United States Patent Application Publication US 2006/0003322 A1 - sequence listing, part 20

SEQ ID NO: 833019 - RNA, 20 nt, Human
ccaggcacccagcugcuuac

SEQ ID NO: 833020 - RNA, 23 nt, Human
cccaacuccacuggguuccaaaa

SEQ ID NO: 833021 - RNA, 19 nt, Human
ccccaggccccaggugccu

SEQ ID NO: 833022 - RNA, 21 nt, Human
ccccaggccccaggugccuuu

SEQ ID NO: 833023 - RNA, 23 nt, Human
cccgccacacccccucccaagaa

SEQ ID NO: 833024 - RNA, 22 nt, Human
ccgagcaagauaccaggccugc

SEQ ID NO: 833025 - RNA, 21 nt, Human
ccggccgguaagacccuucuc

SEQ ID NO: 833026 - RNA, 22 nt, Human
ccuaaguacaaagaaaaucauu

SEQ ID NO: 833027 - RNA, 19 nt, Human
ccugacaugagucagcucc

SEQ ID NO: 833028 - RNA, 24 nt, Human
ccugcuuggugucacacuuccucc

SEQ ID NO: 833029 - RNA, 22 nt, Human
ccuuagaaaaccuaaguacaaa

SEQ ID NO: 833030 - RNA, 23 nt, Human
ccuucucucggccaggggcuggg

SEQ ID NO: 833031 - RNA, 22 nt, Human
cggaauggcuaagacguaagca

SEQ ID NO: 833032 - RNA, 19 nt, Human
cggcacggagcccgggcgg

SEQ ID NO: 833033 - RNA, 21 nt, Human
cuuuuccaagaaguucaacaa

SEQ ID NO: 833034 - RNA, 25 nt, Human
gaaaccacuuaaagccucagggucc

SEQ ID NO: 833035 - RNA, 18 nt, Human
gacuggaggcagagaagg

SEQ ID NO: 833036 - RNA, 20 nt, Human
gagaagcacacaauuggcuu

SEQ ID NO: 833037 - RNA, 21 nt, Human
gagaggcagcaagagcuauag

SEQ ID NO: 833038 - RNA, 21 nt, Human
gagcaccaacaagacaaaaaa

SEQ ID NO: 833039 - RNA, 21 nt, Human
gcaaagcuuccauuaguaaaa

SEQ ID NO: 833040 - RNA, 21 nt, Human
gccucaguuuuguaaaauagg

SEQ ID NO: 833041 - RNA, 19 nt, Human
gcuuaggauuuuauggaug

SEQ ID NO: 833042 - RNA, 22 nt, Human
ggacuggaggcagagaaggugg

SEQ ID NO: 833043 - RNA, 21 nt, Human
gucuggggcauauugguggga

SEQ ID NO: 833044 - RNA, 24 nt, Human
uaaaaacagaagucagaagugacc

SEQ ID NO: 833045 - RNA, 24 nt, Human
uaaaauaucguauaaaauuacccu

SEQ ID NO: 833046 - RNA, 21 nt, Human
uaacagugauacaacuuuggc

SEQ ID NO: 833047 - RNA, 22 nt, Human
uaauaauaguugcccuucuccc

SEQ ID NO: 833048 - RNA, 24 nt, Human
uaauauguccauuaccacauucua

SEQ ID NO: 833049 - RNA, 26 nt, Human
uacacacaaaucuggacuuggugcca

SEQ ID NO: 833050 - RNA, 25 nt, Human
uacaccauccaaacagaaggugagc

SEQ ID NO: 833051 - RNA, 22 nt, Human
uaccaggccugccauccugaca

SEQ ID NO: 833052 - RNA, 22 nt, Human
uacucugcuugcuauucugcua

SEQ ID NO: 833053 - RNA, 24 nt, Human
uaguaaaaacagaagucagaagug

SEQ ID NO: 833054 - RNA, 19 nt, Human
uauauaaaaaaaaaagucc

SEQ ID NO: 833055 - RNA, 24 nt, Human
ucaauuaaaaaaugaacagaaaaa

SEQ ID NO: 833056 - RNA, 19 nt, Human
ucacugaggcucaaagcag

SEQ ID NO: 833057 - RNA, 18 nt, Human
ucaggcuauguggauaag

SEQ ID NO: 833058 - RNA, 26 nt, Human
uccaaaauccgaaaugcuccaaaauc

SEQ ID NO: 833059 - RNA, 20 nt, Human
uccaagaaguucaacaagaa

SEQ ID NO: 833060 - RNA, 22 nt, Human
uccaagaaguucaacaagaaaa

SEQ ID NO: 833061 - RNA, 18 nt, Human
ucccggccgguaagaccc

SEQ ID NO: 833062 - RNA, 28 nt, Human
uccugagccgccgggaggcaaggacucc

SEQ ID NO: 833063 - RNA, 18 nt, Human
ucuaucucucuaaacaga

SEQ ID NO: 833064 - RNA, 19 nt, Human
ucucggccaggggcugggg

SEQ ID NO: 833065 - RNA, 18 nt, Human
ugaccaggauguacagcc

SEQ ID NO: 833066 - RNA, 20 nt, Human
ugagaaaccaauccagugug

SEQ ID NO: 833067 - RNA, 26 nt, Human
ugagaaaccaauccagugugcacgag

SEQ ID NO: 833068 - RNA, 21 nt, Human
ugagaacauaucuugaaauaa

SEQ ID NO: 833069 - RNA, 22 nt, Human
ugagaaccccaacagcuagggc

SEQ ID NO: 833070 - RNA, 18 nt, Human
ugagaagaauccuuccau

SEQ ID NO: 833071 - RNA, 26 nt, Human
ugagcuggggagcaggacggaauggc

SEQ ID NO: 833072 - RNA, 21 nt, Human
ugcacgagaggccccaggcac

SEQ ID NO: 833073 - RNA, 20 nt, Human
ugcauacacaaaucuuuuga

SEQ ID NO: 833074 - RNA, 22 nt, Human
ugccccgccacacccccuccca

SEQ ID NO: 833075 - RNA, 31 nt, Human
ugccccgccacacccccucccaagaaacagg

SEQ ID NO: 833076 - RNA, 24 nt, Human
ugccuuuccccaugcauauacaca

SEQ ID NO: 833077 - RNA, 21 nt, Human
uggcacgauacagauuaaaac

SEQ ID NO: 833078 - RNA, 23 nt, Human
uggcggcacggagcccgggcggu

SEQ ID NO: 833079 - RNA, 18 nt, Human
uggcugaaccucacuaag

SEQ ID NO: 833080 - RNA, 19 nt, Human
uggcugcaaaagucuucau

SEQ ID NO: 833081 - RNA, 20 nt, Human
uggcuugagaacauaucuug

SEQ ID NO: 833082 - RNA, 19 nt, Human
uggggcauauuggugggaa

SEQ ID NO: 833083 - RNA, 21 nt, Human
uguauuacauaugucauaacu

SEQ ID NO: 833084 - RNA, 24 nt, Human
ugugcuucagagagugagcugggg

SEQ ID NO: 833085 - RNA, 19 nt, Human
uguguacacagauguguau

SEQ ID NO: 833086 - RNA, 27 nt, Human
uguguacacagauguguauuacauaug

SEQ ID NO: 833087 - RNA, 24 nt, Human
uuaaaacaauguccuuagaaaacc

SEQ ID NO: 833088 - RNA, 19 nt, Human
uuagagcuauucaagagag

SEQ ID NO: 833089 - RNA, 22 nt, Human
uuaguaaaaacagaagucagaa

SEQ ID NO: 833090 - RNA, 19 nt, Human
uucagagauagacuuugcc

SEQ ID NO: 833091 - RNA, 24 nt, Human
uugcugccuugcuggcaagacuug

SEQ ID NO: 833092 - RNA, 20 nt, Human
acaacuagaagccacaggac

SEQ ID NO: 833093 - RNA, 18 nt, Human
accaaugcuugaaauauu

SEQ ID NO: 833094 - RNA, 21 nt, Human
agugaacugcucucugguggu

SEQ ID NO: 833095 - RNA, 24 nt, Human
auuuacaaguccauuaauucacaa

SEQ ID NO: 833096 - RNA, 25 nt, Human
caaaauaauagguacagaauggaua

SEQ ID NO: 833097 - RNA, 22 nt, Human
caggcacacaacuagaagccac

SEQ ID NO: 833098 - RNA, 18 nt, Human
cagugguccuaagagguc

SEQ ID NO: 833099 - RNA, 19 nt, Human
cauaaauaagacccuauca

SEQ ID NO: 833100 - RNA, 24 nt, Human
cugaucucaggcacacaacuagaa

SEQ ID NO: 833101 - RNA, 23 nt, Human
cuugaaguuuauaaaaugguuug

SEQ ID NO: 833102 - RNA, 18 nt, Human
cuuggcuugauaacccag

SEQ ID NO: 833103 - RNA, 26 nt, Human
cuuuaaauagcuuggcuugauaaccc

SEQ ID NO: 833104 - RNA, 19 nt, Human
gaacugaaaagcaugagca

SEQ ID NO: 833105 - RNA, 21 nt, Human
uaaaagacugauugcauuguu

SEQ ID NO: 833106 - RNA, 19 nt, Human
uaacaugagucucuggauc

SEQ ID NO: 833107 - RNA, 22 nt, Human
uaagacccuaucagaaguucac

SEQ ID NO: 833108 - RNA, 21 nt, Human
uaagaggucuuccuuccaucc

SEQ ID NO: 833109 - RNA, 24 nt, Human
uaaguacaauauuauaccugcaaa

SEQ ID NO: 833110 - RNA, 18 nt, Human
uagcuuggcuugauaacc

SEQ ID NO: 833111 - RNA, 24 nt, Human
uauaaaauugagcaagaaucuuga

SEQ ID NO: 833112 - RNA, 23 nt, Human
uaucuggaacaauuauacugaga

SEQ ID NO: 833113 - RNA, 20 nt, Human
ucauuccaagcugauuuaau

SEQ ID NO: 833114 - RNA, 20 nt, Human
uccaucauaguuuuaucugg

SEQ ID NO: 833115 - RNA, 24 nt, Human
uccuaagaggucuuccuuccaucc

SEQ ID NO: 833116 - RNA, 22 nt, Human
ugagaacaaaauaauagguaca

SEQ ID NO: 833117 - RNA, 22 nt, Human
ugcauuguuucauuuacaaguc

SEQ ID NO: 833118 - RNA, 23 nt, Human
ugcauuguuucauuuacaagucc

SEQ ID NO: 833119 - RNA, 21 nt, Human
uguaccacuuguauccaaaaa

SEQ ID NO: 833120 - RNA, 23 nt, Human
uucucggaauaaauaaaucucug

SEQ ID NO: 833121 - RNA, 18 nt, Human
uuuguucuuuucauaaag

SEQ ID NO: 833122 - RNA, 24 nt, Human
uuuuuuauuuucuuuauuuuugau

SEQ ID NO: 833123 - RNA, 19 nt, Human
aaaaucacaaaacccacua

SEQ ID NO: 833124 - RNA, 22 nt, Human
acacgcggucucgugccgaauu

SEQ ID NO: 833125 - RNA, 22 nt, Human
agaauaacuuaaauauuaaaac

SEQ ID NO: 833126 - RNA, 24 nt, Human
agagaccuaaaauccaguauagga

SEQ ID NO: 833127 - RNA, 21 nt, Human
caagauagaauaacuuaaaua

SEQ ID NO: 833128 - RNA, 22 nt, Human
cagcaguucuucagagaccuaa

SEQ ID NO: 833129 - RNA, 23 nt, Human
cauacaaacucaucucccuauga

SEQ ID NO: 833130 - RNA, 19 nt, Human
ccuaugaccuacugaaacu

SEQ ID NO: 833131 - RNA, 20 nt, Human
ccuucgucuccgcggccucg

SEQ ID NO: 833132 - RNA, 22 nt, Human
gcgcagguuugguuccacacgg

SEQ ID NO: 833133 - RNA, 23 nt, Human
uaaagacauuuuucccugaaaca

SEQ ID NO: 833134 - RNA, 23 nt, Human
uacagcauacaaacucaucuccc

SEQ ID NO: 833135 - RNA, 25 nt, Human
uaguacagcauacaaacucaucucc

SEQ ID NO: 833136 - RNA, 21 nt, Human
uauaggaauaacuguguuagu

SEQ ID NO: 833137 - RNA, 21 nt, Human
uccaagauagaauaacuuaaa

SEQ ID NO: 833138 - RNA, 18 nt, Human
ucccugaaacauacagaa

SEQ ID NO: 833139 - RNA, 19 nt, Human
uguaacagacagcaauauu

SEQ ID NO: 833140 - RNA, 19 nt, Human
uuccacacgggcccacugg

SEQ ID NO: 833141 - RNA, 20 nt, Human
aaaacuuuuucacccagagg

SEQ ID NO: 833142 - RNA, 23 nt, Human
cagacgaggcccgggaagggcag

SEQ ID NO: 833143 - RNA, 21 nt, Human
cagcccccgcccgaggccucg

SEQ ID NO: 833144 - RNA, 19 nt, Human
ccagcccacuacaaaaagg

SEQ ID NO: 833145 - RNA, 21 nt, Human
ccagccccuggcggggcccug

SEQ ID NO: 833146 - RNA, 25 nt, Human
ccagccccuggcggggcccugugau

SEQ ID NO: 833147 - RNA, 18 nt, Human
cccacuacaaaaagggau

SEQ ID NO: 833148 - RNA, 24 nt, Human
cccacuacaaaaagggaugggagc

SEQ ID NO: 833149 - RNA, 24 nt, Human
cccacuggagaccuggaaccccgg

SEQ ID NO: 833150 - RNA, 18 nt, Human
cccagccccuggcggggc

SEQ ID NO: 833151 - RNA, 19 nt, Human
cccgaggcccagagcagcu

SEQ ID NO: 833152 - RNA, 24 nt, Human
cccgggccagcccccgcccgaggc

SEQ ID NO: 833153 - RNA, 20 nt, Human
cccugugcaccggccucucc

SEQ ID NO: 833154 - RNA, 19 nt, Human
ccgccggccccgcucgcuc

SEQ ID NO: 833155 - RNA, 20 nt, Human
ccucuccgguuggggcaggg

SEQ ID NO: 833156 - RNA, 21 nt, Human
ccucuccgguuggggcaggga

SEQ ID NO: 833157 - RNA, 18 nt, Human
ccuggaaccccgggccag

SEQ ID NO: 833158 - RNA, 24 nt, Human
gaccuggaaccccgggccagcccc

SEQ ID NO: 833159 - RNA, 22 nt, Human
gagaccuggaaccccgggccag

SEQ ID NO: 833160 - RNA, 20 nt, Human
gagcaauaaaaacugugcaa

SEQ ID NO: 833161 - RNA, 18 nt, Human
gcaccggccucuccgguu

SEQ ID NO: 833162 - RNA, 18 nt, Human
gcgcccgccgccggcccc

SEQ ID NO: 833163 - RNA, 22 nt, Human
gggaagggcagcccaggggacu

SEQ ID NO: 833164 - RNA, 22 nt, Human
gggcagcccaggggacuggggu

SEQ ID NO: 833165 - RNA, 24 nt, Human
gggcagcccaggggacuggggucu

SEQ ID NO: 833166 - RNA, 24 nt, Human
gggccagcccccgcccgaggccuc

SEQ ID NO: 833167 - RNA, 23 nt, Human
gggucucuccucucccgaggccc

SEQ ID NO: 833168 - RNA, 20 nt, Human
ucccgaggcccagagcagcu

SEQ ID NO: 833169 - RNA, 21 nt, Human
ucccgaggcccagagcagcug

SEQ ID NO: 833170 - RNA, 21 nt, Human
ucggcgucccucggcgcccgc

SEQ ID NO: 833171 - RNA, 21 nt, Human
ucugcagcccccacuggagac

SEQ ID NO: 833172 - RNA, 20 nt, Human
ugaccaaaggacccagacag

SEQ ID NO: 833173 - RNA, 24 nt, Human
ugcccccagccccuggcggggccc

SEQ ID NO: 833174 - RNA, 20 nt, Human
uggaaccccgggccagcccc

SEQ ID NO: 833175 - RNA, 21 nt, Human
uggaaccccgggccagccccc

SEQ ID NO: 833176 - RNA, 19 nt, Human
uggaagccgggaugccccc

SEQ ID NO: 833177 - RNA, 22 nt, Human
uggagaccuggaaccccgggcc

SEQ ID NO: 833178 - RNA, 19 nt, Human
uuaaaacccagcccacuac

SEQ ID NO: 833179 - RNA, 18 nt, Human
aaacagauacacagcuau

SEQ ID NO: 833180 - RNA, 19 nt, Human
aaacagauacacagcuauu

SEQ ID NO: 833181 - RNA, 25 nt, Human
aaaccuacaagugacacagacccaa

SEQ ID NO: 833182 - RNA, 19 nt, Human
aagaaaaggaaagugagaa

SEQ ID NO: 833183 - RNA, 22 nt, Human
aagaugccuuucaccuacaccc

SEQ ID NO: 833184 - RNA, 23 nt, Human
acagacccaagguggcaguucca

SEQ ID NO: 833185 - RNA, 22 nt, Human
acagugagggcugacaguggaa

SEQ ID NO: 833186 - RNA, 22 nt, Human
agaaagaugccuuucaccuaca

SEQ ID NO: 833187 - RNA, 20 nt, Human
agacaagaaaaggaaaguga

SEQ ID NO: 833188 - RNA, 23 nt, Human
agacaagaaaaggaaagugagaa

SEQ ID NO: 833189 - RNA, 22 nt, Human
agaccuagcacagcgaucuugc

SEQ ID NO: 833190 - RNA, 21 nt, Human
agcagaccuaguagaggccug

SEQ ID NO: 833191 - RNA, 21 nt, Human
agcaucuagcuagugcccagu

SEQ ID NO: 833192 - RNA, 18 nt, Human
agccauucacagcuaaag

SEQ ID NO: 833193 - RNA, 21 nt, Human
agcugaagcaaccuaaagcau

SEQ ID NO: 833194 - RNA, 20 nt, Human
agcugaagcaaccuaaagcc

SEQ ID NO: 833195 - RNA, 23 nt, Human
aggaaagugagaagagauaaggc

SEQ ID NO: 833196 - RNA, 25 nt, Human
aggcagcaggacugguucaggagca

SEQ ID NO: 833197 - RNA, 21 nt, Human
aggccuggccuucuagaccug

SEQ ID NO: 833198 - RNA, 22 nt, Human
agggauggggugggcagggucu

SEQ ID NO: 833199 - RNA, 19 nt, Human
aggucaguggagagucuuc

SEQ ID NO: 833200 - RNA, 21 nt, Human
agguggcaguuccacagugcc

SEQ ID NO: 833201 - RNA, 18 nt, Human
aucuagcuagugcccagu

SEQ ID NO: 833202 - RNA, 22 nt, Human
caaaaugggcuguggcugccag

SEQ ID NO: 833203 - RNA, 18 nt, Human
caacucaaauaguguggc

SEQ ID NO: 833204 - RNA, 20 nt, Human
caagugacacagacccaagg

SEQ ID NO: 833205 - RNA, 22 nt, Human
caagugacacagacccaaggug

SEQ ID NO: 833206 - RNA, 24 nt, Human
cacagacccaagguggcaguucca

SEQ ID NO: 833207 - RNA, 23 nt, Human
cacaggccuuuugcagcuugcca

SEQ ID NO: 833208 - RNA, 25 nt, Human
cacccucaccucaaagauggugaaa

SEQ ID NO: 833209 - RNA, 21 nt, Human
cacccugggcuccacucugcc

SEQ ID NO: 833210 - RNA, 18 nt, Human
caccucacagaguugaag

SEQ ID NO: 833211 - RNA, 19 nt, Human
cacuccacuucucugccug

SEQ ID NO: 833212 - RNA, 20 nt, Human
cacuccacuucucugccugc

SEQ ID NO: 833213 - RNA, 19 nt, Human
cacucugccccagcacccc

SEQ ID NO: 833214 - RNA, 23 nt, Human
cagaaaccugagcuccauguacu

SEQ ID NO: 833215 - RNA, 22 nt, Human
cagaauagggacauccacagca

SEQ ID NO: 833216 - RNA, 22 nt, Human
cagaggccugaauccuggcccu

SEQ ID NO: 833217 - RNA, 22 nt, Human
cagcacccugggcuccacucug

SEQ ID NO: 833218 - RNA, 21 nt, Human
cagcagcaggugggugugagg

SEQ ID NO: 833219 - RNA, 18 nt, Human
cagcaggcacaggggggu

SEQ ID NO: 833220 - RNA, 20 nt, Human
cagcaggcugucgaugucgg

SEQ ID NO: 833221 - RNA, 19 nt, Human
cagccccuccccacgcucc

SEQ ID NO: 833222 - RNA, 19 nt, Human
cagcugcugucugucccac

SEQ ID NO: 833223 - RNA, 26 nt, Human
cagcugcugucugucccacuccuccu

SEQ ID NO: 833224 - RNA, 19 nt, Human
caggaaagggcgcggggug

SEQ ID NO: 833225 - RNA, 20 nt, Human
caggagccagugugugucug

SEQ ID NO: 833226 - RNA, 23 nt, Human
caggcacaggggggugcaguggg

SEQ ID NO: 833227 - RNA, 21 nt, Human
cauacagcagcaggugggugu

SEQ ID NO: 833228 - RNA, 20 nt, Human
cauggaaugagcaucccuga

SEQ ID NO: 833229 - RNA, 25 nt, Human
ccacccucaccucaaagauggugaa

SEQ ID NO: 833230 - RNA, 24 nt, Human
ccacuccuccugucuggagccuac

SEQ ID NO: 833231 - RNA, 22 nt, Human
ccagcaccccugagaacaacuc

SEQ ID NO: 833232 - RNA, 21 nt, Human
ccaggccuggacgcucccaug

SEQ ID NO: 833233 - RNA, 21 nt, Human
ccagggauggggugggcaggg

SEQ ID NO: 833234 - RNA, 21 nt, Human
ccagugcccagcaggcacagg

SEQ ID NO: 833235 - RNA, 20 nt, Human
cccagcaggcugucgauguc

SEQ ID NO: 833236 - RNA, 28 nt, Human
cccaggguuaggaucaggaccggggucc

SEQ ID NO: 833237 - RNA, 20 nt, Human
cccugggaucugagggcuuu

SEQ ID NO: 833238 - RNA, 21 nt, Human
cccugggcuccacucugcccc

SEQ ID NO: 833239 - RNA, 24 nt, Human
cccugggcuccacucugccccagc

SEQ ID NO: 833240 - RNA, 24 nt, Human
ccggcgauauuuggcuacucuaga

SEQ ID NO: 833241 - RNA, 21 nt, Human
ccucagaggccugaauccugg

SEQ ID NO: 833242 - RNA, 18 nt, Human
ccugccgccuuccugggc

SEQ ID NO: 833243 - RNA, 19 nt, Human
ccugcuggucgaacacuuc

SEQ ID NO: 833244 - RNA, 25 nt, Human
ccugcuguugaggcaaccuggaggc

SEQ ID NO: 833245 - RNA, 19 nt, Human
ccuggagggcaguggggcu

SEQ ID NO: 833246 - RNA, 25 nt, Human
ccuggaucacaggccuuuugcagcc

SEQ ID NO: 833247 - RNA, 21 nt, Human
ccugggaucugagggcuuuac

SEQ ID NO: 833248 - RNA, 18 nt, Human
cgaugucggggucuucac

SEQ ID NO: 833249 - RNA, 23 nt, Human
cuaaagcaucuagcuagugccca

SEQ ID NO: 833250 - RNA, 21 nt, Human
cucagccccuccccacgcucc

SEQ ID NO: 833251 - RNA, 23 nt, Human
cuccacuucucugccugccgccu

SEQ ID NO: 833252 - RNA, 22 nt, Human
cuccaggcagcaggacugguuc

SEQ ID NO: 833253 - RNA, 18 nt, Human
cucccaucaggcacugug

SEQ ID NO: 833254 - RNA, 23 nt, Human
cuccugucuggagccuacuccca

SEQ ID NO: 833255 - RNA, 20 nt, Human
cugcugucugucccacuccu

SEQ ID NO: 833256 - RNA, 21 nt, Human
cuggcccagcagcuuugcccc

SEQ ID NO: 833257 - RNA, 21 nt, Human
cuggcuacugacuccaggcag

SEQ ID NO: 833258 - RNA, 21 nt, Human
cugugccuccugcuguugagg

SEQ ID NO: 833259 - RNA, 18 nt, Human
cuuccuagcuggggcacc

SEQ ID NO: 833260 - RNA, 20 nt, Human
gacaggcaaguggguggagg

SEQ ID NO: 833261 - RNA, 18 nt, Human
gagggaauggagaagagu

SEQ ID NO: 833262 - RNA, 22 nt, Human
gcaaccuggaggcagagaaacc

SEQ ID NO: 833263 - RNA, 21 nt, Human
gcaggucagccagggaugggg

SEQ ID NO: 833264 - RNA, 19 nt, Human
gccaagggguggcagcacc

SEQ ID NO: 833265 - RNA, 20 nt, Human
gcccagcagcuuugccccgu

SEQ ID NO: 833266 - RNA, 23 nt, Human
gccccagcaccccugagaacaac

SEQ ID NO: 833267 - RNA, 19 nt, Human
gcccuagggcacacagaua

SEQ ID NO: 833268 - RNA, 21 nt, Human
gcccugagcccaugguuaggc

SEQ ID NO: 833269 - RNA, 19 nt, Human
gcccuggagggcagugggg

SEQ ID NO: 833270 - RNA, 24 nt, Human
gccuuuugcagcuugccagcuaca

SEQ ID NO: 833271 - RNA, 20 nt, Human
gcgugacccaggccuggacg

SEQ ID NO: 833272 - RNA, 21 nt, Human
gcugacagugagggcugacag

SEQ ID NO: 833273 - RNA, 20 nt, Human
gcuuagaguucagauuuucc

SEQ ID NO: 833274 - RNA, 22 nt, Human
ggagcagaccuaguagaggccu

SEQ ID NO: 833275 - RNA, 25 nt, Human
ggaggcagagaaaccuacaagugac

SEQ ID NO: 833276 - RNA, 19 nt, Human
ggagggcaguggggcuggg

SEQ ID NO: 833277 - RNA, 23 nt, Human
ggagggcaguggggcuggggugg

SEQ ID NO: 833278 - RNA, 21 nt, Human
ggaugugaauuuauuucuugg

SEQ ID NO: 833279 - RNA, 18 nt, Human
ggcagauggugccuggca

SEQ ID NO: 833280 - RNA, 19 nt, Human
ggcauuggcagauggugcc

SEQ ID NO: 833281 - RNA, 18 nt, Human
ggccuuagcuccagcuca

SEQ ID NO: 833282 - RNA, 20 nt, Human
gggagacagggucccagcag

SEQ ID NO: 833283 - RNA, 25 nt, Human
gggcagggucuguguagcccuggga

SEQ ID NO: 833284 - RNA, 21 nt, Human
gggugcuauucuccaaauagu

SEQ ID NO: 833285 - RNA, 19 nt, Human
gugaaacugcugugccucc

SEQ ID NO: 833286 - RNA, 19 nt, Human
gugacaggcaagugggugg

SEQ ID NO: 833287 - RNA, 21 nt, Human
uaaaaggacucuucuugucca

SEQ ID NO: 833288 - RNA, 19 nt, Human
uacacagcuauucauacag

SEQ ID NO: 833289 - RNA, 18 nt, Human
uagaguccuccagggagc

SEQ ID NO: 833290 - RNA, 21 nt, Human
uauugguauccaccucacaga

SEQ ID NO: 833291 - RNA, 25 nt, Human
ucacucacugccggcgauauuuggc

SEQ ID NO: 833292 - RNA, 23 nt, Human
ucagaccuagcacagcgaucuug

SEQ ID NO: 833293 - RNA, 23 nt, Human
ucaggacaacagguggggcacag

SEQ ID NO: 833294 - RNA, 22 nt, Human
uccacagugccaagggguggca

SEQ ID NO: 833295 - RNA, 19 nt, Human
uccacuucucugccugccg

SEQ ID NO: 833296 - RNA, 21 nt, Human
ucccagcacccugggcuccac

SEQ ID NO: 833297 - RNA, 22 nt, Human
ucccugugggacaucuuuccug

SEQ ID NO: 833298 - RNA, 18 nt, Human
uccucagccccuccccac

SEQ ID NO: 833299 - RNA, 23 nt, Human
uccucagccccuccccacgcucc

SEQ ID NO: 833300 - RNA, 18 nt, Human
uccugggccugugacugc

SEQ ID NO: 833301 - RNA, 24 nt, Human
ucuagaccuggacaaccaggucag

SEQ ID NO: 833302 - RNA, 24 nt, Human
ucugacuuuuauuagcugugugau

SEQ ID NO: 833303 - RNA, 18 nt, Human
ucugucuccucuccucug

SEQ ID NO: 833304 - RNA, 19 nt, Human
ugaaggaucagcugaagca

SEQ ID NO: 833305 - RNA, 19 nt, Human
ugacacagacccaaggugg

SEQ ID NO: 833306 - RNA, 22 nt, Human
ugagcuucuagaguccuccagg

SEQ ID NO: 833307 - RNA, 19 nt, Human
ugaggagaaaaccuccugc

SEQ ID NO: 833308 - RNA, 19 nt, Human
ugcauccaggccacugccc

SEQ ID NO: 833309 - RNA, 21 nt, Human
ugccccagcaccccugagaac

SEQ ID NO: 833310 - RNA, 22 nt, Human
ugccccagcaccccugagaaca

SEQ ID NO: 833311 - RNA, 22 nt, Human
ugccccagcaccccugagaaca

SEQ ID NO: 833312 - RNA, 23 nt, Human
ugccccagcaccccugagaacaa

SEQ ID NO: 833313 - RNA, 20 nt, Human
ugccucuccaucuuucugcc

SEQ ID NO: 833314 - RNA, 18 nt, Human
ugccuuucaccuacaccc

SEQ ID NO: 833315 - RNA, 23 nt, Human
ugcugucugucccacuccuccug

SEQ ID NO: 833316 - RNA, 20 nt, Human
uggaaaaacagauacacagc

SEQ ID NO: 833317 - RNA, 21 nt, Human
uggaaugagcaucccugaaca

SEQ ID NO: 833318 - RNA, 18 nt, Human
uggaauuggugagcaggu

SEQ ID NO: 833319 - RNA, 25 nt, Human
uggacagugccaucuucucagugau

SEQ ID NO: 833320 - RNA, 19 nt, Human
uggagggcaguggggcugg

SEQ ID NO: 833321 - RNA, 21 nt, Human
uggagggcaguggggcugggg

SEQ ID NO: 833322 - RNA, 23 nt, Human
uggaugcagcgagugggcugagg

SEQ ID NO: 833323 - RNA, 18 nt, Human
uggcagauggugccuggc

SEQ ID NO: 833324 - RNA, 27 nt, Human
uggcagauggugccuggcagccugguc

SEQ ID NO: 833325 - RNA, 19 nt, Human
uggccaacucaaauagugu

SEQ ID NO: 833326 - RNA, 19 nt, Human
ugggcaggaaagggcgcgg

SEQ ID NO: 833327 - RNA, 19 nt, Human
uggggagggcuggggaaga

SEQ ID NO: 833328 - RNA, 19 nt, Human
uggggcaggaaguggaauu

SEQ ID NO: 833329 - RNA, 19 nt, Human
uggggcugacagugagggc

SEQ ID NO: 833330 - RNA, 21 nt, Human
ugggguauccucagccccucc

SEQ ID NO: 833331 - RNA, 23 nt, Human
ugguauccaccucacagaguuga

SEQ ID NO: 833332 - RNA, 24 nt, Human
uggugagcagguggggagggcugg

SEQ ID NO: 833333 - RNA, 19 nt, Human
ugguuaggcagagucaugg

SEQ ID NO: 833334 - RNA, 21 nt, Human
uguacccugggaucugagggc

SEQ ID NO: 833335 - RNA, 24 nt, Human
ugugaauuuauuucuuggccaacu

SEQ ID NO: 833336 - RNA, 20 nt, Human
ugugucugucuccucuccuc

SEQ ID NO: 833337 - RNA, 18 nt, Human
uucaagagaaugaaauuc

SEQ ID NO: 833338 - RNA, 21 nt, Human
uucagaaagaugccuuucacc

SEQ ID NO: 833339 - RNA, 24 nt, Human
uuccacagugccaagggguggcag

SEQ ID NO: 833340 - RNA, 19 nt, Human
uuccuugagcgugacccag

SEQ ID NO: 833341 - RNA, 23 nt, Human
uugcagcuugccagcuacauggg

SEQ ID NO: 833342 - RNA, 22 nt, Human
uuucccacacagagugccacug

SEQ ID NO: 833343 - RNA, 18 nt, Human
uuuuuuuuuuuuuuccug

SEQ ID NO: 833344 - RNA, 20 nt, Human
aacauagugagacuccaucu

SEQ ID NO: 833345 - RNA, 21 nt, Human
aacauagugagacuccaucuc

SEQ ID NO: 833346 - RNA, 23 nt, Human
aagcagucagugggauggggagc

SEQ ID NO: 833347 - RNA, 19 nt, Human
aagccucuggcugacccag

SEQ ID NO: 833348 - RNA, 26 nt, Human
aaggaacugacccagaaggcaggaag

SEQ ID NO: 833349 - RNA, 18 nt, Human
aagggaggcaggccuggg

SEQ ID NO: 833350 - RNA, 24 nt, Human
acacacacagugaccugcaugcag

SEQ ID NO: 833351 - RNA, 21 nt, Human
acacacagccacaugacacac

SEQ ID NO: 833352 - RNA, 25 nt, Human
acacacagucagucaacacucacac

SEQ ID NO: 833353 - RNA, 19 nt, Human
acacacagugaccugcaug

SEQ ID NO: 833354 - RNA, 24 nt, Human
acacagccacaugacacacacgcc

SEQ ID NO: 833355 - RNA, 33 nt, Human
acacaugcacacacacagugaccugcaugcagu

SEQ ID NO: 833356 - RNA, 23 nt, Human
acacucacacaggcacacaugca

SEQ ID NO: 833357 - RNA, 19 nt, Human
acagcauaauacacaccac

SEQ ID NO: 833358 - RNA, 28 nt, Human
acccagccccagccccggccccguucua

SEQ ID NO: 833359 - RNA, 19 nt, Human
accucucuccuccaaccuc

SEQ ID NO: 833360 - RNA, 23 nt, Human
acugcucuggggucugagaaaau

SEQ ID NO: 833361 - RNA, 22 nt, Human
agaaggagccaggccuagggaa

SEQ ID NO: 833362 - RNA, 19 nt, Human
agacuugaauaaggaacug

SEQ ID NO: 833363 - RNA, 24 nt, Human
agccugagcaacauagugagacuc

SEQ ID NO: 833364 - RNA, 24 nt, Human
aggauugcuugagcccaggaguuc

SEQ ID NO: 833365 - RNA, 18 nt, Human
aggcacagugguguacac

SEQ ID NO: 833366 - RNA, 18 nt, Human
aggcagaggucacacaca

SEQ ID NO: 833367 - RNA, 23 nt, Human
aggcaggaggauugcuugagccc

SEQ ID NO: 833368 - RNA, 24 nt, Human
aggcaggaggauugcuugagccca

SEQ ID NO: 833369 - RNA, 21 nt, Human
aggcugaggcaggaggauugc

SEQ ID NO: 833370 - RNA, 24 nt, Human
aggcugaggcaggaggauugcuug

SEQ ID NO: 833371 - RNA, 21 nt, Human
agucaacacucacacaggcac

SEQ ID NO: 833372 - RNA, 25 nt, Human
augcacacacacagugaccugcaug

SEQ ID NO: 833373 - RNA, 22 nt, Human
augcagcaggcccagaggccaa

SEQ ID NO: 833374 - RNA, 24 nt, Human
auugcuugagcccaggaguucaag

SEQ ID NO: 833375 - RNA, 30 nt, Human
caaaucccguggcacauacaccacaguucu

SEQ ID NO: 833376 - RNA, 25 nt, Human
caacagaaggagccaggccuaggga

SEQ ID NO: 833377 - RNA, 19 nt, Human
caagccucuggcugaccca

SEQ ID NO: 833378 - RNA, 22 nt, Human
cacacacacagucagucaacac

SEQ ID NO: 833379 - RNA, 28 nt, Human
cacacaggcacacaugcacacacacagu

SEQ ID NO: 833380 - RNA, 20 nt, Human
cacacagucagucaacacuc

SEQ ID NO: 833381 - RNA, 18 nt, Human
caccccuccacacacaca

SEQ ID NO: 833382 - RNA, 21 nt, Human
caccccuccacggacagucac

SEQ ID NO: 833383 - RNA, 22 nt, Human
caccucucuccuccaaccucug

SEQ ID NO: 833384 - RNA, 19 nt, Human
cacggacacagucaccccu

SEQ ID NO: 833385 - RNA, 28 nt, Human
cacuaggggacccagccccagccccggc

SEQ ID NO: 833386 - RNA, 24 nt, Human
cagagggcagagggcuucuguaac

SEQ ID NO: 833387 - RNA, 21 nt, Human
cagccacaugacacacacgcc

SEQ ID NO: 833388 - RNA, 23 nt, Human
cagccccagccccggccccguuc

SEQ ID NO: 833389 - RNA, 22 nt, Human
caggcccagaggccaccagagg

SEQ ID NO: 833390 - RNA, 18 nt, Human
cagucagucaacacucac

SEQ ID NO: 833391 - RNA, 28 nt, Human
cagucagucaacacucacacaggcacac

SEQ ID NO: 833392 - RNA, 23 nt, Human
cagugguguacacuuaaaguccc

SEQ ID NO: 833393 - RNA, 24 nt, Human
cauagugagacuccaucucuaaaa

SEQ ID NO: 833394 - RNA, 33 nt, Human
caugcacacacacagugaccugcaugcauggug

SEQ ID NO: 833395 - RNA, 27 nt, Human
cauggcuccgaagugguaggagacagg

SEQ ID NO: 833396 - RNA, 20 nt, Human
ccagccccagccccggcccc

SEQ ID NO: 833397 - RNA, 22 nt, Human
ccagggacuggcugcuucacac

SEQ ID NO: 833398 - RNA, 21 nt, Human
ccccuccacacacacacaguc

SEQ ID NO: 833399 - RNA, 23 nt, Human
cccgcacaccugggucugagcca

SEQ ID NO: 833400 - RNA, 25 nt, Human
cccgcacaccugggucugagccaca

SEQ ID NO: 833401 - RNA, 26 nt, Human
cccuccacacacacacagucagucaa

SEQ ID NO: 833402 - RNA, 21 nt, Human
ccuccacggacagucacccuu

SEQ ID NO: 833403 - RNA, 28 nt, Human
ccucccgaugaacagaaggguuggaggu

SEQ ID NO: 833404 - RNA, 19 nt, Human
ccucucuccuccaaccucu

SEQ ID NO: 833405 - RNA, 23 nt, Human
ccucugcaucauuaauacugcuc

SEQ ID NO: 833406 - RNA, 24 nt, Human
cgccaaacccugacaguguugccc

SEQ ID NO: 833407 - RNA, 21 nt, Human
cuccaccucucuccuccaacc

SEQ ID NO: 833408 - RNA, 22 nt, Human
cuccacggacagucaccccucc

SEQ ID NO: 833409 - RNA, 19 nt, Human
cucccccagagcugcuucc

SEQ ID NO: 833410 - RNA, 19 nt, Human
gaaggagccaggccuaggg

SEQ ID NO: 833411 - RNA, 20 nt, Human
gagcucccccagagcugcuu

SEQ ID NO: 833412 - RNA, 23 nt, Human
gagcucccccagagcugcuuccc

SEQ ID NO: 833413 - RNA, 22 nt, Human
gagcugcuucccacgcuguggc

SEQ ID NO: 833414 - RNA, 24 nt, Human
gauugcuugagcccaggaguucaa

SEQ ID NO: 833415 - RNA, 21 nt, Human
gcaagaaaaaaaaaagaaaaa

SEQ ID NO: 833416 - RNA, 22 nt, Human
gcccaggaguucaaggccagcc

SEQ ID NO: 833417 - RNA, 21 nt, Human
gcuucuguaacaguucaagcc

SEQ ID NO: 833418 - RNA, 23 nt, Human
ggauugcuugagcccaggaguuc

SEQ ID NO: 833419 - RNA, 28 nt, Human
ggcacacaugcacacacacagugaccug

SEQ ID NO: 833420 - RNA, 23 nt, Human
ggcccagaggccaccagagggca

SEQ ID NO: 833421 - RNA, 18 nt, Human
gggacccagccccagccc

SEQ ID NO: 833422 - RNA, 18 nt, Human
gggaggcugaggcaggag

SEQ ID NO: 833423 - RNA, 21 nt, Human
gggaggcugaggcaggaggau

SEQ ID NO: 833424 - RNA, 18 nt, Human
gggcaagaaaaaaaaaag

SEQ ID NO: 833425 - RNA, 22 nt, Human
guaaaggauucaaagcaggcac

SEQ ID NO: 833426 - RNA, 26 nt, Human
uaaaaaauacaacuaauggaaagggc

SEQ ID NO: 833427 - RNA, 21 nt, Human
uaaaggauucaaagcaggcac

SEQ ID NO: 833428 - RNA, 20 nt, Human
uaaaggucaagcagucagug

SEQ ID NO: 833429 - RNA, 19 nt, Human
uaaagucccagcuacuagg

SEQ ID NO: 833430 - RNA, 22 nt, Human
uacaacuaauggaaagggcaag

SEQ ID NO: 833431 - RNA, 23 nt, Human
uacaacuaauggaaagggcaaga

SEQ ID NO: 833432 - RNA, 18 nt, Human
uacuagggaggcugaggc

SEQ ID NO: 833433 - RNA, 19 nt, Human
uacuagggaggcugaggca

SEQ ID NO: 833434 - RNA, 18 nt, Human
uauguacaugcagcaggc

SEQ ID NO: 833435 - RNA, 23 nt, Human
ucaaagcaggcacagugguguac

SEQ ID NO: 833436 - RNA, 21 nt, Human
uccacuaggggacccagcccc

SEQ ID NO: 833437 - RNA, 23 nt, Human
uccacuaggggacccagccccag

SEQ ID NO: 833438 - RNA, 21 nt, Human
ucuuccgcaagaaaugggggu

SEQ ID NO: 833439 - RNA, 20 nt, Human
ugaauaaggaacugacccag

SEQ ID NO: 833440 - RNA, 22 nt, Human
ugaauaaggaacugacccagaa

SEQ ID NO: 833441 - RNA, 23 nt, Human
ugagcccaggaguucaaggccag

SEQ ID NO: 833442 - RNA, 24 nt, Human
ugaggcaggaggauugcuugagcc

SEQ ID NO: 833443 - RNA, 25 nt, Human
ugaggcaggaggauugcuugagccc

SEQ ID NO: 833444 - RNA, 18 nt, Human
ugcaagaagcucccggcg

SEQ ID NO: 833445 - RNA, 22 nt, Human
ugcccccauggcuccgaagugg

SEQ ID NO: 833446 - RNA, 25 nt, Human
uggaaagggcaagaaaaaaaaaaga

SEQ ID NO: 833447 - RNA, 20 nt, Human
ugggagagacucaauuggug

SEQ ID NO: 833448 - RNA, 20 nt, Human
uggggguguuuaaggaggcc

SEQ ID NO: 833449 - RNA, 24 nt, Human
uggugggagagacucaauuggugg

SEQ ID NO: 833450 - RNA, 22 nt, Human
uugagcccaggaguucaaggcc

SEQ ID NO: 833451 - RNA, 24 nt, Human
uugcuugagcccaggaguucaagg

SEQ ID NO: 833452 - RNA, 24 nt, Human
uuuaaggaggcccccaagaugagc

SEQ ID NO: 833453 - RNA, 21 nt, Human
aaaaaaaagagcuuuagccau

SEQ ID NO: 833454 - RNA, 23 nt, Human
aaaaaaucuaaaagaagcaaaga

SEQ ID NO: 833455 - RNA, 23 nt, Human
aaaaauaaaaagacagcaaugac

SEQ ID NO: 833456 - RNA, 19 nt, Human
aaaaauggccauaauguac

SEQ ID NO: 833457 - RNA, 24 nt, Human
aaacacaaaaaaucuaaaagaagc

SEQ ID NO: 833458 - RNA, 19 nt, Human
aaagagcuuuagccauuuc

SEQ ID NO: 833459 - RNA, 20 nt, Human
aaaucacgggcccguaagaa

SEQ ID NO: 833460 - RNA, 28 nt, Human
aaaucgccucaugaccaugucugugagc

SEQ ID NO: 833461 - RNA, 23 nt, Human
aagaagcaaagaaggaaaagaag

SEQ ID NO: 833462 - RNA, 24 nt, Human
aagaagcaaagaaggaaaagaagc

SEQ ID NO: 833463 - RNA, 19 nt, Human
aagaaggaaaagaagcggg

SEQ ID NO: 833464 - RNA, 21 nt, Human
aagaaggagauagucacagga

SEQ ID NO: 833465 - RNA, 25 nt, Human
acaaaaaaucuaaaagaagcaaaga

SEQ ID NO: 833466 - RNA, 18 nt, Human
accacaaaaggcaacaaa

SEQ ID NO: 833467 - RNA, 22 nt, Human
agaaauccuccacacugaaaaa

SEQ ID NO: 833468 - RNA, 20 nt, Human
agaagcgggcagugagccug

SEQ ID NO: 833469 - RNA, 21 nt, Human
agacacaaacacaaaaaaucu

SEQ ID NO: 833470 - RNA, 21 nt, Human
agacuucagcauauaccaaau

SEQ ID NO: 833471 - RNA, 19 nt, Human
agcaaagaaggaaaagaag

SEQ ID NO: 833472 - RNA, 22 nt, Human
agcaccgaagcuacaccugcag

SEQ ID NO: 833473 - RNA, 20 nt, Human
agcagugugcugccuucucc

SEQ ID NO: 833474 - RNA, 18 nt, Human
agcauuuuuagggauaag

SEQ ID NO: 833475 - RNA, 22 nt, Human
aggcaacaaagggccccucuaa

SEQ ID NO: 833476 - RNA, 26 nt, Human
aguuacuaacgauuguggaaaaaaaa

SEQ ID NO: 833477 - RNA, 20 nt, Human
auuaugcucucugauucuca

SEQ ID NO: 833478 - RNA, 18 nt, Human
caaagaaggaaaagaagc

SEQ ID NO: 833479 - RNA, 23 nt, Human
caaauuuaaaucgccucaugacc

SEQ ID NO: 833480 - RNA, 24 nt, Human
caacaaagggccccucuaaggcuu

SEQ ID NO: 833481 - RNA, 21 nt, Human
caagggcccaaaccagccaag

SEQ ID NO: 833482 - RNA, 22 nt, Human
cacaaaaaaucuaaaagaagca

SEQ ID NO: 833483 - RNA, 24 nt, Human
cacucuugcuuaguauauuaagag

SEQ ID NO: 833484 - RNA, 21 nt, Human
cacugguggagcagcaugagu

SEQ ID NO: 833485 - RNA, 22 nt, Human
cagcaugaguuuuuauacaguu

SEQ ID NO: 833486 - RNA, 22 nt, Human
cagcuacaagggcccaaaccag

SEQ ID NO: 833487 - RNA, 21 nt, Human
caggagagcaccgaagcuaca

SEQ ID NO: 833488 - RNA, 20 nt, Human
cagggaaucuaaagagcugu

SEQ ID NO: 833489 - RNA, 26 nt, Human
cauauaccaaauuuuaaauuuaaauc

SEQ ID NO: 833490 - RNA, 24 nt, Human
ccauuucuuacuaaaaacaaaaca

SEQ ID NO: 833491 - RNA, 24 nt, Human
cccacaaucaguagaucacaaaga

SEQ ID NO: 833492 - RNA, 22 nt, Human
ccccugaacaggagagcaccga

SEQ ID NO: 833493 - RNA, 23 nt, Human
ccucaugaccaugucugugagcc

SEQ ID NO: 833494 - RNA, 25 nt, Human
ccucuaugaaauaaauuaauuaccc

SEQ ID NO: 833495 - RNA, 18 nt, Human
cgccaugaaagugaagaa

SEQ ID NO: 833496 - RNA, 22 nt, Human
cgucgccaugaaagugaagaag

SEQ ID NO: 833497 - RNA, 22 nt, Human
cuccuuuaagcaaaccuugcca

SEQ ID NO: 833498 - RNA, 18 nt, Human
cugugagccagggucaag

SEQ ID NO: 833499 - RNA, 20 nt, Human
gagauagucacaggagacac

SEQ ID NO: 833500 - RNA, 18 nt, Human
gcuugagauuaaaacuag

SEQ ID NO: 833501 - RNA, 23 nt, Human
gucaaggguuccacuugggccac

SEQ ID NO: 833502 - RNA, 19 nt, Human
gugcugccuucucccuggc

SEQ ID NO: 833503 - RNA, 21 nt, Human
uaaaagaagcaaagaaggaaa

SEQ ID NO: 833504 - RNA, 24 nt, Human
uaacaaauaacaugguauuugaaa

SEQ ID NO: 833505 - RNA, 19 nt, Human
uaacagggaaucuaaagag

SEQ ID NO: 833506 - RNA, 20 nt, Human
uaaggcaucuggguggccuc

SEQ ID NO: 833507 - RNA, 25 nt, Human
uacauacacagauuaucugagaaaa

SEQ ID NO: 833508 - RNA, 21 nt, Human
uagaugaucauacuuuuccug

SEQ ID NO: 833509 - RNA, 21 nt, Human
uaggaacgcaaggagccacca

SEQ ID NO: 833510 - RNA, 23 nt, Human
uaggaacgcaaggagccaccacg

SEQ ID NO: 833511 - RNA, 21 nt, Human
uagucacaggagacacaaaca

SEQ ID NO: 833512 - RNA, 25 nt, Human
uaguuguuuuagggcuuuuuauugg

SEQ ID NO: 833513 - RNA, 19 nt, Human
ucaaggguuccacuugggc

SEQ ID NO: 833514 - RNA, 20 nt, Human
ucaucggugaugguaacaaa

SEQ ID NO: 833515 - RNA, 22 nt, Human
ucucccuggccaccuucuguca

SEQ ID NO: 833516 - RNA, 21 nt, Human
ucucugauucucagaugagag

SEQ ID NO: 833517 - RNA, 20 nt, Human
ugaaaaaaaacuaguaguuu

SEQ ID NO: 833518 - RNA, 21 nt, Human
ugaaaaaaaacuaguaguuuu

SEQ ID NO: 833519 - RNA, 19 nt, Human
ugacaagauaaauauagug

SEQ ID NO: 833520 - RNA, 27 nt, Human
ugagaaaaggucaaggguuccacuugg

SEQ ID NO: 833521 - RNA, 24 nt, Human
ugagaggauguaggaacgcaagga

SEQ ID NO: 833522 - RNA, 22 nt, Human
ugagucacuuaacagggaaucu

SEQ ID NO: 833523 - RNA, 19 nt, Human
ugauuuuucuguuuuccuc

SEQ ID NO: 833524 - RNA, 20 nt, Human
ugcucucugauucucagaug

SEQ ID NO: 833525 - RNA, 22 nt, Human
uggcagacuucagcauauacca

SEQ ID NO: 833526 - RNA, 18 nt, Human
uguaaauuaaaaauggcc

SEQ ID NO: 833527 - RNA, 24 nt, Human
uguguacacacacucuucauugug

SEQ ID NO: 833528 - RNA, 19 nt, Human
uguguacauacacagauua

SEQ ID NO: 833529 - RNA, 25 nt, Human
uguuucaacuucuuagccuauuugu

SEQ ID NO: 833530 - RNA, 24 nt, Human
uuaaaaaucuuugucuuguacuau

SEQ ID NO: 833531 - RNA, 24 nt, Human
uuaaaaauggccauaauguacccu

SEQ ID NO: 833532 - RNA, 22 nt, Human
uucugucagcuacaagggccca

SEQ ID NO: 833533 - RNA, 19 nt, Human
uuuagcuguaaauuaaaaa

SEQ ID NO: 833534 - RNA, 24 nt, Human
uuuccaaggcccacugguggagca

SEQ ID NO: 833535 - RNA, 21 nt, Human
agaaacgcaaggaggcgcggc

SEQ ID NO: 833536 - RNA, 20 nt, Human
aggcccuauuuggggaacag

SEQ ID NO: 833537 - RNA, 23 nt, Human
caccgcuccggcggcgggcgaca

SEQ ID NO: 833538 - RNA, 20 nt, Human
cacgcaggggccugggcggc

SEQ ID NO: 833539 - RNA, 24 nt, Human
cacgcggcuagcccuccuucuuuc

SEQ ID NO: 833540 - RNA, 20 nt, Human
cagccccaggcaggccgggc

SEQ ID NO: 833541 - RNA, 20 nt, Human
cagggcaggggccagggacc

SEQ ID NO: 833542 - RNA, 23 nt, Human
ccagccggacuccuucgcaccca

SEQ ID NO: 833543 - RNA, 21 nt, Human
cgacagggcaggggccaggga

SEQ ID NO: 833544 - RNA, 29 nt, Human
cucaauuaaaaaaaaaaaaaacuaaauaa

SEQ ID NO: 833545 - RNA, 19 nt, Human
cucccagccccaggcaggc

SEQ ID NO: 833546 - RNA, 23 nt, Human
cucucaauuaaaaaaaaaaaaaa

SEQ ID NO: 833547 - RNA, 19 nt, Human
gacagcgguggcagcagaa

SEQ ID NO: 833548 - RNA, 21 nt, Human
gacagggcaggggccagggac

SEQ ID NO: 833549 - RNA, 19 nt, Human
gcgcggcgcgaacgcacgc

SEQ ID NO: 833550 - RNA, 19 nt, Human
gcuucaguuaucaccgaga

SEQ ID NO: 833551 - RNA, 20 nt, Human
ggacuccuucgcacccacuu

SEQ ID NO: 833552 - RNA, 23 nt, Human
ggcgacagggcaggggccaggga

SEQ ID NO: 833553 - RNA, 22 nt, Human
gggcaggggccagggaccggga

SEQ ID NO: 833554 - RNA, 22 nt, Human
gggccagggaccgggacgggga

SEQ ID NO: 833555 - RNA, 19 nt, Human
ggggccugggcggcgggag

SEQ ID NO: 833556 - RNA, 22 nt, Human
ggugucggugucuggggcuccc

SEQ ID NO: 833557 - RNA, 21 nt, Human
gugccgacagcgguggcagca

SEQ ID NO: 833558 - RNA, 19 nt, Human
guggcagcagaagaacggc

SEQ ID NO: 833559 - RNA, 22 nt, Human
guuagguuccuuccacaccggg

SEQ ID NO: 833560 - RNA, 20 nt, Human
uaugaccuuagcuccacacg

SEQ ID NO: 833561 - RNA, 24 nt, Human
ucagaugauaugaccuuagcucca

SEQ ID NO: 833562 - RNA, 18 nt, Human
uccacacguccucagggu

SEQ ID NO: 833563 - RNA, 19 nt, Human
ucccgccagccuccagacc

SEQ ID NO: 833564 - RNA, 22 nt, Human
ucucaauuaaaaaaaaaaaaaa

SEQ ID NO: 833565 - RNA, 23 nt, Human
ugccgacagcgguggcagcagaa

SEQ ID NO: 833566 - RNA, 19 nt, Human
uggacuggacuauauacuc

SEQ ID NO: 833567 - RNA, 20 nt, Human
ugggcaaagucagauuuuca

SEQ ID NO: 833568 - RNA, 23 nt, Human
uggucagaugauaugaccuuagc

SEQ ID NO: 833569 - RNA, 22 nt, Human
ugguuagguuccuuccacaccg

SEQ ID NO: 833570 - RNA, 23 nt, Human
uuuuuuuuuuuuuuuuuccccuu

SEQ ID NO: 833571 - RNA, 21 nt, Human
aaacacccaugugugugguaa

SEQ ID NO: 833572 - RNA, 22 nt, Human
aaacuugccccuucucaagcac

SEQ ID NO: 833573 - RNA, 24 nt, Human
aacuugccccuucucaagcacucc

SEQ ID NO: 833574 - RNA, 21 nt, Human
aagauaccagauggagcgcgg

SEQ ID NO: 833575 - RNA, 24 nt, Human
aaggacacuaaagaacagagugug

SEQ ID NO: 833576 - RNA, 21 nt, Human
aaggcuuccugagcagguucu

SEQ ID NO: 833577 - RNA, 23 nt, Human
aauaacaacagaugaagaaagga

SEQ ID NO: 833578 - RNA, 19 nt, Human
acagaagaggagcucagcu

SEQ ID NO: 833579 - RNA, 26 nt, Human
acagagugugagaggugaguucuaaa

SEQ ID NO: 833580 - RNA, 20 nt, Human
acuggcccuuuuccucugag

SEQ ID NO: 833581 - RNA, 22 nt, Human
agaugggggacugggccauagu

SEQ ID NO: 833582 - RNA, 24 nt, Human
agcaagagcaaaucagagccccau

SEQ ID NO: 833583 - RNA, 20 nt, Human
agcagguucuuggugccccu

SEQ ID NO: 833584 - RNA, 20 nt, Human
aggaaggcccuaucuggcca

SEQ ID NO: 833585 - RNA, 19 nt, Human
aggggcaggcccagagcca

SEQ ID NO: 833586 - RNA, 22 nt, Human
aucaagcaggaaugguggccuu

SEQ ID NO: 833587 - RNA, 19 nt, Human
auccugagggagcaauacc

SEQ ID NO: 833588 - RNA, 18 nt, Human
auggagcgcggacagucc

SEQ ID NO: 833589 - RNA, 22 nt, Human
caagacauuugcaaagcaccac

SEQ ID NO: 833590 - RNA, 21 nt, Human
caaggacagcugaggccaaga

SEQ ID NO: 833591 - RNA, 25 nt, Human
caaggacagcugaggccaagauacc

SEQ ID NO: 833592 - RNA, 20 nt, Human
caucccuaagaaacugagag

SEQ ID NO: 833593 - RNA, 22 nt, Human
cauggcuccaauaagcugaggu

SEQ ID NO: 833594 - RNA, 23 nt, Human
ccaagauaccagauggagcgcgg

SEQ ID NO: 833595 - RNA, 20 nt, Human
cccccuucugauuucuccac

SEQ ID NO: 833596 - RNA, 21 nt, Human
ccccgggcgcccuggggccuu

SEQ ID NO: 833597 - RNA, 23 nt, Human
ccccgggcgcccuggggccuuuu

SEQ ID NO: 833598 - RNA, 19 nt, Human
ccgcccgcggccccccagc

SEQ ID NO: 833599 - RNA, 27 nt, Human
ccuccaagacauuugcaaagcaccacu

SEQ ID NO: 833600 - RNA, 20 nt, Human
cgccgcggcggagcagcgcu

SEQ ID NO: 833601 - RNA, 27 nt, Human
cgggcgcccuggggccuuuuggagguc

SEQ ID NO: 833602 - RNA, 25 nt, Human
cuaaagaacagagugugagagguga

SEQ ID NO: 833603 - RNA, 19 nt, Human
cuccugaaucccggaucuc

SEQ ID NO: 833604 - RNA, 21 nt, Human
cuccugaaucccggaucucug

SEQ ID NO: 833605 - RNA, 18 nt, Human
cucuguaggaaggcccua

SEQ ID NO: 833606 - RNA, 20 nt, Human
cucuguccuauacuccucca

SEQ ID NO: 833607 - RNA, 20 nt, Human
cugcuguguauuuugguccu

SEQ ID NO: 833608 - RNA, 24 nt, Human
cugugaaacuugccccuucucaag

SEQ ID NO: 833609 - RNA, 23 nt, Human
cuugcucugccaaacuuguuuuc

SEQ ID NO: 833610 - RNA, 25 nt, Human
gagcaagagcaaaucagagccccau

SEQ ID NO: 833611 - RNA, 21 nt, Human
gagguaucugguguaucggca

SEQ ID NO: 833612 - RNA, 19 nt, Human
gauuggugaucuugccauc

SEQ ID NO: 833613 - RNA, 18 nt, Human
gcaaaguucacuucagac

SEQ ID NO: 833614 - RNA, 19 nt, Human
gcaaaguucacuucagaca

SEQ ID NO: 833615 - RNA, 24 nt, Human
gccaucaaaaggcuuccugagcag

SEQ ID NO: 833616 - RNA, 25 nt, Human
gcccuggggccuuuuuauccgccuc

SEQ ID NO: 833617 - RNA, 18 nt, Human
gcgccgcggcggagcagc

SEQ ID NO: 833618 - RNA, 23 nt, Human
gcugggcgggcgccgcggcggag

SEQ ID NO: 833619 - RNA, 18 nt, Human
ggacagcugaggccaaga

SEQ ID NO: 833620 - RNA, 22 nt, Human
ggcccagagccauccugaggga

SEQ ID NO: 833621 - RNA, 23 nt, Human
uaacgggcucccuccccgggcgc

SEQ ID NO: 833622 - RNA, 24 nt, Human
uaagugugucucaguggagaaaag

SEQ ID NO: 833623 - RNA, 25 nt, Human
uaggggcaggcccagagccauccug

SEQ ID NO: 833624 - RNA, 19 nt, Human
uaucucuguagagaugagu

SEQ ID NO: 833625 - RNA, 19 nt, Human
ucagacacuugguugagac

SEQ ID NO: 833626 - RNA, 21 nt, Human
ucaguggagaaaagaucaaga

SEQ ID NO: 833627 - RNA, 19 nt, Human
uccaaggauaauagaaaca

SEQ ID NO: 833628 - RNA, 20 nt, Human
uccaaggauaauagaaacac

SEQ ID NO: 833629 - RNA, 18 nt, Human
uccauaggccacaggccc

SEQ ID NO: 833630 - RNA, 22 nt, Human
uccaucccuaagaaacugagag

SEQ ID NO: 833631 - RNA, 21 nt, Human
uccccgggcgcccuggggccu

SEQ ID NO: 833632 - RNA, 21 nt, Human
ucccuaagaaacugagagcuc

SEQ ID NO: 833633 - RNA, 24 nt, Human
ucccuaagaaacugagagcuccug

SEQ ID NO: 833634 - RNA, 18 nt, Human
uccggggcugggcgggcg

SEQ ID NO: 833635 - RNA, 18 nt, Human
ucugucucuugcucugcc

SEQ ID NO: 833636 - RNA, 19 nt, Human
ugaguggcuuguuugaugu

SEQ ID NO: 833637 - RNA, 22 nt, Human
ugauacaaguuguguugcuuug

SEQ ID NO: 833638 - RNA, 22 nt, Human
ugcccgaggucugugcuuccaa

SEQ ID NO: 833639 - RNA, 21 nt, Human
ugccugccagguaaauggucc

SEQ ID NO: 833640 - RNA, 21 nt, Human
uggagaaaagaucaagaauca

SEQ ID NO: 833641 - RNA, 22 nt, Human
uggauuggugaucuugccauca

SEQ ID NO: 833642 - RNA, 23 nt, Human
uguucccccuucugauuucucca

SEQ ID NO: 833643 - RNA, 25 nt, Human
uuauuggcauuagggugucaguccu

SEQ ID NO: 833644 - RNA, 24 nt, Human
uucccagguuccauccuuaacuaa

SEQ ID NO: 833645 - RNA, 20 nt, Human
uuccuuggcagaggcccuga

SEQ ID NO: 833646 - RNA, 23 nt, Human
uuccuuggcagaggcccugacag

SEQ ID NO: 833647 - RNA, 18 nt, Human
uugaaguuuagaccaauc

SEQ ID NO: 833648 - RNA, 23 nt, Human
uuggcacuggcccuuuuccucug

SEQ ID NO: 833649 - RNA, 19 nt, Human
uugguccucuguccuauac

SEQ ID NO: 833650 - RNA, 21 nt, Human
aaaaagaaaaccaaagcccac

SEQ ID NO: 833651 - RNA, 24 nt, Human
aaagcacuuuucacuuuaucucug

SEQ ID NO: 833652 - RNA, 22 nt, Human
aacuuguccccuucggucccca

SEQ ID NO: 833653 - RNA, 21 nt, Human
aagaaaaccaaagcccacuaa

SEQ ID NO: 833654 - RNA, 23 nt, Human
acaaaaagaaaaccaaagcccac

SEQ ID NO: 833655 - RNA, 26 nt, Human
acaaaaagaaaaccaaagcccacuaa

SEQ ID NO: 833656 - RNA, 21 nt, Human
acacacacucgcacaaaaaga

SEQ ID NO: 833657 - RNA, 22 nt, Human
acacacacucgcacaaaaagaa

SEQ ID NO: 833658 - RNA, 24 nt, Human
acuaaagcacauggggaaaaaaag

SEQ ID NO: 833659 - RNA, 25 nt, Human
agaaaccagaagcugagauggagcc

SEQ ID NO: 833660 - RNA, 19 nt, Human
agaacaaaguucacacuca

SEQ ID NO: 833661 - RNA, 18 nt, Human
agaggccaccaguucccc

SEQ ID NO: 833662 - RNA, 22 nt, Human
agauuacaaaacaucuuccucc

SEQ ID NO: 833663 - RNA, 23 nt, Human
aggggaacuuguccccuucgguc

SEQ ID NO: 833664 - RNA, 22 nt, Human
augaucacagaacaaaguucac

SEQ ID NO: 833665 - RNA, 26 nt, Human
augcagaggccaccaguuccccaagg

SEQ ID NO: 833666 - RNA, 21 nt, Human
caaaguucacacucaccacac

SEQ ID NO: 833667 - RNA, 22 nt, Human
cacacacucgcacaaaaagaaa

SEQ ID NO: 833668 - RNA, 19 nt, Human
cacacucaccacacagcca

SEQ ID NO: 833669 - RNA, 24 nt, Human
caccacacagccauucucacacac

SEQ ID NO: 833670 - RNA, 22 nt, Human
cccagcccugcccuccccugca

SEQ ID NO: 833671 - RNA, 26 nt, Human
ccuaaaauacccuuucuaugaucaca

SEQ ID NO: 833672 - RNA, 26 nt, Human
ccugcagccuaaaauacccuuucuau

SEQ ID NO: 833673 - RNA, 22 nt, Human
ccuuccuggcagccuuuggcac

SEQ ID NO: 833674 - RNA, 22 nt, Human
cuucggauggugacaccucccu

SEQ ID NO: 833675 - RNA, 22 nt, Human
gaaaacucagcaccaaaggaug

SEQ ID NO: 833676 - RNA, 22 nt, Human
gaagaaagauccaggacucagg

SEQ ID NO: 833677 - RNA, 18 nt, Human
gagauggagccggcuggg

SEQ ID NO: 833678 - RNA, 20 nt, Human
gauuacaaaacaucuuccuc

SEQ ID NO: 833679 - RNA, 21 nt, Human
gcagaggccaccaguucccca

SEQ ID NO: 833680 - RNA, 22 nt, Human
ggaaaaaaagauuacaaaacau

SEQ ID NO: 833681 - RNA, 18 nt, Human
ggggaacuuguccccuuc

SEQ ID NO: 833682 - RNA, 19 nt, Human
uaaaauacccuuucuauga

SEQ ID NO: 833683 - RNA, 20 nt, Human
uaaauaacuacccacaguca

SEQ ID NO: 833684 - RNA, 19 nt, Human
uacagaaaacucagcacca

SEQ ID NO: 833685 - RNA, 25 nt, Human
uauucagaaauaaauaacuacccac

SEQ ID NO: 833686 - RNA, 24 nt, Human
ucaccuaaagcacuuuucacuuua

SEQ ID NO: 833687 - RNA, 21 nt, Human
ucagaaauaaauaacuaccca

SEQ ID NO: 833688 - RNA, 24 nt, Human
uccagaaggaagaaagauccagga

SEQ ID NO: 833689 - RNA, 24 nt, Human
uccaggacucaggaaggcgucucc

SEQ ID NO: 833690 - RNA, 19 nt, Human
uccccagcccugcccuccc

SEQ ID NO: 833691 - RNA, 23 nt, Human
uccgccgugcccagcaggggcug

SEQ ID NO: 833692 - RNA, 23 nt, Human
uccuuccuggcagccuuuggcac

SEQ ID NO: 833693 - RNA, 20 nt, Human
ucggauggugacaccucccu

SEQ ID NO: 833694 - RNA, 23 nt, Human
ugagauggagccggcuggguuca

SEQ ID NO: 833695 - RNA, 20 nt, Human
ugcagccuaaaauacccuuu

SEQ ID NO: 833696 - RNA, 23 nt, Human
uuacaaaacaucuuccuccccau

SEQ ID NO: 833697 - RNA, 25 nt, Human
uucacacucaccacacagccauucu

SEQ ID NO: 833698 - RNA, 18 nt, Human
uuuuuuuuuuuuugaccc

SEQ ID NO: 833699 - RNA, 25 nt, Human
aagcagccaaaggucccucuuggaa

SEQ ID NO: 833700 - RNA, 19 nt, Human
aaggucagcagagccagug

SEQ ID NO: 833701 - RNA, 20 nt, Human
agccagacaccugcccuccg

SEQ ID NO: 833702 - RNA, 21 nt, Human
agccagugggaacagcugccc

SEQ ID NO: 833703 - RNA, 18 nt, Human
caagccagacaccugccc

SEQ ID NO: 833704 - RNA, 21 nt, Human
caagccagacaccugcccucc

SEQ ID NO: 833705 - RNA, 24 nt, Human
cagccaaaggucccucuuggaagc

SEQ ID NO: 833706 - RNA, 22 nt, Human
caucugacuccaacugugaugc

SEQ ID NO: 833707 - RNA, 24 nt, Human
ccucccacgggcgcgcguggagau

SEQ ID NO: 833708 - RNA, 22 nt, Human
ccucuuggaagcggaguucugg

SEQ ID NO: 833709 - RNA, 19 nt, Human
cgcgggaggccucuccggc

SEQ ID NO: 833710 - RNA, 23 nt, Human
cuaauugucuuuuccugcacucu

SEQ ID NO: 833711 - RNA, 20 nt, Human
cuccggccggacccaccucc

SEQ ID NO: 833712 - RNA, 18 nt, Human
gagacggcguccgcggga

SEQ ID NO: 833713 - RNA, 20 nt, Human
gucccucuuggaagcggagu

SEQ ID NO: 833714 - RNA, 18 nt, Human
uaauauuagucaccaguu

SEQ ID NO: 833715 - RNA, 20 nt, Human
uacucuuggcucaaguuuug

SEQ ID NO: 833716 - RNA, 20 nt, Human
ugcccuccgggcucacaucu

SEQ ID NO: 833717 - RNA, 19 nt, Human
ugggaggcugaagacuuca

SEQ ID NO: 833718 - RNA, 19 nt, Human
uugucuuuuccugcacucu

SEQ ID NO: 833719 - RNA, 20 nt, Human
uuuuccugcacucugugugu

SEQ ID NO: 833720 - RNA, 19 nt, Human
aaaggaggagggucuggag

SEQ ID NO: 833721 - RNA, 19 nt, Human
accccagagugggaacagc

SEQ ID NO: 833722 - RNA, 21 nt, Human
acccgucgggcgugagcagca

SEQ ID NO: 833723 - RNA, 24 nt, Human
agaaaggaggagggucuggagagc

SEQ ID NO: 833724 - RNA, 22 nt, Human
agaagaaaggaggagggucugg

SEQ ID NO: 833725 - RNA, 20 nt, Human
agcggccauaggggaggcaa

SEQ ID NO: 833726 - RNA, 20 nt, Human
aggaagagcccgggaggagg

SEQ ID NO: 833727 - RNA, 21 nt, Human
aggcaagugugaggagccagg

SEQ ID NO: 833728 - RNA, 22 nt, Human
agggggugaggggucgaggugu

SEQ ID NO: 833729 - RNA, 23 nt, Human
agggggugaggggucgaggugug

SEQ ID NO: 833730 - RNA, 21 nt, Human
caccccguggggucuuuggcg

SEQ ID NO: 833731 - RNA, 22 nt, Human
cagcaggugcggauguggggag

SEQ ID NO: 833732 - RNA, 23 nt, Human
cagccggggcgcagcugcuggca

SEQ ID NO: 833733 - RNA, 18 nt, Human
cagucgguggagcgggag

SEQ ID NO: 833734 - RNA, 23 nt, Human
ccagagccugcggacuguggagg

SEQ ID NO: 833735 - RNA, 21 nt, Human
ccaggagugggggcccugggc

SEQ ID NO: 833736 - RNA, 19 nt, Human
ccggagcgcagccggggcg

SEQ ID NO: 833737 - RNA, 22 nt, Human
ccggagcgcagccggggcgcag

SEQ ID NO: 833738 - RNA, 20 nt, Human
ccggggcgcagcugcuggca

SEQ ID NO: 833739 - RNA, 18 nt, Human
cggagcgcagccggggcg

SEQ ID NO: 833740 - RNA, 26 nt, Human
cggggcaggggcggcgugaacccguc

SEQ ID NO: 833741 - RNA, 18 nt, Human
cggggcgcagcugcuggc

SEQ ID NO: 833742 - RNA, 21 nt, Human
cgugagcagcagucgguggag

SEQ ID NO: 833743 - RNA, 23 nt, Human
cuccgcaccgcagcgcgguccuu

SEQ ID NO: 833744 - RNA, 20 nt, Human
gagcagcagucgguggagcg

SEQ ID NO: 833745 - RNA, 21 nt, Human
gagcagcagucgguggagcgg

SEQ ID NO: 833746 - RNA, 23 nt, Human
gagcagcagucgguggagcggga

SEQ ID NO: 833747 - RNA, 25 nt, Human
gagcagcagucgguggagcgggagg

SEQ ID NO: 833748 - RNA, 26 nt, Human
gagccugcggacuguggaggggaggc

SEQ ID NO: 833749 - RNA, 19 nt, Human
gauguggggagaagaaagg

SEQ ID NO: 833750 - RNA, 21 nt, Human
gcacaggagcuccacaggcag

SEQ ID NO: 833751 - RNA, 18 nt, Human
gcaggugcggaugugggg

SEQ ID NO: 833752 - RNA, 19 nt, Human
gcggacuguggaggggagg

SEQ ID NO: 833753 - RNA, 24 nt, Human
ggaacagcaggugcggaugugggg

SEQ ID NO: 833754 - RNA, 22 nt, Human
ggaagagcccgggaggaggggg

SEQ ID NO: 833755 - RNA, 18 nt, Human
ggacucgguccuguccca

SEQ ID NO: 833756 - RNA, 18 nt, Human
ggagaagaaaggaggagg

SEQ ID NO: 833757 - RNA, 23 nt, Human
ggagagcggccauaggggaggca

SEQ ID NO: 833758 - RNA, 19 nt, Human
ggaggagggucuggagagc

SEQ ID NO: 833759 - RNA, 21 nt, Human
ggcgcagcugcuggcacagga

SEQ ID NO: 833760 - RNA, 24 nt, Human
gggaacagcaggugcggauguggg

SEQ ID NO: 833761 - RNA, 19 nt, Human
gggaggagggggugagggg

SEQ ID NO: 833762 - RNA, 20 nt, Human
gggcaccccguggggucuuu

SEQ ID NO: 833763 - RNA, 28 nt, Human
ggggagaagaaaggaggagggucuggag

SEQ ID NO: 833764 - RNA, 20 nt, Human
ggggauggggguauccggag

SEQ ID NO: 833765 - RNA, 21 nt, Human
guucauggacuugagaacccc

SEQ ID NO: 833766 - RNA, 20 nt, Human
uauccggagcgcagccgggg

SEQ ID NO: 833767 - RNA, 24 nt, Human
ucauggacuugagaaccccagagu

SEQ ID NO: 833768 - RNA, 26 nt, Human
ucauggacuugagaaccccagaguug

SEQ ID NO: 833769 - RNA, 21 nt, Human
uccacaggcagccaaggacuc

SEQ ID NO: 833770 - RNA, 26 nt, Human
uccacaggcagccaaggacucggucc

SEQ ID NO: 833771 - RNA, 19 nt, Human
ucccagagccugcggacug

SEQ ID NO: 833772 - RNA, 22 nt, Human
ucccagagccugcggacugugg

SEQ ID NO: 833773 - RNA, 30 nt, Human
uccgcaccgcagcgcgguccuucacggggg

SEQ ID NO: 833774 - RNA, 23 nt, Human
ucggcgguggcggggaugggggu

SEQ ID NO: 833775 - RNA, 20 nt, Human
ugcggauguggggagaagaa

SEQ ID NO: 833776 - RNA, 21 nt, Human
ugcgggcaccccguggggucu

SEQ ID NO: 833777 - RNA, 19 nt, Human
ugucccagagccugcggac

SEQ ID NO: 833778 - RNA, 19 nt, Human
uguggaggggaggccgcag

SEQ ID NO: 833779 - RNA, 22 nt, Human
uugacccagacgccagggcccu

SEQ ID NO: 833780 - RNA, 21 nt, Human
uuuaaucagcauuguggaaaa

SEQ ID NO: 833781 - RNA, 21 nt, Human
uuucuggauuguuuauuaugu

SEQ ID NO: 833782 - RNA, 21 nt, Human
uuuugcuuuucuggauuguuu

SEQ ID NO: 833783 - RNA, 25 nt, Human
uuuuuuuuuuuuuuuugcuuuucug

SEQ ID NO: 833784 - RNA, 18 nt, Human
uuuuuuuuuuuuuuuuug

SEQ ID NO: 833785 - RNA, 24 nt, Human
uuuuuuuuuuuuuuuuuugcuuuu

SEQ ID NO: 833786 - RNA, 23 nt, Human
aaaagaaaaacaaauguugugag

SEQ ID NO: 833787 - RNA, 22 nt, Human
aaaguccuuggcgucgcccucc

SEQ ID NO: 833788 - RNA, 23 nt, Human
aaauagccucccccaaaccauac

SEQ ID NO: 833789 - RNA, 23 nt, Human
aaccgcaguagugagcuuuggua

SEQ ID NO: 833790 - RNA, 23 nt, Human
aacucagagucacccugggacgg

SEQ ID NO: 833791 - RNA, 18 nt, Human
aacuuguggagauacccc

SEQ ID NO: 833792 - RNA, 18 nt, Human
aagagcauuuccaucauu

SEQ ID NO: 833793 - RNA, 23 nt, Human
aagcaaagacuacaaaaauagca

SEQ ID NO: 833794 - RNA, 18 nt, Human
aagcacaguuguuuggaa

SEQ ID NO: 833795 - RNA, 25 nt, Human
aauauuguaacccacuuccccacug

SEQ ID NO: 833796 - RNA, 20 nt, Human
acaacacacgcaaugcaaaa

SEQ ID NO: 833797 - RNA, 23 nt, Human
acaauaaaauagccucccccaaa

SEQ ID NO: 833798 - RNA, 18 nt, Human
acagaacccagcagccag

SEQ ID NO: 833799 - RNA, 23 nt, Human
acaggcaaaccgcaguagugagc

SEQ ID NO: 833800 - RNA, 19 nt, Human
acccggggagggaaggggg

SEQ ID NO: 833801 - RNA, 20 nt, Human
acuucugcucauccuagggg

SEQ ID NO: 833802 - RNA, 26 nt, Human
agaaaaacaaauguugugagcucaag

SEQ ID NO: 833803 - RNA, 21 nt, Human
agcaguugauguggaaagucc

SEQ ID NO: 833804 - RNA, 21 nt, Human
auaaaggacaacucagaguca

SEQ ID NO: 833805 - RNA, 21 nt, Human
auagccucccccaaaccauac

SEQ ID NO: 833806 - RNA, 19 nt, Human
caacacacgcaaugcaaaa

SEQ ID NO: 833807 - RNA, 22 nt, Human
caacgccaaacccuggucgcag

SEQ ID NO: 833808 - RNA, 21 nt, Human
caacuuguggagauaccccaa

SEQ ID NO: 833809 - RNA, 21 nt, Human
cacaacacacgcaaugcaaaa

SEQ ID NO: 833810 - RNA, 21 nt, Human
cacaauaaaauagccuccccc

SEQ ID NO: 833811 - RNA, 20 nt, Human
cacacaguaaucuacuagaa

SEQ ID NO: 833812 - RNA, 22 nt, Human
ccaaaaaagucaagcaaagacu

SEQ ID NO: 833813 - RNA, 23 nt, Human
ccaaaccauacuuuucuaggucu

SEQ ID NO: 833814 - RNA, 22 nt, Human
ccaaacccuggucgcagccucc

SEQ ID NO: 833815 - RNA, 23 nt, Human
ccccaacaacaguggcuccgccu

SEQ ID NO: 833816 - RNA, 23 nt, Human
cccccaaaaaagucaagcaaaga

SEQ ID NO: 833817 - RNA, 21 nt, Human
cccccaaaccauacuuuucua

SEQ ID NO: 833818 - RNA, 21 nt, Human
ccucuuccaacuuguggagau

SEQ ID NO: 833819 - RNA, 18 nt, Human
cuaggucuaaaacaugcu

SEQ ID NO: 833820 - RNA, 18 nt, Human
gaugacagaucaggaaaa

SEQ ID NO: 833821 - RNA, 18 nt, Human
gccaaacccuggucgcag

SEQ ID NO: 833822 - RNA, 20 nt, Human
ggaaaaauacaggacccaaa

SEQ ID NO: 833823 - RNA, 21 nt, Human
gugagcucaagagcauuucca

SEQ ID NO: 833824 - RNA, 23 nt, Human
uaaaagaaaaacaaauguuguga

SEQ ID NO: 833825 - RNA, 20 nt, Human
uaaaauagccucccccaaac

SEQ ID NO: 833826 - RNA, 20 nt, Human
uaaaauagccucccccaaac

SEQ ID NO: 833827 - RNA, 24 nt, Human
uaaaucccagaaauauuagugcug

SEQ ID NO: 833828 - RNA, 23 nt, Human
uacaggccuuuucucaaauauuu

SEQ ID NO: 833829 - RNA, 21 nt, Human
uagauuccuugugcuaaccac

SEQ ID NO: 833830 - RNA, 21 nt, Human
uagcucacgauaaaggacaac

SEQ ID NO: 833831 - RNA, 21 nt, Human
uaguacaaauugcuaaucaaa

SEQ ID NO: 833832 - RNA, 20 nt, Human
uauuguaacccacuucccca

SEQ ID NO: 833833 - RNA, 25 nt, Human
uauuuugcuucuuugagcaaauuua

SEQ ID NO: 833834 - RNA, 22 nt, Human
uccaaucucucuccccgaggcu

SEQ ID NO: 833835 - RNA, 21 nt, Human
uccaggcacaggcaaaccgca

SEQ ID NO: 833836 - RNA, 23 nt, Human
uccccgaggcugacaacaacgcc

SEQ ID NO: 833837 - RNA, 21 nt, Human
uccuuggcgucgcccuccucc

SEQ ID NO: 833838 - RNA, 20 nt, Human
ucgcagccuccaaguuuccc

SEQ ID NO: 833839 - RNA, 21 nt, Human
ucugcucauccuaggggcaga

SEQ ID NO: 833840 - RNA, 23 nt, Human
ugacaacaacgccaaacccuggu

SEQ ID NO: 833841 - RNA, 24 nt, Human
ugagcaaauuuaaguuacauucag

SEQ ID NO: 833842 - RNA, 22 nt, Human
ugagcacaacacacgcaaugca

SEQ ID NO: 833843 - RNA, 21 nt, Human
ugcuuugcuaaucccccccaa

SEQ ID NO: 833844 - RNA, 22 nt, Human
ugcuuugcuaaucccccccaaa

SEQ ID NO: 833845 - RNA, 19 nt, Human
ugguaaugagcacaacaca

SEQ ID NO: 833846 - RNA, 19 nt, Human
uguccaggcacaggcaaac

SEQ ID NO: 833847 - RNA, 18 nt, Human
uguggaaaguccuuggcg

SEQ ID NO: 833848 - RNA, 19 nt, Human
uguuucguuucuuaguaca

SEQ ID NO: 833849 - RNA, 20 nt, Human
uugcuccacuguauguuucc

SEQ ID NO: 833850 - RNA, 24 nt, Human
uugugagcucaagagcauuuccau

SEQ ID NO: 833851 - RNA, 24 nt, Human
uuuacuugcuccacuguauguuuc

SEQ ID NO: 833852 - RNA, 24 nt, Human
aaagugcugggauuacaggcguga

SEQ ID NO: 833853 - RNA, 22 nt, Human
aaggcagccccaguguggccag

SEQ ID NO: 833854 - RNA, 19 nt, Human
aagugcugggauuacaggc

SEQ ID NO: 833855 - RNA, 19 nt, Human
aagugcugggauuacaggc

SEQ ID NO: 833856 - RNA, 26 nt, Human
aagugcugggauuacaggcgugagcc

SEQ ID NO: 833857 - RNA, 18 nt, Human
acaggguuucaccauguu

SEQ ID NO: 833858 - RNA, 19 nt, Human
acaggguuucaccauguua

SEQ ID NO: 833859 - RNA, 20 nt, Human
acaggguuucaccauguuag

SEQ ID NO: 833860 - RNA, 21 nt, Human
acaggugcccaccaccacgcc

SEQ ID NO: 833861 - RNA, 22 nt, Human
agaccccccacccucaacccaa

SEQ ID NO: 833862 - RNA, 18 nt, Human
agagaucugggaaacagg

SEQ ID NO: 833863 - RNA, 19 nt, Human
agaguucaagagaucuggg

SEQ ID NO: 833864 - RNA, 24 nt, Human
agauggucucgaucuccugacuuc

SEQ ID NO: 833865 - RNA, 21 nt, Human
agcaucagacccugcacucag

SEQ ID NO: 833866 - RNA, 18 nt, Human
aggaaggacaaggggcug

SEQ ID NO: 833867 - RNA, 20 nt, Human
agugcaguggcacgaucuug

SEQ ID NO: 833868 - RNA, 23 nt, Human
agugcaguggcacgaucuuggcu

SEQ ID NO: 833869 - RNA, 24 nt, Human
agugcaguggcacgaucuuggcuc

SEQ ID NO: 833870 - RNA, 18 nt, Human
agugcugggauuacaggc

SEQ ID NO: 833871 - RNA, 24 nt, Human
caaagugcugggauuacaggcgug

SEQ ID NO: 833872 - RNA, 22 nt, Human
caccauguuagccaagaugguc

SEQ ID NO: 833873 - RNA, 24 nt, Human
caccauguuagccaagauggucuc

SEQ ID NO: 833874 - RNA, 20 nt, Human
cacccggccaaaggcaggau

SEQ ID NO: 833875 - RNA, 19 nt, Human
caccgcaagcuccgccucc

SEQ ID NO: 833876 - RNA, 19 nt, Human
caccuguaaaaggcaggau

SEQ ID NO: 833877 - RNA, 22 nt, Human
cacgccauucuccugccucagc

SEQ ID NO: 833878 - RNA, 18 nt, Human
cagccccgaguuucaccu

SEQ ID NO: 833879 - RNA, 19 nt, Human
caggguuucaccauguuag

SEQ ID NO: 833880 - RNA, 19 nt, Human
caggugcccaccaccacgc

SEQ ID NO: 833881 - RNA, 21 nt, Human
caggugcccaccaccacgccu

SEQ ID NO: 833882 - RNA, 19 nt, Human
caguggcacgaucuuggcu

SEQ ID NO: 833883 - RNA, 22 nt, Human
ccaaagugcugggauuacaggc

SEQ ID NO: 833884 - RNA, 22 nt, Human
ccaaagugcugggauuacaggc

SEQ ID NO: 833885 - RNA, 24 nt, Human
ccaaagugcugggauuacaggcgu

SEQ ID NO: 833886 - RNA, 22 nt, Human
ccagaccccccacccucaaccc

SEQ ID NO: 833887 - RNA, 18 nt, Human
cccacccucaacccaagc

SEQ ID NO: 833888 - RNA, 20 nt, Human
ccccaguguggccagggcuc

SEQ ID NO: 833889 - RNA, 24 nt, Human
cccgaguugcugggacuacaggug

SEQ ID NO: 833890 - RNA, 18 nt, Human
cccucaacccaagccccu

SEQ ID NO: 833891 - RNA, 19 nt, Human
cccugcacucagagagccc

SEQ ID NO: 833892 - RNA, 21 nt, Human
cccugcacucagagagccccc

SEQ ID NO: 833893 - RNA, 22 nt, Human
cccuugguucugaccccaagcu

SEQ ID NO: 833894 - RNA, 24 nt, Human
ccgcaagcuccgccucccaaguuc

SEQ ID NO: 833895 - RNA, 23 nt, Human
ccgcacccggccaaaggcagugg

SEQ ID NO: 833896 - RNA, 24 nt, Human
ccucccaaguucacgccauucucc

SEQ ID NO: 833897 - RNA, 21 nt, Human
ccugccucagccucccgaguu

SEQ ID NO: 833898 - RNA, 19 nt, Human
cgccucccaaguucacgcc

SEQ ID NO: 833899 - RNA, 25 nt, Human
cuaagugggacucagcaucagaccc

SEQ ID NO: 833900 - RNA, 25 nt, Human
cuaccagaccccccacccucaaccc

SEQ ID NO: 833901 - RNA, 22 nt, Human
cuccugacuucgugauccgccc

SEQ ID NO: 833902 - RNA, 23 nt, Human
cuccugccucagccucccgaguu

SEQ ID NO: 833903 - RNA, 23 nt, Human
cucugucgcccaggcuagagugc

SEQ ID NO: 833904 - RNA, 20 nt, Human
cugaccccaagcuaaguggg

SEQ ID NO: 833905 - RNA, 20 nt, Human
cuggaaggaaggacaagggg

SEQ ID NO: 833906 - RNA, 21 nt, Human
cugggccucccaaagugcugg

SEQ ID NO: 833907 - RNA, 22 nt, Human
gacaaggggcugggagaaccca

SEQ ID NO: 833908 - RNA, 23 nt, Human
gacuucgugauccgcccaccugg

SEQ ID NO: 833909 - RNA, 20 nt, Human
gaguugcugggacuacaggu

SEQ ID NO: 833910 - RNA, 18 nt, Human
gauuacaggcgugagccc

SEQ ID NO: 833911 - RNA, 21 nt, Human
gauuacaggcgugagcccccg

SEQ ID NO: 833912 - RNA, 23 nt, Human
gccuggcuaauuuuuuauauuuu

SEQ ID NO: 833913 - RNA, 19 nt, Human
gcuagagugcaguggcacg

SEQ ID NO: 833914 - RNA, 22 nt, Human
ggaaggaaggacaaggggcugg

SEQ ID NO: 833915 - RNA, 20 nt, Human
ggggaagacagagucagaga

SEQ ID NO: 833916 - RNA, 24 nt, Human
uaaaccccuugguucugaccccaa

SEQ ID NO: 833917 - RNA, 22 nt, Human
uaaggaaagcccaucguguguu

SEQ ID NO: 833918 - RNA, 24 nt, Human
uaauuuuuuauauuuuuaguagag

SEQ ID NO: 833919 - RNA, 22 nt, Human
uacaggugcccaccaccacgcc

SEQ ID NO: 833920 - RNA, 22 nt, Human
uagagacaggguuucaccaugu

SEQ ID NO: 833921 - RNA, 21 nt, Human
uagagugcaguggcacgaucu

SEQ ID NO: 833922 - RNA, 24 nt, Human
uagagugcaguggcacgaucuugg

SEQ ID NO: 833923 - RNA, 24 nt, Human
uaguagagacaggguuucaccaug

SEQ ID NO: 833924 - RNA, 26 nt, Human
uaguagagacaggguuucaccauguu

SEQ ID NO: 833925 - RNA, 24 nt, Human
ucaccgcaagcuccgccucccaag

SEQ ID NO: 833926 - RNA, 24 nt, Human
ucccaaagugcugggauuacaggc

SEQ ID NO: 833927 - RNA, 21 nt, Human
ucccaaguucacgccauucuc

SEQ ID NO: 833928 - RNA, 24 nt, Human
ucccaaguucacgccauucuccug

SEQ ID NO: 833929 - RNA, 23 nt, Human
ucccagccgcuauggacagcccc

SEQ ID NO: 833930 - RNA, 23 nt, Human
ucccgaguugcugggacuacagg

SEQ ID NO: 833931 - RNA, 24 nt, Human
ucccgaguugcugggacuacaggu

SEQ ID NO: 833932 - RNA, 18 nt, Human
ucgcccaggcuagagugc

SEQ ID NO: 833933 - RNA, 18 nt, Human
ucuaccagaccccccacc

SEQ ID NO: 833934 - RNA, 21 nt, Human
ucuaccagaccccccacccuc

SEQ ID NO: 833935 - RNA, 24 nt, Human
ucuaccagaccccccacccucaac

SEQ ID NO: 833936 - RNA, 24 nt, Human
ucuccugccucagccucccgaguu

SEQ ID NO: 833937 - RNA, 24 nt, Human
ucugucgcccaggcuagagugcag

SEQ ID NO: 833938 - RNA, 19 nt, Human
ucuugcucugucgcccagg

SEQ ID NO: 833939 - RNA, 23 nt, Human
ucuugcucugucgcccaggcuag

SEQ ID NO: 833940 - RNA, 24 nt, Human
ucuugcucugucgcccaggcuaga

SEQ ID NO: 833941 - RNA, 21 nt, Human
ugaaacggggucccagccgcu

SEQ ID NO: 833942 - RNA, 21 nt, Human
ugagcccccgcacccggccaa

SEQ ID NO: 833943 - RNA, 24 nt, Human
ugauccgcccaccugggccuccca

SEQ ID NO: 833944 - RNA, 22 nt, Human
ugcaguggcacgaucuuggcuc

SEQ ID NO: 833945 - RNA, 24 nt, Human
ugccucagccucccgaguugcugg

SEQ ID NO: 833946 - RNA, 24 nt, Human
ugcucugucgcccaggcuagagug

SEQ ID NO: 833947 - RNA, 21 nt, Human
ugcugggacuacaggugccca

SEQ ID NO: 833948 - RNA, 20 nt, Human
ugcugggauuacaggcguga

SEQ ID NO: 833949 - RNA, 21 nt, Human
uggaaggaaggacaaggggcu

SEQ ID NO: 833950 - RNA, 22 nt, Human
uggaaggaaggacaaggggcug

SEQ ID NO: 833951 - RNA, 23 nt, Human
uggaaggaaggacaaggggcugg

SEQ ID NO: 833952 - RNA, 24 nt, Human
uggaaggaaggacaaggggcuggg

SEQ ID NO: 833953 - RNA, 18 nt, Human
uggcucaccgcaagcucc

SEQ ID NO: 833954 - RNA, 21 nt, Human
ugggacuacaggugcccacca

SEQ ID NO: 833955 - RNA, 24 nt, Human
ugggacuacaggugcccaccacca

SEQ ID NO: 833956 - RNA, 18 nt, Human
ugggauuacaggcgugag

SEQ ID NO: 833957 - RNA, 19 nt, Human
ugggauuacaggcgugagc

SEQ ID NO: 833958 - RNA, 23 nt, Human
ugggauuacaggcgugagccccc

SEQ ID NO: 833959 - RNA, 24 nt, Human
ugggauuacaggcgugagcccccg

SEQ ID NO: 833960 - RNA, 25 nt, Human
ugggauuacaggcgugagcccccgc

SEQ ID NO: 833961 - RNA, 22 nt, Human
uguucuaggaagcauggaugga

SEQ ID NO: 833962 - RNA, 25 nt, Human
uguucuaggaagcauggauggauga

SEQ ID NO: 833963 - RNA, 20 nt, Human
uuacaggcgugagcccccgc

SEQ ID NO: 833964 - RNA, 24 nt, Human
uuaguagagacaggguuucaccau

SEQ ID NO: 833965 - RNA, 23 nt, Human
uugagacagucuugcucugucgc

SEQ ID NO: 833966 - RNA, 22 nt, Human
uugguucugaccccaagcuaag

SEQ ID NO: 833967 - RNA, 23 nt, Human
uuuauauuuuuaguagagacagg

SEQ ID NO: 833968 - RNA, 24 nt, Human
uuuauauuuuuaguagagacaggg

SEQ ID NO: 833969 - RNA, 19 nt, Human
uuucaccauguuagccaag

SEQ ID NO: 833970 - RNA, 24 nt, Human
uuuuuaguagagacaggguuucac

SEQ ID NO: 833971 - RNA, 21 nt, Human
uuuuuauauuuuuaguagaga

SEQ ID NO: 833972 - RNA, 24 nt, Human
uuuuuuauauuuuuaguagagaca

SEQ ID NO: 833973 - RNA, 25 nt, Human
uuuuuuuuuuuuuuuuuccaguuuu

SEQ ID NO: 833974 - RNA, 22 nt, Human
uuuuuuuuuuuuuuuuuuccag

SEQ ID NO: 833975 - RNA, 19 nt, Human
aaaagcuucuucaguuucc

SEQ ID NO: 833976 - RNA, 20 nt, Human
aaaaguuacuaauuuacgaa

SEQ ID NO: 833977 - RNA, 18 nt, Human
aggcaaaaagaggaaaug

SEQ ID NO: 833978 - RNA, 22 nt, Human
aggcaaaaagaggaaauguaag

SEQ ID NO: 833979 - RNA, 24 nt, Human
caacacugcuucaauuuuucuuga

SEQ ID NO: 833980 - RNA, 24 nt, Human
caggacagggaaucauagugagga

SEQ ID NO: 833981 - RNA, 22 nt, Human
caguaaagacguagcuuuuuca

SEQ ID NO: 833982 - RNA, 23 nt, Human
cauauaguuuguggcaacacugc

SEQ ID NO: 833983 - RNA, 20 nt, Human
ccagagauaaggcauccagc

SEQ ID NO: 833984 - RNA, 20 nt, Human
gccaggaaagaaagcaaugg

SEQ ID NO: 833985 - RNA, 24 nt, Human
ggaaauuccucaucuaaaaagcuu

SEQ ID NO: 833986 - RNA, 21 nt, Human
ggacauggauaguuagugcug

SEQ ID NO: 833987 - RNA, 23 nt, Human
ggagauaaaggcaaaaagaggaa

SEQ ID NO: 833988 - RNA, 20 nt, Human
uagacuguuuuaucaaaaau

SEQ ID NO: 833989 - RNA, 23 nt, Human
uauccagagauaaggcauccagc

SEQ ID NO: 833990 - RNA, 22 nt, Human
ucacuggcagugugggcuucuc

SEQ ID NO: 833991 - RNA, 19 nt, Human
uccguuguuccgaaauugc

SEQ ID NO: 833992 - RNA, 21 nt, Human
ucgauccuuacccuggacaug

SEQ ID NO: 833993 - RNA, 23 nt, Human
ugagaaccucugguuucaugcua

SEQ ID NO: 833994 - RNA, 21 nt, Human
uggcaacacugcuucaauuuu

SEQ ID NO: 833995 - RNA, 24 nt, Human
uggggagauaaaggcaaaaagagg

SEQ ID NO: 833996 - RNA, 18 nt, Human
uguguaccagcacguaug

SEQ ID NO: 833997 - RNA, 24 nt, Human
uugcaucugcgcaggacagggaau

SEQ ID NO: 833998 - RNA, 27 nt, Human
uuuguggcaacacugcuucaauuuuuc

SEQ ID NO: 833999 - RNA, 21 nt, Human
aacacuguuuuauugucaaaa

SEQ ID NO: 834000 - RNA, 19 nt, Human
acccuggcagacaugaugg

SEQ ID NO: 834001 - RNA, 19 nt, Human
agacaugauggggggcggc

SEQ ID NO: 834002 - RNA, 19 nt, Human
aggcaguggaggggccccg

SEQ ID NO: 834003 - RNA, 20 nt, Human
aggcaguggaggggccccgg

SEQ ID NO: 834004 - RNA, 22 nt, Human
aggccagugagagcgaucagcu

SEQ ID NO: 834005 - RNA, 18 nt, Human
aggggcugggugggucag

SEQ ID NO: 834006 - RNA, 21 nt, Human
aggggcugggugggucagagg

SEQ ID NO: 834007 - RNA, 24 nt, Human
caacacaaccagcccacucugccc

SEQ ID NO: 834008 - RNA, 18 nt, Human
cagcacccugagaacugc

SEQ ID NO: 834009 - RNA, 23 nt, Human
ccccuggcucaucugcagcaggg

SEQ ID NO: 834010 - RNA, 25 nt, Human
cucugcccugagaaggcuauggggc

SEQ ID NO: 834011 - RNA, 19 nt, Human
cugagccaggcaguggagg

SEQ ID NO: 834012 - RNA, 22 nt, Human
cugagccaggcaguggaggggc

SEQ ID NO: 834013 - RNA, 30 nt, Human
gaacugcuggggcuaccacaggggcugggu

SEQ ID NO: 834014 - RNA, 18 nt, Human
gagcugggccuaggcucc

SEQ ID NO: 834015 - RNA, 18 nt, Human
gcaguggaggggccccgg

SEQ ID NO: 834016 - RNA, 21 nt, Human
ggccagugagagcgaucagcu

SEQ ID NO: 834017 - RNA, 21 nt, Human
ggcgggggagcacccuggcag

SEQ ID NO: 834018 - RNA, 21 nt, Human
ggggcugggugggucagaggu

SEQ ID NO: 834019 - RNA, 25 nt, Human
uauggacaaugggugucuggggucu

SEQ ID NO: 834020 - RNA, 22 nt, Human
ucagcacccugagaacugcugg

SEQ ID NO: 834021 - RNA, 21 nt, Human
ucuggggucugugggagagag

SEQ ID NO: 834022 - RNA, 20 nt, Human
ugagaaggcuauggacaaug

SEQ ID NO: 834023 - RNA, 23 nt, Human
ugagccaggcaguggaggggccc

SEQ ID NO: 834024 - RNA, 18 nt, Human
ugauggggggcggcggca

SEQ ID NO: 834025 - RNA, 18 nt, Human
ugcccugagaaggcuaug

SEQ ID NO: 834026 - RNA, 21 nt, Human
ugcuggggcuaccacaggggc

SEQ ID NO: 834027 - RNA, 22 nt, Human
uggggcuaccacaggggcuggg

SEQ ID NO: 834028 - RNA, 22 nt, Human
uggggcuaccacaggggcuggg

SEQ ID NO: 834029 - RNA, 19 nt, Human
ugggugggucagagguaug

SEQ ID NO: 834030 - RNA, 18 nt, Human
aaaaguucagcaguggca

SEQ ID NO: 834031 - RNA, 20 nt, Human
aaacugaaauacaaaguuuc

SEQ ID NO: 834032 - RNA, 21 nt, Human
aaagacaggagagaggcaaag

SEQ ID NO: 834033 - RNA, 22 nt, Human
aaagguuccagcccuguccaca

SEQ ID NO: 834034 - RNA, 22 nt, Human
aaggcugcagcuaacacagguu

SEQ ID NO: 834035 - RNA, 26 nt, Human
agacaggagagaggcaaaggggaccc

SEQ ID NO: 834036 - RNA, 19 nt, Human
agagcagacaaagacagga

SEQ ID NO: 834037 - RNA, 24 nt, Human
aggcugcagcuaacacaugugucu

SEQ ID NO: 834038 - RNA, 20 nt, Human
aguaaaccacuuauuucuac

SEQ ID NO: 834039 - RNA, 19 nt, Human
aguguuuguuaaaaguuca

SEQ ID NO: 834040 - RNA, 22 nt, Human
caacaagcgugguaaagguucc

SEQ ID NO: 834041 - RNA, 21 nt, Human
cagugcguggcgcggcuggcg

SEQ ID NO: 834042 - RNA, 21 nt, Human
ccaccgagcgagggugcggcc

SEQ ID NO: 834043 - RNA, 19 nt, Human
cccagagaugcagucggcu

SEQ ID NO: 834044 - RNA, 19 nt, Human
ccgccaccuccaaccaguu

SEQ ID NO: 834045 - RNA, 20 nt, Human
ccggcgaaggcggcggcguu

SEQ ID NO: 834046 - RNA, 18 nt, Human
ccgggccggcccggcggg

SEQ ID NO: 834047 - RNA, 18 nt, Human
ccgggccgggguggcugc

SEQ ID NO: 834048 - RNA, 23 nt, Human
ccuugcgccagucccgggccggg

SEQ ID NO: 834049 - RNA, 19 nt, Human
cgccgcuugcccagagaug

SEQ ID NO: 834050 - RNA, 20 nt, Human
cguggcucagggaggaggcg

SEQ ID NO: 834051 - RNA, 23 nt, Human
cuacuuucuuucuuucucaauga

SEQ ID NO: 834052 - RNA, 24 nt, Human
cugcagcggccgccaccuccaacc

SEQ ID NO: 834053 - RNA, 20 nt, Human
gacaaagacaggagagaggc

SEQ ID NO: 834054 - RNA, 24 nt, Human
gacaaagacaggagagaggcaaag

SEQ ID NO: 834055 - RNA, 22 nt, Human
gacuuggcucgcguugcugcgg

SEQ ID NO: 834056 - RNA, 20 nt, Human
gcccagagaugcagucggcu

SEQ ID NO: 834057 - RNA, 24 nt, Human
gcguggcgcggcuggcgucuucgg

SEQ ID NO: 834058 - RNA, 26 nt, Human
uacaaaguuucaaauguuuacaaugg

SEQ ID NO: 834059 - RNA, 24 nt, Human
uacuuucuuucuuucucaaugaca

SEQ ID NO: 834060 - RNA, 22 nt, Human
ugcccaccugggaccgggccgg

SEQ ID NO: 834061 - RNA, 21 nt, Human
ugcccgcugccagggcugcag

SEQ ID NO: 834062 - RNA, 19 nt, Human
uggaucaccuaaacucaaa

SEQ ID NO: 834063 - RNA, 25 nt, Human
uggaucaccuaaacucaaauuauuu

SEQ ID NO: 834064 - RNA, 22 nt, Human
uggcucagggaggaggcguugg

SEQ ID NO: 834065 - RNA, 18 nt, Human
ugggugcguaugcuuagg

SEQ ID NO: 834066 - RNA, 23 nt, Human
uguaguguuuguuaaaaguucag

SEQ ID NO: 834067 - RNA, 19 nt, Human
uucaaaaggcugcagcuaa

SEQ ID NO: 834068 - RNA, 20 nt, Human
uuggcucgcguugcugcggc

SEQ ID NO: 834069 - RNA, 21 nt, Human
uuuuuuuuuuuuuuuuuccau

SEQ ID NO: 834070 - RNA, 25 nt, Human
uuuuuuuuuuuuuuuuuuuccaugg

SEQ ID NO: 834071 - RNA, 18 nt, Human
agggguggccaggcccag

SEQ ID NO: 834072 - RNA, 21 nt, Human
ccucucagagcugggagcggg

SEQ ID NO: 834073 - RNA, 22 nt, Human
cgggacggcucuccgcccacuu

SEQ ID NO: 834074 - RNA, 21 nt, Human
cggucagggugggcugcggga

SEQ ID NO: 834075 - RNA, 18 nt, Human
gucagucccggucagggu

SEQ ID NO: 834076 - RNA, 24 nt, Human
gucagucccggucagggugggcug

SEQ ID NO: 834077 - RNA, 21 nt, Human
gucccggucagggugggcugc

SEQ ID NO: 834078 - RNA, 22 nt, Human
ucagagcugggagcgggguccc

SEQ ID NO: 834079 - RNA, 24 nt, Human
uuuuuuuuuuuuuuuuugccacaa

SEQ ID NO: 834080 - RNA, 27 nt, Human
uuuuuuuuuuuuuuuuuuuuuuugggg

SEQ ID NO: 834081 - RNA, 23 nt, Human
aaacagaaagcaaaacaacccca

SEQ ID NO: 834082 - RNA, 19 nt, Human
aacccucagccgagcacag

SEQ ID NO: 834083 - RNA, 27 nt, Human
aagcaaaacaaccccaaagccuuucgg

SEQ ID NO: 834084 - RNA, 20 nt, Human
aagggaagguuaauggaaaa

SEQ ID NO: 834085 - RNA, 18 nt, Human
accuggggacaaagaggc

SEQ ID NO: 834086 - RNA, 18 nt, Human
agaaagcaaaacaacccc

SEQ ID NO: 834087 - RNA, 20 nt, Human
agagaggaggcagagcgugu

SEQ ID NO: 834088 - RNA, 19 nt, Human
agagcgccacaaaucacaa

SEQ ID NO: 834089 - RNA, 23 nt, Human
agcaaaacaaccccaaaagucau

SEQ ID NO: 834090 - RNA, 23 nt, Human
agcagaaacagaaagcaaaacaa

SEQ ID NO: 834091 - RNA, 32 nt, Human
agcagaaacagaaagcaaaacaaccccaaaag

SEQ ID NO: 834092 - RNA, 19 nt, Human
aggaaggacaagccaagga

SEQ ID NO: 834093 - RNA, 24 nt, Human
aggacaagccaaggaacagagcuu

SEQ ID NO: 834094 - RNA, 21 nt, Human
aggcaaaacaaagcuucuccc

SEQ ID NO: 834095 - RNA, 18 nt, Human
aggcagagcgugugugag

SEQ ID NO: 834096 - RNA, 24 nt, Human
aggcauuuaacacaacaggaaaau

SEQ ID NO: 834097 - RNA, 19 nt, Human
caaggaacagagcuucucu

SEQ ID NO: 834098 - RNA, 18 nt, Human
cacagggcugcuucugca

SEQ ID NO: 834099 - RNA, 24 nt, Human
caccgaauccaccacacaccccuu

SEQ ID NO: 834100 - RNA, 23 nt, Human
cagaaagcaaaacaaccccaaaa

SEQ ID NO: 834101 - RNA, 21 nt, Human
cagcagaaacagaaagcaaaa

SEQ ID NO: 834102 - RNA, 22 nt, Human
caggcaaaacaaagcuucuccc

SEQ ID NO: 834103 - RNA, 20 nt, Human
cagucagccuucuccugccu

SEQ ID NO: 834104 - RNA, 23 nt, Human
cagugagagaugccagcggaugg

SEQ ID NO: 834105 - RNA, 25 nt, Human
cccggcggcggcggcggcggcagcg

SEQ ID NO: 834106 - RNA, 21 nt, Human
ccgcgaacggagagcgccaca

SEQ ID NO: 834107 - RNA, 26 nt, Human
ccuacaaugcuccgcaguucacagcc

SEQ ID NO: 834108 - RNA, 23 nt, Human
ccuucggcccggcggcggcggcg

SEQ ID NO: 834109 - RNA, 20 nt, Human
cgcgaacggagagcgccaca

SEQ ID NO: 834110 - RNA, 22 nt, Human
cggcggcagcggccgcuuggag

SEQ ID NO: 834111 - RNA, 21 nt, Human
cucggaagcuuccuucccggg

SEQ ID NO: 834112 - RNA, 23 nt, Human
cucuacacagaaucccaguacuu

SEQ ID NO: 834113 - RNA, 23 nt, Human
cugagaacccucagccgagcaca

SEQ ID NO: 834114 - RNA, 19 nt, Human
cugagccagccaggcgccu

SEQ ID NO: 834115 - RNA, 19 nt, Human
cugcauuggccugagccag

SEQ ID NO: 834116 - RNA, 30 nt, Human
cuucggcccggcggcggcggcggcggcaac

SEQ ID NO: 834117 - RNA, 19 nt, Human
cuucugcaggcaaaacaaa

SEQ ID NO: 834118 - RNA, 27 nt, Human
gaaacagaaagcaaaacaaccccaaaa

SEQ ID NO: 834119 - RNA, 19 nt, Human
gacaagccaaggaacagag

SEQ ID NO: 834120 - RNA, 24 nt, Human
gaugcgcgcgugcgggagagagga

SEQ ID NO: 834121 - RNA, 22 nt, Human
gcaaaacaaagcuucucccuuc

SEQ ID NO: 834122 - RNA, 22 nt, Human
gcaaaacaaccccaaaagucau

SEQ ID NO: 834123 - RNA, 21 nt, Human
gccaggcgccuacaaugcucc

SEQ ID NO: 834124 - RNA, 20 nt, Human
gcgggagagaggaggcagag

SEQ ID NO: 834125 - RNA, 25 nt, Human
gcguaagaagggaagguuaauggaa

SEQ ID NO: 834126 - RNA, 24 nt, Human
ggaaauucuucagcucaaugaguc

SEQ ID NO: 834127 - RNA, 23 nt, Human
ggaaggacaagccaaggaacaga

SEQ ID NO: 834128 - RNA, 20 nt, Human
ggcccggcggcggcggcggc

SEQ ID NO: 834129 - RNA, 22 nt, Human
ggcccggcggcggcggcggcgg

SEQ ID NO: 834130 - RNA, 18 nt, Human
ggcggcggcagcggccgc

SEQ ID NO: 834131 - RNA, 25 nt, Human
gggaacaauaaagcaacgaauuggc

SEQ ID NO: 834132 - RNA, 19 nt, Human
gggaagguuaauggaaaag

SEQ ID NO: 834133 - RNA, 27 nt, Human
guuccucggaagcuuccuucccgggac

SEQ ID NO: 834134 - RNA, 21 nt, Human
uaacacaacaggaaaauacca

SEQ ID NO: 834135 - RNA, 18 nt, Human
ucacagccagcugagaac

SEQ ID NO: 834136 - RNA, 20 nt, Human
ucacauaaaucacaucuauu

SEQ ID NO: 834137 - RNA, 18 nt, Human
ucaccgaauccaccacac

SEQ ID NO: 834138 - RNA, 18 nt, Human
ucagcagaaacagaaagc

SEQ ID NO: 834139 - RNA, 21 nt, Human
ucagcagaaacagaaagcaaa

SEQ ID NO: 834140 - RNA, 22 nt, Human
ucagccuucuccugccuggagc

SEQ ID NO: 834141 - RNA, 21 nt, Human
uccucggcucuacacagaauc

SEQ ID NO: 834142 - RNA, 18 nt, Human
ucgaagcugguucugugg

SEQ ID NO: 834143 - RNA, 19 nt, Human
ucggcccggcggcggcggc

SEQ ID NO: 834144 - RNA, 21 nt, Human
ugccuggagcaggauguggaa

SEQ ID NO: 834145 - RNA, 21 nt, Human
ugcugagcagcaccuggggac

SEQ ID NO: 834146 - RNA, 18 nt, Human
uggaagguggagggaugc

SEQ ID NO: 834147 - RNA, 24 nt, Human
uggucgcccgguaaggaagccugc

SEQ ID NO: 834148 - RNA, 22 nt, Human
uuaaucaccgaauccaccacac

SEQ ID NO: 834149 - RNA, 20 nt, Human
uuuuaacuuuuaugcugagc

SEQ ID NO: 834150 - RNA, 19 nt, Human
uuuucucugggguucuguc

SEQ ID NO: 834151 - RNA, 18 nt, Human
aaacagagcagggaaacc

SEQ ID NO: 834152 - RNA, 24 nt, Human
aagaagccuagggcagagcuugua

SEQ ID NO: 834153 - RNA, 26 nt, Human
acaaaguccugaaacuacaaugagag

SEQ ID NO: 834154 - RNA, 19 nt, Human
acacauacauaaguacaua

SEQ ID NO: 834155 - RNA, 25 nt, Human
acagaaucacaaauauauacaaaac

SEQ ID NO: 834156 - RNA, 23 nt, Human
agaaucacaaauauauacaaaac

SEQ ID NO: 834157 - RNA, 24 nt, Human
agaaucacaaauauauacaaaaca

SEQ ID NO: 834158 - RNA, 18 nt, Human
agacaguccccugaccaa

SEQ ID NO: 834159 - RNA, 22 nt, Human
agagaaaaaacuccaaaaaugu

SEQ ID NO: 834160 - RNA, 23 nt, Human
agagaaacagcagacuaauaagu

SEQ ID NO: 834161 - RNA, 22 nt, Human
agcagggaaaccaaagagccaa

SEQ ID NO: 834162 - RNA, 21 nt, Human
agggaucacuuuuauuucaaa

SEQ ID NO: 834163 - RNA, 20 nt, Human
aguauaaaguaagaagccua

SEQ ID NO: 834164 - RNA, 26 nt, Human
augcaucacacauacauaaguacaua

SEQ ID NO: 834165 - RNA, 24 nt, Human
caaacaauuaaauacaaaccaaua

SEQ ID NO: 834166 - RNA, 21 nt, Human
caaaguccugaaacuacaaug

SEQ ID NO: 834167 - RNA, 21 nt, Human
cacacagcagcagcauugaag

SEQ ID NO: 834168 - RNA, 27 nt, Human
cacagaaucacaaauauauacaaaaca

SEQ ID NO: 834169 - RNA, 23 nt, Human
caccuaggccaccugagcggcag

SEQ ID NO: 834170 - RNA, 19 nt, Human
cacggucacuauaccuagc

SEQ ID NO: 834171 - RNA, 28 nt, Human
cacuuuuauuucaaacaauuaaauacaa

SEQ ID NO: 834172 - RNA, 21 nt, Human
cagcagcagcauugaagaaaa

SEQ ID NO: 834173 - RNA, 18 nt, Human
ccagagaaaaaacuccaa

SEQ ID NO: 834174 - RNA, 22 nt, Human
cccagagaaaaaacuccaaaaa

SEQ ID NO: 834175 - RNA, 23 nt, Human
cccagagaaaaaacuccaaaaau

SEQ ID NO: 834176 - RNA, 19 nt, Human
cggaauggcuguaucacag

SEQ ID NO: 834177 - RNA, 21 nt, Human
cuccaggcaugacagacaguc

SEQ ID NO: 834178 - RNA, 21 nt, Human
cugacaaaguccugaaacuac

SEQ ID NO: 834179 - RNA, 20 nt, Human
gagaaacagcagacuaauaa

SEQ ID NO: 834180 - RNA, 23 nt, Human
uagcucuaaaauuuuucagagaa

SEQ ID NO: 834181 - RNA, 21 nt, Human
uauauacaaaacaaaguaucg

SEQ ID NO: 834182 - RNA, 24 nt, Human
uaugcagacucacacauguacgga

SEQ ID NO: 834183 - RNA, 22 nt, Human
ucaaaauaacauguagacacag

SEQ ID NO: 834184 - RNA, 26 nt, Human
ucaaaauaacauguagacacagaauc

SEQ ID NO: 834185 - RNA, 20 nt, Human
ucaaacaauuaaauacaaac

SEQ ID NO: 834186 - RNA, 18 nt, Human
ucacggucacuauaccua

SEQ ID NO: 834187 - RNA, 21 nt, Human
uccaaaaauguccaauaacca

SEQ ID NO: 834188 - RNA, 23 nt, Human
ugaacaugcaucacacauacaua

SEQ ID NO: 834189 - RNA, 24 nt, Human
ugaauccuagaucugaugacuccu

SEQ ID NO: 834190 - RNA, 21 nt, Human
ugaguauaaaguaagaagccu

SEQ ID NO: 834191 - RNA, 18 nt, Human
ugcacagaguuaugguca

SEQ ID NO: 834192 - RNA, 19 nt, Human
uggaaaaugaugaauccua

SEQ ID NO: 834193 - RNA, 20 nt, Human
uggcagaagggaaagauggg

SEQ ID NO: 834194 - RNA, 19 nt, Human
uggcuucacacagcagcag

SEQ ID NO: 834195 - RNA, 18 nt, Human
uguccaauaaccaagugc

SEQ ID NO: 834196 - RNA, 23 nt, Human
uuaugcagacucacacauguacg

SEQ ID NO: 834197 - RNA, 21 nt, Human
uucacggucacuauaccuagc

SEQ ID NO: 834198 - RNA, 18 nt, Human
uucgaaaguuaugcagac

SEQ ID NO: 834199 - RNA, 19 nt, Human
uuucauuuauuuuucccuc

SEQ ID NO: 834200 - RNA, 21 nt, Human
uuuuuuuuuuuuauagggauc

SEQ ID NO: 834201 - RNA, 25 nt, Human
uuuuuuuuuuuuuuuuuuauagggg

SEQ ID NO: 834202 - RNA, 24 nt, Human
auccaaguuacaaacaauuuaaaa

SEQ ID NO: 834203 - RNA, 22 nt, Human
auuagugauuauaauuuuuccu

SEQ ID NO: 834204 - RNA, 19 nt, Human
caaguuacaaacaauuuaa

SEQ ID NO: 834205 - RNA, 22 nt, Human
ccugcacaucacugugcauaua

SEQ ID NO: 834206 - RNA, 24 nt, Human
ccuuuccccaaaagaaaaaaaaaa

SEQ ID NO: 834207 - RNA, 22 nt, Human
cuuuagcaggcaagcaauuugu

SEQ ID NO: 834208 - RNA, 21 nt, Human
uaaaaagaaccaagauuagug

SEQ ID NO: 834209 - RNA, 19 nt, Human
uaaaacccuacaaacauug

SEQ ID NO: 834210 - RNA, 20 nt, Human
uaaaacccuacaaacauugg

SEQ ID NO: 834211 - RNA, 26 nt, Human
uauaauuuuuccuucccuuuccccaa

SEQ ID NO: 834212 - RNA, 21 nt, Human
uccccaaaagaaaaaaaaaaa

SEQ ID NO: 834213 - RNA, 26 nt, Human
ucccuuuccccaaaagaaaaaaaaaa

SEQ ID NO: 834214 - RNA, 19 nt, Human
uccugcacaucacugugca

SEQ ID NO: 834215 - RNA, 21 nt, Human
uccugcacaucacugugcaua

SEQ ID NO: 834216 - RNA, 20 nt, Human
ugcacaucacugugcauaua

SEQ ID NO: 834217 - RNA, 21 nt, Human
uuagugauuauaauuuuuccu

SEQ ID NO: 834218 - RNA, 22 nt, Human
aaaaacauuuaaaaaaugacug

SEQ ID NO: 834219 - RNA, 22 nt, Human
aauaugaaaguacacauaugug

SEQ ID NO: 834220 - RNA, 20 nt, Human
aaugaauuugauacaucauc

SEQ ID NO: 834221 - RNA, 21 nt, Human
acacugagacuuccugugcac

SEQ ID NO: 834222 - RNA, 18 nt, Human
acaggguuucaccauguu

SEQ ID NO: 834223 - RNA, 23 nt, Human
acaggguuucaccauguuggcca

SEQ ID NO: 834224 - RNA, 24 nt, Human
acaggguuucaccauguuggccag

SEQ ID NO: 834225 - RNA, 20 nt, Human
accacgcccggccaaaaaca

SEQ ID NO: 834226 - RNA, 18 nt, Human
accauguuggccaggcug

SEQ ID NO: 834227 - RNA, 24 nt, Human
accgcgccugccgccugccucagc

SEQ ID NO: 834228 - RNA, 18 nt, Human
acuuacauuggcagugga

SEQ ID NO: 834229 - RNA, 24 nt, Human
agaaaagaccccuucacacugaga

SEQ ID NO: 834230 - RNA, 19 nt, Human
agauuacaggcaugagcca

SEQ ID NO: 834231 - RNA, 22 nt, Human
agauuacaggcaugagccacca

SEQ ID NO: 834232 - RNA, 24 nt, Human
aggugauccaccugccuuggccuc

SEQ ID NO: 834233 - RNA, 18 nt, Human
aguggcugggauuacagg

SEQ ID NO: 834234 - RNA, 19 nt, Human
aguggcugggauuacaggc

SEQ ID NO: 834235 - RNA, 19 nt, Human
aguggcugggauuacaggc

SEQ ID NO: 834236 - RNA, 19 nt, Human
aucucuuacaaaguaaauu

SEQ ID NO: 834237 - RNA, 22 nt, Human
caagcgauucuccugccucagc

SEQ ID NO: 834238 - RNA, 24 nt, Human
caauguacugagauuacaggcaug

SEQ ID NO: 834239 - RNA, 24 nt, Human
caauuuuuuguauuuuuaguagag

SEQ ID NO: 834240 - RNA, 25 nt, Human
caauuuuuuguauuuuuaguagaga

SEQ ID NO: 834241 - RNA, 21 nt, Human
caccauguuggccaggcuggc

SEQ ID NO: 834242 - RNA, 24 nt, Human
caccauguuggccaggcuggccuc

SEQ ID NO: 834243 - RNA, 27 nt, Human
caccauguuggccaggcuggccucgaa

SEQ ID NO: 834244 - RNA, 18 nt, Human
cacugcaaucucugccuc

SEQ ID NO: 834245 - RNA, 20 nt, Human
cacugcaaucucugccucgc

SEQ ID NO: 834246 - RNA, 23 nt, Human
cagcccgccggggagcggccucg

SEQ ID NO: 834247 - RNA, 21 nt, Human
caggcgcccaccaucacgccc

SEQ ID NO: 834248 - RNA, 24 nt, Human
caggguuucaccauguuggccagg

SEQ ID NO: 834249 - RNA, 20 nt, Human
cauggaaaucuacaaguaac

SEQ ID NO: 834250 - RNA, 24 nt, Human
cauguuggccaggcuggccucgaa

SEQ ID NO: 834251 - RNA, 24 nt, Human
ccaauguacugagauuacaggcau

SEQ ID NO: 834252 - RNA, 18 nt, Human
ccaccaucacgcccggcc

SEQ ID NO: 834253 - RNA, 18 nt, Human
ccaggcuggaguacaaug

SEQ ID NO: 834254 - RNA, 24 nt, Human
cccacauuccuaucagccuaaggc

SEQ ID NO: 834255 - RNA, 25 nt, Human
ccccucgcgggccgggccagggggc

SEQ ID NO: 834256 - RNA, 22 nt, Human
cccggccaaaaacauuuaaaaa

SEQ ID NO: 834257 - RNA, 18 nt, Human
ccgccggggagcggccuc

SEQ ID NO: 834258 - RNA, 30 nt, Human
ccggccaaaaacauuuaaaaaaugacuguu

SEQ ID NO: 834259 - RNA, 21 nt, Human
ccucagccucuggaguggcug

SEQ ID NO: 834260 - RNA, 24 nt, Human
ccucgcagguucaagcgauucucc

SEQ ID NO: 834261 - RNA, 24 nt, Human
ccugccucagccucuggaguggcu

SEQ ID NO: 834262 - RNA, 21 nt, Human
ccugccuuggccucccaaugu

SEQ ID NO: 834263 - RNA, 23 nt, Human
ccugugcaccgcgccugccgccu

SEQ ID NO: 834264 - RNA, 18 nt, Human
cgccggggagcggccucg

SEQ ID NO: 834265 - RNA, 20 nt, Human
cgcuaagugaacgcucgcgc

SEQ ID NO: 834266 - RNA, 24 nt, Human
cgcucuuguuguccaggcuggagu

SEQ ID NO: 834267 - RNA, 26 nt, Human
cggccaaaaacauuuaaaaaaugacu

SEQ ID NO: 834268 - RNA, 18 nt, Human
cucacugcaaucucugcc

SEQ ID NO: 834269 - RNA, 19 nt, Human
cucacugcaaucucugccu

SEQ ID NO: 834270 - RNA, 24 nt, Human
cucaggugauccaccugccuuggc

SEQ ID NO: 834271 - RNA, 21 nt, Human
cucccaauguacugagauuac

SEQ ID NO: 834272 - RNA, 19 nt, Human
cucggcccgcuccacccgg

SEQ ID NO: 834273 - RNA, 19 nt, Human
cucuguccgcggagacgga

SEQ ID NO: 834274 - RNA, 21 nt, Human
cucuuguuguccaggcuggag

SEQ ID NO: 834275 - RNA, 24 nt, Human
cugcaaucucugccucgcagguuc

SEQ ID NO: 834276 - RNA, 21 nt, Human
cuggaguggcugggauuacag

SEQ ID NO: 834277 - RNA, 23 nt, Human
cuugaccucaggugauccaccug

SEQ ID NO: 834278 - RNA, 24 nt, Human
gaccucaggugauccaccugccuu

SEQ ID NO: 834279 - RNA, 18 nt, Human
gauuacaggcaugagcca

SEQ ID NO: 834280 - RNA, 22 nt, Human
gauuacaggcaugagccaccac

SEQ ID NO: 834281 - RNA, 20 nt, Human
gauucuccugccucagccuc

SEQ ID NO: 834282 - RNA, 21 nt, Human
gccaaaaacauuuaaaaaaug

SEQ ID NO: 834283 - RNA, 23 nt, Human
gcccggccaauuuuuuguauuuu

SEQ ID NO: 834284 - RNA, 20 nt, Human
gccucagccucuggaguggc

SEQ ID NO: 834285 - RNA, 21 nt, Human
gcucacugcaaucucugccuc

SEQ ID NO: 834286 - RNA, 19 nt, Human
gcuggaguacaauggcuug

SEQ ID NO: 834287 - RNA, 20 nt, Human
gggcucggcccgcuccaccc

SEQ ID NO: 834288 - RNA, 22 nt, Human
ggguuucaccauguuggccagg

SEQ ID NO: 834289 - RNA, 23 nt, Human
guacauuuuaaaaucaaauauga

SEQ ID NO: 834290 - RNA, 21 nt, Human
guacugagauuacaggcauga

SEQ ID NO: 834291 - RNA, 19 nt, Human
guccaggcuggaguacaau

SEQ ID NO: 834292 - RNA, 24 nt, Human
gugauccaccugccuuggccuccc

SEQ ID NO: 834293 - RNA, 18 nt, Human
guggcugggauuacaggc

SEQ ID NO: 834294 - RNA, 19 nt, Human
uaaagccccucaugcuuuc

SEQ ID NO: 834295 - RNA, 23 nt, Human
uacaggcaugagccaccacgccc

SEQ ID NO: 834296 - RNA, 22 nt, Human
uacaucaucagcaugaagugaa

SEQ ID NO: 834297 - RNA, 22 nt, Human
uagagacaggguuucaccaugu

SEQ ID NO: 834298 - RNA, 24 nt, Human
uaguagagacaggguuucaccaug

SEQ ID NO: 834299 - RNA, 25 nt, Human
uaguagagacaggguuucaccaugu

SEQ ID NO: 834300 - RNA, 23 nt, Human
uauauuuggucaagaaaacccac

SEQ ID NO: 834301 - RNA, 19 nt, Human
ucacugcaaucucugccuc

SEQ ID NO: 834302 - RNA, 20 nt, Human
ucacugcaaucucugccucg

SEQ ID NO: 834303 - RNA, 24 nt, Human
ucacugcaaucucugccucgcagg

SEQ ID NO: 834304 - RNA, 18 nt, Human
ucagccucuggaguggcu

SEQ ID NO: 834305 - RNA, 21 nt, Human
ucaggugauccaccugccuug

SEQ ID NO: 834306 - RNA, 24 nt, Human
ucccaauguacugagauuacaggc

SEQ ID NO: 834307 - RNA, 21 nt, Human
ucgcagguucaagcgauucuc

SEQ ID NO: 834308 - RNA, 24 nt, Human
ucgcagguucaagcgauucuccug

SEQ ID NO: 834309 - RNA, 23 nt, Human
ucgcucuuguuguccaggcugga

SEQ ID NO: 834310 - RNA, 23 nt, Human
ucuccugccucagccucuggagu

SEQ ID NO: 834311 - RNA, 24 nt, Human
ucuggaguggcugggauuacaggc

SEQ ID NO: 834312 - RNA, 19 nt, Human
ugaccucaggugauccacc

SEQ ID NO: 834313 - RNA, 24 nt, Human
ugaccucaggugauccaccugccu

SEQ ID NO: 834314 - RNA, 22 nt, Human
ugagauuacaggcaugagccac

SEQ ID NO: 834315 - RNA, 23 nt, Human
ugagauuacaggcaugagccacc

SEQ ID NO: 834316 - RNA, 24 nt, Human
ugagauuacaggcaugagccacca

SEQ ID NO: 834317 - RNA, 24 nt, Human
ugagauuacaggcaugagccacca

SEQ ID NO: 834318 - RNA, 24 nt, Human
ugccucagccucuggaguggcugg

SEQ ID NO: 834319 - RNA, 20 nt, Human
ugccuuggccucccaaugua

SEQ ID NO: 834320 - RNA, 18 nt, Human
uggcaguggagagaaaag

SEQ ID NO: 834321 - RNA, 20 nt, Human
uggcaguggagagaaaagga

SEQ ID NO: 834322 - RNA, 24 nt, Human
uggccaggcuggccucgaacucuu

SEQ ID NO: 834323 - RNA, 21 nt, Human
uggcucacugcaaucucugcc

SEQ ID NO: 834324 - RNA, 24 nt, Human
uggcucacugcaaucucugccucg

SEQ ID NO: 834325 - RNA, 21 nt, Human
ugggauuacaggcgcccacca

SEQ ID NO: 834326 - RNA, 22 nt, Human
ugggauuacaggcgcccaccau

SEQ ID NO: 834327 - RNA, 25 nt, Human
uguccaggcuggaguacaauggcuu

SEQ ID NO: 834328 - RNA, 18 nt, Human
uuaaagcaguagagcacc

SEQ ID NO: 834329 - RNA, 19 nt, Human
uuaaagcaguagagcaccu

SEQ ID NO: 834330 - RNA, 21 nt, Human
uuagaugcugauauauuuggu

SEQ ID NO: 834331 - RNA, 24 nt, Human
uuaguagagacaggguuucaccau

SEQ ID NO: 834332 - RNA, 21 nt, Human
uucaagcgauucuccugccuc

SEQ ID NO: 834333 - RNA, 23 nt, Human
uucaagcgauucuccugccucag

SEQ ID NO: 834334 - RNA, 24 nt, Human
uucaagcgauucuccugccucagc

SEQ ID NO: 834335 - RNA, 24 nt, Human
uucgcucuuguuguccaggcugga

SEQ ID NO: 834336 - RNA, 18 nt, Human
uuggcaguggagagaaaa

SEQ ID NO: 834337 - RNA, 21 nt, Human
uuucaccauguuggccaggcu

SEQ ID NO: 834338 - RNA, 22 nt, Human
uuucgcucuuguuguccaggcu

SEQ ID NO: 834339 - RNA, 24 nt, Human
uuucgcucuuguuguccaggcugg

SEQ ID NO: 834340 - RNA, 24 nt, Human
uuuuuaguagagacaggguuucac

SEQ ID NO: 834341 - RNA, 21 nt, Human
uuuuuguauuuuuaguagaga

SEQ ID NO: 834342 - RNA, 24 nt, Human
uuuuuuguauuuuuaguagagaca

SEQ ID NO: 834343 - RNA, 22 nt, Human
aaaaaauaaaaacagcauggac

SEQ ID NO: 834344 - RNA, 20 nt, Human
aaaaauaaaaacagcaugga

SEQ ID NO: 834345 - RNA, 21 nt, Human
aaaauacuuuacaagguacag

SEQ ID NO: 834346 - RNA, 19 nt, Human
aaacauagauuccccaccc

SEQ ID NO: 834347 - RNA, 19 nt, Human
aacuguguuuucagcccuu

SEQ ID NO: 834348 - RNA, 19 nt, Human
aacuguguuuucagcccuu

SEQ ID NO: 834349 - RNA, 19 nt, Human
acaauuacggagauaaaaa

SEQ ID NO: 834350 - RNA, 23 nt, Human
acuuuaggaguauuaggccugga

SEQ ID NO: 834351 - RNA, 25 nt, Human
agauaaaaaauaaaaacagcaugga

SEQ ID NO: 834352 - RNA, 18 nt, Human
aggccuccgagugcccag

SEQ ID NO: 834353 - RNA, 22 nt, Human
agugcccaguuacugaggcagc

SEQ ID NO: 834354 - RNA, 21 nt, Human
auaaaauacaaagguggcugg

SEQ ID NO: 834355 - RNA, 19 nt, Human
caaaacucaaaacaguacu

SEQ ID NO: 834356 - RNA, 18 nt, Human
cagugagcacucauagaa

SEQ ID NO: 834357 - RNA, 19 nt, Human
ccaaggccuccgagugccc

SEQ ID NO: 834358 - RNA, 21 nt, Human
ccaaucugccugcccugcccu

SEQ ID NO: 834359 - RNA, 25 nt, Human
cccaacucuuacuuuaggaguauua

SEQ ID NO: 834360 - RNA, 18 nt, Human
ccccaaggagcaucaccc

SEQ ID NO: 834361 - RNA, 21 nt, Human
ccccaaggagcaucacccagg

SEQ ID NO: 834362 - RNA, 21 nt, Human
ccccaugcaauaaagcaaguu

SEQ ID NO: 834363 - RNA, 21 nt, Human
cucuagguagggccccaagga

SEQ ID NO: 834364 - RNA, 23 nt, Human
cugucuguccuccagaacccgug

SEQ ID NO: 834365 - RNA, 22 nt, Human
cuuagugaugguagcucuccuu

SEQ ID NO: 834366 - RNA, 22 nt, Human
cuuagugaugguagcucuccuu

SEQ ID NO: 834367 - RNA, 19 nt, Human
gagaucacugaagucugaa

SEQ ID NO: 834368 - RNA, 19 nt, Human
gccaaggccuccgagugcc

SEQ ID NO: 834369 - RNA, 20 nt, Human
ggacaaaagucagucccucu

SEQ ID NO: 834370 - RNA, 20 nt, Human
guggagaaggcacuuguguu

SEQ ID NO: 834371 - RNA, 23 nt, Human
guggagaaggcacuuguguuuuc

SEQ ID NO: 834372 - RNA, 21 nt, Human
uaaaauacuuuacaagguaca

SEQ ID NO: 834373 - RNA, 26 nt, Human
uaagcagcagauaaaauacuuuacaa

SEQ ID NO: 834374 - RNA, 24 nt, Human
uacagcacaguuguauugaagaaa

SEQ ID NO: 834375 - RNA, 20 nt, Human
uagaauugcugucuguccuc

SEQ ID NO: 834376 - RNA, 21 nt, Human
uagggccccaaggagcaucac

SEQ ID NO: 834377 - RNA, 21 nt, Human
uaucucagugagcacucauag

SEQ ID NO: 834378 - RNA, 29 nt, Human
ucagcccuuagugaugguagcucuccuuu

SEQ ID NO: 834379 - RNA, 19 nt, Human
ucauuccacaaauaagcag

SEQ ID NO: 834380 - RNA, 19 nt, Human
ucccucuagguagggcccc

SEQ ID NO: 834381 - RNA, 21 nt, Human
ucccucuagguagggccccaa

SEQ ID NO: 834382 - RNA, 19 nt, Human
uccgagugcccaguuacug

SEQ ID NO: 834383 - RNA, 26 nt, Human
uccuccaaacauauaaaucugaguga

SEQ ID NO: 834384 - RNA, 19 nt, Human
uccuccagaacccgugcca

SEQ ID NO: 834385 - RNA, 21 nt, Human
ucugccugcccugcccuaccc

SEQ ID NO: 834386 - RNA, 18 nt, Human
ugaauugcaccguggaga

SEQ ID NO: 834387 - RNA, 18 nt, Human
ugccccaugcaauaaagc

SEQ ID NO: 834388 - RNA, 24 nt, Human
ugcccugcccuacccucccccuuu

SEQ ID NO: 834389 - RNA, 20 nt, Human
uggggaaaaacguugaguaa

SEQ ID NO: 834390 - RNA, 25 nt, Human
ugugucaauggacaaaagucagucg

SEQ ID NO: 834391 - RNA, 18 nt, Human
uucagcccuuagugaugg

SEQ ID NO: 834392 - RNA, 18 nt, Human
uucagcccuuagugaugg

SEQ ID NO: 834393 - RNA, 30 nt, Human
uucagcccuuagugaugguagcucuccuuu

SEQ ID NO: 834394 - RNA, 23 nt, Human
uuguauugaagaaaaaaaggacc

SEQ ID NO: 834395 - RNA, 22 nt, Human
uuuaacuguguuuucagcccuu

SEQ ID NO: 834396 - RNA, 22 nt, Human
uuuaacuguguuuucagcccuu

SEQ ID NO: 834397 - RNA, 21 nt, Human
uuuucagcccuuagugauggu

SEQ ID NO: 834398 - RNA, 21 nt, Human
uuuucagcccuuagugauggu

SEQ ID NO: 834399 - RNA, 21 nt, Human
uuuuuuuuuuuuuuuuugguu

SEQ ID NO: 834400 - RNA, 23 nt, Human
uuuuuuuuuuuuuuuuugguugg

SEQ ID NO: 834401 - RNA, 23 nt, Human
uuuuuuuuuuuuuuuuuuuuggg

SEQ ID NO: 834402 - RNA, 21 nt, Human
aaacaagacagaagcaauuga

SEQ ID NO: 834403 - RNA, 18 nt, Human
acaaaacaagacagaagc

SEQ ID NO: 834404 - RNA, 19 nt, Human
agaaacaaaacaagacaga

SEQ ID NO: 834405 - RNA, 19 nt, Human
agcagcaugaugcuugaaa

SEQ ID NO: 834406 - RNA, 22 nt, Human
aggaggcugcagccgggauucc

SEQ ID NO: 834407 - RNA, 22 nt, Human
aggcugcagccgggauuccuuc

SEQ ID NO: 834408 - RNA, 25 nt, Human
agguggaguauguauagauggucau

SEQ ID NO: 834409 - RNA, 21 nt, Human
aguagguuuccuuggugguuu

SEQ ID NO: 834410 - RNA, 24 nt, Human
aucucucuauuuuaaaauauaaag

SEQ ID NO: 834411 - RNA, 19 nt, Human
caaaacaagacagaagcaa

SEQ ID NO: 834412 - RNA, 22 nt, Human
caagacagaagcaauugauuuu

SEQ ID NO: 834413 - RNA, 22 nt, Human
cacauacucacugugucuacuc

SEQ ID NO: 834414 - RNA, 23 nt, Human
cacccgaucaguugucacacuga

SEQ ID NO: 834415 - RNA, 22 nt, Human
cacugugucuacucuacagaau

SEQ ID NO: 834416 - RNA, 21 nt, Human
caguucaacuacucuuauuua

SEQ ID NO: 834417 - RNA, 20 nt, Human
cauauuggagaagagaaggu

SEQ ID NO: 834418 - RNA, 18 nt, Human
ccauagaaccacaaaguu

SEQ ID NO: 834419 - RNA, 22 nt, Human
ccuggaacucuuuuucucaguc

SEQ ID NO: 834420 - RNA, 24 nt, Human
ccuucuuuuuccuggaacucuuuu

SEQ ID NO: 834421 - RNA, 22 nt, Human
ccuugcgugcuggauuccucag

SEQ ID NO: 834422 - RNA, 21 nt, Human
cugaggcucucaauccaguga

SEQ ID NO: 834423 - RNA, 21 nt, Human
cuuauaaaagagguccacaua

SEQ ID NO: 834424 - RNA, 18 nt, Human
gaagguggaguauguaua

SEQ ID NO: 834425 - RNA, 18 nt, Human
gagcagcauuggugaagc

SEQ ID NO: 834426 - RNA, 21 nt, Human
gagcagcauuggugaagcuua

SEQ ID NO: 834427 - RNA, 25 nt, Human
gauaugcacacaugcacgcaaucuu

SEQ ID NO: 834428 - RNA, 25 nt, Human
gauuccuucuuuuuccuggaacucu

SEQ ID NO: 834429 - RNA, 18 nt, Human
gccacaauugcauugucc

SEQ ID NO: 834430 - RNA, 21 nt, Human
gcuuucuucuucagaaauguu

SEQ ID NO: 834431 - RNA, 24 nt, Human
ggagcagcauuggugaagcuuaaa

SEQ ID NO: 834432 - RNA, 25 nt, Human
gugccacaauugcauuguccaaaaa

SEQ ID NO: 834433 - RNA, 18 nt, Human
guguaauacaacacagga

SEQ ID NO: 834434 - RNA, 20 nt, Human
uaaaggaaggcaggaggcug

SEQ ID NO: 834435 - RNA, 20 nt, Human
uacuuaaaaaaaauacagaa

SEQ ID NO: 834436 - RNA, 22 nt, Human
uauaaaggaaggcaggaggcug

SEQ ID NO: 834437 - RNA, 24 nt, Human
uauucuuuauuuagaaacaaaaca

SEQ ID NO: 834438 - RNA, 20 nt, Human
uauuugguugccacaguacc

SEQ ID NO: 834439 - RNA, 21 nt, Human
ucacaugguuguguucuugcc

SEQ ID NO: 834440 - RNA, 22 nt, Human
ucacugugucuacucuacagaa

SEQ ID NO: 834441 - RNA, 24 nt, Human
uccgauguccuugcgugcuggauu

SEQ ID NO: 834442 - RNA, 22 nt, Human
ucucuauuuuaaaauauaaagg

SEQ ID NO: 834443 - RNA, 21 nt, Human
ucuuucgcuuuuuuuuuuuuu

SEQ ID NO: 834444 - RNA, 26 nt, Human
ugaaaagcaguuucagugcuagccca

SEQ ID NO: 834445 - RNA, 21 nt, Human
ugaagcuuaaacuucucucuc

SEQ ID NO: 834446 - RNA, 24 nt, Human
ugaaguuguacauauuuccauugg

SEQ ID NO: 834447 - RNA, 20 nt, Human
ugaaugccauagaaccacaa

SEQ ID NO: 834448 - RNA, 20 nt, Human
ugauuuuaauccaaaaugua

SEQ ID NO: 834449 - RNA, 20 nt, Human
ugccauagaaccacaaaguu

SEQ ID NO: 834450 - RNA, 26 nt, Human
ugcuagcccaccuccgauguccuugc

SEQ ID NO: 834451 - RNA, 18 nt, Human
ugcuaguaaguucaauag

SEQ ID NO: 834452 - RNA, 24 nt, Human
uggcuaauauguguaauacaacac

SEQ ID NO: 834453 - RNA, 21 nt, Human
ugucaaaugaugaaugccaua

SEQ ID NO: 834454 - RNA, 22 nt, Human
ugucacacugacauggugcugc

SEQ ID NO: 834455 - RNA, 19 nt, Human
uguccaaaaaugucaugca

SEQ ID NO: 834456 - RNA, 30 nt, Human
uguuuguuuguuuuguuuuguuuuuaauuu

SEQ ID NO: 834457 - RNA, 22 nt, Human
uuacuuaaaaaaaauacagaaa

SEQ ID NO: 834458 - RNA, 21 nt, Human
uuagcacaacugcagucuuuc

SEQ ID NO: 834459 - RNA, 18 nt, Human
uucaauaggagcugauug

SEQ ID NO: 834460 - RNA, 22 nt, Human
uugccacaguaccccuugaagc

SEQ ID NO: 834461 - RNA, 23 nt, Human
uuggugaagcuuaaacuucucuc

SEQ ID NO: 834462 - RNA, 20 nt, Human
uuguuuguuuguuuuguuuu

SEQ ID NO: 834463 - RNA, 18 nt, Human
uuuguuuuguuuuguuuu

SEQ ID NO: 834464 - RNA, 24 nt, Human
uuuuuccuggaacucuuuuucuca

SEQ ID NO: 834465 - RNA, 22 nt, Human
uuuuuuguucauuuuuggagua

SEQ ID NO: 834466 - RNA, 19 nt, Human
uuuuuuuuuuuuuguucau

SEQ ID NO: 834467 - RNA, 21 nt, Human
aaaaaaaggcuccacuuggug

SEQ ID NO: 834468 - RNA, 20 nt, Human
aaacaguaguaaacaauuuc

SEQ ID NO: 834469 - RNA, 25 nt, Human
aaccaaaaaauaaauaguguguacu

SEQ ID NO: 834470 - RNA, 19 nt, Human
aagcugaccgggagcccuc

SEQ ID NO: 834471 - RNA, 20 nt, Human
aauaaaaauaacgggaggga

SEQ ID NO: 834472 - RNA, 22 nt, Human
acaagaaagagcuguaaacagc

SEQ ID NO: 834473 - RNA, 25 nt, Human
accagaggcgcgagcccuccuccuc

SEQ ID NO: 834474 - RNA, 18 nt, Human
accccacacccaggugcc

SEQ ID NO: 834475 - RNA, 18 nt, Human
acccggagaccgggcuuc

SEQ ID NO: 834476 - RNA, 21 nt, Human
acuggauggcaggacaagaaa

SEQ ID NO: 834477 - RNA, 18 nt, Human
agaaagggguggggagga

SEQ ID NO: 834478 - RNA, 18 nt, Human
agaacacaacgacagcag

SEQ ID NO: 834479 - RNA, 18 nt, Human
agagaugggucaggaagg

SEQ ID NO: 834480 - RNA, 21 nt, Human
agagucuggaggcgucuccuc

SEQ ID NO: 834481 - RNA, 18 nt, Human
agaucuggaggcuggacc

SEQ ID NO: 834482 - RNA, 22 nt, Human
agcagguuaggaaacuccacaa

SEQ ID NO: 834483 - RNA, 19 nt, Human
agccaggggcuggcagcag

SEQ ID NO: 834484 - RNA, 21 nt, Human
aggacaagaaagagcuguaaa

SEQ ID NO: 834485 - RNA, 19 nt, Human
aggcagcaggccccccagg

SEQ ID NO: 834486 - RNA, 20 nt, Human
agggacaggggaccagagaa

SEQ ID NO: 834487 - RNA, 21 nt, Human
auaaaaauaacgggagggaaa

SEQ ID NO: 834488 - RNA, 21 nt, Human
cacagagggaaggacgaggga

SEQ ID NO: 834489 - RNA, 19 nt, Human
cacagaucccgagugaccc

SEQ ID NO: 834490 - RNA, 24 nt, Human
cacccaggugcccaugccgagggc

SEQ ID NO: 834491 - RNA, 19 nt, Human
cacggcccccaggcagcag

SEQ ID NO: 834492 - RNA, 21 nt, Human
cacugaccgagguucuggaac

SEQ ID NO: 834493 - RNA, 24 nt, Human
cagacgcgugcucgcucugggccc

SEQ ID NO: 834494 - RNA, 19 nt, Human
cagagcacacagagggaag

SEQ ID NO: 834495 - RNA, 22 nt, Human
cagaggcgcgagcccuccuccu

SEQ ID NO: 834496 - RNA, 18 nt, Human
cagcacagcgagggucuc

SEQ ID NO: 834497 - RNA, 21 nt, Human
cagcacagcgagggucucugg

SEQ ID NO: 834498 - RNA, 21 nt, Human
cagcuccaaaauccugccugc

SEQ ID NO: 834499 - RNA, 19 nt, Human
caggggaccagagaaagcc

SEQ ID NO: 834500 - RNA, 19 nt, Human
ccagcuccaaaauccugcc

SEQ ID NO: 834501 - RNA, 23 nt, Human
cccaggccaccccggcccaggga

SEQ ID NO: 834502 - RNA, 23 nt, Human
ccccacacccaggugcccaugcc

SEQ ID NO: 834503 - RNA, 18 nt, Human
ccccuggucuuggcaucu

SEQ ID NO: 834504 - RNA, 22 nt, Human
cccgagugacccaguucagucc

SEQ ID NO: 834505 - RNA, 20 nt, Human
ccucauacucggcuugucuc

SEQ ID NO: 834506 - RNA, 27 nt, Human
ccucccacgaaccaggcugauagggau

SEQ ID NO: 834507 - RNA, 22 nt, Human
ccuuuaacaaaugagaaaagaa

SEQ ID NO: 834508 - RNA, 24 nt, Human
cgagggucucuggccacggccccc

SEQ ID NO: 834509 - RNA, 23 nt, Human
cggcccccaggcagcaggccccc

SEQ ID NO: 834510 - RNA, 22 nt, Human
cucuccacaacucccuuucaga

SEQ ID NO: 834511 - RNA, 23 nt, Human
cucuccacaacucccuuucagag

SEQ ID NO: 834512 - RNA, 23 nt, Human
cugcccagccaggggcuggcagc

SEQ ID NO: 834513 - RNA, 23 nt, Human
cuggacccagccacacccacugg

SEQ ID NO: 834514 - RNA, 20 nt, Human
cuggcagcagcacagcgagg

SEQ ID NO: 834515 - RNA, 24 nt, Human
cuguccauccugcaaggcaucgug

SEQ ID NO: 834516 - RNA, 22 nt, Human
cuuuuggacacugccuuuaaca

SEQ ID NO: 834517 - RNA, 21 nt, Human
gaacacaacgacagcagccgc

SEQ ID NO: 834518 - RNA, 19 nt, Human
gagcccuccuccuccaccc

SEQ ID NO: 834519 - RNA, 23 nt, Human
gagggggaccccaagcagguucc

SEQ ID NO: 834520 - RNA, 20 nt, Human
gaucugugagcccacacccc

SEQ ID NO: 834521 - RNA, 23 nt, Human
gcagcaggccccccaggguccug

SEQ ID NO: 834522 - RNA, 20 nt, Human
gccagacgcgugcucgcucu

SEQ ID NO: 834523 - RNA, 24 nt, Human
gcccccagacagggaaacacugac

SEQ ID NO: 834524 - RNA, 18 nt, Human
gccccgagaccagaggcg

SEQ ID NO: 834525 - RNA, 21 nt, Human
gccgagggcacuuucugccca

SEQ ID NO: 834526 - RNA, 19 nt, Human
gcucugggcccugccccca

SEQ ID NO: 834527 - RNA, 23 nt, Human
gcuggcagcagcacagcgagggu

SEQ ID NO: 834528 - RNA, 23 nt, Human
ggaaggacaaggacauauucaga

SEQ ID NO: 834529 - RNA, 19 nt, Human
gggacaggggaccagagaa

SEQ ID NO: 834530 - RNA, 20 nt, Human
gggcugguucagcccuuugg

SEQ ID NO: 834531 - RNA, 20 nt, Human
ggggaggauucgaacacagg

SEQ ID NO: 834532 - RNA, 21 nt, Human
gggguggggaggauucgaaca

SEQ ID NO: 834533 - RNA, 25 nt, Human
gucuccucuccacaacucccuuuca

SEQ ID NO: 834534 - RNA, 25 nt, Human
uaaaauuaaaauaagaaaaaaaaag

SEQ ID NO: 834535 - RNA, 19 nt, Human
uaagccccuggucuuggca

SEQ ID NO: 834536 - RNA, 20 nt, Human
uagaaauaagccccuggucu

SEQ ID NO: 834537 - RNA, 22 nt, Human
uagaaauaagccccuggucuug

SEQ ID NO: 834538 - RNA, 20 nt, Human
uagaacacaacgacagcagc

SEQ ID NO: 834539 - RNA, 18 nt, Human
uaggaagagcccucccac

SEQ ID NO: 834540 - RNA, 20 nt, Human
ucagagcacacagagggaag

SEQ ID NO: 834541 - RNA, 21 nt, Human
uccaaaauccugccugccucu

SEQ ID NO: 834542 - RNA, 24 nt, Human
uccaaaauccugccugccucugac

SEQ ID NO: 834543 - RNA, 19 nt, Human
uccaccuuguucauuaaaa

SEQ ID NO: 834544 - RNA, 22 nt, Human
uccaccuuguucauuaaaauua

SEQ ID NO: 834545 - RNA, 22 nt, Human
ucccacgaaccaggcugauagg

SEQ ID NO: 834546 - RNA, 23 nt, Human
ucccuagaaauaagccccugguc

SEQ ID NO: 834547 - RNA, 21 nt, Human
ucccugucugucauccugucc

SEQ ID NO: 834548 - RNA, 27 nt, Human
uccugguugaggggcuggggguucacc

SEQ ID NO: 834549 - RNA, 21 nt, Human
ucugugagcccacaccccaga

SEQ ID NO: 834550 - RNA, 24 nt, Human
ugaccgggagcccucuguucacag

SEQ ID NO: 834551 - RNA, 18 nt, Human
ugagaaaagaaagcacca

SEQ ID NO: 834552 - RNA, 19 nt, Human
ugagaaaagaaagcaccaa

SEQ ID NO: 834553 - RNA, 19 nt, Human
ugagcccacaccccagaca

SEQ ID NO: 834554 - RNA, 23 nt, Human
ugagcccacaccccagacacagg

SEQ ID NO: 834555 - RNA, 18 nt, Human
ugcccucugggcauaggg

SEQ ID NO: 834556 - RNA, 18 nt, Human
ugccucacuccucuccuc

SEQ ID NO: 834557 - RNA, 23 nt, Human
ugcuccccuccuccuggcaccca

SEQ ID NO: 834558 - RNA, 18 nt, Human
uggcacccaggccacccc

SEQ ID NO: 834559 - RNA, 19 nt, Human
uggcagcagcacagcgagg

SEQ ID NO: 834560 - RNA, 24 nt, Human
uggcaggacaagaaagagcuguaa

SEQ ID NO: 834561 - RNA, 21 nt, Human
ugggguaugcuccccuccucc

SEQ ID NO: 834562 - RNA, 18 nt, Human
uguugggucaguacgggg

SEQ ID NO: 834563 - RNA, 21 nt, Human
uuaggaaacuccacaaagaaa

SEQ ID NO: 834564 - RNA, 18 nt, Human
uucagagugacuuagaga

SEQ ID NO: 834565 - RNA, 21 nt, Human
uucccuagaaauaagccccug

SEQ ID NO: 834566 - RNA, 22 nt, Human
uucccuagaaauaagccccugg

SEQ ID NO: 834567 - RNA, 22 nt, Human
uuccuggccccgagaccagagg

SEQ ID NO: 834568 - RNA, 23 nt, Human
uuccuggccccgagaccagaggc

SEQ ID NO: 834569 - RNA, 22 nt, Human
uucugagagucuggaggcgucu

SEQ ID NO: 834570 - RNA, 22 nt, Human
uugccucacuccucuccucacg

SEQ ID NO: 834571 - RNA, 18 nt, Human
uuucugcccagccagggg

SEQ ID NO: 834572 - RNA, 21 nt, Human
aaaaccucuucccuccuaccg

SEQ ID NO: 834573 - RNA, 18 nt, Human
aaccucuucccuccuacc

SEQ ID NO: 834574 - RNA, 20 nt, Human
aagcccggaaucccgaccga

SEQ ID NO: 834575 - RNA, 21 nt, Human
augucacuuucacucagugac

SEQ ID NO: 834576 - RNA, 21 nt, Human
caagcccggaaucccgaccga

SEQ ID NO: 834577 - RNA, 21 nt, Human
ccccggcuuucagccgccggg

SEQ ID NO: 834578 - RNA, 18 nt, Human
ccccuacucuucaagagc

SEQ ID NO: 834579 - RNA, 19 nt, Human
cccuccuaccgcagucgcc

SEQ ID NO: 834580 - RNA, 19 nt, Human
ccugccggaagcuccucca

SEQ ID NO: 834581 - RNA, 19 nt, Human
cgccggggccugccggaag

SEQ ID NO: 834582 - RNA, 23 nt, Human
cgccggggccugccggaagcucc

SEQ ID NO: 834583 - RNA, 21 nt, Human
cuucaagagccaacagccucu

SEQ ID NO: 834584 - RNA, 22 nt, Human
cuucauguugcauauguaaaau

SEQ ID NO: 834585 - RNA, 20 nt, Human
gaagcuccuccauauuaccc

SEQ ID NO: 834586 - RNA, 21 nt, Human
gaccagcacuucugccccggc

SEQ ID NO: 834587 - RNA, 22 nt, Human
gaccagcacuucugccccggcu

SEQ ID NO: 834588 - RNA, 25 nt, Human
gagccaacagccucugggcaaaaga

SEQ ID NO: 834589 - RNA, 23 nt, Human
gcccggaaucccgaccgagacca

SEQ ID NO: 834590 - RNA, 22 nt, Human
gugacuuuucaaaacucuacag

SEQ ID NO: 834591 - RNA, 21 nt, Human
uaaaaaaaaaacccaccuaca

SEQ ID NO: 834592 - RNA, 22 nt, Human
uaaaaaaaaaacccaccuacac

SEQ ID NO: 834593 - RNA, 24 nt, Human
uaaaaaaaaaacccaccuacacga

SEQ ID NO: 834594 - RNA, 20 nt, Human
uccaaaaccucuucccuccu

SEQ ID NO: 834595 - RNA, 22 nt, Human
uccaaaaccucuucccuccuac

SEQ ID NO: 834596 - RNA, 23 nt, Human
uccaaaaccucuucccuccuacc

SEQ ID NO: 834597 - RNA, 19 nt, Human
ugaagaacaauauaaagaa

SEQ ID NO: 834598 - RNA, 21 nt, Human
ugaugugugaaggagucuaug

SEQ ID NO: 834599 - RNA, 20 nt, Human
ugccacagugaugugugaag

SEQ ID NO: 834600 - RNA, 24 nt, Human
ugugaucaaaugcgugagguggcc

SEQ ID NO: 834601 - RNA, 25 nt, Human
uucaagagccaacagccucugggca

SEQ ID NO: 834602 - RNA, 20 nt, Human
uuuuuuuuuuuuuuuuuugg

SEQ ID NO: 834603 - RNA, 22 nt, Human
aaccaugccggcgaccgggccg

SEQ ID NO: 834604 - RNA, 21 nt, Human
accagcugccugcuugcacgc

SEQ ID NO: 834605 - RNA, 21 nt, Human
aggcagcuuugacagguggug

SEQ ID NO: 834606 - RNA, 23 nt, Human
aggcagcuuugacaggugguguc

SEQ ID NO: 834607 - RNA, 20 nt, Human
cagacagggugugagggcag

SEQ ID NO: 834608 - RNA, 18 nt, Human
cagcaggacggagaaacc

SEQ ID NO: 834609 - RNA, 19 nt, Human
cagcuucuggccuggcccu

SEQ ID NO: 834610 - RNA, 23 nt, Human
cagcuucuggccuggcccugcuu

SEQ ID NO: 834611 - RNA, 20 nt, Human
ccagcuucuggccuggcccu

SEQ ID NO: 834612 - RNA, 24 nt, Human
cccagagugagucugggaggugga

SEQ ID NO: 834613 - RNA, 25 nt, Human
ccccaaggccacauauaggauucug

SEQ ID NO: 834614 - RNA, 20 nt, Human
cccgccggcugcagcaggac

SEQ ID NO: 834615 - RNA, 18 nt, Human
ccgcuuuccccgucuggg

SEQ ID NO: 834616 - RNA, 19 nt, Human
cggagaaaccaugccggcg

SEQ ID NO: 834617 - RNA, 22 nt, Human
ggagguggaacccugugaaagg

SEQ ID NO: 834618 - RNA, 22 nt, Human
gggccagggcuugcugagggcc

SEQ ID NO: 834619 - RNA, 20 nt, Human
gugagucugggagguggaac

SEQ ID NO: 834620 - RNA, 23 nt, Human
uaggauucugggucccagaguga

SEQ ID NO: 834621 - RNA, 24 nt, Human
uauccucacugggagaguugaaaa

SEQ ID NO: 834622 - RNA, 18 nt, Human
ugacagguggugucuguu

SEQ ID NO: 834623 - RNA, 22 nt, Human
ugacagguggugucuguuggac

SEQ ID NO: 834624 - RNA, 22 nt, Human
uggaacccugugaaaggcagcu

SEQ ID NO: 834625 - RNA, 21 nt, Human
uggaggacuccgaguuggggc

SEQ ID NO: 834626 - RNA, 20 nt, Human
uggccuggcccugcuuucuu

SEQ ID NO: 834627 - RNA, 23 nt, Human
uggccuggcccugcuuucuucuc

SEQ ID NO: 834628 - RNA, 20 nt, Human
uggcucaggcugagcauguu

SEQ ID NO: 834629 - RNA, 23 nt, Human
ugguggcucaggcugagcauguu

SEQ ID NO: 834630 - RNA, 21 nt, Human
ugucaccuaccccaaggccac

SEQ ID NO: 834631 - RNA, 20 nt, Human
uucagaucaucaaaaagggg

SEQ ID NO: 834632 - RNA, 21 nt, Human
uugcacgcgacauuccuuccu

SEQ ID NO: 834633 - RNA, 21 nt, Human
uuuuuuuuuuuugguggcuca

SEQ ID NO: 834634 - RNA, 18 nt, Human
uuuuuuuuuuuuuuuuug

SEQ ID NO: 834635 - RNA, 20 nt, Human
uuuuuuuuuuuuuuuuuggu

SEQ ID NO: 834636 - RNA, 22 nt, Human
uuuuuuuuuuuuuuuuuggugg

SEQ ID NO: 834637 - RNA, 21 nt, Human
aaagucucccguuuuccauac

SEQ ID NO: 834638 - RNA, 18 nt, Human
aguggaagaauccccgga

SEQ ID NO: 834639 - RNA, 24 nt, Human
cuuuuagagaggccacuguacaaa

SEQ ID NO: 834640 - RNA, 21 nt, Human
gaaaauaccauuuagcuuaag

SEQ ID NO: 834641 - RNA, 21 nt, Human
gaguggaagaauccccggaau

SEQ ID NO: 834642 - RNA, 22 nt, Human
guacaaagucucccguuuucca

SEQ ID NO: 834643 - RNA, 27 nt, Human
guuaucugcaaaucaacucauuucagg

SEQ ID NO: 834644 - RNA, 22 nt, Human
uaucaaaauguaugcagguuuc

SEQ ID NO: 834645 - RNA, 25 nt, Human
ucucccguuuuccauacaggacaaa

SEQ ID NO: 834646 - RNA, 18 nt, Human
ucucuuaugaauguuuug

SEQ ID NO: 834647 - RNA, 25 nt, Human
ugcaaaucaacucauuucaggagug

SEQ ID NO: 834648 - RNA, 22 nt, Human
uguuuuguacuuuuagagaggc

SEQ ID NO: 834649 - RNA, 18 nt, Human
uuggagagcuugagaaaa

SEQ ID NO: 834650 - RNA, 19 nt, Human
uuuuuuuuuuuuggugguc

SEQ ID NO: 834651 - RNA, 18 nt, Human
uuuuuuuuuuuuuuuuug

SEQ ID NO: 834652 - RNA, 20 nt, Human
uuuuuuuuuuuuuuuuuggu

SEQ ID NO: 834653 - RNA, 22 nt, Human
uuuuuuuuuuuuuuuuuggugg

SEQ ID NO: 834654 - RNA, 19 nt, Human
aaaaaggggcuucaccuaa

SEQ ID NO: 834655 - RNA, 21 nt, Human
aaaacaccaaguaacauuucu

SEQ ID NO: 834656 - RNA, 24 nt, Human
aaacacgaaggggguucccccugg

SEQ ID NO: 834657 - RNA, 24 nt, Human
aaacccugcaggcugucaguccca

SEQ ID NO: 834658 - RNA, 20 nt, Human
aaccaaaaaacaccaaguaa

SEQ ID NO: 834659 - RNA, 20 nt, Human
aagaaaaaggggcuucaccu

SEQ ID NO: 834660 - RNA, 23 nt, Human
aagaaaaaggggcuucaccuaaa

SEQ ID NO: 834661 - RNA, 19 nt, Human
aagggccagggcccgaggc

SEQ ID NO: 834662 - RNA, 19 nt, Human
aagggccagggcccgaggc

SEQ ID NO: 834663 - RNA, 23 nt, Human
aaugcaaaacaaacccgccugga

SEQ ID NO: 834664 - RNA, 23 nt, Human
acaaaacacgaaggggguucccc

SEQ ID NO: 834665 - RNA, 22 nt, Human
accgggcucgccggccacuucc

SEQ ID NO: 834666 - RNA, 23 nt, Human
agagaggaagcgaagggccaggg

SEQ ID NO: 834667 - RNA, 21 nt, Human
agcgaagggccagggcccgag

SEQ ID NO: 834668 - RNA, 19 nt, Human
aggaaacccugcaggcugu

SEQ ID NO: 834669 - RNA, 25 nt, Human
aggaaacccugcaggcugucagucc

SEQ ID NO: 834670 - RNA, 18 nt, Human
caaaaaacaccaaguaac

SEQ ID NO: 834671 - RNA, 20 nt, Human
cacuuccgccgccgccgcuu

SEQ ID NO: 834672 - RNA, 22 nt, Human
cagcuuaaaauaaaaaucuccc

SEQ ID NO: 834673 - RNA, 19 nt, Human
ccagagcgagggguugaaa

SEQ ID NO: 834674 - RNA, 23 nt, Human
ccgcgcccaaggaaacccugcag

SEQ ID NO: 834675 - RNA, 22 nt, Human
ccguccgagacuguggagcgga

SEQ ID NO: 834676 - RNA, 20 nt, Human
cgaaggggguucccccuggc

SEQ ID NO: 834677 - RNA, 23 nt, Human
cgccuggaaaaugcugcccugag

SEQ ID NO: 834678 - RNA, 21 nt, Human
cgggcucgccggccacuuccg

SEQ ID NO: 834679 - RNA, 24 nt, Human
gaaccagagcgagggguugaaaga

SEQ ID NO: 834680 - RNA, 18 nt, Human
gagcagauccguccgaga

SEQ ID NO: 834681 - RNA, 20 nt, Human
gcccugagaaccagagcgag

SEQ ID NO: 834682 - RNA, 25 nt, Human
gccuggaaaaugcugcccugagaac

SEQ ID NO: 834683 - RNA, 27 nt, Human
gcgcagcagccggucugggugggcgac

SEQ ID NO: 834684 - RNA, 18 nt, Human
ggagggggcgcagcagcc

SEQ ID NO: 834685 - RNA, 18 nt, Human
ggcucgccggccacuucc

SEQ ID NO: 834686 - RNA, 20 nt, Human
gguucccccuggcgccugcc

SEQ ID NO: 834687 - RNA, 22 nt, Human
guucgaaggcuuucaaccgucc

SEQ ID NO: 834688 - RNA, 19 nt, Human
uagcaagaaaaaggggcuu

SEQ ID NO: 834689 - RNA, 21 nt, Human
uccaagaaaugcaaaacaaac

SEQ ID NO: 834690 - RNA, 22 nt, Human
uccaagaaaugcaaaacaaacc

SEQ ID NO: 834691 - RNA, 21 nt, Human
uccccugcacgguucgaaggc

SEQ ID NO: 834692 - RNA, 23 nt, Human
ucgaaggcuuucaaccgucccgg

SEQ ID NO: 834693 - RNA, 25 nt, Human
ucgccggccacuuccgccgccgccg

SEQ ID NO: 834694 - RNA, 20 nt, Human
ugaaagaugccuucaacaca

SEQ ID NO: 834695 - RNA, 20 nt, Human
uggaaaaugcugcccugaga

SEQ ID NO: 834696 - RNA, 18 nt, Human
uggcaggagggggcgcag

SEQ ID NO: 834697 - RNA, 24 nt, Human
uggcaggagggggcgcagcagccg

SEQ ID NO: 834698 - RNA, 24 nt, Human
ugggacggccguuucacaaaacca

SEQ ID NO: 834699 - RNA, 23 nt, Human
uucacaaaaccaaaaaacaccaa

SEQ ID NO: 834700 - RNA, 20 nt, Human
uuuuuuuuuuuuuuuuuugg

SEQ ID NO: 834701 - RNA, 25 nt, Human
uuuuuuuuuuuuuuuuuuguaguuu

SEQ ID NO: 834702 - RNA, 22 nt, Human
aaacaaaaugacaguuaaccaa

SEQ ID NO: 834703 - RNA, 24 nt, Human
aaacaaaaugacaguuaaccaaaa

SEQ ID NO: 834704 - RNA, 24 nt, Human
aaauggucacguaaaugacaaaac

SEQ ID NO: 834705 - RNA, 20 nt, Human
acaaacuuuguuccacuggc

SEQ ID NO: 834706 - RNA, 25 nt, Human
acauuagaaagugggaaaaaaaauu

SEQ ID NO: 834707 - RNA, 20 nt, Human
agaaguucuuuucuucuuuu

SEQ ID NO: 834708 - RNA, 23 nt, Human
aguaaguggcaaaauaacuacaa

SEQ ID NO: 834709 - RNA, 23 nt, Human
aguaaguggcaaaauaacuacaa

SEQ ID NO: 834710 - RNA, 24 nt, Human
caaaaugacaguuaaccaaaaaca

SEQ ID NO: 834711 - RNA, 20 nt, Human
caaauaagcauauaaugaca

SEQ ID NO: 834712 - RNA, 20 nt, Human
cauauaaugacagaaaagua

SEQ ID NO: 834713 - RNA, 19 nt, Human
uaaccaaaaacaccuuuau

SEQ ID NO: 834714 - RNA, 26 nt, Human
uaacuuacaaaaauggguacacaucu

SEQ ID NO: 834715 - RNA, 19 nt, Human
uaagccaaaacaaaaucua

SEQ ID NO: 834716 - RNA, 20 nt, Human
uaagccaaaacaaaaucuag

SEQ ID NO: 834717 - RNA, 23 nt, Human
uauaaugacagaaaaguaagugg

SEQ ID NO: 834718 - RNA, 24 nt, Human
uauaaugacagaaaaguaaguggc

SEQ ID NO: 834719 - RNA, 18 nt, Human
ugucauuauaagccaaaa

SEQ ID NO: 834720 - RNA, 24 nt, Human
uuuuuuuuuuuuuuuuuuacaaaa

SEQ ID NO: 834721 - RNA, 27 nt, Human
aaaaagaggacaaauuguaucacaaaa

SEQ ID NO: 834722 - RNA, 22 nt, Human
acccucacuccaggcgccccac

SEQ ID NO: 834723 - RNA, 25 nt, Human
agaacccucacuccaggcgccccac

SEQ ID NO: 834724 - RNA, 25 nt, Human
auaaaaaaauauauccaacuaugaa

SEQ ID NO: 834725 - RNA, 24 nt, Human
aucacaaaagaagcaaaaauuaga

SEQ ID NO: 834726 - RNA, 28 nt, Human
auccacaauuguauacauuuaucuuacu

SEQ ID NO: 834727 - RNA, 23 nt, Human
cagaacccucacuccaggcgccc

SEQ ID NO: 834728 - RNA, 27 nt, Human
cauaaaaaaauauauccaacuaugaaa

SEQ ID NO: 834729 - RNA, 22 nt, Human
ccagaacccucacuccaggcgc

SEQ ID NO: 834730 - RNA, 19 nt, Human
ccaggcgccccacgagccc

SEQ ID NO: 834731 - RNA, 18 nt, Human
ccccacgagcccggccgc

SEQ ID NO: 834732 - RNA, 22 nt, Human
ccucacuccaggcgccccacga

SEQ ID NO: 834733 - RNA, 23 nt, Human
cucacaugucagugaaaaaucac

SEQ ID NO: 834734 - RNA, 19 nt, Human
uaaauccacaauuguauac

SEQ ID NO: 834735 - RNA, 18 nt, Human
uacauuuaucuuacucac

SEQ ID NO: 834736 - RNA, 23 nt, Human
uuuuuuuuuuuuauuuugucuuu

SEQ ID NO: 834737 - RNA, 23 nt, Human
uuuuuuuuuuuuuuuuuuauuuu

SEQ ID NO: 834738 - RNA, 19 nt, Human
aaagaauucuccugccuca

SEQ ID NO: 834739 - RNA, 19 nt, Human
aaagugcuggcauuacagg

SEQ ID NO: 834740 - RNA, 24 nt, Human
aaagugcuggcauuacaggcguga

SEQ ID NO: 834741 - RNA, 24 nt, Human
aagaauucuccugccucagccucc

SEQ ID NO: 834742 - RNA, 18 nt, Human
acaccaccacacccagcu

SEQ ID NO: 834743 - RNA, 23 nt, Human
acagagaccagaccaggugaaug

SEQ ID NO: 834744 - RNA, 19 nt, Human
acaggguuucgccaugucg

SEQ ID NO: 834745 - RNA, 20 nt, Human
acaggguuucgccaugucgg

SEQ ID NO: 834746 - RNA, 24 nt, Human
acaggguuucgccaugucggccag

SEQ ID NO: 834747 - RNA, 25 nt, Human
acccgccucggccucccaaagugcu

SEQ ID NO: 834748 - RNA, 18 nt, Human
agacaggguuucgccaug

SEQ ID NO: 834749 - RNA, 18 nt, Human
agacaggguuucgccaug

SEQ ID NO: 834750 - RNA, 20 nt, Human
aggcacacaccaccacaccc

SEQ ID NO: 834751 - RNA, 19 nt, Human
aggcgugaaccaccgugcc

SEQ ID NO: 834752 - RNA, 23 nt, Human
aggcgugaaccaccgugccuggc

SEQ ID NO: 834753 - RNA, 25 nt, Human
aggcuggagugcaguggugugaucu

SEQ ID NO: 834754 - RNA, 24 nt, Human
aggugguccacccgccucggccuc

SEQ ID NO: 834755 - RNA, 18 nt, Human
aguagcugggauuauagg

SEQ ID NO: 834756 - RNA, 23 nt, Human
agugcaguggugugaucuuggcu

SEQ ID NO: 834757 - RNA, 24 nt, Human
agugcaguggugugaucuuggcuc

SEQ ID NO: 834758 - RNA, 25 nt, Human
auucugucgcccaggcuggagugca

SEQ ID NO: 834759 - RNA, 24 nt, Human
caaagugcuggcauuacaggcgug

SEQ ID NO: 834760 - RNA, 23 nt, Human
cacacaccaccacacccagcuaa

SEQ ID NO: 834761 - RNA, 20 nt, Human
cacaccaccacacccagcua

SEQ ID NO: 834762 - RNA, 23 nt, Human
caccauccaaggaggcacagccg

SEQ ID NO: 834763 - RNA, 23 nt, Human
cacccgccucggccucccaaagu

SEQ ID NO: 834764 - RNA, 23 nt, Human
cacugcaaccuccgccuuuuggg

SEQ ID NO: 834765 - RNA, 20 nt, Human
cagccuccugaguagcuggg

SEQ ID NO: 834766 - RNA, 24 nt, Human
caggguuucgccaugucggccagg

SEQ ID NO: 834767 - RNA, 24 nt, Human
caugucggccaggcuggucuugaa

SEQ ID NO: 834768 - RNA, 24 nt, Human
cauuacaggcgugaaccaccgugc

SEQ ID NO: 834769 - RNA, 24 nt, Human
cauucugucgcccaggcuggagug

SEQ ID NO: 834770 - RNA, 20 nt, Human
ccaaagugcuggcauuacag

SEQ ID NO: 834771 - RNA, 22 nt, Human
ccaaagugcuggcauuacaggc

SEQ ID NO: 834772 - RNA, 24 nt, Human
ccaaagugcuggcauuacaggcgu

SEQ ID NO: 834773 - RNA, 18 nt, Human
ccagaccaggugaaugua

SEQ ID NO: 834774 - RNA, 19 nt, Human
ccaugucggccaggcuggu

SEQ ID NO: 834775 - RNA, 21 nt, Human
ccaugucggccaggcuggucu

SEQ ID NO: 834776 - RNA, 21 nt, Human
ccaugucggccaggcuggucu

SEQ ID NO: 834777 - RNA, 23 nt, Human
ccugaguagcugggauuauaggc

SEQ ID NO: 834778 - RNA, 24 nt, Human
ccugaguagcugggauuauaggca

SEQ ID NO: 834779 - RNA, 23 nt, Human
ccugccucagccuccugaguagc

SEQ ID NO: 834780 - RNA, 24 nt, Human
cgccaugucggccaggcuggucuu

SEQ ID NO: 834781 - RNA, 27 nt, Human
cgccaugucggccaggcuggucuugaa

SEQ ID NO: 834782 - RNA, 24 nt, Human
cgcccaggcuggagugcaguggug

SEQ ID NO: 834783 - RNA, 24 nt, Human
cggccaggcuggucuugaacuccu

SEQ ID NO: 834784 - RNA, 19 nt, Human
cucacugcaaccuccgccu

SEQ ID NO: 834785 - RNA, 24 nt, Human
cucacugcaaccuccgccuuuugg

SEQ ID NO: 834786 - RNA, 23 nt, Human
cucagccuccugaguagcuggga

SEQ ID NO: 834787 - RNA, 24 nt, Human
cucauucugucgcccaggcuggag

SEQ ID NO: 834788 - RNA, 25 nt, Human
cucccagcauccaucugcauucagc

SEQ ID NO: 834789 - RNA, 23 nt, Human
cugcaaccuccgccuuuuggguu

SEQ ID NO: 834790 - RNA, 18 nt, Human
cugcauuaucccgccaga

SEQ ID NO: 834791 - RNA, 23 nt, Human
cugccucagccuccugaguagcu

SEQ ID NO: 834792 - RNA, 26 nt, Human
cuuuuuguauuuuuuuuuaguagagg

SEQ ID NO: 834793 - RNA, 22 nt, Human
gaccaggugaauguaacugggg

SEQ ID NO: 834794 - RNA, 24 nt, Human
gaccucaggugguccacccgccuc

SEQ ID NO: 834795 - RNA, 24 nt, Human
gaguagcugggauuauaggcacac

SEQ ID NO: 834796 - RNA, 19 nt, Human
gagugcaguggugugaucu

SEQ ID NO: 834797 - RNA, 19 nt, Human
gcacacaccaccacaccca

SEQ ID NO: 834798 - RNA, 20 nt, Human
gcccaggcuggagugcagug

SEQ ID NO: 834799 - RNA, 23 nt, Human
gcccaggcuggagugcaguggug

SEQ ID NO: 834800 - RNA, 24 nt, Human
gcccaggcuggagugcaguggugu

SEQ ID NO: 834801 - RNA, 23 nt, Human
gccucggccucccaaagugcugg

SEQ ID NO: 834802 - RNA, 23 nt, Human
gcuggucuugaacuccugaccuc

SEQ ID NO: 834803 - RNA, 22 nt, Human
ggcuggagugcaguggugugau

SEQ ID NO: 834804 - RNA, 24 nt, Human
ggcuggucuugaacuccugaccuc

SEQ ID NO: 834805 - RNA, 20 nt, Human
ggucuccaccauccaaggag

SEQ ID NO: 834806 - RNA, 19 nt, Human
ggucuugaacuccugaccu

SEQ ID NO: 834807 - RNA, 18 nt, Human
guagcugggauuauaggc

SEQ ID NO: 834808 - RNA, 24 nt, Human
gugguccacccgccucggccuccc

SEQ ID NO: 834809 - RNA, 23 nt, Human
uaaaagaauucuccugccucagc

SEQ ID NO: 834810 - RNA, 22 nt, Human
uacaggcgugaaccaccgugcc

SEQ ID NO: 834811 - RNA, 22 nt, Human
uagagacaggguuucgccaugu

SEQ ID NO: 834812 - RNA, 22 nt, Human
uagcagaccauuucugaggucu

SEQ ID NO: 834813 - RNA, 21 nt, Human
uaggcacacaccaccacaccc

SEQ ID NO: 834814 - RNA, 24 nt, Human
uaguagagacaggguuucgccaug

SEQ ID NO: 834815 - RNA, 20 nt, Human
ucacagcuaagguacauacc

SEQ ID NO: 834816 - RNA, 18 nt, Human
ucacugcaaccuccgccu

SEQ ID NO: 834817 - RNA, 23 nt, Human
ucacugcaaccuccgccuuuugg

SEQ ID NO: 834818 - RNA, 23 nt, Human
ucacugcaaccuccgccuuuugg

SEQ ID NO: 834819 - RNA, 24 nt, Human
ucacugcaaccuccgccuuuuggg

SEQ ID NO: 834820 - RNA, 20 nt, Human
ucagccuccugaguagcugg

SEQ ID NO: 834821 - RNA, 24 nt, Human
ucauucugucgcccaggcuggagu

SEQ ID NO: 834822 - RNA, 27 nt, Human
uccaccauccaaggaggcacagccguc

SEQ ID NO: 834823 - RNA, 24 nt, Human
ucccaaagugcuggcauuacaggc

SEQ ID NO: 834824 - RNA, 24 nt, Human
uccugaguagcugggauuauaggc

SEQ ID NO: 834825 - RNA, 24 nt, Human
ucgcccaggcuggagugcaguggu

SEQ ID NO: 834826 - RNA, 18 nt, Human
ucggccucccaaagugcu

SEQ ID NO: 834827 - RNA, 23 nt, Human
ucucauucugucgcccaggcugg

SEQ ID NO: 834828 - RNA, 24 nt, Human
ucucauucugucgcccaggcugga

SEQ ID NO: 834829 - RNA, 24 nt, Human
ucuccugccucagccuccugagua

SEQ ID NO: 834830 - RNA, 18 nt, Human
ucuucuaagcuuacagag

SEQ ID NO: 834831 - RNA, 24 nt, Human
ucuugaacuccugaccucaggugg

SEQ ID NO: 834832 - RNA, 24 nt, Human
ugaccucaggugguccacccgccu

SEQ ID NO: 834833 - RNA, 18 nt, Human
ugagacagagucucauuc

SEQ ID NO: 834834 - RNA, 22 nt, Human
ugagacagagucucauucuguc

SEQ ID NO: 834835 - RNA, 22 nt, Human
ugcaguggugugaucuuggcuc

SEQ ID NO: 834836 - RNA, 24 nt, Human
ugccucagccuccugaguagcugg

SEQ ID NO: 834837 - RNA, 19 nt, Human
uggagugcaguggugugau

SEQ ID NO: 834838 - RNA, 24 nt, Human
uggagugcaguggugugaucuugg

SEQ ID NO: 834839 - RNA, 24 nt, Human
uggcauuacaggcgugaaccaccg

SEQ ID NO: 834840 - RNA, 25 nt, Human
uggcauuacaggcgugaaccaccgu

SEQ ID NO: 834841 - RNA, 21 nt, Human
ugggauuauaggcacacacca

SEQ ID NO: 834842 - RNA, 24 nt, Human
ugggauuauaggcacacaccacca

SEQ ID NO: 834843 - RNA, 26 nt, Human
uguagcagaccauuucugaggucucc

SEQ ID NO: 834844 - RNA, 22 nt, Human
uguccuccaugccuucagcagc

SEQ ID NO: 834845 - RNA, 21 nt, Human
ugucgcccaggcuggagugca

SEQ ID NO: 834846 - RNA, 24 nt, Human
uuaguagagacaggguuucgccau

SEQ ID NO: 834847 - RNA, 18 nt, Human
uucugucgcccaggcugg

SEQ ID NO: 834848 - RNA, 24 nt, Human
uuucgccaugucggccaggcuggu

SEQ ID NO: 834849 - RNA, 24 nt, Human
uuuuggguuaaaagaauucuccug

SEQ ID NO: 834850 - RNA, 26 nt, Human
uuuuguauuuuuuuuuaguagagaca

SEQ ID NO: 834851 - RNA, 24 nt, Human
uuuuuaguagagacaggguuucgc

SEQ ID NO: 834852 - RNA, 24 nt, Human
uuuuuuaguagagacaggguuucg

SEQ ID NO: 834853 - RNA, 20 nt, Human
uuuuuuuuuuugagacagag

SEQ ID NO: 834854 - RNA, 26 nt, Human
uuuuuuuuuuuugagacagagucuca

SEQ ID NO: 834855 - RNA, 27 nt, Human
uuuuuuuuuuuuuuuuuuuuuuugggg

SEQ ID NO: 834856 - RNA, 22 nt, Human
aaaacccaggaggaagggcugg

SEQ ID NO: 834857 - RNA, 20 nt, Human
accacugucaucuucuucag

SEQ ID NO: 834858 - RNA, 19 nt, Human
auccacgaacgucaacccu

SEQ ID NO: 834859 - RNA, 25 nt, Human
cacaaggcugacuuuucaaaaauca

SEQ ID NO: 834860 - RNA, 20 nt, Human
cacccugcuuuuuaaaaccc

SEQ ID NO: 834861 - RNA, 23 nt, Human
cacccugcuuuuuaaaacccagg

SEQ ID NO: 834862 - RNA, 18 nt, Human
caggaccuauuaugggcc

SEQ ID NO: 834863 - RNA, 21 nt, Human
caggucucuugcucaucccgg

SEQ ID NO: 834864 - RNA, 19 nt, Human
cauugaucaguauuaaaau

SEQ ID NO: 834865 - RNA, 22 nt, Human
ccaaaaacccgaucaucaucau

SEQ ID NO: 834866 - RNA, 21 nt, Human
cccuugucacuuuucugugua

SEQ ID NO: 834867 - RNA, 19 nt, Human
ccuugaagccgggggcagg

SEQ ID NO: 834868 - RNA, 19 nt, Human
cgaacgucaacccuauccc

SEQ ID NO: 834869 - RNA, 18 nt, Human
cgggccuugaagccgggg

SEQ ID NO: 834870 - RNA, 22 nt, Human
cucuucguccucgcuguuccgc

SEQ ID NO: 834871 - RNA, 22 nt, Human
cugggcccuuuuuucaaacucu

SEQ ID NO: 834872 - RNA, 18 nt, Human
gaacgucaacccuauccc

SEQ ID NO: 834873 - RNA, 20 nt, Human
gcagagcugguccugcaaca

SEQ ID NO: 834874 - RNA, 21 nt, Human
gcagagcugguccugcaacag

SEQ ID NO: 834875 - RNA, 20 nt, Human
ggccgguccgaucaggucuc

SEQ ID NO: 834876 - RNA, 25 nt, Human
gggcagggccgguccgaucaggucg

SEQ ID NO: 834877 - RNA, 21 nt, Human
gucacuuuucuguguagauuu

SEQ ID NO: 834878 - RNA, 24 nt, Human
gucaucauccugauuuuuccucug

SEQ ID NO: 834879 - RNA, 20 nt, Human
guuccgcgggccuugaagcc

SEQ ID NO: 834880 - RNA, 23 nt, Human
uaaaacccaggaggaagggcugg

SEQ ID NO: 834881 - RNA, 18 nt, Human
uaauauccucaucuucac

SEQ ID NO: 834882 - RNA, 21 nt, Human
uagauuuaaugaaaccaggug

SEQ ID NO: 834883 - RNA, 19 nt, Human
uauaauuagggggcagagc

SEQ ID NO: 834884 - RNA, 23 nt, Human
ucaucauccugauuuuuccucug

SEQ ID NO: 834885 - RNA, 23 nt, Human
uccgcgggccuugaagccggggg

SEQ ID NO: 834886 - RNA, 24 nt, Human
uccucuguuuucuugcaguuggac

SEQ ID NO: 834887 - RNA, 27 nt, Human
ugagggauuuuuccagucgacgcaagu

SEQ ID NO: 834888 - RNA, 18 nt, Human
ugggcccuuuuuucaaac

SEQ ID NO: 834889 - RNA, 22 nt, Human
uguccuggaucaucucugcccu

SEQ ID NO: 834890 - RNA, 23 nt, Human
uuagaaaaguucacauugaucag

SEQ ID NO: 834891 - RNA, 21 nt, Human
uucaucgcugucugaugaauc

SEQ ID NO: 834892 - RNA, 25 nt, Human
uugaagccgggggcagggccggucc

SEQ ID NO: 834893 - RNA, 26 nt, Human
uuuuccucuguuuucuugcaguugga

SEQ ID NO: 834894 - RNA, 20 nt, Human
uuuuuuuuuuuuuuuugcca

SEQ ID NO: 834895 - RNA, 23 nt, Human
uuuuuuuuuuuuuuuuugccauu

SEQ ID NO: 834896 - RNA, 27 nt, Human
uuuuuuuuuuuuuuuuuuuuuuugggg

SEQ ID NO: 834897 - RNA, 23 nt, Human
caucuaaauggccuccagauucc

SEQ ID NO: 834898 - RNA, 20 nt, Human
caugcuuucacuauugucuu

SEQ ID NO: 834899 - RNA, 20 nt, Human
gcuaaauggugaaaaacaaa

SEQ ID NO: 834900 - RNA, 22 nt, Human
uaaccaagcuuuccuauucccu

SEQ ID NO: 834901 - RNA, 18 nt, Human
uaucuccuuucagcauuc

SEQ ID NO: 834902 - RNA, 24 nt, Human
ucaucuaaauggccuccagauucc

SEQ ID NO: 834903 - RNA, 19 nt, Human
uccagauuccauguguccu

SEQ ID NO: 834904 - RNA, 20 nt, Human
ucccuccggcgcgcggcucc

SEQ ID NO: 834905 - RNA, 24 nt, Human
uggccuccagauuccauguguccu

SEQ ID NO: 834906 - RNA, 23 nt, Human
aggaugcgcggcaggggccccga

SEQ ID NO: 834907 - RNA, 21 nt, Human
aggcccgggaccacgacauca

SEQ ID NO: 834908 - RNA, 22 nt, Human
agguccaggcgggcggccccgu

SEQ ID NO: 834909 - RNA, 25 nt, Human
cagcuuccaggcguccguagguccc

SEQ ID NO: 834910 - RNA, 18 nt, Human
cagugggaggcgcuggug

SEQ ID NO: 834911 - RNA, 18 nt, Human
cccgugcacauacgcaua

SEQ ID NO: 834912 - RNA, 18 nt, Human
cgggagcagugcagggcg

SEQ ID NO: 834913 - RNA, 22 nt, Human
cgugcacauacgcauaagcggg

SEQ ID NO: 834914 - RNA, 19 nt, Human
gggccccugggccaggccc

SEQ ID NO: 834915 - RNA, 24 nt, Human
gggcugcaggaugcgcggcagggg

SEQ ID NO: 834916 - RNA, 23 nt, Human
gugcagggcgucgcagcuuccag

SEQ ID NO: 834917 - RNA, 22 nt, Human
uccaggcguccguaggucccuu

SEQ ID NO: 834918 - RNA, 19 nt, Human
uccagguccaggcgggcgg

SEQ ID NO: 834919 - RNA, 19 nt, Human
ucuccagguccaggcgggc

SEQ ID NO: 834920 - RNA, 24 nt, Human
uuuuuuuuuuuagaaaauaggugg

SEQ ID NO: 834921 - RNA, 21 nt, Human
aggcacccgccaacgaaaaca

SEQ ID NO: 834922 - RNA, 22 nt, Human
cagcccaggcacccgccaacga

SEQ ID NO: 834923 - RNA, 21 nt, Human
ccaccagcccaggcacccgcc

SEQ ID NO: 834924 - RNA, 19 nt, Human
cccaccagcccaggcaccc

SEQ ID NO: 834925 - RNA, 23 nt, Human
ccucggcccgcucucaggccgaa

SEQ ID NO: 834926 - RNA, 21 nt, Human
cgaaaacacgggcgacaccgu

SEQ ID NO: 834927 - RNA, 25 nt, Human
cgaaaacacgggcgacacuggagac

SEQ ID NO: 834928 - RNA, 18 nt, Human
uauugauucuggaaccuu

SEQ ID NO: 834929 - RNA, 20 nt, Human
ucagaggugggccgaaccag

SEQ ID NO: 834930 - RNA, 22 nt, Human
ucccaccagcccaggcacccgc

SEQ ID NO: 834931 - RNA, 22 nt, Human
uuccuucgggcggcuguuccca

SEQ ID NO: 834932 - RNA, 18 nt, Human
aaaaaccaaaacagaggu

SEQ ID NO: 834933 - RNA, 19 nt, Human
aaaacaaaaaccaaaacag

SEQ ID NO: 834934 - RNA, 21 nt, Human
aaaaccaaaacagagguaagc

SEQ ID NO: 834935 - RNA, 24 nt, Human
aaacaaaaaccaaaacagagguaa

SEQ ID NO: 834936 - RNA, 22 nt, Human
aaacagagguaagcagggccug

SEQ ID NO: 834937 - RNA, 24 nt, Human
aacaugacacuacguaaaaacaca

SEQ ID NO: 834938 - RNA, 24 nt, Human
acaaaaaccaaaacagcagggacu

SEQ ID NO: 834939 - RNA, 20 nt, Human
accagacacggcccucagca

SEQ ID NO: 834940 - RNA, 22 nt, Human
acccugggaacacagagaaggg

SEQ ID NO: 834941 - RNA, 22 nt, Human
accugagucccguucacgacuc

SEQ ID NO: 834942 - RNA, 18 nt, Human
aggacgcaggcaggggac

SEQ ID NO: 834943 - RNA, 24 nt, Human
auaucaaaaacaaaaaccaaaaca

SEQ ID NO: 834944 - RNA, 21 nt, Human
caacacuauaugcacagaaca

SEQ ID NO: 834945 - RNA, 19 nt, Human
cacggcccucagcagaccc

SEQ ID NO: 834946 - RNA, 18 nt, Human
caggacgcaggcagggga

SEQ ID NO: 834947 - RNA, 24 nt, Human
caggccccaggacgcaggcagggg

SEQ ID NO: 834948 - RNA, 19 nt, Human
cauccccaccagacacggc

SEQ ID NO: 834949 - RNA, 22 nt, Human
ccagacacggcccucagcagac

SEQ ID NO: 834950 - RNA, 26 nt, Human
cccacaccugagucccguucacgacu

SEQ ID NO: 834951 - RNA, 21 nt, Human
cccagccccauccccaccaga

SEQ ID NO: 834952 - RNA, 22 nt, Human
cccagccccauccccaccagac

SEQ ID NO: 834953 - RNA, 18 nt, Human
cccauccccaccagacac

SEQ ID NO: 834954 - RNA, 19 nt, Human
ccugugcagcccaucaccu

SEQ ID NO: 834955 - RNA, 21 nt, Human
cgacuccccagcccuacuccu

SEQ ID NO: 834956 - RNA, 24 nt, Human
cggcccucagcagacccugggaac

SEQ ID NO: 834957 - RNA, 20 nt, Human
gcccuacuccugagggugag

SEQ ID NO: 834958 - RNA, 25 nt, Human
ggaaaaaaaaauaucaaaaacaaaa

SEQ ID NO: 834959 - RNA, 19 nt, Human
ggacgcaggcaggggacag

SEQ ID NO: 834960 - RNA, 19 nt, Human
gggaacacagagaagggcc

SEQ ID NO: 834961 - RNA, 22 nt, Human
gucggccgcgacgacuucucuc

SEQ ID NO: 834962 - RNA, 23 nt, Human
uaacauaaacagugcaaaggaga

SEQ ID NO: 834963 - RNA, 18 nt, Human
uaagcagggccuggucag

SEQ ID NO: 834964 - RNA, 25 nt, Human
uaugcacagaacaugacacuacgua

SEQ ID NO: 834965 - RNA, 19 nt, Human
ugcgagcuccuccacagcc

SEQ ID NO: 834966 - RNA, 19 nt, Human
ugggaacacagagaagggc

SEQ ID NO: 834967 - RNA, 18 nt, Human
uuuuuuuuuuuuuuuuug

SEQ ID NO: 834968 - RNA, 24 nt, Human
uuuuuuuuuuuuuuuuugaccuuu

SEQ ID NO: 834969 - RNA, 22 nt, Human
aaagggccaaggcagacaagua

SEQ ID NO: 834970 - RNA, 23 nt, Human
aagcccuggcucaggaaggucaa

SEQ ID NO: 834971 - RNA, 21 nt, Human
aaggaggcugccuccgacucc

SEQ ID NO: 834972 - RNA, 21 nt, Human
aagggccaaggcagacaagua

SEQ ID NO: 834973 - RNA, 19 nt, Human
acagaccccagcacaugac

SEQ ID NO: 834974 - RNA, 19 nt, Human
acagaccccagcacaugac

SEQ ID NO: 834975 - RNA, 20 nt, Human
acggggugugggugggcggu

SEQ ID NO: 834976 - RNA, 24 nt, Human
agaaaauuacucauuuucugacac

SEQ ID NO: 834977 - RNA, 23 nt, Human
agccacgccacccuuuccacccu

SEQ ID NO: 834978 - RNA, 23 nt, Human
agccacgccacccuuuccacccu

SEQ ID NO: 834979 - RNA, 21 nt, Human
aggcacaacuacagcaaagcc

SEQ ID NO: 834980 - RNA, 21 nt, Human
aggcacaacuacagcaaagcc

SEQ ID NO: 834981 - RNA, 24 nt, Human
aggcaggaaggaggcugccuccga

SEQ ID NO: 834982 - RNA, 20 nt, Human
aggcuguagccacgccaccc

SEQ ID NO: 834983 - RNA, 20 nt, Human
aggcuguagccacgccaccc

SEQ ID NO: 834984 - RNA, 24 nt, Human
aggggcagacgggguguggguggg

SEQ ID NO: 834985 - RNA, 26 nt, Human
caaagcccuggcucaggaaggucaau

SEQ ID NO: 834986 - RNA, 23 nt, Human
caaggcagacaaguagcugcccc

SEQ ID NO: 834987 - RNA, 23 nt, Human
caaggcagacaaguagcugcccc

SEQ ID NO: 834988 - RNA, 21 nt, Human
cacccuguccuagccagaggc

SEQ ID NO: 834989 - RNA, 25 nt, Human
cagaaaauuacucauuuucugacac

SEQ ID NO: 834990 - RNA, 23 nt, Human
cagcaaugugcuccauacagauc

SEQ ID NO: 834991 - RNA, 23 nt, Human
cagcaaugugcuccauacagauc

SEQ ID NO: 834992 - RNA, 19 nt, Human
cagccccaugacaucauaa

SEQ ID NO: 834993 - RNA, 19 nt, Human
cagccccaugacaucauaa

SEQ ID NO: 834994 - RNA, 22 nt, Human
caugacugacacucggaagcac

SEQ ID NO: 834995 - RNA, 22 nt, Human
caugacugacacucggaagcac

SEQ ID NO: 834996 - RNA, 20 nt, Human
caugggcccacagaccccag

SEQ ID NO: 834997 - RNA, 20 nt, Human
caugggcccacagaccccag

SEQ ID NO: 834998 - RNA, 25 nt, Human
ccagcacaugacugacacucggaag

SEQ ID NO: 834999 - RNA, 25 nt, Human
ccagcacaugacugacacucggaag

SEQ ID NO: 835000 - RNA, 20 nt, Human
ccagcagcaccccuuggcag

SEQ ID NO: 835001 - RNA, 20 nt, Human
ccagcagcaccccuuggcag

SEQ ID NO: 835002 - RNA, 22 nt, Human
ccagcagcaccccuuggcaguc

SEQ ID NO: 835003 - RNA, 22 nt, Human
ccagcagcaccccuuggcaguc

SEQ ID NO: 835004 - RNA, 20 nt, Human
ccagccccaugacaucauaa

SEQ ID NO: 835005 - RNA, 20 nt, Human
ccagccccaugacaucauaa

SEQ ID NO: 835006 - RNA, 21 nt, Human
ccaggcacaacuacagcaaag

SEQ ID NO: 835007 - RNA, 21 nt, Human
ccaggcacaacuacagcaaag

SEQ ID NO: 835008 - RNA, 21 nt, Human
cccacacugucgguccccagc

SEQ ID NO: 835009 - RNA, 21 nt, Human
cccacacugucgguccccagc

SEQ ID NO: 835010 - RNA, 23 nt, Human
cccacagaccccagcacaugacu

SEQ ID NO: 835011 - RNA, 23 nt, Human
cccacagaccccagcacaugacu

SEQ ID NO: 835012 - RNA, 18 nt, Human
ccccuuaggcaaauggcu

SEQ ID NO: 835013 - RNA, 18 nt, Human
ccccuuaggcaaauggcu

SEQ ID NO: 835014 - RNA, 24 nt, Human
ccccuuguccuagagcuccugagc

SEQ ID NO: 835015 - RNA, 24 nt, Human
ccccuuguccuagagcuccugagc

SEQ ID NO: 835016 - RNA, 25 nt, Human
cccugccacaccguagaugcagacc

SEQ ID NO: 835017 - RNA, 25 nt, Human
cccugccacaccguagaugcagacc

SEQ ID NO: 835018 - RNA, 19 nt, Human
cccuguccuagccagaggc

SEQ ID NO: 835019 - RNA, 20 nt, Human
cgccgucgccaugcagucca

SEQ ID NO: 835020 - RNA, 20 nt, Human
cgccgucgccaugcagucca

SEQ ID NO: 835021 - RNA, 21 nt, Human
cgccgucgccaugcaguccag

SEQ ID NO: 835022 - RNA, 21 nt, Human
cgccgucgccaugcaguccag

SEQ ID NO: 835023 - RNA, 27 nt, Human
cuaacacacccacacugucggucccca

SEQ ID NO: 835024 - RNA, 27 nt, Human
cuaacacacccacacugucggucccca

SEQ ID NO: 835025 - RNA, 23 nt, Human
cugcaugugcacauucugguccu

SEQ ID NO: 835026 - RNA, 23 nt, Human
cugcaugugcacauucugguccu

SEQ ID NO: 835027 - RNA, 22 nt, Human
gaccccagcacaugacugacac

SEQ ID NO: 835028 - RNA, 22 nt, Human
gaccccagcacaugacugacac

SEQ ID NO: 835029 - RNA, 19 nt, Human
gacugccccaccacacgcc

SEQ ID NO: 835030 - RNA, 19 nt, Human
gacugccccaccacacgcc

SEQ ID NO: 835031 - RNA, 22 nt, Human
gagugccgaggggcccugccac

SEQ ID NO: 835032 - RNA, 22 nt, Human
gagugccgaggggcccugccac

SEQ ID NO: 835033 - RNA, 21 nt, Human
gaugcagaccuggagcggucc

SEQ ID NO: 835034 - RNA, 21 nt, Human
gaugcagaccuggagcggucc

SEQ ID NO: 835035 - RNA, 19 nt, Human
gccgucgccaugcagucca

SEQ ID NO: 835036 - RNA, 19 nt, Human
gccgucgccaugcagucca

SEQ ID NO: 835037 - RNA, 22 nt, Human
gcgguccccuuguccuagagcu

SEQ ID NO: 835038 - RNA, 22 nt, Human
gcgguccccuuguccuagagcu

SEQ ID NO: 835039 - RNA, 19 nt, Human
gcgugugguggggucaagg

SEQ ID NO: 835040 - RNA, 26 nt, Human
ggaagcacagaacaaaggguaggacg

SEQ ID NO: 835041 - RNA, 26 nt, Human
ggaagcacagaacaaaggguaggacg

SEQ ID NO: 835042 - RNA, 21 nt, Human
ggcagacgggguguggguggg

SEQ ID NO: 835043 - RNA, 19 nt, Human
gggccaaggcagacaagua

SEQ ID NO: 835044 - RNA, 22 nt, Human
ggucaaggggcagacggggugu

SEQ ID NO: 835045 - RNA, 22 nt, Human
gguccccagcacgcagaugccc

SEQ ID NO: 835046 - RNA, 22 nt, Human
gguccccagcacgcagaugccc

SEQ ID NO: 835047 - RNA, 21 nt, Human
guccccuuguccuagagcucc

SEQ ID NO: 835048 - RNA, 21 nt, Human
guccccuuguccuagagcucc

SEQ ID NO: 835049 - RNA, 21 nt, Human
gugggugggcggugccgcaag

SEQ ID NO: 835050 - RNA, 19 nt, Human
uacagauccuccuaacaca

SEQ ID NO: 835051 - RNA, 22 nt, Human
uacagauccuccuaacacaccu

SEQ ID NO: 835052 - RNA, 20 nt, Human
uccacccuguccuagccaga

SEQ ID NO: 835053 - RNA, 20 nt, Human
uccacccuguccuagccaga

SEQ ID NO: 835054 - RNA, 21 nt, Human
uccuccuaacacacccacacu

SEQ ID NO: 835055 - RNA, 23 nt, Human
ucugacacauuuauugaccagca

SEQ ID NO: 835056 - RNA, 19 nt, Human
ugacugacacucggaagca

SEQ ID NO: 835057 - RNA, 19 nt, Human
ugacugacacucggaagca

SEQ ID NO: 835058 - RNA, 19 nt, Human
ugcccaucugcaugugcac

SEQ ID NO: 835059 - RNA, 19 nt, Human
ugcccaucugcaugugcac

SEQ ID NO: 835060 - RNA, 20 nt, Human
ugggaaagaugacacuagug

SEQ ID NO: 835061 - RNA, 20 nt, Human
ugggaaagaugacacuagug

SEQ ID NO: 835062 - RNA, 19 nt, Human
ugguggggucaaggggcag

SEQ ID NO: 835063 - RNA, 22 nt, Human
ugguggggucaaggggcagacg

SEQ ID NO: 835064 - RNA, 26 nt, Human
uguccuagagcuccugagccaggcac

SEQ ID NO: 835065 - RNA, 26 nt, Human
uguccuagagcuccugagccaggcac

SEQ ID NO: 835066 - RNA, 19 nt, Human
ugugguggggucaaggggc

SEQ ID NO: 835067 - RNA, 21 nt, Human
uuccacccuguccuagccaga

SEQ ID NO: 835068 - RNA, 26 nt, Human
uuuuuuuuuuuuuuuuuuuuuuuggg

SEQ ID NO: 835069 - RNA, 23 nt, Human
cccaggcucccugcauccgagag

SEQ ID NO: 835070 - RNA, 18 nt, Human
cccugcauccgagagccc

SEQ ID NO: 835071 - RNA, 19 nt, Human
cccugcauccgagagcccu

SEQ ID NO: 835072 - RNA, 20 nt, Human
ccgcccguccugcuugcugc

SEQ ID NO: 835073 - RNA, 18 nt, Human
cucccugcauccgagagc

SEQ ID NO: 835074 - RNA, 24 nt, Human
cuccggaagcugcuguuugggccc

SEQ ID NO: 835075 - RNA, 21 nt, Human
cuucagucugucuucuuccuc

SEQ ID NO: 835076 - RNA, 18 nt, Human
ucaagacauuuauauaaa

SEQ ID NO: 835077 - RNA, 23 nt, Human
ucaauagacauguuuacacuucc

SEQ ID NO: 835078 - RNA, 20 nt, Human
ugcugcuggguccgguugcc

SEQ ID NO: 835079 - RNA, 22 nt, Human
uuccucagcuccuuccgacucc

SEQ ID NO: 835080 - RNA, 21 nt, Human
uugcugcuggguccgguugcc

SEQ ID NO: 835081 - RNA, 30 nt, Human
uugcugcuggguccgguugccgaggcggaa

SEQ ID NO: 835082 - RNA, 18 nt, Human
uuuuuuuuuuuuuuuuug

SEQ ID NO: 835083 - RNA, 21 nt, Human
uuuuuuuuuuuuuuuuuggcu

SEQ ID NO: 835084 - RNA, 22 nt, Human
uuuuuuuuuuuuuuuuuuuggc

SEQ ID NO: 835085 - RNA, 24 nt, Human
agagcagcgcgggagugugggggc

SEQ ID NO: 835086 - RNA, 19 nt, Human
aggcgaaaugaucaggggc

SEQ ID NO: 835087 - RNA, 22 nt, Human
agugugggggcccccuuggcug

SEQ ID NO: 835088 - RNA, 19 nt, Human
cagcaggugggcugcuccc

SEQ ID NO: 835089 - RNA, 22 nt, Human
cagcaggugggcugcucccuga

SEQ ID NO: 835090 - RNA, 21 nt, Human
ccagcaggugggcugcucccu

SEQ ID NO: 835091 - RNA, 19 nt, Human
cccugagccgcagagcagc

SEQ ID NO: 835092 - RNA, 25 nt, Human
cgcagagcagcgcgggagugugggg

SEQ ID NO: 835093 - RNA, 22 nt, Human
cgggagugugggggcccccuug

SEQ ID NO: 835094 - RNA, 18 nt, Human
cuaguccuugcucuuuua

SEQ ID NO: 835095 - RNA, 21 nt, Human
cucccugagccgcagagcagc

SEQ ID NO: 835096 - RNA, 24 nt, Human
gcagagcagcgcgggagugugggg

SEQ ID NO: 835097 - RNA, 22 nt, Human
gcuggaccacagggggacccug

SEQ ID NO: 835098 - RNA, 18 nt, Human
ggacuggccuggagguca

SEQ ID NO: 835099 - RNA, 24 nt, Human
gggcuggugacuugccucaaguuc

SEQ ID NO: 835100 - RNA, 20 nt, Human
guggagagcugcuucccaca

SEQ ID NO: 835101 - RNA, 19 nt, Human
gugggggcccccuuggcug

SEQ ID NO: 835102 - RNA, 18 nt, Human
uccacccgccuggguuga

SEQ ID NO: 835103 - RNA, 19 nt, Human
ucccacaggcagaugcugc

SEQ ID NO: 835104 - RNA, 19 nt, Human
ucccacaggcagaugcugc

SEQ ID NO: 835105 - RNA, 18 nt, Human
ugagaggacugagacaca

SEQ ID NO: 835106 - RNA, 20 nt, Human
ugagaggacugagacacaga

SEQ ID NO: 835107 - RNA, 22 nt, Human
ugccucaaguuccucauccagc

SEQ ID NO: 835108 - RNA, 21 nt, Human
uggccuggaggucaggaacuc

SEQ ID NO: 835109 - RNA, 18 nt, Human
uggguugaggaagguguc

SEQ ID NO: 835110 - RNA, 24 nt, Human
uggguugaggaaggugucuggggu

SEQ ID NO: 835111 - RNA, 21 nt, Human
uuaggcgaaaugaucaggggc

SEQ ID NO: 835112 - RNA, 23 nt, Human
uuuacuggcuggaccacaggggg

SEQ ID NO: 835113 - RNA, 21 nt, Human
aagcauccccauccuucugag

SEQ ID NO: 835114 - RNA, 18 nt, Human
accccuuccucccucccu

SEQ ID NO: 835115 - RNA, 21 nt, Human
acccugggccaguaggaagcc

SEQ ID NO: 835116 - RNA, 20 nt, Human
acuggggaggcagaaggagg

SEQ ID NO: 835117 - RNA, 18 nt, Human
agaaggagggauggaggc

SEQ ID NO: 835118 - RNA, 18 nt, Human
agggauggaggcacuggg

SEQ ID NO: 835119 - RNA, 21 nt, Human
augaccagcacaccuacaagc

SEQ ID NO: 835120 - RNA, 20 nt, Human
augagcagucucagcuccac

SEQ ID NO: 835121 - RNA, 18 nt, Human
auggaggcacugggucac

SEQ ID NO: 835122 - RNA, 19 nt, Human
auggccacgcuccaccccc

SEQ ID NO: 835123 - RNA, 20 nt, Human
cacaccuacaagcauaugga

SEQ ID NO: 835124 - RNA, 18 nt, Human
caccaugaccagcacacc

SEQ ID NO: 835125 - RNA, 20 nt, Human
cacccuuuaguuauacugac

SEQ ID NO: 835126 - RNA, 19 nt, Human
cagggugguuuugacaagg

SEQ ID NO: 835127 - RNA, 23 nt, Human
cauacccuccaaagaccuauucc

SEQ ID NO: 835128 - RNA, 22 nt, Human
caugaccagcacaccuacaagc

SEQ ID NO: 835129 - RNA, 21 nt, Human
cauggccacgcuccacccccu

SEQ ID NO: 835130 - RNA, 19 nt, Human
ccacccuuuaguuauacug

SEQ ID NO: 835131 - RNA, 18 nt, Human
ccccacuuacccuuuccu

SEQ ID NO: 835132 - RNA, 19 nt, Human
ccccacuuacccuuuccua

SEQ ID NO: 835133 - RNA, 22 nt, Human
ccccugggccccacuuacccuu

SEQ ID NO: 835134 - RNA, 19 nt, Human
cccugggccccacuuaccc

SEQ ID NO: 835135 - RNA, 19 nt, Human
cccugggccccacuuaccc

SEQ ID NO: 835136 - RNA, 23 nt, Human
cccuuuccuacugugaagcccac

SEQ ID NO: 835137 - RNA, 21 nt, Human
ccucccucccugccccugggc

SEQ ID NO: 835138 - RNA, 21 nt, Human
cgaggcagaaguggcacgucc

SEQ ID NO: 835139 - RNA, 23 nt, Human
cuccaaagaccuauucccucccu

SEQ ID NO: 835140 - RNA, 18 nt, Human
cuccaccagcggcaggca

SEQ ID NO: 835141 - RNA, 26 nt, Human
cuccaccagcggcaggcacacacaca

SEQ ID NO: 835142 - RNA, 18 nt, Human
cuccacccccuuccugga

SEQ ID NO: 835143 - RNA, 21 nt, Human
cucccugccccugggccccac

SEQ ID NO: 835144 - RNA, 21 nt, Human
cucccuuggaaaguccauggg

SEQ ID NO: 835145 - RNA, 22 nt, Human
cugccaccaugugcugucuucg

SEQ ID NO: 835146 - RNA, 24 nt, Human
cugccccugggccccacuuacccu

SEQ ID NO: 835147 - RNA, 19 nt, Human
cuggggaggcagaaggagg

SEQ ID NO: 835148 - RNA, 20 nt, Human
cuuugucuugcauacccucc

SEQ ID NO: 835149 - RNA, 23 nt, Human
gaccuugucccaccucguuccac

SEQ ID NO: 835150 - RNA, 21 nt, Human
gagcagucucagcuccaccag

SEQ ID NO: 835151 - RNA, 20 nt, Human
gaggcagaaggagggaugga

SEQ ID NO: 835152 - RNA, 19 nt, Human
gagggauggaggcacuggg

SEQ ID NO: 835153 - RNA, 22 nt, Human
gagggauggaggcacuggguca

SEQ ID NO: 835154 - RNA, 22 nt, Human
gaugguacacuucucugagccu

SEQ ID NO: 835155 - RNA, 24 nt, Human
gcacacacacaucacugagcagca

SEQ ID NO: 835156 - RNA, 24 nt, Human
gccaccaugugcugucuucgucau

SEQ ID NO: 835157 - RNA, 19 nt, Human
gccacgcuccacccccuuc

SEQ ID NO: 835158 - RNA, 22 nt, Human
gcccugaaaccccaccuuccuu

SEQ ID NO: 835159 - RNA, 23 nt, Human
gcuccacccccuuccuggacuca

SEQ ID NO: 835160 - RNA, 20 nt, Human
ggagaugggcaguuccugag

SEQ ID NO: 835161 - RNA, 20 nt, Human
ggaggcagaaggagggaugg

SEQ ID NO: 835162 - RNA, 21 nt, Human
gggugguuuugacaaggucug

SEQ ID NO: 835163 - RNA, 20 nt, Human
ggugguuuugacaaggucug

SEQ ID NO: 835164 - RNA, 21 nt, Human
guccggaugucgggaacagga

SEQ ID NO: 835165 - RNA, 21 nt, Human
uaucuaucucugccaccaugu

SEQ ID NO: 835166 - RNA, 23 nt, Human
uauucccucccuuggaaagucca

SEQ ID NO: 835167 - RNA, 23 nt, Human
uccaaagaccuauucccucccuu

SEQ ID NO: 835168 - RNA, 19 nt, Human
uccauggccacgcuccacc

SEQ ID NO: 835169 - RNA, 30 nt, Human
uccccauccuucugagaugagcagucucaa

SEQ ID NO: 835170 - RNA, 19 nt, Human
uccuucugagaugagcagu

SEQ ID NO: 835171 - RNA, 23 nt, Human
ucuacgaggcagaaguggcacgu

SEQ ID NO: 835172 - RNA, 19 nt, Human
ucucaaauacccugggcca

SEQ ID NO: 835173 - RNA, 20 nt, Human
ucuucuacgaggcagaaguu

SEQ ID NO: 835174 - RNA, 22 nt, Human
ugagaugagcagucucagcucc

SEQ ID NO: 835175 - RNA, 20 nt, Human
ugcagggugguuuugacaag

SEQ ID NO: 835176 - RNA, 18 nt, Human
uggccaggaaaucaagca

SEQ ID NO: 835177 - RNA, 22 nt, Human
ugggaaggaaguuauuacuugg

SEQ ID NO: 835178 - RNA, 24 nt, Human
uggggagaugggcaguuccugagg

SEQ ID NO: 835179 - RNA, 18 nt, Human
uggggaggcagaaggagg

SEQ ID NO: 835180 - RNA, 21 nt, Human
uuacuuggcaggagggacagc

SEQ ID NO: 835181 - RNA, 18 nt, Human
uuccucccucccugcccc

SEQ ID NO: 835182 - RNA, 21 nt, Human
uuccuggacucaguuaccccu

SEQ ID NO: 835183 - RNA, 21 nt, Human
aaacauccagggacuagggga

SEQ ID NO: 835184 - RNA, 20 nt, Human
aacaguuuacacacaaauuu

SEQ ID NO: 835185 - RNA, 21 nt, Human
aagcccagauagaagucagga

SEQ ID NO: 835186 - RNA, 20 nt, Human
aggcaaggagggcugguaug

SEQ ID NO: 835187 - RNA, 25 nt, Human
agggacuagaaguccuggccaagcc

SEQ ID NO: 835188 - RNA, 21 nt, Human
caagaggaagagccaaggcug

SEQ ID NO: 835189 - RNA, 23 nt, Human
caagcccagauagaagucaggaa

SEQ ID NO: 835190 - RNA, 22 nt, Human
cccagauagaagucaggaaggu

SEQ ID NO: 835191 - RNA, 20 nt, Human
cuggaaacugguggaauuuu

SEQ ID NO: 835192 - RNA, 23 nt, Human
cuggugggcaguagggcuggggg

SEQ ID NO: 835193 - RNA, 22 nt, Human
ggacuagaaguccuggccaagc

SEQ ID NO: 835194 - RNA, 24 nt, Human
gggguccaguggcuggagggaggc

SEQ ID NO: 835195 - RNA, 20 nt, Human
uagcaguaagugugcugaag

SEQ ID NO: 835196 - RNA, 19 nt, Human
uccaguggcuggagggagg

SEQ ID NO: 835197 - RNA, 22 nt, Human
uggagggaggcaaggagggcug

SEQ ID NO: 835198 - RNA, 22 nt, Human
uggccaagcccagauagaaguc

SEQ ID NO: 835199 - RNA, 20 nt, Human
uggcuggagggaggcaagga

SEQ ID NO: 835200 - RNA, 22 nt, Human
ugggcaguagggcuggggguac

SEQ ID NO: 835201 - RNA, 19 nt, Human
uggugggcaguagggcugg

SEQ ID NO: 835202 - RNA, 22 nt, Human
uugggagaaacauccagggacu

SEQ ID NO: 835203 - RNA, 20 nt, Human
aaaauggaaagaggugagua

SEQ ID NO: 835204 - RNA, 20 nt, Human
aaaugggagcuagggagagg

SEQ ID NO: 835205 - RNA, 23 nt, Human
acagaagccccauuucaggccca

SEQ ID NO: 835206 - RNA, 19 nt, Human
acagagacacagggagaga

SEQ ID NO: 835207 - RNA, 22 nt, Human
agaaaugggagcuagggagaga

SEQ ID NO: 835208 - RNA, 19 nt, Human
agaccacucggaacagugu

SEQ ID NO: 835209 - RNA, 21 nt, Human
agagugaagggugugaggugg

SEQ ID NO: 835210 - RNA, 22 nt, Human
agagugaagggugugagguggg

SEQ ID NO: 835211 - RNA, 19 nt, Human
aggaagcaaaguggggagc

SEQ ID NO: 835212 - RNA, 21 nt, Human
aggccaaggcaggugggagga

SEQ ID NO: 835213 - RNA, 19 nt, Human
agggagagaggcucaggcc

SEQ ID NO: 835214 - RNA, 23 nt, Human
agugaagggugugaggugggaag

SEQ ID NO: 835215 - RNA, 21 nt, Human
cacuggggacaacacagaagc

SEQ ID NO: 835216 - RNA, 24 nt, Human
cccagaucccaaucccuccucaag

SEQ ID NO: 835217 - RNA, 20 nt, Human
cuggaaggaagugggaaggg

SEQ ID NO: 835218 - RNA, 20 nt, Human
gaagggugugaggugggaag

SEQ ID NO: 835219 - RNA, 22 nt, Human
gaccacucggaacaguguuuaa

SEQ ID NO: 835220 - RNA, 24 nt, Human
gagacgauucuguaaagccagggg

SEQ ID NO: 835221 - RNA, 22 nt, Human
gccaauggagguccuggaagga

SEQ ID NO: 835222 - RNA, 20 nt, Human
ggagguccuggaaggaagug

SEQ ID NO: 835223 - RNA, 18 nt, Human
gggagcccuucuaggagc

SEQ ID NO: 835224 - RNA, 22 nt, Human
gggaugggguacauaugggagc

SEQ ID NO: 835225 - RNA, 24 nt, Human
ggggaugggguacauaugggagcc

SEQ ID NO: 835226 - RNA, 21 nt, Human
uauuacucaaaauggaaagag

SEQ ID NO: 835227 - RNA, 25 nt, Human
ucaaaauggaaagaggugaguaugg

SEQ ID NO: 835228 - RNA, 20 nt, Human
ucacuggggacaacacagaa

SEQ ID NO: 835229 - RNA, 22 nt, Human
ucagacucagacauuuauuacu

SEQ ID NO: 835230 - RNA, 21 nt, Human
ugaagggugugaggugggaag

SEQ ID NO: 835231 - RNA, 19 nt, Human
ugaggagaccacucggaac

SEQ ID NO: 835232 - RNA, 20 nt, Human
ugaggugggaaggacggaug

SEQ ID NO: 835233 - RNA, 19 nt, Human
ugaguaugggggauggggu

SEQ ID NO: 835234 - RNA, 19 nt, Human
uggaaggaagugggaaggg

SEQ ID NO: 835235 - RNA, 18 nt, Human
ugggaagggacccagaaa

SEQ ID NO: 835236 - RNA, 18 nt, Human
ugggagccuggauuuggg

SEQ ID NO: 835237 - RNA, 22 nt, Human
ugggaggaggggcagccaaugg

SEQ ID NO: 835238 - RNA, 23 nt, Human
ugggaggaggggcagccaaugga

SEQ ID NO: 835239 - RNA, 22 nt, Human
uggggacaacacagaagcccca

SEQ ID NO: 835240 - RNA, 21 nt, Human
ugggggaugggguacauaugg

SEQ ID NO: 835241 - RNA, 24 nt, Human
ugggggaugggguacauaugggag

SEQ ID NO: 835242 - RNA, 19 nt, Human
uguaaagccaggggauaca

SEQ ID NO: 835243 - RNA, 25 nt, Human
ugugaggugggaaggacggaugagg

SEQ ID NO: 835244 - RNA, 25 nt, Human
aaaaaauaaaaauuaaaaaguaagc

SEQ ID NO: 835245 - RNA, 21 nt, Human
aaaaaguaagcagaggccagg

SEQ ID NO: 835246 - RNA, 19 nt, Human
aaaaaguaagcaugucuua

SEQ ID NO: 835247 - RNA, 22 nt, Human
aaaagaaacagucauguaauac

SEQ ID NO: 835248 - RNA, 25 nt, Human
aaaauauacauauccuaguuaccaa

SEQ ID NO: 835249 - RNA, 21 nt, Human
aacacauguuaaaaaaguaaa

SEQ ID NO: 835250 - RNA, 19 nt, Human
aacauggugaaaccccauc

SEQ ID NO: 835251 - RNA, 20 nt, Human
aacauggugaaaccccaucu

SEQ ID NO: 835252 - RNA, 21 nt, Human
aacauggugaaaccccaucuc

SEQ ID NO: 835253 - RNA, 21 nt, Human
aacauggugaaaccccaucuc

SEQ ID NO: 835254 - RNA, 27 nt, Human
aagaaaucaggacaacuguagugggca

SEQ ID NO: 835255 - RNA, 18 nt, Human
aaucgcuugaaccuggga

SEQ ID NO: 835256 - RNA, 24 nt, Human
aaucgcuugaaccugggaggcgga

SEQ ID NO: 835257 - RNA, 25 nt, Human
aauuaaaaaguaagcaugucuuauu

SEQ ID NO: 835258 - RNA, 24 nt, Human
acagagagagacucagucucaaaa

SEQ ID NO: 835259 - RNA, 21 nt, Human
acaguucaauuuuuacuuuga

SEQ ID NO: 835260 - RNA, 20 nt, Human
acauauuacuguacaaacaa

SEQ ID NO: 835261 - RNA, 24 nt, Human
accccaucucuacuaaaaauacaa

SEQ ID NO: 835262 - RNA, 22 nt, Human
agaaucgcuugaaccugggagg

SEQ ID NO: 835263 - RNA, 23 nt, Human
agacucagucucaaaaaaauaaa

SEQ ID NO: 835264 - RNA, 24 nt, Human
agcacuuugggaggccgaggcggg

SEQ ID NO: 835265 - RNA, 20 nt, Human
agccgggcaugguggcaguu

SEQ ID NO: 835266 - RNA, 22 nt, Human
agccuggccaacauggugaaac

SEQ ID NO: 835267 - RNA, 24 nt, Human
agccuggccaacauggugaaaccc

SEQ ID NO: 835268 - RNA, 24 nt, Human
agccugggcaacagagagagacuc

SEQ ID NO: 835269 - RNA, 22 nt, Human
aggcaggagaaucgcuugaacc

SEQ ID NO: 835270 - RNA, 24 nt, Human
aggcaggagaaucgcuugaaccug

SEQ ID NO: 835271 - RNA, 22 nt, Human
aggccaggcgcgguggcucaug

SEQ ID NO: 835272 - RNA, 23 nt, Human
aggccgaggcgggaggaucacug

SEQ ID NO: 835273 - RNA, 24 nt, Human
aggcgcgguggcucaugccuguaa

SEQ ID NO: 835274 - RNA, 22 nt, Human
aggcggagauuugcagugagcc

SEQ ID NO: 835275 - RNA, 20 nt, Human
aggcugaggcaggagaaucg

SEQ ID NO: 835276 - RNA, 24 nt, Human
aggcugaggcaggagaaucgcuug

SEQ ID NO: 835277 - RNA, 18 nt, Human
agugacuaauuucuccau

SEQ ID NO: 835278 - RNA, 24 nt, Human
aucacgccauuguacuccagccug

SEQ ID NO: 835279 - RNA, 19 nt, Human
augccuguaaucccagcac

SEQ ID NO: 835280 - RNA, 24 nt, Human
auuguacuccagccugggcaacag

SEQ ID NO: 835281 - RNA, 21 nt, Human
caaaugcaacucauacacuuu

SEQ ID NO: 835282 - RNA, 24 nt, Human
caacauggugaaaccccaucucua

SEQ ID NO: 835283 - RNA, 20 nt, Human
caaugcugauagaguuuaca

SEQ ID NO: 835284 - RNA, 21 nt, Human
caauuauaaacagaaaaaaac

SEQ ID NO: 835285 - RNA, 23 nt, Human
caauuauaaacagaaaaaaacuc

SEQ ID NO: 835286 - RNA, 18 nt, Human
cacagaucacaagacaag

SEQ ID NO: 835287 - RNA, 24 nt, Human
cacaugccuaagaucuaaacaacu

SEQ ID NO: 835288 - RNA, 23 nt, Human
caccuaguaauaugccuauuuua

SEQ ID NO: 835289 - RNA, 24 nt, Human
cacugcuacaagguaccuacucaa

SEQ ID NO: 835290 - RNA, 18 nt, Human
cagaaaaugcaaagcaca

SEQ ID NO: 835291 - RNA, 19 nt, Human
cagaaaaugcaaagcacac

SEQ ID NO: 835292 - RNA, 19 nt, Human
cagagagagacucagucuc

SEQ ID NO: 835293 - RNA, 21 nt, Human
cagagagagacucagucucag

SEQ ID NO: 835294 - RNA, 24 nt, Human
cagcacuuugggaggccgaggcgg

SEQ ID NO: 835295 - RNA, 22 nt, Human
cagccugggcaacagagagaga

SEQ ID NO: 835296 - RNA, 24 nt, Human
cagcuacucaggaggcugaggcag

SEQ ID NO: 835297 - RNA, 18 nt, Human
cauaauaaugguaugaaa

SEQ ID NO: 835298 - RNA, 23 nt, Human
cauuaaacauauuacuguacaaa

SEQ ID NO: 835299 - RNA, 18 nt, Human
cauuguacuccagccugg

SEQ ID NO: 835300 - RNA, 19 nt, Human
cauuguacuccagccuggg

SEQ ID NO: 835301 - RNA, 21 nt, Human
cauuguacuccagccugggca

SEQ ID NO: 835302 - RNA, 24 nt, Human
cauuguacuccagccugggcaaca

SEQ ID NO: 835303 - RNA, 24 nt, Human
ccaaucacauucauacagagaaaa

SEQ ID NO: 835304 - RNA, 20 nt, Human
ccauuguacuccagccuggg

SEQ ID NO: 835305 - RNA, 21 nt, Human
ccauuguacuccagccugggc

SEQ ID NO: 835306 - RNA, 22 nt, Human
ccauuguacuccagccugggca

SEQ ID NO: 835307 - RNA, 23 nt, Human
ccauuguacuccagccugggcaa

SEQ ID NO: 835308 - RNA, 24 nt, Human
ccauuguacuccagccugggcaac

SEQ ID NO: 835309 - RNA, 19 nt, Human
cccagugcuaaaaaugacu

SEQ ID NO: 835310 - RNA, 19 nt, Human
ccugagcuggcgcaagccu

SEQ ID NO: 835311 - RNA, 23 nt, Human
ccuggccaacauggugaaacccc

SEQ ID NO: 835312 - RNA, 24 nt, Human
ccuggccaacauggugaaacccca

SEQ ID NO: 835313 - RNA, 20 nt, Human
ccuguaaucccagcacuuug

SEQ ID NO: 835314 - RNA, 21 nt, Human
ccuguaaucccagcuacucag

SEQ ID NO: 835315 - RNA, 22 nt, Human
ccuguaaucccagcuacucagg

SEQ ID NO: 835316 - RNA, 24 nt, Human
cgagaccagccuggccaacauggu

SEQ ID NO: 835317 - RNA, 24 nt, Human
cgagaucacgccauuguacuccag

SEQ ID NO: 835318 - RNA, 22 nt, Human
cuagucuaacaaauucaauaag

SEQ ID NO: 835319 - RNA, 24 nt, Human
cucaugccuguaaucccagcacuu

SEQ ID NO: 835320 - RNA, 23 nt, Human
cuggccaacauggugaaacccca

SEQ ID NO: 835321 - RNA, 19 nt, Human
cuugaaccugggaggcgga

SEQ ID NO: 835322 - RNA, 24 nt, Human
cuuuccuucauggacccuuucucu

SEQ ID NO: 835323 - RNA, 21 nt, Human
cuuuggaguccccuccauucu

SEQ ID NO: 835324 - RNA, 23 nt, Human
cuuuuccaguggaugcuauuacu

SEQ ID NO: 835325 - RNA, 19 nt, Human
gaggcggagauuugcagug

SEQ ID NO: 835326 - RNA, 24 nt, Human
gaggcgggaggaucacugcgguca

SEQ ID NO: 835327 - RNA, 24 nt, Human
gccaacauggugaaaccccaucuc

SEQ ID NO: 835328 - RNA, 22 nt, Human
gccauuguacuccagccugggc

SEQ ID NO: 835329 - RNA, 24 nt, Human
gccauuguacuccagccugggcaa

SEQ ID NO: 835330 - RNA, 21 nt, Human
ggcggagauuugcagugagcc

SEQ ID NO: 835331 - RNA, 24 nt, Human
ggcggagauuugcagugagccgag

SEQ ID NO: 835332 - RNA, 24 nt, Human
gggcaugguggcaguugccuguaa

SEQ ID NO: 835333 - RNA, 24 nt, Human
gguggcaguugccuguaaucccag

SEQ ID NO: 835334 - RNA, 23 nt, Human
gguggcucaugccuguaauccca

SEQ ID NO: 835335 - RNA, 24 nt, Human
gguggcucaugccuguaaucccag

SEQ ID NO: 835336 - RNA, 19 nt, Human
uaaaaaguaagcagaggcc

SEQ ID NO: 835337 - RNA, 20 nt, Human
uaaaaaguaagcagaggcca

SEQ ID NO: 835338 - RNA, 23 nt, Human
uaaacaauuauaaacagaaaaaa

SEQ ID NO: 835339 - RNA, 19 nt, Human
uacacagaucacaagacaa

SEQ ID NO: 835340 - RNA, 21 nt, Human
uacaucagaaaaugcaaagca

SEQ ID NO: 835341 - RNA, 19 nt, Human
uagggugauaaacauggca

SEQ ID NO: 835342 - RNA, 19 nt, Human
uaggugucaaaacuuaaag

SEQ ID NO: 835343 - RNA, 22 nt, Human
uauaaacagaaaaaaacucuuc

SEQ ID NO: 835344 - RNA, 23 nt, Human
uauuacuguacaaacaauuugga

SEQ ID NO: 835345 - RNA, 22 nt, Human
ucaaucuaaaaauaauguuccc

SEQ ID NO: 835346 - RNA, 23 nt, Human
ucacgccauuguacuccagccug

SEQ ID NO: 835347 - RNA, 22 nt, Human
ucaugccuguaaucccagcacu

SEQ ID NO: 835348 - RNA, 21 nt, Human
uccauaaccacauuagugcaa

SEQ ID NO: 835349 - RNA, 18 nt, Human
uccccuccauucuauuaa

SEQ ID NO: 835350 - RNA, 18 nt, Human
ucgcuugaaccugggagg

SEQ ID NO: 835351 - RNA, 23 nt, Human
ucuauuaaaauauacauauccua

SEQ ID NO: 835352 - RNA, 23 nt, Human
ucucuacuaaaaauacaaaaauu

SEQ ID NO: 835353 - RNA, 24 nt, Human
ucuuauuguuuauuuuuccccagu

SEQ ID NO: 835354 - RNA, 19 nt, Human
ugaaaccccaucucuacua

SEQ ID NO: 835355 - RNA, 22 nt, Human
ugagccgagaucacgccauugu

SEQ ID NO: 835356 - RNA, 20 nt, Human
ugaggcaggagaaucgcuug

SEQ ID NO: 835357 - RNA, 24 nt, Human
ugaggcaggagaaucgcuugaacc

SEQ ID NO: 835358 - RNA, 25 nt, Human
ugaggcaggagaaucgcuugaaccu

SEQ ID NO: 835359 - RNA, 22 nt, Human
ugccuaagaucuaaacaacuga

SEQ ID NO: 835360 - RNA, 23 nt, Human
ugccuguaaucccagcacuuugg

SEQ ID NO: 835361 - RNA, 23 nt, Human
ugccuguaaucccagcacuuugg

SEQ ID NO: 835362 - RNA, 24 nt, Human
ugccuguaaucccagcacuuuggg

SEQ ID NO: 835363 - RNA, 24 nt, Human
ugccuguaaucccagcuacucagg

SEQ ID NO: 835364 - RNA, 24 nt, Human
uggccaacauggugaaaccccauc

SEQ ID NO: 835365 - RNA, 24 nt, Human
uggcucaugccuguaaucccagca

SEQ ID NO: 835366 - RNA, 24 nt, Human
ugggaaaauguuaagcacuaaauc

SEQ ID NO: 835367 - RNA, 19 nt, Human
ugggaggccgaggcgggag

SEQ ID NO: 835368 - RNA, 24 nt, Human
ugggaggccgaggcgggaggauca

SEQ ID NO: 835369 - RNA, 25 nt, Human
ugggaggcggagauuugcagugagc

SEQ ID NO: 835370 - RNA, 24 nt, Human
ugguggcaguugccuguaauccca

SEQ ID NO: 835371 - RNA, 19 nt, Human
uguaaaauaaaucuaugga

SEQ ID NO: 835372 - RNA, 22 nt, Human
uguacuccagccugggcaacag

SEQ ID NO: 835373 - RNA, 22 nt, Human
uguacuccagccugggcaacag

SEQ ID NO: 835374 - RNA, 25 nt, Human
uuaaaugcugaauaaaacauuuuca

SEQ ID NO: 835375 - RNA, 18 nt, Human
uuacaacuuuaucauagu

SEQ ID NO: 835376 - RNA, 18 nt, Human
uuagccgggcaugguggc

SEQ ID NO: 835377 - RNA, 24 nt, Human
uucuauuaaaauauacauauccua

SEQ ID NO: 835378 - RNA, 25 nt, Human
uugaaccugggaggcggagauuugc

SEQ ID NO: 835379 - RNA, 20 nt, Human
uugcagugagccgagaucac

SEQ ID NO: 835380 - RNA, 21 nt, Human
uugcagugagccgagaucacg

SEQ ID NO: 835381 - RNA, 25 nt, Human
uugggaggccgaggcgggaggauca

SEQ ID NO: 835382 - RNA, 23 nt, Human
uuuauacaaaaauacucuaaagu

SEQ ID NO: 835383 - RNA, 25 nt, Human
uuucuccauaaccacauuagugcaa

SEQ ID NO: 835384 - RNA, 19 nt, Human
uuugcagugagccgagauc

SEQ ID NO: 835385 - RNA, 19 nt, Human
uuuggaguccccuccauuc

SEQ ID NO: 835386 - RNA, 19 nt, Human
uuuucacaucaaguuggcu

SEQ ID NO: 835387 - RNA, 25 nt, Human
uuuuuuuuuuuuuuuuuuuacuuaa

SEQ ID NO: 835388 - RNA, 20 nt, Human
agaggacguggggccggccc

SEQ ID NO: 835389 - RNA, 24 nt, Human
aggcaggagggcagcgugggagug

SEQ ID NO: 835390 - RNA, 22 nt, Human
agugcugcaaccguguucagcc

SEQ ID NO: 835391 - RNA, 20 nt, Human
agugggucugccucgggggc

SEQ ID NO: 835392 - RNA, 20 nt, Human
caacucaggguggugcgcag

SEQ ID NO: 835393 - RNA, 19 nt, Human
caacucagguggcgcacag

SEQ ID NO: 835394 - RNA, 21 nt, Human
caggcaggagggcagcguggg

SEQ ID NO: 835395 - RNA, 18 nt, Human
ccgcaggcuaucuucacc

SEQ ID NO: 835396 - RNA, 21 nt, Human
cucgagagcuuuguucuugag

SEQ ID NO: 835397 - RNA, 22 nt, Human
gaggacguggggccggcccugc

SEQ ID NO: 835398 - RNA, 19 nt, Human
gccggcccugccucccgga

SEQ ID NO: 835399 - RNA, 20 nt, Human
gcggcagcccagccuucccc

SEQ ID NO: 835400 - RNA, 20 nt, Human
ugagugggucugccucgggg

SEQ ID NO: 835401 - RNA, 18 nt, Human
ugcgcagaggacgugggg

SEQ ID NO: 835402 - RNA, 20 nt, Human
ugcgcagaggacguggggcc

SEQ ID NO: 835403 - RNA, 20 nt, Human
ugcugcaaccguguucagcc

SEQ ID NO: 835404 - RNA, 18 nt, Human
uggggccggcccugccuc

SEQ ID NO: 835405 - RNA, 22 nt, Human
aaaaacacccaaaaaccacaug

SEQ ID NO: 835406 - RNA, 18 nt, Human
aaaaaccacauggagaca

SEQ ID NO: 835407 - RNA, 19 nt, Human
aaaacacccaaaaaccaca

SEQ ID NO: 835408 - RNA, 22 nt, Human
aaacacccaaaaaccacaugga

SEQ ID NO: 835409 - RNA, 27 nt, Human
aaacacccaaaaaccacauggagacag

SEQ ID NO: 835410 - RNA, 24 nt, Human
aaagcagccugccccugcugcaga

SEQ ID NO: 835411 - RNA, 19 nt, Human
aacaagaaaaacacccaaa

SEQ ID NO: 835412 - RNA, 21 nt, Human
aacaagaaaaacacccaaaaa

SEQ ID NO: 835413 - RNA, 21 nt, Human
aacagcugagggaaggccccc

SEQ ID NO: 835414 - RNA, 20 nt, Human
aacuccucccccacugccuc

SEQ ID NO: 835415 - RNA, 24 nt, Human
aagaaaaacacccaaaaaccacau

SEQ ID NO: 835416 - RNA, 19 nt, Human
aagaaagcagccugccccu

SEQ ID NO: 835417 - RNA, 23 nt, Human
acaacuccucccccacugccucc

SEQ ID NO: 835418 - RNA, 19 nt, Human
acacaacaagaaaaacacc

SEQ ID NO: 835419 - RNA, 25 nt, Human
acacaacaagaaaaacacccaaaaa

SEQ ID NO: 835420 - RNA, 19 nt, Human
acacaacuccucccccacu

SEQ ID NO: 835421 - RNA, 25 nt, Human
acacaacuccucccccacugccucc

SEQ ID NO: 835422 - RNA, 23 nt, Human
acagagccagguggcuaaggcca

SEQ ID NO: 835423 - RNA, 23 nt, Human
acaggucaggaaggguggggaca

SEQ ID NO: 835424 - RNA, 20 nt, Human
acccugaggucacaggaggg

SEQ ID NO: 835425 - RNA, 22 nt, Human
agaaaaacacccaaaaaccaca

SEQ ID NO: 835426 - RNA, 21 nt, Human
agccagguggcuaaggccagg

SEQ ID NO: 835427 - RNA, 20 nt, Human
agccccccaguguggggaaa

SEQ ID NO: 835428 - RNA, 22 nt, Human
agcccuacaggcuccaggccug

SEQ ID NO: 835429 - RNA, 18 nt, Human
aggaaggcccggccaggc

SEQ ID NO: 835430 - RNA, 19 nt, Human
aggaaggguggggacaggg

SEQ ID NO: 835431 - RNA, 24 nt, Human
aggcagggcccagccccccagugg

SEQ ID NO: 835432 - RNA, 19 nt, Human
agggacagggagcccacag

SEQ ID NO: 835433 - RNA, 27 nt, Human
aguuggggcaggggccugggggggccc

SEQ ID NO: 835434 - RNA, 22 nt, Human
auggagacagaagacgagacac

SEQ ID NO: 835435 - RNA, 18 nt, Human
caaacccugaggucacag

SEQ ID NO: 835436 - RNA, 24 nt, Human
caacaagaaaaacacccaaaaacc

SEQ ID NO: 835437 - RNA, 19 nt, Human
caacuccucccccacugcc

SEQ ID NO: 835438 - RNA, 21 nt, Human
cacaacaagaaaaacacccaa

SEQ ID NO: 835439 - RNA, 22 nt, Human
cacaacaagaaaaacacccaaa

SEQ ID NO: 835440 - RNA, 23 nt, Human
cacacggcuccacggcgggggcc

SEQ ID NO: 835441 - RNA, 23 nt, Human
cacaggagggggcccaaagcggg

SEQ ID NO: 835442 - RNA, 22 nt, Human
cacuccugcccagggacaggga

SEQ ID NO: 835443 - RNA, 20 nt, Human
cagcaaggggaccccggggc

SEQ ID NO: 835444 - RNA, 21 nt, Human
cagcggcugggccccuuucuc

SEQ ID NO: 835445 - RNA, 22 nt, Human
cagcugagggaaggccccccuc

SEQ ID NO: 835446 - RNA, 19 nt, Human
caggagggggcccaaagcg

SEQ ID NO: 835447 - RNA, 18 nt, Human
cagggacagggagcccac

SEQ ID NO: 835448 - RNA, 22 nt, Human
caggggccugggggggccccau

SEQ ID NO: 835449 - RNA, 21 nt, Human
ccaccuccucaccagcacucc

SEQ ID NO: 835450 - RNA, 22 nt, Human
ccaccugcccccagaggccugu

SEQ ID NO: 835451 - RNA, 25 nt, Human
ccacugccucccugcucuagagugg

SEQ ID NO: 835452 - RNA, 22 nt, Human
ccagggacagggagcccacagc

SEQ ID NO: 835453 - RNA, 23 nt, Human
cccaaaaaccacauggagacaga

SEQ ID NO: 835454 - RNA, 21 nt, Human
ccccacugccucccugcucua

SEQ ID NO: 835455 - RNA, 22 nt, Human
ccccaugggccaaacccugagg

SEQ ID NO: 835456 - RNA, 22 nt, Human
cccccaguguggggaaacagcu

SEQ ID NO: 835457 - RNA, 26 nt, Human
ccccccucaaaaggcuccaccuccuc

SEQ ID NO: 835458 - RNA, 21 nt, Human
ccccucaaaaggcuccaccuc

SEQ ID NO: 835459 - RNA, 24 nt, Human
ccccucaaaaggcuccaccuccuc

SEQ ID NO: 835460 - RNA, 23 nt, Human
ccccugcugcagacagagccagg

SEQ ID NO: 835461 - RNA, 21 nt, Human
ccugcccccagaggccugugg

SEQ ID NO: 835462 - RNA, 18 nt, Human
ccugccccugcugcagac

SEQ ID NO: 835463 - RNA, 22 nt, Human
ccugcugcagacagagccaggu

SEQ ID NO: 835464 - RNA, 23 nt, Human
ccuguagccccuccaauacugcu

SEQ ID NO: 835465 - RNA, 22 nt, Human
ccuugccaccugcccccagagg

SEQ ID NO: 835466 - RNA, 22 nt, Human
ccuuucuccagcugccuguagc

SEQ ID NO: 835467 - RNA, 20 nt, Human
cgagacacaacuccuccccc

SEQ ID NO: 835468 - RNA, 23 nt, Human
cggggccauggccacauucauga

SEQ ID NO: 835469 - RNA, 25 nt, Human
cugggcagaaucaguuggggcaggg

SEQ ID NO: 835470 - RNA, 22 nt, Human
gaauccaggacacaacaagaaa

SEQ ID NO: 835471 - RNA, 23 nt, Human
gagacacaacuccucccccacug

SEQ ID NO: 835472 - RNA, 20 nt, Human
gagugagguccugagugagu

SEQ ID NO: 835473 - RNA, 20 nt, Human
gccccccucaaaaggcucca

SEQ ID NO: 835474 - RNA, 22 nt, Human
gcuccaccuccucaccagcacu

SEQ ID NO: 835475 - RNA, 19 nt, Human
gcucuagaguggggacaaa

SEQ ID NO: 835476 - RNA, 20 nt, Human
ggaaacagcugagggaaggc

SEQ ID NO: 835477 - RNA, 19 nt, Human
ggaaggcccggccaggccu

SEQ ID NO: 835478 - RNA, 23 nt, Human
ggacaggggcucgaccggcucag

SEQ ID NO: 835479 - RNA, 23 nt, Human
ggacaggucaggaagggugggga

SEQ ID NO: 835480 - RNA, 20 nt, Human
ggagggggcccaaagcgggg

SEQ ID NO: 835481 - RNA, 21 nt, Human
ggccugggggggccccauggg

SEQ ID NO: 835482 - RNA, 22 nt, Human
ggcugggccccuuucuccagcu

SEQ ID NO: 835483 - RNA, 21 nt, Human
gggaaacagcugagggaaggc

SEQ ID NO: 835484 - RNA, 21 nt, Human
gggagaccugaaccucagucc

SEQ ID NO: 835485 - RNA, 19 nt, Human
gggcaggggccuggggggg

SEQ ID NO: 835486 - RNA, 20 nt, Human
gggcaggggccugggggggc

SEQ ID NO: 835487 - RNA, 21 nt, Human
gggucagcggcugggccccuu

SEQ ID NO: 835488 - RNA, 22 nt, Human
uaagaaagcagccugccccugc

SEQ ID NO: 835489 - RNA, 23 nt, Human
ucaguuggggcaggggccugggg

SEQ ID NO: 835490 - RNA, 19 nt, Human
uccaccuccucaccagcac

SEQ ID NO: 835491 - RNA, 23 nt, Human
ucccccaugagcugggguacugc

SEQ ID NO: 835492 - RNA, 20 nt, Human
ucccugcucuagagugggga

SEQ ID NO: 835493 - RNA, 23 nt, Human
ucuagaguggggacaaagugggg

SEQ ID NO: 835494 - RNA, 20 nt, Human
ugacugagaagcagcugagu

SEQ ID NO: 835495 - RNA, 24 nt, Human
ugagcugggguacugcacuggggc

SEQ ID NO: 835496 - RNA, 23 nt, Human
ugcagacagagccagguggcuaa

SEQ ID NO: 835497 - RNA, 25 nt, Human
ugcagggaaggaggguaacggggag

SEQ ID NO: 835498 - RNA, 22 nt, Human
ugccaggggggcccgccuccag

SEQ ID NO: 835499 - RNA, 19 nt, Human
ugcccagggacagggagcc

SEQ ID NO: 835500 - RNA, 26 nt, Human
ugggcagaaucaguuggggcaggggc

SEQ ID NO: 835501 - RNA, 24 nt, Human
uggggaaacagcugagggaaggcc

SEQ ID NO: 835502 - RNA, 18 nt, Human
uggggggagaccugaacc

SEQ ID NO: 835503 - RNA, 19 nt, Human
uuuuuuuuuuuuuugagga

SEQ ID NO: 835504 - RNA, 21 nt, Human
uuuuuuuuuuuuuuuuugagg

SEQ ID NO: 835505 - RNA, 27 nt, Human
uuuuuuuuuuuuuuuuuuuuuuugggg

SEQ ID NO: 835506 - RNA, 23 nt, Human
aacaaacagcacuuccccauggc

SEQ ID NO: 835507 - RNA, 23 nt, Human
acagagaaaggauaacaaacagc

SEQ ID NO: 835508 - RNA, 22 nt, Human
accaucagcagcauucuugcca

SEQ ID NO: 835509 - RNA, 19 nt, Human
agaaggccauggcuccaac

SEQ ID NO: 835510 - RNA, 18 nt, Human
agacccuagggcagggug

SEQ ID NO: 835511 - RNA, 22 nt, Human
agagcagcucaguccagcguga

SEQ ID NO: 835512 - RNA, 23 nt, Human
agccacaggaguccuguggcaca

SEQ ID NO: 835513 - RNA, 24 nt, Human
agccaguccacccuguggagccag

SEQ ID NO: 835514 - RNA, 22 nt, Human
aggaaaucagggccccuggaac

SEQ ID NO: 835515 - RNA, 21 nt, Human
aggaacaaggggagacagaug

SEQ ID NO: 835516 - RNA, 22 nt, Human
aggaauaggggggacacauggc

SEQ ID NO: 835517 - RNA, 20 nt, Human
aggcagggacugggaccagg

SEQ ID NO: 835518 - RNA, 21 nt, Human
agggcccagccaguccacccu

SEQ ID NO: 835519 - RNA, 23 nt, Human
aggggggacacauggccccaggc

SEQ ID NO: 835520 - RNA, 30 nt, Human
agguaggaguggagugagaugucccagggg

SEQ ID NO: 835521 - RNA, 23 nt, Human
auacagccugcucagagccccau

SEQ ID NO: 835522 - RNA, 24 nt, Human
augcuucacaguccaagacucggg

SEQ ID NO: 835523 - RNA, 24 nt, Human
caaguuucugggcuagucccagca

SEQ ID NO: 835524 - RNA, 21 nt, Human
cacagagaaaggauaacaaac

SEQ ID NO: 835525 - RNA, 21 nt, Human
cacagcccaguaacaucccuc

SEQ ID NO: 835526 - RNA, 18 nt, Human
cacugccacagagaaagg

SEQ ID NO: 835527 - RNA, 24 nt, Human
cacuuagagccuacugccaugaag

SEQ ID NO: 835528 - RNA, 21 nt, Human
cagaugccaggcauguaugca

SEQ ID NO: 835529 - RNA, 23 nt, Human
cagcagcauucuugccauccagu

SEQ ID NO: 835530 - RNA, 20 nt, Human
cagcauucuugccauccagu

SEQ ID NO: 835531 - RNA, 21 nt, Human
cagcuaagccacagggaagcc

SEQ ID NO: 835532 - RNA, 21 nt, Human
cagcucagggaagcugcgagc

SEQ ID NO: 835533 - RNA, 21 nt, Human
cagggucccauucaaguuucu

SEQ ID NO: 835534 - RNA, 18 nt, Human
cauccagugucccuugag

SEQ ID NO: 835535 - RNA, 21 nt, Human
cauguaugcaacagagaaaau

SEQ ID NO: 835536 - RNA, 19 nt, Human
ccaucagcagcauucuugc

SEQ ID NO: 835537 - RNA, 22 nt, Human
cccagccaguccacccugugga

SEQ ID NO: 835538 - RNA, 23 nt, Human
cccauccucagcccugugcugac

SEQ ID NO: 835539 - RNA, 27 nt, Human
cccaugaccaguggcaggccggggucc

SEQ ID NO: 835540 - RNA, 23 nt, Human
ccccagaggccaacagcaggucc

SEQ ID NO: 835541 - RNA, 25 nt, Human
ccccauccucagcccugugcugacc

SEQ ID NO: 835542 - RNA, 23 nt, Human
ccccuggcucucucaggguccca

SEQ ID NO: 835543 - RNA, 24 nt, Human
cccuaggggggccucaggggaccc

SEQ ID NO: 835544 - RNA, 22 nt, Human
cccuggcucucucaggguccca

SEQ ID NO: 835545 - RNA, 22 nt, Human
cccugugcugacccacuuggua

SEQ ID NO: 835546 - RNA, 22 nt, Human
ccgaggaaaucagggccccugg

SEQ ID NO: 835547 - RNA, 18 nt, Human
ccgggaugcagguucagc

SEQ ID NO: 835548 - RNA, 18 nt, Human
ccucaggggaccccuggc

SEQ ID NO: 835549 - RNA, 21 nt, Human
ccugggaccucuggguacagg

SEQ ID NO: 835550 - RNA, 21 nt, Human
ccuggggcagacagaaagccc

SEQ ID NO: 835551 - RNA, 22 nt, Human
cgagcagccuuggcugcuuccu

SEQ ID NO: 835552 - RNA, 25 nt, Human
cgcaacaaacugccccugccugcag

SEQ ID NO: 835553 - RNA, 19 nt, Human
cgccgcagguccgggaugc

SEQ ID NO: 835554 - RNA, 24 nt, Human
cuacuaggcucgcccaggaagcca

SEQ ID NO: 835555 - RNA, 21 nt, Human
cuccaaccccugcucucaucc

SEQ ID NO: 835556 - RNA, 22 nt, Human
cuggccaccagcuaagccacag

SEQ ID NO: 835557 - RNA, 22 nt, Human
cuguggcuggugugugggaagg

SEQ ID NO: 835558 - RNA, 19 nt, Human
cuuggaaccacagucccag

SEQ ID NO: 835559 - RNA, 21 nt, Human
gaagccagucaggcuggccac

SEQ ID NO: 835560 - RNA, 25 nt, Human
gacagccccagaggccaacagcagg

SEQ ID NO: 835561 - RNA, 20 nt, Human
gagaugucccagggccuggg

SEQ ID NO: 835562 - RNA, 18 nt, Human
gcaacaaacugccccugc

SEQ ID NO: 835563 - RNA, 28 nt, Human
ggaacacagccugcgggacugggggcac

SEQ ID NO: 835564 - RNA, 24 nt, Human
ggaccagggcccagccaguccacc

SEQ ID NO: 835565 - RNA, 22 nt, Human
ggcccaguaggcaaguaugaaa

SEQ ID NO: 835566 - RNA, 21 nt, Human
gggaaccacgaagaacgcaac

SEQ ID NO: 835567 - RNA, 19 nt, Human
gggagagcagcucagucca

SEQ ID NO: 835568 - RNA, 22 nt, Human
gggaggcagcuucaguccuggg

SEQ ID NO: 835569 - RNA, 18 nt, Human
gggccccuggaacacagc

SEQ ID NO: 835570 - RNA, 21 nt, Human
gggggacacauggccccaggc

SEQ ID NO: 835571 - RNA, 18 nt, Human
gguacaggaccacagccc

SEQ ID NO: 835572 - RNA, 21 nt, Human
guggcuggugugugggaaggg

SEQ ID NO: 835573 - RNA, 18 nt, Human
uacuaggcucgcccagga

SEQ ID NO: 835574 - RNA, 18 nt, Human
uaggaaggcugcggggcc

SEQ ID NO: 835575 - RNA, 19 nt, Human
uaggcaaguaugaaaagcc

SEQ ID NO: 835576 - RNA, 22 nt, Human
uaggggggacacauggccccag

SEQ ID NO: 835577 - RNA, 21 nt, Human
uagucccagcacuaagcuggg

SEQ ID NO: 835578 - RNA, 19 nt, Human
ucacugccacagagaaagg

SEQ ID NO: 835579 - RNA, 24 nt, Human
ucacugccacagagaaaggauaac

SEQ ID NO: 835580 - RNA, 18 nt, Human
ucccagggccugggaacc

SEQ ID NO: 835581 - RNA, 19 nt, Human
ucccagggugaagggaggc

SEQ ID NO: 835582 - RNA, 25 nt, Human
uccccauggcagaugcuucacaguc

SEQ ID NO: 835583 - RNA, 24 nt, Human
ucccucauaggaaggcugcggggc

SEQ ID NO: 835584 - RNA, 22 nt, Human
ucccuuucuccauagguuccca

SEQ ID NO: 835585 - RNA, 19 nt, Human
uccuuggauucccuuucuc

SEQ ID NO: 835586 - RNA, 22 nt, Human
ugaaaagcccacaggaauaggg

SEQ ID NO: 835587 - RNA, 20 nt, Human
ugccacagagaaaggauaac

SEQ ID NO: 835588 - RNA, 20 nt, Human
ugccaugaaggcagcccuga

SEQ ID NO: 835589 - RNA, 21 nt, Human
ugcucagagccccaugugggg

SEQ ID NO: 835590 - RNA, 18 nt, Human
ugcugacccacuugguac

SEQ ID NO: 835591 - RNA, 23 nt, Human
ugcugcccaauccagagcuugaa

SEQ ID NO: 835592 - RNA, 22 nt, Human
uggaacacagccugcgggacug

SEQ ID NO: 835593 - RNA, 20 nt, Human
uggaaccacagucccagggu

SEQ ID NO: 835594 - RNA, 21 nt, Human
uggcagugugauggugggguu

SEQ ID NO: 835595 - RNA, 18 nt, Human
uggcuggugugugggaag

SEQ ID NO: 835596 - RNA, 19 nt, Human
ugggaccagggcccagcca

SEQ ID NO: 835597 - RNA, 19 nt, Human
uggugggguuagcaagagg

SEQ ID NO: 835598 - RNA, 25 nt, Human
uguggccagucacccacuuagagcc

SEQ ID NO: 835599 - RNA, 23 nt, Human
uguggcuggugugugggaagggu

SEQ ID NO: 835600 - RNA, 19 nt, Human
ugugggaagggucacccga

SEQ ID NO: 835601 - RNA, 27 nt, Human
uucucggccuguggccagucacccacu

SEQ ID NO: 835602 - RNA, 20 nt, Human
uuggaaccacagucccaggg

SEQ ID NO: 835603 - RNA, 23 nt, Human
uuuuuuuuuuuuuuuuuuuacag

SEQ ID NO: 835604 - RNA, 21 nt, Human
aaaacaaaaccacaggaaaau

SEQ ID NO: 835605 - RNA, 24 nt, Human
aaagugcugggauuacaggcguga

SEQ ID NO: 835606 - RNA, 22 nt, Human
aagaaaaaacaaaaccacagga

SEQ ID NO: 835607 - RNA, 19 nt, Human
aagugcugggauuacaggc

SEQ ID NO: 835608 - RNA, 19 nt, Human
aagugcugggauuacaggc

SEQ ID NO: 835609 - RNA, 26 nt, Human
aagugcugggauuacaggcgugagcc

SEQ ID NO: 835610 - RNA, 21 nt, Human
acccugaggcaaaaauggcuu

SEQ ID NO: 835611 - RNA, 23 nt, Human
acgggcgcccgccaccacaccca

SEQ ID NO: 835612 - RNA, 18 nt, Human
acgggguuucaccguguu

SEQ ID NO: 835613 - RNA, 19 nt, Human
acgggguuucaccguguua

SEQ ID NO: 835614 - RNA, 20 nt, Human
acgggguuucaccguguuag

SEQ ID NO: 835615 - RNA, 24 nt, Human
acgggguuucaccguguuagccag

SEQ ID NO: 835616 - RNA, 21 nt, Human
agaaaaaacaaaaccacagga

SEQ ID NO: 835617 - RNA, 19 nt, Human
agagacgggguuucaccgu

SEQ ID NO: 835618 - RNA, 19 nt, Human
aggaacaaaaaagggaaag

SEQ ID NO: 835619 - RNA, 23 nt, Human
aggaacaaaaaagggaaagaaaa

SEQ ID NO: 835620 - RNA, 21 nt, Human
aggcaaaaauggcuuuuccuu

SEQ ID NO: 835621 - RNA, 18 nt, Human
agugcugggauuacaggc

SEQ ID NO: 835622 - RNA, 24 nt, Human
augauccgcccgccucggccuccc

SEQ ID NO: 835623 - RNA, 24 nt, Human
caaaaaagggaaagaaaaaacaaa

SEQ ID NO: 835624 - RNA, 25 nt, Human
caaaaccacaggaaaauaaagagga

SEQ ID NO: 835625 - RNA, 24 nt, Human
caaagugcugggauuacaggcgug

SEQ ID NO: 835626 - RNA, 23 nt, Human
caccagugggcagcaucacggcc

SEQ ID NO: 835627 - RNA, 18 nt, Human
caccguguuagccaggau

SEQ ID NO: 835628 - RNA, 24 nt, Human
caccguguuagccaggauggucuc

SEQ ID NO: 835629 - RNA, 21 nt, Human
caguccuucucacaaacaauu

SEQ ID NO: 835630 - RNA, 21 nt, Human
cauuuuguuuuuguuuggagg

SEQ ID NO: 835631 - RNA, 20 nt, Human
ccaaagugcugggauuacag

SEQ ID NO: 835632 - RNA, 22 nt, Human
ccaaagugcugggauuacaggc

SEQ ID NO: 835633 - RNA, 22 nt, Human
ccaaagugcugggauuacaggc

SEQ ID NO: 835634 - RNA, 24 nt, Human
ccaaagugcugggauuacaggcgu

SEQ ID NO: 835635 - RNA, 21 nt, Human
cccgccaccacacccagcuaa

SEQ ID NO: 835636 - RNA, 19 nt, Human
ccggggaccccgggagcgg

SEQ ID NO: 835637 - RNA, 24 nt, Human
ccugaguaguuggacuaacgggcg

SEQ ID NO: 835638 - RNA, 20 nt, Human
ccugcuuggccggccgggga

SEQ ID NO: 835639 - RNA, 24 nt, Human
cgccucggccucccaaagugcugg

SEQ ID NO: 835640 - RNA, 21 nt, Human
cggaguuagagcccuccugcu

SEQ ID NO: 835641 - RNA, 24 nt, Human
cgggguuucaccguguuagccagg

SEQ ID NO: 835642 - RNA, 23 nt, Human
cuaauuuuuuguauuuuuaguag

SEQ ID NO: 835643 - RNA, 18 nt, Human
cucaugauccgcccgccu

SEQ ID NO: 835644 - RNA, 24 nt, Human
cuccugaccucaugauccgcccgc

SEQ ID NO: 835645 - RNA, 22 nt, Human
cuccugcuuggccggccgggga

SEQ ID NO: 835646 - RNA, 23 nt, Human
cugaggcaaaaauggcuuuuccu

SEQ ID NO: 835647 - RNA, 18 nt, Human
gaaaaaacaaaaccacag

SEQ ID NO: 835648 - RNA, 22 nt, Human
gaccucaugauccgcccgccuc

SEQ ID NO: 835649 - RNA, 24 nt, Human
gagacgggguuucaccguguuagc

SEQ ID NO: 835650 - RNA, 24 nt, Human
gagccaccgcgcucggccugcauu

SEQ ID NO: 835651 - RNA, 18 nt, Human
gaggagaaacccugaggc

SEQ ID NO: 835652 - RNA, 18 nt, Human
gauuacaggcgugagcca

SEQ ID NO: 835653 - RNA, 22 nt, Human
gauuacaggcgugagccaccgc

SEQ ID NO: 835654 - RNA, 22 nt, Human
gauuacaggcgugagccaccgc

SEQ ID NO: 835655 - RNA, 21 nt, Human
gccggggaccccgggagcggg

SEQ ID NO: 835656 - RNA, 24 nt, Human
ggauggucucgaucuccugaccuc

SEQ ID NO: 835657 - RNA, 18 nt, Human
gggaaagaaaaaacaaaa

SEQ ID NO: 835658 - RNA, 23 nt, Human
gggguuucaccguguuagccagg

SEQ ID NO: 835659 - RNA, 23 nt, Human
guagagacgggguuucaccgugu

SEQ ID NO: 835660 - RNA, 24 nt, Human
uaauuuuuuguauuuuuaguagag

SEQ ID NO: 835661 - RNA, 25 nt, Human
uaauuuuuuguauuuuuaguagaga

SEQ ID NO: 835662 - RNA, 22 nt, Human
uacaggcgugagccaccgcgcu

SEQ ID NO: 835663 - RNA, 21 nt, Human
uaguagagacgggguuucacc

SEQ ID NO: 835664 - RNA, 24 nt, Human
uaguagagacgggguuucaccgug

SEQ ID NO: 835665 - RNA, 26 nt, Human
uaguagagacgggguuucaccguguu

SEQ ID NO: 835666 - RNA, 26 nt, Human
uaguagagacgggguuucaccguugg

SEQ ID NO: 835667 - RNA, 24 nt, Human
ucaccguguuagccaggauggucu

SEQ ID NO: 835668 - RNA, 24 nt, Human
ucccaaagugcugggauuacaggc

SEQ ID NO: 835669 - RNA, 18 nt, Human
ucggccucccaaagugcu

SEQ ID NO: 835670 - RNA, 24 nt, Human
ugcugggauuacaggcgugagcca

SEQ ID NO: 835671 - RNA, 19 nt, Human
uggaggaacaaaaaaggga

SEQ ID NO: 835672 - RNA, 25 nt, Human
uggaggaacaaaaaagggaaaagac

SEQ ID NO: 835673 - RNA, 24 nt, Human
uggccggccggggaccccgggagc

SEQ ID NO: 835674 - RNA, 18 nt, Human
ugggauuacaggcgugag

SEQ ID NO: 835675 - RNA, 19 nt, Human
ugggauuacaggcgugagc

SEQ ID NO: 835676 - RNA, 21 nt, Human
ugggauuacaggcgugagcca

SEQ ID NO: 835677 - RNA, 22 nt, Human
ugggauuacaggcgugagccac

SEQ ID NO: 835678 - RNA, 23 nt, Human
ugggauuacaggcgugagccacc

SEQ ID NO: 835679 - RNA, 24 nt, Human
ugggauuacaggcgugagccaccg

SEQ ID NO: 835680 - RNA, 21 nt, Human
uguauuuuuaguagagacggg

SEQ ID NO: 835681 - RNA, 23 nt, Human
uuagagcccuccugcuuggccgg

SEQ ID NO: 835682 - RNA, 18 nt, Human
uuaguagagacgggguuu

SEQ ID NO: 835683 - RNA, 22 nt, Human
uuaguagagacgggguuucacc

SEQ ID NO: 835684 - RNA, 24 nt, Human
uuaguagagacgggguuucaccgu

SEQ ID NO: 835685 - RNA, 23 nt, Human
uuguauuuuuaguagagacgggg

SEQ ID NO: 835686 - RNA, 20 nt, Human
uuguuuggaggaacaaaaaa

SEQ ID NO: 835687 - RNA, 19 nt, Human
uuucaccguguuagccagg

SEQ ID NO: 835688 - RNA, 24 nt, Human
uuuuuaguagagacgggguuucac

SEQ ID NO: 835689 - RNA, 21 nt, Human
uuuuuguauuuuuaguagaga

SEQ ID NO: 835690 - RNA, 24 nt, Human
uuuuuuguauuuuuaguagagacg

SEQ ID NO: 835691 - RNA, 20 nt, Human
cccacggugacacucgcguc

SEQ ID NO: 835692 - RNA, 26 nt, Human
cccacggugacacucgcguccuccuc

SEQ ID NO: 835693 - RNA, 18 nt, Human
ccuguccccacggugaca

SEQ ID NO: 835694 - RNA, 21 nt, Human
cggcucagcggcggggcgcgg

SEQ ID NO: 835695 - RNA, 25 nt, Human
cguccugcuccucacccgaucuuca

SEQ ID NO: 835696 - RNA, 27 nt, Human
gaggcgcucauuuuuuuuuuuuuuuuu

SEQ ID NO: 835697 - RNA, 21 nt, Human
gagucucagcuucucuccugg

SEQ ID NO: 835698 - RNA, 24 nt, Human
ggcgcucauuuuuuuuuuuuuuuu

SEQ ID NO: 835699 - RNA, 19 nt, Human
ugacacucgcguccuccuc

SEQ ID NO: 835700 - RNA, 23 nt, Human
uuaaauccaauggaggugugucc

SEQ ID NO: 835701 - RNA, 23 nt, Human
uuccauagcugaaagucagugcu

SEQ ID NO: 835702 - RNA, 23 nt, Human
aaacagacaaaucauaacgaaca

SEQ ID NO: 835703 - RNA, 25 nt, Human
aaacagacaaaucauaacgaacaga

SEQ ID NO: 835704 - RNA, 22 nt, Human
aaccccagaagaaagacaccau

SEQ ID NO: 835705 - RNA, 23 nt, Human
aagcagguaaccgcacacaacgc

SEQ ID NO: 835706 - RNA, 22 nt, Human
aauaacugaaaaccccagaaga

SEQ ID NO: 835707 - RNA, 24 nt, Human
aauaacugaaaaccccagaagaaa

SEQ ID NO: 835708 - RNA, 23 nt, Human
acaaugaugaagagcauaaacac

SEQ ID NO: 835709 - RNA, 19 nt, Human
acuugaggaaaaugaaauu

SEQ ID NO: 835710 - RNA, 23 nt, Human
agccuuaauaaaaaucaagucca

SEQ ID NO: 835711 - RNA, 18 nt, Human
auaacugaaaaccccaga

SEQ ID NO: 835712 - RNA, 23 nt, Human
caaaaggcucaaaguucaaacca

SEQ ID NO: 835713 - RNA, 20 nt, Human
caacacuuaaaaacaaacag

SEQ ID NO: 835714 - RNA, 18 nt, Human
cacuaucaacacuuaaaa

SEQ ID NO: 835715 - RNA, 28 nt, Human
cagugagucccucugucgcaacaaguuc

SEQ ID NO: 835716 - RNA, 23 nt, Human
ccagaaucucuucauuucuuugc

SEQ ID NO: 835717 - RNA, 18 nt, Human
cccagaagaaagacacca

SEQ ID NO: 835718 - RNA, 20 nt, Human
cgaacagaguccagugaguc

SEQ ID NO: 835719 - RNA, 22 nt, Human
cucgggguggagaugcugacaa

SEQ ID NO: 835720 - RNA, 24 nt, Human
cuguucacuccaaugaguggggau

SEQ ID NO: 835721 - RNA, 23 nt, Human
gcacaaugaugaagagcauaaac

SEQ ID NO: 835722 - RNA, 19 nt, Human
gguaaccgcacacaacgca

SEQ ID NO: 835723 - RNA, 23 nt, Human
uaaguauauuuuuaugucgcuuu

SEQ ID NO: 835724 - RNA, 23 nt, Human
uaauaaaaaucaaguccacuuug

SEQ ID NO: 835725 - RNA, 22 nt, Human
uaaucucugucucuuaguacuc

SEQ ID NO: 835726 - RNA, 20 nt, Human
ugaaaaccccagaagaaaga

SEQ ID NO: 835727 - RNA, 25 nt, Human
ugcacaaaccuccaguucuugacgu

SEQ ID NO: 835728 - RNA, 23 nt, Human
ugccgaccggucucaaauugcac

SEQ ID NO: 835729 - RNA, 24 nt, Human
uuuuucuuagguuauugaugcauu

SEQ ID NO: 835730 - RNA, 20 nt, Human
aagaaagaacuaaugaggau

SEQ ID NO: 835731 - RNA, 21 nt, Human
aagaacuaaugaggauaccuc

SEQ ID NO: 835732 - RNA, 26 nt, Human
aggaagagaaacauuuaaugaaaaga

SEQ ID NO: 835733 - RNA, 18 nt, Human
caaaacaagaaagaauca

SEQ ID NO: 835734 - RNA, 18 nt, Human
caacauuacuuuuugcca

SEQ ID NO: 835735 - RNA, 21 nt, Human
caccgucaccaccuccuccca

SEQ ID NO: 835736 - RNA, 21 nt, Human
ccaaaacaagaaagaaucaca

SEQ ID NO: 835737 - RNA, 25 nt, Human
ccaaaacaagaaagaaucacauuga

SEQ ID NO: 835738 - RNA, 19 nt, Human
ccaccgucaccaccuccuc

SEQ ID NO: 835739 - RNA, 21 nt, Human
ccaccgucaccaccuccuccc

SEQ ID NO: 835740 - RNA, 21 nt, Human
cccaaaacaagaaagaaucac

SEQ ID NO: 835741 - RNA, 24 nt, Human
ccgacgcugccguugccaccguca

SEQ ID NO: 835742 - RNA, 22 nt, Human
cucccaaaacaagaaagaauca

SEQ ID NO: 835743 - RNA, 18 nt, Human
gaaagaacuaaugaggau

SEQ ID NO: 835744 - RNA, 18 nt, Human
gccugaagaaagaacuaa

SEQ ID NO: 835745 - RNA, 21 nt, Human
uaccuccaccgucucccaaaa

SEQ ID NO: 835746 - RNA, 19 nt, Human
ugccaccgucaccaccucc

SEQ ID NO: 835747 - RNA, 25 nt, Human
ugcgcagccacgcaacuaaagacac

SEQ ID NO: 835748 - RNA, 24 nt, Human
aagaggugguggaaacggaaacga

SEQ ID NO: 835749 - RNA, 21 nt, Human
aggcuaacacugacccggcac

SEQ ID NO: 835750 - RNA, 19 nt, Human
agggcuggaggcuaacacu

SEQ ID NO: 835751 - RNA, 19 nt, Human
ccgccacgcuuuccggcug

SEQ ID NO: 835752 - RNA, 23 nt, Human
ccggcugccacgugacuucuucc

SEQ ID NO: 835753 - RNA, 23 nt, Human
ccucaaggacgggaacaggaaga

SEQ ID NO: 835754 - RNA, 23 nt, Human
ccuugggugcgguaaagggaaag

SEQ ID NO: 835755 - RNA, 24 nt, Human
cuagcagcagccgccacgcuuucc

SEQ ID NO: 835756 - RNA, 20 nt, Human
gaaaggcucuagcagcagcc

SEQ ID NO: 835757 - RNA, 26 nt, Human
gccacgcuuuccggcugccacgugac

SEQ ID NO: 835758 - RNA, 22 nt, Human
gcuggaggcuaacacugacccg

SEQ ID NO: 835759 - RNA, 21 nt, Human
ucaaggacgggaacaggaaga

SEQ ID NO: 835760 - RNA, 18 nt, Human
ugcgguaaagggaaaggc

SEQ ID NO: 835761 - RNA, 20 nt, Human
ugucgcuccagcuccuuggg

SEQ ID NO: 835762 - RNA, 23 nt, Human
aaaacaaacaacguuucuccaaa

SEQ ID NO: 835763 - RNA, 23 nt, Human
aaaacaaacaacguuucuccaaa

SEQ ID NO: 835764 - RNA, 20 nt, Human
aaacaaccaauccguccccg

SEQ ID NO: 835765 - RNA, 20 nt, Human
aaacacagcccacuucaaua

SEQ ID NO: 835766 - RNA, 20 nt, Human
aaggguuggggguagaauga

SEQ ID NO: 835767 - RNA, 22 nt, Human
aaucacaaaaaacugacucagu

SEQ ID NO: 835768 - RNA, 26 nt, Human
acaaaacaaacaacguuucuccaaau

SEQ ID NO: 835769 - RNA, 21 nt, Human
acucuuuuuuuuuuuuuuuaa

SEQ ID NO: 835770 - RNA, 23 nt, Human
agaaaaucagagugcagugaaca

SEQ ID NO: 835771 - RNA, 21 nt, Human
agaaagauaguaaaagccaga

SEQ ID NO: 835772 - RNA, 23 nt, Human
auacaggaaaaaacaaccaaucc

SEQ ID NO: 835773 - RNA, 20 nt, Human
caaaaaacugacucaaugga

SEQ ID NO: 835774 - RNA, 19 nt, Human
caauacagccccucgccau

SEQ ID NO: 835775 - RNA, 25 nt, Human
caauauauuuuuuuacacuuugcuu

SEQ ID NO: 835776 - RNA, 19 nt, Human
caccggccucaaacacagc

SEQ ID NO: 835777 - RNA, 19 nt, Human
cacugcacuuuaugaaauc

SEQ ID NO: 835778 - RNA, 21 nt, Human
cagagugcagugaacauaaug

SEQ ID NO: 835779 - RNA, 21 nt, Human
cagcccacuucaauacagccc

SEQ ID NO: 835780 - RNA, 24 nt, Human
cagccccucgccauuuugguuucc

SEQ ID NO: 835781 - RNA, 23 nt, Human
cauacaggaaaaaacaaccaauc

SEQ ID NO: 835782 - RNA, 24 nt, Human
cauacaggaaaaaacaaccaaucc

SEQ ID NO: 835783 - RNA, 26 nt, Human
ccaaauacuugugcuaucuacaugau

SEQ ID NO: 835784 - RNA, 26 nt, Human
ccaaauacuugugcuaucuacaugau

SEQ ID NO: 835785 - RNA, 19 nt, Human
ccccgugggcgcuuccccu

SEQ ID NO: 835786 - RNA, 18 nt, Human
cccugcgaguccgagcac

SEQ ID NO: 835787 - RNA, 20 nt, Human
ccggccucaaacacagccca

SEQ ID NO: 835788 - RNA, 20 nt, Human
ccuuggagacaaggguuggg

SEQ ID NO: 835789 - RNA, 25 nt, Human
cgcacaaaccgagguccuuggagac

SEQ ID NO: 835790 - RNA, 20 nt, Human
cgcuucauacaggaaaaaac

SEQ ID NO: 835791 - RNA, 23 nt, Human
cggguacccggcacauaugcacg

SEQ ID NO: 835792 - RNA, 25 nt, Human
cuaaucaaaacaaacaacguuucuc

SEQ ID NO: 835793 - RNA, 23 nt, Human
cucaaacacagcccacuucaaua

SEQ ID NO: 835794 - RNA, 20 nt, Human
cuuacugggcacccgcccca

SEQ ID NO: 835795 - RNA, 24 nt, Human
cuucauacaggaaaaaacaaccaa

SEQ ID NO: 835796 - RNA, 19 nt, Human
gcauuauauacacugcacu

SEQ ID NO: 835797 - RNA, 22 nt, Human
gcuucauacaggaaaaaacaac

SEQ ID NO: 835798 - RNA, 24 nt, Human
gguuggggguagaaugagcguucu

SEQ ID NO: 835799 - RNA, 22 nt, Human
uaagaaagauaguaaaagccag

SEQ ID NO: 835800 - RNA, 18 nt, Human
uaaucaaaacaaacaacg

SEQ ID NO: 835801 - RNA, 19 nt, Human
uacuugugcuaucuacaug

SEQ ID NO: 835802 - RNA, 19 nt, Human
uacuugugcuaucuacaug

SEQ ID NO: 835803 - RNA, 22 nt, Human
uacuugugcuaucuacaugaug

SEQ ID NO: 835804 - RNA, 22 nt, Human
uacuugugcuaucuacaugaug

SEQ ID NO: 835805 - RNA, 23 nt, Human
ucuaacaccaugcauggguuuca

SEQ ID NO: 835806 - RNA, 20 nt, Human
ucuuuuuuuuuuuuuuuaag

SEQ ID NO: 835807 - RNA, 21 nt, Human
ugacaauauccauaacauuga

SEQ ID NO: 835808 - RNA, 21 nt, Human
ugacucuuuuuuuuuuuuuuu

SEQ ID NO: 835809 - RNA, 23 nt, Human
ugagcguucuuacaccggccuca

SEQ ID NO: 835810 - RNA, 19 nt, Human
ugcgaguccgagcacuuac

SEQ ID NO: 835811 - RNA, 21 nt, Human
ugguaacaaaacaaacaacgu

SEQ ID NO: 835812 - RNA, 23 nt, Human
ugguaacaaaacaaacaacguuu

SEQ ID NO: 835813 - RNA, 24 nt, Human
ugguaacaaaacaaacaacguuuc

SEQ ID NO: 835814 - RNA, 23 nt, Human
uuuuccaacauuuugguaacaaa

SEQ ID NO: 835815 - RNA, 25 nt, Human
uuuuugacucuuuuuuuuuuuuuuu

SEQ ID NO: 835816 - RNA, 23 nt, Human
acacugccgcaaacgucggggcc

SEQ ID NO: 835817 - RNA, 26 nt, Human
acgggacaaggaacacugccgcaaac

SEQ ID NO: 835818 - RNA, 18 nt, Human
aggcauggaggagcugug

SEQ ID NO: 835819 - RNA, 22 nt, Human
aucccugccaagcuggccccgg

SEQ ID NO: 835820 - RNA, 20 nt, Human
caaggaacacugccgcaaac

SEQ ID NO: 835821 - RNA, 19 nt, Human
caggauccacccacugccc

SEQ ID NO: 835822 - RNA, 21 nt, Human
cccggccccacgggacaagga

SEQ ID NO: 835823 - RNA, 20 nt, Human
ccucugggcggcccaggccu

SEQ ID NO: 835824 - RNA, 19 nt, Human
cucacagcuccccgggauc

SEQ ID NO: 835825 - RNA, 19 nt, Human
gaaaccaggauccacccac

SEQ ID NO: 835826 - RNA, 19 nt, Human
gagccucugggcggcccag

SEQ ID NO: 835827 - RNA, 18 nt, Human
gccuguuggucaggcaug

SEQ ID NO: 835828 - RNA, 26 nt, Human
gggacaaggaacacugccgcaaacgu

SEQ ID NO: 835829 - RNA, 18 nt, Human
guagaacucucgcucaaa

SEQ ID NO: 835830 - RNA, 19 nt, Human
guagaacucucgcucaaac

SEQ ID NO: 835831 - RNA, 21 nt, Human
guagaacucucgcucaaacag

SEQ ID NO: 835832 - RNA, 21 nt, Human
uauuuggcccaggauccagcc

SEQ ID NO: 835833 - RNA, 18 nt, Human
ucacagcuccccgggauc

SEQ ID NO: 835834 - RNA, 22 nt, Human
uccacacuuucuucagccucuu

SEQ ID NO: 835835 - RNA, 19 nt, Human
ugagaggagccucugggcg

SEQ ID NO: 835836 - RNA, 20 nt, Human
ugagaggagccucugggcgg

SEQ ID NO: 835837 - RNA, 19 nt, Human
ugccaagcuggccccgggc

SEQ ID NO: 835838 - RNA, 18 nt, Human
uggccccgggcuggaagg

SEQ ID NO: 835839 - RNA, 23 nt, Human
uggcuuccacacuuucuucagcc

SEQ ID NO: 835840 - RNA, 19 nt, Human
ugggcagcacacgaaacca

SEQ ID NO: 835841 - RNA, 21 nt, Human
ugggcagcacacgaaaccagg

SEQ ID NO: 835842 - RNA, 22 nt, Human
ugggcagcacacgaaaccagga

SEQ ID NO: 835843 - RNA, 19 nt, Human
ugggccuguuggucaggca

SEQ ID NO: 835844 - RNA, 18 nt, Human
uguuggucaggcauggag

SEQ ID NO: 835845 - RNA, 18 nt, Human
uuggcccaggauccagcc

SEQ ID NO: 835846 - RNA, 19 nt, Human
uuggcccaggauccagccc

SEQ ID NO: 835847 - RNA, 22 nt, Human
uuuggcccaggauccagcccuc

SEQ ID NO: 835848 - RNA, 18 nt, Human
aaccuuuuugcuuucucu

SEQ ID NO: 835849 - RNA, 19 nt, Human
aaccuuuuugcuuucucuu

SEQ ID NO: 835850 - RNA, 19 nt, Human
aaugagguuuuuuaagugc

SEQ ID NO: 835851 - RNA, 21 nt, Human
agccgagauuguccagaaauc

SEQ ID NO: 835852 - RNA, 18 nt, Human
aggaaggagaaggagagg

SEQ ID NO: 835853 - RNA, 20 nt, Human
aggauagggggaaagaagga

SEQ ID NO: 835854 - RNA, 20 nt, Human
aggggagaaaaggugauuuu

SEQ ID NO: 835855 - RNA, 19 nt, Human
agggggaaagaaggaaaag

SEQ ID NO: 835856 - RNA, 22 nt, Human
cagcguguuggucucgucucuu

SEQ ID NO: 835857 - RNA, 21 nt, Human
ccagagagcugcgaaguacaa

SEQ ID NO: 835858 - RNA, 21 nt, Human
ccuuuucccucuuucgaaacc

SEQ ID NO: 835859 - RNA, 24 nt, Human
cgcuuuucaagcaguccccagcac

SEQ ID NO: 835860 - RNA, 20 nt, Human
cggcugauaccguagccggc

SEQ ID NO: 835861 - RNA, 21 nt, Human
cuacuuucacucucguuuucc

SEQ ID NO: 835862 - RNA, 20 nt, Human
cucacccucccccaaaugga

SEQ ID NO: 835863 - RNA, 26 nt, Human
cucagggugaggguagagguucagga

SEQ ID NO: 835864 - RNA, 22 nt, Human
cuuccucacccucccccaaaug

SEQ ID NO: 835865 - RNA, 22 nt, Human
cuuggagguuugcugacgcccc

SEQ ID NO: 835866 - RNA, 26 nt, Human
cuuuucccucuuucgaaaccucuuuu

SEQ ID NO: 835867 - RNA, 20 nt, Human
cuuuuggcccucacaaaauc

SEQ ID NO: 835868 - RNA, 18 nt, Human
gaaagaaggaaaaggggg

SEQ ID NO: 835869 - RNA, 21 nt, Human
gaaguacaacucaguccgccg

SEQ ID NO: 835870 - RNA, 21 nt, Human
gagcacagucugacauuggcc

SEQ ID NO: 835871 - RNA, 19 nt, Human
gaucacuuuugugcaagaa

SEQ ID NO: 835872 - RNA, 18 nt, Human
gcaaccaaaagcaaaacg

SEQ ID NO: 835873 - RNA, 18 nt, Human
gcugaccggcugauaccg

SEQ ID NO: 835874 - RNA, 23 nt, Human
gcuuuucaagcaguccccagcac

SEQ ID NO: 835875 - RNA, 24 nt, Human
ggaaaaaacucaggauaccaaaag

SEQ ID NO: 835876 - RNA, 20 nt, Human
ggaaagaaggaaaagggggg

SEQ ID NO: 835877 - RNA, 24 nt, Human
ggaaguuguuugauaaucauuucu

SEQ ID NO: 835878 - RNA, 24 nt, Human
ggagagaaaaaggauagggggaaa

SEQ ID NO: 835879 - RNA, 24 nt, Human
ggaggcguuguuuggacuggguuu

SEQ ID NO: 835880 - RNA, 20 nt, Human
gggaaaaaacucaggauacc

SEQ ID NO: 835881 - RNA, 18 nt, Human
gggggggaugggguggag

SEQ ID NO: 835882 - RNA, 18 nt, Human
gguggagagaaaaaggau

SEQ ID NO: 835883 - RNA, 22 nt, Human
gugcaagaaugugauuuguuuu

SEQ ID NO: 835884 - RNA, 18 nt, Human
uaauguuuuuauuacugu

SEQ ID NO: 835885 - RNA, 20 nt, Human
uaauguuuuuauuacuguuu

SEQ ID NO: 835886 - RNA, 26 nt, Human
uacauaaaaguuuguguccagaguuu

SEQ ID NO: 835887 - RNA, 20 nt, Human
uagcugaguugugugucuga

SEQ ID NO: 835888 - RNA, 18 nt, Human
uaguggguucuccuugug

SEQ ID NO: 835889 - RNA, 19 nt, Human
ucacccucccccaaaugga

SEQ ID NO: 835890 - RNA, 20 nt, Human
ucacccucccccaaauggaa

SEQ ID NO: 835891 - RNA, 20 nt, Human
ucaggagagggaggagcaca

SEQ ID NO: 835892 - RNA, 24 nt, Human
ucugcagccgagauuguccagaaa

SEQ ID NO: 835893 - RNA, 18 nt, Human
ucuucucggggggucgug

SEQ ID NO: 835894 - RNA, 22 nt, Human
ugaggaaggagaaggagaggga

SEQ ID NO: 835895 - RNA, 28 nt, Human
ugagguuuuuuaagugccaaccacaggg

SEQ ID NO: 835896 - RNA, 24 nt, Human
ugccuucuuccucacccuccccca

SEQ ID NO: 835897 - RNA, 23 nt, Human
ugcgcuccccguuaagcccuacu

SEQ ID NO: 835898 - RNA, 23 nt, Human
uggaagaaaacgaucacuuuugu

SEQ ID NO: 835899 - RNA, 24 nt, Human
uggaaguuguuugauaaucauuuc

SEQ ID NO: 835900 - RNA, 24 nt, Human
uggagagaaaaaggauagggggaa

SEQ ID NO: 835901 - RNA, 22 nt, Human
ugguuggguugcucucuuuuug

SEQ ID NO: 835902 - RNA, 21 nt, Human
uguaggugagugccuucuucc

SEQ ID NO: 835903 - RNA, 19 nt, Human
uguccagaaaucuggaaau

SEQ ID NO: 835904 - RNA, 19 nt, Human
uguccagagagcugcgaag

SEQ ID NO: 835905 - RNA, 19 nt, Human
ugugucgcuuuucaagcag

SEQ ID NO: 835906 - RNA, 21 nt, Human
uguuuguaguggguucuccuu

SEQ ID NO: 835907 - RNA, 20 nt, Human
uucugcagaagaauuagggg

SEQ ID NO: 835908 - RNA, 21 nt, Human
uuuugugguggcggagcccga

SEQ ID NO: 835909 - RNA, 18 nt, Human
uuuuuuccuuuucccucu

SEQ ID NO: 835910 - RNA, 22 nt, Human
uuuuuuuuuuuuuuuuuuacaa

SEQ ID NO: 835911 - RNA, 22 nt, Human
aaacaaacaaaaaaaacuuucg

SEQ ID NO: 835912 - RNA, 20 nt, Human
aaacaagaugggaaugacgg

SEQ ID NO: 835913 - RNA, 23 nt, Human
aaacagaaaggacuuaaaccagg

SEQ ID NO: 835914 - RNA, 18 nt, Human
aaaccaggcugggggcuc

SEQ ID NO: 835915 - RNA, 18 nt, Human
aaagacuuagagaaagcu

SEQ ID NO: 835916 - RNA, 20 nt, Human
aaagcaaacaaacaaaaaaa

SEQ ID NO: 835917 - RNA, 23 nt, Human
aacagaaacaaaaacauuuucca

SEQ ID NO: 835918 - RNA, 24 nt, Human
aagcaaacaaacaaaaaaaacuuu

SEQ ID NO: 835919 - RNA, 21 nt, Human
aagcugauggaaugccaagca

SEQ ID NO: 835920 - RNA, 22 nt, Human
aauccucaaacagaaaugugga

SEQ ID NO: 835921 - RNA, 23 nt, Human
acuccacgcagcgccugguugcc

SEQ ID NO: 835922 - RNA, 20 nt, Human
agaaacaaaaacauuuucca

SEQ ID NO: 835923 - RNA, 22 nt, Human
agaaauaaacuaauuuaaaagc

SEQ ID NO: 835924 - RNA, 20 nt, Human
agacuuagagaaagcugaug

SEQ ID NO: 835925 - RNA, 23 nt, Human
agcaguuucuggucugguccugc

SEQ ID NO: 835926 - RNA, 19 nt, Human
aggguuuagucauaagcaa

SEQ ID NO: 835927 - RNA, 22 nt, Human
augaaaauuaaaaguaugaaug

SEQ ID NO: 835928 - RNA, 23 nt, Human
auuugacugaaagucauuguugg

SEQ ID NO: 835929 - RNA, 22 nt, Human
caaaaaaaacuuucgccuagga

SEQ ID NO: 835930 - RNA, 23 nt, Human
caacagaaacaaaaacauuuucc

SEQ ID NO: 835931 - RNA, 24 nt, Human
caacagaaacaaaaacauuuucca

SEQ ID NO: 835932 - RNA, 20 nt, Human
caagaugggaaugacggaac

SEQ ID NO: 835933 - RNA, 21 nt, Human
cacacaguuauuugguaccac

SEQ ID NO: 835934 - RNA, 24 nt, Human
cacacgugagucagacaguaccac

SEQ ID NO: 835935 - RNA, 18 nt, Human
cacucuugagaaucagga

SEQ ID NO: 835936 - RNA, 23 nt, Human
cagcgccugguugccggagcccc

SEQ ID NO: 835937 - RNA, 25 nt, Human
cauaguauguuuucucuuuuuuccu

SEQ ID NO: 835938 - RNA, 21 nt, Human
ccuggcuguagccaccuucuc

SEQ ID NO: 835939 - RNA, 20 nt, Human
ccuucccagacccacgcgcc

SEQ ID NO: 835940 - RNA, 21 nt, Human
cgcaaaacagaaaggacuuaa

SEQ ID NO: 835941 - RNA, 25 nt, Human
cucgcaaaacagaaaggacuuaaac

SEQ ID NO: 835942 - RNA, 21 nt, Human
cuguuuacaacagaaacaaaa

SEQ ID NO: 835943 - RNA, 19 nt, Human
cuucccagacccacgcgcc

SEQ ID NO: 835944 - RNA, 21 nt, Human
gaaacacaagcucgcaaaaca

SEQ ID NO: 835945 - RNA, 19 nt, Human
gaaaggcagcugaaacaca

SEQ ID NO: 835946 - RNA, 22 nt, Human
gcaaaacagaaaggacuuaaac

SEQ ID NO: 835947 - RNA, 23 nt, Human
gcaaaacagaaaggacuuaaacc

SEQ ID NO: 835948 - RNA, 18 nt, Human
gcaaugggaaagaaaggc

SEQ ID NO: 835949 - RNA, 27 nt, Human
gcagugggucuuugaacuccuuagcau

SEQ ID NO: 835950 - RNA, 22 nt, Human
gccuggacccgcugaugugaga

SEQ ID NO: 835951 - RNA, 23 nt, Human
gcugaaacacaagcucgcaaaac

SEQ ID NO: 835952 - RNA, 20 nt, Human
ggagaaauccucaaacagaa

SEQ ID NO: 835953 - RNA, 18 nt, Human
uaaguagggggcauagac

SEQ ID NO: 835954 - RNA, 20 nt, Human
uagagaaagcugauggaaug

SEQ ID NO: 835955 - RNA, 22 nt, Human
ucaaacaggccauguucuuuag

SEQ ID NO: 835956 - RNA, 22 nt, Human
uccacgcagcgccugguugccg

SEQ ID NO: 835957 - RNA, 25 nt, Human
ucucuucugaaaacaagaugggaau

SEQ ID NO: 835958 - RNA, 21 nt, Human
ugaaacacaagcucgcaaaac

SEQ ID NO: 835959 - RNA, 20 nt, Human
ugaacuccuuagcauaccac

SEQ ID NO: 835960 - RNA, 21 nt, Human
ugaugugagaagaggggccaa

SEQ ID NO: 835961 - RNA, 18 nt, Human
ugccggagcccccauagu

SEQ ID NO: 835962 - RNA, 21 nt, Human
uggcuugugagcaaaaugggu

SEQ ID NO: 835963 - RNA, 22 nt, Human
ugggaugaguaaguagggggca

SEQ ID NO: 835964 - RNA, 18 nt, Human
ugucauggugugaacaga

SEQ ID NO: 835965 - RNA, 25 nt, Human
uuaaaagcaaacaaacaaaaaaaac

SEQ ID NO: 835966 - RNA, 21 nt, Human
uuagaggugggaacaagaaaa

SEQ ID NO: 835967 - RNA, 23 nt, Human
uuccuuggguuagaggugggaac

SEQ ID NO: 835968 - RNA, 18 nt, Human
uucuuuagcaguuucugg

SEQ ID NO: 835969 - RNA, 24 nt, Human
uuuaaaagcaaacaaacaaaaaaa

SEQ ID NO: 835970 - RNA, 22 nt, Human
uuuccaguuuaauccauuugac

SEQ ID NO: 835971 - RNA, 22 nt, Human
aaaaagaaaaaaaauaaggcag

SEQ ID NO: 835972 - RNA, 21 nt, Human
aaaaagacgaaagcaaacagg

SEQ ID NO: 835973 - RNA, 20 nt, Human
aaaagaaaaaaaauaaggca

SEQ ID NO: 835974 - RNA, 23 nt, Human
aaacaauggaaaaagcccucccc

SEQ ID NO: 835975 - RNA, 20 nt, Human
aaacacccaguacugaaaca

SEQ ID NO: 835976 - RNA, 21 nt, Human
aaacacccaguacugaaacaa

SEQ ID NO: 835977 - RNA, 20 nt, Human
aaacaggagccccagacagc

SEQ ID NO: 835978 - RNA, 21 nt, Human
aaagauaaagcagguuuacaa

SEQ ID NO: 835979 - RNA, 24 nt, Human
aaagugcugggauuacagguguga

SEQ ID NO: 835980 - RNA, 22 nt, Human
aacacaauuauucuuuuacacu

SEQ ID NO: 835981 - RNA, 23 nt, Human
aacugcugagaauccccaaaccg

SEQ ID NO: 835982 - RNA, 20 nt, Human
aagauaaagcagguuuacaa

SEQ ID NO: 835983 - RNA, 18 nt, Human
aagugcugggauuacagg

SEQ ID NO: 835984 - RNA, 19 nt, Human
aagugcugggauuacaggu

SEQ ID NO: 835985 - RNA, 26 nt, Human
aagugcugggauuacaggugugagcu

SEQ ID NO: 835986 - RNA, 23 nt, Human
acaauauccaaagacaguauugc

SEQ ID NO: 835987 - RNA, 24 nt, Human
acaauggaaaaagcccuccccuca

SEQ ID NO: 835988 - RNA, 20 nt, Human
acaaugucaccaacgagccu

SEQ ID NO: 835989 - RNA, 19 nt, Human
acaggcacccgccaccacg

SEQ ID NO: 835990 - RNA, 18 nt, Human
acauggucggagcugaag

SEQ ID NO: 835991 - RNA, 24 nt, Human
accauguuggccaggcugguuuug

SEQ ID NO: 835992 - RNA, 18 nt, Human
acccaguacugaaacaau

SEQ ID NO: 835993 - RNA, 18 nt, Human
acgggguuucaccguguu

SEQ ID NO: 835994 - RNA, 19 nt, Human
acgggguuucaccguguua

SEQ ID NO: 835995 - RNA, 20 nt, Human
acgggguuucaccguguuag

SEQ ID NO: 835996 - RNA, 24 nt, Human
acgggguuucaccguguuagccag

SEQ ID NO: 835997 - RNA, 23 nt, Human
acguuuucugaacacuuacauuu

SEQ ID NO: 835998 - RNA, 24 nt, Human
acucugucuguugcccaggcugga

SEQ ID NO: 835999 - RNA, 24 nt, Human
acuucgugauccgccugccuuggc

SEQ ID NO: 836000 - RNA, 22 nt, Human
agaauaaauauacacccaaugu

SEQ ID NO: 836001 - RNA, 19 nt, Human
agagacgggguuucaccgu

SEQ ID NO: 836002 - RNA, 18 nt, Human
agcagcuaaaaaacagga

SEQ ID NO: 836003 - RNA, 23 nt, Human
agcuaaaaaacaggagccccaga

SEQ ID NO: 836004 - RNA, 18 nt, Human
aggcggggcugcugcagg

SEQ ID NO: 836005 - RNA, 21 nt, Human
agggccugggagcccagggag

SEQ ID NO: 836006 - RNA, 18 nt, Human
aggucagguugcagggga

SEQ ID NO: 836007 - RNA, 18 nt, Human
aguagcugggacuacagg

SEQ ID NO: 836008 - RNA, 19 nt, Human
aguagcugggacuacaggc

SEQ ID NO: 836009 - RNA, 18 nt, Human
aguagcugggacuauagg

SEQ ID NO: 836010 - RNA, 19 nt, Human
agugcaguggcgugaucuc

SEQ ID NO: 836011 - RNA, 20 nt, Human
agugcaguggcgugaucucg

SEQ ID NO: 836012 - RNA, 23 nt, Human
agugcaguggcgugaucucggcu

SEQ ID NO: 836013 - RNA, 24 nt, Human
agugcaguggcgugaucucggcuc

SEQ ID NO: 836014 - RNA, 24 nt, Human
auaaaacaaaucugaaauucacaa

SEQ ID NO: 836015 - RNA, 21 nt, Human
auaaagcagguuuacaacccu

SEQ ID NO: 836016 - RNA, 19 nt, Human
auccgccugccuuggccuc

SEQ ID NO: 836017 - RNA, 19 nt, Human
augcacugucguggcucaa

SEQ ID NO: 836018 - RNA, 18 nt, Human
augggguuucaccauguu

SEQ ID NO: 836019 - RNA, 22 nt, Human
augggguuucaccauguuggcc

SEQ ID NO: 836020 - RNA, 24 nt, Human
augggguuucaccauguuggccag

SEQ ID NO: 836021 - RNA, 20 nt, Human
caaaaaaagacgaaagcaaa

SEQ ID NO: 836022 - RNA, 24 nt, Human
caaagugcugggauuacaggugug

SEQ ID NO: 836023 - RNA, 18 nt, Human
caacauggucggagcuga

SEQ ID NO: 836024 - RNA, 23 nt, Human
caaugaacuccuuuugcuguauc

SEQ ID NO: 836025 - RNA, 26 nt, Human
caauggaaaaagcccuccccucaauu

SEQ ID NO: 836026 - RNA, 24 nt, Human
caauuuuuuguauuuuuaguagag

SEQ ID NO: 836027 - RNA, 20 nt, Human
cacaaaaaaagacgaaagca

SEQ ID NO: 836028 - RNA, 23 nt, Human
cacaaaaaaagacgaaagcaaac

SEQ ID NO: 836029 - RNA, 21 nt, Human
cacaaugucaccaacgagccu

SEQ ID NO: 836030 - RNA, 21 nt, Human
caccauguuggccaggcuggu

SEQ ID NO: 836031 - RNA, 24 nt, Human
caccauguuggccaggcugguuuu

SEQ ID NO: 836032 - RNA, 26 nt, Human
caccauguuggccaggcugguuuuga

SEQ ID NO: 836033 - RNA, 18 nt, Human
caccguguuagccaggau

SEQ ID NO: 836034 - RNA, 24 nt, Human
caccguguuagccaggauggucuc

SEQ ID NO: 836035 - RNA, 18 nt, Human
caccuaccagguucaagc

SEQ ID NO: 836036 - RNA, 19 nt, Human
caccuggccuaauuuuugu

SEQ ID NO: 836037 - RNA, 28 nt, Human
cacucugucuguugcccaggcuggagug

SEQ ID NO: 836038 - RNA, 20 nt, Human
cacuuguuuuucucaaauau

SEQ ID NO: 836039 - RNA, 22 nt, Human
cagaauaaauauacacccaaug

SEQ ID NO: 836040 - RNA, 24 nt, Human
cagccgcaacugcugagaaucccc

SEQ ID NO: 836041 - RNA, 25 nt, Human
cagcuaaaaaacaggagccccagga

SEQ ID NO: 836042 - RNA, 21 nt, Human
caggcacccgccaccacgccu

SEQ ID NO: 836043 - RNA, 22 nt, Human
caguacugaaacaauauccaaa

SEQ ID NO: 836044 - RNA, 20 nt, Human
caucuccaaaggccaaaagc

SEQ ID NO: 836045 - RNA, 23 nt, Human
cauguuggccaggcugguuuuga

SEQ ID NO: 836046 - RNA, 21 nt, Human
ccaaagugcugggauuacagg

SEQ ID NO: 836047 - RNA, 21 nt, Human
ccaaagugcugggauuacagg

SEQ ID NO: 836048 - RNA, 24 nt, Human
ccaaagugcugggauuacaggugu

SEQ ID NO: 836049 - RNA, 19 nt, Human
ccagguucaagcuauucuc

SEQ ID NO: 836050 - RNA, 18 nt, Human
ccauucuccugccucagc

SEQ ID NO: 836051 - RNA, 18 nt, Human
cccaaauguucugacguu

SEQ ID NO: 836052 - RNA, 22 nt, Human
cccaaguuggagugcaguggcg

SEQ ID NO: 836053 - RNA, 21 nt, Human
cccaguacugaaacaauaucc

SEQ ID NO: 836054 - RNA, 25 nt, Human
cccaucccauuuacacauucaaaaa

SEQ ID NO: 836055 - RNA, 23 nt, Human
cccgaguagcugggacuacaggc

SEQ ID NO: 836056 - RNA, 24 nt, Human
cccgaguagcugggacuacaggca

SEQ ID NO: 836057 - RNA, 19 nt, Human
cccgaguagcugggacuau

SEQ ID NO: 836058 - RNA, 24 nt, Human
cccgaguagcugggacuauaggug

SEQ ID NO: 836059 - RNA, 20 nt, Human
ccgccaccacgccuggccaa

SEQ ID NO: 836060 - RNA, 24 nt, Human
ccuaccagguucaagcuauucucc

SEQ ID NO: 836061 - RNA, 22 nt, Human
ccugccuuggccucccaaagug

SEQ ID NO: 836062 - RNA, 22 nt, Human
ccuuuaaacacccaguacugaa

SEQ ID NO: 836063 - RNA, 20 nt, Human
cgcaccauucuccugccuca

SEQ ID NO: 836064 - RNA, 24 nt, Human
cuaaaagauaaagcagguuuacaa

SEQ ID NO: 836065 - RNA, 23 nt, Human
cuaauuuuuguauuuuuaguaga

SEQ ID NO: 836066 - RNA, 27 nt, Human
cucacucugucuguugcccaggcugga

SEQ ID NO: 836067 - RNA, 24 nt, Human
cucagccucccgaguagcugggac

SEQ ID NO: 836068 - RNA, 24 nt, Human
cuccugacuucgugauccgccugc

SEQ ID NO: 836069 - RNA, 24 nt, Human
cucugucuguugcccaggcuggag

SEQ ID NO: 836070 - RNA, 19 nt, Human
cugaagaacagcagcuaaa

SEQ ID NO: 836071 - RNA, 23 nt, Human
cugagauagcaagucaaguuuau

SEQ ID NO: 836072 - RNA, 25 nt, Human
cugccgcaccuggccuaauuuuugu

SEQ ID NO: 836073 - RNA, 23 nt, Human
cugccucagccucccgaguagcu

SEQ ID NO: 836074 - RNA, 23 nt, Human
cugccuuggccucccaaagugcu

SEQ ID NO: 836075 - RNA, 23 nt, Human
cuguuucagacucccgaguagcu

SEQ ID NO: 836076 - RNA, 18 nt, Human
gaaacaauauccaaagac

SEQ ID NO: 836077 - RNA, 27 nt, Human
gacugcuuugggcaugcccuuuguuuu

SEQ ID NO: 836078 - RNA, 24 nt, Human
gacuucgugauccgccugccuugg

SEQ ID NO: 836079 - RNA, 24 nt, Human
gagacgggguuucaccguguuagc

SEQ ID NO: 836080 - RNA, 18 nt, Human
gagaugggguuucaccau

SEQ ID NO: 836081 - RNA, 24 nt, Human
gagaugggguuucaccauguuggc

SEQ ID NO: 836082 - RNA, 25 nt, Human
gaguagcugggacuacaggcacccg

SEQ ID NO: 836083 - RNA, 18 nt, Human
gauuacaggugugagcug

SEQ ID NO: 836084 - RNA, 23 nt, Human
gauuacaggugugagcugccgca

SEQ ID NO: 836085 - RNA, 19 nt, Human
gcacaaaaaaagacgaaag

SEQ ID NO: 836086 - RNA, 20 nt, Human
gccucagccucccgaguagc

SEQ ID NO: 836087 - RNA, 22 nt, Human
gccuuggccucccaaagugcug

SEQ ID NO: 836088 - RNA, 20 nt, Human
gcuaaaaaacaggagcccca

SEQ ID NO: 836089 - RNA, 18 nt, Human
ggaaaaagcccuccccuc

SEQ ID NO: 836090 - RNA, 23 nt, Human
ggagcaacaaaucaguuuaaaac

SEQ ID NO: 836091 - RNA, 18 nt, Human
ggauaguggcuugggggu

SEQ ID NO: 836092 - RNA, 24 nt, Human
ggauggucucaaucuccugacuuc

SEQ ID NO: 836093 - RNA, 19 nt, Human
ggccagugcccaaguuuaa

SEQ ID NO: 836094 - RNA, 18 nt, Human
ggccugggagcccaggga

SEQ ID NO: 836095 - RNA, 18 nt, Human
gggcugcugcaggagggc

SEQ ID NO: 836096 - RNA, 22 nt, Human
gggguuucaccauguuggccag

SEQ ID NO: 836097 - RNA, 23 nt, Human
gggguuucaccguguuagccagg

SEQ ID NO: 836098 - RNA, 18 nt, Human
ggguuucaccauguuggc

SEQ ID NO: 836099 - RNA, 22 nt, Human
ggguuucaccauguuggccagg

SEQ ID NO: 836100 - RNA, 22 nt, Human
ggguuucaccguguuagccagg

SEQ ID NO: 836101 - RNA, 23 nt, Human
guagagacgggguuucaccgugu

SEQ ID NO: 836102 - RNA, 23 nt, Human
guagagaugggguuucaccaugu

SEQ ID NO: 836103 - RNA, 21 nt, Human
gugaucucggcucacugcaag

SEQ ID NO: 836104 - RNA, 23 nt, Human
guggcuggccagugcccaaguuu

SEQ ID NO: 836105 - RNA, 26 nt, Human
guucagaauaaauauacacccaauua

SEQ ID NO: 836106 - RNA, 20 nt, Human
guuuaaaaccccaaauguuc

SEQ ID NO: 836107 - RNA, 19 nt, Human
uaaaaccccaaauguucug

SEQ ID NO: 836108 - RNA, 23 nt, Human
uaaaagauaaagcagguuuacaa

SEQ ID NO: 836109 - RNA, 23 nt, Human
uaaauaaauagcaaaaaaagugg

SEQ ID NO: 836110 - RNA, 23 nt, Human
uaaauagcaaaaaaaguggauaa

SEQ ID NO: 836111 - RNA, 19 nt, Human
uaauaggcuuuuuuuuuuu

SEQ ID NO: 836112 - RNA, 24 nt, Human
uaauuuuuguauuuuuaguagaga

SEQ ID NO: 836113 - RNA, 24 nt, Human
uacaaaaagaaaaaaaauaaggca

SEQ ID NO: 836114 - RNA, 25 nt, Human
uacaaaaagaaaaaaaauaaggcag

SEQ ID NO: 836115 - RNA, 19 nt, Human
uacaacccugcaccgcgca

SEQ ID NO: 836116 - RNA, 19 nt, Human
uacacuuuuaacaauauaa

SEQ ID NO: 836117 - RNA, 22 nt, Human
uacaggcacccgccaccacgcc

SEQ ID NO: 836118 - RNA, 21 nt, Human
uacauaaauauucacaugaaa

SEQ ID NO: 836119 - RNA, 24 nt, Human
uaccagguucaagcuauucuccug

SEQ ID NO: 836120 - RNA, 22 nt, Human
uagagaugggguuucaccaugu

SEQ ID NO: 836121 - RNA, 22 nt, Human
uagcaagucaaguuuauaaaga

SEQ ID NO: 836122 - RNA, 20 nt, Human
uagcagcuauuuguccuuua

SEQ ID NO: 836123 - RNA, 19 nt, Human
uaggcuuuuuuuuuuuuaa

SEQ ID NO: 836124 - RNA, 21 nt, Human
uaguagagacgggguuucacc

SEQ ID NO: 836125 - RNA, 24 nt, Human
uaguagagacgggguuucaccgug

SEQ ID NO: 836126 - RNA, 26 nt, Human
uaguagagacgggguuucaccguguu

SEQ ID NO: 836127 - RNA, 26 nt, Human
uaguagagacgggguuucaccguugg

SEQ ID NO: 836128 - RNA, 24 nt, Human
uaguagagaugggguuucaccaug

SEQ ID NO: 836129 - RNA, 25 nt, Human
uaguagagaugggguuucaccaugu

SEQ ID NO: 836130 - RNA, 26 nt, Human
uauucaguguucauuugauaguucua

SEQ ID NO: 836131 - RNA, 21 nt, Human
ucaccaacgagccuaucccuu

SEQ ID NO: 836132 - RNA, 24 nt, Human
ucaccguguuagccaggauggucu

SEQ ID NO: 836133 - RNA, 23 nt, Human
ucagccucccgaguagcugggac

SEQ ID NO: 836134 - RNA, 23 nt, Human
uccaaccuugauuuucacuuuaa

SEQ ID NO: 836135 - RNA, 23 nt, Human
ucccaaagugcugggauuacagg

SEQ ID NO: 836136 - RNA, 24 nt, Human
ucccgaguagcugggacuacaggc

SEQ ID NO: 836137 - RNA, 23 nt, Human
ucccgaguagcugggacuauagg

SEQ ID NO: 836138 - RNA, 24 nt, Human
ucccgaguagcugggacuauaggu

SEQ ID NO: 836139 - RNA, 21 nt, Human
ucggagcugaagaacagcagc

SEQ ID NO: 836140 - RNA, 21 nt, Human
ucuaagugggacaacuaguuc

SEQ ID NO: 836141 - RNA, 27 nt, Human
ucucacucugucuguugcccaggcugg

SEQ ID NO: 836142 - RNA, 28 nt, Human
ucucacucugucuguugcccaggcugga

SEQ ID NO: 836143 - RNA, 20 nt, Human
ucuccaaaggccaaaagcaa

SEQ ID NO: 836144 - RNA, 24 nt, Human
ucuccugccucagccucccgagua

SEQ ID NO: 836145 - RNA, 28 nt, Human
ucucgcucugucuguugcccaaguugga

SEQ ID NO: 836146 - RNA, 20 nt, Human
ucugucuguugcccaggcug

SEQ ID NO: 836147 - RNA, 21 nt, Human
ucugucuguugcccaggcugg

SEQ ID NO: 836148 - RNA, 24 nt, Human
ucugucuguugcccaggcuggagu

SEQ ID NO: 836149 - RNA, 24 nt, Human
ucuguugcccaaguuggagugcag

SEQ ID NO: 836150 - RNA, 18 nt, Human
ucuguugcccaggcugga

SEQ ID NO: 836151 - RNA, 24 nt, Human
ucuucugacuucguggcuggccag

SEQ ID NO: 836152 - RNA, 19 nt, Human
ugaaacaauauccaaagac

SEQ ID NO: 836153 - RNA, 25 nt, Human
ugaaacaauauccaaagacaguauu

SEQ ID NO: 836154 - RNA, 19 nt, Human
ugaaaccuccaccuaccag

SEQ ID NO: 836155 - RNA, 23 nt, Human
ugaagaacagcagcuaaaaaaca

SEQ ID NO: 836156 - RNA, 18 nt, Human
ugagacagagucucgcuc

SEQ ID NO: 836157 - RNA, 22 nt, Human
ugagacagagucucgcucuguc

SEQ ID NO: 836158 - RNA, 22 nt, Human
ugagauaaucacacagcaacau

SEQ ID NO: 836159 - RNA, 22 nt, Human
ugagauggagucucacucuguc

SEQ ID NO: 836160 - RNA, 22 nt, Human
ugcaguggcgugaucucggcuc

SEQ ID NO: 836161 - RNA, 19 nt, Human
ugccaagggucuggguccu

SEQ ID NO: 836162 - RNA, 21 nt, Human
ugcccaaguuggagugcagug

SEQ ID NO: 836163 - RNA, 18 nt, Human
ugcccaggcuggagugca

SEQ ID NO: 836164 - RNA, 18 nt, Human
ugcccaggcuggagugca

SEQ ID NO: 836165 - RNA, 20 nt, Human
ugcccaggcuggagugcaug

SEQ ID NO: 836166 - RNA, 21 nt, Human
ugcccaggcuggagugcaugc

SEQ ID NO: 836167 - RNA, 24 nt, Human
ugccucagccucccgaguagcugg

SEQ ID NO: 836168 - RNA, 20 nt, Human
ugcugggauuacagguguga

SEQ ID NO: 836169 - RNA, 23 nt, Human
ugcuuacccaucccauuuacaca

SEQ ID NO: 836170 - RNA, 19 nt, Human
uggagugcaguggcgugau

SEQ ID NO: 836171 - RNA, 23 nt, Human
uggagugcaguggcgugaucucg

SEQ ID NO: 836172 - RNA, 24 nt, Human
uggagugcaguggcgugaucucgg

SEQ ID NO: 836173 - RNA, 19 nt, Human
uggauaguggcuugggggu

SEQ ID NO: 836174 - RNA, 24 nt, Human
uggccaggcugguuuugaucuucu

SEQ ID NO: 836175 - RNA, 20 nt, Human
uggcgugaucucggcucacu

SEQ ID NO: 836176 - RNA, 21 nt, Human
ugggacuacaggcacccgcca

SEQ ID NO: 836177 - RNA, 22 nt, Human
ugggacuacaggcacccgccac

SEQ ID NO: 836178 - RNA, 24 nt, Human
ugggacuacaggcacccgccacca

SEQ ID NO: 836179 - RNA, 21 nt, Human
ugggacuauaggugcgugcca

SEQ ID NO: 836180 - RNA, 22 nt, Human
ugggacuauaggugcgugccac

SEQ ID NO: 836181 - RNA, 24 nt, Human
ugggacuauaggugcgugccacca

SEQ ID NO: 836182 - RNA, 25 nt, Human
ugggacuauaggugcgugccaccau

SEQ ID NO: 836183 - RNA, 18 nt, Human
ugggauuacaggugugag

SEQ ID NO: 836184 - RNA, 19 nt, Human
ugggauuacaggugugagc

SEQ ID NO: 836185 - RNA, 22 nt, Human
ugggauuacaggugugagcugc

SEQ ID NO: 836186 - RNA, 23 nt, Human
ugggauuacaggugugagcugcc

SEQ ID NO: 836187 - RNA, 24 nt, Human
ugggauuacaggugugagcugccg

SEQ ID NO: 836188 - RNA, 25 nt, Human
ugggauuacaggugugagcugccgc

SEQ ID NO: 836189 - RNA, 24 nt, Human
ugggguuucaccauguuggccagg

SEQ ID NO: 836190 - RNA, 21 nt, Human
uguauuuuuaguagagacggg

SEQ ID NO: 836191 - RNA, 21 nt, Human
uguauuuuuaguagagauggg

SEQ ID NO: 836192 - RNA, 23 nt, Human
ugucuguugcccaggcuggagug

SEQ ID NO: 836193 - RNA, 18 nt, Human
uuaguagagacgggguuu

SEQ ID NO: 836194 - RNA, 22 nt, Human
uuaguagagacgggguuucacc

SEQ ID NO: 836195 - RNA, 24 nt, Human
uuaguagagacgggguuucaccgu

SEQ ID NO: 836196 - RNA, 18 nt, Human
uuaguagagaugggguuu

SEQ ID NO: 836197 - RNA, 22 nt, Human
uuaguagagaugggguuucacc

SEQ ID NO: 836198 - RNA, 24 nt, Human
uuaguagagaugggguuucaccau

SEQ ID NO: 836199 - RNA, 18 nt, Human
uucaaaaaagggaaauuc

SEQ ID NO: 836200 - RNA, 23 nt, Human
uucacuuguuuuucucaaauauu

SEQ ID NO: 836201 - RNA, 21 nt, Human
uucucaagaugaaaaucucau

SEQ ID NO: 836202 - RNA, 21 nt, Human
uugcaggggaagacugcuuug

SEQ ID NO: 836203 - RNA, 18 nt, Human
uuggccucccaaagugcu

SEQ ID NO: 836204 - RNA, 23 nt, Human
uuguauuuuuaguagagacgggg

SEQ ID NO: 836205 - RNA, 23 nt, Human
uuguauuuuuaguagagaugggg

SEQ ID NO: 836206 - RNA, 25 nt, Human
uuuaauauaauuuaucuugcugaga

SEQ ID NO: 836207 - RNA, 24 nt, Human
uuucaccauguuggccaggcuggu

SEQ ID NO: 836208 - RNA, 19 nt, Human
uuucaccguguuagccagg

SEQ ID NO: 836209 - RNA, 19 nt, Human
uuucauggucacuugguca

SEQ ID NO: 836210 - RNA, 21 nt, Human
uuugcacauuugcacugagcc

SEQ ID NO: 836211 - RNA, 24 nt, Human
uuuucauauccaaccuugauuuuc

SEQ ID NO: 836212 - RNA, 20 nt, Human
uuuuguauuuuuaguagaga

SEQ ID NO: 836213 - RNA, 24 nt, Human
uuuuuaguagagacgggguuucac

SEQ ID NO: 836214 - RNA, 24 nt, Human
uuuuuaguagagaugggguuucac

SEQ ID NO: 836215 - RNA, 20 nt, Human
uuuuuguauuuuuaguagag

SEQ ID NO: 836216 - RNA, 21 nt, Human
uuuuuguauuuuuaguagaga

SEQ ID NO: 836217 - RNA, 24 nt, Human
uuuuuuguauuuuuaguagagacg

SEQ ID NO: 836218 - RNA, 20 nt, Human
uuuuuuuuuuugagacagag

SEQ ID NO: 836219 - RNA, 21 nt, Human
uuuuuuuuuuuucaggauucu

SEQ ID NO: 836220 - RNA, 25 nt, Human
uuuuuuuuuuuugagacagagucuc

SEQ ID NO: 836221 - RNA, 22 nt, Human
uuuuuuuuuuuuuuuuuucagg

SEQ ID NO: 836222 - RNA, 18 nt, Human
aaaaaaaacuaugucaca

SEQ ID NO: 836223 - RNA, 20 nt, Human
aaaagaaugggaagagaaga

SEQ ID NO: 836224 - RNA, 24 nt, Human
aaacaaaagcuuuuucacccagaa

SEQ ID NO: 836225 - RNA, 22 nt, Human
aaaguacuacuaaaaguaucau

SEQ ID NO: 836226 - RNA, 24 nt, Human
aaauuuucuuuuaaauaaaaaagc

SEQ ID NO: 836227 - RNA, 25 nt, Human
aagaacacaaacaaaagcuuuuuca

SEQ ID NO: 836228 - RNA, 22 nt, Human
acagagcauaugaaaacugccc

SEQ ID NO: 836229 - RNA, 20 nt, Human
agacaucaagagcuucugag

SEQ ID NO: 836230 - RNA, 23 nt, Human
aggagaaaagaaugggaagagaa

SEQ ID NO: 836231 - RNA, 21 nt, Human
aucuggacacauuucacagag

SEQ ID NO: 836232 - RNA, 20 nt, Human
caggaauacugugaaauuag

SEQ ID NO: 836233 - RNA, 19 nt, Human
caguacagaggcucaucuc

SEQ ID NO: 836234 - RNA, 21 nt, Human
caguacagaggcucaucucuu

SEQ ID NO: 836235 - RNA, 30 nt, Human
cauauuaaaaaaaaaaacuaugucacaucu

SEQ ID NO: 836236 - RNA, 18 nt, Human
caugaacaccguuugugc

SEQ ID NO: 836237 - RNA, 24 nt, Human
ccagcuaugacuuuuaaaauucca

SEQ ID NO: 836238 - RNA, 19 nt, Human
cccacaaacuaauuaagcc

SEQ ID NO: 836239 - RNA, 21 nt, Human
cccacaaacuaauuaagccuc

SEQ ID NO: 836240 - RNA, 21 nt, Human
cucagcaagaauuaugacaga

SEQ ID NO: 836241 - RNA, 18 nt, Human
gaaaacugcccacaaacu

SEQ ID NO: 836242 - RNA, 24 nt, Human
gagaaaagaaugggaagagaagac

SEQ ID NO: 836243 - RNA, 21 nt, Human
gagucauuuuuaaauacuugg

SEQ ID NO: 836244 - RNA, 18 nt, Human
ggaagagaagacauuucc

SEQ ID NO: 836245 - RNA, 23 nt, Human
ggagguaauagaggugagagagc

SEQ ID NO: 836246 - RNA, 24 nt, Human
gugauacagcaggaaaagguggaa

SEQ ID NO: 836247 - RNA, 21 nt, Human
uaaaaucccugggaauaguac

SEQ ID NO: 836248 - RNA, 25 nt, Human
uaacuggcagcuucugacaguccua

SEQ ID NO: 836249 - RNA, 28 nt, Human
uaagaacacaaacaaaagcuggagaccc

SEQ ID NO: 836250 - RNA, 24 nt, Human
uaagaacacaaacaaaagcuuuuu

SEQ ID NO: 836251 - RNA, 21 nt, Human
uacaguacagaggcucaucuc

SEQ ID NO: 836252 - RNA, 25 nt, Human
uagaaaaaggcauuuaauuacaaaa

SEQ ID NO: 836253 - RNA, 19 nt, Human
uaugacagaaguccacaug

SEQ ID NO: 836254 - RNA, 18 nt, Human
ucacaauaugguuugugc

SEQ ID NO: 836255 - RNA, 24 nt, Human
ugaacauaagucagaugaacugaa

SEQ ID NO: 836256 - RNA, 19 nt, Human
ugacaacacguaaagccag

SEQ ID NO: 836257 - RNA, 24 nt, Human
ugugaggagguaauagaggugaga

SEQ ID NO: 836258 - RNA, 24 nt, Human
uguuauccauaauccaauuauuau

SEQ ID NO: 836259 - RNA, 25 nt, Human
uuaacauuucucuacuucauuucuu

SEQ ID NO: 836260 - RNA, 22 nt, Human
uuaauaaauugacuccgauuau

SEQ ID NO: 836261 - RNA, 23 nt, Human
uuaaugugcugucuucacaacuu

SEQ ID NO: 836262 - RNA, 22 nt, Human
uuacuggauuauacuaucaugc

SEQ ID NO: 836263 - RNA, 19 nt, Human
uucacagagcauaugaaaa

SEQ ID NO: 836264 - RNA, 23 nt, Human
uucaggacuuaaaaaaaaaaauc

SEQ ID NO: 836265 - RNA, 24 nt, Human
aaaaaaaaaaaguacaaaucuggg

SEQ ID NO: 836266 - RNA, 21 nt, Human
aaaaaaaaaguacaaaucugg

SEQ ID NO: 836267 - RNA, 19 nt, Human
aaaaaaaguacaaaucugg

SEQ ID NO: 836268 - RNA, 23 nt, Human
aaaaaagagacacaguugauuca

SEQ ID NO: 836269 - RNA, 24 nt, Human
aaacaaaaccuacuuggaaaagaa

SEQ ID NO: 836270 - RNA, 19 nt, Human
aaaccuagacggggcagug

SEQ ID NO: 836271 - RNA, 19 nt, Human
aaagagacacaguugauuc

SEQ ID NO: 836272 - RNA, 23 nt, Human
aacugccuuaugcaggggugggg

SEQ ID NO: 836273 - RNA, 24 nt, Human
aagucaaaaaagagacacaguuga

SEQ ID NO: 836274 - RNA, 19 nt, Human
acagaccuccccccacccc

SEQ ID NO: 836275 - RNA, 23 nt, Human
acagaccuccccccaccccaaag

SEQ ID NO: 836276 - RNA, 21 nt, Human
agaaaaaaaaaaaaguacaaa

SEQ ID NO: 836277 - RNA, 22 nt, Human
agaauccacaggagggagagga

SEQ ID NO: 836278 - RNA, 21 nt, Human
agagaucacccaccugccccu

SEQ ID NO: 836279 - RNA, 24 nt, Human
agcaguuagaaaaaaaaaaaagua

SEQ ID NO: 836280 - RNA, 24 nt, Human
agcuguaagggaccaucuucaacu

SEQ ID NO: 836281 - RNA, 23 nt, Human
aggaggaaagggaacguggcugg

SEQ ID NO: 836282 - RNA, 21 nt, Human
aggagggagaggaggaaaggg

SEQ ID NO: 836283 - RNA, 19 nt, Human
aggcagccagggcaccagg

SEQ ID NO: 836284 - RNA, 22 nt, Human
agggaacguggcugggaggagg

SEQ ID NO: 836285 - RNA, 18 nt, Human
agggagaggaggaaaggg

SEQ ID NO: 836286 - RNA, 19 nt, Human
agggauuuggggaguaggg

SEQ ID NO: 836287 - RNA, 19 nt, Human
agggguggggacagggaag

SEQ ID NO: 836288 - RNA, 20 nt, Human
agggguggggacagggaagg

SEQ ID NO: 836289 - RNA, 23 nt, Human
aggugccacuaggcacagcacaa

SEQ ID NO: 836290 - RNA, 19 nt, Human
auuggggaagaaaaccaac

SEQ ID NO: 836291 - RNA, 20 nt, Human
caaaaaagagacacaguuga

SEQ ID NO: 836292 - RNA, 19 nt, Human
caagagacuaaaaacaaca

SEQ ID NO: 836293 - RNA, 25 nt, Human
caagucaaaaaagagacacaguuga

SEQ ID NO: 836294 - RNA, 22 nt, Human
cacauuacagaccuccccccac

SEQ ID NO: 836295 - RNA, 23 nt, Human
cacauuacagaccuccccccacc

SEQ ID NO: 836296 - RNA, 19 nt, Human
caccuccgcuccgcggccg

SEQ ID NO: 836297 - RNA, 25 nt, Human
cacuucuggcucagggauuugggga

SEQ ID NO: 836298 - RNA, 22 nt, Human
cagaccuccccccaccccaaag

SEQ ID NO: 836299 - RNA, 22 nt, Human
cagcacaagagacuaaaaacaa

SEQ ID NO: 836300 - RNA, 19 nt, Human
cagcacaguuuuugcagcu

SEQ ID NO: 836301 - RNA, 19 nt, Human
cagguggaagagaaugguu

SEQ ID NO: 836302 - RNA, 20 nt, Human
ccaagucaaaaaagagacac

SEQ ID NO: 836303 - RNA, 20 nt, Human
ccccaaagccuaauacuugc

SEQ ID NO: 836304 - RNA, 20 nt, Human
ccccaaagccuaauacuugc

SEQ ID NO: 836305 - RNA, 18 nt, Human
ccccccaccccaaagccu

SEQ ID NO: 836306 - RNA, 20 nt, Human
ccccuuccuuucugggcaca

SEQ ID NO: 836307 - RNA, 25 nt, Human
ccgcuagcugcgcccgccgccgcuc

SEQ ID NO: 836308 - RNA, 18 nt, Human
ccgcuccgcuccgcgccc

SEQ ID NO: 836309 - RNA, 19 nt, Human
ccuccccccaccccaaagc

SEQ ID NO: 836310 - RNA, 22 nt, Human
ccuccccccaccccaaagccua

SEQ ID NO: 836311 - RNA, 24 nt, Human
ccuuaagaggagaaccagauggcu

SEQ ID NO: 836312 - RNA, 22 nt, Human
cgcuuggagccgccccgggcuc

SEQ ID NO: 836313 - RNA, 19 nt, Human
cgggggaagccgagcugca

SEQ ID NO: 836314 - RNA, 19 nt, Human
cugcgcccgccgccgcucc

SEQ ID NO: 836315 - RNA, 18 nt, Human
cugggcacaggaaggcag

SEQ ID NO: 836316 - RNA, 24 nt, Human
gaaggcagccagggcaccaggucc

SEQ ID NO: 836317 - RNA, 20 nt, Human
gagaaaaaaagacaagaagu

SEQ ID NO: 836318 - RNA, 23 nt, Human
gagcauuucacaucacuaaccua

SEQ ID NO: 836319 - RNA, 24 nt, Human
gaggaggaaagggaacguggcugg

SEQ ID NO: 836320 - RNA, 21 nt, Human
gaggaggcaauagccccuucc

SEQ ID NO: 836321 - RNA, 20 nt, Human
gcacaagagacuaaaaacaa

SEQ ID NO: 836322 - RNA, 19 nt, Human
gcaguguccuccccagccc

SEQ ID NO: 836323 - RNA, 21 nt, Human
gcaguguccuccccagcccag

SEQ ID NO: 836324 - RNA, 20 nt, Human
gcccaggugccacuaggcac

SEQ ID NO: 836325 - RNA, 19 nt, Human
gccgacccgcuagcugcgc

SEQ ID NO: 836326 - RNA, 26 nt, Human
gcugaugggagaauccacaggaggga

SEQ ID NO: 836327 - RNA, 24 nt, Human
ggaaagggaacguggcugggagga

SEQ ID NO: 836328 - RNA, 20 nt, Human
ggaaggagguagggccaggg

SEQ ID NO: 836329 - RNA, 22 nt, Human
ggaaggagguagggccagggac

SEQ ID NO: 836330 - RNA, 21 nt, Human
ggacagggaaggagguagggc

SEQ ID NO: 836331 - RNA, 21 nt, Human
ggagaaaaaaagacaagaagu

SEQ ID NO: 836332 - RNA, 18 nt, Human
ggagguagggccagggac

SEQ ID NO: 836333 - RNA, 21 nt, Human
ggagguagggccagggacagg

SEQ ID NO: 836334 - RNA, 21 nt, Human
ggcaccagguccaggcaguga

SEQ ID NO: 836335 - RNA, 20 nt, Human
ggccgacccgcuagcugcgc

SEQ ID NO: 836336 - RNA, 21 nt, Human
gggaaggagguagggccaggg

SEQ ID NO: 836337 - RNA, 25 nt, Human
gggaguaggguaaacaaaaccuacu

SEQ ID NO: 836338 - RNA, 22 nt, Human
gggcacaggaaggcagccaggg

SEQ ID NO: 836339 - RNA, 21 nt, Human
gucaaaaaagagacacaguug

SEQ ID NO: 836340 - RNA, 21 nt, Human
gucggcccggccggcggaggg

SEQ ID NO: 836341 - RNA, 22 nt, Human
uaaaaacaacaggggaaggccg

SEQ ID NO: 836342 - RNA, 22 nt, Human
uacagaccuccccccaccccaa

SEQ ID NO: 836343 - RNA, 18 nt, Human
uacaguaaaaccaggugg

SEQ ID NO: 836344 - RNA, 20 nt, Human
uaccaagucaaaaaagagac

SEQ ID NO: 836345 - RNA, 22 nt, Human
uauaagcaccccacuucuggcu

SEQ ID NO: 836346 - RNA, 26 nt, Human
ucacaaggacagcacaguuuuugcag

SEQ ID NO: 836347 - RNA, 22 nt, Human
uccaggcagugaccucacaagg

SEQ ID NO: 836348 - RNA, 23 nt, Human
ugaccucacaaggacagcacagu

SEQ ID NO: 836349 - RNA, 21 nt, Human
ugccuuaugcaggggugggga

SEQ ID NO: 836350 - RNA, 24 nt, Human
ugggagaauccacaggagggagag

SEQ ID NO: 836351 - RNA, 30 nt, Human
uuacaacagugggagaaaaaaagacaagaa

SEQ ID NO: 836352 - RNA, 18 nt, Human
uuacagaccuccccccac

SEQ ID NO: 836353 - RNA, 22 nt, Human
uuagcaguuagaaaaaaaaaaa

SEQ ID NO: 836354 - RNA, 22 nt, Human
uuucugggcacaggaaggcagc

SEQ ID NO: 836355 - RNA, 24 nt, Human
uuugcagcuuagagaucacccacc

SEQ ID NO: 836356 - RNA, 18 nt, Human
uuugcagcuuagagaucc

SEQ ID NO: 836357 - RNA, 24 nt, Human
uuuugcagcuuagagaucacccac

SEQ ID NO: 836358 - RNA, 21 nt, Human
uuuuugcagcuuagagaucac

SEQ ID NO: 836359 - RNA, 21 nt, Human
uuuuuuuuuuuuuuaaaaagg

SEQ ID NO: 836360 - RNA, 25 nt, Human
uuuuuuuuuuuuuuuuuaaaaaggg

SEQ ID NO: 836361 - RNA, 21 nt, Human
aagcugccugcccugcagggg

SEQ ID NO: 836362 - RNA, 21 nt, Human
aagggaagaggcccaagaggc

SEQ ID NO: 836363 - RNA, 21 nt, Human
agaggcuuccuguccccuugg

SEQ ID NO: 836364 - RNA, 25 nt, Human
agcuggcggcgggccggccuagggu

SEQ ID NO: 836365 - RNA, 22 nt, Human
aggcuuggggagggcuccugcc

SEQ ID NO: 836366 - RNA, 21 nt, Human
agggcagaggcccgcccuggg

SEQ ID NO: 836367 - RNA, 18 nt, Human
aguagagggcagaggccc

SEQ ID NO: 836368 - RNA, 20 nt, Human
ccaggaagggaagaggccca

SEQ ID NO: 836369 - RNA, 18 nt, Human
cccugaaggcuuggggag

SEQ ID NO: 836370 - RNA, 19 nt, Human
ccugcagggguccagggag

SEQ ID NO: 836371 - RNA, 23 nt, Human
ccugcccugcagggguccaggga

SEQ ID NO: 836372 - RNA, 19 nt, Human
ccuggcaagugggccuggc

SEQ ID NO: 836373 - RNA, 19 nt, Human
cgggccggccuagggugcc

SEQ ID NO: 836374 - RNA, 22 nt, Human
cuccgagcagcccugaaggcuu

SEQ ID NO: 836375 - RNA, 21 nt, Human
cugccuggcaagugggccugg

SEQ ID NO: 836376 - RNA, 18 nt, Human
cuuccuguccccuugggg

SEQ ID NO: 836377 - RNA, 21 nt, Human
cuuccuguccccuugggggca

SEQ ID NO: 836378 - RNA, 18 nt, Human
gaagaggcccaagaggcu

SEQ ID NO: 836379 - RNA, 21 nt, Human
gggaagaggcccaagaggcuu

SEQ ID NO: 836380 - RNA, 24 nt, Human
gggcagcagagccaaaugcuuggg

SEQ ID NO: 836381 - RNA, 19 nt, Human
gugaggcaaaggcaggggg

SEQ ID NO: 836382 - RNA, 27 nt, Human
guuuaugugaggcaaaggcagggggcc

SEQ ID NO: 836383 - RNA, 22 nt, Human
uacaguuuaugugaggcaaagg

SEQ ID NO: 836384 - RNA, 21 nt, Human
uccaacaggugacuccgagca

SEQ ID NO: 836385 - RNA, 24 nt, Human
uccaggaagggaagaggcccaaga

SEQ ID NO: 836386 - RNA, 18 nt, Human
ucccacacaaggguccuu

SEQ ID NO: 836387 - RNA, 23 nt, Human
ucggcgacagcuggcggcgggcc

SEQ ID NO: 836388 - RNA, 23 nt, Human
ucggcgacagcuggcggcgggcc

SEQ ID NO: 836389 - RNA, 21 nt, Human
ugaaaauacuguacaguuuau

SEQ ID NO: 836390 - RNA, 24 nt, Human
ugaaagaggcuuuuaaugaaaaua

SEQ ID NO: 836391 - RNA, 18 nt, Human
ugaaggcuuggggagggc

SEQ ID NO: 836392 - RNA, 19 nt, Human
ugcagggguccagggaggu

SEQ ID NO: 836393 - RNA, 21 nt, Human
uggcggcgggccggccuaggg

SEQ ID NO: 836394 - RNA, 22 nt, Human
uuuuuuuuuuaugaaagaggcu

SEQ ID NO: 836395 - RNA, 29 nt, Human
uuuuuuuuuuuuuuuuuuuuuuaugaaaa

SEQ ID NO: 836396 - RNA, 21 nt, Human
aaacaaggacgcaacaacagc

SEQ ID NO: 836397 - RNA, 23 nt, Human
aaauagacacgaauuuuccccau

SEQ ID NO: 836398 - RNA, 20 nt, Human
aacccucgccuaggccagga

SEQ ID NO: 836399 - RNA, 22 nt, Human
aagcagggggcucgagucaggu

SEQ ID NO: 836400 - RNA, 20 nt, Human
aagcuccuuucugggcaccc

SEQ ID NO: 836401 - RNA, 18 nt, Human
acacacggcccgccuugc

SEQ ID NO: 836402 - RNA, 23 nt, Human
acacaggcccaagcaccgugcca

SEQ ID NO: 836403 - RNA, 20 nt, Human
acacgaauuuuccccaugau

SEQ ID NO: 836404 - RNA, 22 nt, Human
acagcccaggggcuguuugcca

SEQ ID NO: 836405 - RNA, 27 nt, Human
acagccuugccuuccuuccuuccucgg

SEQ ID NO: 836406 - RNA, 23 nt, Human
acaggcugagcugccgggagggu

SEQ ID NO: 836407 - RNA, 21 nt, Human
acagguggccgggggccccuu

SEQ ID NO: 836408 - RNA, 30 nt, Human
accagccuccaguucaccccagccccagcc

SEQ ID NO: 836409 - RNA, 21 nt, Human
acccggggacacaggcccaag

SEQ ID NO: 836410 - RNA, 21 nt, Human
accggcaagcgggcagugcca

SEQ ID NO: 836411 - RNA, 23 nt, Human
accuggaacccucgccuaggcca

SEQ ID NO: 836412 - RNA, 20 nt, Human
acgcagaggcucaggagccc

SEQ ID NO: 836413 - RNA, 21 nt, Human
acuggugugggcugggagggc

SEQ ID NO: 836414 - RNA, 20 nt, Human
agaccccuuguccacgccag

SEQ ID NO: 836415 - RNA, 19 nt, Human
agcagugggccuguggaga

SEQ ID NO: 836416 - RNA, 31 nt, Human
agcauguacaugagugggugugucuaggugg

SEQ ID NO: 836417 - RNA, 21 nt, Human
agccaggaagagaagccccuc

SEQ ID NO: 836418 - RNA, 19 nt, Human
agccuggggggacagacuc

SEQ ID NO: 836419 - RNA, 26 nt, Human
agcugggcaggccuggggcacccugg

SEQ ID NO: 836420 - RNA, 25 nt, Human
agcuuccagaauggcacagcagugg

SEQ ID NO: 836421 - RNA, 23 nt, Human
aggaaucugagaacagaccgugg

SEQ ID NO: 836422 - RNA, 18 nt, Human
aggcaaagccuugcugca

SEQ ID NO: 836423 - RNA, 24 nt, Human
aggcaguggggagggggucccagg

SEQ ID NO: 836424 - RNA, 21 nt, Human
aggccaaggagcagagggcac

SEQ ID NO: 836425 - RNA, 21 nt, Human
aggccuccucacaaccacccg

SEQ ID NO: 836426 - RNA, 21 nt, Human
aggcgggugcaagccuccugg

SEQ ID NO: 836427 - RNA, 18 nt, Human
agggcuccggauguggaa

SEQ ID NO: 836428 - RNA, 20 nt, Human
agggucaggguccucugugc

SEQ ID NO: 836429 - RNA, 19 nt, Human
aucugagaacagaccgugg

SEQ ID NO: 836430 - RNA, 24 nt, Human
caagcaccgugccacuaagauggg

SEQ ID NO: 836431 - RNA, 21 nt, Human
caagcgggcagugccaggcag

SEQ ID NO: 836432 - RNA, 20 nt, Human
cacagcacggcccacacggu

SEQ ID NO: 836433 - RNA, 22 nt, Human
caccaggcccucguguggcccc

SEQ ID NO: 836434 - RNA, 26 nt, Human
caccccucagcaaacaaggacgcaac

SEQ ID NO: 836435 - RNA, 21 nt, Human
cacccggggacacaggcccaa

SEQ ID NO: 836436 - RNA, 23 nt, Human
cacccugcuggccgagggucagg

SEQ ID NO: 836437 - RNA, 25 nt, Human
caccgugccacuaagauggggucug

SEQ ID NO: 836438 - RNA, 24 nt, Human
cacgaccaccucagggcccugcag

SEQ ID NO: 836439 - RNA, 21 nt, Human
cacgccaggagccuaugugga

SEQ ID NO: 836440 - RNA, 20 nt, Human
cacggcaggcacugcuaugg

SEQ ID NO: 836441 - RNA, 22 nt, Human
cacgggccggggcagacagagc

SEQ ID NO: 836442 - RNA, 20 nt, Human
cacuggggagggcaacacug

SEQ ID NO: 836443 - RNA, 19 nt, Human
cagaccgugggcggcuaug

SEQ ID NO: 836444 - RNA, 18 nt, Human
cagcacggcccacacggu

SEQ ID NO: 836445 - RNA, 21 nt, Human
cagcagagcucaugagaagcc

SEQ ID NO: 836446 - RNA, 21 nt, Human
cagcagugggccuguggagag

SEQ ID NO: 836447 - RNA, 22 nt, Human
cagccacuggggagggcaacac

SEQ ID NO: 836448 - RNA, 19 nt, Human
cagccccuccgugccaccc

SEQ ID NO: 836449 - RNA, 21 nt, Human
cagcccuagguucugacaccu

SEQ ID NO: 836450 - RNA, 19 nt, Human
cagccuccaguucacccca

SEQ ID NO: 836451 - RNA, 18 nt, Human
cagccuugccuuccuucc

SEQ ID NO: 836452 - RNA, 22 nt, Human
cagcuccaggcaccaugccccc

SEQ ID NO: 836453 - RNA, 19 nt, Human
cagcuggaaggggcaggca

SEQ ID NO: 836454 - RNA, 24 nt, Human
cagcuggagcuuccagaauggcac

SEQ ID NO: 836455 - RNA, 19 nt, Human
caggaaacagaggcggcac

SEQ ID NO: 836456 - RNA, 18 nt, Human
caggagccccgggcucug

SEQ ID NO: 836457 - RNA, 20 nt, Human
caggcaggacuacugggugg

SEQ ID NO: 836458 - RNA, 24 nt, Human
caggcaggacuacugggugggcgu

SEQ ID NO: 836459 - RNA, 21 nt, Human
cagggcagguucugugccaga

SEQ ID NO: 836460 - RNA, 18 nt, Human
caggguuccaccacccgg

SEQ ID NO: 836461 - RNA, 19 nt, Human
caggguuccaccacccggg

SEQ ID NO: 836462 - RNA, 19 nt, Human
caggugagaauccaucucu

SEQ ID NO: 836463 - RNA, 18 nt, Human
caugugaccucgggacgc

SEQ ID NO: 836464 - RNA, 22 nt, Human
ccaauaaggcuggggaacccaa

SEQ ID NO: 836465 - RNA, 22 nt, Human
ccacccgcaacgcguucggaug

SEQ ID NO: 836466 - RNA, 23 nt, Human
ccagcagcagcuggagcuuccag

SEQ ID NO: 836467 - RNA, 18 nt, Human
ccaggcccucguguggcc

SEQ ID NO: 836468 - RNA, 18 nt, Human
cccagcuggaaggggcag

SEQ ID NO: 836469 - RNA, 19 nt, Human
ccccagccaggaagagaag

SEQ ID NO: 836470 - RNA, 21 nt, Human
ccccaggugcucacccaguuc

SEQ ID NO: 836471 - RNA, 23 nt, Human
cccccuuccgccacagugggccc

SEQ ID NO: 836472 - RNA, 22 nt, Human
ccccucacacggcaccugccga

SEQ ID NO: 836473 - RNA, 24 nt, Human
ccccucuagcgcacgccccccuca

SEQ ID NO: 836474 - RNA, 23 nt, Human
cccgcaacgcguucggaugcccc

SEQ ID NO: 836475 - RNA, 19 nt, Human
cccgcgcccguccgccccg

SEQ ID NO: 836476 - RNA, 23 nt, Human
cccgcgcccguccgccccgggac

SEQ ID NO: 836477 - RNA, 18 nt, Human
cccugagccacgagggac

SEQ ID NO: 836478 - RNA, 20 nt, Human
cccuggaccccaguggggcc

SEQ ID NO: 836479 - RNA, 25 nt, Human
cccuggaccccaguggggccggagg

SEQ ID NO: 836480 - RNA, 18 nt, Human
ccgcccuucacagacccc

SEQ ID NO: 836481 - RNA, 18 nt, Human
ccuacagccugcagggca

SEQ ID NO: 836482 - RNA, 22 nt, Human
ccuaggccaggaagcagggggc

SEQ ID NO: 836483 - RNA, 21 nt, Human
ccuccaguucaccccagcccc

SEQ ID NO: 836484 - RNA, 19 nt, Human
ccucuagcgcacgcccccc

SEQ ID NO: 836485 - RNA, 18 nt, Human
ccugccccaggugcucac

SEQ ID NO: 836486 - RNA, 23 nt, Human
ccuggcugcaucgccuccaggaa

SEQ ID NO: 836487 - RNA, 23 nt, Human
ccuggugccaggccugcaccacc

SEQ ID NO: 836488 - RNA, 20 nt, Human
ccugugcagacaggcaggac

SEQ ID NO: 836489 - RNA, 22 nt, Human
ccuuccucgguccacuccuuuc

SEQ ID NO: 836490 - RNA, 21 nt, Human
ccuuccuuccuuccucggucc

SEQ ID NO: 836491 - RNA, 21 nt, Human
cgagagcacuggugugggcug

SEQ ID NO: 836492 - RNA, 21 nt, Human
cgaggacccagcggcugcaac

SEQ ID NO: 836493 - RNA, 24 nt, Human
cgccuaggccaggaagcagggggc

SEQ ID NO: 836494 - RNA, 23 nt, Human
cggaaccugcccuagugcccaac

SEQ ID NO: 836495 - RNA, 24 nt, Human
cggaugccccucagcuccaggcac

SEQ ID NO: 836496 - RNA, 20 nt, Human
cgggccggggcagacagagc

SEQ ID NO: 836497 - RNA, 21 nt, Human
cggggcagacagagcagggac

SEQ ID NO: 836498 - RNA, 26 nt, Human
cgucaggaaggaaaggcgggugcaag

SEQ ID NO: 836499 - RNA, 24 nt, Human
cuaggccaggaagcagggggcucg

SEQ ID NO: 836500 - RNA, 19 nt, Human
cuagugcccaacauggacc

SEQ ID NO: 836501 - RNA, 23 nt, Human
cucacaaccacccgcaacgcguu

SEQ ID NO: 836502 - RNA, 23 nt, Human
cucaugagaagcccuuuccuaag

SEQ ID NO: 836503 - RNA, 18 nt, Human
cuccugggauccaggguu

SEQ ID NO: 836504 - RNA, 24 nt, Human
cugaaaauagacacgaauuuuccc

SEQ ID NO: 836505 - RNA, 21 nt, Human
cugaaaccuggaacccucgcc

SEQ ID NO: 836506 - RNA, 24 nt, Human
cugaacagcaccccggguggcuga

SEQ ID NO: 836507 - RNA, 20 nt, Human
cugcagccuccagugauggc

SEQ ID NO: 836508 - RNA, 23 nt, Human
cugccgggaggggcugcccacag

SEQ ID NO: 836509 - RNA, 18 nt, Human
cugggcaccccuggaccc

SEQ ID NO: 836510 - RNA, 24 nt, Human
cuggucaccggguggauucugcug

SEQ ID NO: 836511 - RNA, 18 nt, Human
gaacagcaccccgggugg

SEQ ID NO: 836512 - RNA, 22 nt, Human
gaagcagggggcucgagucagg

SEQ ID NO: 836513 - RNA, 23 nt, Human
gaagcccuuuccuaagguggcuc

SEQ ID NO: 836514 - RNA, 19 nt, Human
gaagccuggggggacagac

SEQ ID NO: 836515 - RNA, 26 nt, Human
gagaugggaggacagcacuagcuggg

SEQ ID NO: 836516 - RNA, 19 nt, Human
gagcaagcaggccccugcc

SEQ ID NO: 836517 - RNA, 20 nt, Human
gagcugccgggagggugggc

SEQ ID NO: 836518 - RNA, 21 nt, Human
gaggcagggcacgggggagcc

SEQ ID NO: 836519 - RNA, 21 nt, Human
gaggggccaccacuggucacc

SEQ ID NO: 836520 - RNA, 21 nt, Human
gaggugccacgguguuugaaa

SEQ ID NO: 836521 - RNA, 22 nt, Human
gcaagcaggccccugccagcca

SEQ ID NO: 836522 - RNA, 20 nt, Human
gcacagcccaggggcuguuu

SEQ ID NO: 836523 - RNA, 20 nt, Human
gcacugcuaugggccagccc

SEQ ID NO: 836524 - RNA, 18 nt, Human
gcaggccuggggcacccu

SEQ ID NO: 836525 - RNA, 18 nt, Human
gcagggaggggcagcuga

SEQ ID NO: 836526 - RNA, 21 nt, Human
gcagugggccuguggagaggc

SEQ ID NO: 836527 - RNA, 22 nt, Human
gcauguacaugagugggugugu

SEQ ID NO: 836528 - RNA, 18 nt, Human
gccaggaagagaagcccc

SEQ ID NO: 836529 - RNA, 19 nt, Human
gccucuuggucccugcagc

SEQ ID NO: 836530 - RNA, 20 nt, Human
gccuugcugcagccucuccc

SEQ ID NO: 836531 - RNA, 24 nt, Human
gcgucaacugaaggagaacuggag

SEQ ID NO: 836532 - RNA, 21 nt, Human
gcguggcuggcgggcaggcag

SEQ ID NO: 836533 - RNA, 18 nt, Human
gcucccaccccucagcaa

SEQ ID NO: 836534 - RNA, 19 nt, Human
gcugcagccucucccacuc

SEQ ID NO: 836535 - RNA, 21 nt, Human
ggaaaauagaauacaaaaauc

SEQ ID NO: 836536 - RNA, 23 nt, Human
ggacaugcuggugggaagggcaa

SEQ ID NO: 836537 - RNA, 21 nt, Human
ggcacugcuaugggccagccc

SEQ ID NO: 836538 - RNA, 18 nt, Human
ggcaggcccugaccggca

SEQ ID NO: 836539 - RNA, 18 nt, Human
ggcugacacgcguggcug

SEQ ID NO: 836540 - RNA, 20 nt, Human
gggaaggaccuuaaccaccc

SEQ ID NO: 836541 - RNA, 23 nt, Human
gggaagggcaaggccugacacaa

SEQ ID NO: 836542 - RNA, 21 nt, Human
gggaauuggcuacagauguac

SEQ ID NO: 836543 - RNA, 22 nt, Human
gggaccaggucacagccccucc

SEQ ID NO: 836544 - RNA, 20 nt, Human
gggcaaccccucacccaccc

SEQ ID NO: 836545 - RNA, 25 nt, Human
gggcaaccccucacccaccugcuga

SEQ ID NO: 836546 - RNA, 18 nt, Human
gggcagggagcuggugcu

SEQ ID NO: 836547 - RNA, 18 nt, Human
gggccagccccaaggaca

SEQ ID NO: 836548 - RNA, 24 nt, Human
gggccggggcagacagagcaggga

SEQ ID NO: 836549 - RNA, 19 nt, Human
gggcgugggugagcaggag

SEQ ID NO: 836550 - RNA, 20 nt, Human
gugcgugcgcgugugcgucu

SEQ ID NO: 836551 - RNA, 19 nt, Human
uaagcccccgaggacccag

SEQ ID NO: 836552 - RNA, 19 nt, Human
uacaaugacauaaggacac

SEQ ID NO: 836553 - RNA, 23 nt, Human
uagagggggauccaggcacagcc

SEQ ID NO: 836554 - RNA, 21 nt, Human
uagcacgggcccccacccagu

SEQ ID NO: 836555 - RNA, 25 nt, Human
uauguggacugacagguagguggac

SEQ ID NO: 836556 - RNA, 22 nt, Human
ucaagaauugagggcagggaca

SEQ ID NO: 836557 - RNA, 20 nt, Human
uccaggagcccuaaccgggc

SEQ ID NO: 836558 - RNA, 21 nt, Human
ucccugacagagggaggcagg

SEQ ID NO: 836559 - RNA, 20 nt, Human
ucccugagacgcuggguggc

SEQ ID NO: 836560 - RNA, 20 nt, Human
uccgugccacccacaggggc

SEQ ID NO: 836561 - RNA, 24 nt, Human
uccucgguccacuccuuucuccug

SEQ ID NO: 836562 - RNA, 21 nt, Human
ucuccugggauccaggguugg

SEQ ID NO: 836563 - RNA, 23 nt, Human
ucuccugggauccaggguugggg

SEQ ID NO: 836564 - RNA, 20 nt, Human
ucugacaguccuaccagagc

SEQ ID NO: 836565 - RNA, 23 nt, Human
ucugggcaccccuggaccccagu

SEQ ID NO: 836566 - RNA, 25 nt, Human
ucugugccagaguuguuuccaggga

SEQ ID NO: 836567 - RNA, 18 nt, Human
ugacagagggaggcaggg

SEQ ID NO: 836568 - RNA, 23 nt, Human
ugacagggagcagugggagguug

SEQ ID NO: 836569 - RNA, 26 nt, Human
ugaccagggcuccggauguggaagcu

SEQ ID NO: 836570 - RNA, 18 nt, Human
ugaccucgggacgcccag

SEQ ID NO: 836571 - RNA, 23 nt, Human
ugaccucgggacgcccaggugug

SEQ ID NO: 836572 - RNA, 22 nt, Human
ugacuccuagcacgggcccccu

SEQ ID NO: 836573 - RNA, 18 nt, Human
ugaggggccaccacuggu

SEQ ID NO: 836574 - RNA, 19 nt, Human
ugauuaggaaucugagaac

SEQ ID NO: 836575 - RNA, 18 nt, Human
ugcaagccuccuggugcc

SEQ ID NO: 836576 - RNA, 26 nt, Human
ugcagacaggcaggacuacugggugg

SEQ ID NO: 836577 - RNA, 18 nt, Human
ugcagggcagguucugug

SEQ ID NO: 836578 - RNA, 23 nt, Human
ugcagugcuggcuggggaagcaa

SEQ ID NO: 836579 - RNA, 21 nt, Human
ugcaucgccuccaggaagccc

SEQ ID NO: 836580 - RNA, 21 nt, Human
ugcaugugugagcauguacau

SEQ ID NO: 836581 - RNA, 18 nt, Human
ugccacgguguuugaaau

SEQ ID NO: 836582 - RNA, 26 nt, Human
ugcccagcucggcgugggcuggggcc

SEQ ID NO: 836583 - RNA, 24 nt, Human
ugcugcagccucucccacucugcg

SEQ ID NO: 836584 - RNA, 23 nt, Human
ugcuuuuuguuuaaaaaagggag

SEQ ID NO: 836585 - RNA, 20 nt, Human
uggaaggggcaggcagcucg

SEQ ID NO: 836586 - RNA, 20 nt, Human
uggagcuuccagaauggcac

SEQ ID NO: 836587 - RNA, 19 nt, Human
uggaggguggggcagggag

SEQ ID NO: 836588 - RNA, 20 nt, Human
uggcagggaggggcagcuga

SEQ ID NO: 836589 - RNA, 24 nt, Human
uggcagggaggggcagcugaacag

SEQ ID NO: 836590 - RNA, 23 nt, Human
uggccgagagcacuggugugggc

SEQ ID NO: 836591 - RNA, 23 nt, Human
uggccucuuggucccugcagccu

SEQ ID NO: 836592 - RNA, 22 nt, Human
uggccugccuggccccgagagc

SEQ ID NO: 836593 - RNA, 19 nt, Human
uggcuacagauguaccaga

SEQ ID NO: 836594 - RNA, 19 nt, Human
uggcuccaggagcccuaac

SEQ ID NO: 836595 - RNA, 22 nt, Human
uggcuccaggagcccuaaccgg

SEQ ID NO: 836596 - RNA, 25 nt, Human
uggcuccaggagcccuaaccgggcu

SEQ ID NO: 836597 - RNA, 22 nt, Human
ugggaaccacggccucaagagc

SEQ ID NO: 836598 - RNA, 19 nt, Human
ugggagggcacacgcagag

SEQ ID NO: 836599 - RNA, 21 nt, Human
ugggcaaccccucacccaccu

SEQ ID NO: 836600 - RNA, 21 nt, Human
ugggcgugggugagcaggagc

SEQ ID NO: 836601 - RNA, 18 nt, Human
ugggcuggccugccuggc

SEQ ID NO: 836602 - RNA, 23 nt, Human
uggggcacccugagccacgaggg

SEQ ID NO: 836603 - RNA, 18 nt, Human
uggguggcucccaccccu

SEQ ID NO: 836604 - RNA, 20 nt, Human
ugggugugucuaggugcgug

SEQ ID NO: 836605 - RNA, 23 nt, Human
uguccacgccaggagccuaugug

SEQ ID NO: 836606 - RNA, 23 nt, Human
uucccgcccuucacagaccccuu

SEQ ID NO: 836607 - RNA, 21 nt, Human
uugcugcagccucucccacuc

SEQ ID NO: 836608 - RNA, 18 nt, Human
uuuuacuuuuuugcuuuu

SEQ ID NO: 836609 - RNA, 22 nt, Human
aacagagggaugacuuugagua

SEQ ID NO: 836610 - RNA, 24 nt, Human
acaguggccuucuuuugaguuucu

SEQ ID NO: 836611 - RNA, 20 nt, Human
agcuucuccaaagaggcaau

SEQ ID NO: 836612 - RNA, 18 nt, Human
caguggccuucuuuugag

SEQ ID NO: 836613 - RNA, 21 nt, Human
caguggccuucuuuugaguuu

SEQ ID NO: 836614 - RNA, 23 nt, Human
caguggccuucuuuugaguuucu

SEQ ID NO: 836615 - RNA, 18 nt, Human
ccaaagaggcaaucagaa

SEQ ID NO: 836616 - RNA, 21 nt, Human
ccaaagaggcaaucagaaaag

SEQ ID NO: 836617 - RNA, 22 nt, Human
ggggcccaggguggucagggca

SEQ ID NO: 836618 - RNA, 19 nt, Human
gugagacaaacaguggccu

SEQ ID NO: 836619 - RNA, 24 nt, Human
gugagacaaacaguggccuucuuu

SEQ ID NO: 836620 - RNA, 23 nt, Human
uaggugagacaaacaguggccuu

SEQ ID NO: 836621 - RNA, 20 nt, Human
ucagggaggggcuucagguu

SEQ ID NO: 836622 - RNA, 19 nt, Human
ucucugugaacagagggau

SEQ ID NO: 836623 - RNA, 20 nt, Human
ugacuuugaguagaauggga

SEQ ID NO: 836624 - RNA, 20 nt, Human
ugagacaaacaguggccuuc

SEQ ID NO: 836625 - RNA, 22 nt, Human
ugagcuucuccaaagaggcaau

SEQ ID NO: 836626 - RNA, 18 nt, Human
uggucagggcacagcuug

SEQ ID NO: 836627 - RNA, 22 nt, Human
ugguuccguccagaaagguggg

SEQ ID NO: 836628 - RNA, 23 nt, Human
ugguuccguccagaaaggugggg

SEQ ID NO: 836629 - RNA, 21 nt, Human
uugcccugaccaguucucaac

SEQ ID NO: 836630 - RNA, 20 nt, Human
uuggucuuacgcauuuuuag

SEQ ID NO: 836631 - RNA, 21 nt, Human
uuggucuuacgcauuuuuagg

SEQ ID NO: 836632 - RNA, 21 nt, Human
aaaaaugaagucuucucuguu

SEQ ID NO: 836633 - RNA, 19 nt, Human
aaaacaccucuguccaucu

SEQ ID NO: 836634 - RNA, 24 nt, Human
aaaacaccucuguccaucugauua

SEQ ID NO: 836635 - RNA, 18 nt, Human
aaacccccacucccaccc

SEQ ID NO: 836636 - RNA, 18 nt, Human
aaacccccacucccaccc

SEQ ID NO: 836637 - RNA, 19 nt, Human
aacaucgguccccccaacc

SEQ ID NO: 836638 - RNA, 19 nt, Human
aacaucgguccccccaacc

SEQ ID NO: 836639 - RNA, 21 nt, Human
aaccuuuuuccccuuacacac

SEQ ID NO: 836640 - RNA, 21 nt, Human
aaccuuuuuccccuuacacac

SEQ ID NO: 836641 - RNA, 21 nt, Human
aaggaacagacuucucggugc

SEQ ID NO: 836642 - RNA, 23 nt, Human
aaggaacagacuucucggugcuu

SEQ ID NO: 836643 - RNA, 23 nt, Human
aaggaacagacuucucggugcuu

SEQ ID NO: 836644 - RNA, 21 nt, Human
aaggcgcuguccagaucauuc

SEQ ID NO: 836645 - RNA, 22 nt, Human
acagaagcugcccagaucuucu

SEQ ID NO: 836646 - RNA, 22 nt, Human
acagaagcugcccagaucuucu

SEQ ID NO: 836647 - RNA, 22 nt, Human
accacuuaagagacuuguuuaa

SEQ ID NO: 836648 - RNA, 26 nt, Human
acccccacucccacccuauuccccac

SEQ ID NO: 836649 - RNA, 26 nt, Human
acccccacucccacccuauuccccac

SEQ ID NO: 836650 - RNA, 19 nt, Human
acccgucucccaaaccccc

SEQ ID NO: 836651 - RNA, 20 nt, Human
acugcagauucauucacacu

SEQ ID NO: 836652 - RNA, 21 nt, Human
acuuguuuaaaccuuuuuccc

SEQ ID NO: 836653 - RNA, 21 nt, Human
acuuguuuaaaccuuuuuccc

SEQ ID NO: 836654 - RNA, 23 nt, Human
agaaggugagcaacuuguaaaga

SEQ ID NO: 836655 - RNA, 20 nt, Human
agagagcaaggcaaaaagcu

SEQ ID NO: 836656 - RNA, 20 nt, Human
aggaacagaagcugcccaga

SEQ ID NO: 836657 - RNA, 20 nt, Human
aggaacagaagcugcccaga

SEQ ID NO: 836658 - RNA, 26 nt, Human
aggacagagagcaaggcaaaaagcuu

SEQ ID NO: 836659 - RNA, 20 nt, Human
aggggagcugaaugagccag

SEQ ID NO: 836660 - RNA, 21 nt, Human
caacggggcccucacuaagcu

SEQ ID NO: 836661 - RNA, 20 nt, Human
cacacuggccaaaguagggu

SEQ ID NO: 836662 - RNA, 23 nt, Human
caccacuuaagagacuuguuuaa

SEQ ID NO: 836663 - RNA, 21 nt, Human
cacccgucucccaaaccccca

SEQ ID NO: 836664 - RNA, 25 nt, Human
cacccuuucccacccgucucccaaa

SEQ ID NO: 836665 - RNA, 25 nt, Human
cacccuuucccacccgucucccaaa

SEQ ID NO: 836666 - RNA, 19 nt, Human
caccggcaccaaggcgcug

SEQ ID NO: 836667 - RNA, 19 nt, Human
caggaacagaagcugccca

SEQ ID NO: 836668 - RNA, 19 nt, Human
caggaacagaagcugccca

SEQ ID NO: 836669 - RNA, 19 nt, Human
caggggagcugaaugagcc

SEQ ID NO: 836670 - RNA, 18 nt, Human
cagugauccucuuccucu

SEQ ID NO: 836671 - RNA, 26 nt, Human
cauuccaucuuccuucagaaguuuca

SEQ ID NO: 836672 - RNA, 19 nt, Human
ccauuugcuuuauauucug

SEQ ID NO: 836673 - RNA, 18 nt, Human
cccaaacccccacuccca

SEQ ID NO: 836674 - RNA, 18 nt, Human
cccaaacccccacuccca

SEQ ID NO: 836675 - RNA, 27 nt, Human
cccaaacccccacucccacccuauucc

SEQ ID NO: 836676 - RNA, 22 nt, Human
cccacucccacccuauucccca

SEQ ID NO: 836677 - RNA, 22 nt, Human
cccacucccacccuauucccca

SEQ ID NO: 836678 - RNA, 18 nt, Human
ccccaaccacccuuuccc

SEQ ID NO: 836679 - RNA, 18 nt, Human
ccccaaccacccuuuccc

SEQ ID NO: 836680 - RNA, 22 nt, Human
ccccaaccacccuuucccaccc

SEQ ID NO: 836681 - RNA, 22 nt, Human
ccccaaccacccuuucccaccc

SEQ ID NO: 836682 - RNA, 24 nt, Human
ccccaaccacccuuucccacccgu

SEQ ID NO: 836683 - RNA, 25 nt, Human
cccccaaccacccuuucccacccgu

SEQ ID NO: 836684 - RNA, 25 nt, Human
cccccaaccacccuuucccacccgu

SEQ ID NO: 836685 - RNA, 21 nt, Human
cccccacucccacccuauucc

SEQ ID NO: 836686 - RNA, 21 nt, Human
cccccacucccacccuauucc

SEQ ID NO: 836687 - RNA, 28 nt, Human
cccccacucccacccuauuccccacccc

SEQ ID NO: 836688 - RNA, 28 nt, Human
cccccacucccacccuauuccccacccc

SEQ ID NO: 836689 - RNA, 26 nt, Human
ccccccaaccacccuuucccacccgu

SEQ ID NO: 836690 - RNA, 23 nt, Human
cccucccaucccacccuugguga

SEQ ID NO: 836691 - RNA, 24 nt, Human
ccucacuaagcuggcaggccccuc

SEQ ID NO: 836692 - RNA, 18 nt, Human
ccugcugauucaguaugc

SEQ ID NO: 836693 - RNA, 18 nt, Human
ccugcugauucaguaugc

SEQ ID NO: 836694 - RNA, 19 nt, Human
cggcaccaaggcgcugucc

SEQ ID NO: 836695 - RNA, 21 nt, Human
cucccaaacccccacucccac

SEQ ID NO: 836696 - RNA, 21 nt, Human
cucccaaacccccacucccac

SEQ ID NO: 836697 - RNA, 19 nt, Human
gaaacuguuucaucuucgu

SEQ ID NO: 836698 - RNA, 22 nt, Human
gcaacaagucugaacagaaaaa

SEQ ID NO: 836699 - RNA, 22 nt, Human
gcaaggcaaaaagcuuuggcaa

SEQ ID NO: 836700 - RNA, 22 nt, Human
gcagauucauucacacuggcca

SEQ ID NO: 836701 - RNA, 22 nt, Human
gcaggaacagaagcugcccaga

SEQ ID NO: 836702 - RNA, 19 nt, Human
gggaaaaaagucuucucau

SEQ ID NO: 836703 - RNA, 24 nt, Human
gggcuggccauugcucccugcuug

SEQ ID NO: 836704 - RNA, 22 nt, Human
guacugcgagggaaggggcugg

SEQ ID NO: 836705 - RNA, 19 nt, Human
uaacagaaggggauuagcu

SEQ ID NO: 836706 - RNA, 19 nt, Human
uaacagaaggggauuagcu

SEQ ID NO: 836707 - RNA, 18 nt, Human
uagaaacugcagauucau

SEQ ID NO: 836708 - RNA, 26 nt, Human
uauuuuauuuccccucugcccuccca

SEQ ID NO: 836709 - RNA, 25 nt, Human
ucaauaacuaugaaaucaaccuguu

SEQ ID NO: 836710 - RNA, 18 nt, Human
ucaggugaggacagagag

SEQ ID NO: 836711 - RNA, 19 nt, Human
uccagaauauaaaagauga

SEQ ID NO: 836712 - RNA, 23 nt, Human
ucccaaacccccacucccacccu

SEQ ID NO: 836713 - RNA, 23 nt, Human
ucccaaacccccacucccacccu

SEQ ID NO: 836714 - RNA, 28 nt, Human
ucccaaacccccacucccacccuauucc

SEQ ID NO: 836715 - RNA, 22 nt, Human
ucccacccuauuccccacccca

SEQ ID NO: 836716 - RNA, 22 nt, Human
ucccacccuauuccccacccca

SEQ ID NO: 836717 - RNA, 20 nt, Human
ucccagguuguaagcuucug

SEQ ID NO: 836718 - RNA, 25 nt, Human
uccccccaaccacccuuucccaccc

SEQ ID NO: 836719 - RNA, 25 nt, Human
uccccccaaccacccuuucccaccc

SEQ ID NO: 836720 - RNA, 18 nt, Human
ucccuuguuuugucucaa

SEQ ID NO: 836721 - RNA, 20 nt, Human
ucucccaaacccccacuccc

SEQ ID NO: 836722 - RNA, 20 nt, Human
ucucccaaacccccacuccc

SEQ ID NO: 836723 - RNA, 21 nt, Human
ucugcccucccaucccacccu

SEQ ID NO: 836724 - RNA, 26 nt, Human
ucuguggucaggggagcugaaugagc

SEQ ID NO: 836725 - RNA, 19 nt, Human
ucuuccucuguggucaggg

SEQ ID NO: 836726 - RNA, 23 nt, Human
ugagaagggggaucuagaaucuu

SEQ ID NO: 836727 - RNA, 24 nt, Human
ugagaagggggaucuagaaucuua

SEQ ID NO: 836728 - RNA, 23 nt, Human
ugcaacaagucugaacagaaaaa

SEQ ID NO: 836729 - RNA, 23 nt, Human
ugcaggaacagaagcugcccaga

SEQ ID NO: 836730 - RNA, 21 nt, Human
ugcuaagauacuuucaaaaca

SEQ ID NO: 836731 - RNA, 20 nt, Human
uggucauuccaucuuccuuc

SEQ ID NO: 836732 - RNA, 19 nt, Human
ugucuaaacaguaacagaa

SEQ ID NO: 836733 - RNA, 19 nt, Human
ugucuaaacaguaacagaa

SEQ ID NO: 836734 - RNA, 21 nt, Human
ugugcaggaacagaagcugcc

SEQ ID NO: 836735 - RNA, 23 nt, Human
uguugcaacaagucugaacagaa

SEQ ID NO: 836736 - RNA, 23 nt, Human
uguugcaacaagucugaacagaa

SEQ ID NO: 836737 - RNA, 20 nt, Human
uuagcacagugauccucuuc

SEQ ID NO: 836738 - RNA, 20 nt, Human
uuagcacagugauccucuuc

SEQ ID NO: 836739 - RNA, 21 nt, Human
uuccauuugcuuuauauucug

SEQ ID NO: 836740 - RNA, 20 nt, Human
uucccacccgucucccaaac

SEQ ID NO: 836741 - RNA, 21 nt, Human
uucccacccgucucccaaacc

SEQ ID NO: 836742 - RNA, 18 nt, Human
uuccuucagaaguuucag

SEQ ID NO: 836743 - RNA, 23 nt, Human
uuuuuuuuuuuuuuugaugcuuu

SEQ ID NO: 836744 - RNA, 18 nt, Human
uuuuuuuuuuuuuuuuug

SEQ ID NO: 836745 - RNA, 25 nt, Human
aaacaauauagaaauauacaaagca

SEQ ID NO: 836746 - RNA, 22 nt, Human
aaagauauauauggauuccccc

SEQ ID NO: 836747 - RNA, 20 nt, Human
aagaaauaugaugacaaaac

SEQ ID NO: 836748 - RNA, 22 nt, Human
acaaagacaauacauggaaaaa

SEQ ID NO: 836749 - RNA, 19 nt, Human
acaaagcagaaaauuaaag

SEQ ID NO: 836750 - RNA, 21 nt, Human
acaaagcagaaaauuaaaggc

SEQ ID NO: 836751 - RNA, 21 nt, Human
agccgcucgcagcggccuugg

SEQ ID NO: 836752 - RNA, 23 nt, Human
auauacccaccugcagacagaau

SEQ ID NO: 836753 - RNA, 21 nt, Human
caaaacacccauauuuaaaga

SEQ ID NO: 836754 - RNA, 20 nt, Human
caaagcagaaaauuaaaggc

SEQ ID NO: 836755 - RNA, 24 nt, Human
caagaaauaugaugacaaaacacc

SEQ ID NO: 836756 - RNA, 23 nt, Human
caccugcagacagaaugggaaga

SEQ ID NO: 836757 - RNA, 31 nt, Human
cagauaauagcagccacggugcuucuuccuu

SEQ ID NO: 836758 - RNA, 23 nt, Human
cagcggccuuggcaucacgaguc

SEQ ID NO: 836759 - RNA, 24 nt, Human
cauauacccaccugcagacagaau

SEQ ID NO: 836760 - RNA, 23 nt, Human
ccaccugcagacagaaugggaag

SEQ ID NO: 836761 - RNA, 21 nt, Human
ccgcucgcagcggccuuggca

SEQ ID NO: 836762 - RNA, 21 nt, Human
ccucauguaaacaaaucaggc

SEQ ID NO: 836763 - RNA, 20 nt, Human
ccuguguuugauuuuaagcc

SEQ ID NO: 836764 - RNA, 19 nt, Human
cuaggaaaaaacguaauca

SEQ ID NO: 836765 - RNA, 23 nt, Human
cucagcuggggcucaaccccgac

SEQ ID NO: 836766 - RNA, 19 nt, Human
cuguguuugauuuuaagcc

SEQ ID NO: 836767 - RNA, 25 nt, Human
gagcagauaauagcagccacggugc

SEQ ID NO: 836768 - RNA, 21 nt, Human
gagcccucggcucagcugggg

SEQ ID NO: 836769 - RNA, 18 nt, Human
gcuauggguagggcagac

SEQ ID NO: 836770 - RNA, 21 nt, Human
ggaauauugaggaagguagga

SEQ ID NO: 836771 - RNA, 21 nt, Human
ggguugggccugggagaccag

SEQ ID NO: 836772 - RNA, 26 nt, Human
gguugggccugggagaccagaagagu

SEQ ID NO: 836773 - RNA, 23 nt, Human
guaaacaaaucaggcaugaauaa

SEQ ID NO: 836774 - RNA, 18 nt, Human
guccugggaggggucagg

SEQ ID NO: 836775 - RNA, 22 nt, Human
uaaauacaaagacaauacaugg

SEQ ID NO: 836776 - RNA, 23 nt, Human
uacauggaaaaaaaauagacaau

SEQ ID NO: 836777 - RNA, 19 nt, Human
uacccaccugcagacagaa

SEQ ID NO: 836778 - RNA, 19 nt, Human
uacugugcuggggcaagau

SEQ ID NO: 836779 - RNA, 23 nt, Human
uaggaaaaaacguaaucauagca

SEQ ID NO: 836780 - RNA, 22 nt, Human
ucagaaguccucauguaaacaa

SEQ ID NO: 836781 - RNA, 23 nt, Human
ucccauuaccauauacccaccug

SEQ ID NO: 836782 - RNA, 24 nt, Human
uccucauguaaacaaaucaggcau

SEQ ID NO: 836783 - RNA, 23 nt, Human
ucuuacaaaguuaaacaauauag

SEQ ID NO: 836784 - RNA, 21 nt, Human
uuaaaggcucucuaaucccau

SEQ ID NO: 836785 - RNA, 23 nt, Human
uuaaaggcucucuaaucccauua

SEQ ID NO: 836786 - RNA, 18 nt, Human
uugaggaagguaggagaa

SEQ ID NO: 836787 - RNA, 23 nt, Human
uuuauagguauuuacaauuuauc

SEQ ID NO: 836788 - RNA, 18 nt, Human
uuucaaauaucuuuuuaa

SEQ ID NO: 836789 - RNA, 24 nt, Human
aagcaggaaguaaggcgcacacag

SEQ ID NO: 836790 - RNA, 20 nt, Human
aagccagcccccgacggugg

SEQ ID NO: 836791 - RNA, 24 nt, Human
aagugucccuccggugccgcugcc

SEQ ID NO: 836792 - RNA, 18 nt, Human
aaguugaaaguacuuuuc

SEQ ID NO: 836793 - RNA, 19 nt, Human
acguacgaacacagucccg

SEQ ID NO: 836794 - RNA, 24 nt, Human
acuaacuacaaaccucuuacgaua

SEQ ID NO: 836795 - RNA, 18 nt, Human
agaaggaaagaaacugaa

SEQ ID NO: 836796 - RNA, 18 nt, Human
aggcguuuuggcagcagc

SEQ ID NO: 836797 - RNA, 20 nt, Human
caacaggaaguggugaagga

SEQ ID NO: 836798 - RNA, 27 nt, Human
cacagaggguguguauacgaaacgacc

SEQ ID NO: 836799 - RNA, 22 nt, Human
cacagucccgcggacacgaccc

SEQ ID NO: 836800 - RNA, 19 nt, Human
cauccggcaaggccucugc

SEQ ID NO: 836801 - RNA, 24 nt, Human
ccagggccaacaggaaguggugaa

SEQ ID NO: 836802 - RNA, 20 nt, Human
cccuccggugccgcugccac

SEQ ID NO: 836803 - RNA, 19 nt, Human
ccgcugccaccuucccggc

SEQ ID NO: 836804 - RNA, 19 nt, Human
ccggccagccagggccaac

SEQ ID NO: 836805 - RNA, 23 nt, Human
ccuucccggccagccagggcccc

SEQ ID NO: 836806 - RNA, 18 nt, Human
cgacccgcgagcaggcgg

SEQ ID NO: 836807 - RNA, 21 nt, Human
cguucacagaaggaaagaaac

SEQ ID NO: 836808 - RNA, 22 nt, Human
gaaaacacagggaaaucacgga

SEQ ID NO: 836809 - RNA, 23 nt, Human
ggcgcacacagaggguguguaua

SEQ ID NO: 836810 - RNA, 19 nt, Human
uacaaaauccuaccaaucc

SEQ ID NO: 836811 - RNA, 22 nt, Human
uacgaaacgacgcagacuccga

SEQ ID NO: 836812 - RNA, 23 nt, Human
ucaacaucaacaugcaaaaauaa

SEQ ID NO: 836813 - RNA, 19 nt, Human
ucaacaugcaaaaauaagc

SEQ ID NO: 836814 - RNA, 26 nt, Human
ucaacaugcaaaaauaagcacuaacu

SEQ ID NO: 836815 - RNA, 19 nt, Human
ucccuccggugccgcugcc

SEQ ID NO: 836816 - RNA, 23 nt, Human
ucgaaugaagccauaaguguccc

SEQ ID NO: 836817 - RNA, 21 nt, Human
ugaaaacacagggaaaucacg

SEQ ID NO: 836818 - RNA, 22 nt, Human
ugguucauuuguuuugaaaagu

SEQ ID NO: 836819 - RNA, 18 nt, Human
uuaaagaagaguuuccuc

SEQ ID NO: 836820 - RNA, 24 nt, Human
aaaaaaaaaaguaauaauaaagaa

SEQ ID NO: 836821 - RNA, 25 nt, Human
aaaaaaaaguaauaauaaagaaaaa

SEQ ID NO: 836822 - RNA, 19 nt, Human
aaaagcagggaaagaaacg

SEQ ID NO: 836823 - RNA, 24 nt, Human
aaacaagaaaaugguacaaaauag

SEQ ID NO: 836824 - RNA, 22 nt, Human
aaacucaaaaaugcauccggcc

SEQ ID NO: 836825 - RNA, 25 nt, Human
aaccaaaaaacagaaaccagucuga

SEQ ID NO: 836826 - RNA, 22 nt, Human
aacuacuauacaacugaagaau

SEQ ID NO: 836827 - RNA, 22 nt, Human
aagcaaaauaggaaaccauuuu

SEQ ID NO: 836828 - RNA, 18 nt, Human
aagguccccugcccgccc

SEQ ID NO: 836829 - RNA, 22 nt, Human
aaguugcaaaauuacuugccaa

SEQ ID NO: 836830 - RNA, 18 nt, Human
aauaaacccaaacaaaga

SEQ ID NO: 836831 - RNA, 23 nt, Human
accaaaaaacagaaaccagucug

SEQ ID NO: 836832 - RNA, 19 nt, Human
accguaauaauaaacccaa

SEQ ID NO: 836833 - RNA, 18 nt, Human
acuauacaacugaagaau

SEQ ID NO: 836834 - RNA, 24 nt, Human
acuuuuucuuuuuuuuuuucuuuu

SEQ ID NO: 836835 - RNA, 26 nt, Human
agaaaaaaaaaaguaauaauaaagaa

SEQ ID NO: 836836 - RNA, 23 nt, Human
agaaagccaggagucuccagaug

SEQ ID NO: 836837 - RNA, 22 nt, Human
agacaaggcuguaguccagaac

SEQ ID NO: 836838 - RNA, 21 nt, Human
agagaggaaaaagaggaccga

SEQ ID NO: 836839 - RNA, 22 nt, Human
agcaggcaauaaaacugaugag

SEQ ID NO: 836840 - RNA, 21 nt, Human
agccgccggaguuuccaaacu

SEQ ID NO: 836841 - RNA, 18 nt, Human
aggaaaaagaggaccgaa

SEQ ID NO: 836842 - RNA, 18 nt, Human
aggaaagaaaacaugcaa

SEQ ID NO: 836843 - RNA, 19 nt, Human
aggacaaauauccacaaua

SEQ ID NO: 836844 - RNA, 18 nt, Human
aggcccagaggguucaga

SEQ ID NO: 836845 - RNA, 20 nt, Human
augcaggacaaauauccaca

SEQ ID NO: 836846 - RNA, 21 nt, Human
caaaaauaccguaauaauaaa

SEQ ID NO: 836847 - RNA, 21 nt, Human
caaaagcagggaaagaaacgc

SEQ ID NO: 836848 - RNA, 24 nt, Human
caaacaaaaauaccguaaucaacg

SEQ ID NO: 836849 - RNA, 18 nt, Human
caaagcagcugucccggc

SEQ ID NO: 836850 - RNA, 24 nt, Human
caaaguucagaaagccaggagucu

SEQ ID NO: 836851 - RNA, 21 nt, Human
caagccuacagcugggacuga

SEQ ID NO: 836852 - RNA, 22 nt, Human
caagguugaaaacuaaagcgag

SEQ ID NO: 836853 - RNA, 27 nt, Human
caccaagaacucuuccuacuaucucaa

SEQ ID NO: 836854 - RNA, 21 nt, Human
caccaugcgguucauacaauc

SEQ ID NO: 836855 - RNA, 20 nt, Human
cacccgcccgucgcccgcgg

SEQ ID NO: 836856 - RNA, 30 nt, Human
cagaaaaaaaaaaguaauaauaaagaaaaa

SEQ ID NO: 836857 - RNA, 21 nt, Human
cagcaaagcagcugucccggc

SEQ ID NO: 836858 - RNA, 22 nt, Human
cagccgccgcugccgcccggga

SEQ ID NO: 836859 - RNA, 24 nt, Human
caggcaauaaaacugaugagccuc

SEQ ID NO: 836860 - RNA, 24 nt, Human
caugcuaaaguuaaacaagaaaau

SEQ ID NO: 836861 - RNA, 20 nt, Human
ccaaaaaacagaaaccaguc

SEQ ID NO: 836862 - RNA, 20 nt, Human
ccagagucccucuccuuucc

SEQ ID NO: 836863 - RNA, 22 nt, Human
ccagcagcgccagcaauuucaa

SEQ ID NO: 836864 - RNA, 18 nt, Human
cccauaucuucccuauaa

SEQ ID NO: 836865 - RNA, 28 nt, Human
ccccgagcgucccuaacugagggccugu

SEQ ID NO: 836866 - RNA, 18 nt, Human
ccccgcacgcagccgccg

SEQ ID NO: 836867 - RNA, 24 nt, Human
ccccugcccgcccgcgcacccgcc

SEQ ID NO: 836868 - RNA, 26 nt, Human
cccgcacgcagccgccggaguuucca

SEQ ID NO: 836869 - RNA, 22 nt, Human
cccgcgcacccgcccgucgccc

SEQ ID NO: 836870 - RNA, 23 nt, Human
cccgcgcacccgcccgucgcccg

SEQ ID NO: 836871 - RNA, 25 nt, Human
cccgcgcacccgcccgucgcccgcg

SEQ ID NO: 836872 - RNA, 19 nt, Human
cccuuguacugggaccucc

SEQ ID NO: 836873 - RNA, 27 nt, Human
ccgggacgccagagucccucuccuuuc

SEQ ID NO: 836874 - RNA, 25 nt, Human
ccuacaauuagcgcaggccgggguc

SEQ ID NO: 836875 - RNA, 19 nt, Human
ccuacagcugggacugaaa

SEQ ID NO: 836876 - RNA, 18 nt, Human
ccucguugcucucuuccu

SEQ ID NO: 836877 - RNA, 19 nt, Human
ccuuguacugggaccucuc

SEQ ID NO: 836878 - RNA, 22 nt, Human
ccuuuccucguugcucucuucc

SEQ ID NO: 836879 - RNA, 28 nt, Human
cggaacuuuuucuuuuuuuuuuucuuuu

SEQ ID NO: 836880 - RNA, 24 nt, Human
cgggaccucccacccucucgucuc

SEQ ID NO: 836881 - RNA, 24 nt, Human
cuccuuuccucguugcucucuucc

SEQ ID NO: 836882 - RNA, 18 nt, Human
cugaaaccccgcacgcag

SEQ ID NO: 836883 - RNA, 22 nt, Human
cugaugcaaaaugcccggaacu

SEQ ID NO: 836884 - RNA, 22 nt, Human
gacaccaccaagaacucuuccu

SEQ ID NO: 836885 - RNA, 19 nt, Human
gaucuguuuuccuuuccuu

SEQ ID NO: 836886 - RNA, 19 nt, Human
gccaagguccccugcccgc

SEQ ID NO: 836887 - RNA, 22 nt, Human
gcgagagaggaaaaagaggacc

SEQ ID NO: 836888 - RNA, 26 nt, Human
gcgcaggcccagaggguucagaaggg

SEQ ID NO: 836889 - RNA, 22 nt, Human
gcgcccuuccucccucucgcuc

SEQ ID NO: 836890 - RNA, 19 nt, Human
gcggagcuuggcagcuucc

SEQ ID NO: 836891 - RNA, 26 nt, Human
gcuaaaguuaaacaagaaaaugguac

SEQ ID NO: 836892 - RNA, 22 nt, Human
ggcagcuucccugcccugcccu

SEQ ID NO: 836893 - RNA, 19 nt, Human
ggccggagcgcgccgagcc

SEQ ID NO: 836894 - RNA, 22 nt, Human
gggacuagggacgugggacagg

SEQ ID NO: 836895 - RNA, 18 nt, Human
gggauaagggaaggaaag

SEQ ID NO: 836896 - RNA, 19 nt, Human
gggccaggaccggccacga

SEQ ID NO: 836897 - RNA, 27 nt, Human
gggccgcggcagggacaggguccgggg

SEQ ID NO: 836898 - RNA, 25 nt, Human
gguccuuccuucuuucgcucagccu

SEQ ID NO: 836899 - RNA, 18 nt, Human
gguuucugguacauucug

SEQ ID NO: 836900 - RNA, 21 nt, Human
guaauaauaaagaaaaacacc

SEQ ID NO: 836901 - RNA, 18 nt, Human
gucagggauggcuaagcc

SEQ ID NO: 836902 - RNA, 23 nt, Human
guccuuccuucuuucgcucagcc

SEQ ID NO: 836903 - RNA, 22 nt, Human
gucugcuuaccagugcacugcc

SEQ ID NO: 836904 - RNA, 21 nt, Human
uaaaacugaugagccucgugc

SEQ ID NO: 836905 - RNA, 18 nt, Human
uaaacaagaaaaugguac

SEQ ID NO: 836906 - RNA, 19 nt, Human
uaaacccaaacaaagaccc

SEQ ID NO: 836907 - RNA, 23 nt, Human
uaaacccaaacaaagacccucag

SEQ ID NO: 836908 - RNA, 19 nt, Human
uaaccaaaaaacagaaacc

SEQ ID NO: 836909 - RNA, 27 nt, Human
uaaccaaaaaacagaaaccagucugaa

SEQ ID NO: 836910 - RNA, 25 nt, Human
uaauaagcaaaauaggaaaccauuu

SEQ ID NO: 836911 - RNA, 23 nt, Human
uaauaauaaagaaaaacacccau

SEQ ID NO: 836912 - RNA, 18 nt, Human
uaccagugcacugccagg

SEQ ID NO: 836913 - RNA, 21 nt, Human
uaccguaauaauaaacccaaa

SEQ ID NO: 836914 - RNA, 18 nt, Human
uacuauacaacugaagaa

SEQ ID NO: 836915 - RNA, 19 nt, Human
uagcgcaggcccagagggu

SEQ ID NO: 836916 - RNA, 24 nt, Human
uagucugggacuagggacguggga

SEQ ID NO: 836917 - RNA, 22 nt, Human
uaugauccaugaucaacaacau

SEQ ID NO: 836918 - RNA, 19 nt, Human
ucagcaccaacaagguuga

SEQ ID NO: 836919 - RNA, 18 nt, Human
uccagaacacuccucugg

SEQ ID NO: 836920 - RNA, 22 nt, Human
ucccuauaacuacuauacaacu

SEQ ID NO: 836921 - RNA, 19 nt, Human
ucccugcccugcccugccc

SEQ ID NO: 836922 - RNA, 25 nt, Human
uccgggccggggcaagggcgggggc

SEQ ID NO: 836923 - RNA, 18 nt, Human
ucucaaaagcagggaaag

SEQ ID NO: 836924 - RNA, 19 nt, Human
ucucagggcugaggagcca

SEQ ID NO: 836925 - RNA, 20 nt, Human
ucuccagauggccuugguga

SEQ ID NO: 836926 - RNA, 22 nt, Human
ucugggacuagggacgugggac

SEQ ID NO: 836927 - RNA, 22 nt, Human
ucugguuacaauaaaaagcaga

SEQ ID NO: 836928 - RNA, 19 nt, Human
ugaagcgaggcgcagccgc

SEQ ID NO: 836929 - RNA, 18 nt, Human
ugagggccugugucucag

SEQ ID NO: 836930 - RNA, 22 nt, Human
ugagggccugugucucagggcu

SEQ ID NO: 836931 - RNA, 20 nt, Human
ugauccaugaucaacaacau

SEQ ID NO: 836932 - RNA, 22 nt, Human
ugccgcccgggaaacuuugcgg

SEQ ID NO: 836933 - RNA, 19 nt, Human
ugccucgccgcccuucagc

SEQ ID NO: 836934 - RNA, 20 nt, Human
uggcuaagccucucacccuu

SEQ ID NO: 836935 - RNA, 20 nt, Human
ugggaccucucgguucucuc

SEQ ID NO: 836936 - RNA, 25 nt, Human
ugggacuagggacgugggacaggga

SEQ ID NO: 836937 - RNA, 21 nt, Human
ugguauuuuugucagugcaac

SEQ ID NO: 836938 - RNA, 21 nt, Human
uuaaaacugcaagcaccaugc

SEQ ID NO: 836939 - RNA, 20 nt, Human
uuacaaacaaaaauaccgua

SEQ ID NO: 836940 - RNA, 21 nt, Human
uucccuauaacuacuauacaa

SEQ ID NO: 836941 - RNA, 18 nt, Human
uugaccauaagacaaggc

SEQ ID NO: 836942 - RNA, 24 nt, Human
uuuuuuuuuuuuuuuuuuaauaag

SEQ ID NO: 836943 - RNA, 22 nt, Human
aaagcaaaggggauccuggccc

SEQ ID NO: 836944 - RNA, 18 nt, Human
aaagcacccggcacgcac

SEQ ID NO: 836945 - RNA, 19 nt, Human
aacuuauuugcccucuccu

SEQ ID NO: 836946 - RNA, 19 nt, Human
aagaagccgccuagggugc

SEQ ID NO: 836947 - RNA, 23 nt, Human
aagaagccgccuagggugcugug

SEQ ID NO: 836948 - RNA, 21 nt, Human
aagcacaaaaugaaagcagga

SEQ ID NO: 836949 - RNA, 22 nt, Human
aagcacccggcacgcaccucac

SEQ ID NO: 836950 - RNA, 21 nt, Human
aagcagcugcagggggagggg

SEQ ID NO: 836951 - RNA, 18 nt, Human
aagcaggaagagcaaaga

SEQ ID NO: 836952 - RNA, 19 nt, Human
aagcaggaagagcaaagag

SEQ ID NO: 836953 - RNA, 23 nt, Human
aagggucacguugcgggggggca

SEQ ID NO: 836954 - RNA, 18 nt, Human
aaucuccguccucauccc

SEQ ID NO: 836955 - RNA, 23 nt, Human
acaggaagaagccgccuagggug

SEQ ID NO: 836956 - RNA, 21 nt, Human
accaagaggagacucagccug

SEQ ID NO: 836957 - RNA, 23 nt, Human
acucagccugggaguguccuugg

SEQ ID NO: 836958 - RNA, 21 nt, Human
acucagguggguugcuguugg

SEQ ID NO: 836959 - RNA, 18 nt, Human
agagaggagagacccagg

SEQ ID NO: 836960 - RNA, 22 nt, Human
agagcaguaccagcagcggcug

SEQ ID NO: 836961 - RNA, 23 nt, Human
agcaguaccagcagcggcuggca

SEQ ID NO: 836962 - RNA, 25 nt, Human
aggaagagcaaagagagccgguacc

SEQ ID NO: 836963 - RNA, 23 nt, Human
agggagggugaagcagcugcagg

SEQ ID NO: 836964 - RNA, 25 nt, Human
agggugcugugucgagaaggaaucu

SEQ ID NO: 836965 - RNA, 21 nt, Human
aucgccaaaaucuccguccuc

SEQ ID NO: 836966 - RNA, 19 nt, Human
aucugugaugagcuuccuc

SEQ ID NO: 836967 - RNA, 19 nt, Human
aucuucucgggaacuccaa

SEQ ID NO: 836968 - RNA, 19 nt, Human
augaaaacacaaggaaaag

SEQ ID NO: 836969 - RNA, 18 nt, Human
augguggagcuggugcug

SEQ ID NO: 836970 - RNA, 23 nt, Human
augguggagcuggugcuggggcc

SEQ ID NO: 836971 - RNA, 23 nt, Human
auuuugcaacuuuaauguaacac

SEQ ID NO: 836972 - RNA, 21 nt, Human
cacaaggaaaagcacaaaaug

SEQ ID NO: 836973 - RNA, 20 nt, Human
caccaacuuauuugcccucu

SEQ ID NO: 836974 - RNA, 22 nt, Human
cacguggcccuccuguuggcac

SEQ ID NO: 836975 - RNA, 22 nt, Human
cagaggacagccucgcuggcac

SEQ ID NO: 836976 - RNA, 22 nt, Human
cagccuccaagaaaugagccuu

SEQ ID NO: 836977 - RNA, 21 nt, Human
cagcucuccacguggcccucc

SEQ ID NO: 836978 - RNA, 22 nt, Human
caggaagaagccgccuagggug

SEQ ID NO: 836979 - RNA, 25 nt, Human
caggaagaagccgccuagggugcug

SEQ ID NO: 836980 - RNA, 20 nt, Human
cagguggaucccaaacuucu

SEQ ID NO: 836981 - RNA, 22 nt, Human
caucugggcccucaucugggcc

SEQ ID NO: 836982 - RNA, 21 nt, Human
caucugggcccuggcauguuc

SEQ ID NO: 836983 - RNA, 21 nt, Human
caucugugaugagcuuccuca

SEQ ID NO: 836984 - RNA, 27 nt, Human
ccaaaacaugaaaacacaaggaaaagc

SEQ ID NO: 836985 - RNA, 20 nt, Human
ccagggagaugagagcucag

SEQ ID NO: 836986 - RNA, 18 nt, Human
ccccgugccaaagcaccc

SEQ ID NO: 836987 - RNA, 19 nt, Human
cccgugccaaagcacccgg

SEQ ID NO: 836988 - RNA, 19 nt, Human
ccucccagaggacagccuc

SEQ ID NO: 836989 - RNA, 23 nt, Human
ccucggccauauccacauccauu

SEQ ID NO: 836990 - RNA, 24 nt, Human
cggaugguggagcuggugcugggg

SEQ ID NO: 836991 - RNA, 21 nt, Human
cggggccaucgggggccgagg

SEQ ID NO: 836992 - RNA, 22 nt, Human
cguccucaucccaggucaggag

SEQ ID NO: 836993 - RNA, 21 nt, Human
cucgcaggccccagaggaauu

SEQ ID NO: 836994 - RNA, 22 nt, Human
cuggcccagaaagcaaagggga

SEQ ID NO: 836995 - RNA, 21 nt, Human
cuggcccaggcaucgccaaaa

SEQ ID NO: 836996 - RNA, 24 nt, Human
cugggcccuggcauguuccucggc

SEQ ID NO: 836997 - RNA, 19 nt, Human
cuugcaugccaccuccgac

SEQ ID NO: 836998 - RNA, 19 nt, Human
gaagaagccgccuagggug

SEQ ID NO: 836999 - RNA, 19 nt, Human
gaagcagcugcagggggag

SEQ ID NO: 837000 - RNA, 20 nt, Human
gaauguacugaugguaucug

SEQ ID NO: 837001 - RNA, 20 nt, Human
gacaggaagaagccgccuag

SEQ ID NO: 837002 - RNA, 18 nt, Human
gacccagggcuaccaggc

SEQ ID NO: 837003 - RNA, 21 nt, Human
gaucuccuucagguggauccc

SEQ ID NO: 837004 - RNA, 24 nt, Human
gcagaagggucacguugcgggggg

SEQ ID NO: 837005 - RNA, 23 nt, Human
gccagcucuccacguggcccucc

SEQ ID NO: 837006 - RNA, 18 nt, Human
ggagaagaagcuggcgcc

SEQ ID NO: 837007 - RNA, 19 nt, Human
ggagaagaagcuggcgcca

SEQ ID NO: 837008 - RNA, 21 nt, Human
ggagggugaagcagcugcagg

SEQ ID NO: 837009 - RNA, 24 nt, Human
ggaugguggagcuggugcuggggc

SEQ ID NO: 837010 - RNA, 19 nt, Human
ggcccuccuguuggcacgg

SEQ ID NO: 837011 - RNA, 23 nt, Human
ggcugugaugcucuccagguggg

SEQ ID NO: 837012 - RNA, 24 nt, Human
ggcugugaugcucuccaggugggu

SEQ ID NO: 837013 - RNA, 19 nt, Human
gggggagggggcgggaucc

SEQ ID NO: 837014 - RNA, 23 nt, Human
ggggggcaggcacaguacgugcc

SEQ ID NO: 837015 - RNA, 21 nt, Human
gguuuuuccaaggaggcgagc

SEQ ID NO: 837016 - RNA, 23 nt, Human
gucgaucuccuucagguggaucc

SEQ ID NO: 837017 - RNA, 18 nt, Human
uaacacugauacccaaaa

SEQ ID NO: 837018 - RNA, 21 nt, Human
uaacacugauacccaaaacau

SEQ ID NO: 837019 - RNA, 19 nt, Human
uaagugccaggcacugagc

SEQ ID NO: 837020 - RNA, 18 nt, Human
uaccaggcuccccgugcc

SEQ ID NO: 837021 - RNA, 18 nt, Human
uacccaaaacaugaaaac

SEQ ID NO: 837022 - RNA, 18 nt, Human
uacucagguggguugcug

SEQ ID NO: 837023 - RNA, 22 nt, Human
ucauccaggugcuuggacugua

SEQ ID NO: 837024 - RNA, 20 nt, Human
ucaucugggcccuggcaugu

SEQ ID NO: 837025 - RNA, 20 nt, Human
uccaaggaggcgagcugagg

SEQ ID NO: 837026 - RNA, 24 nt, Human
uccaaucagcgcuucauccccgau

SEQ ID NO: 837027 - RNA, 19 nt, Human
ucccgugugcagacaagaa

SEQ ID NO: 837028 - RNA, 24 nt, Human
uccucggccauauccacauccauu

SEQ ID NO: 837029 - RNA, 19 nt, Human
ucucccaccaguccugagg

SEQ ID NO: 837030 - RNA, 27 nt, Human
ucucccaccaguccugaggguagggac

SEQ ID NO: 837031 - RNA, 18 nt, Human
ucucgguucugauucugg

SEQ ID NO: 837032 - RNA, 23 nt, Human
ucucucuccuccucgcugcucuc

SEQ ID NO: 837033 - RNA, 20 nt, Human
ucugagaggaggcgcucugg

SEQ ID NO: 837034 - RNA, 21 nt, Human
ucugggcccucaucugggccc

SEQ ID NO: 837035 - RNA, 22 nt, Human
ugaaaacacaaggaaaagcaca

SEQ ID NO: 837036 - RNA, 19 nt, Human
ugaaagcaucauccacagc

SEQ ID NO: 837037 - RNA, 24 nt, Human
ugaagcagcugcagggggaggggg

SEQ ID NO: 837038 - RNA, 21 nt, Human
ugaaucucaggacccucaucu

SEQ ID NO: 837039 - RNA, 21 nt, Human
ugacgcccagaaucaccaaaa

SEQ ID NO: 837040 - RNA, 18 nt, Human
ugagagaggagagaccca

SEQ ID NO: 837041 - RNA, 23 nt, Human
ugagaggaggcgcucuggcuugg

SEQ ID NO: 837042 - RNA, 22 nt, Human
ugaggguagggacuacguggag

SEQ ID NO: 837043 - RNA, 23 nt, Human
ugcuggggccaucuaggacgcug

SEQ ID NO: 837044 - RNA, 18 nt, Human
ugcugugucgagaaggaa

SEQ ID NO: 837045 - RNA, 20 nt, Human
uggagcuggugcuggggcca

SEQ ID NO: 837046 - RNA, 19 nt, Human
uggccaguaagaucgcugc

SEQ ID NO: 837047 - RNA, 18 nt, Human
uggcccaggcaucgccaa

SEQ ID NO: 837048 - RNA, 21 nt, Human
uguaacacugauacccaaaac

SEQ ID NO: 837049 - RNA, 21 nt, Human
ugugcagacaagaauauacag

SEQ ID NO: 837050 - RNA, 19 nt, Human
uuauuugcccucuccugca

SEQ ID NO: 837051 - RNA, 22 nt, Human
uucacaaagucaucugugauga

SEQ ID NO: 837052 - RNA, 19 nt, Human
uucauccccgauauucauc

SEQ ID NO: 837053 - RNA, 21 nt, Human
uuccaaggaggcgagcugagg

SEQ ID NO: 837054 - RNA, 21 nt, Human
uucugauucugggcgaugaau

SEQ ID NO: 837055 - RNA, 22 nt, Human
uugagagaggagagacccaggg

SEQ ID NO: 837056 - RNA, 23 nt, Human
uugguuuuuccaaggaggcgagc

SEQ ID NO: 837057 - RNA, 19 nt, Human
aaaaccuugccuccucaca

SEQ ID NO: 837058 - RNA, 23 nt, Human
aaaaccuugccuccucacagagc

SEQ ID NO: 837059 - RNA, 25 nt, Human
aaccuugccuccucacagagccugg

SEQ ID NO: 837060 - RNA, 23 nt, Human
aagaagccaaggaaauccaggua

SEQ ID NO: 837061 - RNA, 21 nt, Human
aagccaaggaaauccagguau

SEQ ID NO: 837062 - RNA, 22 nt, Human
acauucucaaagaagccaagga

SEQ ID NO: 837063 - RNA, 21 nt, Human
aggaagaauucuuuauucaga

SEQ ID NO: 837064 - RNA, 22 nt, Human
aggcagaucuucuccuuggugc

SEQ ID NO: 837065 - RNA, 19 nt, Human
aggcaggagugugggcagg

SEQ ID NO: 837066 - RNA, 19 nt, Human
auuaucccaauucacaaaa

SEQ ID NO: 837067 - RNA, 24 nt, Human
caaagauaaaucuccaagucaccc

SEQ ID NO: 837068 - RNA, 26 nt, Human
caagucacccaauagaacagaaaccu

SEQ ID NO: 837069 - RNA, 22 nt, Human
cacaagacucuuacccuuaaac

SEQ ID NO: 837070 - RNA, 20 nt, Human
cagagccugggucagguucc

SEQ ID NO: 837071 - RNA, 25 nt, Human
caggcagaucuucuccuuggugcuc

SEQ ID NO: 837072 - RNA, 19 nt, Human
caggcaggagugugggcag

SEQ ID NO: 837073 - RNA, 18 nt, Human
cauucaaccaucccuuaa

SEQ ID NO: 837074 - RNA, 22 nt, Human
ccagucccccucccacuggccc

SEQ ID NO: 837075 - RNA, 21 nt, Human
ccucacagagccugggucagg

SEQ ID NO: 837076 - RNA, 21 nt, Human
cuccaagucacccaauagaac

SEQ ID NO: 837077 - RNA, 25 nt, Human
cuccucuguggccuccagggaaucc

SEQ ID NO: 837078 - RNA, 20 nt, Human
cugaauaaaacacaagacuc

SEQ ID NO: 837079 - RNA, 22 nt, Human
gcagcaggcaggagugugggca

SEQ ID NO: 837080 - RNA, 20 nt, Human
gcaggagugugggcaggagc

SEQ ID NO: 837081 - RNA, 18 nt, Human
gcucucuucagagugaag

SEQ ID NO: 837082 - RNA, 21 nt, Human
ggcaggagugugggcaggagc

SEQ ID NO: 837083 - RNA, 18 nt, Human
ggggaagcugcuggacgc

SEQ ID NO: 837084 - RNA, 23 nt, Human
gugcuccucuguggccuccaggg

SEQ ID NO: 837085 - RNA, 24 nt, Human
uaaagcaagaauugacuaucucuu

SEQ ID NO: 837086 - RNA, 20 nt, Human
uauauacacagaacugugug

SEQ ID NO: 837087 - RNA, 24 nt, Human
uaucucaucuauuuuacugcucau

SEQ ID NO: 837088 - RNA, 24 nt, Human
ucacccaauagaacagaaaccuac

SEQ ID NO: 837089 - RNA, 23 nt, Human
uccacugcuguuauuaucccaau

SEQ ID NO: 837090 - RNA, 23 nt, Human
ucccuuaaaaaaaaacauuugaa

SEQ ID NO: 837091 - RNA, 25 nt, Human
uccucuggguuggccuguccccuga

SEQ ID NO: 837092 - RNA, 23 nt, Human
uguccucuggguuggccuguccc

SEQ ID NO: 837093 - RNA, 25 nt, Human
uucaaccaucccuuaaaaaaaaaca

SEQ ID NO: 837094 - RNA, 19 nt, Human
uuuuuuuuuuuuaacagga

SEQ ID NO: 837095 - RNA, 26 nt, Human
uuuuuuuuuuuuuuuuuuuuaacagg

SEQ ID NO: 837096 - RNA, 19 nt, Human
aaacaaaaacuugacaugc

SEQ ID NO: 837097 - RNA, 19 nt, Human
aaaggagauauauaugaug

SEQ ID NO: 837098 - RNA, 19 nt, Human
acaaagugaacaaucugcc

SEQ ID NO: 837099 - RNA, 18 nt, Human
acuugaaagauacuaaug

SEQ ID NO: 837100 - RNA, 19 nt, Human
agaaaacaaaaacuugagg

SEQ ID NO: 837101 - RNA, 19 nt, Human
agcagaaaggcaggagaug

SEQ ID NO: 837102 - RNA, 20 nt, Human
aggagugggagacacugcug

SEQ ID NO: 837103 - RNA, 27 nt, Human
aggcaggaaagugagcagaagggaccc

SEQ ID NO: 837104 - RNA, 20 nt, Human
aggcaggaaagugagcagag

SEQ ID NO: 837105 - RNA, 22 nt, Human
auuuuacaaaaacaaaacugaa

SEQ ID NO: 837106 - RNA, 24 nt, Human
caaaaacaaagugaacaaucugcc

SEQ ID NO: 837107 - RNA, 22 nt, Human
caaaacaggcaggaaagugagc

SEQ ID NO: 837108 - RNA, 31 nt, Human
caaaacugaaugcagaaaacaaaaacuuggu

SEQ ID NO: 837109 - RNA, 18 nt, Human
caaagugaacaaucugcc

SEQ ID NO: 837110 - RNA, 23 nt, Human
caacccaaaaaagauucaaggau

SEQ ID NO: 837111 - RNA, 19 nt, Human
caccacgcugaaacaugcc

SEQ ID NO: 837112 - RNA, 22 nt, Human
caccuugacucccgaccagucc

SEQ ID NO: 837113 - RNA, 21 nt, Human
cagaaaggcaggagauguggc

SEQ ID NO: 837114 - RNA, 22 nt, Human
cagaaaggcaggagauguggca

SEQ ID NO: 837115 - RNA, 24 nt, Human
cagcaccaauaaaugugugaucca

SEQ ID NO: 837116 - RNA, 20 nt, Human
caguccugagaauucacccu

SEQ ID NO: 837117 - RNA, 21 nt, Human
ccacaaaaacaaagugaacaa

SEQ ID NO: 837118 - RNA, 26 nt, Human
cucagacuucacaaggagugggagac

SEQ ID NO: 837119 - RNA, 25 nt, Human
cucccgaccaguccugagaauucac

SEQ ID NO: 837120 - RNA, 19 nt, Human
cuccuggaugaucuucaua

SEQ ID NO: 837121 - RNA, 24 nt, Human
cucucuagccauaucuuggcugcu

SEQ ID NO: 837122 - RNA, 21 nt, Human
cugaaccugcuccucucacau

SEQ ID NO: 837123 - RNA, 18 nt, Human
cugaaugcagaaaacaaa

SEQ ID NO: 837124 - RNA, 23 nt, Human
gaaaaacacuugaaagauacuaa

SEQ ID NO: 837125 - RNA, 20 nt, Human
gaaaaggcuaaaaacaacca

SEQ ID NO: 837126 - RNA, 19 nt, Human
gaaaggcaggagauguggc

SEQ ID NO: 837127 - RNA, 20 nt, Human
gaaccugcuccucucacauc

SEQ ID NO: 837128 - RNA, 22 nt, Human
gagcagaaaggcaggagaugug

SEQ ID NO: 837129 - RNA, 27 nt, Human
gcaaaacaggcaggaaagugagcagaa

SEQ ID NO: 837130 - RNA, 24 nt, Human
gcagcaccaauaaaugugugaucc

SEQ ID NO: 837131 - RNA, 27 nt, Human
gcccuuuguuuaccugaaccugccgga

SEQ ID NO: 837132 - RNA, 21 nt, Human
gucaggcaaaacaggcaggaa

SEQ ID NO: 837133 - RNA, 21 nt, Human
guuuaccugaaccugcuccuc

SEQ ID NO: 837134 - RNA, 19 nt, Human
uaacaggaacacaaaggag

SEQ ID NO: 837135 - RNA, 23 nt, Human
uaacaggaacacaaaggagaaga

SEQ ID NO: 837136 - RNA, 20 nt, Human
uauagaauaucaaaacucuu

SEQ ID NO: 837137 - RNA, 22 nt, Human
ucaacccaaaaaagauucaagg

SEQ ID NO: 837138 - RNA, 21 nt, Human
ucacaaggagugggagacacu

SEQ ID NO: 837139 - RNA, 24 nt, Human
ucccgaccaguccugagaauucac

SEQ ID NO: 837140 - RNA, 22 nt, Human
uccugagaauucacccucggcu

SEQ ID NO: 837141 - RNA, 18 nt, Human
ucuuggcugcucacuacu

SEQ ID NO: 837142 - RNA, 19 nt, Human
ugaaaaggcuaaaaacaac

SEQ ID NO: 837143 - RNA, 18 nt, Human
ugacucccgaccaguccu

SEQ ID NO: 837144 - RNA, 21 nt, Human
ugccacaaaaacaaagugaac

SEQ ID NO: 837145 - RNA, 23 nt, Human
ugccacaaaaacaaagugaacaa

SEQ ID NO: 837146 - RNA, 20 nt, Human
ugcuuugcuuacucuuccuc

SEQ ID NO: 837147 - RNA, 21 nt, Human
ugcuuugcuuacucuuccucu

SEQ ID NO: 837148 - RNA, 22 nt, Human
uggauuuuacaaaaacaaaacu

SEQ ID NO: 837149 - RNA, 26 nt, Human
uggcagcaccaauaaaugugugaucc

SEQ ID NO: 837150 - RNA, 23 nt, Human
ugggagacacugcuggacaccac

SEQ ID NO: 837151 - RNA, 24 nt, Human
uucacacauuucugagaaaaucuc

SEQ ID NO: 837152 - RNA, 19 nt, Human
aaugccacauuuucuuguc

SEQ ID NO: 837153 - RNA, 23 nt, Human
acaaaacacuuucuacugucccu

SEQ ID NO: 837154 - RNA, 21 nt, Human
accucuggcuucugaucccaa

SEQ ID NO: 837155 - RNA, 21 nt, Human
acugccgaccaguccugagaa

SEQ ID NO: 837156 - RNA, 23 nt, Human
auaaguuguuucacucaaaaaac

SEQ ID NO: 837157 - RNA, 25 nt, Human
cacucaaaaaacaaaacacuuucua

SEQ ID NO: 837158 - RNA, 18 nt, Human
cagcaauaacagggugau

SEQ ID NO: 837159 - RNA, 23 nt, Human
cagcaauaacagggugaucuaua

SEQ ID NO: 837160 - RNA, 21 nt, Human
ccaaagauauuucuacucuaa

SEQ ID NO: 837161 - RNA, 22 nt, Human
ccuaagaccucauuggggguga

SEQ ID NO: 837162 - RNA, 26 nt, Human
cuacacucgcucggguccucgccucc

SEQ ID NO: 837163 - RNA, 23 nt, Human
cuaguugaaaaagagaaaaaaaa

SEQ ID NO: 837164 - RNA, 25 nt, Human
cugaaaaacagcaauaacaggguga

SEQ ID NO: 837165 - RNA, 22 nt, Human
gagaacagcagguaaacuuggc

SEQ ID NO: 837166 - RNA, 18 nt, Human
uaacaggccuuuugaauu

SEQ ID NO: 837167 - RNA, 18 nt, Human
uacaaaguaaagaaucug

SEQ ID NO: 837168 - RNA, 22 nt, Human
uccucgccuccaaagcggaagu

SEQ ID NO: 837169 - RNA, 22 nt, Human
uccugagaauucaccccuggcu

SEQ ID NO: 837170 - RNA, 20 nt, Human
ucuaaugccacauuuucuug

SEQ ID NO: 837171 - RNA, 21 nt, Human
ugaaaaacagcaauaacaggg

SEQ ID NO: 837172 - RNA, 20 nt, Human
uggcaguagugcaaggccug

SEQ ID NO: 837173 - RNA, 18 nt, Human
uggcuucugaucccaaau

SEQ ID NO: 837174 - RNA, 20 nt, Human
ugggagauugauuggcuaug

SEQ ID NO: 837175 - RNA, 21 nt, Human
ugggagauugauuggcuaugg

SEQ ID NO: 837176 - RNA, 22 nt, Human
uucaccccuggcugaccagacg

SEQ ID NO: 837177 - RNA, 24 nt, Human
uucaugcauaacaagaacaaaggu

SEQ ID NO: 837178 - RNA, 18 nt, Human
aguggcugccuagagugc

SEQ ID NO: 837179 - RNA, 21 nt, Human
cacucacuccaagccccuccg

SEQ ID NO: 837180 - RNA, 21 nt, Human
cucacuccaagccccuccgaa

SEQ ID NO: 837181 - RNA, 19 nt, Human
cuccaagccccuccgaaac

SEQ ID NO: 837182 - RNA, 18 nt, Human
cugaggaugcacccuggc

SEQ ID NO: 837183 - RNA, 20 nt, Human
cuguguugaguagguuucug

SEQ ID NO: 837184 - RNA, 18 nt, Human
gcguccacucacuccaag

SEQ ID NO: 837185 - RNA, 24 nt, Human
ugaagagaaagacuggcaggauua

SEQ ID NO: 837186 - RNA, 18 nt, Human
uggcaagagcugagccuc

SEQ ID NO: 837187 - RNA, 21 nt, Human
uggcuugaagagaaagacugg

SEQ ID NO: 837188 - RNA, 21 nt, Human
uguguugaguagguuucugag

SEQ ID NO: 837189 - RNA, 19 nt, Human
uuuuuuuuuuugaaauggc

SEQ ID NO: 837190 - RNA, 18 nt, Human
uuuuuuuuuuuuuuuuug

SEQ ID NO: 837191 - RNA, 24 nt, Human
aaaaacagguaaaucucuacauca

SEQ ID NO: 837192 - RNA, 20 nt, Human
aaacuacugaccacccuuca

SEQ ID NO: 837193 - RNA, 21 nt, Human
aacaagcuaagcaaagccagg

SEQ ID NO: 837194 - RNA, 21 nt, Human
aacagggauauggaugaugag

SEQ ID NO: 837195 - RNA, 19 nt, Human
aagacucuuccccccgcua

SEQ ID NO: 837196 - RNA, 30 nt, Human
aaggaaaagcauuuagaaaauacugaaaag

SEQ ID NO: 837197 - RNA, 24 nt, Human
acacccaguucgucaccaccuggu

SEQ ID NO: 837198 - RNA, 21 nt, Human
acagaaaugcaaagaacacua

SEQ ID NO: 837199 - RNA, 18 nt, Human
acuccuggcacugccugg

SEQ ID NO: 837200 - RNA, 23 nt, Human
acugcccuguucaaacacaaggg

SEQ ID NO: 837201 - RNA, 21 nt, Human
caacaagcuaagcaaagccag

SEQ ID NO: 837202 - RNA, 19 nt, Human
caccaccugguuccuggag

SEQ ID NO: 837203 - RNA, 24 nt, Human
cacuaccuagaaccuaaacugccc

SEQ ID NO: 837204 - RNA, 25 nt, Human
cauuuagaaaauacugaaaaacagg

SEQ ID NO: 837205 - RNA, 23 nt, Human
ccaacaggccuugacuccuggca

SEQ ID NO: 837206 - RNA, 22 nt, Human
cccucacccugaggacuggcca

SEQ ID NO: 837207 - RNA, 23 nt, Human
cccugaggacuggccaggucuaa

SEQ ID NO: 837208 - RNA, 18 nt, Human
ccuccacuaccuagaacc

SEQ ID NO: 837209 - RNA, 22 nt, Human
ccuccgauccgucagauuccca

SEQ ID NO: 837210 - RNA, 20 nt, Human
ccucgagccccaccuggccc

SEQ ID NO: 837211 - RNA, 21 nt, Human
ccucgagccccaccuggcccu

SEQ ID NO: 837212 - RNA, 22 nt, Human
cgcgccuccucacaaaugccuc

SEQ ID NO: 837213 - RNA, 20 nt, Human
cucacaaaugccuccgaucc

SEQ ID NO: 837214 - RNA, 22 nt, Human
cucacaaaugccuccgauccgu

SEQ ID NO: 837215 - RNA, 21 nt, Human
cugcuacuuucuucaacaagc

SEQ ID NO: 837216 - RNA, 23 nt, Human
cuggcacugccugggccuccucu

SEQ ID NO: 837217 - RNA, 20 nt, Human
cuuaaaccagauaaagagca

SEQ ID NO: 837218 - RNA, 24 nt, Human
gaccacccuucaauuuuguuccac

SEQ ID NO: 837219 - RNA, 19 nt, Human
ggggaagaaacuauccuag

SEQ ID NO: 837220 - RNA, 19 nt, Human
guaaaaaaaaaaaaaaauu

SEQ ID NO: 837221 - RNA, 23 nt, Human
uaagacucuuccccccgcuaacu

SEQ ID NO: 837222 - RNA, 18 nt, Human
uacagaucacaaaauaag

SEQ ID NO: 837223 - RNA, 18 nt, Human
uagaaaauacugaaaaac

SEQ ID NO: 837224 - RNA, 24 nt, Human
ucacacccaguucgucaccaccug

SEQ ID NO: 837225 - RNA, 25 nt, Human
uccacuaccuagaaccuaaacugcc

SEQ ID NO: 837226 - RNA, 23 nt, Human
ucgcgccuccucacaaaugccuc

SEQ ID NO: 837227 - RNA, 21 nt, Human
ucuacaucacccauaugggac

SEQ ID NO: 837228 - RNA, 24 nt, Human
ucucacggcagcgcaguacaggcc

SEQ ID NO: 837229 - RNA, 24 nt, Human
ucugcugugcugacuuuaggcugu

SEQ ID NO: 837230 - RNA, 18 nt, Human
ugacuccuggcacugccu

SEQ ID NO: 837231 - RNA, 21 nt, Human
ugcacauuguaaaaaaaaaaa

SEQ ID NO: 837232 - RNA, 20 nt, Human
ugcccuguucaaacacaagg

SEQ ID NO: 837233 - RNA, 21 nt, Human
ugccuccgauccgucagauuc

SEQ ID NO: 837234 - RNA, 24 nt, Human
uucaaaggaaaagcauuuagaaaa

SEQ ID NO: 837235 - RNA, 25 nt, Human
uucaagaacaaaagaauaagcagga

SEQ ID NO: 837236 - RNA, 21 nt, Human
uuccucagggcccucacccug

SEQ ID NO: 837237 - RNA, 23 nt, Human
uuuuuuuuuuuuuuuuuucuuuu

SEQ ID NO: 837238 - RNA, 18 nt, Human
aaaguucuuccauccauu

SEQ ID NO: 837239 - RNA, 19 nt, Human
aauccuuaaagucacacga

SEQ ID NO: 837240 - RNA, 22 nt, Human
acagcggcagugacggcgggag

SEQ ID NO: 837241 - RNA, 23 nt, Human
aggaaaaaguagaccaaucucau

SEQ ID NO: 837242 - RNA, 19 nt, Human
aucaucauacugcugaguu

SEQ ID NO: 837243 - RNA, 23 nt, Human
cacgggccgaggggugugggagc

SEQ ID NO: 837244 - RNA, 22 nt, Human
cagcauuuuaacaguaauuauu

SEQ ID NO: 837245 - RNA, 23 nt, Human
caggaaaaaguagaccaaucuca

SEQ ID NO: 837246 - RNA, 22 nt, Human
cauacugcugaguuccuucaaa

SEQ ID NO: 837247 - RNA, 20 nt, Human
ccagaucaucauacugcuga

SEQ ID NO: 837248 - RNA, 23 nt, Human
ccauccauuuuacaaaaccagca

SEQ ID NO: 837249 - RNA, 21 nt, Human
cccucgccccacccauauuac

SEQ ID NO: 837250 - RNA, 20 nt, Human
ccucgccccacccauauuac

SEQ ID NO: 837251 - RNA, 24 nt, Human
cggcagugacggcgggaguacaag

SEQ ID NO: 837252 - RNA, 24 nt, Human
cggcgggaguacaaggagcaaugg

SEQ ID NO: 837253 - RNA, 18 nt, Human
cuacaggaaaaaguagac

SEQ ID NO: 837254 - RNA, 18 nt, Human
cugaguuccuucaaacca

SEQ ID NO: 837255 - RNA, 19 nt, Human
cuggaaccagaucaucaua

SEQ ID NO: 837256 - RNA, 19 nt, Human
gccaacuuuucaccaaccc

SEQ ID NO: 837257 - RNA, 19 nt, Human
gcguacacgggccgagggg

SEQ ID NO: 837258 - RNA, 18 nt, Human
ggacaguaguucguccuc

SEQ ID NO: 837259 - RNA, 19 nt, Human
ggagggguuggacagcggc

SEQ ID NO: 837260 - RNA, 23 nt, Human
uaaauccuuaaagucacacgauu

SEQ ID NO: 837261 - RNA, 23 nt, Human
uacaaaaccagcaaaacucuaca

SEQ ID NO: 837262 - RNA, 27 nt, Human
uacaaaaccagcaaaacucuacaauaa

SEQ ID NO: 837263 - RNA, 25 nt, Human
uacacgggccgaggggugugggagc

SEQ ID NO: 837264 - RNA, 18 nt, Human
ucaaaccaucaaaguaca

SEQ ID NO: 837265 - RNA, 21 nt, Human
ucaggacaguaguucguccuc

SEQ ID NO: 837266 - RNA, 18 nt, Human
uccacaaauguuuaauuu

SEQ ID NO: 837267 - RNA, 19 nt, Human
ucuacaauaaaauccuaca

SEQ ID NO: 837268 - RNA, 19 nt, Human
ugaagguacaugccagucu

SEQ ID NO: 837269 - RNA, 21 nt, Human
ugcugaguuccuucaaaccau

SEQ ID NO: 837270 - RNA, 19 nt, Human
uggcagcgggagcuuugug

SEQ ID NO: 837271 - RNA, 19 nt, Human
aaagcaaacacucuauuuc

SEQ ID NO: 837272 - RNA, 22 nt, Human
aaugacaggaaacaaagaaaaa

SEQ ID NO: 837273 - RNA, 23 nt, Human
aaugacaggaaacaaagaaaaaa

SEQ ID NO: 837274 - RNA, 20 nt, Human
acaacagcagacacaaaggg

SEQ ID NO: 837275 - RNA, 20 nt, Human
acacaacagcagacacaaag

SEQ ID NO: 837276 - RNA, 22 nt, Human
acacaacagcagacacaaaggg

SEQ ID NO: 837277 - RNA, 20 nt, Human
accaaugucaauagagucuu

SEQ ID NO: 837278 - RNA, 23 nt, Human
agccgccgccagcacuugccgca

SEQ ID NO: 837279 - RNA, 20 nt, Human
aggcucaaagcuuacagcag

SEQ ID NO: 837280 - RNA, 20 nt, Human
aucaugguaaaugucaaucu

SEQ ID NO: 837281 - RNA, 19 nt, Human
augacaggaaacaaagaaa

SEQ ID NO: 837282 - RNA, 24 nt, Human
augacaggaaacaaagaaaaaaaa

SEQ ID NO: 837283 - RNA, 18 nt, Human
auuaucaaaagcaaacac

SEQ ID NO: 837284 - RNA, 18 nt, Human
caaaagaacagcuuauuu

SEQ ID NO: 837285 - RNA, 22 nt, Human
caaagcuuacagcaguccuagg

SEQ ID NO: 837286 - RNA, 24 nt, Human
caaauacagugucccccgccccca

SEQ ID NO: 837287 - RNA, 23 nt, Human
caaucuucacacaacagcagaca

SEQ ID NO: 837288 - RNA, 20 nt, Human
cacaacagcagacacaaagg

SEQ ID NO: 837289 - RNA, 23 nt, Human
cagcaaaauuggccccgccucuc

SEQ ID NO: 837290 - RNA, 19 nt, Human
cagccgccgccagcacuug

SEQ ID NO: 837291 - RNA, 19 nt, Human
caguccuagggaaggaugc

SEQ ID NO: 837292 - RNA, 20 nt, Human
cggaauuuuaaaacgaauac

SEQ ID NO: 837293 - RNA, 22 nt, Human
cugaagcuaccaaugucaauag

SEQ ID NO: 837294 - RNA, 22 nt, Human
gacacaaaggguuucagaaacg

SEQ ID NO: 837295 - RNA, 19 nt, Human
gacaggaaacaaagaaaaa

SEQ ID NO: 837296 - RNA, 18 nt, Human
gacucucuuuuacacccc

SEQ ID NO: 837297 - RNA, 19 nt, Human
ggaauuuuaaaacgaauac

SEQ ID NO: 837298 - RNA, 22 nt, Human
ggccccgccucuccugccacgc

SEQ ID NO: 837299 - RNA, 20 nt, Human
uacaagaucauagauuauga

SEQ ID NO: 837300 - RNA, 21 nt, Human
uacaagaucauagauuaugau

SEQ ID NO: 837301 - RNA, 24 nt, Human
uacaagaucauagauuaugaugga

SEQ ID NO: 837302 - RNA, 19 nt, Human
uacagugucccccgccccc

SEQ ID NO: 837303 - RNA, 21 nt, Human
uaccugugacucucuuuuaca

SEQ ID NO: 837304 - RNA, 20 nt, Human
uagccucuucaggaagcaac

SEQ ID NO: 837305 - RNA, 20 nt, Human
uaggacccuggcaucuacuc

SEQ ID NO: 837306 - RNA, 19 nt, Human
ucaaaagcaaacacucuau

SEQ ID NO: 837307 - RNA, 27 nt, Human
ucaaauacagugucccccgcccccaau

SEQ ID NO: 837308 - RNA, 18 nt, Human
ucaacuuaggacccuggc

SEQ ID NO: 837309 - RNA, 23 nt, Human
ucaaugacaggaaacaaagaaaa

SEQ ID NO: 837310 - RNA, 22 nt, Human
uccauuaucaaaagcaaacacu

SEQ ID NO: 837311 - RNA, 20 nt, Human
ugcaguaacuaaggaaaauc

SEQ ID NO: 837312 - RNA, 18 nt, Human
ugccgcagcugcaagccc

SEQ ID NO: 837313 - RNA, 21 nt, Human
ugcuagaggcucaaagcuuac

SEQ ID NO: 837314 - RNA, 23 nt, Human
uugggguaccugugacucucuuu

SEQ ID NO: 837315 - RNA, 21 nt, Human
uuuaaacauauuguuauucuc

SEQ ID NO: 837316 - RNA, 20 nt, Human
uuucagaaacgucagauaug

SEQ ID NO: 837317 - RNA, 20 nt, Human
cuccggggcucaaacucccc

SEQ ID NO: 837318 - RNA, 20 nt, Human
gcggggugggcggggggagc

SEQ ID NO: 837319 - RNA, 21 nt, Human
ggcagccgcucugcuccgggg

SEQ ID NO: 837320 - RNA, 22 nt, Human
uaccaagcuauaaauuagaggc

SEQ ID NO: 837321 - RNA, 20 nt, Human
uagaggcggcggggugggcg

SEQ ID NO: 837322 - RNA, 19 nt, Human
uccggggcucaaacucccc

SEQ ID NO: 837323 - RNA, 22 nt, Human
aaaaaaaaaaaaaagcaugcaa

SEQ ID NO: 837324 - RNA, 21 nt, Human
aaaaagcaucuuuacaauucg

SEQ ID NO: 837325 - RNA, 20 nt, Human
aaacaucauggcacauuauc

SEQ ID NO: 837326 - RNA, 23 nt, Human
aaagaucaaauucuaaccaugga

SEQ ID NO: 837327 - RNA, 18 nt, Human
aagcuacuguuaauugaa

SEQ ID NO: 837328 - RNA, 21 nt, Human
acaggaagauauguuucaaua

SEQ ID NO: 837329 - RNA, 21 nt, Human
acccacuauauaauagugaac

SEQ ID NO: 837330 - RNA, 19 nt, Human
acucagcugcaaagauaag

SEQ ID NO: 837331 - RNA, 19 nt, Human
acuccagccugggcgccag

SEQ ID NO: 837332 - RNA, 24 nt, Human
acuguacuccagccugggcgccag

SEQ ID NO: 837333 - RNA, 26 nt, Human
acuguacuccagccugggcgccagag

SEQ ID NO: 837334 - RNA, 24 nt, Human
agaaaaaaaaaaaaaagcaugcaa

SEQ ID NO: 837335 - RNA, 24 nt, Human
agacauacugggucaaacaaugug

SEQ ID NO: 837336 - RNA, 20 nt, Human
agcauuuugggagacuaagg

SEQ ID NO: 837337 - RNA, 22 nt, Human
agcauuuugggagacuaaggca

SEQ ID NO: 837338 - RNA, 18 nt, Human
agccaaauacauuccuca

SEQ ID NO: 837339 - RNA, 22 nt, Human
agccgggcaugguggcucacuc

SEQ ID NO: 837340 - RNA, 22 nt, Human
aggaagauauguuucaauacug

SEQ ID NO: 837341 - RNA, 22 nt, Human
aggaccccgacaccugcgccac

SEQ ID NO: 837342 - RNA, 23 nt, Human
aggaguucaagaccagccugggc

SEQ ID NO: 837343 - RNA, 21 nt, Human
aggaucacuugagcccaaguc

SEQ ID NO: 837344 - RNA, 26 nt, Human
aggcagauggcaugagcucaggaguu

SEQ ID NO: 837345 - RNA, 26 nt, Human
aggcaggcagauggcaugagcucagg

SEQ ID NO: 837346 - RNA, 24 nt, Human
aggcucagguaggaggaucacuug

SEQ ID NO: 837347 - RNA, 18 nt, Human
agguaggaggaucacuug

SEQ ID NO: 837348 - RNA, 23 nt, Human
agguaggaggaucacuugagccc

SEQ ID NO: 837349 - RNA, 21 nt, Human
agugcacaccuguagucccag

SEQ ID NO: 837350 - RNA, 24 nt, Human
aucaugccacuguacuccagccug

SEQ ID NO: 837351 - RNA, 20 nt, Human
augaaauaugcaaaucugcc

SEQ ID NO: 837352 - RNA, 22 nt, Human
augccacuguacuccagccugg

SEQ ID NO: 837353 - RNA, 21 nt, Human
auggacugguucauaucacac

SEQ ID NO: 837354 - RNA, 21 nt, Human
caaaucugccaagagaaauua

SEQ ID NO: 837355 - RNA, 24 nt, Human
caacagaacacauaaauuagaaaa

SEQ ID NO: 837356 - RNA, 22 nt, Human
caacuccguaacuccccaucug

SEQ ID NO: 837357 - RNA, 19 nt, Human
caagaccagccugggcaag

SEQ ID NO: 837358 - RNA, 20 nt, Human
caagucaaggcugaagugag

SEQ ID NO: 837359 - RNA, 19 nt, Human
cacaccuguagucccaguu

SEQ ID NO: 837360 - RNA, 19 nt, Human
caccuguagucccaguuac

SEQ ID NO: 837361 - RNA, 24 nt, Human
caccuguagucccaguuacucaga

SEQ ID NO: 837362 - RNA, 24 nt, Human
cacuccuguaaucccagcauuuug

SEQ ID NO: 837363 - RNA, 18 nt, Human
cacuguacuccagccugg

SEQ ID NO: 837364 - RNA, 19 nt, Human
cacuguacuccagccuggg

SEQ ID NO: 837365 - RNA, 20 nt, Human
cacuguacuccagccugggc

SEQ ID NO: 837366 - RNA, 20 nt, Human
cacuguacuccagccugggc

SEQ ID NO: 837367 - RNA, 24 nt, Human
cacuguacuccagccugggcgcca

SEQ ID NO: 837368 - RNA, 19 nt, Human
cagagcaagacccugucuc

SEQ ID NO: 837369 - RNA, 24 nt, Human
cagcauuuugggagacuaaggcag

SEQ ID NO: 837370 - RNA, 25 nt, Human
cagcauuuugggagacuaaggcagg

SEQ ID NO: 837371 - RNA, 27 nt, Human
caguaacucccagggacuaaggccaaa

SEQ ID NO: 837372 - RNA, 20 nt, Human
ccacuguacuccagccuggg

SEQ ID NO: 837373 - RNA, 20 nt, Human
ccacuguacuccagccuggg

SEQ ID NO: 837374 - RNA, 21 nt, Human
ccacuguacuccagccugggc

SEQ ID NO: 837375 - RNA, 22 nt, Human
ccacuguacuccagccugggcg

SEQ ID NO: 837376 - RNA, 22 nt, Human
ccacuguacuccagccugggcg

SEQ ID NO: 837377 - RNA, 23 nt, Human
ccacuguacuccagccugggcgc

SEQ ID NO: 837378 - RNA, 18 nt, Human
ccagauaccuggguauga

SEQ ID NO: 837379 - RNA, 21 nt, Human
ccgacaccugcgccaccggcu

SEQ ID NO: 837380 - RNA, 21 nt, Human
ccuguagucccaguuacucag

SEQ ID NO: 837381 - RNA, 19 nt, Human
cggcaagcaaaauaauguu

SEQ ID NO: 837382 - RNA, 19 nt, Human
cgggagaaaaaaaaaaaaa

SEQ ID NO: 837383 - RNA, 22 nt, Human
cgggagaaaaaaaaaaaaaagc

SEQ ID NO: 837384 - RNA, 21 nt, Human
cucacuccuguaaucccagca

SEQ ID NO: 837385 - RNA, 24 nt, Human
cucccaggcugggcgcucgaggac

SEQ ID NO: 837386 - RNA, 24 nt, Human
cuccuguaaucccagcauuuuggg

SEQ ID NO: 837387 - RNA, 20 nt, Human
cucuuccaugcaacugccag

SEQ ID NO: 837388 - RNA, 20 nt, Human
gacaacagaaaacaggaaga

SEQ ID NO: 837389 - RNA, 21 nt, Human
gagaaaaaaaaaaaaaagcau

SEQ ID NO: 837390 - RNA, 18 nt, Human
gagugcacaccuguaguc

SEQ ID NO: 837391 - RNA, 18 nt, Human
gauauuuuucuucuuuuc

SEQ ID NO: 837392 - RNA, 21 nt, Human
gaucacuugagcccaagucaa

SEQ ID NO: 837393 - RNA, 21 nt, Human
gcaagguggcaagauccugcc

SEQ ID NO: 837394 - RNA, 21 nt, Human
gcaggcagauggcaugagcuc

SEQ ID NO: 837395 - RNA, 24 nt, Human
gcaugagcucaggaguucaagacc

SEQ ID NO: 837396 - RNA, 20 nt, Human
gcaugccagcggcaagcaaa

SEQ ID NO: 837397 - RNA, 22 nt, Human
gcaugccagcggcaagcaaaau

SEQ ID NO: 837398 - RNA, 18 nt, Human
gcaugguggcucacuccu

SEQ ID NO: 837399 - RNA, 22 nt, Human
gccacuguacuccagccugggc

SEQ ID NO: 837400 - RNA, 23 nt, Human
gccacuguacuccagccugggcg

SEQ ID NO: 837401 - RNA, 21 nt, Human
gccagagcaagacccugucuc

SEQ ID NO: 837402 - RNA, 22 nt, Human
ggacaccuuucaucuaguccaa

SEQ ID NO: 837403 - RNA, 23 nt, Human
ggagugcacaccuguagucccag

SEQ ID NO: 837404 - RNA, 23 nt, Human
ggcaugccagcggcaagcaaaau

SEQ ID NO: 837405 - RNA, 23 nt, Human
ggcaugguggcucacuccuguaa

SEQ ID NO: 837406 - RNA, 19 nt, Human
gggagaaaaaaaaaaaaaa

SEQ ID NO: 837407 - RNA, 24 nt, Human
gguggcucacuccuguaaucccag

SEQ ID NO: 837408 - RNA, 26 nt, Human
guaaaaaaacaaaaauuucaacagaa

SEQ ID NO: 837409 - RNA, 18 nt, Human
guaaaggaacaacuccgu

SEQ ID NO: 837410 - RNA, 24 nt, Human
guacuccagccugggcgccagagc

SEQ ID NO: 837411 - RNA, 24 nt, Human
guuuauuuaaaaccaucaguuuuu

SEQ ID NO: 837412 - RNA, 22 nt, Human
uaaaggaacaacuccguaacuc

SEQ ID NO: 837413 - RNA, 24 nt, Human
uaacaaccaaguauguacaauauu

SEQ ID NO: 837414 - RNA, 23 nt, Human
uaacucccagggacuaaggccaa

SEQ ID NO: 837415 - RNA, 20 nt, Human
uaacugacagugaguguugg

SEQ ID NO: 837416 - RNA, 24 nt, Human
uaaggcaggcagauggcaugagcu

SEQ ID NO: 837417 - RNA, 21 nt, Human
uacaaaaacuuaguguguaau

SEQ ID NO: 837418 - RNA, 23 nt, Human
uacuccagccugggcgccagagc

SEQ ID NO: 837419 - RNA, 18 nt, Human
uagugaauuaguuuauuu

SEQ ID NO: 837420 - RNA, 21 nt, Human
uaguguguaaucaaagccaaa

SEQ ID NO: 837421 - RNA, 24 nt, Human
uauaauagugaacuaaauauguuu

SEQ ID NO: 837422 - RNA, 24 nt, Human
ucaaggcugaagugagccaagauc

SEQ ID NO: 837423 - RNA, 23 nt, Human
ucaugccacuguacuccagccug

SEQ ID NO: 837424 - RNA, 19 nt, Human
uccaugcaacugccagccg

SEQ ID NO: 837425 - RNA, 21 nt, Human
uccaugcaacugccagccggg

SEQ ID NO: 837426 - RNA, 22 nt, Human
uccaugcaacugccagccgggc

SEQ ID NO: 837427 - RNA, 19 nt, Human
ucccagggacuaaggccaa

SEQ ID NO: 837428 - RNA, 21 nt, Human
uccccaucugcuuuaucuaca

SEQ ID NO: 837429 - RNA, 20 nt, Human
ugaagccuguccaacgccag

SEQ ID NO: 837430 - RNA, 19 nt, Human
ugaauggacugguucauau

SEQ ID NO: 837431 - RNA, 18 nt, Human
ugccaagagaaauuagau

SEQ ID NO: 837432 - RNA, 25 nt, Human
ugcuguauuuaccuuuuuccuuuca

SEQ ID NO: 837433 - RNA, 21 nt, Human
ugcuuugaaacugucaauagc

SEQ ID NO: 837434 - RNA, 21 nt, Human
uggacaccuuucaucuagucc

SEQ ID NO: 837435 - RNA, 21 nt, Human
uggcucacuccuguaauccca

SEQ ID NO: 837436 - RNA, 22 nt, Human
uggcucacuccuguaaucccag

SEQ ID NO: 837437 - RNA, 24 nt, Human
uggcucacuccuguaaucccagca

SEQ ID NO: 837438 - RNA, 24 nt, Human
ugguggcucacuccuguaauccca

SEQ ID NO: 837439 - RNA, 21 nt, Human
ugucuacaagacauacugggu

SEQ ID NO: 837440 - RNA, 20 nt, Human
uuaguuuauuuaaaaccauc

SEQ ID NO: 837441 - RNA, 24 nt, Human
uuuuauuagugaauuaguuuauuu

SEQ ID NO: 837442 - RNA, 23 nt, Human
aaaaccaaccaacacuuucucau

SEQ ID NO: 837443 - RNA, 24 nt, Human
aaagaaaccaauuuaaugccacca

SEQ ID NO: 837444 - RNA, 22 nt, Human
aacaaaaaaucucacaccuaaa

SEQ ID NO: 837445 - RNA, 22 nt, Human
aacagauuuugucugucaccag

SEQ ID NO: 837446 - RNA, 21 nt, Human
aacauuacagaugucugggcu

SEQ ID NO: 837447 - RNA, 24 nt, Human
aagcuacaaaucuaaguauucaca

SEQ ID NO: 837448 - RNA, 19 nt, Human
aaguauucuccaaagguaa

SEQ ID NO: 837449 - RNA, 20 nt, Human
aaugcaaaauaauuagaagu

SEQ ID NO: 837450 - RNA, 18 nt, Human
acaaaagugccaccaaag

SEQ ID NO: 837451 - RNA, 23 nt, Human
acaaucuagaagcaaucuguuua

SEQ ID NO: 837452 - RNA, 23 nt, Human
accagauuuuaaaaccaaccaac

SEQ ID NO: 837453 - RNA, 20 nt, Human
acccagccuccccuuguuuu

SEQ ID NO: 837454 - RNA, 22 nt, Human
agaaaaggaggaaaauaaaggg

SEQ ID NO: 837455 - RNA, 19 nt, Human
agccagaaaguaaagggcu

SEQ ID NO: 837456 - RNA, 22 nt, Human
agccagaaauaguuuuugugcu

SEQ ID NO: 837457 - RNA, 23 nt, Human
aggaaaauaaagggggaaaggga

SEQ ID NO: 837458 - RNA, 25 nt, Human
aggggaugcuucagccagaaaguaa

SEQ ID NO: 837459 - RNA, 24 nt, Human
aguaguaggauauuauagaaaaga

SEQ ID NO: 837460 - RNA, 19 nt, Human
auauccacacacaaauaug

SEQ ID NO: 837461 - RNA, 20 nt, Human
aucucacaccuaaauucuag

SEQ ID NO: 837462 - RNA, 19 nt, Human
augguuguucuauguucca

SEQ ID NO: 837463 - RNA, 20 nt, Human
caaaaugguauccaaauuga

SEQ ID NO: 837464 - RNA, 22 nt, Human
caaaaugguauccaaauugauc

SEQ ID NO: 837465 - RNA, 22 nt, Human
caccaaacauaagccugcuaua

SEQ ID NO: 837466 - RNA, 25 nt, Human
caccagugguugacaaacuauggcc

SEQ ID NO: 837467 - RNA, 20 nt, Human
cagcaaccaaacaaaaggga

SEQ ID NO: 837468 - RNA, 23 nt, Human
cagcaaccaaacaaaagggauac

SEQ ID NO: 837469 - RNA, 23 nt, Human
caugcacagggcaaacaacugua

SEQ ID NO: 837470 - RNA, 18 nt, Human
cauggcacuccaagggga

SEQ ID NO: 837471 - RNA, 18 nt, Human
cauucaaaacaguuuggc

SEQ ID NO: 837472 - RNA, 22 nt, Human
ccaaacauaagccugcuauacc

SEQ ID NO: 837473 - RNA, 18 nt, Human
ccagaaaguaaagggcug

SEQ ID NO: 837474 - RNA, 18 nt, Human
ccgccgccgccucccgcc

SEQ ID NO: 837475 - RNA, 20 nt, Human
ccgccgccgccucccgccuc

SEQ ID NO: 837476 - RNA, 21 nt, Human
ccgccgccucccgccuccgcc

SEQ ID NO: 837477 - RNA, 22 nt, Human
ccgccgccucccgccuccgccu

SEQ ID NO: 837478 - RNA, 28 nt, Human
ccgccgccucccgccuccgccucccggg

SEQ ID NO: 837479 - RNA, 25 nt, Human
ccgccucccgccuccgccucccggg

SEQ ID NO: 837480 - RNA, 23 nt, Human
ccgccuccgccucccgggcuccu

SEQ ID NO: 837481 - RNA, 18 nt, Human
ccgcgcgccgccgccgcc

SEQ ID NO: 837482 - RNA, 23 nt, Human
ccucccgccuccgccucccgggc

SEQ ID NO: 837483 - RNA, 19 nt, Human
cgccucccgggcuccugcc

SEQ ID NO: 837484 - RNA, 19 nt, Human
cgccuccgccucccgggcu

SEQ ID NO: 837485 - RNA, 27 nt, Human
cgcgcgccgccgccgccucccgccucc

SEQ ID NO: 837486 - RNA, 20 nt, Human
cucauuuuuacagcuaagac

SEQ ID NO: 837487 - RNA, 23 nt, Human
cucccgccuccgccucccgggcu

SEQ ID NO: 837488 - RNA, 27 nt, Human
cucucuacuaaacacauuacuuuugga

SEQ ID NO: 837489 - RNA, 19 nt, Human
cuuugucauucaacucaca

SEQ ID NO: 837490 - RNA, 26 nt, Human
gaaauaaaccagaacuugagcuuaga

SEQ ID NO: 837491 - RNA, 19 nt, Human
gacaaacuauggcccacag

SEQ ID NO: 837492 - RNA, 22 nt, Human
gacucugccugagaaauuuuau

SEQ ID NO: 837493 - RNA, 18 nt, Human
gcuccugccgccgccgcc

SEQ ID NO: 837494 - RNA, 19 nt, Human
gcugccgcugccgcugcug

SEQ ID NO: 837495 - RNA, 18 nt, Human
ggaguuaccagauuuuaa

SEQ ID NO: 837496 - RNA, 22 nt, Human
ggcaaugugauuauugcauaau

SEQ ID NO: 837497 - RNA, 19 nt, Human
ggcuaaacccagccucccc

SEQ ID NO: 837498 - RNA, 18 nt, Human
gggaaagggaaaaagggg

SEQ ID NO: 837499 - RNA, 23 nt, Human
guagaacaauacaaaagcccucg

SEQ ID NO: 837500 - RNA, 19 nt, Human
guauggagcuaggaaaacc

SEQ ID NO: 837501 - RNA, 22 nt, Human
gugacucagcaaccaaacaaaa

SEQ ID NO: 837502 - RNA, 20 nt, Human
guggcuuuucuguuagguuu

SEQ ID NO: 837503 - RNA, 21 nt, Human
uaaaaccaaccaacacuuucu

SEQ ID NO: 837504 - RNA, 18 nt, Human
uaaagggggaaagggaaa

SEQ ID NO: 837505 - RNA, 20 nt, Human
uaacacuugaucauuaagca

SEQ ID NO: 837506 - RNA, 23 nt, Human
uaacuaagguuuuacaccagugg

SEQ ID NO: 837507 - RNA, 20 nt, Human
uaaguauaaagucauaugcc

SEQ ID NO: 837508 - RNA, 19 nt, Human
uacaaaagcccucgugugg

SEQ ID NO: 837509 - RNA, 23 nt, Human
uaccagauuuuaaaaccaaccaa

SEQ ID NO: 837510 - RNA, 23 nt, Human
uagaagcaaucuguuuacaaaag

SEQ ID NO: 837511 - RNA, 19 nt, Human
uagaauguacuguauaucc

SEQ ID NO: 837512 - RNA, 19 nt, Human
uagacuaucauuaguuuga

SEQ ID NO: 837513 - RNA, 24 nt, Human
uagaguuuagugggaagccuauuu

SEQ ID NO: 837514 - RNA, 18 nt, Human
uagcagaguaaacgauuc

SEQ ID NO: 837515 - RNA, 19 nt, Human
uaggugugugguauggagc

SEQ ID NO: 837516 - RNA, 18 nt, Human
uaguuuuugugcuggaua

SEQ ID NO: 837517 - RNA, 23 nt, Human
ucaaaacaguuuggcaccuuucc

SEQ ID NO: 837518 - RNA, 23 nt, Human
ucacagaugugucuuaggcuugg

SEQ ID NO: 837519 - RNA, 20 nt, Human
ucagccagaaauaguuuuug

SEQ ID NO: 837520 - RNA, 19 nt, Human
uccaaagguaaguauuuga

SEQ ID NO: 837521 - RNA, 20 nt, Human
uccacacacaaauaugggua

SEQ ID NO: 837522 - RNA, 19 nt, Human
uccaugaaauaaaccagaa

SEQ ID NO: 837523 - RNA, 20 nt, Human
ucccgccuccgccucccggg

SEQ ID NO: 837524 - RNA, 22 nt, Human
uccgcgcgccgccgccgccucc

SEQ ID NO: 837525 - RNA, 23 nt, Human
uccgcgcgccgccgccgccuccc

SEQ ID NO: 837526 - RNA, 24 nt, Human
uccgcgcgccgccgccgccucccg

SEQ ID NO: 837527 - RNA, 24 nt, Human
ucuagaaugugauuaagcuacaaa

SEQ ID NO: 837528 - RNA, 22 nt, Human
ucuccgcgcgccgccgccgccu

SEQ ID NO: 837529 - RNA, 18 nt, Human
ucucuggggaucccauuu

SEQ ID NO: 837530 - RNA, 21 nt, Human
ugaaguuuacuucauaaauua

SEQ ID NO: 837531 - RNA, 20 nt, Human
ugaauaguugugacagagac

SEQ ID NO: 837532 - RNA, 23 nt, Human
ugacacuaaauauuauguggcuu

SEQ ID NO: 837533 - RNA, 18 nt, Human
ugacgaggaucucuacag

SEQ ID NO: 837534 - RNA, 19 nt, Human
ugacucagcaaccaaacaa

SEQ ID NO: 837535 - RNA, 21 nt, Human
ugccugauuuccucaaaccuu

SEQ ID NO: 837536 - RNA, 23 nt, Human
uggccucacucuuacuuguccuu

SEQ ID NO: 837537 - RNA, 24 nt, Human
ugggaaacaaaaaaucucacaccu

SEQ ID NO: 837538 - RNA, 21 nt, Human
ugucugggcuaauacaaaaac

SEQ ID NO: 837539 - RNA, 20 nt, Human
ugucugucaccagugcaaaa

SEQ ID NO: 837540 - RNA, 23 nt, Human
ugugccaauuccugguuuacacu

SEQ ID NO: 837541 - RNA, 23 nt, Human
uuaaugccaccaaacauaagccu

SEQ ID NO: 837542 - RNA, 22 nt, Human
uucagccagaaaguaaagggcu

SEQ ID NO: 837543 - RNA, 19 nt, Human
uucauaauacagguuuagg

SEQ ID NO: 837544 - RNA, 28 nt, Human
uucaugcacagggcaaacaacuguauuc

SEQ ID NO: 837545 - RNA, 18 nt, Human
uuugcaucuggacaaaau

SEQ ID NO: 837546 - RNA, 18 nt, Human
uuuggcaccuuuccauga

SEQ ID NO: 837547 - RNA, 22 nt, Human
aaaaaggaagacaaaaagccaa

SEQ ID NO: 837548 - RNA, 18 nt, Human
aaaaauacaaccaccaca

SEQ ID NO: 837549 - RNA, 20 nt, Human
aaaagcacacagguaaggca

SEQ ID NO: 837550 - RNA, 21 nt, Human
aaaaggaaacugagcuuuaaa

SEQ ID NO: 837551 - RNA, 23 nt, Human
aaacaaaaaggaaacugagcuuu

SEQ ID NO: 837552 - RNA, 22 nt, Human
aaagcacacagguaaggcacaa

SEQ ID NO: 837553 - RNA, 20 nt, Human
aaauacacauuuugcugcaa

SEQ ID NO: 837554 - RNA, 22 nt, Human
aacaaauuaaauacugaggcac

SEQ ID NO: 837555 - RNA, 19 nt, Human
aacaggacaaguaacagau

SEQ ID NO: 837556 - RNA, 22 nt, Human
aagcaagaaaaagaugcaucug

SEQ ID NO: 837557 - RNA, 20 nt, Human
aagcauuuaaaaaggaagac

SEQ ID NO: 837558 - RNA, 20 nt, Human
aagccaauuguagauuacaa

SEQ ID NO: 837559 - RNA, 23 nt, Human
aaguaaaauuuacucagcaacua

SEQ ID NO: 837560 - RNA, 25 nt, Human
acacacauacauauauacacacaca

SEQ ID NO: 837561 - RNA, 19 nt, Human
agacaaaaagccaaacagg

SEQ ID NO: 837562 - RNA, 24 nt, Human
agacaaaaagccaaacaggaauug

SEQ ID NO: 837563 - RNA, 18 nt, Human
aggaagacaaaaagccaa

SEQ ID NO: 837564 - RNA, 18 nt, Human
auaaaaccuauaaaagau

SEQ ID NO: 837565 - RNA, 18 nt, Human
auaaaaccuauaaaagau

SEQ ID NO: 837566 - RNA, 22 nt, Human
auaacagaggcacuaacauauc

SEQ ID NO: 837567 - RNA, 22 nt, Human
auacacacauacauauauacac

SEQ ID NO: 837568 - RNA, 25 nt, Human
auacaucuauauauacacacacaua

SEQ ID NO: 837569 - RNA, 27 nt, Human
auauauauacaucuauauauacacaca

SEQ ID NO: 837570 - RNA, 19 nt, Human
auuuuuccaauaucugcca

SEQ ID NO: 837571 - RNA, 26 nt, Human
caacgcauacaauaaaacaaaaagga

SEQ ID NO: 837572 - RNA, 25 nt, Human
cacaaaagcacacagguaaggcaca

SEQ ID NO: 837573 - RNA, 28 nt, Human
cacacacauacacacauacauauauaca

SEQ ID NO: 837574 - RNA, 21 nt, Human
cacagguaaggcacaauaggg

SEQ ID NO: 837575 - RNA, 25 nt, Human
cacauacacacauacauauauacac

SEQ ID NO: 837576 - RNA, 25 nt, Human
cacauacauauauacacacacauua

SEQ ID NO: 837577 - RNA, 20 nt, Human
cagcauugcugccucacugc

SEQ ID NO: 837578 - RNA, 22 nt, Human
cagucuuagaaauggaagaaaa

SEQ ID NO: 837579 - RNA, 22 nt, Human
cauauacauccacuuacacaua

SEQ ID NO: 837580 - RNA, 24 nt, Human
caucaaacuucagaacuucucaaa

SEQ ID NO: 837581 - RNA, 18 nt, Human
caugacccaaaauugcaa

SEQ ID NO: 837582 - RNA, 20 nt, Human
cauucacucuugcaacaggu

SEQ ID NO: 837583 - RNA, 23 nt, Human
cgcauacaauaaaacaaaaagga

SEQ ID NO: 837584 - RNA, 20 nt, Human
cuaauacuuccagguguuug

SEQ ID NO: 837585 - RNA, 24 nt, Human
cucuguguguguauauauauacau

SEQ ID NO: 837586 - RNA, 18 nt, Human
cugagcuuuaaauacaag

SEQ ID NO: 837587 - RNA, 25 nt, Human
cuuaaccagaaaacgugcauuaucu

SEQ ID NO: 837588 - RNA, 21 nt, Human
cuuccagguguuuggcuguuu

SEQ ID NO: 837589 - RNA, 27 nt, Human
gaaaacgugcauuaucugugcaaguuc

SEQ ID NO: 837590 - RNA, 19 nt, Human
gugcccacaaaagcacaca

SEQ ID NO: 837591 - RNA, 20 nt, Human
uaaaacaaaaaggaaacuga

SEQ ID NO: 837592 - RNA, 22 nt, Human
uaaaacaaaaaggaaacugagc

SEQ ID NO: 837593 - RNA, 20 nt, Human
uaaaaugccacaacuauuuu

SEQ ID NO: 837594 - RNA, 21 nt, Human
uaaaaugccacaacuauuuuu

SEQ ID NO: 837595 - RNA, 22 nt, Human
uaaacaaggugcccacaaaagc

SEQ ID NO: 837596 - RNA, 22 nt, Human
uaacugagcuccaaaaacugaa

SEQ ID NO: 837597 - RNA, 22 nt, Human
uacacacacauacacacauaca

SEQ ID NO: 837598 - RNA, 19 nt, Human
uacacauucccaucugucu

SEQ ID NO: 837599 - RNA, 29 nt, Human
uacauauauacacacacauuagauuaugg

SEQ ID NO: 837600 - RNA, 22 nt, Human
uacuaugucauggcccuaguau

SEQ ID NO: 837601 - RNA, 18 nt, Human
uacuuucaccaccaccag

SEQ ID NO: 837602 - RNA, 20 nt, Human
uagccuguaggaacuaugca

SEQ ID NO: 837603 - RNA, 24 nt, Human
uauacacacacauacacacauaca

SEQ ID NO: 837604 - RNA, 28 nt, Human
uauacacacacauacacacauacauaua

SEQ ID NO: 837605 - RNA, 24 nt, Human
uauauacacacacauuagauuaug

SEQ ID NO: 837606 - RNA, 22 nt, Human
uauauacaucuauauauacaca

SEQ ID NO: 837607 - RNA, 19 nt, Human
uauauauacacacacauac

SEQ ID NO: 837608 - RNA, 21 nt, Human
uauauauauacaucuauauau

SEQ ID NO: 837609 - RNA, 23 nt, Human
uauauauauacaucuauauauac

SEQ ID NO: 837610 - RNA, 24 nt, Human
uauauaucucuguguguguauaua

SEQ ID NO: 837611 - RNA, 20 nt, Human
uaugcaaaaguacagccaua

SEQ ID NO: 837612 - RNA, 23 nt, Human
uauguauauaucucugugugugu

SEQ ID NO: 837613 - RNA, 24 nt, Human
uauguauauaucucugugugugua

SEQ ID NO: 837614 - RNA, 28 nt, Human
uauguauauaucucuguguguguauaua

SEQ ID NO: 837615 - RNA, 21 nt, Human
uauguuuuagaagcaagaaaa

SEQ ID NO: 837616 - RNA, 25 nt, Human
ucaaauaccuaguuauuauacacau

SEQ ID NO: 837617 - RNA, 23 nt, Human
ucacacaaaaucauacucagaca

SEQ ID NO: 837618 - RNA, 19 nt, Human
ucagaacuuucacacaaaa

SEQ ID NO: 837619 - RNA, 20 nt, Human
uccaaaaacugaaugaaaua

SEQ ID NO: 837620 - RNA, 22 nt, Human
ucggcuuaacaguuucagguaa

SEQ ID NO: 837621 - RNA, 22 nt, Human
ucuaugcaaaaguacagccaua

SEQ ID NO: 837622 - RNA, 20 nt, Human
ucugucuugcagggagggau

SEQ ID NO: 837623 - RNA, 24 nt, Human
ugaaacaaauuaaauacugaggca

SEQ ID NO: 837624 - RNA, 18 nt, Human
ugaaaucauaaacaguaa

SEQ ID NO: 837625 - RNA, 19 nt, Human
ugaggcacaaagcaacagu

SEQ ID NO: 837626 - RNA, 22 nt, Human
ugaggcacaaagcaacagucaa

SEQ ID NO: 837627 - RNA, 21 nt, Human
ugcaaacccaacgcauacaau

SEQ ID NO: 837628 - RNA, 26 nt, Human
ugcaaacccaacgcauacaauaaaac

SEQ ID NO: 837629 - RNA, 28 nt, Human
ugcaaacccaacgcauacagcgccggcg

SEQ ID NO: 837630 - RNA, 18 nt, Human
ugcaacaaugugcccugc

SEQ ID NO: 837631 - RNA, 19 nt, Human
ugcuuaauaaagucagugu

SEQ ID NO: 837632 - RNA, 22 nt, Human
uggaacguucagagauguauuc

SEQ ID NO: 837633 - RNA, 18 nt, Human
ugggggucacuaagcuca

SEQ ID NO: 837634 - RNA, 20 nt, Human
uguauauauauacaucuaua

SEQ ID NO: 837635 - RNA, 24 nt, Human
uguguauauauauacaucuauaua

SEQ ID NO: 837636 - RNA, 22 nt, Human
uuaugaauaaaauggaaagcuu

SEQ ID NO: 837637 - RNA, 18 nt, Human
uucaugcugcaaacccaa

SEQ ID NO: 837638 - RNA, 19 nt, Human
uuccucaugcaaaacuuua

SEQ ID NO: 837639 - RNA, 24 nt, Human
uugcucacauaaauuugacucuau

SEQ ID NO: 837640 - RNA, 20 nt, Human
uuuaaacuugacauauaaca

SEQ ID NO: 837641 - RNA, 25 nt, Human
uuuaaacuugacauauaacagaggc

SEQ ID NO: 837642 - RNA, 24 nt, Human
aaaaacaaaaaccaagaaaccaag

SEQ ID NO: 837643 - RNA, 23 nt, Human
aaaacaaaaaccaagaaaccaaa

SEQ ID NO: 837644 - RNA, 23 nt, Human
aaaaggaagcaaaucaaauacaa

SEQ ID NO: 837645 - RNA, 20 nt, Human
aaacaaaaaccaagaaacca

SEQ ID NO: 837646 - RNA, 26 nt, Human
aaacaaaaaccaagaaaccaaaagga

SEQ ID NO: 837647 - RNA, 22 nt, Human
aaaccaaaaggaagcaaaucaa

SEQ ID NO: 837648 - RNA, 21 nt, Human
aaagggaaaccccuccucaaa

SEQ ID NO: 837649 - RNA, 23 nt, Human
aagaaaccaaaaggaagcaaauc

SEQ ID NO: 837650 - RNA, 25 nt, Human
aagaaaccaaaaggaagcaguggga

SEQ ID NO: 837651 - RNA, 25 nt, Human
aagcaaaaacaaaaaccaagaaacc

SEQ ID NO: 837652 - RNA, 26 nt, Human
aagcaaaaacaaaaaccaagaaacca

SEQ ID NO: 837653 - RNA, 30 nt, Human
aagcaaaaacaaaaaccaagaaaccaaaag

SEQ ID NO: 837654 - RNA, 18 nt, Human
aaguugaacauaggguca

SEQ ID NO: 837655 - RNA, 23 nt, Human
aaucaagcaaaaacaaaaaccaa

SEQ ID NO: 837656 - RNA, 24 nt, Human
aaucaagcaaaaacaaaaaccaag

SEQ ID NO: 837657 - RNA, 23 nt, Human
acaaaaucaagcaaaaacaaaaa

SEQ ID NO: 837658 - RNA, 20 nt, Human
accaaaaggaagcaaaucaa

SEQ ID NO: 837659 - RNA, 21 nt, Human
accuccgguccuuuggcccug

SEQ ID NO: 837660 - RNA, 24 nt, Human
acggcuuggggcccgggcccgcag

SEQ ID NO: 837661 - RNA, 24 nt, Human
acuaaacuguagagaaaagacaaa

SEQ ID NO: 837662 - RNA, 18 nt, Human
agaaaagacaaaaucaag

SEQ ID NO: 837663 - RNA, 18 nt, Human
agcaaaaacaaaaaccaa

SEQ ID NO: 837664 - RNA, 22 nt, Human
agcacuaguaauuuguaacacu

SEQ ID NO: 837665 - RNA, 23 nt, Human
aggcgggggcgcagcggccucgg

SEQ ID NO: 837666 - RNA, 20 nt, Human
agugggcuucauagaaauuc

SEQ ID NO: 837667 - RNA, 27 nt, Human
caaaacuaaacuguagagaaaagacaa

SEQ ID NO: 837668 - RNA, 22 nt, Human
caaagggaaaccccuccucaau

SEQ ID NO: 837669 - RNA, 20 nt, Human
caagcaaaaacaaaaaccaa

SEQ ID NO: 837670 - RNA, 23 nt, Human
caaggcaucccugcggcggcccc

SEQ ID NO: 837671 - RNA, 26 nt, Human
cagccuccccuccggccgagcccucc

SEQ ID NO: 837672 - RNA, 20 nt, Human
cagcggccucggcugggccc

SEQ ID NO: 837673 - RNA, 20 nt, Human
caucgcugagucuccaaguc

SEQ ID NO: 837674 - RNA, 26 nt, Human
ccaagaaaccaaaaggaagcaaauca

SEQ ID NO: 837675 - RNA, 20 nt, Human
ccaggcacgugucugcgggg

SEQ ID NO: 837676 - RNA, 20 nt, Human
cccgccgcgccggggcccgc

SEQ ID NO: 837677 - RNA, 21 nt, Human
cccgccgcgccggggcccgcg

SEQ ID NO: 837678 - RNA, 22 nt, Human
cccuccggccgagcccuccccg

SEQ ID NO: 837679 - RNA, 25 nt, Human
cccuccggccgagcccuccccgccg

SEQ ID NO: 837680 - RNA, 20 nt, Human
cccuggccugacaucgcuga

SEQ ID NO: 837681 - RNA, 22 nt, Human
ccgcccgggaugggggucccug

SEQ ID NO: 837682 - RNA, 25 nt, Human
ccggccgcgcgccgcagccuccccu

SEQ ID NO: 837683 - RNA, 18 nt, Human
ccucggcugggcccgggc

SEQ ID NO: 837684 - RNA, 18 nt, Human
ccugcggcggccccaggg

SEQ ID NO: 837685 - RNA, 24 nt, Human
cgccgcagccuccccuccggccga

SEQ ID NO: 837686 - RNA, 21 nt, Human
cgccgcgccggggcccgcgcc

SEQ ID NO: 837687 - RNA, 20 nt, Human
cgggaugggggucccugggc

SEQ ID NO: 837688 - RNA, 21 nt, Human
cuccagaagcccucggagucc

SEQ ID NO: 837689 - RNA, 19 nt, Human
cuccggccgagcccucccc

SEQ ID NO: 837690 - RNA, 22 nt, Human
cugaggcccaaagggaaacccc

SEQ ID NO: 837691 - RNA, 21 nt, Human
gaaaagacaaaaucaagcaaa

SEQ ID NO: 837692 - RNA, 19 nt, Human
gagcggcacggcuuggggc

SEQ ID NO: 837693 - RNA, 24 nt, Human
gaggcgggggcgcagcggccucgg

SEQ ID NO: 837694 - RNA, 20 nt, Human
gcagccuccccuccggccga

SEQ ID NO: 837695 - RNA, 21 nt, Human
gcccgggcgagcggagcggca

SEQ ID NO: 837696 - RNA, 23 nt, Human
gcggcggccccagggcggcggca

SEQ ID NO: 837697 - RNA, 21 nt, Human
ggcaaaaagcauuuaaaauau

SEQ ID NO: 837698 - RNA, 24 nt, Human
ggcaagugagugggcuucauagaa

SEQ ID NO: 837699 - RNA, 20 nt, Human
ggccaguguggccauggccc

SEQ ID NO: 837700 - RNA, 20 nt, Human
ggccgagcccuccccgccgc

SEQ ID NO: 837701 - RNA, 19 nt, Human
gggcccgggcccgcagcga

SEQ ID NO: 837702 - RNA, 20 nt, Human
guccggagcgccgcccggga

SEQ ID NO: 837703 - RNA, 22 nt, Human
uaaaugacacaaaguugaacau

SEQ ID NO: 837704 - RNA, 24 nt, Human
uaagguaaaugacacaaaguugaa

SEQ ID NO: 837705 - RNA, 25 nt, Human
uaagguaaaugacacaaaguugaac

SEQ ID NO: 837706 - RNA, 23 nt, Human
uagcacuaguaauuuguaacacu

SEQ ID NO: 837707 - RNA, 18 nt, Human
ucaagcaaaaacaaaaac

SEQ ID NO: 837708 - RNA, 18 nt, Human
ucaauaaacucuuuuauu

SEQ ID NO: 837709 - RNA, 18 nt, Human
uccccgaaguucagggag

SEQ ID NO: 837710 - RNA, 23 nt, Human
ucccugggcaggguugccaaccc

SEQ ID NO: 837711 - RNA, 24 nt, Human
ugacaaaacuaaacuguagagaaa

SEQ ID NO: 837712 - RNA, 22 nt, Human
ugacacaaaguugaacauaggg

SEQ ID NO: 837713 - RNA, 18 nt, Human
ugagaacagucucaaauc

SEQ ID NO: 837714 - RNA, 21 nt, Human
ugagugggcuucauagaaauu

SEQ ID NO: 837715 - RNA, 21 nt, Human
uguugggcaaaaagcauuuaa

SEQ ID NO: 837716 - RNA, 21 nt, Human
uugagaacagucucaaauccu

SEQ ID NO: 837717 - RNA, 25 nt, Human
aaaccgucacagaagcagaaggaag

SEQ ID NO: 837718 - RNA, 18 nt, Human
aaagaauugaagggaugg

SEQ ID NO: 837719 - RNA, 18 nt, Human
aagacccucucccugccc

SEQ ID NO: 837720 - RNA, 23 nt, Human
acaaauaaugggagagggugugc

SEQ ID NO: 837721 - RNA, 20 nt, Human
acacgaguauugcuucccuu

SEQ ID NO: 837722 - RNA, 26 nt, Human
acagaagcagaaggaagaggaagucg

SEQ ID NO: 837723 - RNA, 23 nt, Human
acccugagugacggggugagaga

SEQ ID NO: 837724 - RNA, 19 nt, Human
agaagcaggcacugccuac

SEQ ID NO: 837725 - RNA, 24 nt, Human
agaggaagugguggauugcccagc

SEQ ID NO: 837726 - RNA, 22 nt, Human
agccaaauccccugcaccugau

SEQ ID NO: 837727 - RNA, 24 nt, Human
agcugggaggucuaggcugcagug

SEQ ID NO: 837728 - RNA, 23 nt, Human
aggcaggagaauugcuccagcug

SEQ ID NO: 837729 - RNA, 21 nt, Human
aggcauuuucugggccuggcu

SEQ ID NO: 837730 - RNA, 18 nt, Human
aggcugaggcaggagaau

SEQ ID NO: 837731 - RNA, 21 nt, Human
aggcugaggcaggagaauugc

SEQ ID NO: 837732 - RNA, 24 nt, Human
agggaaugaaagaauugaagggau

SEQ ID NO: 837733 - RNA, 19 nt, Human
agggugugcuugucagcau

SEQ ID NO: 837734 - RNA, 23 nt, Human
augggaauggccuucaaagcuug

SEQ ID NO: 837735 - RNA, 22 nt, Human
caaacaggugaggccuggcucu

SEQ ID NO: 837736 - RNA, 19 nt, Human
caacuguagucccagcuac

SEQ ID NO: 837737 - RNA, 24 nt, Human
caacuguagucccagcuacucaga

SEQ ID NO: 837738 - RNA, 20 nt, Human
caaugagucgugauugcgcc

SEQ ID NO: 837739 - RNA, 20 nt, Human
cacagcagcaacaaagguga

SEQ ID NO: 837740 - RNA, 21 nt, Human
cacccugagugacggggugag

SEQ ID NO: 837741 - RNA, 20 nt, Human
cacgccuucagccaaauccc

SEQ ID NO: 837742 - RNA, 21 nt, Human
cacuucagaaggucaugugcc

SEQ ID NO: 837743 - RNA, 25 nt, Human
cacuucagaaggucaugugccuggg

SEQ ID NO: 837744 - RNA, 19 nt, Human
cagaauccucagagcuggc

SEQ ID NO: 837745 - RNA, 18 nt, Human
cagcaacaaaggugacug

SEQ ID NO: 837746 - RNA, 24 nt, Human
cagcaacaaaggugacugaucagg

SEQ ID NO: 837747 - RNA, 24 nt, Human
cagcuacucagaaggcugaggcag

SEQ ID NO: 837748 - RNA, 26 nt, Human
cagcuagugggaucacuaacgcuuug

SEQ ID NO: 837749 - RNA, 19 nt, Human
caggagaucuguagugcac

SEQ ID NO: 837750 - RNA, 24 nt, Human
caggauggccacuuuucacaucuu

SEQ ID NO: 837751 - RNA, 21 nt, Human
caggugaggccuggcucuguc

SEQ ID NO: 837752 - RNA, 26 nt, Human
ccaaauccccugcaccugauggagca

SEQ ID NO: 837753 - RNA, 21 nt, Human
ccacaaggagggggcaacuca

SEQ ID NO: 837754 - RNA, 18 nt, Human
cccaggaaauaugcacgc

SEQ ID NO: 837755 - RNA, 18 nt, Human
ccccaagacccucucccu

SEQ ID NO: 837756 - RNA, 20 nt, Human
cccugcccgcccagcuccuc

SEQ ID NO: 837757 - RNA, 19 nt, Human
ccgcgccgccgcgccgccc

SEQ ID NO: 837758 - RNA, 21 nt, Human
ccgcgccgccgcgccgccccc

SEQ ID NO: 837759 - RNA, 27 nt, Human
ccucagacccugagccuggaaugcggg

SEQ ID NO: 837760 - RNA, 23 nt, Human
ccucccauuucagaggcucagga

SEQ ID NO: 837761 - RNA, 26 nt, Human
ccugcaccugauggagcagaagcagg

SEQ ID NO: 837762 - RNA, 22 nt, Human
cucccgcgccgccgcgccgccc

SEQ ID NO: 837763 - RNA, 20 nt, Human
cugggaggucuaggcugcag

SEQ ID NO: 837764 - RNA, 19 nt, Human
cugucuacacagcagcaac

SEQ ID NO: 837765 - RNA, 23 nt, Human
cugucuacacagcagcaacaaag

SEQ ID NO: 837766 - RNA, 24 nt, Human
cuuuagaaccaacuguagucccag

SEQ ID NO: 837767 - RNA, 19 nt, Human
gaaagaauugaagggaugg

SEQ ID NO: 837768 - RNA, 23 nt, Human
gaaauaugcacgccuucagccaa

SEQ ID NO: 837769 - RNA, 26 nt, Human
gaggcaggagaauugcuccagcuggg

SEQ ID NO: 837770 - RNA, 18 nt, Human
gaguauugcuucccuuuc

SEQ ID NO: 837771 - RNA, 23 nt, Human
gauucugugagcugacccggcuu

SEQ ID NO: 837772 - RNA, 19 nt, Human
gcagaucuucauccuccca

SEQ ID NO: 837773 - RNA, 24 nt, Human
gccacccugagugacggggugaga

SEQ ID NO: 837774 - RNA, 21 nt, Human
gcccagcuggagccuggggac

SEQ ID NO: 837775 - RNA, 28 nt, Human
ggaaauaugcacgccuucagccaaaucc

SEQ ID NO: 837776 - RNA, 22 nt, Human
gugaggccuggcucugucuaca

SEQ ID NO: 837777 - RNA, 27 nt, Human
uaaaaggcacaccuugaaccggggccc

SEQ ID NO: 837778 - RNA, 23 nt, Human
uaaacccacaaggagggggcaac

SEQ ID NO: 837779 - RNA, 25 nt, Human
uaagcaagaaaaugugauucuguga

SEQ ID NO: 837780 - RNA, 21 nt, Human
uagaucucugcggucauaggg

SEQ ID NO: 837781 - RNA, 18 nt, Human
uaggcugcagugagccaa

SEQ ID NO: 837782 - RNA, 24 nt, Human
ucagaaggucaugugccuggggca

SEQ ID NO: 837783 - RNA, 24 nt, Human
ucagacccugagccuggaaugcgg

SEQ ID NO: 837784 - RNA, 26 nt, Human
ucaguuuauucaccauacuuccccca

SEQ ID NO: 837785 - RNA, 23 nt, Human
uccauggcaucuuggccuaaaca

SEQ ID NO: 837786 - RNA, 22 nt, Human
ucccagccagaauccucagagc

SEQ ID NO: 837787 - RNA, 19 nt, Human
uccccaagacccucucccu

SEQ ID NO: 837788 - RNA, 23 nt, Human
uccccaagacccucucccugccc

SEQ ID NO: 837789 - RNA, 25 nt, Human
uccccaagacccucucccugcccgc

SEQ ID NO: 837790 - RNA, 22 nt, Human
ucccccaggaacccucucacug

SEQ ID NO: 837791 - RNA, 19 nt, Human
uccccugcaccugauggag

SEQ ID NO: 837792 - RNA, 26 nt, Human
uccccugcaccugauggagcagaagc

SEQ ID NO: 837793 - RNA, 23 nt, Human
ucuaugcucacaguguguuucag

SEQ ID NO: 837794 - RNA, 20 nt, Human
ucugugagcugacccggcuu

SEQ ID NO: 837795 - RNA, 18 nt, Human
ugacggggugagagauca

SEQ ID NO: 837796 - RNA, 19 nt, Human
ugacuucuggaaagagccc

SEQ ID NO: 837797 - RNA, 20 nt, Human
ugaggcaggagaauugcucc

SEQ ID NO: 837798 - RNA, 22 nt, Human
ugaggcaggagaauugcuccag

SEQ ID NO: 837799 - RNA, 27 nt, Human
ugaggcaggagaauugcuccagcucca

SEQ ID NO: 837800 - RNA, 19 nt, Human
ugagucgugauugcgccac

SEQ ID NO: 837801 - RNA, 22 nt, Human
ugcccagcuggagccuggggac

SEQ ID NO: 837802 - RNA, 22 nt, Human
ugcuaugauggguugaaaagag

SEQ ID NO: 837803 - RNA, 18 nt, Human
uggaaagagcccaacauc

SEQ ID NO: 837804 - RNA, 24 nt, Human
uggaaagagcccaacaucaucugg

SEQ ID NO: 837805 - RNA, 26 nt, Human
uggaaagagcccaacaucaucugguu

SEQ ID NO: 837806 - RNA, 22 nt, Human
uggaaugcgggggaacacaaug

SEQ ID NO: 837807 - RNA, 27 nt, Human
uggccuaaacaaacaggugaggccugg

SEQ ID NO: 837808 - RNA, 19 nt, Human
ugucacagcuagugggauc

SEQ ID NO: 837809 - RNA, 18 nt, Human
uucacaucagcucugucu

SEQ ID NO: 837810 - RNA, 22 nt, Human
uuuauucaccauacuuccccca

SEQ ID NO: 837811 - RNA, 18 nt, Human
uuuucugggccuggcugu

SEQ ID NO: 837812 - RNA, 27 nt, Human
uuuuuuuuuuuuuuuuuuuuuuugggg

SEQ ID NO: 837813 - RNA, 21 nt, Human
aaaaacguggaucauccacag

SEQ ID NO: 837814 - RNA, 22 nt, Human
aaaaacguggaucauccacagc

SEQ ID NO: 837815 - RNA, 22 nt, Human
aaaaggcggcggguucugugaa

SEQ ID NO: 837816 - RNA, 25 nt, Human
aaagauccucuuagggagaucucuc

SEQ ID NO: 837817 - RNA, 18 nt, Human
aacacaacuuccuaacac

SEQ ID NO: 837818 - RNA, 19 nt, Human
aacaccccuuuuuuuuccu

SEQ ID NO: 837819 - RNA, 20 nt, Human
aaucugguuuuccccguuac

SEQ ID NO: 837820 - RNA, 23 nt, Human
acaugggauauaggucaccccuc

SEQ ID NO: 837821 - RNA, 24 nt, Human
acauuuaacauuaaaaaaacaaaa

SEQ ID NO: 837822 - RNA, 22 nt, Human
accccuuuuuuuuccuugguaa

SEQ ID NO: 837823 - RNA, 24 nt, Human
acggcucuuuuugcuauguuuucu

SEQ ID NO: 837824 - RNA, 22 nt, Human
agaaaacuauaaauagugaacc

SEQ ID NO: 837825 - RNA, 20 nt, Human
agaaaugccacucuuucucc

SEQ ID NO: 837826 - RNA, 23 nt, Human
agaaaugucuaccccugcaagag

SEQ ID NO: 837827 - RNA, 22 nt, Human
agacaaaaccugaaacagaaga

SEQ ID NO: 837828 - RNA, 22 nt, Human
aggcagaagggagugugucuga

SEQ ID NO: 837829 - RNA, 20 nt, Human
agggucucucugaaagccuu

SEQ ID NO: 837830 - RNA, 22 nt, Human
auacacaucuaaacacacaagg

SEQ ID NO: 837831 - RNA, 26 nt, Human
caaaaccugaaacagaagaaaugcca

SEQ ID NO: 837832 - RNA, 27 nt, Human
caaaaccugaaacagaagaaaugccac

SEQ ID NO: 837833 - RNA, 25 nt, Human
caaacacaacuuccuaacacuccua

SEQ ID NO: 837834 - RNA, 19 nt, Human
caacuuagaaugcaaagua

SEQ ID NO: 837835 - RNA, 25 nt, Human
cacaacucaggccuaaagauccucu

SEQ ID NO: 837836 - RNA, 21 nt, Human
cacugcugcuuuccguaacaa

SEQ ID NO: 837837 - RNA, 21 nt, Human
ccccugcaagagugaggacuu

SEQ ID NO: 837838 - RNA, 20 nt, Human
cccgcuguacuccagaguga

SEQ ID NO: 837839 - RNA, 21 nt, Human
cgagggucccggcggcucccg

SEQ ID NO: 837840 - RNA, 24 nt, Human
cuaaagauccucuuagggagaucu

SEQ ID NO: 837841 - RNA, 19 nt, Human
cuacccaaaaaggcggcgg

SEQ ID NO: 837842 - RNA, 23 nt, Human
cuagagaacaaaccaaaccagaa

SEQ ID NO: 837843 - RNA, 25 nt, Human
cucccgcuguacuccagagugacac

SEQ ID NO: 837844 - RNA, 21 nt, Human
cugggcggcggcggcggcgac

SEQ ID NO: 837845 - RNA, 18 nt, Human
gaaaugucuaccccugca

SEQ ID NO: 837846 - RNA, 27 nt, Human
gcggcggcgacgacgcgagggucccuu

SEQ ID NO: 837847 - RNA, 20 nt, Human
gcggcggcugcugcggcggc

SEQ ID NO: 837848 - RNA, 28 nt, Human
gcggggguggggggagcaggugacagga

SEQ ID NO: 837849 - RNA, 22 nt, Human
ggaaggcagaagggaguguguc

SEQ ID NO: 837850 - RNA, 18 nt, Human
ggcggcggcggcggcgac

SEQ ID NO: 837851 - RNA, 18 nt, Human
ggcggcggcugcugcggc

SEQ ID NO: 837852 - RNA, 20 nt, Human
gggcggcggcggcggcgacg

SEQ ID NO: 837853 - RNA, 19 nt, Human
gggcggcggcugcugcggc

SEQ ID NO: 837854 - RNA, 23 nt, Human
ggggaucugggcggcggcggcgg

SEQ ID NO: 837855 - RNA, 23 nt, Human
gggggcggcggcugcugcggcgg

SEQ ID NO: 837856 - RNA, 20 nt, Human
gguucugugaaccugaagag

SEQ ID NO: 837857 - RNA, 24 nt, Human
guaauacugaguuacacauuuaac

SEQ ID NO: 837858 - RNA, 21 nt, Human
guagaaaacuucuacccaaaa

SEQ ID NO: 837859 - RNA, 24 nt, Human
uaacaccccuuuuuuuuccuuggu

SEQ ID NO: 837860 - RNA, 20 nt, Human
uaagaaacucgaucaaaauu

SEQ ID NO: 837861 - RNA, 23 nt, Human
uacacugcugcuuuccguaacaa

SEQ ID NO: 837862 - RNA, 21 nt, Human
uacuauuuuguguuucucccg

SEQ ID NO: 837863 - RNA, 21 nt, Human
uagagggcccagaugcaaaga

SEQ ID NO: 837864 - RNA, 22 nt, Human
uaucuagagaacaaaccaaacc

SEQ ID NO: 837865 - RNA, 20 nt, Human
uauuucauacacaucuaaac

SEQ ID NO: 837866 - RNA, 22 nt, Human
uccccguuacaguaaacagcuu

SEQ ID NO: 837867 - RNA, 19 nt, Human
ucuaaacacacaaggguaa

SEQ ID NO: 837868 - RNA, 18 nt, Human
ucuacccaaaaaggcggc

SEQ ID NO: 837869 - RNA, 19 nt, Human
ucuagagaacaaaccaaac

SEQ ID NO: 837870 - RNA, 22 nt, Human
ucuagagaacaaaccaaaccag

SEQ ID NO: 837871 - RNA, 20 nt, Human
ucucacacagcccguuuacc

SEQ ID NO: 837872 - RNA, 24 nt, Human
ucugaccuaagagugauaacuacu

SEQ ID NO: 837873 - RNA, 23 nt, Human
ugaaaacaagcuagccuacauua

SEQ ID NO: 837874 - RNA, 18 nt, Human
ugaaacacaaacacaacu

SEQ ID NO: 837875 - RNA, 28 nt, Human
ugaaacacaaacacaacuuccuaacacu

SEQ ID NO: 837876 - RNA, 19 nt, Human
ugaacucagacaaaaccug

SEQ ID NO: 837877 - RNA, 22 nt, Human
ugacacugguacacugcugcuu

SEQ ID NO: 837878 - RNA, 22 nt, Human
ugacaggaacuccuuuaacaau

SEQ ID NO: 837879 - RNA, 20 nt, Human
ugacaugcacuugguguggg

SEQ ID NO: 837880 - RNA, 19 nt, Human
ugaccugcuacacauaggg

SEQ ID NO: 837881 - RNA, 23 nt, Human
ugaucgaucucaguugguaacac

SEQ ID NO: 837882 - RNA, 21 nt, Human
ugcuggaauuacaaguuccua

SEQ ID NO: 837883 - RNA, 23 nt, Human
uggaucauccacagcuuuaagcc

SEQ ID NO: 837884 - RNA, 20 nt, Human
uggggggagcaggugacagg

SEQ ID NO: 837885 - RNA, 20 nt, Human
ugguacacugcugcuuuccg

SEQ ID NO: 837886 - RNA, 23 nt, Human
ugguacacugcugcuuuccguaa

SEQ ID NO: 837887 - RNA, 22 nt, Human
uuaaaaaaacaaaaacguggau

SEQ ID NO: 837888 - RNA, 25 nt, Human
uuaacauuaaaaaaacaaaaacgug

SEQ ID NO: 837889 - RNA, 18 nt, Human
uucugugaaccugaagag

SEQ ID NO: 837890 - RNA, 25 nt, Human
uuuaaaauuugaaaacaagcuagcc

SEQ ID NO: 837891 - RNA, 21 nt, Human
uuuaaauuacugcuggaauua

SEQ ID NO: 837892 - RNA, 21 nt, Human
uuuuuaaacuuuuaaaauuug

SEQ ID NO: 837893 - RNA, 22 nt, Human
uuuuuuuuuuuuuuuuugacag

SEQ ID NO: 837894 - RNA, 24 nt, Human
aacaacaacaacaaagauauucac

SEQ ID NO: 837895 - RNA, 22 nt, Human
aacauggucacaugugacaugc

SEQ ID NO: 837896 - RNA, 24 nt, Human
aacauggucacaugugacaugcua

SEQ ID NO: 837897 - RNA, 19 nt, Human
aacauggugaaaccccguc

SEQ ID NO: 837898 - RNA, 20 nt, Human
aacauggugaaaccccgucu

SEQ ID NO: 837899 - RNA, 21 nt, Human
aacauggugaaaccccgucuc

SEQ ID NO: 837900 - RNA, 26 nt, Human
aagcagguggaucacuugaggucagg

SEQ ID NO: 837901 - RNA, 24 nt, Human
aauuacaccuuuaggagacuuuaa

SEQ ID NO: 837902 - RNA, 22 nt, Human
acagagcgagacucugucucaa

SEQ ID NO: 837903 - RNA, 21 nt, Human
acccgcgccgcccgagcuccg

SEQ ID NO: 837904 - RNA, 24 nt, Human
accgaaauucaaaguaauccuccg

SEQ ID NO: 837905 - RNA, 23 nt, Human
accuccgcucaggaucuucauca

SEQ ID NO: 837906 - RNA, 18 nt, Human
acgccacugcacuccagc

SEQ ID NO: 837907 - RNA, 22 nt, Human
acgccacugcacuccagccugg

SEQ ID NO: 837908 - RNA, 24 nt, Human
acugcacuccagccugggugacag

SEQ ID NO: 837909 - RNA, 26 nt, Human
acugcacuccagccugggugacagag

SEQ ID NO: 837910 - RNA, 18 nt, Human
acuguucuaccuucaugc

SEQ ID NO: 837911 - RNA, 19 nt, Human
agaccacaggcgaccaccg

SEQ ID NO: 837912 - RNA, 22 nt, Human
agccuggccaacauggugaaac

SEQ ID NO: 837913 - RNA, 24 nt, Human
agccuggccaacauggugaaaccc

SEQ ID NO: 837914 - RNA, 24 nt, Human
agccugggugacagagcgagacuc

SEQ ID NO: 837915 - RNA, 23 nt, Human
agcugggcgugguggcacaugcc

SEQ ID NO: 837916 - RNA, 23 nt, Human
aggaguucgaaacuagccuggcc

SEQ ID NO: 837917 - RNA, 18 nt, Human
aggcacagaaacgacaaa

SEQ ID NO: 837918 - RNA, 22 nt, Human
aggcaggagaauagcuuaaacc

SEQ ID NO: 837919 - RNA, 24 nt, Human
aggcaggagaauagcuuaaaccug

SEQ ID NO: 837920 - RNA, 19 nt, Human
aggcggaggaugcagugag

SEQ ID NO: 837921 - RNA, 24 nt, Human
aggcggaggaugcagugagccaag

SEQ ID NO: 837922 - RNA, 20 nt, Human
aguaccaaacaagcugauac

SEQ ID NO: 837923 - RNA, 24 nt, Human
agugucucacgccuguaaucccag

SEQ ID NO: 837924 - RNA, 24 nt, Human
aucacgccacugcacuccagccug

SEQ ID NO: 837925 - RNA, 21 nt, Human
aucacuugaggucaggaguuc

SEQ ID NO: 837926 - RNA, 20 nt, Human
augacacauagcagaaaucu

SEQ ID NO: 837927 - RNA, 26 nt, Human
caacaacaacaacaaagauauucaca

SEQ ID NO: 837928 - RNA, 24 nt, Human
caacauggugaaaccccgucucua

SEQ ID NO: 837929 - RNA, 24 nt, Human
caagaucacgccacugcacuccag

SEQ ID NO: 837930 - RNA, 20 nt, Human
caaucgugaaaauguuacuc

SEQ ID NO: 837931 - RNA, 22 nt, Human
cacagaaucaauauaauucuga

SEQ ID NO: 837932 - RNA, 25 nt, Human
cacagauagugaaagaacuugugua

SEQ ID NO: 837933 - RNA, 23 nt, Human
cacgccuguaaucccagcacuuu

SEQ ID NO: 837934 - RNA, 22 nt, Human
cacuccagccugggugacagag

SEQ ID NO: 837935 - RNA, 23 nt, Human
cacuccagccugggugacagagc

SEQ ID NO: 837936 - RNA, 24 nt, Human
cacuccagccugggugacagagcg

SEQ ID NO: 837937 - RNA, 19 nt, Human
cacugcacuccagccuggg

SEQ ID NO: 837938 - RNA, 19 nt, Human
cacugcacuccagccuggg

SEQ ID NO: 837939 - RNA, 22 nt, Human
cacugcacuccagccuggguga

SEQ ID NO: 837940 - RNA, 23 nt, Human
cacugcacuccagccugggugac

SEQ ID NO: 837941 - RNA, 24 nt, Human
cacugcacuccagccugggugaca

SEQ ID NO: 837942 - RNA, 24 nt, Human
cacugcacuccagccugggugaca

SEQ ID NO: 837943 - RNA, 19 nt, Human
cagaggccgaagcaggugg

SEQ ID NO: 837944 - RNA, 24 nt, Human
cagguggaucacuugaggucagga

SEQ ID NO: 837945 - RNA, 21 nt, Human
cauugcaaacuuaaccaaucu

SEQ ID NO: 837946 - RNA, 20 nt, Human
ccacugcacuccagccuggg

SEQ ID NO: 837947 - RNA, 20 nt, Human
ccacugcacuccagccuggg

SEQ ID NO: 837948 - RNA, 20 nt, Human
ccacugcacuccagccuggg

SEQ ID NO: 837949 - RNA, 21 nt, Human
ccacugcacuccagccugggu

SEQ ID NO: 837950 - RNA, 21 nt, Human
ccacugcacuccagccugggu

SEQ ID NO: 837951 - RNA, 23 nt, Human
ccacugcacuccagccuggguga

SEQ ID NO: 837952 - RNA, 23 nt, Human
ccacugcacuccagccuggguga

SEQ ID NO: 837953 - RNA, 24 nt, Human
ccacugcacuccagccugggugac

SEQ ID NO: 837954 - RNA, 22 nt, Human
ccagaccacaggcgaccaccga

SEQ ID NO: 837955 - RNA, 19 nt, Human
cccgcgccgcccgagcucc

SEQ ID NO: 837956 - RNA, 20 nt, Human
ccgguacuccaggugccugu

SEQ ID NO: 837957 - RNA, 23 nt, Human
ccuggccaacauggugaaacccc

SEQ ID NO: 837958 - RNA, 24 nt, Human
ccuggccaacauggugaaaccccg

SEQ ID NO: 837959 - RNA, 22 nt, Human
ccugggugacagagcgagacuc

SEQ ID NO: 837960 - RNA, 21 nt, Human
ccuguagucccagcuacucgg

SEQ ID NO: 837961 - RNA, 24 nt, Human
cgaaacuagccuggccaacauggu

SEQ ID NO: 837962 - RNA, 24 nt, Human
cgaagcagguggaucacuugaggu

SEQ ID NO: 837963 - RNA, 26 nt, Human
cgaagcagguggaucacuugagguca

SEQ ID NO: 837964 - RNA, 24 nt, Human
cucacgccuguaaucccagcacuu

SEQ ID NO: 837965 - RNA, 25 nt, Human
cucacgccuguaaucccagcacuuu

SEQ ID NO: 837966 - RNA, 21 nt, Human
cucuacucauugccauauccc

SEQ ID NO: 837967 - RNA, 20 nt, Human
cuuccuagucaauuacaccu

SEQ ID NO: 837968 - RNA, 27 nt, Human
gaaggcggaggaugcagugacaacggu

SEQ ID NO: 837969 - RNA, 22 nt, Human
gacggacacucgggggccacag

SEQ ID NO: 837970 - RNA, 19 nt, Human
gaggaugcagugagccaag

SEQ ID NO: 837971 - RNA, 24 nt, Human
gaucacuugaggucaggaguucga

SEQ ID NO: 837972 - RNA, 24 nt, Human
gcacuccagccugggugacagagc

SEQ ID NO: 837973 - RNA, 22 nt, Human
gcagcacaagguagggauugua

SEQ ID NO: 837974 - RNA, 24 nt, Human
gccaacauggugaaaccccgucuc

SEQ ID NO: 837975 - RNA, 20 nt, Human
gccaagaucacgccacugca

SEQ ID NO: 837976 - RNA, 19 nt, Human
gccacugcacuccagccug

SEQ ID NO: 837977 - RNA, 24 nt, Human
gccacugcacuccagccuggguga

SEQ ID NO: 837978 - RNA, 19 nt, Human
gccccgacgaggcgcggga

SEQ ID NO: 837979 - RNA, 24 nt, Human
gccugugguacugucuggagggac

SEQ ID NO: 837980 - RNA, 20 nt, Human
ggaggaugcagugagccaag

SEQ ID NO: 837981 - RNA, 24 nt, Human
ggaggaugcagugagccaagauca

SEQ ID NO: 837982 - RNA, 22 nt, Human
ggaucacuugaggucaggaguu

SEQ ID NO: 837983 - RNA, 20 nt, Human
ggaugaggcugggcgcagug

SEQ ID NO: 837984 - RNA, 23 nt, Human
ggcgcagugucucacgccuguaa

SEQ ID NO: 837985 - RNA, 21 nt, Human
ggcggaggaugcagugagcca

SEQ ID NO: 837986 - RNA, 21 nt, Human
gugaaaccccgucucuacuga

SEQ ID NO: 837987 - RNA, 24 nt, Human
gugacagagcgagacucugucuca

SEQ ID NO: 837988 - RNA, 21 nt, Human
uaaauaggcacagaaacgacu

SEQ ID NO: 837989 - RNA, 20 nt, Human
uaacaaucgugaaaauguua

SEQ ID NO: 837990 - RNA, 22 nt, Human
uacugagaauugcacaaaaaug

SEQ ID NO: 837991 - RNA, 24 nt, Human
uagccuggccaacauggugaaacc

SEQ ID NO: 837992 - RNA, 22 nt, Human
uagcugggcgugguggcacaug

SEQ ID NO: 837993 - RNA, 18 nt, Human
uaggcacagaaacgacaa

SEQ ID NO: 837994 - RNA, 21 nt, Human
uagugcucgugcccgcguccg

SEQ ID NO: 837995 - RNA, 24 nt, Human
uaugccagaccacaggcgaccacc

SEQ ID NO: 837996 - RNA, 23 nt, Human
ucacgccacugcacuccagccug

SEQ ID NO: 837997 - RNA, 24 nt, Human
ucagaggccgaagcagguggauca

SEQ ID NO: 837998 - RNA, 22 nt, Human
ucauugcaaacuuaaccaaucu

SEQ ID NO: 837999 - RNA, 23 nt, Human
uccagccugggugacagagcgag

SEQ ID NO: 838000 - RNA, 24 nt, Human
uccagccugggugacagagcgaga

SEQ ID NO: 838001 - RNA, 21 nt, Human
ucccuucgugguucccugaga

SEQ ID NO: 838002 - RNA, 19 nt, Human
ucgggcaacugaggcagga

SEQ ID NO: 838003 - RNA, 21 nt, Human
ucucaacaacaacaacaaaga

SEQ ID NO: 838004 - RNA, 22 nt, Human
ugacacauagcagaaaucugug

SEQ ID NO: 838005 - RNA, 18 nt, Human
ugaggcaggagaauagcu

SEQ ID NO: 838006 - RNA, 24 nt, Human
ugaggcaggagaauagcuuaaacc

SEQ ID NO: 838007 - RNA, 20 nt, Human
ugaggcaggagaauagcuuc

SEQ ID NO: 838008 - RNA, 23 nt, Human
ugccuguagucccagcuacucgg

SEQ ID NO: 838009 - RNA, 24 nt, Human
ugccuguagucccagcuacucggg

SEQ ID NO: 838010 - RNA, 21 nt, Human
ugccugugguacugucuggag

SEQ ID NO: 838011 - RNA, 20 nt, Human
ugcucgugcccgcguccgug

SEQ ID NO: 838012 - RNA, 21 nt, Human
uggaaggcggaggaugcagug

SEQ ID NO: 838013 - RNA, 24 nt, Human
uggaucacuugaggucaggaguuc

SEQ ID NO: 838014 - RNA, 27 nt, Human
uggaucacuugaggucaggaguucgaa

SEQ ID NO: 838015 - RNA, 24 nt, Human
uggccaacauggugaaaccccguc

SEQ ID NO: 838016 - RNA, 24 nt, Human
ugguggcacaugccuguaguccca

SEQ ID NO: 838017 - RNA, 21 nt, Human
ugucucacgccuguaauccca

SEQ ID NO: 838018 - RNA, 22 nt, Human
ugucucacgccuguaaucccag

SEQ ID NO: 838019 - RNA, 24 nt, Human
ugucucacgccuguaaucccagca

SEQ ID NO: 838020 - RNA, 19 nt, Human
ugucuguccccucagagca

SEQ ID NO: 838021 - RNA, 21 nt, Human
ugugacaugcuacacuugcac

SEQ ID NO: 838022 - RNA, 22 nt, Human
ugugguucaagauggucauugc

SEQ ID NO: 838023 - RNA, 22 nt, Human
uguguacaauaagaaauucaca

SEQ ID NO: 838024 - RNA, 18 nt, Human
ugugucacaagaguauau

SEQ ID NO: 838025 - RNA, 18 nt, Human
uuagcugggcgugguggc

SEQ ID NO: 838026 - RNA, 20 nt, Human
uuagcugggcgugguggcac

SEQ ID NO: 838027 - RNA, 24 nt, Human
uuagcugggcgugguggcacaugc

SEQ ID NO: 838028 - RNA, 19 nt, Human
uucuaaauaugccagacca

SEQ ID NO: 838029 - RNA, 22 nt, Human
uucuaaauaugccagaccacag

SEQ ID NO: 838030 - RNA, 23 nt, Human
aaaaagaugaaccacacagcagg

SEQ ID NO: 838031 - RNA, 18 nt, Human
aggaaccaggagcucucu

SEQ ID NO: 838032 - RNA, 22 nt, Human
aguagguggguuggugcccucu

SEQ ID NO: 838033 - RNA, 23 nt, Human
cacccaggggcagaguagguggg

SEQ ID NO: 838034 - RNA, 19 nt, Human
cacccucccccaucccacc

SEQ ID NO: 838035 - RNA, 22 nt, Human
cacccucccccaucccaccagc

SEQ ID NO: 838036 - RNA, 19 nt, Human
cagcaggggugcugggagc

SEQ ID NO: 838037 - RNA, 22 nt, Human
caggagcucucugggcagggcc

SEQ ID NO: 838038 - RNA, 23 nt, Human
caggcaggggccuaaaaaaaaga

SEQ ID NO: 838039 - RNA, 21 nt, Human
caguucaggaaccaggagcuc

SEQ ID NO: 838040 - RNA, 26 nt, Human
ccaccagccagcacccagagggacaa

SEQ ID NO: 838041 - RNA, 18 nt, Human
ccacccucccccauccca

SEQ ID NO: 838042 - RNA, 22 nt, Human
ccagcacccagagggacaaccc

SEQ ID NO: 838043 - RNA, 23 nt, Human
cccaccagccagcacccagaggg

SEQ ID NO: 838044 - RNA, 27 nt, Human
cccaccagccagcacccagagggacaa

SEQ ID NO: 838045 - RNA, 20 nt, Human
cccaucccaccagccagcac

SEQ ID NO: 838046 - RNA, 21 nt, Human
ccuaacacgaccggcccagga

SEQ ID NO: 838047 - RNA, 22 nt, Human
ccucgcgcucaagggcucccuu

SEQ ID NO: 838048 - RNA, 21 nt, Human
cgacucccaggccgagccccc

SEQ ID NO: 838049 - RNA, 18 nt, Human
cgcaggccggggcucugg

SEQ ID NO: 838050 - RNA, 26 nt, Human
cucccccaucccaccagccagcaccc

SEQ ID NO: 838051 - RNA, 21 nt, Human
cucgggugggugaggggcaga

SEQ ID NO: 838052 - RNA, 23 nt, Human
cucuggggcgcggggaugugucu

SEQ ID NO: 838053 - RNA, 21 nt, Human
cugagcaaucuuuauucugca

SEQ ID NO: 838054 - RNA, 21 nt, Human
gagaccgaggggcggggagcc

SEQ ID NO: 838055 - RNA, 20 nt, Human
gcagagggacaaugaccaca

SEQ ID NO: 838056 - RNA, 20 nt, Human
gcagcucaguucaggaacca

SEQ ID NO: 838057 - RNA, 20 nt, Human
gcggugggcagagccucggg

SEQ ID NO: 838058 - RNA, 18 nt, Human
gcuccccacccuccccca

SEQ ID NO: 838059 - RNA, 23 nt, Human
gcucuggggcgcggggauguguc

SEQ ID NO: 838060 - RNA, 19 nt, Human
gggugaggggcagaugggc

SEQ ID NO: 838061 - RNA, 20 nt, Human
gugggcagagccucgggugg

SEQ ID NO: 838062 - RNA, 22 nt, Human
guucaggaaccaggagcucucu

SEQ ID NO: 838063 - RNA, 22 nt, Human
uccauacaccacguggagaccg

SEQ ID NO: 838064 - RNA, 23 nt, Human
ucccaccagccagcacccagagg

SEQ ID NO: 838065 - RNA, 19 nt, Human
uccccacccucccccaucc

SEQ ID NO: 838066 - RNA, 20 nt, Human
uccccacccucccccauccc

SEQ ID NO: 838067 - RNA, 23 nt, Human
ucucugggcagggccugaccggg

SEQ ID NO: 838068 - RNA, 18 nt, Human
ugaaccacacagcagggg

SEQ ID NO: 838069 - RNA, 18 nt, Human
ugcuccccacccuccccc

SEQ ID NO: 838070 - RNA, 23 nt, Human
ugcuccccacccucccccauccc

SEQ ID NO: 838071 - RNA, 20 nt, Human
ugcugggagcugcuccccac

SEQ ID NO: 838072 - RNA, 21 nt, Human
uucaggaaccaggagcucucu

SEQ ID NO: 838073 - RNA, 19 nt, Human
uuuuuuuuuuuuuugccag

SEQ ID NO: 838074 - RNA, 22 nt, Human
uuuuuuuuuuuuuuuugccagg

SEQ ID NO: 838075 - RNA, 22 nt, Human
uuuuuuuuuuuuuuuuugccag

SEQ ID NO: 838076 - RNA, 27 nt, Human
uuuuuuuuuuuuuuuuuuuuuuugggg

SEQ ID NO: 838077 - RNA, 27 nt, Human
aaagaaauaaaacauaaucugaagaaa

SEQ ID NO: 838078 - RNA, 27 nt, Human
aagaaauaaaacauaaucugaagaaaa

SEQ ID NO: 838079 - RNA, 24 nt, Human
aagcacuuucuaagccgccgucgc

SEQ ID NO: 838080 - RNA, 18 nt, Human
acagaauaacgaauugua

SEQ ID NO: 838081 - RNA, 19 nt, Human
acgccugggguuucugggc

SEQ ID NO: 838082 - RNA, 26 nt, Human
agaaauaaaacauaaucugaagaaaa

SEQ ID NO: 838083 - RNA, 22 nt, Human
agaacacacaaacauuaaaaca

SEQ ID NO: 838084 - RNA, 19 nt, Human
aguuugauucugauccacu

SEQ ID NO: 838085 - RNA, 20 nt, Human
aguuugauucugauccacug

SEQ ID NO: 838086 - RNA, 23 nt, Human
cauacuaacauuggaaacagaau

SEQ ID NO: 838087 - RNA, 20 nt, Human
cccccuucucucgcaggauc

SEQ ID NO: 838088 - RNA, 22 nt, Human
cccuacaccagaaaauauagca

SEQ ID NO: 838089 - RNA, 19 nt, Human
ccugggguuucugggcugc

SEQ ID NO: 838090 - RNA, 25 nt, Human
cgcugucacuucagggacagcuuua

SEQ ID NO: 838091 - RNA, 19 nt, Human
cggcggccgcgccccuccc

SEQ ID NO: 838092 - RNA, 19 nt, Human
cucauccauaucuggugac

SEQ ID NO: 838093 - RNA, 19 nt, Human
cuccucaagccaccgucac

SEQ ID NO: 838094 - RNA, 19 nt, Human
cucgcaggaucaaucucca

SEQ ID NO: 838095 - RNA, 23 nt, Human
cugcaagccugggcauauuguac

SEQ ID NO: 838096 - RNA, 20 nt, Human
gaagauaagguacacacuga

SEQ ID NO: 838097 - RNA, 24 nt, Human
gcaaagaaauaaaacauaaucuga

SEQ ID NO: 838098 - RNA, 22 nt, Human
ggaagcugcgagggcgcguccg

SEQ ID NO: 838099 - RNA, 24 nt, Human
ggguuucugggcugccugguucuc

SEQ ID NO: 838100 - RNA, 24 nt, Human
uaaaaaguuggcuuuauucugcaa

SEQ ID NO: 838101 - RNA, 20 nt, Human
uaaagagcagcacccucuga

SEQ ID NO: 838102 - RNA, 21 nt, Human
uaacuccaugggagcugugau

SEQ ID NO: 838103 - RNA, 23 nt, Human
uaagaaagacccuacaccagaaa

SEQ ID NO: 838104 - RNA, 23 nt, Human
uaaguuggaaaaaggggcccuuu

SEQ ID NO: 838105 - RNA, 20 nt, Human
uaaugaagauaagguacaca

SEQ ID NO: 838106 - RNA, 23 nt, Human
uauuacuuuuaccaagccauuuu

SEQ ID NO: 838107 - RNA, 18 nt, Human
uauuguacaauuggcagc

SEQ ID NO: 838108 - RNA, 21 nt, Human
uauuguagucuaaagauugcu

SEQ ID NO: 838109 - RNA, 20 nt, Human
ucacuaaauaagaaagaccc

SEQ ID NO: 838110 - RNA, 20 nt, Human
ucccuagaucucacuaaaua

SEQ ID NO: 838111 - RNA, 21 nt, Human
ucugagaauaaucaaacugau

SEQ ID NO: 838112 - RNA, 23 nt, Human
ugaagaacacacaaacauuaaaa

SEQ ID NO: 838113 - RNA, 19 nt, Human
ugauagacugaaccauuuc

SEQ ID NO: 838114 - RNA, 24 nt, Human
ugauugguuacagaaagcagaguu

SEQ ID NO: 838115 - RNA, 23 nt, Human
uggaaaaaggggcccuuucuuga

SEQ ID NO: 838116 - RNA, 23 nt, Human
uggcuuuauucugcaagccuggg

SEQ ID NO: 838117 - RNA, 22 nt, Human
uguuauaaugaagauaagguac

SEQ ID NO: 838118 - RNA, 20 nt, Human
uuaguaauauucaucuauac

SEQ ID NO: 838119 - RNA, 19 nt, Human
uucuaagccgccgucgccc

SEQ ID NO: 838120 - RNA, 19 nt, Human
uugcuggauugauauugug

SEQ ID NO: 838121 - RNA, 22 nt, Human
aaaaaaauauacaacuuggaug

SEQ ID NO: 838122 - RNA, 22 nt, Human
aaaaacacgaaaggugaaugac

SEQ ID NO: 838123 - RNA, 22 nt, Human
aaaagaaaaaaucaacagagga

SEQ ID NO: 838124 - RNA, 23 nt, Human
aaaagaaaaaaucaacagaggau

SEQ ID NO: 838125 - RNA, 22 nt, Human
aaacaagccaaacccauaaagc

SEQ ID NO: 838126 - RNA, 23 nt, Human
aaacaagccaaacccauaaagca

SEQ ID NO: 838127 - RNA, 24 nt, Human
aaagcaaaagaaaaaaucaacaga

SEQ ID NO: 838128 - RNA, 20 nt, Human
aaauggcucgccacagagcc

SEQ ID NO: 838129 - RNA, 21 nt, Human
aacaagccaaacccauaaagc

SEQ ID NO: 838130 - RNA, 24 nt, Human
aacucauccccucuuguguacccc

SEQ ID NO: 838131 - RNA, 19 nt, Human
aagcaaaagaaaaaaucaa

SEQ ID NO: 838132 - RNA, 24 nt, Human
aagcaaaagaaaaaaucaacagag

SEQ ID NO: 838133 - RNA, 24 nt, Human
aagccaaacccauaaagcaaaaga

SEQ ID NO: 838134 - RNA, 26 nt, Human
aauggcucgccacagagccagguggg

SEQ ID NO: 838135 - RNA, 19 nt, Human
accaugcaagaaaaacaag

SEQ ID NO: 838136 - RNA, 20 nt, Human
acccauaaagcaaaagaaaa

SEQ ID NO: 838137 - RNA, 21 nt, Human
accccgcaccaaagccgggau

SEQ ID NO: 838138 - RNA, 22 nt, Human
acugcggcgaggacugcggcgg

SEQ ID NO: 838139 - RNA, 24 nt, Human
acugguggggccgacaagggccug

SEQ ID NO: 838140 - RNA, 20 nt, Human
agagguguggccacccuggg

SEQ ID NO: 838141 - RNA, 23 nt, Human
agcaaaagaaaaaaucaacagag

SEQ ID NO: 838142 - RNA, 19 nt, Human
agcagcauccacagggggc

SEQ ID NO: 838143 - RNA, 19 nt, Human
agcagggagaggcacuggu

SEQ ID NO: 838144 - RNA, 19 nt, Human
agccaggugggagcagccc

SEQ ID NO: 838145 - RNA, 23 nt, Human
agcggcggcggcggcggcggcgg

SEQ ID NO: 838146 - RNA, 27 nt, Human
aggagcagcagggagaggccgguaccc

SEQ ID NO: 838147 - RNA, 23 nt, Human
aggagcagcggcggcggcggcgg

SEQ ID NO: 838148 - RNA, 22 nt, Human
agggagaggcacugguggggcc

SEQ ID NO: 838149 - RNA, 21 nt, Human
agguguggccacccugggcca

SEQ ID NO: 838150 - RNA, 20 nt, Human
auaaagcaaaagaaaaaauc

SEQ ID NO: 838151 - RNA, 26 nt, Human
auaaagcaaaagaaaaaaucaacaga

SEQ ID NO: 838152 - RNA, 27 nt, Human
auaaagcaaaagaaaaaaucaacagag

SEQ ID NO: 838153 - RNA, 18 nt, Human
aucagcuccaaaccaugc

SEQ ID NO: 838154 - RNA, 21 nt, Human
auccguagauccuucuuccuc

SEQ ID NO: 838155 - RNA, 24 nt, Human
augcaagaaaaacaagccaaaccc

SEQ ID NO: 838156 - RNA, 22 nt, Human
caaaagaaaaaaucaacagagg

SEQ ID NO: 838157 - RNA, 22 nt, Human
caaaccaugcaagaaaaacaag

SEQ ID NO: 838158 - RNA, 23 nt, Human
caaacccauaaagcaaaagaaaa

SEQ ID NO: 838159 - RNA, 22 nt, Human
caaauggcucgccacagagcca

SEQ ID NO: 838160 - RNA, 21 nt, Human
caagaaaaacaagccaaaccc

SEQ ID NO: 838161 - RNA, 21 nt, Human
caagccaaacccauaaagcaa

SEQ ID NO: 838162 - RNA, 21 nt, Human
caaggcgguggcccauccacc

SEQ ID NO: 838163 - RNA, 18 nt, Human
cacccaggcacuggcagc

SEQ ID NO: 838164 - RNA, 20 nt, Human
cacccugggccaaagugugc

SEQ ID NO: 838165 - RNA, 24 nt, Human
cagcuggagacggguccuaggagc

SEQ ID NO: 838166 - RNA, 18 nt, Human
caggcacuggcagccugc

SEQ ID NO: 838167 - RNA, 18 nt, Human
cauccaccggccuugcac

SEQ ID NO: 838168 - RNA, 19 nt, Human
cauccaggcccccucaguc

SEQ ID NO: 838169 - RNA, 23 nt, Human
caucucccucaugggagucuugg

SEQ ID NO: 838170 - RNA, 24 nt, Human
caugcaagaaaaacaagccaaacc

SEQ ID NO: 838171 - RNA, 25 nt, Human
caugcaagaaaaacaagccaaaccc

SEQ ID NO: 838172 - RNA, 18 nt, Human
ccaaaccaugcaagaaaa

SEQ ID NO: 838173 - RNA, 21 nt, Human
ccaaacccauaaagcaaaaga

SEQ ID NO: 838174 - RNA, 22 nt, Human
ccaaacccauaaagcaaaagaa

SEQ ID NO: 838175 - RNA, 24 nt, Human
ccaaagguccccacgugggcccgg

SEQ ID NO: 838176 - RNA, 20 nt, Human
ccaggcacuggcagccugcu

SEQ ID NO: 838177 - RNA, 23 nt, Human
ccaugcaagaaaaacaagccaaa

SEQ ID NO: 838178 - RNA, 24 nt, Human
ccaugcaagaaaaacaagccaaac

SEQ ID NO: 838179 - RNA, 19 nt, Human
ccccacgugggcccggcuc

SEQ ID NO: 838180 - RNA, 27 nt, Human
ccguagauccuucuuccucuuggauuu

SEQ ID NO: 838181 - RNA, 19 nt, Human
cgccacagagccagguggg

SEQ ID NO: 838182 - RNA, 19 nt, Human
cgcgacgggcggcgccgga

SEQ ID NO: 838183 - RNA, 24 nt, Human
cggagugggguccgaggcccagcc

SEQ ID NO: 838184 - RNA, 22 nt, Human
cggcgacugcagcaaggacgag

SEQ ID NO: 838185 - RNA, 19 nt, Human
cggcggcggcgacugcggc

SEQ ID NO: 838186 - RNA, 20 nt, Human
cggcucauggcaucucccuc

SEQ ID NO: 838187 - RNA, 19 nt, Human
cggguccuaggagcagcag

SEQ ID NO: 838188 - RNA, 19 nt, Human
cuccaaaccaugcaagaaa

SEQ ID NO: 838189 - RNA, 20 nt, Human
cuccaaaccaugcaagaaaa

SEQ ID NO: 838190 - RNA, 20 nt, Human
cugcccccgcagauggggcu

SEQ ID NO: 838191 - RNA, 18 nt, Human
gaaaaacaagccaaaccc

SEQ ID NO: 838192 - RNA, 26 nt, Human
gagagauuaaaaaaauauacaacuug

SEQ ID NO: 838193 - RNA, 22 nt, Human
gagcagcagggagaggcacugg

SEQ ID NO: 838194 - RNA, 23 nt, Human
gcaagaaaaacaagccaaaccca

SEQ ID NO: 838195 - RNA, 20 nt, Human
gcacuggcagccugcugugc

SEQ ID NO: 838196 - RNA, 24 nt, Human
gcagaggcccuguuugccagugcc

SEQ ID NO: 838197 - RNA, 19 nt, Human
gcagcagggagaggcacug

SEQ ID NO: 838198 - RNA, 20 nt, Human
gcagcagggagaggcacugg

SEQ ID NO: 838199 - RNA, 22 nt, Human
gcagcggcggcggcggcggcuu

SEQ ID NO: 838200 - RNA, 21 nt, Human
gcaggggcagcagcauccaca

SEQ ID NO: 838201 - RNA, 20 nt, Human
gccaggcggaggagcagcgg

SEQ ID NO: 838202 - RNA, 22 nt, Human
gccccgcacagugcugcaggac

SEQ ID NO: 838203 - RNA, 18 nt, Human
gcggcgccggagacagac

SEQ ID NO: 838204 - RNA, 23 nt, Human
gcggcggcggcggcgacugcggc

SEQ ID NO: 838205 - RNA, 20 nt, Human
gcggcggcggcggcggcggc

SEQ ID NO: 838206 - RNA, 24 nt, Human
gcggcggcggcggcggcggcgacu

SEQ ID NO: 838207 - RNA, 23 nt, Human
gcggcggcggcggcggcggcggc

SEQ ID NO: 838208 - RNA, 24 nt, Human
gcggcggcggcggcggcggcggcg

SEQ ID NO: 838209 - RNA, 22 nt, Human
gcucuggagggccggagugggg

SEQ ID NO: 838210 - RNA, 27 nt, Human
ggagcagcggcggcggcggcggcggcg

SEQ ID NO: 838211 - RNA, 20 nt, Human
ggcagacggcccaggccagg

SEQ ID NO: 838212 - RNA, 18 nt, Human
ggcaggacugggugagcc

SEQ ID NO: 838213 - RNA, 19 nt, Human
ggcccuguuugccagugcc

SEQ ID NO: 838214 - RNA, 23 nt, Human
ggcggcggcggcggcggcgacug

SEQ ID NO: 838215 - RNA, 23 nt, Human
ggcggcggcggcggcggcggcgg

SEQ ID NO: 838216 - RNA, 21 nt, Human
gggagaggcacugguggggcc

SEQ ID NO: 838217 - RNA, 24 nt, Human
gggccggagugggguccgaggccc

SEQ ID NO: 838218 - RNA, 23 nt, Human
ggggccgacaagggccuggcugg

SEQ ID NO: 838219 - RNA, 20 nt, Human
ggguccuggacggcggugga

SEQ ID NO: 838220 - RNA, 19 nt, Human
gugggcccggcucgagguc

SEQ ID NO: 838221 - RNA, 18 nt, Human
uaaaaaaaacacgaaagg

SEQ ID NO: 838222 - RNA, 23 nt, Human
uaaaaaaauauacaacuuggaug

SEQ ID NO: 838223 - RNA, 20 nt, Human
uagauccuucuuccucuugg

SEQ ID NO: 838224 - RNA, 21 nt, Human
uauggacuggccucugcaucc

SEQ ID NO: 838225 - RNA, 19 nt, Human
uccccacgugggcccggcu

SEQ ID NO: 838226 - RNA, 22 nt, Human
ucccucaugggagucuuggggu

SEQ ID NO: 838227 - RNA, 23 nt, Human
uccgcagaggcccuguuugccag

SEQ ID NO: 838228 - RNA, 20 nt, Human
uccguagauccuucuuccuc

SEQ ID NO: 838229 - RNA, 22 nt, Human
uccuaggagcagcagggagagg

SEQ ID NO: 838230 - RNA, 21 nt, Human
ucuggagggccggaguggggu

SEQ ID NO: 838231 - RNA, 23 nt, Human
ugcaagaaaaacaagccaaaccc

SEQ ID NO: 838232 - RNA, 21 nt, Human
ugccaggggaaggccuugggc

SEQ ID NO: 838233 - RNA, 23 nt, Human
ugccagugccaggggaaggccuu

SEQ ID NO: 838234 - RNA, 19 nt, Human
uggacuggccucugcaucc

SEQ ID NO: 838235 - RNA, 24 nt, Human
uggagacuaaucuagaggacugcg

SEQ ID NO: 838236 - RNA, 21 nt, Human
uggcaguagcuuauggugugg

SEQ ID NO: 838237 - RNA, 22 nt, Human
uggcaguagcuuaugguguggg

SEQ ID NO: 838238 - RNA, 22 nt, Human
uggccucugcauccaccggccu

SEQ ID NO: 838239 - RNA, 19 nt, Human
ugggguauucacacaacuc

SEQ ID NO: 838240 - RNA, 18 nt, Human
ugguauauggacuggccu

SEQ ID NO: 838241 - RNA, 19 nt, Human
ugguggggccgacaagggc

SEQ ID NO: 838242 - RNA, 19 nt, Human
uguggggcucuggagggcc

SEQ ID NO: 838243 - RNA, 20 nt, Human
uguguaccccgcaccaaagc

SEQ ID NO: 838244 - RNA, 23 nt, Human
uugggacaaauggcucgccacag

SEQ ID NO: 838245 - RNA, 23 nt, Human
aaaaccuaaugagaaccuggcua

SEQ ID NO: 838246 - RNA, 21 nt, Human
aaaauucuuuacgucuugcuu

SEQ ID NO: 838247 - RNA, 21 nt, Human
aaacaggaaauuuggcugagc

SEQ ID NO: 838248 - RNA, 22 nt, Human
aaauaaggcaauaucccugcac

SEQ ID NO: 838249 - RNA, 19 nt, Human
aacuguaaagcaacagaau

SEQ ID NO: 838250 - RNA, 24 nt, Human
aagaauacaggauaaaauauucca

SEQ ID NO: 838251 - RNA, 18 nt, Human
aagugacccuaugcugag

SEQ ID NO: 838252 - RNA, 19 nt, Human
aaucacagucaacaacuug

SEQ ID NO: 838253 - RNA, 18 nt, Human
aauuccaaugccaagaaa

SEQ ID NO: 838254 - RNA, 23 nt, Human
aauuccuccuuugucucccagcu

SEQ ID NO: 838255 - RNA, 26 nt, Human
aauugccuucuuauguggucauccac

SEQ ID NO: 838256 - RNA, 19 nt, Human
acacaauagaacggucaga

SEQ ID NO: 838257 - RNA, 19 nt, Human
acaugauggaaacgaacac

SEQ ID NO: 838258 - RNA, 21 nt, Human
agaaaaauaaccagagcucac

SEQ ID NO: 838259 - RNA, 22 nt, Human
agaaaucuuuaucuaaucaauc

SEQ ID NO: 838260 - RNA, 22 nt, Human
agcaaaaccuaaugagaaccug

SEQ ID NO: 838261 - RNA, 22 nt, Human
agcaccuucuuugacaaguggc

SEQ ID NO: 838262 - RNA, 23 nt, Human
agcaccuucuuugacaaguggca

SEQ ID NO: 838263 - RNA, 27 nt, Human
agcgacaauagaccacaggggaaggga

SEQ ID NO: 838264 - RNA, 20 nt, Human
aggcaaguagaucaaagaga

SEQ ID NO: 838265 - RNA, 18 nt, Human
auagagcaaugucuccuu

SEQ ID NO: 838266 - RNA, 21 nt, Human
auggacuacgagagguucuag

SEQ ID NO: 838267 - RNA, 19 nt, Human
auuccaguagcugcaucuc

SEQ ID NO: 838268 - RNA, 21 nt, Human
auuccucuugaguccccggga

SEQ ID NO: 838269 - RNA, 18 nt, Human
auugcacauggugucugg

SEQ ID NO: 838270 - RNA, 19 nt, Human
caaguuguuccagauaaaa

SEQ ID NO: 838271 - RNA, 25 nt, Human
cacuaacacugugugaucaaucagg

SEQ ID NO: 838272 - RNA, 21 nt, Human
cacugucauacaaagccuaag

SEQ ID NO: 838273 - RNA, 19 nt, Human
cacuguguccuuccaggau

SEQ ID NO: 838274 - RNA, 19 nt, Human
cacugugugaucaaucagg

SEQ ID NO: 838275 - RNA, 20 nt, Human
cacugugugaucaaucaggu

SEQ ID NO: 838276 - RNA, 19 nt, Human
cagacuccugagucuuccc

SEQ ID NO: 838277 - RNA, 24 nt, Human
cagauuagcuccuggacagccaga

SEQ ID NO: 838278 - RNA, 19 nt, Human
cagcccuuuuuucuagagu

SEQ ID NO: 838279 - RNA, 19 nt, Human
caucacaaaagagcaggau

SEQ ID NO: 838280 - RNA, 20 nt, Human
ccacacaauagaacggucag

SEQ ID NO: 838281 - RNA, 24 nt, Human
ccaguagcugcaucuccagguuuu

SEQ ID NO: 838282 - RNA, 21 nt, Human
ccagugauggcaagaagcaaa

SEQ ID NO: 838283 - RNA, 23 nt, Human
cccacuauucuuagccuuuuaaa

SEQ ID NO: 838284 - RNA, 19 nt, Human
ccucuugaguccccgggag

SEQ ID NO: 838285 - RNA, 20 nt, Human
ccuucuguacuguuuucuuc

SEQ ID NO: 838286 - RNA, 19 nt, Human
cgaaggcagacauagagca

SEQ ID NO: 838287 - RNA, 18 nt, Human
cuaugauuaauacacuaa

SEQ ID NO: 838288 - RNA, 20 nt, Human
cuccugagucuucccauuga

SEQ ID NO: 838289 - RNA, 19 nt, Human
cuugaaccacucacagugc

SEQ ID NO: 838290 - RNA, 21 nt, Human
cuugaguccccgggagcaaug

SEQ ID NO: 838291 - RNA, 22 nt, Human
gaagaagcacaagauacuuaaa

SEQ ID NO: 838292 - RNA, 21 nt, Human
gaccacaggggaagggaaaga

SEQ ID NO: 838293 - RNA, 20 nt, Human
gagaaaagaacacauucugu

SEQ ID NO: 838294 - RNA, 18 nt, Human
gcugagcacaucgauccc

SEQ ID NO: 838295 - RNA, 18 nt, Human
ggcaaagugacccuaugc

SEQ ID NO: 838296 - RNA, 20 nt, Human
gucucguuggcugugcaagc

SEQ ID NO: 838297 - RNA, 25 nt, Human
uaacacugugugaucaaucagguau

SEQ ID NO: 838298 - RNA, 22 nt, Human
uaacuguaaagcaacagaauau

SEQ ID NO: 838299 - RNA, 23 nt, Human
uaagaugugaucuaaucacaguc

SEQ ID NO: 838300 - RNA, 28 nt, Human
uaaggaacaucccugcuaaccggggccc

SEQ ID NO: 838301 - RNA, 18 nt, Human
uacagacaaauaaggcaa

SEQ ID NO: 838302 - RNA, 23 nt, Human
uacuagaauuaaaaacaucugua

SEQ ID NO: 838303 - RNA, 18 nt, Human
uacuguuuucuucuuuca

SEQ ID NO: 838304 - RNA, 27 nt, Human
uagaacggucagauuagcuccuggaca

SEQ ID NO: 838305 - RNA, 20 nt, Human
uagaauuaaaaacaucugua

SEQ ID NO: 838306 - RNA, 19 nt, Human
uagaccacaggggaaggga

SEQ ID NO: 838307 - RNA, 23 nt, Human
uagcuccuggacagccagaauug

SEQ ID NO: 838308 - RNA, 24 nt, Human
uaguacauucaucacuguguccuu

SEQ ID NO: 838309 - RNA, 24 nt, Human
uaugguacaagagaaaaauaacca

SEQ ID NO: 838310 - RNA, 23 nt, Human
uauugcacuuggugaagaaagua

SEQ ID NO: 838311 - RNA, 19 nt, Human
ucagcaccuucuuugacaa

SEQ ID NO: 838312 - RNA, 21 nt, Human
ucaggcuugggaccaagggga

SEQ ID NO: 838313 - RNA, 20 nt, Human
uccaaugccaagaaauggug

SEQ ID NO: 838314 - RNA, 23 nt, Human
uccacacaauagaacggucagau

SEQ ID NO: 838315 - RNA, 18 nt, Human
ucccauugaaaaauagga

SEQ ID NO: 838316 - RNA, 24 nt, Human
uccuccuuugucucccagcuccag

SEQ ID NO: 838317 - RNA, 19 nt, Human
uccuggacagccagaauug

SEQ ID NO: 838318 - RNA, 23 nt, Human
ucuugaguccccgggagcaaugg

SEQ ID NO: 838319 - RNA, 20 nt, Human
ugaaaaauaggacugguaga

SEQ ID NO: 838320 - RNA, 19 nt, Human
ugacagcagagaaacagau

SEQ ID NO: 838321 - RNA, 21 nt, Human
ugacagcagagaaacagauuc

SEQ ID NO: 838322 - RNA, 22 nt, Human
ugacagcagagaaacagauucc

SEQ ID NO: 838323 - RNA, 19 nt, Human
ugacaguauuuaugacugu

SEQ ID NO: 838324 - RNA, 19 nt, Human
ugagaggagacacagcaau

SEQ ID NO: 838325 - RNA, 20 nt, Human
ugagaggagacacagcaaua

SEQ ID NO: 838326 - RNA, 25 nt, Human
ugaggcaaguagaucaaagagauaa

SEQ ID NO: 838327 - RNA, 21 nt, Human
ugauuaauacacuaaaauugc

SEQ ID NO: 838328 - RNA, 18 nt, Human
ugcauaauggcaaaguga

SEQ ID NO: 838329 - RNA, 25 nt, Human
ugcauaauggcaaagugacccuaug

SEQ ID NO: 838330 - RNA, 22 nt, Human
ugccagggaggcccaagcaaaa

SEQ ID NO: 838331 - RNA, 23 nt, Human
ugccagggaggcccaagcaaaac

SEQ ID NO: 838332 - RNA, 24 nt, Human
ugccuucuguacuguuuucuucuu

SEQ ID NO: 838333 - RNA, 22 nt, Human
uggcaagaagcaaacaacugag

SEQ ID NO: 838334 - RNA, 20 nt, Human
uggcagacuccugagucuuc

SEQ ID NO: 838335 - RNA, 21 nt, Human
uggcugugcaagcucuucuca

SEQ ID NO: 838336 - RNA, 21 nt, Human
uggggguuaaaaauccucggu

SEQ ID NO: 838337 - RNA, 18 nt, Human
uguaaacuuugccuucug

SEQ ID NO: 838338 - RNA, 21 nt, Human
uguaacagugcugaggguuuu

SEQ ID NO: 838339 - RNA, 24 nt, Human
ugugauacgggaugaaaauucuuu

SEQ ID NO: 838340 - RNA, 18 nt, Human
ugugucucuagaaaagau

SEQ ID NO: 838341 - RNA, 21 nt, Human
uguuuuauauuccagugugcu

SEQ ID NO: 838342 - RNA, 21 nt, Human
uucuuagccuuuuaaacacua

SEQ ID NO: 838343 - RNA, 22 nt, Human
uucuuaggaucagcaccuucuu

SEQ ID NO: 838344 - RNA, 18 nt, Human
uugcacuuggugaagaaa

SEQ ID NO: 838345 - RNA, 22 nt, Human
uugcuuccucucagcccuuuuu

SEQ ID NO: 838346 - RNA, 19 nt, Human
uuggauuaagcgcaaguca

SEQ ID NO: 838347 - RNA, 25 nt, Human
uugggccccacuauucuuagccuuu

SEQ ID NO: 838348 - RNA, 22 nt, Human
uuugugaacacuauacacccuu

SEQ ID NO: 838349 - RNA, 25 nt, Human
uuugugaacacuauacacccuuuug

SEQ ID NO: 838350 - RNA, 21 nt, Human
uuuuugguaaagauaaauuca

SEQ ID NO: 838351 - RNA, 24 nt, Human
aaccagaagguauggggauggccu

SEQ ID NO: 838352 - RNA, 18 nt, Human
aagccagggcccagcaaa

SEQ ID NO: 838353 - RNA, 18 nt, Human
aauggaggaugaggggga

SEQ ID NO: 838354 - RNA, 19 nt, Human
acuuuuauucccaucagug

SEQ ID NO: 838355 - RNA, 25 nt, Human
agagaaaaacauuaggaaaacagaa

SEQ ID NO: 838356 - RNA, 20 nt, Human
agagggugaaaacaagggaa

SEQ ID NO: 838357 - RNA, 19 nt, Human
aggaaaacagaagugggca

SEQ ID NO: 838358 - RNA, 19 nt, Human
aggcaccgagccugcccag

SEQ ID NO: 838359 - RNA, 18 nt, Human
aggcgagggcagggaagc

SEQ ID NO: 838360 - RNA, 21 nt, Human
agggaauggaggaugaggggg

SEQ ID NO: 838361 - RNA, 23 nt, Human
agggcaaggacucgguuuggggg

SEQ ID NO: 838362 - RNA, 20 nt, Human
aggggacucaguccggggcu

SEQ ID NO: 838363 - RNA, 18 nt, Human
cacccuuuaccucucugc

SEQ ID NO: 838364 - RNA, 20 nt, Human
cagaggacagagggugaaaa

SEQ ID NO: 838365 - RNA, 24 nt, Human
cagggcaaggacucgguuuggggg

SEQ ID NO: 838366 - RNA, 18 nt, Human
ccacccgaggccgcgcgg

SEQ ID NO: 838367 - RNA, 21 nt, Human
ccacccggagacacagggcgc

SEQ ID NO: 838368 - RNA, 24 nt, Human
ccaccugcugacagaggugaaggc

SEQ ID NO: 838369 - RNA, 18 nt, Human
ccccagggccgccacacc

SEQ ID NO: 838370 - RNA, 19 nt, Human
ccguguggguaugaggagg

SEQ ID NO: 838371 - RNA, 24 nt, Human
cgacggguggguuguucuccuugg

SEQ ID NO: 838372 - RNA, 21 nt, Human
cgagaggaggaggaggaaggc

SEQ ID NO: 838373 - RNA, 22 nt, Human
cgccacaccacggagagucccc

SEQ ID NO: 838374 - RNA, 18 nt, Human
cgccguguggguaugagg

SEQ ID NO: 838375 - RNA, 21 nt, Human
cggcgguagcggcgagaggag

SEQ ID NO: 838376 - RNA, 20 nt, Human
cuccaagaggugacaagggg

SEQ ID NO: 838377 - RNA, 28 nt, Human
cugguccugggcuuucagugcccugcgg

SEQ ID NO: 838378 - RNA, 22 nt, Human
gagggugcaccgggaagcgggc

SEQ ID NO: 838379 - RNA, 24 nt, Human
gaguugagcgaacgcuauggugaa

SEQ ID NO: 838380 - RNA, 19 nt, Human
gaugagggggagggaagag

SEQ ID NO: 838381 - RNA, 18 nt, Human
gcagcagggcaaggacuc

SEQ ID NO: 838382 - RNA, 19 nt, Human
gcagggaagccagggccca

SEQ ID NO: 838383 - RNA, 22 nt, Human
gccacaccacggagaguccccg

SEQ ID NO: 838384 - RNA, 18 nt, Human
gccccagggccgccacac

SEQ ID NO: 838385 - RNA, 21 nt, Human
gcggcggcggcgacggcggua

SEQ ID NO: 838386 - RNA, 23 nt, Human
gcggcggcggcgacggcgguagc

SEQ ID NO: 838387 - RNA, 20 nt, Human
gcggcggcugcggcggcggc

SEQ ID NO: 838388 - RNA, 19 nt, Human
gcgguagcggcgagaggag

SEQ ID NO: 838389 - RNA, 21 nt, Human
gcucacauccugggguauggg

SEQ ID NO: 838390 - RNA, 18 nt, Human
ggagggaagaggggaggg

SEQ ID NO: 838391 - RNA, 22 nt, Human
ggcagggacccugggagccucc

SEQ ID NO: 838392 - RNA, 19 nt, Human
ggcuccaagaggugacaag

SEQ ID NO: 838393 - RNA, 18 nt, Human
gggaagccagggcccagc

SEQ ID NO: 838394 - RNA, 18 nt, Human
gggacucaguccggggcu

SEQ ID NO: 838395 - RNA, 19 nt, Human
gggauggccugguggggug

SEQ ID NO: 838396 - RNA, 21 nt, Human
gggcaaggacucgguuugggg

SEQ ID NO: 838397 - RNA, 19 nt, Human
gggcagggacccugggagc

SEQ ID NO: 838398 - RNA, 23 nt, Human
gggcagggacccugggagccucc

SEQ ID NO: 838399 - RNA, 21 nt, Human
gggcccagcaaagcucuucug

SEQ ID NO: 838400 - RNA, 23 nt, Human
gggcuauuaagaaagagccccag

SEQ ID NO: 838401 - RNA, 20 nt, Human
ggggagggaagaggggaggg

SEQ ID NO: 838402 - RNA, 24 nt, Human
ggggauggccugguggggugggcc

SEQ ID NO: 838403 - RNA, 18 nt, Human
gggggagggaagagggga

SEQ ID NO: 838404 - RNA, 23 nt, Human
ggucugaggugucucccggggag

SEQ ID NO: 838405 - RNA, 19 nt, Human
ggugacaaggggagugacg

SEQ ID NO: 838406 - RNA, 19 nt, Human
ggugcaccgggaagcgggc

SEQ ID NO: 838407 - RNA, 19 nt, Human
gugaugcugacgggccuga

SEQ ID NO: 838408 - RNA, 24 nt, Human
guuugggggagauacagcggcagg

SEQ ID NO: 838409 - RNA, 19 nt, Human
uaagaaagagccccagggc

SEQ ID NO: 838410 - RNA, 27 nt, Human
uaagaaagagccccagggccgccacac

SEQ ID NO: 838411 - RNA, 22 nt, Human
uacugguccugggcuuucagug

SEQ ID NO: 838412 - RNA, 27 nt, Human
uauggggauggccugguggggugggcc

SEQ ID NO: 838413 - RNA, 20 nt, Human
uauuaagaaagagccccagg

SEQ ID NO: 838414 - RNA, 23 nt, Human
ucaguggacuaggagaggguccu

SEQ ID NO: 838415 - RNA, 19 nt, Human
uccaagaggugacaagggg

SEQ ID NO: 838416 - RNA, 20 nt, Human
uccccaggcaaggccaccug

SEQ ID NO: 838417 - RNA, 18 nt, Human
ucccggggagggugcacc

SEQ ID NO: 838418 - RNA, 28 nt, Human
ucucaaugccccacccuuuaccucucug

SEQ ID NO: 838419 - RNA, 20 nt, Human
ugaggugucucccggggagg

SEQ ID NO: 838420 - RNA, 19 nt, Human
ugccccacccuuuaccucu

SEQ ID NO: 838421 - RNA, 20 nt, Human
uggaggggacucaguccggg

SEQ ID NO: 838422 - RNA, 18 nt, Human
ugggagccuccauucuca

SEQ ID NO: 838423 - RNA, 19 nt, Human
ugggguaugggaaacccac

SEQ ID NO: 838424 - RNA, 21 nt, Human
uuacugguccugggcuuucag

SEQ ID NO: 838425 - RNA, 18 nt, Human
uugguuacugguccuggg

SEQ ID NO: 838426 - RNA, 25 nt, Human
uuuauagagaaaaacauuaggaaaa

SEQ ID NO: 838427 - RNA, 20 nt, Human
aaaacaaacaaacaaagcca

SEQ ID NO: 838428 - RNA, 21 nt, Human
aaacaaacaaacaaagccaaa

SEQ ID NO: 838429 - RNA, 24 nt, Human
aaacaaacaaagccaaagaguaca

SEQ ID NO: 838430 - RNA, 30 nt, Human
aaacagacuggaaagugauuuuucccccag

SEQ ID NO: 838431 - RNA, 19 nt, Human
aaacugacaauuguccucc

SEQ ID NO: 838432 - RNA, 21 nt, Human
aaauaauaaaugggacaaacu

SEQ ID NO: 838433 - RNA, 22 nt, Human
aaaucacaagcacacacagcaa

SEQ ID NO: 838434 - RNA, 18 nt, Human
aacaaagaugcaagcugc

SEQ ID NO: 838435 - RNA, 24 nt, Human
aacaagaaaaaaaaauagauccag

SEQ ID NO: 838436 - RNA, 27 nt, Human
aacaagaaaaaaaaauagauccaggag

SEQ ID NO: 838437 - RNA, 23 nt, Human
aagaaaaaaaaauagauccagga

SEQ ID NO: 838438 - RNA, 24 nt, Human
aagaaaacaaacaaacaaagccaa

SEQ ID NO: 838439 - RNA, 25 nt, Human
aagaaaacaaacaaacaaagccaaa

SEQ ID NO: 838440 - RNA, 23 nt, Human
aagaaaccuagagcuacaaauca

SEQ ID NO: 838441 - RNA, 18 nt, Human
aagaagaaaacaaacaaa

SEQ ID NO: 838442 - RNA, 19 nt, Human
aagaagaaaacaaacaaac

SEQ ID NO: 838443 - RNA, 22 nt, Human
aagaagaaaacaaacaaacaaa

SEQ ID NO: 838444 - RNA, 21 nt, Human
aagaagagcuccuuuuugaua

SEQ ID NO: 838445 - RNA, 19 nt, Human
aagagggggaguaaaaaga

SEQ ID NO: 838446 - RNA, 21 nt, Human
aagcucaucuccuauagagga

SEQ ID NO: 838447 - RNA, 20 nt, Human
aauaauaaaugggacaaacu

SEQ ID NO: 838448 - RNA, 23 nt, Human
aaucuuuucaaccaagcacuuaa

SEQ ID NO: 838449 - RNA, 22 nt, Human
acaaacgcagaagaaggcacca

SEQ ID NO: 838450 - RNA, 24 nt, Human
acaaaucacaagcacacacagcaa

SEQ ID NO: 838451 - RNA, 20 nt, Human
acaguucauucuauacuaua

SEQ ID NO: 838452 - RNA, 23 nt, Human
accccgaaacccaccaauccaca

SEQ ID NO: 838453 - RNA, 20 nt, Human
acuuugccuugcuucucuuc

SEQ ID NO: 838454 - RNA, 18 nt, Human
agaaaauacucugccuuc

SEQ ID NO: 838455 - RNA, 22 nt, Human
agagaagucugagaagcuugag

SEQ ID NO: 838456 - RNA, 23 nt, Human
agagcuacaaaucauagaaccug

SEQ ID NO: 838457 - RNA, 21 nt, Human
aggaagagaggauucagggaa

SEQ ID NO: 838458 - RNA, 19 nt, Human
aggcuccaggucaucugcc

SEQ ID NO: 838459 - RNA, 25 nt, Human
agggggaguaaaaagaaaauuggga

SEQ ID NO: 838460 - RNA, 23 nt, Human
aguaaaaagaaaauugggagaga

SEQ ID NO: 838461 - RNA, 23 nt, Human
auaaaauacaaaucacaagcaca

SEQ ID NO: 838462 - RNA, 27 nt, Human
auaagguuuuuuuuucuucuuuuuaaa

SEQ ID NO: 838463 - RNA, 18 nt, Human
auauaaaaucauauuaca

SEQ ID NO: 838464 - RNA, 18 nt, Human
caaacaaacaaagccaaa

SEQ ID NO: 838465 - RNA, 24 nt, Human
caaacacacacauacacacaggua

SEQ ID NO: 838466 - RNA, 19 nt, Human
caaauagacacacaaacac

SEQ ID NO: 838467 - RNA, 22 nt, Human
caaauagacacacaaacacaca

SEQ ID NO: 838468 - RNA, 21 nt, Human
caacuugcuaggaacucccaa

SEQ ID NO: 838469 - RNA, 24 nt, Human
caagaaaccuagagcuacaaauca

SEQ ID NO: 838470 - RNA, 22 nt, Human
caagaagagcuccuuuuugaua

SEQ ID NO: 838471 - RNA, 20 nt, Human
caagauggaaaugcacaccc

SEQ ID NO: 838472 - RNA, 20 nt, Human
caauagaaaugcaagccuug

SEQ ID NO: 838473 - RNA, 21 nt, Human
cacaacagcuggaacagacau

SEQ ID NO: 838474 - RNA, 24 nt, Human
cacacacauacacacagguagaug

SEQ ID NO: 838475 - RNA, 20 nt, Human
caccccgaaacccaccaauc

SEQ ID NO: 838476 - RNA, 18 nt, Human
caccucaaaguucugauu

SEQ ID NO: 838477 - RNA, 18 nt, Human
cagcagucacaacagcug

SEQ ID NO: 838478 - RNA, 19 nt, Human
caggagggacaaacgcaga

SEQ ID NO: 838479 - RNA, 20 nt, Human
cagggaagcaauccucucca

SEQ ID NO: 838480 - RNA, 21 nt, Human
caguucauucuauacuauaga

SEQ ID NO: 838481 - RNA, 22 nt, Human
cauuuuguaaagaauaagagaa

SEQ ID NO: 838482 - RNA, 20 nt, Human
cccaggauugggcagauguu

SEQ ID NO: 838483 - RNA, 18 nt, Human
cccauuauuuccucaucu

SEQ ID NO: 838484 - RNA, 27 nt, Human
ccccucaaaacugacaauuguccuccu

SEQ ID NO: 838485 - RNA, 23 nt, Human
cccuaaaagauguggugaucacc

SEQ ID NO: 838486 - RNA, 20 nt, Human
cccucuguucuuccuugucc

SEQ ID NO: 838487 - RNA, 21 nt, Human
cccucuguucuuccuugucca

SEQ ID NO: 838488 - RNA, 20 nt, Human
ccucagaacaacaagaaaaa

SEQ ID NO: 838489 - RNA, 20 nt, Human
ccuccuuaccaaacagagau

SEQ ID NO: 838490 - RNA, 21 nt, Human
ccuccuuaccaaacagagauu

SEQ ID NO: 838491 - RNA, 23 nt, Human
ccuucagaggugggccgaaccag

SEQ ID NO: 838492 - RNA, 21 nt, Human
ccuuuugaaguccuaagccuu

SEQ ID NO: 838493 - RNA, 23 nt, Human
cuaaaagauguggugaucaccca

SEQ ID NO: 838494 - RNA, 25 nt, Human
cuagagcuacaaaucauagaaccug

SEQ ID NO: 838495 - RNA, 25 nt, Human
cuauaccacaagugucagaagaacc

SEQ ID NO: 838496 - RNA, 23 nt, Human
cucagaacaacaagaaaaaaaaa

SEQ ID NO: 838497 - RNA, 24 nt, Human
cuccaggucaucugccuucaccgu

SEQ ID NO: 838498 - RNA, 23 nt, Human
cucuucuguagcuaguuuugcaa

SEQ ID NO: 838499 - RNA, 25 nt, Human
cugcuucacugaagaagaaaacaaa

SEQ ID NO: 838500 - RNA, 18 nt, Human
cuggaaagugauuuuucc

SEQ ID NO: 838501 - RNA, 22 nt, Human
cuugcuucaccccgaaacccac

SEQ ID NO: 838502 - RNA, 21 nt, Human
cuuuccacuaauacuauacca

SEQ ID NO: 838503 - RNA, 19 nt, Human
cuuuuugucagggccaaug

SEQ ID NO: 838504 - RNA, 21 nt, Human
gaaaacaaacaaacaaagcca

SEQ ID NO: 838505 - RNA, 21 nt, Human
gaacuuaaaaaauaaaagccc

SEQ ID NO: 838506 - RNA, 23 nt, Human
gaacuugcuucaccccgaaaccc

SEQ ID NO: 838507 - RNA, 24 nt, Human
gacacaaaaccuaguugaauuaca

SEQ ID NO: 838508 - RNA, 19 nt, Human
gcugcuucacugaagaaga

SEQ ID NO: 838509 - RNA, 22 nt, Human
gcuucacugaagaagaaaacaa

SEQ ID NO: 838510 - RNA, 20 nt, Human
gguguggaacuggucugagg

SEQ ID NO: 838511 - RNA, 24 nt, Human
gugaacuugcuucaccccgaaacc

SEQ ID NO: 838512 - RNA, 23 nt, Human
uaaaauacaaaucacaagcacac

SEQ ID NO: 838513 - RNA, 22 nt, Human
uaaaucucgaggugguguggaa

SEQ ID NO: 838514 - RNA, 20 nt, Human
uaacacaugucccccucaaa

SEQ ID NO: 838515 - RNA, 23 nt, Human
uaagagaagucugagaagcuuga

SEQ ID NO: 838516 - RNA, 20 nt, Human
uaauuucaucacuaccguag

SEQ ID NO: 838517 - RNA, 22 nt, Human
uacaaaucacuuuccacuaaua

SEQ ID NO: 838518 - RNA, 22 nt, Human
uacaaaucauagaaccuguggg

SEQ ID NO: 838519 - RNA, 20 nt, Human
uaccaaacagagaugcucau

SEQ ID NO: 838520 - RNA, 24 nt, Human
uaccaaacagagaugcucauagaa

SEQ ID NO: 838521 - RNA, 19 nt, Human
uagaggagccagcuauugc

SEQ ID NO: 838522 - RNA, 22 nt, Human
uagaugaauagguagguggaua

SEQ ID NO: 838523 - RNA, 20 nt, Human
uagggucaaccgauuaaguc

SEQ ID NO: 838524 - RNA, 22 nt, Human
uagguagguggauauaaaauca

SEQ ID NO: 838525 - RNA, 24 nt, Human
uagguagguggauauaaaaucaua

SEQ ID NO: 838526 - RNA, 19 nt, Human
uagucaacuugcuaggaac

SEQ ID NO: 838527 - RNA, 22 nt, Human
uaguugaauuacaguguuagaa

SEQ ID NO: 838528 - RNA, 18 nt, Human
uauuacaaaucacuuucc

SEQ ID NO: 838529 - RNA, 19 nt, Human
uauuacaaaucacuuucca

SEQ ID NO: 838530 - RNA, 20 nt, Human
uauuacaaaucacuuuccac

SEQ ID NO: 838531 - RNA, 22 nt, Human
ucaaagaugacuuucuauugau

SEQ ID NO: 838532 - RNA, 19 nt, Human
ucagaacaacaagaaaaaa

SEQ ID NO: 838533 - RNA, 21 nt, Human
ucagaacaacaagaaaaaaaa

SEQ ID NO: 838534 - RNA, 23 nt, Human
ucagaacaacaagaaaaaaaaau

SEQ ID NO: 838535 - RNA, 19 nt, Human
ucagcuccucagaacaaca

SEQ ID NO: 838536 - RNA, 21 nt, Human
ucagggaagcaauccucucca

SEQ ID NO: 838537 - RNA, 20 nt, Human
ucauaugacacaucauuaaa

SEQ ID NO: 838538 - RNA, 21 nt, Human
uccaaaaauggcagcagucac

SEQ ID NO: 838539 - RNA, 18 nt, Human
uccaauagaaaugcaagc

SEQ ID NO: 838540 - RNA, 22 nt, Human
uccaugcccaggaauuaauuca

SEQ ID NO: 838541 - RNA, 24 nt, Human
ucccuucuuguauaaaauggaauc

SEQ ID NO: 838542 - RNA, 19 nt, Human
uccuauagaggagccagcu

SEQ ID NO: 838543 - RNA, 21 nt, Human
ucgcuucuugccugaccugcc

SEQ ID NO: 838544 - RNA, 20 nt, Human
ucuggaccacagacacaauu

SEQ ID NO: 838545 - RNA, 22 nt, Human
ucugguaguccaugcccaggaa

SEQ ID NO: 838546 - RNA, 22 nt, Human
ucugguaguccaugcccaggaa

SEQ ID NO: 838547 - RNA, 22 nt, Human
ucuguucuuccuuguccaaaag

SEQ ID NO: 838548 - RNA, 24 nt, Human
ugaaauugccagccuccugucucc

SEQ ID NO: 838549 - RNA, 19 nt, Human
ugaacuuaaaaaauaaaag

SEQ ID NO: 838550 - RNA, 21 nt, Human
ugaccgaugcagcagauggac

SEQ ID NO: 838551 - RNA, 22 nt, Human
ugagugauuuuuauguuuucca

SEQ ID NO: 838552 - RNA, 18 nt, Human
ugcaacguuagggaaggc

SEQ ID NO: 838553 - RNA, 23 nt, Human
ugcaacguuagggaaggcugugc

SEQ ID NO: 838554 - RNA, 19 nt, Human
ugcacgcugcugaagaaag

SEQ ID NO: 838555 - RNA, 21 nt, Human
ugccaaauagacacacaaaca

SEQ ID NO: 838556 - RNA, 20 nt, Human
ugcccaggaauuaauucaac

SEQ ID NO: 838557 - RNA, 25 nt, Human
ugccuucaccucaaaguucugauuu

SEQ ID NO: 838558 - RNA, 18 nt, Human
ugccuugcuucucuucug

SEQ ID NO: 838559 - RNA, 21 nt, Human
ugcuaggaacucccaaugaag

SEQ ID NO: 838560 - RNA, 18 nt, Human
ugcugaagaaagaugcgg

SEQ ID NO: 838561 - RNA, 20 nt, Human
ugcuucaccccgaaacccac

SEQ ID NO: 838562 - RNA, 23 nt, Human
ugcuucaccccgaaacccaccaa

SEQ ID NO: 838563 - RNA, 23 nt, Human
uggaaaugcacaccuugcaaaac

SEQ ID NO: 838564 - RNA, 21 nt, Human
uggaauuuuaaggccaggguu

SEQ ID NO: 838565 - RNA, 21 nt, Human
uggaccacagacacaauugaa

SEQ ID NO: 838566 - RNA, 21 nt, Human
uggauauaaaaucauauuaca

SEQ ID NO: 838567 - RNA, 22 nt, Human
uggcagcagucacaacagcugg

SEQ ID NO: 838568 - RNA, 24 nt, Human
uggcagcagucacaacagcuggaa

SEQ ID NO: 838569 - RNA, 18 nt, Human
uguagcuaguuuugcaac

SEQ ID NO: 838570 - RNA, 19 nt, Human
uguggaacuggucugaggu

SEQ ID NO: 838571 - RNA, 22 nt, Human
uguuuuacucuuugagcuguua

SEQ ID NO: 838572 - RNA, 19 nt, Human
uugaacuugaggccaagaa

SEQ ID NO: 838573 - RNA, 23 nt, Human
uugaucaucaagaaaccuagagc

SEQ ID NO: 838574 - RNA, 19 nt, Human
uuucacaagaagagcuccu

SEQ ID NO: 838575 - RNA, 23 nt, Human
uuuccacuaauacuauaccacaa

SEQ ID NO: 838576 - RNA, 21 nt, Human
uuuccuuugaugggggagggg

SEQ ID NO: 838577 - RNA, 23 nt, Human
caggcagcuggguggccaagugg

SEQ ID NO: 838578 - RNA, 19 nt, Human
ccccgccgccaccgccgcc

SEQ ID NO: 838579 - RNA, 19 nt, Human
ccccuggcaggcagcuggg

SEQ ID NO: 838580 - RNA, 19 nt, Human
ccccuguggggcuggccgc

SEQ ID NO: 838581 - RNA, 18 nt, Human
ccgccgccaccgccgccg

SEQ ID NO: 838582 - RNA, 19 nt, Human
ccgccgccaccgccgccgc

SEQ ID NO: 838583 - RNA, 31 nt, Human
ccgccgccaccgccgccgcgcaccgcccggg

SEQ ID NO: 838584 - RNA, 24 nt, Human
ccgccgcgcaccgcccggccgccc

SEQ ID NO: 838585 - RNA, 22 nt, Human
uggcaggcagcuggguggccaa

SEQ ID NO: 838586 - RNA, 20 nt, Human
uggccaugccccuggccccc

SEQ ID NO: 838587 - RNA, 25 nt, Human
uggccguccaggucccaggucuccc

SEQ ID NO: 838588 - RNA, 21 nt, Human
uggggaggggggccuguggcc

SEQ ID NO: 838589 - RNA, 18 nt, Human
uuccccgccgccaccgcc

SEQ ID NO: 838590 - RNA, 26 nt, Human
uuccccgccgccaccgccgccgcgca

SEQ ID NO: 838591 - RNA, 25 nt, Human
aaaaaagaaaagugcagucagagag

SEQ ID NO: 838592 - RNA, 21 nt, Human
aaacaaauuuaaccaagaauc

SEQ ID NO: 838593 - RNA, 18 nt, Human
aaagaauacagauauaag

SEQ ID NO: 838594 - RNA, 23 nt, Human
aaaguuuagggcucaaccccaca

SEQ ID NO: 838595 - RNA, 19 nt, Human
aaaugaggauauauuuuaa

SEQ ID NO: 838596 - RNA, 19 nt, Human
aacaucccuggccucuacc

SEQ ID NO: 838597 - RNA, 19 nt, Human
aacuguuuaaaauacacua

SEQ ID NO: 838598 - RNA, 19 nt, Human
aagcagaaagcuaucccuc

SEQ ID NO: 838599 - RNA, 21 nt, Human
aauuuaaccaagaaucaagag

SEQ ID NO: 838600 - RNA, 20 nt, Human
agaaaccuauauucuuuaag

SEQ ID NO: 838601 - RNA, 18 nt, Human
agcaacaucccuggccuc

SEQ ID NO: 838602 - RNA, 21 nt, Human
agguagaggcacaggagaggu

SEQ ID NO: 838603 - RNA, 31 nt, Human
agguuuuccgugugugugugugugugugugg

SEQ ID NO: 838604 - RNA, 19 nt, Human
auacaugauuuugauuauu

SEQ ID NO: 838605 - RNA, 22 nt, Human
auccuaagaacaaggguuucau

SEQ ID NO: 838606 - RNA, 24 nt, Human
aucuaaagaauacagauauaagag

SEQ ID NO: 838607 - RNA, 23 nt, Human
aucuucuaucaagacuccuacug

SEQ ID NO: 838608 - RNA, 19 nt, Human
auggggaaucaggagcugg

SEQ ID NO: 838609 - RNA, 23 nt, Human
auguuaccuauggggaaucagga

SEQ ID NO: 838610 - RNA, 19 nt, Human
auuuagcaacaucccuggc

SEQ ID NO: 838611 - RNA, 23 nt, Human
auuuugggagggguaauucuuug

SEQ ID NO: 838612 - RNA, 18 nt, Human
caaauaaacauaccucuc

SEQ ID NO: 838613 - RNA, 24 nt, Human
caaaugaggauauauuuuaaauac

SEQ ID NO: 838614 - RNA, 20 nt, Human
caaguaaaacaaaacaaaac

SEQ ID NO: 838615 - RNA, 22 nt, Human
cacuaaaaacuacaaauuauac

SEQ ID NO: 838616 - RNA, 23 nt, Human
cagcucaacaauuugaaaauuag

SEQ ID NO: 838617 - RNA, 23 nt, Human
caucccuggccucuacccaauuc

SEQ ID NO: 838618 - RNA, 23 nt, Human
ccucuugucuuuuuucuccccca

SEQ ID NO: 838619 - RNA, 18 nt, Human
ccuguuuuuuugaggugc

SEQ ID NO: 838620 - RNA, 21 nt, Human
cgugugugugugugugugugu

SEQ ID NO: 838621 - RNA, 22 nt, Human
cuaaaguuuagggccggggucc

SEQ ID NO: 838622 - RNA, 23 nt, Human
cuggccucuacccaauucaugcu

SEQ ID NO: 838623 - RNA, 19 nt, Human
cuuucccucuugucuuuuu

SEQ ID NO: 838624 - RNA, 22 nt, Human
cuuucccucuugucuuuuuucu

SEQ ID NO: 838625 - RNA, 24 nt, Human
gaaugaauagaugggagcuaggua

SEQ ID NO: 838626 - RNA, 23 nt, Human
gguauacaugauuuugauuauuu

SEQ ID NO: 838627 - RNA, 19 nt, Human
gguugguagacagagguua

SEQ ID NO: 838628 - RNA, 19 nt, Human
guaaaacaaaacaaaacug

SEQ ID NO: 838629 - RNA, 23 nt, Human
guaucccuccaauugugacaacc

SEQ ID NO: 838630 - RNA, 18 nt, Human
gugugugugugugugugu

SEQ ID NO: 838631 - RNA, 18 nt, Human
uaaaauacacuaaacacc

SEQ ID NO: 838632 - RNA, 23 nt, Human
uacccuaaacuaaaguuuagggc

SEQ ID NO: 838633 - RNA, 18 nt, Human
uagcaacaucccuggccu

SEQ ID NO: 838634 - RNA, 22 nt, Human
uagcuguuuucaguuuauaacu

SEQ ID NO: 838635 - RNA, 25 nt, Human
uaggauuaacaaauaaacauaccuc

SEQ ID NO: 838636 - RNA, 18 nt, Human
uauaaaaaagaaaagugc

SEQ ID NO: 838637 - RNA, 19 nt, Human
uauaagaagaaaccuauau

SEQ ID NO: 838638 - RNA, 21 nt, Human
uauaaucuauuuagcaacauc

SEQ ID NO: 838639 - RNA, 18 nt, Human
uaucuucuaucaagacuc

SEQ ID NO: 838640 - RNA, 25 nt, Human
uauggccgugagaagauaaaacaga

SEQ ID NO: 838641 - RNA, 25 nt, Human
uauuucuccauuccuuuaauuuugg

SEQ ID NO: 838642 - RNA, 21 nt, Human
ucaagguuuacagauuccagu

SEQ ID NO: 838643 - RNA, 23 nt, Human
ucccccaucucucuuuuuuuaua

SEQ ID NO: 838644 - RNA, 21 nt, Human
ucccuggccucuacccaauuc

SEQ ID NO: 838645 - RNA, 18 nt, Human
ucuaaagaauacagauau

SEQ ID NO: 838646 - RNA, 20 nt, Human
ucugugauccuaagaacaag

SEQ ID NO: 838647 - RNA, 21 nt, Human
ucuugucuuuuuucuccccca

SEQ ID NO: 838648 - RNA, 20 nt, Human
ucuuuuuucucccccaucuc

SEQ ID NO: 838649 - RNA, 18 nt, Human
ugaaaucauccucgcucc

SEQ ID NO: 838650 - RNA, 23 nt, Human
ugaauagaugggagcuagguaga

SEQ ID NO: 838651 - RNA, 20 nt, Human
ugagaagauaaaacagaucg

SEQ ID NO: 838652 - RNA, 21 nt, Human
ugagcaaaaagguugguagac

SEQ ID NO: 838653 - RNA, 18 nt, Human
ugauccuaagaacaaggg

SEQ ID NO: 838654 - RNA, 19 nt, Human
ugauccuaagaacaagggu

SEQ ID NO: 838655 - RNA, 26 nt, Human
ugccaaaugccuagugaaaucauccu

SEQ ID NO: 838656 - RNA, 19 nt, Human
ugcuacuaguaucccucca

SEQ ID NO: 838657 - RNA, 22 nt, Human
uguacuaaagugcuuuaucucu

SEQ ID NO: 838658 - RNA, 18 nt, Human
ugugugugugugugugug

SEQ ID NO: 838659 - RNA, 18 nt, Human
ugugugugugugugugug

SEQ ID NO: 838660 - RNA, 18 nt, Human
ugugugugugugugugug

SEQ ID NO: 838661 - RNA, 21 nt, Human
ugugugugugugugugugugu

SEQ ID NO: 838662 - RNA, 21 nt, Human
ugugugugugugugugugugu

SEQ ID NO: 838663 - RNA, 21 nt, Human
ugugugugugugugugugugu

SEQ ID NO: 838664 - RNA, 22 nt, Human
ugugugugugugugugugugug

SEQ ID NO: 838665 - RNA, 24 nt, Human
uuaggauuaacaaauaaacauacc

SEQ ID NO: 838666 - RNA, 21 nt, Human
uugucuuuuuucucccccauc

SEQ ID NO: 838667 - RNA, 20 nt, Human
uuugauaagagugauguccu

SEQ ID NO: 838668 - RNA, 19 nt, Human
uuugggacgucccccucaa

SEQ ID NO: 838669 - RNA, 23 nt, Human
aaagcagggguacucagagccca

SEQ ID NO: 838670 - RNA, 23 nt, Human
aagcagcaacuucacugagccca

SEQ ID NO: 838671 - RNA, 23 nt, Human
agcagcccccugccaugcagcaa

SEQ ID NO: 838672 - RNA, 20 nt, Human
agcuggcgguuuuggacaca

SEQ ID NO: 838673 - RNA, 24 nt, Human
aggaaaaacaaaauaacacuuuga

SEQ ID NO: 838674 - RNA, 23 nt, Human
aggcagccugagacaccuccucg

SEQ ID NO: 838675 - RNA, 20 nt, Human
agggguacucagagcccaga

SEQ ID NO: 838676 - RNA, 22 nt, Human
auggcggcggcgguggcuaagg

SEQ ID NO: 838677 - RNA, 25 nt, Human
auggcggcggcgguggcuaaggucc

SEQ ID NO: 838678 - RNA, 19 nt, Human
caaaggcugggccaggagc

SEQ ID NO: 838679 - RNA, 19 nt, Human
cacacagucuccaguuuag

SEQ ID NO: 838680 - RNA, 23 nt, Human
cacaggcaggacaggcuccuccu

SEQ ID NO: 838681 - RNA, 23 nt, Human
cacuggagcuccuggaucugaca

SEQ ID NO: 838682 - RNA, 23 nt, Human
cagagcccagagggcacacacag

SEQ ID NO: 838683 - RNA, 23 nt, Human
cagaugcccccaccgugucgucc

SEQ ID NO: 838684 - RNA, 19 nt, Human
cagcauaagagugacucca

SEQ ID NO: 838685 - RNA, 21 nt, Human
cagccaccccaccccggcucu

SEQ ID NO: 838686 - RNA, 21 nt, Human
cagccuaggcccaagcccaaa

SEQ ID NO: 838687 - RNA, 21 nt, Human
cagcuguguggccgugagagc

SEQ ID NO: 838688 - RNA, 23 nt, Human
caggagcgcaaaggccacaaccu

SEQ ID NO: 838689 - RNA, 21 nt, Human
caggcaggacaggcuccuccu

SEQ ID NO: 838690 - RNA, 21 nt, Human
cauggccacaggcaggacagg

SEQ ID NO: 838691 - RNA, 23 nt, Human
ccaagcccaaagcagggguacuc

SEQ ID NO: 838692 - RNA, 21 nt, Human
ccacaucgcgggccccugccu

SEQ ID NO: 838693 - RNA, 20 nt, Human
ccaccccggcucugagcccc

SEQ ID NO: 838694 - RNA, 22 nt, Human
ccagcgcccaggcugagguaaa

SEQ ID NO: 838695 - RNA, 20 nt, Human
ccaggagcgcaaaggccaca

SEQ ID NO: 838696 - RNA, 22 nt, Human
ccccaaccccugcugccauucc

SEQ ID NO: 838697 - RNA, 21 nt, Human
ccccaccgugucguccaucuc

SEQ ID NO: 838698 - RNA, 18 nt, Human
cccccugccaugcagcaa

SEQ ID NO: 838699 - RNA, 21 nt, Human
cccuaccccuccacgcugagc

SEQ ID NO: 838700 - RNA, 22 nt, Human
cccugcugccauucccccucca

SEQ ID NO: 838701 - RNA, 21 nt, Human
ccugcugccauucccccucca

SEQ ID NO: 838702 - RNA, 19 nt, Human
ccuggaucugacaggcugg

SEQ ID NO: 838703 - RNA, 20 nt, Human
cgacucaggcagccugagac

SEQ ID NO: 838704 - RNA, 26 nt, Human
cgcagccggggcugcaugccgggggc

SEQ ID NO: 838705 - RNA, 20 nt, Human
cggcagccugggccucugcc

SEQ ID NO: 838706 - RNA, 22 nt, Human
cguccaucuccccuucugcucc

SEQ ID NO: 838707 - RNA, 22 nt, Human
cuccaugguccacagccuugcc

SEQ ID NO: 838708 - RNA, 18 nt, Human
cuccucgggcucucuggg

SEQ ID NO: 838709 - RNA, 19 nt, Human
cugagcccagcagcagccc

SEQ ID NO: 838710 - RNA, 19 nt, Human
cugaggcugcagccacccc

SEQ ID NO: 838711 - RNA, 18 nt, Human
gaaaggaccagcgcccag

SEQ ID NO: 838712 - RNA, 22 nt, Human
gaggguggggcccacggcugcc

SEQ ID NO: 838713 - RNA, 18 nt, Human
gaucagggcacuggccag

SEQ ID NO: 838714 - RNA, 24 nt, Human
gaugcuguuuccccaaccccugcu

SEQ ID NO: 838715 - RNA, 18 nt, Human
gcagccggggcugcaugc

SEQ ID NO: 838716 - RNA, 19 nt, Human
gcaggacaggcuccuccuu

SEQ ID NO: 838717 - RNA, 21 nt, Human
gccaggagcgcaaaggccaca

SEQ ID NO: 838718 - RNA, 23 nt, Human
gcccagcagcagcccccugccau

SEQ ID NO: 838719 - RNA, 20 nt, Human
gcgucagucuugugccccca

SEQ ID NO: 838720 - RNA, 19 nt, Human
gcugcagccaccccacccc

SEQ ID NO: 838721 - RNA, 20 nt, Human
ggacuggcagagccaaccug

SEQ ID NO: 838722 - RNA, 20 nt, Human
ggagcgcaaaggccacaacc

SEQ ID NO: 838723 - RNA, 18 nt, Human
ggcacacacagucuccag

SEQ ID NO: 838724 - RNA, 20 nt, Human
ggccacaggcaggacaggcc

SEQ ID NO: 838725 - RNA, 24 nt, Human
ggcugcagccaccccaccccggcu

SEQ ID NO: 838726 - RNA, 20 nt, Human
gggcacagaccgacgcuggc

SEQ ID NO: 838727 - RNA, 22 nt, Human
gguggcgauggcggcggcggug

SEQ ID NO: 838728 - RNA, 23 nt, Human
gguggcgauggcggcggcggugg

SEQ ID NO: 838729 - RNA, 27 nt, Human
guggcgauggcggcggcgguggcuuuu

SEQ ID NO: 838730 - RNA, 22 nt, Human
gugucguccaucuccccuucug

SEQ ID NO: 838731 - RNA, 27 nt, Human
uaaaacagagacaacugcauugacaaa

SEQ ID NO: 838732 - RNA, 23 nt, Human
uacagcauaagagugacuccaac

SEQ ID NO: 838733 - RNA, 18 nt, Human
uccacaucgcgggccccu

SEQ ID NO: 838734 - RNA, 20 nt, Human
uccaguuuagaaacugggua

SEQ ID NO: 838735 - RNA, 30 nt, Human
ucccagccccuaccccuccacgcugagcuu

SEQ ID NO: 838736 - RNA, 19 nt, Human
ucccucaggcuugugggag

SEQ ID NO: 838737 - RNA, 22 nt, Human
ucccucaggcuugugggagcuc

SEQ ID NO: 838738 - RNA, 28 nt, Human
uccgcagccggggcugcaugccgggggc

SEQ ID NO: 838739 - RNA, 23 nt, Human
ucuaccagauggagugggcucug

SEQ ID NO: 838740 - RNA, 25 nt, Human
ucugggaucagggcacuggccaggc

SEQ ID NO: 838741 - RNA, 24 nt, Human
ugacaaaacuggauccccccucag

SEQ ID NO: 838742 - RNA, 22 nt, Human
ugcagccuaggcccaagcccaa

SEQ ID NO: 838743 - RNA, 18 nt, Human
ugcaugccgggggcccgg

SEQ ID NO: 838744 - RNA, 22 nt, Human
ugccaugcagcaaagggcgacc

SEQ ID NO: 838745 - RNA, 21 nt, Human
ugcccccaccgugucguccau

SEQ ID NO: 838746 - RNA, 18 nt, Human
ugccgggggcccgggcgg

SEQ ID NO: 838747 - RNA, 22 nt, Human
ugccuugcacacuguucccagc

SEQ ID NO: 838748 - RNA, 23 nt, Human
uggaaggaaaaacaaaauaacac

SEQ ID NO: 838749 - RNA, 22 nt, Human
uggcagagccaaccugggacuc

SEQ ID NO: 838750 - RNA, 21 nt, Human
uggcagcaguuccacaucgcg

SEQ ID NO: 838751 - RNA, 20 nt, Human
uggccacaggcaggacaggc

SEQ ID NO: 838752 - RNA, 23 nt, Human
uggcgauggcggcggcgguggcu

SEQ ID NO: 838753 - RNA, 21 nt, Human
uggcggcggcgguggcuaagg

SEQ ID NO: 838754 - RNA, 20 nt, Human
uggcugaggaagaacagagc

SEQ ID NO: 838755 - RNA, 19 nt, Human
ugggagaggcagggucaug

SEQ ID NO: 838756 - RNA, 24 nt, Human
ugggagcucauccagcccagagau

SEQ ID NO: 838757 - RNA, 19 nt, Human
ugggcgaggcuggcugagg

SEQ ID NO: 838758 - RNA, 18 nt, Human
uguaaaacagagacaacu

SEQ ID NO: 838759 - RNA, 25 nt, Human
uguaaaacagagacaacugcauuga

SEQ ID NO: 838760 - RNA, 19 nt, Human
uucccuucuaccagaugga

SEQ ID NO: 838761 - RNA, 21 nt, Human
uugcacacuguucccagcccc

SEQ ID NO: 838762 - RNA, 22 nt, Human
uuuuuuuuuuuuuuuccuuuaa

SEQ ID NO: 838763 - RNA, 22 nt, Human
uuuuuuuuuuuuuuuuuccuuu

SEQ ID NO: 838764 - RNA, 23 nt, Human
uuuuuuuuuuuuuuuuuuccuuu

SEQ ID NO: 838765 - RNA, 19 nt, Human
aaauagccacaagagucug

SEQ ID NO: 838766 - RNA, 21 nt, Human
aagcugccuuuguccucucca

SEQ ID NO: 838767 - RNA, 24 nt, Human
aagcugccuuuguccucuccauuc

SEQ ID NO: 838768 - RNA, 19 nt, Human
cacugaaccgcucccgcgc

SEQ ID NO: 838769 - RNA, 21 nt, Human
cacugaaccgcucccgcgccu

SEQ ID NO: 838770 - RNA, 18 nt, Human
caguccugggccccacuc

SEQ ID NO: 838771 - RNA, 22 nt, Human
caguccugggccccacucgccu

SEQ ID NO: 838772 - RNA, 23 nt, Human
cauccauccuugggccugucugg

SEQ ID NO: 838773 - RNA, 21 nt, Human
ccacgcuguccagucuccgcu

SEQ ID NO: 838774 - RNA, 22 nt, Human
ccccacucgccuggcuuccucc

SEQ ID NO: 838775 - RNA, 21 nt, Human
cccgcgccugccggauguccc

SEQ ID NO: 838776 - RNA, 19 nt, Human
ccucgguccccacuccagc

SEQ ID NO: 838777 - RNA, 26 nt, Human
ccugggccccacucgccuggcuuccu

SEQ ID NO: 838778 - RNA, 19 nt, Human
cggggcucagcagcuccac

SEQ ID NO: 838779 - RNA, 24 nt, Human
cuccagccccaugguacccggauc

SEQ ID NO: 838780 - RNA, 19 nt, Human
cugcaggcgagccagcucc

SEQ ID NO: 838781 - RNA, 18 nt, Human
gccccagguccuggggcu

SEQ ID NO: 838782 - RNA, 20 nt, Human
gccccagguccuggggcugg

SEQ ID NO: 838783 - RNA, 18 nt, Human
guggguguggccuccagc

SEQ ID NO: 838784 - RNA, 18 nt, Human
uccugccgcagcuguggc

SEQ ID NO: 838785 - RNA, 22 nt, Human
ucgccuggcuuccuccagucgc

SEQ ID NO: 838786 - RNA, 25 nt, Human
ucgguccccacuccagccccauggu

SEQ ID NO: 838787 - RNA, 23 nt, Human
ucucccggaaauagccacaagag

SEQ ID NO: 838788 - RNA, 24 nt, Human
ucucccggaaauagccacaagagu

SEQ ID NO: 838789 - RNA, 20 nt, Human
ucuccgcugcaggcgagcca

SEQ ID NO: 838790 - RNA, 22 nt, Human
ugaaccgcucccgcgccugccg

SEQ ID NO: 838791 - RNA, 18 nt, Human
uggugugucagaagcugc

SEQ ID NO: 838792 - RNA, 27 nt, Human
uugggugccugugguugguuucucuca

SEQ ID NO: 838793 - RNA, 22 nt, Human
acuaguuccugacaccccccua

SEQ ID NO: 838794 - RNA, 20 nt, Human
ccccuagggacucauuccug

SEQ ID NO: 838795 - RNA, 19 nt, Human
ggagaugaggacaugccau

SEQ ID NO: 838796 - RNA, 18 nt, Human
ugaggacaugccaugacc

SEQ ID NO: 838797 - RNA, 20 nt, Human
ugggagaugaggacaugcca

SEQ ID NO: 838798 - RNA, 23 nt, Human
ugggagcaguaggaucauccacu

SEQ ID NO: 838799 - RNA, 18 nt, Human
uuccugacaccccccuag

SEQ ID NO: 838800 - RNA, 19 nt, Human
aaagagccaaaagugugca

SEQ ID NO: 838801 - RNA, 22 nt, Human
aaauauaaagaacauauaccaa

SEQ ID NO: 838802 - RNA, 20 nt, Human
aacaaaauuuuccccaucuu

SEQ ID NO: 838803 - RNA, 24 nt, Human
aaucaaaaaugacuuaaaccaaaa

SEQ ID NO: 838804 - RNA, 29 nt, Human
aaucaaaaaugacuuaaaccaaaacuaag

SEQ ID NO: 838805 - RNA, 18 nt, Human
accacuuaaaacaaaauu

SEQ ID NO: 838806 - RNA, 20 nt, Human
auaaaaguacauuaucuaca

SEQ ID NO: 838807 - RNA, 21 nt, Human
auaaggccaacaaaaguaaaa

SEQ ID NO: 838808 - RNA, 18 nt, Human
auaccaaaaagagccaaa

SEQ ID NO: 838809 - RNA, 19 nt, Human
auaccacuuaaaacaaaau

SEQ ID NO: 838810 - RNA, 25 nt, Human
augaagaucauaaaucacaauuuag

SEQ ID NO: 838811 - RNA, 22 nt, Human
caaaaagagccaaaagugugca

SEQ ID NO: 838812 - RNA, 20 nt, Human
caaaaguaaaaauuccaaga

SEQ ID NO: 838813 - RNA, 21 nt, Human
caaauauaaacaccaguguac

SEQ ID NO: 838814 - RNA, 20 nt, Human
caagcauccauuaauguugc

SEQ ID NO: 838815 - RNA, 22 nt, Human
caaucaggaacauauuuuaaaa

SEQ ID NO: 838816 - RNA, 22 nt, Human
cacuuaaaacaaaauuuucccc

SEQ ID NO: 838817 - RNA, 18 nt, Human
caggugccccccgccucc

SEQ ID NO: 838818 - RNA, 22 nt, Human
cauaccacuuaaaacaaaauuu

SEQ ID NO: 838819 - RNA, 21 nt, Human
cauugccagcaucccauuuug

SEQ ID NO: 838820 - RNA, 23 nt, Human
ccccaggugccccccgccucccu

SEQ ID NO: 838821 - RNA, 22 nt, Human
ccccccgccucccucccgggca

SEQ ID NO: 838822 - RNA, 18 nt, Human
cccgccucccucccgggc

SEQ ID NO: 838823 - RNA, 20 nt, Human
cggagagagggcgccgcggc

SEQ ID NO: 838824 - RNA, 20 nt, Human
cucaugccacaauaaauuac

SEQ ID NO: 838825 - RNA, 24 nt, Human
cucccucccgggcaggggaggggg

SEQ ID NO: 838826 - RNA, 24 nt, Human
cuucaagcauccauuaauguugca

SEQ ID NO: 838827 - RNA, 23 nt, Human
gcaaagacaagcaaucuuacagg

SEQ ID NO: 838828 - RNA, 25 nt, Human
gcagcuuuuguacagcuucaagcau

SEQ ID NO: 838829 - RNA, 22 nt, Human
ggccccaggugccccccgccuc

SEQ ID NO: 838830 - RNA, 22 nt, Human
gggccccaggugccccccgccu

SEQ ID NO: 838831 - RNA, 25 nt, Human
uaaaauaaaugaagaucauaaauca

SEQ ID NO: 838832 - RNA, 27 nt, Human
uaaagaacauauaccaaaaagagccaa

SEQ ID NO: 838833 - RNA, 18 nt, Human
uaacuaaauuauuuuggc

SEQ ID NO: 838834 - RNA, 19 nt, Human
uaagucaaaagaaauauga

SEQ ID NO: 838835 - RNA, 18 nt, Human
uagccacacccaagaaua

SEQ ID NO: 838836 - RNA, 22 nt, Human
uauaaaaugauuacagccucca

SEQ ID NO: 838837 - RNA, 22 nt, Human
uauaaagaacauauaccaaaaa

SEQ ID NO: 838838 - RNA, 23 nt, Human
uaugcuaaauauauccauaccac

SEQ ID NO: 838839 - RNA, 22 nt, Human
ucaaaaaugacuuaaaccaaaa

SEQ ID NO: 838840 - RNA, 19 nt, Human
ucaacauuuacaucuguac

SEQ ID NO: 838841 - RNA, 18 nt, Human
ucauugccagcaucccau

SEQ ID NO: 838842 - RNA, 22 nt, Human
uccauaccacuuaaaacaaaau

SEQ ID NO: 838843 - RNA, 24 nt, Human
ucccucccgggcaggggagggggg

SEQ ID NO: 838844 - RNA, 20 nt, Human
ugaauuaagcacuugugugg

SEQ ID NO: 838845 - RNA, 22 nt, Human
ugacuuaaaccaaaacuaaguu

SEQ ID NO: 838846 - RNA, 23 nt, Human
ugacuuaauacaucacauaucaa

SEQ ID NO: 838847 - RNA, 24 nt, Human
ugccacaauaaauuacaaaguaac

SEQ ID NO: 838848 - RNA, 20 nt, Human
ugccagcaucccauuuugua

SEQ ID NO: 838849 - RNA, 22 nt, Human
uggaaaaaagcaaucaaaaaug

SEQ ID NO: 838850 - RNA, 24 nt, Human
uuaaaaaacauguuuauuuuacaa

SEQ ID NO: 838851 - RNA, 20 nt, Human
uuaaaacaaaauuuucccca

SEQ ID NO: 838852 - RNA, 25 nt, Human
uuaaaauaaaugaagaucauaaauc

SEQ ID NO: 838853 - RNA, 24 nt, Human
uuaaaauauuaaccccaauugcau

SEQ ID NO: 838854 - RNA, 22 nt, Human
uuacugcagcuuuuguacagcu

SEQ ID NO: 838855 - RNA, 22 nt, Human
uuacugcagcuuuuguacagcu

SEQ ID NO: 838856 - RNA, 22 nt, Human
uucaagcauccauuaauguugc

SEQ ID NO: 838857 - RNA, 24 nt, Human
uucauugccagcaucccauuuugu

SEQ ID NO: 838858 - RNA, 25 nt, Human
uucauugccagcaucccauuuugua

SEQ ID NO: 838859 - RNA, 20 nt, Human
uuugugcaaauauaaacacc

SEQ ID NO: 838860 - RNA, 18 nt, Human
uuuuuuuuuuuuuuuuug

SEQ ID NO: 838861 - RNA, 20 nt, Human
uuuuuuuuuuuuuuuuuguu

SEQ ID NO: 838862 - RNA, 23 nt, Human
accaaaaaacaaauaacaauaaa

SEQ ID NO: 838863 - RNA, 18 nt, Human
agacucuggaggccagua

SEQ ID NO: 838864 - RNA, 18 nt, Human
aggaacaggaaggagggg

SEQ ID NO: 838865 - RNA, 22 nt, Human
aggggagagaacccaacacaug

SEQ ID NO: 838866 - RNA, 20 nt, Human
caccaaaaaacaaauaacaa

SEQ ID NO: 838867 - RNA, 24 nt, Human
ccagcugcauugcagccuugauuu

SEQ ID NO: 838868 - RNA, 24 nt, Human
gaagacucuggaggccaguaaucc

SEQ ID NO: 838869 - RNA, 23 nt, Human
gaggggagagaacccaacacaug

SEQ ID NO: 838870 - RNA, 22 nt, Human
gccaccaaaaaacaaauaacaa

SEQ ID NO: 838871 - RNA, 24 nt, Human
gguauauaagaggaacaggaagga

SEQ ID NO: 838872 - RNA, 21 nt, Human
aacagcacacccaccccggcu

SEQ ID NO: 838873 - RNA, 19 nt, Human
aagacagcccccuaccucc

SEQ ID NO: 838874 - RNA, 24 nt, Human
acacacccacgggugaacacaaga

SEQ ID NO: 838875 - RNA, 33 nt, Human
acacauguuugugcaugcauacaugcguguagu

SEQ ID NO: 838876 - RNA, 18 nt, Human
acacccaggcuucccugg

SEQ ID NO: 838877 - RNA, 18 nt, Human
acacccaggcuucccugg

SEQ ID NO: 838878 - RNA, 23 nt, Human
acagcccccuaccuccaggcuga

SEQ ID NO: 838879 - RNA, 23 nt, Human
acauguacacacauguuugugca

SEQ ID NO: 838880 - RNA, 21 nt, Human
accucucccuuugagucuccc

SEQ ID NO: 838881 - RNA, 25 nt, Human
acgcucauccacacgugcccacaca

SEQ ID NO: 838882 - RNA, 21 nt, Human
agagccacacccccaacucag

SEQ ID NO: 838883 - RNA, 21 nt, Human
agagccacacccccaacucag

SEQ ID NO: 838884 - RNA, 19 nt, Human
agccugguggcacacuggc

SEQ ID NO: 838885 - RNA, 21 nt, Human
aggcacuugacacccaggcuu

SEQ ID NO: 838886 - RNA, 21 nt, Human
aggcacuugacacccaggcuu

SEQ ID NO: 838887 - RNA, 23 nt, Human
aggccagcuguggaagggugcag

SEQ ID NO: 838888 - RNA, 23 nt, Human
aggugccucucgaggaaaccagg

SEQ ID NO: 838889 - RNA, 24 nt, Human
aguagccagaagaggacaggagga

SEQ ID NO: 838890 - RNA, 25 nt, Human
auguacacacauguuugugcaugca

SEQ ID NO: 838891 - RNA, 20 nt, Human
auucacacgcaccacaucac

SEQ ID NO: 838892 - RNA, 25 nt, Human
caagaggucacccccuuuccagggc

SEQ ID NO: 838893 - RNA, 25 nt, Human
caagaggucacccccuuuccagggc

SEQ ID NO: 838894 - RNA, 19 nt, Human
caagccccuccacaggcuc

SEQ ID NO: 838895 - RNA, 23 nt, Human
cacacacacccacgggugaacac

SEQ ID NO: 838896 - RNA, 21 nt, Human
cacacacccacgggugaacac

SEQ ID NO: 838897 - RNA, 22 nt, Human
cacacgcaccacaucacaugug

SEQ ID NO: 838898 - RNA, 19 nt, Human
cacacgugcccacacacac

SEQ ID NO: 838899 - RNA, 21 nt, Human
cacacgugcccacacacaccc

SEQ ID NO: 838900 - RNA, 22 nt, Human
cacacgugcccacacacaccca

SEQ ID NO: 838901 - RNA, 22 nt, Human
cacacuggcucugccucuccuc

SEQ ID NO: 838902 - RNA, 28 nt, Human
cacauguacacacauguuugugcaugca

SEQ ID NO: 838903 - RNA, 22 nt, Human
caccacaucacaugugcccuga

SEQ ID NO: 838904 - RNA, 19 nt, Human
cacccaccccggcuccagc

SEQ ID NO: 838905 - RNA, 18 nt, Human
cacccccuuuccagggca

SEQ ID NO: 838906 - RNA, 18 nt, Human
cacccccuuuccagggca

SEQ ID NO: 838907 - RNA, 19 nt, Human
caccucagaucuccggcug

SEQ ID NO: 838908 - RNA, 22 nt, Human
cacgugcccacacacacccacg

SEQ ID NO: 838909 - RNA, 21 nt, Human
cacugagaccucucccuuuga

SEQ ID NO: 838910 - RNA, 22 nt, Human
cagaaagcccugggacagaaga

SEQ ID NO: 838911 - RNA, 22 nt, Human
cagagcaccucagaucuccggc

SEQ ID NO: 838912 - RNA, 18 nt, Human
cagccgccgcuccgcccg

SEQ ID NO: 838913 - RNA, 23 nt, Human
cagcgcguccuccagaaagcccu

SEQ ID NO: 838914 - RNA, 22 nt, Human
caggaggaccaagguaggccca

SEQ ID NO: 838915 - RNA, 25 nt, Human
caucuaggaccccacagucaggucc

SEQ ID NO: 838916 - RNA, 27 nt, Human
cccagccccgcgccccgcgccgguucc

SEQ ID NO: 838917 - RNA, 21 nt, Human
cccccuaccuccaggcugagc

SEQ ID NO: 838918 - RNA, 24 nt, Human
ccccgcgccccgcgcccgcgcccg

SEQ ID NO: 838919 - RNA, 18 nt, Human
ccccucgaggcaagaggu

SEQ ID NO: 838920 - RNA, 18 nt, Human
ccccucgaggcaagaggu

SEQ ID NO: 838921 - RNA, 18 nt, Human
cccgggcccagccccgcg

SEQ ID NO: 838922 - RNA, 21 nt, Human
cccugggacagaagagagccc

SEQ ID NO: 838923 - RNA, 21 nt, Human
ccuacacauggcaagcacaug

SEQ ID NO: 838924 - RNA, 21 nt, Human
ccuccacaggcucucaggggc

SEQ ID NO: 838925 - RNA, 18 nt, Human
ccuccagaaagcccuggg

SEQ ID NO: 838926 - RNA, 20 nt, Human
ccucucgaggaaaccaggcc

SEQ ID NO: 838927 - RNA, 22 nt, Human
ccugaaggcgagggguccuagg

SEQ ID NO: 838928 - RNA, 22 nt, Human
ccuuugagucucccgggguccc

SEQ ID NO: 838929 - RNA, 18 nt, Human
cgagggguccuaggccag

SEQ ID NO: 838930 - RNA, 20 nt, Human
cgcccgagccgagcccgagc

SEQ ID NO: 838931 - RNA, 23 nt, Human
cgcucauccacacgugcccacac

SEQ ID NO: 838932 - RNA, 21 nt, Human
cgcuccgcccgggcccagccc

SEQ ID NO: 838933 - RNA, 23 nt, Human
cucaaggcaucaggaaccgagga

SEQ ID NO: 838934 - RNA, 20 nt, Human
cuccgcccgggcccagcccc

SEQ ID NO: 838935 - RNA, 18 nt, Human
cucucgaggaaaccaggc

SEQ ID NO: 838936 - RNA, 22 nt, Human
cugacccacagaccagagcacc

SEQ ID NO: 838937 - RNA, 23 nt, Human
cugggccccucgaggcaagaggu

SEQ ID NO: 838938 - RNA, 23 nt, Human
cugggccccucgaggcaagaggu

SEQ ID NO: 838939 - RNA, 20 nt, Human
gaagagagcccaaggcugac

SEQ ID NO: 838940 - RNA, 22 nt, Human
gacagaagagagcccaaggcug

SEQ ID NO: 838941 - RNA, 18 nt, Human
gagcagcucuaaccacug

SEQ ID NO: 838942 - RNA, 18 nt, Human
gagccacacccccaacuc

SEQ ID NO: 838943 - RNA, 18 nt, Human
gagccacacccccaacuc

SEQ ID NO: 838944 - RNA, 25 nt, Human
gagcccaaggcugacacucccuugg

SEQ ID NO: 838945 - RNA, 23 nt, Human
gagcccgagccgagcggagcgga

SEQ ID NO: 838946 - RNA, 20 nt, Human
gaggaccaagguaggcccag

SEQ ID NO: 838947 - RNA, 19 nt, Human
gccagucugaaacaccccu

SEQ ID NO: 838948 - RNA, 23 nt, Human
gcucauccacacgugcccacaca

SEQ ID NO: 838949 - RNA, 22 nt, Human
ggaaagaggacugacccacaga

SEQ ID NO: 838950 - RNA, 24 nt, Human
ggcaucaggaaccgaggagaggga

SEQ ID NO: 838951 - RNA, 21 nt, Human
gggacagacaggggaacuccg

SEQ ID NO: 838952 - RNA, 19 nt, Human
gggccccucgaggcaagag

SEQ ID NO: 838953 - RNA, 19 nt, Human
gggccccucgaggcaagag

SEQ ID NO: 838954 - RNA, 20 nt, Human
guagccagaagaggacagga

SEQ ID NO: 838955 - RNA, 25 nt, Human
guaggcccagggacacuugugccca

SEQ ID NO: 838956 - RNA, 19 nt, Human
uaccuccaggcugagcagc

SEQ ID NO: 838957 - RNA, 22 nt, Human
uacuggaucagcuccauccugg

SEQ ID NO: 838958 - RNA, 21 nt, Human
uaggaccccacagucaggucc

SEQ ID NO: 838959 - RNA, 19 nt, Human
ucacacgcaccacaucaca

SEQ ID NO: 838960 - RNA, 26 nt, Human
ucagaucuccggcugcagggccacaa

SEQ ID NO: 838961 - RNA, 21 nt, Human
uccagggcagagccacacccc

SEQ ID NO: 838962 - RNA, 21 nt, Human
uccagggcagagccacacccc

SEQ ID NO: 838963 - RNA, 24 nt, Human
uccagggcagagccacacccccaa

SEQ ID NO: 838964 - RNA, 24 nt, Human
uccagggcagagccacacccccaa

SEQ ID NO: 838965 - RNA, 24 nt, Human
ucucaggggcugcugggcagcacc

SEQ ID NO: 838966 - RNA, 19 nt, Human
ucuccugaaggcgaggggu

SEQ ID NO: 838967 - RNA, 20 nt, Human
ucuccugaaggcgagggguu

SEQ ID NO: 838968 - RNA, 19 nt, Human
ucucgaggaaaccaggcca

SEQ ID NO: 838969 - RNA, 20 nt, Human
ucugccucuccucuuagacc

SEQ ID NO: 838970 - RNA, 20 nt, Human
ugacacccaggcuucccugg

SEQ ID NO: 838971 - RNA, 20 nt, Human
ugacacccaggcuucccugg

SEQ ID NO: 838972 - RNA, 19 nt, Human
ugaccauaggaguguggga

SEQ ID NO: 838973 - RNA, 21 nt, Human
ugcacgcucauccacacgugg

SEQ ID NO: 838974 - RNA, 20 nt, Human
ugcaguagccagaagaggac

SEQ ID NO: 838975 - RNA, 27 nt, Human
ugcaugcauacaugcguguagauucuc

SEQ ID NO: 838976 - RNA, 18 nt, Human
uggagagugcaguagcca

SEQ ID NO: 838977 - RNA, 19 nt, Human
uggcacacuggcucugccu

SEQ ID NO: 838978 - RNA, 18 nt, Human
uuacuggaucagcuccau

SEQ ID NO: 838979 - RNA, 23 nt, Human
uuacuggaucagcuccaucaugc

SEQ ID NO: 838980 - RNA, 20 nt, Human
uucccugggccccucgaggc

SEQ ID NO: 838981 - RNA, 19 nt, Human
uugagucucccgggguccc

SEQ ID NO: 838982 - RNA, 19 nt, Human
uuucucauuugacaccugg

SEQ ID NO: 838983 - RNA, 23 nt, Human
uuuuuuuagagagaacccccuuu

SEQ ID NO: 838984 - RNA, 25 nt, Human
aacgggcucccagcgccccgacccc

SEQ ID NO: 838985 - RNA, 21 nt, Human
aagaagggcugaguuugguag

SEQ ID NO: 838986 - RNA, 22 nt, Human
aaggaaagggccccaccugcag

SEQ ID NO: 838987 - RNA, 23 nt, Human
aagggaccacagcccugccaaca

SEQ ID NO: 838988 - RNA, 18 nt, Human
accacagcccugccaaca

SEQ ID NO: 838989 - RNA, 18 nt, Human
acccuucuguccucugcu

SEQ ID NO: 838990 - RNA, 20 nt, Human
acucagccccacucuggcgg

SEQ ID NO: 838991 - RNA, 18 nt, Human
acugguccuugggcagug

SEQ ID NO: 838992 - RNA, 20 nt, Human
agcgcccacucagccccacu

SEQ ID NO: 838993 - RNA, 25 nt, Human
agcgcccacucagccccacucuggc

SEQ ID NO: 838994 - RNA, 19 nt, Human
cacagcaucacugccauag

SEQ ID NO: 838995 - RNA, 21 nt, Human
cacagcccugccaacaccucc

SEQ ID NO: 838996 - RNA, 19 nt, Human
cacaggauuagggugggcc

SEQ ID NO: 838997 - RNA, 21 nt, Human
caccuccaucccagauuucca

SEQ ID NO: 838998 - RNA, 22 nt, Human
cagcgcccacucagccccacuc

SEQ ID NO: 838999 - RNA, 18 nt, Human
cagcgccccgacccccgc

SEQ ID NO: 839000 - RNA, 23 nt, Human
ccaacacagcaucacugccauag

SEQ ID NO: 839001 - RNA, 19 nt, Human
ccacagcccugccaacacc

SEQ ID NO: 839002 - RNA, 19 nt, Human
cccacauaaggagaaggac

SEQ ID NO: 839003 - RNA, 18 nt, Human
cccagauuuccagccucc

SEQ ID NO: 839004 - RNA, 21 nt, Human
ccccaccugcaggcgauucuc

SEQ ID NO: 839005 - RNA, 19 nt, Human
ccccacucuggcgggaagg

SEQ ID NO: 839006 - RNA, 23 nt, Human
ccccagagccuucaaagggaccc

SEQ ID NO: 839007 - RNA, 18 nt, Human
ccccgcugcgcccgcccc

SEQ ID NO: 839008 - RNA, 24 nt, Human
ccgccacaagcuaaaaagagccaa

SEQ ID NO: 839009 - RNA, 26 nt, Human
ccgccacaagcuaaaaagagccaagg

SEQ ID NO: 839010 - RNA, 20 nt, Human
ccuccagaacuguaagggaa

SEQ ID NO: 839011 - RNA, 26 nt, Human
ccugagaaugugacuuuauuuggaac

SEQ ID NO: 839012 - RNA, 22 nt, Human
ccugccaacaccuccaucccag

SEQ ID NO: 839013 - RNA, 24 nt, Human
ccuugggcagugucuggccggugg

SEQ ID NO: 839014 - RNA, 25 nt, Human
cgcggcccaacgggcucccagcgcc

SEQ ID NO: 839015 - RNA, 19 nt, Human
cgcugcgcccgccccgcgc

SEQ ID NO: 839016 - RNA, 18 nt, Human
cucccaaccgacaucuuu

SEQ ID NO: 839017 - RNA, 23 nt, Human
cucccagcgccccgacccccgcu

SEQ ID NO: 839018 - RNA, 20 nt, Human
cugccaacaccuccauccca

SEQ ID NO: 839019 - RNA, 22 nt, Human
cugcuugaaaggcuguauucca

SEQ ID NO: 839020 - RNA, 21 nt, Human
gagaacagaagagacagagac

SEQ ID NO: 839021 - RNA, 23 nt, Human
gcggccccggcguggcggcugcg

SEQ ID NO: 839022 - RNA, 23 nt, Human
ggcagugucuggccgguggugcc

SEQ ID NO: 839023 - RNA, 19 nt, Human
gggaaggaaagggccccac

SEQ ID NO: 839024 - RNA, 19 nt, Human
gggaaucaaguucugcugu

SEQ ID NO: 839025 - RNA, 21 nt, Human
ggugggcccuaaauccaauga

SEQ ID NO: 839026 - RNA, 20 nt, Human
uaauucguuagagcaucccu

SEQ ID NO: 839027 - RNA, 21 nt, Human
uaggaaaccaacacagcauca

SEQ ID NO: 839028 - RNA, 21 nt, Human
uaggcccccggccuggcucag

SEQ ID NO: 839029 - RNA, 22 nt, Human
ucccacauaaggagaaggaccc

SEQ ID NO: 839030 - RNA, 21 nt, Human
uccccagagccuucaaaggga

SEQ ID NO: 839031 - RNA, 25 nt, Human
uccccagagccuucaaagggaccac

SEQ ID NO: 839032 - RNA, 20 nt, Human
ucuacuaggcccauuuccca

SEQ ID NO: 839033 - RNA, 20 nt, Human
ucuguccucugcuugaaagg

SEQ ID NO: 839034 - RNA, 22 nt, Human
ugccgccacaagcuaaaaagag

SEQ ID NO: 839035 - RNA, 23 nt, Human
uggaaccugagaaugugacuuua

SEQ ID NO: 839036 - RNA, 18 nt, Human
uggcgggaaggaaagggc

SEQ ID NO: 839037 - RNA, 25 nt, Human
ugucuggccgguggugccaugccgg

SEQ ID NO: 839038 - RNA, 22 nt, Human
uguuucaauccaccagguuugu

SEQ ID NO: 839039 - RNA, 18 nt, Human
uuauuuggaacuagagua

SEQ ID NO: 839040 - RNA, 20 nt, Human
uucucccaaccgacaucuuu

SEQ ID NO: 839041 - RNA, 18 nt, Human
uucuuccccagagccuuc

SEQ ID NO: 839042 - RNA, 18 nt, Human
aaaaagaaagucuggauu

SEQ ID NO: 839043 - RNA, 24 nt, Human
aaaaagacaaaacacauuucauga

SEQ ID NO: 839044 - RNA, 23 nt, Human
aaaauccuuacuaaaugacacca

SEQ ID NO: 839045 - RNA, 20 nt, Human
aaacuggcaucaaaaggaaa

SEQ ID NO: 839046 - RNA, 24 nt, Human
aagaaacucaaacggaaugaaaug

SEQ ID NO: 839047 - RNA, 26 nt, Human
aagaaugcauaccagaaccggggccc

SEQ ID NO: 839048 - RNA, 19 nt, Human
aagcaccuccaaaauacaa

SEQ ID NO: 839049 - RNA, 21 nt, Human
aauaaacacaauuaagacuuc

SEQ ID NO: 839050 - RNA, 20 nt, Human
acgaaaacaagaaacucaaa

SEQ ID NO: 839051 - RNA, 20 nt, Human
acuacaauaaugauguaccc

SEQ ID NO: 839052 - RNA, 20 nt, Human
acuauugccuuuuccuuuca

SEQ ID NO: 839053 - RNA, 23 nt, Human
agaaaaagaaagucuggauuuua

SEQ ID NO: 839054 - RNA, 25 nt, Human
aggaagaaaacuggcaucaaaagga

SEQ ID NO: 839055 - RNA, 23 nt, Human
aggcaacaaaccauagugccaaa

SEQ ID NO: 839056 - RNA, 23 nt, Human
augaaaaaugucuuaggaaaaaa

SEQ ID NO: 839057 - RNA, 26 nt, Human
caaaaagugaauaaauaugcacacaa

SEQ ID NO: 839058 - RNA, 18 nt, Human
caaauggaaaaaguauau

SEQ ID NO: 839059 - RNA, 23 nt, Human
caacaggcuucuaugaacauucu

SEQ ID NO: 839060 - RNA, 24 nt, Human
cacaagucuaacauuuguuuuuuu

SEQ ID NO: 839061 - RNA, 20 nt, Human
cacagugcagauacauucag

SEQ ID NO: 839062 - RNA, 19 nt, Human
cacuaguaauaaaaaaaga

SEQ ID NO: 839063 - RNA, 24 nt, Human
cacuaguaauaaaaaaagacaaaa

SEQ ID NO: 839064 - RNA, 26 nt, Human
cacuguguaaauuucaaggcaagguu

SEQ ID NO: 839065 - RNA, 26 nt, Human
caguaaaaacaaaaugucuuaucaug

SEQ ID NO: 839066 - RNA, 22 nt, Human
caguaugaaaaacuugaaaaua

SEQ ID NO: 839067 - RNA, 22 nt, Human
caugcuugccuugggaugggga

SEQ ID NO: 839068 - RNA, 25 nt, Human
cauguagaaaaagaaagucuggauu

SEQ ID NO: 839069 - RNA, 18 nt, Human
cauuuucaguugcugcug

SEQ ID NO: 839070 - RNA, 23 nt, Human
ccaaaauacaaauuccuauacac

SEQ ID NO: 839071 - RNA, 23 nt, Human
cggcauucauuuucaguugcugc

SEQ ID NO: 839072 - RNA, 19 nt, Human
cucacauguagaaaaagaa

SEQ ID NO: 839073 - RNA, 21 nt, Human
cucacauguagaaaaagaaag

SEQ ID NO: 839074 - RNA, 24 nt, Human
cugguccugagcagcaucauucua

SEQ ID NO: 839075 - RNA, 23 nt, Human
cuuaaaaugaacacuuaaguaaa

SEQ ID NO: 839076 - RNA, 28 nt, Human
cuuaaacacuaguaauaaaaaaagacaa

SEQ ID NO: 839077 - RNA, 25 nt, Human
cuuacuauugccuuuuccuuucaaa

SEQ ID NO: 839078 - RNA, 23 nt, Human
cuuagauuuaaagcucaaaaagc

SEQ ID NO: 839079 - RNA, 21 nt, Human
cuuccaugcacacaagucuaa

SEQ ID NO: 839080 - RNA, 21 nt, Human
gaauagaucauucaguaaaaa

SEQ ID NO: 839081 - RNA, 22 nt, Human
gcuggcggcagcggcgucuccg

SEQ ID NO: 839082 - RNA, 21 nt, Human
ggaaagaucuuucaaaaaggg

SEQ ID NO: 839083 - RNA, 23 nt, Human
ggcggcagcggcgucuccgaggc

SEQ ID NO: 839084 - RNA, 24 nt, Human
gucgaguuccccuuagauuuaaag

SEQ ID NO: 839085 - RNA, 18 nt, Human
gugaagcacuaugggugg

SEQ ID NO: 839086 - RNA, 20 nt, Human
gugcauuucuuuucuccucc

SEQ ID NO: 839087 - RNA, 19 nt, Human
uaaccaaagauacagacag

SEQ ID NO: 839088 - RNA, 22 nt, Human
uaaccaaagauacagacaguau

SEQ ID NO: 839089 - RNA, 21 nt, Human
uaacgaaaacaagaaacucaa

SEQ ID NO: 839090 - RNA, 20 nt, Human
uaagagacugcgaugccaca

SEQ ID NO: 839091 - RNA, 21 nt, Human
uaaguaaauuaaguacgugga

SEQ ID NO: 839092 - RNA, 24 nt, Human
uaaguaaauuaaguacguggacag

SEQ ID NO: 839093 - RNA, 21 nt, Human
uacaguaugaaaaacuugaaa

SEQ ID NO: 839094 - RNA, 20 nt, Human
uagauaacacauguguacca

SEQ ID NO: 839095 - RNA, 24 nt, Human
uagaugcagcuagguaggcaacaa

SEQ ID NO: 839096 - RNA, 23 nt, Human
uaggaaaaaaauagcuauuuuca

SEQ ID NO: 839097 - RNA, 18 nt, Human
uagguaggcaacaaacca

SEQ ID NO: 839098 - RNA, 19 nt, Human
uaugaaaaacuugaaaaua

SEQ ID NO: 839099 - RNA, 23 nt, Human
uaugcacacaacaggcuucuaug

SEQ ID NO: 839100 - RNA, 20 nt, Human
uauuaacacuucacuauaaa

SEQ ID NO: 839101 - RNA, 21 nt, Human
ucaaaaagggagaagaaaaau

SEQ ID NO: 839102 - RNA, 26 nt, Human
uccuuuguugcuauauauuuauuuca

SEQ ID NO: 839103 - RNA, 19 nt, Human
uccuuuuucuucaaacagg

SEQ ID NO: 839104 - RNA, 18 nt, Human
ucuaugaacauucuccuc

SEQ ID NO: 839105 - RNA, 18 nt, Human
ucuauucauauugagaau

SEQ ID NO: 839106 - RNA, 19 nt, Human
ugaacauucuccucacagu

SEQ ID NO: 839107 - RNA, 20 nt, Human
ugacauuauagaugcagcua

SEQ ID NO: 839108 - RNA, 23 nt, Human
ugagguagauaacacauguguac

SEQ ID NO: 839109 - RNA, 24 nt, Human
ugccaaacaggccugucgaguucc

SEQ ID NO: 839110 - RNA, 21 nt, Human
ugcugcugguaucauguguuu

SEQ ID NO: 839111 - RNA, 22 nt, Human
ugcuuccacagcaagaugguuu

SEQ ID NO: 839112 - RNA, 22 nt, Human
uggcaucaaaaggaaagaucuu

SEQ ID NO: 839113 - RNA, 22 nt, Human
ugguuaacagaagaugucuuuu

SEQ ID NO: 839114 - RNA, 24 nt, Human
uguaaacaaggaagaaaacuggca

SEQ ID NO: 839115 - RNA, 24 nt, Human
uguagauagaucaagcaccuccaa

SEQ ID NO: 839116 - RNA, 21 nt, Human
uguuuuaagaaauguguacag

SEQ ID NO: 839117 - RNA, 24 nt, Human
uguuuuauuuguccuuuuucuuca

SEQ ID NO: 839118 - RNA, 20 nt, Human
uucaagaaaggggcagcaac

SEQ ID NO: 839119 - RNA, 22 nt, Human
uucaagaaaggggcagcaacuc

SEQ ID NO: 839120 - RNA, 22 nt, Human
uucuaggagcauuuuauaauaa

SEQ ID NO: 839121 - RNA, 20 nt, Human
uuguauuugcuggccauguu

SEQ ID NO: 839122 - RNA, 21 nt, Human
uuuauuaagaauaguuuacua

SEQ ID NO: 839123 - RNA, 22 nt, Human
uuugccacauacucuuguuacc

SEQ ID NO: 839124 - RNA, 22 nt, Human
aaccgacuccccaucccuccca

SEQ ID NO: 839125 - RNA, 22 nt, Human
aaccgacuccccaucccuccca

SEQ ID NO: 839126 - RNA, 23 nt, Human
aaguagucaucuacagcagccca

SEQ ID NO: 839127 - RNA, 25 nt, Human
aaguagucaucuacagcagcccaga

SEQ ID NO: 839128 - RNA, 20 nt, Human
aaugacuaaccgacucccca

SEQ ID NO: 839129 - RNA, 20 nt, Human
aaugacuaaccgacucccca

SEQ ID NO: 839130 - RNA, 20 nt, Human
acagcagcccagaggcccag

SEQ ID NO: 839131 - RNA, 21 nt, Human
accgacuccccaucccuccca

SEQ ID NO: 839132 - RNA, 21 nt, Human
accgacuccccaucccuccca

SEQ ID NO: 839133 - RNA, 19 nt, Human
caaagucggaucuguugac

SEQ ID NO: 839134 - RNA, 24 nt, Human
caaguagucaucuacagcagccca

SEQ ID NO: 839135 - RNA, 21 nt, Human
caaugacuaaccgacuccccc

SEQ ID NO: 839136 - RNA, 21 nt, Human
caaugacuaaccgacuccccc

SEQ ID NO: 839137 - RNA, 19 nt, Human
caccccccgauggcccaag

SEQ ID NO: 839138 - RNA, 19 nt, Human
caccccccgauggcccaag

SEQ ID NO: 839139 - RNA, 20 nt, Human
ccaaagucggaucuguugac

SEQ ID NO: 839140 - RNA, 22 nt, Human
cccaccccccgauggcccaagu

SEQ ID NO: 839141 - RNA, 22 nt, Human
cccaccccccgauggcccaagu

SEQ ID NO: 839142 - RNA, 23 nt, Human
cccucccaccccccgauggccca

SEQ ID NO: 839143 - RNA, 23 nt, Human
cccucccaccccccgauggccca

SEQ ID NO: 839144 - RNA, 25 nt, Human
ccucccaccccccgauggcccaagu

SEQ ID NO: 839145 - RNA, 25 nt, Human
ccucccaccccccgauggcccaagu

SEQ ID NO: 839146 - RNA, 21 nt, Human
cgacuccccaucccucccacc

SEQ ID NO: 839147 - RNA, 21 nt, Human
cgacuccccaucccucccacc

SEQ ID NO: 839148 - RNA, 22 nt, Human
cgacuccccaucccucccaccc

SEQ ID NO: 839149 - RNA, 22 nt, Human
cgacuccccaucccucccaccc

SEQ ID NO: 839150 - RNA, 24 nt, Human
cgacuccccaucccucccaccccc

SEQ ID NO: 839151 - RNA, 24 nt, Human
cgacuccccaucccucccaccccc

SEQ ID NO: 839152 - RNA, 23 nt, Human
cuacagcagcccagaggcccagc

SEQ ID NO: 839153 - RNA, 19 nt, Human
cucccaccccccgauggcc

SEQ ID NO: 839154 - RNA, 19 nt, Human
cucccaccccccgauggcc

SEQ ID NO: 839155 - RNA, 20 nt, Human
gacuccccaucccucccacc

SEQ ID NO: 839156 - RNA, 22 nt, Human
gacuccccaucccucccacccc

SEQ ID NO: 839157 - RNA, 22 nt, Human
gacuccccaucccucccacccc

SEQ ID NO: 839158 - RNA, 24 nt, Human
gacuccccaucccucccacccccc

SEQ ID NO: 839159 - RNA, 24 nt, Human
gacuccccaucccucccacccccc

SEQ ID NO: 839160 - RNA, 22 nt, Human
gcugcugcuucuagacugcugu

SEQ ID NO: 839161 - RNA, 23 nt, Human
guagucaucuacagcagcccaga

SEQ ID NO: 839162 - RNA, 23 nt, Human
uaaccgacuccccaucccuccca

SEQ ID NO: 839163 - RNA, 23 nt, Human
uaaccgacuccccaucccuccca

SEQ ID NO: 839164 - RNA, 22 nt, Human
ucaucuacagcagcccagaggc

SEQ ID NO: 839165 - RNA, 23 nt, Human
ucccucccaccccccgauggccc

SEQ ID NO: 839166 - RNA, 23 nt, Human
ucccucccaccccccgauggccc

SEQ ID NO: 839167 - RNA, 23 nt, Human
ugaaaaaucacccaaaaauaaga

SEQ ID NO: 839168 - RNA, 23 nt, Human
ugaaaaaucacccaaaaauaaga

SEQ ID NO: 839169 - RNA, 22 nt, Human
ugacuaaccgacuccccauccc

SEQ ID NO: 839170 - RNA, 22 nt, Human
ugacuaaccgacuccccauccc

SEQ ID NO: 839171 - RNA, 18 nt, Human
uguuuucaaaguaguucu

SEQ ID NO: 839172 - RNA, 18 nt, Human
uguuuucaaaguaguucu

SEQ ID NO: 839173 - RNA, 21 nt, Human
aaauucccuuauaaaucgcag

SEQ ID NO: 839174 - RNA, 20 nt, Human
aagaaccacuccuagccucc

SEQ ID NO: 839175 - RNA, 21 nt, Human
aagcggagggguauugggggc

SEQ ID NO: 839176 - RNA, 24 nt, Human
acccccacaagcguaaggucccau

SEQ ID NO: 839177 - RNA, 21 nt, Human
accccucccugcuucccccug

SEQ ID NO: 839178 - RNA, 25 nt, Human
accuccuccacacccccgaaguucu

SEQ ID NO: 839179 - RNA, 22 nt, Human
agaaagaacggaucugaggaaa

SEQ ID NO: 839180 - RNA, 23 nt, Human
agaaagaacggaucugaggaaaa

SEQ ID NO: 839181 - RNA, 23 nt, Human
agagagaaaagggagacugggaa

SEQ ID NO: 839182 - RNA, 28 nt, Human
agagaguuuauugaggccaugggcaggg

SEQ ID NO: 839183 - RNA, 19 nt, Human
agaggggcagagacaccag

SEQ ID NO: 839184 - RNA, 19 nt, Human
aggggaguggcaggagggc

SEQ ID NO: 839185 - RNA, 23 nt, Human
aguuuauugaggccaugggcagg

SEQ ID NO: 839186 - RNA, 21 nt, Human
aucgcaggggaguggcaggag

SEQ ID NO: 839187 - RNA, 21 nt, Human
augaucccuugagauucacua

SEQ ID NO: 839188 - RNA, 21 nt, Human
caagaaccacuccuagccucc

SEQ ID NO: 839189 - RNA, 22 nt, Human
cacacccccgaaguucugaccc

SEQ ID NO: 839190 - RNA, 19 nt, Human
cacagagaggggcagagac

SEQ ID NO: 839191 - RNA, 22 nt, Human
cagcccgcagacccccacaagc

SEQ ID NO: 839192 - RNA, 19 nt, Human
cagcugcgccuggagcaga

SEQ ID NO: 839193 - RNA, 23 nt, Human
caggaacacagcacggggcgugc

SEQ ID NO: 839194 - RNA, 26 nt, Human
caggaacacagcacggggcgugcgug

SEQ ID NO: 839195 - RNA, 22 nt, Human
ccaaagccaugguggccucuug

SEQ ID NO: 839196 - RNA, 20 nt, Human
ccaaagugaagaauagagga

SEQ ID NO: 839197 - RNA, 24 nt, Human
ccaauccaguccuugccaaagcca

SEQ ID NO: 839198 - RNA, 19 nt, Human
ccagcccgcagacccccac

SEQ ID NO: 839199 - RNA, 18 nt, Human
ccauguccccccaaucca

SEQ ID NO: 839200 - RNA, 21 nt, Human
ccauguccccccaauccaguc

SEQ ID NO: 839201 - RNA, 22 nt, Human
cccagcccgcagacccccacaa

SEQ ID NO: 839202 - RNA, 23 nt, Human
cccagcccgcagacccccacaag

SEQ ID NO: 839203 - RNA, 23 nt, Human
cccccacaagcguaaggucccau

SEQ ID NO: 839204 - RNA, 19 nt, Human
cccccgaaguucugacccc

SEQ ID NO: 839205 - RNA, 28 nt, Human
cccccgaaguucugaccccaaagugaag

SEQ ID NO: 839206 - RNA, 18 nt, Human
ccccgcagccccaacagc

SEQ ID NO: 839207 - RNA, 21 nt, Human
ccccgcgccggcgcucggccc

SEQ ID NO: 839208 - RNA, 24 nt, Human
ccccugagcuccaugugggguggg

SEQ ID NO: 839209 - RNA, 24 nt, Human
cccucuugucccuguggucaagga

SEQ ID NO: 839210 - RNA, 22 nt, Human
ccgcagccccaacagcugcgcc

SEQ ID NO: 839211 - RNA, 19 nt, Human
ccgcagggcucuuuuggga

SEQ ID NO: 839212 - RNA, 21 nt, Human
ccucccugcuucccccugagc

SEQ ID NO: 839213 - RNA, 21 nt, Human
cgcaccuccuccacacccccg

SEQ ID NO: 839214 - RNA, 21 nt, Human
cgccgcgccccgcgccggcgc

SEQ ID NO: 839215 - RNA, 21 nt, Human
cgccgcgccccgcgccggcgc

SEQ ID NO: 839216 - RNA, 21 nt, Human
cgccggcgcucggcccgcccc

SEQ ID NO: 839217 - RNA, 24 nt, Human
cgggagaggcccgcgacugcggcg

SEQ ID NO: 839218 - RNA, 18 nt, Human
cuagccuccgcagggcuc

SEQ ID NO: 839219 - RNA, 18 nt, Human
cuccuccacacccccgaa

SEQ ID NO: 839220 - RNA, 22 nt, Human
cucuugucccuguggucaagga

SEQ ID NO: 839221 - RNA, 25 nt, Human
cugaccccaaagugaagaauagagg

SEQ ID NO: 839222 - RNA, 23 nt, Human
cugcgcccuggggaccgaggacg

SEQ ID NO: 839223 - RNA, 18 nt, Human
cugcgccuggagcagacg

SEQ ID NO: 839224 - RNA, 18 nt, Human
cuggagcagacggccagg

SEQ ID NO: 839225 - RNA, 19 nt, Human
gaacacagcacggggcgug

SEQ ID NO: 839226 - RNA, 20 nt, Human
gacugcaggggugcgcuagc

SEQ ID NO: 839227 - RNA, 21 nt, Human
gagccgcaccuccuccacacc

SEQ ID NO: 839228 - RNA, 19 nt, Human
gcaccuccuccacaccccc

SEQ ID NO: 839229 - RNA, 19 nt, Human
gcagccccaacagcugcgc

SEQ ID NO: 839230 - RNA, 20 nt, Human
gccaggagacagagcggugg

SEQ ID NO: 839231 - RNA, 18 nt, Human
gccaugguggccucuuga

SEQ ID NO: 839232 - RNA, 21 nt, Human
gcccaggaacacagcacgggg

SEQ ID NO: 839233 - RNA, 20 nt, Human
gccggcgcucggcccgcccc

SEQ ID NO: 839234 - RNA, 21 nt, Human
gccuggagcagacggccagga

SEQ ID NO: 839235 - RNA, 21 nt, Human
ggaaccccucccugcuucccc

SEQ ID NO: 839236 - RNA, 18 nt, Human
ggaagggaaggaggagga

SEQ ID NO: 839237 - RNA, 19 nt, Human
ggacugcaggggugcgcua

SEQ ID NO: 839238 - RNA, 22 nt, Human
ggcacagagaggggcagagaca

SEQ ID NO: 839239 - RNA, 19 nt, Human
ggcagggcccaggaacaca

SEQ ID NO: 839240 - RNA, 18 nt, Human
ggccaggagacagagcgg

SEQ ID NO: 839241 - RNA, 19 nt, Human
gggagccucgccgcgcccc

SEQ ID NO: 839242 - RNA, 21 nt, Human
gggcacgggggcuccacuccc

SEQ ID NO: 839243 - RNA, 20 nt, Human
gggcagggcccaggaacaca

SEQ ID NO: 839244 - RNA, 24 nt, Human
gggguggggcuggggcgagggggc

SEQ ID NO: 839245 - RNA, 25 nt, Human
guggccucuugagacauccucagcc

SEQ ID NO: 839246 - RNA, 26 nt, Human
uagagccgcaccuccuccacaccccc

SEQ ID NO: 839247 - RNA, 22 nt, Human
ucaagaaccacuccuagccucc

SEQ ID NO: 839248 - RNA, 19 nt, Human
ucccagcccgcagaccccc

SEQ ID NO: 839249 - RNA, 20 nt, Human
ucccagcccgcagaccccca

SEQ ID NO: 839250 - RNA, 20 nt, Human
ucccccgcagccccaacagc

SEQ ID NO: 839251 - RNA, 22 nt, Human
ucccugcuucccccugagcucc

SEQ ID NO: 839252 - RNA, 20 nt, Human
ucccuguggucaaggauggg

SEQ ID NO: 839253 - RNA, 18 nt, Human
ucccuuauaaaucgcagg

SEQ ID NO: 839254 - RNA, 24 nt, Human
ucgccgcgccccgcgccggcgcuc

SEQ ID NO: 839255 - RNA, 24 nt, Human
ucugaccccaaagugaagaauaga

SEQ ID NO: 839256 - RNA, 22 nt, Human
ugaccccaaagugaagaauaga

SEQ ID NO: 839257 - RNA, 20 nt, Human
ugaggaaaagcaggggcacg

SEQ ID NO: 839258 - RNA, 23 nt, Human
ugaggaaaagcaggggcacgggg

SEQ ID NO: 839259 - RNA, 19 nt, Human
uggccucuugagacauccu

SEQ ID NO: 839260 - RNA, 20 nt, Human
ugggaagggaaggaggagga

SEQ ID NO: 839261 - RNA, 20 nt, Human
ugggcagggcccaggaacac

SEQ ID NO: 839262 - RNA, 27 nt, Human
ugguggccucuugagacauccucagcc

SEQ ID NO: 839263 - RNA, 18 nt, Human
uucaggugagcaucaaga

SEQ ID NO: 839264 - RNA, 21 nt, Human
uucccagcccgcagaccccca

SEQ ID NO: 839265 - RNA, 25 nt, Human
uuugggaaccccucccugcuucccc

SEQ ID NO: 839266 - RNA, 21 nt, Human
aaaacaaaacaaaacaaaaaa

SEQ ID NO: 839267 - RNA, 33 nt, Human
aaaacaaaacaaaacaaaaaacaacaaaaaaga

SEQ ID NO: 839268 - RNA, 25 nt, Human
aaacaaaaacaaaacaaaacaaaaa

SEQ ID NO: 839269 - RNA, 19 nt, Human
aaacaaaacaaaacaaaaa

SEQ ID NO: 839270 - RNA, 18 nt, Human
aaacaaacauucuuucca

SEQ ID NO: 839271 - RNA, 19 nt, Human
aaacagggaaccccaugug

SEQ ID NO: 839272 - RNA, 24 nt, Human
aagaaccugucuacccaauguguc

SEQ ID NO: 839273 - RNA, 23 nt, Human
aagccagggaugcugcuccacag

SEQ ID NO: 839274 - RNA, 20 nt, Human
aagggcugccugcagacgag

SEQ ID NO: 839275 - RNA, 22 nt, Human
aagggcuggcugugccgccacc

SEQ ID NO: 839276 - RNA, 20 nt, Human
aaguccagagacauuuuugu

SEQ ID NO: 839277 - RNA, 18 nt, Human
aagugaccagggcagacg

SEQ ID NO: 839278 - RNA, 26 nt, Human
aauacaguacauaaaaacaaaaacaa

SEQ ID NO: 839279 - RNA, 26 nt, Human
acaaaaaaauuaagaaauuagaaaaa

SEQ ID NO: 839280 - RNA, 24 nt, Human
acaaaacaaaacaaaaaacaacaa

SEQ ID NO: 839281 - RNA, 23 nt, Human
acaccagcaacagggaggagccu

SEQ ID NO: 839282 - RNA, 18 nt, Human
acaggcacuguacacccc

SEQ ID NO: 839283 - RNA, 22 nt, Human
accaaugcuuugcacuuugccu

SEQ ID NO: 839284 - RNA, 21 nt, Human
accagagcucaccccugaaca

SEQ ID NO: 839285 - RNA, 24 nt, Human
acccagcccacaggccccaagggc

SEQ ID NO: 839286 - RNA, 20 nt, Human
acccaugggacacucccccu

SEQ ID NO: 839287 - RNA, 22 nt, Human
acccgcgccugccccacguucc

SEQ ID NO: 839288 - RNA, 23 nt, Human
acccucucuccagcccugagcac

SEQ ID NO: 839289 - RNA, 28 nt, Human
acgcaggaggugaaaggaaaggggaccc

SEQ ID NO: 839290 - RNA, 21 nt, Human
acuguacaccccuggcuacag

SEQ ID NO: 839291 - RNA, 21 nt, Human
agaaaaacuucaaaaccuaga

SEQ ID NO: 839292 - RNA, 19 nt, Human
agaaaaagagccccaaacg

SEQ ID NO: 839293 - RNA, 20 nt, Human
agaaauuagaaaaacuucaa

SEQ ID NO: 839294 - RNA, 21 nt, Human
agaagaagagcgggcccagag

SEQ ID NO: 839295 - RNA, 19 nt, Human
agacaucaugagaagaaga

SEQ ID NO: 839296 - RNA, 23 nt, Human
agagaagaggagcuuucuccuca

SEQ ID NO: 839297 - RNA, 23 nt, Human
agagacauuuuuguggucacaaa

SEQ ID NO: 839298 - RNA, 22 nt, Human
agagagcgacgaugucagacaa

SEQ ID NO: 839299 - RNA, 22 nt, Human
agcaagcgcaaagaaaccacaa

SEQ ID NO: 839300 - RNA, 19 nt, Human
agcacagggaggacaggag

SEQ ID NO: 839301 - RNA, 22 nt, Human
agcagcaggugggcugacggag

SEQ ID NO: 839302 - RNA, 22 nt, Human
agcaggagccugcagcagcccc

SEQ ID NO: 839303 - RNA, 20 nt, Human
agcagugccgagggagagcc

SEQ ID NO: 839304 - RNA, 21 nt, Human
agcccgcagccccgccacccu

SEQ ID NO: 839305 - RNA, 21 nt, Human
agcccgggugagcaugaggcu

SEQ ID NO: 839306 - RNA, 19 nt, Human
agcuccaggcccgggaagc

SEQ ID NO: 839307 - RNA, 22 nt, Human
aggaaguaagcuucuggagaag

SEQ ID NO: 839308 - RNA, 20 nt, Human
aggaucacuaagcucaaccc

SEQ ID NO: 839309 - RNA, 22 nt, Human
aggcagcccggaggccagagag

SEQ ID NO: 839310 - RNA, 19 nt, Human
aggcagccgcugggugggu

SEQ ID NO: 839311 - RNA, 23 nt, Human
agggacaggcagggaggggccca

SEQ ID NO: 839312 - RNA, 24 nt, Human
agggagagggcgaguggcccagag

SEQ ID NO: 839313 - RNA, 24 nt, Human
agggaggacaggagagcguuccag

SEQ ID NO: 839314 - RNA, 24 nt, Human
agggcagagggcucugacugggga

SEQ ID NO: 839315 - RNA, 20 nt, Human
aggggcaggaugugucuggc

SEQ ID NO: 839316 - RNA, 21 nt, Human
agguuccgcaggccgcagccc

SEQ ID NO: 839317 - RNA, 21 nt, Human
aguaagcuucuggagaagucc

SEQ ID NO: 839318 - RNA, 24 nt, Human
auaguagcuauucucaguugggcc

SEQ ID NO: 839319 - RNA, 20 nt, Human
aucacuaagcucaacccuga

SEQ ID NO: 839320 - RNA, 21 nt, Human
caaaccucucaaccuccuaaa

SEQ ID NO: 839321 - RNA, 21 nt, Human
caaagaaaccacaaucccugc

SEQ ID NO: 839322 - RNA, 20 nt, Human
caacccagcccacaggcccc

SEQ ID NO: 839323 - RNA, 20 nt, Human
cacagggaggacaggagagc

SEQ ID NO: 839324 - RNA, 18 nt, Human
cacagggccugcugggca

SEQ ID NO: 839325 - RNA, 24 nt, Human
cacccaccgcgucccagcggccca

SEQ ID NO: 839326 - RNA, 18 nt, Human
cacccgcuauggcagagc

SEQ ID NO: 839327 - RNA, 19 nt, Human
cacccggcagagagaaaac

SEQ ID NO: 839328 - RNA, 21 nt, Human
caccuuccuccacgcuggguc

SEQ ID NO: 839329 - RNA, 26 nt, Human
cacuguacaccccuggcuacagagcu

SEQ ID NO: 839330 - RNA, 19 nt, Human
cagcaagcgaccuggggcc

SEQ ID NO: 839331 - RNA, 20 nt, Human
cagcaggugggcugacggag

SEQ ID NO: 839332 - RNA, 23 nt, Human
cagccacagccacacagggccug

SEQ ID NO: 839333 - RNA, 24 nt, Human
cagcccagguagggcagagggcuc

SEQ ID NO: 839334 - RNA, 22 nt, Human
cagcccccuguagcuuguggcu

SEQ ID NO: 839335 - RNA, 24 nt, Human
cagccgcuggguggguucccgugg

SEQ ID NO: 839336 - RNA, 19 nt, Human
cagcugccucagguuccgc

SEQ ID NO: 839337 - RNA, 23 nt, Human
cagcuggagaaaaagagccccaa

SEQ ID NO: 839338 - RNA, 20 nt, Human
caggacccaggaggcguuac

SEQ ID NO: 839339 - RNA, 20 nt, Human
caggacccaggaggcguuac

SEQ ID NO: 839340 - RNA, 22 nt, Human
caggagccugcagcagccccca

SEQ ID NO: 839341 - RNA, 21 nt, Human
caggcacgauggacacuuaga

SEQ ID NO: 839342 - RNA, 23 nt, Human
caggccaaaacuggcagcaagcg

SEQ ID NO: 839343 - RNA, 21 nt, Human
cagggaggggcccagagaaga

SEQ ID NO: 839344 - RNA, 21 nt, Human
cagggccugcugggcagccug

SEQ ID NO: 839345 - RNA, 24 nt, Human
caggucccagcuccaggcccggga

SEQ ID NO: 839346 - RNA, 26 nt, Human
caguacauaaaaacaaaaacaaaaca

SEQ ID NO: 839347 - RNA, 28 nt, Human
cauaaaaacaaaaacaaaacaaaacaaa

SEQ ID NO: 839348 - RNA, 23 nt, Human
caugaggcuuuaugugggggugu

SEQ ID NO: 839349 - RNA, 21 nt, Human
caugcauguccagccccaaaa

SEQ ID NO: 839350 - RNA, 21 nt, Human
ccaaaagaugagcagugccga

SEQ ID NO: 839351 - RNA, 21 nt, Human
ccacacacgaagggagagggc

SEQ ID NO: 839352 - RNA, 21 nt, Human
ccacacccaccgcgucccagc

SEQ ID NO: 839353 - RNA, 20 nt, Human
ccacagccacacagggccug

SEQ ID NO: 839354 - RNA, 19 nt, Human
ccacaggcacgauggacac

SEQ ID NO: 839355 - RNA, 21 nt, Human
ccaccgccgccgccagcgcgg

SEQ ID NO: 839356 - RNA, 19 nt, Human
ccagcccaacccagcccac

SEQ ID NO: 839357 - RNA, 18 nt, Human
ccagcccagguagggcag

SEQ ID NO: 839358 - RNA, 24 nt, Human
ccaggcaggguguagcugugcaca

SEQ ID NO: 839359 - RNA, 24 nt, Human
cccaacccagcccacaggccccaa

SEQ ID NO: 839360 - RNA, 23 nt, Human
cccacauccaccagcccaaccca

SEQ ID NO: 839361 - RNA, 26 nt, Human
cccaccgcgucccagcggcccaggcc

SEQ ID NO: 839362 - RNA, 21 nt, Human
cccagaaggcccggggagccc

SEQ ID NO: 839363 - RNA, 21 nt, Human
ccccaaaagaugagcagugcc

SEQ ID NO: 839364 - RNA, 19 nt, Human
ccccaagggcucugccucu

SEQ ID NO: 839365 - RNA, 18 nt, Human
ccccagacgauugcuugu

SEQ ID NO: 839366 - RNA, 22 nt, Human
ccccagcugccucagguuccgc

SEQ ID NO: 839367 - RNA, 21 nt, Human
ccccauguggccaggcagggu

SEQ ID NO: 839368 - RNA, 18 nt, Human
ccccgggcucaggucagg

SEQ ID NO: 839369 - RNA, 19 nt, Human
ccccuggccacaacuuacc

SEQ ID NO: 839370 - RNA, 18 nt, Human
cccugagcacagggagga

SEQ ID NO: 839371 - RNA, 18 nt, Human
ccgacucugccaccaccc

SEQ ID NO: 839372 - RNA, 21 nt, Human
ccgacucugccaccacccggc

SEQ ID NO: 839373 - RNA, 21 nt, Human
ccggcgcgcccggcccucccc

SEQ ID NO: 839374 - RNA, 23 nt, Human
ccuacagggccaccacuuaccca

SEQ ID NO: 839375 - RNA, 22 nt, Human
ccuaugggcaggucccagcucu

SEQ ID NO: 839376 - RNA, 18 nt, Human
ccucgcccgacacccugc

SEQ ID NO: 839377 - RNA, 19 nt, Human
ccucgcccgacacccugcg

SEQ ID NO: 839378 - RNA, 21 nt, Human
ccucucaaccuccuaaacauc

SEQ ID NO: 839379 - RNA, 22 nt, Human
ccugaaauggcuuggaacgggg

SEQ ID NO: 839380 - RNA, 18 nt, Human
ccuguggacacuaaggcc

SEQ ID NO: 839381 - RNA, 24 nt, Human
ccuguggcuugacuggaccagagc

SEQ ID NO: 839382 - RNA, 22 nt, Human
cgacucugccaccacccggcag

SEQ ID NO: 839383 - RNA, 20 nt, Human
cgcagccccgccacccucuc

SEQ ID NO: 839384 - RNA, 23 nt, Human
cgcgcccggcccuccccagcugc

SEQ ID NO: 839385 - RNA, 20 nt, Human
cgcuucugggccaccuuccu

SEQ ID NO: 839386 - RNA, 18 nt, Human
cggauuacgagaaaccgc

SEQ ID NO: 839387 - RNA, 19 nt, Human
cggcagagagaaaacaggg

SEQ ID NO: 839388 - RNA, 23 nt, Human
cggcagagagaaaacagggaacc

SEQ ID NO: 839389 - RNA, 24 nt, Human
cgucacccuacagggccaccacuu

SEQ ID NO: 839390 - RNA, 18 nt, Human
cguggcccccggcccucc

SEQ ID NO: 839391 - RNA, 18 nt, Human
cguguagcagugaccucc

SEQ ID NO: 839392 - RNA, 20 nt, Human
cuaaaggcaaaccucucaac

SEQ ID NO: 839393 - RNA, 23 nt, Human
cucaaacucaggacccaggaggc

SEQ ID NO: 839394 - RNA, 21 nt, Human
cucacaggccaaaacuggcag

SEQ ID NO: 839395 - RNA, 23 nt, Human
cuccucggaagcagggccacccu

SEQ ID NO: 839396 - RNA, 21 nt, Human
cucuaaugcuaaggaucucac

SEQ ID NO: 839397 - RNA, 19 nt, Human
cucugccucugcccagccu

SEQ ID NO: 839398 - RNA, 19 nt, Human
cugcagcagcccccacagg

SEQ ID NO: 839399 - RNA, 24 nt, Human
cuggcugugccgccaccgcugccc

SEQ ID NO: 839400 - RNA, 18 nt, Human
cuggggacccaagaaggg

SEQ ID NO: 839401 - RNA, 23 nt, Human
cuggggcccccgcacucuggcug

SEQ ID NO: 839402 - RNA, 20 nt, Human
cugucgaggggguauccagc

SEQ ID NO: 839403 - RNA, 22 nt, Human
cugugagaaccugcuggggccc

SEQ ID NO: 839404 - RNA, 23 nt, Human
cuucaugucacuccccacgcugg

SEQ ID NO: 839405 - RNA, 18 nt, Human
cuuccgggccucaccacu

SEQ ID NO: 839406 - RNA, 19 nt, Human
cuucuucccaggaaggugg

SEQ ID NO: 839407 - RNA, 21 nt, Human
gaaggugcugacccuguggcu

SEQ ID NO: 839408 - RNA, 19 nt, Human
gaccucugccucugcccag

SEQ ID NO: 839409 - RNA, 25 nt, Human
gagaaaccgcaaccagccgucuacc

SEQ ID NO: 839410 - RNA, 21 nt, Human
gagaagaagagcgggcccaga

SEQ ID NO: 839411 - RNA, 21 nt, Human
gagagaaaacagggaacccca

SEQ ID NO: 839412 - RNA, 21 nt, Human
gagcagugccgagggagagcc

SEQ ID NO: 839413 - RNA, 23 nt, Human
gagcaugaggcuuuauguggggg

SEQ ID NO: 839414 - RNA, 21 nt, Human
gagcucacaggccaaaacugg

SEQ ID NO: 839415 - RNA, 22 nt, Human
gaggacaggagagcguuccaga

SEQ ID NO: 839416 - RNA, 18 nt, Human
gaggagccucucacucca

SEQ ID NO: 839417 - RNA, 23 nt, Human
gaggccgcguggaacagccacag

SEQ ID NO: 839418 - RNA, 19 nt, Human
gaguggccuggcucugggc

SEQ ID NO: 839419 - RNA, 23 nt, Human
gcaaaccccacacucuagacacu

SEQ ID NO: 839420 - RNA, 23 nt, Human
gcaccaaugcuuugcacuuugcc

SEQ ID NO: 839421 - RNA, 26 nt, Human
gcagcaagcgaccuggggcccugaag

SEQ ID NO: 839422 - RNA, 18 nt, Human
gcagccgcuggguggguu

SEQ ID NO: 839423 - RNA, 26 nt, Human
gcagugccgagggagagcccucacac

SEQ ID NO: 839424 - RNA, 21 nt, Human
gccacagccacacagggccug

SEQ ID NO: 839425 - RNA, 23 nt, Human
gccacagccacacagggccugcu

SEQ ID NO: 839426 - RNA, 19 nt, Human
gcccaacccagcccacagg

SEQ ID NO: 839427 - RNA, 21 nt, Human
gcccagaaggcccggggagcc

SEQ ID NO: 839428 - RNA, 23 nt, Human
gcccagccucucuggucaccgcc

SEQ ID NO: 839429 - RNA, 27 nt, Human
gcccgacacccugcgggccagagcucc

SEQ ID NO: 839430 - RNA, 24 nt, Human
gcccggcccuccccagcugccuca

SEQ ID NO: 839431 - RNA, 18 nt, Human
gccgccaccgcugccccg

SEQ ID NO: 839432 - RNA, 21 nt, Human
gccucaccacucccgaguggc

SEQ ID NO: 839433 - RNA, 19 nt, Human
gccuuuaagugaccagggc

SEQ ID NO: 839434 - RNA, 24 nt, Human
gcgccuccccuagcucuccgucac

SEQ ID NO: 839435 - RNA, 18 nt, Human
gcgggcccagagcgggcg

SEQ ID NO: 839436 - RNA, 23 nt, Human
gcugccugcagacgaggcucccg

SEQ ID NO: 839437 - RNA, 22 nt, Human
gcuggguuucuccauccugcca

SEQ ID NO: 839438 - RNA, 21 nt, Human
gcugugccgccaccgcugccc

SEQ ID NO: 839439 - RNA, 19 nt, Human
ggaaagacaucaugagaag

SEQ ID NO: 839440 - RNA, 18 nt, Human
ggaagcagggccacccuc

SEQ ID NO: 839441 - RNA, 21 nt, Human
ggaggugggcccagguggcag

SEQ ID NO: 839442 - RNA, 18 nt, Human
ggcagccgcugggugggu

SEQ ID NO: 839443 - RNA, 19 nt, Human
ggccaggcaggguguagcu

SEQ ID NO: 839444 - RNA, 18 nt, Human
ggcccagagcgggcgcga

SEQ ID NO: 839445 - RNA, 23 nt, Human
ggccgcguggaacagccacagcc

SEQ ID NO: 839446 - RNA, 23 nt, Human
ggcucugccucuguggacauccu

SEQ ID NO: 839447 - RNA, 19 nt, Human
gggacaggcagggaggggc

SEQ ID NO: 839448 - RNA, 22 nt, Human
gggagagcgagucacugcaggu

SEQ ID NO: 839449 - RNA, 19 nt, Human
ggucauuccucaccaugaa

SEQ ID NO: 839450 - RNA, 18 nt, Human
ggugggggcagcccggau

SEQ ID NO: 839451 - RNA, 24 nt, Human
gucccaggccccacauccaccagc

SEQ ID NO: 839452 - RNA, 21 nt, Human
guggcuccugugccuguccca

SEQ ID NO: 839453 - RNA, 20 nt, Human
guggcucugcagcuaugccc

SEQ ID NO: 839454 - RNA, 20 nt, Human
guggcugccugaggccccgc

SEQ ID NO: 839455 - RNA, 20 nt, Human
gugggggcagcccggauuac

SEQ ID NO: 839456 - RNA, 21 nt, Human
gugggggcagcccggauuacg

SEQ ID NO: 839457 - RNA, 24 nt, Human
uaaaggcaaaccucucaaccuccu

SEQ ID NO: 839458 - RNA, 20 nt, Human
uaauuuaaaauaaagaaaaa

SEQ ID NO: 839459 - RNA, 25 nt, Human
uacaguacauaaaaacaaaaacaaa

SEQ ID NO: 839460 - RNA, 23 nt, Human
uagacacugacguuccuccgaga

SEQ ID NO: 839461 - RNA, 19 nt, Human
uagcugugcacaucagaca

SEQ ID NO: 839462 - RNA, 26 nt, Human
uaugaacgaaaacauaaaacgcuaca

SEQ ID NO: 839463 - RNA, 22 nt, Human
ucaaauaaaacacuccuaugaa

SEQ ID NO: 839464 - RNA, 23 nt, Human
ucaaauaaaacacuccuaugaac

SEQ ID NO: 839465 - RNA, 24 nt, Human
ucacacgggcgcagcccgccuccc

SEQ ID NO: 839466 - RNA, 26 nt, Human
ucacuaagcucaacccugacaggcac

SEQ ID NO: 839467 - RNA, 22 nt, Human
ucagggccagggagugaccaga

SEQ ID NO: 839468 - RNA, 25 nt, Human
uccacacccaccgcgucccagcggc

SEQ ID NO: 839469 - RNA, 19 nt, Human
uccacuggugcccucccca

SEQ ID NO: 839470 - RNA, 21 nt, Human
ucccagagcagcgcagcagca

SEQ ID NO: 839471 - RNA, 21 nt, Human
ucccaggaagguggcuguccu

SEQ ID NO: 839472 - RNA, 23 nt, Human
ucccaggcagccgcugggugggu

SEQ ID NO: 839473 - RNA, 25 nt, Human
ucccaggccccacauccaccagccc

SEQ ID NO: 839474 - RNA, 19 nt, Human
uccgccguggcugccugag

SEQ ID NO: 839475 - RNA, 18 nt, Human
ucuaugugacuaaugcgg

SEQ ID NO: 839476 - RNA, 19 nt, Human
ucucaaccuccuaaacauc

SEQ ID NO: 839477 - RNA, 19 nt, Human
ucucacccagggaggagcu

SEQ ID NO: 839478 - RNA, 19 nt, Human
ucucuggucaccgccagac

SEQ ID NO: 839479 - RNA, 19 nt, Human
ucugacuggggacccaaga

SEQ ID NO: 839480 - RNA, 18 nt, Human
ucugcagcuaugcccagu

SEQ ID NO: 839481 - RNA, 22 nt, Human
ucugcagucugauugcgccucc

SEQ ID NO: 839482 - RNA, 20 nt, Human
ucugccucuguggacauccu

SEQ ID NO: 839483 - RNA, 20 nt, Human
ucuucuucccaggaaggugg

SEQ ID NO: 839484 - RNA, 23 nt, Human
ugaaaauacaguacauaaaaaca

SEQ ID NO: 839485 - RNA, 22 nt, Human
ugaaaggaaaacccuugcucuu

SEQ ID NO: 839486 - RNA, 18 nt, Human
ugaaaggaaagacaucau

SEQ ID NO: 839487 - RNA, 18 nt, Human
ugaaggaguggccuggcu

SEQ ID NO: 839488 - RNA, 24 nt, Human
ugaccucugccucugcccagccuc

SEQ ID NO: 839489 - RNA, 19 nt, Human
ugacugccccgaggggaug

SEQ ID NO: 839490 - RNA, 19 nt, Human
ugagaggaggugggcccag

SEQ ID NO: 839491 - RNA, 23 nt, Human
ugagcaagcgcaaagaaaccaca

SEQ ID NO: 839492 - RNA, 18 nt, Human
ugagccagagacagugag

SEQ ID NO: 839493 - RNA, 25 nt, Human
ugagccagagacagugagaggaggu

SEQ ID NO: 839494 - RNA, 21 nt, Human
ugaggcugacgugucuucaga

SEQ ID NO: 839495 - RNA, 18 nt, Human
ugccccgucaccaucacu

SEQ ID NO: 839496 - RNA, 21 nt, Human
ugccucugcccagccucucug

SEQ ID NO: 839497 - RNA, 19 nt, Human
ugccugaggccccgcgcac

SEQ ID NO: 839498 - RNA, 22 nt, Human
ugcugggcagccugagccccug

SEQ ID NO: 839499 - RNA, 18 nt, Human
uggaacagccacagccac

SEQ ID NO: 839500 - RNA, 21 nt, Human
uggagggugggggcagcccgg

SEQ ID NO: 839501 - RNA, 19 nt, Human
uggcuccugugccuguccc

SEQ ID NO: 839502 - RNA, 18 nt, Human
uggcugugccgccaccgc

SEQ ID NO: 839503 - RNA, 21 nt, Human
uggcuugacuggaccagagcu

SEQ ID NO: 839504 - RNA, 21 nt, Human
ugggcccagguggcagggcug

SEQ ID NO: 839505 - RNA, 20 nt, Human
uggggacccaagaagggcug

SEQ ID NO: 839506 - RNA, 22 nt, Human
uggggacccaagaaggggggag

SEQ ID NO: 839507 - RNA, 22 nt, Human
uggggcccugaaggaguggccu

SEQ ID NO: 839508 - RNA, 23 nt, Human
uggggcccugaaggaguggccug

SEQ ID NO: 839509 - RNA, 22 nt, Human
uguacaccccuggcuacagagc

SEQ ID NO: 839510 - RNA, 20 nt, Human
ugucacaggcaccugguguc

SEQ ID NO: 839511 - RNA, 22 nt, Human
ugucccaggcagccgcugggug

SEQ ID NO: 839512 - RNA, 18 nt, Human
uguccuuaccuggcacug

SEQ ID NO: 839513 - RNA, 21 nt, Human
ugucuggcuggagcccgggug

SEQ ID NO: 839514 - RNA, 23 nt, Human
ugugucacaggcaccuggugucu

SEQ ID NO: 839515 - RNA, 23 nt, Human
uucauccuguggacacuaaggcc

SEQ ID NO: 839516 - RNA, 23 nt, Human
uuccucaccaugaguagccacaa

SEQ ID NO: 839517 - RNA, 21 nt, Human
uugaggugugggaaagugcaa

SEQ ID NO: 839518 - RNA, 21 nt, Human
uugcgccuccccuagcucucc

SEQ ID NO: 839519 - RNA, 21 nt, Human
uugcuuguaaugggccagugc

SEQ ID NO: 839520 - RNA, 20 nt, Human
uuugaaaggaaaacccuugc

SEQ ID NO: 839521 - RNA, 20 nt, Human
aggggguggucugaccccca

SEQ ID NO: 839522 - RNA, 18 nt, Human
caagcaucgcuuaucaaa

SEQ ID NO: 839523 - RNA, 23 nt, Human
caagcaucgcuuaucaaagccac

SEQ ID NO: 839524 - RNA, 19 nt, Human
cacucucgggauccacggg

SEQ ID NO: 839525 - RNA, 21 nt, Human
ccacugccaagcagacuuccg

SEQ ID NO: 839526 - RNA, 24 nt, Human
cccccgacaccuuccccgagagcc

SEQ ID NO: 839527 - RNA, 27 nt, Human
cccccgacaccuuccccgagagcccac

SEQ ID NO: 839528 - RNA, 26 nt, Human
cccggccccugccccgagccgguucc

SEQ ID NO: 839529 - RNA, 23 nt, Human
cccggccccugccccgagcucuc

SEQ ID NO: 839530 - RNA, 22 nt, Human
cccggguuagcccucaugcccc

SEQ ID NO: 839531 - RNA, 25 nt, Human
cccuccuagggggcccccgacaccu

SEQ ID NO: 839532 - RNA, 21 nt, Human
ccgccggccggccgagcagca

SEQ ID NO: 839533 - RNA, 19 nt, Human
ccggccggccgagcagcag

SEQ ID NO: 839534 - RNA, 19 nt, Human
ccggcucccccacgccucc

SEQ ID NO: 839535 - RNA, 23 nt, Human
ccgggucggccccuggacaccac

SEQ ID NO: 839536 - RNA, 22 nt, Human
ccgggucggccccuggacacgu

SEQ ID NO: 839537 - RNA, 24 nt, Human
ccgggucggccccuggacacguua

SEQ ID NO: 839538 - RNA, 25 nt, Human
ccgggucggccccuggacacguuuu

SEQ ID NO: 839539 - RNA, 18 nt, Human
ccucaugccccugcugcu

SEQ ID NO: 839540 - RNA, 22 nt, Human
ccucccggccccugccccgagc

SEQ ID NO: 839541 - RNA, 19 nt, Human
ccugaagcugcuuccacac

SEQ ID NO: 839542 - RNA, 21 nt, Human
ccugugccagugagccagggg

SEQ ID NO: 839543 - RNA, 23 nt, Human
cggccgagcagcagcccuauuac

SEQ ID NO: 839544 - RNA, 23 nt, Human
cucccccacgccucccggccccc

SEQ ID NO: 839545 - RNA, 19 nt, Human
cucugagcuacggaacaga

SEQ ID NO: 839546 - RNA, 23 nt, Human
gaaauguacauuuuuguuguuug

SEQ ID NO: 839547 - RNA, 19 nt, Human
ggcacuuggcccuggcagg

SEQ ID NO: 839548 - RNA, 23 nt, Human
ggcaggguggcaggcauugaagg

SEQ ID NO: 839549 - RNA, 21 nt, Human
ggcgcuccucccggcccgcuc

SEQ ID NO: 839550 - RNA, 20 nt, Human
uacgggccgggucggccccu

SEQ ID NO: 839551 - RNA, 20 nt, Human
uaucaaagccacugccaagc

SEQ ID NO: 839552 - RNA, 20 nt, Human
ucccauggcaauguccccag

SEQ ID NO: 839553 - RNA, 21 nt, Human
ucccauggcaauguccccagc

SEQ ID NO: 839554 - RNA, 21 nt, Human
ucccggccccugccccgagcu

SEQ ID NO: 839555 - RNA, 20 nt, Human
ugccccgagcucugcacucu

SEQ ID NO: 839556 - RNA, 22 nt, Human
ugccccgagcucugcacucucg

SEQ ID NO: 839557 - RNA, 19 nt, Human
uuaaaaggaaaaacagaaa

SEQ ID NO: 839558 - RNA, 19 nt, Human
uucauauuguuucacgagc

SEQ ID NO: 839559 - RNA, 26 nt, Human
uucccggguuagcccucaugccccug

SEQ ID NO: 839560 - RNA, 21 nt, Human
uuuuuuuuuuuuuaaagagua

SEQ ID NO: 839561 - RNA, 19 nt, Human
uuuuuuuuuuuuuuuuuaa

SEQ ID NO: 839562 - RNA, 20 nt, Human
aaaaggauucuaagaaacaa

SEQ ID NO: 839563 - RNA, 25 nt, Human
aagcggccgcuuuuuuuuuuuuuuu

SEQ ID NO: 839564 - RNA, 19 nt, Human
acaacaagggcagggugag

SEQ ID NO: 839565 - RNA, 23 nt, Human
acgccggggcacaggcgggggug

SEQ ID NO: 839566 - RNA, 21 nt, Human
agaagacagguaggagagaca

SEQ ID NO: 839567 - RNA, 19 nt, Human
agagacaacaagggcaggg

SEQ ID NO: 839568 - RNA, 18 nt, Human
agagagaagacgggcugg

SEQ ID NO: 839569 - RNA, 21 nt, Human
agagagagaagacgggcuggu

SEQ ID NO: 839570 - RNA, 18 nt, Human
agagccagaagacaggua

SEQ ID NO: 839571 - RNA, 18 nt, Human
agagccccccagugaucc

SEQ ID NO: 839572 - RNA, 20 nt, Human
agcggccgcuuuuuuuuuuu

SEQ ID NO: 839573 - RNA, 19 nt, Human
agcugcgugaccuugagca

SEQ ID NO: 839574 - RNA, 23 nt, Human
aggaaaccuggguccggucugcc

SEQ ID NO: 839575 - RNA, 20 nt, Human
aggaagagacuugggccagg

SEQ ID NO: 839576 - RNA, 21 nt, Human
aggaggaagagacuugggcca

SEQ ID NO: 839577 - RNA, 30 nt, Human
aggcacuggucaucuccuccuggggggaag

SEQ ID NO: 839578 - RNA, 23 nt, Human
aggggugggagcagagagagaag

SEQ ID NO: 839579 - RNA, 19 nt, Human
agucaggaaaccugggucc

SEQ ID NO: 839580 - RNA, 19 nt, Human
aguuuggacaggaacacag

SEQ ID NO: 839581 - RNA, 18 nt, Human
caacgcgcauuguggcca

SEQ ID NO: 839582 - RNA, 19 nt, Human
cagacugcccuccgccucu

SEQ ID NO: 839583 - RNA, 20 nt, Human
caggauaggaggaagagacu

SEQ ID NO: 839584 - RNA, 19 nt, Human
cagggugagggcggcaggg

SEQ ID NO: 839585 - RNA, 25 nt, Human
cccaccgcgcgccgcuggcucccac

SEQ ID NO: 839586 - RNA, 19 nt, Human
cccccgggggccuggcgcu

SEQ ID NO: 839587 - RNA, 18 nt, Human
cccccuccuccggcuccg

SEQ ID NO: 839588 - RNA, 23 nt, Human
ccccgccgccccccgacgggcug

SEQ ID NO: 839589 - RNA, 21 nt, Human
ccccuccccgccgccccccga

SEQ ID NO: 839590 - RNA, 18 nt, Human
cccgcggccgcccccucc

SEQ ID NO: 839591 - RNA, 18 nt, Human
cccucccucccucccccc

SEQ ID NO: 839592 - RNA, 23 nt, Human
ccgcagccuccagggcccgagcu

SEQ ID NO: 839593 - RNA, 20 nt, Human
ccgcgcgccgcuggcucccc

SEQ ID NO: 839594 - RNA, 24 nt, Human
ccuccccgccgccccccgacgggc

SEQ ID NO: 839595 - RNA, 25 nt, Human
ccucccgugggcaggagggcgcggu

SEQ ID NO: 839596 - RNA, 25 nt, Human
ccucccgugggcaggagggcgcggu

SEQ ID NO: 839597 - RNA, 20 nt, Human
ccuugagcagacugcccucc

SEQ ID NO: 839598 - RNA, 22 nt, Human
cgccgcuggcucccaccggccc

SEQ ID NO: 839599 - RNA, 20 nt, Human
cgcugggcagcagagagccu

SEQ ID NO: 839600 - RNA, 24 nt, Human
cgcuuuuuuuuuuuuuuucaccag

SEQ ID NO: 839601 - RNA, 23 nt, Human
cggccgcccccuccuccggcucc

SEQ ID NO: 839602 - RNA, 23 nt, Human
cggcgcccucccucccucccccc

SEQ ID NO: 839603 - RNA, 24 nt, Human
cgggcccccuccccgccgcccccc

SEQ ID NO: 839604 - RNA, 19 nt, Human
cuccgggcccccuccccgc

SEQ ID NO: 839605 - RNA, 23 nt, Human
cuuccccgagccggcccggcucc

SEQ ID NO: 839606 - RNA, 23 nt, Human
gaccgcggggcggcgggggcccg

SEQ ID NO: 839607 - RNA, 20 nt, Human
gagaagaugauaccagaugg

SEQ ID NO: 839608 - RNA, 19 nt, Human
gagagccuggcuauggcac

SEQ ID NO: 839609 - RNA, 21 nt, Human
gagccggcuuccccgagccgg

SEQ ID NO: 839610 - RNA, 20 nt, Human
gagccuggcuauggcacugc

SEQ ID NO: 839611 - RNA, 22 nt, Human
gaggaagagacuugggccagga

SEQ ID NO: 839612 - RNA, 22 nt, Human
gaggagaggaggcagaugugga

SEQ ID NO: 839613 - RNA, 22 nt, Human
gaggagaggaggcagaugugga

SEQ ID NO: 839614 - RNA, 22 nt, Human
gagggcggcaggggugggagca

SEQ ID NO: 839615 - RNA, 18 nt, Human
gcacuggucaucuccucc

SEQ ID NO: 839616 - RNA, 21 nt, Human
gcacuggucaucuccuccugg

SEQ ID NO: 839617 - RNA, 18 nt, Human
gcagggugagggcggcag

SEQ ID NO: 839618 - RNA, 21 nt, Human
gccgcuggcucccaccggccc

SEQ ID NO: 839619 - RNA, 24 nt, Human
gccuccagggcccgagcuuucuuc

SEQ ID NO: 839620 - RNA, 19 nt, Human
gcggcaggggugggagcag

SEQ ID NO: 839621 - RNA, 18 nt, Human
gcgguggcucagugggcc

SEQ ID NO: 839622 - RNA, 19 nt, Human
ggaggagaggaggcagaug

SEQ ID NO: 839623 - RNA, 19 nt, Human
ggaggagaggaggcagaug

SEQ ID NO: 839624 - RNA, 20 nt, Human
ggcagggugagggcggcagg

SEQ ID NO: 839625 - RNA, 22 nt, Human
ggcccccuccccgccgcccccc

SEQ ID NO: 839626 - RNA, 22 nt, Human
ggccgcccccuccuccggcucc

SEQ ID NO: 839627 - RNA, 21 nt, Human
ggccgcuuuuuuuuuuuuuuu

SEQ ID NO: 839628 - RNA, 22 nt, Human
gggcagggugagggcggcaggg

SEQ ID NO: 839629 - RNA, 23 nt, Human
gggcagggugagggcggcagggg

SEQ ID NO: 839630 - RNA, 24 nt, Human
gggcagggugagggcggcaggggu

SEQ ID NO: 839631 - RNA, 21 nt, Human
gggcggcaggggugggagcag

SEQ ID NO: 839632 - RNA, 21 nt, Human
gguccggucugccccaaccag

SEQ ID NO: 839633 - RNA, 21 nt, Human
gucgcggggcuccgugggucc

SEQ ID NO: 839634 - RNA, 21 nt, Human
uaaaaaauauauuccuguaga

SEQ ID NO: 839635 - RNA, 21 nt, Human
uaaaaaauauauuccuguaga

SEQ ID NO: 839636 - RNA, 21 nt, Human
uagcauuucaauguugcugug

SEQ ID NO: 839637 - RNA, 19 nt, Human
ucaacgcgcauuguggcca

SEQ ID NO: 839638 - RNA, 21 nt, Human
ucaacgcgcauuguggccaag

SEQ ID NO: 839639 - RNA, 23 nt, Human
ucccaccggcccggcgcccuccc

SEQ ID NO: 839640 - RNA, 20 nt, Human
uccccgagccggcccggcuc

SEQ ID NO: 839641 - RNA, 19 nt, Human
uccccgccgccccccgacg

SEQ ID NO: 839642 - RNA, 21 nt, Human
uccgggcuggagccggcuucc

SEQ ID NO: 839643 - RNA, 21 nt, Human
uccucccgugggcaggagggc

SEQ ID NO: 839644 - RNA, 21 nt, Human
uccucccgugggcaggagggc

SEQ ID NO: 839645 - RNA, 21 nt, Human
uccuguagagaguuauugcuu

SEQ ID NO: 839646 - RNA, 21 nt, Human
uccuguagagaguuauugcuu

SEQ ID NO: 839647 - RNA, 23 nt, Human
ugaggaggagaggaggcagaugu

SEQ ID NO: 839648 - RNA, 23 nt, Human
ugaggaggagaggaggcagaugu

SEQ ID NO: 839649 - RNA, 25 nt, Human
ugaggaggagaggaggcagaugugg

SEQ ID NO: 839650 - RNA, 25 nt, Human
ugaggaggagaggaggcagaugugg

SEQ ID NO: 839651 - RNA, 18 nt, Human
ugagggcggcaggggugg

SEQ ID NO: 839652 - RNA, 21 nt, Human
uggcacugcugcuguucccug

SEQ ID NO: 839653 - RNA, 21 nt, Human
ugggagcagagagagaagacg

SEQ ID NO: 839654 - RNA, 25 nt, Human
ugggccaggagucaggaaaccuggg

SEQ ID NO: 839655 - RNA, 21 nt, Human
uggguccggucugccccaacc

SEQ ID NO: 839656 - RNA, 21 nt, Human
aaagauagccccugacuucaa

SEQ ID NO: 839657 - RNA, 18 nt, Human
aacccucaaucgccccuc

SEQ ID NO: 839658 - RNA, 21 nt, Human
aaguucagaugaaaagucacc

SEQ ID NO: 839659 - RNA, 22 nt, Human
aaugacccugggcccuccuggc

SEQ ID NO: 839660 - RNA, 21 nt, Human
acagaggccucacucgggcca

SEQ ID NO: 839661 - RNA, 19 nt, Human
acccugggcccuccuggcc

SEQ ID NO: 839662 - RNA, 22 nt, Human
agaggggcuuuccugccugaga

SEQ ID NO: 839663 - RNA, 21 nt, Human
agcaacguggucccuggucac

SEQ ID NO: 839664 - RNA, 24 nt, Human
agccccuaggcccugcccaucucu

SEQ ID NO: 839665 - RNA, 24 nt, Human
aggaaggaacuaggcugcguguca

SEQ ID NO: 839666 - RNA, 25 nt, Human
aggaaggaacuaggcugcgugucag

SEQ ID NO: 839667 - RNA, 21 nt, Human
aggcagaggugaacccucaau

SEQ ID NO: 839668 - RNA, 19 nt, Human
aggcaggcagaccggaucc

SEQ ID NO: 839669 - RNA, 23 nt, Human
agggaggcaggcagaccggaucc

SEQ ID NO: 839670 - RNA, 23 nt, Human
agugagagaggggccaggaagga

SEQ ID NO: 839671 - RNA, 18 nt, Human
aucugggcuggggcugca

SEQ ID NO: 839672 - RNA, 21 nt, Human
caacagagaggggcuuuccug

SEQ ID NO: 839673 - RNA, 23 nt, Human
caagccaggaccagacauucuga

SEQ ID NO: 839674 - RNA, 22 nt, Human
caaggccaggcccaucugcccc

SEQ ID NO: 839675 - RNA, 18 nt, Human
cacagaggccucacucgg

SEQ ID NO: 839676 - RNA, 24 nt, Human
cacagugacauuuuccaaagugga

SEQ ID NO: 839677 - RNA, 19 nt, Human
caccagggcaggacagcac

SEQ ID NO: 839678 - RNA, 20 nt, Human
caccagggcaggacagcaca

SEQ ID NO: 839679 - RNA, 19 nt, Human
caccauggcaaccaauggc

SEQ ID NO: 839680 - RNA, 20 nt, Human
cacucagcauucacaggcag

SEQ ID NO: 839681 - RNA, 19 nt, Human
cagcagccucagggcccaa

SEQ ID NO: 839682 - RNA, 22 nt, Human
cagcaggcagcucccagccccu

SEQ ID NO: 839683 - RNA, 18 nt, Human
cagccccuaggcccugcc

SEQ ID NO: 839684 - RNA, 20 nt, Human
caggaaggaacuaggcugcg

SEQ ID NO: 839685 - RNA, 18 nt, Human
caggacagcacagaggcc

SEQ ID NO: 839686 - RNA, 22 nt, Human
caggacagcacagaggccucac

SEQ ID NO: 839687 - RNA, 21 nt, Human
caggcccaagccaggaccaga

SEQ ID NO: 839688 - RNA, 24 nt, Human
caggcccaucugcccaucccacag

SEQ ID NO: 839689 - RNA, 18 nt, Human
caggcugagaggccaggc

SEQ ID NO: 839690 - RNA, 19 nt, Human
cagggcccaaggaggagug

SEQ ID NO: 839691 - RNA, 24 nt, Human
caggguccuccauccugaaguucc

SEQ ID NO: 839692 - RNA, 24 nt, Human
ccaaccagccacuuucacacaagu

SEQ ID NO: 839693 - RNA, 20 nt, Human
ccagccccuaggcccugccc

SEQ ID NO: 839694 - RNA, 21 nt, Human
ccagccuggcgcuucuagugg

SEQ ID NO: 839695 - RNA, 21 nt, Human
cccagaguaaagaaagagacc

SEQ ID NO: 839696 - RNA, 21 nt, Human
ccccaaccucaggucugaccu

SEQ ID NO: 839697 - RNA, 20 nt, Human
ccccaaggcagaggugaacc

SEQ ID NO: 839698 - RNA, 22 nt, Human
cccugcccaucucuagggcuug

SEQ ID NO: 839699 - RNA, 25 nt, Human
ccgagugacaaauuaaaacacaaca

SEQ ID NO: 839700 - RNA, 21 nt, Human
ccucagggcccaaggaggagu

SEQ ID NO: 839701 - RNA, 18 nt, Human
ccuccccaaggcagaggu

SEQ ID NO: 839702 - RNA, 19 nt, Human
ccuuaaguucagaugaaaa

SEQ ID NO: 839703 - RNA, 23 nt, Human
cgcucagaggcggccccagccug

SEQ ID NO: 839704 - RNA, 18 nt, Human
cgcugagugccaucuggg

SEQ ID NO: 839705 - RNA, 20 nt, Human
cuccccaaggcagaggugaa

SEQ ID NO: 839706 - RNA, 23 nt, Human
cugagguaccggcgaggggcagg

SEQ ID NO: 839707 - RNA, 19 nt, Human
cugggcccuccuggccagg

SEQ ID NO: 839708 - RNA, 19 nt, Human
gaagccacuuagcucugcu

SEQ ID NO: 839709 - RNA, 25 nt, Human
gagccugggccagagaucugaagga

SEQ ID NO: 839710 - RNA, 21 nt, Human
gagugacaaauuaaaacacaa

SEQ ID NO: 839711 - RNA, 20 nt, Human
gcacagaggccucacucggg

SEQ ID NO: 839712 - RNA, 20 nt, Human
gcaggcugagaggccaggcu

SEQ ID NO: 839713 - RNA, 19 nt, Human
gcagggaaaguaugcuggc

SEQ ID NO: 839714 - RNA, 23 nt, Human
gccacuuucacacaaguauacca

SEQ ID NO: 839715 - RNA, 20 nt, Human
gccagagaucugaaggaggc

SEQ ID NO: 839716 - RNA, 21 nt, Human
gccaugcaccagggcaggaca

SEQ ID NO: 839717 - RNA, 23 nt, Human
ggagaggcggucgcgggagcugg

SEQ ID NO: 839718 - RNA, 22 nt, Human
ggccagggccugagcacauuuc

SEQ ID NO: 839719 - RNA, 21 nt, Human
ggccuagaaagcuaaggccau

SEQ ID NO: 839720 - RNA, 21 nt, Human
gggaagcccagccacaacucc

SEQ ID NO: 839721 - RNA, 23 nt, Human
ggucgggaauagugaggggaugg

SEQ ID NO: 839722 - RNA, 22 nt, Human
gugaacccucaaucgccccucc

SEQ ID NO: 839723 - RNA, 19 nt, Human
guucagaugaaaagucacc

SEQ ID NO: 839724 - RNA, 18 nt, Human
uaaaacccagcaguguug

SEQ ID NO: 839725 - RNA, 19 nt, Human
uaaagaaagagaccucagg

SEQ ID NO: 839726 - RNA, 22 nt, Human
uaccauggugggguggggcugg

SEQ ID NO: 839727 - RNA, 23 nt, Human
uagaaagcuaaggccaugcacca

SEQ ID NO: 839728 - RNA, 21 nt, Human
uaggcccugcccaucucuagg

SEQ ID NO: 839729 - RNA, 19 nt, Human
uaugcaggcugagaggcca

SEQ ID NO: 839730 - RNA, 26 nt, Human
ucccaaccagccacuuucacacaagu

SEQ ID NO: 839731 - RNA, 18 nt, Human
uccuggccagggccugag

SEQ ID NO: 839732 - RNA, 18 nt, Human
ucugacauggucuagggu

SEQ ID NO: 839733 - RNA, 24 nt, Human
ucugggcuggggcugcagcaaggc

SEQ ID NO: 839734 - RNA, 21 nt, Human
ugaacccucaaucgccccucc

SEQ ID NO: 839735 - RNA, 24 nt, Human
ugacauuuuccaaaguggaaaaaa

SEQ ID NO: 839736 - RNA, 26 nt, Human
ugagagaggggccaggaaggaacuag

SEQ ID NO: 839737 - RNA, 23 nt, Human
ugagaucuggugagcagaugggu

SEQ ID NO: 839738 - RNA, 23 nt, Human
ugagcagaugggugcagggaaag

SEQ ID NO: 839739 - RNA, 18 nt, Human
ugagguaccggcgagggg

SEQ ID NO: 839740 - RNA, 19 nt, Human
ugagugccaucugggcugg

SEQ ID NO: 839741 - RNA, 25 nt, Human
uggauguaaaacccagcaguguugu

SEQ ID NO: 839742 - RNA, 21 nt, Human
uggcaaccaauggccaaugcc

SEQ ID NO: 839743 - RNA, 18 nt, Human
uggccaaugccuuucuca

SEQ ID NO: 839744 - RNA, 23 nt, Human
uggcuaggcccagggacucccuc

SEQ ID NO: 839745 - RNA, 21 nt, Human
ugggaagcccagccacaacuc

SEQ ID NO: 839746 - RNA, 22 nt, Human
ugggcuggggcugcagcaaggc

SEQ ID NO: 839747 - RNA, 23 nt, Human
ugggugcagggaaaguaugcugg

SEQ ID NO: 839748 - RNA, 18 nt, Human
uggugagcagaugggugc

SEQ ID NO: 839749 - RNA, 18 nt, Human
uucagaugaaaagucacc

SEQ ID NO: 839750 - RNA, 24 nt, Human
uuucagucuguuaugcaggcugag

SEQ ID NO: 839751 - RNA, 23 nt, Human
aaguaauaguaugucucuagaac

SEQ ID NO: 839752 - RNA, 20 nt, Human
aaucaauguggaaaugaaau

SEQ ID NO: 839753 - RNA, 21 nt, Human
acccuaaaucuauacagcagc

SEQ ID NO: 839754 - RNA, 22 nt, Human
acuuuauacauuaaagaauaau

SEQ ID NO: 839755 - RNA, 18 nt, Human
agcccuguccccgcgcgg

SEQ ID NO: 839756 - RNA, 21 nt, Human
aggcugcucagcagcccuguc

SEQ ID NO: 839757 - RNA, 19 nt, Human
cacaguccuaaaguaauag

SEQ ID NO: 839758 - RNA, 19 nt, Human
cagcagcagcggcggaggc

SEQ ID NO: 839759 - RNA, 21 nt, Human
cagcagcggcggaggcggcgg

SEQ ID NO: 839760 - RNA, 26 nt, Human
cagcccuguccccgcgcggccgaggg

SEQ ID NO: 839761 - RNA, 24 nt, Human
cccacagccgggagaggcggaggc

SEQ ID NO: 839762 - RNA, 25 nt, Human
ccccacagccgggagaggcggaggc

SEQ ID NO: 839763 - RNA, 18 nt, Human
ccccgcgcggccgaggga

SEQ ID NO: 839764 - RNA, 22 nt, Human
ccccgcgcggccgagggagcaa

SEQ ID NO: 839765 - RNA, 18 nt, Human
ccccggcgccggcucugc

SEQ ID NO: 839766 - RNA, 23 nt, Human
ccccucgggaccgguggggauga

SEQ ID NO: 839767 - RNA, 20 nt, Human
cgggccccugggccucgugg

SEQ ID NO: 839768 - RNA, 22 nt, Human
cucgggccccugggccucgugg

SEQ ID NO: 839769 - RNA, 20 nt, Human
cucugcuucggcgggcggcu

SEQ ID NO: 839770 - RNA, 24 nt, Human
cuggcggcagcagcagcggcggag

SEQ ID NO: 839771 - RNA, 24 nt, Human
cuuugugcugggccccacgcggcc

SEQ ID NO: 839772 - RNA, 18 nt, Human
gaggaccccggcgccggc

SEQ ID NO: 839773 - RNA, 21 nt, Human
gaggaccccggcgccggcucu

SEQ ID NO: 839774 - RNA, 23 nt, Human
gcacccuaaaucuauacagcagc

SEQ ID NO: 839775 - RNA, 19 nt, Human
gcagcagcagcggcggagg

SEQ ID NO: 839776 - RNA, 27 nt, Human
gcccccacagccgggagaggcggaggc

SEQ ID NO: 839777 - RNA, 18 nt, Human
gccccuggggacaggucu

SEQ ID NO: 839778 - RNA, 19 nt, Human
gcgggcggcucuaggcugg

SEQ ID NO: 839779 - RNA, 19 nt, Human
ggaggcggcggccccuggg

SEQ ID NO: 839780 - RNA, 18 nt, Human
ggccccugggccucgugg

SEQ ID NO: 839781 - RNA, 28 nt, Human
ggcgacgggcagcagccgccccucggga

SEQ ID NO: 839782 - RNA, 19 nt, Human
gugcugggccccacgcggc

SEQ ID NO: 839783 - RNA, 22 nt, Human
uaacuauacuauuauuaagucc

SEQ ID NO: 839784 - RNA, 18 nt, Human
uacuuuauacauuaaaga

SEQ ID NO: 839785 - RNA, 20 nt, Human
uagucgguccuuuuucuacu

SEQ ID NO: 839786 - RNA, 23 nt, Human
uggcggcagcagcagcggcggag

SEQ ID NO: 839787 - RNA, 24 nt, Human
uuacuuuauacauuaaagaauaau

SEQ ID NO: 839788 - RNA, 23 nt, Human
uucuuaaaaacaaacaauaacua

SEQ ID NO: 839789 - RNA, 21 nt, Human
uuuuuuuuuuuuuuuuccaga

SEQ ID NO: 839790 - RNA, 24 nt, Human
uuuuuuuuuuuuuuuuuuuuccag

SEQ ID NO: 839791 - RNA, 20 nt, Human
aaaaaaaaaaaaaaagacag

SEQ ID NO: 839792 - RNA, 21 nt, Human
aaaaaaaaaaaaaaagacagc

SEQ ID NO: 839793 - RNA, 19 nt, Human
aaaaaaaaaaagacagccc

SEQ ID NO: 839794 - RNA, 23 nt, Human
aaaaaaaagaaguaauaaaaaaa

SEQ ID NO: 839795 - RNA, 23 nt, Human
aaaaaacaacaaaauuuggugcu

SEQ ID NO: 839796 - RNA, 22 nt, Human
aaaaacaacaaaauuuggugcu

SEQ ID NO: 839797 - RNA, 22 nt, Human
aaaaauaaaagagaaacaaggc

SEQ ID NO: 839798 - RNA, 22 nt, Human
aaaagagaaacaaggcagagga

SEQ ID NO: 839799 - RNA, 25 nt, Human
aaacaguaccuggcaccacuccaac

SEQ ID NO: 839800 - RNA, 24 nt, Human
aaaucuggguauugguguuuuuuc

SEQ ID NO: 839801 - RNA, 23 nt, Human
aacaaagaaacucaacagaucca

SEQ ID NO: 839802 - RNA, 26 nt, Human
aacaaagaaacucaacagauccaaga

SEQ ID NO: 839803 - RNA, 20 nt, Human
aacaaggcagaggaagaagg

SEQ ID NO: 839804 - RNA, 18 nt, Human
aagaaaguuuacacuuuu

SEQ ID NO: 839805 - RNA, 23 nt, Human
aagagaucaaaaagcagcagcac

SEQ ID NO: 839806 - RNA, 18 nt, Human
aagcagcagcacaggagg

SEQ ID NO: 839807 - RNA, 23 nt, Human
aauaaacaauaaagccuauacaa

SEQ ID NO: 839808 - RNA, 19 nt, Human
acaaaaaaaggagcccaag

SEQ ID NO: 839809 - RNA, 18 nt, Human
acaaggcagaggaagaag

SEQ ID NO: 839810 - RNA, 18 nt, Human
acaaggcagaggaagaag

SEQ ID NO: 839811 - RNA, 18 nt, Human
acaaggcagaggaagaag

SEQ ID NO: 839812 - RNA, 19 nt, Human
acaaggcagaggaagaagg

SEQ ID NO: 839813 - RNA, 23 nt, Human
agaaaaaaaaaaacaacaaaauu

SEQ ID NO: 839814 - RNA, 18 nt, Human
agacaagaggaaaaugga

SEQ ID NO: 839815 - RNA, 29 nt, Human
agacaagaggaaaauggagaagggacccc

SEQ ID NO: 839816 - RNA, 22 nt, Human
agacaagaugcuacacaaaacc

SEQ ID NO: 839817 - RNA, 24 nt, Human
agagaaacaaggcagaggaagaag

SEQ ID NO: 839818 - RNA, 19 nt, Human
agaugggaucuguggggag

SEQ ID NO: 839819 - RNA, 23 nt, Human
augauagacaagaugcuacacaa

SEQ ID NO: 839820 - RNA, 18 nt, Human
auuuauuuuucgcuuuua

SEQ ID NO: 839821 - RNA, 23 nt, Human
caaauuggucaaagcuucuccag

SEQ ID NO: 839822 - RNA, 21 nt, Human
caacagauccaagaggggaaa

SEQ ID NO: 839823 - RNA, 24 nt, Human
caauaaacaauaaagccuauacaa

SEQ ID NO: 839824 - RNA, 20 nt, Human
cacauuuauuuuucgcuuuu

SEQ ID NO: 839825 - RNA, 20 nt, Human
caccacuccaacaaacaaac

SEQ ID NO: 839826 - RNA, 18 nt, Human
cagcacaggagggaggga

SEQ ID NO: 839827 - RNA, 23 nt, Human
cagcagcagcagcggcggcggca

SEQ ID NO: 839828 - RNA, 23 nt, Human
cagcagcagcggcggcggcaaca

SEQ ID NO: 839829 - RNA, 21 nt, Human
cagcagcggcggcggcaacag

SEQ ID NO: 839830 - RNA, 26 nt, Human
cagcggcagcggcacacacaccggag

SEQ ID NO: 839831 - RNA, 24 nt, Human
ccagcaauaaacaauaaagccuau

SEQ ID NO: 839832 - RNA, 27 nt, Human
ccuaugguuuaaaugaacuccuaagac

SEQ ID NO: 839833 - RNA, 18 nt, Human
ccucuuuccuucuuaacu

SEQ ID NO: 839834 - RNA, 19 nt, Human
ccucuuuccuucuuaacuc

SEQ ID NO: 839835 - RNA, 21 nt, Human
ccuuuuugacccacccaucuc

SEQ ID NO: 839836 - RNA, 26 nt, Human
cgaaaaaauaaaaaauaaaagagaaa

SEQ ID NO: 839837 - RNA, 26 nt, Human
cgacuggaaaagaaagcauuaucugc

SEQ ID NO: 839838 - RNA, 22 nt, Human
cggcaacagcggcagcggcaca

SEQ ID NO: 839839 - RNA, 21 nt, Human
cggcggcaacagcggcagcgg

SEQ ID NO: 839840 - RNA, 23 nt, Human
cggcggcaacagcggcagcggca

SEQ ID NO: 839841 - RNA, 21 nt, Human
cucaaagacgacuggaaaaga

SEQ ID NO: 839842 - RNA, 28 nt, Human
cuccggauaaaaaaauuuuagucgaaga

SEQ ID NO: 839843 - RNA, 20 nt, Human
cuucauauaugggcauguca

SEQ ID NO: 839844 - RNA, 24 nt, Human
gaaaaaaaaagaaguaauaaaaaa

SEQ ID NO: 839845 - RNA, 21 nt, Human
gacaagaggaaaauggagaaa

SEQ ID NO: 839846 - RNA, 21 nt, Human
gacaagaugcuacacaaaacc

SEQ ID NO: 839847 - RNA, 22 nt, Human
gagaaaaaaaaaaacaacaaaa

SEQ ID NO: 839848 - RNA, 23 nt, Human
gaggacagaacagaaccgauuaa

SEQ ID NO: 839849 - RNA, 21 nt, Human
gauaucccuuuuugacccacc

SEQ ID NO: 839850 - RNA, 19 nt, Human
gcagcagcagcggcggcgg

SEQ ID NO: 839851 - RNA, 19 nt, Human
gcggcaacagcggcagcgg

SEQ ID NO: 839852 - RNA, 24 nt, Human
gcggcggcggcaacagcggcagcg

SEQ ID NO: 839853 - RNA, 20 nt, Human
ggagggggguggggguggug

SEQ ID NO: 839854 - RNA, 23 nt, Human
ggcaggguggaaaguugcaaacu

SEQ ID NO: 839855 - RNA, 25 nt, Human
gggcaggguggaaaguugcaaacuu

SEQ ID NO: 839856 - RNA, 18 nt, Human
ggggugggggugguggag

SEQ ID NO: 839857 - RNA, 20 nt, Human
gguugguguaacgacggggc

SEQ ID NO: 839858 - RNA, 18 nt, Human
guaguucgaaaaaaaaag

SEQ ID NO: 839859 - RNA, 24 nt, Human
guguaacgacggggcgagcagcag

SEQ ID NO: 839860 - RNA, 21 nt, Human
uaaagccuauacaacuuguag

SEQ ID NO: 839861 - RNA, 20 nt, Human
uaaggucauaaaccagcaau

SEQ ID NO: 839862 - RNA, 21 nt, Human
uacaaaacaugauagacaaga

SEQ ID NO: 839863 - RNA, 24 nt, Human
uaccuggcaccacuccaacaaaca

SEQ ID NO: 839864 - RNA, 24 nt, Human
uagacaagaugcuacacaaaacca

SEQ ID NO: 839865 - RNA, 23 nt, Human
uccaaaacaguaccuggcaccac

SEQ ID NO: 839866 - RNA, 25 nt, Human
uccaaaacaguaccuggcaccacuc

SEQ ID NO: 839867 - RNA, 20 nt, Human
uccaagaggggaaacaaaga

SEQ ID NO: 839868 - RNA, 25 nt, Human
uccaagaugacugcaguuuuacaaa

SEQ ID NO: 839869 - RNA, 24 nt, Human
uccccauugugaccccuaucacuu

SEQ ID NO: 839870 - RNA, 25 nt, Human
ucuccaaaacaguaccuggcaccac

SEQ ID NO: 839871 - RNA, 23 nt, Human
ucugaagauuuuuuuuccuuuau

SEQ ID NO: 839872 - RNA, 23 nt, Human
ucugcuguaaucaaaaacauacc

SEQ ID NO: 839873 - RNA, 20 nt, Human
ucuuuaaaaaaaaaaaaaaa

SEQ ID NO: 839874 - RNA, 19 nt, Human
ugacccacccaucuccuuc

SEQ ID NO: 839875 - RNA, 18 nt, Human
uggaauggugguuaacag

SEQ ID NO: 839876 - RNA, 20 nt, Human
uggcaccacuccaacaaaca

SEQ ID NO: 839877 - RNA, 21 nt, Human
ugguuaacagaaugauuugag

SEQ ID NO: 839878 - RNA, 22 nt, Human
ugguuguagacaaguucuccaa

SEQ ID NO: 839879 - RNA, 21 nt, Human
uguaaaccugccucacaaaau

SEQ ID NO: 839880 - RNA, 21 nt, Human
uguaaucaaaaacauaccaca

SEQ ID NO: 839881 - RNA, 23 nt, Human
uguagacaaguucuccaaaacag

SEQ ID NO: 839882 - RNA, 24 nt, Human
uguggggaggggagaaaaaaaaaa

SEQ ID NO: 839883 - RNA, 19 nt, Human
uguguuuuaaaagguccaa

SEQ ID NO: 839884 - RNA, 24 nt, Human
uuaugcaccacuucaauuucccca

SEQ ID NO: 839885 - RNA, 23 nt, Human
uucaacaaagaaacucaacagau

SEQ ID NO: 839886 - RNA, 21 nt, Human
uugcaaacuucaugugcuucu

SEQ ID NO: 839887 - RNA, 21 nt, Human
uuggugcuuaaaaaaaaguaa

SEQ ID NO: 839888 - RNA, 22 nt, Human
uuguaaaccugccucacaaaau

SEQ ID NO: 839889 - RNA, 20 nt, Human
uuuaaaaaaaaaaaaaaaga

SEQ ID NO: 839890 - RNA, 24 nt, Human
uuuauacaauagucacaguuaaaa

SEQ ID NO: 839891 - RNA, 28 nt, Human
uuucuuuuuuccucuuuccuucuuaacu

SEQ ID NO: 839892 - RNA, 24 nt, Human
uuugauaucccuuuuugacccacc

SEQ ID NO: 839893 - RNA, 18 nt, Human
uuuuuucuuuuuuccucu

SEQ ID NO: 839894 - RNA, 21 nt, Human
aaagauccuucccaucgaacc

SEQ ID NO: 839895 - RNA, 23 nt, Human
aaccucgcagcacuucccuuugg

SEQ ID NO: 839896 - RNA, 22 nt, Human
acauaugagcccgaggacaccu

SEQ ID NO: 839897 - RNA, 20 nt, Human
agagaagugaaaggguuucc

SEQ ID NO: 839898 - RNA, 21 nt, Human
agauggccaaaguccuggagc

SEQ ID NO: 839899 - RNA, 22 nt, Human
agcccgaggacaccucgggagc

SEQ ID NO: 839900 - RNA, 24 nt, Human
agcuuuauagauggccaaaguccu

SEQ ID NO: 839901 - RNA, 21 nt, Human
cagggaacuccucagagaucc

SEQ ID NO: 839902 - RNA, 21 nt, Human
cccacauaugagcccgaggac

SEQ ID NO: 839903 - RNA, 27 nt, Human
ccucaagaggaaccacuuggagaaaga

SEQ ID NO: 839904 - RNA, 24 nt, Human
cucaagaggaaccacuuggagaaa

SEQ ID NO: 839905 - RNA, 25 nt, Human
cuccagaggcugcucaguugucccc

SEQ ID NO: 839906 - RNA, 23 nt, Human
cuggagccagcagaaaugcuccc

SEQ ID NO: 839907 - RNA, 22 nt, Human
gagaaagauccuucccaucgaa

SEQ ID NO: 839908 - RNA, 25 nt, Human
ggaacuccucagagauccucugccu

SEQ ID NO: 839909 - RNA, 19 nt, Human
ucagagauccucugccuuc

SEQ ID NO: 839910 - RNA, 22 nt, Human
ucagagauccucugccuuccca

SEQ ID NO: 839911 - RNA, 21 nt, Human
ucccaucgaaccacugcagcu

SEQ ID NO: 839912 - RNA, 20 nt, Human
ucuccagaggcugcucaguu

SEQ ID NO: 839913 - RNA, 22 nt, Human
ucuccagaggcugcucaguugu

SEQ ID NO: 839914 - RNA, 23 nt, Human
ucuccagaggcugcucaguuguc

SEQ ID NO: 839915 - RNA, 24 nt, Human
ugagcuuuauuaauggccccucuc

SEQ ID NO: 839916 - RNA, 18 nt, Human
uuuucuuuuuuuuuuuug

SEQ ID NO: 839917 - RNA, 19 nt, Human
uuuuucuuuuuuuuuuuug

SEQ ID NO: 839918 - RNA, 25 nt, Human
uuuuucuuuuuuuuuuuugauguug

SEQ ID NO: 839919 - RNA, 23 nt, Human
uuuuuuuuuuuuuuuuucuuuuu

SEQ ID NO: 839920 - RNA, 23 nt, Human
aaguacagaggccgggaagagcc

SEQ ID NO: 839921 - RNA, 23 nt, Human
acucagccagagcaggcgacacc

SEQ ID NO: 839922 - RNA, 19 nt, Human
acuggguuuggcaaggaga

SEQ ID NO: 839923 - RNA, 20 nt, Human
agacuggguuuggcaaggag

SEQ ID NO: 839924 - RNA, 21 nt, Human
agagcaggcgacaccuuccac

SEQ ID NO: 839925 - RNA, 18 nt, Human
agcccacagcagaaccug

SEQ ID NO: 839926 - RNA, 25 nt, Human
agcccggggaugcgccgcucgggcu

SEQ ID NO: 839927 - RNA, 26 nt, Human
agcggcacugcuccgcgcccggcaca

SEQ ID NO: 839928 - RNA, 18 nt, Human
aggaagggagggaaggga

SEQ ID NO: 839929 - RNA, 26 nt, Human
aggagaagggggaaucucugggcagg

SEQ ID NO: 839930 - RNA, 26 nt, Human
aggagaagggggaaucucugggcagg

SEQ ID NO: 839931 - RNA, 22 nt, Human
aggcgaaauacucugugcaacc

SEQ ID NO: 839932 - RNA, 22 nt, Human
aggcgaaauacucugugcaacc

SEQ ID NO: 839933 - RNA, 23 nt, Human
agugaaaaguagcuaagcagccc

SEQ ID NO: 839934 - RNA, 22 nt, Human
aucgcugcagucucgcccaggu

SEQ ID NO: 839935 - RNA, 22 nt, Human
aucgcugcagucucgcccaggu

SEQ ID NO: 839936 - RNA, 20 nt, Human
caaagccccgcuggcuucuc

SEQ ID NO: 839937 - RNA, 22 nt, Human
caacagggacaaagccccgcug

SEQ ID NO: 839938 - RNA, 19 nt, Human
caaccgaaaccaccacuag

SEQ ID NO: 839939 - RNA, 21 nt, Human
caaggugucccaaggugggcc

SEQ ID NO: 839940 - RNA, 19 nt, Human
cacccccccgacccccggc

SEQ ID NO: 839941 - RNA, 18 nt, Human
cagaaccugucaggcagc

SEQ ID NO: 839942 - RNA, 20 nt, Human
cagagagacuggguuuggca

SEQ ID NO: 839943 - RNA, 20 nt, Human
cagagcaggcgacaccuucc

SEQ ID NO: 839944 - RNA, 18 nt, Human
cagcagaaccugucaggc

SEQ ID NO: 839945 - RNA, 19 nt, Human
cagcagagcccacagcaga

SEQ ID NO: 839946 - RNA, 22 nt, Human
cagcagggagacacaccaaucc

SEQ ID NO: 839947 - RNA, 19 nt, Human
cagccacccuuacucagcc

SEQ ID NO: 839948 - RNA, 23 nt, Human
caggggagacacaccaauccauc

SEQ ID NO: 839949 - RNA, 21 nt, Human
ccagccacccuuacucagcca

SEQ ID NO: 839950 - RNA, 18 nt, Human
ccauucagcagagcccac

SEQ ID NO: 839951 - RNA, 21 nt, Human
cccacagcagaaccugucagg

SEQ ID NO: 839952 - RNA, 22 nt, Human
cccacagcagaaccugucaggc

SEQ ID NO: 839953 - RNA, 21 nt, Human
cccauccacccuccccuuccu

SEQ ID NO: 839954 - RNA, 21 nt, Human
cccauccacccuccccuuccu

SEQ ID NO: 839955 - RNA, 21 nt, Human
ccccauccacccuccccuucc

SEQ ID NO: 839956 - RNA, 21 nt, Human
ccccauccacccuccccuucc

SEQ ID NO: 839957 - RNA, 18 nt, Human
ccccccauccacccuccc

SEQ ID NO: 839958 - RNA, 18 nt, Human
ccccccauccacccuccc

SEQ ID NO: 839959 - RNA, 22 nt, Human
ccccccgccgcccccgcuccug

SEQ ID NO: 839960 - RNA, 23 nt, Human
ccccccgccgcccccgcuccugg

SEQ ID NO: 839961 - RNA, 19 nt, Human
cccccgccgcccccgcucc

SEQ ID NO: 839962 - RNA, 21 nt, Human
cccccgccgcccccgcuccug

SEQ ID NO: 839963 - RNA, 22 nt, Human
cccccgccgcccccgcuccugg

SEQ ID NO: 839964 - RNA, 22 nt, Human
cccccggcugggcugugccgcc

SEQ ID NO: 839965 - RNA, 28 nt, Human
ccccgccgcccccgcuccuggcagccug

SEQ ID NO: 839966 - RNA, 23 nt, Human
ccccggcugggcugugccgccuu

SEQ ID NO: 839967 - RNA, 18 nt, Human
cccgacccccggcugggc

SEQ ID NO: 839968 - RNA, 25 nt, Human
cccgcccccgccgcccccgcuccug

SEQ ID NO: 839969 - RNA, 21 nt, Human
cccggccgggcggggcuucuc

SEQ ID NO: 839970 - RNA, 18 nt, Human
cccugcccccccauccac

SEQ ID NO: 839971 - RNA, 19 nt, Human
cccugcccccccauccacc

SEQ ID NO: 839972 - RNA, 23 nt, Human
cccugcccccccauccacccucc

SEQ ID NO: 839973 - RNA, 23 nt, Human
cccugcccccccauccacccucc

SEQ ID NO: 839974 - RNA, 27 nt, Human
cccugcccccccauccacccuccccuu

SEQ ID NO: 839975 - RNA, 27 nt, Human
cccugcccccccauccacccuccccuu

SEQ ID NO: 839976 - RNA, 23 nt, Human
ccgcagccggccgccugccucgg

SEQ ID NO: 839977 - RNA, 23 nt, Human
ccgcccccgccgcccccgcuccu

SEQ ID NO: 839978 - RNA, 18 nt, Human
ccgccgcagccggccgcc

SEQ ID NO: 839979 - RNA, 19 nt, Human
ccgccgcagccggccgccu

SEQ ID NO: 839980 - RNA, 21 nt, Human
ccgccgccggaccugcugcuc

SEQ ID NO: 839981 - RNA, 22 nt, Human
ccgccgccggaccugcugcucc

SEQ ID NO: 839982 - RNA, 23 nt, Human
ccgccggaccugcugcucccaac

SEQ ID NO: 839983 - RNA, 21 nt, Human
ccuagggcgggggcugccggc

SEQ ID NO: 839984 - RNA, 18 nt, Human
ccugcccccccauccacc

SEQ ID NO: 839985 - RNA, 23 nt, Human
ccuuucggccgggccgcgccgcu

SEQ ID NO: 839986 - RNA, 21 nt, Human
cgcaaccgaaaccaccacuag

SEQ ID NO: 839987 - RNA, 24 nt, Human
cgcagccggccgccugccucgcuc

SEQ ID NO: 839988 - RNA, 19 nt, Human
cgccccccgccgcccccgc

SEQ ID NO: 839989 - RNA, 21 nt, Human
cgcccccgcuccuggcagccu

SEQ ID NO: 839990 - RNA, 22 nt, Human
cgcccccgcuccuggcagccug

SEQ ID NO: 839991 - RNA, 19 nt, Human
cggcuccgagcggcuccgg

SEQ ID NO: 839992 - RNA, 20 nt, Human
cggcuccggaccgcaccccc

SEQ ID NO: 839993 - RNA, 18 nt, Human
cggcugggcugugccgcc

SEQ ID NO: 839994 - RNA, 19 nt, Human
cggcugggcugugccgccu

SEQ ID NO: 839995 - RNA, 19 nt, Human
cggggaggccgggcagccg

SEQ ID NO: 839996 - RNA, 19 nt, Human
cgggggugcggggaggccg

SEQ ID NO: 839997 - RNA, 21 nt, Human
cguccagcuggcccgcccccc

SEQ ID NO: 839998 - RNA, 19 nt, Human
cuaagcagccaggccgagc

SEQ ID NO: 839999 - RNA, 18 nt, Human
cucucugccgccgcagcc

SEQ ID NO: 840000 - RNA, 22 nt, Human
cugccucgcuccuccccugccc

SEQ ID NO: 840001 - RNA, 18 nt, Human
gaagggagggaagggaag

SEQ ID NO: 840002 - RNA, 21 nt, Human
gacuuacugcugggcuuggag

SEQ ID NO: 840003 - RNA, 20 nt, Human
gagaagcuuggaggaaggga

SEQ ID NO: 840004 - RNA, 21 nt, Human
gagaagcuuggaggaagggag

SEQ ID NO: 840005 - RNA, 21 nt, Human
gagcccugcccccccauccac

SEQ ID NO: 840006 - RNA, 20 nt, Human
gaggaagggagggaagggaa

SEQ ID NO: 840007 - RNA, 20 nt, Human
gagggcaaaguacagaggcc

SEQ ID NO: 840008 - RNA, 24 nt, Human
gcccacagcagaaccugucaggac

SEQ ID NO: 840009 - RNA, 18 nt, Human
gcccccccauccacccuc

SEQ ID NO: 840010 - RNA, 18 nt, Human
gcccccccauccacccuc

SEQ ID NO: 840011 - RNA, 18 nt, Human
gccgccgcagccggccgc

SEQ ID NO: 840012 - RNA, 20 nt, Human
gccucgcuccuccccugccc

SEQ ID NO: 840013 - RNA, 21 nt, Human
gccucgcuccuccccugcccu

SEQ ID NO: 840014 - RNA, 20 nt, Human
gcgaaauacucugugcaacc

SEQ ID NO: 840015 - RNA, 20 nt, Human
gcgaaauacucugugcaacc

SEQ ID NO: 840016 - RNA, 20 nt, Human
gcgcggagcccggccgggcg

SEQ ID NO: 840017 - RNA, 20 nt, Human
gcugugccgccuuucggccg

SEQ ID NO: 840018 - RNA, 25 nt, Human
ggaaccuggacggugucgcaaccga

SEQ ID NO: 840019 - RNA, 19 nt, Human
ggaagagccaggccuaggg

SEQ ID NO: 840020 - RNA, 18 nt, Human
ggcaaaguacagaggccg

SEQ ID NO: 840021 - RNA, 20 nt, Human
ggcaaggagagcaacaggga

SEQ ID NO: 840022 - RNA, 19 nt, Human
ggccgggaagagccaggcc

SEQ ID NO: 840023 - RNA, 18 nt, Human
ggcgcagcggccggcagc

SEQ ID NO: 840024 - RNA, 20 nt, Human
gggaagagccaggccuaggg

SEQ ID NO: 840025 - RNA, 19 nt, Human
gggccagggaggggagaag

SEQ ID NO: 840026 - RNA, 19 nt, Human
gggccagggaggggagaag

SEQ ID NO: 840027 - RNA, 20 nt, Human
gggccagggaggggagaagu

SEQ ID NO: 840028 - RNA, 20 nt, Human
gggccagggaggggagaagu

SEQ ID NO: 840029 - RNA, 22 nt, Human
gggcugugccgccuuucggccg

SEQ ID NO: 840030 - RNA, 18 nt, Human
gugggagaaaacugagaa

SEQ ID NO: 840031 - RNA, 18 nt, Human
gugggagaaaacugagaa

SEQ ID NO: 840032 - RNA, 21 nt, Human
uaccagcgacuuccauucagc

SEQ ID NO: 840033 - RNA, 19 nt, Human
uccaccaccuccucaguga

SEQ ID NO: 840034 - RNA, 19 nt, Human
uccgcgcccggcacacagg

SEQ ID NO: 840035 - RNA, 19 nt, Human
ucgcaaccgaaaccaccac

SEQ ID NO: 840036 - RNA, 24 nt, Human
ucucugggcaggggugaauguggg

SEQ ID NO: 840037 - RNA, 24 nt, Human
ucucugggcaggggugaauguggg

SEQ ID NO: 840038 - RNA, 18 nt, Human
ugagaagggccagggagg

SEQ ID NO: 840039 - RNA, 18 nt, Human
ugagaagggccagggagg

SEQ ID NO: 840040 - RNA, 21 nt, Human
ugagaagggccagggagggga

SEQ ID NO: 840041 - RNA, 21 nt, Human
ugagaagggccagggagggga

SEQ ID NO: 840042 - RNA, 23 nt, Human
ugccucgcuccuccccugcccuc

SEQ ID NO: 840043 - RNA, 24 nt, Human
ugccucgcuccuccccugcccuca

SEQ ID NO: 840044 - RNA, 26 nt, Human
ugccucgcuccuccccugcccucagc

SEQ ID NO: 840045 - RNA, 26 nt, Human
uggaggaagggagggaagggaaggcg

SEQ ID NO: 840046 - RNA, 25 nt, Human
uggguuuggcaaggagagcaacagg

SEQ ID NO: 840047 - RNA, 21 nt, Human
ugucgcaaccgaaaccaccac

SEQ ID NO: 840048 - RNA, 20 nt, Human
uuccuuugccuccaguaggg

SEQ ID NO: 840049 - RNA, 20 nt, Human
uuccuuugccuccaguaggg

SEQ ID NO: 840050 - RNA, 21 nt, Human
uucuugguuuaggcgaaauac

SEQ ID NO: 840051 - RNA, 21 nt, Human
uucuugguuuaggcgaaauac

SEQ ID NO: 840052 - RNA, 18 nt, Human
uuucuugguuuaggcgaa

SEQ ID NO: 840053 - RNA, 18 nt, Human
uuucuugguuuaggcgaa

SEQ ID NO: 840054 - RNA, 20 nt, Human
aagcggcggcggagggaggc

SEQ ID NO: 840055 - RNA, 18 nt, Human
agagggggcagggcgggg

SEQ ID NO: 840056 - RNA, 18 nt, Human
agccggcccaagcggcgg

SEQ ID NO: 840057 - RNA, 23 nt, Human
agggcgggggaggggaagggacg

SEQ ID NO: 840058 - RNA, 25 nt, Human
agggcgggggaggggaagggacgcc

SEQ ID NO: 840059 - RNA, 22 nt, Human
caggggcggccggguggggggg

SEQ ID NO: 840060 - RNA, 20 nt, Human
ccccccgccggccuggggac

SEQ ID NO: 840061 - RNA, 19 nt, Human
ccccucucuuccccucccc

SEQ ID NO: 840062 - RNA, 27 nt, Human
ccccucucuuccccuccccccccgccg

SEQ ID NO: 840063 - RNA, 23 nt, Human
cgcggagccggcccaagcggcgg

SEQ ID NO: 840064 - RNA, 19 nt, Human
cgugcagcggggaccccgg

SEQ ID NO: 840065 - RNA, 20 nt, Human
gcaggggcggccgggugggg

SEQ ID NO: 840066 - RNA, 20 nt, Human
gccgcggagggggcgcggag

SEQ ID NO: 840067 - RNA, 21 nt, Human
gcgcggcgggagagggggcag

SEQ ID NO: 840068 - RNA, 18 nt, Human
ggcaggcgggcgggcggg

SEQ ID NO: 840069 - RNA, 20 nt, Human
ggcaggggcggccggguggg

SEQ ID NO: 840070 - RNA, 23 nt, Human
ggccggguggggggggcgggggu

SEQ ID NO: 840071 - RNA, 19 nt, Human
ggccuggggacgcgagcuc

SEQ ID NO: 840072 - RNA, 21 nt, Human
ggcggccggguggggggggcg

SEQ ID NO: 840073 - RNA, 18 nt, Human
gggcagggcgggggaggg

SEQ ID NO: 840074 - RNA, 22 nt, Human
gggcaggggcggccgggugggg

SEQ ID NO: 840075 - RNA, 26 nt, Human
gggcggcgggcaggcgggcgggcggg

SEQ ID NO: 840076 - RNA, 19 nt, Human
gggcgggggaggggaaggg

SEQ ID NO: 840077 - RNA, 20 nt, Human
ggggcagggcgggggagggg

SEQ ID NO: 840078 - RNA, 19 nt, Human
ggggcggccgggugggggg

SEQ ID NO: 840079 - RNA, 18 nt, Human
ggguggggggggcggggg

SEQ ID NO: 840080 - RNA, 18 nt, Human
ucccaggguccccucucu

SEQ ID NO: 840081 - RNA, 24 nt, Human
ucccaggguccccucucuuccccu

SEQ ID NO: 840082 - RNA, 20 nt, Human
uccccccccgccggccuggg

SEQ ID NO: 840083 - RNA, 23 nt, Human
ucuuccccuccccccccgccggc

SEQ ID NO: 840084 - RNA, 19 nt, Human
uggggacgcgagcucaaaa

SEQ ID NO: 840085 - RNA, 18 nt, Human
aaacaauuucuacauaua

SEQ ID NO: 840086 - RNA, 19 nt, Human
aacuggaaaaggcggccgc

SEQ ID NO: 840087 - RNA, 21 nt, Human
aagcagaaggaaauaccuugg

SEQ ID NO: 840088 - RNA, 20 nt, Human
aauuuuguucuuuugaagca

SEQ ID NO: 840089 - RNA, 22 nt, Human
acagggacaacucuggggaaca

SEQ ID NO: 840090 - RNA, 26 nt, Human
acauacuugcauacauauguguacau

SEQ ID NO: 840091 - RNA, 23 nt, Human
accucagugcaccuuuuucacug

SEQ ID NO: 840092 - RNA, 18 nt, Human
acuacacuuugcccucac

SEQ ID NO: 840093 - RNA, 22 nt, Human
agugaguuuucuuucccaauuu

SEQ ID NO: 840094 - RNA, 24 nt, Human
auaauuucucaaaacuagcuuucc

SEQ ID NO: 840095 - RNA, 20 nt, Human
caacaugaaauuaacaugac

SEQ ID NO: 840096 - RNA, 23 nt, Human
caauuucuucuaccaacuacacu

SEQ ID NO: 840097 - RNA, 20 nt, Human
caccuggaacuggaaaaggc

SEQ ID NO: 840098 - RNA, 26 nt, Human
cacuucugcacaccuggaacuggaaa

SEQ ID NO: 840099 - RNA, 20 nt, Human
cccgcgcgaucucggagcca

SEQ ID NO: 840100 - RNA, 22 nt, Human
ccggcggccccgcgcgaucucg

SEQ ID NO: 840101 - RNA, 22 nt, Human
cuagacacuacagggacaacuc

SEQ ID NO: 840102 - RNA, 20 nt, Human
cuuccggcggccccgcgcga

SEQ ID NO: 840103 - RNA, 20 nt, Human
gacacuucugcacaccugga

SEQ ID NO: 840104 - RNA, 19 nt, Human
gcggagggcggcgccggcu

SEQ ID NO: 840105 - RNA, 22 nt, Human
gcggagggcggcgccggcugcg

SEQ ID NO: 840106 - RNA, 20 nt, Human
gcggcgccggcugcggcugc

SEQ ID NO: 840107 - RNA, 18 nt, Human
gggcaaugaauuauucau

SEQ ID NO: 840108 - RNA, 21 nt, Human
uaaacauagcacauuagauag

SEQ ID NO: 840109 - RNA, 18 nt, Human
uaccucagugcaccuuuu

SEQ ID NO: 840110 - RNA, 20 nt, Human
uacuugcauacauaugugua

SEQ ID NO: 840111 - RNA, 19 nt, Human
uaguaaauagcaauuaacg

SEQ ID NO: 840112 - RNA, 24 nt, Human
uauauacauacuugcauacauaug

SEQ ID NO: 840113 - RNA, 29 nt, Human
uauauacauacuugcauacauauguguag

SEQ ID NO: 840114 - RNA, 24 nt, Human
ucacauccauuccagaggaaaauc

SEQ ID NO: 840115 - RNA, 21 nt, Human
ucuaccaacuacacuuugccc

SEQ ID NO: 840116 - RNA, 21 nt, Human
ucuugggcuuccggcggcccc

SEQ ID NO: 840117 - RNA, 19 nt, Human
ucuuucccaauuuuguucu

SEQ ID NO: 840118 - RNA, 23 nt, Human
ugcuugcugugggugccacaaug

SEQ ID NO: 840119 - RNA, 19 nt, Human
uggggagggcggagggcgg

SEQ ID NO: 840120 - RNA, 21 nt, Human
uguuaccucagugcaccuuuu

SEQ ID NO: 840121 - RNA, 19 nt, Human
uguuauggacugauuucag

SEQ ID NO: 840122 - RNA, 23 nt, Human
uguuugaucaagacucaagugag

SEQ ID NO: 840123 - RNA, 22 nt, Human
uucuaccaacuacacuuugccc

SEQ ID NO: 840124 - RNA, 23 nt, Human
uugcauacauauguguacauuac

SEQ ID NO: 840125 - RNA, 18 nt, Human
uuggggagggcggagggc

SEQ ID NO: 840126 - RNA, 20 nt, Human
uuucucaaaacuagcuuucc

SEQ ID NO: 840127 - RNA, 22 nt, Human
uuugaagcagaaggaaauaccu

SEQ ID NO: 840128 - RNA, 24 nt, Human
uuuguguucacugaacugagacuu

SEQ ID NO: 840129 - RNA, 25 nt, Human
uuuugaagcagaaggaaauaccuug

SEQ ID NO: 840130 - RNA, 19 nt, Human
aaaagcucaucuggaacca

SEQ ID NO: 840131 - RNA, 26 nt, Human
accaaugccaaaucccgaugcuuuug

SEQ ID NO: 840132 - RNA, 21 nt, Human
accaccacccgcggccaccau

SEQ ID NO: 840133 - RNA, 18 nt, Human
caaccaccacccgcggcc

SEQ ID NO: 840134 - RNA, 19 nt, Human
cacccgcggccaccauggc

SEQ ID NO: 840135 - RNA, 20 nt, Human
cacccgcggccaccauggcc

SEQ ID NO: 840136 - RNA, 19 nt, Human
caccgaccccagcccgcgg

SEQ ID NO: 840137 - RNA, 18 nt, Human
cagcccgcggcgccuucg

SEQ ID NO: 840138 - RNA, 25 nt, Human
cagcgcagccgcgccaaccccuugg

SEQ ID NO: 840139 - RNA, 22 nt, Human
ccagcacacguugggcaggcca

SEQ ID NO: 840140 - RNA, 19 nt, Human
ccagcccgcggcgccuucg

SEQ ID NO: 840141 - RNA, 19 nt, Human
cccccugguucuuggcccc

SEQ ID NO: 840142 - RNA, 24 nt, Human
ccccgggccgcagcgcagccgcgc

SEQ ID NO: 840143 - RNA, 23 nt, Human
ccccugguucuuggccccuccug

SEQ ID NO: 840144 - RNA, 23 nt, Human
cccuaagccaccgaccccagccc

SEQ ID NO: 840145 - RNA, 20 nt, Human
cccugguucuuggccccucc

SEQ ID NO: 840146 - RNA, 24 nt, Human
ccuaagccaccgaccccagcccgc

SEQ ID NO: 840147 - RNA, 18 nt, Human
ccuaagccaccgaccccg

SEQ ID NO: 840148 - RNA, 23 nt, Human
ccugaggcugggcucaggguacc

SEQ ID NO: 840149 - RNA, 19 nt, Human
cgcacugccccgggccgca

SEQ ID NO: 840150 - RNA, 24 nt, Human
cgcagccgcgccaaccaccacccg

SEQ ID NO: 840151 - RNA, 19 nt, Human
gccucgccuucucccaccc

SEQ ID NO: 840152 - RNA, 22 nt, Human
gccucgccuucucccacccagc

SEQ ID NO: 840153 - RNA, 19 nt, Human
gcgaccuccucugcgcucc

SEQ ID NO: 840154 - RNA, 21 nt, Human
gcggcgccuucgagccuucug

SEQ ID NO: 840155 - RNA, 19 nt, Human
gcugccgccucgccuucuc

SEQ ID NO: 840156 - RNA, 21 nt, Human
ggcaggccacccgccgccggc

SEQ ID NO: 840157 - RNA, 24 nt, Human
gggcaggccacccgccgccggcuc

SEQ ID NO: 840158 - RNA, 19 nt, Human
ggugagggggcagccucgg

SEQ ID NO: 840159 - RNA, 22 nt, Human
guuugcuuuaaaagcucaucug

SEQ ID NO: 840160 - RNA, 23 nt, Human
uaaaagcucaucuggaaccaaug

SEQ ID NO: 840161 - RNA, 19 nt, Human
ucccggcuccgcacugccc

SEQ ID NO: 840162 - RNA, 20 nt, Human
ucccuaagccaccgacccca

SEQ ID NO: 840163 - RNA, 24 nt, Human
ucccuaagccaccgaccccagccc

SEQ ID NO: 840164 - RNA, 21 nt, Human
uccggcgccgcgaccuccucu

SEQ ID NO: 840165 - RNA, 22 nt, Human
ucugcagcuggggcccgcgggc

SEQ ID NO: 840166 - RNA, 18 nt, Human
ugaugcucagggcuggau

SEQ ID NO: 840167 - RNA, 18 nt, Human
ugauggcccccugguucu

SEQ ID NO: 840168 - RNA, 18 nt, Human
ugcaagaaauggcaaaca

SEQ ID NO: 840169 - RNA, 20 nt, Human
ugcaagaaauggcaaacaac

SEQ ID NO: 840170 - RNA, 22 nt, Human
ugcaagaaauggcaaacaacug

SEQ ID NO: 840171 - RNA, 22 nt, Human
ugccaaaucccgaugcuuuuga

SEQ ID NO: 840172 - RNA, 21 nt, Human
ugccccgggccgcagcgcagc

SEQ ID NO: 840173 - RNA, 22 nt, Human
uggaaccaaugccaaaucccga

SEQ ID NO: 840174 - RNA, 23 nt, Human
uggcccccugguucuuggccccu

SEQ ID NO: 840175 - RNA, 22 nt, Human
ugggugaugcucagggcuggau

SEQ ID NO: 840176 - RNA, 22 nt, Human
uuaaaagcucaucuggaaccaa

SEQ ID NO: 840177 - RNA, 18 nt, Human
uucugggugagggggcag

SEQ ID NO: 840178 - RNA, 20 nt, Human
uuggccccuccugaggcugg

SEQ ID NO: 840179 - RNA, 24 nt, Human
aaaaaagaaguaaauacaagaaaa

SEQ ID NO: 840180 - RNA, 22 nt, Human
aaaaagaaaaauuacugcaaac

SEQ ID NO: 840181 - RNA, 23 nt, Human
aaaagcaggaggcaucaagcugu

SEQ ID NO: 840182 - RNA, 21 nt, Human
aaaaggacaguuauauauuua

SEQ ID NO: 840183 - RNA, 18 nt, Human
aaacuccaaguuuagcca

SEQ ID NO: 840184 - RNA, 25 nt, Human
aaauaaucaacaugaaauggucaac

SEQ ID NO: 840185 - RNA, 20 nt, Human
aagaaguaaauacaagaaaa

SEQ ID NO: 840186 - RNA, 21 nt, Human
accuccuccaacccaggaucg

SEQ ID NO: 840187 - RNA, 25 nt, Human
acuccaaguuuagccaggacaaacc

SEQ ID NO: 840188 - RNA, 18 nt, Human
agaaaaaaaauacaugua

SEQ ID NO: 840189 - RNA, 20 nt, Human
agaaaaaaaauacauguaca

SEQ ID NO: 840190 - RNA, 20 nt, Human
agagcaucauuuaccugaaa

SEQ ID NO: 840191 - RNA, 22 nt, Human
agcuucaaaaauccugaaaaua

SEQ ID NO: 840192 - RNA, 23 nt, Human
auaaugauaaaaagaaaaauuac

SEQ ID NO: 840193 - RNA, 20 nt, Human
auguugaaauaucucaagca

SEQ ID NO: 840194 - RNA, 22 nt, Human
caaaaauaaaguuccuuucuuc

SEQ ID NO: 840195 - RNA, 19 nt, Human
caacccaggaucgacgcgg

SEQ ID NO: 840196 - RNA, 21 nt, Human
cacgcucuuucaagugcuccc

SEQ ID NO: 840197 - RNA, 19 nt, Human
cacuuagcggcaacauggg

SEQ ID NO: 840198 - RNA, 25 nt, Human
cagcagaucugcuucauccugaccc

SEQ ID NO: 840199 - RNA, 24 nt, Human
cagcuucaaaaauccugaaaauau

SEQ ID NO: 840200 - RNA, 19 nt, Human
cauaaacugcuauaaaagc

SEQ ID NO: 840201 - RNA, 22 nt, Human
caucugaaaagucuacagcaga

SEQ ID NO: 840202 - RNA, 22 nt, Human
cauuacaugccagcaguacaua

SEQ ID NO: 840203 - RNA, 18 nt, Human
ccaggacaaacauaauga

SEQ ID NO: 840204 - RNA, 23 nt, Human
ccucagcggccgccaccuccucc

SEQ ID NO: 840205 - RNA, 23 nt, Human
cuccaaguuuagccaggacaaac

SEQ ID NO: 840206 - RNA, 24 nt, Human
cuccccauaaacugcuauaaaagc

SEQ ID NO: 840207 - RNA, 20 nt, Human
cuuacauuuaaaaaaaagaa

SEQ ID NO: 840208 - RNA, 24 nt, Human
cuucacgccgcagccucagcggcc

SEQ ID NO: 840209 - RNA, 18 nt, Human
cuugcaaaaauaaaguuc

SEQ ID NO: 840210 - RNA, 24 nt, Human
gagucacaauuaaaguacucauac

SEQ ID NO: 840211 - RNA, 25 nt, Human
gcaacaaaagaacaauuaguuuaga

SEQ ID NO: 840212 - RNA, 19 nt, Human
gcccgccgucuucacgccg

SEQ ID NO: 840213 - RNA, 19 nt, Human
gccuagaaaaaaaauacau

SEQ ID NO: 840214 - RNA, 21 nt, Human
uaaaaagggccacauacuaua

SEQ ID NO: 840215 - RNA, 25 nt, Human
uaaauacaagaaaacuaagcauuac

SEQ ID NO: 840216 - RNA, 18 nt, Human
uagccaggacaaacauaa

SEQ ID NO: 840217 - RNA, 21 nt, Human
ucagcggccgccaccuccucc

SEQ ID NO: 840218 - RNA, 22 nt, Human
ucaggcaaagcaaauaaugaac

SEQ ID NO: 840219 - RNA, 25 nt, Human
uccacacaauuuaaaauaaucaaca

SEQ ID NO: 840220 - RNA, 21 nt, Human
ugaaauaucucaagcauaaaa

SEQ ID NO: 840221 - RNA, 22 nt, Human
ugaguauaaccacacauaugaa

SEQ ID NO: 840222 - RNA, 23 nt, Human
uucaagugcuccccauaaacugc

SEQ ID NO: 840223 - RNA, 23 nt, Human
uucauuuaaaaaaaaaaagaacc

SEQ ID NO: 840224 - RNA, 22 nt, Human
uuuagccaggacaaacauaaug

SEQ ID NO: 840225 - RNA, 24 nt, Human
uuuuuuuuuuuuuuuuuuaauuuu

SEQ ID NO: 840226 - RNA, 25 nt, Human
aaaaagaaagcucaaacuagaaagc

SEQ ID NO: 840227 - RNA, 26 nt, Human
aaaauacauugacuacuagaauacga

SEQ ID NO: 840228 - RNA, 21 nt, Human
aaacaacagcaugacauuaac

SEQ ID NO: 840229 - RNA, 24 nt, Human
aaaugaaagucugcaaggcucaga

SEQ ID NO: 840230 - RNA, 22 nt, Human
aaauuacaaaaucuaaagccaa

SEQ ID NO: 840231 - RNA, 19 nt, Human
aacacuuaacacaugaaca

SEQ ID NO: 840232 - RNA, 19 nt, Human
aacagcaugacauuaacag

SEQ ID NO: 840233 - RNA, 19 nt, Human
aagcaguaagaucucaaaa

SEQ ID NO: 840234 - RNA, 18 nt, Human
aaggaucaauaaggacug

SEQ ID NO: 840235 - RNA, 24 nt, Human
aaggucacaugugcagguacauga

SEQ ID NO: 840236 - RNA, 20 nt, Human
aaugguaacgccaagaaaaa

SEQ ID NO: 840237 - RNA, 23 nt, Human
acucuuagggaaagggagaggga

SEQ ID NO: 840238 - RNA, 21 nt, Human
acuguuuuaaaaaugcagaaa

SEQ ID NO: 840239 - RNA, 21 nt, Human
agauauaagcaguauauaacc

SEQ ID NO: 840240 - RNA, 22 nt, Human
aggaucaauaaggacugcagaa

SEQ ID NO: 840241 - RNA, 24 nt, Human
augcaaccaaaacggguucaaacu

SEQ ID NO: 840242 - RNA, 21 nt, Human
auucugauaaaacaaaaacua

SEQ ID NO: 840243 - RNA, 22 nt, Human
caacagcaugacauuaacagaa

SEQ ID NO: 840244 - RNA, 22 nt, Human
caaguaaacacaaauuauacaa

SEQ ID NO: 840245 - RNA, 22 nt, Human
caauugccaaucucacguuaau

SEQ ID NO: 840246 - RNA, 19 nt, Human
cacuaaaacaaaagaguac

SEQ ID NO: 840247 - RNA, 21 nt, Human
cagaaaguuacaaguaaacac

SEQ ID NO: 840248 - RNA, 18 nt, Human
caugacauuaacagaaaa

SEQ ID NO: 840249 - RNA, 27 nt, Human
ccagcagacaacucuuagggaaaggga

SEQ ID NO: 840250 - RNA, 22 nt, Human
cucagggaaaaaaauuacaaaa

SEQ ID NO: 840251 - RNA, 22 nt, Human
cuuagggaaagggagagggaaa

SEQ ID NO: 840252 - RNA, 19 nt, Human
gcagaaucuucuucaagcu

SEQ ID NO: 840253 - RNA, 23 nt, Human
gcagaaucuucuucaagcugaga

SEQ ID NO: 840254 - RNA, 24 nt, Human
gcagaaucuucuucaagcugagaa

SEQ ID NO: 840255 - RNA, 18 nt, Human
gcauuucaauugccaauc

SEQ ID NO: 840256 - RNA, 20 nt, Human
uaacauuaaaaacaaagaac

SEQ ID NO: 840257 - RNA, 24 nt, Human
uaacauuccaaacauguauaacca

SEQ ID NO: 840258 - RNA, 21 nt, Human
uaacuugaauccacagauaua

SEQ ID NO: 840259 - RNA, 18 nt, Human
uacaaaaucuaaagccaa

SEQ ID NO: 840260 - RNA, 24 nt, Human
uacaaguaaacacaaauuauacau

SEQ ID NO: 840261 - RNA, 21 nt, Human
ucacugaaaauacauugacua

SEQ ID NO: 840262 - RNA, 24 nt, Human
ucaguauuguauuuaaaaaagguu

SEQ ID NO: 840263 - RNA, 22 nt, Human
uccacagauauaagcaguauau

SEQ ID NO: 840264 - RNA, 22 nt, Human
uccacuaaaacaaaagaguaca

SEQ ID NO: 840265 - RNA, 21 nt, Human
ucuagcaggaacucagggaaa

SEQ ID NO: 840266 - RNA, 23 nt, Human
ugaauccacagauauaagcagua

SEQ ID NO: 840267 - RNA, 19 nt, Human
ugacuacuagaauacgaaa

SEQ ID NO: 840268 - RNA, 22 nt, Human
uucacaaaggucacaugugcag

SEQ ID NO: 840269 - RNA, 23 nt, Human
uucacaaaggucacaugugcagg

SEQ ID NO: 840270 - RNA, 23 nt, Human
uuccaaacauguauaaccaauua

SEQ ID NO: 840271 - RNA, 18 nt, Human
uugcuauaacacuuaaca

SEQ ID NO: 840272 - RNA, 24 nt, Human
uugcuauaacacuuaacacaugaa

SEQ ID NO: 840273 - RNA, 18 nt, Human
uugucuuaaguagcuuag

SEQ ID NO: 840274 - RNA, 19 nt, Human
aaaaaucaguaaaaauaga

SEQ ID NO: 840275 - RNA, 21 nt, Human
aaaaggaaauaauuaccaagg

SEQ ID NO: 840276 - RNA, 19 nt, Human
aaaaucaguaaaaauagaa

SEQ ID NO: 840277 - RNA, 21 nt, Human
aaaggaaauaauuaccaagga

SEQ ID NO: 840278 - RNA, 24 nt, Human
aaagugcuacgauuacaggcauga

SEQ ID NO: 840279 - RNA, 24 nt, Human
aaagugcugggauuacaggcauga

SEQ ID NO: 840280 - RNA, 24 nt, Human
aacacuuuauggccuacuguccuc

SEQ ID NO: 840281 - RNA, 22 nt, Human
aaccccugaccucaggugaucc

SEQ ID NO: 840282 - RNA, 19 nt, Human
aacuaccauuaacuuaaaa

SEQ ID NO: 840283 - RNA, 24 nt, Human
aaguagcuggaauuacaggcaugu

SEQ ID NO: 840284 - RNA, 27 nt, Human
aaguagcuggaauuacaggcauguggc

SEQ ID NO: 840285 - RNA, 19 nt, Human
aagugcugggauuacaggc

SEQ ID NO: 840286 - RNA, 21 nt, Human
aagugcugggauuacaggcau

SEQ ID NO: 840287 - RNA, 26 nt, Human
aagugcugggauuacaggcaugagcc

SEQ ID NO: 840288 - RNA, 20 nt, Human
aaucaguaaaaauagaaaac

SEQ ID NO: 840289 - RNA, 25 nt, Human
aauuacuucuaaacuugccccccac

SEQ ID NO: 840290 - RNA, 21 nt, Human
acagcagcgucacagcauaac

SEQ ID NO: 840291 - RNA, 23 nt, Human
acauuaucauucucaagccauau

SEQ ID NO: 840292 - RNA, 22 nt, Human
acauuccuuuuuuuuuuuuuuu

SEQ ID NO: 840293 - RNA, 24 nt, Human
accauguuggccaggcuggugucg

SEQ ID NO: 840294 - RNA, 18 nt, Human
acgagguuucaccauguu

SEQ ID NO: 840295 - RNA, 20 nt, Human
acgagguuucaccauguugg

SEQ ID NO: 840296 - RNA, 24 nt, Human
acgagguuucaccauguuggccag

SEQ ID NO: 840297 - RNA, 25 nt, Human
acucuguugcccaggcuggagugca

SEQ ID NO: 840298 - RNA, 25 nt, Human
agacgaucauugagguuucaaaaac

SEQ ID NO: 840299 - RNA, 19 nt, Human
agcauaacacugcuaacac

SEQ ID NO: 840300 - RNA, 22 nt, Human
aggagaaacacaagauuacugc

SEQ ID NO: 840301 - RNA, 25 nt, Human
aggcuggagugcaguggugugaucu

SEQ ID NO: 840302 - RNA, 24 nt, Human
aggugauccacccaccuuggccuc

SEQ ID NO: 840303 - RNA, 21 nt, Human
agguucaagugauccuccugc

SEQ ID NO: 840304 - RNA, 22 nt, Human
aguaaaaauagaaaacauggua

SEQ ID NO: 840305 - RNA, 18 nt, Human
agugcaguggugugaucu

SEQ ID NO: 840306 - RNA, 19 nt, Human
agugcaguggugugaucuc

SEQ ID NO: 840307 - RNA, 21 nt, Human
agugcaguggugugaucucug

SEQ ID NO: 840308 - RNA, 24 nt, Human
agugcaguggugugaucucugcuc

SEQ ID NO: 840309 - RNA, 18 nt, Human
agugcugggauuacaggc

SEQ ID NO: 840310 - RNA, 23 nt, Human
aucaccuuaaacaaacacucuua

SEQ ID NO: 840311 - RNA, 22 nt, Human
augccucagccucccaaguagc

SEQ ID NO: 840312 - RNA, 23 nt, Human
caaagugcuacgauuacaggcau

SEQ ID NO: 840313 - RNA, 24 nt, Human
caaagugcuacgauuacaggcaug

SEQ ID NO: 840314 - RNA, 24 nt, Human
caaagugcugggauuacaggcaug

SEQ ID NO: 840315 - RNA, 29 nt, Human
caagcgauucuccaugccucagccuccca

SEQ ID NO: 840316 - RNA, 24 nt, Human
caaguucucgcuguguugcccagg

SEQ ID NO: 840317 - RNA, 24 nt, Human
caccacacccagcuaauuuuugua

SEQ ID NO: 840318 - RNA, 18 nt, Human
caccauguuggccaggcu

SEQ ID NO: 840319 - RNA, 21 nt, Human
caccauguuggccaggcuggu

SEQ ID NO: 840320 - RNA, 24 nt, Human
caccauguuggccaggcugguguc

SEQ ID NO: 840321 - RNA, 27 nt, Human
caccauguuggccaggcuggugucgaa

SEQ ID NO: 840322 - RNA, 22 nt, Human
cacccaccuuggccucucaaag

SEQ ID NO: 840323 - RNA, 23 nt, Human
cacccaccuuggccucucaaagu

SEQ ID NO: 840324 - RNA, 21 nt, Human
cacugcaacuucugccuccug

SEQ ID NO: 840325 - RNA, 23 nt, Human
cacugcaacuucugccuccuggg

SEQ ID NO: 840326 - RNA, 24 nt, Human
cauguuggccaggcuggugucgaa

SEQ ID NO: 840327 - RNA, 22 nt, Human
ccaaagugcugggauuacaggc

SEQ ID NO: 840328 - RNA, 23 nt, Human
ccaaagugcugggauuacaggca

SEQ ID NO: 840329 - RNA, 24 nt, Human
ccaaagugcugggauuacaggcau

SEQ ID NO: 840330 - RNA, 24 nt, Human
ccaaguagcuggaauuacaggcau

SEQ ID NO: 840331 - RNA, 21 nt, Human
ccacgcccagcugagauuaca

SEQ ID NO: 840332 - RNA, 23 nt, Human
cccaaguagcuggaauuacaggc

SEQ ID NO: 840333 - RNA, 19 nt, Human
cccaggcuggagugcagug

SEQ ID NO: 840334 - RNA, 21 nt, Human
ccccacacaugaacuguuuuc

SEQ ID NO: 840335 - RNA, 22 nt, Human
ccuagguucaagugauccuccu

SEQ ID NO: 840336 - RNA, 23 nt, Human
ccuagguucaagugauccuccug

SEQ ID NO: 840337 - RNA, 20 nt, Human
ccuccugccuuguccugcca

SEQ ID NO: 840338 - RNA, 24 nt, Human
ccuccuggguucaagcgauucucc

SEQ ID NO: 840339 - RNA, 24 nt, Human
ccugaccucaggugauccacccac

SEQ ID NO: 840340 - RNA, 25 nt, Human
cgaacuccuagguucaagugauccu

SEQ ID NO: 840341 - RNA, 24 nt, Human
cgagguuucaccauguuggccagg

SEQ ID NO: 840342 - RNA, 22 nt, Human
cgauuacaggcaugagccacug

SEQ ID NO: 840343 - RNA, 24 nt, Human
cucacugcaacuucugccuccugg

SEQ ID NO: 840344 - RNA, 24 nt, Human
cucaggugauccacccaccuuggc

SEQ ID NO: 840345 - RNA, 21 nt, Human
cuccuggguucaagcgauucu

SEQ ID NO: 840346 - RNA, 23 nt, Human
cugcaacuucugccuccuggguu

SEQ ID NO: 840347 - RNA, 24 nt, Human
cugcaacuucugccuccuggguuc

SEQ ID NO: 840348 - RNA, 19 nt, Human
cuguugcccaggcuggagu

SEQ ID NO: 840349 - RNA, 24 nt, Human
gaccucaggugauccacccaccuu

SEQ ID NO: 840350 - RNA, 23 nt, Human
gagguuucaccauguuggccagg

SEQ ID NO: 840351 - RNA, 18 nt, Human
gauuacaggcaugagcca

SEQ ID NO: 840352 - RNA, 19 nt, Human
gauuacaggcaugagccac

SEQ ID NO: 840353 - RNA, 19 nt, Human
gauuacaggcaugagccac

SEQ ID NO: 840354 - RNA, 21 nt, Human
gauuacaggcaugagccacug

SEQ ID NO: 840355 - RNA, 22 nt, Human
gauuacaggcaugagccacugc

SEQ ID NO: 840356 - RNA, 18 nt, Human
gauuacaggcaugagccg

SEQ ID NO: 840357 - RNA, 21 nt, Human
gauuacaggcaugagccgcca

SEQ ID NO: 840358 - RNA, 22 nt, Human
gauuacaggcaugagccgccac

SEQ ID NO: 840359 - RNA, 24 nt, Human
gccaaagugcugggauuacaggca

SEQ ID NO: 840360 - RNA, 24 nt, Human
gcccaggcuggagugcaguggugu

SEQ ID NO: 840361 - RNA, 22 nt, Human
gccuuguccugccaaagugcug

SEQ ID NO: 840362 - RNA, 20 nt, Human
gcuaaaggcagccccuuaca

SEQ ID NO: 840363 - RNA, 23 nt, Human
gcuggugucgaaccccugaccuc

SEQ ID NO: 840364 - RNA, 24 nt, Human
gcuguguugcccaggcuggucucg

SEQ ID NO: 840365 - RNA, 23 nt, Human
ggagucuuacucuguugcccagg

SEQ ID NO: 840366 - RNA, 22 nt, Human
ggagugcaguggugugaucucu

SEQ ID NO: 840367 - RNA, 19 nt, Human
ggauuacaggcaugagccg

SEQ ID NO: 840368 - RNA, 20 nt, Human
ggccaggcuggugucgaacc

SEQ ID NO: 840369 - RNA, 22 nt, Human
ggcuggagugcaguggugugau

SEQ ID NO: 840370 - RNA, 19 nt, Human
guaaaaauagaaaacaugg

SEQ ID NO: 840371 - RNA, 24 nt, Human
guaguagagacgagguuucaccau

SEQ ID NO: 840372 - RNA, 22 nt, Human
gugauccacccaccuuggccuc

SEQ ID NO: 840373 - RNA, 22 nt, Human
uaaagugaaaaaauugggguca

SEQ ID NO: 840374 - RNA, 18 nt, Human
uaauagagacaaguucuc

SEQ ID NO: 840375 - RNA, 18 nt, Human
uaaugacuugaaaaaguc

SEQ ID NO: 840376 - RNA, 24 nt, Human
uaauuuuuguauuuguaguagaga

SEQ ID NO: 840377 - RNA, 22 nt, Human
uacaggcaugagccacugcgcc

SEQ ID NO: 840378 - RNA, 24 nt, Human
uacaggcaugagccgccacgccca

SEQ ID NO: 840379 - RNA, 24 nt, Human
uacaggcauguggcaccacaccca

SEQ ID NO: 840380 - RNA, 18 nt, Human
uaccaaggaauucaaggc

SEQ ID NO: 840381 - RNA, 24 nt, Human
uacgauuacaggcaugagccacug

SEQ ID NO: 840382 - RNA, 25 nt, Human
uacgauuacaggcaugagccacugc

SEQ ID NO: 840383 - RNA, 24 nt, Human
uacucuguugcccaggcuggagug

SEQ ID NO: 840384 - RNA, 19 nt, Human
uacuuggugguuagagaca

SEQ ID NO: 840385 - RNA, 22 nt, Human
uagagacgagguuucaccaugu

SEQ ID NO: 840386 - RNA, 23 nt, Human
uagguucaagugauccuccugcc

SEQ ID NO: 840387 - RNA, 23 nt, Human
uaguagagacgagguuucaccau

SEQ ID NO: 840388 - RNA, 24 nt, Human
uaguagagacgagguuucaccaug

SEQ ID NO: 840389 - RNA, 26 nt, Human
uaguagagacgagguuucaccauguu

SEQ ID NO: 840390 - RNA, 19 nt, Human
uagucauaaucaaaugaag

SEQ ID NO: 840391 - RNA, 18 nt, Human
uaucaagaaaaagauuga

SEQ ID NO: 840392 - RNA, 21 nt, Human
uaucauucucaagccauauau

SEQ ID NO: 840393 - RNA, 23 nt, Human
ucaaagugcuacgauuacaggca

SEQ ID NO: 840394 - RNA, 24 nt, Human
ucaaagugcuacgauuacaggcau

SEQ ID NO: 840395 - RNA, 19 nt, Human
ucaagugauccuccugccu

SEQ ID NO: 840396 - RNA, 24 nt, Human
ucacugcaacuucugccuccuggg

SEQ ID NO: 840397 - RNA, 25 nt, Human
ucacugcaacuucugccuccugggu

SEQ ID NO: 840398 - RNA, 20 nt, Human
ucagccucccaaguagcugg

SEQ ID NO: 840399 - RNA, 21 nt, Human
ucaguaaaaauagaaaacaug

SEQ ID NO: 840400 - RNA, 22 nt, Human
ucaugaguggagccaaaacucc

SEQ ID NO: 840401 - RNA, 21 nt, Human
ucauuagucuggaaagcacua

SEQ ID NO: 840402 - RNA, 24 nt, Human
ucccaaguagcuggaauuacaggc

SEQ ID NO: 840403 - RNA, 18 nt, Human
uccuagguucaagugauc

SEQ ID NO: 840404 - RNA, 21 nt, Human
uccuagguucaagugauccuc

SEQ ID NO: 840405 - RNA, 24 nt, Human
uccuagguucaagugauccuccug

SEQ ID NO: 840406 - RNA, 20 nt, Human
uccugccuuguccugccaaa

SEQ ID NO: 840407 - RNA, 21 nt, Human
uccuggguucaagcgauucuc

SEQ ID NO: 840408 - RNA, 25 nt, Human
uccuggguucaagcgauucuccaug

SEQ ID NO: 840409 - RNA, 24 nt, Human
ucucaaagugcuacgauuacaggc

SEQ ID NO: 840410 - RNA, 23 nt, Human
ucucgaacuccuagguucaagug

SEQ ID NO: 840411 - RNA, 19 nt, Human
ucucgcuguguugcccagg

SEQ ID NO: 840412 - RNA, 23 nt, Human
ucucgcuguguugcccaggcugg

SEQ ID NO: 840413 - RNA, 24 nt, Human
ucucgcuguguugcccaggcuggu

SEQ ID NO: 840414 - RNA, 26 nt, Human
ucucgcuguguugcccaggcuggucu

SEQ ID NO: 840415 - RNA, 18 nt, Human
ucuguugcccaggcugga

SEQ ID NO: 840416 - RNA, 22 nt, Human
ucuuacucuguugcccaggcug

SEQ ID NO: 840417 - RNA, 23 nt, Human
ucuuacucuguugcccaggcugg

SEQ ID NO: 840418 - RNA, 24 nt, Human
ucuuacucuguugcccaggcugga

SEQ ID NO: 840419 - RNA, 22 nt, Human
ugacaggaaguagccuaauaca

SEQ ID NO: 840420 - RNA, 21 nt, Human
ugaccucaggugauccaccca

SEQ ID NO: 840421 - RNA, 24 nt, Human
ugaccucaggugauccacccaccu

SEQ ID NO: 840422 - RNA, 24 nt, Human
ugagaucaccuuaaacaaacacuc

SEQ ID NO: 840423 - RNA, 24 nt, Human
ugauccacccaccuuggccucuca

SEQ ID NO: 840424 - RNA, 18 nt, Human
ugcccaggcuggagugca

SEQ ID NO: 840425 - RNA, 21 nt, Human
ugcccaggcuggagugcagug

SEQ ID NO: 840426 - RNA, 24 nt, Human
ugcccaggcuggagugcaguggug

SEQ ID NO: 840427 - RNA, 24 nt, Human
ugcccaggcuggucucgaacuccu

SEQ ID NO: 840428 - RNA, 22 nt, Human
ugccucagccucccaaguagcu

SEQ ID NO: 840429 - RNA, 24 nt, Human
ugccucagccucccaaguagcugg

SEQ ID NO: 840430 - RNA, 24 nt, Human
ugcgccuggcccauuuuucgauuu

SEQ ID NO: 840431 - RNA, 20 nt, Human
ugcugggauuacaggcauga

SEQ ID NO: 840432 - RNA, 18 nt, Human
uggaauuacaggcaugug

SEQ ID NO: 840433 - RNA, 24 nt, Human
uggaauuacaggcauguggcacca

SEQ ID NO: 840434 - RNA, 24 nt, Human
uggacaacaacuaccauuaacuua

SEQ ID NO: 840435 - RNA, 24 nt, Human
uggagucuuacucuguugcccagg

SEQ ID NO: 840436 - RNA, 19 nt, Human
uggagugcaguggugugau

SEQ ID NO: 840437 - RNA, 22 nt, Human
uggagugcaguggugugaucuc

SEQ ID NO: 840438 - RNA, 23 nt, Human
uggagugcaguggugugaucucu

SEQ ID NO: 840439 - RNA, 24 nt, Human
uggagugcaguggugugaucucug

SEQ ID NO: 840440 - RNA, 24 nt, Human
uggccaggcuggugucgaaccccu

SEQ ID NO: 840441 - RNA, 18 nt, Human
uggcugcaaaaucaggua

SEQ ID NO: 840442 - RNA, 18 nt, Human
ugggauuacaggcaugag

SEQ ID NO: 840443 - RNA, 19 nt, Human
ugggauuacaggcaugagc

SEQ ID NO: 840444 - RNA, 21 nt, Human
ugggauuacaggcaugagccg

SEQ ID NO: 840445 - RNA, 22 nt, Human
ugggauuacaggcaugagccgc

SEQ ID NO: 840446 - RNA, 23 nt, Human
ugggauuacaggcaugagccgcc

SEQ ID NO: 840447 - RNA, 24 nt, Human
ugggauuacaggcaugagccgcca

SEQ ID NO: 840448 - RNA, 18 nt, Human
uguauuccuccuucucuu

SEQ ID NO: 840449 - RNA, 19 nt, Human
uguguguguguguguggau

SEQ ID NO: 840450 - RNA, 18 nt, Human
ugugugugugugugugug

SEQ ID NO: 840451 - RNA, 18 nt, Human
ugugugugugugugugug

SEQ ID NO: 840452 - RNA, 20 nt, Human
ugugugugugugugugugug

SEQ ID NO: 840453 - RNA, 22 nt, Human
ugugugugugugugugugugag

SEQ ID NO: 840454 - RNA, 21 nt, Human
ugugugugugugugugugugu

SEQ ID NO: 840455 - RNA, 21 nt, Human
ugugugugugugugugugugu

SEQ ID NO: 840456 - RNA, 24 nt, Human
uguguugcccaggcuggucucgaa

SEQ ID NO: 840457 - RNA, 21 nt, Human
uguugcccaggcuggagugca

SEQ ID NO: 840458 - RNA, 19 nt, Human
uguugcccaggcuggucuc

SEQ ID NO: 840459 - RNA, 22 nt, Human
uguugcccaggcuggucucgaa

SEQ ID NO: 840460 - RNA, 22 nt, Human
uuaacugaauuuaaaguuaugu

SEQ ID NO: 840461 - RNA, 20 nt, Human
uuacaggcauguggcaccac

SEQ ID NO: 840462 - RNA, 21 nt, Human
uuacuucuaaacuugcccccc

SEQ ID NO: 840463 - RNA, 25 nt, Human
uuagcaauaauaagaguuacacgcu

SEQ ID NO: 840464 - RNA, 24 nt, Human
uucaagcgauucuccaugccucag

SEQ ID NO: 840465 - RNA, 28 nt, Human
uucaagugauccuccugccuuguccugc

SEQ ID NO: 840466 - RNA, 28 nt, Human
uucaauuuugugugugugugugugugug

SEQ ID NO: 840467 - RNA, 24 nt, Human
uucucgcuguguugcccaggcugg

SEQ ID NO: 840468 - RNA, 24 nt, Human
uugcccaggcuggagugcaguggu

SEQ ID NO: 840469 - RNA, 24 nt, Human
uuucaccauguuggccaggcuggu

SEQ ID NO: 840470 - RNA, 24 nt, Human
uuuguaguagagacgagguuucac

SEQ ID NO: 840471 - RNA, 26 nt, Human
uuuguaguagagacgagguuucacca

SEQ ID NO: 840472 - RNA, 24 nt, Human
uuugugugugugugugugugugug

SEQ ID NO: 840473 - RNA, 23 nt, Human
uuuuaauggcugcaaaaucaggu

SEQ ID NO: 840474 - RNA, 21 nt, Human
uuuuguauuuguaguagagac

SEQ ID NO: 840475 - RNA, 20 nt, Human
uuuuuguauuuguaguagag

SEQ ID NO: 840476 - RNA, 18 nt, Human
uuuuuuuuuuuuuuuuug

SEQ ID NO: 840477 - RNA, 22 nt, Human
uuuuuuuuuuuuuuuuugcugg

SEQ ID NO: 840478 - RNA, 23 nt, Human
uuuuuuuuuuuuuuuuuugcugg

SEQ ID NO: 840479 - RNA, 21 nt, Human
aaagccccgaggaaacccuaa

SEQ ID NO: 840480 - RNA, 21 nt, Human
aaagccccgaggaaacgccaa

SEQ ID NO: 840481 - RNA, 24 nt, Human
aagaagcauuuauuagcaugcagg

SEQ ID NO: 840482 - RNA, 22 nt, Human
aagaucccgaaagccccgagga

SEQ ID NO: 840483 - RNA, 19 nt, Human
acaccgaucccaccaaagc

SEQ ID NO: 840484 - RNA, 25 nt, Human
caccaaagccccgaggaaacgccaa

SEQ ID NO: 840485 - RNA, 21 nt, Human
cacccggauuccgagaacaga

SEQ ID NO: 840486 - RNA, 27 nt, Human
cacccggauuccgagaaccggggguuc

SEQ ID NO: 840487 - RNA, 22 nt, Human
cccaccaaagccccgaggaaag

SEQ ID NO: 840488 - RNA, 18 nt, Human
cccgaaagccccgaggaa

SEQ ID NO: 840489 - RNA, 22 nt, Human
cccuaaaucucauccugaggac

SEQ ID NO: 840490 - RNA, 21 nt, Human
cgaaagccccgaggaaacccu

SEQ ID NO: 840491 - RNA, 19 nt, Human
cgaggaaacgccaaaucuc

SEQ ID NO: 840492 - RNA, 19 nt, Human
cgaggacaccgaucccacc

SEQ ID NO: 840493 - RNA, 22 nt, Human
cgccaaaucucaucccgaggac

SEQ ID NO: 840494 - RNA, 23 nt, Human
uuaggaaccgggaccucaauccg

SEQ ID NO: 840495 - RNA, 20 nt, Human
uuuuuuuuuucugaagaagc

SEQ ID NO: 840496 - RNA, 18 nt, Human
uuuuuuuuuuuuuuucug

SEQ ID NO: 840497 - RNA, 21 nt, Human
aaaagcucagcuucaucuuag

SEQ ID NO: 840498 - RNA, 19 nt, Human
aaaaguccaagucacaggc

SEQ ID NO: 840499 - RNA, 20 nt, Human
aagaauguacaggugucccc

SEQ ID NO: 840500 - RNA, 20 nt, Human
aagcaacucugccuagaagc

SEQ ID NO: 840501 - RNA, 23 nt, Human
aagcugccucucacuguagccaa

SEQ ID NO: 840502 - RNA, 27 nt, Human
aauauccaucucuucuguaucagcagc

SEQ ID NO: 840503 - RNA, 22 nt, Human
acagguaaugguuuguaaagua

SEQ ID NO: 840504 - RNA, 20 nt, Human
acagugaugauggaagaaug

SEQ ID NO: 840505 - RNA, 21 nt, Human
accugauaacucaguaagcua

SEQ ID NO: 840506 - RNA, 22 nt, Human
acuaggaugauuugugacuuug

SEQ ID NO: 840507 - RNA, 20 nt, Human
agaggaaggcuaacgagggg

SEQ ID NO: 840508 - RNA, 21 nt, Human
agcacaauucucacaacgucc

SEQ ID NO: 840509 - RNA, 23 nt, Human
auacaucuaaaaaggcauugguu

SEQ ID NO: 840510 - RNA, 22 nt, Human
auugugugugcuuuucaacaga

SEQ ID NO: 840511 - RNA, 19 nt, Human
caacguccagaggcaauag

SEQ ID NO: 840512 - RNA, 19 nt, Human
caauaaacauggacgccuu

SEQ ID NO: 840513 - RNA, 25 nt, Human
cagagggguugagauguguuaagcc

SEQ ID NO: 840514 - RNA, 19 nt, Human
cagcggagacuugcccugu

SEQ ID NO: 840515 - RNA, 23 nt, Human
cauuuuuguucaauuucuaggaa

SEQ ID NO: 840516 - RNA, 18 nt, Human
ccaagggaagaaaaagcc

SEQ ID NO: 840517 - RNA, 23 nt, Human
ccagccggcgcugcgcuucuucc

SEQ ID NO: 840518 - RNA, 19 nt, Human
ccaggccagguacagguaa

SEQ ID NO: 840519 - RNA, 19 nt, Human
cccaagggaagaaaaagcc

SEQ ID NO: 840520 - RNA, 21 nt, Human
cccuuggaaucccggagaccc

SEQ ID NO: 840521 - RNA, 18 nt, Human
ccuagaagcugccucuca

SEQ ID NO: 840522 - RNA, 23 nt, Human
ccuugaagaccuuuggguaguuc

SEQ ID NO: 840523 - RNA, 20 nt, Human
ccuuuggguaguuccauggu

SEQ ID NO: 840524 - RNA, 21 nt, Human
cgcgacaagaugucugccauc

SEQ ID NO: 840525 - RNA, 23 nt, Human
cgcgaguuucaacagaaaaagaa

SEQ ID NO: 840526 - RNA, 22 nt, Human
cggccaccgccucuuagguccu

SEQ ID NO: 840527 - RNA, 22 nt, Human
cguaaccgagcccuuggaaucc

SEQ ID NO: 840528 - RNA, 23 nt, Human
cguggccccggccaccgccucuu

SEQ ID NO: 840529 - RNA, 21 nt, Human
cuccacuguccauuucaauau

SEQ ID NO: 840530 - RNA, 24 nt, Human
cuccacuguccauuucaauaucca

SEQ ID NO: 840531 - RNA, 22 nt, Human
cuccaugucaaaccuaaggccc

SEQ ID NO: 840532 - RNA, 22 nt, Human
cucuuagguccuccaagcgcua

SEQ ID NO: 840533 - RNA, 24 nt, Human
cugugaauauaaucauuuauuugu

SEQ ID NO: 840534 - RNA, 22 nt, Human
cuuccuguuuccugaugucuuc

SEQ ID NO: 840535 - RNA, 22 nt, Human
cuugcuguacucgcucuuccug

SEQ ID NO: 840536 - RNA, 23 nt, Human
cuuuucaacagaaagaauuccaa

SEQ ID NO: 840537 - RNA, 21 nt, Human
gaagaauguacaggugucccc

SEQ ID NO: 840538 - RNA, 21 nt, Human
gauauauacaucaaaaauaca

SEQ ID NO: 840539 - RNA, 20 nt, Human
gcaaagcacuggcaacagca

SEQ ID NO: 840540 - RNA, 23 nt, Human
gcccugugauuggcgcagagcuu

SEQ ID NO: 840541 - RNA, 18 nt, Human
gcgacaagaugucugcca

SEQ ID NO: 840542 - RNA, 23 nt, Human
gcuauuaaaaagcucuaugugcu

SEQ ID NO: 840543 - RNA, 23 nt, Human
ggcaacagcagauaaaagggucu

SEQ ID NO: 840544 - RNA, 18 nt, Human
ggccccggccaccgccuc

SEQ ID NO: 840545 - RNA, 21 nt, Human
ggcuucaucuccacuguccau

SEQ ID NO: 840546 - RNA, 20 nt, Human
ggggcguggccccggccacc

SEQ ID NO: 840547 - RNA, 22 nt, Human
gguucuuuauugugugugcuuu

SEQ ID NO: 840548 - RNA, 18 nt, Human
guaaaguauuacaaaccc

SEQ ID NO: 840549 - RNA, 27 nt, Human
uaaccgagcccuuggaaucccggagac

SEQ ID NO: 840550 - RNA, 19 nt, Human
uaacucaguaagcuagugg

SEQ ID NO: 840551 - RNA, 23 nt, Human
uaacugggaaauuuauuuagaau

SEQ ID NO: 840552 - RNA, 24 nt, Human
uaccuggaccaacuccuugaagac

SEQ ID NO: 840553 - RNA, 19 nt, Human
uacuaggaugauuugugac

SEQ ID NO: 840554 - RNA, 23 nt, Human
uagccaagagucugaccugcacc

SEQ ID NO: 840555 - RNA, 22 nt, Human
uagguccuccaagcgcuauggg

SEQ ID NO: 840556 - RNA, 23 nt, Human
uagugcuauuaaaaagcucuaug

SEQ ID NO: 840557 - RNA, 23 nt, Human
ucaauaaauucaagugguaugaa

SEQ ID NO: 840558 - RNA, 22 nt, Human
uccaagucacaggcaaggaaaa

SEQ ID NO: 840559 - RNA, 23 nt, Human
uccacagcagcggagacuugccc

SEQ ID NO: 840560 - RNA, 18 nt, Human
uccaugucaaaccuaagg

SEQ ID NO: 840561 - RNA, 22 nt, Human
ucccagaaaagcugacguggcu

SEQ ID NO: 840562 - RNA, 22 nt, Human
ucugaccugcaccugauaacuc

SEQ ID NO: 840563 - RNA, 24 nt, Human
ucugaccugcaccugauaacucag

SEQ ID NO: 840564 - RNA, 19 nt, Human
ucugugacaauaaaagcuu

SEQ ID NO: 840565 - RNA, 20 nt, Human
ugaaaguuacacucgcgagu

SEQ ID NO: 840566 - RNA, 22 nt, Human
ugaagaccuuuggguaguucca

SEQ ID NO: 840567 - RNA, 18 nt, Human
ugauggaagaauguacag

SEQ ID NO: 840568 - RNA, 19 nt, Human
ugcacuaaguccuuguagc

SEQ ID NO: 840569 - RNA, 18 nt, Human
ugccucucacuguagcca

SEQ ID NO: 840570 - RNA, 21 nt, Human
ugcuacauuuccaguagauug

SEQ ID NO: 840571 - RNA, 20 nt, Human
uggaaucccggagacccgcc

SEQ ID NO: 840572 - RNA, 18 nt, Human
ugguuaccgguuguuuga

SEQ ID NO: 840573 - RNA, 22 nt, Human
uguaaaucagaggaaggcuaac

SEQ ID NO: 840574 - RNA, 25 nt, Human
uguagccaagagucugaccugcacc

SEQ ID NO: 840575 - RNA, 24 nt, Human
ugugauuggcgcagagcuugugug

SEQ ID NO: 840576 - RNA, 21 nt, Human
uguuugaaaauugaugcuguu

SEQ ID NO: 840577 - RNA, 20 nt, Human
uucacuuuauuacuaggaug

SEQ ID NO: 840578 - RNA, 19 nt, Human
uuuccacagcagcggagac

SEQ ID NO: 840579 - RNA, 25 nt, Human
cacuaucuucccuuuuuccucugaa

SEQ ID NO: 840580 - RNA, 22 nt, Human
aaagggaccgaaagcccaggac

SEQ ID NO: 840581 - RNA, 22 nt, Human
agaguuccuccugcugacccca

SEQ ID NO: 840582 - RNA, 25 nt, Human
agaguuccuccugcugaccccacuc

SEQ ID NO: 840583 - RNA, 22 nt, Human
gaugggcauuaaaagaaaggga

SEQ ID NO: 840584 - RNA, 20 nt, Human
gggaagggaaaagugugaca

SEQ ID NO: 840585 - RNA, 19 nt, Human
uagaguuccuccugcugac

SEQ ID NO: 840586 - RNA, 19 nt, Human
ugggcauuaaaagaaaggg

SEQ ID NO: 840587 - RNA, 24 nt, Human
ugggcauuaaaagaaagggaccga

SEQ ID NO: 840588 - RNA, 21 nt, Human
aaacagaagggaauaaauucc

SEQ ID NO: 840589 - RNA, 23 nt, Human
aaacagaagggaauaaauuccaa

SEQ ID NO: 840590 - RNA, 19 nt, Human
aaguuuuucaauuuccaaa

SEQ ID NO: 840591 - RNA, 24 nt, Human
aauaaaucuuccuuccgguggucc

SEQ ID NO: 840592 - RNA, 22 nt, Human
aaucuuccuuccggugguccac

SEQ ID NO: 840593 - RNA, 21 nt, Human
acaaaagaaaaaagauguacc

SEQ ID NO: 840594 - RNA, 24 nt, Human
agaagggaauaaauuccaacaaug

SEQ ID NO: 840595 - RNA, 21 nt, Human
auaaaccuugacuucacagag

SEQ ID NO: 840596 - RNA, 22 nt, Human
aucuucucaggccgccccacca

SEQ ID NO: 840597 - RNA, 20 nt, Human
caaaacuuacuggaauauuu

SEQ ID NO: 840598 - RNA, 23 nt, Human
cacaugcauuuaaaauucauuuc

SEQ ID NO: 840599 - RNA, 21 nt, Human
caccaccaccaccaccaagau

SEQ ID NO: 840600 - RNA, 22 nt, Human
caccaccaccaccaccaagauu

SEQ ID NO: 840601 - RNA, 24 nt, Human
caccaccaccaccaccaagauuug

SEQ ID NO: 840602 - RNA, 22 nt, Human
caguguaaguuacacauaugua

SEQ ID NO: 840603 - RNA, 24 nt, Human
caguguaaguuacacauauguaua

SEQ ID NO: 840604 - RNA, 18 nt, Human
cccaccaccaccaccacc

SEQ ID NO: 840605 - RNA, 20 nt, Human
cccaccaccaccaccaccaa

SEQ ID NO: 840606 - RNA, 22 nt, Human
ccccaccaccaccaccaccaag

SEQ ID NO: 840607 - RNA, 24 nt, Human
ccgccccaccaccaccaccaccaa

SEQ ID NO: 840608 - RNA, 21 nt, Human
ccuuccggugguccacaaaag

SEQ ID NO: 840609 - RNA, 23 nt, Human
ccuuuaaaacagaagggaauaaa

SEQ ID NO: 840610 - RNA, 20 nt, Human
ggaauaaauuccaacaaugc

SEQ ID NO: 840611 - RNA, 23 nt, Human
uaaacugguuaacaucaauguua

SEQ ID NO: 840612 - RNA, 23 nt, Human
uccaaaauaccuccuuuaaaaca

SEQ ID NO: 840613 - RNA, 20 nt, Human
ugaaaauaaaccuugacuuc

SEQ ID NO: 840614 - RNA, 20 nt, Human
ugaagauuacuugcugcaag

SEQ ID NO: 840615 - RNA, 19 nt, Human
ugacuucacagagaagucu

SEQ ID NO: 840616 - RNA, 20 nt, Human
uugaaugcuuauuauaugcc

SEQ ID NO: 840617 - RNA, 22 nt, Human
uuuucaauuuccaaaauaccuc

SEQ ID NO: 840618 - RNA, 27 nt, Human
aaaaagaaaacaaguuugaauguuuua

SEQ ID NO: 840619 - RNA, 22 nt, Human
aaaacaaacuuucugaacaaaa

SEQ ID NO: 840620 - RNA, 26 nt, Human
aaacaaaagaaaaaaaagaaagacaa

SEQ ID NO: 840621 - RNA, 23 nt, Human
aaacaaaugcaacgauacaagca

SEQ ID NO: 840622 - RNA, 19 nt, Human
aaacagaaaaaagaaaaca

SEQ ID NO: 840623 - RNA, 21 nt, Human
aaacagaaaaaagaaaacaag

SEQ ID NO: 840624 - RNA, 19 nt, Human
aaacucaaacuuacuuaaa

SEQ ID NO: 840625 - RNA, 22 nt, Human
aaagaaaaaaacagaaaaaaga

SEQ ID NO: 840626 - RNA, 21 nt, Human
aaagaaagcucccaagcugca

SEQ ID NO: 840627 - RNA, 21 nt, Human
aaagaaagcucccaagcugca

SEQ ID NO: 840628 - RNA, 19 nt, Human
aacaaagaaaaaaacagaa

SEQ ID NO: 840629 - RNA, 20 nt, Human
aagaaaaaaaagaaagacaa

SEQ ID NO: 840630 - RNA, 24 nt, Human
aagaaaaaaacagaaaaaagaaaa

SEQ ID NO: 840631 - RNA, 25 nt, Human
aagaaaacaaguuugaauguuuuag

SEQ ID NO: 840632 - RNA, 24 nt, Human
aagcaaaaucuguuguacauauag

SEQ ID NO: 840633 - RNA, 19 nt, Human
aagcaauuggcaaagucag

SEQ ID NO: 840634 - RNA, 19 nt, Human
aagcaauuggcaaagucag

SEQ ID NO: 840635 - RNA, 20 nt, Human
aagcucccaagcugcaguuu

SEQ ID NO: 840636 - RNA, 20 nt, Human
aagcucccaagcugcaguuu

SEQ ID NO: 840637 - RNA, 23 nt, Human
aagcugcaguuuuccagcaaaag

SEQ ID NO: 840638 - RNA, 23 nt, Human
aagcugcaguuuuccagcaaaag

SEQ ID NO: 840639 - RNA, 18 nt, Human
aauauacuaagcauacca

SEQ ID NO: 840640 - RNA, 18 nt, Human
aauauacuaagcauacca

SEQ ID NO: 840641 - RNA, 19 nt, Human
acaaaagaaaaaaaagaaa

SEQ ID NO: 840642 - RNA, 25 nt, Human
acaauacugguagcgggugucaugc

SEQ ID NO: 840643 - RNA, 23 nt, Human
acaccacacuuugaugugucccc

SEQ ID NO: 840644 - RNA, 23 nt, Human
acaccacacuuugaugugucccc

SEQ ID NO: 840645 - RNA, 22 nt, Human
accccaggaacaucuggcagaa

SEQ ID NO: 840646 - RNA, 22 nt, Human
accccaggaacaucuggcagaa

SEQ ID NO: 840647 - RNA, 21 nt, Human
acguccgagucucuugacugu

SEQ ID NO: 840648 - RNA, 25 nt, Human
agaaaaaaaagaaagacaauguuac

SEQ ID NO: 840649 - RNA, 18 nt, Human
agaagugaaacauacccu

SEQ ID NO: 840650 - RNA, 18 nt, Human
agaagugaaacauacccu

SEQ ID NO: 840651 - RNA, 25 nt, Human
agcaaaagugacuucacacaggcac

SEQ ID NO: 840652 - RNA, 25 nt, Human
agcaaaagugacuucacacaggcac

SEQ ID NO: 840653 - RNA, 22 nt, Human
agcaauuggcaaagucagacaa

SEQ ID NO: 840654 - RNA, 22 nt, Human
agcaauuggcaaagucagacaa

SEQ ID NO: 840655 - RNA, 23 nt, Human
agcauaccauauuuaauacucau

SEQ ID NO: 840656 - RNA, 23 nt, Human
agcauaccauauuuaauacucau

SEQ ID NO: 840657 - RNA, 20 nt, Human
aguaaccccaggaacaucug

SEQ ID NO: 840658 - RNA, 20 nt, Human
aguaaccccaggaacaucug

SEQ ID NO: 840659 - RNA, 21 nt, Human
auacagaucuccucaccuaca

SEQ ID NO: 840660 - RNA, 24 nt, Human
auauauaguauauauauguaugug

SEQ ID NO: 840661 - RNA, 21 nt, Human
auaucauggcacuccuuggga

SEQ ID NO: 840662 - RNA, 21 nt, Human
auaucauggcacuccuuggga

SEQ ID NO: 840663 - RNA, 22 nt, Human
augcucagugucaucucuggcu

SEQ ID NO: 840664 - RNA, 22 nt, Human
augcucagugucaucucuggcu

SEQ ID NO: 840665 - RNA, 23 nt, Human
caaaaauauuucagugauuccca

SEQ ID NO: 840666 - RNA, 21 nt, Human
caaaaucaugaaacaaaagaa

SEQ ID NO: 840667 - RNA, 26 nt, Human
caaauuaaaacaaaugcaacgauaca

SEQ ID NO: 840668 - RNA, 22 nt, Human
caaauuuuagaccugcaggaca

SEQ ID NO: 840669 - RNA, 22 nt, Human
caaauuuuagaccugcaggaca

SEQ ID NO: 840670 - RNA, 24 nt, Human
caacauuaaaauauguuucaucca

SEQ ID NO: 840671 - RNA, 26 nt, Human
caauucuauugaggaggaaacaggau

SEQ ID NO: 840672 - RNA, 25 nt, Human
cacauaauauucauuuauaacagcu

SEQ ID NO: 840673 - RNA, 22 nt, Human
cagcuguuauuaauaaagugac

SEQ ID NO: 840674 - RNA, 22 nt, Human
cagcuguuauuaauaaagugac

SEQ ID NO: 840675 - RNA, 22 nt, Human
caggaacaucuggcagaaccaa

SEQ ID NO: 840676 - RNA, 22 nt, Human
caggaacaucuggcagaaccaa

SEQ ID NO: 840677 - RNA, 21 nt, Human
caggaguuguugcugcagaga

SEQ ID NO: 840678 - RNA, 20 nt, Human
caggcaaaccaaacaccaca

SEQ ID NO: 840679 - RNA, 21 nt, Human
caggcaaaccaaacaccacac

SEQ ID NO: 840680 - RNA, 21 nt, Human
caggcaaaccaaacaccacac

SEQ ID NO: 840681 - RNA, 19 nt, Human
cauaaagaugaaacuacca

SEQ ID NO: 840682 - RNA, 18 nt, Human
cauauauaguauauauau

SEQ ID NO: 840683 - RNA, 23 nt, Human
cauccacucauaaggucagggua

SEQ ID NO: 840684 - RNA, 23 nt, Human
cauccacucauaaggucagggua

SEQ ID NO: 840685 - RNA, 19 nt, Human
caugagaaagaaacuucca

SEQ ID NO: 840686 - RNA, 19 nt, Human
caugagaaagaaacuucca

SEQ ID NO: 840687 - RNA, 23 nt, Human
ccacacuuugauguguccccagu

SEQ ID NO: 840688 - RNA, 23 nt, Human
ccacacuuugauguguccccagu

SEQ ID NO: 840689 - RNA, 19 nt, Human
ccaggaacaucuggcagaa

SEQ ID NO: 840690 - RNA, 19 nt, Human
ccaggaacaucuggcagaa

SEQ ID NO: 840691 - RNA, 21 nt, Human
ccaggcaaaccaaacaccaca

SEQ ID NO: 840692 - RNA, 20 nt, Human
ccauucaaauuuuagaccug

SEQ ID NO: 840693 - RNA, 20 nt, Human
ccauucaaauuuuagaccug

SEQ ID NO: 840694 - RNA, 21 nt, Human
cccacauguaagucugaaggu

SEQ ID NO: 840695 - RNA, 21 nt, Human
cccacauguaagucugaaggu

SEQ ID NO: 840696 - RNA, 25 nt, Human
ccccaggaacaucuggcagaaccaa

SEQ ID NO: 840697 - RNA, 25 nt, Human
ccccaggaacaucuggcagaaccaa

SEQ ID NO: 840698 - RNA, 25 nt, Human
ccccaguacuugugcuugaauuucc

SEQ ID NO: 840699 - RNA, 25 nt, Human
ccccaguacuugugcuugaauuucc

SEQ ID NO: 840700 - RNA, 18 nt, Human
cgcucacagcuauugacg

SEQ ID NO: 840701 - RNA, 18 nt, Human
cgcucacagcuauugacg

SEQ ID NO: 840702 - RNA, 23 nt, Human
cgcuucauugcuuuggcagucga

SEQ ID NO: 840703 - RNA, 20 nt, Human
cguccgagucucuugacugu

SEQ ID NO: 840704 - RNA, 19 nt, Human
cuaagcauaccauauuuaa

SEQ ID NO: 840705 - RNA, 19 nt, Human
cuaagcauaccauauuuaa

SEQ ID NO: 840706 - RNA, 22 nt, Human
cuaugcauuugccuugccuccu

SEQ ID NO: 840707 - RNA, 23 nt, Human
cucccaagcugcaguuuuccagc

SEQ ID NO: 840708 - RNA, 23 nt, Human
cucccaagcugcaguuuuccagc

SEQ ID NO: 840709 - RNA, 22 nt, Human
cucugccuguccuucccauuua

SEQ ID NO: 840710 - RNA, 24 nt, Human
cugaaagccgucugccguaucugg

SEQ ID NO: 840711 - RNA, 24 nt, Human
cugaaagccgucugccguaucugg

SEQ ID NO: 840712 - RNA, 20 nt, Human
cugccuguccuucccauuua

SEQ ID NO: 840713 - RNA, 23 nt, Human
cuuagguuggaauauacuaagca

SEQ ID NO: 840714 - RNA, 20 nt, Human
cuuccauguaaauaguucuc

SEQ ID NO: 840715 - RNA, 31 nt, Human
cuuugauccaguggguaaaugacaugacagg

SEQ ID NO: 840716 - RNA, 31 nt, Human; identical to SEQ ID NO: 840715

SEQ ID NO: 840717 - RNA, 21 nt, Human
cuuuuccacaaauuaaaacaa

SEQ ID NO: 840718 - RNA, 22 nt, Human
gaacugauaucuucaugucuug

SEQ ID NO: 840719 - RNA, 22 nt, Human
gaagagcaccagggggaaaggc

SEQ ID NO: 840720 - RNA, 18 nt, Human
gacgauguuggaaaauaa

SEQ ID NO: 840721 - RNA, 18 nt, Human
gacgauguuggaaaauaa

SEQ ID NO: 840722 - RNA, 22 nt, Human
gagcaccagggggaaaggccag

SEQ ID NO: 840723 - RNA, 21 nt, Human
gaguuguugcugcagagacag

SEQ ID NO: 840724 - RNA, 18 nt, Human
gcagaaccaaguggccga

SEQ ID NO: 840725 - RNA, 18 nt, Human
gcagaaccaaguggccga

SEQ ID NO: 840726 - RNA, 22 nt, Human
gcaggaguuguugcugcagaga

SEQ ID NO: 840727 - RNA, 18 nt, Human
gcugcagcauuuauauug

SEQ ID NO: 840728 - RNA, 18 nt, Human
gcugcagcauuuauauug

SEQ ID NO: 840729 - RNA, 22 nt, Human
ggaaaauaagacacucagaugu

SEQ ID NO: 840730 - RNA, 22 nt, Human
ggaaaauaagacacucagaugu

SEQ ID NO: 840731 - RNA, 18 nt, Human
ggaaaggccaggucuaca

SEQ ID NO: 840732 - RNA, 18 nt, Human
ggacagguaucgguuuua

SEQ ID NO: 840733 - RNA, 18 nt, Human
ggacagguaucgguuuua

SEQ ID NO: 840734 - RNA, 23 nt, Human
ggaguuguugcugcagagacagu

SEQ ID NO: 840735 - RNA, 24 nt, Human
ggauauuggugauuuuuguuuuuu

SEQ ID NO: 840736 - RNA, 22 nt, Human
ggcugaaagaauauuucgguga

SEQ ID NO: 840737 - RNA, 18 nt, Human
gggaauucuuuaaguguu

SEQ ID NO: 840738 - RNA, 18 nt, Human
guacuugacagaagagug

SEQ ID NO: 840739 - RNA, 18 nt, Human
guacuugacagaagagug

SEQ ID NO: 840740 - RNA, 20 nt, Human
guagcguaacuacauuguua

SEQ ID NO: 840741 - RNA, 20 nt, Human
uaaacuuuauccuuuauguc

SEQ ID NO: 840742 - RNA, 20 nt, Human
uaaacuuuauccuuuauguc

SEQ ID NO: 840743 - RNA, 23 nt, Human
uaaauaguucucauucccuguuu

SEQ ID NO: 840744 - RNA, 24 nt, Human
uaaauaguucucauucccuguuua

SEQ ID NO: 840745 - RNA, 24 nt, Human
uaacaaagaaaaaaacagaaaaaa

SEQ ID NO: 840746 - RNA, 25 nt, Human
uaacaaagaaaaaaacagaaaaaag

SEQ ID NO: 840747 - RNA, 21 nt, Human
uaacagcuguuuuguuuuuua

SEQ ID NO: 840748 - RNA, 27 nt, Human
uaacagcuguuuuguuuuuuaaacaau

SEQ ID NO: 840749 - RNA, 27 nt, Human
uaagacacucagauguucauauuuuag

SEQ ID NO: 840750 - RNA, 27 nt, Human
uaagacacucagauguucauauuuuag

SEQ ID NO: 840751 - RNA, 21 nt, Human
uaaggucaggguaaaguguac

SEQ ID NO: 840752 - RNA, 21 nt, Human
uaaggucaggguaaaguguac

SEQ ID NO: 840753 - RNA, 18 nt, Human
uaaggugaaagaauuaaa

SEQ ID NO: 840754 - RNA, 19 nt, Human
uaauacaaguuagauacaa

SEQ ID NO: 840755 - RNA, 21 nt, Human
uacaacaauuaaucuacaaaa

SEQ ID NO: 840756 - RNA, 21 nt, Human
uacagucuucuauauuugcuu

SEQ ID NO: 840757 - RNA, 19 nt, Human
uaccauauuuaauacucau

SEQ ID NO: 840758 - RNA, 19 nt, Human
uaccauauuuaauacucau

SEQ ID NO: 840759 - RNA, 21 nt, Human
uacuaagcauaccauauuuaa

SEQ ID NO: 840760 - RNA, 21 nt, Human
uacuaagcauaccauauuuaa

SEQ ID NO: 840761 - RNA, 23 nt, Human
uagaauauuauacagaucuccuc

SEQ ID NO: 840762 - RNA, 21 nt, Human
uaggcacuucuacaaagucuc

SEQ ID NO: 840763 - RNA, 18 nt, Human
uagguuuuuaguuaagaa

SEQ ID NO: 840764 - RNA, 18 nt, Human
uaguuaacuaucuuaggu

SEQ ID NO: 840765 - RNA, 18 nt, Human
uaguuaacuaucuuaggu

SEQ ID NO: 840766 - RNA, 20 nt, Human
uaguuaacuaucuuagguug

SEQ ID NO: 840767 - RNA, 20 nt, Human
uaguuaacuaucuuagguug

SEQ ID NO: 840768 - RNA, 25 nt, Human
uauacagaaaaauaguuuuagaucc

SEQ ID NO: 840769 - RNA, 18 nt, Human
uauaguuauggagauaag

SEQ ID NO: 840770 - RNA, 24 nt, Human
uauauaguauauauauguaugugu

SEQ ID NO: 840771 - RNA, 22 nt, Human
uauauauauguauguguauaua

SEQ ID NO: 840772 - RNA, 19 nt, Human
uaucauggcacuccuuggg

SEQ ID NO: 840773 - RNA, 19 nt, Human
uaucauggcacuccuuggg

SEQ ID NO: 840774 - RNA, 19 nt, Human
uaugucccacuuaaagaug

SEQ ID NO: 840775 - RNA, 19 nt, Human
uaugucccacuuaaagaug

SEQ ID NO: 840776 - RNA, 22 nt, Human
uaugucuuuaaacaucacagcu

SEQ ID NO: 840777 - RNA, 22 nt, Human
uaugucuuuaaacaucacagcu

SEQ ID NO: 840778 - RNA, 18 nt, Human
uauguguauauauaauau

SEQ ID NO: 840779 - RNA, 18 nt, Human
uauguguauauauaauau

SEQ ID NO: 840780 - RNA, 21 nt, Human
uauuucagaauuaucugauug

SEQ ID NO: 840781 - RNA, 22 nt, Human
ucaacguccgagucucuugacu

SEQ ID NO: 840782 - RNA, 22 nt, Human
ucaacguccgagucucuugacu

SEQ ID NO: 840783 - RNA, 18 nt, Human
ucaugaaacaaaagaaaa

SEQ ID NO: 840784 - RNA, 25 nt, Human
ucaugaaacaaaagaaaaaaaagaa

SEQ ID NO: 840785 - RNA, 26 nt, Human
uccacaaauuaaaacaaaugcaacga

SEQ ID NO: 840786 - RNA, 24 nt, Human
uccauucaaauuuuagaccugcag

SEQ ID NO: 840787 - RNA, 24 nt, Human
uccauucaaauuuuagaccugcag

SEQ ID NO: 840788 - RNA, 22 nt, Human
uccccaguacuugugcuugaau

SEQ ID NO: 840789 - RNA, 22 nt, Human
uccccaguacuugugcuugaau

SEQ ID NO: 840790 - RNA, 23 nt, Human
ucgaaccugcccuuggaauaugu

SEQ ID NO: 840791 - RNA, 23 nt, Human
ucgaaccugcccuuggaauaugu

SEQ ID NO: 840792 - RNA, 18 nt, Human
ucucaaaagucaaaauac

SEQ ID NO: 840793 - RNA, 21 nt, Human
ucucaaucuugucaagcugga

SEQ ID NO: 840794 - RNA, 21 nt, Human
ucuccaggcaaaccaaacacc

SEQ ID NO: 840795 - RNA, 21 nt, Human
ucuccaggcaaaccaaacacc

SEQ ID NO: 840796 - RNA, 18 nt, Human
ucugauuggcuguggcug

SEQ ID NO: 840797 - RNA, 18 nt, Human
ucuggcagaaccaagugg

SEQ ID NO: 840798 - RNA, 18 nt, Human
ucuggcagaaccaagugg

SEQ ID NO: 840799 - RNA, 25 nt, Human
ucuuagguuggaauauacuaagcau

SEQ ID NO: 840800 - RNA, 19 nt, Human
ugaagcucauaccgugcaa

SEQ ID NO: 840801 - RNA, 20 nt, Human
ugaagugcuguuauauccug

SEQ ID NO: 840802 - RNA, 21 nt, Human
ugaauuaacaaagaaaaaaac

SEQ ID NO: 840803 - RNA, 27 nt, Human
ugaauuaacaaagaaaaaaacagaaaa

SEQ ID NO: 840804 - RNA, 19 nt, Human
ugacuucaauaucauggca

SEQ ID NO: 840805 - RNA, 19 nt, Human
ugacuucaauaucauggca

SEQ ID NO: 840806 - RNA, 18 nt, Human
ugacuucacacaggcacu

SEQ ID NO: 840807 - RNA, 19 nt, Human
ugcuucuuuuauuucauug

SEQ ID NO: 840808 - RNA, 18 nt, Human
uggaaaauaagacacuca

SEQ ID NO: 840809 - RNA, 18 nt, Human
uggaaaauaagacacuca

SEQ ID NO: 840810 - RNA, 20 nt, Human
uggaauauacuaagcauacc

SEQ ID NO: 840811 - RNA, 24 nt, Human
ugguaccauugcuuuuuucaagug

SEQ ID NO: 840812 - RNA, 21 nt, Human
uguacaguaacaauguuuagu

SEQ ID NO: 840813 - RNA, 21 nt, Human
uguacaguaacaauguuuagu

SEQ ID NO: 840814 - RNA, 31 nt, Human
uguacauauauuuguacaucuaugcauuuca

SEQ ID NO: 840815 - RNA, 19 nt, Human
uguacaucuaugcauuugc

SEQ ID NO: 840816 - RNA, 21 nt, Human
uguacuugacagaagaguggg

SEQ ID NO: 840817 - RNA, 21 nt, Human
uguacuugacagaagaguggg

SEQ ID NO: 840818 - RNA, 22 nt, Human
ugucaagaagugaaacauaccc

SEQ ID NO: 840819 - RNA, 22 nt, Human
ugucaagaagugaaacauaccc

SEQ ID NO: 840820 - RNA, 24 nt, Human
ugugaauacaaagaaagcucccaa

SEQ ID NO: 840821 - RNA, 24 nt, Human
ugugaauacaaagaaagcucccaa

SEQ ID NO: 840822 - RNA, 23 nt, Human
uguguauauauaauauguaugua

SEQ ID NO: 840823 - RNA, 20 nt, Human
uguugcugcgaaggggacac

SEQ ID NO: 840824 - RNA, 24 nt, Human
uuaacaaagaaaaaaacagaaaaa

SEQ ID NO: 840825 - RNA, 19 nt, Human
uuaaggugaaagaauuaaa

SEQ ID NO: 840826 - RNA, 18 nt, Human
uuccauguaaauaguucu

SEQ ID NO: 840827 - RNA, 19 nt, Human
uuccucaaacaaauaauga

SEQ ID NO: 840828 - RNA, 22 nt, Human
uugcauauuguaaucacaauuc

SEQ ID NO: 840829 - RNA, 21 nt, Human
uuggaauauacuaagcauacc

SEQ ID NO: 840830 - RNA, 21 nt, Human
uuggcaaagucagacaacuga

SEQ ID NO: 840831 - RNA, 21 nt, Human
uuggcaaagucagacaacuga

SEQ ID NO: 840832 - RNA, 24 nt, Human
uuggcaugggccucucaaucuugu

SEQ ID NO: 840833 - RNA, 18 nt, Human
uugggguuacaggugaug

SEQ ID NO: 840834 - RNA, 20 nt, Human
uugggugagugaacugaaua

SEQ ID NO: 840835 - RNA, 23 nt, Human
uuguugaacugauaucuucaugu

SEQ ID NO: 840836 - RNA, 20 nt, Human
uuuguugaacugauaucuuc

SEQ ID NO: 840837 - RNA, 23 nt, Human
aaacugacuuacuaagaaaacaa

SEQ ID NO: 840838 - RNA, 20 nt, Human
aaagaugacugcccaacuga

SEQ ID NO: 840839 - RNA, 24 nt, Human
aaauggcugaacaaagaaaacuaa

SEQ ID NO: 840840 - RNA, 19 nt, Human
aacagcaaagugguagcaa

SEQ ID NO: 840841 - RNA, 20 nt, Human
aacuucuccuuuguaguguu

SEQ ID NO: 840842 - RNA, 26 nt, Human
aauaaacauuaaacugacuuacuaag

SEQ ID NO: 840843 - RNA, 24 nt, Human
acaaugaauaaguaauucucuaaa

SEQ ID NO: 840844 - RNA, 21 nt, Human
acccuuauucuuuauugcagu

SEQ ID NO: 840845 - RNA, 22 nt, Human
agagagcagauaucccaaccac

SEQ ID NO: 840846 - RNA, 18 nt, Human
aggcgaggcgaggcggcg

SEQ ID NO: 840847 - RNA, 23 nt, Human
aggcgaggcgaggcggcgggaga

SEQ ID NO: 840848 - RNA, 26 nt, Human
agguaucaacaaccacacuauguacc

SEQ ID NO: 840849 - RNA, 26 nt, Human
auaaaaauacugucacaaagaagcac

SEQ ID NO: 840850 - RNA, 19 nt, Human
auugaagaagucuuauuac

SEQ ID NO: 840851 - RNA, 19 nt, Human
caaccacacuauguaccca

SEQ ID NO: 840852 - RNA, 29 nt, Human
caagguaucaacaaccacacuauguaccu

SEQ ID NO: 840853 - RNA, 19 nt, Human
cacagaucauaaacucaga

SEQ ID NO: 840854 - RNA, 24 nt, Human
cacccugcaguuuaacaaagacug

SEQ ID NO: 840855 - RNA, 23 nt, Human
cagugaugaaauaaugagaaaaa

SEQ ID NO: 840856 - RNA, 25 nt, Human
ccaaccaccaacuugaaauggcuga

SEQ ID NO: 840857 - RNA, 21 nt, Human
ccaggcgaggcgaggcggcgg

SEQ ID NO: 840858 - RNA, 21 nt, Human
ccugcagaagccuccuuuguu

SEQ ID NO: 840859 - RNA, 22 nt, Human
gaaauaaaaauacugucacaaa

SEQ ID NO: 840860 - RNA, 22 nt, Human
guguugcuaguauaaaaaaagg

SEQ ID NO: 840861 - RNA, 23 nt, Human
uaaaaaaagguacaaguucaaaa

SEQ ID NO: 840862 - RNA, 23 nt, Human
uaaaauacauuuuuauuaaaugu

SEQ ID NO: 840863 - RNA, 23 nt, Human
uaaaaugaaugucagaaauaaaa

SEQ ID NO: 840864 - RNA, 18 nt, Human
uacagucucuaguaacag

SEQ ID NO: 840865 - RNA, 24 nt, Human
uaggcaaauaauguuuuaaaacug

SEQ ID NO: 840866 - RNA, 20 nt, Human
uauguacccaaauaaaauga

SEQ ID NO: 840867 - RNA, 22 nt, Human
ucaaaagcacacuucucuucca

SEQ ID NO: 840868 - RNA, 24 nt, Human
ucuugaacagcaaagugguagcaa

SEQ ID NO: 840869 - RNA, 27 nt, Human
ugaaauaaugagaaaaauaaacauuaa

SEQ ID NO: 840870 - RNA, 19 nt, Human
ugaugccaucccagagagc

SEQ ID NO: 840871 - RNA, 23 nt, Human
uggaagauguauugaagaagucu

SEQ ID NO: 840872 - RNA, 21 nt, Human
uggcaacauacaaaaguggcc

SEQ ID NO: 840873 - RNA, 18 nt, Human
ugggaagcaaaaucaaug

SEQ ID NO: 840874 - RNA, 19 nt, Human
uuaaaacugaagucuuugc

SEQ ID NO: 840875 - RNA, 18 nt, Human
uucacaaauucuuuacaa

SEQ ID NO: 840876 - RNA, 21 nt, Human
uuucccuccucauaaugugcc

SEQ ID NO: 840877 - RNA, 22 nt, Human
uuuuuuuuuuuuuuuuuuuagg

SEQ ID NO: 840878 - RNA, 20 nt, Human
aaacagcgcccagcuuccuc

SEQ ID NO: 840879 - RNA, 20 nt, Human
aaacagcgcccagcuuccuc

SEQ ID NO: 840880 - RNA, 25 nt, Human
aaagaaaaaacacguucugcaagaa

SEQ ID NO: 840881 - RNA, 24 nt, Human
aaagugcugggauuacaggcguga

SEQ ID NO: 840882 - RNA, 25 nt, Human
aaccauauauacacacauauguaug

SEQ ID NO: 840883 - RNA, 24 nt, Human
aagaaaaaacacguucugcaagaa

SEQ ID NO: 840884 - RNA, 21 nt, Human
aagccagccuuuggggcagga

SEQ ID NO: 840885 - RNA, 19 nt, Human
aagugcugggauuacaggc

SEQ ID NO: 840886 - RNA, 19 nt, Human
aagugcugggauuacaggc

SEQ ID NO: 840887 - RNA, 26 nt, Human
aagugcugggauuacaggcgugagcc

SEQ ID NO: 840888 - RNA, 23 nt, Human
aaguggacggaaacgauaggaag

SEQ ID NO: 840889 - RNA, 21 nt, Human
acacacagacagacacacaca

SEQ ID NO: 840890 - RNA, 23 nt, Human
acagacagacacacacacccgaa

SEQ ID NO: 840891 - RNA, 24 nt, Human
acagacagacacacacacccgaag

SEQ ID NO: 840892 - RNA, 25 nt, Human
acagacagacacacacacccgaagc

SEQ ID NO: 840893 - RNA, 21 nt, Human
acagcgcccagcuuccucacc

SEQ ID NO: 840894 - RNA, 23 nt, Human
acaggcccccagguuccuguggu

SEQ ID NO: 840895 - RNA, 18 nt, Human
acaggguuucaccguguu

SEQ ID NO: 840896 - RNA, 19 nt, Human
acaggguuucaccguguua

SEQ ID NO: 840897 - RNA, 20 nt, Human
acaggguuucaccguguuag

SEQ ID NO: 840898 - RNA, 24 nt, Human
acaggguuucaccguguuagccag

SEQ ID NO: 840899 - RNA, 22 nt, Human
acauagcuccugcuaacagccu

SEQ ID NO: 840900 - RNA, 18 nt, Human
accacaccuggccccggc

SEQ ID NO: 840901 - RNA, 19 nt, Human
accauauauacacacauau

SEQ ID NO: 840902 - RNA, 19 nt, Human
accuggccccggcacguau

SEQ ID NO: 840903 - RNA, 24 nt, Human
acggagucucgcuguguugcccag

SEQ ID NO: 840904 - RNA, 24 nt, Human
acuuugugauccgcccgccucggc

SEQ ID NO: 840905 - RNA, 18 nt, Human
agacagacacacacaccc

SEQ ID NO: 840906 - RNA, 18 nt, Human
agacaggguuucaccgug

SEQ ID NO: 840907 - RNA, 20 nt, Human
agccaccacaccuggccccg

SEQ ID NO: 840908 - RNA, 25 nt, Human
aggcuggagugcaguggcacggucu

SEQ ID NO: 840909 - RNA, 20 nt, Human
aguagagacaggguuucacc

SEQ ID NO: 840910 - RNA, 18 nt, Human
aguagcugggacuauagg

SEQ ID NO: 840911 - RNA, 20 nt, Human
agugcaguggcacggucucg

SEQ ID NO: 840912 - RNA, 23 nt, Human
agugcaguggcacggucucggcu

SEQ ID NO: 840913 - RNA, 24 nt, Human
agugcaguggcacggucucggcuc

SEQ ID NO: 840914 - RNA, 18 nt, Human
agugcugggauuacaggc

SEQ ID NO: 840915 - RNA, 24 nt, Human
caaagugcugggauuacaggcgug

SEQ ID NO: 840916 - RNA, 19 nt, Human
cacacagacagacacacac

SEQ ID NO: 840917 - RNA, 19 nt, Human
cacacagacagacacacac

SEQ ID NO: 840918 - RNA, 18 nt, Human
caccguguuagccaggau

SEQ ID NO: 840919 - RNA, 24 nt, Human
caccguguuagccaggauggucuc

SEQ ID NO: 840920 - RNA, 18 nt, Human
cacugcagcugcuucugg

SEQ ID NO: 840921 - RNA, 21 nt, Human
cagacagacacacacacccga

SEQ ID NO: 840922 - RNA, 23 nt, Human
cagacagacacacacacccgaag

SEQ ID NO: 840923 - RNA, 21 nt, Human
cagcaacacugcagcugcuuc

SEQ ID NO: 840924 - RNA, 20 nt, Human
cagcugcuggcaggagccag

SEQ ID NO: 840925 - RNA, 22 nt, Human
cagcugcuggcaggagccaggu

SEQ ID NO: 840926 - RNA, 24 nt, Human
caggguuucaccguguuagccagg

SEQ ID NO: 840927 - RNA, 22 nt, Human
cauaccauucuccugcuucagc

SEQ ID NO: 840928 - RNA, 21 nt, Human
cauauauacacacauauguau

SEQ ID NO: 840929 - RNA, 30 nt, Human
cauauguaugcauacacacagacagacaca

SEQ ID NO: 840930 - RNA, 21 nt, Human
caugagcaggcgccuggcucc

SEQ ID NO: 840931 - RNA, 18 nt, Human
cauguagaauaaaaaagc

SEQ ID NO: 840932 - RNA, 22 nt, Human
ccaaagugcugggauuacaggc

SEQ ID NO: 840933 - RNA, 22 nt, Human
ccaaagugcugggauuacaggc

SEQ ID NO: 840934 - RNA, 24 nt, Human
ccaaagugcugggauuacaggcgu

SEQ ID NO: 840935 - RNA, 18 nt, Human
ccaccacaccuggccccg

SEQ ID NO: 840936 - RNA, 19 nt, Human
ccagcucagagaggcuacc

SEQ ID NO: 840937 - RNA, 18 nt, Human
ccagcucagcugcuggca

SEQ ID NO: 840938 - RNA, 23 nt, Human
ccaguuccuggcuucugaccaaa

SEQ ID NO: 840939 - RNA, 20 nt, Human
ccaugaaggacaguguagac

SEQ ID NO: 840940 - RNA, 21 nt, Human
cccagguuccugugguaccca

SEQ ID NO: 840941 - RNA, 21 nt, Human
cccccagguuccugugguacc

SEQ ID NO: 840942 - RNA, 20 nt, Human
cccguuuuccaucccuaagu

SEQ ID NO: 840943 - RNA, 21 nt, Human
ccgaagcucuagccaggcccc

SEQ ID NO: 840944 - RNA, 22 nt, Human
ccgcagguacgcgucuuuucuu

SEQ ID NO: 840945 - RNA, 24 nt, Human
ccuccuggauucauaccauucucc

SEQ ID NO: 840946 - RNA, 18 nt, Human
ccugaacucgaaaacagc

SEQ ID NO: 840947 - RNA, 24 nt, Human
ccugcuucagccuuccgaguagcu

SEQ ID NO: 840948 - RNA, 21 nt, Human
cgaaaacagcgcccagcuucc

SEQ ID NO: 840949 - RNA, 19 nt, Human
cgagcaggagggugguggc

SEQ ID NO: 840950 - RNA, 27 nt, Human
cgagcaggagggugguggcagcaacac

SEQ ID NO: 840951 - RNA, 24 nt, Human
cgccucggccucccaaagugcugg

SEQ ID NO: 840952 - RNA, 22 nt, Human
cgcucgggagacuggggcuccu

SEQ ID NO: 840953 - RNA, 24 nt, Human
cgcuguguugcccaggcuggagug

SEQ ID NO: 840954 - RNA, 24 nt, Human
cggagucucgcuguguugcccagg

SEQ ID NO: 840955 - RNA, 22 nt, Human
cucaucuuugucugcuccccgc

SEQ ID NO: 840956 - RNA, 21 nt, Human
cuccuggauucauaccauucu

SEQ ID NO: 840957 - RNA, 22 nt, Human
cucuccggagcgggugugaaca

SEQ ID NO: 840958 - RNA, 19 nt, Human
gaacagcgcacuucaacau

SEQ ID NO: 840959 - RNA, 24 nt, Human
gaccaaagaaaaaaugucacagga

SEQ ID NO: 840960 - RNA, 22 nt, Human
gacuuugugauccgcccgccuc

SEQ ID NO: 840961 - RNA, 24 nt, Human
gacuuugugauccgcccgccucgg

SEQ ID NO: 840962 - RNA, 18 nt, Human
gagcaagugaacacgggg

SEQ ID NO: 840963 - RNA, 18 nt, Human
gagcaggcgccuggcucc

SEQ ID NO: 840964 - RNA, 22 nt, Human
gagccaccacaccuggccccgg

SEQ ID NO: 840965 - RNA, 18 nt, Human
gauuacaggcgugagcca

SEQ ID NO: 840966 - RNA, 21 nt, Human
gauuacaggcgugagccacca

SEQ ID NO: 840967 - RNA, 22 nt, Human
gauuacaggcgugagccaccac

SEQ ID NO: 840968 - RNA, 25 nt, Human
gccuagcuaauuuuuuuuuguauuu

SEQ ID NO: 840969 - RNA, 19 nt, Human
gcuggagugcaguggcacg

SEQ ID NO: 840970 - RNA, 24 nt, Human
ggaaacgauaggaagggacauagc

SEQ ID NO: 840971 - RNA, 23 nt, Human
ggagucucgcuguguugcccagg

SEQ ID NO: 840972 - RNA, 19 nt, Human
ggauuacaggcgugagcca

SEQ ID NO: 840973 - RNA, 20 nt, Human
gggagcaagugaacacgggg

SEQ ID NO: 840974 - RNA, 21 nt, Human
gggagcugggaaugguccagg

SEQ ID NO: 840975 - RNA, 19 nt, Human
guaaagaaaaaacacguuc

SEQ ID NO: 840976 - RNA, 20 nt, Human
gucccuuuggaggcuuuggc

SEQ ID NO: 840977 - RNA, 19 nt, Human
gucuuuucuuuuuuuuucc

SEQ ID NO: 840978 - RNA, 24 nt, Human
gugauccgcccgccucggccuccc

SEQ ID NO: 840979 - RNA, 23 nt, Human
gugguggcagcaacacugcagcu

SEQ ID NO: 840980 - RNA, 27 nt, Human
guuucacaggcccccagguuccugugg

SEQ ID NO: 840981 - RNA, 25 nt, Human
uaaagaaaaaacacguucugcaaga

SEQ ID NO: 840982 - RNA, 28 nt, Human
uaauuuuuuuuuguauuuuuaguagaga

SEQ ID NO: 840983 - RNA, 25 nt, Human
uacacaccugacaaaaccauauaua

SEQ ID NO: 840984 - RNA, 22 nt, Human
uacaggcgugagccaccacacc

SEQ ID NO: 840985 - RNA, 22 nt, Human
uacaggcgugagccaccacacc

SEQ ID NO: 840986 - RNA, 23 nt, Human
uacaggcgugagccaccacaccu

SEQ ID NO: 840987 - RNA, 21 nt, Human
uacccagcucagcugcuggca

SEQ ID NO: 840988 - RNA, 22 nt, Human
uagagacaggguuucaccgugu

SEQ ID NO: 840989 - RNA, 19 nt, Human
uaggugccaaccacuacgc

SEQ ID NO: 840990 - RNA, 21 nt, Human
uaguagagacaggguuucacc

SEQ ID NO: 840991 - RNA, 24 nt, Human
uaguagagacaggguuucaccgug

SEQ ID NO: 840992 - RNA, 26 nt, Human
uaguagagacaggguuucaccguguu

SEQ ID NO: 840993 - RNA, 26 nt, Human
uauauacacacauauguaugcauaca

SEQ ID NO: 840994 - RNA, 21 nt, Human
uauauacauacauauauaaag

SEQ ID NO: 840995 - RNA, 19 nt, Human
uauauauacauacauauau

SEQ ID NO: 840996 - RNA, 21 nt, Human
uauauauauacauacauauag

SEQ ID NO: 840997 - RNA, 23 nt, Human
uauauauauacauacauauauaa

SEQ ID NO: 840998 - RNA, 20 nt, Human
uauauauauauauuuucaua

SEQ ID NO: 840999 - RNA, 26 nt, Human
uauauauuuucauauauauauauaca

SEQ ID NO: 841000 - RNA, 24 nt, Human
ucaccguguuagccaggauggucu

SEQ ID NO: 841001 - RNA, 19 nt, Human
ucacugcaagcuccaccuc

SEQ ID NO: 841002 - RNA, 23 nt, Human
ucacugcaagcuccaccuccugg

SEQ ID NO: 841003 - RNA, 24 nt, Human
ucacugcaagcuccaccuccugga

SEQ ID NO: 841004 - RNA, 23 nt, Human
ucagccuuccgaguagcugggac

SEQ ID NO: 841005 - RNA, 21 nt, Human
ucauaccauucuccugcuuca

SEQ ID NO: 841006 - RNA, 24 nt, Human
ucccaaagugcugggauuacaggc

SEQ ID NO: 841007 - RNA, 21 nt, Human
ucccugaaaagcggcuugcag

SEQ ID NO: 841008 - RNA, 19 nt, Human
uccgaguagcugggacuau

SEQ ID NO: 841009 - RNA, 22 nt, Human
uccgaguagcugggacuauagg

SEQ ID NO: 841010 - RNA, 24 nt, Human
uccgaguagcugggacuauaggug

SEQ ID NO: 841011 - RNA, 23 nt, Human
uccugacuuugugauccgcccgc

SEQ ID NO: 841012 - RNA, 24 nt, Human
uccuggauucauaccauucuccug

SEQ ID NO: 841013 - RNA, 18 nt, Human
ucgaaaacagcgcccagc

SEQ ID NO: 841014 - RNA, 24 nt, Human
ucgcuguguugcccaggcuggagu

SEQ ID NO: 841015 - RNA, 18 nt, Human
ucggccucccaaagugcu

SEQ ID NO: 841016 - RNA, 21 nt, Human
ucuaggguuggggcccugagc

SEQ ID NO: 841017 - RNA, 19 nt, Human
ucuagucccuuuggaggcu

SEQ ID NO: 841018 - RNA, 22 nt, Human
ucucgcuguguugcccaggcug

SEQ ID NO: 841019 - RNA, 23 nt, Human
ucucgcuguguugcccaggcugg

SEQ ID NO: 841020 - RNA, 24 nt, Human
ucucgcuguguugcccaggcugga

SEQ ID NO: 841021 - RNA, 18 nt, Human
ucucugcugccaacugga

SEQ ID NO: 841022 - RNA, 19 nt, Human
ugaaagggggugugcaggu

SEQ ID NO: 841023 - RNA, 20 nt, Human
ugaaagggggugugcaggug

SEQ ID NO: 841024 - RNA, 21 nt, Human
ugaccaaagaaaaaaugucac

SEQ ID NO: 841025 - RNA, 23 nt, Human
ugcaccuggaugguggaagccag

SEQ ID NO: 841026 - RNA, 22 nt, Human
ugcaguggcacggucucggcuc

SEQ ID NO: 841027 - RNA, 24 nt, Human
ugcauacacacagacagacacaca

SEQ ID NO: 841028 - RNA, 30 nt, Human
ugcauacacacagacagacacacacacccu

SEQ ID NO: 841029 - RNA, 18 nt, Human
ugccaggcccuucgugcu

SEQ ID NO: 841030 - RNA, 18 nt, Human
ugcccaggcuggagugca

SEQ ID NO: 841031 - RNA, 21 nt, Human
ugcccaggcuggagugcagug

SEQ ID NO: 841032 - RNA, 22 nt, Human
ugcccaggcuggagugcagugg

SEQ ID NO: 841033 - RNA, 24 nt, Human
ugcccaggcuggagugcaguggca

SEQ ID NO: 841034 - RNA, 22 nt, Human
ugccuuuugguuguaguuucac

SEQ ID NO: 841035 - RNA, 22 nt, Human
ugcugccaacuggaaacgguuu

SEQ ID NO: 841036 - RNA, 24 nt, Human
ugcugggauuacaggcgugagcca

SEQ ID NO: 841037 - RNA, 18 nt, Human
uggagugcaguggcacgg

SEQ ID NO: 841038 - RNA, 23 nt, Human
uggagugcaguggcacggucucg

SEQ ID NO: 841039 - RNA, 24 nt, Human
uggagugcaguggcacggucucgg

SEQ ID NO: 841040 - RNA, 22 nt, Human
ugggacuauaggugccaaccac

SEQ ID NO: 841041 - RNA, 22 nt, Human
ugggacuauaggugccaaccac

SEQ ID NO: 841042 - RNA, 18 nt, Human
ugggauuacaggcgugag

SEQ ID NO: 841043 - RNA, 19 nt, Human
ugggauuacaggcgugagc

SEQ ID NO: 841044 - RNA, 22 nt, Human
ugggauuacaggcgugagccac

SEQ ID NO: 841045 - RNA, 23 nt, Human
ugggauuacaggcgugagccacc

SEQ ID NO: 841046 - RNA, 24 nt, Human
ugggauuacaggcgugagccacca

SEQ ID NO: 841047 - RNA, 20 nt, Human
ugguggaagccagccuuugg

SEQ ID NO: 841048 - RNA, 18 nt, Human
ugucacaggagacuuuga

SEQ ID NO: 841049 - RNA, 18 nt, Human
uguguugcccaggcugga

SEQ ID NO: 841050 - RNA, 22 nt, Human
uguguugcccaggcuggagugc

SEQ ID NO: 841051 - RNA, 21 nt, Human
uguugcccaggcuggagugca

SEQ ID NO: 841052 - RNA, 19 nt, Human
uuacacaccugacaaaacc

SEQ ID NO: 841053 - RNA, 22 nt, Human
uuaguagagacaggguuucacc

SEQ ID NO: 841054 - RNA, 24 nt, Human
uuaguagagacaggguuucaccgu

SEQ ID NO: 841055 - RNA, 19 nt, Human
uucacaggcccccagguuc

SEQ ID NO: 841056 - RNA, 22 nt, Human
uucacaggcccccagguuccug

SEQ ID NO: 841057 - RNA, 24 nt, Human
uucagccuuccgaguagcugggac

SEQ ID NO: 841058 - RNA, 24 nt, Human
uugcccaggcuggagugcaguggc

SEQ ID NO: 841059 - RNA, 19 nt, Human
uuucaccguguuagccagg

SEQ ID NO: 841060 - RNA, 18 nt, Human
uuucauauauauauauau

SEQ ID NO: 841061 - RNA, 19 nt, Human
uuugcugcugaaaaguagg

SEQ ID NO: 841062 - RNA, 24 nt, Human
uuuuuaguagagacaggguuucac

SEQ ID NO: 841063 - RNA, 21 nt, Human
uuuuuguauuuuuaguagaga

SEQ ID NO: 841064 - RNA, 21 nt, Human
uuuuuuguauuuuuaguagag

SEQ ID NO: 841065 - RNA, 24 nt, Human
uuuuuuguauuuuuaguagagaca

SEQ ID NO: 841066 - RNA, 19 nt, Human
aaccccucucugauccucu

SEQ ID NO: 841067 - RNA, 20 nt, Human
aaugugccccaacaugccaa

SEQ ID NO: 841068 - RNA, 26 nt, Human
accugagucuuucuucauugccuggc

SEQ ID NO: 841069 - RNA, 24 nt, Human
cacccaugugcaccagcuucccuc

SEQ ID NO: 841070 - RNA, 22 nt, Human
cagugcccucugaaugcuucuc

SEQ ID NO: 841071 - RNA, 22 nt, Human
ccacaccccaucaggcccugga

SEQ ID NO: 841072 - RNA, 23 nt, Human
ccucacgccaaaugugccccaac

SEQ ID NO: 841073 - RNA, 19 nt, Human
ccugagucccgggacacuc

SEQ ID NO: 841074 - RNA, 22 nt, Human
cugagucccgggacacucuguu

SEQ ID NO: 841075 - RNA, 19 nt, Human
cuggacacccaugugcacc

SEQ ID NO: 841076 - RNA, 20 nt, Human
gacacccaugugcaccagcu

SEQ ID NO: 841077 - RNA, 24 nt, Human
ucaaccccucucugauccucuggg

SEQ ID NO: 841078 - RNA, 20 nt, Human
uccagaagccagugcccucu

SEQ ID NO: 841079 - RNA, 20 nt, Human
ucccgggacacucuguuggg

SEQ ID NO: 841080 - RNA, 18 nt, Human
ucucugauccucuggggg

SEQ ID NO: 841081 - RNA, 19 nt, Human
ucuggcauguccagacaug

SEQ ID NO: 841082 - RNA, 20 nt, Human
ugacaugccacagcugucug

SEQ ID NO: 841083 - RNA, 20 nt, Human
ugagucccgggacacucugu

SEQ ID NO: 841084 - RNA, 23 nt, Human
ugcaccagcuucccucacgccaa

SEQ ID NO: 841085 - RNA, 21 nt, Human
ugcccucugaaugcuucuccu

SEQ ID NO: 841086 - RNA, 24 nt, Human
ugccuggccacaccccaucaggcc

SEQ ID NO: 841087 - RNA, 20 nt, Human
augauggaagcagugaagga

SEQ ID NO: 841088 - RNA, 21 nt, Human
cuuuaacugugaacuuuuaca

SEQ ID NO: 841089 - RNA, 24 nt, Human
uaggcuuuuucaggucaauuaauu

SEQ ID NO: 841090 - RNA, 22 nt, Human
uauguauuuauauauguauaua

SEQ ID NO: 841091 - RNA, 23 nt, Human
ucuguaauucagucuuuaacugu

SEQ ID NO: 841092 - RNA, 23 nt, Human
uggaagcagugaaggacucaaug

SEQ ID NO: 841093 - RNA, 22 nt, Human
uuuuuuuuuuuuuugaagagga

SEQ ID NO: 841094 - RNA, 18 nt, Human
uuuuuuuuuuuuuuuuug

SEQ ID NO: 841095 - RNA, 24 nt, Human
aaaaaauccuaaaacuuguaaaag

SEQ ID NO: 841096 - RNA, 23 nt, Human
aaacagaagaguuuuuuuccagu

SEQ ID NO: 841097 - RNA, 27 nt, Human
aaacgucauccauacaauaaagaacuc

SEQ ID NO: 841098 - RNA, 18 nt, Human
aaagagaccccgugcccc

SEQ ID NO: 841099 - RNA, 18 nt, Human
aaguaccacaaaaaaugg

SEQ ID NO: 841100 - RNA, 20 nt, Human
aagugccuuuauggggaggg

SEQ ID NO: 841101 - RNA, 22 nt, Human
acccagcccuccuugccagugg

SEQ ID NO: 841102 - RNA, 19 nt, Human
acgccaccgcagccccaga

SEQ ID NO: 841103 - RNA, 22 nt, Human
acucaagguggucaccaggugg

SEQ ID NO: 841104 - RNA, 27 nt, Human
agagcccccccaaagucacuuaguggu

SEQ ID NO: 841105 - RNA, 22 nt, Human
agagcccccccaaagucacuuu

SEQ ID NO: 841106 - RNA, 21 nt, Human
aggcaggggcagggcucucug

SEQ ID NO: 841107 - RNA, 19 nt, Human
aggcggcccucccagcagc

SEQ ID NO: 841108 - RNA, 19 nt, Human
aggcggggacgggcuucgg

SEQ ID NO: 841109 - RNA, 26 nt, Human
agggcuucaaaaguuuugaacagaau

SEQ ID NO: 841110 - RNA, 19 nt, Human
caaaguaccacaaaaaaug

SEQ ID NO: 841111 - RNA, 21 nt, Human
caagaaguugguaaaacagaa

SEQ ID NO: 841112 - RNA, 19 nt, Human
cacacccugcagaaacugc

SEQ ID NO: 841113 - RNA, 21 nt, Human
cacccugcagaaacugcaucu

SEQ ID NO: 841114 - RNA, 20 nt, Human
cacgccacacccugcagaaa

SEQ ID NO: 841115 - RNA, 18 nt, Human
cacggccaggcgcucugg

SEQ ID NO: 841116 - RNA, 19 nt, Human
cacugugcuggggcuggga

SEQ ID NO: 841117 - RNA, 18 nt, Human
caucagggacaucgcggg

SEQ ID NO: 841118 - RNA, 31 nt, Human
ccacaaaaaauggccacgggauugauccccc

SEQ ID NO: 841119 - RNA, 19 nt, Human
ccaccugugaccagggagc

SEQ ID NO: 841120 - RNA, 23 nt, Human
ccacgccaccgcagccccagaca

SEQ ID NO: 841121 - RNA, 24 nt, Human
cccacgccaccgcagccccagaca

SEQ ID NO: 841122 - RNA, 21 nt, Human
ccccgugccccgcucuccuca

SEQ ID NO: 841123 - RNA, 24 nt, Human
ccgcgcccuccccacgccaccgca

SEQ ID NO: 841124 - RNA, 23 nt, Human
ccgcugcccggcgccugccgccc

SEQ ID NO: 841125 - RNA, 25 nt, Human
ccgcugcccggcgccugccgcccgg

SEQ ID NO: 841126 - RNA, 19 nt, Human
ccggcacccagcccuccuu

SEQ ID NO: 841127 - RNA, 23 nt, Human
ccuccacuucuccggaagcagcu

SEQ ID NO: 841128 - RNA, 21 nt, Human
ccucgcccgggcccuuggcag

SEQ ID NO: 841129 - RNA, 20 nt, Human
ccucgcccgggcccuuggcc

SEQ ID NO: 841130 - RNA, 18 nt, Human
ccugccgcccggggcugu

SEQ ID NO: 841131 - RNA, 18 nt, Human
ccugccgcccggggcugu

SEQ ID NO: 841132 - RNA, 23 nt, Human
cgacgagacggaggcaccgcgcc

SEQ ID NO: 841133 - RNA, 20 nt, Human
cgagccggacggacaggcug

SEQ ID NO: 841134 - RNA, 26 nt, Human
cgagccggacggacaggcugcuggcc

SEQ ID NO: 841135 - RNA, 22 nt, Human
cgagccggacgggccgagccgg

SEQ ID NO: 841136 - RNA, 20 nt, Human
cgaggccgcgcuaccccugc

SEQ ID NO: 841137 - RNA, 19 nt, Human
cgcccgggcccuuggcagc

SEQ ID NO: 841138 - RNA, 21 nt, Human
cggccccuccucugugggcuc

SEQ ID NO: 841139 - RNA, 18 nt, Human
cggggcguccgggggccg

SEQ ID NO: 841140 - RNA, 18 nt, Human
cgucacgggugggcucgg

SEQ ID NO: 841141 - RNA, 23 nt, Human
cgugcggggcaguccggggcuga

SEQ ID NO: 841142 - RNA, 21 nt, Human
cuaaagagaccccgugccccg

SEQ ID NO: 841143 - RNA, 24 nt, Human
cuccccacgccaccgcagccccag

SEQ ID NO: 841144 - RNA, 26 nt, Human
cucuccccacuuucacuucuguacuc

SEQ ID NO: 841145 - RNA, 21 nt, Human
cucugccccggagggguccuc

SEQ ID NO: 841146 - RNA, 21 nt, Human
cugaaagcaccguccagaggc

SEQ ID NO: 841147 - RNA, 21 nt, Human
cugcagcuggacgaguugcuc

SEQ ID NO: 841148 - RNA, 23 nt, Human
cuuggcuucuaacugcuuuuggu

SEQ ID NO: 841149 - RNA, 23 nt, Human
gaaaaaauccuaaaacuuguaaa

SEQ ID NO: 841150 - RNA, 19 nt, Human
gaccccgugccccgcucuc

SEQ ID NO: 841151 - RNA, 21 nt, Human
gagacaccaccugaugucacc

SEQ ID NO: 841152 - RNA, 22 nt, Human
gagacaccaccugaugucaccc

SEQ ID NO: 841153 - RNA, 20 nt, Human
gagggguccucugcagcccg

SEQ ID NO: 841154 - RNA, 18 nt, Human
gcacaguacaucagggac

SEQ ID NO: 841155 - RNA, 22 nt, Human
gcaggggcagggcucucugagc

SEQ ID NO: 841156 - RNA, 24 nt, Human
gcaggggcagggcucucugagcua

SEQ ID NO: 841157 - RNA, 25 nt, Human
gccccagacagcgcgcgggucuccg

SEQ ID NO: 841158 - RNA, 22 nt, Human
gcggggagaucaggcggggacg

SEQ ID NO: 841159 - RNA, 18 nt, Human
gcuguucccugcggcccc

SEQ ID NO: 841160 - RNA, 21 nt, Human
ggccagugacggcuacaagcc

SEQ ID NO: 841161 - RNA, 23 nt, Human
ggccguuggccagaggauccucc

SEQ ID NO: 841162 - RNA, 21 nt, Human
gggaaccgugaggcugugagg

SEQ ID NO: 841163 - RNA, 18 nt, Human
gggcagggcucucugagc

SEQ ID NO: 841164 - RNA, 19 nt, Human
gggcagggcucucugagcu

SEQ ID NO: 841165 - RNA, 19 nt, Human
gggcaguccggggcugagc

SEQ ID NO: 841166 - RNA, 21 nt, Human
gggccgagccggacgggccga

SEQ ID NO: 841167 - RNA, 23 nt, Human
ggggagaucaggcggggacgggc

SEQ ID NO: 841168 - RNA, 21 nt, Human
ggggcggugaggugccccuuc

SEQ ID NO: 841169 - RNA, 26 nt, Human
gggugggaggcagggggcgcgugggg

SEQ ID NO: 841170 - RNA, 21 nt, Human
ggugcggccuccgaggaggcu

SEQ ID NO: 841171 - RNA, 23 nt, Human
ggugcggccuccgaggaggcugc

SEQ ID NO: 841172 - RNA, 24 nt, Human
guaaagugccuuuauggggagggu

SEQ ID NO: 841173 - RNA, 24 nt, Human
guggaccugggugggaggcagggg

SEQ ID NO: 841174 - RNA, 23 nt, Human
guggcagguggaccuggguggga

SEQ ID NO: 841175 - RNA, 22 nt, Human
uaaaagcaauaaaaauauccua

SEQ ID NO: 841176 - RNA, 23 nt, Human
uaaauuuucuuuugaaaaugaac

SEQ ID NO: 841177 - RNA, 22 nt, Human
uacacacauggucagaggugca

SEQ ID NO: 841178 - RNA, 21 nt, Human
uacaucagcaguuaaaaaaaa

SEQ ID NO: 841179 - RNA, 22 nt, Human
uaccacaaaaaauggccacggg

SEQ ID NO: 841180 - RNA, 23 nt, Human
uaccacaaaaaauggccacggga

SEQ ID NO: 841181 - RNA, 21 nt, Human
uauggggagggucacacaagg

SEQ ID NO: 841182 - RNA, 23 nt, Human
uauggggagggucacacaagggc

SEQ ID NO: 841183 - RNA, 30 nt, Human
uauguacacacauggucagaggugcacaca

SEQ ID NO: 841184 - RNA, 19 nt, Human
ucaccagguggcaggugga

SEQ ID NO: 841185 - RNA, 21 nt, Human
ucacuucuguacucaaggugg

SEQ ID NO: 841186 - RNA, 22 nt, Human
uccagaggcagaagcagcacgg

SEQ ID NO: 841187 - RNA, 23 nt, Human
uccccacgccaccgcagccccag

SEQ ID NO: 841188 - RNA, 26 nt, Human
uccguggaaccugccucugccccgga

SEQ ID NO: 841189 - RNA, 23 nt, Human
uccuaaaacuuguaaaagcuaaa

SEQ ID NO: 841190 - RNA, 21 nt, Human
ucggcucugccgggcacacac

SEQ ID NO: 841191 - RNA, 24 nt, Human
ucuccccacuuucacuucuguacu

SEQ ID NO: 841192 - RNA, 22 nt, Human
ucugagcuauggucggcagcac

SEQ ID NO: 841193 - RNA, 21 nt, Human
ucuuuugaaaaugaacccuag

SEQ ID NO: 841194 - RNA, 18 nt, Human
ugaaacacaagaaguugg

SEQ ID NO: 841195 - RNA, 18 nt, Human
ugaaacaugaagcuguaa

SEQ ID NO: 841196 - RNA, 20 nt, Human
ugacggcuacaagccgcugg

SEQ ID NO: 841197 - RNA, 19 nt, Human
ugaggccaaaguaccacaa

SEQ ID NO: 841198 - RNA, 23 nt, Human
ugaggccaaaguaccacaaaaaa

SEQ ID NO: 841199 - RNA, 22 nt, Human
ugaucccugcuugaaaaaaucc

SEQ ID NO: 841200 - RNA, 21 nt, Human
ugcacacauacaaaaacaucu

SEQ ID NO: 841201 - RNA, 24 nt, Human
ugcacacauacaaaaacaucugca

SEQ ID NO: 841202 - RNA, 18 nt, Human
ugccccgcucuccucagg

SEQ ID NO: 841203 - RNA, 21 nt, Human
ugccgggcacacacggggcag

SEQ ID NO: 841204 - RNA, 18 nt, Human
uggacgaguugcucagca

SEQ ID NO: 841205 - RNA, 21 nt, Human
ugggaggcagggggcgcgugg

SEQ ID NO: 841206 - RNA, 21 nt, Human
ugggccuuaccugagcugcuc

SEQ ID NO: 841207 - RNA, 25 nt, Human
uggggcugggaaccgugaggcugug

SEQ ID NO: 841208 - RNA, 22 nt, Human
uuaaaaaaaagugacaguggau

SEQ ID NO: 841209 - RNA, 23 nt, Human
uuaccugagcugcucaggcacug

SEQ ID NO: 841210 - RNA, 24 nt, Human
uuuaaaauuccauuuacaucagca

SEQ ID NO: 841211 - RNA, 23 nt, Human
uuuauggggagggucacacaagg

SEQ ID NO: 841212 - RNA, 21 nt, Human
uuuuccaguucugcugugacu

SEQ ID NO: 841213 - RNA, 28 nt, Human
aacacagagccgcgccaacucucugacg

SEQ ID NO: 841214 - RNA, 23 nt, Human
agaccugaagcggcggaccgaga

SEQ ID NO: 841215 - RNA, 18 nt, Human
agagaauaauggugaaaa

SEQ ID NO: 841216 - RNA, 24 nt, Human
agaggcgggaacacaaccugcagg

SEQ ID NO: 841217 - RNA, 23 nt, Human
aucauuggagagaauaaugguga

SEQ ID NO: 841218 - RNA, 23 nt, Human
cacuagguuuggucaacacagag

SEQ ID NO: 841219 - RNA, 23 nt, Human
cccgggucugagacugagagagc

SEQ ID NO: 841220 - RNA, 23 nt, Human
gaauggaggcgggguagaggcgg

SEQ ID NO: 841221 - RNA, 21 nt, Human
gacggcgccaagaccugaagc

SEQ ID NO: 841222 - RNA, 23 nt, Human
gagaauaauggugaaaaccauuc

SEQ ID NO: 841223 - RNA, 21 nt, Human
gcgccaagaccugaagcggcg

SEQ ID NO: 841224 - RNA, 21 nt, Human
gggcagaaggcagcugcaggg

SEQ ID NO: 841225 - RNA, 22 nt, Human
guguuguuccaaguugaaccag

SEQ ID NO: 841226 - RNA, 19 nt, Human
uaacaucaguagccaaaaa

SEQ ID NO: 841227 - RNA, 22 nt, Human
ucaguagccaaaaaccuggggc

SEQ ID NO: 841228 - RNA, 19 nt, Human
ucauuggagagaauaaugg

SEQ ID NO: 841229 - RNA, 20 nt, Human
ugcuccaauauuuuauuguu

SEQ ID NO: 841230 - RNA, 23 nt, Human
ugcuccaauauuuuauuguuugu

SEQ ID NO: 841231 - RNA, 18 nt, Human
uggaggcgggguagaggc

SEQ ID NO: 841232 - RNA, 18 nt, Human
uggggcagaaggcagcug

SEQ ID NO: 841233 - RNA, 23 nt, Human
uuaagagucuccaucuucuuggg

SEQ ID NO: 841234 - RNA, 19 nt, Human
uucaacucuaugcuccaau

SEQ ID NO: 841235 - RNA, 21 nt, Human
uucuuugcuuaagagucucca

SEQ ID NO: 841236 - RNA, 21 nt, Human
uuuuuuuuuuuuuuuuuuaag

SEQ ID NO: 841237 - RNA, 19 nt, Human
acucaaggcgccgcggcag

SEQ ID NO: 841238 - RNA, 20 nt, Human
acuccgaaaggagccaaggg

SEQ ID NO: 841239 - RNA, 21 nt, Human
agacucaaggcgccgcggcag

SEQ ID NO: 841240 - RNA, 20 nt, Human
agauaauaaaaagcaagacu

SEQ ID NO: 841241 - RNA, 21 nt, Human
agcuguaaugccugagggugg

SEQ ID NO: 841242 - RNA, 18 nt, Human
aucacacucacaggcgca

SEQ ID NO: 841243 - RNA, 18 nt, Human
aucagaugacugcccagu

SEQ ID NO: 841244 - RNA, 19 nt, Human
cacuccgaaaggagccaag

SEQ ID NO: 841245 - RNA, 19 nt, Human
ccguagggacaaacuaguu

SEQ ID NO: 841246 - RNA, 18 nt, Human
cugcccaguaagcucgga

SEQ ID NO: 841247 - RNA, 20 nt, Human
cuuuaaaagauaauaaaaag

SEQ ID NO: 841248 - RNA, 22 nt, Human
cuuuuuuuuuuuucgaaguccc

SEQ ID NO: 841249 - RNA, 21 nt, Human
ggcccggagacucaaggcgcc

SEQ ID NO: 841250 - RNA, 24 nt, Human
uacccuucucacccgagcugggua

SEQ ID NO: 841251 - RNA, 25 nt, Human
uagcgcgguuucuucucgcagaucc

SEQ ID NO: 841252 - RNA, 19 nt, Human
uccauauagaaaauuaaga

SEQ ID NO: 841253 - RNA, 22 nt, Human
uccauauagaaaauuaagaaga

SEQ ID NO: 841254 - RNA, 23 nt, Human
ucccggaagauacccuucucacc

SEQ ID NO: 841255 - RNA, 20 nt, Human
ucccgugcaagcacgggguu

SEQ ID NO: 841256 - RNA, 20 nt, Human
uccgaaaggagccaagggca

SEQ ID NO: 841257 - RNA, 19 nt, Human
ugagggugggcuugccuga

SEQ ID NO: 841258 - RNA, 24 nt, Human
ugagggugggcuugccugagcuuu

SEQ ID NO: 841259 - RNA, 22 nt, Human
uuaaaggcgagguucccggaaa

SEQ ID NO: 841260 - RNA, 20 nt, Human
uucgaaguccccucuuuuuu

SEQ ID NO: 841261 - RNA, 20 nt, Human
aaaaaaguaaaauuucaaaa

SEQ ID NO: 841262 - RNA, 22 nt, Human
aaacaagucuuaucucaucuca

SEQ ID NO: 841263 - RNA, 22 nt, Human
aaacacccgauguguucaauuu

SEQ ID NO: 841264 - RNA, 22 nt, Human
aaaccccaucucuacuaaaaaa

SEQ ID NO: 841265 - RNA, 19 nt, Human
aacauggugaaaccccauc

SEQ ID NO: 841266 - RNA, 20 nt, Human
aacauggugaaaccccaucu

SEQ ID NO: 841267 - RNA, 21 nt, Human
aacauggugaaaccccaucuc

SEQ ID NO: 841268 - RNA, 21 nt, Human
aacauggugaaaccccaucuc

SEQ ID NO: 841269 - RNA, 24 nt, Human
aaucucuugaaccugggaggugga

SEQ ID NO: 841270 - RNA, 23 nt, Human
aauggcucaugccuguaauccca

SEQ ID NO: 841271 - RNA, 24 nt, Human
aauggcucaugccuguaaucccag

SEQ ID NO: 841272 - RNA, 24 nt, Human
accaacauggugaaaccccaucuc

SEQ ID NO: 841273 - RNA, 25 nt, Human
accccaucucuacuaaaaaauacaa

SEQ ID NO: 841274 - RNA, 18 nt, Human
accucacuccagccuggg

SEQ ID NO: 841275 - RNA, 24 nt, Human
accucacuccagccugggugacag

SEQ ID NO: 841276 - RNA, 24 nt, Human
acuugaggucaggaguucgagacc

SEQ ID NO: 841277 - RNA, 24 nt, Human
agacugaggcaggagaaucucuug

SEQ ID NO: 841278 - RNA, 24 nt, Human
agcacuuugggaggccgacaaggg

SEQ ID NO: 841279 - RNA, 18 nt, Human
agccaggcauggugaugc

SEQ ID NO: 841280 - RNA, 24 nt, Human
agccugaccaacauggugaaaccc

SEQ ID NO: 841281 - RNA, 22 nt, Human
agccugggugacagagcaaaac

SEQ ID NO: 841282 - RNA, 24 nt, Human
agccugggugacagagcaaaacuc

SEQ ID NO: 841283 - RNA, 22 nt, Human
aggcaggagaaucucuugaacc

SEQ ID NO: 841284 - RNA, 24 nt, Human
aggcaggagaaucucuugaaccug

SEQ ID NO: 841285 - RNA, 22 nt, Human
aggcugggcacaauggcucaug

SEQ ID NO: 841286 - RNA, 21 nt, Human
aggguccgggauccccugccu

SEQ ID NO: 841287 - RNA, 24 nt, Human
agguggagguugcagugagccgag

SEQ ID NO: 841288 - RNA, 21 nt, Human
aguugcaugucgccuugcuag

SEQ ID NO: 841289 - RNA, 24 nt, Human
aucucaucucuuuucugauaacaa

SEQ ID NO: 841290 - RNA, 19 nt, Human
augccuguaaucccagcac

SEQ ID NO: 841291 - RNA, 24 nt, Human
auuguaccaccucacuccagccug

SEQ ID NO: 841292 - RNA, 21 nt, Human
caaaaaagcuucacaauauaa

SEQ ID NO: 841293 - RNA, 27 nt, Human
caaaacucucaaaaaaaaguaaaauuu

SEQ ID NO: 841294 - RNA, 24 nt, Human
caacauggugaaaccccaucucua

SEQ ID NO: 841295 - RNA, 19 nt, Human
cacaucuguaauccuagcu

SEQ ID NO: 841296 - RNA, 24 nt, Human
caccucacuccagccugggugaca

SEQ ID NO: 841297 - RNA, 22 nt, Human
cacuccagccugggugacagag

SEQ ID NO: 841298 - RNA, 23 nt, Human
cacuccagccugggugacagagc

SEQ ID NO: 841299 - RNA, 23 nt, Human
cacuugaggucaggaguucgaga

SEQ ID NO: 841300 - RNA, 28 nt, Human
cagcacuuugggaggccgacaagggcgg

SEQ ID NO: 841301 - RNA, 24 nt, Human
caucuguaauccuagcuacucggg

SEQ ID NO: 841302 - RNA, 20 nt, Human
caugccuguaaucccagcac

SEQ ID NO: 841303 - RNA, 24 nt, Human
caugccuguaaucccagcacuuug

SEQ ID NO: 841304 - RNA, 21 nt, Human
ccaccucacuccagccugggu

SEQ ID NO: 841305 - RNA, 23 nt, Human
ccaccucacuccagccuggguga

SEQ ID NO: 841306 - RNA, 24 nt, Human
ccaccucacuccagccugggugac

SEQ ID NO: 841307 - RNA, 18 nt, Human
cccaggccggccgcagaa

SEQ ID NO: 841308 - RNA, 19 nt, Human
ccccaaauggauauaaagc

SEQ ID NO: 841309 - RNA, 21 nt, Human
ccccaaauggauauaaagcuc

SEQ ID NO: 841310 - RNA, 24 nt, Human
ccugaccaacauggugaaacccca

SEQ ID NO: 841311 - RNA, 21 nt, Human
ccugggagguggagguugcag

SEQ ID NO: 841312 - RNA, 22 nt, Human
ccugggugacagagcaaaacuc

SEQ ID NO: 841313 - RNA, 24 nt, Human
cgacaagggcgggucacuugaggu

SEQ ID NO: 841314 - RNA, 24 nt, Human
cgagaccagccugaccaacauggu

SEQ ID NO: 841315 - RNA, 21 nt, Human
cgauguguucaauuugcuuuc

SEQ ID NO: 841316 - RNA, 20 nt, Human
cgcacagcuugccgccgccc

SEQ ID NO: 841317 - RNA, 21 nt, Human
cgggauccccugccugccucu

SEQ ID NO: 841318 - RNA, 22 nt, Human
cgggauccccugccugccucuc

SEQ ID NO: 841319 - RNA, 24 nt, Human
cgggucacuugaggucaggaguuc

SEQ ID NO: 841320 - RNA, 19 nt, Human
cuacuaaaaaauacaaaaa

SEQ ID NO: 841321 - RNA, 24 nt, Human
cucaugccuguaaucccagcacuu

SEQ ID NO: 841322 - RNA, 21 nt, Human
cucuacuaaaaaauacaaaaa

SEQ ID NO: 841323 - RNA, 23 nt, Human
cucucaaaaaaaaguaaaauuuc

SEQ ID NO: 841324 - RNA, 21 nt, Human
cugcccaggccggccgcagaa

SEQ ID NO: 841325 - RNA, 18 nt, Human
cuguaauccuagcuacuc

SEQ ID NO: 841326 - RNA, 21 nt, Human
cuguaauccuagcuacucggg

SEQ ID NO: 841327 - RNA, 23 nt, Human
cuucacaauauaaaccuuaauuu

SEQ ID NO: 841328 - RNA, 21 nt, Human
cuugaaccugggagguggagg

SEQ ID NO: 841329 - RNA, 21 nt, Human
gagguugcagugagccgagau

SEQ ID NO: 841330 - RNA, 23 nt, Human
gagguugcagugagccgagauug

SEQ ID NO: 841331 - RNA, 22 nt, Human
ggagguugcagugagccgagau

SEQ ID NO: 841332 - RNA, 24 nt, Human
ggagguugcagugagccgagauug

SEQ ID NO: 841333 - RNA, 23 nt, Human
ggcacaauggcucaugccuguaa

SEQ ID NO: 841334 - RNA, 23 nt, Human
ggcugggcacaauggcucaugcc

SEQ ID NO: 841335 - RNA, 22 nt, Human
gggucacuugaggucaggaguu

SEQ ID NO: 841336 - RNA, 23 nt, Human
gggucacuugaggucaggaguuc

SEQ ID NO: 841337 - RNA, 24 nt, Human
ggucacuugaggucaggaguucga

SEQ ID NO: 841338 - RNA, 24 nt, Human
ggugaugcacaucuguaauccuag

SEQ ID NO: 841339 - RNA, 24 nt, Human
gucacuugaggucaggaguucgag

SEQ ID NO: 841340 - RNA, 22 nt, Human
gucgcacagcuugccgccgccc

SEQ ID NO: 841341 - RNA, 19 nt, Human
guugcagugagccgagauu

SEQ ID NO: 841342 - RNA, 18 nt, Human
uauaaagcucgaaggaga

SEQ ID NO: 841343 - RNA, 24 nt, Human
ucaaaguagacuucauccccaaau

SEQ ID NO: 841344 - RNA, 22 nt, Human
ucacuugaggucaggaguucga

SEQ ID NO: 841345 - RNA, 22 nt, Human
ucaucauucaacaacaguugca

SEQ ID NO: 841346 - RNA, 27 nt, Human
ucaucucaucucuuuucugauaacaaa

SEQ ID NO: 841347 - RNA, 22 nt, Human
ucaugccuguaaucccagcacu

SEQ ID NO: 841348 - RNA, 18 nt, Human
uccagccugggugacaga

SEQ ID NO: 841349 - RNA, 22 nt, Human
ucucuacuaaaaaauacaaaaa

SEQ ID NO: 841350 - RNA, 22 nt, Human
ucucuugaaccugggaggugga

SEQ ID NO: 841351 - RNA, 24 nt, Human
ucucuugaaccugggagguggagg

SEQ ID NO: 841352 - RNA, 19 nt, Human
ugaaaccccaucucuacua

SEQ ID NO: 841353 - RNA, 24 nt, Human
ugaaccugggagguggagguugca

SEQ ID NO: 841354 - RNA, 26 nt, Human
ugacagagcaaaacucucaaaaaaaa

SEQ ID NO: 841355 - RNA, 24 nt, Human
ugaccaacauggugaaaccccauc

SEQ ID NO: 841356 - RNA, 19 nt, Human
ugagccgagauuguaccac

SEQ ID NO: 841357 - RNA, 20 nt, Human
ugaggcaggagaaucucuug

SEQ ID NO: 841358 - RNA, 24 nt, Human
ugaggcaggagaaucucuugaacc

SEQ ID NO: 841359 - RNA, 25 nt, Human
ugaggcaggagaaucucuugaaccu

SEQ ID NO: 841360 - RNA, 19 nt, Human
ugaugcacaucuguaaucc

SEQ ID NO: 841361 - RNA, 23 nt, Human
ugccuguaaucccagcacuuugg

SEQ ID NO: 841362 - RNA, 24 nt, Human
ugccuguaaucccagcacuuuggg

SEQ ID NO: 841363 - RNA, 24 nt, Human
uggcucaugccuguaaucccagca

SEQ ID NO: 841364 - RNA, 26 nt, Human
ugggaggccgacaagggcgggucacc

SEQ ID NO: 841365 - RNA, 18 nt, Human
ugggagguggagguugca

SEQ ID NO: 841366 - RNA, 29 nt, Human
ugggagguggagguugcagugacaacggu

SEQ ID NO: 841367 - RNA, 24 nt, Human
ugggagguggagguugcagugagc

SEQ ID NO: 841368 - RNA, 22 nt, Human
uggugaugcacaucuguaaucc

SEQ ID NO: 841369 - RNA, 18 nt, Human
uguguucaauuugcuuuc

SEQ ID NO: 841370 - RNA, 20 nt, Human
uuagccaggcauggugaugc

SEQ ID NO: 841371 - RNA, 24 nt, Human
uugaaccugggagguggagguugc

SEQ ID NO: 841372 - RNA, 18 nt, Human
uugcagugagccgagauu

SEQ ID NO: 841373 - RNA, 19 nt, Human
uugcagugagccgagauug

SEQ ID NO: 841374 - RNA, 22 nt, Human
uugcagugagccgagauuguac

SEQ ID NO: 841375 - RNA, 21 nt, Human
uuuuuuuuuuugaugagagcu

SEQ ID NO: 841376 - RNA, 23 nt, Human
uuuuuuuuuuuuuuuuugaugag

SEQ ID NO: 841377 - RNA, 27 nt, Human
uuuuuuuuuuuuuuuuuuuuuuugggg

SEQ ID NO: 841378 - RNA, 20 nt, Human
aaaaaauacauuucaggauc

SEQ ID NO: 841379 - RNA, 22 nt, Human
aaacugaaaugcaaagugauuc

SEQ ID NO: 841380 - RNA, 19 nt, Human
aacauggcaaaaccccauc

SEQ ID NO: 841381 - RNA, 21 nt, Human
aacauggcaaaaccccaucuc

SEQ ID NO: 841382 - RNA, 21 nt, Human
aacauggcaaaaccccaucuc

SEQ ID NO: 841383 - RNA, 18 nt, Human
aagcaaccuucuauaaag

SEQ ID NO: 841384 - RNA, 22 nt, Human
aaguuagauacagcaccuucca

SEQ ID NO: 841385 - RNA, 22 nt, Human
aaucauccacacugagcuuaga

SEQ ID NO: 841386 - RNA, 19 nt, Human
aauccuuugcuuuccagag

SEQ ID NO: 841387 - RNA, 18 nt, Human
acaauacacagccaaucc

SEQ ID NO: 841388 - RNA, 18 nt, Human
acauagugagacccuguc

SEQ ID NO: 841389 - RNA, 24 nt, Human
accaucucccacaacaaccuccca

SEQ ID NO: 841390 - RNA, 23 nt, Human
accuaaaucaaccaucucccacc

SEQ ID NO: 841391 - RNA, 18 nt, Human
acugcacuccagccaggg

SEQ ID NO: 841392 - RNA, 18 nt, Human
acugcacuccagccaggg

SEQ ID NO: 841393 - RNA, 18 nt, Human
acugcacuccagccaggg

SEQ ID NO: 841394 - RNA, 19 nt, Human
acugcacuccagccagggu

SEQ ID NO: 841395 - RNA, 21 nt, Human
acugcacuccagccaggguga

SEQ ID NO: 841396 - RNA, 22 nt, Human
acugcacuccagccagggugac

SEQ ID NO: 841397 - RNA, 23 nt, Human
acugcacuccagccagggugaca

SEQ ID NO: 841398 - RNA, 19 nt, Human
acuucgaaggaggcucaga

SEQ ID NO: 841399 - RNA, 19 nt, Human
acuuuauucuuuucuuugu

SEQ ID NO: 841400 - RNA, 24 nt, Human
agacugaggugggaggacugcuug

SEQ ID NO: 841401 - RNA, 19 nt, Human
agcaccuuccacccaauua

SEQ ID NO: 841402 - RNA, 22 nt, Human
agccagggugacauagugagac

SEQ ID NO: 841403 - RNA, 24 nt, Human
agccauuaaaaacaucaguuucaa

SEQ ID NO: 841404 - RNA, 19 nt, Human
agcucucuguuuaccuucc

SEQ ID NO: 841405 - RNA, 19 nt, Human
aggaagucugugggaaaau

SEQ ID NO: 841406 - RNA, 20 nt, Human
aggaguuugagaccagccug

SEQ ID NO: 841407 - RNA, 21 nt, Human
agugcucaggaguuugagacc

SEQ ID NO: 841408 - RNA, 22 nt, Human
aucaaccaucucccacaacaac

SEQ ID NO: 841409 - RNA, 20 nt, Human
aucgcacuacugcacuccag

SEQ ID NO: 841410 - RNA, 23 nt, Human
aucucccacaacaaccucccaaa

SEQ ID NO: 841411 - RNA, 19 nt, Human
auuuuuuuuuuuuuuuugg

SEQ ID NO: 841412 - RNA, 18 nt, Human
cacaaguuagauacagca

SEQ ID NO: 841413 - RNA, 18 nt, Human
cacagccaauccuuugcu

SEQ ID NO: 841414 - RNA, 18 nt, Human
cacgccuguaguccuagc

SEQ ID NO: 841415 - RNA, 25 nt, Human
cagugcuaaaaaauacauuucagga

SEQ ID NO: 841416 - RNA, 23 nt, Human
caucucccacaacaaccucccaa

SEQ ID NO: 841417 - RNA, 22 nt, Human
cauuucaggaucacuuagucca

SEQ ID NO: 841418 - RNA, 19 nt, Human
ccaaaaguguuaugucccu

SEQ ID NO: 841419 - RNA, 19 nt, Human
ccagggaagccaaggcugc

SEQ ID NO: 841420 - RNA, 21 nt, Human
cccacaacaaccucccaaaag

SEQ ID NO: 841421 - RNA, 20 nt, Human
cccucuguucaaacaagaac

SEQ ID NO: 841422 - RNA, 26 nt, Human
ccuaaaugagccauuaaaaacaucag

SEQ ID NO: 841423 - RNA, 24 nt, Human
cgccuguaguccuagcuauuuggg

SEQ ID NO: 841424 - RNA, 27 nt, Human
cguauaaacacuagaauuuuguuauga

SEQ ID NO: 841425 - RNA, 19 nt, Human
cuaaaucaaccaucuccca

SEQ ID NO: 841426 - RNA, 21 nt, Human
cuacugcacuccagccagggu

SEQ ID NO: 841427 - RNA, 24 nt, Human
cuacugcacuccagccagggugac

SEQ ID NO: 841428 - RNA, 19 nt, Human
cuagugcucaggaguuuga

SEQ ID NO: 841429 - RNA, 22 nt, Human
cuauaaccaaaagauacagaaa

SEQ ID NO: 841430 - RNA, 25 nt, Human
cugcuugagcccagggaagccaagg

SEQ ID NO: 841431 - RNA, 21 nt, Human
cugugggaaaaugucugaagu

SEQ ID NO: 841432 - RNA, 20 nt, Human
gaccuuucauuuuuuuuuuu

SEQ ID NO: 841433 - RNA, 19 nt, Human
gagaaaacugaagcccaga

SEQ ID NO: 841434 - RNA, 23 nt, Human
gagauaacagaauugaaugaaga

SEQ ID NO: 841435 - RNA, 18 nt, Human
gagguggguggauugcua

SEQ ID NO: 841436 - RNA, 19 nt, Human
gaucaucauuaucuagaug

SEQ ID NO: 841437 - RNA, 24 nt, Human
gauugcuagugcucaggaguuuga

SEQ ID NO: 841438 - RNA, 22 nt, Human
ggaaacagagguggguggauug

SEQ ID NO: 841439 - RNA, 22 nt, Human
ggacaauacacagccaauccuu

SEQ ID NO: 841440 - RNA, 22 nt, Human
ggcuuggucacgcacgccugua

SEQ ID NO: 841441 - RNA, 24 nt, Human
ggucacgcacgccuguaguccuag

SEQ ID NO: 841442 - RNA, 22 nt, Human
uaaaaagaaaagcaaccuucua

SEQ ID NO: 841443 - RNA, 22 nt, Human
uaaaugugguaucaaaccaacc

SEQ ID NO: 841444 - RNA, 22 nt, Human
uaagagcagacagccuucuuuc

SEQ ID NO: 841445 - RNA, 21 nt, Human
uacagcucacccucagccuuu

SEQ ID NO: 841446 - RNA, 21 nt, Human
uaccuggagugagaauuaagc

SEQ ID NO: 841447 - RNA, 23 nt, Human
uacugcacuccagccagggugac

SEQ ID NO: 841448 - RNA, 24 nt, Human
uacugcacuccagccagggugaca

SEQ ID NO: 841449 - RNA, 19 nt, Human
uagaaucuuggccgaugcc

SEQ ID NO: 841450 - RNA, 19 nt, Human
uagcauguucuucuccucu

SEQ ID NO: 841451 - RNA, 23 nt, Human
uaguaucaacauucacuuagguc

SEQ ID NO: 841452 - RNA, 24 nt, Human
uauaaaguagaaguauacuccuaa

SEQ ID NO: 841453 - RNA, 21 nt, Human
uauuauacaacuuauauaaca

SEQ ID NO: 841454 - RNA, 25 nt, Human
ucaaccaauuuacccaaucuuuagc

SEQ ID NO: 841455 - RNA, 21 nt, Human
uccacacugagcuuagaaaag

SEQ ID NO: 841456 - RNA, 19 nt, Human
ucccacaacaaccucccaa

SEQ ID NO: 841457 - RNA, 20 nt, Human
ucccacaacaaccucccaaa

SEQ ID NO: 841458 - RNA, 21 nt, Human
ucccacaacaaccucccaaaa

SEQ ID NO: 841459 - RNA, 20 nt, Human
ucccacaacaaccucccaag

SEQ ID NO: 841460 - RNA, 21 nt, Human
ucccauaagaaagggauugcu

SEQ ID NO: 841461 - RNA, 18 nt, Human
ucccuaacauaauaacau

SEQ ID NO: 841462 - RNA, 19 nt, Human
ucuauaaccaaaagauaca

SEQ ID NO: 841463 - RNA, 23 nt, Human
ucucucucuauauauaaacugaa

SEQ ID NO: 841464 - RNA, 23 nt, Human
ugaaugaaaccuuugcuguggua

SEQ ID NO: 841465 - RNA, 19 nt, Human
ugacauagugagacccugu

SEQ ID NO: 841466 - RNA, 20 nt, Human
ugacauagugagacccuguc

SEQ ID NO: 841467 - RNA, 22 nt, Human
ugagaaaacugaagcccagaag

SEQ ID NO: 841468 - RNA, 23 nt, Human
ugagaaaacugaagcccagaagu

SEQ ID NO: 841469 - RNA, 31 nt, Human
ugagaaaacugaagcccagaaguuaagcuag

SEQ ID NO: 841470 - RNA, 22 nt, Human
ugagauaaauaaaucuacccua

SEQ ID NO: 841471 - RNA, 26 nt, Human
ugagauaaauaaaucuacccuaaaug

SEQ ID NO: 841472 - RNA, 22 nt, Human
ugagcaacauggcaaaacccca

SEQ ID NO: 841473 - RNA, 23 nt, Human
ugaggugggaggacugcuugagc

SEQ ID NO: 841474 - RNA, 24 nt, Human
ugaggugggaggacugcuugagcc

SEQ ID NO: 841475 - RNA, 22 nt, Human
ugcccagaugagcaauguagaa

SEQ ID NO: 841476 - RNA, 21 nt, Human
uggaaacagagguggguggau

SEQ ID NO: 841477 - RNA, 18 nt, Human
uggaagaaucuccugaau

SEQ ID NO: 841478 - RNA, 20 nt, Human
uggaagaaucuccugaaugg

SEQ ID NO: 841479 - RNA, 23 nt, Human
uggauugcuagugcucaggaguu

SEQ ID NO: 841480 - RNA, 24 nt, Human
uggauugcuagugcucaggaguuu

SEQ ID NO: 841481 - RNA, 19 nt, Human
ugggagacugaggugggag

SEQ ID NO: 841482 - RNA, 24 nt, Human
ugggaggacugcuugagcccaggg

SEQ ID NO: 841483 - RNA, 20 nt, Human
uggguguucguauaaacacu

SEQ ID NO: 841484 - RNA, 20 nt, Human
ugguguucaaguucuguugu

SEQ ID NO: 841485 - RNA, 18 nt, Human
ugucaagaggacaguugu

SEQ ID NO: 841486 - RNA, 19 nt, Human
ugucaagaggacaguugug

SEQ ID NO: 841487 - RNA, 18 nt, Human
ugugggaaaaugucugaa

SEQ ID NO: 841488 - RNA, 20 nt, Human
uuaauaggagaugguuccac

SEQ ID NO: 841489 - RNA, 19 nt, Human
uuagcugggcuuggucacg

SEQ ID NO: 841490 - RNA, 24 nt, Human
uuccaauuuuugggcaaaaacuuc

SEQ ID NO: 841491 - RNA, 24 nt, Human
uuccuagaaaaaugaaaauauuuu

SEQ ID NO: 841492 - RNA, 19 nt, Human
uuggaaacagaggugggug

SEQ ID NO: 841493 - RNA, 24 nt, Human
uuuacagaugagaaaacugaagcc

SEQ ID NO: 841494 - RNA, 21 nt, Human
uuuuuuuuuuggaaacagagg

SEQ ID NO: 841495 - RNA, 25 nt, Human
uuuuuuuuuuuggaaacagaggugg

SEQ ID NO: 841496 - RNA, 25 nt, Human
aaaaacagaaacucuucgggagaga

SEQ ID NO: 841497 - RNA, 22 nt, Human
caacagugcaucaagcaucuga

SEQ ID NO: 841498 - RNA, 19 nt, Human
ccaacagugcaucaagcau

SEQ ID NO: 841499 - RNA, 19 nt, Human
cgggagagacccccucccc

SEQ ID NO: 841500 - RNA, 18 nt, Human
uaaaaacagaaacucuuc

SEQ ID NO: 841501 - RNA, 22 nt, Human
uucgggagagacccccucccca

SEQ ID NO: 841502 - RNA, 20 nt, Human
aggucucaauuagcucaaaa

SEQ ID NO: 841503 - RNA, 22 nt, Human
auaggucucaauuagcucaaaa

SEQ ID NO: 841504 - RNA, 22 nt, Human
auccacaguguuccaacucagc

SEQ ID NO: 841505 - RNA, 20 nt, Human
caaaauaacagucuccaaac

SEQ ID NO: 841506 - RNA, 23 nt, Human
caaucccagcauaaaguugcaaa

SEQ ID NO: 841507 - RNA, 24 nt, Human
cagaauauccacaguguuccaacu

SEQ ID NO: 841508 - RNA, 22 nt, Human
cagcauaaaguugcaaagacau

SEQ ID NO: 841509 - RNA, 22 nt, Human
cucaaaauaacagucuccaaac

SEQ ID NO: 841510 - RNA, 22 nt, Human
cuccgguguccgcggcgagggc

SEQ ID NO: 841511 - RNA, 20 nt, Human
gagcggccgcagcuccggug

SEQ ID NO: 841512 - RNA, 22 nt, Human
gagcggccgcagcuccgguguc

SEQ ID NO: 841513 - RNA, 19 nt, Human
uagcucaaaauaacagucu

SEQ ID NO: 841514 - RNA, 22 nt, Human
uccacaguguuccaacucagcu

SEQ ID NO: 841515 - RNA, 21 nt, Human
uccgguguccgcggcgagggc

SEQ ID NO: 841516 - RNA, 21 nt, Human
ucuaaaguacagauaaaccug

SEQ ID NO: 841517 - RNA, 18 nt, Human
aaugaugacagcaacaga

SEQ ID NO: 841518 - RNA, 19 nt, Human
aggaagaacgggcaacagc

SEQ ID NO: 841519 - RNA, 20 nt, Human
aggcccgagggcagcggcgg

SEQ ID NO: 841520 - RNA, 20 nt, Human
cccucucccucccguauucc

SEQ ID NO: 841521 - RNA, 20 nt, Human
ccgcagcagcuuaucauucc

SEQ ID NO: 841522 - RNA, 24 nt, Human
ccgcagcagcuuaucauucccucu

SEQ ID NO: 841523 - RNA, 18 nt, Human
cgagccccggcugcuccc

SEQ ID NO: 841524 - RNA, 18 nt, Human
cugcuccccggaggcgca

SEQ ID NO: 841525 - RNA, 20 nt, Human
ggaagaacgggcaacagcag

SEQ ID NO: 841526 - RNA, 24 nt, Human
uaacucgggacgcgucaggcgcgg

SEQ ID NO: 841527 - RNA, 22 nt, Human
uagcuuugauguuuggucacgu

SEQ ID NO: 841528 - RNA, 23 nt, Human
uaucauucccucucccucccgua

SEQ ID NO: 841529 - RNA, 21 nt, Human
uccuucacagugacucuuggg

SEQ ID NO: 841530 - RNA, 23 nt, Human
ugacucuugggccgcagcagcuu

SEQ ID NO: 841531 - RNA, 23 nt, Human
uucaggguagguucaccgccaga

SEQ ID NO: 841532 - RNA, 23 nt, Human
aaaagaaaaacaauaaaagaaga

SEQ ID NO: 841533 - RNA, 24 nt, Human
acaaaggccagcccuauccucccu

SEQ ID NO: 841534 - RNA, 21 nt, Human
agagaggaagauggggagggg

SEQ ID NO: 841535 - RNA, 20 nt, Human
agaggaagauggggaggggc

SEQ ID NO: 841536 - RNA, 22 nt, Human
aggaagauggggaggggcucug

SEQ ID NO: 841537 - RNA, 23 nt, Human
aggccagcccuauccucccucaa

SEQ ID NO: 841538 - RNA, 20 nt, Human
agggggcuggaguggcaggg

SEQ ID NO: 841539 - RNA, 21 nt, Human
agggggcuggaguggcagggg

SEQ ID NO: 841540 - RNA, 22 nt, Human
agguucucagccucugcuggcu

SEQ ID NO: 841541 - RNA, 20 nt, Human
auggggaggggcucuggauc

SEQ ID NO: 841542 - RNA, 19 nt, Human
caaaucaauggcccgcagc

SEQ ID NO: 841543 - RNA, 24 nt, Human
caaaucaauggcccgcagcugagc

SEQ ID NO: 841544 - RNA, 22 nt, Human
cagcugagccucccacugccca

SEQ ID NO: 841545 - RNA, 20 nt, Human
caggccggagagggcccacg

SEQ ID NO: 841546 - RNA, 19 nt, Human
ccagguuuuuccaggagcc

SEQ ID NO: 841547 - RNA, 18 nt, Human
ccucccucaaaggcucaa

SEQ ID NO: 841548 - RNA, 24 nt, Human
cggagagggcccacgaguccugcc

SEQ ID NO: 841549 - RNA, 21 nt, Human
cucaaaucaauggcccgcagc

SEQ ID NO: 841550 - RNA, 24 nt, Human
cugagccucccacugcccagguuu

SEQ ID NO: 841551 - RNA, 23 nt, Human
cuggagacacaggagugaaggug

SEQ ID NO: 841552 - RNA, 18 nt, Human
gagagaggaagaugggga

SEQ ID NO: 841553 - RNA, 22 nt, Human
gaggcuaaucagcuggagacac

SEQ ID NO: 841554 - RNA, 18 nt, Human
ggcuggaguggcagggga

SEQ ID NO: 841555 - RNA, 21 nt, Human
gggaaacaggccggagagggc

SEQ ID NO: 841556 - RNA, 18 nt, Human
gggcuggaguggcagggg

SEQ ID NO: 841557 - RNA, 18 nt, Human
ggggaggggcucuggauc

SEQ ID NO: 841558 - RNA, 21 nt, Human
gguucucagccucugcuggcu

SEQ ID NO: 841559 - RNA, 23 nt, Human
uaaaagaagagucugaggcuaau

SEQ ID NO: 841560 - RNA, 25 nt, Human
ucaauggcccgcagcugagccuccc

SEQ ID NO: 841561 - RNA, 18 nt, Human
ucagcuggagacacagga

SEQ ID NO: 841562 - RNA, 19 nt, Human
ugagccucccacugcccag

SEQ ID NO: 841563 - RNA, 21 nt, Human
ugcccagguuuuuccaggagc

SEQ ID NO: 841564 - RNA, 18 nt, Human
uggcaaugggggguaggg

SEQ ID NO: 841565 - RNA, 24 nt, Human
uuuuuuuuuuuugaaccuggugcu

SEQ ID NO: 841566 - RNA, 22 nt, Human
aagggggcgacgauagggaagg

SEQ ID NO: 841567 - RNA, 24 nt, Human
acagacacaaacacagauacagca

SEQ ID NO: 841568 - RNA, 20 nt, Human
acaggcauuaucuucaugcu

SEQ ID NO: 841569 - RNA, 23 nt, Human
accacaggcauuaucuucaugcu

SEQ ID NO: 841570 - RNA, 22 nt, Human
augcugucacacacagacacaa

SEQ ID NO: 841571 - RNA, 24 nt, Human
caaacacagauacagcacaauauc

SEQ ID NO: 841572 - RNA, 19 nt, Human
cagcauaaccacaggcauu

SEQ ID NO: 841573 - RNA, 20 nt, Human
cagcauaaccacaggcauuu

SEQ ID NO: 841574 - RNA, 22 nt, Human
cccaagugcauuccuucugagg

SEQ ID NO: 841575 - RNA, 22 nt, Human
ccggaaugggaaagaaauugaa

SEQ ID NO: 841576 - RNA, 19 nt, Human
ccucuggacuccacguagg

SEQ ID NO: 841577 - RNA, 22 nt, Human
gacgauagggaagggcccggaa

SEQ ID NO: 841578 - RNA, 18 nt, Human
gcgacgauagggaagggc

SEQ ID NO: 841579 - RNA, 24 nt, Human
uaucuucaugcugucacacacaga

SEQ ID NO: 841580 - RNA, 22 nt, Human
uuugcagggguccggcagaucc

SEQ ID NO: 841581 - RNA, 23 nt, Human
uuuuuuuuuuuagcaucugguga

SEQ ID NO: 841582 - RNA, 20 nt, Human
acuccuaaaaaguugaaaag

SEQ ID NO: 841583 - RNA, 21 nt, Human
acuccuaaaaaguugaaaagc

SEQ ID NO: 841584 - RNA, 20 nt, Human
agaggagcuuggagguccca

SEQ ID NO: 841585 - RNA, 23 nt, Human
aggcgaccaauuagagaaaaagg

SEQ ID NO: 841586 - RNA, 22 nt, Human
caucagacugcuucuccuccca

SEQ ID NO: 841587 - RNA, 25 nt, Human
cuuaaggacugccaagaggcuccuc

SEQ ID NO: 841588 - RNA, 21 nt, Human
gcacuccuaaaaaguugaaaa

SEQ ID NO: 841589 - RNA, 22 nt, Human
gggacuucauuacaucugugga

SEQ ID NO: 841590 - RNA, 20 nt, Human
ggggaugucugguccuggga

SEQ ID NO: 841591 - RNA, 21 nt, Human
guugaaaagcaggugagucug

SEQ ID NO: 841592 - RNA, 19 nt, Human
uccucccacguagguucag

SEQ ID NO: 841593 - RNA, 22 nt, Human
ugccaagaggcuccuuagaaac

SEQ ID NO: 841594 - RNA, 24 nt, Human
uguggagucuggggaugucugguc

SEQ ID NO: 841595 - RNA, 20 nt, Human
aagcagaaaagauuuaccuc

SEQ ID NO: 841596 - RNA, 18 nt, Human
ccaaagcuuuacaaaugc

SEQ ID NO: 841597 - RNA, 22 nt, Human
ccccucgugccgaagugggagc

SEQ ID NO: 841598 - RNA, 19 nt, Human
cgaagugggagcggcccgc

SEQ ID NO: 841599 - RNA, 20 nt, Human
uaaucaucagacucuuccuu

SEQ ID NO: 841600 - RNA, 24 nt, Human
uucaguaagcagaaaagauuuacc

SEQ ID NO: 841601 - RNA, 19 nt, Human
aagaaucuucaaucaagug

SEQ ID NO: 841602 - RNA, 20 nt, Human
cccacuuagagaagcagggu

SEQ ID NO: 841603 - RNA, 18 nt, Human
cgugccgcuguccgcugc

SEQ ID NO: 841604 - RNA, 19 nt, Human
gagaagggagaggguucuc

SEQ ID NO: 841605 - RNA, 23 nt, Human
gcagggucuaccgcucugugccu

SEQ ID NO: 841606 - RNA, 20 nt, Human
gugaaaugugcgugccgcug

SEQ ID NO: 841607 - RNA, 18 nt, Human
gugccugacaaugacgag

SEQ ID NO: 841608 - RNA, 21 nt, Human
ucagagaagggagaggguucu

SEQ ID NO: 841609 - RNA, 24 nt, Human
ucagaguaaaacaaucauuuuauu

SEQ ID NO: 841610 - RNA, 20 nt, Human
ugcgugccgcuguccgcugc

SEQ ID NO: 841611 - RNA, 21 nt, Human
gagcagucccccggggacucc

SEQ ID NO: 841612 - RNA, 21 nt, Human
aaaaaaaaaaaugaacuaaac

SEQ ID NO: 841613 - RNA, 23 nt, Human
aaaaaccucagcccaggcaaagc

SEQ ID NO: 841614 - RNA, 22 nt, Human
aaaaccucagcccaggcaaagc

SEQ ID NO: 841615 - RNA, 20 nt, Human
acauuaaguagaacagagca

SEQ ID NO: 841616 - RNA, 23 nt, Human
acccucauacucuccagaaacga

SEQ ID NO: 841617 - RNA, 21 nt, Human
acgagcugucuuggccacuug

SEQ ID NO: 841618 - RNA, 22 nt, Human
acuacaacaacagggaccaugg

SEQ ID NO: 841619 - RNA, 20 nt, Human
acucccguucuuccuccucc

SEQ ID NO: 841620 - RNA, 18 nt, Human
acuggaaaaaauagaugg

SEQ ID NO: 841621 - RNA, 24 nt, Human
agaaaacacacccucauacucucc

SEQ ID NO: 841622 - RNA, 21 nt, Human
agaggauacugaaaagccagu

SEQ ID NO: 841623 - RNA, 23 nt, Human
agauggagcugcugaguucugga

SEQ ID NO: 841624 - RNA, 18 nt, Human
agcuggguuugugccugc

SEQ ID NO: 841625 - RNA, 22 nt, Human
aggcaaagccgggagccagaga

SEQ ID NO: 841626 - RNA, 25 nt, Human
aggccagggcuuccaaggcagggaa

SEQ ID NO: 841627 - RNA, 25 nt, Human
aguagaacagagcacacaguuucaa

SEQ ID NO: 841628 - RNA, 27 nt, Human
aguccccuagcauaccuuuuacaaucc

SEQ ID NO: 841629 - RNA, 18 nt, Human
aguuucaaguauucagca

SEQ ID NO: 841630 - RNA, 18 nt, Human
aucauguuagcacagcau

SEQ ID NO: 841631 - RNA, 21 nt, Human
augauauaacuucagguacau

SEQ ID NO: 841632 - RNA, 18 nt, Human
auggagcugcugaguucu

SEQ ID NO: 841633 - RNA, 21 nt, Human
caaaauaucugcaaaguccuu

SEQ ID NO: 841634 - RNA, 25 nt, Human
caacaacagggaccauggcacugaa

SEQ ID NO: 841635 - RNA, 18 nt, Human
caacggugggguaugacc

SEQ ID NO: 841636 - RNA, 19 nt, Human
caauaagaaaacacacccu

SEQ ID NO: 841637 - RNA, 23 nt, Human
cacaauaagaaaacacacccuca

SEQ ID NO: 841638 - RNA, 23 nt, Human
cacacaccacauucuuccuaccc

SEQ ID NO: 841639 - RNA, 21 nt, Human
cacacaguuucaaguauucag

SEQ ID NO: 841640 - RNA, 22 nt, Human
cacagcguuucuuucccagaau

SEQ ID NO: 841641 - RNA, 25 nt, Human
caccacauucuuccuacccucuaag

SEQ ID NO: 841642 - RNA, 20 nt, Human
cacuaugggcuuggcaaggc

SEQ ID NO: 841643 - RNA, 19 nt, Human
cacugcuuucuggccaagu

SEQ ID NO: 841644 - RNA, 18 nt, Human
cagcccaggcaaagccgg

SEQ ID NO: 841645 - RNA, 20 nt, Human
caucugaaguuccuuuguuc

SEQ ID NO: 841646 - RNA, 23 nt, Human
ccaacguuggcugcaccaaaaua

SEQ ID NO: 841647 - RNA, 26 nt, Human
ccacauucuuccuacccucuaagaga

SEQ ID NO: 841648 - RNA, 21 nt, Human
cccaaggaucguuuuuauaga

SEQ ID NO: 841649 - RNA, 18 nt, Human
cccagauccccugcaaaa

SEQ ID NO: 841650 - RNA, 22 nt, Human
cccaggccagggcuuccaaggc

SEQ ID NO: 841651 - RNA, 22 nt, Human
cccaucugaaguuccuuuguuc

SEQ ID NO: 841652 - RNA, 21 nt, Human
cccguucuuccuccuccucuu

SEQ ID NO: 841653 - RNA, 21 nt, Human
cccguucuuccuccuccucuu

SEQ ID NO: 841654 - RNA, 18 nt, Human
cccucauacucuccagaa

SEQ ID NO: 841655 - RNA, 21 nt, Human
ccucccaggccagggcuucca

SEQ ID NO: 841656 - RNA, 20 nt, Human
ccuccuccucuucacucagg

SEQ ID NO: 841657 - RNA, 21 nt, Human
ccucuucacucagggcugucc

SEQ ID NO: 841658 - RNA, 23 nt, Human
ccugcaaaagaaaacaggcagcu

SEQ ID NO: 841659 - RNA, 21 nt, Human
ccuguaucuauacaggccgcu

SEQ ID NO: 841660 - RNA, 24 nt, Human
cggugggguaugaccuccucccag

SEQ ID NO: 841661 - RNA, 21 nt, Human
cuccaacggugggguaugacc

SEQ ID NO: 841662 - RNA, 24 nt, Human
cuccucuucacucagggcuguccu

SEQ ID NO: 841663 - RNA, 21 nt, Human
cuccuggcagcaucuccucaa

SEQ ID NO: 841664 - RNA, 21 nt, Human
cuccuguaucuauacaggccg

SEQ ID NO: 841665 - RNA, 23 nt, Human
cugcugcugcuuccagguuuggu

SEQ ID NO: 841666 - RNA, 21 nt, Human
cuuggcaaggcagagcuuaga

SEQ ID NO: 841667 - RNA, 18 nt, Human
cuuggccacuugacagcu

SEQ ID NO: 841668 - RNA, 18 nt, Human
gaaagaggauacugaaaa

SEQ ID NO: 841669 - RNA, 23 nt, Human
gaacacacacacaccacauucuu

SEQ ID NO: 841670 - RNA, 21 nt, Human
gaagaucaguccccuagcaua

SEQ ID NO: 841671 - RNA, 19 nt, Human
gacacagcguuucuuuccc

SEQ ID NO: 841672 - RNA, 18 nt, Human
gcagcaucuccucaaggc

SEQ ID NO: 841673 - RNA, 19 nt, Human
gcuuuaugagaacacacac

SEQ ID NO: 841674 - RNA, 18 nt, Human
ggagcaccuggguaagca

SEQ ID NO: 841675 - RNA, 19 nt, Human
ggcaaucaccuucccauca

SEQ ID NO: 841676 - RNA, 21 nt, Human
ggcucaguccagcuugaaagc

SEQ ID NO: 841677 - RNA, 24 nt, Human
gucgcagacuucacaguguaacuu

SEQ ID NO: 841678 - RNA, 18 nt, Human
uaagaaaacacacccuca

SEQ ID NO: 841679 - RNA, 20 nt, Human
uaagaaaacacacccucaua

SEQ ID NO: 841680 - RNA, 20 nt, Human
uaagagaagguaguuccuuu

SEQ ID NO: 841681 - RNA, 22 nt, Human
uaagccuccuuauaaggcuaca

SEQ ID NO: 841682 - RNA, 18 nt, Human
uacaauccugucaucuuc

SEQ ID NO: 841683 - RNA, 19 nt, Human
uaccauggacauaaaugca

SEQ ID NO: 841684 - RNA, 24 nt, Human
uagcuuuuuagaauaaaaaaugau

SEQ ID NO: 841685 - RNA, 21 nt, Human
uaggaggggaucauguuagca

SEQ ID NO: 841686 - RNA, 19 nt, Human
ucaaguauucagcacugcu

SEQ ID NO: 841687 - RNA, 22 nt, Human
ucagcacugcuuucuggccaag

SEQ ID NO: 841688 - RNA, 18 nt, Human
ucagcccaggcaaagccg

SEQ ID NO: 841689 - RNA, 22 nt, Human
ucagcccaggcaaagccgggag

SEQ ID NO: 841690 - RNA, 23 nt, Human
ucaguccagcuugaaagcagugu

SEQ ID NO: 841691 - RNA, 22 nt, Human
uccccugcaaaagaaaacaggc

SEQ ID NO: 841692 - RNA, 27 nt, Human
ucuccagaaacgagcugucuuggccac

SEQ ID NO: 841693 - RNA, 18 nt, Human
ucugaaguuccuuuguuc

SEQ ID NO: 841694 - RNA, 20 nt, Human
ucuguaggcuguaagaucac

SEQ ID NO: 841695 - RNA, 21 nt, Human
ucuuccuccuccucuucacuc

SEQ ID NO: 841696 - RNA, 20 nt, Human
ugacagaacauuaaguagaa

SEQ ID NO: 841697 - RNA, 21 nt, Human
ugacugauccagcagagaaga

SEQ ID NO: 841698 - RNA, 19 nt, Human
ugagaacacacacacacca

SEQ ID NO: 841699 - RNA, 20 nt, Human
ugagaacacacacacaccac

SEQ ID NO: 841700 - RNA, 21 nt, Human
ugaguucuggacacagcguuu

SEQ ID NO: 841701 - RNA, 23 nt, Human
ugcagggggaacuguuuucugaa

SEQ ID NO: 841702 - RNA, 19 nt, Human
uggaaaaaauagauggagc

SEQ ID NO: 841703 - RNA, 24 nt, Human
uggaaacagacaaggagauagaug

SEQ ID NO: 841704 - RNA, 21 nt, Human
uggaaguaggaggggaucaug

SEQ ID NO: 841705 - RNA, 18 nt, Human
uggagcugcugaguucug

SEQ ID NO: 841706 - RNA, 23 nt, Human
uggcaaggcagagcuuagaacag

SEQ ID NO: 841707 - RNA, 20 nt, Human
uggcagcaucuccucaaggc

SEQ ID NO: 841708 - RNA, 18 nt, Human
ugggagaggagagcuggg

SEQ ID NO: 841709 - RNA, 18 nt, Human
uggguaagcaaugugacc

SEQ ID NO: 841710 - RNA, 19 nt, Human
uguccuagaguuccugcuc

SEQ ID NO: 841711 - RNA, 20 nt, Human
uuccuuucacaauaagaaaa

SEQ ID NO: 841712 - RNA, 20 nt, Human
uucuuccuccuccucuucac

SEQ ID NO: 841713 - RNA, 19 nt, Human
uuuauacaaaggacuguca

SEQ ID NO: 841714 - RNA, 19 nt, Human
uuuauacaaaggacuguca

SEQ ID NO: 841715 - RNA, 23 nt, Human
uuuauacaaaggacugucagagu

SEQ ID NO: 841716 - RNA, 19 nt, Human
uuucccagaaugagacugg

SEQ ID NO: 841717 - RNA, 25 nt, Human
uuuucagaauauaagcugcauagcu

SEQ ID NO: 841718 - RNA, 22 nt, Human
aauucauaauucuaucuggaac

SEQ ID NO: 841719 - RNA, 23 nt, Human
accaccuuuucuugguuuguguc

SEQ ID NO: 841720 - RNA, 24 nt, Human
accaccuuuucuugguuuguguca

SEQ ID NO: 841721 - RNA, 18 nt, Human
acgugguauacaccaaaa

SEQ ID NO: 841722 - RNA, 23 nt, Human
auuuuuauuuuuuuguuuaggag

SEQ ID NO: 841723 - RNA, 26 nt, Human
cacaccacacacucaugagaccaaau

SEQ ID NO: 841724 - RNA, 19 nt, Human
caccacacacucaugagac

SEQ ID NO: 841725 - RNA, 19 nt, Human
cagcaaagaaacacaccac

SEQ ID NO: 841726 - RNA, 22 nt, Human
cagcaaagaaacacaccacaca

SEQ ID NO: 841727 - RNA, 23 nt, Human
cauuaaacuggacaaacuggggc

SEQ ID NO: 841728 - RNA, 20 nt, Human
cucagaguagccaccaucau

SEQ ID NO: 841729 - RNA, 20 nt, Human
cuucuagguugacgugguau

SEQ ID NO: 841730 - RNA, 21 nt, Human
gacaugaacugugccaaaggc

SEQ ID NO: 841731 - RNA, 18 nt, Human
ggacaaacuggggcucag

SEQ ID NO: 841732 - RNA, 23 nt, Human
uaaacuggacaaacuggggcuca

SEQ ID NO: 841733 - RNA, 21 nt, Human
uaggagggacaaacacaaagc

SEQ ID NO: 841734 - RNA, 21 nt, Human
uagguugacgugguauacacc

SEQ ID NO: 841735 - RNA, 19 nt, Human
uccucagaguagccaccau

SEQ ID NO: 841736 - RNA, 26 nt, Human
ucuaucaaguuaaaauaaauuagacu

SEQ ID NO: 841737 - RNA, 18 nt, Human
ucuguaguuccaggccag

SEQ ID NO: 841738 - RNA, 19 nt, Human
ucuuccugcugaauaaaag

SEQ ID NO: 841739 - RNA, 21 nt, Human
ucuugguuugugucagagaau

SEQ ID NO: 841740 - RNA, 21 nt, Human
ugaccagcaaagaaacacacc

SEQ ID NO: 841741 - RNA, 19 nt, Human
ugagaccaaaugacugcca

SEQ ID NO: 841742 - RNA, 18 nt, Human
ugccaaaggcuuggcugu

SEQ ID NO: 841743 - RNA, 20 nt, Human
ugccaaaggcuuggcugucu

SEQ ID NO: 841744 - RNA, 20 nt, Human
uggcugaauccuccauuaaa

SEQ ID NO: 841745 - RNA, 19 nt, Human
ugugucagagaauguuagc

SEQ ID NO: 841746 - RNA, 21 nt, Human
uuaaaauaaauuagacuaaca

SEQ ID NO: 841747 - RNA, 22 nt, Human
uuucuuguaauucauaauucua

SEQ ID NO: 841748 - RNA, 23 nt, Human
uuuuuuuuuuuuuuuuugaugag

SEQ ID NO: 841749 - RNA, 27 nt, Human
uuuuuuuuuuuuuuuuuuuuuuugggg

SEQ ID NO: 841750 - RNA, 21 nt, Human
aaaaaacaaagcacaaauaua

SEQ ID NO: 841751 - RNA, 19 nt, Human
aagcaaguuuuucuuguuu

SEQ ID NO: 841752 - RNA, 20 nt, Human
auggcgccaaaagcaaguuu

SEQ ID NO: 841753 - RNA, 19 nt, Human
cacgucuccagcuccgccc

SEQ ID NO: 841754 - RNA, 18 nt, Human
cacugcacacccgcgagu

SEQ ID NO: 841755 - RNA, 25 nt, Human
cacugcacacccgcgaguccucgaa

SEQ ID NO: 841756 - RNA, 27 nt, Human
cauucaaaaucaccagaacucuuguuc

SEQ ID NO: 841757 - RNA, 19 nt, Human
ccagagcauuuggcauucu

SEQ ID NO: 841758 - RNA, 21 nt, Human
cccgagcccgagccacgcgcc

SEQ ID NO: 841759 - RNA, 18 nt, Human
cuccagcuccgcccgagc

SEQ ID NO: 841760 - RNA, 19 nt, Human
cuccgcccgagcccgagcc

SEQ ID NO: 841761 - RNA, 18 nt, Human
cuugaagucgcucaucag

SEQ ID NO: 841762 - RNA, 18 nt, Human
guaaguuuuccuguuucc

SEQ ID NO: 841763 - RNA, 18 nt, Human
guuuguuugguucccagg

SEQ ID NO: 841764 - RNA, 20 nt, Human
uaaaaaacaaagcacaaaua

SEQ ID NO: 841765 - RNA, 23 nt, Human
uaccagaaaguaguaaauggcuu

SEQ ID NO: 841766 - RNA, 22 nt, Human
uagacugagguccaggaaaaau

SEQ ID NO: 841767 - RNA, 21 nt, Human
uagcaaaauaaaaagacauaa

SEQ ID NO: 841768 - RNA, 20 nt, Human
uaugguagucuaccagaaag

SEQ ID NO: 841769 - RNA, 23 nt, Human
ucaacucaacuuguaacaacccu

SEQ ID NO: 841770 - RNA, 21 nt, Human
ucuccagcuccgcccgagccc

SEQ ID NO: 841771 - RNA, 26 nt, Human
ugccucuaacauuauuuugaauccuu

SEQ ID NO: 841772 - RNA, 26 nt, Human
uuagcaaaauaaaaagacauaagugg

SEQ ID NO: 841773 - RNA, 20 nt, Human
uuccuguuuccuuaucucca

SEQ ID NO: 841774 - RNA, 28 nt, Human
uugauggcgccaaaagcaaguuuuucuu

SEQ ID NO: 841775 - RNA, 21 nt, Human
uuuuguuuguuugguucccag

SEQ ID NO: 841776 - RNA, 23 nt, Human
uuuuuugcagaugaaaagaaaua

SEQ ID NO: 841777 - RNA, 19 nt, Human
aaccaagaagcaggcaaga

SEQ ID NO: 841778 - RNA, 26 nt, Human
aagcaggcaagaggccugggacccag

SEQ ID NO: 841779 - RNA, 25 nt, Human
aagccagccucagccucagcuccaa

SEQ ID NO: 841780 - RNA, 18 nt, Human
accacagcuggguuguag

SEQ ID NO: 841781 - RNA, 19 nt, Human
accacagcuggguuguagg

SEQ ID NO: 841782 - RNA, 20 nt, Human
agaagcaggcaagaggccug

SEQ ID NO: 841783 - RNA, 21 nt, Human
agacacccaggccccugccuc

SEQ ID NO: 841784 - RNA, 25 nt, Human
agagcugggauuggaacuaggggcc

SEQ ID NO: 841785 - RNA, 21 nt, Human
agccugccaggccugggcucu

SEQ ID NO: 841786 - RNA, 19 nt, Human
agcuggguagcagaggguu

SEQ ID NO: 841787 - RNA, 23 nt, Human
aggaaaccucagaguccugccaa

SEQ ID NO: 841788 - RNA, 19 nt, Human
aggaagccagccucagccu

SEQ ID NO: 841789 - RNA, 22 nt, Human
aggaaggcuaaguccugaacca

SEQ ID NO: 841790 - RNA, 19 nt, Human
aggcaagaggccugggacc

SEQ ID NO: 841791 - RNA, 21 nt, Human
aggcaagaggccugggaccca

SEQ ID NO: 841792 - RNA, 20 nt, Human
agguaagugaaggucaggaa

SEQ ID NO: 841793 - RNA, 22 nt, Human
agguggggaggggcucuaggca

SEQ ID NO: 841794 - RNA, 20 nt, Human
auccgcgccaggcgcgucuc

SEQ ID NO: 841795 - RNA, 23 nt, Human
caaagagcugaaacucccaaggc

SEQ ID NO: 841796 - RNA, 21 nt, Human
caaauggcaauuaagucaaaa

SEQ ID NO: 841797 - RNA, 23 nt, Human
caacucccugaggguaggauaac

SEQ ID NO: 841798 - RNA, 25 nt, Human
caagaagcaggcaagaggccuggga

SEQ ID NO: 841799 - RNA, 22 nt, Human
caagaggccugggacccagggc

SEQ ID NO: 841800 - RNA, 24 nt, Human
caaucucauggcauggucugcagg

SEQ ID NO: 841801 - RNA, 18 nt, Human
cacaccuggcaacacccc

SEQ ID NO: 841802 - RNA, 25 nt, Human
caccuucaaucucauggcauggucu

SEQ ID NO: 841803 - RNA, 18 nt, Human
cacugauuccagccagua

SEQ ID NO: 841804 - RNA, 25 nt, Human
cagagggacacccaugacagaaauc

SEQ ID NO: 841805 - RNA, 19 nt, Human
cagccucagccucagcucc

SEQ ID NO: 841806 - RNA, 23 nt, Human
cagcugugguguuucuaaaagcc

SEQ ID NO: 841807 - RNA, 25 nt, Human
cagcugugguguuucuaaaagccgu

SEQ ID NO: 841808 - RNA, 18 nt, Human
caggcucagagcaggucc

SEQ ID NO: 841809 - RNA, 21 nt, Human
caguaggcuuccugguccccc

SEQ ID NO: 841810 - RNA, 22 nt, Human
cagugcucucagagcccacaug

SEQ ID NO: 841811 - RNA, 18 nt, Human
ccaaauacgcagacaagc

SEQ ID NO: 841812 - RNA, 22 nt, Human
ccaacauccaucuucaccgacu

SEQ ID NO: 841813 - RNA, 24 nt, Human
ccaaggcucagccaggacucucca

SEQ ID NO: 841814 - RNA, 22 nt, Human
ccacaccuggcaacacccccug

SEQ ID NO: 841815 - RNA, 19 nt, Human
ccagcaaagcugaaaggau

SEQ ID NO: 841816 - RNA, 23 nt, Human
cccagggcagggucaacccuccu

SEQ ID NO: 841817 - RNA, 18 nt, Human
ccccgcugcagccacacc

SEQ ID NO: 841818 - RNA, 24 nt, Human
ccuccuauuuugccaacauccauc

SEQ ID NO: 841819 - RNA, 25 nt, Human
ccuccuggcugcuuaccugucacuu

SEQ ID NO: 841820 - RNA, 22 nt, Human
ccugaacccauucugaguacag

SEQ ID NO: 841821 - RNA, 18 nt, Human
ccuggccccugggcaggc

SEQ ID NO: 841822 - RNA, 21 nt, Human
ccuggccccugggcaggcuca

SEQ ID NO: 841823 - RNA, 21 nt, Human
cgccaaagagcugaaacuccc

SEQ ID NO: 841824 - RNA, 27 nt, Human
cgccaaagagcugaaacucccaaggcu

SEQ ID NO: 841825 - RNA, 18 nt, Human
cuaggcagcggccucucc

SEQ ID NO: 841826 - RNA, 20 nt, Human
cuaguaagcggcagagcugg

SEQ ID NO: 841827 - RNA, 23 nt, Human
cuccaaauacgcagacaagcccu

SEQ ID NO: 841828 - RNA, 25 nt, Human
cucucuggcauauaugcaugccuag

SEQ ID NO: 841829 - RNA, 19 nt, Human
cuggagcaggccuggcccc

SEQ ID NO: 841830 - RNA, 20 nt, Human
cuggagcaggccuggccccu

SEQ ID NO: 841831 - RNA, 27 nt, Human
cuuccccagccacaccuggcaacaccc

SEQ ID NO: 841832 - RNA, 20 nt, Human
gaccacagcuggguuguagg

SEQ ID NO: 841833 - RNA, 25 nt, Human
gaggcacagacacccaggccccugc

SEQ ID NO: 841834 - RNA, 23 nt, Human
gccccugccucagguccagcaaa

SEQ ID NO: 841835 - RNA, 20 nt, Human
gcggccucuccugguugaaa

SEQ ID NO: 841836 - RNA, 25 nt, Human
ggaccacagcuggguuguagggaaa

SEQ ID NO: 841837 - RNA, 19 nt, Human
ggacccagggcagggucaa

SEQ ID NO: 841838 - RNA, 18 nt, Human
ggauuggaacuaggggcu

SEQ ID NO: 841839 - RNA, 22 nt, Human
ggcaagaggccugggacccagg

SEQ ID NO: 841840 - RNA, 20 nt, Human
gguagggaggcacagacacc

SEQ ID NO: 841841 - RNA, 19 nt, Human
gucugguggcuucaaguuc

SEQ ID NO: 841842 - RNA, 27 nt, Human
guuccaggcacucaguggcauggguau

SEQ ID NO: 841843 - RNA, 20 nt, Human
uagcagaggguuucugggcc

SEQ ID NO: 841844 - RNA, 25 nt, Human
uauuucauacccuaaggcaauuuua

SEQ ID NO: 841845 - RNA, 21 nt, Human
ucacccauccaggaaaaggug

SEQ ID NO: 841846 - RNA, 22 nt, Human
ucagccaggacucuccagcugu

SEQ ID NO: 841847 - RNA, 19 nt, Human
ucagccucagcuccaaaua

SEQ ID NO: 841848 - RNA, 20 nt, Human
ucccaaagggucaccuggug

SEQ ID NO: 841849 - RNA, 23 nt, Human
ucccaaagggucaccuggugaag

SEQ ID NO: 841850 - RNA, 19 nt, Human
uccccgcaccuucaaucuc

SEQ ID NO: 841851 - RNA, 21 nt, Human
uccccgcugcagccacaccaa

SEQ ID NO: 841852 - RNA, 23 nt, Human
uccgcgccaggcgcgucucgggg

SEQ ID NO: 841853 - RNA, 23 nt, Human
uccugguugaaagaaacugagac

SEQ ID NO: 841854 - RNA, 22 nt, Human
ucgcucaguccuccuuccucgg

SEQ ID NO: 841855 - RNA, 23 nt, Human
ucuccuggcuugccucacccauc

SEQ ID NO: 841856 - RNA, 19 nt, Human
ucucuggaucuacuucccc

SEQ ID NO: 841857 - RNA, 20 nt, Human
ucucugggaccacagcuggg

SEQ ID NO: 841858 - RNA, 22 nt, Human
ucucugggaccacagcuggguu

SEQ ID NO: 841859 - RNA, 22 nt, Human
ucugcaggaaaccucagagucc

SEQ ID NO: 841860 - RNA, 23 nt, Human
ucugggagccugccaggccuggg

SEQ ID NO: 841861 - RNA, 18 nt, Human
ucugggugagauguagag

SEQ ID NO: 841862 - RNA, 18 nt, Human
ucugguggcuucaaguuc

SEQ ID NO: 841863 - RNA, 24 nt, Human
ugaaacucccaaggcucagccagg

SEQ ID NO: 841864 - RNA, 19 nt, Human
ugaaaggaugagaacagag

SEQ ID NO: 841865 - RNA, 21 nt, Human
ugaaccaaacugccacugcua

SEQ ID NO: 841866 - RNA, 21 nt, Human
ugaacccauucugaguacaga

SEQ ID NO: 841867 - RNA, 19 nt, Human
ugaagucaagugcuguuga

SEQ ID NO: 841868 - RNA, 28 nt, Human
ugaguugugaacccagacccuuccccuu

SEQ ID NO: 841869 - RNA, 18 nt, Human
ugcucucagagcccacau

SEQ ID NO: 841870 - RNA, 24 nt, Human
ugcuugcucuccuggcuugccuca

SEQ ID NO: 841871 - RNA, 21 nt, Human
uggagcacugauuccagccag

SEQ ID NO: 841872 - RNA, 19 nt, Human
uggagcaggccuggccccu

SEQ ID NO: 841873 - RNA, 18 nt, Human
uggcauggguauucugca

SEQ ID NO: 841874 - RNA, 23 nt, Human
ugggcaggcucagagcagguccc

SEQ ID NO: 841875 - RNA, 21 nt, Human
uggggaggggcucuaggcagc

SEQ ID NO: 841876 - RNA, 24 nt, Human
uggguagcagaggguuucugggcc

SEQ ID NO: 841877 - RNA, 24 nt, Human
uggguauucugcacacaaaauuuc

SEQ ID NO: 841878 - RNA, 18 nt, Human
uguagggaaagaauggag

SEQ ID NO: 841879 - RNA, 20 nt, Human
uucacugaauccucucaaca

SEQ ID NO: 841880 - RNA, 19 nt, Human
uugaaagaaacugagaccu

SEQ ID NO: 841881 - RNA, 23 nt, Human
aaaauagauuuacuauucaugaa

SEQ ID NO: 841882 - RNA, 21 nt, Human
aaccaaauaaacauaucuacc

SEQ ID NO: 841883 - RNA, 25 nt, Human
aaccaggacaucaagguaauacuuc

SEQ ID NO: 841884 - RNA, 23 nt, Human
aaccauauugacgaagauuggcc

SEQ ID NO: 841885 - RNA, 23 nt, Human
aaucgaugacaaccaaaaaccaa

SEQ ID NO: 841886 - RNA, 24 nt, Human
acaaaaaagucuauaaaacaaaga

SEQ ID NO: 841887 - RNA, 22 nt, Human
accauauugacgaagauuggcc

SEQ ID NO: 841888 - RNA, 21 nt, Human
acuggaaagcuucugcucgca

SEQ ID NO: 841889 - RNA, 19 nt, Human
acuucucuaaaccauauug

SEQ ID NO: 841890 - RNA, 21 nt, Human
agauucucugauaccauaugg

SEQ ID NO: 841891 - RNA, 19 nt, Human
augaaaguucacauccaga

SEQ ID NO: 841892 - RNA, 21 nt, Human
augugcccuuccuccaggaag

SEQ ID NO: 841893 - RNA, 20 nt, Human
augugugacuggaaagcuuc

SEQ ID NO: 841894 - RNA, 21 nt, Human
caaccaaaaaccaaauaaacu

SEQ ID NO: 841895 - RNA, 24 nt, Human
caaggaaacaggaacauggcuuuc

SEQ ID NO: 841896 - RNA, 18 nt, Human
caccgguaaccaauagac

SEQ ID NO: 841897 - RNA, 23 nt, Human
caccgugcgccgcuggcccgcgc

SEQ ID NO: 841898 - RNA, 19 nt, Human
cagcugcgaaguuuaacag

SEQ ID NO: 841899 - RNA, 26 nt, Human
caguaaaaauagauuuacuauucaug

SEQ ID NO: 841900 - RNA, 26 nt, Human
ccaaauaaacauaucuaccaaaugaa

SEQ ID NO: 841901 - RNA, 26 nt, Human
ccaccuaaaacgagggucucagcugc

SEQ ID NO: 841902 - RNA, 23 nt, Human
ccagaugucuuuuuaaaucaaau

SEQ ID NO: 841903 - RNA, 18 nt, Human
ccaucucuucaguguauu

SEQ ID NO: 841904 - RNA, 24 nt, Human
cccucuuucucccucccaaagccc

SEQ ID NO: 841905 - RNA, 22 nt, Human
cuaggucccucuuucucccucc

SEQ ID NO: 841906 - RNA, 25 nt, Human
cucaaauuucuucaccuuuuccauu

SEQ ID NO: 841907 - RNA, 19 nt, Human
cucuucaguguauucuggc

SEQ ID NO: 841908 - RNA, 18 nt, Human
cucuuucucccucccaaa

SEQ ID NO: 841909 - RNA, 19 nt, Human
gacauuuuucccauuuuuc

SEQ ID NO: 841910 - RNA, 25 nt, Human
gaugcaucugaaaccaggacaucaa

SEQ ID NO: 841911 - RNA, 18 nt, Human
gcccgcgcuaggucccuc

SEQ ID NO: 841912 - RNA, 21 nt, Human
ggaaggaauuaugaccuuggu

SEQ ID NO: 841913 - RNA, 22 nt, Human
ggaaggaauuaugaccuuggua

SEQ ID NO: 841914 - RNA, 22 nt, Human
guuuucaucugguccucuccac

SEQ ID NO: 841915 - RNA, 18 nt, Human
uaauuguaaaaaaauaac

SEQ ID NO: 841916 - RNA, 19 nt, Human
uaauuguaaaaaaauaacu

SEQ ID NO: 841917 - RNA, 25 nt, Human
uacauacaacaaaaaagucuauaaa

SEQ ID NO: 841918 - RNA, 18 nt, Human
uacaugaaaguucacauc

SEQ ID NO: 841919 - RNA, 20 nt, Human
uaccauauggaggaucagua

SEQ ID NO: 841920 - RNA, 24 nt, Human
uaccuauuuucuggaucauacaug

SEQ ID NO: 841921 - RNA, 23 nt, Human
uagauuaauuguaaaaaaauaac

SEQ ID NO: 841922 - RNA, 18 nt, Human
uaucuccuucugugaacc

SEQ ID NO: 841923 - RNA, 22 nt, Human
ucaaaauaugugcccuuccucc

SEQ ID NO: 841924 - RNA, 22 nt, Human
ucaauuccauccaaucacacau

SEQ ID NO: 841925 - RNA, 22 nt, Human
ucccauuuuucuauccccuuug

SEQ ID NO: 841926 - RNA, 19 nt, Human
ucccucuuucucccuccca

SEQ ID NO: 841927 - RNA, 24 nt, Human
uccuggguggauuuuucuuccuug

SEQ ID NO: 841928 - RNA, 19 nt, Human
uccuuggcaauucuuuuug

SEQ ID NO: 841929 - RNA, 24 nt, Human
ugaaaccaggacaucaagguaaua

SEQ ID NO: 841930 - RNA, 19 nt, Human
ugccaaggcaccaucucuu

SEQ ID NO: 841931 - RNA, 25 nt, Human
uggcaauguaaaucgaugacaacca

SEQ ID NO: 841932 - RNA, 22 nt, Human
uggguggauuuuucuuccuugg

SEQ ID NO: 841933 - RNA, 19 nt, Human
ugugcccuuccuccaggaa

SEQ ID NO: 841934 - RNA, 20 nt, Human
uuaaaagucaacaauauuaa

SEQ ID NO: 841935 - RNA, 22 nt, Human
uuagaugcaucugaaaccagga

SEQ ID NO: 841936 - RNA, 24 nt, Human
uucaauuccauccaaucacacauc

SEQ ID NO: 841937 - RNA, 23 nt, Human
uucaccuuuuccauugugaucaa

SEQ ID NO: 841938 - RNA, 21 nt, Human
uucaucugguccucuccacuu

SEQ ID NO: 841939 - RNA, 18 nt, Human
uucugugaaccuguucuu

SEQ ID NO: 841940 - RNA, 19 nt, Human
uucuucaccuuuuccauug

SEQ ID NO: 841941 - RNA, 18 nt, Human
uucuuccuuggcaauucu

SEQ ID NO: 841942 - RNA, 18 nt, Human
uuucccauuuuucuaucc

SEQ ID NO: 841943 - RNA, 21 nt, Human
uuuucuggaucauacaugaaa

SEQ ID NO: 841944 - RNA, 23 nt, Human
uuuuuuuuuuuuagaaauucuca

SEQ ID NO: 841945 - RNA, 20 nt, Human
aacagcuggcucccccaaga

SEQ ID NO: 841946 - RNA, 18 nt, Human
aaccaauacccacaaaau

SEQ ID NO: 841947 - RNA, 22 nt, Human
aaccaauacccacaaaauccug

SEQ ID NO: 841948 - RNA, 24 nt, Human
aagaagccaacagccacagcagga

SEQ ID NO: 841949 - RNA, 21 nt, Human
acacaauaaagacacaguauc

SEQ ID NO: 841950 - RNA, 25 nt, Human
acacaccugcacucacacacacaca

SEQ ID NO: 841951 - RNA, 22 nt, Human
aggcuuucgggcaagguaguuc

SEQ ID NO: 841952 - RNA, 22 nt, Human
agguaguucuggcaccacagga

SEQ ID NO: 841953 - RNA, 22 nt, Human
auuaugcaaugguuaucaggaa

SEQ ID NO: 841954 - RNA, 24 nt, Human
caauacccacaaaauccuguauga

SEQ ID NO: 841955 - RNA, 19 nt, Human
ccaauacccacaaaauccu

SEQ ID NO: 841956 - RNA, 19 nt, Human
cccaagauagccagcggcc

SEQ ID NO: 841957 - RNA, 18 nt, Human
cccgcuucucccagcgcc

SEQ ID NO: 841958 - RNA, 21 nt, Human
cgagaucuugucagagaaccu

SEQ ID NO: 841959 - RNA, 18 nt, Human
cgcccuaggaaagcgaga

SEQ ID NO: 841960 - RNA, 22 nt, Human
cgcucugucacaagcucaccuc

SEQ ID NO: 841961 - RNA, 26 nt, Human
cguggucccacgaaacugggucucuu

SEQ ID NO: 841962 - RNA, 20 nt, Human
cuggcaguggggcauagucc

SEQ ID NO: 841963 - RNA, 23 nt, Human
gaccuuugaacgccuucaccgcc

SEQ ID NO: 841964 - RNA, 19 nt, Human
gagcauggcucagcgcugc

SEQ ID NO: 841965 - RNA, 19 nt, Human
gccuguuuccuggcagugg

SEQ ID NO: 841966 - RNA, 18 nt, Human
ggaagacgggguaaaucu

SEQ ID NO: 841967 - RNA, 19 nt, Human
uaagaagccaacagccaca

SEQ ID NO: 841968 - RNA, 20 nt, Human
uaagaagccaacagccacag

SEQ ID NO: 841969 - RNA, 22 nt, Human
uaagaagccaacagccacagca

SEQ ID NO: 841970 - RNA, 19 nt, Human
uauaauaaagacacacacc

SEQ ID NO: 841971 - RNA, 21 nt, Human
ucaaaccaggucugagugaca

SEQ ID NO: 841972 - RNA, 22 nt, Human
uccggugggagggaggcggaag

SEQ ID NO: 841973 - RNA, 20 nt, Human
ucgcucugucacaagcucac

SEQ ID NO: 841974 - RNA, 18 nt, Human
ucucccagcgccccuucc

SEQ ID NO: 841975 - RNA, 20 nt, Human
ucucccagcgccccuucccg

SEQ ID NO: 841976 - RNA, 24 nt, Human
uggcaguggggcauaguccaacag

SEQ ID NO: 841977 - RNA, 18 nt, Human
uggucccacgaaacuggg

SEQ ID NO: 841978 - RNA, 24 nt, Human
uuaacuaucaaaaggacaaaaugc

SEQ ID NO: 841979 - RNA, 23 nt, Human
uuggaauaaucuuucauuuuaua

SEQ ID NO: 841980 - RNA, 19 nt, Human
uuuacacaacuguucaagc

SEQ ID NO: 841981 - RNA, 22 nt, Human
acaccgggccuccagcggaggc

SEQ ID NO: 841982 - RNA, 19 nt, Human
accacaccgggccuccagc

SEQ ID NO: 841983 - RNA, 22 nt, Human
agccacggcaaugacauugucc

SEQ ID NO: 841984 - RNA, 18 nt, Human
agcgucuccacgugagcg

SEQ ID NO: 841985 - RNA, 19 nt, Human
aguccagacuguccacacu

SEQ ID NO: 841986 - RNA, 20 nt, Human
caaugaugccuuuucucuga

SEQ ID NO: 841987 - RNA, 23 nt, Human
caccgggccuccagcggaggcgg

SEQ ID NO: 841988 - RNA, 21 nt, Human
cagacuguccacacugaucuc

SEQ ID NO: 841989 - RNA, 18 nt, Human
cagcagcgccugucucgc

SEQ ID NO: 841990 - RNA, 21 nt, Human
cggaaccacaccgggccucca

SEQ ID NO: 841991 - RNA, 20 nt, Human
cggacaaugaugccuuuucu

SEQ ID NO: 841992 - RNA, 23 nt, Human
gaucucgucuuuccuccgcuuac

SEQ ID NO: 841993 - RNA, 21 nt, Human
gcagcagcgccugucucgcgc

SEQ ID NO: 841994 - RNA, 23 nt, Human
gcaggugcgucacuguucuuaau

SEQ ID NO: 841995 - RNA, 28 nt, Human
gccgugauccuaaauggguccggcgccg

SEQ ID NO: 841996 - RNA, 21 nt, Human
gguuugaggcuggcgcgcggu

SEQ ID NO: 841997 - RNA, 24 nt, Human
uccacggggugccaggcugugugc

SEQ ID NO: 841998 - RNA, 22 nt, Human
uccagcggaggcggcuuucucc

SEQ ID NO: 841999 - RNA, 19 nt, Human
uccugugucugugaaggga

SEQ ID NO: 842000 - RNA, 18 nt, Human
ucucucgaggccuccagg

SEQ ID NO: 842001 - RNA, 26 nt, Human
ugaaauaaauacauuuauucugagua

SEQ ID NO: 842002 - RNA, 24 nt, Human
ugauguccacgauguuaaagcuuc

SEQ ID NO: 842003 - RNA, 22 nt, Human
uuaauggagcggacaaugaugc

SEQ ID NO: 842004 - RNA, 28 nt, Human
aaacaaaacaguuugccauuccuuuaac

SEQ ID NO: 842005 - RNA, 24 nt, Human
acccugcuggcaugaugggugagg

SEQ ID NO: 842006 - RNA, 18 nt, Human
agcagggcuucugaagcu

SEQ ID NO: 842007 - RNA, 18 nt, Human
agcuaugaggcaaguaca

SEQ ID NO: 842008 - RNA, 21 nt, Human
aggaaaugggcagagggucaa

SEQ ID NO: 842009 - RNA, 21 nt, Human
caacacagugacaguggggag

SEQ ID NO: 842010 - RNA, 18 nt, Human
cacacaaacaagucucug

SEQ ID NO: 842011 - RNA, 21 nt, Human
cagugacaguggggagugggu

SEQ ID NO: 842012 - RNA, 24 nt, Human
cauauucccuauccugccaauacc

SEQ ID NO: 842013 - RNA, 23 nt, Human
ccaauaccacagauaccuuuagg

SEQ ID NO: 842014 - RNA, 18 nt, Human
ccaguaaauauucccuga

SEQ ID NO: 842015 - RNA, 23 nt, Human
ccccugggccuaaagccugguuu

SEQ ID NO: 842016 - RNA, 23 nt, Human
ccuccaagagcagagggagcgga

SEQ ID NO: 842017 - RNA, 23 nt, Human
cggcaacgugagaaggcacugac

SEQ ID NO: 842018 - RNA, 20 nt, Human
cuaacgucaagaacuuggaa

SEQ ID NO: 842019 - RNA, 19 nt, Human
cugcugccaucuuucaugc

SEQ ID NO: 842020 - RNA, 23 nt, Human
cuguaaugcauauucccuauccu

SEQ ID NO: 842021 - RNA, 20 nt, Human
cuugucucuucuuucaccga

SEQ ID NO: 842022 - RNA, 20 nt, Human
gaaaagacugcgaggucuau

SEQ ID NO: 842023 - RNA, 19 nt, Human
gacccugcuggcaugaugg

SEQ ID NO: 842024 - RNA, 20 nt, Human
uaccugaagaauacggcaac

SEQ ID NO: 842025 - RNA, 22 nt, Human
uauucccugaacccccgucgcg

SEQ ID NO: 842026 - RNA, 24 nt, Human
ucacccuagggcugcugccaucuu

SEQ ID NO: 842027 - RNA, 24 nt, Human
ucaggguugcuaggaacaugggua

SEQ ID NO: 842028 - RNA, 19 nt, Human
uccccugggccuaaagccu

SEQ ID NO: 842029 - RNA, 19 nt, Human
uccuucaccagcuaugagg

SEQ ID NO: 842030 - RNA, 24 nt, Human
ucucaggguugcuaggaacauggg

SEQ ID NO: 842031 - RNA, 22 nt, Human
ugagaaggcacugacccggcug

SEQ ID NO: 842032 - RNA, 23 nt, Human
uggaagaaaaucaucucaggguu

SEQ ID NO: 842033 - RNA, 22 nt, Human
uggggccacacaaacaagucuc

SEQ ID NO: 842034 - RNA, 24 nt, Human
ugggguggagcccuuaccuccacu

SEQ ID NO: 842035 - RNA, 19 nt, Human
uggguaagaccagacugua

SEQ ID NO: 842036 - RNA, 19 nt, Human
uggguggguggaaaaaugg

SEQ ID NO: 842037 - RNA, 23 nt, Human
uggguggguggaaaaaugggagg

SEQ ID NO: 842038 - RNA, 20 nt, Human
ugugccacggaagacagagc

SEQ ID NO: 842039 - RNA, 20 nt, Human
uucaugcccagagucaaauc

SEQ ID NO: 842040 - RNA, 21 nt, Human
uugugccacggaagacagagc

SEQ ID NO: 842041 - RNA, 19 nt, Human
aaacaaaugugcaccacga

SEQ ID NO: 842042 - RNA, 18 nt, Human
aaaugugaaagcugcagu

SEQ ID NO: 842043 - RNA, 20 nt, Human
aagacaaaugccauaaaugu

SEQ ID NO: 842044 - RNA, 19 nt, Human
accacauuuagaauccagc

SEQ ID NO: 842045 - RNA, 23 nt, Human
aggugccagcggcguacuaaagc

SEQ ID NO: 842046 - RNA, 19 nt, Human
cgcuugcaaaggcgugugc

SEQ ID NO: 842047 - RNA, 18 nt, Human
guacuaaagcaccgacuc

SEQ ID NO: 842048 - RNA, 18 nt, Human
ugcaguuugcaauauacc

SEQ ID NO: 842049 - RNA, 19 nt, Human
ugccagcggcguacuaaag

SEQ ID NO: 842050 - RNA, 20 nt, Human
uuuuuuuuuuuuuuuuguuu

SEQ ID NO: 842051 - RNA, 21 nt, Human
aaaccuccaggccccggcucc

SEQ ID NO: 842052 - RNA, 22 nt, Human
aaaccuccaggccccggcuccu

SEQ ID NO: 842053 - RNA, 24 nt, Human
aaauagcucaaaacuaucuugcau

SEQ ID NO: 842054 - RNA, 21 nt, Human
aagcaggaagaagagcuuccu

SEQ ID NO: 842055 - RNA, 20 nt, Human
acagagagaggaaaucuaaa

SEQ ID NO: 842056 - RNA, 18 nt, Human
aggguuaaagguggaagc

SEQ ID NO: 842057 - RNA, 19 nt, Human
cggcuccuuucgcccgcug

SEQ ID NO: 842058 - RNA, 21 nt, Human
cgggaccaggcgaccgguacg

SEQ ID NO: 842059 - RNA, 18 nt, Human
cuccugggucuggacuug

SEQ ID NO: 842060 - RNA, 26 nt, Human
cuugcucuccugggucuggacuugua

SEQ ID NO: 842061 - RNA, 21 nt, Human
gaagccaagcaggaagaagag

SEQ ID NO: 842062 - RNA, 19 nt, Human
gcuuugagauuugauuggu

SEQ ID NO: 842063 - RNA, 21 nt, Human
ggaagaagagcuuccuuaugg

SEQ ID NO: 842064 - RNA, 20 nt, Human
ggugccgggaccaggcgaca

SEQ ID NO: 842065 - RNA, 19 nt, Human
gugccgggaccaggcgacc

SEQ ID NO: 842066 - RNA, 23 nt, Human
uccaggccccggcuccuuucgcc

SEQ ID NO: 842067 - RNA, 19 nt, Human
uccugggucuggacuugua

SEQ ID NO: 842068 - RNA, 23 nt, Human
ucugggccuugcucuccuggguc

SEQ ID NO: 842069 - RNA, 20 nt, Human
uggaagccaagcaggaagaa

SEQ ID NO: 842070 - RNA, 21 nt, Human
ugggaaaccacacugggcggc

SEQ ID NO: 842071 - RNA, 22 nt, Human
uuccuuaugggaaaccacacug

SEQ ID NO: 842072 - RNA, 20 nt, Human
uucugugcuuugagauuuga

SEQ ID NO: 842073 - RNA, 18 nt, Human
uuuaaaaaacuguaaaaa

SEQ ID NO: 842074 - RNA, 22 nt, Human
aaguacaagagaucaacuaacu

SEQ ID NO: 842075 - RNA, 23 nt, Human
acauagguugaauuuggggguug

SEQ ID NO: 842076 - RNA, 19 nt, Human
accacugugagaggagauc

SEQ ID NO: 842077 - RNA, 23 nt, Human
acucuguucuuuaggaaaaaagu

SEQ ID NO: 842078 - RNA, 21 nt, Human
acugcaauuaggauuuggacc

SEQ ID NO: 842079 - RNA, 23 nt, Human
acuuuguauguuuuagaaaaaaa

SEQ ID NO: 842080 - RNA, 20 nt, Human
aguccuuuuugauuauucuu

SEQ ID NO: 842081 - RNA, 24 nt, Human
auauauccacuccacucuguucuu

SEQ ID NO: 842082 - RNA, 24 nt, Human
caaugcaaaugugcacaacauaaa

SEQ ID NO: 842083 - RNA, 23 nt, Human
cauuaccacugugagaggagauc

SEQ ID NO: 842084 - RNA, 23 nt, Human
ccaaugcaaaugugcacaacaua

SEQ ID NO: 842085 - RNA, 23 nt, Human
cuacauacugaagauuagaaaaa

SEQ ID NO: 842086 - RNA, 20 nt, Human
gagcauaauccaucauuuuu

SEQ ID NO: 842087 - RNA, 19 nt, Human
ggaaaaaaguagcuuuucc

SEQ ID NO: 842088 - RNA, 18 nt, Human
gugaauauauccacucca

SEQ ID NO: 842089 - RNA, 19 nt, Human
uaauuugauuuaaucacau

SEQ ID NO: 842090 - RNA, 22 nt, Human
uacauaaaaguuguuacuguuu

SEQ ID NO: 842091 - RNA, 25 nt, Human
uaguaaguccuauugguauaagucc

SEQ ID NO: 842092 - RNA, 20 nt, Human
ugaagauuagaaaaaaaucu

SEQ ID NO: 842093 - RNA, 23 nt, Human
uugauuauucuucucaaaccagu

SEQ ID NO: 842094 - RNA, 23 nt, Human
uuucauuuuuuuauucuaaggag

SEQ ID NO: 842095 - RNA, 25 nt, Human
uuuuuuuuuuuuuuuuucagccauu

SEQ ID NO: 842096 - RNA, 24 nt, Human
uuuuuuuuuuuuuuuuuuuuucag

SEQ ID NO: 842097 - RNA, 21 nt, Human
cccggcccuacccaccccuuc

SEQ ID NO: 842098 - RNA, 18 nt, Human
cccuacccaccccuuccg

SEQ ID NO: 842099 - RNA, 20 nt, Human
ucgcccggcccuacccaccc

SEQ ID NO: 842100 - RNA, 20 nt, Human
aagcagggccccaguaugug

SEQ ID NO: 842101 - RNA, 25 nt, Human
acccuaaguaacagaugcaaggagg

SEQ ID NO: 842102 - RNA, 18 nt, Human
caaccacgccccaggaga

SEQ ID NO: 842103 - RNA, 20 nt, Human
caagacccaagccuugaccc

SEQ ID NO: 842104 - RNA, 21 nt, Human
caagacccaagccuugacccu

SEQ ID NO: 842105 - RNA, 23 nt, Human
caagucuuaggaguuugagaagg

SEQ ID NO: 842106 - RNA, 19 nt, Human
ccacgccccaggagagcuc

SEQ ID NO: 842107 - RNA, 19 nt, Human
cccaagccuugacccuaag

SEQ ID NO: 842108 - RNA, 18 nt, Human
cgcuggggccgggucguc

SEQ ID NO: 842109 - RNA, 19 nt, Human
cuugacccuaaguaacaga

SEQ ID NO: 842110 - RNA, 21 nt, Human
gccuuagcuacuuucaguuau

SEQ ID NO: 842111 - RNA, 19 nt, Human
gggcucccaggacaggcuc

SEQ ID NO: 842112 - RNA, 22 nt, Human
uaacagaugcaaggaucacgaa

SEQ ID NO: 842113 - RNA, 19 nt, Human
uccuccggcuggggugccu

SEQ ID NO: 842114 - RNA, 19 nt, Human
ugccuuagcuacuuucagu

SEQ ID NO: 842115 - RNA, 18 nt, Human
ugcgcuggggccgggucg

SEQ ID NO: 842116 - RNA, 24 nt, Human
uggaaaguuaggguccuuuauugg

SEQ ID NO: 842117 - RNA, 22 nt, Human
ugggagaauaagcagggcccca

SEQ ID NO: 842118 - RNA, 19 nt, Human
uuccuccggcuggggugcc

SEQ ID NO: 842119 - RNA, 24 nt, Human
uugacccuaaguaacagaugcaaa

SEQ ID NO: 842120 - RNA, 22 nt, Human
aacccauuuauauugugggugu

SEQ ID NO: 842121 - RNA, 24 nt, Human
cacuugggccauuuuggaacccau

SEQ ID NO: 842122 - RNA, 21 nt, Human
cauacuagccucugagacugc

SEQ ID NO: 842123 - RNA, 21 nt, Human
ccccauacuagccucugagac

SEQ ID NO: 842124 - RNA, 21 nt, Human
cuuggcagaccucgguccucu

SEQ ID NO: 842125 - RNA, 23 nt, Human
cuuggcagaccucgguccucucc

SEQ ID NO: 842126 - RNA, 24 nt, Human
aaagccaucaucccaugaaaaagu

SEQ ID NO: 842127 - RNA, 19 nt, Human
aaagugccgggauuacagg

SEQ ID NO: 842128 - RNA, 24 nt, Human
aaagugccgggauuacaggaguga

SEQ ID NO: 842129 - RNA, 21 nt, Human
aacaaagccaucaucccauga

SEQ ID NO: 842130 - RNA, 26 nt, Human
aagugccgggauuacaggagugagcc

SEQ ID NO: 842131 - RNA, 25 nt, Human
acuauguugcccaggcugaucuuga

SEQ ID NO: 842132 - RNA, 20 nt, Human
agaaaacagcuucauucuca

SEQ ID NO: 842133 - RNA, 20 nt, Human
agagugaacuugcaucuguu

SEQ ID NO: 842134 - RNA, 20 nt, Human
agccaccacaccuggcccca

SEQ ID NO: 842135 - RNA, 20 nt, Human
agccaccacaccuggcccca

SEQ ID NO: 842136 - RNA, 21 nt, Human
agccaccacaccuggccccaa

SEQ ID NO: 842137 - RNA, 25 nt, Human
aggugauccaccugccuuggcauuc

SEQ ID NO: 842138 - RNA, 24 nt, Human
aguuaacuaacagagugaacuugg

SEQ ID NO: 842139 - RNA, 22 nt, Human
aguuacaugaaucucagcugca

SEQ ID NO: 842140 - RNA, 20 nt, Human
aucccaugaaaaagugaaac

SEQ ID NO: 842141 - RNA, 22 nt, Human
augaaucucagcugcaacaaag

SEQ ID NO: 842142 - RNA, 21 nt, Human
augugaaacuauuauuaccac

SEQ ID NO: 842143 - RNA, 24 nt, Human
caaagugccgggauuacaggagug

SEQ ID NO: 842144 - RNA, 18 nt, Human
caacaaagccaucauccc

SEQ ID NO: 842145 - RNA, 23 nt, Human
caccugccuuggcauuccaaagu

SEQ ID NO: 842146 - RNA, 24 nt, Human
caccugccuuggcauuccaaagug

SEQ ID NO: 842147 - RNA, 19 nt, Human
cacuauguugcccaggcug

SEQ ID NO: 842148 - RNA, 24 nt, Human
cacuauguugcccaggcugaucuu

SEQ ID NO: 842149 - RNA, 27 nt, Human
cacuauguugcccaggcugaucuugaa

SEQ ID NO: 842150 - RNA, 23 nt, Human
cagguuucacuauguugcccagg

SEQ ID NO: 842151 - RNA, 20 nt, Human
ccaaagugccgggauuacag

SEQ ID NO: 842152 - RNA, 21 nt, Human
ccaaagugccgggauuacagg

SEQ ID NO: 842153 - RNA, 21 nt, Human
ccaaagugccgggauuacagg

SEQ ID NO: 842154 - RNA, 24 nt, Human
ccaaagugccgggauuacaggagu

SEQ ID NO: 842155 - RNA, 18 nt, Human
ccacaccuggccccaaau

SEQ ID NO: 842156 - RNA, 18 nt, Human
ccaccacaccuggcccca

SEQ ID NO: 842157 - RNA, 21 nt, Human
ccaccacaccuggccccaaau

SEQ ID NO: 842158 - RNA, 19 nt, Human
ccuaaagaaaacagcuuca

SEQ ID NO: 842159 - RNA, 18 nt, Human
ccuaggcucaggugaucc

SEQ ID NO: 842160 - RNA, 24 nt, Human
ccuaggcucaggugauccaccugc

SEQ ID NO: 842161 - RNA, 20 nt, Human
ccuuggcauuccaaagugcc

SEQ ID NO: 842162 - RNA, 22 nt, Human
cgggauuacaggagugagccac

SEQ ID NO: 842163 - RNA, 24 nt, Human
cgggauuacaggagugagccacca

SEQ ID NO: 842164 - RNA, 20 nt, Human
cucaggugauccaccugccu

SEQ ID NO: 842165 - RNA, 20 nt, Human
cucaggugauccaccugccu

SEQ ID NO: 842166 - RNA, 24 nt, Human
cucaggugauccaccugccuuggc

SEQ ID NO: 842167 - RNA, 21 nt, Human
cucgugccgaauucuuggccu

SEQ ID NO: 842168 - RNA, 20 nt, Human
cuugaacuccuaggcucagg

SEQ ID NO: 842169 - RNA, 18 nt, Human
gauuacaggagugagcca

SEQ ID NO: 842170 - RNA, 24 nt, Human
gcucaggugauccaccugccuugg

SEQ ID NO: 842171 - RNA, 23 nt, Human
gggauuacaggagugagccacca

SEQ ID NO: 842172 - RNA, 24 nt, Human
gugauccaccugccuuggcauucc

SEQ ID NO: 842173 - RNA, 24 nt, Human
guuucacuauguugcccaggcuga

SEQ ID NO: 842174 - RNA, 25 nt, Human
uaacaaagacuaccaguuaacuaac

SEQ ID NO: 842175 - RNA, 22 nt, Human
uacaggagugagccaccacacc

SEQ ID NO: 842176 - RNA, 23 nt, Human
uacaggagugagccaccacaccu

SEQ ID NO: 842177 - RNA, 23 nt, Human
uacaggagugagccaccacaccu

SEQ ID NO: 842178 - RNA, 20 nt, Human
uauguugcccaggcugaucu

SEQ ID NO: 842179 - RNA, 24 nt, Human
uauguugcccaggcugaucuugaa

SEQ ID NO: 842180 - RNA, 20 nt, Human
ucuugaacuccuaggcucag

SEQ ID NO: 842181 - RNA, 19 nt, Human
ugaaacacacuuagaaaag

SEQ ID NO: 842182 - RNA, 24 nt, Human
ugaucuugaacuccuaggcucagg

SEQ ID NO: 842183 - RNA, 24 nt, Human
ugcccaggcugaucuugaacuccu

SEQ ID NO: 842184 - RNA, 24 nt, Human
ugccuuggcauuccaaagugccgg

SEQ ID NO: 842185 - RNA, 25 nt, Human
uuaaaaccuugaaucaccuuaacaa

SEQ ID NO: 842186 - RNA, 25 nt, Human
uuacagguucccucgugccgaauuc

SEQ ID NO: 842187 - RNA, 19 nt, Human
uuucacuauguugcccagg

SEQ ID NO: 842188 - RNA, 19 nt, Human
aaaagcaggcaaagcuacu

SEQ ID NO: 842189 - RNA, 18 nt, Human
aaaauaagaaacaugaau

SEQ ID NO: 842190 - RNA, 21 nt, Human
aaacaugaauccaggggaagg

SEQ ID NO: 842191 - RNA, 19 nt, Human
aaagcuacuggggguugcc

SEQ ID NO: 842192 - RNA, 20 nt, Human
aacaaaggaguacuaagaaa

SEQ ID NO: 842193 - RNA, 19 nt, Human
aagugcaauucccuucucc

SEQ ID NO: 842194 - RNA, 21 nt, Human
accccugcccaugccaacaaa

SEQ ID NO: 842195 - RNA, 23 nt, Human
acuugcaaaugaaacuccccaga

SEQ ID NO: 842196 - RNA, 23 nt, Human
agaaagcaaggcaaagcugucca

SEQ ID NO: 842197 - RNA, 21 nt, Human
aggaauccuuugguccacuuc

SEQ ID NO: 842198 - RNA, 18 nt, Human
aggacagauggccagguc

SEQ ID NO: 842199 - RNA, 18 nt, Human
agucgagaaagugggcac

SEQ ID NO: 842200 - RNA, 22 nt, Human
aucucggucuggagacaacacc

SEQ ID NO: 842201 - RNA, 20 nt, Human
caacuugcaaaugaaacucc

SEQ ID NO: 842202 - RNA, 27 nt, Human
caauucccuucucccuccaaaauaaga

SEQ ID NO: 842203 - RNA, 19 nt, Human
caccagaggaaugaugacc

SEQ ID NO: 842204 - RNA, 26 nt, Human
cagcagugcaucuaaugaugccucaa

SEQ ID NO: 842205 - RNA, 24 nt, Human
ccaugccaacaaaggaguacuaag

SEQ ID NO: 842206 - RNA, 25 nt, Human
cccccucccaccaucauucuggucc

SEQ ID NO: 842207 - RNA, 18 nt, Human
cccuccaaaauaagaaaa

SEQ ID NO: 842208 - RNA, 18 nt, Human
ccucccaccaucauucug

SEQ ID NO: 842209 - RNA, 19 nt, Human
cucaaccccugcccaugcc

SEQ ID NO: 842210 - RNA, 20 nt, Human
cugacucaaccccugcccau

SEQ ID NO: 842211 - RNA, 32 nt, Human
cugauggcagugugaagugcaauucccuucuu

SEQ ID NO: 842212 - RNA, 25 nt, Human
cugcugacucaaccccugcccaugc

SEQ ID NO: 842213 - RNA, 24 nt, Human
gaaaaacccuuucccacauagucc

SEQ ID NO: 842214 - RNA, 23 nt, Human
gaaauccuggccaaagucgagaa

SEQ ID NO: 842215 - RNA, 24 nt, Human
gcaaggcaaagcuguccaggacag

SEQ ID NO: 842216 - RNA, 21 nt, Human
gugcaauucccuucucccucc

SEQ ID NO: 842217 - RNA, 18 nt, Human
guucagaguguucagcug

SEQ ID NO: 842218 - RNA, 23 nt, Human
uaaggaaaaacccuuucccacau

SEQ ID NO: 842219 - RNA, 20 nt, Human
uauaaaagcaggcaaagcua

SEQ ID NO: 842220 - RNA, 22 nt, Human
uccaaaauaagaaacaugaauc

SEQ ID NO: 842221 - RNA, 23 nt, Human
uccaggacagauggccaggucag

SEQ ID NO: 842222 - RNA, 23 nt, Human
ucuucagaucagccacuugacuc

SEQ ID NO: 842223 - RNA, 21 nt, Human
ugaauccaggggaaggggcuu

SEQ ID NO: 842224 - RNA, 22 nt, Human
ugaccugguuacggaacagcgg

SEQ ID NO: 842225 - RNA, 23 nt, Human
ugcccccucccaccaucauucug

SEQ ID NO: 842226 - RNA, 22 nt, Human
uguccaggacagauggccaggu

SEQ ID NO: 842227 - RNA, 20 nt, Human
uguguauaaggugggguaaa

SEQ ID NO: 842228 - RNA, 20 nt, Human
uucuuugaaggaaauccugg

SEQ ID NO: 842229 - RNA, 19 nt, Human
uuucccacauaguccugcc

SEQ ID NO: 842230 - RNA, 24 nt, Human
uuucuuugaaggaaauccuggcca

SEQ ID NO: 842231 - RNA, 24 nt, Human
aaaaaaaaaguuuacuuccucagu

SEQ ID NO: 842232 - RNA, 24 nt, Human
aaaaacuggagaaacuagaacaaa

SEQ ID NO: 842233 - RNA, 18 nt, Human
aaaagcuggugggaguuu

SEQ ID NO: 842234 - RNA, 24 nt, Human
aaacagauguaggaauguuccaac

SEQ ID NO: 842235 - RNA, 21 nt, Human
aaacagcagaggacuaacuua

SEQ ID NO: 842236 - RNA, 24 nt, Human
aaacuagaacaaacaaauccaacu

SEQ ID NO: 842237 - RNA, 20 nt, Human
aacauggugaaacccagucu

SEQ ID NO: 842238 - RNA, 21 nt, Human
aacauggugaaacccagucuc

SEQ ID NO: 842239 - RNA, 21 nt, Human
aagaaaaaaaaagagaaagaa

SEQ ID NO: 842240 - RNA, 22 nt, Human
aagauagcuauaauuaauuugc

SEQ ID NO: 842241 - RNA, 22 nt, Human
aagugacuccagaggaaaaguu

SEQ ID NO: 842242 - RNA, 23 nt, Human
aagugacuccagaggaaaaguuu

SEQ ID NO: 842243 - RNA, 24 nt, Human
aauaguaauuaaccauuaaccaug

SEQ ID NO: 842244 - RNA, 28 nt, Human
aauucuaaaugugccuauuuuauuuuug

SEQ ID NO: 842245 - RNA, 20 nt, Human
aauuguuugaauccaggagg

SEQ ID NO: 842246 - RNA, 24 nt, Human
aauuguuugaauccaggaggcgga

SEQ ID NO: 842247 - RNA, 24 nt, Human
acagagcgagacugugucucaaaa

SEQ ID NO: 842248 - RNA, 20 nt, Human
acauaaccaucucucucaac

SEQ ID NO: 842249 - RNA, 24 nt, Human
accaacauggugaaacccagucuc

SEQ ID NO: 842250 - RNA, 24 nt, Human
acccagucucuacuaaaaauacaa

SEQ ID NO: 842251 - RNA, 27 nt, Human
acggcacuccagcagccugggcaacag

SEQ ID NO: 842252 - RNA, 19 nt, Human
acguucccccucccccgcc

SEQ ID NO: 842253 - RNA, 20 nt, Human
acuuggaauuauuggaaaua

SEQ ID NO: 842254 - RNA, 22 nt, Human
agaaaaaaaaagagaaagaaaa

SEQ ID NO: 842255 - RNA, 26 nt, Human
agaaacuagaacaaacaaauccaacu

SEQ ID NO: 842256 - RNA, 21 nt, Human
agacagaaaguugggaauagu

SEQ ID NO: 842257 - RNA, 23 nt, Human
agagagaaaaauccauuucuuca

SEQ ID NO: 842258 - RNA, 19 nt, Human
agcagguuaauuucacuca

SEQ ID NO: 842259 - RNA, 23 nt, Human
agccgggcgugguggcaugugcc

SEQ ID NO: 842260 - RNA, 18 nt, Human
agccgggugugguggcuc

SEQ ID NO: 842261 - RNA, 24 nt, Human
agccugaccaacauggugaaaccc

SEQ ID NO: 842262 - RNA, 20 nt, Human
aggaguuugagaccagccug

SEQ ID NO: 842263 - RNA, 23 nt, Human
aggcaggagaauuguuugaaucc

SEQ ID NO: 842264 - RNA, 21 nt, Human
aggccgaggcggguggaucac

SEQ ID NO: 842265 - RNA, 21 nt, Human
aggcggagguugcagugagcc

SEQ ID NO: 842266 - RNA, 24 nt, Human
aggcggagguugcagugagccgag

SEQ ID NO: 842267 - RNA, 24 nt, Human
aggcggguggaucacgaggucagg

SEQ ID NO: 842268 - RNA, 21 nt, Human
aggcuagaaugaguaaaagua

SEQ ID NO: 842269 - RNA, 21 nt, Human
aggcugaggcaggagaauugu

SEQ ID NO: 842270 - RNA, 24 nt, Human
aggcugaggcaggagaauuguuug

SEQ ID NO: 842271 - RNA, 23 nt, Human
aggggcagagagaaaaauccauu

SEQ ID NO: 842272 - RNA, 23 nt, Human
aguacugaaaacaacaagaaaau

SEQ ID NO: 842273 - RNA, 24 nt, Human
auccaggaggcggagguugcagug

SEQ ID NO: 842274 - RNA, 23 nt, Human
auguugugccuugguauuccaug

SEQ ID NO: 842275 - RNA, 23 nt, Human
auugcgccacggcacuccagcag

SEQ ID NO: 842276 - RNA, 18 nt, Human
auuggcucugaauucuaa

SEQ ID NO: 842277 - RNA, 23 nt, Human
auuuguaacuugaaauaucuguu

SEQ ID NO: 842278 - RNA, 24 nt, Human
caaaaacuggagaaacuagaacaa

SEQ ID NO: 842279 - RNA, 24 nt, Human
caacauggugaaacccagucucua

SEQ ID NO: 842280 - RNA, 23 nt, Human
caacauuaaaggaacaguuacau

SEQ ID NO: 842281 - RNA, 19 nt, Human
caagaaaagguaagaacua

SEQ ID NO: 842282 - RNA, 20 nt, Human
caagaaaauggcuuauuuca

SEQ ID NO: 842283 - RNA, 22 nt, Human
caaguagaaaacagguuuuguu

SEQ ID NO: 842284 - RNA, 19 nt, Human
caauaaauaagcuacuuuc

SEQ ID NO: 842285 - RNA, 20 nt, Human
cacaauugcaaguguguugg

SEQ ID NO: 842286 - RNA, 24 nt, Human
cacgaggucaggaguuugagacca

SEQ ID NO: 842287 - RNA, 22 nt, Human
cacggcacuccagcagccuggg

SEQ ID NO: 842288 - RNA, 27 nt, Human
cacggcacuccagcagccugggcaaca

SEQ ID NO: 842289 - RNA, 22 nt, Human
cagcaggaacaagcauaccaga

SEQ ID NO: 842290 - RNA, 19 nt, Human
cagccgggugugguggcuc

SEQ ID NO: 842291 - RNA, 24 nt, Human
cagccgggugugguggcucgcgcc

SEQ ID NO: 842292 - RNA, 24 nt, Human
cagcuacucaggaggcugaggcag

SEQ ID NO: 842293 - RNA, 24 nt, Human
caggauuuugggaggccgaggcgg

SEQ ID NO: 842294 - RNA, 24 nt, Human
cauuaucaaauauucagcacagcc

SEQ ID NO: 842295 - RNA, 23 nt, Human
ccaaacuugagauuaacaaaaau

SEQ ID NO: 842296 - RNA, 24 nt, Human
ccacggcacuccagcagccugggc

SEQ ID NO: 842297 - RNA, 27 nt, Human
ccacggcacuccagcagccugggcaac

SEQ ID NO: 842298 - RNA, 24 nt, Human
ccacggcacuccagcagccugggg

SEQ ID NO: 842299 - RNA, 22 nt, Human
cccaagaaaaauuuaaaaauac

SEQ ID NO: 842300 - RNA, 22 nt, Human
cccccgcccugccaaagcccac

SEQ ID NO: 842301 - RNA, 22 nt, Human
cccccucccccgcccugccaaa

SEQ ID NO: 842302 - RNA, 25 nt, Human
ccccgcccugccaaagcccacuaaa

SEQ ID NO: 842303 - RNA, 22 nt, Human
cccgccgccgcugccuccgccu

SEQ ID NO: 842304 - RNA, 18 nt, Human
ccgccgccgcugccuccg

SEQ ID NO: 842305 - RNA, 19 nt, Human
ccgccgcugccuccgccuc

SEQ ID NO: 842306 - RNA, 20 nt, Human
ccgccgcugccuccgccucg

SEQ ID NO: 842307 - RNA, 28 nt, Human
ccgccgcugccuccgccucggccgccug

SEQ ID NO: 842308 - RNA, 18 nt, Human
ccgccugagcugaggggc

SEQ ID NO: 842309 - RNA, 25 nt, Human
ccuauuaucauacuuggggcuugcu

SEQ ID NO: 842310 - RNA, 19 nt, Human
ccuccgccucggccgccug

SEQ ID NO: 842311 - RNA, 22 nt, Human
ccugaccaacauggugaaaccc

SEQ ID NO: 842312 - RNA, 23 nt, Human
ccugaccaacauggugaaaccca

SEQ ID NO: 842313 - RNA, 21 nt, Human
ccuguaaucccagcuacucag

SEQ ID NO: 842314 - RNA, 24 nt, Human
cgaggcggguggaucacgagguca

SEQ ID NO: 842315 - RNA, 18 nt, Human
cgccucggccgccugagc

SEQ ID NO: 842316 - RNA, 24 nt, Human
cgccuguaaucccaggauuuuggg

SEQ ID NO: 842317 - RNA, 24 nt, Human
cgcgccuguaaucccaggauuuug

SEQ ID NO: 842318 - RNA, 20 nt, Human
cuagaacaaacaaauccaac

SEQ ID NO: 842319 - RNA, 24 nt, Human
cucacuggcagaauuuuagcuguu

SEQ ID NO: 842320 - RNA, 25 nt, Human
cucacuggcagaauuuuagcuguua

SEQ ID NO: 842321 - RNA, 24 nt, Human
cucgcgccuguaaucccaggauuu

SEQ ID NO: 842322 - RNA, 22 nt, Human
cucuaacaacaauuuuucaaaa

SEQ ID NO: 842323 - RNA, 23 nt, Human
gaacaagcauaccagacacaauu

SEQ ID NO: 842324 - RNA, 22 nt, Human
gacaaaaacuggagaaacuaga

SEQ ID NO: 842325 - RNA, 23 nt, Human
gagaauuguuugaauccaggagg

SEQ ID NO: 842326 - RNA, 23 nt, Human
gagauugcgccacggcacuccag

SEQ ID NO: 842327 - RNA, 21 nt, Human
gagguugcagugagccgagau

SEQ ID NO: 842328 - RNA, 23 nt, Human
gagguugcagugagccgagauug

SEQ ID NO: 842329 - RNA, 21 nt, Human
gaguaaaaguagcuuuaaaaa

SEQ ID NO: 842330 - RNA, 24 nt, Human
gaguaaaaguagcuuuaaaaaugu

SEQ ID NO: 842331 - RNA, 21 nt, Human
gaucacgaggucaggaguuug

SEQ ID NO: 842332 - RNA, 22 nt, Human
gaucacgaggucaggaguuuga

SEQ ID NO: 842333 - RNA, 24 nt, Human
gaucacgaggucaggaguuugaga

SEQ ID NO: 842334 - RNA, 20 nt, Human
gauuaaugaacguucccccu

SEQ ID NO: 842335 - RNA, 25 nt, Human
gcagaaguaaacagcagaggacuaa

SEQ ID NO: 842336 - RNA, 22 nt, Human
gcaugugccuguaaucccagcu

SEQ ID NO: 842337 - RNA, 23 nt, Human
gccucggccgccugagcugaggg

SEQ ID NO: 842338 - RNA, 19 nt, Human
gcgccuguaaucccaggau

SEQ ID NO: 842339 - RNA, 24 nt, Human
gcugccuccgccucggccgccuga

SEQ ID NO: 842340 - RNA, 22 nt, Human
ggaggcggagguugcagugagc

SEQ ID NO: 842341 - RNA, 22 nt, Human
ggagguugcagugagccgagau

SEQ ID NO: 842342 - RNA, 24 nt, Human
ggagguugcagugagccgagauug

SEQ ID NO: 842343 - RNA, 21 nt, Human
ggcaugugccuguaaucccag

SEQ ID NO: 842344 - RNA, 21 nt, Human
ggcucgcgccuguaaucccag

SEQ ID NO: 842345 - RNA, 24 nt, Human
gggcgugguggcaugugccuguaa

SEQ ID NO: 842346 - RNA, 23 nt, Human
ggggaaaaaaucuauguuuuacc

SEQ ID NO: 842347 - RNA, 24 nt, Human
gggugugguggcucgcgccuguaa

SEQ ID NO: 842348 - RNA, 23 nt, Human
gguggaucacgaggucaggaguu

SEQ ID NO: 842349 - RNA, 24 nt, Human
gguggcaugugccuguaaucccag

SEQ ID NO: 842350 - RNA, 23 nt, Human
guggaucacgaggucaggaguuu

SEQ ID NO: 842351 - RNA, 23 nt, Human
guggcucgcgccuguaaucccag

SEQ ID NO: 842352 - RNA, 20 nt, Human
gugucucaaaaaacaaaaac

SEQ ID NO: 842353 - RNA, 24 nt, Human
guuaacacauuuauagcuuaaaga

SEQ ID NO: 842354 - RNA, 18 nt, Human
guucccccucccccgccc

SEQ ID NO: 842355 - RNA, 19 nt, Human
guugcagugagccgagauu

SEQ ID NO: 842356 - RNA, 21 nt, Human
guugcagugagccgagauugc

SEQ ID NO: 842357 - RNA, 22 nt, Human
guuuauuacaggggaaacacua

SEQ ID NO: 842358 - RNA, 21 nt, Human
uaaaacacaguauugguaagc

SEQ ID NO: 842359 - RNA, 25 nt, Human
uaaaaguagcuuuaaaaauguuuac

SEQ ID NO: 842360 - RNA, 19 nt, Human
uaaaaguucauuuuuacag

SEQ ID NO: 842361 - RNA, 24 nt, Human
uaaacagcagaggacuaacuuaca

SEQ ID NO: 842362 - RNA, 21 nt, Human
uaaacugaaugaccagacuug

SEQ ID NO: 842363 - RNA, 23 nt, Human
uaaauggaucagcuccugcagaa

SEQ ID NO: 842364 - RNA, 19 nt, Human
uaacaaccaauuccaauuc

SEQ ID NO: 842365 - RNA, 18 nt, Human
uaacagaaauuaacaacc

SEQ ID NO: 842366 - RNA, 20 nt, Human
uaauaaaugguauauauaca

SEQ ID NO: 842367 - RNA, 20 nt, Human
uacaauauuacuuuaaaaaa

SEQ ID NO: 842368 - RNA, 20 nt, Human
uacccgaauuaccagccuga

SEQ ID NO: 842369 - RNA, 22 nt, Human
uacuuuauuagcagcaggaaca

SEQ ID NO: 842370 - RNA, 22 nt, Human
uacuuugaagggggaaaaaagu

SEQ ID NO: 842371 - RNA, 23 nt, Human
uagcaaagccaguaacagaaauu

SEQ ID NO: 842372 - RNA, 24 nt, Human
uagcagcaggaacaagcauaccag

SEQ ID NO: 842373 - RNA, 22 nt, Human
uagccgggcgugguggcaugug

SEQ ID NO: 842374 - RNA, 23 nt, Human
uagcuaaaaaacuaauaagcaag

SEQ ID NO: 842375 - RNA, 18 nt, Human
uagggaaaggagauaugg

SEQ ID NO: 842376 - RNA, 20 nt, Human
uauauacauguuaacacauu

SEQ ID NO: 842377 - RNA, 24 nt, Human
uauaugaacuuggaauuauuggaa

SEQ ID NO: 842378 - RNA, 20 nt, Human
uaugcagaaaauaugaaugg

SEQ ID NO: 842379 - RNA, 21 nt, Human
uaugcagaaaauaugaauggc

SEQ ID NO: 842380 - RNA, 24 nt, Human
ucacgaggucaggaguuugagacc

SEQ ID NO: 842381 - RNA, 20 nt, Human
ucacucaaucuaauccccca

SEQ ID NO: 842382 - RNA, 24 nt, Human
ucacucaaucuaaucccccaaaua

SEQ ID NO: 842383 - RNA, 18 nt, Human
uccaaaauaacugcaaag

SEQ ID NO: 842384 - RNA, 20 nt, Human
uccaaaauaacugcaaagga

SEQ ID NO: 842385 - RNA, 21 nt, Human
uccaauaucaauguauaagca

SEQ ID NO: 842386 - RNA, 26 nt, Human
uccagccgggugugguggcucgcgcc

SEQ ID NO: 842387 - RNA, 22 nt, Human
ucccgauacaguaaugggccuu

SEQ ID NO: 842388 - RNA, 24 nt, Human
ucccgauacaguaaugggccuuac

SEQ ID NO: 842389 - RNA, 21 nt, Human
ucuagcaaagccaguaacaga

SEQ ID NO: 842390 - RNA, 26 nt, Human
ucucaaaaaacaaaaaccaaaaaaaa

SEQ ID NO: 842391 - RNA, 21 nt, Human
ucucuacuaaaaauacaaaaa

SEQ ID NO: 842392 - RNA, 20 nt, Human
ugaaaagcaacaaauaagcu

SEQ ID NO: 842393 - RNA, 23 nt, Human
ugaagauuauuaauaaaacacag

SEQ ID NO: 842394 - RNA, 21 nt, Human
ugacaaaaacuggagaaacua

SEQ ID NO: 842395 - RNA, 23 nt, Human
ugacaaaaacuggagaaacuaga

SEQ ID NO: 842396 - RNA, 24 nt, Human
ugaccaacauggugaaacccaguc

SEQ ID NO: 842397 - RNA, 19 nt, Human
ugagaauaaauacauuucu

SEQ ID NO: 842398 - RNA, 23 nt, Human
ugagaccagccugaccaacaugg

SEQ ID NO: 842399 - RNA, 24 nt, Human
ugagaccagccugaccaacauggu

SEQ ID NO: 842400 - RNA, 22 nt, Human
ugagccgagauugcgccacggc

SEQ ID NO: 842401 - RNA, 24 nt, Human
ugaggcaggagaauuguuugaauc

SEQ ID NO: 842402 - RNA, 25 nt, Human
ugaggcaggagaauuguuugaaucc

SEQ ID NO: 842403 - RNA, 19 nt, Human
ugcaauggucauucuacaa

SEQ ID NO: 842404 - RNA, 24 nt, Human
ugcacauaugaauucuagcaaagc

SEQ ID NO: 842405 - RNA, 24 nt, Human
ugccuguaaucccagcuacucagg

SEQ ID NO: 842406 - RNA, 22 nt, Human
ugcgccacggcacuccagcagc

SEQ ID NO: 842407 - RNA, 21 nt, Human
uggaucacgaggucaggaguu

SEQ ID NO: 842408 - RNA, 24 nt, Human
uggaucacgaggucaggaguuuga

SEQ ID NO: 842409 - RNA, 21 nt, Human
uggcaugugccuguaauccca

SEQ ID NO: 842410 - RNA, 21 nt, Human
uggcucgcgccuguaauccca

SEQ ID NO: 842411 - RNA, 22 nt, Human
uggcucgcgccuguaaucccag

SEQ ID NO: 842412 - RNA, 24 nt, Human
ugggaccauauguuagacucaagu

SEQ ID NO: 842413 - RNA, 23 nt, Human
ugggaggccgaggcggguggauc

SEQ ID NO: 842414 - RNA, 24 nt, Human
ugggaggccgaggcggguggauca

SEQ ID NO: 842415 - RNA, 24 nt, Human
ugguggcaugugccuguaauccca

SEQ ID NO: 842416 - RNA, 24 nt, Human
ugguggcucgcgccuguaauccca

SEQ ID NO: 842417 - RNA, 19 nt, Human
uguagggaaaggagauaug

SEQ ID NO: 842418 - RNA, 22 nt, Human
uguagggaaaggagauauggcc

SEQ ID NO: 842419 - RNA, 22 nt, Human
ugucucaaaaaacaaaaaccaa

SEQ ID NO: 842420 - RNA, 20 nt, Human
uguuugauauguugugccuu

SEQ ID NO: 842421 - RNA, 20 nt, Human
uuaaaaccaaccaaaaucac

SEQ ID NO: 842422 - RNA, 24 nt, Human
uuaaaaccaaccaaaaucacaucc

SEQ ID NO: 842423 - RNA, 23 nt, Human
uuaccagccugauucaaauaugu

SEQ ID NO: 842424 - RNA, 19 nt, Human
uuagccgggcgugguggca

SEQ ID NO: 842425 - RNA, 20 nt, Human
uuagccgggcgugguggcau

SEQ ID NO: 842426 - RNA, 24 nt, Human
uuagccgggcgugguggcaugugc

SEQ ID NO: 842427 - RNA, 21 nt, Human
uucaaauauguugcuagcuaa

SEQ ID NO: 842428 - RNA, 22 nt, Human
uucagcaaaacagauguaggaa

SEQ ID NO: 842429 - RNA, 24 nt, Human
uucuaaaugugccuauuuuauuuu

SEQ ID NO: 842430 - RNA, 24 nt, Human
uugaauccaggaggcggagguugc

SEQ ID NO: 842431 - RNA, 24 nt, Human
uugcaagaaaagguaagaacuagg

SEQ ID NO: 842432 - RNA, 19 nt, Human
uugcagugagccgagauug

SEQ ID NO: 842433 - RNA, 22 nt, Human
uugcagugagccgagauugcgc

SEQ ID NO: 842434 - RNA, 26 nt, Human
uugcgccacggcacuccagcagccug

SEQ ID NO: 842435 - RNA, 25 nt, Human
uugggaggccgaggcggguggauca

SEQ ID NO: 842436 - RNA, 24 nt, Human
uuguuugaauccaggaggcggagg

SEQ ID NO: 842437 - RNA, 20 nt, Human
uuugaagggggaaaaaagug

SEQ ID NO: 842438 - RNA, 18 nt, Human
uuuucuuuuuuuagcagu

SEQ ID NO: 842439 - RNA, 20 nt, Human
aaaaugaacagccaccagug

SEQ ID NO: 842440 - RNA, 21 nt, Human
aaacaagcaaccauccauacc

SEQ ID NO: 842441 - RNA, 22 nt, Human
aacaagaccucuccaaauguaa

SEQ ID NO: 842442 - RNA, 21 nt, Human
aaccaaacagcaguucuggaa

SEQ ID NO: 842443 - RNA, 22 nt, Human
aagcgucaucuugcauuuaaaa

SEQ ID NO: 842444 - RNA, 19 nt, Human
aaggaauaacgaacauaua

SEQ ID NO: 842445 - RNA, 20 nt, Human
aaguagaucaacaaaaggga

SEQ ID NO: 842446 - RNA, 23 nt, Human
aauggcauuugcuaaguaucucu

SEQ ID NO: 842447 - RNA, 20 nt, Human
acaaaacauagaauaugcaa

SEQ ID NO: 842448 - RNA, 21 nt, Human
acaaaaucuaagauuuucgua

SEQ ID NO: 842449 - RNA, 22 nt, Human
acaauccaaacacuacaaaaca

SEQ ID NO: 842450 - RNA, 23 nt, Human
agaauagauucacuugguaugaa

SEQ ID NO: 842451 - RNA, 21 nt, Human
agacacaaaaucuguuccaau

SEQ ID NO: 842452 - RNA, 20 nt, Human
agaccagcuuaagcauaguu

SEQ ID NO: 842453 - RNA, 20 nt, Human
agaguugggagccagccagu

SEQ ID NO: 842454 - RNA, 25 nt, Human
agccaagacacaaaaucuguuccaa

SEQ ID NO: 842455 - RNA, 19 nt, Human
aggaagggauggcaguggc

SEQ ID NO: 842456 - RNA, 25 nt, Human
aggaagggauggcaguggccccuug

SEQ ID NO: 842457 - RNA, 19 nt, Human
aggacaucagcuaacugga

SEQ ID NO: 842458 - RNA, 24 nt, Human
aggcucagcaccaacagaucaaaa

SEQ ID NO: 842459 - RNA, 21 nt, Human
aucaaugucaaauuaaauucg

SEQ ID NO: 842460 - RNA, 19 nt, Human
augcacaaaaauauuucag

SEQ ID NO: 842461 - RNA, 18 nt, Human
caaaaagcaccuacaguc

SEQ ID NO: 842462 - RNA, 22 nt, Human
caaaagaaaaaagaacaacgca

SEQ ID NO: 842463 - RNA, 18 nt, Human
caaaaggaacucuauuuu

SEQ ID NO: 842464 - RNA, 20 nt, Human
caaaaucuaagauuuucgua

SEQ ID NO: 842465 - RNA, 22 nt, Human
caaaaugaacagccaccagugc

SEQ ID NO: 842466 - RNA, 20 nt, Human
caaagccagccaagacacaa

SEQ ID NO: 842467 - RNA, 19 nt, Human
caaaguucaugagaauaga

SEQ ID NO: 842468 - RNA, 23 nt, Human
caaauguaacacguaguuuuaca

SEQ ID NO: 842469 - RNA, 21 nt, Human
caagacacaaaaucuguucca

SEQ ID NO: 842470 - RNA, 19 nt, Human
caagcaaccauccauacca

SEQ ID NO: 842471 - RNA, 19 nt, Human
caccaaaaaggaccccgau

SEQ ID NO: 842472 - RNA, 20 nt, Human
cacguaguuuuacaacaucc

SEQ ID NO: 842473 - RNA, 25 nt, Human
cagcgcaaccuuuucuccccggucu

SEQ ID NO: 842474 - RNA, 18 nt, Human
cagcgucccagaagaaag

SEQ ID NO: 842475 - RNA, 22 nt, Human
cagcgucccagaagaaagcaau

SEQ ID NO: 842476 - RNA, 18 nt, Human
caggacucuaaacgggca

SEQ ID NO: 842477 - RNA, 22 nt, Human
caggaguuaacaauauguuccu

SEQ ID NO: 842478 - RNA, 21 nt, Human
cauaagcagacccaguguuag

SEQ ID NO: 842479 - RNA, 19 nt, Human
caucuggaaaaguuccuaa

SEQ ID NO: 842480 - RNA, 24 nt, Human
caugagaauagauucacuugguau

SEQ ID NO: 842481 - RNA, 20 nt, Human
ccaaagccagccaagacacc

SEQ ID NO: 842482 - RNA, 25 nt, Human
ccaccgaauugacuaacauucacau

SEQ ID NO: 842483 - RNA, 23 nt, Human
ccacugcaaccugcgucuccgag

SEQ ID NO: 842484 - RNA, 20 nt, Human
ccccgauggcuauugacuca

SEQ ID NO: 842485 - RNA, 19 nt, Human
ccuuauucaguuuuucagc

SEQ ID NO: 842486 - RNA, 24 nt, Human
cgaauugacuaacauucacaugaa

SEQ ID NO: 842487 - RNA, 24 nt, Human
cgagggaguucugcaaguucaugc

SEQ ID NO: 842488 - RNA, 23 nt, Human
cuaacauucacaugaaaguggca

SEQ ID NO: 842489 - RNA, 20 nt, Human
cuauguguguccugauguuu

SEQ ID NO: 842490 - RNA, 19 nt, Human
cucaaaaugaacagccacc

SEQ ID NO: 842491 - RNA, 27 nt, Human
cuccccuucucccugguuuaaccaagg

SEQ ID NO: 842492 - RNA, 21 nt, Human
cuccuuuacugcuuugaccac

SEQ ID NO: 842493 - RNA, 24 nt, Human
cuguauuauccaucugaccaaacc

SEQ ID NO: 842494 - RNA, 18 nt, Human
gaaauccgcuugcuucuc

SEQ ID NO: 842495 - RNA, 19 nt, Human
gaacaaccucucugaaauc

SEQ ID NO: 842496 - RNA, 20 nt, Human
gaccaaauacugaacuagca

SEQ ID NO: 842497 - RNA, 19 nt, Human
gaggauggagaagaaccaa

SEQ ID NO: 842498 - RNA, 21 nt, Human
gauggagccagugaucagaau

SEQ ID NO: 842499 - RNA, 21 nt, Human
gcaaaauugaggauggagaag

SEQ ID NO: 842500 - RNA, 18 nt, Human
gccacaaccaaguaaacc

SEQ ID NO: 842501 - RNA, 18 nt, Human
gcgcaaccuuuucucccc

SEQ ID NO: 842502 - RNA, 18 nt, Human
gcuugcuucuccuucuuu

SEQ ID NO: 842503 - RNA, 21 nt, Human
gugcagugaguguucuaagug

SEQ ID NO: 842504 - RNA, 20 nt, Human
uaaaaaucucaauaauugac

SEQ ID NO: 842505 - RNA, 22 nt, Human
uaaaacuaacagcaauggcaaa

SEQ ID NO: 842506 - RNA, 22 nt, Human
uaaacaagcaaccauccauacc

SEQ ID NO: 842507 - RNA, 21 nt, Human
uaacagcaauggcaaaucaca

SEQ ID NO: 842508 - RNA, 23 nt, Human
uaagaccaaaaucucucuuaaac

SEQ ID NO: 842509 - RNA, 22 nt, Human
uaagaugagucugugguacuca

SEQ ID NO: 842510 - RNA, 22 nt, Human
uaauaagaauugccucagguac

SEQ ID NO: 842511 - RNA, 22 nt, Human
uacaaaacauagaauaugcaau

SEQ ID NO: 842512 - RNA, 18 nt, Human
uauaaauuccauaaagau

SEQ ID NO: 842513 - RNA, 23 nt, Human
uauuuucaucuugucccuccaaa

SEQ ID NO: 842514 - RNA, 22 nt, Human
ucagcuuucagcuuucugguuc

SEQ ID NO: 842515 - RNA, 25 nt, Human
ucagucauaucaaaaugaagccuag

SEQ ID NO: 842516 - RNA, 22 nt, Human
ucauauaauuaaccucaaauaa

SEQ ID NO: 842517 - RNA, 24 nt, Human
uccaaaauuaacauggguucaaag

SEQ ID NO: 842518 - RNA, 19 nt, Human
uccagagaucuugagaauc

SEQ ID NO: 842519 - RNA, 19 nt, Human
uccccggucuucacccaaa

SEQ ID NO: 842520 - RNA, 21 nt, Human
uccccggucuucacccaaagc

SEQ ID NO: 842521 - RNA, 18 nt, Human
ucccuccaaaagaaaaaa

SEQ ID NO: 842522 - RNA, 19 nt, Human
ucccuccaaaagaaaaaag

SEQ ID NO: 842523 - RNA, 21 nt, Human
uccuuauuuccuugaauugac

SEQ ID NO: 842524 - RNA, 19 nt, Human
ucgaauccaccugaacaaa

SEQ ID NO: 842525 - RNA, 20 nt, Human
ucucuaaacuccuuuacugc

SEQ ID NO: 842526 - RNA, 22 nt, Human
ugaaaguggcaaaauugaggau

SEQ ID NO: 842527 - RNA, 20 nt, Human
ugaaaguuuaucaucuuugg

SEQ ID NO: 842528 - RNA, 24 nt, Human
ugaccaaaccaccaucauacgugc

SEQ ID NO: 842529 - RNA, 20 nt, Human
ugacuucugcaauacuuccu

SEQ ID NO: 842530 - RNA, 22 nt, Human
ugagacagaaugccauauagga

SEQ ID NO: 842531 - RNA, 21 nt, Human
ugaucaccauaaugagaguuu

SEQ ID NO: 842532 - RNA, 18 nt, Human
ugcauuaaucuauaaacu

SEQ ID NO: 842533 - RNA, 24 nt, Human
ugccuuuguacagcaagcuuucaa

SEQ ID NO: 842534 - RNA, 22 nt, Human
uggaauaagaaaagaaacaguu

SEQ ID NO: 842535 - RNA, 23 nt, Human
uggaauaagaaaagaaacaguug

SEQ ID NO: 842536 - RNA, 22 nt, Human
uggcaaaucacaucucuaacug

SEQ ID NO: 842537 - RNA, 18 nt, Human
ugggagccagccaguggu

SEQ ID NO: 842538 - RNA, 19 nt, Human
ugguucauguccaaaaauu

SEQ ID NO: 842539 - RNA, 23 nt, Human
ugguugguuuuccugaaauuggu

SEQ ID NO: 842540 - RNA, 23 nt, Human
uguccagauuuucuuuuuuaagu

SEQ ID NO: 842541 - RNA, 18 nt, Human
uuauaaaguucuaugguu

SEQ ID NO: 842542 - RNA, 23 nt, Human
uucauguccaaaaauugcccacc

SEQ ID NO: 842543 - RNA, 24 nt, Human
uuccaguggcuaccaagcgguccu

SEQ ID NO: 842544 - RNA, 24 nt, Human
uuucuaaaauaauucuaauuguau

SEQ ID NO: 842545 - RNA, 21 nt, Human
uuugccacaaccaaguaaacc

SEQ ID NO: 842546 - RNA, 18 nt, Human
aaaaaaagggagcccaga

SEQ ID NO: 842547 - RNA, 27 nt, Human
aaaaaaagggagcccagagagggcgac

SEQ ID NO: 842548 - RNA, 21 nt, Human
aaggaucaucuuagagcucug

SEQ ID NO: 842549 - RNA, 19 nt, Human
aaguacucuugagucaagg

SEQ ID NO: 842550 - RNA, 22 nt, Human
aaguagauaugacaaagccagg

SEQ ID NO: 842551 - RNA, 18 nt, Human
aauaccucuguacaauaa

SEQ ID NO: 842552 - RNA, 18 nt, Human
acacugcugcacuuugga

SEQ ID NO: 842553 - RNA, 19 nt, Human
acauuuguccaauuuccug

SEQ ID NO: 842554 - RNA, 21 nt, Human
accauaaucacacccucugcc

SEQ ID NO: 842555 - RNA, 22 nt, Human
acugcuagagcugaaggguuag

SEQ ID NO: 842556 - RNA, 21 nt, Human
acugcuugcuuaaaggaucau

SEQ ID NO: 842557 - RNA, 21 nt, Human
agaaaaaaagggagcccagag

SEQ ID NO: 842558 - RNA, 18 nt, Human
aggauaagggaagaagag

SEQ ID NO: 842559 - RNA, 19 nt, Human
agggcauuuggggcugagu

SEQ ID NO: 842560 - RNA, 19 nt, Human
agugaacauauauuacaaa

SEQ ID NO: 842561 - RNA, 25 nt, Human
aguggaagguauagacacaucugaa

SEQ ID NO: 842562 - RNA, 21 nt, Human
agugggugauaggauuugccu

SEQ ID NO: 842563 - RNA, 22 nt, Human
aguugauuucauuucauuugga

SEQ ID NO: 842564 - RNA, 18 nt, Human
aucaucuuagagcucugu

SEQ ID NO: 842565 - RNA, 21 nt, Human
auccucuucccuccccagucu

SEQ ID NO: 842566 - RNA, 24 nt, Human
augcacacaugcaacauucaugua

SEQ ID NO: 842567 - RNA, 20 nt, Human
auugcccaaaguauuguguu

SEQ ID NO: 842568 - RNA, 18 nt, Human
cagaacucucauacuucc

SEQ ID NO: 842569 - RNA, 19 nt, Human
cagccgggagccgggcggc

SEQ ID NO: 842570 - RNA, 21 nt, Human
cagccgggagccgggcggcgg

SEQ ID NO: 842571 - RNA, 23 nt, Human
cagggcauuuggggcugaguggg

SEQ ID NO: 842572 - RNA, 18 nt, Human
caguuugccaggcagcag

SEQ ID NO: 842573 - RNA, 27 nt, Human
caucuuagagcucuguuuuacauggaa

SEQ ID NO: 842574 - RNA, 25 nt, Human
caugcacacaugcaacauucaugua

SEQ ID NO: 842575 - RNA, 18 nt, Human
caugcuguuuacaguaac

SEQ ID NO: 842576 - RNA, 19 nt, Human
cauucauguaaguauuaca

SEQ ID NO: 842577 - RNA, 23 nt, Human
ccagggcauuuggggcugagugg

SEQ ID NO: 842578 - RNA, 18 nt, Human
cccaugcacacaugcaac

SEQ ID NO: 842579 - RNA, 18 nt, Human
cccgcggccggcccaggg

SEQ ID NO: 842580 - RNA, 19 nt, Human
ccggagcccgagccuggcc

SEQ ID NO: 842581 - RNA, 18 nt, Human
ccucuucccuccccaguc

SEQ ID NO: 842582 - RNA, 20 nt, Human
ccucuucccuccccagucuc

SEQ ID NO: 842583 - RNA, 24 nt, Human
cgacuaacuugaccagaguaacac

SEQ ID NO: 842584 - RNA, 22 nt, Human
cuaaguagauaugacaaagcca

SEQ ID NO: 842585 - RNA, 21 nt, Human
cuugcugaauaccuuugccca

SEQ ID NO: 842586 - RNA, 19 nt, Human
gaaaaccugggauugaguu

SEQ ID NO: 842587 - RNA, 20 nt, Human
gaaacuucaaacuugaguga

SEQ ID NO: 842588 - RNA, 19 nt, Human
gacaucuucaugcugcuca

SEQ ID NO: 842589 - RNA, 23 nt, Human
gacuaacuugaccagaguaacac

SEQ ID NO: 842590 - RNA, 19 nt, Human
gagccuggccagagcgccg

SEQ ID NO: 842591 - RNA, 20 nt, Human
gaggaggccaacuagccguc

SEQ ID NO: 842592 - RNA, 22 nt, Human
gaucuuucaaagucacccauaa

SEQ ID NO: 842593 - RNA, 19 nt, Human
gaugcugcuuguuugcagu

SEQ ID NO: 842594 - RNA, 19 nt, Human
gaugguaacagcaaccaaa

SEQ ID NO: 842595 - RNA, 21 nt, Human
gcagcaguuauuguacaugca

SEQ ID NO: 842596 - RNA, 18 nt, Human
ggccagagcgccaggcag

SEQ ID NO: 842597 - RNA, 22 nt, Human
gggaagaagagaaaaccuggga

SEQ ID NO: 842598 - RNA, 21 nt, Human
gggagccgggcggcgggcagc

SEQ ID NO: 842599 - RNA, 26 nt, Human
guaacacugaaaucucuugauucagu

SEQ ID NO: 842600 - RNA, 20 nt, Human
guaauccucuucccucccca

SEQ ID NO: 842601 - RNA, 23 nt, Human
guccauucuuuuuuugaucauuu

SEQ ID NO: 842602 - RNA, 21 nt, Human
gugugugugugucucugugug

SEQ ID NO: 842603 - RNA, 22 nt, Human
uaaaauagaaguugucagcauu

SEQ ID NO: 842604 - RNA, 27 nt, Human
uaacuuguaauguccuugaacuuugaa

SEQ ID NO: 842605 - RNA, 24 nt, Human
uaaguagauaugacaaagccagga

SEQ ID NO: 842606 - RNA, 18 nt, Human
uaaguaguaguuuuaaga

SEQ ID NO: 842607 - RNA, 23 nt, Human
uaauuuucuaauauuuauauuuu

SEQ ID NO: 842608 - RNA, 19 nt, Human
uacaggaguagccguuagc

SEQ ID NO: 842609 - RNA, 25 nt, Human
uacaggaguagccguuagcuuccua

SEQ ID NO: 842610 - RNA, 23 nt, Human
uaccucuguacaauaaugguuuu

SEQ ID NO: 842611 - RNA, 18 nt, Human
uagaagguggaaggacuu

SEQ ID NO: 842612 - RNA, 21 nt, Human
uagagcugucuucccacucuc

SEQ ID NO: 842613 - RNA, 21 nt, Human
uagcugauguugaugaguagc

SEQ ID NO: 842614 - RNA, 20 nt, Human
uagcuuccuagguuugcccu

SEQ ID NO: 842615 - RNA, 18 nt, Human
ucacuuagggggcagaag

SEQ ID NO: 842616 - RNA, 24 nt, Human
ucauuuggacuuaucugagccuca

SEQ ID NO: 842617 - RNA, 25 nt, Human
ucccgaccagucuaugacugcuugc

SEQ ID NO: 842618 - RNA, 26 nt, Human
ucucuguguguuuaaaccuaucacuu

SEQ ID NO: 842619 - RNA, 18 nt, Human
ucugccuuucccuucucc

SEQ ID NO: 842620 - RNA, 18 nt, Human
ucuugauucagugucuag

SEQ ID NO: 842621 - RNA, 21 nt, Human
ucuugauucagugucuagcca

SEQ ID NO: 842622 - RNA, 18 nt, Human
ugaaagagacacugcugc

SEQ ID NO: 842623 - RNA, 19 nt, Human
ugaaauacugagguaagcu

SEQ ID NO: 842624 - RNA, 21 nt, Human
ugaacagaucuuucaaaguca

SEQ ID NO: 842625 - RNA, 18 nt, Human
ugaagaacuugaaagcaa

SEQ ID NO: 842626 - RNA, 18 nt, Human
ugaauacugggaucugga

SEQ ID NO: 842627 - RNA, 22 nt, Human
ugaauagagugguacaggagua

SEQ ID NO: 842628 - RNA, 24 nt, Human
ugacaaaagcggcgaaacuucaaa

SEQ ID NO: 842629 - RNA, 21 nt, Human
ugacuuguauuacauuuccuu

SEQ ID NO: 842630 - RNA, 22 nt, Human
ugagaacacaauuccuugaaca

SEQ ID NO: 842631 - RNA, 19 nt, Human
ugauguugaugaguagcug

SEQ ID NO: 842632 - RNA, 20 nt, Human
ugcaggauaagggaagaaga

SEQ ID NO: 842633 - RNA, 18 nt, Human
ugcccagaggauaguuga

SEQ ID NO: 842634 - RNA, 20 nt, Human
ugcucccaugcacacaugca

SEQ ID NO: 842635 - RNA, 20 nt, Human
ugcugcucauccuugcuuca

SEQ ID NO: 842636 - RNA, 26 nt, Human
ugcuuaccuauauuucuuucuacaua

SEQ ID NO: 842637 - RNA, 19 nt, Human
uggagcauuagcucauugu

SEQ ID NO: 842638 - RNA, 19 nt, Human
uggccagagcgccaggcag

SEQ ID NO: 842639 - RNA, 21 nt, Human
ugugagaagguucucuuuagg

SEQ ID NO: 842640 - RNA, 19 nt, Human
ugugugugucucugugugu

SEQ ID NO: 842641 - RNA, 20 nt, Human
ugugugugugucucugugug

SEQ ID NO: 842642 - RNA, 18 nt, Human
uguuagacagaaguuucu

SEQ ID NO: 842643 - RNA, 26 nt, Human
uuaaucccgaccagucuaugacugcu

SEQ ID NO: 842644 - RNA, 24 nt, Human
uucaaagucacccauaaaaugcac

SEQ ID NO: 842645 - RNA, 24 nt, Human
uucacaaacacuugcugcccugaa

SEQ ID NO: 842646 - RNA, 25 nt, Human
uucagauaaauauauauauauauau

SEQ ID NO: 842647 - RNA, 19 nt, Human
uucagugucuagccauucc

SEQ ID NO: 842648 - RNA, 24 nt, Human
uuccuguauacuuuuagguuucau

SEQ ID NO: 842649 - RNA, 20 nt, Human
uuggcaaaauuugauaaagc

SEQ ID NO: 842650 - RNA, 27 nt, Human
uuggggcugagugggugauaggauuug

SEQ ID NO: 842651 - RNA, 28 nt, Human
uuucagaacucucauacuucucauuuga

SEQ ID NO: 842652 - RNA, 23 nt, Human
uuuuaugcauagaaaaaaaggga

SEQ ID NO: 842653 - RNA, 25 nt, Human
uuuuuacaucauguuacagcaacug

SEQ ID NO: 842654 - RNA, 21 nt, Human
uuuuuuugcuuuuucugauua

SEQ ID NO: 842655 - RNA, 20 nt, Human
aaaaaaagaagaaauuagag

SEQ ID NO: 842656 - RNA, 22 nt, Human
aaaaaaagaagaaauuagagaa

SEQ ID NO: 842657 - RNA, 19 nt, Human
aaaaagaagaaauuagaga

SEQ ID NO: 842658 - RNA, 24 nt, Human
aagaagaaauuagagaagggaggu

SEQ ID NO: 842659 - RNA, 19 nt, Human
aagggaggugggggggaca

SEQ ID NO: 842660 - RNA, 21 nt, Human
acgucuuuuuaguuugcuuca

SEQ ID NO: 842661 - RNA, 22 nt, Human
agaagggaggugggggggacag

SEQ ID NO: 842662 - RNA, 22 nt, Human
agagaagggaggugggggggac

SEQ ID NO: 842663 - RNA, 22 nt, Human
agaggaccaggcgggaaccaga

SEQ ID NO: 842664 - RNA, 22 nt, Human
agcagggcccuagggagguagg

SEQ ID NO: 842665 - RNA, 24 nt, Human
aggagcccagcucgggucccaggc

SEQ ID NO: 842666 - RNA, 21 nt, Human
aggcagaagcggggcucagag

SEQ ID NO: 842667 - RNA, 20 nt, Human
aggcccccaugucccagcag

SEQ ID NO: 842668 - RNA, 21 nt, Human
aggcgggaaccagagccaggu

SEQ ID NO: 842669 - RNA, 18 nt, Human
agggaggugggggggaca

SEQ ID NO: 842670 - RNA, 20 nt, Human
agggaggugggggggacagg

SEQ ID NO: 842671 - RNA, 23 nt, Human
agggaggugggggggacaggagg

SEQ ID NO: 842672 - RNA, 21 nt, Human
auagcaguagucaaacacuaa

SEQ ID NO: 842673 - RNA, 20 nt, Human
cacucaggcccccauguccc

SEQ ID NO: 842674 - RNA, 21 nt, Human
cacucugucaccuuagaaacu

SEQ ID NO: 842675 - RNA, 23 nt, Human
caguagucaaacacuaauaaugc

SEQ ID NO: 842676 - RNA, 27 nt, Human
ccacccugucccuucucuguccucgcg

SEQ ID NO: 842677 - RNA, 22 nt, Human
ccaucucuuuauuaagugucuc

SEQ ID NO: 842678 - RNA, 18 nt, Human
cccaugucccagcagggc

SEQ ID NO: 842679 - RNA, 18 nt, Human
ccccaugucccagcaggg

SEQ ID NO: 842680 - RNA, 21 nt, Human
ccccaugucccagcagggccc

SEQ ID NO: 842681 - RNA, 21 nt, Human
ccugucccuucucuguccucg

SEQ ID NO: 842682 - RNA, 23 nt, Human
ccuugccgguguccuugagagcc

SEQ ID NO: 842683 - RNA, 21 nt, Human
cuucuggggaccaaggcccag

SEQ ID NO: 842684 - RNA, 19 nt, Human
gauccgggcgacccuccuu

SEQ ID NO: 842685 - RNA, 27 nt, Human
gcucgggucccaggcagaggugaaggc

SEQ ID NO: 842686 - RNA, 22 nt, Human
ggaggugggggggacaggaggg

SEQ ID NO: 842687 - RNA, 18 nt, Human
ggcagaagcggggcucag

SEQ ID NO: 842688 - RNA, 18 nt, Human
gggaggugggggggacag

SEQ ID NO: 842689 - RNA, 23 nt, Human
gggaggugggggggacaggaggg

SEQ ID NO: 842690 - RNA, 24 nt, Human
gucuuuuuuuuuucuguguuuuaa

SEQ ID NO: 842691 - RNA, 24 nt, Human
uaaaaaaagaagaaauuagagaag

SEQ ID NO: 842692 - RNA, 23 nt, Human
uaaauauggcauaaaaaccuguu

SEQ ID NO: 842693 - RNA, 24 nt, Human
uaaggauauuugcuaagaucaaga

SEQ ID NO: 842694 - RNA, 20 nt, Human
uaaguacacuaguggcuuua

SEQ ID NO: 842695 - RNA, 18 nt, Human
uacacccuaccucagaac

SEQ ID NO: 842696 - RNA, 18 nt, Human
ucauuaaaaaaagaagaa

SEQ ID NO: 842697 - RNA, 25 nt, Human
uccuaaaucacaauguagaacuaag

SEQ ID NO: 842698 - RNA, 23 nt, Human
uccuuugaauucacuugauagca

SEQ ID NO: 842699 - RNA, 20 nt, Human
ucucacucugucaccuuaga

SEQ ID NO: 842700 - RNA, 21 nt, Human
ucucacucugucaccuuagaa

SEQ ID NO: 842701 - RNA, 19 nt, Human
ugagcggagaggccuuugg

SEQ ID NO: 842702 - RNA, 21 nt, Human
uggaggugggauccugaagcc

SEQ ID NO: 842703 - RNA, 22 nt, Human
uggggaccaaggcccaggagcc

SEQ ID NO: 842704 - RNA, 18 nt, Human
ugggugggcacucaggcc

SEQ ID NO: 842705 - RNA, 18 nt, Human
ugguuaggugacagcaua

SEQ ID NO: 842706 - RNA, 21 nt, Human
aaaaaagacaggccaacaaug

SEQ ID NO: 842707 - RNA, 24 nt, Human
aaaagacaggccaacaaugccuaa

SEQ ID NO: 842708 - RNA, 25 nt, Human
aacccuuucgucaacuuguuuuggg

SEQ ID NO: 842709 - RNA, 23 nt, Human
aagacaggccaacaaugccuaaa

SEQ ID NO: 842710 - RNA, 24 nt, Human
aagagaaaggggaccagggcagaa

SEQ ID NO: 842711 - RNA, 22 nt, Human
accaacaccaugaugacucaca

SEQ ID NO: 842712 - RNA, 24 nt, Human
acccagacacggccaauuccucau

SEQ ID NO: 842713 - RNA, 21 nt, Human
acggcacagaucuagcauauc

SEQ ID NO: 842714 - RNA, 20 nt, Human
agaaaaacacuucucucuca

SEQ ID NO: 842715 - RNA, 21 nt, Human
agaauccagccucccucaggc

SEQ ID NO: 842716 - RNA, 18 nt, Human
agacacggccaauuccuc

SEQ ID NO: 842717 - RNA, 23 nt, Human
agcauggaagcuuuacugagaaa

SEQ ID NO: 842718 - RNA, 20 nt, Human
agccagaaaauggauuucug

SEQ ID NO: 842719 - RNA, 19 nt, Human
aggaacccagaauccagcc

SEQ ID NO: 842720 - RNA, 21 nt, Human
agggagugggcauuacacagg

SEQ ID NO: 842721 - RNA, 21 nt, Human
agggcaaagaaguggacacuc

SEQ ID NO: 842722 - RNA, 21 nt, Human
agggcagggcaaagaagugga

SEQ ID NO: 842723 - RNA, 18 nt, Human
agugagcugggcugcauu

SEQ ID NO: 842724 - RNA, 20 nt, Human
caaaaaagacaggccaacag

SEQ ID NO: 842725 - RNA, 19 nt, Human
caacagccugugucaguuu

SEQ ID NO: 842726 - RNA, 25 nt, Human
caagaccaacaccaugaugacuccu

SEQ ID NO: 842727 - RNA, 22 nt, Human
caccaugaugacucacauaagu

SEQ ID NO: 842728 - RNA, 20 nt, Human
cagaagaugucaggccccau

SEQ ID NO: 842729 - RNA, 23 nt, Human
caucccauaacccacccagacac

SEQ ID NO: 842730 - RNA, 20 nt, Human
caugaugacucacauaagug

SEQ ID NO: 842731 - RNA, 19 nt, Human
ccaaccuagacucaaacug

SEQ ID NO: 842732 - RNA, 19 nt, Human
cccaagaauaaauauuuac

SEQ ID NO: 842733 - RNA, 18 nt, Human
cccaucucuaugaguagc

SEQ ID NO: 842734 - RNA, 23 nt, Human
cuaacuacacauaacacacaugc

SEQ ID NO: 842735 - RNA, 21 nt, Human
cuccaccaacccaagaauaaa

SEQ ID NO: 842736 - RNA, 21 nt, Human
ggaacccagaauccagccucc

SEQ ID NO: 842737 - RNA, 19 nt, Human
ggaagauguaggauggauu

SEQ ID NO: 842738 - RNA, 21 nt, Human
ggaagcacaggaaaaauaaug

SEQ ID NO: 842739 - RNA, 21 nt, Human
ggaugcccacaucccauaacc

SEQ ID NO: 842740 - RNA, 19 nt, Human
ggccaauuccucauagaca

SEQ ID NO: 842741 - RNA, 18 nt, Human
guaaaaccguaccaaguc

SEQ ID NO: 842742 - RNA, 19 nt, Human
gucccaucacuagggagcc

SEQ ID NO: 842743 - RNA, 22 nt, Human
uaacacacaugcuucaaaaaag

SEQ ID NO: 842744 - RNA, 23 nt, Human
uaacacacaugcuucaaaaaaga

SEQ ID NO: 842745 - RNA, 21 nt, Human
uaacccacccagacacggcca

SEQ ID NO: 842746 - RNA, 19 nt, Human
uaagagcugcuuccaagaa

SEQ ID NO: 842747 - RNA, 23 nt, Human
uaagcucuccuucauccccaaac

SEQ ID NO: 842748 - RNA, 21 nt, Human
uacacacacacucacacgcac

SEQ ID NO: 842749 - RNA, 23 nt, Human
uacacacacacucacacgcacau

SEQ ID NO: 842750 - RNA, 29 nt, Human
uacacacacacucacacgcacauacaugg

SEQ ID NO: 842751 - RNA, 19 nt, Human
uacuggauuuuaaaaccuu

SEQ ID NO: 842752 - RNA, 23 nt, Human
uacuggauuuuaaaaccuuagaa

SEQ ID NO: 842753 - RNA, 26 nt, Human
uauucagccagaaaauggauuucuga

SEQ ID NO: 842754 - RNA, 21 nt, Human
uauuuugcccauauuccuuca

SEQ ID NO: 842755 - RNA, 23 nt, Human
ucaacagccugugucaguuuucu

SEQ ID NO: 842756 - RNA, 19 nt, Human
uccaccaacccaagaauaa

SEQ ID NO: 842757 - RNA, 18 nt, Human
ucccauaacccacccaga

SEQ ID NO: 842758 - RNA, 18 nt, Human
ucccucaggcugagagac

SEQ ID NO: 842759 - RNA, 19 nt, Human
ucccugugacuacaggaac

SEQ ID NO: 842760 - RNA, 21 nt, Human
ucccugugacuacaggaaccc

SEQ ID NO: 842761 - RNA, 22 nt, Human
ucucuaugaguagcauaagagc

SEQ ID NO: 842762 - RNA, 23 nt, Human
ugagagagaggcagugcuuaggg

SEQ ID NO: 842763 - RNA, 20 nt, Human
ugauagaaaaacacuucucu

SEQ ID NO: 842764 - RNA, 24 nt, Human
ugauagaaaaacacuucucucuca

SEQ ID NO: 842765 - RNA, 23 nt, Human
ugcaaagcucaaaaguacauaau

SEQ ID NO: 842766 - RNA, 25 nt, Human
ugcccauauuccuucagacuuuccc

SEQ ID NO: 842767 - RNA, 21 nt, Human
uggaagcauuucucauaaugg

SEQ ID NO: 842768 - RNA, 18 nt, Human
uggcaauauccacuccac

SEQ ID NO: 842769 - RNA, 22 nt, Human
uguaaaaccguaccaaguccug

SEQ ID NO: 842770 - RNA, 23 nt, Human
ugucaagggugaagcauggaagc

SEQ ID NO: 842771 - RNA, 20 nt, Human
ugucucacaagcugagaggg

SEQ ID NO: 842772 - RNA, 18 nt, Human
uguguaaaaccguaccaa

SEQ ID NO: 842773 - RNA, 21 nt, Human
uucaaaaaagacaggccaaca

SEQ ID NO: 842774 - RNA, 18 nt, Human
uuccaacuccaaccuaga

SEQ ID NO: 842775 - RNA, 20 nt, Human
uucugauuuucuucuugaua

SEQ ID NO: 842776 - RNA, 26 nt, Human
uuucucauaauggugaauuaaccuug

SEQ ID NO: 842777 - RNA, 24 nt, Human
aaaaaaaaaaagacauacaaaaaa

SEQ ID NO: 842778 - RNA, 23 nt, Human
aaaaaaaaaagacauacaaaaaa

SEQ ID NO: 842779 - RNA, 25 nt, Human
aaaaaaaaagacauacaaaaaaagg

SEQ ID NO: 842780 - RNA, 25 nt, Human
aaaaaaaagacauacaaaaaaaggu

SEQ ID NO: 842781 - RNA, 26 nt, Human
aaaaaaaagacauacaaaaaaaggua

SEQ ID NO: 842782 - RNA, 28 nt, Human
aaaaacaaaaaugaaaugaacccaugac

SEQ ID NO: 842783 - RNA, 22 nt, Human
aaaaacacaaaaaacaaaaaug

SEQ ID NO: 842784 - RNA, 22 nt, Human
aaacaaaaaugaaaugaaccca

SEQ ID NO: 842785 - RNA, 23 nt, Human
aaacaaaaaugaaaugaacccau

SEQ ID NO: 842786 - RNA, 27 nt, Human
aaacaaaaaugaaaugaacccaugacc

SEQ ID NO: 842787 - RNA, 25 nt, Human
aacacaaaaaacaaaaaugaaauga

SEQ ID NO: 842788 - RNA, 18 nt, Human
aaggccgcggugccuucc

SEQ ID NO: 842789 - RNA, 25 nt, Human
acauacaaaaaaagguagcuacauc

SEQ ID NO: 842790 - RNA, 20 nt, Human
accaugaaccggggcagagc

SEQ ID NO: 842791 - RNA, 20 nt, Human
acuccaguacaugcaaggua

SEQ ID NO: 842792 - RNA, 21 nt, Human
acuccaguacaugcaagguaa

SEQ ID NO: 842793 - RNA, 21 nt, Human
acuguccgcgcuccucgucgc

SEQ ID NO: 842794 - RNA, 22 nt, Human
aggcagcucaggcgggcugugc

SEQ ID NO: 842795 - RNA, 21 nt, Human
agggcgggacggggaagcugg

SEQ ID NO: 842796 - RNA, 21 nt, Human
caaaaaugaaaugaacccaug

SEQ ID NO: 842797 - RNA, 18 nt, Human
cacaaaaaacaaaaauga

SEQ ID NO: 842798 - RNA, 20 nt, Human
caccgccgcugccgcggccc

SEQ ID NO: 842799 - RNA, 22 nt, Human
cagaugacauaucuuccagucc

SEQ ID NO: 842800 - RNA, 22 nt, Human
cagcuuucggccuccuagaggg

SEQ ID NO: 842801 - RNA, 24 nt, Human
caggaaccaugaaccggggcagag

SEQ ID NO: 842802 - RNA, 23 nt, Human
ccaaggccgcggugccuuccccg

SEQ ID NO: 842803 - RNA, 19 nt, Human
cccgcgacggcggccgggg

SEQ ID NO: 842804 - RNA, 21 nt, Human
ccgagggcgagagaacgcgga

SEQ ID NO: 842805 - RNA, 27 nt, Human
ccgccgcugccgcggccacugccgccg

SEQ ID NO: 842806 - RNA, 23 nt, Human
ccgcgggcagagggcacugggcu

SEQ ID NO: 842807 - RNA, 21 nt, Human
ccgggcggcgcggggugggcc

SEQ ID NO: 842808 - RNA, 21 nt, Human
ccuccaagugcgugugcaggu

SEQ ID NO: 842809 - RNA, 23 nt, Human
ccuccuagagggcuugcaggaac

SEQ ID NO: 842810 - RNA, 21 nt, Human
ccucggagcggggagggcggg

SEQ ID NO: 842811 - RNA, 23 nt, Human
ccugccuuguggaagauuccucu

SEQ ID NO: 842812 - RNA, 21 nt, Human
ccuuccugcccaauaaugaaa

SEQ ID NO: 842813 - RNA, 20 nt, Human
ccuuccuuccuuccuuucuc

SEQ ID NO: 842814 - RNA, 23 nt, Human
ccuuccuuccuuucuuugaaauc

SEQ ID NO: 842815 - RNA, 23 nt, Human
cgccacgagguuuuuuucugaga

SEQ ID NO: 842816 - RNA, 24 nt, Human
cgccgccuucuugggcauggccug

SEQ ID NO: 842817 - RNA, 22 nt, Human
cgcucgaggccaccucgggcuc

SEQ ID NO: 842818 - RNA, 18 nt, Human
cggcgggagcccgggcgg

SEQ ID NO: 842819 - RNA, 18 nt, Human
cgggagcccgggcggcgc

SEQ ID NO: 842820 - RNA, 18 nt, Human
cgggcugggguagggggu

SEQ ID NO: 842821 - RNA, 23 nt, Human
cggggaggagcgcgggaggcagc

SEQ ID NO: 842822 - RNA, 21 nt, Human
cgugugcagguugcgugcaug

SEQ ID NO: 842823 - RNA, 20 nt, Human
cucacaguagcuucccccca

SEQ ID NO: 842824 - RNA, 20 nt, Human
cuccaagugcgugugcaggu

SEQ ID NO: 842825 - RNA, 19 nt, Human
cugccgccgccccggcggc

SEQ ID NO: 842826 - RNA, 19 nt, Human
cugcggcggcgggagcccg

SEQ ID NO: 842827 - RNA, 26 nt, Human
cugcugguucgccgccgccgccgccu

SEQ ID NO: 842828 - RNA, 22 nt, Human
cuuccuuuagucugggggugga

SEQ ID NO: 842829 - RNA, 18 nt, Human
gaaccggggcagagcaaa

SEQ ID NO: 842830 - RNA, 18 nt, Human
gaccuccuuccugcccaa

SEQ ID NO: 842831 - RNA, 21 nt, Human
gacgggcugggguagggggug

SEQ ID NO: 842832 - RNA, 19 nt, Human
gagagaacgcggaaggcuc

SEQ ID NO: 842833 - RNA, 22 nt, Human
gccgcggccacugccgccgccc

SEQ ID NO: 842834 - RNA, 18 nt, Human
gccgcuggggagcccgcu

SEQ ID NO: 842835 - RNA, 21 nt, Human
gccgugaccccaccaggcggc

SEQ ID NO: 842836 - RNA, 19 nt, Human
gcucgaggccaccucgggc

SEQ ID NO: 842837 - RNA, 20 nt, Human
gcugcggcggcgggagcccg

SEQ ID NO: 842838 - RNA, 21 nt, Human
gcugguucgccgccgccgccg

SEQ ID NO: 842839 - RNA, 23 nt, Human
gcugguucgccgccgccgccgcc

SEQ ID NO: 842840 - RNA, 23 nt, Human
gcugguucgccgccgccgccgcc

SEQ ID NO: 842841 - RNA, 21 nt, Human
ggccggggcuggcucucuggg

SEQ ID NO: 842842 - RNA, 22 nt, Human
ggcggcgcggggugggcccgag

SEQ ID NO: 842843 - RNA, 18 nt, Human
ggcugggguagggggugg

SEQ ID NO: 842844 - RNA, 22 nt, Human
ggcugugcugucagccgccgcg

SEQ ID NO: 842845 - RNA, 24 nt, Human
gggcaaggggaggggcugcagcuu

SEQ ID NO: 842846 - RNA, 19 nt, Human
gggcauggccuggcgcggc

SEQ ID NO: 842847 - RNA, 24 nt, Human
gggcgagagaacgcggaaggcucu

SEQ ID NO: 842848 - RNA, 19 nt, Human
gggcggcgcggggugggcc

SEQ ID NO: 842849 - RNA, 22 nt, Human
gggcugcagcuuucggccuccu

SEQ ID NO: 842850 - RNA, 20 nt, Human
gggcugggguaggggguggg

SEQ ID NO: 842851 - RNA, 18 nt, Human
ggguauggggguggggug

SEQ ID NO: 842852 - RNA, 20 nt, Human
gugugcagguugcgugcaug

SEQ ID NO: 842853 - RNA, 19 nt, Human
guuguccuuccuuccuucc

SEQ ID NO: 842854 - RNA, 21 nt, Human
uaaaaaaaaaaagacauacaa

SEQ ID NO: 842855 - RNA, 19 nt, Human
uaaaaaaacacacgcucac

SEQ ID NO: 842856 - RNA, 18 nt, Human
uaaauggagaggggcaga

SEQ ID NO: 842857 - RNA, 19 nt, Human
uaaauuaaaaaaacacacg

SEQ ID NO: 842858 - RNA, 23 nt, Human
uaaauuaaaaaaacacacgcuca

SEQ ID NO: 842859 - RNA, 22 nt, Human
uaacacaaccagcagaugacau

SEQ ID NO: 842860 - RNA, 23 nt, Human
uaacacaaccagcagaugacaua

SEQ ID NO: 842861 - RNA, 27 nt, Human
uaacacaaccagcagaugacauaucuu

SEQ ID NO: 842862 - RNA, 20 nt, Human
uaaguaucuuccuuuagucu

SEQ ID NO: 842863 - RNA, 23 nt, Human
uaccaccgccgcugccgcggcca

SEQ ID NO: 842864 - RNA, 23 nt, Human
uagucuggggguggaagaagggg

SEQ ID NO: 842865 - RNA, 22 nt, Human
ucaccaaguauacuccuaauuc

SEQ ID NO: 842866 - RNA, 20 nt, Human
ucaggcgccgugaccccacc

SEQ ID NO: 842867 - RNA, 22 nt, Human
ucccuucugcugguucgccgcc

SEQ ID NO: 842868 - RNA, 23 nt, Human
uccuagagggcuugcaggaaccc

SEQ ID NO: 842869 - RNA, 26 nt, Human
uccuuccuuccuuccuuucuuugaaa

SEQ ID NO: 842870 - RNA, 18 nt, Human
ucgccgggcugccaggaa

SEQ ID NO: 842871 - RNA, 20 nt, Human
ugaaauaaauacuccaguac

SEQ ID NO: 842872 - RNA, 21 nt, Human
ugaaaucaaaauccuuuccuc

SEQ ID NO: 842873 - RNA, 18 nt, Human
ugaaccggggcagagcaa

SEQ ID NO: 842874 - RNA, 22 nt, Human
ugagaaacauaacauuuuaaua

SEQ ID NO: 842875 - RNA, 25 nt, Human
ugagaaacauaacauuuuaauagau

SEQ ID NO: 842876 - RNA, 21 nt, Human
ugcagcuuucggccuccuaga

SEQ ID NO: 842877 - RNA, 24 nt, Human
ugcccaauaaugaaauuuaguuga

SEQ ID NO: 842878 - RNA, 23 nt, Human
ugccgcggccacugccgccgccc

SEQ ID NO: 842879 - RNA, 20 nt, Human
ugccuuguggaagauuccuc

SEQ ID NO: 842880 - RNA, 18 nt, Human
ugcgugcauggcccugcc

SEQ ID NO: 842881 - RNA, 23 nt, Human
ugggggaaaaaaaaucacucuau

SEQ ID NO: 842882 - RNA, 21 nt, Human
uggggguggaagaagggguau

SEQ ID NO: 842883 - RNA, 20 nt, Human
uuagucuggggguggaagaa

SEQ ID NO: 842884 - RNA, 20 nt, Human
uucgccgccgccgccgccuu

SEQ ID NO: 842885 - RNA, 19 nt, Human
uugcgugcauggcccugcc

SEQ ID NO: 842886 - RNA, 23 nt, Human
uuggcccucgaggccaagaauuc

SEQ ID NO: 842887 - RNA, 18 nt, Human
uuggggaggguagggggu

SEQ ID NO: 842888 - RNA, 20 nt, Human
aaaaacaaaaacaaaugaca

SEQ ID NO: 842889 - RNA, 22 nt, Human
aaaaacaaaaacaaaugacauu

SEQ ID NO: 842890 - RNA, 21 nt, Human
aaaaaucugaacacucaagug

SEQ ID NO: 842891 - RNA, 25 nt, Human
aaaacaaacaagacaaaaaggaaga

SEQ ID NO: 842892 - RNA, 23 nt, Human
aaacaagacaaaaaggaagacaa

SEQ ID NO: 842893 - RNA, 24 nt, Human
aaacaagacaaaaaggaagacaaa

SEQ ID NO: 842894 - RNA, 24 nt, Human
aaacagaugcugugaggccaaaac

SEQ ID NO: 842895 - RNA, 20 nt, Human
aaaccugacagacaccaaga

SEQ ID NO: 842896 - RNA, 24 nt, Human
aaaguacugggauuacaggcguga

SEQ ID NO: 842897 - RNA, 20 nt, Human
aacagacacacagaaacuac

SEQ ID NO: 842898 - RNA, 24 nt, Human
aacagagugagacccugucucaaa

SEQ ID NO: 842899 - RNA, 22 nt, Human
aacuacugggugaagugggggc

SEQ ID NO: 842900 - RNA, 21 nt, Human
aagcccacagacagggcuugg

SEQ ID NO: 842901 - RNA, 23 nt, Human
aaggaaacaaaacagaaccccua

SEQ ID NO: 842902 - RNA, 19 nt, Human
aaguacugggauuacaggc

SEQ ID NO: 842903 - RNA, 20 nt, Human
aagucaaagaaauucaaaac

SEQ ID NO: 842904 - RNA, 18 nt, Human
aaugucauccggugugca

SEQ ID NO: 842905 - RNA, 20 nt, Human
acaacagaaaaagcccacag

SEQ ID NO: 842906 - RNA, 21 nt, Human
acaauuaagauccaccagggc

SEQ ID NO: 842907 - RNA, 23 nt, Human
acacugacauuuucuaaccaugu

SEQ ID NO: 842908 - RNA, 24 nt, Human
acagagugagacccugucucaaaa

SEQ ID NO: 842909 - RNA, 23 nt, Human
acaggcccgcaccaccacacucg

SEQ ID NO: 842910 - RNA, 24 nt, Human
acagggcuucaccauguuggccag

SEQ ID NO: 842911 - RNA, 19 nt, Human
acauaacagacacacagaa

SEQ ID NO: 842912 - RNA, 21 nt, Human
acaugucugugccugggcugg

SEQ ID NO: 842913 - RNA, 18 nt, Human
accauguuggccaggcug

SEQ ID NO: 842914 - RNA, 21 nt, Human
accccaucacaauuaagaucc

SEQ ID NO: 842915 - RNA, 23 nt, Human
acccugucucaaaaacaaaaaca

SEQ ID NO: 842916 - RNA, 24 nt, Human
accugaguagcugggauuacaggc

SEQ ID NO: 842917 - RNA, 19 nt, Human
acguccaccugucccccca

SEQ ID NO: 842918 - RNA, 22 nt, Human
acucccaccccaggagcugggc

SEQ ID NO: 842919 - RNA, 20 nt, Human
acucggcuaauuuuuaguag

SEQ ID NO: 842920 - RNA, 19 nt, Human
acugcacucuagugagggc

SEQ ID NO: 842921 - RNA, 24 nt, Human
acugcacucuagugagggcaacag

SEQ ID NO: 842922 - RNA, 19 nt, Human
agagcucuccacguccacc

SEQ ID NO: 842923 - RNA, 26 nt, Human
agaggcuguaucuacaccguccuggg

SEQ ID NO: 842924 - RNA, 19 nt, Human
agagggcauggccuggagg

SEQ ID NO: 842925 - RNA, 21 nt, Human
agauauaaacaaaaguguacc

SEQ ID NO: 842926 - RNA, 20 nt, Human
agaucaauugagccgguagg

SEQ ID NO: 842927 - RNA, 20 nt, Human
agcaaaaaaucugaacacuc

SEQ ID NO: 842928 - RNA, 22 nt, Human
agcugggguuggagcagguggg

SEQ ID NO: 842929 - RNA, 18 nt, Human
aggaaacaaaacagaacc

SEQ ID NO: 842930 - RNA, 18 nt, Human
aggccucugguuuucuua

SEQ ID NO: 842931 - RNA, 25 nt, Human
aggcuggagugcaguggccugaucu

SEQ ID NO: 842932 - RNA, 27 nt, Human
agggaagauucuaccucccccuacccu

SEQ ID NO: 842933 - RNA, 19 nt, Human
agggauacacuuuucacuu

SEQ ID NO: 842934 - RNA, 19 nt, Human
aggguggggggacugcagg

SEQ ID NO: 842935 - RNA, 21 nt, Human
agguagagacuucagugagcc

SEQ ID NO: 842936 - RNA, 22 nt, Human
aguagagacagggcuucaccau

SEQ ID NO: 842937 - RNA, 18 nt, Human
aguagcugggauuacagg

SEQ ID NO: 842938 - RNA, 18 nt, Human
agugcaaccuggacugcc

SEQ ID NO: 842939 - RNA, 20 nt, Human
agugcaguggccugaucuug

SEQ ID NO: 842940 - RNA, 24 nt, Human
agugcaguggccugaucuuggcuc

SEQ ID NO: 842941 - RNA, 19 nt, Human
auaaaaccugacagacacc

SEQ ID NO: 842942 - RNA, 19 nt, Human
auaaaaccugacagacacc

SEQ ID NO: 842943 - RNA, 22 nt, Human
aucccgucauccaggcuggagu

SEQ ID NO: 842944 - RNA, 19 nt, Human
caaaaaaucugaacacuca

SEQ ID NO: 842945 - RNA, 21 nt, Human
caaaaaaucugaacacucaag

SEQ ID NO: 842946 - RNA, 22 nt, Human
caaacaagacaaaaaggaagac

SEQ ID NO: 842947 - RNA, 24 nt, Human
caaacauacaucaccauaaguaca

SEQ ID NO: 842948 - RNA, 22 nt, Human
caaagagcucuccacguccacc

SEQ ID NO: 842949 - RNA, 24 nt, Human
caaaguacugggauuacaggcgug

SEQ ID NO: 842950 - RNA, 22 nt, Human
caaauucauuaaaaacaggaca

SEQ ID NO: 842951 - RNA, 22 nt, Human
caacagagugagacccugucuc

SEQ ID NO: 842952 - RNA, 24 nt, Human
caacaguagcacaucauguuacuc

SEQ ID NO: 842953 - RNA, 25 nt, Human
caaccuggacugccuuucacaccca

SEQ ID NO: 842954 - RNA, 19 nt, Human
caacugauccacccaccuc

SEQ ID NO: 842955 - RNA, 22 nt, Human
caagccauucuccugccucagc

SEQ ID NO: 842956 - RNA, 18 nt, Human
caaguguaaaugggaaaa

SEQ ID NO: 842957 - RNA, 21 nt, Human
cacauaaaaccugacagacac

SEQ ID NO: 842958 - RNA, 21 nt, Human
caccauguuggccaggcuggu

SEQ ID NO: 842959 - RNA, 24 nt, Human
caccauguuggccaggcuggucuc

SEQ ID NO: 842960 - RNA, 27 nt, Human
caccauguuggccaggcuggucucaaa

SEQ ID NO: 842961 - RNA, 24 nt, Human
cacccaaucacagcaggugcuugg

SEQ ID NO: 842962 - RNA, 22 nt, Human
cacccaccucggccucccaaag

SEQ ID NO: 842963 - RNA, 23 nt, Human
cacccaccucggccucccaaagu

SEQ ID NO: 842964 - RNA, 20 nt, Human
caccccaucacaauuaagau

SEQ ID NO: 842965 - RNA, 25 nt, Human
cacccuggagagggcauggccugga

SEQ ID NO: 842966 - RNA, 24 nt, Human
caccucggccucccaaaguacugg

SEQ ID NO: 842967 - RNA, 21 nt, Human
cacugcaaccuccgccucccg

SEQ ID NO: 842968 - RNA, 23 nt, Human
cacugcaaccuccgccucccggg

SEQ ID NO: 842969 - RNA, 22 nt, Human
cacugggacaagcuaccaccgg

SEQ ID NO: 842970 - RNA, 20 nt, Human
cagccacggcaugauucagg

SEQ ID NO: 842971 - RNA, 20 nt, Human
cagcuuauguuggcuccccu

SEQ ID NO: 842972 - RNA, 22 nt, Human
cagggaagauucuaccuccccc

SEQ ID NO: 842973 - RNA, 24 nt, Human
cagggcuucaccauguuggccagg

SEQ ID NO: 842974 - RNA, 25 nt, Human
caguaaccccaucaaacugcccuga

SEQ ID NO: 842975 - RNA, 22 nt, Human
caucccgucauccaggcuggag

SEQ ID NO: 842976 - RNA, 20 nt, Human
caugaacggcaaaaucagac

SEQ ID NO: 842977 - RNA, 21 nt, Human
cauguaaugugcuacuuuuaa

SEQ ID NO: 842978 - RNA, 24 nt, Human
cauguuggccaggcuggucucaaa

SEQ ID NO: 842979 - RNA, 22 nt, Human
ccaaaacaaacauacaucacca

SEQ ID NO: 842980 - RNA, 20 nt, Human
ccaaaguacugggauuacag

SEQ ID NO: 842981 - RNA, 22 nt, Human
ccaaaguacugggauuacaggc

SEQ ID NO: 842982 - RNA, 24 nt, Human
ccaaaguacugggauuacaggcgu

SEQ ID NO: 842983 - RNA, 19 nt, Human
ccacaugucugugccuggg

SEQ ID NO: 842984 - RNA, 18 nt, Human
ccacuguacccagcccaa

SEQ ID NO: 842985 - RNA, 19 nt, Human
ccacuguacccagcccaac

SEQ ID NO: 842986 - RNA, 22 nt, Human
ccagguucaagaugcaggagga

SEQ ID NO: 842987 - RNA, 22 nt, Human
cccaucacaauuaagauccacc

SEQ ID NO: 842988 - RNA, 19 nt, Human
cccccuacccugccccuuu

SEQ ID NO: 842989 - RNA, 23 nt, Human
cccggguucaagccauucuccug

SEQ ID NO: 842990 - RNA, 18 nt, Human
cccgucauccaggcugga

SEQ ID NO: 842991 - RNA, 24 nt, Human
cccgucauccaggcuggagugcag

SEQ ID NO: 842992 - RNA, 24 nt, Human
cccugaguacaacagaaaaagccc

SEQ ID NO: 842993 - RNA, 19 nt, Human
ccgcaccaccacacucggc

SEQ ID NO: 842994 - RNA, 19 nt, Human
ccgcgcagcgcccuagacg

SEQ ID NO: 842995 - RNA, 22 nt, Human
ccuaccaaacuccaugugcuac

SEQ ID NO: 842996 - RNA, 21 nt, Human
ccuacccugccccuuucauac

SEQ ID NO: 842997 - RNA, 18 nt, Human
ccucccagcucacggcuc

SEQ ID NO: 842998 - RNA, 19 nt, Human
ccucucccucugccacuuc

SEQ ID NO: 842999 - RNA, 22 nt, Human
ccucugccacuucuagccacag

SEQ ID NO: 843000 - RNA, 24 nt, Human
ccugaccucaacugauccacccac

SEQ ID NO: 843001 - RNA, 23 nt, Human
ccugagaccacucccaccccagg

SEQ ID NO: 843002 - RNA, 23 nt, Human
ccugaguagcugggauuacaggc

SEQ ID NO: 843003 - RNA, 24 nt, Human
ccugcacugggccccagccucccc

SEQ ID NO: 843004 - RNA, 18 nt, Human
ccugccccuuucauacuu

SEQ ID NO: 843005 - RNA, 20 nt, Human
ccugucucaaaaacaaaaac

SEQ ID NO: 843006 - RNA, 19 nt, Human
cgcagcgcccuagacgcgc

SEQ ID NO: 843007 - RNA, 19 nt, Human
cgccucccggguucaagcc

SEQ ID NO: 843008 - RNA, 23 nt, Human
cgucugucacacucugcaaagga

SEQ ID NO: 843009 - RNA, 25 nt, Human
cuaccaaacuccaugugcuacgcuc

SEQ ID NO: 843010 - RNA, 18 nt, Human
cuacugcacucuagugag

SEQ ID NO: 843011 - RNA, 24 nt, Human
cuacugcacucuagugagggcaac

SEQ ID NO: 843012 - RNA, 18 nt, Human
cucaaaaacaaaaacaaa

SEQ ID NO: 843013 - RNA, 18 nt, Human
cucacggcucacaccugc

SEQ ID NO: 843014 - RNA, 24 nt, Human
cucacugcaaccuccgccucccgg

SEQ ID NO: 843015 - RNA, 23 nt, Human
cucagccaccugaguagcuggga

SEQ ID NO: 843016 - RNA, 19 nt, Human
cucaucccgucauccaggc

SEQ ID NO: 843017 - RNA, 22 nt, Human
cuccagguucaagaugcaggag

SEQ ID NO: 843018 - RNA, 23 nt, Human
cucccccuacccugccccuuuca

SEQ ID NO: 843019 - RNA, 18 nt, Human
cucuccccacugucagac

SEQ ID NO: 843020 - RNA, 21 nt, Human
cugaacacucaaguguccauc

SEQ ID NO: 843021 - RNA, 24 nt, Human
cugauccacccaccucggccuccc

SEQ ID NO: 843022 - RNA, 23 nt, Human
cugcaaccuccgccucccggguu

SEQ ID NO: 843023 - RNA, 24 nt, Human
cugcaaccuccgccucccggguuc

SEQ ID NO: 843024 - RNA, 23 nt, Human
cugccucagccaccugaguagcu

SEQ ID NO: 843025 - RNA, 22 nt, Human
cugcugggguccucuucugauc

SEQ ID NO: 843026 - RNA, 21 nt, Human
cugggccccagccuccccgcu

SEQ ID NO: 843027 - RNA, 24 nt, Human
cugggccccagccuccccgcuggc

SEQ ID NO: 843028 - RNA, 23 nt, Human
cugggccugcacugggccccagc

SEQ ID NO: 843029 - RNA, 19 nt, Human
cuguuuccucugccugccu

SEQ ID NO: 843030 - RNA, 21 nt, Human
cuucaccauguuggccaggcu

SEQ ID NO: 843031 - RNA, 24 nt, Human
cuugguucagccacggcaugauuc

SEQ ID NO: 843032 - RNA, 19 nt, Human
cuuucauacuucuaacagc

SEQ ID NO: 843033 - RNA, 19 nt, Human
gaaaauguccacugcagca

SEQ ID NO: 843034 - RNA, 23 nt, Human
gaaacagaugcugugaggccaaa

SEQ ID NO: 843035 - RNA, 24 nt, Human
gaaacagaugcugugaggccaaaa

SEQ ID NO: 843036 - RNA, 21 nt, Human
gaccucaacugauccacccac

SEQ ID NO: 843037 - RNA, 24 nt, Human
gaccucaacugauccacccaccuc

SEQ ID NO: 843038 - RNA, 19 nt, Human
gagaaggccucugguuuuc

SEQ ID NO: 843039 - RNA, 19 nt, Human
gagaccacucccaccccag

SEQ ID NO: 843040 - RNA, 23 nt, Human
gagcugggcaaagagcucuccac

SEQ ID NO: 843041 - RNA, 24 nt, Human
gaguagcugggauuacaggcccgc

SEQ ID NO: 843042 - RNA, 18 nt, Human
gauuacaggcgugagcca

SEQ ID NO: 843043 - RNA, 21 nt, Human
gauuacaggcgugagccacug

SEQ ID NO: 843044 - RNA, 24 nt, Human
gauuacaggcgugagccacuguac

SEQ ID NO: 843045 - RNA, 18 nt, Human
gcagaggcuguaucuaca

SEQ ID NO: 843046 - RNA, 19 nt, Human
gcuggagugcaguggccug

SEQ ID NO: 843047 - RNA, 23 nt, Human
gcuggucucaaacuccugaccuc

SEQ ID NO: 843048 - RNA, 25 nt, Human
ggaacauauaaccccucgacaccag

SEQ ID NO: 843049 - RNA, 18 nt, Human
ggaagacucaugcagcug

SEQ ID NO: 843050 - RNA, 22 nt, Human
ggaggcuguggugggaagauca

SEQ ID NO: 843051 - RNA, 23 nt, Human
ggcagggagggggaugugggggc

SEQ ID NO: 843052 - RNA, 19 nt, Human
ggcauggccuggagggugg

SEQ ID NO: 843053 - RNA, 19 nt, Human
ggccccagccuccccgcug

SEQ ID NO: 843054 - RNA, 24 nt, Human
ggcuggucucaaacuccugaccuc

SEQ ID NO: 843055 - RNA, 20 nt, Human
gggcaacagagugagacccu

SEQ ID NO: 843056 - RNA, 21 nt, Human
gggcagggagggggauguggg

SEQ ID NO: 843057 - RNA, 22 nt, Human
gggcagggagggggaugugggg

SEQ ID NO: 843058 - RNA, 18 nt, Human
gggccccagccuccccgc

SEQ ID NO: 843059 - RNA, 22 nt, Human
gggcuucaccauguuggccagg

SEQ ID NO: 843060 - RNA, 20 nt, Human
gguaaaugugaugcccaagg

SEQ ID NO: 843061 - RNA, 18 nt, Human
guagcugggauuacaggc

SEQ ID NO: 843062 - RNA, 22 nt, Human
gugaaacacuguacgcagccuc

SEQ ID NO: 843063 - RNA, 22 nt, Human
gugagccacuguacccagccca

SEQ ID NO: 843064 - RNA, 19 nt, Human
gugcaaccuggacugccuu

SEQ ID NO: 843065 - RNA, 20 nt, Human
gugcaaccuggacugccuuu

SEQ ID NO: 843066 - RNA, 23 nt, Human
guguccaucagcagggacuaugc

SEQ ID NO: 843067 - RNA, 18 nt, Human
guucaaaccucaccauca

SEQ ID NO: 843068 - RNA, 21 nt, Human
uaaaaccugacagacaccaag

SEQ ID NO: 843069 - RNA, 20 nt, Human
uaaaccacuugggagggcaa

SEQ ID NO: 843070 - RNA, 20 nt, Human
uaaauaaggaaacaaaacag

SEQ ID NO: 843071 - RNA, 25 nt, Human
uaacagcagcuuccacugggacaag

SEQ ID NO: 843072 - RNA, 19 nt, Human
uaacaugaacggcaaaauc

SEQ ID NO: 843073 - RNA, 22 nt, Human
uaaguacauuuacauaaguaaa

SEQ ID NO: 843074 - RNA, 24 nt, Human
uacaacagaaaaagcccacagacc

SEQ ID NO: 843075 - RNA, 19 nt, Human
uacaggcgugagccacugu

SEQ ID NO: 843076 - RNA, 24 nt, Human
uacaggcgugagccacuguaccca

SEQ ID NO: 843077 - RNA, 22 nt, Human
uaccucccccuacccugcccug

SEQ ID NO: 843078 - RNA, 21 nt, Human
uacugcacucuagugagggca

SEQ ID NO: 843079 - RNA, 23 nt, Human
uacugcacucuagugagggcaac

SEQ ID NO: 843080 - RNA, 24 nt, Human
uacugcacucuagugagggcaaca

SEQ ID NO: 843081 - RNA, 24 nt, Human
uacugcuaggaauuuaccuuucag

SEQ ID NO: 843082 - RNA, 24 nt, Human
uacugggauuacaggcgugagcca

SEQ ID NO: 843083 - RNA, 21 nt, Human
uagaagacacuagaaugucau

SEQ ID NO: 843084 - RNA, 22 nt, Human
uagaagacacuagaaugucauc

SEQ ID NO: 843085 - RNA, 21 nt, Human
uagaaugucauccggugugca

SEQ ID NO: 843086 - RNA, 22 nt, Human
uagagacagggcuucaccaugu

SEQ ID NO: 843087 - RNA, 24 nt, Human
uaguagagacagggcuucaccaug

SEQ ID NO: 843088 - RNA, 19 nt, Human
uauacugggccauuauggc

SEQ ID NO: 843089 - RNA, 22 nt, Human
uauuaagcaguaauucuuugac

SEQ ID NO: 843090 - RNA, 24 nt, Human
uauugagucgucugucacacucug

SEQ ID NO: 843091 - RNA, 22 nt, Human
ucacaaagcauauuuuaccuuu

SEQ ID NO: 843092 - RNA, 21 nt, Human
ucacacaggccucacccugga

SEQ ID NO: 843093 - RNA, 20 nt, Human
ucacacccaccccaucacaa

SEQ ID NO: 843094 - RNA, 23 nt, Human
ucacugcaaccuccgccucccgg

SEQ ID NO: 843095 - RNA, 24 nt, Human
ucacugcaaccuccgccucccggg

SEQ ID NO: 843096 - RNA, 25 nt, Human
ucacugcaaccuccgccucccgggu

SEQ ID NO: 843097 - RNA, 26 nt, Human
ucacugcaaccuccgccucccggguu

SEQ ID NO: 843098 - RNA, 23 nt, Human
ucagauauaaacaaaaguguacc

SEQ ID NO: 843099 - RNA, 24 nt, Human
ucauccaggcuggagugcaguggc

SEQ ID NO: 843100 - RNA, 22 nt, Human
ucaucccgucauccaggcugga

SEQ ID NO: 843101 - RNA, 21 nt, Human
ucaugcagcugggguuggagc

SEQ ID NO: 843102 - RNA, 18 nt, Human
ucccaaagaauuuuaguu

SEQ ID NO: 843103 - RNA, 24 nt, Human
ucccaaaguacugggauuacaggc

SEQ ID NO: 843104 - RNA, 21 nt, Human
ucccggguucaagccauucuc

SEQ ID NO: 843105 - RNA, 24 nt, Human
ucccggguucaagccauucuccug

SEQ ID NO: 843106 - RNA, 22 nt, Human
uccuggguaucccucucucuac

SEQ ID NO: 843107 - RNA, 23 nt, Human
ucggcuaauuuuuaguagagaca

SEQ ID NO: 843108 - RNA, 19 nt, Human
ucguuuuuuugagacagag

SEQ ID NO: 843109 - RNA, 19 nt, Human
ucuacugcuaggaauuuac

SEQ ID NO: 843110 - RNA, 24 nt, Human
ucucaucccgucauccaggcugga

SEQ ID NO: 843111 - RNA, 19 nt, Human
ucugaucagagcaggccac

SEQ ID NO: 843112 - RNA, 20 nt, Human
ugaaaaugauguauauggca

SEQ ID NO: 843113 - RNA, 23 nt, Human
ugaaagcuuugcuaccuuuugcu

SEQ ID NO: 843114 - RNA, 18 nt, Human
ugaagcaccucccagcuc

SEQ ID NO: 843115 - RNA, 21 nt, Human
ugaaggcuggggcuggaaaug

SEQ ID NO: 843116 - RNA, 22 nt, Human
ugaccucaacugauccacccac

SEQ ID NO: 843117 - RNA, 20 nt, Human
ugagaaugcagagggugugg

SEQ ID NO: 843118 - RNA, 22 nt, Human
ugcaguggccugaucuuggcuc

SEQ ID NO: 843119 - RNA, 19 nt, Human
ugcccugaguacaacagaa

SEQ ID NO: 843120 - RNA, 21 nt, Human
ugccucagccaccugaguagc

SEQ ID NO: 843121 - RNA, 24 nt, Human
ugccucagccaccugaguagcugg

SEQ ID NO: 843122 - RNA, 28 nt, Human
ugccugagaccacucccaccccaggagc

SEQ ID NO: 843123 - RNA, 18 nt, Human
ugccugggcugggaagac

SEQ ID NO: 843124 - RNA, 19 nt, Human
ugccugggcugggaagacu

SEQ ID NO: 843125 - RNA, 20 nt, Human
ugccugggcugggaagacuc

SEQ ID NO: 843126 - RNA, 19 nt, Human
uggagcaggugggccuccu

SEQ ID NO: 843127 - RNA, 19 nt, Human
uggaggguggggggacugc

SEQ ID NO: 843128 - RNA, 19 nt, Human
uggagugcaguggccugau

SEQ ID NO: 843129 - RNA, 23 nt, Human
uggagugcaguggccugaucuug

SEQ ID NO: 843130 - RNA, 24 nt, Human
uggagugcaguggccugaucuugg

SEQ ID NO: 843131 - RNA, 22 nt, Human
uggcaaggguaagcugacuaaa

SEQ ID NO: 843132 - RNA, 24 nt, Human
uggccaggcuggucucaaacuccu

SEQ ID NO: 843133 - RNA, 18 nt, Human
uggccuggaggguggggg

SEQ ID NO: 843134 - RNA, 19 nt, Human
uggccuggagggugggggg

SEQ ID NO: 843135 - RNA, 20 nt, Human
ugggaagaucaauugagccg

SEQ ID NO: 843136 - RNA, 20 nt, Human
ugggaggcuguggugggaag

SEQ ID NO: 843137 - RNA, 21 nt, Human
ugggauuacaggcccgcacca

SEQ ID NO: 843138 - RNA, 24 nt, Human
ugggauuacaggcccgcaccacca

SEQ ID NO: 843139 - RNA, 21 nt, Human
ugggauuacaggcgugagcca

SEQ ID NO: 843140 - RNA, 22 nt, Human
ugggauuacaggcgugagccac

SEQ ID NO: 843141 - RNA, 22 nt, Human
ugggauuacaggcgugagccac

SEQ ID NO: 843142 - RNA, 22 nt, Human
ugggauuacaggcgugagccac

SEQ ID NO: 843143 - RNA, 24 nt, Human
ugggauuacaggcgugagccacug

SEQ ID NO: 843144 - RNA, 26 nt, Human
ugggauuacaggcgugagccacugua

SEQ ID NO: 843145 - RNA, 19 nt, Human
ugggcagggagggggaugu

SEQ ID NO: 843146 - RNA, 23 nt, Human
uguaaaugggaaaaagcaacaca

SEQ ID NO: 843147 - RNA, 22 nt, Human
uuagaaaacaucugucuucuua

SEQ ID NO: 843148 - RNA, 24 nt, Human
uuaguagagacagggcuucaccau

SEQ ID NO: 843149 - RNA, 18 nt, Human
uucaagccauucuccugc

SEQ ID NO: 843150 - RNA, 21 nt, Human
uucaagccauucuccugccuc

SEQ ID NO: 843151 - RNA, 18 nt, Human
uucaagucaaagaaauuc

SEQ ID NO: 843152 - RNA, 22 nt, Human
uucccaaagaauuuuaguucuu

SEQ ID NO: 843153 - RNA, 26 nt, Human
uucuccaagggcggggccuacaacag

SEQ ID NO: 843154 - RNA, 20 nt, Human
uugcuugaaggcuggggcug

SEQ ID NO: 843155 - RNA, 20 nt, Human
uuggagcaggugggccuccu

SEQ ID NO: 843156 - RNA, 20 nt, Human
uuucagggccuaguacccua

SEQ ID NO: 843157 - RNA, 22 nt, Human
uuuccauguaaggagauuuuau

SEQ ID NO: 843158 - RNA, 26 nt, Human
aaacagaaaagggaagaaaggggacc

SEQ ID NO: 843159 - RNA, 20 nt, Human
aaacagaggucugaaauagc

SEQ ID NO: 843160 - RNA, 21 nt, Human
aaacagaggucugaaauagca

SEQ ID NO: 843161 - RNA, 21 nt, Human
aaagccugauaaccuuccaaa

SEQ ID NO: 843162 - RNA, 19 nt, Human
aacaggugugcagggggag

SEQ ID NO: 843163 - RNA, 19 nt, Human
aacucuuuccccauccucc

SEQ ID NO: 843164 - RNA, 23 nt, Human
aacucuuuccccauccuccacca

SEQ ID NO: 843165 - RNA, 23 nt, Human
aacuucacacacauacucccaaa

SEQ ID NO: 843166 - RNA, 20 nt, Human
aaguaaaacagaaaagggaa

SEQ ID NO: 843167 - RNA, 26 nt, Human
aaguaaaacagaaaagggaagaaagg

SEQ ID NO: 843168 - RNA, 19 nt, Human
aaguacacucuaaugacaa

SEQ ID NO: 843169 - RNA, 22 nt, Human
aauguuuccuuuauucuucuca

SEQ ID NO: 843170 - RNA, 20 nt, Human
acaaacuccaggucacauag

SEQ ID NO: 843171 - RNA, 23 nt, Human
acaacacaaacuccaggucacaa

SEQ ID NO: 843172 - RNA, 19 nt, Human
acacauacucccaaagucu

SEQ ID NO: 843173 - RNA, 22 nt, Human
acagcuggagacacuuuagaac

SEQ ID NO: 843174 - RNA, 18 nt, Human
acucccaaagucuauacc

SEQ ID NO: 843175 - RNA, 21 nt, Human
auacucccaaagucuauacca

SEQ ID NO: 843176 - RNA, 23 nt, Human
auggggcagcugaggucauuucu

SEQ ID NO: 843177 - RNA, 20 nt, Human
auuugauaugucuucacugg

SEQ ID NO: 843178 - RNA, 22 nt, Human
caaccaggaauuaaaucacugc

SEQ ID NO: 843179 - RNA, 21 nt, Human
cacacagaguccacauuggag

SEQ ID NO: 843180 - RNA, 22 nt, Human
cacgcuucucugagcaccucca

SEQ ID NO: 843181 - RNA, 22 nt, Human
cacuccuacuuggacaacugcu

SEQ ID NO: 843182 - RNA, 22 nt, Human
cccaaccaggaauuaaaucacu

SEQ ID NO: 843183 - RNA, 24 nt, Human
ccccauccuccaccauagugcaaa

SEQ ID NO: 843184 - RNA, 21 nt, Human
cccugcaacagucagccacca

SEQ ID NO: 843185 - RNA, 19 nt, Human
ccuccuggguucacagcug

SEQ ID NO: 843186 - RNA, 21 nt, Human
ccugcaacagucagccaccac

SEQ ID NO: 843187 - RNA, 23 nt, Human
cgaaggacagcugcaucucuacu

SEQ ID NO: 843188 - RNA, 21 nt, Human
cucaaagggcaaaugagaaaa

SEQ ID NO: 843189 - RNA, 18 nt, Human
cuccuggguucacagcug

SEQ ID NO: 843190 - RNA, 18 nt, Human
cugcaaacuauggaucca

SEQ ID NO: 843191 - RNA, 19 nt, Human
gaaaacauuauuauauuuu

SEQ ID NO: 843192 - RNA, 20 nt, Human
gaaaggaacguagauauggg

SEQ ID NO: 843193 - RNA, 19 nt, Human
gaccuccuggguucacagc

SEQ ID NO: 843194 - RNA, 18 nt, Human
gagaaaacaggugugcag

SEQ ID NO: 843195 - RNA, 18 nt, Human
gcaaacuucacgcuucuc

SEQ ID NO: 843196 - RNA, 18 nt, Human
gcagugauaaaagcaacu

SEQ ID NO: 843197 - RNA, 21 nt, Human
uaaaaaaucuggugcaacaca

SEQ ID NO: 843198 - RNA, 25 nt, Human
uaaaaacuucacacacauacuccca

SEQ ID NO: 843199 - RNA, 19 nt, Human
uaaaccugucagagcagaa

SEQ ID NO: 843200 - RNA, 18 nt, Human
uaagaagguacugagaug

SEQ ID NO: 843201 - RNA, 24 nt, Human
uacaagcaaguuuaaguaaaagug

SEQ ID NO: 843202 - RNA, 22 nt, Human
uagaacucuuuccccauccucc

SEQ ID NO: 843203 - RNA, 19 nt, Human
uauaaaccugucagagcag

SEQ ID NO: 843204 - RNA, 25 nt, Human
ucaaagauucucauuuccaauguuu

SEQ ID NO: 843205 - RNA, 20 nt, Human
ucacacacauacucccaaag

SEQ ID NO: 843206 - RNA, 22 nt, Human
uccacauuggagaaagucucau

SEQ ID NO: 843207 - RNA, 22 nt, Human
ucccugcaacagucagccacca

SEQ ID NO: 843208 - RNA, 19 nt, Human
uccuacuuggacaacugcu

SEQ ID NO: 843209 - RNA, 27 nt, Human
ucuauagucaaaacaaaaccggggucc

SEQ ID NO: 843210 - RNA, 19 nt, Human
ucucuacugcaagguuaca

SEQ ID NO: 843211 - RNA, 20 nt, Human
ucucugagcaccuccaaggu

SEQ ID NO: 843212 - RNA, 21 nt, Human
ugaaaggaacguagauauggg

SEQ ID NO: 843213 - RNA, 20 nt, Human
ugaccaaacagaggucugaa

SEQ ID NO: 843214 - RNA, 21 nt, Human
ugaccuccuggguucacagcu

SEQ ID NO: 843215 - RNA, 23 nt, Human
ugaggacacacaucaaaugcugu

SEQ ID NO: 843216 - RNA, 24 nt, Human
ugauaaaaacuucacacacauacu

SEQ ID NO: 843217 - RNA, 21 nt, Human
ugcaacagucagccaccacuu

SEQ ID NO: 843218 - RNA, 21 nt, Human
ugcaagguuacaguacacaaa

SEQ ID NO: 843219 - RNA, 21 nt, Human
ugcagggggagggggcugaag

SEQ ID NO: 843220 - RNA, 20 nt, Human
ugcccaguaaucaaguacaa

SEQ ID NO: 843221 - RNA, 23 nt, Human
uguauacauauauauuuccauau

SEQ ID NO: 843222 - RNA, 24 nt, Human
uguauacauauauauuuccauaua

SEQ ID NO: 843223 - RNA, 28 nt, Human
uguauacauauauauuuccauauauaua

SEQ ID NO: 843224 - RNA, 26 nt, Human
uuaaaagccugauaaccuuccaaagu

SEQ ID NO: 843225 - RNA, 20 nt, Human
uucaaauaauaaaaguaaug

SEQ ID NO: 843226 - RNA, 20 nt, Human
uucucauucccugcaacagu

SEQ ID NO: 843227 - RNA, 21 nt, Human
uuuagaacucuuuccccaucc

SEQ ID NO: 843228 - RNA, 24 nt, Human
uuuucagacccaagacaaguucuu

SEQ ID NO: 843229 - RNA, 18 nt, Human
aaaaagcaacaccagagg

SEQ ID NO: 843230 - RNA, 22 nt, Human
aaaaagcaacaccagaggguau

SEQ ID NO: 843231 - RNA, 19 nt, Human
agacaggaaggggaaaaac

SEQ ID NO: 843232 - RNA, 23 nt, Human
agacaggaaggggaaaaagggac

SEQ ID NO: 843233 - RNA, 21 nt, Human
uaaaacagacaacauguggca

SEQ ID NO: 843234 - RNA, 23 nt, Human
uaaaacagacaacauguggcaaa

SEQ ID NO: 843235 - RNA, 24 nt, Human
uaucauguuuuccaacaaagcuca

SEQ ID NO: 843236 - RNA, 25 nt, Human
uauccaaaaaguaucucuuagguau

SEQ ID NO: 843237 - RNA, 22 nt, Human
uccaaauuccuucuuuuuuaaa

SEQ ID NO: 843238 - RNA, 23 nt, Human
uccaaauuccuucuuuuuuaaac

SEQ ID NO: 843239 - RNA, 19 nt, Human
uccuucuuuuuuaaacaug

SEQ ID NO: 843240 - RNA, 19 nt, Human
ugcccgagagagcgcgagg

SEQ ID NO: 843241 - RNA, 20 nt, Human
uggcaauauaaauauccaaa

SEQ ID NO: 843242 - RNA, 19 nt, Human
uuaaaaagcaacaccagag

SEQ ID NO: 843243 - RNA, 22 nt, Human
aaaaacacuugucauauauaac

SEQ ID NO: 843244 - RNA, 19 nt, Human
aaaaagcucggaaacacaa

SEQ ID NO: 843245 - RNA, 18 nt, Human
acagauugaggucucaaa

SEQ ID NO: 843246 - RNA, 19 nt, Human
agguucaagucugaauucu

SEQ ID NO: 843247 - RNA, 21 nt, Human
aguggcugggauuacaggcau

SEQ ID NO: 843248 - RNA, 21 nt, Human
caaauuuuuuuuuaaaaaaag

SEQ ID NO: 843249 - RNA, 22 nt, Human
cacuugucauauauaacacuuu

SEQ ID NO: 843250 - RNA, 20 nt, Human
cagccuccugaguggcuggg

SEQ ID NO: 843251 - RNA, 19 nt, Human
caugcaccaugcccggugc

SEQ ID NO: 843252 - RNA, 20 nt, Human
ccagcuugcuuccccuacaa

SEQ ID NO: 843253 - RNA, 22 nt, Human
cccgcgccggaucgcucaggaa

SEQ ID NO: 843254 - RNA, 24 nt, Human
cccugccucagccuccugaguggc

SEQ ID NO: 843255 - RNA, 21 nt, Human
ccggugcuacaaauuuuuuuu

SEQ ID NO: 843256 - RNA, 18 nt, Human
ccuacaacuuaauaagcc

SEQ ID NO: 843257 - RNA, 25 nt, Human
ccucccugccucagccuccugagug

SEQ ID NO: 843258 - RNA, 23 nt, Human
ccugaguggcugggauuacaggc

SEQ ID NO: 843259 - RNA, 24 nt, Human
ccugaguggcugggauuacaggca

SEQ ID NO: 843260 - RNA, 20 nt, Human
ccugggcucaauggauccuc

SEQ ID NO: 843261 - RNA, 24 nt, Human
cgcuauuuugcccaggcuggacuc

SEQ ID NO: 843262 - RNA, 20 nt, Human
cggcuuccgaacugcugccu

SEQ ID NO: 843263 - RNA, 21 nt, Human
cucaaagaaagaacuugagaa

SEQ ID NO: 843264 - RNA, 23 nt, Human
cuccugggcucaauggauccucc

SEQ ID NO: 843265 - RNA, 23 nt, Human
cugaguggcugggauuacaggca

SEQ ID NO: 843266 - RNA, 24 nt, Human
cugaguggcugggauuacaggcau

SEQ ID NO: 843267 - RNA, 23 nt, Human
cugccucagccuccugaguggcu

SEQ ID NO: 843268 - RNA, 22 nt, Human
cuggacuccugggcucaaugga

SEQ ID NO: 843269 - RNA, 19 nt, Human
gacuccugggcucaaugga

SEQ ID NO: 843270 - RNA, 22 nt, Human
gaguggcugggauuacaggcau

SEQ ID NO: 843271 - RNA, 24 nt, Human
gaguggcugggauuacaggcaugc

SEQ ID NO: 843272 - RNA, 22 nt, Human
gauccucccugccucagccucc

SEQ ID NO: 843273 - RNA, 19 nt, Human
gauuacaggcaugcaccau

SEQ ID NO: 843274 - RNA, 24 nt, Human
gccucagccuccugaguggcuggg

SEQ ID NO: 843275 - RNA, 21 nt, Human
gcgccggaucgcucaggaacc

SEQ ID NO: 843276 - RNA, 21 nt, Human
ggauuacaggcaugcaccaug

SEQ ID NO: 843277 - RNA, 19 nt, Human
ggguaggagccggccauga

SEQ ID NO: 843278 - RNA, 18 nt, Human
guggcugggauuacaggc

SEQ ID NO: 843279 - RNA, 20 nt, Human
guggcugggauuacaggcau

SEQ ID NO: 843280 - RNA, 19 nt, Human
uaaaaaaagcucggaaaca

SEQ ID NO: 843281 - RNA, 20 nt, Human
uacaacuuaauaagcccuuc

SEQ ID NO: 843282 - RNA, 18 nt, Human
uauuuugcccaggcugga

SEQ ID NO: 843283 - RNA, 26 nt, Human
ucaauggauccucccugccucagccu

SEQ ID NO: 843284 - RNA, 20 nt, Human
ucagccuccugaguggcugg

SEQ ID NO: 843285 - RNA, 24 nt, Human
uccugaguggcugggauuacaggc

SEQ ID NO: 843286 - RNA, 18 nt, Human
ucucaaagaaagaacuug

SEQ ID NO: 843287 - RNA, 23 nt, Human
ucucgcuauuuugcccaggcugg

SEQ ID NO: 843288 - RNA, 24 nt, Human
ucucgcuauuuugcccaggcugga

SEQ ID NO: 843289 - RNA, 23 nt, Human
ucugauucuucccagcuugcuuc

SEQ ID NO: 843290 - RNA, 22 nt, Human
ugcccaggcuggacuccugggc

SEQ ID NO: 843291 - RNA, 25 nt, Human
ugcccaggcuggacuccugggcuca

SEQ ID NO: 843292 - RNA, 24 nt, Human
ugccucagccuccugaguggcugg

SEQ ID NO: 843293 - RNA, 25 nt, Human
uggacuccugggcucaauggauccu

SEQ ID NO: 843294 - RNA, 21 nt, Human
ugggauuacaggcaugcacca

SEQ ID NO: 843295 - RNA, 21 nt, Human
ugggauuacaggcaugcacca

SEQ ID NO: 843296 - RNA, 23 nt, Human
ugggauuacaggcaugcaccaug

SEQ ID NO: 843297 - RNA, 27 nt, Human
ugggauuacaggcaugcaccaugcccg

SEQ ID NO: 843298 - RNA, 24 nt, Human
uguccagcaucaacgagaccucau

SEQ ID NO: 843299 - RNA, 23 nt, Human
uugcaggugcaccuucaggguag

SEQ ID NO: 843300 - RNA, 25 nt, Human
uuuaagguucaagucugaauucuug

SEQ ID NO: 843301 - RNA, 24 nt, Human
uuuugcccaggcuggacuccuggg

SEQ ID NO: 843302 - RNA, 23 nt, Human
aaaacagacagucgacaaauuuc

SEQ ID NO: 843303 - RNA, 21 nt, Human
aaaacgaaauacaauauccuc

SEQ ID NO: 843304 - RNA, 21 nt, Human
aaagauauuugaacccaaaau

SEQ ID NO: 843305 - RNA, 21 nt, Human
aaagauauuugaacccaaaau

SEQ ID NO: 843306 - RNA, 22 nt, Human
aacaaaauucaucaaccaaaac

SEQ ID NO: 843307 - RNA, 24 nt, Human
aagagcucacagccccaccccuca

SEQ ID NO: 843308 - RNA, 24 nt, Human
aagagcucacagccccaccccuca

SEQ ID NO: 843309 - RNA, 23 nt, Human
aagccuccaaugggguauaaucc

SEQ ID NO: 843310 - RNA, 23 nt, Human
aagccuccaaugggguauaaucc

SEQ ID NO: 843311 - RNA, 24 nt, Human
accaaaacagacagucgacaaauu

SEQ ID NO: 843312 - RNA, 21 nt, Human
acgucuccuaucuuuggcuau

SEQ ID NO: 843313 - RNA, 21 nt, Human
acgucuccuaucuuuggcuau

SEQ ID NO: 843314 - RNA, 23 nt, Human
acucaaggacauuccacacuccu

SEQ ID NO: 843315 - RNA, 24 nt, Human
acucaaggacauuccacacuccuu

SEQ ID NO: 843316 - RNA, 22 nt, Human
acugccucaucuucccgagaag

SEQ ID NO: 843317 - RNA, 24 nt, Human
acugccucaucuucccgagaaguu

SEQ ID NO: 843318 - RNA, 23 nt, Human
agaagcuaaagaucuagggagcu

SEQ ID NO: 843319 - RNA, 18 nt, Human
aggaagcagaguuuuuca

SEQ ID NO: 843320 - RNA, 18 nt, Human
aggaagcagaguuuuuca

SEQ ID NO: 843321 - RNA, 20 nt, Human
aggacauuccacacuccuug

SEQ ID NO: 843322 - RNA, 20 nt, Human
aggacauuccacacuccuug

SEQ ID NO: 843323 - RNA, 21 nt, Human
aggaugaaacucugaacaaaa

SEQ ID NO: 843324 - RNA, 22 nt, Human
aggauucuucauugcuugaagg

SEQ ID NO: 843325 - RNA, 18 nt, Human
agguaaaaaauacaauaa

SEQ ID NO: 843326 - RNA, 21 nt, Human
agguaaaaaauacaauaauaa

SEQ ID NO: 843327 - RNA, 21 nt, Human
agguaaaaaauacaauaauaa

SEQ ID NO: 843328 - RNA, 19 nt, Human
agugguaggagcaguggga

SEQ ID NO: 843329 - RNA, 24 nt, Human
aguuaguacaauucauauuuaaag

SEQ ID NO: 843330 - RNA, 24 nt, Human
aguuaguacaauucauauuuaaag

SEQ ID NO: 843331 - RNA, 19 nt, Human
auaaagauacaaagcucca

SEQ ID NO: 843332 - RNA, 24 nt, Human
auacaauaauaauuuuuaaugaaa

SEQ ID NO: 843333 - RNA, 24 nt, Human
auacaauaauaauuuuuaaugaaa

SEQ ID NO: 843334 - RNA, 23 nt, Human
aucgauguacaagggaagaccag

SEQ ID NO: 843335 - RNA, 19 nt, Human
auguacaagggaagaccag

SEQ ID NO: 843336 - RNA, 22 nt, Human
caaaaauacacauacccugaga

SEQ ID NO: 843337 - RNA, 22 nt, Human
caaaaauacacauacccugaga

SEQ ID NO: 843338 - RNA, 19 nt, Human
caaaucacuccuccaacaa

SEQ ID NO: 843339 - RNA, 22 nt, Human
caaccaaaacagacagucgaca

SEQ ID NO: 843340 - RNA, 27 nt, Human
cacccuuugagcauuucuagggcccaa

SEQ ID NO: 843341 - RNA, 23 nt, Human
cacuguuuaucauucaaaauuca

SEQ ID NO: 843342 - RNA, 23 nt, Human
cacuguuuaucauucaaaauuca

SEQ ID NO: 843343 - RNA, 25 nt, Human
caggaagcagaguuuuucagaauca

SEQ ID NO: 843344 - RNA, 25 nt, Human
caggaagcagaguuuuucagaauca

SEQ ID NO: 843345 - RNA, 18 nt, Human
cagggcuuugcuauuuag

SEQ ID NO: 843346 - RNA, 18 nt, Human
cagggcuuugcuauuuag

SEQ ID NO: 843347 - RNA, 22 nt, Human
cauaaugggagcaaagcugaaa

SEQ ID NO: 843348 - RNA, 22 nt, Human
cauaaugggagcaaagcugaaa

SEQ ID NO: 843349 - RNA, 25 nt, Human
cauuccacacuccuuggugguucca

SEQ ID NO: 843350 - RNA, 22 nt, Human
ccaaaacagacagucgacaaau

SEQ ID NO: 843351 - RNA, 21 nt, Human
ccaacaauaaugaugcccaua

SEQ ID NO: 843352 - RNA, 28 nt, Human
ccagcaauauccuaggcaaaugccuccu

SEQ ID NO: 843353 - RNA, 28 nt, Human
ccagcaauauccuaggcaaaugccuccu

SEQ ID NO: 843354 - RNA, 21 nt, Human
ccgcuccaacuaucacccggc

SEQ ID NO: 843355 - RNA, 24 nt, Human
ccggcaacagcaacucggccacag

SEQ ID NO: 843356 - RNA, 22 nt, Human
ccuaggcaaaugccuccugaag

SEQ ID NO: 843357 - RNA, 22 nt, Human
ccuaggcaaaugccuccugaag

SEQ ID NO: 843358 - RNA, 20 nt, Human
cgcuccaacuaucacccggc

SEQ ID NO: 843359 - RNA, 20 nt, Human
cucaaaauuaaaacuaagga

SEQ ID NO: 843360 - RNA, 24 nt, Human
cuccaacaauaaugaugcccauag

SEQ ID NO: 843361 - RNA, 22 nt, Human
cuccuuggcaugggugguccag

SEQ ID NO: 843362 - RNA, 22 nt, Human
cugaacaaaauucaucaaccaa

SEQ ID NO: 843363 - RNA, 23 nt, Human
cugaagaacaacagcuuuuuuaa

SEQ ID NO: 843364 - RNA, 23 nt, Human
cugaagaacaacagcuuuuuuaa

SEQ ID NO: 843365 - RNA, 20 nt, Human
cuuggugacugcaguuugca

SEQ ID NO: 843366 - RNA, 24 nt, Human
cuuuacucaaaauuaaaacuaagg

SEQ ID NO: 843367 - RNA, 24 nt, Human
cuuuacucaaaauuaaaacuaagg

SEQ ID NO: 843368 - RNA, 22 nt, Human
cuuugagcauuucuagggccca

SEQ ID NO: 843369 - RNA, 26 nt, Human
gaccagcccagggaaaaacgaaauac

SEQ ID NO: 843370 - RNA, 20 nt, Human
gagcucacagccccaccccu

SEQ ID NO: 843371 - RNA, 20 nt, Human
gagcucacagccccaccccu

SEQ ID NO: 843372 - RNA, 23 nt, Human
gagcucacagccccaccccucag

SEQ ID NO: 843373 - RNA, 23 nt, Human
gagcucacagccccaccccucag

SEQ ID NO: 843374 - RNA, 22 nt, Human
gcagaguuuuucagaaucaaaa

SEQ ID NO: 843375 - RNA, 22 nt, Human
gcagaguuuuucagaaucaaaa

SEQ ID NO: 843376 - RNA, 18 nt, Human
gcucauuuucaaguugaa

SEQ ID NO: 843377 - RNA, 20 nt, Human
ggcuuugcuauuuagguaca

SEQ ID NO: 843378 - RNA, 20 nt, Human
ggcuuugcuauuuagguaca

SEQ ID NO: 843379 - RNA, 20 nt, Human
gggaaaaacgaaauacaaua

SEQ ID NO: 843380 - RNA, 19 nt, Human
ggguauaauccagcaauau

SEQ ID NO: 843381 - RNA, 19 nt, Human
ggguauaauccagcaauau

SEQ ID NO: 843382 - RNA, 22 nt, Human
uaaaauucuccagcucauuuuc

SEQ ID NO: 843383 - RNA, 18 nt, Human
uaaagauacaaagcucca

SEQ ID NO: 843384 - RNA, 25 nt, Human
uaaauaauacacucaaggacauucc

SEQ ID NO: 843385 - RNA, 25 nt, Human
uaaauaauacacucaaggacauucc

SEQ ID NO: 843386 - RNA, 21 nt, Human
uaacaagccuuuauccuguuu

SEQ ID NO: 843387 - RNA, 20 nt, Human
uaacgggaauaaaaaguaaa

SEQ ID NO: 843388 - RNA, 22 nt, Human
uaacuccuggaugccaggaagc

SEQ ID NO: 843389 - RNA, 22 nt, Human
uaacuccuggaugccaggaagc

SEQ ID NO: 843390 - RNA, 19 nt, Human
uacacauacccugagacag

SEQ ID NO: 843391 - RNA, 19 nt, Human
uacacauacccugagacag

SEQ ID NO: 843392 - RNA, 18 nt, Human
uaucauggucaccaaagc

SEQ ID NO: 843393 - RNA, 18 nt, Human
uaucauggucaccaaagc

SEQ ID NO: 843394 - RNA, 23 nt, Human
uauucccaugaaagaaagcauca

SEQ ID NO: 843395 - RNA, 23 nt, Human
ucaaaaacaaauuaagagcucac

SEQ ID NO: 843396 - RNA, 26 nt, Human
ucacccggcaacagcaacucggccac

SEQ ID NO: 843397 - RNA, 19 nt, Human
uccaaaucacuccuccaac

SEQ ID NO: 843398 - RNA, 18 nt, Human
uccagcaauauccuaggc

SEQ ID NO: 843399 - RNA, 18 nt, Human
uccagcaauauccuaggc

SEQ ID NO: 843400 - RNA, 18 nt, Human
uccuggaugccaggaagc

SEQ ID NO: 843401 - RNA, 18 nt, Human
uccuggaugccaggaagc

SEQ ID NO: 843402 - RNA, 19 nt, Human
uccuuggugguuccagcaa

SEQ ID NO: 843403 - RNA, 19 nt, Human
uccuuggugguuccagcaa

SEQ ID NO: 843404 - RNA, 20 nt, Human
ucggccacagaugccaaacu

SEQ ID NO: 843405 - RNA, 20 nt, Human
ucuccgcuccaacuaucacc

SEQ ID NO: 843406 - RNA, 19 nt, Human
ucuuucauaaagauacaaa

SEQ ID NO: 843407 - RNA, 22 nt, Human
ugaacaaaauucaucaaccaaa

SEQ ID NO: 843408 - RNA, 21 nt, Human
ugacugcaguuugcacucgug

SEQ ID NO: 843409 - RNA, 21 nt, Human
ugagaaagaagaugaaaggcu

SEQ ID NO: 843410 - RNA, 21 nt, Human
ugagaaagaagaugaaaggcu

SEQ ID NO: 843411 - RNA, 21 nt, Human
ugagacagaucauuaccagaa

SEQ ID NO: 843412 - RNA, 21 nt, Human
ugagacagaucauuaccagaa

SEQ ID NO: 843413 - RNA, 21 nt, Human
ugcauaguuuacaaacugcug

SEQ ID NO: 843414 - RNA, 18 nt, Human
ugccucaucuucccgaga

SEQ ID NO: 843415 - RNA, 19 nt, Human
uggaugccaggaagcagag

SEQ ID NO: 843416 - RNA, 19 nt, Human
uggaugccaggaagcagag

SEQ ID NO: 843417 - RNA, 20 nt, Human
ugggagcaaagcugaaaaug

SEQ ID NO: 843418 - RNA, 20 nt, Human
ugggagcaaagcugaaaaug

SEQ ID NO: 843419 - RNA, 19 nt, Human
ugggguauaauccagcaau

SEQ ID NO: 843420 - RNA, 22 nt, Human
ugggguauaauccagcaauauc

SEQ ID NO: 843421 - RNA, 22 nt, Human
uguuucuuuagaaacaucuaag

SEQ ID NO: 843422 - RNA, 22 nt, Human
uguuucuuuagaaacaucuaag

SEQ ID NO: 843423 - RNA, 18 nt, Human
uucagaaucaaaaacaaa

SEQ ID NO: 843424 - RNA, 18 nt, Human
uucagaaucaaaaacaaa

SEQ ID NO: 843425 - RNA, 21 nt, Human
uucaguugcauaguuuacaaa

SEQ ID NO: 843426 - RNA, 21 nt, Human
uucuuuggguaaucuagcaau

SEQ ID NO: 843427 - RNA, 21 nt, Human
uuugagcauuucuagggccca

SEQ ID NO: 843428 - RNA, 19 nt, Human
aaacaggccugcacaaguc

SEQ ID NO: 843429 - RNA, 19 nt, Human
aacagggaugcaaucaagc

SEQ ID NO: 843430 - RNA, 22 nt, Human
aacagggaugcaaucaagccua

SEQ ID NO: 843431 - RNA, 20 nt, Human
aacaucagcauaaagacaag

SEQ ID NO: 843432 - RNA, 18 nt, Human
aacauccacccacagcau

SEQ ID NO: 843433 - RNA, 24 nt, Human
aaccaguaacaaucccaaaacuca

SEQ ID NO: 843434 - RNA, 23 nt, Human
aagcaaucaaaugaaccagagaa

SEQ ID NO: 843435 - RNA, 19 nt, Human
acccccagcacagggcccg

SEQ ID NO: 843436 - RNA, 20 nt, Human
acccugagcccagccggcuc

SEQ ID NO: 843437 - RNA, 18 nt, Human
accucagccagccaccaa

SEQ ID NO: 843438 - RNA, 20 nt, Human
acguauugaagaagcucaaa

SEQ ID NO: 843439 - RNA, 18 nt, Human
acuaaagcaaaggacaca

SEQ ID NO: 843440 - RNA, 18 nt, Human
agaaagggucucucccuc

SEQ ID NO: 843441 - RNA, 19 nt, Human
agcagguaugugaacagga

SEQ ID NO: 843442 - RNA, 20 nt, Human
agccagccaccaacgucccc

SEQ ID NO: 843443 - RNA, 18 nt, Human
aggagccacacgugcccc

SEQ ID NO: 843444 - RNA, 18 nt, Human
aggcaucauggacauggc

SEQ ID NO: 843445 - RNA, 19 nt, Human
aggcccggcacacgccggg

SEQ ID NO: 843446 - RNA, 26 nt, Human
aggcgggaggagggaagugggggacc

SEQ ID NO: 843447 - RNA, 27 nt, Human
aggcgggaggagggaagugggggaccc

SEQ ID NO: 843448 - RNA, 22 nt, Human
aggcuaccaacucauuuccuca

SEQ ID NO: 843449 - RNA, 18 nt, Human
agucaacaccuuggugac

SEQ ID NO: 843450 - RNA, 23 nt, Human
agugauggcugggcugcugggcc

SEQ ID NO: 843451 - RNA, 19 nt, Human
aucauggacauggcugaag

SEQ ID NO: 843452 - RNA, 20 nt, Human
aucauggacauggcugaagu

SEQ ID NO: 843453 - RNA, 26 nt, Human
augaggcauugugcaaugcugagauc

SEQ ID NO: 843454 - RNA, 23 nt, Human
augauacaggaguaacucaagca

SEQ ID NO: 843455 - RNA, 18 nt, Human
caaaacagaucuacacaa

SEQ ID NO: 843456 - RNA, 22 nt, Human
caacaggacagacugagggcuu

SEQ ID NO: 843457 - RNA, 26 nt, Human
caaccaguaacaaucccaaaacucaa

SEQ ID NO: 843458 - RNA, 23 nt, Human
caaucccaaaacucaacaucagc

SEQ ID NO: 843459 - RNA, 19 nt, Human
cacuacgucaccagcgagc

SEQ ID NO: 843460 - RNA, 22 nt, Human
cagcacgucuugcgcuccagca

SEQ ID NO: 843461 - RNA, 23 nt, Human
cagcauuaaagugcuuuuggcca

SEQ ID NO: 843462 - RNA, 21 nt, Human
cagccuaagcccagggguaac

SEQ ID NO: 843463 - RNA, 23 nt, Human
caucacuucgccccacacaacag

SEQ ID NO: 843464 - RNA, 24 nt, Human
cauggcugaaguccaaaagacaaa

SEQ ID NO: 843465 - RNA, 18 nt, Human
cauguccaccuggcagag

SEQ ID NO: 843466 - RNA, 19 nt, Human
cauguuuacgcuaaagaau

SEQ ID NO: 843467 - RNA, 23 nt, Human
ccaccaacguccccaccuuccac

SEQ ID NO: 843468 - RNA, 18 nt, Human
ccagcaacagcaggcaaa

SEQ ID NO: 843469 - RNA, 19 nt, Human
ccauacauccaacagcccu

SEQ ID NO: 843470 - RNA, 21 nt, Human
cccaaaacucaacaucagcau

SEQ ID NO: 843471 - RNA, 19 nt, Human
cccacacggcacuuagggc

SEQ ID NO: 843472 - RNA, 18 nt, Human
cccagcacagggcccgcc

SEQ ID NO: 843473 - RNA, 18 nt, Human
cccagugacugccaccug

SEQ ID NO: 843474 - RNA, 21 nt, Human
cccaugcaccucagccagcca

SEQ ID NO: 843475 - RNA, 22 nt, Human
cccggggggaggcgggaggagg

SEQ ID NO: 843476 - RNA, 19 nt, Human
cccugagcccagccggcuc

SEQ ID NO: 843477 - RNA, 22 nt, Human
cccugagcccagccggcucgcc

SEQ ID NO: 843478 - RNA, 20 nt, Human
ccggccucgcggcggccauc

SEQ ID NO: 843479 - RNA, 22 nt, Human
ccucaccaccaagacgugucug

SEQ ID NO: 843480 - RNA, 20 nt, Human
ccuuccaccauccauccuuc

SEQ ID NO: 843481 - RNA, 22 nt, Human
ccuucuacuacauccuucaacc

SEQ ID NO: 843482 - RNA, 19 nt, Human
ccuuggccaacugcaguca

SEQ ID NO: 843483 - RNA, 28 nt, Human
cgagauggacacacacaagccacagucc

SEQ ID NO: 843484 - RNA, 20 nt, Human
cgccccacacaacaggacag

SEQ ID NO: 843485 - RNA, 21 nt, Human
cgccgggaacauccacccaca

SEQ ID NO: 843486 - RNA, 21 nt, Human
cgucaccagcgagcgccaccc

SEQ ID NO: 843487 - RNA, 24 nt, Human
cucagccuaagcccagggguaacu

SEQ ID NO: 843488 - RNA, 20 nt, Human
cuccaaucgucccuuacacc

SEQ ID NO: 843489 - RNA, 20 nt, Human
cuccacgcagacuccgccuc

SEQ ID NO: 843490 - RNA, 26 nt, Human
cuccagcaaaugaacauaagguaccc

SEQ ID NO: 843491 - RNA, 22 nt, Human
cuccagcugccucagcagcauc

SEQ ID NO: 843492 - RNA, 19 nt, Human
cucucagacccaugagccc

SEQ ID NO: 843493 - RNA, 21 nt, Human
cucucugggaagaaacuccaa

SEQ ID NO: 843494 - RNA, 22 nt, Human
cucugagcuacucccacuccuc

SEQ ID NO: 843495 - RNA, 23 nt, Human
cugggcugcugggccccugccuu

SEQ ID NO: 843496 - RNA, 26 nt, Human
gaagguucuggagaucagggagggug

SEQ ID NO: 843497 - RNA, 20 nt, Human
gaggaaggugggggugucug

SEQ ID NO: 843498 - RNA, 22 nt, Human
gaggcgggaggagggaagugga

SEQ ID NO: 843499 - RNA, 20 nt, Human
gauacaggaguaacucaagc

SEQ ID NO: 843500 - RNA, 19 nt, Human
gccauacuucuuucagaaa

SEQ ID NO: 843501 - RNA, 22 nt, Human
gcccagggguaacugagccuca

SEQ ID NO: 843502 - RNA, 19 nt, Human
gccccucuccacgcagacu

SEQ ID NO: 843503 - RNA, 23 nt, Human
gccuugugggcugcuuuuuuggg

SEQ ID NO: 843504 - RNA, 18 nt, Human
gcugcugggccccugccu

SEQ ID NO: 843505 - RNA, 20 nt, Human
ggccccugccuugugggcug

SEQ ID NO: 843506 - RNA, 20 nt, Human
ggcugcaaggagggcaggug

SEQ ID NO: 843507 - RNA, 18 nt, Human
ggcugcuuuuuugggaga

SEQ ID NO: 843508 - RNA, 18 nt, Human
gggaacauccacccacag

SEQ ID NO: 843509 - RNA, 19 nt, Human
gggcugcuuuuuugggaga

SEQ ID NO: 843510 - RNA, 20 nt, Human
gguucuggagaucagggagg

SEQ ID NO: 843511 - RNA, 21 nt, Human
gugcaaugcugagauccugag

SEQ ID NO: 843512 - RNA, 22 nt, Human
uaaaaacaacaaugucagcagc

SEQ ID NO: 843513 - RNA, 22 nt, Human
uaaagggcacaacagggaugca

SEQ ID NO: 843514 - RNA, 20 nt, Human
uaacaaucccaaaacucaac

SEQ ID NO: 843515 - RNA, 21 nt, Human
uauuaugagcaaugauacagg

SEQ ID NO: 843516 - RNA, 22 nt, Human
ucaccagucgccucagauugcc

SEQ ID NO: 843517 - RNA, 21 nt, Human
ucacccaaacugcuuuucuca

SEQ ID NO: 843518 - RNA, 26 nt, Human
ucagccagccaccaacguccccaccu

SEQ ID NO: 843519 - RNA, 21 nt, Human
ucagccuaagcccagggguaa

SEQ ID NO: 843520 - RNA, 25 nt, Human
uccaaaacagaucuacacaaaacag

SEQ ID NO: 843521 - RNA, 20 nt, Human
uccaaaagacaaaaagauuc

SEQ ID NO: 843522 - RNA, 27 nt, Human
uccacccacagcauguccaccuggcag

SEQ ID NO: 843523 - RNA, 22 nt, Human
uccauuggaauugugugacagu

SEQ ID NO: 843524 - RNA, 21 nt, Human
ucccaaaacucaacaucagca

SEQ ID NO: 843525 - RNA, 22 nt, Human
uccccaccuuccaccauccauc

SEQ ID NO: 843526 - RNA, 19 nt, Human
uccuucugggacagacucu

SEQ ID NO: 843527 - RNA, 21 nt, Human
ucgccccacacaacaggacag

SEQ ID NO: 843528 - RNA, 18 nt, Human
ucucacacagucaacacc

SEQ ID NO: 843529 - RNA, 21 nt, Human
ucucagacccaugagccccuc

SEQ ID NO: 843530 - RNA, 20 nt, Human
ucucuuggcaguggccaggg

SEQ ID NO: 843531 - RNA, 20 nt, Human
ugaaaguguccuuugggggu

SEQ ID NO: 843532 - RNA, 18 nt, Human
ugaacaggacaucaccug

SEQ ID NO: 843533 - RNA, 28 nt, Human
ugaaccagagaaagcuggaaaaagccuu

SEQ ID NO: 843534 - RNA, 21 nt, Human
ugacacuaaagcaaaggacac

SEQ ID NO: 843535 - RNA, 18 nt, Human
ugagcuacucccacuccu

SEQ ID NO: 843536 - RNA, 27 nt, Human
ugcccccacuucaaccaguaacaaucc

SEQ ID NO: 843537 - RNA, 21 nt, Human
ugccccugggggagcccacac

SEQ ID NO: 843538 - RNA, 21 nt, Human
ugcugggcugcaaggagggca

SEQ ID NO: 843539 - RNA, 20 nt, Human
uggaaaaagccucaacuuaa

SEQ ID NO: 843540 - RNA, 20 nt, Human
uggacacacacaagccacag

SEQ ID NO: 843541 - RNA, 18 nt, Human
uggacccugagcccagcc

SEQ ID NO: 843542 - RNA, 19 nt, Human
uggcaguggccagggggca

SEQ ID NO: 843543 - RNA, 21 nt, Human
uggcuauugauugacuguguu

SEQ ID NO: 843544 - RNA, 22 nt, Human
uggcugggcugcugggccccug

SEQ ID NO: 843545 - RNA, 19 nt, Human
ugggcugcaaggagggcag

SEQ ID NO: 843546 - RNA, 19 nt, Human
ugggggagcccacacggca

SEQ ID NO: 843547 - RNA, 23 nt, Human
uguccugucucagguugagguug

SEQ ID NO: 843548 - RNA, 22 nt, Human
ugugcugggcugcaaggagggc

SEQ ID NO: 843549 - RNA, 21 nt, Human
uucaaccaccuagaccaugcc

SEQ ID NO: 843550 - RNA, 22 nt, Human
uucauguuuacgcuaaagaauu

SEQ ID NO: 843551 - RNA, 23 nt, Human
uugcgcuccagcaaaugaacaua

SEQ ID NO: 843552 - RNA, 18 nt, Human
uuggauggugagagaucu

SEQ ID NO: 843553 - RNA, 24 nt, Human
uuucagaaagggucucucccucag

SEQ ID NO: 843554 - RNA, 24 nt, Human
uuucucacacagucaacaccuugg

SEQ ID NO: 843555 - RNA, 27 nt, Human
uuuuugggagagguguugcuuauuucu

SEQ ID NO: 843556 - RNA, 18 nt, Human
uuuuuugggagagguguu

SEQ ID NO: 843557 - RNA, 21 nt, Human
uuuuuuuuuuucaaaaagagc

SEQ ID NO: 843558 - RNA, 23 nt, Human
aaaggaagaaggaaggcggggag

SEQ ID NO: 843559 - RNA, 23 nt, Human
aagcaucccccucuaggccccag

SEQ ID NO: 843560 - RNA, 23 nt, Human
acccugagaggggucuuaagagg

SEQ ID NO: 843561 - RNA, 19 nt, Human
agaaggaaggcggggaggc

SEQ ID NO: 843562 - RNA, 22 nt, Human
agcaggcaccacccccuuccug

SEQ ID NO: 843563 - RNA, 20 nt, Human
aggcggggaggcccuggauc

SEQ ID NO: 843564 - RNA, 24 nt, Human
aucuccccuucucuguuuccccaa

SEQ ID NO: 843565 - RNA, 18 nt, Human
cagcaggcaccacccccu

SEQ ID NO: 843566 - RNA, 18 nt, Human
cccaagcaucccccucua

SEQ ID NO: 843567 - RNA, 18 nt, Human
ccccaagcaucccccucu

SEQ ID NO: 843568 - RNA, 22 nt, Human
ccccagcaggcaccacccccuu

SEQ ID NO: 843569 - RNA, 18 nt, Human
ccucuaggccccagcagg

SEQ ID NO: 843570 - RNA, 25 nt, Human
ccucuaggccccagcaggcaccacc

SEQ ID NO: 843571 - RNA, 19 nt, Human
cuaggccccagcaggcacc

SEQ ID NO: 843572 - RNA, 23 nt, Human
cuccccuucucuguuuccccaag

SEQ ID NO: 843573 - RNA, 22 nt, Human
gaagaaggaaggcggggaggcc

SEQ ID NO: 843574 - RNA, 19 nt, Human
gcccuggaucuccccuucu

SEQ ID NO: 843575 - RNA, 18 nt, Human
gccuucccucauccccca

SEQ ID NO: 843576 - RNA, 22 nt, Human
ggcggggaggcccuggaucucc

SEQ ID NO: 843577 - RNA, 19 nt, Human
ggggaggcccuggaucucc

SEQ ID NO: 843578 - RNA, 19 nt, Human
gucaaggauggaggggguc

SEQ ID NO: 843579 - RNA, 30 nt, Human
gugugauuuugugugugugugugugugugg

SEQ ID NO: 843580 - RNA, 19 nt, Human
uaaaaaggaagaaggaagg

SEQ ID NO: 843581 - RNA, 24 nt, Human
uaggccccagcaggcaccaccccc

SEQ ID NO: 843582 - RNA, 23 nt, Human
ucaaggauggagggggucaagga

SEQ ID NO: 843583 - RNA, 19 nt, Human
ugagaggggucuuaagagg

SEQ ID NO: 843584 - RNA, 19 nt, Human
ugccuuguggugggguggg

SEQ ID NO: 843585 - RNA, 22 nt, Human
ugccuuguggugggguggggau

SEQ ID NO: 843586 - RNA, 22 nt, Human
ugggguggggauugacaggcau

SEQ ID NO: 843587 - RNA, 24 nt, Human
uggugugauuuugugugugugugu

SEQ ID NO: 843588 - RNA, 29 nt, Human
uggugugauuuugugugugugugugugug

SEQ ID NO: 843589 - RNA, 22 nt, Human
uguggugggguggggauugaca

SEQ ID NO: 843590 - RNA, 23 nt, Human
uguggugggguggggauugacag

SEQ ID NO: 843591 - RNA, 18 nt, Human
ugugugugugugugugug

SEQ ID NO: 843592 - RNA, 18 nt, Human
ugugugugugugugugug

SEQ ID NO: 843593 - RNA, 18 nt, Human
ugugugugugugugugug

SEQ ID NO: 843594 - RNA, 18 nt, Human
ugugugugugugugugug

SEQ ID NO: 843595 - RNA, 21 nt, Human
ugugugugugugugugugugu

SEQ ID NO: 843596 - RNA, 21 nt, Human
ugugugugugugugugugugu

SEQ ID NO: 843597 - RNA, 21 nt, Human
ugugugugugugugugugugu

SEQ ID NO: 843598 - RNA, 21 nt, Human
ugugugugugugugugugugu

SEQ ID NO: 843599 - RNA, 21 nt, Human
ugugugugugugugugugugu

SEQ ID NO: 843600 - RNA, 21 nt, Human
ugugugugugugugugugugu

SEQ ID NO: 843601 - RNA, 22 nt, Human
ugugugugugugugugugugug

SEQ ID NO: 843602 - RNA, 21 nt, Human
uguguguguguguguguugag

SEQ ID NO: 843603 - RNA, 22 nt, Human
uguguguguguguguugaggug

SEQ ID NO: 843604 - RNA, 21 nt, Human
uugggggucaaggauggaggg

SEQ ID NO: 843605 - RNA, 24 nt, Human
uuugugugugugugugugugugug

SEQ ID NO: 843606 - RNA, 22 nt, Human
aacacuaugagcuacuaaaaaa

SEQ ID NO: 843607 - RNA, 21 nt, Human
agaaauaugaaaaguuccagc

SEQ ID NO: 843608 - RNA, 26 nt, Human
agcuacuaaaaaaguuguggaacuca

SEQ ID NO: 843609 - RNA, 18 nt, Human
aggagaacuugaggucag

SEQ ID NO: 843610 - RNA, 26 nt, Human
aggggacugguucugagaaggggcag

SEQ ID NO: 843611 - RNA, 21 nt, Human
augguccugguuuagaagaug

SEQ ID NO: 843612 - RNA, 24 nt, Human
caacuugccccaccaauucucacu

SEQ ID NO: 843613 - RNA, 20 nt, Human
cacucuggaaacccaccaac

SEQ ID NO: 843614 - RNA, 22 nt, Human
cagaaagaacaggauuuccagc

SEQ ID NO: 843615 - RNA, 19 nt, Human
cagccuuucucaggacaac

SEQ ID NO: 843616 - RNA, 20 nt, Human
caggacaacuugccccacca

SEQ ID NO: 843617 - RNA, 24 nt, Human
cagguccugcuugaagcccaagga

SEQ ID NO: 843618 - RNA, 24 nt, Human
cauuauaccacccguucagaaaga

SEQ ID NO: 843619 - RNA, 22 nt, Human
ccccguggcagcauacgcugcc

SEQ ID NO: 843620 - RNA, 22 nt, Human
cgcggcgccaucuucagucccc

SEQ ID NO: 843621 - RNA, 20 nt, Human
cggugaucaaggaggagaac

SEQ ID NO: 843622 - RNA, 22 nt, Human
cguucagaaagaacaggauuuc

SEQ ID NO: 843623 - RNA, 18 nt, Human
cugcuggcugaaauucug

SEQ ID NO: 843624 - RNA, 20 nt, Human
cuguuggauaugguagcagg

SEQ ID NO: 843625 - RNA, 19 nt, Human
cuugccccucccuauacuu

SEQ ID NO: 843626 - RNA, 19 nt, Human
gaggucagcaggggacugg

SEQ ID NO: 843627 - RNA, 21 nt, Human
gaucaaggaggagaacuugag

SEQ ID NO: 843628 - RNA, 21 nt, Human
gcuaaaguaccagaagcaaua

SEQ ID NO: 843629 - RNA, 24 nt, Human
ggauuggggugagaggcuuucaca

SEQ ID NO: 843630 - RNA, 21 nt, Human
ggcaggaugggaauaaccuug

SEQ ID NO: 843631 - RNA, 20 nt, Human
ggugaucaaggaggagaacu

SEQ ID NO: 843632 - RNA, 21 nt, Human
uaaaguaccagaagcaauaug

SEQ ID NO: 843633 - RNA, 23 nt, Human
uagcaggacaccuuuauacagaa

SEQ ID NO: 843634 - RNA, 24 nt, Human
uaugguagcaggacaccuuuauac

SEQ ID NO: 843635 - RNA, 19 nt, Human
ucacugguguggcuaaagu

SEQ ID NO: 843636 - RNA, 23 nt, Human
ucagccugaugggcugcuggcug

SEQ ID NO: 843637 - RNA, 20 nt, Human
uccccguggcagcauacgcu

SEQ ID NO: 843638 - RNA, 20 nt, Human
ucuccgaggauuggggugag

SEQ ID NO: 843639 - RNA, 22 nt, Human
ucucuugggcugaugguccugg

SEQ ID NO: 843640 - RNA, 21 nt, Human
ucuggccacggugaucaagga

SEQ ID NO: 843641 - RNA, 20 nt, Human
ucuugggcugaugguccugg

SEQ ID NO: 843642 - RNA, 21 nt, Human
ugaguguagaagagucucuug

SEQ ID NO: 843643 - RNA, 19 nt, Human
uggaaacccaccaacauga

SEQ ID NO: 843644 - RNA, 19 nt, Human
uggcucagguccugcuuga

SEQ ID NO: 843645 - RNA, 24 nt, Human
ugggaauaaccuugccccucccua

SEQ ID NO: 843646 - RNA, 22 nt, Human
uguagaagagucucuugggcug

SEQ ID NO: 843647 - RNA, 19 nt, Human
ugucagccugaugggcugc

SEQ ID NO: 843648 - RNA, 21 nt, Human
uguggaacucagucuccgagg

SEQ ID NO: 843649 - RNA, 22 nt, Human
uucucaggacaacuugccccac

SEQ ID NO: 843650 - RNA, 24 nt, Human
uugcuugcccaaaugucugugcug

SEQ ID NO: 843651 - RNA, 21 nt, Human
uuucucaggacaacuugcccc

SEQ ID NO: 843652 - RNA, 24 nt, Human
uuuuuuucuuuuuuuuuuuuccag

SEQ ID NO: 843653 - RNA, 22 nt, Human
uuuuuuuuuuuuuuuucuuuuu

SEQ ID NO: 843654 - RNA, 22 nt, Human
agcgcccccccagcuaccgccc

SEQ ID NO: 843655 - RNA, 18 nt, Human
augcagccccuggguggg

SEQ ID NO: 843656 - RNA, 27 nt, Human
caagccgagccccagggagccucgcaa

SEQ ID NO: 843657 - RNA, 21 nt, Human
caccggggcccccgccaacaa

SEQ ID NO: 843658 - RNA, 18 nt, Human
ccacaugcagccccuggg

SEQ ID NO: 843659 - RNA, 19 nt, Human
ccaccccggcccgcgcccc

SEQ ID NO: 843660 - RNA, 18 nt, Human
ccagggccgcgcuccaug

SEQ ID NO: 843661 - RNA, 20 nt, Human
cccccagcuaccgccccaga

SEQ ID NO: 843662 - RNA, 22 nt, Human
ccccccagcuaccgccccagac

SEQ ID NO: 843663 - RNA, 18 nt, Human
ccccggggccccagggcc

SEQ ID NO: 843664 - RNA, 24 nt, Human
ccccggggccccagggccgcgcuc

SEQ ID NO: 843665 - RNA, 23 nt, Human
ccccugggccgcccggggggucc

SEQ ID NO: 843666 - RNA, 18 nt, Human
cccgccaacaacgccgcc

SEQ ID NO: 843667 - RNA, 20 nt, Human
cccggcccgcgccccggggc

SEQ ID NO: 843668 - RNA, 24 nt, Human
cccggccgcccgcccgugcguccg

SEQ ID NO: 843669 - RNA, 23 nt, Human
cccggggccccagggccgcgcuc

SEQ ID NO: 843670 - RNA, 19 nt, Human
cccugggucggggcggggu

SEQ ID NO: 843671 - RNA, 20 nt, Human
ccgcccaggccgggccucca

SEQ ID NO: 843672 - RNA, 18 nt, Human
ccgcgccccggggcccca

SEQ ID NO: 843673 - RNA, 20 nt, Human
ccgcgccccggggccccagg

SEQ ID NO: 843674 - RNA, 19 nt, Human
ccggcccgcgccccggggc

SEQ ID NO: 843675 - RNA, 21 nt, Human
ccuggcccggcaggggagggg

SEQ ID NO: 843676 - RNA, 21 nt, Human
cgccaacaacgccgcccggcc

SEQ ID NO: 843677 - RNA, 21 nt, Human
cggcaggggaggggugggggu

SEQ ID NO: 843678 - RNA, 24 nt, Human
cggggcgggguccccugggccgcc

SEQ ID NO: 843679 - RNA, 20 nt, Human
cgggggccgccuuauugcug

SEQ ID NO: 843680 - RNA, 23 nt, Human
cgggggccgccuuauugcugagg

SEQ ID NO: 843681 - RNA, 23 nt, Human
cggggugagguccgggggccgcc

SEQ ID NO: 843682 - RNA, 19 nt, Human
cuccauggcucccggccgc

SEQ ID NO: 843683 - RNA, 22 nt, Human
cugagguccggccgguuggggc

SEQ ID NO: 843684 - RNA, 21 nt, Human
gacagcagccccguuaggagg

SEQ ID NO: 843685 - RNA, 18 nt, Human
gaggccagggcccagccc

SEQ ID NO: 843686 - RNA, 21 nt, Human
gaggggugggggugcuccgag

SEQ ID NO: 843687 - RNA, 18 nt, Human
gagguccggccgguuggg

SEQ ID NO: 843688 - RNA, 25 nt, Human
gcccaggccgggccuccaccggggc

SEQ ID NO: 843689 - RNA, 18 nt, Human
gccgagccccagggagcc

SEQ ID NO: 843690 - RNA, 24 nt, Human
gggaagcccaccccggcccgcgcc

SEQ ID NO: 843691 - RNA, 18 nt, Human
ggucggggcggggucccc

SEQ ID NO: 843692 - RNA, 22 nt, Human
gugggggccggcgcggggugag

SEQ ID NO: 843693 - RNA, 18 nt, Human
uccccugggccgcccggg

SEQ ID NO: 843694 - RNA, 18 nt, Human
ugagguccgggggccgcc

SEQ ID NO: 843695 - RNA, 20 nt, Human
uucacguauuuucuucuugc

SEQ ID NO: 843696 - RNA, 23 nt, Human
aaaaacuggaagaccaaguauaa

SEQ ID NO: 843697 - RNA, 21 nt, Human
aaaaguacuaguuucaacaug

SEQ ID NO: 843698 - RNA, 21 nt, Human
aaaguacuaguuucaacaugg

SEQ ID NO: 843699 - RNA, 23 nt, Human
aaauacaagaacuguauaaagca

SEQ ID NO: 843700 - RNA, 20 nt, Human
aacacaaugagacaaaaaca

SEQ ID NO: 843701 - RNA, 22 nt, Human
aagauauagcuggaacagaaca

SEQ ID NO: 843702 - RNA, 23 nt, Human
aaggaucaauuccuuucaaauac

SEQ ID NO: 843703 - RNA, 23 nt, Human
acauguacacacauacaggccua

SEQ ID NO: 843704 - RNA, 26 nt, Human
agacaaaaacacaaaacauaacuugu

SEQ ID NO: 843705 - RNA, 24 nt, Human
agacaagauauagcuggaacagaa

SEQ ID NO: 843706 - RNA, 21 nt, Human
caaaaacuuuuuguucaugcu

SEQ ID NO: 843707 - RNA, 24 nt, Human
caaaacauaacuuguuuccaaagu

SEQ ID NO: 843708 - RNA, 23 nt, Human
caaugagacaaaaacacaaaaca

SEQ ID NO: 843709 - RNA, 24 nt, Human
cacaaugagacaaaaacacaaaac

SEQ ID NO: 843710 - RNA, 18 nt, Human
cacuuugugugugugugu

SEQ ID NO: 843711 - RNA, 20 nt, Human
cauucuuguuccuuaguuuu

SEQ ID NO: 843712 - RNA, 21 nt, Human
ccaaagucacaaaaugacauu

SEQ ID NO: 843713 - RNA, 23 nt, Human
ccacugaaauuaguccuguaagg

SEQ ID NO: 843714 - RNA, 19 nt, Human
cguaucugcaggcuuaagc

SEQ ID NO: 843715 - RNA, 18 nt, Human
cuacuuagccaccaaaaa

SEQ ID NO: 843716 - RNA, 28 nt, Human
cuccacuuugugugugugugugugugug

SEQ ID NO: 843717 - RNA, 25 nt, Human
cuggaacagaacaaaaacuuuuugu

SEQ ID NO: 843718 - RNA, 23 nt, Human
gaacaauauacaccauguuucuu

SEQ ID NO: 843719 - RNA, 19 nt, Human
gcuagauauuuucacugaa

SEQ ID NO: 843720 - RNA, 18 nt, Human
guggucaguaaccaacgc

SEQ ID NO: 843721 - RNA, 18 nt, Human
guguggugggaggguggg

SEQ ID NO: 843722 - RNA, 21 nt, Human
gugugugugugugugugugug

SEQ ID NO: 843723 - RNA, 20 nt, Human
uacaaaaaacuggaagacca

SEQ ID NO: 843724 - RNA, 23 nt, Human
ucuuauggcuagauauuuucacu

SEQ ID NO: 843725 - RNA, 24 nt, Human
ugaaacaguguuagcacuuagaca

SEQ ID NO: 843726 - RNA, 18 nt, Human
ugacaaagaaauaaaaaa

SEQ ID NO: 843727 - RNA, 19 nt, Human
ugagacaaaaacacaaaac

SEQ ID NO: 843728 - RNA, 23 nt, Human
ugcuaucaucuucaaaaaauaua

SEQ ID NO: 843729 - RNA, 23 nt, Human
uggacauguacacacauacagug

SEQ ID NO: 843730 - RNA, 18 nt, Human
uggugggaggguggggug

SEQ ID NO: 843731 - RNA, 19 nt, Human
uggugggaggguggggugg

SEQ ID NO: 843732 - RNA, 22 nt, Human
uguguguguguggugggagggu

SEQ ID NO: 843733 - RNA, 18 nt, Human
ugugugugugugugugug

SEQ ID NO: 843734 - RNA, 18 nt, Human
ugugugugugugugugug

SEQ ID NO: 843735 - RNA, 18 nt, Human
ugugugugugugugugug

SEQ ID NO: 843736 - RNA, 18 nt, Human
ugugugugugugugugug

SEQ ID NO: 843737 - RNA, 18 nt, Human
ugugugugugugugugug

SEQ ID NO: 843738 - RNA, 18 nt, Human
ugugugugugugugugug

SEQ ID NO: 843739 - RNA, 18 nt, Human
ugugugugugugugugug

SEQ ID NO: 843740 - RNA, 18 nt, Human
ugugugugugugugugug

SEQ ID NO: 843741 - RNA, 18 nt, Human
ugugugugugugugugug

SEQ ID NO: 843742 - RNA, 18 nt, Human
ugugugugugugugugug

SEQ ID NO: 843743 - RNA, 18 nt, Human
ugugugugugugugugug

SEQ ID NO: 843744 - RNA, 18 nt, Human
ugugugugugugugugug

SEQ ID NO: 843745 - RNA, 18 nt, Human
ugugugugugugugugug

SEQ ID NO: 843746 - RNA, 18 nt, Human
ugugugugugugugugug

SEQ ID NO: 843747 - RNA, 18 nt, Human
ugugugugugugugugug

SEQ ID NO: 843748 - RNA, 18 nt, Human
ugugugugugugugugug

SEQ ID NO: 843749 - RNA, 20 nt, Human
ugugugugugugugugugug

SEQ ID NO: 843750 - RNA, 22 nt, Human
ugugugugugugugugugugag

SEQ ID NO: 843751 - RNA, 21 nt, Human
ugugugugugugugugugugu

SEQ ID NO: 843752 - RNA, 21 nt, Human
ugugugugugugugugugugu

SEQ ID NO: 843753 - RNA, 21 nt, Human
ugugugugugugugugugugu

SEQ ID NO: 843754 - RNA, 21 nt, Human
ugugugugugugugugugugu

SEQ ID NO: 843755 - RNA, 21 nt, Human
ugugugugugugugugugugu

SEQ ID NO: 843756 - RNA, 21 nt, Human
ugugugugugugugugugugu

SEQ ID NO: 843757 - RNA, 21 nt, Human
ugugugugugugugugugugu

SEQ ID NO: 843758 - RNA, 21 nt, Human
ugugugugugugugugugugu

SEQ ID NO: 843759 - RNA, 21 nt, Human
ugugugugugugugugugugu

SEQ ID NO: 843760 - RNA, 21 nt, Human
ugugugugugugugugugugu

SEQ ID NO: 843761 - RNA, 21 nt, Human
ugugugugugugugugugugu

SEQ ID NO: 843762 - RNA, 21 nt, Human
ugugugugugugugugugugu

SEQ ID NO: 843763 - RNA, 21 nt, Human
ugugugugugugugugugugu

SEQ ID NO: 843764 - RNA, 21 nt, Human
ugugugugugugugugugugu

SEQ ID NO: 843765 - RNA, 21 nt, Human
ugugugugugugugugugugu

SEQ ID NO: 843766 - RNA, 21 nt, Human
ugugugugugugugugugugu

SEQ ID NO: 843767 - RNA, 21 nt, Human
ugugugugugugugugugugu

SEQ ID NO: 843768 - RNA, 21 nt, Human
ugugugugugugugugugugu

SEQ ID NO: 843769 - RNA, 21 nt, Human
ugugugugugugugugugugu

SEQ ID NO: 843770 - RNA, 21 nt, Human
ugugugugugugugugugugu

SEQ ID NO: 843771 - RNA, 21 nt, Human
ugugugugugugugugugugu

SEQ ID NO: 843772 - RNA, 21 nt, Human
ugugugugugugugugugugu

SEQ ID NO: 843773 - RNA, 21 nt, Human
ugugugugugugugugugugu

SEQ ID NO: 843774 - RNA, 21 nt, Human
ugugugugugugugugugugu

SEQ ID NO: 843775 - RNA, 21 nt, Human
ugugugugugugugugugugu

SEQ ID NO: 843776 - RNA, 21 nt, Human
ugugugugugugugugugugu

SEQ ID NO: 843777 - RNA, 21 nt, Human
ugugugugugugugugugugu

SEQ ID NO: 843778 - RNA, 21 nt, Human
ugugugugugugugugugugu

SEQ ID NO: 843779 - RNA, 21 nt, Human
ugugugugugugugugugugu

SEQ ID NO: 843780 - RNA, 21 nt, Human
ugugugugugugugugugugu

SEQ ID NO: 843781 - RNA, 22 nt, Human
ugugugugugugugugugugug

SEQ ID NO: 843782 - RNA, 22 nt, Human
ugugugugugugugugugugug

SEQ ID NO: 843783 - RNA, 22 nt, Human
ugugugugugugugugugugug

SEQ ID NO: 843784 - RNA, 22 nt, Human
ugugugugugugugugugugug

SEQ ID NO: 843785 - RNA, 22 nt, Human
ugugugugugugugugugugug

SEQ ID NO: 843786 - RNA, 22 nt, Human
ugugugugugugugugugugug

SEQ ID NO: 843787 - RNA, 22 nt, Human
ugugugugugugugugugugug

SEQ ID NO: 843788 - RNA, 22 nt, Human
ugugugugugugugugugugug

SEQ ID NO: 843789 - RNA, 22 nt, Human
ugugugugugugugugugugug

SEQ ID NO: 843790 - RNA, 22 nt, Human
ugugugugugugugugugugug

SEQ ID NO: 843791 - RNA, 22 nt, Human
ugugugugugugugugugugug

SEQ ID NO: 843792 - RNA, 22 nt, Human
ugugugugugugugugugugug

SEQ ID NO: 843793 - RNA, 22 nt, Human
ugugugugugugugugugugug

SEQ ID NO: 843794 - RNA, 22 nt, Human
uucagaaaaaaaaauaccugga

SEQ ID NO: 843795 - RNA, 24 nt, Human
uuugugugugugugugugugugug

SEQ ID NO: 843796 - RNA, 21 nt, Human
uuuuaagcauagcaaacuagg

SEQ ID NO: 843797 - RNA, 21 nt, Human
uuuuccagcuuuacuuggaca

SEQ ID NO: 843798 - RNA, 30 nt, Human
uuuuuguuuuuuuuuuuugguuuguuuuuu

SEQ ID NO: 843799 - RNA, 25 nt, Human
aaaaaaaaaaaaaggaaacaaaaaa

SEQ ID NO: 843800 - RNA, 18 nt, Human
aaaaaaaaaaaggaaaca

SEQ ID NO: 843801 - RNA, 21 nt, Human
aaaaaaaaaaaggaaacaaaa

SEQ ID NO: 843802 - RNA, 20 nt, Human
aaaaauucuccuaucacugg

SEQ ID NO: 843803 - RNA, 24 nt, Human
aaaagaaaaagaaaaaaacaagaa

SEQ ID NO: 843804 - RNA, 24 nt, Human
aaacaagaaauaagcuuuauccaa

SEQ ID NO: 843805 - RNA, 26 nt, Human
aaacaagaaauaagcuuuauccaaaa

SEQ ID NO: 843806 - RNA, 21 nt, Human
aaagaaaaaaacaagaaauaa

SEQ ID NO: 843807 - RNA, 23 nt, Human
aaagaaaaaaacaagaaauaagc

SEQ ID NO: 843808 - RNA, 19 nt, Human
aacauggugaaaccccauc

SEQ ID NO: 843809 - RNA, 20 nt, Human
aacauggugaaaccccaucu

SEQ ID NO: 843810 - RNA, 20 nt, Human
aacauggugaaaccccaucu

SEQ ID NO: 843811 - RNA, 21 nt, Human
aacauggugaaaccccaucuc

SEQ ID NO: 843812 - RNA, 24 nt, Human
aagaaacaagaauaggucaggugu

SEQ ID NO: 843813 - RNA, 22 nt, Human
aagcaauucuccugaguagcug

SEQ ID NO: 843814 - RNA, 18 nt, Human
aagcauccugagcacagg

SEQ ID NO: 843815 - RNA, 19 nt, Human
aaggguuuuaggagcucug

SEQ ID NO: 843816 - RNA, 18 nt, Human
aaguccaaagggccuggg

SEQ ID NO: 843817 - RNA, 18 nt, Human
aauuagccaggcauggug

SEQ ID NO: 843818 - RNA, 24 nt, Human
acaaagcaagauccugucucaaaa

SEQ ID NO: 843819 - RNA, 25 nt, Human
acaaggguuuuaggagcucugaaca

SEQ ID NO: 843820 - RNA, 19 nt, Human
acccugaagcucccugaac

SEQ ID NO: 843821 - RNA, 20 nt, Human
acccugaagcucccugaacu

SEQ ID NO: 843822 - RNA, 18 nt, Human
acugcacucuagccugcg

SEQ ID NO: 843823 - RNA, 19 nt, Human
acuggagugcaguggcacg

SEQ ID NO: 843824 - RNA, 23 nt, Human
agaccaaauacuagaacaaaaga

SEQ ID NO: 843825 - RNA, 25 nt, Human
agacugaaaguuugaaacuuccaau

SEQ ID NO: 843826 - RNA, 20 nt, Human
agagcgagacugucucaaaa

SEQ ID NO: 843827 - RNA, 22 nt, Human
agcaaaauucaaaccgcccgcc

SEQ ID NO: 843828 - RNA, 23 nt, Human
agcaaaauucaaaccgcccgccg

SEQ ID NO: 843829 - RNA, 24 nt, Human
agcacuuugggaggcugaggaggg

SEQ ID NO: 843830 - RNA, 22 nt, Human
agccaggcaugguggcgcacgc

SEQ ID NO: 843831 - RNA, 24 nt, Human
agccauucagggggcugagguggg

SEQ ID NO: 843832 - RNA, 22 nt, Human
agccuaggcaacauggugaaac

SEQ ID NO: 843833 - RNA, 24 nt, Human
agccuaggcaacauggugaaaccc

SEQ ID NO: 843834 - RNA, 23 nt, Human
agccuguaaucccagcacuuugg

SEQ ID NO: 843835 - RNA, 24 nt, Human
agccuguaaucccagcacuuuggg

SEQ ID NO: 843836 - RNA, 21 nt, Human
agcugcucccuaaggaccuau

SEQ ID NO: 843837 - RNA, 25 nt, Human
aggaagaucaaauauauauuucuua

SEQ ID NO: 843838 - RNA, 23 nt, Human
aggagcucaagaccagccuaggc

SEQ ID NO: 843839 - RNA, 21 nt, Human
aggcagaguuugcagcgagcc

SEQ ID NO: 843840 - RNA, 24 nt, Human
aggcagaguuugcagcgagccgag

SEQ ID NO: 843841 - RNA, 22 nt, Human
aggcaggaggauggcgugaacc

SEQ ID NO: 843842 - RNA, 24 nt, Human
aggcaggaggauggcgugaaccug

SEQ ID NO: 843843 - RNA, 18 nt, Human
aggcugaggaggguggau

SEQ ID NO: 843844 - RNA, 20 nt, Human
aggcugaggaggguggauug

SEQ ID NO: 843845 - RNA, 19 nt, Human
aggcugcagugagccaugu

SEQ ID NO: 843846 - RNA, 24 nt, Human
aggugggaggaucacuugagccug

SEQ ID NO: 843847 - RNA, 24 nt, Human
aggugugguggcucaagccuguaa

SEQ ID NO: 843848 - RNA, 24 nt, Human
agguugaggcugcagugagccaug

SEQ ID NO: 843849 - RNA, 20 nt, Human
agucuuuuuuucuuuuuuuc

SEQ ID NO: 843850 - RNA, 20 nt, Human
agugcaguggcacgaucucg

SEQ ID NO: 843851 - RNA, 23 nt, Human
agugcaguggcacgaucucggcu

SEQ ID NO: 843852 - RNA, 24 nt, Human
agugcaguggcacgaucucggcuc

SEQ ID NO: 843853 - RNA, 23 nt, Human
auaccgcagucuccguuggaagc

SEQ ID NO: 843854 - RNA, 20 nt, Human
caaaauguuugccaacccug

SEQ ID NO: 843855 - RNA, 18 nt, Human
caacauggugaaacccca

SEQ ID NO: 843856 - RNA, 22 nt, Human
caacauggugaaaccccaucuc

SEQ ID NO: 843857 - RNA, 24 nt, Human
caacauggugaaaccccaucucuc

SEQ ID NO: 843858 - RNA, 23 nt, Human
caaccuccaccucccagguucaa

SEQ ID NO: 843859 - RNA, 26 nt, Human
cacaaaucuccagccccucuccccuc

SEQ ID NO: 843860 - RNA, 20 nt, Human
cacaggacuugcugacuuca

SEQ ID NO: 843861 - RNA, 18 nt, Human
cacauuaucacaucaacu

SEQ ID NO: 843862 - RNA, 23 nt, Human
cacucuagccugcgugacaaagc

SEQ ID NO: 843863 - RNA, 21 nt, Human
cacugcaaccuccaccuccca

SEQ ID NO: 843864 - RNA, 22 nt, Human
cacugcacucuagccugcguga

SEQ ID NO: 843865 - RNA, 24 nt, Human
cacugcacucuagccugcgugaca

SEQ ID NO: 843866 - RNA, 25 nt, Human
cacugcacucuagccugcgugacaa

SEQ ID NO: 843867 - RNA, 18 nt, Human
cagaagcauccugagcac

SEQ ID NO: 843868 - RNA, 25 nt, Human
cagaugauaaacugucuccaaaucc

SEQ ID NO: 843869 - RNA, 23 nt, Human
cagcacuuugggaggcugaggag

SEQ ID NO: 843870 - RNA, 26 nt, Human
cagcacuuugggaggcugaggagggu

SEQ ID NO: 843871 - RNA, 24 nt, Human
cagccccucuccccucucuggagg

SEQ ID NO: 843872 - RNA, 24 nt, Human
caggugcccaucaagagugaccuc

SEQ ID NO: 843873 - RNA, 21 nt, Human
cagugagccauguuugcgcca

SEQ ID NO: 843874 - RNA, 23 nt, Human
cauccugaguuauccaggugccc

SEQ ID NO: 843875 - RNA, 24 nt, Human
caugauguggucuuuguggcguac

SEQ ID NO: 843876 - RNA, 24 nt, Human
ccaaauacuagaacaaaagaugua

SEQ ID NO: 843877 - RNA, 27 nt, Human
ccaccucccagguucaagcaauucuuu

SEQ ID NO: 843878 - RNA, 18 nt, Human
ccacugcacucuagccug

SEQ ID NO: 843879 - RNA, 18 nt, Human
ccacugcacucuagccug

SEQ ID NO: 843880 - RNA, 19 nt, Human
ccacugcacucuagccugc

SEQ ID NO: 843881 - RNA, 24 nt, Human
ccacugcacucuagccugcgugac

SEQ ID NO: 843882 - RNA, 23 nt, Human
cccagguucaagcaauucuccug

SEQ ID NO: 843883 - RNA, 25 nt, Human
cccagucuuuuuuucuuuuuuucug

SEQ ID NO: 843884 - RNA, 24 nt, Human
ccccugggugacaaagcaagaucc

SEQ ID NO: 843885 - RNA, 18 nt, Human
cccgccgcgcccuagcgc

SEQ ID NO: 843886 - RNA, 21 nt, Human
ccgcugcaguccggccugggu

SEQ ID NO: 843887 - RNA, 24 nt, Human
ccuaggcaacauggugaaacccca

SEQ ID NO: 843888 - RNA, 24 nt, Human
ccucccagguucaagcaauucucc

SEQ ID NO: 843889 - RNA, 21 nt, Human
ccugggaggcagaguuugcag

SEQ ID NO: 843890 - RNA, 20 nt, Human
ccuguaaucccagcacuuug

SEQ ID NO: 843891 - RNA, 21 nt, Human
ccugucucaaaaaaaaaaaaa

SEQ ID NO: 843892 - RNA, 22 nt, Human
ccugucucaaaaaaaaaaaaag

SEQ ID NO: 843893 - RNA, 24 nt, Human
cgcucuguugcccagacuggagug

SEQ ID NO: 843894 - RNA, 24 nt, Human
cgcuuguagucccagccauucagg

SEQ ID NO: 843895 - RNA, 24 nt, Human
cucaaaaaaaaaaaaagaaaaaga

SEQ ID NO: 843896 - RNA, 25 nt, Human
cucaaaaaaaaaaaaaggaaacaaa

SEQ ID NO: 843897 - RNA, 22 nt, Human
cucaagaccagccuaggcaaca

SEQ ID NO: 843898 - RNA, 24 nt, Human
cucaagccuguaaucccagcacuu

SEQ ID NO: 843899 - RNA, 24 nt, Human
cucacugcaaccuccaccucccag

SEQ ID NO: 843900 - RNA, 23 nt, Human
cucuguugcccagacuggagugc

SEQ ID NO: 843901 - RNA, 23 nt, Human
cugcaaccuccaccucccagguu

SEQ ID NO: 843902 - RNA, 24 nt, Human
cugcaaccuccaccucccagguuc

SEQ ID NO: 843903 - RNA, 22 nt, Human
cugcaguccggccugggugaaa

SEQ ID NO: 843904 - RNA, 22 nt, Human
cugcagugagccauguuugcgc

SEQ ID NO: 843905 - RNA, 20 nt, Human
cugucucaaaaaaaaaaaaa

SEQ ID NO: 843906 - RNA, 20 nt, Human
cugucucaaaaaaaaaaaaa

SEQ ID NO: 843907 - RNA, 23 nt, Human
cuugagccugggagguugaggcu

SEQ ID NO: 843908 - RNA, 20 nt, Human
gaaccugggaggcagaguuu

SEQ ID NO: 843909 - RNA, 24 nt, Human
gacacaaaucuccagccccucucc

SEQ ID NO: 843910 - RNA, 19 nt, Human
gagcagcccccauccugag

SEQ ID NO: 843911 - RNA, 22 nt, Human
gcaaccuccaccucccagguuc

SEQ ID NO: 843912 - RNA, 23 nt, Human
gcagcgcaggcgcacauccaugc

SEQ ID NO: 843913 - RNA, 24 nt, Human
gccacugcacucuagccugcguga

SEQ ID NO: 843914 - RNA, 20 nt, Human
gcccagacuggagugcagug

SEQ ID NO: 843915 - RNA, 24 nt, Human
gccugggagguugaggcugcagug

SEQ ID NO: 843916 - RNA, 21 nt, Human
ggcucaagccuguaaucccag

SEQ ID NO: 843917 - RNA, 23 nt, Human
ggcugaggugggaggaucacuug

SEQ ID NO: 843918 - RNA, 18 nt, Human
gggaggcugaggagggug

SEQ ID NO: 843919 - RNA, 19 nt, Human
gucucaaaaaaaaaaaaag

SEQ ID NO: 843920 - RNA, 19 nt, Human
gucucaaaaaaaaaaaaag

SEQ ID NO: 843921 - RNA, 19 nt, Human
guggcgcacgcuuguaguc

SEQ ID NO: 843922 - RNA, 23 nt, Human
guggcucaagccuguaaucccag

SEQ ID NO: 843923 - RNA, 21 nt, Human
uaaaugcauuucagguaagcu

SEQ ID NO: 843924 - RNA, 19 nt, Human
uaccuggggcaagguccag

SEQ ID NO: 843925 - RNA, 23 nt, Human
uaccuggggcaagguccagaagc

SEQ ID NO: 843926 - RNA, 24 nt, Human
uacuacaaaggauacagaugaaca

SEQ ID NO: 843927 - RNA, 22 nt, Human
uagccucuauacucuauacccu

SEQ ID NO: 843928 - RNA, 24 nt, Human
uagcugaggcaggaggauggcgug

SEQ ID NO: 843929 - RNA, 20 nt, Human
uaggcaacauggugaaaccc

SEQ ID NO: 843930 - RNA, 22 nt, Human
uaggcaacauggugaaacccca

SEQ ID NO: 843931 - RNA, 21 nt, Human
uaggucaggugugguggcuca

SEQ ID NO: 843932 - RNA, 24 nt, Human
uaggucaggugugguggcucaagc

SEQ ID NO: 843933 - RNA, 21 nt, Human
uaucacugggaaauuuaaagg

SEQ ID NO: 843934 - RNA, 23 nt, Human
uauguucaaaaguucacaaggga

SEQ ID NO: 843935 - RNA, 21 nt, Human
ucaaaaaaaaaaaaagaaaaa

SEQ ID NO: 843936 - RNA, 24 nt, Human
ucaaaaaaaaaaaaagaaaaagaa

SEQ ID NO: 843937 - RNA, 22 nt, Human
ucaaaaaaaaaaaaaggaaaca

SEQ ID NO: 843938 - RNA, 23 nt, Human
ucaaaaaaaaaaaaaggaaacaa

SEQ ID NO: 843939 - RNA, 22 nt, Human
ucaaagaccaaauacuagaaca

SEQ ID NO: 843940 - RNA, 24 nt, Human
ucacugcaaccuccaccucccagg

SEQ ID NO: 843941 - RNA, 25 nt, Human
ucacugcaaccuccaccucccaggu

SEQ ID NO: 843942 - RNA, 27 nt, Human
ucacugcaaccuccaccucccagguuc

SEQ ID NO: 843943 - RNA, 23 nt, Human
ucacuugagccugggagguugag

SEQ ID NO: 843944 - RNA, 23 nt, Human
uccaaagggccuggguauccuaa

SEQ ID NO: 843945 - RNA, 20 nt, Human
uccaauaucacaucuguacc

SEQ ID NO: 843946 - RNA, 21 nt, Human
ucccagguucaagcaauucuc

SEQ ID NO: 843947 - RNA, 24 nt, Human
ucccagguucaagcaauucuccug

SEQ ID NO: 843948 - RNA, 18 nt, Human
ucccugaacuccauaguu

SEQ ID NO: 843949 - RNA, 23 nt, Human
uccggccugggugaaagagcgag

SEQ ID NO: 843950 - RNA, 24 nt, Human
uccggccugggugaaagagcgaga

SEQ ID NO: 843951 - RNA, 22 nt, Human
ucgccgcugggucuccagccgc

SEQ ID NO: 843952 - RNA, 20 nt, Human
ucuccaaaaaauacaaaaau

SEQ ID NO: 843953 - RNA, 22 nt, Human
ucucgcucuguugcccagacug

SEQ ID NO: 843954 - RNA, 24 nt, Human
ucucgcucuguugcccagacugga

SEQ ID NO: 843955 - RNA, 26 nt, Human
ucucgcucuguugcccagacuggagu

SEQ ID NO: 843956 - RNA, 27 nt, Human
ucucgcucuguugcccagacuggagug

SEQ ID NO: 843957 - RNA, 18 nt, Human
ucucuggaggugggagac

SEQ ID NO: 843958 - RNA, 24 nt, Human
ucuguugcccagacuggagugcag

SEQ ID NO: 843959 - RNA, 20 nt, Human
ugacaaagcaagauccuguc

SEQ ID NO: 843960 - RNA, 22 nt, Human
ugacaaagcaagauccugucuc

SEQ ID NO: 843961 - RNA, 20 nt, Human
ugacacaaaucuccagcccc

SEQ ID NO: 843962 - RNA, 22 nt, Human
ugagauggagucucgcucuguu

SEQ ID NO: 843963 - RNA, 22 nt, Human
ugagcagcccccauccugaguu

SEQ ID NO: 843964 - RNA, 24 nt, Human
ugagccugggagguugaggcugca

SEQ ID NO: 843965 - RNA, 22 nt, Human
ugaggaggguggauuguuugag

SEQ ID NO: 843966 - RNA, 24 nt, Human
ugaggcaggaggauggcgugaacc

SEQ ID NO: 843967 - RNA, 25 nt, Human
ugaggcaggaggauggcgugaaccu

SEQ ID NO: 843968 - RNA, 19 nt, Human
ugaggugggaggaucacuu

SEQ ID NO: 843969 - RNA, 20 nt, Human
ugaggugggaggaucacuug

SEQ ID NO: 843970 - RNA, 22 nt, Human
ugaggugggaggaucacuugag

SEQ ID NO: 843971 - RNA, 23 nt, Human
ugaggugggaggaucacuugagc

SEQ ID NO: 843972 - RNA, 24 nt, Human
ugaggugggaggaucacuugagcc

SEQ ID NO: 843973 - RNA, 22 nt, Human
ugcaguggcacgaucucggcuc

SEQ ID NO: 843974 - RNA, 24 nt, Human
ugcccagacuggagugcaguggca

SEQ ID NO: 843975 - RNA, 23 nt, Human
uggagugcaguggcacgaucucg

SEQ ID NO: 843976 - RNA, 24 nt, Human
uggagugcaguggcacgaucucgg

SEQ ID NO: 843977 - RNA, 27 nt, Human
uggauuauugacacaaaucuccagccc

SEQ ID NO: 843978 - RNA, 24 nt, Human
uggauuguuugagcucaggagcuc

SEQ ID NO: 843979 - RNA, 22 nt, Human
uggcucaagccuguaaucccag

SEQ ID NO: 843980 - RNA, 24 nt, Human
uggcucaagccuguaaucccagca

SEQ ID NO: 843981 - RNA, 22 nt, Human
ugggaggcugaggaggguggau

SEQ ID NO: 843982 - RNA, 24 nt, Human
ugggaggcugaggaggguggauug

SEQ ID NO: 843983 - RNA, 24 nt, Human
ugggagguugaggcugcagugagc

SEQ ID NO: 843984 - RNA, 22 nt, Human
uggggcaagguccagaagcauc

SEQ ID NO: 843985 - RNA, 24 nt, Human
ugguggcgcacgcuuguaguccca

SEQ ID NO: 843986 - RNA, 24 nt, Human
ugguggcucaagccuguaauccca

SEQ ID NO: 843987 - RNA, 20 nt, Human
uguagucccagccauucagg

SEQ ID NO: 843988 - RNA, 22 nt, Human
uuacacuuucauuacagguuga

SEQ ID NO: 843989 - RNA, 18 nt, Human
uucagggggcugaggugg

SEQ ID NO: 843990 - RNA, 22 nt, Human
uugcagcgagccgagauagcgc

SEQ ID NO: 843991 - RNA, 22 nt, Human
uugggaggcugaggagggugga

SEQ ID NO: 843992 - RNA, 20 nt, Human
uuucuuuuuuucugagaugg

SEQ ID NO: 843993 - RNA, 24 nt, Human
uuugcagcgagccgagauagcgcc

SEQ ID NO: 843994 - RNA, 24 nt, Human
uuugcgccacugcacucuagccug

SEQ ID NO: 843995 - RNA, 20 nt, Human
uuuuuuuuuuuuuuuguguu

SEQ ID NO: 843996 - RNA, 22 nt, Human
accccgggaccugugacuucac

SEQ ID NO: 843997 - RNA, 22 nt, Human
accgcagcccagaucugcagca

SEQ ID NO: 843998 - RNA, 21 nt, Human
agcccagaucugcagcaggaa

SEQ ID NO: 843999 - RNA, 24 nt, Human
auaggccgagggggagccguggcu

SEQ ID NO: 844000 - RNA, 18 nt, Human
caccccugccugcucugc

SEQ ID NO: 844001 - RNA, 22 nt, Human
caccgcacccuggcgaggccug

SEQ ID NO: 844002 - RNA, 25 nt, Human
cacgggacucacggcccuggccacc

SEQ ID NO: 844003 - RNA, 18 nt, Human
cagaggaucuccuguucc

SEQ ID NO: 844004 - RNA, 19 nt, Human
cagcccagaucugcagcag

SEQ ID NO: 844005 - RNA, 19 nt, Human
cagcucacaggggcgacag

SEQ ID NO: 844006 - RNA, 20 nt, Human
ccagcucagcucacaggggc

SEQ ID NO: 844007 - RNA, 18 nt, Human
cccacguucauggccucc

SEQ ID NO: 844008 - RNA, 19 nt, Human
cccgcagcgcccagaaggc

SEQ ID NO: 844009 - RNA, 22 nt, Human
cccuggcgaggccuggcugcgc

SEQ ID NO: 844010 - RNA, 21 nt, Human
ccguggcugaggcgucuuguu

SEQ ID NO: 844011 - RNA, 19 nt, Human
ccuaaccagcucagcucac

SEQ ID NO: 844012 - RNA, 18 nt, Human
ccugugacuucacccugg

SEQ ID NO: 844013 - RNA, 23 nt, Human
ccuguucccgcagcgcccagaag

SEQ ID NO: 844014 - RNA, 24 nt, Human
cgccaccuucucugucacagucug

SEQ ID NO: 844015 - RNA, 20 nt, Human
cgcccagaaggcucugccac

SEQ ID NO: 844016 - RNA, 20 nt, Human
cgggcccggcccccaccccu

SEQ ID NO: 844017 - RNA, 23 nt, Human
cuccacaccccgggaccugugac

SEQ ID NO: 844018 - RNA, 24 nt, Human
cucugucacagucugugguuccua

SEQ ID NO: 844019 - RNA, 19 nt, Human
cugcacggccugcuccggg

SEQ ID NO: 844020 - RNA, 24 nt, Human
cugccugcucugcucugcaccgca

SEQ ID NO: 844021 - RNA, 24 nt, Human
cugcucugcucugcaccgcacccu

SEQ ID NO: 844022 - RNA, 23 nt, Human
gagugcucggcguagagcuucug

SEQ ID NO: 844023 - RNA, 22 nt, Human
gcaggaaagccggugcggcccu

SEQ ID NO: 844024 - RNA, 18 nt, Human
gcagggagugcucggcgu

SEQ ID NO: 844025 - RNA, 24 nt, Human
gcccagaaggcucugccacgggag

SEQ ID NO: 844026 - RNA, 26 nt, Human
gcccccaccccugccugcucugcucu

SEQ ID NO: 844027 - RNA, 18 nt, Human
ggcccuggccaccgcagc

SEQ ID NO: 844028 - RNA, 21 nt, Human
ggccuggcugcgcacgcgugu

SEQ ID NO: 844029 - RNA, 24 nt, Human
ggggcgacagaggaucuccuguuc

SEQ ID NO: 844030 - RNA, 23 nt, Human
gucacagucugugguuccuaacc

SEQ ID NO: 844031 - RNA, 20 nt, Human
gugggcagcgugcagaaggc

SEQ ID NO: 844032 - RNA, 20 nt, Human
gugggccucuucugggcugg

SEQ ID NO: 844033 - RNA, 18 nt, Human
uagcaucugcacggccug

SEQ ID NO: 844034 - RNA, 19 nt, Human
ucacggcccuggccaccgc

SEQ ID NO: 844035 - RNA, 18 nt, Human
ucugcaccgcacccuggc

SEQ ID NO: 844036 - RNA, 20 nt, Human
ucugcacggccugcuccggg

SEQ ID NO: 844037 - RNA, 20 nt, Human
ucugcucugcaccgcacccu

SEQ ID NO: 844038 - RNA, 20 nt, Human
ugcaccccagcgucucccuc

SEQ ID NO: 844039 - RNA, 18 nt, Human
ugccugcucugcucugca

SEQ ID NO: 844040 - RNA, 23 nt, Human
ugcucugcaccgcacccuggcga

SEQ ID NO: 844041 - RNA, 18 nt, Human
uggcagaaaggagaaagg

SEQ ID NO: 844042 - RNA, 22 nt, Human
uggcagaaaggagaaaggaugg

SEQ ID NO: 844043 - RNA, 25 nt, Human
uggcagaaaggagaaaggauggagc

SEQ ID NO: 844044 - RNA, 23 nt, Human
uucacccugguucgcagaugcac

SEQ ID NO: 844045 - RNA, 21 nt, Human
uuccuaaccagcucagcucac

SEQ ID NO: 844046 - RNA, 28 nt, Human
uucucugucacagucugugguuccuaac

SEQ ID NO: 844047 - RNA, 24 nt, Human
aggggauggguggacagcuggggg

SEQ ID NO: 844048 - RNA, 25 nt, Human
caaagagaacugagggaggagccag

SEQ ID NO: 844049 - RNA, 21 nt, Human
cagcuggggguuuuccaaaga

SEQ ID NO: 844050 - RNA, 23 nt, Human
ccgccgcugguucugcugucuac

SEQ ID NO: 844051 - RNA, 26 nt, Human
cuacuacagucucugcuuaggggccu

SEQ ID NO: 844052 - RNA, 22 nt, Human
cugccgucgucgcugucgccgc

SEQ ID NO: 844053 - RNA, 25 nt, Human
cuggggguuuuccaaagagaacuga

SEQ ID NO: 844054 - RNA, 20 nt, Human
gcaggggauggguggacagc

SEQ ID NO: 844055 - RNA, 27 nt, Human
gccgccgccgcugguucugcugucuac

SEQ ID NO: 844056 - RNA, 19 nt, Human
ggggauggguggacagcug

SEQ ID NO: 844057 - RNA, 21 nt, Human
ggggauggguggacagcuggg

SEQ ID NO: 844058 - RNA, 24 nt, Human
gguuuuggggcaggggaugggugg

SEQ ID NO: 844059 - RNA, 24 nt, Human
guaaauuuauugaaacugguuuug

SEQ ID NO: 844060 - RNA, 23 nt, Human
uagccgccgccgcugguucugcu

SEQ ID NO: 844061 - RNA, 20 nt, Human
ucgucgcugucgccgcuacc

SEQ ID NO: 844062 - RNA, 20 nt, Human
ugcuuagccgccgccgcugg

SEQ ID NO: 844063 - RNA, 21 nt, Human
uggggcaggggauggguggac

SEQ ID NO: 844064 - RNA, 20 nt, Human
uuuuuuggaaaugaacguaa

SEQ ID NO: 844065 - RNA, 23 nt, Human
uuuuuuuuuuuuuuuuuggaaau

SEQ ID NO: 844066 - RNA, 23 nt, Human
uuuuuuuuuuuuuuuuuuuuggg

SEQ ID NO: 844067 - RNA, 23 nt, Human
aaggcgcggucuggggaggaugc

SEQ ID NO: 844068 - RNA, 20 nt, Human
acaaacacccucaccaggac

SEQ ID NO: 844069 - RNA, 22 nt, Human
acaaacacccucaccaggacca

SEQ ID NO: 844070 - RNA, 21 nt, Human
acaaggcacaaacacccucac

SEQ ID NO: 844071 - RNA, 23 nt, Human
caaacacccucaccaggaccaaa

SEQ ID NO: 844072 - RNA, 23 nt, Human
caaauaaauaacuccacgguugc

SEQ ID NO: 844073 - RNA, 24 nt, Human
cacaaacacccucaccaggaccaa

SEQ ID NO: 844074 - RNA, 22 nt, Human
caccaggaccaaauaaauaacu

SEQ ID NO: 844075 - RNA, 27 nt, Human
cacccucaccaggaccaaauaaauaac

SEQ ID NO: 844076 - RNA, 21 nt, Human
cacugcacuguccugaccucu

SEQ ID NO: 844077 - RNA, 21 nt, Human
cccucaccaggaccaaauaaa

SEQ ID NO: 844078 - RNA, 24 nt, Human
cgccaggcauaggaggcauccaaa

SEQ ID NO: 844079 - RNA, 19 nt, Human
cugugaggggccuccuggg

SEQ ID NO: 844080 - RNA, 19 nt, Human
gaagaugucgugggccgug

SEQ ID NO: 844081 - RNA, 23 nt, Human
gcacaaacacccucaccaggacc

SEQ ID NO: 844082 - RNA, 19 nt, Human
gcccuccucccgacccucg

SEQ ID NO: 844083 - RNA, 23 nt, Human
gccucuagagcggguccagucuc

SEQ ID NO: 844084 - RNA, 23 nt, Human
gguugcaggaaggcgcggucugg

SEQ ID NO: 844085 - RNA, 21 nt, Human
gucucacaaggcacaaacacc

SEQ ID NO: 844086 - RNA, 22 nt, Human
guggagccuggcagagggucca

SEQ ID NO: 844087 - RNA, 22 nt, Human
gugggccgugugguggugccag

SEQ ID NO: 844088 - RNA, 21 nt, Human
uccacaggcuucccugcgaag

SEQ ID NO: 844089 - RNA, 18 nt, Human
uccacgguugcaggaagg

SEQ ID NO: 844090 - RNA, 18 nt, Human
ucccagggcuggugggcg

SEQ ID NO: 844091 - RNA, 21 nt, Human
ucccagggcuggugggcgagc

SEQ ID NO: 844092 - RNA, 21 nt, Human
uccuggguguguccgggccuc

SEQ ID NO: 844093 - RNA, 23 nt, Human
uccuggguguguccgggccucua

SEQ ID NO: 844094 - RNA, 22 nt, Human
ucucacaaggcacaaacacccu

SEQ ID NO: 844095 - RNA, 21 nt, Human
ucugcagucugugaggggccu

SEQ ID NO: 844096 - RNA, 22 nt, Human
ucugcagucugugaggggccuc

SEQ ID NO: 844097 - RNA, 20 nt, Human
ugcgaagaugucgugggccg

SEQ ID NO: 844098 - RNA, 22 nt, Human
ugcgaagaugucgugggccgug

SEQ ID NO: 844099 - RNA, 19 nt, Human
uggcagaggguccacaggc

SEQ ID NO: 844100 - RNA, 18 nt, Human
uggugccagcucagacaa

SEQ ID NO: 844101 - RNA, 18 nt, Human
uguacggagucucacaag

SEQ ID NO: 844102 - RNA, 18 nt, Human
ugugaggggccuccuggg

SEQ ID NO: 844103 - RNA, 23 nt, Human
uuuuuuuuuuuugaagaagagac

SEQ ID NO: 844104 - RNA, 18 nt, Human
uuuuuuuuuuuuuuuuug

SEQ ID NO: 844105 - RNA, 18 nt, Human
aacugagccucacaaggu

SEQ ID NO: 844106 - RNA, 19 nt, Human
aagguccgcccccgccccc

SEQ ID NO: 844107 - RNA, 18 nt, Human
aggagcagugcccucggc

SEQ ID NO: 844108 - RNA, 18 nt, Human
cacagagccggguguggg

SEQ ID NO: 844109 - RNA, 21 nt, Human
cccgcggccgguggcaguggg

SEQ ID NO: 844110 - RNA, 21 nt, Human
ccggcggugcaacgcaccgag

SEQ ID NO: 844111 - RNA, 18 nt, Human
ccucggccgagccagucc

SEQ ID NO: 844112 - RNA, 18 nt, Human
ccugcgccugccgggugg

SEQ ID NO: 844113 - RNA, 19 nt, Human
cgcucggccgccgcggggc

SEQ ID NO: 844114 - RNA, 24 nt, Human
cggugcaacgcaccgaggcgcuuc

SEQ ID NO: 844115 - RNA, 20 nt, Human
cucacaagguccgcccccgc

SEQ ID NO: 844116 - RNA, 21 nt, Human
cuggcggcugcgggcugcggc

SEQ ID NO: 844117 - RNA, 23 nt, Human
gagccagucccagccagucccgc

SEQ ID NO: 844118 - RNA, 24 nt, Human
gagcgcgcucggccgccgcggggc

SEQ ID NO: 844119 - RNA, 18 nt, Human
gcgagcgcgcucggccgc

SEQ ID NO: 844120 - RNA, 19 nt, Human
gcgggcgagggucggccgu

SEQ ID NO: 844121 - RNA, 20 nt, Human
ggaggcuggcggcugcgggc

SEQ ID NO: 844122 - RNA, 21 nt, Human
guaaagaaggccagagggccc

SEQ ID NO: 844123 - RNA, 19 nt, Human
gugggcgccgacggacagc

SEQ ID NO: 844124 - RNA, 23 nt, Human
guuuucagguugcaaguaacggg

SEQ ID NO: 844125 - RNA, 24 nt, Human
uaacgggucaacugagccucacaa

SEQ ID NO: 844126 - RNA, 19 nt, Human
ucagguugcaaguaacggg

SEQ ID NO: 844127 - RNA, 19 nt, Human
uccagcgccgagcagcgcu

SEQ ID NO: 844128 - RNA, 22 nt, Human
ugcaaugcugcggggggcagcc

SEQ ID NO: 844129 - RNA, 21 nt, Human
ugccgccgggcagugggcgcc

SEQ ID NO: 844130 - RNA, 18 nt, Human
ugggcgccgacggacagc

SEQ ID NO: 844131 - RNA, 21 nt, Human
ugguagaugggggugcugggg

SEQ ID NO: 844132 - RNA, 19 nt, Human
uuuuuuuuuuuuuuuuuaa

SEQ ID NO: 844133 - RNA, 19 nt, Human
acagugcaugcaauaaaau

SEQ ID NO: 844134 - RNA, 18 nt, Human
acgagauccaagccagcc

SEQ ID NO: 844135 - RNA, 25 nt, Human
acgcuacagaacgagggggacagac

SEQ ID NO: 844136 - RNA, 22 nt, Human
aggggcucugaggguccagagc

SEQ ID NO: 844137 - RNA, 26 nt, Human
agggggacagacacgcgugggguaag

SEQ ID NO: 844138 - RNA, 27 nt, Human
cacagugcaugcaauaaaauauauaua

SEQ ID NO: 844139 - RNA, 23 nt, Human
cacugggaccaggagagcagaac

SEQ ID NO: 844140 - RNA, 20 nt, Human
ccacggggagcagagggagc

SEQ ID NO: 844141 - RNA, 20 nt, Human
ccagaucgcaggaggugcgg

SEQ ID NO: 844142 - RNA, 19 nt, Human
ccaguggcgcucccuggcg

SEQ ID NO: 844143 - RNA, 18 nt, Human
cccacggggagcagaggg

SEQ ID NO: 844144 - RNA, 24 nt, Human
cccuucggguggcgggaagccagu

SEQ ID NO: 844145 - RNA, 24 nt, Human
ccgccggggugggcuggccuggga

SEQ ID NO: 844146 - RNA, 21 nt, Human
ccugggaguggggggcgcucc

SEQ ID NO: 844147 - RNA, 23 nt, Human
ccugggcgcgcggggcccggucc

SEQ ID NO: 844148 - RNA, 24 nt, Human
cgcgugggguaagaagggccuggu

SEQ ID NO: 844149 - RNA, 19 nt, Human
cgucccccuucuguucucc

SEQ ID NO: 844150 - RNA, 22 nt, Human
cgucccccuucuguucuccccc

SEQ ID NO: 844151 - RNA, 19 nt, Human
gagcggcccacggggagca

SEQ ID NO: 844152 - RNA, 23 nt, Human
gccucgccugggcgcgcggggcc

SEQ ID NO: 844153 - RNA, 19 nt, Human
gcggccaggccgggcugga

SEQ ID NO: 844154 - RNA, 22 nt, Human
gcgugggguaagaagggccugg

SEQ ID NO: 844155 - RNA, 25 nt, Human
gggaagccaguggcgcucccuggcg

SEQ ID NO: 844156 - RNA, 21 nt, Human
gggcuggagccacaugcgucg

SEQ ID NO: 844157 - RNA, 23 nt, Human
uaaaaacgagauccaagccagcc

SEQ ID NO: 844158 - RNA, 24 nt, Human
ugaggguccagagcucccuucggg

SEQ ID NO: 844159 - RNA, 18 nt, Human
uggccugggagugggggg

SEQ ID NO: 844160 - RNA, 20 nt, Human
uggcggccaggccgggcugg

SEQ ID NO: 844161 - RNA, 21 nt, Human
uggcggccaggccgggcugga

SEQ ID NO: 844162 - RNA, 21 nt, Human
uguacaaacgcuacagaacga

SEQ ID NO: 844163 - RNA, 24 nt, Human
uuauuauguacaaacgcuacagaa

SEQ ID NO: 844164 - RNA, 19 nt, Human
uuuuuuuuuuuuuuugucu

SEQ ID NO: 844165 - RNA, 18 nt, Human
uuuuuuuuuuuuuuuuug

SEQ ID NO: 844166 - RNA, 19 nt, Human
uuuuuuuuuuuuuuuuugu

SEQ ID NO: 844167 - RNA, 24 nt, Human
agggcagagucaggugccgggggc

SEQ ID NO: 844168 - RNA, 22 nt, Human
augugaugcaacuauuuggccu

SEQ ID NO: 844169 - RNA, 21 nt, Human
caggaagugcucagcuggacu

SEQ ID NO: 844170 - RNA, 19 nt, Human
gaaaacaucguguggauaa

SEQ ID NO: 844171 - RNA, 20 nt, Human
gagggcagugagcaggagcu

SEQ ID NO: 844172 - RNA, 20 nt, Human
gcaggaagugcucagcugga

SEQ ID NO: 844173 - RNA, 21 nt, Human
gcaggaagugcucagcuggac

SEQ ID NO: 844174 - RNA, 22 nt, Human
ugagggcagugagcaggagcug

SEQ ID NO: 844175 - RNA, 24 nt, Human
uucugagggcagugagcaggagcu

SEQ ID NO: 844176 - RNA, 21 nt, Human
uuuuuuuuuuuuuuuuuuaag

SEQ ID NO: 844177 - RNA, 24 nt, Human
auuuuucucggcaccgcucccgau

SEQ ID NO: 844178 - RNA, 19 nt, Human
ccuggucugguuccgcggg

SEQ ID NO: 844179 - RNA, 20 nt, Human
gcagucgggcggcccucgug

SEQ ID NO: 844180 - RNA, 22 nt, Human
uggcagucgggcggcccucgug

SEQ ID NO: 844181 - RNA, 22 nt, Human
uuccgcgggcgcggccgggccg

SEQ ID NO: 844182 - RNA, 20 nt, Human
uuucucggcaccgcucccga

SEQ ID NO: 844183 - RNA, 19 nt, Human
aacccggaagcuaccggcu

SEQ ID NO: 844184 - RNA, 21 nt, Human
acacugggucugucuccuuuu

SEQ ID NO: 844185 - RNA, 19 nt, Human
acccggaagcuaccggcua

SEQ ID NO: 844186 - RNA, 18 nt, Human
aggaaacccggaagcuac

SEQ ID NO: 844187 - RNA, 21 nt, Human
auggggugugagaaacccauc

SEQ ID NO: 844188 - RNA, 18 nt, Human
cacugccaggcccguggg

SEQ ID NO: 844189 - RNA, 22 nt, Human
cagcaccagccugagaagggag

SEQ ID NO: 844190 - RNA, 20 nt, Human
ccacaccucucacugccagg

SEQ ID NO: 844191 - RNA, 22 nt, Human
ccagccuucaggacuggagucc

SEQ ID NO: 844192 - RNA, 21 nt, Human
ccagggcuucccccauccccu

SEQ ID NO: 844193 - RNA, 20 nt, Human
cuaggaugggaaaggaggua

SEQ ID NO: 844194 - RNA, 19 nt, Human
cuuugggggacacuggguc

SEQ ID NO: 844195 - RNA, 23 nt, Human
gaggaggagacagaagcaugugc

SEQ ID NO: 844196 - RNA, 20 nt, Human
gaggaggaggagacagaagc

SEQ ID NO: 844197 - RNA, 22 nt, Human
gagucacagauccagucuuugg

SEQ ID NO: 844198 - RNA, 25 nt, Human
gcaugugcugcaggcgcaugugugu

SEQ ID NO: 844199 - RNA, 18 nt, Human
gcugccugcagccagggc

SEQ ID NO: 844200 - RNA, 20 nt, Human
gcuucagccucacccuaucc

SEQ ID NO: 844201 - RNA, 18 nt, Human
ggaaggcugccugcagcc

SEQ ID NO: 844202 - RNA, 18 nt, Human
ggaggagacagaagcaug

SEQ ID NO: 844203 - RNA, 25 nt, Human
ggagucacagauccagucuuugggg

SEQ ID NO: 844204 - RNA, 20 nt, Human
gggaggaggaggagacagaa

SEQ ID NO: 844205 - RNA, 25 nt, Human
gggggacacugggucugucuccuuu

SEQ ID NO: 844206 - RNA, 22 nt, Human
uagcccaggaaacccggaagcu

SEQ ID NO: 844207 - RNA, 18 nt, Human
uaggaaggauccagcacc

SEQ ID NO: 844208 - RNA, 24 nt, Human
uaggaaggauccagcaccagccug

SEQ ID NO: 844209 - RNA, 21 nt, Human
uaucauaaaucgguguggggc

SEQ ID NO: 844210 - RNA, 18 nt, Human
uauguacuuacaugugug

SEQ ID NO: 844211 - RNA, 26 nt, Human
uauguacuuacaugugugaacacaua

SEQ ID NO: 844212 - RNA, 18 nt, Human
ucaaggacagucuaggau

SEQ ID NO: 844213 - RNA, 18 nt, Human
uccaagggacagacauau

SEQ ID NO: 844214 - RNA, 25 nt, Human
uccuuuugaaagcccuggaaaggug

SEQ ID NO: 844215 - RNA, 18 nt, Human
ugaaagcccuggaaaggu

SEQ ID NO: 844216 - RNA, 24 nt, Human
uggggccacaccucucacugccag

SEQ ID NO: 844217 - RNA, 21 nt, Human
ugguggagucacagauccagu

SEQ ID NO: 844218 - RNA, 18 nt, Human
ugugagaaacccaucccc

SEQ ID NO: 844219 - RNA, 22 nt, Human
uguguauguacuuacaugugug

SEQ ID NO: 844220 - RNA, 18 nt, Human
uguguguauguacuuaca

SEQ ID NO: 844221 - RNA, 18 nt, Human
uuuuuuuuuuuuuuuuug

SEQ ID NO: 844222 - RNA, 25 nt, Human
uuuuuuuuuuuuuuuuuuuuuuggg

SEQ ID NO: 844223 - RNA, 22 nt, Human
aagccacacccgggacugaggc

SEQ ID NO: 844224 - RNA, 20 nt, Human
acacugccucugcccuccuc

SEQ ID NO: 844225 - RNA, 22 nt, Human
acugccucugcccuccuccaag

SEQ ID NO: 844226 - RNA, 22 nt, Human
agaaggccaaagcacaucauca

SEQ ID NO: 844227 - RNA, 19 nt, Human
aggcccuccucccccaucc

SEQ ID NO: 844228 - RNA, 18 nt, Human
auccagccggcaauccua

SEQ ID NO: 844229 - RNA, 24 nt, Human
caaaucuuaggcuuuugagucaca

SEQ ID NO: 844230 - RNA, 24 nt, Human
caggacagucccgagaaggccaaa

SEQ ID NO: 844231 - RNA, 21 nt, Human
cagggacagugcccggaggag

SEQ ID NO: 844232 - RNA, 25 nt, Human
cccacacugccucugcccuccucca

SEQ ID NO: 844233 - RNA, 18 nt, Human
cccgggacugaggccagg

SEQ ID NO: 844234 - RNA, 22 nt, Human
cccgggacugaggccaggcccu

SEQ ID NO: 844235 - RNA, 21 nt, Human
cccuaccacggaccccagggg

SEQ ID NO: 844236 - RNA, 22 nt, Human
cccuaccacggaccccaggggc

SEQ ID NO: 844237 - RNA, 21 nt, Human
cccuccucccccauccugucc

SEQ ID NO: 844238 - RNA, 23 nt, Human
ccuaccacggaccccaggggcug

SEQ ID NO: 844239 - RNA, 18 nt, Human
ccucaggggagggagggg

SEQ ID NO: 844240 - RNA, 18 nt, Human
ccuccuggcacccccugg

SEQ ID NO: 844241 - RNA, 22 nt, Human
ccuccuggcacccccuggcuau

SEQ ID NO: 844242 - RNA, 23 nt, Human
ccuggcuauucagucagcccugc

SEQ ID NO: 844243 - RNA, 23 nt, Human
cggggugagcccaucacuguagc

SEQ ID NO: 844244 - RNA, 19 nt, Human
cugccucugcccuccucca

SEQ ID NO: 844245 - RNA, 18 nt, Human
cuguccugccucaccugu

SEQ ID NO: 844246 - RNA, 23 nt, Human
gagaaggccaaagcacaucauca

SEQ ID NO: 844247 - RNA, 22 nt, Human
gccaaagcacaucaucagccca

SEQ ID NO: 844248 - RNA, 22 nt, Human
gcccacacugccucugcccucc

SEQ ID NO: 844249 - RNA, 21 nt, Human
gcccuccuccaaggccccucc

SEQ ID NO: 844250 - RNA, 19 nt, Human
ggcccggaguagcccccaa

SEQ ID NO: 844251 - RNA, 20 nt, Human
gggagggaggggcccuacca

SEQ ID NO: 844252 - RNA, 21 nt, Human
ggugacaggacagucccgaga

SEQ ID NO: 844253 - RNA, 25 nt, Human
ucaaagccacacccgggacugaggc

SEQ ID NO: 844254 - RNA, 23 nt, Human
ucaccuguccucaggggagggag

SEQ ID NO: 844255 - RNA, 20 nt, Human
uccugccucaccuguccuca

SEQ ID NO: 844256 - RNA, 21 nt, Human
ucuuaggcuuuugagucacau

SEQ ID NO: 844257 - RNA, 18 nt, Human
ucuuuuuuuuuuuuuuuu

SEQ ID NO: 844258 - RNA, 23 nt, Human
uggcggggugagcccaucacugu

SEQ ID NO: 844259 - RNA, 23 nt, Human
uggcuauucagucagcccugccu

SEQ ID NO: 844260 - RNA, 21 nt, Human
uguccugccucaccuguccuc

SEQ ID NO: 844261 - RNA, 18 nt, Human
uuuuuuuuuuuuuuuuug

SEQ ID NO: 844262 - RNA, 19 nt, Human
uuuuuuuuuuuuuuuuugu

SEQ ID NO: 844263 - RNA, 27 nt, Human
uuuuuuuuuuuuuuuuuuguaucaggg

SEQ ID NO: 844264 - RNA, 25 nt, Human
uuuuuuuuuuuuuuuuuuucuuuuu

SEQ ID NO: 844265 - RNA, 19 nt, Human
aaucuguauauucuucccu

SEQ ID NO: 844266 - RNA, 21 nt, Human
accgacaggcaccgcgcgagc

SEQ ID NO: 844267 - RNA, 28 nt, Human
agaaacaaggaaggggaagccgguaccc

SEQ ID NO: 844268 - RNA, 19 nt, Human
aggaagaaaaaagccucuu

SEQ ID NO: 844269 - RNA, 18 nt, Human
aggcgcuggcgacccgcc

SEQ ID NO: 844270 - RNA, 20 nt, Human
aguguaggugacgcgggcug

SEQ ID NO: 844271 - RNA, 19 nt, Human
aucccauuuuccuucucac

SEQ ID NO: 844272 - RNA, 19 nt, Human
cagaguagaggccacacag

SEQ ID NO: 844273 - RNA, 21 nt, Human
cauuuuccuucucacuggggg

SEQ ID NO: 844274 - RNA, 23 nt, Human
ccccgccgccccgcacgcgacua

SEQ ID NO: 844275 - RNA, 20 nt, Human
ccccgccgccccgccgcccc

SEQ ID NO: 844276 - RNA, 27 nt, Human
cccgcacgcgacuaccgacaggcaccg

SEQ ID NO: 844277 - RNA, 30 nt, Human
cccgcacgcgacuaccgacaggcaccgcgg

SEQ ID NO: 844278 - RNA, 20 nt, Human
cccucugacuguguggcucc

SEQ ID NO: 844279 - RNA, 21 nt, Human
cccucuguuuuaaaaagaagg

SEQ ID NO: 844280 - RNA, 22 nt, Human
ccgccccgccgccccgccgccc

SEQ ID NO: 844281 - RNA, 18 nt, Human
ccgccgccggccgccccg

SEQ ID NO: 844282 - RNA, 21 nt, Human
ccgccggccgccccgccgccc

SEQ ID NO: 844283 - RNA, 18 nt, Human
cucugcuuuagaauaacc

SEQ ID NO: 844284 - RNA, 22 nt, Human
cucugcuuuagaauaaccuggg

SEQ ID NO: 844285 - RNA, 23 nt, Human
cugaaacagugucccagacuuau

SEQ ID NO: 844286 - RNA, 19 nt, Human
cugcuuuagaauaaccugg

SEQ ID NO: 844287 - RNA, 20 nt, Human
cuuacaucccccucugacug

SEQ ID NO: 844288 - RNA, 19 nt, Human
gacuuaucccauuuuccuu

SEQ ID NO: 844289 - RNA, 21 nt, Human
ggccuggggcacaaugggugg

SEQ ID NO: 844290 - RNA, 19 nt, Human
gguggagcugcgcaauggg

SEQ ID NO: 844291 - RNA, 21 nt, Human
gucugugcaucugggcugagc

SEQ ID NO: 844292 - RNA, 20 nt, Human
uagaacacacucaauucucc

SEQ ID NO: 844293 - RNA, 18 nt, Human
uaucccauuuuccuucuc

SEQ ID NO: 844294 - RNA, 23 nt, Human
uaucccauuuuccuucucacugg

SEQ ID NO: 844295 - RNA, 25 nt, Human
uaucccauuuuccuucucacugggg

SEQ ID NO: 844296 - RNA, 22 nt, Human
ucccagacuuaucccauuuucc

SEQ ID NO: 844297 - RNA, 18 nt, Human
ucccaggcacagcugccc

SEQ ID NO: 844298 - RNA, 21 nt, Human
uccugucccaggcacagcugc

SEQ ID NO: 844299 - RNA, 24 nt, Human
ucugcuuuagaauaaccugggggu

SEQ ID NO: 844300 - RNA, 25 nt, Human
ucuguagauggcuuaaauaacucuu

SEQ ID NO: 844301 - RNA, 21 nt, Human
ugacuguguggcuccuguccc

SEQ ID NO: 844302 - RNA, 21 nt, Human
ugccuucacuuagaacacacu

SEQ ID NO: 844303 - RNA, 19 nt, Human
uggcagggcacagaaggaa

SEQ ID NO: 844304 - RNA, 20 nt, Human
uguauauucuucccucuguu

SEQ ID NO: 844305 - RNA, 23 nt, Human
ugugaugacagaggagggucaac

SEQ ID NO: 844306 - RNA, 18 nt, Human
uguucagaguagaggcca

SEQ ID NO: 844307 - RNA, 19 nt, Human
uguuuuaaaaagaaggaga

SEQ ID NO: 844308 - RNA, 26 nt, Human
uucccucuguuuuaaaaagaaggagc

SEQ ID NO: 844309 - RNA, 22 nt, Human
uuccucagcucuguagauggcu

SEQ ID NO: 844310 - RNA, 18 nt, Human
uuugucagagaagguggc

SEQ ID NO: 844311 - RNA, 23 nt, Human
uuuuuuuuuuuuuuuuuuuaagg

SEQ ID NO: 844312 - RNA, 23 nt, Human
aaaaaacaaaaacaaaaacugaa

SEQ ID NO: 844313 - RNA, 21 nt, Human
aaaacaaaaacaaaaacugaa

SEQ ID NO: 844314 - RNA, 28 nt, Human
aaaacaaaaacaaaaacugaaagcugga

SEQ ID NO: 844315 - RNA, 19 nt, Human
aaacaaaaacaaaaacuga

SEQ ID NO: 844316 - RNA, 25 nt, Human
aaacaaaaacaaaaacugaaagcug

SEQ ID NO: 844317 - RNA, 27 nt, Human
aaacaaaaacaaaaacugaaagcugga

SEQ ID NO: 844318 - RNA, 26 nt, Human
aaauaaugguuaaaaaacaaaaacaa

SEQ ID NO: 844319 - RNA, 18 nt, Human
aacugaauacuucuucca

SEQ ID NO: 844320 - RNA, 23 nt, Human
aaggaaacugaauacuucuucca

SEQ ID NO: 844321 - RNA, 22 nt, Human
agaaaaacuugcaggauaacca

SEQ ID NO: 844322 - RNA, 20 nt, Human
agaaaggaaaaggaaacuga

SEQ ID NO: 844323 - RNA, 22 nt, Human
agagcagacagacuaagccagg

SEQ ID NO: 844324 - RNA, 19 nt, Human
aggaaagaggaggaagagg

SEQ ID NO: 844325 - RNA, 20 nt, Human
aggaaagaggaggaagaggg

SEQ ID NO: 844326 - RNA, 25 nt, Human
aggaggaagagggcaugaggucuga

SEQ ID NO: 844327 - RNA, 21 nt, Human
aggauaaccacacccaacaga

SEQ ID NO: 844328 - RNA, 18 nt, Human
agggaaccgguuggacug

SEQ ID NO: 844329 - RNA, 18 nt, Human
agggaggggggaauagua

SEQ ID NO: 844330 - RNA, 23 nt, Human
agggaggggggaauaguauaaag

SEQ ID NO: 844331 - RNA, 24 nt, Human
agggaggggggaauaguauaaagg

SEQ ID NO: 844332 - RNA, 21 nt, Human
cagaggacuacuacaaacaga

SEQ ID NO: 844333 - RNA, 22 nt, Human
cagcagaugcugcagagcagac

SEQ ID NO: 844334 - RNA, 27 nt, Human
cagcguagugugaguaggagggccccc

SEQ ID NO: 844335 - RNA, 18 nt, Human
caguggcucuugugucca

SEQ ID NO: 844336 - RNA, 24 nt, Human
ccagguauuccuucaugaucccag

SEQ ID NO: 844337 - RNA, 22 nt, Human
cccacagcagaugcugcagagc

SEQ ID NO: 844338 - RNA, 20 nt, Human
cccuccuccucaaaaaaaag

SEQ ID NO: 844339 - RNA, 22 nt, Human
cgaccuuaaggggcacuguuug

SEQ ID NO: 844340 - RNA, 20 nt, Human
cgccgaccuuaaggggcacu

SEQ ID NO: 844341 - RNA, 18 nt, Human
cuuaaaaucuccaaguuc

SEQ ID NO: 844342 - RNA, 24 nt, Human
cuuggcuguugugcaguggcucuu

SEQ ID NO: 844343 - RNA, 21 nt, Human
gaaggugaugcccuccuccuc

SEQ ID NO: 844344 - RNA, 18 nt, Human
gaggaagagggcaugagg

SEQ ID NO: 844345 - RNA, 18 nt, Human
gcaggucucaaaguuccu

SEQ ID NO: 844346 - RNA, 22 nt, Human
gcugcagagcagacagacuaag

SEQ ID NO: 844347 - RNA, 23 nt, Human
ggaggggggaauaguauaaagga

SEQ ID NO: 844348 - RNA, 26 nt, Human
gggaggggggaauaguauaaaggagg

SEQ ID NO: 844349 - RNA, 19 nt, Human
gggggaauaguauaaagga

SEQ ID NO: 844350 - RNA, 20 nt, Human
ggggggaauaguauaaagga

SEQ ID NO: 844351 - RNA, 24 nt, Human
guaaauaaugguuaaaaaacaaaa

SEQ ID NO: 844352 - RNA, 22 nt, Human
guuaccagagaaaggaaaagga

SEQ ID NO: 844353 - RNA, 23 nt, Human
uaaaaaacaaaaacaaaaacuga

SEQ ID NO: 844354 - RNA, 22 nt, Human
uccucaaaaaaaagggaggggg

SEQ ID NO: 844355 - RNA, 19 nt, Human
uccucaaggaugaaaacuc

SEQ ID NO: 844356 - RNA, 20 nt, Human
ugagacaugaggaccugaaa

SEQ ID NO: 844357 - RNA, 21 nt, Human
ugccucaggaaucgaguccag

SEQ ID NO: 844358 - RNA, 20 nt, Human
uggcuguugugcaguggcuc

SEQ ID NO: 844359 - RNA, 21 nt, Human
uguccuuuucuuaaaaucucc

SEQ ID NO: 844360 - RNA, 23 nt, Human
uucaugguccugacuacuucacc

SEQ ID NO: 844361 - RNA, 22 nt, Human
uuuuuuuuuuuuagagauucca

SEQ ID NO: 844362 - RNA, 21 nt, Human
aaacaaaggcugcaggcucca

SEQ ID NO: 844363 - RNA, 24 nt, Human
aaugagccccuaccccagccaccc

SEQ ID NO: 844364 - RNA, 20 nt, Human
agccccuaccccagccaccc

SEQ ID NO: 844365 - RNA, 24 nt, Human
agcggugaccgauccagaccaggu

SEQ ID NO: 844366 - RNA, 22 nt, Human
auaguuggucuggaacaaguac

SEQ ID NO: 844367 - RNA, 21 nt, Human
caaugagccccuaccccagcc

SEQ ID NO: 844368 - RNA, 24 nt, Human
caaugagccccuaccccagccacc

SEQ ID NO: 844369 - RNA, 19 nt, Human
caccacaauuuccgccuca

SEQ ID NO: 844370 - RNA, 23 nt, Human
cccagcggugaccgauccagacc

SEQ ID NO: 844371 - RNA, 26 nt, Human
ccccagccacccgcugcguuugcgcc

SEQ ID NO: 844372 - RNA, 21 nt, Human
ccccgagccgccgccgcgcuc

SEQ ID NO: 844373 - RNA, 19 nt, Human
cccggaagcccggccugcc

SEQ ID NO: 844374 - RNA, 21 nt, Human
cccggaagcccggccugcccg

SEQ ID NO: 844375 - RNA, 23 nt, Human
ccgccgcgcuccgugggcuccca

SEQ ID NO: 844376 - RNA, 19 nt, Human
cggcccccgagccgccgcc

SEQ ID NO: 844377 - RNA, 28 nt, Human
cuucccguucuucuggaugggcauccua

SEQ ID NO: 844378 - RNA, 18 nt, Human
ucccaaugagccccuacc

SEQ ID NO: 844379 - RNA, 19 nt, Human
ucccggaagcccggccugc

SEQ ID NO: 844380 - RNA, 23 nt, Human
uccgugggcucccaaugagcccc

SEQ ID NO: 844381 - RNA, 25 nt, Human
uccgugggcucccaaugagccccua

SEQ ID NO: 844382 - RNA, 19 nt, Human
ucuggaacaaguacaccac

SEQ ID NO: 844383 - RNA, 22 nt, Human
ucuuuauaaguuaaacaaaggc

SEQ ID NO: 844384 - RNA, 24 nt, Human
ucuuuauaaguuaaacaaaggcug

SEQ ID NO: 844385 - RNA, 22 nt, Human
ugagccccuaccccagccaccc

SEQ ID NO: 844386 - RNA, 24 nt, Human
uuauaaguuaaacaaaggcugcag

SEQ ID NO: 844387 - RNA, 18 nt, Human
uuugcgccagccuccccc

SEQ ID NO: 844388 - RNA, 25 nt, Human
uuuuuuuucuuuuuuuuuuuguuuu

SEQ ID NO: 844389 - RNA, 27 nt, Human
uuuuuuuuuuucuuuuuuuuuuugggg

SEQ ID NO: 844390 - RNA, 24 nt, Human
uuuuuuuuuuuuuuuuuucuuuuu

SEQ ID NO: 844391 - RNA, 20 nt, Human
aaaaagacacuccggacaua

SEQ ID NO: 844392 - RNA, 23 nt, Human
aacagaaccaccuacacacauga

SEQ ID NO: 844393 - RNA, 23 nt, Human
aacaggacuguucagggagccug

SEQ ID NO: 844394 - RNA, 23 nt, Human
aauuguugccuuuaauaauuuca

SEQ ID NO: 844395 - RNA, 20 nt, Human
agacaaagguaccuccccuc

SEQ ID NO: 844396 - RNA, 21 nt, Human
aggcuggaaggcucuaguggg

SEQ ID NO: 844397 - RNA, 19 nt, Human
caaagguaccuccccucug

SEQ ID NO: 844398 - RNA, 24 nt, Human
caccuaacauuacaauaugaaaac

SEQ ID NO: 844399 - RNA, 19 nt, Human
cagccgcaccggaggccug

SEQ ID NO: 844400 - RNA, 24 nt, Human
cauugcagccgcaccggaggccug

SEQ ID NO: 844401 - RNA, 18 nt, Human
ccccucugagaacaccua

SEQ ID NO: 844402 - RNA, 18 nt, Human
ccgccgccgccgccgccg

SEQ ID NO: 844403 - RNA, 24 nt, Human
ccgccgccgccgccgccgccgccg

SEQ ID NO: 844404 - RNA, 25 nt, Human
ccgccgccgccgccgccgccgccgg

SEQ ID NO: 844405 - RNA, 23 nt, Human
ccgccgccgccgccgccgccgga

SEQ ID NO: 844406 - RNA, 24 nt, Human
ccgccgccgccgccgccggaccga

SEQ ID NO: 844407 - RNA, 19 nt, Human
ccggaccgagggauacgac

SEQ ID NO: 844408 - RNA, 25 nt, Human
ccuccgcuaccgccgccgccgccgg

SEQ ID NO: 844409 - RNA, 22 nt, Human
cggaggccugaaaccgucuccu

SEQ ID NO: 844410 - RNA, 19 nt, Human
cuaccgccgccgccgccgc

SEQ ID NO: 844411 - RNA, 22 nt, Human
cugcucuuagaacacaccagaa

SEQ ID NO: 844412 - RNA, 28 nt, Human
gaacaccuaacauuacaauaugaaaacg

SEQ ID NO: 844413 - RNA, 19 nt, Human
gggccugcuuauuaaaaau

SEQ ID NO: 844414 - RNA, 21 nt, Human
gggcuggcucccagguggagc

SEQ ID NO: 844415 - RNA, 24 nt, Human
gggcuggcucccagguggagccug

SEQ ID NO: 844416 - RNA, 22 nt, Human
gucuccuccgcuaccgccgccg

SEQ ID NO: 844417 - RNA, 23 nt, Human
uaacacaacagaaccaccuacac

SEQ ID NO: 844418 - RNA, 20 nt, Human
uaccgccgccgccgccgccc

SEQ ID NO: 844419 - RNA, 19 nt, Human
uagaacacaccagaaggcu

SEQ ID NO: 844420 - RNA, 25 nt, Human
uagaacacaccagaaggcuggaagg

SEQ ID NO: 844421 - RNA, 20 nt, Human
ucccagguggagccugcucu

SEQ ID NO: 844422 - RNA, 18 nt, Human
uccuccgcuaccgccgcc

SEQ ID NO: 844423 - RNA, 23 nt, Human
uccuccgcuaccgccgccgccgc

SEQ ID NO: 844424 - RNA, 18 nt, Human
ugaguaaaaagacacucc

SEQ ID NO: 844425 - RNA, 24 nt, Human
uggaaacguugauuagacaaaggu

SEQ ID NO: 844426 - RNA, 24 nt, Human
uggagccugcucuuagaacacacc

SEQ ID NO: 844427 - RNA, 21 nt, Human
uuagaacacaccagaaggcug

SEQ ID NO: 844428 - RNA, 24 nt, Human
uucuucuaaauuguugccuuuaau

SEQ ID NO: 844429 - RNA, 23 nt, Human
uuuccuggacagugcagacagug

SEQ ID NO: 844430 - RNA, 24 nt, Human
uuuuuuuuuuuuuucuucuaaauu

SEQ ID NO: 844431 - RNA, 18 nt, Human
aaacaaagaccuccuucc

SEQ ID NO: 844432 - RNA, 22 nt, Human
aauguauagcaagccaccauca

SEQ ID NO: 844433 - RNA, 23 nt, Human
acaagcccugcccacagaggucu

SEQ ID NO: 844434 - RNA, 18 nt, Human
accccugaaaaggucauc

SEQ ID NO: 844435 - RNA, 19 nt, Human
accuacaaacaaccaguaa

SEQ ID NO: 844436 - RNA, 20 nt, Human
agaagguaccccugcaaagg

SEQ ID NO: 844437 - RNA, 22 nt, Human
agcuggugacccuggagagccu

SEQ ID NO: 844438 - RNA, 22 nt, Human
aggaagaagcugaccugcaaug

SEQ ID NO: 844439 - RNA, 21 nt, Human
agggcaggacugggcagagga

SEQ ID NO: 844440 - RNA, 20 nt, Human
aggguuggggccagaaggua

SEQ ID NO: 844441 - RNA, 19 nt, Human
auacauccuacaaacaaag

SEQ ID NO: 844442 - RNA, 19 nt, Human
aucacagucacaucccuga

SEQ ID NO: 844443 - RNA, 21 nt, Human
auggcugaagccuuaucuaca

SEQ ID NO: 844444 - RNA, 19 nt, Human
caacacuccccagacaagg

SEQ ID NO: 844445 - RNA, 18 nt, Human
caagaaguagaaaagaaa

SEQ ID NO: 844446 - RNA, 22 nt, Human
caauuaucuggacagacaacga

SEQ ID NO: 844447 - RNA, 21 nt, Human
cacauuuucccuccccaccca

SEQ ID NO: 844448 - RNA, 19 nt, Human
cacccacaagcccugccca

SEQ ID NO: 844449 - RNA, 25 nt, Human
cacccauguaaagcuugucccaaaa

SEQ ID NO: 844450 - RNA, 19 nt, Human
cagagcuccacaguguccc

SEQ ID NO: 844451 - RNA, 18 nt, Human
cagaggucuucucccuga

SEQ ID NO: 844452 - RNA, 18 nt, Human
cagaggugagugagguag

SEQ ID NO: 844453 - RNA, 22 nt, Human
ccaaaaaagcuguucuuugaug

SEQ ID NO: 844454 - RNA, 18 nt, Human
ccagagcggagugcaucu

SEQ ID NO: 844455 - RNA, 19 nt, Human
cccaaaaaagcuguucuuu

SEQ ID NO: 844456 - RNA, 22 nt, Human
ccccacaugcagauucucccug

SEQ ID NO: 844457 - RNA, 22 nt, Human
ccccugcaaaggugcauugccc

SEQ ID NO: 844458 - RNA, 22 nt, Human
cccuacacauaaacuucucucc

SEQ ID NO: 844459 - RNA, 21 nt, Human
cccuccccacccauguaaagc

SEQ ID NO: 844460 - RNA, 27 nt, Human
ccuguggcugagagugaguuccagagc

SEQ ID NO: 844461 - RNA, 21 nt, Human
cgcucacauacagaguacaug

SEQ ID NO: 844462 - RNA, 18 nt, Human
cucaaggccgacugaugg

SEQ ID NO: 844463 - RNA, 21 nt, Human
cucccuguggcugagagugag

SEQ ID NO: 844464 - RNA, 22 nt, Human
cucuauacucauaaggcuccuc

SEQ ID NO: 844465 - RNA, 18 nt, Human
cucuggacucagucucuu

SEQ ID NO: 844466 - RNA, 24 nt, Human
cuucccacagucccuacacauaaa

SEQ ID NO: 844467 - RNA, 21 nt, Human
cuugggguagcaagacugucc

SEQ ID NO: 844468 - RNA, 21 nt, Human
gaaaauugaggauucacuggg

SEQ ID NO: 844469 - RNA, 25 nt, Human
gaagcuccacccacaagcccugccc

SEQ ID NO: 844470 - RNA, 22 nt, Human
gaccugcaaugugucugcaacc

SEQ ID NO: 844471 - RNA, 26 nt, Human
gacugggcagaggaagaagcugaccu

SEQ ID NO: 844472 - RNA, 20 nt, Human
gaucacagucacaucccugg

SEQ ID NO: 844473 - RNA, 22 nt, Human
gauuccucugcucuggacucag

SEQ ID NO: 844474 - RNA, 21 nt, Human
gcagagcuccacagugucccc

SEQ ID NO: 844475 - RNA, 19 nt, Human
gcaugcagcucccuguggc

SEQ ID NO: 844476 - RNA, 20 nt, Human
gcccauacauccuacaaaca

SEQ ID NO: 844477 - RNA, 19 nt, Human
ggagcacagcuggugaccc

SEQ ID NO: 844478 - RNA, 19 nt, Human
ggaugaagcuccacccaca

SEQ ID NO: 844479 - RNA, 24 nt, Human
ggaugaagcuccacccacaagccc

SEQ ID NO: 844480 - RNA, 21 nt, Human
ggccagaagguaccccugcaa

SEQ ID NO: 844481 - RNA, 20 nt, Human
guggagcacagcuggugacc

SEQ ID NO: 844482 - RNA, 21 nt, Human
guggagcacagcuggugaccc

SEQ ID NO: 844483 - RNA, 22 nt, Human
guuucacauuuucccuccccac

SEQ ID NO: 844484 - RNA, 24 nt, Human
uaacugguaccuacaaacaaccag

SEQ ID NO: 844485 - RNA, 25 nt, Human
uaaguccuuguccauucuccccaca

SEQ ID NO: 844486 - RNA, 22 nt, Human
uaauguguuucacauuuucccu

SEQ ID NO: 844487 - RNA, 22 nt, Human
uagcaagccaccaucaaucuuc

SEQ ID NO: 844488 - RNA, 19 nt, Human
uauagcaagccaccaucaa

SEQ ID NO: 844489 - RNA, 20 nt, Human
uaucuggacagacaacgaga

SEQ ID NO: 844490 - RNA, 23 nt, Human
ucacaaucuguguacacaggguc

SEQ ID NO: 844491 - RNA, 23 nt, Human
ucacauuuucccuccccacccau

SEQ ID NO: 844492 - RNA, 18 nt, Human
ucacuggggagugagggc

SEQ ID NO: 844493 - RNA, 19 nt, Human
uccacccacaagcccugcc

SEQ ID NO: 844494 - RNA, 19 nt, Human
uccauucuccccacacaug

SEQ ID NO: 844495 - RNA, 21 nt, Human
uccccaacacuccccagacaa

SEQ ID NO: 844496 - RNA, 27 nt, Human
uccccaacacuccccagacaaggguug

SEQ ID NO: 844497 - RNA, 23 nt, Human
uccccacacaugcagaauuucua

SEQ ID NO: 844498 - RNA, 23 nt, Human
ucccucccaugccugauaagggc

SEQ ID NO: 844499 - RNA, 21 nt, Human
ucccuccccacccauguaaag

SEQ ID NO: 844500 - RNA, 21 nt, Human
ucccuguguguggagcacagc

SEQ ID NO: 844501 - RNA, 21 nt, Human
uccuuguccauucuccccaca

SEQ ID NO: 844502 - RNA, 19 nt, Human
ucucaagcagcuggggugu

SEQ ID NO: 844503 - RNA, 21 nt, Human
ugaauguaacugguaccuaca

SEQ ID NO: 844504 - RNA, 21 nt, Human
ugacuugggguagcaagacug

SEQ ID NO: 844505 - RNA, 21 nt, Human
ugagguagugacuugggguag

SEQ ID NO: 844506 - RNA, 23 nt, Human
ugagucaaggguuggggccagaa

SEQ ID NO: 844507 - RNA, 19 nt, Human
ugcaaaggugcauugcccc

SEQ ID NO: 844508 - RNA, 19 nt, Human
ugcaacccagugauccuuc

SEQ ID NO: 844509 - RNA, 21 nt, Human
ugcaucucuggaaugcaucuc

SEQ ID NO: 844510 - RNA, 22 nt, Human
uggcugaagccuuaucuacacu

SEQ ID NO: 844511 - RNA, 19 nt, Human
ugggcagagcuccacagug

SEQ ID NO: 844512 - RNA, 19 nt, Human
ugggguguuaccccugaaa

SEQ ID NO: 844513 - RNA, 20 nt, Human
uguccauucuuuuacugaug

SEQ ID NO: 844514 - RNA, 20 nt, Human
ugucccaaaaaagcuguucu

SEQ ID NO: 844515 - RNA, 22 nt, Human
uuccugagggccacucugugcc

SEQ ID NO: 844516 - RNA, 22 nt, Human
uuguccauucuccccacacaug

SEQ ID NO: 844517 - RNA, 26 nt, Human
uuuacugaugcuccccaacacucccc

SEQ ID NO: 844518 - RNA, 18 nt, Human
aggccuucgccacgcgac

SEQ ID NO: 844519 - RNA, 18 nt, Human
aggcgcgaccuggaggag

SEQ ID NO: 844520 - RNA, 21 nt, Human
cccaacuuugugccgcggccg

SEQ ID NO: 844521 - RNA, 23 nt, Human
cccaacuuugugccgcggccgca

SEQ ID NO: 844522 - RNA, 24 nt, Human
ccccaacuuugugccgcggccgca

SEQ ID NO: 844523 - RNA, 25 nt, Human
cuuugugccgcggccgcaggccuuc

SEQ ID NO: 844524 - RNA, 19 nt, Human
gcgcggcggagagagggag

SEQ ID NO: 844525 - RNA, 18 nt, Human
gcggcggagagagggagc

SEQ ID NO: 844526 - RNA, 18 nt, Human
ggcggccgcggagcugcg

SEQ ID NO: 844527 - RNA, 19 nt, Human
ggcuuggcggccgcggagc

SEQ ID NO: 844528 - RNA, 25 nt, Human
uaccuuuauuuuuccuuauaacauu

SEQ ID NO: 844529 - RNA, 18 nt, Human
uauuaccuuuauuuuucc

SEQ ID NO: 844530 - RNA, 21 nt, Human
uggcggccgcggagcugcgcc

SEQ ID NO: 844531 - RNA, 22 nt, Human
uuggcggccgcggagcugcgcc

SEQ ID NO: 844532 - RNA, 22 nt, Human
aagugcagucccucagccgccu

SEQ ID NO: 844533 - RNA, 21 nt, Human
agaaugcugagagcagggagu

SEQ ID NO: 844534 - RNA, 20 nt, Human
agagcagggagugggaaggg

SEQ ID NO: 844535 - RNA, 20 nt, Human
aucuguuacaacagauggug

SEQ ID NO: 844536 - RNA, 22 nt, Human
caaccaauacagguucuugauu

SEQ ID NO: 844537 - RNA, 18 nt, Human
cacccccucucccaguca

SEQ ID NO: 844538 - RNA, 24 nt, Human
cacccccucucccagucauccucc

SEQ ID NO: 844539 - RNA, 27 nt, Human
cagccuccagcccuaugucgagaccuu

SEQ ID NO: 844540 - RNA, 23 nt, Human
cagggccuugguccccaccuccc

SEQ ID NO: 844541 - RNA, 20 nt, Human
caucggugcugccaaagggg

SEQ ID NO: 844542 - RNA, 21 nt, Human
ccaccucccugccaugaauuc

SEQ ID NO: 844543 - RNA, 24 nt, Human
ccagauaggauccauguuccugcc

SEQ ID NO: 844544 - RNA, 25 nt, Human
cccagccuccagcccuaugucgaga

SEQ ID NO: 844545 - RNA, 28 nt, Human
ccccagccuccagcccuaugucgagacc

SEQ ID NO: 844546 - RNA, 19 nt, Human
cccucugacucucccgggg

SEQ ID NO: 844547 - RNA, 26 nt, Human
ccugugaucccucuuaacugcccucu

SEQ ID NO: 844548 - RNA, 23 nt, Human
cucagggccuugguccccaccuc

SEQ ID NO: 844549 - RNA, 21 nt, Human
cuccuucgcaaugcucccugg

SEQ ID NO: 844550 - RNA, 24 nt, Human
cucgcgggugggccuucucuggcc

SEQ ID NO: 844551 - RNA, 21 nt, Human
cuugagaggcacccccucucc

SEQ ID NO: 844552 - RNA, 20 nt, Human
gggaaaggccacgggagaug

SEQ ID NO: 844553 - RNA, 22 nt, Human
gggagauguucgagcucaggga

SEQ ID NO: 844554 - RNA, 21 nt, Human
ggggaaaggccacgggagaug

SEQ ID NO: 844555 - RNA, 19 nt, Human
uacagguucuugauugaag

SEQ ID NO: 844556 - RNA, 28 nt, Human
uaggauccauguuccugccccagccucc

SEQ ID NO: 844557 - RNA, 18 nt, Human
ucccucagccgccucucu

SEQ ID NO: 844558 - RNA, 18 nt, Human
uccuccaucggugcugcc

SEQ ID NO: 844559 - RNA, 18 nt, Human
ugacagaaugcugagagc

SEQ ID NO: 844560 - RNA, 21 nt, Human
ugacaguaccaagccgggccu

SEQ ID NO: 844561 - RNA, 26 nt, Human
ugggaaggggagugacagucgaccuc

SEQ ID NO: 844562 - RNA, 18 nt, Human
ugggaucacaggcaacca

SEQ ID NO: 844563 - RNA, 18 nt, Human
ugggaucacaggcaacca

SEQ ID NO: 844564 - RNA, 20 nt, Human
ugggauuucgggguuuaucu

SEQ ID NO: 844565 - RNA, 23 nt, Human
uggggauagucaucccauuacug

SEQ ID NO: 844566 - RNA, 18 nt, Human
uguuccugccccagccuc

SEQ ID NO: 844567 - RNA, 24 nt, Human
uuuugggauuucgggguuuaucug

SEQ ID NO: 844568 - RNA, 26 nt, Human
uuuugggauuucgggguuuaucuguu

SEQ ID NO: 844569 - RNA, 20 nt, Human
uuuuuuuuuuuugggauuuc

SEQ ID NO: 844570 - RNA, 23 nt, Human
uuuuuuuuuuuuugggauuucgg

SEQ ID NO: 844571 - RNA, 23 nt, Human
uuuuuuuuuuuuuuuuugggauu

SEQ ID NO: 844572 - RNA, 22 nt, Human
uuuuuuuuuuuuuuuuuuuggg

SEQ ID NO: 844573 - RNA, 24 nt, Human
aaaacuccugccaaauguccacaa

SEQ ID NO: 844574 - RNA, 23 nt, Human
aaaagacauuuuguugcaagacu

SEQ ID NO: 844575 - RNA, 25 nt, Human
aaaaggccaaguauacucauaagug

SEQ ID NO: 844576 - RNA, 23 nt, Human
aaacuuaaaagacauuuuguugc

SEQ ID NO: 844577 - RNA, 24 nt, Human
aaagugcugggauuacaggcauga

SEQ ID NO: 844578 - RNA, 21 nt, Human
aagguuguguuuuucaaccug

SEQ ID NO: 844579 - RNA, 19 nt, Human
aagugcugggauuacaggc

SEQ ID NO: 844580 - RNA, 21 nt, Human
aagugcugggauuacaggcau

SEQ ID NO: 844581 - RNA, 26 nt, Human
aagugcugggauuacaggcaugagcc

SEQ ID NO: 844582 - RNA, 23 nt, Human
acaauaaaaucccucucaccaug

SEQ ID NO: 844583 - RNA, 21 nt, Human
accaaaaucaacaaacacaaa

SEQ ID NO: 844584 - RNA, 24 nt, Human
accauguuggucaggcuggucucg

SEQ ID NO: 844585 - RNA, 22 nt, Human
accccuaccucuuuacucuuga

SEQ ID NO: 844586 - RNA, 23 nt, Human
acccuaauacuguuaacacauca

SEQ ID NO: 844587 - RNA, 20 nt, Human
acccucugccucccggguuc

SEQ ID NO: 844588 - RNA, 23 nt, Human
accucggccucccaaagugcugg

SEQ ID NO: 844589 - RNA, 24 nt, Human
accuugugauccacccaccucggc

SEQ ID NO: 844590 - RNA, 21 nt, Human
acugcacccucugccucccgg

SEQ ID NO: 844591 - RNA, 21 nt, Human
acugcacccucugccucccgg

SEQ ID NO: 844592 - RNA, 22 nt, Human
acugcacccucugccucccggg

SEQ ID NO: 844593 - RNA, 23 nt, Human
acuuggagaugccuguaugaugc

SEQ ID NO: 844594 - RNA, 22 nt, Human
agaaauagagagugaggaagga

SEQ ID NO: 844595 - RNA, 22 nt, Human
agaaccaggaucuugacccaaa

SEQ ID NO: 844596 - RNA, 18 nt, Human
agagagugaggaaggaag

SEQ ID NO: 844597 - RNA, 18 nt, Human
agagggaaagagaaauag

SEQ ID NO: 844598 - RNA, 18 nt, Human
agcugacuacuguacuua

SEQ ID NO: 844599 - RNA, 25 nt, Human
aggcuggagugcaguggugcaaucu

SEQ ID NO: 844600 - RNA, 23 nt, Human
agggaaagagaaauagagaguga

SEQ ID NO: 844601 - RNA, 22 nt, Human
aguagagauggcguuucaccau

SEQ ID NO: 844602 - RNA, 20 nt, Human
agugcaguggugcaaucucg

SEQ ID NO: 844603 - RNA, 24 nt, Human
agugcaguggugcaaucucggcuu

SEQ ID NO: 844604 - RNA, 18 nt, Human
agugcugggauuacaggc

SEQ ID NO: 844605 - RNA, 19 nt, Human
auaacaaaacacaaaggca

SEQ ID NO: 844606 - RNA, 23 nt, Human
auaacaguaacuuuaaaaggcca

SEQ ID NO: 844607 - RNA, 21 nt, Human
auggcguuucaccauguuggu

SEQ ID NO: 844608 - RNA, 24 nt, Human
auggcguuucaccauguuggucag

SEQ ID NO: 844609 - RNA, 22 nt, Human
auugacaccaaaaucaacaaac

SEQ ID NO: 844610 - RNA, 24 nt, Human
auuuuuguauuuuuaguagagaug

SEQ ID NO: 844611 - RNA, 18 nt, Human
caaaacacaaaggcaagu

SEQ ID NO: 844612 - RNA, 19 nt, Human
caaaauaucaaguaaggau

SEQ ID NO: 844613 - RNA, 24 nt, Human
caaagugcugggauuacaggcaug

SEQ ID NO: 844614 - RNA, 22 nt, Human
caaccaauaugccaauauccaa

SEQ ID NO: 844615 - RNA, 20 nt, Human
caagugauucucuugccuca

SEQ ID NO: 844616 - RNA, 22 nt, Human
caagugauucucuugccucagc

SEQ ID NO: 844617 - RNA, 24 nt, Human
caccaaaaucaacaaacacaaaga

SEQ ID NO: 844618 - RNA, 24 nt, Human
caccacgcccggcuaauuuuugua

SEQ ID NO: 844619 - RNA, 21 nt, Human
caccauguuggucaggcuggu

SEQ ID NO: 844620 - RNA, 24 nt, Human
caccauguuggucaggcuggucuc

SEQ ID NO: 844621 - RNA, 22 nt, Human
cacccaccucggccucccaaag

SEQ ID NO: 844622 - RNA, 23 nt, Human
cacccaccucggccucccaaagu

SEQ ID NO: 844623 - RNA, 21 nt, Human
cagcaggagcagaggaaugcu

SEQ ID NO: 844624 - RNA, 20 nt, Human
cagccuccuggguagcuggg

SEQ ID NO: 844625 - RNA, 24 nt, Human
cauaagaaccaggaucuugaccca

SEQ ID NO: 844626 - RNA, 23 nt, Human
ccaaagugcugggauuacaggca

SEQ ID NO: 844627 - RNA, 24 nt, Human
ccaaagugcugggauuacaggcau

SEQ ID NO: 844628 - RNA, 27 nt, Human
cccaaacuuauaagaucuucuaaaaag

SEQ ID NO: 844629 - RNA, 24 nt, Human
cccaaagugcugggauuacaggca

SEQ ID NO: 844630 - RNA, 21 nt, Human
cccggguucaagugauucucu

SEQ ID NO: 844631 - RNA, 18 nt, Human
cccucucaccaugaaaau

SEQ ID NO: 844632 - RNA, 19 nt, Human
ccuaggcuggagugcagug

SEQ ID NO: 844633 - RNA, 26 nt, Human
ccucuuuacucuugauuccucuucca

SEQ ID NO: 844634 - RNA, 22 nt, Human
ccugaccuugugauccacccac

SEQ ID NO: 844635 - RNA, 23 nt, Human
ccuggguagcugggauuacaggu

SEQ ID NO: 844636 - RNA, 24 nt, Human
ccuggguagcugggauuacaggug

SEQ ID NO: 844637 - RNA, 24 nt, Human
cgcucugucgccuaggcuggagug

SEQ ID NO: 844638 - RNA, 20 nt, Human
cggguucaagugauucucuu

SEQ ID NO: 844639 - RNA, 20 nt, Human
cuaaagagaaugcaaccuaa

SEQ ID NO: 844640 - RNA, 24 nt, Human
cucagccuccuggguagcugggau

SEQ ID NO: 844641 - RNA, 19 nt, Human
cucauucugucuccuuucc

SEQ ID NO: 844642 - RNA, 20 nt, Human
cucccggguucaagugauuc

SEQ ID NO: 844643 - RNA, 18 nt, Human
cuccugaccuugugaucc

SEQ ID NO: 844644 - RNA, 25 nt, Human
cuccugaccuugugauccacccacc

SEQ ID NO: 844645 - RNA, 19 nt, Human
cuccugccaaauguccaca

SEQ ID NO: 844646 - RNA, 21 nt, Human
cucgcucugucgccuaggcug

SEQ ID NO: 844647 - RNA, 24 nt, Human
cucgcucugucgccuaggcuggag

SEQ ID NO: 844648 - RNA, 22 nt, Human
cucuauggccagauauuauacu

SEQ ID NO: 844649 - RNA, 23 nt, Human
cucugucgccuaggcuggagugc

SEQ ID NO: 844650 - RNA, 21 nt, Human
cugcacccucugccucccggg

SEQ ID NO: 844651 - RNA, 23 nt, Human
cugccucccggguucaagugauu

SEQ ID NO: 844652 - RNA, 22 nt, Human
gaauggugacagaguuggcuug

SEQ ID NO: 844653 - RNA, 22 nt, Human
gacaccaaaaucaacaaacaca

SEQ ID NO: 844654 - RNA, 22 nt, Human
gaccuugugauccacccaccuc

SEQ ID NO: 844655 - RNA, 22 nt, Human
gaccuugugauccacccaccuc

SEQ ID NO: 844656 - RNA, 24 nt, Human
gaccuugugauccacccaccucgg

SEQ ID NO: 844657 - RNA, 24 nt, Human
gagauggcguuucaccauguuggu

SEQ ID NO: 844658 - RNA, 22 nt, Human
gagcaccaccacgcccggcuaa

SEQ ID NO: 844659 - RNA, 19 nt, Human
gaugcuggaugaccaagua

SEQ ID NO: 844660 - RNA, 18 nt, Human
gauuacaggcaugagcca

SEQ ID NO: 844661 - RNA, 22 nt, Human
gauuacaggcaugagccacugc

SEQ ID NO: 844662 - RNA, 22 nt, Human
gauuacaggcaugagccacugc

SEQ ID NO: 844663 - RNA, 21 nt, Human
gauucucuugccucagccucc

SEQ ID NO: 844664 - RNA, 21 nt, Human
gccaauauccaacuucuaggu

SEQ ID NO: 844665 - RNA, 22 nt, Human
gcccggcuaauuuuuguauuuu

SEQ ID NO: 844666 - RNA, 20 nt, Human
gccuaggcuggagugcagug

SEQ ID NO: 844667 - RNA, 23 nt, Human
gccuaggcuggagugcaguggug

SEQ ID NO: 844668 - RNA, 19 nt, Human
gcugaaucagaaucucaua

SEQ ID NO: 844669 - RNA, 23 nt, Human
gcuugucacaccuggcucaggga

SEQ ID NO: 844670 - RNA, 22 nt, Human
ggauuacaggcaugagccacug

SEQ ID NO: 844671 - RNA, 22 nt, Human
ggcguuucaccauguuggucag

SEQ ID NO: 844672 - RNA, 24 nt, Human
ggcguuucaccauguuggucaggc

SEQ ID NO: 844673 - RNA, 23 nt, Human
ggcuggucucgaacuccugaccu

SEQ ID NO: 844674 - RNA, 22 nt, Human
ggguucaagugauucucuugcc

SEQ ID NO: 844675 - RNA, 23 nt, Human
ggguucaagugauucucuugccu

SEQ ID NO: 844676 - RNA, 20 nt, Human
ggucucgaacuccugaccuu

SEQ ID NO: 844677 - RNA, 24 nt, Human
gugauccacccaccucggccuccc

SEQ ID NO: 844678 - RNA, 23 nt, Human
gugauucucuugccucagccucc

SEQ ID NO: 844679 - RNA, 18 nt, Human
guuguguuuuucaaccug

SEQ ID NO: 844680 - RNA, 19 nt, Human
uaaauugaagcaauuccua

SEQ ID NO: 844681 - RNA, 19 nt, Human
uaacaggaaacuuaaaaga

SEQ ID NO: 844682 - RNA, 22 nt, Human
uaagaauaaugccauuaucugu

SEQ ID NO: 844683 - RNA, 25 nt, Human
uaaucuaauuuuaaaaauccuuuuc

SEQ ID NO: 844684 - RNA, 24 nt, Human
uaauuuuuguauuuuuaguagaga

SEQ ID NO: 844685 - RNA, 22 nt, Human
uacaggcaugagccacugcgcc

SEQ ID NO: 844686 - RNA, 23 nt, Human
uacaggugagcaccaccacgccc

SEQ ID NO: 844687 - RNA, 23 nt, Human
uacuaaggucacaaguguguuca

SEQ ID NO: 844688 - RNA, 23 nt, Human
uacugcacccucugccucccggg

SEQ ID NO: 844689 - RNA, 24 nt, Human
uagaauuucacaauaaaaucccuc

SEQ ID NO: 844690 - RNA, 22 nt, Human
uagagauggcguuucaccaugu

SEQ ID NO: 844691 - RNA, 18 nt, Human
uagauaaacauaacagua

SEQ ID NO: 844692 - RNA, 24 nt, Human
uaguagagauggcguuucaccaug

SEQ ID NO: 844693 - RNA, 23 nt, Human
uauggccagauauuauacuaauc

SEQ ID NO: 844694 - RNA, 22 nt, Human
ucaacaaacacaaagaaagaga

SEQ ID NO: 844695 - RNA, 19 nt, Human
ucaagugauucucuugccu

SEQ ID NO: 844696 - RNA, 20 nt, Human
ucagccuccuggguagcugg

SEQ ID NO: 844697 - RNA, 23 nt, Human
ucauauuguucuuaucacucuau

SEQ ID NO: 844698 - RNA, 24 nt, Human
ucccaaagugcugggauuacaggc

SEQ ID NO: 844699 - RNA, 21 nt, Human
ucccggguucaagugauucuc

SEQ ID NO: 844700 - RNA, 21 nt, Human
ucccggguucaagugauucuc

SEQ ID NO: 844701 - RNA, 24 nt, Human
ucccggguucaagugauucucuug

SEQ ID NO: 844702 - RNA, 24 nt, Human
uccuggguagcugggauuacaggu

SEQ ID NO: 844703 - RNA, 24 nt, Human
ucgccuaggcuggagugcaguggu

SEQ ID NO: 844704 - RNA, 24 nt, Human
ucgcucugucgccuaggcuggagu

SEQ ID NO: 844705 - RNA, 18 nt, Human
ucggccucccaaagugcu

SEQ ID NO: 844706 - RNA, 19 nt, Human
ucucgaacuccugaccuug

SEQ ID NO: 844707 - RNA, 19 nt, Human
ucucgcucugucgccuagg

SEQ ID NO: 844708 - RNA, 20 nt, Human
ucucgcucugucgccuaggc

SEQ ID NO: 844709 - RNA, 23 nt, Human
ucucgcucugucgccuaggcugg

SEQ ID NO: 844710 - RNA, 24 nt, Human
ucucgcucugucgccuaggcugga

SEQ ID NO: 844711 - RNA, 18 nt, Human
ucugucuccuuuccuuuc

SEQ ID NO: 844712 - RNA, 23 nt, Human
ucugugcaauagaaauaaccaaa

SEQ ID NO: 844713 - RNA, 21 nt, Human
ucugugcucaauauagauaaa

SEQ ID NO: 844714 - RNA, 23 nt, Human
ugaccuugugauccacccaccuc

SEQ ID NO: 844715 - RNA, 21 nt, Human
ugagaaccaguggccuaaaga

SEQ ID NO: 844716 - RNA, 18 nt, Human
ugagacagagucucgcuc

SEQ ID NO: 844717 - RNA, 22 nt, Human
ugagacagagucucgcucuguc

SEQ ID NO: 844718 - RNA, 18 nt, Human
ugagcaccaccacgcccg

SEQ ID NO: 844719 - RNA, 24 nt, Human
ugaguaaaccccuaccucuuuacu

SEQ ID NO: 844720 - RNA, 20 nt, Human
ugauaggaacaaaauaucaa

SEQ ID NO: 844721 - RNA, 24 nt, Human
ugauccacccaccucggccuccca

SEQ ID NO: 844722 - RNA, 20 nt, Human
ugcaauagaaauaaccaaag

SEQ ID NO: 844723 - RNA, 21 nt, Human
ugcauagagucuaacuuggag

SEQ ID NO: 844724 - RNA, 21 nt, Human
ugccucagccuccuggguagc

SEQ ID NO: 844725 - RNA, 22 nt, Human
ugccucagccuccuggguagcu

SEQ ID NO: 844726 - RNA, 24 nt, Human
ugccucagccuccuggguagcugg

SEQ ID NO: 844727 - RNA, 22 nt, Human
ugccucccggguucaagugauu

SEQ ID NO: 844728 - RNA, 24 nt, Human
ugcguguuucauaacaaaacacaa

SEQ ID NO: 844729 - RNA, 23 nt, Human
uggagugcaguggugcaaucucg

SEQ ID NO: 844730 - RNA, 24 nt, Human
uggagugcaguggugcaaucucgg

SEQ ID NO: 844731 - RNA, 24 nt, Human
uggcguuucaccauguuggucagg

SEQ ID NO: 844732 - RNA, 18 nt, Human
ugggauuacaggcaugag

SEQ ID NO: 844733 - RNA, 19 nt, Human
ugggauuacaggcaugagc

SEQ ID NO: 844734 - RNA, 21 nt, Human
ugggauuacaggcaugagcca

SEQ ID NO: 844735 - RNA, 22 nt, Human
ugggauuacaggcaugagccac

SEQ ID NO: 844736 - RNA, 22 nt, Human
ugggauuacaggcaugagccac

SEQ ID NO: 844737 - RNA, 23 nt, Human
ugggauuacaggcaugagccacu

SEQ ID NO: 844738 - RNA, 24 nt, Human
ugggauuacaggcaugagccacug

SEQ ID NO: 844739 - RNA, 24 nt, Human
ugggauuacaggcaugagccacug

SEQ ID NO: 844740 - RNA, 19 nt, Human
ugggauuacaggugagcac

SEQ ID NO: 844741 - RNA, 21 nt, Human
ugggauuacaggugagcacca

SEQ ID NO: 844742 - RNA, 24 nt, Human
ugggauuacaggugagcaccacca

SEQ ID NO: 844743 - RNA, 24 nt, Human
uggucaggcuggucucgaacuccu

SEQ ID NO: 844744 - RNA, 21 nt, Human
ugucgccuaggcuggagugca

SEQ ID NO: 844745 - RNA, 18 nt, Human
ugugcaauagaaauaacc

SEQ ID NO: 844746 - RNA, 21 nt, Human
uguugcaagacuaucuuaaca

SEQ ID NO: 844747 - RNA, 21 nt, Human
uuaaaagacauuuuguugcaa

SEQ ID NO: 844748 - RNA, 24 nt, Human
uuacugcacccucugccucccggg

SEQ ID NO: 844749 - RNA, 18 nt, Human
uuaguagagauggcguuu

SEQ ID NO: 844750 - RNA, 24 nt, Human
uuaguagagauggcguuucaccau

SEQ ID NO: 844751 - RNA, 23 nt, Human
uucaagugauucucuugccucag

SEQ ID NO: 844752 - RNA, 21 nt, Human
uugacaccaaaaucaacaaac

SEQ ID NO: 844753 - RNA, 23 nt, Human
uugacaccaaaaucaacaaacac

SEQ ID NO: 844754 - RNA, 19 nt, Human
uugucacaccuggcucagg

SEQ ID NO: 844755 - RNA, 24 nt, Human
uuucaccauguuggucaggcuggu

SEQ ID NO: 844756 - RNA, 24 nt, Human
uuuuuaguagagauggcguuucac

SEQ ID NO: 844757 - RNA, 20 nt, Human
uuuuuguauuuuuaguagag

SEQ ID NO: 844758 - RNA, 20 nt, Human
uuuuuuuuuuugagacagag

SEQ ID NO: 844759 - RNA, 25 nt, Human
uuuuuuuuuuuugagacagagucuc

SEQ ID NO: 844760 - RNA, 18 nt, Human
uuuuuuuuuuuuuuuuug

SEQ ID NO: 844761 - RNA, 24 nt, Human
aaagugcugggauuacaggcauga

SEQ ID NO: 844762 - RNA, 22 nt, Human
aaccuccacucacugcaaccuc

SEQ ID NO: 844763 - RNA, 19 nt, Human
aaguagcugggauuagagg

SEQ ID NO: 844764 - RNA, 19 nt, Human
aagugcugggauuacaggc

SEQ ID NO: 844765 - RNA, 21 nt, Human
aagugcugggauuacaggcau

SEQ ID NO: 844766 - RNA, 26 nt, Human
aagugcugggauuacaggcaugagcc

SEQ ID NO: 844767 - RNA, 22 nt, Human
accauguuggccaggcuggucu

SEQ ID NO: 844768 - RNA, 25 nt, Human
acccgucucagccucccaaagugcu

SEQ ID NO: 844769 - RNA, 18 nt, Human
acgggguuucaccauguu

SEQ ID NO: 844770 - RNA, 23 nt, Human
acgggguuucaccauguuggcca

SEQ ID NO: 844771 - RNA, 24 nt, Human
acgggguuucaccauguuggccag

SEQ ID NO: 844772 - RNA, 25 nt, Human
acugcaaccucugccuccuggauuc

SEQ ID NO: 844773 - RNA, 24 nt, Human
agguaauccacccgucucagccuc

SEQ ID NO: 844774 - RNA, 18 nt, Human
aggugcccaccaucacgc

SEQ ID NO: 844775 - RNA, 18 nt, Human
agugcugggauuacaggc

SEQ ID NO: 844776 - RNA, 24 nt, Human
auuuuuguauuuuuaguggagacg

SEQ ID NO: 844777 - RNA, 24 nt, Human
caaagugcugggauuacaggcaug

SEQ ID NO: 844778 - RNA, 21 nt, Human
caccauguuggccaggcuggu

SEQ ID NO: 844779 - RNA, 22 nt, Human
caccauguuggccaggcugguc

SEQ ID NO: 844780 - RNA, 23 nt, Human
caccauguuggccaggcuggucu

SEQ ID NO: 844781 - RNA, 24 nt, Human
caccauguuggccaggcuggucuu

SEQ ID NO: 844782 - RNA, 23 nt, Human
cacccgucucagccucccaaagu

SEQ ID NO: 844783 - RNA, 21 nt, Human
cacgcccggcuaauuuuugua

SEQ ID NO: 844784 - RNA, 18 nt, Human
cacugcaaccucugccuc

SEQ ID NO: 844785 - RNA, 21 nt, Human
cacugcaaccucugccuccug

SEQ ID NO: 844786 - RNA, 24 nt, Human
cauguuggccaggcuggucuugaa

SEQ ID NO: 844787 - RNA, 23 nt, Human
ccaaagugcugggauuacaggca

SEQ ID NO: 844788 - RNA, 24 nt, Human
ccaaagugcugggauuacaggcau

SEQ ID NO: 844789 - RNA, 19 nt, Human
ccaccaugccuggccuacc

SEQ ID NO: 844790 - RNA, 26 nt, Human
ccacccgucucagccucccaaagugc

SEQ ID NO: 844791 - RNA, 24 nt, Human
cccaaagugcugggauuacaggca

SEQ ID NO: 844792 - RNA, 19 nt, Human
cccaaguagcugggauuag

SEQ ID NO: 844793 - RNA, 23 nt, Human
ccgucucagccucccaaagugcu

SEQ ID NO: 844794 - RNA, 22 nt, Human
ccucagccucccaaguagcugg

SEQ ID NO: 844795 - RNA, 24 nt, Human
ccuccuggauucaagcaauucucc

SEQ ID NO: 844796 - RNA, 22 nt, Human
ccugaccucagguaauccaccc

SEQ ID NO: 844797 - RNA, 24 nt, Human
ccugaccucagguaauccacccgu

SEQ ID NO: 844798 - RNA, 24 nt, Human
ccugcccucagccucccaaguagc

SEQ ID NO: 844799 - RNA, 23 nt, Human
ccuggauucaagcaauucuccug

SEQ ID NO: 844800 - RNA, 24 nt, Human
cgggguuucaccauguuggccagg

SEQ ID NO: 844801 - RNA, 24 nt, Human
cgucucagccucccaaagugcugg

SEQ ID NO: 844802 - RNA, 20 nt, Human
cucacugcaaccucugccuc

SEQ ID NO: 844803 - RNA, 24 nt, Human
cucacugcaaccucugccuccugg

SEQ ID NO: 844804 - RNA, 25 nt, Human
cucacugcaaccucugccuccuggg

SEQ ID NO: 844805 - RNA, 24 nt, Human
cucagccucccaaguagcugggau

SEQ ID NO: 844806 - RNA, 19 nt, Human
cugcaaccucugccuccug

SEQ ID NO: 844807 - RNA, 23 nt, Human
cugcaaccucugccuccuggauu

SEQ ID NO: 844808 - RNA, 22 nt, Human
cugccucauucagaaaggcaau

SEQ ID NO: 844809 - RNA, 23 nt, Human
cugucagccaggcuggagugcag

SEQ ID NO: 844810 - RNA, 19 nt, Human
cuuuuuuuuuuuuuuuuug

SEQ ID NO: 844811 - RNA, 20 nt, Human
cuuuuuuuuuuuuuuuuugg

SEQ ID NO: 844812 - RNA, 24 nt, Human
gaccucagguaauccacccgucuc

SEQ ID NO: 844813 - RNA, 24 nt, Human
gagacgggguuucaccauguuggc

SEQ ID NO: 844814 - RNA, 21 nt, Human
gaggugcccaccaucacgccc

SEQ ID NO: 844815 - RNA, 18 nt, Human
gauuacaggcaugagcca

SEQ ID NO: 844816 - RNA, 21 nt, Human
gauuacaggcaugagccacca

SEQ ID NO: 844817 - RNA, 24 nt, Human
gauuacaggcaugagccaccaugc

SEQ ID NO: 844818 - RNA, 22 nt, Human
gcccggcuaauuuuuguauuuu

SEQ ID NO: 844819 - RNA, 24 nt, Human
ggauuacaggcaugagccaccaug

SEQ ID NO: 844820 - RNA, 24 nt, Human
ggcuggucuugaaguccugaccuc

SEQ ID NO: 844821 - RNA, 23 nt, Human
gggguuucaccauguuggccagg

SEQ ID NO: 844822 - RNA, 24 nt, Human
guaauccacccgucucagccuccc

SEQ ID NO: 844823 - RNA, 19 nt, Human
gucagccaggcuggagugc

SEQ ID NO: 844824 - RNA, 23 nt, Human
guggagacgggguuucaccaugu

SEQ ID NO: 844825 - RNA, 24 nt, Human
uaauuuuuguauuuuuaguggaga

SEQ ID NO: 844826 - RNA, 22 nt, Human
uacaggcaugagccaccaugcc

SEQ ID NO: 844827 - RNA, 24 nt, Human
uaguggagacgggguuucaccaug

SEQ ID NO: 844828 - RNA, 18 nt, Human
ucacugcaaccucugccu

SEQ ID NO: 844829 - RNA, 19 nt, Human
ucacugcaaccucugccuc

SEQ ID NO: 844830 - RNA, 23 nt, Human
ucacugcaaccucugccuccugg

SEQ ID NO: 844831 - RNA, 27 nt, Human
ucacugcaaccucugccuccuggauuc

SEQ ID NO: 844832 - RNA, 20 nt, Human
ucagccucccaaguagcugg

SEQ ID NO: 844833 - RNA, 24 nt, Human
ucccaaagugcugggauuacaggc

SEQ ID NO: 844834 - RNA, 24 nt, Human
ucccaaguagcugggauuagaggu

SEQ ID NO: 844835 - RNA, 21 nt, Human
uccuggauucaagcaauucuc

SEQ ID NO: 844836 - RNA, 24 nt, Human
uccuggauucaagcaauucuccug

SEQ ID NO: 844837 - RNA, 22 nt, Human
ucucacugucagccaggcugga

SEQ ID NO: 844838 - RNA, 24 nt, Human
ucucacugucagccaggcuggagu

SEQ ID NO: 844839 - RNA, 24 nt, Human
ucugccuccuggauucaagcaauu

SEQ ID NO: 844840 - RNA, 21 nt, Human
ucuugaaguccugaccucagg

SEQ ID NO: 844841 - RNA, 21 nt, Human
ugaccucagguaauccacccg

SEQ ID NO: 844842 - RNA, 24 nt, Human
ugaccucagguaauccacccgucu

SEQ ID NO: 844843 - RNA, 18 nt, Human
uggagugcagugguacaa

SEQ ID NO: 844844 - RNA, 19 nt, Human
uggagugcagugguacaac

SEQ ID NO: 844845 - RNA, 21 nt, Human
uggauucaagcaauucuccug

SEQ ID NO: 844846 - RNA, 24 nt, Human
uggccaggcuggucuugaaguccu

SEQ ID NO: 844847 - RNA, 18 nt, Human
ugggauuacaggcaugag

SEQ ID NO: 844848 - RNA, 22 nt, Human
ugggauuacaggcaugagccac

SEQ ID NO: 844849 - RNA, 23 nt, Human
ugggauuacaggcaugagccacc

SEQ ID NO: 844850 - RNA, 24 nt, Human
ugggauuacaggcaugagccacca

SEQ ID NO: 844851 - RNA, 25 nt, Human
ugggauuacaggcaugagccaccau

SEQ ID NO: 844852 - RNA, 21 nt, Human
ugggauuagaggugcccacca

SEQ ID NO: 844853 - RNA, 22 nt, Human
ugggauuagaggugcccaccau

SEQ ID NO: 844854 - RNA, 24 nt, Human
ugguacaaccuccacucacugcaa

SEQ ID NO: 844855 - RNA, 18 nt, Human
uuaguggagacgggguuu

SEQ ID NO: 844856 - RNA, 22 nt, Human
uuaguggagacgggguuucacc

SEQ ID NO: 844857 - RNA, 24 nt, Human
uuaguggagacgggguuucaccau

SEQ ID NO: 844858 - RNA, 25 nt, Human
uucaagcaauucuccugcccucagc

SEQ ID NO: 844859 - RNA, 23 nt, Human
uuguauuuuuaguggagacgggg

SEQ ID NO: 844860 - RNA, 24 nt, Human
uuucaccauguuggccaggcuggu

SEQ ID NO: 844861 - RNA, 24 nt, Human
uuuuuaguggagacgggguuucac

SEQ ID NO: 844862 - RNA, 20 nt, Human
uuuuuguauuuuuaguggag

SEQ ID NO: 844863 - RNA, 27 nt, Human
uuuuuuuuuuugagauggagugucuca

SEQ ID NO: 844864 - RNA, 22 nt, Human
uuuuuuuuuuuuuugagaugga

SEQ ID NO: 844865 - RNA, 25 nt, Human
aaccagaucacacaccuuuauuauc

SEQ ID NO: 844866 - RNA, 22 nt, Human
aagccccgcagucaggccagga

SEQ ID NO: 844867 - RNA, 21 nt, Human
acacugggcuccgcugcgugg

SEQ ID NO: 844868 - RNA, 24 nt, Human
acagcagcggcgcccgcuccuucc

SEQ ID NO: 844869 - RNA, 18 nt, Human
accugguccugcacucac

SEQ ID NO: 844870 - RNA, 21 nt, Human
accugguccugcacucacucc

SEQ ID NO: 844871 - RNA, 23 nt, Human
agaaaucccucccuccccccgcc

SEQ ID NO: 844872 - RNA, 24 nt, Human
agaaaucccucccuccccccgccc

SEQ ID NO: 844873 - RNA, 25 nt, Human
agaaaucccucccuccccccgcccc

SEQ ID NO: 844874 - RNA, 22 nt, Human
auaagaaaucccucccuccccc

SEQ ID NO: 844875 - RNA, 20 nt, Human
caaaccagaucacacaccuu

SEQ ID NO: 844876 - RNA, 22 nt, Human
cacaccuuuauuauccucaaaa

SEQ ID NO: 844877 - RNA, 19 nt, Human
cacccggggccgcgcggga

SEQ ID NO: 844878 - RNA, 28 nt, Human
cagacaguggcagcgaaagcggcuccuu

SEQ ID NO: 844879 - RNA, 22 nt, Human
cagcagcggcgcccgcuccuuc

SEQ ID NO: 844880 - RNA, 26 nt, Human
cagcagcggcgcccgcuccuucccau

SEQ ID NO: 844881 - RNA, 22 nt, Human
caggcauccuccucgagcucgu

SEQ ID NO: 844882 - RNA, 21 nt, Human
caggugccgccagcgucacuc

SEQ ID NO: 844883 - RNA, 19 nt, Human
ccccccgccccuccccgca

SEQ ID NO: 844884 - RNA, 23 nt, Human
cccccgccccuccccgcaguccc

SEQ ID NO: 844885 - RNA, 21 nt, Human
ccccgccccuccccgcagucc

SEQ ID NO: 844886 - RNA, 21 nt, Human
ccccgggcccgcgccacacuc

SEQ ID NO: 844887 - RNA, 24 nt, Human
cccgcagucaggccaggaguccgc

SEQ ID NO: 844888 - RNA, 19 nt, Human
cccguggcaggucucaagu

SEQ ID NO: 844889 - RNA, 25 nt, Human
ccgccagcgucacucggggacccgc

SEQ ID NO: 844890 - RNA, 19 nt, Human
ccgccccuccccgcagucc

SEQ ID NO: 844891 - RNA, 18 nt, Human
ccgggggcugcccguggc

SEQ ID NO: 844892 - RNA, 21 nt, Human
ccuccccccgccccuccccgc

SEQ ID NO: 844893 - RNA, 20 nt, Human
ccucccuccccccgccccuc

SEQ ID NO: 844894 - RNA, 28 nt, Human
ccuugcaccgggcccaggcauccuccuc

SEQ ID NO: 844895 - RNA, 20 nt, Human
cggcccgggggagcagacag

SEQ ID NO: 844896 - RNA, 18 nt, Human
cgggauaagaaaucccuc

SEQ ID NO: 844897 - RNA, 21 nt, Human
cggggacccgcggccgggggc

SEQ ID NO: 844898 - RNA, 21 nt, Human
cgguggggcccggggcgccgg

SEQ ID NO: 844899 - RNA, 25 nt, Human
cuccccccgccccuccccgcagucc

SEQ ID NO: 844900 - RNA, 19 nt, Human
cuccgagcgcugggcugga

SEQ ID NO: 844901 - RNA, 21 nt, Human
cuccuucccauggcgccggcg

SEQ ID NO: 844902 - RNA, 23 nt, Human
cuugcaccgggcccaggcauccu

SEQ ID NO: 844903 - RNA, 19 nt, Human
gagagggggaaccuugcac

SEQ ID NO: 844904 - RNA, 19 nt, Human
gcagcgaaagcggcuccga

SEQ ID NO: 844905 - RNA, 20 nt, Human
gcggcggcacgggcggcggg

SEQ ID NO: 844906 - RNA, 23 nt, Human
ggcggcggcacgggcggcggguc

SEQ ID NO: 844907 - RNA, 20 nt, Human
ggcggcggguccucagacgc

SEQ ID NO: 844908 - RNA, 18 nt, Human
gggcccggggcgccgggc

SEQ ID NO: 844909 - RNA, 19 nt, Human
gggcuccgcugcguggccc

SEQ ID NO: 844910 - RNA, 18 nt, Human
ggggagcagacaguggca

SEQ ID NO: 844911 - RNA, 22 nt, Human
gggggaggcggcggcggcccgg

SEQ ID NO: 844912 - RNA, 21 nt, Human
uaaaaagccccgcagucaggc

SEQ ID NO: 844913 - RNA, 20 nt, Human
uauccucaaaauguaacaaa

SEQ ID NO: 844914 - RNA, 18 nt, Human
ucacccggggccgcgcgg

SEQ ID NO: 844915 - RNA, 23 nt, Human
ucacccggggccgcgcgggaccu

SEQ ID NO: 844916 - RNA, 22 nt, Human
ucaggccaggaguccgccggug

SEQ ID NO: 844917 - RNA, 24 nt, Human
ucaggccaggaguccgccgguggg

SEQ ID NO: 844918 - RNA, 22 nt, Human
uccacagcugcgggugagaggg

SEQ ID NO: 844919 - RNA, 20 nt, Human
ucccucccuccccccgcccc

SEQ ID NO: 844920 - RNA, 23 nt, Human
uccgcuuccuccucuccacagcu

SEQ ID NO: 844921 - RNA, 19 nt, Human
uccuccucuccacagcugc

SEQ ID NO: 844922 - RNA, 20 nt, Human
ucucaagucgugcgcgcgcc

SEQ ID NO: 844923 - RNA, 18 nt, Human
uggccccgggcccgcgcc

SEQ ID NO: 844924 - RNA, 21 nt, Human
uggcccggggcgagcagcgcg

SEQ ID NO: 844925 - RNA, 20 nt, Human
uucccauggcgccggcgggc

SEQ ID NO: 844926 - RNA, 19 nt, Human
uuccgcuuccuccucucca

SEQ ID NO: 844927 - RNA, 23 nt, Human
uuuuuuuuuuuuuuuuucaccaa

SEQ ID NO: 844928 - RNA, 18 nt, Human
aaaaguucuagggcgggg

SEQ ID NO: 844929 - RNA, 22 nt, Human
aaacccccaggccccagacccc

SEQ ID NO: 844930 - RNA, 19 nt, Human
aacacagucaccuuuggca

SEQ ID NO: 844931 - RNA, 19 nt, Human
aaccagcagccccgggccc

SEQ ID NO: 844932 - RNA, 18 nt, Human
aaccccagcccucggccg

SEQ ID NO: 844933 - RNA, 18 nt, Human
acagcggggagaaagagc

SEQ ID NO: 844934 - RNA, 18 nt, Human
acuugugcccagggaagg

SEQ ID NO: 844935 - RNA, 25 nt, Human
agaaagggaauuugggggaggggga

SEQ ID NO: 844936 - RNA, 18 nt, Human
agacaagauaaaaaccug

SEQ ID NO: 844937 - RNA, 23 nt, Human
agaggagcccccagaaccaagcc

SEQ ID NO: 844938 - RNA, 19 nt, Human
agccacggccacuacccag

SEQ ID NO: 844939 - RNA, 18 nt, Human
aggagaaagggaauuugg

SEQ ID NO: 844940 - RNA, 22 nt, Human
aggagaaagggaauuuggggga

SEQ ID NO: 844941 - RNA, 19 nt, Human
aggcagaauccggcauauc

SEQ ID NO: 844942 - RNA, 19 nt, Human
aggcaggcacuucuguggg

SEQ ID NO: 844943 - RNA, 21 nt, Human
agggagaagccacacugagcc

SEQ ID NO: 844944 - RNA, 23 nt, Human
agggagaagccacacugagccug

SEQ ID NO: 844945 - RNA, 23 nt, Human
caaaacccccaggccccagaccc

SEQ ID NO: 844946 - RNA, 20 nt, Human
caaagugucacgacacaaaa

SEQ ID NO: 844947 - RNA, 24 nt, Human
caaagugucacgacacaaaacccc

SEQ ID NO: 844948 - RNA, 19 nt, Human
caaguccugggaguccccc

SEQ ID NO: 844949 - RNA, 19 nt, Human
cacaaaacccccaggcccc

SEQ ID NO: 844950 - RNA, 26 nt, Human
cacaaaacccccaggccccagacccc

SEQ ID NO: 844951 - RNA, 22 nt, Human
cacuucuguggguaacuggggg

SEQ ID NO: 844952 - RNA, 22 nt, Human
cagaaccaagccggugcucccc

SEQ ID NO: 844953 - RNA, 21 nt, Human
cagcagccccgggcccucaug

SEQ ID NO: 844954 - RNA, 20 nt, Human
cagcuugugacaacuguccu

SEQ ID NO: 844955 - RNA, 18 nt, Human
ccaggccccagaccccac

SEQ ID NO: 844956 - RNA, 19 nt, Human
ccaggccccagaccccacc

SEQ ID NO: 844957 - RNA, 19 nt, Human
ccagggaagggaaauuuaa

SEQ ID NO: 844958 - RNA, 22 nt, Human
cccaggccccagaccccaccuc

SEQ ID NO: 844959 - RNA, 21 nt, Human
cccccaggccccagaccccac

SEQ ID NO: 844960 - RNA, 22 nt, Human
cccccaggccccagaccccacc

SEQ ID NO: 844961 - RNA, 20 nt, Human
ccgggcccuccuucggcggc

SEQ ID NO: 844962 - RNA, 18 nt, Human
ccucacugcaaaaacggg

SEQ ID NO: 844963 - RNA, 23 nt, Human
ccucccaaccagcagccccgggc

SEQ ID NO: 844964 - RNA, 21 nt, Human
ccugggaguccccccccacuc

SEQ ID NO: 844965 - RNA, 21 nt, Human
cgggcccucaugaggcacuug

SEQ ID NO: 844966 - RNA, 19 nt, Human
cuaaguggaaccccagccc

SEQ ID NO: 844967 - RNA, 19 nt, Human
cuagagcccagccccaggc

SEQ ID NO: 844968 - RNA, 21 nt, Human
cuagggcgggggucagggaga

SEQ ID NO: 844969 - RNA, 18 nt, Human
cuccuagagcccagcccc

SEQ ID NO: 844970 - RNA, 21 nt, Human
gacacaaaacccccaggcccc

SEQ ID NO: 844971 - RNA, 20 nt, Human
gagcaggaggagaaagggaa

SEQ ID NO: 844972 - RNA, 20 nt, Human
gagccacggccacuacccag

SEQ ID NO: 844973 - RNA, 20 nt, Human
gagggaccgggcccuccuuc

SEQ ID NO: 844974 - RNA, 23 nt, Human
gaguccccccccacucagggcac

SEQ ID NO: 844975 - RNA, 20 nt, Human
gcacagcggggagaaagagc

SEQ ID NO: 844976 - RNA, 23 nt, Human
gccacacugagccuggagggacc

SEQ ID NO: 844977 - RNA, 20 nt, Human
gcccggcccucagccaggcu

SEQ ID NO: 844978 - RNA, 18 nt, Human
gccuccucacugcaaaaa

SEQ ID NO: 844979 - RNA, 25 nt, Human
gccuccucacugcaaaaacggggau

SEQ ID NO: 844980 - RNA, 21 nt, Human
gccuggggggcccgggacaca

SEQ ID NO: 844981 - RNA, 30 nt, Human
ggaccgggcccuccuucggcggcagaaaaa

SEQ ID NO: 844982 - RNA, 23 nt, Human
ggagaagccacacugagccugga

SEQ ID NO: 844983 - RNA, 27 nt, Human
ggaggagaaagggaauuugggggaggg

SEQ ID NO: 844984 - RNA, 22 nt, Human
ggaggcuugcccggcccucagc

SEQ ID NO: 844985 - RNA, 22 nt, Human
ggaguccccccccacucagcuu

SEQ ID NO: 844986 - RNA, 24 nt, Human
gggagggggagcaguuuggggugg

SEQ ID NO: 844987 - RNA, 21 nt, Human
gggcgggggucagggagaagc

SEQ ID NO: 844988 - RNA, 22 nt, Human
ggggagggggagcaguuugggg

SEQ ID NO: 844989 - RNA, 20 nt, Human
gggggaggcacagcggggag

SEQ ID NO: 844990 - RNA, 26 nt, Human
ggggggcccgggacacaggaguuuca

SEQ ID NO: 844991 - RNA, 22 nt, Human
guggaaucuccuugagacaaag

SEQ ID NO: 844992 - RNA, 20 nt, Human
uaacugggggaggcacagcg

SEQ ID NO: 844993 - RNA, 18 nt, Human
uaagacaagauaaaaacc

SEQ ID NO: 844994 - RNA, 20 nt, Human
uaagacaagauaaaaaccug

SEQ ID NO: 844995 - RNA, 21 nt, Human
uaaguggaaccccagcccucg

SEQ ID NO: 844996 - RNA, 18 nt, Human
ucagaaaaggcacuggca

SEQ ID NO: 844997 - RNA, 21 nt, Human
ucaggggaggcuugcccggcc

SEQ ID NO: 844998 - RNA, 22 nt, Human
uccgccuggggggcccgggaca

SEQ ID NO: 844999 - RNA, 22 nt, Human
uccuucggcggcagaaaacaca

SEQ ID NO: 845000 - RNA, 21 nt, Human
ucuccuagagcccagccccag

SEQ ID NO: 845001 - RNA, 18 nt, Human
ugagccuggagggaccgg

SEQ ID NO: 845002 - RNA, 18 nt, Human
ugaggcacuugugcccag

SEQ ID NO: 845003 - RNA, 26 nt, Human
uggaaccccagcccucggccggccuc

SEQ ID NO: 845004 - RNA, 21 nt, Human
uggcagggaaggguuuuuucc

SEQ ID NO: 845005 - RNA, 21 nt, Human
ugggcaggcagagagugaacu

SEQ ID NO: 845006 - RNA, 19 nt, Human
uggggugggacuggguccc

SEQ ID NO: 845007 - RNA, 19 nt, Human
uggggugggacuggguccc

SEQ ID NO: 845008 - RNA, 21 nt, Human
ugucacgacacaaaaccccca

SEQ ID NO: 845009 - RNA, 22 nt, Human
uguuagaggagcccccagaacc

SEQ ID NO: 845010 - RNA, 24 nt, Human
uucuguggguaacugggggaggca

SEQ ID NO: 845011 - RNA, 19 nt, Human
uugagacaaagugucacga

SEQ ID NO: 845012 - RNA, 20 nt, Human
uuggggucuccuagagccca

SEQ ID NO: 845013 - RNA, 19 nt, Human
uuuuuuuuuuuuuuuugcg

SEQ ID NO: 845014 - RNA, 19 nt, Human
uuuuuuuuuuuuuuuuugc

SEQ ID NO: 845015 - RNA, 20 nt, Human
uuuuuuuuuuuuuuuuuugg

SEQ ID NO: 845016 - RNA, 24 nt, Human
aaagugcugggauuacaggcauga

SEQ ID NO: 845017 - RNA, 25 nt, Human
aagcgauucucccaccucagccucu

SEQ ID NO: 845018 - RNA, 24 nt, Human
aaguagcuggcauuacagguaugu

SEQ ID NO: 845019 - RNA, 18 nt, Human
aagugcugggauuacagg

SEQ ID NO: 845020 - RNA, 19 nt, Human
aagugcugggauuacaggc

SEQ ID NO: 845021 - RNA, 21 nt, Human
aagugcugggauuacaggcau

SEQ ID NO: 845022 - RNA, 26 nt, Human
aagugcugggauuacaggcaugagcc

SEQ ID NO: 845023 - RNA, 19 nt, Human
aagugcugggauuacaggu

SEQ ID NO: 845024 - RNA, 23 nt, Human
aagugcugggauuacagguguga

SEQ ID NO: 845025 - RNA, 26 nt, Human
aagugcugggauuacaggugugagcc

SEQ ID NO: 845026 - RNA, 24 nt, Human
aauuuuguauuuuuaguagagacg

SEQ ID NO: 845027 - RNA, 22 nt, Human
acaccuaacaccugcagccaca

SEQ ID NO: 845028 - RNA, 21 nt, Human
acaggcacucaucaccaugcc

SEQ ID NO: 845029 - RNA, 18 nt, Human
acaggguuucaccauguu

SEQ ID NO: 845030 - RNA, 23 nt, Human
acaggguuucaccauguuggcca

SEQ ID NO: 845031 - RNA, 24 nt, Human
acaggguuucaccauguuggccag

SEQ ID NO: 845032 - RNA, 18 nt, Human
accauguuggccaggcug

SEQ ID NO: 845033 - RNA, 25 nt, Human
acccgccuuggccucccgaagugcu

SEQ ID NO: 845034 - RNA, 19 nt, Human
accucagccucuugaguag

SEQ ID NO: 845035 - RNA, 23 nt, Human
accucggccucccaaagugcugg

SEQ ID NO: 845036 - RNA, 20 nt, Human
acgggguuucaccauguugg

SEQ ID NO: 845037 - RNA, 21 nt, Human
acgggguuucaccauguuggu

SEQ ID NO: 845038 - RNA, 23 nt, Human
acgggguuucaccauguuggucc

SEQ ID NO: 845039 - RNA, 25 nt, Human
acgggguuucaccauguuggucccg

SEQ ID NO: 845040 - RNA, 27 nt, Human
acucuguugcccaggcuggaaugccuc

SEQ ID NO: 845041 - RNA, 24 nt, Human
agcgauucucccaccucagccucu

SEQ ID NO: 845042 - RNA, 24 nt, Human
aggugauccacccaccucggccuc

SEQ ID NO: 845043 - RNA, 19 nt, Human
auuacagguaugugccacc

SEQ ID NO: 845044 - RNA, 24 nt, Human
caaagugcugggauuacaggcaug

SEQ ID NO: 845045 - RNA, 23 nt, Human
caaccuccaccucccggguucaa

SEQ ID NO: 845046 - RNA, 22 nt, Human
caagcaauucuccugccucagc

SEQ ID NO: 845047 - RNA, 19 nt, Human
cacagccaccucugccucc

SEQ ID NO: 845048 - RNA, 23 nt, Human
cacagccaccucugccucccggg

SEQ ID NO: 845049 - RNA, 18 nt, Human
caccauguuggccaggcu

SEQ ID NO: 845050 - RNA, 22 nt, Human
caccauguuggccaggcuguuc

SEQ ID NO: 845051 - RNA, 24 nt, Human
caccauguuggccaggcuguucuc

SEQ ID NO: 845052 - RNA, 27 nt, Human
caccauguuggccaggcuguucucaaa

SEQ ID NO: 845053 - RNA, 22 nt, Human
cacccaccucggccucccaaag

SEQ ID NO: 845054 - RNA, 23 nt, Human
cacccaccucggccucccaaagu

SEQ ID NO: 845055 - RNA, 24 nt, Human
cacccgccuuggccucccgaagug

SEQ ID NO: 845056 - RNA, 21 nt, Human
caccgcaaccuccaccucccg

SEQ ID NO: 845057 - RNA, 23 nt, Human
caccgcaaccuccaccucccggg

SEQ ID NO: 845058 - RNA, 23 nt, Human
caccucagccucuugaguagcuu

SEQ ID NO: 845059 - RNA, 24 nt, Human
caccucccuucacuccuuucaguc

SEQ ID NO: 845060 - RNA, 19 nt, Human
caccucugccucccggguu

SEQ ID NO: 845061 - RNA, 22 nt, Human
cacucuguugcccaggcuggaa

SEQ ID NO: 845062 - RNA, 24 nt, Human
caggguuucaccauguuggccagg

SEQ ID NO: 845063 - RNA, 24 nt, Human
caggugugagccaccgugcccggc

SEQ ID NO: 845064 - RNA, 24 nt, Human
cauguuggccaggcuguucucaaa

SEQ ID NO: 845065 - RNA, 19 nt, Human
cauuacagguaugugccac

SEQ ID NO: 845066 - RNA, 23 nt, Human
ccaaagugcugggauuacaggca

SEQ ID NO: 845067 - RNA, 24 nt, Human
ccaaagugcugggauuacaggcau

SEQ ID NO: 845068 - RNA, 21 nt, Human
ccacagagucuccaucugaca

SEQ ID NO: 845069 - RNA, 23 nt, Human
ccacagagucuccaucugacaga

SEQ ID NO: 845070 - RNA, 20 nt, Human
ccaccacgcccaguuaauuu

SEQ ID NO: 845071 - RNA, 23 nt, Human
ccaccucagccucuugaguagcu

SEQ ID NO: 845072 - RNA, 26 nt, Human
ccaccucccggguucaagcaauucuu

SEQ ID NO: 845073 - RNA, 19 nt, Human
ccaucugacagaugagcug

SEQ ID NO: 845074 - RNA, 24 nt, Human
cccaaagugcugggauuacaggca

SEQ ID NO: 845075 - RNA, 23 nt, Human
cccaaguagcuggcauuacaggu

SEQ ID NO: 845076 - RNA, 24 nt, Human
cccagaccaacuaacaccuaacac

SEQ ID NO: 845077 - RNA, 22 nt, Human
cccaguuaauuuuguauuuuua

SEQ ID NO: 845078 - RNA, 23 nt, Human
cccccagaccaacuaacaccuaa

SEQ ID NO: 845079 - RNA, 24 nt, Human
cccgaagugcugggauuacaggug

SEQ ID NO: 845080 - RNA, 21 nt, Human
cccgcugaucucgaauuccca

SEQ ID NO: 845081 - RNA, 23 nt, Human
cccggguucaagcaauucuccug

SEQ ID NO: 845082 - RNA, 20 nt, Human
cccggguucaagcgauucuc

SEQ ID NO: 845083 - RNA, 23 nt, Human
cccuguccuuccacagagucucc

SEQ ID NO: 845084 - RNA, 23 nt, Human
ccgaagugcugggauuacaggug

SEQ ID NO: 845085 - RNA, 24 nt, Human
ccgaagugcugggauuacaggugu

SEQ ID NO: 845086 - RNA, 18 nt, Human
ccgcaaccuccaccuccc

SEQ ID NO: 845087 - RNA, 23 nt, Human
ccgcaaccuccaccucccggguu

SEQ ID NO: 845088 - RNA, 24 nt, Human
ccgcaaccuccaccucccggguuc

SEQ ID NO: 845089 - RNA, 22 nt, Human
ccucacucuguugcccaggcug

SEQ ID NO: 845090 - RNA, 24 nt, Human
ccucacucuguugcccaggcugga

SEQ ID NO: 845091 - RNA, 24 nt, Human
ccucccggguucaagcaauucucc

SEQ ID NO: 845092 - RNA, 24 nt, Human
ccucccggguucaagcgauucucc

SEQ ID NO: 845093 - RNA, 22 nt, Human
ccucccuucacuccuuucaguc

SEQ ID NO: 845094 - RNA, 24 nt, Human
ccugaccucaggugauccacccac

SEQ ID NO: 845095 - RNA, 24 nt, Human
ccugccucagccuucccaaguagc

SEQ ID NO: 845096 - RNA, 24 nt, Human
cgaagugcugggauuacaggugug

SEQ ID NO: 845097 - RNA, 24 nt, Human
cgggguuucaccauguuggucccg

SEQ ID NO: 845098 - RNA, 24 nt, Human
cucacagccaccucugccucccgg

SEQ ID NO: 845099 - RNA, 24 nt, Human
cucaccgcaaccuccaccucccgg

SEQ ID NO: 845100 - RNA, 19 nt, Human
cucaucugucacccccaga

SEQ ID NO: 845101 - RNA, 23 nt, Human
cucuuguugcccaggcuggagcg

SEQ ID NO: 845102 - RNA, 24 nt, Human
cugccucagccuucccaaguagcu

SEQ ID NO: 845103 - RNA, 24 nt, Human
cuugaguagcuuggacuacaggca

SEQ ID NO: 845104 - RNA, 24 nt, Human
cuugcucuuguugcccaggcugga

SEQ ID NO: 845105 - RNA, 20 nt, Human
gacccacccgccuuggccuc

SEQ ID NO: 845106 - RNA, 24 nt, Human
gaccucaggugauccacccaccuc

SEQ ID NO: 845107 - RNA, 24 nt, Human
gacuacaggcacucaucaccaugc

SEQ ID NO: 845108 - RNA, 23 nt, Human
gagacgggguuucaccauguugg

SEQ ID NO: 845109 - RNA, 24 nt, Human
gagacgggguuucaccauguuggu

SEQ ID NO: 845110 - RNA, 21 nt, Human
gagcugcccgaggguccugga

SEQ ID NO: 845111 - RNA, 18 nt, Human
gauuacaggcaugagcca

SEQ ID NO: 845112 - RNA, 22 nt, Human
gauuacaggcaugagccacugc

SEQ ID NO: 845113 - RNA, 23 nt, Human
gauuacaggcaugagccacugca

SEQ ID NO: 845114 - RNA, 18 nt, Human
gauuacaggugugagcca

SEQ ID NO: 845115 - RNA, 21 nt, Human
gauuacaggugugagccaccg

SEQ ID NO: 845116 - RNA, 24 nt, Human
gauuacaggugugagccaccgugc

SEQ ID NO: 845117 - RNA, 26 nt, Human
gcaauucuccugccucagccuuccca

SEQ ID NO: 845118 - RNA, 22 nt, Human
gccuuggccucccgaagugcug

SEQ ID NO: 845119 - RNA, 21 nt, Human
gcucuuguugcccaggcugga

SEQ ID NO: 845120 - RNA, 19 nt, Human
gcuggagcgcaauggcacg

SEQ ID NO: 845121 - RNA, 22 nt, Human
ggacuacaggcacucaucacca

SEQ ID NO: 845122 - RNA, 22 nt, Human
ggauuacaggcaugagccacug

SEQ ID NO: 845123 - RNA, 21 nt, Human
gggguuucaccauguuggucc

SEQ ID NO: 845124 - RNA, 22 nt, Human
ggguuucaccauguuggccagg

SEQ ID NO: 845125 - RNA, 23 nt, Human
guagagacgggguuucaccaugu

SEQ ID NO: 845126 - RNA, 24 nt, Human
gugacccacccgccuuggccuccc

SEQ ID NO: 845127 - RNA, 24 nt, Human
gugauccacccaccucggccuccc

SEQ ID NO: 845128 - RNA, 22 nt, Human
uaauuuuuuuauuuuuagcaga

SEQ ID NO: 845129 - RNA, 22 nt, Human
uacaggcaugagccacugcacc

SEQ ID NO: 845130 - RNA, 24 nt, Human
uacagguaugugccaccacgccca

SEQ ID NO: 845131 - RNA, 23 nt, Human
uacaggugugagccaccgugccc

SEQ ID NO: 845132 - RNA, 22 nt, Human
uagagacgggguuucaccaugu

SEQ ID NO: 845133 - RNA, 24 nt, Human
uagcagacacaggguuucaccaug

SEQ ID NO: 845134 - RNA, 24 nt, Human
uaguagagacgggguuucaccaug

SEQ ID NO: 845135 - RNA, 26 nt, Human
uaguagagacgggguuucaccauguu

SEQ ID NO: 845136 - RNA, 19 nt, Human
uaugugccaccacgcccag

SEQ ID NO: 845137 - RNA, 21 nt, Human
uaugugccaccacgcccaguu

SEQ ID NO: 845138 - RNA, 24 nt, Human
ucacagccaccucugccucccggg

SEQ ID NO: 845139 - RNA, 24 nt, Human
ucaccgcaaccuccaccucccggg

SEQ ID NO: 845140 - RNA, 27 nt, Human
ucaccgcaaccuccaccucccggguuc

SEQ ID NO: 845141 - RNA, 21 nt, Human
ucagcaccucccuucacuccu

SEQ ID NO: 845142 - RNA, 20 nt, Human
ucaggugauccacccaccuc

SEQ ID NO: 845143 - RNA, 23 nt, Human
ucaugugacccacccgccuuggc

SEQ ID NO: 845144 - RNA, 24 nt, Human
ucccaaagugcugggauuacaggc

SEQ ID NO: 845145 - RNA, 26 nt, Human
ucccaaccucaugugacccacccgcc

SEQ ID NO: 845146 - RNA, 24 nt, Human
ucccaaguagcuggcauuacaggu

SEQ ID NO: 845147 - RNA, 18 nt, Human
uccccuguccuuccacaa

SEQ ID NO: 845148 - RNA, 19 nt, Human
ucccgaagugcugggauua

SEQ ID NO: 845149 - RNA, 23 nt, Human
ucccgaagugcugggauuacagg

SEQ ID NO: 845150 - RNA, 24 nt, Human
ucccgaagugcugggauuacaggu

SEQ ID NO: 845151 - RNA, 21 nt, Human
ucccggguucaagcaauucuc

SEQ ID NO: 845152 - RNA, 24 nt, Human
ucccggguucaagcaauucuccug

SEQ ID NO: 845153 - RNA, 21 nt, Human
ucccggguucaagcgauucuc

SEQ ID NO: 845154 - RNA, 23 nt, Human
ucccggguucaagcgauucuccc

SEQ ID NO: 845155 - RNA, 18 nt, Human
ucggccucccaaagugcu

SEQ ID NO: 845156 - RNA, 24 nt, Human
ucucccaccucagccucuugagua

SEQ ID NO: 845157 - RNA, 26 nt, Human
ucuccugccucagccuucccaaguag

SEQ ID NO: 845158 - RNA, 21 nt, Human
ucugcucaucugucaccccca

SEQ ID NO: 845159 - RNA, 18 nt, Human
ucuguugcccaggcugga

SEQ ID NO: 845160 - RNA, 24 nt, Human
ucuugaguagcuuggacuacaggc

SEQ ID NO: 845161 - RNA, 24 nt, Human
ucuugcucuuguugcccaggcugg

SEQ ID NO: 845162 - RNA, 25 nt, Human
ucuugcucuuguugcccaggcugga

SEQ ID NO: 845163 - RNA, 21 nt, Human
ugaccucaggugauccaccca

SEQ ID NO: 845164 - RNA, 24 nt, Human
ugaccucaggugauccacccaccu

SEQ ID NO: 845165 - RNA, 18 nt, Human
ugagacagagucuugcuc

SEQ ID NO: 845166 - RNA, 23 nt, Human
ugagacagagucuugcucuuguu

SEQ ID NO: 845167 - RNA, 24 nt, Human
ugauccacccaccucggccuccca

SEQ ID NO: 845168 - RNA, 26 nt, Human
ugcaccuggccuuuucuccauaauuc

SEQ ID NO: 845169 - RNA, 24 nt, Human
ugcccaggcuggagcgcaauggca

SEQ ID NO: 845170 - RNA, 25 nt, Human
ugccucagccuucccaaguagcugg

SEQ ID NO: 845171 - RNA, 24 nt, Human
ugcugggauuacaggugugagcca

SEQ ID NO: 845172 - RNA, 23 nt, Human
uggacuacaggcacucaucacca

SEQ ID NO: 845173 - RNA, 24 nt, Human
uggcacgaucucagcucaccgcaa

SEQ ID NO: 845174 - RNA, 22 nt, Human
uggcauuacagguaugugccac

SEQ ID NO: 845175 - RNA, 24 nt, Human
uggcauuacagguaugugccacca

SEQ ID NO: 845176 - RNA, 24 nt, Human
uggccaggcuguucucaaacuccu

SEQ ID NO: 845177 - RNA, 18 nt, Human
ugggauuacaggcaugag

SEQ ID NO: 845178 - RNA, 19 nt, Human
ugggauuacaggcaugagc

SEQ ID NO: 845179 - RNA, 21 nt, Human
ugggauuacaggcaugagcca

SEQ ID NO: 845180 - RNA, 22 nt, Human
ugggauuacaggcaugagccac

SEQ ID NO: 845181 - RNA, 22 nt, Human
ugggauuacaggcaugagccac

SEQ ID NO: 845182 - RNA, 24 nt, Human
ugggauuacaggcaugagccacug

SEQ ID NO: 845183 - RNA, 24 nt, Human
ugggauuacaggcaugagccacug

SEQ ID NO: 845184 - RNA, 18 nt, Human
ugggauuacaggugugag

SEQ ID NO: 845185 - RNA, 21 nt, Human
ugggauuacaggugugagcca

SEQ ID NO: 845186 - RNA, 22 nt, Human
ugggauuacaggugugagccac

SEQ ID NO: 845187 - RNA, 23 nt, Human
ugggauuacaggugugagccacc

SEQ ID NO: 845188 - RNA, 23 nt, Human
ugggauuacaggugugagccacc

SEQ ID NO: 845189 - RNA, 24 nt, Human
ugggauuacaggugugagccaccg

SEQ ID NO: 845190 - RNA, 25 nt, Human
ugugagccaccgugcccggccccau

SEQ ID NO: 845191 - RNA, 24 nt, Human
uuagcagacacaggguuucaccau

SEQ ID NO: 845192 - RNA, 18 nt, Human
uuaguagagacgggguuu

SEQ ID NO: 845193 - RNA, 22 nt, Human
uuaguagagacgggguuucacc

SEQ ID NO: 845194 - RNA, 24 nt, Human
uuaguagagacgggguuucaccau

SEQ ID NO: 845195 - RNA, 21 nt, Human
uucaagcaauucuccugccuc

SEQ ID NO: 845196 - RNA, 24 nt, Human
uucaagcaauucuccugccucagc

SEQ ID NO: 845197 - RNA, 23 nt, Human
uucaagcgauucucccaccucag

SEQ ID NO: 845198 - RNA, 24 nt, Human
uucaagcgauucucccaccucagc

SEQ ID NO: 845199 - RNA, 18 nt, Human
uuccacagagucuccauc

SEQ ID NO: 845200 - RNA, 21 nt, Human
uugcccaggcuggaaugccuc

SEQ ID NO: 845201 - RNA, 18 nt, Human
uugcccaggcuggagcgc

SEQ ID NO: 845202 - RNA, 23 nt, Human
uugcucuuguugcccaggcugga

SEQ ID NO: 845203 - RNA, 18 nt, Human
uuggccucccgaagugcu

SEQ ID NO: 845204 - RNA, 23 nt, Human
uuguauuuuuaguagagacgggg

SEQ ID NO: 845205 - RNA, 21 nt, Human
uuucaccauguuggccaggcu

SEQ ID NO: 845206 - RNA, 19 nt, Human
uuuuguauuuuuaguagag

SEQ ID NO: 845207 - RNA, 20 nt, Human
uuuuguauuuuuaguagaga

SEQ ID NO: 845208 - RNA, 24 nt, Human
uuuuuagcagacacaggguuucac

SEQ ID NO: 845209 - RNA, 24 nt, Human
uuuuuaguagagacgggguuucac

SEQ ID NO: 845210 - RNA, 20 nt, Human
uuuuuuuuuuugagacagag

SEQ ID NO: 845211 - RNA, 24 nt, Human
uuuuuuuuuuuugagacagagucu

SEQ ID NO: 845212 - RNA, 18 nt, Human
uuuuuuuuuuuuuuuuug

SEQ ID NO: 845213 - RNA, 20 nt, Human
aauugcuugaacccagaagg

SEQ ID NO: 845214 - RNA, 24 nt, Human
aauugcuugaacccagaaggcaga

SEQ ID NO: 845215 - RNA, 23 nt, Human
acacgcaacucacugacucaacc

SEQ ID NO: 845216 - RNA, 22 nt, Human
acagaguaagacuccaucaaaa

SEQ ID NO: 845217 - RNA, 19 nt, Human
accauuggaucaugaaagu

SEQ ID NO: 845218 - RNA, 22 nt, Human
accauuguacuccagccugggc

SEQ ID NO: 845219 - RNA, 24 nt, Human
accauuguacuccagccugggcga

SEQ ID NO: 845220 - RNA, 18 nt, Human
accuccugggccgcgcac

SEQ ID NO: 845221 - RNA, 18 nt, Human
acucaggagacuucccuc

SEQ ID NO: 845222 - RNA, 21 nt, Human
acuccagccugggcgacagag

SEQ ID NO: 845223 - RNA, 18 nt, Human
agacaaggaugaaggagg

SEQ ID NO: 845224 - RNA, 24 nt, Human
agacuccaucaaaagcgaagccaa

SEQ ID NO: 845225 - RNA, 22 nt, Human
agcauaagaggcgagaggaggg

SEQ ID NO: 845226 - RNA, 24 nt, Human
agccugggcgacagaguaagacuc

SEQ ID NO: 845227 - RNA, 19 nt, Human
aggaaugaaggaggugagg

SEQ ID NO: 845228 - RNA, 18 nt, Human
aggaggcugaggcagaga

SEQ ID NO: 845229 - RNA, 22 nt, Human
aggaugaaggaggggauguggg

SEQ ID NO: 845230 - RNA, 23 nt, Human
aggcagagaauugcuugaaccca

SEQ ID NO: 845231 - RNA, 24 nt, Human
aggcagagguagcagguggcugag

SEQ ID NO: 845232 - RNA, 23 nt, Human
aggcugaggcagagaauugcuug

SEQ ID NO: 845233 - RNA, 22 nt, Human
agggcggcggcggcggcggcgg

SEQ ID NO: 845234 - RNA, 18 nt, Human
agguccccgccacaaguu

SEQ ID NO: 845235 - RNA, 24 nt, Human
auuguacuccagccugggcgacag

SEQ ID NO: 845236 - RNA, 19 nt, Human
caacucacugacucaacca

SEQ ID NO: 845237 - RNA, 20 nt, Human
cacucaggagacuucccuca

SEQ ID NO: 845238 - RNA, 21 nt, Human
cagcccuuggggaguggggag

SEQ ID NO: 845239 - RNA, 19 nt, Human
cagcggcugcaggccuggc

SEQ ID NO: 845240 - RNA, 18 nt, Human
caggaggcugaggcagag

SEQ ID NO: 845241 - RNA, 21 nt, Human
caggcacgugccuagaaggcc

SEQ ID NO: 845242 - RNA, 18 nt, Human
caggccuggccgauugug

SEQ ID NO: 845243 - RNA, 24 nt, Human
caguuacucaggaggcugaggcag

SEQ ID NO: 845244 - RNA, 20 nt, Human
caugcccugugagcauaaga

SEQ ID NO: 845245 - RNA, 19 nt, Human
cauuguacuccagccuggg

SEQ ID NO: 845246 - RNA, 21 nt, Human
cauuguacuccagccugggcg

SEQ ID NO: 845247 - RNA, 22 nt, Human
cauuguacuccagccugggcga

SEQ ID NO: 845248 - RNA, 24 nt, Human
cauuguacuccagccugggcgaca

SEQ ID NO: 845249 - RNA, 20 nt, Human
ccauuguacuccagccuggg

SEQ ID NO: 845250 - RNA, 21 nt, Human
ccauuguacuccagccugggc

SEQ ID NO: 845251 - RNA, 22 nt, Human
ccauuguacuccagccugggcg

SEQ ID NO: 845252 - RNA, 23 nt, Human
ccauuguacuccagccugggcga

SEQ ID NO: 845253 - RNA, 24 nt, Human
ccauuguacuccagccugggcgac

SEQ ID NO: 845254 - RNA, 20 nt, Human
cccaggcuucucugucccuu

SEQ ID NO: 845255 - RNA, 18 nt, Human
cccauggccaugcucugc

SEQ ID NO: 845256 - RNA, 20 nt, Human
cccggcucgcgccgcggccg

SEQ ID NO: 845257 - RNA, 22 nt, Human
cccggcucgcgccgcggccgcg

SEQ ID NO: 845258 - RNA, 20 nt, Human
ccuccugguccucuuccaug

SEQ ID NO: 845259 - RNA, 22 nt, Human
ccugggcgacagaguaagacuc

SEQ ID NO: 845260 - RNA, 21 nt, Human
ccugugagcauaagaggcgag

SEQ ID NO: 845261 - RNA, 21 nt, Human
cgcaccauuguacuccagccu

SEQ ID NO: 845262 - RNA, 19 nt, Human
cggcggcagcggcugcagg

SEQ ID NO: 845263 - RNA, 22 nt, Human
cuaaccgaguucgagaccacag

SEQ ID NO: 845264 - RNA, 21 nt, Human
cugcaauuccaguuacucagg

SEQ ID NO: 845265 - RNA, 22 nt, Human
gaacccagaaggcagagguagc

SEQ ID NO: 845266 - RNA, 20 nt, Human
gaaccgaugugugacugaug

SEQ ID NO: 845267 - RNA, 18 nt, Human
gaaugaaggaggugaggg

SEQ ID NO: 845268 - RNA, 21 nt, Human
gacugaugaagguaggaaaga

SEQ ID NO: 845269 - RNA, 23 nt, Human
gagcauaagaggcgagaggaggg

SEQ ID NO: 845270 - RNA, 20 nt, Human
gcaccauuguacuccagccu

SEQ ID NO: 845271 - RNA, 23 nt, Human
gcggcagcggcugcaggccuggc

SEQ ID NO: 845272 - RNA, 21 nt, Human
gcggcggcagcggcugcaggc

SEQ ID NO: 845273 - RNA, 20 nt, Human
gcggcggcggcggcggcggc

SEQ ID NO: 845274 - RNA, 20 nt, Human
gcggcggcggcggcggcggc

SEQ ID NO: 845275 - RNA, 23 nt, Human
gcggcggcggcggcggcggcagc

SEQ ID NO: 845276 - RNA, 24 nt, Human
gcggcggcggcggcggcggcggca

SEQ ID NO: 845277 - RNA, 21 nt, Human
ggcagcggcugcaggccuggc

SEQ ID NO: 845278 - RNA, 20 nt, Human
ggcggcagcggcugcaggcc

SEQ ID NO: 845279 - RNA, 23 nt, Human
ggcggcggcggcggcagcggcug

SEQ ID NO: 845280 - RNA, 27 nt, Human
gggaguggggagguagccuugggggaa

SEQ ID NO: 845281 - RNA, 24 nt, Human
gggcggcggcggcggcggcggcgg

SEQ ID NO: 845282 - RNA, 18 nt, Human
gguccccgccacaaguuc

SEQ ID NO: 845283 - RNA, 22 nt, Human
ggucuaucaagcaccagcccuu

SEQ ID NO: 845284 - RNA, 24 nt, Human
guacuccagccugggcgacagagu

SEQ ID NO: 845285 - RNA, 24 nt, Human
guggcacacuaauggaggcgacca

SEQ ID NO: 845286 - RNA, 18 nt, Human
uaagaggcgagaggaggg

SEQ ID NO: 845287 - RNA, 21 nt, Human
uaccuccugggccgcgcaccc

SEQ ID NO: 845288 - RNA, 23 nt, Human
uacgaauagagugaacucaaaua

SEQ ID NO: 845289 - RNA, 21 nt, Human
uacgguggcacacuaauggag

SEQ ID NO: 845290 - RNA, 22 nt, Human
uacuccagccugggcgacagag

SEQ ID NO: 845291 - RNA, 21 nt, Human
uauccuggaggccaaagacag

SEQ ID NO: 845292 - RNA, 24 nt, Human
uccagccugggcgacagaguaaga

SEQ ID NO: 845293 - RNA, 19 nt, Human
ucccauggccaugcucugc

SEQ ID NO: 845294 - RNA, 23 nt, Human
ucccggcucgcgccgcggccgcg

SEQ ID NO: 845295 - RNA, 24 nt, Human
ucccugaguagggcggcggcggcg

SEQ ID NO: 845296 - RNA, 22 nt, Human
uccugggccgcgcacccgaccc

SEQ ID NO: 845297 - RNA, 23 nt, Human
uccugggccgcgcacccgacccu

SEQ ID NO: 845298 - RNA, 23 nt, Human
ucgcaccauuguacuccagccug

SEQ ID NO: 845299 - RNA, 18 nt, Human
ucucaccaaaagugaagc

SEQ ID NO: 845300 - RNA, 18 nt, Human
ucucauccccucuuccca

SEQ ID NO: 845301 - RNA, 22 nt, Human
ucucugucccuucaccggacua

SEQ ID NO: 845302 - RNA, 23 nt, Human
ugaaacaccauuggaucaugaaa

SEQ ID NO: 845303 - RNA, 19 nt, Human
ugaaggaggugaggguggc

SEQ ID NO: 845304 - RNA, 21 nt, Human
ugaagguaggaaagaagggaa

SEQ ID NO: 845305 - RNA, 18 nt, Human
ugagagggacaggucccc

SEQ ID NO: 845306 - RNA, 23 nt, Human
ugagcuccuccugguccucuucc

SEQ ID NO: 845307 - RNA, 23 nt, Human
ugaggcagagaauugcuugaacc

SEQ ID NO: 845308 - RNA, 23 nt, Human
ugaggcagagaauugcuugaacc

SEQ ID NO: 845309 - RNA, 24 nt, Human
ugaggcagagaauugcuugaaccc

SEQ ID NO: 845310 - RNA, 18 nt, Human
ugcccugugagcauaaga

SEQ ID NO: 845311 - RNA, 21 nt, Human
ugcccugugagcauaagaggc

SEQ ID NO: 845312 - RNA, 25 nt, Human
ugcucugcucugaccugcaauucca

SEQ ID NO: 845313 - RNA, 22 nt, Human
ugggcaaaggccacucaccaaa

SEQ ID NO: 845314 - RNA, 25 nt, Human
ugguuggucaggggcugugcaccuc

SEQ ID NO: 845315 - RNA, 22 nt, Human
uguacuccagccugggcgacag

SEQ ID NO: 845316 - RNA, 24 nt, Human
uguacuccagccugggcgacagag

SEQ ID NO: 845317 - RNA, 18 nt, Human
ugugucaccaugcccugu

SEQ ID NO: 845318 - RNA, 24 nt, Human
uucgcaccauuguacuccagccug

SEQ ID NO: 845319 - RNA, 19 nt, Human
acccaccccuacccuucgc

SEQ ID NO: 845320 - RNA, 22 nt, Human
agaggcaggaagaggcaguaga

SEQ ID NO: 845321 - RNA, 22 nt, Human
agcuaugacccuucucuccccu

SEQ ID NO: 845322 - RNA, 21 nt, Human
aggagcugaggcguguacaag

SEQ ID NO: 845323 - RNA, 21 nt, Human
aggcaggaagaggcaguaggg

SEQ ID NO: 845324 - RNA, 21 nt, Human
aguagagggaaaugacauuug

SEQ ID NO: 845325 - RNA, 20 nt, Human
aucacuguccuucaugcacu

SEQ ID NO: 845326 - RNA, 25 nt, Human
cagaacagaaaagcagguugggaca

SEQ ID NO: 845327 - RNA, 23 nt, Human
ccagaaaggcuuacuuuaugaua

SEQ ID NO: 845328 - RNA, 21 nt, Human
cccaccccuacccuucgccca

SEQ ID NO: 845329 - RNA, 25 nt, Human
cccaccccuacccuucgcccagaca

SEQ ID NO: 845330 - RNA, 22 nt, Human
cccagacagacgucggaucuau

SEQ ID NO: 845331 - RNA, 23 nt, Human
ccccacggccuccccacaucacu

SEQ ID NO: 845332 - RNA, 19 nt, Human
ccccuacccaccccuaccc

SEQ ID NO: 845333 - RNA, 21 nt, Human
cccuacccaccccuacccuuc

SEQ ID NO: 845334 - RNA, 24 nt, Human
ccuacccaccccuacccuucgccc

SEQ ID NO: 845335 - RNA, 20 nt, Human
ccucuguggaugugggcagg

SEQ ID NO: 845336 - RNA, 25 nt, Human
cgccccuacccaccccuacccuucg

SEQ ID NO: 845337 - RNA, 19 nt, Human
cuguggaugugggcagggu

SEQ ID NO: 845338 - RNA, 20 nt, Human
gaggcguguacaagccauga

SEQ ID NO: 845339 - RNA, 23 nt, Human
gccccacggccuccccacaucac

SEQ ID NO: 845340 - RNA, 20 nt, Human
ggggugggucauggagucca

SEQ ID NO: 845341 - RNA, 26 nt, Human
uaacagaacagaaaagcagguuggga

SEQ ID NO: 845342 - RNA, 23 nt, Human
uaugcuaacagaacagaaaagca

SEQ ID NO: 845343 - RNA, 20 nt, Human
uaugcugcaccagggguggg

SEQ ID NO: 845344 - RNA, 20 nt, Human
uccccacaucacuguccuuc

SEQ ID NO: 845345 - RNA, 21 nt, Human
ucccgccccuacccaccccua

SEQ ID NO: 845346 - RNA, 21 nt, Human
ugggacaagauacagacuuug

SEQ ID NO: 845347 - RNA, 23 nt, Human
ugggacaagauacagacuuuguu

SEQ ID NO: 845348 - RNA, 18 nt, Human
uggggagaggcaggaaga

SEQ ID NO: 845349 - RNA, 18 nt, Human
ugggucauggaguccagc

SEQ ID NO: 845350 - RNA, 24 nt, Human
uuugcacucaggcuucccgccccu

SEQ ID NO: 845351 - RNA, 22 nt, Human
uuuguugcauuuagcuaugacc

SEQ ID NO: 845352 - RNA, 23 nt, Human
aacagagcccuguaaaacugccu

SEQ ID NO: 845353 - RNA, 22 nt, Human
aaugaugaaccugagcaggcac

SEQ ID NO: 845354 - RNA, 21 nt, Human
acagagcccuguaaaacugcc

SEQ ID NO: 845355 - RNA, 23 nt, Human
agagucccccggcccgacuuccc

SEQ ID NO: 845356 - RNA, 22 nt, Human
agucccccgguguaauucccag

SEQ ID NO: 845357 - RNA, 19 nt, Human
caacaggaaaccacacgcc

SEQ ID NO: 845358 - RNA, 21 nt, Human
caaugaugaaccugagguacc

SEQ ID NO: 845359 - RNA, 22 nt, Human
cagcgcuguaaacacgugccca

SEQ ID NO: 845360 - RNA, 24 nt, Human
cccagacgcgcuacagcaacgccg

SEQ ID NO: 845361 - RNA, 21 nt, Human
cccgcaggcacgaagcgggcc

SEQ ID NO: 845362 - RNA, 19 nt, Human
ccggcuguuuccucccugu

SEQ ID NO: 845363 - RNA, 20 nt, Human
cggcuguuuccucccuguuu

SEQ ID NO: 845364 - RNA, 26 nt, Human
cuacagcaacgccggcuguuuccucc

SEQ ID NO: 845365 - RNA, 19 nt, Human
cugacagugccccgggcac

SEQ ID NO: 845366 - RNA, 22 nt, Human
cugcugagccaucugacagugc

SEQ ID NO: 845367 - RNA, 22 nt, Human
gaccuucaguugaugugacugu

SEQ ID NO: 845368 - RNA, 21 nt, Human
gacuucccgcaggcacgaagc

SEQ ID NO: 845369 - RNA, 20 nt, Human
gaggcucggaguuuccgaag

SEQ ID NO: 845370 - RNA, 18 nt, Human
gcagcgcuguaaacacgu

SEQ ID NO: 845371 - RNA, 20 nt, Human
ggaaaccacacgccccauca

SEQ ID NO: 845372 - RNA, 22 nt, Human
gguaagaaaggcaugaaaggga

SEQ ID NO: 845373 - RNA, 21 nt, Human
gugagacaacaggaaaccaca

SEQ ID NO: 845374 - RNA, 20 nt, Human
uaagaaaggcaugaaaggga

SEQ ID NO: 845375 - RNA, 18 nt, Human
uacaagacuaugcagcag

SEQ ID NO: 845376 - RNA, 20 nt, Human
uccgaagagucccccggccc

SEQ ID NO: 845377 - RNA, 22 nt, Human
ucucugaggcucggaguuuccg

SEQ ID NO: 845378 - RNA, 23 nt, Human
ugaccuucaguugaugugacugu

SEQ ID NO: 845379 - RNA, 21 nt, Human
ugagcaggcacugcugagcca

SEQ ID NO: 845380 - RNA, 19 nt, Human
uucccgcaggcacgaagcg

SEQ ID NO: 845381 - RNA, 28 nt, Human
uuuuuuuuuuuuucuagguuuguuuuuu

SEQ ID NO: 845382 - RNA, 25 nt, Human
uuuuuuuuuuuuuuuuucuagguuu

SEQ ID NO: 845383 - RNA, 23 nt, Human
uuuuuuuuuuuuuuuuuucuagg

SEQ ID NO: 845384 - RNA, 23 nt, Human
aaaccagggcccaagagugggaa

SEQ ID NO: 845385 - RNA, 23 nt, Human
aagaacagaggaggaagcccagc

SEQ ID NO: 845386 - RNA, 20 nt, Human
aagcggcccccugggugggc

SEQ ID NO: 845387 - RNA, 21 nt, Human
aagcggcccccugggugggcc

SEQ ID NO: 845388 - RNA, 22 nt, Human
acaaaaccagggcccaagagug

SEQ ID NO: 845389 - RNA, 22 nt, Human
acauccacgcccaccugcucag

SEQ ID NO: 845390 - RNA, 25 nt, Human
acccgaauguggcugggacuccuug

SEQ ID NO: 845391 - RNA, 18 nt, Human
acgcggugguccugcgcu

SEQ ID NO: 845392 - RNA, 20 nt, Human
agcgcccauccucugcccag

SEQ ID NO: 845393 - RNA, 19 nt, Human
aggcagaaguauucgaccc

SEQ ID NO: 845394 - RNA, 21 nt, Human
aggcagcaccaacauugggga

SEQ ID NO: 845395 - RNA, 27 nt, Human
aggcagcaccaacauuggggauggucc

SEQ ID NO: 845396 - RNA, 21 nt, Human
aggggaagcuccauugcgacc

SEQ ID NO: 845397 - RNA, 21 nt, Human
agugacccacccuggagcagc

SEQ ID NO: 845398 - RNA, 19 nt, Human
caagaacagaggaggaagc

SEQ ID NO: 845399 - RNA, 24 nt, Human
cacauccacgcccaccugcucagg

SEQ ID NO: 845400 - RNA, 21 nt, Human
caccaggaugucaggcaggua

SEQ ID NO: 845401 - RNA, 22 nt, Human
caccgcccuaggggaagcucca

SEQ ID NO: 845402 - RNA, 22 nt, Human
caccuucuugucauaggugcca

SEQ ID NO: 845403 - RNA, 19 nt, Human
cagcgcaaugcaggcugcc

SEQ ID NO: 845404 - RNA, 19 nt, Human
cagcugccgcaggucccac

SEQ ID NO: 845405 - RNA, 22 nt, Human
cagcugccgcaggucccacaag

SEQ ID NO: 845406 - RNA, 21 nt, Human
caggccaggacgcucacccga

SEQ ID NO: 845407 - RNA, 19 nt, Human
ccacgcccaccugcucagg

SEQ ID NO: 845408 - RNA, 22 nt, Human
ccaggacgcucacccgaaugug

SEQ ID NO: 845409 - RNA, 21 nt, Human
cccaagagugggaagcggccc

SEQ ID NO: 845410 - RNA, 22 nt, Human
ccccaagaacagaggaggaagc

SEQ ID NO: 845411 - RNA, 21 nt, Human
ccccaauuucacccuuccccc

SEQ ID NO: 845412 - RNA, 20 nt, Human
ccccagcugccgcagguccc

SEQ ID NO: 845413 - RNA, 27 nt, Human
cccccaagaacagaggaggaagcccag

SEQ ID NO: 845414 - RNA, 27 nt, Human
ccccugggugggccugaaccccaauuu

SEQ ID NO: 845415 - RNA, 19 nt, Human
cccgcgacaggacguggag

SEQ ID NO: 845416 - RNA, 21 nt, Human
ccgccagcagggucagcacgg

SEQ ID NO: 845417 - RNA, 18 nt, Human
ccuggacgcggcccgagg

SEQ ID NO: 845418 - RNA, 25 nt, Human
cgcgcguacgcggcguagcgcgcgu

SEQ ID NO: 845419 - RNA, 20 nt, Human
cgcucucaacugagagcggg

SEQ ID NO: 845420 - RNA, 20 nt, Human
cggccagucaaaguucuucu

SEQ ID NO: 845421 - RNA, 22 nt, Human
cggccgaaacccuggacgcggc

SEQ ID NO: 845422 - RNA, 21 nt, Human
cuccuugugcccuaggcccac

SEQ ID NO: 845423 - RNA, 19 nt, Human
cugccagugaccacaccca

SEQ ID NO: 845424 - RNA, 23 nt, Human
cugccagugaccacacccagccc

SEQ ID NO: 845425 - RNA, 22 nt, Human
cugccaugucccagagcuucac

SEQ ID NO: 845426 - RNA, 20 nt, Human
cugggccggcucuggggucg

SEQ ID NO: 845427 - RNA, 20 nt, Human
gacccacccuggagcagcag

SEQ ID NO: 845428 - RNA, 18 nt, Human
gacguggagcacgaggcg

SEQ ID NO: 845429 - RNA, 21 nt, Human
gcacugagucaacggaagcca

SEQ ID NO: 845430 - RNA, 24 nt, Human
gcacugagucaacggaagccacgu

SEQ ID NO: 845431 - RNA, 25 nt, Human
gcagcaccaacauuggggauggucc

SEQ ID NO: 845432 - RNA, 25 nt, Human
gccgaaacccuggacgcggcccgag

SEQ ID NO: 845433 - RNA, 19 nt, Human
gcguagccuccaggugaca

SEQ ID NO: 845434 - RNA, 19 nt, Human
ggacaggugcugcuccagc

SEQ ID NO: 845435 - RNA, 18 nt, Human
ggagcccgacagacagag

SEQ ID NO: 845436 - RNA, 24 nt, Human
gggaagcggcccccugggugggcc

SEQ ID NO: 845437 - RNA, 22 nt, Human
gggcauagggcccaggccagga

SEQ ID NO: 845438 - RNA, 22 nt, Human
gggcgcugccggccucgcgucu

SEQ ID NO: 845439 - RNA, 21 nt, Human
ggugcuucaacagggcugggc

SEQ ID NO: 845440 - RNA, 18 nt, Human
guaggagaggcacagcac

SEQ ID NO: 845441 - RNA, 24 nt, Human
gucaccuucuugucauaggugcca

SEQ ID NO: 845442 - RNA, 22 nt, Human
uacgcggcguagcgcgcguagc

SEQ ID NO: 845443 - RNA, 21 nt, Human
uaggugccagucaccaggaug

SEQ ID NO: 845444 - RNA, 25 nt, Human
ucagaaccugguuggacuccguccc

SEQ ID NO: 845445 - RNA, 24 nt, Human
uccacauccacgcccaccugcuca

SEQ ID NO: 845446 - RNA, 21 nt, Human
ucccaggagccggagcacacg

SEQ ID NO: 845447 - RNA, 24 nt, Human
ucccccaagaacagaggaggaagc

SEQ ID NO: 845448 - RNA, 21 nt, Human
uccgcugccaugucccagagc

SEQ ID NO: 845449 - RNA, 27 nt, Human
uggagcagcagcacugagucaacggaa

SEQ ID NO: 845450 - RNA, 23 nt, Human
ugggaagcggcccccuggguggg

SEQ ID NO: 845451 - RNA, 19 nt, Human
ugggccugaaccccaauuu

SEQ ID NO: 845452 - RNA, 18 nt, Human
uggguagggcgcgcguac

SEQ ID NO: 845453 - RNA, 21 nt, Human
uggugcuucaacagggcuggg

SEQ ID NO: 845454 - RNA, 22 nt, Human
ugucccaggagccggagcacac

SEQ ID NO: 845455 - RNA, 24 nt, Human
uuuuuuuuuuuuuuuuuuuccaag

SEQ ID NO: 845456 - RNA, 18 nt, Human
aaaaagggaggaguggag

SEQ ID NO: 845457 - RNA, 24 nt, Human
aaaacaaacaaaacaacaaaaccc

SEQ ID NO: 845458 - RNA, 21 nt, Human
aaaacaacaaaacccccaaug

SEQ ID NO: 845459 - RNA, 22 nt, Human
aaaacaacaaaacccccaaugg

SEQ ID NO: 845460 - RNA, 23 nt, Human
aaaaggggaugccagcauaaucc

SEQ ID NO: 845461 - RNA, 19 nt, Human
aaacaaaacaacaaaaccc

SEQ ID NO: 845462 - RNA, 21 nt, Human
aaacaaaacaacaaaaccccc

SEQ ID NO: 845463 - RNA, 23 nt, Human
aaacaaaacaacaaaacccccaa

SEQ ID NO: 845464 - RNA, 24 nt, Human
aaacaaaacaacaaaacccccaau

SEQ ID NO: 845465 - RNA, 26 nt, Human
aaacaaacaaaacaacaaaaccccca

SEQ ID NO: 845466 - RNA, 20 nt, Human
aacaaaacaacaaaaccccc

SEQ ID NO: 845467 - RNA, 19 nt, Human
aagaguccagagcuaacag

SEQ ID NO: 845468 - RNA, 20 nt, Human
aaguguuaagaguccagagc

SEQ ID NO: 845469 - RNA, 21 nt, Human
aaguguuaagaguccagagcu

SEQ ID NO: 845470 - RNA, 22 nt, Human
aauuuuuuuaaaaaagggagga

SEQ ID NO: 845471 - RNA, 21 nt, Human
acaaaacaacaaaacccccaa

SEQ ID NO: 845472 - RNA, 21 nt, Human
acauggucauuuuaaagggaa

SEQ ID NO: 845473 - RNA, 23 nt, Human
acuuagaagaauuaagaaagaaa

SEQ ID NO: 845474 - RNA, 25 nt, Human
agaaagaaaacauaguuggucacaa

SEQ ID NO: 845475 - RNA, 23 nt, Human
agcaauggaaacaucccggcaaa

SEQ ID NO: 845476 - RNA, 18 nt, Human
aggaaagaaaagucaacu

SEQ ID NO: 845477 - RNA, 25 nt, Human
aggaaagaaaagucaacuuagaaga

SEQ ID NO: 845478 - RNA, 22 nt, Human
aggcugagaauauaaggaacag

SEQ ID NO: 845479 - RNA, 20 nt, Human
caaaacccccaaugguccua

SEQ ID NO: 845480 - RNA, 23 nt, Human
caaacaaaacaacaaaaccccca

SEQ ID NO: 845481 - RNA, 18 nt, Human
cacugcacaggaaaaagg

SEQ ID NO: 845482 - RNA, 23 nt, Human
ccuuaccuagggcugcucagagg

SEQ ID NO: 845483 - RNA, 20 nt, Human
cgagccuggacgcgaccggg

SEQ ID NO: 845484 - RNA, 25 nt, Human
cgcgaccgggcccuuucucgcgcgc

SEQ ID NO: 845485 - RNA, 24 nt, Human
cgcgcgccagcucacgcacgcgcg

SEQ ID NO: 845486 - RNA, 24 nt, Human
cggacauaaaaaacaaacaaaaca

SEQ ID NO: 845487 - RNA, 21 nt, Human
cuagcaauuucagaagaguaa

SEQ ID NO: 845488 - RNA, 20 nt, Human
cucacgcacgcgcgagugcg

SEQ ID NO: 845489 - RNA, 23 nt, Human
cucacgcacgcgcgagugcgcgc

SEQ ID NO: 845490 - RNA, 24 nt, Human
cucccacgucagagagaaccuuac

SEQ ID NO: 845491 - RNA, 20 nt, Human
gacauaaaaaacaaacaaaa

SEQ ID NO: 845492 - RNA, 25 nt, Human
gagcaaguucucauauaugaccgca

SEQ ID NO: 845493 - RNA, 21 nt, Human
gaguccagagcuaacagaaga

SEQ ID NO: 845494 - RNA, 20 nt, Human
gcgagugcgcgcugcuuccc

SEQ ID NO: 845495 - RNA, 25 nt, Human
gcggcagcgacggcggcucccacgu

SEQ ID NO: 845496 - RNA, 18 nt, Human
gcugagaauauaaggaac

SEQ ID NO: 845497 - RNA, 18 nt, Human
ggaaagaaaagucaacuu

SEQ ID NO: 845498 - RNA, 19 nt, Human
ggaguggaguaaaacaagg

SEQ ID NO: 845499 - RNA, 27 nt, Human
ggcuacagagacuaguuucaggaggaa

SEQ ID NO: 845500 - RNA, 23 nt, Human
guaaaaggcugcuugccacuaca

SEQ ID NO: 845501 - RNA, 24 nt, Human
guuaagaguccagagcuaacagaa

SEQ ID NO: 845502 - RNA, 23 nt, Human
uaaaaaacaaacaaaacaacaaa

SEQ ID NO: 845503 - RNA, 24 nt, Human
uaaaaaacaaacaaaacaacaaaa

SEQ ID NO: 845504 - RNA, 24 nt, Human
uacagagacuaguuucaggaggaa

SEQ ID NO: 845505 - RNA, 21 nt, Human
uaccuagggcugcucagaggc

SEQ ID NO: 845506 - RNA, 21 nt, Human
ucaacuuagaagaauuaagaa

SEQ ID NO: 845507 - RNA, 19 nt, Human
ucagaagaguaacuuaagu

SEQ ID NO: 845508 - RNA, 21 nt, Human
ucaguccgcaauuauccuacc

SEQ ID NO: 845509 - RNA, 20 nt, Human
ugacaagagccuccgggugg

SEQ ID NO: 845510 - RNA, 22 nt, Human
uggcggcagcgacggcggcucc

SEQ ID NO: 845511 - RNA, 18 nt, Human
uucaggaggaaagaaaag

SEQ ID NO: 845512 - RNA, 21 nt, Human
agggaaggggagugggauggg

SEQ ID NO: 845513 - RNA, 20 nt, Human
ggagggaaggggagugggau

SEQ ID NO: 845514 - RNA, 24 nt, Human
ggagggaaggggagugggaugggg

SEQ ID NO: 845515 - RNA, 21 nt, Human
ggagugggauggggugggggc

SEQ ID NO: 845516 - RNA, 19 nt, Human
gggaaggggagugggaugg

SEQ ID NO: 845517 - RNA, 19 nt, Human
gggagggaaggggaguggg

SEQ ID NO: 845518 - RNA, 20 nt, Human
uggggagggaaggggagugg

SEQ ID NO: 845519 - RNA, 21 nt, Human
uggggagggaaggggaguggg

SEQ ID NO: 845520 - RNA, 18 nt, Human
uuuuuuuuuuuuuuuuug

SEQ ID NO: 845521 - RNA, 24 nt, Human
uuuuuuuuuuuuuuuuuugcuuuu

SEQ ID NO: 845522 - RNA, 29 nt, Human
uuuuuuuuuuuuuuuuuuuugcuuuuuaa

SEQ ID NO: 845523 - RNA, 21 nt, Human
aaacaaccagaucccaugagc

SEQ ID NO: 845524 - RNA, 22 nt, Human
aaacaaccagaucccaugagca

SEQ ID NO: 845525 - RNA, 18 nt, Human
aaggagcccugagggggc

SEQ ID NO: 845526 - RNA, 20 nt, Human
aaggagcccugagggggccu

SEQ ID NO: 845527 - RNA, 18 nt, Human
acgagaccagccugccca

SEQ ID NO: 845528 - RNA, 20 nt, Human
acucacaguuuugcaggcuu

SEQ ID NO: 845529 - RNA, 23 nt, Human
acucacuaucacgagaccagccu

SEQ ID NO: 845530 - RNA, 22 nt, Human
agaaaggcagaggagaggcagg

SEQ ID NO: 845531 - RNA, 23 nt, Human
agaggagaggcaggggggcuggu

SEQ ID NO: 845532 - RNA, 22 nt, Human
agaggcaggggggcuggugcug

SEQ ID NO: 845533 - RNA, 20 nt, Human
aggaagcauggcuggggagc

SEQ ID NO: 845534 - RNA, 22 nt, Human
aggcaaggagcccugagggggc

SEQ ID NO: 845535 - RNA, 19 nt, Human
aggcagaggagaggcaggg

SEQ ID NO: 845536 - RNA, 23 nt, Human
aggcagaggagaggcaggggggc

SEQ ID NO: 845537 - RNA, 19 nt, Human
aggcaggguacggggugug

SEQ ID NO: 845538 - RNA, 27 nt, Human
agggggccugugggugcaggagcuggg

SEQ ID NO: 845539 - RNA, 24 nt, Human
auuccaggcaggguacggggugug

SEQ ID NO: 845540 - RNA, 18 nt, Human
cacgagaccagccugccc

SEQ ID NO: 845541 - RNA, 18 nt, Human
cacgagaccagccugccc

SEQ ID NO: 845542 - RNA, 20 nt, Human
cacggcagaaggcgaagggg

SEQ ID NO: 845543 - RNA, 24 nt, Human
cacucacuaucacgagaccagccu

SEQ ID NO: 845544 - RNA, 21 nt, Human
cagaaaggcagaggagaggca

SEQ ID NO: 845545 - RNA, 21 nt, Human
cagaaggcgaaggggaagcag

SEQ ID NO: 845546 - RNA, 25 nt, Human
cagaaggcgaaggggaagcaggcac

SEQ ID NO: 845547 - RNA, 23 nt, Human
cagccugcccauggcccuccccu

SEQ ID NO: 845548 - RNA, 22 nt, Human
caggggcuggucuggcuccccc

SEQ ID NO: 845549 - RNA, 25 nt, Human
cccauggcccuccccuaaacccucc

SEQ ID NO: 845550 - RNA, 21 nt, Human
ccuaaacccuccugagugcaa

SEQ ID NO: 845551 - RNA, 21 nt, Human
ccuccccuaaacccuccugag

SEQ ID NO: 845552 - RNA, 22 nt, Human
ccuccccuaaacccuccugagu

SEQ ID NO: 845553 - RNA, 24 nt, Human
cucaagaaacugacaaucacggca

SEQ ID NO: 845554 - RNA, 25 nt, Human
cuccccuaaacccuccugagugcaa

SEQ ID NO: 845555 - RNA, 21 nt, Human
cuucuaaacaaccagauccca

SEQ ID NO: 845556 - RNA, 18 nt, Human
gaaaccagaaaggcagag

SEQ ID NO: 845557 - RNA, 19 nt, Human
gaaaccagaaaggcagagg

SEQ ID NO: 845558 - RNA, 19 nt, Human
gagaccagccugcccaugg

SEQ ID NO: 845559 - RNA, 23 nt, Human
gagcccugagggggccugugggu

SEQ ID NO: 845560 - RNA, 21 nt, Human
gaggcaggggggcuggugcug

SEQ ID NO: 845561 - RNA, 20 nt, Human
gcccugagggggccuguggg

SEQ ID NO: 845562 - RNA, 24 nt, Human
gcuggugcugggauuccaggcagg

SEQ ID NO: 845563 - RNA, 20 nt, Human
ggagagaaaccagaaaggca

SEQ ID NO: 845564 - RNA, 18 nt, Human
ggagaggcaggggggcug

SEQ ID NO: 845565 - RNA, 20 nt, Human
ggcccuccccuaaacccucc

SEQ ID NO: 845566 - RNA, 23 nt, Human
ggguacggggugugcuggugggg

SEQ ID NO: 845567 - RNA, 19 nt, Human
guggagcaggagagacaga

SEQ ID NO: 845568 - RNA, 23 nt, Human
gugugcuggugggggggaaaggc

SEQ ID NO: 845569 - RNA, 18 nt, Human
uaaacaaccagaucccau

SEQ ID NO: 845570 - RNA, 23 nt, Human
uacaggaagcauggcuggggagc

SEQ ID NO: 845571 - RNA, 18 nt, Human
uccaggcaggguacgggg

SEQ ID NO: 845572 - RNA, 18 nt, Human
ugagggggccugugggug

SEQ ID NO: 845573 - RNA, 23 nt, Human
ugcuucuaaacaaccagaucccu

SEQ ID NO: 845574 - RNA, 18 nt, Human
ugcuuggagagggagaga

SEQ ID NO: 845575 - RNA, 21 nt, Human
ugcuuggagagggagagaaac

SEQ ID NO: 845576 - RNA, 21 nt, Human
uggcccuccccuaaacccucc

SEQ ID NO: 845577 - RNA, 22 nt, Human
uggucuggcugcuucgggcugc

SEQ ID NO: 845578 - RNA, 24 nt, Human
uggugcugggauuccaggcagggu

SEQ ID NO: 845579 - RNA, 20 nt, Human
uggugggggggaaaggcaag

SEQ ID NO: 845580 - RNA, 22 nt, Human
ugugcuggugggggggaaaggc

SEQ ID NO: 845581 - RNA, 24 nt, Human
uuacagaugcuuggagagggagag

SEQ ID NO: 845582 - RNA, 21 nt, Human
aaacggaaacgcaaggaggcc

SEQ ID NO: 845583 - RNA, 21 nt, Human
aagaaggggccaggcgcggug

SEQ ID NO: 845584 - RNA, 22 nt, Human
accuguuccacccuccccguca

SEQ ID NO: 845585 - RNA, 22 nt, Human
acggaaacgcaaggaggcccag

SEQ ID NO: 845586 - RNA, 18 nt, Human
agaaaggggaaaaaaagg

SEQ ID NO: 845587 - RNA, 20 nt, Human
agagucugccugagacacga

SEQ ID NO: 845588 - RNA, 24 nt, Human
aggccgagacaggacgaucguuga

SEQ ID NO: 845589 - RNA, 24 nt, Human
aggcgcgguggcucaugccuguca

SEQ ID NO: 845590 - RNA, 24 nt, Human
aggggccaggcgcgguggcucaug

SEQ ID NO: 845591 - RNA, 27 nt, Human
caauucucaaacacaagcaacgauuca

SEQ ID NO: 845592 - RNA, 21 nt, Human
cacccuccccgucaugcacag

SEQ ID NO: 845593 - RNA, 22 nt, Human
cacgagucuuuuuuccuggcuc

SEQ ID NO: 845594 - RNA, 18 nt, Human
cagcgcggggcggcugcc

SEQ ID NO: 845595 - RNA, 24 nt, Human
caugccugucaucccggcacuuug

SEQ ID NO: 845596 - RNA, 20 nt, Human
ccaaaguuccucccuccacc

SEQ ID NO: 845597 - RNA, 20 nt, Human
ccuccgggaccuguuccacc

SEQ ID NO: 845598 - RNA, 21 nt, Human
ccuuggggcucccaaaaaagu

SEQ ID NO: 845599 - RNA, 24 nt, Human
cgagacaggacgaucguugaggcc

SEQ ID NO: 845600 - RNA, 21 nt, Human
cgagucuuuuuuccuggcucc

SEQ ID NO: 845601 - RNA, 18 nt, Human
cggcacuuugggaggccg

SEQ ID NO: 845602 - RNA, 21 nt, Human
cgggaccuguuccacccuccc

SEQ ID NO: 845603 - RNA, 19 nt, Human
cucccaaaaaaguagcacg

SEQ ID NO: 845604 - RNA, 21 nt, Human
cugcugagcagcgcggggcgg

SEQ ID NO: 845605 - RNA, 22 nt, Human
cugcugagcagcgcggggcggc

SEQ ID NO: 845606 - RNA, 23 nt, Human
cuuuaauuuagguuaaaaagaaa

SEQ ID NO: 845607 - RNA, 20 nt, Human
cuuuuuuccuggcuccaagg

SEQ ID NO: 845608 - RNA, 19 nt, Human
gaccuguuccacccucccc

SEQ ID NO: 845609 - RNA, 21 nt, Human
gacgaucguugaggccaggaa

SEQ ID NO: 845610 - RNA, 24 nt, Human
gacgaucguugaggccaggaauuc

SEQ ID NO: 845611 - RNA, 18 nt, Human
gcacuuugggaggccgag

SEQ ID NO: 845612 - RNA, 22 nt, Human
gcacuuugggaggccgagacag

SEQ ID NO: 845613 - RNA, 22 nt, Human
ggaaacgcaaggaggcccauuc

SEQ ID NO: 845614 - RNA, 22 nt, Human
ggacgaucguugaggccaggaa

SEQ ID NO: 845615 - RNA, 19 nt, Human
ggcucaugccugucauccc

SEQ ID NO: 845616 - RNA, 21 nt, Human
ggcucugcaguggcagcuuua

SEQ ID NO: 845617 - RNA, 22 nt, Human
gguggcucaugccugucauccc

SEQ ID NO: 845618 - RNA, 18 nt, Human
guccugcugagcagcgcg

SEQ ID NO: 845619 - RNA, 21 nt, Human
guggcucaugccugucauccc

SEQ ID NO: 845620 - RNA, 26 nt, Human
uaauaaaaaagaaauuuccuccuaca

SEQ ID NO: 845621 - RNA, 22 nt, Human
uccccgucaugcacagaugauc

SEQ ID NO: 845622 - RNA, 22 nt, Human
ucccugagugggugucugggug

SEQ ID NO: 845623 - RNA, 23 nt, Human
uccucccuccaccggggagggag

SEQ ID NO: 845624 - RNA, 19 nt, Human
uccuccgggaccuguucca

SEQ ID NO: 845625 - RNA, 24 nt, Human
ucuggguguucacguguccugcug

SEQ ID NO: 845626 - RNA, 24 nt, Human
ugaaacggaaacgcaaggaggccc

SEQ ID NO: 845627 - RNA, 19 nt, Human
ugacucauuccuccaauuc

SEQ ID NO: 845628 - RNA, 21 nt, Human
ugacucauuccuccaauucuc

SEQ ID NO: 845629 - RNA, 18 nt, Human
ugagcagcgcggggcggc

SEQ ID NO: 845630 - RNA, 19 nt, Human
ugagcagcgcggggcggcu

SEQ ID NO: 845631 - RNA, 19 nt, Human
ugccugagacacgagucuu

SEQ ID NO: 845632 - RNA, 24 nt, Human
uggcucaugccugucaucccggca

SEQ ID NO: 845633 - RNA, 23 nt, Human
ugggaggccgagacaggacgauc

SEQ ID NO: 845634 - RNA, 27 nt, Human
uggggcucccaaaaaaguaggggaguc

SEQ ID NO: 845635 - RNA, 18 nt, Human
uguuccacccuccccguc

SEQ ID NO: 845636 - RNA, 21 nt, Human
uguuccacccuccccgucaug

SEQ ID NO: 845637 - RNA, 18 nt, Human
uuuuuuuuuuuuuuuuug

SEQ ID NO: 845638 - RNA, 24 nt, Human
uuuuuuuuuuuuuuuuuuuuuggg

SEQ ID NO: 845639 - RNA, 23 nt, Human
aaaaacacagucauaacaaaagu

SEQ ID NO: 845640 - RNA, 24 nt, Human
aaacacagucauaacaaaaguuua

SEQ ID NO: 845641 - RNA, 22 nt, Human
aaaccaagaugaauuaccacuu

SEQ ID NO: 845642 - RNA, 18 nt, Human
aagagcuuuuucaaacau

SEQ ID NO: 845643 - RNA, 24 nt, Human
aagcuacuucuuucuuugcuccua

SEQ ID NO: 845644 - RNA, 21 nt, Human
aaucaccaggagacaaaagga

SEQ ID NO: 845645 - RNA, 22 nt, Human
aauccucuccuuacucccagac

SEQ ID NO: 845646 - RNA, 18 nt, Human
agacaaaaggaaaauaag

SEQ ID NO: 845647 - RNA, 25 nt, Human
agacaaaaggaaaauaagggggacc

SEQ ID NO: 845648 - RNA, 24 nt, Human
agagcuuuuucaaacauuaaccac

SEQ ID NO: 845649 - RNA, 22 nt, Human
agcgcugggaggccgaggggga

SEQ ID NO: 845650 - RNA, 18 nt, Human
auaaagcaagacugcccc

SEQ ID NO: 845651 - RNA, 18 nt, Human
auaaagcaagacugcccc

SEQ ID NO: 845652 - RNA, 20 nt, Human
auaaagcaagacugcccccu

SEQ ID NO: 845653 - RNA, 19 nt, Human
caaaaggaaaauaaggggg

SEQ ID NO: 845654 - RNA, 22 nt, Human
caacaguacuuuauuuuuuuaa

SEQ ID NO: 845655 - RNA, 19 nt, Human
caagacugcccccuaccga

SEQ ID NO: 845656 - RNA, 19 nt, Human
caagaugaauuaccacuug

SEQ ID NO: 845657 - RNA, 23 nt, Human
caagaugaauuaccacuugggca

SEQ ID NO: 845658 - RNA, 19 nt, Human
caccaggagacaaaaggaa

SEQ ID NO: 845659 - RNA, 21 nt, Human
caggaaggccuuugccagaaa

SEQ ID NO: 845660 - RNA, 22 nt, Human
cauuauaacccacugguuucug

SEQ ID NO: 845661 - RNA, 19 nt, Human
ccaagcuacuucuuucuuu

SEQ ID NO: 845662 - RNA, 19 nt, Human
cccccuaccgacuacaggg

SEQ ID NO: 845663 - RNA, 24 nt, Human
cuaaucaccaggagacaaaaggaa

SEQ ID NO: 845664 - RNA, 21 nt, Human
cuaggaacaaauagagagaaa

SEQ ID NO: 845665 - RNA, 18 nt, Human
cuuccagguguucauaca

SEQ ID NO: 845666 - RNA, 20 nt, Human
gacugcccccuaccgacuac

SEQ ID NO: 845667 - RNA, 19 nt, Human
gcaagagcuuuuucaaaca

SEQ ID NO: 845668 - RNA, 18 nt, Human
ggaaggccuuugccagaa

SEQ ID NO: 845669 - RNA, 19 nt, Human
gggaagcagagcgagcgag

SEQ ID NO: 845670 - RNA, 18 nt, Human
gggggguggggguggggg

SEQ ID NO: 845671 - RNA, 20 nt, Human
gggggugggggugggggugg

SEQ ID NO: 845672 - RNA, 20 nt, Human
gggugggggugaagaacgcu

SEQ ID NO: 845673 - RNA, 19 nt, Human
guggggguggggguggggg

SEQ ID NO: 845674 - RNA, 24 nt, Human
guuccaagcuacuucuuucuuugc

SEQ ID NO: 845675 - RNA, 18 nt, Human
uaacacauuguaaaagca

SEQ ID NO: 845676 - RNA, 23 nt, Human
uaaccacuaaugauucaaugauu

SEQ ID NO: 845677 - RNA, 23 nt, Human
uaauuccaaguucauuuugagau

SEQ ID NO: 845678 - RNA, 19 nt, Human
uacaaacaauauauaaggc

SEQ ID NO: 845679 - RNA, 26 nt, Human
uacagugacaacaccuuuagaauccc

SEQ ID NO: 845680 - RNA, 26 nt, Human
uagaaucccuuagguacaauaaggua

SEQ ID NO: 845681 - RNA, 22 nt, Human
uagguacaauaagguaccgcag

SEQ ID NO: 845682 - RNA, 24 nt, Human
uauuuaccaauuaaagacuuauuu

SEQ ID NO: 845683 - RNA, 18 nt, Human
ucaccaggagacaaaagg

SEQ ID NO: 845684 - RNA, 24 nt, Human
ucaccaggagacaaaaggaaaaua

SEQ ID NO: 845685 - RNA, 19 nt, Human
uccaaguucauuuugagau

SEQ ID NO: 845686 - RNA, 20 nt, Human
ucuagauuaacuugaacagc

SEQ ID NO: 845687 - RNA, 22 nt, Human
ugaagaacgcuaauuauagaaa

SEQ ID NO: 845688 - RNA, 25 nt, Human
ugagaaaaccccuuuaaaauggcca

SEQ ID NO: 845689 - RNA, 21 nt, Human
ugcuacacaagagauauuuau

SEQ ID NO: 845690 - RNA, 19 nt, Human
ugggagcgcugggaggccg

SEQ ID NO: 845691 - RNA, 18 nt, Human
ugggaggccgagggggac

SEQ ID NO: 845692 - RNA, 18 nt, Human
uggggguggggguggggg

SEQ ID NO: 845693 - RNA, 20 nt, Human
ugggggugggggugggggug

SEQ ID NO: 845694 - RNA, 24 nt, Human
uguucuguuguauuuacaguuuua

SEQ ID NO: 845695 - RNA, 19 nt, Human
uucaaacauuaaccacuaa

SEQ ID NO: 845696 - RNA, 21 nt, Human
uucugcaucuugauucacuuc

SEQ ID NO: 845697 - RNA, 20 nt, Human
uuuuuuuuuuuuuuuugcua

SEQ ID NO: 845698 - RNA, 18 nt, Human
uuuuuuuuuuuuuuuuug

SEQ ID NO: 845699 - RNA, 20 nt, Human
uuuuuuuuuuuuuuuuugcu

SEQ ID NO: 845700 - RNA, 23 nt, Human
aaaauaaaacagaagcccugcca

SEQ ID NO: 845701 - RNA, 20 nt, Human
aacuaaaaauuuuaaaacag

SEQ ID NO: 845702 - RNA, 25 nt, Human
aagcaauccuccugcgucggccucc

SEQ ID NO: 845703 - RNA, 20 nt, Human
aagucaccucuuuaaaggcc

SEQ ID NO: 845704 - RNA, 24 nt, Human
acaaauucuaucuuuuccagaaca

SEQ ID NO: 845705 - RNA, 21 nt, Human
acaagaagauuugaaagagcu

SEQ ID NO: 845706 - RNA, 18 nt, Human
acccucccagccucucaa

SEQ ID NO: 845707 - RNA, 22 nt, Human
acuauguuguccaggcuggccu

SEQ ID NO: 845708 - RNA, 21 nt, Human
agaacaaacgugcauauccuu

SEQ ID NO: 845709 - RNA, 19 nt, Human
agacuagcuucauuuuaca

SEQ ID NO: 845710 - RNA, 19 nt, Human
agagcuaaagcuggaccgu

SEQ ID NO: 845711 - RNA, 25 nt, Human
agcaauccuccugcgucggccuccc

SEQ ID NO: 845712 - RNA, 24 nt, Human
agcggcggcggcgagcagagagcu

SEQ ID NO: 845713 - RNA, 23 nt, Human
aggacaauuuaaacauauuuuua

SEQ ID NO: 845714 - RNA, 23 nt, Human
agggucuuacuauguuguccagg

SEQ ID NO: 845715 - RNA, 24 nt, Human
agguggcggcgacagcggcggcgg

SEQ ID NO: 845716 - RNA, 22 nt, Human
auagaauggucugcauuuguaa

SEQ ID NO: 845717 - RNA, 19 nt, Human
aucauaaucacgcuugcuu

SEQ ID NO: 845718 - RNA, 22 nt, Human
caaaacacuguagccaaaugca

SEQ ID NO: 845719 - RNA, 23 nt, Human
caaggaaacagcauaguagacac

SEQ ID NO: 845720 - RNA, 19 nt, Human
caccauguuggauuagacu

SEQ ID NO: 845721 - RNA, 22 nt, Human
cacuguauuagcuugcuagggc

SEQ ID NO: 845722 - RNA, 19 nt, Human
cagcauaguagacacagca

SEQ ID NO: 845723 - RNA, 19 nt, Human
cauuuuacaugacaagaag

SEQ ID NO: 845724 - RNA, 22 nt, Human
cauuuuacaugacaagaagauu

SEQ ID NO: 845725 - RNA, 24 nt, Human
ccaaugaccuauucuaagguuucu

SEQ ID NO: 845726 - RNA, 20 nt, Human
ccaccuggaaagcuaguuau

SEQ ID NO: 845727 - RNA, 22 nt, Human
ccuaacauuaugaaucuaagaa

SEQ ID NO: 845728 - RNA, 21 nt, Human
ccucaacccucccagccucuc

SEQ ID NO: 845729 - RNA, 18 nt, Human
ccuggccucaagcaaucc

SEQ ID NO: 845730 - RNA, 22 nt, Human
cggcggcggcgagcagagagcu

SEQ ID NO: 845731 - RNA, 24 nt, Human
cucaagcaauccuccugcgucggc

SEQ ID NO: 845732 - RNA, 18 nt, Human
cucacuguguccucuccu

SEQ ID NO: 845733 - RNA, 18 nt, Human
cuggaccgucccuccgca

SEQ ID NO: 845734 - RNA, 25 nt, Human
cuggauggagaggugagaucuugga

SEQ ID NO: 845735 - RNA, 18 nt, Human
cuggccucaagcaauccu

SEQ ID NO: 845736 - RNA, 20 nt, Human
gaacaaacgugcauauccuu

SEQ ID NO: 845737 - RNA, 18 nt, Human
gaaucuaagaaaugucag

SEQ ID NO: 845738 - RNA, 22 nt, Human
gagguggcggcgacagcgggac

SEQ ID NO: 845739 - RNA, 26 nt, Human
gcggcgacagcggcggcggcgagcag

SEQ ID NO: 845740 - RNA, 24 nt, Human
gcugccauaauaaaauaccacaga

SEQ ID NO: 845741 - RNA, 19 nt, Human
gcuggccuugaacuccugg

SEQ ID NO: 845742 - RNA, 23 nt, Human
gcuggccuugaacuccuggccuc

SEQ ID NO: 845743 - RNA, 23 nt, Human
ggaaacagcauaguagacacagc

SEQ ID NO: 845744 - RNA, 24 nt, Human
ggcuggccuugaacuccuggccuc

SEQ ID NO: 845745 - RNA, 24 nt, Human
ggucuuacuauguuguccaggcug

SEQ ID NO: 845746 - RNA, 23 nt, Human
guaaggcucaaaggguuaaaccc

SEQ ID NO: 845747 - RNA, 23 nt, Human
guggcggcgacagcggcggcggc

SEQ ID NO: 845748 - RNA, 26 nt, Human
guuacacugagcaaguauuuuuaacu

SEQ ID NO: 845749 - RNA, 18 nt, Human
uaaaauaccacagauugg

SEQ ID NO: 845750 - RNA, 21 nt, Human
uaaagcagcacuagcaggaac

SEQ ID NO: 845751 - RNA, 24 nt, Human
uaacaggaaagaaaacaaacauua

SEQ ID NO: 845752 - RNA, 22 nt, Human
uaaggcucaaaggguuaaaccc

SEQ ID NO: 845753 - RNA, 20 nt, Human
uaagguuucuguuucaaaac

SEQ ID NO: 845754 - RNA, 22 nt, Human
uagagauagggucuuacuaugu

SEQ ID NO: 845755 - RNA, 24 nt, Human
uagaguggaagcugagaagcaaaa

SEQ ID NO: 845756 - RNA, 22 nt, Human
uagcaggaacaaggaaacagca

SEQ ID NO: 845757 - RNA, 22 nt, Human
uagcuaaauugcuuaauggcac

SEQ ID NO: 845758 - RNA, 24 nt, Human
uagggucuuacuauguuguccagg

SEQ ID NO: 845759 - RNA, 18 nt, Human
uaguagacacagcagauu

SEQ ID NO: 845760 - RNA, 24 nt, Human
uauaaaaacacagacugucuuaga

SEQ ID NO: 845761 - RNA, 25 nt, Human
uaucaaaaugaaaaauuauuguuuc

SEQ ID NO: 845762 - RNA, 23 nt, Human
uauguuguccaggcuggccuuga

SEQ ID NO: 845763 - RNA, 24 nt, Human
uauguuguccaggcuggccuugaa

SEQ ID NO: 845764 - RNA, 24 nt, Human
ucaacccucccagccucucaaacc

SEQ ID NO: 845765 - RNA, 21 nt, Human
ucaaggugcuggugauuuugu

SEQ ID NO: 845766 - RNA, 21 nt, Human
uccccucaacccucccagccu

SEQ ID NO: 845767 - RNA, 22 nt, Human
uccccucaacccucccagccuc

SEQ ID NO: 845768 - RNA, 21 nt, Human
uccgaacagucacauucaaaa

SEQ ID NO: 845769 - RNA, 18 nt, Human
uccuggauggagagguga

SEQ ID NO: 845770 - RNA, 21 nt, Human
ucgccaguacuaauucauuuu

SEQ ID NO: 845771 - RNA, 23 nt, Human
ucuaagguuucuguuucaaaaca

SEQ ID NO: 845772 - RNA, 20 nt, Human
ucugaagccucucucuuugc

SEQ ID NO: 845773 - RNA, 23 nt, Human
ucuuacuauguuguccaggcugg

SEQ ID NO: 845774 - RNA, 24 nt, Human
ugacuggacucccuuugaucaguu

SEQ ID NO: 845775 - RNA, 24 nt, Human
ugagaagcaaaauuguuacacuga

SEQ ID NO: 845776 - RNA, 22 nt, Human
ugauagaauggucugcauuugu

SEQ ID NO: 845777 - RNA, 18 nt, Human
ugcagauaacugccuucu

SEQ ID NO: 845778 - RNA, 21 nt, Human
ugcuggugauuuuguuucuuc

SEQ ID NO: 845779 - RNA, 22 nt, Human
uggaaagcuaguuaucaaaaug

SEQ ID NO: 845780 - RNA, 20 nt, Human
uggaauacaugcagcaauuu

SEQ ID NO: 845781 - RNA, 20 nt, Human
uggccucaagcaauccuccu

SEQ ID NO: 845782 - RNA, 21 nt, Human
uggccucaagcaauccuccug

SEQ ID NO: 845783 - RNA, 20 nt, Human
uggccuugaacuccuggccu

SEQ ID NO: 845784 - RNA, 18 nt, Human
uggcggcgacagcggcgg

SEQ ID NO: 845785 - RNA, 21 nt, Human
uggcuaaguccaccuggaaag

SEQ ID NO: 845786 - RNA, 27 nt, Human
uguaaaauacagauuaaaugcuccuaa

SEQ ID NO: 845787 - RNA, 18 nt, Human
uguagccaaaugcauacu

SEQ ID NO: 845788 - RNA, 24 nt, Human
uguccaggcuggccuugaacuccu

SEQ ID NO: 845789 - RNA, 25 nt, Human
ugucuuagaaucccacuuaaugaag

SEQ ID NO: 845790 - RNA, 22 nt, Human
uuaaaauaaguauauaaaaauc

SEQ ID NO: 845791 - RNA, 21 nt, Human
uuaaagcagagggggcuuccu

SEQ ID NO: 845792 - RNA, 19 nt, Human
uuagauuuuaacuguugag

SEQ ID NO: 845793 - RNA, 21 nt, Human
uucauuuuacaugacaagaag

SEQ ID NO: 845794 - RNA, 18 nt, Human
uuggauuagacuaacagc

SEQ ID NO: 845795 - RNA, 20 nt, Human
uuuuuuuuuuuuaaagaucu

SEQ ID NO: 845796 - RNA, 19 nt, Human
uuuuuuuuuuuuuuuuuaa

SEQ ID NO: 845797 - RNA, 24 nt, Human
cuggaguagaguuugggaguccac

SEQ ID NO: 845798 - RNA, 21 nt, Human
ggaguccacagggacaucuug

SEQ ID NO: 845799 - RNA, 20 nt, Human
uaaaaaggguccaaagguuu

SEQ ID NO: 845800 - RNA, 19 nt, Human
uccccaucuggaguagagu

SEQ ID NO: 845801 - RNA, 18 nt, Human
ugaguuuucgacucuugc

SEQ ID NO: 845802 - RNA, 18 nt, Human
uggaguagaguuugggag

SEQ ID NO: 845803 - RNA, 22 nt, Human
uuuuuuuuuuuuaaaaaggguc

SEQ ID NO: 845804 - RNA, 21 nt, Human
uuuuuuuuuuuuuuaaaaagg

SEQ ID NO: 845805 - RNA, 25 nt, Human
uuuuuuuuuuuuuuuuuaaaaaggg

SEQ ID NO: 845806 - RNA, 25 nt, Human
aaaaggcuuacuuucccugccuccu

SEQ ID NO: 845807 - RNA, 18 nt, Human
acuauugcuguucuuuuc

SEQ ID NO: 845808 - RNA, 23 nt, Human
agacaguucuguccugcuacaga

SEQ ID NO: 845809 - RNA, 21 nt, Human
agcugaggcacaggcagacau

SEQ ID NO: 845810 - RNA, 20 nt, Human
aggcagagcccaccucccac

SEQ ID NO: 845811 - RNA, 22 nt, Human
auccauuccugcugcagccaug

SEQ ID NO: 845812 - RNA, 23 nt, Human
auccuuuacuauugcuguucuuu

SEQ ID NO: 845813 - RNA, 18 nt, Human
auggcagugggagguuga

SEQ ID NO: 845814 - RNA, 21 nt, Human
cacuaaauuauuuucugcucc

SEQ ID NO: 845815 - RNA, 23 nt, Human
cacuccucucucacacuccuuug

SEQ ID NO: 845816 - RNA, 23 nt, Human
ccaaucagauggaccugcccuga

SEQ ID NO: 845817 - RNA, 18 nt, Human
ccacgacagaagcugaaa

SEQ ID NO: 845818 - RNA, 18 nt, Human
ccauggcuacaacaucug

SEQ ID NO: 845819 - RNA, 23 nt, Human
cccacgacagaagcugaaaaggc

SEQ ID NO: 845820 - RNA, 19 nt, Human
cccugaacuugggagcaag

SEQ ID NO: 845821 - RNA, 26 nt, Human
ccucccacgacagaagcugaaaaggc

SEQ ID NO: 845822 - RNA, 21 nt, Human
ccucuaaacuucuuacaugaa

SEQ ID NO: 845823 - RNA, 18 nt, Human
ccugcccugaacuuggga

SEQ ID NO: 845824 - RNA, 19 nt, Human
cgagguuuuuuuuuuuuuu

SEQ ID NO: 845825 - RNA, 21 nt, Human
cgagguuuuuuuuuuuuuuuu

SEQ ID NO: 845826 - RNA, 20 nt, Human
cugcagccauggcuacaacc

SEQ ID NO: 845827 - RNA, 22 nt, Human
cuuacuuucccugccucccuca

SEQ ID NO: 845828 - RNA, 22 nt, Human
gacagaagcugaaaaggcuuac

SEQ ID NO: 845829 - RNA, 19 nt, Human
gcagugccagcuuuuuguc

SEQ ID NO: 845830 - RNA, 18 nt, Human
gccauggcuacaacaucu

SEQ ID NO: 845831 - RNA, 21 nt, Human
ggcagcugauugaguacuaua

SEQ ID NO: 845832 - RNA, 24 nt, Human
gguaggaggcagagcccaccuccc

SEQ ID NO: 845833 - RNA, 19 nt, Human
guuugaagauccuccaccc

SEQ ID NO: 845834 - RNA, 20 nt, Human
uacagagagagaaugcagug

SEQ ID NO: 845835 - RNA, 23 nt, Human
ucacagcugaggcacaggcagac

SEQ ID NO: 845836 - RNA, 26 nt, Human
ucacagcugaggcacaggcagacauu

SEQ ID NO: 845837 - RNA, 19 nt, Human
uccauuccugcugcagcca

SEQ ID NO: 845838 - RNA, 21 nt, Human
uccauuccugcugcagccaug

SEQ ID NO: 845839 - RNA, 18 nt, Human
uccuguuucuuccccucc

SEQ ID NO: 845840 - RNA, 27 nt, Human
uccuuuacuauugcuguucuuuucguu

SEQ ID NO: 845841 - RNA, 19 nt, Human
ucucucacacuccuuugcc

SEQ ID NO: 845842 - RNA, 21 nt, Human
ucuugguaggaggcagagccc

SEQ ID NO: 845843 - RNA, 25 nt, Human
ugaaaauuugggggugccaggaucc

SEQ ID NO: 845844 - RNA, 26 nt, Human
ugaacuugggagcaagucacaccgag

SEQ ID NO: 845845 - RNA, 25 nt, Human
ugaagauccuccacccuuugauucu

SEQ ID NO: 845846 - RNA, 18 nt, Human
ugccaggauccggguucu

SEQ ID NO: 845847 - RNA, 21 nt, Human
ugcucccaucagccagcacug

SEQ ID NO: 845848 - RNA, 22 nt, Human
ugcugcagccauggcuacaaca

SEQ ID NO: 845849 - RNA, 18 nt, Human
uggaguccaugguggugg

SEQ ID NO: 845850 - RNA, 21 nt, Human
uggccaaaggggucuugucuu

SEQ ID NO: 845851 - RNA, 24 nt, Human
uuccugcugcagccauggcuacaa

SEQ ID NO: 845852 - RNA, 21 nt, Human
uuccuuuauuuuggccaaagg

SEQ ID NO: 845853 - RNA, 23 nt, Human
uuccuuuauuuuggccaaagggg

SEQ ID NO: 845854 - RNA, 20 nt, Human
uucuggauggugguaguggc

SEQ ID NO: 845855 - RNA, 21 nt, Human
uuuccuguuucuuccccucca

SEQ ID NO: 845856 - RNA, 18 nt, Human
uuuuggccaaaggggucu

SEQ ID NO: 845857 - RNA, 25 nt, Human
uuuuggccaaaggggucuugucuuu

SEQ ID NO: 845858 - RNA, 22 nt, Human
uuuuuuuuuuuuuuuaauguuu

SEQ ID NO: 845859 - RNA, 24 nt, Human
uuuuuuuuuuuuuuuuuuuuaaug

SEQ ID NO: 845860 - RNA, 22 nt, Human
aaagagccugaucucagcaggc

SEQ ID NO: 845861 - RNA, 23 nt, Human
aaaggagacaguaaacaacagaa

SEQ ID NO: 845862 - RNA, 21 nt, Human
aagacuucugcagugacagcc

SEQ ID NO: 845863 - RNA, 19 nt, Human
aagcagccuccauucuggg

SEQ ID NO: 845864 - RNA, 18 nt, Human
aagggaaaacgugggaaa

SEQ ID NO: 845865 - RNA, 19 nt, Human
acagugggagcccagcugg

SEQ ID NO: 845866 - RNA, 21 nt, Human
acagugggagcccagcuggau

SEQ ID NO: 845867 - RNA, 24 nt, Human
acguaucucuuuaagaaugugucc

SEQ ID NO: 845868 - RNA, 19 nt, Human
agaaaaaggacaaguugaa

SEQ ID NO: 845869 - RNA, 21 nt, Human
agaaauacacacaacguccuc

SEQ ID NO: 845870 - RNA, 19 nt, Human
agacagaaaucugagcaca

SEQ ID NO: 845871 - RNA, 21 nt, Human
agacagaaaucugagcacacg

SEQ ID NO: 845872 - RNA, 18 nt, Human
agacagucacagggucau

SEQ ID NO: 845873 - RNA, 19 nt, Human
agaccacaguuugaaaucc

SEQ ID NO: 845874 - RNA, 18 nt, Human
agauggagggaagcacca

SEQ ID NO: 845875 - RNA, 18 nt, Human
agcagcagagggucccgg

SEQ ID NO: 845876 - RNA, 19 nt, Human
agccauggaauaggaaggg

SEQ ID NO: 845877 - RNA, 23 nt, Human
agcuggauuccuacacucaagcc

SEQ ID NO: 845878 - RNA, 18 nt, Human
aggcauuggcaggaccag

SEQ ID NO: 845879 - RNA, 19 nt, Human
aggcgaccacaggauuccu

SEQ ID NO: 845880 - RNA, 21 nt, Human
aggggaauguucccagugcca

SEQ ID NO: 845881 - RNA, 20 nt, Human
agugaacaggggauggaugg

SEQ ID NO: 845882 - RNA, 18 nt, Human
aucagguuuauuuuccag

SEQ ID NO: 845883 - RNA, 22 nt, Human
auccgcucucugcugcucugga

SEQ ID NO: 845884 - RNA, 20 nt, Human
auggagggaagcaccauggg

SEQ ID NO: 845885 - RNA, 20 nt, Human
auguccuggccccaggcgac

SEQ ID NO: 845886 - RNA, 25 nt, Human
caaagagccugaucucagcaggcac

SEQ ID NO: 845887 - RNA, 23 nt, Human
caacagcugggaacgccaugucc

SEQ ID NO: 845888 - RNA, 21 nt, Human
cacaaaggagacaguaaacac

SEQ ID NO: 845889 - RNA, 20 nt, Human
cacacaaggacuauagucaa

SEQ ID NO: 845890 - RNA, 24 nt, Human
cacaguuugaaauccacuuaaucu

SEQ ID NO: 845891 - RNA, 19 nt, Human
caccucagcgaaggccugu

SEQ ID NO: 845892 - RNA, 18 nt, Human
caccugaagccauggaau

SEQ ID NO: 845893 - RNA, 21 nt, Human
cagcagacaccccauggagcc

SEQ ID NO: 845894 - RNA, 24 nt, Human
caguaaacaacagaacagaggugg

SEQ ID NO: 845895 - RNA, 24 nt, Human
caguucccagaaggcucaagacca

SEQ ID NO: 845896 - RNA, 20 nt, Human
ccaaggggaauguucccagu

SEQ ID NO: 845897 - RNA, 22 nt, Human
ccaagucagggagagcgucaca

SEQ ID NO: 845898 - RNA, 24 nt, Human
ccacaccaacccgcaccucagcga

SEQ ID NO: 845899 - RNA, 19 nt, Human
ccacagucucagcacagca

SEQ ID NO: 845900 - RNA, 18 nt, Human
ccaccgcggcccagggag

SEQ ID NO: 845901 - RNA, 19 nt, Human
ccagcacacccgugcgcag

SEQ ID NO: 845902 - RNA, 24 nt, Human
ccagcagacaccccauggagccga

SEQ ID NO: 845903 - RNA, 21 nt, Human
ccagcuggauuccuacacuca

SEQ ID NO: 845904 - RNA, 20 nt, Human
ccauguccuggccccaggcg

SEQ ID NO: 845905 - RNA, 20 nt, Human
cccacagagucaugagcagg

SEQ ID NO: 845906 - RNA, 19 nt, Human
ccccacaccaacccgcacc

SEQ ID NO: 845907 - RNA, 21 nt, Human
ccccacaccaacccgcaccuc

SEQ ID NO: 845908 - RNA, 23 nt, Human
ccccuccuuucgggcaguuccca

SEQ ID NO: 845909 - RNA, 18 nt, Human
ccuacacucaagcccucc

SEQ ID NO: 845910 - RNA, 20 nt, Human
ccuaggacaccaggaccaag

SEQ ID NO: 845911 - RNA, 21 nt, Human
ccucaggcgaccacaggauuc

SEQ ID NO: 845912 - RNA, 20 nt, Human
ccucugagguuugggguggc

SEQ ID NO: 845913 - RNA, 22 nt, Human
ccuggccaccgcggcccaggga

SEQ ID NO: 845914 - RNA, 22 nt, Human
ccuuccccugaccuguccggga

SEQ ID NO: 845915 - RNA, 22 nt, Human
cggagucucaguguugcccggg

SEQ ID NO: 845916 - RNA, 23 nt, Human
cuaggacaccaggaccaagacca

SEQ ID NO: 845917 - RNA, 21 nt, Human
cuggggcagacagugggagcc

SEQ ID NO: 845918 - RNA, 25 nt, Human
cuguggagacccagggccccccucc

SEQ ID NO: 845919 - RNA, 24 nt, Human
cuuaccgcauaccaggcucccaaa

SEQ ID NO: 845920 - RNA, 18 nt, Human
gaagccauggaauaggaa

SEQ ID NO: 845921 - RNA, 23 nt, Human
gacggagcccagccaccacggga

SEQ ID NO: 845922 - RNA, 21 nt, Human
gagacagucacagggucaugc

SEQ ID NO: 845923 - RNA, 21 nt, Human
gaggcccggccagccugcggu

SEQ ID NO: 845924 - RNA, 20 nt, Human
gaucccaccguucuagccac

SEQ ID NO: 845925 - RNA, 21 nt, Human
gcacacaaggacuauagucaa

SEQ ID NO: 845926 - RNA, 24 nt, Human
gccacagucucagcacagcagguu

SEQ ID NO: 845927 - RNA, 21 nt, Human
gccaggaaguggaugguggcu

SEQ ID NO: 845928 - RNA, 21 nt, Human
gccccggccaucucacccucc

SEQ ID NO: 845929 - RNA, 23 nt, Human
gcgaccacaggauuccuucucaa

SEQ ID NO: 845930 - RNA, 24 nt, Human
ggaagacuucugcagugacagccc

SEQ ID NO: 845931 - RNA, 25 nt, Human
ggaccaagaccaggccacagucuca

SEQ ID NO: 845932 - RNA, 19 nt, Human
ggagauggagggaagcacc

SEQ ID NO: 845933 - RNA, 19 nt, Human
ggagugcuuaccgcauacc

SEQ ID NO: 845934 - RNA, 21 nt, Human
ggagugcuuaccgcauaccag

SEQ ID NO: 845935 - RNA, 21 nt, Human
ggagugcuuaccgcauaccag

SEQ ID NO: 845936 - RNA, 20 nt, Human
ggcaugacaggaaggggguu

SEQ ID NO: 845937 - RNA, 22 nt, Human
ggcccagcagacaccccaugga

SEQ ID NO: 845938 - RNA, 23 nt, Human
gggaaaacgugggaaauggauuu

SEQ ID NO: 845939 - RNA, 19 nt, Human
gggagcagcagaggguccc

SEQ ID NO: 845940 - RNA, 22 nt, Human
gggagcagcagagggucccggc

SEQ ID NO: 845941 - RNA, 20 nt, Human
gggaggcccggccagccugc

SEQ ID NO: 845942 - RNA, 19 nt, Human
gggcacggaaggccaggaa

SEQ ID NO: 845943 - RNA, 21 nt, Human
gggccccccuccaggagcccc

SEQ ID NO: 845944 - RNA, 20 nt, Human
gggcuggcggcugacaccug

SEQ ID NO: 845945 - RNA, 21 nt, Human
guggagaggauggcaccugaa

SEQ ID NO: 845946 - RNA, 22 nt, Human
guggagcgggcacggaaggcca

SEQ ID NO: 845947 - RNA, 20 nt, Human
guggaugguggcugccagca

SEQ ID NO: 845948 - RNA, 22 nt, Human
gugggaaauggauuuuuggugc

SEQ ID NO: 845949 - RNA, 19 nt, Human
uacacucaagcccuccagc

SEQ ID NO: 845950 - RNA, 19 nt, Human
uaggacaccaggaccaaga

SEQ ID NO: 845951 - RNA, 18 nt, Human
uaggcuucaaaagcacaa

SEQ ID NO: 845952 - RNA, 21 nt, Human
uauccuguaggcauuggcagg

SEQ ID NO: 845953 - RNA, 18 nt, Human
ucacagaucaguggcauu

SEQ ID NO: 845954 - RNA, 21 nt, Human
ucacagaucaguggcauuuac

SEQ ID NO: 845955 - RNA, 21 nt, Human
ucagaggcugcuggcuggucc

SEQ ID NO: 845956 - RNA, 21 nt, Human
uccacagugaacaggggaugg

SEQ ID NO: 845957 - RNA, 21 nt, Human
uccacucaggccccggccauc

SEQ ID NO: 845958 - RNA, 20 nt, Human
ucccaccguucuagccacag

SEQ ID NO: 845959 - RNA, 19 nt, Human
ucccagaaggcucaagacc

SEQ ID NO: 845960 - RNA, 22 nt, Human
uccuacacucaagcccuccagc

SEQ ID NO: 845961 - RNA, 19 nt, Human
uccuucucaaagagccuga

SEQ ID NO: 845962 - RNA, 21 nt, Human
ucucaaagagccugaucucag

SEQ ID NO: 845963 - RNA, 19 nt, Human
ucucaguguugcccgggcc

SEQ ID NO: 845964 - RNA, 22 nt, Human
ucuguggagacccagggccccc

SEQ ID NO: 845965 - RNA, 24 nt, Human
ucuguggagaggauggcaccugaa

SEQ ID NO: 845966 - RNA, 23 nt, Human
ugaacaggccgggcagcuggacc

SEQ ID NO: 845967 - RNA, 18 nt, Human
ugaagggaaaacguggga

SEQ ID NO: 845968 - RNA, 19 nt, Human
ugacaggaaggggguucac

SEQ ID NO: 845969 - RNA, 24 nt, Human
ugagcacacggauugcccugugug

SEQ ID NO: 845970 - RNA, 20 nt, Human
ugcccgggccagagcgcagc

SEQ ID NO: 845971 - RNA, 19 nt, Human
ugcccggggcgccugccug

SEQ ID NO: 845972 - RNA, 20 nt, Human
ugcucuacaacagcugggaa

SEQ ID NO: 845973 - RNA, 21 nt, Human
ugcucuggagggagaaaaagg

SEQ ID NO: 845974 - RNA, 22 nt, Human
ugcuggcugguccugcagagcc

SEQ ID NO: 845975 - RNA, 24 nt, Human
uggaaaucauuuugugccaccgua

SEQ ID NO: 845976 - RNA, 24 nt, Human
uggaccacuccgaggcuggcgccu

SEQ ID NO: 845977 - RNA, 21 nt, Human
uggcugagauguccucgaaau

SEQ ID NO: 845978 - RNA, 18 nt, Human
uggcuggaaagggaaagg

SEQ ID NO: 845979 - RNA, 18 nt, Human
ugggaacgccauguccug

SEQ ID NO: 845980 - RNA, 21 nt, Human
ugguggcugccagcacuucug

SEQ ID NO: 845981 - RNA, 22 nt, Human
uguccuggccaccgcggcccag

SEQ ID NO: 845982 - RNA, 20 nt, Human
ugugaacaggccgggcagcu

SEQ ID NO: 845983 - RNA, 23 nt, Human
uucccacaaaggagacaguaaac

SEQ ID NO: 845984 - RNA, 21 nt, Human
uuccccacaccaacccgcacc

SEQ ID NO: 845985 - RNA, 21 nt, Human
uuccccuccuuucgggcaguu

SEQ ID NO: 845986 - RNA, 19 nt, Human
uucccuuguauuccccaca

SEQ ID NO: 845987 - RNA, 18 nt, Human
uuguuguuuuccagaguc

SEQ ID NO: 845988 - RNA, 24 nt, Human
uuuccagagucggagucucagugu

SEQ ID NO: 845989 - RNA, 24 nt, Human
uuuuuuuuuuuuuuuuuuuuaaag

SEQ ID NO: 845990 - RNA, 19 nt, Human
caaggggcucuggccuguc

SEQ ID NO: 845991 - RNA, 18 nt, Human
cagccccucggucagucc

SEQ ID NO: 845992 - RNA, 19 nt, Human
cagccgccgcuccucccca

SEQ ID NO: 845993 - RNA, 20 nt, Human
ccccaaccccgucccagccu

SEQ ID NO: 845994 - RNA, 21 nt, Human
cccccccggcccguugucgcc

SEQ ID NO: 845995 - RNA, 22 nt, Human
cccccccggcccguugucgccc

SEQ ID NO: 845996 - RNA, 21 nt, Human
ccccucggucaguccagcagc

SEQ ID NO: 845997 - RNA, 23 nt, Human
ccucgcgccuccagccgccgcuc

SEQ ID NO: 845998 - RNA, 23 nt, Human
cgccccaaccccgucccagccga

SEQ ID NO: 845999 - RNA, 23 nt, Human
cggcccguugucgccccaacccc

SEQ ID NO: 846000 - RNA, 26 nt, Human
gaagaggcugcagucuugcugggcag

SEQ ID NO: 846001 - RNA, 20 nt, Human
ugagggaggaagaggcugca

SEQ ID NO: 846002 - RNA, 20 nt, Human
uggccugucggguccccccc

SEQ ID NO: 846003 - RNA, 22 nt, Human
uggugggaucugagggaggaag

SEQ ID NO: 846004 - RNA, 18 nt, Human
uuuucuccgucuagaauc

SEQ ID NO: 846005 - RNA, 18 nt, Human
uuuuuuuuuuuuucuccg

SEQ ID NO: 846006 - RNA, 21 nt, Human
uuuuuuuuuuuuuuucuccgu

SEQ ID NO: 846007 - RNA, 24 nt, Human
uuuuuuuuuuuuuuuuuucuccgu

SEQ ID NO: 846008 - RNA, 24 nt, Human
uuuuuuuuuuuuuuuuuuucuccu

SEQ ID NO: 846009 - RNA, 24 nt, Human
uuuuuuuuuuuuuuuuuuuuucuu

SEQ ID NO: 846010 - RNA, 18 nt, Human
aaacaccaucaucuccuc

SEQ ID NO: 846011 - RNA, 21 nt, Human
acaccccugugggccgugggc

SEQ ID NO: 846012 - RNA, 21 nt, Human
acccccacccccaucccuggc

SEQ ID NO: 846013 - RNA, 21 nt, Human
accuccccgcucugggacagc

SEQ ID NO: 846014 - RNA, 19 nt, Human
agacaccgcgacgagucca

SEQ ID NO: 846015 - RNA, 20 nt, Human
agccggcucccccaccuccc

SEQ ID NO: 846016 - RNA, 27 nt, Human
agccuggaagaggggcugggagaagcu

SEQ ID NO: 846017 - RNA, 21 nt, Human
aggagggggucggguggcggc

SEQ ID NO: 846018 - RNA, 22 nt, Human
agggcaggggcaaucagacagc

SEQ ID NO: 846019 - RNA, 20 nt, Human
agguugagcugcugaauggg

SEQ ID NO: 846020 - RNA, 19 nt, Human
agugcaggugccacgcccc

SEQ ID NO: 846021 - RNA, 19 nt, Human
caaacaccaucaucuccuc

SEQ ID NO: 846022 - RNA, 19 nt, Human
caaaucgaagaagcuguag

SEQ ID NO: 846023 - RNA, 21 nt, Human
caccacaugagcucagggacc

SEQ ID NO: 846024 - RNA, 18 nt, Human
caccgcgacgaguccagc

SEQ ID NO: 846025 - RNA, 21 nt, Human
cacggaggcgcagugcgcggc

SEQ ID NO: 846026 - RNA, 21 nt, Human
cacugccucuucuguucccac

SEQ ID NO: 846027 - RNA, 21 nt, Human
cagcagccacugccucuucug

SEQ ID NO: 846028 - RNA, 21 nt, Human
cagccaccugcuguggagcug

SEQ ID NO: 846029 - RNA, 18 nt, Human
caggagcccggagcaggg

SEQ ID NO: 846030 - RNA, 22 nt, Human
caggaucccguacuuguccagu

SEQ ID NO: 846031 - RNA, 21 nt, Human
caggggccucguccuggcucu

SEQ ID NO: 846032 - RNA, 19 nt, Human
cagggucagcuuccggggc

SEQ ID NO: 846033 - RNA, 19 nt, Human
cagugcgcggcgguugggc

SEQ ID NO: 846034 - RNA, 18 nt, Human
caucccuggccuggguga

SEQ ID NO: 846035 - RNA, 21 nt, Human
caucuccuccucggugcaguc

SEQ ID NO: 846036 - RNA, 21 nt, Human
ccagccuugaugcccugcugc

SEQ ID NO: 846037 - RNA, 21 nt, Human
cccacaaacacccgcagcucc

SEQ ID NO: 846038 - RNA, 25 nt, Human
cccacaaacacccgcagcucccaug

SEQ ID NO: 846039 - RNA, 21 nt, Human
ccccagugacccgcaggguga

SEQ ID NO: 846040 - RNA, 21 nt, Human
ccccaucccuggccuggguga

SEQ ID NO: 846041 - RNA, 22 nt, Human
cccccagccaagacaaccuugc

SEQ ID NO: 846042 - RNA, 19 nt, Human
ccccuccagcuucaccucc

SEQ ID NO: 846043 - RNA, 24 nt, Human
ccgccauggcugcggcugcugcuu

SEQ ID NO: 846044 - RNA, 20 nt, Human
ccucaggggagggcacuagg

SEQ ID NO: 846045 - RNA, 21 nt, Human
ccuccagcuucaccuccaggu

SEQ ID NO: 846046 - RNA, 26 nt, Human
ccucuggcuccuucucuuugggccgc

SEQ ID NO: 846047 - RNA, 18 nt, Human
ccuggagcgggugugggg

SEQ ID NO: 846048 - RNA, 20 nt, Human
ccugggugaugguacagcgu

SEQ ID NO: 846049 - RNA, 24 nt, Human
ccuugagcucugggauggugguga

SEQ ID NO: 846050 - RNA, 22 nt, Human
cgccauggcugcggcugcugcu

SEQ ID NO: 846051 - RNA, 23 nt, Human
cggccaggaucccguacuugucc

SEQ ID NO: 846052 - RNA, 19 nt, Human
cggccucuggguccuccuc

SEQ ID NO: 846053 - RNA, 23 nt, Human
cggccucuggguccuccucuccc

SEQ ID NO: 846054 - RNA, 21 nt, Human
cggggugccggaugcugagga

SEQ ID NO: 846055 - RNA, 19 nt, Human
cucucccacaaacacccgc

SEQ ID NO: 846056 - RNA, 21 nt, Human
cugcagcagccacugccucuu

SEQ ID NO: 846057 - RNA, 20 nt, Human
cugccuggagcggguguggg

SEQ ID NO: 846058 - RNA, 22 nt, Human
cugcugcaugagacaccgcgac

SEQ ID NO: 846059 - RNA, 24 nt, Human
cuguagcuacaucuggucuuccuu

SEQ ID NO: 846060 - RNA, 22 nt, Human
cugugggugugggcuugggagu

SEQ ID NO: 846061 - RNA, 21 nt, Human
cuuucuucuucuucuccuucu

SEQ ID NO: 846062 - RNA, 20 nt, Human
gaaccaccucacagcccuug

SEQ ID NO: 846063 - RNA, 18 nt, Human
gacagcaggugaaaugcc

SEQ ID NO: 846064 - RNA, 20 nt, Human
gaccccuccagcuucaccuc

SEQ ID NO: 846065 - RNA, 19 nt, Human
gagcccggagcagggacag

SEQ ID NO: 846066 - RNA, 24 nt, Human
gagcugggccguggcagacgcugg

SEQ ID NO: 846067 - RNA, 26 nt, Human
gcaggugaaaugcccagcugggugcc

SEQ ID NO: 846068 - RNA, 20 nt, Human
gcccccagccaagacaaccu

SEQ ID NO: 846069 - RNA, 19 nt, Human
gccggaugcugaggaggcg

SEQ ID NO: 846070 - RNA, 25 nt, Human
gccggcucccccaccuccccgcucu

SEQ ID NO: 846071 - RNA, 22 nt, Human
gccgugggcuuccugcccuccu

SEQ ID NO: 846072 - RNA, 22 nt, Human
gccucuggguccuccucuccca

SEQ ID NO: 846073 - RNA, 23 nt, Human
gcgguagcccuucagggucagcu

SEQ ID NO: 846074 - RNA, 20 nt, Human
ggaguggcugugacaggugg

SEQ ID NO: 846075 - RNA, 20 nt, Human
ggcaucccccggaacagugc

SEQ ID NO: 846076 - RNA, 23 nt, Human
ggccgugggcuuccugcccuccu

SEQ ID NO: 846077 - RNA, 20 nt, Human
ggcugggggcugcagguggg

SEQ ID NO: 846078 - RNA, 21 nt, Human
gggaguggcugugacaggugg

SEQ ID NO: 846079 - RNA, 22 nt, Human
gggcggcaaacaccaucaucuc

SEQ ID NO: 846080 - RNA, 21 nt, Human
gggucggguggcggcuggggc

SEQ ID NO: 846081 - RNA, 22 nt, Human
gucagcuuccggggccgaaaga

SEQ ID NO: 846082 - RNA, 18 nt, Human
guccagccaccugcugug

SEQ ID NO: 846083 - RNA, 21 nt, Human
gucugugccagccggcucccc

SEQ ID NO: 846084 - RNA, 18 nt, Human
uagagcucuuccucuggc

SEQ ID NO: 846085 - RNA, 19 nt, Human
uagagcucuuccucuggcu

SEQ ID NO: 846086 - RNA, 20 nt, Human
uagcaggccucagucugggc

SEQ ID NO: 846087 - RNA, 22 nt, Human
uagcaggccucagucugggcgc

SEQ ID NO: 846088 - RNA, 24 nt, Human
uagcauggucugaccaguccugcu

SEQ ID NO: 846089 - RNA, 18 nt, Human
ucagacaaggaaaggggg

SEQ ID NO: 846090 - RNA, 18 nt, Human
ucagggccacauccaggu

SEQ ID NO: 846091 - RNA, 24 nt, Human
ucccacaaacacccgcagcuccca

SEQ ID NO: 846092 - RNA, 24 nt, Human
uccccaggggccucguccuggcuc

SEQ ID NO: 846093 - RNA, 19 nt, Human
ucucccacaaacacccgca

SEQ ID NO: 846094 - RNA, 20 nt, Human
ucucuuucuucuucuucucc

SEQ ID NO: 846095 - RNA, 20 nt, Human
ucuuucuucuucuucuccuu

SEQ ID NO: 846096 - RNA, 18 nt, Human
ugacagguggugagcagg

SEQ ID NO: 846097 - RNA, 18 nt, Human
ugaccgacucggccucug

SEQ ID NO: 846098 - RNA, 19 nt, Human
ugaggaggcggcagauggc

SEQ ID NO: 846099 - RNA, 18 nt, Human
ugaugugguacugcaggc

SEQ ID NO: 846100 - RNA, 21 nt, Human
ugccacgcccccagccaagac

SEQ ID NO: 846101 - RNA, 18 nt, Human
ugcccugcugcaugagac

SEQ ID NO: 846102 - RNA, 20 nt, Human
ugccuggagcgggugugggg

SEQ ID NO: 846103 - RNA, 22 nt, Human
uggaagaggggcugggagaagc

SEQ ID NO: 846104 - RNA, 23 nt, Human
uggccggagacguuaacaucggg

SEQ ID NO: 846105 - RNA, 21 nt, Human
uggcgguagcccuucaggguc

SEQ ID NO: 846106 - RNA, 22 nt, Human
uggcugugacagguggugagca

SEQ ID NO: 846107 - RNA, 21 nt, Human
ugggagaagcuggcacggagg

SEQ ID NO: 846108 - RNA, 20 nt, Human
ugggaugguggugaggcugu

SEQ ID NO: 846109 - RNA, 19 nt, Human
ugguacagcgucuggcccu

SEQ ID NO: 846110 - RNA, 21 nt, Human
ugguccuugagcucugggaug

SEQ ID NO: 846111 - RNA, 23 nt, Human
ugugccagccggcucccccaccu

SEQ ID NO: 846112 - RNA, 20 nt, Human
ugugguagcaggccucaguc

SEQ ID NO: 846113 - RNA, 19 nt, Human
ugugugcugggggacugca

SEQ ID NO: 846114 - RNA, 20 nt, Human
ugugugcugggggacugcag

SEQ ID NO: 846115 - RNA, 21 nt, Human
uguuucaucauccuguagcua

SEQ ID NO: 846116 - RNA, 21 nt, Human
uuuaaaaaguaacaagaaaga

SEQ ID NO: 846117 - RNA, 18 nt, Human
uuuccuggcaagggcugg

SEQ ID NO: 846118 - RNA, 24 nt, Human
uuuccuggcaagggcugggggcug

SEQ ID NO: 846119 - RNA, 18 nt, Human
gagggcaggguuggggaa

SEQ ID NO: 846120 - RNA, 23 nt, Human
uuuuuuuuuuuuuuuuuuuuagg

SEQ ID NO: 846121 - RNA, 24 nt, Human
aaacagccacgaauugaagcacaa

SEQ ID NO: 846122 - RNA, 18 nt, Human
accauauuuaauagaaac

SEQ ID NO: 846123 - RNA, 22 nt, Human
augagagacaaauuaacccaca

SEQ ID NO: 846124 - RNA, 22 nt, Human
caaaacagccacgaauugaagc

SEQ ID NO: 846125 - RNA, 20 nt, Human
cagauuucugagauuuucac

SEQ ID NO: 846126 - RNA, 26 nt, Human
ccaaaaugagagacaaauuaacccac

SEQ ID NO: 846127 - RNA, 19 nt, Human
ccuccugcaaaacagccac

SEQ ID NO: 846128 - RNA, 23 nt, Human
ccuccugcaaaacagccacgaau

SEQ ID NO: 846129 - RNA, 20 nt, Human
gaagcacaagugaggacaau

SEQ ID NO: 846130 - RNA, 19 nt, Human
gaguuugcuuuguuucucc

SEQ ID NO: 846131 - RNA, 27 nt, Human
gcgaaaaagagggcuuucugggauaaa

SEQ ID NO: 846132 - RNA, 25 nt, Human
gcuuuguuucuccucauguuuguca

SEQ ID NO: 846133 - RNA, 30 nt, Human
ggugcgaaaaagagggcuuucugggauaaa

SEQ ID NO: 846134 - RNA, 18 nt, Human
uacgaaggacccaaaaug

SEQ ID NO: 846135 - RNA, 30 nt, Human
uauacgaaggacccaaaaugagagacaaag

SEQ ID NO: 846136 - RNA, 18 nt, Human
ugagagacaaauuaaccc

SEQ ID NO: 846137 - RNA, 23 nt, Human
uuaauguuuucaccauauuuaau

SEQ ID NO: 846138 - RNA, 19 nt, Human
uugaugaggugcgaaaaag

SEQ ID NO: 846139 - RNA, 22 nt, Human
uuuuuaauguuuucaccauauu

SEQ ID NO: 846140 - RNA, 25 nt, Human
uuuuuuuuuuuuuuuuuaauguuuu

SEQ ID NO: 846141 - RNA, 24 nt, Human
uuuuuuuuuuuuuuuuuuuuaaug

SEQ ID NO: 846142 - RNA, 18 nt, Human
aauccucccuccuaccac

SEQ ID NO: 846143 - RNA, 19 nt, Human
accccaucauagaaaugag

SEQ ID NO: 846144 - RNA, 22 nt, Human
agcaaguggcagggcugcagug

SEQ ID NO: 846145 - RNA, 24 nt, Human
agucagccaaagaaagcggauccc

SEQ ID NO: 846146 - RNA, 21 nt, Human
augcagacaagcaaguggcag

SEQ ID NO: 846147 - RNA, 21 nt, Human
cacagcaagccauucuuaucc

SEQ ID NO: 846148 - RNA, 23 nt, Human
cacagcaagccauucuuauccca

SEQ ID NO: 846149 - RNA, 24 nt, Human
cacagcaagccauucuuaucccau

SEQ ID NO: 846150 - RNA, 18 nt, Human
caccugugggaucgacuc

SEQ ID NO: 846151 - RNA, 21 nt, Human
cagaacugguuugccaccugu

SEQ ID NO: 846152 - RNA, 22 nt, Human
caggugaugggcuccugagucc

SEQ ID NO: 846153 - RNA, 20 nt, Human
cauccagccggaaauagauu

SEQ ID NO: 846154 - RNA, 23 nt, Human
cauuaagacaugagacacucagc

SEQ ID NO: 846155 - RNA, 21 nt, Human
ccagcacccucuucccuuccc

SEQ ID NO: 846156 - RNA, 24 nt, Human
cccaacauacguguugaccagaua

SEQ ID NO: 846157 - RNA, 19 nt, Human
cccacacaugcagacaagc

SEQ ID NO: 846158 - RNA, 19 nt, Human
cccagcacccucuucccuu

SEQ ID NO: 846159 - RNA, 24 nt, Human
cccaucauagaaaugagaaaagaa

SEQ ID NO: 846160 - RNA, 22 nt, Human
ccccaucauagaaaugagaaaa

SEQ ID NO: 846161 - RNA, 22 nt, Human
ccgucauccuuccucaucagcc

SEQ ID NO: 846162 - RNA, 20 nt, Human
ccuccaagcacuagagcagu

SEQ ID NO: 846163 - RNA, 24 nt, Human
ccugagauuuucaaaucugaaucu

SEQ ID NO: 846164 - RNA, 24 nt, Human
ccugaucuaggcuuuucuccaccu

SEQ ID NO: 846165 - RNA, 23 nt, Human
ccuguaguagauccagcuagggc

SEQ ID NO: 846166 - RNA, 21 nt, Human
ccuucagacuccacauccagc

SEQ ID NO: 846167 - RNA, 23 nt, Human
cggaugucuugcauuccggcuuc

SEQ ID NO: 846168 - RNA, 18 nt, Human
cucagcaucuuuaucugu

SEQ ID NO: 846169 - RNA, 20 nt, Human
cuccggguggcccugggcuc

SEQ ID NO: 846170 - RNA, 19 nt, Human
cuguucuacccaacauacg

SEQ ID NO: 846171 - RNA, 23 nt, Human
gagccugcccacccgugagugcc

SEQ ID NO: 846172 - RNA, 18 nt, Human
gagcggugggcaccguca

SEQ ID NO: 846173 - RNA, 19 nt, Human
gagcggugggcaccgucau

SEQ ID NO: 846174 - RNA, 21 nt, Human
gcagcuccggguggcccuggg

SEQ ID NO: 846175 - RNA, 22 nt, Human
gccaaauccucccuccuaccac

SEQ ID NO: 846176 - RNA, 19 nt, Human
gcucccccaaggcucacag

SEQ ID NO: 846177 - RNA, 21 nt, Human
ggaaaagggaagacucugagc

SEQ ID NO: 846178 - RNA, 22 nt, Human
ggaagacucugagcagucagcc

SEQ ID NO: 846179 - RNA, 21 nt, Human
ggaguuaggugcagauguuga

SEQ ID NO: 846180 - RNA, 21 nt, Human
ggcagggcugcagugugggga

SEQ ID NO: 846181 - RNA, 23 nt, Human
ggcuccugaguccaucugggcau

SEQ ID NO: 846182 - RNA, 24 nt, Human
ggcuugaaaucgcuccgcagggcc

SEQ ID NO: 846183 - RNA, 19 nt, Human
ggugaugggcuccugaguc

SEQ ID NO: 846184 - RNA, 20 nt, Human
guggggauuuacaggugaug

SEQ ID NO: 846185 - RNA, 18 nt, Human
uaaaaagccccccauggc

SEQ ID NO: 846186 - RNA, 19 nt, Human
uaagacaugagacacucag

SEQ ID NO: 846187 - RNA, 18 nt, Human
uauccugcggugccugug

SEQ ID NO: 846188 - RNA, 21 nt, Human
uauccugcggugccugugguc

SEQ ID NO: 846189 - RNA, 22 nt, Human
ucaaaucugaaucugugcaacu

SEQ ID NO: 846190 - RNA, 23 nt, Human
ucacagagccagagugggugcca

SEQ ID NO: 846191 - RNA, 21 nt, Human
ucacaggaaaagggaagacuc

SEQ ID NO: 846192 - RNA, 18 nt, Human
ucagcuggagagauggag

SEQ ID NO: 846193 - RNA, 20 nt, Human
ucagggagccagccaggcag

SEQ ID NO: 846194 - RNA, 23 nt, Human
uccaggaagauuucccagagaaa

SEQ ID NO: 846195 - RNA, 19 nt, Human
ucccuguaguagauccagc

SEQ ID NO: 846196 - RNA, 20 nt, Human
ucuaccccaucauagaaaug

SEQ ID NO: 846197 - RNA, 22 nt, Human
ugagaaaagaaucaccaagaga

SEQ ID NO: 846198 - RNA, 19 nt, Human
uggcagggcugcagugugg

SEQ ID NO: 846199 - RNA, 22 nt, Human
uggcagggcugcagugugggga

SEQ ID NO: 846200 - RNA, 18 nt, Human
uggcccugggcuccaggu

SEQ ID NO: 846201 - RNA, 21 nt, Human
ugggaucgacucagcauuuua

SEQ ID NO: 846202 - RNA, 18 nt, Human
ugggauuugcaccugaga

SEQ ID NO: 846203 - RNA, 19 nt, Human
ugggcuccugaguccaucu

SEQ ID NO: 846204 - RNA, 19 nt, Human
uguaguagauccagcuagg

SEQ ID NO: 846205 - RNA, 23 nt, Human
uguccaggaagauuucccagaag

SEQ ID NO: 846206 - RNA, 19 nt, Human
ugucugagccugcccaccc

SEQ ID NO: 846207 - RNA, 18 nt, Human
ugugguccacagcaagcc

SEQ ID NO: 846208 - RNA, 21 nt, Human
uguuuauuucaacagcucaag

SEQ ID NO: 846209 - RNA, 24 nt, Human
uuuguauugguguuaguccucauu

SEQ ID NO: 846210 - RNA, 20 nt, Human
uuuuaaaauaggaggcaguu

SEQ ID NO: 846211 - RNA, 20 nt, Human
uuuuuuuuuuuuuuuuuugg

SEQ ID NO: 846212 - RNA, 22 nt, Human
uuuuuuuuuuuuuuuuuuguuu

SEQ ID NO: 846213 - RNA, 22 nt, Human
aagaaggaaggaguccuggagc

SEQ ID NO: 846214 - RNA, 21 nt, Human
aagcaggaagcaggguggugg

SEQ ID NO: 846215 - RNA, 22 nt, Human
aaggaagaaggaaggaguccug

SEQ ID NO: 846216 - RNA, 23 nt, Human
aaggaagaaggaaggaguccugg

SEQ ID NO: 846217 - RNA, 19 nt, Human
aaggaguccuggagcagag

SEQ ID NO: 846218 - RNA, 20 nt, Human
aaggaguccuggagcagagc

SEQ ID NO: 846219 - RNA, 26 nt, Human
accuccuucccaccuucccccugccg

SEQ ID NO: 846220 - RNA, 22 nt, Human
acuuccccaucuccucccccau

SEQ ID NO: 846221 - RNA, 18 nt, Human
agaaggaagaaggaagga

SEQ ID NO: 846222 - RNA, 22 nt, Human
agaccccaauccugguuuccaa

SEQ ID NO: 846223 - RNA, 22 nt, Human
agcgggggaggggaguggggcc

SEQ ID NO: 846224 - RNA, 18 nt, Human
aggggguggaagguuaca

SEQ ID NO: 846225 - RNA, 22 nt, Human
auaggggagcugggcuuggggg

SEQ ID NO: 846226 - RNA, 21 nt, Human
caacaggaugggcacaaaugg

SEQ ID NO: 846227 - RNA, 18 nt, Human
caagccccacuggggcag

SEQ ID NO: 846228 - RNA, 21 nt, Human
cagagcccugcccuggucccc

SEQ ID NO: 846229 - RNA, 20 nt, Human
cagccccugccagugccugg

SEQ ID NO: 846230 - RNA, 22 nt, Human
caggcccugccuugcccugcag

SEQ ID NO: 846231 - RNA, 19 nt, Human
cauccccuucccaccuggc

SEQ ID NO: 846232 - RNA, 21 nt, Human
ccaagccccacuggggcaggc

SEQ ID NO: 846233 - RNA, 20 nt, Human
ccacgcaagcccagcucgac

SEQ ID NO: 846234 - RNA, 20 nt, Human
ccacuuccccaucuccuccc

SEQ ID NO: 846235 - RNA, 24 nt, Human
ccccacgcaagcccagcucgaccu

SEQ ID NO: 846236 - RNA, 21 nt, Human
cccuacgccugagcaagccuc

SEQ ID NO: 846237 - RNA, 19 nt, Human
ccgcggggcgggaucgguc

SEQ ID NO: 846238 - RNA, 22 nt, Human
ccgcuggguucaggcccggccu

SEQ ID NO: 846239 - RNA, 21 nt, Human
ccggccugggccgcggggcgg

SEQ ID NO: 846240 - RNA, 21 nt, Human
ccugccuugcccugcagaggc

SEQ ID NO: 846241 - RNA, 23 nt, Human
ccuggagcagagcccugcccugg

SEQ ID NO: 846242 - RNA, 18 nt, Human
ccuugcuggagaaaaggc

SEQ ID NO: 846243 - RNA, 21 nt, Human
cgaccuccuucccaccuuccc

SEQ ID NO: 846244 - RNA, 25 nt, Human
cgguggcagugagggagcuugggac

SEQ ID NO: 846245 - RNA, 22 nt, Human
cucccccaugggcugcaggggc

SEQ ID NO: 846246 - RNA, 19 nt, Human
cuccuucccaccuuccccc

SEQ ID NO: 846247 - RNA, 19 nt, Human
cuccuuccucccugucucc

SEQ ID NO: 846248 - RNA, 19 nt, Human
cuggggcaggcccugccuu

SEQ ID NO: 846249 - RNA, 20 nt, Human
cuggggugagguggggaggg

SEQ ID NO: 846250 - RNA, 18 nt, Human
gaagcaggaagcagggug

SEQ ID NO: 846251 - RNA, 20 nt, Human
gaccuccuucccaccuuccc

SEQ ID NO: 846252 - RNA, 26 nt, Human
gagaaggaagaaggaaggaguccugg

SEQ ID NO: 846253 - RNA, 22 nt, Human
gagguagauggggagacguggg

SEQ ID NO: 846254 - RNA, 22 nt, Human
gcacugucgcgcuccuuccucc

SEQ ID NO: 846255 - RNA, 19 nt, Human
gccggcuccaggccuuccg

SEQ ID NO: 846256 - RNA, 20 nt, Human
gccucccaggggguccuggg

SEQ ID NO: 846257 - RNA, 20 nt, Human
gccugggccgcggggcggga

SEQ ID NO: 846258 - RNA, 24 nt, Human
gcuccacuuccccaucuccucccc

SEQ ID NO: 846259 - RNA, 18 nt, Human
ggagaagcggcacccgcu

SEQ ID NO: 846260 - RNA, 23 nt, Human
ggagcgggggaggggaguggggc

SEQ ID NO: 846261 - RNA, 19 nt, Human
ggcccccacgcaagcccag

SEQ ID NO: 846262 - RNA, 24 nt, Human
gggagggaggcugaacgaagcagg

SEQ ID NO: 846263 - RNA, 21 nt, Human
gggaguggggccgcaccagcc

SEQ ID NO: 846264 - RNA, 20 nt, Human
ggggagggaggcugaacgaa

SEQ ID NO: 846265 - RNA, 21 nt, Human
ggguacgaggagggcgcgggc

SEQ ID NO: 846266 - RNA, 19 nt, Human
ucaggcccggccugggccg

SEQ ID NO: 846267 - RNA, 23 nt, Human
uccacuuccccaucuccuccccc

SEQ ID NO: 846268 - RNA, 18 nt, Human
uccccaucuccuccccca

SEQ ID NO: 846269 - RNA, 18 nt, Human
uccccaucuccuccccca

SEQ ID NO: 846270 - RNA, 18 nt, Human
ucccccaugggcugcagg

SEQ ID NO: 846271 - RNA, 19 nt, Human
uccuucccaccuucccccu

SEQ ID NO: 846272 - RNA, 23 nt, Human
ugagggagcuugggacccugagg

SEQ ID NO: 846273 - RNA, 23 nt, Human
ugagguggggagggaggcugaac

SEQ ID NO: 846274 - RNA, 27 nt, Human
uggcacugucgcgcuccuuccucccug

SEQ ID NO: 846275 - RNA, 20 nt, Human
uggggccgcaccagccccug

SEQ ID NO: 846276 - RNA, 24 nt, Human
uggggccgcaccagccccugccag

SEQ ID NO: 846277 - RNA, 24 nt, Human
uggggugagguggggagggaggcu

SEQ ID NO: 846278 - RNA, 21 nt, Human
uggucccaagccccacugggg

SEQ ID NO: 846279 - RNA, 21 nt, Human
uggugggcagaccccaauccu

SEQ ID NO: 846280 - RNA, 23 nt, Human
uuaaggguagagguagaugggga

SEQ ID NO: 846281 - RNA, 27 nt, Human
uucccaccuucccccugccggcuccag

SEQ ID NO: 846282 - RNA, 20 nt, Human
uugcuucugcuucuccacgc

SEQ ID NO: 846283 - RNA, 22 nt, Human
uuggagguggaagccucgggug

SEQ ID NO: 846284 - RNA, 21 nt, Human
uuuuuuuuuuagagaaucugg

SEQ ID NO: 846285 - RNA, 21 nt, Human
uuuuuuuuuuuuagagaaucu

SEQ ID NO: 846286 - RNA, 24 nt, Human
aacaacugcccccaacaugcccag

SEQ ID NO: 846287 - RNA, 22 nt, Human
acauuccugagcucugguucag

SEQ ID NO: 846288 - RNA, 24 nt, Human
acucgcggucgggcucaggggcgg

SEQ ID NO: 846289 - RNA, 26 nt, Human
agcccugcaugaaguccugggugggu

SEQ ID NO: 846290 - RNA, 19 nt, Human
auaaaacauaggcuuccuu

SEQ ID NO: 846291 - RNA, 20 nt, Human
aucuggacugggccuuggag

SEQ ID NO: 846292 - RNA, 21 nt, Human
auggguccaaagacuucuggg

SEQ ID NO: 846293 - RNA, 21 nt, Human
caacccccgcccacaucugcc

SEQ ID NO: 846294 - RNA, 18 nt, Human
cacaacccccgcccacau

SEQ ID NO: 846295 - RNA, 24 nt, Human
caggguggggcuccaacaacugcc

SEQ ID NO: 846296 - RNA, 19 nt, Human
caugaugacgccgugcccc

SEQ ID NO: 846297 - RNA, 19 nt, Human
cccaagaacuugaacuuca

SEQ ID NO: 846298 - RNA, 22 nt, Human
cccacaacccccgcccacaucu

SEQ ID NO: 846299 - RNA, 23 nt, Human
cccacaacccccgcccacaucug

SEQ ID NO: 846300 - RNA, 23 nt, Human
cccauccugcccagccacaggaa

SEQ ID NO: 846301 - RNA, 19 nt, Human
ccccaagaacuugaacuuc

SEQ ID NO: 846302 - RNA, 24 nt, Human
ccccacaacccccgcccacaucug

SEQ ID NO: 846303 - RNA, 22 nt, Human
cccccaacaugcccagcccugc

SEQ ID NO: 846304 - RNA, 18 nt, Human
cccccacaacccccgccc

SEQ ID NO: 846305 - RNA, 21 nt, Human
ccccgcuucccucugggccac

SEQ ID NO: 846306 - RNA, 18 nt, Human
cccgcccacaucugccau

SEQ ID NO: 846307 - RNA, 18 nt, Human
ccgugccccgcuucccuc

SEQ ID NO: 846308 - RNA, 18 nt, Human
ccucugggccaccgggcg

SEQ ID NO: 846309 - RNA, 19 nt, Human
cgccuccucggaccucggg

SEQ ID NO: 846310 - RNA, 22 nt, Human
cggcuccggggacgcgcggcgg

SEQ ID NO: 846311 - RNA, 19 nt, Human
cgggcccugagcucgaacu

SEQ ID NO: 846312 - RNA, 25 nt, Human
cgucccccacaacccccgcccacau

SEQ ID NO: 846313 - RNA, 27 nt, Human
cuccggggacgcgcggcggggcaaauc

SEQ ID NO: 846314 - RNA, 19 nt, Human
cugggccaccgggcggagg

SEQ ID NO: 846315 - RNA, 20 nt, Human
cugggccuuggagcuguccu

SEQ ID NO: 846316 - RNA, 24 nt, Human
gcgauacaacugugcaugaugacg

SEQ ID NO: 846317 - RNA, 23 nt, Human
gcgcgcgcgcgcgcgugugugua

SEQ ID NO: 846318 - RNA, 24 nt, Human
gcgcgcguguguguauauauauau

SEQ ID NO: 846319 - RNA, 30 nt, Human
gcguguguguauauauauauauaaaaaauc

SEQ ID NO: 846320 - RNA, 24 nt, Human
gcugcggcgggguagagcgggcac

SEQ ID NO: 846321 - RNA, 22 nt, Human
ggacccugggcagguauggggc

SEQ ID NO: 846322 - RNA, 20 nt, Human
ggccgggacuugcgggcucc

SEQ ID NO: 846323 - RNA, 22 nt, Human
ggguccaaagacuucugggugu

SEQ ID NO: 846324 - RNA, 19 nt, Human
ggguggggcuccaacaacu

SEQ ID NO: 846325 - RNA, 20 nt, Human
guauauauauauauaaaaca

SEQ ID NO: 846326 - RNA, 24 nt, Human
guccugggugggugaggucaucug

SEQ ID NO: 846327 - RNA, 21 nt, Human
gugugcgcgcgcgcgcgcgcg

SEQ ID NO: 846328 - RNA, 23 nt, Human
ucugccauacuuucagaugcccc

SEQ ID NO: 846329 - RNA, 24 nt, Human
ugaugacgccgugccccgcuuccc

SEQ ID NO: 846330 - RNA, 21 nt, Human
ugcccccaacaugcccagccc

SEQ ID NO: 846331 - RNA, 26 nt, Human
ugcccccaacaugcccagcccugcau

SEQ ID NO: 846332 - RNA, 24 nt, Human
ugcgcgcgcgcgcgcgcgugugug

SEQ ID NO: 846333 - RNA, 19 nt, Human
uggcaggaacuggucccag

SEQ ID NO: 846334 - RNA, 23 nt, Human
uguauuuauaaaaccaaaugggu

SEQ ID NO: 846335 - RNA, 24 nt, Human
uguauuuauaaaaccaaauggguc

SEQ ID NO: 846336 - RNA, 19 nt, Human
ugugcgcgcgcgcgcgcgc

SEQ ID NO: 846337 - RNA, 24 nt, Human
ugugcgcgcgcgcgcgcgcgugug

SEQ ID NO: 846338 - RNA, 18 nt, Human
uguguauauauauauaua

SEQ ID NO: 846339 - RNA, 23 nt, Human
uguguauauauauauauaaaaca

SEQ ID NO: 846340 - RNA, 24 nt, Human
uguguguauauauauauauaaaac

SEQ ID NO: 846341 - RNA, 19 nt, Human
uuacuugacauuccugagc

SEQ ID NO: 846342 - RNA, 19 nt, Human
uucacugcauuguaugaug

SEQ ID NO: 846343 - RNA, 23 nt, Human
uuuuuuuuuuuuuucuucacauu

SEQ ID NO: 846344 - RNA, 18 nt, Human
aaguguccuugugaugag

SEQ ID NO: 846345 - RNA, 22 nt, Human
caacucuacaaucuugcaaggc

SEQ ID NO: 846346 - RNA, 20 nt, Human
cacccuuugugccaggcccu

SEQ ID NO: 846347 - RNA, 19 nt, Human
cauaaguagugguuauagu

SEQ ID NO: 846348 - RNA, 23 nt, Human
caucuccacuuuacaguucaaga

SEQ ID NO: 846349 - RNA, 19 nt, Human
caugugcgcgcggcagggc

SEQ ID NO: 846350 - RNA, 24 nt, Human
ccccugaauagucccucauagucc

SEQ ID NO: 846351 - RNA, 19 nt, Human
ccgccgccgcucggaacgc

SEQ ID NO: 846352 - RNA, 26 nt, Human
ccgugcgcucaccuccgccgccgcuc

SEQ ID NO: 846353 - RNA, 18 nt, Human
cgccuacaugugcgcgcg

SEQ ID NO: 846354 - RNA, 23 nt, Human
cugaauagucccucauagucccu

SEQ ID NO: 846355 - RNA, 24 nt, Human
gagcuauagguccaaaggcuccaa

SEQ ID NO: 846356 - RNA, 20 nt, Human
uagccccugaauagucccuc

SEQ ID NO: 846357 - RNA, 21 nt, Human
uagccccugaauagucccuca

SEQ ID NO: 846358 - RNA, 21 nt, Human
uccgugcgcucaccuccgccg

SEQ ID NO: 846359 - RNA, 23 nt, Human
ucugcacaagcuggaaguguccu

SEQ ID NO: 846360 - RNA, 24 nt, Human
ucugcacaagcuggaaguguccuu

SEQ ID NO: 846361 - RNA, 24 nt, Human
ugaguucauaaguagugguuauag

SEQ ID NO: 846362 - RNA, 22 nt, Human
ugccaggcccuuauguucauga

SEQ ID NO: 846363 - RNA, 24 nt, Human
uuuuuuuuuuuuuuuuaaggaggg

SEQ ID NO: 846364 - RNA, 23 nt, Human
uuuuuuuuuuuuuuuuuuuaagg

SEQ ID NO: 846365 - RNA, 24 nt, Human
aaagugcuaagauuauacauauga

SEQ ID NO: 846366 - RNA, 19 nt, Human
aaccgcgcgaucacagggc

SEQ ID NO: 846367 - RNA, 24 nt, Human
aagcaauccuccugccuuggccuc

SEQ ID NO: 846368 - RNA, 25 nt, Human
aagcaauccuccugccuuggccucc

SEQ ID NO: 846369 - RNA, 20 nt, Human
aagggcuuuccaccccucca

SEQ ID NO: 846370 - RNA, 24 nt, Human
aaguaacugggauuacaggcacgu

SEQ ID NO: 846371 - RNA, 25 nt, Human
aaguaacugggauuacaggcacgug

SEQ ID NO: 846372 - RNA, 26 nt, Human
aagugcuaagauuauacauaugagcc

SEQ ID NO: 846373 - RNA, 25 nt, Human
aaucucgccucacugcaaccuccac

SEQ ID NO: 846374 - RNA, 23 nt, Human
aaugcaguggcgugacuguggcu

SEQ ID NO: 846375 - RNA, 24 nt, Human
aaugcaguggcgugacuguggcuc

SEQ ID NO: 846376 - RNA, 24 nt, Human
aauuuuguauuuuuaguagagaug

SEQ ID NO: 846377 - RNA, 23 nt, Human
acagugcugggauuacaggcaua

SEQ ID NO: 846378 - RNA, 25 nt, Human
acccgccucagccucccacagugcu

SEQ ID NO: 846379 - RNA, 21 nt, Human
acccuccguacgccuccgcug

SEQ ID NO: 846380 - RNA, 19 nt, Human
acuguuuucugcaaugaau

SEQ ID NO: 846381 - RNA, 18 nt, Human
agaugauccacccgccuc

SEQ ID NO: 846382 - RNA, 22 nt, Human
agauuauacauaugagccacca

SEQ ID NO: 846383 - RNA, 21 nt, Human
agcaauccuccugccuuggcc

SEQ ID NO: 846384 - RNA, 24 nt, Human
agcgauucucuugccucagccucc

SEQ ID NO: 846385 - RNA, 19 nt, Human
aggcauaaaccacugugcc

SEQ ID NO: 846386 - RNA, 23 nt, Human
aggcauaaaccacugugcccggc

SEQ ID NO: 846387 - RNA, 24 nt, Human
agguggucucaaacuccugaccuc

SEQ ID NO: 846388 - RNA, 18 nt, Human
agugcugggauuacaggc

SEQ ID NO: 846389 - RNA, 21 nt, Human
agugcugggauuacaggcaua

SEQ ID NO: 846390 - RNA, 25 nt, Human
aguugagaaaagagccuccaaacuu

SEQ ID NO: 846391 - RNA, 24 nt, Human
augauccacccgccucagccuccc

SEQ ID NO: 846392 - RNA, 22 nt, Human
augggguuucaccauguuggcc

SEQ ID NO: 846393 - RNA, 24 nt, Human
augggguuucaccauguuggccag

SEQ ID NO: 846394 - RNA, 22 nt, Human
caaagugcuaagauuauacaua

SEQ ID NO: 846395 - RNA, 22 nt, Human
caagcaauccuccugccuuggc

SEQ ID NO: 846396 - RNA, 27 nt, Human
caagcaauccuccugccuuggccuccc

SEQ ID NO: 846397 - RNA, 27 nt, Human
caagcaauccuccugccuuggccuccc

SEQ ID NO: 846398 - RNA, 22 nt, Human
caagcgauucucuugccucagc

SEQ ID NO: 846399 - RNA, 27 nt, Human
caagcgauucucuugccucagccuccc

SEQ ID NO: 846400 - RNA, 24 nt, Human
caaggucuccaucuguugcccagg

SEQ ID NO: 846401 - RNA, 20 nt, Human
caauccacccuccucagccu

SEQ ID NO: 846402 - RNA, 24 nt, Human
cacagugcugggauuacaggcaua

SEQ ID NO: 846403 - RNA, 23 nt, Human
caccacacacuugugcucguccu

SEQ ID NO: 846404 - RNA, 20 nt, Human
caccauguuggccagguggu

SEQ ID NO: 846405 - RNA, 23 nt, Human
caccauguuggccagguggucuc

SEQ ID NO: 846406 - RNA, 26 nt, Human
caccauguuggccagguggucucaaa

SEQ ID NO: 846407 - RNA, 23 nt, Human
cacccaguugaccgcggccucgu

SEQ ID NO: 846408 - RNA, 20 nt, Human
cacccuccucagccucagcc

SEQ ID NO: 846409 - RNA, 21 nt, Human
cacgugccaccacgcccagcu

SEQ ID NO: 846410 - RNA, 19 nt, Human
cagcagaauuuucccgguu

SEQ ID NO: 846411 - RNA, 23 nt, Human
cagcagcagcucugccacccucc

SEQ ID NO: 846412 - RNA, 20 nt, Human
cagcagcucugccacccucc

SEQ ID NO: 846413 - RNA, 24 nt, Human
cagccucaaaccccugggcucaag

SEQ ID NO: 846414 - RNA, 23 nt, Human
cagccucccaaguaacugggauu

SEQ ID NO: 846415 - RNA, 25 nt, Human
caggggguuuucuuuggaucaguuu

SEQ ID NO: 846416 - RNA, 25 nt, Human
cagugcugggauuacaggcauaaac

SEQ ID NO: 846417 - RNA, 23 nt, Human
ccaaguaacugggauuacaggca

SEQ ID NO: 846418 - RNA, 23 nt, Human
ccacagugcugggauuacaggca

SEQ ID NO: 846419 - RNA, 24 nt, Human
ccacagugcugggauuacaggcau

SEQ ID NO: 846420 - RNA, 20 nt, Human
ccaccacgcccagcuaauuu

SEQ ID NO: 846421 - RNA, 21 nt, Human
ccacccgccucagccucccac

SEQ ID NO: 846422 - RNA, 22 nt, Human
ccacccuccguacgccuccgcu

SEQ ID NO: 846423 - RNA, 24 nt, Human
ccaccuucugaguucaagcgauuc

SEQ ID NO: 846424 - RNA, 21 nt, Human
ccacgcgcagcucuggccccu

SEQ ID NO: 846425 - RNA, 19 nt, Human
ccagagagaccccggggca

SEQ ID NO: 846426 - RNA, 19 nt, Human
cccaaguaacugggauuac

SEQ ID NO: 846427 - RNA, 24 nt, Human
cccaaguaacugggauuacaggca

SEQ ID NO: 846428 - RNA, 20 nt, Human
ccccugggcucaagcaaucc

SEQ ID NO: 846429 - RNA, 21 nt, Human
cccgacuguuuucugcaauga

SEQ ID NO: 846430 - RNA, 20 nt, Human
ccgacuguuuucugcaauga

SEQ ID NO: 846431 - RNA, 21 nt, Human
ccgccuuggccagcagcagcu

SEQ ID NO: 846432 - RNA, 24 nt, Human
ccguacgccuccgcugucaauaaa

SEQ ID NO: 846433 - RNA, 24 nt, Human
ccguccauucugcccuuugggacc

SEQ ID NO: 846434 - RNA, 24 nt, Human
ccuauaaccucgaucauguucucu

SEQ ID NO: 846435 - RNA, 22 nt, Human
ccuauguugccuaggcuggucu

SEQ ID NO: 846436 - RNA, 22 nt, Human
ccuauguugccuaggcuggucu

SEQ ID NO: 846437 - RNA, 31 nt, Human
ccuccacgcgcagcucuggccccgccgccuu

SEQ ID NO: 846438 - RNA, 26 nt, Human
ccuccugccuuggccucccaaagugc

SEQ ID NO: 846439 - RNA, 20 nt, Human
ccucgccucaagcaauccuc

SEQ ID NO: 846440 - RNA, 22 nt, Human
ccugaccucagaugauccaccc

SEQ ID NO: 846441 - RNA, 23 nt, Human
ccugaccucagaugauccacccg

SEQ ID NO: 846442 - RNA, 24 nt, Human
ccugggcucaagcaauccacccuc

SEQ ID NO: 846443 - RNA, 24 nt, Human
ccuucugaguucaagcgauucucu

SEQ ID NO: 846444 - RNA, 23 nt, Human
cgccucaagcaauccuccugccu

SEQ ID NO: 846445 - RNA, 24 nt, Human
cgccucagccucccacagugcugg

SEQ ID NO: 846446 - RNA, 19 nt, Human
cgccuuggccagcagcagc

SEQ ID NO: 846447 - RNA, 21 nt, Human
cgggucaagguccacucugcg

SEQ ID NO: 846448 - RNA, 22 nt, Human
cuaaacaaggucccgcccugcc

SEQ ID NO: 846449 - RNA, 24 nt, Human
cuaauuuuguauuuuuaguagaga

SEQ ID NO: 846450 - RNA, 24 nt, Human
cucaagcaauccuccugccuuggc

SEQ ID NO: 846451 - RNA, 23 nt, Human
cucacugcaaccuccaccuucug

SEQ ID NO: 846452 - RNA, 19 nt, Human
cucacugcagccucaaacc

SEQ ID NO: 846453 - RNA, 24 nt, Human
cucacugcagccucaaaccccugg

SEQ ID NO: 846454 - RNA, 22 nt, Human
cucaugaagggcuuuccacccc

SEQ ID NO: 846455 - RNA, 22 nt, Human
cucguccugcuccgaccaaaag

SEQ ID NO: 846456 - RNA, 22 nt, Human
cucuuguugcugaggcuggagu

SEQ ID NO: 846457 - RNA, 24 nt, Human
cugcaaccuccaccuucugaguuc

SEQ ID NO: 846458 - RNA, 23 nt, Human
cugcagccucaaaccccugggcu

SEQ ID NO: 846459 - RNA, 23 nt, Human
cugccuuggccucccaaagugcu

SEQ ID NO: 846460 - RNA, 18 nt, Human
gaaaccagagagaccccg

SEQ ID NO: 846461 - RNA, 18 nt, Human
gacaaaguuucacucuug

SEQ ID NO: 846462 - RNA, 24 nt, Human
gaccucagaugauccacccgccuc

SEQ ID NO: 846463 - RNA, 18 nt, Human
gagaauccgaugccucuc

SEQ ID NO: 846464 - RNA, 18 nt, Human
gagaugggguuucaccau

SEQ ID NO: 846465 - RNA, 24 nt, Human
gagaugggguuucaccauguuggc

SEQ ID NO: 846466 - RNA, 18 nt, Human
gaguucaagcgauucucu

SEQ ID NO: 846467 - RNA, 23 nt, Human
gauuacagagcgugccaccaugc

SEQ ID NO: 846468 - RNA, 18 nt, Human
gauuacaggcacgugcca

SEQ ID NO: 846469 - RNA, 21 nt, Human
gauuacaggcauaaaccacug

SEQ ID NO: 846470 - RNA, 24 nt, Human
gauuacaggcauaaaccacugugc

SEQ ID NO: 846471 - RNA, 18 nt, Human
gauuauacauaugagcca

SEQ ID NO: 846472 - RNA, 19 nt, Human
gccgcccugggguucagcu

SEQ ID NO: 846473 - RNA, 23 nt, Human
gccuaggcuggucuugaacuccu

SEQ ID NO: 846474 - RNA, 24 nt, Human
gcgauucucuugccucagccuccc

SEQ ID NO: 846475 - RNA, 19 nt, Human
gcuggagugcaauggccua

SEQ ID NO: 846476 - RNA, 23 nt, Human
ggauuacagagcgugccaccaug

SEQ ID NO: 846477 - RNA, 24 nt, Human
ggauuacaggcauaaaccacugug

SEQ ID NO: 846478 - RNA, 22 nt, Human
ggcucuguugacggcggcgccg

SEQ ID NO: 846479 - RNA, 24 nt, Human
ggcuggucuugaacuccucgccuc

SEQ ID NO: 846480 - RNA, 24 nt, Human
gggggucucccuauguugccuagg

SEQ ID NO: 846481 - RNA, 19 nt, Human
gggguuucaccauguuggc

SEQ ID NO: 846482 - RNA, 22 nt, Human
gggguuucaccauguuggccag

SEQ ID NO: 846483 - RNA, 22 nt, Human
gggucucccuauguugccuagg

SEQ ID NO: 846484 - RNA, 18 nt, Human
ggguuucaccauguuggc

SEQ ID NO: 846485 - RNA, 22 nt, Human
ggguuucaccauguuggccagg

SEQ ID NO: 846486 - RNA, 23 nt, Human
guagagaugggguuucaccaugu

SEQ ID NO: 846487 - RNA, 21 nt, Human
uaacuucugcgcacuauucuc

SEQ ID NO: 846488 - RNA, 24 nt, Human
uaagauuauacauaugagccacca

SEQ ID NO: 846489 - RNA, 24 nt, Human
uacaggcacgugccaccacgccca

SEQ ID NO: 846490 - RNA, 18 nt, Human
uacauaugagccaccaca

SEQ ID NO: 846491 - RNA, 20 nt, Human
uacgaggcacuaguuauugg

SEQ ID NO: 846492 - RNA, 24 nt, Human
uagaaugcaguggcgugacugugg

SEQ ID NO: 846493 - RNA, 22 nt, Human
uagagaugggguuucaccaugu

SEQ ID NO: 846494 - RNA, 19 nt, Human
uagaggauucccugggauu

SEQ ID NO: 846495 - RNA, 22 nt, Human
uaggaaaccagagagaccccgg

SEQ ID NO: 846496 - RNA, 24 nt, Human
uaguagagaugggguuucaccaug

SEQ ID NO: 846497 - RNA, 26 nt, Human
uaguagagaugggguuucaccauguu

SEQ ID NO: 846498 - RNA, 19 nt, Human
uauguugccuaggcugguc

SEQ ID NO: 846499 - RNA, 24 nt, Human
uauguugccuaggcuggucuugaa

SEQ ID NO: 846500 - RNA, 21 nt, Human
ucaauuuccuauaaccucgau

SEQ ID NO: 846501 - RNA, 18 nt, Human
ucacugcaaccuccaccu

SEQ ID NO: 846502 - RNA, 18 nt, Human
ucacugcaaccuccaccu

SEQ ID NO: 846503 - RNA, 22 nt, Human
ucacugcaaccuccaccuucug

SEQ ID NO: 846504 - RNA, 25 nt, Human
ucacugcaaccuccaccuucugagu

SEQ ID NO: 846505 - RNA, 27 nt, Human
ucacugcaaccuccaccuucugaguuc

SEQ ID NO: 846506 - RNA, 24 nt, Human
ucacugcagccucaaaccccuggg

SEQ ID NO: 846507 - RNA, 21 nt, Human
uccacccgccucagccuccca

SEQ ID NO: 846508 - RNA, 21 nt, Human
uccagcagaauuuucccgguu

SEQ ID NO: 846509 - RNA, 24 nt, Human
ucccaaguaacugggauuacaggc

SEQ ID NO: 846510 - RNA, 24 nt, Human
ucccacagugcugggauuacaggc

SEQ ID NO: 846511 - RNA, 23 nt, Human
ucccuauguugccuaggcugguc

SEQ ID NO: 846512 - RNA, 20 nt, Human
uccgaaccugauccagggca

SEQ ID NO: 846513 - RNA, 23 nt, Human
ucucccuauguugccuaggcugg

SEQ ID NO: 846514 - RNA, 24 nt, Human
ucucccuauguugccuaggcuggu

SEQ ID NO: 846515 - RNA, 20 nt, Human
ucugaguucaagcgauucuc

SEQ ID NO: 846516 - RNA, 20 nt, Human
ucugaguucaagcgauucuc

SEQ ID NO: 846517 - RNA, 18 nt, Human
ucuuguugcugaggcugg

SEQ ID NO: 846518 - RNA, 24 nt, Human
ugaacuccucgccucaagcaaucc

SEQ ID NO: 846519 - RNA, 24 nt, Human
ugaccgcggccucgucggccgccc

SEQ ID NO: 846520 - RNA, 24 nt, Human
ugaccucagaugauccacccgccu

SEQ ID NO: 846521 - RNA, 18 nt, Human
ugagaaaagagccuccaa

SEQ ID NO: 846522 - RNA, 24 nt, Human
ugagaaaagagccuccaaacuucc

SEQ ID NO: 846523 - RNA, 23 nt, Human
ugagacaaaguuucacucuuguu

SEQ ID NO: 846524 - RNA, 22 nt, Human
ugagacaaggucuccaucuguu

SEQ ID NO: 846525 - RNA, 24 nt, Human
ugaguucaagcgauucucuugccu

SEQ ID NO: 846526 - RNA, 22 nt, Human
ugcccaggauagaaugcagugg

SEQ ID NO: 846527 - RNA, 24 nt, Human
ugccucagccucccaaguaacugg

SEQ ID NO: 846528 - RNA, 23 nt, Human
ugccuuggccucccaaagugcua

SEQ ID NO: 846529 - RNA, 21 nt, Human
ugcugaggcuggagugcaaug

SEQ ID NO: 846530 - RNA, 24 nt, Human
ugcugggauuacaggcauaaacca

SEQ ID NO: 846531 - RNA, 23 nt, Human
uggagugcaauggccuaaucucg

SEQ ID NO: 846532 - RNA, 23 nt, Human
uggccagguggucucaaacuccu

SEQ ID NO: 846533 - RNA, 23 nt, Human
uggcgugacuguggcucacugca

SEQ ID NO: 846534 - RNA, 24 nt, Human
uggcgugacuguggcucacugcag

SEQ ID NO: 846535 - RNA, 21 nt, Human
ugggauuacagagcgugccac

SEQ ID NO: 846536 - RNA, 23 nt, Human
ugggauuacagagcgugccacca

SEQ ID NO: 846537 - RNA, 24 nt, Human
ugggauuacagagcgugccaccau

SEQ ID NO: 846538 - RNA, 21 nt, Human
ugggauuacaggcacgugcca

SEQ ID NO: 846539 - RNA, 22 nt, Human
ugggauuacaggcacgugccac

SEQ ID NO: 846540 - RNA, 24 nt, Human
ugggauuacaggcacgugccacca

SEQ ID NO: 846541 - RNA, 21 nt, Human
ugggauuacaggcauaaacca

SEQ ID NO: 846542 - RNA, 22 nt, Human
ugggauuacaggcauaaaccac

SEQ ID NO: 846543 - RNA, 23 nt, Human
ugggauuacaggcauaaaccacu

SEQ ID NO: 846544 - RNA, 24 nt, Human
ugggauuacaggcauaaaccacug

SEQ ID NO: 846545 - RNA, 26 nt, Human
ugggauuacaggcauaaaccacugug

SEQ ID NO: 846546 - RNA, 24 nt, Human
ugggcaaucaauuuccuauaaccu

SEQ ID NO: 846547 - RNA, 24 nt, Human
ugggguuucaccauguuggccagg

SEQ ID NO: 846548 - RNA, 25 nt, Human
uguagagaugggggucucccuaugu

SEQ ID NO: 846549 - RNA, 21 nt, Human
uguauuuuuaguagagauggg

SEQ ID NO: 846550 - RNA, 21 nt, Human
ugucagaacgaaguauauucc

SEQ ID NO: 846551 - RNA, 22 nt, Human
uguugcugaggcuggagugcaa

SEQ ID NO: 846552 - RNA, 21 nt, Human
uuaaauuuuuguagagauggg

SEQ ID NO: 846553 - RNA, 18 nt, Human
uuaguagagaugggguuu

SEQ ID NO: 846554 - RNA, 22 nt, Human
uuaguagagaugggguuucacc

SEQ ID NO: 846555 - RNA, 24 nt, Human
uuaguagagaugggguuucaccau

SEQ ID NO: 846556 - RNA, 20 nt, Human
uuagugcagccaagguaaag

SEQ ID NO: 846557 - RNA, 23 nt, Human
uucaagcgauucucuugccucag

SEQ ID NO: 846558 - RNA, 22 nt, Human
uucuccagcagaauuuucccgg

SEQ ID NO: 846559 - RNA, 18 nt, Human
uucugcaaugaauuuaga

SEQ ID NO: 846560 - RNA, 23 nt, Human
uugcugaggcuggagugcaaugg

SEQ ID NO: 846561 - RNA, 18 nt, Human
uuggccucccaaagugcu

SEQ ID NO: 846562 - RNA, 24 nt, Human
uugggauuacagagcgugccacca

SEQ ID NO: 846563 - RNA, 19 nt, Human
uuucaccauguuggccagg

SEQ ID NO: 846564 - RNA, 20 nt, Human
uuucaccauguuggccaggu

SEQ ID NO: 846565 - RNA, 24 nt, Human
uuuccaccccuccacgcgcagcuc

SEQ ID NO: 846566 - RNA, 19 nt, Human
uuuucugcaaugaauuuag

SEQ ID NO: 846567 - RNA, 25 nt, Human
uuuugagacaaggucuccaucuguu

SEQ ID NO: 846568 - RNA, 19 nt, Human
uuuuguauuuuuaguagag

SEQ ID NO: 846569 - RNA, 20 nt, Human
uuuuguauuuuuaguagaga

SEQ ID NO: 846570 - RNA, 21 nt, Human
uuuuguuguuguuguuguugu

SEQ ID NO: 846571 - RNA, 24 nt, Human
uuuuuaguagagaugggguuucac

SEQ ID NO: 846572 - RNA, 18 nt, Human
uuuuuuuuugagacaagg

SEQ ID NO: 846573 - RNA, 20 nt, Human
uuuuuuuuuuuuuuuuuugg

SEQ ID NO: 846574 - RNA, 19 nt, Human
aaaaacaaaacugaacaga

SEQ ID NO: 846575 - RNA, 23 nt, Human
aaaccaaauccuacugcaaguca

SEQ ID NO: 846576 - RNA, 23 nt, Human
aaaccaaauuacuguagagcaac

SEQ ID NO: 846577 - RNA, 22 nt, Human
aaagagcuucucugccuauaca

SEQ ID NO: 846578 - RNA, 21 nt, Human
aacagcaucgcuaguccacag

SEQ ID NO: 846579 - RNA, 24 nt, Human
aaccugggcucuucuccuagcccu

SEQ ID NO: 846580 - RNA, 23 nt, Human
aacuuuuuuuuuuuucagggggg

SEQ ID NO: 846581 - RNA, 19 nt, Human
aagcacaaaacugcucaga

SEQ ID NO: 846582 - RNA, 23 nt, Human
aaggaaugaaaauaaaaucaaga

SEQ ID NO: 846583 - RNA, 21 nt, Human
aagugccaacaaggguagugg

SEQ ID NO: 846584 - RNA, 25 nt, Human
aaugacuggcugaacugucucuacg

SEQ ID NO: 846585 - RNA, 22 nt, Human
acaaacagcaucgcuaguccac

SEQ ID NO: 846586 - RNA, 22 nt, Human
acccagaucguaggaaaaucaa

SEQ ID NO: 846587 - RNA, 23 nt, Human
acuaguuccacucucuaagggac

SEQ ID NO: 846588 - RNA, 21 nt, Human
agaauugauuccaguguccuc

SEQ ID NO: 846589 - RNA, 21 nt, Human
agacaguggugaaagucuuuc

SEQ ID NO: 846590 - RNA, 24 nt, Human
agacaguggugaaagucuuucuuc

SEQ ID NO: 846591 - RNA, 20 nt, Human
agauacacaugggaagaagg

SEQ ID NO: 846592 - RNA, 18 nt, Human
agcuggaagcgcagggcu

SEQ ID NO: 846593 - RNA, 24 nt, Human
agcuggaagcgcagggcuccucug

SEQ ID NO: 846594 - RNA, 25 nt, Human
agguuauuccaucugaaagaacuag

SEQ ID NO: 846595 - RNA, 20 nt, Human
aucaaguggcagaauugcuu

SEQ ID NO: 846596 - RNA, 22 nt, Human
aucacccaggcaaaagguaccg

SEQ ID NO: 846597 - RNA, 24 nt, Human
augagauaaauaauccauuucagg

SEQ ID NO: 846598 - RNA, 23 nt, Human
augcuggaguuggcccagggcug

SEQ ID NO: 846599 - RNA, 23 nt, Human
caaagcacaaaacugcucagaug

SEQ ID NO: 846600 - RNA, 22 nt, Human
caacagcaucaucacucagaca

SEQ ID NO: 846601 - RNA, 22 nt, Human
caagacaauucuggguccucaa

SEQ ID NO: 846602 - RNA, 19 nt, Human
caaggaaaaacaaagauaa

SEQ ID NO: 846603 - RNA, 21 nt, Human
caagucaaaauucucugcugg

SEQ ID NO: 846604 - RNA, 19 nt, Human
cacaaggaaaaacaaagau

SEQ ID NO: 846605 - RNA, 20 nt, Human
cacaaggaaaaacaaagaua

SEQ ID NO: 846606 - RNA, 23 nt, Human
cagaaaugggcuuuucaagauca

SEQ ID NO: 846607 - RNA, 19 nt, Human
cagaauugcuucgagaaua

SEQ ID NO: 846608 - RNA, 23 nt, Human
cagauguucaagaguccuaggag

SEQ ID NO: 846609 - RNA, 19 nt, Human
cagccccucccuucccauc

SEQ ID NO: 846610 - RNA, 23 nt, Human
cagucuacacuuauuucacauua

SEQ ID NO: 846611 - RNA, 21 nt, Human
caucacacuuccuucucucaa

SEQ ID NO: 846612 - RNA, 23 nt, Human
caucacacuuccuucucucaaaa

SEQ ID NO: 846613 - RNA, 22 nt, Human
caugagcauuaaucagaaauuu

SEQ ID NO: 846614 - RNA, 22 nt, Human
cauguggugauuuuuauuaaga

SEQ ID NO: 846615 - RNA, 18 nt, Human
ccaaugcagaaaugacug

SEQ ID NO: 846616 - RNA, 22 nt, Human
ccaguguccucuuccuuuuucc

SEQ ID NO: 846617 - RNA, 22 nt, Human
ccaguguccucuuccuuuuucc

SEQ ID NO: 846618 - RNA, 20 nt, Human
ccuagcccugccucagcugc

SEQ ID NO: 846619 - RNA, 23 nt, Human
ccucccuucccaucagcuguucc

SEQ ID NO: 846620 - RNA, 18 nt, Human
ccucuuccuuuuuccugu

SEQ ID NO: 846621 - RNA, 21 nt, Human
cgacaucauccuuaucaacag

SEQ ID NO: 846622 - RNA, 24 nt, Human
cuaaaggagccuaccagggccccu

SEQ ID NO: 846623 - RNA, 21 nt, Human
cucuaggaacagaaauggucc

SEQ ID NO: 846624 - RNA, 21 nt, Human
cugcaaguagcuggaagcgca

SEQ ID NO: 846625 - RNA, 20 nt, Human
cugcuauuauuacacagaga

SEQ ID NO: 846626 - RNA, 28 nt, Human
cuggaagguuauuccaucucccaauugg

SEQ ID NO: 846627 - RNA, 20 nt, Human
cugucuggcugcaaguagcu

SEQ ID NO: 846628 - RNA, 23 nt, Human
gaaagaacuagaucagcaagaca

SEQ ID NO: 846629 - RNA, 20 nt, Human
gaacacagguccaucauucc

SEQ ID NO: 846630 - RNA, 22 nt, Human
gaaccaaaaggaaugaaaauaa

SEQ ID NO: 846631 - RNA, 21 nt, Human
gacaggauguaccuucuugga

SEQ ID NO: 846632 - RNA, 22 nt, Human
gcaaaagguaccgaugcccaca

SEQ ID NO: 846633 - RNA, 20 nt, Human
gcccagggcugcuucaucgc

SEQ ID NO: 846634 - RNA, 23 nt, Human
gccuagagaaauccugacugccc

SEQ ID NO: 846635 - RNA, 21 nt, Human
gcucaaagcacaaaacugcuc

SEQ ID NO: 846636 - RNA, 22 nt, Human
gcugcuucaucgcuuggaggug

SEQ ID NO: 846637 - RNA, 23 nt, Human
gcugcuucaucgcuuggaggugg

SEQ ID NO: 846638 - RNA, 21 nt, Human
ggaaugaaaauaaaaucaaga

SEQ ID NO: 846639 - RNA, 25 nt, Human
ggacaggauguaccuucuuggaaaa

SEQ ID NO: 846640 - RNA, 22 nt, Human
ggagccuaccagggccccugug

SEQ ID NO: 846641 - RNA, 23 nt, Human
guccucuuccuuuuuccuguucu

SEQ ID NO: 846642 - RNA, 21 nt, Human
uaaaaacaaaacugaacagaa

SEQ ID NO: 846643 - RNA, 23 nt, Human
uaaaaacaaaacugaacagaaac

SEQ ID NO: 846644 - RNA, 19 nt, Human
uaaaggagccuaccagggc

SEQ ID NO: 846645 - RNA, 27 nt, Human
uaaauuaaacaagacaauucugggucc

SEQ ID NO: 846646 - RNA, 21 nt, Human
uaacugcaacaggggugaaag

SEQ ID NO: 846647 - RNA, 22 nt, Human
uaagaaaaccacgcuguggaaa

SEQ ID NO: 846648 - RNA, 21 nt, Human
uaagacaccacuuuacgcuau

SEQ ID NO: 846649 - RNA, 21 nt, Human
uaagugccaacaaggguagug

SEQ ID NO: 846650 - RNA, 18 nt, Human
uagcuagaacaagggaac

SEQ ID NO: 846651 - RNA, 18 nt, Human
uagcuggaagcgcagggc

SEQ ID NO: 846652 - RNA, 19 nt, Human
uauacaagagcaaauacaa

SEQ ID NO: 846653 - RNA, 22 nt, Human
uauuauauacacucaaacaagu

SEQ ID NO: 846654 - RNA, 20 nt, Human
ucaaaugcuauacaucuucu

SEQ ID NO: 846655 - RNA, 22 nt, Human
ucaagauuuuucagaguagaag

SEQ ID NO: 846656 - RNA, 18 nt, Human
ucacaaggaaaaacaaag

SEQ ID NO: 846657 - RNA, 26 nt, Human
uccacagacacaaagaaagaauucca

SEQ ID NO: 846658 - RNA, 25 nt, Human
uccaccguuuagcauaagacaccac

SEQ ID NO: 846659 - RNA, 22 nt, Human
uccucugcaguucacacgagaa

SEQ ID NO: 846660 - RNA, 21 nt, Human
uccuucucugguguuaacugc

SEQ ID NO: 846661 - RNA, 26 nt, Human
ucuucauuuuacaaacagcaucgcua

SEQ ID NO: 846662 - RNA, 21 nt, Human
ugagaggagaccgacagccug

SEQ ID NO: 846663 - RNA, 21 nt, Human
ugagauaaauaauccauuuca

SEQ ID NO: 846664 - RNA, 19 nt, Human
ugagauuaggaaagaaaug

SEQ ID NO: 846665 - RNA, 21 nt, Human
ugagauugagaaggcacccac

SEQ ID NO: 846666 - RNA, 21 nt, Human
ugauaugcauuaucauuagac

SEQ ID NO: 846667 - RNA, 20 nt, Human
ugcaugagaaugcggcugcu

SEQ ID NO: 846668 - RNA, 20 nt, Human
ugcaugguccaagcaugugg

SEQ ID NO: 846669 - RNA, 21 nt, Human
ugcaugguccaagcauguggu

SEQ ID NO: 846670 - RNA, 21 nt, Human
ugcccagcuggucaugggaac

SEQ ID NO: 846671 - RNA, 20 nt, Human
ugccccagauacacauggga

SEQ ID NO: 846672 - RNA, 23 nt, Human
uggaacuggaaugucacuaugua

SEQ ID NO: 846673 - RNA, 23 nt, Human
uggaauggaagaaaaaccaagua

SEQ ID NO: 846674 - RNA, 30 nt, Human
uggcagaauugcuucgagaauacagauuuc

SEQ ID NO: 846675 - RNA, 19 nt, Human
uggucaugggaaccuuccc

SEQ ID NO: 846676 - RNA, 21 nt, Human
uguagccugcuauuauuacac

SEQ ID NO: 846677 - RNA, 22 nt, Human
ugucaaaaaguggcucaaagca

SEQ ID NO: 846678 - RNA, 20 nt, Human
uguucccauucagauugaau

SEQ ID NO: 846679 - RNA, 23 nt, Human
uuaaaaacaauuauacaagagca

SEQ ID NO: 846680 - RNA, 23 nt, Human
uuccuguucucacuuguuuugcu

SEQ ID NO: 846681 - RNA, 19 nt, Human
uucuccuagcccugccuca

SEQ ID NO: 846682 - RNA, 19 nt, Human
uucuggguccucaaaauuu

SEQ ID NO: 846683 - RNA, 22 nt, Human
uugaauaugggccuaauuguca

SEQ ID NO: 846684 - RNA, 19 nt, Human
uugacagcagucuacacuu

SEQ ID NO: 846685 - RNA, 24 nt, Human
uugacagcagucuacacuuauuuc

SEQ ID NO: 846686 - RNA, 20 nt, Human
uugugagcccagcucaucug

SEQ ID NO: 846687 - RNA, 25 nt, Human
uuuuucagugaagaaugaauucuag

SEQ ID NO: 846688 - RNA, 18 nt, Human
aaaaauuguuuuaaaaag

SEQ ID NO: 846689 - RNA, 24 nt, Human
aaacaaaccaaauauauaucagca

SEQ ID NO: 846690 - RNA, 22 nt, Human
aaacagaaacuuuaaaucagau

SEQ ID NO: 846691 - RNA, 21 nt, Human
aaacauuuugaagaaaaaaau

SEQ ID NO: 846692 - RNA, 21 nt, Human
aagaauucccagccuacacac

SEQ ID NO: 846693 - RNA, 19 nt, Human
accaaauauauaucagcaa

SEQ ID NO: 846694 - RNA, 25 nt, Human
agauaaacagaaacuuuaaaucaga

SEQ ID NO: 846695 - RNA, 19 nt, Human
aguauuuuauuuuuucuac

SEQ ID NO: 846696 - RNA, 21 nt, Human
auaaauauauauguauaaaua

SEQ ID NO: 846697 - RNA, 19 nt, Human
augauuuagaaguaccacu

SEQ ID NO: 846698 - RNA, 21 nt, Human
augcuguaaauauuacuguuu

SEQ ID NO: 846699 - RNA, 22 nt, Human
auuuuauucacuggaauaugga

SEQ ID NO: 846700 - RNA, 19 nt, Human
caaaaaugguuuugaaaag

SEQ ID NO: 846701 - RNA, 22 nt, Human
caagcugcgagcgaggccagaa

SEQ ID NO: 846702 - RNA, 20 nt, Human
caaggaaguaucgaagcaug

SEQ ID NO: 846703 - RNA, 25 nt, Human
cagaaacuuuaaaucagauguuugg

SEQ ID NO: 846704 - RNA, 24 nt, Human
ccaaaaaucccagauaacugcaau

SEQ ID NO: 846705 - RNA, 27 nt, Human
ccacuuaaaaauauuuacugaugcugu

SEQ ID NO: 846706 - RNA, 20 nt, Human
ccccaccaaagucuucuccu

SEQ ID NO: 846707 - RNA, 20 nt, Human
ccccgagacuaccccaccaa

SEQ ID NO: 846708 - RNA, 19 nt, Human
cccgcacgcucgcccuacg

SEQ ID NO: 846709 - RNA, 20 nt, Human
cccgcacgcucgcccuacgg

SEQ ID NO: 846710 - RNA, 19 nt, Human
ccgagacuaccccaccaaa

SEQ ID NO: 846711 - RNA, 19 nt, Human
ccucuugcuccuuugguca

SEQ ID NO: 846712 - RNA, 19 nt, Human
cugugaugcuggagaaaac

SEQ ID NO: 846713 - RNA, 21 nt, Human
gacacaaucuuaaaaacacaa

SEQ ID NO: 846714 - RNA, 20 nt, Human
gaggcugcggcugggcccag

SEQ ID NO: 846715 - RNA, 21 nt, Human
gcugagcugccccgagacuac

SEQ ID NO: 846716 - RNA, 19 nt, Human
gggcacagcgggccgcuga

SEQ ID NO: 846717 - RNA, 20 nt, Human
gugcuuuuggcacaaguuuu

SEQ ID NO: 846718 - RNA, 22 nt, Human
uaaaaauauuuacugaugcugu

SEQ ID NO: 846719 - RNA, 24 nt, Human
uaaaauucugacccaaaaauccca

SEQ ID NO: 846720 - RNA, 22 nt, Human
uaaacagaaacuuuaaaucaga

SEQ ID NO: 846721 - RNA, 26 nt, Human
uaaacagaaacuuuaaaucagauguu

SEQ ID NO: 846722 - RNA, 22 nt, Human
uaaaggucucuuuccccaacuu

SEQ ID NO: 846723 - RNA, 19 nt, Human
uaucgaagcaugugugaga

SEQ ID NO: 846724 - RNA, 21 nt, Human
uauuaagaauucuuaacaagg

SEQ ID NO: 846725 - RNA, 25 nt, Human
ucccagauaacugcaauugcuuaau

SEQ ID NO: 846726 - RNA, 20 nt, Human
ucccagccuacacacaaauu

SEQ ID NO: 846727 - RNA, 23 nt, Human
uccuuuggucagaaagauaaaca

SEQ ID NO: 846728 - RNA, 23 nt, Human
ucuccaauuccuucagcaagaau

SEQ ID NO: 846729 - RNA, 21 nt, Human
ucugcaggaucugugaugcug

SEQ ID NO: 846730 - RNA, 20 nt, Human
ugacccaaaaaucccagaua

SEQ ID NO: 846731 - RNA, 20 nt, Human
ugcagcaacagguuuucucc

SEQ ID NO: 846732 - RNA, 21 nt, Human
ugcggcugggcccagaccccg

SEQ ID NO: 846733 - RNA, 19 nt, Human
uggagaaaacauuuugaag

SEQ ID NO: 846734 - RNA, 19 nt, Human
ugugaugcuggagaaaaca

SEQ ID NO: 846735 - RNA, 22 nt, Human
uuccuucagcaagaauucccag

SEQ ID NO: 846736 - RNA, 20 nt, Human
uucuauucauguauaacuug

SEQ ID NO: 846737 - RNA, 24 nt, Human
uuuaaaggucucuuuccccaacuu

SEQ ID NO: 846738 - RNA, 24 nt, Human
uuucauaaauauauauguauaaau

SEQ ID NO: 846739 - RNA, 23 nt, Human
uuuuaugauuuagaaguaccacu

SEQ ID NO: 846740 - RNA, 21 nt, Human
uuuuuuuuuuuucacaacugg

SEQ ID NO: 846741 - RNA, 24 nt, Human
uuuuuuuuuuuuuuuuucacaacu

SEQ ID NO: 846742 - RNA, 19 nt, Human
aaaagaagaagggaaaugg

SEQ ID NO: 846743 - RNA, 23 nt, Human
aagaagggaaucaguggggagga

SEQ ID NO: 846744 - RNA, 21 nt, Human
aagcccuuuuccuuucucucu

SEQ ID NO: 846745 - RNA, 25 nt, Human
acuagcucuaguuucugcaaguucu

SEQ ID NO: 846746 - RNA, 24 nt, Human
agaaagacaaacacaauuuccugg

SEQ ID NO: 846747 - RNA, 18 nt, Human
agaagaagggaaauggca

SEQ ID NO: 846748 - RNA, 19 nt, Human
agaagaagggaaauggcag

SEQ ID NO: 846749 - RNA, 21 nt, Human
agaagaagggaaauggcagaa

SEQ ID NO: 846750 - RNA, 18 nt, Human
agaagggaaucagugggg

SEQ ID NO: 846751 - RNA, 20 nt, Human
aggaaggagugggcucuagc

SEQ ID NO: 846752 - RNA, 19 nt, Human
aucacgugggccugaucug

SEQ ID NO: 846753 - RNA, 21 nt, Human
caaacacaauuuccugccuua

SEQ ID NO: 846754 - RNA, 19 nt, Human
caauccuguuaacccaggg

SEQ ID NO: 846755 - RNA, 23 nt, Human
ccacuuggaaaggacaggcaaga

SEQ ID NO: 846756 - RNA, 18 nt, Human
cccgagggaacagacagc

SEQ ID NO: 846757 - RNA, 19 nt, Human
cccuuuuccuuucucucuc

SEQ ID NO: 846758 - RNA, 21 nt, Human
cccuuuuccuuucucucuccc

SEQ ID NO: 846759 - RNA, 18 nt, Human
ccgcauuccuacaccuua

SEQ ID NO: 846760 - RNA, 23 nt, Human
ccuuuuccuuucucucucccucc

SEQ ID NO: 846761 - RNA, 20 nt, Human
ccuuuuuuuuuguaaaggac

SEQ ID NO: 846762 - RNA, 18 nt, Human
cgcagccaggugccugag

SEQ ID NO: 846763 - RNA, 21 nt, Human
cguuuuauuacuucgcagcca

SEQ ID NO: 846764 - RNA, 18 nt, Human
cucucccuccgccuuuuu

SEQ ID NO: 846765 - RNA, 18 nt, Human
cucucccuccgccuuuuu

SEQ ID NO: 846766 - RNA, 18 nt, Human
cuuuagaugauaaggcaa

SEQ ID NO: 846767 - RNA, 20 nt, Human
cuuucucucucccuccgccu

SEQ ID NO: 846768 - RNA, 18 nt, Human
cuuuuugcuguuuugcuc

SEQ ID NO: 846769 - RNA, 22 nt, Human
gaaaggacaggcaagauucaaa

SEQ ID NO: 846770 - RNA, 25 nt, Human
gaacagacagcccauaucagacuca

SEQ ID NO: 846771 - RNA, 21 nt, Human
gaccaucaaaacgcuucccuc

SEQ ID NO: 846772 - RNA, 20 nt, Human
gacucacuccaccuuuagau

SEQ ID NO: 846773 - RNA, 21 nt, Human
gaugauaaggcaaccguuuua

SEQ ID NO: 846774 - RNA, 21 nt, Human
gcugaaccucggagcagggac

SEQ ID NO: 846775 - RNA, 18 nt, Human
gcuguuuugcucguuucu

SEQ ID NO: 846776 - RNA, 23 nt, Human
ggaaauggcagaaauggaaagaa

SEQ ID NO: 846777 - RNA, 21 nt, Human
ggugccugagggugacaagac

SEQ ID NO: 846778 - RNA, 18 nt, Human
gugggccugaucugucgg

SEQ ID NO: 846779 - RNA, 22 nt, Human
guggggaggaaggagugggcuc

SEQ ID NO: 846780 - RNA, 24 nt, Human
guuggcaucaaauuuggaauucac

SEQ ID NO: 846781 - RNA, 22 nt, Human
uaacagcaaugaaugagucacu

SEQ ID NO: 846782 - RNA, 19 nt, Human
uacacauaaaguuggcauc

SEQ ID NO: 846783 - RNA, 21 nt, Human
uacaccuuagcucuguccucu

SEQ ID NO: 846784 - RNA, 21 nt, Human
uacccugggcugagguuugac

SEQ ID NO: 846785 - RNA, 23 nt, Human
uagcacuuaggcacaagacucca

SEQ ID NO: 846786 - RNA, 18 nt, Human
ucacugcagcugccaugg

SEQ ID NO: 846787 - RNA, 18 nt, Human
uccaaggagaaagacaaa

SEQ ID NO: 846788 - RNA, 19 nt, Human
uccaaggagaaagacaaac

SEQ ID NO: 846789 - RNA, 19 nt, Human
uccagaaaauguccaaguu

SEQ ID NO: 846790 - RNA, 26 nt, Human
ucccuggaaaacuuuuugcuguuuug

SEQ ID NO: 846791 - RNA, 23 nt, Human
uccuuucucucucccuccgccuu

SEQ ID NO: 846792 - RNA, 21 nt, Human
ucuguccucuuguguucuccc

SEQ ID NO: 846793 - RNA, 18 nt, Human
ugagguuugacucacucc

SEQ ID NO: 846794 - RNA, 19 nt, Human
ugagucacuuggugugauu

SEQ ID NO: 846795 - RNA, 20 nt, Human
ugauuguaacuuccuucccu

SEQ ID NO: 846796 - RNA, 24 nt, Human
ugccauggggcuuuuauaagcugg

SEQ ID NO: 846797 - RNA, 22 nt, Human
uggaaaggacaggcaagauuca

SEQ ID NO: 846798 - RNA, 23 nt, Human
uggauuuucaucagcuugagccu

SEQ ID NO: 846799 - RNA, 22 nt, Human
uggcagaaauggaaagaaggga

SEQ ID NO: 846800 - RNA, 23 nt, Human
uggcagaaauggaaagaagggaa

SEQ ID NO: 846801 - RNA, 23 nt, Human
uggcaucaaauuuggaauucaca

SEQ ID NO: 846802 - RNA, 22 nt, Human
uucacaaucacuaguucacgaa

SEQ ID NO: 846803 - RNA, 22 nt, Human
uugacucacuccaccuuuagau

SEQ ID NO: 846804 - RNA, 21 nt, Human
uuggcaggaguuagcuucuuu

SEQ ID NO: 846805 - RNA, 21 nt, Human
uuugcuaaaacuuuucaucca

SEQ ID NO: 846806 - RNA, 21 nt, Human
uuuuuuuuuuuuuuuuccaga

SEQ ID NO: 846807 - RNA, 23 nt, Human
uuuuuuuuuuuuuuuuuuuccag

SEQ ID NO: 846808 - RNA, 18 nt, Human
acccugggaauguccaag

SEQ ID NO: 846809 - RNA, 22 nt, Human
agagacugucaacuccuccucc

SEQ ID NO: 846810 - RNA, 21 nt, Human
aguggagaauuggguccugga

SEQ ID NO: 846811 - RNA, 25 nt, Human
caagcccagaagagccaggggccag

SEQ ID NO: 846812 - RNA, 25 nt, Human
cacccugggaauguccaagcccaga

SEQ ID NO: 846813 - RNA, 18 nt, Human
cagagaggagcccugcuu

SEQ ID NO: 846814 - RNA, 19 nt, Human
caggggccagucccugagc

SEQ ID NO: 846815 - RNA, 18 nt, Human
caguccaacugcgaggag

SEQ ID NO: 846816 - RNA, 22 nt, Human
ccaagcccagaagagccagggg

SEQ ID NO: 846817 - RNA, 18 nt, Human
ccagucccugagcaagug

SEQ ID NO: 846818 - RNA, 22 nt, Human
cccaccaguccaacugcgagga

SEQ ID NO: 846819 - RNA, 20 nt, Human
ccucaugcaggggugaagau

SEQ ID NO: 846820 - RNA, 18 nt, Human
ccugaguuccuuggaugg

SEQ ID NO: 846821 - RNA, 21 nt, Human
gaacccaggacuguucggcgg

SEQ ID NO: 846822 - RNA, 19 nt, Human
gaagagccaggggccaguc

SEQ ID NO: 846823 - RNA, 21 nt, Human
gcucagaacccaggacuguuc

SEQ ID NO: 846824 - RNA, 19 nt, Human
uagaaaucaggucuccagu

SEQ ID NO: 846825 - RNA, 26 nt, Human
uccaguguucccaguucccaccaguc

SEQ ID NO: 846826 - RNA, 22 nt, Human
ucccugagcaaguggagaauug

SEQ ID NO: 846827 - RNA, 20 nt, Human
uccugaguuccuuggaugga

SEQ ID NO: 846828 - RNA, 26 nt, Human
ugcaggggugaagaugugcagagcac

SEQ ID NO: 846829 - RNA, 22 nt, Human
ugguuaggaacgaagagacugu

SEQ ID NO: 846830 - RNA, 19 nt, Human
uguucccaguucccaccag

SEQ ID NO: 846831 - RNA, 19 nt, Human
uuagaaaucaggucuccag

SEQ ID NO: 846832 - RNA, 23 nt, Human
uuggauggcaggcucagaaccca

SEQ ID NO: 846833 - RNA, 19 nt, Human
uuuuuuuuuucaccaaccc

SEQ ID NO: 846834 - RNA, 23 nt, Human
uuuuuuuuuuuuuuuuucaccaa

SEQ ID NO: 846835 - RNA, 20 nt, Human
aaccaggcuguggcaccuga

SEQ ID NO: 846836 - RNA, 24 nt, Human
aagcagcaguccccuuggcgggcc

SEQ ID NO: 846837 - RNA, 25 nt, Human
acagagcauaguuagucaacgggca

SEQ ID NO: 846838 - RNA, 23 nt, Human
acaggcgagaaaccgaggacgcg

SEQ ID NO: 846839 - RNA, 23 nt, Human
accugcagggcugggccuccccu

SEQ ID NO: 846840 - RNA, 24 nt, Human
acgcgccgggucccuggcaggccc

SEQ ID NO: 846841 - RNA, 18 nt, Human
agaaggugcucuaccucc

SEQ ID NO: 846842 - RNA, 21 nt, Human
agaaggugcucuaccuccagu

SEQ ID NO: 846843 - RNA, 18 nt, Human
agagagagggaggggcag

SEQ ID NO: 846844 - RNA, 18 nt, Human
agcucugugggcccaggc

SEQ ID NO: 846845 - RNA, 21 nt, Human
aggcacccgggagccacagaa

SEQ ID NO: 846846 - RNA, 20 nt, Human
aggcccaggccagccaggaa

SEQ ID NO: 846847 - RNA, 25 nt, Human
aggcccuggguccagggucugucag

SEQ ID NO: 846848 - RNA, 22 nt, Human
aggcggagauggagcccugggg

SEQ ID NO: 846849 - RNA, 23 nt, Human
aggcggagauggagcccugggga

SEQ ID NO: 846850 - RNA, 18 nt, Human
aggggagugggggugcca

SEQ ID NO: 846851 - RNA, 22 nt, Human
aggguaaagagagagggagaga

SEQ ID NO: 846852 - RNA, 18 nt, Human
aguagccccuccuccagg

SEQ ID NO: 846853 - RNA, 20 nt, Human
caacgggcagggccggaggg

SEQ ID NO: 846854 - RNA, 23 nt, Human
caacuugauaugccccccacauc

SEQ ID NO: 846855 - RNA, 22 nt, Human
caaggcccaggccagccaggaa

SEQ ID NO: 846856 - RNA, 18 nt, Human
cacagcaaggcccaggcc

SEQ ID NO: 846857 - RNA, 22 nt, Human
cacagcgccgcccgcagucccc

SEQ ID NO: 846858 - RNA, 21 nt, Human
cacaugacucccagggccuga

SEQ ID NO: 846859 - RNA, 19 nt, Human
caccccgcaggaagcccaa

SEQ ID NO: 846860 - RNA, 24 nt, Human
cacccgggagccacagaaggugcu

SEQ ID NO: 846861 - RNA, 21 nt, Human
cagcgugaacagggcuccccu

SEQ ID NO: 846862 - RNA, 21 nt, Human
caggaaggccagcagguagcg

SEQ ID NO: 846863 - RNA, 21 nt, Human
caggccagccaggaagcucau

SEQ ID NO: 846864 - RNA, 18 nt, Human
caguccccagcggucugc

SEQ ID NO: 846865 - RNA, 24 nt, Human
cauccacaugacucccagggccug

SEQ ID NO: 846866 - RNA, 23 nt, Human
cauuuagaaaaagaagcagcagu

SEQ ID NO: 846867 - RNA, 22 nt, Human
ccacagcccagcagccugggac

SEQ ID NO: 846868 - RNA, 20 nt, Human
ccagccaggaagcucauggg

SEQ ID NO: 846869 - RNA, 23 nt, Human
ccagccaggaagcucaugggucc

SEQ ID NO: 846870 - RNA, 23 nt, Human
ccaggccagccaggaagcucaug

SEQ ID NO: 846871 - RNA, 20 nt, Human
cccagucccucuggucucug

SEQ ID NO: 846872 - RNA, 20 nt, Human
ccccccuaggucaucugcca

SEQ ID NO: 846873 - RNA, 19 nt, Human
ccccgcaggaagcccaagg

SEQ ID NO: 846874 - RNA, 22 nt, Human
ccccgccgcgcguccgccccuc

SEQ ID NO: 846875 - RNA, 19 nt, Human
ccccucgagcucuccccgc

SEQ ID NO: 846876 - RNA, 23 nt, Human
ccccucggucagccgcccggucc

SEQ ID NO: 846877 - RNA, 19 nt, Human
ccccugaggcggagaugga

SEQ ID NO: 846878 - RNA, 22 nt, Human
ccccugaggcggagauggaaag

SEQ ID NO: 846879 - RNA, 24 nt, Human
ccccugggccucagaggggugggg

SEQ ID NO: 846880 - RNA, 22 nt, Human
ccccuguggcauacucguggcu

SEQ ID NO: 846881 - RNA, 24 nt, Human
ccccuguuacucagcucgccgcuc

SEQ ID NO: 846882 - RNA, 23 nt, Human
cccgcaguccccagcggucugcc

SEQ ID NO: 846883 - RNA, 18 nt, Human
cccucgagcucuccccgc

SEQ ID NO: 846884 - RNA, 24 nt, Human
cccucggucagccgcccgguccac

SEQ ID NO: 846885 - RNA, 28 nt, Human
cccuggguccagggucugucagagcccc

SEQ ID NO: 846886 - RNA, 24 nt, Human
ccgcaggaagcccaagguugcugc

SEQ ID NO: 846887 - RNA, 22 nt, Human
ccgccaggccgaaccaggcugu

SEQ ID NO: 846888 - RNA, 22 nt, Human
ccgcccgguccaccagcuccag

SEQ ID NO: 846889 - RNA, 18 nt, Human
ccgccgcgcguccgcccc

SEQ ID NO: 846890 - RNA, 22 nt, Human
ccgugcucgcccgccccuuuuu

SEQ ID NO: 846891 - RNA, 19 nt, Human
ccuaggucaucugccagga

SEQ ID NO: 846892 - RNA, 23 nt, Human
ccucuggucucuguccuguuguc

SEQ ID NO: 846893 - RNA, 18 nt, Human
ccugaggacaggagccuc

SEQ ID NO: 846894 - RNA, 22 nt, Human
ccugaggcuagcccuccucagg

SEQ ID NO: 846895 - RNA, 19 nt, Human
ccugccugguuuugaaagc

SEQ ID NO: 846896 - RNA, 18 nt, Human
ccuguuacucagcucgcc

SEQ ID NO: 846897 - RNA, 23 nt, Human
cgcccgcaguccccagcggucug

SEQ ID NO: 846898 - RNA, 21 nt, Human
cgccgggucccuggcaggccc

SEQ ID NO: 846899 - RNA, 18 nt, Human
cgcgggccgugcucgccc

SEQ ID NO: 846900 - RNA, 25 nt, Human
cgcgggccgugcucgcccgccccuu

SEQ ID NO: 846901 - RNA, 20 nt, Human
cguggcuggggagggagagc

SEQ ID NO: 846902 - RNA, 24 nt, Human
cucuguccuguugucuaagggcca

SEQ ID NO: 846903 - RNA, 24 nt, Human
cugaguucucuggaaacaaaacca

SEQ ID NO: 846904 - RNA, 18 nt, Human
cuguugucuaagggccaa

SEQ ID NO: 846905 - RNA, 19 nt, Human
cuuggcccugccugguuuu

SEQ ID NO: 846906 - RNA, 20 nt, Human
gaagguguguuuuuuacaca

SEQ ID NO: 846907 - RNA, 22 nt, Human
gagagagagggagagagaggga

SEQ ID NO: 846908 - RNA, 19 nt, Human
gaggguaaagagagaggga

SEQ ID NO: 846909 - RNA, 22 nt, Human
gaguggcaggugaggcccuggg

SEQ ID NO: 846910 - RNA, 19 nt, Human
gaugaugacaggcgagaaa

SEQ ID NO: 846911 - RNA, 19 nt, Human
gcagggcugggccuccccu

SEQ ID NO: 846912 - RNA, 22 nt, Human
gcaggugaggcccuggguccag

SEQ ID NO: 846913 - RNA, 22 nt, Human
gccaagggacaguagccccucc

SEQ ID NO: 846914 - RNA, 18 nt, Human
gcccccaaacgagcaccu

SEQ ID NO: 846915 - RNA, 21 nt, Human
gccccgccgcgcguccgcccc

SEQ ID NO: 846916 - RNA, 18 nt, Human
gcccuggguccagggucc

SEQ ID NO: 846917 - RNA, 21 nt, Human
gcggagauggagcccugggga

SEQ ID NO: 846918 - RNA, 23 nt, Human
ggaauggagccagacuuggggug

SEQ ID NO: 846919 - RNA, 21 nt, Human
ggagaaaccagcgugaacagg

SEQ ID NO: 846920 - RNA, 20 nt, Human
ggagauggagcccuggggag

SEQ ID NO: 846921 - RNA, 19 nt, Human
ggagugggggugccaggcu

SEQ ID NO: 846922 - RNA, 23 nt, Human
ggccagccaggaagcucaugggu

SEQ ID NO: 846923 - RNA, 23 nt, Human
ggccugggggcugugcaggggag

SEQ ID NO: 846924 - RNA, 18 nt, Human
gggagugggggugccagg

SEQ ID NO: 846925 - RNA, 18 nt, Human
gggccgccaggccgaacc

SEQ ID NO: 846926 - RNA, 21 nt, Human
gggcugggccuccccucgagc

SEQ ID NO: 846927 - RNA, 19 nt, Human
ggguccgucaugggguugg

SEQ ID NO: 846928 - RNA, 19 nt, Human
gguaaagagagagggagag

SEQ ID NO: 846929 - RNA, 26 nt, Human
gguaaagagagagggagagagaggga

SEQ ID NO: 846930 - RNA, 18 nt, Human
guccccuuggcgggccgg

SEQ ID NO: 846931 - RNA, 23 nt, Human
gugccaggcugaggugcugccug

SEQ ID NO: 846932 - RNA, 22 nt, Human
guggggaggccuccaggggguc

SEQ ID NO: 846933 - RNA, 20 nt, Human
uaccuccaguggggccaagg

SEQ ID NO: 846934 - RNA, 19 nt, Human
ucagcaccuuguaagguga

SEQ ID NO: 846935 - RNA, 19 nt, Human
ucccacagcaaggcccagg

SEQ ID NO: 846936 - RNA, 24 nt, Human
ucccagggccugaguccacacugc

SEQ ID NO: 846937 - RNA, 24 nt, Human
uccccagcggucugccccgccgcg

SEQ ID NO: 846938 - RNA, 18 nt, Human
ucccucuggucucugucc

SEQ ID NO: 846939 - RNA, 26 nt, Human
ucgaugaugacaggcgagaaaccgag

SEQ ID NO: 846940 - RNA, 21 nt, Human
ugaaaggguccgucauggggu

SEQ ID NO: 846941 - RNA, 23 nt, Human
ugaagagcccccaaacgagcacc

SEQ ID NO: 846942 - RNA, 21 nt, Human
ugacucccagggccugagucc

SEQ ID NO: 846943 - RNA, 20 nt, Human
ugauaugccccccacauccc

SEQ ID NO: 846944 - RNA, 23 nt, Human
ugcaggggagugggggugccagg

SEQ ID NO: 846945 - RNA, 19 nt, Human
uggagaagccccugaggcg

SEQ ID NO: 846946 - RNA, 19 nt, Human
uggcaggcccuuggggucu

SEQ ID NO: 846947 - RNA, 22 nt, Human
uggcaggcccuuggggucuggc

SEQ ID NO: 846948 - RNA, 19 nt, Human
uggcauccacaugacuccc

SEQ ID NO: 846949 - RNA, 21 nt, Human
uggcuggggagggagagccag

SEQ ID NO: 846950 - RNA, 20 nt, Human
uggggagggagagccagucc

SEQ ID NO: 846951 - RNA, 20 nt, Human
uggggaggguaaagagagag

SEQ ID NO: 846952 - RNA, 20 nt, Human
ugggggcugugcaggggagu

SEQ ID NO: 846953 - RNA, 19 nt, Human
ugggguggagaagccccug

SEQ ID NO: 846954 - RNA, 23 nt, Human
ugggguggagaagccccugaggc

SEQ ID NO: 846955 - RNA, 20 nt, Human
uggguccagggucugucaga

SEQ ID NO: 846956 - RNA, 18 nt, Human
uugguugaguggcaggug

SEQ ID NO: 846957 - RNA, 20 nt, Human
aggccccauggcgcagggca

SEQ ID NO: 846958 - RNA, 21 nt, Human
cccaaggucacaccgucagcc

SEQ ID NO: 846959 - RNA, 19 nt, Human
ccccagcuucaaggcccca

SEQ ID NO: 846960 - RNA, 22 nt, Human
gcagggcauaggacagagccuu

SEQ ID NO: 846961 - RNA, 21 nt, Human
gggcauaggacagagccuugg

SEQ ID NO: 846962 - RNA, 23 nt, Human
gggugguccgggaggcagggccg

SEQ ID NO: 846963 - RNA, 18 nt, Human
ggugguccgggaggcagg

SEQ ID NO: 846964 - RNA, 22 nt, Human
ucaaggccccauggcgcagggc

SEQ ID NO: 846965 - RNA, 21 nt, Human
ucacaccgucagccaggagcg

SEQ ID NO: 846966 - RNA, 20 nt, Human
ugcgccccgcaggguggucc

SEQ ID NO: 846967 - RNA, 29 nt, Human
uuuuacaggaugaugaaacaugguuucaa

SEQ ID NO: 846968 - RNA, 22 nt, Human
uuuuuuuuuuuuuuuuacagga

SEQ ID NO: 846969 - RNA, 24 nt, Human
uuuuuuuuuuuuuuuuuuuacagg

SEQ ID NO: 846970 - RNA, 21 nt, Human
aaaauuccccacccacucccc

SEQ ID NO: 846971 - RNA, 23 nt, Human
aaacaggaacuaacaggccaaac

SEQ ID NO: 846972 - RNA, 19 nt, Human
aaagagguucucggccuuu

SEQ ID NO: 846973 - RNA, 24 nt, Human
aaauacaaaccuaaaaaacagcca

SEQ ID NO: 846974 - RNA, 19 nt, Human
aacauaaaggcaugagaaa

SEQ ID NO: 846975 - RNA, 19 nt, Human
aacuaacaggccaaacuac

SEQ ID NO: 846976 - RNA, 19 nt, Human
agagugccaggguccucug

SEQ ID NO: 846977 - RNA, 21 nt, Human
agcugccugggagggugagac

SEQ ID NO: 846978 - RNA, 25 nt, Human
aggaaguuuacugccgguguuagga

SEQ ID NO: 846979 - RNA, 19 nt, Human
aggacccugggaucuccca

SEQ ID NO: 846980 - RNA, 18 nt, Human
aggcaugagaaacaguca

SEQ ID NO: 846981 - RNA, 23 nt, Human
aguaaagggagcagcaauugaaa

SEQ ID NO: 846982 - RNA, 20 nt, Human
aguaggaaagggagaggaga

SEQ ID NO: 846983 - RNA, 24 nt, Human
agucauggccaaaacaggaacuaa

SEQ ID NO: 846984 - RNA, 18 nt, Human
aguggcggcacauaaaua

SEQ ID NO: 846985 - RNA, 26 nt, Human
caaaacaggaacuaacaggccaaacc

SEQ ID NO: 846986 - RNA, 21 nt, Human
cagcuucagcuauggccaaag

SEQ ID NO: 846987 - RNA, 18 nt, Human
caggguccucuguccccu

SEQ ID NO: 846988 - RNA, 22 nt, Human
cauucccugccaugcccaccuc

SEQ ID NO: 846989 - RNA, 20 nt, Human
ccaaagaggccagcguggca

SEQ ID NO: 846990 - RNA, 21 nt, Human
ccaaggauggggcuuucugua

SEQ ID NO: 846991 - RNA, 21 nt, Human
ccagcguggcaagguccuguc

SEQ ID NO: 846992 - RNA, 19 nt, Human
ccagggaguagucacaggu

SEQ ID NO: 846993 - RNA, 18 nt, Human
ccaggguccucugucccc

SEQ ID NO: 846994 - RNA, 22 nt, Human
ccaggguccucuguccccuccg

SEQ ID NO: 846995 - RNA, 18 nt, Human
ccuaagccaaggaugggg

SEQ ID NO: 846996 - RNA, 20 nt, Human
ccuccgcaccugagggcaaa

SEQ ID NO: 846997 - RNA, 20 nt, Human
cggcacauaaauacaaaccc

SEQ ID NO: 846998 - RNA, 21 nt, Human
cggcacauaaauacaaaccua

SEQ ID NO: 846999 - RNA, 24 nt, Human
cucccaggccuuacaaaaguggcg

SEQ ID NO: 847000 - RNA, 20 nt, Human
cucccuaagccaaggauggg

SEQ ID NO: 847001 - RNA, 27 nt, Human
cugagggcaaaguuccaggaaguuuac

SEQ ID NO: 847002 - RNA, 19 nt, Human
cuggaggugagaccuuucc

SEQ ID NO: 847003 - RNA, 19 nt, Human
cuguaaucccgacugcucc

SEQ ID NO: 847004 - RNA, 29 nt, Human
gaaaaugugcccuccucaggauugguccc

SEQ ID NO: 847005 - RNA, 23 nt, Human
gaaggaacauaaaggcaugagaa

SEQ ID NO: 847006 - RNA, 19 nt, Human
gagaaaguaaagggagcag

SEQ ID NO: 847007 - RNA, 26 nt, Human
gcagcaauugaaacucgcccuugacc

SEQ ID NO: 847008 - RNA, 24 nt, Human
gccagcguggcaagguccugucuc

SEQ ID NO: 847009 - RNA, 21 nt, Human
gcccugccauugcuucaagga

SEQ ID NO: 847010 - RNA, 18 nt, Human
gccugggagggugagacu

SEQ ID NO: 847011 - RNA, 19 nt, Human
gcuccaggcuggaggugag

SEQ ID NO: 847012 - RNA, 19 nt, Human
gucagggggaggguggagg

SEQ ID NO: 847013 - RNA, 19 nt, Human
uaaaaaacagccauuuccu

SEQ ID NO: 847014 - RNA, 23 nt, Human
uaaaaaacagccauuuccugcca

SEQ ID NO: 847015 - RNA, 23 nt, Human
uaaaugcaagacaugagcauaaa

SEQ ID NO: 847016 - RNA, 20 nt, Human
uagagugccuuuguaugugg

SEQ ID NO: 847017 - RNA, 24 nt, Human
uagcuucccuuugaggguguguga

SEQ ID NO: 847018 - RNA, 26 nt, Human
uagucacagguagagaaaguaaaggg

SEQ ID NO: 847019 - RNA, 19 nt, Human
ucaacuggccccacagcuu

SEQ ID NO: 847020 - RNA, 25 nt, Human
ucaacuggccccacagcuucagcua

SEQ ID NO: 847021 - RNA, 21 nt, Human
ucagugucucugccucuggcu

SEQ ID NO: 847022 - RNA, 22 nt, Human
ucagugucucugccucuggcuc

SEQ ID NO: 847023 - RNA, 18 nt, Human
uccacagaaaccagcccc

SEQ ID NO: 847024 - RNA, 18 nt, Human
uccaggcuggaggugaga

SEQ ID NO: 847025 - RNA, 21 nt, Human
ucccuaagccaaggauggggc

SEQ ID NO: 847026 - RNA, 24 nt, Human
ucccugcuggcccugccauugcuu

SEQ ID NO: 847027 - RNA, 21 nt, Human
ucucccaggccuuacaaaagu

SEQ ID NO: 847028 - RNA, 18 nt, Human
ucuggcucacucucucca

SEQ ID NO: 847029 - RNA, 24 nt, Human
ugagaaacagucaucucaauaaau

SEQ ID NO: 847030 - RNA, 19 nt, Human
ugagaccuuuccuagagaa

SEQ ID NO: 847031 - RNA, 19 nt, Human
ugagcucaaguucaguguc

SEQ ID NO: 847032 - RNA, 24 nt, Human
ugauggcagggagccaagaggugc

SEQ ID NO: 847033 - RNA, 23 nt, Human
ugcaaaagucauggccaaaacag

SEQ ID NO: 847034 - RNA, 19 nt, Human
ugccaugcccaccucccug

SEQ ID NO: 847035 - RNA, 20 nt, Human
ugccgguguuaggaggugag

SEQ ID NO: 847036 - RNA, 27 nt, Human
ugccucuggcuccacagaaaccagccc

SEQ ID NO: 847037 - RNA, 21 nt, Human
uggcaagguccugucucagau

SEQ ID NO: 847038 - RNA, 18 nt, Human
uggccaaaacaggaacua

SEQ ID NO: 847039 - RNA, 20 nt, Human
uggcccguguagcuucccuu

SEQ ID NO: 847040 - RNA, 21 nt, Human
uggcccguguagcuucccuuu

SEQ ID NO: 847041 - RNA, 22 nt, Human
uggcuucuggaaaaugugcccu

SEQ ID NO: 847042 - RNA, 19 nt, Human
uggggcuuucuguaauccc

SEQ ID NO: 847043 - RNA, 23 nt, Human
uguguccaguaaggaggugaagu

SEQ ID NO: 847044 - RNA, 21 nt, Human
uguuaaacaaaauucaaggcu

SEQ ID NO: 847045 - RNA, 24 nt, Human
uucccugccaugcccaccucccug

SEQ ID NO: 847046 - RNA, 20 nt, Human
uugagggugugugacuugcc

SEQ ID NO: 847047 - RNA, 20 nt, Human
uuuguauguggucaggggga

SEQ ID NO: 847048 - RNA, 22 nt, Human
uuuuuuuuuuugagcacaaagg

SEQ ID NO: 847049 - RNA, 18 nt, Human
uuuuuuuuuuuuuuuuug

SEQ ID NO: 847050 - RNA, 23 nt, Human
aaacaggccacagccaggccccu

SEQ ID NO: 847051 - RNA, 21 nt, Human
acaggccacagccaggccccu

SEQ ID NO: 847052 - RNA, 26 nt, Human
acgucgcccaccuaagcgugaacagc

SEQ ID NO: 847053 - RNA, 18 nt, Human
acuccacaagcucccacc

SEQ ID NO: 847054 - RNA, 20 nt, Human
aggccccucgauggacgcag

SEQ ID NO: 847055 - RNA, 23 nt, Human
aggcucuggugcuggugaucccg

SEQ ID NO: 847056 - RNA, 19 nt, Human
aggugcagguuugcagcug

SEQ ID NO: 847057 - RNA, 21 nt, Human
caccggaggagcugaaagccc

SEQ ID NO: 847058 - RNA, 22 nt, Human
cauccacgcucugcgcugaagg

SEQ ID NO: 847059 - RNA, 24 nt, Human
ccaccuaagcgugaacagcugcgu

SEQ ID NO: 847060 - RNA, 23 nt, Human
ccagagcauccacgcucugcgcu

SEQ ID NO: 847061 - RNA, 25 nt, Human
cccaccaccggaggagcugaaagcc

SEQ ID NO: 847062 - RNA, 20 nt, Human
cccuccaaagcagauuccug

SEQ ID NO: 847063 - RNA, 22 nt, Human
cccugcacugggcagcggcccc

SEQ ID NO: 847064 - RNA, 18 nt, Human
cccuguguggucugaggc

SEQ ID NO: 847065 - RNA, 18 nt, Human
ccgccccgcgcugaaccc

SEQ ID NO: 847066 - RNA, 20 nt, Human
ccgccggaggagcugcaccc

SEQ ID NO: 847067 - RNA, 23 nt, Human
ccgcugcccugcuggugaacccg

SEQ ID NO: 847068 - RNA, 21 nt, Human
ccggcccccaccaccggagga

SEQ ID NO: 847069 - RNA, 21 nt, Human
ccggcccccaccgccggagga

SEQ ID NO: 847070 - RNA, 20 nt, Human
cgacuccacaagcucccacc

SEQ ID NO: 847071 - RNA, 22 nt, Human
cgcccaccugcgcccacgucgc

SEQ ID NO: 847072 - RNA, 22 nt, Human
cgggaggagccagcaugcccca

SEQ ID NO: 847073 - RNA, 18 nt, Human
cuccaaggccaggggucc

SEQ ID NO: 847074 - RNA, 22 nt, Human
cugcgcccacgucgcccaccua

SEQ ID NO: 847075 - RNA, 24 nt, Human
cuggugcuggugaucccggccccc

SEQ ID NO: 847076 - RNA, 20 nt, Human
gaaaaauagacauuucccuc

SEQ ID NO: 847077 - RNA, 23 nt, Human
gaaaacaggccacagccaggccc

SEQ ID NO: 847078 - RNA, 20 nt, Human
gcagcggccccgccccgcgc

SEQ ID NO: 847079 - RNA, 18 nt, Human
gcccacgucgcccaccua

SEQ ID NO: 847080 - RNA, 22 nt, Human
gcucccaccaggggcuccccau

SEQ ID NO: 847081 - RNA, 24 nt, Human
ggagggucuggaggagggaagggg

SEQ ID NO: 847082 - RNA, 21 nt, Human
ggcagcggccccgccccgcgc

SEQ ID NO: 847083 - RNA, 18 nt, Human
uccaaagcagauuccugg

SEQ ID NO: 847084 - RNA, 24 nt, Human
ucccuccaaagcagauuccugggg

SEQ ID NO: 847085 - RNA, 22 nt, Human
uccgacuccacaagcucccacc

SEQ ID NO: 847086 - RNA, 19 nt, Human
ugaaggcacugaaccugcc

SEQ ID NO: 847087 - RNA, 18 nt, Human
ugauccgacuccacaagc

SEQ ID NO: 847088 - RNA, 18 nt, Human
uggaggagggaaggggcc

SEQ ID NO: 847089 - RNA, 20 nt, Human
uggaggagggaaggggcccu

SEQ ID NO: 847090 - RNA, 19 nt, Human
uggcgggaggagccagcau

SEQ ID NO: 847091 - RNA, 20 nt, Human
uggggcuggagggucccucc

SEQ ID NO: 847092 - RNA, 24 nt, Human
uuccuggggcuggagggucccucc

SEQ ID NO: 847093 - RNA, 24 nt, Human
uucugcacagguacgugauccgac

SEQ ID NO: 847094 - RNA, 25 nt, Human
uuuuuuuuuuuugcugcugggucgg

SEQ ID NO: 847095 - RNA, 25 nt, Human
uuuuuuuuuuuuuuuugcugcuggg

SEQ ID NO: 847096 - RNA, 18 nt, Human
uuuuuuuuuuuuuuuuug

SEQ ID NO: 847097 - RNA, 20 nt, Human
uuuuuuuuuuuuuuuuugcu

SEQ ID NO: 847098 - RNA, 25 nt, Human
uuuuuuuuuuuuuuuuugcugcugg

SEQ ID NO: 847099 - RNA, 21 nt, Human
aacaguccaaaccggaaggga

SEQ ID NO: 847100 - RNA, 20 nt, Human
aacaguccuuccagagcccu

SEQ ID NO: 847101 - RNA, 24 nt, Human
aaccggaagggagaauuuauuuuu

SEQ ID NO: 847102 - RNA, 19 nt, Human
aacuccuguccccuuaguc

SEQ ID NO: 847103 - RNA, 21 nt, Human
aagcugccuuugccgcugggc

SEQ ID NO: 847104 - RNA, 18 nt, Human
agaaaccuccucagccuu

SEQ ID NO: 847105 - RNA, 18 nt, Human
agacagggcuuggugggg

SEQ ID NO: 847106 - RNA, 18 nt, Human
agcaggaggguggcagag

SEQ ID NO: 847107 - RNA, 19 nt, Human
aggggcccugaccacugug

SEQ ID NO: 847108 - RNA, 21 nt, Human
auggcucccauuuugaaggga

SEQ ID NO: 847109 - RNA, 22 nt, Human
cagagcugggacaaagcugccu

SEQ ID NO: 847110 - RNA, 20 nt, Human
ccaaucccugccguccuugc

SEQ ID NO: 847111 - RNA, 18 nt, Human
ccacugugagcaggaggg

SEQ ID NO: 847112 - RNA, 19 nt, Human
ccauccacgucuuccucgu

SEQ ID NO: 847113 - RNA, 19 nt, Human
cccaagggccuucccauga

SEQ ID NO: 847114 - RNA, 21 nt, Human
ccccuuagucaugagaacaga

SEQ ID NO: 847115 - RNA, 22 nt, Human
cccucguccugguguuccugau

SEQ ID NO: 847116 - RNA, 23 nt, Human
ccuucuagcucacccaggccaga

SEQ ID NO: 847117 - RNA, 23 nt, Human
ccuugccccugaggggcccugac

SEQ ID NO: 847118 - RNA, 24 nt, Human
ccuuucaccuggcaggggaggggg

SEQ ID NO: 847119 - RNA, 18 nt, Human
cuccuguccccuuaguca

SEQ ID NO: 847120 - RNA, 18 nt, Human
gagcacaggcggggaagc

SEQ ID NO: 847121 - RNA, 24 nt, Human
gagcaggaggguggcagagcuggg

SEQ ID NO: 847122 - RNA, 18 nt, Human
gaggggcccugaccacug

SEQ ID NO: 847123 - RNA, 23 nt, Human
gaggggcccugaccacugugagc

SEQ ID NO: 847124 - RNA, 18 nt, Human
gaggguggcagagcuggg

SEQ ID NO: 847125 - RNA, 19 nt, Human
gcucccauuuugaagggag

SEQ ID NO: 847126 - RNA, 18 nt, Human
gggacuccaauguccuug

SEQ ID NO: 847127 - RNA, 20 nt, Human
gggcccugaccacugugagc

SEQ ID NO: 847128 - RNA, 20 nt, Human
uaguguccccagcauagggg

SEQ ID NO: 847129 - RNA, 23 nt, Human
ucacccaggccagaagcgagaau

SEQ ID NO: 847130 - RNA, 18 nt, Human
ucaccuggcaggggaggg

SEQ ID NO: 847131 - RNA, 23 nt, Human
ucagauucccaagggccuuccca

SEQ ID NO: 847132 - RNA, 24 nt, Human
ucagccuucauuuguucguggaug

SEQ ID NO: 847133 - RNA, 22 nt, Human
uccaugugguccgagugaggug

SEQ ID NO: 847134 - RNA, 19 nt, Human
ucccaugaaguugucuagg

SEQ ID NO: 847135 - RNA, 22 nt, Human
ucguccugguguuccugaucau

SEQ ID NO: 847136 - RNA, 20 nt, Human
ucuagcucacccaggccaga

SEQ ID NO: 847137 - RNA, 22 nt, Human
ucuagcucacccaggccagaag

SEQ ID NO: 847138 - RNA, 20 nt, Human
ugcacacucauggacuuuag

SEQ ID NO: 847139 - RNA, 20 nt, Human
ugccuguaguguccccagca

SEQ ID NO: 847140 - RNA, 19 nt, Human
ugccuuugccgcugggcuu

SEQ ID NO: 847141 - RNA, 18 nt, Human
uggagggagcacaggcgg

SEQ ID NO: 847142 - RNA, 20 nt, Human
uuuuuuuuuuuuaacagucc

SEQ ID NO: 847143 - RNA, 23 nt, Human
uuuuuuuuuuuuuuuuuuaacag

SEQ ID NO: 847144 - RNA, 22 nt, Human
aaauagauuauacccaaggcuc

SEQ ID NO: 847145 - RNA, 20 nt, Human
aagcagugggaagagccuuu

SEQ ID NO: 847146 - RNA, 18 nt, Human
aagcugcaagugacaagg

SEQ ID NO: 847147 - RNA, 24 nt, Human
agaaaagccagcuccacugaaggg

SEQ ID NO: 847148 - RNA, 18 nt, Human
agagggagaagcaggggc

SEQ ID NO: 847149 - RNA, 21 nt, Human
agagggagaagcaggggccug

SEQ ID NO: 847150 - RNA, 19 nt, Human
agccaucaaagcagagggc

SEQ ID NO: 847151 - RNA, 25 nt, Human
agccugccuccccaaauggcuucca

SEQ ID NO: 847152 - RNA, 25 nt, Human
aggcagacugggagagaagaccagg

SEQ ID NO: 847153 - RNA, 20 nt, Human
aggcauggaaaggggcuggg

SEQ ID NO: 847154 - RNA, 18 nt, Human
aggggccuggggucaagg

SEQ ID NO: 847155 - RNA, 19 nt, Human
agggguggggaaaaggaag

SEQ ID NO: 847156 - RNA, 19 nt, Human
aucugggaggggugugggg

SEQ ID NO: 847157 - RNA, 21 nt, Human
caaacuuacgggccacccucc

SEQ ID NO: 847158 - RNA, 23 nt, Human
caacacaguaacaagcaguggga

SEQ ID NO: 847159 - RNA, 22 nt, Human
caccacccaccccccaagugcu

SEQ ID NO: 847160 - RNA, 22 nt, Human
caccacccaccccccaagugcu

SEQ ID NO: 847161 - RNA, 18 nt, Human
cacccuccaccacccacc

SEQ ID NO: 847162 - RNA, 21 nt, Human
cacccuccaccacccaccccc

SEQ ID NO: 847163 - RNA, 22 nt, Human
cagagcuugccaaauggaguga

SEQ ID NO: 847164 - RNA, 22 nt, Human
cagcuccacugaacaaagggga

SEQ ID NO: 847165 - RNA, 20 nt, Human
ccaaagaacaugaguucacc

SEQ ID NO: 847166 - RNA, 18 nt, Human
ccacagcacgccuucccu

SEQ ID NO: 847167 - RNA, 18 nt, Human
ccaccacccaccccccaa

SEQ ID NO: 847168 - RNA, 19 nt, Human
ccaccacccaccccccaag

SEQ ID NO: 847169 - RNA, 21 nt, Human
ccaccacccaccccccaagug

SEQ ID NO: 847170 - RNA, 20 nt, Human
ccacccuccaccacccaccc

SEQ ID NO: 847171 - RNA, 23 nt, Human
ccagcuccacugaacaaagggga

SEQ ID NO: 847172 - RNA, 21 nt, Human
cccaaagaacaugaguucacc

SEQ ID NO: 847173 - RNA, 18 nt, Human
cccaggcucccccucaga

SEQ ID NO: 847174 - RNA, 23 nt, Human
cccagggcugggcuaggcagacu

SEQ ID NO: 847175 - RNA, 25 nt, Human
ccccaaauggcuuccaaaucccuca

SEQ ID NO: 847176 - RNA, 20 nt, Human
ccccucauccccuacucaaa

SEQ ID NO: 847177 - RNA, 20 nt, Human
cccuccaccacccacccccc

SEQ ID NO: 847178 - RNA, 22 nt, Human
ccuccaccacccaccccccaag

SEQ ID NO: 847179 - RNA, 21 nt, Human
ccuugcccaaacccuccagcc

SEQ ID NO: 847180 - RNA, 23 nt, Human
ccuugcccaaacccuccagccuc

SEQ ID NO: 847181 - RNA, 19 nt, Human
cucagaacugauaaagagg

SEQ ID NO: 847182 - RNA, 18 nt, Human
cugcaagugacaaggcag

SEQ ID NO: 847183 - RNA, 22 nt, Human
cugggaggggugugggguggga

SEQ ID NO: 847184 - RNA, 19 nt, Human
cuugcccaaacccuccagc

SEQ ID NO: 847185 - RNA, 22 nt, Human
cuugcccaaacccuccagccuc

SEQ ID NO: 847186 - RNA, 20 nt, Human
cuugguugagugcuggaaaa

SEQ ID NO: 847187 - RNA, 23 nt, Human
gaagagcagggguggggaaaagg

SEQ ID NO: 847188 - RNA, 18 nt, Human
gagaagcaggggccuggg

SEQ ID NO: 847189 - RNA, 23 nt, Human
gagcuggaggccaggaggguucu

SEQ ID NO: 847190 - RNA, 21 nt, Human
gccagcuccacugaacaaagg

SEQ ID NO: 847191 - RNA, 19 nt, Human
gcccaaacccuccagccuc

SEQ ID NO: 847192 - RNA, 18 nt, Human
ggagaagcaggggccugg

SEQ ID NO: 847193 - RNA, 19 nt, Human
ggccuggggucaaggggga

SEQ ID NO: 847194 - RNA, 24 nt, Human
gggguguggggugggaugagcuuu

SEQ ID NO: 847195 - RNA, 20 nt, Human
gucccagggcugggcuaggc

SEQ ID NO: 847196 - RNA, 18 nt, Human
uaacaagcagugggaaga

SEQ ID NO: 847197 - RNA, 23 nt, Human
uacccaaggcucuccuccugggg

SEQ ID NO: 847198 - RNA, 25 nt, Human
uacccaaggcucuccuccuggggac

SEQ ID NO: 847199 - RNA, 20 nt, Human
ucaagugaagcuaaauucug

SEQ ID NO: 847200 - RNA, 19 nt, Human
ucaaucauggcgaccauuc

SEQ ID NO: 847201 - RNA, 20 nt, Human
ucauccccuacucaaauucc

SEQ ID NO: 847202 - RNA, 22 nt, Human
uccaaaucccucagcuaaaauc

SEQ ID NO: 847203 - RNA, 23 nt, Human
uccccaaauggcuuccaaauccc

SEQ ID NO: 847204 - RNA, 21 nt, Human
ugagcuggaggccaggagggu

SEQ ID NO: 847205 - RNA, 23 nt, Human
ugccuccccaaauggcuuccaaa

SEQ ID NO: 847206 - RNA, 19 nt, Human
ugccuugcccaaacccucc

SEQ ID NO: 847207 - RNA, 20 nt, Human
uggaaaggggcugggagaaa

SEQ ID NO: 847208 - RNA, 20 nt, Human
uggaggccaggaggguucuu

SEQ ID NO: 847209 - RNA, 24 nt, Human
uggagugaaaggcauggaaagggg

SEQ ID NO: 847210 - RNA, 28 nt, Human
uggagugaaaggcauggaaaggggcugg

SEQ ID NO: 847211 - RNA, 23 nt, Human
uggcagugagcagaucugggagg

SEQ ID NO: 847212 - RNA, 21 nt, Human
ugggagaaaagccagcuccac

SEQ ID NO: 847213 - RNA, 18 nt, Human
ugggagggguguggggug

SEQ ID NO: 847214 - RNA, 18 nt, Human
ugggagggguguggggug

SEQ ID NO: 847215 - RNA, 22 nt, Human
ugggaugagcuuugcuccuugg

SEQ ID NO: 847216 - RNA, 21 nt, Human
uggggacccaaacccgucccc

SEQ ID NO: 847217 - RNA, 18 nt, Human
uucaccucagccaucaaa

SEQ ID NO: 847218 - RNA, 21 nt, Human
uuccagucccagggcugggcu

SEQ ID NO: 847219 - RNA, 19 nt, Human
uugguugagugcuggaaaa

SEQ ID NO: 847220 - RNA, 20 nt, Human
uuuagaaucccuccucccca

SEQ ID NO: 847221 - RNA, 20 nt, Human
uuuuuuuuuuuuagagaagc

SEQ ID NO: 847222 - RNA, 24 nt, Human
aagaaaacaaagggagccgguacc

SEQ ID NO: 847223 - RNA, 18 nt, Human
aaggguggcaaaugaccu

SEQ ID NO: 847224 - RNA, 23 nt, Human
acacaguuucccucccugaagcc

SEQ ID NO: 847225 - RNA, 23 nt, Human
acccugucugucucaggcuugcu

SEQ ID NO: 847226 - RNA, 18 nt, Human
agaaauaaaauggaaaug

SEQ ID NO: 847227 - RNA, 21 nt, Human
agcuccguggccuccuggagg

SEQ ID NO: 847228 - RNA, 22 nt, Human
agcuggcauccuggacucuggg

SEQ ID NO: 847229 - RNA, 18 nt, Human
aggaaacacagaccucaa

SEQ ID NO: 847230 - RNA, 19 nt, Human
aggaaacacagaccucaaa

SEQ ID NO: 847231 - RNA, 21 nt, Human
aggaaagaaacaaauucugaa

SEQ ID NO: 847232 - RNA, 22 nt, Human
aggaaagaaacaaauucugaaa

SEQ ID NO: 847233 - RNA, 19 nt, Human
aggcugcuaugagucccuu

SEQ ID NO: 847234 - RNA, 18 nt, Human
agggaggagcaucccagg

SEQ ID NO: 847235 - RNA, 21 nt, Human
agguggccagcuuccuggagc

SEQ ID NO: 847236 - RNA, 20 nt, Human
auggaaauggggagaaagaa

SEQ ID NO: 847237 - RNA, 22 nt, Human
caaccccgucccccugucugga

SEQ ID NO: 847238 - RNA, 24 nt, Human
caaccccgucccccugucuggagg

SEQ ID NO: 847239 - RNA, 21 nt, Human
cagaagaaauaaaauggaaau

SEQ ID NO: 847240 - RNA, 21 nt, Human
caggacccuaaaauuugcaaa

SEQ ID NO: 847241 - RNA, 21 nt, Human
caggcuaaaggccccacuccc

SEQ ID NO: 847242 - RNA, 19 nt, Human
ccacugccgggcaccgccu

SEQ ID NO: 847243 - RNA, 20 nt, Human
ccagaagaaauaaaauggaa

SEQ ID NO: 847244 - RNA, 19 nt, Human
ccagccccugcuguccuuu

SEQ ID NO: 847245 - RNA, 18 nt, Human
ccagcuccguggccuccu

SEQ ID NO: 847246 - RNA, 23 nt, Human
ccauccauacuuggcucaggacc

SEQ ID NO: 847247 - RNA, 19 nt, Human
cccagaagaaauaaaaugg

SEQ ID NO: 847248 - RNA, 19 nt, Human
ccccagggucuccacuagc

SEQ ID NO: 847249 - RNA, 22 nt, Human
cccggguuccaggcaccaagag

SEQ ID NO: 847250 - RNA, 21 nt, Human
cccucuaggcaggccagcccc

SEQ ID NO: 847251 - RNA, 23 nt, Human
cccucuaggcaggccagccccug

SEQ ID NO: 847252 - RNA, 23 nt, Human
cccuggccaggugaggcuaggac

SEQ ID NO: 847253 - RNA, 24 nt, Human
ccgccugcacagggcucuggcugc

SEQ ID NO: 847254 - RNA, 19 nt, Human
ccucuaggcaggccagccc

SEQ ID NO: 847255 - RNA, 21 nt, Human
ccugcacagggcucuggcugc

SEQ ID NO: 847256 - RNA, 23 nt, Human
ccuggaacccugucugucucagg

SEQ ID NO: 847257 - RNA, 19 nt, Human
ccuggagcccaggcccgcu

SEQ ID NO: 847258 - RNA, 19 nt, Human
ccuggagcccaggcccgcu

SEQ ID NO: 847259 - RNA, 18 nt, Human
ccuggagggggaccccca

SEQ ID NO: 847260 - RNA, 22 nt, Human
cuaugagucccuuccccuuccc

SEQ ID NO: 847261 - RNA, 20 nt, Human
cuccguggccuccuggaggg

SEQ ID NO: 847262 - RNA, 21 nt, Human
cuccuggagggggacccccag

SEQ ID NO: 847263 - RNA, 23 nt, Human
cucugucuggcuucuccccuuca

SEQ ID NO: 847264 - RNA, 24 nt, Human
cugaagccaaggguggcaaaugac

SEQ ID NO: 847265 - RNA, 26 nt, Human
cugcuguccuuugggccccucccucc

SEQ ID NO: 847266 - RNA, 24 nt, Human
cuucccuacccauccugcuggggg

SEQ ID NO: 847267 - RNA, 24 nt, Human
cuuguucugacagguggucuuggc

SEQ ID NO: 847268 - RNA, 18 nt, Human
cuuuguguuguccaugga

SEQ ID NO: 847269 - RNA, 21 nt, Human
cuuuuggccaccgucaccugg

SEQ ID NO: 847270 - RNA, 18 nt, Human
gaaagaaacaaauucuga

SEQ ID NO: 847271 - RNA, 19 nt, Human
gacucugggcgcuggacuc

SEQ ID NO: 847272 - RNA, 19 nt, Human
gagcagggccugagguagg

SEQ ID NO: 847273 - RNA, 21 nt, Human
gagcaucuuggaggaggucug

SEQ ID NO: 847274 - RNA, 19 nt, Human
gaggcagggcccaguccug

SEQ ID NO: 847275 - RNA, 19 nt, Human
gagggggacccccaggguc

SEQ ID NO: 847276 - RNA, 23 nt, Human
gcaaaugaccuugacccuggccg

SEQ ID NO: 847277 - RNA, 23 nt, Human
gcacugucugccugcgucguagc

SEQ ID NO: 847278 - RNA, 18 nt, Human
gccagccccugcuguccu

SEQ ID NO: 847279 - RNA, 20 nt, Human
gcugggguacaggggacacc

SEQ ID NO: 847280 - RNA, 18 nt, Human
ggagaaagaaaacaaagg

SEQ ID NO: 847281 - RNA, 18 nt, Human
ggcagggcccaguccugg

SEQ ID NO: 847282 - RNA, 22 nt, Human
ggcccaguccuggagcagggcc

SEQ ID NO: 847283 - RNA, 23 nt, Human
gggggucaggggagcccugggcc

SEQ ID NO: 847284 - RNA, 21 nt, Human
ggggucaggggagcccugggc

SEQ ID NO: 847285 - RNA, 21 nt, Human
gucccuuccccuucccuaccc

SEQ ID NO: 847286 - RNA, 19 nt, Human
uaugagucccuuccccuuc

SEQ ID NO: 847287 - RNA, 23 nt, Human
ucacggccuccuuuguguugucc

SEQ ID NO: 847288 - RNA, 22 nt, Human
ucaggggagcccugggccacag

SEQ ID NO: 847289 - RNA, 23 nt, Human
ucccagaagaaauaaaauggaaa

SEQ ID NO: 847290 - RNA, 22 nt, Human
ucccaggcugcuaugagucccu

SEQ ID NO: 847291 - RNA, 23 nt, Human
ucccaggcugcuaugagucccuu

SEQ ID NO: 847292 - RNA, 22 nt, Human
ucccccagcuccguggccuccu

SEQ ID NO: 847293 - RNA, 20 nt, Human
ucccugaagccaaggguggc

SEQ ID NO: 847294 - RNA, 18 nt, Human
uccggacaggaugggccc

SEQ ID NO: 847295 - RNA, 19 nt, Human
uccuggagcccaggcccgc

SEQ ID NO: 847296 - RNA, 19 nt, Human
uccuggggggcuccucugu

SEQ ID NO: 847297 - RNA, 23 nt, Human
ucugaaccauccauacuuggcuc

SEQ ID NO: 847298 - RNA, 21 nt, Human
ucugggcgcuggacucugcga

SEQ ID NO: 847299 - RNA, 18 nt, Human
ugaagucacuggggcugu

SEQ ID NO: 847300 - RNA, 21 nt, Human
ugaagucacuggggcuguggg

SEQ ID NO: 847301 - RNA, 23 nt, Human
ugaagucacuggggcugugggag

SEQ ID NO: 847302 - RNA, 19 nt, Human
ugaggcggacaaccccguc

SEQ ID NO: 847303 - RNA, 19 nt, Human
ugagguaggagcugaugcu

SEQ ID NO: 847304 - RNA, 18 nt, Human
ugcguugggucccccagc

SEQ ID NO: 847305 - RNA, 24 nt, Human
ugcugggggucugcugggggucag

SEQ ID NO: 847306 - RNA, 22 nt, Human
ugcugggguacaggggacaccg

SEQ ID NO: 847307 - RNA, 25 nt, Human
uggaacccugucugucucaggcuug

SEQ ID NO: 847308 - RNA, 22 nt, Human
uggacucugcgauuguuuccag

SEQ ID NO: 847309 - RNA, 23 nt, Human
uggagggggacccccagggucuc

SEQ ID NO: 847310 - RNA, 19 nt, Human
uggagggucaucaggcuga

SEQ ID NO: 847311 - RNA, 19 nt, Human
uggcaaaugaccuugaccc

SEQ ID NO: 847312 - RNA, 23 nt, Human
uggcaaaugaccuugacccuggc

SEQ ID NO: 847313 - RNA, 19 nt, Human
uggcugcucugcucagggc

SEQ ID NO: 847314 - RNA, 20 nt, Human
uggcuggcccucugugaggc

SEQ ID NO: 847315 - RNA, 21 nt, Human
ugggagacacaguuucccucc

SEQ ID NO: 847316 - RNA, 23 nt, Human
ugggcgcuggacucugcgauugu

SEQ ID NO: 847317 - RNA, 21 nt, Human
uggguggcaaaggaaacacag

SEQ ID NO: 847318 - RNA, 22 nt, Human
uggucuuggcuggcccucugug

SEQ ID NO: 847319 - RNA, 23 nt, Human
ugucucaggcuugcugucaucgg

SEQ ID NO: 847320 - RNA, 22 nt, Human
ugucuggagggucaucaggcug

SEQ ID NO: 847321 - RNA, 20 nt, Human
uucccagaagaaauaaaauc

SEQ ID NO: 847322 - RNA, 23 nt, Human
uucccagaagaaauaaaauggaa

SEQ ID NO: 847323 - RNA, 21 nt, Human
uuccuggagcccaggcccgcu

SEQ ID NO: 847324 - RNA, 24 nt, Human
uuggcuggcccucugugaggcgga

SEQ ID NO: 847325 - RNA, 19 nt, Human
aacccgccuccuaggucug

SEQ ID NO: 847326 - RNA, 25 nt, Human
acccgccuccuaggucugucucuac

SEQ ID NO: 847327 - RNA, 20 nt, Human
aggccccagccacacagucc

SEQ ID NO: 847328 - RNA, 19 nt, Human
cacacaguccagcugugcu

SEQ ID NO: 847329 - RNA, 18 nt, Human
caccaaacccccucgugc

SEQ ID NO: 847330 - RNA, 18 nt, Human
caccaaacccgccuccua

SEQ ID NO: 847331 - RNA, 20 nt, Human
caggccaaggaggcggcuuu

SEQ ID NO: 847332 - RNA, 25 nt, Human
caguaagauuuucucgcuuuggccu

SEQ ID NO: 847333 - RNA, 19 nt, Human
cccagccacacaguccagc

SEQ ID NO: 847334 - RNA, 18 nt, Human
cgcaccaaacccgccucc

SEQ ID NO: 847335 - RNA, 19 nt, Human
gcaccaaacccccucgugc

SEQ ID NO: 847336 - RNA, 22 nt, Human
gcagggcacuggccucucacca

SEQ ID NO: 847337 - RNA, 24 nt, Human
uaaaaagcucuuuauuugaagcuc

SEQ ID NO: 847338 - RNA, 22 nt, Human
uauuugaagcuccagggugggg

SEQ ID NO: 847339 - RNA, 22 nt, Human
uccagcugugcuccgauuggca

SEQ ID NO: 847340 - RNA, 22 nt, Human
ucuacaggccaaggaggcggcu

SEQ ID NO: 847341 - RNA, 18 nt, Human
ugucaggccccagccaca

SEQ ID NO: 847342 - RNA, 25 nt, Human
ugucucuacaggccaaggaggcggc

SEQ ID NO: 847343 - RNA, 22 nt, Human
uuauuugaagcuccaggguggg

SEQ ID NO: 847344 - RNA, 22 nt, Human
uuuuggggguaaaaagcucuuu

SEQ ID NO: 847345 - RNA, 26 nt, Human
uuuuggggguaaaaagcucuuuauuu

SEQ ID NO: 847346 - RNA, 19 nt, Human
uuuuuuuuuuuuugggggu

SEQ ID NO: 847347 - RNA, 20 nt, Human
uuuuuuuuuuuuuuuggggg

SEQ ID NO: 847348 - RNA, 22 nt, Human
uuuuuuuuuuuuuuuuuggggg

SEQ ID NO: 847349 - RNA, 23 nt, Human
uuuuuuuuuuuuuuuuugggggu

SEQ ID NO: 847350 - RNA, 24 nt, Human
aagugauccgucugccucggccuc

SEQ ID NO: 847351 - RNA, 20 nt, Human
accacagagagucauguaca

SEQ ID NO: 847352 - RNA, 21 nt, Human
accagaggcaagacauuucug

SEQ ID NO: 847353 - RNA, 20 nt, Human
accauguuggccaggcuggu

SEQ ID NO: 847354 - RNA, 22 nt, Human
accauguuggccaggcuggucu

SEQ ID NO: 847355 - RNA, 22 nt, Human
accauguuggccaggcuggucu

SEQ ID NO: 847356 - RNA, 19 nt, Human
accugguggugacugggau

SEQ ID NO: 847357 - RNA, 22 nt, Human
aggcaggacguggaccacagag

SEQ ID NO: 847358 - RNA, 21 nt, Human
agugcugggauuauagacgug

SEQ ID NO: 847359 - RNA, 22 nt, Human
agugcugggauuauagacguga

SEQ ID NO: 847360 - RNA, 24 nt, Human
agugcugggauuauagacgugagc

SEQ ID NO: 847361 - RNA, 24 nt, Human
aucaaauucaguucagcaaacauu

SEQ ID NO: 847362 - RNA, 19 nt, Human
auggcaucccugcuucugg

SEQ ID NO: 847363 - RNA, 26 nt, Human
caaaacucuaguggaaauuucccagg

SEQ ID NO: 847364 - RNA, 22 nt, Human
caagugauccgucugccucggc

SEQ ID NO: 847365 - RNA, 19 nt, Human
caccccagcuuuucagaga

SEQ ID NO: 847366 - RNA, 19 nt, Human
caccgcgcaggccuggggc

SEQ ID NO: 847367 - RNA, 22 nt, Human
caccugguggugacugggaugc

SEQ ID NO: 847368 - RNA, 21 nt, Human
cacguggaccgugucagaagc

SEQ ID NO: 847369 - RNA, 19 nt, Human
cagcugggaccauguuggc

SEQ ID NO: 847370 - RNA, 28 nt, Human
caucccucccugcacaacagauggcauc

SEQ ID NO: 847371 - RNA, 20 nt, Human
caucugguacuguguugagc

SEQ ID NO: 847372 - RNA, 24 nt, Human
cauguuggccaggcuggucuugaa

SEQ ID NO: 847373 - RNA, 18 nt, Human
ccacagugcugggauuau

SEQ ID NO: 847374 - RNA, 24 nt, Human
ccacagugcugggauuauagacgu

SEQ ID NO: 847375 - RNA, 24 nt, Human
ccaggucggucccacgccccggug

SEQ ID NO: 847376 - RNA, 20 nt, Human
cccacgccccggugacaggg

SEQ ID NO: 847377 - RNA, 21 nt, Human
cccccaaacuggaggcaauug

SEQ ID NO: 847378 - RNA, 23 nt, Human
cccugcacaacagauggcauccc

SEQ ID NO: 847379 - RNA, 18 nt, Human
ccugaccucaagugaucc

SEQ ID NO: 847380 - RNA, 18 nt, Human
ccugaccucaagugaucc

SEQ ID NO: 847381 - RNA, 23 nt, Human
ccugaccucaagugauccgucug

SEQ ID NO: 847382 - RNA, 23 nt, Human
ccugcagcugggaccauguuggc

SEQ ID NO: 847383 - RNA, 24 nt, Human
ccugcagcugggaccauguuggcc

SEQ ID NO: 847384 - RNA, 26 nt, Human
cuccugaccucaagugauccgucugc

SEQ ID NO: 847385 - RNA, 23 nt, Human
cucugucucagucuccugaagag

SEQ ID NO: 847386 - RNA, 23 nt, Human
cugccucggccucccacagugcu

SEQ ID NO: 847387 - RNA, 20 nt, Human
cuggcagggaggagcugagg

SEQ ID NO: 847388 - RNA, 23 nt, Human
cuucugggccuccccagcugcac

SEQ ID NO: 847389 - RNA, 24 nt, Human
gaccucaagugauccgucugccuc

SEQ ID NO: 847390 - RNA, 24 nt, Human
gagaggagcccccaaacuggaggc

SEQ ID NO: 847391 - RNA, 22 nt, Human
gagcucuggagagagcugagga

SEQ ID NO: 847392 - RNA, 18 nt, Human
gauuauagacgugagcca

SEQ ID NO: 847393 - RNA, 22 nt, Human
gauuauagacgugagccaccgc

SEQ ID NO: 847394 - RNA, 25 nt, Human
gcaaaacucuaguggaaauuuccca

SEQ ID NO: 847395 - RNA, 23 nt, Human
gcagcugggaccauguuggccag

SEQ ID NO: 847396 - RNA, 24 nt, Human
gcagcugggaccauguuggccagg

SEQ ID NO: 847397 - RNA, 19 nt, Human
gcccugcagcugggaccau

SEQ ID NO: 847398 - RNA, 18 nt, Human
gccuucagagccaggcac

SEQ ID NO: 847399 - RNA, 23 nt, Human
gcuggucuugaacuccugaccuc

SEQ ID NO: 847400 - RNA, 21 nt, Human
ggcucuguuuuccuuuccaau

SEQ ID NO: 847401 - RNA, 24 nt, Human
ggcuggucuugaacuccugaccuc

SEQ ID NO: 847402 - RNA, 21 nt, Human
gguaaacagccagggccugag

SEQ ID NO: 847403 - RNA, 19 nt, Human
ggucuugaacuccugaccu

SEQ ID NO: 847404 - RNA, 22 nt, Human
gucaagucuccccaccaugagu

SEQ ID NO: 847405 - RNA, 19 nt, Human
gucucagucuccugaagag

SEQ ID NO: 847406 - RNA, 23 nt, Human
guugggccuucagagccaggcac

SEQ ID NO: 847407 - RNA, 20 nt, Human
uaaccacucaccccagcuuu

SEQ ID NO: 847408 - RNA, 22 nt, Human
uacuguguugagcucuggagag

SEQ ID NO: 847409 - RNA, 18 nt, Human
ucacaguaggcagugaca

SEQ ID NO: 847410 - RNA, 21 nt, Human
ucacuugucuucucugucuca

SEQ ID NO: 847411 - RNA, 18 nt, Human
ucccacagugcugggauu

SEQ ID NO: 847412 - RNA, 24 nt, Human
ucccacagugcugggauuauagac

SEQ ID NO: 847413 - RNA, 18 nt, Human
uccucaucccucccugca

SEQ ID NO: 847414 - RNA, 23 nt, Human
uccugaagagcccgaggaaguca

SEQ ID NO: 847415 - RNA, 21 nt, Human
ucuugaacuccugaccucaag

SEQ ID NO: 847416 - RNA, 19 nt, Human
ugaccucaagugauccguc

SEQ ID NO: 847417 - RNA, 24 nt, Human
ugaccucaagugauccgucugccu

SEQ ID NO: 847418 - RNA, 23 nt, Human
ugacugggaugcuggcagggagg

SEQ ID NO: 847419 - RNA, 22 nt, Human
ugagcucuggagagagcugagg

SEQ ID NO: 847420 - RNA, 21 nt, Human
ugccucggccucccacagugc

SEQ ID NO: 847421 - RNA, 24 nt, Human
ugccucggccucccacagugcugg

SEQ ID NO: 847422 - RNA, 21 nt, Human
uggaccgugucagaagcgcca

SEQ ID NO: 847423 - RNA, 24 nt, Human
uggccaggcuggucuugaacuccu

SEQ ID NO: 847424 - RNA, 18 nt, Human
ugggauuauagacgugag

SEQ ID NO: 847425 - RNA, 19 nt, Human
ugggauuauagacgugagc

SEQ ID NO: 847426 - RNA, 21 nt, Human
ugggauuauagacgugagcca

SEQ ID NO: 847427 - RNA, 22 nt, Human
ugggauuauagacgugagccac

SEQ ID NO: 847428 - RNA, 23 nt, Human
ugggauuauagacgugagccacc

SEQ ID NO: 847429 - RNA, 24 nt, Human
ugggauuauagacgugagccaccg

SEQ ID NO: 847430 - RNA, 23 nt, Human
uggucugacaguugggccuucag

SEQ ID NO: 847431 - RNA, 19 nt, Human
ugucucagucuccugaaga

SEQ ID NO: 847432 - RNA, 23 nt, Human
uuucacuugucuucucugucuca

SEQ ID NO: 847433 - RNA, 22 nt, Human
uuuuuuuuuuuuuuuuuuuagg

SEQ ID NO: 847434 - RNA, 21 nt, Human
acuggcauuuuccagccgcgc

SEQ ID NO: 847435 - RNA, 24 nt, Human
auuuuuauuacuguuucuuuuaau

SEQ ID NO: 847436 - RNA, 20 nt, Human
cagcccggccaccgccgcuu

SEQ ID NO: 847437 - RNA, 18 nt, Human
ccccaacccacccagcca

SEQ ID NO: 847438 - RNA, 18 nt, Human
ccgagcuugcuccucgug

SEQ ID NO: 847439 - RNA, 19 nt, Human
ccgcuucaaugaagggcgc

SEQ ID NO: 847440 - RNA, 24 nt, Human
cgccccaacccacccagccaccga

SEQ ID NO: 847441 - RNA, 18 nt, Human
gccccaacccacccagcc

SEQ ID NO: 847442 - RNA, 18 nt, Human
gcggaacgccccaaccca

SEQ ID NO: 847443 - RNA, 22 nt, Human
guccaccuccaucucaucguga

SEQ ID NO: 847444 - RNA, 19 nt, Human
ucggagcugcuccccucau

SEQ ID NO: 847445 - RNA, 22 nt, Human
ucucucaugauucagugagaau

SEQ ID NO: 847446 - RNA, 22 nt, Human
uugguaacacuaauaagguaaa

SEQ ID NO: 847447 - RNA, 18 nt, Human
uuuuuuuuuuuuuuuucg

SEQ ID NO: 847448 - RNA, 20 nt, Human
uuuuuuuuuuuuuuuuucgu

SEQ ID NO: 847449 - RNA, 20 nt, Human
aaaguccuggcugggccugg

SEQ ID NO: 847450 - RNA, 18 nt, Human
acccaccugccccgaggg

SEQ ID NO: 847451 - RNA, 22 nt, Human
acccaccugccccgagggcccc

SEQ ID NO: 847452 - RNA, 23 nt, Human
agcugggguaggcaaaguccugg

SEQ ID NO: 847453 - RNA, 23 nt, Human
aggcaaaguccuggcugggccug

SEQ ID NO: 847454 - RNA, 23 nt, Human
caccugccccgagggccccgcga

SEQ ID NO: 847455 - RNA, 19 nt, Human
cagccaccugcagguccug

SEQ ID NO: 847456 - RNA, 19 nt, Human
cagccgcgcagccgccccg

SEQ ID NO: 847457 - RNA, 24 nt, Human
ccaccugcagguccuguucaugcc

SEQ ID NO: 847458 - RNA, 20 nt, Human
ccccugagcucccccggcuc

SEQ ID NO: 847459 - RNA, 19 nt, Human
cccugagcucccccggcuc

SEQ ID NO: 847460 - RNA, 23 nt, Human
ccgcgccgagucccggcagccgc

SEQ ID NO: 847461 - RNA, 18 nt, Human
ccgcgugccaagcgcucc

SEQ ID NO: 847462 - RNA, 22 nt, Human
ccggcagccgcgcagccgcccc

SEQ ID NO: 847463 - RNA, 21 nt, Human
ccuguucaugccccaguuggu

SEQ ID NO: 847464 - RNA, 22 nt, Human
cgccgagucccggcagccgcgc

SEQ ID NO: 847465 - RNA, 24 nt, Human
cgcgcagccgccccgccgagugcg

SEQ ID NO: 847466 - RNA, 19 nt, Human
cgcgccgagucccggcagc

SEQ ID NO: 847467 - RNA, 25 nt, Human
cggcuccugcggccccugagcuccc

SEQ ID NO: 847468 - RNA, 21 nt, Human
cuggaguggggcagaggucag

SEQ ID NO: 847469 - RNA, 24 nt, Human
cuuuauacccgcugagucccccuu

SEQ ID NO: 847470 - RNA, 21 nt, Human
gccgagucccggcagccgcgc

SEQ ID NO: 847471 - RNA, 27 nt, Human
gcggccccugagcucccccggcucccu

SEQ ID NO: 847472 - RNA, 23 nt, Human
ggggaccugguuuauaacacagc

SEQ ID NO: 847473 - RNA, 21 nt, Human
gggggacacucaguccagcca

SEQ ID NO: 847474 - RNA, 18 nt, Human
ggucaggagggggaccug

SEQ ID NO: 847475 - RNA, 19 nt, Human
ucaggagggggaccugguu

SEQ ID NO: 847476 - RNA, 21 nt, Human
ucccgcugcggcugcagcucc

SEQ ID NO: 847477 - RNA, 22 nt, Human
ugccaagcgcucccgugucucc

SEQ ID NO: 847478 - RNA, 22 nt, Human
ugggaagagcuccauuccugga

SEQ ID NO: 847479 - RNA, 19 nt, Human
ugggguaggcaaaguccug

SEQ ID NO: 847480 - RNA, 20 nt, Human
uuuuuuuuuuuugcaggguc

SEQ ID NO: 847481 - RNA, 19 nt, Human
uuuuuuuuuuuuuuuuugc

SEQ ID NO: 847482 - RNA, 24 nt, Human
uuuuuuuuuuuuuuuuugcagggg

SEQ ID NO: 847483 - RNA, 24 nt, Human
aagaaagugggaggagccgguacc

SEQ ID NO: 847484 - RNA, 18 nt, Human
aaguggggcccgcagcug

SEQ ID NO: 847485 - RNA, 20 nt, Human
aauggcacucuggucugagc

SEQ ID NO: 847486 - RNA, 24 nt, Human
acagagucagaggccaucuaacaa

SEQ ID NO: 847487 - RNA, 18 nt, Human
acaguacagcuccccggg

SEQ ID NO: 847488 - RNA, 18 nt, Human
accucuuccuucugccca

SEQ ID NO: 847489 - RNA, 25 nt, Human
agacagagccuccuggggcaaaaaa

SEQ ID NO: 847490 - RNA, 21 nt, Human
aggaagggcugggcagguguu

SEQ ID NO: 847491 - RNA, 18 nt, Human
agggagcccacagcugug

SEQ ID NO: 847492 - RNA, 18 nt, Human
aguugguauuuaauggca

SEQ ID NO: 847493 - RNA, 23 nt, Human
caaugcaccguccgcuccgugac

SEQ ID NO: 847494 - RNA, 19 nt, Human
caccaacagccuguuccuu

SEQ ID NO: 847495 - RNA, 23 nt, Human
caccucuuccuucugcccaagug

SEQ ID NO: 847496 - RNA, 23 nt, Human
caccucuuccuucugcccaagug

SEQ ID NO: 847497 - RNA, 22 nt, Human
cacuguccccucccuggggccc

SEQ ID NO: 847498 - RNA, 22 nt, Human
cagaggccaucuaacaaacccu

SEQ ID NO: 847499 - RNA, 21 nt, Human
cagccucagggccucaccccc

SEQ ID NO: 847500 - RNA, 18 nt, Human
cagcuagcaccucuuccc

SEQ ID NO: 847501 - RNA, 20 nt, Human
caucacuaacaaugcaggga

SEQ ID NO: 847502 - RNA, 18 nt, Human
ccacuguccccucccugg

SEQ ID NO: 847503 - RNA, 21 nt, Human
cccacagagucagaggccauc

SEQ ID NO: 847504 - RNA, 26 nt, Human
cccccacuguccccucccuggggccc

SEQ ID NO: 847505 - RNA, 28 nt, Human
cccccacuguccccucccuggggcccac

SEQ ID NO: 847506 - RNA, 21 nt, Human
cccuggacagccucagggccu

SEQ ID NO: 847507 - RNA, 22 nt, Human
cccuggacagccucagggccuc

SEQ ID NO: 847508 - RNA, 21 nt, Human
ccucacccccacuguccccuc

SEQ ID NO: 847509 - RNA, 18 nt, Human
ccucagaagacccagcca

SEQ ID NO: 847510 - RNA, 24 nt, Human
ccuccuggggcaaaaaagucaagu

SEQ ID NO: 847511 - RNA, 20 nt, Human
ccuggacagccucagggccu

SEQ ID NO: 847512 - RNA, 21 nt, Human
ccuggacagccucagggccuc

SEQ ID NO: 847513 - RNA, 20 nt, Human
ccuuuuggggcagaagcagg

SEQ ID NO: 847514 - RNA, 24 nt, Human
cuagcaccucuuccuucugcccaa

SEQ ID NO: 847515 - RNA, 23 nt, Human
cucagacccuggacagccucagg

SEQ ID NO: 847516 - RNA, 23 nt, Human
cugccaccaacagccuguuccuu

SEQ ID NO: 847517 - RNA, 21 nt, Human
gaagggcugggcagguguuca

SEQ ID NO: 847518 - RNA, 21 nt, Human
gagcaccucagcagacaagga

SEQ ID NO: 847519 - RNA, 24 nt, Human
gagcccacagcugugaguccuugg

SEQ ID NO: 847520 - RNA, 25 nt, Human
gaggagcuggaagggagcccacagc

SEQ ID NO: 847521 - RNA, 20 nt, Human
gccccagguuaaagagugau

SEQ ID NO: 847522 - RNA, 19 nt, Human
gcuggaagggagcccacag

SEQ ID NO: 847523 - RNA, 19 nt, Human
ggaaagcucugugggagaa

SEQ ID NO: 847524 - RNA, 21 nt, Human
ggaggagcuggaagggagccc

SEQ ID NO: 847525 - RNA, 20 nt, Human
ggcaaaaaagucaaguugaa

SEQ ID NO: 847526 - RNA, 19 nt, Human
gggaggagcuggaagggag

SEQ ID NO: 847527 - RNA, 22 nt, Human
guaguucauuccacguaggccu

SEQ ID NO: 847528 - RNA, 21 nt, Human
uaacaaugcagggaaagcucu

SEQ ID NO: 847529 - RNA, 22 nt, Human
uacaccuuggucuguacaguac

SEQ ID NO: 847530 - RNA, 18 nt, Human
uagaagagcaaacuguuu

SEQ ID NO: 847531 - RNA, 19 nt, Human
uaggccucagaagacccag

SEQ ID NO: 847532 - RNA, 21 nt, Human
uaguucauuccacguaggccu

SEQ ID NO: 847533 - RNA, 18 nt, Human
ucacagcaggcaggggca

SEQ ID NO: 847534 - RNA, 19 nt, Human
ucacuaacaaugcagggaa

SEQ ID NO: 847535 - RNA, 19 nt, Human
ucauuccacguaggccuca

SEQ ID NO: 847536 - RNA, 26 nt, Human
ucccaccccagcacuaaaaggucggc

SEQ ID NO: 847537 - RNA, 19 nt, Human
uccccgggaggagccugcc

SEQ ID NO: 847538 - RNA, 20 nt, Human
ucccugcuggggccaaugcc

SEQ ID NO: 847539 - RNA, 18 nt, Human
ucugagcaccucagcaga

SEQ ID NO: 847540 - RNA, 21 nt, Human
ugaaucccacagagucagagg

SEQ ID NO: 847541 - RNA, 27 nt, Human
ugacaucaguugguauuuaauggcacu

SEQ ID NO: 847542 - RNA, 24 nt, Human
ugaguccuuggcaaugcaccgucc

SEQ ID NO: 847543 - RNA, 19 nt, Human
ugcuuugcccgacaucacu

SEQ ID NO: 847544 - RNA, 21 nt, Human
ugggaggagcuggaagggagc

SEQ ID NO: 847545 - RNA, 22 nt, Human
ugggaggagcuggaagggagcc

SEQ ID NO: 847546 - RNA, 21 nt, Human
uggggcccacagggcaggucc

SEQ ID NO: 847547 - RNA, 21 nt, Human
uguguaguucauuccacguag

SEQ ID NO: 847548 - RNA, 22 nt, Human
uucacagcaggcaggggcagca

SEQ ID NO: 847549 - RNA, 20 nt, Human
uuuuuuuuuuuuagaagagc

SEQ ID NO: 847550 - RNA, 23 nt, Human
aaaaaagccauuccauuucuaag

SEQ ID NO: 847551 - RNA, 18 nt, Human
aaaacaaaacaaaaaaag

SEQ ID NO: 847552 - RNA, 28 nt, Human
aaaacaaaacaaaacaaaaaaagccauu

SEQ ID NO: 847553 - RNA, 19 nt, Human
aaacaaaacaaaacaaaaa

SEQ ID NO: 847554 - RNA, 19 nt, Human
aaacaaacaaaucaguaga

SEQ ID NO: 847555 - RNA, 18 nt, Human
aaacaaggaaaacuaagc

SEQ ID NO: 847556 - RNA, 19 nt, Human
aaacaauaaaacaaaacaa

SEQ ID NO: 847557 - RNA, 24 nt, Human
aaaccaccuuacaauccauggggc

SEQ ID NO: 847558 - RNA, 20 nt, Human
aacaaaacaauaaaacaaaa

SEQ ID NO: 847559 - RNA, 19 nt, Human
aacaacaaaagccaaaaag

SEQ ID NO: 847560 - RNA, 18 nt, Human
acaaaacaaaaaaagcca

SEQ ID NO: 847561 - RNA, 23 nt, Human
acaaaacaaaaaaagccauucca

SEQ ID NO: 847562 - RNA, 23 nt, Human
acaaaacaaaacaaaaaaagcca

SEQ ID NO: 847563 - RNA, 23 nt, Human
acaaaacaauaaaacaaaacaaa

SEQ ID NO: 847564 - RNA, 27 nt, Human
acaaaacaauaaaacaaaacaaaacaa

SEQ ID NO: 847565 - RNA, 22 nt, Human
acaaaagccaaaaagggcaccu

SEQ ID NO: 847566 - RNA, 27 nt, Human
acaacaacaaaagccaaaaagggcacc

SEQ ID NO: 847567 - RNA, 28 nt, Human
acaacaacaaaagccaaaaagggcaccu

SEQ ID NO: 847568 - RNA, 19 nt, Human
acaacaacaacaaaagcca

SEQ ID NO: 847569 - RNA, 24 nt, Human
acaacaacaacaaaagccaaaaag

SEQ ID NO: 847570 - RNA, 21 nt, Human
accauaaccauaauggucauc

SEQ ID NO: 847571 - RNA, 21 nt, Human
accuuacaauccauggggcua

SEQ ID NO: 847572 - RNA, 20 nt, Human
caaaacaaaacaaaaaaagc

SEQ ID NO: 847573 - RNA, 26 nt, Human
caaaacaauaaaacaaaacaaaacaa

SEQ ID NO: 847574 - RNA, 23 nt, Human
caaaagccaaaaagggcaccugu

SEQ ID NO: 847575 - RNA, 20 nt, Human
cacugauguguaaucucacc

SEQ ID NO: 847576 - RNA, 25 nt, Human
caucuugcacugauguguaaucuca

SEQ ID NO: 847577 - RNA, 19 nt, Human
ccggcggagcuggcaccgg

SEQ ID NO: 847578 - RNA, 21 nt, Human
ccgggccgcgggcugugcugg

SEQ ID NO: 847579 - RNA, 21 nt, Human
ccucuggcauaaagagguaga

SEQ ID NO: 847580 - RNA, 23 nt, Human
ccucuggcauaaagagguagaga

SEQ ID NO: 847581 - RNA, 21 nt, Human
cgagccagguucccugcggga

SEQ ID NO: 847582 - RNA, 22 nt, Human
cgaugaguuccaaacacacuuu

SEQ ID NO: 847583 - RNA, 24 nt, Human
cuaucugaaaauguguuugguuac

SEQ ID NO: 847584 - RNA, 23 nt, Human
cucaguaaaccaccuuacaaucc

SEQ ID NO: 847585 - RNA, 20 nt, Human
cuggaggcccuccccgagcc

SEQ ID NO: 847586 - RNA, 21 nt, Human
gcaccgggccgcgggcugugc

SEQ ID NO: 847587 - RNA, 21 nt, Human
gcacugauguguaaucucacc

SEQ ID NO: 847588 - RNA, 18 nt, Human
gcugguuaaaaugugguc

SEQ ID NO: 847589 - RNA, 24 nt, Human
uaaaacaaaacaaaacaaaaaaag

SEQ ID NO: 847590 - RNA, 23 nt, Human
uaacucaguaaaccaccuuacaa

SEQ ID NO: 847591 - RNA, 31 nt, Human
uaauaaaaacaaaacaauaaaacaaaacaaa

SEQ ID NO: 847592 - RNA, 25 nt, Human
uacaaaaacaaacaaaucaguagau

SEQ ID NO: 847593 - RNA, 23 nt, Human
uacaacaacaacaaaagccaaaa

SEQ ID NO: 847594 - RNA, 31 nt, Human
uacaacaacaacaaaagccaaaaagggcacc

SEQ ID NO: 847595 - RNA, 23 nt, Human
uacaauccuccauuuuuccuuuc

SEQ ID NO: 847596 - RNA, 19 nt, Human
uagaaaagauuaacaauaa

SEQ ID NO: 847597 - RNA, 21 nt, Human
uagaugggagggguacuaggu

SEQ ID NO: 847598 - RNA, 22 nt, Human
uaguauuucucuuccaacacac

SEQ ID NO: 847599 - RNA, 18 nt, Human
uauacaaauauuucauuc

SEQ ID NO: 847600 - RNA, 20 nt, Human
ucaaacaaggaaaacuaagc

SEQ ID NO: 847601 - RNA, 18 nt, Human
ucagagcagguggccaca

SEQ ID NO: 847602 - RNA, 25 nt, Human
uccccaggcagucccgcgggagcuc

SEQ ID NO: 847603 - RNA, 18 nt, Human
uccccgagccagguuccc

SEQ ID NO: 847604 - RNA, 21 nt, Human
uccccgagccagguucccugc

SEQ ID NO: 847605 - RNA, 18 nt, Human
ucccugcgggagcaccgc

SEQ ID NO: 847606 - RNA, 22 nt, Human
ucccugcgggagcaccgcacuu

SEQ ID NO: 847607 - RNA, 25 nt, Human
ucccugcgggagcaccgcacuuugg

SEQ ID NO: 847608 - RNA, 21 nt, Human
ucccuguccccaggcaguccc

SEQ ID NO: 847609 - RNA, 26 nt, Human
ugccuacauauaaaugcgcacacaca

SEQ ID NO: 847610 - RNA, 19 nt, Human
ugcgcacacacauuaacuu

SEQ ID NO: 847611 - RNA, 25 nt, Human
uggcaaggcuaauuacagaaaaaga

SEQ ID NO: 847612 - RNA, 18 nt, Human
ugggagggguacuaggua

SEQ ID NO: 847613 - RNA, 19 nt, Human
uguuugguuacaaaaacaa

SEQ ID NO: 847614 - RNA, 23 nt, Human
uuacaacaacaacaaaagccaaa

SEQ ID NO: 847615 - RNA, 19 nt, Human
uucaaacaaggaaaacuaa

SEQ ID NO: 847616 - RNA, 22 nt, Human
uucagagcagguggccacaaag

SEQ ID NO: 847617 - RNA, 19 nt, Human
uucccugcgggagcaccgc

SEQ ID NO: 847618 - RNA, 20 nt, Human
uugguuacaaaaacaaacaa

SEQ ID NO: 847619 - RNA, 22 nt, Human
cagcagcagccgcggaccuacc

SEQ ID NO: 847620 - RNA, 24 nt, Human
gcagcagccgcggaccuaccccuc

SEQ ID NO: 847621 - RNA, 21 nt, Human
gcagccgcggaccuaccccuc

SEQ ID NO: 847622 - RNA, 21 nt, Human
uuuuuuuuuuuuuuuuuuguu

SEQ ID NO: 847623 - RNA, 27 nt, Human
uuuuuuuuuuuuuuuuuuuuuuugggg

SEQ ID NO: 847624 - RNA, 20 nt, Human
aaagcccucccuugccuccu

SEQ ID NO: 847625 - RNA, 18 nt, Human
aaccagggcccucugucc

SEQ ID NO: 847626 - RNA, 26 nt, Human
aacucaucuccccacaagagccucug

SEQ ID NO: 847627 - RNA, 18 nt, Human
aagcaagccccagucccc

SEQ ID NO: 847628 - RNA, 22 nt, Human
aagucccugucaugucuggcuc

SEQ ID NO: 847629 - RNA, 23 nt, Human
accaacucaucuccccacaagag

SEQ ID NO: 847630 - RNA, 19 nt, Human
acccugcaagucugaggag

SEQ ID NO: 847631 - RNA, 20 nt, Human
agccaccucuggcuucaccc

SEQ ID NO: 847632 - RNA, 21 nt, Human
aggagcaggugagccacugga

SEQ ID NO: 847633 - RNA, 21 nt, Human
aggcugaagggcuccccaggg

SEQ ID NO: 847634 - RNA, 19 nt, Human
caaaagcccaagagcucac

SEQ ID NO: 847635 - RNA, 24 nt, Human
caacucaucuccccacaagagccu

SEQ ID NO: 847636 - RNA, 18 nt, Human
caagaacgaaacaaaacu

SEQ ID NO: 847637 - RNA, 23 nt, Human
caccucuggcuucacccagacuc

SEQ ID NO: 847638 - RNA, 24 nt, Human
caccucuggcuucacccagacuca

SEQ ID NO: 847639 - RNA, 21 nt, Human
caccugggaagggccugguca

SEQ ID NO: 847640 - RNA, 23 nt, Human
caggaacauuugccacccugcaa

SEQ ID NO: 847641 - RNA, 22 nt, Human
caucuccccacaagagccucug

SEQ ID NO: 847642 - RNA, 23 nt, Human
ccaccugggaagggccuggucac

SEQ ID NO: 847643 - RNA, 22 nt, Human
ccagggcccucuguccuacuuc

SEQ ID NO: 847644 - RNA, 21 nt, Human
ccccucccuggucccucugcc

SEQ ID NO: 847645 - RNA, 24 nt, Human
cccucccuugccuccucucugcca

SEQ ID NO: 847646 - RNA, 25 nt, Human
ccgccaccgggaacgcgccgccugg

SEQ ID NO: 847647 - RNA, 24 nt, Human
ccucagccgagcuggccccucuug

SEQ ID NO: 847648 - RNA, 24 nt, Human
ccucuggcuucacccagacucauc

SEQ ID NO: 847649 - RNA, 23 nt, Human
ccuggcacgcuggcaccgcccac

SEQ ID NO: 847650 - RNA, 22 nt, Human
ccugggaagggccuggucacau

SEQ ID NO: 847651 - RNA, 20 nt, Human
ccuggucagacauggcuccu

SEQ ID NO: 847652 - RNA, 18 nt, Human
ccugugcacaccguggua

SEQ ID NO: 847653 - RNA, 22 nt, Human
cuaaagcccucccuugccuccu

SEQ ID NO: 847654 - RNA, 22 nt, Human
cucaggccucagccgagcuggc

SEQ ID NO: 847655 - RNA, 22 nt, Human
cuccuggcacgcuggcaccgcc

SEQ ID NO: 847656 - RNA, 23 nt, Human
cucucugccaaaccagggcccuc

SEQ ID NO: 847657 - RNA, 20 nt, Human
cuggcaccgcccacuccgcg

SEQ ID NO: 847658 - RNA, 19 nt, Human
cuggucccucugcccugug

SEQ ID NO: 847659 - RNA, 22 nt, Human
cuguggcaaggagcccaggugc

SEQ ID NO: 847660 - RNA, 18 nt, Human
cuguuccugagaugcccc

SEQ ID NO: 847661 - RNA, 24 nt, Human
cuuuaccaacucaucuccccacaa

SEQ ID NO: 847662 - RNA, 19 nt, Human
gcccucccuugccuccucu

SEQ ID NO: 847663 - RNA, 24 nt, Human
gcccucuguccuacuucaaaagcc

SEQ ID NO: 847664 - RNA, 21 nt, Human
gcucugcccugugcacaccgu

SEQ ID NO: 847665 - RNA, 19 nt, Human
gcugaagggcuccccaggg

SEQ ID NO: 847666 - RNA, 19 nt, Human
ggcuccuggcacgcuggca

SEQ ID NO: 847667 - RNA, 20 nt, Human
gggucccugagggacagcuu

SEQ ID NO: 847668 - RNA, 21 nt, Human
gucaugucuggcuccuguucc

SEQ ID NO: 847669 - RNA, 23 nt, Human
uaaagcaagccccaguccccacc

SEQ ID NO: 847670 - RNA, 20 nt, Human
uaaagcccucccuugccucc

SEQ ID NO: 847671 - RNA, 18 nt, Human
uaaccuggcaacaggaac

SEQ ID NO: 847672 - RNA, 24 nt, Human
uccccaccugggaagggccugguc

SEQ ID NO: 847673 - RNA, 24 nt, Human
ucccugagggacagcuuguugccc

SEQ ID NO: 847674 - RNA, 21 nt, Human
ucccuugccuccucucugcca

SEQ ID NO: 847675 - RNA, 21 nt, Human
uccgcgcugcacuggaaacca

SEQ ID NO: 847676 - RNA, 23 nt, Human
uccgcgcugcacuggaaaccaug

SEQ ID NO: 847677 - RNA, 22 nt, Human
ugagaugccccagcccaagaac

SEQ ID NO: 847678 - RNA, 21 nt, Human
ugcacuggaaaccaugggucc

SEQ ID NO: 847679 - RNA, 24 nt, Human
ugccccagcccaagaacgaaacaa

SEQ ID NO: 847680 - RNA, 19 nt, Human
ugcggaucaggcugaaggg

SEQ ID NO: 847681 - RNA, 20 nt, Human
uggcaaggagcccaggugca

SEQ ID NO: 847682 - RNA, 23 nt, Human
uggcaucaccaugaggaggccug

SEQ ID NO: 847683 - RNA, 22 nt, Human
uggcggcagcucugcccugugc

SEQ ID NO: 847684 - RNA, 22 nt, Human
ugggagggcaggugaggguccc

SEQ ID NO: 847685 - RNA, 20 nt, Human
uggucacaugggagggcagg

SEQ ID NO: 847686 - RNA, 19 nt, Human
uucucagauguucuaaagc

SEQ ID NO: 847687 - RNA, 20 nt, Human
uuuaccaacucaucucccca

SEQ ID NO: 847688 - RNA, 24 nt, Human
uuuuuuuuuuuuuuuuuuuauuuu

SEQ ID NO: 847689 - RNA, 26 nt, Human
aaaccaaaugaggucuccccaggcuc

SEQ ID NO: 847690 - RNA, 20 nt, Human
acaaaccccaucccaggugc

SEQ ID NO: 847691 - RNA, 24 nt, Human
caaaaucaacuugcccacaaaccc

SEQ ID NO: 847692 - RNA, 18 nt, Human
caaagaguauagcccgaa

SEQ ID NO: 847693 - RNA, 21 nt, Human
cacacugaagcugaaagacca

SEQ ID NO: 847694 - RNA, 22 nt, Human
cacacugaagcugaaagaccac

SEQ ID NO: 847695 - RNA, 21 nt, Human
cacagcccucgacagggcagg

SEQ ID NO: 847696 - RNA, 22 nt, Human
cacagcucagauccaacgggac

SEQ ID NO: 847697 - RNA, 19 nt, Human
cacaggacacucgaacggc

SEQ ID NO: 847698 - RNA, 22 nt, Human
caccacaucauccucccccgaa

SEQ ID NO: 847699 - RNA, 20 nt, Human
cacugaagcugaaagaccac

SEQ ID NO: 847700 - RNA, 23 nt, Human
cacuuuauaaacuguugccaaau

SEQ ID NO: 847701 - RNA, 23 nt, Human
cagggcagguaaaccuccgguca

SEQ ID NO: 847702 - RNA, 20 nt, Human
caucgucauguuuccuucug

SEQ ID NO: 847703 - RNA, 19 nt, Human
cauguuuccuucugugccu

SEQ ID NO: 847704 - RNA, 21 nt, Human
cccaggugcugggaugcuaac

SEQ ID NO: 847705 - RNA, 19 nt, Human
ccccccgagcucucggcua

SEQ ID NO: 847706 - RNA, 22 nt, Human
cccccgagcucucggcuaugaa

SEQ ID NO: 847707 - RNA, 18 nt, Human
ccccgaaaacuagcugcc

SEQ ID NO: 847708 - RNA, 20 nt, Human
cgaacggcuuugugccuagg

SEQ ID NO: 847709 - RNA, 21 nt, Human
cuagguggguuaugcuguggc

SEQ ID NO: 847710 - RNA, 21 nt, Human
cuguugccaaauuaccacuua

SEQ ID NO: 847711 - RNA, 21 nt, Human
cuucacgguggcaaugggacc

SEQ ID NO: 847712 - RNA, 22 nt, Human
gagguccucugucccaccacau

SEQ ID NO: 847713 - RNA, 26 nt, Human
gcacuuugcucacaaaggcaguuuca

SEQ ID NO: 847714 - RNA, 19 nt, Human
gcccacaaaccccauccca

SEQ ID NO: 847715 - RNA, 20 nt, Human
gcucaugucaugagucucag

SEQ ID NO: 847716 - RNA, 26 nt, Human
gcuuugugccuagguggguuaugcug

SEQ ID NO: 847717 - RNA, 21 nt, Human
ggccugcccaggccgaggcug

SEQ ID NO: 847718 - RNA, 18 nt, Human
ggccuugggccugcccag

SEQ ID NO: 847719 - RNA, 19 nt, Human
gguccagccacagcuguca

SEQ ID NO: 847720 - RNA, 24 nt, Human
gguggcaaugggaccaccugggcc

SEQ ID NO: 847721 - RNA, 18 nt, Human
gugcugggaugcuaacac

SEQ ID NO: 847722 - RNA, 22 nt, Human
uaaaacaaaaggaaaacauuuu

SEQ ID NO: 847723 - RNA, 24 nt, Human
uaaaacaaaaggaaaacauuuuug

SEQ ID NO: 847724 - RNA, 23 nt, Human
uaaaccuccggucaucggacccu

SEQ ID NO: 847725 - RNA, 21 nt, Human
uaaauguacccaaaagucuca

SEQ ID NO: 847726 - RNA, 24 nt, Human
uaacuaccauccccccgagcucuc

SEQ ID NO: 847727 - RNA, 18 nt, Human
uaauaggccacugagguc

SEQ ID NO: 847728 - RNA, 22 nt, Human
uaauauccaaauacagaauuua

SEQ ID NO: 847729 - RNA, 18 nt, Human
uagaaacugggcaacggc

SEQ ID NO: 847730 - RNA, 19 nt, Human
uagaauuuggcuucacggu

SEQ ID NO: 847731 - RNA, 22 nt, Human
uagagugaauguacagacugcu

SEQ ID NO: 847732 - RNA, 20 nt, Human
uauucagaacaucacuuuau

SEQ ID NO: 847733 - RNA, 22 nt, Human
ucaaaagggcuacgcuggucuu

SEQ ID NO: 847734 - RNA, 18 nt, Human
ucagaacaucacuuuaua

SEQ ID NO: 847735 - RNA, 18 nt, Human
ucauccucccccgaaaac

SEQ ID NO: 847736 - RNA, 19 nt, Human
uccaacgggacacggggaa

SEQ ID NO: 847737 - RNA, 20 nt, Human
ucccaccacaucauccuccc

SEQ ID NO: 847738 - RNA, 21 nt, Human
ucccaggugcugggaugcuaa

SEQ ID NO: 847739 - RNA, 20 nt, Human
ucccaggugcugggaugcuc

SEQ ID NO: 847740 - RNA, 23 nt, Human
uccccaggcucaugucaugaguc

SEQ ID NO: 847741 - RNA, 26 nt, Human
uccccaggcucaugucaugagucuca

SEQ ID NO: 847742 - RNA, 21 nt, Human
ucccccgaaaacuagcugccc

SEQ ID NO: 847743 - RNA, 20 nt, Human
ugaagagucuguugcaggua

SEQ ID NO: 847744 - RNA, 21 nt, Human
ugaggucuccccaggcucaug

SEQ ID NO: 847745 - RNA, 21 nt, Human
ugcagaagucuuuuucuuugu

SEQ ID NO: 847746 - RNA, 23 nt, Human
ugccaaagcacuuugcucacaaa

SEQ ID NO: 847747 - RNA, 23 nt, Human
ugcuacacagcucagauccaacg

SEQ ID NO: 847748 - RNA, 22 nt, Human
ugcucuggugaaugauuuccca

SEQ ID NO: 847749 - RNA, 22 nt, Human
ugcuguggccuuucagaugcuc

SEQ ID NO: 847750 - RNA, 21 nt, Human
ugcuuggaggugaagagucug

SEQ ID NO: 847751 - RNA, 22 nt, Human
uggcaaugggaccaccugggcc

SEQ ID NO: 847752 - RNA, 24 nt, Human
uggcaaugggaccaccugggcccu

SEQ ID NO: 847753 - RNA, 21 nt, Human
ugggaagagggcuccguaaua

SEQ ID NO: 847754 - RNA, 18 nt, Human
ugggcuagaauuuggcuu

SEQ ID NO: 847755 - RNA, 23 nt, Human
uggugaagguccagccacagcug

SEQ ID NO: 847756 - RNA, 18 nt, Human
uguaaugcaacaagugcu

SEQ ID NO: 847757 - RNA, 22 nt, Human
uguagugcaccuagcccugcug

SEQ ID NO: 847758 - RNA, 26 nt, Human
uuagagugaauguacagacuucaaag

SEQ ID NO: 847759 - RNA, 22 nt, Human
uugcagguagaaacugggcaac

SEQ ID NO: 847760 - RNA, 24 nt, Human
uugcagguagaaacugggcaacgg

SEQ ID NO: 847761 - RNA, 23 nt, Human
uuucagaugcucugcucugguga

SEQ ID NO: 847762 - RNA, 19 nt, Human
uuucccacagcccucgaca

SEQ ID NO: 847763 - RNA, 23 nt, Human
aaaaaaaucaucaucaacagcca

SEQ ID NO: 847764 - RNA, 18 nt, Human
aaacaaaaugccuggagc

SEQ ID NO: 847765 - RNA, 19 nt, Human
aacaaaaaugaccaaaaca

SEQ ID NO: 847766 - RNA, 23 nt, Human
aacuggcgagccugggccucuga

SEQ ID NO: 847767 - RNA, 25 nt, Human
aagcagacauaugggagaggucaga

SEQ ID NO: 847768 - RNA, 20 nt, Human
aagggguuucaccguauuag

SEQ ID NO: 847769 - RNA, 21 nt, Human
aagugucucuaccaagauccc

SEQ ID NO: 847770 - RNA, 23 nt, Human
aaguguuagaaaguagcccagcu

SEQ ID NO: 847771 - RNA, 19 nt, Human
acaagccaacuugugcggc

SEQ ID NO: 847772 - RNA, 25 nt, Human
acaauguuuccucuagaccuaugga

SEQ ID NO: 847773 - RNA, 20 nt, Human
acacaaccuaaaaaccgugg

SEQ ID NO: 847774 - RNA, 19 nt, Human
acagcucaugcagcagcag

SEQ ID NO: 847775 - RNA, 24 nt, Human
accaacccccuucacagaaaggcc

SEQ ID NO: 847776 - RNA, 26 nt, Human
accacacuagaauguacacuccggca

SEQ ID NO: 847777 - RNA, 18 nt, Human
accccaaacaaaaaugac

SEQ ID NO: 847778 - RNA, 25 nt, Human
accccaaacaaaaaugaccaaaaca

SEQ ID NO: 847779 - RNA, 19 nt, Human
acccgccaccaagcccggc

SEQ ID NO: 847780 - RNA, 21 nt, Human
acccuagagcuggaaaggccc

SEQ ID NO: 847781 - RNA, 22 nt, Human
acccuaucccuugguuccucug

SEQ ID NO: 847782 - RNA, 21 nt, Human
accgacacccguaagacccua

SEQ ID NO: 847783 - RNA, 22 nt, Human
acuacaggcacccgccaccaag

SEQ ID NO: 847784 - RNA, 24 nt, Human
acucaguguccccaagcucuucug

SEQ ID NO: 847785 - RNA, 18 nt, Human
acugcaagcuccgccucc

SEQ ID NO: 847786 - RNA, 20 nt, Human
acugcagccaccuacaguca

SEQ ID NO: 847787 - RNA, 23 nt, Human
agacaaaugccccagcuaucccc

SEQ ID NO: 847788 - RNA, 19 nt, Human
agacugccacgugaccggc

SEQ ID NO: 847789 - RNA, 21 nt, Human
agagcagccccagaaaagccc

SEQ ID NO: 847790 - RNA, 18 nt, Human
agaggcuguugugggcug

SEQ ID NO: 847791 - RNA, 19 nt, Human
agaggcuguugugggcugg

SEQ ID NO: 847792 - RNA, 18 nt, Human
agagggaagugucucuac

SEQ ID NO: 847793 - RNA, 23 nt, Human
agaggucagagaacuggcgagcc

SEQ ID NO: 847794 - RNA, 18 nt, Human
agccaccaguauacacca

SEQ ID NO: 847795 - RNA, 21 nt, Human
agccaggauggugaacaugcc

SEQ ID NO: 847796 - RNA, 24 nt, Human
agcccaggcuggagugcaguggug

SEQ ID NO: 847797 - RNA, 20 nt, Human
agccccagaaaagcccugac

SEQ ID NO: 847798 - RNA, 18 nt, Human
agcuccgccuccuggguu

SEQ ID NO: 847799 - RNA, 23 nt, Human
agcugcagcagaguccuaagcag

SEQ ID NO: 847800 - RNA, 19 nt, Human
aggagcccuggccaacagu

SEQ ID NO: 847801 - RNA, 22 nt, Human
aggagcccuggccaacaguuuc

SEQ ID NO: 847802 - RNA, 19 nt, Human
aggauggugaacaugccuu

SEQ ID NO: 847803 - RNA, 20 nt, Human
aggccagugcuaggugggga

SEQ ID NO: 847804 - RNA, 25 nt, Human
aggcuggagugcaguggugugaucu

SEQ ID NO: 847805 - RNA, 24 nt, Human
aggcuggccaucuugggcuggggc

SEQ ID NO: 847806 - RNA, 24 nt, Human
agggguuucaccguauuagccagg

SEQ ID NO: 847807 - RNA, 19 nt, Human
aggugcugggaccacugcu

SEQ ID NO: 847808 - RNA, 18 nt, Human
aguagcugggacuacagg

SEQ ID NO: 847809 - RNA, 19 nt, Human
aguagcugggacuacaggc

SEQ ID NO: 847810 - RNA, 19 nt, Human
agugcaguggugugaucuc

SEQ ID NO: 847811 - RNA, 20 nt, Human
agugcaguggugugaucucg

SEQ ID NO: 847812 - RNA, 23 nt, Human
agugcaguggugugaucucggcu

SEQ ID NO: 847813 - RNA, 24 nt, Human
agugcaguggugugaucucggcuc

SEQ ID NO: 847814 - RNA, 18 nt, Human
aguguccccaagcucuuc

SEQ ID NO: 847815 - RNA, 21 nt, Human
aucacacuuccgaaaaacaca

SEQ ID NO: 847816 - RNA, 25 nt, Human
aucaucaacagccaccaguauacac

SEQ ID NO: 847817 - RNA, 26 nt, Human
auccauccuucuguaaggucuacaua

SEQ ID NO: 847818 - RNA, 18 nt, Human
augcagcagcagugccca

SEQ ID NO: 847819 - RNA, 24 nt, Human
auucaaauucugggugacaauuuc

SEQ ID NO: 847820 - RNA, 24 nt, Human
caaaacagcauuaauauaaagaua

SEQ ID NO: 847821 - RNA, 21 nt, Human
caaacaaaaaugaccaaaaca

SEQ ID NO: 847822 - RNA, 20 nt, Human
caaaugccccagcuaucccc

SEQ ID NO: 847823 - RNA, 20 nt, Human
caacuugugcggcuguggcc

SEQ ID NO: 847824 - RNA, 23 nt, Human
caagagcagccccagaaaagccc

SEQ ID NO: 847825 - RNA, 21 nt, Human
caagggcaacugaaagugcug

SEQ ID NO: 847826 - RNA, 21 nt, Human
cacaugcaugccugccaccuc

SEQ ID NO: 847827 - RNA, 21 nt, Human
caccaagcccggcuaauuuuu

SEQ ID NO: 847828 - RNA, 27 nt, Human
caccagaaacaaaaugccuggagcuuc

SEQ ID NO: 847829 - RNA, 18 nt, Human
caccguauuagccaggau

SEQ ID NO: 847830 - RNA, 24 nt, Human
caccguauuagccaggauggugaa

SEQ ID NO: 847831 - RNA, 18 nt, Human
cacguuccaggaagguug

SEQ ID NO: 847832 - RNA, 18 nt, Human
cacuccaccacccacccc

SEQ ID NO: 847833 - RNA, 23 nt, Human
cacuccaccacccacccccuacc

SEQ ID NO: 847834 - RNA, 23 nt, Human
cacugccaccaacccccuucaca

SEQ ID NO: 847835 - RNA, 20 nt, Human
cacuuccgaaaaacacaagg

SEQ ID NO: 847836 - RNA, 19 nt, Human
cagaagacagugaggccac

SEQ ID NO: 847837 - RNA, 22 nt, Human
cagcacuccaccacccaccccc

SEQ ID NO: 847838 - RNA, 24 nt, Human
cagccaccaguauacaccacacua

SEQ ID NO: 847839 - RNA, 31 nt, Human
cagcuagacaaaugccccagcuauccccagg

SEQ ID NO: 847840 - RNA, 20 nt, Human
cagcugaaagcucuggacca

SEQ ID NO: 847841 - RNA, 23 nt, Human
cagcugcagccugggguuguggc

SEQ ID NO: 847842 - RNA, 21 nt, Human
caggagccuuccaggagcucu

SEQ ID NO: 847843 - RNA, 26 nt, Human
caggagccuuccaggagcucuggccg

SEQ ID NO: 847844 - RNA, 19 nt, Human
caggccagccagcccuggg

SEQ ID NO: 847845 - RNA, 22 nt, Human
caggccagccagcccuggguac

SEQ ID NO: 847846 - RNA, 23 nt, Human
caggggaggcugggucagaggca

SEQ ID NO: 847847 - RNA, 18 nt, Human
caguagcaccaagaccag

SEQ ID NO: 847848 - RNA, 21 nt, Human
caguauacaccacacuagaau

SEQ ID NO: 847849 - RNA, 25 nt, Human
caguguccccaagcucuucugcuug

SEQ ID NO: 847850 - RNA, 25 nt, Human
cauacagaaucuuaaaaaaaaaaaa

SEQ ID NO: 847851 - RNA, 20 nt, Human
cauggggaaacccagugcca

SEQ ID NO: 847852 - RNA, 27 nt, Human
ccaaacaaaaaugaccaaaacagcauu

SEQ ID NO: 847853 - RNA, 22 nt, Human
ccaaacaaaaaugaccaaaacc

SEQ ID NO: 847854 - RNA, 19 nt, Human
ccaacucugcaaaaaucgc

SEQ ID NO: 847855 - RNA, 19 nt, Human
ccaccacccacccccuacc

SEQ ID NO: 847856 - RNA, 19 nt, Human
ccaccaguauacaccacac

SEQ ID NO: 847857 - RNA, 20 nt, Human
ccagaagacagugaggccac

SEQ ID NO: 847858 - RNA, 18 nt, Human
ccagcuagacaaaugccc

SEQ ID NO: 847859 - RNA, 22 nt, Human
ccagcuauccccaggggaguua

SEQ ID NO: 847860 - RNA, 22 nt, Human
ccaggacacacagcucaugcag

SEQ ID NO: 847861 - RNA, 23 nt, Human
cccacccccuaccaguacagcug

SEQ ID NO: 847862 - RNA, 23 nt, Human
cccacuucgacucagugucccca

SEQ ID NO: 847863 - RNA, 20 nt, Human
cccaggcuggagugcagugg

SEQ ID NO: 847864 - RNA, 18 nt, Human
ccccagaaaagcccugac

SEQ ID NO: 847865 - RNA, 19 nt, Human
cccccuaccaguacagcug

SEQ ID NO: 847866 - RNA, 22 nt, Human
cccguaagacccuagagcugga

SEQ ID NO: 847867 - RNA, 24 nt, Human
cccugccucagccuccggaguagc

SEQ ID NO: 847868 - RNA, 19 nt, Human
ccggacacacaaccuaaaa

SEQ ID NO: 847869 - RNA, 24 nt, Human
ccggaguagcugggacuacaggca

SEQ ID NO: 847870 - RNA, 24 nt, Human
ccuacagucacaugcaugccugcc

SEQ ID NO: 847871 - RNA, 22 nt, Human
ccuccuggguucacaccauucc

SEQ ID NO: 847872 - RNA, 21 nt, Human
ccucugaagcagagaagcaga

SEQ ID NO: 847873 - RNA, 21 nt, Human
ccucugagacugcuggcugag

SEQ ID NO: 847874 - RNA, 19 nt, Human
cgccuccuggguucacacc

SEQ ID NO: 847875 - RNA, 22 nt, Human
cgcuggggagugggggagugcu

SEQ ID NO: 847876 - RNA, 21 nt, Human
cggggauucaggacaggccag

SEQ ID NO: 847877 - RNA, 18 nt, Human
cgucuauguuccucugag

SEQ ID NO: 847878 - RNA, 28 nt, Human
cuacagagaauuguguaaaaaaaaaaaa

SEQ ID NO: 847879 - RNA, 24 nt, Human
cucagccuccggaguagcugggac

SEQ ID NO: 847880 - RNA, 22 nt, Human
cucaggugcugggaccacugcu

SEQ ID NO: 847881 - RNA, 24 nt, Human
cugagaacagccagaagggucuau

SEQ ID NO: 847882 - RNA, 21 nt, Human
cugcagcauccuccugggcac

SEQ ID NO: 847883 - RNA, 19 nt, Human
cugccaccaacccccuuca

SEQ ID NO: 847884 - RNA, 23 nt, Human
cugccucagccuccggaguagcu

SEQ ID NO: 847885 - RNA, 23 nt, Human
cugccucccuccuuucucagcag

SEQ ID NO: 847886 - RNA, 19 nt, Human
cuggguucacaccauuccc

SEQ ID NO: 847887 - RNA, 18 nt, Human
gaagcagagaagcagagg

SEQ ID NO: 847888 - RNA, 20 nt, Human
gaagcaucacacuuccgaaa

SEQ ID NO: 847889 - RNA, 21 nt, Human
gaauuguguaaaaaaaaaaaa

SEQ ID NO: 847890 - RNA, 18 nt, Human
gagaaagagaggcuguug

SEQ ID NO: 847891 - RNA, 19 nt, Human
gagcaaaaaaggcucuaaa

SEQ ID NO: 847892 - RNA, 18 nt, Human
gaggagaaagagaggcug

SEQ ID NO: 847893 - RNA, 20 nt, Human
gaggagcccuggccaacagu

SEQ ID NO: 847894 - RNA, 23 nt, Human
gaggcuguugugggcugguucuu

SEQ ID NO: 847895 - RNA, 25 nt, Human
gaguagcugggacuacaggcacccg

SEQ ID NO: 847896 - RNA, 18 nt, Human
gagugcuuguauguggga

SEQ ID NO: 847897 - RNA, 18 nt, Human
gcagaguccuaagcagac

SEQ ID NO: 847898 - RNA, 26 nt, Human
gcauggaaucucccagagaaauucca

SEQ ID NO: 847899 - RNA, 21 nt, Human
gccaggcuucuuguggaccau

SEQ ID NO: 847900 - RNA, 20 nt, Human
gcccaggcuggagugcagug

SEQ ID NO: 847901 - RNA, 23 nt, Human
gcccaggcuggagugcaguggug

SEQ ID NO: 847902 - RNA, 18 nt, Human
gccccagaaaagcccuga

SEQ ID NO: 847903 - RNA, 25 nt, Human
gccccagaaaagcccugacaggaag

SEQ ID NO: 847904 - RNA, 24 nt, Human
gcccggcuaauuuuuuuguauuuu

SEQ ID NO: 847905 - RNA, 18 nt, Human
gcccugacaggaagggug

SEQ ID NO: 847906 - RNA, 21 nt, Human
gccggcacacaagggcaacug

SEQ ID NO: 847907 - RNA, 18 nt, Human
gccucccuccuuucucag

SEQ ID NO: 847908 - RNA, 19 nt, Human
gccucccuccuuucucagc

SEQ ID NO: 847909 - RNA, 20 nt, Human
gcuggccaucuugggcuggg

SEQ ID NO: 847910 - RNA, 24 nt, Human
gcuucaaucccauguccccacuuc

SEQ ID NO: 847911 - RNA, 18 nt, Human
ggaaaggcccaccuguga

SEQ ID NO: 847912 - RNA, 23 nt, Human
ggacagaaauaaccuaaaacaau

SEQ ID NO: 847913 - RNA, 19 nt, Human
ggagugcuuguauguggga

SEQ ID NO: 847914 - RNA, 18 nt, Human
ggaugccucaggugcugg

SEQ ID NO: 847915 - RNA, 18 nt, Human
ggaugccucaggugcugg

SEQ ID NO: 847916 - RNA, 19 nt, Human
ggcaaaguguuagaaagua

SEQ ID NO: 847917 - RNA, 20 nt, Human
ggcacgaugacagagggaag

SEQ ID NO: 847918 - RNA, 22 nt, Human
ggcuggagugcaguggugugau

SEQ ID NO: 847919 - RNA, 21 nt, Human
gggaggcugcaguauguggag

SEQ ID NO: 847920 - RNA, 18 nt, Human
gggguuucaccguauuag

SEQ ID NO: 847921 - RNA, 23 nt, Human
gggguuucaccguauuagccagg

SEQ ID NO: 847922 - RNA, 21 nt, Human
gguucacaccauuccccugcc

SEQ ID NO: 847923 - RNA, 21 nt, Human
gucuguggccacccacucccc

SEQ ID NO: 847924 - RNA, 26 nt, Human
gugaccccaaacaaaaaugaccaaaa

SEQ ID NO: 847925 - RNA, 21 nt, Human
gugaucucggcucacugcaag

SEQ ID NO: 847926 - RNA, 18 nt, Human
gugcugggaccacugcug

SEQ ID NO: 847927 - RNA, 26 nt, Human
uaauuuuuuuguauuuuuaguagaga

SEQ ID NO: 847928 - RNA, 21 nt, Human
uacauggccacaagaggagcc

SEQ ID NO: 847929 - RNA, 25 nt, Human
uagacaaaugccccagcuaucccca

SEQ ID NO: 847930 - RNA, 24 nt, Human
uagcaauaucucaauagugacccc

SEQ ID NO: 847931 - RNA, 23 nt, Human
uagcaauaucucaauagugacug

SEQ ID NO: 847932 - RNA, 24 nt, Human
uagcgggggauaaaccacaagccu

SEQ ID NO: 847933 - RNA, 21 nt, Human
uaguagagaagggguuucacc

SEQ ID NO: 847934 - RNA, 22 nt, Human
uaguagagaagggguuucaccg

SEQ ID NO: 847935 - RNA, 24 nt, Human
uaguagagaagggguuucaccgua

SEQ ID NO: 847936 - RNA, 21 nt, Human
uagucaccugcagcauccucc

SEQ ID NO: 847937 - RNA, 20 nt, Human
uagugaccccaaacaaaaau

SEQ ID NO: 847938 - RNA, 21 nt, Human
uauacaccacacuagaaugua

SEQ ID NO: 847939 - RNA, 26 nt, Human
uauacaccacacuagaauguacacuc

SEQ ID NO: 847940 - RNA, 24 nt, Human
uauuagccaggauggugaacaugc

SEQ ID NO: 847941 - RNA, 21 nt, Human
ucacaccauuccccugccuca

SEQ ID NO: 847942 - RNA, 18 nt, Human
ucaccugcagcauccucc

SEQ ID NO: 847943 - RNA, 22 nt, Human
ucaccugcagcauccuccuggg

SEQ ID NO: 847944 - RNA, 18 nt, Human
ucacugcaagcuccgccu

SEQ ID NO: 847945 - RNA, 23 nt, Human
ucacugcaagcuccgccuccugg

SEQ ID NO: 847946 - RNA, 24 nt, Human
ucacugcaagcuccgccuccuggg

SEQ ID NO: 847947 - RNA, 22 nt, Human
ucagcagucgucuauguuccuc

SEQ ID NO: 847948 - RNA, 23 nt, Human
ucagcagucgucuauguuccucu

SEQ ID NO: 847949 - RNA, 22 nt, Human
ucauucagcacuccaccaccca

SEQ ID NO: 847950 - RNA, 24 nt, Human
ucauucagcacuccaccacccacc

SEQ ID NO: 847951 - RNA, 21 nt, Human
uccauuccucauccaacuauu

SEQ ID NO: 847952 - RNA, 21 nt, Human
ucccaugacagcaggaugccu

SEQ ID NO: 847953 - RNA, 24 nt, Human
uccccugccucagccuccggagua

SEQ ID NO: 847954 - RNA, 24 nt, Human
uccggaguagcugggacuacaggc

SEQ ID NO: 847955 - RNA, 22 nt, Human
uccuggguucacaccauucccc

SEQ ID NO: 847956 - RNA, 22 nt, Human
ucuagugaggugggcacugcca

SEQ ID NO: 847957 - RNA, 28 nt, Human
ucuauaguugaaagauaaaccggggucc

SEQ ID NO: 847958 - RNA, 21 nt, Human
ucuauguuccucugagacugc

SEQ ID NO: 847959 - RNA, 23 nt, Human
ucuauguuccucugagacugcug

SEQ ID NO: 847960 - RNA, 21 nt, Human
ucugaagcagagaagcagagg

SEQ ID NO: 847961 - RNA, 21 nt, Human
ucugcugggagccuuccaaca

SEQ ID NO: 847962 - RNA, 24 nt, Human
ucugugcggacagccgaugcuggg

SEQ ID NO: 847963 - RNA, 21 nt, Human
ucuuuuuugagcccaggcugg

SEQ ID NO: 847964 - RNA, 22 nt, Human
ucuuuuuugagcccaggcugga

SEQ ID NO: 847965 - RNA, 24 nt, Human
ucuuuuuugagcccaggcuggagu

SEQ ID NO: 847966 - RNA, 21 nt, Human
ugaaagauaaacccaacucuu

SEQ ID NO: 847967 - RNA, 24 nt, Human
ugaacaggaauuggccaagccuug

SEQ ID NO: 847968 - RNA, 18 nt, Human
ugaccaaaacagcauuaa

SEQ ID NO: 847969 - RNA, 23 nt, Human
ugaccccaaacaaaaaugaccaa

SEQ ID NO: 847970 - RNA, 21 nt, Human
ugaccggcucucauccuugcu

SEQ ID NO: 847971 - RNA, 20 nt, Human
ugagaagccaucaggugggu

SEQ ID NO: 847972 - RNA, 18 nt, Human
ugagacugcuggcugaga

SEQ ID NO: 847973 - RNA, 19 nt, Human
ugaggacagcugcagcaga

SEQ ID NO: 847974 - RNA, 24 nt, Human
ugaggugggcacugccaccaaccc

SEQ ID NO: 847975 - RNA, 22 nt, Human
ugcaguggugugaucucggcuc

SEQ ID NO: 847976 - RNA, 20 nt, Human
ugcaugccugccaccucccu

SEQ ID NO: 847977 - RNA, 19 nt, Human
ugcauggaaucucccagag

SEQ ID NO: 847978 - RNA, 19 nt, Human
ugccaggcuucuuguggac

SEQ ID NO: 847979 - RNA, 20 nt, Human
ugcccuguggguagugggau

SEQ ID NO: 847980 - RNA, 24 nt, Human
ugccucagccuccggaguagcugg

SEQ ID NO: 847981 - RNA, 18 nt, Human
ugccuggagcuucugagc

SEQ ID NO: 847982 - RNA, 20 nt, Human
ugccuggagcuucugagcag

SEQ ID NO: 847983 - RNA, 18 nt, Human
uggaaaggcccaccugug

SEQ ID NO: 847984 - RNA, 19 nt, Human
uggagugcaguggugugau

SEQ ID NO: 847985 - RNA, 23 nt, Human
uggagugcaguggugugaucucg

SEQ ID NO: 847986 - RNA, 24 nt, Human
uggagugcaguggugugaucucgg

SEQ ID NO: 847987 - RNA, 22 nt, Human
uggcagccgcguuuaccacuga

SEQ ID NO: 847988 - RNA, 23 nt, Human
uggcaggccagccagcccugggu

SEQ ID NO: 847989 - RNA, 20 nt, Human
uggcagggagggucuguggc

SEQ ID NO: 847990 - RNA, 23 nt, Human
uggccaagccuugccaacuugau

SEQ ID NO: 847991 - RNA, 18 nt, Human
uggccggcacacaagggc

SEQ ID NO: 847992 - RNA, 19 nt, Human
uggccggcacacaagggca

SEQ ID NO: 847993 - RNA, 22 nt, Human
uggccucugcauggaaucuccc

SEQ ID NO: 847994 - RNA, 25 nt, Human
uggcugagaagccaucagguggguu

SEQ ID NO: 847995 - RNA, 27 nt, Human
uggcugagaagccaucagguggguucc

SEQ ID NO: 847996 - RNA, 21 nt, Human
ugggacuacaggcacccgcca

SEQ ID NO: 847997 - RNA, 22 nt, Human
ugggacuacaggcacccgccac

SEQ ID NO: 847998 - RNA, 24 nt, Human
ugggacuacaggcacccgccacca

SEQ ID NO: 847999 - RNA, 23 nt, Human
ugggagaggucagagaacuggcg

SEQ ID NO: 848000 - RNA, 22 nt, Human
ugggcuggggcucccugggcuu

SEQ ID NO: 848001 - RNA, 18 nt, Human
ugggcuugcaguggggag

SEQ ID NO: 848002 - RNA, 21 nt, Human
ugggcuugcaguggggagggu

SEQ ID NO: 848003 - RNA, 24 nt, Human
ugggcuugcaguggggagggucag

SEQ ID NO: 848004 - RNA, 20 nt, Human
uggucugagcuauggcaaag

SEQ ID NO: 848005 - RNA, 22 nt, Human
uguggaggagaaagagaggcug

SEQ ID NO: 848006 - RNA, 18 nt, Human
uguguaaaaaaaaaaaaa

SEQ ID NO: 848007 - RNA, 18 nt, Human
uuaguagagaagggguuu

SEQ ID NO: 848008 - RNA, 22 nt, Human
uuaguagagaagggguuucacc

SEQ ID NO: 848009 - RNA, 24 nt, Human
uuaguagagaagggguuucaccgu

SEQ ID NO: 848010 - RNA, 23 nt, Human
uucagcacuccaccacccacccc

SEQ ID NO: 848011 - RNA, 21 nt, Human
uucagcccagcccacagcccu

SEQ ID NO: 848012 - RNA, 19 nt, Human
uuccauuccucauccaacu

SEQ ID NO: 848013 - RNA, 19 nt, Human
uuccccugccucagccucc

SEQ ID NO: 848014 - RNA, 18 nt, Human
uucuuguggaccaugcag

SEQ ID NO: 848015 - RNA, 18 nt, Human
uugcaguggggaggguca

SEQ ID NO: 848016 - RNA, 22 nt, Human
uuggcagucaaagagaagcauc

SEQ ID NO: 848017 - RNA, 21 nt, Human
uugggcuggggcucccugggc

SEQ ID NO: 848018 - RNA, 19 nt, Human
uuguguaaaaaaaaaaaaa

SEQ ID NO: 848019 - RNA, 24 nt, Human
uuguguaaaaaaaaaaaaaucauc

SEQ ID NO: 848020 - RNA, 24 nt, Human
uuucuuuuuugagcccaggcugga

SEQ ID NO: 848021 - RNA, 24 nt, Human
uuuucuuuuuugagcccaggcugg

SEQ ID NO: 848022 - RNA, 24 nt, Human
uuuugagcccaggcuggagugcag

SEQ ID NO: 848023 - RNA, 24 nt, Human
uuuuuaguagagaagggguuucac

SEQ ID NO: 848024 - RNA, 21 nt, Human
uuuuuguauuuuuaguagaga

SEQ ID NO: 848025 - RNA, 18 nt, Human
uuuuuuguauuuuuagua

SEQ ID NO: 848026 - RNA, 21 nt, Human
uuuuuuguauuuuuaguagag

SEQ ID NO: 848027 - RNA, 18 nt, Human
uuuuuuuuuucuuuuuug

SEQ ID NO: 848028 - RNA, 25 nt, Human
uuuuuuuuuuuuuuuuuuucuuuuu

SEQ ID NO: 848029 - RNA, 23 nt, Human
aaccucacuccccguccccuccc

SEQ ID NO: 848030 - RNA, 25 nt, Human
aaccucacuccccguccccucccac

SEQ ID NO: 848031 - RNA, 19 nt, Human
aagcagcagccgugggccu

SEQ ID NO: 848032 - RNA, 22 nt, Human
aagcaggguucaaaucagcgug

SEQ ID NO: 848033 - RNA, 26 nt, Human
accucacuccccguccccucccacaa

SEQ ID NO: 848034 - RNA, 19 nt, Human
acugccagccaugcaccuc

SEQ ID NO: 848035 - RNA, 18 nt, Human
agcugccuccuucccugg

SEQ ID NO: 848036 - RNA, 19 nt, Human
aggaguggcuguggugaug

SEQ ID NO: 848037 - RNA, 23 nt, Human
agguggcagaaaccguggcagcu

SEQ ID NO: 848038 - RNA, 18 nt, Human
auaaagggacucggucuc

SEQ ID NO: 848039 - RNA, 18 nt, Human
auggcccuuuuguuuugg

SEQ ID NO: 848040 - RNA, 22 nt, Human
caaccucacuccccguccccuu

SEQ ID NO: 848041 - RNA, 20 nt, Human
cacacacgucgaagcagggu

SEQ ID NO: 848042 - RNA, 23 nt, Human
caccacacugcccaaccucacuc

SEQ ID NO: 848043 - RNA, 22 nt, Human
cacgcuagcuaccuccuccugu

SEQ ID NO: 848044 - RNA, 21 nt, Human
cagggagcacccuggccagau

SEQ ID NO: 848045 - RNA, 23 nt, Human
caguggccuggggcucggccucu

SEQ ID NO: 848046 - RNA, 24 nt, Human
ccaaccucacuccccguccccucc

SEQ ID NO: 848047 - RNA, 21 nt, Human
ccaccacacugcccaaccuca

SEQ ID NO: 848048 - RNA, 21 nt, Human
ccagcugggagccagggaccu

SEQ ID NO: 848049 - RNA, 18 nt, Human
ccaucuacagccuagcug

SEQ ID NO: 848050 - RNA, 22 nt, Human
ccaucucuucgcugucugucuc

SEQ ID NO: 848051 - RNA, 21 nt, Human
cccacgggccuggccugaccu

SEQ ID NO: 848052 - RNA, 19 nt, Human
ccccguccccucccacaaa

SEQ ID NO: 848053 - RNA, 24 nt, Human
cccucacacgcuagcuaccuccuc

SEQ ID NO: 848054 - RNA, 19 nt, Human
cccuuuuguuuuggugagg

SEQ ID NO: 848055 - RNA, 19 nt, Human
ccuagcugccuccuucccu

SEQ ID NO: 848056 - RNA, 23 nt, Human
ccuaucuccagcugggagccagg

SEQ ID NO: 848057 - RNA, 22 nt, Human
ccucacuccccguccccuccca

SEQ ID NO: 848058 - RNA, 19 nt, Human
ccuccuaucuccagcuggg

SEQ ID NO: 848059 - RNA, 21 nt, Human
ccuccuaucuccagcugggag

SEQ ID NO: 848060 - RNA, 19 nt, Human
ccuccugcuaccugccacc

SEQ ID NO: 848061 - RNA, 20 nt, Human
ccugaccucucucccccucc

SEQ ID NO: 848062 - RNA, 21 nt, Human
cgcuccugcugcugucgccgc

SEQ ID NO: 848063 - RNA, 21 nt, Human
cuagcuaccuccuccugugcu

SEQ ID NO: 848064 - RNA, 22 nt, Human
cucacacgcuagcuaccuccuc

SEQ ID NO: 848065 - RNA, 22 nt, Human
cucacuccccguccccucccac

SEQ ID NO: 848066 - RNA, 19 nt, Human
cucuaugcuagggguuuca

SEQ ID NO: 848067 - RNA, 18 nt, Human
cugcaggaguggcugugg

SEQ ID NO: 848068 - RNA, 19 nt, Human
cugcccaaccucacucccc

SEQ ID NO: 848069 - RNA, 21 nt, Human
cugcccaagacagguugacag

SEQ ID NO: 848070 - RNA, 19 nt, Human
cuuggaguggaaagucugu

SEQ ID NO: 848071 - RNA, 21 nt, Human
gaaacacuugggcacaaagag

SEQ ID NO: 848072 - RNA, 23 nt, Human
gcagacagcgccacggccaugac

SEQ ID NO: 848073 - RNA, 21 nt, Human
gcagggcagagauggcccuuu

SEQ ID NO: 848074 - RNA, 23 nt, Human
gccacggccaugacgcuccugcu

SEQ ID NO: 848075 - RNA, 23 nt, Human
gccggcgcagacagcgccacggc

SEQ ID NO: 848076 - RNA, 18 nt, Human
ggauccaguaagcgagug

SEQ ID NO: 848077 - RNA, 20 nt, Human
ggaugggugaucugggccuc

SEQ ID NO: 848078 - RNA, 21 nt, Human
ggggaggaugggugaucuggg

SEQ ID NO: 848079 - RNA, 20 nt, Human
ggugcccauccaccacacug

SEQ ID NO: 848080 - RNA, 18 nt, Human
guggcuguggugaugaug

SEQ ID NO: 848081 - RNA, 21 nt, Human
uacagccuagcugccuccuuc

SEQ ID NO: 848082 - RNA, 22 nt, Human
uacccacgggccuggccugacc

SEQ ID NO: 848083 - RNA, 19 nt, Human
uagcugccuccuucccugg

SEQ ID NO: 848084 - RNA, 20 nt, Human
uagcugccuccuucccuggu

SEQ ID NO: 848085 - RNA, 23 nt, Human
uagugccaacccucacacgcuag

SEQ ID NO: 848086 - RNA, 19 nt, Human
ucagcgugugcgcugguga

SEQ ID NO: 848087 - RNA, 19 nt, Human
uccaccacacugcccaacc

SEQ ID NO: 848088 - RNA, 20 nt, Human
uccccguccccucccacaaa

SEQ ID NO: 848089 - RNA, 21 nt, Human
uccugcugcugucgccgccgc

SEQ ID NO: 848090 - RNA, 25 nt, Human
uccugcugcugucgccgccgcuguu

SEQ ID NO: 848091 - RNA, 22 nt, Human
ucuccagcugggagccagggac

SEQ ID NO: 848092 - RNA, 19 nt, Human
ucugggccuccugcuaccu

SEQ ID NO: 848093 - RNA, 19 nt, Human
ugaccucucucccccuccc

SEQ ID NO: 848094 - RNA, 20 nt, Human
ugaccucucucccccucccc

SEQ ID NO: 848095 - RNA, 20 nt, Human
ugagggagagagggaaacac

SEQ ID NO: 848096 - RNA, 19 nt, Human
ugcaggaguggcuguggug

SEQ ID NO: 848097 - RNA, 18 nt, Human
ugcccaagacagguugac

SEQ ID NO: 848098 - RNA, 22 nt, Human
ugcucuuugcaagcgcugcgcu

SEQ ID NO: 848099 - RNA, 21 nt, Human
ugcuuggaguggaaagucugu

SEQ ID NO: 848100 - RNA, 21 nt, Human
uggcagcugcaggaguggcug

SEQ ID NO: 848101 - RNA, 25 nt, Human
uggcagcugcaggaguggcuguggu

SEQ ID NO: 848102 - RNA, 18 nt, Human
ugggccuccuaucuccag

SEQ ID NO: 848103 - RNA, 19 nt, Human
ugggugaucugggccuccu

SEQ ID NO: 848104 - RNA, 22 nt, Human
uucccuggucaacccuuccugg

SEQ ID NO: 848105 - RNA, 21 nt, Human
uucucugucugguucugcaag

SEQ ID NO: 848106 - RNA, 19 nt, Human
uuucacacaacucuacacc

SEQ ID NO: 848107 - RNA, 18 nt, Human
uuuuguuuuggugaggga

SEQ ID NO: 848108 - RNA, 20 nt, Human
aaaaagaaaaaagaaguuca

SEQ ID NO: 848109 - RNA, 24 nt, Human
aaaggccgggugcaguggcucaug

SEQ ID NO: 848110 - RNA, 24 nt, Human
aaagugcugggauuauaggcguga

SEQ ID NO: 848111 - RNA, 19 nt, Human
aaauccuguacuuccuguu

SEQ ID NO: 848112 - RNA, 20 nt, Human
aacacagugagauccccauc

SEQ ID NO: 848113 - RNA, 21 nt, Human
aacacagugagauccccaucu

SEQ ID NO: 848114 - RNA, 22 nt, Human
aacacagugagauccccaucuc

SEQ ID NO: 848115 - RNA, 22 nt, Human
aagccagcaugacagcaaagaa

SEQ ID NO: 848116 - RNA, 19 nt, Human
aaguagcugggacuacagg

SEQ ID NO: 848117 - RNA, 20 nt, Human
aaguagcugggacuacaggc

SEQ ID NO: 848118 - RNA, 24 nt, Human
aaguagcugggacuacaggcacac

SEQ ID NO: 848119 - RNA, 19 nt, Human
aagugcugggauuauaggc

SEQ ID NO: 848120 - RNA, 19 nt, Human
aagugcugggauuauaggc

SEQ ID NO: 848121 - RNA, 26 nt, Human
aagugcugggauuauaggcgugagcc

SEQ ID NO: 848122 - RNA, 18 nt, Human
aaugaaacaaaacauaca

SEQ ID NO: 848123 - RNA, 21 nt, Human
acaccagggccugucagggga

SEQ ID NO: 848124 - RNA, 21 nt, Human
acaggguuucaccauguuggc

SEQ ID NO: 848125 - RNA, 24 nt, Human
acaggguuucaccauguuggccag

SEQ ID NO: 848126 - RNA, 25 nt, Human
acaggguuucaccauguuggccagg

SEQ ID NO: 848127 - RNA, 24 nt, Human
accacugugcuucagccuaggcga

SEQ ID NO: 848128 - RNA, 24 nt, Human
acugugcuucagccuaggcgauag

SEQ ID NO: 848129 - RNA, 26 nt, Human
acugugcuucagccuaggcgauagag

SEQ ID NO: 848130 - RNA, 21 nt, Human
agaaaaaaugagacgggucug

SEQ ID NO: 848131 - RNA, 21 nt, Human
agcaugacagcaaagaaagga

SEQ ID NO: 848132 - RNA, 24 nt, Human
agccuaggcgauagagcgaggccu

SEQ ID NO: 848133 - RNA, 22 nt, Human
agccucaccacaaaaaugacaa

SEQ ID NO: 848134 - RNA, 24 nt, Human
agccuggccaacacagugagaucc

SEQ ID NO: 848135 - RNA, 19 nt, Human
aggaggucaaggcugcagc

SEQ ID NO: 848136 - RNA, 20 nt, Human
aggaguuugagaccagccug

SEQ ID NO: 848137 - RNA, 24 nt, Human
aggauugcuugagcccaggaguuu

SEQ ID NO: 848138 - RNA, 26 nt, Human
aggcaggaaauaaauaguaacaccaa

SEQ ID NO: 848139 - RNA, 27 nt, Human
aggcaggaaauaaauaguaagggaccc

SEQ ID NO: 848140 - RNA, 18 nt, Human
aggcaggaggauggcuug

SEQ ID NO: 848141 - RNA, 21 nt, Human
aggccaaggugggaggauugc

SEQ ID NO: 848142 - RNA, 24 nt, Human
aggccaaggugggaggauugcuug

SEQ ID NO: 848143 - RNA, 19 nt, Human
aggcgugagccacugcgcc

SEQ ID NO: 848144 - RNA, 18 nt, Human
aggcuggagugcaguggc

SEQ ID NO: 848145 - RNA, 24 nt, Human
aggugaucugcuuacuucggccuc

SEQ ID NO: 848146 - RNA, 23 nt, Human
aggugggaggauugcuugagccc

SEQ ID NO: 848147 - RNA, 22 nt, Human
aguagagacaggguuucaccau

SEQ ID NO: 848148 - RNA, 22 nt, Human
agugagauccccaucucuaaaa

SEQ ID NO: 848149 - RNA, 23 nt, Human
agugcaguggcguaauuuuggcu

SEQ ID NO: 848150 - RNA, 24 nt, Human
agugcaguggcguaauuuuggcuc

SEQ ID NO: 848151 - RNA, 23 nt, Human
aguggcucaugccuguaaucuca

SEQ ID NO: 848152 - RNA, 24 nt, Human
auaauaaaaauagaaaaaaugaga

SEQ ID NO: 848153 - RNA, 23 nt, Human
aucgcaccacugugcuucagccu

SEQ ID NO: 848154 - RNA, 23 nt, Human
augaaaaaaaaaaaagacaacca

SEQ ID NO: 848155 - RNA, 27 nt, Human
augaaacaaaacauacaaccaagccuc

SEQ ID NO: 848156 - RNA, 19 nt, Human
augccuguaaucucaauac

SEQ ID NO: 848157 - RNA, 24 nt, Human
augcugaggcaggaggauggcuug

SEQ ID NO: 848158 - RNA, 18 nt, Human
auguguaugugugugugu

SEQ ID NO: 848159 - RNA, 25 nt, Human
auucugcacguguaccccagaacuu

SEQ ID NO: 848160 - RNA, 24 nt, Human
caaaggcaaggaauaggguuuuug

SEQ ID NO: 848161 - RNA, 24 nt, Human
caaagugcugggauuauaggcgug

SEQ ID NO: 848162 - RNA, 24 nt, Human
caaccgugugagguaaugcauuug

SEQ ID NO: 848163 - RNA, 22 nt, Human
caauacuuugaggccaaggugg

SEQ ID NO: 848164 - RNA, 23 nt, Human
caauacuuugaggccaagguggg

SEQ ID NO: 848165 - RNA, 23 nt, Human
cacacaacaccacaucaggcuaa

SEQ ID NO: 848166 - RNA, 22 nt, Human
caccauguuggccagguuuguc

SEQ ID NO: 848167 - RNA, 24 nt, Human
caccauguuggccagguuugucuu

SEQ ID NO: 848168 - RNA, 18 nt, Human
cacgugcauaccuaugua

SEQ ID NO: 848169 - RNA, 21 nt, Human
cacuaccuugcacugaaagca

SEQ ID NO: 848170 - RNA, 21 nt, Human
cacugcaaccuccgccuccca

SEQ ID NO: 848171 - RNA, 19 nt, Human
cacugugcuucagccuagg

SEQ ID NO: 848172 - RNA, 20 nt, Human
cacugugcuucagccuaggc

SEQ ID NO: 848173 - RNA, 22 nt, Human
cacugugcuucagccuaggcga

SEQ ID NO: 848174 - RNA, 23 nt, Human
cacugugcuucagccuaggcgau

SEQ ID NO: 848175 - RNA, 23 nt, Human
cagagccccggaacagcgguguu

SEQ ID NO: 848176 - RNA, 19 nt, Human
cagcaaagaaaggacggac

SEQ ID NO: 848177 - RNA, 21 nt, Human
cagcaugacagcaaagaaagg

SEQ ID NO: 848178 - RNA, 22 nt, Human
cagcaugacagcaaagaaagga

SEQ ID NO: 848179 - RNA, 21 nt, Human
cagccuaggcgauagagcgag

SEQ ID NO: 848180 - RNA, 23 nt, Human
cagcuacucgggaggccccagcc

SEQ ID NO: 848181 - RNA, 19 nt, Human
cagcuuaaccugagggugg

SEQ ID NO: 848182 - RNA, 24 nt, Human
caggguuucaccauguuggccagg

SEQ ID NO: 848183 - RNA, 20 nt, Human
cagucgaggcgagcagagcc

SEQ ID NO: 848184 - RNA, 20 nt, Human
cauacaaccaagccucacca

SEQ ID NO: 848185 - RNA, 22 nt, Human
cauacaaccaagccucaccaca

SEQ ID NO: 848186 - RNA, 20 nt, Human
caugccuguaaucucaauac

SEQ ID NO: 848187 - RNA, 24 nt, Human
caugccuguaaucucaauacuuug

SEQ ID NO: 848188 - RNA, 22 nt, Human
ccaaagugcugggauuauaggc

SEQ ID NO: 848189 - RNA, 24 nt, Human
ccaaagugcugggauuauaggcgu

SEQ ID NO: 848190 - RNA, 19 nt, Human
ccacugugcuucagccuag

SEQ ID NO: 848191 - RNA, 20 nt, Human
ccacugugcuucagccuagg

SEQ ID NO: 848192 - RNA, 20 nt, Human
ccacugugcuucagccuagg

SEQ ID NO: 848193 - RNA, 21 nt, Human
ccacugugcuucagccuaggc

SEQ ID NO: 848194 - RNA, 22 nt, Human
ccagcccaugaaauccuguacu

SEQ ID NO: 848195 - RNA, 18 nt, Human
ccauggcacgugcauacc

SEQ ID NO: 848196 - RNA, 18 nt, Human
ccccuuaggcccacuacc

SEQ ID NO: 848197 - RNA, 26 nt, Human
ccgccucccagguucaagcaauucuu

SEQ ID NO: 848198 - RNA, 23 nt, Human
ccuaaguagcugggacuacaggc

SEQ ID NO: 848199 - RNA, 24 nt, Human
ccuaaguagcugggacuacaggca

SEQ ID NO: 848200 - RNA, 23 nt, Human
ccuaccucagccuccuaaguagc

SEQ ID NO: 848201 - RNA, 21 nt, Human
ccucauggucugccucgugcc

SEQ ID NO: 848202 - RNA, 24 nt, Human
ccucccagguucaagcaauucucc

SEQ ID NO: 848203 - RNA, 24 nt, Human
cgaccucaggugaucugcuuacuu

SEQ ID NO: 848204 - RNA, 21 nt, Human
cgagcagagccagcccaugaa

SEQ ID NO: 848205 - RNA, 19 nt, Human
cgcuccucugcagugaccu

SEQ ID NO: 848206 - RNA, 24 nt, Human
cucacugcaaccuccgccucccag

SEQ ID NO: 848207 - RNA, 24 nt, Human
cucagccuccuaaguagcugggac

SEQ ID NO: 848208 - RNA, 24 nt, Human
cucaugccuguaaucucaauacuu

SEQ ID NO: 848209 - RNA, 19 nt, Human
cucauggucugccucgugc

SEQ ID NO: 848210 - RNA, 24 nt, Human
cucgcucuguugcccaggcuggag

SEQ ID NO: 848211 - RNA, 20 nt, Human
cucuguugcccaggcuggag

SEQ ID NO: 848212 - RNA, 23 nt, Human
cugcaaccuccgccucccagguu

SEQ ID NO: 848213 - RNA, 24 nt, Human
cugcaaccuccgccucccagguuc

SEQ ID NO: 848214 - RNA, 22 nt, Human
cugucaauuuaaaaauaaaaau

SEQ ID NO: 848215 - RNA, 18 nt, Human
gaaaggacggacccagag

SEQ ID NO: 848216 - RNA, 23 nt, Human
gaccgcuccucugcagugaccug

SEQ ID NO: 848217 - RNA, 21 nt, Human
gacuacaggcacacaacacca

SEQ ID NO: 848218 - RNA, 20 nt, Human
gagaaaggccgggugcagug

SEQ ID NO: 848219 - RNA, 23 nt, Human
gagaccagccuggccaacacagu

SEQ ID NO: 848220 - RNA, 18 nt, Human
gaggagacuccaaggaug

SEQ ID NO: 848221 - RNA, 20 nt, Human
gaggcgagcagagccagccc

SEQ ID NO: 848222 - RNA, 21 nt, Human
gaggcgagcagagccagccca

SEQ ID NO: 848223 - RNA, 21 nt, Human
gauaucagggaaugaaaggga

SEQ ID NO: 848224 - RNA, 24 nt, Human
gauguaaaaacaugaaugaaacaa

SEQ ID NO: 848225 - RNA, 18 nt, Human
gauuauaggcgugagcca

SEQ ID NO: 848226 - RNA, 22 nt, Human
gauuauaggcgugagccacugc

SEQ ID NO: 848227 - RNA, 22 nt, Human
gauuauaggcgugagccacugc

SEQ ID NO: 848228 - RNA, 22 nt, Human
gauugcuugagcccaggaguuu

SEQ ID NO: 848229 - RNA, 24 nt, Human
gauugcuugagcccaggaguuuga

SEQ ID NO: 848230 - RNA, 22 nt, Human
gcaaagaaaggacggacccaga

SEQ ID NO: 848231 - RNA, 19 nt, Human
gcaagccagcaugacagca

SEQ ID NO: 848232 - RNA, 18 nt, Human
gcaugacagcaaagaaag

SEQ ID NO: 848233 - RNA, 22 nt, Human
gcccaggaguuugagaccagcc

SEQ ID NO: 848234 - RNA, 20 nt, Human
gcccaggcuggagugcagug

SEQ ID NO: 848235 - RNA, 24 nt, Human
gcccaggcuggagugcaguggcgu

SEQ ID NO: 848236 - RNA, 18 nt, Human
gcuacuguggaugcugag

SEQ ID NO: 848237 - RNA, 19 nt, Human
gcuacuguggaugcugagg

SEQ ID NO: 848238 - RNA, 20 nt, Human
gcuacuguggaugcugaggc

SEQ ID NO: 848239 - RNA, 25 nt, Human
gcucuguugcccaggcuggagugca

SEQ ID NO: 848240 - RNA, 19 nt, Human
gcuggagugcaguggcgua

SEQ ID NO: 848241 - RNA, 23 nt, Human
ggaaauaccuaauguaggugaca

SEQ ID NO: 848242 - RNA, 19 nt, Human
ggaucgcaucaaacagcaa

SEQ ID NO: 848243 - RNA, 22 nt, Human
ggaugcugaggcaggaggaugg

SEQ ID NO: 848244 - RNA, 22 nt, Human
ggauugcuugagcccaggaguu

SEQ ID NO: 848245 - RNA, 23 nt, Human
ggccgggugcaguggcucaugcc

SEQ ID NO: 848246 - RNA, 18 nt, Human
ggccugucaggggaugga

SEQ ID NO: 848247 - RNA, 24 nt, Human
ggcgagcagagccagcccaugaaa

SEQ ID NO: 848248 - RNA, 24 nt, Human
gggaggccccagcccagcaggagc

SEQ ID NO: 848249 - RNA, 23 nt, Human
gggauggagggcuaggggaggga

SEQ ID NO: 848250 - RNA, 24 nt, Human
ggggaacaucacacaccagggccu

SEQ ID NO: 848251 - RNA, 24 nt, Human
gggugcaguggcucaugccuguaa

SEQ ID NO: 848252 - RNA, 22 nt, Human
ggguuucaccauguuggccagg

SEQ ID NO: 848253 - RNA, 19 nt, Human
gugcauaccuauguaacaa

SEQ ID NO: 848254 - RNA, 24 nt, Human
guuuuaguagagacaggguuucac

SEQ ID NO: 848255 - RNA, 18 nt, Human
uaaauguguaugugugug

SEQ ID NO: 848256 - RNA, 20 nt, Human
uaaugcauuugugagcuaga

SEQ ID NO: 848257 - RNA, 26 nt, Human
uaauuuuuuuguaguuuuaguagaga

SEQ ID NO: 848258 - RNA, 24 nt, Human
uaccucagccuccuaaguagcugg

SEQ ID NO: 848259 - RNA, 18 nt, Human
uacuuugaggccaaggug

SEQ ID NO: 848260 - RNA, 22 nt, Human
uagagacaggguuucaccaugu

SEQ ID NO: 848261 - RNA, 24 nt, Human
uagagcgaggccuugucucuaaaa

SEQ ID NO: 848262 - RNA, 24 nt, Human
uaguagagacaggguuucaccaug

SEQ ID NO: 848263 - RNA, 26 nt, Human
uaguagagacaggguuucaccauguu

SEQ ID NO: 848264 - RNA, 23 nt, Human
uauaggcgugagccacugcgccu

SEQ ID NO: 848265 - RNA, 23 nt, Human
uaucuguacuuccagcuacucgg

SEQ ID NO: 848266 - RNA, 24 nt, Human
uaucuguacuuccagcuacucggg

SEQ ID NO: 848267 - RNA, 18 nt, Human
uauguguguguguauaca

SEQ ID NO: 848268 - RNA, 24 nt, Human
uauuuuuuuuuuuuuuuugcccag

SEQ ID NO: 848269 - RNA, 26 nt, Human
uauuuuuuuuuuuuuuuugcccaggg

SEQ ID NO: 848270 - RNA, 22 nt, Human
ucaaacagcaauauugauaagc

SEQ ID NO: 848271 - RNA, 19 nt, Human
ucacugcaaccuccgccuc

SEQ ID NO: 848272 - RNA, 23 nt, Human
ucacugcaaccuccgccucccag

SEQ ID NO: 848273 - RNA, 24 nt, Human
ucacugcaaccuccgccucccagg

SEQ ID NO: 848274 - RNA, 27 nt, Human
ucacugcaaccuccgccucccagguuc

SEQ ID NO: 848275 - RNA, 24 nt, Human
ucccaaagugcugggauuauaggc

SEQ ID NO: 848276 - RNA, 21 nt, Human
ucccagguucaagcaauucuc

SEQ ID NO: 848277 - RNA, 23 nt, Human
ucccagguucaagcaauucuccu

SEQ ID NO: 848278 - RNA, 24 nt, Human
uccuaaguagcugggacuacaggc

SEQ ID NO: 848279 - RNA, 19 nt, Human
ucgcaccacugugcuucag

SEQ ID NO: 848280 - RNA, 24 nt, Human
ucgcucuguugcccaggcuggagu

SEQ ID NO: 848281 - RNA, 24 nt, Human
ucuccuaccucagccuccuaagua

SEQ ID NO: 848282 - RNA, 19 nt, Human
ucucgcucuguugcccagg

SEQ ID NO: 848283 - RNA, 23 nt, Human
ucucgcucuguugcccaggcugg

SEQ ID NO: 848284 - RNA, 24 nt, Human
ucucgcucuguugcccaggcugga

SEQ ID NO: 848285 - RNA, 26 nt, Human
ucucgcucuguugcccaggcuggagu

SEQ ID NO: 848286 - RNA, 27 nt, Human
ucucgcucuguugcccaggcuggagug

SEQ ID NO: 848287 - RNA, 21 nt, Human
ucucuaaaauaauaaaaauag

SEQ ID NO: 848288 - RNA, 23 nt, Human
ucugcagugaccugcagaccccc

SEQ ID NO: 848289 - RNA, 18 nt, Human
ucuguugcccaggcugga

SEQ ID NO: 848290 - RNA, 24 nt, Human
ucuguugcccaggcuggagugcag

SEQ ID NO: 848291 - RNA, 24 nt, Human
ugaaaaaaaaaaaagacaaccaaa

SEQ ID NO: 848292 - RNA, 20 nt, Human
ugaaagggauuaaaagcuuu

SEQ ID NO: 848293 - RNA, 25 nt, Human
ugaaaucucugagauaucagggaau

SEQ ID NO: 848294 - RNA, 24 nt, Human
ugaaugaaacaaaacauacaaccc

SEQ ID NO: 848295 - RNA, 22 nt, Human
ugacaaccgugugagguaaugc

SEQ ID NO: 848296 - RNA, 22 nt, Human
ugacagcaaagaaaggacggac

SEQ ID NO: 848297 - RNA, 18 nt, Human
ugagaccagccuggccaa

SEQ ID NO: 848298 - RNA, 23 nt, Human
ugagcccaggaguuugagaccag

SEQ ID NO: 848299 - RNA, 23 nt, Human
ugagcuagauuuaaccauuccca

SEQ ID NO: 848300 - RNA, 18 nt, Human
ugaggcaggaggauggcu

SEQ ID NO: 848301 - RNA, 19 nt, Human
ugaggcaggaggauggcuu

SEQ ID NO: 848302 - RNA, 19 nt, Human
ugcacauucugcacgugua

SEQ ID NO: 848303 - RNA, 22 nt, Human
ugcaguggcguaauuuuggcuc

SEQ ID NO: 848304 - RNA, 18 nt, Human
ugcccaggcuggagugca

SEQ ID NO: 848305 - RNA, 21 nt, Human
ugcccaggcuggagugcagug

SEQ ID NO: 848306 - RNA, 22 nt, Human
ugcccaggcuggagugcagugg

SEQ ID NO: 848307 - RNA, 24 nt, Human
ugcccaggcuggagugcaguggcg

SEQ ID NO: 848308 - RNA, 23 nt, Human
ugcuucagccuaggcgauagagc

SEQ ID NO: 848309 - RNA, 18 nt, Human
ugcuugagcccaggaguu

SEQ ID NO: 848310 - RNA, 19 nt, Human
uggagugcaguggcguaau

SEQ ID NO: 848311 - RNA, 23 nt, Human
uggagugcaguggcguaauuuug

SEQ ID NO: 848312 - RNA, 24 nt, Human
uggagugcaguggcguaauuuugg

SEQ ID NO: 848313 - RNA, 21 nt, Human
uggccagguuugucuugaacu

SEQ ID NO: 848314 - RNA, 19 nt, Human
uggcguaauuuuggcucac

SEQ ID NO: 848315 - RNA, 21 nt, Human
uggcucaugccuguaaucuca

SEQ ID NO: 848316 - RNA, 22 nt, Human
uggcucaugccuguaaucucaa

SEQ ID NO: 848317 - RNA, 24 nt, Human
uggcucaugccuguaaucucaaua

SEQ ID NO: 848318 - RNA, 24 nt, Human
ugggacuacaggcacacaacacca

SEQ ID NO: 848319 - RNA, 18 nt, Human
ugggauuauaggcgugag

SEQ ID NO: 848320 - RNA, 19 nt, Human
ugggauuauaggcgugagc

SEQ ID NO: 848321 - RNA, 21 nt, Human
ugggauuauaggcgugagcca

SEQ ID NO: 848322 - RNA, 22 nt, Human
ugggauuauaggcgugagccac

SEQ ID NO: 848323 - RNA, 22 nt, Human
ugggauuauaggcgugagccac

SEQ ID NO: 848324 - RNA, 24 nt, Human
ugggauuauaggcgugagccacug

SEQ ID NO: 848325 - RNA, 19 nt, Human
uguaacagaccgcuccucu

SEQ ID NO: 848326 - RNA, 18 nt, Human
uguauguguguguguaua

SEQ ID NO: 848327 - RNA, 21 nt, Human
uguauguguguguguauacau

SEQ ID NO: 848328 - RNA, 23 nt, Human
uguauguguguguguauacauau

SEQ ID NO: 848329 - RNA, 20 nt, Human
ugugaucgcaccacugugcu

SEQ ID NO: 848330 - RNA, 20 nt, Human
uguguauguguguguguaua

SEQ ID NO: 848331 - RNA, 18 nt, Human
uguguguguauacauaua

SEQ ID NO: 848332 - RNA, 19 nt, Human
uguguguguauacauauac

SEQ ID NO: 848333 - RNA, 23 nt, Human
uuaggcccacuaccuugcacuga

SEQ ID NO: 848334 - RNA, 24 nt, Human
uuaguagagacaggguuucaccau

SEQ ID NO: 848335 - RNA, 24 nt, Human
uucaagcaauucuccuaccucagc

SEQ ID NO: 848336 - RNA, 24 nt, Human
uucagccuaggcgauagagcgagg

SEQ ID NO: 848337 - RNA, 19 nt, Human
uucggccucccaaagugcu

SEQ ID NO: 848338 - RNA, 20 nt, Human
uugaagcaccagggccucgg

SEQ ID NO: 848339 - RNA, 23 nt, Human
uugacuccuacaaaggcaaggaa

SEQ ID NO: 848340 - RNA, 22 nt, Human
uugagcccaggaguuugagacc

SEQ ID NO: 848341 - RNA, 21 nt, Human
uugcuugagcccaggaguuug

SEQ ID NO: 848342 - RNA, 18 nt, Human
uuguuguuguuguuuuug

SEQ ID NO: 848343 - RNA, 19 nt, Human
uuucaccauguuggccagg

SEQ ID NO: 848344 - RNA, 20 nt, Human
uuucaccauguuggccaggu

SEQ ID NO: 848345 - RNA, 21 nt, Human
uuugucuugaacucccgaccu

SEQ ID NO: 848346 - RNA, 24 nt, Human
uuuuaaaaaugaaaaaaaaaaaag

SEQ ID NO: 848347 - RNA, 18 nt, Human
uuuuguaguuuuaguaga

SEQ ID NO: 848348 - RNA, 21 nt, Human
uuuuuguaguuuuaguagaga

SEQ ID NO: 848349 - RNA, 21 nt, Human
uuuuuuguaguuuuaguagag

SEQ ID NO: 848350 - RNA, 24 nt, Human
uuuuuuguaguuuuaguagagaca

SEQ ID NO: 848351 - RNA, 20 nt, Human
uuuuuuuuuuuuuugcccag

SEQ ID NO: 848352 - RNA, 18 nt, Human
uuuuuuuuuuuuuuuuug

SEQ ID NO: 848353 - RNA, 18 nt, Human
aaguucccuccgcccucc

SEQ ID NO: 848354 - RNA, 21 nt, Human
aaguucccuccgcccuccgcc

SEQ ID NO: 848355 - RNA, 19 nt, Human
acacacuggggugugugcg

SEQ ID NO: 848356 - RNA, 22 nt, Human
agaaugagaggggcaguguggg

SEQ ID NO: 848357 - RNA, 21 nt, Human
aucaguaguaaaacauccccu

SEQ ID NO: 848358 - RNA, 26 nt, Human
auuccauucaacgccccccuccccca

SEQ ID NO: 848359 - RNA, 18 nt, Human
caaggaucguggcgcuuu

SEQ ID NO: 848360 - RNA, 18 nt, Human
caaguucccuccgcccuc

SEQ ID NO: 848361 - RNA, 22 nt, Human
caaugcugaaaggauaggagga

SEQ ID NO: 848362 - RNA, 21 nt, Human
cacagguuuaguucccucacc

SEQ ID NO: 848363 - RNA, 21 nt, Human
cacccccucucucuucaucca

SEQ ID NO: 848364 - RNA, 24 nt, Human
cagaucgugcaggucagacacacu

SEQ ID NO: 848365 - RNA, 22 nt, Human
cagcggacugcuccucaggcuc

SEQ ID NO: 848366 - RNA, 20 nt, Human
cccauagcaccuggggggcc

SEQ ID NO: 848367 - RNA, 21 nt, Human
ccccauagcaccuggggggcc

SEQ ID NO: 848368 - RNA, 18 nt, Human
ccccgccugcccucucuc

SEQ ID NO: 848369 - RNA, 21 nt, Human
ccccucucucuucauccagau

SEQ ID NO: 848370 - RNA, 19 nt, Human
cccuccgcccucuccuccc

SEQ ID NO: 848371 - RNA, 19 nt, Human
ccucccgggaacaccaccc

SEQ ID NO: 848372 - RNA, 18 nt, Human
ccuccgcccucuccuccc

SEQ ID NO: 848373 - RNA, 21 nt, Human
cgccccccucccccauagcac

SEQ ID NO: 848374 - RNA, 21 nt, Human
cucggccaggugcagcuucug

SEQ ID NO: 848375 - RNA, 19 nt, Human
gacaagcuuugcuaugauu

SEQ ID NO: 848376 - RNA, 22 nt, Human
gaggacaucggacaagcuuugc

SEQ ID NO: 848377 - RNA, 21 nt, Human
gcagcggacugcuccucaggc

SEQ ID NO: 848378 - RNA, 19 nt, Human
gcccucucucacccccucu

SEQ ID NO: 848379 - RNA, 23 nt, Human
gcgcacucgcgcuguuucugacu

SEQ ID NO: 848380 - RNA, 24 nt, Human
ggccuggagguuuggggucucgag

SEQ ID NO: 848381 - RNA, 25 nt, Human
uaaaacauccccuacaaccacuuuu

SEQ ID NO: 848382 - RNA, 21 nt, Human
ucccaccccggucucccaucu

SEQ ID NO: 848383 - RNA, 21 nt, Human
ucccccauagcaccugggggg

SEQ ID NO: 848384 - RNA, 24 nt, Human
uccccgccugcccucucucacccc

SEQ ID NO: 848385 - RNA, 19 nt, Human
ucccucaccugugcaaagg

SEQ ID NO: 848386 - RNA, 22 nt, Human
ucccuccgcccuccgcccucuc

SEQ ID NO: 848387 - RNA, 22 nt, Human
ucggcguucucggccaggugca

SEQ ID NO: 848388 - RNA, 22 nt, Human
ucucucacccccucucucuuca

SEQ ID NO: 848389 - RNA, 23 nt, Human
ugaaaggauaggaggacaucgga

SEQ ID NO: 848390 - RNA, 25 nt, Human
ugaagagaaugagaggggcagugug

SEQ ID NO: 848391 - RNA, 20 nt, Human
uggagguuuggggucucgag

SEQ ID NO: 848392 - RNA, 19 nt, Human
ugggccucaggccuggagg

SEQ ID NO: 848393 - RNA, 18 nt, Human
ugggccugcgugggacgc

SEQ ID NO: 848394 - RNA, 22 nt, Human
uugcaguccccgccugcccucu

SEQ ID NO: 848395 - RNA, 20 nt, Human
uuugaagagaaugagagggg

SEQ ID NO: 848396 - RNA, 25 nt, Human
uuuggaccaguccuuccucccaccc

SEQ ID NO: 848397 - RNA, 23 nt, Human
uuuuuuuuuuuuuuuuuugcuuu

SEQ ID NO: 848398 - RNA, 27 nt, Human
uuuuuuuuuuuuuuuuuuuuuuugggg

SEQ ID NO: 848399 - RNA, 20 nt, Human
aaaaaagaaaaaaaaaagga

SEQ ID NO: 848400 - RNA, 20 nt, Human
aaaaaagaaaaaaaaaagga

SEQ ID NO: 848401 - RNA, 21 nt, Human
aaaaaagaaaagaaaagcaaa

SEQ ID NO: 848402 - RNA, 18 nt, Human
aaaagaaaaaaaaaaggg

SEQ ID NO: 848403 - RNA, 20 nt, Human
aaagaaaagcaaaaaagaaa

SEQ ID NO: 848404 - RNA, 23 nt, Human
aaagauucuaaaacaauugaaca

SEQ ID NO: 848405 - RNA, 22 nt, Human
aagcaacuaaaaaaaggcauac

SEQ ID NO: 848406 - RNA, 31 nt, Human
acaaaguuuucucccuaaaguggcucaaaag

SEQ ID NO: 848407 - RNA, 22 nt, Human
acacugcuucauagcaaggccu

SEQ ID NO: 848408 - RNA, 19 nt, Human
acagccuagccugcacucu

SEQ ID NO: 848409 - RNA, 21 nt, Human
acaggcugcagaguaaaccaa

SEQ ID NO: 848410 - RNA, 18 nt, Human
accuggcucuccaucacu

SEQ ID NO: 848411 - RNA, 20 nt, Human
agaaaagaaaagcaaaaaag

SEQ ID NO: 848412 - RNA, 22 nt, Human
agaaaagaaaagcaaaaaagaa

SEQ ID NO: 848413 - RNA, 18 nt, Human
agaaaagcaaaaaagaaa

SEQ ID NO: 848414 - RNA, 21 nt, Human
agaguaaaccaaugucugcug

SEQ ID NO: 848415 - RNA, 23 nt, Human
agcaaaaaagaaaaaaaaaagga

SEQ ID NO: 848416 - RNA, 24 nt, Human
aggacucaacaaaaucuaaaaaug

SEQ ID NO: 848417 - RNA, 23 nt, Human
aggauuggguggggggaaggagg

SEQ ID NO: 848418 - RNA, 24 nt, Human
aggcugcagaguaaaccaaugucu

SEQ ID NO: 848419 - RNA, 22 nt, Human
aucuacucaaaccucuucaucg

SEQ ID NO: 848420 - RNA, 20 nt, Human
auuuugaugauuuacuaggu

SEQ ID NO: 848421 - RNA, 21 nt, Human
caaaaaagaaaaaaaaaagga

SEQ ID NO: 848422 - RNA, 21 nt, Human
caaagaugaaccuggcucucc

SEQ ID NO: 848423 - RNA, 30 nt, Human
caaaguuuucucccuaaaguggcucaaaag

SEQ ID NO: 848424 - RNA, 23 nt, Human
cacacugcuucauagcaaggccu

SEQ ID NO: 848425 - RNA, 24 nt, Human
cacugagccagacauucauucaac

SEQ ID NO: 848426 - RNA, 24 nt, Human
cagcacgguauucuaccacaacug

SEQ ID NO: 848427 - RNA, 21 nt, Human
caucaaacauucaucuggugc

SEQ ID NO: 848428 - RNA, 23 nt, Human
cauucaacauuguccauucacac

SEQ ID NO: 848429 - RNA, 24 nt, Human
cauucauguaaaguuuucauuaca

SEQ ID NO: 848430 - RNA, 25 nt, Human
ccuacaaugagccaccuuauaaaga

SEQ ID NO: 848431 - RNA, 23 nt, Human
cuccaucacugagccagacauuc

SEQ ID NO: 848432 - RNA, 22 nt, Human
cuuauagcaaacuguuguucau

SEQ ID NO: 848433 - RNA, 18 nt, Human
cuugauuuguacaucuac

SEQ ID NO: 848434 - RNA, 20 nt, Human
gagccagacauucauucaac

SEQ ID NO: 848435 - RNA, 21 nt, Human
gaucugugaccuguagcccuu

SEQ ID NO: 848436 - RNA, 22 nt, Human
gcaaaugcacagggaaaccuuc

SEQ ID NO: 848437 - RNA, 20 nt, Human
ggaaaccuuccugaaaaguu

SEQ ID NO: 848438 - RNA, 21 nt, Human
ggaaagggggaaacagaaaac

SEQ ID NO: 848439 - RNA, 18 nt, Human
ggaaggaggugggaaagg

SEQ ID NO: 848440 - RNA, 18 nt, Human
ggaaggaggugggaaagg

SEQ ID NO: 848441 - RNA, 18 nt, Human
ggaaggaggugggaaagg

SEQ ID NO: 848442 - RNA, 21 nt, Human
ggauuggguggggggaaggag

SEQ ID NO: 848443 - RNA, 21 nt, Human
ggccugggcucauuuuccuuu

SEQ ID NO: 848444 - RNA, 20 nt, Human
gggaaggcacaggauuuccu

SEQ ID NO: 848445 - RNA, 21 nt, Human
ggggaaggaggugggaaaggg

SEQ ID NO: 848446 - RNA, 20 nt, Human
ggguggggggaaggaggugg

SEQ ID NO: 848447 - RNA, 21 nt, Human
ggguggggggaaggagguggg

SEQ ID NO: 848448 - RNA, 21 nt, Human
ggugggaaagggggaaacaga

SEQ ID NO: 848449 - RNA, 20 nt, Human
guggcuaaucugguauguuu

SEQ ID NO: 848450 - RNA, 28 nt, Human
uaaaaaaaaagaaaagaaaagcaaaaaa

SEQ ID NO: 848451 - RNA, 22 nt, Human
uaaaaauacaaaguuuucuccc

SEQ ID NO: 848452 - RNA, 23 nt, Human
uacaaaguuuucucccuaaagug

SEQ ID NO: 848453 - RNA, 23 nt, Human
uacaggacucaacaaaaggacau

SEQ ID NO: 848454 - RNA, 24 nt, Human
uacucuaguucaacaaagaguuau

SEQ ID NO: 848455 - RNA, 23 nt, Human
ucaauguucuuucucaggcacug

SEQ ID NO: 848456 - RNA, 22 nt, Human
uccauucuacaguguuucagaa

SEQ ID NO: 848457 - RNA, 20 nt, Human
uccccaagacagccuagccu

SEQ ID NO: 848458 - RNA, 22 nt, Human
ucugugaccuguagcccuuuuu

SEQ ID NO: 848459 - RNA, 24 nt, Human
ugaaaacaaguaacauuuaaacac

SEQ ID NO: 848460 - RNA, 18 nt, Human
ugaaaaugaaaaggaugg

SEQ ID NO: 848461 - RNA, 21 nt, Human
ugacaaggaaugcugcaaaaa

SEQ ID NO: 848462 - RNA, 19 nt, Human
ugagaagcaacuaaaaaaa

SEQ ID NO: 848463 - RNA, 23 nt, Human
ugcuaaugguggcuaaucuggua

SEQ ID NO: 848464 - RNA, 26 nt, Human
ugcuaaugguggcuaaucugguauga

SEQ ID NO: 848465 - RNA, 19 nt, Human
ugcuucauagcaaggccug

SEQ ID NO: 848466 - RNA, 21 nt, Human
ugggcucauuuuccuuugacu

SEQ ID NO: 848467 - RNA, 18 nt, Human
uggggggaaggagguggg

SEQ ID NO: 848468 - RNA, 21 nt, Human
uggguggggggaaggaggugg

SEQ ID NO: 848469 - RNA, 19 nt, Human
ugguggcuaaucugguaug

SEQ ID NO: 848470 - RNA, 21 nt, Human
uguucaaaccauuacuugauu

SEQ ID NO: 848471 - RNA, 24 nt, Human
uguuucuuauagcaaacuguuguu

SEQ ID NO: 848472 - RNA, 21 nt, Human
uuacaagcuaguuuucugcug

SEQ ID NO: 848473 - RNA, 28 nt, Human
uugaagaugacgguacugcacuuucccc

SEQ ID NO: 848474 - RNA, 24 nt, Human
uuucauagaaaacaaaguuugaaa

SEQ ID NO: 848475 - RNA, 25 nt, Human
uuucucaggcacugacgaucuguga

SEQ ID NO: 848476 - RNA, 21 nt, Human
uuuguacaucuacucaaaccu

SEQ ID NO: 848477 - RNA, 25 nt, Human
uuuuuucuuuuuuuuuuuaaaacau

SEQ ID NO: 848478 - RNA, 25 nt, Human
uuuuuuuuuuuuuuuuuuucuuuuu

SEQ ID NO: 848479 - RNA, 24 nt, Human
aaaaugcugcacuuauuucucuua

SEQ ID NO: 848480 - RNA, 23 nt, Human
aaaugcugcacuuauuucucuua

SEQ ID NO: 848481 - RNA, 22 nt, Human
aacaacugauuuuccaccccuc

SEQ ID NO: 848482 - RNA, 20 nt, Human
acaacugauuuuccaccccu

SEQ ID NO: 848483 - RNA, 21 nt, Human
acagaaagagauaaaaucaau

SEQ ID NO: 848484 - RNA, 18 nt, Human
agaaagagauaaaaucaa

SEQ ID NO: 848485 - RNA, 19 nt, Human
agccgcgggacacagcagc

SEQ ID NO: 848486 - RNA, 21 nt, Human
aggguucucaaugucaacacc

SEQ ID NO: 848487 - RNA, 19 nt, Human
augcugcacuuauuucucu

SEQ ID NO: 848488 - RNA, 24 nt, Human
caacugauuuuccaccccuccgcc

SEQ ID NO: 848489 - RNA, 23 nt, Human
caagccgcgggacacagcagcca

SEQ ID NO: 848490 - RNA, 22 nt, Human
cagaaaggagacuaccccaggc

SEQ ID NO: 848491 - RNA, 19 nt, Human
ccucugagcagggaauggg

SEQ ID NO: 848492 - RNA, 24 nt, Human
cucaaugucaacaccuaacauuuu

SEQ ID NO: 848493 - RNA, 20 nt, Human
cuccgccaaauuuggugucu

SEQ ID NO: 848494 - RNA, 23 nt, Human
cuucaugaguccaagcuggaaca

SEQ ID NO: 848495 - RNA, 25 nt, Human
gaaaauaguggaagaugccgguacc

SEQ ID NO: 848496 - RNA, 18 nt, Human
gaagaugcagauuuuuaa

SEQ ID NO: 848497 - RNA, 20 nt, Human
ggagcgcaagccgcgggaca

SEQ ID NO: 848498 - RNA, 23 nt, Human
uaggguuauaaugguaacaacug

SEQ ID NO: 848499 - RNA, 23 nt, Human
uauagauacagaaagagauaaaa

SEQ ID NO: 848500 - RNA, 20 nt, Human
ucacacuguuccucugagca

SEQ ID NO: 848501 - RNA, 18 nt, Human
uccaagcuggaacaugac

SEQ ID NO: 848502 - RNA, 25 nt, Human
uccaagcuggaacaugaccgggguc

SEQ ID NO: 848503 - RNA, 21 nt, Human
ugggguuucaggguucucaau

SEQ ID NO: 848504 - RNA, 18 nt, Human
ugucuuuuuuuuuuuuag

SEQ ID NO: 848505 - RNA, 25 nt, Human
uuauaaugguaacaacugauuuucc

SEQ ID NO: 848506 - RNA, 24 nt, Human
uucucaaugucaacaccuaacauu

SEQ ID NO: 848507 - RNA, 21 nt, Human
aaaaaaaaaaaaauggcccag

SEQ ID NO: 848508 - RNA, 21 nt, Human
aaaaaccaagaguucucaagu

SEQ ID NO: 848509 - RNA, 25 nt, Human
aaguaacccuuuugccuuuugcagg

SEQ ID NO: 848510 - RNA, 19 nt, Human
agaccauccuccacgaagg

SEQ ID NO: 848511 - RNA, 20 nt, Human
caaccuuucaaaaaaccaag

SEQ ID NO: 848512 - RNA, 20 nt, Human
cacucucugucccuccuacu

SEQ ID NO: 848513 - RNA, 18 nt, Human
cagacaacuucaguagua

SEQ ID NO: 848514 - RNA, 18 nt, Human
cauccuccacgaagguca

SEQ ID NO: 848515 - RNA, 18 nt, Human
cauugccuugguucugac

SEQ ID NO: 848516 - RNA, 23 nt, Human
ccaccaccucccuccaccagaaa

SEQ ID NO: 848517 - RNA, 20 nt, Human
ccagaaaaaaaaaaaaaaaa

SEQ ID NO: 848518 - RNA, 20 nt, Human
ccuccacgaaggucaaagau

SEQ ID NO: 848519 - RNA, 19 nt, Human
cuaaguuccucucucucuc

SEQ ID NO: 848520 - RNA, 19 nt, Human
cuagauguucucuaacaca

SEQ ID NO: 848521 - RNA, 18 nt, Human
cuauaccauuuauuugau

SEQ ID NO: 848522 - RNA, 20 nt, Human
cuccaccaccucccuccacc

SEQ ID NO: 848523 - RNA, 23 nt, Human
cuccaccagaaaaaaaaaaaaaa

SEQ ID NO: 848524 - RNA, 22 nt, Human
cucccuccaccagaaaaaaaaa

SEQ ID NO: 848525 - RNA, 21 nt, Human
gagaucugggagagagaaguc

SEQ ID NO: 848526 - RNA, 23 nt, Human
gcagucaaccuuucaaaaaacca

SEQ ID NO: 848527 - RNA, 23 nt, Human
ggaugagcaacccaugaaaauaa

SEQ ID NO: 848528 - RNA, 24 nt, Human
ggcccaggaccaguagcuaggaga

SEQ ID NO: 848529 - RNA, 22 nt, Human
gugaguuucuuuggucagauuu

SEQ ID NO: 848530 - RNA, 21 nt, Human
guuuucuucuuucuugguucu

SEQ ID NO: 848531 - RNA, 20 nt, Human
uaacuuacuuucccauuguc

SEQ ID NO: 848532 - RNA, 20 nt, Human
uaaguaacccuuuugccuuu

SEQ ID NO: 848533 - RNA, 24 nt, Human
uaaguaacccuuuugccuuuugca

SEQ ID NO: 848534 - RNA, 22 nt, Human
ucaaccuuucaaaaaaccaaga

SEQ ID NO: 848535 - RNA, 25 nt, Human
ucccuccaccagaaaaaaaaaaaaa

SEQ ID NO: 848536 - RNA, 19 nt, Human
uccucagcauccuucucug

SEQ ID NO: 848537 - RNA, 21 nt, Human
uccuccacgaaggucaaagau

SEQ ID NO: 848538 - RNA, 20 nt, Human
ucucuguaaacugaagaguu

SEQ ID NO: 848539 - RNA, 20 nt, Human
uggaagagguuuugacaaug

SEQ ID NO: 848540 - RNA, 22 nt, Human
uggcccaggaccaguagcuagg

SEQ ID NO: 848541 - RNA, 24 nt, Human
ugggauuauuuaaaaaaaaaaaaa

SEQ ID NO: 848542 - RNA, 23 nt, Human
uguuccuccaccaccucccucca

SEQ ID NO: 848543 - RNA, 19 nt, Human
uugcucagaagagaaacag

SEQ ID NO: 848544 - RNA, 19 nt, Human
uuguguuuucuucuuucuu

SEQ ID NO: 848545 - RNA, 22 nt, Human
uuuaaaaaaaaaaaaauggccc

SEQ ID NO: 848546 - RNA, 21 nt, Human
uuugcagguaacuucucaucu

SEQ ID NO: 848547 - RNA, 18 nt, Human
uuuuuuuuuuuuuuuuug

SEQ ID NO: 848548 - RNA, 21 nt, Human
uuuuuuuuuuuuuuuuuuguu

SEQ ID NO: 848549 - RNA, 19 nt, Human
aagaaacuuuugucccaua

SEQ ID NO: 848550 - RNA, 18 nt, Human
agacaaaaaucgaaaauu

SEQ ID NO: 848551 - RNA, 20 nt, Human
caccaugcugccuucugagc

SEQ ID NO: 848552 - RNA, 20 nt, Human
cccaucucgcuaaggcuucu

SEQ ID NO: 848553 - RNA, 21 nt, Human
ccuaaaaaaaaaugaacaaac

SEQ ID NO: 848554 - RNA, 18 nt, Human
cucugguugcuagggccc

SEQ ID NO: 848555 - RNA, 25 nt, Human
cugaagacaaaaaucgaaaauuugu

SEQ ID NO: 848556 - RNA, 23 nt, Human
cugaauaaguuaaaggaaaaaaa

SEQ ID NO: 848557 - RNA, 20 nt, Human
gaacaaacugaaaaaaacau

SEQ ID NO: 848558 - RNA, 18 nt, Human
gccaguuuucucuuccca

SEQ ID NO: 848559 - RNA, 27 nt, Human
ggaacucuucccaucaccaugcugccu

SEQ ID NO: 848560 - RNA, 18 nt, Human
ggcuucagauggccucug

SEQ ID NO: 848561 - RNA, 22 nt, Human
gucuacaaagguuuuguuuuag

SEQ ID NO: 848562 - RNA, 24 nt, Human
uaaccuaaaaaaaaaugaacaaac

SEQ ID NO: 848563 - RNA, 19 nt, Human
uagauggggcuacacagua

SEQ ID NO: 848564 - RNA, 23 nt, Human
uauagggggaaucugggcauaaa

SEQ ID NO: 848565 - RNA, 22 nt, Human
ucgcuaaggcuucuuugauugu

SEQ ID NO: 848566 - RNA, 23 nt, Human
ucuaaccuaaaaaaaaaugaaca

SEQ ID NO: 848567 - RNA, 20 nt, Human
ugcugccuucugagcuaaag

SEQ ID NO: 848568 - RNA, 20 nt, Human
uggggagaaacacugaauaa

SEQ ID NO: 848569 - RNA, 21 nt, Human
uuaagaaacuuuugucccaua

SEQ ID NO: 848570 - RNA, 27 nt, Human
uucuuugauuguuguugcuuucgccau

SEQ ID NO: 848571 - RNA, 22 nt, Human
uuuuuuuuuuccuuuuuucacc

SEQ ID NO: 848572 - RNA, 23 nt, Human
uuuuuuuuuuuuuuuuuuccuuu

SEQ ID NO: 848573 - RNA, 25 nt, Human
uuuuuuuuuuuuuuuuuuccuuuuu

SEQ ID NO: 848574 - RNA, 18 nt, Human
aagaagccuucauuacac

SEQ ID NO: 848575 - RNA, 27 nt, Human
cacccucuuaagaucuuuacaugccaa

SEQ ID NO: 848576 - RNA, 24 nt, Human
cagcuuaauuaauucgaaggugac

SEQ ID NO: 848577 - RNA, 18 nt, Human
gaaauuaacaagaacaag

SEQ ID NO: 848578 - RNA, 20 nt, Human
gguauaaaauaucacauaua

SEQ ID NO: 848579 - RNA, 23 nt, Human
uaaaaaagaagccuucauuacac

SEQ ID NO: 848580 - RNA, 21 nt, Human
uaacaagaacaagcaauuucu

SEQ ID NO: 848581 - RNA, 21 nt, Human
uauaggaauccuaagauaaga

SEQ ID NO: 848582 - RNA, 18 nt, Human
uuaacaagaacaagcaau

SEQ ID NO: 848583 - RNA, 22 nt, Human
uucgagugguucguucugcacc

SEQ ID NO: 848584 - RNA, 18 nt, Human
uuuuuuuuuuuuuuuucg

SEQ ID NO: 848585 - RNA, 22 nt, Human
uuuuuuuuuuuuuuuuucgauu

SEQ ID NO: 848586 - RNA, 23 nt, Human
aaaaaacacaagaaaacuuccug

SEQ ID NO: 848587 - RNA, 19 nt, Human
aaaacacaagaaaacuucc

SEQ ID NO: 848588 - RNA, 19 nt, Human
aacacagccuauuaagcuc

SEQ ID NO: 848589 - RNA, 19 nt, Human
aacacagccuauuaagcuc

SEQ ID NO: 848590 - RNA, 24 nt, Human
aacauguagacaggcugaggcagg

SEQ ID NO: 848591 - RNA, 19 nt, Human
aaggcuuuaccacauuguu

SEQ ID NO: 848592 - RNA, 30 nt, Human
aagguagaauacacacacacacacacacag

SEQ ID NO: 848593 - RNA, 24 nt, Human
aaucacuugagcccaggaauuuga

SEQ ID NO: 848594 - RNA, 24 nt, Human
aauuugaggcugcagugagcuaag

SEQ ID NO: 848595 - RNA, 26 nt, Human
acaaauuuuuaaaugaauagacaaaa

SEQ ID NO: 848596 - RNA, 26 nt, Human
acaaauuuuuaaaugaauagacaaaa

SEQ ID NO: 848597 - RNA, 23 nt, Human
acaauaaauaaaaaacacaagaa

SEQ ID NO: 848598 - RNA, 23 nt, Human
acacacacacacacacacacaca

SEQ ID NO: 848599 - RNA, 23 nt, Human
acacacacacacacacacacaca

SEQ ID NO: 848600 - RNA, 23 nt, Human
acacacacacacacacacacaca

SEQ ID NO: 848601 - RNA, 23 nt, Human
acacacacacacacacacacaca

SEQ ID NO: 848602 - RNA, 23 nt, Human
acacacacacacacacacacaca

SEQ ID NO: 848603 - RNA, 23 nt, Human
acacacacacacacacacacaca

SEQ ID NO: 848604 - RNA, 28 nt, Human
acacacacacacacacacacaugaacuc

SEQ ID NO: 848605 - RNA, 25 nt, Human
acacacacacacacacacaugaacu

SEQ ID NO: 848606 - RNA, 18 nt, Human
acagcgagaucccaucuc

SEQ ID NO: 848607 - RNA, 18 nt, Human
acgcagauuagacaagca

SEQ ID NO: 848608 - RNA, 20 nt, Human
acuacacuucagccuagcug

SEQ ID NO: 848609 - RNA, 20 nt, Human
acuauuauuaccacuacacu

SEQ ID NO: 848610 - RNA, 18 nt, Human
acuccuuuaccaugaaac

SEQ ID NO: 848611 - RNA, 18 nt, Human
acuugauggugagacuga

SEQ ID NO: 848612 - RNA, 26 nt, Human
agaagaaaaucuuuacaacaaaaaag

SEQ ID NO: 848613 - RNA, 26 nt, Human
agaagaaaaucuuuacaacaaaaaag

SEQ ID NO: 848614 - RNA, 19 nt, Human
agaaugccaaaaaccacaa

SEQ ID NO: 848615 - RNA, 20 nt, Human
agcaaagaaaacagaagaaa

SEQ ID NO: 848616 - RNA, 20 nt, Human
agcaaagaaaacagaagaaa

SEQ ID NO: 848617 - RNA, 21 nt, Human
agcaaagaaaacagaagaaaa

SEQ ID NO: 848618 - RNA, 21 nt, Human
agcaaagaaaacagaagaaaa

SEQ ID NO: 848619 - RNA, 24 nt, Human
agcaaagaaaacagaagaaaaucu

SEQ ID NO: 848620 - RNA, 24 nt, Human
agcaaagaaaacagaagaaaaucu

SEQ ID NO: 848621 - RNA, 22 nt, Human
agcaacagaagcugccgcggga

SEQ ID NO: 848622 - RNA, 23 nt, Human
agcugagcaugguggcauguguc

SEQ ID NO: 848623 - RNA, 28 nt, Human
agcuugaggccaggaauucaaccuucgg

SEQ ID NO: 848624 - RNA, 23 nt, Human
aggaauucaauaccagccuagac

SEQ ID NO: 848625 - RNA, 19 nt, Human
aggauagcuugaggccagg

SEQ ID NO: 848626 - RNA, 24 nt, Human
aggauagcuugaggccaggaauuc

SEQ ID NO: 848627 - RNA, 18 nt, Human
aggcaggaggauagcuug

SEQ ID NO: 848628 - RNA, 26 nt, Human
aggcaggaggauagcuugaggccagg

SEQ ID NO: 848629 - RNA, 24 nt, Human
aggcuaaggugggagaaucacuug

SEQ ID NO: 848630 - RNA, 24 nt, Human
aggcugaggcaggaggauagcuug

SEQ ID NO: 848631 - RNA, 18 nt, Human
agggcacaccaauuugac

SEQ ID NO: 848632 - RNA, 18 nt, Human
aggugggagaaucacuug

SEQ ID NO: 848633 - RNA, 23 nt, Human
aggugggagaaucacuugagccc

SEQ ID NO: 848634 - RNA, 24 nt, Human
aggugugguagcucaugucaguaa

SEQ ID NO: 848635 - RNA, 22 nt, Human
auacacacacacacacacacag

SEQ ID NO: 848636 - RNA, 19 nt, Human
auacagaugaugcuauacu

SEQ ID NO: 848637 - RNA, 20 nt, Human
augaaccacugauaaaaaua

SEQ ID NO: 848638 - RNA, 20 nt, Human
augaaccacugauaaaaaua

SEQ ID NO: 848639 - RNA, 20 nt, Human
augacagaauaaaggaaaga

SEQ ID NO: 848640 - RNA, 18 nt, Human
auguagacaggcugaggc

SEQ ID NO: 848641 - RNA, 20 nt, Human
auguagacaugcuauauaua

SEQ ID NO: 848642 - RNA, 18 nt, Human
auuucagacuuuuaacau

SEQ ID NO: 848643 - RNA, 21 nt, Human
caaaaaacugaaaaucuaaag

SEQ ID NO: 848644 - RNA, 21 nt, Human
caaaaaacugaaaaucuaaag

SEQ ID NO: 848645 - RNA, 20 nt, Human
caaccuguagauaaaauacu

SEQ ID NO: 848646 - RNA, 19 nt, Human
caagaaaacuuccugagcc

SEQ ID NO: 848647 - RNA, 23 nt, Human
caaguaacagccaaaacucauga

SEQ ID NO: 848648 - RNA, 18 nt, Human
cacacacacacacacaca

SEQ ID NO: 848649 - RNA, 20 nt, Human
cacacacacacacacacaca

SEQ ID NO: 848650 - RNA, 20 nt, Human
cacacacacacacacacaca

SEQ ID NO: 848651 - RNA, 20 nt, Human
cacacacacacacacacaca

SEQ ID NO: 848652 - RNA, 20 nt, Human
cacacacacacacacacaca

SEQ ID NO: 848653 - RNA, 20 nt, Human
cacacacacacacacacaca

SEQ ID NO: 848654 - RNA, 20 nt, Human
cacacacacacacacacaca

SEQ ID NO: 848655 - RNA, 20 nt, Human
cacacacacacacacacaca

SEQ ID NO: 848656 - RNA, 20 nt, Human
cacacacacacacacacaca

SEQ ID NO: 848657 - RNA, 20 nt, Human
cacacacacacacacacaca

SEQ ID NO: 848658 - RNA, 20 nt, Human
cacacacacacacacacaca

SEQ ID NO: 848659 - RNA, 20 nt, Human
cacacacacacacacacaca

SEQ ID NO: 848660 - RNA, 20 nt, Human
cacacacacacacacacaca

SEQ ID NO: 848661 - RNA, 20 nt, Human
cacacacacacacacacaca

SEQ ID NO: 848662 - RNA, 20 nt, Human
cacacacacacacacacaca

SEQ ID NO: 848663 - RNA, 20 nt, Human
cacacacacacacacacaca

SEQ ID NO: 848664 - RNA, 20 nt, Human
cacacacacacacacacaca

SEQ ID NO: 848665 - RNA, 20 nt, Human
cacacacacacacacacaca

SEQ ID NO: 848666 - RNA, 20 nt, Human
cacacacacacacacacaca

SEQ ID NO: 848667 - RNA, 22 nt, Human
cacacacacacacacacacaca

SEQ ID NO: 848668 - RNA, 22 nt, Human
cacacacacacacacacacaca

SEQ ID NO: 848669 - RNA, 22 nt, Human
cacacacacacacacacacaca

SEQ ID NO: 848670 - RNA, 22 nt, Human
cacacacacacacacacacaca

SEQ ID NO: 848671 - RNA, 22 nt, Human
cacacacacacacacacacaca

SEQ ID NO: 848672 - RNA, 22 nt, Human
cacacacacacacacacacaca

SEQ ID NO: 848673 - RNA, 22 nt, Human
cacacacacacacacacacaca

SEQ ID NO: 848674 - RNA, 22 nt, Human
cacacacacacacacacacaca

SEQ ID NO: 848675 - RNA, 22 nt, Human
cacacacacacacacacacaca

SEQ ID NO: 848676 - RNA, 22 nt, Human
cacacacacacacacacacaca

SEQ ID NO: 848677 - RNA, 22 nt, Human
cacacacacacacacacacaca

SEQ ID NO: 848678 - RNA, 26 nt, Human
cacacacacacacacacacacacaca

SEQ ID NO: 848679 - RNA, 26 nt, Human
cacacacacacacacacacacacaca

SEQ ID NO: 848680 - RNA, 26 nt, Human
cacacacacacacacacacacacaca

SEQ ID NO: 848681 - RNA, 26 nt, Human
cacacacacacacacacacacacaca

SEQ ID NO: 848682 - RNA, 26 nt, Human
cacacacacacacacacacacacaca

SEQ ID NO: 848683 - RNA, 26 nt, Human
cacacacacacacacacacacacaca

SEQ ID NO: 848684 - RNA, 26 nt, Human
cacacacacacacacacacacacaca

SEQ ID NO: 848685 - RNA, 26 nt, Human
cacacacacacacacacacacacaca

SEQ ID NO: 848686 - RNA, 26 nt, Human
cacacacacacacacacacacacaca

SEQ ID NO: 848687 - RNA, 26 nt, Human
cacacacacacacacacacacacaug

SEQ ID NO: 848688 - RNA, 26 nt, Human
cacacacacacacacacacacacaug

SEQ ID NO: 848689 - RNA, 24 nt, Human
cacuacacuucagccuagcugaca

SEQ ID NO: 848690 - RNA, 24 nt, Human
cagcuacauaggaggcuaaggugg

SEQ ID NO: 848691 - RNA, 21 nt, Human
caggucccagagcaacagaag

SEQ ID NO: 848692 - RNA, 23 nt, Human
cauguagacaugcuauauauaca

SEQ ID NO: 848693 - RNA, 23 nt, Human
ccacauucgcgcugcccaacaca

SEQ ID NO: 848694 - RNA, 19 nt, Human
ccacuacacuucagccuag

SEQ ID NO: 848695 - RNA, 20 nt, Human
ccacuacacuucagccuagc

SEQ ID NO: 848696 - RNA, 24 nt, Human
ccacuacacuucagccuagcugac

SEQ ID NO: 848697 - RNA, 18 nt, Human
ccagagcaacagaagcug

SEQ ID NO: 848698 - RNA, 19 nt, Human
ccggugucugggguccucc

SEQ ID NO: 848699 - RNA, 21 nt, Human
ccggugucugggguccucccu

SEQ ID NO: 848700 - RNA, 23 nt, Human
ccuaaggaccuuccgggaccuuu

SEQ ID NO: 848701 - RNA, 23 nt, Human
cgccacauucgcgcugcccaaca

SEQ ID NO: 848702 - RNA, 27 nt, Human
cguaauagacuaucaguagaaugccaa

SEQ ID NO: 848703 - RNA, 25 nt, Human
cuccaugauucccugcaaaaaacug

SEQ ID NO: 848704 - RNA, 26 nt, Human
cugaggcaggaggauagcuugaggcc

SEQ ID NO: 848705 - RNA, 19 nt, Human
cugaugagaaacaaaacac

SEQ ID NO: 848706 - RNA, 19 nt, Human
cugaugagaaacaaaacac

SEQ ID NO: 848707 - RNA, 21 nt, Human
cuguagcuccagcuacauagg

SEQ ID NO: 848708 - RNA, 22 nt, Human
cugugaguccuuucauggacuc

SEQ ID NO: 848709 - RNA, 24 nt, Human
cuuauacacauauaaguauacaug

SEQ ID NO: 848710 - RNA, 19 nt, Human
cuuccgggaccugcagguc

SEQ ID NO: 848711 - RNA, 23 nt, Human
cuuccgggaccugcaggucccag

SEQ ID NO: 848712 - RNA, 18 nt, Human
gaaaaucuaaaguauaga

SEQ ID NO: 848713 - RNA, 18 nt, Human
gaaaaucuaaaguauaga

SEQ ID NO: 848714 - RNA, 23 nt, Human
gaaucacuugagcccaggaauuu

SEQ ID NO: 848715 - RNA, 21 nt, Human
gacaccuucuuuaacaaugaa

SEQ ID NO: 848716 - RNA, 21 nt, Human
gacaccuucuuuaacaaugaa

SEQ ID NO: 848717 - RNA, 27 nt, Human
gagcaucccuaauccaaauaucaaaaa

SEQ ID NO: 848718 - RNA, 26 nt, Human
gagcauuucuguugagcauaagacuc

SEQ ID NO: 848719 - RNA, 23 nt, Human
gagcucgccacauucgcgcugcc

SEQ ID NO: 848720 - RNA, 18 nt, Human
gaggcugcagugagcuaa

SEQ ID NO: 848721 - RNA, 19 nt, Human
gaugagaaacaaaacacag

SEQ ID NO: 848722 - RNA, 19 nt, Human
gaugagaaacaaaacacag

SEQ ID NO: 848723 - RNA, 22 nt, Human
gcagaaaaaaacaugucauaag

SEQ ID NO: 848724 - RNA, 24 nt, Human
gcccaggaauuugaggcugcagug

SEQ ID NO: 848725 - RNA, 20 nt, Human
gccuagacaauacagcgaga

SEQ ID NO: 848726 - RNA, 26 nt, Human
gcuccaugauucccugcaaaaaacug

SEQ ID NO: 848727 - RNA, 25 nt, Human
ggaaagaaaaugaaaauaacaaugu

SEQ ID NO: 848728 - RNA, 21 nt, Human
ggaacaucuaaaggcuuugcc

SEQ ID NO: 848729 - RNA, 21 nt, Human
ggccaggugugguagcucaug

SEQ ID NO: 848730 - RNA, 24 nt, Human
gggccaggugugguagcucauguc

SEQ ID NO: 848731 - RNA, 30 nt, Human
gguagaauacacacacacacacacacacag

SEQ ID NO: 848732 - RNA, 30 nt, Human; identical to SEQ ID NO: 848731

SEQ ID NO: 848733 - RNA, 22 nt, Human
gguguuuuguuguuguuguuuu

SEQ ID NO: 848734 - RNA, 31 nt, Human
guagaauacacacacacacacacacacacag

SEQ ID NO: 848735 - RNA, 20 nt, Human
uaacagccaaaacucaugac

SEQ ID NO: 848736 - RNA, 20 nt, Human
uaaggugggagaaucacuug

SEQ ID NO: 848737 - RNA, 21 nt, Human
uacaaaacuguacuauaccac

SEQ ID NO: 848738 - RNA, 20 nt, Human
uacacacacacacacacaca

SEQ ID NO: 848739 - RNA, 25 nt, Human
uacacacacacacacacacacacac

SEQ ID NO: 848740 - RNA, 25 nt, Human
uacacacacacacacacacacacac

SEQ ID NO: 848741 - RNA, 25 nt, Human
uacacacacacacacacacacacag

SEQ ID NO: 848742 - RNA, 25 nt, Human
uacagcgagaucccaucucuauaaa

SEQ ID NO: 848743 - RNA, 21 nt, Human
uacauaggaggcuaagguggg

SEQ ID NO: 848744 - RNA, 21 nt, Human
uacauguguuggguuucucuc

SEQ ID NO: 848745 - RNA, 21 nt, Human
uacuauaugguauacuagggc

SEQ ID NO: 848746 - RNA, 24 nt, Human
uagaaugccaaaaaccacaaauca

SEQ ID NO: 848747 - RNA, 21 nt, Human
uagcaaagaaaacagaagaaa

SEQ ID NO: 848748 - RNA, 22 nt, Human
uagcaaagaaaacagaagaaaa

SEQ ID NO: 848749 - RNA, 22 nt, Human
uagcaaagaaaacagaagaaaa

SEQ ID NO: 848750 - RNA, 24 nt, Human
uaggaggcuaaggugggagaauca

SEQ ID NO: 848751 - RNA, 18 nt, Human
uagggcacaccaauuuga

SEQ ID NO: 848752 - RNA, 20 nt, Human
uauacagaugaugcuauacu

SEQ ID NO: 848753 - RNA, 22 nt, Human
uauauaauuagcugagcauggu

SEQ ID NO: 848754 - RNA, 23 nt, Human
uauguuaacugaugagaaacaaa

SEQ ID NO: 848755 - RNA, 23 nt, Human
uauguuaacugaugagaaacaaa

SEQ ID NO: 848756 - RNA, 24 nt, Human
uauuagaaauacauuucaacuuag

SEQ ID NO: 848757 - RNA, 24 nt, Human
uauuagaaauacauuucaacuuag

SEQ ID NO: 848758 - RNA, 24 nt, Human
uauuagcaaagaaaacagaagaaa

SEQ ID NO: 848759 - RNA, 27 nt, Human
uauuagcaaagaaaacagaagaaaauc

SEQ ID NO: 848760 - RNA, 27 nt, Human
uauuagcaaagaaaacagaagaaaauc

SEQ ID NO: 848761 - RNA, 30 nt, Human
uccaaauaucaaaaauccucuaaugagcaa

SEQ ID NO: 848762 - RNA, 24 nt, Human
uccacaauauacuugauggugaga

SEQ ID NO: 848763 - RNA, 19 nt, Human
ucccugcaaaaaacugaaa

SEQ ID NO: 848764 - RNA, 19 nt, Human
ucccugcaaaaaacugaaa

SEQ ID NO: 848765 - RNA, 20 nt, Human
ucccugcaaaaaacugaaaa

SEQ ID NO: 848766 - RNA, 20 nt, Human
ucccugcaaaaaacugaaaa

SEQ ID NO: 848767 - RNA, 19 nt, Human
ucugggguccucccuaagg

SEQ ID NO: 848768 - RNA, 21 nt, Human
ucuguagcuccagcuacauag

SEQ ID NO: 848769 - RNA, 20 nt, Human
ucuguugagcauaagacugg

SEQ ID NO: 848770 - RNA, 19 nt, Human
ugaaaaauccacaauauac

SEQ ID NO: 848771 - RNA, 19 nt, Human
ugaaauacuugggaacgga

SEQ ID NO: 848772 - RNA, 23 nt, Human
ugaagacaaauuucacccagaua

SEQ ID NO: 848773 - RNA, 21 nt, Human
ugacagaauaaaggaaagaaa

SEQ ID NO: 848774 - RNA, 23 nt, Human
ugacuauaaaugcaaaaggcccc

SEQ ID NO: 848775 - RNA, 21 nt, Human
ugagaaacaaaacacagccua

SEQ ID NO: 848776 - RNA, 21 nt, Human
ugagaaacaaaacacagccua

SEQ ID NO: 848777 - RNA, 23 nt, Human
ugagcaucccuaauccaaauauc

SEQ ID NO: 848778 - RNA, 22 nt, Human
ugagcccaggaauuugaggcug

SEQ ID NO: 848779 - RNA, 24 nt, Human
ugagcuaagacuauuauuaccacu

SEQ ID NO: 848780 - RNA, 18 nt, Human
ugaggcaggaggauagcu

SEQ ID NO: 848781 - RNA, 20 nt, Human
ugaggcaggaggauagcuuc

SEQ ID NO: 848782 - RNA, 26 nt, Human
ugaggcaggaggauagcuugaggcca

SEQ ID NO: 848783 - RNA, 19 nt, Human
ugaguccuuucauggacuc

SEQ ID NO: 848784 - RNA, 20 nt, Human
ugcaaaaaacugaaaaucua

SEQ ID NO: 848785 - RNA, 20 nt, Human
ugcaaaaaacugaaaaucua

SEQ ID NO: 848786 - RNA, 25 nt, Human
ugcauacauucuaaucuuccuuaca

SEQ ID NO: 848787 - RNA, 18 nt, Human
uggaacaucuaaaggcuu

SEQ ID NO: 848788 - RNA, 22 nt, Human
uggaauauuugcagaaaacuua

SEQ ID NO: 848789 - RNA, 23 nt, Human
uggaaucugggguuuacagaugu

SEQ ID NO: 848790 - RNA, 25 nt, Human
uggaaucugggguuuacagauguuu

SEQ ID NO: 848791 - RNA, 21 nt, Human
ugggaaaauaaaguguucuaa

SEQ ID NO: 848792 - RNA, 21 nt, Human
ugggaaaauaaaguguucuaa

SEQ ID NO: 848793 - RNA, 19 nt, Human
ugguauuggaaucuggggu

SEQ ID NO: 848794 - RNA, 21 nt, Human
ugucauaagaguucaacacuc

SEQ ID NO: 848795 - RNA, 23 nt, Human
ugucugggguccucccuaaggac

SEQ ID NO: 848796 - RNA, 24 nt, Human
ugucuguagcuccagcuacauagg

SEQ ID NO: 848797 - RNA, 23 nt, Human
uguuggguuucucucuaauuuga

SEQ ID NO: 848798 - RNA, 20 nt, Human
uguuuuguuguuguuguuuu

SEQ ID NO: 848799 - RNA, 21 nt, Human
uuacuagaauauuugaaggcu

SEQ ID NO: 848800 - RNA, 24 nt, Human
uuacuggaugagcaucccuaaucc

SEQ ID NO: 848801 - RNA, 24 nt, Human
uuagcugagcaugguggcaugugu

SEQ ID NO: 848802 - RNA, 19 nt, Human
uuauuguagugcuaauuac

SEQ ID NO: 848803 - RNA, 21 nt, Human
uucuaaucuuccuuacaugug

SEQ ID NO: 848804 - RNA, 22 nt, Human
uucuuuaacaaugaaccacuga

SEQ ID NO: 848805 - RNA, 22 nt, Human
uucuuuaacaaugaaccacuga

SEQ ID NO: 848806 - RNA, 21 nt, Human
uuuagaagggaacuaggaaaa

SEQ ID NO: 848807 - RNA, 21 nt, Human
uuuagaagggaacuaggaaaa

SEQ ID NO: 848808 - RNA, 18 nt, Human
uuuuuuuuuuuuuuuuug

SEQ ID NO: 848809 - RNA, 24 nt, Human
uuuuuuuuuuuuuuuuuggcaaau

SEQ ID NO: 848810 - RNA, 22 nt, Human
uuuuuuuuuuuuuuuuuuuggc

SEQ ID NO: 848811 - RNA, 23 nt, Human
aaaaaggagacuaguaaaauaga

SEQ ID NO: 848812 - RNA, 20 nt, Human
aacauggugaaacccucacu

SEQ ID NO: 848813 - RNA, 21 nt, Human
aacauggugaaacccucacuc

SEQ ID NO: 848814 - RNA, 22 nt, Human
aacauggugaaacccucacucu

SEQ ID NO: 848815 - RNA, 21 nt, Human
aagacauaaaaacagcaaccc

SEQ ID NO: 848816 - RNA, 25 nt, Human
aaucacuugaaucccgaggggcaga

SEQ ID NO: 848817 - RNA, 24 nt, Human
acacgaggucaggcguucgagacc

SEQ ID NO: 848818 - RNA, 21 nt, Human
acauauguggucauaugaaga

SEQ ID NO: 848819 - RNA, 20 nt, Human
accccuaaaguauauggaau

SEQ ID NO: 848820 - RNA, 26 nt, Human
agaggaccugaaggcaguauaaaaca

SEQ ID NO: 848821 - RNA, 21 nt, Human
agauacacacccuuaucaaua

SEQ ID NO: 848822 - RNA, 24 nt, Human
agcacuuugggaggcugaggaggg

SEQ ID NO: 848823 - RNA, 23 nt, Human
agccgggcaugauggcacucgcc

SEQ ID NO: 848824 - RNA, 22 nt, Human
agccuggccaacauggugaaac

SEQ ID NO: 848825 - RNA, 24 nt, Human
agccuggccaacauggugaaaccc

SEQ ID NO: 848826 - RNA, 25 nt, Human
aggagcagaggacauagagcaguga

SEQ ID NO: 848827 - RNA, 18 nt, Human
aggcaguagaaucacuug

SEQ ID NO: 848828 - RNA, 25 nt, Human
aggcaguagaaucacuugaaucccg

SEQ ID NO: 848829 - RNA, 24 nt, Human
aggcugaggcaguagaaucacuug

SEQ ID NO: 848830 - RNA, 21 nt, Human
auaaaacaaauauuccuaaca

SEQ ID NO: 848831 - RNA, 23 nt, Human
auauauauacuuucacauaugug

SEQ ID NO: 848832 - RNA, 19 nt, Human
augccuguaaucccagcac

SEQ ID NO: 848833 - RNA, 24 nt, Human
caacauggugaaacccucacucua

SEQ ID NO: 848834 - RNA, 24 nt, Human
caagagacaauaaaguaccuaaca

SEQ ID NO: 848835 - RNA, 23 nt, Human
caaucuucaaaaaaaggaacaau

SEQ ID NO: 848836 - RNA, 21 nt, Human
cacacccuuaucaauagcuua

SEQ ID NO: 848837 - RNA, 20 nt, Human
cacauauauauacuuucaca

SEQ ID NO: 848838 - RNA, 22 nt, Human
cacucuacuaaaaauacaaaaa

SEQ ID NO: 848839 - RNA, 23 nt, Human
cagaccaccaaauaagucaaaag

SEQ ID NO: 848840 - RNA, 23 nt, Human
cagcacuuugggaggcugaggag

SEQ ID NO: 848841 - RNA, 28 nt, Human
cagcacuuugggaggcugaggagggcgg

SEQ ID NO: 848842 - RNA, 20 nt, Human
cagcgagagacaaaggcccc

SEQ ID NO: 848843 - RNA, 24 nt, Human
cagcuacucgggaggcugaggcag

SEQ ID NO: 848844 - RNA, 21 nt, Human
cauagagcagugaagacgaga

SEQ ID NO: 848845 - RNA, 24 nt, Human
caugccuguaaucccagcacuuug

SEQ ID NO: 848846 - RNA, 25 nt, Human
ccaaauaagucaaaagagucuuaaa

SEQ ID NO: 848847 - RNA, 19 nt, Human
ccaauagguaaaagcaaug

SEQ ID NO: 848848 - RNA, 21 nt, Human
ccuauaaucccagcuacucgg

SEQ ID NO: 848849 - RNA, 22 nt, Human
ccuauaaucccagcuacucggg

SEQ ID NO: 848850 - RNA, 19 nt, Human
ccugaaggcaguauaaaac

SEQ ID NO: 848851 - RNA, 23 nt, Human
ccuggccaacauggugaaacccu

SEQ ID NO: 848852 - RNA, 25 nt, Human
ccuggccaacauggugaaacccuca

SEQ ID NO: 848853 - RNA, 21 nt, Human
cgacugcagcgagagacaaag

SEQ ID NO: 848854 - RNA, 24 nt, Human
cgagaccagccuggccaacauggu

SEQ ID NO: 848855 - RNA, 23 nt, Human
cgccuauaaucccagcuacucgg

SEQ ID NO: 848856 - RNA, 24 nt, Human
cggaucacacgaggucaggcguuc

SEQ ID NO: 848857 - RNA, 21 nt, Human
cucaagagacaauaaaguacc

SEQ ID NO: 848858 - RNA, 24 nt, Human
cucaugccuguaaucccagcacuu

SEQ ID NO: 848859 - RNA, 22 nt, Human
cugucaccaaaucauucaguag

SEQ ID NO: 848860 - RNA, 21 nt, Human
gacaauaaaguaccuaacaau

SEQ ID NO: 848861 - RNA, 24 nt, Human
gaucacacgaggucaggcguucga

SEQ ID NO: 848862 - RNA, 24 nt, Human
gauggcacucgccuauaaucccag

SEQ ID NO: 848863 - RNA, 24 nt, Human
gccaacauggugaaacccucacuc

SEQ ID NO: 848864 - RNA, 23 nt, Human
gccuauaaucccagcuacucggg

SEQ ID NO: 848865 - RNA, 26 nt, Human
gcuuuuguucaaaaguugaaauauug

SEQ ID NO: 848866 - RNA, 23 nt, Human
ggcagagguugcaguaacccaag

SEQ ID NO: 848867 - RNA, 23 nt, Human
gggaggcugaggcaguagaauca

SEQ ID NO: 848868 - RNA, 24 nt, Human
gggcacuguggcucaugccuguaa

SEQ ID NO: 848869 - RNA, 21 nt, Human
ggucauaugaagagucauuuu

SEQ ID NO: 848870 - RNA, 20 nt, Human
guaaaaaaaaaaaggagacu

SEQ ID NO: 848871 - RNA, 22 nt, Human
guggcucaugccuguaauccca

SEQ ID NO: 848872 - RNA, 21 nt, Human
uaaaaacagcaaccccuaaag

SEQ ID NO: 848873 - RNA, 21 nt, Human
uaaagguaaaaaaaaaaagga

SEQ ID NO: 848874 - RNA, 20 nt, Human
uaacaaaaauggaaugacaa

SEQ ID NO: 848875 - RNA, 25 nt, Human
uaacaaaaauggaaugacaauauaa

SEQ ID NO: 848876 - RNA, 23 nt, Human
uaacaaguuuacaaauauauagu

SEQ ID NO: 848877 - RNA, 23 nt, Human
uaagagaacagaggaccugaagg

SEQ ID NO: 848878 - RNA, 24 nt, Human
uaagauacacacccuuaucaauag

SEQ ID NO: 848879 - RNA, 22 nt, Human
uacaaagcuacagaauuaaaac

SEQ ID NO: 848880 - RNA, 21 nt, Human
uacacacccuuaucaauagcu

SEQ ID NO: 848881 - RNA, 27 nt, Human
uacagaauuaaaacaauuugcuacaag

SEQ ID NO: 848882 - RNA, 22 nt, Human
uaguaagaauaaaacaagacag

SEQ ID NO: 848883 - RNA, 22 nt, Human
uauauauacuuucacauaugug

SEQ ID NO: 848884 - RNA, 24 nt, Human
uauuacaaagcuacagaauuaaaa

SEQ ID NO: 848885 - RNA, 22 nt, Human
ucaugccuguaaucccagcacu

SEQ ID NO: 848886 - RNA, 25 nt, Human
ucgggaggcugaggcaguagaauca

SEQ ID NO: 848887 - RNA, 21 nt, Human
ucuauaacaaaaauggaauga

SEQ ID NO: 848888 - RNA, 19 nt, Human
ucucccaauaccugcaggu

SEQ ID NO: 848889 - RNA, 24 nt, Human
ucugaaauauaaaaauacuuggcc

SEQ ID NO: 848890 - RNA, 18 nt, Human
ucuucaaaaaaaggaaca

SEQ ID NO: 848891 - RNA, 25 nt, Human
ugacagaccaccaaauaagucaaaa

SEQ ID NO: 848892 - RNA, 24 nt, Human
ugaggagggcggaucacacgaggu

SEQ ID NO: 848893 - RNA, 26 nt, Human
ugaggagggcggaucacacgagguca

SEQ ID NO: 848894 - RNA, 20 nt, Human
ugaggcaguagaaucacuug

SEQ ID NO: 848895 - RNA, 25 nt, Human
ugaggcaguagaaucacuugaaucc

SEQ ID NO: 848896 - RNA, 23 nt, Human
ugccuguaaucccagcacuuugg

SEQ ID NO: 848897 - RNA, 23 nt, Human
ugccuguaaucccagcacuuugg

SEQ ID NO: 848898 - RNA, 24 nt, Human
ugccuguaaucccagcacuuuggg

SEQ ID NO: 848899 - RNA, 22 nt, Human
ugcgacugcagcgagagacaaa

SEQ ID NO: 848900 - RNA, 22 nt, Human
uggccaacauggugaaacccuc

SEQ ID NO: 848901 - RNA, 24 nt, Human
uggccgggcacuguggcucaugcc

SEQ ID NO: 848902 - RNA, 24 nt, Human
uggcucaugccuguaaucccagca

SEQ ID NO: 848903 - RNA, 19 nt, Human
ugggaggcugaggagggcg

SEQ ID NO: 848904 - RNA, 24 nt, Human
ugggaggcugaggagggcggauca

SEQ ID NO: 848905 - RNA, 24 nt, Human
uguggcucaugccuguaaucccag

SEQ ID NO: 848906 - RNA, 20 nt, Human
uguucaaaaguugaaauauu

SEQ ID NO: 848907 - RNA, 18 nt, Human
uucgagaccagccuggcc

SEQ ID NO: 848908 - RNA, 25 nt, Human
uugggaggcugaggagggcggauca

SEQ ID NO: 848909 - RNA, 19 nt, Human
aguugauuccauuuuucuu

SEQ ID NO: 848910 - RNA, 22 nt, Human
aguugcugagaaagaaucagaa

SEQ ID NO: 848911 - RNA, 22 nt, Human
aucauccaguugcuguugaagc

SEQ ID NO: 848912 - RNA, 20 nt, Human
cauggaccuguccauggccu

SEQ ID NO: 848913 - RNA, 19 nt, Human
ccuagcccccacccccgga

SEQ ID NO: 848914 - RNA, 20 nt, Human
ccucuuguucuucuagcaaa

SEQ ID NO: 848915 - RNA, 22 nt, Human
ccuucauuugacaccguuuggu

SEQ ID NO: 848916 - RNA, 19 nt, Human
cuagaauuuucuauuucaa

SEQ ID NO: 848917 - RNA, 18 nt, Human
cuccuuaguacauuuuau

SEQ ID NO: 848918 - RNA, 19 nt, Human
cuucucuuucugcuuucuc

SEQ ID NO: 848919 - RNA, 18 nt, Human
gaucauccucuuguucuu

SEQ ID NO: 848920 - RNA, 22 nt, Human
gcuugaagauuuugugcuguag

SEQ ID NO: 848921 - RNA, 28 nt, Human
uaauuucuuccuugaauccuacaucucc

SEQ ID NO: 848922 - RNA, 23 nt, Human
uaauuuucuuuuuuuauaugaga

SEQ ID NO: 848923 - RNA, 23 nt, Human
uacguggccuugcgucuccuuag

SEQ ID NO: 848924 - RNA, 21 nt, Human
uacucucagcuuuagaaaguu

SEQ ID NO: 848925 - RNA, 20 nt, Human
uagaagauccacaguaacuc

SEQ ID NO: 848926 - RNA, 20 nt, Human
uaugagauucuggaaauacu

SEQ ID NO: 848927 - RNA, 22 nt, Human
ucaauguccuucauuugacacc

SEQ ID NO: 848928 - RNA, 18 nt, Human
ucccuccccuagccccca

SEQ ID NO: 848929 - RNA, 25 nt, Human
ugacgcaaugaagcauccagcaaag

SEQ ID NO: 848930 - RNA, 23 nt, Human
ugagaaagaaucagaacaugaga

SEQ ID NO: 848931 - RNA, 18 nt, Human
uggacgcagugacgcaau

SEQ ID NO: 848932 - RNA, 20 nt, Human
uguaaaugacgcaauuuauc

SEQ ID NO: 848933 - RNA, 24 nt, Human
uguagguugggaaccucugcuaca

SEQ ID NO: 848934 - RNA, 20 nt, Human
ugugaacaucauccaguugc

SEQ ID NO: 848935 - RNA, 23 nt, Human
uguuauggagcucaguuuugagg

SEQ ID NO: 848936 - RNA, 21 nt, Human
uuacauaaauaaacugcauuu

SEQ ID NO: 848937 - RNA, 19 nt, Human
uuagaaaguugcugagaaa

SEQ ID NO: 848938 - RNA, 20 nt, Human
uuagaaaguugcugagaaag

SEQ ID NO: 848939 - RNA, 24 nt, Human
uucaaaaaccaaagcguuuucuuu

SEQ ID NO: 848940 - RNA, 20 nt, Human
uuguugugaacaucauccag

SEQ ID NO: 848941 - RNA, 21 nt, Human
uuuacauaaauaaacugcauu

SEQ ID NO: 848942 - RNA, 23 nt, Human
uuuguaguacacuagucuuuuuc

SEQ ID NO: 848943 - RNA, 18 nt, Human
uuuuuuuuuuuuuuuuug

SEQ ID NO: 848944 - RNA, 19 nt, Human
uuuuuuuuuuuuuuuuugu

SEQ ID NO: 848945 - RNA, 21 nt, Human
aaaugggccggaccgagaucc

SEQ ID NO: 848946 - RNA, 22 nt, Human
aacaaaaacgacugcaguagau

SEQ ID NO: 848947 - RNA, 25 nt, Human
aacccaaucugauccaacaauaacc

SEQ ID NO: 848948 - RNA, 23 nt, Human
aagccgcacccucgcggccccag

SEQ ID NO: 848949 - RNA, 19 nt, Human
aaggcucccccucccccac

SEQ ID NO: 848950 - RNA, 21 nt, Human
accaacagcagcagcaacugg

SEQ ID NO: 848951 - RNA, 24 nt, Human
acccacccucaggccucuccaccg

SEQ ID NO: 848952 - RNA, 20 nt, Human
agaagcgcagucuuaggccc

SEQ ID NO: 848953 - RNA, 18 nt, Human
agcaccaacagcagcagc

SEQ ID NO: 848954 - RNA, 22 nt, Human
aggagcggcugcgccgcccggc

SEQ ID NO: 848955 - RNA, 18 nt, Human
aggcucccccucccccac

SEQ ID NO: 848956 - RNA, 20 nt, Human
aggcucccccucccccaccc

SEQ ID NO: 848957 - RNA, 22 nt, Human
agugccuacuaucaccaggcac

SEQ ID NO: 848958 - RNA, 25 nt, Human
agugguucucauaauguggucccgg

SEQ ID NO: 848959 - RNA, 21 nt, Human
auucaauauuuauugagugcc

SEQ ID NO: 848960 - RNA, 28 nt, Human
caacaauaaccagccuuaauucaauaau

SEQ ID NO: 848961 - RNA, 24 nt, Human
caauauuuauugagugccuacuau

SEQ ID NO: 848962 - RNA, 23 nt, Human
cacagcacccggguuuaaacagg

SEQ ID NO: 848963 - RNA, 22 nt, Human
cacccuacacucuagggauggg

SEQ ID NO: 848964 - RNA, 19 nt, Human
cagaaaugaacucccggau

SEQ ID NO: 848965 - RNA, 19 nt, Human
cagcagcagcaacugggag

SEQ ID NO: 848966 - RNA, 23 nt, Human
caucuggcuucuaaacccacccu

SEQ ID NO: 848967 - RNA, 23 nt, Human
ccaacagcagcagcaacugggag

SEQ ID NO: 848968 - RNA, 19 nt, Human
ccacgcggccgcagcccca

SEQ ID NO: 848969 - RNA, 21 nt, Human
ccccucccccaccccgagucc

SEQ ID NO: 848970 - RNA, 19 nt, Human
ccgcacccucgcggcccca

SEQ ID NO: 848971 - RNA, 26 nt, Human
ccgcagccccagccgagacgcgagcu

SEQ ID NO: 848972 - RNA, 21 nt, Human
ccgggggggccggcuagggcc

SEQ ID NO: 848973 - RNA, 23 nt, Human
cgaggaggucagaaaugaacucc

SEQ ID NO: 848974 - RNA, 21 nt, Human
cgccgcccggccgggucaacg

SEQ ID NO: 848975 - RNA, 21 nt, Human
cgcggaggugauuccacacug

SEQ ID NO: 848976 - RNA, 22 nt, Human
cggauaucccccaccucugccu

SEQ ID NO: 848977 - RNA, 24 nt, Human
cggauaucccccaccucugccugg

SEQ ID NO: 848978 - RNA, 19 nt, Human
cggccgcagccccagccga

SEQ ID NO: 848979 - RNA, 19 nt, Human
cggccgggucaacgucgug

SEQ ID NO: 848980 - RNA, 19 nt, Human
cgggaagggccgggggggc

SEQ ID NO: 848981 - RNA, 19 nt, Human
cgggggggccggcuagggc

SEQ ID NO: 848982 - RNA, 20 nt, Human
cuaaacccacccucaggccu

SEQ ID NO: 848983 - RNA, 20 nt, Human
cuagggccggccagcuugga

SEQ ID NO: 848984 - RNA, 20 nt, Human
cucccccucccccaccccga

SEQ ID NO: 848985 - RNA, 20 nt, Human
cugaaggguacuguaauugu

SEQ ID NO: 848986 - RNA, 21 nt, Human
cugaaggguacuguaauuguu

SEQ ID NO: 848987 - RNA, 19 nt, Human
cugauccaacaauaaccag

SEQ ID NO: 848988 - RNA, 22 nt, Human
cuucuaaacccacccucaggcc

SEQ ID NO: 848989 - RNA, 23 nt, Human
gaacucccggauaucccccaccu

SEQ ID NO: 848990 - RNA, 21 nt, Human
gacccggcgccauuuuggugg

SEQ ID NO: 848991 - RNA, 23 nt, Human
gaggcgagcgcggcggccggggu

SEQ ID NO: 848992 - RNA, 22 nt, Human
gaguaccugucucaaacccaau

SEQ ID NO: 848993 - RNA, 19 nt, Human
gagugcggcgucggaaacc

SEQ ID NO: 848994 - RNA, 26 nt, Human
gcccgaaccuucggucagaggccagc

SEQ ID NO: 848995 - RNA, 24 nt, Human
gccgcacccucgcggccccagacg

SEQ ID NO: 848996 - RNA, 24 nt, Human
gcgcccgaaccuucggucagaggc

SEQ ID NO: 848997 - RNA, 22 nt, Human
gcgcggcggccggggugguagu

SEQ ID NO: 848998 - RNA, 19 nt, Human
gcggcggccggggugguag

SEQ ID NO: 848999 - RNA, 21 nt, Human
ggauaucccccaccucugccu

SEQ ID NO: 849000 - RNA, 23 nt, Human
gggccggaccgagauccgggaga

SEQ ID NO: 849001 - RNA, 23 nt, Human
guacuguaauuguuuccauuucu

SEQ ID NO: 849002 - RNA, 20 nt, Human
gugugugugugugugugugu

SEQ ID NO: 849003 - RNA, 20 nt, Human
uagauuuucuggggcuacac

SEQ ID NO: 849004 - RNA, 31 nt, Human
uaggagugagugugugugugugugugugugg

SEQ ID NO: 849005 - RNA, 18 nt, Human
ucagccuccggguuccgg

SEQ ID NO: 849006 - RNA, 23 nt, Human
uccaccgaguaccugucucaaac

SEQ ID NO: 849007 - RNA, 20 nt, Human
uccagccgagugcggcgucg

SEQ ID NO: 849008 - RNA, 23 nt, Human
ucccggaaccagcaccaacagca

SEQ ID NO: 849009 - RNA, 20 nt, Human
ucgugcgcaugcgccgaccc

SEQ ID NO: 849010 - RNA, 20 nt, Human
ugaacucccggauauccccc

SEQ ID NO: 849011 - RNA, 27 nt, Human
ugaauuuucacaugcuucauucaguuc

SEQ ID NO: 849012 - RNA, 20 nt, Human
ugagaugaugggaauaaucg

SEQ ID NO: 849013 - RNA, 18 nt, Human
ugcagaacaaaaacgacu

SEQ ID NO: 849014 - RNA, 22 nt, Human
ugccuacuaucaccaggcaccu

SEQ ID NO: 849015 - RNA, 22 nt, Human
uggcuucuaaacccacccucag

SEQ ID NO: 849016 - RNA, 19 nt, Human
uggggcgggaggguccucc

SEQ ID NO: 849017 - RNA, 18 nt, Human
ugugugugugugugugug

SEQ ID NO: 849018 - RNA, 18 nt, Human
ugugugugugugugugug

SEQ ID NO: 849019 - RNA, 18 nt, Human
ugugugugugugugugug

SEQ ID NO: 849020 - RNA, 21 nt, Human
ugugugugugugugugugugu

SEQ ID NO: 849021 - RNA, 21 nt, Human
ugugugugugugugugugugu

SEQ ID NO: 849022 - RNA, 21 nt, Human
ugugugugugugugugugugu

SEQ ID NO: 849023 - RNA, 21 nt, Human
ugugugugugugugugugugu

SEQ ID NO: 849024 - RNA, 22 nt, Human
ugugugugugugugugugugug

SEQ ID NO: 849025 - RNA, 22 nt, Human
ugugugugugugugugugugug

SEQ ID NO: 849026 - RNA, 19 nt, Human
uuacagaaauaaggcuccc

SEQ ID NO: 849027 - RNA, 18 nt, Human
uucaaggaggugcugaag

SEQ ID NO: 849028 - RNA, 18 nt, Human
uuccacacugaggcgagc

SEQ ID NO: 849029 - RNA, 19 nt, Human
uuuuuuuuuuuuuuuuugu

SEQ ID NO: 849030 - RNA, 27 nt, Human
uuuuuuuuuuuuuuuuuuuuuuugggg

SEQ ID NO: 849031 - RNA, 24 nt, Human
aaaagacaaagacaacagaggaca

SEQ ID NO: 849032 - RNA, 21 nt, Human
aaacaucagggcagcaagagc

SEQ ID NO: 849033 - RNA, 22 nt, Human
aaacaucagggcagcaagagcc

SEQ ID NO: 849034 - RNA, 21 nt, Human
aaagacaaagacaacagagga

SEQ ID NO: 849035 - RNA, 27 nt, Human
aaagacaacagaggacagccgguaccc

SEQ ID NO: 849036 - RNA, 22 nt, Human
aaccugcagcuucucccgcucc

SEQ ID NO: 849037 - RNA, 19 nt, Human
aagacaaagacaacagagg

SEQ ID NO: 849038 - RNA, 22 nt, Human
aaggagcagcagugggcuggcc

SEQ ID NO: 849039 - RNA, 21 nt, Human
accugcagcuucucccgcucc

SEQ ID NO: 849040 - RNA, 30 nt, Human
agacaaagacaacagaggacagcagagaaa

SEQ ID NO: 849041 - RNA, 23 nt, Human
agacaacagaggacagcagagaa

SEQ ID NO: 849042 - RNA, 20 nt, Human
agagaggaagaggaguccgc

SEQ ID NO: 849043 - RNA, 22 nt, Human
agcaagagccaucuggccccca

SEQ ID NO: 849044 - RNA, 23 nt, Human
agcagcagugggcuggccugggg

SEQ ID NO: 849045 - RNA, 18 nt, Human
agcagugggcuggccugg

SEQ ID NO: 849046 - RNA, 24 nt, Human
agccuuccgccgggccagcagcuc

SEQ ID NO: 849047 - RNA, 18 nt, Human
agcuccuccugggcaacc

SEQ ID NO: 849048 - RNA, 22 nt, Human
aggagaagagagaggaagagga

SEQ ID NO: 849049 - RNA, 24 nt, Human
aggcauuaccuuauuuaaaguuca

SEQ ID NO: 849050 - RNA, 18 nt, Human
agggacugauaaggacua

SEQ ID NO: 849051 - RNA, 18 nt, Human
augcagcuguuaaaagca

SEQ ID NO: 849052 - RNA, 19 nt, Human
caaaaaugcucucugcagc

SEQ ID NO: 849053 - RNA, 24 nt, Human
caaagacaacagaggacagcagag

SEQ ID NO: 849054 - RNA, 18 nt, Human
caccaggaggggcccagg

SEQ ID NO: 849055 - RNA, 23 nt, Human
caccaggaggggcccaggcagac

SEQ ID NO: 849056 - RNA, 18 nt, Human
cagcuccucggccugcug

SEQ ID NO: 849057 - RNA, 21 nt, Human
caggaggggcccaggcagacc

SEQ ID NO: 849058 - RNA, 18 nt, Human
cagggccgugaaagugcc

SEQ ID NO: 849059 - RNA, 18 nt, Human
cagggcggagagaaucag

SEQ ID NO: 849060 - RNA, 22 nt, Human
cagugggcuggccugggggucc

SEQ ID NO: 849061 - RNA, 20 nt, Human
cccaggcagaccccccaaaa

SEQ ID NO: 849062 - RNA, 22 nt, Human
cccccaaaacaucagggcagca

SEQ ID NO: 849063 - RNA, 22 nt, Human
cccccauacccucagagaugga

SEQ ID NO: 849064 - RNA, 24 nt, Human
cccccauacccucagagauggagg

SEQ ID NO: 849065 - RNA, 21 nt, Human
cccgugcgccauucugcaccg

SEQ ID NO: 849066 - RNA, 19 nt, Human
ccucacucagcuguuccuu

SEQ ID NO: 849067 - RNA, 21 nt, Human
ccucuuccugcucuuccucca

SEQ ID NO: 849068 - RNA, 19 nt, Human
ccugcggcagcuccucggc

SEQ ID NO: 849069 - RNA, 19 nt, Human
ccugcuccugccggcucug

SEQ ID NO: 849070 - RNA, 25 nt, Human
ccuuccgccgggccagcagcuccuc

SEQ ID NO: 849071 - RNA, 20 nt, Human
cgcgugugacacaccaggag

SEQ ID NO: 849072 - RNA, 22 nt, Human
cgcuggcgcugcagcuccuccu

SEQ ID NO: 849073 - RNA, 20 nt, Human
cucagagauggagggugacc

SEQ ID NO: 849074 - RNA, 22 nt, Human
cuccugcggcagcuccucggcc

SEQ ID NO: 849075 - RNA, 18 nt, Human
cuccugcugcagggcagc

SEQ ID NO: 849076 - RNA, 18 nt, Human
cuccugggccugcuccgc

SEQ ID NO: 849077 - RNA, 21 nt, Human
cucuaguugucuauggcugcg

SEQ ID NO: 849078 - RNA, 20 nt, Human
cucugcagcugggcccgcuc

SEQ ID NO: 849079 - RNA, 19 nt, Human
cugcaccgccucuuccugc

SEQ ID NO: 849080 - RNA, 19 nt, Human
cugcaccgccucuuccugc

SEQ ID NO: 849081 - RNA, 21 nt, Human
cugcagcuccuccugggcaac

SEQ ID NO: 849082 - RNA, 21 nt, Human
cugcagcugggcccgcucggc

SEQ ID NO: 849083 - RNA, 19 nt, Human
cugcggcagcuccucggcc

SEQ ID NO: 849084 - RNA, 20 nt, Human
cuggacgcgugugacacacc

SEQ ID NO: 849085 - RNA, 18 nt, Human
cuggcgcugcagcuccuc

SEQ ID NO: 849086 - RNA, 20 nt, Human
cugggccaccugcaggcugu

SEQ ID NO: 849087 - RNA, 23 nt, Human
cugggcccgcucggccuccagcu

SEQ ID NO: 849088 - RNA, 23 nt, Human
cuguugcuccagcgccuccuggg

SEQ ID NO: 849089 - RNA, 19 nt, Human
cuucucagccuuccgccgg

SEQ ID NO: 849090 - RNA, 21 nt, Human
cuucucgcucucggccaggag

SEQ ID NO: 849091 - RNA, 27 nt, Human
gaaaauaauaacagaugaccgguaccc

SEQ ID NO: 849092 - RNA, 22 nt, Human
gaacgaauuuauuauucaauaa

SEQ ID NO: 849093 - RNA, 23 nt, Human
gaacuaccaaggaaaagaguaac

SEQ ID NO: 849094 - RNA, 19 nt, Human
gaagagccucuggccuaca

SEQ ID NO: 849095 - RNA, 21 nt, Human
gacaacagaggacagcagaga

SEQ ID NO: 849096 - RNA, 18 nt, Human
gagcagcagugggcuggc

SEQ ID NO: 849097 - RNA, 21 nt, Human
gagcagcagugggcuggccug

SEQ ID NO: 849098 - RNA, 23 nt, Human
gagcagcagugggcuggccuggg

SEQ ID NO: 849099 - RNA, 18 nt, Human
gcagcagugggcuggccu

SEQ ID NO: 849100 - RNA, 19 nt, Human
gcagcugggcccgcucggc

SEQ ID NO: 849101 - RNA, 21 nt, Human
gccuacccgguccugcuccug

SEQ ID NO: 849102 - RNA, 18 nt, Human
gccucccucaccuccacc

SEQ ID NO: 849103 - RNA, 19 nt, Human
gcgcugcagcuccuccugg

SEQ ID NO: 849104 - RNA, 29 nt, Human
gcuccuuggccaggacugagcgcuucccc

SEQ ID NO: 849105 - RNA, 24 nt, Human
gcugcagcuccuccugggcaaccu

SEQ ID NO: 849106 - RNA, 21 nt, Human
ggaaaagaguaacuuguggca

SEQ ID NO: 849107 - RNA, 21 nt, Human
ggaacaccaggauagaagacc

SEQ ID NO: 849108 - RNA, 20 nt, Human
ggagaugguggccaggcugu

SEQ ID NO: 849109 - RNA, 25 nt, Human
ggaugcuggaaaccgcgggauagcu

SEQ ID NO: 849110 - RNA, 25 nt, Human
ggcauuaccuuauuuaaaguucaga

SEQ ID NO: 849111 - RNA, 24 nt, Human
ggccugcugcugggccaccugcag

SEQ ID NO: 849112 - RNA, 22 nt, Human
ggcgcugcagcuccuccugggc

SEQ ID NO: 849113 - RNA, 18 nt, Human
ggcuggccuggggguccg

SEQ ID NO: 849114 - RNA, 24 nt, Human
gggcggagagaaucagggcaagcg

SEQ ID NO: 849115 - RNA, 24 nt, Human
gugaaaagacaaagacaacagagg

SEQ ID NO: 849116 - RNA, 19 nt, Human
uaccaaggaaaagaguaac

SEQ ID NO: 849117 - RNA, 22 nt, Human
uagaagacccagaguaggagaa

SEQ ID NO: 849118 - RNA, 22 nt, Human
uauccagaguccuugaucugau

SEQ ID NO: 849119 - RNA, 20 nt, Human
ucaauaauuauaaaaugguc

SEQ ID NO: 849120 - RNA, 23 nt, Human
ucacucagcuguuccuuccucgg

SEQ ID NO: 849121 - RNA, 22 nt, Human
ucagggcagcaagagccaucug

SEQ ID NO: 849122 - RNA, 21 nt, Human
ucccgcuggcgcugcagcucc

SEQ ID NO: 849123 - RNA, 19 nt, Human
ucccugaaggcuuugauug

SEQ ID NO: 849124 - RNA, 20 nt, Human
ucuaguugucuauggcugcg

SEQ ID NO: 849125 - RNA, 18 nt, Human
ucucugacagcgccaucu

SEQ ID NO: 849126 - RNA, 25 nt, Human
ucugcaccgccucuuccugcucuuc

SEQ ID NO: 849127 - RNA, 23 nt, Human
ucugcagcugggcccgcucggcc

SEQ ID NO: 849128 - RNA, 22 nt, Human
ugaccagguaaauacaagggac

SEQ ID NO: 849129 - RNA, 23 nt, Human
ugauaaggacuaugacggggaca

SEQ ID NO: 849130 - RNA, 21 nt, Human
ugcaccgccucuuccugcucu

SEQ ID NO: 849131 - RNA, 18 nt, Human
ugcagcuucucccgcucc

SEQ ID NO: 849132 - RNA, 18 nt, Human
ugcagggcggagagaauc

SEQ ID NO: 849133 - RNA, 18 nt, Human
ugccgcuccaucuccagg

SEQ ID NO: 849134 - RNA, 18 nt, Human
ugcuccagcgccuccugg

SEQ ID NO: 849135 - RNA, 20 nt, Human
ugggaugcuggaaaccgcgg

SEQ ID NO: 849136 - RNA, 21 nt, Human
ugguuucugccgcuccaucuc

SEQ ID NO: 849137 - RNA, 18 nt, Human
uguaaaauagcagaacga

SEQ ID NO: 849138 - RNA, 19 nt, Human
uugcuccagcgccuccugg

SEQ ID NO: 849139 - RNA, 19 nt, Human
aaaggaaaagggcaggaaa

SEQ ID NO: 849140 - RNA, 20 nt, Human
aagagaaaaaagguggaaaa

SEQ ID NO: 849141 - RNA, 22 nt, Human
aagaggaagaagggaacuccag

SEQ ID NO: 849142 - RNA, 20 nt, Human
aagauaccaaaggcuuauga

SEQ ID NO: 849143 - RNA, 18 nt, Human
acaaaggaagggaagaaa

SEQ ID NO: 849144 - RNA, 22 nt, Human
acaaaggaagggaagaaaagag

SEQ ID NO: 849145 - RNA, 23 nt, Human
acaaaggaagggaagaaaagaga

SEQ ID NO: 849146 - RNA, 22 nt, Human
agaaaaaagguggaaaaucagg

SEQ ID NO: 849147 - RNA, 22 nt, Human
agagcagaauagcaguccugug

SEQ ID NO: 849148 - RNA, 19 nt, Human
aggaagggaagaaaagaga

SEQ ID NO: 849149 - RNA, 23 nt, Human
aguccagugggggacuuugagug

SEQ ID NO: 849150 - RNA, 24 nt, Human
aguuggggauggaggggaugaugc

SEQ ID NO: 849151 - RNA, 19 nt, Human
auagcaguccuguguuucc

SEQ ID NO: 849152 - RNA, 20 nt, Human
caaagcuugauuuucaccac

SEQ ID NO: 849153 - RNA, 25 nt, Human
cacccacuguuccaccagcuggcac

SEQ ID NO: 849154 - RNA, 24 nt, Human
caggaaagauaccaaaggcuuagu

SEQ ID NO: 849155 - RNA, 21 nt, Human
caggaagcccagccuggcucc

SEQ ID NO: 849156 - RNA, 26 nt, Human
cauuuguucucucgagcauccuucca

SEQ ID NO: 849157 - RNA, 21 nt, Human
ccaccagcuggcaccagauca

SEQ ID NO: 849158 - RNA, 21 nt, Human
ccucugaauuucuaguugcaa

SEQ ID NO: 849159 - RNA, 21 nt, Human
ccuggcuccuuuucucuuuug

SEQ ID NO: 849160 - RNA, 22 nt, Human
ccuugauuuauccuucccuugg

SEQ ID NO: 849161 - RNA, 22 nt, Human
ccuugcacuggcuuguuuccuc

SEQ ID NO: 849162 - RNA, 25 nt, Human
ccuuggcuuugggcuuugaggaagu

SEQ ID NO: 849163 - RNA, 19 nt, Human
ccuuuucucuuuugcuccc

SEQ ID NO: 849164 - RNA, 21 nt, Human
cuaaagccagcauaccaaccc

SEQ ID NO: 849165 - RNA, 18 nt, Human
cucuauuccaagccccuc

SEQ ID NO: 849166 - RNA, 18 nt, Human
cuggggucaagucucuuu

SEQ ID NO: 849167 - RNA, 18 nt, Human
gaagaaaagagaaaaaag

SEQ ID NO: 849168 - RNA, 19 nt, Human
gaagaagggaacuccagua

SEQ ID NO: 849169 - RNA, 21 nt, Human
gaaguuggggauggaggggau

SEQ ID NO: 849170 - RNA, 21 nt, Human
gagcauccuuccagauguuuc

SEQ ID NO: 849171 - RNA, 24 nt, Human
gagcauccuuccagauguuucucc

SEQ ID NO: 849172 - RNA, 20 nt, Human
gagucguaguacaguccugg

SEQ ID NO: 849173 - RNA, 24 nt, Human
gcaggagagcagaauagcaguccu

SEQ ID NO: 849174 - RNA, 25 nt, Human
ggaggaagcaguccagugggggacu

SEQ ID NO: 849175 - RNA, 18 nt, Human
ggaggggaugaugcuucu

SEQ ID NO: 849176 - RNA, 19 nt, Human
ggauggaggggaugaugcu

SEQ ID NO: 849177 - RNA, 21 nt, Human
ggauugagccuacagcaagag

SEQ ID NO: 849178 - RNA, 22 nt, Human
ggcuuaugaaaacaaaggaagg

SEQ ID NO: 849179 - RNA, 22 nt, Human
gggaagaaaagagaaaaaaggu

SEQ ID NO: 849180 - RNA, 19 nt, Human
uaaagccagcauaccaacc

SEQ ID NO: 849181 - RNA, 27 nt, Human
uagcaguccuguguuuccugugucugu

SEQ ID NO: 849182 - RNA, 21 nt, Human
uauagaguacacaaaggaaaa

SEQ ID NO: 849183 - RNA, 19 nt, Human
ucaggaagcccagccuggc

SEQ ID NO: 849184 - RNA, 23 nt, Human
uccaccagcuggcaccagaucac

SEQ ID NO: 849185 - RNA, 20 nt, Human
ucccgagcucugcgaugcug

SEQ ID NO: 849186 - RNA, 19 nt, Human
uccuucccuuggcuuuggg

SEQ ID NO: 849187 - RNA, 26 nt, Human
uccuuuucucuuuugcuccccuugca

SEQ ID NO: 849188 - RNA, 21 nt, Human
ucuaaagccagcauaccaacc

SEQ ID NO: 849189 - RNA, 22 nt, Human
ucuaaagccagcauaccaaccc

SEQ ID NO: 849190 - RNA, 18 nt, Human
ugaauuucuaguugcaac

SEQ ID NO: 849191 - RNA, 22 nt, Human
ugcacuggcuuguuuccucccc

SEQ ID NO: 849192 - RNA, 18 nt, Human
ugccucccgagcucugcg

SEQ ID NO: 849193 - RNA, 22 nt, Human
uggcaccagaucaccgugggca

SEQ ID NO: 849194 - RNA, 26 nt, Human
uggcuuugggcuuugaggaaguuggg

SEQ ID NO: 849195 - RNA, 22 nt, Human
ugggaaagauuaguuguagaug

SEQ ID NO: 849196 - RNA, 20 nt, Human
ugugggaucaggaagcccag

SEQ ID NO: 849197 - RNA, 21 nt, Human
uuauaccaguggggcuaagga

SEQ ID NO: 849198 - RNA, 18 nt, Human
uuauccuucccuuggcuu

SEQ ID NO: 849199 - RNA, 28 nt, Human
uugcuccccuugcacuggcuuguuuccc

SEQ ID NO: 849200 - RNA, 20 nt, Human
uuuuuuuuuuuuuugccaaa

SEQ ID NO: 849201 - RNA, 18 nt, Human
uuuuuuuuuuuuuuuuug

SEQ ID NO: 849202 - RNA, 22 nt, Human
uuuuuuuuuuuuuuuuugccaa

SEQ ID NO: 849203 - RNA, 24 nt, Human
uuuuuuuuuuuuuuuuugccaaau

SEQ ID NO: 849204 - RNA, 19 nt, Human
agagcucagcacucacugc

SEQ ID NO: 849205 - RNA, 21 nt, Human
agagggggaaagguccagagc

SEQ ID NO: 849206 - RNA, 18 nt, Human
agccacuucccucacugg

SEQ ID NO: 849207 - RNA, 24 nt, Human
agggagagggggaaagguccagag

SEQ ID NO: 849208 - RNA, 23 nt, Human
aggguuuguuuaagguuuucucc

SEQ ID NO: 849209 - RNA, 19 nt, Human
auaagaccaccucugcgca

SEQ ID NO: 849210 - RNA, 25 nt, Human
caaccuaacaaucaccucuuuccag

SEQ ID NO: 849211 - RNA, 20 nt, Human
caaucaccucuuuccaggcc

SEQ ID NO: 849212 - RNA, 21 nt, Human
caggggaagcugagcuggaua

SEQ ID NO: 849213 - RNA, 25 nt, Human
caggucccacggugggucccagggg

SEQ ID NO: 849214 - RNA, 20 nt, Human
ccaaggucacagugagucag

SEQ ID NO: 849215 - RNA, 24 nt, Human
ccagagcuguggagaaagaagggg

SEQ ID NO: 849216 - RNA, 25 nt, Human
ccucugcgcaaccuaacaaucaccu

SEQ ID NO: 849217 - RNA, 26 nt, Human
ccugucuccaggguuuguuuaagguu

SEQ ID NO: 849218 - RNA, 19 nt, Human
gagcuguggagaaagaagg

SEQ ID NO: 849219 - RNA, 20 nt, Human
gccgcagggagagggggaaa

SEQ ID NO: 849220 - RNA, 19 nt, Human
ggagagggggaaaggucca

SEQ ID NO: 849221 - RNA, 21 nt, Human
gggagagggggaaagguccag

SEQ ID NO: 849222 - RNA, 20 nt, Human
ggugacaaaggccgcaggga

SEQ ID NO: 849223 - RNA, 24 nt, Human
guuuguuuaagguuuucuccaugg

SEQ ID NO: 849224 - RNA, 24 nt, Human
uaacaaucaccucuuuccaggccu

SEQ ID NO: 849225 - RNA, 24 nt, Human
uccauggccuagggcccagccacu

SEQ ID NO: 849226 - RNA, 22 nt, Human
ucugcgcaaccuaacaaucacc

SEQ ID NO: 849227 - RNA, 24 nt, Human
ugacaaaggccgcagggagagggg

SEQ ID NO: 849228 - RNA, 25 nt, Human
ugacaaaggccgcagggagaggggg

SEQ ID NO: 849229 - RNA, 19 nt, Human
ugcgcaaccuaacaaucac

SEQ ID NO: 849230 - RNA, 19 nt, Human
ugcgcaaccuaacaaucac

SEQ ID NO: 849231 - RNA, 21 nt, Human
ugggggaagggugagagcuca

SEQ ID NO: 849232 - RNA, 19 nt, Human
uuccaggccuuguggguca

SEQ ID NO: 849233 - RNA, 19 nt, Human
uuuuuuuuuuuuagugggg

SEQ ID NO: 849234 - RNA, 19 nt, Human
uuuuuuuuuuuuuuagugg

SEQ ID NO: 849235 - RNA, 23 nt, Human
uuuuuuuuuuuuuuuuuaguggg

SEQ ID NO: 849236 - RNA, 23 nt, Human
aacagcuucugaagcugaagcua

SEQ ID NO: 849237 - RNA, 18 nt, Human
agaggaaacacagugaca

SEQ ID NO: 849238 - RNA, 20 nt, Human
agaggaugaggaaguggaag

SEQ ID NO: 849239 - RNA, 18 nt, Human
aggggggaagaggaggga

SEQ ID NO: 849240 - RNA, 25 nt, Human
cugaagcuaugacaaugaacuucca

SEQ ID NO: 849241 - RNA, 18 nt, Human
cugaagcugaagcuauga

SEQ ID NO: 849242 - RNA, 22 nt, Human
gaggaugaggaaguggaaggga

SEQ ID NO: 849243 - RNA, 21 nt, Human
gcuaugacaaugaacuuccau

SEQ ID NO: 849244 - RNA, 28 nt, Human
gggaacagugcagaggaaaccgguaccc

SEQ ID NO: 849245 - RNA, 18 nt, Human
uaaaaaaaggggggaaga

SEQ ID NO: 849246 - RNA, 21 nt, Human
uaugacaaugaacuuccaugu

SEQ ID NO: 849247 - RNA, 25 nt, Human
uggaguagagucuaggaaaugauau

SEQ ID NO: 849248 - RNA, 23 nt, Human
uuuuuuuuuuuuuuuuuuauuuu

SEQ ID NO: 849249 - RNA, 19 nt, Human
aagaagguuuagcaagaag

SEQ ID NO: 849250 - RNA, 20 nt, Human
aaggacaagacaagacucgg

SEQ ID NO: 849251 - RNA, 23 nt, Human
aaugcacauccaaaacgggugac

SEQ ID NO: 849252 - RNA, 23 nt, Human
aaugcggggccugcaccagcaga

SEQ ID NO: 849253 - RNA, 23 nt, Human
acaagacucggccccucccacca

SEQ ID NO: 849254 - RNA, 21 nt, Human
accacaaaaccccuuuccccc

SEQ ID NO: 849255 - RNA, 22 nt, Human
accccgagaaggccgaugccag

SEQ ID NO: 849256 - RNA, 20 nt, Human
acucggccccucccaccauc

SEQ ID NO: 849257 - RNA, 21 nt, Human
agacaagagcugcccccagag

SEQ ID NO: 849258 - RNA, 21 nt, Human
agcaggugggggcugugcuga

SEQ ID NO: 849259 - RNA, 22 nt, Human
agccgggcagccaaucgagccc

SEQ ID NO: 849260 - RNA, 21 nt, Human
aggaacucagcccgguugagg

SEQ ID NO: 849261 - RNA, 21 nt, Human
aggagacuuggaguccaagca

SEQ ID NO: 849262 - RNA, 20 nt, Human
agggccagcccugcccccag

SEQ ID NO: 849263 - RNA, 18 nt, Human
auagggcuguccccaugg

SEQ ID NO: 849264 - RNA, 18 nt, Human
auaguguggagaguugca

SEQ ID NO: 849265 - RNA, 22 nt, Human
auccaaaacgggugacuuggaa

SEQ ID NO: 849266 - RNA, 18 nt, Human
augaaaugcacauccaaa

SEQ ID NO: 849267 - RNA, 21 nt, Human
augaugaugaaaggacaagac

SEQ ID NO: 849268 - RNA, 24 nt, Human
augcacauccaaaacgggugaccc

SEQ ID NO: 849269 - RNA, 19 nt, Human
auggcaauggcaccugcau

SEQ ID NO: 849270 - RNA, 24 nt, Human
augucaucuguauugucacaugaa

SEQ ID NO: 849271 - RNA, 22 nt, Human
caaaacgcacuugaggaaccaa

SEQ ID NO: 849272 - RNA, 22 nt, Human
caaaagcaucucgcaggcuggu

SEQ ID NO: 849273 - RNA, 21 nt, Human
caagacaagacucggccccuc

SEQ ID NO: 849274 - RNA, 22 nt, Human
caagacaagacucggccccucc

SEQ ID NO: 849275 - RNA, 19 nt, Human
caagcaaaggggcaagagg

SEQ ID NO: 849276 - RNA, 22 nt, Human
caagggccuucuccccgaagac

SEQ ID NO: 849277 - RNA, 19 nt, Human
cacaaaaccccuuuccccc

SEQ ID NO: 849278 - RNA, 22 nt, Human
cacaaaaccccuuucccccaaa

SEQ ID NO: 849279 - RNA, 18 nt, Human
cacacggaguccggcccc

SEQ ID NO: 849280 - RNA, 19 nt, Human
cacauggcuguuuaucucc

SEQ ID NO: 849281 - RNA, 25 nt, Human
cacccccugccccuucucuagggcc

SEQ ID NO: 849282 - RNA, 19 nt, Human
caccucgccacccccugcc

SEQ ID NO: 849283 - RNA, 19 nt, Human
cagagcagaagcuaaauag

SEQ ID NO: 849284 - RNA, 19 nt, Human
cagcacuuccgaaaguuau

SEQ ID NO: 849285 - RNA, 24 nt, Human
cagcucccaaaacgcacuugagga

SEQ ID NO: 849286 - RNA, 22 nt, Human
cauccugauuuuugcuguuccc

SEQ ID NO: 849287 - RNA, 21 nt, Human
ccaaagccucaucgaugccca

SEQ ID NO: 849288 - RNA, 18 nt, Human
ccaacuuggggacagagu

SEQ ID NO: 849289 - RNA, 23 nt, Human
ccacaaaaccccuuucccccaaa

SEQ ID NO: 849290 - RNA, 23 nt, Human
ccaccauccugauuuuugcuguu

SEQ ID NO: 849291 - RNA, 22 nt, Human
ccacccagcuccaaggggacgu

SEQ ID NO: 849292 - RNA, 20 nt, Human
ccacccagcuccaaggggag

SEQ ID NO: 849293 - RNA, 22 nt, Human
ccacgcccgccaccucgccacc

SEQ ID NO: 849294 - RNA, 24 nt, Human
ccagaggcuugugugggccggcgg

SEQ ID NO: 849295 - RNA, 18 nt, Human
cccaugggcacccguugg

SEQ ID NO: 849296 - RNA, 18 nt, Human
ccccagagccgccaccgu

SEQ ID NO: 849297 - RNA, 23 nt, Human
ccccgucaccagcaggugggggc

SEQ ID NO: 849298 - RNA, 21 nt, Human
ccccucccaccauccugauuu

SEQ ID NO: 849299 - RNA, 19 nt, Human
ccccugggggccaaagccu

SEQ ID NO: 849300 - RNA, 20 nt, Human
cccgggcacgggcccggcuc

SEQ ID NO: 849301 - RNA, 21 nt, Human
ccguggcugccucccugccuu

SEQ ID NO: 849302 - RNA, 22 nt, Human
ccucccugccuucuccgccgca

SEQ ID NO: 849303 - RNA, 23 nt, Human
ccucgcucaccccgagaaggccg

SEQ ID NO: 849304 - RNA, 23 nt, Human
ccucugccacccagcuccaaggg

SEQ ID NO: 849305 - RNA, 18 nt, Human
ccucuggcagcugcugug

SEQ ID NO: 849306 - RNA, 23 nt, Human
ccuggccgcucuguuccacccac

SEQ ID NO: 849307 - RNA, 19 nt, Human
ccuucuccccgaagacaag

SEQ ID NO: 849308 - RNA, 19 nt, Human
ccuuggggguuaauagcug

SEQ ID NO: 849309 - RNA, 21 nt, Human
cgaggccuuucugcccgagcu

SEQ ID NO: 849310 - RNA, 18 nt, Human
cggccccucccaccaucc

SEQ ID NO: 849311 - RNA, 23 nt, Human
cgggcccggcucugggaagcugg

SEQ ID NO: 849312 - RNA, 25 nt, Human
cggggcuccgggccccccuuggggg

SEQ ID NO: 849313 - RNA, 23 nt, Human
cucccaaaacgcacuugaggaac

SEQ ID NO: 849314 - RNA, 20 nt, Human
cuccucugccacccagcucc

SEQ ID NO: 849315 - RNA, 22 nt, Human
cuccucugccacccagcuccaa

SEQ ID NO: 849316 - RNA, 18 nt, Human
cuccuggccgcucuguuc

SEQ ID NO: 849317 - RNA, 21 nt, Human
cucucuggcagcagcucccaa

SEQ ID NO: 849318 - RNA, 19 nt, Human
cugccccuucucuagggcc

SEQ ID NO: 849319 - RNA, 24 nt, Human
cuguggcgugugcacccggccucc

SEQ ID NO: 849320 - RNA, 22 nt, Human
gagucagcucacaccccaggcc

SEQ ID NO: 849321 - RNA, 20 nt, Human
gaugaaaggacaagacaaga

SEQ ID NO: 849322 - RNA, 19 nt, Human
gcccgaggccuuucugccc

SEQ ID NO: 849323 - RNA, 21 nt, Human
gcggggcuccgggccccccuu

SEQ ID NO: 849324 - RNA, 19 nt, Human
gcugaugggcccgaggccu

SEQ ID NO: 849325 - RNA, 28 nt, Human
ggcccuuuagcucucuggcagcagcucu

SEQ ID NO: 849326 - RNA, 18 nt, Human
ggcugugcugaugggccc

SEQ ID NO: 849327 - RNA, 21 nt, Human
gguccuggcugccuagagagg

SEQ ID NO: 849328 - RNA, 22 nt, Human
guccaacuuggggacagagugu

SEQ ID NO: 849329 - RNA, 24 nt, Human
gugcugaugggcccgaggccuuuc

SEQ ID NO: 849330 - RNA, 19 nt, Human
uagggccagcccugccccc

SEQ ID NO: 849331 - RNA, 23 nt, Human
uagguugggggcauuuuggcagg

SEQ ID NO: 849332 - RNA, 19 nt, Human
ucagcucacaccccaggcc

SEQ ID NO: 849333 - RNA, 18 nt, Human
ucagggacaggaacucag

SEQ ID NO: 849334 - RNA, 18 nt, Human
uccaacuuggggacagag

SEQ ID NO: 849335 - RNA, 20 nt, Human
uccacccacgcccgccaccu

SEQ ID NO: 849336 - RNA, 22 nt, Human
uccccaagaaaaggguucugug

SEQ ID NO: 849337 - RNA, 20 nt, Human
uccccagaggagagucagcu

SEQ ID NO: 849338 - RNA, 19 nt, Human
uccccgaagacaagagcug

SEQ ID NO: 849339 - RNA, 24 nt, Human
uccccgaagacaagagcugccccc

SEQ ID NO: 849340 - RNA, 19 nt, Human
ucuagggccagcccugccc

SEQ ID NO: 849341 - RNA, 20 nt, Human
ucuccccgaagacaagagcu

SEQ ID NO: 849342 - RNA, 23 nt, Human
ucuccucugccacccagcuccaa

SEQ ID NO: 849343 - RNA, 20 nt, Human
ucucuggcagcagcucccaa

SEQ ID NO: 849344 - RNA, 20 nt, Human
ucucuggccccgucaccagc

SEQ ID NO: 849345 - RNA, 21 nt, Human
ugacuuggaaacgaccuauua

SEQ ID NO: 849346 - RNA, 19 nt, Human
ugagguggggguggccgcu

SEQ ID NO: 849347 - RNA, 21 nt, Human
ugccagcccggcuccaagggc

SEQ ID NO: 849348 - RNA, 19 nt, Human
ugcuguggcgugaugggca

SEQ ID NO: 849349 - RNA, 23 nt, Human
uggcagcagcucccaaaacgcac

SEQ ID NO: 849350 - RNA, 21 nt, Human
uggccgcucuguuccacccac

SEQ ID NO: 849351 - RNA, 22 nt, Human
uggggacagagugugcagcacu

SEQ ID NO: 849352 - RNA, 21 nt, Human
ugugcugaugggcccgaggcc

SEQ ID NO: 849353 - RNA, 19 nt, Human
uguuaaauauaguguggag

SEQ ID NO: 849354 - RNA, 26 nt, Human
uguuccacccacgcccgccaccucgc

SEQ ID NO: 849355 - RNA, 19 nt, Human
uucagggacaggaacucag

SEQ ID NO: 849356 - RNA, 18 nt, Human
uucuccgccgcagcuguu

SEQ ID NO: 849357 - RNA, 19 nt, Human
aaacacucugcacuaguca

SEQ ID NO: 849358 - RNA, 23 nt, Human
aacaucgcauccuucaaaggcuc

SEQ ID NO: 849359 - RNA, 21 nt, Human
aacugagugaucucuaaacac

SEQ ID NO: 849360 - RNA, 23 nt, Human
acuucaaagaaauuagugagaga

SEQ ID NO: 849361 - RNA, 22 nt, Human
aucaacucugcuuauccuugaa

SEQ ID NO: 849362 - RNA, 18 nt, Human
auccuugaagacuucaaa

SEQ ID NO: 849363 - RNA, 25 nt, Human
cagucaccaucaccagagucagcac

SEQ ID NO: 849364 - RNA, 19 nt, Human
ccuucaaaggcucugccuc

SEQ ID NO: 849365 - RNA, 22 nt, Human
cuaguucaugaucccuuucuca

SEQ ID NO: 849366 - RNA, 24 nt, Human
cucugcuuauccuugaagacuuca

SEQ ID NO: 849367 - RNA, 19 nt, Human
gccagucuuuaaaaacuga

SEQ ID NO: 849368 - RNA, 18 nt, Human
gcugcacugagacacgau

SEQ ID NO: 849369 - RNA, 23 nt, Human
uaagaaugacaacaucgcauccu

SEQ ID NO: 849370 - RNA, 25 nt, Human
ucccggagacuuuugaaauucuacc

SEQ ID NO: 849371 - RNA, 20 nt, Human
uccuucaaaggcucugccuc

SEQ ID NO: 849372 - RNA, 28 nt, Human
ugacaacaucgcauccuucaaaggcucu

SEQ ID NO: 849373 - RNA, 20 nt, Human
ugagacacgauaaaggccag

SEQ ID NO: 849374 - RNA, 19 nt, Human
ugagugaucucuaaacacu

SEQ ID NO: 849375 - RNA, 18 nt, Human
ugccucggcugcacugag

SEQ ID NO: 849376 - RNA, 21 nt, Human
uucaagagucugugccucuaa

SEQ ID NO: 849377 - RNA, 21 nt, Human
uucaugaucccuuucucagau

SEQ ID NO: 849378 - RNA, 20 nt, Human
uuucugaaguuggacuugau

SEQ ID NO: 849379 - RNA, 19 nt, Human
aaaaggccccacgcaaaga

SEQ ID NO: 849380 - RNA, 21 nt, Human
aaggccccacgcaaagaauuc

SEQ ID NO: 849381 - RNA, 22 nt, Human
acgcucaugccgcggccaugcc

SEQ ID NO: 849382 - RNA, 20 nt, Human
agcucggggcgcuccgggac

SEQ ID NO: 849383 - RNA, 22 nt, Human
agcucggggcgcuccgggacga

SEQ ID NO: 849384 - RNA, 19 nt, Human
aggcggcggcgccgagggc

SEQ ID NO: 849385 - RNA, 23 nt, Human
agugcaauggugugaucuuggcu

SEQ ID NO: 849386 - RNA, 24 nt, Human
agugcaauggugugaucuuggcuc

SEQ ID NO: 849387 - RNA, 18 nt, Human
augccuaggcuggagugc

SEQ ID NO: 849388 - RNA, 18 nt, Human
auggagucucaccaugcc

SEQ ID NO: 849389 - RNA, 21 nt, Human
augguacacacuuggugggcc

SEQ ID NO: 849390 - RNA, 22 nt, Human
caccaugccuaggcuggagugc

SEQ ID NO: 849391 - RNA, 24 nt, Human
caccaugccuaggcuggagugcaa

SEQ ID NO: 849392 - RNA, 23 nt, Human
cacugcaaccuccgcuuccuggg

SEQ ID NO: 849393 - RNA, 18 nt, Human
ccaaagccuuguagccag

SEQ ID NO: 849394 - RNA, 20 nt, Human
ccaggaaccgaccacuuagc

SEQ ID NO: 849395 - RNA, 20 nt, Human
ccccgcggccugcgcgcccg

SEQ ID NO: 849396 - RNA, 21 nt, Human
ccccgcggccugcgcgcccgc

SEQ ID NO: 849397 - RNA, 20 nt, Human
cccgcgccagcucggggcgc

SEQ ID NO: 849398 - RNA, 24 nt, Human
cccgcgcccucaugggcucugcgg

SEQ ID NO: 849399 - RNA, 19 nt, Human
ccuaggcuggagugcaaug

SEQ ID NO: 849400 - RNA, 19 nt, Human
ccuccagcuccggcggcgg

SEQ ID NO: 849401 - RNA, 20 nt, Human
ccuccagcuccggcggcggc

SEQ ID NO: 849402 - RNA, 22 nt, Human
ccucgggcuccgacgccgccuu

SEQ ID NO: 849403 - RNA, 21 nt, Human
ccuuguagccaggugcucccc

SEQ ID NO: 849404 - RNA, 20 nt, Human
cgccgagggcugaggaggcg

SEQ ID NO: 849405 - RNA, 19 nt, Human
cgccgccuucuccuccagc

SEQ ID NO: 849406 - RNA, 23 nt, Human
cgccucgggcuccgacgccgccu

SEQ ID NO: 849407 - RNA, 19 nt, Human
cgcggccugcgcgcccgcg

SEQ ID NO: 849408 - RNA, 22 nt, Human
cggaggcugaagcugcggauca

SEQ ID NO: 849409 - RNA, 24 nt, Human
cucacugcaaccuccgcuuccugg

SEQ ID NO: 849410 - RNA, 24 nt, Human
cuccacgcucaugccgcggccaug

SEQ ID NO: 849411 - RNA, 21 nt, Human
cuccaggaaccgaccacuuag

SEQ ID NO: 849412 - RNA, 22 nt, Human
cuccaggaaccgaccacuuagc

SEQ ID NO: 849413 - RNA, 24 nt, Human
cuccuccagcuccggcggcggcuc

SEQ ID NO: 849414 - RNA, 22 nt, Human
cugcaaccuccgcuuccugggu

SEQ ID NO: 849415 - RNA, 19 nt, Human
gcagcuccaggaaccgacc

SEQ ID NO: 849416 - RNA, 24 nt, Human
gccuaggcuggagugcaauggugu

SEQ ID NO: 849417 - RNA, 30 nt, Human; identical to SEQ ID NO: 340167

SEQ ID NO: 849418 - RNA, 20 nt, Human
ggaggcggcggaggcugaag

SEQ ID NO: 849419 - RNA, 20 nt, Human
ggagucucaccaugccuagg

SEQ ID NO: 849420 - RNA, 18 nt, Human
ggcggcggcggugcccgc

SEQ ID NO: 849421 - RNA, 22 nt, Human
ggcuggagugcaauggugugau

SEQ ID NO: 849422 - RNA, 21 nt, Human
gucucaccaugccuaggcugg

SEQ ID NO: 849423 - RNA, 22 nt, Human
uaauuuuuuuuuuuuuuugaga

SEQ ID NO: 849424 - RNA, 24 nt, Human
ucacugcaaccuccgcuuccuggg

SEQ ID NO: 849425 - RNA, 25 nt, Human
ucacugcaaccuccgcuuccugggu

SEQ ID NO: 849426 - RNA, 21 nt, Human
uccacgcucaugccgcggcca

SEQ ID NO: 849427 - RNA, 23 nt, Human
uccacgcucaugccgcggccaug

SEQ ID NO: 849428 - RNA, 21 nt, Human
ucucaccaugccuaggcugga

SEQ ID NO: 849429 - RNA, 23 nt, Human
ucucaccaugccuaggcuggagu

SEQ ID NO: 849430 - RNA, 23 nt, Human
ugaaaagagaaaaucaauacaau

SEQ ID NO: 849431 - RNA, 23 nt, Human
ugaagcugcggaucaggcuagca

SEQ ID NO: 849432 - RNA, 20 nt, Human
ugccuaggcuggagugcaau

SEQ ID NO: 849433 - RNA, 24 nt, Human
ugccuaggcuggagugcaauggug

SEQ ID NO: 849434 - RNA, 19 nt, Human
uggagugcaauggugugau

SEQ ID NO: 849435 - RNA, 23 nt, Human
uggagugcaauggugugaucuug

SEQ ID NO: 849436 - RNA, 24 nt, Human
uggagugcaauggugugaucuugg

SEQ ID NO: 849437 - RNA, 22 nt, Human
ugggccaaagccuuguagccag

SEQ ID NO: 849438 - RNA, 20 nt, Human
ugguacacacuuggugggcc

SEQ ID NO: 849439 - RNA, 24 nt, Human
uguagccaggugcuccccgcggcc

SEQ ID NO: 849440 - RNA, 24 nt, Human
uuuuugagauggagucucaccaug

SEQ ID NO: 849441 - RNA, 26 nt, Human
uuuuuuuuuuuugaaaagagaaaauc

SEQ ID NO: 849442 - RNA, 26 nt, Human
uuuuuuuuuuuugagauggagucuca

SEQ ID NO: 849443 - RNA, 22 nt, Human
uuuuuuuuuuuuuugagaugga

SEQ ID NO: 849444 - RNA, 20 nt, Human
uuuuuuuuuuuuuuuuuugg

SEQ ID NO: 849445 - RNA, 25 nt, Human
aaaaggacacacaggauuugggaca

SEQ ID NO: 849446 - RNA, 19 nt, Human
aaacccacggcugugcucg

SEQ ID NO: 849447 - RNA, 18 nt, Human
aaacuacagcaggaaccu

SEQ ID NO: 849448 - RNA, 24 nt, Human
aaagcacaauuuaacacaugccaa

SEQ ID NO: 849449 - RNA, 19 nt, Human
aaccacaggcuuauucauc

SEQ ID NO: 849450 - RNA, 22 nt, Human
aacuucccauuuccggcacuuu

SEQ ID NO: 849451 - RNA, 19 nt, Human
aagcacaauuuaacacaug

SEQ ID NO: 849452 - RNA, 21 nt, Human
aagccagaggccagccccgcu

SEQ ID NO: 849453 - RNA, 22 nt, Human
aagccagaggccagccccgcuc

SEQ ID NO: 849454 - RNA, 23 nt, Human
aaggacacacaggauuugggaca

SEQ ID NO: 849455 - RNA, 20 nt, Human
acauauggaagcacugggcc

SEQ ID NO: 849456 - RNA, 18 nt, Human
acugcaauucuuagaauc

SEQ ID NO: 849457 - RNA, 22 nt, Human
acuguccucuguggccgucagu

SEQ ID NO: 849458 - RNA, 20 nt, Human
agaccaaaaucauucuacaa

SEQ ID NO: 849459 - RNA, 22 nt, Human
agacgacaacaggagucaccuu

SEQ ID NO: 849460 - RNA, 19 nt, Human
agcuacuuuuuucucgagc

SEQ ID NO: 849461 - RNA, 24 nt, Human
aggaggcggcggcuagaccggcgg

SEQ ID NO: 849462 - RNA, 21 nt, Human
augguaacagcuuaccacgaa

SEQ ID NO: 849463 - RNA, 18 nt, Human
auuuccagugauaaugcc

SEQ ID NO: 849464 - RNA, 19 nt, Human
caaaacuacagcaggaacu

SEQ ID NO: 849465 - RNA, 21 nt, Human
caaaagguugcagagccagua

SEQ ID NO: 849466 - RNA, 23 nt, Human
cacagcccccccgcccgcccucu

SEQ ID NO: 849467 - RNA, 23 nt, Human
caccacugcaggacacccgagca

SEQ ID NO: 849468 - RNA, 24 nt, Human
cacgugcagcguugcagacaggau

SEQ ID NO: 849469 - RNA, 26 nt, Human
cagacccuugggaaaagcacuuggug

SEQ ID NO: 849470 - RNA, 20 nt, Human
cagagcuucaacaccacugc

SEQ ID NO: 849471 - RNA, 22 nt, Human
cagcacacagcauaaacugaua

SEQ ID NO: 849472 - RNA, 18 nt, Human
cagcccccccgcccgccc

SEQ ID NO: 849473 - RNA, 20 nt, Human
cagccgccuguaccagccug

SEQ ID NO: 849474 - RNA, 23 nt, Human
caguaaccccaguguuaucugca

SEQ ID NO: 849475 - RNA, 18 nt, Human
cauuuccagugauaaugc

SEQ ID NO: 849476 - RNA, 21 nt, Human
ccacugcaggacacccgagca

SEQ ID NO: 849477 - RNA, 21 nt, Human
ccagagcuucaacaccacugc

SEQ ID NO: 849478 - RNA, 25 nt, Human
cccacagcccccccgcccgcccucu

SEQ ID NO: 849479 - RNA, 19 nt, Human
ccccaaacacuaaaauagc

SEQ ID NO: 849480 - RNA, 22 nt, Human
cccccccgcccgcccucuccgc

SEQ ID NO: 849481 - RNA, 18 nt, Human
cccccgcccgcccucucc

SEQ ID NO: 849482 - RNA, 21 nt, Human
ccccgcucggauccuuucuca

SEQ ID NO: 849483 - RNA, 21 nt, Human
cccggcagcugacccucgccu

SEQ ID NO: 849484 - RNA, 22 nt, Human
ccggcacuuuuugauggcgugg

SEQ ID NO: 849485 - RNA, 22 nt, Human
ccggcgcucccacagccccccc

SEQ ID NO: 849486 - RNA, 23 nt, Human
ccucccagccagucucgccgccc

SEQ ID NO: 849487 - RNA, 19 nt, Human
ccuccgcgagcagccgccu

SEQ ID NO: 849488 - RNA, 20 nt, Human
ccugaaaacuucccauuucc

SEQ ID NO: 849489 - RNA, 27 nt, Human
cgaggcucuccuuugggggaggucccc

SEQ ID NO: 849490 - RNA, 22 nt, Human
cgccccagagcuucaacaccac

SEQ ID NO: 849491 - RNA, 22 nt, Human
cgcccgcccucuccgcgccgcg

SEQ ID NO: 849492 - RNA, 24 nt, Human
cgcucccacagcccccccgcccgc

SEQ ID NO: 849493 - RNA, 19 nt, Human
cggcgcucccacagccccc

SEQ ID NO: 849494 - RNA, 25 nt, Human
cgugcagcguugcagacaggaugga

SEQ ID NO: 849495 - RNA, 24 nt, Human
cuaaaauagcacauggcauaguaa

SEQ ID NO: 849496 - RNA, 18 nt, Human
cuaauucaaaagguugca

SEQ ID NO: 849497 - RNA, 20 nt, Human
cucccagccagucucgccgc

SEQ ID NO: 849498 - RNA, 19 nt, Human
cuccgcgccgcgucgcccc

SEQ ID NO: 849499 - RNA, 19 nt, Human
cugaggugcuuuuaagcau

SEQ ID NO: 849500 - RNA, 20 nt, Human
gaagccagaggccagccccg

SEQ ID NO: 849501 - RNA, 24 nt, Human
gacaacaggagucaccuugaaaaa

SEQ ID NO: 849502 - RNA, 21 nt, Human
gaccaucugaggugcuuuuaa

SEQ ID NO: 849503 - RNA, 21 nt, Human
gcagccgccuguaccagccug

SEQ ID NO: 849504 - RNA, 28 nt, Human
gcccugggcccuccucccagccagucuc

SEQ ID NO: 849505 - RNA, 25 nt, Human
gcggcuagaccggcgggcgggcggg

SEQ ID NO: 849506 - RNA, 18 nt, Human
gcggugggccugagguca

SEQ ID NO: 849507 - RNA, 19 nt, Human
gcucccacagcccccccgc

SEQ ID NO: 849508 - RNA, 24 nt, Human
ggcgcucccacagcccccccgccc

SEQ ID NO: 849509 - RNA, 19 nt, Human
ggcugcaugauaguuuguc

SEQ ID NO: 849510 - RNA, 27 nt, Human
uaaagcacaauuuaacacaugccaaaa

SEQ ID NO: 849511 - RNA, 22 nt, Human
uaacacaugccaaaaaaguucc

SEQ ID NO: 849512 - RNA, 24 nt, Human
uaagggcugcacaguuugcaucca

SEQ ID NO: 849513 - RNA, 18 nt, Human
uacuuuaagucugccagg

SEQ ID NO: 849514 - RNA, 23 nt, Human
uauugguauuguucugcuuguac

SEQ ID NO: 849515 - RNA, 25 nt, Human
uauuguuugcuuugaaaacaugggc

SEQ ID NO: 849516 - RNA, 19 nt, Human
ucaacaccacugcaggaca

SEQ ID NO: 849517 - RNA, 24 nt, Human
ucacuuugugaauuuccaucaacc

SEQ ID NO: 849518 - RNA, 19 nt, Human
ucaguggcccugggcccuc

SEQ ID NO: 849519 - RNA, 21 nt, Human
uccagacuuaaugcgaaagaa

SEQ ID NO: 849520 - RNA, 19 nt, Human
uccgcgccgcgucgccccg

SEQ ID NO: 849521 - RNA, 21 nt, Human
uccgcgccgcgucgccccggc

SEQ ID NO: 849522 - RNA, 22 nt, Human
uccgcgccgcgucgccccggca

SEQ ID NO: 849523 - RNA, 19 nt, Human
ucucuguaacugagcuacu

SEQ ID NO: 849524 - RNA, 19 nt, Human
ugaaaaauuuuaggguaca

SEQ ID NO: 849525 - RNA, 24 nt, Human
ugaaaacuucccauuuccggcacu

SEQ ID NO: 849526 - RNA, 22 nt, Human
ugaaaucgaauuuugcugcaga

SEQ ID NO: 849527 - RNA, 22 nt, Human
ugcgaaagaaaucauucuaaga

SEQ ID NO: 849528 - RNA, 19 nt, Human
ugcugcagaccaaaaucaa

SEQ ID NO: 849529 - RNA, 27 nt, Human
ugcugcagaccaaaaucauucuacaag

SEQ ID NO: 849530 - RNA, 18 nt, Human
uggagugcaggcaagcgg

SEQ ID NO: 849531 - RNA, 23 nt, Human
uggauuucuucuuacugauucuc

SEQ ID NO: 849532 - RNA, 23 nt, Human
uggcauaguaauucagcacacag

SEQ ID NO: 849533 - RNA, 20 nt, Human
uggcccugggcccuccuccc

SEQ ID NO: 849534 - RNA, 19 nt, Human
ugggaaauaacucgauuug

SEQ ID NO: 849535 - RNA, 24 nt, Human
uguaacugagcuacuuuuuucucg

SEQ ID NO: 849536 - RNA, 23 nt, Human
uguccgagucaccuccuccggcc

SEQ ID NO: 849537 - RNA, 18 nt, Human
ugugaagccagaggccag

SEQ ID NO: 849538 - RNA, 28 nt, Human
uuaaagcacaauuuaacaccaccuaggu

SEQ ID NO: 849539 - RNA, 24 nt, Human
uuaaggcugcaugauaguuugucc

SEQ ID NO: 849540 - RNA, 24 nt, Human
uuacugauucucucacauauggaa

SEQ ID NO: 849541 - RNA, 23 nt, Human
uucaacaccacugcaggacaccc

SEQ ID NO: 849542 - RNA, 21 nt, Human
uuccaacucagagcccagacc

SEQ ID NO: 849543 - RNA, 19 nt, Human
uuuuuuuuuuuuuuuuuaa

SEQ ID NO: 849544 - RNA, 18 nt, Human
agacagggucuugcuaug

SEQ ID NO: 849545 - RNA, 23 nt, Human
agacagggucuugcuauguugcc

SEQ ID NO: 849546 - RNA, 23 nt, Human
agauuacaggugggagccacugc

SEQ ID NO: 849547 - RNA, 20 nt, Human
aggagacagucuugcaucug

SEQ ID NO: 849548 - RNA, 24 nt, Human
aggagcccauuccccuucugucag

SEQ ID NO: 849549 - RNA, 24 nt, Human
agggcugagauuacaggugggagc

SEQ ID NO: 849550 - RNA, 20 nt, Human
agguggauggcaguguugag

SEQ ID NO: 849551 - RNA, 23 nt, Human
agucccaggaccugagggagcuc

SEQ ID NO: 849552 - RNA, 19 nt, Human
aguggugcugggacguggc

SEQ ID NO: 849553 - RNA, 25 nt, Human
aguuucaguuacauuauagagagag

SEQ ID NO: 849554 - RNA, 20 nt, Human
auguugcccaggcuggucuc

SEQ ID NO: 849555 - RNA, 19 nt, Human
cacaguucaggaccaggga

SEQ ID NO: 849556 - RNA, 24 nt, Human
cagggucuugcuauguugcccagg

SEQ ID NO: 849557 - RNA, 19 nt, Human
cauguccccgccuuagucc

SEQ ID NO: 849558 - RNA, 19 nt, Human
cauuccccuucugucagag

SEQ ID NO: 849559 - RNA, 19 nt, Human
ccacugcgcccagccagca

SEQ ID NO: 849560 - RNA, 26 nt, Human
cccagaagugagcuuggaaagggcgg

SEQ ID NO: 849561 - RNA, 20 nt, Human
ccgccaggagacagucuugc

SEQ ID NO: 849562 - RNA, 26 nt, Human
ccuuccaccucagccucgggaagggc

SEQ ID NO: 849563 - RNA, 24 nt, Human
cgggaagggcugagauuacaggug

SEQ ID NO: 849564 - RNA, 18 nt, Human
cucagucccagaagugag

SEQ ID NO: 849565 - RNA, 24 nt, Human
cucgagcaauccuuccaccucagc

SEQ ID NO: 849566 - RNA, 22 nt, Human
cucuggauugguggcuuggccc

SEQ ID NO: 849567 - RNA, 21 nt, Human
cuuccaccucagccucgggaa

SEQ ID NO: 849568 - RNA, 23 nt, Human
gaacaccuggccucgagcaaucc

SEQ ID NO: 849569 - RNA, 21 nt, Human
gagcccauuccccuucuguca

SEQ ID NO: 849570 - RNA, 18 nt, Human
gauuacaggugggagcca

SEQ ID NO: 849571 - RNA, 19 nt, Human
gauuacaggugggagccac

SEQ ID NO: 849572 - RNA, 20 nt, Human
gcagagugggcccugugcug

SEQ ID NO: 849573 - RNA, 19 nt, Human
gcccugugcugaggauggg

SEQ ID NO: 849574 - RNA, 24 nt, Human
gcuauguugcccaggcuggucucg

SEQ ID NO: 849575 - RNA, 23 nt, Human
ggaaagaaacacagaggcugccu

SEQ ID NO: 849576 - RNA, 21 nt, Human
ggcuggugcuugagacugguu

SEQ ID NO: 849577 - RNA, 22 nt, Human
ggggccgacuccaggccugagc

SEQ ID NO: 849578 - RNA, 24 nt, Human
gggggugguccgccaggagacagu

SEQ ID NO: 849579 - RNA, 19 nt, Human
gugguccgccaggagacag

SEQ ID NO: 849580 - RNA, 22 nt, Human
uagagacagggucuugcuaugu

SEQ ID NO: 849581 - RNA, 21 nt, Human
uauguugcccaggcuggucuc

SEQ ID NO: 849582 - RNA, 23 nt, Human
uauguugcccaggcuggucucga

SEQ ID NO: 849583 - RNA, 24 nt, Human
uauguugcccaggcuggucucgaa

SEQ ID NO: 849584 - RNA, 21 nt, Human
ucaauauaaauagagacaggg

SEQ ID NO: 849585 - RNA, 25 nt, Human
ucagucccagaagugagcuuggaaa

SEQ ID NO: 849586 - RNA, 19 nt, Human
uccaccucagccucgggaa

SEQ ID NO: 849587 - RNA, 25 nt, Human
uccggagcugaaguggugcugggac

SEQ ID NO: 849588 - RNA, 23 nt, Human
ucgaacaccuggccucgagcaau

SEQ ID NO: 849589 - RNA, 18 nt, Human
ucuugcuauguugcccag

SEQ ID NO: 849590 - RNA, 19 nt, Human
ucuugcuauguugcccagg

SEQ ID NO: 849591 - RNA, 23 nt, Human
ucuugcuauguugcccaggcugg

SEQ ID NO: 849592 - RNA, 24 nt, Human
ucuugcuauguugcccaggcuggu

SEQ ID NO: 849593 - RNA, 21 nt, Human
ugagauuacaggugggagcca

SEQ ID NO: 849594 - RNA, 22 nt, Human
ugagauuacaggugggagccac

SEQ ID NO: 849595 - RNA, 22 nt, Human
ugagauuacaggugggagccac

SEQ ID NO: 849596 - RNA, 24 nt, Human
ugagauuacaggugggagccacug

SEQ ID NO: 849597 - RNA, 19 nt, Human
ugagcuuggaaagggcggc

SEQ ID NO: 849598 - RNA, 22 nt, Human
ugaggaaacucagucccagaag

SEQ ID NO: 849599 - RNA, 24 nt, Human
ugcccaggcuggucucgaacaccu

SEQ ID NO: 849600 - RNA, 24 nt, Human
ugcuauguugcccaggcuggucuc

SEQ ID NO: 849601 - RNA, 24 nt, Human
ugcuccggagcugaaguggugcug

SEQ ID NO: 849602 - RNA, 26 nt, Human
uggcccagagccagguggauggcagg

SEQ ID NO: 849603 - RNA, 21 nt, Human
uggccucgagcaauccuucca

SEQ ID NO: 849604 - RNA, 19 nt, Human
ugggagccacugcgcccag

SEQ ID NO: 849605 - RNA, 21 nt, Human
ugggggccgacuccaggccug

SEQ ID NO: 849606 - RNA, 22 nt, Human
ugguuggcagagugggcccugu

SEQ ID NO: 849607 - RNA, 23 nt, Human
uuggcagagugggcccugugcug

SEQ ID NO: 849608 - RNA, 28 nt, Human
uuuucuuuuguuauuuuuauuuuucaau

SEQ ID NO: 849609 - RNA, 24 nt, Human
uuuuuuuuuuuucuuuuguuauuu

SEQ ID NO: 849610 - RNA, 27 nt, Human
uuuuuuuuuuuuuuuuuucuuuugggg

SEQ ID NO: 849611 - RNA, 24 nt, Human
uuuuuuuuuuuuuuuuuuucuuuu

SEQ ID NO: 849612 - RNA, 23 nt, Human
aaaaaaaugaagagaggcccagc

SEQ ID NO: 849613 - RNA, 25 nt, Human
aacugguuucuccaauuagccccca

SEQ ID NO: 849614 - RNA, 21 nt, Human
aagaaggccugagaucacgua

SEQ ID NO: 849615 - RNA, 18 nt, Human
aagcaaaaagauaaacug

SEQ ID NO: 849616 - RNA, 19 nt, Human
aaguggcccuucaaaaaaa

SEQ ID NO: 849617 - RNA, 22 nt, Human
acacaccuccagaucuggagcc

SEQ ID NO: 849618 - RNA, 20 nt, Human
agaagcagcacggaagcaac

SEQ ID NO: 849619 - RNA, 21 nt, Human
agcacggaagcaaccaaucaa

SEQ ID NO: 849620 - RNA, 20 nt, Human
agccaugaaagcacagcuga

SEQ ID NO: 849621 - RNA, 20 nt, Human
aggaccaauuaccuccaaac

SEQ ID NO: 849622 - RNA, 20 nt, Human
aggcaguuccaauuguugac

SEQ ID NO: 849623 - RNA, 22 nt, Human
agggcugcccagcuacucaggu

SEQ ID NO: 849624 - RNA, 22 nt, Human
agugauccaagaggcaguucca

SEQ ID NO: 849625 - RNA, 19 nt, Human
aguggcccuucaaaaaaau

SEQ ID NO: 849626 - RNA, 20 nt, Human
aucuggagccaccuucuucc

SEQ ID NO: 849627 - RNA, 19 nt, Human
caaaaaaaauaagcaaaaa

SEQ ID NO: 849628 - RNA, 21 nt, Human
caacccaguagaaaaaugaau

SEQ ID NO: 849629 - RNA, 23 nt, Human
caagggcugcccagcuacucagg

SEQ ID NO: 849630 - RNA, 19 nt, Human
caauaggcacacgagaucc

SEQ ID NO: 849631 - RNA, 22 nt, Human
cacaccuccagaucuggagcca

SEQ ID NO: 849632 - RNA, 19 nt, Human
cagccaugaaagcacagcu

SEQ ID NO: 849633 - RNA, 25 nt, Human
caucaaggggcguucccaucugggg

SEQ ID NO: 849634 - RNA, 22 nt, Human
caucucucuucgcacaguguuc

SEQ ID NO: 849635 - RNA, 24 nt, Human
ccacgccggcagcaccaaggccuc

SEQ ID NO: 849636 - RNA, 25 nt, Human
ccagaacagaaaacacaaguggccc

SEQ ID NO: 849637 - RNA, 18 nt, Human
cccccaucucucuucgca

SEQ ID NO: 849638 - RNA, 20 nt, Human
ccggcagcaccaaggccucu

SEQ ID NO: 849639 - RNA, 23 nt, Human
ccuccaaacauaaacagcuccua

SEQ ID NO: 849640 - RNA, 18 nt, Human
ccuugucacccuccgcag

SEQ ID NO: 849641 - RNA, 24 nt, Human
cgcacaguguuccaucauccagcc

SEQ ID NO: 849642 - RNA, 21 nt, Human
cggcagcaccaaggccucugg

SEQ ID NO: 849643 - RNA, 21 nt, Human
cuccuccagcaaagacaauuu

SEQ ID NO: 849644 - RNA, 22 nt, Human
cucuuccuagaguucccuuaaa

SEQ ID NO: 849645 - RNA, 20 nt, Human
cuggcuuagacccugccaag

SEQ ID NO: 849646 - RNA, 21 nt, Human
cuucaaaaaaaugaagagagg

SEQ ID NO: 849647 - RNA, 19 nt, Human
gaaacaugcagagcaggga

SEQ ID NO: 849648 - RNA, 18 nt, Human
gaggauguacuaagcaug

SEQ ID NO: 849649 - RNA, 24 nt, Human
gcagcacggaagcaaccaaucaac

SEQ ID NO: 849650 - RNA, 23 nt, Human
gcucgcugcccugccucuuugcg

SEQ ID NO: 849651 - RNA, 24 nt, Human
gcugagugauccaagaggcaguuc

SEQ ID NO: 849652 - RNA, 18 nt, Human
ggaagcaaccaaucaacu

SEQ ID NO: 849653 - RNA, 21 nt, Human
ggauguacuaagcaugaagcg

SEQ ID NO: 849654 - RNA, 18 nt, Human
ggccucuuccuagaguuc

SEQ ID NO: 849655 - RNA, 18 nt, Human
ggcugcccagcuacucag

SEQ ID NO: 849656 - RNA, 18 nt, Human
gggcaagagcuaauugug

SEQ ID NO: 849657 - RNA, 24 nt, Human
uaaaaagucaaaaaaaauaagcaa

SEQ ID NO: 849658 - RNA, 21 nt, Human
uaagcaugaagcgcuacuucc

SEQ ID NO: 849659 - RNA, 18 nt, Human
uacaauaaaaagucaaaa

SEQ ID NO: 849660 - RNA, 22 nt, Human
uaccuccaaacauaaacagcuc

SEQ ID NO: 849661 - RNA, 18 nt, Human
uagaaauuacugcaaaga

SEQ ID NO: 849662 - RNA, 21 nt, Human
uccccacgccggcagcaccaa

SEQ ID NO: 849663 - RNA, 19 nt, Human
uccuaugggaacucaggcc

SEQ ID NO: 849664 - RNA, 19 nt, Human
ucuggagccaccuucuucc

SEQ ID NO: 849665 - RNA, 23 nt, Human
ugaagagaggcccagccucuuau

SEQ ID NO: 849666 - RNA, 19 nt, Human
ugaagcgcuacuuccuggc

SEQ ID NO: 849667 - RNA, 24 nt, Human
ugaaguucccagaacagaaaacac

SEQ ID NO: 849668 - RNA, 19 nt, Human
ugaguacgguuuucuccuc

SEQ ID NO: 849669 - RNA, 21 nt, Human
ugagugauccaagaggcaguu

SEQ ID NO: 849670 - RNA, 21 nt, Human
ugccaagggcugcccagcuac

SEQ ID NO: 849671 - RNA, 24 nt, Human
uggaaaauaagacuuacaucucau

SEQ ID NO: 849672 - RNA, 19 nt, Human
uggacaaaggaccaauuac

SEQ ID NO: 849673 - RNA, 24 nt, Human
uggcgugggguaggggcaagagcu

SEQ ID NO: 849674 - RNA, 18 nt, Human
uggcugaguacgguuuuc

SEQ ID NO: 849675 - RNA, 22 nt, Human
ugguuucuccaauuagccccca

SEQ ID NO: 849676 - RNA, 23 nt, Human
uguccugaucuuuuggcugagua

SEQ ID NO: 849677 - RNA, 25 nt, Human
uucaaacuucacaccuaaggaaaau

SEQ ID NO: 849678 - RNA, 24 nt, Human
uucaaaguaguggcuuucaaaauu

SEQ ID NO: 849679 - RNA, 18 nt, Human
uuuaaaaaccuaggccuc

SEQ ID NO: 849680 - RNA, 19 nt, Human
aaaauuuuuggcagucaca

SEQ ID NO: 849681 - RNA, 21 nt, Human
aaacaaauggaaucuauccac

SEQ ID NO: 849682 - RNA, 22 nt, Human
aaagaacucaauuccaaaggau

SEQ ID NO: 849683 - RNA, 21 nt, Human
aaccauccuggaacucaggcc

SEQ ID NO: 849684 - RNA, 26 nt, Human
aacuucagaaaggcaucucuuggcac

SEQ ID NO: 849685 - RNA, 20 nt, Human
aagcagagcuuaaaaacaaa

SEQ ID NO: 849686 - RNA, 22 nt, Human
aagcucuaacacaaagcagagc

SEQ ID NO: 849687 - RNA, 22 nt, Human
acaaagcagagcuuaaaaacaa

SEQ ID NO: 849688 - RNA, 19 nt, Human
acagugaaauaccugcagg

SEQ ID NO: 849689 - RNA, 19 nt, Human
aggaggcuaccaaagccaa

SEQ ID NO: 849690 - RNA, 22 nt, Human
aggaggcuaccaaagccaaggc

SEQ ID NO: 849691 - RNA, 19 nt, Human
aggcaguguggcugugugg

SEQ ID NO: 849692 - RNA, 23 nt, Human
aggcaguguggcuguguggaggg

SEQ ID NO: 849693 - RNA, 23 nt, Human
aggcucuuaacauauugagguuc

SEQ ID NO: 849694 - RNA, 27 nt, Human
aguaaacagugaaauaccugcaggcaa

SEQ ID NO: 849695 - RNA, 24 nt, Human
aucaaacccgguuggggcgaccag

SEQ ID NO: 849696 - RNA, 25 nt, Human
caagaaaaaaccauccuggaacuca

SEQ ID NO: 849697 - RNA, 18 nt, Human
cacggcuuuuaucaguuu

SEQ ID NO: 849698 - RNA, 20 nt, Human
caggaggcuaccaaagccaa

SEQ ID NO: 849699 - RNA, 22 nt, Human
cauauauucuaaacauacaucc

SEQ ID NO: 849700 - RNA, 23 nt, Human
cccaagaaaaaaccauccuggaa

SEQ ID NO: 849701 - RNA, 20 nt, Human
cccuuaagauccuaaaacag

SEQ ID NO: 849702 - RNA, 20 nt, Human
ccggagccucaccuccuccc

SEQ ID NO: 849703 - RNA, 22 nt, Human
ccucccgccucgcagcucaggc

SEQ ID NO: 849704 - RNA, 22 nt, Human
ccugcaggcaaccaugucuaaa

SEQ ID NO: 849705 - RNA, 20 nt, Human
ccugcaggcaaccaugucuu

SEQ ID NO: 849706 - RNA, 20 nt, Human
ccugcgcgcgccgagggccg

SEQ ID NO: 849707 - RNA, 24 nt, Human
cgagcugcggagagaccgcggccc

SEQ ID NO: 849708 - RNA, 23 nt, Human
cucaccuuucacaaaauucuacc

SEQ ID NO: 849709 - RNA, 22 nt, Human
cuccggggcccggaaggagcgg

SEQ ID NO: 849710 - RNA, 21 nt, Human
cugccaggaggcuaccaaagc

SEQ ID NO: 849711 - RNA, 24 nt, Human
gaaaaaaccauccuggaacucagg

SEQ ID NO: 849712 - RNA, 18 nt, Human
gagcgggcgcagcgcggu

SEQ ID NO: 849713 - RNA, 19 nt, Human
gccggagccucaccuccuc

SEQ ID NO: 849714 - RNA, 18 nt, Human
gcgccggagccucaccuc

SEQ ID NO: 849715 - RNA, 26 nt, Human
gcugcggagagaccgcggcccccaaa

SEQ ID NO: 849716 - RNA, 19 nt, Human
ggaaggagcgggcgcagcg

SEQ ID NO: 849717 - RNA, 23 nt, Human
ggagccucaccuccucccgccuc

SEQ ID NO: 849718 - RNA, 19 nt, Human
ggcccggaaggagcgggcg

SEQ ID NO: 849719 - RNA, 21 nt, Human
uaacaacaguaaacagugaaa

SEQ ID NO: 849720 - RNA, 18 nt, Human
uaacacaaagcagagcuu

SEQ ID NO: 849721 - RNA, 24 nt, Human
uaagauccuaaaacagucauauca

SEQ ID NO: 849722 - RNA, 23 nt, Human
uaaucaguguucaaaugcacccu

SEQ ID NO: 849723 - RNA, 22 nt, Human
uaccaaagccaaggcucuuaac

SEQ ID NO: 849724 - RNA, 23 nt, Human
uauaaucaguguucaaaugcacc

SEQ ID NO: 849725 - RNA, 18 nt, Human
uauaucucuaacaacagu

SEQ ID NO: 849726 - RNA, 23 nt, Human
ucaaggaaacaaauggaaucuau

SEQ ID NO: 849727 - RNA, 25 nt, Human
ucaggcgggccaugugacccgcgag

SEQ ID NO: 849728 - RNA, 21 nt, Human
uccccugcgcgcgccgagggc

SEQ ID NO: 849729 - RNA, 23 nt, Human
uccccugcgcgcgccgagggccg

SEQ ID NO: 849730 - RNA, 19 nt, Human
ucugguauugcccaggcug

SEQ ID NO: 849731 - RNA, 18 nt, Human
ugagaaagaacucaauuc

SEQ ID NO: 849732 - RNA, 20 nt, Human
ugagaaagaacucaauucca

SEQ ID NO: 849733 - RNA, 22 nt, Human
uggcaaacugcugcuccugcca

SEQ ID NO: 849734 - RNA, 20 nt, Human
ugggucagacugcaugaggc

SEQ ID NO: 849735 - RNA, 24 nt, Human
uguggcuguguggagggagagguc

SEQ ID NO: 849736 - RNA, 24 nt, Human
uuuuuuuuuuuuuuuuuuuccaag

SEQ ID NO: 849737 - RNA, 24 nt, Human
aaaaaggaccaucccccauacaaa

SEQ ID NO: 849738 - RNA, 22 nt, Human
aaacaccaucuccccagcuguc

SEQ ID NO: 849739 - RNA, 20 nt, Human
aaagaaccaauuucacaaac

SEQ ID NO: 849740 - RNA, 18 nt, Human
aaaugcuagaguuguacu

SEQ ID NO: 849741 - RNA, 19 nt, Human
aacacaguggaaccaauuc

SEQ ID NO: 849742 - RNA, 21 nt, Human
aacacaguggaaccaauuccu

SEQ ID NO: 849743 - RNA, 20 nt, Human
aauuuccgaucccaauucuc

SEQ ID NO: 849744 - RNA, 18 nt, Human
agaguacaacgucacugu

SEQ ID NO: 849745 - RNA, 19 nt, Human
aggaagccacugaggcggc

SEQ ID NO: 849746 - RNA, 19 nt, Human
agggaugaggccguccugc

SEQ ID NO: 849747 - RNA, 22 nt, Human
agggcacugagaucucuacauu

SEQ ID NO: 849748 - RNA, 21 nt, Human
aguggccuugcagugcagaau

SEQ ID NO: 849749 - RNA, 20 nt, Human
auggugcugucguguuggag

SEQ ID NO: 849750 - RNA, 22 nt, Human
auuggggcaaaggccggggcca

SEQ ID NO: 849751 - RNA, 23 nt, Human
cacucuaaagggugaaauggcuc

SEQ ID NO: 849752 - RNA, 19 nt, Human
cagugacaccuccacuucc

SEQ ID NO: 849753 - RNA, 19 nt, Human
caucugaacuugacugacu

SEQ ID NO: 849754 - RNA, 18 nt, Human
caugucccccacuagcac

SEQ ID NO: 849755 - RNA, 21 nt, Human
ccagaaucgcucgaaacacag

SEQ ID NO: 849756 - RNA, 20 nt, Human
ccagauccaaacauccugcc

SEQ ID NO: 849757 - RNA, 21 nt, Human
ccagcugucuuacagcuacca

SEQ ID NO: 849758 - RNA, 23 nt, Human
cccaagauaaauacuuuuugcuc

SEQ ID NO: 849759 - RNA, 18 nt, Human
cccacacaagauuggggc

SEQ ID NO: 849760 - RNA, 25 nt, Human
cccauaacucuuaagaaaaaaaaag

SEQ ID NO: 849761 - RNA, 25 nt, Human
cccccauacaaagaaccaauuucac

SEQ ID NO: 849762 - RNA, 21 nt, Human
ccuacacugcaauauccuaaa

SEQ ID NO: 849763 - RNA, 22 nt, Human
ccuacacugcaauauccuaaac

SEQ ID NO: 849764 - RNA, 19 nt, Human
ccucacacuacugcucuga

SEQ ID NO: 849765 - RNA, 19 nt, Human
ccucugacauucacacucc

SEQ ID NO: 849766 - RNA, 20 nt, Human
ccugcccaacauuguauuug

SEQ ID NO: 849767 - RNA, 23 nt, Human
cuaauggaaccauuuggggaugc

SEQ ID NO: 849768 - RNA, 24 nt, Human
cuaauggaaccauuuggggaugcu

SEQ ID NO: 849769 - RNA, 22 nt, Human
cucacaaugaagaagaguggcc

SEQ ID NO: 849770 - RNA, 21 nt, Human
cuccaagcuuccucacacuac

SEQ ID NO: 849771 - RNA, 21 nt, Human
cucugccaccucauacucucc

SEQ ID NO: 849772 - RNA, 18 nt, Human
cugcaauauccuaaacau

SEQ ID NO: 849773 - RNA, 24 nt, Human
cuucgucuaucucuugaucucuca

SEQ ID NO: 849774 - RNA, 23 nt, Human
cuucugaaaagaccuagcugugu

SEQ ID NO: 849775 - RNA, 24 nt, Human
gaaccaauuucacaaaccuacugg

SEQ ID NO: 849776 - RNA, 20 nt, Human
gaaccuguagucccccuucg

SEQ ID NO: 849777 - RNA, 22 nt, Human
gcacugcuaauggaaccauuug

SEQ ID NO: 849778 - RNA, 23 nt, Human
gcucgaaacacaguggaaccaau

SEQ ID NO: 849779 - RNA, 21 nt, Human
gcuuuuugaggacgcggacug

SEQ ID NO: 849780 - RNA, 20 nt, Human
ggaaccauuuggggaugcuu

SEQ ID NO: 849781 - RNA, 21 nt, Human
ggaagccacugaggcggcugc

SEQ ID NO: 849782 - RNA, 19 nt, Human
gggcaaaggccggggccag

SEQ ID NO: 849783 - RNA, 19 nt, Human
gggcacugagaucucuaca

SEQ ID NO: 849784 - RNA, 23 nt, Human
gggcacugagaucucuacauuua

SEQ ID NO: 849785 - RNA, 18 nt, Human
guccugccaucccacucc

SEQ ID NO: 849786 - RNA, 23 nt, Human
uaaaaauggaugggucuacaaca

SEQ ID NO: 849787 - RNA, 23 nt, Human
uaaaccaccucugacauucacac

SEQ ID NO: 849788 - RNA, 22 nt, Human
uaaaugaagagcaaacacuuca

SEQ ID NO: 849789 - RNA, 27 nt, Human
uaacucucgaaccuguagucccccuuu

SEQ ID NO: 849790 - RNA, 27 nt, Human
uaagaaaaaaaaagcauuaguaaauaa

SEQ ID NO: 849791 - RNA, 24 nt, Human
uaaggcagacuggauaauaaacca

SEQ ID NO: 849792 - RNA, 20 nt, Human
uacaacgucacugugaagag

SEQ ID NO: 849793 - RNA, 19 nt, Human
uacucuccuuucucauugg

SEQ ID NO: 849794 - RNA, 21 nt, Human
uaguaaaugaagagcaaacac

SEQ ID NO: 849795 - RNA, 21 nt, Human
uauacaaacaccaucucccca

SEQ ID NO: 849796 - RNA, 24 nt, Human
uaugugcaucucacaaugaagaag

SEQ ID NO: 849797 - RNA, 24 nt, Human
ucaacuccuccuuuagcaauacgc

SEQ ID NO: 849798 - RNA, 24 nt, Human
ucauugggucguguaaaguuaugu

SEQ ID NO: 849799 - RNA, 21 nt, Human
uccaccacuucugaaaagacc

SEQ ID NO: 849800 - RNA, 21 nt, Human
uccucacacuacugcucugaa

SEQ ID NO: 849801 - RNA, 24 nt, Human
ucgaaacacaguggaaccaauucc

SEQ ID NO: 849802 - RNA, 21 nt, Human
ucugcugcuguucccagcacu

SEQ ID NO: 849803 - RNA, 19 nt, Human
ucuggagauaacugaacug

SEQ ID NO: 849804 - RNA, 20 nt, Human
ucuggagauaacugaacuga

SEQ ID NO: 849805 - RNA, 19 nt, Human
ucugugaacagauuaaggg

SEQ ID NO: 849806 - RNA, 19 nt, Human
ugaaaaaggaccauccccc

SEQ ID NO: 849807 - RNA, 22 nt, Human
ugaaaagaccuagcugugugaa

SEQ ID NO: 849808 - RNA, 24 nt, Human
ugaaaagaccuagcugugugaaaa

SEQ ID NO: 849809 - RNA, 19 nt, Human
ugaaagcacacauguagca

SEQ ID NO: 849810 - RNA, 19 nt, Human
ugaacagauuaaggguaag

SEQ ID NO: 849811 - RNA, 21 nt, Human
ugaagaagaguggccuugcag

SEQ ID NO: 849812 - RNA, 23 nt, Human
ugagaugaaucucgugaucuguc

SEQ ID NO: 849813 - RNA, 20 nt, Human
ugaggagaguacaacgucac

SEQ ID NO: 849814 - RNA, 25 nt, Human
ugcagaaugaggagaguacaacguc

SEQ ID NO: 849815 - RNA, 20 nt, Human
ugcuuggacgagaggaacug

SEQ ID NO: 849816 - RNA, 21 nt, Human
uggaaccaauucccucugcca

SEQ ID NO: 849817 - RNA, 21 nt, Human
uggacgagaggaacugugauc

SEQ ID NO: 849818 - RNA, 20 nt, Human
uggaguuaccaucauaggga

SEQ ID NO: 849819 - RNA, 23 nt, Human
ugugcaguaaaaauggauggguc

SEQ ID NO: 849820 - RNA, 24 nt, Human
uguuaugugcaucucacaaugaag

SEQ ID NO: 849821 - RNA, 22 nt, Human
uuaaaaaagccuacacugcaau

SEQ ID NO: 849822 - RNA, 23 nt, Human
uuaaaaaagccuacacugcaaua

SEQ ID NO: 849823 - RNA, 18 nt, Human
uucaggaauagauaugcc

SEQ ID NO: 849824 - RNA, 19 nt, Human
uuccucacacuacugcucu

SEQ ID NO: 849825 - RNA, 19 nt, Human
uucucuggaucacuggagu

SEQ ID NO: 849826 - RNA, 24 nt, Human
uuggcugugcaguaaaaauggaug

SEQ ID NO: 849827 - RNA, 25 nt, Human
uuggggcaaaggccggggccaguga

SEQ ID NO: 849828 - RNA, 23 nt, Human
uuguacucauuuaaaaaaaaacc

SEQ ID NO: 849829 - RNA, 25 nt, Human
uuucacaaaccuacugguaaacaaa

SEQ ID NO: 849830 - RNA, 21 nt, Human
uuuccauuuaaccaccauuua

SEQ ID NO: 849831 - RNA, 18 nt, Human
uuugauaacucaugcauu

SEQ ID NO: 849832 - RNA, 23 nt, Human
uuuugguguggucaacuccuccu

SEQ ID NO: 849833 - RNA, 20 nt, Human
uuuuuuuuuuaaaacaaugg

SEQ ID NO: 849834 - RNA, 25 nt, Human
aaaagcacuugucagacgagagcuc

SEQ ID NO: 849835 - RNA, 21 nt, Human
aagaaagaaagaaagaaagaa

SEQ ID NO: 849836 - RNA, 23 nt, Human
aagcaaaagcacuugucagacga

SEQ ID NO: 849837 - RNA, 24 nt, Human
aagggucucauucuguugcccagg

SEQ ID NO: 849838 - RNA, 18 nt, Human
acagaggccucucagaau

SEQ ID NO: 849839 - RNA, 26 nt, Human
auaccacccaaaagcugagaaacaga

SEQ ID NO: 849840 - RNA, 18 nt, Human
auucuguugcccaggcug

SEQ ID NO: 849841 - RNA, 24 nt, Human
auucuguugcccaggcuggaguga

SEQ ID NO: 849842 - RNA, 25 nt, Human
caaaaaagaaagaaagaaagaaaaa

SEQ ID NO: 849843 - RNA, 24 nt, Human
cacauggaaucagaauucugggca

SEQ ID NO: 849844 - RNA, 26 nt, Human
cacucuaaauaaacaaagcacuauaa

SEQ ID NO: 849845 - RNA, 20 nt, Human
cagacgagagcucugacucu

SEQ ID NO: 849846 - RNA, 18 nt, Human
cagccccugaaagagagg

SEQ ID NO: 849847 - RNA, 21 nt, Human
cagccccugaaagagagggag

SEQ ID NO: 849848 - RNA, 18 nt, Human
caggcagccccugaaaga

SEQ ID NO: 849849 - RNA, 24 nt, Human
cauucuguugcccaggcuggagug

SEQ ID NO: 849850 - RNA, 22 nt, Human
ccaccacccguggugcgcccug

SEQ ID NO: 849851 - RNA, 25 nt, Human
ccacccaaaagcugagaaacagagg

SEQ ID NO: 849852 - RNA, 24 nt, Human
cccccucccacaauggcugagucc

SEQ ID NO: 849853 - RNA, 20 nt, Human
ccguggugcgcccuggcccu

SEQ ID NO: 849854 - RNA, 20 nt, Human
cgcccuggcccuauuucaac

SEQ ID NO: 849855 - RNA, 22 nt, Human
cgcccuggcccuauuucaaccc

SEQ ID NO: 849856 - RNA, 21 nt, Human
cguggagaauuaaagaggcca

SEQ ID NO: 849857 - RNA, 24 nt, Human
cucauucuguugcccaggcuggag

SEQ ID NO: 849858 - RNA, 19 nt, Human
cuccauggaucaugugcac

SEQ ID NO: 849859 - RNA, 25 nt, Human
cugacucugacuccauggaucaugu

SEQ ID NO: 849860 - RNA, 19 nt, Human
cuguugcccaggcuggagu

SEQ ID NO: 849861 - RNA, 18 nt, Human
gagcacuuagcuuugcgg

SEQ ID NO: 849862 - RNA, 19 nt, Human
gagccugcccucaccagcc

SEQ ID NO: 849863 - RNA, 24 nt, Human
gcuggagugagauucugucuccuc

SEQ ID NO: 849864 - RNA, 21 nt, Human
uauuucaacccuacuuccuau

SEQ ID NO: 849865 - RNA, 23 nt, Human
uccaaaaaagaaagaaagaaaga

SEQ ID NO: 849866 - RNA, 23 nt, Human
ucucauucuguugcccaggcugg

SEQ ID NO: 849867 - RNA, 24 nt, Human
ucucauucuguugcccaggcugga

SEQ ID NO: 849868 - RNA, 24 nt, Human
ucugucuccaaaaaagaaagaaag

SEQ ID NO: 849869 - RNA, 18 nt, Human
ucuguugcccaggcugga

SEQ ID NO: 849870 - RNA, 22 nt, Human
ucuguugcccaggcuggaguga

SEQ ID NO: 849871 - RNA, 19 nt, Human
ugaaagagagggaggugcc

SEQ ID NO: 849872 - RNA, 22 nt, Human
ugaggucauucuucacucacug

SEQ ID NO: 849873 - RNA, 24 nt, Human
ugaggucauucuucacucacuguu

SEQ ID NO: 849874 - RNA, 24 nt, Human
ugcccaggcuggagugagauucug

SEQ ID NO: 849875 - RNA, 18 nt, Human
uggaaucagaauucuggg

SEQ ID NO: 849876 - RNA, 21 nt, Human
uggagugagauucugucucca

SEQ ID NO: 849877 - RNA, 22 nt, Human
uugcccaggcuggagugagauu

SEQ ID NO: 849878 - RNA, 22 nt, Human
uuuuuuuuuuugcggaaggguc

SEQ ID NO: 849879 - RNA, 26 nt, Human
uuuuuuuuuuuugcggaagggucuca

SEQ ID NO: 849880 - RNA, 19 nt, Human
uuuuuuuuuuuuuugcgga

SEQ ID NO: 849881 - RNA, 18 nt, Human
uuuuuuuuuuuuuuuuug

SEQ ID NO: 849882 - RNA, 21 nt, Human
uuuuuuuuuuuuuuuuugcgg

SEQ ID NO: 849883 - RNA, 20 nt, Human
aagcgcagaagccagcgacc

SEQ ID NO: 849884 - RNA, 21 nt, Human
agacuuuccggaucccugagg

SEQ ID NO: 849885 - RNA, 26 nt, Human
aggcgccaggagcaggcaggugggag

SEQ ID NO: 849886 - RNA, 21 nt, Human
aggcggcaguauguaugagga

SEQ ID NO: 849887 - RNA, 21 nt, Human
caaccguguccagcccagaau

SEQ ID NO: 849888 - RNA, 21 nt, Human
caacgcagcggcgagcgggag

SEQ ID NO: 849889 - RNA, 23 nt, Human
cacugcacacaccgggcugcgcg

SEQ ID NO: 849890 - RNA, 18 nt, Human
cagaagccagcgaccugg

SEQ ID NO: 849891 - RNA, 20 nt, Human
cagaagccagcgaccuggag

SEQ ID NO: 849892 - RNA, 21 nt, Human
cagucaaugugcagcaaaccc

SEQ ID NO: 849893 - RNA, 23 nt, Human
ccacaaccguguccagcccagaa

SEQ ID NO: 849894 - RNA, 19 nt, Human
ccacacguggccaaaggaa

SEQ ID NO: 849895 - RNA, 20 nt, Human
ccacugcacacaccgggcug

SEQ ID NO: 849896 - RNA, 22 nt, Human
cccaccgccgucggcccugccu

SEQ ID NO: 849897 - RNA, 19 nt, Human
cccugaggccacugcacac

SEQ ID NO: 849898 - RNA, 20 nt, Human
ccguguccagcccagaauca

SEQ ID NO: 849899 - RNA, 20 nt, Human
ccuccaguugcgggagcgag

SEQ ID NO: 849900 - RNA, 18 nt, Human
cggaucccugaggccacu

SEQ ID NO: 849901 - RNA, 24 nt, Human
cggaucccugaggccacugcacac

SEQ ID NO: 849902 - RNA, 19 nt, Human
cggcccugccuccucugcc

SEQ ID NO: 849903 - RNA, 20 nt, Human
cggucccaacgcagcggcga

SEQ ID NO: 849904 - RNA, 18 nt, Human
cuccucugccgugccucc

SEQ ID NO: 849905 - RNA, 19 nt, Human
cugccuccucugccgugcc

SEQ ID NO: 849906 - RNA, 19 nt, Human
cugccuccucugccgugcc

SEQ ID NO: 849907 - RNA, 20 nt, Human
cugccuccucugccgugccu

SEQ ID NO: 849908 - RNA, 19 nt, Human
cuuuccggaucccugaggc

SEQ ID NO: 849909 - RNA, 21 nt, Human
gagccugcgcaacgcaccgcc

SEQ ID NO: 849910 - RNA, 20 nt, Human
gcaggcaggugggagggaaa

SEQ ID NO: 849911 - RNA, 19 nt, Human
gcagggcagaaacccugcc

SEQ ID NO: 849912 - RNA, 19 nt, Human
gcccugccuccucugccgu

SEQ ID NO: 849913 - RNA, 23 nt, Human
gccugcgcaacgcaccgcccacc

SEQ ID NO: 849914 - RNA, 22 nt, Human
gcgcagaagccagcgaccugga

SEQ ID NO: 849915 - RNA, 18 nt, Human
gcgccaggagcaggcagg

SEQ ID NO: 849916 - RNA, 28 nt, Human
ggcgccaggagcaggcaggugggaggga

SEQ ID NO: 849917 - RNA, 24 nt, Human
gggaaaguguucggcagggcagaa

SEQ ID NO: 849918 - RNA, 21 nt, Human
uccacaaccguguccagccca

SEQ ID NO: 849919 - RNA, 24 nt, Human
uccacaaccguguccagcccagaa

SEQ ID NO: 849920 - RNA, 24 nt, Human
uccagcccagaaucaggaccccca

SEQ ID NO: 849921 - RNA, 23 nt, Human
ucccugaggccacugcacacacc

SEQ ID NO: 849922 - RNA, 22 nt, Human
uccuagacuuuccggaucccug

SEQ ID NO: 849923 - RNA, 21 nt, Human
ucucuggauccacaaccgugu

SEQ ID NO: 849924 - RNA, 24 nt, Human
uggauccacaaccguguccagccc

SEQ ID NO: 849925 - RNA, 22 nt, Human
uggccaaaggacagcacccaga

SEQ ID NO: 849926 - RNA, 19 nt, Human
uuacuggauguuaggagaa

SEQ ID NO: 849927 - RNA, 18 nt, Human
uuuuuuuuuuuuuuccug

SEQ ID NO: 849928 - RNA, 21 nt, Human
aaacacguggcagccccaggc

SEQ ID NO: 849929 - RNA, 23 nt, Human
cagggcacaguggcugugguccc

SEQ ID NO: 849930 - RNA, 20 nt, Human
ggcccagcaggaaacggcag

SEQ ID NO: 849931 - RNA, 18 nt, Human
gucccuucuucagggcuc

SEQ ID NO: 849932 - RNA, 22 nt, Human
uaugcaggggcccagcaggaaa

SEQ ID NO: 849933 - RNA, 23 nt, Human
uggcagccccaggcucaggggca

SEQ ID NO: 849934 - RNA, 18 nt, Human
uucagggcuccaagucac

SEQ ID NO: 849935 - RNA, 27 nt, Human
uuuuuuuuuuuuuuuuuuuuuuugggg

SEQ ID NO: 849936 - RNA, 26 nt, Human
aaaaaaaaaaaccugaaaacagaaaa

SEQ ID NO: 849937 - RNA, 21 nt, Human
aaaaaggcauuuuaaacaaaa

SEQ ID NO: 849938 - RNA, 22 nt, Human
aaaacaaaacaaaaaacaaaaa

SEQ ID NO: 849939 - RNA, 26 nt, Human
aaaacaaaacaaaaaacaaaaaaccc

SEQ ID NO: 849940 - RNA, 24 nt, Human
aaacaaaaaacaaaaaacccugaa

SEQ ID NO: 849941 - RNA, 21 nt, Human
aaagugcugggauuauuaugg

SEQ ID NO: 849942 - RNA, 23 nt, Human
aacccugaaaauaugagcccagg

SEQ ID NO: 849943 - RNA, 24 nt, Human
aaccucaggugaucugcucaccuc

SEQ ID NO: 849944 - RNA, 19 nt, Human
aaccugaaaacagaaaaga

SEQ ID NO: 849945 - RNA, 22 nt, Human
aaggcauuuuaaacaaaaauuc

SEQ ID NO: 849946 - RNA, 23 nt, Human
aagugcugggauuauuaugggcc

SEQ ID NO: 849947 - RNA, 20 nt, Human
aaugagccaauacugcaccu

SEQ ID NO: 849948 - RNA, 20 nt, Human
acaaaacaaaaaacaaaaaa

SEQ ID NO: 849949 - RNA, 21 nt, Human
acaaaacaaaaaacaaaaaac

SEQ ID NO: 849950 - RNA, 24 nt, Human
acaaaacaaaaaacaaaaaacccu

SEQ ID NO: 849951 - RNA, 23 nt, Human
acagagcaagacucugucucaaa

SEQ ID NO: 849952 - RNA, 24 nt, Human
acagagcaagacucugucucaaaa

SEQ ID NO: 849953 - RNA, 18 nt, Human
acagauguccgccaccau

SEQ ID NO: 849954 - RNA, 24 nt, Human
acccugaaaauaugagcccaggag

SEQ ID NO: 849955 - RNA, 25 nt, Human
acccugaaaauaugagcccaggagu

SEQ ID NO: 849956 - RNA, 18 nt, Human
acgggguuucaucguguu

SEQ ID NO: 849957 - RNA, 23 nt, Human
acgggguuucaucguguuggcca

SEQ ID NO: 849958 - RNA, 24 nt, Human
acgggguuucaucguguuggccag

SEQ ID NO: 849959 - RNA, 22 nt, Human
acugcaaccuccaccucccagg

SEQ ID NO: 849960 - RNA, 21 nt, Human
acugcaccuuugugcuucugc

SEQ ID NO: 849961 - RNA, 24 nt, Human
acugcacuacugccugggcaacag

SEQ ID NO: 849962 - RNA, 26 nt, Human
agaaaaaaaaaaaccugaaaacagaa

SEQ ID NO: 849963 - RNA, 21 nt, Human
agaguccuucucauuccaccu

SEQ ID NO: 849964 - RNA, 18 nt, Human
agccacugugcccagccc

SEQ ID NO: 849965 - RNA, 19 nt, Human
agccacugugcccagccca

SEQ ID NO: 849966 - RNA, 24 nt, Human
aggugaucugcucaccucggccuc

SEQ ID NO: 849967 - RNA, 18 nt, Human
aguagcugggauuacaga

SEQ ID NO: 849968 - RNA, 24 nt, Human
agugcaauggcacgaucuuggcuu

SEQ ID NO: 849969 - RNA, 23 nt, Human
aucccagccuccuuucuaauccu

SEQ ID NO: 849970 - RNA, 20 nt, Human
aucgcgccacugcacuacug

SEQ ID NO: 849971 - RNA, 22 nt, Human
caaaacaaaaaacaaaaaaccc

SEQ ID NO: 849972 - RNA, 23 nt, Human
caaaacaaaaaacaaaaaacccu

SEQ ID NO: 849973 - RNA, 25 nt, Human
caaaacaaaaaacaaaaaacccuga

SEQ ID NO: 849974 - RNA, 27 nt, Human
caaagugcugggauuauuaugggcaua

SEQ ID NO: 849975 - RNA, 23 nt, Human
caaccuccaccucccagguucaa

SEQ ID NO: 849976 - RNA, 24 nt, Human
caccucggccucccaaagugcugg

SEQ ID NO: 849977 - RNA, 23 nt, Human
cacuacugccugggcaacagagc

SEQ ID NO: 849978 - RNA, 23 nt, Human
cacugcacuacugccugggcaac

SEQ ID NO: 849979 - RNA, 24 nt, Human
cacugcacuacugccugggcaaca

SEQ ID NO: 849980 - RNA, 23 nt, Human
cagaaaagagggcuuuuacaaug

SEQ ID NO: 849981 - RNA, 20 nt, Human
cagccuccugaguagcuggg

SEQ ID NO: 849982 - RNA, 20 nt, Human
caggaguucgaggcugcaau

SEQ ID NO: 849983 - RNA, 19 nt, Human
caucguguuggccaggcug

SEQ ID NO: 849984 - RNA, 24 nt, Human
caucguguuggccaggcuggucuc

SEQ ID NO: 849985 - RNA, 26 nt, Human
ccaaagugcugggauuauuaugggca

SEQ ID NO: 849986 - RNA, 27 nt, Human
ccaaagugcugggauuauuaugggcau

SEQ ID NO: 849987 - RNA, 24 nt, Human
ccacugcacuacugccugggcaac

SEQ ID NO: 849988 - RNA, 19 nt, Human
ccacugugcccagcccaaa

SEQ ID NO: 849989 - RNA, 23 nt, Human
ccacugugcccagcccaaaaagg

SEQ ID NO: 849990 - RNA, 24 nt, Human
ccacugugcccagcccaaaaaggc

SEQ ID NO: 849991 - RNA, 23 nt, Human
cccagguucaagcaguucuucug

SEQ ID NO: 849992 - RNA, 24 nt, Human
ccuaaccucaggugaucugcucac

SEQ ID NO: 849993 - RNA, 24 nt, Human
ccucccagguucaagcaguucuuc

SEQ ID NO: 849994 - RNA, 23 nt, Human
ccugaguagcugggauuacagau

SEQ ID NO: 849995 - RNA, 22 nt, Human
ccugggcaacagagcaagacuc

SEQ ID NO: 849996 - RNA, 21 nt, Human
ccugggcgacagagugagacc

SEQ ID NO: 849997 - RNA, 24 nt, Human
cgccacugcacuacugccugggca

SEQ ID NO: 849998 - RNA, 18 nt, Human
cguguuggccaggcuggu

SEQ ID NO: 849999 - RNA, 18 nt, Human
cuccugggaaaaugagaa

SEQ ID NO: 850000 - RNA, 23 nt, Human
cugcaaccuccaccucccagguu

SEQ ID NO: 850001 - RNA, 24 nt, Human
cugcaaccuccaccucccagguuc

SEQ ID NO: 850002 - RNA, 22 nt, Human
cugcacuacugccugggcaaca

SEQ ID NO: 850003 - RNA, 23 nt, Human
cugcuucagccuccugaguagcu

SEQ ID NO: 850004 - RNA, 21 nt, Human
cugucucaaaaaaacaaaaca

SEQ ID NO: 850005 - RNA, 24 nt, Human
cuuacugcaaccuccaccucccag

SEQ ID NO: 850006 - RNA, 22 nt, Human
cuuauugccuaggcuggagugc

SEQ ID NO: 850007 - RNA, 24 nt, Human
cuuauugccuaggcuggagugcaa

SEQ ID NO: 850008 - RNA, 24 nt, Human
cuuugugcuucugccugggcgaca

SEQ ID NO: 850009 - RNA, 18 nt, Human
gagacgggguuucaucgu

SEQ ID NO: 850010 - RNA, 24 nt, Human
gagacgggguuucaucguguuggc

SEQ ID NO: 850011 - RNA, 18 nt, Human
gagcccaggaguucgagg

SEQ ID NO: 850012 - RNA, 26 nt, Human
gaguagcugggauuacagauguccgc

SEQ ID NO: 850013 - RNA, 18 nt, Human
gauuacagauguccgcca

SEQ ID NO: 850014 - RNA, 24 nt, Human
gauuacagauguccgccaccaugc

SEQ ID NO: 850015 - RNA, 22 nt, Human
gcaaccuccaccucccagguuc

SEQ ID NO: 850016 - RNA, 24 nt, Human
gccacugcacuacugccugggcaa

SEQ ID NO: 850017 - RNA, 19 nt, Human
gccuaggcuggagugcaau

SEQ ID NO: 850018 - RNA, 23 nt, Human
gccugggcaacagagcaagacuc

SEQ ID NO: 850019 - RNA, 20 nt, Human
gccugggcgacagagugaga

SEQ ID NO: 850020 - RNA, 21 nt, Human
gcucuuauugccuaggcugga

SEQ ID NO: 850021 - RNA, 19 nt, Human
gcuggagugcaauggcacg

SEQ ID NO: 850022 - RNA, 23 nt, Human
gcuggucucaaacuccuaaccuc

SEQ ID NO: 850023 - RNA, 20 nt, Human
ggcauaagccacugugccca

SEQ ID NO: 850024 - RNA, 23 nt, Human
gggguuucaucguguuggccagg

SEQ ID NO: 850025 - RNA, 22 nt, Human
ggguuucaucguguuggccagg

SEQ ID NO: 850026 - RNA, 20 nt, Human
guagcugggauuacagaugu

SEQ ID NO: 850027 - RNA, 19 nt, Human
uaaccucaggugaucugcu

SEQ ID NO: 850028 - RNA, 20 nt, Human
uaaccucaggugaucugcuc

SEQ ID NO: 850029 - RNA, 23 nt, Human
uaagaaaaaaaaaaaccugaaaa

SEQ ID NO: 850030 - RNA, 28 nt, Human
uacagugauaacuccugggaaaaugaga

SEQ ID NO: 850031 - RNA, 21 nt, Human
uacugcaaccuccaccuccca

SEQ ID NO: 850032 - RNA, 19 nt, Human
uagacagaguccuucucau

SEQ ID NO: 850033 - RNA, 19 nt, Human
uaguagagacgggguuuca

SEQ ID NO: 850034 - RNA, 24 nt, Human
uaguagagacgggguuucaucgug

SEQ ID NO: 850035 - RNA, 22 nt, Human
uaugagcccaggaguucgaggc

SEQ ID NO: 850036 - RNA, 24 nt, Human
uauuaugggcauaagccacugugc

SEQ ID NO: 850037 - RNA, 19 nt, Human
uauugccuaggcuggagug

SEQ ID NO: 850038 - RNA, 20 nt, Human
ucagccuccugaguagcugg

SEQ ID NO: 850039 - RNA, 27 nt, Human
ucccaaagugcugggauuauuaugggc

SEQ ID NO: 850040 - RNA, 20 nt, Human
ucccagguucaagcaguucu

SEQ ID NO: 850041 - RNA, 24 nt, Human
ucccagguucaagcaguucuucug

SEQ ID NO: 850042 - RNA, 18 nt, Human
uccugaguagcugggauu

SEQ ID NO: 850043 - RNA, 21 nt, Human
ucgauaagaaaaaaaaaaacc

SEQ ID NO: 850044 - RNA, 18 nt, Human
ucggccucccaaagugcu

SEQ ID NO: 850045 - RNA, 18 nt, Human
ugagcccaggaguucgag

SEQ ID NO: 850046 - RNA, 24 nt, Human
ugaucugcucaccucggccuccca

SEQ ID NO: 850047 - RNA, 20 nt, Human
ugccuaggcuggagugcaau

SEQ ID NO: 850048 - RNA, 21 nt, Human
ugccuaggcuggagugcaaug

SEQ ID NO: 850049 - RNA, 24 nt, Human
ugccuaggcuggagugcaauggca

SEQ ID NO: 850050 - RNA, 24 nt, Human
ugccugggcgacagagugagaccu

SEQ ID NO: 850051 - RNA, 24 nt, Human
ugcucuuauugccuaggcuggagu

SEQ ID NO: 850052 - RNA, 24 nt, Human
ugcuucagccuccugaguagcugg

SEQ ID NO: 850053 - RNA, 24 nt, Human
ugcuucugccugggcgacagagug

SEQ ID NO: 850054 - RNA, 23 nt, Human
uggagugcaauggcacgaucuug

SEQ ID NO: 850055 - RNA, 24 nt, Human
uggagugcaauggcacgaucuugg

SEQ ID NO: 850056 - RNA, 24 nt, Human
uggccaggcuggucucaaacuccu

SEQ ID NO: 850057 - RNA, 19 nt, Human
ugggauuacagauguccgc

SEQ ID NO: 850058 - RNA, 21 nt, Human
ugggauuacagauguccgcca

SEQ ID NO: 850059 - RNA, 24 nt, Human
ugggauuacagauguccgccacca

SEQ ID NO: 850060 - RNA, 25 nt, Human
ugggauuacagauguccgccaccau

SEQ ID NO: 850061 - RNA, 18 nt, Human
ugggauuauuaugggcau

SEQ ID NO: 850062 - RNA, 20 nt, Human
ugggauuauuaugggcauaa

SEQ ID NO: 850063 - RNA, 19 nt, Human
ugggcgacagagugagacc

SEQ ID NO: 850064 - RNA, 21 nt, Human
uguauuuuuaguagagacggg

SEQ ID NO: 850065 - RNA, 21 nt, Human
ugucgauaagaaaaaaaaaaa

SEQ ID NO: 850066 - RNA, 22 nt, Human
ugucgauaagaaaaaaaaaaac

SEQ ID NO: 850067 - RNA, 19 nt, Human
uguuggccaggcuggucuc

SEQ ID NO: 850068 - RNA, 24 nt, Human
uuacugcaaccuccaccucccagg

SEQ ID NO: 850069 - RNA, 25 nt, Human
uuacugcaaccuccaccucccaggu

SEQ ID NO: 850070 - RNA, 18 nt, Human
uuaguagagacgggguuu

SEQ ID NO: 850071 - RNA, 20 nt, Human
uuaguagagacgggguuuca

SEQ ID NO: 850072 - RNA, 24 nt, Human
uuaguagagacgggguuucaucgu

SEQ ID NO: 850073 - RNA, 24 nt, Human
uucagccuccugaguagcugggau

SEQ ID NO: 850074 - RNA, 22 nt, Human
uugcucuuauugccuaggcugg

SEQ ID NO: 850075 - RNA, 23 nt, Human
uugcucuuauugccuaggcugga

SEQ ID NO: 850076 - RNA, 23 nt, Human
uuguauuuuuaguagagacgggg

SEQ ID NO: 850077 - RNA, 24 nt, Human
uugucgauaagaaaaaaaaaaacc

SEQ ID NO: 850078 - RNA, 23 nt, Human
uuucaucguguuggccaggcugu

SEQ ID NO: 850079 - RNA, 24 nt, Human
uuugcucuuauugccuaggcugga

SEQ ID NO: 850080 - RNA, 18 nt, Human
uuuguauuuuuaguagag

SEQ ID NO: 850081 - RNA, 19 nt, Human
uuuguauuuuuaguagaga

SEQ ID NO: 850082 - RNA, 20 nt, Human
uuuguauuuuuaguagagac

SEQ ID NO: 850083 - RNA, 24 nt, Human
uuugugcuucugccugggcgacag

SEQ ID NO: 850084 - RNA, 23 nt, Human
uuuugcucuuauugccuaggcug

SEQ ID NO: 850085 - RNA, 24 nt, Human
uuuugcucuuauugccuaggcugg

SEQ ID NO: 850086 - RNA, 24 nt, Human
uuuuuaguagagacgggguuucau

SEQ ID NO: 850087 - RNA, 22 nt, Human
uuuuuuuuuuuuuugagacgga

SEQ ID NO: 850088 - RNA, 18 nt, Human
uuuuuuuuuuuuuuuuug

SEQ ID NO: 850089 - RNA, 20 nt, Human
aauagaaggaaugcucugga

SEQ ID NO: 850090 - RNA, 22 nt, Human
aaucuguaaaaggcaauuccuu

SEQ ID NO: 850091 - RNA, 22 nt, Human
agacaccguccagcuguccccc

SEQ ID NO: 850092 - RNA, 23 nt, Human
agagagggccugggggauucuga

SEQ ID NO: 850093 - RNA, 22 nt, Human
agauauccucccagagacaucc

SEQ ID NO: 850094 - RNA, 22 nt, Human
auaugauauacacguguauacg

SEQ ID NO: 850095 - RNA, 30 nt, Human
caaaagguacaaaagguguacauugaaaaa

SEQ ID NO: 850096 - RNA, 20 nt, Human
cacacuuucuccauuccaaa

SEQ ID NO: 850097 - RNA, 22 nt, Human
cacauacaucuacacacuuucu

SEQ ID NO: 850098 - RNA, 25 nt, Human
cacccacagccuugcacuguggucc

SEQ ID NO: 850099 - RNA, 21 nt, Human
caccccucuucccagaggcaa

SEQ ID NO: 850100 - RNA, 22 nt, Human
cagaggcaauucaggcugccgg

SEQ ID NO: 850101 - RNA, 23 nt, Human
ccaaaacauaccuuaucucuaac

SEQ ID NO: 850102 - RNA, 19 nt, Human
ccaccccucuucccagagg

SEQ ID NO: 850103 - RNA, 29 nt, Human
cccccauggagugccuacaugucacacuc

SEQ ID NO: 850104 - RNA, 22 nt, Human
cccuguauugguggcacucucc

SEQ ID NO: 850105 - RNA, 18 nt, Human
ccucccagagacauccua

SEQ ID NO: 850106 - RNA, 23 nt, Human
ccucccagagacauccuaggcau

SEQ ID NO: 850107 - RNA, 19 nt, Human
cugccaccaccauaucuag

SEQ ID NO: 850108 - RNA, 19 nt, Human
cugccgggcugcuagauau

SEQ ID NO: 850109 - RNA, 25 nt, Human
cuuuuugcuauuacaauguuucaac

SEQ ID NO: 850110 - RNA, 20 nt, Human
gaaagauucaaaaccucuga

SEQ ID NO: 850111 - RNA, 23 nt, Human
gacauaugauauacacguguaua

SEQ ID NO: 850112 - RNA, 22 nt, Human
gccauuuuauccaaccggaauu

SEQ ID NO: 850113 - RNA, 21 nt, Human
gccuugcacuguggucccacu

SEQ ID NO: 850114 - RNA, 19 nt, Human
guaaaaggcaauuccuuug

SEQ ID NO: 850115 - RNA, 18 nt, Human
uacaaugcaucuucagcc

SEQ ID NO: 850116 - RNA, 24 nt, Human
uacgcauuugcacuuuugauagac

SEQ ID NO: 850117 - RNA, 24 nt, Human
uauacacguguauacgucugugug

SEQ ID NO: 850118 - RNA, 19 nt, Human
uauagauaauacauguaca

SEQ ID NO: 850119 - RNA, 21 nt, Human
uauagauaauacauguacaug

SEQ ID NO: 850120 - RNA, 23 nt, Human
uaugauauacacguguauacguc

SEQ ID NO: 850121 - RNA, 24 nt, Human
uaugcacacacauacaucuacaca

SEQ ID NO: 850122 - RNA, 20 nt, Human
uccaaacauuaggauaccau

SEQ ID NO: 850123 - RNA, 20 nt, Human
uccagcugucccccauggag

SEQ ID NO: 850124 - RNA, 21 nt, Human
ucccacuucuugguucacaug

SEQ ID NO: 850125 - RNA, 26 nt, Human
ucuaugguaguacacacacacagugu

SEQ ID NO: 850126 - RNA, 21 nt, Human
ucuccaguuuugcacauuuau

SEQ ID NO: 850127 - RNA, 22 nt, Human
ucucuaacauuaguguaguucu

SEQ ID NO: 850128 - RNA, 23 nt, Human
ucucuuuuucccuucuuagggaa

SEQ ID NO: 850129 - RNA, 20 nt, Human
ucugaagaugcacagaacaa

SEQ ID NO: 850130 - RNA, 23 nt, Human
ucuucagccuguaauagaaggaa

SEQ ID NO: 850131 - RNA, 21 nt, Human
ugaaaaggaucaagagagggc

SEQ ID NO: 850132 - RNA, 21 nt, Human
ugaaagauucaaaaccucuga

SEQ ID NO: 850133 - RNA, 23 nt, Human
ugagagagacccucuaaaguugg

SEQ ID NO: 850134 - RNA, 19 nt, Human
ugcacuguggucccacuuc

SEQ ID NO: 850135 - RNA, 22 nt, Human
ugcacuguggucccacuucuug

SEQ ID NO: 850136 - RNA, 23 nt, Human
ugcacuguggucccacuucuugg

SEQ ID NO: 850137 - RNA, 23 nt, Human
ugguaguacacacacacaggauc

SEQ ID NO: 850138 - RNA, 24 nt, Human
ugucccccauggagugccuacaug

SEQ ID NO: 850139 - RNA, 28 nt, Human
ugugugaaaacauaugcacacacauagu

SEQ ID NO: 850140 - RNA, 21 nt, Human
uuacaaugcaucuucagccug

SEQ ID NO: 850141 - RNA, 19 nt, Human
uucaaaaccucugacaccu

SEQ ID NO: 850142 - RNA, 24 nt, Human
uucaaaaccucugacaccuuguuu

SEQ ID NO: 850143 - RNA, 22 nt, Human
uucuaugguaguacacacacac

SEQ ID NO: 850144 - RNA, 21 nt, Human
uugcacuguggucccacuucu

SEQ ID NO: 850145 - RNA, 20 nt, Human
uugcuaguucaaagagcuua

SEQ ID NO: 850146 - RNA, 23 nt, Human
aagccucaggguucacucagaau

SEQ ID NO: 850147 - RNA, 23 nt, Human
acagccgcgaagaccaagggccu

SEQ ID NO: 850148 - RNA, 19 nt, Human
aggaagccucaggguucac

SEQ ID NO: 850149 - RNA, 23 nt, Human
aggaggaaaaagaaaucaucugg

SEQ ID NO: 850150 - RNA, 23 nt, Human
aggcaagaaccugaaguaguagc

SEQ ID NO: 850151 - RNA, 22 nt, Human
ccucgguuccucaccacuggcg

SEQ ID NO: 850152 - RNA, 19 nt, Human
ccugcgccuccacagccgc

SEQ ID NO: 850153 - RNA, 21 nt, Human
ccuuagagcucagagacugga

SEQ ID NO: 850154 - RNA, 19 nt, Human
cgcccuucccgggugguuc

SEQ ID NO: 850155 - RNA, 22 nt, Human
cgccgacccgcgcgggccccuc

SEQ ID NO: 850156 - RNA, 23 nt, Human
cgggguucacucaggaagccuca

SEQ ID NO: 850157 - RNA, 18 nt, Human
gacccgcgcgggccccuc

SEQ ID NO: 850158 - RNA, 19 nt, Human
gaccuggggcagaggagga

SEQ ID NO: 850159 - RNA, 21 nt, Human
gggcagaggaggaaaaagaaa

SEQ ID NO: 850160 - RNA, 21 nt, Human
ggggcuggcacccucucagag

SEQ ID NO: 850161 - RNA, 23 nt, Human
ggugguucgggguucacucagga

SEQ ID NO: 850162 - RNA, 20 nt, Human
uaaauacaaaauaguagagg

SEQ ID NO: 850163 - RNA, 19 nt, Human
uagagcucagagacuggaa

SEQ ID NO: 850164 - RNA, 22 nt, Human
uagagcucagagacuggaaggu

SEQ ID NO: 850165 - RNA, 19 nt, Human
uagauuuuauuauggauga

SEQ ID NO: 850166 - RNA, 18 nt, Human
uagccacccaaguccccg

SEQ ID NO: 850167 - RNA, 25 nt, Human
uaguauuccacacaaauuuuuaaaa

SEQ ID NO: 850168 - RNA, 23 nt, Human
uccacagccgcgaagaccaaggg

SEQ ID NO: 850169 - RNA, 22 nt, Human
ucccacccacagcauccgcccu

SEQ ID NO: 850170 - RNA, 20 nt, Human
uccccgagcuccccaguagc

SEQ ID NO: 850171 - RNA, 24 nt, Human
ugguucgggguucacucaggaagc

SEQ ID NO: 850172 - RNA, 18 nt, Human
uguuugcuuucuucugcu

SEQ ID NO: 850173 - RNA, 20 nt, Human
uuuuuuuuuuuuuuuuuggu

SEQ ID NO: 850174 - RNA, 24 nt, Human
uuuuuuuuuuuuuuuuugguauag

SEQ ID NO: 850175 - RNA, 20 nt, Human
uuuuuuuuuuuuuuuuuugg

SEQ ID NO: 850176 - RNA, 23 nt, Human
augucccccaaacccaggggucu

SEQ ID NO: 850177 - RNA, 19 nt, Human
ccagggcccggaagcucca

SEQ ID NO: 850178 - RNA, 19 nt, Human
cccaugucccccaaaccca

SEQ ID NO: 850179 - RNA, 23 nt, Human
ccccaaacccaggggucugccuc

SEQ ID NO: 850180 - RNA, 21 nt, Human
ccccaaaugcccauguccccc

SEQ ID NO: 850181 - RNA, 24 nt, Human
ccccaaaugcccaugucccccaaa

SEQ ID NO: 850182 - RNA, 18 nt, Human
ccgacccggggcgcgcgg

SEQ ID NO: 850183 - RNA, 23 nt, Human
ccggaagcuccagccuccagcgg

SEQ ID NO: 850184 - RNA, 19 nt, Human
cgacccggggcgcgcgggg

SEQ ID NO: 850185 - RNA, 22 nt, Human
gggcccggaagcuccagccucc

SEQ ID NO: 850186 - RNA, 23 nt, Human
gucccccaaacccaggggucugc

SEQ ID NO: 850187 - RNA, 24 nt, Human
uuuuuuuuuuuuuuuuuuuccaag

SEQ ID NO: 850188 - RNA, 23 nt, Human
uuuuuuuuuuuuuuuuuuuucca

SEQ ID NO: 850189 - RNA, 24 nt, Human
uuuuuuuuuuuuuuuuuuuuuccu

SEQ ID NO: 850190 - RNA, 22 nt, Human
aacagaaccaguccauguaugg

SEQ ID NO: 850191 - RNA, 20 nt, Human
agcacuuggaauucaggggu

SEQ ID NO: 850192 - RNA, 21 nt, Human
cccgaagcugaacuuccuggg

SEQ ID NO: 850193 - RNA, 26 nt, Human
cgaagcugaacuuccugggaagcuga

SEQ ID NO: 850194 - RNA, 19 nt, Human
cugggucagagcugguuca

SEQ ID NO: 850195 - RNA, 22 nt, Human
gaagcugauccaauggagcacu

SEQ ID NO: 850196 - RNA, 23 nt, Human
uaacccgaagcugaacuuccugg

SEQ ID NO: 850197 - RNA, 22 nt, Human
uccauguauggaggcaugggca

SEQ ID NO: 850198 - RNA, 21 nt, Human
ugggccuugcuaggcagggag

SEQ ID NO: 850199 - RNA, 24 nt, Human
uguaacucguacguuuuuucuaaa

SEQ ID NO: 850200 - RNA, 19 nt, Human
uguauggaggcaugggcau

SEQ ID NO: 850201 - RNA, 23 nt, Human
uuccugggaagcugauccaaugg

SEQ ID NO: 850202 - RNA, 23 nt, Human
aaaaauaagagagacgagagaga

SEQ ID NO: 850203 - RNA, 24 nt, Human
aaaguacugggauuacaggcguga

SEQ ID NO: 850204 - RNA, 19 nt, Human
aaagugcugggauuacagg

SEQ ID NO: 850205 - RNA, 19 nt, Human
aaagugcugggauuacagg

SEQ ID NO: 850206 - RNA, 20 nt, Human
aaccugcagaccucccaccu

SEQ ID NO: 850207 - RNA, 25 nt, Human
aagaaaaauaagagagaccgguacc

SEQ ID NO: 850208 - RNA, 20 nt, Human
aagcaaaaaccccagcgccc

SEQ ID NO: 850209 - RNA, 19 nt, Human
aaguacugggauuacaggc

SEQ ID NO: 850210 - RNA, 26 nt, Human
aaguacugggauuacaggcgugagcc

SEQ ID NO: 850211 - RNA, 18 nt, Human
aagugcugggauuacagg

SEQ ID NO: 850212 - RNA, 22 nt, Human
aagugcugggauuacaggaguc

SEQ ID NO: 850213 - RNA, 24 nt, Human
aauaaaaaauaaguaaagcacauc

SEQ ID NO: 850214 - RNA, 18 nt, Human
acaggcgcccgccaccuc

SEQ ID NO: 850215 - RNA, 24 nt, Human
accauguuggcuaggcuguucuug

SEQ ID NO: 850216 - RNA, 22 nt, Human
acggagucuugcugucgcccag

SEQ ID NO: 850217 - RNA, 18 nt, Human
acgggguuucaguguuag

SEQ ID NO: 850218 - RNA, 20 nt, Human
acuauaugauuucucaagga

SEQ ID NO: 850219 - RNA, 22 nt, Human
acucccccucggcuugggggau

SEQ ID NO: 850220 - RNA, 25 nt, Human
acucugucgcccaggcuggagugca

SEQ ID NO: 850221 - RNA, 18 nt, Human
acugaagcaaaaacccca

SEQ ID NO: 850222 - RNA, 19 nt, Human
acugcaggcuccacccccc

SEQ ID NO: 850223 - RNA, 19 nt, Human
agaaggcgggaagaaaucu

SEQ ID NO: 850224 - RNA, 19 nt, Human
agagacgagagagagagag

SEQ ID NO: 850225 - RNA, 19 nt, Human
agagagagagagaaagaga

SEQ ID NO: 850226 - RNA, 30 nt, Human
agcuaauuuuuuguauuuuuaguagagacg

SEQ ID NO: 850227 - RNA, 19 nt, Human
agcugauuacaggcacccg

SEQ ID NO: 850228 - RNA, 25 nt, Human
aggcuggagugcaguggcgcgaucu

SEQ ID NO: 850229 - RNA, 18 nt, Human
aggguagaaggcgggaag

SEQ ID NO: 850230 - RNA, 24 nt, Human
aggugaucugcccagcucagccuc

SEQ ID NO: 850231 - RNA, 18 nt, Human
aguagagacgggguuuca

SEQ ID NO: 850232 - RNA, 24 nt, Human
agugauuccccugccucagccucc

SEQ ID NO: 850233 - RNA, 20 nt, Human
agugcaguggcgcgaucucg

SEQ ID NO: 850234 - RNA, 23 nt, Human
agugcaguggcgcgaucucggcu

SEQ ID NO: 850235 - RNA, 24 nt, Human
agugcaguggcgcgaucucggcuc

SEQ ID NO: 850236 - RNA, 20 nt, Human
agugcaguggugcgauuucg

SEQ ID NO: 850237 - RNA, 23 nt, Human
agugcaguggugcgauuucggcu

SEQ ID NO: 850238 - RNA, 24 nt, Human
agugcaguggugcgauuucggcuc

SEQ ID NO: 850239 - RNA, 27 nt, Human
aucuccaacaauaaaccaaauucugag

SEQ ID NO: 850240 - RNA, 21 nt, Human
augcagugcgcuguaccggug

SEQ ID NO: 850241 - RNA, 23 nt, Human
caaaagaaaaauaagagagacga

SEQ ID NO: 850242 - RNA, 24 nt, Human
caaaguacugggauuacaggcgug

SEQ ID NO: 850243 - RNA, 26 nt, Human
caaagugcugggauuacaggagucgu

SEQ ID NO: 850244 - RNA, 21 nt, Human
caacgacccucucccuccuuc

SEQ ID NO: 850245 - RNA, 20 nt, Human
caagugauuccccugccuca

SEQ ID NO: 850246 - RNA, 22 nt, Human
caagugauuccccugccucagc

SEQ ID NO: 850247 - RNA, 22 nt, Human
cacacaauauucgaagacauuc

SEQ ID NO: 850248 - RNA, 23 nt, Human
caccacacccgcuaauuuuugua

SEQ ID NO: 850249 - RNA, 22 nt, Human
caccauguuggcuaggcuguuc

SEQ ID NO: 850250 - RNA, 23 nt, Human
caccauguuggcuaggcuguucu

SEQ ID NO: 850251 - RNA, 24 nt, Human
caccauguuggcuaggcuguucuu

SEQ ID NO: 850252 - RNA, 22 nt, Human
cacgccauucuccugccucagc

SEQ ID NO: 850253 - RNA, 22 nt, Human
cacucugucgcccaggcuggag

SEQ ID NO: 850254 - RNA, 20 nt, Human
cacugcaaccuccgcccccc

SEQ ID NO: 850255 - RNA, 20 nt, Human
cacugcaaccuccgcccccc

SEQ ID NO: 850256 - RNA, 18 nt, Human
cagaacccacccgguuca

SEQ ID NO: 850257 - RNA, 25 nt, Human
cagaaugucuuuuuuuuuuuuuuuu

SEQ ID NO: 850258 - RNA, 23 nt, Human
cagagcagcuacacugaagcaaa

SEQ ID NO: 850259 - RNA, 21 nt, Human
cagagcugagugcaaccugcu

SEQ ID NO: 850260 - RNA, 18 nt, Human
cagcaggaugguuaacgg

SEQ ID NO: 850261 - RNA, 23 nt, Human
cagcccccaucccaucguccgcu

SEQ ID NO: 850262 - RNA, 24 nt, Human
cagcucagccucccaaaguacugg

SEQ ID NO: 850263 - RNA, 21 nt, Human
caggcgcccgccaccucgccc

SEQ ID NO: 850264 - RNA, 24 nt, Human
caggcgugagccaccgugcccggc

SEQ ID NO: 850265 - RNA, 24 nt, Human
cauguuggcuaggcuguucuugaa

SEQ ID NO: 850266 - RNA, 19 nt, Human
cauucaguccccugccuau

SEQ ID NO: 850267 - RNA, 20 nt, Human
ccaaaguacugggauuacag

SEQ ID NO: 850268 - RNA, 22 nt, Human
ccaaaguacugggauuacaggc

SEQ ID NO: 850269 - RNA, 24 nt, Human
ccaaaguacugggauuacaggcgu

SEQ ID NO: 850270 - RNA, 19 nt, Human
ccaaagugcugggauuaca

SEQ ID NO: 850271 - RNA, 21 nt, Human
ccaaagugcugggauuacagg

SEQ ID NO: 850272 - RNA, 24 nt, Human
ccaaagugcugggauuacaggagu

SEQ ID NO: 850273 - RNA, 25 nt, Human
cccccagccucagccaacgcaaguu

SEQ ID NO: 850274 - RNA, 19 nt, Human
cccccggguucaagugauu

SEQ ID NO: 850275 - RNA, 21 nt, Human
ccccggggccugcaggcugug

SEQ ID NO: 850276 - RNA, 20 nt, Human
ccccgggguucacgccauuc

SEQ ID NO: 850277 - RNA, 19 nt, Human
ccccggguucaagugauuc

SEQ ID NO: 850278 - RNA, 24 nt, Human
ccccggguucaagugauuccccug

SEQ ID NO: 850279 - RNA, 24 nt, Human
ccccucggcuugggggauggaggc

SEQ ID NO: 850280 - RNA, 22 nt, Human
cccgaguagcugauuacaggca

SEQ ID NO: 850281 - RNA, 21 nt, Human
cccggguucaagugauucccc

SEQ ID NO: 850282 - RNA, 20 nt, Human
cccucucccuccuucccaaa

SEQ ID NO: 850283 - RNA, 24 nt, Human
cccugccucagccucccgaguagc

SEQ ID NO: 850284 - RNA, 24 nt, Human
ccgccccccggguucaagugauuc

SEQ ID NO: 850285 - RNA, 25 nt, Human
ccggugcgggaguccaggaaggcug

SEQ ID NO: 850286 - RNA, 22 nt, Human
ccucaggugaucugcccagcuc

SEQ ID NO: 850287 - RNA, 19 nt, Human
ccucccgagaagcugggaa

SEQ ID NO: 850288 - RNA, 24 nt, Human
ccugccucggccucccaaagugcu

SEQ ID NO: 850289 - RNA, 24 nt, Human
ccugcucacaacgacccucucccu

SEQ ID NO: 850290 - RNA, 22 nt, Human
cgaagacauucuuccuucuuuc

SEQ ID NO: 850291 - RNA, 23 nt, Human
cgacccucucccuccuucccaaa

SEQ ID NO: 850292 - RNA, 24 nt, Human
cgcccaggcuggagugcaguggcg

SEQ ID NO: 850293 - RNA, 24 nt, Human
cgcccaggcuggagugcaguggug

SEQ ID NO: 850294 - RNA, 22 nt, Human
cgccccccggguucaagugauu

SEQ ID NO: 850295 - RNA, 21 nt, Human
cggggguuucaccauguuggc

SEQ ID NO: 850296 - RNA, 24 nt, Human
cggggguuucaccauguuggcuag

SEQ ID NO: 850297 - RNA, 20 nt, Human
cgugaagugcacccuccgga

SEQ ID NO: 850298 - RNA, 20 nt, Human
cguuuaagacccuccugcua

SEQ ID NO: 850299 - RNA, 25 nt, Human
cuaauuuuuguauuuuuagucgaga

SEQ ID NO: 850300 - RNA, 24 nt, Human
cucacucugucgcccaggcuggag

SEQ ID NO: 850301 - RNA, 22 nt, Human
cucacugcaaccuccgcccccc

SEQ ID NO: 850302 - RNA, 24 nt, Human
cucacugcaaccuccgccccccgg

SEQ ID NO: 850303 - RNA, 24 nt, Human
cucacugcaggcuccaccccccgg

SEQ ID NO: 850304 - RNA, 19 nt, Human
cucagaggcuugagucugg

SEQ ID NO: 850305 - RNA, 18 nt, Human
cucaugauccgccugccu

SEQ ID NO: 850306 - RNA, 25 nt, Human
cuccacacaauauucgaagacauuc

SEQ ID NO: 850307 - RNA, 19 nt, Human
cuccagcccccaucccauc

SEQ ID NO: 850308 - RNA, 24 nt, Human
cuccugaccucaugauccgccugc

SEQ ID NO: 850309 - RNA, 19 nt, Human
cucucccuccuucccaaau

SEQ ID NO: 850310 - RNA, 22 nt, Human
cugaagcaaaaaccccagcgcc

SEQ ID NO: 850311 - RNA, 23 nt, Human
cugcaaccuccgccccccggguu

SEQ ID NO: 850312 - RNA, 24 nt, Human
cugcaaccuccgccccccggguuc

SEQ ID NO: 850313 - RNA, 20 nt, Human
cugccccggggccugcaggc

SEQ ID NO: 850314 - RNA, 23 nt, Human
cugccucagccucccgagaagcu

SEQ ID NO: 850315 - RNA, 23 nt, Human
cugccucagccucccgaguagcu

SEQ ID NO: 850316 - RNA, 19 nt, Human
cuggcuccuuuuggacuag

SEQ ID NO: 850317 - RNA, 18 nt, Human
cugucgcccaggcuggag

SEQ ID NO: 850318 - RNA, 19 nt, Human
cugucgcccaggcuggagu

SEQ ID NO: 850319 - RNA, 23 nt, Human
cuuaggcucacagaaagcacuga

SEQ ID NO: 850320 - RNA, 21 nt, Human
cuuauagaauuggagagaauu

SEQ ID NO: 850321 - RNA, 19 nt, Human
cuuccuucuuucugcugcc

SEQ ID NO: 850322 - RNA, 20 nt, Human
cuugaacuccugaccucagg

SEQ ID NO: 850323 - RNA, 20 nt, Human
cuugccugugucuccucccu

SEQ ID NO: 850324 - RNA, 21 nt, Human
gaccccagugaguuuuagcac

SEQ ID NO: 850325 - RNA, 24 nt, Human
gaccucaggugaucugcccagcuc

SEQ ID NO: 850326 - RNA, 22 nt, Human
gaccucaugauccgccugccuc

SEQ ID NO: 850327 - RNA, 22 nt, Human
gaccucaugauccgccugccuc

SEQ ID NO: 850328 - RNA, 24 nt, Human
gaccucaugauccgccugccucgg

SEQ ID NO: 850329 - RNA, 21 nt, Human
gagaacgaacaaaucaggaug

SEQ ID NO: 850330 - RNA, 20 nt, Human
gagagagaaagagagagaga

SEQ ID NO: 850331 - RNA, 20 nt, Human
gagagagagagagaaagaga

SEQ ID NO: 850332 - RNA, 18 nt, Human
gaggcaaagagacaaacu

SEQ ID NO: 850333 - RNA, 18 nt, Human
gauuacaggcgugagcca

SEQ ID NO: 850334 - RNA, 20 nt, Human
gauuacaggcgugagccacc

SEQ ID NO: 850335 - RNA, 21 nt, Human
gauuacaggcgugagccaccg

SEQ ID NO: 850336 - RNA, 18 nt, Human
gauuucggcucacugcaa

SEQ ID NO: 850337 - RNA, 23 nt, Human
gcccagcuaauuuuuuguauuuu

SEQ ID NO: 850338 - RNA, 19 nt, Human
gcccaggcuggagugcagu

SEQ ID NO: 850339 - RNA, 19 nt, Human
gcccaggcuggagugcagu

SEQ ID NO: 850340 - RNA, 20 nt, Human
gcccaggcuggagugcagug

SEQ ID NO: 850341 - RNA, 20 nt, Human
gcccaggcuggagugcagug

SEQ ID NO: 850342 - RNA, 23 nt, Human
gcccaggcuggagugcaguggug

SEQ ID NO: 850343 - RNA, 19 nt, Human
gcccuaaaaucuccaacaa

SEQ ID NO: 850344 - RNA, 22 nt, Human
gcccuaaaaucuccaacaauaa

SEQ ID NO: 850345 - RNA, 24 nt, Human
gcugucgcccaggcuggagugcag

SEQ ID NO: 850346 - RNA, 21 nt, Human
ggagaaaccguccacaauggg

SEQ ID NO: 850347 - RNA, 22 nt, Human
ggauggaggcugccccggggcc

SEQ ID NO: 850348 - RNA, 18 nt, Human
ggcugccccggggccugc

SEQ ID NO: 850349 - RNA, 19 nt, Human
ggcuguggaccuucucugg

SEQ ID NO: 850350 - RNA, 24 nt, Human
ggcuguucuugaacuccugaccuc

SEQ ID NO: 850351 - RNA, 18 nt, Human
gggaguugaggcuugccu

SEQ ID NO: 850352 - RNA, 18 nt, Human
gggccugcaggcugugua

SEQ ID NO: 850353 - RNA, 24 nt, Human
gggggauggaggcugccccggggc

SEQ ID NO: 850354 - RNA, 19 nt, Human
ggggguuucaccauguugg

SEQ ID NO: 850355 - RNA, 21 nt, Human
ggggguuucaccauguuggcu

SEQ ID NO: 850356 - RNA, 23 nt, Human
gggguuucaccauguuggcuagg

SEQ ID NO: 850357 - RNA, 22 nt, Human
ggguuucaccauguuggcuagg

SEQ ID NO: 850358 - RNA, 23 nt, Human
gucuugcugucgcccaggcugga

SEQ ID NO: 850359 - RNA, 27 nt, Human
gucuuuuuuuuuuuuuuuuuuuuuuug

SEQ ID NO: 850360 - RNA, 24 nt, Human
gugaucugcccagcucagccuccc

SEQ ID NO: 850361 - RNA, 24 nt, Human
gugauuccccugccucagccuccc

SEQ ID NO: 850362 - RNA, 20 nt, Human
gugcgggaguccaggaaggc

SEQ ID NO: 850363 - RNA, 20 nt, Human
gugcugggauuacaggaguc

SEQ ID NO: 850364 - RNA, 25 nt, Human
uaaaaaauaaguaaagcacaucgaa

SEQ ID NO: 850365 - RNA, 18 nt, Human
uaaccauaugaauguauu

SEQ ID NO: 850366 - RNA, 24 nt, Human
uaauuuuuuguauuuuuaguagag

SEQ ID NO: 850367 - RNA, 25 nt, Human
uaauuuuuuguauuuuuaguagaga

SEQ ID NO: 850368 - RNA, 22 nt, Human
uacacugaagcaaaaaccccag

SEQ ID NO: 850369 - RNA, 23 nt, Human
uacaggcacccgccaccacaccc

SEQ ID NO: 850370 - RNA, 23 nt, Human
uacaggcgugagccaccgugccc

SEQ ID NO: 850371 - RNA, 24 nt, Human
uacugggauuacaggcgugagcca

SEQ ID NO: 850372 - RNA, 21 nt, Human
uagcugugugacuuuagacau

SEQ ID NO: 850373 - RNA, 22 nt, Human
uagguuuucagcaccaggaggc

SEQ ID NO: 850374 - RNA, 19 nt, Human
uaguagagacgggguuuca

SEQ ID NO: 850375 - RNA, 22 nt, Human
uaguagagacgggguuucagug

SEQ ID NO: 850376 - RNA, 22 nt, Human
uaguagagacgggguuucaguu

SEQ ID NO: 850377 - RNA, 25 nt, Human
uagucgagacggggguuucaccaug

SEQ ID NO: 850378 - RNA, 18 nt, Human
uauuaaagaagggggggc

SEQ ID NO: 850379 - RNA, 20 nt, Human
ucacgccauucuccugccuc

SEQ ID NO: 850380 - RNA, 18 nt, Human
ucacugcaaccuccgccc

SEQ ID NO: 850381 - RNA, 23 nt, Human
ucacugcaaccuccgccccccgg

SEQ ID NO: 850382 - RNA, 24 nt, Human
ucacugcaaccuccgccccccggg

SEQ ID NO: 850383 - RNA, 27 nt, Human
ucacugcaaccuccgccccccggguuc

SEQ ID NO: 850384 - RNA, 20 nt, Human
ucacugcaggcuccaccccc

SEQ ID NO: 850385 - RNA, 24 nt, Human
ucacugcaggcuccaccccccggg

SEQ ID NO: 850386 - RNA, 19 nt, Human
ucagaacccacccgguuca

SEQ ID NO: 850387 - RNA, 24 nt, Human
ucccaaaguacugggauuacaggc

SEQ ID NO: 850388 - RNA, 18 nt, Human
ucccaaagugcugggauu

SEQ ID NO: 850389 - RNA, 23 nt, Human
ucccaaagugcugggauuacagg

SEQ ID NO: 850390 - RNA, 24 nt, Human
uccccugccucagccucccgagua

SEQ ID NO: 850391 - RNA, 22 nt, Human
ucccgaguagcugauuacaggc

SEQ ID NO: 850392 - RNA, 21 nt, Human
uccugccucagccucccgaga

SEQ ID NO: 850393 - RNA, 22 nt, Human
ucgcccagcuaauuuuuuguau

SEQ ID NO: 850394 - RNA, 22 nt, Human
ucgcccaggcuggagugcagug

SEQ ID NO: 850395 - RNA, 24 nt, Human
ucgcccaggcuggagugcaguggu

SEQ ID NO: 850396 - RNA, 18 nt, Human
ucggccucccaaagugcu

SEQ ID NO: 850397 - RNA, 23 nt, Human
ucucacucugucgcccaggcugg

SEQ ID NO: 850398 - RNA, 24 nt, Human
ucucacucugucgcccaggcugga

SEQ ID NO: 850399 - RNA, 26 nt, Human
ucucacucugucgcccaggcuggagu

SEQ ID NO: 850400 - RNA, 27 nt, Human
ucucacucugucgcccaggcuggagug

SEQ ID NO: 850401 - RNA, 24 nt, Human
ucuccugccucagccucccgagaa

SEQ ID NO: 850402 - RNA, 24 nt, Human
ucuguaacugaucagagccggggc

SEQ ID NO: 850403 - RNA, 24 nt, Human
ucugucgcccaggcuggagugcag

SEQ ID NO: 850404 - RNA, 21 nt, Human
ucuuccuucuuucugcugccu

SEQ ID NO: 850405 - RNA, 23 nt, Human
ucuugaacuccugaccucaggug

SEQ ID NO: 850406 - RNA, 20 nt, Human
ucuugcugucgcccaggcug

SEQ ID NO: 850407 - RNA, 21 nt, Human
ucuugcugucgcccaggcugg

SEQ ID NO: 850408 - RNA, 21 nt, Human
ucuugcugucgcccaggcugg

SEQ ID NO: 850409 - RNA, 22 nt, Human
ucuugcugucgcccaggcugga

SEQ ID NO: 850410 - RNA, 23 nt, Human
ucuugcugucgcccaggcuggag

SEQ ID NO: 850411 - RNA, 24 nt, Human
ucuugcugucgcccaggcuggagu

SEQ ID NO: 850412 - RNA, 18 nt, Human
ucuuuuuuuuuuuuuuuu

SEQ ID NO: 850413 - RNA, 26 nt, Human
ugaagugagguuacucagaacccacc

SEQ ID NO: 850414 - RNA, 20 nt, Human
ugaccucaggugaucugccc

SEQ ID NO: 850415 - RNA, 21 nt, Human
ugaccucaggugaucugccca

SEQ ID NO: 850416 - RNA, 23 nt, Human
ugaccucaggugaucugcccagc

SEQ ID NO: 850417 - RNA, 24 nt, Human
ugaccucaggugaucugcccagcu

SEQ ID NO: 850418 - RNA, 25 nt, Human
ugaccucaggugaucugcccagcuc

SEQ ID NO: 850419 - RNA, 19 nt, Human
ugagugcaaccugcucaca

SEQ ID NO: 850420 - RNA, 20 nt, Human
ugagugcaaccugcucacaa

SEQ ID NO: 850421 - RNA, 19 nt, Human
ugaguuuuagcacuucuac

SEQ ID NO: 850422 - RNA, 24 nt, Human
ugcagugcgcuguaccggugcggg

SEQ ID NO: 850423 - RNA, 22 nt, Human
ugcaguggcgcgaucucggcuc

SEQ ID NO: 850424 - RNA, 19 nt, Human
ugcccagcucagccuccca

SEQ ID NO: 850425 - RNA, 19 nt, Human
ugccccggggccugcaggc

SEQ ID NO: 850426 - RNA, 24 nt, Human
ugccucagccucccgagaagcugg

SEQ ID NO: 850427 - RNA, 24 nt, Human
ugccucagccucccgaguagcuga

SEQ ID NO: 850428 - RNA, 21 nt, Human
ugccucggccucccaaagugc

SEQ ID NO: 850429 - RNA, 24 nt, Human
ugccucggccucccaaagugcugg

SEQ ID NO: 850430 - RNA, 20 nt, Human
ugccugugucuccucccuuu

SEQ ID NO: 850431 - RNA, 20 nt, Human
ugcgggaguccaggaaggcu

SEQ ID NO: 850432 - RNA, 24 nt, Human
uggagucucacucugucgcccagg

SEQ ID NO: 850433 - RNA, 23 nt, Human
uggagugcaguggcgcgaucucg

SEQ ID NO: 850434 - RNA, 24 nt, Human
uggagugcaguggcgcgaucucgg

SEQ ID NO: 850435 - RNA, 23 nt, Human
uggagugcaguggugcgauuucg

SEQ ID NO: 850436 - RNA, 24 nt, Human
uggagugcaguggugcgauuucgg

SEQ ID NO: 850437 - RNA, 24 nt, Human
uggcuaggcuguucuugaacuccu

SEQ ID NO: 850438 - RNA, 21 nt, Human
ugggaauacaggcgcccgcca

SEQ ID NO: 850439 - RNA, 22 nt, Human
ugggaauacaggcgcccgccac

SEQ ID NO: 850440 - RNA, 18 nt, Human
ugggauuacaggcgugag

SEQ ID NO: 850441 - RNA, 21 nt, Human
ugggauuacaggcgugagcca

SEQ ID NO: 850442 - RNA, 22 nt, Human
ugggauuacaggcgugagccac

SEQ ID NO: 850443 - RNA, 23 nt, Human
ugggauuacaggcgugagccacc

SEQ ID NO: 850444 - RNA, 23 nt, Human
ugggauuacaggcgugagccacc

SEQ ID NO: 850445 - RNA, 24 nt, Human
ugggauuacaggcgugagccaccg

SEQ ID NO: 850446 - RNA, 21 nt, Human
uggucucgaucuccugaccuc

SEQ ID NO: 850447 - RNA, 21 nt, Human
uguauuuuuaguagagacggg

SEQ ID NO: 850448 - RNA, 21 nt, Human
uguauuuuuagucgagacggg

SEQ ID NO: 850449 - RNA, 24 nt, Human
uguucuugaacuccugaccucagg

SEQ ID NO: 850450 - RNA, 18 nt, Human
uuaguagagacgggguuu

SEQ ID NO: 850451 - RNA, 20 nt, Human
uuaguagagacgggguuuca

SEQ ID NO: 850452 - RNA, 20 nt, Human
uuaguagagacgggguuuca

SEQ ID NO: 850453 - RNA, 24 nt, Human
uuaguagagacgggguuucagugu

SEQ ID NO: 850454 - RNA, 25 nt, Human
uuagucgagacggggguuucaccau

SEQ ID NO: 850455 - RNA, 21 nt, Human
uucaagugauuccccugccuc

SEQ ID NO: 850456 - RNA, 23 nt, Human
uucaagugauuccccugccucag

SEQ ID NO: 850457 - RNA, 24 nt, Human
uucaagugauuccccugccucagc

SEQ ID NO: 850458 - RNA, 20 nt, Human
uucagcaccaggaggcugug

SEQ ID NO: 850459 - RNA, 19 nt, Human
uuccccugccucagccucc

SEQ ID NO: 850460 - RNA, 23 nt, Human
uucuuccuucuuucugcugccuu

SEQ ID NO: 850461 - RNA, 18 nt, Human
uugggggauggaggcugc

SEQ ID NO: 850462 - RNA, 24 nt, Human
uuguauuuuuagucgagacggggg

SEQ ID NO: 850463 - RNA, 18 nt, Human
uuuaagacccuccugcua

SEQ ID NO: 850464 - RNA, 21 nt, Human
uuucaccauguuggcuaggcu

SEQ ID NO: 850465 - RNA, 21 nt, Human
uuuuguauuuuuagucgagac

SEQ ID NO: 850466 - RNA, 22 nt, Human
uuuuuaguagagacgggguuuc

SEQ ID NO: 850467 - RNA, 25 nt, Human
uuuuuagucgagacggggguuucac

SEQ ID NO: 850468 - RNA, 21 nt, Human
uuuuuguauuuuuaguagaga

SEQ ID NO: 850469 - RNA, 20 nt, Human
uuuuuguauuuuuagucgag

SEQ ID NO: 850470 - RNA, 27 nt, Human
uuuuuuuuuuuuagagauggagucuca

SEQ ID NO: 850471 - RNA, 24 nt, Human
uuuuuuuuuuuugagacggagucu

SEQ ID NO: 850472 - RNA, 22 nt, Human
uuuuuuuuuuuuuugagacgga

SEQ ID NO: 850473 - RNA, 18 nt, Human
uuuuuuuuuuuuuuuuug

SEQ ID NO: 850474 - RNA, 25 nt, Human
uuuuuuuuuuuuuuuuuuaauuuuu

SEQ ID NO: 850475 - RNA, 20 nt, Human
aaacuagcaccuccacaguc

SEQ ID NO: 850476 - RNA, 21 nt, Human
aagcaguggcaaagacuacuu

SEQ ID NO: 850477 - RNA, 21 nt, Human
acagucaaaguguugucaucc

SEQ ID NO: 850478 - RNA, 20 nt, Human
cagggcacuucaguaaucaa

SEQ ID NO: 850479 - RNA, 22 nt, Human
cccauggcacguccggacagcc

SEQ ID NO: 850480 - RNA, 23 nt, Human
cccauggcacguccggacagccg

SEQ ID NO: 850481 - RNA, 25 nt, Human
cccauggcacguccggacagccgug

SEQ ID NO: 850482 - RNA, 23 nt, Human
ccggagcagcccugucgugggag

SEQ ID NO: 850483 - RNA, 19 nt, Human
ccugcgcucaggcccgggg

SEQ ID NO: 850484 - RNA, 19 nt, Human
gacagccguggggucccgg

SEQ ID NO: 850485 - RNA, 20 nt, Human
gagcagcccugucgugggag

SEQ ID NO: 850486 - RNA, 25 nt, Human
ggcccggggcgggucuccgaagcuc

SEQ ID NO: 850487 - RNA, 18 nt, Human
guccggacagccgugggg

SEQ ID NO: 850488 - RNA, 22 nt, Human
gugauguugaccagugcuuucc

SEQ ID NO: 850489 - RNA, 22 nt, Human
guggaggaagcaguggcaaaga

SEQ ID NO: 850490 - RNA, 20 nt, Human
gugggaggggggcuugcugg

SEQ ID NO: 850491 - RNA, 22 nt, Human
uaugaagagcuguuuguggagg

SEQ ID NO: 850492 - RNA, 23 nt, Human
ucacguguaguguuuaccucccu

SEQ ID NO: 850493 - RNA, 20 nt, Human
uccggacagccguggggucc

SEQ ID NO: 850494 - RNA, 18 nt, Human
ugggaggggggcuugcug

SEQ ID NO: 850495 - RNA, 22 nt, Human
uguggaggaagcaguggcaaag

SEQ ID NO: 850496 - RNA, 21 nt, Human
uguuuguggaggaagcagugg

SEQ ID NO: 850497 - RNA, 19 nt, Human
uucccuuucaccacucuuc

SEQ ID NO: 850498 - RNA, 21 nt, Human
uugcccggcagcugcgcgccc

SEQ ID NO: 850499 - RNA, 20 nt, Human
uuuuuuuuuuuuuugcuuuu

SEQ ID NO: 850500 - RNA, 24 nt, Human
uuuuuuuuuuuuuuuuuugcuuuu

SEQ ID NO: 850501 - RNA, 20 nt, Human
uuuuuuuuuuuuuuuuuugg

SEQ ID NO: 850502 - RNA, 21 nt, Human
aaccuagugagaucccaucuc

SEQ ID NO: 850503 - RNA, 21 nt, Human
aagaguccauaguccuuccca

SEQ ID NO: 850504 - RNA, 21 nt, Human
aagguccaagagaacuuccaa

SEQ ID NO: 850505 - RNA, 18 nt, Human
aauccuuggacaccucca

SEQ ID NO: 850506 - RNA, 22 nt, Human
acacaacaagaguccauagucc

SEQ ID NO: 850507 - RNA, 21 nt, Human
agaaaaccucucacagcucca

SEQ ID NO: 850508 - RNA, 22 nt, Human
agaaggcaagcuuucccuccuc

SEQ ID NO: 850509 - RNA, 24 nt, Human
agcaccuugggaggcugagguggg

SEQ ID NO: 850510 - RNA, 19 nt, Human
agccagaaggcaggguaca

SEQ ID NO: 850511 - RNA, 21 nt, Human
agccugggcaaccuagugaga

SEQ ID NO: 850512 - RNA, 23 nt, Human
aggaaaccacuguguuguaaucc

SEQ ID NO: 850513 - RNA, 25 nt, Human
aggaauucgacaccagccugggcaa

SEQ ID NO: 850514 - RNA, 24 nt, Human
aggacugcuugagaccaggaauuc

SEQ ID NO: 850515 - RNA, 18 nt, Human
aggagaggaggcagagau

SEQ ID NO: 850516 - RNA, 19 nt, Human
aggcaggggccuauucuuu

SEQ ID NO: 850517 - RNA, 24 nt, Human
aggcaggguacaaaggagaggagg

SEQ ID NO: 850518 - RNA, 19 nt, Human
aggcggccggggcgcggac

SEQ ID NO: 850519 - RNA, 24 nt, Human
aggcugaggugggaggacugcuug

SEQ ID NO: 850520 - RNA, 18 nt, Human
aggguacaaaggagagga

SEQ ID NO: 850521 - RNA, 24 nt, Human
aggugugguggcucacaccuguaa

SEQ ID NO: 850522 - RNA, 28 nt, Human
caacugcccaguggcugcaauuccuagu

SEQ ID NO: 850523 - RNA, 24 nt, Human
cacaccuguaaucccagcaccuug

SEQ ID NO: 850524 - RNA, 23 nt, Human
caccccaacugcccaguggcugc

SEQ ID NO: 850525 - RNA, 23 nt, Human
caccuguaaucccagcaccuugg

SEQ ID NO: 850526 - RNA, 24 nt, Human
caccuguaaucccagcaccuuggg

SEQ ID NO: 850527 - RNA, 23 nt, Human
cagaugcccaccaccccaggucu

SEQ ID NO: 850528 - RNA, 23 nt, Human
cagcaccuugggaggcugaggug

SEQ ID NO: 850529 - RNA, 24 nt, Human
cagcaccuugggaggcugaggugg

SEQ ID NO: 850530 - RNA, 21 nt, Human
caggaccuggucgcggcuccc

SEQ ID NO: 850531 - RNA, 21 nt, Human
caggucugucugagccaagga

SEQ ID NO: 850532 - RNA, 19 nt, Human
cauggcccaaggcccacag

SEQ ID NO: 850533 - RNA, 21 nt, Human
cauggcuaacuuagucuccuc

SEQ ID NO: 850534 - RNA, 18 nt, Human
ccacagguaaacaaaaac

SEQ ID NO: 850535 - RNA, 21 nt, Human
ccagaguagcucacccaugcc

SEQ ID NO: 850536 - RNA, 21 nt, Human
ccaggguucaaacaucccaag

SEQ ID NO: 850537 - RNA, 25 nt, Human
cccacagguaaacaaaaacacucuu

SEQ ID NO: 850538 - RNA, 27 nt, Human
cccaucucuaucguaauuuuucuaaaa

SEQ ID NO: 850539 - RNA, 19 nt, Human
ccuaguguccacuucccag

SEQ ID NO: 850540 - RNA, 20 nt, Human
ccuaguguccacuucccagu

SEQ ID NO: 850541 - RNA, 19 nt, Human
ccuguaaucccagcaccuu

SEQ ID NO: 850542 - RNA, 25 nt, Human
ccuuccauuccacacaacaagaguc

SEQ ID NO: 850543 - RNA, 24 nt, Human
cgcggcucaucucccaggaagcca

SEQ ID NO: 850544 - RNA, 18 nt, Human
cgggguugagccgggcga

SEQ ID NO: 850545 - RNA, 24 nt, Human
cuaauggcuuagagguuaucuccc

SEQ ID NO: 850546 - RNA, 23 nt, Human
cucacaccuguaaucccagcacc

SEQ ID NO: 850547 - RNA, 24 nt, Human
cucacaccuguaaucccagcaccu

SEQ ID NO: 850548 - RNA, 22 nt, Human
cuccaggcugcaggaaaggcuc

SEQ ID NO: 850549 - RNA, 18 nt, Human
cuuggccagguguggugg

SEQ ID NO: 850550 - RNA, 24 nt, Human
cuuggccaggugugguggcucaca

SEQ ID NO: 850551 - RNA, 24 nt, Human
gaugacagggagagagaccaggaa

SEQ ID NO: 850552 - RNA, 19 nt, Human
gccagaugcccaccacccc

SEQ ID NO: 850553 - RNA, 20 nt, Human
ggccggggcgcggacgucgg

SEQ ID NO: 850554 - RNA, 24 nt, Human
gguggcucacaccuguaaucccag

SEQ ID NO: 850555 - RNA, 18 nt, Human
gugugguggcucacaccu

SEQ ID NO: 850556 - RNA, 22 nt, Human
uaagguaagguccaagagaacu

SEQ ID NO: 850557 - RNA, 22 nt, Human
uacacucauacagaagcuucuc

SEQ ID NO: 850558 - RNA, 19 nt, Human
ucagguaauuuccaggaug

SEQ ID NO: 850559 - RNA, 21 nt, Human
uccacacaacaagaguccaua

SEQ ID NO: 850560 - RNA, 19 nt, Human
uccagggcuuuuacuaggg

SEQ ID NO: 850561 - RNA, 24 nt, Human
ucccaggaagccaccccaacugcc

SEQ ID NO: 850562 - RNA, 18 nt, Human
ucucccagcaaugaugug

SEQ ID NO: 850563 - RNA, 21 nt, Human
ucucccagcaaugaugugugg

SEQ ID NO: 850564 - RNA, 19 nt, Human
ucucccaggaagccacccc

SEQ ID NO: 850565 - RNA, 23 nt, Human
ucucccaggagccaggcaggggc

SEQ ID NO: 850566 - RNA, 22 nt, Human
ucuucaggauaaugcuuaauuc

SEQ ID NO: 850567 - RNA, 20 nt, Human
ugagccaaggacaguuuccu

SEQ ID NO: 850568 - RNA, 24 nt, Human
ugaggugggaggacugcuugagac

SEQ ID NO: 850569 - RNA, 26 nt, Human
ugaggugggaggacugcuugagacca

SEQ ID NO: 850570 - RNA, 20 nt, Human
ugaugacagggagagagacc

SEQ ID NO: 850571 - RNA, 22 nt, Human
ugcuuaauucucccagcaauga

SEQ ID NO: 850572 - RNA, 23 nt, Human
uggaauguccaggguucaaacau

SEQ ID NO: 850573 - RNA, 24 nt, Human
uggccaggugugguggcucacacc

SEQ ID NO: 850574 - RNA, 21 nt, Human
uggcucacaccuguaauccca

SEQ ID NO: 850575 - RNA, 22 nt, Human
uggcucacaccuguaaucccag

SEQ ID NO: 850576 - RNA, 24 nt, Human
uggcucacaccuguaaucccagca

SEQ ID NO: 850577 - RNA, 20 nt, Human
ugggaggacugcuugagacc

SEQ ID NO: 850578 - RNA, 19 nt, Human
ugggaggcugaggugggag

SEQ ID NO: 850579 - RNA, 24 nt, Human
ugguggcucacaccuguaauccca

SEQ ID NO: 850580 - RNA, 24 nt, Human
uuacaguuuauuacagugaaagga

SEQ ID NO: 850581 - RNA, 21 nt, Human
uucagccagaugcccaccacc

SEQ ID NO: 850582 - RNA, 19 nt, Human
uucuuuauuuggaaugucc

SEQ ID NO: 850583 - RNA, 19 nt, Human
uuuuuuuuuuuuuuuugca

SEQ ID NO: 850584 - RNA, 18 nt, Human
uuuuuuuuuuuuuuuuug

SEQ ID NO: 850585 - RNA, 19 nt, Human
uuuuuuuuuuuuuuuuugc

SEQ ID NO: 850586 - RNA, 22 nt, Human
aaaaaaaaaaaaaaaaugaggg

SEQ ID NO: 850587 - RNA, 26 nt, Human
aaaaaaaaaaaaaaugagggauggag

SEQ ID NO: 850588 - RNA, 24 nt, Human
aaacaagacacccaaaucagcagc

SEQ ID NO: 850589 - RNA, 22 nt, Human
aaacaccgcgaacaggaaccaa

SEQ ID NO: 850590 - RNA, 24 nt, Human
aaagggaaggauugagggagacgc

SEQ ID NO: 850591 - RNA, 20 nt, Human
aaguugggaagaaaagggaa

SEQ ID NO: 850592 - RNA, 19 nt, Human
aaugagggauggagaggga

SEQ ID NO: 850593 - RNA, 23 nt, Human
acaccgcgaacaggaaccaagac

SEQ ID NO: 850594 - RNA, 24 nt, Human
agggggaaaguccaaaaaguagaa

SEQ ID NO: 850595 - RNA, 18 nt, Human
agguugggcgggcggccc

SEQ ID NO: 850596 - RNA, 20 nt, Human
agugccuccucgggcugggc

SEQ ID NO: 850597 - RNA, 24 nt, Human
auaaacaccgcgaacaggaaccaa

SEQ ID NO: 850598 - RNA, 18 nt, Human
cacugggaaugggagggg

SEQ ID NO: 850599 - RNA, 21 nt, Human
caguccauucccuauucccca

SEQ ID NO: 850600 - RNA, 22 nt, Human
cauaaacaccgcgaacaggaac

SEQ ID NO: 850601 - RNA, 24 nt, Human
cauaaacaccgcgaacaggaacca

SEQ ID NO: 850602 - RNA, 22 nt, Human
cccacccaccugauuuucuuuu

SEQ ID NO: 850603 - RNA, 24 nt, Human
cccagaccuccuaacccugagugc

SEQ ID NO: 850604 - RNA, 19 nt, Human
cccauaaacaccgcgaaca

SEQ ID NO: 850605 - RNA, 18 nt, Human
cccauaaacaccgcgaca

SEQ ID NO: 850606 - RNA, 21 nt, Human
cccccagaccccagagagccc

SEQ ID NO: 850607 - RNA, 24 nt, Human
cccccagaccccagagagccccac

SEQ ID NO: 850608 - RNA, 22 nt, Human
ccgaagaggcagcggaccaggu

SEQ ID NO: 850609 - RNA, 24 nt, Human
ccuccugacugcuguugcccguau

SEQ ID NO: 850610 - RNA, 20 nt, Human
cuccugacugcuguugcccg

SEQ ID NO: 850611 - RNA, 18 nt, Human
cuggaggacagagcuggg

SEQ ID NO: 850612 - RNA, 23 nt, Human
gaacaggaaccaagacuccaaga

SEQ ID NO: 850613 - RNA, 18 nt, Human
gcccagaccuccuaaccc

SEQ ID NO: 850614 - RNA, 23 nt, Human
gcccguauucccccagaccccag

SEQ ID NO: 850615 - RNA, 20 nt, Human
ggaaaguccaaaaaguagaa

SEQ ID NO: 850616 - RNA, 20 nt, Human
ggaaauaacccauaaacacc

SEQ ID NO: 850617 - RNA, 21 nt, Human
ggcgggcggcccuggccuggc

SEQ ID NO: 850618 - RNA, 22 nt, Human
gggcgggcggcccuggccuggc

SEQ ID NO: 850619 - RNA, 18 nt, Human
uaacccugagugccuccu

SEQ ID NO: 850620 - RNA, 21 nt, Human
uaccccuccugacugcuguug

SEQ ID NO: 850621 - RNA, 22 nt, Human
uagucacugagauuuugaacac

SEQ ID NO: 850622 - RNA, 18 nt, Human
uccaagagauucccaccc

SEQ ID NO: 850623 - RNA, 22 nt, Human
uccaagagauucccacccaccu

SEQ ID NO: 850624 - RNA, 24 nt, Human
ucccccagaccccagagagccccc

SEQ ID NO: 850625 - RNA, 21 nt, Human
ucccucuacccucagccucag

SEQ ID NO: 850626 - RNA, 18 nt, Human
uccugacugcuguugccc

SEQ ID NO: 850627 - RNA, 25 nt, Human
ucggcggcgaagugaugagggcccu

SEQ ID NO: 850628 - RNA, 22 nt, Human
ucuccaagagauucccacccac

SEQ ID NO: 850629 - RNA, 18 nt, Human
ugacaugucuacuugugu

SEQ ID NO: 850630 - RNA, 19 nt, Human
ugagggagacgcuaggcuc

SEQ ID NO: 850631 - RNA, 23 nt, Human
ugagggagacgcuaggcucugga

SEQ ID NO: 850632 - RNA, 25 nt, Human
ugagggauggagagggaaauaaccc

SEQ ID NO: 850633 - RNA, 19 nt, Human
ugagggcccuaguugcuuc

SEQ ID NO: 850634 - RNA, 19 nt, Human
ugagugccuccucgggcug

SEQ ID NO: 850635 - RNA, 21 nt, Human
ugagugccuccucgggcuggg

SEQ ID NO: 850636 - RNA, 19 nt, Human
uggccuggcucugccccgc

SEQ ID NO: 850637 - RNA, 21 nt, Human
ugggaagaaaagggaaggauu

SEQ ID NO: 850638 - RNA, 22 nt, Human
ugggcggcgccggggauucggc

SEQ ID NO: 850639 - RNA, 19 nt, Human
ugggcgggcggcccuggcc

SEQ ID NO: 850640 - RNA, 21 nt, Human
uugcccguauucccccagacc

SEQ ID NO: 850641 - RNA, 23 nt, Human
uuuuuuuuuuuuuuuuugacaug

SEQ ID NO: 850642 - RNA, 20 nt, Human
uuuuuuuuuuuuuuuuuugg

SEQ ID NO: 850643 - RNA, 21 nt, Human
aaagccauuccacauugucuu

SEQ ID NO: 850644 - RNA, 21 nt, Human
aaagcccuucccgcauuccuu

SEQ ID NO: 850645 - RNA, 18 nt, Human
aaaggacuucccacauuu

SEQ ID NO: 850646 - RNA, 18 nt, Human
acaaggugggaaaacuga

SEQ ID NO: 850647 - RNA, 24 nt, Human
accugcuuccacucugaccuccac

SEQ ID NO: 850648 - RNA, 21 nt, Human
agcuuccagcuugcacagcuc

SEQ ID NO: 850649 - RNA, 23 nt, Human
aggaagcuggcuagugaugggcc

SEQ ID NO: 850650 - RNA, 18 nt, Human
aggaauaucagaaaaguu

SEQ ID NO: 850651 - RNA, 21 nt, Human
aggcagaguucaccaugccuc

SEQ ID NO: 850652 - RNA, 25 nt, Human
aggccugcuuugagccuaaaggacu

SEQ ID NO: 850653 - RNA, 19 nt, Human
caaagggcuucucaccagu

SEQ ID NO: 850654 - RNA, 22 nt, Human
caaagggcuucucaccagugug

SEQ ID NO: 850655 - RNA, 21 nt, Human
caacagcuaaggccaggccaa

SEQ ID NO: 850656 - RNA, 20 nt, Human
caaggugggaaaacugacga

SEQ ID NO: 850657 - RNA, 21 nt, Human
cacagcucgcucuggccgucc

SEQ ID NO: 850658 - RNA, 24 nt, Human
cacagcucgcucuggccguccccu

SEQ ID NO: 850659 - RNA, 25 nt, Human
cagaaugagcccaaagguggcugcu

SEQ ID NO: 850660 - RNA, 19 nt, Human
cagaguucaccaugccucc

SEQ ID NO: 850661 - RNA, 19 nt, Human
caucggggcuguggcccag

SEQ ID NO: 850662 - RNA, 18 nt, Human
cauuacauaaggcagagu

SEQ ID NO: 850663 - RNA, 24 nt, Human
ccacauuuguuacauucaaagggc

SEQ ID NO: 850664 - RNA, 19 nt, Human
ccaccugucuguuaacucc

SEQ ID NO: 850665 - RNA, 19 nt, Human
ccagugaugacuggcgcac

SEQ ID NO: 850666 - RNA, 22 nt, Human
cgggacccucucacaccugcuu

SEQ ID NO: 850667 - RNA, 19 nt, Human
cuccauaagguuguugcuc

SEQ ID NO: 850668 - RNA, 19 nt, Human
cuggcgcucucugcuuccu

SEQ ID NO: 850669 - RNA, 22 nt, Human
cuggcgcucucugcuuccuggg

SEQ ID NO: 850670 - RNA, 18 nt, Human
cuguaaaucuuugcuacc

SEQ ID NO: 850671 - RNA, 24 nt, Human
cuuccacucugaccuccacaucua

SEQ ID NO: 850672 - RNA, 21 nt, Human
gaaaggccuuuccacauuccu

SEQ ID NO: 850673 - RNA, 22 nt, Human
gaagcagauguugaucaugagc

SEQ ID NO: 850674 - RNA, 21 nt, Human
gagucccuuccccuaccacaa

SEQ ID NO: 850675 - RNA, 20 nt, Human
gcagaguucaccaugccucc

SEQ ID NO: 850676 - RNA, 22 nt, Human
gcagauguugaucaugagcauu

SEQ ID NO: 850677 - RNA, 19 nt, Human
gcagcuggaggagcacgga

SEQ ID NO: 850678 - RNA, 19 nt, Human
gcgcucucugcuuccuggg

SEQ ID NO: 850679 - RNA, 20 nt, Human
gcuuccacucugaccuccac

SEQ ID NO: 850680 - RNA, 26 nt, Human
ggacccucucacaccugcuuccacuc

SEQ ID NO: 850681 - RNA, 21 nt, Human
gggugagggcgaaagguggug

SEQ ID NO: 850682 - RNA, 20 nt, Human
gguaaguugauaccuacaug

SEQ ID NO: 850683 - RNA, 20 nt, Human
ggugagggcgaaagguggug

SEQ ID NO: 850684 - RNA, 19 nt, Human
gugcagguaggcuggggcc

SEQ ID NO: 850685 - RNA, 19 nt, Human
guugacggcuaguccuaaa

SEQ ID NO: 850686 - RNA, 23 nt, Human
uaaggccaggccaaacuugccga

SEQ ID NO: 850687 - RNA, 18 nt, Human
uaccuacauguaaagccc

SEQ ID NO: 850688 - RNA, 26 nt, Human
uacuuccuucacuuuaagccaauuuu

SEQ ID NO: 850689 - RNA, 20 nt, Human
uaguccucuccaaugcuggu

SEQ ID NO: 850690 - RNA, 21 nt, Human
uaugacccacaaggugggaaa

SEQ ID NO: 850691 - RNA, 21 nt, Human
ucacuagggcagcuggaggag

SEQ ID NO: 850692 - RNA, 18 nt, Human
ucauuuauauaugauccc

SEQ ID NO: 850693 - RNA, 19 nt, Human
uccauacacacuggggccu

SEQ ID NO: 850694 - RNA, 21 nt, Human
uccauacacacuggggccuug

SEQ ID NO: 850695 - RNA, 22 nt, Human
uccauacacacuggggccuugc

SEQ ID NO: 850696 - RNA, 21 nt, Human
ucugaagugauuuuaccuuua

SEQ ID NO: 850697 - RNA, 19 nt, Human
ucugcagcuuccagcuugc

SEQ ID NO: 850698 - RNA, 19 nt, Human
ucuggcgcucucugcuucc

SEQ ID NO: 850699 - RNA, 23 nt, Human
ucuggcgcucucugcuuccuggg

SEQ ID NO: 850700 - RNA, 22 nt, Human
ucuguaaaucuuugcuaccagu

SEQ ID NO: 850701 - RNA, 18 nt, Human
ugaccuccacaucuaacu

SEQ ID NO: 850702 - RNA, 19 nt, Human
ugagaacagcagucaaaga

SEQ ID NO: 850703 - RNA, 19 nt, Human
ugagaacagcagucaaaga

SEQ ID NO: 850704 - RNA, 21 nt, Human
ugagagcugguaugcaauguc

SEQ ID NO: 850705 - RNA, 19 nt, Human
ugaugccuaauaaaaacug

SEQ ID NO: 850706 - RNA, 23 nt, Human
ugcagguaggcuggggccucacu

SEQ ID NO: 850707 - RNA, 21 nt, Human
ugccuuggagucacccucagc

SEQ ID NO: 850708 - RNA, 18 nt, Human
uggaagauguuuacaugc

SEQ ID NO: 850709 - RNA, 24 nt, Human
uggccagugaguuggcgaucagcu

SEQ ID NO: 850710 - RNA, 21 nt, Human
ugggaaaacugacgaaaggcc

SEQ ID NO: 850711 - RNA, 20 nt, Human
uggggccucacuagggcagc

SEQ ID NO: 850712 - RNA, 21 nt, Human
uggggugagggcgaaaggugg

SEQ ID NO: 850713 - RNA, 21 nt, Human
ugggugauuaguucuccagca

SEQ ID NO: 850714 - RNA, 19 nt, Human
uuauuauauacagaagcua

SEQ ID NO: 850715 - RNA, 18 nt, Human
uucacaccaauacaaauu

SEQ ID NO: 850716 - RNA, 19 nt, Human
uucagugggauaaauccau

SEQ ID NO: 850717 - RNA, 25 nt, Human
uugaaaaguucacaccaauacaaau

SEQ ID NO: 850718 - RNA, 21 nt, Human
uugaucaugagcauuaaauau

SEQ ID NO: 850719 - RNA, 20 nt, Human
uuggcagccauguuuucuuc

SEQ ID NO: 850720 - RNA, 21 nt, Human
uugguuuuuguacacauggga

SEQ ID NO: 850721 - RNA, 19 nt, Human
uuguugcuggaagauguuu

SEQ ID NO: 850722 - RNA, 20 nt, Human
aaaguuaagguggaagggaa

SEQ ID NO: 850723 - RNA, 24 nt, Human
aagcaggcugcagccgcucagggc

SEQ ID NO: 850724 - RNA, 19 nt, Human
aagcccaacuggggucacc

SEQ ID NO: 850725 - RNA, 20 nt, Human
aagggacacccaugguauca

SEQ ID NO: 850726 - RNA, 24 nt, Human
aagguuuauugaucauauacaaaa

SEQ ID NO: 850727 - RNA, 23 nt, Human
acacaaccuccccuggcuagacc

SEQ ID NO: 850728 - RNA, 19 nt, Human
acagccaacaggaaggcaa

SEQ ID NO: 850729 - RNA, 19 nt, Human
accacagccuaaaaaagua

SEQ ID NO: 850730 - RNA, 19 nt, Human
accaccacccucuccacca

SEQ ID NO: 850731 - RNA, 20 nt, Human
accagugccaccccgagcag

SEQ ID NO: 850732 - RNA, 22 nt, Human
acccaggacacaggccagaggc

SEQ ID NO: 850733 - RNA, 18 nt, Human
accccgcauccaaacccc

SEQ ID NO: 850734 - RNA, 19 nt, Human
accccgcauccaaacccca

SEQ ID NO: 850735 - RNA, 21 nt, Human
acccucuccaccacccucuca

SEQ ID NO: 850736 - RNA, 21 nt, Human
acuuggcggacaaguuugaga

SEQ ID NO: 850737 - RNA, 19 nt, Human
agcgccaggagagcaacag

SEQ ID NO: 850738 - RNA, 23 nt, Human
aggcaaaaauacaccaaaaagaa

SEQ ID NO: 850739 - RNA, 18 nt, Human
aggcagggcaggcaggga

SEQ ID NO: 850740 - RNA, 23 nt, Human
aggccagacagccaacaggaagg

SEQ ID NO: 850741 - RNA, 24 nt, Human
agggggugggaagaagggcagggc

SEQ ID NO: 850742 - RNA, 22 nt, Human
aggugagaagagaccaccaccc

SEQ ID NO: 850743 - RNA, 22 nt, Human
agucucucagacacgcccugcc

SEQ ID NO: 850744 - RNA, 24 nt, Human
caaaauaaagaaaaccuuauauau

SEQ ID NO: 850745 - RNA, 21 nt, Human
caaagcugcugcuccaggggc

SEQ ID NO: 850746 - RNA, 18 nt, Human
caacaccagugccacccc

SEQ ID NO: 850747 - RNA, 22 nt, Human
caacucugcuuggacccaccuc

SEQ ID NO: 850748 - RNA, 21 nt, Human
caagaacagggaggucucaca

SEQ ID NO: 850749 - RNA, 31 nt, Human
caauaaauacugcgcagggcagggguagggg

SEQ ID NO: 850750 - RNA, 21 nt, Human
cacacaaccuccccuggcuag

SEQ ID NO: 850751 - RNA, 21 nt, Human
cacacucuagcucagacucaa

SEQ ID NO: 850752 - RNA, 21 nt, Human
caccaagaacagggaggucuc

SEQ ID NO: 850753 - RNA, 20 nt, Human
caccacccucuccaccaccc

SEQ ID NO: 850754 - RNA, 22 nt, Human
caccagucagaaguguacacac

SEQ ID NO: 850755 - RNA, 23 nt, Human
cacccaggacacaggccagaggc

SEQ ID NO: 850756 - RNA, 24 nt, Human
caccccgcauccaaaccccagccc

SEQ ID NO: 850757 - RNA, 24 nt, Human
caccccgcauccaaaccccagccc

SEQ ID NO: 850758 - RNA, 20 nt, Human
cacccucuccaccacccucc

SEQ ID NO: 850759 - RNA, 20 nt, Human
cacucccguuugguuaaagg

SEQ ID NO: 850760 - RNA, 21 nt, Human
cagaaaaacugaggugagaag

SEQ ID NO: 850761 - RNA, 21 nt, Human
cagaucccggggucuucuccc

SEQ ID NO: 850762 - RNA, 19 nt, Human
cagcaacaccagugccacc

SEQ ID NO: 850763 - RNA, 24 nt, Human
cagcccuuguccuguugccaggag

SEQ ID NO: 850764 - RNA, 23 nt, Human
cagggcaggcagggacugaucaa

SEQ ID NO: 850765 - RNA, 19 nt, Human
cagguaugguacacaccca

SEQ ID NO: 850766 - RNA, 21 nt, Human
ccaaaccacagccuaaaaaag

SEQ ID NO: 850767 - RNA, 23 nt, Human
ccaaaccacagccuaaaaaagua

SEQ ID NO: 850768 - RNA, 18 nt, Human
ccaaaccccagccccucc

SEQ ID NO: 850769 - RNA, 23 nt, Human
ccaaaccccagccccuccucacu

SEQ ID NO: 850770 - RNA, 23 nt, Human
ccaaagcccaacuggggucacca

SEQ ID NO: 850771 - RNA, 25 nt, Human
ccacacacacaaccuccccuggcua

SEQ ID NO: 850772 - RNA, 21 nt, Human
ccagacagccaacaggaaggc

SEQ ID NO: 850773 - RNA, 25 nt, Human
ccagcaacaccagugccaccccgag

SEQ ID NO: 850774 - RNA, 19 nt, Human
ccaggcccagugcugcccc

SEQ ID NO: 850775 - RNA, 20 nt, Human
cccaaagcaggcugcagccg

SEQ ID NO: 850776 - RNA, 18 nt, Human
ccccgcauccaaacccca

SEQ ID NO: 850777 - RNA, 22 nt, Human
cccgcauccaaaccccagcccc

SEQ ID NO: 850778 - RNA, 19 nt, Human
cccugcccgcccuacacga

SEQ ID NO: 850779 - RNA, 18 nt, Human
cccuggcuagaccuaggc

SEQ ID NO: 850780 - RNA, 18 nt, Human
ccucaccccgcauccaaa

SEQ ID NO: 850781 - RNA, 25 nt, Human
cgcauccaaaccccagccccuccuc

SEQ ID NO: 850782 - RNA, 19 nt, Human
cggggacacacucuagcuc

SEQ ID NO: 850783 - RNA, 20 nt, Human
cgucccaaagcaggcugcag

SEQ ID NO: 850784 - RNA, 22 nt, Human
cuccaucccaccccagcagauc

SEQ ID NO: 850785 - RNA, 21 nt, Human
cugaucaccagucagaagugu

SEQ ID NO: 850786 - RNA, 22 nt, Human
cugcugcuccaggggcagggug

SEQ ID NO: 850787 - RNA, 24 nt, Human
cugggacacaagguugcuggaggg

SEQ ID NO: 850788 - RNA, 18 nt, Human
cuucagggacuagcagau

SEQ ID NO: 850789 - RNA, 25 nt, Human
gaagagaccaccacccucuccacca

SEQ ID NO: 850790 - RNA, 18 nt, Human
gaaggcaaaaauacacca

SEQ ID NO: 850791 - RNA, 23 nt, Human
gagcaacagggcuggacacgcgg

SEQ ID NO: 850792 - RNA, 19 nt, Human
gcagggguagggcaccaag

SEQ ID NO: 850793 - RNA, 21 nt, Human
gccaaagcccucgauucgcug

SEQ ID NO: 850794 - RNA, 23 nt, Human
gccaggcccagugcugccccucc

SEQ ID NO: 850795 - RNA, 22 nt, Human
gccccuccuggacaauaauuua

SEQ ID NO: 850796 - RNA, 26 nt, Human
gccucaccccgcauccaaaccccagc

SEQ ID NO: 850797 - RNA, 21 nt, Human
gcgcuuuggccaaguggccac

SEQ ID NO: 850798 - RNA, 20 nt, Human
ggacacaagguugcuggagg

SEQ ID NO: 850799 - RNA, 22 nt, Human
ggcaaaaauacaccaaaaagaa

SEQ ID NO: 850800 - RNA, 21 nt, Human
ggcagcagggacaacauggga

SEQ ID NO: 850801 - RNA, 21 nt, Human
ggcagggguagggcaccaagg

SEQ ID NO: 850802 - RNA, 19 nt, Human
ggccagaggcaggacaggc

SEQ ID NO: 850803 - RNA, 19 nt, Human
gggaagaagggcagggcug

SEQ ID NO: 850804 - RNA, 26 nt, Human
gggcagggcugggacacaagguugcu

SEQ ID NO: 850805 - RNA, 24 nt, Human
gggugggaagaagggcagggcugg

SEQ ID NO: 850806 - RNA, 19 nt, Human
ggucaccaagaacagggag

SEQ ID NO: 850807 - RNA, 20 nt, Human
ggugggaagaagggcagggc

SEQ ID NO: 850808 - RNA, 19 nt, Human
guacacacccaggacacag

SEQ ID NO: 850809 - RNA, 28 nt, Human
guguacacacauaucugaaacaugcagu

SEQ ID NO: 850810 - RNA, 25 nt, Human
gugucagaaaaacugaggugagaag

SEQ ID NO: 850811 - RNA, 19 nt, Human
uaaccuccaucccacccca

SEQ ID NO: 850812 - RNA, 20 nt, Human
uacuuggcggacaaguuuga

SEQ ID NO: 850813 - RNA, 19 nt, Human
uaucugaaacaugcaccaa

SEQ ID NO: 850814 - RNA, 18 nt, Human
uauucaguggcuucuggg

SEQ ID NO: 850815 - RNA, 18 nt, Human
ucagaaaaacugagguga

SEQ ID NO: 850816 - RNA, 25 nt, Human
ucaggccccugcccgcccuacacga

SEQ ID NO: 850817 - RNA, 18 nt, Human
uccaaaccccagccccuc

SEQ ID NO: 850818 - RNA, 18 nt, Human
ucccagagcggaaacggu

SEQ ID NO: 850819 - RNA, 23 nt, Human
ucccgaccugcuccaaggccaga

SEQ ID NO: 850820 - RNA, 19 nt, Human
ucgauucgcugugucagaa

SEQ ID NO: 850821 - RNA, 24 nt, Human
ucucucagacacgcccugccucug

SEQ ID NO: 850822 - RNA, 21 nt, Human
ugagccagcaacaccagugcc

SEQ ID NO: 850823 - RNA, 18 nt, Human
ugaggugagaagagacca

SEQ ID NO: 850824 - RNA, 24 nt, Human
ugaucauauacaaaauaaagaaaa

SEQ ID NO: 850825 - RNA, 22 nt, Human
ugccaggagaaggcuuucugug

SEQ ID NO: 850826 - RNA, 19 nt, Human
ugcccugcaagaggucagg

SEQ ID NO: 850827 - RNA, 27 nt, Human
ugcgcagggcagggguagggggaacgc

SEQ ID NO: 850828 - RNA, 21 nt, Human
ugcuggaggggccaaagccca

SEQ ID NO: 850829 - RNA, 21 nt, Human
uggacccaccucucagcgcca

SEQ ID NO: 850830 - RNA, 21 nt, Human
uggccaaguggccacuccaga

SEQ ID NO: 850831 - RNA, 21 nt, Human
ugggaagaagggcagggcugg

SEQ ID NO: 850832 - RNA, 23 nt, Human
ugggacuggcccagcagguaugg

SEQ ID NO: 850833 - RNA, 23 nt, Human
ugggggaaaaaucguuaaugugu

SEQ ID NO: 850834 - RNA, 18 nt, Human
uuaaaggcuucagggacu

SEQ ID NO: 850835 - RNA, 25 nt, Human
uucaccaaaccacagccuaaaaaag

SEQ ID NO: 850836 - RNA, 23 nt, Human
uucucccacacacacaaccuccc

SEQ ID NO: 850837 - RNA, 23 nt, Human
uuggacccaccucucagcgccag

SEQ ID NO: 850838 - RNA, 24 nt, Human
uuguuuuuucucuuuaaaagguuu

SEQ ID NO: 850839 - RNA, 22 nt, Human
uuuaauaaccuccaucccaccc

SEQ ID NO: 850840 - RNA, 18 nt, Human
uuuuuuuuuuuuuuuuug

SEQ ID NO: 850841 - RNA, 25 nt, Human
uuuuuuuuuuuuuuuuuuuguuuuu

SEQ ID NO: 850842 - RNA, 19 nt, Human
caggugaaaacgcaaacua

SEQ ID NO: 850843 - RNA, 18 nt, Human
ccgccgggcgaccaggug

SEQ ID NO: 850844 - RNA, 18 nt, Human
uuuuuuuuuuuuuuuuug

SEQ ID NO: 850845 - RNA, 22 nt, Human
uuuuuuuuuuuuuuuuuuuggg

SEQ ID NO: 850846 - RNA, 22 nt, Human
aacaucaaccaccgcaccaucc

SEQ ID NO: 850847 - RNA, 23 nt, Human
acacacacacacacacacacaca

SEQ ID NO: 850848 - RNA, 23 nt, Human
acacacacacacacacacacaca

SEQ ID NO: 850849 - RNA, 23 nt, Human
acacacacacacacacacacaca

SEQ ID NO: 850850 - RNA, 23 nt, Human
acacacacacacacacacacaca

SEQ ID NO: 850851 - RNA, 23 nt, Human
acaguaaauaggccagucaugga

SEQ ID NO: 850852 - RNA, 20 nt, Human
acuccgagggcgagggcgga

SEQ ID NO: 850853 - RNA, 22 nt, Human
agggccuuggcuguggcucugc

SEQ ID NO: 850854 - RNA, 22 nt, Human
auaaaguuuuucgcaaggguuu

SEQ ID NO: 850855 - RNA, 18 nt, Human
cacacacacacacacaca

SEQ ID NO: 850856 - RNA, 20 nt, Human
cacacacacacacacacaca

SEQ ID NO: 850857 - RNA, 20 nt, Human
cacacacacacacacacaca

SEQ ID NO: 850858 - RNA, 20 nt, Human
cacacacacacacacacaca

SEQ ID NO: 850859 - RNA, 20 nt, Human
cacacacacacacacacaca

SEQ ID NO: 850860 - RNA, 20 nt, Human
cacacacacacacacacaca

SEQ ID NO: 850861 - RNA, 20 nt, Human
cacacacacacacacacaca

SEQ ID NO: 850862 - RNA, 22 nt, Human
cacacacacacacacacacaca

SEQ ID NO: 850863 - RNA, 22 nt, Human
cacacacacacacacacacaca

SEQ ID NO: 850864 - RNA, 26 nt, Human
cacacacacacacacacacacacaca

SEQ ID NO: 850865 - RNA, 26 nt, Human
cacacacacacacacacacacacaca

SEQ ID NO: 850866 - RNA, 27 nt, Human
cacacacacacacacacacacacacua

SEQ ID NO: 850867 - RNA, 26 nt, Human
caccauccaggcacuccccagccacc

SEQ ID NO: 850868 - RNA, 21 nt, Human
caccgcgguccuaggccuggg

SEQ ID NO: 850869 - RNA, 18 nt, Human
caccuuuuucccugcaag

SEQ ID NO: 850870 - RNA, 22 nt, Human
cagauuucccugucugcucccc

SEQ ID NO: 850871 - RNA, 26 nt, Human
caggaaggagcugugccucuccccug

SEQ ID NO: 850872 - RNA, 19 nt, Human
caggguuccacccaccgcg

SEQ ID NO: 850873 - RNA, 21 nt, Human
ccccaaaggugaagggcagcu

SEQ ID NO: 850874 - RNA, 23 nt, Human
cccccuacuccgagggcgagggc

SEQ ID NO: 850875 - RNA, 23 nt, Human
cccugucugcuccccucuuccug

SEQ ID NO: 850876 - RNA, 26 nt, Human
ccuccugccucacgggaagccgggga

SEQ ID NO: 850877 - RNA, 26 nt, Human
ccugguccuggccccaugcccucagc

SEQ ID NO: 850878 - RNA, 25 nt, Human
ccugucugcuccccucuuccugugg

SEQ ID NO: 850879 - RNA, 21 nt, Human
ccuguuggggcaguagcaggg

SEQ ID NO: 850880 - RNA, 22 nt, Human
ccuuaugacugucucgggcccc

SEQ ID NO: 850881 - RNA, 19 nt, Human
cgggccccaaaggugaagg

SEQ ID NO: 850882 - RNA, 19 nt, Human
cucagcauccuuaagaaac

SEQ ID NO: 850883 - RNA, 21 nt, Human
cucaggaaggagcugugccuc

SEQ ID NO: 850884 - RNA, 20 nt, Human
cuccggcaaggggagaacuc

SEQ ID NO: 850885 - RNA, 18 nt, Human
cuggccccaugcccucag

SEQ ID NO: 850886 - RNA, 23 nt, Human
cugucugcuccccucuuccugug

SEQ ID NO: 850887 - RNA, 22 nt, Human
gagcagagaccagcauuaggga

SEQ ID NO: 850888 - RNA, 24 nt, Human
gauuggagucccuguuggggcagu

SEQ ID NO: 850889 - RNA, 19 nt, Human
gcacaaagacacacacacc

SEQ ID NO: 850890 - RNA, 19 nt, Human
gccucaguggguacacugu

SEQ ID NO: 850891 - RNA, 21 nt, Human
gcgguccuaggccugggggcg

SEQ ID NO: 850892 - RNA, 20 nt, Human
gcucugcacuggccagcugu

SEQ ID NO: 850893 - RNA, 19 nt, Human
gcuguggcucugccuccug

SEQ ID NO: 850894 - RNA, 23 nt, Human
gcuguggcucugccuccugccuc

SEQ ID NO: 850895 - RNA, 24 nt, Human
ggagucccuguuggggcaguagca

SEQ ID NO: 850896 - RNA, 18 nt, Human
ggcacaaagacacacaca

SEQ ID NO: 850897 - RNA, 21 nt, Human
ggcacaaagacacacacaccc

SEQ ID NO: 850898 - RNA, 19 nt, Human
ggcagcuccggcaagggga

SEQ ID NO: 850899 - RNA, 24 nt, Human
ggcaguggugagaggcugcucagg

SEQ ID NO: 850900 - RNA, 19 nt, Human
gggccucaguucugggauc

SEQ ID NO: 850901 - RNA, 22 nt, Human
gggggcgaaguccaggccuggc

SEQ ID NO: 850902 - RNA, 23 nt, Human
ggugagaggcugcucaggaagga

SEQ ID NO: 850903 - RNA, 24 nt, Human
guccguucucugauagcuuugccc

SEQ ID NO: 850904 - RNA, 19 nt, Human
gugaagggcagcuccggca

SEQ ID NO: 850905 - RNA, 28 nt, Human
guggcaguggugagaggcugcucaggaa

SEQ ID NO: 850906 - RNA, 19 nt, Human
guggcucugccuccugccu

SEQ ID NO: 850907 - RNA, 21 nt, Human
uaaaagagcagcagcucugca

SEQ ID NO: 850908 - RNA, 20 nt, Human
uaacaucaaccaccgcacca

SEQ ID NO: 850909 - RNA, 22 nt, Human
uaacaucaaccaccgcaccauc

SEQ ID NO: 850910 - RNA, 22 nt, Human
uaacaucaaccaccgcaccauc

SEQ ID NO: 850911 - RNA, 20 nt, Human
uaagaaacacggcuguccac

SEQ ID NO: 850912 - RNA, 25 nt, Human
uacacacacacacacacacacacac

SEQ ID NO: 850913 - RNA, 25 nt, Human
uacacacacacacacacacacacag

SEQ ID NO: 850914 - RNA, 18 nt, Human
uagacaacuggcacagaa

SEQ ID NO: 850915 - RNA, 19 nt, Human
ucauccugcccugauccag

SEQ ID NO: 850916 - RNA, 24 nt, Human
uccaccuuuuucccugcaagaaaa

SEQ ID NO: 850917 - RNA, 27 nt, Human
uccaccuuuuucccugcaagaaaacua

SEQ ID NO: 850918 - RNA, 25 nt, Human
uccaucccuuaugacugucucgggc

SEQ ID NO: 850919 - RNA, 18 nt, Human
uccccugguccuggcccc

SEQ ID NO: 850920 - RNA, 18 nt, Human
uccugaauccagauccuc

SEQ ID NO: 850921 - RNA, 24 nt, Human
ugaagggcagcuccggcaagggga

SEQ ID NO: 850922 - RNA, 19 nt, Human
ugggaucuaccacaagguc

SEQ ID NO: 850923 - RNA, 22 nt, Human
ugggcacaaagacacacacacc

SEQ ID NO: 850924 - RNA, 21 nt, Human
ugguaggcagauuucccuguc

SEQ ID NO: 850925 - RNA, 20 nt, Human
uguccaccuuuuucccugca

SEQ ID NO: 850926 - RNA, 19 nt, Human
uguggcaguggugagaggc

SEQ ID NO: 850927 - RNA, 19 nt, Human
uguggcaguggugagaggc

SEQ ID NO: 850928 - RNA, 24 nt, Human
uugguaggcagauuucccugucug

SEQ ID NO: 850929 - RNA, 31 nt, Human
uuuauuguuacacacacacacacacacacag

SEQ ID NO: 850930 - RNA, 18 nt, Human
uuuuuuuuuuuuuuuuug

SEQ ID NO: 850931 - RNA, 23 nt, Human
uuuuuuuuuuuuuuuuugacugg

SEQ ID NO: 850932 - RNA, 18 nt, Human
aagaagaaucuccacaca

SEQ ID NO: 850933 - RNA, 21 nt, Human
agacaccaaggaaggcuuccc

SEQ ID NO: 850934 - RNA, 21 nt, Human
agacagaaaacaucuugagaa

SEQ ID NO: 850935 - RNA, 22 nt, Human
agagugaaagguuucaacacau

SEQ ID NO: 850936 - RNA, 20 nt, Human
agguuuccuacguucaguuu

SEQ ID NO: 850937 - RNA, 23 nt, Human
auauaaccucuuuaaaacaugua

SEQ ID NO: 850938 - RNA, 21 nt, Human
caaaagcauucugauauggca

SEQ ID NO: 850939 - RNA, 18 nt, Human
caagcucaguaaggcccg

SEQ ID NO: 850940 - RNA, 18 nt, Human
caccaaggaaggcuuccc

SEQ ID NO: 850941 - RNA, 20 nt, Human
ccaaaguggaagcuaaaaac

SEQ ID NO: 850942 - RNA, 25 nt, Human
ccuuaugacuguguacauugccacu

SEQ ID NO: 850943 - RNA, 21 nt, Human
gaaagguuucaacacauuccu

SEQ ID NO: 850944 - RNA, 22 nt, Human
gaucugagacaccaaggaaggc

SEQ ID NO: 850945 - RNA, 22 nt, Human
gcuaaaaacaaagaagaaucuc

SEQ ID NO: 850946 - RNA, 22 nt, Human
ggccuauggaaggagccaagau

SEQ ID NO: 850947 - RNA, 24 nt, Human
uaaaaacaaagaagaaucuccaca

SEQ ID NO: 850948 - RNA, 22 nt, Human
uaaggccuauggaaggagccaa

SEQ ID NO: 850949 - RNA, 19 nt, Human
uauauaaccucuuuaaaac

SEQ ID NO: 850950 - RNA, 25 nt, Human
uauggaaggagccaagauuuuccca

SEQ ID NO: 850951 - RNA, 22 nt, Human
ucuucuauuggaauuguuaaga

SEQ ID NO: 850952 - RNA, 21 nt, Human
ugagaaagaugaucgggacac

SEQ ID NO: 850953 - RNA, 22 nt, Human
ugagacaccaaggaagggggag

SEQ ID NO: 850954 - RNA, 21 nt, Human
ugaggaaguaguggcuuuacc

SEQ ID NO: 850955 - RNA, 23 nt, Human
uggaaggagccaagauuuuccca

SEQ ID NO: 850956 - RNA, 18 nt, Human
uguucaguaagugugagg

SEQ ID NO: 850957 - RNA, 24 nt, Human
uucaacacauuccuuacagccaga

SEQ ID NO: 850958 - RNA, 19 nt, Human
uuccuacguucaguuuguu

SEQ ID NO: 850959 - RNA, 23 nt, Human
uucuuuccaaguaucagccccaa

SEQ ID NO: 850960 - RNA, 21 nt, Human
uuugaccuuccauacagucag

SEQ ID NO: 850961 - RNA, 21 nt, Human
aacagguccagcgacuguggc

SEQ ID NO: 850962 - RNA, 19 nt, Human
acagcagcuaggacuggga

SEQ ID NO: 850963 - RNA, 18 nt, Human
acccccucccugucccca

SEQ ID NO: 850964 - RNA, 20 nt, Human
agaagccaggcccugaggcu

SEQ ID NO: 850965 - RNA, 19 nt, Human
agccuggugggcaaggggg

SEQ ID NO: 850966 - RNA, 20 nt, Human
aggagggaggacucucagca

SEQ ID NO: 850967 - RNA, 18 nt, Human
aggcugggguuuggagaa

SEQ ID NO: 850968 - RNA, 18 nt, Human
agggaggcaggguucgug

SEQ ID NO: 850969 - RNA, 23 nt, Human
agggagggguacagacuggaagu

SEQ ID NO: 850970 - RNA, 20 nt, Human
caccauccucuccaggagca

SEQ ID NO: 850971 - RNA, 21 nt, Human
caccccgacugugaugggggc

SEQ ID NO: 850972 - RNA, 20 nt, Human
cacuggccuuucccaggucc

SEQ ID NO: 850973 - RNA, 23 nt, Human
cacuggccuuucccagguccucc

SEQ ID NO: 850974 - RNA, 18 nt, Human
cagcaacaacuccccgcc

SEQ ID NO: 850975 - RNA, 19 nt, Human
cagcagcuaggacugggag

SEQ ID NO: 850976 - RNA, 19 nt, Human
caggagcaggccacuggcc

SEQ ID NO: 850977 - RNA, 20 nt, Human
caggcccugaggcuggagag

SEQ ID NO: 850978 - RNA, 19 nt, Human
cagggcaggagacagcagc

SEQ ID NO: 850979 - RNA, 20 nt, Human
ccacggcagacacccaugcu

SEQ ID NO: 850980 - RNA, 20 nt, Human
ccauguugaugcagagcaac

SEQ ID NO: 850981 - RNA, 19 nt, Human
cccacuggaccaaggucgg

SEQ ID NO: 850982 - RNA, 25 nt, Human
cccagagagccugggacagcggacc

SEQ ID NO: 850983 - RNA, 21 nt, Human
cccagugcucccagccccacg

SEQ ID NO: 850984 - RNA, 18 nt, Human
cccccauucuggguuccu

SEQ ID NO: 850985 - RNA, 20 nt, Human
ccuagggaggcaggguucga

SEQ ID NO: 850986 - RNA, 22 nt, Human
ccucacagagccuccggcaggg

SEQ ID NO: 850987 - RNA, 24 nt, Human
ccucacagagccuccggcagggau

SEQ ID NO: 850988 - RNA, 21 nt, Human
cgccccagugcucccagcccc

SEQ ID NO: 850989 - RNA, 20 nt, Human
cgcuugggagggggccgagu

SEQ ID NO: 850990 - RNA, 21 nt, Human
cggcagcaacaacuccccgcc

SEQ ID NO: 850991 - RNA, 20 nt, Human
cugcugcucugaagagcccc

SEQ ID NO: 850992 - RNA, 22 nt, Human
cuggagacccucaccccgacug

SEQ ID NO: 850993 - RNA, 23 nt, Human
cuggagacccucaccccgacugu

SEQ ID NO: 850994 - RNA, 23 nt, Human
cuggagacccucaccccgacugu

SEQ ID NO: 850995 - RNA, 23 nt, Human
cuggagacccucaccccgacugu

SEQ ID NO: 850996 - RNA, 23 nt, Human
cuggagacccucaccccgacugu

SEQ ID NO: 850997 - RNA, 23 nt, Human
gagccccuggugaguaggaacag

SEQ ID NO: 850998 - RNA, 23 nt, Human
gaggacucucagcagggcaggag

SEQ ID NO: 850999 - RNA, 22 nt, Human
gaggggaggccgugcugguggc

SEQ ID NO: 851000 - RNA, 22 nt, Human
gcacccccucccuguccccaag

SEQ ID NO: 851001 - RNA, 19 nt, Human
gcccacuggaccaaggucg

SEQ ID NO: 851002 - RNA, 22 nt, Human
gccccagugcucccagccccac

SEQ ID NO: 851003 - RNA, 19 nt, Human
gcccccaacagaagccagg

SEQ ID NO: 851004 - RNA, 25 nt, Human
gcccugggcuugcgugguggcccca

SEQ ID NO: 851005 - RNA, 18 nt, Human
gcccuggguuugagcagg

SEQ ID NO: 851006 - RNA, 18 nt, Human
gccugggacagacuugca

SEQ ID NO: 851007 - RNA, 18 nt, Human
ggagcccaggagggagga

SEQ ID NO: 851008 - RNA, 22 nt, Human
ggcauagggcugugggcauggg

SEQ ID NO: 851009 - RNA, 19 nt, Human
ggccacuggccuuucccag

SEQ ID NO: 851010 - RNA, 19 nt, Human
ggcugugggcauggggaca

SEQ ID NO: 851011 - RNA, 22 nt, Human
ggggcagggagcccaggaggga

SEQ ID NO: 851012 - RNA, 19 nt, Human
ggggguagggaggcuggca

SEQ ID NO: 851013 - RNA, 18 nt, Human
gggguagggaggcuggca

SEQ ID NO: 851014 - RNA, 20 nt, Human
ggguagggaggcuggcagau

SEQ ID NO: 851015 - RNA, 19 nt, Human
gguggcugggcggggggca

SEQ ID NO: 851016 - RNA, 22 nt, Human
gguggcugggcggggggcaggg

SEQ ID NO: 851017 - RNA, 22 nt, Human
guugcucuggggggagaucuuc

SEQ ID NO: 851018 - RNA, 19 nt, Human
ucccagagagccugggaca

SEQ ID NO: 851019 - RNA, 21 nt, Human
uccgugcagcgcagggggcug

SEQ ID NO: 851020 - RNA, 19 nt, Human
uccugcugcucugaagagc

SEQ ID NO: 851021 - RNA, 20 nt, Human
ugaagagccccuggugagua

SEQ ID NO: 851022 - RNA, 22 nt, Human
ugaaggaggggcuuaguuuuuc

SEQ ID NO: 851023 - RNA, 18 nt, Human
ugagagcacagacugggu

SEQ ID NO: 851024 - RNA, 19 nt, Human
ugagcagguguccugcugc

SEQ ID NO: 851025 - RNA, 20 nt, Human
ugaguaggaacaggacggca

SEQ ID NO: 851026 - RNA, 22 nt, Human
ugcugggcuccccacagaccuc

SEQ ID NO: 851027 - RNA, 22 nt, Human
uggaggggaggccgugcuggug

SEQ ID NO: 851028 - RNA, 18 nt, Human
uggcugggcggggggcag

SEQ ID NO: 851029 - RNA, 18 nt, Human
uggcugggcggggggcag

SEQ ID NO: 851030 - RNA, 22 nt, Human
ugggagcgggaggcccgccgug

SEQ ID NO: 851031 - RNA, 19 nt, Human
ugggagggggccgaguccu

SEQ ID NO: 851032 - RNA, 23 nt, Human
ugucccgaagcccccauucuggg

SEQ ID NO: 851033 - RNA, 24 nt, Human
uucccagguccuccaggagggcug

SEQ ID NO: 851034 - RNA, 19 nt, Human
uugaugcagagcaacaggu

SEQ ID NO: 851035 - RNA, 19 nt, Human
uugcaggcugggguuugga

SEQ ID NO: 851036 - RNA, 20 nt, Human
uugggagggggccgaguccu

SEQ ID NO: 851037 - RNA, 20 nt, Human
aaaaagaaaaagaaaaaccc

SEQ ID NO: 851038 - RNA, 20 nt, Human
aaacccuaccaagaacaaac

SEQ ID NO: 851039 - RNA, 23 nt, Human
acagccggugcugucacacccaa

SEQ ID NO: 851040 - RNA, 25 nt, Human
agaaaaagaaaaacccuaccaagaa

SEQ ID NO: 851041 - RNA, 23 nt, Human
agccagcaacagccggugcuguc

SEQ ID NO: 851042 - RNA, 28 nt, Human
auguuuauuuaaaaaagaaaaagaaaaa

SEQ ID NO: 851043 - RNA, 24 nt, Human
caaugagaaaucaaugcuuccucu

SEQ ID NO: 851044 - RNA, 18 nt, Human
cacagcccagccaccccc

SEQ ID NO: 851045 - RNA, 22 nt, Human
cacagcccagccacccccacag

SEQ ID NO: 851046 - RNA, 21 nt, Human
cagccacccccacagccucag

SEQ ID NO: 851047 - RNA, 18 nt, Human
ccagccacccccacagcc

SEQ ID NO: 851048 - RNA, 22 nt, Human
ccagccacccccacagccucag

SEQ ID NO: 851049 - RNA, 22 nt, Human
cccagccacccccacagccuca

SEQ ID NO: 851050 - RNA, 22 nt, Human
ccggugcugucacacccaagaa

SEQ ID NO: 851051 - RNA, 25 nt, Human
gaaaaacccuaccaagaacaaaccc

SEQ ID NO: 851052 - RNA, 18 nt, Human
gccacccccacagccuca

SEQ ID NO: 851053 - RNA, 24 nt, Human
gcccacuaccacagcccagccacc

SEQ ID NO: 851054 - RNA, 21 nt, Human
gcugccuaugcccacuaccac

SEQ ID NO: 851055 - RNA, 25 nt, Human
uaccaagaacaaacccuggucaaug

SEQ ID NO: 851056 - RNA, 23 nt, Human
ucaaugagaaaucaaugcuuccu

SEQ ID NO: 851057 - RNA, 22 nt, Human
ucacacccaagaaguacaggua

SEQ ID NO: 851058 - RNA, 27 nt, Human
ugagaaaucaaugcuuccucugaaagc

SEQ ID NO: 851059 - RNA, 21 nt, Human
uuauuuaaaaaagaaaaagaa

SEQ ID NO: 851060 - RNA, 26 nt, Human
uuauuuaaaaaagaaaaagaaaaacc

SEQ ID NO: 851061 - RNA, 18 nt, Human
uucuguggucaaaacugg

SEQ ID NO: 851062 - RNA, 23 nt, Human
uuuaaaaaagaaaaagaaaaacc

SEQ ID NO: 851063 - RNA, 21 nt, Human
agggaacuucucuggcucagu

SEQ ID NO: 851064 - RNA, 19 nt, Human
auugcaguagcaacagcgg

SEQ ID NO: 851065 - RNA, 18 nt, Human
cacagcacagcagaaagc

SEQ ID NO: 851066 - RNA, 20 nt, Human
gcaguagcaacagcggcaac

SEQ ID NO: 851067 - RNA, 22 nt, Human
gcgcagcuccacagagcccucg

SEQ ID NO: 851068 - RNA, 23 nt, Human
ggcaacugacugcaggaucacag

SEQ ID NO: 851069 - RNA, 18 nt, Human
uagcaacagcggcaacug

SEQ ID NO: 851070 - RNA, 22 nt, Human
uagcaacagcggcaacugacug

SEQ ID NO: 851071 - RNA, 21 nt, Human
aaaaacacuaaaagcaagcca

SEQ ID NO: 851072 - RNA, 21 nt, Human
aaaaagacaauggagguggug

SEQ ID NO: 851073 - RNA, 24 nt, Human
aaacaccaaaaacacuaaaagcaa

SEQ ID NO: 851074 - RNA, 20 nt, Human
aacacugccuggacucagau

SEQ ID NO: 851075 - RNA, 21 nt, Human
aacucagcccugccucaguag

SEQ ID NO: 851076 - RNA, 23 nt, Human
aacuccagaaaaccugagugcua

SEQ ID NO: 851077 - RNA, 24 nt, Human
aagacaauggagguggugggugcc

SEQ ID NO: 851078 - RNA, 23 nt, Human
aagcaagccaugaugaauggcac

SEQ ID NO: 851079 - RNA, 21 nt, Human
aauggcacguggugcuugguc

SEQ ID NO: 851080 - RNA, 18 nt, Human
aauugcuugaacucugga

SEQ ID NO: 851081 - RNA, 18 nt, Human
acaccacugcacuccagc

SEQ ID NO: 851082 - RNA, 20 nt, Human
acaccacugcacuccagccu

SEQ ID NO: 851083 - RNA, 24 nt, Human
acagagcaggaagcugucucagaa

SEQ ID NO: 851084 - RNA, 20 nt, Human
acaggaucacuucagccaag

SEQ ID NO: 851085 - RNA, 19 nt, Human
accacugcacuccagccug

SEQ ID NO: 851086 - RNA, 24 nt, Human
accacugcacuccagccuggguga

SEQ ID NO: 851087 - RNA, 18 nt, Human
accccaucacacacacac

SEQ ID NO: 851088 - RNA, 19 nt, Human
accucaguccucuuagcac

SEQ ID NO: 851089 - RNA, 21 nt, Human
accucccugcaggccgccggu

SEQ ID NO: 851090 - RNA, 20 nt, Human
acggaucggcugccuccccu

SEQ ID NO: 851091 - RNA, 24 nt, Human
acugcacuccagccugggugacag

SEQ ID NO: 851092 - RNA, 26 nt, Human
acugcacuccagccugggugacagag

SEQ ID NO: 851093 - RNA, 18 nt, Human
agaaaaccugagugcuac

SEQ ID NO: 851094 - RNA, 21 nt, Human
agacgacaggaucacuucagc

SEQ ID NO: 851095 - RNA, 18 nt, Human
agagcccugggcaguggg

SEQ ID NO: 851096 - RNA, 22 nt, Human
agagguugcagugagcugagau

SEQ ID NO: 851097 - RNA, 24 nt, Human
agagguugcagugagcugagauug

SEQ ID NO: 851098 - RNA, 23 nt, Human
agcccuguucacaccacugcacu

SEQ ID NO: 851099 - RNA, 18 nt, Human
aggaaggagaauugcuug

SEQ ID NO: 851100 - RNA, 26 nt, Human
aggaaggagaauugcuugaacucugg

SEQ ID NO: 851101 - RNA, 20 nt, Human
aggaguuugagaccagccug

SEQ ID NO: 851102 - RNA, 20 nt, Human
aggcagagguugcagugagc

SEQ ID NO: 851103 - RNA, 24 nt, Human
aggcagagguugcagugagcugag

SEQ ID NO: 851104 - RNA, 24 nt, Human
aggcugaggaaggagaauugcuug

SEQ ID NO: 851105 - RNA, 24 nt, Human
aggugcuggcagaggaggcugcuc

SEQ ID NO: 851106 - RNA, 24 nt, Human
aguguugcccgccuguagucucag

SEQ ID NO: 851107 - RNA, 25 nt, Human
aguguugcccgccuguagucucaga

SEQ ID NO: 851108 - RNA, 19 nt, Human
aguugccaaaucuuuggau

SEQ ID NO: 851109 - RNA, 22 nt, Human
auaaaugagcgggaaaugccag

SEQ ID NO: 851110 - RNA, 19 nt, Human
aucacacacacacacacac

SEQ ID NO: 851111 - RNA, 23 nt, Human
aucacuuaaaaacacugccugga

SEQ ID NO: 851112 - RNA, 23 nt, Human
auggugguagcucacgccuguaa

SEQ ID NO: 851113 - RNA, 18 nt, Human
auugcacuccagccuggg

SEQ ID NO: 851114 - RNA, 24 nt, Human
auugcacuccagccugggcaacaa

SEQ ID NO: 851115 - RNA, 24 nt, Human
auugcgcuauugcacuccagccug

SEQ ID NO: 851116 - RNA, 25 nt, Human
caaacucaaaugaccauaggaacuc

SEQ ID NO: 851117 - RNA, 20 nt, Human
caacaagagcaaaaccccau

SEQ ID NO: 851118 - RNA, 21 nt, Human
caacaagagcaaaaccccauc

SEQ ID NO: 851119 - RNA, 18 nt, Human
cacacacacacacacaca

SEQ ID NO: 851120 - RNA, 21 nt, Human
cacaccacugcacuccagccu

SEQ ID NO: 851121 - RNA, 26 nt, Human
caccacugcacuccagccugggugac

SEQ ID NO: 851122 - RNA, 25 nt, Human
cacccuuucucuccaacuccagaaa

SEQ ID NO: 851123 - RNA, 24 nt, Human
caccucugggcugagaaacagcuu

SEQ ID NO: 851124 - RNA, 23 nt, Human
cacgccuguaaucccagcacuug

SEQ ID NO: 851125 - RNA, 24 nt, Human
cacuccagccugggcaacaagagc

SEQ ID NO: 851126 - RNA, 22 nt, Human
cacuccagccugggugacagag

SEQ ID NO: 851127 - RNA, 23 nt, Human
cacuccagccugggugacagagc

SEQ ID NO: 851128 - RNA, 19 nt, Human
cacugcacuccagccuggg

SEQ ID NO: 851129 - RNA, 19 nt, Human
cacugcacuccagccuggg

SEQ ID NO: 851130 - RNA, 22 nt, Human
cacugcacuccagccuggguga

SEQ ID NO: 851131 - RNA, 23 nt, Human
cacugcacuccagccugggugac

SEQ ID NO: 851132 - RNA, 24 nt, Human
cacugcacuccagccugggugaca

SEQ ID NO: 851133 - RNA, 25 nt, Human
cacugcacuccagccugggugacag

SEQ ID NO: 851134 - RNA, 21 nt, Human
cacuuaaaaacacugccugga

SEQ ID NO: 851135 - RNA, 22 nt, Human
cagaaaaccugagugcuacaga

SEQ ID NO: 851136 - RNA, 24 nt, Human
cagaaauaaauaaauaaauaaaua

SEQ ID NO: 851137 - RNA, 21 nt, Human
cagccaaggaguuugagacca

SEQ ID NO: 851138 - RNA, 24 nt, Human
cagcucuugcccuagauucuggga

SEQ ID NO: 851139 - RNA, 22 nt, Human
ccaagaucagacuguccgcacc

SEQ ID NO: 851140 - RNA, 20 nt, Human
ccacugcacuccagccuggg

SEQ ID NO: 851141 - RNA, 20 nt, Human
ccacugcacuccagccuggg

SEQ ID NO: 851142 - RNA, 21 nt, Human
ccacugcacuccagccugggu

SEQ ID NO: 851143 - RNA, 21 nt, Human
ccacugcacuccagccugggu

SEQ ID NO: 851144 - RNA, 24 nt, Human
ccacugcacuccagccugggugac

SEQ ID NO: 851145 - RNA, 20 nt, Human
ccaguacacagucacaggau

SEQ ID NO: 851146 - RNA, 24 nt, Human
ccaucacacacacacacacacaaa

SEQ ID NO: 851147 - RNA, 21 nt, Human
cccaucacacacacacacaca

SEQ ID NO: 851148 - RNA, 20 nt, Human
ccccugagcccaucucgggc

SEQ ID NO: 851149 - RNA, 22 nt, Human
ccccuuauguaggucugggggu

SEQ ID NO: 851150 - RNA, 20 nt, Human
cccguaaugucuagauaguc

SEQ ID NO: 851151 - RNA, 22 nt, Human
cccugagcccaucucgggccuc

SEQ ID NO: 851152 - RNA, 26 nt, Human
ccgacgacggaucggcugccuccccu

SEQ ID NO: 851153 - RNA, 21 nt, Human
ccuccugcgcccgagaaagcc

SEQ ID NO: 851154 - RNA, 19 nt, Human
ccucugggcugagaaacag

SEQ ID NO: 851155 - RNA, 21 nt, Human
ccugcggaaccuccugcgccc

SEQ ID NO: 851156 - RNA, 19 nt, Human
ccugggugacagagcagga

SEQ ID NO: 851157 - RNA, 19 nt, Human
ccuguaaucccagcacuug

SEQ ID NO: 851158 - RNA, 21 nt, Human
ccuguaaucccagcacuugcg

SEQ ID NO: 851159 - RNA, 21 nt, Human
ccuguagucccagcuacuugg

SEQ ID NO: 851160 - RNA, 22 nt, Human
ccuguagucccagcuacuuggg

SEQ ID NO: 851161 - RNA, 24 nt, Human
cgcaggccagauccaguacacagu

SEQ ID NO: 851162 - RNA, 24 nt, Human
cgccuguaaucccagcacuugcgg

SEQ ID NO: 851163 - RNA, 24 nt, Human
cgcuauugcacuccagccugggca

SEQ ID NO: 851164 - RNA, 19 nt, Human
cgggccccugagcccaucu

SEQ ID NO: 851165 - RNA, 19 nt, Human
cuacagaccacuguuugca

SEQ ID NO: 851166 - RNA, 20 nt, Human
cuauugcacuccagccuggg

SEQ ID NO: 851167 - RNA, 24 nt, Human
cuauugcacuccagccugggcaac

SEQ ID NO: 851168 - RNA, 24 nt, Human
cucacgccuguaaucccagcacuu

SEQ ID NO: 851169 - RNA, 25 nt, Human
cucacgccuguaaucccagcacuug

SEQ ID NO: 851170 - RNA, 18 nt, Human
cucagcccugccucagua

SEQ ID NO: 851171 - RNA, 20 nt, Human
cucagcucccaacaacugug

SEQ ID NO: 851172 - RNA, 25 nt, Human
cuccagaaaaccugagugcuacaga

SEQ ID NO: 851173 - RNA, 20 nt, Human
cucccugcaggccgccgcag

SEQ ID NO: 851174 - RNA, 24 nt, Human
cucccugcaggccgccgcagaggu

SEQ ID NO: 851175 - RNA, 20 nt, Human
cuggccuggccugggccugc

SEQ ID NO: 851176 - RNA, 24 nt, Human
cugggcaacaagagcaaaacccca

SEQ ID NO: 851177 - RNA, 18 nt, Human
cuucccuuucuucuucgc

SEQ ID NO: 851178 - RNA, 19 nt, Human
cuucccuuucuucuucgcu

SEQ ID NO: 851179 - RNA, 20 nt, Human
cuugccacccuuucucucca

SEQ ID NO: 851180 - RNA, 24 nt, Human
gaggaaggagaauugcuugaacuc

SEQ ID NO: 851181 - RNA, 20 nt, Human
gaguugccaaaucuuuggau

SEQ ID NO: 851182 - RNA, 24 nt, Human
gcacuccagccugggugacagagc

SEQ ID NO: 851183 - RNA, 18 nt, Human
gcaguaaaaagacaaugg

SEQ ID NO: 851184 - RNA, 23 nt, Human
gccaggcauggugguagcucacg

SEQ ID NO: 851185 - RNA, 19 nt, Human
gcccaagaucagacugucc

SEQ ID NO: 851186 - RNA, 21 nt, Human
gccuuggagagcccugggcag

SEQ ID NO: 851187 - RNA, 22 nt, Human
gcuauugcacuccagccugggc

SEQ ID NO: 851188 - RNA, 24 nt, Human
gcuauugcacuccagccugggcaa

SEQ ID NO: 851189 - RNA, 24 nt, Human
gcucagcucccaacaacugugguu

SEQ ID NO: 851190 - RNA, 20 nt, Human
gcugcaguuagcccuguuca

SEQ ID NO: 851191 - RNA, 22 nt, Human
gcuguacuuuaagauaaacacc

SEQ ID NO: 851192 - RNA, 18 nt, Human
ggagcaaggugcuggcag

SEQ ID NO: 851193 - RNA, 22 nt, Human
ggagcaaggugcuggcagagga

SEQ ID NO: 851194 - RNA, 22 nt, Human
ggaggcugaggaaggagaauug

SEQ ID NO: 851195 - RNA, 24 nt, Human
ggccguaguguugcccgccuguag

SEQ ID NO: 851196 - RNA, 23 nt, Human
ggccuuggagagcccugggcagu

SEQ ID NO: 851197 - RNA, 24 nt, Human
gguagcucacgccuguaaucccag

SEQ ID NO: 851198 - RNA, 23 nt, Human
gguggugggugccuguaguccca

SEQ ID NO: 851199 - RNA, 19 nt, Human
guaaaacaagguucuccuc

SEQ ID NO: 851200 - RNA, 19 nt, Human
guugcagugagcugagauu

SEQ ID NO: 851201 - RNA, 20 nt, Human
guugcccgccuguagucuca

SEQ ID NO: 851202 - RNA, 18 nt, Human
uaaaaagacaauggguaa

SEQ ID NO: 851203 - RNA, 23 nt, Human
uaagauaaacaccaaaaacacua

SEQ ID NO: 851204 - RNA, 27 nt, Human
uaagauaaacaccaaaaacacuaaaag

SEQ ID NO: 851205 - RNA, 21 nt, Human
uaagggcccaagaucagacug

SEQ ID NO: 851206 - RNA, 18 nt, Human
uaccucaguccucuuagc

SEQ ID NO: 851207 - RNA, 20 nt, Human
uaccucaguccucuuagcaa

SEQ ID NO: 851208 - RNA, 18 nt, Human
uagauucugggaccuccc

SEQ ID NO: 851209 - RNA, 22 nt, Human
uagcucacgccuguaaucccag

SEQ ID NO: 851210 - RNA, 24 nt, Human
uagcucacgccuguaaucccagca

SEQ ID NO: 851211 - RNA, 22 nt, Human
uauugcacuccagccugggcaa

SEQ ID NO: 851212 - RNA, 24 nt, Human
uauugcacuccagccugggcaaca

SEQ ID NO: 851213 - RNA, 21 nt, Human
uauuuggacagagacaugggu

SEQ ID NO: 851214 - RNA, 19 nt, Human
ucaaaugaccauaggaacu

SEQ ID NO: 851215 - RNA, 23 nt, Human
ucacaccacugcacuccagccug

SEQ ID NO: 851216 - RNA, 22 nt, Human
uccagccugggugacagagcag

SEQ ID NO: 851217 - RNA, 23 nt, Human
uccagccugggugacagagcagg

SEQ ID NO: 851218 - RNA, 18 nt, Human
ucccugcaggccgccgca

SEQ ID NO: 851219 - RNA, 20 nt, Human
ucccugcaggccgccgcaga

SEQ ID NO: 851220 - RNA, 19 nt, Human
ucucagaaauaaauaaaua

SEQ ID NO: 851221 - RNA, 23 nt, Human
ucucagauauuuggaaggcugau

SEQ ID NO: 851222 - RNA, 23 nt, Human
ucucucuugccacccuuucucuc

SEQ ID NO: 851223 - RNA, 24 nt, Human
ugagauugcgcuauugcacuccag

SEQ ID NO: 851224 - RNA, 20 nt, Human
ugaggcugcaguuagcccug

SEQ ID NO: 851225 - RNA, 18 nt, Human
ugcacuccagccugggca

SEQ ID NO: 851226 - RNA, 19 nt, Human
ugcacuccagccugggcaa

SEQ ID NO: 851227 - RNA, 19 nt, Human
ugcacuccagccugggcaa

SEQ ID NO: 851228 - RNA, 20 nt, Human
ugcacuccagccugggcaac

SEQ ID NO: 851229 - RNA, 22 nt, Human
ugcacuccagccugggcaacaa

SEQ ID NO: 851230 - RNA, 23 nt, Human
ugccuguagucccagcuacuugg

SEQ ID NO: 851231 - RNA, 24 nt, Human
ugccuguagucccagcuacuuggg

SEQ ID NO: 851232 - RNA, 22 nt, Human
ugcgcccgagaaagccucgugc

SEQ ID NO: 851233 - RNA, 23 nt, Human
uggaggcagagguugcagugagc

SEQ ID NO: 851234 - RNA, 18 nt, Human
uggccuggccugggccug

SEQ ID NO: 851235 - RNA, 21 nt, Human
uggccugggccugcggaaccu

SEQ ID NO: 851236 - RNA, 23 nt, Human
ugggaggcugaggaaggagaauu

SEQ ID NO: 851237 - RNA, 23 nt, Human
ugggcaacaagagcaaaacccca

SEQ ID NO: 851238 - RNA, 27 nt, Human
ugggcaguggggagcaaggugcuggga

SEQ ID NO: 851239 - RNA, 18 nt, Human
ugggcugagaaacagcuu

SEQ ID NO: 851240 - RNA, 24 nt, Human
ugguagcucacgccuguaauccca

SEQ ID NO: 851241 - RNA, 20 nt, Human
ugguggggauggguggccgg

SEQ ID NO: 851242 - RNA, 24 nt, Human
uggugggugccuguagucccagcu

SEQ ID NO: 851243 - RNA, 18 nt, Human
uguugcccgccuguaguc

SEQ ID NO: 851244 - RNA, 21 nt, Human
uguugcccgccuguagucuca

SEQ ID NO: 851245 - RNA, 24 nt, Human
uucacaccacugcacuccagccug

SEQ ID NO: 851246 - RNA, 18 nt, Human
uuccuugagcacugcagg

SEQ ID NO: 851247 - RNA, 22 nt, Human
uugcaaacucaaaugaccauag

SEQ ID NO: 851248 - RNA, 20 nt, Human
uugcagugagcugagauugc

SEQ ID NO: 851249 - RNA, 22 nt, Human
uugcagugagcugagauugcgc

SEQ ID NO: 851250 - RNA, 18 nt, Human
uugcuugaacucuggagg

SEQ ID NO: 851251 - RNA, 23 nt, Human
uugggaggcugaggaaggagaau

SEQ ID NO: 851252 - RNA, 21 nt, Human
uuuaagauaaacaccaaaaac

SEQ ID NO: 851253 - RNA, 23 nt, Human
uuuggaaggcugaugggagagga

SEQ ID NO: 851254 - RNA, 24 nt, Human
uuuuacuucucucuugccacccuu

SEQ ID NO: 851255 - RNA, 22 nt, Human
aaacaaaucaaugugaagagac

SEQ ID NO: 851256 - RNA, 22 nt, Human
acaccugauaguuccuagccuu

SEQ ID NO: 851257 - RNA, 21 nt, Human
acauaacuugcagcaucagcc

SEQ ID NO: 851258 - RNA, 19 nt, Human
agugggaaaaagggaaagg

SEQ ID NO: 851259 - RNA, 20 nt, Human
aguuccuagccuuagacaua

SEQ ID NO: 851260 - RNA, 23 nt, Human
auuuagugggaaaaagggaaagg

SEQ ID NO: 851261 - RNA, 23 nt, Human
caaagugcacuggagaguuaaaa

SEQ ID NO: 851262 - RNA, 18 nt, Human
cacuggagaguuaaaaug

SEQ ID NO: 851263 - RNA, 25 nt, Human
cccggcgcaggccggcuguccucuc

SEQ ID NO: 851264 - RNA, 21 nt, Human
gagaguuaaaaugguuacaug

SEQ ID NO: 851265 - RNA, 19 nt, Human
uaagaaaaaauuuaguggg

SEQ ID NO: 851266 - RNA, 19 nt, Human
ugaagagacuuuaauggca

SEQ ID NO: 851267 - RNA, 22 nt, Human
ugugcuacaauuauagacaccu

SEQ ID NO: 851268 - RNA, 24 nt, Human
uuuaagaaaaaauuuagugggaaa

SEQ ID NO: 851269 - RNA, 18 nt, Human
uuuuuuuuuuuuuuuuug

SEQ ID NO: 851270 - RNA, 19 nt, Human
accuacaaugaaaccacuu

SEQ ID NO: 851271 - RNA, 22 nt, Human
acuacuucgaaggcugaggcag

SEQ ID NO: 851272 - RNA, 22 nt, Human
acuucgaaggcugaggcaggag

SEQ ID NO: 851273 - RNA, 23 nt, Human
agccaggcacgguggcgugggcc

SEQ ID NO: 851274 - RNA, 23 nt, Human
agccugggcaacauagaagaccc

SEQ ID NO: 851275 - RNA, 23 nt, Human
agccugggcaacauagaagaccc

SEQ ID NO: 851276 - RNA, 22 nt, Human
aggaaaccauucacuucauagc

SEQ ID NO: 851277 - RNA, 18 nt, Human
aggaguccaucuuggccu

SEQ ID NO: 851278 - RNA, 24 nt, Human
aggaucacuugaucccaggaguuc

SEQ ID NO: 851279 - RNA, 24 nt, Human
aggaucuucccugacauuaaauau

SEQ ID NO: 851280 - RNA, 18 nt, Human
aggcaggaggaucacuug

SEQ ID NO: 851281 - RNA, 24 nt, Human
aggcugaggcaggaggaucacuug

SEQ ID NO: 851282 - RNA, 23 nt, Human
aucacuugaucccaggaguucaa

SEQ ID NO: 851283 - RNA, 22 nt, Human
auuaggaaaugcuaaaaaccca

SEQ ID NO: 851284 - RNA, 21 nt, Human
caaacagauuaacauugcaaa

SEQ ID NO: 851285 - RNA, 18 nt, Human
caacauagaagacccugg

SEQ ID NO: 851286 - RNA, 21 nt, Human
caacauagaagacccugucuc

SEQ ID NO: 851287 - RNA, 23 nt, Human
caauccugaagugaaacacugcg

SEQ ID NO: 851288 - RNA, 21 nt, Human
cacagcacuccgcgauucuaa

SEQ ID NO: 851289 - RNA, 23 nt, Human
cagcucuccagagaauucugaag

SEQ ID NO: 851290 - RNA, 20 nt, Human
caguccuuccagacugggcc

SEQ ID NO: 851291 - RNA, 21 nt, Human
cauuguacacugcgguacacg

SEQ ID NO: 851292 - RNA, 22 nt, Human
ccacuuucuccaaagacucaaa

SEQ ID NO: 851293 - RNA, 21 nt, Human
ccagagaauucugaagcgcag

SEQ ID NO: 851294 - RNA, 20 nt, Human
ccaugcuuucagcuagcugg

SEQ ID NO: 851295 - RNA, 18 nt, Human
ccucgcgguccagcuggg

SEQ ID NO: 851296 - RNA, 21 nt, Human
ccugggcaacauagaagaccc

SEQ ID NO: 851297 - RNA, 21 nt, Human
ccugggcaacauagaagaccc

SEQ ID NO: 851298 - RNA, 21 nt, Human
ccuguagucccaacuacuucg

SEQ ID NO: 851299 - RNA, 22 nt, Human
ccuguagucccaacuacuucga

SEQ ID NO: 851300 - RNA, 23 nt, Human
ccuuccagacugggccagggcug

SEQ ID NO: 851301 - RNA, 20 nt, Human
cgaaacucaguccuuccaga

SEQ ID NO: 851302 - RNA, 22 nt, Human
cggcgucacccucgcgguccag

SEQ ID NO: 851303 - RNA, 22 nt, Human
cuacaaugaaaccacuuucucc

SEQ ID NO: 851304 - RNA, 18 nt, Human
cucuccagagaauucuga

SEQ ID NO: 851305 - RNA, 23 nt, Human
cugggccucggcguccggcagga

SEQ ID NO: 851306 - RNA, 20 nt, Human
cuuccagacugggccagggc

SEQ ID NO: 851307 - RNA, 22 nt, Human
gaaggcugaggcaggaggauca

SEQ ID NO: 851308 - RNA, 19 nt, Human
gauucuaaggaucuucccu

SEQ ID NO: 851309 - RNA, 24 nt, Human
gcaacauagaagacccugucucuu

SEQ ID NO: 851310 - RNA, 23 nt, Human
ggaucacuugaucccaggaguuc

SEQ ID NO: 851311 - RNA, 23 nt, Human
gguggcgugggccuguaguccca

SEQ ID NO: 851312 - RNA, 21 nt, Human
guaaauccuuaagacuuaaaa

SEQ ID NO: 851313 - RNA, 21 nt, Human
guagcuuuucuguuagggucu

SEQ ID NO: 851314 - RNA, 18 nt, Human
guggcgugggccuguagu

SEQ ID NO: 851315 - RNA, 20 nt, Human
uaaagcugguuaaaggcaca

SEQ ID NO: 851316 - RNA, 25 nt, Human
uaaccauucacuucaaauuuacaug

SEQ ID NO: 851317 - RNA, 25 nt, Human
uacacgcauguuucugguaaauccu

SEQ ID NO: 851318 - RNA, 20 nt, Human
uagcugcaaaaacacacugu

SEQ ID NO: 851319 - RNA, 23 nt, Human
uaggugucaaaucagcucuccag

SEQ ID NO: 851320 - RNA, 18 nt, Human
uccaaagacucaaacaga

SEQ ID NO: 851321 - RNA, 22 nt, Human
uccagccaggcacgguggcgug

SEQ ID NO: 851322 - RNA, 22 nt, Human
uccccaggaaaccauucacuuu

SEQ ID NO: 851323 - RNA, 24 nt, Human
ucgaaggcugaggcaggaggauca

SEQ ID NO: 851324 - RNA, 21 nt, Human
ucgccgccggagcugcugccg

SEQ ID NO: 851325 - RNA, 18 nt, Human
ugacgggcaaggcagaua

SEQ ID NO: 851326 - RNA, 20 nt, Human
ugaggcaggaggaucacuug

SEQ ID NO: 851327 - RNA, 24 nt, Human
ugaggcaggaggaucacuugaucc

SEQ ID NO: 851328 - RNA, 25 nt, Human
ugaggcaggaggaucacuugauccc

SEQ ID NO: 851329 - RNA, 24 nt, Human
ugauaaaaucuaaagugaugagaa

SEQ ID NO: 851330 - RNA, 19 nt, Human
ugccaugcuuucagcuagc

SEQ ID NO: 851331 - RNA, 23 nt, Human
ugggcaacauagaagacccuguc

SEQ ID NO: 851332 - RNA, 21 nt, Human
ugugucagguauacauauacc

SEQ ID NO: 851333 - RNA, 22 nt, Human
uuccccaggaaaccauucacuu

SEQ ID NO: 851334 - RNA, 25 nt, Human
uucgaaggcugaggcaggaggauca

SEQ ID NO: 851335 - RNA, 18 nt, Human
uuggugcgcgccucaccc

SEQ ID NO: 851336 - RNA, 22 nt, Human
uuuuuuuuuuuuuuuuuuaaag

SEQ ID NO: 851337 - RNA, 23 nt, Human
aaagggaaaagucaaguugggaa

SEQ ID NO: 851338 - RNA, 20 nt, Human
aacccagaagaaugcaacca

SEQ ID NO: 851339 - RNA, 19 nt, Human
aauuauaguuacugauuug

SEQ ID NO: 851340 - RNA, 19 nt, Human
accccuggcauagcuauuu

SEQ ID NO: 851341 - RNA, 23 nt, Human
acccggaagcccccuccccacuu

SEQ ID NO: 851342 - RNA, 24 nt, Human
agacaaaauuccagucaucauaga

SEQ ID NO: 851343 - RNA, 20 nt, Human
agcaauuuucauauuguuua

SEQ ID NO: 851344 - RNA, 25 nt, Human
aggaaagagaaucuucaaauuucgg

SEQ ID NO: 851345 - RNA, 24 nt, Human
auaaaugcauaucugauugccucc

SEQ ID NO: 851346 - RNA, 20 nt, Human
auaucugauugccuccuuug

SEQ ID NO: 851347 - RNA, 30 nt, Human
auauuguuuauccccaaaucccuccuucaa

SEQ ID NO: 851348 - RNA, 19 nt, Human
aucugauugccuccuuugg

SEQ ID NO: 851349 - RNA, 19 nt, Human
auucacaaacugguuccac

SEQ ID NO: 851350 - RNA, 31 nt, Human
caaaaguaacuccaccuuuggaaaucaaagg

SEQ ID NO: 851351 - RNA, 23 nt, Human
cacacaucuuacuuauccaaagu

SEQ ID NO: 851352 - RNA, 19 nt, Human
cacaccccuggcauagcua

SEQ ID NO: 851353 - RNA, 21 nt, Human
cacaugucaucaggaccaccu

SEQ ID NO: 851354 - RNA, 23 nt, Human
cacuugguucccugcacgugucu

SEQ ID NO: 851355 - RNA, 21 nt, Human
cagagaccaauauuuuuuuca

SEQ ID NO: 851356 - RNA, 19 nt, Human
cagaguaaaaucuaucucu

SEQ ID NO: 851357 - RNA, 21 nt, Human
caggaaagagaaucuucaaau

SEQ ID NO: 851358 - RNA, 21 nt, Human
cauugcuccguucacugagau

SEQ ID NO: 851359 - RNA, 18 nt, Human
ccagaguaacauaaaacc

SEQ ID NO: 851360 - RNA, 19 nt, Human
cccaaaucccuccuucauc

SEQ ID NO: 851361 - RNA, 29 nt, Human
cccaaaucccuccuucaucuuucuaaucu

SEQ ID NO: 851362 - RNA, 18 nt, Human
ccccacuuugagucaucu

SEQ ID NO: 851363 - RNA, 18 nt, Human
ccccaucacaccccuggc

SEQ ID NO: 851364 - RNA, 27 nt, Human
ccccgaagaggugccuucaggucggug

SEQ ID NO: 851365 - RNA, 19 nt, Human
cccggaagcccccucccca

SEQ ID NO: 851366 - RNA, 21 nt, Human
cccggaagcccccuccccacu

SEQ ID NO: 851367 - RNA, 22 nt, Human
cccggaagcccccuccccacuu

SEQ ID NO: 851368 - RNA, 20 nt, Human
ccucaggccccaucacaccc

SEQ ID NO: 851369 - RNA, 21 nt, Human
ccucaggccccaucacacccc

SEQ ID NO: 851370 - RNA, 24 nt, Human
ccugccguugcaucugccuacagu

SEQ ID NO: 851371 - RNA, 23 nt, Human
cgacaggaaagagaaucuucaaa

SEQ ID NO: 851372 - RNA, 27 nt, Human
cgacaggaaagagaaucuucaaauuuc

SEQ ID NO: 851373 - RNA, 21 nt, Human
cgaggcucuauuagcagagga

SEQ ID NO: 851374 - RNA, 19 nt, Human
cgagguuuuuuuuuuuuuu

SEQ ID NO: 851375 - RNA, 21 nt, Human
cgagguuuuuuuuuuuuuuuu

SEQ ID NO: 851376 - RNA, 23 nt, Human
cgcuuuuucuucuggcuggcuca

SEQ ID NO: 851377 - RNA, 20 nt, Human
cggaagcccccuccccacuu

SEQ ID NO: 851378 - RNA, 22 nt, Human
cggcauacaugccucccauucu

SEQ ID NO: 851379 - RNA, 18 nt, Human
cugaccgcuuugggcaca

SEQ ID NO: 851380 - RNA, 24 nt, Human
cuuacggcauacaugccucccauu

SEQ ID NO: 851381 - RNA, 18 nt, Human
cuuguccucccaccacuu

SEQ ID NO: 851382 - RNA, 18 nt, Human
cuuucuaaauuaacugag

SEQ ID NO: 851383 - RNA, 23 nt, Human
gaggugccuucaggucggugcug

SEQ ID NO: 851384 - RNA, 18 nt, Human
gcaacacucugagugggc

SEQ ID NO: 851385 - RNA, 21 nt, Human
gcuacaguucggcaacacucu

SEQ ID NO: 851386 - RNA, 23 nt, Human
gucaucucuggcuuuuccagacu

SEQ ID NO: 851387 - RNA, 20 nt, Human
gucuccgacaggaaagagaa

SEQ ID NO: 851388 - RNA, 18 nt, Human
uaaaugcauaucugauug

SEQ ID NO: 851389 - RNA, 25 nt, Human
uaagcagagaccaauauuguaauga

SEQ ID NO: 851390 - RNA, 22 nt, Human
uacauccauugauagacaaaau

SEQ ID NO: 851391 - RNA, 19 nt, Human
uacauguuugcauuuacuc

SEQ ID NO: 851392 - RNA, 19 nt, Human
uaccagaguaacauaaaac

SEQ ID NO: 851393 - RNA, 21 nt, Human
ucaacccuggcaaaauaaacu

SEQ ID NO: 851394 - RNA, 18 nt, Human
ucaaguugggaacugcuu

SEQ ID NO: 851395 - RNA, 22 nt, Human
ucacaaaaguaacuccaccuuu

SEQ ID NO: 851396 - RNA, 19 nt, Human
ucacaaacugguuccacca

SEQ ID NO: 851397 - RNA, 22 nt, Human
ucagaaacccagaagaaugcaa

SEQ ID NO: 851398 - RNA, 21 nt, Human
ucccugcacgugucugucucc

SEQ ID NO: 851399 - RNA, 19 nt, Human
uccucaggccccaucacac

SEQ ID NO: 851400 - RNA, 18 nt, Human
uccugccguugcaucugc

SEQ ID NO: 851401 - RNA, 19 nt, Human
uccuugauugaaguugagg

SEQ ID NO: 851402 - RNA, 18 nt, Human
ucucaugucuuccuacaa

SEQ ID NO: 851403 - RNA, 18 nt, Human
ugacccggaagcccccuc

SEQ ID NO: 851404 - RNA, 20 nt, Human
ugagacauuaauguauccuc

SEQ ID NO: 851405 - RNA, 25 nt, Human
ugagccaaaggauuaauuacaucca

SEQ ID NO: 851406 - RNA, 21 nt, Human
ugaggcagaugucuuuugccu

SEQ ID NO: 851407 - RNA, 23 nt, Human
ugaggcagaugucuuuugccuuu

SEQ ID NO: 851408 - RNA, 18 nt, Human
ugauagacaaaauuccag

SEQ ID NO: 851409 - RNA, 19 nt, Human
ugauugaaguugaggcaga

SEQ ID NO: 851410 - RNA, 21 nt, Human
ugcagggucacacaucuuacu

SEQ ID NO: 851411 - RNA, 23 nt, Human
ugccaugcucuccucaggcccca

SEQ ID NO: 851412 - RNA, 19 nt, Human
uggccagggcaaauucaca

SEQ ID NO: 851413 - RNA, 20 nt, Human
uggccagggcaaauucacaa

SEQ ID NO: 851414 - RNA, 18 nt, Human
uggcucagcucugcucag

SEQ ID NO: 851415 - RNA, 20 nt, Human
ugucauugcugaggcuaugc

SEQ ID NO: 851416 - RNA, 23 nt, Human
uucaagcagaguauucaaacgag

SEQ ID NO: 851417 - RNA, 21 nt, Human
uucacaaacugguuccaccau

SEQ ID NO: 851418 - RNA, 18 nt, Human
uucuggcuggcucagcuc

SEQ ID NO: 851419 - RNA, 23 nt, Human
uuuaagacaaaauuuuauugccc

SEQ ID NO: 851420 - RNA, 29 nt, Human
uuuuuuuuuuuuuuuuuuuuuguuuuuag

SEQ ID NO: 851421 - RNA, 27 nt, Human
uuuuuuuuuuuuuuuuuuuuuuugggg

SEQ ID NO: 851422 - RNA, 31 nt, Human; identical to SEQ ID NO: 314735

SEQ ID NO: 851423 - RNA, 23 nt, Human
acccacccugcugccugggcaga

SEQ ID NO: 851424 - RNA, 22 nt, Human
acucacaaggccugcuucccuc

SEQ ID NO: 851425 - RNA, 21 nt, Human
agcagccgggugggcagugcc

SEQ ID NO: 851426 - RNA, 19 nt, Human
aggcaggggcccggcugua

SEQ ID NO: 851427 - RNA, 24 nt, Human
aucagcagccgggugggcagugcc

SEQ ID NO: 851428 - RNA, 25 nt, Human
auggucaguguccacucacaaggcc

SEQ ID NO: 851429 - RNA, 20 nt, Human
caaggcuuuuugccuccccu

SEQ ID NO: 851430 - RNA, 24 nt, Human
cacccacaggggagguugggggca

SEQ ID NO: 851431 - RNA, 19 nt, Human
cagcaggagcagaaccagc

SEQ ID NO: 851432 - RNA, 20 nt, Human
caggacccaggagagccugu

SEQ ID NO: 851433 - RNA, 23 nt, Human
caggggcccggcuguacaccugc

SEQ ID NO: 851434 - RNA, 19 nt, Human
cagugcuuuggggccccau

SEQ ID NO: 851435 - RNA, 18 nt, Human
cagugucccugcagcagg

SEQ ID NO: 851436 - RNA, 22 nt, Human
ccacccacccugcugccugggc

SEQ ID NO: 851437 - RNA, 25 nt, Human
ccaggaguaacaggcagccuccucu

SEQ ID NO: 851438 - RNA, 19 nt, Human
ccaugguacccacccaccc

SEQ ID NO: 851439 - RNA, 20 nt, Human
cccacccugcugccugggca

SEQ ID NO: 851440 - RNA, 22 nt, Human
cccacccugcugccugggcaga

SEQ ID NO: 851441 - RNA, 20 nt, Human
ccccagggacucauggucag

SEQ ID NO: 851442 - RNA, 18 nt, Human
cccugcugccugggcaga

SEQ ID NO: 851443 - RNA, 19 nt, Human
cccuguccauggugggcug

SEQ ID NO: 851444 - RNA, 21 nt, Human
ccggcagcagcagcucucgag

SEQ ID NO: 851445 - RNA, 22 nt, Human
ccgggaggacucccagcuggca

SEQ ID NO: 851446 - RNA, 27 nt, Human
ccugcagcaggagcagaaccggggucc

SEQ ID NO: 851447 - RNA, 22 nt, Human
ccuugggcgucacuggcucagg

SEQ ID NO: 851448 - RNA, 21 nt, Human
cgagagcugaggcacaaggca

SEQ ID NO: 851449 - RNA, 21 nt, Human
cgccuaggcaggaaacagcag

SEQ ID NO: 851450 - RNA, 23 nt, Human
cuaggcaggaaacagcagagugu

SEQ ID NO: 851451 - RNA, 22 nt, Human
cucccagcuggcaccaggccau

SEQ ID NO: 851452 - RNA, 23 nt, Human
gaaacagcagagugucuggaggg

SEQ ID NO: 851453 - RNA, 21 nt, Human
gaggacgagguugaggaggaa

SEQ ID NO: 851454 - RNA, 19 nt, Human
gcagaagugcaacauggca

SEQ ID NO: 851455 - RNA, 20 nt, Human
gcagccgggugggcagugcc

SEQ ID NO: 851456 - RNA, 26 nt, Human
gcugaggcacaaggcaggggcccggu

SEQ ID NO: 851457 - RNA, 19 nt, Human
ggaaggguggcucaguggc

SEQ ID NO: 851458 - RNA, 21 nt, Human
ggaccuggguaacaggcaugu

SEQ ID NO: 851459 - RNA, 20 nt, Human
ggagguugggggcagacacc

SEQ ID NO: 851460 - RNA, 20 nt, Human
ggaucaggucacccggcagc

SEQ ID NO: 851461 - RNA, 21 nt, Human
ggcccggcuguacaccugcag

SEQ ID NO: 851462 - RNA, 21 nt, Human
ggcucaguggccucgaagugc

SEQ ID NO: 851463 - RNA, 24 nt, Human
ggcuggggcuggaaggguggcuca

SEQ ID NO: 851464 - RNA, 20 nt, Human
gggcagacacccuucucuuc

SEQ ID NO: 851465 - RNA, 19 nt, Human
gggcuggggcuggaagggu

SEQ ID NO: 851466 - RNA, 24 nt, Human
gggugggcagugccgugcugcugu

SEQ ID NO: 851467 - RNA, 19 nt, Human
gguaacaggcauguccuug

SEQ ID NO: 851468 - RNA, 21 nt, Human
gguggcucaguggccucgaag

SEQ ID NO: 851469 - RNA, 24 nt, Human
guccuugggcgucacuggcucagg

SEQ ID NO: 851470 - RNA, 21 nt, Human
guggaggggugggcacccaug

SEQ ID NO: 851471 - RNA, 18 nt, Human
gugggcuggggcuggaag

SEQ ID NO: 851472 - RNA, 19 nt, Human
uacaggaccuggguaacag

SEQ ID NO: 851473 - RNA, 23 nt, Human
uacccacccacccugcugccugg

SEQ ID NO: 851474 - RNA, 22 nt, Human
uacccuugaacauggugucagg

SEQ ID NO: 851475 - RNA, 23 nt, Human
uagcucgacggacaccgaacagg

SEQ ID NO: 851476 - RNA, 21 nt, Human
ucagggccuugcagugguagc

SEQ ID NO: 851477 - RNA, 20 nt, Human
ucaguguccacucacaaggc

SEQ ID NO: 851478 - RNA, 19 nt, Human
ucccugcagcaggagcaga

SEQ ID NO: 851479 - RNA, 24 nt, Human
ugccgggaggacucccagcuggca

SEQ ID NO: 851480 - RNA, 27 nt, Human
ugccgugcugcuguugcccucagggcc

SEQ ID NO: 851481 - RNA, 19 nt, Human
ugccuccccuaccaugucc

SEQ ID NO: 851482 - RNA, 20 nt, Human
ugccuccccuaccauguccc

SEQ ID NO: 851483 - RNA, 20 nt, Human
ugccugggggaucacucccc

SEQ ID NO: 851484 - RNA, 22 nt, Human
uggcaccaggccaucagcagcc

SEQ ID NO: 851485 - RNA, 21 nt, Human
uggccagugacacccacaggg

SEQ ID NO: 851486 - RNA, 21 nt, Human
uggcucaggggcagaggacga

SEQ ID NO: 851487 - RNA, 21 nt, Human
ugggcagugccgugcugcugu

SEQ ID NO: 851488 - RNA, 19 nt, Human
ugggcuggggcuggaaggg

SEQ ID NO: 851489 - RNA, 22 nt, Human
ugggggaucacuccccccaauu

SEQ ID NO: 851490 - RNA, 19 nt, Human
ugggguugcccugcuuggc

SEQ ID NO: 851491 - RNA, 18 nt, Human
uggugggcuggggcugga

SEQ ID NO: 851492 - RNA, 18 nt, Human
uguccacucacaaggccu

SEQ ID NO: 851493 - RNA, 22 nt, Human
uguugcccucagggccuugcag

SEQ ID NO: 851494 - RNA, 20 nt, Human
uugccuccccuaccaugucc

SEQ ID NO: 851495 - RNA, 23 nt, Human
uuuuuuuuuuuuuaaaagcuuca

SEQ ID NO: 851496 - RNA, 23 nt, Human
uuuuuuuuuuuuuuuuuuaaaag

SEQ ID NO: 851497 - RNA, 25 nt, Human
aaaauaccuucuuccuaaguuuuca

SEQ ID NO: 851498 - RNA, 20 nt, Human
aaaaugauaaagcaagcuga

SEQ ID NO: 851499 - RNA, 21 nt, Human
aagugucucccgaaucuuucc

SEQ ID NO: 851500 - RNA, 19 nt, Human
agcgccuauuucaauguga

SEQ ID NO: 851501 - RNA, 21 nt, Human
caacucagguuuacauuuucu

SEQ ID NO: 851502 - RNA, 20 nt, Human
caagaaaagcuuuccuagug

SEQ ID NO: 851503 - RNA, 19 nt, Human
caccaugaaauugcccaaa

SEQ ID NO: 851504 - RNA, 18 nt, Human
cacuaagacuccgaguca

SEQ ID NO: 851505 - RNA, 25 nt, Human
cagcaaaaaugauaaagcaagcuga

SEQ ID NO: 851506 - RNA, 21 nt, Human
cagcuucauccccucggcaaa

SEQ ID NO: 851507 - RNA, 22 nt, Human
cagcuucauccccucggcaaag

SEQ ID NO: 851508 - RNA, 20 nt, Human
cauacaagcaucaucucagc

SEQ ID NO: 851509 - RNA, 22 nt, Human
cccucggcaaagugucucccga

SEQ ID NO: 851510 - RNA, 21 nt, Human
ccuuccaaaauacgucuccaa

SEQ ID NO: 851511 - RNA, 20 nt, Human
ccuucugaaaaaacaaaaac

SEQ ID NO: 851512 - RNA, 22 nt, Human
cuacuccucgcaaauguuaaaa

SEQ ID NO: 851513 - RNA, 21 nt, Human
cugccuucugaaaaaacaaaa

SEQ ID NO: 851514 - RNA, 21 nt, Human
ggaaaguauucuucccaugga

SEQ ID NO: 851515 - RNA, 18 nt, Human
gucucuagcgcccucugg

SEQ ID NO: 851516 - RNA, 23 nt, Human
gugaaacaccaugaaauugccca

SEQ ID NO: 851517 - RNA, 28 nt, Human
guuuucaucaucacugccuucugaaaaa

SEQ ID NO: 851518 - RNA, 19 nt, Human
uaaaaggacagcaaaaaug

SEQ ID NO: 851519 - RNA, 27 nt, Human
uaaaaggacagcaaaaaugauaaagca

SEQ ID NO: 851520 - RNA, 22 nt, Human
uaacgacacacuaagacuccga

SEQ ID NO: 851521 - RNA, 23 nt, Human
uauugcaaaauaccuucuuccua

SEQ ID NO: 851522 - RNA, 23 nt, Human
ucaggacggaaggugaaauagca

SEQ ID NO: 851523 - RNA, 21 nt, Human
ucccauggacacucagccaag

SEQ ID NO: 851524 - RNA, 23 nt, Human
uccuuccaaaauacgucuccaaa

SEQ ID NO: 851525 - RNA, 23 nt, Human
ugaaaaaacaaaaaccggucaau

SEQ ID NO: 851526 - RNA, 22 nt, Human
ugaaacaccaugaaauugccca

SEQ ID NO: 851527 - RNA, 18 nt, Human
ugaaauagcagaaugagc

SEQ ID NO: 851528 - RNA, 23 nt, Human
ugaauaccaccacucuagucaac

SEQ ID NO: 851529 - RNA, 21 nt, Human
ugaugugcugccuucuccccg

SEQ ID NO: 851530 - RNA, 19 nt, Human
uguccaaauaacgacacac

SEQ ID NO: 851531 - RNA, 18 nt, Human
ugucucccgaaucuuucc

SEQ ID NO: 851532 - RNA, 22 nt, Human
uucaggaccaggccccuacucc

SEQ ID NO: 851533 - RNA, 18 nt, Human
uucaucaucacugccuuc

SEQ ID NO: 851534 - RNA, 19 nt, Human
uuucacaccuccuuccaaa

SEQ ID NO: 851535 - RNA, 24 nt, Human
uuuuuuuuuuuuuuuuuuuuuggg

SEQ ID NO: 851536 - RNA, 19 nt, Human
aaacaagaaaucuuuaagc

SEQ ID NO: 851537 - RNA, 18 nt, Human
aaggcaggaaugcacgug

SEQ ID NO: 851538 - RNA, 21 nt, Human
aggcagggcuccaucaggcuc

SEQ ID NO: 851539 - RNA, 25 nt, Human
cuagaaaagcccacaagguuccaua

SEQ ID NO: 851540 - RNA, 26 nt, Human
gaaaagcccacaagguuccauaaccc

SEQ ID NO: 851541 - RNA, 21 nt, Human
gggagcaguccagguuggggu

SEQ ID NO: 851542 - RNA, 21 nt, Human
uaaccccauaggcauacagcc

SEQ ID NO: 851543 - RNA, 18 nt, Human
uacagccucgacaggcag

SEQ ID NO: 851544 - RNA, 20 nt, Human
ucaggcuccucuugaacugg

SEQ ID NO: 851545 - RNA, 21 nt, Human
uccuucacggaaggcaggaau

SEQ ID NO: 851546 - RNA, 18 nt, Human
uggugggcggggguaggg

SEQ ID NO: 851547 - RNA, 24 nt, Human
aaauuuguauuuuuaguagagacg

SEQ ID NO: 851548 - RNA, 20 nt, Human
acaccacagagcagggaggc

SEQ ID NO: 851549 - RNA, 23 nt, Human
acaggccugcaccaccacgcccg

SEQ ID NO: 851550 - RNA, 23 nt, Human
acauugaaaaaugaccuaagaga

SEQ ID NO: 851551 - RNA, 26 nt, Human
acucuuguacuucuuuuuuuucuuuu

SEQ ID NO: 851552 - RNA, 20 nt, Human
agacggagguugcagugagc

SEQ ID NO: 851553 - RNA, 24 nt, Human
agacggagguugcagugagcugag

SEQ ID NO: 851554 - RNA, 22 nt, Human
agagacggagguugcagugagc

SEQ ID NO: 851555 - RNA, 18 nt, Human
agcaauucuccugcuuua

SEQ ID NO: 851556 - RNA, 18 nt, Human
agccucccgaguagcugg

SEQ ID NO: 851557 - RNA, 18 nt, Human
agggaggccuggcugggc

SEQ ID NO: 851558 - RNA, 18 nt, Human
aguagagacggagguugc

SEQ ID NO: 851559 - RNA, 20 nt, Human
aguagagacggagguugcag

SEQ ID NO: 851560 - RNA, 19 nt, Human
aguagcugggauuacaggc

SEQ ID NO: 851561 - RNA, 20 nt, Human
agugcaauggcgcgaucucg

SEQ ID NO: 851562 - RNA, 24 nt, Human
agugcaauggcgcgaucucggcuc

SEQ ID NO: 851563 - RNA, 22 nt, Human
caagcaauucuccugcuuuagc

SEQ ID NO: 851564 - RNA, 23 nt, Human
caaguaucaaaauggaaauacca

SEQ ID NO: 851565 - RNA, 21 nt, Human
cacauugaaaaaugaccuaag

SEQ ID NO: 851566 - RNA, 20 nt, Human
caccacaaccuccgccuccc

SEQ ID NO: 851567 - RNA, 21 nt, Human
caccacaaccuccgccuccca

SEQ ID NO: 851568 - RNA, 22 nt, Human
caccacaaccuccgccucccag

SEQ ID NO: 851569 - RNA, 23 nt, Human
caccaccacgcccggcuaaauuu

SEQ ID NO: 851570 - RNA, 22 nt, Human
cagagcagggaggccuggcugg

SEQ ID NO: 851571 - RNA, 23 nt, Human
ccacaaccuccgccucccagguu

SEQ ID NO: 851572 - RNA, 24 nt, Human
ccacaaccuccgccucccagguuc

SEQ ID NO: 851573 - RNA, 20 nt, Human
ccacagagcagggaggccuu

SEQ ID NO: 851574 - RNA, 23 nt, Human
cccagguucaagcaauucuccug

SEQ ID NO: 851575 - RNA, 25 nt, Human
cccgaguagcugggauuacaggccu

SEQ ID NO: 851576 - RNA, 27 nt, Human
ccgccucccagguucaagcaauucuuu

SEQ ID NO: 851577 - RNA, 24 nt, Human
ccucccagguucaagcaauucucc

SEQ ID NO: 851578 - RNA, 24 nt, Human
cuaaauuuguauuuuuaguagaga

SEQ ID NO: 851579 - RNA, 24 nt, Human
cucaccacaaccuccgccucccag

SEQ ID NO: 851580 - RNA, 21 nt, Human
cucagauaaugagcuuucaag

SEQ ID NO: 851581 - RNA, 23 nt, Human
cugcuuuagccucccgaguagcu

SEQ ID NO: 851582 - RNA, 19 nt, Human
cuguaguuucuccaaaauu

SEQ ID NO: 851583 - RNA, 24 nt, Human
gaguagcugggauuacaggccugc

SEQ ID NO: 851584 - RNA, 18 nt, Human
ggagguugcagugagcug

SEQ ID NO: 851585 - RNA, 20 nt, Human
ggagguugcagugagcuggc

SEQ ID NO: 851586 - RNA, 19 nt, Human
guacuucuuuuuuuucuuu

SEQ ID NO: 851587 - RNA, 22 nt, Human
guagcugggauuacaggccugc

SEQ ID NO: 851588 - RNA, 18 nt, Human
guugaggucaucauggug

SEQ ID NO: 851589 - RNA, 18 nt, Human
uaaauaacauuuuaauga

SEQ ID NO: 851590 - RNA, 21 nt, Human
uacaggccugcaccaccacgc

SEQ ID NO: 851591 - RNA, 19 nt, Human
uacuucuuuuuuuucuuuu

SEQ ID NO: 851592 - RNA, 20 nt, Human
uaguagagacggagguugca

SEQ ID NO: 851593 - RNA, 20 nt, Human
uaguagagacggagguugca

SEQ ID NO: 851594 - RNA, 23 nt, Human
uaguagagacggagguugcagug

SEQ ID NO: 851595 - RNA, 24 nt, Human
ucaccacaaccuccgccucccagg

SEQ ID NO: 851596 - RNA, 25 nt, Human
ucaccacaaccuccgccucccaggu

SEQ ID NO: 851597 - RNA, 27 nt, Human
ucaccacaaccuccgccucccagguuc

SEQ ID NO: 851598 - RNA, 23 nt, Human
ucacuccuguuguccaggaugga

SEQ ID NO: 851599 - RNA, 23 nt, Human
uccaaaauucccugaucauagcu

SEQ ID NO: 851600 - RNA, 21 nt, Human
ucccagguucaagcaauucuc

SEQ ID NO: 851601 - RNA, 24 nt, Human
ucccagguucaagcaauucuccug

SEQ ID NO: 851602 - RNA, 24 nt, Human
ucccgaguagcugggauuacaggc

SEQ ID NO: 851603 - RNA, 18 nt, Human
ucucuggaaccucucagu

SEQ ID NO: 851604 - RNA, 19 nt, Human
ucucuggaaccucucaguu

SEQ ID NO: 851605 - RNA, 20 nt, Human
ucuggaaccucucaguuucc

SEQ ID NO: 851606 - RNA, 28 nt, Human
ucuuguacuucuuuuuuuucuuuuuuuc

SEQ ID NO: 851607 - RNA, 23 nt, Human
ugaccuaagagaguuguuuugag

SEQ ID NO: 851608 - RNA, 19 nt, Human
ugcugaaaaguccuucuca

SEQ ID NO: 851609 - RNA, 24 nt, Human
uggaaauaccaacagcaagguuuc

SEQ ID NO: 851610 - RNA, 23 nt, Human
uggagugcaauggcgcgaucucg

SEQ ID NO: 851611 - RNA, 24 nt, Human
uggagugcaauggcgcgaucucgg

SEQ ID NO: 851612 - RNA, 24 nt, Human
uggcgcgaucucggcucaccacaa

SEQ ID NO: 851613 - RNA, 21 nt, Human
ugggauuacaggccugcacca

SEQ ID NO: 851614 - RNA, 24 nt, Human
ugggauuacaggccugcaccacca

SEQ ID NO: 851615 - RNA, 24 nt, Human
ugguuacacacauugaaaaaugac

SEQ ID NO: 851616 - RNA, 21 nt, Human
uguauuuuuaguagagacgga

SEQ ID NO: 851617 - RNA, 18 nt, Human
uuacaggccugcaccacc

SEQ ID NO: 851618 - RNA, 23 nt, Human
uuaguagagacggagguugcagu

SEQ ID NO: 851619 - RNA, 19 nt, Human
uuccagggauguccaacac

SEQ ID NO: 851620 - RNA, 24 nt, Human
uucucuggaaccucucaguuucca

SEQ ID NO: 851621 - RNA, 24 nt, Human
uucuuuuuuuucuuuuuuuuuuuu

SEQ ID NO: 851622 - RNA, 29 nt, Human
uucuuuuuuuucuuuuuuuuuuuugagaa

SEQ ID NO: 851623 - RNA, 23 nt, Human
uuguauuuuuaguagagacggag

SEQ ID NO: 851624 - RNA, 24 nt, Human
uuuagccucccgaguagcugggau

SEQ ID NO: 851625 - RNA, 18 nt, Human
uuuguauuuuuaguagag

SEQ ID NO: 851626 - RNA, 19 nt, Human
uuuguauuuuuaguagaga

SEQ ID NO: 851627 - RNA, 18 nt, Human
uuuucuuuuuuuuuuuug

SEQ ID NO: 851628 - RNA, 23 nt, Human
uuuuuaguagagacggagguugc

SEQ ID NO: 851629 - RNA, 26 nt, Human
uuuuuuuuuuuugagacggaguuuca

SEQ ID NO: 851630 - RNA, 21 nt, Human
uuuuuuuuuuuuuuuuuauuu

SEQ ID NO: 851631 - RNA, 24 nt, Human
aaaacaaaaacccuaggaauugaa

SEQ ID NO: 851632 - RNA, 23 nt, Human
aaacaaaaacaaaaacccuagga

SEQ ID NO: 851633 - RNA, 21 nt, Human
aaucgcuugaacccaggaagu

SEQ ID NO: 851634 - RNA, 18 nt, Human
aauuagccaggcauggug

SEQ ID NO: 851635 - RNA, 28 nt, Human
acaaaaacaaaaacccuaggaauugaaa

SEQ ID NO: 851636 - RNA, 24 nt, Human
acagagcaauauuacaucucaaaa

SEQ ID NO: 851637 - RNA, 21 nt, Human
acaucucaaaaacaaaaacaa

SEQ ID NO: 851638 - RNA, 22 nt, Human
accacugcacuccagccugggc

SEQ ID NO: 851639 - RNA, 24 nt, Human
acugcacuccagccugggcaacag

SEQ ID NO: 851640 - RNA, 24 nt, Human
acugcacuccagccugggcaacag

SEQ ID NO: 851641 - RNA, 22 nt, Human
agaaucgcuugaacccaggaag

SEQ ID NO: 851642 - RNA, 21 nt, Human
agcagaugacuugaggucagg

SEQ ID NO: 851643 - RNA, 23 nt, Human
agccaggcaugguggcuggugcc

SEQ ID NO: 851644 - RNA, 23 nt, Human
agccugggcaacagagcaauauu

SEQ ID NO: 851645 - RNA, 23 nt, Human
aggcaggagaaucgcuugaaccc

SEQ ID NO: 851646 - RNA, 24 nt, Human
aggcaggagaaucgcuugaaccca

SEQ ID NO: 851647 - RNA, 24 nt, Human
aggcaugguggcuggugccuguaa

SEQ ID NO: 851648 - RNA, 20 nt, Human
aggcugaggcaggagaaucg

SEQ ID NO: 851649 - RNA, 24 nt, Human
aggcugaggcaggagaaucgcuug

SEQ ID NO: 851650 - RNA, 24 nt, Human
aucauaccacugcacuccagccug

SEQ ID NO: 851651 - RNA, 18 nt, Human
caaaaacccuaggaauug

SEQ ID NO: 851652 - RNA, 24 nt, Human
caacauggagaaaccacaucucua

SEQ ID NO: 851653 - RNA, 19 nt, Human
cacugcacuccagccuggg

SEQ ID NO: 851654 - RNA, 21 nt, Human
cacugcacuccagccugggca

SEQ ID NO: 851655 - RNA, 22 nt, Human
cacugcacuccagccugggcaa

SEQ ID NO: 851656 - RNA, 23 nt, Human
cacugcacuccagccugggcaac

SEQ ID NO: 851657 - RNA, 24 nt, Human
cacugcacuccagccugggcaaca

SEQ ID NO: 851658 - RNA, 27 nt, Human
cacugcacuccagccugggcaacagag

SEQ ID NO: 851659 - RNA, 19 nt, Human
cacuuugugaggucaaggc

SEQ ID NO: 851660 - RNA, 23 nt, Human
cagaugacuugaggucaggauuu

SEQ ID NO: 851661 - RNA, 20 nt, Human
cagcacuuugugaggucaag

SEQ ID NO: 851662 - RNA, 23 nt, Human
cagcacuuugugaggucaaggcc

SEQ ID NO: 851663 - RNA, 24 nt, Human
cagccuggccaacauggagaaacc

SEQ ID NO: 851664 - RNA, 24 nt, Human
caucucaaaaacaaaaacaaaaac

SEQ ID NO: 851665 - RNA, 20 nt, Human
ccacugcacuccagccuggg

SEQ ID NO: 851666 - RNA, 21 nt, Human
ccacugcacuccagccugggc

SEQ ID NO: 851667 - RNA, 23 nt, Human
ccacugcacuccagccugggcaa

SEQ ID NO: 851668 - RNA, 24 nt, Human
ccacugcacuccagccugggcaac

SEQ ID NO: 851669 - RNA, 24 nt, Human
ccagcagaugacuugaggucagga

SEQ ID NO: 851670 - RNA, 23 nt, Human
ccgggccggacggggccgcagcu

SEQ ID NO: 851671 - RNA, 21 nt, Human
ccuggccaacauggagaaacc

SEQ ID NO: 851672 - RNA, 22 nt, Human
ccuggccaacauggagaaacca

SEQ ID NO: 851673 - RNA, 18 nt, Human
ccuguaaucccagcuacu

SEQ ID NO: 851674 - RNA, 18 nt, Human
ccuguaaucccagcuacu

SEQ ID NO: 851675 - RNA, 22 nt, Human
ccuguaaucccagcuacugggg

SEQ ID NO: 851676 - RNA, 22 nt, Human
cucaaaaacaaaaacaaaaacc

SEQ ID NO: 851677 - RNA, 23 nt, Human
cucaaaaacaaaaacaaaaaccc

SEQ ID NO: 851678 - RNA, 20 nt, Human
cuccaauuccaacccaugcc

SEQ ID NO: 851679 - RNA, 21 nt, Human
cugauggaagcaggauucucu

SEQ ID NO: 851680 - RNA, 19 nt, Human
gagaaaccacaucucuacu

SEQ ID NO: 851681 - RNA, 23 nt, Human
gagaucauaccacugcacuccag

SEQ ID NO: 851682 - RNA, 18 nt, Human
gaggucaaggccagcaga

SEQ ID NO: 851683 - RNA, 22 nt, Human
gaggucaaggccagcagaugac

SEQ ID NO: 851684 - RNA, 24 nt, Human
gaugacuugaggucaggauuuuga

SEQ ID NO: 851685 - RNA, 24 nt, Human
gcacuccagccugggcaacagagc

SEQ ID NO: 851686 - RNA, 19 nt, Human
gcagcuccuggcagaccgc

SEQ ID NO: 851687 - RNA, 22 nt, Human
gcaggagaaucgcuugaaccca

SEQ ID NO: 851688 - RNA, 24 nt, Human
gccaacauggagaaaccacaucuc

SEQ ID NO: 851689 - RNA, 23 nt, Human
ggagaaaccacaucucuacuaaa

SEQ ID NO: 851690 - RNA, 21 nt, Human
ggcuggugccuguaaucccag

SEQ ID NO: 851691 - RNA, 22 nt, Human
gggaggcugaggcaggagaauc

SEQ ID NO: 851692 - RNA, 24 nt, Human
gguggcuggugccuguaaucccag

SEQ ID NO: 851693 - RNA, 24 nt, Human
ggugguugcaguaaggugagauca

SEQ ID NO: 851694 - RNA, 20 nt, Human
uaaaaaaacuuucugcagcc

SEQ ID NO: 851695 - RNA, 25 nt, Human
uaaaaauuuaaacaguuaauacaag

SEQ ID NO: 851696 - RNA, 22 nt, Human
uaccacugcacuccagccuggg

SEQ ID NO: 851697 - RNA, 24 nt, Human
uaccacugcacuccagccugggca

SEQ ID NO: 851698 - RNA, 22 nt, Human
uaguucaugacacuaaacugaa

SEQ ID NO: 851699 - RNA, 20 nt, Human
uaucuuagaaaacaaaucuc

SEQ ID NO: 851700 - RNA, 23 nt, Human
ucauaccacugcacuccagccug

SEQ ID NO: 851701 - RNA, 21 nt, Human
ucggcugggccagcacuuugu

SEQ ID NO: 851702 - RNA, 22 nt, Human
ucuaaaaaaacuuucugcagcc

SEQ ID NO: 851703 - RNA, 25 nt, Human
ucucuacuaaaaauacaaaaaaauu

SEQ ID NO: 851704 - RNA, 21 nt, Human
ugaagugaauaguucaugaca

SEQ ID NO: 851705 - RNA, 21 nt, Human
ugagaccagccuggccaacau

SEQ ID NO: 851706 - RNA, 24 nt, Human
ugagaccagccuggccaacaugga

SEQ ID NO: 851707 - RNA, 21 nt, Human
ugaggaacaguuaguaaccac

SEQ ID NO: 851708 - RNA, 20 nt, Human
ugaggcaggagaaucgcuug

SEQ ID NO: 851709 - RNA, 24 nt, Human
ugaggcaggagaaucgcuugaacc

SEQ ID NO: 851710 - RNA, 25 nt, Human
ugaggcaggagaaucgcuugaaccc

SEQ ID NO: 851711 - RNA, 20 nt, Human
ugccuguaaucccagcuacu

SEQ ID NO: 851712 - RNA, 23 nt, Human
ugccuguaaucccagcuacuggg

SEQ ID NO: 851713 - RNA, 22 nt, Human
uggccaacauggagaaaccaca

SEQ ID NO: 851714 - RNA, 21 nt, Human
uggcuggugccuguaauccca

SEQ ID NO: 851715 - RNA, 22 nt, Human
uggcuggugccuguaaucccag

SEQ ID NO: 851716 - RNA, 24 nt, Human
uggcuggugccuguaaucccagcu

SEQ ID NO: 851717 - RNA, 23 nt, Human
ugggccagcacuuugugagguca

SEQ ID NO: 851718 - RNA, 24 nt, Human
ugguggcuggugccuguaauccca

SEQ ID NO: 851719 - RNA, 21 nt, Human
uuaauacaagaaaaauaugaa

SEQ ID NO: 851720 - RNA, 18 nt, Human
uuagccaggcaugguggc

SEQ ID NO: 851721 - RNA, 25 nt, Human
uuagccaggcaugguggcuggugcc

SEQ ID NO: 851722 - RNA, 19 nt, Human
uuccuuuaugacuccagaa

SEQ ID NO: 851723 - RNA, 29 nt, Human
uuuuuuuuuuuuuuuuuuaguggaugggg

SEQ ID NO: 851724 - RNA, 23 nt, Human
aauuuuuauuuuagacucggggg

SEQ ID NO: 851725 - RNA, 22 nt, Human
acccuguaguucccucuuauug

SEQ ID NO: 851726 - RNA, 19 nt, Human
agccuggcgguuggggacc

SEQ ID NO: 851727 - RNA, 24 nt, Human
agcuggauucuagccugagaccug

SEQ ID NO: 851728 - RNA, 25 nt, Human
aggcauuagauugucaugaggagga

SEQ ID NO: 851729 - RNA, 19 nt, Human
agggacugguuuuguggaa

SEQ ID NO: 851730 - RNA, 18 nt, Human
aggugcugcuuaggugag

SEQ ID NO: 851731 - RNA, 21 nt, Human
aucacggccuccagcuccauc

SEQ ID NO: 851732 - RNA, 20 nt, Human
auggcugcugcaacccuagu

SEQ ID NO: 851733 - RNA, 21 nt, Human
auucuagccugagaccuggcu

SEQ ID NO: 851734 - RNA, 25 nt, Human
auucuguccuuucuauggcugcucc

SEQ ID NO: 851735 - RNA, 19 nt, Human
caugaggugcagcucaggc

SEQ ID NO: 851736 - RNA, 19 nt, Human
cccuggagcccgugucccu

SEQ ID NO: 851737 - RNA, 20 nt, Human
ccggggccgggucaggggcu

SEQ ID NO: 851738 - RNA, 24 nt, Human
ccuccagcuccauccacggugugc

SEQ ID NO: 851739 - RNA, 21 nt, Human
ccugcugcguggcccgguucc

SEQ ID NO: 851740 - RNA, 20 nt, Human
ccuggccuugggagcaggag

SEQ ID NO: 851741 - RNA, 18 nt, Human
cgggucaggggcugcggg

SEQ ID NO: 851742 - RNA, 21 nt, Human
cguccggggccgggucagggg

SEQ ID NO: 851743 - RNA, 21 nt, Human
cuccgagggagccaccucccu

SEQ ID NO: 851744 - RNA, 18 nt, Human
cugccagggacagugagc

SEQ ID NO: 851745 - RNA, 20 nt, Human
cuggagaaucuaaugcagug

SEQ ID NO: 851746 - RNA, 20 nt, Human
cuuucuauggcugcugcaac

SEQ ID NO: 851747 - RNA, 20 nt, Human
gagcaggagggggagccggc

SEQ ID NO: 851748 - RNA, 24 nt, Human
gaggcaacggccagagggcggugg

SEQ ID NO: 851749 - RNA, 25 nt, Human
gagguggcugggagccaaagggcag

SEQ ID NO: 851750 - RNA, 20 nt, Human
gaucacggccuccagcucca

SEQ ID NO: 851751 - RNA, 20 nt, Human
gccagagggcgguggugcgg

SEQ ID NO: 851752 - RNA, 19 nt, Human
gcccuggagcccguguccc

SEQ ID NO: 851753 - RNA, 21 nt, Human
gccuuuuuggcaccagggacu

SEQ ID NO: 851754 - RNA, 19 nt, Human
gcgcccacugccgcgcucc

SEQ ID NO: 851755 - RNA, 19 nt, Human
gcgguggugcggccggcgc

SEQ ID NO: 851756 - RNA, 19 nt, Human
gcuccguccggggccgggu

SEQ ID NO: 851757 - RNA, 22 nt, Human
ggccagguaccgguccgcagcc

SEQ ID NO: 851758 - RNA, 19 nt, Human
ggccuugggagcaggaggg

SEQ ID NO: 851759 - RNA, 22 nt, Human
ggcgguggugcggccggcgcuc

SEQ ID NO: 851760 - RNA, 20 nt, Human
gggcagugguccccagccuu

SEQ ID NO: 851761 - RNA, 26 nt, Human
gugcggccggcgcuccguccggggcc

SEQ ID NO: 851762 - RNA, 19 nt, Human
guggaagacaauuuuucca

SEQ ID NO: 851763 - RNA, 20 nt, Human
guuuagggauaaaacuguuc

SEQ ID NO: 851764 - RNA, 18 nt, Human
uaaaacuguuccaccccc

SEQ ID NO: 851765 - RNA, 19 nt, Human
uaccgguccgcagccuggc

SEQ ID NO: 851766 - RNA, 22 nt, Human
uccauccacggugugcaaagga

SEQ ID NO: 851767 - RNA, 21 nt, Human
ucuguccuuucuauggcugcu

SEQ ID NO: 851768 - RNA, 21 nt, Human
ucugugggcagcugccaggga

SEQ ID NO: 851769 - RNA, 23 nt, Human
ugaaccacccuguaguucccuuc

SEQ ID NO: 851770 - RNA, 19 nt, Human
ugacaccaaguagcgacga

SEQ ID NO: 851771 - RNA, 23 nt, Human
ugacaugaggugcagcuuccacg

SEQ ID NO: 851772 - RNA, 24 nt, Human
ugaggagcgcgcagccuggauccc

SEQ ID NO: 851773 - RNA, 22 nt, Human
uggagcccgugucccugucucc

SEQ ID NO: 851774 - RNA, 23 nt, Human
uggcaccagggacugguuuugug

SEQ ID NO: 851775 - RNA, 25 nt, Human
uggcaccagggacugguuuugugga

SEQ ID NO: 851776 - RNA, 24 nt, Human
uggcugggagccaaagggcaggug

SEQ ID NO: 851777 - RNA, 19 nt, Human
uggcuucuggcuggacccc

SEQ ID NO: 851778 - RNA, 20 nt, Human
uggcuucuggcuggaccccu

SEQ ID NO: 851779 - RNA, 18 nt, Human
uucuauggcugcugcaac

SEQ ID NO: 851780 - RNA, 20 nt, Human
uugcgcgcgugcgugcgcug

SEQ ID NO: 851781 - RNA, 27 nt, Human
uuuuuuuuuuucuuuuuuaaaaaauuu

SEQ ID NO: 851782 - RNA, 24 nt, Human
uuuuuuuuuuuuuuuuuucuuuuu

SEQ ID NO: 851783 - RNA, 25 nt, Human
aaacgcucaacaaauaucccggaac

SEQ ID NO: 851784 - RNA, 22 nt, Human
aaccugcguuacuacucaucuc

SEQ ID NO: 851785 - RNA, 18 nt, Human
aagugucucaucuggauu

SEQ ID NO: 851786 - RNA, 30 nt, Human
acaagcccucagagcagaagccacaaggag

SEQ ID NO: 851787 - RNA, 18 nt, Human
acccgcccccgccgccgc

SEQ ID NO: 851788 - RNA, 19 nt, Human
acccgcccccgccgccgcu

SEQ ID NO: 851789 - RNA, 20 nt, Human
aggaaucaagcccgugagaa

SEQ ID NO: 851790 - RNA, 19 nt, Human
aggacaccccgccgagggc

SEQ ID NO: 851791 - RNA, 20 nt, Human
aggcaggaaucaagcccgug

SEQ ID NO: 851792 - RNA, 22 nt, Human
agugauucuuuugggcaacauu

SEQ ID NO: 851793 - RNA, 18 nt, Human
caaauaucccggaacccc

SEQ ID NO: 851794 - RNA, 21 nt, Human
caacaggcggcccgagucccu

SEQ ID NO: 851795 - RNA, 24 nt, Human
cacacacugggcaaaaaaaguccc

SEQ ID NO: 851796 - RNA, 24 nt, Human
caccagcaacaggcggcccgaguc

SEQ ID NO: 851797 - RNA, 18 nt, Human
cagagcccggagacggga

SEQ ID NO: 851798 - RNA, 22 nt, Human
cagcucgccgggagcgcaccuu

SEQ ID NO: 851799 - RNA, 18 nt, Human
caggacaccccgccgagg

SEQ ID NO: 851800 - RNA, 23 nt, Human
ccaccagcaacaggcggcccgag

SEQ ID NO: 851801 - RNA, 26 nt, Human
ccagcaacaggcggcccgagucccuc

SEQ ID NO: 851802 - RNA, 25 nt, Human
cccggaaccccaaucuguaggcagg

SEQ ID NO: 851803 - RNA, 18 nt, Human
ccgcccccgccgccgcuc

SEQ ID NO: 851804 - RNA, 19 nt, Human
ccgcccccgccgccgcucc

SEQ ID NO: 851805 - RNA, 19 nt, Human
ccgccgccgcuccaccagc

SEQ ID NO: 851806 - RNA, 26 nt, Human
ccggcagagcccggagacgggaggcg

SEQ ID NO: 851807 - RNA, 25 nt, Human
cgagggcccggcagagcuggagacc

SEQ ID NO: 851808 - RNA, 20 nt, Human
cggggaaggacggcgcugcc

SEQ ID NO: 851809 - RNA, 22 nt, Human
cucagagcagaagccacaagga

SEQ ID NO: 851810 - RNA, 21 nt, Human
gacaagggcagcucgccggga

SEQ ID NO: 851811 - RNA, 22 nt, Human
gccaaagacaagggcagcucgc

SEQ ID NO: 851812 - RNA, 21 nt, Human
ggaaggacggcgcugccuggg

SEQ ID NO: 851813 - RNA, 22 nt, Human
ggcacacacugggcaaaaaaag

SEQ ID NO: 851814 - RNA, 19 nt, Human
gggcaaaaaaagucccucu

SEQ ID NO: 851815 - RNA, 21 nt, Human
uaacgccuaucguaaacgcuc

SEQ ID NO: 851816 - RNA, 23 nt, Human
uaacucaggcacacacugggcaa

SEQ ID NO: 851817 - RNA, 23 nt, Human
uacgucagaugucugcugggaac

SEQ ID NO: 851818 - RNA, 19 nt, Human
ucagagcagaagccacaag

SEQ ID NO: 851819 - RNA, 24 nt, Human
ucccucugugccaaagacaagggc

SEQ ID NO: 851820 - RNA, 18 nt, Human
ucugugccaaagacaagg

SEQ ID NO: 851821 - RNA, 23 nt, Human
ugagaaagcgcgugugccggagg

SEQ ID NO: 851822 - RNA, 19 nt, Human
ugccuggggcucacugcgg

SEQ ID NO: 851823 - RNA, 21 nt, Human
ugcugggaacacaagcccuca

SEQ ID NO: 851824 - RNA, 18 nt, Human
ugggaacacaagcccuca

SEQ ID NO: 851825 - RNA, 21 nt, Human
uucaucuuuaauguuugcgac

SEQ ID NO: 851826 - RNA, 25 nt, Human
uuuuuggcuguaaaaaaaauucauc

SEQ ID NO: 851827 - RNA, 18 nt, Human
uuuuuuuuuuuuuuuuug

SEQ ID NO: 851828 - RNA, 21 nt, Human
uuuuuuuuuuuuuuuuuggcu

SEQ ID NO: 851829 - RNA, 22 nt, Human
uuuuuuuuuuuuuuuuuuuggc

SEQ ID NO: 851830 - RNA, 21 nt, Human
aagcacuuuaaugcauucacc

SEQ ID NO: 851831 - RNA, 18 nt, Human
acacagacauggccacag

SEQ ID NO: 851832 - RNA, 21 nt, Human
acauggccacagcgcaggcac

SEQ ID NO: 851833 - RNA, 23 nt, Human
accaacccacagucccugcccgc

SEQ ID NO: 851834 - RNA, 23 nt, Human
agagaggccagcccccaucugga

SEQ ID NO: 851835 - RNA, 18 nt, Human
aggcugagcccgcacaca

SEQ ID NO: 851836 - RNA, 20 nt, Human
auggccacagcgcaggcacc

SEQ ID NO: 851837 - RNA, 18 nt, Human
caacccacagucccugcc

SEQ ID NO: 851838 - RNA, 18 nt, Human
caagagaggccagccccc

SEQ ID NO: 851839 - RNA, 21 nt, Human
caagagaggccagcccccauc

SEQ ID NO: 851840 - RNA, 20 nt, Human
caccgcccucacccggccgc

SEQ ID NO: 851841 - RNA, 18 nt, Human
caccgcucccucccaccg

SEQ ID NO: 851842 - RNA, 21 nt, Human
cacuuuaaugcauucaccaac

SEQ ID NO: 851843 - RNA, 21 nt, Human
cagcgcaggcaccgcucccuc

SEQ ID NO: 851844 - RNA, 21 nt, Human
caucuggaggcuccuauggcu

SEQ ID NO: 851845 - RNA, 21 nt, Human
cauggccacagcgcaggcacc

SEQ ID NO: 851846 - RNA, 23 nt, Human
cccacaccuaguguguccaggaa

SEQ ID NO: 851847 - RNA, 23 nt, Human
cccaccgcccucacccggccgcc

SEQ ID NO: 851848 - RNA, 18 nt, Human
ccggcccccugcguacac

SEQ ID NO: 851849 - RNA, 21 nt, Human
ccggccgccggugcaggaaga

SEQ ID NO: 851850 - RNA, 18 nt, Human
ccggccggggccggccug

SEQ ID NO: 851851 - RNA, 22 nt, Human
ccuauggcuucccacaccuagu

SEQ ID NO: 851852 - RNA, 19 nt, Human
ccucccaccgcccucaccc

SEQ ID NO: 851853 - RNA, 25 nt, Human
cguacacagacauggccacagcgca

SEQ ID NO: 851854 - RNA, 20 nt, Human
cucccucccaccgcccucac

SEQ ID NO: 851855 - RNA, 18 nt, Human
cuucgcggggccccggcc

SEQ ID NO: 851856 - RNA, 25 nt, Human
guccggccggggccggccugagggc

SEQ ID NO: 851857 - RNA, 20 nt, Human
ucccacaccuagugugucca

SEQ ID NO: 851858 - RNA, 21 nt, Human
ugagggcacagcuucgcgggg

SEQ ID NO: 851859 - RNA, 25 nt, Human
ugagggcacagcuucgcggggcccc

SEQ ID NO: 851860 - RNA, 22 nt, Human
ugcguacacagacauggccaca

SEQ ID NO: 851861 - RNA, 19 nt, Human
uguccaggaaggcugagcc

SEQ ID NO: 851862 - RNA, 24 nt, Human
uguccggccggggccgggaggucc

SEQ ID NO: 851863 - RNA, 21 nt, Human
uuuuuuuuuuccccaaagcac

SEQ ID NO: 851864 - RNA, 23 nt, Human
uuuuuuuuuuuuuuuuuucccca

SEQ ID NO: 851865 - RNA, 21 nt, Human
aaucagccugccuggaaaccu

SEQ ID NO: 851866 - RNA, 19 nt, Human
agcuggguuuugcacugag

SEQ ID NO: 851867 - RNA, 19 nt, Human
auaaaguuuaaaggccuau

SEQ ID NO: 851868 - RNA, 18 nt, Human
caaaaaccuagagauaac

SEQ ID NO: 851869 - RNA, 22 nt, Human
cagcgaaauuucccgaaggucc

SEQ ID NO: 851870 - RNA, 24 nt, Human
ccacuagccuuuuuaauuuggucu

SEQ ID NO: 851871 - RNA, 22 nt, Human
gacuuagugaaauuacaggcau

SEQ ID NO: 851872 - RNA, 20 nt, Human
gaggaugcuacacagccacu

SEQ ID NO: 851873 - RNA, 21 nt, Human
gccugccuggaaaccucacaa

SEQ ID NO: 851874 - RNA, 20 nt, Human
gcuacacagccacuagccuu

SEQ ID NO: 851875 - RNA, 20 nt, Human
ggaacgcuuugcaccgagag

SEQ ID NO: 851876 - RNA, 20 nt, Human
uacacagccacuagccuuuu

SEQ ID NO: 851877 - RNA, 20 nt, Human
uaccaggugaaaauucugga

SEQ ID NO: 851878 - RNA, 22 nt, Human
ucaaugccagccgguauccagc

SEQ ID NO: 851879 - RNA, 24 nt, Human
ucacaaggcucagggacgcugggu

SEQ ID NO: 851880 - RNA, 24 nt, Human
ucacacaaaaaccuagagauaaca

SEQ ID NO: 851881 - RNA, 18 nt, Human
ugaaaauucuggagcugg

SEQ ID NO: 851882 - RNA, 24 nt, Human
ugaaauuacaggcauaggccucuu

SEQ ID NO: 851883 - RNA, 25 nt, Human
ugaaauuacaggcauaggccucuua

SEQ ID NO: 851884 - RNA, 25 nt, Human
uggguuugucaaugccaaccacagg

SEQ ID NO: 851885 - RNA, 21 nt, Human
uucuggagcuggguuuugcac

SEQ ID NO: 851886 - RNA, 27 nt, Human
uuuuuuuuuuuuuuuuggauuguuuuu

SEQ ID NO: 851887 - RNA, 18 nt, Human
uuuuuuuuuuuuuuuuug

SEQ ID NO: 851888 - RNA, 24 nt, Human
aaagugcugggauuacaggcguga

SEQ ID NO: 851889 - RNA, 19 nt, Human
aagugcugggauuacaggc

SEQ ID NO: 851890 - RNA, 19 nt, Human
aagugcugggauuacaggc

SEQ ID NO: 851891 - RNA, 26 nt, Human
aagugcugggauuacaggcgugagcc

SEQ ID NO: 851892 - RNA, 21 nt, Human
acagcuucuuccagaaccagu

SEQ ID NO: 851893 - RNA, 19 nt, Human
acaggcacccgccaccacg

SEQ ID NO: 851894 - RNA, 24 nt, Human
accauguuggcuaggcuggucucg

SEQ ID NO: 851895 - RNA, 25 nt, Human
acccgccucagccucccaaagugcu

SEQ ID NO: 851896 - RNA, 19 nt, Human
acccucaaacaccgggaag

SEQ ID NO: 851897 - RNA, 22 nt, Human
accggcucccaccucggcguac

SEQ ID NO: 851898 - RNA, 21 nt, Human
agaaaugacaucgucugcagg

SEQ ID NO: 851899 - RNA, 19 nt, Human
agcuccuuaaaggcagauu

SEQ ID NO: 851900 - RNA, 19 nt, Human
aggcagauuccuuuauucu

SEQ ID NO: 851901 - RNA, 19 nt, Human
agggauuccaggucccggc

SEQ ID NO: 851902 - RNA, 18 nt, Human
aggggugaacuccccggc

SEQ ID NO: 851903 - RNA, 24 nt, Human
aggugauccacccgccucagccuc

SEQ ID NO: 851904 - RNA, 21 nt, Human
aguagaggcgagguuucacca

SEQ ID NO: 851905 - RNA, 22 nt, Human
aguagaggcgagguuucaccau

SEQ ID NO: 851906 - RNA, 18 nt, Human
aguagccgggauuacagg

SEQ ID NO: 851907 - RNA, 19 nt, Human
auggucaauccccuauaac

SEQ ID NO: 851908 - RNA, 24 nt, Human
auuuuuguauuuuuaguagaggcg

SEQ ID NO: 851909 - RNA, 24 nt, Human
caaagugcugggauuacaggcgug

SEQ ID NO: 851910 - RNA, 22 nt, Human
caaccgcagugcacgcaaagcc

SEQ ID NO: 851911 - RNA, 22 nt, Human
caagcgaaucuccugccucagc

SEQ ID NO: 851912 - RNA, 23 nt, Human
cacagcccuacugacgagcccga

SEQ ID NO: 851913 - RNA, 24 nt, Human
caccacgccuggcuaauuuuugua

SEQ ID NO: 851914 - RNA, 21 nt, Human
caccauguuggcuaggcuggu

SEQ ID NO: 851915 - RNA, 24 nt, Human
caccauguuggcuaggcuggucuc

SEQ ID NO: 851916 - RNA, 23 nt, Human
cacccgccucagccucccaaagu

SEQ ID NO: 851917 - RNA, 21 nt, Human
cacugcaacuucagccuccca

SEQ ID NO: 851918 - RNA, 22 nt, Human
cacugcaacuucagccucccag

SEQ ID NO: 851919 - RNA, 19 nt, Human
cagcccuacugacgagccc

SEQ ID NO: 851920 - RNA, 20 nt, Human
cagccuccugaguagccggg

SEQ ID NO: 851921 - RNA, 21 nt, Human
caggcacccgccaccacgccu

SEQ ID NO: 851922 - RNA, 22 nt, Human
ccaaagugcugggauuacaggc

SEQ ID NO: 851923 - RNA, 22 nt, Human
ccaaagugcugggauuacaggc

SEQ ID NO: 851924 - RNA, 24 nt, Human
ccaaagugcugggauuacaggcgu

SEQ ID NO: 851925 - RNA, 26 nt, Human
ccacccgccucagccucccaaagugc

SEQ ID NO: 851926 - RNA, 22 nt, Human
cccaaccgcagugcacgcaaag

SEQ ID NO: 851927 - RNA, 23 nt, Human
cccagguucaagcgaaucucccc

SEQ ID NO: 851928 - RNA, 23 nt, Human
cccagguucaagcgaaucuccug

SEQ ID NO: 851929 - RNA, 19 nt, Human
ccccuaagccgacugugag

SEQ ID NO: 851930 - RNA, 24 nt, Human
ccgccucagccucccaaagugcug

SEQ ID NO: 851931 - RNA, 24 nt, Human
ccucccagguucaagcgaaucucc

SEQ ID NO: 851932 - RNA, 22 nt, Human
ccugaccuuaggugauccaccc

SEQ ID NO: 851933 - RNA, 19 nt, Human
ccugaguagccgggauuac

SEQ ID NO: 851934 - RNA, 23 nt, Human
ccugaguagccgggauuacaggc

SEQ ID NO: 851935 - RNA, 24 nt, Human
ccugaguagccgggauuacaggca

SEQ ID NO: 851936 - RNA, 23 nt, Human
ccugccucagccuccugaguagc

SEQ ID NO: 851937 - RNA, 19 nt, Human
cgagguuucaccauguugg

SEQ ID NO: 851938 - RNA, 20 nt, Human
cgagguuucaccauguuggc

SEQ ID NO: 851939 - RNA, 24 nt, Human
cgagguuucaccauguuggcuagg

SEQ ID NO: 851940 - RNA, 20 nt, Human
cggcucacugcaacuucagc

SEQ ID NO: 851941 - RNA, 21 nt, Human
cgggauuacaggcacccgcca

SEQ ID NO: 851942 - RNA, 22 nt, Human
cgggauuacaggcacccgccac

SEQ ID NO: 851943 - RNA, 22 nt, Human
cgucuaaacaaccaggaguggg

SEQ ID NO: 851944 - RNA, 24 nt, Human
cucacugcaacuucagccucccag

SEQ ID NO: 851945 - RNA, 24 nt, Human
cugcaacuucagccucccagguuc

SEQ ID NO: 851946 - RNA, 24 nt, Human
gaccuuaggugauccacccgccuc

SEQ ID NO: 851947 - RNA, 23 nt, Human
gagguuucaccauguuggcuagg

SEQ ID NO: 851948 - RNA, 25 nt, Human
gaguagccgggauuacaggcacccg

SEQ ID NO: 851949 - RNA, 18 nt, Human
gauuacaggcgugagcca

SEQ ID NO: 851950 - RNA, 22 nt, Human
gauuacaggcgugagccaccgc

SEQ ID NO: 851951 - RNA, 23 nt, Human
gauuacaggcgugagccaccgca

SEQ ID NO: 851952 - RNA, 20 nt, Human
gcccaaugcauguuuugagu

SEQ ID NO: 851953 - RNA, 19 nt, Human
gcccaggcuggaguacaau

SEQ ID NO: 851954 - RNA, 20 nt, Human
gcccaggcuggaguacaaug

SEQ ID NO: 851955 - RNA, 18 nt, Human
gcccgaacccucaaacac

SEQ ID NO: 851956 - RNA, 23 nt, Human
gccucagccucccaaagugcugg

SEQ ID NO: 851957 - RNA, 20 nt, Human
gccucagccuccugaguagc

SEQ ID NO: 851958 - RNA, 24 nt, Human
gcgaaucuccugccucagccuccu

SEQ ID NO: 851959 - RNA, 22 nt, Human
gcgagguuucaccauguuggcu

SEQ ID NO: 851960 - RNA, 19 nt, Human
gcucaucgcccaggcugga

SEQ ID NO: 851961 - RNA, 19 nt, Human
gcuggaguacaauggcgcg

SEQ ID NO: 851962 - RNA, 22 nt, Human
ggaguuuugcucaucgcccagg

SEQ ID NO: 851963 - RNA, 24 nt, Human
ggcuggucucgaacuccugaccuu

SEQ ID NO: 851964 - RNA, 24 nt, Human
gggaggcccgaacccucaaacacc

SEQ ID NO: 851965 - RNA, 23 nt, Human
gggauuacaggcacccgccacca

SEQ ID NO: 851966 - RNA, 26 nt, Human
gggcggagccuggcgcuggcccggcg

SEQ ID NO: 851967 - RNA, 19 nt, Human
ggucucgaacuccugaccu

SEQ ID NO: 851968 - RNA, 24 nt, Human
gugauccacccgccucagccuccc

SEQ ID NO: 851969 - RNA, 23 nt, Human
guuuugcucaucgcccaggcugg

SEQ ID NO: 851970 - RNA, 24 nt, Human
guuuugcucaucgcccaggcugga

SEQ ID NO: 851971 - RNA, 21 nt, Human
uaaauguccugguuuugaaaa

SEQ ID NO: 851972 - RNA, 23 nt, Human
uaauuuuuguauuuuuaguagag

SEQ ID NO: 851973 - RNA, 18 nt, Human
uacagcuucuuccagaac

SEQ ID NO: 851974 - RNA, 22 nt, Human
uacaggcacccgccaccacgcc

SEQ ID NO: 851975 - RNA, 23 nt, Human
uacaggcgugagccaccgcaccc

SEQ ID NO: 851976 - RNA, 22 nt, Human
uagaggcgagguuucaccaugu

SEQ ID NO: 851977 - RNA, 24 nt, Human
uaguagaggcgagguuucaccaug

SEQ ID NO: 851978 - RNA, 25 nt, Human
uauucuguuuuucccauacuccuca

SEQ ID NO: 851979 - RNA, 22 nt, Human
uauuuaguauucuuuacagcuu

SEQ ID NO: 851980 - RNA, 18 nt, Human
ucacugcaacuucagccu

SEQ ID NO: 851981 - RNA, 19 nt, Human
ucacugcaacuucagccuc

SEQ ID NO: 851982 - RNA, 20 nt, Human
ucacugcaacuucagccucc

SEQ ID NO: 851983 - RNA, 23 nt, Human
ucacugcaacuucagccucccag

SEQ ID NO: 851984 - RNA, 24 nt, Human
ucacugcaacuucagccucccagg

SEQ ID NO: 851985 - RNA, 21 nt, Human
uccacccgccucagccuccca

SEQ ID NO: 851986 - RNA, 24 nt, Human
ucccaaagugcugggauuacaggc

SEQ ID NO: 851987 - RNA, 21 nt, Human
ucccagguucaagcgaaucuc

SEQ ID NO: 851988 - RNA, 24 nt, Human
ucccagguucaagcgaaucuccug

SEQ ID NO: 851989 - RNA, 24 nt, Human
uccugaguagccgggauuacaggc

SEQ ID NO: 851990 - RNA, 19 nt, Human
uccugccuuagaggaauac

SEQ ID NO: 851991 - RNA, 24 nt, Human
ucuccugccucagccuccugagua

SEQ ID NO: 851992 - RNA, 23 nt, Human
ucucgaacuccugaccuuaggug

SEQ ID NO: 851993 - RNA, 24 nt, Human
ugaccuuaggugauccacccgccu

SEQ ID NO: 851994 - RNA, 19 nt, Human
ugcaacuucagccucccag

SEQ ID NO: 851995 - RNA, 18 nt, Human
ugcaggaagaggcgacag

SEQ ID NO: 851996 - RNA, 24 nt, Human
ugccucagccuccugaguagccgg

SEQ ID NO: 851997 - RNA, 24 nt, Human
ugcugggauuacaggcgugagcca

SEQ ID NO: 851998 - RNA, 24 nt, Human
uggaguacaauggcgcgaucucgg

SEQ ID NO: 851999 - RNA, 23 nt, Human
uggaguuuugcucaucgcccagg

SEQ ID NO: 852000 - RNA, 24 nt, Human
uggcuaggcuggucucgaacuccu

SEQ ID NO: 852001 - RNA, 18 nt, Human
ugggauuacaggcgugag

SEQ ID NO: 852002 - RNA, 19 nt, Human
ugggauuacaggcgugagc

SEQ ID NO: 852003 - RNA, 21 nt, Human
ugggauuacaggcgugagcca

SEQ ID NO: 852004 - RNA, 22 nt, Human
ugggauuacaggcgugagccac

SEQ ID NO: 852005 - RNA, 23 nt, Human
ugggauuacaggcgugagccacc

SEQ ID NO: 852006 - RNA, 24 nt, Human
ugggauuacaggcgugagccaccg

SEQ ID NO: 852007 - RNA, 24 nt, Human
uuaguagaggcgagguuucaccau

SEQ ID NO: 852008 - RNA, 18 nt, Human
uucaagcgaaucuccugc

SEQ ID NO: 852009 - RNA, 19 nt, Human
uucuuccagaaccagucug

SEQ ID NO: 852010 - RNA, 20 nt, Human
uugcucaucgcccaggcugg

SEQ ID NO: 852011 - RNA, 21 nt, Human
uugcucaucgcccaggcugga

SEQ ID NO: 852012 - RNA, 22 nt, Human
uuguaagcuccuuaaaggcaga

SEQ ID NO: 852013 - RNA, 23 nt, Human
uuuauucuguuuuucccauacuc

SEQ ID NO: 852014 - RNA, 24 nt, Human
uuucaccauguuggcuaggcuggu

SEQ ID NO: 852015 - RNA, 24 nt, Human
uuugcucaucgcccaggcuggagu

SEQ ID NO: 852016 - RNA, 23 nt, Human
uuuugcucaucgcccaggcugga

SEQ ID NO: 852017 - RNA, 24 nt, Human
uuuuuaguagaggcgagguuucac

SEQ ID NO: 852018 - RNA, 20 nt, Human
uuuuuguauuuuuaguagag

SEQ ID NO: 852019 - RNA, 27 nt, Human
uuuuuuuuuuuuuuuuuuuuuuugggg

SEQ ID NO: 852020 - RNA, 18 nt, Human
aagcaaauggaacacacc

SEQ ID NO: 852021 - RNA, 27 nt, Human
aagcaaauggaacacaccacggagggg

SEQ ID NO: 852022 - RNA, 22 nt, Human
accggcgugcagggcaccucca

SEQ ID NO: 852023 - RNA, 21 nt, Human
agaggagaaacugcaccuuug

SEQ ID NO: 852024 - RNA, 22 nt, Human
aggaguaggggggcuuguuccu

SEQ ID NO: 852025 - RNA, 21 nt, Human
caccuuugucaacaaagacga

SEQ ID NO: 852026 - RNA, 18 nt, Human
ccacggaggggagacugc

SEQ ID NO: 852027 - RNA, 20 nt, Human
ccaggagaggagaaacugca

SEQ ID NO: 852028 - RNA, 20 nt, Human
cccccgggaggccgccugcu

SEQ ID NO: 852029 - RNA, 18 nt, Human
cccgaccuaaccucccag

SEQ ID NO: 852030 - RNA, 21 nt, Human
ccuccagaugugggaagcaaa

SEQ ID NO: 852031 - RNA, 19 nt, Human
cggaggaguggggcucccg

SEQ ID NO: 852032 - RNA, 21 nt, Human
cucccaggaccggcgugcagg

SEQ ID NO: 852033 - RNA, 18 nt, Human
cuccccuaucucccagga

SEQ ID NO: 852034 - RNA, 24 nt, Human
cucccgcacccccgggaggccgcc

SEQ ID NO: 852035 - RNA, 22 nt, Human
cucgccggggcagccccgaccu

SEQ ID NO: 852036 - RNA, 19 nt, Human
cugggcuugggagcuucug

SEQ ID NO: 852037 - RNA, 19 nt, Human
cuuaaacuuucucagcaga

SEQ ID NO: 852038 - RNA, 22 nt, Human
cuuaggaccccaggcuggcaga

SEQ ID NO: 852039 - RNA, 19 nt, Human
gaaagcugggcuugggagc

SEQ ID NO: 852040 - RNA, 22 nt, Human
gaggccuuuggaaagcugggcu

SEQ ID NO: 852041 - RNA, 24 nt, Human
gaggguggucaggaguaggggggc

SEQ ID NO: 852042 - RNA, 23 nt, Human
gcgguucugcucaugcuccacuc

SEQ ID NO: 852043 - RNA, 20 nt, Human
ggaaagcugggcuugggagc

SEQ ID NO: 852044 - RNA, 19 nt, Human
ggccuuuggaaagcugggc

SEQ ID NO: 852045 - RNA, 19 nt, Human
gggaggcuggcacgucagc

SEQ ID NO: 852046 - RNA, 20 nt, Human
gggaggcuggcacgucagcu

SEQ ID NO: 852047 - RNA, 21 nt, Human
ggggaggcuggcacgucagcu

SEQ ID NO: 852048 - RNA, 19 nt, Human
gugcugggggaggcuggca

SEQ ID NO: 852049 - RNA, 23 nt, Human
uaaccucccagcaggcagcgcau

SEQ ID NO: 852050 - RNA, 20 nt, Human
uaggaccccaggcuggcaga

SEQ ID NO: 852051 - RNA, 21 nt, Human
ucagcagauggugaaauccaa

SEQ ID NO: 852052 - RNA, 24 nt, Human
ucaucgcuuaggaccccaggcugg

SEQ ID NO: 852053 - RNA, 21 nt, Human
uccuccagaugugggaagcaa

SEQ ID NO: 852054 - RNA, 19 nt, Human
ucugcucaucgcuuaggac

SEQ ID NO: 852055 - RNA, 18 nt, Human
ugagcaauccucgugcca

SEQ ID NO: 852056 - RNA, 21 nt, Human
ugcagguucuccccuaucucc

SEQ ID NO: 852057 - RNA, 20 nt, Human
ugcccagaagugacccucgg

SEQ ID NO: 852058 - RNA, 18 nt, Human
ugccugcagguucucccc

SEQ ID NO: 852059 - RNA, 19 nt, Human
ugccugcagguucuccccu

SEQ ID NO: 852060 - RNA, 21 nt, Human
uggaaagcugggcuugggagc

SEQ ID NO: 852061 - RNA, 26 nt, Human
uggaaagcugggcuuggggacagagg

SEQ ID NO: 852062 - RNA, 20 nt, Human
uggaauguucagccgggccc

SEQ ID NO: 852063 - RNA, 18 nt, Human
uggcagaggaggguuuca

SEQ ID NO: 852064 - RNA, 20 nt, Human
uggcagaggaggguuucaac

SEQ ID NO: 852065 - RNA, 22 nt, Human
uggggugggagugggggauucu

SEQ ID NO: 852066 - RNA, 25 nt, Human
uggggugggagugggggauucugcu

SEQ ID NO: 852067 - RNA, 18 nt, Human
uggguuggugggguggga

SEQ ID NO: 852068 - RNA, 18 nt, Human
uggguuggugggguggga

SEQ ID NO: 852069 - RNA, 19 nt, Human
uggucaggaguaggggggc

SEQ ID NO: 852070 - RNA, 20 nt, Human
ugguggggugggaguggggg

SEQ ID NO: 852071 - RNA, 22 nt, Human
ugguggggugggagugggggau

SEQ ID NO: 852072 - RNA, 20 nt, Human
uuuaaacaacaaagguuuau

SEQ ID NO: 852073 - RNA, 25 nt, Human
uuucucagcagauggugaaauccaa

SEQ ID NO: 852074 - RNA, 19 nt, Human
aaagagcccaucaguuugc

SEQ ID NO: 852075 - RNA, 21 nt, Human
aaccgguacagcaaacucaca

SEQ ID NO: 852076 - RNA, 21 nt, Human
auccaccuucccggccagcca

SEQ ID NO: 852077 - RNA, 20 nt, Human
caaggcgaauccaccuuccc

SEQ ID NO: 852078 - RNA, 21 nt, Human
cacacuguguuguuuuucucc

SEQ ID NO: 852079 - RNA, 23 nt, Human
cacaggcggaccugccuggcacc

SEQ ID NO: 852080 - RNA, 20 nt, Human
cacauggagccccaagacuc

SEQ ID NO: 852081 - RNA, 21 nt, Human
caggcggaccugccuggcacc

SEQ ID NO: 852082 - RNA, 18 nt, Human
cauaacagucccaaggac

SEQ ID NO: 852083 - RNA, 22 nt, Human
ccaccagggccuugaauuggca

SEQ ID NO: 852084 - RNA, 22 nt, Human
cccaagacucuggauccccaag

SEQ ID NO: 852085 - RNA, 21 nt, Human
ccccaagacucuggaucccca

SEQ ID NO: 852086 - RNA, 22 nt, Human
ccccaagacucuggauccccaa

SEQ ID NO: 852087 - RNA, 21 nt, Human
cccuaucgccccgccccuccu

SEQ ID NO: 852088 - RNA, 20 nt, Human
cccugcacggcgcaaagagc

SEQ ID NO: 852089 - RNA, 22 nt, Human
ccgugaccgggacaaccgguac

SEQ ID NO: 852090 - RNA, 23 nt, Human
ccucccacccugcacggcgcaaa

SEQ ID NO: 852091 - RNA, 19 nt, Human
ccuggcaccuagccaaggc

SEQ ID NO: 852092 - RNA, 20 nt, Human
cuguugugugugaagcaagc

SEQ ID NO: 852093 - RNA, 19 nt, Human
cuuccaaaaacacacugug

SEQ ID NO: 852094 - RNA, 22 nt, Human
gcugcuaccagaccagucgauc

SEQ ID NO: 852095 - RNA, 21 nt, Human
gguggaggacagucuggagug

SEQ ID NO: 852096 - RNA, 22 nt, Human
uccaccuucccggccagccacc

SEQ ID NO: 852097 - RNA, 19 nt, Human
ucccacccugcacggcgca

SEQ ID NO: 852098 - RNA, 22 nt, Human
uccccaagacucuggaucccua

SEQ ID NO: 852099 - RNA, 20 nt, Human
ucccuaucgccccgccccuc

SEQ ID NO: 852100 - RNA, 18 nt, Human
uccucccacccugcacgg

SEQ ID NO: 852101 - RNA, 19 nt, Human
uccuguugugugugaagca

SEQ ID NO: 852102 - RNA, 18 nt, Human
ucgggcugugacauaagc

SEQ ID NO: 852103 - RNA, 21 nt, Human
ugaccgggacaaccgguacag

SEQ ID NO: 852104 - RNA, 23 nt, Human
uggauccccaagacucuggaucc

SEQ ID NO: 852105 - RNA, 20 nt, Human
ugggguggaggacagucugg

SEQ ID NO: 852106 - RNA, 22 nt, Human
uuuucuguucauaacaguccca

SEQ ID NO: 852107 - RNA, 25 nt, Human
uuuuuuuuuuuuuuuuuuuauuuuu

SEQ ID NO: 852108 - RNA, 25 nt, Human
acaccaccccagggagaggggaacc

SEQ ID NO: 852109 - RNA, 21 nt, Human
acuccuccugcccccaauccu

SEQ ID NO: 852110 - RNA, 21 nt, Human
agaacaugcaucccaauaccc

SEQ ID NO: 852111 - RNA, 22 nt, Human
agaacaugcaucccaauacccu

SEQ ID NO: 852112 - RNA, 27 nt, Human
agacacacccucucugcuggcagugca

SEQ ID NO: 852113 - RNA, 21 nt, Human
aggagaaacaccaccccaggg

SEQ ID NO: 852114 - RNA, 24 nt, Human
cagacuccuccugcccccaauccu

SEQ ID NO: 852115 - RNA, 25 nt, Human
cagcugucaccuuggacuuguugga

SEQ ID NO: 852116 - RNA, 19 nt, Human
caggccuggccacacaugc

SEQ ID NO: 852117 - RNA, 21 nt, Human
ccacacaugcggacagaggau

SEQ ID NO: 852118 - RNA, 24 nt, Human
cccacgccccuagcaccagcuguc

SEQ ID NO: 852119 - RNA, 20 nt, Human
ccccacgccccuagcaccag

SEQ ID NO: 852120 - RNA, 19 nt, Human
ccccagacacacccucucu

SEQ ID NO: 852121 - RNA, 23 nt, Human
cccccaauccucugugccccugc

SEQ ID NO: 852122 - RNA, 21 nt, Human
cccccagacacacccucucug

SEQ ID NO: 852123 - RNA, 24 nt, Human
cccccagacacacccucucugcug

SEQ ID NO: 852124 - RNA, 20 nt, Human
cugcuccaaccuccugggca

SEQ ID NO: 852125 - RNA, 18 nt, Human
gagagaaggauaagccau

SEQ ID NO: 852126 - RNA, 19 nt, Human
gaugcaggggcuagaaagg

SEQ ID NO: 852127 - RNA, 18 nt, Human
ggcuggggucagggggca

SEQ ID NO: 852128 - RNA, 20 nt, Human
gggcagcagccaucugcagg

SEQ ID NO: 852129 - RNA, 18 nt, Human
ggguguggggagggucgg

SEQ ID NO: 852130 - RNA, 19 nt, Human
ggguguggggagggucggg

SEQ ID NO: 852131 - RNA, 22 nt, Human
ggucgggcuggggucagggggc

SEQ ID NO: 852132 - RNA, 20 nt, Human
gguuggggcagcagccaucu

SEQ ID NO: 852133 - RNA, 22 nt, Human
uacccuagaggagaaacaccac

SEQ ID NO: 852134 - RNA, 20 nt, Human
uagcaccagcugucaccuug

SEQ ID NO: 852135 - RNA, 25 nt, Human
uaggugguggcccccagacacaccc

SEQ ID NO: 852136 - RNA, 23 nt, Human
uccagacuccuccugcccccaau

SEQ ID NO: 852137 - RNA, 26 nt, Human
ucccagguuggggcagcagccaucug

SEQ ID NO: 852138 - RNA, 20 nt, Human
ucgggcuggggucagggggc

SEQ ID NO: 852139 - RNA, 20 nt, Human
ugcuccaaccuccugggcag

SEQ ID NO: 852140 - RNA, 26 nt, Human
ugcuccaaccuccugggcagguccca

SEQ ID NO: 852141 - RNA, 19 nt, Human
uggcccccagacacacccu

SEQ ID NO: 852142 - RNA, 22 nt, Human
uggcccccagacacacccucuc

SEQ ID NO: 852143 - RNA, 22 nt, Human
uggggagggucgggcugggguc

SEQ ID NO: 852144 - RNA, 18 nt, Human
uguuggagaugcaggggc

SEQ ID NO: 852145 - RNA, 20 nt, Human
uuuuuuuuuuuuuuuuuugg

SEQ ID NO: 852146 - RNA, 21 nt, Human
ccuaagcaccuuucagguugg

SEQ ID NO: 852147 - RNA, 18 nt, Human
cggaggccuccucugggc

SEQ ID NO: 852148 - RNA, 21 nt, Human
ucucgcgagcgcucccgaccu

SEQ ID NO: 852149 - RNA, 21 nt, Human
uuuuuuuuuuuuuuuuucggu

SEQ ID NO: 852150 - RNA, 23 nt, Human
uuuuuuuuuuuuuuuuuuuucgg

SEQ ID NO: 852151 - RNA, 24 nt, Human
uuuuuuuuuuuuuuuuuuuucggu

SEQ ID NO: 852152 - RNA, 24 nt, Human
uuuuuuuuuuuuuuuuuuuuucgu

SEQ ID NO: 852153 - RNA, 22 nt, Human
aaaaaacaagggcagaacaaga

SEQ ID NO: 852154 - RNA, 18 nt, Human
aaacaagggcagaacaag

SEQ ID NO: 852155 - RNA, 22 nt, Human
aaacaagggcagaacaagagua

SEQ ID NO: 852156 - RNA, 23 nt, Human
aaagaccuugaagcuaaacaaac

SEQ ID NO: 852157 - RNA, 24 nt, Human
aacaagggcagaacaagaguacaa

SEQ ID NO: 852158 - RNA, 21 nt, Human
aauacccauccaaguccaaag

SEQ ID NO: 852159 - RNA, 20 nt, Human
acaauaaaagaagcaucugc

SEQ ID NO: 852160 - RNA, 20 nt, Human
acacugucaaaauguuucuu

SEQ ID NO: 852161 - RNA, 24 nt, Human
acagaaacauucuucucuuccacu

SEQ ID NO: 852162 - RNA, 24 nt, Human
acagcauauugacucuaguugcau

SEQ ID NO: 852163 - RNA, 21 nt, Human
acaguccuaagccugauaugc

SEQ ID NO: 852164 - RNA, 22 nt, Human
agaacaagaguacaauaaaaga

SEQ ID NO: 852165 - RNA, 24 nt, Human
agacacugucaaaauguuucuucu

SEQ ID NO: 852166 - RNA, 21 nt, Human
aggaagagacagaaacaggga

SEQ ID NO: 852167 - RNA, 25 nt, Human
aggcaagagcaggcuguaaaagcaa

SEQ ID NO: 852168 - RNA, 18 nt, Human
agggacuauuccaacauc

SEQ ID NO: 852169 - RNA, 22 nt, Human
augguauuaagaaaaguuggcu

SEQ ID NO: 852170 - RNA, 20 nt, Human
caaguccaaagguggaagaa

SEQ ID NO: 852171 - RNA, 22 nt, Human
cacccguggccgagcucccggc

SEQ ID NO: 852172 - RNA, 23 nt, Human
caucacuccuuuggaauuauuuc

SEQ ID NO: 852173 - RNA, 20 nt, Human
caucuccaaccaagacacug

SEQ ID NO: 852174 - RNA, 21 nt, Human
ccauccaaguccaaaggugga

SEQ ID NO: 852175 - RNA, 21 nt, Human
ccuucaaaaaacaagggcaga

SEQ ID NO: 852176 - RNA, 25 nt, Human
ccuucaaaaaacaagggcagaacaa

SEQ ID NO: 852177 - RNA, 24 nt, Human
gaacaguccugcuaaagaaaccag

SEQ ID NO: 852178 - RNA, 19 nt, Human
gaccaggccucaccgcagc

SEQ ID NO: 852179 - RNA, 19 nt, Human
gcagccggagaccaggccu

SEQ ID NO: 852180 - RNA, 21 nt, Human
guggccgagcucccggcuucc

SEQ ID NO: 852181 - RNA, 19 nt, Human
uaggcaagagcaggcugua

SEQ ID NO: 852182 - RNA, 22 nt, Human
uauacagcauauugacucuagu

SEQ ID NO: 852183 - RNA, 23 nt, Human
uaugguaauaggcaagagcaggc

SEQ ID NO: 852184 - RNA, 22 nt, Human
uaugguauuaagaaaaguuggc

SEQ ID NO: 852185 - RNA, 23 nt, Human
uauuccaacaucacuccuuugga

SEQ ID NO: 852186 - RNA, 22 nt, Human
ucagucauccuuaacaugugac

SEQ ID NO: 852187 - RNA, 22 nt, Human
uccacagaggcugaguagaaca

SEQ ID NO: 852188 - RNA, 18 nt, Human
ucucuuccacuuauuacc

SEQ ID NO: 852189 - RNA, 21 nt, Human
ugaagcuaaacaaacaagcaa

SEQ ID NO: 852190 - RNA, 24 nt, Human
ugaguagaacaguccugcuaaaga

SEQ ID NO: 852191 - RNA, 23 nt, Human
ugucaacauguuuauugcuaaua

SEQ ID NO: 852192 - RNA, 23 nt, Human
uguugcguuuuuuuaauuuuuuu

SEQ ID NO: 852193 - RNA, 22 nt, Human
uuaaaagguauaugguauuaag

SEQ ID NO: 852194 - RNA, 19 nt, Human
uucaucuccaaccaagaca

SEQ ID NO: 852195 - RNA, 19 nt, Human
uuuuuuuuuuuuauaggaa

SEQ ID NO: 852196 - RNA, 23 nt, Human
uuuuuuuuuuuuuuuuuuauagg

SEQ ID NO: 852197 - RNA, 23 nt, Human
aaaaauguccacaguggcaacau

SEQ ID NO: 852198 - RNA, 21 nt, Human
aaacaaacaaaaaacuaaaca

SEQ ID NO: 852199 - RNA, 28 nt, Human
aaacaaacaaaaaacuaaacagucccca

SEQ ID NO: 852200 - RNA, 20 nt, Human
aaacccaaaaggagugaagg

SEQ ID NO: 852201 - RNA, 26 nt, Human
aaacccaaaaggagugaaggccagaa

SEQ ID NO: 852202 - RNA, 23 nt, Human
aacaaaaaacuaaacagucccca

SEQ ID NO: 852203 - RNA, 18 nt, Human
aaggucaaacagguacug

SEQ ID NO: 852204 - RNA, 21 nt, Human
aaucucagcaauuuuccuuuc

SEQ ID NO: 852205 - RNA, 25 nt, Human
acaaacccaaaaggagugaaggcca

SEQ ID NO: 852206 - RNA, 19 nt, Human
accacucaguuccgucuug

SEQ ID NO: 852207 - RNA, 20 nt, Human
accccaggcaccugcaccau

SEQ ID NO: 852208 - RNA, 26 nt, Human
acuccagagcccuuugagagugacca

SEQ ID NO: 852209 - RNA, 22 nt, Human
acuuuguaaauuccagccaaug

SEQ ID NO: 852210 - RNA, 22 nt, Human
agccuaucccuuucuucuucug

SEQ ID NO: 852211 - RNA, 20 nt, Human
agguaguauucacacuucuu

SEQ ID NO: 852212 - RNA, 19 nt, Human
aggugcuuacacgcuucag

SEQ ID NO: 852213 - RNA, 18 nt, Human
aucccuuucuucuucugg

SEQ ID NO: 852214 - RNA, 21 nt, Human
caaaaggagugaaggccagaa

SEQ ID NO: 852215 - RNA, 25 nt, Human
caaacccaaaaggagugaaggccag

SEQ ID NO: 852216 - RNA, 24 nt, Human
caaauuggaaagaugagaaacaga

SEQ ID NO: 852217 - RNA, 20 nt, Human
caacagcaccacagaguuua

SEQ ID NO: 852218 - RNA, 24 nt, Human
cagcagccgcacggugcagcuggu

SEQ ID NO: 852219 - RNA, 21 nt, Human
cagcauccgauguuuuacaga

SEQ ID NO: 852220 - RNA, 19 nt, Human
caggaagacuaaauaccug

SEQ ID NO: 852221 - RNA, 26 nt, Human
caggcgucccucagcccggcagcucc

SEQ ID NO: 852222 - RNA, 19 nt, Human
caugucacuauuuaccugu

SEQ ID NO: 852223 - RNA, 26 nt, Human
ccaaaaggagugaaggccagaaaugc

SEQ ID NO: 852224 - RNA, 20 nt, Human
ccaaugucugugcuuuucuu

SEQ ID NO: 852225 - RNA, 18 nt, Human
ccacauuuccagaggugc

SEQ ID NO: 852226 - RNA, 19 nt, Human
ccacuugaaucuauuugca

SEQ ID NO: 852227 - RNA, 26 nt, Human
cccauuguccagaucccuggccugcc

SEQ ID NO: 852228 - RNA, 19 nt, Human
ccccgucgcugccguugcc

SEQ ID NO: 852229 - RNA, 19 nt, Human
cccgcccgcccgcccggga

SEQ ID NO: 852230 - RNA, 21 nt, Human
cccgucgcugccguugccucc

SEQ ID NO: 852231 - RNA, 18 nt, Human
cccucagcccggcagcuc

SEQ ID NO: 852232 - RNA, 19 nt, Human
ccgauguuuuacagaggag

SEQ ID NO: 852233 - RNA, 19 nt, Human
ccgcacggugcagcuguac

SEQ ID NO: 852234 - RNA, 22 nt, Human
ccgcccgggagcgacgcggcgg

SEQ ID NO: 852235 - RNA, 27 nt, Human
ccucuuguuuccuugaagaacaacaaa

SEQ ID NO: 852236 - RNA, 21 nt, Human
ccugcaaauuggaaagaugag

SEQ ID NO: 852237 - RNA, 24 nt, Human
cgauuccacauuuccagaggugcu

SEQ ID NO: 852238 - RNA, 19 nt, Human
cgcugccguugccuccugc

SEQ ID NO: 852239 - RNA, 22 nt, Human
cggacccuggaccaggcguccc

SEQ ID NO: 852240 - RNA, 22 nt, Human
cuaaauaccugauccaacagca

SEQ ID NO: 852241 - RNA, 30 nt, Human
cuaugaaaaaucaaaauucaaaaccaaaaa

SEQ ID NO: 852242 - RNA, 19 nt, Human
cucccagcuuaucuuucag

SEQ ID NO: 852243 - RNA, 22 nt, Human
cuccgcaccgaccccaggcacc

SEQ ID NO: 852244 - RNA, 20 nt, Human
cucuuguuuccuugaagaac

SEQ ID NO: 852245 - RNA, 23 nt, Human
cuguacucgcgcuccaggcuccu

SEQ ID NO: 852246 - RNA, 23 nt, Human
cuguagccuucaggguguuuccc

SEQ ID NO: 852247 - RNA, 22 nt, Human
cuucccgcccgcccgcccggga

SEQ ID NO: 852248 - RNA, 20 nt, Human
gaagaacaacaaacccaaaa

SEQ ID NO: 852249 - RNA, 19 nt, Human
gaaggccagaaaugcagca

SEQ ID NO: 852250 - RNA, 20 nt, Human
gaccaggcgucccucagccc

SEQ ID NO: 852251 - RNA, 19 nt, Human
gaccccaggcaccugcacc

SEQ ID NO: 852252 - RNA, 30 nt, Human
gccccgucgcugccguugccuccugcuggg

SEQ ID NO: 852253 - RNA, 18 nt, Human
gcccgcccgcccgggagc

SEQ ID NO: 852254 - RNA, 19 nt, Human
gccuuuggcaucucucugg

SEQ ID NO: 852255 - RNA, 22 nt, Human
ggcaaaaaaaacaaacaaaaaa

SEQ ID NO: 852256 - RNA, 20 nt, Human
gguagccggguuccuugguc

SEQ ID NO: 852257 - RNA, 23 nt, Human
uaaaacuucacacggaagcacau

SEQ ID NO: 852258 - RNA, 19 nt, Human
uagagaucccuuuugaucu

SEQ ID NO: 852259 - RNA, 19 nt, Human
uaugaaaaaucaaaauuca

SEQ ID NO: 852260 - RNA, 19 nt, Human
ucaacuaguguccccucug

SEQ ID NO: 852261 - RNA, 24 nt, Human
ucaagagguaguauucacacuucu

SEQ ID NO: 852262 - RNA, 19 nt, Human
uccaggcuccugcugcugc

SEQ ID NO: 852263 - RNA, 20 nt, Human
ucccucagcccggcagcucc

SEQ ID NO: 852264 - RNA, 20 nt, Human
ucccugagucauaaucccca

SEQ ID NO: 852265 - RNA, 24 nt, Human
ucccugagucauaauccccaaucu

SEQ ID NO: 852266 - RNA, 20 nt, Human
ucucccagcuuaucuuucag

SEQ ID NO: 852267 - RNA, 22 nt, Human
ugaaaaaucaaaauucaaaacc

SEQ ID NO: 852268 - RNA, 21 nt, Human
ugaagaacaacaaacccaaaa

SEQ ID NO: 852269 - RNA, 24 nt, Human
ugaagaacaacaaacccaaaagga

SEQ ID NO: 852270 - RNA, 22 nt, Human
ugaauguuuagggaaaaacugg

SEQ ID NO: 852271 - RNA, 18 nt, Human
ugagaaacagagucgcug

SEQ ID NO: 852272 - RNA, 18 nt, Human
ugcaccaucaccccggcc

SEQ ID NO: 852273 - RNA, 24 nt, Human
ugcccugcugaggcugcagugaug

SEQ ID NO: 852274 - RNA, 19 nt, Human
ugcuaggugauacuacugc

SEQ ID NO: 852275 - RNA, 21 nt, Human
uggaccaggcgucccucagcc

SEQ ID NO: 852276 - RNA, 27 nt, Human
uggcaaaaaaaacaaacaaaaaacuaa

SEQ ID NO: 852277 - RNA, 22 nt, Human
uggcaccagcaggaaaagcucc

SEQ ID NO: 852278 - RNA, 21 nt, Human
uguaagcugcuaacaaggcag

SEQ ID NO: 852279 - RNA, 22 nt, Human
uguccccucugcuaggugauac

SEQ ID NO: 852280 - RNA, 19 nt, Human
uuaaaaguucuggcuggca

SEQ ID NO: 852281 - RNA, 18 nt, Human
uuccacauuuccagaggu

SEQ ID NO: 852282 - RNA, 20 nt, Human
uugaagaacaacaaacccaa

SEQ ID NO: 852283 - RNA, 20 nt, Human
uuucuugaaauaacuucuga

SEQ ID NO: 852284 - RNA, 21 nt, Human
uuugcaaccuccgaaauaagc

SEQ ID NO: 852285 - RNA, 23 nt, Human
uuuuuuuuuuuaagaagcaacuu

SEQ ID NO: 852286 - RNA, 20 nt, Human
uuuuuuuuuuuuuaagaagc

SEQ ID NO: 852287 - RNA, 25 nt, Human
uuuuuuuuuuuuuuuuuuuuuaagg

SEQ ID NO: 852288 - RNA, 22 nt, Human
aaacacaaggccccaaauugac

SEQ ID NO: 852289 - RNA, 21 nt, Human
aaaugaccucagaaugggggc

SEQ ID NO: 852290 - RNA, 19 nt, Human
aacacaggcugcugugagg

SEQ ID NO: 852291 - RNA, 22 nt, Human
aaccaaaacacuuaagaaaccu

SEQ ID NO: 852292 - RNA, 18 nt, Human
aacccaaaucuuccccaa

SEQ ID NO: 852293 - RNA, 18 nt, Human
acaaggccccaaauugac

SEQ ID NO: 852294 - RNA, 23 nt, Human
acacucuaggaucgacugcuucc

SEQ ID NO: 852295 - RNA, 18 nt, Human
acagcccuccacuagccc

SEQ ID NO: 852296 - RNA, 18 nt, Human
acaggcuguggccucaca

SEQ ID NO: 852297 - RNA, 20 nt, Human
acaggugaccccagaaagaa

SEQ ID NO: 852298 - RNA, 20 nt, Human
accccagaaagaaaugaagu

SEQ ID NO: 852299 - RNA, 18 nt, Human
agaaagaacccuggggug

SEQ ID NO: 852300 - RNA, 20 nt, Human
agaaagacaaugcauaggag

SEQ ID NO: 852301 - RNA, 21 nt, Human
agagucuagagacaucuauuc

SEQ ID NO: 852302 - RNA, 20 nt, Human
aggaggagagaauggcucug

SEQ ID NO: 852303 - RNA, 20 nt, Human
auaggacaaaggcaacccuu

SEQ ID NO: 852304 - RNA, 21 nt, Human
augucccacaccuccucgcug

SEQ ID NO: 852305 - RNA, 18 nt, Human
caaacacaaggccccaaa

SEQ ID NO: 852306 - RNA, 26 nt, Human
caaagcccaucacaggugaccccaga

SEQ ID NO: 852307 - RNA, 18 nt, Human
caacagaacagauaccuc

SEQ ID NO: 852308 - RNA, 20 nt, Human
caagcucagggauaggacaa

SEQ ID NO: 852309 - RNA, 20 nt, Human
cacaaaaaugaccucagaau

SEQ ID NO: 852310 - RNA, 19 nt, Human
cacacuccagucuccaugg

SEQ ID NO: 852311 - RNA, 24 nt, Human
caccacaucaaagcccaucacagg

SEQ ID NO: 852312 - RNA, 23 nt, Human
cacccaggugucacugcagucaa

SEQ ID NO: 852313 - RNA, 24 nt, Human
cagugaccacagguucuccuagac

SEQ ID NO: 852314 - RNA, 24 nt, Human
cauauacauagucaaauaagaaug

SEQ ID NO: 852315 - RNA, 22 nt, Human
ccaaauucuagacaaucccaca

SEQ ID NO: 852316 - RNA, 21 nt, Human
ccacaucaaagcccaucacaa

SEQ ID NO: 852317 - RNA, 19 nt, Human
cccacaaaaugcuaguauc

SEQ ID NO: 852318 - RNA, 23 nt, Human
ccccaaauugacaccacaucaaa

SEQ ID NO: 852319 - RNA, 21 nt, Human
ccucuggcacaaacacaaggg

SEQ ID NO: 852320 - RNA, 25 nt, Human
cgcuugugcaucuuaggaacccaaa

SEQ ID NO: 852321 - RNA, 23 nt, Human
cggcaguauuuucaacugcaugc

SEQ ID NO: 852322 - RNA, 19 nt, Human
cguuugaagccuucagggu

SEQ ID NO: 852323 - RNA, 18 nt, Human
cuaaaaaucaccugguug

SEQ ID NO: 852324 - RNA, 20 nt, Human
cuagcccauuucccaagggu

SEQ ID NO: 852325 - RNA, 24 nt, Human
gaacagauaccuccggagcaccca

SEQ ID NO: 852326 - RNA, 18 nt, Human
gaggagagaauggcucug

SEQ ID NO: 852327 - RNA, 21 nt, Human
gcccaucacaggugaccccag

SEQ ID NO: 852328 - RNA, 27 nt, Human
gcuggccugcuucugucaacucuacgc

SEQ ID NO: 852329 - RNA, 18 nt, Human
ggaagcuaacuuccuaca

SEQ ID NO: 852330 - RNA, 29 nt, Human
ggagggcagagauaaggcucuccccgagg

SEQ ID NO: 852331 - RNA, 23 nt, Human
ggcuccauggcucuuuagcacag

SEQ ID NO: 852332 - RNA, 19 nt, Human
gggccauuagccucaagca

SEQ ID NO: 852333 - RNA, 19 nt, Human
gggguucacacaguacagu

SEQ ID NO: 852334 - RNA, 20 nt, Human
gugagggaaacugaacagaa

SEQ ID NO: 852335 - RNA, 25 nt, Human
uaacccaagcacucaggcuauuaug

SEQ ID NO: 852336 - RNA, 23 nt, Human
uacgcugguagaagaucucggca

SEQ ID NO: 852337 - RNA, 19 nt, Human
uauaaaagaaagacaaugc

SEQ ID NO: 852338 - RNA, 21 nt, Human
uauaaaagaaagacaaugcau

SEQ ID NO: 852339 - RNA, 22 nt, Human
uauaaaagaaagacaaugcaua

SEQ ID NO: 852340 - RNA, 19 nt, Human
ucaacagcccuccacuagc

SEQ ID NO: 852341 - RNA, 22 nt, Human
ucaacagcccuccacuagccca

SEQ ID NO: 852342 - RNA, 28 nt, Human
ucaacagcccuccacuagcccauuuccc

SEQ ID NO: 852343 - RNA, 24 nt, Human
uccauggcucuuuagcacaggcug

SEQ ID NO: 852344 - RNA, 19 nt, Human
uccuacucaggaggagaga

SEQ ID NO: 852345 - RNA, 18 nt, Human
uccugaaugacucuggaa

SEQ ID NO: 852346 - RNA, 25 nt, Human
ucucuuguugagcaagcucagggau

SEQ ID NO: 852347 - RNA, 19 nt, Human
ucuggaaggacauucuggg

SEQ ID NO: 852348 - RNA, 26 nt, Human
ugaaacaaaacaauuuuaauuucaga

SEQ ID NO: 852349 - RNA, 20 nt, Human
ugaggccuuguaggaaagga

SEQ ID NO: 852350 - RNA, 21 nt, Human
ugagggaaacugaacagaaac

SEQ ID NO: 852351 - RNA, 22 nt, Human
ugcagaaagaacccugggguga

SEQ ID NO: 852352 - RNA, 19 nt, Human
uggccugcuucugucaacu

SEQ ID NO: 852353 - RNA, 24 nt, Human
uggggaagcuaacuuccuacagug

SEQ ID NO: 852354 - RNA, 19 nt, Human
ugggggccauuagccucaa

SEQ ID NO: 852355 - RNA, 23 nt, Human
uugcauggccagucacugugggg

SEQ ID NO: 852356 - RNA, 19 nt, Human
uuuugguuacgauucauua

SEQ ID NO: 852357 - RNA, 19 nt, Human
aaagcaacuuucucccucc

SEQ ID NO: 852358 - RNA, 20 nt, Human
accgaggccuccucaggcag

SEQ ID NO: 852359 - RNA, 19 nt, Human
agaaccagagaaaccaugg

SEQ ID NO: 852360 - RNA, 21 nt, Human
agccgaacgcagcacucggaa

SEQ ID NO: 852361 - RNA, 30 nt, Human
ccucacauugcuauuacgauucaaaagccc

SEQ ID NO: 852362 - RNA, 19 nt, Human
ccuccucaggcaggcaggg

SEQ ID NO: 852363 - RNA, 18 nt, Human
cgaggccacugucuacgc

SEQ ID NO: 852364 - RNA, 23 nt, Human
cgucccuggacaacccugaacgc

SEQ ID NO: 852365 - RNA, 23 nt, Human
cugcagcuccuucgcauccaacc

SEQ ID NO: 852366 - RNA, 31 nt, Human
cuggaaaugguggcaggugaagucucuccuu

SEQ ID NO: 852367 - RNA, 19 nt, Human
gaagucucuccacagcauu

SEQ ID NO: 852368 - RNA, 20 nt, Human
gcagaaagcaacuuucuccc

SEQ ID NO: 852369 - RNA, 18 nt, Human
uagguguaccucacccuc

SEQ ID NO: 852370 - RNA, 23 nt, Human
ucaaacuggcagaaccagagaaa

SEQ ID NO: 852371 - RNA, 21 nt, Human
uccaaccgaggccuccucagg

SEQ ID NO: 852372 - RNA, 21 nt, Human
uccccuggaugcugcagcucc

SEQ ID NO: 852373 - RNA, 24 nt, Human
ucccuggacaacccugaacgccuu

SEQ ID NO: 852374 - RNA, 23 nt, Human
ucuccacagcaugccuugggccu

SEQ ID NO: 852375 - RNA, 18 nt, Human
uggcagaaccagagaaac

SEQ ID NO: 852376 - RNA, 24 nt, Human
uuggugcagaaagcaacuuucucc

SEQ ID NO: 852377 - RNA, 21 nt, Human
uuucacagcaaauuauuuaau

SEQ ID NO: 852378 - RNA, 26 nt, Human
uuuuuuuuuuuuuucacagcaaauua

SEQ ID NO: 852379 - RNA, 24 nt, Human
uuuuuuuuuuuuuuuuuuucacag

SEQ ID NO: 852380 - RNA, 22 nt, Human
aaaaaaaaaaacuguuagaaaa

SEQ ID NO: 852381 - RNA, 24 nt, Human
aaaaagccaaguaguuaaacaaac

SEQ ID NO: 852382 - RNA, 23 nt, Human
aaacaaacuaugauaauauuaau

SEQ ID NO: 852383 - RNA, 24 nt, Human
aaacaugauuauguacgaugugaa

SEQ ID NO: 852384 - RNA, 20 nt, Human
aagcaaaaguaaaaaauagc

SEQ ID NO: 852385 - RNA, 22 nt, Human
aagcaaaaguaaaaaauagcug

SEQ ID NO: 852386 - RNA, 24 nt, Human
aagcaaaaguaaaaaauagcugga

SEQ ID NO: 852387 - RNA, 20 nt, Human
aagcaggcagaucgcuugag

SEQ ID NO: 852388 - RNA, 24 nt, Human
aagcaggcagaucgcuugagccca

SEQ ID NO: 852389 - RNA, 18 nt, Human
aaggcugcagugagccga

SEQ ID NO: 852390 - RNA, 24 nt, Human
aagucaaggcugcagugagccgag

SEQ ID NO: 852391 - RNA, 19 nt, Human
acaaaaaaaaaauacaaaa

SEQ ID NO: 852392 - RNA, 22 nt, Human
acagagcaagaccaucucaaaa

SEQ ID NO: 852393 - RNA, 21 nt, Human
accccauccccaaccacccau

SEQ ID NO: 852394 - RNA, 20 nt, Human
accuguagucccagcuacuc

SEQ ID NO: 852395 - RNA, 24 nt, Human
acgucacugcacuccagccugggc

SEQ ID NO: 852396 - RNA, 24 nt, Human
acugcacuccagccugggcaacag

SEQ ID NO: 852397 - RNA, 24 nt, Human
acugcacuccagccugggcaacag

SEQ ID NO: 852398 - RNA, 22 nt, Human
agaccaucucaaaaaaaaaaac

SEQ ID NO: 852399 - RNA, 22 nt, Human
agagcaagaccaucucaaaaaa

SEQ ID NO: 852400 - RNA, 21 nt, Human
agcaaaaguaaaaaauagcug

SEQ ID NO: 852401 - RNA, 20 nt, Human
agcacucugggaggcugaag

SEQ ID NO: 852402 - RNA, 24 nt, Human
agcuacucaggaggcugagguggg

SEQ ID NO: 852403 - RNA, 18 nt, Human
aggaguucaagacuagcc

SEQ ID NO: 852404 - RNA, 24 nt, Human
aggcugaagcaggcagaucgcuug

SEQ ID NO: 852405 - RNA, 24 nt, Human
aggcugaggugggaugaucacuug

SEQ ID NO: 852406 - RNA, 20 nt, Human
aggcugggugcaguggcuca

SEQ ID NO: 852407 - RNA, 22 nt, Human
aggugggaugaucacuugagcc

SEQ ID NO: 852408 - RNA, 23 nt, Human
aggugggaugaucacuugagccc

SEQ ID NO: 852409 - RNA, 21 nt, Human
aguggcucaugccuguaaucc

SEQ ID NO: 852410 - RNA, 24 nt, Human
aguggcucaugccuguaauccuag

SEQ ID NO: 852411 - RNA, 24 nt, Human
aucacgucacugcacuccagccug

SEQ ID NO: 852412 - RNA, 18 nt, Human
auccccaaccacccaugc

SEQ ID NO: 852413 - RNA, 19 nt, Human
augccuguaauccuagcac

SEQ ID NO: 852414 - RNA, 24 nt, Human
caaaaaaaaaauacaaaaaauuag

SEQ ID NO: 852415 - RNA, 20 nt, Human
caccccauccccaaccaccc

SEQ ID NO: 852416 - RNA, 18 nt, Human
cacugcacuccagccugg

SEQ ID NO: 852417 - RNA, 19 nt, Human
cacugcacuccagccuggg

SEQ ID NO: 852418 - RNA, 19 nt, Human
cacugcacuccagccuggg

SEQ ID NO: 852419 - RNA, 20 nt, Human
cacugcacuccagccugggc

SEQ ID NO: 852420 - RNA, 21 nt, Human
cacugcacuccagccugggca

SEQ ID NO: 852421 - RNA, 22 nt, Human
cacugcacuccagccugggcaa

SEQ ID NO: 852422 - RNA, 23 nt, Human
cacugcacuccagccugggcaac

SEQ ID NO: 852423 - RNA, 24 nt, Human
cacugcacuccagccugggcaaca

SEQ ID NO: 852424 - RNA, 26 nt, Human
cacugcacuccagccugggcaacaga

SEQ ID NO: 852425 - RNA, 19 nt, Human
cagaagucagcagagcucc

SEQ ID NO: 852426 - RNA, 24 nt, Human
cagaucgcuugagcccaggaguuc

SEQ ID NO: 852427 - RNA, 24 nt, Human
cagcuacucaggaggcugaggugg

SEQ ID NO: 852428 - RNA, 22 nt, Human
caggaguuauauucaaaauuug

SEQ ID NO: 852429 - RNA, 20 nt, Human
caugccuguaauccuagcac

SEQ ID NO: 852430 - RNA, 18 nt, Human
cauggcaaaauacccucu

SEQ ID NO: 852431 - RNA, 29 nt, Human
cauggcaaaauacccucucuacaaaaaaa

SEQ ID NO: 852432 - RNA, 25 nt, Human
cccaaauguauucuuccaaaaggac

SEQ ID NO: 852433 - RNA, 21 nt, Human
cccaaccacccaugcccaaau

SEQ ID NO: 852434 - RNA, 19 nt, Human
cccaccccauccccaacca

SEQ ID NO: 852435 - RNA, 21 nt, Human
cccaccccauccccaaccacc

SEQ ID NO: 852436 - RNA, 18 nt, Human
ccccaaccacccaugccc

SEQ ID NO: 852437 - RNA, 18 nt, Human
ccuguaauccuagcacuc

SEQ ID NO: 852438 - RNA, 20 nt, Human
ccuguaauccuagcacucug

SEQ ID NO: 852439 - RNA, 21 nt, Human
ccuguagucccagcuacucag

SEQ ID NO: 852440 - RNA, 24 nt, Human
cgucacugcacuccagccugggca

SEQ ID NO: 852441 - RNA, 22 nt, Human
cuacaaaaaaaaaauacaaaaa

SEQ ID NO: 852442 - RNA, 18 nt, Human
cucaggaggcugaggugg

SEQ ID NO: 852443 - RNA, 23 nt, Human
cucaugccuguaauccuagcacu

SEQ ID NO: 852444 - RNA, 21 nt, Human
cugaggugggaugaucacuug

SEQ ID NO: 852445 - RNA, 20 nt, Human
cugcagugagccgagaucac

SEQ ID NO: 852446 - RNA, 21 nt, Human
gaacaaauauagaaagaugcu

SEQ ID NO: 852447 - RNA, 22 nt, Human
gaacaaauauagaaagaugcuu

SEQ ID NO: 852448 - RNA, 25 nt, Human
gacaauauuaagugaaaaaaaaaaa

SEQ ID NO: 852449 - RNA, 23 nt, Human
gagaucacgucacugcacuccag

SEQ ID NO: 852450 - RNA, 22 nt, Human
gaggcugaggugggaugaucac

SEQ ID NO: 852451 - RNA, 24 nt, Human
gaucacuugagcccaggaagucaa

SEQ ID NO: 852452 - RNA, 24 nt, Human
gaucgcuugagcccaggaguucaa

SEQ ID NO: 852453 - RNA, 24 nt, Human
gcacuccagccugggcaacagagc

SEQ ID NO: 852454 - RNA, 24 nt, Human
gcccaggaagucaaggcugcagug

SEQ ID NO: 852455 - RNA, 22 nt, Human
gcccaggaguucaagacuagcc

SEQ ID NO: 852456 - RNA, 19 nt, Human
gcccuggacuagccccauc

SEQ ID NO: 852457 - RNA, 19 nt, Human
gcugggugcaguggcucau

SEQ ID NO: 852458 - RNA, 23 nt, Human
ggcugggugcaguggcucaugcc

SEQ ID NO: 852459 - RNA, 23 nt, Human
ggugcaguggcucaugccuguaa

SEQ ID NO: 852460 - RNA, 24 nt, Human
gucacugcacuccagccugggcaa

SEQ ID NO: 852461 - RNA, 22 nt, Human
guggugcauaccuguaguccca

SEQ ID NO: 852462 - RNA, 23 nt, Human
uacaaaaaaaaaauacaaaaaau

SEQ ID NO: 852463 - RNA, 26 nt, Human
uacaaaaaaaaaauacaaaaaauuag

SEQ ID NO: 852464 - RNA, 21 nt, Human
uacccagccugaggaaagcac

SEQ ID NO: 852465 - RNA, 30 nt, Human
uacccagccugaggaaagcaccuaggagcc

SEQ ID NO: 852466 - RNA, 24 nt, Human
uaccuguagucccagcuacucagg

SEQ ID NO: 852467 - RNA, 21 nt, Human
uagaaaaagccaaguaguuaa

SEQ ID NO: 852468 - RNA, 21 nt, Human
uagaaaaagccaaguaguuaa

SEQ ID NO: 852469 - RNA, 18 nt, Human
uagcacucugggaggcug

SEQ ID NO: 852470 - RNA, 24 nt, Human
uagcacucugggaggcugaagcag

SEQ ID NO: 852471 - RNA, 21 nt, Human
ucaauauucugcagauuuuaa

SEQ ID NO: 852472 - RNA, 23 nt, Human
ucacgucacugcacuccagccug

SEQ ID NO: 852473 - RNA, 20 nt, Human
ucacugcacuccagccuggg

SEQ ID NO: 852474 - RNA, 21 nt, Human
ucacugcacuccagccugggc

SEQ ID NO: 852475 - RNA, 24 nt, Human
ucacugcacuccagccugggcaac

SEQ ID NO: 852476 - RNA, 20 nt, Human
ucccaccccauccccaacca

SEQ ID NO: 852477 - RNA, 23 nt, Human
ucgcuugagcccaggaguucaag

SEQ ID NO: 852478 - RNA, 28 nt, Human
ucucuacaaaaaaaaaauacaaaaaauu

SEQ ID NO: 852479 - RNA, 25 nt, Human
ugaagcaggcagaucgcuugagccc

SEQ ID NO: 852480 - RNA, 24 nt, Human
ugagacaauauuaagugaaaaaaa

SEQ ID NO: 852481 - RNA, 23 nt, Human
ugagcccaggaguucaagacuag

SEQ ID NO: 852482 - RNA, 22 nt, Human
ugagccgagaucacgucacugc

SEQ ID NO: 852483 - RNA, 24 nt, Human
ugaggugggaugaucacuugagcc

SEQ ID NO: 852484 - RNA, 23 nt, Human
ugccuguaauccuagcacucugg

SEQ ID NO: 852485 - RNA, 24 nt, Human
ugccuguaauccuagcacucuggg

SEQ ID NO: 852486 - RNA, 19 nt, Human
uggcucaugccuguaaucc

SEQ ID NO: 852487 - RNA, 24 nt, Human
uggcucaugccuguaauccuagca

SEQ ID NO: 852488 - RNA, 23 nt, Human
ugggaggcugaagcaggcagauc

SEQ ID NO: 852489 - RNA, 24 nt, Human
ugggaggcugaagcaggcagaucg

SEQ ID NO: 852490 - RNA, 18 nt, Human
uggugcauaccuguaguc

SEQ ID NO: 852491 - RNA, 21 nt, Human
uuagcuggucguggugcauac

SEQ ID NO: 852492 - RNA, 22 nt, Human
uuagcuggucguggugcauacc

SEQ ID NO: 852493 - RNA, 21 nt, Human
uucaaugucccaccccauccc

SEQ ID NO: 852494 - RNA, 19 nt, Human
uucagcacuugcccuggac

SEQ ID NO: 852495 - RNA, 19 nt, Human
uuccaaaaggacauuuucu

SEQ ID NO: 852496 - RNA, 21 nt, Human
uugagcccaggaguucaagac

SEQ ID NO: 852497 - RNA, 18 nt, Human
aaaucaggacaucaagac

SEQ ID NO: 852498 - RNA, 22 nt, Human
aagaaucacguuccuuugagcc

SEQ ID NO: 852499 - RNA, 18 nt, Human
aagcaaguauacaguuua

SEQ ID NO: 852500 - RNA, 24 nt, Human
cacucuauuguuuagacacaugcc

SEQ ID NO: 852501 - RNA, 18 nt, Human
cagccgcuacuggaggag

SEQ ID NO: 852502 - RNA, 18 nt, Human
ccgcuacuggaggagugc

SEQ ID NO: 852503 - RNA, 23 nt, Human
uagaacaaaucaggacaucaaga

SEQ ID NO: 852504 - RNA, 25 nt, Human
uagaacaaaucaggacaucaagaca

SEQ ID NO: 852505 - RNA, 21 nt, Human
ucugaagacuucuuuauaucu

SEQ ID NO: 852506 - RNA, 21 nt, Human
uucccgcguaggcggggcgag

SEQ ID NO: 852507 - RNA, 20 nt, Human
uuggguucccgcguaggcgg

SEQ ID NO: 852508 - RNA, 22 nt, Human
aaaccaaagaugaaaauuacag

SEQ ID NO: 852509 - RNA, 24 nt, Human
aagcaaggagaaaguacggaggca

SEQ ID NO: 852510 - RNA, 20 nt, Human
aagcaauccccuauugcaaa

SEQ ID NO: 852511 - RNA, 18 nt, Human
aaguagggcggugaagcc

SEQ ID NO: 852512 - RNA, 24 nt, Human
aauacaaaauguggaaaauuugga

SEQ ID NO: 852513 - RNA, 22 nt, Human
agauggcagaggcacauagcga

SEQ ID NO: 852514 - RNA, 23 nt, Human
agcagaaaaggaauaaauuccca

SEQ ID NO: 852515 - RNA, 18 nt, Human
aggagagggcuggaggcu

SEQ ID NO: 852516 - RNA, 23 nt, Human
aggcagaaagccuggagagaaau

SEQ ID NO: 852517 - RNA, 22 nt, Human
aggccacaugacacauaucacc

SEQ ID NO: 852518 - RNA, 23 nt, Human
aguacggaggcaguguccaggga

SEQ ID NO: 852519 - RNA, 24 nt, Human
auccccuauugcaaacuuucguua

SEQ ID NO: 852520 - RNA, 22 nt, Human
auugcuucccauuuuucuccau

SEQ ID NO: 852521 - RNA, 24 nt, Human
caaaauugaaaucacauaacaugc

SEQ ID NO: 852522 - RNA, 26 nt, Human
cacccaacugucauccaggaagccug

SEQ ID NO: 852523 - RNA, 22 nt, Human
cacccauauuuuaaaaaacaaa

SEQ ID NO: 852524 - RNA, 22 nt, Human
caccucugcuccaugaugggug

SEQ ID NO: 852525 - RNA, 22 nt, Human
cagcagaaaaggaauaaauucc

SEQ ID NO: 852526 - RNA, 21 nt, Human
cagugacuuuguuccaccaua

SEQ ID NO: 852527 - RNA, 24 nt, Human
caucucggaggcagaaagccugga

SEQ ID NO: 852528 - RNA, 24 nt, Human
caucuggauggagauacaauaauu

SEQ ID NO: 852529 - RNA, 22 nt, Human
ccaaagauagaauucguagguc

SEQ ID NO: 852530 - RNA, 22 nt, Human
ccaauauugggucuuauuuuuu

SEQ ID NO: 852531 - RNA, 22 nt, Human
cccaaccaaaccauugcuuccc

SEQ ID NO: 852532 - RNA, 22 nt, Human
cccacacgcaauguaugggaau

SEQ ID NO: 852533 - RNA, 25 nt, Human
ccccuauugcaaacuuucguuacag

SEQ ID NO: 852534 - RNA, 18 nt, Human
ccuuccgucuuuuuuauc

SEQ ID NO: 852535 - RNA, 22 nt, Human
cguauacaagcauacacccaua

SEQ ID NO: 852536 - RNA, 24 nt, Human
cuccaugaugggugaagauggcag

SEQ ID NO: 852537 - RNA, 20 nt, Human
cucuuggggugcuccuggcc

SEQ ID NO: 852538 - RNA, 21 nt, Human
cuggaggcucgccgucaaugg

SEQ ID NO: 852539 - RNA, 22 nt, Human
cuucccauuuuucuccauugca

SEQ ID NO: 852540 - RNA, 18 nt, Human
cuugguccuugaggcugc

SEQ ID NO: 852541 - RNA, 19 nt, Human
gaaauuacagaaaaaccaa

SEQ ID NO: 852542 - RNA, 18 nt, Human
ggcggagguggaaguagg

SEQ ID NO: 852543 - RNA, 21 nt, Human
ggcggugaagccacagggcac

SEQ ID NO: 852544 - RNA, 18 nt, Human
guucuuuuacaugacuuu

SEQ ID NO: 852545 - RNA, 24 nt, Human
uaacaugcacuauuuuuacaaccu

SEQ ID NO: 852546 - RNA, 19 nt, Human
uacaaagauaaccacucaa

SEQ ID NO: 852547 - RNA, 24 nt, Human
uacacccauauuuuaaaaaacaaa

SEQ ID NO: 852548 - RNA, 19 nt, Human
ucaaaguaggagagggcug

SEQ ID NO: 852549 - RNA, 25 nt, Human
ucagucagauguucuuuuacaugac

SEQ ID NO: 852550 - RNA, 23 nt, Human
uccaccauacaaagauaaccacu

SEQ ID NO: 852551 - RNA, 18 nt, Human
uccagggacagagucacc

SEQ ID NO: 852552 - RNA, 20 nt, Human
ucccaaagauagaauucgua

SEQ ID NO: 852553 - RNA, 23 nt, Human
uccccuauugcaaacuuucguua

SEQ ID NO: 852554 - RNA, 19 nt, Human
uccccugcuucucuaccuc

SEQ ID NO: 852555 - RNA, 22 nt, Human
ugaaaucacauaacaugcacua

SEQ ID NO: 852556 - RNA, 23 nt, Human
ugacuuuguuccaccauacaaag

SEQ ID NO: 852557 - RNA, 21 nt, Human
ugcuccaugaugggugaagau

SEQ ID NO: 852558 - RNA, 21 nt, Human
ugcugggaugaacaucuuauc

SEQ ID NO: 852559 - RNA, 22 nt, Human
ugcuguggccagugaagcaagg

SEQ ID NO: 852560 - RNA, 21 nt, Human
ugcuuccagcucuauuugccu

SEQ ID NO: 852561 - RNA, 18 nt, Human
uguugcagccuaugaguc

SEQ ID NO: 852562 - RNA, 19 nt, Human
uucuugguccuugaggcug

SEQ ID NO: 852563 - RNA, 22 nt, Human
uugcaaugcugggaugaacauc

SEQ ID NO: 852564 - RNA, 20 nt, Human
uuggaaauuacagaaaaacc

SEQ ID NO: 852565 - RNA, 18 nt, Human
uugggucuuauuuuuuuc

SEQ ID NO: 852566 - RNA, 20 nt, Human
uuguuccaccauacaaagau

SEQ ID NO: 852567 - RNA, 20 nt, Human
uuuacuuaagcaauccccua

SEQ ID NO: 852568 - RNA, 26 nt, Human
uuuuaggccacaugacacauaucacc

SEQ ID NO: 852569 - RNA, 21 nt, Human
aaccaggcccccggccgcucc

SEQ ID NO: 852570 - RNA, 23 nt, Human
aacccagaauguggggcuggcgg

SEQ ID NO: 852571 - RNA, 22 nt, Human
aaccgaagccgaaccaggcccc

SEQ ID NO: 852572 - RNA, 20 nt, Human
aagcacauacacaggauucc

SEQ ID NO: 852573 - RNA, 23 nt, Human
aagcagggaaaugacugacagaa

SEQ ID NO: 852574 - RNA, 22 nt, Human
aagccgcagaaaccgaagccga

SEQ ID NO: 852575 - RNA, 24 nt, Human
aagccgcagaaaccgaagccgaac

SEQ ID NO: 852576 - RNA, 22 nt, Human
aagcggccuccaccugcggggc

SEQ ID NO: 852577 - RNA, 18 nt, Human
aagucucuggccuuccag

SEQ ID NO: 852578 - RNA, 20 nt, Human
acagcuccaagcggccucca

SEQ ID NO: 852579 - RNA, 20 nt, Human
acgcggcagaugucgacgcc

SEQ ID NO: 852580 - RNA, 19 nt, Human
acuauccaggccacacacc

SEQ ID NO: 852581 - RNA, 22 nt, Human
agaacaccauauagcauuaaaa

SEQ ID NO: 852582 - RNA, 24 nt, Human
agaauggaggcggcggggaugggg

SEQ ID NO: 852583 - RNA, 19 nt, Human
aggcccccggccgcuccuc

SEQ ID NO: 852584 - RNA, 21 nt, Human
agugacaaaaacgacacaaaa

SEQ ID NO: 852585 - RNA, 21 nt, Human
aguggggacggggcggggagg

SEQ ID NO: 852586 - RNA, 24 nt, Human
auggauuauacaaugcugagugac

SEQ ID NO: 852587 - RNA, 27 nt, Human
caacagaacaccauauagcauuaaaaa

SEQ ID NO: 852588 - RNA, 19 nt, Human
cagaaaccgaagccgaacc

SEQ ID NO: 852589 - RNA, 20 nt, Human
cagaguuuucaaugcucucc

SEQ ID NO: 852590 - RNA, 23 nt, Human
cagcagaguuuucaaugcucucc

SEQ ID NO: 852591 - RNA, 18 nt, Human
caggccacacaccuagaa

SEQ ID NO: 852592 - RNA, 18 nt, Human
cauacaacagaacaccau

SEQ ID NO: 852593 - RNA, 22 nt, Human
cauauagcauuaaaaaugaacu

SEQ ID NO: 852594 - RNA, 22 nt, Human
ccaacaaggauggauuauacaa

SEQ ID NO: 852595 - RNA, 21 nt, Human
ccagguguuucuaaagugcag

SEQ ID NO: 852596 - RNA, 23 nt, Human
cccacgcagcgccgauucggccg

SEQ ID NO: 852597 - RNA, 21 nt, Human
cccgcagcggacuggggcugu

SEQ ID NO: 852598 - RNA, 19 nt, Human
cccgccgcgccgcuggcug

SEQ ID NO: 852599 - RNA, 22 nt, Human
ccgaagccgaaccaggcccccg

SEQ ID NO: 852600 - RNA, 22 nt, Human
ccgcagaaaccgaagccgaacc

SEQ ID NO: 852601 - RNA, 24 nt, Human
ccgcagaaaccgaagccgaaccag

SEQ ID NO: 852602 - RNA, 23 nt, Human
ccgccgcgccgcuggcugagccc

SEQ ID NO: 852603 - RNA, 24 nt, Human
ccgcgaggagccccuccgaggccc

SEQ ID NO: 852604 - RNA, 18 nt, Human
ccgcgccgcuggcugagc

SEQ ID NO: 852605 - RNA, 18 nt, Human
ccggagcccagcuccugc

SEQ ID NO: 852606 - RNA, 19 nt, Human
ccggagcccagcuccugcc

SEQ ID NO: 852607 - RNA, 24 nt, Human
ccucaccggccggaucgucuuccc

SEQ ID NO: 852608 - RNA, 20 nt, Human
ccuccaacagccguggcucc

SEQ ID NO: 852609 - RNA, 23 nt, Human
ccuccagggucccauggcccagc

SEQ ID NO: 852610 - RNA, 29 nt, Human
ccuccagggucccauggcccagcuguccc

SEQ ID NO: 852611 - RNA, 18 nt, Human
ccuccgaggcccacgcgu

SEQ ID NO: 852612 - RNA, 24 nt, Human
ccuggcugcggcgggcccgggggg

SEQ ID NO: 852613 - RNA, 21 nt, Human
cgaagccgaaccaggcccccg

SEQ ID NO: 852614 - RNA, 21 nt, Human
cgagcagcgcccucugccggc

SEQ ID NO: 852615 - RNA, 19 nt, Human
cgcccagaccugcaguaac

SEQ ID NO: 852616 - RNA, 18 nt, Human
cgcggcagaugucgacgc

SEQ ID NO: 852617 - RNA, 25 nt, Human
cggccucgggcaccacauucugggc

SEQ ID NO: 852618 - RNA, 18 nt, Human
cguccggagcccagcucc

SEQ ID NO: 852619 - RNA, 23 nt, Human
cguccggagcccagcuccugccc

SEQ ID NO: 852620 - RNA, 23 nt, Human
cgucuuccccuucggccucgggc

SEQ ID NO: 852621 - RNA, 19 nt, Human
cuaugcccucuacccucuc

SEQ ID NO: 852622 - RNA, 18 nt, Human
cucccagccugggccuca

SEQ ID NO: 852623 - RNA, 21 nt, Human
cucucgggcagguccuucugg

SEQ ID NO: 852624 - RNA, 18 nt, Human
cugaccuuaggcagcaga

SEQ ID NO: 852625 - RNA, 18 nt, Human
cugggcccacaauggcuc

SEQ ID NO: 852626 - RNA, 18 nt, Human
cuugagggugaagggcag

SEQ ID NO: 852627 - RNA, 20 nt, Human
cuugaucuugacccuaugcc

SEQ ID NO: 852628 - RNA, 23 nt, Human
gaagccgcagaaaccgaagccga

SEQ ID NO: 852629 - RNA, 21 nt, Human
gaauaaguggggacggggcgg

SEQ ID NO: 852630 - RNA, 18 nt, Human
gagcaggguggccagaau

SEQ ID NO: 852631 - RNA, 21 nt, Human
gccgccgccuggcugcggcgg

SEQ ID NO: 852632 - RNA, 24 nt, Human
gccuccaacagccguggcuccagc

SEQ ID NO: 852633 - RNA, 19 nt, Human
gccuuccaggggcuggagc

SEQ ID NO: 852634 - RNA, 21 nt, Human
gcucggcgcccagcuccagcu

SEQ ID NO: 852635 - RNA, 22 nt, Human
ggagccccuccgaggcccacgc

SEQ ID NO: 852636 - RNA, 20 nt, Human
ggccagcagcguccagcagc

SEQ ID NO: 852637 - RNA, 23 nt, Human
ggcccugcaacgccuccaacagc

SEQ ID NO: 852638 - RNA, 24 nt, Human
gggaggggcaaauauggggcccuu

SEQ ID NO: 852639 - RNA, 20 nt, Human
gggcagcagggguagccucc

SEQ ID NO: 852640 - RNA, 18 nt, Human
ggggauggggggagcggg

SEQ ID NO: 852641 - RNA, 18 nt, Human
gugaagggcaggacugug

SEQ ID NO: 852642 - RNA, 24 nt, Human
guggggcuggcggccugaacgggg

SEQ ID NO: 852643 - RNA, 24 nt, Human
uaccugggaugagguggguggagc

SEQ ID NO: 852644 - RNA, 19 nt, Human
uagcauuaaaaaugaacuc

SEQ ID NO: 852645 - RNA, 20 nt, Human
uagccucccagccugggccu

SEQ ID NO: 852646 - RNA, 24 nt, Human
uauccaggccacacaccuagaagc

SEQ ID NO: 852647 - RNA, 25 nt, Human
uauccaggccacacaccuagaagcu

SEQ ID NO: 852648 - RNA, 20 nt, Human
uccaagcggccuccaccugc

SEQ ID NO: 852649 - RNA, 18 nt, Human
uccagggucccauggccc

SEQ ID NO: 852650 - RNA, 28 nt, Human
uccccacgcagcgccgauucggccgccc

SEQ ID NO: 852651 - RNA, 20 nt, Human
uccggccccggcccggcgcg

SEQ ID NO: 852652 - RNA, 18 nt, Human
ucggcgcccagcuccagc

SEQ ID NO: 852653 - RNA, 19 nt, Human
ucuaacacucaaaagcaaa

SEQ ID NO: 852654 - RNA, 21 nt, Human
ucuccagguguuucuaaagug

SEQ ID NO: 852655 - RNA, 23 nt, Human
ugacaaaaacgacacaaaagcac

SEQ ID NO: 852656 - RNA, 19 nt, Human
ugacagaagacgaugaccu

SEQ ID NO: 852657 - RNA, 18 nt, Human
ugaccugaaugggggucu

SEQ ID NO: 852658 - RNA, 22 nt, Human
ugaugcugaccuuaggcagcag

SEQ ID NO: 852659 - RNA, 24 nt, Human
ugauggggaggggcaaauaugggg

SEQ ID NO: 852660 - RNA, 19 nt, Human
ugcccgaagccgcagaaac

SEQ ID NO: 852661 - RNA, 20 nt, Human
ugcccgagcagcgcccucug

SEQ ID NO: 852662 - RNA, 19 nt, Human
ugcccgcagcuccggagcc

SEQ ID NO: 852663 - RNA, 24 nt, Human
ugccggccgccgccuggcugcggc

SEQ ID NO: 852664 - RNA, 18 nt, Human
ugccuccagggucccaug

SEQ ID NO: 852665 - RNA, 25 nt, Human
uggagcaggguggccagaauggagg

SEQ ID NO: 852666 - RNA, 18 nt, Human
ugggaugaggugggugga

SEQ ID NO: 852667 - RNA, 20 nt, Human
ugggaugagguggguggagc

SEQ ID NO: 852668 - RNA, 21 nt, Human
ugggcagccuuggaggaaacg

SEQ ID NO: 852669 - RNA, 24 nt, Human
uggggaggggcaaauauggggccc

SEQ ID NO: 852670 - RNA, 19 nt, Human
uggggcuggcggccugaac

SEQ ID NO: 852671 - RNA, 21 nt, Human
uggguggagcuuugaaucuac

SEQ ID NO: 852672 - RNA, 27 nt, Human
uguugcauauacauauacguacacaug

SEQ ID NO: 852673 - RNA, 25 nt, Human
uuaaaaaugaacuccaggacccaac

SEQ ID NO: 852674 - RNA, 22 nt, Human
uuaucuaacacucaaaagcaaa

SEQ ID NO: 852675 - RNA, 19 nt, Human
uucaaacgaaagcagggaa

SEQ ID NO: 852676 - RNA, 20 nt, Human
uuggagcaggguggccagaa

SEQ ID NO: 852677 - RNA, 22 nt, Human
uuuuccuugaccugaauggggg

SEQ ID NO: 852678 - RNA, 18 nt, Human
uuuuuuuuuuuuuuuuug

SEQ ID NO: 852679 - RNA, 19 nt, Human
uuuuuuuuuuuuuuuuugu

SEQ ID NO: 852680 - RNA, 24 nt, Human
aaagugcugagauuacagguguga

SEQ ID NO: 852681 - RNA, 24 nt, Human
aagagcuuucuagaaagaguugaa

SEQ ID NO: 852682 - RNA, 19 nt, Human
aagggguuucaccauguag

SEQ ID NO: 852683 - RNA, 24 nt, Human
aagggguuucaccauguaggcuag

SEQ ID NO: 852684 - RNA, 20 nt, Human
aaguauacgccacaugccag

SEQ ID NO: 852685 - RNA, 20 nt, Human
aagugacucaaagaugagcc

SEQ ID NO: 852686 - RNA, 26 nt, Human
aagugcugagauuacaggugugagcc

SEQ ID NO: 852687 - RNA, 19 nt, Human
aauaucucuccaucccuga

SEQ ID NO: 852688 - RNA, 23 nt, Human
acaguguccuuaccucacaagca

SEQ ID NO: 852689 - RNA, 19 nt, Human
acccaggcuggagugcagu

SEQ ID NO: 852690 - RNA, 22 nt, Human
accugcucuaguuccacuaucc

SEQ ID NO: 852691 - RNA, 23 nt, Human
acuccauaaauaccaagcaaauc

SEQ ID NO: 852692 - RNA, 19 nt, Human
agagucuccugacuccgcc

SEQ ID NO: 852693 - RNA, 18 nt, Human
agagugccaugaaggaaa

SEQ ID NO: 852694 - RNA, 22 nt, Human
agauuacaggugugagccacug

SEQ ID NO: 852695 - RNA, 25 nt, Human
aggcuggagugcaguggcacagucu

SEQ ID NO: 852696 - RNA, 24 nt, Human
agggguuucaccauguaggcuagg

SEQ ID NO: 852697 - RNA, 19 nt, Human
agugauccacccaccucaa

SEQ ID NO: 852698 - RNA, 20 nt, Human
agugcaguggcacagucuug

SEQ ID NO: 852699 - RNA, 24 nt, Human
agugcaguggcacagucuuggcuc

SEQ ID NO: 852700 - RNA, 24 nt, Human
caaagugcugagauuacaggugug

SEQ ID NO: 852701 - RNA, 23 nt, Human
caacagcaaacaaaaugccauca

SEQ ID NO: 852702 - RNA, 21 nt, Human
caagcaacagcaaacaaaaug

SEQ ID NO: 852703 - RNA, 23 nt, Human
caagcauccuuuacuccagccca

SEQ ID NO: 852704 - RNA, 21 nt, Human
caccauguaggcuaggcuggu

SEQ ID NO: 852705 - RNA, 22 nt, Human
caccauguaggcuaggcugguc

SEQ ID NO: 852706 - RNA, 23 nt, Human
cacccaccucaacuucccaaagu

SEQ ID NO: 852707 - RNA, 24 nt, Human
caccucaacuucccaaagugcuga

SEQ ID NO: 852708 - RNA, 24 nt, Human
cacuccacuugcuucacugucacu

SEQ ID NO: 852709 - RNA, 21 nt, Human
cacugcaaccucugccuccug

SEQ ID NO: 852710 - RNA, 23 nt, Human
cacugcaaccucugccuccuggg

SEQ ID NO: 852711 - RNA, 24 nt, Human
cauguaggcuaggcuggucccgaa

SEQ ID NO: 852712 - RNA, 21 nt, Human
ccaaagugcugagauuacagg

SEQ ID NO: 852713 - RNA, 21 nt, Human
ccaaagugcugagauuacagg

SEQ ID NO: 852714 - RNA, 24 nt, Human
ccaaagugcugagauuacaggugu

SEQ ID NO: 852715 - RNA, 19 nt, Human
ccagaggucuuugcuucaa

SEQ ID NO: 852716 - RNA, 22 nt, Human
ccaucccaaccacuccacuugc

SEQ ID NO: 852717 - RNA, 18 nt, Human
ccauugccaguucccagg

SEQ ID NO: 852718 - RNA, 19 nt, Human
ccccauuaccuaucucuuu

SEQ ID NO: 852719 - RNA, 23 nt, Human
cccccauugccaguucccaggcu

SEQ ID NO: 852720 - RNA, 24 nt, Human
cccgaguagcugugacuacaggug

SEQ ID NO: 852721 - RNA, 18 nt, Human
cccggccucaagugaucc

SEQ ID NO: 852722 - RNA, 24 nt, Human
cccggccucaagugauccacccac

SEQ ID NO: 852723 - RNA, 23 nt, Human
ccgccucccgaguagcugugacu

SEQ ID NO: 852724 - RNA, 19 nt, Human
ccuauguggucacuaaagu

SEQ ID NO: 852725 - RNA, 22 nt, Human
ccucaagugauccacccaccuc

SEQ ID NO: 852726 - RNA, 21 nt, Human
ccucucuaacugaugucacuc

SEQ ID NO: 852727 - RNA, 19 nt, Human
ccucugccuccuggguuca

SEQ ID NO: 852728 - RNA, 23 nt, Human
ccuggguucaagagagucuccug

SEQ ID NO: 852729 - RNA, 20 nt, Human
ccuguagccugagccaccac

SEQ ID NO: 852730 - RNA, 24 nt, Human
cucaagugauccacccaccucaac

SEQ ID NO: 852731 - RNA, 24 nt, Human
cucacugcaaccucugccuccugg

SEQ ID NO: 852732 - RNA, 23 nt, Human
cucccggccucaagugauccacc

SEQ ID NO: 852733 - RNA, 27 nt, Human
cucccggccucaagugauccacccacc

SEQ ID NO: 852734 - RNA, 21 nt, Human
cuccuggguucaagagagucu

SEQ ID NO: 852735 - RNA, 20 nt, Human
cucugucacccaggcuggag

SEQ ID NO: 852736 - RNA, 20 nt, Human
cucuugagucccagaccucu

SEQ ID NO: 852737 - RNA, 19 nt, Human
cugacuccgccucccgagu

SEQ ID NO: 852738 - RNA, 23 nt, Human
cugcaaccucugccuccuggguu

SEQ ID NO: 852739 - RNA, 24 nt, Human
cugcaaccucugccuccuggguuc

SEQ ID NO: 852740 - RNA, 18 nt, Human
cugucacccaggcuggag

SEQ ID NO: 852741 - RNA, 19 nt, Human
cugucacccaggcuggagu

SEQ ID NO: 852742 - RNA, 22 nt, Human
cuucacugucacucuacugagu

SEQ ID NO: 852743 - RNA, 21 nt, Human
cuugcucugucacccaggcug

SEQ ID NO: 852744 - RNA, 20 nt, Human
cuuuaaauaucucuccaucc

SEQ ID NO: 852745 - RNA, 21 nt, Human
cuuucuagaaagaguugaaag

SEQ ID NO: 852746 - RNA, 19 nt, Human
gaaaguccuuagcgcaguc

SEQ ID NO: 852747 - RNA, 24 nt, Human
gaccgugcucuccuagauuuccac

SEQ ID NO: 852748 - RNA, 21 nt, Human
gacuacaggugcacaccacca

SEQ ID NO: 852749 - RNA, 21 nt, Human
gacuccgccucccgaguagcu

SEQ ID NO: 852750 - RNA, 25 nt, Human
gagcaccuagcauggugccucaaca

SEQ ID NO: 852751 - RNA, 21 nt, Human
gaucacucugcauuguaagaa

SEQ ID NO: 852752 - RNA, 18 nt, Human
gauuacaggugugagcca

SEQ ID NO: 852753 - RNA, 24 nt, Human
gauuacaggugugagccacugugc

SEQ ID NO: 852754 - RNA, 19 nt, Human
gcaagcaacagcaaacaaa

SEQ ID NO: 852755 - RNA, 20 nt, Human
gcccaugcaucccuacaaca

SEQ ID NO: 852756 - RNA, 19 nt, Human
gccccccaccuuugaccgu

SEQ ID NO: 852757 - RNA, 20 nt, Human
gcgcaguccacaguguccuu

SEQ ID NO: 852758 - RNA, 21 nt, Human
gcucacugcaaccucugccuc

SEQ ID NO: 852759 - RNA, 25 nt, Human
gcucugucacccaggcuggagugca

SEQ ID NO: 852760 - RNA, 19 nt, Human
gcuggagugcaguggcaca

SEQ ID NO: 852761 - RNA, 23 nt, Human
gcuggucccgaacucccggccuc

SEQ ID NO: 852762 - RNA, 22 nt, Human
gcuuccaucccaaccacuccac

SEQ ID NO: 852763 - RNA, 18 nt, Human
gggagcauauguguugac

SEQ ID NO: 852764 - RNA, 19 nt, Human
gggguuucaccauguaggc

SEQ ID NO: 852765 - RNA, 23 nt, Human
gggguuucaccauguaggcuagg

SEQ ID NO: 852766 - RNA, 24 nt, Human
gucuugcucugucacccaggcugg

SEQ ID NO: 852767 - RNA, 24 nt, Human
gugauccacccaccucaacuuccc

SEQ ID NO: 852768 - RNA, 20 nt, Human
uaaaccuguagccugagcca

SEQ ID NO: 852769 - RNA, 19 nt, Human
uaacaaaauauuuaccaag

SEQ ID NO: 852770 - RNA, 24 nt, Human
uacaggugcacaccaccacaucca

SEQ ID NO: 852771 - RNA, 23 nt, Human
uacaggugugagccacugugccc

SEQ ID NO: 852772 - RNA, 24 nt, Human
uacaggugugagccacugugccca

SEQ ID NO: 852773 - RNA, 18 nt, Human
uacuccagcccaugcauc

SEQ ID NO: 852774 - RNA, 25 nt, Human
uagaaagaguugaaaguccuuagcg

SEQ ID NO: 852775 - RNA, 22 nt, Human
uagagaagggguuucaccaugu

SEQ ID NO: 852776 - RNA, 20 nt, Human
uagcaagcaacagcaaacaa

SEQ ID NO: 852777 - RNA, 23 nt, Human
uagcauggugccucaacauaaaa

SEQ ID NO: 852778 - RNA, 24 nt, Human
uaguagagaagggguuucaccaug

SEQ ID NO: 852779 - RNA, 22 nt, Human
uaguauucuuuucaaaaggcca

SEQ ID NO: 852780 - RNA, 23 nt, Human
uauccaaaucuauacaugaacuc

SEQ ID NO: 852781 - RNA, 24 nt, Human
ucaaaguagagaguggugaaccac

SEQ ID NO: 852782 - RNA, 20 nt, Human
ucaagugauccacccaccuc

SEQ ID NO: 852783 - RNA, 24 nt, Human
ucacccaggcuggagugcaguggc

SEQ ID NO: 852784 - RNA, 24 nt, Human
ucacugcaaccucugccuccuggg

SEQ ID NO: 852785 - RNA, 25 nt, Human
ucacugcaaccucugccuccugggu

SEQ ID NO: 852786 - RNA, 27 nt, Human
ucacugcaaccucugccuccuggguuc

SEQ ID NO: 852787 - RNA, 20 nt, Human
ucacugucacucuacugagu

SEQ ID NO: 852788 - RNA, 23 nt, Human
ucaguggccucaaagagcuuucu

SEQ ID NO: 852789 - RNA, 21 nt, Human
uccacccaccucaacuuccca

SEQ ID NO: 852790 - RNA, 20 nt, Human
uccacuugcuucacugucac

SEQ ID NO: 852791 - RNA, 23 nt, Human
ucccaaagugcugagauuacagg

SEQ ID NO: 852792 - RNA, 24 nt, Human
ucccaaccacuccacuugcuucac

SEQ ID NO: 852793 - RNA, 23 nt, Human
ucccgaguagcugugacuacagg

SEQ ID NO: 852794 - RNA, 24 nt, Human
ucccgaguagcugugacuacaggu

SEQ ID NO: 852795 - RNA, 21 nt, Human
uccuggguucaagagagucuc

SEQ ID NO: 852796 - RNA, 24 nt, Human
uccuggguucaagagagucuccug

SEQ ID NO: 852797 - RNA, 20 nt, Human
ucuagagagcaacaguucau

SEQ ID NO: 852798 - RNA, 21 nt, Human
ucuccaucccugacaucaguc

SEQ ID NO: 852799 - RNA, 22 nt, Human
ucuccugacuccgccucccgag

SEQ ID NO: 852800 - RNA, 24 nt, Human
ucugucacccaggcuggagugcag

SEQ ID NO: 852801 - RNA, 22 nt, Human
ucuguccauucccccauuaccu

SEQ ID NO: 852802 - RNA, 23 nt, Human
ucuugcucugucacccaggcugg

SEQ ID NO: 852803 - RNA, 24 nt, Human
ucuugcucugucacccaggcugga

SEQ ID NO: 852804 - RNA, 21 nt, Human
ucuuuagccaguacucucuua

SEQ ID NO: 852805 - RNA, 22 nt, Human
ugacaccugguaugacauuucu

SEQ ID NO: 852806 - RNA, 20 nt, Human
ugacuccgccucccgaguag

SEQ ID NO: 852807 - RNA, 18 nt, Human
ugagacagagucuugcuc

SEQ ID NO: 852808 - RNA, 22 nt, Human
ugagacagagucuugcucuguc

SEQ ID NO: 852809 - RNA, 21 nt, Human
ugagaugucucucuugagucc

SEQ ID NO: 852810 - RNA, 22 nt, Human
ugagaugucucucuugaguccc

SEQ ID NO: 852811 - RNA, 21 nt, Human
ugagauuacaggugugagcca

SEQ ID NO: 852812 - RNA, 22 nt, Human
ugagauuacaggugugagccac

SEQ ID NO: 852813 - RNA, 22 nt, Human
ugagauuacaggugugagccac

SEQ ID NO: 852814 - RNA, 22 nt, Human
ugagauuacaggugugagccac

SEQ ID NO: 852815 - RNA, 24 nt, Human
ugagauuacaggugugagccacug

SEQ ID NO: 852816 - RNA, 19 nt, Human
ugagcaccuagcauggugc

SEQ ID NO: 852817 - RNA, 22 nt, Human
ugagucccagaccucuauaucc

SEQ ID NO: 852818 - RNA, 23 nt, Human
ugauccacccaccucaacuuccc

SEQ ID NO: 852819 - RNA, 22 nt, Human
ugcaguggcacagucuuggcuc

SEQ ID NO: 852820 - RNA, 24 nt, Human
ugcugagauuacaggugugagcca

SEQ ID NO: 852821 - RNA, 23 nt, Human
uggagugcaguggcacagucuug

SEQ ID NO: 852822 - RNA, 24 nt, Human
uggagugcaguggcacagucuugg

SEQ ID NO: 852823 - RNA, 20 nt, Human
uggucccgaacucccggccu

SEQ ID NO: 852824 - RNA, 18 nt, Human
uuaguagagaagggguuu

SEQ ID NO: 852825 - RNA, 22 nt, Human
uuaguagagaagggguuucacc

SEQ ID NO: 852826 - RNA, 24 nt, Human
uuaguagagaagggguuucaccau

SEQ ID NO: 852827 - RNA, 19 nt, Human
uucaagcagagaaugaagg

SEQ ID NO: 852828 - RNA, 21 nt, Human
uucaagcagagaaugaaggaa

SEQ ID NO: 852829 - RNA, 18 nt, Human
uucacugucacucuacug

SEQ ID NO: 852830 - RNA, 21 nt, Human
uucccaaagugcugagauuac

SEQ ID NO: 852831 - RNA, 18 nt, Human
uucccaggcuaagcacca

SEQ ID NO: 852832 - RNA, 24 nt, Human
uucccccauuaccuaucucuuuag

SEQ ID NO: 852833 - RNA, 20 nt, Human
uuccucguaacuugauguug

SEQ ID NO: 852834 - RNA, 19 nt, Human
uucuuuucaaaaggccaaa

SEQ ID NO: 852835 - RNA, 24 nt, Human
uuucaccauguaggcuaggcuggu

SEQ ID NO: 852836 - RNA, 19 nt, Human
uuuccauacucagcagcua

SEQ ID NO: 852837 - RNA, 24 nt, Human
uuuuuaguagagaagggguuucac

SEQ ID NO: 852838 - RNA, 20 nt, Human
uuuuuuuuuuugagacagag

SEQ ID NO: 852839 - RNA, 24 nt, Human
uuuuuuuuuuuugagacagagucu

SEQ ID NO: 852840 - RNA, 20 nt, Human
uuuuuuuuuuuuuuuuuugg

SEQ ID NO: 852841 - RNA, 20 nt, Human
aaaggcugugaagcugccua

SEQ ID NO: 852842 - RNA, 20 nt, Human
agagaagaggaaagaaaagg

SEQ ID NO: 852843 - RNA, 22 nt, Human
agagaccucugauagagaagag

SEQ ID NO: 852844 - RNA, 18 nt, Human
agggccccagcgccccuc

SEQ ID NO: 852845 - RNA, 24 nt, Human
caagggcaguagccucugcaacuu

SEQ ID NO: 852846 - RNA, 19 nt, Human
cagaccuucaagcauccuc

SEQ ID NO: 852847 - RNA, 20 nt, Human
cauuagccacauuuuaaaga

SEQ ID NO: 852848 - RNA, 18 nt, Human
cccagaaaauaaaucaga

SEQ ID NO: 852849 - RNA, 18 nt, Human
cccagggccccagcgccc

SEQ ID NO: 852850 - RNA, 19 nt, Human
ccccagcgccccucgugcc

SEQ ID NO: 852851 - RNA, 18 nt, Human
cgagcccgcgcugcccag

SEQ ID NO: 852852 - RNA, 27 nt, Human
cucaccgcuccagugggaccagcuacu

SEQ ID NO: 852853 - RNA, 25 nt, Human
cucccuggcauacauggaaccccag

SEQ ID NO: 852854 - RNA, 23 nt, Human
gccacauuuuaaagaugagggaa

SEQ ID NO: 852855 - RNA, 19 nt, Human
gcccagggccccagcgccc

SEQ ID NO: 852856 - RNA, 20 nt, Human
gcgcugcccagggccccagc

SEQ ID NO: 852857 - RNA, 18 nt, Human
ggggaagggagagaugga

SEQ ID NO: 852858 - RNA, 19 nt, Human
guuuuauauaccaugucuc

SEQ ID NO: 852859 - RNA, 24 nt, Human
ucaugagugccucccaagggcagu

SEQ ID NO: 852860 - RNA, 23 nt, Human
uccaccucaaguuuaugccagaa

SEQ ID NO: 852861 - RNA, 22 nt, Human
ucccaagggcaguagccucugc

SEQ ID NO: 852862 - RNA, 20 nt, Human
ucgcgcucucucuuucuccc

SEQ ID NO: 852863 - RNA, 24 nt, Human
ucuuucgcgcucucucuuucuccc

SEQ ID NO: 852864 - RNA, 18 nt, Human
ugagugccucccaagggc

SEQ ID NO: 852865 - RNA, 24 nt, Human
uggcauacauggaaccccagaaaa

SEQ ID NO: 852866 - RNA, 22 nt, Human
uguuauagucaucauuauugcu

SEQ ID NO: 852867 - RNA, 26 nt, Human
uguuauagucaucauuauugcuucca

SEQ ID NO: 852868 - RNA, 26 nt, Human
uuauauaccaugucucacuuaauccu

SEQ ID NO: 852869 - RNA, 18 nt, Human
uuuuuuuuuuuuuuuuug

SEQ ID NO: 852870 - RNA, 22 nt, Human
acaaagguagacccccaaaagc

SEQ ID NO: 852871 - RNA, 20 nt, Human
acggccgcguuggguuuugu

SEQ ID NO: 852872 - RNA, 21 nt, Human
agcaguacuggccgcggcgcg

SEQ ID NO: 852873 - RNA, 22 nt, Human
aggcggcgggcgcugugugcuc

SEQ ID NO: 852874 - RNA, 20 nt, Human
auccggaccuggcgguaaga

SEQ ID NO: 852875 - RNA, 19 nt, Human
caaagguagacccccaaaa

SEQ ID NO: 852876 - RNA, 22 nt, Human
caaagguagacccccaaaagcu

SEQ ID NO: 852877 - RNA, 24 nt, Human
caccuccaccucugagggagcaac

SEQ ID NO: 852878 - RNA, 20 nt, Human
cacgccccucugccgaaccc

SEQ ID NO: 852879 - RNA, 21 nt, Human
caguagaaguguuguccugcu

SEQ ID NO: 852880 - RNA, 23 nt, Human
ccaacuggcggucacgccccucu

SEQ ID NO: 852881 - RNA, 18 nt, Human
ccccccuuuuccccugcc

SEQ ID NO: 852882 - RNA, 24 nt, Human
ccccccuuuuccccugccgcgccc

SEQ ID NO: 852883 - RNA, 18 nt, Human
ccccucaccuccaccucu

SEQ ID NO: 852884 - RNA, 21 nt, Human
cccucugccgaacccuuggcc

SEQ ID NO: 852885 - RNA, 18 nt, Human
ccgccgccgccgccucug

SEQ ID NO: 852886 - RNA, 23 nt, Human
ccgcugccgccgccgccgccgcc

SEQ ID NO: 852887 - RNA, 22 nt, Human
ccucccgcggcugcugccccgc

SEQ ID NO: 852888 - RNA, 22 nt, Human
ccucuggcgccucgcucagccc

SEQ ID NO: 852889 - RNA, 22 nt, Human
cgccucuggaucuggacggacc

SEQ ID NO: 852890 - RNA, 23 nt, Human
cgcgcugcgcgccgccgcugccc

SEQ ID NO: 852891 - RNA, 19 nt, Human
cgcucagcccggccaacug

SEQ ID NO: 852892 - RNA, 22 nt, Human
cgcugcccggggagggagacgg

SEQ ID NO: 852893 - RNA, 21 nt, Human
cgcugcgcgccgccgcugccc

SEQ ID NO: 852894 - RNA, 24 nt, Human
cggcggaaggagacgcgcugcgcg

SEQ ID NO: 852895 - RNA, 21 nt, Human
cggcgggcgcugugugcucuu

SEQ ID NO: 852896 - RNA, 20 nt, Human
cgggauagccgcggaggcug

SEQ ID NO: 852897 - RNA, 23 nt, Human
cgguaagagagccagcgcccccc

SEQ ID NO: 852898 - RNA, 20 nt, Human
cucagcccggccaacuggcc

SEQ ID NO: 852899 - RNA, 20 nt, Human
cucccgggauagccgcggag

SEQ ID NO: 852900 - RNA, 18 nt, Human
cuccgcagggccgggcac

SEQ ID NO: 852901 - RNA, 18 nt, Human
cucugcugcuguuacugc

SEQ ID NO: 852902 - RNA, 20 nt, Human
cugccgccgccgccgccgcc

SEQ ID NO: 852903 - RNA, 26 nt, Human
cugcucugcugcuguuacugcgggac

SEQ ID NO: 852904 - RNA, 19 nt, Human
cugcugccccgcccgcgcc

SEQ ID NO: 852905 - RNA, 21 nt, Human
cugugugcucugaacaucaaa

SEQ ID NO: 852906 - RNA, 22 nt, Human
cuucacuuuccccucaccucca

SEQ ID NO: 852907 - RNA, 19 nt, Human
gaccuggcgguaagagagc

SEQ ID NO: 852908 - RNA, 28 nt, Human
gagaagaaugaaaggaucaccgguaccc

SEQ ID NO: 852909 - RNA, 18 nt, Human
gcccuggcccccaucccg

SEQ ID NO: 852910 - RNA, 18 nt, Human
gccgccgccgccgccgcc

SEQ ID NO: 852911 - RNA, 24 nt, Human
gccgcugcccggggagggagacgg

SEQ ID NO: 852912 - RNA, 18 nt, Human
gccucgcucagcccggcc

SEQ ID NO: 852913 - RNA, 19 nt, Human
gcgguggcggcggcugggc

SEQ ID NO: 852914 - RNA, 25 nt, Human
ggacugcuaauucaggcuaacucag

SEQ ID NO: 852915 - RNA, 21 nt, Human
ggagcaacgaauacaaaggua

SEQ ID NO: 852916 - RNA, 18 nt, Human
guccugcucugcugcugu

SEQ ID NO: 852917 - RNA, 21 nt, Human
gucucccgcugccgccgccgc

SEQ ID NO: 852918 - RNA, 22 nt, Human
ucacuuuccccucaccuccacc

SEQ ID NO: 852919 - RNA, 18 nt, Human
ucccccucguuuucccuu

SEQ ID NO: 852920 - RNA, 18 nt, Human
ucccgcugccgccgccgc

SEQ ID NO: 852921 - RNA, 24 nt, Human
ucccgcugccgccgccgccgccgg

SEQ ID NO: 852922 - RNA, 18 nt, Human
ucccugcgucucuccgag

SEQ ID NO: 852923 - RNA, 20 nt, Human
ucggggucuucgacggccgc

SEQ ID NO: 852924 - RNA, 23 nt, Human
ucucccgcugccgccgccgccgc

SEQ ID NO: 852925 - RNA, 19 nt, Human
ugagaagaaugaaaggauc

SEQ ID NO: 852926 - RNA, 22 nt, Human
ugaggcgucaacccaggaguuu

SEQ ID NO: 852927 - RNA, 19 nt, Human
ugaucagaguggaaccacu

SEQ ID NO: 852928 - RNA, 22 nt, Human
ugccucggggucuucgacggcc

SEQ ID NO: 852929 - RNA, 21 nt, Human
ugcuaauucaggcuaacucag

SEQ ID NO: 852930 - RNA, 20 nt, Human
uggccgcggcgcgguggcgg

SEQ ID NO: 852931 - RNA, 21 nt, Human
uguccugcucugcugcuguua

SEQ ID NO: 852932 - RNA, 19 nt, Human
uuaguaucaccacaaauga

SEQ ID NO: 852933 - RNA, 23 nt, Human
uugcaggcuucccucuggcgccu

SEQ ID NO: 852934 - RNA, 23 nt, Human
uugguucugcugugacuuugggg

SEQ ID NO: 852935 - RNA, 24 nt, Human
uuucaguagaaguguuguccugcu

SEQ ID NO: 852936 - RNA, 20 nt, Human
uuucccccucguuuucccuu

SEQ ID NO: 852937 - RNA, 19 nt, Human
uuugcccgcaucccuugcc

SEQ ID NO: 852938 - RNA, 25 nt, Human
aaagaccuugguuucagugggagag

SEQ ID NO: 852939 - RNA, 26 nt, Human
aaaucaauaucuuauaacaaaacuag

SEQ ID NO: 852940 - RNA, 23 nt, Human
aaauccccaauaaaauaaccucu

SEQ ID NO: 852941 - RNA, 19 nt, Human
aaccuagaaguagauggca

SEQ ID NO: 852942 - RNA, 22 nt, Human
aagauguuauuaguucuuaaaa

SEQ ID NO: 852943 - RNA, 21 nt, Human
aagccguagcaaccuagggac

SEQ ID NO: 852944 - RNA, 22 nt, Human
acacacuaaaaccaacuguuca

SEQ ID NO: 852945 - RNA, 19 nt, Human
agccguagcaaccuaggga

SEQ ID NO: 852946 - RNA, 23 nt, Human
aggaaaaaagauuucaacaaaau

SEQ ID NO: 852947 - RNA, 21 nt, Human
auacuaagcuacaacaaaaca

SEQ ID NO: 852948 - RNA, 22 nt, Human
augguuuuauuccuaauuuuua

SEQ ID NO: 852949 - RNA, 18 nt, Human
augugcuugcuaugugug

SEQ ID NO: 852950 - RNA, 24 nt, Human
caaaguuauacaacacacuaaaac

SEQ ID NO: 852951 - RNA, 22 nt, Human
caaauacagauccuaacaaagg

SEQ ID NO: 852952 - RNA, 20 nt, Human
caaauagacuacauaauaua

SEQ ID NO: 852953 - RNA, 18 nt, Human
cacacacuggacaugaag

SEQ ID NO: 852954 - RNA, 18 nt, Human
cagauccuaacaaaggca

SEQ ID NO: 852955 - RNA, 19 nt, Human
ccaauaccuaaugugccag

SEQ ID NO: 852956 - RNA, 20 nt, Human
ccacacacuggacaugaagc

SEQ ID NO: 852957 - RNA, 21 nt, Human
ccacaucccccugaauuaaaa

SEQ ID NO: 852958 - RNA, 24 nt, Human
ccauacaguuuacaaauacacuuu

SEQ ID NO: 852959 - RNA, 21 nt, Human
cccaaaauauaaaauccuaug

SEQ ID NO: 852960 - RNA, 21 nt, Human
cccaacaacauacagaaaaca

SEQ ID NO: 852961 - RNA, 23 nt, Human
ccucuaaaaauaaucuugaccau

SEQ ID NO: 852962 - RNA, 18 nt, Human
ccugaauuaaaaauaacu

SEQ ID NO: 852963 - RNA, 21 nt, Human
cgacuuuccaaacaaccucau

SEQ ID NO: 852964 - RNA, 18 nt, Human
cuacaacaaaacacuuga

SEQ ID NO: 852965 - RNA, 20 nt, Human
cuagaaguagauggcaucca

SEQ ID NO: 852966 - RNA, 21 nt, Human
cuagaaguagauggcauccau

SEQ ID NO: 852967 - RNA, 19 nt, Human
cuccaauaccuaaugugcc

SEQ ID NO: 852968 - RNA, 18 nt, Human
cugacugcucuggcccug

SEQ ID NO: 852969 - RNA, 24 nt, Human
gaacaugauaguuugcugaccucg

SEQ ID NO: 852970 - RNA, 22 nt, Human
gacaucagggaggccaugugcu

SEQ ID NO: 852971 - RNA, 23 nt, Human
gcaaagcaguugcgcuaacaccc

SEQ ID NO: 852972 - RNA, 22 nt, Human
gcaaauacagauccuaacaaag

SEQ ID NO: 852973 - RNA, 24 nt, Human
gcgccuuuuaguuuuuuuuaaaaa

SEQ ID NO: 852974 - RNA, 22 nt, Human
ggaggccaugugcuugcuaugu

SEQ ID NO: 852975 - RNA, 22 nt, Human
gugaaucucuugaaacacuaaa

SEQ ID NO: 852976 - RNA, 25 nt, Human
uaaagaaugcacacacaccaagaaa

SEQ ID NO: 852977 - RNA, 20 nt, Human
uaacaaaacuagccaagauc

SEQ ID NO: 852978 - RNA, 19 nt, Human
uaacaaaggcauccugaca

SEQ ID NO: 852979 - RNA, 24 nt, Human
uaacucuggccuuggccuaaguuu

SEQ ID NO: 852980 - RNA, 22 nt, Human
uaagcuacaacaaaacacuuga

SEQ ID NO: 852981 - RNA, 22 nt, Human
uaauacccaccagcaaccuaga

SEQ ID NO: 852982 - RNA, 18 nt, Human
uaauucuuucaccccaaa

SEQ ID NO: 852983 - RNA, 19 nt, Human
uacaacaaaacacuugaca

SEQ ID NO: 852984 - RNA, 26 nt, Human
uacaacaaaacacuugacaauugcaa

SEQ ID NO: 852985 - RNA, 21 nt, Human
uacagcaaaguuauacaacac

SEQ ID NO: 852986 - RNA, 23 nt, Human
uacaguuuacaaauacacuuuua

SEQ ID NO: 852987 - RNA, 20 nt, Human
uacuucauauacugcaggaa

SEQ ID NO: 852988 - RNA, 22 nt, Human
ucagcuuaaucagggauccuuu

SEQ ID NO: 852989 - RNA, 27 nt, Human
ucagcuuaaucagggauccuuuuccca

SEQ ID NO: 852990 - RNA, 22 nt, Human
uccaaacaaccucauucaccca

SEQ ID NO: 852991 - RNA, 23 nt, Human
ucccccugaauuaaaaauaacuc

SEQ ID NO: 852992 - RNA, 19 nt, Human
uccccgaagcaacuuggcu

SEQ ID NO: 852993 - RNA, 21 nt, Human
uccuggcuguuuccccgaagc

SEQ ID NO: 852994 - RNA, 23 nt, Human
ucuauagucuaaguuucccuuau

SEQ ID NO: 852995 - RNA, 19 nt, Human
ucuuuuaauacucugguac

SEQ ID NO: 852996 - RNA, 22 nt, Human
ugccagauaauucuuucacccc

SEQ ID NO: 852997 - RNA, 21 nt, Human
ugcucuggcccugggcgcucu

SEQ ID NO: 852998 - RNA, 26 nt, Human
ugcucuggcccugggcgcucugacuu

SEQ ID NO: 852999 - RNA, 21 nt, Human
ugguuuuauuccuaauuuuua

SEQ ID NO: 853000 - RNA, 23 nt, Human
ugucaaaauuaguuugauauaca

SEQ ID NO: 853001 - RNA, 21 nt, Human
uucaagaggaagaaggaaaaa

SEQ ID NO: 853002 - RNA, 22 nt, Human
uuuccaaacaaccucauucacc

SEQ ID NO: 853003 - RNA, 22 nt, Human
uuuuuuuuuuauaagaaaaugg

SEQ ID NO: 853004 - RNA, 25 nt, Human
aaaaaaaaaaaaaaaagcuauggaa

SEQ ID NO: 853005 - RNA, 24 nt, Human
aaaaaaaaaaaaaaagcuauggaa

SEQ ID NO: 853006 - RNA, 23 nt, Human
aaaaaaaaaaaaaagcuauggaa

SEQ ID NO: 853007 - RNA, 19 nt, Human
acagggcaagaccccgucu

SEQ ID NO: 853008 - RNA, 22 nt, Human
accccagccugggugacagggc

SEQ ID NO: 853009 - RNA, 20 nt, Human
acccgucuccaccuccccag

SEQ ID NO: 853010 - RNA, 18 nt, Human
accguaccccagccuggg

SEQ ID NO: 853011 - RNA, 21 nt, Human
accguaccccagccuggguga

SEQ ID NO: 853012 - RNA, 24 nt, Human
accguaccccagccugggugacag

SEQ ID NO: 853013 - RNA, 19 nt, Human
accuccccagcagcuguuc

SEQ ID NO: 853014 - RNA, 25 nt, Human
aggaaucuguuguagaagaguugcu

SEQ ID NO: 853015 - RNA, 18 nt, Human
aggcuggagugcaguggc

SEQ ID NO: 853016 - RNA, 22 nt, Human
aggggggcgauggggcacaggg

SEQ ID NO: 853017 - RNA, 25 nt, Human
agugcaguggcgugugaucucagcu

SEQ ID NO: 853018 - RNA, 22 nt, Human
agugcaguggcgugugaucucc

SEQ ID NO: 853019 - RNA, 19 nt, Human
cacagccccauuaugacau

SEQ ID NO: 853020 - RNA, 24 nt, Human
cacccaggcuggagugcaguggcg

SEQ ID NO: 853021 - RNA, 24 nt, Human
caccguaccccagccugggugaca

SEQ ID NO: 853022 - RNA, 20 nt, Human
cagagagauucuaugaccac

SEQ ID NO: 853023 - RNA, 18 nt, Human
cagcucacuguaagcucc

SEQ ID NO: 853024 - RNA, 19 nt, Human
caucccuccuucccucuuu

SEQ ID NO: 853025 - RNA, 23 nt, Human
ccaaaaaaaacugggcggggggc

SEQ ID NO: 853026 - RNA, 24 nt, Human
ccaccguaccccagccugggugac

SEQ ID NO: 853027 - RNA, 21 nt, Human
ccaccuccccagcagcuguuc

SEQ ID NO: 853028 - RNA, 18 nt, Human
ccagucgccugucuccag

SEQ ID NO: 853029 - RNA, 21 nt, Human
cccaggcuggagugcaguggc

SEQ ID NO: 853030 - RNA, 21 nt, Human
cccuccuucccucuuuugguc

SEQ ID NO: 853031 - RNA, 23 nt, Human
ccggcacccgucuccaccucccc

SEQ ID NO: 853032 - RNA, 21 nt, Human
ccguaccccagccugggugac

SEQ ID NO: 853033 - RNA, 20 nt, Human
ccugggugacagggcaagac

SEQ ID NO: 853034 - RNA, 19 nt, Human
cgacuccuaacuuugcccu

SEQ ID NO: 853035 - RNA, 18 nt, Human
cgcagcuccaccucgugc

SEQ ID NO: 853036 - RNA, 19 nt, Human
cgccucccgggcucacgcc

SEQ ID NO: 853037 - RNA, 24 nt, Human
cucacuguaagcuccgccucccgg

SEQ ID NO: 853038 - RNA, 21 nt, Human
cucccggcacccgucuccacc

SEQ ID NO: 853039 - RNA, 22 nt, Human
cuccgcagaaagcucacugcuu

SEQ ID NO: 853040 - RNA, 19 nt, Human
cuccuccacgcgcagcucc

SEQ ID NO: 853041 - RNA, 22 nt, Human
cuccuggauuuccaagccucug

SEQ ID NO: 853042 - RNA, 24 nt, Human
cucguucugucacccaggcuggag

SEQ ID NO: 853043 - RNA, 24 nt, Human
cugcuuccuguggcuccuggauuu

SEQ ID NO: 853044 - RNA, 23 nt, Human
cugggguuuccugucucucccgg

SEQ ID NO: 853045 - RNA, 20 nt, Human
cuuuuggucuccauuuccau

SEQ ID NO: 853046 - RNA, 23 nt, Human
gagugcaguggcgugugaucuca

SEQ ID NO: 853047 - RNA, 24 nt, Human
gccaccguaccccagccuggguga

SEQ ID NO: 853048 - RNA, 23 nt, Human
gcggggaaacugagacaaguucc

SEQ ID NO: 853049 - RNA, 19 nt, Human
gcuggagugcaguggcgug

SEQ ID NO: 853050 - RNA, 21 nt, Human
gcuuccuguggcuccuggauu

SEQ ID NO: 853051 - RNA, 26 nt, Human
ggacuccuccacgcgcagcuccaccu

SEQ ID NO: 853052 - RNA, 18 nt, Human
ggcgauggggcacaggga

SEQ ID NO: 853053 - RNA, 24 nt, Human
guaccccagccugggugacagggc

SEQ ID NO: 853054 - RNA, 23 nt, Human
guucuuugcccguugcacacagu

SEQ ID NO: 853055 - RNA, 22 nt, Human
guugaaaucccuuuugaaaagu

SEQ ID NO: 853056 - RNA, 22 nt, Human
uacaaugagcgccagucgccug

SEQ ID NO: 853057 - RNA, 23 nt, Human
uacauuuuuuuuuuuuuuugaga

SEQ ID NO: 853058 - RNA, 20 nt, Human
uaccccagccugggugacag

SEQ ID NO: 853059 - RNA, 24 nt, Human
uauaucacaaccccauuucuggag

SEQ ID NO: 853060 - RNA, 27 nt, Human
uauggaagccacuaggugagcucuacg

SEQ ID NO: 853061 - RNA, 24 nt, Human
ucacccaggcuggagugcaguggc

SEQ ID NO: 853062 - RNA, 18 nt, Human
ucacuguaagcuccgccu

SEQ ID NO: 853063 - RNA, 19 nt, Human
ucacuguaagcuccgccuc

SEQ ID NO: 853064 - RNA, 24 nt, Human
ucacuguaagcuccgccucccggg

SEQ ID NO: 853065 - RNA, 21 nt, Human
ucagaucuccccacucauucu

SEQ ID NO: 853066 - RNA, 20 nt, Human
ucaucugguggcaucccucc

SEQ ID NO: 853067 - RNA, 21 nt, Human
ucccgggcucacgccauucuc

SEQ ID NO: 853068 - RNA, 24 nt, Human
ucccgggcucacgccauucuccug

SEQ ID NO: 853069 - RNA, 22 nt, Human
uccuaacuuugcccuacucagc

SEQ ID NO: 853070 - RNA, 24 nt, Human
ucguucugucacccaggcuggagu

SEQ ID NO: 853071 - RNA, 19 nt, Human
ucuaugaccacuuccaaaa

SEQ ID NO: 853072 - RNA, 20 nt, Human
ucuccaaaaaaaaaaaaaaa

SEQ ID NO: 853073 - RNA, 19 nt, Human
ucucguucugucacccagg

SEQ ID NO: 853074 - RNA, 22 nt, Human
ucucguucugucacccaggcug

SEQ ID NO: 853075 - RNA, 23 nt, Human
ucucguucugucacccaggcugg

SEQ ID NO: 853076 - RNA, 24 nt, Human
ucucguucugucacccaggcugga

SEQ ID NO: 853077 - RNA, 18 nt, Human
ucugucacccaggcugga

SEQ ID NO: 853078 - RNA, 19 nt, Human
ucugucacccaggcuggag

SEQ ID NO: 853079 - RNA, 24 nt, Human
ucugucacccaggcuggagugcag

SEQ ID NO: 853080 - RNA, 23 nt, Human
ugaccacuuccaaaaaaaacugg

SEQ ID NO: 853081 - RNA, 22 nt, Human
ugagacggagucucguucuguc

SEQ ID NO: 853082 - RNA, 24 nt, Human
ugcaguggcgugugaucucagcuc

SEQ ID NO: 853083 - RNA, 24 nt, Human
ugcccuacucagcucccucggcug

SEQ ID NO: 853084 - RNA, 23 nt, Human
uggaagccacuaggugagcucua

SEQ ID NO: 853085 - RNA, 23 nt, Human
uggacuccuccacgcgcagcucc

SEQ ID NO: 853086 - RNA, 22 nt, Human
uggagugcaguggcgugugauc

SEQ ID NO: 853087 - RNA, 28 nt, Human
uggagugcaguggcgugugggcucuagc

SEQ ID NO: 853088 - RNA, 25 nt, Human
uggcgugugaucucagcucacugua

SEQ ID NO: 853089 - RNA, 22 nt, Human
uggcuccuggauuuccaagccu

SEQ ID NO: 853090 - RNA, 22 nt, Human
ugggcggggggcuuucggcuga

SEQ ID NO: 853091 - RNA, 24 nt, Human
ugggcggggggcuuucggcugagc

SEQ ID NO: 853092 - RNA, 30 nt, Human
uggggcacagggacgggcaggaaucuguuu

SEQ ID NO: 853093 - RNA, 23 nt, Human
ugggguuuccugucucucccggc

SEQ ID NO: 853094 - RNA, 21 nt, Human
ugucacccaggcuggagugca

SEQ ID NO: 853095 - RNA, 22 nt, Human
uguuccgucuuccgggauccca

SEQ ID NO: 853096 - RNA, 18 nt, Human
uuuccaggguggcucugu

SEQ ID NO: 853097 - RNA, 19 nt, Human
uuugaaaaguucuuugccc

SEQ ID NO: 853098 - RNA, 25 nt, Human
uuuuuuuuuuuugagacggagucuc

SEQ ID NO: 853099 - RNA, 22 nt, Human
uuuuuuuuuuuuuugagacgga

SEQ ID NO: 853100 - RNA, 20 nt, Human
uuuuuuuuuuuuuuuuuugg

SEQ ID NO: 853101 - RNA, 23 nt, Human
aaaaaaccacaaaauaaaaaagg

SEQ ID NO: 853102 - RNA, 21 nt, Human
aaaaaagggaucaaucaacau

SEQ ID NO: 853103 - RNA, 22 nt, Human
acuauauuaaaaaaccacaaaa

SEQ ID NO: 853104 - RNA, 30 nt, Human
agagcggagccgggcggcacuccgcggaaa

SEQ ID NO: 853105 - RNA, 21 nt, Human
agccgcgccggcggcagagcg

SEQ ID NO: 853106 - RNA, 20 nt, Human
cacccuucgcugagucccuc

SEQ ID NO: 853107 - RNA, 19 nt, Human
caccggagaugacucgugc

SEQ ID NO: 853108 - RNA, 19 nt, Human
caugagccgcgccggcggc

SEQ ID NO: 853109 - RNA, 22 nt, Human
ccgcccggccgacucugcccau

SEQ ID NO: 853110 - RNA, 21 nt, Human
ccggcccgcccggccgacucu

SEQ ID NO: 853111 - RNA, 20 nt, Human
ccugcaguucauuuaaggau

SEQ ID NO: 853112 - RNA, 22 nt, Human
cgcggaaacccgccagcggcag

SEQ ID NO: 853113 - RNA, 22 nt, Human
cuugguaugcaacagccaugga

SEQ ID NO: 853114 - RNA, 22 nt, Human
gaucaccggagaugacucgugc

SEQ ID NO: 853115 - RNA, 20 nt, Human
gccucggcggcgcccacccu

SEQ ID NO: 853116 - RNA, 22 nt, Human
gccucggcggcgcccacccuuc

SEQ ID NO: 853117 - RNA, 19 nt, Human
uccgcggaaacccgccagc

SEQ ID NO: 853118 - RNA, 26 nt, Human
uccgcggaaacccgccagcggcagga

SEQ ID NO: 853119 - RNA, 24 nt, Human
uccuuccaagagucuugguaugca

SEQ ID NO: 853120 - RNA, 22 nt, Human
uggaggcugugaccuuuuuccu

SEQ ID NO: 853121 - RNA, 23 nt, Human
ugugaccuuuuuccuucuuuucu

SEQ ID NO: 853122 - RNA, 22 nt, Human
uuagaaguccuuccaagagucu

SEQ ID NO: 853123 - RNA, 23 nt, Human
uuuaaggaucaccggagaugacu

SEQ ID NO: 853124 - RNA, 20 nt, Human
uuuuguuuuuuuaaaaggau

SEQ ID NO: 853125 - RNA, 23 nt, Human
uuuuuuuuuguuuuuuuaaaagg

SEQ ID NO: 853126 - RNA, 20 nt, Human
uuuuuuuuuuuuuuuuuugg

SEQ ID NO: 853127 - RNA, 24 nt, Human
uuuuuuuuuuuuuuuuuuguuuuu

SEQ ID NO: 853128 - RNA, 20 nt, Human
acacaaggccugcuucugug

SEQ ID NO: 853129 - RNA, 18 nt, Human
acugcaguccugccccuu

SEQ ID NO: 853130 - RNA, 24 nt, Human
aggaggcagcgcugccagcugcug

SEQ ID NO: 853131 - RNA, 19 nt, Human
aggcagggacuccccaggu

SEQ ID NO: 853132 - RNA, 23 nt, Human
caaauuuauagccuggggaagca

SEQ ID NO: 853133 - RNA, 20 nt, Human
cagcgcugccagcugcuguu

SEQ ID NO: 853134 - RNA, 23 nt, Human
cagcugcuguuugucaaacacac

SEQ ID NO: 853135 - RNA, 23 nt, Human
caggcuaccugcuggccaggccu

SEQ ID NO: 853136 - RNA, 18 nt, Human
ccagggaggagaggcagg

SEQ ID NO: 853137 - RNA, 20 nt, Human
ccaguguccccacuggacac

SEQ ID NO: 853138 - RNA, 21 nt, Human
ccccuucccacaccagugucc

SEQ ID NO: 853139 - RNA, 22 nt, Human
ccccuucugcacaggcuggaga

SEQ ID NO: 853140 - RNA, 18 nt, Human
cccgcagugcacugcagu

SEQ ID NO: 853141 - RNA, 22 nt, Human
ccgcuggaaacacaaggccugc

SEQ ID NO: 853142 - RNA, 22 nt, Human
ccugcuggccaggccuuuccca

SEQ ID NO: 853143 - RNA, 20 nt, Human
cugccccuucccacaccagu

SEQ ID NO: 853144 - RNA, 22 nt, Human
cuucccugccucuuaucagagg

SEQ ID NO: 853145 - RNA, 26 nt, Human
cuucugcacaggcuggagacucccag

SEQ ID NO: 853146 - RNA, 19 nt, Human
ucagguccuucccugccuc

SEQ ID NO: 853147 - RNA, 24 nt, Human
uccccacuggacacuccaaggccc

SEQ ID NO: 853148 - RNA, 20 nt, Human
uccccaggugcugccccuuc

SEQ ID NO: 853149 - RNA, 19 nt, Human
uccucuggggguggccuca

SEQ ID NO: 853150 - RNA, 19 nt, Human
uccucuggggguggccuca

SEQ ID NO: 853151 - RNA, 18 nt, Human
ugagaacaaauuuauagc

SEQ ID NO: 853152 - RNA, 27 nt, Human
ugagaacaaauuuauagccuggggaag

SEQ ID NO: 853153 - RNA, 21 nt, Human
ugcuggccaggccuuucccag

SEQ ID NO: 853154 - RNA, 19 nt, Human
uggcaggaaugugggcagg

SEQ ID NO: 853155 - RNA, 21 nt, Human
uuuuuugggagagacaguuuu

SEQ ID NO: 853156 - RNA, 26 nt, Human
uuuuuuuuuuuuuuuuuuuuuuuggg

SEQ ID NO: 853157 - RNA, 20 nt, Human
aaacgccucacgcacgcccc

SEQ ID NO: 853158 - RNA, 19 nt, Human
ccccaguacccucaaugcc

SEQ ID NO: 853159 - RNA, 21 nt, Human
ccgaggccaccggaccaggaa

SEQ ID NO: 853160 - RNA, 18 nt, Human
cuaaagcauauggguuca

SEQ ID NO: 853161 - RNA, 19 nt, Human
cuuaccgggaccgaggcca

SEQ ID NO: 853162 - RNA, 22 nt, Human
uaaacgccucacgcacgcccca

SEQ ID NO: 853163 - RNA, 23 nt, Human
uaccgggaccgaggccaccggac

SEQ ID NO: 853164 - RNA, 18 nt, Human
uucacauuugaauguccu

SEQ ID NO: 853165 - RNA, 18 nt, Human
uucacccggaaaugaagc

SEQ ID NO: 853166 - RNA, 20 nt, Human
uuuucacauuugaauguccu

SEQ ID NO: 853167 - RNA, 21 nt, Human
aaaaggucaccagaacaagag

SEQ ID NO: 853168 - RNA, 22 nt, Human
acgccgagucgauuggcagcac

SEQ ID NO: 853169 - RNA, 22 nt, Human
acucagcugggucugccaaagc

SEQ ID NO: 853170 - RNA, 31 nt, Human
agacaagacguauucaaaaggucaccagaaa

SEQ ID NO: 853171 - RNA, 23 nt, Human
caaaaggucaccagaaccggggc

SEQ ID NO: 853172 - RNA, 18 nt, Human
cagaacaagagcugaaaa

SEQ ID NO: 853173 - RNA, 19 nt, Human
cagcugggucugccaaagc

SEQ ID NO: 853174 - RNA, 18 nt, Human
ccagaacaagagcugaaa

SEQ ID NO: 853175 - RNA, 22 nt, Human
cugccaaagccgcaaauuccgc

SEQ ID NO: 853176 - RNA, 24 nt, Human
gccuaucuaccacgaccgacgcca

SEQ ID NO: 853177 - RNA, 20 nt, Human
guagacaguuuaaaauccau

SEQ ID NO: 853178 - RNA, 20 nt, Human
uaucacaugaugaguuggca

SEQ ID NO: 853179 - RNA, 22 nt, Human
ucaccagaacaagagcugaaaa

SEQ ID NO: 853180 - RNA, 19 nt, Human
uccgcagcugguguccuuc

SEQ ID NO: 853181 - RNA, 19 nt, Human
ucgauuggcagcacagacg

SEQ ID NO: 853182 - RNA, 19 nt, Human
ucuuuuauagacaagacgu

SEQ ID NO: 853183 - RNA, 19 nt, Human
ugaguuggcauuagcuucu

SEQ ID NO: 853184 - RNA, 21 nt, Human
uuagcuucuccaggcauggga

SEQ ID NO: 853185 - RNA, 23 nt, Human
uucaaaaggucaccagaacaaga

SEQ ID NO: 853186 - RNA, 18 nt, Human
uuuuuuuuuuuuuuuuug

SEQ ID NO: 853187 - RNA, 23 nt, Human
uuuuuuuuuuuuuuuuuuugggu

SEQ ID NO: 853188 - RNA, 24 nt, Human
uuuuuuuuuuuuuuuuuuuuuggg

SEQ ID NO: 853189 - RNA, 24 nt, Human
aaauucacuuaaacucuauuugcc

SEQ ID NO: 853190 - RNA, 20 nt, Human
auagucagggcaauaagagc

SEQ ID NO: 853191 - RNA, 19 nt, Human
caacucuaugguuuucuca

SEQ ID NO: 853192 - RNA, 23 nt, Human
cagaucuccauuugauucucagc

SEQ ID NO: 853193 - RNA, 21 nt, Human
caggcacauaaggauuugguu

SEQ ID NO: 853194 - RNA, 19 nt, Human
cagggcaauaagagcaaag

SEQ ID NO: 853195 - RNA, 20 nt, Human
ccgggccgggccgcagcguc

SEQ ID NO: 853196 - RNA, 21 nt, Human
gagcaaaguuacaguaaaaac

SEQ ID NO: 853197 - RNA, 19 nt, Human
gggccgcagcgucuacaac

SEQ ID NO: 853198 - RNA, 20 nt, Human
gggccgcagcgucuacaacc

SEQ ID NO: 853199 - RNA, 22 nt, Human
guaacaaauuuuaguucucuuc

SEQ ID NO: 853200 - RNA, 21 nt, Human
uaaagcauagagcuguaacaa

SEQ ID NO: 853201 - RNA, 25 nt, Human
uaagagcaaaguuacaguaaaaacg

SEQ ID NO: 853202 - RNA, 22 nt, Human
uaggugagccauuuaauuucug

SEQ ID NO: 853203 - RNA, 21 nt, Human
uagucagggcaauaagagcaa

SEQ ID NO: 853204 - RNA, 23 nt, Human
ugaggacugagauauaauuuuca

SEQ ID NO: 853205 - RNA, 19 nt, Human
uguuuauuuccaggcacau

SEQ ID NO: 853206 - RNA, 25 nt, Human
uuuuuuuuuuuuuuuuuuuuacaag

SEQ ID NO: 853207 - RNA, 21 nt, Human
agaaaugcggcagggcccaga

SEQ ID NO: 853208 - RNA, 21 nt, Human
auaagucaaauauauacuuug

SEQ ID NO: 853209 - RNA, 23 nt, Human
cagggcccagaggcggacugcag

SEQ ID NO: 853210 - RNA, 21 nt, Human
gccaaugaggguaaagagaaa

SEQ ID NO: 853211 - RNA, 21 nt, Human
uagaaugccacuuuaagucuc

SEQ ID NO: 853212 - RNA, 19 nt, Human
ucuccagcagugccugaga

SEQ ID NO: 853213 - RNA, 18 nt, Human
uuuuuuuuuuuuuuuccg

SEQ ID NO: 853214 - RNA, 21 nt, Human
uuuuuuuuuuuuuuuuuccgu

SEQ ID NO: 853215 - RNA, 24 nt, Human
uuuuuuuuuuuuuuuuuuuuccgu

SEQ ID NO: 853216 - RNA, 24 nt, Human
uuuuuuuuuuuuuuuuuuuuuccu

SEQ ID NO: 853217 - RNA, 24 nt, Human
aaacuagucauaguaacugagaaa

SEQ ID NO: 853218 - RNA, 23 nt, Human
aaagaaaaaaaaggucauaggga

SEQ ID NO: 853219 - RNA, 19 nt, Human
aaagaaaugcuacagaaau

SEQ ID NO: 853220 - RNA, 18 nt, Human
aaagaagccaaucugaaa

SEQ ID NO: 853221 - RNA, 19 nt, Human
aaaggucauagggaagaug

SEQ ID NO: 853222 - RNA, 21 nt, Human
aaagucuauuuuuuguaaaag

SEQ ID NO: 853223 - RNA, 24 nt, Human
aaccuaaaacuguucuaaaacaua

SEQ ID NO: 853224 - RNA, 24 nt, Human
aagaaagagagaaggaggaaaaga

SEQ ID NO: 853225 - RNA, 25 nt, Human
aagaaagagagaaggaggaaaagaa

SEQ ID NO: 853226 - RNA, 22 nt, Human
aagaagccaaucugaaaagcua

SEQ ID NO: 853227 - RNA, 25 nt, Human
aaggguuaaaggagagggagggaug

SEQ ID NO: 853228 - RNA, 24 nt, Human
agaaagagagaaggaggaaaagaa

SEQ ID NO: 853229 - RNA, 22 nt, Human
aggaaaagaaacuagugugaua

SEQ ID NO: 853230 - RNA, 20 nt, Human
caugacaagauacagagaaa

SEQ ID NO: 853231 - RNA, 20 nt, Human
cccucacguaaacuauggac

SEQ ID NO: 853232 - RNA, 22 nt, Human
cuaaaaaaaaaaugagcuacau

SEQ ID NO: 853233 - RNA, 22 nt, Human
cuacacuaaaaaaaaaaugagc

SEQ ID NO: 853234 - RNA, 20 nt, Human
cucugcauuuucugcuccau

SEQ ID NO: 853235 - RNA, 21 nt, Human
cugagaaaauacuauggaauu

SEQ ID NO: 853236 - RNA, 20 nt, Human
gagcaagaaagagagaagga

SEQ ID NO: 853237 - RNA, 20 nt, Human
gaggauuuuuuaaggcagug

SEQ ID NO: 853238 - RNA, 21 nt, Human
ggaugaauaaguaaaacacag

SEQ ID NO: 853239 - RNA, 22 nt, Human
gggaggcugugaauguguggag

SEQ ID NO: 853240 - RNA, 24 nt, Human
uaaaaaaauaagagucaugagaaa

SEQ ID NO: 853241 - RNA, 23 nt, Human
uaaaauaaaaaugauaaaucgcu

SEQ ID NO: 853242 - RNA, 27 nt, Human
uaaaauaacuuguaagaguuaaggacc

SEQ ID NO: 853243 - RNA, 20 nt, Human
uaaaggagagggagggauga

SEQ ID NO: 853244 - RNA, 23 nt, Human
uaaagugaccaucuuuucaucuu

SEQ ID NO: 853245 - RNA, 21 nt, Human
uaaaugcauauuaauacauga

SEQ ID NO: 853246 - RNA, 18 nt, Human
uacaacaccaagagugaa

SEQ ID NO: 853247 - RNA, 25 nt, Human
uacuauggaauuuuuuuguauagaa

SEQ ID NO: 853248 - RNA, 19 nt, Human
uagaaccagacaauaaaau

SEQ ID NO: 853249 - RNA, 22 nt, Human
ucaaaacccauauuauguacaa

SEQ ID NO: 853250 - RNA, 19 nt, Human
ucuaaaacauaaagucuau

SEQ ID NO: 853251 - RNA, 18 nt, Human
ucugguaaaagcaaaacu

SEQ ID NO: 853252 - RNA, 19 nt, Human
ugaaacacuucaaccauga

SEQ ID NO: 853253 - RNA, 22 nt, Human
ugaaagaagccaaucugaaaag

SEQ ID NO: 853254 - RNA, 24 nt, Human
ugaaauaaaagaaaaaaaagguca

SEQ ID NO: 853255 - RNA, 22 nt, Human
ugaacaugccgucgacauuuuc

SEQ ID NO: 853256 - RNA, 19 nt, Human
ugacaagauacagagaaac

SEQ ID NO: 853257 - RNA, 18 nt, Human
ugugguagaaccagacaa

SEQ ID NO: 853258 - RNA, 23 nt, Human
ugugucaauguagguucaucagu

SEQ ID NO: 853259 - RNA, 22 nt, Human
uuaaggacauucuuccuaauug

SEQ ID NO: 853260 - RNA, 23 nt, Human
uuacacauuugucaaaacccaua

SEQ ID NO: 853261 - RNA, 21 nt, Human
uuggagcaagaaagagagaag

SEQ ID NO: 853262 - RNA, 20 nt, Human
uuugcugugaaccuaaaacc

SEQ ID NO: 853263 - RNA, 23 nt, Human
uuuuuuguauagaaauggugguu

SEQ ID NO: 853264 - RNA, 22 nt, Human
uuuuuuuuuuugugguagaacc

SEQ ID NO: 853265 - RNA, 19 nt, Human
uuuuuuuuuuuuuuuuugu

SEQ ID NO: 853266 - RNA, 21 nt, Human
uuuuuuuuuuuuuuuuugugg

SEQ ID NO: 853267 - RNA, 27 nt, Human
uuuuuuuuuuuuuuuuuuuuuuugggg

SEQ ID NO: 853268 - RNA, 19 nt, Human
aaagugcugggauuacagg

SEQ ID NO: 853269 - RNA, 24 nt, Human
aaagugcugggauuacaggccuga

SEQ ID NO: 853270 - RNA, 24 nt, Human
aagaugggguuucaccauguuggu

SEQ ID NO: 853271 - RNA, 19 nt, Human
aagugcugggauuacaggc

SEQ ID NO: 853272 - RNA, 19 nt, Human
aagugcugggauuacaggc

SEQ ID NO: 853273 - RNA, 19 nt, Human
aagugcugggauuacaggc

SEQ ID NO: 853274 - RNA, 23 nt, Human
accauguuggucgguuggucucg

SEQ ID NO: 853275 - RNA, 24 nt, Human
acugucacccaggcuggagugcaa

SEQ ID NO: 853276 - RNA, 23 nt, Human
agcgauucuccugccccggcccc

SEQ ID NO: 853277 - RNA, 18 nt, Human
aguagccgggauuacagg

SEQ ID NO: 853278 - RNA, 24 nt, Human
agugcaauggcacgaccucggcuc

SEQ ID NO: 853279 - RNA, 24 nt, Human
agugcugggauuacaggccugagu

SEQ ID NO: 853280 - RNA, 24 nt, Human
augauccgcccgccucggccuccc

SEQ ID NO: 853281 - RNA, 24 nt, Human
augggguuucaccauguuggucgg

SEQ ID NO: 853282 - RNA, 25 nt, Human
augggguuucaccauguuggucggu

SEQ ID NO: 853283 - RNA, 24 nt, Human
caaagugcugggauuacaggccug

SEQ ID NO: 853284 - RNA, 20 nt, Human
caacucaacccugcaacuuc

SEQ ID NO: 853285 - RNA, 24 nt, Human
caacucaacccugcaacuucucag

SEQ ID NO: 853286 - RNA, 19 nt, Human
caagcgauucuccugcccc

SEQ ID NO: 853287 - RNA, 22 nt, Human
cacagcagccggcgguaaggac

SEQ ID NO: 853288 - RNA, 23 nt, Human
caccauguuggucgguuggucuc

SEQ ID NO: 853289 - RNA, 22 nt, Human
caggugcacaccaccaacaccc

SEQ ID NO: 853290 - RNA, 24 nt, Human
caguaaagaugggguuucaccaug

SEQ ID NO: 853291 - RNA, 26 nt, Human
caguaaagaugggguuucaccauguu

SEQ ID NO: 853292 - RNA, 19 nt, Human
ccaaagugcugggauuaca

SEQ ID NO: 853293 - RNA, 22 nt, Human
ccaaagugcugggauuacaggc

SEQ ID NO: 853294 - RNA, 24 nt, Human
ccaaagugcugggauuacaggccu

SEQ ID NO: 853295 - RNA, 18 nt, Human
cccaggcuggagugcaau

SEQ ID NO: 853296 - RNA, 20 nt, Human
cccagguucaagcgauucuc

SEQ ID NO: 853297 - RNA, 23 nt, Human
cccagguucaagcgauucuccug

SEQ ID NO: 853298 - RNA, 23 nt, Human
ccccgaguagccgggauuacagg

SEQ ID NO: 853299 - RNA, 19 nt, Human
cccgaguagccgggauuac

SEQ ID NO: 853300 - RNA, 24 nt, Human
cccgaguagccgggauuacaggug

SEQ ID NO: 853301 - RNA, 23 nt, Human
ccggcgguaaggacggggcguuc

SEQ ID NO: 853302 - RNA, 21 nt, Human
ccugcaacuucucagcucccg

SEQ ID NO: 853303 - RNA, 23 nt, Human
ccugccccggccccccgaguagc

SEQ ID NO: 853304 - RNA, 19 nt, Human
cgauucuccugccccggcc

SEQ ID NO: 853305 - RNA, 24 nt, Human
cgccucggccucccaaagugcugg

SEQ ID NO: 853306 - RNA, 21 nt, Human
cgggaccaacucaacccugca

SEQ ID NO: 853307 - RNA, 22 nt, Human
cgggaccaacucaacccugcaa

SEQ ID NO: 853308 - RNA, 23 nt, Human
cggggcaccaggaagcgggaaga

SEQ ID NO: 853309 - RNA, 22 nt, Human
cucaaggacuugccgggaccaa

SEQ ID NO: 853310 - RNA, 23 nt, Human
cucacugcaaccuccugcuccca

SEQ ID NO: 853311 - RNA, 24 nt, Human
cucacugcaaccuccugcucccag

SEQ ID NO: 853312 - RNA, 23 nt, Human
cucccagguucaagcgauucucc

SEQ ID NO: 853313 - RNA, 24 nt, Human
cuccugaccucaugauccgcccgc

SEQ ID NO: 853314 - RNA, 23 nt, Human
cugcaaccuccugcucccagguu

SEQ ID NO: 853315 - RNA, 24 nt, Human
cugcaaccuccugcucccagguuc

SEQ ID NO: 853316 - RNA, 18 nt, Human
gaagcgggaagacagagg

SEQ ID NO: 853317 - RNA, 22 nt, Human
gaccucaugauccgcccgccuc

SEQ ID NO: 853318 - RNA, 19 nt, Human
gaccucggcucacugcaac

SEQ ID NO: 853319 - RNA, 19 nt, Human
gacgcagucggggcaccag

SEQ ID NO: 853320 - RNA, 19 nt, Human
gaggcacuccacagcagcc

SEQ ID NO: 853321 - RNA, 26 nt, Human
gaguagccgggauuacaggugcacac

SEQ ID NO: 853322 - RNA, 21 nt, Human
gauuacaggccugagucacca

SEQ ID NO: 853323 - RNA, 24 nt, Human
gauuacaggccugagucaccaugc

SEQ ID NO: 853324 - RNA, 19 nt, Human
gcuggagugcaauggcacg

SEQ ID NO: 853325 - RNA, 24 nt, Human
ggagacagcgaggcacuccacagc

SEQ ID NO: 853326 - RNA, 19 nt, Human
gggaagacagaggaacaaa

SEQ ID NO: 853327 - RNA, 23 nt, Human
gggauuacaggugcacaccacca

SEQ ID NO: 853328 - RNA, 18 nt, Human
gggguuucaccauguugg

SEQ ID NO: 853329 - RNA, 20 nt, Human
ggguuucaccauguuggucg

SEQ ID NO: 853330 - RNA, 19 nt, Human
ggucucgaacuccugaccu

SEQ ID NO: 853331 - RNA, 24 nt, Human
gguuggucucgaacuccugaccuc

SEQ ID NO: 853332 - RNA, 22 nt, Human
guaaagaugggguuucaccaug

SEQ ID NO: 853333 - RNA, 19 nt, Human
guagccgggauuacaggug

SEQ ID NO: 853334 - RNA, 23 nt, Human
gucucacugucacccaggcugga

SEQ ID NO: 853335 - RNA, 21 nt, Human
gugcacaccaccaacacccgg

SEQ ID NO: 853336 - RNA, 22 nt, Human
uaaagaugggguuucaccaugu

SEQ ID NO: 853337 - RNA, 24 nt, Human
uauuuuguauuuucaguaaagaug

SEQ ID NO: 853338 - RNA, 18 nt, Human
ucacccaggcuggagugc

SEQ ID NO: 853339 - RNA, 19 nt, Human
ucacugcaaccuccugcuc

SEQ ID NO: 853340 - RNA, 24 nt, Human
ucacugcaaccuccugcucccagg

SEQ ID NO: 853341 - RNA, 23 nt, Human
ucacugucacccaggcuggagug

SEQ ID NO: 853342 - RNA, 24 nt, Human
ucaguaaagaugggguuucaccau

SEQ ID NO: 853343 - RNA, 24 nt, Human
ucccaaagugcugggauuacaggc

SEQ ID NO: 853344 - RNA, 21 nt, Human
ucccagguucaagcgauucuc

SEQ ID NO: 853345 - RNA, 24 nt, Human
ucccagguucaagcgauucuccug

SEQ ID NO: 853346 - RNA, 20 nt, Human
ucggggcaccaggaagcggg

SEQ ID NO: 853347 - RNA, 22 nt, Human
ucucacugucacccaggcugga

SEQ ID NO: 853348 - RNA, 24 nt, Human
ucucacugucacccaggcuggagu

SEQ ID NO: 853349 - RNA, 21 nt, Human
ucucgaacuccugaccucaug

SEQ ID NO: 853350 - RNA, 20 nt, Human
ugccccggccccccgaguaa

SEQ ID NO: 853351 - RNA, 21 nt, Human
ugccccggccccccgaguagc

SEQ ID NO: 853352 - RNA, 24 nt, Human
ugccccggccccccgaguagccgg

SEQ ID NO: 853353 - RNA, 23 nt, Human
uggagugcaauggcacgaccucg

SEQ ID NO: 853354 - RNA, 24 nt, Human
uggagugcaauggcacgaccucgg

SEQ ID NO: 853355 - RNA, 18 nt, Human
ugggauuacaggccugag

SEQ ID NO: 853356 - RNA, 22 nt, Human
ugggauuacaggccugagucac

SEQ ID NO: 853357 - RNA, 24 nt, Human
ugggauuacaggccugagucacca

SEQ ID NO: 853358 - RNA, 25 nt, Human
ugggauuacaggccugagucaccau

SEQ ID NO: 853359 - RNA, 23 nt, Human
ugggguuucaccauguuggucgg

SEQ ID NO: 853360 - RNA, 20 nt, Human
ugucacccaggcuggagugc

SEQ ID NO: 853361 - RNA, 24 nt, Human
uucaagcgauucuccugccccggc

SEQ ID NO: 853362 - RNA, 21 nt, Human
uugccgggaccaacucaaccc

SEQ ID NO: 853363 - RNA, 24 nt, Human
uuggucgguuggucucgaacuccu

SEQ ID NO: 853364 - RNA, 18 nt, Human
uuucaccauguuggucgg

SEQ ID NO: 853365 - RNA, 24 nt, Human
uuuucaguaaagaugggguuucac

SEQ ID NO: 853366 - RNA, 26 nt, Human
uuuuuuuuuuuugugacaaagucuca

SEQ ID NO: 853367 - RNA, 18 nt, Human
uuuuuuuuuuuuuuuuug

SEQ ID NO: 853368 - RNA, 19 nt, Human
uuuuuuuuuuuuuuuuugu

SEQ ID NO: 853369 - RNA, 22 nt, Human
aaccagugcggcgagcgccgcg

SEQ ID NO: 853370 - RNA, 21 nt, Human
acuugacaaccucaaccggac

SEQ ID NO: 853371 - RNA, 21 nt, Human
agcaucugaagauugguuuca

SEQ ID NO: 853372 - RNA, 25 nt, Human
agugcugggcuccgcauccuucuuu

SEQ ID NO: 853373 - RNA, 23 nt, Human
caaaacgcugaguuuggaaauca

SEQ ID NO: 853374 - RNA, 23 nt, Human
caaccggaccgaaggugcugaac

SEQ ID NO: 853375 - RNA, 19 nt, Human
caagccagcgcaucaaugu

SEQ ID NO: 853376 - RNA, 19 nt, Human
cgaaggugcugaacaaccg

SEQ ID NO: 853377 - RNA, 22 nt, Human
cuccuuuuuuuccuucucuuuu

SEQ ID NO: 853378 - RNA, 22 nt, Human
gagcgccgcgaaacccaacgcc

SEQ ID NO: 853379 - RNA, 20 nt, Human
gccgcgaaacccaacgcccg

SEQ ID NO: 853380 - RNA, 19 nt, Human
gucugaacuuagugugaaa

SEQ ID NO: 853381 - RNA, 18 nt, Human
uacaccaaaacgcugagu

SEQ ID NO: 853382 - RNA, 23 nt, Human
ucaaccggaccgaaggugcugaa

SEQ ID NO: 853383 - RNA, 21 nt, Human
ucagcccaguuucagucccuc

SEQ ID NO: 853384 - RNA, 19 nt, Human
ucagucccucuuggaaagg

SEQ ID NO: 853385 - RNA, 22 nt, Human
ugaaagauguucaaauucaaaa

SEQ ID NO: 853386 - RNA, 21 nt, Human
ugacaaccucaaccggaccga

SEQ ID NO: 853387 - RNA, 20 nt, Human
ugaguuuggaaaucaaaagg

SEQ ID NO: 853388 - RNA, 23 nt, Human
uggaaaucaaaagggucagccca

SEQ ID NO: 853389 - RNA, 19 nt, Human
uguaggcuucacagugcug

SEQ ID NO: 853390 - RNA, 21 nt, Human
uucacagugcugggcuccgca

SEQ ID NO: 853391 - RNA, 27 nt, Human
uuuccuccuuuuuuuccuucucuuuuu

SEQ ID NO: 853392 - RNA, 22 nt, Human
uuuuccuucucuuuuucuuggu

SEQ ID NO: 853393 - RNA, 18 nt, Human
uuuuuuuuuuuuuuuuug

SEQ ID NO: 853394 - RNA, 26 nt, Human
uuuuuuuuuuuuuuuuuuugguuuuu

SEQ ID NO: 853395 - RNA, 22 nt, Human
cugaauagacacacauaaccaa

SEQ ID NO: 853396 - RNA, 23 nt, Human
cugaauagacacacauaaccaaa

SEQ ID NO: 853397 - RNA, 18 nt, Human
gaauagacacacauaacc

SEQ ID NO: 853398 - RNA, 21 nt, Human
gaauagacacacauaaccaaa

SEQ ID NO: 853399 - RNA, 21 nt, Human
gccucauuaaacuuugguaau

SEQ ID NO: 853400 - RNA, 21 nt, Human
uaaaaaaugcuguggccucau

SEQ ID NO: 853401 - RNA, 19 nt, Human
uagcugaaucauagauacc

SEQ ID NO: 853402 - RNA, 20 nt, Human
ugaauagacacacauaacca

SEQ ID NO: 853403 - RNA, 18 nt, Human
uuuuuuuuuuuuuuuuug

SEQ ID NO: 853404 - RNA, 20 nt, Human
aaaaucuaaguucacaaaaa

SEQ ID NO: 853405 - RNA, 19 nt, Human
aaacgaacacccacaccuc

SEQ ID NO: 853406 - RNA, 24 nt, Human
aaagugcugggauuacagguguga

SEQ ID NO: 853407 - RNA, 19 nt, Human
aacugaccucgugauccac

SEQ ID NO: 853408 - RNA, 18 nt, Human
aagugcugggauuacagg

SEQ ID NO: 853409 - RNA, 19 nt, Human
aagugcugggauuacaggu

SEQ ID NO: 853410 - RNA, 26 nt, Human
aagugcugggauuacaggugugagcc

SEQ ID NO: 853411 - RNA, 21 nt, Human
accucacgcucacgccgaccg

SEQ ID NO: 853412 - RNA, 18 nt, Human
agccaccaugcccagccc

SEQ ID NO: 853413 - RNA, 20 nt, Human
aguauacauguguauacauu

SEQ ID NO: 853414 - RNA, 20 nt, Human
augggguuucacuguauuag

SEQ ID NO: 853415 - RNA, 24 nt, Human
caaagugcugggauuacaggugug

SEQ ID NO: 853416 - RNA, 19 nt, Human
cacaccucacgcucacgcc

SEQ ID NO: 853417 - RNA, 19 nt, Human
cacccacaccucacgcuca

SEQ ID NO: 853418 - RNA, 23 nt, Human
caccugccucggccucccaaagu

SEQ ID NO: 853419 - RNA, 21 nt, Human
cacuguauuagccaggcuagu

SEQ ID NO: 853420 - RNA, 24 nt, Human
cacuguauuagccaggcuagucuc

SEQ ID NO: 853421 - RNA, 21 nt, Human
ccaaagugcugggauuacagg

SEQ ID NO: 853422 - RNA, 21 nt, Human
ccaaagugcugggauuacagg

SEQ ID NO: 853423 - RNA, 24 nt, Human
ccaaagugcugggauuacaggugu

SEQ ID NO: 853424 - RNA, 22 nt, Human
cccauguggcauuuuccaaggu

SEQ ID NO: 853425 - RNA, 24 nt, Human
ccugccucggccucccaaagugcu

SEQ ID NO: 853426 - RNA, 19 nt, Human
cucacgcucacgccgaccu

SEQ ID NO: 853427 - RNA, 19 nt, Human
cugauuauaacuggauauu

SEQ ID NO: 853428 - RNA, 22 nt, Human
gaccucgugauccaccugccuc

SEQ ID NO: 853429 - RNA, 22 nt, Human
gaccucgugauccaccugccuc

SEQ ID NO: 853430 - RNA, 24 nt, Human
gaccucgugauccaccugccucgg

SEQ ID NO: 853431 - RNA, 18 nt, Human
gagaugggguuucacugu

SEQ ID NO: 853432 - RNA, 18 nt, Human
gauuacaggugugagcca

SEQ ID NO: 853433 - RNA, 21 nt, Human
gauuacaggugugagccacca

SEQ ID NO: 853434 - RNA, 22 nt, Human
gauuacaggugugagccaccau

SEQ ID NO: 853435 - RNA, 24 nt, Human
ggauuacaggugugagccaccaug

SEQ ID NO: 853436 - RNA, 18 nt, Human
gggguuucacuguauuag

SEQ ID NO: 853437 - RNA, 24 nt, Human
gugauccaccugccucggccuccc

SEQ ID NO: 853438 - RNA, 19 nt, Human
guggcauuuuccaagguuu

SEQ ID NO: 853439 - RNA, 20 nt, Human
uaaccauauuaauaccugac

SEQ ID NO: 853440 - RNA, 19 nt, Human
uacaacaacuuucuuuaaa

SEQ ID NO: 853441 - RNA, 24 nt, Human
uacaggugugagccaccaugccca

SEQ ID NO: 853442 - RNA, 22 nt, Human
uaccugagaaacgaacaccuug

SEQ ID NO: 853443 - RNA, 20 nt, Human
uaguagagaugggguuucac

SEQ ID NO: 853444 - RNA, 22 nt, Human
uaguagagaugggguuucacug

SEQ ID NO: 853445 - RNA, 24 nt, Human
uaguagagaugggguuucacugua

SEQ ID NO: 853446 - RNA, 23 nt, Human
ucccaaagugcugggauuacagg

SEQ ID NO: 853447 - RNA, 18 nt, Human
ucggccucccaaagugcu

SEQ ID NO: 853448 - RNA, 22 nt, Human
ugaauugaagaaaaaaggccaa

SEQ ID NO: 853449 - RNA, 21 nt, Human
ugccucggccucccaaagugc

SEQ ID NO: 853450 - RNA, 24 nt, Human
ugccucggccucccaaagugcugg

SEQ ID NO: 853451 - RNA, 24 nt, Human
ugcugggauuacaggugugagcca

SEQ ID NO: 853452 - RNA, 23 nt, Human
uggcaguugaaaucaaaguauac

SEQ ID NO: 853453 - RNA, 18 nt, Human
ugggauuacaggugugag

SEQ ID NO: 853454 - RNA, 22 nt, Human
ugggauuacaggugugagccac

SEQ ID NO: 853455 - RNA, 23 nt, Human
ugggauuacaggugugagccacc

SEQ ID NO: 853456 - RNA, 24 nt, Human
ugggauuacaggugugagccacca

SEQ ID NO: 853457 - RNA, 25 nt, Human
ugggauuacaggugugagccaccau

SEQ ID NO: 853458 - RNA, 24 nt, Human
ugggguuucacuguauuagccagg

SEQ ID NO: 853459 - RNA, 24 nt, Human
uguauacauucuaauccgucaucu

SEQ ID NO: 853460 - RNA, 21 nt, Human
uguauuuuuaguagagauggg

SEQ ID NO: 853461 - RNA, 23 nt, Human
uuaauaccugacagaacguugag

SEQ ID NO: 853462 - RNA, 18 nt, Human
uuaguagagaugggguuu

SEQ ID NO: 853463 - RNA, 21 nt, Human
uuaguagagaugggguuucac

SEQ ID NO: 853464 - RNA, 21 nt, Human
uuaguagagaugggguuucac

SEQ ID NO: 853465 - RNA, 24 nt, Human
uuaguagagaugggguuucacugu

SEQ ID NO: 853466 - RNA, 24 nt, Human
uuguaagaacaauucuaaccauau

SEQ ID NO: 853467 - RNA, 23 nt, Human
uuguauuuuuaguagagaugggg

SEQ ID NO: 853468 - RNA, 21 nt, Human
uuugaauugaagaaaaaaggc

SEQ ID NO: 853469 - RNA, 24 nt, Human
uuuuuaguagagaugggguuucac

SEQ ID NO: 853470 - RNA, 21 nt, Human
uuuuuguauuuuuaguagaga

SEQ ID NO: 853471 - RNA, 21 nt, Human
uuuuuuguauuuuuaguagag

SEQ ID NO: 853472 - RNA, 24 nt, Human
uuuuuuguauuuuuaguagagaug

SEQ ID NO: 853473 - RNA, 18 nt, Human
uuuuuuuuuuuuuuuuug

SEQ ID NO: 853474 - RNA, 25 nt, Human
uuuuuuuuuuuuuuuuuuguauuuu

SEQ ID NO: 853475 - RNA, 22 nt, Human
aggcagggggagcucccagcaa

SEQ ID NO: 853476 - RNA, 21 nt, Human
aguaggggaaagaggcagggg

SEQ ID NO: 853477 - RNA, 21 nt, Human
aucagacagguauuaccgagg

SEQ ID NO: 853478 - RNA, 20 nt, Human
ccagaacagagcaggaaccc

SEQ ID NO: 853479 - RNA, 21 nt, Human
ccagaacagagcaggaaccca

SEQ ID NO: 853480 - RNA, 21 nt, Human
ccccagaacagagcaggaacc

SEQ ID NO: 853481 - RNA, 20 nt, Human
cccuggguuaggggagaaua

SEQ ID NO: 853482 - RNA, 21 nt, Human
ccugcccccaaggccacggaa

SEQ ID NO: 853483 - RNA, 22 nt, Human
cugcccccaaggccacggaauc

SEQ ID NO: 853484 - RNA, 22 nt, Human
cuucuauuccuucuuuguaccc

SEQ ID NO: 853485 - RNA, 20 nt, Human
gccacuuuacugccaauagc

SEQ ID NO: 853486 - RNA, 24 nt, Human
uaguguuuguagcgccacuuuaac

SEQ ID NO: 853487 - RNA, 20 nt, Human
uggacugggcuuucgugggc

SEQ ID NO: 853488 - RNA, 24 nt, Human
ugggaaggggguaugagguggcug

SEQ ID NO: 853489 - RNA, 25 nt, Human
ugggaaggggguaugagguggcugg

SEQ ID NO: 853490 - RNA, 19 nt, Human
uuucgugggcacuuacccu

SEQ ID NO: 853491 - RNA, 26 nt, Human
uuuuuuaguguuuguagcgccacuuu

SEQ ID NO: 853492 - RNA, 20 nt, Human
cgauggcaauguacaagacu

SEQ ID NO: 853493 - RNA, 18 nt, Human
ugcaaggggaaacugggg

SEQ ID NO: 853494 - RNA, 19 nt, Human
uuuuuuuuuuuugcaaggg

SEQ ID NO: 853495 - RNA, 18 nt, Human
uuuuuuuuuuuuuuuuug

SEQ ID NO: 853496 - RNA, 21 nt, Human
uuuuuuuuuuuuuuuuugcaa

SEQ ID NO: 853497 - RNA, 26 nt, Human
uuuuuuuuuuuuuuuuuuugcaaggg

SEQ ID NO: 853498 - RNA, 24 nt, Human
aaaaaaaaaaaaaaagaggccaaa

SEQ ID NO: 853499 - RNA, 21 nt, Human
aaaaaaaaaaaagaggccaaa

SEQ ID NO: 853500 - RNA, 19 nt, Human
aaaaagcuuugcccauaac

SEQ ID NO: 853501 - RNA, 24 nt, Human
acagagcaagacucugccucaaaa

SEQ ID NO: 853502 - RNA, 24 nt, Human
acugcacuccagccugggcaacag

SEQ ID NO: 853503 - RNA, 24 nt, Human
acugcacuccagccugggcaacag

SEQ ID NO: 853504 - RNA, 24 nt, Human
agagauucuccugccucagccucc

SEQ ID NO: 853505 - RNA, 18 nt, Human
agaggcuugagacuuucc

SEQ ID NO: 853506 - RNA, 24 nt, Human
agccugggcaacagagcaagacuc

SEQ ID NO: 853507 - RNA, 21 nt, Human
aggagaauugcccgaacccug

SEQ ID NO: 853508 - RNA, 18 nt, Human
aggcaggagaauugcccg

SEQ ID NO: 853509 - RNA, 25 nt, Human
aggcaggagaauugcccgaacccug

SEQ ID NO: 853510 - RNA, 24 nt, Human
aggcggagguugcagugagccaag

SEQ ID NO: 853511 - RNA, 20 nt, Human
aggcuaaggcaggagaauug

SEQ ID NO: 853512 - RNA, 24 nt, Human
aggucuauucaguugauaaauggc

SEQ ID NO: 853513 - RNA, 24 nt, Human
aucgcgccacugcacuccagccug

SEQ ID NO: 853514 - RNA, 24 nt, Human
caagaucgcgccacugcacuccag

SEQ ID NO: 853515 - RNA, 19 nt, Human
cacugcacuccagccuggg

SEQ ID NO: 853516 - RNA, 21 nt, Human
cacugcacuccagccugggca

SEQ ID NO: 853517 - RNA, 22 nt, Human
cacugcacuccagccugggcaa

SEQ ID NO: 853518 - RNA, 23 nt, Human
cacugcacuccagccugggcaac

SEQ ID NO: 853519 - RNA, 24 nt, Human
cacugcacuccagccugggcaaca

SEQ ID NO: 853520 - RNA, 27 nt, Human
cacugcacuccagccugggcaacagag

SEQ ID NO: 853521 - RNA, 20 nt, Human
ccacugcacuccagccuggg

SEQ ID NO: 853522 - RNA, 20 nt, Human
ccacugcacuccagccuggg

SEQ ID NO: 853523 - RNA, 21 nt, Human
ccacugcacuccagccugggc

SEQ ID NO: 853524 - RNA, 23 nt, Human
ccacugcacuccagccugggcaa

SEQ ID NO: 853525 - RNA, 24 nt, Human
ccacugcacuccagccugggcaac

SEQ ID NO: 853526 - RNA, 22 nt, Human
cccgcaggacggcuagcgagcc

SEQ ID NO: 853527 - RNA, 24 nt, Human
ccuacuccccacacccaguugaug

SEQ ID NO: 853528 - RNA, 18 nt, Human
ccucaaaaaaaaaaaaaa

SEQ ID NO: 853529 - RNA, 18 nt, Human
ccucaaaaaaaaaaaaaa

SEQ ID NO: 853530 - RNA, 24 nt, Human
ccugccucagccucccgagcagcu

SEQ ID NO: 853531 - RNA, 22 nt, Human
ccugggcaacagagcaagacuc

SEQ ID NO: 853532 - RNA, 24 nt, Human
cgccacugcacuccagccugggca

SEQ ID NO: 853533 - RNA, 24 nt, Human
cucugaccuacuccccacacccag

SEQ ID NO: 853534 - RNA, 19 nt, Human
cucugccucaaaaaaaaaa

SEQ ID NO: 853535 - RNA, 22 nt, Human
cucugccucaaaaaaaaaaaaa

SEQ ID NO: 853536 - RNA, 23 nt, Human
cugaccuacuccccacacccagu

SEQ ID NO: 853537 - RNA, 29 nt, Human
cuuuaaaaaaaaaaaaaaaagaggccaaa

SEQ ID NO: 853538 - RNA, 21 nt, Human
gaaaaaagcuuugcccauaac

SEQ ID NO: 853539 - RNA, 23 nt, Human
gaaagagauucuccugccucagc

SEQ ID NO: 853540 - RNA, 23 nt, Human
gaagacaauauugaacaaccccc

SEQ ID NO: 853541 - RNA, 21 nt, Human
gacaucugagccuggaguuug

SEQ ID NO: 853542 - RNA, 24 nt, Human
gagauucuccugccucagccuccc

SEQ ID NO: 853543 - RNA, 20 nt, Human
gagcagcuaggacuacagga

SEQ ID NO: 853544 - RNA, 22 nt, Human
gagcagcuaggacuacaggagg

SEQ ID NO: 853545 - RNA, 23 nt, Human
gagcagcuaggacuacaggaggc

SEQ ID NO: 853546 - RNA, 23 nt, Human
gagguugcagugagccaagaucg

SEQ ID NO: 853547 - RNA, 24 nt, Human
gcacuccagccugggcaacagagc

SEQ ID NO: 853548 - RNA, 20 nt, Human
gccaagaucgcgccacugca

SEQ ID NO: 853549 - RNA, 22 nt, Human
gccacugcacuccagccugggc

SEQ ID NO: 853550 - RNA, 24 nt, Human
gccacugcacuccagccugggcaa

SEQ ID NO: 853551 - RNA, 20 nt, Human
gcccgaacccuggaggcgga

SEQ ID NO: 853552 - RNA, 21 nt, Human
gccucccgagcagcuaggacu

SEQ ID NO: 853553 - RNA, 20 nt, Human
ggagguugcagugagccaag

SEQ ID NO: 853554 - RNA, 24 nt, Human
ggagguugcagugagccaagaucg

SEQ ID NO: 853555 - RNA, 20 nt, Human
gugaggauugagaaggggug

SEQ ID NO: 853556 - RNA, 24 nt, Human
uaacccucugaccuacuccccaca

SEQ ID NO: 853557 - RNA, 21 nt, Human
uaaccugugacaucugagccu

SEQ ID NO: 853558 - RNA, 24 nt, Human
uaaggagaaacuuuuaaccacaaa

SEQ ID NO: 853559 - RNA, 24 nt, Human
uaaggcaggagaauugcccgaacc

SEQ ID NO: 853560 - RNA, 18 nt, Human
ucaaaaaaaaaaaaaagu

SEQ ID NO: 853561 - RNA, 23 nt, Human
ucccgagcagcuaggacuacagg

SEQ ID NO: 853562 - RNA, 22 nt, Human
uccuuuaaaaaaaaaaaaaaaa

SEQ ID NO: 853563 - RNA, 23 nt, Human
ucgcgccacugcacuccagccug

SEQ ID NO: 853564 - RNA, 23 nt, Human
ucugccucaaaaaaaaaaaaaag

SEQ ID NO: 853565 - RNA, 21 nt, Human
ugaccuacuccccacacccag

SEQ ID NO: 853566 - RNA, 24 nt, Human
ugagaaggggugaauagaggcuug

SEQ ID NO: 853567 - RNA, 22 nt, Human
ugagccaagaucgcgccacugc

SEQ ID NO: 853568 - RNA, 23 nt, Human
ugccucagccucccgagcagcua

SEQ ID NO: 853569 - RNA, 24 nt, Human
ugccucagccucccgagcagcuag

SEQ ID NO: 853570 - RNA, 23 nt, Human
uggaggcggagguugcagugagc

SEQ ID NO: 853571 - RNA, 26 nt, Human
ugggauuuccuuuaaaaaaaaaaaaa

SEQ ID NO: 853572 - RNA, 21 nt, Human
ugguaggacuuggaggagaaa

SEQ ID NO: 853573 - RNA, 24 nt, Human
ugguaggacuuggaggagaaaucc

SEQ ID NO: 853574 - RNA, 23 nt, Human
uguugaugcuuaaggaaaaaagc

SEQ ID NO: 853575 - RNA, 23 nt, Human
uuaaggaaaaaagcuuugcccau

SEQ ID NO: 853576 - RNA, 23 nt, Human
uucuuccauuguuauuguucugu

SEQ ID NO: 853577 - RNA, 22 nt, Human
uugcagugagccaagaucgcgc

SEQ ID NO: 853578 - RNA, 21 nt, Human
uuggcaggaugauagcuuugu

SEQ ID NO: 853579 - RNA, 18 nt, Human
uugugaggauugagaagg

SEQ ID NO: 853580 - RNA, 27 nt, Human
uuuaaaaaaaaaaaaaaaagaggccaa

SEQ ID NO: 853581 - RNA, 23 nt, Human
uuucacuaacccucugaccuacu

SEQ ID NO: 853582 - RNA, 21 nt, Human
uuucuuccauuguuauuguua

SEQ ID NO: 853583 - RNA, 27 nt, Human
uuugugauaauguucccaauuucuucc

SEQ ID NO: 853584 - RNA, 23 nt, Human
uuuuuuuuuuuuuuuccuauugg

SEQ ID NO: 853585 - RNA, 22 nt, Human
uuuuuuuuuuuuuuuuccuauu

SEQ ID NO: 853586 - RNA, 19 nt, Human
aaagcucagaaugcuuuuc

SEQ ID NO: 853587 - RNA, 19 nt, Human
aaccugacucagccacuga

SEQ ID NO: 853588 - RNA, 19 nt, Human
aagccagcccuagugucug

SEQ ID NO: 853589 - RNA, 19 nt, Human
accaacuauuaacuccaac

SEQ ID NO: 853590 - RNA, 20 nt, Human
acguggacaacaucccuggg

SEQ ID NO: 853591 - RNA, 18 nt, Human
agaggccaggggagaaaa

SEQ ID NO: 853592 - RNA, 24 nt, Human
agcaccuccccuucagcuuuggag

SEQ ID NO: 853593 - RNA, 22 nt, Human
agcaggagcaacaauggugggg

SEQ ID NO: 853594 - RNA, 23 nt, Human
agcggccccgcaccugcgagagc

SEQ ID NO: 853595 - RNA, 18 nt, Human
aggauaccauuaauuaaa

SEQ ID NO: 853596 - RNA, 19 nt, Human
agggaaguuuccaggccuc

SEQ ID NO: 853597 - RNA, 21 nt, Human
aguaagaggccaggggagaaa

SEQ ID NO: 853598 - RNA, 20 nt, Human
caacaagaucagcccacgug

SEQ ID NO: 853599 - RNA, 20 nt, Human
caacagucccuccgagggaa

SEQ ID NO: 853600 - RNA, 23 nt, Human
cacugacuugagguccugaaagc

SEQ ID NO: 853601 - RNA, 21 nt, Human
cacuuugcaagagcaggagca

SEQ ID NO: 853602 - RNA, 26 nt, Human
cagaaugcuuuuccggagcaccuccc

SEQ ID NO: 853603 - RNA, 23 nt, Human
cagcccccuucccccauuugucu

SEQ ID NO: 853604 - RNA, 22 nt, Human
caguagguucucccccacaggu

SEQ ID NO: 853605 - RNA, 25 nt, Human
ccaccuaaccucauguggauagcua

SEQ ID NO: 853606 - RNA, 24 nt, Human
cccauagcuaaaccaacuauuaac

SEQ ID NO: 853607 - RNA, 22 nt, Human
ccccgcaccugcgagagccaac

SEQ ID NO: 853608 - RNA, 20 nt, Human
cccuccgagggaaguuucca

SEQ ID NO: 853609 - RNA, 19 nt, Human
cugcucuuucugcacuuug

SEQ ID NO: 853610 - RNA, 24 nt, Human
gaccuaccucccugcacacuccac

SEQ ID NO: 853611 - RNA, 19 nt, Human
gacuugagguccugaaagc

SEQ ID NO: 853612 - RNA, 21 nt, Human
gagggaaguuuccaggccuca

SEQ ID NO: 853613 - RNA, 22 nt, Human
ggaaguuuccaggccucacugu

SEQ ID NO: 853614 - RNA, 19 nt, Human
ggagcaccuccccuucagc

SEQ ID NO: 853615 - RNA, 25 nt, Human
ggugugugaaaaaggauaccauuaa

SEQ ID NO: 853616 - RNA, 19 nt, Human
gugugaaaaaggauaccau

SEQ ID NO: 853617 - RNA, 21 nt, Human
uaccucccugcacacuccacc

SEQ ID NO: 853618 - RNA, 20 nt, Human
uagcggccccgcaccugcga

SEQ ID NO: 853619 - RNA, 22 nt, Human
ucccugcacacuccaccuaacc

SEQ ID NO: 853620 - RNA, 24 nt, Human
ucccugcacacuccaccuaaccuc

SEQ ID NO: 853621 - RNA, 19 nt, Human
ucccuggguugccacccaa

SEQ ID NO: 853622 - RNA, 21 nt, Human
ucccuggguugccacccaauu

SEQ ID NO: 853623 - RNA, 22 nt, Human
ucccuggguugccacccaauuc

SEQ ID NO: 853624 - RNA, 20 nt, Human
uccugaaagcguuuccucca

SEQ ID NO: 853625 - RNA, 24 nt, Human
ucugcacuuugcaagagcaggagc

SEQ ID NO: 853626 - RNA, 19 nt, Human
ugaggaaauggcccaagcc

SEQ ID NO: 853627 - RNA, 21 nt, Human
ugcacuuugcaagagcaggag

SEQ ID NO: 853628 - RNA, 21 nt, Human
uggaguucuuuaagcuuaaaa

SEQ ID NO: 853629 - RNA, 22 nt, Human
uuggaguucuuuaagcuuaaaa

SEQ ID NO: 853630 - RNA, 21 nt, Human
uuuaaggugugugaaaaagga

SEQ ID NO: 853631 - RNA, 23 nt, Human
uuuuuuguuucucaggccguuua

SEQ ID NO: 853632 - RNA, 18 nt, Human
uuuuuuuuuuuuuguuuc

SEQ ID NO: 853633 - RNA, 25 nt, Human
uuuuuuuuuuuuuuuguuucucagg

SEQ ID NO: 853634 - RNA, 22 nt, Human
uuuuuuuuuuuuuuuuuuguuu

SEQ ID NO: 853635 - RNA, 27 nt, Human
uuuuuuuuuuuuuuuuuuuuuuugggg

SEQ ID NO: 853636 - RNA, 21 nt, Human
aaaugaaagaggagagacuaa

SEQ ID NO: 853637 - RNA, 21 nt, Human
aagcagaugcccaaccaaugu

SEQ ID NO: 853638 - RNA, 22 nt, Human
aagcagaugcccaaccaauguc

SEQ ID NO: 853639 - RNA, 29 nt, Human
aagcagaugcccaaccaaugucagauaaa

SEQ ID NO: 853640 - RNA, 21 nt, Human
aucauguuuaagcccuggauu

SEQ ID NO: 853641 - RNA, 26 nt, Human
caaaacagagaagcuaccuccaagcc

SEQ ID NO: 853642 - RNA, 20 nt, Human
caacugcaaaacagagaagc

SEQ ID NO: 853643 - RNA, 20 nt, Human
caagaaaugcagcaggaaaa

SEQ ID NO: 853644 - RNA, 26 nt, Human
caagcagaugcccaaccaaucaacgg

SEQ ID NO: 853645 - RNA, 22 nt, Human
caagcagaugcccaaccaaugu

SEQ ID NO: 853646 - RNA, 26 nt, Human
caccagaugguggcuucugcucaguc

SEQ ID NO: 853647 - RNA, 22 nt, Human
cagggaguccuccuuaaaauuu

SEQ ID NO: 853648 - RNA, 18 nt, Human
ccaccgcauuacagaaac

SEQ ID NO: 853649 - RNA, 19 nt, Human
cccauguaauaugcaacca

SEQ ID NO: 853650 - RNA, 21 nt, Human
ccuccaagcagaugcccaacc

SEQ ID NO: 853651 - RNA, 20 nt, Human
ccuuaaaauuuuagaaagaa

SEQ ID NO: 853652 - RNA, 23 nt, Human
cgcggggcgcaggggaagaggcg

SEQ ID NO: 853653 - RNA, 21 nt, Human
cggcguggccuggcuggugcu

SEQ ID NO: 853654 - RNA, 18 nt, Human
cguggccuggcuggugcu

SEQ ID NO: 853655 - RNA, 20 nt, Human
cuaaagaaagagagucaaau

SEQ ID NO: 853656 - RNA, 23 nt, Human
cuaauccaaucauguuuaagccc

SEQ ID NO: 853657 - RNA, 18 nt, Human
gaaaaugaaagaggagag

SEQ ID NO: 853658 - RNA, 20 nt, Human
gaggagagacuaaccuaaaa

SEQ ID NO: 853659 - RNA, 22 nt, Human
gcaaaacagagaagcuaccucc

SEQ ID NO: 853660 - RNA, 24 nt, Human
gcaaaacagagaagcuaccuccaa

SEQ ID NO: 853661 - RNA, 19 nt, Human
gcagagcccucucuaaucc

SEQ ID NO: 853662 - RNA, 20 nt, Human
gcagagcccucucuaaucca

SEQ ID NO: 853663 - RNA, 21 nt, Human
gcagagcccucucuaauccaa

SEQ ID NO: 853664 - RNA, 19 nt, Human
gcccggccugggcgcgggg

SEQ ID NO: 853665 - RNA, 21 nt, Human
gccugggcgcggggcgcaggg

SEQ ID NO: 853666 - RNA, 21 nt, Human
gcggcguggccuggcuggugc

SEQ ID NO: 853667 - RNA, 27 nt, Human
gcuucugcucaguccgggggucauuua

SEQ ID NO: 853668 - RNA, 21 nt, Human
uaaaagacugagguuacuauc

SEQ ID NO: 853669 - RNA, 21 nt, Human
uaccuccaagcagaugcccaa

SEQ ID NO: 853670 - RNA, 21 nt, Human
uauagccccaggugagaacca

SEQ ID NO: 853671 - RNA, 21 nt, Human
ucagauaaccugcagucuggg

SEQ ID NO: 853672 - RNA, 18 nt, Human
ucagcccauguaauaugc

SEQ ID NO: 853673 - RNA, 21 nt, Human
ucggcccggccugggcgcggg

SEQ ID NO: 853674 - RNA, 21 nt, Human
ucuaaagaaagagagucaaau

SEQ ID NO: 853675 - RNA, 18 nt, Human
ucuuuagaugaacagguc

SEQ ID NO: 853676 - RNA, 20 nt, Human
ugaacagaaucuugcuugug

SEQ ID NO: 853677 - RNA, 25 nt, Human
ugcaaaacagagaagcuaccuccaa

SEQ ID NO: 853678 - RNA, 30 nt, Human
ugcaaaacagagaagcuaccuccaagcagg

SEQ ID NO: 853679 - RNA, 18 nt, Human
ugcuugagcuccaugccc

SEQ ID NO: 853680 - RNA, 20 nt, Human
ugguggcuucugcucagucc

SEQ ID NO: 853681 - RNA, 21 nt, Human
uugcuugugacuaucagugug

SEQ ID NO: 853682 - RNA, 22 nt, Human
uuuuuuuuuuuuuuuuuuucag

SEQ ID NO: 853683 - RNA, 21 nt, Human
aaacaggcucccgccaguccc

SEQ ID NO: 853684 - RNA, 19 nt, Human
aaaccggagccgggagcca

SEQ ID NO: 853685 - RNA, 18 nt, Human
aaccacccaggccaaaga

SEQ ID NO: 853686 - RNA, 23 nt, Human
aaccauccagaucccccaaacag

SEQ ID NO: 853687 - RNA, 18 nt, Human
aagagaagcuguggaucu

SEQ ID NO: 853688 - RNA, 23 nt, Human
aaugacagagcagccaggacccc

SEQ ID NO: 853689 - RNA, 24 nt, Human
acagccagcgccugucaggggccc

SEQ ID NO: 853690 - RNA, 20 nt, Human
accgcaguccccagcaaggc

SEQ ID NO: 853691 - RNA, 21 nt, Human
accgcaguccccagcaaggcc

SEQ ID NO: 853692 - RNA, 22 nt, Human
agcaacagugggaaagucaaag

SEQ ID NO: 853693 - RNA, 18 nt, Human
agcagccaggaccccagc

SEQ ID NO: 853694 - RNA, 25 nt, Human
aggcacaggcucuacuagagugagg

SEQ ID NO: 853695 - RNA, 22 nt, Human
aggcggagcugagggcagcagc

SEQ ID NO: 853696 - RNA, 21 nt, Human
agucaaagugaagcaggcucc

SEQ ID NO: 853697 - RNA, 23 nt, Human
caaaccacucacagccagcgccu

SEQ ID NO: 853698 - RNA, 25 nt, Human
caaagcgggguccagccucuccauc

SEQ ID NO: 853699 - RNA, 21 nt, Human
caacuuaaaaaaucaggacau

SEQ ID NO: 853700 - RNA, 22 nt, Human
cacacacaccccuucacauagc

SEQ ID NO: 853701 - RNA, 25 nt, Human
cacucuacucccaccgcagucccca

SEQ ID NO: 853702 - RNA, 22 nt, Human
cagagcgcuaguaggcaggcac

SEQ ID NO: 853703 - RNA, 22 nt, Human
cagaucccccaaacaggcuccc

SEQ ID NO: 853704 - RNA, 18 nt, Human
cagcaaggccgcccuucc

SEQ ID NO: 853705 - RNA, 19 nt, Human
cagcaaggccgcccuuccc

SEQ ID NO: 853706 - RNA, 18 nt, Human
cagcagccagccuuccca

SEQ ID NO: 853707 - RNA, 23 nt, Human
cagcagugcccagcaucccucaa

SEQ ID NO: 853708 - RNA, 24 nt, Human
cagcagugcccagcaucccucaau

SEQ ID NO: 853709 - RNA, 21 nt, Human
cagcuacuucuuuugcaaaau

SEQ ID NO: 853710 - RNA, 20 nt, Human
cagcuccuaguguacaaggg

SEQ ID NO: 853711 - RNA, 20 nt, Human
cagguccccguguuucacuc

SEQ ID NO: 853712 - RNA, 21 nt, Human
caguccccagcaaggccgccc

SEQ ID NO: 853713 - RNA, 25 nt, Human
cauccagaucccccaaacaggcucc

SEQ ID NO: 853714 - RNA, 18 nt, Human
ccagcaaggccgcccuuc

SEQ ID NO: 853715 - RNA, 31 nt, Human
ccagcaucccucaaugacagagcagccaggg

SEQ ID NO: 853716 - RNA, 22 nt, Human
ccagcgccugucaggggcccag

SEQ ID NO: 853717 - RNA, 22 nt, Human
cccagcaaggccgcccuuccca

SEQ ID NO: 853718 - RNA, 19 nt, Human
cccaggacacuggccagcg

SEQ ID NO: 853719 - RNA, 25 nt, Human
cccaggccaaagaaaacaugucggc

SEQ ID NO: 853720 - RNA, 20 nt, Human
ccccagcaaggccgcccuuc

SEQ ID NO: 853721 - RNA, 21 nt, Human
ccccauacccuggccacccgg

SEQ ID NO: 853722 - RNA, 25 nt, Human
cccccaaacaggcucccgccagucc

SEQ ID NO: 853723 - RNA, 27 nt, Human
ccccgccguggacaggaccucggaaau

SEQ ID NO: 853724 - RNA, 26 nt, Human
cccgccagucccauggcuuccagcua

SEQ ID NO: 853725 - RNA, 24 nt, Human
cccgugcucucccccccaucccca

SEQ ID NO: 853726 - RNA, 21 nt, Human
cccucagacccucuccugggc

SEQ ID NO: 853727 - RNA, 27 nt, Human
cccuucccaggcugcacccucuucaaa

SEQ ID NO: 853728 - RNA, 23 nt, Human
ccugcagauuugauuucugaauu

SEQ ID NO: 853729 - RNA, 23 nt, Human
cgagcccagggagggggcggcag

SEQ ID NO: 853730 - RNA, 26 nt, Human
cgagcccagggagggggcggcaggau

SEQ ID NO: 853731 - RNA, 23 nt, Human
cgcaguccccagcaaggccgccc

SEQ ID NO: 853732 - RNA, 19 nt, Human
cggagccgggagccaggcc

SEQ ID NO: 853733 - RNA, 24 nt, Human
cggccacccgccggcccggaaacc

SEQ ID NO: 853734 - RNA, 21 nt, Human
cgugcucucccccccaucccc

SEQ ID NO: 853735 - RNA, 20 nt, Human
cuacaggggcauggggccaa

SEQ ID NO: 853736 - RNA, 18 nt, Human
cucaggguauaaaccacc

SEQ ID NO: 853737 - RNA, 19 nt, Human
cucccaacucaagggccug

SEQ ID NO: 853738 - RNA, 22 nt, Human
cucuagugcccaucaggcagcu

SEQ ID NO: 853739 - RNA, 18 nt, Human
cuggacgagcccagggag

SEQ ID NO: 853740 - RNA, 20 nt, Human
cugggcacaugccccauacc

SEQ ID NO: 853741 - RNA, 22 nt, Human
cugggcacaugccccauacccu

SEQ ID NO: 853742 - RNA, 21 nt, Human
cuucccaggcugcacccucuu

SEQ ID NO: 853743 - RNA, 20 nt, Human
gagcagccaggaccccagcg

SEQ ID NO: 853744 - RNA, 23 nt, Human
gcagcggccucgaggugcaggga

SEQ ID NO: 853745 - RNA, 21 nt, Human
gcagggaauaacccugcagag

SEQ ID NO: 853746 - RNA, 25 nt, Human
gccaggaccccagcggugacugucc

SEQ ID NO: 853747 - RNA, 19 nt, Human
gcccaggacacuggccagc

SEQ ID NO: 853748 - RNA, 19 nt, Human
gccccaggggcaucggagu

SEQ ID NO: 853749 - RNA, 18 nt, Human
gcccggaaaccggagccg

SEQ ID NO: 853750 - RNA, 22 nt, Human
gcggagcugagggcagcagcca

SEQ ID NO: 853751 - RNA, 22 nt, Human
gcugggcacaugccccauaccc

SEQ ID NO: 853752 - RNA, 21 nt, Human
ggaggaagccagacccagggg

SEQ ID NO: 853753 - RNA, 21 nt, Human
ggcacuuaggugaguagaacg

SEQ ID NO: 853754 - RNA, 18 nt, Human
ggcauggggccaaagcug

SEQ ID NO: 853755 - RNA, 25 nt, Human
gggcaucggaguuugagaucucugg

SEQ ID NO: 853756 - RNA, 23 nt, Human
gggcccaggacacuggccagcgg

SEQ ID NO: 853757 - RNA, 20 nt, Human
ggggcauggggccaaagcug

SEQ ID NO: 853758 - RNA, 21 nt, Human
ggggcccaggacacuggccag

SEQ ID NO: 853759 - RNA, 21 nt, Human
guaggcaggcacaggcucuac

SEQ ID NO: 853760 - RNA, 20 nt, Human
uaaaccacccaggccaaaga

SEQ ID NO: 853761 - RNA, 24 nt, Human
uaaaccacccaggccaaagaaaac

SEQ ID NO: 853762 - RNA, 20 nt, Human
uacucccaccgcagucccca

SEQ ID NO: 853763 - RNA, 25 nt, Human
uagcauguacaaaccacucacagcc

SEQ ID NO: 853764 - RNA, 26 nt, Human
uagcauguacaaaccacucacagcca

SEQ ID NO: 853765 - RNA, 21 nt, Human
uaguaggcaggcacaggcucu

SEQ ID NO: 853766 - RNA, 23 nt, Human
ucaaccauccagaucccccaaac

SEQ ID NO: 853767 - RNA, 19 nt, Human
ucccaaacucuccgaaccc

SEQ ID NO: 853768 - RNA, 20 nt, Human
ucccaaacucuccgaacccu

SEQ ID NO: 853769 - RNA, 21 nt, Human
ucccagagggaccuacagggg

SEQ ID NO: 853770 - RNA, 21 nt, Human
ucccaggcugcacccucuuca

SEQ ID NO: 853771 - RNA, 19 nt, Human
ucccauggcuuccagcuac

SEQ ID NO: 853772 - RNA, 18 nt, Human
uccuucagguccccgugu

SEQ ID NO: 853773 - RNA, 22 nt, Human
ucucccccccauccccaccgca

SEQ ID NO: 853774 - RNA, 21 nt, Human
ucugcagccacggugaagaug

SEQ ID NO: 853775 - RNA, 18 nt, Human
ucuggacgagcccaggga

SEQ ID NO: 853776 - RNA, 27 nt, Human
ucuggacgagcccagggagggggcggc

SEQ ID NO: 853777 - RNA, 20 nt, Human
ugacccccaucccaccccuc

SEQ ID NO: 853778 - RNA, 23 nt, Human
ugacuccuaggagucaaccaucc

SEQ ID NO: 853779 - RNA, 24 nt, Human
ugagaaauucccaaacucuccgaa

SEQ ID NO: 853780 - RNA, 26 nt, Human
ugaggcggagcugagggcagcagcca

SEQ ID NO: 853781 - RNA, 21 nt, Human
ugagggcagcagccagccuuc

SEQ ID NO: 853782 - RNA, 23 nt, Human
uggacgagcccagggagggggcg

SEQ ID NO: 853783 - RNA, 25 nt, Human
uggacgagcccagggagggggcggc

SEQ ID NO: 853784 - RNA, 22 nt, Human
uggccugcagauuugauuucug

SEQ ID NO: 853785 - RNA, 18 nt, Human
uggguggggccgggccag

SEQ ID NO: 853786 - RNA, 19 nt, Human
ugucccagguaguguugcc

SEQ ID NO: 853787 - RNA, 19 nt, Human
ugucuuugucuccagcaac

SEQ ID NO: 853788 - RNA, 21 nt, Human
uuaggccugcauucccacacc

SEQ ID NO: 853789 - RNA, 21 nt, Human
uuaggugaguagaacgggcca

SEQ ID NO: 853790 - RNA, 21 nt, Human
uucugccaacaacuuaaaaaa

SEQ ID NO: 853791 - RNA, 20 nt, Human
uuggcccgcagcggccucgg

SEQ ID NO: 853792 - RNA, 19 nt, Human
agccucuagaccacucacu

SEQ ID NO: 853793 - RNA, 24 nt, Human
aggccagguggggcuccuucccag

SEQ ID NO: 853794 - RNA, 18 nt, Human
ggagagaggccagguggg

SEQ ID NO: 853795 - RNA, 26 nt, Human
ggcggaagcugcggaggucagccaag

SEQ ID NO: 853796 - RNA, 20 nt, Human
ggcucuugggccagcagccu

SEQ ID NO: 853797 - RNA, 19 nt, Human
gucagccaagccucgugcc

SEQ ID NO: 853798 - RNA, 22 nt, Human
uagccagagucgggcggaagcu

SEQ ID NO: 853799 - RNA, 21 nt, Human
ucaaggcaguagccuccaaga

SEQ ID NO: 853800 - RNA, 23 nt, Human
ucuagaccacucacuaggacccc

SEQ ID NO: 853801 - RNA, 18 nt, Human
ugggauggguauugccgg

SEQ ID NO: 853802 - RNA, 19 nt, Human
ugggauggguauugccggg

SEQ ID NO: 853803 - RNA, 19 nt, Human
uuccugagccuggcucuug

SEQ ID NO: 853804 - RNA, 20 nt, Human
uuccugagccuggcucuugg

SEQ ID NO: 853805 - RNA, 18 nt, Human
uuuuuuuuuucgaacagg

SEQ ID NO: 853806 - RNA, 21 nt, Human
uuuuuuuuuuuuuuuuuucgg

SEQ ID NO: 853807 - RNA, 21 nt, Human
acacuagaauccaucugucca

SEQ ID NO: 853808 - RNA, 22 nt, Human
acucgcccgcccugcucgcgcc

SEQ ID NO: 853809 - RNA, 22 nt, Human
agaaaaacgcaucccagcccuu

SEQ ID NO: 853810 - RNA, 22 nt, Human
agccccaggcccccguccaggc

SEQ ID NO: 853811 - RNA, 23 nt, Human
caagcaauagguuuacugugcac

SEQ ID NO: 853812 - RNA, 22 nt, Human
cacaccagaauccaucugucca

SEQ ID NO: 853813 - RNA, 22 nt, Human
cacacuagaauccaucugucca

SEQ ID NO: 853814 - RNA, 31 nt, Human
cacagccccaggcccccguccaggccgccuu

SEQ ID NO: 853815 - RNA, 21 nt, Human
caccaagaaaaacgcauccca

SEQ ID NO: 853816 - RNA, 23 nt, Human
caccacugcuugggggucagggg

SEQ ID NO: 853817 - RNA, 18 nt, Human
caccagaggcccucccgg

SEQ ID NO: 853818 - RNA, 19 nt, Human
cacugucaacaggaguggc

SEQ ID NO: 853819 - RNA, 21 nt, Human
cagcagaguugugagcaugca

SEQ ID NO: 853820 - RNA, 24 nt, Human
ccagaggcccucccgggcaucuga

SEQ ID NO: 853821 - RNA, 22 nt, Human
ccccguccaggccgccugcccc

SEQ ID NO: 853822 - RNA, 28 nt, Human
cccgcaggcccaggccuccucccgggcc

SEQ ID NO: 853823 - RNA, 18 nt, Human
cccgcgcccgucccggga

SEQ ID NO: 853824 - RNA, 23 nt, Human
cccgcgggccgccccugcugcuc

SEQ ID NO: 853825 - RNA, 18 nt, Human
ccgcccugcucgcgccgc

SEQ ID NO: 853826 - RNA, 19 nt, Human
ccgcccugcucgcgccgcu

SEQ ID NO: 853827 - RNA, 20 nt, Human
ccgccgccgucgccgcggcc

SEQ ID NO: 853828 - RNA, 19 nt, Human
ccgucgccgcggcccgcuc

SEQ ID NO: 853829 - RNA, 21 nt, Human
cgcccggggccugucagcgcc

SEQ ID NO: 853830 - RNA, 18 nt, Human
cgccgcugcccgcgcccg

SEQ ID NO: 853831 - RNA, 24 nt, Human
cgcgggccgccccugcugcucccg

SEQ ID NO: 853832 - RNA, 23 nt, Human
cggcccgcaggcccaggccuccu

SEQ ID NO: 853833 - RNA, 21 nt, Human
cggggccugucagcgccgccg

SEQ ID NO: 853834 - RNA, 25 nt, Human
cucccgggccgcgccucccgaaggc

SEQ ID NO: 853835 - RNA, 21 nt, Human
cuccucccgggccgcgccucc

SEQ ID NO: 853836 - RNA, 23 nt, Human
cucuccagaccacuucucagcug

SEQ ID NO: 853837 - RNA, 19 nt, Human
cugcugcucccggcccgca

SEQ ID NO: 853838 - RNA, 20 nt, Human
cuuggcccagaggugaugca

SEQ ID NO: 853839 - RNA, 20 nt, Human
cuuuccccacaccagaaucc

SEQ ID NO: 853840 - RNA, 24 nt, Human
gagcaugcaacaccaagaaaaacg

SEQ ID NO: 853841 - RNA, 21 nt, Human
gcccaggccuccucccgggcc

SEQ ID NO: 853842 - RNA, 18 nt, Human
gccgccugccccgccccg

SEQ ID NO: 853843 - RNA, 23 nt, Human
gcucucucucagcugcugcuuag

SEQ ID NO: 853844 - RNA, 23 nt, Human
ggaaaaagugagggagggaaagc

SEQ ID NO: 853845 - RNA, 19 nt, Human
ggaacucgcccgcccugcu

SEQ ID NO: 853846 - RNA, 25 nt, Human
ggccauggggagggagcgcggaacu

SEQ ID NO: 853847 - RNA, 22 nt, Human
ggcccaggccuccucccgggcc

SEQ ID NO: 853848 - RNA, 21 nt, Human
uagaaauaggcuccgcucucu

SEQ ID NO: 853849 - RNA, 19 nt, Human
uagaauccaucuguccagu

SEQ ID NO: 853850 - RNA, 19 nt, Human
uaucugugcuuuccccaca

SEQ ID NO: 853851 - RNA, 21 nt, Human
ucagcgccgccgccgucgccg

SEQ ID NO: 853852 - RNA, 23 nt, Human
uccaguaucugugcuuuccccac

SEQ ID NO: 853853 - RNA, 21 nt, Human
ucccacagccccaggcccccg

SEQ ID NO: 853854 - RNA, 18 nt, Human
uccccacaccagaaucca

SEQ ID NO: 853855 - RNA, 20 nt, Human
ucccgagucuuccucucuca

SEQ ID NO: 853856 - RNA, 24 nt, Human
ucccggcccgcaggcccaggccuc

SEQ ID NO: 853857 - RNA, 19 nt, Human
ucccgggacuuccgcuccc

SEQ ID NO: 853858 - RNA, 20 nt, Human
ucccgggacuuccgcucccu

SEQ ID NO: 853859 - RNA, 24 nt, Human
ucgccgcggcccgcucccggccau

SEQ ID NO: 853860 - RNA, 18 nt, Human
ucgcgccgcugcccgcgc

SEQ ID NO: 853861 - RNA, 23 nt, Human
ucuccagaccacuucucagcugu

SEQ ID NO: 853862 - RNA, 21 nt, Human
ucucucagcugcugcuuagac

SEQ ID NO: 853863 - RNA, 25 nt, Human
ugagggagggaaagcucuccccgag

SEQ ID NO: 853864 - RNA, 23 nt, Human
ugaguguuuacaaaggaaaaagu

SEQ ID NO: 853865 - RNA, 18 nt, Human
ugccccgccccgcccggg

SEQ ID NO: 853866 - RNA, 19 nt, Human
uggcaccagaggcccuccc

SEQ ID NO: 853867 - RNA, 23 nt, Human
uggcuuguccuuggcccagaggu

SEQ ID NO: 853868 - RNA, 23 nt, Human
ugugagcaugcaacaccaagaaa

SEQ ID NO: 853869 - RNA, 22 nt, Human
uuaaauacuuuuaaccugagua

SEQ ID NO: 853870 - RNA, 21 nt, Human
uuggaagaguggcaccacugc

SEQ ID NO: 853871 - RNA, 23 nt, Human
uuggaagaguggcaccacugcuu

SEQ ID NO: 853872 - RNA, 18 nt, Human
uuuacaaaggaaaaagug

SEQ ID NO: 853873 - RNA, 19 nt, Human
uuuuuuuuuuuuagcaguc

SEQ ID NO: 853874 - RNA, 24 nt, Human
aaagugcugggauuacaggcguga

SEQ ID NO: 853875 - RNA, 18 nt, Human
aaauaagcaacugagucc

SEQ ID NO: 853876 - RNA, 20 nt, Human
aagcucacuugcacuccgcc

SEQ ID NO: 853877 - RNA, 19 nt, Human
aagugcugggauuacaggc

SEQ ID NO: 853878 - RNA, 19 nt, Human
aagugcugggauuacaggc

SEQ ID NO: 853879 - RNA, 26 nt, Human
aagugcugggauuacaggcgugagcc

SEQ ID NO: 853880 - RNA, 19 nt, Human
acaggugccugccaccacg

SEQ ID NO: 853881 - RNA, 22 nt, Human
accaucuuggccaggcuggucu

SEQ ID NO: 853882 - RNA, 23 nt, Human
acccaggcuggagugcaguggug

SEQ ID NO: 853883 - RNA, 24 nt, Human
accuugguucaagcaauucuccug

SEQ ID NO: 853884 - RNA, 18 nt, Human
acucuaucacccaggcug

SEQ ID NO: 853885 - RNA, 24 nt, Human
acucuaucacccaggcuggagugc

SEQ ID NO: 853886 - RNA, 18 nt, Human
acugcaaccucugccacc

SEQ ID NO: 853887 - RNA, 22 nt, Human
acugcaaccucugccaccuugg

SEQ ID NO: 853888 - RNA, 18 nt, Human
agcucacuugcacuccgc

SEQ ID NO: 853889 - RNA, 25 nt, Human
aggcuggagugcaguggugugaucu

SEQ ID NO: 853890 - RNA, 21 nt, Human
aguagcugggauuacaggugc

SEQ ID NO: 853891 - RNA, 23 nt, Human
agugcaguggugugaucuuggcu

SEQ ID NO: 853892 - RNA, 23 nt, Human
agugcaguggugugaucuuggcu

SEQ ID NO: 853893 - RNA, 24 nt, Human
agugcaguggugugaucuuggcuu

SEQ ID NO: 853894 - RNA, 18 nt, Human
agugcugggauuacaggc

SEQ ID NO: 853895 - RNA, 19 nt, Human
auuacaggugccugccacc

SEQ ID NO: 853896 - RNA, 19 nt, Human
caaaaaaaaaugaggggcu

SEQ ID NO: 853897 - RNA, 24 nt, Human
caaagugcugggauuacaggcgug

SEQ ID NO: 853898 - RNA, 18 nt, Human
caaauaagcaacugaguc

SEQ ID NO: 853899 - RNA, 22 nt, Human
caagcaauucuccugccucagc

SEQ ID NO: 853900 - RNA, 24 nt, Human
caccacgccuggcuaauuuuugua

SEQ ID NO: 853901 - RNA, 21 nt, Human
caccagggcugguuugaaaac

SEQ ID NO: 853902 - RNA, 21 nt, Human
caccaucuuggccaggcuggu

SEQ ID NO: 853903 - RNA, 24 nt, Human
caccaucuuggccaggcuggucuu

SEQ ID NO: 853904 - RNA, 21 nt, Human
cacccaggcuggagugcagug

SEQ ID NO: 853905 - RNA, 21 nt, Human
caccccggcccgcggggcagc

SEQ ID NO: 853906 - RNA, 25 nt, Human
caccuauagaaggcaaucaaaaaaa

SEQ ID NO: 853907 - RNA, 23 nt, Human
cacucuaucacccaggcuggagu

SEQ ID NO: 853908 - RNA, 24 nt, Human
cacucuaucacccaggcuggagug

SEQ ID NO: 853909 - RNA, 24 nt, Human
caggauuucaccaucuuggccagg

SEQ ID NO: 853910 - RNA, 25 nt, Human
cagggauguggcaaacagaaaaucc

SEQ ID NO: 853911 - RNA, 19 nt, Human
caggugccugccaccacgc

SEQ ID NO: 853912 - RNA, 21 nt, Human
caggugccugccaccacgccu

SEQ ID NO: 853913 - RNA, 23 nt, Human
caggugccugccaccacgccugg

SEQ ID NO: 853914 - RNA, 22 nt, Human
ccaaagugcugggauuacaggc

SEQ ID NO: 853915 - RNA, 22 nt, Human
ccaaagugcugggauuacaggc

SEQ ID NO: 853916 - RNA, 24 nt, Human
ccaaagugcugggauuacaggcgu

SEQ ID NO: 853917 - RNA, 20 nt, Human
ccaccacgccuggcuaauuu

SEQ ID NO: 853918 - RNA, 20 nt, Human
ccaccgcgcccggccacaaa

SEQ ID NO: 853919 - RNA, 20 nt, Human
cccaggcuggagugcagugg

SEQ ID NO: 853920 - RNA, 23 nt, Human
cccgaguagcugggauuacaggu

SEQ ID NO: 853921 - RNA, 24 nt, Human
cccgaguagcugggauuacaggug

SEQ ID NO: 853922 - RNA, 21 nt, Human
ccgaguagcugggauuacagg

SEQ ID NO: 853923 - RNA, 21 nt, Human
ccgcaccccggcccgcggggc

SEQ ID NO: 853924 - RNA, 18 nt, Human
ccgcgcccggccacaaac

SEQ ID NO: 853925 - RNA, 23 nt, Human
ccggccacaaacagcauuuucua

SEQ ID NO: 853926 - RNA, 23 nt, Human
ccugccucagccucccgaguagc

SEQ ID NO: 853927 - RNA, 23 nt, Human
ccuugguucaagcaauucuccug

SEQ ID NO: 853928 - RNA, 20 nt, Human
cucacucuaucacccaggcc

SEQ ID NO: 853929 - RNA, 23 nt, Human
cucagccucccgaguagcuggga

SEQ ID NO: 853930 - RNA, 20 nt, Human
cuccugaccuugugaaucac

SEQ ID NO: 853931 - RNA, 24 nt, Human
cugcaaccucugccaccuugguuc

SEQ ID NO: 853932 - RNA, 23 nt, Human
cugccucagccucccgaguagcu

SEQ ID NO: 853933 - RNA, 21 nt, Human
cuuacugcaaccucugccacc

SEQ ID NO: 853934 - RNA, 19 nt, Human
cuucaagagcagagugucc

SEQ ID NO: 853935 - RNA, 22 nt, Human
gaagcucacuugcacuccgccu

SEQ ID NO: 853936 - RNA, 22 nt, Human
gaccuugugaaucaccggccuc

SEQ ID NO: 853937 - RNA, 24 nt, Human
gaccuugugaaucaccggccucgg

SEQ ID NO: 853938 - RNA, 18 nt, Human
gauuacaggcgugagcca

SEQ ID NO: 853939 - RNA, 22 nt, Human
gauuacaggcgugagccaccgc

SEQ ID NO: 853940 - RNA, 22 nt, Human
gauuacaggcgugagccaccgc

SEQ ID NO: 853941 - RNA, 18 nt, Human
gauuacaggugccugcca

SEQ ID NO: 853942 - RNA, 25 nt, Human
ggaccacauccauuacacaaauaag

SEQ ID NO: 853943 - RNA, 22 nt, Human
ggcuggagugcaguggugugau

SEQ ID NO: 853944 - RNA, 23 nt, Human
ggcuggucuugaacuccugaccu

SEQ ID NO: 853945 - RNA, 20 nt, Human
ggucuugaacuccugaccuu

SEQ ID NO: 853946 - RNA, 18 nt, Human
guagcugggauuacaggu

SEQ ID NO: 853947 - RNA, 24 nt, Human
uaauuuuuguauuuuuauuagaga

SEQ ID NO: 853948 - RNA, 23 nt, Human
uacaggcgugagccaccgcgccc

SEQ ID NO: 853949 - RNA, 22 nt, Human
uacaggugccugccaccacgcc

SEQ ID NO: 853950 - RNA, 23 nt, Human
uacugcaaccucugccaccuugg

SEQ ID NO: 853951 - RNA, 21 nt, Human
uagaaggcaaucaaaaaaaaa

SEQ ID NO: 853952 - RNA, 20 nt, Human
uagagacaggauuucaccau

SEQ ID NO: 853953 - RNA, 21 nt, Human
uaucacccaggcuggagugca

SEQ ID NO: 853954 - RNA, 26 nt, Human
uauuagagacaggauuucaccaucuu

SEQ ID NO: 853955 - RNA, 19 nt, Human
ucaagcaauucuccugccu

SEQ ID NO: 853956 - RNA, 24 nt, Human
ucacccaggcuggagugcaguggu

SEQ ID NO: 853957 - RNA, 24 nt, Human
ucacucuaucacccaggcuggagu

SEQ ID NO: 853958 - RNA, 20 nt, Human
ucagccucccgaguagcugg

SEQ ID NO: 853959 - RNA, 18 nt, Human
uccacaucaccuauagaa

SEQ ID NO: 853960 - RNA, 24 nt, Human
ucccaaagugcugggauuacaggc

SEQ ID NO: 853961 - RNA, 23 nt, Human
ucccgaguagcugggauuacagg

SEQ ID NO: 853962 - RNA, 24 nt, Human
ucccgaguagcugggauuacaggu

SEQ ID NO: 853963 - RNA, 21 nt, Human
ucuaggaggcaucuguugcag

SEQ ID NO: 853964 - RNA, 24 nt, Human
ucuaucacccaggcuggagugcag

SEQ ID NO: 853965 - RNA, 23 nt, Human
ucucacucuaucacccaggcugg

SEQ ID NO: 853966 - RNA, 24 nt, Human
ucucacucuaucacccaggcugga

SEQ ID NO: 853967 - RNA, 26 nt, Human
ucucacucuaucacccaggcuggagu

SEQ ID NO: 853968 - RNA, 27 nt, Human
ucucacucuaucacccaggcuggagug

SEQ ID NO: 853969 - RNA, 24 nt, Human
ucuccugccucagccucccgagua

SEQ ID NO: 853970 - RNA, 19 nt, Human
ucuugaacuccugaccuug

SEQ ID NO: 853971 - RNA, 22 nt, Human
ucuuggccaggcuggucuugaa

SEQ ID NO: 853972 - RNA, 21 nt, Human
ugaaaagacacugcacauuga

SEQ ID NO: 853973 - RNA, 23 nt, Human
ugaaaagacacugcacauugaug

SEQ ID NO: 853974 - RNA, 21 nt, Human
ugcaguggugugaucuuggcu

SEQ ID NO: 853975 - RNA, 24 nt, Human
ugccucagccucccgaguagcugg

SEQ ID NO: 853976 - RNA, 24 nt, Human
ugcugggauuacaggcgugagcca

SEQ ID NO: 853977 - RNA, 19 nt, Human
uggagugcaguggugugau

SEQ ID NO: 853978 - RNA, 23 nt, Human
uggagugcaguggugugaucuug

SEQ ID NO: 853979 - RNA, 24 nt, Human
uggagugcaguggugugaucuugg

SEQ ID NO: 853980 - RNA, 24 nt, Human
uggccaggcuggucuugaacuccu

SEQ ID NO: 853981 - RNA, 18 nt, Human
ugggauuacaggcgugag

SEQ ID NO: 853982 - RNA, 19 nt, Human
ugggauuacaggcgugagc

SEQ ID NO: 853983 - RNA, 21 nt, Human
ugggauuacaggcgugagcca

SEQ ID NO: 853984 - RNA, 22 nt, Human
ugggauuacaggcgugagccac

SEQ ID NO: 853985 - RNA, 23 nt, Human
ugggauuacaggcgugagccacc

SEQ ID NO: 853986 - RNA, 24 nt, Human
ugggauuacaggcgugagccaccg

SEQ ID NO: 853987 - RNA, 21 nt, Human
ugggauuacaggugccugcca

SEQ ID NO: 853988 - RNA, 22 nt, Human
ugggauuacaggugccugccac

SEQ ID NO: 853989 - RNA, 24 nt, Human
ugggauuacaggugccugccacca

SEQ ID NO: 853990 - RNA, 23 nt, Human
ugguucaagcaauucuccugccu

SEQ ID NO: 853991 - RNA, 24 nt, Human
uuacugcaaccucugccaccuugg

SEQ ID NO: 853992 - RNA, 24 nt, Human
uuauuagagacaggauuucaccau

SEQ ID NO: 853993 - RNA, 18 nt, Human
uucaagagcagagugucc

SEQ ID NO: 853994 - RNA, 21 nt, Human
uucaagcaauucuccugccuc

SEQ ID NO: 853995 - RNA, 24 nt, Human
uucaagcaauucuccugccucagc

SEQ ID NO: 853996 - RNA, 19 nt, Human
uugaaaaccugauguaaua

SEQ ID NO: 853997 - RNA, 24 nt, Human
uugcagugucugcuacaccagggc

SEQ ID NO: 853998 - RNA, 24 nt, Human
uuucaccaucuuggccaggcuggu

SEQ ID NO: 853999 - RNA, 20 nt, Human
uuuuuguauuuuuauuagag

SEQ ID NO: 854000 - RNA, 23 nt, Human
uuuuuguauuuuuauuagagaca

SEQ ID NO: 854001 - RNA, 21 nt, Human
uuuuuuuuuuuuuuugucaag

SEQ ID NO: 854002 - RNA, 18 nt, Human
uuuuuuuuuuuuuuuuug

SEQ ID NO: 854003 - RNA, 19 nt, Human
uuuuuuuuuuuuuuuuugu

SEQ ID NO: 854004 - RNA, 22 nt, Human
aaaggggcaacggggaagaucc

SEQ ID NO: 854005 - RNA, 19 nt, Human
ccgguuaggccuuugggcc

SEQ ID NO: 854006 - RNA, 20 nt, Human
cggggaagaucccuaggcca

SEQ ID NO: 854007 - RNA, 27 nt, Human
gagccgagagggaguaggggaagagcu

SEQ ID NO: 854008 - RNA, 19 nt, Human
gaguaggggaagagcuggc

SEQ ID NO: 854009 - RNA, 18 nt, Human
ggaguaggggaagagcug

SEQ ID NO: 854010 - RNA, 22 nt, Human
ggccacaaggagccgagaggga

SEQ ID NO: 854011 - RNA, 19 nt, Human
ggggaagagcuggcccgca

SEQ ID NO: 854012 - RNA, 21 nt, Human
uuuuguuaaauuguucuuaau

SEQ ID NO: 854013 - RNA, 22 nt, Human
uuuuuuuuuuuuuuuuuuucag

SEQ ID NO: 854014 - RNA, 22 nt, Human
aaaugcuggcacuucaggugug

SEQ ID NO: 854015 - RNA, 22 nt, Human
aaaugcuggcacuucaggugug

SEQ ID NO: 854016 - RNA, 23 nt, Human
aaaugcuggcacuucaggugugg

SEQ ID NO: 854017 - RNA, 21 nt, Human
aagccaucggcagcucagcuc

SEQ ID NO: 854018 - RNA, 19 nt, Human
aagccgcucacccggacuc

SEQ ID NO: 854019 - RNA, 24 nt, Human
acccucgcccacuccccaccggcc

SEQ ID NO: 854020 - RNA, 30 nt, Human
accuccaucuccacgauguuucccuccauu

SEQ ID NO: 854021 - RNA, 18 nt, Human
agagagcagccacccaca

SEQ ID NO: 854022 - RNA, 19 nt, Human
agcucagcucacaccugca

SEQ ID NO: 854023 - RNA, 24 nt, Human
aggaacugcugcgcccaccacucg

SEQ ID NO: 854024 - RNA, 24 nt, Human
aggaacugcugcgcccaccacucg

SEQ ID NO: 854025 - RNA, 24 nt, Human
agggaaaaaaaggugcaaaagucc

SEQ ID NO: 854026 - RNA, 24 nt, Human
agggaaaaaaaggugcaaaagucc

SEQ ID NO: 854027 - RNA, 20 nt, Human
caaaguucugcagccgggga

SEQ ID NO: 854028 - RNA, 31 nt, Human
caaaugcuggcacuucagguguggccggcaa

SEQ ID NO: 854029 - RNA, 24 nt, Human
caagucuccccuggagcuaaccac

SEQ ID NO: 854030 - RNA, 21 nt, Human
cacccacagcagccgguggcc

SEQ ID NO: 854031 - RNA, 19 nt, Human
cacgacccaguccaugacc

SEQ ID NO: 854032 - RNA, 18 nt, Human
cacucugcagccggggau

SEQ ID NO: 854033 - RNA, 24 nt, Human
cacucugcagccggggauuggggg

SEQ ID NO: 854034 - RNA, 24 nt, Human
cagaagcaccuccaucuccacgau

SEQ ID NO: 854035 - RNA, 18 nt, Human
cagccacccacagcagcc

SEQ ID NO: 854036 - RNA, 21 nt, Human
cagcugcuguugcaccugcug

SEQ ID NO: 854037 - RNA, 20 nt, Human
caggaucagaggggcugggg

SEQ ID NO: 854038 - RNA, 21 nt, Human
caggcaccccaucgcccaccc

SEQ ID NO: 854039 - RNA, 23 nt, Human
caggcugugggaggagggcaguc

SEQ ID NO: 854040 - RNA, 24 nt, Human
cagggccugggucaggaucagagg

SEQ ID NO: 854041 - RNA, 20 nt, Human
caggucccaggcaccccauc

SEQ ID NO: 854042 - RNA, 23 nt, Human
ccaaaugcuggcacuucaggugu

SEQ ID NO: 854043 - RNA, 23 nt, Human
ccaaaugcuggcacuucaggugu

SEQ ID NO: 854044 - RNA, 18 nt, Human
ccacagaagcaccuccau

SEQ ID NO: 854045 - RNA, 18 nt, Human
ccacauucucgccccaca

SEQ ID NO: 854046 - RNA, 21 nt, Human
ccacauucucgccccacagaa

SEQ ID NO: 854047 - RNA, 20 nt, Human
ccagauccggccccugcgcc

SEQ ID NO: 854048 - RNA, 21 nt, Human
ccaggaacugcugcgcccacc

SEQ ID NO: 854049 - RNA, 21 nt, Human
ccaggaacugcugcgcccacc

SEQ ID NO: 854050 - RNA, 23 nt, Human
cccaacccccccacucugggugu

SEQ ID NO: 854051 - RNA, 26 nt, Human
cccacaccgccgccggcccccggcca

SEQ ID NO: 854052 - RNA, 22 nt, Human
cccacagcagccgguggcccag

SEQ ID NO: 854053 - RNA, 18 nt, Human
ccccaacccccccacucu

SEQ ID NO: 854054 - RNA, 22 nt, Human
ccccaacccccccacucugggu

SEQ ID NO: 854055 - RNA, 25 nt, Human
ccccaggggcuggucgcuggucccu

SEQ ID NO: 854056 - RNA, 25 nt, Human
ccccaggggcuggucgcuggucccu

SEQ ID NO: 854057 - RNA, 23 nt, Human
ccccaucgcccacccagggccug

SEQ ID NO: 854058 - RNA, 25 nt, Human
cccccacgucccaugggaugaggac

SEQ ID NO: 854059 - RNA, 24 nt, Human
ccccccacucuggguguaguucua

SEQ ID NO: 854060 - RNA, 23 nt, Human
cccccggccagauccggccccug

SEQ ID NO: 854061 - RNA, 20 nt, Human
cccccucccagcagccacua

SEQ ID NO: 854062 - RNA, 21 nt, Human
ccccgagggucuugcaggugc

SEQ ID NO: 854063 - RNA, 22 nt, Human
cccugcgccggggcucgcccuc

SEQ ID NO: 854064 - RNA, 20 nt, Human
cccugggcacagugagcagg

SEQ ID NO: 854065 - RNA, 20 nt, Human
cccugggcacagugagcagg

SEQ ID NO: 854066 - RNA, 19 nt, Human
ccggcccccggccagaucc

SEQ ID NO: 854067 - RNA, 19 nt, Human
ccggccccugcgccggggc

SEQ ID NO: 854068 - RNA, 20 nt, Human
ccgggccagcccacuuuccc

SEQ ID NO: 854069 - RNA, 24 nt, Human
ccucccugccagccccaggggcug

SEQ ID NO: 854070 - RNA, 24 nt, Human
ccucccugccagccccaggggcug

SEQ ID NO: 854071 - RNA, 20 nt, Human
ccugaaccagagagagcagc

SEQ ID NO: 854072 - RNA, 24 nt, Human
ccugaaccagagagagcagccacc

SEQ ID NO: 854073 - RNA, 23 nt, Human
ccugcagcccuguguccugaggg

SEQ ID NO: 854074 - RNA, 21 nt, Human
ccugcaucccaucagcagccc

SEQ ID NO: 854075 - RNA, 21 nt, Human
ccuggggggacaggguugggg

SEQ ID NO: 854076 - RNA, 22 nt, Human
ccugggucaggaucagaggggc

SEQ ID NO: 854077 - RNA, 24 nt, Human
cgagacaaggggcgaugccaaagg

SEQ ID NO: 854078 - RNA, 22 nt, Human
cgcagugggugggcagggcgcc

SEQ ID NO: 854079 - RNA, 22 nt, Human
cgcagugggugggcagggcgcc

SEQ ID NO: 854080 - RNA, 19 nt, Human
cgcccacuccccaccggcc

SEQ ID NO: 854081 - RNA, 21 nt, Human
cgccccacagaagcaccucca

SEQ ID NO: 854082 - RNA, 22 nt, Human
cgcccccucccagcagccacua

SEQ ID NO: 854083 - RNA, 22 nt, Human
cggcaggcgcugggaagaaggg

SEQ ID NO: 854084 - RNA, 20 nt, Human
cggcccgagacaaggggcga

SEQ ID NO: 854085 - RNA, 20 nt, Human
cgguggcccaggccucucuu

SEQ ID NO: 854086 - RNA, 20 nt, Human
cguguagcagcgcccccucc

SEQ ID NO: 854087 - RNA, 20 nt, Human
cguguagcagcgcccccucc

SEQ ID NO: 854088 - RNA, 19 nt, Human
cuaggccacauucucgccc

SEQ ID NO: 854089 - RNA, 18 nt, Human
cuccucccugccagcccc

SEQ ID NO: 854090 - RNA, 18 nt, Human
cuccucccugccagcccc

SEQ ID NO: 854091 - RNA, 20 nt, Human
cuccucccugccagccccag

SEQ ID NO: 854092 - RNA, 20 nt, Human
cuccucccugccagccccag

SEQ ID NO: 854093 - RNA, 23 nt, Human
cucgccaggaacugcugcgccca

SEQ ID NO: 854094 - RNA, 23 nt, Human
cucgccaggaacugcugcgccca

SEQ ID NO: 854095 - RNA, 22 nt, Human
cucgcccacuccccaccggccc

SEQ ID NO: 854096 - RNA, 19 nt, Human
cucucugccccaacccccc

SEQ ID NO: 854097 - RNA, 19 nt, Human
cucugccccaaccccccca

SEQ ID NO: 854098 - RNA, 21 nt, Human
cucugccccaacccccccacu

SEQ ID NO: 854099 - RNA, 24 nt, Human
cugcugccaggcugugggaggagg

SEQ ID NO: 854100 - RNA, 25 nt, Human
cuggcacuucagguguggccggcaa

SEQ ID NO: 854101 - RNA, 19 nt, Human
cuuggcccgcccucaccgg

SEQ ID NO: 854102 - RNA, 21 nt, Human
gacuccgagugcggcaggcgc

SEQ ID NO: 854103 - RNA, 20 nt, Human
gagcagccccgggccagccc

SEQ ID NO: 854104 - RNA, 21 nt, Human
gagcagccccgggccagccca

SEQ ID NO: 854105 - RNA, 20 nt, Human
gccccaacccccccacucuu

SEQ ID NO: 854106 - RNA, 19 nt, Human
gccccaggggcuggucgcu

SEQ ID NO: 854107 - RNA, 19 nt, Human
gccccaggggcuggucgcu

SEQ ID NO: 854108 - RNA, 21 nt, Human
ggagcuccucccugccagccc

SEQ ID NO: 854109 - RNA, 21 nt, Human
ggagcuccucccugccagccc

SEQ ID NO: 854110 - RNA, 21 nt, Human
ggcccuuggccauggcagcuu

SEQ ID NO: 854111 - RNA, 21 nt, Human
ggcccuuggccauggcagcuu

SEQ ID NO: 854112 - RNA, 23 nt, Human
ggcugggccaccauccagcugcu

SEQ ID NO: 854113 - RNA, 20 nt, Human
gggacaggguuggggggcuc

SEQ ID NO: 854114 - RNA, 18 nt, Human
ggggacaggguugggggg

SEQ ID NO: 854115 - RNA, 18 nt, Human
ggggggcucacucugcag

SEQ ID NO: 854116 - RNA, 23 nt, Human
guccaugaccaugucucucugcc

SEQ ID NO: 854117 - RNA, 19 nt, Human
gugacuauaacccucgccc

SEQ ID NO: 854118 - RNA, 21 nt, Human
guggccggcacccagccaggc

SEQ ID NO: 854119 - RNA, 19 nt, Human
guguagcagcgcccccucc

SEQ ID NO: 854120 - RNA, 18 nt, Human
uaacccucgcccacuccc

SEQ ID NO: 854121 - RNA, 18 nt, Human
uagcagcgcccccuccca

SEQ ID NO: 854122 - RNA, 18 nt, Human
uagcagcgcccccuccca

SEQ ID NO: 854123 - RNA, 19 nt, Human
ucaaugggcacaaagucug

SEQ ID NO: 854124 - RNA, 22 nt, Human
ucaccggcugggccaccaucca

SEQ ID NO: 854125 - RNA, 19 nt, Human
ucagcucacaccugcagcc

SEQ ID NO: 854126 - RNA, 19 nt, Human
uccacgauguuucccucca

SEQ ID NO: 854127 - RNA, 26 nt, Human
uccccaagccaucggcagcucagcuc

SEQ ID NO: 854128 - RNA, 18 nt, Human
uccccgagggucuugcag

SEQ ID NO: 854129 - RNA, 19 nt, Human
uccccuggggugggaaccu

SEQ ID NO: 854130 - RNA, 24 nt, Human
ucccucauccccuggggugggaac

SEQ ID NO: 854131 - RNA, 18 nt, Human
ucccugagucgggagagu

SEQ ID NO: 854132 - RNA, 19 nt, Human
ucccugccagccccagggg

SEQ ID NO: 854133 - RNA, 19 nt, Human
ucccugccagccccagggg

SEQ ID NO: 854134 - RNA, 22 nt, Human
ucccuggcugcccccacguccc

SEQ ID NO: 854135 - RNA, 22 nt, Human
ucccugggcacagugagcaggg

SEQ ID NO: 854136 - RNA, 22 nt, Human
ucccugggcacagugagcaggg

SEQ ID NO: 854137 - RNA, 19 nt, Human
uccggccccugcgccgggg

SEQ ID NO: 854138 - RNA, 21 nt, Human
ucgcccacuccccaccggcug

SEQ ID NO: 854139 - RNA, 18 nt, Human
ucugcagccggggauugg

SEQ ID NO: 854140 - RNA, 18 nt, Human
ucugcagccggggauugg

SEQ ID NO: 854141 - RNA, 21 nt, Human
ucuuagagugucccaaaccuu

SEQ ID NO: 854142 - RNA, 23 nt, Human
ucuugcaguccccaagccaucgg

SEQ ID NO: 854143 - RNA, 18 nt, Human
ugaaccagagagagcagc

SEQ ID NO: 854144 - RNA, 20 nt, Human
ugaccugagccacgacccag

SEQ ID NO: 854145 - RNA, 18 nt, Human
ugagcagggcugagguca

SEQ ID NO: 854146 - RNA, 18 nt, Human
ugagcagggcugagguca

SEQ ID NO: 854147 - RNA, 24 nt, Human
ugagccacgacccaguccaugacc

SEQ ID NO: 854148 - RNA, 18 nt, Human
ugcaucccaucagcagcc

SEQ ID NO: 854149 - RNA, 21 nt, Human
ugccaccugcaucccaucagc

SEQ ID NO: 854150 - RNA, 22 nt, Human
ugccccaacccccccacucugg

SEQ ID NO: 854151 - RNA, 22 nt, Human
ugcugccuggcagaacucagga

SEQ ID NO: 854152 - RNA, 18 nt, Human
ugcuguugcaccugcugc

SEQ ID NO: 854153 - RNA, 23 nt, Human
uggcagcuugguugggacagccg

SEQ ID NO: 854154 - RNA, 23 nt, Human
uggcagcuugguugggacagccg

SEQ ID NO: 854155 - RNA, 19 nt, Human
uggcagggccugggucagg

SEQ ID NO: 854156 - RNA, 23 nt, Human
ugggaggagggcagucgggcuga

SEQ ID NO: 854157 - RNA, 25 nt, Human
ugggaggagggcagucgggcugagc

SEQ ID NO: 854158 - RNA, 22 nt, Human
uggggggacaggguuggggggc

SEQ ID NO: 854159 - RNA, 20 nt, Human
uggggugggaaccuggcagg

SEQ ID NO: 854160 - RNA, 19 nt, Human
ugggugggcagggcgccau

SEQ ID NO: 854161 - RNA, 19 nt, Human
ugggugggcagggcgccau

SEQ ID NO: 854162 - RNA, 22 nt, Human
uguggccggcacccagccaggc

SEQ ID NO: 854163 - RNA, 21 nt, Human
ugugggcagagaaggcugggc

SEQ ID NO: 854164 - RNA, 21 nt, Human
uugcaggugcccaugcugcca

SEQ ID NO: 854165 - RNA, 18 nt, Human
uuuuuuuuuuuuuuuuug

SEQ ID NO: 854166 - RNA, 18 nt, Human
uuuuuuuuuuuuuuuuug

SEQ ID NO: 854167 - RNA, 22 nt, Human
uuuuuuuuuuuuuuuuugacag

SEQ ID NO: 854168 - RNA, 25 nt, Human
uuuuuuuuuuuuuuuuuuguuuuuu

SEQ ID NO: 854169 - RNA, 18 nt, Human
aaaagacaagaacccaga

SEQ ID NO: 854170 - RNA, 22 nt, Human
aaaagacaagaacccagacaua

SEQ ID NO: 854171 - RNA, 20 nt, Human
aaaagggccuccugcaaggg

SEQ ID NO: 854172 - RNA, 24 nt, Human
aaacagaccacaaaagacaagaac

SEQ ID NO: 854173 - RNA, 25 nt, Human
aaagacaaacagaccacaaaagaca

SEQ ID NO: 854174 - RNA, 21 nt, Human
aaagagguagaaaagacaaac

SEQ ID NO: 854175 - RNA, 20 nt, Human
aacaugccuuggggucagga

SEQ ID NO: 854176 - RNA, 21 nt, Human
aaccacgaugaugaggggccc

SEQ ID NO: 854177 - RNA, 20 nt, Human
aagaacaggagaagcucaug

SEQ ID NO: 854178 - RNA, 21 nt, Human
aagaacccagacauauagaca

SEQ ID NO: 854179 - RNA, 26 nt, Human
aagacaaacagaccacaaaagacaag

SEQ ID NO: 854180 - RNA, 21 nt, Human
aagcucauguaauggauuacc

SEQ ID NO: 854181 - RNA, 21 nt, Human
aaggaggagugggugggaggg

SEQ ID NO: 854182 - RNA, 19 nt, Human
aaggagguggggaaguggg

SEQ ID NO: 854183 - RNA, 22 nt, Human
acaaaagacaagaacccagaca

SEQ ID NO: 854184 - RNA, 26 nt, Human
acaaacagaccacaaaagacaagaac

SEQ ID NO: 854185 - RNA, 19 nt, Human
accgaccuccacucuggcu

SEQ ID NO: 854186 - RNA, 24 nt, Human
accgaccuccacucuggcucccac

SEQ ID NO: 854187 - RNA, 22 nt, Human
acuuuaagaacaugccuugggg

SEQ ID NO: 854188 - RNA, 24 nt, Human
agaaaagacaaacagaccacaaaa

SEQ ID NO: 854189 - RNA, 26 nt, Human
agaaaagacaaacagaccacaaaaga

SEQ ID NO: 854190 - RNA, 23 nt, Human
agaaagagguagaaaagagggac

SEQ ID NO: 854191 - RNA, 19 nt, Human
agaacaggagaagcucaug

SEQ ID NO: 854192 - RNA, 19 nt, Human
agaaggaggaguggguggg

SEQ ID NO: 854193 - RNA, 20 nt, Human
agaccacaaaagacaagaac

SEQ ID NO: 854194 - RNA, 19 nt, Human
agcaaggaagccuccagga

SEQ ID NO: 854195 - RNA, 22 nt, Human
agcaggaaacaagcuuggcuga

SEQ ID NO: 854196 - RNA, 25 nt, Human
aggaaaguggaagaacaggagaagc

SEQ ID NO: 854197 - RNA, 21 nt, Human
aggaaggguaaaagcaggggg

SEQ ID NO: 854198 - RNA, 19 nt, Human
aggagaagcucauguaaug

SEQ ID NO: 854199 - RNA, 20 nt, Human
aggagcagcaaggaagccuc

SEQ ID NO: 854200 - RNA, 19 nt, Human
aggaggagugggugggagg

SEQ ID NO: 854201 - RNA, 24 nt, Human
aggcaggaaaguggaagaacagga

SEQ ID NO: 854202 - RNA, 21 nt, Human
aggguaaaagcagggggcaaa

SEQ ID NO: 854203 - RNA, 19 nt, Human
aguguguaaccuggggccu

SEQ ID NO: 854204 - RNA, 20 nt, Human
auguaugcauguguguauau

SEQ ID NO: 854205 - RNA, 21 nt, Human
auguaugcauguguguauaug

SEQ ID NO: 854206 - RNA, 18 nt, Human
caaagcgguggcccuccc

SEQ ID NO: 854207 - RNA, 19 nt, Human
cagaccacaaaagacaaga

SEQ ID NO: 854208 - RNA, 25 nt, Human
cagacgcaccuguugcaugugcaug

SEQ ID NO: 854209 - RNA, 18 nt, Human
cagagcaggcaggcagcc

SEQ ID NO: 854210 - RNA, 25 nt, Human
cagcugaaaccuguguccaaguagc

SEQ ID NO: 854211 - RNA, 21 nt, Human
caggcaggcagcccacccccu

SEQ ID NO: 854212 - RNA, 21 nt, Human
caugccuuggggucaggagga

SEQ ID NO: 854213 - RNA, 20 nt, Human
caugggguccccaccuuccc

SEQ ID NO: 854214 - RNA, 22 nt, Human
ccacaaaagacaagaacccaga

SEQ ID NO: 854215 - RNA, 20 nt, Human
ccaggcaggaaaguggaaga

SEQ ID NO: 854216 - RNA, 22 nt, Human
ccaggguggcagucccagagga

SEQ ID NO: 854217 - RNA, 28 nt, Human
cccacaagccucagagcaggaaacaagc

SEQ ID NO: 854218 - RNA, 21 nt, Human
cccccugcagcagugcugggc

SEQ ID NO: 854219 - RNA, 21 nt, Human
ccccugcagcagugcugggcu

SEQ ID NO: 854220 - RNA, 26 nt, Human
ccgaccuccacucuggcucccacccc

SEQ ID NO: 854221 - RNA, 18 nt, Human
ccucaggccugguaaccu

SEQ ID NO: 854222 - RNA, 24 nt, Human
ccugagguguagagcacccagaag

SEQ ID NO: 854223 - RNA, 24 nt, Human
cgaugaugaggggccacagaacac

SEQ ID NO: 854224 - RNA, 19 nt, Human
cucagagcaggcaggcagc

SEQ ID NO: 854225 - RNA, 19 nt, Human
cucauguaugcaugugugu

SEQ ID NO: 854226 - RNA, 21 nt, Human
cugcacaugacaaugugcaug

SEQ ID NO: 854227 - RNA, 24 nt, Human
cuggccacacccuaagccuugcaa

SEQ ID NO: 854228 - RNA, 18 nt, Human
cuggggccucagcuucuu

SEQ ID NO: 854229 - RNA, 22 nt, Human
cuuucagggcuggccacacccu

SEQ ID NO: 854230 - RNA, 22 nt, Human
gaaaagacaaacagaccacaaa

SEQ ID NO: 854231 - RNA, 21 nt, Human
gaccacaaaagacaagaaccc

SEQ ID NO: 854232 - RNA, 19 nt, Human
gagcacccagaaggaaggg

SEQ ID NO: 854233 - RNA, 24 nt, Human
gagcaggcaggcagcccacccccu

SEQ ID NO: 854234 - RNA, 21 nt, Human
gagccagagccugggagagaa

SEQ ID NO: 854235 - RNA, 21 nt, Human
gauuacccuccacaggauuau

SEQ ID NO: 854236 - RNA, 19 nt, Human
gccucagcuucuugaucug

SEQ ID NO: 854237 - RNA, 21 nt, Human
gccucagcuucuugaucuggg

SEQ ID NO: 854238 - RNA, 23 nt, Human
gcgugcaugugggcauguaugua

SEQ ID NO: 854239 - RNA, 21 nt, Human
gcugggcagagcaggggaagg

SEQ ID NO: 854240 - RNA, 19 nt, Human
gcuggggccagcugaaacc

SEQ ID NO: 854241 - RNA, 24 nt, Human
gcuggugaagggccugugguucaa

SEQ ID NO: 854242 - RNA, 18 nt, Human
ggaagcaggcgcgugcug

SEQ ID NO: 854243 - RNA, 21 nt, Human
ggagguggggaaguggguguu

SEQ ID NO: 854244 - RNA, 20 nt, Human
ggagugggugggagggaaag

SEQ ID NO: 854245 - RNA, 25 nt, Human
ggagugggugggagggaaaggcugg

SEQ ID NO: 854246 - RNA, 22 nt, Human
ggcugggcagagcaggggaagg

SEQ ID NO: 854247 - RNA, 21 nt, Human
gggcagagcaggggaaggagu

SEQ ID NO: 854248 - RNA, 21 nt, Human
gggccucagcuucuugaucug

SEQ ID NO: 854249 - RNA, 23 nt, Human
ggguguugggguaagggcuggga

SEQ ID NO: 854250 - RNA, 18 nt, Human
ggugggagggaaaggcug

SEQ ID NO: 854251 - RNA, 22 nt, Human
gguguagagcacccagaaggaa

SEQ ID NO: 854252 - RNA, 18 nt, Human
gugcaugagccagagccu

SEQ ID NO: 854253 - RNA, 21 nt, Human
guggaagaacaggagaagcuc

SEQ ID NO: 854254 - RNA, 25 nt, Human
uaaggagguggggaaguggguguug

SEQ ID NO: 854255 - RNA, 22 nt, Human
uagaaaagacaaacagaccaca

SEQ ID NO: 854256 - RNA, 23 nt, Human
uagagcacccagaaggaagggua

SEQ ID NO: 854257 - RNA, 21 nt, Human
uaucacugcaagagaaagagg

SEQ ID NO: 854258 - RNA, 23 nt, Human
ucugggcuggggccagcugaaac

SEQ ID NO: 854259 - RNA, 26 nt, Human
ugagguuagcaugguuaggaguccac

SEQ ID NO: 854260 - RNA, 22 nt, Human
ugcaagagagagcucagagcag

SEQ ID NO: 854261 - RNA, 22 nt, Human
ugcacaugacaaugugcaugcc

SEQ ID NO: 854262 - RNA, 19 nt, Human
ugcaugccaguccagaguu

SEQ ID NO: 854263 - RNA, 24 nt, Human
ugcaugugcaugagccagagccug

SEQ ID NO: 854264 - RNA, 20 nt, Human
uggaaacaaggauggcucua

SEQ ID NO: 854265 - RNA, 24 nt, Human
uggaagaacaggagaagcucaugu

SEQ ID NO: 854266 - RNA, 22 nt, Human
uggcucccaccccacaagccuc

SEQ ID NO: 854267 - RNA, 21 nt, Human
ugggagagaagagagagcgug

SEQ ID NO: 854268 - RNA, 20 nt, Human
ugggcauguauguaucuggg

SEQ ID NO: 854269 - RNA, 20 nt, Human
uggggaaguggguguugggg

SEQ ID NO: 854270 - RNA, 22 nt, Human
uggggaaguggguguuggggaa

SEQ ID NO: 854271 - RNA, 22 nt, Human
uggggucaggaggacauaggug

SEQ ID NO: 854272 - RNA, 24 nt, Human
ugggugggagggaaaggcugggca

SEQ ID NO: 854273 - RNA, 21 nt, Human
uguagagcacccagaaggaag

SEQ ID NO: 854274 - RNA, 18 nt, Human
uguaugcauguguguaua

SEQ ID NO: 854275 - RNA, 19 nt, Human
uguaugcauguguguauau

SEQ ID NO: 854276 - RNA, 27 nt, Human
ugugcuggugaagggccugugguucaa

SEQ ID NO: 854277 - RNA, 20 nt, Human
ugugggcauguauguaucug

SEQ ID NO: 854278 - RNA, 21 nt, Human
uguguaaccuggggccucagc

SEQ ID NO: 854279 - RNA, 24 nt, Human
uguguauaugcaaagcugcacaug

SEQ ID NO: 854280 - RNA, 22 nt, Human
uguguggaggcucauguaugca

SEQ ID NO: 854281 - RNA, 19 nt, Human
uuccugagaguuuuuucuc

SEQ ID NO: 854282 - RNA, 22 nt, Human
uugcagaaggaggagugggugg

SEQ ID NO: 854283 - RNA, 23 nt, Human
uuuuuuuuuuuuuuuucuaauug

SEQ ID NO: 854284 - RNA, 23 nt, Human
uuuuuuuuuuuuuuuuucuaauu

SEQ ID NO: 854285 - RNA, 23 nt, Human
aagucuuugguauggaaugaagc

SEQ ID NO: 854286 - RNA, 20 nt, Human
acgcacccuccaccuugggg

SEQ ID NO: 854287 - RNA, 20 nt, Human
acgcggccggagccggcggc

SEQ ID NO: 854288 - RNA, 21 nt, Human
agcucuauccuuucaaaguca

SEQ ID NO: 854289 - RNA, 21 nt, Human
aguagcggcugcgggccuggc

SEQ ID NO: 854290 - RNA, 18 nt, Human
aguggccauggcacuggg

SEQ ID NO: 854291 - RNA, 23 nt, Human
aucccccuccaggcgccucgcug

SEQ ID NO: 854292 - RNA, 22 nt, Human
caacacgauuccugaguucuga

SEQ ID NO: 854293 - RNA, 20 nt, Human
caaugcaugcaacacgauuc

SEQ ID NO: 854294 - RNA, 19 nt, Human
caguggguaauuucccaag

SEQ ID NO: 854295 - RNA, 21 nt, Human
cauuggcauuggacggagaag

SEQ ID NO: 854296 - RNA, 23 nt, Human
ccacgaaaggccgcccaggcacc

SEQ ID NO: 854297 - RNA, 21 nt, Human
ccaggcacccccggugacccc

SEQ ID NO: 854298 - RNA, 19 nt, Human
cccaaggauucuggggucc

SEQ ID NO: 854299 - RNA, 20 nt, Human
cccacgaaaggccgcccagg

SEQ ID NO: 854300 - RNA, 22 nt, Human
cccccggugaccccauggaagu

SEQ ID NO: 854301 - RNA, 21 nt, Human
ccgagaugguagaucccccuc

SEQ ID NO: 854302 - RNA, 21 nt, Human
ccgagugaguagcggcugcgg

SEQ ID NO: 854303 - RNA, 23 nt, Human
ccgcccaggcacccccggugacc

SEQ ID NO: 854304 - RNA, 21 nt, Human
ccgugugccaccccaauuccu

SEQ ID NO: 854305 - RNA, 19 nt, Human
cggccggagccggcggcgg

SEQ ID NO: 854306 - RNA, 21 nt, Human
cggccggagccggcggcgggu

SEQ ID NO: 854307 - RNA, 22 nt, Human
cggcugcgggccuggcuucggu

SEQ ID NO: 854308 - RNA, 23 nt, Human
cucauuuccacgcacccuccacc

SEQ ID NO: 854309 - RNA, 21 nt, Human
gagaugguagaucccccucca

SEQ ID NO: 854310 - RNA, 22 nt, Human
gaguagcggcugcgggccuggc

SEQ ID NO: 854311 - RNA, 21 nt, Human
gcccaggcacccccggugacc

SEQ ID NO: 854312 - RNA, 20 nt, Human
ggccggagccggcggcgggu

SEQ ID NO: 854313 - RNA, 18 nt, Human
ggguucacggggcuccug

SEQ ID NO: 854314 - RNA, 24 nt, Human
gguaaaaagcuuucucauuuccac

SEQ ID NO: 854315 - RNA, 20 nt, Human
gguggucuggguucacgggg

SEQ ID NO: 854316 - RNA, 20 nt, Human
ggugucccgugugccacccc

SEQ ID NO: 854317 - RNA, 18 nt, Human
guagaucccccuccaggc

SEQ ID NO: 854318 - RNA, 19 nt, Human
guagaucccccuccaggcg

SEQ ID NO: 854319 - RNA, 19 nt, Human
guagaucccccuccaggcg

SEQ ID NO: 854320 - RNA, 30 nt, Human
gucccugucauugccucaggguuuccaacu

SEQ ID NO: 854321 - RNA, 20 nt, Human
gugcaugcccacgaaaggcc

SEQ ID NO: 854322 - RNA, 27 nt, Human
uaaaaagcuuucucauuuccacgcacc

SEQ ID NO: 854323 - RNA, 19 nt, Human
uauccuuucaaagucacca

SEQ ID NO: 854324 - RNA, 26 nt, Human
uauggaaugaagcucuauccuuucaa

SEQ ID NO: 854325 - RNA, 20 nt, Human
ucaccagguucggguuccca

SEQ ID NO: 854326 - RNA, 21 nt, Human
ucgguuacggcuucgguccca

SEQ ID NO: 854327 - RNA, 18 nt, Human
ugaaggcauuggcauugg

SEQ ID NO: 854328 - RNA, 21 nt, Human
ugcucuggcuucgaagugcuu

SEQ ID NO: 854329 - RNA, 19 nt, Human
uggguagaaacaaugcaug

SEQ ID NO: 854330 - RNA, 18 nt, Human
uuaggguguggaagaucc

SEQ ID NO: 854331 - RNA, 18 nt, Human
uuccugaguucugaagaa

SEQ ID NO: 854332 - RNA, 22 nt, Human
uuuuugggguaaaaagcuuucu

SEQ ID NO: 854333 - RNA, 18 nt, Human
uuuuuuuuuuuuuuuuug

SEQ ID NO: 854334 - RNA, 24 nt, Human
aaaacaaacaaaacgacagcacaa

SEQ ID NO: 854335 - RNA, 20 nt, Human
aaacaaaacgacagcacaaa

SEQ ID NO: 854336 - RNA, 20 nt, Human
aaauguaacauccuuaacua

SEQ ID NO: 854337 - RNA, 23 nt, Human
aaauuuccucaguagcccuaccu

SEQ ID NO: 854338 - RNA, 22 nt, Human
aacauguccauauugcacagaa

SEQ ID NO: 854339 - RNA, 25 nt, Human
aagcaaauauugaugauuuagaaau

SEQ ID NO: 854340 - RNA, 18 nt, Human
aaggagcccgagccggau

SEQ ID NO: 854341 - RNA, 23 nt, Human
aaggagcccgagccggaugguuc

SEQ ID NO: 854342 - RNA, 22 nt, Human
acaaacaaaacgacagcacaag

SEQ ID NO: 854343 - RNA, 22 nt, Human
acacagaaagacacacuccaaa

SEQ ID NO: 854344 - RNA, 20 nt, Human
acacagucucaucuuaagaa

SEQ ID NO: 854345 - RNA, 24 nt, Human
acauccuuucaaaauguaacaucc

SEQ ID NO: 854346 - RNA, 25 nt, Human
agaaaaacaaacaaaacgacagcac

SEQ ID NO: 854347 - RNA, 27 nt, Human
agaaaaacaaacaaaacgacagcacaa

SEQ ID NO: 854348 - RNA, 21 nt, Human
agaaagacacacuccaaaagg

SEQ ID NO: 854349 - RNA, 19 nt, Human
agaaaugcaguagcacguu

SEQ ID NO: 854350 - RNA, 26 nt, Human
agaagcaaggaggggggauagggccg

SEQ ID NO: 854351 - RNA, 22 nt, Human
agaaugaacuucuugcugcaaa

SEQ ID NO: 854352 - RNA, 22 nt, Human
agcaaaagugcuuugucucccc

SEQ ID NO: 854353 - RNA, 21 nt, Human
agcagcucccucugggagaaa

SEQ ID NO: 854354 - RNA, 20 nt, Human
agcugcucuagagaaaaugu

SEQ ID NO: 854355 - RNA, 22 nt, Human
agcugcucuagagaaaaugugg

SEQ ID NO: 854356 - RNA, 23 nt, Human
aggaagacaauucuccaaagccu

SEQ ID NO: 854357 - RNA, 20 nt, Human
aggaggggggauagggcugu

SEQ ID NO: 854358 - RNA, 22 nt, Human
agggggcucggggacccagagc

SEQ ID NO: 854359 - RNA, 22 nt, Human
aguagcccugucuccuccgccc

SEQ ID NO: 854360 - RNA, 21 nt, Human
caaaagugcuuugucucccca

SEQ ID NO: 854361 - RNA, 21 nt, Human
caagaagggccagcugcucua

SEQ ID NO: 854362 - RNA, 21 nt, Human
caagcggccgcugcgggacca

SEQ ID NO: 854363 - RNA, 24 nt, Human
caagcuguccuuucaaugcucccc

SEQ ID NO: 854364 - RNA, 21 nt, Human
cacacagaaagacacacucca

SEQ ID NO: 854365 - RNA, 22 nt, Human
cacacuccuuccucuugcaccc

SEQ ID NO: 854366 - RNA, 21 nt, Human
cacagaaagacacacuccaaa

SEQ ID NO: 854367 - RNA, 21 nt, Human
cacuccuuccucuugcacccc

SEQ ID NO: 854368 - RNA, 21 nt, Human
cagaaagacacacuccaaaag

SEQ ID NO: 854369 - RNA, 19 nt, Human
cagaacgccggcaagcggc

SEQ ID NO: 854370 - RNA, 22 nt, Human
caggggagggggcucggggacc

SEQ ID NO: 854371 - RNA, 26 nt, Human
cagugcagccaugacugaccccuugg

SEQ ID NO: 854372 - RNA, 20 nt, Human
cagugucgggacucugacgc

SEQ ID NO: 854373 - RNA, 24 nt, Human
ccccauuucacagaagcaaggagg

SEQ ID NO: 854374 - RNA, 18 nt, Human
cccccagcucugcgccug

SEQ ID NO: 854375 - RNA, 20 nt, Human
cccccggcugcccccagcuc

SEQ ID NO: 854376 - RNA, 22 nt, Human
ccccuuagagcgggccagcagc

SEQ ID NO: 854377 - RNA, 18 nt, Human
cccggcugcccccagcuc

SEQ ID NO: 854378 - RNA, 26 nt, Human
cccggcugcccccagcucugcgccug

SEQ ID NO: 854379 - RNA, 20 nt, Human
cccucugggagaaaugaggc

SEQ ID NO: 854380 - RNA, 24 nt, Human
cccuuagcugugcauacccagagg

SEQ ID NO: 854381 - RNA, 18 nt, Human
ccgagcuuccccaguguc

SEQ ID NO: 854382 - RNA, 18 nt, Human
ccucagccacucgggccc

SEQ ID NO: 854383 - RNA, 26 nt, Human
ccuccgcccccuucccucuccucgcc

SEQ ID NO: 854384 - RNA, 21 nt, Human
ccucuaaaugcaggaaguaag

SEQ ID NO: 854385 - RNA, 18 nt, Human
ccugcaguagcccugucu

SEQ ID NO: 854386 - RNA, 23 nt, Human
ccugcaguagcccugucuccucc

SEQ ID NO: 854387 - RNA, 25 nt, Human
cgacagcacaaguagcagugcagcc

SEQ ID NO: 854388 - RNA, 26 nt, Human
cgacagcacaaguagcagugcagcca

SEQ ID NO: 854389 - RNA, 23 nt, Human
cgcuccgagcuuccccagugucg

SEQ ID NO: 854390 - RNA, 18 nt, Human
cgggaaggaggagggagu

SEQ ID NO: 854391 - RNA, 19 nt, Human
cgggcugggccaggggagg

SEQ ID NO: 854392 - RNA, 21 nt, Human
cgggcugggccaggggagggg

SEQ ID NO: 854393 - RNA, 19 nt, Human
cucgggcccccggcugccc

SEQ ID NO: 854394 - RNA, 22 nt, Human
cugggccaggggagggggcucg

SEQ ID NO: 854395 - RNA, 18 nt, Human
cuguagcaggugccccga

SEQ ID NO: 854396 - RNA, 22 nt, Human
cugucuccuccgcccccuuccc

SEQ ID NO: 854397 - RNA, 19 nt, Human
cuucagggcauguuuucua

SEQ ID NO: 854398 - RNA, 21 nt, Human
cuuuccuucuuguucacuggu

SEQ ID NO: 854399 - RNA, 19 nt, Human
gaaaaacaaacaaaacgac

SEQ ID NO: 854400 - RNA, 20 nt, Human
gaaggaggagggagucgggc

SEQ ID NO: 854401 - RNA, 20 nt, Human
gagcaaaagugcuuugucuc

SEQ ID NO: 854402 - RNA, 21 nt, Human
gcaaacauguccauauugcac

SEQ ID NO: 854403 - RNA, 21 nt, Human
gcaggaggcggcggcagcgga

SEQ ID NO: 854404 - RNA, 19 nt, Human
gccugcaguagcccugucu

SEQ ID NO: 854405 - RNA, 18 nt, Human
gcggcagcggaggcggcg

SEQ ID NO: 854406 - RNA, 23 nt, Human
gcggcggcagcggaggcggcgcu

SEQ ID NO: 854407 - RNA, 18 nt, Human
ggacccagagccaggcag

SEQ ID NO: 854408 - RNA, 18 nt, Human
ggaggagggagucgggcu

SEQ ID NO: 854409 - RNA, 25 nt, Human
gggaaggaggagggagucgggcugg

SEQ ID NO: 854410 - RNA, 23 nt, Human
gggcccccggcugcccccagcuc

SEQ ID NO: 854411 - RNA, 18 nt, Human
ggggacccagagccaggc

SEQ ID NO: 854412 - RNA, 18 nt, Human
ggggagggggcucgggga

SEQ ID NO: 854413 - RNA, 19 nt, Human
ggggcucggggacccagag

SEQ ID NO: 854414 - RNA, 20 nt, Human
gguauaauugaugcauuugu

SEQ ID NO: 854415 - RNA, 21 nt, Human
guagcagugcagccaugacug

SEQ ID NO: 854416 - RNA, 21 nt, Human
gugaggccacaggagccagaa

SEQ ID NO: 854417 - RNA, 25 nt, Human
uaaccuaagaacaacucucuucagg

SEQ ID NO: 854418 - RNA, 30 nt, Human
uaaccuaagaacaacucucuucagggcauu

SEQ ID NO: 854419 - RNA, 22 nt, Human
uaaguauaaugagaaaccacag

SEQ ID NO: 854420 - RNA, 21 nt, Human
uaaguguacaacaaccugacc

SEQ ID NO: 854421 - RNA, 23 nt, Human
uaaguguacaacaaccugacccu

SEQ ID NO: 854422 - RNA, 21 nt, Human
uaauauaucuaacauacaucc

SEQ ID NO: 854423 - RNA, 23 nt, Human
uacccagagggaacgaaacauuc

SEQ ID NO: 854424 - RNA, 21 nt, Human
uagcaggugccccgauuuagg

SEQ ID NO: 854425 - RNA, 23 nt, Human
uaggcaagaguccagagagaaca

SEQ ID NO: 854426 - RNA, 18 nt, Human
uagucuagagucuagggg

SEQ ID NO: 854427 - RNA, 25 nt, Human
uaucauagaaaaacaaacaaaacga

SEQ ID NO: 854428 - RNA, 26 nt, Human
uaucauagaaaaacaaacaaaacgac

SEQ ID NO: 854429 - RNA, 20 nt, Human
uauccaaaagugcuuuggag

SEQ ID NO: 854430 - RNA, 25 nt, Human
uaucuuaucuuuccuccugaguauc

SEQ ID NO: 854431 - RNA, 24 nt, Human
ucccccagcuggucugggcacacu

SEQ ID NO: 854432 - RNA, 23 nt, Human
ucgggaaggaggagggagucggg

SEQ ID NO: 854433 - RNA, 24 nt, Human
ucuaccuaacuggaaaauggagau

SEQ ID NO: 854434 - RNA, 20 nt, Human
ugagaaaccacagaaugugg

SEQ ID NO: 854435 - RNA, 24 nt, Human
ugaguauccaaaagugcuuuggag

SEQ ID NO: 854436 - RNA, 21 nt, Human
ugaugcauuuguggauguucc

SEQ ID NO: 854437 - RNA, 21 nt, Human
ugcaguagcccugucuccucc

SEQ ID NO: 854438 - RNA, 21 nt, Human
ugcauuuguggauguuccauu

SEQ ID NO: 854439 - RNA, 24 nt, Human
ugccccgauuuaggaagacaauuc

SEQ ID NO: 854440 - RNA, 19 nt, Human
ugcuuugucuccccauuuc

SEQ ID NO: 854441 - RNA, 20 nt, Human
uggagauaaaaaaaaaaaaa

SEQ ID NO: 854442 - RNA, 25 nt, Human
uguaucuuaucuuuccuccugagua

SEQ ID NO: 854443 - RNA, 22 nt, Human
uguggcaguaccaggguaaaug

SEQ ID NO: 854444 - RNA, 24 nt, Human
uuaaaacacacagaaagacacacu

SEQ ID NO: 854445 - RNA, 24 nt, Human
uucacagaagcaaggaggggggau

SEQ ID NO: 854446 - RNA, 23 nt, Human
uucccucuccucgccuagcaguc

SEQ ID NO: 854447 - RNA, 24 nt, Human
uuuacacagucucaucuuaagaac

SEQ ID NO: 854448 - RNA, 18 nt, Human
uuuagaaaugcaguagca

SEQ ID NO: 854449 - RNA, 19 nt, Human
uuuuuuuuuuuuuuuuuug

SEQ ID NO: 854450 - RNA, 20 nt, Human
uuuuuuuuuuuuuuuuuugg

SEQ ID NO: 854451 - RNA, 24 nt, Human
aaaugcaccacuuuauuuuccuua

SEQ ID NO: 854452 - RNA, 21 nt, Human
aagccuucuccccagccacaa

SEQ ID NO: 854453 - RNA, 23 nt, Human
acaggcccgagagccaugguggg

SEQ ID NO: 854454 - RNA, 21 nt, Human
acaggcuuguuggcagugggu

SEQ ID NO: 854455 - RNA, 23 nt, Human
agcccccaggcuuccacuccacg

SEQ ID NO: 854456 - RNA, 23 nt, Human
agcuaggcuucuggcggaacuug

SEQ ID NO: 854457 - RNA, 23 nt, Human
aggccggagccggcgcggccaga

SEQ ID NO: 854458 - RNA, 19 nt, Human
aggccggggucccggcggc

SEQ ID NO: 854459 - RNA, 23 nt, Human
cacuucucucuguaggccgggag

SEQ ID NO: 854460 - RNA, 18 nt, Human
cagaggaguccugagauu

SEQ ID NO: 854461 - RNA, 24 nt, Human
cagcagcagcuccuggcccuuggu

SEQ ID NO: 854462 - RNA, 21 nt, Human
cagcccgggcgcggccggcga

SEQ ID NO: 854463 - RNA, 21 nt, Human
cagcuuccucuugcucacaga

SEQ ID NO: 854464 - RNA, 19 nt, Human
caucuccccucuggcccug

SEQ ID NO: 854465 - RNA, 22 nt, Human
caucuccccucuggcccugccc

SEQ ID NO: 854466 - RNA, 18 nt, Human
ccagcccgggcgcggccg

SEQ ID NO: 854467 - RNA, 23 nt, Human
ccagcuggagccucucuucuucc

SEQ ID NO: 854468 - RNA, 20 nt, Human
cccccaggcuuccacuccac

SEQ ID NO: 854469 - RNA, 27 nt, Human
cccccaggcuuccacuccacgggaguc

SEQ ID NO: 854470 - RNA, 24 nt, Human
ccccggaggccggagccggcgcgg

SEQ ID NO: 854471 - RNA, 22 nt, Human
ccccucuggcccugcccaggga

SEQ ID NO: 854472 - RNA, 21 nt, Human
cccgaguggucugcagcuucc

SEQ ID NO: 854473 - RNA, 18 nt, Human
cccggcccccccggaggc

SEQ ID NO: 854474 - RNA, 19 nt, Human
cccucuggcccugcccagg

SEQ ID NO: 854475 - RNA, 21 nt, Human
cccucugugggacacacaggc

SEQ ID NO: 854476 - RNA, 20 nt, Human
cccugcccagggaccuggug

SEQ ID NO: 854477 - RNA, 19 nt, Human
ccggcccccgcggccuccg

SEQ ID NO: 854478 - RNA, 24 nt, Human
ccuccuggacuagcuccagcccca

SEQ ID NO: 854479 - RNA, 18 nt, Human
ccucugcaacgccugguu

SEQ ID NO: 854480 - RNA, 22 nt, Human
ccucuugcucacaggccggggg

SEQ ID NO: 854481 - RNA, 26 nt, Human
ccuggacuagcuccagccccaggaac

SEQ ID NO: 854482 - RNA, 18 nt, Human
ccugggucgcaggcaagu

SEQ ID NO: 854483 - RNA, 18 nt, Human
cgcggccagaggccgggg

SEQ ID NO: 854484 - RNA, 19 nt, Human
cgcuccggcccccgcggcc

SEQ ID NO: 854485 - RNA, 23 nt, Human
cggcccggggccugguccgaccc

SEQ ID NO: 854486 - RNA, 26 nt, Human
cggcggcggggaaggggugcgacugg

SEQ ID NO: 854487 - RNA, 25 nt, Human
cgugcacacggcacgcgaauucaug

SEQ ID NO: 854488 - RNA, 23 nt, Human
cuaaggaaggcgacaucuucacu

SEQ ID NO: 854489 - RNA, 20 nt, Human
cuagcuccagccccaggaac

SEQ ID NO: 854490 - RNA, 22 nt, Human
cucccagccuggcugcagcccg

SEQ ID NO: 854491 - RNA, 20 nt, Human
cuccggcgcgaccgcucucc

SEQ ID NO: 854492 - RNA, 23 nt, Human
cugcaacgccugguucauggacu

SEQ ID NO: 854493 - RNA, 19 nt, Human
cugcacccccuuggcgaag

SEQ ID NO: 854494 - RNA, 22 nt, Human
cugcagcccggggccuuuguga

SEQ ID NO: 854495 - RNA, 20 nt, Human
gacuggcaccaugucccggc

SEQ ID NO: 854496 - RNA, 22 nt, Human
gacugggguggguggcccgcag

SEQ ID NO: 854497 - RNA, 18 nt, Human
gagcccccaggcuuccac

SEQ ID NO: 854498 - RNA, 21 nt, Human
gaggccggggucccggcggcg

SEQ ID NO: 854499 - RNA, 24 nt, Human
gccagaaucagggacucagaagcu

SEQ ID NO: 854500 - RNA, 25 nt, Human
gcccagggaccugguguguggcagc

SEQ ID NO: 854501 - RNA, 18 nt, Human
gcccaguccugaguuggg

SEQ ID NO: 854502 - RNA, 21 nt, Human
gcgcggccagaggccgggguc

SEQ ID NO: 854503 - RNA, 24 nt, Human
gcggcggggaaggggugcgacugg

SEQ ID NO: 854504 - RNA, 21 nt, Human
gcuccuggcccuuggucaugu

SEQ ID NO: 854505 - RNA, 21 nt, Human
ggccagaggccggggucccgg

SEQ ID NO: 854506 - RNA, 23 nt, Human
ggguggcccgaguggucugcagc

SEQ ID NO: 854507 - RNA, 22 nt, Human
uaccugggucgcaggcaaguua

SEQ ID NO: 854508 - RNA, 19 nt, Human
uagcuccagccccaggaac

SEQ ID NO: 854509 - RNA, 27 nt, Human
uagcuccagccccaggaacuacggccu

SEQ ID NO: 854510 - RNA, 31 nt, Human
uagucaagccuucuccccagccacaaguucu

SEQ ID NO: 854511 - RNA, 20 nt, Human
ucaaaaugcaccacuuuauu

SEQ ID NO: 854512 - RNA, 20 nt, Human
ucagccucacucccgguacc

SEQ ID NO: 854513 - RNA, 18 nt, Human
ucaggugugugcaagugg

SEQ ID NO: 854514 - RNA, 25 nt, Human
ucccagccuggcugcagcccggggc

SEQ ID NO: 854515 - RNA, 21 nt, Human
ucccgguaccugggucgcagg

SEQ ID NO: 854516 - RNA, 18 nt, Human
uccgugcacacggcacgc

SEQ ID NO: 854517 - RNA, 18 nt, Human
uccgugcacacggcacgc

SEQ ID NO: 854518 - RNA, 21 nt, Human
uccuggacuagcuccagcccc

SEQ ID NO: 854519 - RNA, 21 nt, Human
ucuggcccugcccagggaccu

SEQ ID NO: 854520 - RNA, 21 nt, Human
ucugggugaggguggcccgag

SEQ ID NO: 854521 - RNA, 19 nt, Human
ugaggggcacaggcccgag

SEQ ID NO: 854522 - RNA, 18 nt, Human
ugcccagggaccuggugu

SEQ ID NO: 854523 - RNA, 23 nt, Human
ugcgacuggcaccaugucccggg

SEQ ID NO: 854524 - RNA, 19 nt, Human
uggcccgcagccccggaag

SEQ ID NO: 854525 - RNA, 23 nt, Human
ugggagcuccuggacagaggagu

SEQ ID NO: 854526 - RNA, 20 nt, Human
ugggccacccaggagcccag

SEQ ID NO: 854527 - RNA, 21 nt, Human
ugggguggguggcccgcagcc

SEQ ID NO: 854528 - RNA, 19 nt, Human
ugucugucauuuucuucuc

SEQ ID NO: 854529 - RNA, 20 nt, Human
uguucaaaucgaggguguug

SEQ ID NO: 854530 - RNA, 22 nt, Human
uucuuugucgucguauguuugc

SEQ ID NO: 854531 - RNA, 18 nt, Human
uugagcacggccuccucc

SEQ ID NO: 854532 - RNA, 23 nt, Human
uugaugcuuggguuacugaacac

SEQ ID NO: 854533 - RNA, 24 nt, Human
uugaugcuuggguuacugaacaca

SEQ ID NO: 854534 - RNA, 20 nt, Human
uuguacugcacccccuuggc

SEQ ID NO: 854535 - RNA, 26 nt, Human
uuuuuauucaaaaugcaccacuuuau

SEQ ID NO: 854536 - RNA, 24 nt, Human
uuuuuuuuuuuuuuuuucacauuu

SEQ ID NO: 854537 - RNA, 27 nt, Human
uuuuuuuuuuuuuuuuuucacauuuaa

SEQ ID NO: 854538 - RNA, 21 nt, Human
aacccccaaaucagugcuccu

SEQ ID NO: 854539 - RNA, 21 nt, Human
aagaguccuucuuuccaggug

SEQ ID NO: 854540 - RNA, 21 nt, Human
aagugacgcccagagaagggg

SEQ ID NO: 854541 - RNA, 21 nt, Human
acacagaaucuggccccccuu

SEQ ID NO: 854542 - RNA, 25 nt, Human
acacagaaucuggccccccuuugca

SEQ ID NO: 854543 - RNA, 20 nt, Human
acccucaaaacccccaaauc

SEQ ID NO: 854544 - RNA, 19 nt, Human
acuaggcuucuaaacuaaa

SEQ ID NO: 854545 - RNA, 21 nt, Human
acuccaggcucaggucuccca

SEQ ID NO: 854546 - RNA, 18 nt, Human
acuguacagaugaggaaa

SEQ ID NO: 854547 - RNA, 24 nt, Human
agaaacacacagaaucuggccccc

SEQ ID NO: 854548 - RNA, 19 nt, Human
agacacagagucucugacc

SEQ ID NO: 854549 - RNA, 26 nt, Human
agagaaacacacagaaucuggccccc

SEQ ID NO: 854550 - RNA, 21 nt, Human
agcuagaagcugaacuggguc

SEQ ID NO: 854551 - RNA, 20 nt, Human
aggaaugagagggcucauca

SEQ ID NO: 854552 - RNA, 19 nt, Human
aggaguggggagagugagg

SEQ ID NO: 854553 - RNA, 21 nt, Human
aggcagggccucaugggucug

SEQ ID NO: 854554 - RNA, 21 nt, Human
aggccuccgggccggcgaccc

SEQ ID NO: 854555 - RNA, 23 nt, Human
agggacuugggccucucacuggc

SEQ ID NO: 854556 - RNA, 18 nt, Human
agggagugggggucauag

SEQ ID NO: 854557 - RNA, 19 nt, Human
agggagugggggucaugag

SEQ ID NO: 854558 - RNA, 18 nt, Human
auagaaaccaucuuccuu

SEQ ID NO: 854559 - RNA, 21 nt, Human
auagaugccccggggcucaga

SEQ ID NO: 854560 - RNA, 19 nt, Human
aucuggaccuccuguagag

SEQ ID NO: 854561 - RNA, 21 nt, Human
caaaacccccaaaucagugcu

SEQ ID NO: 854562 - RNA, 23 nt, Human
caaaacccccaaaucagugcucc

SEQ ID NO: 854563 - RNA, 20 nt, Human
caccgcugcccgcgcgccca

SEQ ID NO: 854564 - RNA, 23 nt, Human
cagacuccaggcucaggucuccc

SEQ ID NO: 854565 - RNA, 22 nt, Human
cagaggccaugaagggggagcc

SEQ ID NO: 854566 - RNA, 23 nt, Human
caggcucaggucucccagcugcu

SEQ ID NO: 854567 - RNA, 23 nt, Human
cagggaccaccugagucagacac

SEQ ID NO: 854568 - RNA, 20 nt, Human
caggucccagacgagaccag

SEQ ID NO: 854569 - RNA, 21 nt, Human
caggucccagacgagaccagg

SEQ ID NO: 854570 - RNA, 22 nt, Human
caucaggcuucccccauucccu

SEQ ID NO: 854571 - RNA, 20 nt, Human
ccaaccccuacuugacccuc

SEQ ID NO: 854572 - RNA, 21 nt, Human
ccaggcagggccucauggguc

SEQ ID NO: 854573 - RNA, 20 nt, Human
cccagagaaggggaacuguc

SEQ ID NO: 854574 - RNA, 21 nt, Human
cccccagacuccaggcucagg

SEQ ID NO: 854575 - RNA, 22 nt, Human
ccccucuucuaccuccgaaucc

SEQ ID NO: 854576 - RNA, 23 nt, Human
ccccucuucuaccuccgaauccu

SEQ ID NO: 854577 - RNA, 21 nt, Human
cccgcgcgcccaccaccuccg

SEQ ID NO: 854578 - RNA, 22 nt, Human
cccuucccagggcacucugcag

SEQ ID NO: 854579 - RNA, 20 nt, Human
ccgagcuacgcccgcucucc

SEQ ID NO: 854580 - RNA, 24 nt, Human
ccgcugcccgcgcgcccaccaccu

SEQ ID NO: 854581 - RNA, 19 nt, Human
ccggagcgcugggacuggc

SEQ ID NO: 854582 - RNA, 20 nt, Human
ccggagcgcugggacuggcg

SEQ ID NO: 854583 - RNA, 20 nt, Human
ccggcgcgggcccgccgcuc

SEQ ID NO: 854584 - RNA, 24 nt, Human
cgaauuaccccuuuugcauacaug

SEQ ID NO: 854585 - RNA, 23 nt, Human
cgcgcgcccaccaccuccggagc

SEQ ID NO: 854586 - RNA, 22 nt, Human
cucagagggacccaggcgacca

SEQ ID NO: 854587 - RNA, 22 nt, Human
cuggauccagagaagccacugu

SEQ ID NO: 854588 - RNA, 23 nt, Human
cuggccccccuuugguccccugg

SEQ ID NO: 854589 - RNA, 18 nt, Human
gaaaggaggaaugagagg

SEQ ID NO: 854590 - RNA, 22 nt, Human
gacauggagggggcacuuugug

SEQ ID NO: 854591 - RNA, 22 nt, Human
gaccaccugagucagacacaga

SEQ ID NO: 854592 - RNA, 24 nt, Human
gaccaggcagggccucaugggucu

SEQ ID NO: 854593 - RNA, 21 nt, Human
gagcgcugggacuggcgucuc

SEQ ID NO: 854594 - RNA, 23 nt, Human
gaggggggucuuuggaagcagag

SEQ ID NO: 854595 - RNA, 18 nt, Human
gaggguggugaaucugga

SEQ ID NO: 854596 - RNA, 18 nt, Human
gccauagcugggcaagga

SEQ ID NO: 854597 - RNA, 22 nt, Human
gcgcgcccaccaccuccggagc

SEQ ID NO: 854598 - RNA, 22 nt, Human
ggacuugggccucucacuggca

SEQ ID NO: 854599 - RNA, 20 nt, Human
ggaguggggagagugagggg

SEQ ID NO: 854600 - RNA, 24 nt, Human
gggagucaccaucgucauaauaaa

SEQ ID NO: 854601 - RNA, 23 nt, Human
gggcacuuugugaaugagagggg

SEQ ID NO: 854602 - RNA, 21 nt, Human
gggccauagcugggcaaggaa

SEQ ID NO: 854603 - RNA, 21 nt, Human
gggucuuuggaagcagagaaa

SEQ ID NO: 854604 - RNA, 19 nt, Human
gugaaucuggaccuccugu

SEQ ID NO: 854605 - RNA, 22 nt, Human
gugcagaggccaugaaggggga

SEQ ID NO: 854606 - RNA, 19 nt, Human
guggugggggagccuuuuc

SEQ ID NO: 854607 - RNA, 20 nt, Human
guguggaggugcagaggcca

SEQ ID NO: 854608 - RNA, 22 nt, Human
guuccaggcccccagacuccag

SEQ ID NO: 854609 - RNA, 20 nt, Human
uaaaacggggaaauucaaac

SEQ ID NO: 854610 - RNA, 29 nt, Human
uacaguaauuuuaaaaaagaaaaaaaaaa

SEQ ID NO: 854611 - RNA, 19 nt, Human
uacuugacccucaaaaccc

SEQ ID NO: 854612 - RNA, 18 nt, Human
uagaaaccaucuuccuuc

SEQ ID NO: 854613 - RNA, 18 nt, Human
ucaggaaugagagggaga

SEQ ID NO: 854614 - RNA, 21 nt, Human
uccagagaagccacugucccc

SEQ ID NO: 854615 - RNA, 21 nt, Human
ucccagcugcugucccagguc

SEQ ID NO: 854616 - RNA, 21 nt, Human
ucccaggucccagacgagacc

SEQ ID NO: 854617 - RNA, 23 nt, Human
ucccucucacagggagugggggu

SEQ ID NO: 854618 - RNA, 22 nt, Human
uccgaauccuccauaauugucc

SEQ ID NO: 854619 - RNA, 22 nt, Human
uccgccgaggagcaggccuccg

SEQ ID NO: 854620 - RNA, 18 nt, Human
ucggugguggugggggag

SEQ ID NO: 854621 - RNA, 18 nt, Human
ucucccagcugcuguccc

SEQ ID NO: 854622 - RNA, 24 nt, Human
ucucccagcugcugucccaggucc

SEQ ID NO: 854623 - RNA, 19 nt, Human
ucuccuagggacuugggcc

SEQ ID NO: 854624 - RNA, 20 nt, Human
ugagagggggccauagcugg

SEQ ID NO: 854625 - RNA, 21 nt, Human
ugagagggggccauagcugga

SEQ ID NO: 854626 - RNA, 22 nt, Human
ugagagggggccauagcugggc

SEQ ID NO: 854627 - RNA, 23 nt, Human
ugagagggggccauagcugggcc

SEQ ID NO: 854628 - RNA, 23 nt, Human
ugagauagaaaccaucuuccuuc

SEQ ID NO: 854629 - RNA, 21 nt, Human
ugaggaaagugacgcccagag

SEQ ID NO: 854630 - RNA, 25 nt, Human
ugcauacauggacacuuacuguaca

SEQ ID NO: 854631 - RNA, 19 nt, Human
ugcccaagggcuuccaagc

SEQ ID NO: 854632 - RNA, 23 nt, Human
uggaacagcugagggucaucagg

SEQ ID NO: 854633 - RNA, 21 nt, Human
uuccucucggugguggugggg

SEQ ID NO: 854634 - RNA, 19 nt, Human
uuggaagguagauguggaa

SEQ ID NO: 854635 - RNA, 21 nt, Human
uugggaguguggaggugcaga

SEQ ID NO: 854636 - RNA, 24 nt, Human
aaacacaggaggaauggacgagcc

SEQ ID NO: 854637 - RNA, 20 nt, Human
aaagaaaccccuagacaaaa

SEQ ID NO: 854638 - RNA, 22 nt, Human
aagagaccucucggcuccggcu

SEQ ID NO: 854639 - RNA, 24 nt, Human
aaucauucaaaaugcaaacuguaa

SEQ ID NO: 854640 - RNA, 24 nt, Human
agacaaaaauuuaaaaaccacagu

SEQ ID NO: 854641 - RNA, 22 nt, Human
agagugugggggggagcaacag

SEQ ID NO: 854642 - RNA, 21 nt, Human
aggaagcauagaagcucuuua

SEQ ID NO: 854643 - RNA, 22 nt, Human
agugugggggggagcaacagag

SEQ ID NO: 854644 - RNA, 22 nt, Human
aucacaaacuucagucccaugg

SEQ ID NO: 854645 - RNA, 21 nt, Human
auggucacaaagcuagagugg

SEQ ID NO: 854646 - RNA, 23 nt, Human
auuacauuuggaccacagugauu

SEQ ID NO: 854647 - RNA, 22 nt, Human
cacaaugaaugucuaccauuuc

SEQ ID NO: 854648 - RNA, 27 nt, Human
cagacugaacaggugacagacugagca

SEQ ID NO: 854649 - RNA, 23 nt, Human
cagcagaugcuguucuaaaaucc

SEQ ID NO: 854650 - RNA, 23 nt, Human
cauuuaggaaaccucugggccaa

SEQ ID NO: 854651 - RNA, 22 nt, Human
cgggggcccaggacaggcccgg

SEQ ID NO: 854652 - RNA, 22 nt, Human
cuccaccaccucccgcggcgcc

SEQ ID NO: 854653 - RNA, 25 nt, Human
cuccggcuaggccuccaccaccucc

SEQ ID NO: 854654 - RNA, 21 nt, Human
cuccguucacgucccuccuca

SEQ ID NO: 854655 - RNA, 26 nt, Human
cucucggcuccggcuaggccuccacc

SEQ ID NO: 854656 - RNA, 19 nt, Human
cuggagagacuccacggua

SEQ ID NO: 854657 - RNA, 19 nt, Human
gacaacagcaaaaggguaa

SEQ ID NO: 854658 - RNA, 19 nt, Human
gcaaacuguaaacacgaca

SEQ ID NO: 854659 - RNA, 21 nt, Human
gcacagaccgggggcccagga

SEQ ID NO: 854660 - RNA, 23 nt, Human
ggcccgggccgggcgcugcggcg

SEQ ID NO: 854661 - RNA, 23 nt, Human
gggagcaacagagaauguaagac

SEQ ID NO: 854662 - RNA, 19 nt, Human
gggcccaggacaggcccgg

SEQ ID NO: 854663 - RNA, 18 nt, Human
ggggacugggcgccggag

SEQ ID NO: 854664 - RNA, 18 nt, Human
ggucccuggguacaucau

SEQ ID NO: 854665 - RNA, 24 nt, Human
guagcauuaacacgggguuugcug

SEQ ID NO: 854666 - RNA, 25 nt, Human
uaaaaaagccaucacaaacuucagu

SEQ ID NO: 854667 - RNA, 23 nt, Human
uaaaauccccaaagaaaccccua

SEQ ID NO: 854668 - RNA, 20 nt, Human
uaagaugcaaagaaauuuuc

SEQ ID NO: 854669 - RNA, 20 nt, Human
uacaucauauauugucuuuc

SEQ ID NO: 854670 - RNA, 18 nt, Human
uaggccuccaccaccucc

SEQ ID NO: 854671 - RNA, 20 nt, Human
uauguguauguauguguggc

SEQ ID NO: 854672 - RNA, 22 nt, Human
ucauucaaaaugcaaacuguaa

SEQ ID NO: 854673 - RNA, 18 nt, Human
uccacgguagcucuagaa

SEQ ID NO: 854674 - RNA, 18 nt, Human
ucccauggucacaaagcu

SEQ ID NO: 854675 - RNA, 19 nt, Human
uccccaaagaaaccccuag

SEQ ID NO: 854676 - RNA, 24 nt, Human
uccccaaagaaaccccuagacaaa

SEQ ID NO: 854677 - RNA, 26 nt, Human
uccccaaagaaaccccuagacaaaaa

SEQ ID NO: 854678 - RNA, 24 nt, Human
ucuaaaauccccaaagaaaccccc

SEQ ID NO: 854679 - RNA, 21 nt, Human
ucuggucccuggguacaucau

SEQ ID NO: 854680 - RNA, 18 nt, Human
ugaaugucuaccauuucu

SEQ ID NO: 854681 - RNA, 20 nt, Human
ugacagacugagcaagagug

SEQ ID NO: 854682 - RNA, 21 nt, Human
ugagcaagaguguggggggga

SEQ ID NO: 854683 - RNA, 21 nt, Human
ugcggcccgggccgggcgcug

SEQ ID NO: 854684 - RNA, 24 nt, Human
ugcuguucuaaaauccccaaagaa

SEQ ID NO: 854685 - RNA, 22 nt, Human
ugggccaaauacuaaaacacag

SEQ ID NO: 854686 - RNA, 20 nt, Human
uguauguguggcucugggga

SEQ ID NO: 854687 - RNA, 21 nt, Human
ugucuaccauuucuaagaugc

SEQ ID NO: 854688 - RNA, 23 nt, Human
uguggcucuggggaucuggacac

SEQ ID NO: 854689 - RNA, 18 nt, Human
ugugggggggagcaacag

SEQ ID NO: 854690 - RNA, 20 nt, Human
uguguaagaauuacauuugg

SEQ ID NO: 854691 - RNA, 18 nt, Human
uguguauguguauguaug

SEQ ID NO: 854692 - RNA, 19 nt, Human
uguguauguguauguaugu

SEQ ID NO: 854693 - RNA, 20 nt, Human
uguguauguguauguaugug

SEQ ID NO: 854694 - RNA, 23 nt, Human
uucgccaagguugaccaccucca

SEQ ID NO: 854695 - RNA, 23 nt, Human
uuuagaauuaaaaaaauauuuau

SEQ ID NO: 854696 - RNA, 26 nt, Human
uuucuuaugggcaccucaacaggaau

SEQ ID NO: 854697 - RNA, 22 nt, Human
uuugcuggaaugccccucccua

SEQ ID NO: 854698 - RNA, 21 nt, Human
aaaacuugugaaauuucuaga

SEQ ID NO: 854699 - RNA, 24 nt, Human
aaacacacccaaagcccagugugc

SEQ ID NO: 854700 - RNA, 22 nt, Human
aaagcccagugugcucuacccc

SEQ ID NO: 854701 - RNA, 18 nt, Human
aaccuuggcuaacuucag

SEQ ID NO: 854702 - RNA, 19 nt, Human
aagaggaauccccccucaa

SEQ ID NO: 854703 - RNA, 18 nt, Human
aaggaaagggagaagcag

SEQ ID NO: 854704 - RNA, 18 nt, Human
aaggaaagggagaagcag

SEQ ID NO: 854705 - RNA, 20 nt, Human
aaggaaagggagaagcaggg

SEQ ID NO: 854706 - RNA, 24 nt, Human
acccaaagcccagugugcucuacc

SEQ ID NO: 854707 - RNA, 18 nt, Human
accggguccugggcgggu

SEQ ID NO: 854708 - RNA, 22 nt, Human
acuucugguuggcagcagcugc

SEQ ID NO: 854709 - RNA, 23 nt, Human
agaagcaggggagguucggggac

SEQ ID NO: 854710 - RNA, 23 nt, Human
agaaggaaagggagaagcagggg

SEQ ID NO: 854711 - RNA, 19 nt, Human
agacacgcgaacauguucc

SEQ ID NO: 854712 - RNA, 22 nt, Human
aggaaauaaauauuuccccaaa

SEQ ID NO: 854713 - RNA, 27 nt, Human
aggaaauaaauauuuccccaaagagga

SEQ ID NO: 854714 - RNA, 23 nt, Human
aggaauccccccucaauuacuuu

SEQ ID NO: 854715 - RNA, 22 nt, Human
aggcagugguuucuaccguccu

SEQ ID NO: 854716 - RNA, 25 nt, Human
aggcagugguuucuaccguccuuuc

SEQ ID NO: 854717 - RNA, 19 nt, Human
agggagaagcaggggaggu

SEQ ID NO: 854718 - RNA, 24 nt, Human
agggagaagcaggggagguucggg

SEQ ID NO: 854719 - RNA, 18 nt, Human
auaacacaaaagcaaccu

SEQ ID NO: 854720 - RNA, 27 nt, Human
augcaggaaauaaauauuuccccaaag

SEQ ID NO: 854721 - RNA, 24 nt, Human
auuuaucgagaagcauucggugcc

SEQ ID NO: 854722 - RNA, 18 nt, Human
caaaagcaaccuuggcua

SEQ ID NO: 854723 - RNA, 28 nt, Human
cagaaggaaagggagaagcaggggaggu

SEQ ID NO: 854724 - RNA, 23 nt, Human
cagugugcucuaccccaaaacuu

SEQ ID NO: 854725 - RNA, 21 nt, Human
cccaaagaggaauccccccuc

SEQ ID NO: 854726 - RNA, 19 nt, Human
cccaaagcccagugugcuc

SEQ ID NO: 854727 - RNA, 25 nt, Human
cccaaagcccagugugcucuacccc

SEQ ID NO: 854728 - RNA, 23 nt, Human
ccccaaaacuugugaaauuucua

SEQ ID NO: 854729 - RNA, 19 nt, Human
ccccgugccgugccgagcc

SEQ ID NO: 854730 - RNA, 24 nt, Human
ccgacggagaaauggacuccucuu

SEQ ID NO: 854731 - RNA, 20 nt, Human
ccggaacagaaggaaaggga

SEQ ID NO: 854732 - RNA, 20 nt, Human
cuuucagacuuaacaaauug

SEQ ID NO: 854733 - RNA, 22 nt, Human
gagaagcaggggagguucgggg

SEQ ID NO: 854734 - RNA, 18 nt, Human
gagcgauccucagccaga

SEQ ID NO: 854735 - RNA, 21 nt, Human
gcacacaggcgcagacacgcg

SEQ ID NO: 854736 - RNA, 21 nt, Human
uaacacaaaagcaaccuuggc

SEQ ID NO: 854737 - RNA, 24 nt, Human
uagauuuuuaccaacaggcaguuu

SEQ ID NO: 854738 - RNA, 21 nt, Human
ucagagaccauaaggggauuu

SEQ ID NO: 854739 - RNA, 19 nt, Human
ucagccagaaaacuggcug

SEQ ID NO: 854740 - RNA, 21 nt, Human
uccucagccagaaaacuggcu

SEQ ID NO: 854741 - RNA, 19 nt, Human
ucggggacgacggcgcucc

SEQ ID NO: 854742 - RNA, 21 nt, Human
ucuaauagauuuuuaccaaca

SEQ ID NO: 854743 - RNA, 21 nt, Human
ucuucucgcuccuguggaguu

SEQ ID NO: 854744 - RNA, 19 nt, Human
ugagaaacacacccaaagc

SEQ ID NO: 854745 - RNA, 22 nt, Human
ugagaaacacacccaaagccca

SEQ ID NO: 854746 - RNA, 19 nt, Human
ugaguguggcaccgggucc

SEQ ID NO: 854747 - RNA, 24 nt, Human
ugcaguacggugguuugcucuuga

SEQ ID NO: 854748 - RNA, 20 nt, Human
ugcucagagaccauaagggg

SEQ ID NO: 854749 - RNA, 25 nt, Human
uggcuaacuucaguaccuuauguaa

SEQ ID NO: 854750 - RNA, 20 nt, Human
uggcugcgcacacaggcgca

SEQ ID NO: 854751 - RNA, 24 nt, Human
uguuuuccucccuugcuuucuuua

SEQ ID NO: 854752 - RNA, 22 nt, Human
uucagacuuaacaaauuggagu

SEQ ID NO: 854753 - RNA, 23 nt, Human
uucuaccguccuuucucacugca

SEQ ID NO: 854754 - RNA, 23 nt, Human
uugcaguacggugguuugcucuu

SEQ ID NO: 854755 - RNA, 18 nt, Human
uugggcgcauguuuuccu

SEQ ID NO: 854756 - RNA, 26 nt, Human
uuucuagagucucaaaaaagugaaua

SEQ ID NO: 854757 - RNA, 18 nt, Human
uuuuuuuuuuuuaugggg

SEQ ID NO: 854758 - RNA, 30 nt, Human
uuuuuuuuuuuuuuuuuuuuuuuuaugggg

SEQ ID NO: 854759 - RNA, 23 nt, Human
agaggcugccuggaggaggcagc

SEQ ID NO: 854760 - RNA, 21 nt, Human
agaggucuaggggcccggggc

SEQ ID NO: 854761 - RNA, 19 nt, Human
aggucuaggggcccggggc

SEQ ID NO: 854762 - RNA, 25 nt, Human
caaccuccggaccccgccaagcccu

SEQ ID NO: 854763 - RNA, 21 nt, Human
cagcccgaggccacggucaca

SEQ ID NO: 854764 - RNA, 18 nt, Human
caggcgcgggcgcgggcc

SEQ ID NO: 854765 - RNA, 24 nt, Human
ccacggucacaggucccaacgucc

SEQ ID NO: 854766 - RNA, 20 nt, Human
cccgccaagcccugcggccg

SEQ ID NO: 854767 - RNA, 20 nt, Human
ccuccggaccccgccaagcc

SEQ ID NO: 854768 - RNA, 20 nt, Human
ccucgggggucgccgggcug

SEQ ID NO: 854769 - RNA, 21 nt, Human
ccugcggccgccucagggcca

SEQ ID NO: 854770 - RNA, 22 nt, Human
ccuguaaucuccgagcccagac

SEQ ID NO: 854771 - RNA, 18 nt, Human
cggcugcgggggcgaggu

SEQ ID NO: 854772 - RNA, 24 nt, Human
cgggccccagaggcugccuggagg

SEQ ID NO: 854773 - RNA, 23 nt, Human
cgggcgcgggccccagaggcugc

SEQ ID NO: 854774 - RNA, 23 nt, Human
cucagggccaugcgucccucgcu

SEQ ID NO: 854775 - RNA, 21 nt, Human
cugcggccggcuuuggaagcc

SEQ ID NO: 854776 - RNA, 25 nt, Human
gagccgcagagccagcuagggacac

SEQ ID NO: 854777 - RNA, 22 nt, Human
gaggaggcagccucgaaggccc

SEQ ID NO: 854778 - RNA, 18 nt, Human
gcccugcggccgccucag

SEQ ID NO: 854779 - RNA, 21 nt, Human
gcuuuggaagcccagcccgag

SEQ ID NO: 854780 - RNA, 18 nt, Human
ggggaugggcagccugaa

SEQ ID NO: 854781 - RNA, 19 nt, Human
ucaaccuccggaccccgcc

SEQ ID NO: 854782 - RNA, 19 nt, Human
uccgagcccagacccggaa

SEQ ID NO: 854783 - RNA, 18 nt, Human
ucuccgagcccagacccg

SEQ ID NO: 854784 - RNA, 19 nt, Human
ucuccgagcccagacccgg

SEQ ID NO: 854785 - RNA, 18 nt, Human
ugagcaggcgcgggcgcg

SEQ ID NO: 854786 - RNA, 26 nt, Human
ugccuggaggaggcagccucgaaggc

SEQ ID NO: 854787 - RNA, 23 nt, Human
ugcgggggcgaggucaaccuccg

SEQ ID NO: 854788 - RNA, 18 nt, Human
uuuuuuuuuuuuuuuuug

SEQ ID NO: 854789 - RNA, 24 nt, Human
uuuuuuuuuuuuuuuuugacaaug

SEQ ID NO: 854790 - RNA, 19 nt, Human
acaaugguguugcuuucuc

SEQ ID NO: 854791 - RNA, 23 nt, Human
agagugcucccauggcaccaccc

SEQ ID NO: 854792 - RNA, 24 nt, Human
agguauguccugggugggggcgcu

SEQ ID NO: 854793 - RNA, 21 nt, Human
cacagccuggagcucccucuu

SEQ ID NO: 854794 - RNA, 26 nt, Human
cacccgaacgcucacuaccugagagc

SEQ ID NO: 854795 - RNA, 20 nt, Human
cccauggcaccacccgaacg

SEQ ID NO: 854796 - RNA, 23 nt, Human
cccccgcccgcaccuuccugagc

SEQ ID NO: 854797 - RNA, 18 nt, Human
ccccgcccgcaccuuccu

SEQ ID NO: 854798 - RNA, 18 nt, Human
cccgaacgcucacuaccu

SEQ ID NO: 854799 - RNA, 21 nt, Human
cccgcaccuuccugagcgcug

SEQ ID NO: 854800 - RNA, 26 nt, Human
ccguccagaccgcgucucccgaucau

SEQ ID NO: 854801 - RNA, 20 nt, Human
ccucccagcccgcccggccg

SEQ ID NO: 854802 - RNA, 24 nt, Human
ccucccagcccgcccggccgggcg

SEQ ID NO: 854803 - RNA, 24 nt, Human
ccucccggcguccggccgaaaacc

SEQ ID NO: 854804 - RNA, 21 nt, Human
ccugagcgcugggcucugggc

SEQ ID NO: 854805 - RNA, 24 nt, Human
ccugagcgcugggcucugggcugg

SEQ ID NO: 854806 - RNA, 21 nt, Human
cgccugaaaaacaaugguguu

SEQ ID NO: 854807 - RNA, 23 nt, Human
cggcucggcucgggggcaaaugg

SEQ ID NO: 854808 - RNA, 18 nt, Human
cggcucgggggcaaaugg

SEQ ID NO: 854809 - RNA, 25 nt, Human
cguccagaccgcgucucccgaucau

SEQ ID NO: 854810 - RNA, 27 nt, Human
cguccucauccucccagcccgcccggc

SEQ ID NO: 854811 - RNA, 21 nt, Human
cuuggguggcuggguccuccu

SEQ ID NO: 854812 - RNA, 18 nt, Human
gacccuuggguggcuggg

SEQ ID NO: 854813 - RNA, 24 nt, Human
gagaugggcaggccaagcaggcca

SEQ ID NO: 854814 - RNA, 19 nt, Human
gagcaaggacaggagggag

SEQ ID NO: 854815 - RNA, 26 nt, Human
gcaccacccgaacgcucacuaccuga

SEQ ID NO: 854816 - RNA, 18 nt, Human
gcaccuuccugagcgcug

SEQ ID NO: 854817 - RNA, 22 nt, Human
gcccgcaccuuccugagcgcug

SEQ ID NO: 854818 - RNA, 18 nt, Human
gcggcgccgcggaggccg

SEQ ID NO: 854819 - RNA, 20 nt, Human
ggaaagccacggcucggcuc

SEQ ID NO: 854820 - RNA, 18 nt, Human
ggacaggagggaggugug

SEQ ID NO: 854821 - RNA, 23 nt, Human
ggcaaauggaggcgccugaaaaa

SEQ ID NO: 854822 - RNA, 19 nt, Human
ggccgaaaacccuccugug

SEQ ID NO: 854823 - RNA, 23 nt, Human
ggcggaaguccagggcagccguc

SEQ ID NO: 854824 - RNA, 21 nt, Human
ggggaagguauguccugggug

SEQ ID NO: 854825 - RNA, 20 nt, Human
gggggcagcaccagccaggg

SEQ ID NO: 854826 - RNA, 19 nt, Human
ucccauggcaccacccgaa

SEQ ID NO: 854827 - RNA, 21 nt, Human
uccgagaugggcaggccaagc

SEQ ID NO: 854828 - RNA, 23 nt, Human
uccgcaggcgcccggcuccuuuc

SEQ ID NO: 854829 - RNA, 18 nt, Human
ucucccccgcccgcaccu

SEQ ID NO: 854830 - RNA, 19 nt, Human
ucuccgcaggcgcccggcu

SEQ ID NO: 854831 - RNA, 24 nt, Human
ucuccgcaggcgcccggcuccuuu

SEQ ID NO: 854832 - RNA, 18 nt, Human
uggguggcuggguccucc

SEQ ID NO: 854833 - RNA, 24 nt, Human
uggguggcuggguccuccuggaga

SEQ ID NO: 854834 - RNA, 25 nt, Human
uguccugggugggggcgcugaucag

SEQ ID NO: 854835 - RNA, 21 nt, Human
uguggcggcggaaguccaggg

SEQ ID NO: 854836 - RNA, 21 nt, Human
uuuacaaauggagcucacagc

SEQ ID NO: 854837 - RNA, 18 nt, Human
uuuuuuuuuuuuucacuu

SEQ ID NO: 854838 - RNA, 19 nt, Human
uuuuuuuuuuuuucacuug

SEQ ID NO: 854839 - RNA, 22 nt, Human
uuuuuuuuuuuuuuuuucacuu

SEQ ID NO: 854840 - RNA, 27 nt, Human
uuuuuuuuuuuuuuuuuucacuugauu

SEQ ID NO: 854841 - RNA, 26 nt, Human
uuuuuuuuuuuuuuuuuuucacuugg

SEQ ID NO: 854842 - RNA, 24 nt, Human
aaauauccaaagcaugacaaaaaa

SEQ ID NO: 854843 - RNA, 24 nt, Human
aacaaacaaaauauauauacugaa

SEQ ID NO: 854844 - RNA, 20 nt, Human
aacauggugagaucccaucu

SEQ ID NO: 854845 - RNA, 21 nt, Human
aacauggugagaucccaucuc

SEQ ID NO: 854846 - RNA, 19 nt, Human
aacccuccugugugugccu

SEQ ID NO: 854847 - RNA, 27 nt, Human
aagauacagaaucagauguucagaaag

SEQ ID NO: 854848 - RNA, 24 nt, Human
acaaaaaagaauaggacaccuaaa

SEQ ID NO: 854849 - RNA, 27 nt, Human
acagcagcagcagugauugccgggcuc

SEQ ID NO: 854850 - RNA, 18 nt, Human
acccugguaaauauaagg

SEQ ID NO: 854851 - RNA, 24 nt, Human
accuaaauggauauaaacacacca

SEQ ID NO: 854852 - RNA, 21 nt, Human
acgccuauaaucccagcaccu

SEQ ID NO: 854853 - RNA, 23 nt, Human
acgccuauaaucccagcaccuug

SEQ ID NO: 854854 - RNA, 24 nt, Human
agacacaguggcuuacgccuauaa

SEQ ID NO: 854855 - RNA, 24 nt, Human
agaucccaucucuaaaacaaacaa

SEQ ID NO: 854856 - RNA, 24 nt, Human
agcaccuugggaggccaagguggg

SEQ ID NO: 854857 - RNA, 20 nt, Human
agcagcagcagugauugcag

SEQ ID NO: 854858 - RNA, 19 nt, Human
agccugggcaacaugguga

SEQ ID NO: 854859 - RNA, 21 nt, Human
agccugggcaacauggugaga

SEQ ID NO: 854860 - RNA, 21 nt, Human
agccugggcaacauggugaga

SEQ ID NO: 854861 - RNA, 24 nt, Human
agccugggcaacauggugagaucc

SEQ ID NO: 854862 - RNA, 21 nt, Human
agcuagguccucuacuccugg

SEQ ID NO: 854863 - RNA, 20 nt, Human
aggacucuucugccaggccu

SEQ ID NO: 854864 - RNA, 18 nt, Human
aggaguucaagacuagcc

SEQ ID NO: 854865 - RNA, 20 nt, Human
aggccaaggugggaggauca

SEQ ID NO: 854866 - RNA, 24 nt, Human
aggccagacacaguggcuuacgcc

SEQ ID NO: 854867 - RNA, 24 nt, Human
aguggcuuacgccuauaaucccag

SEQ ID NO: 854868 - RNA, 23 nt, Human
auaaauccuugaaauauccaaag

SEQ ID NO: 854869 - RNA, 22 nt, Human
auaaucauacacuaggccagac

SEQ ID NO: 854870 - RNA, 22 nt, Human
augacaaaaaagaauaggacac

SEQ ID NO: 854871 - RNA, 21 nt, Human
caaagugcugcaaauuugaua

SEQ ID NO: 854872 - RNA, 22 nt, Human
caacauggugagaucccaucuc

SEQ ID NO: 854873 - RNA, 24 nt, Human
caacauggugagaucccaucucua

SEQ ID NO: 854874 - RNA, 23 nt, Human
cagaggacucuucugccaggccu

SEQ ID NO: 854875 - RNA, 21 nt, Human
cagcaccuugggaggccaagg

SEQ ID NO: 854876 - RNA, 24 nt, Human
cagcaccuugggaggccaaggugg

SEQ ID NO: 854877 - RNA, 21 nt, Human
cagcagcagcagugauugcag

SEQ ID NO: 854878 - RNA, 22 nt, Human
caggaccagaacauugcgugac

SEQ ID NO: 854879 - RNA, 24 nt, Human
cauggugagaucccaucucuaaaa

SEQ ID NO: 854880 - RNA, 19 nt, Human
ccaaagcaugacaaaaaag

SEQ ID NO: 854881 - RNA, 22 nt, Human
ccagaacauugcgugacucaug

SEQ ID NO: 854882 - RNA, 19 nt, Human
ccagcaccuugggaggcca

SEQ ID NO: 854883 - RNA, 24 nt, Human
cccaucucuaaaacaaacaaaaua

SEQ ID NO: 854884 - RNA, 22 nt, Human
ccccagaggacucuucugccag

SEQ ID NO: 854885 - RNA, 18 nt, Human
cccuccccgccuggcacc

SEQ ID NO: 854886 - RNA, 22 nt, Human
ccuauaaucccagcaccuuggg

SEQ ID NO: 854887 - RNA, 21 nt, Human
ccuccccgccuggcacccugc

SEQ ID NO: 854888 - RNA, 18 nt, Human
ccucucgcccccuccccg

SEQ ID NO: 854889 - RNA, 19 nt, Human
ccucucgcccccuccccgc

SEQ ID NO: 854890 - RNA, 23 nt, Human
ccugcagagugcauucuuugccu

SEQ ID NO: 854891 - RNA, 24 nt, Human
ccugggcaacauggugagauccca

SEQ ID NO: 854892 - RNA, 23 nt, Human
cgagcccaggaguucaagacuag

SEQ ID NO: 854893 - RNA, 19 nt, Human
cgagguuuuuuuuuuuuuu

SEQ ID NO: 854894 - RNA, 21 nt, Human
cgagguuuuuuuuuuuuuuuu

SEQ ID NO: 854895 - RNA, 21 nt, Human
cgccuauaaucccagcaccuu

SEQ ID NO: 854896 - RNA, 23 nt, Human
cgccuauaaucccagcaccuugg

SEQ ID NO: 854897 - RNA, 23 nt, Human
cuaaauggauauaaacacaccaa

SEQ ID NO: 854898 - RNA, 24 nt, Human
cuaggccagacacaguggcuuacg

SEQ ID NO: 854899 - RNA, 25 nt, Human
cuggaacccuccugugugugccuaa

SEQ ID NO: 854900 - RNA, 24 nt, Human
cuggccacagcaguuugucugcag

SEQ ID NO: 854901 - RNA, 23 nt, Human
cuggccucagaggggcccacugg

SEQ ID NO: 854902 - RNA, 23 nt, Human
cuuacgccuauaaucccagcacc

SEQ ID NO: 854903 - RNA, 19 nt, Human
gaacauugcgugacucaug

SEQ ID NO: 854904 - RNA, 28 nt, Human
gaacuaguuucaagcaaacugaaacuaa

SEQ ID NO: 854905 - RNA, 24 nt, Human
gaucauucgagcccaggaguucaa

SEQ ID NO: 854906 - RNA, 22 nt, Human
gcccaggaguucaagacuagcc

SEQ ID NO: 854907 - RNA, 20 nt, Human
gccuggcacccugcggcguc

SEQ ID NO: 854908 - RNA, 24 nt, Human
uaaauauaagguuucucuuccaca

SEQ ID NO: 854909 - RNA, 22 nt, Human
uagaaaaagacauccauaaagg

SEQ ID NO: 854910 - RNA, 24 nt, Human
uagaaaaagacauccauaaaggua

SEQ ID NO: 854911 - RNA, 23 nt, Human
ucauucgagcccaggaguucaag

SEQ ID NO: 854912 - RNA, 22 nt, Human
uccaaagcaugacaaaaaagaa

SEQ ID NO: 854913 - RNA, 25 nt, Human
uccuccccagaggacucuucugcca

SEQ ID NO: 854914 - RNA, 20 nt, Human
ugaaauauccaaagcaugac

SEQ ID NO: 854915 - RNA, 22 nt, Human
ugaaauauccaaagcaugacaa

SEQ ID NO: 854916 - RNA, 18 nt, Human
ugacagcagcagcaguga

SEQ ID NO: 854917 - RNA, 19 nt, Human
ugagcuuuuggcaaauuag

SEQ ID NO: 854918 - RNA, 25 nt, Human
ugauaauagcucagaaguacucuug

SEQ ID NO: 854919 - RNA, 18 nt, Human
ugcacacaugggaaaaag

SEQ ID NO: 854920 - RNA, 22 nt, Human
ugcacacaugggaaaaaggcca

SEQ ID NO: 854921 - RNA, 21 nt, Human
uggcuuacgccuauaauccca

SEQ ID NO: 854922 - RNA, 24 nt, Human
uggcuuacgccuauaaucccagca

SEQ ID NO: 854923 - RNA, 22 nt, Human
ugggaaaaaggccagucgcccc

SEQ ID NO: 854924 - RNA, 19 nt, Human
ugggaggccaaggugggag

SEQ ID NO: 854925 - RNA, 24 nt, Human
ugggaggccaaggugggaggauca

SEQ ID NO: 854926 - RNA, 19 nt, Human
uuaaagcuagguccucuac

SEQ ID NO: 854927 - RNA, 23 nt, Human
uucgagcccaggaguucaagacu

SEQ ID NO: 854928 - RNA, 24 nt, Human
uugggguccuccccagaggacucu

SEQ ID NO: 854929 - RNA, 19 nt, Human
uugguuuuaagagaucuag

SEQ ID NO: 854930 - RNA, 23 nt, Human
uuuaaagcuagguccucuacucc

SEQ ID NO: 854931 - RNA, 18 nt, Human
uuuuuuuuuuuuuuucug

SEQ ID NO: 854932 - RNA, 19 nt, Human
uuuuuuuuuuuuuuucugu

SEQ ID NO: 854933 - RNA, 19 nt, Human
aaaaacaccugaaacuagu

SEQ ID NO: 854934 - RNA, 23 nt, Human
aaaaacccaaauuauuugaccca

SEQ ID NO: 854935 - RNA, 26 nt, Human
aaaaacucgaaccaagcacauuggcc

SEQ ID NO: 854936 - RNA, 23 nt, Human
aaaaaucuucuuucccccuaaaa

SEQ ID NO: 854937 - RNA, 19 nt, Human
aaaagucaauuccuaaacc

SEQ ID NO: 854938 - RNA, 20 nt, Human
aaaauaacaacaacaacaaa

SEQ ID NO: 854939 - RNA, 24 nt, Human
aaacaccugaaacuaguggaaaaa

SEQ ID NO: 854940 - RNA, 23 nt, Human
aaacuccugagacacagcagucu

SEQ ID NO: 854941 - RNA, 23 nt, Human
aaacuccuggccucaagcaaucc

SEQ ID NO: 854942 - RNA, 19 nt, Human
aaagugcugggauuacagg

SEQ ID NO: 854943 - RNA, 24 nt, Human
aaagugcugggauuacaggcuuga

SEQ ID NO: 854944 - RNA, 26 nt, Human
aaauaccaaaaaacaaacaaacaaac

SEQ ID NO: 854945 - RNA, 26 nt, Human
aacaacaacaacaaaaaaaaaaacac

SEQ ID NO: 854946 - RNA, 24 nt, Human
aacaacaacaacaaaaaaaaaaag

SEQ ID NO: 854947 - RNA, 27 nt, Human
aacaacaacaacaacaacaaaaaaaaa

SEQ ID NO: 854948 - RNA, 21 nt, Human
aacacucuacuaccaaccaaa

SEQ ID NO: 854949 - RNA, 20 nt, Human
aagaaaagaguacuuacuaa

SEQ ID NO: 854950 - RNA, 22 nt, Human
aagaaaagaguacuuacuaaau

SEQ ID NO: 854951 - RNA, 24 nt, Human
aagcaauccuccugccuggccucc

SEQ ID NO: 854952 - RNA, 23 nt, Human
aagcuaauucaaauacacucauu

SEQ ID NO: 854953 - RNA, 19 nt, Human
aagugcugggauuacaggc

SEQ ID NO: 854954 - RNA, 19 nt, Human
aagugcugggauuacaggc

SEQ ID NO: 854955 - RNA, 26 nt, Human
aagugcugggauuacaggcuugagcu

SEQ ID NO: 854956 - RNA, 18 nt, Human
aauugcuugagccuggga

SEQ ID NO: 854957 - RNA, 24 nt, Human
aauugcuugagccugggaggucga

SEQ ID NO: 854958 - RNA, 24 nt, Human
acaaacaaacaaacaaacaaaaaa

SEQ ID NO: 854959 - RNA, 24 nt, Human
acaacaaaaaaaaaaacaccugaa

SEQ ID NO: 854960 - RNA, 26 nt, Human
acaacaacaaaaaaaaaaacaccuga

SEQ ID NO: 854961 - RNA, 19 nt, Human
acaacaacaacaacaaaaa

SEQ ID NO: 854962 - RNA, 19 nt, Human
acaacaacaacaacaacaa

SEQ ID NO: 854963 - RNA, 20 nt, Human
acaacaacaacaacaacaaa

SEQ ID NO: 854964 - RNA, 21 nt, Human
acaaucaccaaaugcaaauau

SEQ ID NO: 854965 - RNA, 23 nt, Human
acacagcagucuucagugcauuc

SEQ ID NO: 854966 - RNA, 20 nt, Human
accaaaaaacaaacaaacaa

SEQ ID NO: 854967 - RNA, 22 nt, Human
accaauguacuccagccugggc

SEQ ID NO: 854968 - RNA, 26 nt, Human
accaauguacuccagccugggcaaca

SEQ ID NO: 854969 - RNA, 23 nt, Human
acuauguugcccaggcuggucuc

SEQ ID NO: 854970 - RNA, 25 nt, Human
acuauguugcccaggcuggucucaa

SEQ ID NO: 854971 - RNA, 23 nt, Human
agaaacuccugagacacagcagu

SEQ ID NO: 854972 - RNA, 24 nt, Human
agaaauuagaaguuacgucuaacu

SEQ ID NO: 854973 - RNA, 22 nt, Human
agaauugcuugagccugggagg

SEQ ID NO: 854974 - RNA, 19 nt, Human
agauagccaguaggaauag

SEQ ID NO: 854975 - RNA, 22 nt, Human
agcaauccuccugccuggccuc

SEQ ID NO: 854976 - RNA, 24 nt, Human
agccugggcaacagagcaggacuc

SEQ ID NO: 854977 - RNA, 21 nt, Human
agcuacaaacacucuacuacc

SEQ ID NO: 854978 - RNA, 24 nt, Human
aggcugagguaggagaauugcuug

SEQ ID NO: 854979 - RNA, 24 nt, Human
agguaggagaauugcuugagccug

SEQ ID NO: 854980 - RNA, 19 nt, Human
aggucgaggcugcagugaa

SEQ ID NO: 854981 - RNA, 22 nt, Human
aggucuuacuauguugcccagg

SEQ ID NO: 854982 - RNA, 24 nt, Human
agugcugggauuacaggcuugagc

SEQ ID NO: 854983 - RNA, 22 nt, Human
aguucaaaauaacaacaacaac

SEQ ID NO: 854984 - RNA, 22 nt, Human
auaacaacaacaacaacaaaac

SEQ ID NO: 854985 - RNA, 24 nt, Human
auaacaacaacaacaacaacaaaa

SEQ ID NO: 854986 - RNA, 22 nt, Human
auaccaaaaaacaaacaaacaa

SEQ ID NO: 854987 - RNA, 24 nt, Human
aucacaccaauguacuccagccug

SEQ ID NO: 854988 - RNA, 24 nt, Human
auccuauagucccaguuacucagg

SEQ ID NO: 854989 - RNA, 19 nt, Human
augcagaugcacucaauuu

SEQ ID NO: 854990 - RNA, 22 nt, Human
auuaaaaaucuucuuucccccu

SEQ ID NO: 854991 - RNA, 18 nt, Human
caaacacucuacuaccaa

SEQ ID NO: 854992 - RNA, 23 nt, Human
caaagugcugggauuacaggcuu

SEQ ID NO: 854993 - RNA, 19 nt, Human
caacaaaaaaaaaaacacc

SEQ ID NO: 854994 - RNA, 23 nt, Human
caacaaaaaaaaaaacaccugaa

SEQ ID NO: 854995 - RNA, 23 nt, Human
caacaaaaaaaaaaacaccugaa

SEQ ID NO: 854996 - RNA, 20 nt, Human
caacaacaacaacaacaaaa

SEQ ID NO: 854997 - RNA, 25 nt, Human
caagagaaacuccugagacacagca

SEQ ID NO: 854998 - RNA, 26 nt, Human
caagcaauccuccugccuggccuccc

SEQ ID NO: 854999 - RNA, 26 nt, Human
caagcaauccuccugccuggccuccc

SEQ ID NO: 855000 - RNA, 19 nt, Human
caauccuccugccuggccu

SEQ ID NO: 855001 - RNA, 19 nt, Human
caauguacuccagccuggg

SEQ ID NO: 855002 - RNA, 22 nt, Human
caauguacuccagccugggcaa

SEQ ID NO: 855003 - RNA, 23 nt, Human
caauguacuccagccugggcaac

SEQ ID NO: 855004 - RNA, 24 nt, Human
caauguacuccagccugggcaaca

SEQ ID NO: 855005 - RNA, 25 nt, Human
caauguacuccagccugggcaacaa

SEQ ID NO: 855006 - RNA, 24 nt, Human
cacauaaaauuuagcugaaucaaa

SEQ ID NO: 855007 - RNA, 24 nt, Human
caccaauguacuccagccugggca

SEQ ID NO: 855008 - RNA, 26 nt, Human
caccaauguacuccagccugggcaac

SEQ ID NO: 855009 - RNA, 19 nt, Human
cacccauggccgacaccau

SEQ ID NO: 855010 - RNA, 23 nt, Human
caccugaaacuaguggaaaaaac

SEQ ID NO: 855011 - RNA, 24 nt, Human
caggccgcuagccccccgcuuccu

SEQ ID NO: 855012 - RNA, 24 nt, Human
caguuacucaggaggcugagguag

SEQ ID NO: 855013 - RNA, 19 nt, Human
ccaaagugcugggauuaca

SEQ ID NO: 855014 - RNA, 22 nt, Human
ccaaagugcugggauuacaggc

SEQ ID NO: 855015 - RNA, 23 nt, Human
ccaaagugcugggauuacaggcu

SEQ ID NO: 855016 - RNA, 21 nt, Human
ccaauguacuccagccugggc

SEQ ID NO: 855017 - RNA, 23 nt, Human
ccaauguacuccagccugggcaa

SEQ ID NO: 855018 - RNA, 24 nt, Human
ccaauguacuccagccugggcaac

SEQ ID NO: 855019 - RNA, 20 nt, Human
ccagauaagcuacaaacacu

SEQ ID NO: 855020 - RNA, 24 nt, Human
cccaaagugcugggauuacaggcu

SEQ ID NO: 855021 - RNA, 23 nt, Human
cccauggccgacaccaugcuacc

SEQ ID NO: 855022 - RNA, 27 nt, Human
cccauggccgacaccaugcuaccuugu

SEQ ID NO: 855023 - RNA, 19 nt, Human
cccccuaaaauacuuuaaa

SEQ ID NO: 855024 - RNA, 20 nt, Human
cccccuuccaguuccaaaag

SEQ ID NO: 855025 - RNA, 21 nt, Human
cccuccuauuuuaaauuaaaa

SEQ ID NO: 855026 - RNA, 24 nt, Human
cccuccuauuuuaaauuaaaaacc

SEQ ID NO: 855027 - RNA, 22 nt, Human
ccgacaccaugcuaccuucacu

SEQ ID NO: 855028 - RNA, 21 nt, Human
ccuauagucccaguuacucag

SEQ ID NO: 855029 - RNA, 20 nt, Human
ccugccuggccucccaaagu

SEQ ID NO: 855030 - RNA, 18 nt, Human
ccuggccucaagcaaucc

SEQ ID NO: 855031 - RNA, 22 nt, Human
ccugggcaacagagcaggacuc

SEQ ID NO: 855032 - RNA, 21 nt, Human
ccuuccagcaugaaauucuga

SEQ ID NO: 855033 - RNA, 18 nt, Human
cgccaggccgcuagcccc

SEQ ID NO: 855034 - RNA, 22 nt, Human
cuauacaauucuucuugcuccg

SEQ ID NO: 855035 - RNA, 23 nt, Human
cucaagcaauccuccugccuggc

SEQ ID NO: 855036 - RNA, 18 nt, Human
cucaggaggcugagguag

SEQ ID NO: 855037 - RNA, 20 nt, Human
cucauuaggcucagaaacaa

SEQ ID NO: 855038 - RNA, 21 nt, Human
cucauuuuuuucaugccacau

SEQ ID NO: 855039 - RNA, 23 nt, Human
cugccuggccucccaaagugcug

SEQ ID NO: 855040 - RNA, 18 nt, Human
cuggccucaagcaauccu

SEQ ID NO: 855041 - RNA, 20 nt, Human
cuucuugcuccgggacccgc

SEQ ID NO: 855042 - RNA, 27 nt, Human
gaaacuaguggaaaaaacuuccacagc

SEQ ID NO: 855043 - RNA, 21 nt, Human
gaaauaccaaaaaacaaacaa

SEQ ID NO: 855044 - RNA, 18 nt, Human
gaauaugauuccuccagu

SEQ ID NO: 855045 - RNA, 20 nt, Human
gacaggaaaguaagaucugg

SEQ ID NO: 855046 - RNA, 19 nt, Human
gaccagagguccucauuuu

SEQ ID NO: 855047 - RNA, 22 nt, Human
gagcaggacucuuuuuuggaaa

SEQ ID NO: 855048 - RNA, 23 nt, Human
gagguaggagaauugcuugagcc

SEQ ID NO: 855049 - RNA, 19 nt, Human
gauuacaggcuugagcuac

SEQ ID NO: 855050 - RNA, 21 nt, Human
gauuacaggcuugagcuacca

SEQ ID NO: 855051 - RNA, 27 nt, Human
gcaacagagcaggacucuuuuuuggaa

SEQ ID NO: 855052 - RNA, 21 nt, Human
gcccaaaucaagaaauacccc

SEQ ID NO: 855053 - RNA, 24 nt, Human
gccugggaggucgaggcugcagug

SEQ ID NO: 855054 - RNA, 20 nt, Human
gcuaguacccuuaagagcuc

SEQ ID NO: 855055 - RNA, 19 nt, Human
gcuccgggacccgcccgcc

SEQ ID NO: 855056 - RNA, 20 nt, Human
gcugcagaugagcuuucagu

SEQ ID NO: 855057 - RNA, 23 nt, Human
gcuggucucaaacuccuggccuc

SEQ ID NO: 855058 - RNA, 18 nt, Human
gcuugagcuaccacaccc

SEQ ID NO: 855059 - RNA, 24 nt, Human
ggcuggucucaaacuccuggccuc

SEQ ID NO: 855060 - RNA, 24 nt, Human
guacuccagccugggcaacagagc

SEQ ID NO: 855061 - RNA, 21 nt, Human
gugaagcacacauaaauguuu

SEQ ID NO: 855062 - RNA, 23 nt, Human
uaacaacaacaacaacaacaaaa

SEQ ID NO: 855063 - RNA, 21 nt, Human
uaagaguucuaccauggcuaa

SEQ ID NO: 855064 - RNA, 24 nt, Human
uaagcuacaaacacucuacuacca

SEQ ID NO: 855065 - RNA, 24 nt, Human
uaagcuacaaacacucuacuacca

SEQ ID NO: 855066 - RNA, 21 nt, Human
uaccaaaaaacaaacaaacaa

SEQ ID NO: 855067 - RNA, 22 nt, Human
uaccaaaaaacaaacaaacaaa

SEQ ID NO: 855068 - RNA, 23 nt, Human
uaccaaaaaacaaacaaacaaac

SEQ ID NO: 855069 - RNA, 23 nt, Human
uaccaaaaaacaaacaaacaaac

SEQ ID NO: 855070 - RNA, 24 nt, Human
uaccaaaaaacaaacaaacaaaca

SEQ ID NO: 855071 - RNA, 25 nt, Human
uaccaaaaaacaaacaaacaaacaa

SEQ ID NO: 855072 - RNA, 25 nt, Human
uaccaaaaaacaaacaaacaaacaa

SEQ ID NO: 855073 - RNA, 19 nt, Human
uaccacacccugccaugac

SEQ ID NO: 855074 - RNA, 24 nt, Human
uaccagauaagcuacaaacacucu

SEQ ID NO: 855075 - RNA, 23 nt, Human
uaccucauuaggcucagaaacaa

SEQ ID NO: 855076 - RNA, 19 nt, Human
uacuauguugcccaggcug

SEQ ID NO: 855077 - RNA, 21 nt, Human
uacuauguugcccaggcuggu

SEQ ID NO: 855078 - RNA, 27 nt, Human
uacuauguugcccaggcuggucucaaa

SEQ ID NO: 855079 - RNA, 23 nt, Human
uauguugcccaggcuggucucaa

SEQ ID NO: 855080 - RNA, 24 nt, Human
uauguugcccaggcuggucucaaa

SEQ ID NO: 855081 - RNA, 18 nt, Human
uauuaaguccagaucuuu

SEQ ID NO: 855082 - RNA, 22 nt, Human
uauucacuaaaaaacucgaacc

SEQ ID NO: 855083 - RNA, 21 nt, Human
ucacccauggccgacaccaug

SEQ ID NO: 855084 - RNA, 25 nt, Human
ucacuaaaaaacucgaaccaagcac

SEQ ID NO: 855085 - RNA, 18 nt, Human
ucacucuuuaaaauucca

SEQ ID NO: 855086 - RNA, 18 nt, Human
ucauauuucccuuuugcu

SEQ ID NO: 855087 - RNA, 20 nt, Human
ucauauuucccuuuugcuuc

SEQ ID NO: 855088 - RNA, 21 nt, Human
ucauugaauaugauuccucca

SEQ ID NO: 855089 - RNA, 24 nt, Human
ucccaaagugcugggauuacaggc

SEQ ID NO: 855090 - RNA, 25 nt, Human
ucuauccugcuaguacccuuaagag

SEQ ID NO: 855091 - RNA, 19 nt, Human
ucuuacuauguugcccagg

SEQ ID NO: 855092 - RNA, 23 nt, Human
ucuuacuauguugcccaggcugg

SEQ ID NO: 855093 - RNA, 24 nt, Human
ucuuacuauguugcccaggcuggu

SEQ ID NO: 855094 - RNA, 18 nt, Human
ugagccugggaggucgag

SEQ ID NO: 855095 - RNA, 24 nt, Human
ugagccugggaggucgaggcugca

SEQ ID NO: 855096 - RNA, 24 nt, Human
ugaggucuuacuauguugcccagg

SEQ ID NO: 855097 - RNA, 24 nt, Human
ugcccaggcuggucucaaacuccu

SEQ ID NO: 855098 - RNA, 19 nt, Human
ugcuuucauauuucccuuu

SEQ ID NO: 855099 - RNA, 22 nt, Human
uggagaugaggucuuacuaugu

SEQ ID NO: 855100 - RNA, 20 nt, Human
uggccucaagcaauccuccu

SEQ ID NO: 855101 - RNA, 21 nt, Human
uggccucaagcaauccuccug

SEQ ID NO: 855102 - RNA, 24 nt, Human
uggccucaagcaauccuccugccu

SEQ ID NO: 855103 - RNA, 18 nt, Human
ugggauuacaggcuugag

SEQ ID NO: 855104 - RNA, 19 nt, Human
ugggauuacaggcuugagc

SEQ ID NO: 855105 - RNA, 22 nt, Human
ugggauuacaggcuugagcuac

SEQ ID NO: 855106 - RNA, 24 nt, Human
ugggauuacaggcuugagcuacca

SEQ ID NO: 855107 - RNA, 21 nt, Human
uggggccacuuucuguaacuc

SEQ ID NO: 855108 - RNA, 22 nt, Human
uggggccacuuucuguaacuca

SEQ ID NO: 855109 - RNA, 22 nt, Human
uguacuccagccugggcaacag

SEQ ID NO: 855110 - RNA, 22 nt, Human
ugucuuccucucuaaagccucu

SEQ ID NO: 855111 - RNA, 19 nt, Human
ugugaagcacacauaaaug

SEQ ID NO: 855112 - RNA, 25 nt, Human
uguggagaugaggucuuacuauguu

SEQ ID NO: 855113 - RNA, 23 nt, Human
uuaaaaaucuucuuucccccuaa

SEQ ID NO: 855114 - RNA, 19 nt, Human
uuacuaaaugaucccaaau

SEQ ID NO: 855115 - RNA, 24 nt, Human
uucagaacauaaaaauaaauuucc

SEQ ID NO: 855116 - RNA, 26 nt, Human
uuccauuuacagauuucccccuucca

SEQ ID NO: 855117 - RNA, 21 nt, Human
uucccccuaaaauacuuuaaa

SEQ ID NO: 855118 - RNA, 23 nt, Human
uugaagguguuccucaaggacag

SEQ ID NO: 855119 - RNA, 23 nt, Human
uugcuugagccugggaggucgag

SEQ ID NO: 855120 - RNA, 24 nt, Human
uugcuugagccugggaggucgagg

SEQ ID NO: 855121 - RNA, 20 nt, Human
uuuaccagauaagcuacaaa

SEQ ID NO: 855122 - RNA, 20 nt, Human
uuucaugccacaugugaagc

SEQ ID NO: 855123 - RNA, 24 nt, Human
uuucccuuuugcuucuuuucuaga

SEQ ID NO: 855124 - RNA, 27 nt, Human
uuuuuuuuuuuuguggagaugaggucu

SEQ ID NO: 855125 - RNA, 22 nt, Human
uuuuuuuuuuuuuuuuuugugg

SEQ ID NO: 855126 - RNA, 27 nt, Human
aaaaaagaaauacaaagacugaaaaga

SEQ ID NO: 855127 - RNA, 30 nt, Human
aaaaaagaaauacaaagacugaaaagagaa

SEQ ID NO: 855128 - RNA, 23 nt, Human
aaaaagaaauacaaagacugaaa

SEQ ID NO: 855129 - RNA, 26 nt, Human
aaaacaagaaaaaagaaauacaaaga

SEQ ID NO: 855130 - RNA, 23 nt, Human
aaacaagaaaaaagaaauacaag

SEQ ID NO: 855131 - RNA, 22 nt, Human
aaaguguucaacaugagaaaau

SEQ ID NO: 855132 - RNA, 21 nt, Human
aacaagaaaaaagaaauacaa

SEQ ID NO: 855133 - RNA, 24 nt, Human
aaccaaaccucucaccaagcggcc

SEQ ID NO: 855134 - RNA, 26 nt, Human
aaccaaaccucucaccaagcggccca

SEQ ID NO: 855135 - RNA, 25 nt, Human
aagaaaaaagaaauacaaagacuga

SEQ ID NO: 855136 - RNA, 19 nt, Human
aaggagaaggccgggcaug

SEQ ID NO: 855137 - RNA, 19 nt, Human
aaguauaagaugaaggaac

SEQ ID NO: 855138 - RNA, 18 nt, Human
aauaaaacaagaaaaaag

SEQ ID NO: 855139 - RNA, 18 nt, Human
aauaagauuggggugccc

SEQ ID NO: 855140 - RNA, 24 nt, Human
acacgugaaauuugaaaacuguac

SEQ ID NO: 855141 - RNA, 19 nt, Human
accaggaucccaaaggaac

SEQ ID NO: 855142 - RNA, 20 nt, Human
agaaaaaagaaauacaaaga

SEQ ID NO: 855143 - RNA, 19 nt, Human
agaaggccgggcauggugg

SEQ ID NO: 855144 - RNA, 18 nt, Human
agaaugcucagaugcauc

SEQ ID NO: 855145 - RNA, 18 nt, Human
agaccuaacagacuaaca

SEQ ID NO: 855146 - RNA, 20 nt, Human
agacuuuucuagaauggggu

SEQ ID NO: 855147 - RNA, 21 nt, Human
agagaguuuauuuuauacagu

SEQ ID NO: 855148 - RNA, 21 nt, Human
aggcagagguaucaaaccaaa

SEQ ID NO: 855149 - RNA, 21 nt, Human
aggcuguguccacccagaauc

SEQ ID NO: 855150 - RNA, 23 nt, Human
aggcuguguccacccagaaucca

SEQ ID NO: 855151 - RNA, 21 nt, Human
agugguccagucugcagcccc

SEQ ID NO: 855152 - RNA, 28 nt, Human
auaaaacaagaaaaaagaaauacaaaga

SEQ ID NO: 855153 - RNA, 18 nt, Human
caaaccaaaccucucacc

SEQ ID NO: 855154 - RNA, 24 nt, Human
caaaccucucaccaagcggcccag

SEQ ID NO: 855155 - RNA, 24 nt, Human
caaggggcuuggccucucugcguc

SEQ ID NO: 855156 - RNA, 22 nt, Human
caauaaaacaagaaaaaagaaa

SEQ ID NO: 855157 - RNA, 24 nt, Human
caaugcaauaaaacaagaaaaaag

SEQ ID NO: 855158 - RNA, 18 nt, Human
cagguggcagaaaacaau

SEQ ID NO: 855159 - RNA, 23 nt, Human
caguggacaggaaaagaucucaa

SEQ ID NO: 855160 - RNA, 25 nt, Human
cccuccaucauugcuacuauucaac

SEQ ID NO: 855161 - RNA, 25 nt, Human
ccuaacagacuaacacgugaccacc

SEQ ID NO: 855162 - RNA, 20 nt, Human
ccucucgugacagcacaggc

SEQ ID NO: 855163 - RNA, 23 nt, Human
ccuuuggcugugugacccaaggc

SEQ ID NO: 855164 - RNA, 22 nt, Human
cuagaaaauccaaaagaccuaa

SEQ ID NO: 855165 - RNA, 28 nt, Human
gaaaaaagaaauacaaagacugaaaaga

SEQ ID NO: 855166 - RNA, 24 nt, Human
gaaggccgggcaugguggcucaca

SEQ ID NO: 855167 - RNA, 18 nt, Human
gacagugucuucuuuuug

SEQ ID NO: 855168 - RNA, 20 nt, Human
gaggggccuggguaccccuu

SEQ ID NO: 855169 - RNA, 23 nt, Human
gcccccaaccuuacugauggccu

SEQ ID NO: 855170 - RNA, 18 nt, Human
gcggcccaggaggggcag

SEQ ID NO: 855171 - RNA, 19 nt, Human
gcucauuuucaauuaaggc

SEQ ID NO: 855172 - RNA, 23 nt, Human
gcucauuuucaauuaaggcuaaa

SEQ ID NO: 855173 - RNA, 20 nt, Human
ggagccaccuagaagcuggc

SEQ ID NO: 855174 - RNA, 19 nt, Human
ggaguggaugggcagcucu

SEQ ID NO: 855175 - RNA, 22 nt, Human
ggcaugguggcucacaccugua

SEQ ID NO: 855176 - RNA, 18 nt, Human
ggccaccagcagggaccu

SEQ ID NO: 855177 - RNA, 22 nt, Human
ggccuggguaccccuuuugggg

SEQ ID NO: 855178 - RNA, 27 nt, Human
ggccuggguaccccuuuuggggaaacu

SEQ ID NO: 855179 - RNA, 20 nt, Human
gggcacacagaggaggggcc

SEQ ID NO: 855180 - RNA, 18 nt, Human
ggugcagugguccagucu

SEQ ID NO: 855181 - RNA, 24 nt, Human
guacuggaccuuccacaaccggag

SEQ ID NO: 855182 - RNA, 24 nt, Human
guggcagcuaaaguagcuucuuuu

SEQ ID NO: 855183 - RNA, 23 nt, Human
gugggaguggaugggcagcucuu

SEQ ID NO: 855184 - RNA, 20 nt, Human
gugugacccaaggcaagggg

SEQ ID NO: 855185 - RNA, 22 nt, Human
uaaaacaagaaaaaagaaauac

SEQ ID NO: 855186 - RNA, 23 nt, Human
uaaaacaagaaaaaagaaauaca

SEQ ID NO: 855187 - RNA, 22 nt, Human
uaacagacuaacacgugaccac

SEQ ID NO: 855188 - RNA, 20 nt, Human
uacacgugaaauuugaaaac

SEQ ID NO: 855189 - RNA, 18 nt, Human
uacaguaguuguacagua

SEQ ID NO: 855190 - RNA, 21 nt, Human
uagaacagcuugaaaauaaga

SEQ ID NO: 855191 - RNA, 18 nt, Human
uagaaugggguggcagcu

SEQ ID NO: 855192 - RNA, 24 nt, Human
uagcuucuuuuucuuucuuucaga

SEQ ID NO: 855193 - RNA, 23 nt, Human
ucagcauugucguguuuacuggc

SEQ ID NO: 855194 - RNA, 24 nt, Human
uccaaaagaccuaacagacuaaca

SEQ ID NO: 855195 - RNA, 25 nt, Human
uccaaaagaccuaacagacuaacac

SEQ ID NO: 855196 - RNA, 19 nt, Human
ucccuguugccucuggauc

SEQ ID NO: 855197 - RNA, 18 nt, Human
ucguguuuacugaaauac

SEQ ID NO: 855198 - RNA, 20 nt, Human
ucucgugacagcacaggccc

SEQ ID NO: 855199 - RNA, 20 nt, Human
ucugcagcccccaaccuuac

SEQ ID NO: 855200 - RNA, 23 nt, Human
ucugccuccuuuggcugugugac

SEQ ID NO: 855201 - RNA, 20 nt, Human
ucugcuccacggugcagugg

SEQ ID NO: 855202 - RNA, 23 nt, Human
ugacagcacaggcccaugagaca

SEQ ID NO: 855203 - RNA, 20 nt, Human
ugacccaaggcaaggggcuu

SEQ ID NO: 855204 - RNA, 21 nt, Human
ugacccaaggcaaggggcuug

SEQ ID NO: 855205 - RNA, 23 nt, Human
ugagaaaaugugauacauuugau

SEQ ID NO: 855206 - RNA, 21 nt, Human
ugagacgaagcuauuuagaac

SEQ ID NO: 855207 - RNA, 23 nt, Human
ugaggaaaaauguugucaggugg

SEQ ID NO: 855208 - RNA, 19 nt, Human
ugaggggagcugguccggg

SEQ ID NO: 855209 - RNA, 19 nt, Human
ugcagcuggggcacacaga

SEQ ID NO: 855210 - RNA, 25 nt, Human
ugccucuggaucugguugugaguuc

SEQ ID NO: 855211 - RNA, 18 nt, Human
uggagccaccuagaagcu

SEQ ID NO: 855212 - RNA, 18 nt, Human
uggcaggagggaggcaga

SEQ ID NO: 855213 - RNA, 18 nt, Human
uggcucacaccuguaguc

SEQ ID NO: 855214 - RNA, 18 nt, Human
uggcucacaccuguaguc

SEQ ID NO: 855215 - RNA, 20 nt, Human
uggcucacaccuguagucug

SEQ ID NO: 855216 - RNA, 19 nt, Human
uggcucugccuccuuuggc

SEQ ID NO: 855217 - RNA, 18 nt, Human
uggggcacacagaggagg

SEQ ID NO: 855218 - RNA, 23 nt, Human
uggggcacacagaggaggggccu

SEQ ID NO: 855219 - RNA, 24 nt, Human
uggggugggaguggaugggcagcu

SEQ ID NO: 855220 - RNA, 19 nt, Human
uguccauacuuuuugggaa

SEQ ID NO: 855221 - RNA, 20 nt, Human
ugucguguuuacugaaauac

SEQ ID NO: 855222 - RNA, 20 nt, Human
uuggugguacuggaccuucc

SEQ ID NO: 855223 - RNA, 18 nt, Human
uuguacaguaauugagga

SEQ ID NO: 855224 - RNA, 22 nt, Human
uuucagaaugcucagaugcauc

SEQ ID NO: 855225 - RNA, 20 nt, Human
uuugaggggagcugguccgg

SEQ ID NO: 855226 - RNA, 21 nt, Human
uuuuuuuuuuuuuuuuuccag

SEQ ID NO: 855227 - RNA, 24 nt, Human
uuuuuuuuuuuuuuuuuuccaggg

SEQ ID NO: 855228 - RNA, 24 nt, Human
aaagcacugggauuacaggcauga

SEQ ID NO: 855229 - RNA, 25 nt, Human
aagcaauccucccaccucagccucc

SEQ ID NO: 855230 - RNA, 26 nt, Human
aagcacugggauuacaggcaugagcc

SEQ ID NO: 855231 - RNA, 23 nt, Human
acacccggcacauuuuaaaaacg

SEQ ID NO: 855232 - RNA, 21 nt, Human
acagggcaggggagccccagg

SEQ ID NO: 855233 - RNA, 21 nt, Human
acagggccuggggucuguggg

SEQ ID NO: 855234 - RNA, 22 nt, Human
acccacccucucuccagaaccu

SEQ ID NO: 855235 - RNA, 24 nt, Human
accgucccuguuuucucuuccccu

SEQ ID NO: 855236 - RNA, 23 nt, Human
accucagccucccaaagcacugg

SEQ ID NO: 855237 - RNA, 22 nt, Human
acuggggacaugcacagggccu

SEQ ID NO: 855238 - RNA, 21 nt, Human
agacaggagacugaggcccca

SEQ ID NO: 855239 - RNA, 24 nt, Human
agacaggagacugaggccccagga

SEQ ID NO: 855240 - RNA, 18 nt, Human
agcaccuggcccgggacc

SEQ ID NO: 855241 - RNA, 18 nt, Human
agccaccgcaccuggccu

SEQ ID NO: 855242 - RNA, 18 nt, Human
agccuggagagugggcag

SEQ ID NO: 855243 - RNA, 19 nt, Human
agcgggacagauggugggg

SEQ ID NO: 855244 - RNA, 20 nt, Human
agcgggacagauggugggga

SEQ ID NO: 855245 - RNA, 26 nt, Human
agcuccauccacuccuggccgugcga

SEQ ID NO: 855246 - RNA, 19 nt, Human
aggccccaggaggggagga

SEQ ID NO: 855247 - RNA, 21 nt, Human
aggccccaggaggggaggagg

SEQ ID NO: 855248 - RNA, 23 nt, Human
agggaacccagcagccugucucu

SEQ ID NO: 855249 - RNA, 23 nt, Human
agggggcccgggagggcggcagg

SEQ ID NO: 855250 - RNA, 24 nt, Human
augccucagggcccccuccugcug

SEQ ID NO: 855251 - RNA, 24 nt, Human
caaagcacugggauuacaggcaug

SEQ ID NO: 855252 - RNA, 27 nt, Human
caagcaauccucccaccucagccuccc

SEQ ID NO: 855253 - RNA, 27 nt, Human
caagcaauccucccaccucagccuccc

SEQ ID NO: 855254 - RNA, 20 nt, Human
caagugauccucuugccuca

SEQ ID NO: 855255 - RNA, 22 nt, Human
caagugauccucuugccucagc

SEQ ID NO: 855256 - RNA, 23 nt, Human
cacaacggagaggggagugcuca

SEQ ID NO: 855257 - RNA, 18 nt, Human
cacagccucgcagcccuc

SEQ ID NO: 855258 - RNA, 22 nt, Human
cacccagcaucagcccgccucc

SEQ ID NO: 855259 - RNA, 23 nt, Human
caccuccugccugacacuggggg

SEQ ID NO: 855260 - RNA, 22 nt, Human
cagaaccugucgcugugccccg

SEQ ID NO: 855261 - RNA, 21 nt, Human
cagccucgaccuucugggcuc

SEQ ID NO: 855262 - RNA, 24 nt, Human
cagccucgaccuucugggcucaag

SEQ ID NO: 855263 - RNA, 24 nt, Human
cagcucccugcagccucgaccuuc

SEQ ID NO: 855264 - RNA, 19 nt, Human
caggagacugaggccccaa

SEQ ID NO: 855265 - RNA, 24 nt, Human
ccaaagcacugggauuacaggcau

SEQ ID NO: 855266 - RNA, 26 nt, Human
ccaccagcaccuggcccgggacccac

SEQ ID NO: 855267 - RNA, 24 nt, Human
ccagcagccugucucucugguccc

SEQ ID NO: 855268 - RNA, 21 nt, Human
ccaggcucgcgggagcugcug

SEQ ID NO: 855269 - RNA, 24 nt, Human
cccaaagcacugggauuacaggca

SEQ ID NO: 855270 - RNA, 21 nt, Human
cccagcaucagcccgccucca

SEQ ID NO: 855271 - RNA, 19 nt, Human
cccaggcuguccuccucgg

SEQ ID NO: 855272 - RNA, 18 nt, Human
ccccaggcuguccuccuc

SEQ ID NO: 855273 - RNA, 23 nt, Human
ccccaguggugguggccuggccu

SEQ ID NO: 855274 - RNA, 22 nt, Human
ccccgcgacagccuccuugcuc

SEQ ID NO: 855275 - RNA, 23 nt, Human
cccgccuccaccuggaggcccac

SEQ ID NO: 855276 - RNA, 23 nt, Human
cccggcuccggggaaaucgguuc

SEQ ID NO: 855277 - RNA, 23 nt, Human
cccucgaaccucggaggccccca

SEQ ID NO: 855278 - RNA, 18 nt, Human
ccgccacccacagccucg

SEQ ID NO: 855279 - RNA, 21 nt, Human
ccgggacccacccucucucca

SEQ ID NO: 855280 - RNA, 21 nt, Human
ccggggaaaucgguucccucc

SEQ ID NO: 855281 - RNA, 20 nt, Human
ccucccaaagcacugggauu

SEQ ID NO: 855282 - RNA, 24 nt, Human
ccucccaccucagccucccaaagc

SEQ ID NO: 855283 - RNA, 21 nt, Human
ccucccggcuccggggaaauc

SEQ ID NO: 855284 - RNA, 19 nt, Human
ccucgaaccucggaggccc

SEQ ID NO: 855285 - RNA, 21 nt, Human
ccucgaccuucugggcucaag

SEQ ID NO: 855286 - RNA, 20 nt, Human
ccucggaggcccccacgccc

SEQ ID NO: 855287 - RNA, 23 nt, Human
ccuggcccgggacccacccucuc

SEQ ID NO: 855288 - RNA, 21 nt, Human
ccuguuuucucuuccccucuc

SEQ ID NO: 855289 - RNA, 24 nt, Human
ccuucugggcucaagugauccucu

SEQ ID NO: 855290 - RNA, 23 nt, Human
cgauggggugggagacgggaugg

SEQ ID NO: 855291 - RNA, 20 nt, Human
cggcaugugcucugcauccc

SEQ ID NO: 855292 - RNA, 21 nt, Human
cggcaugugcucugcaucccc

SEQ ID NO: 855293 - RNA, 22 nt, Human
cggguugggccgaggagggggc

SEQ ID NO: 855294 - RNA, 21 nt, Human
cuacugcagcuccugcccugg

SEQ ID NO: 855295 - RNA, 24 nt, Human
cucaagcaauccucccaccucagc

SEQ ID NO: 855296 - RNA, 24 nt, Human
cucagcuucuuggguagcugggau

SEQ ID NO: 855297 - RNA, 19 nt, Human
cuccccaguggugguggcc

SEQ ID NO: 855298 - RNA, 18 nt, Human
cuccucgggcuugggggg

SEQ ID NO: 855299 - RNA, 21 nt, Human
cucggccccgcgacagccucc

SEQ ID NO: 855300 - RNA, 23 nt, Human
cugacgaugacgacacacccagc

SEQ ID NO: 855301 - RNA, 22 nt, Human
cugcagccucgaccuucugggc

SEQ ID NO: 855302 - RNA, 23 nt, Human
cugcugcacugggccagccgugc

SEQ ID NO: 855303 - RNA, 18 nt, Human
cuggcccagacuguccca

SEQ ID NO: 855304 - RNA, 20 nt, Human
cugggcucaagugauccucu

SEQ ID NO: 855305 - RNA, 22 nt, Human
cuggucucaagcaauccuccca

SEQ ID NO: 855306 - RNA, 21 nt, Human
gaaaucgguucccuccacugg

SEQ ID NO: 855307 - RNA, 23 nt, Human
gacccacccucucuccagaaccu

SEQ ID NO: 855308 - RNA, 23 nt, Human
gacgaugacgacacacccagcau

SEQ ID NO: 855309 - RNA, 24 nt, Human
gagugcagcagugugaucacagcu

SEQ ID NO: 855310 - RNA, 18 nt, Human
gauuacaggcaugagcca

SEQ ID NO: 855311 - RNA, 22 nt, Human
gauuacaggcaugagccaccgc

SEQ ID NO: 855312 - RNA, 23 nt, Human
gauuacaggcaugagccaccgca

SEQ ID NO: 855313 - RNA, 21 nt, Human
gcaccuggccugguuuagcuu

SEQ ID NO: 855314 - RNA, 18 nt, Human
gcagcuccauccacuccu

SEQ ID NO: 855315 - RNA, 22 nt, Human
gcagcuccauccacuccuggcc

SEQ ID NO: 855316 - RNA, 18 nt, Human
gccccaggcuugccuccc

SEQ ID NO: 855317 - RNA, 19 nt, Human
gccuaagccccgguuuccc

SEQ ID NO: 855318 - RNA, 24 nt, Human
gccucagcuucuuggguagcuggg

SEQ ID NO: 855319 - RNA, 24 nt, Human
gccuggggucuguggggacgugag

SEQ ID NO: 855320 - RNA, 19 nt, Human
ggagggggcccgggagggc

SEQ ID NO: 855321 - RNA, 22 nt, Human
ggauuacaggcaugagccaccg

SEQ ID NO: 855322 - RNA, 18 nt, Human
ggcccgggagggcggcag

SEQ ID NO: 855323 - RNA, 23 nt, Human
gggcacaacggagaggggagugc

SEQ ID NO: 855324 - RNA, 19 nt, Human
gggcagggaacccagcagc

SEQ ID NO: 855325 - RNA, 22 nt, Human
gggcucaagugauccucuugcc

SEQ ID NO: 855326 - RNA, 19 nt, Human
ggggacugggagccuggag

SEQ ID NO: 855327 - RNA, 22 nt, Human
gggggucuccugcugugccucu

SEQ ID NO: 855328 - RNA, 19 nt, Human
gggucuccugcugugccuc

SEQ ID NO: 855329 - RNA, 20 nt, Human
gggucuccugcugugccucu

SEQ ID NO: 855330 - RNA, 22 nt, Human
gggucuugcugugucacccagg

SEQ ID NO: 855331 - RNA, 22 nt, Human
ggguggcgauggggugggagac

SEQ ID NO: 855332 - RNA, 24 nt, Human
ggguucucggccccgcgacagccu

SEQ ID NO: 855333 - RNA, 24 nt, Human
gugauccucuugccucagcuucuu

SEQ ID NO: 855334 - RNA, 21 nt, Human
gugccgccuagagauggggug

SEQ ID NO: 855335 - RNA, 18 nt, Human
guggagauggggucuugc

SEQ ID NO: 855336 - RNA, 22 nt, Human
uacaggcaugagccaccgcacc

SEQ ID NO: 855337 - RNA, 21 nt, Human
uagagauggggugaccuggug

SEQ ID NO: 855338 - RNA, 22 nt, Human
uagagauggggugaccugguga

SEQ ID NO: 855339 - RNA, 19 nt, Human
ucaccagggcacguccccg

SEQ ID NO: 855340 - RNA, 20 nt, Human
ucagcuucuuggguagcugg

SEQ ID NO: 855341 - RNA, 24 nt, Human
uccaugaccucggccuaggccaag

SEQ ID NO: 855342 - RNA, 24 nt, Human
ucccaaagcacugggauuacaggc

SEQ ID NO: 855343 - RNA, 26 nt, Human
uccccaggcuguccuccucgggcuug

SEQ ID NO: 855344 - RNA, 23 nt, Human
ucccgccacccacagccucgcag

SEQ ID NO: 855345 - RNA, 22 nt, Human
ucccugcagccucgaccuucug

SEQ ID NO: 855346 - RNA, 23 nt, Human
ucccugcagccucgaccuucugg

SEQ ID NO: 855347 - RNA, 24 nt, Human
ucccugcagccucgaccuucuggg

SEQ ID NO: 855348 - RNA, 23 nt, Human
ucggaggcccccacgcccaauua

SEQ ID NO: 855349 - RNA, 18 nt, Human
ucgggcuugggggggucu

SEQ ID NO: 855350 - RNA, 24 nt, Human
ucucugugacugucacggccgccc

SEQ ID NO: 855351 - RNA, 22 nt, Human
ucucugugugugucaccguccc

SEQ ID NO: 855352 - RNA, 23 nt, Human
ucucugugugugucaccgucccu

SEQ ID NO: 855353 - RNA, 21 nt, Human
ucugcauccccaggcuguccu

SEQ ID NO: 855354 - RNA, 24 nt, Human
ucuggcucuguugcacaggcugga

SEQ ID NO: 855355 - RNA, 20 nt, Human
ucugggcucaagugauccuc

SEQ ID NO: 855356 - RNA, 18 nt, Human
ucugucccgggagguggc

SEQ ID NO: 855357 - RNA, 24 nt, Human
ucuguugcacaggcuggagugcag

SEQ ID NO: 855358 - RNA, 19 nt, Human
ucuugcugugucacccagg

SEQ ID NO: 855359 - RNA, 23 nt, Human
ucuugcugugucacccaggcugg

SEQ ID NO: 855360 - RNA, 24 nt, Human
ucuugcugugucacccaggcuggu

SEQ ID NO: 855361 - RNA, 24 nt, Human
ucuuggguagcugggaugacaggu

SEQ ID NO: 855362 - RNA, 20 nt, Human
ugaaaggcagcuccauccac

SEQ ID NO: 855363 - RNA, 19 nt, Human
ugaggccccaggaggggag

SEQ ID NO: 855364 - RNA, 19 nt, Human
ugaucacagcucccugcag

SEQ ID NO: 855365 - RNA, 20 nt, Human
ugcacagggccuggggucug

SEQ ID NO: 855366 - RNA, 18 nt, Human
ugcccgagguccagggca

SEQ ID NO: 855367 - RNA, 22 nt, Human
ugcccuggugccgcacuucugu

SEQ ID NO: 855368 - RNA, 21 nt, Human
ugccucagcuucuuggguagc

SEQ ID NO: 855369 - RNA, 22 nt, Human
ugccucagcuucuuggguagcu

SEQ ID NO: 855370 - RNA, 24 nt, Human
ugccucagcuucuuggguagcugg

SEQ ID NO: 855371 - RNA, 21 nt, Human
ugccucagggcccccuccugc

SEQ ID NO: 855372 - RNA, 21 nt, Human
ugccucagggcccccuccugc

SEQ ID NO: 855373 - RNA, 22 nt, Human
ugccucugucugcucuuccuuc

SEQ ID NO: 855374 - RNA, 21 nt, Human
ugcucacauggcgagcacacg

SEQ ID NO: 855375 - RNA, 23 nt, Human
ugcuggccaugccuccacugggg

SEQ ID NO: 855376 - RNA, 19 nt, Human
uggagugcagcagugugau

SEQ ID NO: 855377 - RNA, 20 nt, Human
uggccuggccugaccacggu

SEQ ID NO: 855378 - RNA, 18 nt, Human
uggcugucaccagggcac

SEQ ID NO: 855379 - RNA, 18 nt, Human
ugggauuacaggcaugag

SEQ ID NO: 855380 - RNA, 19 nt, Human
ugggauuacaggcaugagc

SEQ ID NO: 855381 - RNA, 21 nt, Human
ugggauuacaggcaugagcca

SEQ ID NO: 855382 - RNA, 22 nt, Human
ugggauuacaggcaugagccac

SEQ ID NO: 855383 - RNA, 23 nt, Human
ugggauuacaggcaugagccacc

SEQ ID NO: 855384 - RNA, 24 nt, Human
ugggauuacaggcaugagccaccg

SEQ ID NO: 855385 - RNA, 24 nt, Human
ugggauuacaggcaugagccaccg

SEQ ID NO: 855386 - RNA, 21 nt, Human
ugggccgaggagggggcccgg

SEQ ID NO: 855387 - RNA, 22 nt, Human
ugggccgaggagggggcccggg

SEQ ID NO: 855388 - RNA, 24 nt, Human
ugggcucaagugauccucuugccu

SEQ ID NO: 855389 - RNA, 23 nt, Human
uggggaccuggcuuccugccuaa

SEQ ID NO: 855390 - RNA, 24 nt, Human
uggggucuugcugugucacccagg

SEQ ID NO: 855391 - RNA, 19 nt, Human
uggggugggagacgggaug

SEQ ID NO: 855392 - RNA, 21 nt, Human
uggucucaagcaauccuccca

SEQ ID NO: 855393 - RNA, 20 nt, Human
ugguggggagacggcugggg

SEQ ID NO: 855394 - RNA, 25 nt, Human
ugguggggagacggcugggggggcu

SEQ ID NO: 855395 - RNA, 25 nt, Human
ugguuuagcuuuaaaaaaaaaaaaa

SEQ ID NO: 855396 - RNA, 19 nt, Human
ugucacccaggcuggucuc

SEQ ID NO: 855397 - RNA, 21 nt, Human
ugucacccaggcuggucucaa

SEQ ID NO: 855398 - RNA, 25 nt, Human
uguggagauggggucuugcuguguu

SEQ ID NO: 855399 - RNA, 23 nt, Human
ugugucacccaggcuggucucaa

SEQ ID NO: 855400 - RNA, 23 nt, Human
uuaacagacaggagacugaggcc

SEQ ID NO: 855401 - RNA, 23 nt, Human
uuauuuguauugagucagggucu

SEQ ID NO: 855402 - RNA, 18 nt, Human
uuccugccuaagccccgg

SEQ ID NO: 855403 - RNA, 21 nt, Human
uuggaccacaggacuggugug

SEQ ID NO: 855404 - RNA, 23 nt, Human
uuggguagcugggaugacaggug

SEQ ID NO: 855405 - RNA, 23 nt, Human
uuuaaaaaaaaaaaaaucuuucu

SEQ ID NO: 855406 - RNA, 18 nt, Human
uuuuuuuuuuuuuuuuug

SEQ ID NO: 855407 - RNA, 23 nt, Human
uuuuuuuuuuuuuuuuuugguuu

SEQ ID NO: 855408 - RNA, 24 nt, Human
aaaacaaaacaaaacaacaaaaaa

SEQ ID NO: 855409 - RNA, 25 nt, Human
aaaacaaaacaaaacaacaaaaaag

SEQ ID NO: 855410 - RNA, 23 nt, Human
aaaacaacaaaaaaaaacaaagg

SEQ ID NO: 855411 - RNA, 20 nt, Human
aaaacuucuccaaggcucuu

SEQ ID NO: 855412 - RNA, 25 nt, Human
aaacaaaacaaaacaaaacaacaaa

SEQ ID NO: 855413 - RNA, 19 nt, Human
aaacaaaacaaaacaacaa

SEQ ID NO: 855414 - RNA, 21 nt, Human
aaacaaaacaaaacaacaaaa

SEQ ID NO: 855415 - RNA, 22 nt, Human
aaacaaaacaacaaaaaaaaac

SEQ ID NO: 855416 - RNA, 24 nt, Human
aaacaaaacaacaaaaaaaaacaa

SEQ ID NO: 855417 - RNA, 25 nt, Human
aaacaaaacaacaaaaaaaaacaaa

SEQ ID NO: 855418 - RNA, 20 nt, Human
aaacaacaacaacaacaaaa

SEQ ID NO: 855419 - RNA, 22 nt, Human
aaacaacaacaacaacaacaac

SEQ ID NO: 855420 - RNA, 23 nt, Human
aacaacaacaaaaacaaaacaaa

SEQ ID NO: 855421 - RNA, 22 nt, Human
aacaacaacaacaaaaacaaaa

SEQ ID NO: 855422 - RNA, 24 nt, Human
aacaacaacaacaaaaacaaaaca

SEQ ID NO: 855423 - RNA, 22 nt, Human
aacaacaacaacaacaacaaaa

SEQ ID NO: 855424 - RNA, 22 nt, Human
acaaaacaaaacaaaacaacaa

SEQ ID NO: 855425 - RNA, 25 nt, Human
acaaaacaaaacaaaacaacaaaaa

SEQ ID NO: 855426 - RNA, 24 nt, Human
acaaaacaacaaaaaaaaacaaag

SEQ ID NO: 855427 - RNA, 27 nt, Human
acaaaacaacaaaaaaaaacaaagguc

SEQ ID NO: 855428 - RNA, 26 nt, Human
acaacaacaacaaaaacaaaacaaaa

SEQ ID NO: 855429 - RNA, 26 nt, Human
acaacaacaacaacaaaaacaaaaca

SEQ ID NO: 855430 - RNA, 27 nt, Human
acaacaacaacaacaaaaacaaaacaa

SEQ ID NO: 855431 - RNA, 19 nt, Human
acaacaacaacaacaacaa

SEQ ID NO: 855432 - RNA, 19 nt, Human
acaacaacaacaacaacaa

SEQ ID NO: 855433 - RNA, 22 nt, Human
acaacaacaacaacaacaaaaa

SEQ ID NO: 855434 - RNA, 25 nt, Human
acaacaacaacaacaacaaaaacaa

SEQ ID NO: 855435 - RNA, 24 nt, Human
acaacaacaacaacaacaacaaaa

SEQ ID NO: 855436 - RNA, 24 nt, Human
acagaaaaaaauaaaacuucucca

SEQ ID NO: 855437 - RNA, 25 nt, Human
agaaaaaaauaaaacuucuccaagg

SEQ ID NO: 855438 - RNA, 21 nt, Human
agaaccuucuccuuaaauacu

SEQ ID NO: 855439 - RNA, 22 nt, Human
agacauuggaugugcaaaagcc

SEQ ID NO: 855440 - RNA, 24 nt, Human
caaaaacaaaacaaaacaaaacaa

SEQ ID NO: 855441 - RNA, 26 nt, Human
caaaacaaaacaacaaaaaaaaacaa

SEQ ID NO: 855442 - RNA, 19 nt, Human
caaaacagggguccccugc

SEQ ID NO: 855443 - RNA, 21 nt, Human
caaaacagggguccccugcug

SEQ ID NO: 855444 - RNA, 22 nt, Human
caaaacagggguccccugcugg

SEQ ID NO: 855445 - RNA, 23 nt, Human
caacaaaaaaaaacaaagguccc

SEQ ID NO: 855446 - RNA, 24 nt, Human
caacaaaaaaaaacaaagguccca

SEQ ID NO: 855447 - RNA, 24 nt, Human
caacaaaaaaaaacaaagguccca

SEQ ID NO: 855448 - RNA, 26 nt, Human
caacaacaaaaacaaaacaaaacaaa

SEQ ID NO: 855449 - RNA, 27 nt, Human
caacaacaaaaacaaaacaaaacaaaa

SEQ ID NO: 855450 - RNA, 30 nt, Human
caacaacaaaaacaaaacaaaacaaaacaa

SEQ ID NO: 855451 - RNA, 18 nt, Human
caacaacaacaacaacaa

SEQ ID NO: 855452 - RNA, 23 nt, Human
caauccccaaccuccacauccaa

SEQ ID NO: 855453 - RNA, 24 nt, Human
cauaccacucucacucugcacguu

SEQ ID NO: 855454 - RNA, 18 nt, Human
caugcuguggcuguucau

SEQ ID NO: 855455 - RNA, 21 nt, Human
ccaaccuccacauccaauuuu

SEQ ID NO: 855456 - RNA, 24 nt, Human
ccacucucacucugcacguucuca

SEQ ID NO: 855457 - RNA, 19 nt, Human
cccaaccuccacauccaau

SEQ ID NO: 855458 - RNA, 23 nt, Human
cccccgaguaguauaaaaaugag

SEQ ID NO: 855459 - RNA, 21 nt, Human
cuagggagaagggagauccug

SEQ ID NO: 855460 - RNA, 22 nt, Human
cuccauaaaaaggcuucugggc

SEQ ID NO: 855461 - RNA, 22 nt, Human
cuucagcuuugcaggcugggac

SEQ ID NO: 855462 - RNA, 24 nt, Human
gccuagaaccuucuccuuaaauac

SEQ ID NO: 855463 - RNA, 22 nt, Human
gcugguaaacaacaacaacaac

SEQ ID NO: 855464 - RNA, 23 nt, Human
gugcuguugcuccacagcugaca

SEQ ID NO: 855465 - RNA, 18 nt, Human
uaaaaaggcuucugggca

SEQ ID NO: 855466 - RNA, 21 nt, Human
uagacaaaacagggguccccu

SEQ ID NO: 855467 - RNA, 22 nt, Human
uauucuuuccaaacagaaaaaa

SEQ ID NO: 855468 - RNA, 23 nt, Human
ucauaccacucucacucugcacg

SEQ ID NO: 855469 - RNA, 22 nt, Human
ucaugcugcuguuacugacugu

SEQ ID NO: 855470 - RNA, 26 nt, Human
uccacagcugacaaauaccauagaaa

SEQ ID NO: 855471 - RNA, 22 nt, Human
uccacaugacagcaaacagaac

SEQ ID NO: 855472 - RNA, 20 nt, Human
uccccaaccuccacauccaa

SEQ ID NO: 855473 - RNA, 22 nt, Human
ucucaauucugaaccacaugcu

SEQ ID NO: 855474 - RNA, 25 nt, Human
ucucuguaacaugccccaaugacuc

SEQ ID NO: 855475 - RNA, 26 nt, Human
ucuuuugccuggucuuuguucuugac

SEQ ID NO: 855476 - RNA, 18 nt, Human
ugaaccacaugcuuuaag

SEQ ID NO: 855477 - RNA, 19 nt, Human
ugacuguaguucccuccuu

SEQ ID NO: 855478 - RNA, 19 nt, Human
ugcucuggguauucuuucc

SEQ ID NO: 855479 - RNA, 22 nt, Human
ugggaaaagcauaucaaaaaca

SEQ ID NO: 855480 - RNA, 18 nt, Human
uggguuccugacuucagc

SEQ ID NO: 855481 - RNA, 23 nt, Human
uguaaaugcggcuugacauuucu

SEQ ID NO: 855482 - RNA, 23 nt, Human
uguucuugacauagacaaaacag

SEQ ID NO: 855483 - RNA, 21 nt, Human
uucacaguaaucucuuaacac

SEQ ID NO: 855484 - RNA, 21 nt, Human
uucagguagcuuacaggaaaa

SEQ ID NO: 855485 - RNA, 22 nt, Human
uuccugacuucagcuuugcagg

SEQ ID NO: 855486 - RNA, 23 nt, Human
uucggaagccuagaaccuucucc

SEQ ID NO: 855487 - RNA, 23 nt, Human
uucucaauucugaaccacaugcu

SEQ ID NO: 855488 - RNA, 19 nt, Human
uucuccaaggcucuuuucu

SEQ ID NO: 855489 - RNA, 18 nt, Human
uuuccuggucugaauuuc

SEQ ID NO: 855490 - RNA, 18 nt, Human
uuucucaucucuacaaug

SEQ ID NO: 855491 - RNA, 24 nt, Human
uuuguaaaugcggcuugacauuuc

SEQ ID NO: 855492 - RNA, 19 nt, Human
uuuucugaauuuuacugaa

SEQ ID NO: 855493 - RNA, 18 nt, Human
uuuuuuuuuuuuuugcgg

SEQ ID NO: 855494 - RNA, 18 nt, Human
uuuuuuuuuuuuuuuuug

SEQ ID NO: 855495 - RNA, 19 nt, Human
uuuuuuuuuuuuuuuuugc

SEQ ID NO: 855496 - RNA, 27 nt, Human
uuuuuuuuuuuuuuuuugcgguagggg

SEQ ID NO: 855497 - RNA, 25 nt, Human
uuuuuuuuuuuuuuuuuugcgguag

SEQ ID NO: 855498 - RNA, 22 nt, Human
agcccaaugagagacacagcuu

SEQ ID NO: 855499 - RNA, 22 nt, Human
agcucgcgguucucccugcagc

SEQ ID NO: 855500 - RNA, 22 nt, Human
aucccaccucuuuggagcccaa

SEQ ID NO: 855501 - RNA, 20 nt, Human
auggaagucacaccugcccc

SEQ ID NO: 855502 - RNA, 19 nt, Human
caccgggucucagugagcc

SEQ ID NO: 855503 - RNA, 21 nt, Human
caccugccccccggaggcaaa

SEQ ID NO: 855504 - RNA, 19 nt, Human
cccccggaggcaaagccuu

SEQ ID NO: 855505 - RNA, 19 nt, Human
ccccugagagcucgcgguu

SEQ ID NO: 855506 - RNA, 19 nt, Human
cccgcagagcgcguuccuc

SEQ ID NO: 855507 - RNA, 18 nt, Human
cgcagagcgcguuccucg

SEQ ID NO: 855508 - RNA, 22 nt, Human
cugagagcucgcgguucucccu

SEQ ID NO: 855509 - RNA, 20 nt, Human
cuggggccgcuuacuugugg

SEQ ID NO: 855510 - RNA, 20 nt, Human
gagcugcaggacagcuggcu

SEQ ID NO: 855511 - RNA, 18 nt, Human
gcagagcgcguuccucgc

SEQ ID NO: 855512 - RNA, 20 nt, Human
ggcugcacccagcccugggc

SEQ ID NO: 855513 - RNA, 19 nt, Human
uagacuguauauaagaaau

SEQ ID NO: 855514 - RNA, 19 nt, Human
uagacuuguccuucugggg

SEQ ID NO: 855515 - RNA, 23 nt, Human
ucaguucugugcuggucucccca

SEQ ID NO: 855516 - RNA, 20 nt, Human
ucccaccucuuuggagccca

SEQ ID NO: 855517 - RNA, 19 nt, Human
ucuggaccaccgggucuca

SEQ ID NO: 855518 - RNA, 21 nt, Human
ucuggaccaccgggucucagu

SEQ ID NO: 855519 - RNA, 22 nt, Human
ucugugcuggucuccccagagc

SEQ ID NO: 855520 - RNA, 22 nt, Human
ugaaauggaagucacaccugcc

SEQ ID NO: 855521 - RNA, 22 nt, Human
uggagcccaaugagagacacag

SEQ ID NO: 855522 - RNA, 24 nt, Human
uggcaggcacugaugaaauggaag

SEQ ID NO: 855523 - RNA, 21 nt, Human
ugugguuggggacuucggggc

SEQ ID NO: 855524 - RNA, 18 nt, Human
uucugugcuggucucccc

SEQ ID NO: 855525 - RNA, 21 nt, Human
uuuaaaaaaucccaccucuuu

SEQ ID NO: 855526 - RNA, 19 nt, Human
acagcagccccaaaggggc

SEQ ID NO: 855527 - RNA, 21 nt, Human
acccaauccguccaccagcgu

SEQ ID NO: 855528 - RNA, 23 nt, Human
agagcuggguccacuuuggcuuu

SEQ ID NO: 855529 - RNA, 23 nt, Human
auacuccuccucuucuuuggaga

SEQ ID NO: 855530 - RNA, 23 nt, Human
aucaacaccaacuccuugcaccc

SEQ ID NO: 855531 - RNA, 21 nt, Human
cagcagccccaaaggggcagg

SEQ ID NO: 855532 - RNA, 21 nt, Human
ccagcguccccuccaauuucc

SEQ ID NO: 855533 - RNA, 21 nt, Human
cccaggggagcccccuuugcc

SEQ ID NO: 855534 - RNA, 24 nt, Human
cccaguucuguaacuuucuccccu

SEQ ID NO: 855535 - RNA, 22 nt, Human
cuccuccaucaacaccaacucc

SEQ ID NO: 855536 - RNA, 19 nt, Human
cucuggcguccugcuccuc

SEQ ID NO: 855537 - RNA, 20 nt, Human
cuggguccacuuuggcuuug

SEQ ID NO: 855538 - RNA, 19 nt, Human
gaggggucccggcccuggc

SEQ ID NO: 855539 - RNA, 21 nt, Human
ggaauccgaggggucccggcc

SEQ ID NO: 855540 - RNA, 25 nt, Human
ggagcccccuuugcccacgguuccu

SEQ ID NO: 855541 - RNA, 23 nt, Human
gggcaggaaccugggaauccgag

SEQ ID NO: 855542 - RNA, 19 nt, Human
ggggaugaggaagcccacc

SEQ ID NO: 855543 - RNA, 22 nt, Human
ggggaugaggaagcccaccugg

SEQ ID NO: 855544 - RNA, 23 nt, Human
uccguccaccagcguccccucca

SEQ ID NO: 855545 - RNA, 22 nt, Human
ucucccagagagcuggguccac

SEQ ID NO: 855546 - RNA, 21 nt, Human
ucugaacgguuccagggcugg

SEQ ID NO: 855547 - RNA, 24 nt, Human
ucugaacgguuccagggcugggac

SEQ ID NO: 855548 - RNA, 23 nt, Human
uggagaugaagucagggacauag

SEQ ID NO: 855549 - RNA, 19 nt, Human
ugggaauccgagggguccc

SEQ ID NO: 855550 - RNA, 23 nt, Human
ugguauggggucuucuguagcuc

SEQ ID NO: 855551 - RNA, 18 nt, Human
uuggagaugaagucaggg

SEQ ID NO: 855552 - RNA, 21 nt, Human
uuggggcauuaaaaaccuguc

SEQ ID NO: 855553 - RNA, 26 nt, Human
uuuuuuuuuuuuuaaagauuuuuuug

SEQ ID NO: 855554 - RNA, 22 nt, Human
uuuuuuuuuuuuuuuuuuaaag

SEQ ID NO: 855555 - RNA, 22 nt, Human
aaaaagcuucaguuccugcuaa

SEQ ID NO: 855556 - RNA, 23 nt, Human
aaaauccuuuuaucggccugccu

SEQ ID NO: 855557 - RNA, 18 nt, Human
aaauaccaugccaauuca

SEQ ID NO: 855558 - RNA, 30 nt, Human
aaccugguggaugcuccaaaaucgaaccag

SEQ ID NO: 855559 - RNA, 20 nt, Human
aagguggggaaguuagaaaa

SEQ ID NO: 855560 - RNA, 19 nt, Human
acacaguacucuucagccu

SEQ ID NO: 855561 - RNA, 19 nt, Human
accgcagccuugcagagug

SEQ ID NO: 855562 - RNA, 20 nt, Human
agaagccgauuuguggacag

SEQ ID NO: 855563 - RNA, 24 nt, Human
agaggcaguuggccucuggcccua

SEQ ID NO: 855564 - RNA, 20 nt, Human
agcaguggaucucacuguua

SEQ ID NO: 855565 - RNA, 23 nt, Human
agccucagccccucaccgcagcc

SEQ ID NO: 855566 - RNA, 20 nt, Human
agccucugacccuuuacccu

SEQ ID NO: 855567 - RNA, 20 nt, Human
auucaaaauaccaugccaau

SEQ ID NO: 855568 - RNA, 20 nt, Human
caaaacacuaccaugaauaa

SEQ ID NO: 855569 - RNA, 23 nt, Human
caaaauaccaugccaauucagac

SEQ ID NO: 855570 - RNA, 24 nt, Human
caaaaucgaaccaaaacacuacca

SEQ ID NO: 855571 - RNA, 21 nt, Human
caccaggcagccagccucagc

SEQ ID NO: 855572 - RNA, 20 nt, Human
caccgcagccuugcagagug

SEQ ID NO: 855573 - RNA, 21 nt, Human
caccugaugaugagucaacca

SEQ ID NO: 855574 - RNA, 18 nt, Human
cacuaccaugaauaagag

SEQ ID NO: 855575 - RNA, 21 nt, Human
cacugucagggugcuggcacc

SEQ ID NO: 855576 - RNA, 22 nt, Human
cagagaagccgauuuguggaca

SEQ ID NO: 855577 - RNA, 23 nt, Human
caggagacauccacucaaaccac

SEQ ID NO: 855578 - RNA, 21 nt, Human
caguggaucucacuguuaucc

SEQ ID NO: 855579 - RNA, 18 nt, Human
caugaauaagagaugacu

SEQ ID NO: 855580 - RNA, 23 nt, Human
cauucaaaauaccaugccaauuc

SEQ ID NO: 855581 - RNA, 22 nt, Human
ccaaaauaaagacagagaucau

SEQ ID NO: 855582 - RNA, 23 nt, Human
ccaauucagacuuuuuuaaaaca

SEQ ID NO: 855583 - RNA, 24 nt, Human
ccaccaggcagccagccucagccc

SEQ ID NO: 855584 - RNA, 24 nt, Human
ccuaagugggccuuauacuaaaaa

SEQ ID NO: 855585 - RNA, 18 nt, Human
ccucaccgcagccuugca

SEQ ID NO: 855586 - RNA, 25 nt, Human
ccucccccaaaauaaagacagagau

SEQ ID NO: 855587 - RNA, 24 nt, Human
ccuuccugugaaacccaagucaaa

SEQ ID NO: 855588 - RNA, 18 nt, Human
cgauuuguggacagugcc

SEQ ID NO: 855589 - RNA, 20 nt, Human
cuaaaaagcuucaguuccug

SEQ ID NO: 855590 - RNA, 18 nt, Human
gaaacaccugaugaugag

SEQ ID NO: 855591 - RNA, 21 nt, Human
gaacagucccaagaaggccgg

SEQ ID NO: 855592 - RNA, 18 nt, Human
gaaguuagaaaaauagaa

SEQ ID NO: 855593 - RNA, 19 nt, Human
gacacugucagggugcugg

SEQ ID NO: 855594 - RNA, 23 nt, Human
gauuuguggacagugccacccuc

SEQ ID NO: 855595 - RNA, 21 nt, Human
gcaacccuagaggcaguuggc

SEQ ID NO: 855596 - RNA, 21 nt, Human
gcagagugggcucugcagaga

SEQ ID NO: 855597 - RNA, 23 nt, Human
gccuugcagagugggcucugcag

SEQ ID NO: 855598 - RNA, 22 nt, Human
gcuggcacccuaagugggccuu

SEQ ID NO: 855599 - RNA, 21 nt, Human
ggccccuucuaggugcagcug

SEQ ID NO: 855600 - RNA, 19 nt, Human
ggugcuggcacccuaagug

SEQ ID NO: 855601 - RNA, 19 nt, Human
guggaucucacuguuaucc

SEQ ID NO: 855602 - RNA, 20 nt, Human
guuggccucuggcccuagcc

SEQ ID NO: 855603 - RNA, 24 nt, Human
uaaaagcaccuucugauccuugac

SEQ ID NO: 855604 - RNA, 20 nt, Human
uaccaugaauaagagaugac

SEQ ID NO: 855605 - RNA, 26 nt, Human
uacuaaaaagcuucaguuccugcuaa

SEQ ID NO: 855606 - RNA, 20 nt, Human
uagaagacgggauccuugga

SEQ ID NO: 855607 - RNA, 22 nt, Human
uagcaggagcaggaucucaggc

SEQ ID NO: 855608 - RNA, 19 nt, Human
ucaaaccaccuguuacuga

SEQ ID NO: 855609 - RNA, 23 nt, Human
ucaccgcagccuugcagaguggg

SEQ ID NO: 855610 - RNA, 20 nt, Human
uccagcagcauucaaaauac

SEQ ID NO: 855611 - RNA, 23 nt, Human
ucccaccaggcagccagccucag

SEQ ID NO: 855612 - RNA, 20 nt, Human
ucccccaaaauaaagacaga

SEQ ID NO: 855613 - RNA, 22 nt, Human
ucucacuguuauccugugacug

SEQ ID NO: 855614 - RNA, 24 nt, Human
ugacugcacuccucugacacaacu

SEQ ID NO: 855615 - RNA, 22 nt, Human
ugcuccaaaaucgaaccaaaac

SEQ ID NO: 855616 - RNA, 24 nt, Human
uggaucucacuguuauccugugac

SEQ ID NO: 855617 - RNA, 19 nt, Human
uggcacccuaagugggccu

SEQ ID NO: 855618 - RNA, 22 nt, Human
uuacugaggcaccaagcaaccc

SEQ ID NO: 855619 - RNA, 23 nt, Human
uuauuacaguuccagcagcauuc

SEQ ID NO: 855620 - RNA, 21 nt, Human
uucaaaauaccaugccaauuc

SEQ ID NO: 855621 - RNA, 20 nt, Human
uuuuuuuuuuuuuaaaggug

SEQ ID NO: 855622 - RNA, 22 nt, Human
uuuuuuuuuuuuuuuuuaaagg

SEQ ID NO: 855623 - RNA, 21 nt, Human
aaagccccuccaccccucccu

SEQ ID NO: 855624 - RNA, 22 nt, Human
aaagccccuccaccccucccug

SEQ ID NO: 855625 - RNA, 24 nt, Human
accccgcagggcgcaggaaagaaa

SEQ ID NO: 855626 - RNA, 27 nt, Human
cacggcucggccucuuguuucugcggc

SEQ ID NO: 855627 - RNA, 22 nt, Human
ccacccucugggcagugcgagu

SEQ ID NO: 855628 - RNA, 24 nt, Human
ccaccggaccccgcagggcgcagg

SEQ ID NO: 855629 - RNA, 18 nt, Human
ccccugggaaggggauga

SEQ ID NO: 855630 - RNA, 19 nt, Human
ccccugggaaggggaugag

SEQ ID NO: 855631 - RNA, 19 nt, Human
ccuccaccccucccuggug

SEQ ID NO: 855632 - RNA, 19 nt, Human
ccucugggcagugcgaguu

SEQ ID NO: 855633 - RNA, 24 nt, Human
cuccugguauccaccggaccccgc

SEQ ID NO: 855634 - RNA, 21 nt, Human
cuguauuucgggacgguggca

SEQ ID NO: 855635 - RNA, 23 nt, Human
gccccuccaccccucccuggugg

SEQ ID NO: 855636 - RNA, 19 nt, Human
gcugcagcuuaggcggcgg

SEQ ID NO: 855637 - RNA, 19 nt, Human
ggaaagaaagccccuccac

SEQ ID NO: 855638 - RNA, 18 nt, Human
uuuuuuuuuuaaggcaaa

SEQ ID NO: 855639 - RNA, 23 nt, Human
uuuuuuuuuuuuuuuuuuuaagg

SEQ ID NO: 855640 - RNA, 24 nt, Human
aacaagacuggaaauaguuuagaa

SEQ ID NO: 855641 - RNA, 23 nt, Human
aagccaagacacagauggaaaga

SEQ ID NO: 855642 - RNA, 27 nt, Human
agaaaagaaaugaaaaccggucgcgga

SEQ ID NO: 855643 - RNA, 18 nt, Human
auggaguggccggggcgg

SEQ ID NO: 855644 - RNA, 25 nt, Human
caagacacagauggaaagagacuaa

SEQ ID NO: 855645 - RNA, 19 nt, Human
cagugccugauggaguggc

SEQ ID NO: 855646 - RNA, 22 nt, Human
ccaagacacagauggaaagaga

SEQ ID NO: 855647 - RNA, 23 nt, Human
cccgggagcuggcggcgguggcg

SEQ ID NO: 855648 - RNA, 21 nt, Human
cgacugaagaagccaagacac

SEQ ID NO: 855649 - RNA, 23 nt, Human
cgcggccaggcagcccgggcgcc

SEQ ID NO: 855650 - RNA, 25 nt, Human
cggguccccucgccaugggcucaga

SEQ ID NO: 855651 - RNA, 23 nt, Human
cgguggcggggcggcgggggugg

SEQ ID NO: 855652 - RNA, 22 nt, Human
cucccuagcugcgcgcggugcc

SEQ ID NO: 855653 - RNA, 22 nt, Human
cucgacucggcuccggcucugc

SEQ ID NO: 855654 - RNA, 21 nt, Human
gaaaugaaaaccggucgcgga

SEQ ID NO: 855655 - RNA, 22 nt, Human
gcggccaggcagcccgggcgcc

SEQ ID NO: 855656 - RNA, 21 nt, Human
gcgguggcggcggguccccuc

SEQ ID NO: 855657 - RNA, 21 nt, Human
gcgguggcgggcagcgcggag

SEQ ID NO: 855658 - RNA, 24 nt, Human
gcuggcggcgguggcggggcggcg

SEQ ID NO: 855659 - RNA, 18 nt, Human
ggaggcgguggcggcggg

SEQ ID NO: 855660 - RNA, 19 nt, Human
ggcggcggggguggaggcg

SEQ ID NO: 855661 - RNA, 18 nt, Human
ggcggcgguggcggggcg

SEQ ID NO: 855662 - RNA, 19 nt, Human
ggcggggguggaggcggug

SEQ ID NO: 855663 - RNA, 21 nt, Human
gggagcuggcggcgguggcgg

SEQ ID NO: 855664 - RNA, 21 nt, Human
ggggguggaggcgguggcggc

SEQ ID NO: 855665 - RNA, 23 nt, Human
ggggguggaggcgguggcggcgg

SEQ ID NO: 855666 - RNA, 23 nt, Human
gggguggaggcgguggcggcgac

SEQ ID NO: 855667 - RNA, 24 nt, Human
ggguccccucgccaugggcucaga

SEQ ID NO: 855668 - RNA, 24 nt, Human
ggguggaggcgguggcggcggguc

SEQ ID NO: 855669 - RNA, 18 nt, Human
guggcggggcggcggggg

SEQ ID NO: 855670 - RNA, 21 nt, Human
uaaaccgacugaagaagccaa

SEQ ID NO: 855671 - RNA, 23 nt, Human
uaaaccgacugaagaagccaaga

SEQ ID NO: 855672 - RNA, 24 nt, Human
ucagugccugauggaguggccggg

SEQ ID NO: 855673 - RNA, 27 nt, Human
ucagugccugauggaguggccggggcg

SEQ ID NO: 855674 - RNA, 19 nt, Human
ucgccgcgguucucggcuc

SEQ ID NO: 855675 - RNA, 19 nt, Human
ugcccaccgcggcccagag

SEQ ID NO: 855676 - RNA, 20 nt, Human
ugcccgggagcuggcggcgg

SEQ ID NO: 855677 - RNA, 23 nt, Human
ugcccgggagcuggcggcggugg

SEQ ID NO: 855678 - RNA, 22 nt, Human
uggaaagagacuaagaacaaga

SEQ ID NO: 855679 - RNA, 24 nt, Human
uggaaagagacuaagaacaagacu

SEQ ID NO: 855680 - RNA, 18 nt, Human
uggaggcgguggcggcgg

SEQ ID NO: 855681 - RNA, 18 nt, Human
uggccgaggcgguggcgg

SEQ ID NO: 855682 - RNA, 20 nt, Human
uggcggcgguggcggggcgg

SEQ ID NO: 855683 - RNA, 22 nt, Human
aagcccgcucgcugcucccccg

SEQ ID NO: 855684 - RNA, 18 nt, Human
acccgggacaggccugug

SEQ ID NO: 855685 - RNA, 19 nt, Human
agggcgggcgggcgggcgc

SEQ ID NO: 855686 - RNA, 21 nt, Human
cagaauggaaggccaaaggca

SEQ ID NO: 855687 - RNA, 22 nt, Human
cagagcgcugggaacagacgcg

SEQ ID NO: 855688 - RNA, 21 nt, Human
cauugggccuggcaaauaccu

SEQ ID NO: 855689 - RNA, 22 nt, Human
ccagggaaagcagggccagcaa

SEQ ID NO: 855690 - RNA, 24 nt, Human
cccccgcugcccgggcagcucaga

SEQ ID NO: 855691 - RNA, 18 nt, Human
ccccuccuuuuccugucc

SEQ ID NO: 855692 - RNA, 24 nt, Human
cccgcugcccgggcagcucagaca

SEQ ID NO: 855693 - RNA, 18 nt, Human
ccgcagggcgggcgggcg

SEQ ID NO: 855694 - RNA, 24 nt, Human
ccgggacaggccugugccuucucc

SEQ ID NO: 855695 - RNA, 18 nt, Human
ccuggcaaauaccuacca

SEQ ID NO: 855696 - RNA, 21 nt, Human
ccuggcaaauaccuaccaggg

SEQ ID NO: 855697 - RNA, 21 nt, Human
cugacaucuaaagcaaaguau

SEQ ID NO: 855698 - RNA, 21 nt, Human
cugcucccccgcugcccgggc

SEQ ID NO: 855699 - RNA, 19 nt, Human
gauucuggacagguugcuc

SEQ ID NO: 855700 - RNA, 20 nt, Human
gcgggcgggcgggcgcgggg

SEQ ID NO: 855701 - RNA, 18 nt, Human
gcucgcggaagcccgcuc

SEQ ID NO: 855702 - RNA, 23 nt, Human
ggaccgcagggcgggcgggcggg

SEQ ID NO: 855703 - RNA, 24 nt, Human
ggaccgcagggcgggcgggcgggc

SEQ ID NO: 855704 - RNA, 19 nt, Human
ggcgggcgggcgcgggggc

SEQ ID NO: 855705 - RNA, 18 nt, Human
gggacccgggacaggccu

SEQ ID NO: 855706 - RNA, 20 nt, Human
gggcgggcgggcgcgggggc

SEQ ID NO: 855707 - RNA, 21 nt, Human
gggcgggcgggcgcgggggcc

SEQ ID NO: 855708 - RNA, 22 nt, Human
uccuccuuuuuaggccucgcag

SEQ ID NO: 855709 - RNA, 20 nt, Human
ugggaacagacgcgcagacc

SEQ ID NO: 855710 - RNA, 20 nt, Human
uugggucaaaaggcugcugg

SEQ ID NO: 855711 - RNA, 22 nt, Human
uuuuuuuuuuuuuuuuuuacaa

SEQ ID NO: 855712 - RNA, 23 nt, Human
aaaaacaagcagccccuggccua

SEQ ID NO: 855713 - RNA, 25 nt, Human
aagagaagggaaucacaacacagaa

SEQ ID NO: 855714 - RNA, 23 nt, Human
aagcucacagcacgugccccugg

SEQ ID NO: 855715 - RNA, 25 nt, Human
agaagaacacacacggcuccacaaa

SEQ ID NO: 855716 - RNA, 19 nt, Human
agaagggaaucacaacaca

SEQ ID NO: 855717 - RNA, 19 nt, Human
agcagugagcacaaccugg

SEQ ID NO: 855718 - RNA, 20 nt, Human
aggagaggaggccccggggc

SEQ ID NO: 855719 - RNA, 27 nt, Human
agggccccuuggggggaaguggggggc

SEQ ID NO: 855720 - RNA, 20 nt, Human
agucauggucaccaucgcug

SEQ ID NO: 855721 - RNA, 21 nt, Human
agugagcacaaccugggcucc

SEQ ID NO: 855722 - RNA, 21 nt, Human
aucacaacacagaagcugcaa

SEQ ID NO: 855723 - RNA, 20 nt, Human
caacacagaagcugcaaaug

SEQ ID NO: 855724 - RNA, 20 nt, Human
caagcagccccuggccuaga

SEQ ID NO: 855725 - RNA, 20 nt, Human
cacaacacagaagcugcaaa

SEQ ID NO: 855726 - RNA, 21 nt, Human
caccgggaagguggugguggg

SEQ ID NO: 855727 - RNA, 22 nt, Human
cacggcuccacaaaaacaagca

SEQ ID NO: 855728 - RNA, 18 nt, Human
cagccccacuccaucccg

SEQ ID NO: 855729 - RNA, 20 nt, Human
cagccccuggccuagaucua

SEQ ID NO: 855730 - RNA, 26 nt, Human
caggacacaggucgggaccccccucc

SEQ ID NO: 855731 - RNA, 21 nt, Human
cagggcccugcugccugagag

SEQ ID NO: 855732 - RNA, 19 nt, Human
ccacaaaaacaagcagccc

SEQ ID NO: 855733 - RNA, 20 nt, Human
ccacaaaaacaagcagcccc

SEQ ID NO: 855734 - RNA, 19 nt, Human
ccauuugguauuaaaugug

SEQ ID NO: 855735 - RNA, 24 nt, Human
ccccuggcacuggaggggcgccuc

SEQ ID NO: 855736 - RNA, 20 nt, Human
cccucggagccuauuugccc

SEQ ID NO: 855737 - RNA, 20 nt, Human
cccuggugccuucuuuccgc

SEQ ID NO: 855738 - RNA, 19 nt, Human
cccuuggggggaagugggg

SEQ ID NO: 855739 - RNA, 21 nt, Human
cccuuggggggaagugggggg

SEQ ID NO: 855740 - RNA, 19 nt, Human
ccuagaucuacgcagggaa

SEQ ID NO: 855741 - RNA, 20 nt, Human
ccuccccccaccccauuugg

SEQ ID NO: 855742 - RNA, 23 nt, Human
ccuggcacuggaggggcgccucc

SEQ ID NO: 855743 - RNA, 18 nt, Human
ccuggccccgccuccgcc

SEQ ID NO: 855744 - RNA, 20 nt, Human
ccuggccccgccuccgccug

SEQ ID NO: 855745 - RNA, 23 nt, Human
cgauacgggagagcagugagcac

SEQ ID NO: 855746 - RNA, 18 nt, Human
cgccuccgccugucucca

SEQ ID NO: 855747 - RNA, 23 nt, Human
cgcugggcugccuccccagcccc

SEQ ID NO: 855748 - RNA, 23 nt, Human
cggcuccacaaaaacaagcagcc

SEQ ID NO: 855749 - RNA, 22 nt, Human
cgggaccccccuccuccugggg

SEQ ID NO: 855750 - RNA, 19 nt, Human
cgggaugaguguccacugu

SEQ ID NO: 855751 - RNA, 18 nt, Human
cuaggaaacucaguaaca

SEQ ID NO: 855752 - RNA, 21 nt, Human
cucgcgcugggcugccucccc

SEQ ID NO: 855753 - RNA, 19 nt, Human
cuggugccuucuuuccgcc

SEQ ID NO: 855754 - RNA, 30 nt, Human
gaccccccuccuccugggggaacacccacc

SEQ ID NO: 855755 - RNA, 19 nt, Human
gaggaggagaggaggcccc

SEQ ID NO: 855756 - RNA, 21 nt, Human
gccaaagcacaaaguucacug

SEQ ID NO: 855757 - RNA, 20 nt, Human
gccagugccgggcugacacg

SEQ ID NO: 855758 - RNA, 27 nt, Human
gcccuggugccuucuuuccgccaucuc

SEQ ID NO: 855759 - RNA, 23 nt, Human
ggagaggaggccccggggcccuc

SEQ ID NO: 855760 - RNA, 20 nt, Human
ggaggagaggaggccccggg

SEQ ID NO: 855761 - RNA, 20 nt, Human
gggaaggugguggugggcag

SEQ ID NO: 855762 - RNA, 21 nt, Human
gggaaggugguggugggcagg

SEQ ID NO: 855763 - RNA, 19 nt, Human
gggaggacucgcgcugggc

SEQ ID NO: 855764 - RNA, 23 nt, Human
gguggugggcagggccccuuggg

SEQ ID NO: 855765 - RNA, 25 nt, Human
ucagacagccccacuccaucccggg

SEQ ID NO: 855766 - RNA, 22 nt, Human
ucauggucaccaucgcugucac

SEQ ID NO: 855767 - RNA, 21 nt, Human
uccacaaaaacaagcagcccc

SEQ ID NO: 855768 - RNA, 18 nt, Human
uccacugugcccuggugc

SEQ ID NO: 855769 - RNA, 20 nt, Human
uccagggcccugcugccuga

SEQ ID NO: 855770 - RNA, 25 nt, Human
ucccacagucauggucaccaucgcu

SEQ ID NO: 855771 - RNA, 18 nt, Human
ucccgggacugcgcuggg

SEQ ID NO: 855772 - RNA, 19 nt, Human
ucuccagggcccugcugcc

SEQ ID NO: 855773 - RNA, 18 nt, Human
ugacacgaggggcaggau

SEQ ID NO: 855774 - RNA, 18 nt, Human
ugagaggaggagaggagg

SEQ ID NO: 855775 - RNA, 20 nt, Human
ugagaggaggagaggaggcc

SEQ ID NO: 855776 - RNA, 24 nt, Human
ugccccuggcacuggaggggcgcc

SEQ ID NO: 855777 - RNA, 24 nt, Human
ugccgggcugacacgaggggcaac

SEQ ID NO: 855778 - RNA, 18 nt, Human
ugccuccccagccccaac

SEQ ID NO: 855779 - RNA, 24 nt, Human
uggaacgccaaagcacaaaguuca

SEQ ID NO: 855780 - RNA, 24 nt, Human
uggaggggcgccuccccccacccc

SEQ ID NO: 855781 - RNA, 21 nt, Human
ugggggaacacccaccccaau

SEQ ID NO: 855782 - RNA, 21 nt, Human
ugguggugggcagggccccuu

SEQ ID NO: 855783 - RNA, 23 nt, Human
ugguggugggcagggccccuugg

SEQ ID NO: 855784 - RNA, 24 nt, Human
uuuuuuuuuuuuuuuuuaacacug

SEQ ID NO: 855785 - RNA, 18 nt, Human
aaaaaggcuucuaagccc

SEQ ID NO: 855786 - RNA, 21 nt, Human
aaagguauccaagccccagga

SEQ ID NO: 855787 - RNA, 18 nt, Human
aaggaaggagagaaacga

SEQ ID NO: 855788 - RNA, 22 nt, Human
aaguuaaauuacacagcagcuu

SEQ ID NO: 855789 - RNA, 23 nt, Human
acagcagcuuuacacagcaugag

SEQ ID NO: 855790 - RNA, 19 nt, Human
acuuggaaagguauccaag

SEQ ID NO: 855791 - RNA, 20 nt, Human
agaauagaggagaagauggg

SEQ ID NO: 855792 - RNA, 20 nt, Human
agaggagaagauggggaagu

SEQ ID NO: 855793 - RNA, 22 nt, Human
agaggagaagauggggaagugg

SEQ ID NO: 855794 - RNA, 19 nt, Human
agagucccuggauaaagcu

SEQ ID NO: 855795 - RNA, 31 nt, Human
aggaaggaaggagagaaacgaggagaggaaa

SEQ ID NO: 855796 - RNA, 25 nt, Human
aggaaggagagaaacgaggagagga

SEQ ID NO: 855797 - RNA, 20 nt, Human
aggagaagauggggaagugg

SEQ ID NO: 855798 - RNA, 22 nt, Human
caagccccaggauaggggcagg

SEQ ID NO: 855799 - RNA, 23 nt, Human
caagccccaggauaggggcaggg

SEQ ID NO: 855800 - RNA, 24 nt, Human
caagccccaggauaggggcaggga

SEQ ID NO: 855801 - RNA, 19 nt, Human
cacccaugcugagcugagg

SEQ ID NO: 855802 - RNA, 18 nt, Human
cagcaugagauggaaagg

SEQ ID NO: 855803 - RNA, 20 nt, Human
cagcgccucccucccgcucc

SEQ ID NO: 855804 - RNA, 21 nt, Human
cagcgccucccucccgcuccc

SEQ ID NO: 855805 - RNA, 20 nt, Human
caggcccggcagcgccuccc

SEQ ID NO: 855806 - RNA, 18 nt, Human
ccaaaggggugggaaugg

SEQ ID NO: 855807 - RNA, 20 nt, Human
ccaaaggggugggaauggua

SEQ ID NO: 855808 - RNA, 24 nt, Human
ccagaauagaggagaagaugggga

SEQ ID NO: 855809 - RNA, 18 nt, Human
ccccgccugaccgcccuc

SEQ ID NO: 855810 - RNA, 21 nt, Human
cccggcagcgccucccucccg

SEQ ID NO: 855811 - RNA, 18 nt, Human
cccuccucccccuuuccu

SEQ ID NO: 855812 - RNA, 18 nt, Human
ccgcuaugcaacucaggu

SEQ ID NO: 855813 - RNA, 20 nt, Human
ccgucucugcugggggcgug

SEQ ID NO: 855814 - RNA, 24 nt, Human
ccucaaaaaggcuucuaagcccau

SEQ ID NO: 855815 - RNA, 21 nt, Human
ccuccaccuccuucucuuggg

SEQ ID NO: 855816 - RNA, 23 nt, Human
ccugaccgcccucaaaccuggga

SEQ ID NO: 855817 - RNA, 23 nt, Human
ccugccaggaccgcucuccgagu

SEQ ID NO: 855818 - RNA, 18 nt, Human
ccugcccuucaaaucacc

SEQ ID NO: 855819 - RNA, 19 nt, Human
ccuggucccuccucccccu

SEQ ID NO: 855820 - RNA, 23 nt, Human
cuccugagauucuuggcugccuc

SEQ ID NO: 855821 - RNA, 20 nt, Human
cucuccgagugcaagacggg

SEQ ID NO: 855822 - RNA, 18 nt, Human
cugggugggaaggcgugg

SEQ ID NO: 855823 - RNA, 22 nt, Human
cuuccugccaggaccgcucucc

SEQ ID NO: 855824 - RNA, 19 nt, Human
gaaucucucggccccugcc

SEQ ID NO: 855825 - RNA, 18 nt, Human
gacgcugggugggaaggc

SEQ ID NO: 855826 - RNA, 22 nt, Human
gagaagauggggaagugguugu

SEQ ID NO: 855827 - RNA, 19 nt, Human
gagagucgggcgcaacgca

SEQ ID NO: 855828 - RNA, 23 nt, Human
gagauucuuggcugccuccaccu

SEQ ID NO: 855829 - RNA, 21 nt, Human
gcaggggcccgaaccgggugc

SEQ ID NO: 855830 - RNA, 19 nt, Human
gccuguccacgcgcugcag

SEQ ID NO: 855831 - RNA, 18 nt, Human
gcgcaacgcagacgcgcc

SEQ ID NO: 855832 - RNA, 22 nt, Human
ggagagaaacgaggagaggaag

SEQ ID NO: 855833 - RNA, 20 nt, Human
ggccuggaucugagggagag

SEQ ID NO: 855834 - RNA, 24 nt, Human
gugggcaguuccagggacuuggaa

SEQ ID NO: 855835 - RNA, 18 nt, Human
gugggggaaccuggggaa

SEQ ID NO: 855836 - RNA, 18 nt, Human
uaaauuacacagcagcuu

SEQ ID NO: 855837 - RNA, 25 nt, Human
uaaccgcggagagucgggcgcaacg

SEQ ID NO: 855838 - RNA, 19 nt, Human
ucccccuuuccuggaggga

SEQ ID NO: 855839 - RNA, 25 nt, Human
ucccccuuuccuggagggagaacca

SEQ ID NO: 855840 - RNA, 22 nt, Human
uccccgaugguguccuagaggc

SEQ ID NO: 855841 - RNA, 18 nt, Human
ucccucaaaaaggcuucu

SEQ ID NO: 855842 - RNA, 18 nt, Human
ucccuccucccccuuucc

SEQ ID NO: 855843 - RNA, 19 nt, Human
ucccuggauaaagcugguc

SEQ ID NO: 855844 - RNA, 22 nt, Human
uccuggucccuccucccccuuu

SEQ ID NO: 855845 - RNA, 18 nt, Human
ucugagggagagguagug

SEQ ID NO: 855846 - RNA, 23 nt, Human
ucugggccggggaacuccgggac

SEQ ID NO: 855847 - RNA, 21 nt, Human
ugccuggccuugaccccgccu

SEQ ID NO: 855848 - RNA, 19 nt, Human
ugcugggggcguggccauc

SEQ ID NO: 855849 - RNA, 23 nt, Human
ugcugggggcguggccaucuugc

SEQ ID NO: 855850 - RNA, 19 nt, Human
uggagggagaaccacccau

SEQ ID NO: 855851 - RNA, 20 nt, Human
uggccggccuuccugccagg

SEQ ID NO: 855852 - RNA, 26 nt, Human
uggggaagacgcugggugggaaggcg

SEQ ID NO: 855853 - RNA, 24 nt, Human
uucuaagcccauccaggcagccgc

SEQ ID NO: 855854 - RNA, 18 nt, Human
uugaccccgccugaccgc

SEQ ID NO: 855855 - RNA, 22 nt, Human
uuggaaagguauccaagcccca

SEQ ID NO: 855856 - RNA, 19 nt, Human
aaaaagcacaggcaaacaa

SEQ ID NO: 855857 - RNA, 21 nt, Human
aaaaagcacaggcaaacaagc

SEQ ID NO: 855858 - RNA, 22 nt, Human
aaaaagcacaggcaaacaagcg

SEQ ID NO: 855859 - RNA, 21 nt, Human
aaacccagucccacacugagg

SEQ ID NO: 855860 - RNA, 20 nt, Human
aagcugcccacgugaccacc

SEQ ID NO: 855861 - RNA, 24 nt, Human
aauacagggugccaucgggaagga

SEQ ID NO: 855862 - RNA, 21 nt, Human
acccagagcccugauggccuc

SEQ ID NO: 855863 - RNA, 24 nt, Human
acuucacgccagccugggcgacag

SEQ ID NO: 855864 - RNA, 24 nt, Human
agacagcaggucucgcccugagca

SEQ ID NO: 855865 - RNA, 24 nt, Human
agccacucgggagguggaggcaga

SEQ ID NO: 855866 - RNA, 23 nt, Human
agccaggcggcuccaauucuccu

SEQ ID NO: 855867 - RNA, 21 nt, Human
agccugggcgacagagaccga

SEQ ID NO: 855868 - RNA, 19 nt, Human
aggaaugucuuucuccuug

SEQ ID NO: 855869 - RNA, 20 nt, Human
aggcagaagcugcccacgug

SEQ ID NO: 855870 - RNA, 23 nt, Human
aggcagaagcugcccacgugacc

SEQ ID NO: 855871 - RNA, 27 nt, Human
aggccccaggccccucugaggcccagg

SEQ ID NO: 855872 - RNA, 21 nt, Human
agggcugguuccugaggccuc

SEQ ID NO: 855873 - RNA, 18 nt, Human
auacaggcauuccacaag

SEQ ID NO: 855874 - RNA, 21 nt, Human
caagcagcuuggaucagggcc

SEQ ID NO: 855875 - RNA, 23 nt, Human
caagcgguuccucgggcggccca

SEQ ID NO: 855876 - RNA, 23 nt, Human
caaggacaccaagcagcuuggau

SEQ ID NO: 855877 - RNA, 24 nt, Human
cacuucacgccagccugggcgaca

SEQ ID NO: 855878 - RNA, 22 nt, Human
cagaagcugcccacgugaccac

SEQ ID NO: 855879 - RNA, 21 nt, Human
cagaucccagccggccaggga

SEQ ID NO: 855880 - RNA, 20 nt, Human
caggcuccuggcccggccug

SEQ ID NO: 855881 - RNA, 18 nt, Human
caggugucaccagggcug

SEQ ID NO: 855882 - RNA, 23 nt, Human
ccacuucacgccagccugggcga

SEQ ID NO: 855883 - RNA, 18 nt, Human
ccagagcccacaagaacc

SEQ ID NO: 855884 - RNA, 23 nt, Human
ccagccugggcgacagagaccga

SEQ ID NO: 855885 - RNA, 22 nt, Human
ccaggaggucaaggcugcagug

SEQ ID NO: 855886 - RNA, 20 nt, Human
ccaggugucaccagggcugg

SEQ ID NO: 855887 - RNA, 20 nt, Human
ccagucccacacugaggugc

SEQ ID NO: 855888 - RNA, 20 nt, Human
cccacaagaaccuucuccaa

SEQ ID NO: 855889 - RNA, 19 nt, Human
cccacacugaggugcuggg

SEQ ID NO: 855890 - RNA, 19 nt, Human
cccagccggccagggaguc

SEQ ID NO: 855891 - RNA, 19 nt, Human
cccaguaacaacccugggc

SEQ ID NO: 855892 - RNA, 23 nt, Human
ccucgggcggcccaaggagccuu

SEQ ID NO: 855893 - RNA, 20 nt, Human
ccucuugguggccuccugcc

SEQ ID NO: 855894 - RNA, 20 nt, Human
ccucuuuuaaccugcugacc

SEQ ID NO: 855895 - RNA, 21 nt, Human
ccugggcacggggguccaagg

SEQ ID NO: 855896 - RNA, 24 nt, Human
ccuucuccaacaggggagggcgcu

SEQ ID NO: 855897 - RNA, 19 nt, Human
cgaaacagugaaagggagg

SEQ ID NO: 855898 - RNA, 18 nt, Human
cggcaggcuccuggcccu

SEQ ID NO: 855899 - RNA, 20 nt, Human
cggccagggagucuggcccg

SEQ ID NO: 855900 - RNA, 22 nt, Human
cgggaaggacugcagccaggcg

SEQ ID NO: 855901 - RNA, 24 nt, Human
cgucggcaggcuccuggcccuggc

SEQ ID NO: 855902 - RNA, 21 nt, Human
cuccaaacccagucccacacu

SEQ ID NO: 855903 - RNA, 22 nt, Human
cucugugugugucuguguccuu

SEQ ID NO: 855904 - RNA, 22 nt, Human
cugcagccaggcggcuccaauu

SEQ ID NO: 855905 - RNA, 23 nt, Human
cuggcccuggccuucuccagccc

SEQ ID NO: 855906 - RNA, 19 nt, Human
cuguccacaguccagugcu

SEQ ID NO: 855907 - RNA, 23 nt, Human
cuuguggcuuuccacaacuuauu

SEQ ID NO: 855908 - RNA, 19 nt, Human
gaaaaagcacaggcaaaca

SEQ ID NO: 855909 - RNA, 22 nt, Human
gaaagauugcuucagcccagga

SEQ ID NO: 855910 - RNA, 19 nt, Human
gagcuggugggagcgggcu

SEQ ID NO: 855911 - RNA, 24 nt, Human
gccacuucacgccagccugggcga

SEQ ID NO: 855912 - RNA, 22 nt, Human
gccccaggccccucugaggccc

SEQ ID NO: 855913 - RNA, 21 nt, Human
gccccucugaggcccagcuuc

SEQ ID NO: 855914 - RNA, 20 nt, Human
gcccuggccuucuccagccc

SEQ ID NO: 855915 - RNA, 23 nt, Human
ggagcuggugggagcgggcuuaa

SEQ ID NO: 855916 - RNA, 21 nt, Human
ggcaggaggugggcgugcugg

SEQ ID NO: 855917 - RNA, 23 nt, Human
gggaaggacugcagccaggcggc

SEQ ID NO: 855918 - RNA, 18 nt, Human
gggcaggaggugggcgug

SEQ ID NO: 855919 - RNA, 19 nt, Human
gggcauggucuugcaccuc

SEQ ID NO: 855920 - RNA, 22 nt, Human
gggcuuaaccaggagcucgugu

SEQ ID NO: 855921 - RNA, 21 nt, Human
guaggggcuccaucuccaaac

SEQ ID NO: 855922 - RNA, 22 nt, Human
gugguuugaaaacuggacagag

SEQ ID NO: 855923 - RNA, 24 nt, Human
guugcgccacuucacgccagccug

SEQ ID NO: 855924 - RNA, 26 nt, Human
uaagacagcaggucucgcccugagcc

SEQ ID NO: 855925 - RNA, 25 nt, Human
uacaaggacaccaagcagcuuggau

SEQ ID NO: 855926 - RNA, 21 nt, Human
uacagauaagacagcaggucu

SEQ ID NO: 855927 - RNA, 19 nt, Human
uacagggugccaucgggaa

SEQ ID NO: 855928 - RNA, 22 nt, Human
uagcagugugagaacggacuaa

SEQ ID NO: 855929 - RNA, 22 nt, Human
ucaaaucccaaaaccugcaggc

SEQ ID NO: 855930 - RNA, 23 nt, Human
ucagaggccucuuguggcuuucc

SEQ ID NO: 855931 - RNA, 22 nt, Human
uccagccccgcagcuccuugug

SEQ ID NO: 855932 - RNA, 18 nt, Human
uccauuuacagaugaaaa

SEQ ID NO: 855933 - RNA, 24 nt, Human
uccauuuacagaugaaaaagcaca

SEQ ID NO: 855934 - RNA, 18 nt, Human
ucccagccggccagggag

SEQ ID NO: 855935 - RNA, 23 nt, Human
uccgucggcaggcuccuggcccg

SEQ ID NO: 855936 - RNA, 18 nt, Human
uccuacuguccugggcac

SEQ ID NO: 855937 - RNA, 21 nt, Human
uccucaucucuucuucuuaca

SEQ ID NO: 855938 - RNA, 20 nt, Human
uccuccucagaggccucuug

SEQ ID NO: 855939 - RNA, 23 nt, Human
uccuggcccuggccuucuccagc

SEQ ID NO: 855940 - RNA, 23 nt, Human
ucucagacacaggccccaggccc

SEQ ID NO: 855941 - RNA, 24 nt, Human
ucucagacacaggccccaggcccc

SEQ ID NO: 855942 - RNA, 24 nt, Human
ugaaaaagcacaggcaaacaagcg

SEQ ID NO: 855943 - RNA, 22 nt, Human
ugaacacaguguuuacagauaa

SEQ ID NO: 855944 - RNA, 19 nt, Human
ugagaagcagauauucagg

SEQ ID NO: 855945 - RNA, 21 nt, Human
ugagaagcagauauucagggc

SEQ ID NO: 855946 - RNA, 19 nt, Human
ugagcaugcgaacaugaug

SEQ ID NO: 855947 - RNA, 20 nt, Human
ugaggccucugcccugggcu

SEQ ID NO: 855948 - RNA, 21 nt, Human
uggacagaguucaccgcguca

SEQ ID NO: 855949 - RNA, 19 nt, Human
uggaucagggcccacccag

SEQ ID NO: 855950 - RNA, 24 nt, Human
uggcccggccuggccccucgcugg

SEQ ID NO: 855951 - RNA, 24 nt, Human
uggcccggccuggccccucgcugg

SEQ ID NO: 855952 - RNA, 18 nt, Human
ugggaugggcccagagcc

SEQ ID NO: 855953 - RNA, 18 nt, Human
uggggcugucccucugug

SEQ ID NO: 855954 - RNA, 21 nt, Human
uggugcacaacuauaguccca

SEQ ID NO: 855955 - RNA, 23 nt, Human
uuaacuuaucggacaggagcugg

SEQ ID NO: 855956 - RNA, 24 nt, Human
uuccugaggccucugcccugggcu

SEQ ID NO: 855957 - RNA, 23 nt, Human
uugcgccacuucacgccagccug

SEQ ID NO: 855958 - RNA, 24 nt, Human
uugcuucagcccaggaggucaagg

SEQ ID NO: 855959 - RNA, 21 nt, Human
uugguggccuccugcccacug

SEQ ID NO: 855960 - RNA, 18 nt, Human
uugucccauauuuucaug

SEQ ID NO: 855961 - RNA, 18 nt, Human
uuuuuuuuuuuuuuucug

SEQ ID NO: 855962 - RNA, 20 nt, Human
uuuuuuuuuuuuuuucuggu

SEQ ID NO: 855963 - RNA, 21 nt, Human
aaaguaucccacccuacccca

SEQ ID NO: 855964 - RNA, 18 nt, Human
aagcaggagcacuuuaaa

SEQ ID NO: 855965 - RNA, 22 nt, Human
aaguaucccacccuaccccauu

SEQ ID NO: 855966 - RNA, 19 nt, Human
acacuuaggcagagcaggg

SEQ ID NO: 855967 - RNA, 19 nt, Human
accccauuccacccccagu

SEQ ID NO: 855968 - RNA, 19 nt, Human
acccugagccucugaaagc

SEQ ID NO: 855969 - RNA, 20 nt, Human
acgucgccgcgcgggcuggg

SEQ ID NO: 855970 - RNA, 22 nt, Human
acguggacccacuccuucuggc

SEQ ID NO: 855971 - RNA, 21 nt, Human
acuccuucuggccauccaggu

SEQ ID NO: 855972 - RNA, 22 nt, Human
agaaaggaaauugacugacuug

SEQ ID NO: 855973 - RNA, 23 nt, Human
agagacucagcgaagaaggcugc

SEQ ID NO: 855974 - RNA, 18 nt, Human
agcgaagaaggcugcaau

SEQ ID NO: 855975 - RNA, 18 nt, Human
aggcccccccacccugag

SEQ ID NO: 855976 - RNA, 20 nt, Human
agugcauaccacguggaccc

SEQ ID NO: 855977 - RNA, 28 nt, Human
aucccacccuaccccauuccacccccag

SEQ ID NO: 855978 - RNA, 24 nt, Human
augucagggacgaagucuuuuccc

SEQ ID NO: 855979 - RNA, 19 nt, Human
cacuuaggcagagcagggc

SEQ ID NO: 855980 - RNA, 19 nt, Human
caggaagagcugaugagcc

SEQ ID NO: 855981 - RNA, 23 nt, Human
caggcccccccacccugagccuc

SEQ ID NO: 855982 - RNA, 25 nt, Human
cagguggccgugauacgcacgugcg

SEQ ID NO: 855983 - RNA, 22 nt, Human
ccacccugagccucugaaagcu

SEQ ID NO: 855984 - RNA, 19 nt, Human
cccacccuaccccauucca

SEQ ID NO: 855985 - RNA, 23 nt, Human
cccccaguggacagaaaggaaau

SEQ ID NO: 855986 - RNA, 20 nt, Human
ccccccacccugagccucug

SEQ ID NO: 855987 - RNA, 25 nt, Human
ccccccacccugagccucugaaagc

SEQ ID NO: 855988 - RNA, 22 nt, Human
cccccccacccugagccucuga

SEQ ID NO: 855989 - RNA, 21 nt, Human
ccccgcuccgagccccgcccc

SEQ ID NO: 855990 - RNA, 26 nt, Human
ccccuguucaucguacauguacugcc

SEQ ID NO: 855991 - RNA, 21 nt, Human
cccuaccccauuccaccccca

SEQ ID NO: 855992 - RNA, 18 nt, Human
ccgcgcgggcugggccuc

SEQ ID NO: 855993 - RNA, 19 nt, Human
ccgcuccgagccccgcccc

SEQ ID NO: 855994 - RNA, 19 nt, Human
ccugggucgggauuugggg

SEQ ID NO: 855995 - RNA, 23 nt, Human
cgccgcgcgggcugggccuccaa

SEQ ID NO: 855996 - RNA, 19 nt, Human
cgcgggcugggccuccaag

SEQ ID NO: 855997 - RNA, 23 nt, Human
cgcgggcugggccuccaaggccc

SEQ ID NO: 855998 - RNA, 24 nt, Human
cggaacuuguagggacugauguca

SEQ ID NO: 855999 - RNA, 18 nt, Human
cggccuucgggcgcuggu

SEQ ID NO: 856000 - RNA, 26 nt, Human
cucggccccgccccgaagccgguucc

SEQ ID NO: 856001 - RNA, 22 nt, Human
cuuaacaggauccucgggaaaa

SEQ ID NO: 856002 - RNA, 20 nt, Human
gaagaaggcugcaaucuguu

SEQ ID NO: 856003 - RNA, 21 nt, Human
gacagaaaggaaauugacuga

SEQ ID NO: 856004 - RNA, 26 nt, Human
gaccagugguuaggaggagggggugg

SEQ ID NO: 856005 - RNA, 19 nt, Human
gaggaggggguggguagca

SEQ ID NO: 856006 - RNA, 19 nt, Human
gcaggaagagcugaugagc

SEQ ID NO: 856007 - RNA, 18 nt, Human
gccccugccugggucggg

SEQ ID NO: 856008 - RNA, 18 nt, Human
ggagcucagguggccgug

SEQ ID NO: 856009 - RNA, 22 nt, Human
ggcccccccacccugagccucu

SEQ ID NO: 856010 - RNA, 21 nt, Human
gggcagagacucagcgaagaa

SEQ ID NO: 856011 - RNA, 22 nt, Human
gggcgcuggucugcggccaugg

SEQ ID NO: 856012 - RNA, 21 nt, Human
gugcgccacauugcugaugca

SEQ ID NO: 856013 - RNA, 19 nt, Human
guggguggccgucagucgg

SEQ ID NO: 856014 - RNA, 28 nt, Human
uaucccacccuaccccauuccaccccca

SEQ ID NO: 856015 - RNA, 22 nt, Human
uccaaggccccgcuccgagccc

SEQ ID NO: 856016 - RNA, 19 nt, Human
ucccacccuaccccauucc

SEQ ID NO: 856017 - RNA, 18 nt, Human
ucccuggagucugccacu

SEQ ID NO: 856018 - RNA, 20 nt, Human
uccgagccccgccccugccu

SEQ ID NO: 856019 - RNA, 24 nt, Human
ucugcggccaugguggguggccgu

SEQ ID NO: 856020 - RNA, 18 nt, Human
ucuggccauccagguugc

SEQ ID NO: 856021 - RNA, 19 nt, Human
ugacugacuugaggggaug

SEQ ID NO: 856022 - RNA, 21 nt, Human
ugaguugggcagugcauaccc

SEQ ID NO: 856023 - RNA, 22 nt, Human
ugcccuugggcccggacaaucu

SEQ ID NO: 856024 - RNA, 24 nt, Human
ugguuaggaggaggggguggguag

SEQ ID NO: 856025 - RNA, 21 nt, Human
ugucggccuucgggcgcuggu

SEQ ID NO: 856026 - RNA, 22 nt, Human
ugugcaugucaggauuuucuuu

SEQ ID NO: 856027 - RNA, 23 nt, Human
uuuaaaguaucccacccuacccc

SEQ ID NO: 856028 - RNA, 19 nt, Human
uuuuuuuuuuuuuuuuugu

SEQ ID NO: 856029 - RNA, 20 nt, Human
uuuuuuuuuuuuuuuuuugg

SEQ ID NO: 856030 - RNA, 20 nt, Human
aaaaacaaaaacaaaaauca

SEQ ID NO: 856031 - RNA, 22 nt, Human
aaaaacaaaaacaaaaaucacu

SEQ ID NO: 856032 - RNA, 23 nt, Human
aaaaucagagccccuaguccuga

SEQ ID NO: 856033 - RNA, 22 nt, Human
aaacaaaaacaaaaaucacuca

SEQ ID NO: 856034 - RNA, 23 nt, Human
aacuccuguuccaccaacaagga

SEQ ID NO: 856035 - RNA, 18 nt, Human
acaaaaacaaaaacaaaa

SEQ ID NO: 856036 - RNA, 22 nt, Human
agaauccaaaaaucagagcccc

SEQ ID NO: 856037 - RNA, 20 nt, Human
agcugccggguaccuccagc

SEQ ID NO: 856038 - RNA, 21 nt, Human
aggaggggcaagaaugcaggg

SEQ ID NO: 856039 - RNA, 23 nt, Human
agggaggagaagggagaagagga

SEQ ID NO: 856040 - RNA, 22 nt, Human
caaaaaucagagccccuagucc

SEQ ID NO: 856041 - RNA, 23 nt, Human
caacaaaaacaaaaacaaaaauc

SEQ ID NO: 856042 - RNA, 24 nt, Human
caacaaaaacaaaaacaaaaauca

SEQ ID NO: 856043 - RNA, 21 nt, Human
caccuucugcuucagaagcuu

SEQ ID NO: 856044 - RNA, 27 nt, Human
ccgacaaugauggaggcucuggggcgc

SEQ ID NO: 856045 - RNA, 21 nt, Human
ccuccucuccagggcuggugg

SEQ ID NO: 856046 - RNA, 18 nt, Human
cgggagagcugccgggua

SEQ ID NO: 856047 - RNA, 22 nt, Human
cguguguguguguguagcuugu

SEQ ID NO: 856048 - RNA, 21 nt, Human
cuccagcuccccagaacucuc

SEQ ID NO: 856049 - RNA, 24 nt, Human
gaaugcagggagccagcucucugg

SEQ ID NO: 856050 - RNA, 21 nt, Human
gagccccuaguccugauccaa

SEQ ID NO: 856051 - RNA, 18 nt, Human
gaggagaagggagaagag

SEQ ID NO: 856052 - RNA, 22 nt, Human
gaggcucuggggcgcucauuac

SEQ ID NO: 856053 - RNA, 19 nt, Human
gaucucaucuuugccacug

SEQ ID NO: 856054 - RNA, 20 nt, Human
gcaagaaugcagggagccag

SEQ ID NO: 856055 - RNA, 18 nt, Human
gggucgugugugugugug

SEQ ID NO: 856056 - RNA, 18 nt, Human
gucgugugugugugugua

SEQ ID NO: 856057 - RNA, 19 nt, Human
uaccaacaaaaacaaaaac

SEQ ID NO: 856058 - RNA, 23 nt, Human
uaccaacaaaaacaaaaacaaag

SEQ ID NO: 856059 - RNA, 24 nt, Human
ucagucccuuccuccucuccaggg

SEQ ID NO: 856060 - RNA, 23 nt, Human
uccccagaacucucuucgaccag

SEQ ID NO: 856061 - RNA, 19 nt, Human
ucuccgacaaugauggagg

SEQ ID NO: 856062 - RNA, 26 nt, Human
ucuccgacaaugauggaggcucuggg

SEQ ID NO: 856063 - RNA, 21 nt, Human
ucugguccccucgggagagcu

SEQ ID NO: 856064 - RNA, 22 nt, Human
ugagcuccagagcuugcuggcg

SEQ ID NO: 856065 - RNA, 19 nt, Human
ugccggguaccuccagcuc

SEQ ID NO: 856066 - RNA, 21 nt, Human
uggugaggcuuaggaacuccu

SEQ ID NO: 856067 - RNA, 18 nt, Human
ugugccaugugugaggag

SEQ ID NO: 856068 - RNA, 21 nt, Human
uguuccaccaacaaggagauc

SEQ ID NO: 856069 - RNA, 24 nt, Human
uugcuggcguagucagucccuucc

SEQ ID NO: 856070 - RNA, 20 nt, Human
uugugccaugugugaggagg

SEQ ID NO: 856071 - RNA, 22 nt, Human
uugugccaugugugaggagggc

SEQ ID NO: 856072 - RNA, 23 nt, Human
uuuuuuuuuuuucaaguagcuca

SEQ ID NO: 856073 - RNA, 22 nt, Human
uuuuuuuuuuuuuuuuuucaag

SEQ ID NO: 856074 - RNA, 20 nt, Human
aaacgguagcggcggccaca

SEQ ID NO: 856075 - RNA, 19 nt, Human
aaggccccaggccguuggg

SEQ ID NO: 856076 - RNA, 24 nt, Human
aagggggcuuugggacagggaggg

SEQ ID NO: 856077 - RNA, 19 nt, Human
acacugaguucauggacgc

SEQ ID NO: 856078 - RNA, 22 nt, Human
acaugacauaaauaaaaaaaua

SEQ ID NO: 856079 - RNA, 18 nt, Human
accgcagccaucgccauc

SEQ ID NO: 856080 - RNA, 20 nt, Human
acugaguucauggacgcgcc

SEQ ID NO: 856081 - RNA, 22 nt, Human
agggccccgcuggugggagaca

SEQ ID NO: 856082 - RNA, 23 nt, Human
cacccaaccguacuugacguugu

SEQ ID NO: 856083 - RNA, 18 nt, Human
cacccucgcccucgaaac

SEQ ID NO: 856084 - RNA, 19 nt, Human
cacucgggccagccccggg

SEQ ID NO: 856085 - RNA, 22 nt, Human
cagccacaguccgaggucaggc

SEQ ID NO: 856086 - RNA, 22 nt, Human
caggaaggggcgggaagucccg

SEQ ID NO: 856087 - RNA, 19 nt, Human
caggagggccccgcuggug

SEQ ID NO: 856088 - RNA, 18 nt, Human
cagguggggggcugcggc

SEQ ID NO: 856089 - RNA, 18 nt, Human
ccaagggggcuuugggac

SEQ ID NO: 856090 - RNA, 23 nt, Human
ccacacccgacaugacauaaaua

SEQ ID NO: 856091 - RNA, 20 nt, Human
ccagagcucaagaucccaca

SEQ ID NO: 856092 - RNA, 23 nt, Human
ccagcagccacaguucccccaag

SEQ ID NO: 856093 - RNA, 18 nt, Human
ccaggaaggggcgggaag

SEQ ID NO: 856094 - RNA, 21 nt, Human
ccccagccacaguccgagguc

SEQ ID NO: 856095 - RNA, 26 nt, Human
ccccaggccguuggggucugggccuc

SEQ ID NO: 856096 - RNA, 18 nt, Human
ccccaggguaccgggcca

SEQ ID NO: 856097 - RNA, 22 nt, Human
ccccgggagagccaagagcggg

SEQ ID NO: 856098 - RNA, 21 nt, Human
cccgcagccgguucacggggc

SEQ ID NO: 856099 - RNA, 21 nt, Human
cccugaggggggugcccgggg

SEQ ID NO: 856100 - RNA, 20 nt, Human
ccgagggcccaggugggggg

SEQ ID NO: 856101 - RNA, 21 nt, Human
ccgccgcugcuaccgcagcca

SEQ ID NO: 856102 - RNA, 18 nt, Human
ccgcugccccccaagggc

SEQ ID NO: 856103 - RNA, 25 nt, Human
ccucugggaccccgcggccugcggg

SEQ ID NO: 856104 - RNA, 20 nt, Human
ccugaggggggugcccgggg

SEQ ID NO: 856105 - RNA, 21 nt, Human
cgccgggagggcggaccgagg

SEQ ID NO: 856106 - RNA, 21 nt, Human
cgggagagccaagagcggggc

SEQ ID NO: 856107 - RNA, 20 nt, Human
cuggaaacgcuguaugucac

SEQ ID NO: 856108 - RNA, 19 nt, Human
cuguaugucacccucgccc

SEQ ID NO: 856109 - RNA, 19 nt, Human
gaaggcgcuacucggcccc

SEQ ID NO: 856110 - RNA, 23 nt, Human
gacacaaagucccgcuggaaacg

SEQ ID NO: 856111 - RNA, 19 nt, Human
gccagccccgggagagcca

SEQ ID NO: 856112 - RNA, 19 nt, Human
gccccgggagagccaagag

SEQ ID NO: 856113 - RNA, 21 nt, Human
gccucgggccggcggcgcgcg

SEQ ID NO: 856114 - RNA, 21 nt, Human
ggaaacgcuguaugucacccu

SEQ ID NO: 856115 - RNA, 22 nt, Human
ggaaacgcuguaugucacccuc

SEQ ID NO: 856116 - RNA, 19 nt, Human
ggagggcggaccgagggcc

SEQ ID NO: 856117 - RNA, 23 nt, Human
ggaugcuggagauugcuaaagcu

SEQ ID NO: 856118 - RNA, 21 nt, Human
ggcccccagcagccacaguuc

SEQ ID NO: 856119 - RNA, 25 nt, Human
gggaccccgcggccugcgggccucg

SEQ ID NO: 856120 - RNA, 24 nt, Human
gggcggaccgagggcccagguggg

SEQ ID NO: 856121 - RNA, 21 nt, Human
gggcguccagugcaaacuaca

SEQ ID NO: 856122 - RNA, 20 nt, Human
gguaccgggccaggcaacag

SEQ ID NO: 856123 - RNA, 24 nt, Human
gguugcagcugggcuugaggggcu

SEQ ID NO: 856124 - RNA, 21 nt, Human
guccggcucacucgggccagc

SEQ ID NO: 856125 - RNA, 20 nt, Human
uacacagcuuuauuggcccc

SEQ ID NO: 856126 - RNA, 18 nt, Human
uccccucauccccucccu

SEQ ID NO: 856127 - RNA, 18 nt, Human
uccgaggucaggcagccc

SEQ ID NO: 856128 - RNA, 23 nt, Human
ucugugggcucugucccuggcug

SEQ ID NO: 856129 - RNA, 21 nt, Human
ugaggggggugcccggggucc

SEQ ID NO: 856130 - RNA, 18 nt, Human
ugccagagcucaagaucc

SEQ ID NO: 856131 - RNA, 19 nt, Human
ugucccuggcugaauggcc

SEQ ID NO: 856132 - RNA, 21 nt, Human
uucacggggcccggggaaggc

SEQ ID NO: 856133 - RNA, 21 nt, Human
aaaaucacagcagauucaccg

SEQ ID NO: 856134 - RNA, 25 nt, Human
aaagaauauacccuccccugccucc

SEQ ID NO: 856135 - RNA, 23 nt, Human
aaccccgucuuucccuauaacac

SEQ ID NO: 856136 - RNA, 21 nt, Human
acagcagauucaccgaggcuc

SEQ ID NO: 856137 - RNA, 22 nt, Human
accuugagaccuugaagaagaa

SEQ ID NO: 856138 - RNA, 21 nt, Human
agaaacucuauuauccucagc

SEQ ID NO: 856139 - RNA, 22 nt, Human
caaaaucacagcagauucaccg

SEQ ID NO: 856140 - RNA, 23 nt, Human
caaaaucacagcagauucaccga

SEQ ID NO: 856141 - RNA, 22 nt, Human
caaguugcauaaagaguucuga

SEQ ID NO: 856142 - RNA, 24 nt, Human
cacuucgcgcuccuggggauacua

SEQ ID NO: 856143 - RNA, 22 nt, Human
cauaaagaguucugauucccag

SEQ ID NO: 856144 - RNA, 18 nt, Human
ccagccaggauuguaagc

SEQ ID NO: 856145 - RNA, 19 nt, Human
cuccuggggauacuagaag

SEQ ID NO: 856146 - RNA, 20 nt, Human
cucuauuauccucagccacu

SEQ ID NO: 856147 - RNA, 20 nt, Human
gcagagauuacuaagcagcu

SEQ ID NO: 856148 - RNA, 18 nt, Human
gguacagaaacaaagaga

SEQ ID NO: 856149 - RNA, 25 nt, Human
guuacaacugggcgcuugccuuauu

SEQ ID NO: 856150 - RNA, 24 nt, Human
uaacaucaaggcuccaggugagaa

SEQ ID NO: 856151 - RNA, 18 nt, Human
uacccuccccugccucca

SEQ ID NO: 856152 - RNA, 21 nt, Human
ucaagagcauggcugugucuu

SEQ ID NO: 856153 - RNA, 18 nt, Human
ucaccgaggcuccggggg

SEQ ID NO: 856154 - RNA, 21 nt, Human
ucagguacagaaacaaagaga

SEQ ID NO: 856155 - RNA, 25 nt, Human
ucccagagguaagaacugagccucg

SEQ ID NO: 856156 - RNA, 19 nt, Human
ucugauucccagagguaag

SEQ ID NO: 856157 - RNA, 24 nt, Human
ucugcuuuaauauuaagagauggc

SEQ ID NO: 856158 - RNA, 24 nt, Human
ugcuuuaauauuaagagauggcuu

SEQ ID NO: 856159 - RNA, 22 nt, Human
uggcuuucuaguuacauguuua

SEQ ID NO: 856160 - RNA, 19 nt, Human
uguaagugaagaaaucuau

SEQ ID NO: 856161 - RNA, 18 nt, Human
aaaacagucagacacgga

SEQ ID NO: 856162 - RNA, 18 nt, Human
aaaagacaggacccuaug

SEQ ID NO: 856163 - RNA, 28 nt, Human
aaacagccagcgagcagccuggcccagc

SEQ ID NO: 856164 - RNA, 23 nt, Human
aaacagucagacacggaacaugc

SEQ ID NO: 856165 - RNA, 18 nt, Human
aacucaucuuuccaucca

SEQ ID NO: 856166 - RNA, 18 nt, Human
aagcagcagcaacucugg

SEQ ID NO: 856167 - RNA, 21 nt, Human
aagcuaagagcagagcagaga

SEQ ID NO: 856168 - RNA, 18 nt, Human
aagcuguuuucuuggaga

SEQ ID NO: 856169 - RNA, 21 nt, Human
aaggagccuggacucacuggc

SEQ ID NO: 856170 - RNA, 19 nt, Human
acacagcugaaccuccugu

SEQ ID NO: 856171 - RNA, 22 nt, Human
acacgccgccugcaucccaugc

SEQ ID NO: 856172 - RNA, 21 nt, Human
acaggacaucuuaaaaggaaa

SEQ ID NO: 856173 - RNA, 20 nt, Human
accccagggcuccugagggc

SEQ ID NO: 856174 - RNA, 19 nt, Human
agaaugcugucgcuguucu

SEQ ID NO: 856175 - RNA, 24 nt, Human
agagugcggguccccugaggagca

SEQ ID NO: 856176 - RNA, 24 nt, Human
agcaaggacccagaggucugggug

SEQ ID NO: 856177 - RNA, 20 nt, Human
agcacaggagcugauggcag

SEQ ID NO: 856178 - RNA, 18 nt, Human
agccagcgagcagccugg

SEQ ID NO: 856179 - RNA, 24 nt, Human
agcuugggugacgcuccugccugc

SEQ ID NO: 856180 - RNA, 21 nt, Human
aggacaaaguggggaaggcgg

SEQ ID NO: 856181 - RNA, 23 nt, Human
aggacccagaggucugggugcag

SEQ ID NO: 856182 - RNA, 23 nt, Human
aggggcccugcagagcagccacc

SEQ ID NO: 856183 - RNA, 19 nt, Human
agucagacacggaacaugc

SEQ ID NO: 856184 - RNA, 20 nt, Human
auuucaucagggucagaggc

SEQ ID NO: 856185 - RNA, 22 nt, Human
caccgaggcuggggagucgggc

SEQ ID NO: 856186 - RNA, 24 nt, Human
caccuccggccacggccauugcuc

SEQ ID NO: 856187 - RNA, 18 nt, Human
caccugaacggucacagc

SEQ ID NO: 856188 - RNA, 20 nt, Human
caccuggccagaucugagcc

SEQ ID NO: 856189 - RNA, 19 nt, Human
cacuccucauucaguuccc

SEQ ID NO: 856190 - RNA, 23 nt, Human
cagagaaaaucaacagcagcaca

SEQ ID NO: 856191 - RNA, 22 nt, Human
cagagaccagccugccaucugc

SEQ ID NO: 856192 - RNA, 18 nt, Human
cagcgagcagccuggccc

SEQ ID NO: 856193 - RNA, 20 nt, Human
caggcccaggggaagggccc

SEQ ID NO: 856194 - RNA, 24 nt, Human
caucccaugcgcaccuccggccac

SEQ ID NO: 856195 - RNA, 21 nt, Human
caucuuaaaaggaaacccaag

SEQ ID NO: 856196 - RNA, 21 nt, Human
cauggcuccugcugugugcca

SEQ ID NO: 856197 - RNA, 20 nt, Human
cauuuucacucauugugggg

SEQ ID NO: 856198 - RNA, 19 nt, Human
ccacggccauugcucaccu

SEQ ID NO: 856199 - RNA, 21 nt, Human
ccacucccaaaagacaggacc

SEQ ID NO: 856200 - RNA, 20 nt, Human
ccagaggucugggugcaggg

SEQ ID NO: 856201 - RNA, 20 nt, Human
ccagcacuccccacucccaa

SEQ ID NO: 856202 - RNA, 22 nt, Human
ccagcacuccccacucccaaaa

SEQ ID NO: 856203 - RNA, 19 nt, Human
cccagcacuccccacuccc

SEQ ID NO: 856204 - RNA, 22 nt, Human
cccaugcgcaccuccggccacg

SEQ ID NO: 856205 - RNA, 26 nt, Human
cccaugcgcaccuccggccacggcca

SEQ ID NO: 856206 - RNA, 18 nt, Human
ccccagggcuccugaggg

SEQ ID NO: 856207 - RNA, 19 nt, Human
ccgaagcuauuucaucagg

SEQ ID NO: 856208 - RNA, 19 nt, Human
ccucacaggcacacagcug

SEQ ID NO: 856209 - RNA, 19 nt, Human
ccuccugcauuuucacuca

SEQ ID NO: 856210 - RNA, 18 nt, Human
ccucugaagacaaugcug

SEQ ID NO: 856211 - RNA, 23 nt, Human
ccugaacggucacagcucgaccc

SEQ ID NO: 856212 - RNA, 21 nt, Human
ccugggagccggguggguggg

SEQ ID NO: 856213 - RNA, 21 nt, Human
cgccgccugcaucccaugcgc

SEQ ID NO: 856214 - RNA, 22 nt, Human
cgccugcaucccaugcgcaccu

SEQ ID NO: 856215 - RNA, 24 nt, Human
cuagagugucacucaggcuugggg

SEQ ID NO: 856216 - RNA, 21 nt, Human
cucaggacaaaguggggaagg

SEQ ID NO: 856217 - RNA, 21 nt, Human
cucuggugcuggggaggaccc

SEQ ID NO: 856218 - RNA, 21 nt, Human
cuggauaaccuacacaacuca

SEQ ID NO: 856219 - RNA, 20 nt, Human
gaaacuccacuaucugcuaa

SEQ ID NO: 856220 - RNA, 23 nt, Human
gagaugacacuaacaugaucuug

SEQ ID NO: 856221 - RNA, 20 nt, Human
gagggcuuccuaaugaggau

SEQ ID NO: 856222 - RNA, 18 nt, Human
gauccugggagccgggug

SEQ ID NO: 856223 - RNA, 24 nt, Human
gaugccaaggaggacagggguauc

SEQ ID NO: 856224 - RNA, 21 nt, Human
gcagcaacucuggugcugggg

SEQ ID NO: 856225 - RNA, 18 nt, Human
gcaggcucugcacaccca

SEQ ID NO: 856226 - RNA, 19 nt, Human
gccuggcccagcacucccc

SEQ ID NO: 856227 - RNA, 22 nt, Human
gcugccggggaauucucuucug

SEQ ID NO: 856228 - RNA, 22 nt, Human
gcuggggagucgggcucaccaa

SEQ ID NO: 856229 - RNA, 21 nt, Human
gcugugggaacgggcccaggg

SEQ ID NO: 856230 - RNA, 23 nt, Human
ggaagggcccacagugggcugcg

SEQ ID NO: 856231 - RNA, 19 nt, Human
ggagcagggaggcgagggg

SEQ ID NO: 856232 - RNA, 22 nt, Human
ggaggacaggcagcgcccucug

SEQ ID NO: 856233 - RNA, 18 nt, Human
ggauaaccuacacaacuc

SEQ ID NO: 856234 - RNA, 22 nt, Human
ggcaaggagacccaccccaggg

SEQ ID NO: 856235 - RNA, 19 nt, Human
ggcacagugcagccagagg

SEQ ID NO: 856236 - RNA, 19 nt, Human
ggcaggggcugccugagca

SEQ ID NO: 856237 - RNA, 22 nt, Human
ggccacggccauugcucaccuc

SEQ ID NO: 856238 - RNA, 21 nt, Human
ggcccagcacuccccacuccc

SEQ ID NO: 856239 - RNA, 19 nt, Human
ggcccaggggaagggccca

SEQ ID NO: 856240 - RNA, 20 nt, Human
gggaagggcccacagugggc

SEQ ID NO: 856241 - RNA, 24 nt, Human
gggaauucucuucugaagcuuggg

SEQ ID NO: 856242 - RNA, 22 nt, Human
gggugcagguggagggucaugg

SEQ ID NO: 856243 - RNA, 24 nt, Human
gguggucaaugcugaugugggcca

SEQ ID NO: 856244 - RNA, 23 nt, Human
guaagcuaagagcagagcagaga

SEQ ID NO: 856245 - RNA, 25 nt, Human
guggggaaggcggggcaggcucugc

SEQ ID NO: 856246 - RNA, 21 nt, Human
uaaaaggaaacccaaguucau

SEQ ID NO: 856247 - RNA, 24 nt, Human
uaaaaggaaacccaaguucauguu

SEQ ID NO: 856248 - RNA, 22 nt, Human
uaacacaaauggagcguucaca

SEQ ID NO: 856249 - RNA, 22 nt, Human
uaauagagaugacacuaacaug

SEQ ID NO: 856250 - RNA, 20 nt, Human
uaauagagaugacacuaacu

SEQ ID NO: 856251 - RNA, 19 nt, Human
uagagugucacucaggcuu

SEQ ID NO: 856252 - RNA, 22 nt, Human
ucacagcucgacccaagucugc

SEQ ID NO: 856253 - RNA, 18 nt, Human
ucaggcuuggggccggga

SEQ ID NO: 856254 - RNA, 24 nt, Human
ucaucuggauaaccuacacaacuc

SEQ ID NO: 856255 - RNA, 25 nt, Human
uccaaagcaucuaauagagaugaca

SEQ ID NO: 856256 - RNA, 23 nt, Human
ucccaugcgcaccuccggccacg

SEQ ID NO: 856257 - RNA, 24 nt, Human
uccccugaggagcagggaggcgag

SEQ ID NO: 856258 - RNA, 24 nt, Human
uccuagagugucacucaggcuugg

SEQ ID NO: 856259 - RNA, 18 nt, Human
uccugagggcuuccuaau

SEQ ID NO: 856260 - RNA, 25 nt, Human
uccugcauuuucacucauugugggg

SEQ ID NO: 856261 - RNA, 23 nt, Human
uccugcugugugccaggugcugu

SEQ ID NO: 856262 - RNA, 19 nt, Human
ucucaccgagggcaggggc

SEQ ID NO: 856263 - RNA, 23 nt, Human
ucugcuaaaaccuuccauucugu

SEQ ID NO: 856264 - RNA, 21 nt, Human
ugagaaggagccuggacucag

SEQ ID NO: 856265 - RNA, 21 nt, Human
ugcaaaugccaccgaagcuau

SEQ ID NO: 856266 - RNA, 19 nt, Human
ugcaauccuagagugucac

SEQ ID NO: 856267 - RNA, 18 nt, Human
ugccaaggaggacaggca

SEQ ID NO: 856268 - RNA, 23 nt, Human
ugcccaaaucuucugaaugucgc

SEQ ID NO: 856269 - RNA, 21 nt, Human
ugcucccuggauguagccuca

SEQ ID NO: 856270 - RNA, 20 nt, Human
ugcugcccaaaucuucugaa

SEQ ID NO: 856271 - RNA, 18 nt, Human
ugcuuuaauuccuaaggc

SEQ ID NO: 856272 - RNA, 18 nt, Human
uggaaaaugaucacaagg

SEQ ID NO: 856273 - RNA, 18 nt, Human
uggauaaccuacacaacu

SEQ ID NO: 856274 - RNA, 21 nt, Human
uggcacagugcagccagaggg

SEQ ID NO: 856275 - RNA, 18 nt, Human
ugggagccgggugggugg

SEQ ID NO: 856276 - RNA, 20 nt, Human
ugggagccgggugggugggg

SEQ ID NO: 856277 - RNA, 21 nt, Human
uggggaaggcggggcaggcuc

SEQ ID NO: 856278 - RNA, 18 nt, Human
ugugggaacgggcccagg

SEQ ID NO: 856279 - RNA, 23 nt, Human
uucaguguacugaaauucccauc

SEQ ID NO: 856280 - RNA, 19 nt, Human
uucauucuuuaaucuguuc

SEQ ID NO: 856281 - RNA, 23 nt, Human
uuccuaaugaggauccugggagc

SEQ ID NO: 856282 - RNA, 24 nt, Human
uuuuuuuuuuuucaacuuuuaagg

SEQ ID NO: 856283 - RNA, 30 nt, Human
uuuuuuuuuuuuuuuuuuucaacuuuuaaa

SEQ ID NO: 856284 - RNA, 21 nt, Human
auugcaauugaauuauccaau

SEQ ID NO: 856285 - RNA, 21 nt, Human
cggagcugcuuacaagcuucu

SEQ ID NO: 856286 - RNA, 24 nt, Human
ucggagcugcuuacaagcuucuuu

SEQ ID NO: 856287 - RNA, 20 nt, Human
ucuuuagcuuuaagcucauu

SEQ ID NO: 856288 - RNA, 27 nt, Human
uuuuuuuuuuuuuuuuuuuuuuugggg

SEQ ID NO: 856289 - RNA, 23 nt, Human
aaacuugccuaaggccucccaga

SEQ ID NO: 856290 - RNA, 20 nt, Human
aaauagcugggauuacaggc

SEQ ID NO: 856291 - RNA, 24 nt, Human
aaauagcugggauuacaggcuugc

SEQ ID NO: 856292 - RNA, 21 nt, Human
aaccagguaaggugguuucca

SEQ ID NO: 856293 - RNA, 18 nt, Human
aagcgaaaauccaaaugc

SEQ ID NO: 856294 - RNA, 25 nt, Human
aagcgauucuccugccucagccucc

SEQ ID NO: 856295 - RNA, 21 nt, Human
acaggcuugcgccaccacacc

SEQ ID NO: 856296 - RNA, 25 nt, Human
acucuguuguccaggcuggagugca

SEQ ID NO: 856297 - RNA, 24 nt, Human
agagugcugggauuacaggccuga

SEQ ID NO: 856298 - RNA, 24 nt, Human
agcgauucuccugccucagccucc

SEQ ID NO: 856299 - RNA, 25 nt, Human
aggcuggagugcaguggugcgaucu

SEQ ID NO: 856300 - RNA, 24 nt, Human
aggugauccacaugcauuggccuc

SEQ ID NO: 856301 - RNA, 20 nt, Human
agugcaguggugcgaucucg

SEQ ID NO: 856302 - RNA, 23 nt, Human
agugcaguggugcgaucucggcu

SEQ ID NO: 856303 - RNA, 24 nt, Human
agugcaguggugcgaucucggcuc

SEQ ID NO: 856304 - RNA, 18 nt, Human
agugcugggauuacaggc

SEQ ID NO: 856305 - RNA, 22 nt, Human
agugcugggauuacaggccuga

SEQ ID NO: 856306 - RNA, 24 nt, Human
agugcugggauuacaggccugagc

SEQ ID NO: 856307 - RNA, 22 nt, Human
auagcugggauuacaggcuugc

SEQ ID NO: 856308 - RNA, 23 nt, Human
auccagcucgacuguucuugauc

SEQ ID NO: 856309 - RNA, 20 nt, Human
aucucugggcaaggcagcuc

SEQ ID NO: 856310 - RNA, 24 nt, Human
augggguuucaggcaguuggccag

SEQ ID NO: 856311 - RNA, 24 nt, Human
auuuuuguauuuuuaguagagaug

SEQ ID NO: 856312 - RNA, 22 nt, Human
caagcgauucuccugccucagc

SEQ ID NO: 856313 - RNA, 22 nt, Human
cacaggaguugcagccccgccc

SEQ ID NO: 856314 - RNA, 24 nt, Human
caccacaccuggcuaauuuuugua

SEQ ID NO: 856315 - RNA, 24 nt, Human
cacucuguuguccaggcuggagug

SEQ ID NO: 856316 - RNA, 21 nt, Human
cacugcaaccucugccucccg

SEQ ID NO: 856317 - RNA, 23 nt, Human
cacugcaaccucugccucccggg

SEQ ID NO: 856318 - RNA, 18 nt, Human
cagagugcugggauuaca

SEQ ID NO: 856319 - RNA, 21 nt, Human
cagccccgcccccgccccccu

SEQ ID NO: 856320 - RNA, 19 nt, Human
cagcuccugaccccuaccc

SEQ ID NO: 856321 - RNA, 20 nt, Human
caggcaguuggccaggcugg

SEQ ID NO: 856322 - RNA, 24 nt, Human
caggcaguuggccaggcuggucuc

SEQ ID NO: 856323 - RNA, 22 nt, Human
ccacaugcauuggccucccaga

SEQ ID NO: 856324 - RNA, 24 nt, Human
ccacucuguuguccaggcuggagu

SEQ ID NO: 856325 - RNA, 20 nt, Human
ccagaaaguguauuuugaag

SEQ ID NO: 856326 - RNA, 19 nt, Human
ccagagugcugggauuaca

SEQ ID NO: 856327 - RNA, 22 nt, Human
ccagagugcugggauuacaggc

SEQ ID NO: 856328 - RNA, 24 nt, Human
ccagagugcugggauuacaggccu

SEQ ID NO: 856329 - RNA, 23 nt, Human
ccagcgauguugcugccccuccc

SEQ ID NO: 856330 - RNA, 18 nt, Human
ccaggcuggagugcagug

SEQ ID NO: 856331 - RNA, 24 nt, Human
cccaaauagcugggauuacaggcu

SEQ ID NO: 856332 - RNA, 19 nt, Human
ccccgccccccugggauga

SEQ ID NO: 856333 - RNA, 21 nt, Human
cccgccccccugggaugacua

SEQ ID NO: 856334 - RNA, 20 nt, Human
cccggguucaagcgauucuc

SEQ ID NO: 856335 - RNA, 23 nt, Human
cccggguucaagcgauucuccug

SEQ ID NO: 856336 - RNA, 24 nt, Human
ccucccggguucaagcgauucucc

SEQ ID NO: 856337 - RNA, 20 nt, Human
ccugaccucaggugauccac

SEQ ID NO: 856338 - RNA, 23 nt, Human
ccugaccucaggugauccacaug

SEQ ID NO: 856339 - RNA, 24 nt, Human
ccugaccucaggugauccacaugg

SEQ ID NO: 856340 - RNA, 23 nt, Human
cuaauuuuuguauuuuuaguaga

SEQ ID NO: 856341 - RNA, 24 nt, Human
cucacugcaaccucugccucccgg

SEQ ID NO: 856342 - RNA, 24 nt, Human
cucccaaauagcugggauuacagg

SEQ ID NO: 856343 - RNA, 24 nt, Human
cugaccccuacccagggcccuucc

SEQ ID NO: 856344 - RNA, 19 nt, Human
cugcaaccucugccucccg

SEQ ID NO: 856345 - RNA, 23 nt, Human
cugcaaccucugccucccggguu

SEQ ID NO: 856346 - RNA, 24 nt, Human
cugcaaccucugccucccggguuc

SEQ ID NO: 856347 - RNA, 23 nt, Human
cugccucagccucccaaauagcu

SEQ ID NO: 856348 - RNA, 19 nt, Human
gaccucaggugauccacau

SEQ ID NO: 856349 - RNA, 19 nt, Human
gagugcugggauuacaggc

SEQ ID NO: 856350 - RNA, 25 nt, Human
gauacacacacagcucauuuauaca

SEQ ID NO: 856351 - RNA, 20 nt, Human
gaugacuagugcuggacaag

SEQ ID NO: 856352 - RNA, 18 nt, Human
gauuacaggccugagcca

SEQ ID NO: 856353 - RNA, 22 nt, Human
gauuacaggccugagccaccgc

SEQ ID NO: 856354 - RNA, 20 nt, Human
gcacacuccugguaacccca

SEQ ID NO: 856355 - RNA, 18 nt, Human
gcaguuggccaggcuggu

SEQ ID NO: 856356 - RNA, 22 nt, Human
gcaguuggccaggcuggucucg

SEQ ID NO: 856357 - RNA, 24 nt, Human
gccugagccaccgcgccaggccuc

SEQ ID NO: 856358 - RNA, 24 nt, Human
gcgauucuccugccucagccuccc

SEQ ID NO: 856359 - RNA, 23 nt, Human
gcuggucucgaacuccugaccuc

SEQ ID NO: 856360 - RNA, 21 nt, Human
ggcagcuccugaccccuaccc

SEQ ID NO: 856361 - RNA, 24 nt, Human
ggcuggucucgaacuccugaccuc

SEQ ID NO: 856362 - RNA, 22 nt, Human
gggguuucaggcaguuggccag

SEQ ID NO: 856363 - RNA, 22 nt, Human
gguaaggugguuuccaaaagcg

SEQ ID NO: 856364 - RNA, 19 nt, Human
ggucucgaacuccugaccu

SEQ ID NO: 856365 - RNA, 24 nt, Human
gugauccacaugcauuggccuccc

SEQ ID NO: 856366 - RNA, 20 nt, Human
uaaaccauucucagugccca

SEQ ID NO: 856367 - RNA, 24 nt, Human
uaauuuuuguauuuuuaguagaga

SEQ ID NO: 856368 - RNA, 23 nt, Human
uacaccucaggguucccagcgau

SEQ ID NO: 856369 - RNA, 22 nt, Human
uacaggcuugcgccaccacacc

SEQ ID NO: 856370 - RNA, 23 nt, Human
uacccauuuuggggagaggauuc

SEQ ID NO: 856371 - RNA, 20 nt, Human
uagagaugggguuucaggca

SEQ ID NO: 856372 - RNA, 21 nt, Human
uagagaugggguuucaggcag

SEQ ID NO: 856373 - RNA, 19 nt, Human
uaguagagaugggguuuca

SEQ ID NO: 856374 - RNA, 20 nt, Human
uaguagagaugggguuucag

SEQ ID NO: 856375 - RNA, 21 nt, Human
uaguagagaugggguuucagg

SEQ ID NO: 856376 - RNA, 23 nt, Human
uaguagagaugggguuucaggca

SEQ ID NO: 856377 - RNA, 24 nt, Human
ucacugcaaccucugccucccggg

SEQ ID NO: 856378 - RNA, 25 nt, Human
ucacugcaaccucugccucccgggu

SEQ ID NO: 856379 - RNA, 18 nt, Human
ucagccucccaaauagcu

SEQ ID NO: 856380 - RNA, 22 nt, Human
ucaggccauaaaccauucucag

SEQ ID NO: 856381 - RNA, 24 nt, Human
ucccaaauagcugggauuacaggc

SEQ ID NO: 856382 - RNA, 24 nt, Human
ucccacucuguuguccaggcugga

SEQ ID NO: 856383 - RNA, 24 nt, Human
ucccagagugcugggauuacaggc

SEQ ID NO: 856384 - RNA, 19 nt, Human
ucccagcgauguugcugcc

SEQ ID NO: 856385 - RNA, 21 nt, Human
ucccggguucaagcgauucuc

SEQ ID NO: 856386 - RNA, 24 nt, Human
ucccggguucaagcgauucuccug

SEQ ID NO: 856387 - RNA, 27 nt, Human
ucccucauggagcaaaccagguaaggu

SEQ ID NO: 856388 - RNA, 26 nt, Human
ucuccugccucagccucccaaauagc

SEQ ID NO: 856389 - RNA, 23 nt, Human
ucucgaacuccugaccucaggug

SEQ ID NO: 856390 - RNA, 22 nt, Human
ucucugggcaaggcagcuccug

SEQ ID NO: 856391 - RNA, 24 nt, Human
ucuguuguccaggcuggagugcag

SEQ ID NO: 856392 - RNA, 23 nt, Human
ucuugaucaaacuugccuaaggc

SEQ ID NO: 856393 - RNA, 18 nt, Human
ugagacagagucccacuc

SEQ ID NO: 856394 - RNA, 22 nt, Human
ugagacagagucccacucuguu

SEQ ID NO: 856395 - RNA, 18 nt, Human
ugagacgcacacuccugg

SEQ ID NO: 856396 - RNA, 25 nt, Human
ugagacgcacacuccugguaacccc

SEQ ID NO: 856397 - RNA, 22 nt, Human
ugcagccccgcccccgcccccc

SEQ ID NO: 856398 - RNA, 27 nt, Human
ugccucagccucccaaauagcugggau

SEQ ID NO: 856399 - RNA, 22 nt, Human
ugcuacccauuuuggggagagg

SEQ ID NO: 856400 - RNA, 23 nt, Human
uggacaaggaacagccuguuuau

SEQ ID NO: 856401 - RNA, 23 nt, Human
uggagugcaguggugcgaucucg

SEQ ID NO: 856402 - RNA, 24 nt, Human
uggagugcaguggugcgaucucgg

SEQ ID NO: 856403 - RNA, 24 nt, Human
uggccaggcuggucucgaacuccu

SEQ ID NO: 856404 - RNA, 18 nt, Human
ugggauuacaggccugag

SEQ ID NO: 856405 - RNA, 19 nt, Human
ugggauuacaggccugagc

SEQ ID NO: 856406 - RNA, 21 nt, Human
ugggauuacaggccugagcca

SEQ ID NO: 856407 - RNA, 22 nt, Human
ugggauuacaggccugagccac

SEQ ID NO: 856408 - RNA, 23 nt, Human
ugggauuacaggccugagccacc

SEQ ID NO: 856409 - RNA, 24 nt, Human
ugggauuacaggccugagccaccg

SEQ ID NO: 856410 - RNA, 18 nt, Human
ugggauuacaggcuugcg

SEQ ID NO: 856411 - RNA, 24 nt, Human
ugggauuacaggcuugcgccacca

SEQ ID NO: 856412 - RNA, 24 nt, Human
ugggguuucaggcaguuggccagg

SEQ ID NO: 856413 - RNA, 21 nt, Human
uguauuuuuaguagagauggg

SEQ ID NO: 856414 - RNA, 20 nt, Human
uguccaggcuggagugcagu

SEQ ID NO: 856415 - RNA, 24 nt, Human
uguccaggcuggagugcaguggug

SEQ ID NO: 856416 - RNA, 18 nt, Human
uguugcugccccucccuc

SEQ ID NO: 856417 - RNA, 19 nt, Human
uguuguccaggcuggagug

SEQ ID NO: 856418 - RNA, 18 nt, Human
uuaguagagaugggguuu

SEQ ID NO: 856419 - RNA, 21 nt, Human
uucaagcgauucuccugccuc

SEQ ID NO: 856420 - RNA, 23 nt, Human
uucaagcgauucuccugccucag

SEQ ID NO: 856421 - RNA, 24 nt, Human
uucaagcgauucuccugccucagc

SEQ ID NO: 856422 - RNA, 22 nt, Human
uugagacagagucccacucugu

SEQ ID NO: 856423 - RNA, 23 nt, Human
uugcagccccgcccccgcccccc

SEQ ID NO: 856424 - RNA, 22 nt, Human
uuuuuaguagagaugggguuuc

SEQ ID NO: 856425 - RNA, 20 nt, Human
uuuuuguauuuuuaguagag

SEQ ID NO: 856426 - RNA, 20 nt, Human
uuuuuuuuuuugagacagag

SEQ ID NO: 856427 - RNA, 18 nt, Human
uuuuuuuuuuuuuuuuug

SEQ ID NO: 856428 - RNA, 25 nt, Human
aaaaaaaaaagacaaaaaaccucac

SEQ ID NO: 856429 - RNA, 22 nt, Human
aaaaaagacaaaaaaccucaca

SEQ ID NO: 856430 - RNA, 21 nt, Human
aaaaagucuaaaaugcuuaga

SEQ ID NO: 856431 - RNA, 18 nt, Human
aaacagcagaucaagucc

SEQ ID NO: 856432 - RNA, 21 nt, Human
aaacagcagaucaaguccagg

SEQ ID NO: 856433 - RNA, 23 nt, Human
aaacagcagaucaaguccaggga

SEQ ID NO: 856434 - RNA, 19 nt, Human
aaacaggaugagggaccuu

SEQ ID NO: 856435 - RNA, 19 nt, Human
aaacaggaugagggaccuu

SEQ ID NO: 856436 - RNA, 18 nt, Human
aaaccuuccuauuucaac

SEQ ID NO: 856437 - RNA, 24 nt, Human
aaaguagauacagcaauauaccaa

SEQ ID NO: 856438 - RNA, 19 nt, Human
aaccuagccucugaaacag

SEQ ID NO: 856439 - RNA, 19 nt, Human
aaccuguaacucucucccc

SEQ ID NO: 856440 - RNA, 23 nt, Human
aagcaacccacgggauucccucg

SEQ ID NO: 856441 - RNA, 20 nt, Human
aagcccaagucucaccuuuc

SEQ ID NO: 856442 - RNA, 19 nt, Human
aagcgggcagggccugagg

SEQ ID NO: 856443 - RNA, 26 nt, Human
aaguaucccagcccugauaaggcacc

SEQ ID NO: 856444 - RNA, 23 nt, Human
accagauacaugcuaccucccau

SEQ ID NO: 856445 - RNA, 19 nt, Human
accagccucagagggaggc

SEQ ID NO: 856446 - RNA, 25 nt, Human
accagccucagagggaggggaacgc

SEQ ID NO: 856447 - RNA, 19 nt, Human
accuguaacucucuccccc

SEQ ID NO: 856448 - RNA, 20 nt, Human
agaaacaaccuagccucuga

SEQ ID NO: 856449 - RNA, 26 nt, Human
agaugucuuaaggguuugaccugaag

SEQ ID NO: 856450 - RNA, 22 nt, Human
agcaauauaccaaaaaaaaaaa

SEQ ID NO: 856451 - RNA, 19 nt, Human
agcacccucugcccagccu

SEQ ID NO: 856452 - RNA, 22 nt, Human
agcccugauaaggcacccacag

SEQ ID NO: 856453 - RNA, 21 nt, Human
aggaagcgggcagggccugag

SEQ ID NO: 856454 - RNA, 21 nt, Human
aggccaauacauuacaaagga

SEQ ID NO: 856455 - RNA, 22 nt, Human
aggcccucuagcuguucugccu

SEQ ID NO: 856456 - RNA, 21 nt, Human
aggcgggcaggcggggaggcc

SEQ ID NO: 856457 - RNA, 24 nt, Human
agggaccuuuagacacgcaaggag

SEQ ID NO: 856458 - RNA, 19 nt, Human
agguauacacccucauacg

SEQ ID NO: 856459 - RNA, 23 nt, Human
auucagagaccagcuaauuugau

SEQ ID NO: 856460 - RNA, 30 nt, Human
caaaaaaaaaaaaaaaaaaagacaaaaaag

SEQ ID NO: 856461 - RNA, 21 nt, Human
caaaaaaccucacaauaauau

SEQ ID NO: 856462 - RNA, 22 nt, Human
caacaccaaaggccagguugca

SEQ ID NO: 856463 - RNA, 23 nt, Human
caacaccaaaggccagguugcag

SEQ ID NO: 856464 - RNA, 25 nt, Human
caacaccaaaggccagguugcagcu

SEQ ID NO: 856465 - RNA, 24 nt, Human
caaggcgggcaggcggggaggccc

SEQ ID NO: 856466 - RNA, 23 nt, Human
cacagaaacaaccuagccucuga

SEQ ID NO: 856467 - RNA, 21 nt, Human
caccaaaggccagguugcagc

SEQ ID NO: 856468 - RNA, 22 nt, Human
cacuaugaaguacacauuggaa

SEQ ID NO: 856469 - RNA, 21 nt, Human
cagaaguaucccagcccugau

SEQ ID NO: 856470 - RNA, 23 nt, Human
cagaguuaagaccagauacaugc

SEQ ID NO: 856471 - RNA, 20 nt, Human
cagcuucagaugucuuaagg

SEQ ID NO: 856472 - RNA, 19 nt, Human
caguaagccuuugcccugc

SEQ ID NO: 856473 - RNA, 23 nt, Human
caucauguccaaccuguaacucu

SEQ ID NO: 856474 - RNA, 20 nt, Human
ccaaaaaaaaaaaaaaaaaa

SEQ ID NO: 856475 - RNA, 21 nt, Human
cccaagucucaccuuucuaaa

SEQ ID NO: 856476 - RNA, 25 nt, Human
cccuaggucccuaugauuuaaaccc

SEQ ID NO: 856477 - RNA, 22 nt, Human
ccucggcugggcuggggauggg

SEQ ID NO: 856478 - RNA, 23 nt, Human
ccugagaccaggauuccuaaaac

SEQ ID NO: 856479 - RNA, 20 nt, Human
cgcaaggagacaugccucua

SEQ ID NO: 856480 - RNA, 24 nt, Human
cgggcaggcggggaggcccucuuc

SEQ ID NO: 856481 - RNA, 23 nt, Human
cuaaaaggccaauacauuacaaa

SEQ ID NO: 856482 - RNA, 21 nt, Human
cuagccagccaaggcgggcug

SEQ ID NO: 856483 - RNA, 24 nt, Human
cucucucccccucuucuuccauga

SEQ ID NO: 856484 - RNA, 18 nt, Human
cuguucugccucaccugu

SEQ ID NO: 856485 - RNA, 19 nt, Human
gaagccagaaucagaagua

SEQ ID NO: 856486 - RNA, 20 nt, Human
gaccaggauuccuaaaacaa

SEQ ID NO: 856487 - RNA, 19 nt, Human
gacucaaguuuaucaguaa

SEQ ID NO: 856488 - RNA, 21 nt, Human
gacuggggucgggaggguggg

SEQ ID NO: 856489 - RNA, 20 nt, Human
gagaagcccugaacccucgc

SEQ ID NO: 856490 - RNA, 18 nt, Human
gagggggcaguggacagg

SEQ ID NO: 856491 - RNA, 23 nt, Human
gcacgugcuagguguucccauac

SEQ ID NO: 856492 - RNA, 22 nt, Human
gccagaaucagaaguaucccag

SEQ ID NO: 856493 - RNA, 18 nt, Human
gcccugaacccucgcccu

SEQ ID NO: 856494 - RNA, 19 nt, Human
ggcaguggacaggaagcgg

SEQ ID NO: 856495 - RNA, 24 nt, Human
gggaggguggggcaggaaggaagc

SEQ ID NO: 856496 - RNA, 18 nt, Human
gggauggggagggggcag

SEQ ID NO: 856497 - RNA, 24 nt, Human
gggcaguggacaggaagcgggcaa

SEQ ID NO: 856498 - RNA, 18 nt, Human
ggggacuggggucgggag

SEQ ID NO: 856499 - RNA, 23 nt, Human
ggggagggggcaguggacaggaa

SEQ ID NO: 856500 - RNA, 22 nt, Human
ggggauggggagggggcagugg

SEQ ID NO: 856501 - RNA, 22 nt, Human
ggggcaguggacaggaagcggg

SEQ ID NO: 856502 - RNA, 23 nt, Human
guggggcaggaaggaagccagaa

SEQ ID NO: 856503 - RNA, 19 nt, Human
guucccauacgcacaggag

SEQ ID NO: 856504 - RNA, 24 nt, Human
uaaaaggccaauacauuacaaagg

SEQ ID NO: 856505 - RNA, 20 nt, Human
uaacaaacagaauuccacag

SEQ ID NO: 856506 - RNA, 23 nt, Human
uaacaaacagaauuccacagaaa

SEQ ID NO: 856507 - RNA, 20 nt, Human
uaaggcacccacagaaacaa

SEQ ID NO: 856508 - RNA, 23 nt, Human
uaaggcacccacagaaacaaccu

SEQ ID NO: 856509 - RNA, 21 nt, Human
uaaggguuugaccugaagccu

SEQ ID NO: 856510 - RNA, 22 nt, Human
uacaaucagaguuaagaccaga

SEQ ID NO: 856511 - RNA, 18 nt, Human
uacugaagaguguugcug

SEQ ID NO: 856512 - RNA, 24 nt, Human
uagauacagcaauauaccaaaaaa

SEQ ID NO: 856513 - RNA, 25 nt, Human
uauaccaaaaaaaaaaaaaaaaaaa

SEQ ID NO: 856514 - RNA, 23 nt, Human
uauuauguacugaagaguguugc

SEQ ID NO: 856515 - RNA, 21 nt, Human
ucagaacuuuugcuacaauca

SEQ ID NO: 856516 - RNA, 20 nt, Human
uccagagaagcccugaaccc

SEQ ID NO: 856517 - RNA, 20 nt, Human
uccaggcaggaggacugggg

SEQ ID NO: 856518 - RNA, 18 nt, Human
ucccccucuucuuccaug

SEQ ID NO: 856519 - RNA, 20 nt, Human
uccugagaccaggauuccua

SEQ ID NO: 856520 - RNA, 19 nt, Human
ugaaacagcagaucaaguc

SEQ ID NO: 856521 - RNA, 19 nt, Human
ugaaacagcagaucaaguc

SEQ ID NO: 856522 - RNA, 20 nt, Human
ugaaacagcagaucaagucc

SEQ ID NO: 856523 - RNA, 22 nt, Human
ugaaacagcagaucaaguccag

SEQ ID NO: 856524 - RNA, 22 nt, Human
ugagucagaggcagcccaucca

SEQ ID NO: 856525 - RNA, 22 nt, Human
ugauaaggcacccacagaaaca

SEQ ID NO: 856526 - RNA, 23 nt, Human
ugcagcuucagaugucuuaaggg

SEQ ID NO: 856527 - RNA, 24 nt, Human
ugccaaauccggccaugccucuga

SEQ ID NO: 856528 - RNA, 23 nt, Human
ugccucaccuguggggccccagc

SEQ ID NO: 856529 - RNA, 21 nt, Human
ugccucugagucagaggcagc

SEQ ID NO: 856530 - RNA, 24 nt, Human
uggagaaguaagagcucugcauga

SEQ ID NO: 856531 - RNA, 19 nt, Human
uggggauggggagggggca

SEQ ID NO: 856532 - RNA, 20 nt, Human
uuccuaaaacaaacaggaug

SEQ ID NO: 856533 - RNA, 20 nt, Human
uuuaucaguuaagcuuauua

SEQ ID NO: 856534 - RNA, 18 nt, Human
uuuuuuuuuuuuuuuuug

SEQ ID NO: 856535 - RNA, 22 nt, Human
uuuuuuuuuuuuuuuuugacgg

SEQ ID NO: 856536 - RNA, 19 nt, Human
aaaagaagacgcaagaaaa

SEQ ID NO: 856537 - RNA, 22 nt, Human
aaacaguccuccacaggcuucc

SEQ ID NO: 856538 - RNA, 23 nt, Human
aaacucaucaguaaucaaggaca

SEQ ID NO: 856539 - RNA, 24 nt, Human
aaacucaucaguaaucaaggacac

SEQ ID NO: 856540 - RNA, 22 nt, Human
aaacuuuuggaagaaacagucc

SEQ ID NO: 856541 - RNA, 25 nt, Human
aaaggacacaccuacaagaaaaggc

SEQ ID NO: 856542 - RNA, 24 nt, Human
aagaaaaggcaaaauauaugaaaa

SEQ ID NO: 856543 - RNA, 18 nt, Human
aaggggucacccggugag

SEQ ID NO: 856544 - RNA, 22 nt, Human
aagggucagcggucaacagagc

SEQ ID NO: 856545 - RNA, 19 nt, Human
aagguggucaucgucaccu

SEQ ID NO: 856546 - RNA, 19 nt, Human
acaaauugagaagacaagc

SEQ ID NO: 856547 - RNA, 22 nt, Human
accaaaaacaccaaaaaaauca

SEQ ID NO: 856548 - RNA, 23 nt, Human
aggauauaccaaaaacaccaaaa

SEQ ID NO: 856549 - RNA, 24 nt, Human
aggauauaccaaaaaccggggccc

SEQ ID NO: 856550 - RNA, 22 nt, Human
augaaacuggggcagcagccuc

SEQ ID NO: 856551 - RNA, 21 nt, Human
auugucaguuccugaaaucac

SEQ ID NO: 856552 - RNA, 21 nt, Human
caaaaacaccaaaaaaaucaa

SEQ ID NO: 856553 - RNA, 18 nt, Human
caaaaacccaaaaacaaa

SEQ ID NO: 856554 - RNA, 22 nt, Human
caaaaacccaaaaacaaauuga

SEQ ID NO: 856555 - RNA, 18 nt, Human
caaagcaaaggggucacc

SEQ ID NO: 856556 - RNA, 24 nt, Human
caagaaaaggcaaaauauaugaaa

SEQ ID NO: 856557 - RNA, 19 nt, Human
caccagugcaaauacacug

SEQ ID NO: 856558 - RNA, 18 nt, Human
cagcauccaugaaacugg

SEQ ID NO: 856559 - RNA, 18 nt, Human
caggaaaagaagacgcaa

SEQ ID NO: 856560 - RNA, 21 nt, Human
caguaaucaaggacacacaua

SEQ ID NO: 856561 - RNA, 26 nt, Human
cauauaaaugacaaagaauuaguaca

SEQ ID NO: 856562 - RNA, 27 nt, Human
ccaaaaacaccaaaaaaaucaauuuga

SEQ ID NO: 856563 - RNA, 19 nt, Human
ccaaggaccgaagaggaaa

SEQ ID NO: 856564 - RNA, 18 nt, Human
ccacacaaagagaugcug

SEQ ID NO: 856565 - RNA, 18 nt, Human
ccccgugggcaucagggc

SEQ ID NO: 856566 - RNA, 24 nt, Human
cugcuucguggauguacggugcaa

SEQ ID NO: 856567 - RNA, 24 nt, Human
cuuccuguucuccuacaggucuua

SEQ ID NO: 856568 - RNA, 20 nt, Human
gaaaagaagacgcaagaaaa

SEQ ID NO: 856569 - RNA, 19 nt, Human
gaaaaggacacaccuacaa

SEQ ID NO: 856570 - RNA, 21 nt, Human
gaaacaaaaacccaaaaacaa

SEQ ID NO: 856571 - RNA, 21 nt, Human
gaagaaacaguccuccacagg

SEQ ID NO: 856572 - RNA, 18 nt, Human
gaugcuguuuaaaaucgg

SEQ ID NO: 856573 - RNA, 22 nt, Human
gcaaauacacugacacuggcca

SEQ ID NO: 856574 - RNA, 19 nt, Human
gcuacagaggacauaaaug

SEQ ID NO: 856575 - RNA, 22 nt, Human
ggaagaaacaguccuccacagg

SEQ ID NO: 856576 - RNA, 21 nt, Human
ggaccgaagaggaaauugaac

SEQ ID NO: 856577 - RNA, 22 nt, Human
ggcaucagggcuugaggcacca

SEQ ID NO: 856578 - RNA, 20 nt, Human
ggccacacaaagagaugcug

SEQ ID NO: 856579 - RNA, 23 nt, Human
gugaaaggagauauuauuaaugc

SEQ ID NO: 856580 - RNA, 21 nt, Human
uaaaugacaaagaauuaguac

SEQ ID NO: 856581 - RNA, 20 nt, Human
uacaagaaaaggcaaaauau

SEQ ID NO: 856582 - RNA, 30 nt, Human
uacacaggauauaccaaaaacaccaaaaaa

SEQ ID NO: 856583 - RNA, 22 nt, Human
uauaaaugacaaagaauuagua

SEQ ID NO: 856584 - RNA, 24 nt, Human
uauacauguguaagagcuaacacu

SEQ ID NO: 856585 - RNA, 24 nt, Human
uauaccaaaaacaccaaaaaaauc

SEQ ID NO: 856586 - RNA, 25 nt, Human
ucaguccaacaaaugacaauugcuc

SEQ ID NO: 856587 - RNA, 25 nt, Human
ucaguuccugaaaucacugagggaa

SEQ ID NO: 856588 - RNA, 24 nt, Human
uccaacaaaugacaauugcucaaa

SEQ ID NO: 856589 - RNA, 28 nt, Human
ucucugaaacaaaaacccaaaaacaaag

SEQ ID NO: 856590 - RNA, 21 nt, Human
ucugaaacaaaaacccaaaaa

SEQ ID NO: 856591 - RNA, 22 nt, Human
ugaaaaggccaaggaccgaaga

SEQ ID NO: 856592 - RNA, 20 nt, Human
ugaaacaaaaacccaaaaac

SEQ ID NO: 856593 - RNA, 22 nt, Human
ugaaacaaaaacccaaaaacaa

SEQ ID NO: 856594 - RNA, 23 nt, Human
ugaaacaaaaacccaaaaacaaa

SEQ ID NO: 856595 - RNA, 25 nt, Human
ugaaacaaaaacccaaaaacaaauu

SEQ ID NO: 856596 - RNA, 19 nt, Human
ugagaagacaagccacaca

SEQ ID NO: 856597 - RNA, 22 nt, Human
ugagaagacaagccacacagug

SEQ ID NO: 856598 - RNA, 19 nt, Human
ugagggaaauaauuuggca

SEQ ID NO: 856599 - RNA, 21 nt, Human
ugcaaggagacaaauugcagu

SEQ ID NO: 856600 - RNA, 24 nt, Human
ugcuacagaggacauaaauggcaa

SEQ ID NO: 856601 - RNA, 26 nt, Human
ugcuacagaggacauaaauggcaaac

SEQ ID NO: 856602 - RNA, 21 nt, Human
uggaagaaacaguccuccaca

SEQ ID NO: 856603 - RNA, 24 nt, Human
uugaggcaccagugcaaauacacu

SEQ ID NO: 856604 - RNA, 24 nt, Human
uuggugcaguccucacuguuuguc

SEQ ID NO: 856605 - RNA, 18 nt, Human
cacccuuccucuccccuu

SEQ ID NO: 856606 - RNA, 21 nt, Human
cacccuuccucuccccuuacu

SEQ ID NO: 856607 - RNA, 19 nt, Human
caccugguggcaggaacac

SEQ ID NO: 856608 - RNA, 19 nt, Human
ccccuuacuccuuuuccag

SEQ ID NO: 856609 - RNA, 20 nt, Human
ccuuacuccuuuuccagucc

SEQ ID NO: 856610 - RNA, 19 nt, Human
cggcagaccccaccuuccc

SEQ ID NO: 856611 - RNA, 22 nt, Human
cucgcggggagcgggcaccugg

SEQ ID NO: 856612 - RNA, 20 nt, Human
cuuccucuccccuuacuccu

SEQ ID NO: 856613 - RNA, 20 nt, Human
gaccccaccuucccucgugc

SEQ ID NO: 856614 - RNA, 23 nt, Human
gcagaccccaccuucccucgugc

SEQ ID NO: 856615 - RNA, 22 nt, Human
gcucacccuuccucuccccuua

SEQ ID NO: 856616 - RNA, 18 nt, Human
ggggacugaagauagguu

SEQ ID NO: 856617 - RNA, 20 nt, Human
guggggacugaagauagguu

SEQ ID NO: 856618 - RNA, 18 nt, Human
ucagaaaagggcaucacg

SEQ ID NO: 856619 - RNA, 24 nt, Human
uccccuuacuccuuuuccaguccu

SEQ ID NO: 856620 - RNA, 19 nt, Human
ugcagcugcucacccuucc

SEQ ID NO: 856621 - RNA, 21 nt, Human
uggaucguguaaauaaaggua

SEQ ID NO: 856622 - RNA, 21 nt, Human
ugggugguauucugauuggga

SEQ ID NO: 856623 - RNA, 24 nt, Human
ugggugguauucugauugggaagg

SEQ ID NO: 856624 - RNA, 20 nt, Human
uucuucguuguccugugggu

SEQ ID NO: 856625 - RNA, 22 nt, Human
uuguccuuggaggaaaaucuag

SEQ ID NO: 856626 - RNA, 21 nt, Human
uuuuuuggcuaaaauauugcu

SEQ ID NO: 856627 - RNA, 18 nt, Human
uuuuuuuuuuuuuuuuug

SEQ ID NO: 856628 - RNA, 21 nt, Human
uuuuuuuuuuuuuuuuuggcu

SEQ ID NO: 856629 - RNA, 22 nt, Human
uuuuuuuuuuuuuuuuuuuggc

SEQ ID NO: 856630 - RNA, 24 nt, Human
aaagugcugggauuauaggcauga

SEQ ID NO: 856631 - RNA, 20 nt, Human
aagccugaaccagacagcaa

SEQ ID NO: 856632 - RNA, 19 nt, Human
aagugcugggauuauaggc

SEQ ID NO: 856633 - RNA, 21 nt, Human
aagugcugggauuauaggcau

SEQ ID NO: 856634 - RNA, 22 nt, Human
acaggacuaucaggaacccauu

SEQ ID NO: 856635 - RNA, 20 nt, Human
accucacauggaaguagggc

SEQ ID NO: 856636 - RNA, 22 nt, Human
acuccucauuuucccuccccac

SEQ ID NO: 856637 - RNA, 24 nt, Human
agccuugcuauucaaagauggucu

SEQ ID NO: 856638 - RNA, 20 nt, Human
aggauggaacagccaaccgu

SEQ ID NO: 856639 - RNA, 21 nt, Human
aggcaugagccacugugccca

SEQ ID NO: 856640 - RNA, 19 nt, Human
aggcauuugccaccacgcc

SEQ ID NO: 856641 - RNA, 24 nt, Human
aggugauccucccaccuuggccuc

SEQ ID NO: 856642 - RNA, 25 nt, Human
aggugauccucccaccuuggccucc

SEQ ID NO: 856643 - RNA, 21 nt, Human
aguagcugggauuauaggcau

SEQ ID NO: 856644 - RNA, 19 nt, Human
agugcagugguacaaucuc

SEQ ID NO: 856645 - RNA, 19 nt, Human
aucuagagccuugcuauuc

SEQ ID NO: 856646 - RNA, 24 nt, Human
aucucaggccccacccaaaccaac

SEQ ID NO: 856647 - RNA, 22 nt, Human
augccucagccucccgaguagc

SEQ ID NO: 856648 - RNA, 21 nt, Human
auggaaguagggccuacccuc

SEQ ID NO: 856649 - RNA, 20 nt, Human
auggaguuucaucacguugg

SEQ ID NO: 856650 - RNA, 24 nt, Human
caaagugcugggauuauaggcaug

SEQ ID NO: 856651 - RNA, 28 nt, Human
caaguaauucucaugccucagccucccg

SEQ ID NO: 856652 - RNA, 19 nt, Human
cacaggacuaucaggaacc

SEQ ID NO: 856653 - RNA, 20 nt, Human
caccaccaccaccagaaucu

SEQ ID NO: 856654 - RNA, 22 nt, Human
caccagcagcacuggcagcacc

SEQ ID NO: 856655 - RNA, 20 nt, Human
cacguuggccaggcuggccu

SEQ ID NO: 856656 - RNA, 24 nt, Human
cacguuggccaggcuggccuugaa

SEQ ID NO: 856657 - RNA, 23 nt, Human
cacugcgaucucugccuccuggg

SEQ ID NO: 856658 - RNA, 20 nt, Human
cacuuuuuuuuugagacaca

SEQ ID NO: 856659 - RNA, 20 nt, Human
cagaaucucaggccccaccc

SEQ ID NO: 856660 - RNA, 26 nt, Human
caucacguuggccaggcuggccuuga

SEQ ID NO: 856661 - RNA, 27 nt, Human
cauucagaaacacacgacccauuuagc

SEQ ID NO: 856662 - RNA, 24 nt, Human
ccaaagugcugggauuauaggcau

SEQ ID NO: 856663 - RNA, 26 nt, Human
ccaccaccaccaccagaaggccucgg

SEQ ID NO: 856664 - RNA, 21 nt, Human
ccaccacgccuggcuuuuugu

SEQ ID NO: 856665 - RNA, 19 nt, Human
cccacagccccuggccacc

SEQ ID NO: 856666 - RNA, 27 nt, Human
cccacagccccuggccaccaccaccac

SEQ ID NO: 856667 - RNA, 21 nt, Human
ccccacagccccuggccacca

SEQ ID NO: 856668 - RNA, 23 nt, Human
cccgaguagcugggauuauaggc

SEQ ID NO: 856669 - RNA, 24 nt, Human
cccgaguagcugggauuauaggca

SEQ ID NO: 856670 - RNA, 24 nt, Human
ccgaguagcugggauuauaggcau

SEQ ID NO: 856671 - RNA, 26 nt, Human
ccucccaccuuggccucccaaagugc

SEQ ID NO: 856672 - RNA, 24 nt, Human
ccugaccucaggugauccucccac

SEQ ID NO: 856673 - RNA, 19 nt, Human
ccuggccaccaccaccacc

SEQ ID NO: 856674 - RNA, 23 nt, Human
ccuggguucaaguaauucucaug

SEQ ID NO: 856675 - RNA, 18 nt, Human
ccuuauccaccucaacuc

SEQ ID NO: 856676 - RNA, 23 nt, Human
cgucuguugcccagacuggagug

SEQ ID NO: 856677 - RNA, 23 nt, Human
cgucuguugcccagacuggagug

SEQ ID NO: 856678 - RNA, 24 nt, Human
cucacugcgaucucugccuccugg

SEQ ID NO: 856679 - RNA, 23 nt, Human
cucagccucccgaguagcuggga

SEQ ID NO: 856680 - RNA, 24 nt, Human
cucaggugauccucccaccuuggc

SEQ ID NO: 856681 - RNA, 25 nt, Human
cucaugccucagccucccgaguagc

SEQ ID NO: 856682 - RNA, 23 nt, Human
cucauuuucccuccccacagccc

SEQ ID NO: 856683 - RNA, 21 nt, Human
cuccuggguucaaguaauucu

SEQ ID NO: 856684 - RNA, 20 nt, Human
cucugccuccuggguucaag

SEQ ID NO: 856685 - RNA, 18 nt, Human
cucuuuucaucuuccaaa

SEQ ID NO: 856686 - RNA, 26 nt, Human
cugaaccagacagcaauuugcuccuu

SEQ ID NO: 856687 - RNA, 23 nt, Human
cugagguggagaucauagcaacu

SEQ ID NO: 856688 - RNA, 24 nt, Human
cugcgaucucugccuccuggguuc

SEQ ID NO: 856689 - RNA, 22 nt, Human
cuggccaccaccaccaccagaa

SEQ ID NO: 856690 - RNA, 18 nt, Human
cuuauccaccucaacuca

SEQ ID NO: 856691 - RNA, 21 nt, Human
cuuccaaucugaaaagagaug

SEQ ID NO: 856692 - RNA, 21 nt, Human
cuuuuuguauuuuuuguagag

SEQ ID NO: 856693 - RNA, 23 nt, Human
gaccucaggugauccucccaccu

SEQ ID NO: 856694 - RNA, 19 nt, Human
gagaugagcgaaaacagua

SEQ ID NO: 856695 - RNA, 18 nt, Human
gagauggaguuucaucac

SEQ ID NO: 856696 - RNA, 18 nt, Human
gagccacugugcccaaaa

SEQ ID NO: 856697 - RNA, 21 nt, Human
gauuauaggcaugagccacug

SEQ ID NO: 856698 - RNA, 24 nt, Human
gauuauaggcaugagccacugugc

SEQ ID NO: 856699 - RNA, 20 nt, Human
gcacuggcagcaccuaggga

SEQ ID NO: 856700 - RNA, 23 nt, Human
gcuggccuugaacuccugaccuc

SEQ ID NO: 856701 - RNA, 22 nt, Human
ggaguuucaucacguuggccag

SEQ ID NO: 856702 - RNA, 23 nt, Human
ggaguuucaucacguuggccagg

SEQ ID NO: 856703 - RNA, 20 nt, Human
ggccaccaccaccaccagaa

SEQ ID NO: 856704 - RNA, 24 nt, Human
ggcuggccuugaacuccugaccuc

SEQ ID NO: 856705 - RNA, 24 nt, Human
guaauucucaugccucagccuccc

SEQ ID NO: 856706 - RNA, 18 nt, Human
guagcugggauuauaggc

SEQ ID NO: 856707 - RNA, 20 nt, Human
guagcugggauuauaggcau

SEQ ID NO: 856708 - RNA, 20 nt, Human
guauuuuuuguagagaugga

SEQ ID NO: 856709 - RNA, 24 nt, Human
uaauauauccuuuaccugagauuu

SEQ ID NO: 856710 - RNA, 18 nt, Human
uaauggacuagaucagag

SEQ ID NO: 856711 - RNA, 18 nt, Human
uaauuaccucacauggaa

SEQ ID NO: 856712 - RNA, 20 nt, Human
uaauucucaugccucagccu

SEQ ID NO: 856713 - RNA, 18 nt, Human
uaauuuauuugucucccu

SEQ ID NO: 856714 - RNA, 23 nt, Human
uagagccuugcuauucaaagaug

SEQ ID NO: 856715 - RNA, 20 nt, Human
uaggcauuugccaccacgcc

SEQ ID NO: 856716 - RNA, 22 nt, Human
uauauggaaauuuuguaaauuu

SEQ ID NO: 856717 - RNA, 24 nt, Human
ucacugcgaucucugccuccuggg

SEQ ID NO: 856718 - RNA, 25 nt, Human
ucacugcgaucucugccuccugggg

SEQ ID NO: 856719 - RNA, 25 nt, Human
ucacugcgaucucugccuccugggu

SEQ ID NO: 856720 - RNA, 24 nt, Human
ucagaaacacacgacccauuuagc

SEQ ID NO: 856721 - RNA, 20 nt, Human
ucagccucccgaguagcugg

SEQ ID NO: 856722 - RNA, 22 nt, Human
ucaggaacccauucagaaacac

SEQ ID NO: 856723 - RNA, 23 nt, Human
ucagguaacguuugucaugcaac

SEQ ID NO: 856724 - RNA, 18 nt, Human
ucaucuguagcccaguua

SEQ ID NO: 856725 - RNA, 20 nt, Human
ucaucuuccaaaacugaaau

SEQ ID NO: 856726 - RNA, 24 nt, Human
ucccaaagugcugggauuauaggc

SEQ ID NO: 856727 - RNA, 24 nt, Human
ucccgaguagcugggauuauaggc

SEQ ID NO: 856728 - RNA, 21 nt, Human
uccucauuuucccuccccaca

SEQ ID NO: 856729 - RNA, 21 nt, Human
uccuggguucaaguaauucuc

SEQ ID NO: 856730 - RNA, 24 nt, Human
uccuggguucaaguaauucucaug

SEQ ID NO: 856731 - RNA, 23 nt, Human
ucuaauauauccuuuaccugaga

SEQ ID NO: 856732 - RNA, 24 nt, Human
ucuccgucuguugcccagacugga

SEQ ID NO: 856733 - RNA, 23 nt, Human
ucuguagcccaguuaucuagagc

SEQ ID NO: 856734 - RNA, 24 nt, Human
ucuguugcccagacuggagugcag

SEQ ID NO: 856735 - RNA, 27 nt, Human
ugaaccagacagcaauuugcuccuucc

SEQ ID NO: 856736 - RNA, 18 nt, Human
ugaccucaggugauccuc

SEQ ID NO: 856737 - RNA, 20 nt, Human
ugaccucaggugauccuccc

SEQ ID NO: 856738 - RNA, 21 nt, Human
ugaccucaggugauccuccca

SEQ ID NO: 856739 - RNA, 24 nt, Human
ugaccucaggugauccucccaccu

SEQ ID NO: 856740 - RNA, 18 nt, Human
ugagcgaaaacaguauau

SEQ ID NO: 856741 - RNA, 22 nt, Human
ugccaccacgccuggcuuuuug

SEQ ID NO: 856742 - RNA, 21 nt, Human
ugcccagacuggagugcagug

SEQ ID NO: 856743 - RNA, 22 nt, Human
ugccucagccucccgaguagcu

SEQ ID NO: 856744 - RNA, 24 nt, Human
ugccucagccucccgaguagcugg

SEQ ID NO: 856745 - RNA, 23 nt, Human
uggaaauuuuguaaauuagcuug

SEQ ID NO: 856746 - RNA, 18 nt, Human
uggagugcagugguacaa

SEQ ID NO: 856747 - RNA, 19 nt, Human
uggagugcagugguacaau

SEQ ID NO: 856748 - RNA, 23 nt, Human
uggagugcagugguacaaucuca

SEQ ID NO: 856749 - RNA, 24 nt, Human
uggaguuucaucacguuggccagg

SEQ ID NO: 856750 - RNA, 20 nt, Human
uggcagcaccuagggacuug

SEQ ID NO: 856751 - RNA, 22 nt, Human
uggccaccaccaccaccagaau

SEQ ID NO: 856752 - RNA, 24 nt, Human
uggccaggcuggccuugaacuccu

SEQ ID NO: 856753 - RNA, 20 nt, Human
uggccuugaacuccugaccu

SEQ ID NO: 856754 - RNA, 21 nt, Human
ugggaaaaaugcagaaucuca

SEQ ID NO: 856755 - RNA, 18 nt, Human
ugggauuauaggcaugag

SEQ ID NO: 856756 - RNA, 21 nt, Human
ugggauuauaggcaugagcca

SEQ ID NO: 856757 - RNA, 22 nt, Human
ugggauuauaggcaugagccac

SEQ ID NO: 856758 - RNA, 22 nt, Human
ugggauuauaggcaugagccac

SEQ ID NO: 856759 - RNA, 22 nt, Human
ugggauuauaggcaugagccac

SEQ ID NO: 856760 - RNA, 24 nt, Human
ugggauuauaggcaugagccacug

SEQ ID NO: 856761 - RNA, 26 nt, Human
ugggauuauaggcaugagccacugug

SEQ ID NO: 856762 - RNA, 19 nt, Human
ugggauuauaggcauuugc

SEQ ID NO: 856763 - RNA, 21 nt, Human
ugggauuauaggcauuugcca

SEQ ID NO: 856764 - RNA, 24 nt, Human
ugggauuauaggcauuugccacca

SEQ ID NO: 856765 - RNA, 24 nt, Human
ugguacaaucucaacucacugcga

SEQ ID NO: 856766 - RNA, 18 nt, Human
uguaaaaggcaggcuucc

SEQ ID NO: 856767 - RNA, 19 nt, Human
uuaaaccguaacuccucau

SEQ ID NO: 856768 - RNA, 21 nt, Human
uuagcuugcauguuauuaagc

SEQ ID NO: 856769 - RNA, 18 nt, Human
uuaguacuaucuaccacc

SEQ ID NO: 856770 - RNA, 21 nt, Human
uucaaagauggucugugcacc

SEQ ID NO: 856771 - RNA, 23 nt, Human
uucaaguaauucucaugccucag

SEQ ID NO: 856772 - RNA, 18 nt, Human
uucaucuuccaaaacuga

SEQ ID NO: 856773 - RNA, 24 nt, Human
uugccaccacgccuggcuuuuugu

SEQ ID NO: 856774 - RNA, 24 nt, Human
uugcccagacuggagugcaguggu

SEQ ID NO: 856775 - RNA, 18 nt, Human
uuggccucccaaagugcu

SEQ ID NO: 856776 - RNA, 24 nt, Human
uuguagagauggaguuucaucacg

SEQ ID NO: 856777 - RNA, 21 nt, Human
uuucaucacguuggccaggcu

SEQ ID NO: 856778 - RNA, 25 nt, Human
uuuugagacacagucuccgucuguu

SEQ ID NO: 856779 - RNA, 23 nt, Human
uuuuuguauuuuuuguagagaug

SEQ ID NO: 856780 - RNA, 24 nt, Human
uuuuuuguagagauggaguuucau

SEQ ID NO: 856781 - RNA, 19 nt, Human
uuuuuuuuuuuuuuuugcc

SEQ ID NO: 856782 - RNA, 22 nt, Human
uuuuuuuuuuuuuuuuugccuu

SEQ ID NO: 856783 - RNA, 20 nt, Human
uuuuuuuuuuuuuuuuuugg

SEQ ID NO: 856784 - RNA, 23 nt, Human
agcaaaggcagagccaaccacaa

SEQ ID NO: 856785 - RNA, 18 nt, Human
aggaggccuggaccugug

SEQ ID NO: 856786 - RNA, 22 nt, Human
aggcaggagcuagcuguuucuu

SEQ ID NO: 856787 - RNA, 23 nt, Human
cagcaaaggcagagccaaccaca

SEQ ID NO: 856788 - RNA, 27 nt, Human
cagcaaaggcagagccaaccacaacua

SEQ ID NO: 856789 - RNA, 18 nt, Human
caggaggccuggaccugu

SEQ ID NO: 856790 - RNA, 23 nt, Human
caggauaucacaaggccgauuga

SEQ ID NO: 856791 - RNA, 25 nt, Human
ccaaccacaacuacccuuuuuuagc

SEQ ID NO: 856792 - RNA, 21 nt, Human
ccccuggacccgggccugacc

SEQ ID NO: 856793 - RNA, 22 nt, Human
ccccuggacccgggccugaccu

SEQ ID NO: 856794 - RNA, 24 nt, Human
cccugcagccggccacuuccccua

SEQ ID NO: 856795 - RNA, 22 nt, Human
cccuggacccgggccugaccuc

SEQ ID NO: 856796 - RNA, 20 nt, Human
ccgugcagucccugcagccg

SEQ ID NO: 856797 - RNA, 23 nt, Human
ccuggaccugugugucgcagggg

SEQ ID NO: 856798 - RNA, 20 nt, Human
cucacagauugccucaccgu

SEQ ID NO: 856799 - RNA, 24 nt, Human
gaacugguuuuauagguuugggau

SEQ ID NO: 856800 - RNA, 19 nt, Human
gacccgggccugaccucua

SEQ ID NO: 856801 - RNA, 20 nt, Human
ggaagguuacaguuggggca

SEQ ID NO: 856802 - RNA, 24 nt, Human
ggugcauagucacgagguggaggg

SEQ ID NO: 856803 - RNA, 21 nt, Human
guucacauggcaggauaucac

SEQ ID NO: 856804 - RNA, 19 nt, Human
uaaagacagcaaaggcaga

SEQ ID NO: 856805 - RNA, 23 nt, Human
uaaagacagcaaaggcagagcca

SEQ ID NO: 856806 - RNA, 22 nt, Human
uagugguucuccuguugcucaa

SEQ ID NO: 856807 - RNA, 18 nt, Human
uccccuggacccgggccu

SEQ ID NO: 856808 - RNA, 24 nt, Human
ucuucuuuagugguucuccuguug

SEQ ID NO: 856809 - RNA, 24 nt, Human
ugaaaagggagucagcgaagggcg

SEQ ID NO: 856810 - RNA, 21 nt, Human
ugacuccaggaggccuggacc

SEQ ID NO: 856811 - RNA, 23 nt, Human
ugcugcugcugaagggaccgugg

SEQ ID NO: 856812 - RNA, 20 nt, Human
uggagggaguucacauggca

SEQ ID NO: 856813 - RNA, 19 nt, Human
uucacauggcaggauauca

SEQ ID NO: 856814 - RNA, 24 nt, Human
uuucuucuucuuuagugguucucc

SEQ ID NO: 856815 - RNA, 19 nt, Human
uuuuuuuuuuuuuuuuugu

SEQ ID NO: 856816 - RNA, 20 nt, Human
uuuuuuuuuuuuuuuuuugg

SEQ ID NO: 856817 - RNA, 22 nt, Human
aaacacagauccgagcuuuuca

SEQ ID NO: 856818 - RNA, 25 nt, Human
aaacuuuacggaaaugcaacaaucu

SEQ ID NO: 856819 - RNA, 19 nt, Human
aaagacaagggggauggag

SEQ ID NO: 856820 - RNA, 20 nt, Human
aacacagauccgagcuuuuc

SEQ ID NO: 856821 - RNA, 19 nt, Human
aauaacacaaucgacagga

SEQ ID NO: 856822 - RNA, 21 nt, Human
acacaaucgacaggacugucu

SEQ ID NO: 856823 - RNA, 26 nt, Human
accagacgcugcauuucaggugcucc

SEQ ID NO: 856824 - RNA, 19 nt, Human
agacaagggggauggagcu

SEQ ID NO: 856825 - RNA, 21 nt, Human
agauuucacuguuaagaaaau

SEQ ID NO: 856826 - RNA, 24 nt, Human
agauuucacuguuaagaaaauucu

SEQ ID NO: 856827 - RNA, 20 nt, Human
augaguuacuaaauguagca

SEQ ID NO: 856828 - RNA, 22 nt, Human
auggaggacagcuuuuucaggg

SEQ ID NO: 856829 - RNA, 23 nt, Human
caagccuggccuuccccaaacac

SEQ ID NO: 856830 - RNA, 20 nt, Human
cacccucuacccuccccuca

SEQ ID NO: 856831 - RNA, 21 nt, Human
cagcgcugucgcuguggcugc

SEQ ID NO: 856832 - RNA, 19 nt, Human
cagcugaauuucuugggcu

SEQ ID NO: 856833 - RNA, 19 nt, Human
ccuggaacgccgggagcuc

SEQ ID NO: 856834 - RNA, 22 nt, Human
ccuggaacgccgggagcucaga

SEQ ID NO: 856835 - RNA, 25 nt, Human
cgagcuuuucacccucuacccuccc

SEQ ID NO: 856836 - RNA, 20 nt, Human
cgcaggcaagcacaaagaca

SEQ ID NO: 856837 - RNA, 19 nt, Human
gcagugugguaaaaauaua

SEQ ID NO: 856838 - RNA, 20 nt, Human
gcugucgcuguggcugcugc

SEQ ID NO: 856839 - RNA, 19 nt, Human
ggagcgcaagccuggccuu

SEQ ID NO: 856840 - RNA, 21 nt, Human
guggcugcugcugccgcuacg

SEQ ID NO: 856841 - RNA, 18 nt, Human
uaaguuuuggcagucaca

SEQ ID NO: 856842 - RNA, 23 nt, Human
uaugaagaacugugcuguuggug

SEQ ID NO: 856843 - RNA, 18 nt, Human
uaugaucagauuucacug

SEQ ID NO: 856844 - RNA, 19 nt, Human
uaugaucagauuucacugu

SEQ ID NO: 856845 - RNA, 19 nt, Human
ucgcuguggcugcugcugc

SEQ ID NO: 856846 - RNA, 19 nt, Human
ugagauuuuaaaaaauguc

SEQ ID NO: 856847 - RNA, 21 nt, Human
ugcauggauaacugaacaugu

SEQ ID NO: 856848 - RNA, 20 nt, Human
uggagcuucuacacagggcc

SEQ ID NO: 856849 - RNA, 22 nt, Human
uggauaacugaacaugugggag

SEQ ID NO: 856850 - RNA, 26 nt, Human
uggggacgcaggcaagcacaaagaca

SEQ ID NO: 856851 - RNA, 19 nt, Human
ugggugaaaugaguuacua

SEQ ID NO: 856852 - RNA, 18 nt, Human
uuuuuuuuuuuuuuuuug

SEQ ID NO: 856853 - RNA, 21 nt, Human
uuuuuuuuuuuuuuuuuuggg

SEQ ID NO: 856854 - RNA, 19 nt, Human
aaccuugcucuucuuccuc

SEQ ID NO: 856855 - RNA, 20 nt, Human
aagacugcagaaguagauga

SEQ ID NO: 856856 - RNA, 18 nt, Human
acagucauuaauucagag

SEQ ID NO: 856857 - RNA, 20 nt, Human
acugcaagcuccgccuccca

SEQ ID NO: 856858 - RNA, 22 nt, Human
acugcaagcuccgccucccagg

SEQ ID NO: 856859 - RNA, 18 nt, Human
agagaaucgggcuuugca

SEQ ID NO: 856860 - RNA, 21 nt, Human
agcccccagcugcucgguccu

SEQ ID NO: 856861 - RNA, 21 nt, Human
aggagauaacagaaaaacaag

SEQ ID NO: 856862 - RNA, 18 nt, Human
aggcuggagugcaguggc

SEQ ID NO: 856863 - RNA, 20 nt, Human
agugcaguggcucagucucg

SEQ ID NO: 856864 - RNA, 24 nt, Human
agugcaguggcucagucucggcuu

SEQ ID NO: 856865 - RNA, 23 nt, Human
auauacagucauuaauucagagu

SEQ ID NO: 856866 - RNA, 18 nt, Human
cagaaguagaugaagaaa

SEQ ID NO: 856867 - RNA, 22 nt, Human
cagagcaggcugcagcccccag

SEQ ID NO: 856868 - RNA, 22 nt, Human
caugucauucuccugccucagc

SEQ ID NO: 856869 - RNA, 24 nt, Human
cauuuuuuuuuggcugccauuuuu

SEQ ID NO: 856870 - RNA, 23 nt, Human
ccaggcauccaguuaugccugau

SEQ ID NO: 856871 - RNA, 20 nt, Human
ccagucuuaaagcugcagag

SEQ ID NO: 856872 - RNA, 20 nt, Human
cccagguucaugucauucuc

SEQ ID NO: 856873 - RNA, 25 nt, Human
ccuacacugcggcguccgccucaga

SEQ ID NO: 856874 - RNA, 19 nt, Human
ccugcaggccugccuccaa

SEQ ID NO: 856875 - RNA, 22 nt, Human
cgcccagauccagacucacagc

SEQ ID NO: 856876 - RNA, 18 nt, Human
cucaaaacaauaaaacug

SEQ ID NO: 856877 - RNA, 25 nt, Human
cuccugccucagccucuugcgagcu

SEQ ID NO: 856878 - RNA, 24 nt, Human
cugcaagcuccgccucccagguuc

SEQ ID NO: 856879 - RNA, 21 nt, Human
cugccucagccucuugcgagc

SEQ ID NO: 856880 - RNA, 21 nt, Human
cuugcucuauugcccaggcug

SEQ ID NO: 856881 - RNA, 19 nt, Human
cuuucagauaacucaacug

SEQ ID NO: 856882 - RNA, 18 nt, Human
gacagagcaggcugcagc

SEQ ID NO: 856883 - RNA, 19 nt, Human
gagcaggcugcagccccca

SEQ ID NO: 856884 - RNA, 19 nt, Human
gauaacagaaaaacaagga

SEQ ID NO: 856885 - RNA, 23 nt, Human
gccaaaaagccucuucuuacaga

SEQ ID NO: 856886 - RNA, 18 nt, Human
gccgcaggggagcuuuga

SEQ ID NO: 856887 - RNA, 25 nt, Human
gccucccagguucaugucauucucc

SEQ ID NO: 856888 - RNA, 25 nt, Human
gcucuauugcccaggcuggagugca

SEQ ID NO: 856889 - RNA, 25 nt, Human
gcuggagugcaguggcucagucucg

SEQ ID NO: 856890 - RNA, 18 nt, Human
gcuuugacccccucucuc

SEQ ID NO: 856891 - RNA, 19 nt, Human
ggccgcaggggagcuuuga

SEQ ID NO: 856892 - RNA, 19 nt, Human
ggcuggagugcaguggcuc

SEQ ID NO: 856893 - RNA, 20 nt, Human
gggugcgaacgcccagaucc

SEQ ID NO: 856894 - RNA, 24 nt, Human
gucuugcucuauugcccaggcugg

SEQ ID NO: 856895 - RNA, 23 nt, Human
gugacccgaggcuguccucaacc

SEQ ID NO: 856896 - RNA, 19 nt, Human
uaaaaccugacaccauuua

SEQ ID NO: 856897 - RNA, 22 nt, Human
uaacucaacugaagaaguugac

SEQ ID NO: 856898 - RNA, 19 nt, Human
uaacucaugggauggacaa

SEQ ID NO: 856899 - RNA, 22 nt, Human
uagcuaccucaaaggagauaac

SEQ ID NO: 856900 - RNA, 19 nt, Human
uauugcccaggcuggagug

SEQ ID NO: 856901 - RNA, 21 nt, Human
ucaaaggagauaacagaaaaa

SEQ ID NO: 856902 - RNA, 18 nt, Human
ucaagacgaacucuaacu

SEQ ID NO: 856903 - RNA, 22 nt, Human
ucaagacgaacucuaacucaug

SEQ ID NO: 856904 - RNA, 21 nt, Human
uccaaacuacucuggugaccc

SEQ ID NO: 856905 - RNA, 21 nt, Human
ucccagguucaugucauucuc

SEQ ID NO: 856906 - RNA, 24 nt, Human
ucccagguucaugucauucuccug

SEQ ID NO: 856907 - RNA, 24 nt, Human
ucuauugcccaggcuggagugcag

SEQ ID NO: 856908 - RNA, 25 nt, Human
ucuccugccucagccucuugcgagc

SEQ ID NO: 856909 - RNA, 21 nt, Human
ucucucugggaucggugggga

SEQ ID NO: 856910 - RNA, 19 nt, Human
ucuugcucuauugcccagg

SEQ ID NO: 856911 - RNA, 23 nt, Human
ucuugcucuauugcccaggcugg

SEQ ID NO: 856912 - RNA, 24 nt, Human
ucuugcucuauugcccaggcugga

SEQ ID NO: 856913 - RNA, 23 nt, Human
ugaacaccuccuguggcuaccca

SEQ ID NO: 856914 - RNA, 22 nt, Human
ugagauggagucuugcucuauu

SEQ ID NO: 856915 - RNA, 23 nt, Human
ugcaauagaaauagcuauauaaa

SEQ ID NO: 856916 - RNA, 21 nt, Human
ugcccaggcuggagugcagug

SEQ ID NO: 856917 - RNA, 22 nt, Human
ugcccaggcuggagugcagugg

SEQ ID NO: 856918 - RNA, 25 nt, Human
ugcccaggcuggagugcaguggcuc

SEQ ID NO: 856919 - RNA, 26 nt, Human
ugcccuuggucaaaucuaaaugaucu

SEQ ID NO: 856920 - RNA, 23 nt, Human
ugccucagccucuugcgagcuga

SEQ ID NO: 856921 - RNA, 24 nt, Human
ugcucuauugcccaggcuggagug

SEQ ID NO: 856922 - RNA, 23 nt, Human
uggaagauguaaaauaaguaagg

SEQ ID NO: 856923 - RNA, 24 nt, Human
uggagucuugcucuauugcccagg

SEQ ID NO: 856924 - RNA, 23 nt, Human
uggagugcaguggcucagucucg

SEQ ID NO: 856925 - RNA, 24 nt, Human
uggagugcaguggcucagucucgg

SEQ ID NO: 856926 - RNA, 21 nt, Human
uggcagcacucagaaugcaag

SEQ ID NO: 856927 - RNA, 20 nt, Human
ugggauggacaaacuggaag

SEQ ID NO: 856928 - RNA, 19 nt, Human
uuaaaagggcuguuuaaua

SEQ ID NO: 856929 - RNA, 19 nt, Human
uuacugcaagcuccgccuc

SEQ ID NO: 856930 - RNA, 24 nt, Human
uuacugcaagcuccgccucccagg

SEQ ID NO: 856931 - RNA, 24 nt, Human
uugcccaggcuggagugcaguggc

SEQ ID NO: 856932 - RNA, 24 nt, Human
uugcucuauugcccaggcuggagu

SEQ ID NO: 856933 - RNA, 24 nt, Human
uuuuuuuuuuuugagauggagucu

SEQ ID NO: 856934 - RNA, 22 nt, Human
uuuuuuuuuuuuuugagaugga

SEQ ID NO: 856935 - RNA, 20 nt, Human
uuuuuuuuuuuuuuuuuugg

SEQ ID NO: 856936 - RNA, 21 nt, Human
aaacacaacaagcaaacuccu

SEQ ID NO: 856937 - RNA, 18 nt, Human
aagcaaacacaacaagca

SEQ ID NO: 856938 - RNA, 19 nt, Human
aagcaaacacaacaagcaa

SEQ ID NO: 856939 - RNA, 22 nt, Human
aagcaaacacaacaagcaaacu

SEQ ID NO: 856940 - RNA, 21 nt, Human
aaugagccauuugcucagacc

SEQ ID NO: 856941 - RNA, 20 nt, Human
acccacccacuccagccgca

SEQ ID NO: 856942 - RNA, 19 nt, Human
acuggagccuccuggaagg

SEQ ID NO: 856943 - RNA, 24 nt, Human
agcaaacuccuuaccucuggcacc

SEQ ID NO: 856944 - RNA, 19 nt, Human
aggcaaggaggccaggccc

SEQ ID NO: 856945 - RNA, 22 nt, Human
aggccaggcccaggcccugagg

SEQ ID NO: 856946 - RNA, 23 nt, Human
aggccaggcccaggcccugagga

SEQ ID NO: 856947 - RNA, 23 nt, Human
caacaagcaaacuccuuaccucu

SEQ ID NO: 856948 - RNA, 21 nt, Human
caacugucgccuccaagcaaa

SEQ ID NO: 856949 - RNA, 26 nt, Human
caagcaaacacaacaagcaaacuccu

SEQ ID NO: 856950 - RNA, 19 nt, Human
cacacaccccacgaggugg

SEQ ID NO: 856951 - RNA, 23 nt, Human
cacaccccacgaggugggcaccg

SEQ ID NO: 856952 - RNA, 22 nt, Human
cacaggcaaggaggccaggccc

SEQ ID NO: 856953 - RNA, 21 nt, Human
caccaaacagugaucgugauc

SEQ ID NO: 856954 - RNA, 25 nt, Human
cacccacccacuccagccgcagaac

SEQ ID NO: 856955 - RNA, 18 nt, Human
caccuccugcuuucagag

SEQ ID NO: 856956 - RNA, 23 nt, Human
cacuccagccgcagaacugggag

SEQ ID NO: 856957 - RNA, 19 nt, Human
cacucggcccucacacacc

SEQ ID NO: 856958 - RNA, 22 nt, Human
cacuggggcugugguugcugca

SEQ ID NO: 856959 - RNA, 23 nt, Human
cagaccaagauaaggaaacuaga

SEQ ID NO: 856960 - RNA, 20 nt, Human
caggcccaggcccugaggaa

SEQ ID NO: 856961 - RNA, 22 nt, Human
caggcccaggcccugaggaucc

SEQ ID NO: 856962 - RNA, 20 nt, Human
ccaagauaaggaaacuagaa

SEQ ID NO: 856963 - RNA, 22 nt, Human
ccaagcaaacacaacaagcaaa

SEQ ID NO: 856964 - RNA, 26 nt, Human
ccaucucacaggcaaggaggccaggc

SEQ ID NO: 856965 - RNA, 19 nt, Human
cccacgaggugggcaccgu

SEQ ID NO: 856966 - RNA, 18 nt, Human
ccuguacacuggggcugu

SEQ ID NO: 856967 - RNA, 18 nt, Human
cgccuccaagcaaacaca

SEQ ID NO: 856968 - RNA, 18 nt, Human
cggugcuucucccaggcu

SEQ ID NO: 856969 - RNA, 20 nt, Human
cucaugcuugguugcugugc

SEQ ID NO: 856970 - RNA, 20 nt, Human
cugccagaugaucauagugu

SEQ ID NO: 856971 - RNA, 21 nt, Human
cuggaagguacuuuacuggcc

SEQ ID NO: 856972 - RNA, 18 nt, Human
cugggaggggcagguggu

SEQ ID NO: 856973 - RNA, 19 nt, Human
cuuggggcacuuuccccug

SEQ ID NO: 856974 - RNA, 18 nt, Human
gaaaagcuuaacucaguc

SEQ ID NO: 856975 - RNA, 24 nt, Human
gcuuucagagcugcuguaaaaggc

SEQ ID NO: 856976 - RNA, 18 nt, Human
ggaggagacaguggugac

SEQ ID NO: 856977 - RNA, 23 nt, Human
ggcacuuuccccugggaugaucu

SEQ ID NO: 856978 - RNA, 20 nt, Human
gguggucuuggacucuccuu

SEQ ID NO: 856979 - RNA, 21 nt, Human
uaaaaugagccauuugcucag

SEQ ID NO: 856980 - RNA, 21 nt, Human
ucauagugucuuuuuucuccg

SEQ ID NO: 856981 - RNA, 21 nt, Human
uccaagcaaacacaacaagca

SEQ ID NO: 856982 - RNA, 24 nt, Human
uccaagcaaacacaacaagcaaac

SEQ ID NO: 856983 - RNA, 26 nt, Human
uccaagcaaacacaacaagggaguuc

SEQ ID NO: 856984 - RNA, 24 nt, Human
ucuccgaaaagcuuaacucagucc

SEQ ID NO: 856985 - RNA, 20 nt, Human
ucugagaacaccuccugcuu

SEQ ID NO: 856986 - RNA, 23 nt, Human
ugcucagaccaagauaaggaaac

SEQ ID NO: 856987 - RNA, 23 nt, Human
ugcugugcacuuccaagcugggc

SEQ ID NO: 856988 - RNA, 22 nt, Human
ugcuucucccaggcugucauug

SEQ ID NO: 856989 - RNA, 26 nt, Human
uggaagaaauaggaaggcccucaagc

SEQ ID NO: 856990 - RNA, 27 nt, Human
ugggaggggcagguggucuucucccgg

SEQ ID NO: 856991 - RNA, 18 nt, Human
uguguuuacuucaggguc

SEQ ID NO: 856992 - RNA, 19 nt, Human
uucagggucaagucugaga

SEQ ID NO: 856993 - RNA, 25 nt, Human
uuccaagcugggccaaugcgggagg

SEQ ID NO: 856994 - RNA, 23 nt, Human
uugcugcacccacccacuccagc

SEQ ID NO: 856995 - RNA, 21 nt, Human
uuugcucagaccaagauaagg

SEQ ID NO: 856996 - RNA, 18 nt, Human
uuuuuuuuuuuuaaaagg

SEQ ID NO: 856997 - RNA, 24 nt, Human
uuuuuuuuuuuuuuuuuuaaaagg

SEQ ID NO: 856998 - RNA, 20 nt, Human
agccugaggcggagagaggc

SEQ ID NO: 856999 - RNA, 21 nt, Human
caagaggaaaaagucacagcc

SEQ ID NO: 857000 - RNA, 24 nt, Human
caccccugcccgggugcccccgcc

SEQ ID NO: 857001 - RNA, 21 nt, Human
ccagcuguccuccugcucccc

SEQ ID NO: 857002 - RNA, 19 nt, Human
ccaguuggcuggcuggcug

SEQ ID NO: 857003 - RNA, 25 nt, Human
cccugaacuugccuuuuacagcccc

SEQ ID NO: 857004 - RNA, 22 nt, Human
cggcuggacuuuguagccccca

SEQ ID NO: 857005 - RNA, 21 nt, Human
cgucuccugcgggcugcggga

SEQ ID NO: 857006 - RNA, 27 nt, Human
cuccaaaacguugauaaaacaagagga

SEQ ID NO: 857007 - RNA, 21 nt, Human
cuucacgcuggaggcagcugu

SEQ ID NO: 857008 - RNA, 18 nt, Human
cuucgcgccuggggcucc

SEQ ID NO: 857009 - RNA, 19 nt, Human
gccuggggcucccgaaagc

SEQ ID NO: 857010 - RNA, 21 nt, Human
gcgccuggggcucccgaaagc

SEQ ID NO: 857011 - RNA, 19 nt, Human
ggagagaggccgcuucgcg

SEQ ID NO: 857012 - RNA, 18 nt, Human
gugggaaaaccacacuga

SEQ ID NO: 857013 - RNA, 21 nt, Human
uaaaacaagaggaaaaaguca

SEQ ID NO: 857014 - RNA, 23 nt, Human
uaaaacaagaggaaaaagucaca

SEQ ID NO: 857015 - RNA, 18 nt, Human
uaaaucagaagcaucuac

SEQ ID NO: 857016 - RNA, 18 nt, Human
uaaggguuuuucagaaaa

SEQ ID NO: 857017 - RNA, 23 nt, Human
uccaaaacguugauaaaacaaga

SEQ ID NO: 857018 - RNA, 18 nt, Human
ucccccugagcggggagc

SEQ ID NO: 857019 - RNA, 20 nt, Human
ucuccugcgggcugcgggag

SEQ ID NO: 857020 - RNA, 18 nt, Human
ucugaucaccccaacaga

SEQ ID NO: 857021 - RNA, 21 nt, Human
ugaggcggagagaggccgcuu

SEQ ID NO: 857022 - RNA, 20 nt, Human
uggaggcagcuguuuaguuu

SEQ ID NO: 857023 - RNA, 23 nt, Human
uggcuggcuggcuggcuagcugu

SEQ ID NO: 857024 - RNA, 20 nt, Human
ugggaaaaccacacugagcg

SEQ ID NO: 857025 - RNA, 23 nt, Human
uuccaucucuguggcaccuucuu

SEQ ID NO: 857026 - RNA, 21 nt, Human
uuuucagaaaaggaguaggcu

SEQ ID NO: 857027 - RNA, 21 nt, Human
uuuuuuuuuuuuuugacucgg

SEQ ID NO: 857028 - RNA, 24 nt, Human
uuuuuuuuuuuuuuuuugacucgg

SEQ ID NO: 857029 - RNA, 20 nt, Human
uuuuuuuuuuuuuuuuuugg

SEQ ID NO: 857030 - RNA, 21 nt, Human
aacaguaacagagggaugaaa

SEQ ID NO: 857031 - RNA, 22 nt, Human
aaguauuaaagagagagaccag

SEQ ID NO: 857032 - RNA, 18 nt, Human
aaguauuuguauguguga

SEQ ID NO: 857033 - RNA, 20 nt, Human
acaguaagcuguuuuuaauu

SEQ ID NO: 857034 - RNA, 22 nt, Human
agagaccagcaggacuuugccc

SEQ ID NO: 857035 - RNA, 21 nt, Human
auaaugauaaagacaguaagc

SEQ ID NO: 857036 - RNA, 23 nt, Human
caagcauggagcauauuucuugc

SEQ ID NO: 857037 - RNA, 23 nt, Human
cagcaggacuuugcccaguuuug

SEQ ID NO: 857038 - RNA, 21 nt, Human
caugagaacuagcauccagau

SEQ ID NO: 857039 - RNA, 20 nt, Human
cugaggcaugagaacuagca

SEQ ID NO: 857040 - RNA, 19 nt, Human
gagcgcgcgcgccucgugc

SEQ ID NO: 857041 - RNA, 21 nt, Human
gauaccuuuaggaaauuuuag

SEQ ID NO: 857042 - RNA, 24 nt, Human
gauaccuuuaggaaauuuuagggu

SEQ ID NO: 857043 - RNA, 22 nt, Human
gcagaaaccagucaccacuaag

SEQ ID NO: 857044 - RNA, 18 nt, Human
guauuaaagagagagacc

SEQ ID NO: 857045 - RNA, 22 nt, Human
uaaagagagagaccagcaggac

SEQ ID NO: 857046 - RNA, 21 nt, Human
uagugaagacuggcuuuagua

SEQ ID NO: 857047 - RNA, 18 nt, Human
uucccaugucuugcucuc

SEQ ID NO: 857048 - RNA, 21 nt, Human
uugagacacuuaacccaaauc

SEQ ID NO: 857049 - RNA, 22 nt, Human
uuugagaaguauuaaagagaga

SEQ ID NO: 857050 - RNA, 27 nt, Human
aaaaagcaccugcugcaccauaagccc

SEQ ID NO: 857051 - RNA, 24 nt, Human
aaaguuuuauccacuuucccauau

SEQ ID NO: 857052 - RNA, 24 nt, Human
aaaguuuuauccacuuucccauau

SEQ ID NO: 857053 - RNA, 18 nt, Human
aagaacacccacaccccc

SEQ ID NO: 857054 - RNA, 20 nt, Human
aagcaccaggcauacuugac

SEQ ID NO: 857055 - RNA, 20 nt, Human
acaaacacaggcugugggcu

SEQ ID NO: 857056 - RNA, 19 nt, Human
acacaggcugugggcugga

SEQ ID NO: 857057 - RNA, 23 nt, Human
accauugcuacgucccaguccca

SEQ ID NO: 857058 - RNA, 22 nt, Human
accccagggccccugcuguccu

SEQ ID NO: 857059 - RNA, 22 nt, Human
acccuggggcugucuaaguugc

SEQ ID NO: 857060 - RNA, 24 nt, Human
accugggaugggguggggacaggc

SEQ ID NO: 857061 - RNA, 20 nt, Human
acugucacccuggggcuguc

SEQ ID NO: 857062 - RNA, 19 nt, Human
agaaccugcaagagucuca

SEQ ID NO: 857063 - RNA, 18 nt, Human
agacugugcucccuuugg

SEQ ID NO: 857064 - RNA, 24 nt, Human
agcacgucugcugcaaugacaaca

SEQ ID NO: 857065 - RNA, 19 nt, Human
agcugggugcagacugugc

SEQ ID NO: 857066 - RNA, 25 nt, Human
aggccugugguaccgugggagauga

SEQ ID NO: 857067 - RNA, 25 nt, Human
aggccugugguaccgugggagauga

SEQ ID NO: 857068 - RNA, 24 nt, Human
auuuggucuccaggugucaccuuu

SEQ ID NO: 857069 - RNA, 26 nt, Human
caccauaagcccugggauguggcagc

SEQ ID NO: 857070 - RNA, 21 nt, Human
cacccuggggcugucuaaguu

SEQ ID NO: 857071 - RNA, 20 nt, Human
cagcagcucagaauaugaug

SEQ ID NO: 857072 - RNA, 19 nt, Human
cagccagccucugcaggac

SEQ ID NO: 857073 - RNA, 21 nt, Human
cagcgccucccaguggccaga

SEQ ID NO: 857074 - RNA, 24 nt, Human
cagcugggccacugucacccuggg

SEQ ID NO: 857075 - RNA, 24 nt, Human
caggagcccgcuugugcucccggc

SEQ ID NO: 857076 - RNA, 18 nt, Human
caggccugugguaccgug

SEQ ID NO: 857077 - RNA, 18 nt, Human
caggccugugguaccgug

SEQ ID NO: 857078 - RNA, 22 nt, Human
cauugccaucuccaagugcucu

SEQ ID NO: 857079 - RNA, 18 nt, Human
cauugcuacgucccaguc

SEQ ID NO: 857080 - RNA, 21 nt, Human
ccaagugagggaguuagggac

SEQ ID NO: 857081 - RNA, 19 nt, Human
ccacacccccuuguuaccc

SEQ ID NO: 857082 - RNA, 23 nt, Human
ccacugccaagcucuaggacagu

SEQ ID NO: 857083 - RNA, 23 nt, Human
ccacugccaagcucuaggacagu

SEQ ID NO: 857084 - RNA, 21 nt, Human
ccaugugaccaggccuguggu

SEQ ID NO: 857085 - RNA, 22 nt, Human
cccaugugaccaggccuguggu

SEQ ID NO: 857086 - RNA, 18 nt, Human
ccccagggccccugcugu

SEQ ID NO: 857087 - RNA, 18 nt, Human
cccgcagcagcucagaau

SEQ ID NO: 857088 - RNA, 18 nt, Human
cccgcagcagcucagaau

SEQ ID NO: 857089 - RNA, 23 nt, Human
ccucaggagcccgcuugugcucc

SEQ ID NO: 857090 - RNA, 21 nt, Human
ccucuaagcucuggucaccgc

SEQ ID NO: 857091 - RNA, 21 nt, Human
ccugcaggcaagcuaaaccag

SEQ ID NO: 857092 - RNA, 24 nt, Human
ccugcauuuggucuccagguguca

SEQ ID NO: 857093 - RNA, 18 nt, Human
ccuguuaaucaaggcugc

SEQ ID NO: 857094 - RNA, 22 nt, Human
ccuuucgagcagcgccucccag

SEQ ID NO: 857095 - RNA, 21 nt, Human
cgagcagcgccucccaguggc

SEQ ID NO: 857096 - RNA, 18 nt, Human
cggccuagcucgguggug

SEQ ID NO: 857097 - RNA, 19 nt, Human
cuaaaaccccagggccccu

SEQ ID NO: 857098 - RNA, 18 nt, Human
cucaaacuuuucugaucc

SEQ ID NO: 857099 - RNA, 24 nt, Human
cucacagucuucugcaaaauaucc

SEQ ID NO: 857100 - RNA, 24 nt, Human
cucacagucuucugcaaaauaucc

SEQ ID NO: 857101 - RNA, 20 nt, Human
cucuaagcucuggucaccgc

SEQ ID NO: 857102 - RNA, 22 nt, Human
cucuuuagcauuuugcagaugc

SEQ ID NO: 857103 - RNA, 19 nt, Human
cugaugggaugagagcugg

SEQ ID NO: 857104 - RNA, 18 nt, Human
cuggguugugaagggucu

SEQ ID NO: 857105 - RNA, 22 nt, Human
cuugugcucccggcaggcagcc

SEQ ID NO: 857106 - RNA, 18 nt, Human
gaaccgaguguguccagg

SEQ ID NO: 857107 - RNA, 18 nt, Human
gaaccgaguguguccagg

SEQ ID NO: 857108 - RNA, 18 nt, Human
gaaccgaguguguccagg

SEQ ID NO: 857109 - RNA, 18 nt, Human
gaagggucucaaguccaa

SEQ ID NO: 857110 - RNA, 18 nt, Human
gaagggucucaaguccaa

SEQ ID NO: 857111 - RNA, 18 nt, Human
gaccgagccuccugagga

SEQ ID NO: 857112 - RNA, 21 nt, Human
gagcagcgccucccaguggcc

SEQ ID NO: 857113 - RNA, 20 nt, Human
gagggcgcugacuuuuuaga

SEQ ID NO: 857114 - RNA, 20 nt, Human
gagggcgcugacuuuuuaga

SEQ ID NO: 857115 - RNA, 21 nt, Human
gauccuugauucagacaguuu

SEQ ID NO: 857116 - RNA, 26 nt, Human
gauggcaaggccugugaggccggcac

SEQ ID NO: 857117 - RNA, 26 nt, Human
gauggcaaggccugugaggccggcac

SEQ ID NO: 857118 - RNA, 24 nt, Human
gaugggugggacuguguuggccag

SEQ ID NO: 857119 - RNA, 19 nt, Human
gcaaaauaucccgcagcag

SEQ ID NO: 857120 - RNA, 19 nt, Human
gcaaaauaucccgcagcag

SEQ ID NO: 857121 - RNA, 21 nt, Human
gcaaggcugaaaagaacaccc

SEQ ID NO: 857122 - RNA, 25 nt, Human
gcaaggcugaaaagaacacccacac

SEQ ID NO: 857123 - RNA, 18 nt, Human
gcagcgggcuuggcuuuc

SEQ ID NO: 857124 - RNA, 18 nt, Human
gcagcgggcuuggcuuuc

SEQ ID NO: 857125 - RNA, 18 nt, Human
gcagcugcagcgggcuug

SEQ ID NO: 857126 - RNA, 18 nt, Human
gcagcugcagcgggcuug

SEQ ID NO: 857127 - RNA, 18 nt, Human
gcagcugcagcgggcuug

SEQ ID NO: 857128 - RNA, 18 nt, Human
gcagcugcagcgggcuug

SEQ ID NO: 857129 - RNA, 18 nt, Human
gcagcugcagcgggcuug

SEQ ID NO: 857130 - RNA, 20 nt, Human
gccaucuccaagugcucucc

SEQ ID NO: 857131 - RNA, 18 nt, Human
gccugugguaccguggga

SEQ ID NO: 857132 - RNA, 18 nt, Human
gccugugguaccguggga

SEQ ID NO: 857133 - RNA, 19 nt, Human
gcuaaaaccccagggcccc

SEQ ID NO: 857134 - RNA, 19 nt, Human
gcucccggcaggcagccag

SEQ ID NO: 857135 - RNA, 22 nt, Human
gcucccggcaggcagccagccu

SEQ ID NO: 857136 - RNA, 21 nt, Human
ggacauucccucggagcugcu

SEQ ID NO: 857137 - RNA, 21 nt, Human
ggaguuagggacuugggaggg

SEQ ID NO: 857138 - RNA, 19 nt, Human
ggcacaucuugcagauggc

SEQ ID NO: 857139 - RNA, 23 nt, Human
ggcaguuuugauuccugauuugg

SEQ ID NO: 857140 - RNA, 23 nt, Human
ggcaguuuugauuccugauuugg

SEQ ID NO: 857141 - RNA, 20 nt, Human
ggccagaggcuaaaacccca

SEQ ID NO: 857142 - RNA, 19 nt, Human
gggaugggguggggacagg

SEQ ID NO: 857143 - RNA, 20 nt, Human
gggaugggguggggacaggc

SEQ ID NO: 857144 - RNA, 21 nt, Human
gggugggacuguguuggccag

SEQ ID NO: 857145 - RNA, 27 nt, Human
ggguugugaagggucucaaguccaagu

SEQ ID NO: 857146 - RNA, 22 nt, Human
ggucgcugaagauguaugcccg

SEQ ID NO: 857147 - RNA, 20 nt, Human
ggucucaaguccaagugagg

SEQ ID NO: 857148 - RNA, 21 nt, Human
ggugcagacugugcuccccgg

SEQ ID NO: 857149 - RNA, 19 nt, Human
gguggggacaggcaaugag

SEQ ID NO: 857150 - RNA, 21 nt, Human
ggugucaccuuucugccgugu

SEQ ID NO: 857151 - RNA, 18 nt, Human
gugcucccggcaggcaga

SEQ ID NO: 857152 - RNA, 24 nt, Human
uagcauuuugcagaugcuuuucuc

SEQ ID NO: 857153 - RNA, 18 nt, Human
uagcucgguggugaacag

SEQ ID NO: 857154 - RNA, 20 nt, Human
uaggacaguccuguuaauca

SEQ ID NO: 857155 - RNA, 19 nt, Human
uccaagugagggaguuagg

SEQ ID NO: 857156 - RNA, 18 nt, Human
ucccagucccagcugggc

SEQ ID NO: 857157 - RNA, 25 nt, Human
ucccagugaccagaacgagguaccc

SEQ ID NO: 857158 - RNA, 25 nt, Human
ucccagugaccagaacgagguaccc

SEQ ID NO: 857159 - RNA, 23 nt, Human
ucccagugaccagaacgauuacu

SEQ ID NO: 857160 - RNA, 23 nt, Human
ucccagugaccagaacgauuacu

SEQ ID NO: 857161 - RNA, 20 nt, Human
uccuguuaaugaaggcugcc

SEQ ID NO: 857162 - RNA, 23 nt, Human
ucucaaguccaagugagggaguu

SEQ ID NO: 857163 - RNA, 18 nt, Human
ucuccaggugucaccuuu

SEQ ID NO: 857164 - RNA, 18 nt, Human
ucugcaggaccccgacca

SEQ ID NO: 857165 - RNA, 25 nt, Human
ugaaaagaacacccacacccccuug

SEQ ID NO: 857166 - RNA, 22 nt, Human
ugaagggucucaaguccaagug

SEQ ID NO: 857167 - RNA, 22 nt, Human
ugaagggucucaaguccaagug

SEQ ID NO: 857168 - RNA, 22 nt, Human
ugacaacaucuggcuggaaggc

SEQ ID NO: 857169 - RNA, 19 nt, Human
ugaccgagccuccugagga

SEQ ID NO: 857170 - RNA, 20 nt, Human
ugaggccggcaccacugcca

SEQ ID NO: 857171 - RNA, 20 nt, Human
ugaggccggcaccacugcca

SEQ ID NO: 857172 - RNA, 18 nt, Human
ugagggaguuagggacuu

SEQ ID NO: 857173 - RNA, 18 nt, Human
ugaguuaagcucugcucu

SEQ ID NO: 857174 - RNA, 23 nt, Human
ugaguucugagagaaagaaccag

SEQ ID NO: 857175 - RNA, 22 nt, Human
ugaugucaaguuggagguggag

SEQ ID NO: 857176 - RNA, 24 nt, Human
ugcaaugacaacaucuggcuggaa

SEQ ID NO: 857177 - RNA, 20 nt, Human
ugcauuuggucuccaggugu

SEQ ID NO: 857178 - RNA, 23 nt, Human
ugcucuccauagggaaacaguuu

SEQ ID NO: 857179 - RNA, 22 nt, Human
uggagucucagggcaaagccuu

SEQ ID NO: 857180 - RNA, 21 nt, Human
uggcaaggccugugaggccgg

SEQ ID NO: 857181 - RNA, 21 nt, Human
uggcaaggccugugaggccgg

SEQ ID NO: 857182 - RNA, 20 nt, Human
uggcagaaagggggcaccca

SEQ ID NO: 857183 - RNA, 20 nt, Human
ugggaugagagcugggugca

SEQ ID NO: 857184 - RNA, 18 nt, Human
ugggaugggguggggaca

SEQ ID NO: 857185 - RNA, 18 nt, Human
ugggaugggguggggaca

SEQ ID NO: 857186 - RNA, 23 nt, Human
ugggauguggcagcugcagcggg

SEQ ID NO: 857187 - RNA, 25 nt, Human
uggggacaggcaaugaguuaagcuc

SEQ ID NO: 857188 - RNA, 19 nt, Human
ugggguggggacaggcaau

SEQ ID NO: 857189 - RNA, 24 nt, Human
ugggugcagacugugcucccuuug

SEQ ID NO: 857190 - RNA, 23 nt, Human
uggugaccugggauggggugggg

SEQ ID NO: 857191 - RNA, 20 nt, Human
uguaugcccgggggcggcac

SEQ ID NO: 857192 - RNA, 20 nt, Human
ugugaagggucucaagucca

SEQ ID NO: 857193 - RNA, 20 nt, Human
ugugaagggucucaagucca

SEQ ID NO: 857194 - RNA, 18 nt, Human
ugugagguucagcauugc

SEQ ID NO: 857195 - RNA, 21 nt, Human
ugugagguucagcauugccau

SEQ ID NO: 857196 - RNA, 24 nt, Human
uguggcagcugcagcgggcuuggc

SEQ ID NO: 857197 - RNA, 24 nt, Human
uguggcagcugcagcgggcuuggc

SEQ ID NO: 857198 - RNA, 24 nt, Human
uguggcagcugcagcgggcuuggc

SEQ ID NO: 857199 - RNA, 24 nt, Human
uguggcagcugcagcgggcuuggc

SEQ ID NO: 857200 - RNA, 24 nt, Human
uguggcagcugcagcgggcuuggc

SEQ ID NO: 857201 - RNA, 19 nt, Human
uuacaaacacaggcugugg

SEQ ID NO: 857202 - RNA, 23 nt, Human
uuccaguccaaugaaaguuuuau

SEQ ID NO: 857203 - RNA, 23 nt, Human
uuccaguccaaugaaaguuuuau

SEQ ID NO: 857204 - RNA, 24 nt, Human
uucccauauaaaaauucuucccac

SEQ ID NO: 857205 - RNA, 24 nt, Human
uucccauauaaaaauucuucccac

SEQ ID NO: 857206 - RNA, 27 nt, Human
uugaaaaaagcaccugcugcaccauaa

SEQ ID NO: 857207 - RNA, 22 nt, Human
uugugaagggucucaaguccaa

SEQ ID NO: 857208 - RNA, 20 nt, Human
uuuuuuuuuuuuuuguucca

SEQ ID NO: 857209 - RNA, 21 nt, Human
uuuuuuuuuuuuuuguuccaa

SEQ ID NO: 857210 - RNA, 20 nt, Human
uuuuuuuuuuuuuuuuuguu

SEQ ID NO: 857211 - RNA, 20 nt, Human
uuuuuuuuuuuuuuuuuugg

SEQ ID NO: 857212 - RNA, 24 nt, Human
aaaaacauguuguuaaggcucagg

SEQ ID NO: 857213 - RNA, 20 nt, Human
aaacaaagcauacuuagaga

SEQ ID NO: 857214 - RNA, 20 nt, Human
aagucgccucgcccucgcgc

SEQ ID NO: 857215 - RNA, 21 nt, Human
acaaagcauacuuagagagga

SEQ ID NO: 857216 - RNA, 27 nt, Human
acaaagcauacuuagagaggaguagag

SEQ ID NO: 857217 - RNA, 28 nt, Human
acaaagcauacuuagagaggaguagaga

SEQ ID NO: 857218 - RNA, 21 nt, Human
acagaccacgcugccuggagc

SEQ ID NO: 857219 - RNA, 19 nt, Human
acgcugccuggagcagggu

SEQ ID NO: 857220 - RNA, 21 nt, Human
acuuagagaggaguagagaaa

SEQ ID NO: 857221 - RNA, 21 nt, Human
agugcaggcaggcggcaccca

SEQ ID NO: 857222 - RNA, 23 nt, Human
auggucaguuuaaggccuguuua

SEQ ID NO: 857223 - RNA, 22 nt, Human
auugacagcaagccagugauaa

SEQ ID NO: 857224 - RNA, 18 nt, Human
cacugccuccagccucca

SEQ ID NO: 857225 - RNA, 21 nt, Human
cagcauguccccuuuucuguu

SEQ ID NO: 857226 - RNA, 22 nt, Human
cagccuccagcauccagggaga

SEQ ID NO: 857227 - RNA, 23 nt, Human
cagguuccaggcuucuuggguuc

SEQ ID NO: 857228 - RNA, 19 nt, Human
ccagcauccagggagagug

SEQ ID NO: 857229 - RNA, 22 nt, Human
ccaggcuucuuggguucuggga

SEQ ID NO: 857230 - RNA, 25 nt, Human
ccaggcuucuuggguucugggagga

SEQ ID NO: 857231 - RNA, 22 nt, Human
ccaucaggagcacgucacauuc

SEQ ID NO: 857232 - RNA, 23 nt, Human
cccacggcggagcagccuccagc

SEQ ID NO: 857233 - RNA, 18 nt, Human
cccucuucuuucuccucc

SEQ ID NO: 857234 - RNA, 24 nt, Human
cccucuucuuucuccuccugccca

SEQ ID NO: 857235 - RNA, 21 nt, Human
ccucacugccuccagccucca

SEQ ID NO: 857236 - RNA, 18 nt, Human
ccuccagcauccagggag

SEQ ID NO: 857237 - RNA, 22 nt, Human
ccucgcgcuguugcugccucac

SEQ ID NO: 857238 - RNA, 23 nt, Human
ccuggagcagggugaaaugcggc

SEQ ID NO: 857239 - RNA, 22 nt, Human
cgaaaaacaaagcauacuuaga

SEQ ID NO: 857240 - RNA, 18 nt, Human
cgccucgcccucgcgcug

SEQ ID NO: 857241 - RNA, 20 nt, Human
cuagcagugggcgucauagc

SEQ ID NO: 857242 - RNA, 19 nt, Human
cuuagagaggaguagagaa

SEQ ID NO: 857243 - RNA, 21 nt, Human
gagcagccuccagcauccagg

SEQ ID NO: 857244 - RNA, 21 nt, Human
gagugcaggcaaaagcgcggc

SEQ ID NO: 857245 - RNA, 18 nt, Human
gccacagguuccaggcuc

SEQ ID NO: 857246 - RNA, 20 nt, Human
gccauacagaccacgcugcc

SEQ ID NO: 857247 - RNA, 20 nt, Human
gcccacggcggagcagccuc

SEQ ID NO: 857248 - RNA, 19 nt, Human
gcccucuucuuucuccucc

SEQ ID NO: 857249 - RNA, 20 nt, Human
ggcggcacccaguucucuuc

SEQ ID NO: 857250 - RNA, 18 nt, Human
gguguucccuacccugcu

SEQ ID NO: 857251 - RNA, 20 nt, Human
gugaaaugcggccucgugcc

SEQ ID NO: 857252 - RNA, 21 nt, Human
gugggcgucauagccaucagg

SEQ ID NO: 857253 - RNA, 19 nt, Human
uagguuacagauuagcuaa

SEQ ID NO: 857254 - RNA, 21 nt, Human
uagguuacagauuagcuaaaa

SEQ ID NO: 857255 - RNA, 21 nt, Human
ucacugccuccagccuccagc

SEQ ID NO: 857256 - RNA, 18 nt, Human
uccagcauccagggagag

SEQ ID NO: 857257 - RNA, 18 nt, Human
uccagcauccggagagag

SEQ ID NO: 857258 - RNA, 23 nt, Human
ucgcgcuguugcugccucacugc

SEQ ID NO: 857259 - RNA, 21 nt, Human
ucuccuccugcccagggcgga

SEQ ID NO: 857260 - RNA, 27 nt, Human
ucugcagcaaaaacauguuguuaaggc

SEQ ID NO: 857261 - RNA, 20 nt, Human
ucuuccuucuccuccugccc

SEQ ID NO: 857262 - RNA, 20 nt, Human
ucuucuuucuccuccugccc

SEQ ID NO: 857263 - RNA, 20 nt, Human
ucuuggguucugggaggagg

SEQ ID NO: 857264 - RNA, 25 nt, Human
ugcaaagcgauaaaagcaaaggcag

SEQ ID NO: 857265 - RNA, 25 nt, Human
ugccucacugccuccagccuccagc

SEQ ID NO: 857266 - RNA, 20 nt, Human
ugggccagguguucccuacc

SEQ ID NO: 857267 - RNA, 21 nt, Human
uguugcugccucacugccucc

SEQ ID NO: 857268 - RNA, 21 nt, Human
uuacagauuagcuaaaagcau

SEQ ID NO: 857269 - RNA, 23 nt, Human
uuuuuuuuuuuuuuuuuuuucag

SEQ ID NO: 857270 - RNA, 20 nt, Human
accccaagugacaugaaaag

SEQ ID NO: 857271 - RNA, 21 nt, Human
accccaagugacaugaaaagc

SEQ ID NO: 857272 - RNA, 22 nt, Human
acucagagacuuaggagaggag

SEQ ID NO: 857273 - RNA, 21 nt, Human
agagaaacucagagacuuagg

SEQ ID NO: 857274 - RNA, 20 nt, Human
aggagaggaggaaagggggu

SEQ ID NO: 857275 - RNA, 23 nt, Human
aguaaauugaugugaagggucug

SEQ ID NO: 857276 - RNA, 20 nt, Human
caggccccacuccucuccac

SEQ ID NO: 857277 - RNA, 18 nt, Human
ccccugagauaccccaag

SEQ ID NO: 857278 - RNA, 25 nt, Human
cucaggauggcaggaggagagagaa

SEQ ID NO: 857279 - RNA, 21 nt, Human
cuuaggagaggaggaaagggg

SEQ ID NO: 857280 - RNA, 21 nt, Human
gagggguguggaggggcuuug

SEQ ID NO: 857281 - RNA, 23 nt, Human
gggagaggaacgaaaagagaggu

SEQ ID NO: 857282 - RNA, 22 nt, Human
gggcaggccccacuccucucca

SEQ ID NO: 857283 - RNA, 21 nt, Human
ggguguugugggcaggccucg

SEQ ID NO: 857284 - RNA, 21 nt, Human
uaggagaggaggaaagggggu

SEQ ID NO: 857285 - RNA, 19 nt, Human
uaguagagaaagguugaca

SEQ ID NO: 857286 - RNA, 21 nt, Human
uauuuuguuuccuggagcuuu

SEQ ID NO: 857287 - RNA, 23 nt, Human
uauuuuguuuccuggagcuuuca

SEQ ID NO: 857288 - RNA, 22 nt, Human
ucagagacuuaggagaggagga

SEQ ID NO: 857289 - RNA, 21 nt, Human
ucgaagacaacaguaaauuga

SEQ ID NO: 857290 - RNA, 18 nt, Human
ucuaaaauaaaaggcugc

SEQ ID NO: 857291 - RNA, 20 nt, Human
ucuguauuuuguuuccugga

SEQ ID NO: 857292 - RNA, 24 nt, Human
ugaaaagcauacucagggccuaga

SEQ ID NO: 857293 - RNA, 22 nt, Human
ugagauaccccaagugacauga

SEQ ID NO: 857294 - RNA, 24 nt, Human
ugagauaccccaagugacaugaaa

SEQ ID NO: 857295 - RNA, 18 nt, Human
uuaggagaggaggaaagg

SEQ ID NO: 857296 - RNA, 20 nt, Human
uuuccuggagcuuucacugg

SEQ ID NO: 857297 - RNA, 19 nt, Human
uuuuuuuuagaaucaggug

SEQ ID NO: 857298 - RNA, 21 nt, Human
aaagggucuugcuuuguugac

SEQ ID NO: 857299 - RNA, 24 nt, Human
aaaguguugggauuacaggcauga

SEQ ID NO: 857300 - RNA, 21 nt, Human
aaguguugggauuacaggcau

SEQ ID NO: 857301 - RNA, 26 nt, Human
aaguguugggauuacaggcaugagcc

SEQ ID NO: 857302 - RNA, 20 nt, Human
acaccaccgugcccagcuaa

SEQ ID NO: 857303 - RNA, 24 nt, Human
acuauguugcccaggcuggucuug

SEQ ID NO: 857304 - RNA, 25 nt, Human
acuauguugcccaggcuggucuuga

SEQ ID NO: 857305 - RNA, 22 nt, Human
acuccagugauccuccagccuc

SEQ ID NO: 857306 - RNA, 21 nt, Human
acugcagccucgaacuccagu

SEQ ID NO: 857307 - RNA, 20 nt, Human
aggcacacaccaccgugccc

SEQ ID NO: 857308 - RNA, 20 nt, Human
aggcaugagccaccgugccu

SEQ ID NO: 857309 - RNA, 23 nt, Human
aggcaugagccaccgugccuggc

SEQ ID NO: 857310 - RNA, 19 nt, Human
aggcuggagugcaguggca

SEQ ID NO: 857311 - RNA, 19 nt, Human
agggccuccgggcugcuca

SEQ ID NO: 857312 - RNA, 23 nt, Human
agggguguguggucccaggcagg

SEQ ID NO: 857313 - RNA, 19 nt, Human
agucauagcucacugcagc

SEQ ID NO: 857314 - RNA, 21 nt, Human
agugcaguggcacagucauag

SEQ ID NO: 857315 - RNA, 23 nt, Human
agugcaguggcacagucauagcu

SEQ ID NO: 857316 - RNA, 18 nt, Human
auagcucacugcagccuc

SEQ ID NO: 857317 - RNA, 24 nt, Human
caaaguguugggauuacaggcaug

SEQ ID NO: 857318 - RNA, 19 nt, Human
cacacaccaccgugcccag

SEQ ID NO: 857319 - RNA, 24 nt, Human
cacaccaccgugcccagcuaauuu

SEQ ID NO: 857320 - RNA, 21 nt, Human
cacccgggccaggcgcucggc

SEQ ID NO: 857321 - RNA, 19 nt, Human
cacgacacgguggcagagc

SEQ ID NO: 857322 - RNA, 19 nt, Human
cacuauguugcccaggcug

SEQ ID NO: 857323 - RNA, 24 nt, Human
cacuauguugcccaggcuggucuu

SEQ ID NO: 857324 - RNA, 27 nt, Human
cacuauguugcccaggcuggucuugaa

SEQ ID NO: 857325 - RNA, 20 nt, Human
cagcauagauggggucacua

SEQ ID NO: 857326 - RNA, 25 nt, Human
cagccucagccucaccaguagcugg

SEQ ID NO: 857327 - RNA, 23 nt, Human
cagccucgaacuccagugauccu

SEQ ID NO: 857328 - RNA, 27 nt, Human
cagggccagggccugggcacccagcgu

SEQ ID NO: 857329 - RNA, 23 nt, Human
caggucucacuauguugcccagg

SEQ ID NO: 857330 - RNA, 25 nt, Human
caguagcugggacuacaggcacaca

SEQ ID NO: 857331 - RNA, 22 nt, Human
cagugauccuccagccucagcc

SEQ ID NO: 857332 - RNA, 20 nt, Human
caguggcacagucauagcuc

SEQ ID NO: 857333 - RNA, 23 nt, Human
cauccagggccuccgggcugcuc

SEQ ID NO: 857334 - RNA, 23 nt, Human
ccaaaguguugggauuacaggca

SEQ ID NO: 857335 - RNA, 24 nt, Human
ccaaaguguugggauuacaggcau

SEQ ID NO: 857336 - RNA, 23 nt, Human
ccacccgggccaggcgcucggcc

SEQ ID NO: 857337 - RNA, 22 nt, Human
ccaguagcugggacuacaggca

SEQ ID NO: 857338 - RNA, 20 nt, Human
ccauccagggccuccgggcu

SEQ ID NO: 857339 - RNA, 24 nt, Human
cccaaaguguugggauuacaggca

SEQ ID NO: 857340 - RNA, 25 nt, Human
ccuccagccucagccucaccaguag

SEQ ID NO: 857341 - RNA, 19 nt, Human
ccuccggccucagccuccc

SEQ ID NO: 857342 - RNA, 18 nt, Human
ccucuuccccuuccgggu

SEQ ID NO: 857343 - RNA, 18 nt, Human
ccugggcucaagcaaucc

SEQ ID NO: 857344 - RNA, 21 nt, Human
cucacugcagccucgaacucc

SEQ ID NO: 857345 - RNA, 24 nt, Human
cucagccucaccaguagcugggac

SEQ ID NO: 857346 - RNA, 24 nt, Human
cuccagccucagccucaccaguag

SEQ ID NO: 857347 - RNA, 25 nt, Human
cuccagccucagccucaccaguagc

SEQ ID NO: 857348 - RNA, 23 nt, Human
cuccugggcucaagcaauccucc

SEQ ID NO: 857349 - RNA, 19 nt, Human
cuggucuugaacuccuggg

SEQ ID NO: 857350 - RNA, 24 nt, Human
gacuacaggcacacaccaccgugc

SEQ ID NO: 857351 - RNA, 18 nt, Human
gauuacaggcaugagcca

SEQ ID NO: 857352 - RNA, 21 nt, Human
gauuacaggcaugagccaccg

SEQ ID NO: 857353 - RNA, 24 nt, Human
gauuacaggcaugagccaccgugc

SEQ ID NO: 857354 - RNA, 19 nt, Human
gcacacaccaccgugccca

SEQ ID NO: 857355 - RNA, 19 nt, Human
gcagccucgaacuccagug

SEQ ID NO: 857356 - RNA, 19 nt, Human
gcagcuccuggaacagcag

SEQ ID NO: 857357 - RNA, 23 nt, Human
gccucagccucccaaaguguugg

SEQ ID NO: 857358 - RNA, 19 nt, Human
gcuggagugcaguggcaca

SEQ ID NO: 857359 - RNA, 24 nt, Human
ggauuacaggcaugagccaccgug

SEQ ID NO: 857360 - RNA, 18 nt, Human
ggcacccagcgugcccac

SEQ ID NO: 857361 - RNA, 18 nt, Human
ggccagagcucugaggaa

SEQ ID NO: 857362 - RNA, 18 nt, Human
ggcuggucuugaacuccu

SEQ ID NO: 857363 - RNA, 23 nt, Human
gggguguguggucccaggcaggg

SEQ ID NO: 857364 - RNA, 22 nt, Human
gggucuuucuaucccaggggug

SEQ ID NO: 857365 - RNA, 23 nt, Human
ggucccaggcagggagucaggag

SEQ ID NO: 857366 - RNA, 18 nt, Human
guagcugggacuacaggc

SEQ ID NO: 857367 - RNA, 20 nt, Human
guguaacuuucacuccaccc

SEQ ID NO: 857368 - RNA, 22 nt, Human
guugaaguguggcugcagcucc

SEQ ID NO: 857369 - RNA, 19 nt, Human
guugaccaggcuggagugc

SEQ ID NO: 857370 - RNA, 23 nt, Human
uaauuuuuuauuuuuuguagaga

SEQ ID NO: 857371 - RNA, 22 nt, Human
uacaggcaugagccaccgugcc

SEQ ID NO: 857372 - RNA, 22 nt, Human
uagcagaugcuucccgggcugg

SEQ ID NO: 857373 - RNA, 24 nt, Human
uagcucacugcagccucgaacucc

SEQ ID NO: 857374 - RNA, 23 nt, Human
uauguugcccaggcuggucuuga

SEQ ID NO: 857375 - RNA, 24 nt, Human
uauguugcccaggcuggucuugaa

SEQ ID NO: 857376 - RNA, 24 nt, Human
ucaccaguagcugggacuacaggc

SEQ ID NO: 857377 - RNA, 22 nt, Human
ucacugcagccucgaacuccag

SEQ ID NO: 857378 - RNA, 24 nt, Human
ucccaaaguguugggauuacaggc

SEQ ID NO: 857379 - RNA, 21 nt, Human
ucccaggggugugugguccca

SEQ ID NO: 857380 - RNA, 19 nt, Human
uccuccggccucagccucc

SEQ ID NO: 857381 - RNA, 18 nt, Human
uccugggcucaagcaauc

SEQ ID NO: 857382 - RNA, 22 nt, Human
uccugggcucaagcaauccucc

SEQ ID NO: 857383 - RNA, 19 nt, Human
ucucacuauguugcccagg

SEQ ID NO: 857384 - RNA, 23 nt, Human
ucucacuauguugcccaggcugg

SEQ ID NO: 857385 - RNA, 24 nt, Human
ucucacuauguugcccaggcuggu

SEQ ID NO: 857386 - RNA, 26 nt, Human
ucucacuauguugcccaggcuggucu

SEQ ID NO: 857387 - RNA, 27 nt, Human
ucucacuauguugcccaggcuggucuu

SEQ ID NO: 857388 - RNA, 19 nt, Human
ucugcgcagggccagggcc

SEQ ID NO: 857389 - RNA, 23 nt, Human
ucuugaacuccugggcucaagca

SEQ ID NO: 857390 - RNA, 23 nt, Human
ucuugcuuuguugaccaggcugg

SEQ ID NO: 857391 - RNA, 24 nt, Human
ucuugcuuuguugaccaggcugga

SEQ ID NO: 857392 - RNA, 24 nt, Human
ugaacuccugggcucaagcaaucc

SEQ ID NO: 857393 - RNA, 25 nt, Human
ugaacuccugggcucaagcaauccu

SEQ ID NO: 857394 - RNA, 24 nt, Human
ugaccaggcuggagugcaguggca

SEQ ID NO: 857395 - RNA, 19 nt, Human
ugagccaccgugccuggcg

SEQ ID NO: 857396 - RNA, 24 nt, Human
ugcccaggcuggucuugaacuccu

SEQ ID NO: 857397 - RNA, 28 nt, Human
ugcccaggcuggucuugaacuccugggc

SEQ ID NO: 857398 - RNA, 23 nt, Human
ugcgcagggccagggccugggca

SEQ ID NO: 857399 - RNA, 23 nt, Human
uggaacagcaggucggccacgac

SEQ ID NO: 857400 - RNA, 21 nt, Human
uggagugcaguggcacaguca

SEQ ID NO: 857401 - RNA, 24 nt, Human
uggcacagucauagcucacugcag

SEQ ID NO: 857402 - RNA, 21 nt, Human
ugggacuacaggcacacacca

SEQ ID NO: 857403 - RNA, 22 nt, Human
ugggacuacaggcacacaccac

SEQ ID NO: 857404 - RNA, 23 nt, Human
ugggacuacaggcacacaccacc

SEQ ID NO: 857405 - RNA, 24 nt, Human
ugggacuacaggcacacaccaccg

SEQ ID NO: 857406 - RNA, 18 nt, Human
ugggauuacaggcaugag

SEQ ID NO: 857407 - RNA, 21 nt, Human
ugggauuacaggcaugagcca

SEQ ID NO: 857408 - RNA, 22 nt, Human
ugggauuacaggcaugagccac

SEQ ID NO: 857409 - RNA, 23 nt, Human
ugggauuacaggcaugagccacc

SEQ ID NO: 857410 - RNA, 23 nt, Human
ugggauuacaggcaugagccacc

SEQ ID NO: 857411 - RNA, 24 nt, Human
ugggauuacaggcaugagccaccg

SEQ ID NO: 857412 - RNA, 20 nt, Human
ugggcucaagcaauccuccg

SEQ ID NO: 857413 - RNA, 19 nt, Human
ugguccagagcacuagcag

SEQ ID NO: 857414 - RNA, 18 nt, Human
uguugaccaggcuggagu

SEQ ID NO: 857415 - RNA, 19 nt, Human
uuagaagucaauccgccac

SEQ ID NO: 857416 - RNA, 18 nt, Human
uuugagaaagggucuugc

SEQ ID NO: 857417 - RNA, 24 nt, Human
uuuguugaccaggcuggagugcag

SEQ ID NO: 857418 - RNA, 23 nt, Human
uuuuuuuuuuuugagaaaggguc

SEQ ID NO: 857419 - RNA, 24 nt, Human
uuuuuuuuuuuugagaaagggucu

SEQ ID NO: 857420 - RNA, 25 nt, Human
uuuuuuuuuuuuuuuugagaaaggg

SEQ ID NO: 857421 - RNA, 18 nt, Human
uuuuuuuuuuuuuuuuug

SEQ ID NO: 857422 - RNA, 19 nt, Human
agacagcccuggaaaaucc

SEQ ID NO: 857423 - RNA, 21 nt, Human
auaaugcaggacacagguaac

SEQ ID NO: 857424 - RNA, 24 nt, Human
cagugggugauaugagcuggcucc

SEQ ID NO: 857425 - RNA, 18 nt, Human
ccagugggugauaugagc

SEQ ID NO: 857426 - RNA, 22 nt, Human
cccuccgcaccaccuccagacc

SEQ ID NO: 857427 - RNA, 23 nt, Human
cccuggaaaauccagagagcagg

SEQ ID NO: 857428 - RNA, 27 nt, Human
ccucuggcuccuuauuucggggccgcc

SEQ ID NO: 857429 - RNA, 24 nt, Human
cucccuccgcaccaccuccagacc

SEQ ID NO: 857430 - RNA, 23 nt, Human
cuggucccuaggcggcucccucc

SEQ ID NO: 857431 - RNA, 22 nt, Human
gcaggacacagguaacuccucu

SEQ ID NO: 857432 - RNA, 25 nt, Human
ggaaaauccagagagcaggcccagg

SEQ ID NO: 857433 - RNA, 22 nt, Human
ggcuauaaagacagcccuggaa

SEQ ID NO: 857434 - RNA, 20 nt, Human
gucccuggucccuaggcggc

SEQ ID NO: 857435 - RNA, 22 nt, Human
uccagagagcaggcccaggugc

SEQ ID NO: 857436 - RNA, 19 nt, Human
uggucccuaggcggcuccc

SEQ ID NO: 857437 - RNA, 19 nt, Human
aaacauguauaaagcaugu

SEQ ID NO: 857438 - RNA, 19 nt, Human
aaaggagcuuccgucuaca

SEQ ID NO: 857439 - RNA, 22 nt, Human
aaaguccuuucaaacagcccuu

SEQ ID NO: 857440 - RNA, 18 nt, Human
aaccagugccaugccaca

SEQ ID NO: 857441 - RNA, 21 nt, Human
aaccagugccaugccacaaug

SEQ ID NO: 857442 - RNA, 20 nt, Human
aaccauggcucacugcagcc

SEQ ID NO: 857443 - RNA, 20 nt, Human
aagacaaacacagacaggcc

SEQ ID NO: 857444 - RNA, 19 nt, Human
aagcacacaacaaaccgaa

SEQ ID NO: 857445 - RNA, 24 nt, Human
aagcacacaacaaaccgaagcuag

SEQ ID NO: 857446 - RNA, 25 nt, Human
aagugauccucccaccucagccucc

SEQ ID NO: 857447 - RNA, 22 nt, Human
aauaaagagaucgauaaagucc

SEQ ID NO: 857448 - RNA, 21 nt, Human
acaauaagcacacaacaaacc

SEQ ID NO: 857449 - RNA, 25 nt, Human
acaauaagcacacaacaaaccgaag

SEQ ID NO: 857450 - RNA, 19 nt, Human
accucagccuccuguacuu

SEQ ID NO: 857451 - RNA, 21 nt, Human
accugaccuccugggcugaag

SEQ ID NO: 857452 - RNA, 24 nt, Human
accugaccuccugggcugaaguga

SEQ ID NO: 857453 - RNA, 18 nt, Human
acuuugucacccaggcua

SEQ ID NO: 857454 - RNA, 21 nt, Human
acuuugucacccaggcuacag

SEQ ID NO: 857455 - RNA, 18 nt, Human
agacaggccgcaggcagg

SEQ ID NO: 857456 - RNA, 25 nt, Human
agacauguaaaccacucagcccagg

SEQ ID NO: 857457 - RNA, 18 nt, Human
agagauguucaggagcaa

SEQ ID NO: 857458 - RNA, 20 nt, Human
agccucccacccagcagccu

SEQ ID NO: 857459 - RNA, 18 nt, Human
aggacacaggccuuucug

SEQ ID NO: 857460 - RNA, 23 nt, Human
aggcagaugugugagugggcccg

SEQ ID NO: 857461 - RNA, 20 nt, Human
aguggugcaaccauggcuca

SEQ ID NO: 857462 - RNA, 19 nt, Human
auaaaguccuuucaaacag

SEQ ID NO: 857463 - RNA, 25 nt, Human
aucagccucccacccagcagccucc

SEQ ID NO: 857464 - RNA, 18 nt, Human
aucuguaaauuauuccuc

SEQ ID NO: 857465 - RNA, 22 nt, Human
augccacaaugacccacuggcu

SEQ ID NO: 857466 - RNA, 18 nt, Human
caaaacauuccaugaggg

SEQ ID NO: 857467 - RNA, 23 nt, Human
caaacacagacaggccgcaggca

SEQ ID NO: 857468 - RNA, 19 nt, Human
caaaguaggcgcacagggc

SEQ ID NO: 857469 - RNA, 22 nt, Human
caacaucaccaaacaugaguca

SEQ ID NO: 857470 - RNA, 25 nt, Human
caacugcuuaguuuuucauucaaau

SEQ ID NO: 857471 - RNA, 19 nt, Human
cacucagcccaggcccagc

SEQ ID NO: 857472 - RNA, 24 nt, Human
cacuuugucacccaggcuacagug

SEQ ID NO: 857473 - RNA, 18 nt, Human
cagaacuccacacaggga

SEQ ID NO: 857474 - RNA, 22 nt, Human
cagacaggccgcaggcaggcag

SEQ ID NO: 857475 - RNA, 21 nt, Human
cagcaaccagugccaugccac

SEQ ID NO: 857476 - RNA, 18 nt, Human
cagccuugaccugaccuc

SEQ ID NO: 857477 - RNA, 18 nt, Human
cauccaacaucaccaaac

SEQ ID NO: 857478 - RNA, 23 nt, Human
cauggcucacugcagccuugacc

SEQ ID NO: 857479 - RNA, 18 nt, Human
cauguaaaccacucagcc

SEQ ID NO: 857480 - RNA, 19 nt, Human
cauguagacuggugagauc

SEQ ID NO: 857481 - RNA, 20 nt, Human
ccacccagcagccuccaggc

SEQ ID NO: 857482 - RNA, 26 nt, Human
ccagugccaugccacaauggggugca

SEQ ID NO: 857483 - RNA, 19 nt, Human
cccacccagcagccuccag

SEQ ID NO: 857484 - RNA, 18 nt, Human
cccagagacuucucugga

SEQ ID NO: 857485 - RNA, 20 nt, Human
cccaggcuacaguguagugg

SEQ ID NO: 857486 - RNA, 23 nt, Human
ccucccaccucagccuccuguac

SEQ ID NO: 857487 - RNA, 21 nt, Human
ccugaccuccugggcugaagu

SEQ ID NO: 857488 - RNA, 23 nt, Human
ccugaccuccugggcugaaguga

SEQ ID NO: 857489 - RNA, 20 nt, Human
ccugggcugaagugauccuc

SEQ ID NO: 857490 - RNA, 22 nt, Human
ccuguacuuuaauuacuaaaaa

SEQ ID NO: 857491 - RNA, 18 nt, Human
cucacugcagccuugacc

SEQ ID NO: 857492 - RNA, 24 nt, Human
cugaagugauccucccaccucagc

SEQ ID NO: 857493 - RNA, 20 nt, Human
cuggcaccaaaggagcuucc

SEQ ID NO: 857494 - RNA, 20 nt, Human
cuucugucuccucgaugucc

SEQ ID NO: 857495 - RNA, 19 nt, Human
cuugaccugaccuccuggg

SEQ ID NO: 857496 - RNA, 19 nt, Human
gaaaucagagauguucagg

SEQ ID NO: 857497 - RNA, 20 nt, Human
gagacagggucucacuuugu

SEQ ID NO: 857498 - RNA, 20 nt, Human
gaucaaaacauuccaugagg

SEQ ID NO: 857499 - RNA, 22 nt, Human
gcacagggcuauuuuggugaag

SEQ ID NO: 857500 - RNA, 18 nt, Human
gcagaugugugagugggc

SEQ ID NO: 857501 - RNA, 19 nt, Human
ggcagaugugugagugggc

SEQ ID NO: 857502 - RNA, 23 nt, Human
ggcauccaacaucaccaaacaug

SEQ ID NO: 857503 - RNA, 20 nt, Human
ggcccgcagaagaaugucca

SEQ ID NO: 857504 - RNA, 21 nt, Human
gggugcacggcucagagacac

SEQ ID NO: 857505 - RNA, 18 nt, Human
ggucccaccauuugcagu

SEQ ID NO: 857506 - RNA, 21 nt, Human
gugagaucugccagaacucca

SEQ ID NO: 857507 - RNA, 23 nt, Human
gugauccucccaccucagccucc

SEQ ID NO: 857508 - RNA, 24 nt, Human
uaaaaagaaacauguauaaagcau

SEQ ID NO: 857509 - RNA, 21 nt, Human
uaagacaaacacagacaggcc

SEQ ID NO: 857510 - RNA, 23 nt, Human
uaauaagaccgcacccgccuccu

SEQ ID NO: 857511 - RNA, 26 nt, Human
uacuuggccagugacuuggagggguu

SEQ ID NO: 857512 - RNA, 30 nt, Human
ucacugcagccuugaccugaccuccugggg

SEQ ID NO: 857513 - RNA, 21 nt, Human
ucagcccaggcccagcacaca

SEQ ID NO: 857514 - RNA, 20 nt, Human
uccuuggggaaaugcagugu

SEQ ID NO: 857515 - RNA, 19 nt, Human
ucucacuuugucacccagg

SEQ ID NO: 857516 - RNA, 22 nt, Human
ucucacuuugucacccaggcua

SEQ ID NO: 857517 - RNA, 23 nt, Human
ucucacuuugucacccaggcuac

SEQ ID NO: 857518 - RNA, 24 nt, Human
ucucacuuugucacccaggcuaca

SEQ ID NO: 857519 - RNA, 19 nt, Human
ucucuggaaggauggaaau

SEQ ID NO: 857520 - RNA, 21 nt, Human
ucuucugucuccucgaugucc

SEQ ID NO: 857521 - RNA, 23 nt, Human
ucuugggcuuaaguucuggacuu

SEQ ID NO: 857522 - RNA, 19 nt, Human
ugacagcauaagcaacugc

SEQ ID NO: 857523 - RNA, 20 nt, Human
ugacagcauaagcaacugcu

SEQ ID NO: 857524 - RNA, 21 nt, Human
ugaggggacugacuacaaaag

SEQ ID NO: 857525 - RNA, 23 nt, Human
ugccacaauggggugcacggcuc

SEQ ID NO: 857526 - RNA, 22 nt, Human
uggcucacugcagccuugaccu

SEQ ID NO: 857527 - RNA, 25 nt, Human
ugggacuuuggugcuaacacugggu

SEQ ID NO: 857528 - RNA, 24 nt, Human
uggugcaaccauggcucacugcag

SEQ ID NO: 857529 - RNA, 22 nt, Human
uguaguggugcaaccauggcuc

SEQ ID NO: 857530 - RNA, 19 nt, Human
ugucacccaggcuacagug

SEQ ID NO: 857531 - RNA, 22 nt, Human
uucacaaaacuguacagauaua

SEQ ID NO: 857532 - RNA, 23 nt, Human
uuuuuuuuuugagacagggucuc

SEQ ID NO: 857533 - RNA, 20 nt, Human
uuuuuuuuuuugagacaggg

SEQ ID NO: 857534 - RNA, 23 nt, Human
uuuuuuuuuuuugagacaggguc

SEQ ID NO: 857535 - RNA, 26 nt, Human
uuuuuuuuuuuugagacagggucuca

SEQ ID NO: 857536 - RNA, 25 nt, Human
uuuuuuuuuuuuuuugagacagggg

SEQ ID NO: 857537 - RNA, 27 nt, Human
uuuuuuuuuuuuuuuuuuuuuuugggg

SEQ ID NO: 857538 - RNA, 20 nt, Human
aaacccucgaacggucaggc

SEQ ID NO: 857539 - RNA, 20 nt, Human
aaacgaggcugcgaagaggc

SEQ ID NO: 857540 - RNA, 24 nt, Human
aaagugcugggauuacaggcguga

SEQ ID NO: 857541 - RNA, 22 nt, Human
aaaugucagaaaaucacagcgg

SEQ ID NO: 857542 - RNA, 18 nt, Human
aagaacccuucagagccu

SEQ ID NO: 857543 - RNA, 20 nt, Human
aagcagacaaacggaacucc

SEQ ID NO: 857544 - RNA, 19 nt, Human
aagugcugggauuacaggc

SEQ ID NO: 857545 - RNA, 19 nt, Human
aagugcugggauuacaggc

SEQ ID NO: 857546 - RNA, 26 nt, Human
aagugcugggauuacaggcgugagcc

SEQ ID NO: 857547 - RNA, 22 nt, Human
acaaccgaccaagcagacaaac

SEQ ID NO: 857548 - RNA, 23 nt, Human
acaggccugcaccaccacgcccg

SEQ ID NO: 857549 - RNA, 20 nt, Human
accauucaugaaagaugcuc

SEQ ID NO: 857550 - RNA, 18 nt, Human
acccaagacggggcccca

SEQ ID NO: 857551 - RNA, 23 nt, Human
acggcaaaaaaaguaagugaacc

SEQ ID NO: 857552 - RNA, 18 nt, Human
acgggguuucuccauguu

SEQ ID NO: 857553 - RNA, 20 nt, Human
acgggguuucuccauguuga

SEQ ID NO: 857554 - RNA, 23 nt, Human
acgggguuucuccauguugaggc

SEQ ID NO: 857555 - RNA, 26 nt, Human
acgggguuucuccauguugaggcugg

SEQ ID NO: 857556 - RNA, 21 nt, Human
acuccgaggaggccgcgcggg

SEQ ID NO: 857557 - RNA, 18 nt, Human
agcaauucuccugcuuua

SEQ ID NO: 857558 - RNA, 18 nt, Human
agccucccgaguagcugg

SEQ ID NO: 857559 - RNA, 19 nt, Human
agcugggauuacaggccug

SEQ ID NO: 857560 - RNA, 24 nt, Human
aggugauccgcccgucucggccuc

SEQ ID NO: 857561 - RNA, 22 nt, Human
aguagagacgggguuucuccau

SEQ ID NO: 857562 - RNA, 19 nt, Human
aguagcugggauuacaggc

SEQ ID NO: 857563 - RNA, 20 nt, Human
agugcaauggcgcgaucucg

SEQ ID NO: 857564 - RNA, 24 nt, Human
agugcaauggcgcgaucucggcuc

SEQ ID NO: 857565 - RNA, 24 nt, Human
caaagugcugggauuacaggcgug

SEQ ID NO: 857566 - RNA, 22 nt, Human
caacggcaaaaaaaguaaguga

SEQ ID NO: 857567 - RNA, 24 nt, Human
caagacggggccccagccggcgcc

SEQ ID NO: 857568 - RNA, 22 nt, Human
caagcaauucuccugcuuuagc

SEQ ID NO: 857569 - RNA, 21 nt, Human
caccacaaccuccgccuccca

SEQ ID NO: 857570 - RNA, 22 nt, Human
caccacaaccuccgccucccag

SEQ ID NO: 857571 - RNA, 23 nt, Human
caccaccacgcccggcuaaauuu

SEQ ID NO: 857572 - RNA, 18 nt, Human
cagcagcaucaagcgauc

SEQ ID NO: 857573 - RNA, 20 nt, Human
cagcagcaucaagcgaucuu

SEQ ID NO: 857574 - RNA, 24 nt, Human
cagcagcaucaagcgaucuuugga

SEQ ID NO: 857575 - RNA, 23 nt, Human
cagcugcugcuucacuguccacu

SEQ ID NO: 857576 - RNA, 23 nt, Human
caggcgacggcguggacacccaa

SEQ ID NO: 857577 - RNA, 20 nt, Human
ccaaagugcugggauuacag

SEQ ID NO: 857578 - RNA, 22 nt, Human
ccaaagugcugggauuacaggc

SEQ ID NO: 857579 - RNA, 22 nt, Human
ccaaagugcugggauuacaggc

SEQ ID NO: 857580 - RNA, 24 nt, Human
ccaaagugcugggauuacaggcgu

SEQ ID NO: 857581 - RNA, 19 nt, Human
ccaagcagcagcaucaagc

SEQ ID NO: 857582 - RNA, 23 nt, Human
ccacaaccuccgccucccagguu

SEQ ID NO: 857583 - RNA, 24 nt, Human
ccacaaccuccgccucccagguuc

SEQ ID NO: 857584 - RNA, 23 nt, Human
ccaugggcaggcccagccccacu

SEQ ID NO: 857585 - RNA, 22 nt, Human
cccacugccuagcccagcugcu

SEQ ID NO: 857586 - RNA, 23 nt, Human
cccagguucaagcaauucuccug

SEQ ID NO: 857587 - RNA, 21 nt, Human
ccccaugggcaggcccagccc

SEQ ID NO: 857588 - RNA, 19 nt, Human
ccccuuagggcccagcugu

SEQ ID NO: 857589 - RNA, 25 nt, Human
cccgaguagcugggauuacaggccu

SEQ ID NO: 857590 - RNA, 22 nt, Human
cccgucucggccucccaaagug

SEQ ID NO: 857591 - RNA, 27 nt, Human
ccgccucccagguucaagcaauucuuu

SEQ ID NO: 857592 - RNA, 21 nt, Human
ccuagcccagcugcugcuuca

SEQ ID NO: 857593 - RNA, 24 nt, Human
ccucccagguucaagcaauucucc

SEQ ID NO: 857594 - RNA, 18 nt, Human
ccugaccucaggugaucc

SEQ ID NO: 857595 - RNA, 22 nt, Human
ccugaccucaggugauccgccc

SEQ ID NO: 857596 - RNA, 22 nt, Human
ccuggucacccaagccuuucug

SEQ ID NO: 857597 - RNA, 19 nt, Human
ccuuugggcauucucuucc

SEQ ID NO: 857598 - RNA, 19 nt, Human
cgccgcgccccugccccuc

SEQ ID NO: 857599 - RNA, 22 nt, Human
cggaacuccgugagggggacac

SEQ ID NO: 857600 - RNA, 21 nt, Human
cgggguuucuccauguugagg

SEQ ID NO: 857601 - RNA, 23 nt, Human
cguuccuuugggcauucucuucc

SEQ ID NO: 857602 - RNA, 24 nt, Human
cuaaauuuguauuuuuaguagaga

SEQ ID NO: 857603 - RNA, 24 nt, Human
cucaccacaaccuccgccucccag

SEQ ID NO: 857604 - RNA, 26 nt, Human
cuccugaccucaggugauccgcccgu

SEQ ID NO: 857605 - RNA, 23 nt, Human
cugcuuuagccucccgaguagcu

SEQ ID NO: 857606 - RNA, 19 nt, Human
cuggcucagcauucucuuc

SEQ ID NO: 857607 - RNA, 19 nt, Human
cuuaaacccuggcucagca

SEQ ID NO: 857608 - RNA, 19 nt, Human
gaccaagcagacaaacgga

SEQ ID NO: 857609 - RNA, 24 nt, Human
gaccucaggugauccgcccgucuc

SEQ ID NO: 857610 - RNA, 20 nt, Human
gagacgggguuucuccaugu

SEQ ID NO: 857611 - RNA, 24 nt, Human
gaguagcugggauuacaggccugc

SEQ ID NO: 857612 - RNA, 18 nt, Human
gauuacaggcgugagcca

SEQ ID NO: 857613 - RNA, 22 nt, Human
gauuacaggcgugagccaccgc

SEQ ID NO: 857614 - RNA, 22 nt, Human
gauuacaggcgugagccaccgc

SEQ ID NO: 857615 - RNA, 24 nt, Human
gauuauuuugggcacuguauuuuu

SEQ ID NO: 857616 - RNA, 18 nt, Human
gcagaaacguccaggggc

SEQ ID NO: 857617 - RNA, 18 nt, Human
gccgcgccccugccccuc

SEQ ID NO: 857618 - RNA, 28 nt, Human
gccugaagguauucuacucuuaguuauu

SEQ ID NO: 857619 - RNA, 18 nt, Human
gccuggguccuggggcuc

SEQ ID NO: 857620 - RNA, 19 nt, Human
gcggucucaagcgcaagaa

SEQ ID NO: 857621 - RNA, 23 nt, Human
gcuggucucgaacuccugaccuc

SEQ ID NO: 857622 - RNA, 18 nt, Human
ggcguggacacccaagac

SEQ ID NO: 857623 - RNA, 24 nt, Human
ggcuggucucgaacuccugaccuc

SEQ ID NO: 857624 - RNA, 25 nt, Human
gggcggguguuguuucgggagcugc

SEQ ID NO: 857625 - RNA, 19 nt, Human
ggucucgaacuccugaccu

SEQ ID NO: 857626 - RNA, 23 nt, Human
guagagacgggguuucuccaugu

SEQ ID NO: 857627 - RNA, 18 nt, Human
guccccuugcagaacucg

SEQ ID NO: 857628 - RNA, 23 nt, Human
guuccuuugggcauucucuucca

SEQ ID NO: 857629 - RNA, 22 nt, Human
uaagggcuucaacuuaaagucc

SEQ ID NO: 857630 - RNA, 20 nt, Human
uaagugaaccauucaugaaa

SEQ ID NO: 857631 - RNA, 21 nt, Human
uacaggccugcaccaccacgc

SEQ ID NO: 857632 - RNA, 22 nt, Human
uacaggcgugagccaccgcgcc

SEQ ID NO: 857633 - RNA, 22 nt, Human
uacaggcgugagccaccgcgcc

SEQ ID NO: 857634 - RNA, 23 nt, Human
uacaggcgugagccaccgcgccu

SEQ ID NO: 857635 - RNA, 24 nt, Human
uaguagagacgggguuucuccaug

SEQ ID NO: 857636 - RNA, 19 nt, Human
uaucagaaaggucgcucaa

SEQ ID NO: 857637 - RNA, 24 nt, Human
ucaccacaaccuccgccucccagg

SEQ ID NO: 857638 - RNA, 25 nt, Human
ucaccacaaccuccgccucccaggu

SEQ ID NO: 857639 - RNA, 27 nt, Human
ucaccacaaccuccgccucccagguuc

SEQ ID NO: 857640 - RNA, 24 nt, Human
ucacgggcaaacugggcuucaaga

SEQ ID NO: 857641 - RNA, 23 nt, Human
ucacuccuguuguccaggaugga

SEQ ID NO: 857642 - RNA, 23 nt, Human
uccagagaacaaccgaccaagca

SEQ ID NO: 857643 - RNA, 25 nt, Human
uccagagaacaaccgaccaagcaga

SEQ ID NO: 857644 - RNA, 26 nt, Human
uccagagaacaaccgaccaagcagac

SEQ ID NO: 857645 - RNA, 19 nt, Human
uccauggaggaccccagaa

SEQ ID NO: 857646 - RNA, 24 nt, Human
ucccaaagugcugggauuacaggc

SEQ ID NO: 857647 - RNA, 21 nt, Human
ucccagguucaagcaauucuc

SEQ ID NO: 857648 - RNA, 24 nt, Human
ucccagguucaagcaauucuccug

SEQ ID NO: 857649 - RNA, 24 nt, Human
ucccgaguagcugggauuacaggc

SEQ ID NO: 857650 - RNA, 21 nt, Human
uccgaggaggccgcgcggguc

SEQ ID NO: 857651 - RNA, 19 nt, Human
ucucgaacuccugaccuca

SEQ ID NO: 857652 - RNA, 20 nt, Human
ucucggccucccaaagugcu

SEQ ID NO: 857653 - RNA, 21 nt, Human
ucugccuccaaaaugucagaa

SEQ ID NO: 857654 - RNA, 26 nt, Human
ucuuuggaugacuuaaacccuggcuc

SEQ ID NO: 857655 - RNA, 18 nt, Human
ugaccucaggugauccgc

SEQ ID NO: 857656 - RNA, 21 nt, Human
ugaccucaggugauccgcccg

SEQ ID NO: 857657 - RNA, 24 nt, Human
ugaccucaggugauccgcccgucu

SEQ ID NO: 857658 - RNA, 21 nt, Human
ugacuuaaacccuggcucagc

SEQ ID NO: 857659 - RNA, 21 nt, Human
ugagauuauuuugggcacugu

SEQ ID NO: 857660 - RNA, 22 nt, Human
ugaggcuggucucgaacuccug

SEQ ID NO: 857661 - RNA, 19 nt, Human
ugcgaagaggcucaggcug

SEQ ID NO: 857662 - RNA, 24 nt, Human
ugcugggauuacaggcgugagcca

SEQ ID NO: 857663 - RNA, 21 nt, Human
uggacacccaagacggggccc

SEQ ID NO: 857664 - RNA, 23 nt, Human
uggagugcaauggcgcgaucucg

SEQ ID NO: 857665 - RNA, 24 nt, Human
uggagugcaauggcgcgaucucgg

SEQ ID NO: 857666 - RNA, 24 nt, Human
uggcgcgaucucggcucaccacaa

SEQ ID NO: 857667 - RNA, 19 nt, Human
uggcucagcauucucuucc

SEQ ID NO: 857668 - RNA, 21 nt, Human
ugggauuacaggccugcacca

SEQ ID NO: 857669 - RNA, 24 nt, Human
ugggauuacaggccugcaccacca

SEQ ID NO: 857670 - RNA, 18 nt, Human
ugggauuacaggcgugag

SEQ ID NO: 857671 - RNA, 19 nt, Human
ugggauuacaggcgugagc

SEQ ID NO: 857672 - RNA, 21 nt, Human
ugggauuacaggcgugagcca

SEQ ID NO: 857673 - RNA, 22 nt, Human
ugggauuacaggcgugagccac

SEQ ID NO: 857674 - RNA, 23 nt, Human
ugggauuacaggcgugagccacc

SEQ ID NO: 857675 - RNA, 24 nt, Human
ugggauuacaggcgugagccaccg

SEQ ID NO: 857676 - RNA, 21 nt, Human
uguauuuuuaguagagacggg

SEQ ID NO: 857677 - RNA, 26 nt, Human
ugucagaaaaucacagcggucucaag

SEQ ID NO: 857678 - RNA, 19 nt, Human
ugucugggcagggcgaggc

SEQ ID NO: 857679 - RNA, 24 nt, Human
uguugaggcuggucucgaacuccu

SEQ ID NO: 857680 - RNA, 18 nt, Human
uguuggggccgugcggcc

SEQ ID NO: 857681 - RNA, 22 nt, Human
uguuggggccgugcggccgcag

SEQ ID NO: 857682 - RNA, 18 nt, Human
uuaguagagacgggguuu

SEQ ID NO: 857683 - RNA, 24 nt, Human
uuaguagagacgggguuucuccau

SEQ ID NO: 857684 - RNA, 18 nt, Human
uucacuguccacuccgag

SEQ ID NO: 857685 - RNA, 20 nt, Human
uucgggagcugcuuuccaug

SEQ ID NO: 857686 - RNA, 24 nt, Human
uuuagccucccgaguagcugggau

SEQ ID NO: 857687 - RNA, 18 nt, Human
uuuguauuuuuaguagag

SEQ ID NO: 857688 - RNA, 19 nt, Human
uuuguauuuuuaguagaga

SEQ ID NO: 857689 - RNA, 20 nt, Human
uuuguauuuuuaguagagac

SEQ ID NO: 857690 - RNA, 22 nt, Human
uuuuuaguagagacgggguuuc

SEQ ID NO: 857691 - RNA, 26 nt, Human
uuuuuuuuuuuugagacggaguuuca

SEQ ID NO: 857692 - RNA, 22 nt, Human
uuuuuuuuuuuuuugagacgga

SEQ ID NO: 857693 - RNA, 18 nt, Human
uuuuuuuuuuuuuuuuug

SEQ ID NO: 857694 - RNA, 23 nt, Human
aaacaucaaaagguacaauggcc

SEQ ID NO: 857695 - RNA, 25 nt, Human
aaacaucucaacagcagaccagaac

SEQ ID NO: 857696 - RNA, 24 nt, Human
aagaagaaagccaccaacagaagg

SEQ ID NO: 857697 - RNA, 20 nt, Human
aagagacaggacaccaguga

SEQ ID NO: 857698 - RNA, 23 nt, Human
aagagacaggacaccagugagug

SEQ ID NO: 857699 - RNA, 23 nt, Human
aagcagccaccccucccaacaag

SEQ ID NO: 857700 - RNA, 18 nt, Human
aagcauaguugcaaaaug

SEQ ID NO: 857701 - RNA, 23 nt, Human
aagcccucaaaggcagacagucc

SEQ ID NO: 857702 - RNA, 22 nt, Human
aauggguaugggugacaagagg

SEQ ID NO: 857703 - RNA, 23 nt, Human
aauggguaugggugacaagaggg

SEQ ID NO: 857704 - RNA, 19 nt, Human
acacagguaacaagaccag

SEQ ID NO: 857705 - RNA, 21 nt, Human
acagcaccugguggccacacc

SEQ ID NO: 857706 - RNA, 19 nt, Human
agaaagauggggaaauucu

SEQ ID NO: 857707 - RNA, 21 nt, Human
agaagaaagccaccaacagaa

SEQ ID NO: 857708 - RNA, 21 nt, Human
agccaccccucccaacaagag

SEQ ID NO: 857709 - RNA, 22 nt, Human
agccagcgcccuaucaaccugg

SEQ ID NO: 857710 - RNA, 18 nt, Human
aggacaggacgacaagag

SEQ ID NO: 857711 - RNA, 22 nt, Human
aggacaggagggagagucuggc

SEQ ID NO: 857712 - RNA, 22 nt, Human
aggagggagagucuggccaggu

SEQ ID NO: 857713 - RNA, 19 nt, Human
aggccgaggcuggcagagc

SEQ ID NO: 857714 - RNA, 21 nt, Human
agggagaggccgaggcuggca

SEQ ID NO: 857715 - RNA, 18 nt, Human
aggggccaccuuccaccc

SEQ ID NO: 857716 - RNA, 21 nt, Human
auccaaguacccugacccagc

SEQ ID NO: 857717 - RNA, 18 nt, Human
aucccauuuuuuccuuaa

SEQ ID NO: 857718 - RNA, 23 nt, Human
aucuucccuggcauucucuguua

SEQ ID NO: 857719 - RNA, 23 nt, Human
auggccaggggugcggcaggaga

SEQ ID NO: 857720 - RNA, 18 nt, Human
caaaaacuaaaauugcua

SEQ ID NO: 857721 - RNA, 18 nt, Human
caagcagccaccccuccc

SEQ ID NO: 857722 - RNA, 22 nt, Human
caagcagccaccccucccaaca

SEQ ID NO: 857723 - RNA, 23 nt, Human
caaguacccugacccagcacuca

SEQ ID NO: 857724 - RNA, 18 nt, Human
cacagaaacucacagcac

SEQ ID NO: 857725 - RNA, 28 nt, Human
caccagugaguggcugggccaggcggcc

SEQ ID NO: 857726 - RNA, 20 nt, Human
caccccucccaacaagagcc

SEQ ID NO: 857727 - RNA, 23 nt, Human
cacccugaaaugcacccuuugcu

SEQ ID NO: 857728 - RNA, 20 nt, Human
caccucagcgucuacuucca

SEQ ID NO: 857729 - RNA, 22 nt, Human
cacucaucuucccuggcauucu

SEQ ID NO: 857730 - RNA, 21 nt, Human
cagaaacucacagcaccuggu

SEQ ID NO: 857731 - RNA, 25 nt, Human
cagacaguccucaugcgcagcacca

SEQ ID NO: 857732 - RNA, 19 nt, Human
cagccagcgcccuaucaac

SEQ ID NO: 857733 - RNA, 21 nt, Human
cagcccagaggccaugagcca

SEQ ID NO: 857734 - RNA, 24 nt, Human
cagucuguggcccaucuggaaacu

SEQ ID NO: 857735 - RNA, 26 nt, Human
ccaacucuaaaacaaaaucccauuuu

SEQ ID NO: 857736 - RNA, 18 nt, Human
ccagaacuagaaaacaca

SEQ ID NO: 857737 - RNA, 26 nt, Human
ccaggcggccccauuuccuaaaacca

SEQ ID NO: 857738 - RNA, 28 nt, Human
ccaggggugcggcaggagagucgggggc

SEQ ID NO: 857739 - RNA, 20 nt, Human
ccagugaguggcugggccag

SEQ ID NO: 857740 - RNA, 22 nt, Human
cccagaggccaugagccacaga

SEQ ID NO: 857741 - RNA, 18 nt, Human
ccccugggccuauuucca

SEQ ID NO: 857742 - RNA, 20 nt, Human
ccuacauccuucaaaacuca

SEQ ID NO: 857743 - RNA, 21 nt, Human
ccuauuuccaagcagccaccc

SEQ ID NO: 857744 - RNA, 23 nt, Human
ccuccagcgccgccgccccgggc

SEQ ID NO: 857745 - RNA, 24 nt, Human
ccugggacucccagaccuggcaga

SEQ ID NO: 857746 - RNA, 23 nt, Human
cgaggcuggcagagccccugggc

SEQ ID NO: 857747 - RNA, 24 nt, Human
cuagaaaacacagcuucuguguag

SEQ ID NO: 857748 - RNA, 18 nt, Human
cucaaaggcagacagucc

SEQ ID NO: 857749 - RNA, 18 nt, Human
cucacagcaccugguggc

SEQ ID NO: 857750 - RNA, 23 nt, Human
cuggcuaugguacuuuggggaga

SEQ ID NO: 857751 - RNA, 18 nt, Human
gaaacuggcuaugguacu

SEQ ID NO: 857752 - RNA, 19 nt, Human
gaaggcaacucaggaggga

SEQ ID NO: 857753 - RNA, 22 nt, Human
gacaagaggggccaccuuccac

SEQ ID NO: 857754 - RNA, 21 nt, Human
gacccagcacucaucuucccu

SEQ ID NO: 857755 - RNA, 20 nt, Human
gagccccugggccuauuucc

SEQ ID NO: 857756 - RNA, 22 nt, Human
gcagaggguuuuauuagggccc

SEQ ID NO: 857757 - RNA, 20 nt, Human
gccaccaacagaaggcaacc

SEQ ID NO: 857758 - RNA, 20 nt, Human
gccacugauucuccucccca

SEQ ID NO: 857759 - RNA, 21 nt, Human
gcccucaaaggcagacagucc

SEQ ID NO: 857760 - RNA, 20 nt, Human
gcgguucagcucaaggacac

SEQ ID NO: 857761 - RNA, 21 nt, Human
gcuccgucucgagcuccucca

SEQ ID NO: 857762 - RNA, 20 nt, Human
gcugggccaggcggccccau

SEQ ID NO: 857763 - RNA, 26 nt, Human
ggaaggacaggacgacaagagacagg

SEQ ID NO: 857764 - RNA, 18 nt, Human
ggcagacaguccucaugc

SEQ ID NO: 857765 - RNA, 22 nt, Human
ggcagaggguuuuauuagggcc

SEQ ID NO: 857766 - RNA, 24 nt, Human
gggagagucuggccaggugcaccc

SEQ ID NO: 857767 - RNA, 18 nt, Human
gggccaccuuccaccccu

SEQ ID NO: 857768 - RNA, 18 nt, Human
gguaacaagaccagggga

SEQ ID NO: 857769 - RNA, 18 nt, Human
guacacacuuauggucug

SEQ ID NO: 857770 - RNA, 25 nt, Human
gucgggggcagggcagccuucaaau

SEQ ID NO: 857771 - RNA, 18 nt, Human
gugacuccugauucugca

SEQ ID NO: 857772 - RNA, 24 nt, Human
guggcccaucuggaaacuggcuau

SEQ ID NO: 857773 - RNA, 25 nt, Human
uaaaauugcuaucagcccccgccgc

SEQ ID NO: 857774 - RNA, 24 nt, Human
uaagaaauggguaugggugacaag

SEQ ID NO: 857775 - RNA, 21 nt, Human
uaagacauuucccaagaguuc

SEQ ID NO: 857776 - RNA, 21 nt, Human
uacaauggccaggggugcggc

SEQ ID NO: 857777 - RNA, 21 nt, Human
uacagaaucaaaggggaaacc

SEQ ID NO: 857778 - RNA, 19 nt, Human
uagaaaacacagcuucugu

SEQ ID NO: 857779 - RNA, 18 nt, Human
ucaaaacucagacuccac

SEQ ID NO: 857780 - RNA, 22 nt, Human
ucagugcgguucagcucaagga

SEQ ID NO: 857781 - RNA, 26 nt, Human
ucaugcgcagcaccagcacacacaca

SEQ ID NO: 857782 - RNA, 25 nt, Human
uccaagacagaauugcccucagccc

SEQ ID NO: 857783 - RNA, 21 nt, Human
uccaaguacccugacccagca

SEQ ID NO: 857784 - RNA, 21 nt, Human
uccgucucgagcuccuccagc

SEQ ID NO: 857785 - RNA, 21 nt, Human
uccuucaaaacucagacucca

SEQ ID NO: 857786 - RNA, 19 nt, Human
ucugagacccaacuaaggc

SEQ ID NO: 857787 - RNA, 18 nt, Human
ugaaaaccucuuuacaca

SEQ ID NO: 857788 - RNA, 19 nt, Human
ugacaagaggggccaccuu

SEQ ID NO: 857789 - RNA, 22 nt, Human
ugagaggauagggaggccaaaa

SEQ ID NO: 857790 - RNA, 26 nt, Human
ugaggacaagaguucuucagugcggu

SEQ ID NO: 857791 - RNA, 27 nt, Human
ugaggacaagaguucuucagugcgguu

SEQ ID NO: 857792 - RNA, 19 nt, Human
ugcacccuuugcuccaagc

SEQ ID NO: 857793 - RNA, 19 nt, Human
ugcaccguuucauccaagu

SEQ ID NO: 857794 - RNA, 20 nt, Human
ugcaccguuucauccaagua

SEQ ID NO: 857795 - RNA, 21 nt, Human
uggcauucucuguuauccacc

SEQ ID NO: 857796 - RNA, 18 nt, Human
uggccaggggugcggcag

SEQ ID NO: 857797 - RNA, 20 nt, Human
uggcugggccaggcggcccc

SEQ ID NO: 857798 - RNA, 18 nt, Human
ugggccacugauucuccu

SEQ ID NO: 857799 - RNA, 22 nt, Human
uguaguacacacuuauggucug

SEQ ID NO: 857800 - RNA, 20 nt, Human
ugugcaagggaccagcccag

SEQ ID NO: 857801 - RNA, 24 nt, Human
uuccucaggaacagagaacuuugc

SEQ ID NO: 857802 - RNA, 22 nt, Human
uucuccuccccagucuguggcc

SEQ ID NO: 857803 - RNA, 25 nt, Human
uuugcaaugaugaucucaacucugc

SEQ ID NO: 857804 - RNA, 18 nt, Human
uuuggggagauaggaagg

SEQ ID NO: 857805 - RNA, 21 nt, Human
uuuggggagauaggaaggaca

SEQ ID NO: 857806 - RNA, 19 nt, Human
uuuuuuuuuuuuaacaggc

SEQ ID NO: 857807 - RNA, 21 nt, Human
uuuuuuuuuuuuuuuaacagg

SEQ ID NO: 857808 - RNA, 23 nt, Human
uuuuuuuuuuuuuuuuuaacagg

SEQ ID NO: 857809 - RNA, 18 nt, Human
aaagacccucuuagacca

SEQ ID NO: 857810 - RNA, 18 nt, Human
aagcugcugggaucacca

SEQ ID NO: 857811 - RNA, 22 nt, Human
aagcugcugggaucaccacagg

SEQ ID NO: 857812 - RNA, 21 nt, Human
aaggcuucacagcugggggua

SEQ ID NO: 857813 - RNA, 22 nt, Human
aaggggccugggcugcgaccca

SEQ ID NO: 857814 - RNA, 18 nt, Human
aagugugaugcaauaacc

SEQ ID NO: 857815 - RNA, 19 nt, Human
acaaagccagggaacaccu

SEQ ID NO: 857816 - RNA, 20 nt, Human
acaaagccagggaacaccuc

SEQ ID NO: 857817 - RNA, 21 nt, Human
accccgugaggcccagucccu

SEQ ID NO: 857818 - RNA, 21 nt, Human
acccuggaaggggccugggcu

SEQ ID NO: 857819 - RNA, 19 nt, Human
agcccacaggggccucgug

SEQ ID NO: 857820 - RNA, 18 nt, Human
agcccuccccaaacccag

SEQ ID NO: 857821 - RNA, 23 nt, Human
agcccuguaaccaagccaguggg

SEQ ID NO: 857822 - RNA, 18 nt, Human
aggcagggacggggcggc

SEQ ID NO: 857823 - RNA, 19 nt, Human
aggcggggggcacgaaggc

SEQ ID NO: 857824 - RNA, 22 nt, Human
agggagagcggcugggcagggg

SEQ ID NO: 857825 - RNA, 22 nt, Human
agggggaaaggaguggcacccu

SEQ ID NO: 857826 - RNA, 20 nt, Human
aguggcacccuggaaggggc

SEQ ID NO: 857827 - RNA, 18 nt, Human
caaccccucaagaggaag

SEQ ID NO: 857828 - RNA, 18 nt, Human
caagaggaaggcuucaca

SEQ ID NO: 857829 - RNA, 21 nt, Human
caccccgugaggcccaguccu

SEQ ID NO: 857830 - RNA, 19 nt, Human
cacccuggaaggggccugg

SEQ ID NO: 857831 - RNA, 21 nt, Human
cacucuuggaggccccacccc

SEQ ID NO: 857832 - RNA, 20 nt, Human
cagugcugggccuccuggca

SEQ ID NO: 857833 - RNA, 23 nt, Human
caugugagagcccuguaaccaag

SEQ ID NO: 857834 - RNA, 28 nt, Human
cauucugcgccucuggucauguccucca

SEQ ID NO: 857835 - RNA, 22 nt, Human
ccaaggugcugggcauuaaggc

SEQ ID NO: 857836 - RNA, 24 nt, Human
ccacaggggccucgugcucgggaa

SEQ ID NO: 857837 - RNA, 23 nt, Human
cccaccccaccccgugaggccca

SEQ ID NO: 857838 - RNA, 21 nt, Human
cccucaagaggaaggcuucac

SEQ ID NO: 857839 - RNA, 21 nt, Human
cccuguaguggcccagccuga

SEQ ID NO: 857840 - RNA, 19 nt, Human
ccggcccccgggccccgac

SEQ ID NO: 857841 - RNA, 18 nt, Human
ccucuuagaccaugggaa

SEQ ID NO: 857842 - RNA, 23 nt, Human
cgacggcgagacaaagccaggga

SEQ ID NO: 857843 - RNA, 21 nt, Human
cggcccccgggccccgacggc

SEQ ID NO: 857844 - RNA, 23 nt, Human
cggcugggcaggggccaaggcgg

SEQ ID NO: 857845 - RNA, 21 nt, Human
cgggcuaaacccagcccuccc

SEQ ID NO: 857846 - RNA, 24 nt, Human
cgggcuaaacccagcccuccccaa

SEQ ID NO: 857847 - RNA, 19 nt, Human
cucaaccccucaagaggaa

SEQ ID NO: 857848 - RNA, 19 nt, Human
cucccaggcaggagggcuc

SEQ ID NO: 857849 - RNA, 23 nt, Human
cugggcugcgacccacccugggc

SEQ ID NO: 857850 - RNA, 24 nt, Human
cuguauacugcccaccucaacccc

SEQ ID NO: 857851 - RNA, 20 nt, Human
gaacaagcucccaggcagga

SEQ ID NO: 857852 - RNA, 19 nt, Human
gaaucaauccaaggugcug

SEQ ID NO: 857853 - RNA, 19 nt, Human
gaccaugggaaucaaucca

SEQ ID NO: 857854 - RNA, 21 nt, Human
gcagugcugggccuccuggca

SEQ ID NO: 857855 - RNA, 21 nt, Human
gcccggcccccgggccccgac

SEQ ID NO: 857856 - RNA, 18 nt, Human
gccugcaccccaccggca

SEQ ID NO: 857857 - RNA, 19 nt, Human
gccuuagucaaaaagaccc

SEQ ID NO: 857858 - RNA, 19 nt, Human
ggaggaggacagggagagc

SEQ ID NO: 857859 - RNA, 18 nt, Human
ggcaggggccaaggcggg

SEQ ID NO: 857860 - RNA, 22 nt, Human
ggcaggggccaaggcggggggc

SEQ ID NO: 857861 - RNA, 24 nt, Human
ggcggcaacgacggcgagacaaag

SEQ ID NO: 857862 - RNA, 23 nt, Human
gggaauacgcaaggggguggggg

SEQ ID NO: 857863 - RNA, 20 nt, Human
gggcaggggccaaggcgggg

SEQ ID NO: 857864 - RNA, 21 nt, Human
gggcaggggccaaggcggggg

SEQ ID NO: 857865 - RNA, 18 nt, Human
gggccugggcugcgaccc

SEQ ID NO: 857866 - RNA, 24 nt, Human
ggggaaaggaguggcacccuggaa

SEQ ID NO: 857867 - RNA, 24 nt, Human
ggggaauacgcaagggggugggag

SEQ ID NO: 857868 - RNA, 18 nt, Human
gugaggcccagucccuuc

SEQ ID NO: 857869 - RNA, 23 nt, Human
gugaugcaauaaccaaagggucc

SEQ ID NO: 857870 - RNA, 18 nt, Human
gugggaguauggcucccc

SEQ ID NO: 857871 - RNA, 19 nt, Human
uaaacccagcccuccccaa

SEQ ID NO: 857872 - RNA, 24 nt, Human
uaguggcccagccugauccaaagu

SEQ ID NO: 857873 - RNA, 24 nt, Human
uauacugcccaccucaaccccuca

SEQ ID NO: 857874 - RNA, 26 nt, Human
ucagcaccuuccaaagaacaagcucc

SEQ ID NO: 857875 - RNA, 24 nt, Human
ucccaggcaggagggcuccuugca

SEQ ID NO: 857876 - RNA, 18 nt, Human
ucccagugauuacccaag

SEQ ID NO: 857877 - RNA, 19 nt, Human
ucccuguaacauaccaugu

SEQ ID NO: 857878 - RNA, 19 nt, Human
ucccuucccuucuggccag

SEQ ID NO: 857879 - RNA, 21 nt, Human
uccgcccggcccccgggcccc

SEQ ID NO: 857880 - RNA, 21 nt, Human
ucugcgccucuggucaugucc

SEQ ID NO: 857881 - RNA, 22 nt, Human
ucugcgccucuggucauguccu

SEQ ID NO: 857882 - RNA, 22 nt, Human
ugaugcaauaaccaaagggucc

SEQ ID NO: 857883 - RNA, 20 nt, Human
uggaaggggccugggcugcg

SEQ ID NO: 857884 - RNA, 21 nt, Human
uggcacauucugcgccucugg

SEQ ID NO: 857885 - RNA, 20 nt, Human
uggcacccuggaaggggccu

SEQ ID NO: 857886 - RNA, 18 nt, Human
uggcccagccugauccaa

SEQ ID NO: 857887 - RNA, 19 nt, Human
uggcccaucaggcccugua

SEQ ID NO: 857888 - RNA, 19 nt, Human
uggcuccuguauacugccc

SEQ ID NO: 857889 - RNA, 26 nt, Human
ugggccuccuggcacauucugcgccu

SEQ ID NO: 857890 - RNA, 19 nt, Human
ugggggugguuaaggggag

SEQ ID NO: 857891 - RNA, 20 nt, Human
uggucauguccuccacacaa

SEQ ID NO: 857892 - RNA, 21 nt, Human
uggucuguucaaucaaaggcc

SEQ ID NO: 857893 - RNA, 22 nt, Human
uguauacugcccaccucaaccc

SEQ ID NO: 857894 - RNA, 20 nt, Human
uuaaggggaggaggacaggg

SEQ ID NO: 857895 - RNA, 23 nt, Human
uuccaaagaacaagcucccaggc

SEQ ID NO: 857896 - RNA, 22 nt, Human
uuuuuuuuuuuuuuuuuuucag

SEQ ID NO: 857897 - RNA, 24 nt, Human
aaagugcugggauuacaggcauga

SEQ ID NO: 857898 - RNA, 19 nt, Human
aagugcugggauuacaggc

SEQ ID NO: 857899 - RNA, 21 nt, Human
aagugcugggauuacaggcau

SEQ ID NO: 857900 - RNA, 26 nt, Human
aagugcugggauuacaggcaugagcc

SEQ ID NO: 857901 - RNA, 19 nt, Human
acagaggucuccugccucc

SEQ ID NO: 857902 - RNA, 23 nt, Human
acaggugucugccaccacacccg

SEQ ID NO: 857903 - RNA, 24 nt, Human
accucgugaucugccugccuuggc

SEQ ID NO: 857904 - RNA, 27 nt, Human
acugacaucuuucaggaccacaucccc

SEQ ID NO: 857905 - RNA, 20 nt, Human
acugcaagcucugccucccg

SEQ ID NO: 857906 - RNA, 23 nt, Human
acuuuaaaggguagugguuaagg

SEQ ID NO: 857907 - RNA, 21 nt, Human
agaggucuccugccuccucgg

SEQ ID NO: 857908 - RNA, 18 nt, Human
agccucccgaauagcugg

SEQ ID NO: 857909 - RNA, 25 nt, Human
aggcuggagugcaguggugcaaucu

SEQ ID NO: 857910 - RNA, 21 nt, Human
agggguugucuccauaaagga

SEQ ID NO: 857911 - RNA, 20 nt, Human
agugcaguggugcaaucucg

SEQ ID NO: 857912 - RNA, 18 nt, Human
agugcugggauuacaggc

SEQ ID NO: 857913 - RNA, 21 nt, Human
auccuccugccucagccuccc

SEQ ID NO: 857914 - RNA, 19 nt, Human
aucugccugccuuggccuc

SEQ ID NO: 857915 - RNA, 24 nt, Human
caaagugcugggauuacaggcaug

SEQ ID NO: 857916 - RNA, 23 nt, Human
cacaggugucugccaccacaccc

SEQ ID NO: 857917 - RNA, 18 nt, Human
caccguguuagccaggau

SEQ ID NO: 857918 - RNA, 24 nt, Human
caccguguuagccaggauggucuc

SEQ ID NO: 857919 - RNA, 23 nt, Human
cacugcaagcucugccucccggg

SEQ ID NO: 857920 - RNA, 25 nt, Human
cagccucagccucuguuuucuaaag

SEQ ID NO: 857921 - RNA, 22 nt, Human
cagcugguucuccaacaggucc

SEQ ID NO: 857922 - RNA, 21 nt, Human
caugguaaaguuccugaugcc

SEQ ID NO: 857923 - RNA, 19 nt, Human
cauucagggccccaucgaa

SEQ ID NO: 857924 - RNA, 25 nt, Human
cauuucagggcgggacagccuuugg

SEQ ID NO: 857925 - RNA, 23 nt, Human
ccaaagugcugggauuacaggca

SEQ ID NO: 857926 - RNA, 24 nt, Human
ccaaagugcugggauuacaggcau

SEQ ID NO: 857927 - RNA, 24 nt, Human
ccacaucuguggauugggaaaacc

SEQ ID NO: 857928 - RNA, 18 nt, Human
ccaccgugcccagccuca

SEQ ID NO: 857929 - RNA, 21 nt, Human
ccagcccaccucccacaaccc

SEQ ID NO: 857930 - RNA, 24 nt, Human
cccaaagugcugggauuacaggca

SEQ ID NO: 857931 - RNA, 19 nt, Human
cccaccucccacaaccccu

SEQ ID NO: 857932 - RNA, 21 nt, Human
ccccugcgggagaagccccca

SEQ ID NO: 857933 - RNA, 21 nt, Human
cccggguucacgccauccucc

SEQ ID NO: 857934 - RNA, 23 nt, Human
cccggguucacgccauccuccug

SEQ ID NO: 857935 - RNA, 20 nt, Human
ccgaggagagggcagggggc

SEQ ID NO: 857936 - RNA, 18 nt, Human
ccgcagagggcuacgugc

SEQ ID NO: 857937 - RNA, 18 nt, Human
ccgggguuucaccguguu

SEQ ID NO: 857938 - RNA, 20 nt, Human
ccgggguuucaccguguuag

SEQ ID NO: 857939 - RNA, 24 nt, Human
ccucccacaaccccugcgggagaa

SEQ ID NO: 857940 - RNA, 21 nt, Human
ccugaccucgugaucugccug

SEQ ID NO: 857941 - RNA, 22 nt, Human
ccugccuuggccucccaaagug

SEQ ID NO: 857942 - RNA, 26 nt, Human
ccuggccccugccccgagccgguucc

SEQ ID NO: 857943 - RNA, 24 nt, Human
cgcucuguugcccaggcuggagug

SEQ ID NO: 857944 - RNA, 26 nt, Human
cggcgccagcccaccucccacaaccc

SEQ ID NO: 857945 - RNA, 22 nt, Human
cggcggcgccagcccaccuccc

SEQ ID NO: 857946 - RNA, 23 nt, Human
cgggguuucaccguguuagccag

SEQ ID NO: 857947 - RNA, 24 nt, Human
cgggguuucaccguguuagccagg

SEQ ID NO: 857948 - RNA, 21 nt, Human
cuaauuuuuuguauuuuuuag

SEQ ID NO: 857949 - RNA, 24 nt, Human
cucacugcaagcucugccucccgg

SEQ ID NO: 857950 - RNA, 24 nt, Human
cucccgaauagcugggaccacagg

SEQ ID NO: 857951 - RNA, 24 nt, Human
cuccugaccucgugaucugccugc

SEQ ID NO: 857952 - RNA, 24 nt, Human
cucgcucuguugcccaggcuggag

SEQ ID NO: 857953 - RNA, 22 nt, Human
cugcaggucuccugcuuccuga

SEQ ID NO: 857954 - RNA, 23 nt, Human
cugccucagccucccgaauagcu

SEQ ID NO: 857955 - RNA, 23 nt, Human
cugccuuggccucccaaagugcu

SEQ ID NO: 857956 - RNA, 20 nt, Human
cugguaauauugccccauga

SEQ ID NO: 857957 - RNA, 20 nt, Human
cuugggacccugcuuggcuu

SEQ ID NO: 857958 - RNA, 26 nt, Human
gaagcgccuucucaugguaaaguucc

SEQ ID NO: 857959 - RNA, 26 nt, Human
gaauagcugggaccacaggugucugc

SEQ ID NO: 857960 - RNA, 21 nt, Human
gaccucgugaucugccugccu

SEQ ID NO: 857961 - RNA, 24 nt, Human
gaccucgugaucugccugccuugg

SEQ ID NO: 857962 - RNA, 21 nt, Human
gaggagagggcagggggcugg

SEQ ID NO: 857963 - RNA, 21 nt, Human
gagggcagggggcuggagacg

SEQ ID NO: 857964 - RNA, 18 nt, Human
gauuacaggcaugagcca

SEQ ID NO: 857965 - RNA, 21 nt, Human
gauuacaggcaugagccaccg

SEQ ID NO: 857966 - RNA, 24 nt, Human
gauuacaggcaugagccaccgugc

SEQ ID NO: 857967 - RNA, 21 nt, Human
gcacagagggccugggcuccu

SEQ ID NO: 857968 - RNA, 22 nt, Human
gcacugacaucuuucaggacca

SEQ ID NO: 857969 - RNA, 20 nt, Human
gcccaggcuggagugcagug

SEQ ID NO: 857970 - RNA, 28 nt, Human
gcccccaaggggaggagacgggccuggc

SEQ ID NO: 857971 - RNA, 22 nt, Human
gccuuggccucccaaagugcug

SEQ ID NO: 857972 - RNA, 21 nt, Human
gccuugggacccugcuuggcu

SEQ ID NO: 857973 - RNA, 23 nt, Human
gcgggcacuggcgaucuuggcca

SEQ ID NO: 857974 - RNA, 25 nt, Human
gcucuguugcccaggcuggagugca

SEQ ID NO: 857975 - RNA, 24 nt, Human
ggauggucucaaucuccugaccuc

SEQ ID NO: 857976 - RNA, 24 nt, Human
ggauuacaggcaugagccaccgug

SEQ ID NO: 857977 - RNA, 22 nt, Human
gggagaagcccccaaggggagg

SEQ ID NO: 857978 - RNA, 22 nt, Human
gggcggcacagagggccugggc

SEQ ID NO: 857979 - RNA, 23 nt, Human
gggguuucaccguguuagccagg

SEQ ID NO: 857980 - RNA, 20 nt, Human
gguggcgacagccgcacuga

SEQ ID NO: 857981 - RNA, 19 nt, Human
uaaaguuccugaugccgcc

SEQ ID NO: 857982 - RNA, 24 nt, Human
uaauuuuuuguauuuuuuaguaga

SEQ ID NO: 857983 - RNA, 25 nt, Human
uaauuuuuuguauuuuuuaguagag

SEQ ID NO: 857984 - RNA, 24 nt, Human
uacaggcaugagccaccgugccca

SEQ ID NO: 857985 - RNA, 21 nt, Human
uaguagagccgggguuucacc

SEQ ID NO: 857986 - RNA, 24 nt, Human
uaguagagccgggguuucaccgug

SEQ ID NO: 857987 - RNA, 25 nt, Human
uaguagagccgggguuucaccgugu

SEQ ID NO: 857988 - RNA, 19 nt, Human
uauuugguaaaguauaagg

SEQ ID NO: 857989 - RNA, 24 nt, Human
ucaccguguuagccaggauggucu

SEQ ID NO: 857990 - RNA, 18 nt, Human
ucacugcaagcucugccu

SEQ ID NO: 857991 - RNA, 18 nt, Human
ucacugcaagcucugccu

SEQ ID NO: 857992 - RNA, 24 nt, Human
ucacugcaagcucugccucccggg

SEQ ID NO: 857993 - RNA, 20 nt, Human
ucagccucccgaauagcugg

SEQ ID NO: 857994 - RNA, 24 nt, Human
ucccaaagugcugggauuacaggc

SEQ ID NO: 857995 - RNA, 24 nt, Human
ucccggguucacgccauccuccug

SEQ ID NO: 857996 - RNA, 27 nt, Human
uccuccugccucagccucccgaauagc

SEQ ID NO: 857997 - RNA, 20 nt, Human
uccugauggcacaaggacuc

SEQ ID NO: 857998 - RNA, 24 nt, Human
ucgcucuguugcccaggcuggagu

SEQ ID NO: 857999 - RNA, 23 nt, Human
ucggccuugggacccugcuuggc

SEQ ID NO: 858000 - RNA, 21 nt, Human
ucggcggcgccagcccaccuc

SEQ ID NO: 858001 - RNA, 19 nt, Human
ucucgcucuguugcccagg

SEQ ID NO: 858002 - RNA, 23 nt, Human
ucucgcucuguugcccaggcugg

SEQ ID NO: 858003 - RNA, 24 nt, Human
ucucgcucuguugcccaggcugga

SEQ ID NO: 858004 - RNA, 26 nt, Human
ucucgcucuguugcccaggcuggagu

SEQ ID NO: 858005 - RNA, 27 nt, Human
ucucgcucuguugcccaggcuggagug

SEQ ID NO: 858006 - RNA, 18 nt, Human
ucuguugcccaggcugga

SEQ ID NO: 858007 - RNA, 22 nt, Human
ucuuggcugagaugaccagggc

SEQ ID NO: 858008 - RNA, 19 nt, Human
ugaaaagggguugucucca

SEQ ID NO: 858009 - RNA, 23 nt, Human
ugacgugaaaagggguugucucc

SEQ ID NO: 858010 - RNA, 22 nt, Human
ugagggaacauaaaguauuugg

SEQ ID NO: 858011 - RNA, 23 nt, Human
ugccauggugagggucacacuug

SEQ ID NO: 858012 - RNA, 18 nt, Human
ugcccaggcuggagugca

SEQ ID NO: 858013 - RNA, 21 nt, Human
ugcccaggcuggagugcagug

SEQ ID NO: 858014 - RNA, 24 nt, Human
ugcccaggcuggagugcaguggug

SEQ ID NO: 858015 - RNA, 20 nt, Human
ugcccugcuggacagagguu

SEQ ID NO: 858016 - RNA, 27 nt, Human
ugccucagccucccgaauagcugggac

SEQ ID NO: 858017 - RNA, 22 nt, Human
ugccucccggguucacgccauc

SEQ ID NO: 858018 - RNA, 18 nt, Human
ugccugccuuggccuccc

SEQ ID NO: 858019 - RNA, 18 nt, Human
uggagugcaguggugcaa

SEQ ID NO: 858020 - RNA, 23 nt, Human
uggagugcaguggugcaaucucg

SEQ ID NO: 858021 - RNA, 23 nt, Human
uggcucgaagcgggcacuggcga

SEQ ID NO: 858022 - RNA, 21 nt, Human
ugggaccacaggugucugcca

SEQ ID NO: 858023 - RNA, 24 nt, Human
ugggaccacaggugucugccacca

SEQ ID NO: 858024 - RNA, 18 nt, Human
ugggauuacaggcaugag

SEQ ID NO: 858025 - RNA, 21 nt, Human
ugggauuacaggcaugagcca

SEQ ID NO: 858026 - RNA, 22 nt, Human
ugggauuacaggcaugagccac

SEQ ID NO: 858027 - RNA, 23 nt, Human
ugggauuacaggcaugagccacc

SEQ ID NO: 858028 - RNA, 23 nt, Human
ugggauuacaggcaugagccacc

SEQ ID NO: 858029 - RNA, 24 nt, Human
ugggauuacaggcaugagccaccg

SEQ ID NO: 858030 - RNA, 26 nt, Human
ugggauuacaggcaugagccaccgug

SEQ ID NO: 858031 - RNA, 22 nt, Human
ugguucacugugagggcggcac

SEQ ID NO: 858032 - RNA, 20 nt, Human
ugugcuugcucuugauggug

SEQ ID NO: 858033 - RNA, 21 nt, Human
uguugcccaggcuggagugca

SEQ ID NO: 858034 - RNA, 22 nt, Human
uuaguagagccgggguuucacc

SEQ ID NO: 858035 - RNA, 24 nt, Human
uuaguagagccgggguuucaccgu

SEQ ID NO: 858036 - RNA, 24 nt, Human
uuccugauggcacaaggacuccac

SEQ ID NO: 858037 - RNA, 18 nt, Human
uuggccucccaaagugcu

SEQ ID NO: 858038 - RNA, 22 nt, Human
uugggaaaacccagcucugauu

SEQ ID NO: 858039 - RNA, 19 nt, Human
uuucaccguguuagccagg

SEQ ID NO: 858040 - RNA, 23 nt, Human
uuucuuuuuuuuuuuuuugagau

SEQ ID NO: 858041 - RNA, 20 nt, Human
uuucuuuuuuuuuuuuuugg

SEQ ID NO: 858042 - RNA, 24 nt, Human
uuuuuaguagagccgggguuucac

SEQ ID NO: 858043 - RNA, 20 nt, Human
uuuuuguauuuuuuaguaga

SEQ ID NO: 858044 - RNA, 24 nt, Human
uuuuuuguauuuuuuaguagagcc

SEQ ID NO: 858045 - RNA, 26 nt, Human
uuuuuuuuuuuuugagauguagucuc

SEQ ID NO: 858046 - RNA, 21 nt, Human
acggaacaaaugucagcauua

SEQ ID NO: 858047 - RNA, 19 nt, Human
auucagggccguacuaucc

SEQ ID NO: 858048 - RNA, 20 nt, Human
ccacaaggguuggugcauag

SEQ ID NO: 858049 - RNA, 26 nt, Human
cuaaaguaaaggcaaaauucagggcc

SEQ ID NO: 858050 - RNA, 20 nt, Human
uaaaaugugauacucagcuu

SEQ ID NO: 858051 - RNA, 22 nt, Human
uagguggauagaugcacaaauu

SEQ ID NO: 858052 - RNA, 20 nt, Human
ucuaaaaugugauacucagc

SEQ ID NO: 858053 - RNA, 21 nt, Human
uugcuagguggauagaugcac

SEQ ID NO: 858054 - RNA, 19 nt, Human
uuucuauacuuguaacagc

SEQ ID NO: 858055 - RNA, 19 nt, Human
uuuuuuuuuuuuuugagga

SEQ ID NO: 858056 - RNA, 21 nt, Human
uuuuuuuuuuuuuuuuugagg

SEQ ID NO: 858057 - RNA, 27 nt, Human
uuuuuuuuuuuuuuuuuuuuuuugggg

SEQ ID NO: 858058 - RNA, 18 nt, Human
aaacuccaaugguacagc

SEQ ID NO: 858059 - RNA, 20 nt, Human
aaacuccaaugguacagccu

SEQ ID NO: 858060 - RNA, 19 nt, Human
auagaggccaaagcuuaaa

SEQ ID NO: 858061 - RNA, 18 nt, Human
caaagcuuaaaacaauuu

SEQ ID NO: 858062 - RNA, 24 nt, Human
caccagagucccugagccugggga

SEQ ID NO: 858063 - RNA, 20 nt, Human
cagcugccaaggcugcgggg

SEQ ID NO: 858064 - RNA, 19 nt, Human
ccauggcagcugccaaggc

SEQ ID NO: 858065 - RNA, 25 nt, Human
ccccaaacuccaaugguacagccuc

SEQ ID NO: 858066 - RNA, 19 nt, Human
cggguccaccacggagcug

SEQ ID NO: 858067 - RNA, 19 nt, Human
cuaucacguuuccuucugg

SEQ ID NO: 858068 - RNA, 24 nt, Human
cuggauagaggccaaagcuuaaaa

SEQ ID NO: 858069 - RNA, 19 nt, Human
cuggauuuggcaccagagu

SEQ ID NO: 858070 - RNA, 23 nt, Human
cuuuucgguagugguguaccggg

SEQ ID NO: 858071 - RNA, 18 nt, Human
gaggaggaggaggacgug

SEQ ID NO: 858072 - RNA, 18 nt, Human
gcaccagagucccugagc

SEQ ID NO: 858073 - RNA, 23 nt, Human
gcagcagagcagaucuuucugga

SEQ ID NO: 858074 - RNA, 19 nt, Human
ggagcuguccauggcagcu

SEQ ID NO: 858075 - RNA, 20 nt, Human
gggcagcagagcagaucuuu

SEQ ID NO: 858076 - RNA, 25 nt, Human
gggcagcagagcagaucuuucugga

SEQ ID NO: 858077 - RNA, 20 nt, Human
gguccaaggcucaaaauccg

SEQ ID NO: 858078 - RNA, 19 nt, Human
uagaggccaaagcuuaaaa

SEQ ID NO: 858079 - RNA, 21 nt, Human
ucauugucagaauaaccugga

SEQ ID NO: 858080 - RNA, 19 nt, Human
uccauggcagcugccaagg

SEQ ID NO: 858081 - RNA, 21 nt, Human
ucgaggacgcugcucagcggg

SEQ ID NO: 858082 - RNA, 23 nt, Human
ucuggagcuguccauggcagcug

SEQ ID NO: 858083 - RNA, 25 nt, Human
ugagaaaccuaaauugccguaagag

SEQ ID NO: 858084 - RNA, 18 nt, Human
ugcucugacaacucccau

SEQ ID NO: 858085 - RNA, 23 nt, Human
uggaggaggaggaggacguggaa

SEQ ID NO: 858086 - RNA, 25 nt, Human
uggcugcaaacauggagaggggguc

SEQ ID NO: 858087 - RNA, 18 nt, Human
uggggaugggcccggggg

SEQ ID NO: 858088 - RNA, 19 nt, Human
uucauugucagaauaaccu

SEQ ID NO: 858089 - RNA, 21 nt, Human
uuuguaguuccuauuccugga

SEQ ID NO: 858090 - RNA, 24 nt, Human
aaaaugcuucaauccuucuuuauc

SEQ ID NO: 858091 - RNA, 23 nt, Human
aaaauucuuccuuauccaugauu

SEQ ID NO: 858092 - RNA, 18 nt, Human
aaacaagaggcaagucag

SEQ ID NO: 858093 - RNA, 25 nt, Human
aaaugggccuuugaugacaaaguuu

SEQ ID NO: 858094 - RNA, 23 nt, Human
aagcuaagccacuggcaccugau

SEQ ID NO: 858095 - RNA, 26 nt, Human
acccuguaauucaagcuaagccacug

SEQ ID NO: 858096 - RNA, 18 nt, Human
accugauucaugacauga

SEQ ID NO: 858097 - RNA, 20 nt, Human
aggggagggaaggggaaaau

SEQ ID NO: 858098 - RNA, 18 nt, Human
ccacuggcaccugauuca

SEQ ID NO: 858099 - RNA, 19 nt, Human
cccaucaguacccauggcu

SEQ ID NO: 858100 - RNA, 19 nt, Human
ccuguaauucaagcuaagc

SEQ ID NO: 858101 - RNA, 23 nt, Human
ccuugcuuuuccaaguccagcug

SEQ ID NO: 858102 - RNA, 18 nt, Human
cuugcuuuuccaagucca

SEQ ID NO: 858103 - RNA, 21 nt, Human
uagaauaaaaagcuaggaaag

SEQ ID NO: 858104 - RNA, 19 nt, Human
ugacaugaagagguucaag

SEQ ID NO: 858105 - RNA, 25 nt, Human
uuacagaaacaagaggcaagucaga

SEQ ID NO: 858106 - RNA, 21 nt, Human
uugaugacaaaguuuaguuuu

SEQ ID NO: 858107 - RNA, 24 nt, Human
uuuaaaaaugcuucaauccuucuu

SEQ ID NO: 858108 - RNA, 18 nt, Human
uuuaaagcauccauaggg

SEQ ID NO: 858109 - RNA, 23 nt, Human
uuuugaaugggcaauaacauuuu

SEQ ID NO: 858110 - RNA, 19 nt, Human
uuuuuuuuuuugaaugggc

SEQ ID NO: 858111 - RNA, 20 nt, Human
uuuuuuuuuuuugaaugggc

SEQ ID NO: 858112 - RNA, 21 nt, Human
uuuuuuuuuuuuuugaauggg

SEQ ID NO: 858113 - RNA, 18 nt, Human
uuuuuuuuuuuuuuuuug

SEQ ID NO: 858114 - RNA, 24 nt, Human
uuuuuuuuuuuuuuuuugaauggg

SEQ ID NO: 858115 - RNA, 22 nt, Human
aacacccaguuccaaggaggca

SEQ ID NO: 858116 - RNA, 21 nt, Human
aaucgauuaacacaaccauga

SEQ ID NO: 858117 - RNA, 24 nt, Human
acacccuggcucggcucuggggac

SEQ ID NO: 858118 - RNA, 18 nt, Human
agaguccccuccaggucu

SEQ ID NO: 858119 - RNA, 23 nt, Human
agccugggggcauacacgcacuc

SEQ ID NO: 858120 - RNA, 22 nt, Human
aggcagggccgagcaggugggg

SEQ ID NO: 858121 - RNA, 21 nt, Human
aggggucagagggugcagauc

SEQ ID NO: 858122 - RNA, 24 nt, Human
agucccauuccucucacaguccag

SEQ ID NO: 858123 - RNA, 18 nt, Human
auaaagccucauucagga

SEQ ID NO: 858124 - RNA, 21 nt, Human
caacacccaguuccaaggagg

SEQ ID NO: 858125 - RNA, 23 nt, Human
cacaguccaggauauggucaccc

SEQ ID NO: 858126 - RNA, 21 nt, Human
cacauggccucagcugucacc

SEQ ID NO: 858127 - RNA, 21 nt, Human
cacccaguuccaaggaggcac

SEQ ID NO: 858128 - RNA, 20 nt, Human
caccucucugccucuggcuc

SEQ ID NO: 858129 - RNA, 24 nt, Human
cagagaggaaguuccauggacacc

SEQ ID NO: 858130 - RNA, 20 nt, Human
cagccagagauaaagccuca

SEQ ID NO: 858131 - RNA, 26 nt, Human
cauccccacaaucgauuaacacaacc

SEQ ID NO: 858132 - RNA, 18 nt, Human
caucccggcuggcugagg

SEQ ID NO: 858133 - RNA, 18 nt, Human
ccugagauacagagagga

SEQ ID NO: 858134 - RNA, 19 nt, Human
ccuggagcaccugccaccu

SEQ ID NO: 858135 - RNA, 24 nt, Human
ccuggccagcaguuacucuccuca

SEQ ID NO: 858136 - RNA, 20 nt, Human
cuacugaccugagauacaga

SEQ ID NO: 858137 - RNA, 22 nt, Human
cuacugaccugagauacagaga

SEQ ID NO: 858138 - RNA, 19 nt, Human
cuccaggucugucucauug

SEQ ID NO: 858139 - RNA, 20 nt, Human
cucugccucuggcucucuca

SEQ ID NO: 858140 - RNA, 23 nt, Human
cugaggccgcugugagaagaagg

SEQ ID NO: 858141 - RNA, 19 nt, Human
gacaaugacaacggcagcc

SEQ ID NO: 858142 - RNA, 18 nt, Human
gagaagaaggacggcucu

SEQ ID NO: 858143 - RNA, 18 nt, Human
gcagaucacagccuggag

SEQ ID NO: 858144 - RNA, 21 nt, Human
ggagaguccccuccaggucug

SEQ ID NO: 858145 - RNA, 19 nt, Human
ggaggcacacauuaaccuu

SEQ ID NO: 858146 - RNA, 19 nt, Human
ggcauacacgcacucaugu

SEQ ID NO: 858147 - RNA, 22 nt, Human
ggcauacacgcacucaugugua

SEQ ID NO: 858148 - RNA, 21 nt, Human
gugagaagaaggacggcucug

SEQ ID NO: 858149 - RNA, 23 nt, Human
uacacgcacucauguguacucaa

SEQ ID NO: 858150 - RNA, 25 nt, Human
uaggaggucaaugucaggggucaga

SEQ ID NO: 858151 - RNA, 19 nt, Human
ucaccucucugccucuggc

SEQ ID NO: 858152 - RNA, 26 nt, Human
ucaccucucugccucuggcucucuca

SEQ ID NO: 858153 - RNA, 19 nt, Human
ucauucaggauccuacuca

SEQ ID NO: 858154 - RNA, 23 nt, Human
ucauucaggauccuacucacaug

SEQ ID NO: 858155 - RNA, 25 nt, Human
uccauacacaaugacauuucauccc

SEQ ID NO: 858156 - RNA, 24 nt, Human
uccauggacaccaacacccaguuc

SEQ ID NO: 858157 - RNA, 23 nt, Human
uccccuccaggucugucucauug

SEQ ID NO: 858158 - RNA, 19 nt, Human
uccucgggaggaggagaag

SEQ ID NO: 858159 - RNA, 23 nt, Human
uccucgggaggaggagaagccug

SEQ ID NO: 858160 - RNA, 20 nt, Human
ucgggaggaggagaagccug

SEQ ID NO: 858161 - RNA, 26 nt, Human
ucgggaggaggagaagccuggaugug

SEQ ID NO: 858162 - RNA, 20 nt, Human
ucuggcucucucagucgcug

SEQ ID NO: 858163 - RNA, 18 nt, Human
ugagcaggcacuggugca

SEQ ID NO: 858164 - RNA, 23 nt, Human
ugaggccgcugugagaagaagga

SEQ ID NO: 858165 - RNA, 19 nt, Human
ugcgccuacugaccugaga

SEQ ID NO: 858166 - RNA, 22 nt, Human
ugcgccuacugaccugagauac

SEQ ID NO: 858167 - RNA, 23 nt, Human
uggccagcaguuacucuccucaa

SEQ ID NO: 858168 - RNA, 18 nt, Human
uggcugagggagcuggug

SEQ ID NO: 858169 - RNA, 18 nt, Human
ugggacgaacagccagag

SEQ ID NO: 858170 - RNA, 30 nt, Human
ugggcuuuuaaucacacgccaugcaauccu

SEQ ID NO: 858171 - RNA, 21 nt, Human
uguguacucaacguucacaug

SEQ ID NO: 858172 - RNA, 23 nt, Human
uguguacucaacguucacaugca

SEQ ID NO: 858173 - RNA, 25 nt, Human
uuaacacaaccaugauagccaugaa

SEQ ID NO: 858174 - RNA, 21 nt, Human
uuggaugugaggggucuugga

SEQ ID NO: 858175 - RNA, 23 nt, Human
uuuuuuuuuuggagacaaugaca

SEQ ID NO: 858176 - RNA, 18 nt, Human
uuuuuuuuuuuuuuuuug

SEQ ID NO: 858177 - RNA, 22 nt, Human
aagccagcaacccgcaguccug

SEQ ID NO: 858178 - RNA, 18 nt, Human
accucaggggcagagucu

SEQ ID NO: 858179 - RNA, 23 nt, Human
agcacuggguggaucugacugcc

SEQ ID NO: 858180 - RNA, 23 nt, Human
aggggaccuagaugggcaggcag

SEQ ID NO: 858181 - RNA, 21 nt, Human
caagccagcaacccgcagucc

SEQ ID NO: 858182 - RNA, 25 nt, Human
caagccagcaacccgcaguccuggg

SEQ ID NO: 858183 - RNA, 20 nt, Human
cacagagaaaaguugguucc

SEQ ID NO: 858184 - RNA, 26 nt, Human
ccacaugggugcccccagccucuccc

SEQ ID NO: 858185 - RNA, 18 nt, Human
ccaucagaggcugguguc

SEQ ID NO: 858186 - RNA, 21 nt, Human
cccagcacccugagcugcagg

SEQ ID NO: 858187 - RNA, 19 nt, Human
cccagccucuccccacaag

SEQ ID NO: 858188 - RNA, 25 nt, Human
cccagccucuccccacaaguccucc

SEQ ID NO: 858189 - RNA, 18 nt, Human
ccccuccuaccgcaucuc

SEQ ID NO: 858190 - RNA, 21 nt, Human
ccgcaagcagggggguggguc

SEQ ID NO: 858191 - RNA, 20 nt, Human
ccugcaccgucuccuuggaa

SEQ ID NO: 858192 - RNA, 19 nt, Human
ccugcgacggggcaccugg

SEQ ID NO: 858193 - RNA, 21 nt, Human
ccugguccgugucccucccuc

SEQ ID NO: 858194 - RNA, 22 nt, Human
cgccccuccuaccgcaucuccg

SEQ ID NO: 858195 - RNA, 22 nt, Human
cuccccacaaguccuccugagc

SEQ ID NO: 858196 - RNA, 25 nt, Human
cuccccacaaguccuccugagccau

SEQ ID NO: 858197 - RNA, 24 nt, Human
cucgccccuccuaccgcaucuccc

SEQ ID NO: 858198 - RNA, 25 nt, Human
cugacugcccagagagggcacugcc

SEQ ID NO: 858199 - RNA, 19 nt, Human
cugguccgugucccucccu

SEQ ID NO: 858200 - RNA, 21 nt, Human
gagccaucagaggcugguguc

SEQ ID NO: 858201 - RNA, 24 nt, Human
gaggcuggugucucgguggcagcu

SEQ ID NO: 858202 - RNA, 19 nt, Human
ggaccuagaugggcaggca

SEQ ID NO: 858203 - RNA, 20 nt, Human
ggagaggggguuguggggcc

SEQ ID NO: 858204 - RNA, 21 nt, Human
ggaucugacugcccagagagg

SEQ ID NO: 858205 - RNA, 19 nt, Human
ggcaccuggcccgggcguc

SEQ ID NO: 858206 - RNA, 19 nt, Human
gggaccuagaugggcaggc

SEQ ID NO: 858207 - RNA, 20 nt, Human
gggcaggcagcccugcaccc

SEQ ID NO: 858208 - RNA, 19 nt, Human
gggcaguguugguggcugc

SEQ ID NO: 858209 - RNA, 22 nt, Human
gggcgucuuugaccuagcucag

SEQ ID NO: 858210 - RNA, 19 nt, Human
ggggaccuagaugggcagg

SEQ ID NO: 858211 - RNA, 23 nt, Human
guccugaggggcccgggccucgg

SEQ ID NO: 858212 - RNA, 24 nt, Human
guuccugguccgugucccucccuc

SEQ ID NO: 858213 - RNA, 24 nt, Human
uagcucagguuccugguccguguc

SEQ ID NO: 858214 - RNA, 20 nt, Human
uccccaaggucacacagcaa

SEQ ID NO: 858215 - RNA, 22 nt, Human
uccccacaaguccuccugagcc

SEQ ID NO: 858216 - RNA, 18 nt, Human
ucccgagccccagcaccc

SEQ ID NO: 858217 - RNA, 24 nt, Human
ucccgagccccagcacccugagcu

SEQ ID NO: 858218 - RNA, 18 nt, Human
uccugguccgugucccuc

SEQ ID NO: 858219 - RNA, 18 nt, Human
ugaaagaaaggagagggg

SEQ ID NO: 858220 - RNA, 19 nt, Human
ugaaagaaaggagaggggg

SEQ ID NO: 858221 - RNA, 21 nt, Human
ugaccuagcucagguuccugg

SEQ ID NO: 858222 - RNA, 20 nt, Human
ugagcugcaggcacagccaa

SEQ ID NO: 858223 - RNA, 19 nt, Human
ugcgacggggcaccuggcc

SEQ ID NO: 858224 - RNA, 21 nt, Human
uggaguccugaggggcccggg

SEQ ID NO: 858225 - RNA, 25 nt, Human
uggcagcgccgaggaaggggcuucc

SEQ ID NO: 858226 - RNA, 23 nt, Human
ugggucccgagccccagcacccu

SEQ ID NO: 858227 - RNA, 18 nt, Human
uggguggaucugacugcc

SEQ ID NO: 858228 - RNA, 22 nt, Human
uggguggaucugacugcccaga

SEQ ID NO: 858229 - RNA, 21 nt, Human
uugguggcugcagcaggcccc

SEQ ID NO: 858230 - RNA, 18 nt, Human
aaacaggaagagucccug

SEQ ID NO: 858231 - RNA, 24 nt, Human
aaacaggaagagucccugggccca

SEQ ID NO: 858232 - RNA, 21 nt, Human
aagcacagaggagccuggggg

SEQ ID NO: 858233 - RNA, 20 nt, Human
aaggcacaucauugccagca

SEQ ID NO: 858234 - RNA, 20 nt, Human
acauugggcaguggaagggu

SEQ ID NO: 858235 - RNA, 21 nt, Human
acccagccuuacccucagccc

SEQ ID NO: 858236 - RNA, 22 nt, Human
accgaggcccccuuggcggcgg

SEQ ID NO: 858237 - RNA, 23 nt, Human
acucucuuaccugugcaaaauga

SEQ ID NO: 858238 - RNA, 19 nt, Human
agaagcagcucacaaggcc

SEQ ID NO: 858239 - RNA, 22 nt, Human
agacaggucacuauccaucccu

SEQ ID NO: 858240 - RNA, 22 nt, Human
agaccaccugaggucuaggucc

SEQ ID NO: 858241 - RNA, 21 nt, Human
agcagcagcaucacuguggga

SEQ ID NO: 858242 - RNA, 18 nt, Human
agcuguaggagggugggc

SEQ ID NO: 858243 - RNA, 20 nt, Human
aggaaggugcugaccuggac

SEQ ID NO: 858244 - RNA, 23 nt, Human
aggcacaucauugccagcaagcu

SEQ ID NO: 858245 - RNA, 22 nt, Human
agggauggacaaggagcacugu

SEQ ID NO: 858246 - RNA, 24 nt, Human
aggguuuuaaccagaacacaaagu

SEQ ID NO: 858247 - RNA, 23 nt, Human
aguaaagcacagaggagccuggg

SEQ ID NO: 858248 - RNA, 21 nt, Human
aucacuaacaccaagagacca

SEQ ID NO: 858249 - RNA, 22 nt, Human
aucauugccagcaagcugaagc

SEQ ID NO: 858250 - RNA, 20 nt, Human
augggcuccugcccacuggg

SEQ ID NO: 858251 - RNA, 21 nt, Human
caagagaccaccugaggucua

SEQ ID NO: 858252 - RNA, 21 nt, Human
caagcccacaguggagacuga

SEQ ID NO: 858253 - RNA, 21 nt, Human
cacagaggagccugggggagc

SEQ ID NO: 858254 - RNA, 22 nt, Human
cacuuuuuccucucuggggucc

SEQ ID NO: 858255 - RNA, 23 nt, Human
cagauggcuccauagaaagcccc

SEQ ID NO: 858256 - RNA, 23 nt, Human
cagcagcaucacugugggagcuu

SEQ ID NO: 858257 - RNA, 21 nt, Human
caggaagagucccugggccca

SEQ ID NO: 858258 - RNA, 26 nt, Human
caggaaggugcugaccuggacgcccg

SEQ ID NO: 858259 - RNA, 19 nt, Human
ccaacccaaaguucugacu

SEQ ID NO: 858260 - RNA, 24 nt, Human
ccacagacaaaaucugcuccaagg

SEQ ID NO: 858261 - RNA, 22 nt, Human
ccaccugaggucuaggucccca

SEQ ID NO: 858262 - RNA, 19 nt, Human
cccacaguggagacugagg

SEQ ID NO: 858263 - RNA, 21 nt, Human
cccacaguggagacugaggcc

SEQ ID NO: 858264 - RNA, 27 nt, Human
cccagccuuacccucagcccacagggc

SEQ ID NO: 858265 - RNA, 22 nt, Human
ccccacuaaccccugucuccac

SEQ ID NO: 858266 - RNA, 19 nt, Human
cccgcaggaccaccugcua

SEQ ID NO: 858267 - RNA, 21 nt, Human
cccugggcccaggccuggccc

SEQ ID NO: 858268 - RNA, 20 nt, Human
cccugguucaguuccagggg

SEQ ID NO: 858269 - RNA, 22 nt, Human
ccgucaggaagcugggcucuug

SEQ ID NO: 858270 - RNA, 20 nt, Human
ccucccagucccagccuugc

SEQ ID NO: 858271 - RNA, 18 nt, Human
ccucugagcuuaguuucc

SEQ ID NO: 858272 - RNA, 24 nt, Human
ccucuuagaagcagcucacaaggc

SEQ ID NO: 858273 - RNA, 24 nt, Human
cuccaagggauggacaaggagcac

SEQ ID NO: 858274 - RNA, 19 nt, Human
cucuauggcuaggagcugc

SEQ ID NO: 858275 - RNA, 19 nt, Human
cugaagcauaccagcagcc

SEQ ID NO: 858276 - RNA, 18 nt, Human
cugaccuggacgcccgca

SEQ ID NO: 858277 - RNA, 18 nt, Human
cugcugagcugcuagcac

SEQ ID NO: 858278 - RNA, 21 nt, Human
cuggacgcccgcaggaccacc

SEQ ID NO: 858279 - RNA, 21 nt, Human
cugggguccuguguccaaaag

SEQ ID NO: 858280 - RNA, 21 nt, Human
cuugaccugcuuuaccuuaac

SEQ ID NO: 858281 - RNA, 24 nt, Human
cuugccuccuucgucuugcaggug

SEQ ID NO: 858282 - RNA, 25 nt, Human
gaccaccugaggucuagguccccaa

SEQ ID NO: 858283 - RNA, 19 nt, Human
gagcugccaaggccucuug

SEQ ID NO: 858284 - RNA, 18 nt, Human
gcaguggaaggguucugg

SEQ ID NO: 858285 - RNA, 27 nt, Human
gccacaaccuagaucucauucccaacc

SEQ ID NO: 858286 - RNA, 18 nt, Human
gcccccuuggcggcggcc

SEQ ID NO: 858287 - RNA, 24 nt, Human
gcggcucugccucccagucccagc

SEQ ID NO: 858288 - RNA, 20 nt, Human
ggaaggguucuggaaaggaa

SEQ ID NO: 858289 - RNA, 20 nt, Human
ggagcagauccuucucuauc

SEQ ID NO: 858290 - RNA, 18 nt, Human
ggagccugggggagcucc

SEQ ID NO: 858291 - RNA, 21 nt, Human
gggcaucccaggucugccucu

SEQ ID NO: 858292 - RNA, 20 nt, Human
gggcccaggccuggcccacg

SEQ ID NO: 858293 - RNA, 19 nt, Human
gguaaacagccucucccca

SEQ ID NO: 858294 - RNA, 20 nt, Human
ggucaguagggaguuccauc

SEQ ID NO: 858295 - RNA, 19 nt, Human
uaaccagaacacaaagugg

SEQ ID NO: 858296 - RNA, 19 nt, Human
uaaccccugucuccacauu

SEQ ID NO: 858297 - RNA, 21 nt, Human
uacccucagcccacagggcca

SEQ ID NO: 858298 - RNA, 21 nt, Human
uacgaccuugggcaagucacu

SEQ ID NO: 858299 - RNA, 24 nt, Human
uagaggcccugcugagcugcuagc

SEQ ID NO: 858300 - RNA, 23 nt, Human
uagcagcagcaucacugugggag

SEQ ID NO: 858301 - RNA, 19 nt, Human
uagccucuuagaagcagcu

SEQ ID NO: 858302 - RNA, 19 nt, Human
uaggagggugggcuguccu

SEQ ID NO: 858303 - RNA, 20 nt, Human
uagguccccaaagcagaugg

SEQ ID NO: 858304 - RNA, 18 nt, Human
uaugaaacaggaagaguc

SEQ ID NO: 858305 - RNA, 18 nt, Human
ucagcccacagggccacc

SEQ ID NO: 858306 - RNA, 23 nt, Human
ucaguagggaguuccaucccaaa

SEQ ID NO: 858307 - RNA, 21 nt, Human
uccaagggauggacaaggagc

SEQ ID NO: 858308 - RNA, 20 nt, Human
uccaggggugcaggcaaugu

SEQ ID NO: 858309 - RNA, 24 nt, Human
uccauagaaagccccacuaacccc

SEQ ID NO: 858310 - RNA, 18 nt, Human
ucccugaagagaaacugg

SEQ ID NO: 858311 - RNA, 21 nt, Human
ucccugaagagaaacugggga

SEQ ID NO: 858312 - RNA, 21 nt, Human
ucccugaagagaaacuggggc

SEQ ID NO: 858313 - RNA, 18 nt, Human
ucccugggcccaggccug

SEQ ID NO: 858314 - RNA, 22 nt, Human
ucccugggcccaggccuggccc

SEQ ID NO: 858315 - RNA, 18 nt, Human
ucccugguucaguuccag

SEQ ID NO: 858316 - RNA, 18 nt, Human
uccuguguccaaaaggcu

SEQ ID NO: 858317 - RNA, 21 nt, Human
ucuaucccugguucaguucca

SEQ ID NO: 858318 - RNA, 24 nt, Human
ucuauggcuaggagcugccaaggc

SEQ ID NO: 858319 - RNA, 25 nt, Human
ucucuuaccugugcaaaaugaagac

SEQ ID NO: 858320 - RNA, 23 nt, Human
ugaagagaaacuggggcauccca

SEQ ID NO: 858321 - RNA, 18 nt, Human
ugacuucuguacaaacuc

SEQ ID NO: 858322 - RNA, 24 nt, Human
ugccaguagcuugcuuacgaccuu

SEQ ID NO: 858323 - RNA, 21 nt, Human
ugcccuuguuaugcuguucug

SEQ ID NO: 858324 - RNA, 23 nt, Human
ugcccuuguuaugcuguucuggu

SEQ ID NO: 858325 - RNA, 19 nt, Human
ugccucugagcuuaguuuc

SEQ ID NO: 858326 - RNA, 18 nt, Human
ugcuuuaugaguuagggg

SEQ ID NO: 858327 - RNA, 18 nt, Human
uggcuaggagcugccaag

SEQ ID NO: 858328 - RNA, 25 nt, Human
ugggcucuugccaugccaguagcuu

SEQ ID NO: 858329 - RNA, 19 nt, Human
ugguaaacagccucucccc

SEQ ID NO: 858330 - RNA, 23 nt, Human
ugucugcaugggcuccugcccac

SEQ ID NO: 858331 - RNA, 19 nt, Human
ugugcaaaaugaagacagg

SEQ ID NO: 858332 - RNA, 24 nt, Human
uuaaccagaacacaaagugguagu

SEQ ID NO: 858333 - RNA, 21 nt, Human
uucccacacuauaugcaggug

SEQ ID NO: 858334 - RNA, 23 nt, Human
uugaccugcuuuaccuuaaccau

SEQ ID NO: 858335 - RNA, 25 nt, Human
aauuuucagaagacuauaacagcuu

SEQ ID NO: 858336 - RNA, 18 nt, Human
cagguuacugaccgccaa

SEQ ID NO: 858337 - RNA, 22 nt, Human
ccaacacagauuaauuacaaga

SEQ ID NO: 858338 - RNA, 21 nt, Human
cgccaaguccauguuccagac

SEQ ID NO: 858339 - RNA, 26 nt, Human
cgccaaguccauguuccagacauucu

SEQ ID NO: 858340 - RNA, 23 nt, Human
cuacuaccacucuaauuuuccua

SEQ ID NO: 858341 - RNA, 18 nt, Human
cucauagugauaauuuuc

SEQ ID NO: 858342 - RNA, 18 nt, Human
gcagcggcggcgcggcag

SEQ ID NO: 858343 - RNA, 21 nt, Human
ggguacagagggugcagcugu

SEQ ID NO: 858344 - RNA, 20 nt, Human
uaaauaagugacuacuacug

SEQ ID NO: 858345 - RNA, 22 nt, Human
uaauuuucagaagacuauaaca

SEQ ID NO: 858346 - RNA, 20 nt, Human
uagcuauccugcagcggcgg

SEQ ID NO: 858347 - RNA, 21 nt, Human
ugaccgccaaguccauguucc

SEQ ID NO: 858348 - RNA, 24 nt, Human
ugcagcggcggcgcggcagccgcg

SEQ ID NO: 858349 - RNA, 21 nt, Human
uuuuucuuguaugaauucuaa

SEQ ID NO: 858350 - RNA, 18 nt, Human
uuuuuuuuuuuuuucuug

SEQ ID NO: 858351 - RNA, 19 nt, Human
uuuuuuuuuuuuuucuugu

SEQ ID NO: 858352 - RNA, 20 nt, Human
acgucugaaaauauuacuac

SEQ ID NO: 858353 - RNA, 19 nt, Human
agauguaugcuucaacaca

SEQ ID NO: 858354 - RNA, 21 nt, Human
caacuagauuauucucucucu

SEQ ID NO: 858355 - RNA, 24 nt, Human
ccagggccgccgccgcugccgccg

SEQ ID NO: 858356 - RNA, 18 nt, Human
ccgccgccgcugccgccg

SEQ ID NO: 858357 - RNA, 18 nt, Human
ccgcugccgccgccaccg

SEQ ID NO: 858358 - RNA, 23 nt, Human
cgccgccgcugccgccgccaccg

SEQ ID NO: 858359 - RNA, 23 nt, Human
gccccaacuagauuauucucucu

SEQ ID NO: 858360 - RNA, 19 nt, Human
gccgccgccgcugccgccg

SEQ ID NO: 858361 - RNA, 18 nt, Human
ggaggcgggggaggugcu

SEQ ID NO: 858362 - RNA, 23 nt, Human
ggaggugcucagucagggaccua

SEQ ID NO: 858363 - RNA, 23 nt, Human
ggcgggggaggugcucagucagg

SEQ ID NO: 858364 - RNA, 18 nt, Human
gggcagggaggcggggga

SEQ ID NO: 858365 - RNA, 18 nt, Human
ggggcagggaggcggggg

SEQ ID NO: 858366 - RNA, 20 nt, Human
uaugcuucaacacacuuauu

SEQ ID NO: 858367 - RNA, 18 nt, Human
ucaagggauaacauaugu

SEQ ID NO: 858368 - RNA, 19 nt, Human
ucaguguuugccccaacua

SEQ ID NO: 858369 - RNA, 19 nt, Human
uccacugcaaaaagaaagu

SEQ ID NO: 858370 - RNA, 22 nt, Human
uucaacacacuuauuggggaaa

SEQ ID NO: 858371 - RNA, 21 nt, Human
uucccauuccccgcaguccag

SEQ ID NO: 858372 - RNA, 21 nt, Human
uuucaaaaaagaaaagggguc

SEQ ID NO: 858373 - RNA, 24 nt, Human
aaauaagaaccgaccaagccaaac

SEQ ID NO: 858374 - RNA, 21 nt, Human
aagacccucagaccuuaaccc

SEQ ID NO: 858375 - RNA, 20 nt, Human
aaguagcagcaaaagggucu

SEQ ID NO: 858376 - RNA, 20 nt, Human
accuggugaucagcgccgug

SEQ ID NO: 858377 - RNA, 22 nt, Human
agaaccgaccaagccaaacacc

SEQ ID NO: 858378 - RNA, 18 nt, Human
cacaagacccucagaccu

SEQ ID NO: 858379 - RNA, 24 nt, Human
cagggcaaggaggaaacuugggca

SEQ ID NO: 858380 - RNA, 20 nt, Human
ccaaacaccuggugaucagc

SEQ ID NO: 858381 - RNA, 18 nt, Human
ccccacaagacccucaga

SEQ ID NO: 858382 - RNA, 21 nt, Human
ccgaccaagccaaacaccuug

SEQ ID NO: 858383 - RNA, 20 nt, Human
cguggccccacaagacccuc

SEQ ID NO: 858384 - RNA, 23 nt, Human
cucagaccuuaacccgccucagc

SEQ ID NO: 858385 - RNA, 22 nt, Human
cuugggcaggagaugauugcuc

SEQ ID NO: 858386 - RNA, 22 nt, Human
gaccuuaacccgccucagcagc

SEQ ID NO: 858387 - RNA, 21 nt, Human
gccguggccccacaagacccu

SEQ ID NO: 858388 - RNA, 19 nt, Human
gggcaaggaggaaacuugg

SEQ ID NO: 858389 - RNA, 23 nt, Human
guagcagcaaaagggucucuccu

SEQ ID NO: 858390 - RNA, 21 nt, Human
uaggucagaacgaaugaagua

SEQ ID NO: 858391 - RNA, 25 nt, Human
ucagggcaaggaggaaacuugggca

SEQ ID NO: 858392 - RNA, 22 nt, Human
ugaucagcgccguggccccaca

SEQ ID NO: 858393 - RNA, 28 nt, Human
uugggcaggagaugauugccggacuucc

SEQ ID NO: 858394 - RNA, 23 nt, Human
uuuuuaugguucuaacuuuuauu

SEQ ID NO: 858395 - RNA, 21 nt, Human
aaaagaaaaagguaucucugg

SEQ ID NO: 858396 - RNA, 19 nt, Human
acuccgaccauagaaagag

SEQ ID NO: 858397 - RNA, 20 nt, Human
agaaagagagagauacagga

SEQ ID NO: 858398 - RNA, 22 nt, Human
cagcaacacauuuuagggcaac

SEQ ID NO: 858399 - RNA, 21 nt, Human
cgcgcgggccgagggaagauu

SEQ ID NO: 858400 - RNA, 20 nt, Human
gcgggccgagggaagauucc

SEQ ID NO: 858401 - RNA, 24 nt, Human
ggcaacaaaguucagaauggauac

SEQ ID NO: 858402 - RNA, 20 nt, Human
uagauccuccaauauuaaaa

SEQ ID NO: 858403 - RNA, 20 nt, Human
ucucggcuggggaaggaccc

SEQ ID NO: 858404 - RNA, 19 nt, Human
ucuuugaaaaaaguuugcu

SEQ ID NO: 858405 - RNA, 24 nt, Human
ugaauggaguaaaaaagggaagau

SEQ ID NO: 858406 - RNA, 23 nt, Human
ugccagcucuguugguucacauu

SEQ ID NO: 858407 - RNA, 22 nt, Human
ugugauaaauuuguuaacuaga

SEQ ID NO: 858408 - RNA, 22 nt, Human
uguucauccaucaagccaacuc

SEQ ID NO: 858409 - RNA, 21 nt, Human
uuagggcaacaaaguucagaa

SEQ ID NO: 858410 - RNA, 23 nt, Human
uugcuaaguagauccuccaauau

SEQ ID NO: 858411 - RNA, 19 nt, Human
uuuaaaguuugguuguggu

SEQ ID NO: 858412 - RNA, 20 nt, Human
uuugcuaaguagauccucca

SEQ ID NO: 858413 - RNA, 21 nt, Human
uuuuuuuuuuuuuuuuuaaag

SEQ ID NO: 858414 - RNA, 21 nt, Human
aaaaaaaaaaguacaguggga

SEQ ID NO: 858415 - RNA, 19 nt, Human
aaauguugaaagcagcaau

SEQ ID NO: 858416 - RNA, 19 nt, Human
aagacaaaagcgauacaga

SEQ ID NO: 858417 - RNA, 19 nt, Human
aagcagcaauaaagacaaa

SEQ ID NO: 858418 - RNA, 22 nt, Human
aagcagcaauaaagacaaaagc

SEQ ID NO: 858419 - RNA, 18 nt, Human
aaggggccugggaggcaa

SEQ ID NO: 858420 - RNA, 23 nt, Human
aaggggccugggaggcaagcuga

SEQ ID NO: 858421 - RNA, 23 nt, Human
aauguugaaagcagcaauaaaga

SEQ ID NO: 858422 - RNA, 19 nt, Human
agaaacucuugcugaauuu

SEQ ID NO: 858423 - RNA, 19 nt, Human
agagagaggaggacucugc

SEQ ID NO: 858424 - RNA, 21 nt, Human
agagcccaucaucccuccgcc

SEQ ID NO: 858425 - RNA, 22 nt, Human
agagcccaucaucccuccgccu

SEQ ID NO: 858426 - RNA, 23 nt, Human
agagcccaucaucccuccgccuu

SEQ ID NO: 858427 - RNA, 21 nt, Human
agcagcaauaaagacaaaagc

SEQ ID NO: 858428 - RNA, 19 nt, Human
agcgauacagaauaaaagc

SEQ ID NO: 858429 - RNA, 19 nt, Human
aggagcuucucggucagcc

SEQ ID NO: 858430 - RNA, 24 nt, Human
agucagaugcuugccgaccccuca

SEQ ID NO: 858431 - RNA, 22 nt, Human
aucaucccuccgccuuucauug

SEQ ID NO: 858432 - RNA, 24 nt, Human
caaaagguacccucaaaccggggc

SEQ ID NO: 858433 - RNA, 24 nt, Human
caaucaccacacuccgaaaauagu

SEQ ID NO: 858434 - RNA, 19 nt, Human
cacacaggccccaaaccug

SEQ ID NO: 858435 - RNA, 26 nt, Human
cacagagagagcccaucaucccuccg

SEQ ID NO: 858436 - RNA, 22 nt, Human
cacaggccccaaaccugacagg

SEQ ID NO: 858437 - RNA, 23 nt, Human
cacgcugucaccaggcuggagug

SEQ ID NO: 858438 - RNA, 20 nt, Human
cacuccccaaagucucuugc

SEQ ID NO: 858439 - RNA, 18 nt, Human
cagagagagcccaucauc

SEQ ID NO: 858440 - RNA, 23 nt, Human
cagcaaaagguacccucaaacau

SEQ ID NO: 858441 - RNA, 26 nt, Human
cagcaauaaagacaaaagcgauacag

SEQ ID NO: 858442 - RNA, 23 nt, Human
cagcgagcuucuccaucuggacc

SEQ ID NO: 858443 - RNA, 24 nt, Human
cagcuuccggggcugccagcuccc

SEQ ID NO: 858444 - RNA, 18 nt, Human
caggggcuuucuccuccu

SEQ ID NO: 858445 - RNA, 20 nt, Human
caucccugucuuuaggcagg

SEQ ID NO: 858446 - RNA, 24 nt, Human
ccagcccugaugguuucccuuccu

SEQ ID NO: 858447 - RNA, 25 nt, Human
cccaaaccugacagggccgagccca

SEQ ID NO: 858448 - RNA, 20 nt, Human
cccucaaacauaaggcccag

SEQ ID NO: 858449 - RNA, 21 nt, Human
cccucucaaaaaaaaaaguac

SEQ ID NO: 858450 - RNA, 22 nt, Human
cccucucaaaaaaaaaaguaca

SEQ ID NO: 858451 - RNA, 21 nt, Human
ccuaacucaaucacucaguga

SEQ ID NO: 858452 - RNA, 19 nt, Human
ccuccuagucgucucucca

SEQ ID NO: 858453 - RNA, 19 nt, Human
ccucucacggggcuggagg

SEQ ID NO: 858454 - RNA, 20 nt, Human
ccugggucagcucccgcccu

SEQ ID NO: 858455 - RNA, 18 nt, Human
ccuuucauugccaucuuc

SEQ ID NO: 858456 - RNA, 27 nt, Human
ccuuucauugccaucuucagcgauucc

SEQ ID NO: 858457 - RNA, 24 nt, Human
cgcuugaauguuaaccucgggagc

SEQ ID NO: 858458 - RNA, 21 nt, Human
cggagcaccuuccaggagcuu

SEQ ID NO: 858459 - RNA, 22 nt, Human
cggagcaccuuccaggagcuuc

SEQ ID NO: 858460 - RNA, 18 nt, Human
cuaaguccacaaggggcc

SEQ ID NO: 858461 - RNA, 19 nt, Human
cucuggcaacacaggggcu

SEQ ID NO: 858462 - RNA, 18 nt, Human
cugaauauucacaacugc

SEQ ID NO: 858463 - RNA, 23 nt, Human
cuggcaacacaggggcuuucucc

SEQ ID NO: 858464 - RNA, 20 nt, Human
cuuccggggcugccagcucc

SEQ ID NO: 858465 - RNA, 18 nt, Human
gaaagcagcaauaaagac

SEQ ID NO: 858466 - RNA, 20 nt, Human
gaccccucagcaaccugucu

SEQ ID NO: 858467 - RNA, 21 nt, Human
gagaaacucaagggacagucc

SEQ ID NO: 858468 - RNA, 25 nt, Human
gcagcaauaaagacaaaagcgauac

SEQ ID NO: 858469 - RNA, 21 nt, Human
gccugagagagaggaggacuc

SEQ ID NO: 858470 - RNA, 18 nt, Human
ggcccugggucagcuccc

SEQ ID NO: 858471 - RNA, 24 nt, Human
ggcggggcucaccauauccagggg

SEQ ID NO: 858472 - RNA, 19 nt, Human
uaacucaaucacucaguga

SEQ ID NO: 858473 - RNA, 23 nt, Human
uaacucaaucacucagugaccaa

SEQ ID NO: 858474 - RNA, 18 nt, Human
uacugagucggaccuguu

SEQ ID NO: 858475 - RNA, 23 nt, Human
ucaaacauaaggcccagaaacuc

SEQ ID NO: 858476 - RNA, 23 nt, Human
ucacgcugucaccaggcuggagu

SEQ ID NO: 858477 - RNA, 18 nt, Human
ucagaacacacauuucag

SEQ ID NO: 858478 - RNA, 25 nt, Human
ucagaacacacauuucagaggacca

SEQ ID NO: 858479 - RNA, 21 nt, Human
ucagcgagcuucuccaucuuu

SEQ ID NO: 858480 - RNA, 18 nt, Human
ucccucucaaaaaaaaaa

SEQ ID NO: 858481 - RNA, 21 nt, Human
ucucacgcugucaccaggcug

SEQ ID NO: 858482 - RNA, 23 nt, Human
ucucacgcugucaccaggcugga

SEQ ID NO: 858483 - RNA, 22 nt, Human
ucuccuccucuucagccucaga

SEQ ID NO: 858484 - RNA, 20 nt, Human
ucucuggcaacacaggggcu

SEQ ID NO: 858485 - RNA, 20 nt, Human
ucuguacucucuggcaacac

SEQ ID NO: 858486 - RNA, 20 nt, Human
ugagagagaggaggacucug

SEQ ID NO: 858487 - RNA, 21 nt, Human
ugagagagaggaggacucugc

SEQ ID NO: 858488 - RNA, 21 nt, Human
ugccggagggacuugaagacu

SEQ ID NO: 858489 - RNA, 20 nt, Human
ugucuugugcaaaaaugauc

SEQ ID NO: 858490 - RNA, 21 nt, Human
uguggacagccaucccugucu

SEQ ID NO: 858491 - RNA, 21 nt, Human
uucaaaguagaaacgcuugaa

SEQ ID NO: 858492 - RNA, 18 nt, Human
uucauugccaucuucagc

SEQ ID NO: 858493 - RNA, 24 nt, Human
uucccuuccuugcugggacacagc

SEQ ID NO: 858494 - RNA, 20 nt, Human
uuccuugcugggacacagcu

SEQ ID NO: 858495 - RNA, 22 nt, Human
uucuccuccucuucagccucag

SEQ ID NO: 858496 - RNA, 22 nt, Human
uugaaagcagcaauaaagacaa

SEQ ID NO: 858497 - RNA, 23 nt, Human
uugcugggacacagcuccuucca

SEQ ID NO: 858498 - RNA, 19 nt, Human
uuuuuuuuuuuuuuugucu

SEQ ID NO: 858499 - RNA, 23 nt, Human
uuuuuuuuuuuuuuuugucucaa

SEQ ID NO: 858500 - RNA, 18 nt, Human
uuuuuuuuuuuuuuuuug

SEQ ID NO: 858501 - RNA, 19 nt, Human
uuuuuuuuuuuuuuuuugu

SEQ ID NO: 858502 - RNA, 24 nt, Human
uuuuuuuuuuuuuuuuuugucuca

SEQ ID NO: 858503 - RNA, 18 nt, Human
aagccacucucugccccc

SEQ ID NO: 858504 - RNA, 19 nt, Human
accacagacagccacagga

SEQ ID NO: 858505 - RNA, 22 nt, Human
acgcaggcugacugaguucacg

SEQ ID NO: 858506 - RNA, 21 nt, Human
agacagccacaggaccccucg

SEQ ID NO: 858507 - RNA, 23 nt, Human
agccacaggaccccucggagaug

SEQ ID NO: 858508 - RNA, 19 nt, Human
aggaagccacucucugccc

SEQ ID NO: 858509 - RNA, 19 nt, Human
cagcagggcucaugugaug

SEQ ID NO: 858510 - RNA, 24 nt, Human
cagcaggggcuggugccagcgaug

SEQ ID NO: 858511 - RNA, 22 nt, Human
ccaaccaccagcagcagaaugu

SEQ ID NO: 858512 - RNA, 19 nt, Human
ccaguggccaugugucucc

SEQ ID NO: 858513 - RNA, 21 nt, Human
cccaaagggcucugccccucu

SEQ ID NO: 858514 - RNA, 22 nt, Human
ccccaaagggcucugccccucu

SEQ ID NO: 858515 - RNA, 21 nt, Human
cccccuccuucaggaagccac

SEQ ID NO: 858516 - RNA, 19 nt, Human
ccccugcagugccugcgcc

SEQ ID NO: 858517 - RNA, 20 nt, Human
cccugcugugugccugcugu

SEQ ID NO: 858518 - RNA, 21 nt, Human
cccugcugugugccugcugug

SEQ ID NO: 858519 - RNA, 20 nt, Human
ccucugggcaccugacuggc

SEQ ID NO: 858520 - RNA, 22 nt, Human
ccucugggcaccugacuggcuu

SEQ ID NO: 858521 - RNA, 19 nt, Human
ccugcgccacugcccccuc

SEQ ID NO: 858522 - RNA, 21 nt, Human
ccuugggccugcccuggcccc

SEQ ID NO: 858523 - RNA, 21 nt, Human
cucccacgcaggcugacugag

SEQ ID NO: 858524 - RNA, 28 nt, Human
cugccccccaaagggcucugccccucug

SEQ ID NO: 858525 - RNA, 25 nt, Human
cuggugccagcgauggccugagguc

SEQ ID NO: 858526 - RNA, 24 nt, Human
cugugugacaccccugcagugccu

SEQ ID NO: 858527 - RNA, 26 nt, Human
cuucaggaagccacucucugcccccc

SEQ ID NO: 858528 - RNA, 20 nt, Human
gccccauuuccaaggccaug

SEQ ID NO: 858529 - RNA, 19 nt, Human
ggcucugccccucugggca

SEQ ID NO: 858530 - RNA, 18 nt, Human
gggcaggacaggccuggc

SEQ ID NO: 858531 - RNA, 21 nt, Human
gggggcaccacucuggugguc

SEQ ID NO: 858532 - RNA, 24 nt, Human
ggguuuccagccccuguuggugcu

SEQ ID NO: 858533 - RNA, 28 nt, Human
ucaguggccaguggccaugugucuccuu

SEQ ID NO: 858534 - RNA, 20 nt, Human
ucaugugaugauggcaagag

SEQ ID NO: 858535 - RNA, 18 nt, Human
ucucugccccccaaaggg

SEQ ID NO: 858536 - RNA, 18 nt, Human
ucugccccccaaagggcu

SEQ ID NO: 858537 - RNA, 21 nt, Human
ucugggggcaccacucuggug

SEQ ID NO: 858538 - RNA, 22 nt, Human
ugaagccaaccaccagcagcag

SEQ ID NO: 858539 - RNA, 18 nt, Human
ugagccccugcugugugc

SEQ ID NO: 858540 - RNA, 27 nt, Human
ugaguucacggcacacaggccaggguu

SEQ ID NO: 858541 - RNA, 18 nt, Human
ugcagcaggggcuggugc

SEQ ID NO: 858542 - RNA, 21 nt, Human
ugccagcgauggccugagguc

SEQ ID NO: 858543 - RNA, 22 nt, Human
ugcccccuccuucaggaagcca

SEQ ID NO: 858544 - RNA, 26 nt, Human
ugccugcgccacugcccccuccuuca

SEQ ID NO: 858545 - RNA, 19 nt, Human
ugcugugugacaccccugc

SEQ ID NO: 858546 - RNA, 20 nt, Human
uggcaucgcagcugugccca

SEQ ID NO: 858547 - RNA, 18 nt, Human
uggccugagguccgcggg

SEQ ID NO: 858548 - RNA, 18 nt, Human
ugugaugauggcaagagu

SEQ ID NO: 858549 - RNA, 23 nt, Human
uuuuucaaguucaacaagcauuu

SEQ ID NO: 858550 - RNA, 18 nt, Human
aaugagaaagagagaaag

SEQ ID NO: 858551 - RNA, 24 nt, Human
acugcagcucauaaagggagcacu

SEQ ID NO: 858552 - RNA, 25 nt, Human
agaaugagaaagagagaaagacuga

SEQ ID NO: 858553 - RNA, 22 nt, Human
auaauugcagcaaacuuuuuuu

SEQ ID NO: 858554 - RNA, 23 nt, Human
cucauucuggaaaaaaaaaaaaa

SEQ ID NO: 858555 - RNA, 24 nt, Human
cuggaaaaaaaaaaaaaaaguuaa

SEQ ID NO: 858556 - RNA, 19 nt, Human
ggcauuaaaggcuagaaca

SEQ ID NO: 858557 - RNA, 18 nt, Human
uagaacaguggugcaaaa

SEQ ID NO: 858558 - RNA, 21 nt, Human
uagcaccagcauuccaaaaaa

SEQ ID NO: 858559 - RNA, 20 nt, Human
uagcagagcacugugaugcu

SEQ ID NO: 858560 - RNA, 23 nt, Human
ucagcagccuguguuuucagccu

SEQ ID NO: 858561 - RNA, 21 nt, Human
ugagaaagagagaaagacuga

SEQ ID NO: 858562 - RNA, 18 nt, Human
ugcaaaaagcuguaggua

SEQ ID NO: 858563 - RNA, 18 nt, Human
uggaaaaaaaaaaaaaaa

SEQ ID NO: 858564 - RNA, 18 nt, Human
uggcugccaaauauaggg

SEQ ID NO: 858565 - RNA, 23 nt, Human
uugcagcaaacuuuuuuuuuggu

SEQ ID NO: 858566 - RNA, 19 nt, Human
uuuggcugccaaauauagg

SEQ ID NO: 858567 - RNA, 19 nt, Human
uuuuugguucugcugcacu

SEQ ID NO: 858568 - RNA, 19 nt, Human
aaacaaccccugaccccaa

SEQ ID NO: 858569 - RNA, 27 nt, Human
aaacaaccccugaccccaaccucccca

SEQ ID NO: 858570 - RNA, 20 nt, Human
aaacccagaagggcugccca

SEQ ID NO: 858571 - RNA, 19 nt, Human
aaagaaacaaccccugacc

SEQ ID NO: 858572 - RNA, 24 nt, Human
aaaguaccuucacucuugcuauua

SEQ ID NO: 858573 - RNA, 24 nt, Human
aacagagugagucuccgucucaaa

SEQ ID NO: 858574 - RNA, 20 nt, Human
aaccccucuucuccaucaag

SEQ ID NO: 858575 - RNA, 19 nt, Human
aaccccugaccccaaccuc

SEQ ID NO: 858576 - RNA, 24 nt, Human
aaccccugaccccaaccuccccaa

SEQ ID NO: 858577 - RNA, 22 nt, Human
aagagggcagacccugcuguca

SEQ ID NO: 858578 - RNA, 23 nt, Human
aagauagacaagacccaguaucc

SEQ ID NO: 858579 - RNA, 19 nt, Human
aagauccugggcaggaacc

SEQ ID NO: 858580 - RNA, 20 nt, Human
aagaugcccacaccccacag

SEQ ID NO: 858581 - RNA, 19 nt, Human
aagcgccgccccagcccuu

SEQ ID NO: 858582 - RNA, 21 nt, Human
acaaccccugaccccaaccuc

SEQ ID NO: 858583 - RNA, 22 nt, Human
acacggcacuggcagacaaagc

SEQ ID NO: 858584 - RNA, 24 nt, Human
acagagugagucuccgucucaaaa

SEQ ID NO: 858585 - RNA, 24 nt, Human
acagcaccucccucuuggccaaag

SEQ ID NO: 858586 - RNA, 23 nt, Human
acccaguauccugugcaaucugg

SEQ ID NO: 858587 - RNA, 19 nt, Human
accuggagggcuguggggg

SEQ ID NO: 858588 - RNA, 20 nt, Human
accuggagggcugugggggc

SEQ ID NO: 858589 - RNA, 21 nt, Human
accuggagggcugugggggcu

SEQ ID NO: 858590 - RNA, 24 nt, Human
acuccagucugggcaacagaguga

SEQ ID NO: 858591 - RNA, 24 nt, Human
acugcacuccagucugggcaacag

SEQ ID NO: 858592 - RNA, 24 nt, Human
acugcacuccagucugggcaacag

SEQ ID NO: 858593 - RNA, 21 nt, Human
acuucauuuccucccacuggu

SEQ ID NO: 858594 - RNA, 26 nt, Human
agaaacaaccccugaccccaaccucc

SEQ ID NO: 858595 - RNA, 18 nt, Human
agaacgggaggcggcggc

SEQ ID NO: 858596 - RNA, 18 nt, Human
agcaauuuggcugggugg

SEQ ID NO: 858597 - RNA, 19 nt, Human
agccagcaggugcuugggg

SEQ ID NO: 858598 - RNA, 23 nt, Human
agccgggcaugguggcaugugcc

SEQ ID NO: 858599 - RNA, 23 nt, Human
agccuggccaacauggcgaagcc

SEQ ID NO: 858600 - RNA, 23 nt, Human
agcuccaccacuguccugagcag

SEQ ID NO: 858601 - RNA, 21 nt, Human
agcuggcccagguaccugcag

SEQ ID NO: 858602 - RNA, 22 nt, Human
aggacuaggggcuccccacacu

SEQ ID NO: 858603 - RNA, 22 nt, Human
aggaucgcuugaacccaggagg

SEQ ID NO: 858604 - RNA, 23 nt, Human
aggcaggaggaucgcuugaaccc

SEQ ID NO: 858605 - RNA, 24 nt, Human
aggcaggaggaucgcuugaaccca

SEQ ID NO: 858606 - RNA, 18 nt, Human
aggcagguggaucaccug

SEQ ID NO: 858607 - RNA, 26 nt, Human
aggcagguggaucaccugagcucagg

SEQ ID NO: 858608 - RNA, 21 nt, Human
aggccgaggcagguggaucac

SEQ ID NO: 858609 - RNA, 20 nt, Human
aggcgcaccaggcuccugcu

SEQ ID NO: 858610 - RNA, 19 nt, Human
aggcggagguuguaguaag

SEQ ID NO: 858611 - RNA, 24 nt, Human
aggcggagguuguaguaagccaag

SEQ ID NO: 858612 - RNA, 21 nt, Human
aggcugccccagcccguugcu

SEQ ID NO: 858613 - RNA, 26 nt, Human
agggcacugucgggacuggacuuccc

SEQ ID NO: 858614 - RNA, 22 nt, Human
agguggaucaccugagcucagg

SEQ ID NO: 858615 - RNA, 22 nt, Human
agguugggugggcagcugcagg

SEQ ID NO: 858616 - RNA, 22 nt, Human
agucaaggcuuggggucuuggg

SEQ ID NO: 858617 - RNA, 22 nt, Human
agucugggcaacagagugaguc

SEQ ID NO: 858618 - RNA, 18 nt, Human
aucaagauagacaagacc

SEQ ID NO: 858619 - RNA, 24 nt, Human
aucgugccacugcacuccagucug

SEQ ID NO: 858620 - RNA, 21 nt, Human
augacccgggcggcgcggggc

SEQ ID NO: 858621 - RNA, 25 nt, Human
augcagcacuuccaggagagagggg

SEQ ID NO: 858622 - RNA, 20 nt, Human
augcuuccagcagccagcag

SEQ ID NO: 858623 - RNA, 25 nt, Human
auuccaaccccagcagccccaagcc

SEQ ID NO: 858624 - RNA, 22 nt, Human
caaagaaacaaccccugacccc

SEQ ID NO: 858625 - RNA, 19 nt, Human
caaagcaaugggcgggggc

SEQ ID NO: 858626 - RNA, 19 nt, Human
caaagcagcugugccaguc

SEQ ID NO: 858627 - RNA, 22 nt, Human
caaccccugaccccaaccuccc

SEQ ID NO: 858628 - RNA, 20 nt, Human
caacuaacagcaccucccuc

SEQ ID NO: 858629 - RNA, 24 nt, Human
caagaucgugccacugcacuccag

SEQ ID NO: 858630 - RNA, 18 nt, Human
caauggagaugagaccag

SEQ ID NO: 858631 - RNA, 23 nt, Human
cacacggcacuggcagacaaagc

SEQ ID NO: 858632 - RNA, 24 nt, Human
cacaggcaguugcacaaagucccc

SEQ ID NO: 858633 - RNA, 26 nt, Human
caccaccugaagaugcccacacccca

SEQ ID NO: 858634 - RNA, 19 nt, Human
caccucccucuuggccaaa

SEQ ID NO: 858635 - RNA, 21 nt, Human
caccugaagaugcccacaccc

SEQ ID NO: 858636 - RNA, 23 nt, Human
caccugaagaugcccacacccca

SEQ ID NO: 858637 - RNA, 21 nt, Human
cacggcacuggcagacaaagc

SEQ ID NO: 858638 - RNA, 22 nt, Human
cacuccagucugggcaacagag

SEQ ID NO: 858639 - RNA, 22 nt, Human
cacuccagucugggcaacagag

SEQ ID NO: 858640 - RNA, 24 nt, Human
cacuccagucugggcaacagagug

SEQ ID NO: 858641 - RNA, 19 nt, Human
cacugcacuccagucuggg

SEQ ID NO: 858642 - RNA, 21 nt, Human
cacugcacuccagucugggca

SEQ ID NO: 858643 - RNA, 22 nt, Human
cacugcacuccagucugggcaa

SEQ ID NO: 858644 - RNA, 23 nt, Human
cacugcacuccagucugggcaac

SEQ ID NO: 858645 - RNA, 24 nt, Human
cacugcacuccagucugggcaaca

SEQ ID NO: 858646 - RNA, 21 nt, Human
cacugucuaaaucacauccca

SEQ ID NO: 858647 - RNA, 20 nt, Human
cagagcccaccucugccccc

SEQ ID NO: 858648 - RNA, 23 nt, Human
cagcaccucccucuuggccaaag

SEQ ID NO: 858649 - RNA, 18 nt, Human
cagcagccagcaggugcu

SEQ ID NO: 858650 - RNA, 20 nt, Human
cagcagccccaagccugggc

SEQ ID NO: 858651 - RNA, 24 nt, Human
cagcagccccaagccugggccagg

SEQ ID NO: 858652 - RNA, 23 nt, Human
cagcaugugaacaggcugggcag

SEQ ID NO: 858653 - RNA, 21 nt, Human
caggacccaggagugcaggga

SEQ ID NO: 858654 - RNA, 22 nt, Human
caggacccaggagugcagggau

SEQ ID NO: 858655 - RNA, 24 nt, Human
caggagagaggggccuggaggggu

SEQ ID NO: 858656 - RNA, 19 nt, Human
caggauuuuggcugguguc

SEQ ID NO: 858657 - RNA, 22 nt, Human
caggauuuuggcuggugucagg

SEQ ID NO: 858658 - RNA, 24 nt, Human
caggcaguugcacaaaguccccgg

SEQ ID NO: 858659 - RNA, 20 nt, Human
caggcucaguccugcggucu

SEQ ID NO: 858660 - RNA, 22 nt, Human
caggcucaguccugcggucugu

SEQ ID NO: 858661 - RNA, 21 nt, Human
caggggucagaugcccuguaa

SEQ ID NO: 858662 - RNA, 21 nt, Human
cagguggaucaccugagcuca

SEQ ID NO: 858663 - RNA, 25 nt, Human
cauccugaaaacuucauuuccuccc

SEQ ID NO: 858664 - RNA, 28 nt, Human
cauccugccucugugacccucccuaggc

SEQ ID NO: 858665 - RNA, 20 nt, Human
cauccuggagcaggccaggc

SEQ ID NO: 858666 - RNA, 19 nt, Human
ccaaccccagcagccccaa

SEQ ID NO: 858667 - RNA, 22 nt, Human
ccaacugucccacauggcuuca

SEQ ID NO: 858668 - RNA, 18 nt, Human
ccacagucccagugguag

SEQ ID NO: 858669 - RNA, 23 nt, Human
ccaccugaagaugcccacacccc

SEQ ID NO: 858670 - RNA, 19 nt, Human
ccaccuggcauuaaggcaa

SEQ ID NO: 858671 - RNA, 20 nt, Human
ccacugcacuccagucuggg

SEQ ID NO: 858672 - RNA, 20 nt, Human
ccacugcacuccagucuggg

SEQ ID NO: 858673 - RNA, 21 nt, Human
ccacugcacuccagucugggc

SEQ ID NO: 858674 - RNA, 23 nt, Human
ccacugcacuccagucugggcaa

SEQ ID NO: 858675 - RNA, 24 nt, Human
ccacugcacuccagucugggcaac

SEQ ID NO: 858676 - RNA, 26 nt, Human
ccagaacaccaccugaagaugcccac

SEQ ID NO: 858677 - RNA, 23 nt, Human
ccagcugccucgucagcugccuc

SEQ ID NO: 858678 - RNA, 23 nt, Human
ccaucaagauagacaagacccag

SEQ ID NO: 858679 - RNA, 18 nt, Human
cccaagcgccgccccagc

SEQ ID NO: 858680 - RNA, 19 nt, Human
cccagagcacugcugccag

SEQ ID NO: 858681 - RNA, 22 nt, Human
cccagagcgggcuacagcuucc

SEQ ID NO: 858682 - RNA, 21 nt, Human
cccauggccccggcccagagc

SEQ ID NO: 858683 - RNA, 18 nt, Human
ccccaaaaaagaggaagg

SEQ ID NO: 858684 - RNA, 21 nt, Human
ccccaagcgccgccccagccc

SEQ ID NO: 858685 - RNA, 21 nt, Human
ccccaagcgccgccccagccc

SEQ ID NO: 858686 - RNA, 22 nt, Human
ccccaagcgccgccccagcccu

SEQ ID NO: 858687 - RNA, 18 nt, Human
ccccacccucucgcccaa

SEQ ID NO: 858688 - RNA, 18 nt, Human
ccccagcagccccaagcc

SEQ ID NO: 858689 - RNA, 19 nt, Human
ccccagcccguugcuuugg

SEQ ID NO: 858690 - RNA, 18 nt, Human
ccccgcccccuccuuagg

SEQ ID NO: 858691 - RNA, 20 nt, Human
ccccgcugccuccgccuccg

SEQ ID NO: 858692 - RNA, 22 nt, Human
ccccuccuuaggccccgcccca

SEQ ID NO: 858693 - RNA, 18 nt, Human
ccccugaccccaaccucc

SEQ ID NO: 858694 - RNA, 18 nt, Human
cccgcccccuccuuaggc

SEQ ID NO: 858695 - RNA, 22 nt, Human
cccgggcucgagcggcggcccc

SEQ ID NO: 858696 - RNA, 23 nt, Human
cccguggcuagaaugaacaaagc

SEQ ID NO: 858697 - RNA, 20 nt, Human
cccuccuaaacagagcccac

SEQ ID NO: 858698 - RNA, 21 nt, Human
cccuccuaaacagagcccacc

SEQ ID NO: 858699 - RNA, 20 nt, Human
cccucuggggcuagggcagc

SEQ ID NO: 858700 - RNA, 22 nt, Human
ccuaggcagaugagucuugaga

SEQ ID NO: 858701 - RNA, 22 nt, Human
ccugaccccaaccuccccaaaa

SEQ ID NO: 858702 - RNA, 19 nt, Human
ccugagcagacucccaaga

SEQ ID NO: 858703 - RNA, 21 nt, Human
ccugcagcaccauccuggagc

SEQ ID NO: 858704 - RNA, 18 nt, Human
ccuggagcaggccaggcc

SEQ ID NO: 858705 - RNA, 21 nt, Human
ccuggccaacauggcgaagcc

SEQ ID NO: 858706 - RNA, 23 nt, Human
ccuggccaacauggcgaagccug

SEQ ID NO: 858707 - RNA, 20 nt, Human
ccugggcaggaaccccucuu

SEQ ID NO: 858708 - RNA, 23 nt, Human
ccuggucucuacuaaaaauacaa

SEQ ID NO: 858709 - RNA, 21 nt, Human
cgagaccagccuggccaacau

SEQ ID NO: 858710 - RNA, 19 nt, Human
cgagagcccuccaucugac

SEQ ID NO: 858711 - RNA, 26 nt, Human
cgaggcagguggaucaccugagcuca

SEQ ID NO: 858712 - RNA, 21 nt, Human
cgccccaagcgccgccccagc

SEQ ID NO: 858713 - RNA, 20 nt, Human
cggcccagagcgggcuacag

SEQ ID NO: 858714 - RNA, 22 nt, Human
cggcugggccgccccaagcgcc

SEQ ID NO: 858715 - RNA, 18 nt, Human
cggcuggggcgggagggc

SEQ ID NO: 858716 - RNA, 19 nt, Human
cgggaggcggcggcugggc

SEQ ID NO: 858717 - RNA, 23 nt, Human
cgggcacaggcaguugcacaaag

SEQ ID NO: 858718 - RNA, 22 nt, Human
cggugcgugucgaguuccuucu

SEQ ID NO: 858719 - RNA, 22 nt, Human
cuaaacagagcccaccucugcc

SEQ ID NO: 858720 - RNA, 18 nt, Human
cuaugcugucuccagaca

SEQ ID NO: 858721 - RNA, 22 nt, Human
cuccaggcucaguccugcgguc

SEQ ID NO: 858722 - RNA, 27 nt, Human
cuccgucucaaaaaaaaaaaaaaaaau

SEQ ID NO: 858723 - RNA, 24 nt, Human
cucucaaacucacugucguccagc

SEQ ID NO: 858724 - RNA, 19 nt, Human
cugaagaugcccacacccc

SEQ ID NO: 858725 - RNA, 22 nt, Human
cuggcagacaaagcagcugugc

SEQ ID NO: 858726 - RNA, 25 nt, Human
cugggguggggaugggguccgaggg

SEQ ID NO: 858727 - RNA, 22 nt, Human
cuuaaaggacuaggggcucccc

SEQ ID NO: 858728 - RNA, 22 nt, Human
gagaagcaauuuggcugggugg

SEQ ID NO: 858729 - RNA, 19 nt, Human
gagaagccauccucuggga

SEQ ID NO: 858730 - RNA, 19 nt, Human
gaggcagguggaucaccug

SEQ ID NO: 858731 - RNA, 23 nt, Human
gagguuguaguaagccaagaucg

SEQ ID NO: 858732 - RNA, 24 nt, Human
gaucaccugagcucagggguucga

SEQ ID NO: 858733 - RNA, 24 nt, Human
gaucgcuugaacccaggaggcgga

SEQ ID NO: 858734 - RNA, 25 nt, Human
gcaauggagaugagaccagucuaga

SEQ ID NO: 858735 - RNA, 24 nt, Human
gcacuccagucugggcaacagagu

SEQ ID NO: 858736 - RNA, 22 nt, Human
gcaggaggaucgcuugaaccca

SEQ ID NO: 858737 - RNA, 22 nt, Human
gcaugugccuguagucccagcu

SEQ ID NO: 858738 - RNA, 20 nt, Human
gcauuggaagagcaggaccc

SEQ ID NO: 858739 - RNA, 24 nt, Human
gccaacauggcgaagccuggucuc

SEQ ID NO: 858740 - RNA, 20 nt, Human
gccaagaucgugccacugca

SEQ ID NO: 858741 - RNA, 22 nt, Human
gccacugcacuccagucugggc

SEQ ID NO: 858742 - RNA, 24 nt, Human
gccacugcacuccagucugggcaa

SEQ ID NO: 858743 - RNA, 20 nt, Human
gccagcugccucgucagcug

SEQ ID NO: 858744 - RNA, 23 nt, Human
gccccaagcgccgccccagcccu

SEQ ID NO: 858745 - RNA, 18 nt, Human
gccccacccucucgccca

SEQ ID NO: 858746 - RNA, 20 nt, Human
gccccagcccguugcuuugg

SEQ ID NO: 858747 - RNA, 23 nt, Human
gcgggcccggcugggguggggau

SEQ ID NO: 858748 - RNA, 20 nt, Human
gcuacagcuuccgcuucggc

SEQ ID NO: 858749 - RNA, 20 nt, Human
gcuccuggucagcugcagcu

SEQ ID NO: 858750 - RNA, 19 nt, Human
gcuuccagcagccagcagg

SEQ ID NO: 858751 - RNA, 24 nt, Human
ggagguuguaguaagccaagaucg

SEQ ID NO: 858752 - RNA, 23 nt, Human
ggccaccuggcauuaaggcaaug

SEQ ID NO: 858753 - RNA, 20 nt, Human
ggcucaaaggcaacaagggc

SEQ ID NO: 858754 - RNA, 24 nt, Human
ggcucaaaggcaacaagggcacug

SEQ ID NO: 858755 - RNA, 22 nt, Human
ggcucaguccugcggucugugg

SEQ ID NO: 858756 - RNA, 18 nt, Human
ggcuggacugaggugcug

SEQ ID NO: 858757 - RNA, 21 nt, Human
gggcacaggggcauaugcagc

SEQ ID NO: 858758 - RNA, 20 nt, Human
gggcagcuuucucauucauc

SEQ ID NO: 858759 - RNA, 20 nt, Human
gggcugaggcaggaggaucg

SEQ ID NO: 858760 - RNA, 24 nt, Human
gggcugaggcaggaggaucgcuug

SEQ ID NO: 858761 - RNA, 18 nt, Human
gggggcugaggcaggagg

SEQ ID NO: 858762 - RNA, 24 nt, Human
gggguaugcuuccagcagccagca

SEQ ID NO: 858763 - RNA, 18 nt, Human
ggugaaggggcagguacu

SEQ ID NO: 858764 - RNA, 18 nt, Human
ggugucaugugcuguggg

SEQ ID NO: 858765 - RNA, 19 nt, Human
gguugggugggcagcugca

SEQ ID NO: 858766 - RNA, 23 nt, Human
gucaggaggccuccugggugcag

SEQ ID NO: 858767 - RNA, 26 nt, Human
gucaggauuuuggcuggugucaggag

SEQ ID NO: 858768 - RNA, 20 nt, Human
guccaggcucucuggcucca

SEQ ID NO: 858769 - RNA, 19 nt, Human
gugguaucaucaaccacug

SEQ ID NO: 858770 - RNA, 23 nt, Human
uaaaaucucugcaaugcaaaaga

SEQ ID NO: 858771 - RNA, 24 nt, Human
uaacaauuuuaccagaacaccacc

SEQ ID NO: 858772 - RNA, 21 nt, Human
uaacagcaccucccucuuggc

SEQ ID NO: 858773 - RNA, 18 nt, Human
uaacuuguggcaugcccu

SEQ ID NO: 858774 - RNA, 24 nt, Human
uaccccucaaaaaugaaaacuuaa

SEQ ID NO: 858775 - RNA, 25 nt, Human
uacuugcuguguuguaagauccugg

SEQ ID NO: 858776 - RNA, 19 nt, Human
ucaaaaaaaaaaaaaaaaa

SEQ ID NO: 858777 - RNA, 19 nt, Human
ucaaagaaacaaccccuga

SEQ ID NO: 858778 - RNA, 18 nt, Human
ucaaaggcaacaagggca

SEQ ID NO: 858779 - RNA, 18 nt, Human
ucaagacccagcuccacc

SEQ ID NO: 858780 - RNA, 20 nt, Human
ucaagacccagcuccaccac

SEQ ID NO: 858781 - RNA, 18 nt, Human
uccagcagccagcaggug

SEQ ID NO: 858782 - RNA, 19 nt, Human
uccaggagagaggggccug

SEQ ID NO: 858783 - RNA, 18 nt, Human
uccaugaaggccacuccc

SEQ ID NO: 858784 - RNA, 24 nt, Human
ucccacuuugggaggccgaggcag

SEQ ID NO: 858785 - RNA, 18 nt, Human
ucccagagcacugcugcc

SEQ ID NO: 858786 - RNA, 18 nt, Human
ucccagugguagagcugc

SEQ ID NO: 858787 - RNA, 18 nt, Human
uccccaaaaaagaggaag

SEQ ID NO: 858788 - RNA, 19 nt, Human
uccccaaaaaagaggaagg

SEQ ID NO: 858789 - RNA, 26 nt, Human
uccccagccucuugauuuaagucugc

SEQ ID NO: 858790 - RNA, 21 nt, Human
ucccuaggcagaugagucuug

SEQ ID NO: 858791 - RNA, 23 nt, Human
uccuggagcaggccaggccacag

SEQ ID NO: 858792 - RNA, 19 nt, Human
uccuuaggccccgccccaa

SEQ ID NO: 858793 - RNA, 24 nt, Human
uccuuaggccccgccccucgggag

SEQ ID NO: 858794 - RNA, 24 nt, Human
uccuucauacagcuauucuaacaa

SEQ ID NO: 858795 - RNA, 24 nt, Human
ucgcuugaacccaggaggcggagg

SEQ ID NO: 858796 - RNA, 23 nt, Human
ucgugccacugcacuccagucug

SEQ ID NO: 858797 - RNA, 21 nt, Human
ucuaaaucacaucccaccauc

SEQ ID NO: 858798 - RNA, 19 nt, Human
ucuccagcggccagggcuc

SEQ ID NO: 858799 - RNA, 18 nt, Human
ucuccaggcucaguccug

SEQ ID NO: 858800 - RNA, 23 nt, Human
ucuccgccaccgccgccgcugcg

SEQ ID NO: 858801 - RNA, 24 nt, Human
ucuccgccaccgccgccgcugcgg

SEQ ID NO: 858802 - RNA, 25 nt, Human
ucuccgucucaaaaaaaaaaaaaaa

SEQ ID NO: 858803 - RNA, 22 nt, Human
ucucuacuaaaaauacaaaaaa

SEQ ID NO: 858804 - RNA, 22 nt, Human
ucucugaaacccagaagggcug

SEQ ID NO: 858805 - RNA, 24 nt, Human
ucucugcaaugcaaaagaucccuu

SEQ ID NO: 858806 - RNA, 21 nt, Human
ucuuggccaaaggcuuugucu

SEQ ID NO: 858807 - RNA, 21 nt, Human
ugaaaacuucauuuccuccca

SEQ ID NO: 858808 - RNA, 23 nt, Human
ugaaaaugacccauuucccacuu

SEQ ID NO: 858809 - RNA, 26 nt, Human
ugaacaaagcccaacugucccacaug

SEQ ID NO: 858810 - RNA, 19 nt, Human
ugacccgggcggcgcgggg

SEQ ID NO: 858811 - RNA, 19 nt, Human
ugacccgggcggcgcgggg

SEQ ID NO: 858812 - RNA, 20 nt, Human
ugaccuuuaacuuguggcau

SEQ ID NO: 858813 - RNA, 22 nt, Human
ugagaagcaauuuggcugggug

SEQ ID NO: 858814 - RNA, 19 nt, Human
ugagaagccauccucuggg

SEQ ID NO: 858815 - RNA, 19 nt, Human
ugagaauggcucauuacaa

SEQ ID NO: 858816 - RNA, 19 nt, Human
ugagcuggcuaacugcccu

SEQ ID NO: 858817 - RNA, 24 nt, Human
ugaggcaggaggaucgcuugaacc

SEQ ID NO: 858818 - RNA, 25 nt, Human
ugaggcaggaggaucgcuugaaccc

SEQ ID NO: 858819 - RNA, 24 nt, Human
ugccacugcacuccagucugggca

SEQ ID NO: 858820 - RNA, 18 nt, Human
ugcccuguaaugagccac

SEQ ID NO: 858821 - RNA, 26 nt, Human
ugccuccgccuccguccucaugaccc

SEQ ID NO: 858822 - RNA, 23 nt, Human
ugccuguagucccagcuaguggg

SEQ ID NO: 858823 - RNA, 19 nt, Human
ugcuggguggcagggguca

SEQ ID NO: 858824 - RNA, 20 nt, Human
ugcugugcugguccccagca

SEQ ID NO: 858825 - RNA, 22 nt, Human
uggaagagcaggacccaggagu

SEQ ID NO: 858826 - RNA, 24 nt, Human
uggagggguccucagcccuggggg

SEQ ID NO: 858827 - RNA, 24 nt, Human
uggaucaccugagcucagggguuc

SEQ ID NO: 858828 - RNA, 21 nt, Human
uggcaggggucagaugcccug

SEQ ID NO: 858829 - RNA, 18 nt, Human
uggcccagguaccugcag

SEQ ID NO: 858830 - RNA, 23 nt, Human
uggcccagguaccugcagcacca

SEQ ID NO: 858831 - RNA, 22 nt, Human
uggcuagaaugaacaaagccca

SEQ ID NO: 858832 - RNA, 18 nt, Human
uggcuggacugaggugcu

SEQ ID NO: 858833 - RNA, 23 nt, Human
uggcuggguggucucacugcccu

SEQ ID NO: 858834 - RNA, 24 nt, Human
ugggaggccgaggcagguggauca

SEQ ID NO: 858835 - RNA, 20 nt, Human
ugggcagcugucggugucau

SEQ ID NO: 858836 - RNA, 24 nt, Human
ugggccagcugccucgucagcugc

SEQ ID NO: 858837 - RNA, 23 nt, Human
uggggggcugaggcaggaggauc

SEQ ID NO: 858838 - RNA, 23 nt, Human
uggggucagcuaugcugucucca

SEQ ID NO: 858839 - RNA, 23 nt, Human
uggguaggcagguggugguggua

SEQ ID NO: 858840 - RNA, 19 nt, Human
uggucagcugcagcuucug

SEQ ID NO: 858841 - RNA, 20 nt, Human
uggucagcugcagcuucugc

SEQ ID NO: 858842 - RNA, 24 nt, Human
ugguggcaugugccuguaguccca

SEQ ID NO: 858843 - RNA, 19 nt, Human
uggugguaucaucaaccac

SEQ ID NO: 858844 - RNA, 26 nt, Human
uguaaugagccacagaaacuugggcc

SEQ ID NO: 858845 - RNA, 19 nt, Human
ugugaacaggcugggcagc

SEQ ID NO: 858846 - RNA, 18 nt, Human
ugugaagaccagguuggg

SEQ ID NO: 858847 - RNA, 20 nt, Human
ugugcaagaaugcaacacag

SEQ ID NO: 858848 - RNA, 18 nt, Human
uuagagguccccagccuc

SEQ ID NO: 858849 - RNA, 19 nt, Human
uuagagguccccagccucu

SEQ ID NO: 858850 - RNA, 24 nt, Human
uuagccgggcaugguggcaugugc

SEQ ID NO: 858851 - RNA, 18 nt, Human
uucuccgccaccgccgcc

SEQ ID NO: 858852 - RNA, 23 nt, Human
uucuccgccaccgccgccgcugc

SEQ ID NO: 858853 - RNA, 24 nt, Human
uugaacccaggaggcggagguugu

SEQ ID NO: 858854 - RNA, 25 nt, Human
uugggaggccgaggcagguggauca

SEQ ID NO: 858855 - RNA, 22 nt, Human
uuguaguaagccaagaucgugc

SEQ ID NO: 858856 - RNA, 27 nt, Human
aaaaaaagagcuacaauggaacaaaaa

SEQ ID NO: 858857 - RNA, 25 nt, Human
aaaaaagagcuacaauggaacaaaa

SEQ ID NO: 858858 - RNA, 24 nt, Human
aaaaacaaaaacaaaaaaaaagga

SEQ ID NO: 858859 - RNA, 23 nt, Human
aaaaacaaaaacaaaaacaaaaa

SEQ ID NO: 858860 - RNA, 26 nt, Human
aaaaagaaaagcauaauuaccacaaa

SEQ ID NO: 858861 - RNA, 20 nt, Human
aaaaagcuccccuaccaacc

SEQ ID NO: 858862 - RNA, 24 nt, Human
aaaaagcuccccuaccaaccacca

SEQ ID NO: 858863 - RNA, 23 nt, Human
aaaacaaaaacaaaaaaaaagga

SEQ ID NO: 858864 - RNA, 22 nt, Human
aaaacaaaaacaaaaacaaaaa

SEQ ID NO: 858865 - RNA, 24 nt, Human
aaaacaaaaacaaaaacaaaaaaa

SEQ ID NO: 858866 - RNA, 18 nt, Human
aaaacaacccucacccuc

SEQ ID NO: 858867 - RNA, 26 nt, Human
aaacaaaaacaaaaacaaaaaaaaag

SEQ ID NO: 858868 - RNA, 25 nt, Human
aaacaaaaacaaaaacaaaaacaaa

SEQ ID NO: 858869 - RNA, 19 nt, Human
aaacaacccucacccuccg

SEQ ID NO: 858870 - RNA, 21 nt, Human
aaagaaaagcauaauuaccac

SEQ ID NO: 858871 - RNA, 18 nt, Human
aaaggaaaggagaagggg

SEQ ID NO: 858872 - RNA, 27 nt, Human
aacaaaaacaaaaacaaaaaaaaagga

SEQ ID NO: 858873 - RNA, 23 nt, Human
aacagggcugaggcacacagacc

SEQ ID NO: 858874 - RNA, 23 nt, Human
aaccugccccuuaacagggcugg

SEQ ID NO: 858875 - RNA, 21 nt, Human
aaccuuugggcccaacagagg

SEQ ID NO: 858876 - RNA, 26 nt, Human
aacuccauguugcccagaucccacug

SEQ ID NO: 858877 - RNA, 23 nt, Human
aagagcuacaauggaacaaaaca

SEQ ID NO: 858878 - RNA, 19 nt, Human
aagcaacaggacaaugaac

SEQ ID NO: 858879 - RNA, 22 nt, Human
aagcagauacucucaauaauau

SEQ ID NO: 858880 - RNA, 22 nt, Human
aagcagucaguggcugaagaaa

SEQ ID NO: 858881 - RNA, 22 nt, Human
aagcauaauuaccacaaauuac

SEQ ID NO: 858882 - RNA, 21 nt, Human
aaggugcccaagguaaagggc

SEQ ID NO: 858883 - RNA, 24 nt, Human
aaggugcccaagguaaagggcaag

SEQ ID NO: 858884 - RNA, 24 nt, Human
acaaaaacaaaaaaaaaggaaaga

SEQ ID NO: 858885 - RNA, 25 nt, Human
acaaaaacaaaaacaaaaacaaaaa

SEQ ID NO: 858886 - RNA, 25 nt, Human
acagagccucccugaggucucaaag

SEQ ID NO: 858887 - RNA, 19 nt, Human
acagcagggauaucuuggg

SEQ ID NO: 858888 - RNA, 23 nt, Human
accaaaaacaaaaacaaaaacaa

SEQ ID NO: 858889 - RNA, 19 nt, Human
acucuggggugugaggaga

SEQ ID NO: 858890 - RNA, 21 nt, Human
acucuggggugugaggagaug

SEQ ID NO: 858891 - RNA, 23 nt, Human
agagaaaccugccccuuaacagg

SEQ ID NO: 858892 - RNA, 20 nt, Human
agagacagagccucccugag

SEQ ID NO: 858893 - RNA, 18 nt, Human
agagauagauggcuugca

SEQ ID NO: 858894 - RNA, 20 nt, Human
agcagagaccagacgcucau

SEQ ID NO: 858895 - RNA, 24 nt, Human
agcccuugucagccugggauacug

SEQ ID NO: 858896 - RNA, 19 nt, Human
aggaagagggcuaaagaga

SEQ ID NO: 858897 - RNA, 22 nt, Human
aggaagagggcuaaagagaaac

SEQ ID NO: 858898 - RNA, 20 nt, Human
aggagaaggggguccaggaa

SEQ ID NO: 858899 - RNA, 18 nt, Human
aggauuccccccagcccc

SEQ ID NO: 858900 - RNA, 19 nt, Human
aggcaacagcaagcagagc

SEQ ID NO: 858901 - RNA, 18 nt, Human
aggcacacagaccugcug

SEQ ID NO: 858902 - RNA, 18 nt, Human
agggaaaggccucggaua

SEQ ID NO: 858903 - RNA, 20 nt, Human
aguccaugugggucaguccu

SEQ ID NO: 858904 - RNA, 20 nt, Human
auccagagaaggugggagcu

SEQ ID NO: 858905 - RNA, 19 nt, Human
augaacagagggaucuggg

SEQ ID NO: 858906 - RNA, 20 nt, Human
caaaaaaaaaggaaagaaaa

SEQ ID NO: 858907 - RNA, 21 nt, Human
caaaaacaaaaaaaaaggaaa

SEQ ID NO: 858908 - RNA, 27 nt, Human
caaaaacaaaaacaaaaacaaaaaaaa

SEQ ID NO: 858909 - RNA, 25 nt, Human
caaaaacaaaaacaaaaacaaaaac

SEQ ID NO: 858910 - RNA, 21 nt, Human
caaaccagcagaggaaaaaca

SEQ ID NO: 858911 - RNA, 21 nt, Human
caaaggacuaaagcaggacua

SEQ ID NO: 858912 - RNA, 25 nt, Human
caacagaggaaccaguugaaaagga

SEQ ID NO: 858913 - RNA, 18 nt, Human
caacaguccagagaaaga

SEQ ID NO: 858914 - RNA, 23 nt, Human
caacuggcaggauuccccccagc

SEQ ID NO: 858915 - RNA, 22 nt, Human
caagaaacguuuccaagccuca

SEQ ID NO: 858916 - RNA, 21 nt, Human
caagauggggagacuccaccg

SEQ ID NO: 858917 - RNA, 26 nt, Human
cacaaauuacaaaggacuaaagcagg

SEQ ID NO: 858918 - RNA, 19 nt, Human
cacaggaacugagaugggc

SEQ ID NO: 858919 - RNA, 20 nt, Human
cacagggcuucaccaacugg

SEQ ID NO: 858920 - RNA, 24 nt, Human
caccaggaaagggaaaaaaaaaaa

SEQ ID NO: 858921 - RNA, 23 nt, Human
caccucuaucugagccccagggg

SEQ ID NO: 858922 - RNA, 23 nt, Human
cacucccaacucucuugccucca

SEQ ID NO: 858923 - RNA, 24 nt, Human
cagagccucccugaggucucaaag

SEQ ID NO: 858924 - RNA, 21 nt, Human
cagaucacucuacccaggcuu

SEQ ID NO: 858925 - RNA, 19 nt, Human
cagcagggauaucuugggc

SEQ ID NO: 858926 - RNA, 24 nt, Human
cagcagggauaucuugggcacggc

SEQ ID NO: 858927 - RNA, 19 nt, Human
caggauuccccccagcccc

SEQ ID NO: 858928 - RNA, 18 nt, Human
cagggcuucaccaacugg

SEQ ID NO: 858929 - RNA, 23 nt, Human
caguaaguaagcaacaggacaau

SEQ ID NO: 858930 - RNA, 21 nt, Human
cagucaugcccauaaccgaca

SEQ ID NO: 858931 - RNA, 18 nt, Human
caucuuccuugucccucc

SEQ ID NO: 858932 - RNA, 21 nt, Human
cauugcaguaaguaagcaaca

SEQ ID NO: 858933 - RNA, 21 nt, Human
ccacagggcuucaccaacugg

SEQ ID NO: 858934 - RNA, 21 nt, Human
ccaggcuggggcacggcugga

SEQ ID NO: 858935 - RNA, 23 nt, Human
ccaguccaagcccaggcacaucc

SEQ ID NO: 858936 - RNA, 24 nt, Human
ccauuaucauucacagcccaaccc

SEQ ID NO: 858937 - RNA, 22 nt, Human
cccaagcagucaguggcugaag

SEQ ID NO: 858938 - RNA, 23 nt, Human
cccagagguuauguuggcaugga

SEQ ID NO: 858939 - RNA, 24 nt, Human
cccuccguaacuagucaucuuccu

SEQ ID NO: 858940 - RNA, 18 nt, Human
ccucaccucccugcccca

SEQ ID NO: 858941 - RNA, 24 nt, Human
ccuccucaucccuuguucccaggc

SEQ ID NO: 858942 - RNA, 19 nt, Human
ccugccccuuaacagggcu

SEQ ID NO: 858943 - RNA, 22 nt, Human
ccugcugaugucugaugcccag

SEQ ID NO: 858944 - RNA, 19 nt, Human
ccuggcgugaggcaacagc

SEQ ID NO: 858945 - RNA, 24 nt, Human
ccuucugacaacagcagacuccag

SEQ ID NO: 858946 - RNA, 22 nt, Human
ccuugguuugagacaugaaguc

SEQ ID NO: 858947 - RNA, 20 nt, Human
ccuugucagccugggauacu

SEQ ID NO: 858948 - RNA, 18 nt, Human
ccuuugggcccaacagag

SEQ ID NO: 858949 - RNA, 18 nt, Human
ccuuugggcccaacagag

SEQ ID NO: 858950 - RNA, 25 nt, Human
cgaggacacaacaguggcuggagac

SEQ ID NO: 858951 - RNA, 18 nt, Human
cggcaggacggggccugg

SEQ ID NO: 858952 - RNA, 23 nt, Human
cuagucaucuuccuugucccucc

SEQ ID NO: 858953 - RNA, 21 nt, Human
cucagcaccucuaucugagcc

SEQ ID NO: 858954 - RNA, 19 nt, Human
cucaucccuuguucccagg

SEQ ID NO: 858955 - RNA, 20 nt, Human
cuccauguugcccagauccc

SEQ ID NO: 858956 - RNA, 24 nt, Human
cucucuugccuccaggauggaggc

SEQ ID NO: 858957 - RNA, 20 nt, Human
cugaagaaagagaaucaggu

SEQ ID NO: 858958 - RNA, 21 nt, Human
cuucccacauaccaaccacug

SEQ ID NO: 858959 - RNA, 21 nt, Human
cuuccuugucccuccuccuca

SEQ ID NO: 858960 - RNA, 18 nt, Human
cuugcagaaggguaugca

SEQ ID NO: 858961 - RNA, 23 nt, Human
cuugguuugagacaugaagucac

SEQ ID NO: 858962 - RNA, 20 nt, Human
cuugucccuccuccucacuu

SEQ ID NO: 858963 - RNA, 18 nt, Human
cuuugggcccaacagagg

SEQ ID NO: 858964 - RNA, 25 nt, Human
gaaagauucuagccaguccaagccc

SEQ ID NO: 858965 - RNA, 18 nt, Human
gaaccaguugaaaaggag

SEQ ID NO: 858966 - RNA, 23 nt, Human
gaacugagaugggcuucccacag

SEQ ID NO: 858967 - RNA, 21 nt, Human
gaaguccucaccucccugccc

SEQ ID NO: 858968 - RNA, 18 nt, Human
gacugggcagggaaaggc

SEQ ID NO: 858969 - RNA, 23 nt, Human
gagaugggcuucccacauaccaa

SEQ ID NO: 858970 - RNA, 21 nt, Human
gaggaaaaacacugagguuuc

SEQ ID NO: 858971 - RNA, 18 nt, Human
gaggacaaguguguucca

SEQ ID NO: 858972 - RNA, 20 nt, Human
gaggacaaguguguuccaga

SEQ ID NO: 858973 - RNA, 18 nt, Human
gauaggaugaacagaggg

SEQ ID NO: 858974 - RNA, 25 nt, Human
gcaaaaaacaacccucacccuccgu

SEQ ID NO: 858975 - RNA, 18 nt, Human
gccccagggguccaggcu

SEQ ID NO: 858976 - RNA, 25 nt, Human
ggacccuuccacacaggagguacuc

SEQ ID NO: 858977 - RNA, 18 nt, Human
ggagagaauggcaucuuu

SEQ ID NO: 858978 - RNA, 23 nt, Human
ggcaacagcaagcagagcgagga

SEQ ID NO: 858979 - RNA, 18 nt, Human
ggcccaacagaggaacca

SEQ ID NO: 858980 - RNA, 23 nt, Human
ggcuuuuuggcaaaaaacaaccc

SEQ ID NO: 858981 - RNA, 19 nt, Human
gggagggcaaaggugggga

SEQ ID NO: 858982 - RNA, 24 nt, Human
gguguucaccuuuccacucugggg

SEQ ID NO: 858983 - RNA, 21 nt, Human
guaaagggcaagcccuuguca

SEQ ID NO: 858984 - RNA, 19 nt, Human
gugaagaagauggcagccc

SEQ ID NO: 858985 - RNA, 22 nt, Human
guguucaccuuuccacucuggg

SEQ ID NO: 858986 - RNA, 26 nt, Human
guuaccaaaaacaaaaacaaaaacaa

SEQ ID NO: 858987 - RNA, 24 nt, Human
uaaaaagaaaagcauaauuaccac

SEQ ID NO: 858988 - RNA, 23 nt, Human
uaaacucuagguaauaacagccu

SEQ ID NO: 858989 - RNA, 19 nt, Human
uaaagagaaaccugccccu

SEQ ID NO: 858990 - RNA, 19 nt, Human
uaaagagaaaccugccccu

SEQ ID NO: 858991 - RNA, 23 nt, Human
uaacuagucaucuuccuuguccc

SEQ ID NO: 858992 - RNA, 20 nt, Human
uaagagagacagagccuccc

SEQ ID NO: 858993 - RNA, 22 nt, Human
uaagagagacagagccucccug

SEQ ID NO: 858994 - RNA, 18 nt, Human
uaagcugaggacaagugu

SEQ ID NO: 858995 - RNA, 22 nt, Human
uaauucagaucacucuacccag

SEQ ID NO: 858996 - RNA, 18 nt, Human
uacaaaggacuaaagcag

SEQ ID NO: 858997 - RNA, 22 nt, Human
uacaauggaacaaaacaaaaac

SEQ ID NO: 858998 - RNA, 25 nt, Human
uacaguacagggcugcgugaccuga

SEQ ID NO: 858999 - RNA, 22 nt, Human
uaccaaaaacaaaaacaaaaac

SEQ ID NO: 859000 - RNA, 23 nt, Human
uaccaaaaacaaaaacaaaaaca

SEQ ID NO: 859001 - RNA, 23 nt, Human
uaccaaaaacaaaaacaaaaaca

SEQ ID NO: 859002 - RNA, 24 nt, Human
uaccaaaaacaaaaacaaaaacaa

SEQ ID NO: 859003 - RNA, 22 nt, Human
uacccaggcuuuuuggcaaaaa

SEQ ID NO: 859004 - RNA, 19 nt, Human
uagauggcuugcagaaggg

SEQ ID NO: 859005 - RNA, 25 nt, Human
uaggaugaacagagggaucugggca

SEQ ID NO: 859006 - RNA, 19 nt, Human
uagggaaaauccagggacc

SEQ ID NO: 859007 - RNA, 21 nt, Human
uaguaaagauaauguacuacg

SEQ ID NO: 859008 - RNA, 21 nt, Human
ucagcaccucuaucugagccc

SEQ ID NO: 859009 - RNA, 20 nt, Human
ucagcauggcugaaggggga

SEQ ID NO: 859010 - RNA, 19 nt, Human
ucaguggcugaagaaagag

SEQ ID NO: 859011 - RNA, 24 nt, Human
uccaagcccaggcacauccagaga

SEQ ID NO: 859012 - RNA, 23 nt, Human
uccacauauaccuuccugccaca

SEQ ID NO: 859013 - RNA, 25 nt, Human
uccaggcuggggcacggccgggguc

SEQ ID NO: 859014 - RNA, 20 nt, Human
uccccccagcccccaacucc

SEQ ID NO: 859015 - RNA, 19 nt, Human
uccgcaaagccagaugaca

SEQ ID NO: 859016 - RNA, 21 nt, Human
ugaaaaggagggccaaagaca

SEQ ID NO: 859017 - RNA, 21 nt, Human
ugaaggaaagaaaggaaagga

SEQ ID NO: 859018 - RNA, 18 nt, Human
ugagagugaacgugcagu

SEQ ID NO: 859019 - RNA, 25 nt, Human
ugagccccagggguccaggcugggg

SEQ ID NO: 859020 - RNA, 24 nt, Human
ugaggcaacagcaagcagagcgag

SEQ ID NO: 859021 - RNA, 20 nt, Human
ugauucgagccacucccaag

SEQ ID NO: 859022 - RNA, 24 nt, Human
ugcaacaguccagagaaagauucu

SEQ ID NO: 859023 - RNA, 21 nt, Human
ugccagauaauucagaucacu

SEQ ID NO: 859024 - RNA, 22 nt, Human
ugcccauaaccgacacacaucc

SEQ ID NO: 859025 - RNA, 22 nt, Human
uggaacaaaacaaaaacauuua

SEQ ID NO: 859026 - RNA, 18 nt, Human
uggcaaaaaacaacccuc

SEQ ID NO: 859027 - RNA, 20 nt, Human
uggcaaaaaacaacccucac

SEQ ID NO: 859028 - RNA, 22 nt, Human
uggcagcaguguacagacacag

SEQ ID NO: 859029 - RNA, 25 nt, Human
uggcugaagaaagagaaucagguau

SEQ ID NO: 859030 - RNA, 21 nt, Human
ugggcccaacagaggaaccag

SEQ ID NO: 859031 - RNA, 18 nt, Human
ugggcuccaaguucuuau

SEQ ID NO: 859032 - RNA, 20 nt, Human
ugggcuucccacauaccaac

SEQ ID NO: 859033 - RNA, 19 nt, Human
uggggugugaggagauggu

SEQ ID NO: 859034 - RNA, 18 nt, Human
uguacuacgagcguaagg

SEQ ID NO: 859035 - RNA, 21 nt, Human
uguccacauauaccuuccugc

SEQ ID NO: 859036 - RNA, 26 nt, Human
ugucccuccuccucacuucccuucca

SEQ ID NO: 859037 - RNA, 19 nt, Human
uguccgguacaaugugggg

SEQ ID NO: 859038 - RNA, 23 nt, Human
ugugaggagaugguaagcugagg

SEQ ID NO: 859039 - RNA, 20 nt, Human
uuccauucaggagggugcca

SEQ ID NO: 859040 - RNA, 23 nt, Human
uuccugccacagggcuucaccaa

SEQ ID NO: 859041 - RNA, 18 nt, Human
uuguauuaaaaagaaaag

SEQ ID NO: 859042 - RNA, 19 nt, Human
uuuuuuuuuuuuuuuugcc

SEQ ID NO: 859043 - RNA, 25 nt, Human
uuuuuuuuuuuuuuuuuugccuuuu

SEQ ID NO: 859044 - RNA, 20 nt, Human
uuuuuuuuuuuuuuuuuugg

SEQ ID NO: 859045 - RNA, 19 nt, Human
aaaaagcagagaaguagaa

SEQ ID NO: 859046 - RNA, 23 nt, Human
aaaaaugccaaacuaacuggaau

SEQ ID NO: 859047 - RNA, 23 nt, Human
aaaacaaaaacucuccccuagga

SEQ ID NO: 859048 - RNA, 23 nt, Human
aaaaugccaaacuaacuggaaug

SEQ ID NO: 859049 - RNA, 21 nt, Human
aacaaaaacucuccccuagga

SEQ ID NO: 859050 - RNA, 20 nt, Human
aagcaagcccuccuccacag

SEQ ID NO: 859051 - RNA, 20 nt, Human
acaaacgacaaaaaaugcca

SEQ ID NO: 859052 - RNA, 20 nt, Human
acaaacgacaaaaaaugcca

SEQ ID NO: 859053 - RNA, 18 nt, Human
acagcaaccaaagucugu

SEQ ID NO: 859054 - RNA, 18 nt, Human
acuugaauacagcaacca

SEQ ID NO: 859055 - RNA, 22 nt, Human
aggaggaaucugaugacauaag

SEQ ID NO: 859056 - RNA, 23 nt, Human
agguagcauacuggagaaaaagg

SEQ ID NO: 859057 - RNA, 21 nt, Human
cacaaaaaaacacaaccacau

SEQ ID NO: 859058 - RNA, 26 nt, Human
cacaggagaacacggaaacauccaaa

SEQ ID NO: 859059 - RNA, 23 nt, Human
caccacaaauuucuugguaacaa

SEQ ID NO: 859060 - RNA, 20 nt, Human
caccuggaaaggagucgguu

SEQ ID NO: 859061 - RNA, 21 nt, Human
cagccaagucacccuucaccu

SEQ ID NO: 859062 - RNA, 20 nt, Human
cauaauccaaauacuugaau

SEQ ID NO: 859063 - RNA, 22 nt, Human
ccaaucccgccaaagccucgug

SEQ ID NO: 859064 - RNA, 18 nt, Human
ccccgcggggaagggcuc

SEQ ID NO: 859065 - RNA, 20 nt, Human
cccgccccgcggggaagggc

SEQ ID NO: 859066 - RNA, 21 nt, Human
cccgcggggaagggcuccgga

SEQ ID NO: 859067 - RNA, 19 nt, Human
ccugguagguggggagcag

SEQ ID NO: 859068 - RNA, 21 nt, Human
cgacaaaaaaugccaaacuaa

SEQ ID NO: 859069 - RNA, 22 nt, Human
cgacaaaaaaugccaaacuaac

SEQ ID NO: 859070 - RNA, 26 nt, Human
cggagccaaucccgccaaagccuccu

SEQ ID NO: 859071 - RNA, 19 nt, Human
cggggaagggcuccggauc

SEQ ID NO: 859072 - RNA, 18 nt, Human
cuccacagucauaaucca

SEQ ID NO: 859073 - RNA, 20 nt, Human
cuucagccaagucacccuuc

SEQ ID NO: 859074 - RNA, 18 nt, Human
gaaacuuuccucugccua

SEQ ID NO: 859075 - RNA, 24 nt, Human
gaaacuuuccucugccuauuuucu

SEQ ID NO: 859076 - RNA, 24 nt, Human
gaaugaucauccuuccugaaauuu

SEQ ID NO: 859077 - RNA, 23 nt, Human
gacaaaaaaugccaaacuaacug

SEQ ID NO: 859078 - RNA, 20 nt, Human
gagcagcggaccagcccaaa

SEQ ID NO: 859079 - RNA, 22 nt, Human
gccaaucccgccaaagccucgu

SEQ ID NO: 859080 - RNA, 23 nt, Human
gcggaccagcccaaacgcggagc

SEQ ID NO: 859081 - RNA, 18 nt, Human
ggggaagggcuccggauc

SEQ ID NO: 859082 - RNA, 18 nt, Human
gugcacaaacgacaaaaa

SEQ ID NO: 859083 - RNA, 23 nt, Human
uaaaaagcagagaaguagaacca

SEQ ID NO: 859084 - RNA, 23 nt, Human
uaaaaagcagagaaguagaacca

SEQ ID NO: 859085 - RNA, 24 nt, Human
uaaaaagcagagaaguagaaccaa

SEQ ID NO: 859086 - RNA, 24 nt, Human
uaaaacaaaaacucuccccuagga

SEQ ID NO: 859087 - RNA, 22 nt, Human
uagagaugacacaggagaacac

SEQ ID NO: 859088 - RNA, 18 nt, Human
uaucaagccaccuaacuc

SEQ ID NO: 859089 - RNA, 26 nt, Human
uaucaccacaaauuucuugguaacaa

SEQ ID NO: 859090 - RNA, 23 nt, Human
uauggcccaguagagaugacaca

SEQ ID NO: 859091 - RNA, 21 nt, Human
uccacaaaaaaacacaaccac

SEQ ID NO: 859092 - RNA, 25 nt, Human
ucccugccuauuaucaagccaccua

SEQ ID NO: 859093 - RNA, 23 nt, Human
uccuuccugaaauuucucuuaaa

SEQ ID NO: 859094 - RNA, 19 nt, Human
ugaugacauaaggauaaca

SEQ ID NO: 859095 - RNA, 20 nt, Human
ugcacaaacgacaaaaaaug

SEQ ID NO: 859096 - RNA, 24 nt, Human
ugcacaaacgacaaaaaaugcccu

SEQ ID NO: 859097 - RNA, 23 nt, Human
ugcccgguccuauggcccaguag

SEQ ID NO: 859098 - RNA, 22 nt, Human
ugguagguggggagcagcggac

SEQ ID NO: 859099 - RNA, 26 nt, Human
uguaauuaaaacaaaaaccggggucc

SEQ ID NO: 859100 - RNA, 22 nt, Human
uuaagcaagcccuccuccacag

SEQ ID NO: 859101 - RNA, 24 nt, Human
uucaccuggaaaggagucgguugu

SEQ ID NO: 859102 - RNA, 22 nt, Human
uucagccaagucacccuucacc

SEQ ID NO: 859103 - RNA, 20 nt, Human
aaccaagguaaagccaacga

SEQ ID NO: 859104 - RNA, 18 nt, Human
aagcagcaggcgccaggg

SEQ ID NO: 859105 - RNA, 18 nt, Human
aagcagcaggcgccaggg

SEQ ID NO: 859106 - RNA, 20 nt, Human
aagcagcaggcgccaggggg

SEQ ID NO: 859107 - RNA, 25 nt, Human
aagcagcaggcgccagggggcccaa

SEQ ID NO: 859108 - RNA, 23 nt, Human
aagcuggggccaagcagggcgga

SEQ ID NO: 859109 - RNA, 18 nt, Human
aaggggacagaacuaaug

SEQ ID NO: 859110 - RNA, 19 nt, Human
aaguggcugggacaugggg

SEQ ID NO: 859111 - RNA, 24 nt, Human
aaguggcugggacaugggggcugc

SEQ ID NO: 859112 - RNA, 24 nt, Human
agaaaacacuucucauugugaagg

SEQ ID NO: 859113 - RNA, 18 nt, Human
agaacuaaugggggacag

SEQ ID NO: 859114 - RNA, 19 nt, Human
agacaaggagcagaggccu

SEQ ID NO: 859115 - RNA, 20 nt, Human
agccuggcccacaguggcug

SEQ ID NO: 859116 - RNA, 22 nt, Human
aggcuccccccucccccgaccc

SEQ ID NO: 859117 - RNA, 23 nt, Human
aggcuccccccucccccgacccu

SEQ ID NO: 859118 - RNA, 25 nt, Human
agggcguggggcugggggaaggagc

SEQ ID NO: 859119 - RNA, 21 nt, Human
aggggacagaacuaauggggg

SEQ ID NO: 859120 - RNA, 22 nt, Human
caaggacgaccgcgaaccaagg

SEQ ID NO: 859121 - RNA, 25 nt, Human
caagguaaagccaacgaggccaccu

SEQ ID NO: 859122 - RNA, 21 nt, Human
caggacaguaacauccgugcu

SEQ ID NO: 859123 - RNA, 21 nt, Human
cagggcagugagugaugggac

SEQ ID NO: 859124 - RNA, 23 nt, Human
cagugagugaugggacgugcccu

SEQ ID NO: 859125 - RNA, 18 nt, Human
ccagaaaacacuucucau

SEQ ID NO: 859126 - RNA, 23 nt, Human
ccagagacagacaagcuggggcc

SEQ ID NO: 859127 - RNA, 24 nt, Human
ccagagacagacaagcuggggcca

SEQ ID NO: 859128 - RNA, 23 nt, Human
cccacaguggcugccacauuuca

SEQ ID NO: 859129 - RNA, 22 nt, Human
cccccgacccuuuaccuagggc

SEQ ID NO: 859130 - RNA, 25 nt, Human
ccccuaggcuuggccucccagagac

SEQ ID NO: 859131 - RNA, 19 nt, Human
cccuacaaggcuccccccu

SEQ ID NO: 859132 - RNA, 20 nt, Human
cccugcccugagccuggccc

SEQ ID NO: 859133 - RNA, 23 nt, Human
ccuaggcuuggccucccagagac

SEQ ID NO: 859134 - RNA, 19 nt, Human
ccucccagagacucgcgga

SEQ ID NO: 859135 - RNA, 19 nt, Human
ccucgugcgcgacggaggc

SEQ ID NO: 859136 - RNA, 21 nt, Human
ccucuagccccuuccggccgc

SEQ ID NO: 859137 - RNA, 21 nt, Human
cgccccuaggcuuggccuccc

SEQ ID NO: 859138 - RNA, 20 nt, Human
cgccucuagccccuuccggc

SEQ ID NO: 859139 - RNA, 22 nt, Human
cguggggcugggggaaggagca

SEQ ID NO: 859140 - RNA, 22 nt, Human
cuuccgggacgcucacgguggu

SEQ ID NO: 859141 - RNA, 23 nt, Human
gagccuggcccacaguggcugcc

SEQ ID NO: 859142 - RNA, 19 nt, Human
gcaggcgcuguggcgcccc

SEQ ID NO: 859143 - RNA, 18 nt, Human
gcggagcaucugagaccc

SEQ ID NO: 859144 - RNA, 21 nt, Human
ggcguggggcugggggaagga

SEQ ID NO: 859145 - RNA, 19 nt, Human
ggcuggcccaggacccaga

SEQ ID NO: 859146 - RNA, 20 nt, Human
guaaagccaacgaggccacc

SEQ ID NO: 859147 - RNA, 22 nt, Human
uacaaggcuccccccucccccg

SEQ ID NO: 859148 - RNA, 22 nt, Human
uagaggccucccuacaaggcuc

SEQ ID NO: 859149 - RNA, 24 nt, Human
uauuaucagguauccuggcuggcc

SEQ ID NO: 859150 - RNA, 18 nt, Human
ucacacgacucacccaga

SEQ ID NO: 859151 - RNA, 21 nt, Human
ucccagagacucgcggacgcu

SEQ ID NO: 859152 - RNA, 21 nt, Human
ucccccgacccuuuaccuagg

SEQ ID NO: 859153 - RNA, 25 nt, Human
ucccuacaaggcuccccccuccccc

SEQ ID NO: 859154 - RNA, 27 nt, Human
uccgugcugcuggcugggacccagaag

SEQ ID NO: 859155 - RNA, 18 nt, Human
uccugagucacacgacuc

SEQ ID NO: 859156 - RNA, 19 nt, Human
ugagucacacgacucaccc

SEQ ID NO: 859157 - RNA, 18 nt, Human
ugcccccucugguagggc

SEQ ID NO: 859158 - RNA, 21 nt, Human
uggcccaggacccagagacag

SEQ ID NO: 859159 - RNA, 23 nt, Human
uggcugccacauuucagacaggg

SEQ ID NO: 859160 - RNA, 21 nt, Human
uggcugggacaugggggcugc

SEQ ID NO: 859161 - RNA, 23 nt, Human
uggggccaagcagggcggagcau

SEQ ID NO: 859162 - RNA, 20 nt, Human
ugguagggcguggggcuggg

SEQ ID NO: 859163 - RNA, 20 nt, Human
ugguagggcguggggcuggg

SEQ ID NO: 859164 - RNA, 21 nt, Human
uguggcgccccuaggcuuggc

SEQ ID NO: 859165 - RNA, 27 nt, Human
uuacagguaagaaagacaaggagcaga

SEQ ID NO: 859166 - RNA, 19 nt, Human
uugcccccucugguagggc

SEQ ID NO: 859167 - RNA, 23 nt, Human
uuuuuuuuuuuuuucacccaaug

SEQ ID NO: 859168 - RNA, 23 nt, Human
uuuuuuuuuuuuuuuucacccaa

SEQ ID NO: 859169 - RNA, 18 nt, Human
acacauggcagguggagc

SEQ ID NO: 859170 - RNA, 25 nt, Human
agcccagccgcgaguucuccuggag

SEQ ID NO: 859171 - RNA, 25 nt, Human
caccccacuaggggcccugucccca

SEQ ID NO: 859172 - RNA, 22 nt, Human
cagcccagccgcgaguucuccu

SEQ ID NO: 859173 - RNA, 22 nt, Human
cauacacauggcagguggagca

SEQ ID NO: 859174 - RNA, 18 nt, Human
caugucgucuucccucuc

SEQ ID NO: 859175 - RNA, 19 nt, Human
ccaauaugaguccacuccu

SEQ ID NO: 859176 - RNA, 24 nt, Human
ccacuccuacucaaacccugauuc

SEQ ID NO: 859177 - RNA, 22 nt, Human
ccagguguucaugucagugggg

SEQ ID NO: 859178 - RNA, 18 nt, Human
ccccaccagagccuggac

SEQ ID NO: 859179 - RNA, 23 nt, Human
cccugauucucaggggccugggg

SEQ ID NO: 859180 - RNA, 21 nt, Human
ccugauucucaggggccuggg

SEQ ID NO: 859181 - RNA, 21 nt, Human
cugggcagggcuggcaccugg

SEQ ID NO: 859182 - RNA, 20 nt, Human
ggcagggcuggcaccuggcu

SEQ ID NO: 859183 - RNA, 20 nt, Human
ggcagguggagcaggccagg

SEQ ID NO: 859184 - RNA, 21 nt, Human
gggggccaugucuagcauguc

SEQ ID NO: 859185 - RNA, 19 nt, Human
guggagcaggccagggagg

SEQ ID NO: 859186 - RNA, 19 nt, Human
ucaggggccuggggaaggc

SEQ ID NO: 859187 - RNA, 22 nt, Human
ucaguggggcuuggggacaugg

SEQ ID NO: 859188 - RNA, 22 nt, Human
uccacuccuacucaaacccuga

SEQ ID NO: 859189 - RNA, 25 nt, Human
uccagguguucaugucaguggggcu

SEQ ID NO: 859190 - RNA, 21 nt, Human
ucccucaaucugggcccuggg

SEQ ID NO: 859191 - RNA, 18 nt, Human
uccgcuccuuccagcucc

SEQ ID NO: 859192 - RNA, 20 nt, Human
uccucgggaggaggcaggag

SEQ ID NO: 859193 - RNA, 24 nt, Human
ucucaggggccuggggaaggccac

SEQ ID NO: 859194 - RNA, 25 nt, Human
ucucaggggccuggggaaggcccca

SEQ ID NO: 859195 - RNA, 23 nt, Human
ucucucccaagcagggguguugu

SEQ ID NO: 859196 - RNA, 23 nt, Human
ugaguccacuccuacucaaaccc

SEQ ID NO: 859197 - RNA, 22 nt, Human
uggacaugggacucucucccaa

SEQ ID NO: 859198 - RNA, 19 nt, Human
uggcagcccagccgcgagu

SEQ ID NO: 859199 - RNA, 21 nt, Human
uggcagguggagcaggccagg

SEQ ID NO: 859200 - RNA, 19 nt, Human
uggccauccacguagaagu

SEQ ID NO: 859201 - RNA, 18 nt, Human
uuuuuuuuuuuuuuucug

SEQ ID NO: 859202 - RNA, 19 nt, Human
uuuuuuuuuuuuuuucugu

SEQ ID NO: 859203 - RNA, 24 nt, Human
cagcaggccauucugugacaguuc

SEQ ID NO: 859204 - RNA, 19 nt, Human
cauccugaguuccaagucc

SEQ ID NO: 859205 - RNA, 22 nt, Human
caugacacagacgguuuauuca

SEQ ID NO: 859206 - RNA, 26 nt, Human
uccacccgccacaguuccacauccca

SEQ ID NO: 859207 - RNA, 21 nt, Human
ugaguuccaaguccauguccu

SEQ ID NO: 859208 - RNA, 18 nt, Human
uguccugacugaguggug

SEQ ID NO: 859209 - RNA, 18 nt, Human
uuuuuuuuuuuuuuuuug

SEQ ID NO: 859210 - RNA, 22 nt, Human
uuuuuuuuuuuuuuuuugccau

SEQ ID NO: 859211 - RNA, 25 nt, Human
uuuuuuuuuuuuuuuuuugccauga

SEQ ID NO: 859212 - RNA, 20 nt, Human
acccgcccugccuugcugcc

SEQ ID NO: 859213 - RNA, 24 nt, Human
caaggaauaccauaucccucuuuc

SEQ ID NO: 859214 - RNA, 25 nt, Human
cauuacaaccauuguggauauugcu

SEQ ID NO: 859215 - RNA, 22 nt, Human
ccauaucccucuuuccucucug

SEQ ID NO: 859216 - RNA, 21 nt, Human
cccgcuggguucuccucggca

SEQ ID NO: 859217 - RNA, 20 nt, Human
cccucuuuccucucugaccc

SEQ ID NO: 859218 - RNA, 20 nt, Human
cccucuuuccucucugaccc

SEQ ID NO: 859219 - RNA, 21 nt, Human
cccugccuugcugccagcaaa

SEQ ID NO: 859220 - RNA, 23 nt, Human
cgcuggguucuccucggcagcgc

SEQ ID NO: 859221 - RNA, 20 nt, Human
cgucucccuccgggagcagg

SEQ ID NO: 859222 - RNA, 22 nt, Human
cucagcacuuggccuauuccua

SEQ ID NO: 859223 - RNA, 24 nt, Human
gaguaaaucucuuuccccagauuc

SEQ ID NO: 859224 - RNA, 24 nt, Human
uaccauaucccucuuuccucucug

SEQ ID NO: 859225 - RNA, 21 nt, Human
ucccucuuuccucucugaccc

SEQ ID NO: 859226 - RNA, 23 nt, Human
uccugaaauguucucccgcuggg

SEQ ID NO: 859227 - RNA, 22 nt, Human
ugaaauguucucccgcuggguu

SEQ ID NO: 859228 - RNA, 21 nt, Human
uuccccagauuccaaggaaua

SEQ ID NO: 859229 - RNA, 23 nt, Human
uuucagagaguaaaucucuuucc

SEQ ID NO: 859230 - RNA, 18 nt, Human
uuuuuuuuuuucagagag

SEQ ID NO: 859231 - RNA, 21 nt, Human
uuuuuuuuuuuuuuuuuucag

SEQ ID NO: 859232 - RNA, 20 nt, Human
uuuuuuuuuuuuuuuuuugg

SEQ ID NO: 859233 - RNA, 24 nt, Human
uuuuuuuuuuuuuuuuuuguuuuu

SEQ ID NO: 859234 - RNA, 22 nt, Human
aaacagccagaagaaaauuugc

SEQ ID NO: 859235 - RNA, 20 nt, Human
aagccucaguuucuucacug

SEQ ID NO: 859236 - RNA, 21 nt, Human
aagccucaguuucuucacugg

SEQ ID NO: 859237 - RNA, 20 nt, Human
acuaaaacagccagaagaaa

SEQ ID NO: 859238 - RNA, 18 nt, Human
agccagaagaaaauuugc

SEQ ID NO: 859239 - RNA, 23 nt, Human
cccccaauuugaguacauacuac

SEQ ID NO: 859240 - RNA, 20 nt, Human
cuaaaacagccagaagaaaa

SEQ ID NO: 859241 - RNA, 18 nt, Human
cuguaaaaaaaauacuac

SEQ ID NO: 859242 - RNA, 24 nt, Human
gagaagccucaguuucuucacuga

SEQ ID NO: 859243 - RNA, 20 nt, Human
gcgcaugcguccaacuuccc

SEQ ID NO: 859244 - RNA, 19 nt, Human
uaacugcaaaauucuaaag

SEQ ID NO: 859245 - RNA, 23 nt, Human
uacaagaaacauguaggguuuuu

SEQ ID NO: 859246 - RNA, 25 nt, Human
uacauacuacuguuaacugcaaaau

SEQ ID NO: 859247 - RNA, 18 nt, Human
uacauauuuuuaucuaga

SEQ ID NO: 859248 - RNA, 23 nt, Human
uuuuuuuuuuuuuuuuuuacuaa

SEQ ID NO: 859249 - RNA, 23 nt, Human
aagcaaacuucaccaaacauaga

SEQ ID NO: 859250 - RNA, 19 nt, Human
caagugcucuuuuccacaa

SEQ ID NO: 859251 - RNA, 21 nt, Human
ggaaaagcaaacuucaccaaa

SEQ ID NO: 859252 - RNA, 20 nt, Human
gguuuaaucaagcauguagu

SEQ ID NO: 859253 - RNA, 21 nt, Human
uacaagcauuuaaugguuuaa

SEQ ID NO: 859254 - RNA, 24 nt, Human
uuaaaguuacaagcauuuaauggu

SEQ ID NO: 859255 - RNA, 19 nt, Human
uucaagugcucuuuuccac

SEQ ID NO: 859256 - RNA, 23 nt, Human
uuuuuuuuuuaaaguuacaagca

SEQ ID NO: 859257 - RNA, 19 nt, Human
uuuuuuuuuuuuuuuuuaa

SEQ ID NO: 859258 - RNA, 24 nt, Human
aaaaaaaacaaaaaacuaaccaag

SEQ ID NO: 859259 - RNA, 22 nt, Human
aaaaaacaaaaaacuaaccaag

SEQ ID NO: 859260 - RNA, 19 nt, Human
aaaaaacuaaccaagggca

SEQ ID NO: 859261 - RNA, 19 nt, Human
aaaguacugggauuacagg

SEQ ID NO: 859262 - RNA, 19 nt, Human
aaaguacugggauuacagg

SEQ ID NO: 859263 - RNA, 22 nt, Human
aaaugcccccuucagacugacc

SEQ ID NO: 859264 - RNA, 24 nt, Human
aaggugccucaagaaaaugccagg

SEQ ID NO: 859265 - RNA, 18 nt, Human
aaguacugggauuacagg

SEQ ID NO: 859266 - RNA, 26 nt, Human
aaguacugggauuacagguguaagcc

SEQ ID NO: 859267 - RNA, 24 nt, Human
aagugcuuugggaggccaagaagg

SEQ ID NO: 859268 - RNA, 18 nt, Human
accaaaaaaaaaacaaaa

SEQ ID NO: 859269 - RNA, 21 nt, Human
accaagccaccuuuaaugaac

SEQ ID NO: 859270 - RNA, 25 nt, Human
acccacuucggccucccaaaguacu

SEQ ID NO: 859271 - RNA, 23 nt, Human
accucagcuuccugaguagcugg

SEQ ID NO: 859272 - RNA, 20 nt, Human
acuacagcucucuccacauu

SEQ ID NO: 859273 - RNA, 22 nt, Human
agaaagaccagccaggcacagg

SEQ ID NO: 859274 - RNA, 19 nt, Human
agaccaggguugcaggugc

SEQ ID NO: 859275 - RNA, 23 nt, Human
agagaagcagacuaucacuuuuu

SEQ ID NO: 859276 - RNA, 18 nt, Human
agagauccucucaccuca

SEQ ID NO: 859277 - RNA, 20 nt, Human
agcgauccacccacuucggc

SEQ ID NO: 859278 - RNA, 23 nt, Human
agcuggacccaccguuuuaccua

SEQ ID NO: 859279 - RNA, 24 nt, Human
aggaguucaaaaccaaccuggacc

SEQ ID NO: 859280 - RNA, 24 nt, Human
aggaucgcuugagcccaggaguuc

SEQ ID NO: 859281 - RNA, 19 nt, Human
aggcacaggcucacaucug

SEQ ID NO: 859282 - RNA, 23 nt, Human
aggccaggugccacuccagggaa

SEQ ID NO: 859283 - RNA, 25 nt, Human
aggcuggagugcaguugcacgaucu

SEQ ID NO: 859284 - RNA, 18 nt, Human
aggguagaaaacuugaaa

SEQ ID NO: 859285 - RNA, 19 nt, Human
aguagccgggauuacaggc

SEQ ID NO: 859286 - RNA, 25 nt, Human
aguagccgggauuacaggcgcaugc

SEQ ID NO: 859287 - RNA, 18 nt, Human
aguagcugggacuacagg

SEQ ID NO: 859288 - RNA, 24 nt, Human
agugauucugcugccucagccucc

SEQ ID NO: 859289 - RNA, 24 nt, Human
agugcaguugcacgaucuuggcuc

SEQ ID NO: 859290 - RNA, 19 nt, Human
agugcuuugggaggccaag

SEQ ID NO: 859291 - RNA, 20 nt, Human
auagaccaggguugcaggug

SEQ ID NO: 859292 - RNA, 18 nt, Human
auaugaguguguguguau

SEQ ID NO: 859293 - RNA, 22 nt, Human
auccaagugcuuugggaggcca

SEQ ID NO: 859294 - RNA, 19 nt, Human
auggucaaagcagauaggc

SEQ ID NO: 859295 - RNA, 19 nt, Human
auuacaggcgcaugccacc

SEQ ID NO: 859296 - RNA, 24 nt, Human
auuuuuguauuuuuaguagagaca

SEQ ID NO: 859297 - RNA, 25 nt, Human
caaagcagauaggcacagaaaagca

SEQ ID NO: 859298 - RNA, 24 nt, Human
caaaguacugggauuacaggugua

SEQ ID NO: 859299 - RNA, 27 nt, Human
caacucugucuuccuaggaaccaggga

SEQ ID NO: 859300 - RNA, 19 nt, Human
caagcgauccacccacuuc

SEQ ID NO: 859301 - RNA, 24 nt, Human
caagguuucaccauguugaccagg

SEQ ID NO: 859302 - RNA, 22 nt, Human
caagugauucugcugccucagc

SEQ ID NO: 859303 - RNA, 24 nt, Human
cacaucuguaauccaagugcuuug

SEQ ID NO: 859304 - RNA, 24 nt, Human
caccacacccagcuaauuuuugua

SEQ ID NO: 859305 - RNA, 19 nt, Human
caccagggaguugugggag

SEQ ID NO: 859306 - RNA, 21 nt, Human
caccauguugaccaggcuggu

SEQ ID NO: 859307 - RNA, 22 nt, Human
caccauguugaccaggcugguc

SEQ ID NO: 859308 - RNA, 31 nt, Human
caccauguugaccaggcuggucacgaacucc

SEQ ID NO: 859309 - RNA, 21 nt, Human
cacugcacccagcuguaagac

SEQ ID NO: 859310 - RNA, 23 nt, Human
cagaaaggacagagggcuaaagg

SEQ ID NO: 859311 - RNA, 19 nt, Human
cagaaucugauggcagccc

SEQ ID NO: 859312 - RNA, 20 nt, Human
cagagugccaggugccucuc

SEQ ID NO: 859313 - RNA, 20 nt, Human
cagagugggcugggcugggc

SEQ ID NO: 859314 - RNA, 25 nt, Human
cagauaggcacagaaaagcaucuau

SEQ ID NO: 859315 - RNA, 21 nt, Human
cagcgacagaaacggaagaga

SEQ ID NO: 859316 - RNA, 20 nt, Human
cagcuuccugaguagcuggg

SEQ ID NO: 859317 - RNA, 23 nt, Human
caggugccuggaguacagggaca

SEQ ID NO: 859318 - RNA, 23 nt, Human
caguacagaaaggccaggugcca

SEQ ID NO: 859319 - RNA, 24 nt, Human
caucuguaauccaagugcuuuggg

SEQ ID NO: 859320 - RNA, 24 nt, Human
caugccaccacacccagcuaauuu

SEQ ID NO: 859321 - RNA, 18 nt, Human
cauggucaaagcagauag

SEQ ID NO: 859322 - RNA, 24 nt, Human
cauguugaccaggcuggucacgaa

SEQ ID NO: 859323 - RNA, 24 nt, Human
ccaaaaaaaaaacaaaaaacuaac

SEQ ID NO: 859324 - RNA, 21 nt, Human
ccaaaguacugggauuacagg

SEQ ID NO: 859325 - RNA, 24 nt, Human
ccaaaguacugggauuacaggugu

SEQ ID NO: 859326 - RNA, 22 nt, Human
ccacugcacccagcuguaagac

SEQ ID NO: 859327 - RNA, 19 nt, Human
ccacugcgcccagccggca

SEQ ID NO: 859328 - RNA, 21 nt, Human
ccacugcgcccagccggcagg

SEQ ID NO: 859329 - RNA, 21 nt, Human
ccacugcgcccagccggcagg

SEQ ID NO: 859330 - RNA, 21 nt, Human
ccagccaggcacaggcucaca

SEQ ID NO: 859331 - RNA, 19 nt, Human
ccagcccugauggagcugg

SEQ ID NO: 859332 - RNA, 18 nt, Human
cccaggcuggagugcagu

SEQ ID NO: 859333 - RNA, 19 nt, Human
cccgaguagccgggauuac

SEQ ID NO: 859334 - RNA, 24 nt, Human
cccgaguagccgggauuacaggcg

SEQ ID NO: 859335 - RNA, 22 nt, Human
ccucaagcgauccacccacuuc

SEQ ID NO: 859336 - RNA, 19 nt, Human
ccucuaagggcagaguggg

SEQ ID NO: 859337 - RNA, 23 nt, Human
ccugaguagcugggacuacaggu

SEQ ID NO: 859338 - RNA, 24 nt, Human
ccugaguagcugggacuacaggua

SEQ ID NO: 859339 - RNA, 24 nt, Human
ccugcccucaagcgauccacccac

SEQ ID NO: 859340 - RNA, 20 nt, Human
ccuggaguacagggacagca

SEQ ID NO: 859341 - RNA, 20 nt, Human
ccugugcaggcccgcagagu

SEQ ID NO: 859342 - RNA, 23 nt, Human
cgacugcagcgacagaaacggaa

SEQ ID NO: 859343 - RNA, 20 nt, Human
cgcaugccaccacacccagc

SEQ ID NO: 859344 - RNA, 22 nt, Human
cggaagagaguggaaucgaaaa

SEQ ID NO: 859345 - RNA, 21 nt, Human
cgggauuacaggcgcaugcca

SEQ ID NO: 859346 - RNA, 22 nt, Human
cgggauuacaggcgcaugccac

SEQ ID NO: 859347 - RNA, 24 nt, Human
cgggauuacaggcgcaugccacca

SEQ ID NO: 859348 - RNA, 22 nt, Human
cgguuucaagugauucugcugc

SEQ ID NO: 859349 - RNA, 25 nt, Human
cgguuucaagugauucugcugccuc

SEQ ID NO: 859350 - RNA, 23 nt, Human
cuaauuuuuguauuuuuaguaga

SEQ ID NO: 859351 - RNA, 27 nt, Human
cuagagauccucucaccucagcuuccu

SEQ ID NO: 859352 - RNA, 27 nt, Human
cuagagauccucucaccucagcuuccu

SEQ ID NO: 859353 - RNA, 24 nt, Human
cucaagcgauccacccacuucggc

SEQ ID NO: 859354 - RNA, 24 nt, Human
cucacaucuguaauccaagugcuu

SEQ ID NO: 859355 - RNA, 24 nt, Human
cucaccucagcuuccugaguagcu

SEQ ID NO: 859356 - RNA, 24 nt, Human
cucacugcaaccucugccuuccgg

SEQ ID NO: 859357 - RNA, 24 nt, Human
cucagcuuccugaguagcugggac

SEQ ID NO: 859358 - RNA, 25 nt, Human
cucauguuaaacuugaaagguuuuc

SEQ ID NO: 859359 - RNA, 18 nt, Human
cuccucuacuauuuuggc

SEQ ID NO: 859360 - RNA, 21 nt, Human
cuccucuacuauuuuggcucc

SEQ ID NO: 859361 - RNA, 23 nt, Human
cucuaccaaaaaaaaaacaaaaa

SEQ ID NO: 859362 - RNA, 21 nt, Human
cucugggaccagagagggccc

SEQ ID NO: 859363 - RNA, 19 nt, Human
cucuuuugcccaggcugga

SEQ ID NO: 859364 - RNA, 20 nt, Human
cugcaaccucugccuuccgg

SEQ ID NO: 859365 - RNA, 23 nt, Human
cugcaaccucugccuuccgguuu

SEQ ID NO: 859366 - RNA, 24 nt, Human
cugcaaccucugccuuccgguuuc

SEQ ID NO: 859367 - RNA, 21 nt, Human
cuggauacugauagcuucauc

SEQ ID NO: 859368 - RNA, 20 nt, Human
cuuccgguuucaagugauuc

SEQ ID NO: 859369 - RNA, 23 nt, Human
cuuuugcccaggcuggagugcag

SEQ ID NO: 859370 - RNA, 23 nt, Human
gaagggccucuaagggcagagug

SEQ ID NO: 859371 - RNA, 21 nt, Human
gacaggaaagggagggucuag

SEQ ID NO: 859372 - RNA, 21 nt, Human
gaccaacagugagacucuguc

SEQ ID NO: 859373 - RNA, 18 nt, Human
gaccaggguugcaggugc

SEQ ID NO: 859374 - RNA, 23 nt, Human
gacuacagguauauaccacugca

SEQ ID NO: 859375 - RNA, 18 nt, Human
gacuuagaggcucuccuu

SEQ ID NO: 859376 - RNA, 20 nt, Human
gagggggugggagguaagga

SEQ ID NO: 859377 - RNA, 25 nt, Human
gaguagcugggacuacagguauaua

SEQ ID NO: 859378 - RNA, 25 nt, Human
gaguguguguguaugaaguuaacuu

SEQ ID NO: 859379 - RNA, 24 nt, Human
gaucgcuugagcccaggaguucaa

SEQ ID NO: 859380 - RNA, 18 nt, Human
gauuacaggcgcaugcca

SEQ ID NO: 859381 - RNA, 18 nt, Human
gauuacagguguaagcca

SEQ ID NO: 859382 - RNA, 22 nt, Human
gauuacagguguaagccacugc

SEQ ID NO: 859383 - RNA, 22 nt, Human
gauuacagguguaagccacugc

SEQ ID NO: 859384 - RNA, 19 nt, Human
gcaugccaccacacccagc

SEQ ID NO: 859385 - RNA, 19 nt, Human
gcccaggcuggagugcagu

SEQ ID NO: 859386 - RNA, 24 nt, Human
gcgauccacccacuucggccuccc

SEQ ID NO: 859387 - RNA, 24 nt, Human
gcuaaaguacagaaacuauuucua

SEQ ID NO: 859388 - RNA, 20 nt, Human
gcucacugcaaccucugccu

SEQ ID NO: 859389 - RNA, 20 nt, Human
gcucuuuugcccaggcugga

SEQ ID NO: 859390 - RNA, 23 nt, Human
gcugccucagccucccgaguagc

SEQ ID NO: 859391 - RNA, 19 nt, Human
gcuggagugcaguugcacg

SEQ ID NO: 859392 - RNA, 23 nt, Human
ggacagagggcuaaagggccuug

SEQ ID NO: 859393 - RNA, 23 nt, Human
ggaucgcuugagcccaggaguuc

SEQ ID NO: 859394 - RNA, 22 nt, Human
ggauuacagguguaagccacug

SEQ ID NO: 859395 - RNA, 23 nt, Human
gggauuacaggcgcaugccacca

SEQ ID NO: 859396 - RNA, 22 nt, Human
gggcugggcugagcugagcugg

SEQ ID NO: 859397 - RNA, 18 nt, Human
ggggagaagcaccgccug

SEQ ID NO: 859398 - RNA, 24 nt, Human
gugauucugcugccucagccuccc

SEQ ID NO: 859399 - RNA, 23 nt, Human
guggaacagaacccagcagccuu

SEQ ID NO: 859400 - RNA, 24 nt, Human
guuuugcucuuuugcccaggcugg

SEQ ID NO: 859401 - RNA, 22 nt, Human
uaaaagccagauaaaacuacag

SEQ ID NO: 859402 - RNA, 18 nt, Human
uaagggcagagugggcug

SEQ ID NO: 859403 - RNA, 24 nt, Human
uaauuuuuguauuuuuaguagaga

SEQ ID NO: 859404 - RNA, 24 nt, Human
uacaggcgcaugccaccacaccca

SEQ ID NO: 859405 - RNA, 24 nt, Human
uacagguauauaccacugcaccca

SEQ ID NO: 859406 - RNA, 24 nt, Human
uacagguguaagccacugcgccca

SEQ ID NO: 859407 - RNA, 24 nt, Human
uaccaaaaaaaaaacaaaaaacua

SEQ ID NO: 859408 - RNA, 21 nt, Human
uaccuaccuguguccacucac

SEQ ID NO: 859409 - RNA, 24 nt, Human
uacugggauuacagguguaagcca

SEQ ID NO: 859410 - RNA, 22 nt, Human
uagagacaagguuucaccaugu

SEQ ID NO: 859411 - RNA, 20 nt, Human
uagcuggagaacaacucugu

SEQ ID NO: 859412 - RNA, 24 nt, Human
uaguagagacaagguuucaccaug

SEQ ID NO: 859413 - RNA, 26 nt, Human
uaguagagacaagguuucaccauguu

SEQ ID NO: 859414 - RNA, 20 nt, Human
uauauaccacugcacccagc

SEQ ID NO: 859415 - RNA, 19 nt, Human
uaucacuuuuucacauggu

SEQ ID NO: 859416 - RNA, 18 nt, Human
ucacugcaaccucugccu

SEQ ID NO: 859417 - RNA, 23 nt, Human
ucacugcaaccucugccuuccgg

SEQ ID NO: 859418 - RNA, 21 nt, Human
ucagccucccgaguagccggg

SEQ ID NO: 859419 - RNA, 23 nt, Human
ucagcuuccugaguagcugggac

SEQ ID NO: 859420 - RNA, 23 nt, Human
ucccaaaguacugggauuacagg

SEQ ID NO: 859421 - RNA, 20 nt, Human
uccccugaaaguccuuggag

SEQ ID NO: 859422 - RNA, 24 nt, Human
ucccgaguagccgggauuacaggc

SEQ ID NO: 859423 - RNA, 24 nt, Human
uccugaguagcugggacuacaggu

SEQ ID NO: 859424 - RNA, 21 nt, Human
uccugcccucaagcgauccac

SEQ ID NO: 859425 - RNA, 26 nt, Human
ucuaaggugccucaagaaaaugccag

SEQ ID NO: 859426 - RNA, 20 nt, Human
ucugucuuuggcucuguuuu

SEQ ID NO: 859427 - RNA, 22 nt, Human
ucuuuggggagaagggccucua

SEQ ID NO: 859428 - RNA, 24 nt, Human
ucuuuugcccaggcuggagugcag

SEQ ID NO: 859429 - RNA, 20 nt, Human
ugacaggaaagggagggucu

SEQ ID NO: 859430 - RNA, 23 nt, Human
ugacaggaaagggagggucuaga

SEQ ID NO: 859431 - RNA, 20 nt, Human
ugaccaggcuggucacgaac

SEQ ID NO: 859432 - RNA, 24 nt, Human
ugaccaggcuggucacgaacuccu

SEQ ID NO: 859433 - RNA, 23 nt, Human
ugagcccaggaguucaaaaccaa

SEQ ID NO: 859434 - RNA, 18 nt, Human
ugagcugggcgguggugg

SEQ ID NO: 859435 - RNA, 18 nt, Human
ugcccaggcuggagugca

SEQ ID NO: 859436 - RNA, 20 nt, Human
ugcccaggcuggagugcagu

SEQ ID NO: 859437 - RNA, 23 nt, Human
ugcccaggcuggagugcaguugc

SEQ ID NO: 859438 - RNA, 24 nt, Human
ugccucagccucccgaguagccgg

SEQ ID NO: 859439 - RNA, 24 nt, Human
ugccucucuccccuccucuacuau

SEQ ID NO: 859440 - RNA, 21 nt, Human
ugcucuuuugcccaggcugga

SEQ ID NO: 859441 - RNA, 24 nt, Human
ugcucuuuugcccaggcuggagug

SEQ ID NO: 859442 - RNA, 23 nt, Human
uggaacagaacccagcagccuuc

SEQ ID NO: 859443 - RNA, 21 nt, Human
uggagaacaacucugucuucc

SEQ ID NO: 859444 - RNA, 20 nt, Human
uggagugcaguugcacgauc

SEQ ID NO: 859445 - RNA, 23 nt, Human
uggagugcaguugcacgaucuug

SEQ ID NO: 859446 - RNA, 24 nt, Human
uggagugcaguugcacgaucuugg

SEQ ID NO: 859447 - RNA, 21 nt, Human
ugggacuacagguauauacca

SEQ ID NO: 859448 - RNA, 24 nt, Human
ugggacuacagguauauaccacug

SEQ ID NO: 859449 - RNA, 23 nt, Human
ugggaggccaagaagggaggauc

SEQ ID NO: 859450 - RNA, 19 nt, Human
ugggauuacagguguaagc

SEQ ID NO: 859451 - RNA, 21 nt, Human
ugggauuacagguguaagcca

SEQ ID NO: 859452 - RNA, 22 nt, Human
ugggauuacagguguaagccac

SEQ ID NO: 859453 - RNA, 22 nt, Human
ugggauuacagguguaagccac

SEQ ID NO: 859454 - RNA, 24 nt, Human
ugggauuacagguguaagccacug

SEQ ID NO: 859455 - RNA, 20 nt, Human
ugggcugagcugagcugggc

SEQ ID NO: 859456 - RNA, 19 nt, Human
ugggcugggcugggcugag

SEQ ID NO: 859457 - RNA, 20 nt, Human
ugggcugggcugggcugagc

SEQ ID NO: 859458 - RNA, 26 nt, Human
ugggggaaacuggaggauaugagugu

SEQ ID NO: 859459 - RNA, 22 nt, Human
uggggugaaaugcccccuucag

SEQ ID NO: 859460 - RNA, 23 nt, Human
ugguggggagaagcaccgccugg

SEQ ID NO: 859461 - RNA, 22 nt, Human
ugugcugcuccacauugucaaa

SEQ ID NO: 859462 - RNA, 21 nt, Human
uuaccuaccuguguccacuca

SEQ ID NO: 859463 - RNA, 24 nt, Human
uuaguagagacaagguuucaccau

SEQ ID NO: 859464 - RNA, 22 nt, Human
uucaaaaccaaccuggaccaac

SEQ ID NO: 859465 - RNA, 23 nt, Human
uucaaaaccaaccuggaccaaca

SEQ ID NO: 859466 - RNA, 23 nt, Human
uucaagugauucugcugccucag

SEQ ID NO: 859467 - RNA, 20 nt, Human
uucaggucugggaucccagg

SEQ ID NO: 859468 - RNA, 20 nt, Human
uuccucaagaaagaccagcc

SEQ ID NO: 859469 - RNA, 22 nt, Human
uuccugggcucuagagauccuc

SEQ ID NO: 859470 - RNA, 23 nt, Human
uuccugggcucuagagauccucu

SEQ ID NO: 859471 - RNA, 22 nt, Human
uugcccaggcuggagugcaguu

SEQ ID NO: 859472 - RNA, 22 nt, Human
uugcucuuuugcccaggcugga

SEQ ID NO: 859473 - RNA, 24 nt, Human
uugcucuuuugcccaggcuggagu

SEQ ID NO: 859474 - RNA, 21 nt, Human
uuucaagugauucugcugccu

SEQ ID NO: 859475 - RNA, 24 nt, Human
uuucaccauguugaccaggcuggu

SEQ ID NO: 859476 - RNA, 24 nt, Human
uuuugcucuuuugcccaggcugga

SEQ ID NO: 859477 - RNA, 24 nt, Human
uuuuuaguagagacaagguuucac

SEQ ID NO: 859478 - RNA, 20 nt, Human
uuuuuguauuuuuaguagag

SEQ ID NO: 859479 - RNA, 20 nt, Human
aaaaaauaaauacaacuguc

SEQ ID NO: 859480 - RNA, 22 nt, Human
aaagaucuuaguucuguaagac

SEQ ID NO: 859481 - RNA, 23 nt, Human
acaguggcuuucugucgucuccc

SEQ ID NO: 859482 - RNA, 21 nt, Human
accuaugcccaccacaacaga

SEQ ID NO: 859483 - RNA, 23 nt, Human
accuaugcccaccacaacagaga

SEQ ID NO: 859484 - RNA, 18 nt, Human
acugcugcuugaauguuc

SEQ ID NO: 859485 - RNA, 21 nt, Human
agaaaaauagaaaaugauagc

SEQ ID NO: 859486 - RNA, 19 nt, Human
agacaugaaauacagcagc

SEQ ID NO: 859487 - RNA, 18 nt, Human
agagagccuugggacggc

SEQ ID NO: 859488 - RNA, 21 nt, Human
agucagacugaggagaaccug

SEQ ID NO: 859489 - RNA, 26 nt, Human
aguugugagagccacaacagaggcuu

SEQ ID NO: 859490 - RNA, 18 nt, Human
aucugcacgaacaugaga

SEQ ID NO: 859491 - RNA, 24 nt, Human
caccuaugcccaccacaacagaga

SEQ ID NO: 859492 - RNA, 22 nt, Human
cacguucaaguggcuuccagug

SEQ ID NO: 859493 - RNA, 24 nt, Human
caucauaaauucagagugauguuu

SEQ ID NO: 859494 - RNA, 19 nt, Human
ccacccuccucaaaaggaa

SEQ ID NO: 859495 - RNA, 18 nt, Human
ccaguggauuuuuccagc

SEQ ID NO: 859496 - RNA, 18 nt, Human
cccuggugcacccguggg

SEQ ID NO: 859497 - RNA, 23 nt, Human
ccuccucaaaaggacacguucaa

SEQ ID NO: 859498 - RNA, 18 nt, Human
ccuuuuaaccaagaagua

SEQ ID NO: 859499 - RNA, 26 nt, Human
cuccccacaaacuuuuuuaaacaaaa

SEQ ID NO: 859500 - RNA, 20 nt, Human
cuccucaaaaggacacguuu

SEQ ID NO: 859501 - RNA, 22 nt, Human
cugaagacccuucaucuuccuu

SEQ ID NO: 859502 - RNA, 23 nt, Human
cugaagacccuucaucuuccuua

SEQ ID NO: 859503 - RNA, 26 nt, Human
cuuuccuccccacaaacuuuuuuuuu

SEQ ID NO: 859504 - RNA, 19 nt, Human
cuuuugggcguggcuccac

SEQ ID NO: 859505 - RNA, 20 nt, Human
gaacagguaguucgcauuua

SEQ ID NO: 859506 - RNA, 22 nt, Human
gacugaggagaaccuggauucc

SEQ ID NO: 859507 - RNA, 23 nt, Human
gcagcaguccugguuuacucucu

SEQ ID NO: 859508 - RNA, 18 nt, Human
gcccaauauuugucuuug

SEQ ID NO: 859509 - RNA, 21 nt, Human
ggaagcugugcgggcagcagu

SEQ ID NO: 859510 - RNA, 22 nt, Human
guaguaagguugcuuuccugau

SEQ ID NO: 859511 - RNA, 25 nt, Human
gucaaguccuucccaucagaccuca

SEQ ID NO: 859512 - RNA, 20 nt, Human
gugaagggacauucucuaca

SEQ ID NO: 859513 - RNA, 19 nt, Human
guggcuuccaguguuaaaa

SEQ ID NO: 859514 - RNA, 18 nt, Human
guucuuggaggcuguuuc

SEQ ID NO: 859515 - RNA, 18 nt, Human
uaaaggaaagaggugucu

SEQ ID NO: 859516 - RNA, 18 nt, Human
uaaaggaaagaggugucu

SEQ ID NO: 859517 - RNA, 23 nt, Human
uacucuugacagccaagauacau

SEQ ID NO: 859518 - RNA, 18 nt, Human
uagcaggaguagcuccag

SEQ ID NO: 859519 - RNA, 22 nt, Human
ucagaccucagcccuggugcac

SEQ ID NO: 859520 - RNA, 18 nt, Human
ucagacugaggagaaccu

SEQ ID NO: 859521 - RNA, 19 nt, Human
ucaucuuccuuaucacaag

SEQ ID NO: 859522 - RNA, 20 nt, Human
ucauuugaauauuaauggcu

SEQ ID NO: 859523 - RNA, 20 nt, Human
uccucaaaaggacacguuca

SEQ ID NO: 859524 - RNA, 23 nt, Human
uccuccccacaaacuuuuuuaaa

SEQ ID NO: 859525 - RNA, 22 nt, Human
ucucugaaaaagaucuuaguuc

SEQ ID NO: 859526 - RNA, 24 nt, Human
ucucugaaaaagaucuuaguucug

SEQ ID NO: 859527 - RNA, 25 nt, Human
ucuguacuguugugucccacccucc

SEQ ID NO: 859528 - RNA, 22 nt, Human
ugaaaacacugcaacagugaac

SEQ ID NO: 859529 - RNA, 24 nt, Human
ugaaauacagcagcagguuaccag

SEQ ID NO: 859530 - RNA, 22 nt, Human
ugaagacccuucaucuuccuua

SEQ ID NO: 859531 - RNA, 21 nt, Human
ugaauguucuuggaggcuguu

SEQ ID NO: 859532 - RNA, 21 nt, Human
ugaccucagugauguggagcu

SEQ ID NO: 859533 - RNA, 20 nt, Human
ugacuuagggaaagaugagu

SEQ ID NO: 859534 - RNA, 18 nt, Human
ugagacagaggugccagc

SEQ ID NO: 859535 - RNA, 19 nt, Human
ugagacagaggugccagcu

SEQ ID NO: 859536 - RNA, 20 nt, Human
ugagacagaggugccagcug

SEQ ID NO: 859537 - RNA, 18 nt, Human
ugagcuuuuccauccgua

SEQ ID NO: 859538 - RNA, 20 nt, Human
ugauguggagcuugaugacu

SEQ ID NO: 859539 - RNA, 26 nt, Human
ugauuuccugcccaauauuugucuuu

SEQ ID NO: 859540 - RNA, 22 nt, Human
ugcaacagugaacuuuugcauc

SEQ ID NO: 859541 - RNA, 19 nt, Human
uggaaaccgggcucaguga

SEQ ID NO: 859542 - RNA, 23 nt, Human
uguguguuuuggucauuuuuccc

SEQ ID NO: 859543 - RNA, 18 nt, Human
uucaccugaguucugagc

SEQ ID NO: 859544 - RNA, 21 nt, Human
uucuucucugaagacccuuca

SEQ ID NO: 859545 - RNA, 23 nt, Human
uugaaaacacugcaacagugaac

SEQ ID NO: 859546 - RNA, 20 nt, Human
uugaagaaaacuuggcuguc

SEQ ID NO: 859547 - RNA, 24 nt, Human
uugacagccaagauacauuucagu

SEQ ID NO: 859548 - RNA, 19 nt, Human
uuguaaaugugugugugug

SEQ ID NO: 859549 - RNA, 20 nt, Human
uuguaaaugugugugugugu

SEQ ID NO: 859550 - RNA, 19 nt, Human
uuuauuguaacuuaaaaaa

SEQ ID NO: 859551 - RNA, 21 nt, Human
aaacaaauuuaaugaccaaau

SEQ ID NO: 859552 - RNA, 26 nt, Human
aaacaggagagggagaggagggaccc

SEQ ID NO: 859553 - RNA, 24 nt, Human
aaagacagaaagagacagaaagaa

SEQ ID NO: 859554 - RNA, 23 nt, Human
aaagagacagaaagaagcccaga

SEQ ID NO: 859555 - RNA, 22 nt, Human
aacagagagggggagacagacc

SEQ ID NO: 859556 - RNA, 19 nt, Human
aacaguggccaggcccucc

SEQ ID NO: 859557 - RNA, 21 nt, Human
aaccccagaaacagugggggu

SEQ ID NO: 859558 - RNA, 20 nt, Human
aagaagcccagacagacacc

SEQ ID NO: 859559 - RNA, 24 nt, Human
aagacagaaagagacagaaagaag

SEQ ID NO: 859560 - RNA, 22 nt, Human
aagcccagacagacaccaagaa

SEQ ID NO: 859561 - RNA, 22 nt, Human
aagcgcuccguagcagaggcuu

SEQ ID NO: 859562 - RNA, 22 nt, Human
acagcgcagacauaaacagaga

SEQ ID NO: 859563 - RNA, 19 nt, Human
accuuuccuguggcccagg

SEQ ID NO: 859564 - RNA, 23 nt, Human
acuaaccuccggcccacgcacgc

SEQ ID NO: 859565 - RNA, 18 nt, Human
acuugucccuccaaugcu

SEQ ID NO: 859566 - RNA, 20 nt, Human
agaaacaguggggguggggg

SEQ ID NO: 859567 - RNA, 21 nt, Human
agaaagacagaaagagacaga

SEQ ID NO: 859568 - RNA, 23 nt, Human
agaaagacagaaagagacagaaa

SEQ ID NO: 859569 - RNA, 24 nt, Human
agaaagacagaggcaggagacagg

SEQ ID NO: 859570 - RNA, 18 nt, Human
agaaagagacagaaagaa

SEQ ID NO: 859571 - RNA, 23 nt, Human
agaaagagacagaaagaagccca

SEQ ID NO: 859572 - RNA, 26 nt, Human
agacagaaagacagaaagagacagaa

SEQ ID NO: 859573 - RNA, 19 nt, Human
agacagacagcacgggagg

SEQ ID NO: 859574 - RNA, 23 nt, Human
agagacagaaagacagaaagaga

SEQ ID NO: 859575 - RNA, 18 nt, Human
agagagagggggagaaag

SEQ ID NO: 859576 - RNA, 19 nt, Human
agagagggggagaaaggga

SEQ ID NO: 859577 - RNA, 19 nt, Human
agagauaaaggcugagaga

SEQ ID NO: 859578 - RNA, 21 nt, Human
agagauaugaccccaaggucc

SEQ ID NO: 859579 - RNA, 25 nt, Human
agagcugcccccauccucccugccu

SEQ ID NO: 859580 - RNA, 20 nt, Human
agaggcaugaggagucccua

SEQ ID NO: 859581 - RNA, 23 nt, Human
agagggggagacagacagcacgg

SEQ ID NO: 859582 - RNA, 19 nt, Human
agaggggggcugguggggc

SEQ ID NO: 859583 - RNA, 22 nt, Human
agccagccagagcacuggaaag

SEQ ID NO: 859584 - RNA, 20 nt, Human
agcuggccuccggcaagggg

SEQ ID NO: 859585 - RNA, 26 nt, Human
aggcagaaggagagaugggaaccuaa

SEQ ID NO: 859586 - RNA, 23 nt, Human
aggcaggagacaggggggacccc

SEQ ID NO: 859587 - RNA, 21 nt, Human
aggcagguaagagacagacag

SEQ ID NO: 859588 - RNA, 18 nt, Human
aggcccagagugaggcag

SEQ ID NO: 859589 - RNA, 20 nt, Human
aggccccgugauccacagcc

SEQ ID NO: 859590 - RNA, 23 nt, Human
aggcggaggaagggaaaauugug

SEQ ID NO: 859591 - RNA, 19 nt, Human
aggcucggaggucaggaac

SEQ ID NO: 859592 - RNA, 26 nt, Human
agggaaccccagaaacagugggggug

SEQ ID NO: 859593 - RNA, 23 nt, Human
agggggaagaaggggcccagagc

SEQ ID NO: 859594 - RNA, 27 nt, Human
aucuugucugccuccauccagcucuca

SEQ ID NO: 859595 - RNA, 22 nt, Human
auggcccugacaccugagaggc

SEQ ID NO: 859596 - RNA, 23 nt, Human
caaaacccagagauaaaggcuga

SEQ ID NO: 859597 - RNA, 20 nt, Human
caccaagaaagacagaggca

SEQ ID NO: 859598 - RNA, 21 nt, Human
cacuaguucauggggccaucu

SEQ ID NO: 859599 - RNA, 25 nt, Human
cacugagcaggccuggaaucagcug

SEQ ID NO: 859600 - RNA, 18 nt, Human
cagaaacagugggggugg

SEQ ID NO: 859601 - RNA, 19 nt, Human
cagacagcacgggaggcag

SEQ ID NO: 859602 - RNA, 18 nt, Human
cagacagcucucauccug

SEQ ID NO: 859603 - RNA, 22 nt, Human
cagagccuaaggcagagagaga

SEQ ID NO: 859604 - RNA, 19 nt, Human
cagcaccggaaccaaacug

SEQ ID NO: 859605 - RNA, 24 nt, Human
caggagccgggugugggggcaugg

SEQ ID NO: 859606 - RNA, 22 nt, Human
caggauaccaccauuccaucuc

SEQ ID NO: 859607 - RNA, 22 nt, Human
caggcagguaagagacagacag

SEQ ID NO: 859608 - RNA, 20 nt, Human
caguggggguggggguuguc

SEQ ID NO: 859609 - RNA, 20 nt, Human
caucuugucugccuccaucc

SEQ ID NO: 859610 - RNA, 18 nt, Human
cauuuggggaguguaaac

SEQ ID NO: 859611 - RNA, 22 nt, Human
ccagacagacaccaagaaagac

SEQ ID NO: 859612 - RNA, 21 nt, Human
ccagccacgaaaggcccugcc

SEQ ID NO: 859613 - RNA, 23 nt, Human
ccagcuggccuccggcaagggga

SEQ ID NO: 859614 - RNA, 20 nt, Human
ccagguuugagggaaggggg

SEQ ID NO: 859615 - RNA, 18 nt, Human
cccagacagacaccaaga

SEQ ID NO: 859616 - RNA, 21 nt, Human
ccccccucccucuacacucaa

SEQ ID NO: 859617 - RNA, 22 nt, Human
ccccccucccucuacacucaag

SEQ ID NO: 859618 - RNA, 19 nt, Human
ccccuggggcuguauuacu

SEQ ID NO: 859619 - RNA, 20 nt, Human
ccccuggggcuguauuacuc

SEQ ID NO: 859620 - RNA, 24 nt, Human
cccuaggccccgacuuggugaccc

SEQ ID NO: 859621 - RNA, 20 nt, Human
cccugcgguggagacagagc

SEQ ID NO: 859622 - RNA, 21 nt, Human
ccggguccgggugcaccgcug

SEQ ID NO: 859623 - RNA, 18 nt, Human
ccuccggcaaggggagga

SEQ ID NO: 859624 - RNA, 26 nt, Human
ccugcgguggagacagagccuaaggc

SEQ ID NO: 859625 - RNA, 19 nt, Human
ccuggguucccacaggccc

SEQ ID NO: 859626 - RNA, 20 nt, Human
cgccugagaauguuccgggu

SEQ ID NO: 859627 - RNA, 21 nt, Human
cgccuggguucccacaggccc

SEQ ID NO: 859628 - RNA, 22 nt, Human
cgggacaguggcuagcacggag

SEQ ID NO: 859629 - RNA, 20 nt, Human
cgggcccugcggccagcugg

SEQ ID NO: 859630 - RNA, 20 nt, Human
cuaccaucugacccuucuca

SEQ ID NO: 859631 - RNA, 18 nt, Human
cuagagagguggaaaugu

SEQ ID NO: 859632 - RNA, 20 nt, Human
cugagagauaugaccccaag

SEQ ID NO: 859633 - RNA, 18 nt, Human
cugcaugcacacuugucc

SEQ ID NO: 859634 - RNA, 20 nt, Human
cugcaugcacacuugucccu

SEQ ID NO: 859635 - RNA, 21 nt, Human
cugcaugcacacuugucccuc

SEQ ID NO: 859636 - RNA, 20 nt, Human
cugcccccauccucccugcc

SEQ ID NO: 859637 - RNA, 21 nt, Human
cugcccccauccucccugccu

SEQ ID NO: 859638 - RNA, 19 nt, Human
cugcugcuuccuccucugg

SEQ ID NO: 859639 - RNA, 25 nt, Human
cuggaaucagcugccuuguugggga

SEQ ID NO: 859640 - RNA, 20 nt, Human
cuugucugccuccauccagc

SEQ ID NO: 859641 - RNA, 22 nt, Human
gaaaggcccugccagcuggccu

SEQ ID NO: 859642 - RNA, 20 nt, Human
gacagaaagacagaaagaga

SEQ ID NO: 859643 - RNA, 20 nt, Human
gacagagagggacagugaga

SEQ ID NO: 859644 - RNA, 25 nt, Human
gacagugagagcagaggccuagaga

SEQ ID NO: 859645 - RNA, 23 nt, Human
gacaguggcuagcacggagcccc

SEQ ID NO: 859646 - RNA, 23 nt, Human
gagcugcccccauccucccugcc

SEQ ID NO: 859647 - RNA, 20 nt, Human
gaggcagaaggagagauggg

SEQ ID NO: 859648 - RNA, 18 nt, Human
gaggcagcugcgcugggg

SEQ ID NO: 859649 - RNA, 18 nt, Human
gaggguccuucaggcuug

SEQ ID NO: 859650 - RNA, 18 nt, Human
gaggucaggaaccgugga

SEQ ID NO: 859651 - RNA, 24 nt, Human
gaguggccuugaggaagcaacauc

SEQ ID NO: 859652 - RNA, 19 nt, Human
gaugguggugugugugggu

SEQ ID NO: 859653 - RNA, 26 nt, Human
gcaggagacagggugggaggucgacc

SEQ ID NO: 859654 - RNA, 22 nt, Human
gcagggggcuccauggggcggg

SEQ ID NO: 859655 - RNA, 21 nt, Human
gcccgguggcugagucaccag

SEQ ID NO: 859656 - RNA, 21 nt, Human
gcccugacaccugagaggcca

SEQ ID NO: 859657 - RNA, 22 nt, Human
gccuaccaucugacccuucuca

SEQ ID NO: 859658 - RNA, 19 nt, Human
gccuaucaccaagggcuga

SEQ ID NO: 859659 - RNA, 21 nt, Human
gccuugaggaagcaacaucuu

SEQ ID NO: 859660 - RNA, 21 nt, Human
gcucggaggucaggaaccgug

SEQ ID NO: 859661 - RNA, 21 nt, Human
ggaaccccagaaacagugggg

SEQ ID NO: 859662 - RNA, 18 nt, Human
ggaagaaggggcccagag

SEQ ID NO: 859663 - RNA, 21 nt, Human
ggaaucagcugccuuguuggg

SEQ ID NO: 859664 - RNA, 18 nt, Human
ggagacagggugggagag

SEQ ID NO: 859665 - RNA, 21 nt, Human
ggagacagggugggagagaug

SEQ ID NO: 859666 - RNA, 24 nt, Human
ggagaggaaggcggaggaagggaa

SEQ ID NO: 859667 - RNA, 24 nt, Human
ggccagacagccaagugguuucua

SEQ ID NO: 859668 - RNA, 19 nt, Human
ggcucggaggucaggaacc

SEQ ID NO: 859669 - RNA, 23 nt, Human
ggcugagagacagacagagaggg

SEQ ID NO: 859670 - RNA, 23 nt, Human
gggacaguggcuagcacggagaa

SEQ ID NO: 859671 - RNA, 21 nt, Human
gggccccgcacacuaaccucc

SEQ ID NO: 859672 - RNA, 23 nt, Human
gggcggcagggggcuccaugggg

SEQ ID NO: 859673 - RNA, 21 nt, Human
gggcuccauggggcgggcccu

SEQ ID NO: 859674 - RNA, 22 nt, Human
gggcugguggggcugagaaggg

SEQ ID NO: 859675 - RNA, 26 nt, Human
ggggaagaaggggcccagagccugga

SEQ ID NO: 859676 - RNA, 18 nt, Human
ggggauggggauggggca

SEQ ID NO: 859677 - RNA, 20 nt, Human
ggggauggggcaggcggugg

SEQ ID NO: 859678 - RNA, 20 nt, Human
gggguggggguugucugaga

SEQ ID NO: 859679 - RNA, 18 nt, Human
ggguuccuguuucauuuc

SEQ ID NO: 859680 - RNA, 18 nt, Human
gguagaguccccccuccc

SEQ ID NO: 859681 - RNA, 24 nt, Human
gugaggcagaaggagagaugggaa

SEQ ID NO: 859682 - RNA, 22 nt, Human
gugggagagaugagaaagggaa

SEQ ID NO: 859683 - RNA, 21 nt, Human
guuccggguccgggugcaccg

SEQ ID NO: 859684 - RNA, 18 nt, Human
uaaggcagagagagaggg

SEQ ID NO: 859685 - RNA, 21 nt, Human
uagcugcugcuuccuccucug

SEQ ID NO: 859686 - RNA, 25 nt, Human
uaguucauggggccaucugaggauc

SEQ ID NO: 859687 - RNA, 19 nt, Human
uaucaccaagggcugauac

SEQ ID NO: 859688 - RNA, 21 nt, Human
uauuacucaguggucaggguu

SEQ ID NO: 859689 - RNA, 25 nt, Human
uauuacucaguggucaggguucugc

SEQ ID NO: 859690 - RNA, 19 nt, Human
uccaaugcugucucacucu

SEQ ID NO: 859691 - RNA, 24 nt, Human
uccaggccuccuuugacccacuuc

SEQ ID NO: 859692 - RNA, 22 nt, Human
uccccccucccucuacacucaa

SEQ ID NO: 859693 - RNA, 21 nt, Human
ucgcucugagcaucuugucug

SEQ ID NO: 859694 - RNA, 23 nt, Human
ucggaggucaggaaccguggacu

SEQ ID NO: 859695 - RNA, 20 nt, Human
ucuaggccuggguuccuguu

SEQ ID NO: 859696 - RNA, 22 nt, Human
ucucacucuggauggcccugac

SEQ ID NO: 859697 - RNA, 26 nt, Human
ucugcugggggagcaggagccgggug

SEQ ID NO: 859698 - RNA, 18 nt, Human
ugaccaaaugauagacug

SEQ ID NO: 859699 - RNA, 27 nt, Human
ugagaaggguagaguccccccucccuc

SEQ ID NO: 859700 - RNA, 23 nt, Human
ugagagacagacagagagggaca

SEQ ID NO: 859701 - RNA, 22 nt, Human
ugagagcagaggccuagagagg

SEQ ID NO: 859702 - RNA, 19 nt, Human
ugagaugguggugugugug

SEQ ID NO: 859703 - RNA, 19 nt, Human
ugaggaagcaacaucuuuc

SEQ ID NO: 859704 - RNA, 18 nt, Human
ugccuccauccagcucuc

SEQ ID NO: 859705 - RNA, 19 nt, Human
ugcggccagcugggggcag

SEQ ID NO: 859706 - RNA, 21 nt, Human
ugcgguggagacagagccuaa

SEQ ID NO: 859707 - RNA, 21 nt, Human
uggagacagagccuaaggcag

SEQ ID NO: 859708 - RNA, 18 nt, Human
uggcuagcacggagcccu

SEQ ID NO: 859709 - RNA, 24 nt, Human
ugggcagaggggggcugguggggc

SEQ ID NO: 859710 - RNA, 21 nt, Human
ugggggagcaggagccgggug

SEQ ID NO: 859711 - RNA, 19 nt, Human
ugguggggcugagaagggu

SEQ ID NO: 859712 - RNA, 19 nt, Human
ugguugggcagaggggggc

SEQ ID NO: 859713 - RNA, 20 nt, Human
ugguugggcagaggggggcu

SEQ ID NO: 859714 - RNA, 23 nt, Human
uguaaacaaauuuaaugaccaaa

SEQ ID NO: 859715 - RNA, 23 nt, Human
ugucaggcacuucgcucgggccu

SEQ ID NO: 859716 - RNA, 22 nt, Human
ugucugagaugagacuagaccc

SEQ ID NO: 859717 - RNA, 23 nt, Human
ugugugcccccucaacaguggcc

SEQ ID NO: 859718 - RNA, 23 nt, Human
uuccaggccuccuuugacccacu

SEQ ID NO: 859719 - RNA, 22 nt, Human
uugcccugugugcccccucaac

SEQ ID NO: 859720 - RNA, 19 nt, Human
uuucaccuugggcccugcg

SEQ ID NO: 859721 - RNA, 19 nt, Human
uuuccaggccuccuuugac

SEQ ID NO: 859722 - RNA, 23 nt, Human
uuucugagagauaugaccccaag

SEQ ID NO: 859723 - RNA, 18 nt, Human
uuuuuuuuuuauagcaaa

SEQ ID NO: 859724 - RNA, 22 nt, Human
aagcuuuacucagaggaacagc

SEQ ID NO: 859725 - RNA, 18 nt, Human
agcaaauggcccccuccc

SEQ ID NO: 859726 - RNA, 24 nt, Human
agcacagggauugggggacuucca

SEQ ID NO: 859727 - RNA, 19 nt, Human
aggcagagcugcugggagg

SEQ ID NO: 859728 - RNA, 20 nt, Human
auccgcccuccccgcuccuc

SEQ ID NO: 859729 - RNA, 22 nt, Human
caaauggcccccucccaucccu

SEQ ID NO: 859730 - RNA, 25 nt, Human
cagaggaacagcaaauggcccccuc

SEQ ID NO: 859731 - RNA, 18 nt, Human
cagcaaauggcccccucc

SEQ ID NO: 859732 - RNA, 24 nt, Human
cagcaaauggcccccucccauccc

SEQ ID NO: 859733 - RNA, 20 nt, Human
ccauccccucaucgggaucc

SEQ ID NO: 859734 - RNA, 19 nt, Human
ccccagcccugggauggcg

SEQ ID NO: 859735 - RNA, 28 nt, Human
cccccaagcccacgaucugggggcaggg

SEQ ID NO: 859736 - RNA, 18 nt, Human
cccccucccaucccugcu

SEQ ID NO: 859737 - RNA, 20 nt, Human
ccccugggauagaauccugg

SEQ ID NO: 859738 - RNA, 19 nt, Human
cgaggacccuucugccucc

SEQ ID NO: 859739 - RNA, 22 nt, Human
cugcugggaggaagaagaagaa

SEQ ID NO: 859740 - RNA, 18 nt, Human
gauccgcccuccccgcuc

SEQ ID NO: 859741 - RNA, 20 nt, Human
gcugggaggaagaagaagaa

SEQ ID NO: 859742 - RNA, 20 nt, Human
ggacccagaaaacccccugg

SEQ ID NO: 859743 - RNA, 19 nt, Human
ggcgcgguccauccccuca

SEQ ID NO: 859744 - RNA, 22 nt, Human
ggcuguggcuuccaggcugcag

SEQ ID NO: 859745 - RNA, 20 nt, Human
uccccgcuccuccccagccc

SEQ ID NO: 859746 - RNA, 21 nt, Human
uccccgcuccuccccagcccu

SEQ ID NO: 859747 - RNA, 21 nt, Human
uccccgugcuugagagggcuc

SEQ ID NO: 859748 - RNA, 23 nt, Human
uccgcccuccccgcuccucccca

SEQ ID NO: 859749 - RNA, 21 nt, Human
uccugaaaugggcgaggaccc

SEQ ID NO: 859750 - RNA, 22 nt, Human
ugcagcuuucuugcuguccccc

SEQ ID NO: 859751 - RNA, 23 nt, Human
uggcaacaccucaagccuguggg

SEQ ID NO: 859752 - RNA, 23 nt, Human
uggcuuccaggcugcagauuccu

SEQ ID NO: 859753 - RNA, 23 nt, Human
ugggauagaauccuggcaacacc

SEQ ID NO: 859754 - RNA, 25 nt, Human
ugggggacccagaaaacccccuggg

SEQ ID NO: 859755 - RNA, 23 nt, Human
ugggggacuuccaggcagagcug

SEQ ID NO: 859756 - RNA, 24 nt, Human
ugggggcaggagcacagggauugg

SEQ ID NO: 859757 - RNA, 18 nt, Human
uuugcagcuuucuugcug

SEQ ID NO: 859758 - RNA, 23 nt, Human
uuuucaugcagaacaagcuuuac

SEQ ID NO: 859759 - RNA, 23 nt, Human
aaagugcuguagcucacuggcuc

SEQ ID NO: 859760 - RNA, 23 nt, Human
acagcagaggcuguuagaaaccu

SEQ ID NO: 859761 - RNA, 23 nt, Human
acuucagaaauuucaaaaacaac

SEQ ID NO: 859762 - RNA, 21 nt, Human
agaggcuguuagaaaccuugg

SEQ ID NO: 859763 - RNA, 19 nt, Human
caacagcagaggcuguuag

SEQ ID NO: 859764 - RNA, 19 nt, Human
cauguuacacaaauuuucc

SEQ ID NO: 859765 - RNA, 22 nt, Human
gagagacagcacuuuuuauaca

SEQ ID NO: 859766 - RNA, 20 nt, Human
gcauuuugguauauaacacu

SEQ ID NO: 859767 - RNA, 22 nt, Human
uacaacagcagaggcuguuaga

SEQ ID NO: 859768 - RNA, 20 nt, Human
uacccaaaucuugaggcauu

SEQ ID NO: 859769 - RNA, 22 nt, Human
uaccucaaaaacauguuacaca

SEQ ID NO: 859770 - RNA, 19 nt, Human
uacugagagacagcacuuu

SEQ ID NO: 859771 - RNA, 21 nt, Human
uacugagagacagcacuuuuu

SEQ ID NO: 859772 - RNA, 19 nt, Human
uauacaacagcagaggcug

SEQ ID NO: 859773 - RNA, 24 nt, Human
uauuuacaacuuacagauuuuaca

SEQ ID NO: 859774 - RNA, 22 nt, Human
uggcauuuugguauauaacacu

SEQ ID NO: 859775 - RNA, 23 nt, Human
uuuuuauacaacagcagaggcug

SEQ ID NO: 859776 - RNA, 19 nt, Human
aaaaaaccucaacacaaga

SEQ ID NO: 859777 - RNA, 24 nt, Human
aaaaacauucucugcaaaugagga

SEQ ID NO: 859778 - RNA, 23 nt, Human
aaagacaaaaaaaaaagcuccug

SEQ ID NO: 859779 - RNA, 26 nt, Human
aaauaaccagugaaaacccaugaagc

SEQ ID NO: 859780 - RNA, 18 nt, Human
aaauaaccagugaacagc

SEQ ID NO: 859781 - RNA, 23 nt, Human
aaauaaccagugaacagcaacau

SEQ ID NO: 859782 - RNA, 20 nt, Human
aaauuaguaggcucaaauaa

SEQ ID NO: 859783 - RNA, 19 nt, Human
aacauuuuaucuuccuuua

SEQ ID NO: 859784 - RNA, 20 nt, Human
aagaaggguaggaggcggug

SEQ ID NO: 859785 - RNA, 21 nt, Human
aagcaaugcugccuuggccuc

SEQ ID NO: 859786 - RNA, 22 nt, Human
aagcagaagccgaugggcagag

SEQ ID NO: 859787 - RNA, 22 nt, Human
aagcagaagccgaugggcagag

SEQ ID NO: 859788 - RNA, 22 nt, Human
aagcagaagccggucggcagag

SEQ ID NO: 859789 - RNA, 21 nt, Human
aagcuacacauuuuuucccug

SEQ ID NO: 859790 - RNA, 26 nt, Human
aagcugcuccuccucuggcucuucca

SEQ ID NO: 859791 - RNA, 20 nt, Human
acaagaaaggaacuuucagc

SEQ ID NO: 859792 - RNA, 23 nt, Human
acacauuuuuucccuggagguuc

SEQ ID NO: 859793 - RNA, 21 nt, Human
acagacagcaugaaagggaac

SEQ ID NO: 859794 - RNA, 19 nt, Human
accaguauacacacaugca

SEQ ID NO: 859795 - RNA, 19 nt, Human
accaugccagauguagcau

SEQ ID NO: 859796 - RNA, 19 nt, Human
accuggaggcugcaaggcu

SEQ ID NO: 859797 - RNA, 18 nt, Human
aggaggcggugguggugg

SEQ ID NO: 859798 - RNA, 25 nt, Human
aggcgguggagggggagccuggggc

SEQ ID NO: 859799 - RNA, 23 nt, Human
aggcucaaauaaaaaucugaaac

SEQ ID NO: 859800 - RNA, 19 nt, Human
auacuaaaguacugaaacc

SEQ ID NO: 859801 - RNA, 22 nt, Human
aucaaaacauguccuaauuuua

SEQ ID NO: 859802 - RNA, 18 nt, Human
auccucuccuuguucuug

SEQ ID NO: 859803 - RNA, 20 nt, Human
augaaagggaaccgcauaca

SEQ ID NO: 859804 - RNA, 19 nt, Human
augacauuuucccauuuuu

SEQ ID NO: 859805 - RNA, 20 nt, Human
auuccuccucuggaaguauc

SEQ ID NO: 859806 - RNA, 22 nt, Human
caaacgauggcaucaaaaccaa

SEQ ID NO: 859807 - RNA, 19 nt, Human
cacaagaaaggaacuuuca

SEQ ID NO: 859808 - RNA, 18 nt, Human
caccggaccuggaggcug

SEQ ID NO: 859809 - RNA, 19 nt, Human
cagaagccgaugggcagag

SEQ ID NO: 859810 - RNA, 19 nt, Human
cagaagccggucggcagag

SEQ ID NO: 859811 - RNA, 23 nt, Human
cagacaaacucauaacucuaaag

SEQ ID NO: 859812 - RNA, 24 nt, Human
cagcacucucaaacgauggcauca

SEQ ID NO: 859813 - RNA, 25 nt, Human
caguauacacacaugcaaccacaca

SEQ ID NO: 859814 - RNA, 22 nt, Human
cauccuuggggucucuagcugg

SEQ ID NO: 859815 - RNA, 24 nt, Human
caucugagagccuaauaauuguuc

SEQ ID NO: 859816 - RNA, 22 nt, Human
cauuuuuuuaauaaaaagaaaa

SEQ ID NO: 859817 - RNA, 22 nt, Human
ccaaaaaaugacauuuucccau

SEQ ID NO: 859818 - RNA, 21 nt, Human
ccaugccagauguagcauuca

SEQ ID NO: 859819 - RNA, 23 nt, Human
cccaaaaaaugacauuuucccau

SEQ ID NO: 859820 - RNA, 23 nt, Human
cccacaccacgacacaucagcgg

SEQ ID NO: 859821 - RNA, 23 nt, Human
ccccacaccacgacacaucagcg

SEQ ID NO: 859822 - RNA, 22 nt, Human
cccuggagguucacucaggaug

SEQ ID NO: 859823 - RNA, 18 nt, Human
cccuuugaagugcggguu

SEQ ID NO: 859824 - RNA, 22 nt, Human
ccuccuguaaauucaucuaaag

SEQ ID NO: 859825 - RNA, 22 nt, Human
ccugaaacuccuaagaagaaag

SEQ ID NO: 859826 - RNA, 26 nt, Human
ccugccccucucggugcucucucucc

SEQ ID NO: 859827 - RNA, 18 nt, Human
ccuggcugagugaauggu

SEQ ID NO: 859828 - RNA, 23 nt, Human
ccugggccuggcaggaacggcug

SEQ ID NO: 859829 - RNA, 20 nt, Human
cuccucgccguccuccccgc

SEQ ID NO: 859830 - RNA, 21 nt, Human
cucuggggucccacggcaggu

SEQ ID NO: 859831 - RNA, 23 nt, Human
cugcggcuggaacaggccggggc

SEQ ID NO: 859832 - RNA, 18 nt, Human
cuggagcuguagcguccu

SEQ ID NO: 859833 - RNA, 24 nt, Human
cugggccuggcaggaacggcuguc

SEQ ID NO: 859834 - RNA, 23 nt, Human
cuguccuugcugauuaaaugcug

SEQ ID NO: 859835 - RNA, 20 nt, Human
cuucaaauaaccagugaaaa

SEQ ID NO: 859836 - RNA, 19 nt, Human
cuugaacaggcgugaccac

SEQ ID NO: 859837 - RNA, 19 nt, Human
gaaagauguuacagacgca

SEQ ID NO: 859838 - RNA, 23 nt, Human
gaacaggcgugaccaccgucccu

SEQ ID NO: 859839 - RNA, 18 nt, Human
gaacugguagcaagggca

SEQ ID NO: 859840 - RNA, 21 nt, Human
gacacaucagcggaccuccuc

SEQ ID NO: 859841 - RNA, 19 nt, Human
gaccuggaggcugcaaggc

SEQ ID NO: 859842 - RNA, 19 nt, Human
gacugauucuuuuugccag

SEQ ID NO: 859843 - RNA, 30 nt, Human
gcuaaagugcagaauccccaccggaccugg

SEQ ID NO: 859844 - RNA, 24 nt, Human
gcucucucuccucuggucccccac

SEQ ID NO: 859845 - RNA, 23 nt, Human
gcugcaccggaagcagcggcugc

SEQ ID NO: 859846 - RNA, 21 nt, Human
ggaaaaagcagguggcgagaa

SEQ ID NO: 859847 - RNA, 23 nt, Human
ggagccuggggcucucuagaggc

SEQ ID NO: 859848 - RNA, 20 nt, Human
ggauggguggugcgggugcu

SEQ ID NO: 859849 - RNA, 25 nt, Human
ggcagaaacggcuguccugggccug

SEQ ID NO: 859850 - RNA, 22 nt, Human
ggcagagggcacucaaggccuu

SEQ ID NO: 859851 - RNA, 22 nt, Human
ggcagagggcacucaaggccuu

SEQ ID NO: 859852 - RNA, 19 nt, Human
ggccuggcaggaacggcug

SEQ ID NO: 859853 - RNA, 19 nt, Human
ggcucaaauaaaaaucuga

SEQ ID NO: 859854 - RNA, 24 nt, Human
gggcagagggcacucaaggccuuc

SEQ ID NO: 859855 - RNA, 22 nt, Human
uaaaaaaccucaacacaagaaa

SEQ ID NO: 859856 - RNA, 19 nt, Human
uaaaaacauuuuaucuucc

SEQ ID NO: 859857 - RNA, 18 nt, Human
uaaaaugcaguaauaagc

SEQ ID NO: 859858 - RNA, 21 nt, Human
uaaagugcagaauccccaccg

SEQ ID NO: 859859 - RNA, 24 nt, Human
uaaccagugaaaacccaugaagca

SEQ ID NO: 859860 - RNA, 21 nt, Human
uaaguaacauuguugaaaaaa

SEQ ID NO: 859861 - RNA, 18 nt, Human
uaauaguaacccuacaau

SEQ ID NO: 859862 - RNA, 21 nt, Human
uaguaggcucaaauaaaaauc

SEQ ID NO: 859863 - RNA, 18 nt, Human
uauacaauucugauccau

SEQ ID NO: 859864 - RNA, 22 nt, Human
uauacaauucugauccaucaga

SEQ ID NO: 859865 - RNA, 23 nt, Human
uauggaacacaaagccuugaagc

SEQ ID NO: 859866 - RNA, 21 nt, Human
ucaaauaaccagugaaaaccc

SEQ ID NO: 859867 - RNA, 19 nt, Human
ucaaauucaagcaaugcug

SEQ ID NO: 859868 - RNA, 19 nt, Human
ucauacuguccuucuucug

SEQ ID NO: 859869 - RNA, 25 nt, Human
uccagauuggucguuaguguuguca

SEQ ID NO: 859870 - RNA, 18 nt, Human
uccaucagauuugugaua

SEQ ID NO: 859871 - RNA, 22 nt, Human
ucccugaggcggggaugggugg

SEQ ID NO: 859872 - RNA, 23 nt, Human
ucccugaggcggggauggguggu

SEQ ID NO: 859873 - RNA, 20 nt, Human
uccuugcugauuaaaugcug

SEQ ID NO: 859874 - RNA, 18 nt, Human
ucucggugcucucucucc

SEQ ID NO: 859875 - RNA, 21 nt, Human
ucugcaauggggauguauuaa

SEQ ID NO: 859876 - RNA, 22 nt, Human
ucugcugaaagcuccaaaguuu

SEQ ID NO: 859877 - RNA, 20 nt, Human
ucuuuaaauaaccacaaauu

SEQ ID NO: 859878 - RNA, 20 nt, Human
ugaaagcuccaaaguuucug

SEQ ID NO: 859879 - RNA, 18 nt, Human
ugaagcagaagccggucg

SEQ ID NO: 859880 - RNA, 22 nt, Human
ugaggcggcggaggcgguggag

SEQ ID NO: 859881 - RNA, 20 nt, Human
ugaggcggggguggggcucu

SEQ ID NO: 859882 - RNA, 22 nt, Human
ugcaauggggauguauuaauug

SEQ ID NO: 859883 - RNA, 18 nt, Human
ugcagacaaacucauaac

SEQ ID NO: 859884 - RNA, 22 nt, Human
ugccuuggccucugcugaaagc

SEQ ID NO: 859885 - RNA, 22 nt, Human
ugcuccuccucuggcucuucca

SEQ ID NO: 859886 - RNA, 21 nt, Human
uggcgagaagaugugcauuua

SEQ ID NO: 859887 - RNA, 20 nt, Human
uggcucggaacugguagcaa

SEQ ID NO: 859888 - RNA, 21 nt, Human
ugggaaucucuggggucccac

SEQ ID NO: 859889 - RNA, 24 nt, Human
uggggcucuccacugguccuggag

SEQ ID NO: 859890 - RNA, 21 nt, Human
ugguggagggggacuucgcug

SEQ ID NO: 859891 - RNA, 22 nt, Human
uggugguggagggggacuucgc

SEQ ID NO: 859892 - RNA, 23 nt, Human
uggugguggagggggacuucgcu

SEQ ID NO: 859893 - RNA, 19 nt, Human
ugguucaccugaaacuccu

SEQ ID NO: 859894 - RNA, 20 nt, Human
uguaugcuguggaaauucug

SEQ ID NO: 859895 - RNA, 24 nt, Human
ugucagagaguucaaaugauguaa

SEQ ID NO: 859896 - RNA, 24 nt, Human
uguuaagaaggguaggaggcggug

SEQ ID NO: 859897 - RNA, 18 nt, Human
uguuacagacgcauguca

SEQ ID NO: 859898 - RNA, 19 nt, Human
uucaaauucaagcaaugcu

SEQ ID NO: 859899 - RNA, 23 nt, Human
uucagcgauaccaaaacuucauu

SEQ ID NO: 859900 - RNA, 22 nt, Human
uucaucuucauuaucacucugc

SEQ ID NO: 859901 - RNA, 25 nt, Human
uucucugcaaaugaggacauucuau

SEQ ID NO: 859902 - RNA, 23 nt, Human
uugaaaauuucugcaauggggau

SEQ ID NO: 859903 - RNA, 24 nt, Human
uugaagcuacacauuuuuucccug

SEQ ID NO: 859904 - RNA, 21 nt, Human
uugauguccuuuugaaguucc

SEQ ID NO: 859905 - RNA, 21 nt, Human
uuuagacuugcugaugaaggu

SEQ ID NO: 859906 - RNA, 22 nt, Human
uuugccagauagcaaaucuucu

SEQ ID NO: 859907 - RNA, 21 nt, Human
uuuuauacagaugagcaaaug

SEQ ID NO: 859908 - RNA, 23 nt, Human
uuuuuuuuuuuuuuuuuuacaag

SEQ ID NO: 859909 - RNA, 29 nt, Human
uuuuuuuuuuuuuuuuuuuuuuacaagaa

SEQ ID NO: 859910 - RNA, 21 nt, Human
aacccaaggcagaagaacagg

SEQ ID NO: 859911 - RNA, 19 nt, Human
agauguuucagccacgacc

SEQ ID NO: 859912 - RNA, 21 nt, Human
agcagguggaagcuggggcag

SEQ ID NO: 859913 - RNA, 18 nt, Human
agcugggggcaggaagcc

SEQ ID NO: 859914 - RNA, 25 nt, Human
aggaagccaacccaggccccauagg

SEQ ID NO: 859915 - RNA, 20 nt, Human
aggcagaagaacaggagccc

SEQ ID NO: 859916 - RNA, 20 nt, Human
auauugcuuggaaugcuuua

SEQ ID NO: 859917 - RNA, 21 nt, Human
augagauggucagguggguca

SEQ ID NO: 859918 - RNA, 19 nt, Human
caaaucccauggccuggaa

SEQ ID NO: 859919 - RNA, 21 nt, Human
caaaucccauggccuggagag

SEQ ID NO: 859920 - RNA, 21 nt, Human
caacccaaggcagaagaacag

SEQ ID NO: 859921 - RNA, 20 nt, Human
cagaagaacaggagccucug

SEQ ID NO: 859922 - RNA, 24 nt, Human
cagauguuucagccacgaccaaug

SEQ ID NO: 859923 - RNA, 19 nt, Human
cagcacucaggucccuugg

SEQ ID NO: 859924 - RNA, 19 nt, Human
cagcagcuggagggccugc

SEQ ID NO: 859925 - RNA, 19 nt, Human
caggagccucuguggccag

SEQ ID NO: 859926 - RNA, 18 nt, Human
cucaggucccuugggcuc

SEQ ID NO: 859927 - RNA, 21 nt, Human
cugcagcugggggcaggaagc

SEQ ID NO: 859928 - RNA, 19 nt, Human
cuguggccagcagcuggag

SEQ ID NO: 859929 - RNA, 22 nt, Human
cuugagcuugcggauagcagca

SEQ ID NO: 859930 - RNA, 18 nt, Human
gaagccaacccaggcccc

SEQ ID NO: 859931 - RNA, 18 nt, Human
gaagccaacccaggcccc

SEQ ID NO: 859932 - RNA, 18 nt, Human
gcagaaagggugagggca

SEQ ID NO: 859933 - RNA, 21 nt, Human
gcagauggggagcagguggaa

SEQ ID NO: 859934 - RNA, 22 nt, Human
gcuggagggccugcucaaucug

SEQ ID NO: 859935 - RNA, 18 nt, Human
ggacuguuccaggcuugu

SEQ ID NO: 859936 - RNA, 24 nt, Human
ggcagaagaacaggagccucugug

SEQ ID NO: 859937 - RNA, 21 nt, Human
gggcagaaagggugagggcag

SEQ ID NO: 859938 - RNA, 18 nt, Human
uagaaucucugggaucuu

SEQ ID NO: 859939 - RNA, 20 nt, Human
uagcaagcaaacaaguaggc

SEQ ID NO: 859940 - RNA, 19 nt, Human
uagcugcagcugggggcag

SEQ ID NO: 859941 - RNA, 23 nt, Human
uauuccaggacuucuccuggcug

SEQ ID NO: 859942 - RNA, 22 nt, Human
ucaggaaaggugcaaaaggcaa

SEQ ID NO: 859943 - RNA, 22 nt, Human
ucaggucccuugggcucagcug

SEQ ID NO: 859944 - RNA, 25 nt, Human
ucaggugggucagcaggcagguagc

SEQ ID NO: 859945 - RNA, 28 nt, Human
ucccuugggcucagcuguaucugaaaca

SEQ ID NO: 859946 - RNA, 18 nt, Human
ucucagguauugugcucu

SEQ ID NO: 859947 - RNA, 23 nt, Human
ucuguggccagcagcuggagggc

SEQ ID NO: 859948 - RNA, 21 nt, Human
ugagauggucaggugggucag

SEQ ID NO: 859949 - RNA, 21 nt, Human
ugagugccuguagauuggcau

SEQ ID NO: 859950 - RNA, 21 nt, Human
ugcagagggugggaagggucc

SEQ ID NO: 859951 - RNA, 23 nt, Human
ugccuguagauuggcaugguggu

SEQ ID NO: 859952 - RNA, 22 nt, Human
ugcuaaaacaaaucucaggagc

SEQ ID NO: 859953 - RNA, 18 nt, Human
uggcagcacucagguccc

SEQ ID NO: 859954 - RNA, 21 nt, Human
uggcagcacucaggucccuug

SEQ ID NO: 859955 - RNA, 19 nt, Human
uggcaugccacaugggcuu

SEQ ID NO: 859956 - RNA, 20 nt, Human
ugggcagauggggagcaggu

SEQ ID NO: 859957 - RNA, 24 nt, Human
ugggggcaggaagccaacccaggc

SEQ ID NO: 859958 - RNA, 19 nt, Human
ugguguccccuucaguagc

SEQ ID NO: 859959 - RNA, 19 nt, Human
ugguuagaaucucugggau

SEQ ID NO: 859960 - RNA, 22 nt, Human
ugguucccaaaucccauggccu

SEQ ID NO: 859961 - RNA, 18 nt, Human
uguucgagagauggcaug

SEQ ID NO: 859962 - RNA, 18 nt, Human
uucgagagauggcaugcc

SEQ ID NO: 859963 - RNA, 18 nt, Human
uuuuuuuuuuuuuuuuug

SEQ ID NO: 859964 - RNA, 26 nt, Human
aaagaagcccagccucucucccugga

SEQ ID NO: 859965 - RNA, 19 nt, Human
aacaaaugagagaaagaag

SEQ ID NO: 859966 - RNA, 22 nt, Human
aacuuacacauuacacauaaga

SEQ ID NO: 859967 - RNA, 18 nt, Human
aauuuggguuuuuuccuu

SEQ ID NO: 859968 - RNA, 19 nt, Human
acaaaugagagaaagaagc

SEQ ID NO: 859969 - RNA, 19 nt, Human
acucacgugacaauucacc

SEQ ID NO: 859970 - RNA, 22 nt, Human
acuuucacauuugaucuuuagc

SEQ ID NO: 859971 - RNA, 23 nt, Human
agacagcugcucggcgugugugu

SEQ ID NO: 859972 - RNA, 28 nt, Human
agacuucuaaccugcagagacagagcuc

SEQ ID NO: 859973 - RNA, 25 nt, Human
agagaagccccagauggggcuugga

SEQ ID NO: 859974 - RNA, 20 nt, Human
agccaggaaaccugccacaa

SEQ ID NO: 859975 - RNA, 19 nt, Human
aggagaagccaugcaugaa

SEQ ID NO: 859976 - RNA, 19 nt, Human
aguaaaaaauacauauaca

SEQ ID NO: 859977 - RNA, 20 nt, Human
caaggagcagacuucacucu

SEQ ID NO: 859978 - RNA, 23 nt, Human
cacagaggaaagcagcauuuuga

SEQ ID NO: 859979 - RNA, 21 nt, Human
cagacuucacucuuacuggcc

SEQ ID NO: 859980 - RNA, 23 nt, Human
cauauacacagacauaaacaccc

SEQ ID NO: 859981 - RNA, 22 nt, Human
ccacgcugcucgcucuggaccc

SEQ ID NO: 859982 - RNA, 19 nt, Human
cccacauuuucacacuucu

SEQ ID NO: 859983 - RNA, 19 nt, Human
cccaguaaacgcuuggcuc

SEQ ID NO: 859984 - RNA, 24 nt, Human
cccggaggaaaucgggaggggcgg

SEQ ID NO: 859985 - RNA, 19 nt, Human
cggaagaggcaagaaaaua

SEQ ID NO: 859986 - RNA, 20 nt, Human
cggcgugugugugugugugu

SEQ ID NO: 859987 - RNA, 19 nt, Human
cgggcucagccaggaaacc

SEQ ID NO: 859988 - RNA, 21 nt, Human
cgugugugugugugugugugu

SEQ ID NO: 859989 - RNA, 23 nt, Human
cuccacgcugcucgcucuggacc

SEQ ID NO: 859990 - RNA, 22 nt, Human
cugcucgcucuggacccgagac

SEQ ID NO: 859991 - RNA, 30 nt, Human
cugcucggcgugugugugugugugugugug

SEQ ID NO: 859992 - RNA, 21 nt, Human
cuggcccuuuuuaagugcagg

SEQ ID NO: 859993 - RNA, 21 nt, Human
cuucaguggauuucucccugc

SEQ ID NO: 859994 - RNA, 23 nt, Human
cuugcagcuguuuucuuugugga

SEQ ID NO: 859995 - RNA, 20 nt, Human
gcagagacagagcucagcca

SEQ ID NO: 859996 - RNA, 20 nt, Human
gcccauuuguuccacaagga

SEQ ID NO: 859997 - RNA, 24 nt, Human
ggaaauuuggguuuuuuccuucag

SEQ ID NO: 859998 - RNA, 21 nt, Human
ggacccgagacagcugcucgg

SEQ ID NO: 859999 - RNA, 21 nt, Human
gugugugugugugugugugug

SEQ ID NO: 860000 - RNA, 21 nt, Human
gugugugugugugugugugug

SEQ ID NO: 860001 - RNA, 21 nt, Human
gugugugugugugugugugug

SEQ ID NO: 860002 - RNA, 21 nt, Human
gugugugugugugugugugug

SEQ ID NO: 860003 - RNA, 21 nt, Human
gugugugugugugugugugug

SEQ ID NO: 860004 - RNA, 21 nt, Human
gugugugugugugugugugug

SEQ ID NO: 860005 - RNA, 21 nt, Human
gugugugugugugugugugug

SEQ ID NO: 860006 - RNA, 21 nt, Human
gugugugugugugugugugug

SEQ ID NO: 860007 - RNA, 21 nt, Human
gugugugugugugugugugug

SEQ ID NO: 860008 - RNA, 22 nt, Human
guuuucuuuguggaguggaaau

SEQ ID NO: 860009 - RNA, 23 nt, Human
uaaccugcagagacagagcucag

SEQ ID NO: 860010 - RNA, 19 nt, Human
uacacagacauaaacaccc

SEQ ID NO: 860011 - RNA, 19 nt, Human
uacacagacauaaacaccc

SEQ ID NO: 860012 - RNA, 21 nt, Human
uacacagacauaaacacccac

SEQ ID NO: 860013 - RNA, 18 nt, Human
uagcccggaggaaaucgg

SEQ ID NO: 860014 - RNA, 23 nt, Human
uccacaaggaacaaaugagagaa

SEQ ID NO: 860015 - RNA, 19 nt, Human
ucccugggggcuugcagcu

SEQ ID NO: 860016 - RNA, 22 nt, Human
ucucccugcugcugucacugag

SEQ ID NO: 860017 - RNA, 24 nt, Human
ugagaaaaguuuuauauggaaaca

SEQ ID NO: 860018 - RNA, 18 nt, Human
ugccagccccagguaagu

SEQ ID NO: 860019 - RNA, 24 nt, Human
ugcuugggacacaagcaugaaugu

SEQ ID NO: 860020 - RNA, 24 nt, Human
uggacccgagacagcugcucggcg

SEQ ID NO: 860021 - RNA, 20 nt, Human
uggcccuuuuuaagugcagg

SEQ ID NO: 860022 - RNA, 23 nt, Human
ugggacacaagcaugaauguccg

SEQ ID NO: 860023 - RNA, 18 nt, Human
uguccggaagaggcaaga

SEQ ID NO: 860024 - RNA, 23 nt, Human
ugugagacacagaggaaagcagc

SEQ ID NO: 860025 - RNA, 18 nt, Human
ugugugugugugugugug

SEQ ID NO: 860026 - RNA, 18 nt, Human
ugugugugugugugugug

SEQ ID NO: 860027 - RNA, 18 nt, Human
ugugugugugugugugug

SEQ ID NO: 860028 - RNA, 18 nt, Human
ugugugugugugugugug

SEQ ID NO: 860029 - RNA, 18 nt, Human
ugugugugugugugugug

SEQ ID NO: 860030 - RNA, 18 nt, Human
ugugugugugugugugug

SEQ ID NO: 860031 - RNA, 18 nt, Human
ugugugugugugugugug

SEQ ID NO: 860032 - RNA, 18 nt, Human
ugugugugugugugugug

SEQ ID NO: 860033 - RNA, 18 nt, Human
ugugugugugugugugug

SEQ ID NO: 860034 - RNA, 18 nt, Human
ugugugugugugugugug

SEQ ID NO: 860035 - RNA, 18 nt, Human
ugugugugugugugugug

SEQ ID NO: 860036 - RNA, 18 nt, Human
ugugugugugugugugug

SEQ ID NO: 860037 - RNA, 18 nt, Human
ugugugugugugugugug

SEQ ID NO: 860038 - RNA, 18 nt, Human
ugugugugugugugugug

SEQ ID NO: 860039 - RNA, 18 nt, Human
ugugugugugugugugug

SEQ ID NO: 860040 - RNA, 18 nt, Human
ugugugugugugugugug

SEQ ID NO: 860041 - RNA, 18 nt, Human
ugugugugugugugugug

SEQ ID NO: 860042 - RNA, 18 nt, Human
ugugugugugugugugug

SEQ ID NO: 860043 - RNA, 18 nt, Human
ugugugugugugugugug

SEQ ID NO: 860044 - RNA, 18 nt, Human
ugugugugugugugugug

SEQ ID NO: 860045 - RNA, 18 nt, Human
ugugugugugugugugug

SEQ ID NO: 860046 - RNA, 18 nt, Human
ugugugugugugugugug

SEQ ID NO: 860047 - RNA, 21 nt, Human
ugugugugugugugugugugu

SEQ ID NO: 860048 - RNA, 21 nt, Human
ugugugugugugugugugugu

SEQ ID NO: 860049 - RNA, 21 nt, Human
ugugugugugugugugugugu

SEQ ID NO: 860050 - RNA, 21 nt, Human
ugugugugugugugugugugu

SEQ ID NO: 860051 - RNA, 21 nt, Human
ugugugugugugugugugugu

SEQ ID NO: 860052 - RNA, 21 nt, Human
ugugugugugugugugugugu

SEQ ID NO: 860053 - RNA, 21 nt, Human
ugugugugugugugugugugu

SEQ ID NO: 860054 - RNA, 21 nt, Human
ugugugugugugugugugugu

SEQ ID NO: 860055 - RNA, 21 nt, Human
ugugugugugugugugugugu

SEQ ID NO: 860056 - RNA, 21 nt, Human
ugugugugugugugugugugu

SEQ ID NO: 860057 - RNA, 21 nt, Human
ugugugugugugugugugugu

SEQ ID NO: 860058 - RNA, 21 nt, Human
ugugugugugugugugugugu

SEQ ID NO: 860059 - RNA, 21 nt, Human
ugugugugugugugugugugu

SEQ ID NO: 860060 - RNA, 21 nt, Human
ugugugugugugugugugugu

SEQ ID NO: 860061 - RNA, 21 nt, Human
ugugugugugugugugugugu

SEQ ID NO: 860062 - RNA, 21 nt, Human
ugugugugugugugugugugu

SEQ ID NO: 860063 - RNA, 21 nt, Human
ugugugugugugugugugugu

SEQ ID NO: 860064 - RNA, 21 nt, Human
ugugugugugugugugugugu

SEQ ID NO: 860065 - RNA, 21 nt, Human
ugugugugugugugugugugu

SEQ ID NO: 860066 - RNA, 21 nt, Human
ugugugugugugugugugugu

SEQ ID NO: 860067 - RNA, 21 nt, Human
ugugugugugugugugugugu

SEQ ID NO: 860068 - RNA, 21 nt, Human
ugugugugugugugugugugu

SEQ ID NO: 860069 - RNA, 21 nt, Human
ugugugugugugugugugugu

SEQ ID NO: 860070 - RNA, 21 nt, Human
ugugugugugugugugugugu

SEQ ID NO: 860071 - RNA, 21 nt, Human
ugugugugugugugugugugu

SEQ ID NO: 860072 - RNA, 21 nt, Human
ugugugugugugugugugugu

SEQ ID NO: 860073 - RNA, 21 nt, Human
ugugugugugugugugugugu

SEQ ID NO: 860074 - RNA, 21 nt, Human
ugugugugugugugugugugu

SEQ ID NO: 860075 - RNA, 21 nt, Human
ugugugugugugugugugugu

SEQ ID NO: 860076 - RNA, 21 nt, Human
ugugugugugugugugugugu

SEQ ID NO: 860077 - RNA, 21 nt, Human
ugugugugugugugugugugu

SEQ ID NO: 860078 - RNA, 21 nt, Human
ugugugugugugugugugugu

SEQ ID NO: 860079 - RNA, 21 nt, Human
ugugugugugugugugugugu

SEQ ID NO: 860080 - RNA, 21 nt, Human
ugugugugugugugugugugu

SEQ ID NO: 860081 - RNA, 21 nt, Human
ugugugugugugugugugugu

SEQ ID NO: 860082 - RNA, 21 nt, Human
ugugugugugugugugugugu

SEQ ID NO: 860083 - RNA, 21 nt, Human
ugugugugugugugugugugu

SEQ ID NO: 860084 - RNA, 21 nt, Human
ugugugugugugugugugugu

SEQ ID NO: 860085 - RNA, 21 nt, Human
ugugugugugugugugugugu

SEQ ID NO: 860086 - RNA, 21 nt, Human
ugugugugugugugugugugu

SEQ ID NO: 860087 - RNA, 21 nt, Human
ugugugugugugugugugugu

SEQ ID NO: 860088 - RNA, 22 nt, Human
ugugugugugugugugugugua

SEQ ID NO: 860089 - RNA, 22 nt, Human
ugugugugugugugugugugug

SEQ ID NO: 860090 - RNA, 22 nt, Human
ugugugugugugugugugugug

SEQ ID NO: 860091 - RNA, 22 nt, Human
ugugugugugugugugugugug

SEQ ID NO: 860092 - RNA, 22 nt, Human
ugugugugugugugugugugug

SEQ ID NO: 860093 - RNA, 22 nt, Human
ugugugugugugugugugugug

SEQ ID NO: 860094 - RNA, 22 nt, Human
ugugugugugugugugugugug

SEQ ID NO: 860095 - RNA, 22 nt, Human
ugugugugugugugugugugug

SEQ ID NO: 860096 - RNA, 22 nt, Human
ugugugugugugugugugugug

SEQ ID NO: 860097 - RNA, 22 nt, Human
ugugugugugugugugugugug

SEQ ID NO: 860098 - RNA, 22 nt, Human
ugugugugugugugugugugug

SEQ ID NO: 860099 - RNA, 22 nt, Human
ugugugugugugugugugugug

SEQ ID NO: 860100 - RNA, 22 nt, Human
uucuccaaguacuuucacauuu

SEQ ID NO: 860101 - RNA, 20 nt, Human
uuucucccugcugcugucac

SEQ ID NO: 860102 - RNA, 19 nt, Human
aacaccagcgcuucccgcc

SEQ ID NO: 860103 - RNA, 22 nt, Human
acaccagcgcuucccgccuggc

SEQ ID NO: 860104 - RNA, 23 nt, Human
acccagggucucguccugcagcg

SEQ ID NO: 860105 - RNA, 22 nt, Human
agcuuugcuuuucuucauuugg

SEQ ID NO: 860106 - RNA, 22 nt, Human
aggcucggcacagcgaaggcuu

SEQ ID NO: 860107 - RNA, 18 nt, Human
aggcugcaagccugggua

SEQ ID NO: 860108 - RNA, 19 nt, Human
cacccagggucucguccug

SEQ ID NO: 860109 - RNA, 18 nt, Human
cacgcugacaggcacggg

SEQ ID NO: 860110 - RNA, 21 nt, Human
cagaaacacaaggcucggcac

SEQ ID NO: 860111 - RNA, 25 nt, Human
ccccgacugucgccagcgccgcaac

SEQ ID NO: 860112 - RNA, 19 nt, Human
ccccggccccgggccgcuc

SEQ ID NO: 860113 - RNA, 21 nt, Human
ccccgggccgcucgcaacccc

SEQ ID NO: 860114 - RNA, 19 nt, Human
ccccuacgccgccccucgu

SEQ ID NO: 860115 - RNA, 30 nt, Human
cccggccccgggccgcucgcaaccccgacc

SEQ ID NO: 860116 - RNA, 21 nt, Human
ccuggcugaguggccccggcc

SEQ ID NO: 860117 - RNA, 23 nt, Human
cgccagcgccgcaacaccccccu

SEQ ID NO: 860118 - RNA, 27 nt, Human
cgccuggcugaguggccccggcugcgc

SEQ ID NO: 860119 - RNA, 18 nt, Human
cguccugcagcggcccug

SEQ ID NO: 860120 - RNA, 22 nt, Human
cuccgccccuacgccgccccuc

SEQ ID NO: 860121 - RNA, 22 nt, Human
cucguccugcagcggcccuggc

SEQ ID NO: 860122 - RNA, 20 nt, Human
cuugcacccgccucccggga

SEQ ID NO: 860123 - RNA, 21 nt, Human
gaccuccgccccuacgccgcc

SEQ ID NO: 860124 - RNA, 19 nt, Human
gauuccuggccugggcgga

SEQ ID NO: 860125 - RNA, 24 nt, Human
ucagaaacacaaggcucggcacag

SEQ ID NO: 860126 - RNA, 19 nt, Human
uccccgcggaugcccugga

SEQ ID NO: 860127 - RNA, 19 nt, Human
ucgugcggacgcacucagg

SEQ ID NO: 860128 - RNA, 20 nt, Human
ugcgucagaaacacaaggcu

SEQ ID NO: 860129 - RNA, 23 nt, Human
uggacggcccuccacugcgaggg

SEQ ID NO: 860130 - RNA, 19 nt, Human
uggagacgguuccgcccuc

SEQ ID NO: 860131 - RNA, 18 nt, Human
ugggcggaugcacuggca

SEQ ID NO: 860132 - RNA, 22 nt, Human
uucgucuccccgcggaugcccu

SEQ ID NO: 860133 - RNA, 23 nt, Human
uugcacccgccucccgggacccc

SEQ ID NO: 860134 - RNA, 24 nt, Human
uuuuuuuuuuuuuuuuuaagcuuu

SEQ ID NO: 860135 - RNA, 21 nt, Human
uuuuuuuuuuuuuuuuuuaag

SEQ ID NO: 860136 - RNA, 23 nt, Human
aaacugacaaccucauuuucuca

SEQ ID NO: 860137 - RNA, 26 nt, Human
aaccagacagggaauguucaccuuca

SEQ ID NO: 860138 - RNA, 19 nt, Human
aaggacccagaagacacaa

SEQ ID NO: 860139 - RNA, 21 nt, Human
aaucugcagcuauccuucccc

SEQ ID NO: 860140 - RNA, 19 nt, Human
aaucuuguccgccuucccc

SEQ ID NO: 860141 - RNA, 18 nt, Human
aaugccaauucauuccca

SEQ ID NO: 860142 - RNA, 18 nt, Human
aauucauucccacauccc

SEQ ID NO: 860143 - RNA, 23 nt, Human
acacacacacacacacacacaca

SEQ ID NO: 860144 - RNA, 23 nt, Human
acacacacacacacacacacaca

SEQ ID NO: 860145 - RNA, 23 nt, Human
acacacacacacacacacacaca

SEQ ID NO: 860146 - RNA, 23 nt, Human
acacacacacacacacacacaca

SEQ ID NO: 860147 - RNA, 23 nt, Human
acacacacacacacacacacaca

SEQ ID NO: 860148 - RNA, 23 nt, Human
acacacacacacacacacacaca

SEQ ID NO: 860149 - RNA, 23 nt, Human
acacacacacacacacacacaca

SEQ ID NO: 860150 - RNA, 23 nt, Human
acacacacacacacacacacaca

SEQ ID NO: 860151 - RNA, 23 nt, Human
acacacacacacacacacacacg

SEQ ID NO: 860152 - RNA, 29 nt, Human
acacacacacacacacacacacggcucca

SEQ ID NO: 860153 - RNA, 22 nt, Human
acacacacacacacacacacag

SEQ ID NO: 860154 - RNA, 21 nt, Human
acacacacacacacacacggc

SEQ ID NO: 860155 - RNA, 20 nt, Human
accauguugaccaggcuggu

SEQ ID NO: 860156 - RNA, 23 nt, Human
accauguugaccaggcuggucuc

SEQ ID NO: 860157 - RNA, 21 nt, Human
acccuugacucaguccaacca

SEQ ID NO: 860158 - RNA, 19 nt, Human
accucacccacccugccca

SEQ ID NO: 860159 - RNA, 19 nt, Human
accuggcccuccugcaaac

SEQ ID NO: 860160 - RNA, 22 nt, Human
acugagcaccgacuccguacca

SEQ ID NO: 860161 - RNA, 19 nt, Human
agaaaugggguuuuaccau

SEQ ID NO: 860162 - RNA, 19 nt, Human
agauggccggaaagaccag

SEQ ID NO: 860163 - RNA, 18 nt, Human
agccaagugcaacaucgg

SEQ ID NO: 860164 - RNA, 24 nt, Human
agccugucagcaaugaaaggaccc

SEQ ID NO: 860165 - RNA, 18 nt, Human
aggaccccagaagggcaa

SEQ ID NO: 860166 - RNA, 19 nt, Human
aggcaaaaauaugcacgug

SEQ ID NO: 860167 - RNA, 19 nt, Human
agggaauguucaccuucaa

SEQ ID NO: 860168 - RNA, 24 nt, Human
aggugaucugccugccucggccuc

SEQ ID NO: 860169 - RNA, 20 nt, Human
aucccuccaagacccaggag

SEQ ID NO: 860170 - RNA, 19 nt, Human
augggguuuuaccauguug

SEQ ID NO: 860171 - RNA, 24 nt, Human
augggguuuuaccauguugaccag

SEQ ID NO: 860172 - RNA, 22 nt, Human
auucauucccacaucccuccaa

SEQ ID NO: 860173 - RNA, 22 nt, Human
caaccagacagggaauguucac

SEQ ID NO: 860174 - RNA, 24 nt, Human
caaccucauuuucucaagcugaag

SEQ ID NO: 860175 - RNA, 25 nt, Human
caaccucauuuucucaagcugaaga

SEQ ID NO: 860176 - RNA, 24 nt, Human
caagcuccucucuccacggccauc

SEQ ID NO: 860177 - RNA, 26 nt, Human
caagcuccucucuccacggccauccu

SEQ ID NO: 860178 - RNA, 24 nt, Human
caagugaauauaccuggcccuccu

SEQ ID NO: 860179 - RNA, 28 nt, Human
caagugaauauaccuggcccuccugcaa

SEQ ID NO: 860180 - RNA, 20 nt, Human
cacacacacacacacacaca

SEQ ID NO: 860181 - RNA, 20 nt, Human
cacacacacacacacacaca

SEQ ID NO: 860182 - RNA, 20 nt, Human
cacacacacacacacacaca

SEQ ID NO: 860183 - RNA, 20 nt, Human
cacacacacacacacacaca

SEQ ID NO: 860184 - RNA, 20 nt, Human
cacacacacacacacacaca

SEQ ID NO: 860185 - RNA, 20 nt, Human
cacacacacacacacacaca

SEQ ID NO: 860186 - RNA, 20 nt, Human
cacacacacacacacacaca

SEQ ID NO: 860187 - RNA, 20 nt, Human
cacacacacacacacacaca

SEQ ID NO: 860188 - RNA, 20 nt, Human
cacacacacacacacacaca

SEQ ID NO: 860189 - RNA, 20 nt, Human
cacacacacacacacacaca

SEQ ID NO: 860190 - RNA, 20 nt, Human
cacacacacacacacacaca

SEQ ID NO: 860191 - RNA, 20 nt, Human
cacacacacacacacacaca

SEQ ID NO: 860192 - RNA, 20 nt, Human
cacacacacacacacacaca

SEQ ID NO: 860193 - RNA, 22 nt, Human
cacacacacacacacacacaca

SEQ ID NO: 860194 - RNA, 22 nt, Human
cacacacacacacacacacaca

SEQ ID NO: 860195 - RNA, 22 nt, Human
cacacacacacacacacacaca

SEQ ID NO: 860196 - RNA, 26 nt, Human
cacacacacacacacacacacacaca

SEQ ID NO: 860197 - RNA, 26 nt, Human
cacacacacacacacacacacacaca

SEQ ID NO: 860198 - RNA, 26 nt, Human
cacacacacacacacacacacacaca

SEQ ID NO: 860199 - RNA, 26 nt, Human
cacacacacacacacacacacacaca

SEQ ID NO: 860200 - RNA, 26 nt, Human
cacacacacacacacacacacacaca

SEQ ID NO: 860201 - RNA, 23 nt, Human
cacggaacaaagccaccuccugg

SEQ ID NO: 860202 - RNA, 21 nt, Human
cacuucaaucuaagccaggag

SEQ ID NO: 860203 - RNA, 19 nt, Human
cagaauccccaaaggguca

SEQ ID NO: 860204 - RNA, 26 nt, Human
cagacccuugacucaguccaaccaga

SEQ ID NO: 860205 - RNA, 21 nt, Human
cagaggugacuaaacuuccaa

SEQ ID NO: 860206 - RNA, 26 nt, Human
cagcaagaaagauggccggaaagacc

SEQ ID NO: 860207 - RNA, 22 nt, Human
cagcagugacaacugaaauaaa

SEQ ID NO: 860208 - RNA, 30 nt, Human
cagcagugacaacugaaauaaauacagccc

SEQ ID NO: 860209 - RNA, 22 nt, Human
caggugaucugccugccucggc

SEQ ID NO: 860210 - RNA, 24 nt, Human
caucacacacacuucaaucuaagc

SEQ ID NO: 860211 - RNA, 21 nt, Human
caucuccaucccuuucagagg

SEQ ID NO: 860212 - RNA, 24 nt, Human
cauguugaccaggcuggucucaaa

SEQ ID NO: 860213 - RNA, 22 nt, Human
ccaaagucauuuccugcaauua

SEQ ID NO: 860214 - RNA, 19 nt, Human
ccaauucauucccacaucc

SEQ ID NO: 860215 - RNA, 20 nt, Human
cccaaggcucaagagggcca

SEQ ID NO: 860216 - RNA, 24 nt, Human
cccacccugcccaaggcucaagag

SEQ ID NO: 860217 - RNA, 23 nt, Human
cccaugcuaagcagccacucagu

SEQ ID NO: 860218 - RNA, 19 nt, Human
cccuccugcaaacuuugca

SEQ ID NO: 860219 - RNA, 24 nt, Human
ccgagccuagcgcgguggcccaug

SEQ ID NO: 860220 - RNA, 21 nt, Human
ccugaccucaggugaucugcc

SEQ ID NO: 860221 - RNA, 23 nt, Human
ccugaccucaggugaucugccug

SEQ ID NO: 860222 - RNA, 24 nt, Human
ccuugcuggaaacugacaaccuca

SEQ ID NO: 860223 - RNA, 22 nt, Human
cgcacagcuccuucucauugca

SEQ ID NO: 860224 - RNA, 18 nt, Human
cggaacaaagccaccucc

SEQ ID NO: 860225 - RNA, 22 nt, Human
cggcuccagccuuuccaacuuu

SEQ ID NO: 860226 - RNA, 21 nt, Human
cucacacacacacacacacac

SEQ ID NO: 860227 - RNA, 26 nt, Human
cuccugaccucaggugaucugccugc

SEQ ID NO: 860228 - RNA, 27 nt, Human
cuccuggucaucugcaccucacccacc

SEQ ID NO: 860229 - RNA, 31 nt, Human; identical to SEQ ID NO: 661661

SEQ ID NO: 860230 - RNA, 20 nt, Human
cugaaacuggacaagagccu

SEQ ID NO: 860231 - RNA, 20 nt, Human
cugagcaccgacuccguacc

SEQ ID NO: 860232 - RNA, 20 nt, Human
cuggaaacugacaaccucau

SEQ ID NO: 860233 - RNA, 23 nt, Human
cuucauaaauauugccuuuccca

SEQ ID NO: 860234 - RNA, 24 nt, Human
gaccucaggugaucugccugccuc

SEQ ID NO: 860235 - RNA, 20 nt, Human
gagagcuuggggaagcaggg

SEQ ID NO: 860236 - RNA, 18 nt, Human
gcaagcuccucucuccac

SEQ ID NO: 860237 - RNA, 23 nt, Human
gcuggucucaaacuccugaccuc

SEQ ID NO: 860238 - RNA, 21 nt, Human
ggaaggcauucacacacuccu

SEQ ID NO: 860239 - RNA, 20 nt, Human
ggacccagaagacacaagug

SEQ ID NO: 860240 - RNA, 20 nt, Human
ggagaaaucagucuggugga

SEQ ID NO: 860241 - RNA, 24 nt, Human
ggcuggucucaaacuccugaccuc

SEQ ID NO: 860242 - RNA, 21 nt, Human
gggccucuggucccauuccaa

SEQ ID NO: 860243 - RNA, 22 nt, Human
gggguuuuaccauguugaccag

SEQ ID NO: 860244 - RNA, 23 nt, Human
gggguuuuaccauguugaccagg

SEQ ID NO: 860245 - RNA, 21 nt, Human
gucagccuugcuggaaacuga

SEQ ID NO: 860246 - RNA, 18 nt, Human
uaaauauugccuuuccca

SEQ ID NO: 860247 - RNA, 23 nt, Human
uacaaaugugacauuuaaagcac

SEQ ID NO: 860248 - RNA, 21 nt, Human
uaccauguugaccaggcuggu

SEQ ID NO: 860249 - RNA, 24 nt, Human
uaccauguugaccaggcuggucuc

SEQ ID NO: 860250 - RNA, 27 nt, Human
uaccauguugaccaggcuggucucaaa

SEQ ID NO: 860251 - RNA, 21 nt, Human
uaccuggcccuccugcaaacu

SEQ ID NO: 860252 - RNA, 24 nt, Human
uagcagaaaugggguuuuaccaug

SEQ ID NO: 860253 - RNA, 21 nt, Human
uagguucuuggggcugccucu

SEQ ID NO: 860254 - RNA, 18 nt, Human
ucaaagcugagcugggac

SEQ ID NO: 860255 - RNA, 19 nt, Human
ucaaagcugagcugggaca

SEQ ID NO: 860256 - RNA, 19 nt, Human
ucaaucuaagccaggaguu

SEQ ID NO: 860257 - RNA, 21 nt, Human
ucagcucuguuuugcaaacac

SEQ ID NO: 860258 - RNA, 22 nt, Human
ucauucccacaucccuccaaga

SEQ ID NO: 860259 - RNA, 18 nt, Human
ucccuugaggaagguggc

SEQ ID NO: 860260 - RNA, 20 nt, Human
uccguuuucagcucuguuuu

SEQ ID NO: 860261 - RNA, 21 nt, Human
ucucacacacacacacacaca

SEQ ID NO: 860262 - RNA, 18 nt, Human
ucucagaggcauaagcca

SEQ ID NO: 860263 - RNA, 20 nt, Human
ugaaauaaauacagccgugg

SEQ ID NO: 860264 - RNA, 24 nt, Human
ugaccaggcuggucucaaacuccu

SEQ ID NO: 860265 - RNA, 18 nt, Human
ugaccucaggugaucugc

SEQ ID NO: 860266 - RNA, 20 nt, Human
ugaccucaggugaucugccu

SEQ ID NO: 860267 - RNA, 24 nt, Human
ugaccucaggugaucugccugccu

SEQ ID NO: 860268 - RNA, 20 nt, Human
ugagcuggcagugggagggc

SEQ ID NO: 860269 - RNA, 22 nt, Human
ugagcuggcagugggagggcuc

SEQ ID NO: 860270 - RNA, 21 nt, Human
ugaggaagguggcaagaggug

SEQ ID NO: 860271 - RNA, 20 nt, Human
ugcugacuugccagcaagaa

SEQ ID NO: 860272 - RNA, 27 nt, Human
uggcaagagguguagaucaaagcugag

SEQ ID NO: 860273 - RNA, 24 nt, Human
ugggguuuuaccauguugaccagg

SEQ ID NO: 860274 - RNA, 19 nt, Human
ugguggaugucagccuugc

SEQ ID NO: 860275 - RNA, 19 nt, Human
ugucagcaaugaaaggacc

SEQ ID NO: 860276 - RNA, 19 nt, Human
ugugauggcugaauggagu

SEQ ID NO: 860277 - RNA, 24 nt, Human
uuagcagaaaugggguuuuaccau

SEQ ID NO: 860278 - RNA, 22 nt, Human
uucagcccugaaacuggacaag

SEQ ID NO: 860279 - RNA, 22 nt, Human
uucccacaucccuccaagaccc

SEQ ID NO: 860280 - RNA, 18 nt, Human
uuuaaagcaccuuuggca

SEQ ID NO: 860281 - RNA, 19 nt, Human
uuuaaagcaccuuuggcac

SEQ ID NO: 860282 - RNA, 21 nt, Human
uuucaagggccucugguccca

SEQ ID NO: 860283 - RNA, 18 nt, Human
uuugcaaacacugagcac

SEQ ID NO: 860284 - RNA, 20 nt, Human
uuuugcaaacacugagcacc

SEQ ID NO: 860285 - RNA, 24 nt, Human
uuuuuagcagaaaugggguuuuac

SEQ ID NO: 860286 - RNA, 20 nt, Human
aaaaauagcuacagugcuac

SEQ ID NO: 860287 - RNA, 20 nt, Human
caaagccggacccgcccccu

SEQ ID NO: 860288 - RNA, 20 nt, Human
caaggcccgacccgccggcu

SEQ ID NO: 860289 - RNA, 24 nt, Human
caaguauccugaauguaaccauga

SEQ ID NO: 860290 - RNA, 20 nt, Human
caauugcaaaacagguuuac

SEQ ID NO: 860291 - RNA, 25 nt, Human
ccgacccgccggcuuuucaaagccg

SEQ ID NO: 860292 - RNA, 18 nt, Human
ccuccccucgcacuuggu

SEQ ID NO: 860293 - RNA, 22 nt, Human
cucaaguauccugaauguaacc

SEQ ID NO: 860294 - RNA, 22 nt, Human
cuuccaccucaaggcccgaccc

SEQ ID NO: 860295 - RNA, 24 nt, Human
gaaaauggaggcuucaauugcaaa

SEQ ID NO: 860296 - RNA, 23 nt, Human
gcuucgccuguccuccccucgca

SEQ ID NO: 860297 - RNA, 23 nt, Human
ggagacgcaggagggguggcugc

SEQ ID NO: 860298 - RNA, 25 nt, Human
gggguggcugcgaggcgugaggcag

SEQ ID NO: 860299 - RNA, 22 nt, Human
uaaaaaauagcuacagugcuac

SEQ ID NO: 860300 - RNA, 24 nt, Human
ucaaagccggacccgcccccuugc

SEQ ID NO: 860301 - RNA, 20 nt, Human
ucaaggcccgacccgccggc

SEQ ID NO: 860302 - RNA, 20 nt, Human
ucgccuguccuccccucgca

SEQ ID NO: 860303 - RNA, 20 nt, Human
acaggauaauaaaacaugua

SEQ ID NO: 860304 - RNA, 19 nt, Human
accacccucuggggacagg

SEQ ID NO: 860305 - RNA, 22 nt, Human
accacccucuggggacaggaua

SEQ ID NO: 860306 - RNA, 20 nt, Human
agaugggaaguggggagggg

SEQ ID NO: 860307 - RNA, 19 nt, Human
cacccaugccaggcaaggc

SEQ ID NO: 860308 - RNA, 23 nt, Human
ccccagcuggggcugugugggac

SEQ ID NO: 860309 - RNA, 20 nt, Human
cuccaggaacaguccccacc

SEQ ID NO: 860310 - RNA, 18 nt, Human
cugcgcugaucacgucgu

SEQ ID NO: 860311 - RNA, 23 nt, Human
gcuguuugccccagcuggggcug

SEQ ID NO: 860312 - RNA, 18 nt, Human
ggagagacugcaggucug

SEQ ID NO: 860313 - RNA, 24 nt, Human
ggcugugugggacggggucucagg

SEQ ID NO: 860314 - RNA, 24 nt, Human
gucaacguggacuagcucguguca

SEQ ID NO: 860315 - RNA, 18 nt, Human
gucaucugcucgagaggg

SEQ ID NO: 860316 - RNA, 20 nt, Human
uccaccuucuaggagagcca

SEQ ID NO: 860317 - RNA, 24 nt, Human
ugagcagugagggccagagacuag

SEQ ID NO: 860318 - RNA, 20 nt, Human
ugccaggcaaggccuaggga

SEQ ID NO: 860319 - RNA, 19 nt, Human
ugccccagcuggggcugug

SEQ ID NO: 860320 - RNA, 23 nt, Human
ugcucgagaggggcugucgcugu

SEQ ID NO: 860321 - RNA, 20 nt, Human
uggagcccugggcucauccu

SEQ ID NO: 860322 - RNA, 18 nt, Human
ugggaaguggggaggggg

SEQ ID NO: 860323 - RNA, 20 nt, Human
ugggaaguggggagggggcu

SEQ ID NO: 860324 - RNA, 21 nt, Human
ugggaaguggggagggggcuc

SEQ ID NO: 860325 - RNA, 28 nt, Human
ugggacggggucucaggugaggaaucuu

SEQ ID NO: 860326 - RNA, 27 nt, Human
uggggacaggauaauaaaacauguaau

SEQ ID NO: 860327 - RNA, 19 nt, Human
uggggcugugugggacggg

SEQ ID NO: 860328 - RNA, 22 nt, Human
ugguuucuggauaaaccacccu

SEQ ID NO: 860329 - RNA, 19 nt, Human
uguaauauuuuuaagaagg

SEQ ID NO: 860330 - RNA, 18 nt, Human
uuuuuuuuuuuuuucuug

SEQ ID NO: 860331 - RNA, 18 nt, Human
uuuuuuuuuuuuuucuug

SEQ ID NO: 860332 - RNA, 22 nt, Human
aaagucuguucuccccacccuc

SEQ ID NO: 860333 - RNA, 23 nt, Human
agggaaaaagucuguucucccca

SEQ ID NO: 860334 - RNA, 20 nt, Human
agggaggggcgcgggcggcg

SEQ ID NO: 860335 - RNA, 22 nt, Human
caccgcacgccccgcggcaggu

SEQ ID NO: 860336 - RNA, 21 nt, Human
caccucaaacaacuuccugga

SEQ ID NO: 860337 - RNA, 19 nt, Human
cacucgcuggcugcucuuc

SEQ ID NO: 860338 - RNA, 19 nt, Human
cacucucccucucucuuuu

SEQ ID NO: 860339 - RNA, 21 nt, Human
cacucucccucucucuuuuuc

SEQ ID NO: 860340 - RNA, 19 nt, Human
cccaagcaccgcacgcccc

SEQ ID NO: 860341 - RNA, 18 nt, Human
cccagggaggggcgcggg

SEQ ID NO: 860342 - RNA, 21 nt, Human
ccccccuucacucucacuuuc

SEQ ID NO: 860343 - RNA, 19 nt, Human
cccccucacucgucccccc

SEQ ID NO: 860344 - RNA, 19 nt, Human
cccccucuccuucuccucc

SEQ ID NO: 860345 - RNA, 18 nt, Human
cccgggcugcucccaggg

SEQ ID NO: 860346 - RNA, 20 nt, Human
ccgcggcagguuggcggcga

SEQ ID NO: 860347 - RNA, 19 nt, Human
ccgcggucccgggcugcuc

SEQ ID NO: 860348 - RNA, 19 nt, Human
ccucaaacaacuuccugga

SEQ ID NO: 860349 - RNA, 21 nt, Human
ccucacucguccccccccuuc

SEQ ID NO: 860350 - RNA, 22 nt, Human
ccucacucguccccccccuuca

SEQ ID NO: 860351 - RNA, 26 nt, Human
ccuccccccucacucgucacccgagg

SEQ ID NO: 860352 - RNA, 21 nt, Human
ccuccucuucuucccccucuc

SEQ ID NO: 860353 - RNA, 18 nt, Human
cggucccgggcugcuccc

SEQ ID NO: 860354 - RNA, 20 nt, Human
cguccccccccuucacucuc

SEQ ID NO: 860355 - RNA, 23 nt, Human
cucucccucucucuuuuucuuuu

SEQ ID NO: 860356 - RNA, 19 nt, Human
cuucuccuccuccuccucc

SEQ ID NO: 860357 - RNA, 21 nt, Human
cuuucuuucuuuccgcuuucu

SEQ ID NO: 860358 - RNA, 21 nt, Human
gaaaaagucuguucuccccac

SEQ ID NO: 860359 - RNA, 20 nt, Human
gagggggcgccgagccuucc

SEQ ID NO: 860360 - RNA, 24 nt, Human
ggucccgggcugcucccagggagg

SEQ ID NO: 860361 - RNA, 21 nt, Human
guucuccccacccuccccccu

SEQ ID NO: 860362 - RNA, 21 nt, Human
uaauuuccuaugaugcaccuc

SEQ ID NO: 860363 - RNA, 19 nt, Human
ucacucucccucucucuuu

SEQ ID NO: 860364 - RNA, 18 nt, Human
ucccagggaggggcgcgg

SEQ ID NO: 860365 - RNA, 19 nt, Human
uccccacccuccccccuca

SEQ ID NO: 860366 - RNA, 20 nt, Human
ucucccagauucacucuccc

SEQ ID NO: 860367 - RNA, 19 nt, Human
ucuguucuccccacccucc

SEQ ID NO: 860368 - RNA, 20 nt, Human
ucuuucuuuccgcuuucucc

SEQ ID NO: 860369 - RNA, 22 nt, Human
ucuuucuuuccgcuuucuccuu

SEQ ID NO: 860370 - RNA, 24 nt, Human
ucuuucuuucuuuccgcuuucucc

SEQ ID NO: 860371 - RNA, 20 nt, Human
ucuuuuucuuuucuuucuuu

SEQ ID NO: 860372 - RNA, 24 nt, Human
uguucuccccacccuccccccuca

SEQ ID NO: 860373 - RNA, 21 nt, Human
uuccaaccgcggucccgggcu

SEQ ID NO: 860374 - RNA, 18 nt, Human
uucccccucuccuucucc

SEQ ID NO: 860375 - RNA, 18 nt, Human
uucuccccacccuccccc

SEQ ID NO: 860376 - RNA, 22 nt, Human
uucuccuccuccuccuccucgc

SEQ ID NO: 860377 - RNA, 18 nt, Human
uuggcggcgagggagggg

SEQ ID NO: 860378 - RNA, 23 nt, Human
aacacaacuuuuucucguguucu

SEQ ID NO: 860379 - RNA, 23 nt, Human
cuccagcauucuggccucgugcc

SEQ ID NO: 860380 - RNA, 21 nt, Human
gaagguaguauguucagaguc

SEQ ID NO: 860381 - RNA, 18 nt, Human
uaguauguucagagucuu

SEQ ID NO: 860382 - RNA, 24 nt, Human
uccuuuggcauagcuaauuuccag

SEQ ID NO: 860383 - RNA, 20 nt, Human
ugaaaugugucuggcuuuug

SEQ ID NO: 860384 - RNA, 22 nt, Human
ugaggcccaggcccaggcacug

SEQ ID NO: 860385 - RNA, 18 nt, Human
ugucuggcuuuuguccuu

SEQ ID NO: 860386 - RNA, 20 nt, Human
uugccaguuucugaaguccu

SEQ ID NO: 860387 - RNA, 22 nt, Human
uugcuugccaguuucugaaguc

SEQ ID NO: 860388 - RNA, 24 nt, Human
uuuuguccuuucaccuacgcucca

SEQ ID NO: 860389 - RNA, 26 nt, Human
uuuuuuuuuuaaagguaagagcacuu

SEQ ID NO: 860390 - RNA, 20 nt, Human
uuuuuuuuuuuuuaaaggua

SEQ ID NO: 860391 - RNA, 22 nt, Human
uuuuuuuuuuuuuuuuuaaagg

SEQ ID NO: 860392 - RNA, 19 nt, Human
aaaccaagcagaggaagcc

SEQ ID NO: 860393 - RNA, 18 nt, Human
aagcuuuugaacagaccc

SEQ ID NO: 860394 - RNA, 18 nt, Human
aauuuauucguccuccuc

SEQ ID NO: 860395 - RNA, 21 nt, Human
acagacccucaaaccaagcag

SEQ ID NO: 860396 - RNA, 22 nt, Human
acuucagaggcgcccgcucagg

SEQ ID NO: 860397 - RNA, 20 nt, Human
agacccucaaaccaagcaga

SEQ ID NO: 860398 - RNA, 20 nt, Human
agcuuccacaauggaaugga

SEQ ID NO: 860399 - RNA, 22 nt, Human
caggcgaggcugcggugaagcc

SEQ ID NO: 860400 - RNA, 23 nt, Human
cccaaagcuuuugaacagacccu

SEQ ID NO: 860401 - RNA, 22 nt, Human
ccgaagcccggcccugaccccg

SEQ ID NO: 860402 - RNA, 20 nt, Human
ccgcgccccgcucccuccag

SEQ ID NO: 860403 - RNA, 20 nt, Human
ccggaggcccgcccucgugc

SEQ ID NO: 860404 - RNA, 20 nt, Human
ccggcccugaccccgcggac

SEQ ID NO: 860405 - RNA, 24 nt, Human
ccuggcaccuggcccagcuuccac

SEQ ID NO: 860406 - RNA, 19 nt, Human
ccuucccuccuuuuacucc

SEQ ID NO: 860407 - RNA, 20 nt, Human
cgccccgcucccuccagcaa

SEQ ID NO: 860408 - RNA, 23 nt, Human
cgcccuccacuucagaggcgccc

SEQ ID NO: 860409 - RNA, 21 nt, Human
cucaaaccaagcagaggaagc

SEQ ID NO: 860410 - RNA, 20 nt, Human
cuccagcaccucgccgggcc

SEQ ID NO: 860411 - RNA, 21 nt, Human
cucccgaggcccgcggcccag

SEQ ID NO: 860412 - RNA, 20 nt, Human
gauccgcgccccgcucccuc

SEQ ID NO: 860413 - RNA, 20 nt, Human
gcccaggcggcccgcccucc

SEQ ID NO: 860414 - RNA, 24 nt, Human
ucaaaccaagcagaggaagccaug

SEQ ID NO: 860415 - RNA, 18 nt, Human
ucccuaauuggcccaaag

SEQ ID NO: 860416 - RNA, 22 nt, Human
ucccuaauuggcccaaagcuuu

SEQ ID NO: 860417 - RNA, 22 nt, Human
ucccugaaggagagugucccug

SEQ ID NO: 860418 - RNA, 24 nt, Human
ucccugaaggagagugucccuggc

SEQ ID NO: 860419 - RNA, 22 nt, Human
ucccuggcaccuggcccagcuu

SEQ ID NO: 860420 - RNA, 23 nt, Human
ucccuggcaccuggcccagcuuc

SEQ ID NO: 860421 - RNA, 18 nt, Human
uccgcgccccgcucccuc

SEQ ID NO: 860422 - RNA, 20 nt, Human
uccgcgccccgcucccucca

SEQ ID NO: 860423 - RNA, 22 nt, Human
ugaacagacccucaaaccaagc

SEQ ID NO: 860424 - RNA, 25 nt, Human
ugaacagacccucaaaccaagcaga

SEQ ID NO: 860425 - RNA, 22 nt, Human
uggcccaaagcuuuugaacagg

SEQ ID NO: 860426 - RNA, 23 nt, Human
uggugugccuuccaccacuggag

SEQ ID NO: 860427 - RNA, 20 nt, Human
uuacucccuaauuggcccaa

SEQ ID NO: 860428 - RNA, 21 nt, Human
uugaacagacccucaaaccaa

SEQ ID NO: 860429 - RNA, 18 nt, Human
uuuuuuuuuuaaaacaaa

SEQ ID NO: 860430 - RNA, 23 nt, Human
aaaaucagaaaucaccuguaacc

SEQ ID NO: 860431 - RNA, 22 nt, Human
aaaucccuggaguagacaaucc

SEQ ID NO: 860432 - RNA, 19 nt, Human
aagcgccccgggggucgga

SEQ ID NO: 860433 - RNA, 26 nt, Human
aaggacccagccacugcuggccaccc

SEQ ID NO: 860434 - RNA, 21 nt, Human
accugucccgagacccgagag

SEQ ID NO: 860435 - RNA, 19 nt, Human
acugaccccugcgccacgc

SEQ ID NO: 860436 - RNA, 24 nt, Human
agcccggggcucgcucgggcgcgc

SEQ ID NO: 860437 - RNA, 22 nt, Human
aggacggaggggcgcggaagga

SEQ ID NO: 860438 - RNA, 19 nt, Human
aggugcucagggaaaggag

SEQ ID NO: 860439 - RNA, 19 nt, Human
cacccuggccucugcucug

SEQ ID NO: 860440 - RNA, 21 nt, Human
cagccacugcuggccacccug

SEQ ID NO: 860441 - RNA, 20 nt, Human
ccaggaacagugccugugcc

SEQ ID NO: 860442 - RNA, 22 nt, Human
cccacgaucuccugcacccgcc

SEQ ID NO: 860443 - RNA, 21 nt, Human
ccccacuccggacgcuuccuc

SEQ ID NO: 860444 - RNA, 21 nt, Human
cccgagagaaccacugacccc

SEQ ID NO: 860445 - RNA, 21 nt, Human
cccuccucaccuccucugcca

SEQ ID NO: 860446 - RNA, 21 nt, Human
ccuccucaccuccucugccau

SEQ ID NO: 860447 - RNA, 19 nt, Human
cgccccuccucaccacggc

SEQ ID NO: 860448 - RNA, 19 nt, Human
cucagggaaaggaggacgg

SEQ ID NO: 860449 - RNA, 20 nt, Human
cucgaagcgccccggggguc

SEQ ID NO: 860450 - RNA, 20 nt, Human
cucuggggaggcgccccucc

SEQ ID NO: 860451 - RNA, 21 nt, Human
cugaccccugcgccacgcugg

SEQ ID NO: 860452 - RNA, 20 nt, Human
cugggcccgaggggagcccg

SEQ ID NO: 860453 - RNA, 21 nt, Human
cuggggaggcgccccuccuca

SEQ ID NO: 860454 - RNA, 18 nt, Human
cuggugaugaaggugcuc

SEQ ID NO: 860455 - RNA, 23 nt, Human
gagcacugacaugcuguggucca

SEQ ID NO: 860456 - RNA, 18 nt, Human
gccugcaggccgggcugg

SEQ ID NO: 860457 - RNA, 20 nt, Human
gcgcggaaggacccagccag

SEQ ID NO: 860458 - RNA, 28 nt, Human
gcggaaggacccagccacugcuggccag

SEQ ID NO: 860459 - RNA, 19 nt, Human
gcggggccggggugcgcga

SEQ ID NO: 860460 - RNA, 19 nt, Human
gggccggggugcgcgaggg

SEQ ID NO: 860461 - RNA, 20 nt, Human
gggcgcccacgaucuccugc

SEQ ID NO: 860462 - RNA, 19 nt, Human
ggggucggaguccgggccc

SEQ ID NO: 860463 - RNA, 19 nt, Human
gucaaaaucagaaaucacc

SEQ ID NO: 860464 - RNA, 24 nt, Human
gucccgagacccgagagaaccacu

SEQ ID NO: 860465 - RNA, 22 nt, Human
uagacaaucccuagagcacuga

SEQ ID NO: 860466 - RNA, 18 nt, Human
ucaaaaucagaaaucacc

SEQ ID NO: 860467 - RNA, 21 nt, Human
ucagaaaucaccuguaaccgg

SEQ ID NO: 860468 - RNA, 24 nt, Human
ucccgagacccgagagaaccacug

SEQ ID NO: 860469 - RNA, 22 nt, Human
ucccuggaguagacaaucccua

SEQ ID NO: 860470 - RNA, 19 nt, Human
ucuccugcacccgcccagg

SEQ ID NO: 860471 - RNA, 23 nt, Human
ugcaggccgggcuggagccugcg

SEQ ID NO: 860472 - RNA, 24 nt, Human
ugcgcgaggggggcggcuacuggc

SEQ ID NO: 860473 - RNA, 20 nt, Human
uggccugggugaagcggcgg

SEQ ID NO: 860474 - RNA, 24 nt, Human
uggggaggcgccccuccucaccac

SEQ ID NO: 860475 - RNA, 18 nt, Human
uuuuuuuuuuuuuuucug

SEQ ID NO: 860476 - RNA, 23 nt, Human
uuuuuuuuuuuuuuuuucuguuu

SEQ ID NO: 860477 - RNA, 21 nt, Human
acagacgacccgggucucaaa

SEQ ID NO: 860478 - RNA, 20 nt, Human
acccgcggggccggcagggc

SEQ ID NO: 860479 - RNA, 23 nt, Human
acgacccgggucucaaagaggcg

SEQ ID NO: 860480 - RNA, 19 nt, Human
acgcagccccugguccauc

SEQ ID NO: 860481 - RNA, 19 nt, Human
agccgcgacaccaccaaca

SEQ ID NO: 860482 - RNA, 22 nt, Human
caccaccaacagucgccgcaac

SEQ ID NO: 860483 - RNA, 18 nt, Human
cagccccugguccaucuc

SEQ ID NO: 860484 - RNA, 19 nt, Human
cagccccugguccaucucg

SEQ ID NO: 860485 - RNA, 22 nt, Human
cagccccugguccaucucgggc

SEQ ID NO: 860486 - RNA, 22 nt, Human
caggcgccucccacgggguucc

SEQ ID NO: 860487 - RNA, 19 nt, Human
cccgcagccgcgacaccac

SEQ ID NO: 860488 - RNA, 19 nt, Human
cccgcagugcuuggggacc

SEQ ID NO: 860489 - RNA, 21 nt, Human
cccgccgcgcgcaggcggccg

SEQ ID NO: 860490 - RNA, 23 nt, Human
cccgccgcgcgcaggcggccgca

SEQ ID NO: 860491 - RNA, 19 nt, Human
ccgugcaggaagcagccuc

SEQ ID NO: 860492 - RNA, 21 nt, Human
cgaccgggaagaaggggccgg

SEQ ID NO: 860493 - RNA, 21 nt, Human
cgcagccgcgacaccaccaac

SEQ ID NO: 860494 - RNA, 19 nt, Human
cgggaccccuucccggugu

SEQ ID NO: 860495 - RNA, 23 nt, Human
cgggacgcagccccugguccauc

SEQ ID NO: 860496 - RNA, 18 nt, Human
gacccgggcggagagcaa

SEQ ID NO: 860497 - RNA, 20 nt, Human
gacccgggucucaaagaggc

SEQ ID NO: 860498 - RNA, 23 nt, Human
gagguccugggagcgcggggcug

SEQ ID NO: 860499 - RNA, 27 nt, Human
gagguccugggagcgcggggcugggcg

SEQ ID NO: 860500 - RNA, 18 nt, Human
gcguggaacagacgaccc

SEQ ID NO: 860501 - RNA, 18 nt, Human
gcucccacguggcgucga

SEQ ID NO: 860502 - RNA, 21 nt, Human
ggagcccuucccaggcgccuu

SEQ ID NO: 860503 - RNA, 18 nt, Human
ggagcgcggggcugggcg

SEQ ID NO: 860504 - RNA, 19 nt, Human
uacaggagacggggccucc

SEQ ID NO: 860505 - RNA, 21 nt, Human
uacugcgcccggguccucccg

SEQ ID NO: 860506 - RNA, 25 nt, Human
ucgccgcaaccgccgcguggaacag

SEQ ID NO: 860507 - RNA, 22 nt, Human
ucucaaagaggcggcgcgggcg

SEQ ID NO: 860508 - RNA, 20 nt, Human
ugaaagggagccgcgcggug

SEQ ID NO: 860509 - RNA, 23 nt, Human
uggggucccgcagugcuugggga

SEQ ID NO: 860510 - RNA, 21 nt, Human
uucacggugacaucgcaaaag

SEQ ID NO: 860511 - RNA, 21 nt, Human
aaggggccccguggggccugc

SEQ ID NO: 860512 - RNA, 22 nt, Human
accuggugccgcagggcguucu

SEQ ID NO: 860513 - RNA, 24 nt, Human
agccgccucugccgcaacaccacc

SEQ ID NO: 860514 - RNA, 22 nt, Human
agcuggagcuccuccagccgcc

SEQ ID NO: 860515 - RNA, 25 nt, Human
aggccggggcggacccagcugggga

SEQ ID NO: 860516 - RNA, 23 nt, Human
agggaucgggggcuccgaagggg

SEQ ID NO: 860517 - RNA, 18 nt, Human
caccuggugccgcagggc

SEQ ID NO: 860518 - RNA, 22 nt, Human
caccuggugccgcagggcguuc

SEQ ID NO: 860519 - RNA, 23 nt, Human
ccccuuccuccccuccgggcgcc

SEQ ID NO: 860520 - RNA, 21 nt, Human
cccggccccuuccuccccucc

SEQ ID NO: 860521 - RNA, 24 nt, Human
ccgcuggccgccuccguucccggu

SEQ ID NO: 860522 - RNA, 21 nt, Human
ccuccagccgccucugccgca

SEQ ID NO: 860523 - RNA, 20 nt, Human
ccuccgggcgccgcuggccg

SEQ ID NO: 860524 - RNA, 19 nt, Human
ccucugccgcaacaccacc

SEQ ID NO: 860525 - RNA, 19 nt, Human
ccugcgcuagacccggagg

SEQ ID NO: 860526 - RNA, 21 nt, Human
ccugcgcuagacccggaggga

SEQ ID NO: 860527 - RNA, 18 nt, Human
cgggggcuccgaaggggg

SEQ ID NO: 860528 - RNA, 21 nt, Human
cuccuccagccgccucugccg

SEQ ID NO: 860529 - RNA, 19 nt, Human
cuggaccacuuucucaucu

SEQ ID NO: 860530 - RNA, 23 nt, Human
cuugagcagguccagcagcuuua

SEQ ID NO: 860531 - RNA, 19 nt, Human
gccccguggggccugcgcu

SEQ ID NO: 860532 - RNA, 20 nt, Human
gccggggcggacccagcugg

SEQ ID NO: 860533 - RNA, 23 nt, Human
gccugcgcuagacccggagggau

SEQ ID NO: 860534 - RNA, 19 nt, Human
gcugacugauggucucccu

SEQ ID NO: 860535 - RNA, 19 nt, Human
ggagcuccuccagccgccu

SEQ ID NO: 860536 - RNA, 18 nt, Human
ggccccuuccuccccucc

SEQ ID NO: 860537 - RNA, 21 nt, Human
gguccgggccgcguucagccc

SEQ ID NO: 860538 - RNA, 26 nt, Human
guucugcugcuucaccuucucccuca

SEQ ID NO: 860539 - RNA, 21 nt, Human
uagacccggagggaucggggg

SEQ ID NO: 860540 - RNA, 22 nt, Human
ucccuugagcagguccagcagc

SEQ ID NO: 860541 - RNA, 21 nt, Human
ucucccuugagcagguccagc

SEQ ID NO: 860542 - RNA, 21 nt, Human
ucugcugcuucaccuucuccc

SEQ ID NO: 860543 - RNA, 18 nt, Human
ugaaggggccccgugggg

SEQ ID NO: 860544 - RNA, 18 nt, Human
ugacugauggucucccuc

SEQ ID NO: 860545 - RNA, 24 nt, Human
ugccuggaccacuuucucaucucc

SEQ ID NO: 860546 - RNA, 18 nt, Human
uguccuguucuucaggua

SEQ ID NO: 860547 - RNA, 23 nt, Human
uuccagugccuuagucuccuugc

SEQ ID NO: 860548 - RNA, 20 nt, Human
uugcggagcugacugauggu

SEQ ID NO: 860549 - RNA, 23 nt, Human
uuuuuuuuuuuuuuuuuucaugg

SEQ ID NO: 860550 - RNA, 18 nt, Human
aacagcccugaauggcag

SEQ ID NO: 860551 - RNA, 22 nt, Human
aacagcccugaauggcagggau

SEQ ID NO: 860552 - RNA, 18 nt, Human
aaggaggcccgaggagag

SEQ ID NO: 860553 - RNA, 25 nt, Human
agaaauccccccaucaaagucacca

SEQ ID NO: 860554 - RNA, 21 nt, Human
agaggaucgaaucucuggaac

SEQ ID NO: 860555 - RNA, 24 nt, Human
agaggcuguccaggagcugcccag

SEQ ID NO: 860556 - RNA, 23 nt, Human
aggcagagguggcuaggcugggu

SEQ ID NO: 860557 - RNA, 25 nt, Human
aggccagcgccgagcgcggcccgga

SEQ ID NO: 860558 - RNA, 21 nt, Human
aggccuggcgcgucugggccc

SEQ ID NO: 860559 - RNA, 24 nt, Human
aggcggccaaaggcccuuccuguc

SEQ ID NO: 860560 - RNA, 23 nt, Human
aggcugcuggccuggugcuggcu

SEQ ID NO: 860561 - RNA, 20 nt, Human
agugccaguccccagguggc

SEQ ID NO: 860562 - RNA, 18 nt, Human
caccacagugccaguccc

SEQ ID NO: 860563 - RNA, 23 nt, Human
caccagucugcacacccaccugc

SEQ ID NO: 860564 - RNA, 22 nt, Human
cagcaggccagcgccgagcgcg

SEQ ID NO: 860565 - RNA, 19 nt, Human
cagccaccccuggaguccc

SEQ ID NO: 860566 - RNA, 22 nt, Human
cagggcggagccaguguccacu

SEQ ID NO: 860567 - RNA, 19 nt, Human
cagucucccagccaccccu

SEQ ID NO: 860568 - RNA, 18 nt, Human
caguggguccucauggcc

SEQ ID NO: 860569 - RNA, 22 nt, Human
cauuccugucccaaggcgaagg

SEQ ID NO: 860570 - RNA, 18 nt, Human
ccaaggcgaagggucuug

SEQ ID NO: 860571 - RNA, 19 nt, Human
ccaccccuggaguccccag

SEQ ID NO: 860572 - RNA, 22 nt, Human
ccaccugcagcuguccugaucc

SEQ ID NO: 860573 - RNA, 28 nt, Human
ccagaaauccccccaucaaagucaccaa

SEQ ID NO: 860574 - RNA, 22 nt, Human
ccagagccuugacauaaccaga

SEQ ID NO: 860575 - RNA, 20 nt, Human
ccagcgccgagcgcggcccg

SEQ ID NO: 860576 - RNA, 23 nt, Human
ccagggagaaggaggcccgagga

SEQ ID NO: 860577 - RNA, 18 nt, Human
ccccuggaguccccagcc

SEQ ID NO: 860578 - RNA, 19 nt, Human
ccccuggaguccccagccc

SEQ ID NO: 860579 - RNA, 20 nt, Human
ccuccggccggcggacccgc

SEQ ID NO: 860580 - RNA, 24 nt, Human
ccuccggccggcggacccgccggg

SEQ ID NO: 860581 - RNA, 23 nt, Human
cucaagugcucccggaggcagcc

SEQ ID NO: 860582 - RNA, 18 nt, Human
cuggagccaagaggcugu

SEQ ID NO: 860583 - RNA, 23 nt, Human
gagccgggcaggggccacagggu

SEQ ID NO: 860584 - RNA, 21 nt, Human
gagccuugacauaaccagaaa

SEQ ID NO: 860585 - RNA, 23 nt, Human
gaucuuucuucuccuguauggac

SEQ ID NO: 860586 - RNA, 18 nt, Human
gcaggugcccauuccugu

SEQ ID NO: 860587 - RNA, 21 nt, Human
gcccugaauggcagggaugag

SEQ ID NO: 860588 - RNA, 22 nt, Human
gcuggagccaagaggcugucca

SEQ ID NO: 860589 - RNA, 22 nt, Human
ggagggcugacccaagaggcag

SEQ ID NO: 860590 - RNA, 23 nt, Human
ggaggggccccaccaccuggggg

SEQ ID NO: 860591 - RNA, 18 nt, Human
ggccacauugggccacug

SEQ ID NO: 860592 - RNA, 22 nt, Human
ggccagcgccgagcgcggcccg

SEQ ID NO: 860593 - RNA, 20 nt, Human
ggcuaggcuggguguugacc

SEQ ID NO: 860594 - RNA, 21 nt, Human
ggcuaggcuggguguugaccu

SEQ ID NO: 860595 - RNA, 19 nt, Human
ggcugcuggccuggugcug

SEQ ID NO: 860596 - RNA, 25 nt, Human
ggggaagggagguuguuugcagaaa

SEQ ID NO: 860597 - RNA, 21 nt, Human
ggggagcagaauggguggggg

SEQ ID NO: 860598 - RNA, 22 nt, Human
gggugggggagccgggcagggg

SEQ ID NO: 860599 - RNA, 18 nt, Human
ggugggggagccgggcag

SEQ ID NO: 860600 - RNA, 18 nt, Human
gucaaggagggcugaccc

SEQ ID NO: 860601 - RNA, 24 nt, Human
gucucccagccaccccuggagucc

SEQ ID NO: 860602 - RNA, 20 nt, Human
uaaccagaaauccccccauc

SEQ ID NO: 860603 - RNA, 19 nt, Human
uacccaaggcggccaaagg

SEQ ID NO: 860604 - RNA, 20 nt, Human
uaccucaagugcucccggag

SEQ ID NO: 860605 - RNA, 22 nt, Human
uaccucaagugcucccggaggc

SEQ ID NO: 860606 - RNA, 22 nt, Human
ucaacuacccaaggcggccaaa

SEQ ID NO: 860607 - RNA, 24 nt, Human
ucaaggagggcugacccaagaggc

SEQ ID NO: 860608 - RNA, 19 nt, Human
uccccagguggccagggcg

SEQ ID NO: 860609 - RNA, 21 nt, Human
uccccagguggccagggcgga

SEQ ID NO: 860610 - RNA, 20 nt, Human
uccugccccugccuccucca

SEQ ID NO: 860611 - RNA, 22 nt, Human
ucuccuguauggacucagaagc

SEQ ID NO: 860612 - RNA, 23 nt, Human
ugacauaaccagaaaucccccca

SEQ ID NO: 860613 - RNA, 20 nt, Human
ugauccgccgaggccuccuu

SEQ ID NO: 860614 - RNA, 20 nt, Human
ugcagaaagacuuagcuaca

SEQ ID NO: 860615 - RNA, 23 nt, Human
ugcagaaagacuuagcuacaagg

SEQ ID NO: 860616 - RNA, 24 nt, Human
ugcccaguggguccucauggccug

SEQ ID NO: 860617 - RNA, 25 nt, Human
ugccccugccuccuccaggcgcugg

SEQ ID NO: 860618 - RNA, 19 nt, Human
ugccuccuccaggcgcugg

SEQ ID NO: 860619 - RNA, 23 nt, Human
ugcucccggaggcagccuaggac

SEQ ID NO: 860620 - RNA, 22 nt, Human
uggcuaggcuggguguugaccu

SEQ ID NO: 860621 - RNA, 19 nt, Human
ugggggagccgggcagggg

SEQ ID NO: 860622 - RNA, 22 nt, Human
ugggggcuggagccaagaggcu

SEQ ID NO: 860623 - RNA, 18 nt, Human
uguccaggagcugcccag

SEQ ID NO: 860624 - RNA, 20 nt, Human
uugacauaaccagaaauccc

SEQ ID NO: 860625 - RNA, 20 nt, Human
uuuuuuuuuuuuuuuugcaa

SEQ ID NO: 860626 - RNA, 22 nt, Human
uuuuuuuuuuuuuuuugcaagu

SEQ ID NO: 860627 - RNA, 19 nt, Human
agaaaacuugccaaguucu

SEQ ID NO: 860628 - RNA, 22 nt, Human
auccaggcaugauuaacuugac

SEQ ID NO: 860629 - RNA, 21 nt, Human
caaauggagaaaacuugccaa

SEQ ID NO: 860630 - RNA, 19 nt, Human
caacauccaggcaugauua

SEQ ID NO: 860631 - RNA, 23 nt, Human
cacaucuuuuaaacugagguaga

SEQ ID NO: 860632 - RNA, 25 nt, Human
cccccgggcagcccucagaaaugug

SEQ ID NO: 860633 - RNA, 23 nt, Human
cugaggaaaaaucaauagcauuc

SEQ ID NO: 860634 - RNA, 25 nt, Human
uaacuugaccacauauuaucacauc

SEQ ID NO: 860635 - RNA, 23 nt, Human
ucaacauccaggcaugauuaacu

SEQ ID NO: 860636 - RNA, 18 nt, Human
ucggagaagacaaccacg

SEQ ID NO: 860637 - RNA, 24 nt, Human
ugaccacauauuaucacaucuuuu

SEQ ID NO: 860638 - RNA, 27 nt, Human
ugaggaaaaaucaauagcauuccacag

SEQ ID NO: 860639 - RNA, 25 nt, Human
ugauucaucugugaauguugggcag

SEQ ID NO: 860640 - RNA, 21 nt, Human
uggcugacagaucugaaaguu

SEQ ID NO: 860641 - RNA, 18 nt, Human
uguguuagacagauugag

SEQ ID NO: 860642 - RNA, 20 nt, Human
uuccugcuugaggcugaagg

SEQ ID NO: 860643 - RNA, 21 nt, Human
uuuacauuguuauugagauuc

SEQ ID NO: 860644 - RNA, 21 nt, Human
uuuuguucuuccugcuugagg

SEQ ID NO: 860645 - RNA, 23 nt, Human
uuuuuuguucuuccugcuugagg

SEQ ID NO: 860646 - RNA, 19 nt, Human
uuuuuuuuuuuuuuuugcu

SEQ ID NO: 860647 - RNA, 20 nt, Human
uuuuuuuuuuuuuuuugcuu

SEQ ID NO: 860648 - RNA, 21 nt, Human
aacauuuuuauuguaaaaagu

SEQ ID NO: 860649 - RNA, 18 nt, Human
aagcuugcccacgaccgc

SEQ ID NO: 860650 - RNA, 21 nt, Human
agacacauuuuucuguacaaa

SEQ ID NO: 860651 - RNA, 21 nt, Human
aggcccagcgcucccggcccg

SEQ ID NO: 860652 - RNA, 21 nt, Human
caggcccagcgcucccggccc

SEQ ID NO: 860653 - RNA, 26 nt, Human
cauuuuuauuguaaaaaguucaagaa

SEQ ID NO: 860654 - RNA, 25 nt, Human
ccauuuacaagccaaaaaguaucag

SEQ ID NO: 860655 - RNA, 21 nt, Human
cccgcuggguaaccgucccag

SEQ ID NO: 860656 - RNA, 19 nt, Human
cgaccgucucaaggugaca

SEQ ID NO: 860657 - RNA, 24 nt, Human
cugauugcaaaauaggucucucuc

SEQ ID NO: 860658 - RNA, 20 nt, Human
cuucccggcaggcccagcgc

SEQ ID NO: 860659 - RNA, 23 nt, Human
uaaauaaauaaucuaaaaaucaa

SEQ ID NO: 860660 - RNA, 23 nt, Human
ugcaaaauaggucucucucucga

SEQ ID NO: 860661 - RNA, 18 nt, Human
uuuauuguaaaaaguuca

SEQ ID NO: 860662 - RNA, 19 nt, Human
aaaauaaaaaugacugguu

SEQ ID NO: 860663 - RNA, 21 nt, Human
aaacaaguuguaaacaauaua

SEQ ID NO: 860664 - RNA, 20 nt, Human
aaacaggagaauugcuugaa

SEQ ID NO: 860665 - RNA, 24 nt, Human
aaacaggagaauugcuugaaucug

SEQ ID NO: 860666 - RNA, 25 nt, Human
aacaagccaggacaguggacagacg

SEQ ID NO: 860667 - RNA, 19 nt, Human
aacauggugaaaccccauc

SEQ ID NO: 860668 - RNA, 20 nt, Human
aacauggugaaaccccaucu

SEQ ID NO: 860669 - RNA, 21 nt, Human
aacauggugaaaccccaucuc

SEQ ID NO: 860670 - RNA, 21 nt, Human
aacauggugaaaccccaucuc

SEQ ID NO: 860671 - RNA, 23 nt, Human
aagagcgaaacucugucucaaaa

SEQ ID NO: 860672 - RNA, 26 nt, Human
aauucuugguuguuuucggcugggca

SEQ ID NO: 860673 - RNA, 20 nt, Human
aauugcuugaaucugggugg

SEQ ID NO: 860674 - RNA, 20 nt, Human
acaagagcgaaacucugucu

SEQ ID NO: 860675 - RNA, 21 nt, Human
acaagagcgaaacucugucuc

SEQ ID NO: 860676 - RNA, 24 nt, Human
accaacauggugaaaccccaucuc

SEQ ID NO: 860677 - RNA, 22 nt, Human
accauugcacuccagccugggc

SEQ ID NO: 860678 - RNA, 18 nt, Human
accccaucucuacuaaaa

SEQ ID NO: 860679 - RNA, 24 nt, Human
accugaggucaggaguucaagacc

SEQ ID NO: 860680 - RNA, 19 nt, Human
acgcuggaucccuggcugg

SEQ ID NO: 860681 - RNA, 18 nt, Human
acucgggaggcugaaaca

SEQ ID NO: 860682 - RNA, 18 nt, Human
acuuggaguucuucuuuc

SEQ ID NO: 860683 - RNA, 22 nt, Human
agacuggaggugggagaggcag

SEQ ID NO: 860684 - RNA, 18 nt, Human
agagcgaaacucugucuc

SEQ ID NO: 860685 - RNA, 24 nt, Human
agcacuuugggagccugacguggg

SEQ ID NO: 860686 - RNA, 24 nt, Human
agccugaccaacauggugaaaccc

SEQ ID NO: 860687 - RNA, 18 nt, Human
agcucugcuccagcuaca

SEQ ID NO: 860688 - RNA, 21 nt, Human
agcugggcguggugaugggug

SEQ ID NO: 860689 - RNA, 24 nt, Human
aggcaggugccacccgcaggaguu

SEQ ID NO: 860690 - RNA, 23 nt, Human
agugguucaugccuguaaucuca

SEQ ID NO: 860691 - RNA, 24 nt, Human
agugguucaugccuguaaucucag

SEQ ID NO: 860692 - RNA, 23 nt, Human
aucaccugaggucaggaguucaa

SEQ ID NO: 860693 - RNA, 24 nt, Human
aucaccugaggucaggaguucaag

SEQ ID NO: 860694 - RNA, 19 nt, Human
augccuguaaucucagcac

SEQ ID NO: 860695 - RNA, 24 nt, Human
auugcacuccagccugggcaacaa

SEQ ID NO: 860696 - RNA, 21 nt, Human
auugcagugagcugaaauugc

SEQ ID NO: 860697 - RNA, 24 nt, Human
auuuggguguaggaaucuuggcug

SEQ ID NO: 860698 - RNA, 23 nt, Human
caacaagagcgaaacucugucuc

SEQ ID NO: 860699 - RNA, 24 nt, Human
caacauggugaaaccccaucucua

SEQ ID NO: 860700 - RNA, 18 nt, Human
caagccaggacaguggac

SEQ ID NO: 860701 - RNA, 20 nt, Human
caagccaggacaguggacag

SEQ ID NO: 860702 - RNA, 25 nt, Human
cacaauguauucauacuuuaaaacu

SEQ ID NO: 860703 - RNA, 20 nt, Human
caccauugcacuccagccug

SEQ ID NO: 860704 - RNA, 23 nt, Human
caccugaggucaggaguucaaga

SEQ ID NO: 860705 - RNA, 24 nt, Human
cacuccagccugggcaacaagagc

SEQ ID NO: 860706 - RNA, 25 nt, Human
cacuccagccugggcaacaagagcg

SEQ ID NO: 860707 - RNA, 20 nt, Human
cagaacgguugcccgggaga

SEQ ID NO: 860708 - RNA, 18 nt, Human
cagcacuuugggagccug

SEQ ID NO: 860709 - RNA, 20 nt, Human
cagcacuuugggagccugac

SEQ ID NO: 860710 - RNA, 22 nt, Human
cagcacuuugggagccugacgu

SEQ ID NO: 860711 - RNA, 20 nt, Human
caugccuguaaucucagcac

SEQ ID NO: 860712 - RNA, 24 nt, Human
caugccuguaaucucagcacuuug

SEQ ID NO: 860713 - RNA, 19 nt, Human
cauugcacuccagccuggg

SEQ ID NO: 860714 - RNA, 21 nt, Human
cauugcacuccagccugggca

SEQ ID NO: 860715 - RNA, 20 nt, Human
ccauugcacuccagccuggg

SEQ ID NO: 860716 - RNA, 21 nt, Human
ccauugcacuccagccugggc

SEQ ID NO: 860717 - RNA, 22 nt, Human
ccauugcacuccagccugggca

SEQ ID NO: 860718 - RNA, 23 nt, Human
ccauugcacuccagccugggcaa

SEQ ID NO: 860719 - RNA, 24 nt, Human
ccauugcacuccagccugggcaac

SEQ ID NO: 860720 - RNA, 25 nt, Human
ccauugcacuccagccugggcaaca

SEQ ID NO: 860721 - RNA, 21 nt, Human
ccgaguugaauaaaauagucc

SEQ ID NO: 860722 - RNA, 24 nt, Human
ccugaccaacauggugaaacccca

SEQ ID NO: 860723 - RNA, 20 nt, Human
ccugcaucccucuccguucu

SEQ ID NO: 860724 - RNA, 21 nt, Human
cggcagaaagaggaggaaccc

SEQ ID NO: 860725 - RNA, 22 nt, Human
cggcagaaagaggaggaaccgg

SEQ ID NO: 860726 - RNA, 20 nt, Human
cggcugggcacagugguuca

SEQ ID NO: 860727 - RNA, 24 nt, Human
cgugauacugaacacaccgacuaa

SEQ ID NO: 860728 - RNA, 21 nt, Human
cucugcagccaggaccccagu

SEQ ID NO: 860729 - RNA, 18 nt, Human
cugcaauuccagcuacuc

SEQ ID NO: 860730 - RNA, 21 nt, Human
cugcaauuccagcuacucggg

SEQ ID NO: 860731 - RNA, 19 nt, Human
cuggguggcagagauugca

SEQ ID NO: 860732 - RNA, 19 nt, Human
cugugcacacggcugggca

SEQ ID NO: 860733 - RNA, 23 nt, Human
cuugguuguuuucggcugggcac

SEQ ID NO: 860734 - RNA, 23 nt, Human
gacguggguggaucaccugaggu

SEQ ID NO: 860735 - RNA, 21 nt, Human
gacuggaggugggagaggcag

SEQ ID NO: 860736 - RNA, 18 nt, Human
gagcucgcccccaacucc

SEQ ID NO: 860737 - RNA, 23 nt, Human
gagcucgcccccaacuccaugcc

SEQ ID NO: 860738 - RNA, 22 nt, Human
gagcucugcuccagcuacacug

SEQ ID NO: 860739 - RNA, 21 nt, Human
gaggaggaaccggaugcagug

SEQ ID NO: 860740 - RNA, 19 nt, Human
gaguugaauaaaauagucc

SEQ ID NO: 860741 - RNA, 23 nt, Human
gaucaccugaggucaggaguuca

SEQ ID NO: 860742 - RNA, 24 nt, Human
gaucaccugaggucaggaguucaa

SEQ ID NO: 860743 - RNA, 23 nt, Human
gaucccuggcuggccugcauccc

SEQ ID NO: 860744 - RNA, 21 nt, Human
gcagaaagaggaggaaccgga

SEQ ID NO: 860745 - RNA, 20 nt, Human
gcagacagcucugcagccag

SEQ ID NO: 860746 - RNA, 18 nt, Human
gcccaacguggggagcag

SEQ ID NO: 860747 - RNA, 24 nt, Human
ggagaaggcagcgcuuggaacaag

SEQ ID NO: 860748 - RNA, 22 nt, Human
ggaucaccugaggucaggaguu

SEQ ID NO: 860749 - RNA, 23 nt, Human
ggcacagugguucaugccuguaa

SEQ ID NO: 860750 - RNA, 23 nt, Human
gggaagacgcuggaucccuggcu

SEQ ID NO: 860751 - RNA, 23 nt, Human
gggcguggugaugggugucugca

SEQ ID NO: 860752 - RNA, 19 nt, Human
ggggagcagacagcucugc

SEQ ID NO: 860753 - RNA, 23 nt, Human
guacaugacugacaagaccagug

SEQ ID NO: 860754 - RNA, 19 nt, Human
uaaaaugggggccuuuggc

SEQ ID NO: 860755 - RNA, 19 nt, Human
uaaaauuagcugggcgugg

SEQ ID NO: 860756 - RNA, 19 nt, Human
uaccucaucgacguuccca

SEQ ID NO: 860757 - RNA, 20 nt, Human
uacugaugagcucgccccca

SEQ ID NO: 860758 - RNA, 23 nt, Human
ucaugccuguaaucucagcacuu

SEQ ID NO: 860759 - RNA, 23 nt, Human
ucgggaggcugaaacaggagaau

SEQ ID NO: 860760 - RNA, 22 nt, Human
ucucuacuaaaaauacauaaaa

SEQ ID NO: 860761 - RNA, 21 nt, Human
ucugcaauuccagcuacucgg

SEQ ID NO: 860762 - RNA, 20 nt, Human
ucuugguuguuuucggcugg

SEQ ID NO: 860763 - RNA, 25 nt, Human
ugaaacaggagaauugcuugaaucu

SEQ ID NO: 860764 - RNA, 19 nt, Human
ugaaaccccaucucuacua

SEQ ID NO: 860765 - RNA, 19 nt, Human
ugacauggagucgcaugaa

SEQ ID NO: 860766 - RNA, 24 nt, Human
ugaccaacauggugaaaccccauc

SEQ ID NO: 860767 - RNA, 18 nt, Human
ugacguggguggaucacc

SEQ ID NO: 860768 - RNA, 24 nt, Human
ugacguggguggaucaccugaggu

SEQ ID NO: 860769 - RNA, 26 nt, Human
ugacguggguggaucaccugagguca

SEQ ID NO: 860770 - RNA, 21 nt, Human
ugcaccauugcacuccagccu

SEQ ID NO: 860771 - RNA, 19 nt, Human
ugcacuccagccugggcaa

SEQ ID NO: 860772 - RNA, 22 nt, Human
ugcacuccagccugggcaacaa

SEQ ID NO: 860773 - RNA, 23 nt, Human
ugccuguaaucucagcacuuugg

SEQ ID NO: 860774 - RNA, 23 nt, Human
ugccuguaaucucagcacuuugg

SEQ ID NO: 860775 - RNA, 24 nt, Human
ugccuguaaucucagcacuuuggg

SEQ ID NO: 860776 - RNA, 24 nt, Human
uggaucaccugaggucaggaguuc

SEQ ID NO: 860777 - RNA, 27 nt, Human
uggaucaccugaggucaggaguucaag

SEQ ID NO: 860778 - RNA, 18 nt, Human
uggaucccuggcuggccu

SEQ ID NO: 860779 - RNA, 18 nt, Human
uggcagagauugcaguga

SEQ ID NO: 860780 - RNA, 19 nt, Human
uggcuggaguugcccaacg

SEQ ID NO: 860781 - RNA, 22 nt, Human
uggcuggaguugcccaacgugg

SEQ ID NO: 860782 - RNA, 19 nt, Human
ugggagaggcaggugccac

SEQ ID NO: 860783 - RNA, 24 nt, Human
uggguggaucaccugaggucagga

SEQ ID NO: 860784 - RNA, 23 nt, Human
uggugaugggugucugcaauucc

SEQ ID NO: 860785 - RNA, 22 nt, Human
ugguucaugccuguaaucucag

SEQ ID NO: 860786 - RNA, 24 nt, Human
ugguucaugccuguaaucucagca

SEQ ID NO: 860787 - RNA, 22 nt, Human
uguaggaaucuuggcuggaguu

SEQ ID NO: 860788 - RNA, 24 nt, Human
ugucugcaauuccagcuacucggg

SEQ ID NO: 860789 - RNA, 24 nt, Human
ugugcacacggcugggcacacgca

SEQ ID NO: 860790 - RNA, 23 nt, Human
ugugcagacgaacacugugugca

SEQ ID NO: 860791 - RNA, 21 nt, Human
ugugcagacggaggccaugga

SEQ ID NO: 860792 - RNA, 19 nt, Human
uuagcugggcguggugaug

SEQ ID NO: 860793 - RNA, 23 nt, Human
uuagcugggcguggugaugggug

SEQ ID NO: 860794 - RNA, 24 nt, Human
uuagcugggcguggugaugggugu

SEQ ID NO: 860795 - RNA, 23 nt, Human
uugcaccauugcacuccagccug

SEQ ID NO: 860796 - RNA, 31 nt, Human
uugcaccauugcacuccagccugggcaacaa

SEQ ID NO: 860797 - RNA, 22 nt, Human
uugcagugagcugaaauugcac

SEQ ID NO: 860798 - RNA, 20 nt, Human
uugcccgggagagucggcag

SEQ ID NO: 860799 - RNA, 18 nt, Human
uugcuugaaucugggugg

SEQ ID NO: 860800 - RNA, 18 nt, Human
uuggcccuugucuugagc

SEQ ID NO: 860801 - RNA, 23 nt, Human
uuuuuuuuuuuuuuuuucacaau

SEQ ID NO: 860802 - RNA, 24 nt, Human
uuuuuuuuuuuuuuuuucacaaug

SEQ ID NO: 860803 - RNA, 18 nt, Human
aaaaaaacagaccaaaaa

SEQ ID NO: 860804 - RNA, 21 nt, Human
aaaaagaggaagauuuagaga

SEQ ID NO: 860805 - RNA, 24 nt, Human
aacaaauucuuaaauagaacaaaa

SEQ ID NO: 860806 - RNA, 21 nt, Human
aaccagagccauccuuucuuc

SEQ ID NO: 860807 - RNA, 24 nt, Human
aagaaaagcagagaagagagaggc

SEQ ID NO: 860808 - RNA, 21 nt, Human
aagagacacucccucaugacu

SEQ ID NO: 860809 - RNA, 18 nt, Human
aagccacccacccuuccc

SEQ ID NO: 860810 - RNA, 24 nt, Human
aagccacccacccuucccacaacc

SEQ ID NO: 860811 - RNA, 19 nt, Human
acagaaaggcucuaccuuc

SEQ ID NO: 860812 - RNA, 19 nt, Human
acagcuguagccaugcccc

SEQ ID NO: 860813 - RNA, 25 nt, Human
accagagccauccuuucuuccaccu

SEQ ID NO: 860814 - RNA, 18 nt, Human
acccccggcaagccccgg

SEQ ID NO: 860815 - RNA, 20 nt, Human
acuguagccuuggccuuuca

SEQ ID NO: 860816 - RNA, 19 nt, Human
agaccaaaaaccuucuguc

SEQ ID NO: 860817 - RNA, 22 nt, Human
agagaagagagaggcaugggga

SEQ ID NO: 860818 - RNA, 22 nt, Human
aggaaaaaagaggaagauuuag

SEQ ID NO: 860819 - RNA, 18 nt, Human
aggcauggggaggguggg

SEQ ID NO: 860820 - RNA, 22 nt, Human
aggcauggggaggguggggggu

SEQ ID NO: 860821 - RNA, 25 nt, Human
agugagaagaaaagcagagaagaga

SEQ ID NO: 860822 - RNA, 23 nt, Human
augccccagaggccccgggcaac

SEQ ID NO: 860823 - RNA, 22 nt, Human
augcgcccccagcccagccccu

SEQ ID NO: 860824 - RNA, 21 nt, Human
caagaagagacacucccucau

SEQ ID NO: 860825 - RNA, 18 nt, Human
cacacuugggcacagagg

SEQ ID NO: 860826 - RNA, 24 nt, Human
cacagcccagucacaacccccuuu

SEQ ID NO: 860827 - RNA, 21 nt, Human
caccccacccucacacagcca

SEQ ID NO: 860828 - RNA, 25 nt, Human
caccccacccucacacagcccaguc

SEQ ID NO: 860829 - RNA, 23 nt, Human
caccccuguggcccucuuguggc

SEQ ID NO: 860830 - RNA, 21 nt, Human
cacccuggcuggggcggggcc

SEQ ID NO: 860831 - RNA, 21 nt, Human
cacuacgugggcauuaacacc

SEQ ID NO: 860832 - RNA, 19 nt, Human
cagcccagccccugccucc

SEQ ID NO: 860833 - RNA, 20 nt, Human
cagcccagucacaacccccu

SEQ ID NO: 860834 - RNA, 23 nt, Human
cagccccuccaggugggggugau

SEQ ID NO: 860835 - RNA, 18 nt, Human
cagccccugccuccucuc

SEQ ID NO: 860836 - RNA, 24 nt, Human
caugcaaaacacacaacggagaag

SEQ ID NO: 860837 - RNA, 21 nt, Human
ccacaaccauaaaaacguaca

SEQ ID NO: 860838 - RNA, 22 nt, Human
ccaccccacccucacacagccc

SEQ ID NO: 860839 - RNA, 20 nt, Human
ccacccuucccacaaccaua

SEQ ID NO: 860840 - RNA, 21 nt, Human
ccagaggccuccacuacgugg

SEQ ID NO: 860841 - RNA, 21 nt, Human
ccagccccuccaggugggggu

SEQ ID NO: 860842 - RNA, 19 nt, Human
ccagugaccuuggaaugca

SEQ ID NO: 860843 - RNA, 24 nt, Human
cccagcccagccccugccuccucu

SEQ ID NO: 860844 - RNA, 21 nt, Human
ccccaagaagagacacucccu

SEQ ID NO: 860845 - RNA, 24 nt, Human
ccccagaggccccgggcaaccccc

SEQ ID NO: 860846 - RNA, 19 nt, Human
ccccagcccagccccugcc

SEQ ID NO: 860847 - RNA, 21 nt, Human
cccccagcccagccccugccu

SEQ ID NO: 860848 - RNA, 21 nt, Human
cccccucccaccccacccuca

SEQ ID NO: 860849 - RNA, 25 nt, Human
ccccgggcaacccccggcaagcccc

SEQ ID NO: 860850 - RNA, 20 nt, Human
ccccugccuccucuccaaac

SEQ ID NO: 860851 - RNA, 18 nt, Human
cccgcacauccuaggagg

SEQ ID NO: 860852 - RNA, 25 nt, Human
cccuguacuguagccuuggccuuuc

SEQ ID NO: 860853 - RNA, 24 nt, Human
cccuuaauucuaaagccacccacc

SEQ ID NO: 860854 - RNA, 21 nt, Human
ccucacacagcccagucacaa

SEQ ID NO: 860855 - RNA, 24 nt, Human
ccucccaccccacccucacacagc

SEQ ID NO: 860856 - RNA, 24 nt, Human
ccuguggcccucuuguggcccucu

SEQ ID NO: 860857 - RNA, 19 nt, Human
ccuuucuuccaccucccgc

SEQ ID NO: 860858 - RNA, 21 nt, Human
cuaaagccacccacccuuccc

SEQ ID NO: 860859 - RNA, 25 nt, Human
cucccaccccacccucacacagccc

SEQ ID NO: 860860 - RNA, 21 nt, Human
cugccacagcuguagccaugc

SEQ ID NO: 860861 - RNA, 19 nt, Human
cugccuccucuccaaacac

SEQ ID NO: 860862 - RNA, 19 nt, Human
cugccuccucuccaaacac

SEQ ID NO: 860863 - RNA, 24 nt, Human
cugcugggagccuugagcccacag

SEQ ID NO: 860864 - RNA, 22 nt, Human
gaaaagcagagaagagagaggc

SEQ ID NO: 860865 - RNA, 26 nt, Human
gacacucccucaugacugucacucuu

SEQ ID NO: 860866 - RNA, 18 nt, Human
gacuaaaaaaacagacca

SEQ ID NO: 860867 - RNA, 20 nt, Human
gagaagaaaagcagagaaga

SEQ ID NO: 860868 - RNA, 23 nt, Human
gagaggcauggggaggguggggg

SEQ ID NO: 860869 - RNA, 22 nt, Human
gcacauccuaggagggguuggg

SEQ ID NO: 860870 - RNA, 20 nt, Human
gccacccacccuucccacaa

SEQ ID NO: 860871 - RNA, 21 nt, Human
gcccccagcccagccccugcc

SEQ ID NO: 860872 - RNA, 20 nt, Human
gccccgggagugggggcagg

SEQ ID NO: 860873 - RNA, 23 nt, Human
gcccuguacuguagccuuggccu

SEQ ID NO: 860874 - RNA, 19 nt, Human
gcucucguucuuaccuugg

SEQ ID NO: 860875 - RNA, 23 nt, Human
ggaagugagaagaaaagcagaga

SEQ ID NO: 860876 - RNA, 21 nt, Human
ggagaagcgagcgcucccagg

SEQ ID NO: 860877 - RNA, 23 nt, Human
gggcagcccggcuggcugugagg

SEQ ID NO: 860878 - RNA, 21 nt, Human
gggcaggggcccuugagggac

SEQ ID NO: 860879 - RNA, 21 nt, Human
gggcccccucccaccccaccc

SEQ ID NO: 860880 - RNA, 23 nt, Human
ggggagggugggggguugcuggg

SEQ ID NO: 860881 - RNA, 19 nt, Human
uaaagccacccacccuucc

SEQ ID NO: 860882 - RNA, 21 nt, Human
uaaauagaacaaaauaaacac

SEQ ID NO: 860883 - RNA, 18 nt, Human
uaccuugggcccucuuac

SEQ ID NO: 860884 - RNA, 20 nt, Human
ucaagcacugcacauggacu

SEQ ID NO: 860885 - RNA, 22 nt, Human
ucagcugacaacucccggccac

SEQ ID NO: 860886 - RNA, 23 nt, Human
uccccaagaagagacacucccuc

SEQ ID NO: 860887 - RNA, 18 nt, Human
ucccucaugacugucacu

SEQ ID NO: 860888 - RNA, 20 nt, Human
ucuaaagccacccacccuuc

SEQ ID NO: 860889 - RNA, 20 nt, Human
ucuaccuucuuuccucccca

SEQ ID NO: 860890 - RNA, 23 nt, Human
ucuaccuucuuuccuccccaaga

SEQ ID NO: 860891 - RNA, 22 nt, Human
ucugcugggagccuugagccca

SEQ ID NO: 860892 - RNA, 24 nt, Human
ugaaugggcagcccggcuggcugu

SEQ ID NO: 860893 - RNA, 23 nt, Human
ugcaaaacacacaacggagaagc

SEQ ID NO: 860894 - RNA, 23 nt, Human
ugcaugccacugccaggcaugau

SEQ ID NO: 860895 - RNA, 20 nt, Human
ugccccagaggccccgggca

SEQ ID NO: 860896 - RNA, 19 nt, Human
uggaaugcaggaucugcca

SEQ ID NO: 860897 - RNA, 19 nt, Human
uggcacaauuccugccucu

SEQ ID NO: 860898 - RNA, 19 nt, Human
uggcuggggcggggcccug

SEQ ID NO: 860899 - RNA, 21 nt, Human
uggcuggggcggggcccugua

SEQ ID NO: 860900 - RNA, 24 nt, Human
uggcugugaggcgccagcacacug

SEQ ID NO: 860901 - RNA, 18 nt, Human
ugggaaagggcccaggcc

SEQ ID NO: 860902 - RNA, 23 nt, Human
ugggaaagggcccaggccccauu

SEQ ID NO: 860903 - RNA, 19 nt, Human
ugggcacagaggcucugcc

SEQ ID NO: 860904 - RNA, 24 nt, Human
uggggagggugggggguugcuggg

SEQ ID NO: 860905 - RNA, 26 nt, Human
uguacuguagccuuggccuuucauuc

SEQ ID NO: 860906 - RNA, 21 nt, Human
uugcugggcccccucccaccc

SEQ ID NO: 860907 - RNA, 24 nt, Human
aaaaaagaaaaaaaaaguaaagag

SEQ ID NO: 860908 - RNA, 18 nt, Human
aaaaagaaaaaagaaaaa

SEQ ID NO: 860909 - RNA, 23 nt, Human
aaaacaaauacagccacauccuc

SEQ ID NO: 860910 - RNA, 21 nt, Human
aaaagaccuaucugauaaagg

SEQ ID NO: 860911 - RNA, 22 nt, Human
aaacaaauacagccacauccuc

SEQ ID NO: 860912 - RNA, 24 nt, Human
aaacaaauacagccacauccucau

SEQ ID NO: 860913 - RNA, 22 nt, Human
aaaccagucuuagauuguauua

SEQ ID NO: 860914 - RNA, 21 nt, Human
aaagaaaaaaaaaguaaagag

SEQ ID NO: 860915 - RNA, 23 nt, Human
aaagaaaaaaaaaguaaagagaa

SEQ ID NO: 860916 - RNA, 21 nt, Human
aauggaaaagugaaacuuaga

SEQ ID NO: 860917 - RNA, 21 nt, Human
acagaagucccacaacaugag

SEQ ID NO: 860918 - RNA, 21 nt, Human
acccuaaacacacacagaagu

SEQ ID NO: 860919 - RNA, 25 nt, Human
acccucaucuucccuuaagagacca

SEQ ID NO: 860920 - RNA, 22 nt, Human
accugugucugguuuucacaga

SEQ ID NO: 860921 - RNA, 28 nt, Human
agaaaaaagaaaaaaaaaguaaagagaa

SEQ ID NO: 860922 - RNA, 24 nt, Human
agcacuuugggaggcugaggcagg

SEQ ID NO: 860923 - RNA, 24 nt, Human
aggcaggaauuugaggcacaugcg

SEQ ID NO: 860924 - RNA, 18 nt, Human
aggcaggcggaucacuug

SEQ ID NO: 860925 - RNA, 22 nt, Human
aggcaggcggaucacuugaggu

SEQ ID NO: 860926 - RNA, 26 nt, Human
aggcaggcggaucacuugaggucagg

SEQ ID NO: 860927 - RNA, 21 nt, Human
aggcugaggcaggcggaucac

SEQ ID NO: 860928 - RNA, 24 nt, Human
aggcugaggcaggcggaucacuug

SEQ ID NO: 860929 - RNA, 21 nt, Human
aggcuuagcauagccuaaagc

SEQ ID NO: 860930 - RNA, 21 nt, Human
agggauaagguuacacccacu

SEQ ID NO: 860931 - RNA, 23 nt, Human
auacaaggaacacuuaaaauuca

SEQ ID NO: 860932 - RNA, 23 nt, Human
auacagccacauccucaucuaca

SEQ ID NO: 860933 - RNA, 21 nt, Human
auauuguaaauaaacuuuuag

SEQ ID NO: 860934 - RNA, 23 nt, Human
aucccaaucaguacauuuuucuc

SEQ ID NO: 860935 - RNA, 20 nt, Human
augagaaccaaacaacaaug

SEQ ID NO: 860936 - RNA, 22 nt, Human
caacaggaagguucaauggugg

SEQ ID NO: 860937 - RNA, 19 nt, Human
caacccuaaacacacacag

SEQ ID NO: 860938 - RNA, 22 nt, Human
caagacacuguucucuccuucc

SEQ ID NO: 860939 - RNA, 21 nt, Human
caagcaauacuggcuuuucuc

SEQ ID NO: 860940 - RNA, 19 nt, Human
caaggaacacuuaaaauuc

SEQ ID NO: 860941 - RNA, 22 nt, Human
caaggacaaaccagucuuagau

SEQ ID NO: 860942 - RNA, 22 nt, Human
cacacacaucacacaugcauug

SEQ ID NO: 860943 - RNA, 24 nt, Human
cacaccuguaaucccagcacuuug

SEQ ID NO: 860944 - RNA, 28 nt, Human
caccccacaauguccacucaaaucccaa

SEQ ID NO: 860945 - RNA, 23 nt, Human
caccuguaaucccagcacuuugg

SEQ ID NO: 860946 - RNA, 24 nt, Human
caccuguaaucccagcacuuuggg

SEQ ID NO: 860947 - RNA, 23 nt, Human
cagauaccucaccaaagcuauac

SEQ ID NO: 860948 - RNA, 24 nt, Human
cagcacuuugggaggcugaggcag

SEQ ID NO: 860949 - RNA, 26 nt, Human
cagcacuuugggaggcugaggcaggc

SEQ ID NO: 860950 - RNA, 21 nt, Human
caggaagguucaaugguggga

SEQ ID NO: 860951 - RNA, 19 nt, Human
caggaauuugaggcacaug

SEQ ID NO: 860952 - RNA, 24 nt, Human
caggcggaucacuugaggucagga

SEQ ID NO: 860953 - RNA, 23 nt, Human
ccaacccaucagcauccccaaga

SEQ ID NO: 860954 - RNA, 24 nt, Human
cccacaauguccacucaaauccca

SEQ ID NO: 860955 - RNA, 20 nt, Human
cccauacucauuauauucca

SEQ ID NO: 860956 - RNA, 21 nt, Human
ccccaagacacuguucucucc

SEQ ID NO: 860957 - RNA, 18 nt, Human
ccccgcggcgcuccccuc

SEQ ID NO: 860958 - RNA, 18 nt, Human
cccgcggcgcuccccucu

SEQ ID NO: 860959 - RNA, 18 nt, Human
cccugggugcugcccugc

SEQ ID NO: 860960 - RNA, 20 nt, Human
cccugggugcugcccugcgg

SEQ ID NO: 860961 - RNA, 18 nt, Human
cccuuccucuuccuuguu

SEQ ID NO: 860962 - RNA, 23 nt, Human
ccucuauauuccaguccucucua

SEQ ID NO: 860963 - RNA, 28 nt, Human
ccugcaggauuccccuuccucuuccuug

SEQ ID NO: 860964 - RNA, 20 nt, Human
ccuggccaccugugucuggu

SEQ ID NO: 860965 - RNA, 21 nt, Human
ccugggaucuuaacaucuucu

SEQ ID NO: 860966 - RNA, 24 nt, Human
cggaucacuugaggucaggaguuc

SEQ ID NO: 860967 - RNA, 21 nt, Human
cggcgcuccccgcggcgcucc

SEQ ID NO: 860968 - RNA, 22 nt, Human
cucacaccuguaaucccagcac

SEQ ID NO: 860969 - RNA, 24 nt, Human
cucacaccuguaaucccagcacuu

SEQ ID NO: 860970 - RNA, 18 nt, Human
cucuauauuccaguccuc

SEQ ID NO: 860971 - RNA, 18 nt, Human
cugucauaugccuucucc

SEQ ID NO: 860972 - RNA, 20 nt, Human
cuucccgcggcgcuccccgc

SEQ ID NO: 860973 - RNA, 19 nt, Human
gaaacuuagagcuuaaaau

SEQ ID NO: 860974 - RNA, 19 nt, Human
gaacucaaaacaaauacag

SEQ ID NO: 860975 - RNA, 21 nt, Human
gacucacaccuguaaucccag

SEQ ID NO: 860976 - RNA, 21 nt, Human
gagacagguuguuaggagcac

SEQ ID NO: 860977 - RNA, 23 nt, Human
gaggaaaggcaggaauuugaggc

SEQ ID NO: 860978 - RNA, 21 nt, Human
gaucacuugaggucaggaguu

SEQ ID NO: 860979 - RNA, 24 nt, Human
gaucacuugaggucaggaguucga

SEQ ID NO: 860980 - RNA, 18 nt, Human
ggacaaaccagucuuaga

SEQ ID NO: 860981 - RNA, 23 nt, Human
ggaucacuugaggucaggaguuc

SEQ ID NO: 860982 - RNA, 24 nt, Human
ggaucacuugaggucaggaguucg

SEQ ID NO: 860983 - RNA, 18 nt, Human
ggggaaacugaggcucag

SEQ ID NO: 860984 - RNA, 18 nt, Human
ggggaauggggaaacuga

SEQ ID NO: 860985 - RNA, 21 nt, Human
gugaaacuuagagcuuaaaau

SEQ ID NO: 860986 - RNA, 19 nt, Human
gugcucacacacaucacac

SEQ ID NO: 860987 - RNA, 26 nt, Human
gugcugcccugcggaaaggggucaac

SEQ ID NO: 860988 - RNA, 20 nt, Human
uaaaaaugggcaaaaccucu

SEQ ID NO: 860989 - RNA, 22 nt, Human
uaaaaaugggcaaaaccucuaa

SEQ ID NO: 860990 - RNA, 18 nt, Human
uaaacacacacagaaguc

SEQ ID NO: 860991 - RNA, 22 nt, Human
uaaacacacacagaagucccac

SEQ ID NO: 860992 - RNA, 23 nt, Human
uaaaccagaacugcaaaucuaua

SEQ ID NO: 860993 - RNA, 23 nt, Human
uaacagauaccucaccaaagcua

SEQ ID NO: 860994 - RNA, 24 nt, Human
uaagaaacaauacauuaugagaac

SEQ ID NO: 860995 - RNA, 24 nt, Human
uaaucaccugcugccaacccuaaa

SEQ ID NO: 860996 - RNA, 22 nt, Human
uacauuaugagaaccaaacaac

SEQ ID NO: 860997 - RNA, 21 nt, Human
uaccauuucuuuaaaaaaaga

SEQ ID NO: 860998 - RNA, 19 nt, Human
uacuugucagauuuugaua

SEQ ID NO: 860999 - RNA, 23 nt, Human
uagaacucaaaacaaauacagcc

SEQ ID NO: 861000 - RNA, 25 nt, Human
uagaucauaaaaucauagcccaauu

SEQ ID NO: 861001 - RNA, 20 nt, Human
uaggacacaacauuucuugu

SEQ ID NO: 861002 - RNA, 21 nt, Human
uauacagauggcaaacauaug

SEQ ID NO: 861003 - RNA, 23 nt, Human
uauccccauuuuucuauuggggg

SEQ ID NO: 861004 - RNA, 24 nt, Human
ucaccugcugccaacccuaaacac

SEQ ID NO: 861005 - RNA, 19 nt, Human
ucagccucucaagagacag

SEQ ID NO: 861006 - RNA, 23 nt, Human
uccagacuaggacacauuaggac

SEQ ID NO: 861007 - RNA, 21 nt, Human
uccaucaaaaguauucuuuga

SEQ ID NO: 861008 - RNA, 24 nt, Human
ucccugcaggauuccccuuccucu

SEQ ID NO: 861009 - RNA, 24 nt, Human
uccgaccagauguggugacucaca

SEQ ID NO: 861010 - RNA, 23 nt, Human
ucuacccucaucuucccuuaaga

SEQ ID NO: 861011 - RNA, 22 nt, Human
ucuaggaugugaauaguaacuc

SEQ ID NO: 861012 - RNA, 22 nt, Human
ucucuugaggaaaggcaggaau

SEQ ID NO: 861013 - RNA, 23 nt, Human
ucucuuuuuccuugacucuagga

SEQ ID NO: 861014 - RNA, 20 nt, Human
ugaaagugaaccccugauga

SEQ ID NO: 861015 - RNA, 22 nt, Human
ugacucacaccuguaaucccag

SEQ ID NO: 861016 - RNA, 24 nt, Human
ugacucacaccuguaaucccagca

SEQ ID NO: 861017 - RNA, 19 nt, Human
ugagaaaauaagccacagc

SEQ ID NO: 861018 - RNA, 18 nt, Human
ugagauucaauucugaca

SEQ ID NO: 861019 - RNA, 25 nt, Human
ugaggcacaugcgcuucccgcggcg

SEQ ID NO: 861020 - RNA, 24 nt, Human
ugaggcaggcggaucacuugaggu

SEQ ID NO: 861021 - RNA, 26 nt, Human
ugaggcaggcggaucacuugagguca

SEQ ID NO: 861022 - RNA, 20 nt, Human
ugcaaaagaccuaucugaua

SEQ ID NO: 861023 - RNA, 20 nt, Human
ugcauugcuguccucucauu

SEQ ID NO: 861024 - RNA, 23 nt, Human
ugcgcuucccgcggcgcuccccg

SEQ ID NO: 861025 - RNA, 25 nt, Human
ugcuaccauuucuuuaaaaaaagaa

SEQ ID NO: 861026 - RNA, 28 nt, Human
ugcucacacacaucacacaugcauugcu

SEQ ID NO: 861027 - RNA, 19 nt, Human
ugcugccaacccuaaacac

SEQ ID NO: 861028 - RNA, 18 nt, Human
uggcuggaauucaugcug

SEQ ID NO: 861029 - RNA, 18 nt, Human
ugggaaauuaccuguaug

SEQ ID NO: 861030 - RNA, 18 nt, Human
ugggaggcugaggcaggc

SEQ ID NO: 861031 - RNA, 20 nt, Human
ugggaggcugaggcaggcgg

SEQ ID NO: 861032 - RNA, 24 nt, Human
ugggaggcugaggcaggcggauca

SEQ ID NO: 861033 - RNA, 23 nt, Human
uggggggaauggggaaacugagg

SEQ ID NO: 861034 - RNA, 24 nt, Human
uggugacucacaccuguaauccca

SEQ ID NO: 861035 - RNA, 27 nt, Human
ugugugcucacacacaucacacaugca

SEQ ID NO: 861036 - RNA, 24 nt, Human
uuauuggugaacugcagauuaaaa

SEQ ID NO: 861037 - RNA, 20 nt, Human
uuccucuuccuuguucagcc

SEQ ID NO: 861038 - RNA, 25 nt, Human
uugggaggcugaggcaggcggauca

SEQ ID NO: 861039 - RNA, 22 nt, Human
uuguauuauccuauuuaaacca

SEQ ID NO: 861040 - RNA, 24 nt, Human
uuucauggcuuuuaaugagccauu

SEQ ID NO: 861041 - RNA, 19 nt, Human
uuuuuuuuuuuaagggugg

SEQ ID NO: 861042 - RNA, 18 nt, Human
uuuuuuuuuuuuuaaggg

SEQ ID NO: 861043 - RNA, 22 nt, Human
uuuuuuuuuuuuuuuuuaaggg

SEQ ID NO: 861044 - RNA, 24 nt, Human
uuuuuuuuuuuuuuuuuaagggug

SEQ ID NO: 861045 - RNA, 21 nt, Human
aagaaaagcuucccagggaaa

SEQ ID NO: 861046 - RNA, 23 nt, Human
aagagacuaaagaccccaacuca

SEQ ID NO: 861047 - RNA, 18 nt, Human
aagcaaaaucugaucagc

SEQ ID NO: 861048 - RNA, 18 nt, Human
acacuaaacacuacccug

SEQ ID NO: 861049 - RNA, 25 nt, Human
acaggacaggaaaagcuccugcgaa

SEQ ID NO: 861050 - RNA, 20 nt, Human
accugcaaagagaugugucc

SEQ ID NO: 861051 - RNA, 24 nt, Human
accugcaaagagauguguccagca

SEQ ID NO: 861052 - RNA, 20 nt, Human
acuucaucacuggggcacaa

SEQ ID NO: 861053 - RNA, 18 nt, Human
agcaaaaucugaucagcu

SEQ ID NO: 861054 - RNA, 23 nt, Human
agcugcagggauaggugggugug

SEQ ID NO: 861055 - RNA, 22 nt, Human
aggaaauaauccacccuguguc

SEQ ID NO: 861056 - RNA, 20 nt, Human
aggcccccugucccuugcag

SEQ ID NO: 861057 - RNA, 21 nt, Human
agggauagguggguguggaua

SEQ ID NO: 861058 - RNA, 19 nt, Human
auaaaagucugcugcccuc

SEQ ID NO: 861059 - RNA, 22 nt, Human
auaaaagucugcugcccucaga

SEQ ID NO: 861060 - RNA, 21 nt, Human
caaauauuaacacuaaacacu

SEQ ID NO: 861061 - RNA, 21 nt, Human
caaauucugcuaauauccaaa

SEQ ID NO: 861062 - RNA, 23 nt, Human
caacgcgggacaugaaaccuccu

SEQ ID NO: 861063 - RNA, 20 nt, Human
caacuggaaaaccacaggac

SEQ ID NO: 861064 - RNA, 26 nt, Human
caagaaaagcuucccagggaaacuaa

SEQ ID NO: 861065 - RNA, 23 nt, Human
caccaaacagaauauuaaagcaa

SEQ ID NO: 861066 - RNA, 19 nt, Human
cacuggggcacaaugagcu

SEQ ID NO: 861067 - RNA, 22 nt, Human
cagacacucagcauauucugcc

SEQ ID NO: 861068 - RNA, 26 nt, Human
cagcuggcuuuuccucccuggggcuc

SEQ ID NO: 861069 - RNA, 20 nt, Human
caggaaaagcuccugcgaau

SEQ ID NO: 861070 - RNA, 24 nt, Human
caggaaacaucuaauccaugcuca

SEQ ID NO: 861071 - RNA, 19 nt, Human
caggcugacuccagacacu

SEQ ID NO: 861072 - RNA, 21 nt, Human
cauucugccucuccaugggag

SEQ ID NO: 861073 - RNA, 20 nt, Human
ccacaggacaggaaaagcuc

SEQ ID NO: 861074 - RNA, 21 nt, Human
cccccugucccuugcagaauc

SEQ ID NO: 861075 - RNA, 18 nt, Human
ccgggaccuccucuuggg

SEQ ID NO: 861076 - RNA, 18 nt, Human
ccucugaacuccgccugg

SEQ ID NO: 861077 - RNA, 21 nt, Human
ccucugaacuccgccuggccu

SEQ ID NO: 861078 - RNA, 20 nt, Human
ccugccauucugccucucca

SEQ ID NO: 861079 - RNA, 18 nt, Human
cgaauggagcacuuuuuu

SEQ ID NO: 861080 - RNA, 22 nt, Human
cgggacaugaaaccuccugcca

SEQ ID NO: 861081 - RNA, 22 nt, Human
cuccagacacucagcauauucu

SEQ ID NO: 861082 - RNA, 20 nt, Human
cuccagcuggcuuuuccucc

SEQ ID NO: 861083 - RNA, 24 nt, Human
cugccucugggccagaggucuggg

SEQ ID NO: 861084 - RNA, 19 nt, Human
cugcugcccucagauucag

SEQ ID NO: 861085 - RNA, 22 nt, Human
cugcugcuacaacuguugcugc

SEQ ID NO: 861086 - RNA, 26 nt, Human
cugcugcugcuacaacuguugcugcc

SEQ ID NO: 861087 - RNA, 19 nt, Human
cugggccagaggucugggg

SEQ ID NO: 861088 - RNA, 24 nt, Human
cuggggcgauuccgggaccuccuc

SEQ ID NO: 861089 - RNA, 18 nt, Human
cugugagucaagaaaagc

SEQ ID NO: 861090 - RNA, 21 nt, Human
cuuacacucaccaaacagaau

SEQ ID NO: 861091 - RNA, 19 nt, Human
cuucuguaacuuacagggu

SEQ ID NO: 861092 - RNA, 22 nt, Human
gaaaaacuguaaaugggaugag

SEQ ID NO: 861093 - RNA, 19 nt, Human
gauucuggaaaugcaaauu

SEQ ID NO: 861094 - RNA, 20 nt, Human
ggaaaugcaaauucauccuc

SEQ ID NO: 861095 - RNA, 18 nt, Human
ggaguucuccacauucuc

SEQ ID NO: 861096 - RNA, 18 nt, Human
gggagaagggagugagcc

SEQ ID NO: 861097 - RNA, 21 nt, Human
gggagaagggagugagccgag

SEQ ID NO: 861098 - RNA, 24 nt, Human
gggcuccacaggcugaccagugcc

SEQ ID NO: 861099 - RNA, 23 nt, Human
uaaaaacaguuuugaaaaaaaau

SEQ ID NO: 861100 - RNA, 23 nt, Human
uaaacucaagcugauaaaagucu

SEQ ID NO: 861101 - RNA, 21 nt, Human
uaagaagagacuaaagacccc

SEQ ID NO: 861102 - RNA, 22 nt, Human
uaagaagagacuaaagacccca

SEQ ID NO: 861103 - RNA, 23 nt, Human
uacaaauuacaaacuacuuaaaa

SEQ ID NO: 861104 - RNA, 24 nt, Human
uacaacuguugcugcuaccugcaa

SEQ ID NO: 861105 - RNA, 23 nt, Human
uacacucaccaaacagaauauua

SEQ ID NO: 861106 - RNA, 23 nt, Human
uacaggguuucuauuuuauguuu

SEQ ID NO: 861107 - RNA, 18 nt, Human
uaccaaaucagcacacug

SEQ ID NO: 861108 - RNA, 23 nt, Human
uacccaagcaaaaucugaucagc

SEQ ID NO: 861109 - RNA, 21 nt, Human
uacccuggaguuagaaaaacu

SEQ ID NO: 861110 - RNA, 21 nt, Human
uacccuggaguuagaaaaacu

SEQ ID NO: 861111 - RNA, 23 nt, Human
ucaagaaaagcuucccagggaaa

SEQ ID NO: 861112 - RNA, 25 nt, Human
ucaggcugacuccagacacucagca

SEQ ID NO: 861113 - RNA, 18 nt, Human
uccagcaacuucaucacu

SEQ ID NO: 861114 - RNA, 22 nt, Human
ucccacaccuauuuucugccuc

SEQ ID NO: 861115 - RNA, 19 nt, Human
ucccaggaaacaucuaauc

SEQ ID NO: 861116 - RNA, 21 nt, Human
ucccuuacacucaccaaacag

SEQ ID NO: 861117 - RNA, 18 nt, Human
ucugaagucaguguagga

SEQ ID NO: 861118 - RNA, 21 nt, Human
ucugacagacuguuuucugaa

SEQ ID NO: 861119 - RNA, 26 nt, Human
ucugccucugggccagaggucugggg

SEQ ID NO: 861120 - RNA, 21 nt, Human
ucugggccagaggucuggggc

SEQ ID NO: 861121 - RNA, 19 nt, Human
ugacaauaucagucccaac

SEQ ID NO: 861122 - RNA, 19 nt, Human
ugacuccagacacucagca

SEQ ID NO: 861123 - RNA, 23 nt, Human
ugcagaaucccuuacacucacca

SEQ ID NO: 861124 - RNA, 22 nt, Human
ugccucugggccagaggucugg

SEQ ID NO: 861125 - RNA, 20 nt, Human
uggccaccuaaaauuaguuu

SEQ ID NO: 861126 - RNA, 21 nt, Human
uggcuuuuccucccuggggcu

SEQ ID NO: 861127 - RNA, 23 nt, Human
ugggcagaagaaccugggcugug

SEQ ID NO: 861128 - RNA, 20 nt, Human
uguggauagcauccagggcu

SEQ ID NO: 861129 - RNA, 25 nt, Human
uuacaaauuacaaacuacuuaaaaa

SEQ ID NO: 861130 - RNA, 19 nt, Human
uucaaauuuggaucaaauu

SEQ ID NO: 861131 - RNA, 24 nt, Human
uuuuuucccaaauucugcuaauau

SEQ ID NO: 861132 - RNA, 18 nt, Human
acaggccccucccaggcu

SEQ ID NO: 861133 - RNA, 23 nt, Human
agaggguuuuggcacaggccccu

SEQ ID NO: 861134 - RNA, 20 nt, Human
agcccggaccccugguuccc

SEQ ID NO: 861135 - RNA, 24 nt, Human
aggcagaagcggaaucaccgccca

SEQ ID NO: 861136 - RNA, 19 nt, Human
agugguggaaaagcugagg

SEQ ID NO: 861137 - RNA, 23 nt, Human
cacacaccuuggccguuuaugua

SEQ ID NO: 861138 - RNA, 19 nt, Human
cacaggccccucccaggcu

SEQ ID NO: 861139 - RNA, 23 nt, Human
caccgggagcuaaagugucagcc

SEQ ID NO: 861140 - RNA, 18 nt, Human
cccaggcagaagcggaau

SEQ ID NO: 861141 - RNA, 20 nt, Human
cccccaaaaguuugccucua

SEQ ID NO: 861142 - RNA, 21 nt, Human
cccggcccgcgccuuccuucu

SEQ ID NO: 861143 - RNA, 27 nt, Human
cccggcccgcgccuuccuucuuccucc

SEQ ID NO: 861144 - RNA, 22 nt, Human
cccuggcuccgaguccgccucc

SEQ ID NO: 861145 - RNA, 18 nt, Human
ccgcccaguccccaggca

SEQ ID NO: 861146 - RNA, 19 nt, Human
ccgccuccgucuccuaauc

SEQ ID NO: 861147 - RNA, 19 nt, Human
ccgggcacacaccuuggcc

SEQ ID NO: 861148 - RNA, 19 nt, Human
ccucccagagcggggcggg

SEQ ID NO: 861149 - RNA, 24 nt, Human
ccucucgggggccauggcaggagc

SEQ ID NO: 861150 - RNA, 21 nt, Human
ccugguucccuggcuccgagu

SEQ ID NO: 861151 - RNA, 23 nt, Human
cgacuccagcucuagcccggacc

SEQ ID NO: 861152 - RNA, 21 nt, Human
cuccagcucuagcccggaccu

SEQ ID NO: 861153 - RNA, 20 nt, Human
gcucacgacuccagcucuag

SEQ ID NO: 861154 - RNA, 19 nt, Human
ggaagggcgcggggaauga

SEQ ID NO: 861155 - RNA, 19 nt, Human
ggacuagaaagcaguggug

SEQ ID NO: 861156 - RNA, 22 nt, Human
ggcgcgcgcucacgacuccagc

SEQ ID NO: 861157 - RNA, 24 nt, Human
uaggaguuaaaggacuagaaagca

SEQ ID NO: 861158 - RNA, 21 nt, Human
ucaccgcccaguccccaggca

SEQ ID NO: 861159 - RNA, 18 nt, Human
ucuuuuuuuuuuuuuuuu

SEQ ID NO: 861160 - RNA, 18 nt, Human
ucuuuuuuuuuuuuuuuu

SEQ ID NO: 861161 - RNA, 24 nt, Human
uuuggcacaggccccucccaggcu

SEQ ID NO: 861162 - RNA, 30 nt, Human; identical to SEQ ID NO: 289986

SEQ ID NO: 861163 - RNA, 32 nt, Human; identical to SEQ ID NO: 423254

SEQ ID NO: 861164 - RNA, 21 nt, Human
uuuuuuuuuuuuuuuuuccgg

SEQ ID NO: 861165 - RNA, 24 nt, Human
uuuuuuuuuuuuuuuuuucuuuuu

SEQ ID NO: 861166 - RNA, 24 nt, Human
uuuuuuuuuuuuuuuuuuucuuuu

SEQ ID NO: 861167 - RNA, 25 nt, Human
uuuuuuuuuuuuuuuuuuucuuuuu

SEQ ID NO: 861168 - RNA, 23 nt, Human
uuuuuuuuuuuuuuuuuuuuccg

SEQ ID NO: 861169 - RNA, 24 nt, Human
uuuuuuuuuuuuuuuuuuuucuuu

SEQ ID NO: 861170 - RNA, 26 nt, Human
uuuuuuuuuuuuuuuuuuuuuccggg

SEQ ID NO: 861171 - RNA, 24 nt, Human
uuuuuuuuuuuuuuuuuuuuuccu

SEQ ID NO: 861172 - RNA, 26 nt, Human
uuuuuuuuuuuuuuuuuuuuuucuuu

SEQ ID NO: 861173 - RNA, 24 nt, Human
acagcagcaggagaaaaucgggac

SEQ ID NO: 861174 - RNA, 23 nt, Human
agaaaaucgggacuccgaccucc

SEQ ID NO: 861175 - RNA, 21 nt, Human
auuaagcaggggaguggaggg

SEQ ID NO: 861176 - RNA, 22 nt, Human
caacagcaucuaggauuuuuga

SEQ ID NO: 861177 - RNA, 20 nt, Human
ccacagcagcaggagaaaau

SEQ ID NO: 861178 - RNA, 19 nt, Human
cgggccacagcagcaggag

SEQ ID NO: 861179 - RNA, 24 nt, Human
cgguagggccagugguugcucccu

SEQ ID NO: 861180 - RNA, 19 nt, Human
ggccagugguugcucccug

SEQ ID NO: 861181 - RNA, 21 nt, Human
guagggccagugguugcuccc

SEQ ID NO: 861182 - RNA, 24 nt, Human
uaagcaggggaguggaggggagau

SEQ ID NO: 861183 - RNA, 18 nt, Human
ucaaggccagacccuggg

SEQ ID NO: 861184 - RNA, 19 nt, Human
uccccagcgacacaugggc

SEQ ID NO: 861185 - RNA, 22 nt, Human
uccccagcgacacaugggccuc

SEQ ID NO: 861186 - RNA, 21 nt, Human
uccgggccacagcagcaggag

SEQ ID NO: 861187 - RNA, 18 nt, Human
uggaggggagauguggca

SEQ ID NO: 861188 - RNA, 20 nt, Human
uuuuuuuuuuaaauacaagu

SEQ ID NO: 861189 - RNA, 18 nt, Human
aaaaaaaaaagccaagag

SEQ ID NO: 861190 - RNA, 19 nt, Human
aaaaaccgaaagaccccca

SEQ ID NO: 861191 - RNA, 19 nt, Human
aaaaagacuucugcacccc

SEQ ID NO: 861192 - RNA, 19 nt, Human
aaaaagccaagagacuggu

SEQ ID NO: 861193 - RNA, 22 nt, Human
aaaacaaaaacucaaaaaaccc

SEQ ID NO: 861194 - RNA, 21 nt, Human
aaaagccagacccaaaaccaa

SEQ ID NO: 861195 - RNA, 23 nt, Human
aaaagccagacccaaaaccaaaa

SEQ ID NO: 861196 - RNA, 20 nt, Human
aaacaaaaacucaaaaaacc

SEQ ID NO: 861197 - RNA, 18 nt, Human
aaacaaaacagagcagaa

SEQ ID NO: 861198 - RNA, 23 nt, Human
aaacaauaccacuacaaaaagca

SEQ ID NO: 861199 - RNA, 22 nt, Human
aaacacacuucaguaacaaaag

SEQ ID NO: 861200 - RNA, 21 nt, Human
aaacagagcagaaaaggaacc

SEQ ID NO: 861201 - RNA, 20 nt, Human
aaacagauacaguaaacacc

SEQ ID NO: 861202 - RNA, 18 nt, Human
aaaccaacagccaaccug

SEQ ID NO: 861203 - RNA, 18 nt, Human
aaaccccccagacaaggg

SEQ ID NO: 861204 - RNA, 18 nt, Human
aaagcaguacccaugaag

SEQ ID NO: 861205 - RNA, 19 nt, Human
aaauccaugcaacaccuuu

SEQ ID NO: 861206 - RNA, 24 nt, Human
aaaugaccccagauuuuucaaggu

SEQ ID NO: 861207 - RNA, 18 nt, Human
aacaaaaugaccccagau

SEQ ID NO: 861208 - RNA, 21 nt, Human
aacaauacaacacaacacaac

SEQ ID NO: 861209 - RNA, 21 nt, Human
aaccaaaaagcaccugccaag

SEQ ID NO: 861210 - RNA, 22 nt, Human
aaccgaaagacccccaaaucca

SEQ ID NO: 861211 - RNA, 18 nt, Human
aaccucgcacuccagcuc

SEQ ID NO: 861212 - RNA, 26 nt, Human
aagaaaaaaaaggguauugaaaccaa

SEQ ID NO: 861213 - RNA, 20 nt, Human
aagaucacggaaaaaucacc

SEQ ID NO: 861214 - RNA, 19 nt, Human
aagccagacccaaaaccaa

SEQ ID NO: 861215 - RNA, 20 nt, Human
aaguaggccaaaucgcucgg

SEQ ID NO: 861216 - RNA, 23 nt, Human
aaugaccccagauuuuucaaggu

SEQ ID NO: 861217 - RNA, 19 nt, Human
acaaaaacucaaaaaaccc

SEQ ID NO: 861218 - RNA, 20 nt, Human
acaagaaaaaccaacacucc

SEQ ID NO: 861219 - RNA, 21 nt, Human
acaagaaaaaccaacacucca

SEQ ID NO: 861220 - RNA, 18 nt, Human
acagaaagggagauagcu

SEQ ID NO: 861221 - RNA, 20 nt, Human
acagcuauauuaaaguggau

SEQ ID NO: 861222 - RNA, 20 nt, Human
acaucacuccuguuuuucuc

SEQ ID NO: 861223 - RNA, 21 nt, Human
accaagggaagaacaauacaa

SEQ ID NO: 861224 - RNA, 19 nt, Human
accgaaagacccccaaauc

SEQ ID NO: 861225 - RNA, 21 nt, Human
acggcaaccacaccgccuaac

SEQ ID NO: 861226 - RNA, 18 nt, Human
acuccccuuccucaaaaa

SEQ ID NO: 861227 - RNA, 25 nt, Human
acuccuguuuuucuccccucuuuuc

SEQ ID NO: 861228 - RNA, 18 nt, Human
acuucccuugcacgcaac

SEQ ID NO: 861229 - RNA, 23 nt, Human
agaaaaaccaacacuccaacaaa

SEQ ID NO: 861230 - RNA, 23 nt, Human
agaaagcuucagcagcaaggggg

SEQ ID NO: 861231 - RNA, 18 nt, Human
agaaaggaaaaaaagaaa

SEQ ID NO: 861232 - RNA, 19 nt, Human
agaacguugauagcaccuc

SEQ ID NO: 861233 - RNA, 23 nt, Human
agacccaaaaccaaaaaccgaaa

SEQ ID NO: 861234 - RNA, 18 nt, Human
agaggacagaagcugucc

SEQ ID NO: 861235 - RNA, 26 nt, Human
agauccaucuggucucccuuggugug

SEQ ID NO: 861236 - RNA, 28 nt, Human
agcaaaacuuaaacaugaaauacagcca

SEQ ID NO: 861237 - RNA, 22 nt, Human
agcaagggggggauaaagagcu

SEQ ID NO: 861238 - RNA, 23 nt, Human
agcaccacuggcuuuucacagcu

SEQ ID NO: 861239 - RNA, 23 nt, Human
aggaaaaaaagaaaaugaucaaa

SEQ ID NO: 861240 - RNA, 20 nt, Human
aggaagauucacacaugcca

SEQ ID NO: 861241 - RNA, 21 nt, Human
aggaaggagauccaucugguc

SEQ ID NO: 861242 - RNA, 23 nt, Human
aggcacccccgcaucuaccuaag

SEQ ID NO: 861243 - RNA, 23 nt, Human
aggcagaaguacccaacuccccu

SEQ ID NO: 861244 - RNA, 18 nt, Human
aggcugcugguggugagg

SEQ ID NO: 861245 - RNA, 23 nt, Human
agggcugggagcaccagaggggg

SEQ ID NO: 861246 - RNA, 21 nt, Human
aggggagaaaggaaaaaaaga

SEQ ID NO: 861247 - RNA, 24 nt, Human
agugaugaguuaccccugaaugac

SEQ ID NO: 861248 - RNA, 22 nt, Human
agugccaguaaaaaauaaaaau

SEQ ID NO: 861249 - RNA, 24 nt, Human
aguggggacauccaauggagacug

SEQ ID NO: 861250 - RNA, 20 nt, Human
aguuucuucuucaaagugcu

SEQ ID NO: 861251 - RNA, 20 nt, Human
auaaaaaccccccagacaag

SEQ ID NO: 861252 - RNA, 22 nt, Human
auaaaacacacuucaguaacaa

SEQ ID NO: 861253 - RNA, 24 nt, Human
auaaaacacacuucaguaacaaaa

SEQ ID NO: 861254 - RNA, 20 nt, Human
auagagauaaaaagacuucu

SEQ ID NO: 861255 - RNA, 21 nt, Human
auaugcgcaucuauauaugua

SEQ ID NO: 861256 - RNA, 20 nt, Human
aucagaauagaagccaauga

SEQ ID NO: 861257 - RNA, 22 nt, Human
auccacauggcuagcaugagau

SEQ ID NO: 861258 - RNA, 22 nt, Human
aucucguagcacagaacuuuac

SEQ ID NO: 861259 - RNA, 23 nt, Human
augaaaaagaaaugacaucacuc

SEQ ID NO: 861260 - RNA, 20 nt, Human
augaaauuagguuaucauua

SEQ ID NO: 861261 - RNA, 18 nt, Human
augaaccaaggcuguuug

SEQ ID NO: 861262 - RNA, 24 nt, Human
augcaccauuguccaauguggaaa

SEQ ID NO: 861263 - RNA, 22 nt, Human
augguguccguggacagggcac

SEQ ID NO: 861264 - RNA, 19 nt, Human
auuaaaacaccauagcacc

SEQ ID NO: 861265 - RNA, 19 nt, Human
caaaaaccgaaagaccccc

SEQ ID NO: 861266 - RNA, 23 nt, Human
caaaaaccgaaagacccccaaau

SEQ ID NO: 861267 - RNA, 21 nt, Human
caaaaccaaaaaccgaaagac

SEQ ID NO: 861268 - RNA, 19 nt, Human
caaaacgcgaagagggagc

SEQ ID NO: 861269 - RNA, 18 nt, Human
caaaagcaccacagagac

SEQ ID NO: 861270 - RNA, 20 nt, Human
caaaauagcauuuaaaggac

SEQ ID NO: 861271 - RNA, 25 nt, Human
caaacaauaccacuacaaaaagcau

SEQ ID NO: 861272 - RNA, 19 nt, Human
caaacagauacaguaaaca

SEQ ID NO: 861273 - RNA, 25 nt, Human
caacaggcagggaaaacaaaacaga

SEQ ID NO: 861274 - RNA, 26 nt, Human
caacuaaaaagcagccucaguggcau

SEQ ID NO: 861275 - RNA, 22 nt, Human
caagacaggaucagggacaguc

SEQ ID NO: 861276 - RNA, 22 nt, Human
caagagacuggagcccaccuug

SEQ ID NO: 861277 - RNA, 22 nt, Human
caaggcacccggaagcucagga

SEQ ID NO: 861278 - RNA, 23 nt, Human
caagggaagaacaauacaacaca

SEQ ID NO: 861279 - RNA, 20 nt, Human
caauacaacacaacacaaca

SEQ ID NO: 861280 - RNA, 25 nt, Human
caauacaacacaacacaacacugcu

SEQ ID NO: 861281 - RNA, 19 nt, Human
caauaccacuacaaaaagc

SEQ ID NO: 861282 - RNA, 25 nt, Human
cacaaaaauuaagcaccacauucuc

SEQ ID NO: 861283 - RNA, 20 nt, Human
cacaaaauggagcuuccugg

SEQ ID NO: 861284 - RNA, 21 nt, Human
cacaacacaacacugcucaga

SEQ ID NO: 861285 - RNA, 21 nt, Human
cacaacacugcucagagcaga

SEQ ID NO: 861286 - RNA, 23 nt, Human
cacaacacugcucagagcagauu

SEQ ID NO: 861287 - RNA, 18 nt, Human
cacaagaaaaaccaacac

SEQ ID NO: 861288 - RNA, 22 nt, Human
cacaagaaaaaccaacacucca

SEQ ID NO: 861289 - RNA, 23 nt, Human
cacacuucaguaacaaaaggaaa

SEQ ID NO: 861290 - RNA, 21 nt, Human
cacagagacagcucgggccag

SEQ ID NO: 861291 - RNA, 18 nt, Human
cacagagcaccacuggcu

SEQ ID NO: 861292 - RNA, 18 nt, Human
cacagcaccaugcacaga

SEQ ID NO: 861293 - RNA, 28 nt, Human
caccaagggaagaacaauacaacacaac

SEQ ID NO: 861294 - RNA, 30 nt, Human
caccaagggaagaacaauacaacacaacag

SEQ ID NO: 861295 - RNA, 21 nt, Human
caccacacacacauccacaug

SEQ ID NO: 861296 - RNA, 19 nt, Human
cacccccaacccgccccca

SEQ ID NO: 861297 - RNA, 19 nt, Human
caccguguggccacauucc

SEQ ID NO: 861298 - RNA, 19 nt, Human
cagaaguacccaacucccc

SEQ ID NO: 861299 - RNA, 19 nt, Human
cagaauuucagaacagcua

SEQ ID NO: 861300 - RNA, 22 nt, Human
cagacccaaaaccaaaaaccga

SEQ ID NO: 861301 - RNA, 22 nt, Human
cagauacaguaaacacccagca

SEQ ID NO: 861302 - RNA, 21 nt, Human
cagcaacaaugacugagaaag

SEQ ID NO: 861303 - RNA, 26 nt, Human
cagcaacaaugacugagaaagcucaa

SEQ ID NO: 861304 - RNA, 22 nt, Human
cagcaagacaggaucagggaca

SEQ ID NO: 861305 - RNA, 22 nt, Human
cagcagcaagggggggauaaag

SEQ ID NO: 861306 - RNA, 22 nt, Human
caggaagauucacacaugccaa

SEQ ID NO: 861307 - RNA, 18 nt, Human
caggccgguucucagcuc

SEQ ID NO: 861308 - RNA, 18 nt, Human
cauaaauacauauauaug

SEQ ID NO: 861309 - RNA, 21 nt, Human
caucaagccugagaagacagg

SEQ ID NO: 861310 - RNA, 19 nt, Human
caucuaauggcuuuccuac

SEQ ID NO: 861311 - RNA, 20 nt, Human
caucucuuuccacgcacacc

SEQ ID NO: 861312 - RNA, 24 nt, Human
caugaaaaagaaaugacaucacuc

SEQ ID NO: 861313 - RNA, 22 nt, Human
cauuacuauugucgcuuuuaaa

SEQ ID NO: 861314 - RNA, 19 nt, Human
cauucaccacacacacauc

SEQ ID NO: 861315 - RNA, 19 nt, Human
ccaaaagaggggagggaaa

SEQ ID NO: 861316 - RNA, 24 nt, Human
ccacacacacauccacauggcuaa

SEQ ID NO: 861317 - RNA, 22 nt, Human
ccacagagacagcucgggccag

SEQ ID NO: 861318 - RNA, 21 nt, Human
ccagacccaaaaccaaaaacc

SEQ ID NO: 861319 - RNA, 20 nt, Human
ccagagggggccgccccucc

SEQ ID NO: 861320 - RNA, 23 nt, Human
ccaggcccgacgcugagguacgc

SEQ ID NO: 861321 - RNA, 20 nt, Human
cccacucccgaucacagaaa

SEQ ID NO: 861322 - RNA, 27 nt, Human
ccccaaauccaugcaacaccuuuaguc

SEQ ID NO: 861323 - RNA, 20 nt, Human
ccccauucaccacacacaca

SEQ ID NO: 861324 - RNA, 24 nt, Human
ccccauucaccacacacacaucca

SEQ ID NO: 861325 - RNA, 24 nt, Human
ccccccagacaagggggggggaca

SEQ ID NO: 861326 - RNA, 19 nt, Human
cccccgcaucuaccuaagc

SEQ ID NO: 861327 - RNA, 18 nt, Human
ccccugcccaccaugguc

SEQ ID NO: 861328 - RNA, 19 nt, Human
cccgcccccagguaugagg

SEQ ID NO: 861329 - RNA, 22 nt, Human
cccugcccaccauggucccagc

SEQ ID NO: 861330 - RNA, 18 nt, Human
ccucaaaagaaaaaaaag

SEQ ID NO: 861331 - RNA, 22 nt, Human
ccucgcacuccagcuccagcgu

SEQ ID NO: 861332 - RNA, 25 nt, Human
ccugcuaaaagccagacccaaaacc

SEQ ID NO: 861333 - RNA, 18 nt, Human
ccuuccaaaccaacagcc

SEQ ID NO: 861334 - RNA, 25 nt, Human
ccuuccucaaaaacaaaaacucaaa

SEQ ID NO: 861335 - RNA, 19 nt, Human
cgacaacgucacaaaaauu

SEQ ID NO: 861336 - RNA, 24 nt, Human
cgcacagcaccaugcacagagcac

SEQ ID NO: 861337 - RNA, 20 nt, Human
cgcccuuucuuucacaucaa

SEQ ID NO: 861338 - RNA, 19 nt, Human
cgcgaagagggagcaaaca

SEQ ID NO: 861339 - RNA, 27 nt, Human
cggccccuaagaaccucgcacuccuuu

SEQ ID NO: 861340 - RNA, 21 nt, Human
cggcuacuauuuacaauuucu

SEQ ID NO: 861341 - RNA, 22 nt, Human
cgggucuaagacagcaccaaaa

SEQ ID NO: 861342 - RNA, 24 nt, Human
cgguaaacgggucuaagacagcac

SEQ ID NO: 861343 - RNA, 22 nt, Human
cuaaaagccagacccaaaacca

SEQ ID NO: 861344 - RNA, 23 nt, Human
cuaaaagccagacccaaaaccaa

SEQ ID NO: 861345 - RNA, 21 nt, Human
cuaagcacggagucaaaugag

SEQ ID NO: 861346 - RNA, 22 nt, Human
cuaucaugcuaggagaggcaga

SEQ ID NO: 861347 - RNA, 18 nt, Human
cucaaaaaacccuucgcc

SEQ ID NO: 861348 - RNA, 19 nt, Human
cucaaaaaacccuucgccc

SEQ ID NO: 861349 - RNA, 25 nt, Human
cucaaaaacaaaaacucaaaaaacc

SEQ ID NO: 861350 - RNA, 26 nt, Human
cucaaaaacaaaaacucaaaaaaccc

SEQ ID NO: 861351 - RNA, 21 nt, Human
cucccacaauuacauguuaaa

SEQ ID NO: 861352 - RNA, 19 nt, Human
cuccccuuccucaaaaaca

SEQ ID NO: 861353 - RNA, 20 nt, Human
cuccgcacagcaccaugcac

SEQ ID NO: 861354 - RNA, 19 nt, Human
cucgccagcgcccgagggg

SEQ ID NO: 861355 - RNA, 21 nt, Human
cuuagcacccugggcugcagg

SEQ ID NO: 861356 - RNA, 19 nt, Human
cuuggcaacauggugggca

SEQ ID NO: 861357 - RNA, 20 nt, Human
cuuuccuugcuuuagcgcuu

SEQ ID NO: 861358 - RNA, 22 nt, Human
gaagggguguaugucgggaggg

SEQ ID NO: 861359 - RNA, 20 nt, Human
gaaguggggguaagggaggg

SEQ ID NO: 861360 - RNA, 19 nt, Human
gagaagccuauugcucugc

SEQ ID NO: 861361 - RNA, 23 nt, Human
gagcaaagaaagcuccuuccuuu

SEQ ID NO: 861362 - RNA, 18 nt, Human
gagggcaaaagcaccaca

SEQ ID NO: 861363 - RNA, 24 nt, Human
gauaaaaagacuucugcaccccca

SEQ ID NO: 861364 - RNA, 23 nt, Human
gaucaggauagaugcauuaacug

SEQ ID NO: 861365 - RNA, 24 nt, Human
gaucauuuaaaaugaaguuuucaa

SEQ ID NO: 861366 - RNA, 19 nt, Human
gaugaagaggggagaaagg

SEQ ID NO: 861367 - RNA, 24 nt, Human
gcaaacaauaccacuacaaaaagc

SEQ ID NO: 861368 - RNA, 20 nt, Human
gcaagacaggaucagggaca

SEQ ID NO: 861369 - RNA, 19 nt, Human
gcacccccaacccgccccc

SEQ ID NO: 861370 - RNA, 21 nt, Human
gcacccggaagcucaggaacu

SEQ ID NO: 861371 - RNA, 19 nt, Human
gcacgcaacaggcagggaa

SEQ ID NO: 861372 - RNA, 19 nt, Human
gcagcuggcuaauaaaacu

SEQ ID NO: 861373 - RNA, 21 nt, Human
gcucccaucaggcccaaccuc

SEQ ID NO: 861374 - RNA, 19 nt, Human
gcuccgcacagcaccaugc

SEQ ID NO: 861375 - RNA, 20 nt, Human
gcugaagaaugaaaaacaaa

SEQ ID NO: 861376 - RNA, 21 nt, Human
gcuuggcucgccagacccagc

SEQ ID NO: 861377 - RNA, 22 nt, Human
ggaaccaaaaagcaccugccaa

SEQ ID NO: 861378 - RNA, 19 nt, Human
ggaaggaccaagagggggc

SEQ ID NO: 861379 - RNA, 21 nt, Human
ggacuggaaaagggaccccag

SEQ ID NO: 861380 - RNA, 20 nt, Human
ggacuuaaaaaaugauagug

SEQ ID NO: 861381 - RNA, 24 nt, Human
ggagggaaaaaaaaaagccaagag

SEQ ID NO: 861382 - RNA, 21 nt, Human
gggaaacauuggcccugcuaa

SEQ ID NO: 861383 - RNA, 19 nt, Human
gggaaguggggguaaggga

SEQ ID NO: 861384 - RNA, 18 nt, Human
gggagaaaggaaaaaaag

SEQ ID NO: 861385 - RNA, 25 nt, Human
gggcgggggagcacuacuggccuuu

SEQ ID NO: 861386 - RNA, 23 nt, Human
ggggagggaaaaaaaaaagccaa

SEQ ID NO: 861387 - RNA, 19 nt, Human
gggggauaaagagcugugc

SEQ ID NO: 861388 - RNA, 24 nt, Human
gguuucuccuuucaucuaauggcu

SEQ ID NO: 861389 - RNA, 22 nt, Human
gucuaagacagcaccaaaagag

SEQ ID NO: 861390 - RNA, 20 nt, Human
gugcuuccaaacagauacag

SEQ ID NO: 861391 - RNA, 23 nt, Human
gugggguggugggcgucuguggg

SEQ ID NO: 861392 - RNA, 23 nt, Human
guuaaaaccagaccacauaaaug

SEQ ID NO: 861393 - RNA, 21 nt, Human
guuugacuuggugaugaugag

SEQ ID NO: 861394 - RNA, 20 nt, Human
uaaaaaacugccacuaagac

SEQ ID NO: 861395 - RNA, 19 nt, Human
uaaaaacaaagagaaaaua

SEQ ID NO: 861396 - RNA, 21 nt, Human
uaaaaagcagccucaguggca

SEQ ID NO: 861397 - RNA, 18 nt, Human
uaaaagccagacccaaaa

SEQ ID NO: 861398 - RNA, 19 nt, Human
uaaaagccagacccaaaac

SEQ ID NO: 861399 - RNA, 22 nt, Human
uaaaggacccaauuuuuccuca

SEQ ID NO: 861400 - RNA, 25 nt, Human
uaaauacauauauaugauaugcgca

SEQ ID NO: 861401 - RNA, 20 nt, Human
uaagaaccucgcacuccagc

SEQ ID NO: 861402 - RNA, 23 nt, Human
uaagcacggagucaaaugagacc

SEQ ID NO: 861403 - RNA, 19 nt, Human
uaaguguaggcccccgaac

SEQ ID NO: 861404 - RNA, 20 nt, Human
uacaaaaagcaucccugaua

SEQ ID NO: 861405 - RNA, 21 nt, Human
uacagcaccaggcuccgcaca

SEQ ID NO: 861406 - RNA, 21 nt, Human
uacccaacuccccuuccucaa

SEQ ID NO: 861407 - RNA, 24 nt, Human
uagaguuuuaaaaacaaagagaaa

SEQ ID NO: 861408 - RNA, 18 nt, Human
uagcacccugggcugcag

SEQ ID NO: 861409 - RNA, 21 nt, Human
uagcaugagaucauuucugcu

SEQ ID NO: 861410 - RNA, 18 nt, Human
uagcuuguauugguuucu

SEQ ID NO: 861411 - RNA, 27 nt, Human
uaggcaaaaagcaacuuuagaccuugc

SEQ ID NO: 861412 - RNA, 18 nt, Human
uagguuagcaccaacuaa

SEQ ID NO: 861413 - RNA, 23 nt, Human
uagguuaucaucgacucauuguc

SEQ ID NO: 861414 - RNA, 18 nt, Human
uauaugucuaaagcaugc

SEQ ID NO: 861415 - RNA, 24 nt, Human
uaucacaagaaaaaccaacacucc

SEQ ID NO: 861416 - RNA, 19 nt, Human
uauuuugugagaaccugcu

SEQ ID NO: 861417 - RNA, 25 nt, Human
ucaaaagcaaaacuuaaacaugaaa

SEQ ID NO: 861418 - RNA, 20 nt, Human
ucaaaagcaaaacuuaaacu

SEQ ID NO: 861419 - RNA, 19 nt, Human
ucaaaugacagcaacaaug

SEQ ID NO: 861420 - RNA, 21 nt, Human
ucacggaaaaaucacccgaca

SEQ ID NO: 861421 - RNA, 19 nt, Human
uccacgcacaccaucguca

SEQ ID NO: 861422 - RNA, 21 nt, Human
ucccaucaggcccaaccucuc

SEQ ID NO: 861423 - RNA, 19 nt, Human
uccccgugugaagagugau

SEQ ID NO: 861424 - RNA, 20 nt, Human
uccccucaaaagaaaaaaaa

SEQ ID NO: 861425 - RNA, 22 nt, Human
uccgcacagcaccaugcacaga

SEQ ID NO: 861426 - RNA, 21 nt, Human
uccgcuaucuuaacugcugaa

SEQ ID NO: 861427 - RNA, 21 nt, Human
uccugaggcucccuuccccaa

SEQ ID NO: 861428 - RNA, 18 nt, Human
uccugcccauccuuuacc

SEQ ID NO: 861429 - RNA, 20 nt, Human
ucgaacuuggucaugcuguu

SEQ ID NO: 861430 - RNA, 19 nt, Human
ucgacuccaagccggggac

SEQ ID NO: 861431 - RNA, 24 nt, Human
ucgagugagcaaagaaagcuccuu

SEQ ID NO: 861432 - RNA, 22 nt, Human
ucucugggcacaggcucagccu

SEQ ID NO: 861433 - RNA, 20 nt, Human
ucugauuguuaaacaugauu

SEQ ID NO: 861434 - RNA, 21 nt, Human
ucugcacccccaacccgcccc

SEQ ID NO: 861435 - RNA, 26 nt, Human
ucugugcugcggucucugcucagggg

SEQ ID NO: 861436 - RNA, 20 nt, Human
ucuucucaugauaaaaaugu

SEQ ID NO: 861437 - RNA, 19 nt, Human
ucuugccugcagcucugca

SEQ ID NO: 861438 - RNA, 22 nt, Human
ugaagccccccauucaccacac

SEQ ID NO: 861439 - RNA, 20 nt, Human
ugacagcaacaaugacugag

SEQ ID NO: 861440 - RNA, 23 nt, Human
ugacagcauggaggaagcaggcu

SEQ ID NO: 861441 - RNA, 18 nt, Human
ugacucaccucucagcag

SEQ ID NO: 861442 - RNA, 19 nt, Human
ugacucaccucucagcagc

SEQ ID NO: 861443 - RNA, 18 nt, Human
ugagaggcagaagcaacg

SEQ ID NO: 861444 - RNA, 20 nt, Human
ugagaggcagaagcaacgcu

SEQ ID NO: 861445 - RNA, 22 nt, Human
ugagaggcagaagcaacgcugg

SEQ ID NO: 861446 - RNA, 21 nt, Human
ugaggcucccuuccccaaagg

SEQ ID NO: 861447 - RNA, 21 nt, Human
ugagggcaaaagcaccacaga

SEQ ID NO: 861448 - RNA, 19 nt, Human
ugagguagguuagacaugu

SEQ ID NO: 861449 - RNA, 22 nt, Human
ugauucaugaagacccauaucu

SEQ ID NO: 861450 - RNA, 20 nt, Human
ugcacagagcaccacuggcu

SEQ ID NO: 861451 - RNA, 18 nt, Human
ugcacccccaacccgccc

SEQ ID NO: 861452 - RNA, 21 nt, Human
ugcacccccaacccgccccca

SEQ ID NO: 861453 - RNA, 27 nt, Human
ugcagaaacugaugaaccaaggcuggu

SEQ ID NO: 861454 - RNA, 23 nt, Human
ugccagcaucucguggggcuggc

SEQ ID NO: 861455 - RNA, 22 nt, Human
ugcucaggacaucuuacaacga

SEQ ID NO: 861456 - RNA, 18 nt, Human
ugcucaguaaauaccugu

SEQ ID NO: 861457 - RNA, 19 nt, Human
uggaaccaaaaagcaccug

SEQ ID NO: 861458 - RNA, 22 nt, Human
uggaaccaaaaagcaccugcca

SEQ ID NO: 861459 - RNA, 25 nt, Human
uggaaccaaaaagcaccugccaagc

SEQ ID NO: 861460 - RNA, 19 nt, Human
uggaauguucacaugagcc

SEQ ID NO: 861461 - RNA, 21 nt, Human
uggagacugccucuugacuca

SEQ ID NO: 861462 - RNA, 19 nt, Human
uggagcucugggcaaaggg

SEQ ID NO: 861463 - RNA, 18 nt, Human
uggccauguacuacagca

SEQ ID NO: 861464 - RNA, 18 nt, Human
uggccuggggugcaucug

SEQ ID NO: 861465 - RNA, 22 nt, Human
ugggcaaagggggagggguccc

SEQ ID NO: 861466 - RNA, 23 nt, Human
ugggcacggccccuaagaaccuc

SEQ ID NO: 861467 - RNA, 22 nt, Human
ugggcgucugugggaacagccu

SEQ ID NO: 861468 - RNA, 18 nt, Human
uggggaaguggggguaag

SEQ ID NO: 861469 - RNA, 22 nt, Human
uggggaaguggggguaagggag

SEQ ID NO: 861470 - RNA, 19 nt, Human
ugggucagagaaugaagcc

SEQ ID NO: 861471 - RNA, 23 nt, Human
uguaggaugugaccugcccaaga

SEQ ID NO: 861472 - RNA, 24 nt, Human
ugucaugauguccuguuuuugagg

SEQ ID NO: 861473 - RNA, 18 nt, Human
uguuugggcugggggaca

SEQ ID NO: 861474 - RNA, 22 nt, Human
uuaaaacaccauagcaccauuu

SEQ ID NO: 861475 - RNA, 23 nt, Human
uuaaaacaccauagcaccauuuu

SEQ ID NO: 861476 - RNA, 22 nt, Human
uuaagaucacggaaaaaucacc

SEQ ID NO: 861477 - RNA, 21 nt, Human
uuacaguuaaaaccagaccac

SEQ ID NO: 861478 - RNA, 22 nt, Human
uuagaccuugcauuucugugcu

SEQ ID NO: 861479 - RNA, 24 nt, Human
uuagcaugcucauuaaagacucug

SEQ ID NO: 861480 - RNA, 24 nt, Human
uucaaagaaccgaaugaaugcacc

SEQ ID NO: 861481 - RNA, 21 nt, Human
uuccaccagcuuugccuuggu

SEQ ID NO: 861482 - RNA, 18 nt, Human
uucugagguuuggaccau

SEQ ID NO: 861483 - RNA, 22 nt, Human
uucugcacccccaacccgcccc

SEQ ID NO: 861484 - RNA, 21 nt, Human
uugaggcacgucagggauauc

SEQ ID NO: 861485 - RNA, 22 nt, Human
uuggagcucugggcaaaggggg

SEQ ID NO: 861486 - RNA, 21 nt, Human
uuggccaccaagggaagaaca

SEQ ID NO: 861487 - RNA, 18 nt, Human
uuggguucaacuuccugu

SEQ ID NO: 861488 - RNA, 22 nt, Human
uugguccaggguauguugaagu

SEQ ID NO: 861489 - RNA, 24 nt, Human
uuguuuggccaccaagggaagaac

SEQ ID NO: 861490 - RNA, 23 nt, Human
aacuuaccuuuccagucuucucc

SEQ ID NO: 861491 - RNA, 19 nt, Human
aagagaagggacaaaagca

SEQ ID NO: 861492 - RNA, 23 nt, Human
aagagaagggacaaaagcaaugu

SEQ ID NO: 861493 - RNA, 20 nt, Human
aagcaaaaaggacacggggu

SEQ ID NO: 861494 - RNA, 22 nt, Human
aaggcagugggcauaaggaggg

SEQ ID NO: 861495 - RNA, 21 nt, Human
acauuuaacaaucaaggucau

SEQ ID NO: 861496 - RNA, 21 nt, Human
acccaggccgucuccagccuc

SEQ ID NO: 861497 - RNA, 19 nt, Human
acccauuugccccuaguga

SEQ ID NO: 861498 - RNA, 18 nt, Human
agaaagacaaccaguucu

SEQ ID NO: 861499 - RNA, 24 nt, Human
agccauuaaaacaauguucuugac

SEQ ID NO: 861500 - RNA, 18 nt, Human
caaaaaggacacggggug

SEQ ID NO: 861501 - RNA, 23 nt, Human
caaacucaugccacaacacagcc

SEQ ID NO: 861502 - RNA, 19 nt, Human
caacagcaacauaccaucg

SEQ ID NO: 861503 - RNA, 23 nt, Human
caacauaccaucggcauggcacu

SEQ ID NO: 861504 - RNA, 21 nt, Human
caacuuaccuuuccagucuuc

SEQ ID NO: 861505 - RNA, 18 nt, Human
cacauuaaauuucauuca

SEQ ID NO: 861506 - RNA, 22 nt, Human
caccacugcuccacccaccuga

SEQ ID NO: 861507 - RNA, 20 nt, Human
cagccaacagcaacauacca

SEQ ID NO: 861508 - RNA, 20 nt, Human
cagcugcagaaggcaaccca

SEQ ID NO: 861509 - RNA, 26 nt, Human
caugcaaacucaugccacaacacagc

SEQ ID NO: 861510 - RNA, 18 nt, Human
caugccuccagaaaguca

SEQ ID NO: 861511 - RNA, 21 nt, Human
cauggcacugagagcaagcaa

SEQ ID NO: 861512 - RNA, 19 nt, Human
ccacugcuccacccaccug

SEQ ID NO: 861513 - RNA, 20 nt, Human
cccauucagucuuuacuugu

SEQ ID NO: 861514 - RNA, 25 nt, Human
ccuccagaaagucaugcaaacucau

SEQ ID NO: 861515 - RNA, 19 nt, Human
ccugcccaacucauccugc

SEQ ID NO: 861516 - RNA, 22 nt, Human
cggccuccgcuucgccagcacc

SEQ ID NO: 861517 - RNA, 22 nt, Human
gaacccugacccuuuucccugc

SEQ ID NO: 861518 - RNA, 22 nt, Human
gacccaagaccagaugaagaga

SEQ ID NO: 861519 - RNA, 19 nt, Human
gacccuuuucccugcccaa

SEQ ID NO: 861520 - RNA, 20 nt, Human
gagagcaagcaaaaaggaca

SEQ ID NO: 861521 - RNA, 20 nt, Human
gcaagcaaaaaggacacggg

SEQ ID NO: 861522 - RNA, 19 nt, Human
gcacugagagcaagcaaaa

SEQ ID NO: 861523 - RNA, 19 nt, Human
gcagugggcauaaggaggg

SEQ ID NO: 861524 - RNA, 22 nt, Human
gcccaccacacauuccuuaccu

SEQ ID NO: 861525 - RNA, 19 nt, Human
gccuucaucucagccccau

SEQ ID NO: 861526 - RNA, 21 nt, Human
ggacacggggugacuucacug

SEQ ID NO: 861527 - RNA, 20 nt, Human
ggaucugaggcccaccacac

SEQ ID NO: 861528 - RNA, 24 nt, Human
ggcacugagagcaagcaaaaagga

SEQ ID NO: 861529 - RNA, 26 nt, Human
guggcuuagaaaccugagcuugguuu

SEQ ID NO: 861530 - RNA, 25 nt, Human
uaccuucaacuuaccuuuccagucu

SEQ ID NO: 861531 - RNA, 22 nt, Human
uaugucuucauaaaacuaccau

SEQ ID NO: 861532 - RNA, 24 nt, Human
uauucaaauauaacuacauuuaac

SEQ ID NO: 861533 - RNA, 22 nt, Human
ucaccacauugaauaaucguau

SEQ ID NO: 861534 - RNA, 21 nt, Human
ucagccccauucagucuuuac

SEQ ID NO: 861535 - RNA, 24 nt, Human
ucauacucuucuuucaaaacccag

SEQ ID NO: 861536 - RNA, 24 nt, Human
uccggccuccgcuucgccagcacc

SEQ ID NO: 861537 - RNA, 18 nt, Human
ucggcauggcacugagag

SEQ ID NO: 861538 - RNA, 25 nt, Human
ucuaacagucuucuuaccaguuccc

SEQ ID NO: 861539 - RNA, 22 nt, Human
ucucugaaugugguuccagcuu

SEQ ID NO: 861540 - RNA, 21 nt, Human
ugacccaagaccagaugaaga

SEQ ID NO: 861541 - RNA, 19 nt, Human
ugagagcaagcaaaaagga

SEQ ID NO: 861542 - RNA, 23 nt, Human
ugagauucuagguggagcaaucu

SEQ ID NO: 861543 - RNA, 24 nt, Human
ugcaaauagaaaucuuacuucuaa

SEQ ID NO: 861544 - RNA, 22 nt, Human
ugcaugaguuucuucacauuuc

SEQ ID NO: 861545 - RNA, 21 nt, Human
ugcuccacccaccugagauuc

SEQ ID NO: 861546 - RNA, 25 nt, Human
uguggcuuagaaaccugagcuuggu

SEQ ID NO: 861547 - RNA, 19 nt, Human
uuaaagaaagacaaccagu

SEQ ID NO: 861548 - RNA, 19 nt, Human
uucacugucuccacuugaa

SEQ ID NO: 861549 - RNA, 18 nt, Human
uucauugucggcagccau

SEQ ID NO: 861550 - RNA, 25 nt, Human
uucgccagcacccaggccgucucca

SEQ ID NO: 861551 - RNA, 19 nt, Human
uuuaaacaaagauaaguga

SEQ ID NO: 861552 - RNA, 22 nt, Human
uuuagaaaaacccauuugcccc

SEQ ID NO: 861553 - RNA, 18 nt, Human
uuuccuuuccuuggaaac

SEQ ID NO: 861554 - RNA, 18 nt, Human
uuuuuuuuuuuuuuuuug

SEQ ID NO: 861555 - RNA, 23 nt, Human
uuuuuuuuuuuuuuuuuggaaau

SEQ ID NO: 861556 - RNA, 21 nt, Human
aacuuaguauuuccaagacaa

SEQ ID NO: 861557 - RNA, 21 nt, Human
acuuaguauuuccaagacaaa

SEQ ID NO: 861558 - RNA, 19 nt, Human
agccgccgcccuccgacgc

SEQ ID NO: 861559 - RNA, 22 nt, Human
ccgccgucggcagccgccgccc

SEQ ID NO: 861560 - RNA, 23 nt, Human
ccgccgucggcagccgccgcccu

SEQ ID NO: 861561 - RNA, 19 nt, Human
gaacaucugauagaaaacc

SEQ ID NO: 861562 - RNA, 26 nt, Human
guggaacaucugauagaaaacccagu

SEQ ID NO: 861563 - RNA, 21 nt, Human
uaccccaacuuaguauuucca

SEQ ID NO: 861564 - RNA, 23 nt, Human
uacuccuauucuauauacaggga

SEQ ID NO: 861565 - RNA, 21 nt, Human
ucccgccgucggcagccgccg

SEQ ID NO: 861566 - RNA, 22 nt, Human
ucuucaguuuuaaacaucagcc

SEQ ID NO: 861567 - RNA, 23 nt, Human
ugauagaaaacccagucccgccg

SEQ ID NO: 861568 - RNA, 18 nt, Human
uuuuuuuuuuuuuuuucg

SEQ ID NO: 861569 - RNA, 23 nt, Human
uuuuuuuuuuuuuuuuucgacau

SEQ ID NO: 861570 - RNA, 24 nt, Human
uuuuuuuuuuuuuuuuuuuuucgu

SEQ ID NO: 861571 - RNA, 24 nt, Human
agaccuggauccucgauuuauacu

SEQ ID NO: 861572 - RNA, 22 nt, Human
aguguaguuuugcaaaauacau

SEQ ID NO: 861573 - RNA, 18 nt, Human
cacccaucuucgcucaaa

SEQ ID NO: 861574 - RNA, 24 nt, Human
gaacagggacuaagagaagaacuc

SEQ ID NO: 861575 - RNA, 23 nt, Human
gggaacagggacuaagagaagaa

SEQ ID NO: 861576 - RNA, 21 nt, Human
uaagagaagaacuccaagagc

SEQ ID NO: 861577 - RNA, 20 nt, Human
uaucagaaacuucaguguag

SEQ ID NO: 861578 - RNA, 19 nt, Human
ucgcucaaaacaugucccg

SEQ ID NO: 861579 - RNA, 19 nt, Human
ucucgauucuuccuucauu

SEQ ID NO: 861580 - RNA, 28 nt, Human
uuuuuuuuuuugacaagaaguaagcguu

SEQ ID NO: 861581 - RNA, 18 nt, Human
uuuuuuuuuuuuuuuuug

SEQ ID NO: 861582 - RNA, 23 nt, Human
uuuuuuuuuuuuuuuuugacaag

SEQ ID NO: 861583 - RNA, 22 nt, Human
agaaggacaggcagcuuccagg

SEQ ID NO: 861584 - RNA, 23 nt, Human
agggagaaggacaggcagcuucc

SEQ ID NO: 861585 - RNA, 21 nt, Human
cacaugcccggauggcaaagc

SEQ ID NO: 861586 - RNA, 18 nt, Human
ccgcagcuaauccagucc

SEQ ID NO: 861587 - RNA, 18 nt, Human
cuuccagggcuccgcagc

SEQ ID NO: 861588 - RNA, 22 nt, Human
gagaaggacaggcagcuuccag

SEQ ID NO: 861589 - RNA, 21 nt, Human
uaauccaguccaccacccgga

SEQ ID NO: 861590 - RNA, 19 nt, Human
uacccacaucgucgguggu

SEQ ID NO: 861591 - RNA, 22 nt, Human
uccaguccaccacccggacaca

SEQ ID NO: 861592 - RNA, 20 nt, Human
uccauacccacaucgucggu

SEQ ID NO: 861593 - RNA, 22 nt, Human
ugguuaagcacagggagaagga

SEQ ID NO: 861594 - RNA, 20 nt, Human
uuggaaaagaagggguucug

SEQ ID NO: 861595 - RNA, 22 nt, Human
uuuuuuuuuuuuuuuuucggau

SEQ ID NO: 861596 - RNA, 23 nt, Human
uuuuuuuuuuuuuuuuuuuucgg

SEQ ID NO: 861597 - RNA, 24 nt, Human
uuuuuuuuuuuuuuuuuuuuucgu

SEQ ID NO: 861598 - RNA, 18 nt, Human
agcccuccagggaucuuu

SEQ ID NO: 861599 - RNA, 21 nt, Human
caaaaauacgaacuagcccuc

SEQ ID NO: 861600 - RNA, 24 nt, Human
cuccaacggucaggggacacagcc

SEQ ID NO: 861601 - RNA, 18 nt, Human
gagggugcggggaugcgg

SEQ ID NO: 861602 - RNA, 23 nt, Human
uaacacaaaaauacgaacuagcc

SEQ ID NO: 861603 - RNA, 24 nt, Human
uaacacaaaaauacgaacuagccc

SEQ ID NO: 861604 - RNA, 18 nt, Human
ugccuugagggugcgggg

SEQ ID NO: 861605 - RNA, 18 nt, Human
ugcggggaugcggggguc

SEQ ID NO: 861606 - RNA, 22 nt, Human
uggaggugccuugagggugcgg

SEQ ID NO: 861607 - RNA, 18 nt, Human
uuuuuuuuuuuuuuuucg

SEQ ID NO: 861608 - RNA, 22 nt, Human
uuuuuuuuuuuuuuuuucgcaa

SEQ ID NO: 861609 - RNA, 24 nt, Human
uuuuuuuuuuuuuuuuuuuuucgu

SEQ ID NO: 861610 - RNA, 21 nt, Human
aaauggcccacagaccaaaag

SEQ ID NO: 861611 - RNA, 20 nt, Human
aagcuccaggagugcuuuuc

SEQ ID NO: 861612 - RNA, 24 nt, Human
aaguagcugggauuacaggcaugu

SEQ ID NO: 861613 - RNA, 25 nt, Human
aaguagcugggauuacaggcaugua

SEQ ID NO: 861614 - RNA, 25 nt, Human
aagugauccucccaccucagccucc

SEQ ID NO: 861615 - RNA, 22 nt, Human
aauaucaaaauccuuccuggcu

SEQ ID NO: 861616 - RNA, 23 nt, Human
accucagccucccaaguagcugg

SEQ ID NO: 861617 - RNA, 19 nt, Human
aguucaagugauccuccca

SEQ ID NO: 861618 - RNA, 19 nt, Human
aucaaaauccuuccuggcu

SEQ ID NO: 861619 - RNA, 21 nt, Human
aucaaaauccuuccuggcuga

SEQ ID NO: 861620 - RNA, 25 nt, Human
caaacuccugaguucaagugauccu

SEQ ID NO: 861621 - RNA, 27 nt, Human
caagugauccucccaccucagccuccc

SEQ ID NO: 861622 - RNA, 27 nt, Human
caagugauccucccaccucagccuccc

SEQ ID NO: 861623 - RNA, 24 nt, Human
cagggucucgcuguguugcccugg

SEQ ID NO: 861624 - RNA, 23 nt, Human
caucaguuucugacugaagugga

SEQ ID NO: 861625 - RNA, 23 nt, Human
ccaaguagcugggauuacaggca

SEQ ID NO: 861626 - RNA, 24 nt, Human
ccaaguagcugggauuacaggcau

SEQ ID NO: 861627 - RNA, 23 nt, Human
cccaaguagcugggauuacaggc

SEQ ID NO: 861628 - RNA, 24 nt, Human
cccaaguagcugggauuacaggca

SEQ ID NO: 861629 - RNA, 23 nt, Human
cccaccucagccucccaaguagc

SEQ ID NO: 861630 - RNA, 23 nt, Human
ccucccaccucagccucccaagu

SEQ ID NO: 861631 - RNA, 26 nt, Human
ccucccaccucagccucccaaguagc

SEQ ID NO: 861632 - RNA, 20 nt, Human
ccugaguucaagugauccuc

SEQ ID NO: 861633 - RNA, 24 nt, Human
cucagccucccaaguagcugggau

SEQ ID NO: 861634 - RNA, 18 nt, Human
cuccuugaaucuucugga

SEQ ID NO: 861635 - RNA, 21 nt, Human
gauuacaggcauguaccacug

SEQ ID NO: 861636 - RNA, 24 nt, Human
gauuacaggcauguaccacugugc

SEQ ID NO: 861637 - RNA, 23 nt, Human
gcccuggcugcucucaaacuccu

SEQ ID NO: 861638 - RNA, 24 nt, Human
ggauuacaggcauguaccacugug

SEQ ID NO: 861639 - RNA, 18 nt, Human
gguccuucacaggcuuac

SEQ ID NO: 861640 - RNA, 18 nt, Human
guagcugggauuacaggc

SEQ ID NO: 861641 - RNA, 24 nt, Human
guaucuccaucgguguggucacaa

SEQ ID NO: 861642 - RNA, 24 nt, Human
gugauccucccaccucagccuccc

SEQ ID NO: 861643 - RNA, 23 nt, Human
uaaauaaaaagcucuuccaaaac

SEQ ID NO: 861644 - RNA, 21 nt, Human
uaaauggcccacagaccaaaa

SEQ ID NO: 861645 - RNA, 22 nt, Human
uacaggcauguaccacugugcc

SEQ ID NO: 861646 - RNA, 21 nt, Human
uaccacugugccuagcugaaa

SEQ ID NO: 861647 - RNA, 18 nt, Human
uagaauccagucguuaac

SEQ ID NO: 861648 - RNA, 20 nt, Human
uauaaauaaaaagcucuucc

SEQ ID NO: 861649 - RNA, 20 nt, Human
ucagccucccaaguagcugg

SEQ ID NO: 861650 - RNA, 24 nt, Human
ucccaaguagcugggauuacaggc

SEQ ID NO: 861651 - RNA, 21 nt, Human
ucccuagaaguccaagcuggu

SEQ ID NO: 861652 - RNA, 21 nt, Human
uccugaguucaagugauccuc

SEQ ID NO: 861653 - RNA, 23 nt, Human
ucucaaacuccugaguucaagug

SEQ ID NO: 861654 - RNA, 19 nt, Human
ucucgcuguguugcccugg

SEQ ID NO: 861655 - RNA, 21 nt, Human
uggcccacagaccaaaagucu

SEQ ID NO: 861656 - RNA, 21 nt, Human
ugggauuacaggcauguacca

SEQ ID NO: 861657 - RNA, 23 nt, Human
ugggauuacaggcauguaccacu

SEQ ID NO: 861658 - RNA, 24 nt, Human
ugggauuacaggcauguaccacug

SEQ ID NO: 861659 - RNA, 24 nt, Human
uguguugcccuggcugcucucaaa

SEQ ID NO: 861660 - RNA, 22 nt, Human
uguugcccuggcugcucucaaa

SEQ ID NO: 861661 - RNA, 20 nt, Human
uuaaauggcccacagaccaa

SEQ ID NO: 861662 - RNA, 23 nt, Human
uucaagugauccucccaccucag

SEQ ID NO: 861663 - RNA, 24 nt, Human
uucaagugauccucccaccucagc

SEQ ID NO: 861664 - RNA, 18 nt, Human
uuuucuagcaaaaacccc

SEQ ID NO: 861665 - RNA, 24 nt, Human
uuuuuuuuuugggacagggucucg

SEQ ID NO: 861666 - RNA, 25 nt, Human
uuuuuuuuuuuugggacagggucuc

SEQ ID NO: 861667 - RNA, 26 nt, Human
uuuuuuuuuuuuuuuuugggacaggg

SEQ ID NO: 861668 - RNA, 24 nt, Human
uuuuuuuuuuuuuuuuuuuuuggg

SEQ ID NO: 861669 - RNA, 18 nt, Human
aacuccugccuucacccc

SEQ ID NO: 861670 - RNA, 23 nt, Human
aagcaggcaccagcucacccucc

SEQ ID NO: 861671 - RNA, 19 nt, Human
aaguggacccgccaauccc

SEQ ID NO: 861672 - RNA, 21 nt, Human
acacagccucucccugggucc

SEQ ID NO: 861673 - RNA, 19 nt, Human
accaccaagucuccaaguc

SEQ ID NO: 861674 - RNA, 21 nt, Human
accccagcagggacacagccu

SEQ ID NO: 861675 - RNA, 21 nt, Human
accccgccgucaccgcauaca

SEQ ID NO: 861676 - RNA, 19 nt, Human
agcacaauccuccuccugg

SEQ ID NO: 861677 - RNA, 25 nt, Human
agccaaauaaaacauaaaaacagaa

SEQ ID NO: 861678 - RNA, 19 nt, Human
agccucucagcggugggga

SEQ ID NO: 861679 - RNA, 20 nt, Human
aggccagcaaaugccaacca

SEQ ID NO: 861680 - RNA, 18 nt, Human
agggcuccuguggcuacg

SEQ ID NO: 861681 - RNA, 25 nt, Human
aggugcggaggcagccucucagcgg

SEQ ID NO: 861682 - RNA, 21 nt, Human
aguucggcuauuucagagagg

SEQ ID NO: 861683 - RNA, 21 nt, Human
caaaggccccuccccaccccc

SEQ ID NO: 861684 - RNA, 24 nt, Human
caagccaaauaaaacauaaaaaca

SEQ ID NO: 861685 - RNA, 23 nt, Human
caaucccgaggaagaaccggagg

SEQ ID NO: 861686 - RNA, 20 nt, Human
cacagcagcuucggccucaa

SEQ ID NO: 861687 - RNA, 23 nt, Human
cacaguaaagcuggaccugagac

SEQ ID NO: 861688 - RNA, 18 nt, Human
caccaagucuccaagucc

SEQ ID NO: 861689 - RNA, 22 nt, Human
cacucuggcuuuggcucagccc

SEQ ID NO: 861690 - RNA, 23 nt, Human
cagaccaccaagucuccaagucc

SEQ ID NO: 861691 - RNA, 25 nt, Human
cagcagcuucggccucaaagccaag

SEQ ID NO: 861692 - RNA, 19 nt, Human
cagcccccagaaaccaagg

SEQ ID NO: 861693 - RNA, 20 nt, Human
cagcucagaccaccaagucu

SEQ ID NO: 861694 - RNA, 18 nt, Human
cagcuuucauacuagggc

SEQ ID NO: 861695 - RNA, 21 nt, Human
caggagagggggugcugggcc

SEQ ID NO: 861696 - RNA, 26 nt, Human
caggcugagguccccacaaaucugcc

SEQ ID NO: 861697 - RNA, 22 nt, Human
ccaaaaagaauugcaaagcucc

SEQ ID NO: 861698 - RNA, 24 nt, Human
ccaaaauaaaacaagccaaauaaa

SEQ ID NO: 861699 - RNA, 21 nt, Human
ccaacuccugccuucaccccc

SEQ ID NO: 861700 - RNA, 24 nt, Human
ccaaucccgaggaagaaccggagg

SEQ ID NO: 861701 - RNA, 20 nt, Human
ccagacagccacaguaaagc

SEQ ID NO: 861702 - RNA, 21 nt, Human
ccagcccccagaaaccaaggg

SEQ ID NO: 861703 - RNA, 19 nt, Human
cccagcccuggccugggaa

SEQ ID NO: 861704 - RNA, 19 nt, Human
cccauauugcacuugguca

SEQ ID NO: 861705 - RNA, 19 nt, Human
ccccacaaaucugccccca

SEQ ID NO: 861706 - RNA, 22 nt, Human
ccccagagcccuggcaagugga

SEQ ID NO: 861707 - RNA, 27 nt, Human
ccccgccgucaccgcauacagaaucua

SEQ ID NO: 861708 - RNA, 22 nt, Human
ccccucacaggccaccacaccc

SEQ ID NO: 861709 - RNA, 21 nt, Human
ccgcccgugauugucucugcc

SEQ ID NO: 861710 - RNA, 20 nt, Human
ccgccgucaccgcauacagg

SEQ ID NO: 861711 - RNA, 24 nt, Human
ccucacaggccaccacaccccgcc

SEQ ID NO: 861712 - RNA, 23 nt, Human
ccugccaggccagcaaaugccaa

SEQ ID NO: 861713 - RNA, 18 nt, Human
ccugggcagcagucaggu

SEQ ID NO: 861714 - RNA, 21 nt, Human
ccugggcagcagucaggugcg

SEQ ID NO: 861715 - RNA, 23 nt, Human
ccugguccugaccugcccccaac

SEQ ID NO: 861716 - RNA, 22 nt, Human
ccugugacccagcccuggccug

SEQ ID NO: 861717 - RNA, 22 nt, Human
cgaggaagaaccggaggacuug

SEQ ID NO: 861718 - RNA, 18 nt, Human
cgcccccgggcggacccu

SEQ ID NO: 861719 - RNA, 22 nt, Human
cgcucaguaaggggacacaguc

SEQ ID NO: 861720 - RNA, 22 nt, Human
cuaauccaaaauaaaacaagcc

SEQ ID NO: 861721 - RNA, 21 nt, Human
cugccuucacccccugccagg

SEQ ID NO: 861722 - RNA, 20 nt, Human
cuggcaggcugcugggcgcc

SEQ ID NO: 861723 - RNA, 24 nt, Human
cugugacccagcccuggccuggga

SEQ ID NO: 861724 - RNA, 24 nt, Human
gaggggguugaaggguuagcagaa

SEQ ID NO: 861725 - RNA, 21 nt, Human
gaucugggagacguuuccccu

SEQ ID NO: 861726 - RNA, 21 nt, Human
gccaggggccccucacaggcc

SEQ ID NO: 861727 - RNA, 23 nt, Human
gcccccagaaaccaagggcagca

SEQ ID NO: 861728 - RNA, 22 nt, Human
gccucaaagccaagggagcgau

SEQ ID NO: 861729 - RNA, 19 nt, Human
gccuucacccccugccagg

SEQ ID NO: 861730 - RNA, 23 nt, Human
gcggacacuaguacaaaauaagu

SEQ ID NO: 861731 - RNA, 18 nt, Human
gcugcugggcgcccucca

SEQ ID NO: 861732 - RNA, 20 nt, Human
gcugggccgagccgggcugg

SEQ ID NO: 861733 - RNA, 21 nt, Human
ggaagaaccggaggacuuggg

SEQ ID NO: 861734 - RNA, 21 nt, Human
ggccaggggccccucacaggc

SEQ ID NO: 861735 - RNA, 21 nt, Human
gggcagcagucaggugcggag

SEQ ID NO: 861736 - RNA, 22 nt, Human
gggccgagccgggcuggcagga

SEQ ID NO: 861737 - RNA, 26 nt, Human
gggccguggccacucuggcuuuggcu

SEQ ID NO: 861738 - RNA, 24 nt, Human
ggggccccucacaggccaccacac

SEQ ID NO: 861739 - RNA, 20 nt, Human
guccuuguuguucuccaaac

SEQ ID NO: 861740 - RNA, 22 nt, Human
gucugucccguccccuccuuuu

SEQ ID NO: 861741 - RNA, 19 nt, Human
guggacccgccaaucccga

SEQ ID NO: 861742 - RNA, 21 nt, Human
guggacccgccaaucccgagg

SEQ ID NO: 861743 - RNA, 20 nt, Human
guggccacucuggcuuuggc

SEQ ID NO: 861744 - RNA, 22 nt, Human
uaaaacaagccaaauaaaacau

SEQ ID NO: 861745 - RNA, 22 nt, Human
uaaaacauaaaaacagaaaaua

SEQ ID NO: 861746 - RNA, 23 nt, Human
uaauccaaaauaaaacaagccaa

SEQ ID NO: 861747 - RNA, 23 nt, Human
uaggaggcgaggggguugaaggg

SEQ ID NO: 861748 - RNA, 22 nt, Human
ucacuacaucagcacaauccuc

SEQ ID NO: 861749 - RNA, 21 nt, Human
ucagggucugggugcagacgg

SEQ ID NO: 861750 - RNA, 19 nt, Human
uccccacaaaucugccccc

SEQ ID NO: 861751 - RNA, 19 nt, Human
uccccuccuuuucucuaca

SEQ ID NO: 861752 - RNA, 20 nt, Human
ucccgggagugcccgguccu

SEQ ID NO: 861753 - RNA, 25 nt, Human
ucccuggguccugguccuuccgaug

SEQ ID NO: 861754 - RNA, 24 nt, Human
uccuguggcuacguacaaucaacu

SEQ ID NO: 861755 - RNA, 18 nt, Human
ucggccucaaagccaagg

SEQ ID NO: 861756 - RNA, 21 nt, Human
ugacccagcccuggccuggga

SEQ ID NO: 861757 - RNA, 18 nt, Human
ugaccugcccccaacucc

SEQ ID NO: 861758 - RNA, 25 nt, Human
ugagaccccagcagggacacagccu

SEQ ID NO: 861759 - RNA, 22 nt, Human
ugccaaccagcccccagaaacc

SEQ ID NO: 861760 - RNA, 19 nt, Human
ugcugggcgcccuccagga

SEQ ID NO: 861761 - RNA, 23 nt, Human
uggcaaguggacccgccaauccc

SEQ ID NO: 861762 - RNA, 25 nt, Human
uggcaggcugcugggcgcccuccuc

SEQ ID NO: 861763 - RNA, 18 nt, Human
uggccacucuggcuuugg

SEQ ID NO: 861764 - RNA, 19 nt, Human
uggccacucuggcuuuggc

SEQ ID NO: 861765 - RNA, 21 nt, Human
uggccacucuggcuuuggcuc

SEQ ID NO: 861766 - RNA, 27 nt, Human
ugggaaggauccagacagccacaguag

SEQ ID NO: 861767 - RNA, 23 nt, Human
ugggccaggggccccucacaggc

SEQ ID NO: 861768 - RNA, 19 nt, Human
ugggcgcccuccaggagag

SEQ ID NO: 861769 - RNA, 21 nt, Human
uggguccugguccugaccugc

SEQ ID NO: 861770 - RNA, 21 nt, Human
ugggugcagacggcaacggcc

SEQ ID NO: 861771 - RNA, 21 nt, Human
uucacccccugccaggccagc

SEQ ID NO: 861772 - RNA, 20 nt, Human
uuccugugacccagcccugg

SEQ ID NO: 861773 - RNA, 22 nt, Human
uucuuaacaguacucacuuuaa

SEQ ID NO: 861774 - RNA, 20 nt, Human
uuguguguagguuuuauucc

SEQ ID NO: 861775 - RNA, 21 nt, Human
uuuggcucagcccagccugga

SEQ ID NO: 861776 - RNA, 20 nt, Human
aaacugcugggauuacaggc

SEQ ID NO: 861777 - RNA, 24 nt, Human
aaacugcugggauuacaggcguga

SEQ ID NO: 861778 - RNA, 21 nt, Human
aaccccugaccucaaguguuc

SEQ ID NO: 861779 - RNA, 22 nt, Human
accccccucucccccucccagu

SEQ ID NO: 861780 - RNA, 22 nt, Human
acccgccucggcuucccaaacu

SEQ ID NO: 861781 - RNA, 25 nt, Human
acucugucgcccaggcuggagugca

SEQ ID NO: 861782 - RNA, 23 nt, Human
aggacggggucucaggauggggc

SEQ ID NO: 861783 - RNA, 23 nt, Human
aggcgugagccaccgugucuggc

SEQ ID NO: 861784 - RNA, 25 nt, Human
aggcuggagugcaguggcgcaaucu

SEQ ID NO: 861785 - RNA, 20 nt, Human
agguucuugggggaaagugg

SEQ ID NO: 861786 - RNA, 20 nt, Human
agugcaguggcgcaaucucg

SEQ ID NO: 861787 - RNA, 24 nt, Human
agugcaguggcgcaaucucggcuc

SEQ ID NO: 861788 - RNA, 21 nt, Human
aucaccccccucucccccucc

SEQ ID NO: 861789 - RNA, 24 nt, Human
caaacugcugggauuacaggcgug

SEQ ID NO: 861790 - RNA, 26 nt, Human
caagccaggcuggucucaaaccccug

SEQ ID NO: 861791 - RNA, 21 nt, Human
caccccccucucccccuccca

SEQ ID NO: 861792 - RNA, 24 nt, Human
cacucugucgcccaggcuggagug

SEQ ID NO: 861793 - RNA, 21 nt, Human
cacugcaaccuccgccuccca

SEQ ID NO: 861794 - RNA, 22 nt, Human
cauuacagaaaugaggacgggg

SEQ ID NO: 861795 - RNA, 20 nt, Human
ccaaacugcugggauuacag

SEQ ID NO: 861796 - RNA, 22 nt, Human
ccaaacugcugggauuacaggc

SEQ ID NO: 861797 - RNA, 22 nt, Human
ccaaacugcugggauuacaggc

SEQ ID NO: 861798 - RNA, 24 nt, Human
ccaaacugcugggauuacaggcgu

SEQ ID NO: 861799 - RNA, 23 nt, Human
ccacccgccucggcuucccaaac

SEQ ID NO: 861800 - RNA, 22 nt, Human
ccuaugggugggguccuguuga

SEQ ID NO: 861801 - RNA, 24 nt, Human
ccucccagguucaagccaggcugg

SEQ ID NO: 861802 - RNA, 19 nt, Human
ccucccaguugacagacuu

SEQ ID NO: 861803 - RNA, 23 nt, Human
ccugaccucaaguguuccacccg

SEQ ID NO: 861804 - RNA, 22 nt, Human
ccuggcccaucaccccccucuc

SEQ ID NO: 861805 - RNA, 24 nt, Human
cgcccaggcuggagugcaguggcg

SEQ ID NO: 861806 - RNA, 19 nt, Human
cgccucccagguucaagcc

SEQ ID NO: 861807 - RNA, 24 nt, Human
cucacucugucgcccaggcuggag

SEQ ID NO: 861808 - RNA, 24 nt, Human
cucacugcaaccuccgccucccag

SEQ ID NO: 861809 - RNA, 23 nt, Human
cugcaaccuccgccucccagguu

SEQ ID NO: 861810 - RNA, 24 nt, Human
cugcaaccuccgccucccagguuc

SEQ ID NO: 861811 - RNA, 24 nt, Human
gaccucaaguguuccacccgccuc

SEQ ID NO: 861812 - RNA, 18 nt, Human
gauuacaggcgugagcca

SEQ ID NO: 861813 - RNA, 21 nt, Human
gauuacaggcgugagccaccg

SEQ ID NO: 861814 - RNA, 24 nt, Human
gauuacaggcgugagccaccgugu

SEQ ID NO: 861815 - RNA, 19 nt, Human
gcccaggcuggagugcagu

SEQ ID NO: 861816 - RNA, 20 nt, Human
gcccaggcuggagugcagug

SEQ ID NO: 861817 - RNA, 23 nt, Human
gcccaucaccccccucucccccu

SEQ ID NO: 861818 - RNA, 23 nt, Human
gccucggcuucccaaacugcugg

SEQ ID NO: 861819 - RNA, 24 nt, Human
gccucggcuucccaaacugcuggg

SEQ ID NO: 861820 - RNA, 19 nt, Human
gcuggagugcaguggcgca

SEQ ID NO: 861821 - RNA, 23 nt, Human
gcuggucucaaaccccugaccuc

SEQ ID NO: 861822 - RNA, 23 nt, Human
ggacggggucucaggauggggcu

SEQ ID NO: 861823 - RNA, 21 nt, Human
gguucaagccaggcuggucuc

SEQ ID NO: 861824 - RNA, 24 nt, Human
guguuccacccgccucggcuuccc

SEQ ID NO: 861825 - RNA, 23 nt, Human
uacaggcgugagccaccgugucu

SEQ ID NO: 861826 - RNA, 20 nt, Human
uagguucuugggggaaagug

SEQ ID NO: 861827 - RNA, 20 nt, Human
ucaccccccucucccccucc

SEQ ID NO: 861828 - RNA, 24 nt, Human
ucacucugucgcccaggcuggagu

SEQ ID NO: 861829 - RNA, 19 nt, Human
ucacugcaaccuccgccuc

SEQ ID NO: 861830 - RNA, 24 nt, Human
ucacugcaaccuccgccucccagg

SEQ ID NO: 861831 - RNA, 25 nt, Human
ucacugcaaccuccgccucccaggu

SEQ ID NO: 861832 - RNA, 27 nt, Human
ucacugcaaccuccgccucccagguuc

SEQ ID NO: 861833 - RNA, 23 nt, Human
uccaucauuacagaaaugaggac

SEQ ID NO: 861834 - RNA, 24 nt, Human
ucccaaacugcugggauuacaggc

SEQ ID NO: 861835 - RNA, 21 nt, Human
ucccagguucaagccaggcug

SEQ ID NO: 861836 - RNA, 24 nt, Human
ucgcccaggcuggagugcaguggc

SEQ ID NO: 861837 - RNA, 22 nt, Human
ucucacucugucgcccaggcug

SEQ ID NO: 861838 - RNA, 23 nt, Human
ucucacucugucgcccaggcugg

SEQ ID NO: 861839 - RNA, 24 nt, Human
ucucacucugucgcccaggcugga

SEQ ID NO: 861840 - RNA, 26 nt, Human
ucucacucugucgcccaggcuggagu

SEQ ID NO: 861841 - RNA, 21 nt, Human
ucucaggauggggcugacagg

SEQ ID NO: 861842 - RNA, 24 nt, Human
ucugucgcccaggcuggagugcag

SEQ ID NO: 861843 - RNA, 24 nt, Human
ugacaggcucccaauccuccugcu

SEQ ID NO: 861844 - RNA, 22 nt, Human
ugagacggagucucacucuguc

SEQ ID NO: 861845 - RNA, 23 nt, Human
ugcaguggcgcaaucucggcuca

SEQ ID NO: 861846 - RNA, 24 nt, Human
ugcugggauuacaggcgugagcca

SEQ ID NO: 861847 - RNA, 23 nt, Human
uggagugcaguggcgcaaucucg

SEQ ID NO: 861848 - RNA, 24 nt, Human
uggagugcaguggcgcaaucucgg

SEQ ID NO: 861849 - RNA, 18 nt, Human
ugggauuacaggcgugag

SEQ ID NO: 861850 - RNA, 21 nt, Human
ugggauuacaggcgugagcca

SEQ ID NO: 861851 - RNA, 22 nt, Human
ugggauuacaggcgugagccac

SEQ ID NO: 861852 - RNA, 23 nt, Human
ugggauuacaggcgugagccacc

SEQ ID NO: 861853 - RNA, 23 nt, Human
ugggauuacaggcgugagccacc

SEQ ID NO: 861854 - RNA, 24 nt, Human
ugggauuacaggcgugagccaccg

SEQ ID NO: 861855 - RNA, 22 nt, Human
uguuccacccgccucggcuucc

SEQ ID NO: 861856 - RNA, 24 nt, Human
uguuccacccgccucggcuuccca

SEQ ID NO: 861857 - RNA, 22 nt, Human
uuuuuuuugagacggagucuca

SEQ ID NO: 861858 - RNA, 23 nt, Human
uuuuuuuuuuuuuucuucacaag

SEQ ID NO: 861859 - RNA, 21 nt, Human
aaccaggaaaagagaugucca

SEQ ID NO: 861860 - RNA, 22 nt, Human
aaccaggaaaagagauguccag

SEQ ID NO: 861861 - RNA, 21 nt, Human
aaggaccaugaagugccaugg

SEQ ID NO: 861862 - RNA, 19 nt, Human
acccgccuccgcacucacc

SEQ ID NO: 861863 - RNA, 18 nt, Human
acccgugaccacggccgu

SEQ ID NO: 861864 - RNA, 23 nt, Human
agaaaguaaccacggaggucaag

SEQ ID NO: 861865 - RNA, 20 nt, Human
agaugaccccagcccugcau

SEQ ID NO: 861866 - RNA, 26 nt, Human
agcagcaaccccgcgcccagcagcag

SEQ ID NO: 861867 - RNA, 23 nt, Human
aggaaaagagauguccagggcac

SEQ ID NO: 861868 - RNA, 18 nt, Human
cacccauuauuccuucaa

SEQ ID NO: 861869 - RNA, 20 nt, Human
cacccgccuccgcacucacc

SEQ ID NO: 861870 - RNA, 21 nt, Human
cacggcggggccuucaccagg

SEQ ID NO: 861871 - RNA, 18 nt, Human
cacugugagacccuaggc

SEQ ID NO: 861872 - RNA, 21 nt, Human
cagaucccaggcccuccuccu

SEQ ID NO: 861873 - RNA, 22 nt, Human
cagcagcaaccccgcgcccagc

SEQ ID NO: 861874 - RNA, 23 nt, Human
cagcugcccugcccugacucacu

SEQ ID NO: 861875 - RNA, 20 nt, Human
cauccaaauuuccgagaagc

SEQ ID NO: 861876 - RNA, 19 nt, Human
cauggcaagcauccuggcc

SEQ ID NO: 861877 - RNA, 23 nt, Human
ccagcccugcauccgcccggaag

SEQ ID NO: 861878 - RNA, 22 nt, Human
cccaugccgccgcacggcgggg

SEQ ID NO: 861879 - RNA, 20 nt, Human
ccccgcagguugcccaugcc

SEQ ID NO: 861880 - RNA, 21 nt, Human
ccccgccagcucgcacucacc

SEQ ID NO: 861881 - RNA, 23 nt, Human
ccccgccagcucgcacucacccg

SEQ ID NO: 861882 - RNA, 22 nt, Human
cccuaggcgagucccuuagcuc

SEQ ID NO: 861883 - RNA, 18 nt, Human
cccuccuccuacucacug

SEQ ID NO: 861884 - RNA, 19 nt, Human
ccgccggcccggccuccuc

SEQ ID NO: 861885 - RNA, 26 nt, Human
ccgcgcccagcagcagcgccuccaug

SEQ ID NO: 861886 - RNA, 24 nt, Human
ccgcuucauuaacauggggguaau

SEQ ID NO: 861887 - RNA, 21 nt, Human
ccucagacccuuggguucaga

SEQ ID NO: 861888 - RNA, 19 nt, Human
ccuuggguucagaucccag

SEQ ID NO: 861889 - RNA, 27 nt, Human
cggcccuggccucagacccuuggguuc

SEQ ID NO: 861890 - RNA, 21 nt, Human
cuaauuccgcuucauuaacau

SEQ ID NO: 861891 - RNA, 22 nt, Human
cucugcuccagagcugaucaga

SEQ ID NO: 861892 - RNA, 18 nt, Human
cuuuccgaugccgcuguu

SEQ ID NO: 861893 - RNA, 19 nt, Human
gagaagcacagugucuagc

SEQ ID NO: 861894 - RNA, 19 nt, Human
gagcccggcgggccgcugc

SEQ ID NO: 861895 - RNA, 21 nt, Human
gcacagugucuagcauacccc

SEQ ID NO: 861896 - RNA, 22 nt, Human
gcagcagcgccuccaugccucg

SEQ ID NO: 861897 - RNA, 21 nt, Human
gccauggcaagcauccuggcc

SEQ ID NO: 861898 - RNA, 22 nt, Human
gccauggcaagcauccuggccu

SEQ ID NO: 861899 - RNA, 22 nt, Human
gccgcuguuggcgccugcggac

SEQ ID NO: 861900 - RNA, 19 nt, Human
gggcgggagccgagcugag

SEQ ID NO: 861901 - RNA, 20 nt, Human
guggggccugaaaauacuac

SEQ ID NO: 861902 - RNA, 18 nt, Human
uaagcgcccagcagcaac

SEQ ID NO: 861903 - RNA, 23 nt, Human
uacucacugugagacccuaggcg

SEQ ID NO: 861904 - RNA, 22 nt, Human
uagacaagcacguaagcgccca

SEQ ID NO: 861905 - RNA, 18 nt, Human
uagcauaccccuaucucu

SEQ ID NO: 861906 - RNA, 22 nt, Human
ucacauugcaaacucccugccu

SEQ ID NO: 861907 - RNA, 21 nt, Human
ucacucucaggaagaaauaau

SEQ ID NO: 861908 - RNA, 23 nt, Human
ucaggaagaaauaaucacccauu

SEQ ID NO: 861909 - RNA, 19 nt, Human
uccagggcacagcuugggg

SEQ ID NO: 861910 - RNA, 24 nt, Human
ucccuuagcucgggagccuaauuc

SEQ ID NO: 861911 - RNA, 21 nt, Human
uccgcgcgccccgccagcucg

SEQ ID NO: 861912 - RNA, 23 nt, Human
uccgcgcgccccgccagcucgca

SEQ ID NO: 861913 - RNA, 26 nt, Human
uccuccuacucacugugagacccuag

SEQ ID NO: 861914 - RNA, 21 nt, Human
ucucaggaagaaauaaucacc

SEQ ID NO: 861915 - RNA, 21 nt, Human
ugcccugacucacuucucagc

SEQ ID NO: 861916 - RNA, 19 nt, Human
ugccucugcuccagagcug

SEQ ID NO: 861917 - RNA, 18 nt, Human
uggggccccagaaaguaa

SEQ ID NO: 861918 - RNA, 18 nt, Human
uggggguaauuuaacuac

SEQ ID NO: 861919 - RNA, 25 nt, Human
uuaacuaccuagcuagacgguugca

SEQ ID NO: 861920 - RNA, 21 nt, Human
uugcaaacucccugccucugc

SEQ ID NO: 861921 - RNA, 24 nt, Human
uugcaaacucccugccucugcucc

SEQ ID NO: 861922 - RNA, 23 nt, Human
uuuuuuuuuggcggucaacgcgc

SEQ ID NO: 861923 - RNA, 19 nt, Human
uuuuuuuuuuuuggcgguc

SEQ ID NO: 861924 - RNA, 18 nt, Human
uuuuuuuuuuuuuuuuug

SEQ ID NO: 861925 - RNA, 22 nt, Human
uuuuuuuuuuuuuuuuuggcgg

SEQ ID NO: 861926 - RNA, 23 nt, Human
uuuuuuuuuuuuuuuuuggcggu

SEQ ID NO: 861927 - RNA, 22 nt, Human
uuuuuuuuuuuuuuuuuuuggc

SEQ ID NO: 861928 - RNA, 25 nt, Human
aagaggccaggaaagcaugguggga

SEQ ID NO: 861929 - RNA, 23 nt, Human
aagaggccaggaaagcauguugc

SEQ ID NO: 861930 - RNA, 22 nt, Human
aagcccacugcuggaguuuugg

SEQ ID NO: 861931 - RNA, 22 nt, Human
aagccuucggagacugcagccc

SEQ ID NO: 861932 - RNA, 23 nt, Human
acaccgagguccacucuccgcac

SEQ ID NO: 861933 - RNA, 24 nt, Human
acagauucucuccaaaugcaucaa

SEQ ID NO: 861934 - RNA, 22 nt, Human
acccaagaacagccacccugau

SEQ ID NO: 861935 - RNA, 27 nt, Human
acugcagcccauccagaaaggaccuug

SEQ ID NO: 861936 - RNA, 18 nt, Human
agaaaacaaucacaguuu

SEQ ID NO: 861937 - RNA, 27 nt, Human
agaaaacaaucacaguuucgggauggc

SEQ ID NO: 861938 - RNA, 18 nt, Human
agaccucgccgcgcccag

SEQ ID NO: 861939 - RNA, 24 nt, Human
agcaaggguucuccaaggaccgcg

SEQ ID NO: 861940 - RNA, 22 nt, Human
agcgauggcagugcacgcagcc

SEQ ID NO: 861941 - RNA, 23 nt, Human
aggaaagauggcagcacugugag

SEQ ID NO: 861942 - RNA, 21 nt, Human
agggauggggaggcgaggcca

SEQ ID NO: 861943 - RNA, 21 nt, Human
augaggugagccggccacuug

SEQ ID NO: 861944 - RNA, 23 nt, Human
caaaaaacagcuuucuggaggca

SEQ ID NO: 861945 - RNA, 23 nt, Human
caaggguucuccaaggaccgcgc

SEQ ID NO: 861946 - RNA, 19 nt, Human
cacagcucagcccuggguc

SEQ ID NO: 861947 - RNA, 20 nt, Human
cacagcucagcccugggucc

SEQ ID NO: 861948 - RNA, 19 nt, Human
caccagaccucgccgcgcc

SEQ ID NO: 861949 - RNA, 22 nt, Human
caccagaccucgccgcgcccag

SEQ ID NO: 861950 - RNA, 18 nt, Human
cacccaagaacagccacc

SEQ ID NO: 861951 - RNA, 18 nt, Human
cacgcagccccgcacaca

SEQ ID NO: 861952 - RNA, 20 nt, Human
cagaccccggaucgccgccu

SEQ ID NO: 861953 - RNA, 23 nt, Human
cagauucucuccaaaugcaucaa

SEQ ID NO: 861954 - RNA, 25 nt, Human
cagccccgcacacaccgagguccac

SEQ ID NO: 861955 - RNA, 23 nt, Human
cagugcacgcagccccgcacaca

SEQ ID NO: 861956 - RNA, 23 nt, Human
cauccagaaaggaccacugucuc

SEQ ID NO: 861957 - RNA, 23 nt, Human
cauguugccccugcaguugugga

SEQ ID NO: 861958 - RNA, 22 nt, Human
ccaagaacagccacccugaucu

SEQ ID NO: 861959 - RNA, 18 nt, Human
ccagaccucgccgcgccc

SEQ ID NO: 861960 - RNA, 25 nt, Human
ccauaaccaugucugacccccuggg

SEQ ID NO: 861961 - RNA, 21 nt, Human
cccccaaaaaacagcuuucug

SEQ ID NO: 861962 - RNA, 20 nt, Human
ccccgcacacaccgaggucc

SEQ ID NO: 861963 - RNA, 25 nt, Human
ccccggaucgccgccuccucgggag

SEQ ID NO: 861964 - RNA, 18 nt, Human
cccgcacacaccgagguc

SEQ ID NO: 861965 - RNA, 20 nt, Human
cccgcacacaccgaggucca

SEQ ID NO: 861966 - RNA, 20 nt, Human
cccuggguccacgccggcuc

SEQ ID NO: 861967 - RNA, 21 nt, Human
cggccgacgcuuccacauuca

SEQ ID NO: 861968 - RNA, 23 nt, Human
cucgucgggauggcccucguggu

SEQ ID NO: 861969 - RNA, 18 nt, Human
gaagaggccaggaaagca

SEQ ID NO: 861970 - RNA, 21 nt, Human
gaggcgaggccaggccgcaga

SEQ ID NO: 861971 - RNA, 26 nt, Human
gccaaguccuccgucccccaaaaaac

SEQ ID NO: 861972 - RNA, 24 nt, Human
gccgcagagugagcgucauucucc

SEQ ID NO: 861973 - RNA, 23 nt, Human
gcgauggcagugcacgcagcccc

SEQ ID NO: 861974 - RNA, 20 nt, Human
gcucguguagagggagcgau

SEQ ID NO: 861975 - RNA, 19 nt, Human
gcucuccccaucaauccug

SEQ ID NO: 861976 - RNA, 20 nt, Human
ggaauuccagaauuccaggc

SEQ ID NO: 861977 - RNA, 23 nt, Human
ggcaggaaugaggugagccggcc

SEQ ID NO: 861978 - RNA, 18 nt, Human
gggauggggaggcgaggc

SEQ ID NO: 861979 - RNA, 21 nt, Human
gggauggggaggcgaggccag

SEQ ID NO: 861980 - RNA, 18 nt, Human
ggucacagcucagcccug

SEQ ID NO: 861981 - RNA, 18 nt, Human
uaaccaugucugaccccc

SEQ ID NO: 861982 - RNA, 23 nt, Human
ucacagcucagcccuggguccac

SEQ ID NO: 861983 - RNA, 22 nt, Human
uccagaaaggaccacugucucc

SEQ ID NO: 861984 - RNA, 19 nt, Human
ucuccgcacagcccacgcu

SEQ ID NO: 861985 - RNA, 19 nt, Human
ugcagaagggauggggagg

SEQ ID NO: 861986 - RNA, 25 nt, Human
uggcagcacugugagaacacggacc

SEQ ID NO: 861987 - RNA, 19 nt, Human
ugggaauuccagaauucca

SEQ ID NO: 861988 - RNA, 23 nt, Human
ugucugacccccugggaauucca

SEQ ID NO: 861989 - RNA, 22 nt, Human
uucccauaaccaugucugaccc

SEQ ID NO: 861990 - RNA, 18 nt, Human
uucgccugggcucucccc

SEQ ID NO: 861991 - RNA, 22 nt, Human
uuugcagaagggauggggaggc

SEQ ID NO: 861992 - RNA, 20 nt, Human
uuuuuuuuuuuuuuuuucac

SEQ ID NO: 861993 - RNA, 24 nt, Human
uuuuuuuuuuuuuuuuuuuucacg

SEQ ID NO: 861994 - RNA, 21 nt, Human
aacuuccccgcaccccagcac

SEQ ID NO: 861995 - RNA, 20 nt, Human
aauaaugaagaaaacagauu

SEQ ID NO: 861996 - RNA, 23 nt, Human
aaugaagaaaacagauuuuguaa

SEQ ID NO: 861997 - RNA, 18 nt, Human
agcgcccccuugcuccuc

SEQ ID NO: 861998 - RNA, 24 nt, Human
auaaugaagaaaacagauuuugua

SEQ ID NO: 861999 - RNA, 19 nt, Human
augcucaucccaauaauga

SEQ ID NO: 862000 - RNA, 21 nt, Human
cacaaccuuagcccuccgucc

SEQ ID NO: 862001 - RNA, 23 nt, Human
cacacaaccuuagcccuccgucc

SEQ ID NO: 862002 - RNA, 22 nt, Human
caccaagcggccucugcucccc

SEQ ID NO: 862003 - RNA, 22 nt, Human
caccccagcucucucucgccgg

SEQ ID NO: 862004 - RNA, 21 nt, Human
cagcgccuuccacacaaccuu

SEQ ID NO: 862005 - RNA, 18 nt, Human
ccccagcaccccagcucu

SEQ ID NO: 862006 - RNA, 26 nt, Human
ccccagcaccccagcucucucucgcc

SEQ ID NO: 862007 - RNA, 24 nt, Human
ccccgcaccccagcaccccagcuc

SEQ ID NO: 862008 - RNA, 21 nt, Human
cccgcaccccagcaccccagc

SEQ ID NO: 862009 - RNA, 18 nt, Human
cccuccguccggggaucc

SEQ ID NO: 862010 - RNA, 21 nt, Human
ccuagcgcccccuugcuccuc

SEQ ID NO: 862011 - RNA, 22 nt, Human
cuccccaacuuccccgcacccc

SEQ ID NO: 862012 - RNA, 19 nt, Human
cuuagcccuccguccgggg

SEQ ID NO: 862013 - RNA, 20 nt, Human
cuuccacacaaccuuagccc

SEQ ID NO: 862014 - RNA, 21 nt, Human
cuuccccgcaccccagcaccc

SEQ ID NO: 862015 - RNA, 22 nt, Human
gcggccucugcuccccaacuuc

SEQ ID NO: 862016 - RNA, 24 nt, Human
uacaagggugguuuaauacuagaa

SEQ ID NO: 862017 - RNA, 22 nt, Human
uacccuacucggacaccaagcg

SEQ ID NO: 862018 - RNA, 18 nt, Human
uccacacaaccuuagccc

SEQ ID NO: 862019 - RNA, 20 nt, Human
uccccaacuuccccgcaccc

SEQ ID NO: 862020 - RNA, 21 nt, Human
uccccaacuuccccgcacccc

SEQ ID NO: 862021 - RNA, 20 nt, Human
uccccgcaccccagcacccc

SEQ ID NO: 862022 - RNA, 21 nt, Human
ucgcaacccaguucccuuucc

SEQ ID NO: 862023 - RNA, 18 nt, Human
uuccacacaaccuuagcc

SEQ ID NO: 862024 - RNA, 24 nt, Human
uuuccuagcgcccccuugcuccuc

SEQ ID NO: 862025 - RNA, 19 nt, Human
cggcggggcugggcucuca

SEQ ID NO: 862026 - RNA, 22 nt, Human
cucagcgcggggcggcccuagc

SEQ ID NO: 862027 - RNA, 21 nt, Human
gcaggaagugcuuggcguccc

SEQ ID NO: 862028 - RNA, 18 nt, Human
gcgcagccacccagcucc

SEQ ID NO: 862029 - RNA, 21 nt, Human
gcggcaggaagugcuuggcgu

SEQ ID NO: 862030 - RNA, 24 nt, Human
gcgggcagcggcggggcugggcuc

SEQ ID NO: 862031 - RNA, 23 nt, Human
gcgggcgggcagcggcggggcug

SEQ ID NO: 862032 - RNA, 19 nt, Human
ggcagcggcggggcugggc

SEQ ID NO: 862033 - RNA, 23 nt, Human
ggcccgguccggccugggcagcu

SEQ ID NO: 862034 - RNA, 24 nt, Human
guuuguauuaguaacgcaugcaag

SEQ ID NO: 862035 - RNA, 20 nt, Human
ucucaggcaacaguagcagu

SEQ ID NO: 862036 - RNA, 22 nt, Human
ucucaggcaacaguagcaguuc

SEQ ID NO: 862037 - RNA, 23 nt, Human
ucugcgggcgcccggcccggucc

SEQ ID NO: 862038 - RNA, 24 nt, Human
ugggcucucagcgcggggcggccc

SEQ ID NO: 862039 - RNA, 23 nt, Human
uguauuaguaacgcaugcaagca

SEQ ID NO: 862040 - RNA, 24 nt, Human
acaccagaccaccacacacgaggc

SEQ ID NO: 862041 - RNA, 20 nt, Human
acacugacacucagcagaau

SEQ ID NO: 862042 - RNA, 21 nt, Human
acccagagcccccaagcccac

SEQ ID NO: 862043 - RNA, 18 nt, Human
acccggaccggcggaauc

SEQ ID NO: 862044 - RNA, 21 nt, Human
accuagcuggggaacagauuc

SEQ ID NO: 862045 - RNA, 21 nt, Human
agaacacuuuauuuguaaagg

SEQ ID NO: 862046 - RNA, 19 nt, Human
agacaggaaaucacaacaa

SEQ ID NO: 862047 - RNA, 22 nt, Human
auuuguaaaggagcaaagaccg

SEQ ID NO: 862048 - RNA, 24 nt, Human
caaggcaaacgagacaggaaauca

SEQ ID NO: 862049 - RNA, 27 nt, Human
cacaaaaucgggacgagaagccuuuaa

SEQ ID NO: 862050 - RNA, 18 nt, Human
cacccagagcccccaagc

SEQ ID NO: 862051 - RNA, 19 nt, Human
cacccagagcccccaagcc

SEQ ID NO: 862052 - RNA, 20 nt, Human
cacccagagcccccaagccc

SEQ ID NO: 862053 - RNA, 18 nt, Human
caccguccacaccagacc

SEQ ID NO: 862054 - RNA, 22 nt, Human
cauggugguggcagacacccuu

SEQ ID NO: 862055 - RNA, 24 nt, Human
ccagagcccccaagcccacggcag

SEQ ID NO: 862056 - RNA, 22 nt, Human
ccagccccaccccugacugcgc

SEQ ID NO: 862057 - RNA, 22 nt, Human
cccaaaucgaggcccgcgggac

SEQ ID NO: 862058 - RNA, 20 nt, Human
cccagagcccccaagcccac

SEQ ID NO: 862059 - RNA, 21 nt, Human
cccagccccaccccugacugc

SEQ ID NO: 862060 - RNA, 19 nt, Human
ccugacugcgcuggguagg

SEQ ID NO: 862061 - RNA, 19 nt, Human
cgagacaggaaaucacaac

SEQ ID NO: 862062 - RNA, 23 nt, Human
cgcucugggucccagccccaccc

SEQ ID NO: 862063 - RNA, 18 nt, Human
cggcggaaucacacccag

SEQ ID NO: 862064 - RNA, 21 nt, Human
cggucaaggcaaacgagacag

SEQ ID NO: 862065 - RNA, 21 nt, Human
cucugggucccagccccaccc

SEQ ID NO: 862066 - RNA, 19 nt, Human
cugagauacggcugagcac

SEQ ID NO: 862067 - RNA, 24 nt, Human
cugggucccagccccaccccugac

SEQ ID NO: 862068 - RNA, 23 nt, Human
gagacaggaaaucacaacaauca

SEQ ID NO: 862069 - RNA, 19 nt, Human
gcagaaccaggagcgaccc

SEQ ID NO: 862070 - RNA, 20 nt, Human
gcuccggcaccuguccuccu

SEQ ID NO: 862071 - RNA, 21 nt, Human
ggaaucacacccagagccccc

SEQ ID NO: 862072 - RNA, 22 nt, Human
gggacaccuggacucggcagcc

SEQ ID NO: 862073 - RNA, 18 nt, Human
ucaggcauggugguggca

SEQ ID NO: 862074 - RNA, 23 nt, Human
uccaccguccacaccagaccacc

SEQ ID NO: 862075 - RNA, 19 nt, Human
ucccagccccaccccugac

SEQ ID NO: 862076 - RNA, 18 nt, Human
uccccaccuagcugggga

SEQ ID NO: 862077 - RNA, 19 nt, Human
uccggcaccuguccuccug

SEQ ID NO: 862078 - RNA, 23 nt, Human
ucuacagacagcccaccugugaa

SEQ ID NO: 862079 - RNA, 19 nt, Human
ugaauuuuccccaccuagc

SEQ ID NO: 862080 - RNA, 21 nt, Human
ugggucaggcauggugguggc

SEQ ID NO: 862081 - RNA, 20 nt, Human
ugggucccagccccaccccu

SEQ ID NO: 862082 - RNA, 19 nt, Human
uguaaaggagcaaagaccg

SEQ ID NO: 862083 - RNA, 25 nt, Human
uguaaaggagcaaagaccgucgacc

SEQ ID NO: 862084 - RNA, 19 nt, Human
uugaaacagaacacuuuau

SEQ ID NO: 862085 - RNA, 21 nt, Human
uuggcuaucacaaaaucggga

SEQ ID NO: 862086 - RNA, 20 nt, Human
uuuuugaaacagaacacuuu

SEQ ID NO: 862087 - RNA, 21 nt, Human
uuuuuuuuugaaacagaacac

SEQ ID NO: 862088 - RNA, 18 nt, Human
uuuuuuuuuuuuuuuuug

SEQ ID NO: 862089 - RNA, 24 nt, Human
aaagcaccuacuacaugaaggcac

SEQ ID NO: 862090 - RNA, 21 nt, Human
aagaggucagucuuuuguacc

SEQ ID NO: 862091 - RNA, 21 nt, Human
aagcaccuacuacaugaaggc

SEQ ID NO: 862092 - RNA, 18 nt, Human
acccuggaaauugccuga

SEQ ID NO: 862093 - RNA, 30 nt, Human
acucugaaaaccuucacucuagagaagagg

SEQ ID NO: 862094 - RNA, 19 nt, Human
agaaugcugugccaacccc

SEQ ID NO: 862095 - RNA, 20 nt, Human
agcaaguucacagguaaugc

SEQ ID NO: 862096 - RNA, 21 nt, Human
aggaaaaaaacugaguaagaa

SEQ ID NO: 862097 - RNA, 19 nt, Human
agguagcaauucuuuucua

SEQ ID NO: 862098 - RNA, 20 nt, Human
agugagggaagcagcguagg

SEQ ID NO: 862099 - RNA, 21 nt, Human
agugagggaagcagcguagga

SEQ ID NO: 862100 - RNA, 22 nt, Human
augaaggcacaugccagggaca

SEQ ID NO: 862101 - RNA, 20 nt, Human
cagaacaucuagauucacag

SEQ ID NO: 862102 - RNA, 23 nt, Human
cauccugcccacuggccgcucca

SEQ ID NO: 862103 - RNA, 23 nt, Human
ccaacccccagagauucugauuc

SEQ ID NO: 862104 - RNA, 22 nt, Human
cccaagcuggggcuauguagac

SEQ ID NO: 862105 - RNA, 25 nt, Human
cccccagagauucugauucaguagg

SEQ ID NO: 862106 - RNA, 19 nt, Human
ccgcuccacugcgcagccc

SEQ ID NO: 862107 - RNA, 18 nt, Human
ccuggaaauugccugaug

SEQ ID NO: 862108 - RNA, 22 nt, Human
ccugggccggggggacuggggc

SEQ ID NO: 862109 - RNA, 25 nt, Human
cuacuacaugaaggcacaugccagg

SEQ ID NO: 862110 - RNA, 20 nt, Human
gagugcucuuaggagaaggg

SEQ ID NO: 862111 - RNA, 23 nt, Human
gauacaugaggcuuugaaaagga

SEQ ID NO: 862112 - RNA, 20 nt, Human
gcaagacucuagaccaaccc

SEQ ID NO: 862113 - RNA, 18 nt, Human
gccgccugggccgggggg

SEQ ID NO: 862114 - RNA, 18 nt, Human
gggcagaggggucuggcu

SEQ ID NO: 862115 - RNA, 23 nt, Human
gguggggccugaggauuuguauu

SEQ ID NO: 862116 - RNA, 26 nt, Human
guaaaucagaaugcugugccaacccc

SEQ ID NO: 862117 - RNA, 19 nt, Human
guaggacagaggaaaaaaa

SEQ ID NO: 862118 - RNA, 19 nt, Human
gucugggagauacaugagg

SEQ ID NO: 862119 - RNA, 19 nt, Human
uaaugcugaugaugcacuc

SEQ ID NO: 862120 - RNA, 20 nt, Human
uacuacaugaaggcacaugc

SEQ ID NO: 862121 - RNA, 21 nt, Human
uacuacaugaaggcacaugcc

SEQ ID NO: 862122 - RNA, 23 nt, Human
uagcacccacagcaucucgcaaa

SEQ ID NO: 862123 - RNA, 23 nt, Human
uauguuccuguugucaucucaca

SEQ ID NO: 862124 - RNA, 24 nt, Human
ucaaaauuagaauacaucaaaauc

SEQ ID NO: 862125 - RNA, 21 nt, Human
ucgucauccugcccacuggcc

SEQ ID NO: 862126 - RNA, 19 nt, Human
ucuagaccaacccuggaaa

SEQ ID NO: 862127 - RNA, 21 nt, Human
ucugaaaaccuucacucuaga

SEQ ID NO: 862128 - RNA, 18 nt, Human
ugaaaaggaaguagcugc

SEQ ID NO: 862129 - RNA, 24 nt, Human
ugaaaaggaaguagcugcaaguug

SEQ ID NO: 862130 - RNA, 20 nt, Human
ugaaauuaaaagaaaauggc

SEQ ID NO: 862131 - RNA, 22 nt, Human
ugaggcuuugaaaaggaaguag

SEQ ID NO: 862132 - RNA, 21 nt, Human
ugaguaagaaugugcucucag

SEQ ID NO: 862133 - RNA, 20 nt, Human
ugauguaagaggucagucuu

SEQ ID NO: 862134 - RNA, 20 nt, Human
ugauuccaugaggagcucug

SEQ ID NO: 862135 - RNA, 25 nt, Human
uggcaagacucuagaccaacccugg

SEQ ID NO: 862136 - RNA, 25 nt, Human
uggggcagaggggucuggcucguca

SEQ ID NO: 862137 - RNA, 24 nt, Human
uucauaacagucucugcuccugag

SEQ ID NO: 862138 - RNA, 19 nt, Human
uucucgugcaagugguuua

SEQ ID NO: 862139 - RNA, 21 nt, Human
uuguugaaacauucuuacuug

SEQ ID NO: 862140 - RNA, 19 nt, Human
uuuuuuuucucgugcaagu

SEQ ID NO: 862141 - RNA, 20 nt, Human
uuuuuuuuuuuuuuucucgu

SEQ ID NO: 862142 - RNA, 24 nt, Human
uuuuuuuuuuuuuuuuuucucggg

SEQ ID NO: 862143 - RNA, 23 nt, Human
aauauguaugcaacagaaacuaa

SEQ ID NO: 862144 - RNA, 26 nt, Human
aaucaaaaguauuuuccaaaguugaa

SEQ ID NO: 862145 - RNA, 18 nt, Human
augcauauauguaaacuu

SEQ ID NO: 862146 - RNA, 24 nt, Human
cgcauguguguauuucaguauccu

SEQ ID NO: 862147 - RNA, 21 nt, Human
cuuuaugaauguauaugcauc

SEQ ID NO: 862148 - RNA, 24 nt, Human
gcauguguguauuucaguauccug

SEQ ID NO: 862149 - RNA, 22 nt, Human
uaaaugcauauauguaaacuug

SEQ ID NO: 862150 - RNA, 24 nt, Human
uaaaugcauauauguaaacuugug

SEQ ID NO: 862151 - RNA, 18 nt, Human
ucauguguacgcaugugu

SEQ ID NO: 862152 - RNA, 25 nt, Human
uccaugcuacauacauggaaguuaa

SEQ ID NO: 862153 - RNA, 23 nt, Human
ugaacauuauuaaaugaaaguaa

SEQ ID NO: 862154 - RNA, 18 nt, Human
uguguacgcaugugugua

SEQ ID NO: 862155 - RNA, 18 nt, Human
uuuuuuuuuuuuuuuuug

SEQ ID NO: 862156 - RNA, 19 nt, Human
uuuuuuuuuuuuuuuuugu

SEQ ID NO: 862157 - RNA, 23 nt, Human
aaagcugauucgacuaagcccca

SEQ ID NO: 862158 - RNA, 22 nt, Human
agccccagaagaaaacagccag

SEQ ID NO: 862159 - RNA, 19 nt, Human
agcugauucgacuaagccc

SEQ ID NO: 862160 - RNA, 19 nt, Human
cauuacaaagcugauucga

SEQ ID NO: 862161 - RNA, 21 nt, Human
gacuaagccccagaagaaaac

SEQ ID NO: 862162 - RNA, 19 nt, Human
gcuuucuggagccuccucu

SEQ ID NO: 862163 - RNA, 25 nt, Human
uaagccccagaagaaaacagccagg

SEQ ID NO: 862164 - RNA, 26 nt, Human
uuuuuugcuguuaugauuuuauugcc

SEQ ID NO: 862165 - RNA, 21 nt, Human
uuuuuuuuuuuuuuuugcugu

SEQ ID NO: 862166 - RNA, 18 nt, Human
uuuuuuuuuuuuuuuuug

SEQ ID NO: 862167 - RNA, 20 nt, Human
uuuuuuuuuuuuuuuuugcu

SEQ ID NO: 862168 - RNA, 30 nt, Human
aauauauacauauauacagacauauggcau

SEQ ID NO: 862169 - RNA, 23 nt, Human
accauccccugcaggacaggccu

SEQ ID NO: 862170 - RNA, 19 nt, Human
agaauggcaggggccaccc

SEQ ID NO: 862171 - RNA, 22 nt, Human
agcagacaaggagcugaccuca

SEQ ID NO: 862172 - RNA, 19 nt, Human
agcccccaucccugcccaa

SEQ ID NO: 862173 - RNA, 19 nt, Human
augugcagacacaggcacg

SEQ ID NO: 862174 - RNA, 21 nt, Human
caagccuagcccccaucccug

SEQ ID NO: 862175 - RNA, 21 nt, Human
cagacaaggagcugaccucau

SEQ ID NO: 862176 - RNA, 21 nt, Human
caucccugcccaagaccaucc

SEQ ID NO: 862177 - RNA, 22 nt, Human
cauucagaauggcaggggccac

SEQ ID NO: 862178 - RNA, 20 nt, Human
ccccaucccugcccaagaca

SEQ ID NO: 862179 - RNA, 22 nt, Human
ccuagcccccaucccugcccaa

SEQ ID NO: 862180 - RNA, 21 nt, Human
ccugcccaagaccauccccug

SEQ ID NO: 862181 - RNA, 22 nt, Human
ccugcccaagaccauccccugc

SEQ ID NO: 862182 - RNA, 18 nt, Human
gaugggcgaguggugggg

SEQ ID NO: 862183 - RNA, 20 nt, Human
ggccacccagcagacaagga

SEQ ID NO: 862184 - RNA, 20 nt, Human
ggggguuucagacuugaugg

SEQ ID NO: 862185 - RNA, 22 nt, Human
gugcagacacaggcacgcccag

SEQ ID NO: 862186 - RNA, 24 nt, Human
guucaaaauauauacauauauaca

SEQ ID NO: 862187 - RNA, 20 nt, Human
uauacauauauacagacaua

SEQ ID NO: 862188 - RNA, 28 nt, Human
uauauacauauauacagacauauguaca

SEQ ID NO: 862189 - RNA, 20 nt, Human
uauguacauccacaugugca

SEQ ID NO: 862190 - RNA, 23 nt, Human
ucaaaauauauacauauauacag

SEQ ID NO: 862191 - RNA, 21 nt, Human
ucagaauggcaggggccaccc

SEQ ID NO: 862192 - RNA, 21 nt, Human
uccacaugugcagacacaggc

SEQ ID NO: 862193 - RNA, 22 nt, Human
uccccugcaggacaggccugau

SEQ ID NO: 862194 - RNA, 18 nt, Human
ucccugcccaagaccauc

SEQ ID NO: 862195 - RNA, 19 nt, Human
ucccugcccaagaccaucc

SEQ ID NO: 862196 - RNA, 23 nt, Human
ugauggcaagccuagcccccucu

SEQ ID NO: 862197 - RNA, 24 nt, Human
uggcaagccuagcccccaucccug

SEQ ID NO: 862198 - RNA, 19 nt, Human
uggcaggggccacccagca

SEQ ID NO: 862199 - RNA, 21 nt, Human
uggggguuucagacuugaugg

SEQ ID NO: 862200 - RNA, 19 nt, Human
uguugcugguucugccucc

SEQ ID NO: 862201 - RNA, 20 nt, Human
uucagaauggcaggggccac

SEQ ID NO: 862202 - RNA, 19 nt, Human
uuguugcugguucugccuc

SEQ ID NO: 862203 - RNA, 18 nt, Human
uuuuuuuuuuuuuuuucg

SEQ ID NO: 862204 - RNA, 19 nt, Human
aaaaugccccaccaucuuc

SEQ ID NO: 862205 - RNA, 19 nt, Human
aaacaaaaugcaaacuaca

SEQ ID NO: 862206 - RNA, 24 nt, Human
aaaccaaacuaaacaaaaugcaaa

SEQ ID NO: 862207 - RNA, 21 nt, Human
aacacauuuuucucugccacc

SEQ ID NO: 862208 - RNA, 25 nt, Human
aauagccacauaugugaaaccuuuu

SEQ ID NO: 862209 - RNA, 19 nt, Human
aauauacccacuuccaaaa

SEQ ID NO: 862210 - RNA, 19 nt, Human
agaaagaaaacaguagagg

SEQ ID NO: 862211 - RNA, 19 nt, Human
agaaagaaaacaguagagg

SEQ ID NO: 862212 - RNA, 24 nt, Human
agaaagaaaacaguagaggaaugu

SEQ ID NO: 862213 - RNA, 21 nt, Human
auaaccucaaauauacccacu

SEQ ID NO: 862214 - RNA, 20 nt, Human
auccaaauuaaaaaugaagc

SEQ ID NO: 862215 - RNA, 23 nt, Human
caaaacaugauuguaauauuaca

SEQ ID NO: 862216 - RNA, 19 nt, Human
caaaaugcaaacuacagug

SEQ ID NO: 862217 - RNA, 24 nt, Human
caaauauacccacuuccaaaacua

SEQ ID NO: 862218 - RNA, 21 nt, Human
caaaucaaaggucucuagcag

SEQ ID NO: 862219 - RNA, 31 nt, Human
caauaugauuucucucccuuucagaagccuu

SEQ ID NO: 862220 - RNA, 20 nt, Human
caaugcaguuugggaaaugg

SEQ ID NO: 862221 - RNA, 21 nt, Human
caaugcaguuugggaaaugga

SEQ ID NO: 862222 - RNA, 19 nt, Human
caccaacacugauuuccaa

SEQ ID NO: 862223 - RNA, 20 nt, Human
caccaucuucuucacugcau

SEQ ID NO: 862224 - RNA, 18 nt, Human
cacccuuucccccacacu

SEQ ID NO: 862225 - RNA, 20 nt, Human
cacccuuucccccacacuuc

SEQ ID NO: 862226 - RNA, 21 nt, Human
caccgggccccgggcuauccc

SEQ ID NO: 862227 - RNA, 20 nt, Human
cacugcauuacagcuuagca

SEQ ID NO: 862228 - RNA, 24 nt, Human
cacugcauuacagcuuagcaaggc

SEQ ID NO: 862229 - RNA, 20 nt, Human
cacuucagaaaaaccaccaa

SEQ ID NO: 862230 - RNA, 30 nt, Human
cagaaaaaccaccaauuccuuccuagaggg

SEQ ID NO: 862231 - RNA, 21 nt, Human
cagaaacauccaaauuaaaaa

SEQ ID NO: 862232 - RNA, 19 nt, Human
cagaaagaaaacaguagag

SEQ ID NO: 862233 - RNA, 25 nt, Human
cagcaagaaaccacccuuuccccca

SEQ ID NO: 862234 - RNA, 18 nt, Human
caguagaggaauguggca

SEQ ID NO: 862235 - RNA, 21 nt, Human
caguaucagaaagaaaacagu

SEQ ID NO: 862236 - RNA, 25 nt, Human
caguugacaaacaugcaaaauaacu

SEQ ID NO: 862237 - RNA, 22 nt, Human
cauccaaauuaaaaaugaagca

SEQ ID NO: 862238 - RNA, 20 nt, Human
cauccagacauccccgguuc

SEQ ID NO: 862239 - RNA, 18 nt, Human
cgggccccgggcuauccc

SEQ ID NO: 862240 - RNA, 23 nt, Human
cuaaaaccaaacuaaacaaaaug

SEQ ID NO: 862241 - RNA, 21 nt, Human
cuagcauguccaguaucagaa

SEQ ID NO: 862242 - RNA, 22 nt, Human
gaaaacaguagaggaauguggc

SEQ ID NO: 862243 - RNA, 21 nt, Human
ggacagaugcucacgugcucu

SEQ ID NO: 862244 - RNA, 22 nt, Human
ggacagaugcucacgugcucuc

SEQ ID NO: 862245 - RNA, 21 nt, Human
gugggacaaagaacugacucu

SEQ ID NO: 862246 - RNA, 22 nt, Human
uaaaauuccaggagacauucuu

SEQ ID NO: 862247 - RNA, 28 nt, Human
uaacuaaaugagauauaaccucaaauau

SEQ ID NO: 862248 - RNA, 26 nt, Human
uaauuuccaaaucaaaggucucuagc

SEQ ID NO: 862249 - RNA, 24 nt, Human
uacugaacacuaaagauaaagagg

SEQ ID NO: 862250 - RNA, 24 nt, Human
uacuggccaugaaauccagcaaga

SEQ ID NO: 862251 - RNA, 20 nt, Human
uagaaaggacagaugcucac

SEQ ID NO: 862252 - RNA, 21 nt, Human
uagccacauaugugaaaccuu

SEQ ID NO: 862253 - RNA, 18 nt, Human
uaguagagcuaaaaccaa

SEQ ID NO: 862254 - RNA, 18 nt, Human
uauccccgcugcuacuga

SEQ ID NO: 862255 - RNA, 22 nt, Human
ucaaaggucucuagcagaaaca

SEQ ID NO: 862256 - RNA, 19 nt, Human
ucacugcauuacagcuuag

SEQ ID NO: 862257 - RNA, 20 nt, Human
ucacugcauuacagcuuagc

SEQ ID NO: 862258 - RNA, 18 nt, Human
ucagaacaucuaacccug

SEQ ID NO: 862259 - RNA, 22 nt, Human
uccaaguuacuagcauguccag

SEQ ID NO: 862260 - RNA, 21 nt, Human
uccaguaucagaaagaaaaca

SEQ ID NO: 862261 - RNA, 18 nt, Human
ucuagcagaaacauccaa

SEQ ID NO: 862262 - RNA, 18 nt, Human
ugaaaaacauaauggccu

SEQ ID NO: 862263 - RNA, 20 nt, Human
ugaaaccuuaguagagcuaa

SEQ ID NO: 862264 - RNA, 20 nt, Human
ugaaugaggacauuaauggg

SEQ ID NO: 862265 - RNA, 24 nt, Human
ugaaugaggacauuaaugggaaug

SEQ ID NO: 862266 - RNA, 23 nt, Human
ugacaaacaugcaaaauaacuaa

SEQ ID NO: 862267 - RNA, 22 nt, Human
ugccccaccaucuucuucacug

SEQ ID NO: 862268 - RNA, 18 nt, Human
uggcuucaagcaaccucc

SEQ ID NO: 862269 - RNA, 19 nt, Human
uggcuucaagcaaccucca

SEQ ID NO: 862270 - RNA, 21 nt, Human
uugaaugaggacauuaauggg

SEQ ID NO: 862271 - RNA, 21 nt, Human
uuugggaaaugggccaugaaa

SEQ ID NO: 862272 - RNA, 24 nt, Human
uuuuuuuuuuuaguguuaaaaugu

SEQ ID NO: 862273 - RNA, 19 nt, Human
aaagcucaucgaggcacga

SEQ ID NO: 862274 - RNA, 21 nt, Human
aagaaagagaauggaggaaaa

SEQ ID NO: 862275 - RNA, 22 nt, Human
acugcagcugcgcggaccgcac

SEQ ID NO: 862276 - RNA, 22 nt, Human
aggcacgaaggagaugaaccgc

SEQ ID NO: 862277 - RNA, 21 nt, Human
aggccggaagcgggcugcgaa

SEQ ID NO: 862278 - RNA, 19 nt, Human
aggugaagaaagagaaugg

SEQ ID NO: 862279 - RNA, 19 nt, Human
ccagcucgugcaggcaucg

SEQ ID NO: 862280 - RNA, 19 nt, Human
ccuuucauuuugaccaucu

SEQ ID NO: 862281 - RNA, 20 nt, Human
cgaagcaccgcgccugcgcc

SEQ ID NO: 862282 - RNA, 20 nt, Human
cgcccccuuacugcagcugc

SEQ ID NO: 862283 - RNA, 21 nt, Human
cucaagaggugaagaaagaga

SEQ ID NO: 862284 - RNA, 23 nt, Human
ggugaagaaagagaauggaggaa

SEQ ID NO: 862285 - RNA, 20 nt, Human
gugaggccggaagcgggcug

SEQ ID NO: 862286 - RNA, 19 nt, Human
ucagcuacagauaggcuaa

SEQ ID NO: 862287 - RNA, 19 nt, Human
ucgcaggugugaugcuugg

SEQ ID NO: 862288 - RNA, 19 nt, Human
ugaccaucucauagccacu

SEQ ID NO: 862289 - RNA, 23 nt, Human
ugaggccggaagcgggcugcgaa

SEQ ID NO: 862290 - RNA, 18 nt, Human
ugcuuggcaggugugagg

SEQ ID NO: 862291 - RNA, 19 nt, Human
uggcaggugugaugcuugg

SEQ ID NO: 862292 - RNA, 19 nt, Human
uggcaggugugaugcuugg

SEQ ID NO: 862293 - RNA, 19 nt, Human
uggcaggugugaugcuugg

SEQ ID NO: 862294 - RNA, 24 nt, Human
ugugaugcuuggcaggugugaggc

SEQ ID NO: 862295 - RNA, 22 nt, Human
uuuugaccaucucauagccacu

SEQ ID NO: 862296 - RNA, 18 nt, Human
uuuuuuuuuuuuuuuuug

SEQ ID NO: 862297 - RNA, 20 nt, Human
uuuuuuuuuuuuuuuuuggu

SEQ ID NO: 862298 - RNA, 23 nt, Human
acucuuauugcccaggcuggagu

SEQ ID NO: 862299 - RNA, 24 nt, Human
acucuuauugcccaggcuggagug

SEQ ID NO: 862300 - RNA, 19 nt, Human
agaggcgaccuagagcucc

SEQ ID NO: 862301 - RNA, 18 nt, Human
agccuccugaguagcugg

SEQ ID NO: 862302 - RNA, 19 nt, Human
agcgaagaggcgaccuaga

SEQ ID NO: 862303 - RNA, 20 nt, Human
aggacacagggccacagagg

SEQ ID NO: 862304 - RNA, 25 nt, Human
aggagcagaggacacagaguagcga

SEQ ID NO: 862305 - RNA, 24 nt, Human
aggugauccucccaccuuggccuc

SEQ ID NO: 862306 - RNA, 21 nt, Human
aguagcugggauuacaggcau

SEQ ID NO: 862307 - RNA, 23 nt, Human
aguagcugggauuacaggcaugu

SEQ ID NO: 862308 - RNA, 23 nt, Human
aguagcugggauuacaggcaugu

SEQ ID NO: 862309 - RNA, 20 nt, Human
auccucccaccuuggccucc

SEQ ID NO: 862310 - RNA, 20 nt, Human
caccacaaccucugccucca

SEQ ID NO: 862311 - RNA, 20 nt, Human
caccacaaccucugccucca

SEQ ID NO: 862312 - RNA, 22 nt, Human
caguagagacuggguuucuccg

SEQ ID NO: 862313 - RNA, 21 nt, Human
ccaauaccuacaggacacagg

SEQ ID NO: 862314 - RNA, 24 nt, Human
ccacaaccucugccuccaggguuc

SEQ ID NO: 862315 - RNA, 18 nt, Human
cccaggcuggagugcaau

SEQ ID NO: 862316 - RNA, 19 nt, Human
cccaggcuggagugcaaug

SEQ ID NO: 862317 - RNA, 26 nt, Human
ccucccaccuuggccucccaaagugc

SEQ ID NO: 862318 - RNA, 23 nt, Human
ccugaguagcugggauuacaggc

SEQ ID NO: 862319 - RNA, 24 nt, Human
ccugaguagcugggauuacaggca

SEQ ID NO: 862320 - RNA, 21 nt, Human
cuacaggacacagggccacag

SEQ ID NO: 862321 - RNA, 19 nt, Human
cuaggcuucuaaggggucc

SEQ ID NO: 862322 - RNA, 19 nt, Human
cucuuauugcccaggcugg

SEQ ID NO: 862323 - RNA, 23 nt, Human
cugaguagcugggauuacaggca

SEQ ID NO: 862324 - RNA, 24 nt, Human
cugaguagcugggauuacaggcau

SEQ ID NO: 862325 - RNA, 20 nt, Human
cugccuccaggguucaagcc

SEQ ID NO: 862326 - RNA, 24 nt, Human
cuuauugcccaggcuggagugcaa

SEQ ID NO: 862327 - RNA, 24 nt, Human
gacaucaggugauccucccaccuu

SEQ ID NO: 862328 - RNA, 22 nt, Human
gaguagcugggauuacaggcau

SEQ ID NO: 862329 - RNA, 18 nt, Human
gauuacaggcaugugcca

SEQ ID NO: 862330 - RNA, 22 nt, Human
gauuacaggcaugugccaccau

SEQ ID NO: 862331 - RNA, 24 nt, Human
ggauuacaggcaugugccaccaug

SEQ ID NO: 862332 - RNA, 19 nt, Human
ggccacagagggugggccu

SEQ ID NO: 862333 - RNA, 24 nt, Human
ggguucaagccuccugaguagcug

SEQ ID NO: 862334 - RNA, 18 nt, Human
guagcugggauuacaggc

SEQ ID NO: 862335 - RNA, 20 nt, Human
guagcugggauuacaggcau

SEQ ID NO: 862336 - RNA, 23 nt, Human
uacaaugcuuccaaaaaucugcu

SEQ ID NO: 862337 - RNA, 19 nt, Human
uauugcccaggcuggagug

SEQ ID NO: 862338 - RNA, 20 nt, Human
uauugcccaggcuggagugc

SEQ ID NO: 862339 - RNA, 19 nt, Human
ucaagccuccugaguagcu

SEQ ID NO: 862340 - RNA, 25 nt, Human
ucaccacaaccucugccuccagggu

SEQ ID NO: 862341 - RNA, 27 nt, Human
ucaccacaaccucugccuccaggguuc

SEQ ID NO: 862342 - RNA, 22 nt, Human
ucacucuuauugcccaggcugg

SEQ ID NO: 862343 - RNA, 23 nt, Human
ucacucuuauugcccaggcugga

SEQ ID NO: 862344 - RNA, 24 nt, Human
ucaguagagacuggguuucuccgu

SEQ ID NO: 862345 - RNA, 24 nt, Human
uccugaguagcugggauuacaggc

SEQ ID NO: 862346 - RNA, 22 nt, Human
ucugaucucaaacucccgacau

SEQ ID NO: 862347 - RNA, 22 nt, Human
ugaacaaguauacuuuuaaugu

SEQ ID NO: 862348 - RNA, 18 nt, Human
ugcccaggcuggagugca

SEQ ID NO: 862349 - RNA, 21 nt, Human
ugcccaggcuggagugcaaug

SEQ ID NO: 862350 - RNA, 21 nt, Human
ugggauuacaggcaugugcca

SEQ ID NO: 862351 - RNA, 22 nt, Human
ugggauuacaggcaugugccac

SEQ ID NO: 862352 - RNA, 24 nt, Human
ugggauuacaggcaugugccacca

SEQ ID NO: 862353 - RNA, 20 nt, Human
uguggaucucccaauaccua

SEQ ID NO: 862354 - RNA, 24 nt, Human
uucacucuuauugcccaggcugga

SEQ ID NO: 862355 - RNA, 18 nt, Human
uuggccucccaaagugcu

SEQ ID NO: 862356 - RNA, 24 nt, Human
uuuuuuuuuugaacaaguauacuu

SEQ ID NO: 862357 - RNA, 27 nt, Human
uuuuuuuuuuuuuuuuuuuuuuugggg

SEQ ID NO: 862358 - RNA, 25 nt, Human
aaaaagaucaguauaaauaugaaua

SEQ ID NO: 862359 - RNA, 24 nt, Human
aaagaucaguauaaauaugaauaa

SEQ ID NO: 862360 - RNA, 20 nt, Human
aaauggaauaacaccaaaua

SEQ ID NO: 862361 - RNA, 26 nt, Human
aagaaaccagaaucaagcagugggca

SEQ ID NO: 862362 - RNA, 23 nt, Human
aaggaaaagacugugaacauaaa

SEQ ID NO: 862363 - RNA, 20 nt, Human
acacauuagguacuauuacu

SEQ ID NO: 862364 - RNA, 21 nt, Human
acacugaacagauacaggacu

SEQ ID NO: 862365 - RNA, 19 nt, Human
acagauacaggacuaaagu

SEQ ID NO: 862366 - RNA, 18 nt, Human
acauguagagagauuaag

SEQ ID NO: 862367 - RNA, 25 nt, Human
acucaaugcuuauaacaacccuaca

SEQ ID NO: 862368 - RNA, 20 nt, Human
aggaaauguuagcuaugagc

SEQ ID NO: 862369 - RNA, 22 nt, Human
augagccuaaaggaaaagacug

SEQ ID NO: 862370 - RNA, 25 nt, Human
caacaaauacuggcuauuucuagaa

SEQ ID NO: 862371 - RNA, 21 nt, Human
caacccuacacauuagguacu

SEQ ID NO: 862372 - RNA, 21 nt, Human
caacuaguaaaggaacuaaca

SEQ ID NO: 862373 - RNA, 18 nt, Human
cacagcauuaauccaggg

SEQ ID NO: 862374 - RNA, 20 nt, Human
cacugcuggauggaaaaaga

SEQ ID NO: 862375 - RNA, 20 nt, Human
cagaaucaagcaaggggcca

SEQ ID NO: 862376 - RNA, 23 nt, Human
cauguagagagauuaagugacuu

SEQ ID NO: 862377 - RNA, 20 nt, Human
cauuacaggaaucacuucuc

SEQ ID NO: 862378 - RNA, 18 nt, Human
ccaauaucaucaucauug

SEQ ID NO: 862379 - RNA, 20 nt, Human
cugaacagauacaggacuaa

SEQ ID NO: 862380 - RNA, 21 nt, Human
gaaaaucuguaacugugaaga

SEQ ID NO: 862381 - RNA, 20 nt, Human
gaaauaccaucauuuuauag

SEQ ID NO: 862382 - RNA, 22 nt, Human
gaaguaaaacaagaaaccagaa

SEQ ID NO: 862383 - RNA, 19 nt, Human
gcaaauggaauaacaccaa

SEQ ID NO: 862384 - RNA, 21 nt, Human
gcaacaguucaaauacguaau

SEQ ID NO: 862385 - RNA, 20 nt, Human
gccuucaugacagcugucac

SEQ ID NO: 862386 - RNA, 23 nt, Human
ggccaugauuucuugucugggau

SEQ ID NO: 862387 - RNA, 22 nt, Human
guuucuuuaaauagcaaaugga

SEQ ID NO: 862388 - RNA, 21 nt, Human
uaaagcaacuaguaaaggaac

SEQ ID NO: 862389 - RNA, 22 nt, Human
uaaaggaacuaacauguaggca

SEQ ID NO: 862390 - RNA, 20 nt, Human
uaacuuaaguucaucuacag

SEQ ID NO: 862391 - RNA, 28 nt, Human
uaaguagacagucuguuauuguaaugac

SEQ ID NO: 862392 - RNA, 22 nt, Human
uaaguucaucuacaguacaacu

SEQ ID NO: 862393 - RNA, 23 nt, Human
uagaagaaauguaaauaggaaau

SEQ ID NO: 862394 - RNA, 22 nt, Human
uagcuuuaaugagaaguaaaac

SEQ ID NO: 862395 - RNA, 24 nt, Human
uaggaaauguuagcuaugagcuaa

SEQ ID NO: 862396 - RNA, 20 nt, Human
uauauuauuuaucuuacuca

SEQ ID NO: 862397 - RNA, 20 nt, Human
uaucaucaucauugaguacu

SEQ ID NO: 862398 - RNA, 18 nt, Human
ucuugucugggauggaac

SEQ ID NO: 862399 - RNA, 18 nt, Human
ucuuucuuccaaaucuug

SEQ ID NO: 862400 - RNA, 23 nt, Human
ugaaaaauaacacaaauuuaagc

SEQ ID NO: 862401 - RNA, 25 nt, Human
ugaaaagaaaaauucuuacuugaga

SEQ ID NO: 862402 - RNA, 21 nt, Human
ugaagaaauugacauguagag

SEQ ID NO: 862403 - RNA, 22 nt, Human
ugagaagaaagccuucaugaca

SEQ ID NO: 862404 - RNA, 23 nt, Human
ugagaaguaaaacaagaaaccag

SEQ ID NO: 862405 - RNA, 25 nt, Human
ugagaaguaaaacaagaaaccagaa

SEQ ID NO: 862406 - RNA, 22 nt, Human
ugucacauuauccaaaugcucc

SEQ ID NO: 862407 - RNA, 25 nt, Human
uguuuuuauguuccaggcacuguuc

SEQ ID NO: 862408 - RNA, 22 nt, Human
uuaaaaguaaaauuucaugaaa

SEQ ID NO: 862409 - RNA, 19 nt, Human
uuuuuuuuuuuuuugccuu

SEQ ID NO: 862410 - RNA, 18 nt, Human
uuuuuuuuuuuuuuuuug

SEQ ID NO: 862411 - RNA, 22 nt, Human
uuuuuuuuuuuuuuuuugccuu

SEQ ID NO: 862412 - RNA, 24 nt, Human
acagauccuagauaaucaguugca

SEQ ID NO: 862413 - RNA, 20 nt, Human
agaaagauuugaaauggaca

SEQ ID NO: 862414 - RNA, 20 nt, Human
aucacaaugcuuguguuuga

SEQ ID NO: 862415 - RNA, 19 nt, Human
cugccugcugcacuuucuc

SEQ ID NO: 862416 - RNA, 18 nt, Human
gaggagaaggaagguaaa

SEQ ID NO: 862417 - RNA, 19 nt, Human
ggaagguaaaacuguuaag

SEQ ID NO: 862418 - RNA, 22 nt, Human
uacacagauccuagauaaucag

SEQ ID NO: 862419 - RNA, 26 nt, Human
ucaguauggcaauggaaagguuucuu

SEQ ID NO: 862420 - RNA, 19 nt, Human
uccuagauaaucaguugca

SEQ ID NO: 862421 - RNA, 20 nt, Human
ugaaauggacaguggaauca

SEQ ID NO: 862422 - RNA, 22 nt, Human
uguugccguuaaaggguuaucu

SEQ ID NO: 862423 - RNA, 19 nt, Human
uucccucaagaagaugauc

SEQ ID NO: 862424 - RNA, 21 nt, Human
uuggcacuaaugauuggcuuu

SEQ ID NO: 862425 - RNA, 23 nt, Human
uuuuuuuuuuuugaaagcagacu

SEQ ID NO: 862426 - RNA, 18 nt, Human
uuuuuuuuuuuuuuuuug

SEQ ID NO: 862427 - RNA, 24 nt, Human
ugaggauagugggcgagaacuuug

SEQ ID NO: 862428 - RNA, 19 nt, Human
uggaagacaaaaagucugc

SEQ ID NO: 862429 - RNA, 18 nt, Human
ugguuuauuugcuuguaa

SEQ ID NO: 862430 - RNA, 19 nt, Human
uucuuaauggggcuggaag

SEQ ID NO: 862431 - RNA, 21 nt, Human
uuugaauguucuuuucaaagg

SEQ ID NO: 862432 - RNA, 24 nt, Human
uuuuuuuuuuuguuugaccaguuc

SEQ ID NO: 862433 - RNA, 18 nt, Human
uuuuuuuuuuuuuuuuug

SEQ ID NO: 862434 - RNA, 22 nt, Human
uuuuuuuuuuuuuuuuuuguuu

SEQ ID NO: 862435 - RNA, 23 nt, Human
agacugcaguuuuccagucuuuu

SEQ ID NO: 862436 - RNA, 23 nt, Human
cauaccaaagacggguggaaaag

SEQ ID NO: 862437 - RNA, 21 nt, Human
ccuugcucgcuccgucccucu

SEQ ID NO: 862438 - RNA, 20 nt, Human
gaacugauuuuauuagccaa

SEQ ID NO: 862439 - RNA, 21 nt, Human
uauuacagacugcaguuuucc

SEQ ID NO: 862440 - RNA, 21 nt, Human
uggaggccuggcccucgugcc

SEQ ID NO: 862441 - RNA, 23 nt, Human
uuggguguaaggccggcuuggag

SEQ ID NO: 862442 - RNA, 22 nt, Human
uuuuuuuuuuuuuuuuucccag

SEQ ID NO: 862443 - RNA, 25 nt, Human
uuuuuuuuuuuuuuuuuucccaguu

SEQ ID NO: 862444 - RNA, 23 nt, Human
uuuuuuuuuuuuuuuuuuuccca

SEQ ID NO: 862445 - RNA, 23 nt, Human
uuuuuuuuuuuuuuuuuuuuccc

SEQ ID NO: 862446 - RNA, 24 nt, Human
uuuuuuuuuuuuuuuuuuuuuccu

SEQ ID NO: 862447 - RNA, 22 nt, Human
aaccccaaguccuaagucagga

SEQ ID NO: 862448 - RNA, 23 nt, Human
aaccccaaguccuaagucaggaa

SEQ ID NO: 862449 - RNA, 21 nt, Human
aauggcaggaaggguggagga

SEQ ID NO: 862450 - RNA, 22 nt, Human
acccaaccccaaguccuaaguc

SEQ ID NO: 862451 - RNA, 23 nt, Human
aggaaggguggaggaccaugcuc

SEQ ID NO: 862452 - RNA, 24 nt, Human
caaguccuaagucaggaauuccuu

SEQ ID NO: 862453 - RNA, 20 nt, Human
ccaaguccuaagucaggaau

SEQ ID NO: 862454 - RNA, 21 nt, Human
ccccugggauguaagcaccuu

SEQ ID NO: 862455 - RNA, 27 nt, Human
ccgccgggcagccagagccgccggccc

SEQ ID NO: 862456 - RNA, 21 nt, Human
gagcccagggcagaauggcag

SEQ ID NO: 862457 - RNA, 18 nt, Human
gaggagcccagggcagaa

SEQ ID NO: 862458 - RNA, 18 nt, Human
uaagcaccuuggacccaa

SEQ ID NO: 862459 - RNA, 19 nt, Human
uuuuuuuuuuucuggaucu

SEQ ID NO: 862460 - RNA, 18 nt, Human
uuuuuuuuuuuuuuucug

SEQ ID NO: 862461 - RNA, 18 nt, Human
uuuuuuuuuuuuuuucug

SEQ ID NO: 862462 - RNA, 19 nt, Human
aaaaaaaacaauacaaaga

SEQ ID NO: 862463 - RNA, 23 nt, Human
aaaaaaaacaauacaaagaguga

SEQ ID NO: 862464 - RNA, 24 nt, Human
aaaaaaaacaauacaaagagugaa

SEQ ID NO: 862465 - RNA, 26 nt, Human
aaaaaacaauacaaagagugaaagga

SEQ ID NO: 862466 - RNA, 19 nt, Human
aaaguacaaaugacuacaa

SEQ ID NO: 862467 - RNA, 20 nt, Human
aaaugcagcacccauuacaa

SEQ ID NO: 862468 - RNA, 26 nt, Human
aaauggauuucucuucuauuaaaaac

SEQ ID NO: 862469 - RNA, 19 nt, Human
aagaaaagcuuucacgggg

SEQ ID NO: 862470 - RNA, 19 nt, Human
aagaacaguaaagcccaac

SEQ ID NO: 862471 - RNA, 21 nt, Human
aagagccucuuugaaaauuaa

SEQ ID NO: 862472 - RNA, 22 nt, Human
aagcaaaagcuguuagagucua

SEQ ID NO: 862473 - RNA, 20 nt, Human
aauacaaagagugaaaggaa

SEQ ID NO: 862474 - RNA, 22 nt, Human
aauguacucaaaguuacauuaa

SEQ ID NO: 862475 - RNA, 20 nt, Human
acaugagucaggaugauuuu

SEQ ID NO: 862476 - RNA, 20 nt, Human
acucaaaguuacauuaagaa

SEQ ID NO: 862477 - RNA, 20 nt, Human
agcaagaacaguaaagccca

SEQ ID NO: 862478 - RNA, 22 nt, Human
agcauuacauaauaaugcuacu

SEQ ID NO: 862479 - RNA, 18 nt, Human
agguuaagaaaauacuga

SEQ ID NO: 862480 - RNA, 20 nt, Human
auaaaauaucuucccucccc

SEQ ID NO: 862481 - RNA, 25 nt, Human
caagaacaguaaagcccaacuaaug

SEQ ID NO: 862482 - RNA, 21 nt, Human
caccaaaguuuucuggaaaua

SEQ ID NO: 862483 - RNA, 22 nt, Human
ccaggcagauguauaugccaua

SEQ ID NO: 862484 - RNA, 23 nt, Human
ccauaccccuacccgaaaucuua

SEQ ID NO: 862485 - RNA, 19 nt, Human
ccccauaccccuacccgaa

SEQ ID NO: 862486 - RNA, 21 nt, Human
ccccauaccccuacccgaaau

SEQ ID NO: 862487 - RNA, 23 nt, Human
cuuuugucucaagaauuaucacc

SEQ ID NO: 862488 - RNA, 22 nt, Human
gguuauguugacaucuagaaga

SEQ ID NO: 862489 - RNA, 19 nt, Human
gguugguuauguugacauc

SEQ ID NO: 862490 - RNA, 18 nt, Human
uaaaauaucuucccuccc

SEQ ID NO: 862491 - RNA, 26 nt, Human
uaaagaacacaacacaugagucagga

SEQ ID NO: 862492 - RNA, 23 nt, Human
uaagaaaagcuuucacgggggua

SEQ ID NO: 862493 - RNA, 18 nt, Human
uaagaaacacuuuaauaa

SEQ ID NO: 862494 - RNA, 22 nt, Human
uaaggaauaaaaaccuuaaaaa

SEQ ID NO: 862495 - RNA, 27 nt, Human
uacaauagcaagaacaguaaagcccaa

SEQ ID NO: 862496 - RNA, 22 nt, Human
uagcaagaacaguaaagcccaa

SEQ ID NO: 862497 - RNA, 21 nt, Human
ucaaaguacaaaugacuacaa

SEQ ID NO: 862498 - RNA, 22 nt, Human
ucacaaagguuaagaaaauacu

SEQ ID NO: 862499 - RNA, 24 nt, Human
ucacaaagguuaagaaaauacuga

SEQ ID NO: 862500 - RNA, 18 nt, Human
uccacauaagaauuaaau

SEQ ID NO: 862501 - RNA, 21 nt, Human
uccccaaggaaccucugaucc

SEQ ID NO: 862502 - RNA, 24 nt, Human
uuaaaaauaaagaacacaacacau

SEQ ID NO: 862503 - RNA, 21 nt, Human
uuagcaagaucuuuucuuuuu

SEQ ID NO: 862504 - RNA, 18 nt, Human
uuuuuuuuuuucucuuug

SEQ ID NO: 862505 - RNA, 20 nt, Human
uuuuuuuuuuuuuuuucucu

SEQ ID NO: 862506 - RNA, 23 nt, Human
uuuuuuuuuuuuuuuuucucuuu

SEQ ID NO: 862507 - RNA, 25 nt, Human
uuuuuuuuuuuuuuuuuuuauuuuu

SEQ ID NO: 862508 - RNA, 22 nt, Human
aaacacagcucuuuaaaacagg

SEQ ID NO: 862509 - RNA, 21 nt, Human
aaccaaacacagagaggccca

SEQ ID NO: 862510 - RNA, 18 nt, Human
aaccuccagacaacgcuc

SEQ ID NO: 862511 - RNA, 18 nt, Human
aagagaccaaugucgagu

SEQ ID NO: 862512 - RNA, 21 nt, Human
aagaggugaagaggagagggg

SEQ ID NO: 862513 - RNA, 20 nt, Human
aagcaaugaaucuauuuuaa

SEQ ID NO: 862514 - RNA, 20 nt, Human
aagcaucuuguuuugacaau

SEQ ID NO: 862515 - RNA, 19 nt, Human
aagcggaaacaggcaagcg

SEQ ID NO: 862516 - RNA, 23 nt, Human
acaaaacacagcucuuuaaaaca

SEQ ID NO: 862517 - RNA, 19 nt, Human
acaauucauccaaacggcc

SEQ ID NO: 862518 - RNA, 18 nt, Human
acacaggcuuggcauugg

SEQ ID NO: 862519 - RNA, 19 nt, Human
acagaacaaugacuucucu

SEQ ID NO: 862520 - RNA, 23 nt, Human
acagcauaauuuucuugccucuc

SEQ ID NO: 862521 - RNA, 20 nt, Human
accaaacacagagaggccca

SEQ ID NO: 862522 - RNA, 19 nt, Human
acccagcaagcaagaaaug

SEQ ID NO: 862523 - RNA, 21 nt, Human
accuccuguggacgagagguu

SEQ ID NO: 862524 - RNA, 18 nt, Human
agaggagacagaccuuag

SEQ ID NO: 862525 - RNA, 20 nt, Human
agaggagacagaccuuagga

SEQ ID NO: 862526 - RNA, 19 nt, Human
agaggagagggggugcugg

SEQ ID NO: 862527 - RNA, 18 nt, Human
agcaaaaaccuaggccuc

SEQ ID NO: 862528 - RNA, 23 nt, Human
aggaagaggugaagaggagggac

SEQ ID NO: 862529 - RNA, 23 nt, Human
aggaagaugcuuuauacucuucu

SEQ ID NO: 862530 - RNA, 21 nt, Human
aggagagggggugcugggggc

SEQ ID NO: 862531 - RNA, 21 nt, Human
aggagaugggagcugaggaca

SEQ ID NO: 862532 - RNA, 24 nt, Human
aggcccuacaucuggaggcuggug

SEQ ID NO: 862533 - RNA, 22 nt, Human
aggcccugcacaguucuccggu

SEQ ID NO: 862534 - RNA, 24 nt, Human
aggcugcaggagguggagaaagug

SEQ ID NO: 862535 - RNA, 26 nt, Human
agggagcgggugccacacaugugcuc

SEQ ID NO: 862536 - RNA, 23 nt, Human
aucuaaaucccagcaaaaaccua

SEQ ID NO: 862537 - RNA, 18 nt, Human
caaaacaaaacacagcuc

SEQ ID NO: 862538 - RNA, 22 nt, Human
caaaacacagcucuuuaaaaca

SEQ ID NO: 862539 - RNA, 18 nt, Human
caacagggaggcugcagg

SEQ ID NO: 862540 - RNA, 20 nt, Human
caaggcugcaggccccuggg

SEQ ID NO: 862541 - RNA, 20 nt, Human
caauucauccaaacggccuu

SEQ ID NO: 862542 - RNA, 23 nt, Human
cacagccagcuggcacacaagag

SEQ ID NO: 862543 - RNA, 26 nt, Human
caccagcagccgucagcccgugcucc

SEQ ID NO: 862544 - RNA, 23 nt, Human
caccaggugcaagagucuagaaa

SEQ ID NO: 862545 - RNA, 21 nt, Human
caccgugccuggggaccagcg

SEQ ID NO: 862546 - RNA, 18 nt, Human
cacgguagaccaaggcug

SEQ ID NO: 862547 - RNA, 24 nt, Human
cagaacaaugacuucucugaaaac

SEQ ID NO: 862548 - RNA, 21 nt, Human
cagcaagcaagaaaugcacuc

SEQ ID NO: 862549 - RNA, 22 nt, Human
cagcaagcaagaaaugcacucu

SEQ ID NO: 862550 - RNA, 21 nt, Human
cagcagccgucagcccgugcu

SEQ ID NO: 862551 - RNA, 22 nt, Human
cagcaggaagaggugaagagga

SEQ ID NO: 862552 - RNA, 20 nt, Human
cagcgcagcagaagggugcc

SEQ ID NO: 862553 - RNA, 22 nt, Human
cagcucuccugggcauccuuga

SEQ ID NO: 862554 - RNA, 20 nt, Human
cagcuggcacacaagaggca

SEQ ID NO: 862555 - RNA, 23 nt, Human
caggccccugggucaccuauccu

SEQ ID NO: 862556 - RNA, 25 nt, Human
caucaggccaaccaugcuaacugca

SEQ ID NO: 862557 - RNA, 21 nt, Human
caucaucgcugccauuaggga

SEQ ID NO: 862558 - RNA, 20 nt, Human
cauugggcuccagccccugg

SEQ ID NO: 862559 - RNA, 20 nt, Human
cauugggcuccagccccugg

SEQ ID NO: 862560 - RNA, 24 nt, Human
ccacacaugugcuccgacacuccu

SEQ ID NO: 862561 - RNA, 21 nt, Human
ccacaggcugugcgccucagc

SEQ ID NO: 862562 - RNA, 18 nt, Human
ccacuggaucaggaccaa

SEQ ID NO: 862563 - RNA, 21 nt, Human
ccagcggcuagcaacacccag

SEQ ID NO: 862564 - RNA, 31 nt, Human
cccaaaauauuccagcauugaguggcaauuu

SEQ ID NO: 862565 - RNA, 19 nt, Human
ccccugugugugggcaggc

SEQ ID NO: 862566 - RNA, 18 nt, Human
cccugggcaaaggccaug

SEQ ID NO: 862567 - RNA, 25 nt, Human
ccuccagacaacgcuccaggaaggc

SEQ ID NO: 862568 - RNA, 29 nt, Human
ccuccuguggacgagagguucccguggac

SEQ ID NO: 862569 - RNA, 27 nt, Human
ccuggaaccuccagacaacgcuccagg

SEQ ID NO: 862570 - RNA, 21 nt, Human
ccuugagcucuugcucggcuc

SEQ ID NO: 862571 - RNA, 19 nt, Human
cgagcagcugcagggucgc

SEQ ID NO: 862572 - RNA, 26 nt, Human
cgcuccaggaaggcuguuucccuggg

SEQ ID NO: 862573 - RNA, 19 nt, Human
cgcugcugcugccauugcu

SEQ ID NO: 862574 - RNA, 18 nt, Human
cgcuggggacaacacagg

SEQ ID NO: 862575 - RNA, 18 nt, Human
cucccgagccacagccag

SEQ ID NO: 862576 - RNA, 24 nt, Human
cucgccgugccuucacccugguca

SEQ ID NO: 862577 - RNA, 18 nt, Human
cucuggaagugugguggg

SEQ ID NO: 862578 - RNA, 23 nt, Human
cugaaaauaucuaaaucccagca

SEQ ID NO: 862579 - RNA, 19 nt, Human
cugaaacggaugcaccaug

SEQ ID NO: 862580 - RNA, 25 nt, Human
cugccccacuucacguccauuaugu

SEQ ID NO: 862581 - RNA, 19 nt, Human
cugcucccgagccacagcc

SEQ ID NO: 862582 - RNA, 24 nt, Human
cuggaaccuccagacaacgcucca

SEQ ID NO: 862583 - RNA, 24 nt, Human
cuuuugguuccuaagacacuuggg

SEQ ID NO: 862584 - RNA, 23 nt, Human
gaaaggcaccagcagccgucagc

SEQ ID NO: 862585 - RNA, 18 nt, Human
gaagaggagagggggugc

SEQ ID NO: 862586 - RNA, 20 nt, Human
gacacaggggcuucucauuu

SEQ ID NO: 862587 - RNA, 23 nt, Human
gacauuucacuuccagacuguga

SEQ ID NO: 862588 - RNA, 21 nt, Human
gaccaaaaaacccuccaucau

SEQ ID NO: 862589 - RNA, 18 nt, Human
gaggcugcccugucccug

SEQ ID NO: 862590 - RNA, 24 nt, Human
gcaccagcagccgucagcccgugc

SEQ ID NO: 862591 - RNA, 19 nt, Human
gcagauacuuccccaugcu

SEQ ID NO: 862592 - RNA, 24 nt, Human
gccacagauguuuguggacauuuc

SEQ ID NO: 862593 - RNA, 21 nt, Human
gcgaaacaaaacaaaacacag

SEQ ID NO: 862594 - RNA, 21 nt, Human
gcuccaggaaggcuguuuccc

SEQ ID NO: 862595 - RNA, 24 nt, Human
gcugaugucuguugaaacccagca

SEQ ID NO: 862596 - RNA, 24 nt, Human
gcuggcacacaagaggcacgucug

SEQ ID NO: 862597 - RNA, 21 nt, Human
gcuuccucguggccagcagga

SEQ ID NO: 862598 - RNA, 22 nt, Human
ggaagaggugaagaggagaggg

SEQ ID NO: 862599 - RNA, 21 nt, Human
ggaagaugcuuuauacucuuc

SEQ ID NO: 862600 - RNA, 18 nt, Human
ggaggugcacacagcccc

SEQ ID NO: 862601 - RNA, 18 nt, Human
ggccugcgucugcucccg

SEQ ID NO: 862602 - RNA, 20 nt, Human
ggcuccagccccuggaucuu

SEQ ID NO: 862603 - RNA, 18 nt, Human
ggcucugggaggcugccc

SEQ ID NO: 862604 - RNA, 18 nt, Human
gggcggugcggggagggg

SEQ ID NO: 862605 - RNA, 18 nt, Human
ggggugcugggggcggug

SEQ ID NO: 862606 - RNA, 21 nt, Human
gggugucuccauucuggcuuc

SEQ ID NO: 862607 - RNA, 21 nt, Human
ggugcugggggcggugcgggg

SEQ ID NO: 862608 - RNA, 18 nt, Human
gucagcuuggacugaguu

SEQ ID NO: 862609 - RNA, 21 nt, Human
gugcaucuguuuccauccgca

SEQ ID NO: 862610 - RNA, 18 nt, Human
gugccacacaugugcucc

SEQ ID NO: 862611 - RNA, 20 nt, Human
gugcucccagucccgcuccu

SEQ ID NO: 862612 - RNA, 21 nt, Human
guggacauuucacuuccagac

SEQ ID NO: 862613 - RNA, 19 nt, Human
guggcaucagucuucaugg

SEQ ID NO: 862614 - RNA, 21 nt, Human
gugugggcaggcucaggugug

SEQ ID NO: 862615 - RNA, 19 nt, Human
uaaaaaguaaucccucggg

SEQ ID NO: 862616 - RNA, 21 nt, Human
uaaaauggcccaguguaagaa

SEQ ID NO: 862617 - RNA, 23 nt, Human
uacagugguuugaaaaugggagu

SEQ ID NO: 862618 - RNA, 21 nt, Human
uagcaacacccagcaggcccu

SEQ ID NO: 862619 - RNA, 22 nt, Human
uagcaacacccagcaggcccua

SEQ ID NO: 862620 - RNA, 20 nt, Human
uaggcccugcacaguucucc

SEQ ID NO: 862621 - RNA, 23 nt, Human
uaggccucaacuuuggaacccag

SEQ ID NO: 862622 - RNA, 23 nt, Human
uauagcaaaucucucauuuguac

SEQ ID NO: 862623 - RNA, 19 nt, Human
ucaccaaauugggguagca

SEQ ID NO: 862624 - RNA, 21 nt, Human
ucacugcaggccgggaccauc

SEQ ID NO: 862625 - RNA, 19 nt, Human
ucagaccaaauuuauugcc

SEQ ID NO: 862626 - RNA, 27 nt, Human
ucauagaucuuucuaggcagaaggccu

SEQ ID NO: 862627 - RNA, 22 nt, Human
ucauccaaacggccuuaggccc

SEQ ID NO: 862628 - RNA, 23 nt, Human
uccagacugugacgucugaagau

SEQ ID NO: 862629 - RNA, 22 nt, Human
uccauucuggcuucaccagaga

SEQ ID NO: 862630 - RNA, 18 nt, Human
ucccagucccgcuccugc

SEQ ID NO: 862631 - RNA, 25 nt, Human
ucccgcuccugccgcuguaacugga

SEQ ID NO: 862632 - RNA, 18 nt, Human
uccggucucuggaagugu

SEQ ID NO: 862633 - RNA, 21 nt, Human
uccuaagcccaagacgugccc

SEQ ID NO: 862634 - RNA, 18 nt, Human
uccuuuggugagauggcc

SEQ ID NO: 862635 - RNA, 19 nt, Human
ucgcugccagagggagcgg

SEQ ID NO: 862636 - RNA, 23 nt, Human
ucgcugccagagggagcgggugc

SEQ ID NO: 862637 - RNA, 19 nt, Human
ucgcuggggacaacacagg

SEQ ID NO: 862638 - RNA, 19 nt, Human
ucggagcuggaggaagggu

SEQ ID NO: 862639 - RNA, 18 nt, Human
ucggcucugggaggcugc

SEQ ID NO: 862640 - RNA, 21 nt, Human
ucucugaaaaccaugaggcuc

SEQ ID NO: 862641 - RNA, 18 nt, Human
ucucuggaaguguggugg

SEQ ID NO: 862642 - RNA, 19 nt, Human
ucuuuuguucuuuuggcug

SEQ ID NO: 862643 - RNA, 18 nt, Human
ugaaaauaucuaaauccc

SEQ ID NO: 862644 - RNA, 24 nt, Human
ugaagaggagagggggugcugggg

SEQ ID NO: 862645 - RNA, 21 nt, Human
ugaaugcugaguucuggguuu

SEQ ID NO: 862646 - RNA, 21 nt, Human
ugacccaaaauauuccagcau

SEQ ID NO: 862647 - RNA, 21 nt, Human
ugaggacaaggcugcaggccc

SEQ ID NO: 862648 - RNA, 23 nt, Human
ugaggacaaggcugcaggccccu

SEQ ID NO: 862649 - RNA, 18 nt, Human
ugaggacuuuggcacuuu

SEQ ID NO: 862650 - RNA, 21 nt, Human
ugaguucuggguuucugcccc

SEQ ID NO: 862651 - RNA, 21 nt, Human
ugcaggagguggagaaagugc

SEQ ID NO: 862652 - RNA, 20 nt, Human
ugcccugggcaaaggccaug

SEQ ID NO: 862653 - RNA, 21 nt, Human
ugcccugucccuggaaccucc

SEQ ID NO: 862654 - RNA, 19 nt, Human
ugccugaaaauaucuaaau

SEQ ID NO: 862655 - RNA, 18 nt, Human
ugcugagugucccgggag

SEQ ID NO: 862656 - RNA, 19 nt, Human
ugcugggggcggugcgggg

SEQ ID NO: 862657 - RNA, 21 nt, Human
ugcuuggaaccaaacacagag

SEQ ID NO: 862658 - RNA, 18 nt, Human
uggaacccagucauagac

SEQ ID NO: 862659 - RNA, 22 nt, Human
uggaagcaucuuguuuugacug

SEQ ID NO: 862660 - RNA, 18 nt, Human
ugggaagugcuuggaacc

SEQ ID NO: 862661 - RNA, 19 nt, Human
ugggaagugcuuggaacca

SEQ ID NO: 862662 - RNA, 22 nt, Human
ugggacacccagcuggaagugc

SEQ ID NO: 862663 - RNA, 19 nt, Human
ugggagaggagggaugcgc

SEQ ID NO: 862664 - RNA, 20 nt, Human
ugggaguuugaggugggaag

SEQ ID NO: 862665 - RNA, 20 nt, Human
uggggcauaaucagccuaua

SEQ ID NO: 862666 - RNA, 21 nt, Human
ugggggcggugcggggagggg

SEQ ID NO: 862667 - RNA, 23 nt, Human
ugguccguauagccuuuucugcc

SEQ ID NO: 862668 - RNA, 22 nt, Human
uguugaagaguggguaaauuug

SEQ ID NO: 862669 - RNA, 21 nt, Human
uguuuccauccgcaucuggua

SEQ ID NO: 862670 - RNA, 20 nt, Human
uguuuguggacauuucacuu

SEQ ID NO: 862671 - RNA, 20 nt, Human
uuacaugguccauugcgggg

SEQ ID NO: 862672 - RNA, 20 nt, Human
uucuggguuucugccccacu

SEQ ID NO: 862673 - RNA, 23 nt, Human
uugcacguaucuucaaggcuccc

SEQ ID NO: 862674 - RNA, 18 nt, Human
uugcucggcucugggagg

SEQ ID NO: 862675 - RNA, 24 nt, Human
uugcucuguaaagcugcagcacaa

SEQ ID NO: 862676 - RNA, 20 nt, Human
uugcugggccuuaaggaaac

SEQ ID NO: 862677 - RNA, 18 nt, Human
uuuaaaacagggacagcu

SEQ ID NO: 862678 - RNA, 20 nt, Human
uuuacacaaccgaaguuccu

SEQ ID NO: 862679 - RNA, 21 nt, Human
uuuucuugccucuccugaauc

SEQ ID NO: 862680 - RNA, 23 nt, Human
uuuugcuauuaaaaguugagaaa

SEQ ID NO: 862681 - RNA, 24 nt, Human
uuuuugcuauuaaaaguugagaaa

SEQ ID NO: 862682 - RNA, 18 nt, Human
uuuuuuuuuuuuuuucug

SEQ ID NO: 862683 - RNA, 21 nt, Human
acagcuaacuuacaagggccu

SEQ ID NO: 862684 - RNA, 21 nt, Human
agccucaggcccggacccugg

SEQ ID NO: 862685 - RNA, 18 nt, Human
caagggccugaacccggc

SEQ ID NO: 862686 - RNA, 23 nt, Human
ccccugaaaaccuuuauuuugaa

SEQ ID NO: 862687 - RNA, 21 nt, Human
ccuagagacagcaaacuucug

SEQ ID NO: 862688 - RNA, 21 nt, Human
cgccagccucaggcccggacc

SEQ ID NO: 862689 - RNA, 25 nt, Human
cuucugcuguacagcuaacuuacaa

SEQ ID NO: 862690 - RNA, 24 nt, Human
gaaacucuuaccaagcauguguac

SEQ ID NO: 862691 - RNA, 21 nt, Human
gugaaccccugaaaaccuuua

SEQ ID NO: 862692 - RNA, 18 nt, Human
uaagugaaccccugaaaa

SEQ ID NO: 862693 - RNA, 20 nt, Human
uacauuuccgaaaaucugau

SEQ ID NO: 862694 - RNA, 20 nt, Human
uaccaagcauguguacccau

SEQ ID NO: 862695 - RNA, 19 nt, Human
ucagccacaccuccugucu

SEQ ID NO: 862696 - RNA, 24 nt, Human
ugaaaaccuuuauuuugaaauuga

SEQ ID NO: 862697 - RNA, 28 nt, Human
ugacagaagauaaaacuuaaggggaccc

SEQ ID NO: 862698 - RNA, 20 nt, Human
ugcuguacagcuaacuuaca

SEQ ID NO: 862699 - RNA, 24 nt, Human
uuuuuuuuuuuuuuuuguuacagg

SEQ ID NO: 862700 - RNA, 18 nt, Human
uuuuuuuuuuuuuuuuug

SEQ ID NO: 862701 - RNA, 20 nt, Human
uuuuuuuuuuuuuuuuuguu

SEQ ID NO: 862702 - RNA, 18 nt, Human
aaacagccacuuccccuc

SEQ ID NO: 862703 - RNA, 27 nt, Human
acaccugugcccacacacgcacacaga

SEQ ID NO: 862704 - RNA, 22 nt, Human
agcagccaaacagccacuuccc

SEQ ID NO: 862705 - RNA, 18 nt, Human
agcaggaaaugacugaaa

SEQ ID NO: 862706 - RNA, 21 nt, Human
cacacagaccacauccgcagc

SEQ ID NO: 862707 - RNA, 28 nt, Human
cacaccugugcccacacacgcacacagu

SEQ ID NO: 862708 - RNA, 19 nt, Human
cacacgcacacagaccaca

SEQ ID NO: 862709 - RNA, 22 nt, Human
cagccaaacagccacuuccccu

SEQ ID NO: 862710 - RNA, 19 nt, Human
ccaguggccucauggucuc

SEQ ID NO: 862711 - RNA, 21 nt, Human
cccacacacgcacacagacca

SEQ ID NO: 862712 - RNA, 23 nt, Human
cccacacacgcacacagaccaca

SEQ ID NO: 862713 - RNA, 20 nt, Human
ccgcagcaggugggccuggc

SEQ ID NO: 862714 - RNA, 19 nt, Human
ccugggagggggaaagccc

SEQ ID NO: 862715 - RNA, 24 nt, Human
cucacacacucacaccugugccca

SEQ ID NO: 862716 - RNA, 21 nt, Human
ggaggcccaagaauuaaagua

SEQ ID NO: 862717 - RNA, 24 nt, Human
gggagggggaaagcccaguggccu

SEQ ID NO: 862718 - RNA, 18 nt, Human
gucuucauguugucagca

SEQ ID NO: 862719 - RNA, 21 nt, Human
ucacacacucacaccugugcc

SEQ ID NO: 862720 - RNA, 19 nt, Human
ugcccacacacgcacacag

SEQ ID NO: 862721 - RNA, 23 nt, Human
uggccagacaccuaugggacacu

SEQ ID NO: 862722 - RNA, 25 nt, Human
ugugcccacacacgcacacagacca

SEQ ID NO: 862723 - RNA, 22 nt, Human
uuuuuuuuuuuuuuuuuuucag

SEQ ID NO: 862724 - RNA, 18 nt, Human
aaaaaaaacagacaaugg

SEQ ID NO: 862725 - RNA, 19 nt, Human
aaaaaaacagacaaugggg

SEQ ID NO: 862726 - RNA, 18 nt, Human
aaaaaagcgggggcgacc

SEQ ID NO: 862727 - RNA, 23 nt, Human
aaaaagaaaaagacaacagagaa

SEQ ID NO: 862728 - RNA, 19 nt, Human
aaaaagcgggggcgacucc

SEQ ID NO: 862729 - RNA, 22 nt, Human
aaaagaaaaagacaacagagaa

SEQ ID NO: 862730 - RNA, 21 nt, Human
aaagaaaaagacaacagagaa

SEQ ID NO: 862731 - RNA, 23 nt, Human
aacacuuccccggcccgguacca

SEQ ID NO: 862732 - RNA, 21 nt, Human
aacauagugggaaccccaucu

SEQ ID NO: 862733 - RNA, 19 nt, Human
aacauggugaaaccccauc

SEQ ID NO: 862734 - RNA, 20 nt, Human
aacauggugaaaccccaucu

SEQ ID NO: 862735 - RNA, 21 nt, Human
aacauggugaaaccccaucuc

SEQ ID NO: 862736 - RNA, 21 nt, Human
aacauggugaaaccccaucuc

SEQ ID NO: 862737 - RNA, 20 nt, Human
aagaaaaagacaacagagaa

SEQ ID NO: 862738 - RNA, 22 nt, Human
aagaaaaagacaacagagaaaa

SEQ ID NO: 862739 - RNA, 19 nt, Human
aauaucucuggauacagcu

SEQ ID NO: 862740 - RNA, 18 nt, Human
aauugcuugaaccgagga

SEQ ID NO: 862741 - RNA, 18 nt, Human
acaccacugcauuccagc

SEQ ID NO: 862742 - RNA, 20 nt, Human
acaccacugcauuccagccu

SEQ ID NO: 862743 - RNA, 22 nt, Human
acaccacugcauuccagccugg

SEQ ID NO: 862744 - RNA, 19 nt, Human
acauagugggaaccccauc

SEQ ID NO: 862745 - RNA, 21 nt, Human
acauagugggaaccccaucuc

SEQ ID NO: 862746 - RNA, 19 nt, Human
accacugcauuccagccug

SEQ ID NO: 862747 - RNA, 21 nt, Human
accaggcauaguguugcccac

SEQ ID NO: 862748 - RNA, 22 nt, Human
accauugcacuccagccugggc

SEQ ID NO: 862749 - RNA, 24 nt, Human
accccaucucuacuaaaaauacaa

SEQ ID NO: 862750 - RNA, 19 nt, Human
accucaauccucuuagcau

SEQ ID NO: 862751 - RNA, 18 nt, Human
accucagcccugccucag

SEQ ID NO: 862752 - RNA, 21 nt, Human
accucccugcaggccgcuggu

SEQ ID NO: 862753 - RNA, 21 nt, Human
acggcggcagcgcgaccccuc

SEQ ID NO: 862754 - RNA, 18 nt, Human
acugcauuccagccuggg

SEQ ID NO: 862755 - RNA, 22 nt, Human
acugcauuccagccugggugag

SEQ ID NO: 862756 - RNA, 22 nt, Human
acugcauuccagccugggugag

SEQ ID NO: 862757 - RNA, 22 nt, Human
agaaucgcuugacuccaggagg

SEQ ID NO: 862758 - RNA, 24 nt, Human
agcacuuugggaggcagagguggg

SEQ ID NO: 862759 - RNA, 24 nt, Human
agcacuuugggaggccaagguggg

SEQ ID NO: 862760 - RNA, 19 nt, Human
agcaggucuaggcugcagu

SEQ ID NO: 862761 - RNA, 23 nt, Human
agccgggcauaguggcaggugcc

SEQ ID NO: 862762 - RNA, 24 nt, Human
agccuagccaacauggugaaaccc

SEQ ID NO: 862763 - RNA, 25 nt, Human
agccugaucaacauagugggaaccc

SEQ ID NO: 862764 - RNA, 20 nt, Human
aggaguuugagaccagccug

SEQ ID NO: 862765 - RNA, 21 nt, Human
aggcagagguggguggaucac

SEQ ID NO: 862766 - RNA, 18 nt, Human
aggcaggagaaucgcuug

SEQ ID NO: 862767 - RNA, 24 nt, Human
aggcauaguguugcccaccuguag

SEQ ID NO: 862768 - RNA, 21 nt, Human
aggccaaggugggcgaauugc

SEQ ID NO: 862769 - RNA, 24 nt, Human
aggccaggugagguggcucacgcc

SEQ ID NO: 862770 - RNA, 24 nt, Human
aggcuggggcaggaggauuccuug

SEQ ID NO: 862771 - RNA, 19 nt, Human
agggaaggagggacgucag

SEQ ID NO: 862772 - RNA, 20 nt, Human
agggaaggagggacgucagu

SEQ ID NO: 862773 - RNA, 24 nt, Human
aggggggugggcaaaaaagcgggg

SEQ ID NO: 862774 - RNA, 25 nt, Human
aggggggugggcaaaaaagcgggga

SEQ ID NO: 862775 - RNA, 25 nt, Human
aggggggugggcaaaaaagcggggg

SEQ ID NO: 862776 - RNA, 24 nt, Human
aggugagguggcucacgccuguaa

SEQ ID NO: 862777 - RNA, 23 nt, Human
aggugcuggcagaagaggcugcu

SEQ ID NO: 862778 - RNA, 24 nt, Human
agguggaaguugcagugagucgag

SEQ ID NO: 862779 - RNA, 21 nt, Human
agguggguggaucaccugagg

SEQ ID NO: 862780 - RNA, 21 nt, Human
agugcaguggcuccccuguaa

SEQ ID NO: 862781 - RNA, 24 nt, Human
aguggcaggugccuguaauuccag

SEQ ID NO: 862782 - RNA, 22 nt, Human
aguggcuccccuguaaucccag

SEQ ID NO: 862783 - RNA, 24 nt, Human
auaaaacggcggcagcgcgacccc

SEQ ID NO: 862784 - RNA, 22 nt, Human
aucccagcacuuugggaggcca

SEQ ID NO: 862785 - RNA, 24 nt, Human
aucgcaccauugcacuccagccug

SEQ ID NO: 862786 - RNA, 28 nt, Human
aucgcaccauugcacuccagccugggca

SEQ ID NO: 862787 - RNA, 20 nt, Human
auggaggucugggggguucu

SEQ ID NO: 862788 - RNA, 22 nt, Human
augugcuccaccaguguggagc

SEQ ID NO: 862789 - RNA, 24 nt, Human
auugcacuccagccugggcaacaa

SEQ ID NO: 862790 - RNA, 22 nt, Human
caaaaaaaacagacaaugggua

SEQ ID NO: 862791 - RNA, 23 nt, Human
caaaaaguuagccgggcauagug

SEQ ID NO: 862792 - RNA, 24 nt, Human
caacauggugaaaccccaucucua

SEQ ID NO: 862793 - RNA, 21 nt, Human
cacaccacugcauuccagccu

SEQ ID NO: 862794 - RNA, 20 nt, Human
caccccaggccagcucuugc

SEQ ID NO: 862795 - RNA, 23 nt, Human
caccuguagucacagccaucuga

SEQ ID NO: 862796 - RNA, 24 nt, Human
cacgccuguaaucccagcacuuug

SEQ ID NO: 862797 - RNA, 24 nt, Human
cacuccagccugggcaacaagagc

SEQ ID NO: 862798 - RNA, 22 nt, Human
cacucgggacagcgguggggcc

SEQ ID NO: 862799 - RNA, 19 nt, Human
cacugcauuccagccuggg

SEQ ID NO: 862800 - RNA, 19 nt, Human
cacugcauuccagccuggg

SEQ ID NO: 862801 - RNA, 22 nt, Human
cacugcauuccagccuggguga

SEQ ID NO: 862802 - RNA, 22 nt, Human
cacugcauuccagccuggguga

SEQ ID NO: 862803 - RNA, 20 nt, Human
cagagguggguggaucaccu

SEQ ID NO: 862804 - RNA, 22 nt, Human
cagagguggguggaucaccuga

SEQ ID NO: 862805 - RNA, 24 nt, Human
cagcacuuugggaggcagaggugg

SEQ ID NO: 862806 - RNA, 24 nt, Human
cagcacuuugggaggccaaggugg

SEQ ID NO: 862807 - RNA, 24 nt, Human
cagccaucugagaggcuggggcag

SEQ ID NO: 862808 - RNA, 22 nt, Human
cagccccccagggcgccggccc

SEQ ID NO: 862809 - RNA, 21 nt, Human
caguagagcccccgaaggccc

SEQ ID NO: 862810 - RNA, 26 nt, Human
cagugcaguggcuccccuguaauccc

SEQ ID NO: 862811 - RNA, 23 nt, Human
caguggcuccccuguaaucccag

SEQ ID NO: 862812 - RNA, 19 nt, Human
cagugugaacgcgcaggug

SEQ ID NO: 862813 - RNA, 22 nt, Human
cauaguggcaggugccuguaau

SEQ ID NO: 862814 - RNA, 24 nt, Human
caucucugggaggagaaacagcuu

SEQ ID NO: 862815 - RNA, 22 nt, Human
cauuccagccugggugaggagc

SEQ ID NO: 862816 - RNA, 19 nt, Human
cauugcacuccagccuggg

SEQ ID NO: 862817 - RNA, 21 nt, Human
cauugcacuccagccugggca

SEQ ID NO: 862818 - RNA, 22 nt, Human
ccaagaucagacuguccgcacc

SEQ ID NO: 862819 - RNA, 22 nt, Human
ccaccuguagucacagccaucu

SEQ ID NO: 862820 - RNA, 20 nt, Human
ccacugcauuccagccuggg

SEQ ID NO: 862821 - RNA, 20 nt, Human
ccacugcauuccagccuggg

SEQ ID NO: 862822 - RNA, 21 nt, Human
ccacugcauuccagccugggu

SEQ ID NO: 862823 - RNA, 21 nt, Human
ccacugcauuccagccugggu

SEQ ID NO: 862824 - RNA, 23 nt, Human
ccacugcauuccagccuggguga

SEQ ID NO: 862825 - RNA, 24 nt, Human
ccacugcauuccagccugggugag

SEQ ID NO: 862826 - RNA, 19 nt, Human
ccagccugggugaggagca

SEQ ID NO: 862827 - RNA, 22 nt, Human
ccagccugggugaggagcaaga

SEQ ID NO: 862828 - RNA, 20 nt, Human
ccauugcacuccagccuggg

SEQ ID NO: 862829 - RNA, 21 nt, Human
ccauugcacuccagccugggc

SEQ ID NO: 862830 - RNA, 23 nt, Human
ccauugcacuccagccugggcaa

SEQ ID NO: 862831 - RNA, 24 nt, Human
ccauugcacuccagccugggcaac

SEQ ID NO: 862832 - RNA, 25 nt, Human
ccauugcacuccagccugggcaaca

SEQ ID NO: 862833 - RNA, 18 nt, Human
cccacaaugucuagaugg

SEQ ID NO: 862834 - RNA, 24 nt, Human
cccacaggcggguccagguccccg

SEQ ID NO: 862835 - RNA, 25 nt, Human
cccacaggcggguccagguccccgc

SEQ ID NO: 862836 - RNA, 20 nt, Human
cccacuagaggggauggaac

SEQ ID NO: 862837 - RNA, 21 nt, Human
cccccagggcgccggccccua

SEQ ID NO: 862838 - RNA, 20 nt, Human
ccccccagggcgccggcccc

SEQ ID NO: 862839 - RNA, 18 nt, Human
ccccgggccgauggaccc

SEQ ID NO: 862840 - RNA, 20 nt, Human
ccccugagcccaucucgggc

SEQ ID NO: 862841 - RNA, 19 nt, Human
ccccuguaaucccagcacu

SEQ ID NO: 862842 - RNA, 23 nt, Human
ccccuguggcuguaaaugugcuc

SEQ ID NO: 862843 - RNA, 19 nt, Human
cccgcacacguagcagccg

SEQ ID NO: 862844 - RNA, 21 nt, Human
cccgcacacguagcagccgug

SEQ ID NO: 862845 - RNA, 18 nt, Human
ccgaggaguuugagacca

SEQ ID NO: 862846 - RNA, 23 nt, Human
ccgcgcccgagaacacuuccccg

SEQ ID NO: 862847 - RNA, 18 nt, Human
ccgggccuuggacagcug

SEQ ID NO: 862848 - RNA, 24 nt, Human
ccuagccaacauggugaaacccca

SEQ ID NO: 862849 - RNA, 19 nt, Human
ccucccugcaggccgcugc

SEQ ID NO: 862850 - RNA, 20 nt, Human
ccucgcccccgggccgaugg

SEQ ID NO: 862851 - RNA, 25 nt, Human
ccugaucaacauagugggaacccca

SEQ ID NO: 862852 - RNA, 22 nt, Human
ccuguaaucccagcacuuuggg

SEQ ID NO: 862853 - RNA, 18 nt, Human
ccuguaauuccagcuacu

SEQ ID NO: 862854 - RNA, 25 nt, Human
ccuguaauuccagcuacuugggugg

SEQ ID NO: 862855 - RNA, 21 nt, Human
ccuguauggaggucugggggg

SEQ ID NO: 862856 - RNA, 19 nt, Human
cgagaacacuuccccggcc

SEQ ID NO: 862857 - RNA, 24 nt, Human
cgagaccagccuagccaacauggu

SEQ ID NO: 862858 - RNA, 21 nt, Human
cgcaccauugcacuccagccu

SEQ ID NO: 862859 - RNA, 21 nt, Human
cgccgugcggcgcaugaaggc

SEQ ID NO: 862860 - RNA, 24 nt, Human
cgccuguaaucccagcacuuuggg

SEQ ID NO: 862861 - RNA, 19 nt, Human
cgggccccugagcccaucu

SEQ ID NO: 862862 - RNA, 20 nt, Human
cuacgccccucgcccccggg

SEQ ID NO: 862863 - RNA, 22 nt, Human
cucaccucagcccugccucagc

SEQ ID NO: 862864 - RNA, 22 nt, Human
cucacgccuguaaucccagcac

SEQ ID NO: 862865 - RNA, 24 nt, Human
cucacgccuguaaucccagcacuu

SEQ ID NO: 862866 - RNA, 26 nt, Human
cucagcccugccucagcaaagggggc

SEQ ID NO: 862867 - RNA, 24 nt, Human
cuccccuggccaggccugggcaug

SEQ ID NO: 862868 - RNA, 22 nt, Human
cuccccuguaaucccagcacuu

SEQ ID NO: 862869 - RNA, 24 nt, Human
cuccccuguaaucccagcacuuug

SEQ ID NO: 862870 - RNA, 20 nt, Human
cucccugcaggccgcugcag

SEQ ID NO: 862871 - RNA, 21 nt, Human
cucuacuaaaaauacaaaaag

SEQ ID NO: 862872 - RNA, 19 nt, Human
cuugcgguggauucuggga

SEQ ID NO: 862873 - RNA, 23 nt, Human
gaagaggcugcugagagcccaag

SEQ ID NO: 862874 - RNA, 23 nt, Human
gacagcgguggggccgcuccccc

SEQ ID NO: 862875 - RNA, 18 nt, Human
gagaacacuuccccggcc

SEQ ID NO: 862876 - RNA, 20 nt, Human
gagaacacuuccccggcccg

SEQ ID NO: 862877 - RNA, 23 nt, Human
gagaucgcaccauugcacuccag

SEQ ID NO: 862878 - RNA, 20 nt, Human
gagcccagggcagcggggag

SEQ ID NO: 862879 - RNA, 20 nt, Human
gaggauuccuugagcccagc

SEQ ID NO: 862880 - RNA, 19 nt, Human
gaggccaaggugggcgaau

SEQ ID NO: 862881 - RNA, 18 nt, Human
gagguggguggaucaccu

SEQ ID NO: 862882 - RNA, 18 nt, Human
gaucaccugagggcagga

SEQ ID NO: 862883 - RNA, 24 nt, Human
gaucaccugagggcaggaguucga

SEQ ID NO: 862884 - RNA, 20 nt, Human
gcaccauugcacuccagccu

SEQ ID NO: 862885 - RNA, 20 nt, Human
gcacuuugggaggccaaggu

SEQ ID NO: 862886 - RNA, 24 nt, Human
gccaacauggugaaaccccaucuc

SEQ ID NO: 862887 - RNA, 21 nt, Human
gccacacugcgggcagcggua

SEQ ID NO: 862888 - RNA, 21 nt, Human
gccagcucuugcgguggauuc

SEQ ID NO: 862889 - RNA, 19 nt, Human
gcccaagaucagacugucc

SEQ ID NO: 862890 - RNA, 26 nt, Human
gccccuguggcuguaaaugugcucca

SEQ ID NO: 862891 - RNA, 21 nt, Human
gcccugccucagcaaaggggg

SEQ ID NO: 862892 - RNA, 18 nt, Human
gccgugcggcgcaugaag

SEQ ID NO: 862893 - RNA, 22 nt, Human
gccuuggagagcccagggcagc

SEQ ID NO: 862894 - RNA, 19 nt, Human
gcgccggccccuacgcccc

SEQ ID NO: 862895 - RNA, 23 nt, Human
gcuggggcaggaggauuccuuga

SEQ ID NO: 862896 - RNA, 23 nt, Human
ggaaggagggacgucaguagagc

SEQ ID NO: 862897 - RNA, 24 nt, Human
ggaaguugcagugagucgagaucg

SEQ ID NO: 862898 - RNA, 22 nt, Human
ggagcaaggugcuggcagaaga

SEQ ID NO: 862899 - RNA, 22 nt, Human
ggcaggaggauuccuugagccc

SEQ ID NO: 862900 - RNA, 21 nt, Human
ggcaugcggaaccucccgcgc

SEQ ID NO: 862901 - RNA, 22 nt, Human
ggccccuacgccccucgccccc

SEQ ID NO: 862902 - RNA, 23 nt, Human
ggccuuggagagcccagggcagc

SEQ ID NO: 862903 - RNA, 20 nt, Human
ggcggcagcgcgaccccucg

SEQ ID NO: 862904 - RNA, 24 nt, Human
gggcauaguggcaggugccuguaa

SEQ ID NO: 862905 - RNA, 20 nt, Human
gggcgacuccggcgccgggc

SEQ ID NO: 862906 - RNA, 23 nt, Human
gggguucucaccucagcccugcc

SEQ ID NO: 862907 - RNA, 23 nt, Human
ggguucucaccucagcccugccu

SEQ ID NO: 862908 - RNA, 24 nt, Human
ggugccuguaauuccagcuacuug

SEQ ID NO: 862909 - RNA, 23 nt, Human
gguggcucacgccuguaauccca

SEQ ID NO: 862910 - RNA, 24 nt, Human
gguggcucacgccuguaaucccag

SEQ ID NO: 862911 - RNA, 18 nt, Human
guggccgaagcccuugcc

SEQ ID NO: 862912 - RNA, 23 nt, Human
guggcuccccuguaaucccagca

SEQ ID NO: 862913 - RNA, 18 nt, Human
uaaacaaaaaaaacagac

SEQ ID NO: 862914 - RNA, 22 nt, Human
uaaauaaacaaaaaaaacagac

SEQ ID NO: 862915 - RNA, 18 nt, Human
uaccucaauccucuuagc

SEQ ID NO: 862916 - RNA, 18 nt, Human
uagagcccccgaaggccc

SEQ ID NO: 862917 - RNA, 24 nt, Human
uaguggcaggugccuguaauucca

SEQ ID NO: 862918 - RNA, 23 nt, Human
ucacaccacugcauuccagccug

SEQ ID NO: 862919 - RNA, 20 nt, Human
ucagcgccgugcggcgcaug

SEQ ID NO: 862920 - RNA, 22 nt, Human
ucaggccgaagcagcggccaca

SEQ ID NO: 862921 - RNA, 24 nt, Human
uccaccaguguggagcgccaggcg

SEQ ID NO: 862922 - RNA, 18 nt, Human
uccagccugggugaggag

SEQ ID NO: 862923 - RNA, 22 nt, Human
uccagccugggugaggagcaag

SEQ ID NO: 862924 - RNA, 18 nt, Human
uccauggucagaacugga

SEQ ID NO: 862925 - RNA, 18 nt, Human
ucccugcaggccgcugca

SEQ ID NO: 862926 - RNA, 20 nt, Human
ucccugcaggccgcugcaga

SEQ ID NO: 862927 - RNA, 23 nt, Human
ucgcaccauugcacuccagccug

SEQ ID NO: 862928 - RNA, 31 nt, Human; identical to SEQ ID NO: 515949

SEQ ID NO: 862929 - RNA, 24 nt, Human
ucucuacuaaaaauacaaaaaguu

SEQ ID NO: 862930 - RNA, 19 nt, Human
ugaaaccccaucucuacua

SEQ ID NO: 862931 - RNA, 23 nt, Human
ugagaccagccugaucaacauag

SEQ ID NO: 862932 - RNA, 24 nt, Human
ugagaccagccugaucaacauagu

SEQ ID NO: 862933 - RNA, 21 nt, Human
ugagagcccaagaucagacug

SEQ ID NO: 862934 - RNA, 20 nt, Human
ugagcccagcaggucuaggc

SEQ ID NO: 862935 - RNA, 19 nt, Human
ugaggagcaagaugcuguc

SEQ ID NO: 862936 - RNA, 20 nt, Human
ugaggcaggagaaucgcuug

SEQ ID NO: 862937 - RNA, 25 nt, Human
ugaggcaggagaaucgcuugacucc

SEQ ID NO: 862938 - RNA, 22 nt, Human
ugagucgagaucgcaccauugc

SEQ ID NO: 862939 - RNA, 19 nt, Human
ugcacuccagccugggcaa

SEQ ID NO: 862940 - RNA, 22 nt, Human
ugcacuccagccugggcaacaa

SEQ ID NO: 862941 - RNA, 24 nt, Human
ugccuguaauuccagcuacuuggg

SEQ ID NO: 862942 - RNA, 18 nt, Human
ugcuccaccaguguggag

SEQ ID NO: 862943 - RNA, 19 nt, Human
ugcugagagcccaagauca

SEQ ID NO: 862944 - RNA, 19 nt, Human
uggaagcccacaggcgggu

SEQ ID NO: 862945 - RNA, 24 nt, Human
uggaucaccugagggcaggaguuc

SEQ ID NO: 862946 - RNA, 22 nt, Human
uggcaggugccuguaauuccag

SEQ ID NO: 862947 - RNA, 24 nt, Human
uggcucacgccuguaaucccagca

SEQ ID NO: 862948 - RNA, 24 nt, Human
uggcugaggcaggagaaucgcuug

SEQ ID NO: 862949 - RNA, 19 nt, Human
ugggaggcagaggugggug

SEQ ID NO: 862950 - RNA, 20 nt, Human
ugggaggcagaggugggugg

SEQ ID NO: 862951 - RNA, 24 nt, Human
ugggaggcagagguggguggauca

SEQ ID NO: 862952 - RNA, 22 nt, Human
ugggaggccaaggugggcgaau

SEQ ID NO: 862953 - RNA, 24 nt, Human
ugggaggccaaggugggcgaauug

SEQ ID NO: 862954 - RNA, 19 nt, Human
uggggcaggaggauuccuu

SEQ ID NO: 862955 - RNA, 24 nt, Human
uggggcaggaggauuccuugagcc

SEQ ID NO: 862956 - RNA, 19 nt, Human
ugggugaggagcaagaugc

SEQ ID NO: 862957 - RNA, 24 nt, Human
uggguggaucaccugagggcagga

SEQ ID NO: 862958 - RNA, 18 nt, Human
uggguggcugaggcagga

SEQ ID NO: 862959 - RNA, 24 nt, Human
uucacaccacugcauuccagccug

SEQ ID NO: 862960 - RNA, 19 nt, Human
uucccuguauggaggucug

SEQ ID NO: 862961 - RNA, 19 nt, Human
uuccuugagcccagcaggu

SEQ ID NO: 862962 - RNA, 23 nt, Human
uuccuugagcccagcaggucuag

SEQ ID NO: 862963 - RNA, 22 nt, Human
uucucaccucagcccugccuca

SEQ ID NO: 862964 - RNA, 19 nt, Human
uugcagugagucgagaucg

SEQ ID NO: 862965 - RNA, 22 nt, Human
uugcagugagucgagaucgcac

SEQ ID NO: 862966 - RNA, 19 nt, Human
uugcgguggauucugggac

SEQ ID NO: 862967 - RNA, 20 nt, Human
uugcuucccuguauggaggu

SEQ ID NO: 862968 - RNA, 20 nt, Human
uugggaggcagaggugggug

SEQ ID NO: 862969 - RNA, 25 nt, Human
uuggguggcugaggcaggagaaucg

SEQ ID NO: 862970 - RNA, 26 nt, Human
uuuuuuuuuuuuuuccaauacagggg

SEQ ID NO: 862971 - RNA, 21 nt, Human
aaaaaaacccaaacaauacca

SEQ ID NO: 862972 - RNA, 24 nt, Human
aaaaaacccaaacaauaccaagug

SEQ ID NO: 862973 - RNA, 23 nt, Human
aaaaacaaacaaaaccacgccca

SEQ ID NO: 862974 - RNA, 20 nt, Human
aaaaagaaaacgaagcaaaa

SEQ ID NO: 862975 - RNA, 21 nt, Human
aaaaagaaaacgaagcaaaac

SEQ ID NO: 862976 - RNA, 19 nt, Human
aaaaagcaaaaaagaaaac

SEQ ID NO: 862977 - RNA, 25 nt, Human
aaaaaugggcaaucauaaaaccccc

SEQ ID NO: 862978 - RNA, 21 nt, Human
aaaacaaacaaaaccacgccc

SEQ ID NO: 862979 - RNA, 19 nt, Human
aaaacaaagcaaaacagcc

SEQ ID NO: 862980 - RNA, 24 nt, Human
aaaaccaaaaaaaaacccaaacaa

SEQ ID NO: 862981 - RNA, 24 nt, Human
aaaagaaaacgaagcaaaacaaaa

SEQ ID NO: 862982 - RNA, 21 nt, Human
aaacaaaaccacgcccacaca

SEQ ID NO: 862983 - RNA, 23 nt, Human
aaacaaacaaaaccacgcccaca

SEQ ID NO: 862984 - RNA, 18 nt, Human
aaacaaagcaaaacagcc

SEQ ID NO: 862985 - RNA, 23 nt, Human
aaacaaccacugagucugaaggc

SEQ ID NO: 862986 - RNA, 19 nt, Human
aaaccaaaaaaaaacccaa

SEQ ID NO: 862987 - RNA, 19 nt, Human
aaacgaagcaaaacaaaaa

SEQ ID NO: 862988 - RNA, 23 nt, Human
aaacgaagcaaaacaaaaagcaa

SEQ ID NO: 862989 - RNA, 19 nt, Human
aaagaaaacgaagcaaaac

SEQ ID NO: 862990 - RNA, 25 nt, Human
aaagaaaacgaagcaaaacaaaaag

SEQ ID NO: 862991 - RNA, 24 nt, Human
aaagcaaaaaagaaaacgaagcaa

SEQ ID NO: 862992 - RNA, 20 nt, Human
aaaugcuaaagguagaagca

SEQ ID NO: 862993 - RNA, 19 nt, Human
aacaaaaccaaaaaaaaac

SEQ ID NO: 862994 - RNA, 20 nt, Human
aacaaaaccaaaaaaaaacc

SEQ ID NO: 862995 - RNA, 24 nt, Human
aacaaaaccaaaaaaaaacccaaa

SEQ ID NO: 862996 - RNA, 26 nt, Human
aacaacaacaacaaaaccaaaaaaaa

SEQ ID NO: 862997 - RNA, 24 nt, Human
aacagagugagacucugucucaaa

SEQ ID NO: 862998 - RNA, 24 nt, Human
aacagccgggcgcgguggcucaca

SEQ ID NO: 862999 - RNA, 24 nt, Human
aaccaguauacuugacuuugagug

SEQ ID NO: 863000 - RNA, 19 nt, Human
aacccaaacaauaccaagu

SEQ ID NO: 863001 - RNA, 22 nt, Human
aacccuggacugacugcuuuaa

SEQ ID NO: 863002 - RNA, 22 nt, Human
aagcaaaaaagaaaacgaagca

SEQ ID NO: 863003 - RNA, 23 nt, Human
aagcaaaaaagaaaacgaagcaa

SEQ ID NO: 863004 - RNA, 24 nt, Human
aagcaaaaaagaaaacgaagcaaa

SEQ ID NO: 863005 - RNA, 24 nt, Human
aagcaaaacaaaaagcaauaccag

SEQ ID NO: 863006 - RNA, 19 nt, Human
aagcaaaacagccgggcgc

SEQ ID NO: 863007 - RNA, 25 nt, Human
aagggccaugguggugauucuuaga

SEQ ID NO: 863008 - RNA, 23 nt, Human
aaugugcuggugaccuucaaccu

SEQ ID NO: 863009 - RNA, 23 nt, Human
acaaaaccaaaaaaaaacccaaa

SEQ ID NO: 863010 - RNA, 24 nt, Human
acaaaaccaaaaaaaaacccaaac

SEQ ID NO: 863011 - RNA, 21 nt, Human
acaaacaaaaccacgcccaca

SEQ ID NO: 863012 - RNA, 23 nt, Human
acaaacaaaaccacgcccacaca

SEQ ID NO: 863013 - RNA, 26 nt, Human
acaacaacaaaaccaaaaaaaaaccc

SEQ ID NO: 863014 - RNA, 18 nt, Human
acacacuaacaacaacaa

SEQ ID NO: 863015 - RNA, 20 nt, Human
acacuaacaacaacaacaaa

SEQ ID NO: 863016 - RNA, 21 nt, Human
acagagugagacucugucuca

SEQ ID NO: 863017 - RNA, 24 nt, Human
acagagugagacucugucucaaaa

SEQ ID NO: 863018 - RNA, 22 nt, Human
accaaaaaaaaacccaaacaau

SEQ ID NO: 863019 - RNA, 20 nt, Human
accaugacgagaaaaggaau

SEQ ID NO: 863020 - RNA, 23 nt, Human
accggggcacaagaacuugccua

SEQ ID NO: 863021 - RNA, 22 nt, Human
accuugucuccaaaaacaaaca

SEQ ID NO: 863022 - RNA, 19 nt, Human
acgaagcaaaacaaaaagc

SEQ ID NO: 863023 - RNA, 23 nt, Human
acgccacugcacuccagcugggc

SEQ ID NO: 863024 - RNA, 23 nt, Human
acuaacaacaacaacaaaaccaa

SEQ ID NO: 863025 - RNA, 19 nt, Human
acugcacuccagcccuggg

SEQ ID NO: 863026 - RNA, 25 nt, Human
acugcacuccagcccugggcgacag

SEQ ID NO: 863027 - RNA, 20 nt, Human
acugcacuccagcccugggg

SEQ ID NO: 863028 - RNA, 23 nt, Human
acugcacuccagcugggcaacag

SEQ ID NO: 863029 - RNA, 23 nt, Human
acugcacuccagcugggcaacag

SEQ ID NO: 863030 - RNA, 23 nt, Human
agaaaacgaagcaaaacaaaaag

SEQ ID NO: 863031 - RNA, 24 nt, Human
agacacgcacucucccccuagcaa

SEQ ID NO: 863032 - RNA, 22 nt, Human
agacagaaaaaugggcaaucau

SEQ ID NO: 863033 - RNA, 23 nt, Human
agagcuugcagugagccgagauc

SEQ ID NO: 863034 - RNA, 23 nt, Human
agaggagaguacugcugcccagu

SEQ ID NO: 863035 - RNA, 18 nt, Human
agagugaaaaggggccuu

SEQ ID NO: 863036 - RNA, 24 nt, Human
agcacuuugggaggccgagguggg

SEQ ID NO: 863037 - RNA, 18 nt, Human
agccggccgugguggcgg

SEQ ID NO: 863038 - RNA, 22 nt, Human
agccgggcgugguggugcacgc

SEQ ID NO: 863039 - RNA, 23 nt, Human
agccgggcgugguggugcacgcc

SEQ ID NO: 863040 - RNA, 25 nt, Human
agcggcggaagcaggaaaugcuaaa

SEQ ID NO: 863041 - RNA, 23 nt, Human
agcugggcaacagagugagacuc

SEQ ID NO: 863042 - RNA, 19 nt, Human
aggagcagggaggaggcgg

SEQ ID NO: 863043 - RNA, 21 nt, Human
aggcagagcuugcagugagcc

SEQ ID NO: 863044 - RNA, 24 nt, Human
aggcagagcuugcagugagccgag

SEQ ID NO: 863045 - RNA, 24 nt, Human
aggcaggagaauggcgugaacccg

SEQ ID NO: 863046 - RNA, 23 nt, Human
aggcaggaggaucgcuugggccc

SEQ ID NO: 863047 - RNA, 25 nt, Human
aggcaggaggaucgcuugggcccug

SEQ ID NO: 863048 - RNA, 18 nt, Human
aggccgaggugggcggau

SEQ ID NO: 863049 - RNA, 19 nt, Human
aggcugaggcaggagaaug

SEQ ID NO: 863050 - RNA, 22 nt, Human
agggcaccuggauuaaagcccu

SEQ ID NO: 863051 - RNA, 22 nt, Human
agguaggaggaaaucuggagag

SEQ ID NO: 863052 - RNA, 20 nt, Human
agguugaggcaggaggaucg

SEQ ID NO: 863053 - RNA, 24 nt, Human
agguugaggcaggaggaucgcuug

SEQ ID NO: 863054 - RNA, 23 nt, Human
aucacgccacugcacuccagcug

SEQ ID NO: 863055 - RNA, 23 nt, Human
auccagccuuuuagugguugaaa

SEQ ID NO: 863056 - RNA, 25 nt, Human
aucgcgccacugcacuccagcccug

SEQ ID NO: 863057 - RNA, 23 nt, Human
caaaaaaaaacccaaacaauacc

SEQ ID NO: 863058 - RNA, 27 nt, Human
caaaaagcaaaaaagaaaacgaagcaa

SEQ ID NO: 863059 - RNA, 28 nt, Human
caaaacaaaaagcaauaccagccgggcg

SEQ ID NO: 863060 - RNA, 22 nt, Human
caaaacagccgggcgcgguggc

SEQ ID NO: 863061 - RNA, 24 nt, Human
caaagcccauccuccuugcuucuc

SEQ ID NO: 863062 - RNA, 21 nt, Human
caacaaaaccaaaaaaaaacc

SEQ ID NO: 863063 - RNA, 25 nt, Human
caacaaaaccaaaaaaaaacccaaa

SEQ ID NO: 863064 - RNA, 28 nt, Human
caacaacaacaaaaccaaaaaaaaaccc

SEQ ID NO: 863065 - RNA, 24 nt, Human
cacaccuguaaucccagcacuuug

SEQ ID NO: 863066 - RNA, 20 nt, Human
caccccacaaacuguuccuu

SEQ ID NO: 863067 - RNA, 24 nt, Human
caccccggaauugaggacacaggg

SEQ ID NO: 863068 - RNA, 19 nt, Human
caccucacuggauuccacc

SEQ ID NO: 863069 - RNA, 24 nt, Human
caccuggauuaaagcccugugggc

SEQ ID NO: 863070 - RNA, 19 nt, Human
caccuguaaucccagcacu

SEQ ID NO: 863071 - RNA, 24 nt, Human
caccuguaaucccagcacuuuggg

SEQ ID NO: 863072 - RNA, 18 nt, Human
cacgccuguaaucccagc

SEQ ID NO: 863073 - RNA, 19 nt, Human
cacgccuguaaucccagcu

SEQ ID NO: 863074 - RNA, 24 nt, Human
cacuccagcccugggcgacagagc

SEQ ID NO: 863075 - RNA, 21 nt, Human
cacuccagcugggcaacagag

SEQ ID NO: 863076 - RNA, 22 nt, Human
cacuccagcugggcaacagagu

SEQ ID NO: 863077 - RNA, 20 nt, Human
cacugcacuccagcccuggg

SEQ ID NO: 863078 - RNA, 21 nt, Human
cacugcacuccagcccugggc

SEQ ID NO: 863079 - RNA, 23 nt, Human
cacugcacuccagcccugggcga

SEQ ID NO: 863080 - RNA, 24 nt, Human
cacugcacuccagcccugggcgac

SEQ ID NO: 863081 - RNA, 25 nt, Human
cacugcacuccagcccugggcgaca

SEQ ID NO: 863082 - RNA, 18 nt, Human
cacugcacuccagcuggg

SEQ ID NO: 863083 - RNA, 20 nt, Human
cacugcacuccagcugggca

SEQ ID NO: 863084 - RNA, 21 nt, Human
cacugcacuccagcugggcaa

SEQ ID NO: 863085 - RNA, 23 nt, Human
cacugcacuccagcugggcaaca

SEQ ID NO: 863086 - RNA, 24 nt, Human
cagcacuuugggaggccgaggugg

SEQ ID NO: 863087 - RNA, 23 nt, Human
cagccuuucuccuucgugggccc

SEQ ID NO: 863088 - RNA, 22 nt, Human
cagcuaaaccugagauccaagc

SEQ ID NO: 863089 - RNA, 24 nt, Human
cagcuacucgggaggcugaggcag

SEQ ID NO: 863090 - RNA, 24 nt, Human
cagcuauccgggagguugaggcag

SEQ ID NO: 863091 - RNA, 21 nt, Human
caggagaugccacugcaggac

SEQ ID NO: 863092 - RNA, 27 nt, Human
ccaaacaauaccaaguguguaccauga

SEQ ID NO: 863093 - RNA, 24 nt, Human
ccaagcccagccuggcucuucacu

SEQ ID NO: 863094 - RNA, 21 nt, Human
ccacacacuaacaacaacaac

SEQ ID NO: 863095 - RNA, 24 nt, Human
ccacagagcacagcucgggccucu

SEQ ID NO: 863096 - RNA, 21 nt, Human
ccacugcacuccagcccuggg

SEQ ID NO: 863097 - RNA, 22 nt, Human
ccacugcacuccagcccugggc

SEQ ID NO: 863098 - RNA, 25 nt, Human
ccacugcacuccagcccugggcgac

SEQ ID NO: 863099 - RNA, 19 nt, Human
ccacugcacuccagcuggg

SEQ ID NO: 863100 - RNA, 19 nt, Human
ccacugcacuccagcuggg

SEQ ID NO: 863101 - RNA, 20 nt, Human
ccacugcacuccagcugggc

SEQ ID NO: 863102 - RNA, 23 nt, Human
ccagccgggcgugguggugcacg

SEQ ID NO: 863103 - RNA, 21 nt, Human
ccaucagugagcagcagcagc

SEQ ID NO: 863104 - RNA, 24 nt, Human
ccauccuccuugcuucucccuggc

SEQ ID NO: 863105 - RNA, 24 nt, Human
cccaaacccuggacugacugcuuu

SEQ ID NO: 863106 - RNA, 19 nt, Human
cccacacacuaacaacaac

SEQ ID NO: 863107 - RNA, 22 nt, Human
cccacacacuaacaacaacaac

SEQ ID NO: 863108 - RNA, 25 nt, Human
cccacacacuaacaacaacaacaaa

SEQ ID NO: 863109 - RNA, 22 nt, Human
cccccaaacccuggacugacuu

SEQ ID NO: 863110 - RNA, 22 nt, Human
cccccuagcaaucccaccccgg

SEQ ID NO: 863111 - RNA, 25 nt, Human
ccccgcgcucagcccuuggugcccu

SEQ ID NO: 863112 - RNA, 19 nt, Human
ccccuagcaaucccacccc

SEQ ID NO: 863113 - RNA, 21 nt, Human
ccgugggcgccggaccuuggc

SEQ ID NO: 863114 - RNA, 21 nt, Human
ccucagcuaaaccugagaucc

SEQ ID NO: 863115 - RNA, 25 nt, Human
ccucccaaagacaucccucuagggg

SEQ ID NO: 863116 - RNA, 24 nt, Human
ccuccuugcuucucccuggcacaa

SEQ ID NO: 863117 - RNA, 23 nt, Human
ccucugaaacaaccacugagucu

SEQ ID NO: 863118 - RNA, 18 nt, Human
ccugagauccaagcgcuc

SEQ ID NO: 863119 - RNA, 22 nt, Human
ccuggauuaaagcccugugggc

SEQ ID NO: 863120 - RNA, 20 nt, Human
ccuguaaucccagcuauccg

SEQ ID NO: 863121 - RNA, 21 nt, Human
ccuguaaucccagcuauccgg

SEQ ID NO: 863122 - RNA, 19 nt, Human
ccuguagucccagcuacuc

SEQ ID NO: 863123 - RNA, 21 nt, Human
ccuguagucccagcuacucgg

SEQ ID NO: 863124 - RNA, 22 nt, Human
ccuguagucccagcuacucggg

SEQ ID NO: 863125 - RNA, 24 nt, Human
cgagaccagccugaccuacauagu

SEQ ID NO: 863126 - RNA, 24 nt, Human
cgagaucacgccacugcacuccag

SEQ ID NO: 863127 - RNA, 27 nt, Human
cgccacugcacuccagcccugggcgac

SEQ ID NO: 863128 - RNA, 24 nt, Human
cgccuguaaucccagcuauccggg

SEQ ID NO: 863129 - RNA, 22 nt, Human
cggaagacagaaaaaugggcaa

SEQ ID NO: 863130 - RNA, 18 nt, Human
cggaagcaggaaaugcua

SEQ ID NO: 863131 - RNA, 22 nt, Human
cggaagcaggaaaugcuaaagg

SEQ ID NO: 863132 - RNA, 22 nt, Human
cggaucacgaggucaggaguuc

SEQ ID NO: 863133 - RNA, 22 nt, Human
cucacaccuguaaucccagcac

SEQ ID NO: 863134 - RNA, 24 nt, Human
cucacaccuguaaucccagcacuu

SEQ ID NO: 863135 - RNA, 18 nt, Human
cuccaaccaguauacuug

SEQ ID NO: 863136 - RNA, 23 nt, Human
cuccaagcccagccuggcucuuc

SEQ ID NO: 863137 - RNA, 21 nt, Human
cuccaaucuuucuucuguacc

SEQ ID NO: 863138 - RNA, 23 nt, Human
cugcccagugcaccccacaaacu

SEQ ID NO: 863139 - RNA, 18 nt, Human
cugggauggcaacaaggg

SEQ ID NO: 863140 - RNA, 21 nt, Human
cuucccucccaaagacauccc

SEQ ID NO: 863141 - RNA, 22 nt, Human
cuucucccuggcacaagggcca

SEQ ID NO: 863142 - RNA, 19 nt, Human
cuugggcccuggaagucga

SEQ ID NO: 863143 - RNA, 26 nt, Human
cuugggcccuggaagucgaggcuuca

SEQ ID NO: 863144 - RNA, 20 nt, Human
gaacccgggaggcagagcuu

SEQ ID NO: 863145 - RNA, 18 nt, Human
gaacugaaagaaccaaua

SEQ ID NO: 863146 - RNA, 19 nt, Human
gaccuugucuccaaaaaca

SEQ ID NO: 863147 - RNA, 18 nt, Human
gacuggagcuccugcgaa

SEQ ID NO: 863148 - RNA, 19 nt, Human
gagagccccggacuggagc

SEQ ID NO: 863149 - RNA, 19 nt, Human
gagcuccugcgaacucccc

SEQ ID NO: 863150 - RNA, 18 nt, Human
gagcuugcagugagccga

SEQ ID NO: 863151 - RNA, 24 nt, Human
gaggugggcggauugggcggauca

SEQ ID NO: 863152 - RNA, 21 nt, Human
gaucacgaggucaggaguucg

SEQ ID NO: 863153 - RNA, 22 nt, Human
gaucacgaggucaggaguucga

SEQ ID NO: 863154 - RNA, 24 nt, Human
gaucacgaggucaggaguucgaga

SEQ ID NO: 863155 - RNA, 21 nt, Human
gaucgcgccacugcacuccag

SEQ ID NO: 863156 - RNA, 24 nt, Human
gauugggcggaucacgaggucagg

SEQ ID NO: 863157 - RNA, 22 nt, Human
gcaaauggagauccccacucuc

SEQ ID NO: 863158 - RNA, 24 nt, Human
gcaacagagugagacucugucuca

SEQ ID NO: 863159 - RNA, 25 nt, Human
gccacugcacuccagcccugggcga

SEQ ID NO: 863160 - RNA, 23 nt, Human
gccacugcacuccagcugggcaa

SEQ ID NO: 863161 - RNA, 24 nt, Human
gccacugcacuccagcugggcaac

SEQ ID NO: 863162 - RNA, 19 nt, Human
gccaugaucgcgccacugc

SEQ ID NO: 863163 - RNA, 21 nt, Human
gcccugugggccaagaguugu

SEQ ID NO: 863164 - RNA, 20 nt, Human
gccgagaucacgccacugca

SEQ ID NO: 863165 - RNA, 23 nt, Human
gccuguagucccagcuacucggg

SEQ ID NO: 863166 - RNA, 21 nt, Human
gcggcaacagcuugcggcugc

SEQ ID NO: 863167 - RNA, 18 nt, Human
gcggcgaaggcggcgcca

SEQ ID NO: 863168 - RNA, 24 nt, Human
gcgggccagggccgagacgcgagu

SEQ ID NO: 863169 - RNA, 22 nt, Human
gcugaggcaggagaauggcgug

SEQ ID NO: 863170 - RNA, 20 nt, Human
gcugggcgcaggggcuggcg

SEQ ID NO: 863171 - RNA, 18 nt, Human
gcuucauuuucugaugca

SEQ ID NO: 863172 - RNA, 25 nt, Human
ggaaacgucggaagacagaaaaaug

SEQ ID NO: 863173 - RNA, 19 nt, Human
ggaagacagaaaaaugggc

SEQ ID NO: 863174 - RNA, 24 nt, Human
ggagaugccacugcaggacccaag

SEQ ID NO: 863175 - RNA, 18 nt, Human
ggagcuccugcgaacucc

SEQ ID NO: 863176 - RNA, 22 nt, Human
ggaugcugggaggagccugggc

SEQ ID NO: 863177 - RNA, 24 nt, Human
ggcagaugggacuuuugagagaaa

SEQ ID NO: 863178 - RNA, 19 nt, Human
ggccgugguggcgggcgcc

SEQ ID NO: 863179 - RNA, 20 nt, Human
ggccgugguggcgggcgccu

SEQ ID NO: 863180 - RNA, 24 nt, Human
ggccgugguggcgggcgccuguag

SEQ ID NO: 863181 - RNA, 20 nt, Human
ggcgccggaccuuggcuugg

SEQ ID NO: 863182 - RNA, 19 nt, Human
ggcggaucacgaggucagg

SEQ ID NO: 863183 - RNA, 23 nt, Human
ggcggaucacgaggucaggaguu

SEQ ID NO: 863184 - RNA, 23 nt, Human
ggcgugggcuacgcgcuccucgu

SEQ ID NO: 863185 - RNA, 21 nt, Human
ggcucacaccuguaaucccag

SEQ ID NO: 863186 - RNA, 26 nt, Human
ggcugugcaggcggccauggauuccu

SEQ ID NO: 863187 - RNA, 20 nt, Human
gggaggccgaggugggcgga

SEQ ID NO: 863188 - RNA, 22 nt, Human
gggagguugaggcaggaggauc

SEQ ID NO: 863189 - RNA, 25 nt, Human
gggcaaauggagauccccacucucu

SEQ ID NO: 863190 - RNA, 20 nt, Human
gggccagggccgagacgcga

SEQ ID NO: 863191 - RNA, 24 nt, Human
gggcgcgguggcucacaccuguaa

SEQ ID NO: 863192 - RNA, 18 nt, Human
gggcgcucuagccugcgc

SEQ ID NO: 863193 - RNA, 19 nt, Human
gggcggguggagagccccg

SEQ ID NO: 863194 - RNA, 24 nt, Human
gggcgugguggugcacgccuguaa

SEQ ID NO: 863195 - RNA, 24 nt, Human
gguggcgggcgccuguagucccag

SEQ ID NO: 863196 - RNA, 23 nt, Human
gguggcucacaccuguaauccca

SEQ ID NO: 863197 - RNA, 24 nt, Human
gguggcucacaccuguaaucccag

SEQ ID NO: 863198 - RNA, 24 nt, Human
gguggugcacgccuguaaucccag

SEQ ID NO: 863199 - RNA, 19 nt, Human
guuuacucuuuggcaggag

SEQ ID NO: 863200 - RNA, 18 nt, Human
uaaaauaaauguuaaaga

SEQ ID NO: 863201 - RNA, 22 nt, Human
uaacaacaacaacaaaaccaaa

SEQ ID NO: 863202 - RNA, 20 nt, Human
uacauagugaaacucuuucu

SEQ ID NO: 863203 - RNA, 23 nt, Human
uaucgugaccccgggagagcggc

SEQ ID NO: 863204 - RNA, 20 nt, Human
ucaacccccucagcuaaacc

SEQ ID NO: 863205 - RNA, 18 nt, Human
ucacgaggucaggaguuc

SEQ ID NO: 863206 - RNA, 24 nt, Human
ucacgaggucaggaguucgagacc

SEQ ID NO: 863207 - RNA, 22 nt, Human
ucacgccacugcacuccagcug

SEQ ID NO: 863208 - RNA, 23 nt, Human
ucacuuuggucuuggaagaaggc

SEQ ID NO: 863209 - RNA, 22 nt, Human
ucagggcaggggaaaaugccca

SEQ ID NO: 863210 - RNA, 19 nt, Human
uccaagcgcuccggauucc

SEQ ID NO: 863211 - RNA, 25 nt, Human
uccagcccugggcgacagagcgaga

SEQ ID NO: 863212 - RNA, 23 nt, Human
uccagcugggcaacagagugaga

SEQ ID NO: 863213 - RNA, 18 nt, Human
ucccaaccugguauguuu

SEQ ID NO: 863214 - RNA, 21 nt, Human
uccgcaaggcgggccagggcc

SEQ ID NO: 863215 - RNA, 18 nt, Human
uccucugucccagagagg

SEQ ID NO: 863216 - RNA, 23 nt, Human
ucuaggguccugugggcuccaag

SEQ ID NO: 863217 - RNA, 21 nt, Human
ucuaugguuucugcuauaggg

SEQ ID NO: 863218 - RNA, 18 nt, Human
ucucaaaaagcaaaaaag

SEQ ID NO: 863219 - RNA, 23 nt, Human
ucuccaaccaguauacuugacuu

SEQ ID NO: 863220 - RNA, 24 nt, Human
ucuccgggguccugugagcugccg

SEQ ID NO: 863221 - RNA, 18 nt, Human
ucucuacuaaaaauacaa

SEQ ID NO: 863222 - RNA, 22 nt, Human
ucucuacuaaaaauacaaaaaa

SEQ ID NO: 863223 - RNA, 23 nt, Human
ucugaaacaaccacugagucuga

SEQ ID NO: 863224 - RNA, 23 nt, Human
ucugucccagagaggguugggca

SEQ ID NO: 863225 - RNA, 19 nt, Human
ucuuggaagaaggccucag

SEQ ID NO: 863226 - RNA, 18 nt, Human
ucuuggacaccucaaccc

SEQ ID NO: 863227 - RNA, 21 nt, Human
ucuuucuucuguaccuucuuc

SEQ ID NO: 863228 - RNA, 21 nt, Human
ugaaaacaaagcaaaacagcc

SEQ ID NO: 863229 - RNA, 22 nt, Human
ugaaacaaccacugagucugaa

SEQ ID NO: 863230 - RNA, 24 nt, Human
ugaacugaaagaaccaauaaaauc

SEQ ID NO: 863231 - RNA, 20 nt, Human
ugaaggcuggcuccaguuga

SEQ ID NO: 863232 - RNA, 23 nt, Human
ugaaggcuggcuccaguugagaa

SEQ ID NO: 863233 - RNA, 20 nt, Human
ugaccccgggagagcggcgg

SEQ ID NO: 863234 - RNA, 18 nt, Human
ugacugcaggaaaccaca

SEQ ID NO: 863235 - RNA, 22 nt, Human
ugagccgagaucacgccacugc

SEQ ID NO: 863236 - RNA, 23 nt, Human
ugaggcaggagaauggcgugaac

SEQ ID NO: 863237 - RNA, 24 nt, Human
ugaggcaggagaauggcgugaacc

SEQ ID NO: 863238 - RNA, 25 nt, Human
ugaggcaggagaauggcgugaaccc

SEQ ID NO: 863239 - RNA, 24 nt, Human
ugaggcaggaggaucgcuugggcc

SEQ ID NO: 863240 - RNA, 25 nt, Human
ugaggcaggaggaucgcuugggccc

SEQ ID NO: 863241 - RNA, 18 nt, Human
ugaggggauggagaggga

SEQ ID NO: 863242 - RNA, 21 nt, Human
ugccagcacuucuuggacacc

SEQ ID NO: 863243 - RNA, 19 nt, Human
ugcccagugcaccccacaa

SEQ ID NO: 863244 - RNA, 18 nt, Human
ugcuaagcgauuauacgc

SEQ ID NO: 863245 - RNA, 22 nt, Human
ugcugcccagugcaccccacaa

SEQ ID NO: 863246 - RNA, 22 nt, Human
ugcugggaggagccugggcuau

SEQ ID NO: 863247 - RNA, 26 nt, Human
uggacugacugcuuuaagguccgcaa

SEQ ID NO: 863248 - RNA, 19 nt, Human
uggauuaaagcccuguggg

SEQ ID NO: 863249 - RNA, 21 nt, Human
uggcucacaccuguaauccca

SEQ ID NO: 863250 - RNA, 22 nt, Human
uggcucacaccuguaaucccag

SEQ ID NO: 863251 - RNA, 24 nt, Human
uggcucacaccuguaaucccagca

SEQ ID NO: 863252 - RNA, 19 nt, Human
ugggaggccgaggugggcg

SEQ ID NO: 863253 - RNA, 22 nt, Human
ugggaggccgaggugggcggau

SEQ ID NO: 863254 - RNA, 24 nt, Human
ugggaggccgaggugggcggauug

SEQ ID NO: 863255 - RNA, 21 nt, Human
ugggcaacagagugagacucu

SEQ ID NO: 863256 - RNA, 24 nt, Human
ugguagucccgaggaagggugggc

SEQ ID NO: 863257 - RNA, 19 nt, Human
uggugaacugaaagaacca

SEQ ID NO: 863258 - RNA, 20 nt, Human
uggugauucuuagagugcaa

SEQ ID NO: 863259 - RNA, 21 nt, Human
uggugcacgccuguaauccca

SEQ ID NO: 863260 - RNA, 22 nt, Human
uggugcacgccuguaaucccag

SEQ ID NO: 863261 - RNA, 24 nt, Human
ugguggcgggcgccuguaguccca

SEQ ID NO: 863262 - RNA, 24 nt, Human
ugguggugcacgccuguaauccca

SEQ ID NO: 863263 - RNA, 22 nt, Human
ugguguuuacucuuuggcagga

SEQ ID NO: 863264 - RNA, 22 nt, Human
ugguuggcggcgaaggcggcgc

SEQ ID NO: 863265 - RNA, 23 nt, Human
ugugagcugccgucgggugagca

SEQ ID NO: 863266 - RNA, 23 nt, Human
uguguaccaugacgagaaaagga

SEQ ID NO: 863267 - RNA, 21 nt, Human
uguguagaugcccuccaugcg

SEQ ID NO: 863268 - RNA, 19 nt, Human
uguguauguguguagaugc

SEQ ID NO: 863269 - RNA, 23 nt, Human
uucaccucacuggauuccaccac

SEQ ID NO: 863270 - RNA, 20 nt, Human
uucagagugcuagggcuuua

SEQ ID NO: 863271 - RNA, 21 nt, Human
uucagugagccaugaucgcgc

SEQ ID NO: 863272 - RNA, 24 nt, Human
uucucccuggcacaagggccaugg

SEQ ID NO: 863273 - RNA, 18 nt, Human
uugcagugagccgagauc

SEQ ID NO: 863274 - RNA, 20 nt, Human
uugcagugagccgagaucac

SEQ ID NO: 863275 - RNA, 21 nt, Human
uugcagugagccgagaucacg

SEQ ID NO: 863276 - RNA, 24 nt, Human
uuuccucugucccagagaggguug

SEQ ID NO: 863277 - RNA, 21 nt, Human
uuucugcuauagggcgcucua

SEQ ID NO: 863278 - RNA, 24 nt, Human
uuuuccucugucccagagaggguu

SEQ ID NO: 863279 - RNA, 22 nt, Human
uuuuuuuuuuuuuuuuuuucag

SEQ ID NO: 863280 - RNA, 20 nt, Human
accgcccccgucauacaugc

SEQ ID NO: 863281 - RNA, 18 nt, Human
acuggccuccauucuggc

SEQ ID NO: 863282 - RNA, 19 nt, Human
agcgccggccccaggaggg

SEQ ID NO: 863283 - RNA, 19 nt, Human
aggaagggggccagaaagc

SEQ ID NO: 863284 - RNA, 24 nt, Human
aggcacacgagaugcaggcagcgg

SEQ ID NO: 863285 - RNA, 21 nt, Human
aggcugaggucuccucugugu

SEQ ID NO: 863286 - RNA, 21 nt, Human
cacacagcgcucacagugcag

SEQ ID NO: 863287 - RNA, 18 nt, Human
cagccaggcauccucaca

SEQ ID NO: 863288 - RNA, 21 nt, Human
cagcccgggucacaccugcag

SEQ ID NO: 863289 - RNA, 20 nt, Human
cagcgcucacagugcagccc

SEQ ID NO: 863290 - RNA, 22 nt, Human
caggagccgucaggugcacagc

SEQ ID NO: 863291 - RNA, 19 nt, Human
caggagggacggacggaug

SEQ ID NO: 863292 - RNA, 21 nt, Human
caucugugugcuccucugcuc

SEQ ID NO: 863293 - RNA, 20 nt, Human
cauucuggcagggggacugc

SEQ ID NO: 863294 - RNA, 21 nt, Human
cccgggucacaccugcaggag

SEQ ID NO: 863295 - RNA, 23 nt, Human
ccucccagcccgggucacaccug

SEQ ID NO: 863296 - RNA, 20 nt, Human
cggccggacgcguggacacc

SEQ ID NO: 863297 - RNA, 22 nt, Human
cucccagcccgggucacaccug

SEQ ID NO: 863298 - RNA, 21 nt, Human
cucugcuccuccucgcccucc

SEQ ID NO: 863299 - RNA, 20 nt, Human
cuggccuccauucuggcagg

SEQ ID NO: 863300 - RNA, 21 nt, Human
cugugugcuccucugcuccuc

SEQ ID NO: 863301 - RNA, 19 nt, Human
cuucaucugugugcuccuc

SEQ ID NO: 863302 - RNA, 22 nt, Human
gacggccggacgcguggacacc

SEQ ID NO: 863303 - RNA, 18 nt, Human
ggccaggucacaguggga

SEQ ID NO: 863304 - RNA, 21 nt, Human
uacccaagcugaaggguggug

SEQ ID NO: 863305 - RNA, 26 nt, Human
uacccaagcugaaggguggugagaac

SEQ ID NO: 863306 - RNA, 19 nt, Human
ucacagugggagcugcagu

SEQ ID NO: 863307 - RNA, 24 nt, Human
ucaucugugugcuccucugcuccu

SEQ ID NO: 863308 - RNA, 18 nt, Human
ucuggugugaggcugagg

SEQ ID NO: 863309 - RNA, 21 nt, Human
ugaccgggagcccccagaaug

SEQ ID NO: 863310 - RNA, 19 nt, Human
ugccauggcugguggcagg

SEQ ID NO: 863311 - RNA, 20 nt, Human
uggaagaggugaggaagggg

SEQ ID NO: 863312 - RNA, 19 nt, Human
uggccuccauucuggcagg

SEQ ID NO: 863313 - RNA, 21 nt, Human
ugguggcagguaccgugcugg

SEQ ID NO: 863314 - RNA, 25 nt, Human
uuuuuuuuuuuuuuuuuugcauuuu

SEQ ID NO: 863315 - RNA, 27 nt, Human
uuuuuuuuuuuuuuuuuuuuuuugggg

SEQ ID NO: 863316 - RNA, 21 nt, Human
aaaagagccacucagccugga

SEQ ID NO: 863317 - RNA, 23 nt, Human
aaacugcuucuacuuuuugacua

SEQ ID NO: 863318 - RNA, 18 nt, Human
aaauacacccuaaguuac

SEQ ID NO: 863319 - RNA, 24 nt, Human
aaccaacugaaguaugaaaacaaa

SEQ ID NO: 863320 - RNA, 25 nt, Human
aacuacucuuccaaacugcuucuac

SEQ ID NO: 863321 - RNA, 25 nt, Human
aagaggaaaacacagaauacaagaa

SEQ ID NO: 863322 - RNA, 20 nt, Human
aagcaauaccuuaggaacaa

SEQ ID NO: 863323 - RNA, 23 nt, Human
aagcaauaccuuaggaacaacca

SEQ ID NO: 863324 - RNA, 21 nt, Human
aagggaccuugucucaaaaac

SEQ ID NO: 863325 - RNA, 20 nt, Human
aaggucuucugcuggacucu

SEQ ID NO: 863326 - RNA, 24 nt, Human
acacagagguugcagugagccaag

SEQ ID NO: 863327 - RNA, 22 nt, Human
acagagguugcagugagccaag

SEQ ID NO: 863328 - RNA, 21 nt, Human
acuacucuuccaaacugcuuc

SEQ ID NO: 863329 - RNA, 18 nt, Human
acucuaaccugggugaca

SEQ ID NO: 863330 - RNA, 18 nt, Human
agaggugcccaggucauc

SEQ ID NO: 863331 - RNA, 22 nt, Human
agagguugcagugagccaagau

SEQ ID NO: 863332 - RNA, 24 nt, Human
agagguugcagugagccaagauug

SEQ ID NO: 863333 - RNA, 19 nt, Human
agaguugacaaagcaaauc

SEQ ID NO: 863334 - RNA, 21 nt, Human
agcaaaguggaccaaaaaaga

SEQ ID NO: 863335 - RNA, 19 nt, Human
agcauggugacacgcaccu

SEQ ID NO: 863336 - RNA, 24 nt, Human
agccuggacaauauagugaggccu

SEQ ID NO: 863337 - RNA, 25 nt, Human
agccuggacaauauagugaggccuc

SEQ ID NO: 863338 - RNA, 23 nt, Human
agcuacuugggaggcugaggcag

SEQ ID NO: 863339 - RNA, 23 nt, Human
aggacacagagguugcagugagc

SEQ ID NO: 863340 - RNA, 18 nt, Human
aggcagauuccaaaacca

SEQ ID NO: 863341 - RNA, 18 nt, Human
aggcaggaggaucacuug

SEQ ID NO: 863342 - RNA, 23 nt, Human
aggcaggaggaucacuugagccc

SEQ ID NO: 863343 - RNA, 24 nt, Human
aggcaggaggaucacuugagccca

SEQ ID NO: 863344 - RNA, 24 nt, Human
aggcugaggcaggaggaucacuug

SEQ ID NO: 863345 - RNA, 21 nt, Human
aucuacucuaaccugggugac

SEQ ID NO: 863346 - RNA, 23 nt, Human
caaagcaaaucuaauaaaaagua

SEQ ID NO: 863347 - RNA, 23 nt, Human
caagcaauaccuuaggaacaacc

SEQ ID NO: 863348 - RNA, 22 nt, Human
caauugcuuaacaucaccaggu

SEQ ID NO: 863349 - RNA, 24 nt, Human
caccugugguccuagcuacuuggg

SEQ ID NO: 863350 - RNA, 21 nt, Human
cacuucauaccucagcaaagu

SEQ ID NO: 863351 - RNA, 23 nt, Human
cacuucucuucuuuccuuauuca

SEQ ID NO: 863352 - RNA, 19 nt, Human
cagaaagggaccuugucuc

SEQ ID NO: 863353 - RNA, 25 nt, Human
ccaaaaaagaggaaaacacagaaua

SEQ ID NO: 863354 - RNA, 26 nt, Human
ccaaaaaagaggaaaacacagaauac

SEQ ID NO: 863355 - RNA, 20 nt, Human
ccacuucucuucuuuccuua

SEQ ID NO: 863356 - RNA, 19 nt, Human
ccaggacacagagguugca

SEQ ID NO: 863357 - RNA, 18 nt, Human
cccaggucaucucggcga

SEQ ID NO: 863358 - RNA, 27 nt, Human
cucucuuucuguucucagccucugccc

SEQ ID NO: 863359 - RNA, 23 nt, Human
cuuuuagccaccuggcucuugau

SEQ ID NO: 863360 - RNA, 20 nt, Human
gaaaaaggacuucuugauaa

SEQ ID NO: 863361 - RNA, 24 nt, Human
gaucacuugagcccaggacacaga

SEQ ID NO: 863362 - RNA, 22 nt, Human
gcagauuccaaaaccaacugaa

SEQ ID NO: 863363 - RNA, 20 nt, Human
gccuggacaauauagugagg

SEQ ID NO: 863364 - RNA, 18 nt, Human
gggauuuauuuuggaaau

SEQ ID NO: 863365 - RNA, 19 nt, Human
guacagaauuggaaaaagg

SEQ ID NO: 863366 - RNA, 21 nt, Human
uaaaacacauauauuuaaugu

SEQ ID NO: 863367 - RNA, 24 nt, Human
uacaagaaagaguugacaaagcaa

SEQ ID NO: 863368 - RNA, 19 nt, Human
uacagccccuccacccucu

SEQ ID NO: 863369 - RNA, 20 nt, Human
uacagccccuccacccucuc

SEQ ID NO: 863370 - RNA, 22 nt, Human
uaccuuaggaacaaccauugcu

SEQ ID NO: 863371 - RNA, 20 nt, Human
uacucuaaccugggugacag

SEQ ID NO: 863372 - RNA, 20 nt, Human
uaguacacuucauaccucag

SEQ ID NO: 863373 - RNA, 21 nt, Human
uauaaggcagauuccaaaacc

SEQ ID NO: 863374 - RNA, 22 nt, Human
uaucuuuaacuggucauggcuu

SEQ ID NO: 863375 - RNA, 23 nt, Human
uaugauucuacuuuuugacaggc

SEQ ID NO: 863376 - RNA, 23 nt, Human
uauuagaagacucagaugcuuca

SEQ ID NO: 863377 - RNA, 25 nt, Human
ucacuccguugccaauguccucaau

SEQ ID NO: 863378 - RNA, 23 nt, Human
ucucauccaaagaguaagccaaa

SEQ ID NO: 863379 - RNA, 21 nt, Human
ucugcaaauaucuuuaacugg

SEQ ID NO: 863380 - RNA, 24 nt, Human
ugacacgcaccugugguccuagcu

SEQ ID NO: 863381 - RNA, 22 nt, Human
ugacagaaagggaccuugucuc

SEQ ID NO: 863382 - RNA, 19 nt, Human
ugaccaagguguaacucug

SEQ ID NO: 863383 - RNA, 20 nt, Human
ugaccaagguguaacucugc

SEQ ID NO: 863384 - RNA, 21 nt, Human
ugacuuaaccaaugcccuaga

SEQ ID NO: 863385 - RNA, 19 nt, Human
ugagccaagauugugccac

SEQ ID NO: 863386 - RNA, 22 nt, Human
ugagccaagauugugccacuga

SEQ ID NO: 863387 - RNA, 20 nt, Human
ugaggcaggaggaucacuug

SEQ ID NO: 863388 - RNA, 24 nt, Human
ugaggcaggaggaucacuugagcc

SEQ ID NO: 863389 - RNA, 25 nt, Human
ugaggcaggaggaucacuugagccc

SEQ ID NO: 863390 - RNA, 23 nt, Human
ugaucaguauuugccgauucaac

SEQ ID NO: 863391 - RNA, 23 nt, Human
ugaucuaucauuuugaucacucc

SEQ ID NO: 863392 - RNA, 22 nt, Human
ugauuugaacaguccuuauggu

SEQ ID NO: 863393 - RNA, 23 nt, Human
ugauuugaacaguccuuaugguu

SEQ ID NO: 863394 - RNA, 18 nt, Human
uggaaauaaaccaacuuc

SEQ ID NO: 863395 - RNA, 20 nt, Human
ugggaggcugaggcaggagg

SEQ ID NO: 863396 - RNA, 24 nt, Human
ugggaggcugaggcaggaggauca

SEQ ID NO: 863397 - RNA, 22 nt, Human
uuacagccccuccacccucucu

SEQ ID NO: 863398 - RNA, 23 nt, Human
uuccaaaaccaacugaaguauga

SEQ ID NO: 863399 - RNA, 22 nt, Human
uucuaccgccucaucuucucug

SEQ ID NO: 863400 - RNA, 20 nt, Human
uucucagccucugccacuuc

SEQ ID NO: 863401 - RNA, 18 nt, Human
uucuccccuuuccuuggg

SEQ ID NO: 863402 - RNA, 21 nt, Human
uugacuacugccuccuacacu

SEQ ID NO: 863403 - RNA, 20 nt, Human
uugaugcuuaugagugugaa

SEQ ID NO: 863404 - RNA, 22 nt, Human
uugcagugagccaagauugugc

SEQ ID NO: 863405 - RNA, 19 nt, Human
uugcuacaugcuucuuucc

SEQ ID NO: 863406 - RNA, 25 nt, Human
uugggaggcugaggcaggaggauca

SEQ ID NO: 863407 - RNA, 23 nt, Human
uuuaaaacacauauauuuaaugu

SEQ ID NO: 863408 - RNA, 21 nt, Human
uuuguaacuacucuuccaaac

SEQ ID NO: 863409 - RNA, 18 nt, Human
uuuuaggccucaugaucu

SEQ ID NO: 863410 - RNA, 19 nt, Human
uuuuuugucaggggauuua

SEQ ID NO: 863411 - RNA, 20 nt, Human
uuuuuuuuuuaaaacacaua

SEQ ID NO: 863412 - RNA, 19 nt, Human
agaaggcucgggcagaguc

SEQ ID NO: 863413 - RNA, 24 nt, Human
agcgguacuuucuggcuggcuuga

SEQ ID NO: 863414 - RNA, 21 nt, Human
agggggccccuguguaggggu

SEQ ID NO: 863415 - RNA, 18 nt, Human
auggagcaaaggaguaga

SEQ ID NO: 863416 - RNA, 21 nt, Human
cagcucucaucccccagcccc

SEQ ID NO: 863417 - RNA, 20 nt, Human
cagcuucuugggggccuccu

SEQ ID NO: 863418 - RNA, 21 nt, Human
ccccuuuggugcucacuaccu

SEQ ID NO: 863419 - RNA, 19 nt, Human
ccgucgggcgccgccggcg

SEQ ID NO: 863420 - RNA, 23 nt, Human
gccucaggguuccgcacaucuuu

SEQ ID NO: 863421 - RNA, 23 nt, Human
ggaguagagaagggggacaggag

SEQ ID NO: 863422 - RNA, 18 nt, Human
gggacaggaguuaggggg

SEQ ID NO: 863423 - RNA, 19 nt, Human
gggggccccuguguagggg

SEQ ID NO: 863424 - RNA, 18 nt, Human
ucaucuccucggccucag

SEQ ID NO: 863425 - RNA, 20 nt, Human
ucccucugggaucugagccu

SEQ ID NO: 863426 - RNA, 18 nt, Human
ucgcuccccuuuggugcu

SEQ ID NO: 863427 - RNA, 24 nt, Human
ucggaucagcuucuugggggccuc

SEQ ID NO: 863428 - RNA, 22 nt, Human
ugagguugauguauguggccuu

SEQ ID NO: 863429 - RNA, 24 nt, Human
uuccgcacaucuuugaaucgcucc

SEQ ID NO: 863430 - RNA, 19 nt, Human
uuccuugggccaccuuuac

SEQ ID NO: 863431 - RNA, 22 nt, Human
uuuuuuuuuuccuugggccacc

SEQ ID NO: 863432 - RNA, 26 nt, Human
uuuuuuuuuuuuuuuuuuuccuuggg

SEQ ID NO: 863433 - RNA, 18 nt, Human
ccucgcagccuggccugg

SEQ ID NO: 863434 - RNA, 19 nt, Human
gcccaagguccuucccagc

SEQ ID NO: 863435 - RNA, 20 nt, Human
gcccucucccuccugccggg

SEQ ID NO: 863436 - RNA, 19 nt, Human
gcuggcggugugcccucuc

SEQ ID NO: 863437 - RNA, 22 nt, Human
ggguccgcggcccucgcagccu

SEQ ID NO: 863438 - RNA, 19 nt, Human
ucgcagccuggccuggggc

SEQ ID NO: 863439 - RNA, 22 nt, Human
agagaguucugcagugcccccg

SEQ ID NO: 863440 - RNA, 20 nt, Human
aggaggacccggcagcugug

SEQ ID NO: 863441 - RNA, 20 nt, Human
cagugucaagcuggcagcgc

SEQ ID NO: 863442 - RNA, 19 nt, Human
ccggcagcuguggccaccc

SEQ ID NO: 863443 - RNA, 22 nt, Human
gccgcgacccggacgcuuuggc

SEQ ID NO: 863444 - RNA, 20 nt, Human
ggaagggugaaggcauuuua

SEQ ID NO: 863445 - RNA, 20 nt, Human
uagcucugaagcucaaucau

SEQ ID NO: 863446 - RNA, 21 nt, Human
ucccacucgccgcgacccgga

SEQ ID NO: 863447 - RNA, 21 nt, Human
ucugcagugcccccgcauugg

SEQ ID NO: 863448 - RNA, 23 nt, Human
ugaagcucaaucaugacauuucu

SEQ ID NO: 863449 - RNA, 18 nt, Human
uggcuggauuccccagug

SEQ ID NO: 863450 - RNA, 21 nt, Human
uggcuggauuccccaguguca

SEQ ID NO: 863451 - RNA, 20 nt, Human
uuccccagugucaagcuggc

SEQ ID NO: 863452 - RNA, 24 nt, Human
uucucgggucccaggggccgcggg

SEQ ID NO: 863453 - RNA, 19 nt, Human
agaguugcaggacagggga

SEQ ID NO: 863454 - RNA, 25 nt, Human
agccugguucagagaagggccccaa

SEQ ID NO: 863455 - RNA, 18 nt, Human
aggccaggggagggcugg

SEQ ID NO: 863456 - RNA, 22 nt, Human
agggccccaaaagguaggccag

SEQ ID NO: 863457 - RNA, 23 nt, Human
cagaguugcaggacaggggagcc

SEQ ID NO: 863458 - RNA, 18 nt, Human
cagcaggaccaugccccu

SEQ ID NO: 863459 - RNA, 18 nt, Human
ccaggggagggcuggggg

SEQ ID NO: 863460 - RNA, 23 nt, Human
cccaggauugcccaucuuucuca

SEQ ID NO: 863461 - RNA, 21 nt, Human
ccccaaaagguaggccagggg

SEQ ID NO: 863462 - RNA, 18 nt, Human
cccugugaaugacagagu

SEQ ID NO: 863463 - RNA, 22 nt, Human
ccucaagccagcccaggauugc

SEQ ID NO: 863464 - RNA, 18 nt, Human
ccucugcccaugauuccc

SEQ ID NO: 863465 - RNA, 20 nt, Human
ccugguucagagaagggccc

SEQ ID NO: 863466 - RNA, 19 nt, Human
cucugcccaugauucccuc

SEQ ID NO: 863467 - RNA, 21 nt, Human
gacuugcuucuggcugggcug

SEQ ID NO: 863468 - RNA, 20 nt, Human
gagggcugggggcugggacu

SEQ ID NO: 863469 - RNA, 22 nt, Human
gcugggggcugggacuugcuuc

SEQ ID NO: 863470 - RNA, 21 nt, Human
ggagggcugggggcugggacu

SEQ ID NO: 863471 - RNA, 20 nt, Human
gggcugggggcugggacuug

SEQ ID NO: 863472 - RNA, 27 nt, Human
ggggcugggacuugcuucuggcugggc

SEQ ID NO: 863473 - RNA, 19 nt, Human
uaaucucuggccccauccc

SEQ ID NO: 863474 - RNA, 23 nt, Human
uccagacauuuacugucuagacu

SEQ ID NO: 863475 - RNA, 27 nt, Human
ucucacaacaccccugugucacaugaa

SEQ ID NO: 863476 - RNA, 18 nt, Human
ucucuggccccaucccag

SEQ ID NO: 863477 - RNA, 23 nt, Human
ucuggccccaucccagcucucac

SEQ ID NO: 863478 - RNA, 20 nt, Human
ugucuagacuggcuacggga

SEQ ID NO: 863479 - RNA, 21 nt, Human
uucauccuagugucucagaug

SEQ ID NO: 863480 - RNA, 21 nt, Human
uuuacugucuagacuggcuac

SEQ ID NO: 863481 - RNA, 21 nt, Human
aaagacugaagcucuaaauaa

SEQ ID NO: 863482 - RNA, 23 nt, Human
aagaaugaagggugauggcacaa

SEQ ID NO: 863483 - RNA, 20 nt, Human
aagagcccucugccuucccg

SEQ ID NO: 863484 - RNA, 23 nt, Human
aaucuucuggguccucuuuauua

SEQ ID NO: 863485 - RNA, 22 nt, Human
accuacacauaugaaaaaaaua

SEQ ID NO: 863486 - RNA, 26 nt, Human
acucaauugggguccagcucccaacu

SEQ ID NO: 863487 - RNA, 19 nt, Human
agaguuccugcaccccaua

SEQ ID NO: 863488 - RNA, 18 nt, Human
aggcaaagguccagggca

SEQ ID NO: 863489 - RNA, 19 nt, Human
caacuuugcugccccaucc

SEQ ID NO: 863490 - RNA, 21 nt, Human
caccagcccgguccucaaaau

SEQ ID NO: 863491 - RNA, 19 nt, Human
caccucaccuuuccugccc

SEQ ID NO: 863492 - RNA, 22 nt, Human
cagcaacaccucaccuuuccug

SEQ ID NO: 863493 - RNA, 19 nt, Human
cagggcccccgugguuucc

SEQ ID NO: 863494 - RNA, 23 nt, Human
caguaguauagucgcaccagccc

SEQ ID NO: 863495 - RNA, 19 nt, Human
cccagaguuccugcacccc

SEQ ID NO: 863496 - RNA, 22 nt, Human
cccauagcccauggcauccauc

SEQ ID NO: 863497 - RNA, 20 nt, Human
ccccaaaagcccaaguugcu

SEQ ID NO: 863498 - RNA, 19 nt, Human
ccccagagagaagugggau

SEQ ID NO: 863499 - RNA, 23 nt, Human
ccccauccccaaaagcccaaguu

SEQ ID NO: 863500 - RNA, 18 nt, Human
ccccgugguuuccgcgcc

SEQ ID NO: 863501 - RNA, 18 nt, Human
ccgcgcccuuuugccaga

SEQ ID NO: 863502 - RNA, 21 nt, Human
ccgcuggcuacagcgccgccc

SEQ ID NO: 863503 - RNA, 22 nt, Human
ccuaccagccacagagccaccc

SEQ ID NO: 863504 - RNA, 18 nt, Human
cgccgccccagagagaag

SEQ ID NO: 863505 - RNA, 19 nt, Human
cucaccuuuccugccccca

SEQ ID NO: 863506 - RNA, 22 nt, Human
cuucagggcccccagaguuccu

SEQ ID NO: 863507 - RNA, 23 nt, Human
cuucagggcccccagaguuccug

SEQ ID NO: 863508 - RNA, 19 nt, Human
gaagggugauggcacaauc

SEQ ID NO: 863509 - RNA, 19 nt, Human
gagggcugccuuucgcugc

SEQ ID NO: 863510 - RNA, 20 nt, Human
gccccauccccaaaagccca

SEQ ID NO: 863511 - RNA, 26 nt, Human
gcgccgccccagagagaagggaacgc

SEQ ID NO: 863512 - RNA, 22 nt, Human
gggaagaaugaagggugauggc

SEQ ID NO: 863513 - RNA, 21 nt, Human
gggaauaagggagacacaaac

SEQ ID NO: 863514 - RNA, 24 nt, Human
ggggagggaagcaaauccuucagg

SEQ ID NO: 863515 - RNA, 20 nt, Human
gggguccagcucccaacuuu

SEQ ID NO: 863516 - RNA, 24 nt, Human
uaacugggaauaagggagacacaa

SEQ ID NO: 863517 - RNA, 23 nt, Human
ucacgaaggcccugugugcucca

SEQ ID NO: 863518 - RNA, 20 nt, Human
uccagggcaauuugcuccca

SEQ ID NO: 863519 - RNA, 23 nt, Human
uccuaccagccacagagccaccc

SEQ ID NO: 863520 - RNA, 23 nt, Human
ucucagggcccccgugguuuccg

SEQ ID NO: 863521 - RNA, 22 nt, Human
ucugccuucccaggggagggaa

SEQ ID NO: 863522 - RNA, 19 nt, Human
ucugggaagaaugaagggu

SEQ ID NO: 863523 - RNA, 18 nt, Human
ugaagggugauggcacaa

SEQ ID NO: 863524 - RNA, 18 nt, Human
ugccccauccccaaaagc

SEQ ID NO: 863525 - RNA, 23 nt, Human
ugcccccauucaggcaaagguug

SEQ ID NO: 863526 - RNA, 21 nt, Human
ugggaagaaugaagggugaug

SEQ ID NO: 863527 - RNA, 19 nt, Human
ugggacccuuagcagaggg

SEQ ID NO: 863528 - RNA, 25 nt, Human
uuuuuuuuuuuaacaaaagaucuca

SEQ ID NO: 863529 - RNA, 18 nt, Human
uuuuuuuuuuuuucccug

SEQ ID NO: 863530 - RNA, 22 nt, Human
uuuuuuuuuuuuuucccuguuu

SEQ ID NO: 863531 - RNA, 21 nt, Human
aaggcuagguguggggagcag

SEQ ID NO: 863532 - RNA, 21 nt, Human
aaggggcagcagggauugcaa

SEQ ID NO: 863533 - RNA, 19 nt, Human
acccuggguggcuaagggg

SEQ ID NO: 863534 - RNA, 24 nt, Human
accuggucucaggucacucugugc

SEQ ID NO: 863535 - RNA, 23 nt, Human
acuaaaguaggcaaggaaagcca

SEQ ID NO: 863536 - RNA, 22 nt, Human
agacccuggguggcuaaggggc

SEQ ID NO: 863537 - RNA, 21 nt, Human
agccagcuccaguggcucugc

SEQ ID NO: 863538 - RNA, 20 nt, Human
aggaucagaggcaucuacca

SEQ ID NO: 863539 - RNA, 21 nt, Human
aggcaggggcaggccccagag

SEQ ID NO: 863540 - RNA, 18 nt, Human
aggcuguugggagcuggg

SEQ ID NO: 863541 - RNA, 19 nt, Human
aggguccggaaucagggug

SEQ ID NO: 863542 - RNA, 23 nt, Human
auagcaaauggaugacagcuggg

SEQ ID NO: 863543 - RNA, 23 nt, Human
caaccuccagagaauaaccuggc

SEQ ID NO: 863544 - RNA, 18 nt, Human
caacugggccuucuugca

SEQ ID NO: 863545 - RNA, 20 nt, Human
caagacagcccucaggguga

SEQ ID NO: 863546 - RNA, 23 nt, Human
cacacaagacccuggguggcuaa

SEQ ID NO: 863547 - RNA, 19 nt, Human
cacacuucacaucuccuag

SEQ ID NO: 863548 - RNA, 22 nt, Human
cacagcaaagcccaauacugcu

SEQ ID NO: 863549 - RNA, 22 nt, Human
caccacauagccagccaggaau

SEQ ID NO: 863550 - RNA, 18 nt, Human
cagaacaaaggcuaggug

SEQ ID NO: 863551 - RNA, 18 nt, Human
cagcgagccauccuggcc

SEQ ID NO: 863552 - RNA, 20 nt, Human
cagcgagccauccuggccca

SEQ ID NO: 863553 - RNA, 18 nt, Human
caggccccagagugggaa

SEQ ID NO: 863554 - RNA, 19 nt, Human
caggccccagagugggaag

SEQ ID NO: 863555 - RNA, 25 nt, Human
caggcugaggaacuacuguccacaa

SEQ ID NO: 863556 - RNA, 23 nt, Human
caguuuggccaccacauagccag

SEQ ID NO: 863557 - RNA, 18 nt, Human
cauccugccucuuccaug

SEQ ID NO: 863558 - RNA, 18 nt, Human
cauccugccucuuccaug

SEQ ID NO: 863559 - RNA, 25 nt, Human
cauccugccucuuccauggcaccua

SEQ ID NO: 863560 - RNA, 24 nt, Human
ccaaacccacacuucacaucuccu

SEQ ID NO: 863561 - RNA, 22 nt, Human
ccacagcaaagcccaauacugc

SEQ ID NO: 863562 - RNA, 19 nt, Human
ccaccugaaggcugagcug

SEQ ID NO: 863563 - RNA, 21 nt, Human
ccaggaaggagaagccgugga

SEQ ID NO: 863564 - RNA, 19 nt, Human
cccacacaagacccugggu

SEQ ID NO: 863565 - RNA, 18 nt, Human
cccaggggcuacauuccc

SEQ ID NO: 863566 - RNA, 18 nt, Human
cccauggagcuaggaagg

SEQ ID NO: 863567 - RNA, 23 nt, Human
ccccuugcguagcaacugcaaau

SEQ ID NO: 863568 - RNA, 21 nt, Human
cccuucauccaccaaccucca

SEQ ID NO: 863569 - RNA, 22 nt, Human
cccuucauccaccaaccuccag

SEQ ID NO: 863570 - RNA, 19 nt, Human
ccuagagcuagucgggccc

SEQ ID NO: 863571 - RNA, 23 nt, Human
ccucacuucuccagcuuuucuca

SEQ ID NO: 863572 - RNA, 23 nt, Human
ccuccagagaauaaccuggcugc

SEQ ID NO: 863573 - RNA, 21 nt, Human
ccuuaaccaaacccacacuuc

SEQ ID NO: 863574 - RNA, 18 nt, Human
ccuugaagccacagucuu

SEQ ID NO: 863575 - RNA, 21 nt, Human
cuacagguuuccuguaccugg

SEQ ID NO: 863576 - RNA, 25 nt, Human
cucagggugaacagagaggucagga

SEQ ID NO: 863577 - RNA, 19 nt, Human
cucugugcagagcuucccc

SEQ ID NO: 863578 - RNA, 18 nt, Human
cugcaggcuuuccagcug

SEQ ID NO: 863579 - RNA, 22 nt, Human
cugcaggcuuuccagcugguuc

SEQ ID NO: 863580 - RNA, 22 nt, Human
cugggagggggaucugguggug

SEQ ID NO: 863581 - RNA, 18 nt, Human
cuguggcaacugggccuu

SEQ ID NO: 863582 - RNA, 23 nt, Human
cuuaggcagagaauccuugucau

SEQ ID NO: 863583 - RNA, 23 nt, Human
cuugaagaguaaggggcuggugg

SEQ ID NO: 863584 - RNA, 18 nt, Human
gaggaacuacuguccaca

SEQ ID NO: 863585 - RNA, 22 nt, Human
gaggaaggccugggagggggau

SEQ ID NO: 863586 - RNA, 20 nt, Human
gagggggaucuggugguggc

SEQ ID NO: 863587 - RNA, 23 nt, Human
gcagagcuuccccaggcuguugg

SEQ ID NO: 863588 - RNA, 24 nt, Human
gcagagcuuccccaggcuguuggg

SEQ ID NO: 863589 - RNA, 18 nt, Human
gcccacagcaaagcccaa

SEQ ID NO: 863590 - RNA, 19 nt, Human
gcugaugggagagggagga

SEQ ID NO: 863591 - RNA, 20 nt, Human
ggaagaacuugguugggggu

SEQ ID NO: 863592 - RNA, 23 nt, Human
ggaagaacuugguuggggguggg

SEQ ID NO: 863593 - RNA, 25 nt, Human
ggaaucaggguggaaguugucaggg

SEQ ID NO: 863594 - RNA, 19 nt, Human
ggagacugcuaggcagggg

SEQ ID NO: 863595 - RNA, 18 nt, Human
ggaggaaggccugggagg

SEQ ID NO: 863596 - RNA, 24 nt, Human
gggagcagcacuguggagagggca

SEQ ID NO: 863597 - RNA, 20 nt, Human
gggaucuggugguggcgccc

SEQ ID NO: 863598 - RNA, 21 nt, Human
ggguggcuaaggggcagcagg

SEQ ID NO: 863599 - RNA, 20 nt, Human
gguccuugaagccacagucu

SEQ ID NO: 863600 - RNA, 21 nt, Human
gucuuggggcgagucccaugg

SEQ ID NO: 863601 - RNA, 25 nt, Human
uaagccagggcccaggggcuacauu

SEQ ID NO: 863602 - RNA, 19 nt, Human
uacagguuuccuguaccug

SEQ ID NO: 863603 - RNA, 22 nt, Human
uaccuccuaggagccucagagu

SEQ ID NO: 863604 - RNA, 21 nt, Human
uaccuuaauucuuuagucugg

SEQ ID NO: 863605 - RNA, 18 nt, Human
uauggagccagcucccag

SEQ ID NO: 863606 - RNA, 27 nt, Human
uccagagaauaaccuggcugcccucac

SEQ ID NO: 863607 - RNA, 19 nt, Human
uccagggugcaggcugagg

SEQ ID NO: 863608 - RNA, 18 nt, Human
ucccaggaaggagaagcc

SEQ ID NO: 863609 - RNA, 20 nt, Human
ucccaggaaggagaagccgu

SEQ ID NO: 863610 - RNA, 26 nt, Human
ucccugagaugagucaagcccagccc

SEQ ID NO: 863611 - RNA, 19 nt, Human
ucccuuauggaagagucau

SEQ ID NO: 863612 - RNA, 18 nt, Human
uccgccaucuuccccgcc

SEQ ID NO: 863613 - RNA, 19 nt, Human
uccgccaucuuccccgccc

SEQ ID NO: 863614 - RNA, 24 nt, Human
ucgggccccuugcguagcaacugc

SEQ ID NO: 863615 - RNA, 18 nt, Human
ucuccaccugaaggcuga

SEQ ID NO: 863616 - RNA, 18 nt, Human
ucuccagcuuuucucaca

SEQ ID NO: 863617 - RNA, 21 nt, Human
ucuccagcuuuucucacaagg

SEQ ID NO: 863618 - RNA, 23 nt, Human
ucugggguuuccagaacaaaggc

SEQ ID NO: 863619 - RNA, 19 nt, Human
ugaacagagaggucaggag

SEQ ID NO: 863620 - RNA, 18 nt, Human
ugaagaguaaggggcugg

SEQ ID NO: 863621 - RNA, 23 nt, Human
ugagaugagucaagcccagcccu

SEQ ID NO: 863622 - RNA, 18 nt, Human
ugcaccauggcugggcug

SEQ ID NO: 863623 - RNA, 19 nt, Human
ugcccucacuucuccagcu

SEQ ID NO: 863624 - RNA, 19 nt, Human
ugcucauccugccucuucc

SEQ ID NO: 863625 - RNA, 24 nt, Human
ugcucauccugccucuuccauggc

SEQ ID NO: 863626 - RNA, 20 nt, Human
uggaagaacuugguuggggg

SEQ ID NO: 863627 - RNA, 21 nt, Human
uggaagggugaggaucccuua

SEQ ID NO: 863628 - RNA, 19 nt, Human
uggagcuaggaaggggaag

SEQ ID NO: 863629 - RNA, 18 nt, Human
uggcugggcuggacuagc

SEQ ID NO: 863630 - RNA, 18 nt, Human
ugggagacugcuaggcag

SEQ ID NO: 863631 - RNA, 21 nt, Human
ugggagggggaucugguggug

SEQ ID NO: 863632 - RNA, 21 nt, Human
ugggagggggaucugguggug

SEQ ID NO: 863633 - RNA, 20 nt, Human
ugggggugggggaugguaag

SEQ ID NO: 863634 - RNA, 21 nt, Human
ugggggugggggaugguaagc

SEQ ID NO: 863635 - RNA, 22 nt, Human
uggguggcuaaggggcagcagg

SEQ ID NO: 863636 - RNA, 21 nt, Human
ugguugggggugggggauggu

SEQ ID NO: 863637 - RNA, 22 nt, Human
uguuacagggcugcugauggga

SEQ ID NO: 863638 - RNA, 18 nt, Human
uuaaagagacacugauug

SEQ ID NO: 863639 - RNA, 23 nt, Human
uuuuuuuuuuuuuuuugcugugg

SEQ ID NO: 863640 - RNA, 20 nt, Human
uuuuuuuuuuuuuuuuugcu

SEQ ID NO: 863641 - RNA, 24 nt, Human
uuuuuuuuuuuuuuuuugcugugg

SEQ ID NO: 863642 - RNA, 21 nt, Human
uuuuuuuuuuuuuuuuuuugg

SEQ ID NO: 863643 - RNA, 21 nt, Human
aaacacaaagcccccacguuc

SEQ ID NO: 863644 - RNA, 18 nt, Human
aaagcccccacguucccc

SEQ ID NO: 863645 - RNA, 25 nt, Human
aaauagugagugaaaaguacaaaac

SEQ ID NO: 863646 - RNA, 19 nt, Human
aacacuccuguuucuccaa

SEQ ID NO: 863647 - RNA, 24 nt, Human
aagccugaguuccuacugcccaaa

SEQ ID NO: 863648 - RNA, 19 nt, Human
aaggagcaggcucugcugu

SEQ ID NO: 863649 - RNA, 24 nt, Human
aaggaucacucacagcccagaagc

SEQ ID NO: 863650 - RNA, 25 nt, Human
aaggaucacucacagcccagaagcc

SEQ ID NO: 863651 - RNA, 25 nt, Human
aaguaucaaaggaucacucacagcc

SEQ ID NO: 863652 - RNA, 19 nt, Human
aauugcuguacagucaucu

SEQ ID NO: 863653 - RNA, 19 nt, Human
acaaaacacaaagccccca

SEQ ID NO: 863654 - RNA, 27 nt, Human
acaaaacacaaagcccccacguucccc

SEQ ID NO: 863655 - RNA, 23 nt, Human
acacaaauucuaaaacaugaagc

SEQ ID NO: 863656 - RNA, 18 nt, Human
acagcccagaagccccaa

SEQ ID NO: 863657 - RNA, 20 nt, Human
acuagauaagugaacacucc

SEQ ID NO: 863658 - RNA, 21 nt, Human
agcucagucucucccaccccc

SEQ ID NO: 863659 - RNA, 25 nt, Human
aggaucacucacagcccagaagccc

SEQ ID NO: 863660 - RNA, 21 nt, Human
auaguuuuuaaucauaagcuu

SEQ ID NO: 863661 - RNA, 24 nt, Human
caaaacacaaagcccccacguucc

SEQ ID NO: 863662 - RNA, 18 nt, Human
caaaggaucacucacagc

SEQ ID NO: 863663 - RNA, 19 nt, Human
cacguacuccaagcucagc

SEQ ID NO: 863664 - RNA, 22 nt, Human
cacugcagaccagaagccugag

SEQ ID NO: 863665 - RNA, 22 nt, Human
cagccucucggccagcggcccc

SEQ ID NO: 863666 - RNA, 23 nt, Human
cccagaagccccaaauuagugac

SEQ ID NO: 863667 - RNA, 19 nt, Human
ccccaaauuagugacaagg

SEQ ID NO: 863668 - RNA, 19 nt, Human
ccucucggccagcggcccc

SEQ ID NO: 863669 - RNA, 18 nt, Human
cgccucagccucucggcc

SEQ ID NO: 863670 - RNA, 20 nt, Human
cuacugcccaaacugguucu

SEQ ID NO: 863671 - RNA, 24 nt, Human
cucacagcccagaagccccaaauu

SEQ ID NO: 863672 - RNA, 21 nt, Human
cugcuguuccaagcgacucag

SEQ ID NO: 863673 - RNA, 23 nt, Human
gaaaaguacaaaacacaaagccc

SEQ ID NO: 863674 - RNA, 20 nt, Human
gagcaggcucugcuguucca

SEQ ID NO: 863675 - RNA, 24 nt, Human
gaggcgaacaggcuccacugcaga

SEQ ID NO: 863676 - RNA, 19 nt, Human
gccgccucagccucucggc

SEQ ID NO: 863677 - RNA, 21 nt, Human
guacaaaacacaaagccccca

SEQ ID NO: 863678 - RNA, 23 nt, Human
uacugcccaaacugguucugugg

SEQ ID NO: 863679 - RNA, 21 nt, Human
uaugcuaaaaauaguuuagca

SEQ ID NO: 863680 - RNA, 22 nt, Human
ucagucucucccacccccaauu

SEQ ID NO: 863681 - RNA, 20 nt, Human
uccacugcagaccagaagcu

SEQ ID NO: 863682 - RNA, 18 nt, Human
ucccagcacaagcaggau

SEQ ID NO: 863683 - RNA, 18 nt, Human
ucuaaaacaugaagcugu

SEQ ID NO: 863684 - RNA, 20 nt, Human
ucugugaaacaggcuaaggc

SEQ ID NO: 863685 - RNA, 18 nt, Human
ugaaaaguacaaaacaca

SEQ ID NO: 863686 - RNA, 23 nt, Human
ugagugaaaaguacaaaacacaa

SEQ ID NO: 863687 - RNA, 19 nt, Human
ugaguuccuacugcccaaa

SEQ ID NO: 863688 - RNA, 23 nt, Human
ugcacuagauaagugaacacucc

SEQ ID NO: 863689 - RNA, 22 nt, Human
ugcccaaacugguucuguggaa

SEQ ID NO: 863690 - RNA, 20 nt, Human
ugugaaacaggcuaaggcaa

SEQ ID NO: 863691 - RNA, 21 nt, Human
ugugaaacaggcuaaggcaag

SEQ ID NO: 863692 - RNA, 18 nt, Human
uuuuuuuuuuuuuuguuc

SEQ ID NO: 863693 - RNA, 18 nt, Human
uuuuuuuuuuuuuuuuug

SEQ ID NO: 863694 - RNA, 20 nt, Human
uuuuuuuuuuuuuuuuuguu

SEQ ID NO: 863695 - RNA, 21 nt, Human
agcgggaggaggaggagcugg

SEQ ID NO: 863696 - RNA, 23 nt, Human
aggagccggcuggacugcgggag

SEQ ID NO: 863697 - RNA, 21 nt, Human
agggcuccgggaggcgcgggg

SEQ ID NO: 863698 - RNA, 18 nt, Human
cagcgcgccuucucggcg

SEQ ID NO: 863699 - RNA, 18 nt, Human
cccccucucccuccucuc

SEQ ID NO: 863700 - RNA, 21 nt, Human
ccccgcgccggcgcugcgcuc

SEQ ID NO: 863701 - RNA, 21 nt, Human
ccccgggagcaggagcagcgg

SEQ ID NO: 863702 - RNA, 23 nt, Human
cccgccucucccuggacuccucc

SEQ ID NO: 863703 - RNA, 20 nt, Human
cccucucccuccucucccuc

SEQ ID NO: 863704 - RNA, 22 nt, Human
ccgcgccggcgcugcgcucugc

SEQ ID NO: 863705 - RNA, 18 nt, Human
ccgcugcguguccagccc

SEQ ID NO: 863706 - RNA, 24 nt, Human
ccuggacuccuccccucccccucu

SEQ ID NO: 863707 - RNA, 18 nt, Human
cgggagcaggagcagcgg

SEQ ID NO: 863708 - RNA, 19 nt, Human
cgggaggaggaggagcugg

SEQ ID NO: 863709 - RNA, 24 nt, Human
cgggcugcuccccugcgcugcguu

SEQ ID NO: 863710 - RNA, 22 nt, Human
cucccccucucccuccucuccc

SEQ ID NO: 863711 - RNA, 20 nt, Human
gacugcgggagugccgggcg

SEQ ID NO: 863712 - RNA, 21 nt, Human
gagcaggagcagcgggaggaa

SEQ ID NO: 863713 - RNA, 22 nt, Human
gagccguggccgggcuagagga

SEQ ID NO: 863714 - RNA, 20 nt, Human
gaggaggagcuggcgcggcg

SEQ ID NO: 863715 - RNA, 18 nt, Human
gagugccgggcggcucgc

SEQ ID NO: 863716 - RNA, 20 nt, Human
gaucccgccucucccuggac

SEQ ID NO: 863717 - RNA, 21 nt, Human
gccccgggagcaggagcagcg

SEQ ID NO: 863718 - RNA, 23 nt, Human
gccggcgcugcgcucugcgaugc

SEQ ID NO: 863719 - RNA, 27 nt, Human
gcgcaugggagcagcgggggggaggag

SEQ ID NO: 863720 - RNA, 18 nt, Human
gcgcggggcgggcucggg

SEQ ID NO: 863721 - RNA, 20 nt, Human
ggagcagcgggggggagggc

SEQ ID NO: 863722 - RNA, 24 nt, Human
ggccgugaucccgccucucccugg

SEQ ID NO: 863723 - RNA, 21 nt, Human
gggagcagcgggggggagggc

SEQ ID NO: 863724 - RNA, 22 nt, Human
gggagcagcgggggggagggcu

SEQ ID NO: 863725 - RNA, 21 nt, Human
gggaggugaaaguggggagaa

SEQ ID NO: 863726 - RNA, 18 nt, Human
gggagugccgggcggcuc

SEQ ID NO: 863727 - RNA, 20 nt, Human
gggggagggcuccgggaggc

SEQ ID NO: 863728 - RNA, 20 nt, Human
gggggggagggcuccgggag

SEQ ID NO: 863729 - RNA, 22 nt, Human
uagaggagccggcuggacugcg

SEQ ID NO: 863730 - RNA, 22 nt, Human
uauaaaguuuggguggggaggu

SEQ ID NO: 863731 - RNA, 18 nt, Human
ucagcagccugggccgug

SEQ ID NO: 863732 - RNA, 22 nt, Human
uccccucccccucucccuccuc

SEQ ID NO: 863733 - RNA, 18 nt, Human
ucccucgcucgcccuccc

SEQ ID NO: 863734 - RNA, 18 nt, Human
ucccuggacuccuccccu

SEQ ID NO: 863735 - RNA, 23 nt, Human
ucccuggacuccuccccuccccc

SEQ ID NO: 863736 - RNA, 20 nt, Human
ucgccccgggagcaggagcu

SEQ ID NO: 863737 - RNA, 23 nt, Human
ucgcggccccgcgccggcgcugc

SEQ ID NO: 863738 - RNA, 22 nt, Human
ugaaaguggggagaaggggagu

SEQ ID NO: 863739 - RNA, 23 nt, Human
ugcgcugcguucucgcggccccg

SEQ ID NO: 863740 - RNA, 19 nt, Human
ugggagcagcgggggggag

SEQ ID NO: 863741 - RNA, 21 nt, Human
uggggaggugaaaguggggag

SEQ ID NO: 863742 - RNA, 24 nt, Human
uggggaggugaaaguggggagaag

SEQ ID NO: 863743 - RNA, 24 nt, Human
uuccuuucguggcccgaguccucc

SEQ ID NO: 863744 - RNA, 21 nt, Human
uucguggcccgaguccucccc

SEQ ID NO: 863745 - RNA, 20 nt, Human
uuuauaaaguuugggugggg

SEQ ID NO: 863746 - RNA, 21 nt, Human
uuuuauaaaguuugggugggg

SEQ ID NO: 863747 - RNA, 24 nt, Human
uuuuauaaaguuuggguggggagg

SEQ ID NO: 863748 - RNA, 29 nt, Human
uuuuuuuuuuuuuuuuuuuucuauaaaaa

SEQ ID NO: 863749 - RNA, 21 nt, Human
aaaaaaaaaaaaaagcaauug

SEQ ID NO: 863750 - RNA, 22 nt, Human
aaaagcauuuucuauuuuaaaa

SEQ ID NO: 863751 - RNA, 19 nt, Human
aaacgagcacaucuaagca

SEQ ID NO: 863752 - RNA, 23 nt, Human
aaugcaaaaaaaaaaaaaagcaa

SEQ ID NO: 863753 - RNA, 19 nt, Human
acaaaugcaaaaaaaaaaa

SEQ ID NO: 863754 - RNA, 24 nt, Human
acaaaugcaaaaaaaaaaaaaagc

SEQ ID NO: 863755 - RNA, 18 nt, Human
agauguaaaacuaugacc

SEQ ID NO: 863756 - RNA, 22 nt, Human
agguuugaggcagcuguacugc

SEQ ID NO: 863757 - RNA, 19 nt, Human
augguaacagaguaaaugc

SEQ ID NO: 863758 - RNA, 19 nt, Human
auuacugauuucccucuaa

SEQ ID NO: 863759 - RNA, 21 nt, Human
caaccucuagaauuuuagaaa

SEQ ID NO: 863760 - RNA, 27 nt, Human
cagcucaggccgaaccccgccggcgag

SEQ ID NO: 863761 - RNA, 25 nt, Human
cauucaugagcugauuauaucaacc

SEQ ID NO: 863762 - RNA, 22 nt, Human
ccucuagaauuuuagaaacgag

SEQ ID NO: 863763 - RNA, 20 nt, Human
cguggaacuccagaccacuc

SEQ ID NO: 863764 - RNA, 24 nt, Human
cuuaaagcacuauuaagucaugaa

SEQ ID NO: 863765 - RNA, 19 nt, Human
ggagagguggccucugguc

SEQ ID NO: 863766 - RNA, 21 nt, Human
guaaaacuaugaccaacagaa

SEQ ID NO: 863767 - RNA, 18 nt, Human
uaaaaagagacucaagug

SEQ ID NO: 863768 - RNA, 21 nt, Human
uaacaaaugcaaaaaaaaaaa

SEQ ID NO: 863769 - RNA, 22 nt, Human
uaacaaaugcaaaaaaaaaaaa

SEQ ID NO: 863770 - RNA, 24 nt, Human
uaacaaaugcaaaaaaaaaaaaaa

SEQ ID NO: 863771 - RNA, 23 nt, Human
uagaauuuuagaaacgagcacau

SEQ ID NO: 863772 - RNA, 18 nt, Human
uaugucaauccagcucag

SEQ ID NO: 863773 - RNA, 21 nt, Human
uauucccagcaaccaucgcau

SEQ ID NO: 863774 - RNA, 24 nt, Human
ucagauguaaaacuaugaccaaca

SEQ ID NO: 863775 - RNA, 27 nt, Human
uccaaaaaaucaauaauccauucugua

SEQ ID NO: 863776 - RNA, 19 nt, Human
uccacaguuucagguauuc

SEQ ID NO: 863777 - RNA, 26 nt, Human
ucccaaagguuugaggcagcuguacu

SEQ ID NO: 863778 - RNA, 18 nt, Human
ucccagcaaccaucgcau

SEQ ID NO: 863779 - RNA, 23 nt, Human
uccuagaggucaaauaauauacc

SEQ ID NO: 863780 - RNA, 24 nt, Human
ucucuuaccuuacaaaguaaaagc

SEQ ID NO: 863781 - RNA, 22 nt, Human
ugaccaacagaagacacccaaa

SEQ ID NO: 863782 - RNA, 22 nt, Human
uguuauguacaaucuaucacaa

SEQ ID NO: 863783 - RNA, 20 nt, Human
uuaaagucucaacuuccaaa

SEQ ID NO: 863784 - RNA, 19 nt, Human
uuucccucuaaaaagagac

SEQ ID NO: 863785 - RNA, 23 nt, Human
uuuuuuuuuuucuuccuuauuuu

SEQ ID NO: 863786 - RNA, 24 nt, Human
aaagugcugagauuacaggcguga

SEQ ID NO: 863787 - RNA, 24 nt, Human
aaagugcugggauuacagguguga

SEQ ID NO: 863788 - RNA, 24 nt, Human
aaagugcugggauuauaggcguga

SEQ ID NO: 863789 - RNA, 24 nt, Human
aaauuguugggauuacagguauga

SEQ ID NO: 863790 - RNA, 23 nt, Human
aacugguucgaacuccugagcuc

SEQ ID NO: 863791 - RNA, 23 nt, Human
aagcgucgcaugccucagccucc

SEQ ID NO: 863792 - RNA, 23 nt, Human
aagcucagccucccgaguagcug

SEQ ID NO: 863793 - RNA, 19 nt, Human
aaggagcugggauuacagg

SEQ ID NO: 863794 - RNA, 24 nt, Human
aagugauccacccgccucggccuc

SEQ ID NO: 863795 - RNA, 26 nt, Human
aagugcugagauuacaggcgugagcc

SEQ ID NO: 863796 - RNA, 18 nt, Human
aagugcugggauuacagg

SEQ ID NO: 863797 - RNA, 19 nt, Human
aagugcugggauuacaggu

SEQ ID NO: 863798 - RNA, 26 nt, Human
aagugcugggauuacaggugugagcc

SEQ ID NO: 863799 - RNA, 19 nt, Human
aagugcugggauuauaggc

SEQ ID NO: 863800 - RNA, 19 nt, Human
aagugcugggauuauaggc

SEQ ID NO: 863801 - RNA, 26 nt, Human
aagugcugggauuauaggcgugagcc

SEQ ID NO: 863802 - RNA, 19 nt, Human
acaggcacccuccaccucc

SEQ ID NO: 863803 - RNA, 20 nt, Human
acaggcacccuccaccuccc

SEQ ID NO: 863804 - RNA, 18 nt, Human
acaggguuucaccauguu

SEQ ID NO: 863805 - RNA, 18 nt, Human
acaggguuucaccauguu

SEQ ID NO: 863806 - RNA, 19 nt, Human
acaggguuucaccauguuu

SEQ ID NO: 863807 - RNA, 21 nt, Human
acaggguuucaccauguuugg

SEQ ID NO: 863808 - RNA, 25 nt, Human
acaggguuucaccauguuuggccag

SEQ ID NO: 863809 - RNA, 19 nt, Human
acaggguuuugccauguug

SEQ ID NO: 863810 - RNA, 20 nt, Human
acaggguuuugccauguugu

SEQ ID NO: 863811 - RNA, 24 nt, Human
acaggguuuugccauguuguccag

SEQ ID NO: 863812 - RNA, 24 nt, Human
accauguugggcaggauggucucg

SEQ ID NO: 863813 - RNA, 23 nt, Human
accauguuuggccaggcuggucu

SEQ ID NO: 863814 - RNA, 19 nt, Human
acccagugcuugggcuuua

SEQ ID NO: 863815 - RNA, 24 nt, Human
acccugcccccaaacaggccaugg

SEQ ID NO: 863816 - RNA, 21 nt, Human
accuggacucuggcuggguca

SEQ ID NO: 863817 - RNA, 18 nt, Human
acgggguuucaccauguu

SEQ ID NO: 863818 - RNA, 23 nt, Human
acgggguuucaccauguugggca

SEQ ID NO: 863819 - RNA, 24 nt, Human
acgggguuucaccauguugggcag

SEQ ID NO: 863820 - RNA, 18 nt, Human
acuaacauaguuaacacc

SEQ ID NO: 863821 - RNA, 21 nt, Human
acuacaggcgcaugcuaccau

SEQ ID NO: 863822 - RNA, 18 nt, Human
agacaggguuucaccaug

SEQ ID NO: 863823 - RNA, 18 nt, Human
agacaggguuuugccaug

SEQ ID NO: 863824 - RNA, 23 nt, Human
agauuacaggcgugagccagugc

SEQ ID NO: 863825 - RNA, 23 nt, Human
agcagcugggauuacaggugcgu

SEQ ID NO: 863826 - RNA, 18 nt, Human
agccuccagagcagcugg

SEQ ID NO: 863827 - RNA, 19 nt, Human
agcucagccucccgaguag

SEQ ID NO: 863828 - RNA, 18 nt, Human
agcuuccacaucauuccc

SEQ ID NO: 863829 - RNA, 20 nt, Human
agcuucccaaagagcuggga

SEQ ID NO: 863830 - RNA, 19 nt, Human
aggaagauguggggcuucu

SEQ ID NO: 863831 - RNA, 25 nt, Human
aggcacccuccaucaugccuggggg

SEQ ID NO: 863832 - RNA, 24 nt, Human
aggcaggcggcccacagugcccca

SEQ ID NO: 863833 - RNA, 26 nt, Human
aggcaggcggcccacagugccccagg

SEQ ID NO: 863834 - RNA, 18 nt, Human
aggcaggguuucgccaug

SEQ ID NO: 863835 - RNA, 23 nt, Human
aggcaggguuucgccauguugcc

SEQ ID NO: 863836 - RNA, 19 nt, Human
aggcgugagccaccgcacc

SEQ ID NO: 863837 - RNA, 25 nt, Human
aggcuggagugcaguggcgcaaucu

SEQ ID NO: 863838 - RNA, 25 nt, Human
aggcuggagugcaguggcgcgaucu

SEQ ID NO: 863839 - RNA, 25 nt, Human
aggcuggagugcaguggugcgaucu

SEQ ID NO: 863840 - RNA, 22 nt, Human
aggugauccgcccaccuuggcc

SEQ ID NO: 863841 - RNA, 23 nt, Human
aggugugagccaccgugccuggc

SEQ ID NO: 863842 - RNA, 22 nt, Human
aguagaaacgggguuucaccau

SEQ ID NO: 863843 - RNA, 18 nt, Human
aguagcuggcauuacagg

SEQ ID NO: 863844 - RNA, 18 nt, Human
aguagcugggacuacagg

SEQ ID NO: 863845 - RNA, 19 nt, Human
aguagcugggacuacaggc

SEQ ID NO: 863846 - RNA, 24 nt, Human
agugauucucgugccucagccucc

SEQ ID NO: 863847 - RNA, 18 nt, Human
agugcagccuggaccuca

SEQ ID NO: 863848 - RNA, 23 nt, Human
agugcaguggcgcaaucuuggcu

SEQ ID NO: 863849 - RNA, 24 nt, Human
agugcaguggcgcaaucuuggcuc

SEQ ID NO: 863850 - RNA, 20 nt, Human
agugcaguggcgcgaucucg

SEQ ID NO: 863851 - RNA, 23 nt, Human
agugcaguggcgcgaucucggcu

SEQ ID NO: 863852 - RNA, 24 nt, Human
agugcaguggcgcgaucucggcuc

SEQ ID NO: 863853 - RNA, 20 nt, Human
agugcaguggugcgaucuug

SEQ ID NO: 863854 - RNA, 24 nt, Human
agugcaguggugcgaucuuggauc

SEQ ID NO: 863855 - RNA, 20 nt, Human
auccgcccaccuuggccacc

SEQ ID NO: 863856 - RNA, 24 nt, Human
augaucugcccaccucggccuccc

SEQ ID NO: 863857 - RNA, 24 nt, Human
auguuuggccaggcuggucuugaa

SEQ ID NO: 863858 - RNA, 19 nt, Human
auuacaggugcgugccacc

SEQ ID NO: 863859 - RNA, 21 nt, Human
auucaggacgcagccugugag

SEQ ID NO: 863860 - RNA, 21 nt, Human
auucucccgccucagcuuccc

SEQ ID NO: 863861 - RNA, 18 nt, Human
auugcucugucgcccagg

SEQ ID NO: 863862 - RNA, 24 nt, Human
auuuuuauuugagacagggucugg

SEQ ID NO: 863863 - RNA, 24 nt, Human
auuuuuuuuuuuuuuugagacggg

SEQ ID NO: 863864 - RNA, 21 nt, Human
caaagagcugggacuaaaggc

SEQ ID NO: 863865 - RNA, 22 nt, Human
caaagagcugggacuaaaggca

SEQ ID NO: 863866 - RNA, 24 nt, Human
caaagugcugagauuacaggcgug

SEQ ID NO: 863867 - RNA, 24 nt, Human
caaagugcugggauuacaggugug

SEQ ID NO: 863868 - RNA, 24 nt, Human
caaagugcugggauuauaggcgug

SEQ ID NO: 863869 - RNA, 24 nt, Human
caaggagcugggauuacaggcacc

SEQ ID NO: 863870 - RNA, 22 nt, Human
caagugauucucgugccucagc

SEQ ID NO: 863871 - RNA, 28 nt, Human
caagugauucucgugccucagccucccg

SEQ ID NO: 863872 - RNA, 22 nt, Human
caagugauuugcuugccuuggc

SEQ ID NO: 863873 - RNA, 19 nt, Human
cacaccgaucgcuuggcag

SEQ ID NO: 863874 - RNA, 18 nt, Human
caccaugccuggccauuu

SEQ ID NO: 863875 - RNA, 18 nt, Human
caccauguugggcaggau

SEQ ID NO: 863876 - RNA, 24 nt, Human
caccauguugggcaggauggucuc

SEQ ID NO: 863877 - RNA, 22 nt, Human
caccauguuuggccaggcuggu

SEQ ID NO: 863878 - RNA, 24 nt, Human
caccauguuuggccaggcuggucu

SEQ ID NO: 863879 - RNA, 25 nt, Human
caccauguuuggccaggcuggucuu

SEQ ID NO: 863880 - RNA, 23 nt, Human
cacccgccucggccucccaaagu

SEQ ID NO: 863881 - RNA, 24 nt, Human
caccucggccucccaaagugcugg

SEQ ID NO: 863882 - RNA, 19 nt, Human
cacguacgugacaacaagc

SEQ ID NO: 863883 - RNA, 21 nt, Human
cacugcaaccuccgccuccug

SEQ ID NO: 863884 - RNA, 23 nt, Human
cacugcaaccuccgccuccuggg

SEQ ID NO: 863885 - RNA, 19 nt, Human
cacugcaaccucugccugc

SEQ ID NO: 863886 - RNA, 23 nt, Human
cacugcaaccucugccugcuggg

SEQ ID NO: 863887 - RNA, 21 nt, Human
cagccugugaggacccaccag

SEQ ID NO: 863888 - RNA, 21 nt, Human
cagcugggauuacaggugcgu

SEQ ID NO: 863889 - RNA, 25 nt, Human
caggguuucaccauguuuggccagg

SEQ ID NO: 863890 - RNA, 18 nt, Human
caggguuucgccauguug

SEQ ID NO: 863891 - RNA, 18 nt, Human
caggguuuugccauguug

SEQ ID NO: 863892 - RNA, 21 nt, Human
caucagcaggcaggcggccca

SEQ ID NO: 863893 - RNA, 21 nt, Human
caugccuggcuaauuuuugua

SEQ ID NO: 863894 - RNA, 22 nt, Human
caugcuauucuccugccuuagc

SEQ ID NO: 863895 - RNA, 23 nt, Human
cauguugcccaaacugguucgaa

SEQ ID NO: 863896 - RNA, 20 nt, Human
cauguuguccagacugaucu

SEQ ID NO: 863897 - RNA, 24 nt, Human
cauguuguccagacugaucuugaa

SEQ ID NO: 863898 - RNA, 19 nt, Human
cauugaagaaucuacuaac

SEQ ID NO: 863899 - RNA, 22 nt, Human
ccaaagugcugagauuacaggc

SEQ ID NO: 863900 - RNA, 22 nt, Human
ccaaagugcugagauuacaggc

SEQ ID NO: 863901 - RNA, 24 nt, Human
ccaaagugcugagauuacaggcgu

SEQ ID NO: 863902 - RNA, 21 nt, Human
ccaaagugcugggauuacagg

SEQ ID NO: 863903 - RNA, 21 nt, Human
ccaaagugcugggauuacagg

SEQ ID NO: 863904 - RNA, 24 nt, Human
ccaaagugcugggauuacaggugu

SEQ ID NO: 863905 - RNA, 22 nt, Human
ccaaagugcugggauuauaggc

SEQ ID NO: 863906 - RNA, 24 nt, Human
ccaaagugcugggauuauaggcgu

SEQ ID NO: 863907 - RNA, 21 nt, Human
ccaaauuguugggauuacagg

SEQ ID NO: 863908 - RNA, 21 nt, Human
ccaaauuguugggauuacagg

SEQ ID NO: 863909 - RNA, 21 nt, Human
ccaaauuguugggauuacagg

SEQ ID NO: 863910 - RNA, 24 nt, Human
ccaaauuguugggauuacagguau

SEQ ID NO: 863911 - RNA, 19 nt, Human
ccaaggagcugggauuaca

SEQ ID NO: 863912 - RNA, 20 nt, Human
ccaccacacccagcuaauuu

SEQ ID NO: 863913 - RNA, 22 nt, Human
ccagagcagcugggauuacagg

SEQ ID NO: 863914 - RNA, 22 nt, Human
ccagagcagcugggauuacagg

SEQ ID NO: 863915 - RNA, 25 nt, Human
ccagcuaauuuuugcauguuuugua

SEQ ID NO: 863916 - RNA, 18 nt, Human
ccaggcuggagugcagug

SEQ ID NO: 863917 - RNA, 21 nt, Human
ccaggcuggagugcaguggug

SEQ ID NO: 863918 - RNA, 21 nt, Human
ccauguuguccagacugaucu

SEQ ID NO: 863919 - RNA, 18 nt, Human
cccaaacaggccaugggg

SEQ ID NO: 863920 - RNA, 23 nt, Human
cccaaagugcugagauuacaggc

SEQ ID NO: 863921 - RNA, 19 nt, Human
cccaaggagcugggauuac

SEQ ID NO: 863922 - RNA, 24 nt, Human
cccaaggagcugggauuacaggca

SEQ ID NO: 863923 - RNA, 21 nt, Human
cccacagugccccaggaccua

SEQ ID NO: 863924 - RNA, 22 nt, Human
cccacagugccccaggaccuac

SEQ ID NO: 863925 - RNA, 24 nt, Human
cccaggaccuacccugcccccaaa

SEQ ID NO: 863926 - RNA, 22 nt, Human
cccaggcuggagugcaguggcg

SEQ ID NO: 863927 - RNA, 22 nt, Human
ccccaggaccuacccugccccc

SEQ ID NO: 863928 - RNA, 23 nt, Human
cccccaaacaggccauggggccc

SEQ ID NO: 863929 - RNA, 23 nt, Human
cccgaguagcuggcauuacaggc

SEQ ID NO: 863930 - RNA, 23 nt, Human
cccgaguagcugggacuacaggc

SEQ ID NO: 863931 - RNA, 24 nt, Human
cccgaguagcugggacuacaggcg

SEQ ID NO: 863932 - RNA, 22 nt, Human
ccggguucaugcuauucuccug

SEQ ID NO: 863933 - RNA, 24 nt, Human
ccuccgccuccuggguucaagcgu

SEQ ID NO: 863934 - RNA, 22 nt, Human
ccugagcucaagugauuugcuu

SEQ ID NO: 863935 - RNA, 23 nt, Human
ccugagcucaagugauuugcuug

SEQ ID NO: 863936 - RNA, 22 nt, Human
ccugaucucaagugauccaccc

SEQ ID NO: 863937 - RNA, 21 nt, Human
ccugccuuagccucccaagga

SEQ ID NO: 863938 - RNA, 26 nt, Human
ccuggccaauauuuuuaaauaguucu

SEQ ID NO: 863939 - RNA, 22 nt, Human
ccugugaggacccaccagcuga

SEQ ID NO: 863940 - RNA, 30 nt, Human
cgccauguugcccaaacugguucgaacucc

SEQ ID NO: 863941 - RNA, 24 nt, Human
cgccucggccucccaaagugcugg

SEQ ID NO: 863942 - RNA, 24 nt, Human
cgggguuucaccauguugggcagg

SEQ ID NO: 863943 - RNA, 21 nt, Human
cucaagugauccacccgccuc

SEQ ID NO: 863944 - RNA, 20 nt, Human
cucaagugauuugcuugccu

SEQ ID NO: 863945 - RNA, 22 nt, Human
cucacugcaaccuccaccuacc

SEQ ID NO: 863946 - RNA, 24 nt, Human
cucacugcaaccuccaccuaccgg

SEQ ID NO: 863947 - RNA, 19 nt, Human
cucacugcaaccucugccu

SEQ ID NO: 863948 - RNA, 24 nt, Human
cucagccucccgaguagcugggac

SEQ ID NO: 863949 - RNA, 24 nt, Human
cucaggugauccgcccaccuuggc

SEQ ID NO: 863950 - RNA, 25 nt, Human
cuccacggccagcacaccgaucgcu

SEQ ID NO: 863951 - RNA, 20 nt, Human
cuccugaccucaugaucugc

SEQ ID NO: 863952 - RNA, 18 nt, Human
cuccugagcucaagugau

SEQ ID NO: 863953 - RNA, 23 nt, Human
cucgcuuugucgucaggcuggag

SEQ ID NO: 863954 - RNA, 25 nt, Human
cucgugccucagccucccgaguagc

SEQ ID NO: 863955 - RNA, 19 nt, Human
cucugucgcccaggcugga

SEQ ID NO: 863956 - RNA, 23 nt, Human
cugaccucaggugauccgcccac

SEQ ID NO: 863957 - RNA, 24 nt, Human
cugcaaccuccaccuaccggguuc

SEQ ID NO: 863958 - RNA, 23 nt, Human
cugcaaccuccgccuccuggguu

SEQ ID NO: 863959 - RNA, 24 nt, Human
cugcaaccuccgccuccuggguuc

SEQ ID NO: 863960 - RNA, 20 nt, Human
cugcaaccucugccugcugg

SEQ ID NO: 863961 - RNA, 24 nt, Human
cugcaaccucugccugcuggguuc

SEQ ID NO: 863962 - RNA, 23 nt, Human
cugccugcuggguucaagugauu

SEQ ID NO: 863963 - RNA, 23 nt, Human
cugccuuagccucccaaggagcu

SEQ ID NO: 863964 - RNA, 19 nt, Human
cugucgcccaggcuggagu

SEQ ID NO: 863965 - RNA, 24 nt, Human
cuuagccucccaaggagcugggau

SEQ ID NO: 863966 - RNA, 18 nt, Human
cuugagaucagcuccagu

SEQ ID NO: 863967 - RNA, 20 nt, Human
cuugccuuggccucccaaau

SEQ ID NO: 863968 - RNA, 18 nt, Human
gaaaagaggaaaauagug

SEQ ID NO: 863969 - RNA, 24 nt, Human
gacaacaagcuggccuagagccca

SEQ ID NO: 863970 - RNA, 20 nt, Human
gacaggguuucaccauguuu

SEQ ID NO: 863971 - RNA, 19 nt, Human
gacaggguuuugccauguu

SEQ ID NO: 863972 - RNA, 23 nt, Human
gacaggguuuugccauguugucc

SEQ ID NO: 863973 - RNA, 23 nt, Human
gaccucaggugauccgcccaccu

SEQ ID NO: 863974 - RNA, 22 nt, Human
gaccucaugaucugcccaccuc

SEQ ID NO: 863975 - RNA, 24 nt, Human
gacggagucucgcuuugucgucag

SEQ ID NO: 863976 - RNA, 22 nt, Human
gacuacaggcgcaugcuaccau

SEQ ID NO: 863977 - RNA, 24 nt, Human
gacugaucuugaacuccugaucuc

SEQ ID NO: 863978 - RNA, 24 nt, Human
gagcucaagugauuugcuugccuu

SEQ ID NO: 863979 - RNA, 24 nt, Human
gaguagcuggcauuacaggcacac

SEQ ID NO: 863980 - RNA, 26 nt, Human
gaguagcugggacuacaggcgcaugc

SEQ ID NO: 863981 - RNA, 18 nt, Human
gauuacaggcgugagcca

SEQ ID NO: 863982 - RNA, 22 nt, Human
gauuacaggcgugagccagugc

SEQ ID NO: 863983 - RNA, 18 nt, Human
gauuacagguaugaguca

SEQ ID NO: 863984 - RNA, 21 nt, Human
gauuacagguaugagucacca

SEQ ID NO: 863985 - RNA, 22 nt, Human
gauuacagguaugagucaccau

SEQ ID NO: 863986 - RNA, 18 nt, Human
gauuacaggugcgugcca

SEQ ID NO: 863987 - RNA, 18 nt, Human
gauuacaggugugagcca

SEQ ID NO: 863988 - RNA, 21 nt, Human
gauuacaggugugagccaccg

SEQ ID NO: 863989 - RNA, 24 nt, Human
gauuacaggugugagccaccgugc

SEQ ID NO: 863990 - RNA, 18 nt, Human
gauuauaggcgugagcca

SEQ ID NO: 863991 - RNA, 22 nt, Human
gauuauaggcgugagccaccgc

SEQ ID NO: 863992 - RNA, 23 nt, Human
gauuauaggcgugagccaccgca

SEQ ID NO: 863993 - RNA, 22 nt, Human
gcaaccucugccugcuggguuc

SEQ ID NO: 863994 - RNA, 18 nt, Human
gcagcugggauuacaggu

SEQ ID NO: 863995 - RNA, 18 nt, Human
gcagcugggauuacaggu

SEQ ID NO: 863996 - RNA, 18 nt, Human
gcaggguuucgccauguu

SEQ ID NO: 863997 - RNA, 19 nt, Human
gcaggguuucgccauguug

SEQ ID NO: 863998 - RNA, 20 nt, Human
gcauuacaggcacacgccac

SEQ ID NO: 863999 - RNA, 19 nt, Human
gcccaggcuggagugcagu

SEQ ID NO: 864000 - RNA, 20 nt, Human
gcccaggcuggagugcagug

SEQ ID NO: 864001 - RNA, 23 nt, Human
gccucagcuucccaaagagcugg

SEQ ID NO: 864002 - RNA, 24 nt, Human
gccucagcuucccaaagagcuggg

SEQ ID NO: 864003 - RNA, 20 nt, Human
gccugugaggacccaccagc

SEQ ID NO: 864004 - RNA, 20 nt, Human
gcucagccucccgaguagcu

SEQ ID NO: 864005 - RNA, 20 nt, Human
gcucugucgcccaggcugga

SEQ ID NO: 864006 - RNA, 25 nt, Human
gcucugucgcccaggcuggagugca

SEQ ID NO: 864007 - RNA, 19 nt, Human
gcuggagugcaguggcgca

SEQ ID NO: 864008 - RNA, 19 nt, Human
gcuggagugcaguggcgcg

SEQ ID NO: 864009 - RNA, 24 nt, Human
ggacuaaaggcacccuccaucaug

SEQ ID NO: 864010 - RNA, 18 nt, Human
ggagcugggauuacaggc

SEQ ID NO: 864011 - RNA, 21 nt, Human
gggacuaaaggcacccuccau

SEQ ID NO: 864012 - RNA, 24 nt, Human
gggacuaaaggcacccuccaucau

SEQ ID NO: 864013 - RNA, 18 nt, Human
gggguuucaccauguugg

SEQ ID NO: 864014 - RNA, 24 nt, Human
gggguuucaccauguugggcagga

SEQ ID NO: 864015 - RNA, 20 nt, Human
ggucucgaucuccugaccuc

SEQ ID NO: 864016 - RNA, 19 nt, Human
guagacaggguuucaccau

SEQ ID NO: 864017 - RNA, 21 nt, Human
guagagacaggguuuugccau

SEQ ID NO: 864018 - RNA, 21 nt, Human
guagaggcaggguuucgccau

SEQ ID NO: 864019 - RNA, 22 nt, Human
guagaggcaggguuucgccaug

SEQ ID NO: 864020 - RNA, 24 nt, Human
gucucgcuuugucgucaggcugga

SEQ ID NO: 864021 - RNA, 18 nt, Human
gugaaaggagcuccaucu

SEQ ID NO: 864022 - RNA, 24 nt, Human
gugauccacccgccucggccuccc

SEQ ID NO: 864023 - RNA, 24 nt, Human
gugauucucgugccucagccuccc

SEQ ID NO: 864024 - RNA, 22 nt, Human
gugccucagccucccgaguagc

SEQ ID NO: 864025 - RNA, 23 nt, Human
guucgaacuccugagcucaagug

SEQ ID NO: 864026 - RNA, 22 nt, Human
guuuggucuuccaggcuggagu

SEQ ID NO: 864027 - RNA, 22 nt, Human
uaauuuuugcauuuuuaguaga

SEQ ID NO: 864028 - RNA, 24 nt, Human
uacaggcacacgccaccacaccca

SEQ ID NO: 864029 - RNA, 22 nt, Human
uacagguaugagucaccaugcc

SEQ ID NO: 864030 - RNA, 24 nt, Human
uacaggugcgugccaccacaccca

SEQ ID NO: 864031 - RNA, 22 nt, Human
uacaggugugagccaccgugcc

SEQ ID NO: 864032 - RNA, 22 nt, Human
uacaggugugagccaccgugcc

SEQ ID NO: 864033 - RNA, 23 nt, Human
uacaggugugagccaccgugccu

SEQ ID NO: 864034 - RNA, 20 nt, Human
uacccugcccccaaacaggc

SEQ ID NO: 864035 - RNA, 24 nt, Human
uaccggguucaugcuauucuccug

SEQ ID NO: 864036 - RNA, 24 nt, Human
uacgugacaacaagcuggccuaga

SEQ ID NO: 864037 - RNA, 22 nt, Human
uagaaacgggguuucaccaugu

SEQ ID NO: 864038 - RNA, 21 nt, Human
uagagacaggguuuugccaug

SEQ ID NO: 864039 - RNA, 22 nt, Human
uagagacaggguuuugccaugu

SEQ ID NO: 864040 - RNA, 21 nt, Human
uagaggcaggguuucgccaug

SEQ ID NO: 864041 - RNA, 22 nt, Human
uagaggcaggguuucgccaugu

SEQ ID NO: 864042 - RNA, 24 nt, Human
uagcauugaagaaucuacuaacau

SEQ ID NO: 864043 - RNA, 18 nt, Human
uagcuggcauuacaggca

SEQ ID NO: 864044 - RNA, 24 nt, Human
uaguagaaacgggguuucaccaug

SEQ ID NO: 864045 - RNA, 26 nt, Human
uaguagaaacgggguuucaccauguu

SEQ ID NO: 864046 - RNA, 21 nt, Human
uaguucuguuuugaauuggua

SEQ ID NO: 864047 - RNA, 23 nt, Human
uauaggcgugagccaccgcaccu

SEQ ID NO: 864048 - RNA, 23 nt, Human
uaugagucaccaugccuggccau

SEQ ID NO: 864049 - RNA, 26 nt, Human
uauuauuauuuuuugauacagagucu

SEQ ID NO: 864050 - RNA, 19 nt, Human
uauucucccgccucagcuu

SEQ ID NO: 864051 - RNA, 19 nt, Human
uauucuccugccuuagccu

SEQ ID NO: 864052 - RNA, 19 nt, Human
uauugcucugucgcccagg

SEQ ID NO: 864053 - RNA, 23 nt, Human
uauugcucugucgcccaggcugg

SEQ ID NO: 864054 - RNA, 24 nt, Human
uauugcucugucgcccaggcugga

SEQ ID NO: 864055 - RNA, 18 nt, Human
ucacugcaaccuccaccu

SEQ ID NO: 864056 - RNA, 24 nt, Human
ucacugcaaccuccaccuaccggg

SEQ ID NO: 864057 - RNA, 23 nt, Human
ucacugcaaccuccgccuccugg

SEQ ID NO: 864058 - RNA, 24 nt, Human
ucacugcaaccuccgccuccuggg

SEQ ID NO: 864059 - RNA, 25 nt, Human
ucacugcaaccuccgccuccugggu

SEQ ID NO: 864060 - RNA, 27 nt, Human
ucacugcaaccuccgccuccuggguuc

SEQ ID NO: 864061 - RNA, 24 nt, Human
ucacugcaaccucugccugcuggg

SEQ ID NO: 864062 - RNA, 18 nt, Human
ucagcaggcaggcggccc

SEQ ID NO: 864063 - RNA, 20 nt, Human
ucagccucccgaguagcugg

SEQ ID NO: 864064 - RNA, 23 nt, Human
ucagccucccgaguagcugggac

SEQ ID NO: 864065 - RNA, 19 nt, Human
ucaugcuauucucccgccu

SEQ ID NO: 864066 - RNA, 24 nt, Human
uccagagcagcugggauuacaggu

SEQ ID NO: 864067 - RNA, 19 nt, Human
ucccaaagagcugggacua

SEQ ID NO: 864068 - RNA, 24 nt, Human
ucccaaagagcugggacuaaaggc

SEQ ID NO: 864069 - RNA, 23 nt, Human
ucccaaagugcugggauuacagg

SEQ ID NO: 864070 - RNA, 24 nt, Human
ucccaaagugcugggauuauaggc

SEQ ID NO: 864071 - RNA, 23 nt, Human
ucccaaauuguugggauuacagg

SEQ ID NO: 864072 - RNA, 24 nt, Human
ucccaaggagcugggauuacaggc

SEQ ID NO: 864073 - RNA, 24 nt, Human
ucccgaguagcuggcauuacaggc

SEQ ID NO: 864074 - RNA, 24 nt, Human
ucccgaguagcugggacuacaggc

SEQ ID NO: 864075 - RNA, 24 nt, Human
ucgcccaggcuggagugcaguggc

SEQ ID NO: 864076 - RNA, 18 nt, Human
ucggccucccaaagugcu

SEQ ID NO: 864077 - RNA, 18 nt, Human
ucggccucccaaagugcu

SEQ ID NO: 864078 - RNA, 24 nt, Human
ucgucaggcuggagugcaguggcg

SEQ ID NO: 864079 - RNA, 26 nt, Human
ucuccugccuuagccucccaaggagc

SEQ ID NO: 864080 - RNA, 22 nt, Human
ucucgcuuugucgucaggcugg

SEQ ID NO: 864081 - RNA, 23 nt, Human
ucucgcuuugucgucaggcugga

SEQ ID NO: 864082 - RNA, 23 nt, Human
ucucguuuggucuuccaggcugg

SEQ ID NO: 864083 - RNA, 24 nt, Human
ucucguuuggucuuccaggcugga

SEQ ID NO: 864084 - RNA, 21 nt, Human
ucuggcucuguugccuagugg

SEQ ID NO: 864085 - RNA, 24 nt, Human
ucugucgcccaggcuggagugcag

SEQ ID NO: 864086 - RNA, 24 nt, Human
ucuuccaggcuggagugcaguggu

SEQ ID NO: 864087 - RNA, 21 nt, Human
ucuugaacuccugaucucaag

SEQ ID NO: 864088 - RNA, 18 nt, Human
ugaccucaggugauccgc

SEQ ID NO: 864089 - RNA, 21 nt, Human
ugaccucaggugauccgccca

SEQ ID NO: 864090 - RNA, 24 nt, Human
ugaccucaggugauccgcccaccu

SEQ ID NO: 864091 - RNA, 22 nt, Human
ugagacagggucuggcucuguu

SEQ ID NO: 864092 - RNA, 18 nt, Human
ugagauuacaggcgugag

SEQ ID NO: 864093 - RNA, 18 nt, Human
ugagauuacaggcgugag

SEQ ID NO: 864094 - RNA, 19 nt, Human
ugagauuacaggcgugagc

SEQ ID NO: 864095 - RNA, 21 nt, Human
ugagauuacaggcgugagcca

SEQ ID NO: 864096 - RNA, 24 nt, Human
ugagauuacaggcgugagccagug

SEQ ID NO: 864097 - RNA, 27 nt, Human
ugagauuacaggcgugagccagugcgc

SEQ ID NO: 864098 - RNA, 31 nt, Human
ugagauuacaggcgugagccagugcgcccgg

SEQ ID NO: 864099 - RNA, 20 nt, Human
ugagcucaagugauuugcuu

SEQ ID NO: 864100 - RNA, 19 nt, Human
ugaggacccaccagcugac

SEQ ID NO: 864101 - RNA, 24 nt, Human
ugaucucaagugauccacccgccu

SEQ ID NO: 864102 - RNA, 24 nt, Human
ugaucugcccaccucggccuccca

SEQ ID NO: 864103 - RNA, 22 nt, Human
ugcaguggcgcaaucuuggcuc

SEQ ID NO: 864104 - RNA, 23 nt, Human
ugcaguggcgcaaucuuggcuca

SEQ ID NO: 864105 - RNA, 22 nt, Human
ugcaguggcgcgaucucggcuc

SEQ ID NO: 864106 - RNA, 24 nt, Human
ugccauguuguccagacugaucuu

SEQ ID NO: 864107 - RNA, 27 nt, Human
ugccauguuguccagacugaucuugaa

SEQ ID NO: 864108 - RNA, 20 nt, Human
ugccccaggaccuacccugc

SEQ ID NO: 864109 - RNA, 24 nt, Human
ugccucagccuccagagcagcugg

SEQ ID NO: 864110 - RNA, 22 nt, Human
ugccucagccucccgaguagcu

SEQ ID NO: 864111 - RNA, 24 nt, Human
ugccucagccucccgaguagcugg

SEQ ID NO: 864112 - RNA, 22 nt, Human
ugccugcuggguucaagugauu

SEQ ID NO: 864113 - RNA, 24 nt, Human
ugccuuagccucccaaggagcugg

SEQ ID NO: 864114 - RNA, 18 nt, Human
ugccuuggccucccaaau

SEQ ID NO: 864115 - RNA, 20 nt, Human
ugcgugccaccacacccagc

SEQ ID NO: 864116 - RNA, 24 nt, Human
ugcucugucgcccaggcuggagug

SEQ ID NO: 864117 - RNA, 24 nt, Human
ugcugagauuacaggcgugagcca

SEQ ID NO: 864118 - RNA, 24 nt, Human
ugcugggauuacaggugugagcca

SEQ ID NO: 864119 - RNA, 18 nt, Human
ugcuugccuuggccuccc

SEQ ID NO: 864120 - RNA, 23 nt, Human
uggagugcaguggcgcaaucuug

SEQ ID NO: 864121 - RNA, 24 nt, Human
uggagugcaguggcgcaaucuugg

SEQ ID NO: 864122 - RNA, 23 nt, Human
uggagugcaguggcgcgaucucg

SEQ ID NO: 864123 - RNA, 24 nt, Human
uggagugcaguggcgcgaucucgg

SEQ ID NO: 864124 - RNA, 23 nt, Human
uggagugcaguggugcgaucuug

SEQ ID NO: 864125 - RNA, 24 nt, Human
uggagugcaguggugcgaucuugg

SEQ ID NO: 864126 - RNA, 23 nt, Human
uggcaugcaauaaaauugcauuu

SEQ ID NO: 864127 - RNA, 22 nt, Human
uggcauuacaggcacacgccac

SEQ ID NO: 864128 - RNA, 24 nt, Human
uggcauuacaggcacacgccacca

SEQ ID NO: 864129 - RNA, 26 nt, Human
uggccaggcuggucuugaacugaccu

SEQ ID NO: 864130 - RNA, 21 nt, Human
uggcucacugcaaccucugcc

SEQ ID NO: 864131 - RNA, 21 nt, Human
ugggacuaaaggcacccucca

SEQ ID NO: 864132 - RNA, 22 nt, Human
ugggacuacaggcgcaugcuac

SEQ ID NO: 864133 - RNA, 24 nt, Human
ugggacuacaggcgcaugcuacca

SEQ ID NO: 864134 - RNA, 25 nt, Human
ugggacuacaggcgcaugcuaccau

SEQ ID NO: 864135 - RNA, 21 nt, Human
ugggauuacaggcacccucca

SEQ ID NO: 864136 - RNA, 22 nt, Human
ugggauuacaggcacccuccac

SEQ ID NO: 864137 - RNA, 18 nt, Human
ugggauuacagguaugag

SEQ ID NO: 864138 - RNA, 22 nt, Human
ugggauuacagguaugagucac

SEQ ID NO: 864139 - RNA, 23 nt, Human
ugggauuacagguaugagucacc

SEQ ID NO: 864140 - RNA, 24 nt, Human
ugggauuacagguaugagucacca

SEQ ID NO: 864141 - RNA, 25 nt, Human
ugggauuacagguaugagucaccau

SEQ ID NO: 864142 - RNA, 18 nt, Human
ugggauuacaggugcgug

SEQ ID NO: 864143 - RNA, 21 nt, Human
ugggauuacaggugcgugcca

SEQ ID NO: 864144 - RNA, 22 nt, Human
ugggauuacaggugcgugccac

SEQ ID NO: 864145 - RNA, 24 nt, Human
ugggauuacaggugcgugccacca

SEQ ID NO: 864146 - RNA, 18 nt, Human
ugggauuacaggugugag

SEQ ID NO: 864147 - RNA, 21 nt, Human
ugggauuacaggugugagcca

SEQ ID NO: 864148 - RNA, 22 nt, Human
ugggauuacaggugugagccac

SEQ ID NO: 864149 - RNA, 23 nt, Human
ugggauuacaggugugagccacc

SEQ ID NO: 864150 - RNA, 23 nt, Human
ugggauuacaggugugagccacc

SEQ ID NO: 864151 - RNA, 24 nt, Human
ugggauuacaggugugagccaccg

SEQ ID NO: 864152 - RNA, 18 nt, Human
ugggauuauaggcgugag

SEQ ID NO: 864153 - RNA, 19 nt, Human
ugggauuauaggcgugagc

SEQ ID NO: 864154 - RNA, 21 nt, Human
ugggauuauaggcgugagcca

SEQ ID NO: 864155 - RNA, 22 nt, Human
ugggauuauaggcgugagccac

SEQ ID NO: 864156 - RNA, 23 nt, Human
ugggauuauaggcgugagccacc

SEQ ID NO: 864157 - RNA, 24 nt, Human
ugggauuauaggcgugagccaccg

SEQ ID NO: 864158 - RNA, 23 nt, Human
uggguucaagugauucucgugcc

SEQ ID NO: 864159 - RNA, 21 nt, Human
uggucuugaacugaccucagg

SEQ ID NO: 864160 - RNA, 24 nt, Human
uguagagacaggguuuugccaugu

SEQ ID NO: 864161 - RNA, 24 nt, Human
uguagaggcaggguuucgccaugu

SEQ ID NO: 864162 - RNA, 24 nt, Human
uguccagacugaucuugaacuccu

SEQ ID NO: 864163 - RNA, 18 nt, Human
ugucgucaggcuggagug

SEQ ID NO: 864164 - RNA, 23 nt, Human
ugugaaaggagcuccaucugcuu

SEQ ID NO: 864165 - RNA, 23 nt, Human
uguggaaaccuggacucuggcug

SEQ ID NO: 864166 - RNA, 20 nt, Human
uguugggauuacagguauga

SEQ ID NO: 864167 - RNA, 24 nt, Human
uuaguagaaacgggguuucaccau

SEQ ID NO: 864168 - RNA, 23 nt, Human
uucaagugauucucgugccucag

SEQ ID NO: 864169 - RNA, 22 nt, Human
uuccaggcuggagugcaguggu

SEQ ID NO: 864170 - RNA, 23 nt, Human
uuccaggcuggagugcaguggug

SEQ ID NO: 864171 - RNA, 22 nt, Human
uugagacagggucuggcucugu

SEQ ID NO: 864172 - RNA, 22 nt, Human
uugagacagggucuggcucugu

SEQ ID NO: 864173 - RNA, 20 nt, Human
uugcucugucgcccaggcug

SEQ ID NO: 864174 - RNA, 22 nt, Human
uugcucugucgcccaggcugga

SEQ ID NO: 864175 - RNA, 24 nt, Human
uuggccaggcuggucuugaacuga

SEQ ID NO: 864176 - RNA, 24 nt, Human
uugggauuacagguaugagucacc

SEQ ID NO: 864177 - RNA, 24 nt, Human
uuggucuuccaggcuggagugcag

SEQ ID NO: 864178 - RNA, 22 nt, Human
uuguagacaggguuucaccaug

SEQ ID NO: 864179 - RNA, 24 nt, Human
uuguagagacaggguuuugccaug

SEQ ID NO: 864180 - RNA, 24 nt, Human
uuguagaggcaggguuucgccaug

SEQ ID NO: 864181 - RNA, 19 nt, Human
uuucaccauguugggcagg

SEQ ID NO: 864182 - RNA, 25 nt, Human
uuucaccauguuuggccaggcuggu

SEQ ID NO: 864183 - RNA, 21 nt, Human
uuucgccauguugcccaaacu

SEQ ID NO: 864184 - RNA, 22 nt, Human
uuuguagacaggguuucaccau

SEQ ID NO: 864185 - RNA, 20 nt, Human
uuuguagagacaggguuuug

SEQ ID NO: 864186 - RNA, 23 nt, Human
uuuguagagacaggguuuugcca

SEQ ID NO: 864187 - RNA, 24 nt, Human
uuuguagagacaggguuuugccau

SEQ ID NO: 864188 - RNA, 18 nt, Human
uuuguagaggcaggguuu

SEQ ID NO: 864189 - RNA, 24 nt, Human
uuuguagaggcaggguuucgccau

SEQ ID NO: 864190 - RNA, 23 nt, Human
uuugucgucaggcuggagugcag

SEQ ID NO: 864191 - RNA, 18 nt, Human
uuuugccauguuguccag

SEQ ID NO: 864192 - RNA, 24 nt, Human
uuuuguagacaggguuucaccaug

SEQ ID NO: 864193 - RNA, 24 nt, Human
uuuuuaguagaaacgggguuucac

SEQ ID NO: 864194 - RNA, 21 nt, Human
uuuuuuguagagacaggguuu

SEQ ID NO: 864195 - RNA, 24 nt, Human
uuuuuuguagagacaggguuuugc

SEQ ID NO: 864196 - RNA, 19 nt, Human
uuuuuuuuuuugagacggg

SEQ ID NO: 864197 - RNA, 23 nt, Human
uuuuuuuuuuugagacgggagua

SEQ ID NO: 864198 - RNA, 25 nt, Human
uuuuuuuuuuuugagacggagucuc

SEQ ID NO: 864199 - RNA, 22 nt, Human
uuuuuuuuuuuuuugagacgga

SEQ ID NO: 864200 - RNA, 22 nt, Human
uuuuuuuuuuuuuugagacggg

SEQ ID NO: 864201 - RNA, 18 nt, Human
uuuuuuuuuuuuuuuuug

SEQ ID NO: 864202 - RNA, 23 nt, Human
aaaagcucugcucccugcaaccu

SEQ ID NO: 864203 - RNA, 19 nt, Human
aagaauguacaguucuugg

SEQ ID NO: 864204 - RNA, 19 nt, Human
agaggaaggagggauggga

SEQ ID NO: 864205 - RNA, 20 nt, Human
agaggaaggagggaugggag

SEQ ID NO: 864206 - RNA, 21 nt, Human
aggagggaugggagcugaauc

SEQ ID NO: 864207 - RNA, 22 nt, Human
aguauugaaaaguggagaggaa

SEQ ID NO: 864208 - RNA, 26 nt, Human
agucaccagcucacugaggaaccaga

SEQ ID NO: 864209 - RNA, 21 nt, Human
cacacagaccugccuggaagc

SEQ ID NO: 864210 - RNA, 25 nt, Human
cacaccccugcgcacgugcagcccc

SEQ ID NO: 864211 - RNA, 19 nt, Human
caggucccaggcccccucu

SEQ ID NO: 864212 - RNA, 18 nt, Human
cccaggcccccucugggc

SEQ ID NO: 864213 - RNA, 21 nt, Human
cccaggcccccucugggcuuc

SEQ ID NO: 864214 - RNA, 23 nt, Human
ccccugcgcacgugcagcccccg

SEQ ID NO: 864215 - RNA, 24 nt, Human
ccuccaggccugggauggaccuag

SEQ ID NO: 864216 - RNA, 19 nt, Human
cgcccccaucucugccagg

SEQ ID NO: 864217 - RNA, 22 nt, Human
cgcccccaucucugccaggucc

SEQ ID NO: 864218 - RNA, 24 nt, Human
cuauugucuguauuugccggugcc

SEQ ID NO: 864219 - RNA, 18 nt, Human
cucccugcaaccucccca

SEQ ID NO: 864220 - RNA, 18 nt, Human
cucugggcuucuguccca

SEQ ID NO: 864221 - RNA, 19 nt, Human
cuggaagccuucaaaggcc

SEQ ID NO: 864222 - RNA, 19 nt, Human
cuuggagaaggagaggaag

SEQ ID NO: 864223 - RNA, 21 nt, Human
gagaggaaggagggaugggag

SEQ ID NO: 864224 - RNA, 22 nt, Human
gagaggaaggagggaugggagc

SEQ ID NO: 864225 - RNA, 21 nt, Human
gaggaaggagggaugggagcu

SEQ ID NO: 864226 - RNA, 24 nt, Human
gcagccuuugggaagguguggggg

SEQ ID NO: 864227 - RNA, 20 nt, Human
gccauggguuuggagugcca

SEQ ID NO: 864228 - RNA, 21 nt, Human
ggagaggaaggagggauggga

SEQ ID NO: 864229 - RNA, 19 nt, Human
ggagucaccugccagucac

SEQ ID NO: 864230 - RNA, 23 nt, Human
ggucgggguggggguccccguuc

SEQ ID NO: 864231 - RNA, 19 nt, Human
gucuguauuugccggugcc

SEQ ID NO: 864232 - RNA, 24 nt, Human
uauugaaaaguggagaggaaccgg

SEQ ID NO: 864233 - RNA, 26 nt, Human
ucagagcagccuuugggaaggugugg

SEQ ID NO: 864234 - RNA, 24 nt, Human
ucccaggcccccucugggcuucug

SEQ ID NO: 864235 - RNA, 21 nt, Human
ucucuccaucagaaugaaagc

SEQ ID NO: 864236 - RNA, 24 nt, Human
ugaaagcuccucgagggcagggac

SEQ ID NO: 864237 - RNA, 18 nt, Human
ugaaggcacuuggagaag

SEQ ID NO: 864238 - RNA, 19 nt, Human
ugagcagcggccugaggug

SEQ ID NO: 864239 - RNA, 19 nt, Human
ugaggugcugugucugaca

SEQ ID NO: 864240 - RNA, 20 nt, Human
ugaggugcugugucugacau

SEQ ID NO: 864241 - RNA, 21 nt, Human
ugcaacaggcacucaauaaau

SEQ ID NO: 864242 - RNA, 23 nt, Human
ugccuguaugcaacaggcacuca

SEQ ID NO: 864243 - RNA, 22 nt, Human
ugcugagggagucaccugcccc

SEQ ID NO: 864244 - RNA, 23 nt, Human
uggacaggcaugaguuagauucu

SEQ ID NO: 864245 - RNA, 21 nt, Human
uggauucccaacugucagccu

SEQ ID NO: 864246 - RNA, 23 nt, Human
uggauucccaacugucagccucc

SEQ ID NO: 864247 - RNA, 23 nt, Human
ugggcuucugucccacacagacc

SEQ ID NO: 864248 - RNA, 22 nt, Human
uguagacuggacaggcaugagu

SEQ ID NO: 864249 - RNA, 18 nt, Human
uucuugguuugaaggcac

SEQ ID NO: 864250 - RNA, 21 nt, Human
uucuugguuugaaggcacuug

SEQ ID NO: 864251 - RNA, 18 nt, Human
uugcuggggacagaggca

SEQ ID NO: 864252 - RNA, 21 nt, Human
uugguuugaaggcacuuggag

SEQ ID NO: 864253 - RNA, 19 nt, Human
uuuuuuuuuuuuuuuugca

SEQ ID NO: 864254 - RNA, 18 nt, Human
uuuuuuuuuuuuuuuuug

SEQ ID NO: 864255 - RNA, 23 nt, Human
uuuuuuuuuuuuuuuuugcauuu

SEQ ID NO: 864256 - RNA, 21 nt, Human
aaacacacaagacacaaagaa

SEQ ID NO: 864257 - RNA, 20 nt, Human
aagacacaaagaaagcccaa

SEQ ID NO: 864258 - RNA, 18 nt, Human
aggggugagaggacacag

SEQ ID NO: 864259 - RNA, 23 nt, Human
caagacacaaagaaagcccaaua

SEQ ID NO: 864260 - RNA, 27 nt, Human
caauaaagcugugagucccaguuuggu

SEQ ID NO: 864261 - RNA, 23 nt, Human
caccucuggaugcacaacagcuc

SEQ ID NO: 864262 - RNA, 22 nt, Human
cccugggugacugcauugcugg

SEQ ID NO: 864263 - RNA, 19 nt, Human
gcacaacagcucguggccu

SEQ ID NO: 864264 - RNA, 21 nt, Human
gcccaauaaagcugugagucc

SEQ ID NO: 864265 - RNA, 19 nt, Human
ggaaagaaggggugagagg

SEQ ID NO: 864266 - RNA, 21 nt, Human
gggaaagaaggggugagagga

SEQ ID NO: 864267 - RNA, 20 nt, Human
uaaaagaaacacacaagaca

SEQ ID NO: 864268 - RNA, 20 nt, Human
uccucaguaucccugggaaa

SEQ ID NO: 864269 - RNA, 21 nt, Human
uccucaguaucccugggaaag

SEQ ID NO: 864270 - RNA, 23 nt, Human
uuuuuuuuuuuuuuuuuaccuuu

SEQ ID NO: 864271 - RNA, 29 nt, Human
uuuuuuuuuuuuuuuuuuuaccuuuuuaa

SEQ ID NO: 864272 - RNA, 19 nt, Human
aggcgggcgggcggggugc

SEQ ID NO: 864273 - RNA, 23 nt, Human
caccgccgccaccagagccgccu

SEQ ID NO: 864274 - RNA, 23 nt, Human
ccaccgccgccaccagagccgcc

SEQ ID NO: 864275 - RNA, 21 nt, Human
cgaccgaggagcagaccuggc

SEQ ID NO: 864276 - RNA, 19 nt, Human
cgcaggguguggaugggcc

SEQ ID NO: 864277 - RNA, 19 nt, Human
cgccgccucggccgccgcc

SEQ ID NO: 864278 - RNA, 18 nt, Human
cuccuaugagguuggaag

SEQ ID NO: 864279 - RNA, 22 nt, Human
cucggccgccgccucagccucc

SEQ ID NO: 864280 - RNA, 18 nt, Human
cuggcaggaggcgccugu

SEQ ID NO: 864281 - RNA, 20 nt, Human
gccucggccgccgccucagc

SEQ ID NO: 864282 - RNA, 22 nt, Human
ggaggcgggcgggcggggugcu

SEQ ID NO: 864283 - RNA, 20 nt, Human
ggaugggccggcagggaggc

SEQ ID NO: 864284 - RNA, 27 nt, Human
gggccggcagggaggcgggcgggcggg

SEQ ID NO: 864285 - RNA, 19 nt, Human
uaacuuccagccacggccu

SEQ ID NO: 864286 - RNA, 21 nt, Human
uaacuuccagccacggccucg

SEQ ID NO: 864287 - RNA, 20 nt, Human
uaugagguuggaaguggugu

SEQ ID NO: 864288 - RNA, 18 nt, Human
uccuccgucgccgccucg

SEQ ID NO: 864289 - RNA, 18 nt, Human
ucgccgccucggccgccg

SEQ ID NO: 864290 - RNA, 20 nt, Human
ucgccgccucggccgccgcc

SEQ ID NO: 864291 - RNA, 20 nt, Human
uggcgggcaggcgggugggc

SEQ ID NO: 864292 - RNA, 20 nt, Human
ugguguggacgcagggugug

SEQ ID NO: 864293 - RNA, 22 nt, Human
uuuccuccgucgccgccucggc

SEQ ID NO: 864294 - RNA, 18 nt, Human
uuuuuuuuuuuugggucu

SEQ ID NO: 864295 - RNA, 18 nt, Human
uuuuuuuuuuuuuuuuug

SEQ ID NO: 864296 - RNA, 22 nt, Human
uuuuuuuuuuuuuuuuuuuggg

SEQ ID NO: 864297 - RNA, 24 nt, Human
uuuuuuuuuuuuuuuuuuuggguc

SEQ ID NO: 864298 - RNA, 22 nt, Human
aaauaccagaaauuaaagagcu

SEQ ID NO: 864299 - RNA, 19 nt, Human
aggcgcagguccgggcaca

SEQ ID NO: 864300 - RNA, 22 nt, Human
cagaaggcgcagguccgggcac

SEQ ID NO: 864301 - RNA, 22 nt, Human
ccgccgccgccgccgaguccgu

SEQ ID NO: 864302 - RNA, 20 nt, Human
ccgccgccgccgccgccgcc

SEQ ID NO: 864303 - RNA, 24 nt, Human
ccgccgccgccgccgccgccgagu

SEQ ID NO: 864304 - RNA, 20 nt, Human
gacccagaaggcgcaggucc

SEQ ID NO: 864305 - RNA, 20 nt, Human
gauggggugcggguggggcg

SEQ ID NO: 864306 - RNA, 22 nt, Human
gccgccgccgccgccgccgccg

SEQ ID NO: 864307 - RNA, 19 nt, Human
uaccagaaauuaaagagcu

SEQ ID NO: 864308 - RNA, 24 nt, Human
uaccagaaauuaaagagcugacag

SEQ ID NO: 864309 - RNA, 21 nt, Human
ucagagacccagaaggcgcag

SEQ ID NO: 864310 - RNA, 22 nt, Human
uggggugcggguggggcgcagg

SEQ ID NO: 864311 - RNA, 19 nt, Human
aagcagugggcccacccuc

SEQ ID NO: 864312 - RNA, 19 nt, Human
agccgggggcgccggccgc

SEQ ID NO: 864313 - RNA, 20 nt, Human
agccgggggcgccggccgcc

SEQ ID NO: 864314 - RNA, 24 nt, Human
agccgggggcgccggccgcccggc

SEQ ID NO: 864315 - RNA, 19 nt, Human
aguucuuauugauaguccc

SEQ ID NO: 864316 - RNA, 23 nt, Human
caaagcagugggcccacccuccc

SEQ ID NO: 864317 - RNA, 18 nt, Human
cacccucccuccuaccag

SEQ ID NO: 864318 - RNA, 18 nt, Human
cagccccuccccagcacc

SEQ ID NO: 864319 - RNA, 21 nt, Human
cagugggcccacccucccucc

SEQ ID NO: 864320 - RNA, 20 nt, Human
cccuccuaccagccccuccc

SEQ ID NO: 864321 - RNA, 18 nt, Human
ccgcugccccggcggggc

SEQ ID NO: 864322 - RNA, 21 nt, Human
ccggccccggcgaagcccucg

SEQ ID NO: 864323 - RNA, 18 nt, Human
ccuccaaagcagugggcc

SEQ ID NO: 864324 - RNA, 21 nt, Human
ccuccaaagcagugggcccac

SEQ ID NO: 864325 - RNA, 20 nt, Human
ccuccuaccagccccucccc

SEQ ID NO: 864326 - RNA, 21 nt, Human
ccuccuaccagccccucccca

SEQ ID NO: 864327 - RNA, 22 nt, Human
ccuccuaccagccccuccccag

SEQ ID NO: 864328 - RNA, 21 nt, Human
cgggagcagccgggggcgccg

SEQ ID NO: 864329 - RNA, 22 nt, Human
cgggagcagccgggggcgccgg

SEQ ID NO: 864330 - RNA, 24 nt, Human
cucccuccuaccagccccucccca

SEQ ID NO: 864331 - RNA, 23 nt, Human
gcucucaccaccgcugccccggc

SEQ ID NO: 864332 - RNA, 18 nt, Human
ggagcagccgggggcgcc

SEQ ID NO: 864333 - RNA, 20 nt, Human
ggcggcgggagcagccgggg

SEQ ID NO: 864334 - RNA, 21 nt, Human
gggcccacccucccuccuacc

SEQ ID NO: 864335 - RNA, 25 nt, Human
ggggcgcggguccgggcggcggcgg

SEQ ID NO: 864336 - RNA, 19 nt, Human
uaccagccccuccccagca

SEQ ID NO: 864337 - RNA, 18 nt, Human
uccccagcacccagcccc

SEQ ID NO: 864338 - RNA, 25 nt, Human
uccuaccagccccuccccagcaccc

SEQ ID NO: 864339 - RNA, 18 nt, Human
uuuuuuuuuuuuuuuuug

SEQ ID NO: 864340 - RNA, 21 nt, Human
uuuuuuuuuuuuuuuuugcgu

SEQ ID NO: 864341 - RNA, 25 nt, Human
aaaaaaaaaaaacacauccauaagc

SEQ ID NO: 864342 - RNA, 18 nt, Human
aaaaaaaaaacacaucca

SEQ ID NO: 864343 - RNA, 24 nt, Human
aaacucacuccucucuccacccac

SEQ ID NO: 864344 - RNA, 18 nt, Human
aaucgcuugaauccggga

SEQ ID NO: 864345 - RNA, 24 nt, Human
acagagcgagacuccaucucaaaa

SEQ ID NO: 864346 - RNA, 20 nt, Human
acauccagauuguuguacag

SEQ ID NO: 864347 - RNA, 23 nt, Human
accaccuuccugagggaaagcca

SEQ ID NO: 864348 - RNA, 18 nt, Human
accucgucucuacuaaaa

SEQ ID NO: 864349 - RNA, 19 nt, Human
acuauauuuuccuacaucu

SEQ ID NO: 864350 - RNA, 28 nt, Human
acuccaucucaaaaaaaaaaaaaaaaaa

SEQ ID NO: 864351 - RNA, 23 nt, Human
acugcacuccagccuggcgacag

SEQ ID NO: 864352 - RNA, 25 nt, Human
acugcacuccagccuggcgacagag

SEQ ID NO: 864353 - RNA, 18 nt, Human
agacucauucagggaauu

SEQ ID NO: 864354 - RNA, 24 nt, Human
agagggugcagugagcugaggucg

SEQ ID NO: 864355 - RNA, 24 nt, Human
agcacuuugggaggcugagguggg

SEQ ID NO: 864356 - RNA, 23 nt, Human
agccaccaccuuccugagggaaa

SEQ ID NO: 864357 - RNA, 22 nt, Human
agccagagauuaaaagcucacu

SEQ ID NO: 864358 - RNA, 21 nt, Human
agccuggcgacagagcgagac

SEQ ID NO: 864359 - RNA, 23 nt, Human
agccuggcgacagagcgagacuc

SEQ ID NO: 864360 - RNA, 23 nt, Human
agcugggcgugguggcgcaugcc

SEQ ID NO: 864361 - RNA, 24 nt, Human
aggcaggagaaucgcuugaauccg

SEQ ID NO: 864362 - RNA, 20 nt, Human
aggcugaggcaggagaaucg

SEQ ID NO: 864363 - RNA, 24 nt, Human
aggcugaggcaggagaaucgcuug

SEQ ID NO: 864364 - RNA, 20 nt, Human
aggcugaggugggcggauca

SEQ ID NO: 864365 - RNA, 24 nt, Human
aucacugaaaaaaaagggucaaga

SEQ ID NO: 864366 - RNA, 20 nt, Human
auggugaaaccucgucucua

SEQ ID NO: 864367 - RNA, 25 nt, Human
caaaaaaaauuagcugggcguggug

SEQ ID NO: 864368 - RNA, 25 nt, Human
caccacugcacuccagccuggcgac

SEQ ID NO: 864369 - RNA, 21 nt, Human
cacccacaacuauauuuuccu

SEQ ID NO: 864370 - RNA, 22 nt, Human
cacuccagccuggcgacagagc

SEQ ID NO: 864371 - RNA, 23 nt, Human
cacuccagccuggcgacagagcg

SEQ ID NO: 864372 - RNA, 18 nt, Human
cacugcacuccagccugg

SEQ ID NO: 864373 - RNA, 18 nt, Human
cacugcacuccagccugg

SEQ ID NO: 864374 - RNA, 22 nt, Human
cacugcacuccagccuggcgac

SEQ ID NO: 864375 - RNA, 23 nt, Human
cacugcacuccagccuggcgaca

SEQ ID NO: 864376 - RNA, 24 nt, Human
cacugcacuccagccuggcgacag

SEQ ID NO: 864377 - RNA, 21 nt, Human
cagcacuuugggaggcugagg

SEQ ID NO: 864378 - RNA, 24 nt, Human
cagcacuuugggaggcugaggugg

SEQ ID NO: 864379 - RNA, 25 nt, Human
caucucaaaaaaaaaaaaaaaaaaa

SEQ ID NO: 864380 - RNA, 21 nt, Human
caucuggcugggcgcgguggc

SEQ ID NO: 864381 - RNA, 21 nt, Human
caugccaccuucccaccuaaa

SEQ ID NO: 864382 - RNA, 24 nt, Human
caugccaccuucccaccuaaacaa

SEQ ID NO: 864383 - RNA, 20 nt, Human
ccaccuaaacaaacucacuc

SEQ ID NO: 864384 - RNA, 21 nt, Human
ccaccuaaacaaacucacucc

SEQ ID NO: 864385 - RNA, 22 nt, Human
ccaccuuccugagggaaagcca

SEQ ID NO: 864386 - RNA, 19 nt, Human
ccacugcacuccagccugg

SEQ ID NO: 864387 - RNA, 19 nt, Human
ccacugcacuccagccugg

SEQ ID NO: 864388 - RNA, 20 nt, Human
ccacugcacuccagccuggc

SEQ ID NO: 864389 - RNA, 23 nt, Human
ccacugcacuccagccuggcgac

SEQ ID NO: 864390 - RNA, 19 nt, Human
cccaccuaaacaaacucac

SEQ ID NO: 864391 - RNA, 23 nt, Human
ccuaaacaaacucacuccucucu

SEQ ID NO: 864392 - RNA, 21 nt, Human
ccuggcgacagagcgagacuc

SEQ ID NO: 864393 - RNA, 21 nt, Human
ccuggcuaauauggugaaacc

SEQ ID NO: 864394 - RNA, 21 nt, Human
ccuggcuaauauggugaaacc

SEQ ID NO: 864395 - RNA, 24 nt, Human
ccuggcuaauauggugaaaccucg

SEQ ID NO: 864396 - RNA, 22 nt, Human
ccuguaaucucagcacuuuggg

SEQ ID NO: 864397 - RNA, 23 nt, Human
cgagacuccaucucaaaaaaaaa

SEQ ID NO: 864398 - RNA, 21 nt, Human
cgcaccacugcacuccagccu

SEQ ID NO: 864399 - RNA, 18 nt, Human
cucaaaaaaaaaaaaaaa

SEQ ID NO: 864400 - RNA, 27 nt, Human
cucaaaaaaaaaaaaaaaaaaacacaa

SEQ ID NO: 864401 - RNA, 19 nt, Human
cucacuccucucuccaccc

SEQ ID NO: 864402 - RNA, 24 nt, Human
cuccagccuggcgacagagcgaga

SEQ ID NO: 864403 - RNA, 19 nt, Human
cuccaucucaaaaaaaaaa

SEQ ID NO: 864404 - RNA, 19 nt, Human
cuugugggaaaaggguaac

SEQ ID NO: 864405 - RNA, 19 nt, Human
gaaaccucgucucuacuaa

SEQ ID NO: 864406 - RNA, 18 nt, Human
gagauauuuaaacauaga

SEQ ID NO: 864407 - RNA, 20 nt, Human
gcaccacugcacuccagccu

SEQ ID NO: 864408 - RNA, 23 nt, Human
gcacuccagccuggcgacagagc

SEQ ID NO: 864409 - RNA, 25 nt, Human
gccaccuucccaccuaaacaaacuc

SEQ ID NO: 864410 - RNA, 19 nt, Human
gccuguaaucucagcacuu

SEQ ID NO: 864411 - RNA, 24 nt, Human
gcuaauauggugaaaccucgucuc

SEQ ID NO: 864412 - RNA, 21 nt, Human
ggaaagccaugaugccaaucc

SEQ ID NO: 864413 - RNA, 23 nt, Human
ggcgcgguggcuuaugccuguaa

SEQ ID NO: 864414 - RNA, 21 nt, Human
ggcggaucaggaggucaggag

SEQ ID NO: 864415 - RNA, 20 nt, Human
gggaggcugaggugggcgga

SEQ ID NO: 864416 - RNA, 23 nt, Human
gguggcuuaugccuguaaucuca

SEQ ID NO: 864417 - RNA, 24 nt, Human
gguggcuuaugccuguaaucucag

SEQ ID NO: 864418 - RNA, 20 nt, Human
guaacagagucacauccaga

SEQ ID NO: 864419 - RNA, 21 nt, Human
guacugcccuuuauuuacaca

SEQ ID NO: 864420 - RNA, 24 nt, Human
gucgcaccacugcacuccagccug

SEQ ID NO: 864421 - RNA, 22 nt, Human
gugcagugagcugaggucgcac

SEQ ID NO: 864422 - RNA, 23 nt, Human
uaaaaggcacuuucauagagaua

SEQ ID NO: 864423 - RNA, 22 nt, Human
uaauauggugaaaccucgucuc

SEQ ID NO: 864424 - RNA, 24 nt, Human
uaauauggugaaaccucgucucua

SEQ ID NO: 864425 - RNA, 23 nt, Human
uaaucacugaaaaaaaaggguca

SEQ ID NO: 864426 - RNA, 23 nt, Human
uaaugacaacuucaucccaugcc

SEQ ID NO: 864427 - RNA, 21 nt, Human
uacacagagaagaugcucagu

SEQ ID NO: 864428 - RNA, 26 nt, Human
uacaguuaccacaaaaauaaaauagg

SEQ ID NO: 864429 - RNA, 21 nt, Human
uagaaacaaagcuucaaacau

SEQ ID NO: 864430 - RNA, 20 nt, Human
uaugccuguaaucucagcac

SEQ ID NO: 864431 - RNA, 24 nt, Human
uaugccuguaaucucagcacuuug

SEQ ID NO: 864432 - RNA, 21 nt, Human
ucaaaaaaaaaaaaaaaaaaa

SEQ ID NO: 864433 - RNA, 24 nt, Human
ucaggaggucaggagauggagacc

SEQ ID NO: 864434 - RNA, 18 nt, Human
uccacaccuggguugugg

SEQ ID NO: 864435 - RNA, 22 nt, Human
uccagccuggcgacagagcgag

SEQ ID NO: 864436 - RNA, 21 nt, Human
uccauaagcaaggucccaguc

SEQ ID NO: 864437 - RNA, 23 nt, Human
uccaucucaaaaaaaaaaaaaaa

SEQ ID NO: 864438 - RNA, 23 nt, Human
ucgcaccacugcacuccagccug

SEQ ID NO: 864439 - RNA, 24 nt, Human
ucgcuugaauccgggacacagagg

SEQ ID NO: 864440 - RNA, 24 nt, Human
ucgggaggcugaggcaggagaauc

SEQ ID NO: 864441 - RNA, 19 nt, Human
ucuaccucucuucucucca

SEQ ID NO: 864442 - RNA, 21 nt, Human
ucucuacuaaaaauccaaaaa

SEQ ID NO: 864443 - RNA, 25 nt, Human
ucucuacuaaaaauccaaaaaaaau

SEQ ID NO: 864444 - RNA, 24 nt, Human
ucuugugggaaaaggguaacagag

SEQ ID NO: 864445 - RNA, 22 nt, Human
ugagcugaggucgcaccacugc

SEQ ID NO: 864446 - RNA, 22 nt, Human
ugaggcaggagaaucgcuugaa

SEQ ID NO: 864447 - RNA, 25 nt, Human
ugaggcaggagaaucgcuugaaucc

SEQ ID NO: 864448 - RNA, 24 nt, Human
ugaggucgcaccacugcacuccag

SEQ ID NO: 864449 - RNA, 20 nt, Human
ugaggugggcggaucaggag

SEQ ID NO: 864450 - RNA, 21 nt, Human
ugaggugggcggaucaggagg

SEQ ID NO: 864451 - RNA, 22 nt, Human
ugaggugggcggaucaggaggu

SEQ ID NO: 864452 - RNA, 24 nt, Human
ugaggugggcggaucaggagguca

SEQ ID NO: 864453 - RNA, 23 nt, Human
ugccuguaaucucagcacuuugg

SEQ ID NO: 864454 - RNA, 23 nt, Human
ugccuguaaucucagcacuuugg

SEQ ID NO: 864455 - RNA, 24 nt, Human
ugccuguagucccugcuauucggg

SEQ ID NO: 864456 - RNA, 23 nt, Human
ugcuauucgggaggcugaggcag

SEQ ID NO: 864457 - RNA, 24 nt, Human
uggcuuaugccuguaaucucagca

SEQ ID NO: 864458 - RNA, 19 nt, Human
ugggaggcugaggugggcg

SEQ ID NO: 864459 - RNA, 24 nt, Human
ugggaggcugaggugggcggauca

SEQ ID NO: 864460 - RNA, 22 nt, Human
ugggcggaucaggaggucagga

SEQ ID NO: 864461 - RNA, 20 nt, Human
uggguuaagaucagccagag

SEQ ID NO: 864462 - RNA, 23 nt, Human
ugguggcgcaugccuguaguccc

SEQ ID NO: 864463 - RNA, 18 nt, Human
uuagcugggcgugguggc

SEQ ID NO: 864464 - RNA, 19 nt, Human
uuagcugggcgugguggcg

SEQ ID NO: 864465 - RNA, 24 nt, Human
uuagcugggcgugguggcgcaugc

SEQ ID NO: 864466 - RNA, 25 nt, Human
uugggaggcugaggugggcggauca

SEQ ID NO: 864467 - RNA, 23 nt, Human
uuugcuaaucacugaaaaaaaag

SEQ ID NO: 864468 - RNA, 18 nt, Human
aaacaggccccccagccc

SEQ ID NO: 864469 - RNA, 23 nt, Human
aagcaccagguugcccacccucc

SEQ ID NO: 864470 - RNA, 18 nt, Human
acaggccccccagcccac

SEQ ID NO: 864471 - RNA, 18 nt, Human
agaagcccggcuccccag

SEQ ID NO: 864472 - RNA, 19 nt, Human
agcaccagguugcccaccc

SEQ ID NO: 864473 - RNA, 22 nt, Human
cacacaggccccacugaguggu

SEQ ID NO: 864474 - RNA, 19 nt, Human
caccagguugcccacccuc

SEQ ID NO: 864475 - RNA, 20 nt, Human
cacgaggagggacgcaggcc

SEQ ID NO: 864476 - RNA, 21 nt, Human
cagcccacggugccccuucag

SEQ ID NO: 864477 - RNA, 19 nt, Human
caggagcggaacccggccg

SEQ ID NO: 864478 - RNA, 24 nt, Human
ccaaaacaggccccccagcccacg

SEQ ID NO: 864479 - RNA, 25 nt, Human
ccaaaacaggccccccagcccacgg

SEQ ID NO: 864480 - RNA, 20 nt, Human
cccagcccacggugccccuu

SEQ ID NO: 864481 - RNA, 19 nt, Human
ccccacuucccagacaccc

SEQ ID NO: 864482 - RNA, 21 nt, Human
ccccccagcccacggugcccc

SEQ ID NO: 864483 - RNA, 22 nt, Human
ccccgugugccccacuucccag

SEQ ID NO: 864484 - RNA, 19 nt, Human
cccgugugccccacuuccc

SEQ ID NO: 864485 - RNA, 22 nt, Human
cccgugugccccacuucccaga

SEQ ID NO: 864486 - RNA, 21 nt, Human
ccuccgaggcugggcagaugg

SEQ ID NO: 864487 - RNA, 19 nt, Human
cgagguuuuuuuuuuuuuu

SEQ ID NO: 864488 - RNA, 21 nt, Human
cgagguuuuuuuuuuuuuuuu

SEQ ID NO: 864489 - RNA, 19 nt, Human
cggcuccccaggaacuccc

SEQ ID NO: 864490 - RNA, 22 nt, Human
cucggcgcccacacaggcccca

SEQ ID NO: 864491 - RNA, 19 nt, Human
gagaagcccggcuccccag

SEQ ID NO: 864492 - RNA, 19 nt, Human
gagguggcccucauguggg

SEQ ID NO: 864493 - RNA, 19 nt, Human
gcagauggcuggccagggc

SEQ ID NO: 864494 - RNA, 20 nt, Human
gcagauggcuggccagggcc

SEQ ID NO: 864495 - RNA, 18 nt, Human
ggaggccccgugugcccc

SEQ ID NO: 864496 - RNA, 21 nt, Human
ggcugggcagauggcuggcca

SEQ ID NO: 864497 - RNA, 18 nt, Human
gguccagcuggccgaggu

SEQ ID NO: 864498 - RNA, 19 nt, Human
uaggaagggcugugcgaag

SEQ ID NO: 864499 - RNA, 20 nt, Human
ucacgaggagggacgcaggc

SEQ ID NO: 864500 - RNA, 19 nt, Human
uccccaggaacuccccggc

SEQ ID NO: 864501 - RNA, 21 nt, Human
ucucggcgcccacacaggccc

SEQ ID NO: 864502 - RNA, 22 nt, Human
ucucggcgcccacacaggcccc

SEQ ID NO: 864503 - RNA, 21 nt, Human
ugagugguccuguguguccaa

SEQ ID NO: 864504 - RNA, 23 nt, Human
ugccccacuucccagacacccag

SEQ ID NO: 864505 - RNA, 22 nt, Human
ugccugcuccaaaacaggcccc

SEQ ID NO: 864506 - RNA, 22 nt, Human
uucagggcggggcccgcucucc

SEQ ID NO: 864507 - RNA, 24 nt, Human
uucauaguugggaggccccgugug

SEQ ID NO: 864508 - RNA, 18 nt, Human
uuuuuuuuuuuuuuuuug

SEQ ID NO: 864509 - RNA, 24 nt, Human
uuuuuuuuuuuuuuuuuggccuuu

SEQ ID NO: 864510 - RNA, 22 nt, Human
uuuuuuuuuuuuuuuuuuuggc

SEQ ID NO: 864511 - RNA, 20 nt, Human
aagcucaguuacauggcuau

SEQ ID NO: 864512 - RNA, 20 nt, Human
agcacguugggaggcugaag

SEQ ID NO: 864513 - RNA, 21 nt, Human
agccugggcaacaugaugaaa

SEQ ID NO: 864514 - RNA, 24 nt, Human
agccugggcaacaugaugaaaucc

SEQ ID NO: 864515 - RNA, 20 nt, Human
agguauauauguauuagcca

SEQ ID NO: 864516 - RNA, 23 nt, Human
cagcaagauccucuuccaagcuc

SEQ ID NO: 864517 - RNA, 18 nt, Human
cagcacguugggaggcug

SEQ ID NO: 864518 - RNA, 24 nt, Human
cauccauguucugagcauuaggaa

SEQ ID NO: 864519 - RNA, 19 nt, Human
ccagcuguugccaugugac

SEQ ID NO: 864520 - RNA, 22 nt, Human
ccaggacagcaagauccucuuc

SEQ ID NO: 864521 - RNA, 18 nt, Human
cccccgggaccccgcagg

SEQ ID NO: 864522 - RNA, 22 nt, Human
cccccgggaccccgcaggguca

SEQ ID NO: 864523 - RNA, 18 nt, Human
ccccgggaccccgcaggg

SEQ ID NO: 864524 - RNA, 19 nt, Human
ccgcggccgccggcuccgc

SEQ ID NO: 864525 - RNA, 22 nt, Human
ccugggcaacaugaugaaaucc

SEQ ID NO: 864526 - RNA, 24 nt, Human
ccugggcaacaugaugaaauccug

SEQ ID NO: 864527 - RNA, 18 nt, Human
cggcucccccuccccccc

SEQ ID NO: 864528 - RNA, 20 nt, Human
cucccgcggccgccggcucc

SEQ ID NO: 864529 - RNA, 21 nt, Human
cuguaaucccagcacguuggg

SEQ ID NO: 864530 - RNA, 24 nt, Human
gcuguaaucccagcacguugggag

SEQ ID NO: 864531 - RNA, 22 nt, Human
ggaccccgcagggucagcuccc

SEQ ID NO: 864532 - RNA, 20 nt, Human
ggggaggggaggcccggcag

SEQ ID NO: 864533 - RNA, 19 nt, Human
uacccccccgccaaagguu

SEQ ID NO: 864534 - RNA, 26 nt, Human
ucagugggggcuucgcggcucccccu

SEQ ID NO: 864535 - RNA, 22 nt, Human
uccaagcucaguuacauggcua

SEQ ID NO: 864536 - RNA, 22 nt, Human
uccacaaagcuuggacuaucca

SEQ ID NO: 864537 - RNA, 21 nt, Human
uccccccccgggaccccgcag

SEQ ID NO: 864538 - RNA, 23 nt, Human
ucccccuccccccccgggacccc

SEQ ID NO: 864539 - RNA, 21 nt, Human
uggcaugaccaccggcuguaa

SEQ ID NO: 864540 - RNA, 19 nt, Human
uggcugaguuccuuaccac

SEQ ID NO: 864541 - RNA, 18 nt, Human
ugggaggcugaaggcugg

SEQ ID NO: 864542 - RNA, 22 nt, Human
ugugacgaauuacccccccgcc

SEQ ID NO: 864543 - RNA, 21 nt, Human
uucagguacugggauccaguu

SEQ ID NO: 864544 - RNA, 18 nt, Human
uugggaggcugaaggcug

SEQ ID NO: 864545 - RNA, 21 nt, Human
uuuuuuuuuuuuuuuuuuaca

SEQ ID NO: 864546 - RNA, 22 nt, Human
aaaaauaagccaucucucggac

SEQ ID NO: 864547 - RNA, 23 nt, Human
aaacagaggucaucaaggccaag

SEQ ID NO: 864548 - RNA, 26 nt, Human
aacaguccuucugcaggcaugccucc

SEQ ID NO: 864549 - RNA, 21 nt, Human
aagcacgcuuuguugaaaaua

SEQ ID NO: 864550 - RNA, 22 nt, Human
aagcugaggggcugggagagcu

SEQ ID NO: 864551 - RNA, 18 nt, Human
aagggcaccuucuccugu

SEQ ID NO: 864552 - RNA, 24 nt, Human
aaguguccucccugaguccugccc

SEQ ID NO: 864553 - RNA, 23 nt, Human
acugcguguaacacccgucuccu

SEQ ID NO: 864554 - RNA, 22 nt, Human
acuggaagccccugggcagcag

SEQ ID NO: 864555 - RNA, 24 nt, Human
agaaacagaggucaucaaggccaa

SEQ ID NO: 864556 - RNA, 19 nt, Human
agacacauggccccaagug

SEQ ID NO: 864557 - RNA, 24 nt, Human
agacacauggccccaaguguccuc

SEQ ID NO: 864558 - RNA, 18 nt, Human
agcagugggggugggcug

SEQ ID NO: 864559 - RNA, 22 nt, Human
agccauauacaagucuacagcc

SEQ ID NO: 864560 - RNA, 20 nt, Human
agcugaggggcugggagagc

SEQ ID NO: 864561 - RNA, 22 nt, Human
agcuggggauggcucccugagc

SEQ ID NO: 864562 - RNA, 23 nt, Human
aggaagaaacagaggucaucaag

SEQ ID NO: 864563 - RNA, 24 nt, Human
aggaagaaacagaggucaucaagg

SEQ ID NO: 864564 - RNA, 19 nt, Human
aggaagagccgguccaggg

SEQ ID NO: 864565 - RNA, 18 nt, Human
aggcccccaccacucucc

SEQ ID NO: 864566 - RNA, 19 nt, Human
aggggucaagagcgccagg

SEQ ID NO: 864567 - RNA, 19 nt, Human
aggucaggugacccgggga

SEQ ID NO: 864568 - RNA, 21 nt, Human
aguccucacuggaaucagggg

SEQ ID NO: 864569 - RNA, 25 nt, Human
caacaagcgcauccgugcgggacca

SEQ ID NO: 864570 - RNA, 19 nt, Human
caacggcagcaaacgugaa

SEQ ID NO: 864571 - RNA, 21 nt, Human
caagaggacaccuggcuuggc

SEQ ID NO: 864572 - RNA, 21 nt, Human
caaguguccucccugaguccu

SEQ ID NO: 864573 - RNA, 19 nt, Human
caccaccagagggacagaa

SEQ ID NO: 864574 - RNA, 20 nt, Human
caccaccagagggacagaag

SEQ ID NO: 864575 - RNA, 18 nt, Human
caccagagggacagaagu

SEQ ID NO: 864576 - RNA, 21 nt, Human
caccauccugcugcccucagg

SEQ ID NO: 864577 - RNA, 20 nt, Human
caccggagaacacuugggga

SEQ ID NO: 864578 - RNA, 21 nt, Human
caccggagaacacuuggggag

SEQ ID NO: 864579 - RNA, 18 nt, Human
caccuggcuuggccuggc

SEQ ID NO: 864580 - RNA, 20 nt, Human
caccugggacccuggugcuc

SEQ ID NO: 864581 - RNA, 21 nt, Human
cacggccaaguauacacaggc

SEQ ID NO: 864582 - RNA, 21 nt, Human
cacucagccucuguccugccu

SEQ ID NO: 864583 - RNA, 23 nt, Human
cagaacuccccagcacuguuucc

SEQ ID NO: 864584 - RNA, 21 nt, Human
cagaggucaucaaggccaagc

SEQ ID NO: 864585 - RNA, 23 nt, Human
cagcagggagagggaaggggcuc

SEQ ID NO: 864586 - RNA, 19 nt, Human
cagcagugggggugggcug

SEQ ID NO: 864587 - RNA, 19 nt, Human
cagcagugggggugggcug

SEQ ID NO: 864588 - RNA, 22 nt, Human
cagcagugggggugggcugcgg

SEQ ID NO: 864589 - RNA, 23 nt, Human
cagcagugggggugggcugcggc

SEQ ID NO: 864590 - RNA, 21 nt, Human
cagcaucccacguucuguugc

SEQ ID NO: 864591 - RNA, 20 nt, Human
cagccacgcugaaaccccuc

SEQ ID NO: 864592 - RNA, 24 nt, Human
cagcccccgccccacgcagcugcc

SEQ ID NO: 864593 - RNA, 28 nt, Human
cagccucuaggcauccaccagcuucccu

SEQ ID NO: 864594 - RNA, 22 nt, Human
cagccugagcccccaacggcag

SEQ ID NO: 864595 - RNA, 23 nt, Human
cagccugagcccccaacggcagc

SEQ ID NO: 864596 - RNA, 21 nt, Human
caggccccggggccucagagg

SEQ ID NO: 864597 - RNA, 19 nt, Human
cagggccaguccucacugg

SEQ ID NO: 864598 - RNA, 24 nt, Human
ccaccaguccucugcaguuucucc

SEQ ID NO: 864599 - RNA, 21 nt, Human
ccacucagccucuguccugcc

SEQ ID NO: 864600 - RNA, 24 nt, Human
ccagaccaccuuuccacucagccu

SEQ ID NO: 864601 - RNA, 23 nt, Human
ccagagggacagaaguggccagg

SEQ ID NO: 864602 - RNA, 21 nt, Human
ccagcuucccugagcugugca

SEQ ID NO: 864603 - RNA, 19 nt, Human
ccaggcagcugguccaccc

SEQ ID NO: 864604 - RNA, 24 nt, Human
ccaggggggguccaucuuugggcc

SEQ ID NO: 864605 - RNA, 24 nt, Human
ccaggucugccugugucugggucu

SEQ ID NO: 864606 - RNA, 18 nt, Human
ccaugacaccugggaccc

SEQ ID NO: 864607 - RNA, 25 nt, Human
cccaaguguccucccugaguccugc

SEQ ID NO: 864608 - RNA, 23 nt, Human
cccacaggacgcagccacgcuga

SEQ ID NO: 864609 - RNA, 21 nt, Human
cccauuccacccuaacccgga

SEQ ID NO: 864610 - RNA, 23 nt, Human
cccauuccacccuaacccggaaa

SEQ ID NO: 864611 - RNA, 21 nt, Human
ccccaccacucuccucccagc

SEQ ID NO: 864612 - RNA, 20 nt, Human
ccccacccaggccaccaucc

SEQ ID NO: 864613 - RNA, 23 nt, Human
ccccacgcagcugccggucucgg

SEQ ID NO: 864614 - RNA, 19 nt, Human
cccccacaggacgcagcca

SEQ ID NO: 864615 - RNA, 18 nt, Human
ccccgccccaacaggccc

SEQ ID NO: 864616 - RNA, 19 nt, Human
ccccgccccaacaggcccc

SEQ ID NO: 864617 - RNA, 21 nt, Human
cccugcaggcaucugggccug

SEQ ID NO: 864618 - RNA, 22 nt, Human
cccugcaucugucccgagagcc

SEQ ID NO: 864619 - RNA, 22 nt, Human
ccggucucgggcgccgggcgca

SEQ ID NO: 864620 - RNA, 19 nt, Human
ccuacagaaccacgugcug

SEQ ID NO: 864621 - RNA, 23 nt, Human
ccucagaggaugcugcgccaggc

SEQ ID NO: 864622 - RNA, 21 nt, Human
ccucuaggcauccaccagcuu

SEQ ID NO: 864623 - RNA, 21 nt, Human
ccugagcuggggaccuagaag

SEQ ID NO: 864624 - RNA, 21 nt, Human
ccugcagccaugcugcacguc

SEQ ID NO: 864625 - RNA, 22 nt, Human
ccugcaggcaucugggccugaa

SEQ ID NO: 864626 - RNA, 19 nt, Human
ccugggcagcaggucaggu

SEQ ID NO: 864627 - RNA, 23 nt, Human
ccuucagccucuaggcauccacc

SEQ ID NO: 864628 - RNA, 20 nt, Human
cgccuugccgugaaucucca

SEQ ID NO: 864629 - RNA, 21 nt, Human
cggucucgggcgccgggcgca

SEQ ID NO: 864630 - RNA, 21 nt, Human
cuaugcccucucuccagacac

SEQ ID NO: 864631 - RNA, 24 nt, Human
cucaucggcaggcuaguguaacaa

SEQ ID NO: 864632 - RNA, 19 nt, Human
cuccagcagcccaggugcc

SEQ ID NO: 864633 - RNA, 18 nt, Human
cuccagcaucccacguuc

SEQ ID NO: 864634 - RNA, 19 nt, Human
cucuuccaaccccgcccca

SEQ ID NO: 864635 - RNA, 24 nt, Human
cugcaggcaugccuccagcauccc

SEQ ID NO: 864636 - RNA, 18 nt, Human
cuggaacagccgcuccag

SEQ ID NO: 864637 - RNA, 20 nt, Human
cuguccugccucgccuguug

SEQ ID NO: 864638 - RNA, 18 nt, Human
gaacagcagugggggugg

SEQ ID NO: 864639 - RNA, 28 nt, Human
gaaguccucucaauauuugagucucuuc

SEQ ID NO: 864640 - RNA, 20 nt, Human
gacagaaguggccaggccca

SEQ ID NO: 864641 - RNA, 20 nt, Human
gacgcagccacgcugaaacc

SEQ ID NO: 864642 - RNA, 22 nt, Human
gacgcagccacgcugaaacccc

SEQ ID NO: 864643 - RNA, 18 nt, Human
gagagcaucauuuauggc

SEQ ID NO: 864644 - RNA, 23 nt, Human
gagcuggggauggcucccugagc

SEQ ID NO: 864645 - RNA, 20 nt, Human
gcaaagcacauacucgcuga

SEQ ID NO: 864646 - RNA, 18 nt, Human
gcagcacacaucccugca

SEQ ID NO: 864647 - RNA, 21 nt, Human
gcagccugagcccccaacggc

SEQ ID NO: 864648 - RNA, 22 nt, Human
gccccaggcuuuacgccuugcc

SEQ ID NO: 864649 - RNA, 24 nt, Human
gccccgcccaccaguccucugcag

SEQ ID NO: 864650 - RNA, 19 nt, Human
gcccucagggccuugauuc

SEQ ID NO: 864651 - RNA, 19 nt, Human
gcugcacgucugacugaga

SEQ ID NO: 864652 - RNA, 18 nt, Human
gcugcgaagcugaggggc

SEQ ID NO: 864653 - RNA, 18 nt, Human
gcuuuguugaaaauacuc

SEQ ID NO: 864654 - RNA, 21 nt, Human
ggaaggggcuccagaccaccu

SEQ ID NO: 864655 - RNA, 22 nt, Human
ggaccuagaagacgcugcugac

SEQ ID NO: 864656 - RNA, 20 nt, Human
ggaggcaaaaagaggcuuug

SEQ ID NO: 864657 - RNA, 23 nt, Human
ggaggcaaaaagaggcuuugggu

SEQ ID NO: 864658 - RNA, 20 nt, Human
gggauggcucccugagcugg

SEQ ID NO: 864659 - RNA, 22 nt, Human
gggauucucuuggcagcuggug

SEQ ID NO: 864660 - RNA, 22 nt, Human
gggccccuucaugguggggccc

SEQ ID NO: 864661 - RNA, 18 nt, Human
gggcuccagaccaccuuu

SEQ ID NO: 864662 - RNA, 21 nt, Human
ggggauggcucccugagcugg

SEQ ID NO: 864663 - RNA, 20 nt, Human
ggggggcccaggugggcacu

SEQ ID NO: 864664 - RNA, 20 nt, Human
guccucccugaguccugccc

SEQ ID NO: 864665 - RNA, 22 nt, Human
guucuguugccaugacaccugg

SEQ ID NO: 864666 - RNA, 26 nt, Human
uagaaaaauaagccaucucucggacg

SEQ ID NO: 864667 - RNA, 21 nt, Human
uaggcuuccaucccugcccag

SEQ ID NO: 864668 - RNA, 24 nt, Human
uauacacaggcagaacuccccagc

SEQ ID NO: 864669 - RNA, 20 nt, Human
uaugcucgcugcgcgggucg

SEQ ID NO: 864670 - RNA, 22 nt, Human
ucaaggccaagcugcaagagga

SEQ ID NO: 864671 - RNA, 21 nt, Human
ucagggccaguccucacugga

SEQ ID NO: 864672 - RNA, 21 nt, Human
uccaaggucagcagggagagg

SEQ ID NO: 864673 - RNA, 21 nt, Human
uccacaacuauguggguuugu

SEQ ID NO: 864674 - RNA, 20 nt, Human
ucccuacagaaccacgugcu

SEQ ID NO: 864675 - RNA, 20 nt, Human
ucccuacagaaccacgugcu

SEQ ID NO: 864676 - RNA, 20 nt, Human
ucccugcccagaguaucguu

SEQ ID NO: 864677 - RNA, 18 nt, Human
ucccugggggggcccagg

SEQ ID NO: 864678 - RNA, 21 nt, Human
ucccugggggggcccaggugg

SEQ ID NO: 864679 - RNA, 18 nt, Human
ucgcugaacugggaggag

SEQ ID NO: 864680 - RNA, 23 nt, Human
ucgcugggccagcuuuggacccu

SEQ ID NO: 864681 - RNA, 22 nt, Human
ucgggcgccgggcgcagcuucg

SEQ ID NO: 864682 - RNA, 21 nt, Human
ucguggggcaggcagcagguc

SEQ ID NO: 864683 - RNA, 23 nt, Human
ucucugcaggcguccacaacuau

SEQ ID NO: 864684 - RNA, 23 nt, Human
ucuguugccaugacaccugggac

SEQ ID NO: 864685 - RNA, 19 nt, Human
ugaaguagcugcagacggc

SEQ ID NO: 864686 - RNA, 22 nt, Human
ugaccccucagguuagcaaacc

SEQ ID NO: 864687 - RNA, 23 nt, Human
ugaccccucagguuagcaaaccu

SEQ ID NO: 864688 - RNA, 22 nt, Human
ugacccggggagugcagccuga

SEQ ID NO: 864689 - RNA, 18 nt, Human
ugagaaaacuggagcugg

SEQ ID NO: 864690 - RNA, 18 nt, Human
ugagaacugagcaccaga

SEQ ID NO: 864691 - RNA, 19 nt, Human
ugcaagaggacaccuggcu

SEQ ID NO: 864692 - RNA, 22 nt, Human
ugccaggcagcugguccacccu

SEQ ID NO: 864693 - RNA, 22 nt, Human
ugcccagaguaucguuggaagc

SEQ ID NO: 864694 - RNA, 18 nt, Human
ugcccaggaagaaacaga

SEQ ID NO: 864695 - RNA, 21 nt, Human
ugcguguaacacccgucuccu

SEQ ID NO: 864696 - RNA, 18 nt, Human
uggaaugcgugcacaggg

SEQ ID NO: 864697 - RNA, 19 nt, Human
uggagggagagaaaaagga

SEQ ID NO: 864698 - RNA, 23 nt, Human
uggagggagagaaaaaggagaag

SEQ ID NO: 864699 - RNA, 26 nt, Human
uggagggagagaaaaaggagaagucc

SEQ ID NO: 864700 - RNA, 23 nt, Human
uggcagggaggugggugccugcu

SEQ ID NO: 864701 - RNA, 22 nt, Human
uggcucccugagcuggggaccu

SEQ ID NO: 864702 - RNA, 19 nt, Human
ugggagcucuggagggaga

SEQ ID NO: 864703 - RNA, 19 nt, Human
ugggaggaguccacaccgc

SEQ ID NO: 864704 - RNA, 20 nt, Human
uggggagcugucacaaggcc

SEQ ID NO: 864705 - RNA, 23 nt, Human
uuccaaccccgccccaacaggcc

SEQ ID NO: 864706 - RNA, 23 nt, Human
uucccuguccuucagccucuagg

SEQ ID NO: 864707 - RNA, 19 nt, Human
uugaaaauacucugggcca

SEQ ID NO: 864708 - RNA, 21 nt, Human
uuggcagcuggugggugccug

SEQ ID NO: 864709 - RNA, 22 nt, Human
uuggggagcugucacaaggcca

SEQ ID NO: 864710 - RNA, 24 nt, Human
uuuugcaguuagggcugcauccau

SEQ ID NO: 864711 - RNA, 20 nt, Human
uuuuuuuuuuuuuuuuuugg

SEQ ID NO: 864712 - RNA, 23 nt, Human
agauguguuuauuuuggagccua

SEQ ID NO: 864713 - RNA, 20 nt, Human
cacuggaggggugagagcuc

SEQ ID NO: 864714 - RNA, 20 nt, Human
cagugaggaagccccuggag

SEQ ID NO: 864715 - RNA, 20 nt, Human
ccccuggaggaaagucuuuc

SEQ ID NO: 864716 - RNA, 19 nt, Human
cuuuccggcaauuccccag

SEQ ID NO: 864717 - RNA, 20 nt, Human
gaagccccuggaggaaaguc

SEQ ID NO: 864718 - RNA, 19 nt, Human
guuugcucuuuccggcaau

SEQ ID NO: 864719 - RNA, 19 nt, Human
uccccagugaggaagcccc

SEQ ID NO: 864720 - RNA, 23 nt, Human
uccggcaauuccccagugaggaa

SEQ ID NO: 864721 - RNA, 18 nt, Human
uguguuuauuuuggagcc

SEQ ID NO: 864722 - RNA, 21 nt, Human
uguguuuauuuuggagccuac

SEQ ID NO: 864723 - RNA, 23 nt, Human
uuauuguuuguuuugaaacuuuu

SEQ ID NO: 864724 - RNA, 21 nt, Human
uugaaacuuuuaauccaauaa

SEQ ID NO: 864725 - RNA, 19 nt, Human
uuguuugcucuuuccggca

SEQ ID NO: 864726 - RNA, 20 nt, Human
uuguuuguuuugaaacuuuu

SEQ ID NO: 864727 - RNA, 19 nt, Human
uuuuuuguuugcucuuucc

SEQ ID NO: 864728 - RNA, 25 nt, Human
uuuuuuuuuuuuuuuucauuauuuu

SEQ ID NO: 864729 - RNA, 21 nt, Human
uuuuuuuuuuuuuuuuucauu

SEQ ID NO: 864730 - RNA, 18 nt, Human
aaauuaggcaggaaaaaa

SEQ ID NO: 864731 - RNA, 22 nt, Human
acagcacagcguuccccacagu

SEQ ID NO: 864732 - RNA, 18 nt, Human
acaguucucugcucugcu

SEQ ID NO: 864733 - RNA, 19 nt, Human
aggaaaaaaaaacccaagg

SEQ ID NO: 864734 - RNA, 18 nt, Human
aggcaggaaaaaaaaacc

SEQ ID NO: 864735 - RNA, 18 nt, Human
aggcaggaaaaaaaaacc

SEQ ID NO: 864736 - RNA, 21 nt, Human
aggcaggaaaaaaaaacccaa

SEQ ID NO: 864737 - RNA, 23 nt, Human
aggcaggaaaaaaaaacccaagg

SEQ ID NO: 864738 - RNA, 23 nt, Human
cacaguucucugcucugcucucc

SEQ ID NO: 864739 - RNA, 20 nt, Human
cagcguuccccacaguucuc

SEQ ID NO: 864740 - RNA, 18 nt, Human
guuggaaaucacagaaau

SEQ ID NO: 864741 - RNA, 20 nt, Human
guuuauagucauuucauguu

SEQ ID NO: 864742 - RNA, 20 nt, Human
uaggcaggaaaaaaaaaccu

SEQ ID NO: 864743 - RNA, 30 nt, Human
ucuccugcgagccggggaaggagaggggcu

SEQ ID NO: 864744 - RNA, 18 nt, Human
ugagcucgggcgggggcu

SEQ ID NO: 864745 - RNA, 19 nt, Human
ugagcucgggcgggggcug

SEQ ID NO: 864746 - RNA, 18 nt, Human
ugcucugcucuccugcga

SEQ ID NO: 864747 - RNA, 18 nt, Human
uuggaaaucacagaaauu

SEQ ID NO: 864748 - RNA, 21 nt, Human
uugguuggaaaucacagaaau

SEQ ID NO: 864749 - RNA, 21 nt, Human
uuuuuuuuuuuuuuuuucauu

SEQ ID NO: 864750 - RNA, 21 nt, Human
aaagauuaucacacuggauaa

SEQ ID NO: 864751 - RNA, 22 nt, Human
aagaacagaaaagaauguugac

SEQ ID NO: 864752 - RNA, 22 nt, Human
aagaugccaggguuccuaagua

SEQ ID NO: 864753 - RNA, 22 nt, Human
aagcaccgaagaacccagcgac

SEQ ID NO: 864754 - RNA, 19 nt, Human
aagccaguaccaaaugcgc

SEQ ID NO: 864755 - RNA, 20 nt, Human
aaguaucacaaaagccagua

SEQ ID NO: 864756 - RNA, 19 nt, Human
aauaauuaaugccaagaac

SEQ ID NO: 864757 - RNA, 21 nt, Human
aaugccaagaacagaaaagaa

SEQ ID NO: 864758 - RNA, 20 nt, Human
acaaaccucaaggacccaga

SEQ ID NO: 864759 - RNA, 22 nt, Human
acagcaauaauuaaugccaaga

SEQ ID NO: 864760 - RNA, 20 nt, Human
acauuuuauuuaaacuuuuu

SEQ ID NO: 864761 - RNA, 25 nt, Human
acguguugcccggcccgccaagcgg

SEQ ID NO: 864762 - RNA, 21 nt, Human
agagacggcggcagcuccagg

SEQ ID NO: 864763 - RNA, 18 nt, Human
agcagccacagccugugg

SEQ ID NO: 864764 - RNA, 19 nt, Human
agcagccacagccuguggc

SEQ ID NO: 864765 - RNA, 22 nt, Human
agcaggugccaggugcgacaca

SEQ ID NO: 864766 - RNA, 18 nt, Human
agccacagccuguggcug

SEQ ID NO: 864767 - RNA, 19 nt, Human
agccuguggcuggggugcu

SEQ ID NO: 864768 - RNA, 18 nt, Human
agcgggccaaggccagga

SEQ ID NO: 864769 - RNA, 19 nt, Human
agcguccagcccugcccaa

SEQ ID NO: 864770 - RNA, 27 nt, Human
aggggguaucauggcuuugggacggac

SEQ ID NO: 864771 - RNA, 18 nt, Human
aggucccagcguccagcc

SEQ ID NO: 864772 - RNA, 21 nt, Human
auuucuuccuggucaucaaag

SEQ ID NO: 864773 - RNA, 23 nt, Human
caccgaagaacccagcgacgccg

SEQ ID NO: 864774 - RNA, 19 nt, Human
cagaagcaccgaagaaccc

SEQ ID NO: 864775 - RNA, 19 nt, Human
cagaccccacagcagaccc

SEQ ID NO: 864776 - RNA, 18 nt, Human
cagacgcaggcggguggc

SEQ ID NO: 864777 - RNA, 19 nt, Human
cagcgacgccggugggacc

SEQ ID NO: 864778 - RNA, 21 nt, Human
cagcuccaggucccagcgucc

SEQ ID NO: 864779 - RNA, 25 nt, Human
cagcuccaggucccagcguccagcc

SEQ ID NO: 864780 - RNA, 18 nt, Human
cagcugccccacugcucc

SEQ ID NO: 864781 - RNA, 20 nt, Human
cauggcucgccugagcucug

SEQ ID NO: 864782 - RNA, 24 nt, Human
ccacagccuguggcuggggugcuu

SEQ ID NO: 864783 - RNA, 18 nt, Human
ccagggcagaccccacag

SEQ ID NO: 864784 - RNA, 21 nt, Human
cccacugcuccuuccauccuu

SEQ ID NO: 864785 - RNA, 18 nt, Human
cccaggcccccaagcucu

SEQ ID NO: 864786 - RNA, 20 nt, Human
ccccaaucccccaaugcuug

SEQ ID NO: 864787 - RNA, 22 nt, Human
ccccacugcuccuuccauccuu

SEQ ID NO: 864788 - RNA, 19 nt, Human
cccccaagcucugccacca

SEQ ID NO: 864789 - RNA, 22 nt, Human
ccccugcccaggcccccaagcu

SEQ ID NO: 864790 - RNA, 18 nt, Human
ccccuucucugccggccc

SEQ ID NO: 864791 - RNA, 18 nt, Human
cccgccaagcgggccccu

SEQ ID NO: 864792 - RNA, 22 nt, Human
cccgccaagcgggccccugccc

SEQ ID NO: 864793 - RNA, 22 nt, Human
cccugcccaggcccccaagcuc

SEQ ID NO: 864794 - RNA, 20 nt, Human
ccgcccgccgcccgcugucc

SEQ ID NO: 864795 - RNA, 20 nt, Human
ccgcccgccgcccgcugucc

SEQ ID NO: 864796 - RNA, 22 nt, Human
ccggccccgccucugcugggag

SEQ ID NO: 864797 - RNA, 20 nt, Human
ccggcuccccuucugcgcgg

SEQ ID NO: 864798 - RNA, 22 nt, Human
ccggggcagggucgggcugggc

SEQ ID NO: 864799 - RNA, 22 nt, Human
ccucaaggacccagacacacag

SEQ ID NO: 864800 - RNA, 21 nt, Human
cgcgccgcccgccgcccgcug

SEQ ID NO: 864801 - RNA, 27 nt, Human
cguccccucccgcagcggggcacaguc

SEQ ID NO: 864802 - RNA, 24 nt, Human
cuaaguaucacaaaagccaguacc

SEQ ID NO: 864803 - RNA, 23 nt, Human
cuccaggucccagcguccagccc

SEQ ID NO: 864804 - RNA, 18 nt, Human
cuccuuccauccuugccc

SEQ ID NO: 864805 - RNA, 26 nt, Human
cucgcgcgucggucccuucuucccac

SEQ ID NO: 864806 - RNA, 20 nt, Human
cugccaccacuggggugccg

SEQ ID NO: 864807 - RNA, 21 nt, Human
cugcuccuuccauccuugccc

SEQ ID NO: 864808 - RNA, 22 nt, Human
cugcuccuuccauccuugcccc

SEQ ID NO: 864809 - RNA, 19 nt, Human
cuggucaucaaagagaaac

SEQ ID NO: 864810 - RNA, 23 nt, Human
cuucucugccggccccgccucug

SEQ ID NO: 864811 - RNA, 22 nt, Human
cuuuuuuuuuuaaaaaaaagac

SEQ ID NO: 864812 - RNA, 20 nt, Human
gacucgcgcgucggucccuu

SEQ ID NO: 864813 - RNA, 19 nt, Human
gagcagccacagccugugg

SEQ ID NO: 864814 - RNA, 23 nt, Human
gcagcagccuggguuccucccgg

SEQ ID NO: 864815 - RNA, 23 nt, Human
gcaggcggguggcugcgcuuccc

SEQ ID NO: 864816 - RNA, 22 nt, Human
gccccugcccaggcccccaagc

SEQ ID NO: 864817 - RNA, 18 nt, Human
gccguccccucccgcagc

SEQ ID NO: 864818 - RNA, 20 nt, Human
gcgacacaggagcggggaca

SEQ ID NO: 864819 - RNA, 20 nt, Human
gcgcaagguggaaguggggc

SEQ ID NO: 864820 - RNA, 23 nt, Human
gcggggacaucccugaccccaga

SEQ ID NO: 864821 - RNA, 18 nt, Human
ggaccaggcggcccugcu

SEQ ID NO: 864822 - RNA, 23 nt, Human
ggcagggucgggcugggcagggc

SEQ ID NO: 864823 - RNA, 19 nt, Human
ggccggggcagggucgggc

SEQ ID NO: 864824 - RNA, 24 nt, Human
ggcugggcagggcagcagccuggg

SEQ ID NO: 864825 - RNA, 20 nt, Human
gggccccugcccaggccccc

SEQ ID NO: 864826 - RNA, 23 nt, Human
gggugcugggauuucuuccuggu

SEQ ID NO: 864827 - RNA, 22 nt, Human
uaaugccaagaacagaaaagaa

SEQ ID NO: 864828 - RNA, 24 nt, Human
uacaaaccucaaggacccagacac

SEQ ID NO: 864829 - RNA, 23 nt, Human
uagaaaagaugccaggguuccua

SEQ ID NO: 864830 - RNA, 23 nt, Human
uauagaaaagaugccaggguucc

SEQ ID NO: 864831 - RNA, 21 nt, Human
ucaaagagaaacguacaaacc

SEQ ID NO: 864832 - RNA, 20 nt, Human
ucccugaccccagacgcagg

SEQ ID NO: 864833 - RNA, 19 nt, Human
ugaaaagauuaucacacug

SEQ ID NO: 864834 - RNA, 22 nt, Human
ugcaggcuccuccugugagcuc

SEQ ID NO: 864835 - RNA, 18 nt, Human
ugccaagaacagaaaaga

SEQ ID NO: 864836 - RNA, 22 nt, Human
ugcccaggcccccaagcucugc

SEQ ID NO: 864837 - RNA, 18 nt, Human
ugccccacugcuccuucc

SEQ ID NO: 864838 - RNA, 19 nt, Human
ugcccggcccgccaagcgg

SEQ ID NO: 864839 - RNA, 21 nt, Human
ugcuccuuccauccuugcccc

SEQ ID NO: 864840 - RNA, 19 nt, Human
ugcucuggcggccucggcg

SEQ ID NO: 864841 - RNA, 20 nt, Human
uggaaguggggccggggcag

SEQ ID NO: 864842 - RNA, 22 nt, Human
uggaggaggccccuucucugcc

SEQ ID NO: 864843 - RNA, 20 nt, Human
uggccagggcagaccccaca

SEQ ID NO: 864844 - RNA, 24 nt, Human
uggccagggcagaccccacagcag

SEQ ID NO: 864845 - RNA, 18 nt, Human
uggguggaggaggccccu

SEQ ID NO: 864846 - RNA, 19 nt, Human
uggguggaggaggccccuu

SEQ ID NO: 864847 - RNA, 22 nt, Human
uggguggaggaggccccuucuc

SEQ ID NO: 864848 - RNA, 18 nt, Human
uuaaugccaagaacagaa

SEQ ID NO: 864849 - RNA, 23 nt, Human
uuaaugccaagaacagaaaagaa

SEQ ID NO: 864850 - RNA, 24 nt, Human
uuccauaaaaauacuauuauuccu

SEQ ID NO: 864851 - RNA, 22 nt, Human
accccuagggccugggauuccc

SEQ ID NO: 864852 - RNA, 26 nt, Human
accccuuugccuccucugacaccccc

SEQ ID NO: 864853 - RNA, 21 nt, Human
cacacagccuuuauugagcag

SEQ ID NO: 864854 - RNA, 24 nt, Human
caccacaguccugaccgcagcugg

SEQ ID NO: 864855 - RNA, 24 nt, Human
cacuuccugagcaaaugugacccc

SEQ ID NO: 864856 - RNA, 22 nt, Human
cagcuacugggcagugacgcug

SEQ ID NO: 864857 - RNA, 23 nt, Human
cagcugggaccccuuugccuccu

SEQ ID NO: 864858 - RNA, 22 nt, Human
ccaagaccaccccgaaaugcag

SEQ ID NO: 864859 - RNA, 24 nt, Human
ccacuuccugagcaaaugugaccc

SEQ ID NO: 864860 - RNA, 18 nt, Human
cccaccgucuccugaggc

SEQ ID NO: 864861 - RNA, 21 nt, Human
cgaaaugcagcggccccaccg

SEQ ID NO: 864862 - RNA, 23 nt, Human
cggugaggccaggggcagcagug

SEQ ID NO: 864863 - RNA, 18 nt, Human
cucaauuugauacccacu

SEQ ID NO: 864864 - RNA, 19 nt, Human
gccaggggcagcagugcgg

SEQ ID NO: 864865 - RNA, 22 nt, Human
ugcagcggccccaccgucuccu

SEQ ID NO: 864866 - RNA, 23 nt, Human
uuccugagcaaaugugaccccua

SEQ ID NO: 864867 - RNA, 22 nt, Human
uuuuuuuuuuuuuuuuuuucag

SEQ ID NO: 864868 - RNA, 19 nt, Human
agaaauacacucuaagaac

SEQ ID NO: 864869 - RNA, 24 nt, Human
agauacugcagacagguccaagcu

SEQ ID NO: 864870 - RNA, 24 nt, Human
agcugcuggaggcgcucguaaacc

SEQ ID NO: 864871 - RNA, 18 nt, Human
aggagcugugggaaggag

SEQ ID NO: 864872 - RNA, 18 nt, Human
agguggcuguugagggca

SEQ ID NO: 864873 - RNA, 24 nt, Human
aguagcuuugcaucgcccugggag

SEQ ID NO: 864874 - RNA, 18 nt, Human
aucucagagacuuggcca

SEQ ID NO: 864875 - RNA, 18 nt, Human
caagagaucugcaccgac

SEQ ID NO: 864876 - RNA, 19 nt, Human
caccgacaucuguacaaua

SEQ ID NO: 864877 - RNA, 22 nt, Human
caccuuaguccuaggacaggag

SEQ ID NO: 864878 - RNA, 21 nt, Human
cagccaguccaguucuuugac

SEQ ID NO: 864879 - RNA, 21 nt, Human
caggcauuuuucaaucugugg

SEQ ID NO: 864880 - RNA, 20 nt, Human
cauaacaggcggucugcgca

SEQ ID NO: 864881 - RNA, 27 nt, Human
ccaccuuaguccuaggacaggaguugg

SEQ ID NO: 864882 - RNA, 22 nt, Human
ccagagcuccagcugcuggagg

SEQ ID NO: 864883 - RNA, 19 nt, Human
cccagccugggaucccacc

SEQ ID NO: 864884 - RNA, 20 nt, Human
cccucagaggugagaauggg

SEQ ID NO: 864885 - RNA, 19 nt, Human
ccgcggggcccagccuggg

SEQ ID NO: 864886 - RNA, 25 nt, Human
ccucuugugaccaacugaaggggac

SEQ ID NO: 864887 - RNA, 25 nt, Human
cgcccugggagaagaucucagagac

SEQ ID NO: 864888 - RNA, 24 nt, Human
cgggagagcguuuuaaacacagca

SEQ ID NO: 864889 - RNA, 20 nt, Human
cuggaggcgcucguaaaccg

SEQ ID NO: 864890 - RNA, 19 nt, Human
cugguggaggcgauggguc

SEQ ID NO: 864891 - RNA, 18 nt, Human
gaauggguccucagcaug

SEQ ID NO: 864892 - RNA, 19 nt, Human
gagacgccgcgccuggugg

SEQ ID NO: 864893 - RNA, 25 nt, Human
gagcugcuccagcgcgugcaggcag

SEQ ID NO: 864894 - RNA, 24 nt, Human
gagcuucugauuuuacuagaaaua

SEQ ID NO: 864895 - RNA, 19 nt, Human
gaugaucuuccagagcucc

SEQ ID NO: 864896 - RNA, 21 nt, Human
gccugggaucccacccgacuc

SEQ ID NO: 864897 - RNA, 31 nt, Human
gcuccagcgcgugcaggcaggagcggaaguu

SEQ ID NO: 864898 - RNA, 18 nt, Human
gcugugggaaggaggccu

SEQ ID NO: 864899 - RNA, 24 nt, Human
ggcaggucccagaggagauacugc

SEQ ID NO: 864900 - RNA, 18 nt, Human
gguggugugaucguacag

SEQ ID NO: 864901 - RNA, 20 nt, Human
gucccagaggagauacugca

SEQ ID NO: 864902 - RNA, 23 nt, Human
gugaccaacugaaggggaccuug

SEQ ID NO: 864903 - RNA, 20 nt, Human
gugcaggcaggagcggaagu

SEQ ID NO: 864904 - RNA, 21 nt, Human
uaacuauaccaccuccagugg

SEQ ID NO: 864905 - RNA, 21 nt, Human
uaagaacagucgagacgccgc

SEQ ID NO: 864906 - RNA, 28 nt, Human
ucagaaauuuccucuugugaccaacuga

SEQ ID NO: 864907 - RNA, 24 nt, Human
ucagugugaaguugagccucuucu

SEQ ID NO: 864908 - RNA, 21 nt, Human
uccacgggcuccaccacgaag

SEQ ID NO: 864909 - RNA, 18 nt, Human
ucccacccgacucccguc

SEQ ID NO: 864910 - RNA, 20 nt, Human
uccgugccaugguggcugcg

SEQ ID NO: 864911 - RNA, 19 nt, Human
ucucagagacuuggccagg

SEQ ID NO: 864912 - RNA, 21 nt, Human
ucugcgaugaucuuccagagc

SEQ ID NO: 864913 - RNA, 19 nt, Human
ugggaucccacccgacucc

SEQ ID NO: 864914 - RNA, 21 nt, Human
uggguccucagcauggcaggu

SEQ ID NO: 864915 - RNA, 19 nt, Human
uguacaauaaacgguccgu

SEQ ID NO: 864916 - RNA, 24 nt, Human
ugugaucguacaggucagaaauuu

SEQ ID NO: 864917 - RNA, 25 nt, Human
uuuuuugcuuuggugagcuucugau

SEQ ID NO: 864918 - RNA, 23 nt, Human
uuuuuuuuuuuuuuuugcuuugg

SEQ ID NO: 864919 - RNA, 18 nt, Human
uuuuuuuuuuuuuuuuug

SEQ ID NO: 864920 - RNA, 23 nt, Human
uuuuuuuuuuuuuuuuuugcuuu

SEQ ID NO: 864921 - RNA, 26 nt, Human
uuuuuuuuuuuuuuuuuuugcuuugg

SEQ ID NO: 864922 - RNA, 24 nt, Human
acagcucgcuccaucuccagaacu

SEQ ID NO: 864923 - RNA, 22 nt, Human
accgucccgaacccuuccgcca

SEQ ID NO: 864924 - RNA, 18 nt, Human
accucugacccagaggca

SEQ ID NO: 864925 - RNA, 21 nt, Human
acgcaaccucacgaggccuua

SEQ ID NO: 864926 - RNA, 21 nt, Human
auggagccgcugcaaggccug

SEQ ID NO: 864927 - RNA, 22 nt, Human
cacagcucgcuccaucuccaga

SEQ ID NO: 864928 - RNA, 26 nt, Human
cacucuaaaacccugagcuggcuggg

SEQ ID NO: 864929 - RNA, 18 nt, Human
cagaacuacaagucccag

SEQ ID NO: 864930 - RNA, 18 nt, Human
ccaucuccagaacuacaa

SEQ ID NO: 864931 - RNA, 20 nt, Human
ccgucccgaacccuuccgcc

SEQ ID NO: 864932 - RNA, 33 nt, Human
ccugaaacuuuauuguaaaaaaaaaaaaaagga

SEQ ID NO: 864933 - RNA, 22 nt, Human
ccuggaacaccucugacccaga

SEQ ID NO: 864934 - RNA, 22 nt, Human
cgcgccgcccgucuuccgcgcc

SEQ ID NO: 864935 - RNA, 21 nt, Human
gcugcaaggccuggaacaccu

SEQ ID NO: 864936 - RNA, 22 nt, Human
uccaucuccagaacuacaaguc

SEQ ID NO: 864937 - RNA, 25 nt, Human
uccgccacgcgccgcccgucuuccg

SEQ ID NO: 864938 - RNA, 27 nt, Human
uccgccacgcgccgcccgucuuccgcg

SEQ ID NO: 864939 - RNA, 18 nt, Human
uccgcgcgcgacgcaacc

SEQ ID NO: 864940 - RNA, 20 nt, Human
uccgcgcgcgacgcaaccuc

SEQ ID NO: 864941 - RNA, 21 nt, Human
uccgcgcgcgacgcaaccuca

SEQ ID NO: 864942 - RNA, 22 nt, Human
uccgcgcgcgacgcaaccucac

SEQ ID NO: 864943 - RNA, 22 nt, Human
ucuccguggcgcccuaccgccu

SEQ ID NO: 864944 - RNA, 23 nt, Human
ucuuccgcgcccgcgcagaaccu

SEQ ID NO: 864945 - RNA, 23 nt, Human
ugacccagaggcaccgcgagcgg

SEQ ID NO: 864946 - RNA, 20 nt, Human
uggaacaccucugacccaga

SEQ ID NO: 864947 - RNA, 23 nt, Human
uggaacaccucugacccagaggc

SEQ ID NO: 864948 - RNA, 21 nt, Human
uuaaaaaagccugaaacuuua

SEQ ID NO: 864949 - RNA, 24 nt, Human
uuauuguaaaaaaaaaaaaaagaa

SEQ ID NO: 864950 - RNA, 22 nt, Human
aagcagccccagggagcagagu

SEQ ID NO: 864951 - RNA, 19 nt, Human
aagcuuggaaaaauaggac

SEQ ID NO: 864952 - RNA, 24 nt, Human
acccuccccaucagaguuuuaaaa

SEQ ID NO: 864953 - RNA, 18 nt, Human
agagggacuguguccuga

SEQ ID NO: 864954 - RNA, 21 nt, Human
agcaaggacuucaggcccaaa

SEQ ID NO: 864955 - RNA, 20 nt, Human
aggccaggucccacagggug

SEQ ID NO: 864956 - RNA, 23 nt, Human
aggguccaguuuuacggguccag

SEQ ID NO: 864957 - RNA, 24 nt, Human
cagaguccuagcuccaggggaguc

SEQ ID NO: 864958 - RNA, 23 nt, Human
cagggucucccagguccagucuu

SEQ ID NO: 864959 - RNA, 18 nt, Human
ccaguuuggguuguucag

SEQ ID NO: 864960 - RNA, 21 nt, Human
ccccuaaauauugggccucua

SEQ ID NO: 864961 - RNA, 21 nt, Human
cuguccccaaggcuucuguag

SEQ ID NO: 864962 - RNA, 19 nt, Human
gaggacccuuagagggggg

SEQ ID NO: 864963 - RNA, 21 nt, Human
gagggacuguguccugacucg

SEQ ID NO: 864964 - RNA, 22 nt, Human
gcagcaaggacuucaggcccaa

SEQ ID NO: 864965 - RNA, 20 nt, Human
gggcucuggagggagcaucu

SEQ ID NO: 864966 - RNA, 19 nt, Human
gggugcugagucaagauug

SEQ ID NO: 864967 - RNA, 21 nt, Human
uacggguccaguuuggguugu

SEQ ID NO: 864968 - RNA, 18 nt, Human
uagaagcagccccaggga

SEQ ID NO: 864969 - RNA, 20 nt, Human
uagaagcagccccagggagc

SEQ ID NO: 864970 - RNA, 22 nt, Human
ucaagccccagauuuaagcacu

SEQ ID NO: 864971 - RNA, 20 nt, Human
ucagggucagggucucccag

SEQ ID NO: 864972 - RNA, 21 nt, Human
uccccgacacccuccccauca

SEQ ID NO: 864973 - RNA, 20 nt, Human
uccguggggccagaggaccc

SEQ ID NO: 864974 - RNA, 23 nt, Human
ucggcucaaaucuguggcaacgg

SEQ ID NO: 864975 - RNA, 21 nt, Human
ucugcagcaaggacuucaggc

SEQ ID NO: 864976 - RNA, 20 nt, Human
ucuguggcaacggagucucc

SEQ ID NO: 864977 - RNA, 21 nt, Human
ucuuguuuugccccggugucc

SEQ ID NO: 864978 - RNA, 21 nt, Human
ugacucggcucaaaucugugg

SEQ ID NO: 864979 - RNA, 25 nt, Human
ugagcuagaagcagccccagggagc

SEQ ID NO: 864980 - RNA, 25 nt, Human
ugaguuugaggccaggucccacagg

SEQ ID NO: 864981 - RNA, 20 nt, Human
ugccccgguguccccgacac

SEQ ID NO: 864982 - RNA, 24 nt, Human
ugcuaagcagccaaacgguggggu

SEQ ID NO: 864983 - RNA, 23 nt, Human
ugggccucuaggguccaguuuua

SEQ ID NO: 864984 - RNA, 19 nt, Human
uggugaguuugaggccagg

SEQ ID NO: 864985 - RNA, 22 nt, Human
uguccccgacacccuccccauu

SEQ ID NO: 864986 - RNA, 20 nt, Human
uguccguggggccagaggac

SEQ ID NO: 864987 - RNA, 26 nt, Human
uucugcauucagauauuggggugcug

SEQ ID NO: 864988 - RNA, 28 nt, Human
uuucuuguuuugccccgguguccccgac

SEQ ID NO: 864989 - RNA, 18 nt, Human
uuuuuuuuuuuuuuuucg

SEQ ID NO: 864990 - RNA, 23 nt, Human
uuuuuuuuuuuuuuuucgcccaa

SEQ ID NO: 864991 - RNA, 21 nt, Human
cauccuuauauccaaugggga

SEQ ID NO: 864992 - RNA, 23 nt, Human
cgcuuccggucgccgccaccccu

SEQ ID NO: 864993 - RNA, 22 nt, Human
cuuccggucgccgccaccccuu

SEQ ID NO: 864994 - RNA, 27 nt, Human
uaccagucauccuuauauccaaugggg

SEQ ID NO: 864995 - RNA, 22 nt, Human
ucccagcucucucugcgccucu

SEQ ID NO: 864996 - RNA, 19 nt, Human
uccuuauauccaaugggga

SEQ ID NO: 864997 - RNA, 21 nt, Human
uuagauuaaaguagcaaugag

SEQ ID NO: 864998 - RNA, 21 nt, Human
aaguuucaaguugucacccau

SEQ ID NO: 864999 - RNA, 26 nt, Human
acaggcaccuuuagaauuuuuuaaac

SEQ ID NO: 865000 - RNA, 19 nt, Human
agaaaaugccaucucccac

SEQ ID NO: 865001 - RNA, 22 nt, Human
agaagaaaaugccaucucccac

SEQ ID NO: 865002 - RNA, 18 nt, Human
caccccauccucaaccuc

SEQ ID NO: 865003 - RNA, 26 nt, Human
ccaccaggacaccccauccucaaccu

SEQ ID NO: 865004 - RNA, 24 nt, Human
ccuggacuucccccaaauaaagaa

SEQ ID NO: 865005 - RNA, 21 nt, Human
cuucaggguucugaaguuuca

SEQ ID NO: 865006 - RNA, 19 nt, Human
gccaucucccacugguacu

SEQ ID NO: 865007 - RNA, 19 nt, Human
gccaucucccacugguacu

SEQ ID NO: 865008 - RNA, 19 nt, Human
uccaccaggacaccccauc

SEQ ID NO: 865009 - RNA, 21 nt, Human
uggcaaaacuuuuauugaaca

SEQ ID NO: 865010 - RNA, 21 nt, Human
uucuccuggacuucccccaaa

SEQ ID NO: 865011 - RNA, 21 nt, Human
aaaaugcaauauuuugacaca

SEQ ID NO: 865012 - RNA, 20 nt, Human
agaaaaaaacauuaggauga

SEQ ID NO: 865013 - RNA, 21 nt, Human
aggcacugcagucggagucuu

SEQ ID NO: 865014 - RNA, 24 nt, Human
cacucucuuaguauuaauuggagg

SEQ ID NO: 865015 - RNA, 21 nt, Human
cagaaaaugcaauauuuugac

SEQ ID NO: 865016 - RNA, 20 nt, Human
caggggcccugguccacucu

SEQ ID NO: 865017 - RNA, 23 nt, Human
cauuuggagccacauggcugucc

SEQ ID NO: 865018 - RNA, 18 nt, Human
ccaucugucuuccucagg

SEQ ID NO: 865019 - RNA, 24 nt, Human
cccagcagagccccuggccaggca

SEQ ID NO: 865020 - RNA, 21 nt, Human
ccucaggggcccugguccacu

SEQ ID NO: 865021 - RNA, 23 nt, Human
ccucaggggcccugguccacucu

SEQ ID NO: 865022 - RNA, 23 nt, Human
cucacugucaaucucuacucugg

SEQ ID NO: 865023 - RNA, 24 nt, Human
cucugguucugccuuuucuccacc

SEQ ID NO: 865024 - RNA, 20 nt, Human
gagccccuggccaggacccu

SEQ ID NO: 865025 - RNA, 21 nt, Human
gcgcgcugucccugccaucug

SEQ ID NO: 865026 - RNA, 22 nt, Human
ggccguggugagcuuuuucuug

SEQ ID NO: 865027 - RNA, 22 nt, Human
gucaaucucuacucugguucug

SEQ ID NO: 865028 - RNA, 21 nt, Human
gugaaaucaaauacgauucug

SEQ ID NO: 865029 - RNA, 25 nt, Human
ucaaucucuacucugguucugccuu

SEQ ID NO: 865030 - RNA, 23 nt, Human
ucaggggcccugguccacucucu

SEQ ID NO: 865031 - RNA, 19 nt, Human
ucucuacucugguucugcc

SEQ ID NO: 865032 - RNA, 21 nt, Human
ucucuacucugguucugccuu

SEQ ID NO: 865033 - RNA, 21 nt, Human
uggccuggaucgccaucucuc

SEQ ID NO: 865034 - RNA, 21 nt, Human
ugguccacucucuuaguauua

SEQ ID NO: 865035 - RNA, 21 nt, Human
uggugagcuuuuucuuggccu

SEQ ID NO: 865036 - RNA, 24 nt, Human
uggugagcuuuuucuuggccugga

SEQ ID NO: 865037 - RNA, 24 nt, Human
uucuuggccuggaucgccaucuua

SEQ ID NO: 865038 - RNA, 25 nt, Human
uugguggccguggugagcuuuuucu

SEQ ID NO: 865039 - RNA, 20 nt, Human
uuuauuucugccuguuuuuu

SEQ ID NO: 865040 - RNA, 21 nt, Human
uuuugagcugacauuuaguca

SEQ ID NO: 865041 - RNA, 21 nt, Human
uuuuugacuacucaaugucuu

SEQ ID NO: 865042 - RNA, 20 nt, Human
aaaaagacucucaggcgcuc

SEQ ID NO: 865043 - RNA, 19 nt, Human
aaaaugcugggauuacagg

SEQ ID NO: 865044 - RNA, 19 nt, Human
aaaaugcugggauuacagg

SEQ ID NO: 865045 - RNA, 19 nt, Human
aaguagcugggauuacagg

SEQ ID NO: 865046 - RNA, 18 nt, Human
aauuuuuuguauuuucag

SEQ ID NO: 865047 - RNA, 23 nt, Human
aauuuuuuguauuuucaguagag

SEQ ID NO: 865048 - RNA, 24 nt, Human
acaagguuucaccauguuggccag

SEQ ID NO: 865049 - RNA, 18 nt, Human
acaggugcccaccacacc

SEQ ID NO: 865050 - RNA, 23 nt, Human
accucagccucucaaaaugcugg

SEQ ID NO: 865051 - RNA, 25 nt, Human
acuccaucgcccaggcuggagugca

SEQ ID NO: 865052 - RNA, 19 nt, Human
acucugaaaggcaaaaaga

SEQ ID NO: 865053 - RNA, 22 nt, Human
agaaaucgccaggucccugaac

SEQ ID NO: 865054 - RNA, 24 nt, Human
agcuucuucucuccagagugaguu

SEQ ID NO: 865055 - RNA, 25 nt, Human
aggcuggagugcaguggcaugaucu

SEQ ID NO: 865056 - RNA, 22 nt, Human
agguuucaccauguuggccagg

SEQ ID NO: 865057 - RNA, 22 nt, Human
aguaauuuucaugcagcuucuu

SEQ ID NO: 865058 - RNA, 19 nt, Human
agugauccacccaccucag

SEQ ID NO: 865059 - RNA, 24 nt, Human
agugauucacuugccucagccucc

SEQ ID NO: 865060 - RNA, 18 nt, Human
agugcaguggcaugaucu

SEQ ID NO: 865061 - RNA, 19 nt, Human
agugcaguggcaugaucuc

SEQ ID NO: 865062 - RNA, 21 nt, Human
agugcaguggcaugaucucug

SEQ ID NO: 865063 - RNA, 24 nt, Human
auuccucuuuaaacaggguuauug

SEQ ID NO: 865064 - RNA, 21 nt, Human
auuuucaguagagacaagguu

SEQ ID NO: 865065 - RNA, 19 nt, Human
caaaaugcugggauuacag

SEQ ID NO: 865066 - RNA, 27 nt, Human
caaaaugcugggauuacaggaauuaag

SEQ ID NO: 865067 - RNA, 24 nt, Human
caagguuucaccauguuggccagg

SEQ ID NO: 865068 - RNA, 19 nt, Human
caagugauccacccaccuc

SEQ ID NO: 865069 - RNA, 22 nt, Human
caagugauucacuugccucagc

SEQ ID NO: 865070 - RNA, 18 nt, Human
caccauguuggccagggu

SEQ ID NO: 865071 - RNA, 22 nt, Human
caccauguuggccagggugguc

SEQ ID NO: 865072 - RNA, 24 nt, Human
caccauguuggccaggguggucuc

SEQ ID NO: 865073 - RNA, 22 nt, Human
cacccaccucagccucucaaaa

SEQ ID NO: 865074 - RNA, 23 nt, Human
cacccaccucagccucucaaaau

SEQ ID NO: 865075 - RNA, 24 nt, Human
cacuccaucgcccaggcuggagug

SEQ ID NO: 865076 - RNA, 23 nt, Human
cacugcaaccucugcuuccuggg

SEQ ID NO: 865077 - RNA, 25 nt, Human
cagaacccuccuuucauugauguca

SEQ ID NO: 865078 - RNA, 24 nt, Human
caguagagacaagguuucaccaug

SEQ ID NO: 865079 - RNA, 25 nt, Human
caguagagacaagguuucaccaugu

SEQ ID NO: 865080 - RNA, 21 nt, Human
ccaaguagcugggauuacagg

SEQ ID NO: 865081 - RNA, 23 nt, Human
cccaaguagcugggauuacaggu

SEQ ID NO: 865082 - RNA, 24 nt, Human
cccaaguagcugggauuacaggug

SEQ ID NO: 865083 - RNA, 22 nt, Human
ccgggaagauccuggggacgga

SEQ ID NO: 865084 - RNA, 25 nt, Human
ccucuuuaaacaggguuauugggau

SEQ ID NO: 865085 - RNA, 24 nt, Human
ccugaccucaagugauccacccac

SEQ ID NO: 865086 - RNA, 20 nt, Human
ccuggguucaagugauucac

SEQ ID NO: 865087 - RNA, 21 nt, Human
ccuggguucaagugauucacu

SEQ ID NO: 865088 - RNA, 22 nt, Human
ccuggguucaagugauucacuu

SEQ ID NO: 865089 - RNA, 23 nt, Human
cgaggugagaacgugucagaacc

SEQ ID NO: 865090 - RNA, 24 nt, Human
cucaagugauccacccaccucagc

SEQ ID NO: 865091 - RNA, 18 nt, Human
cucacuccaucgcccagg

SEQ ID NO: 865092 - RNA, 24 nt, Human
cucacugcaaccucugcuuccugg

SEQ ID NO: 865093 - RNA, 24 nt, Human
cucagccucccaaguagcugggau

SEQ ID NO: 865094 - RNA, 21 nt, Human
cucugaaaggcaaaaagacuc

SEQ ID NO: 865095 - RNA, 19 nt, Human
cugcaaccucugcuuccug

SEQ ID NO: 865096 - RNA, 23 nt, Human
cugcaaccucugcuuccuggguu

SEQ ID NO: 865097 - RNA, 24 nt, Human
cugcaaccucugcuuccuggguuc

SEQ ID NO: 865098 - RNA, 23 nt, Human
cuugccucagccucccaaguagc

SEQ ID NO: 865099 - RNA, 22 nt, Human
gaacaaaugagagcuuucccac

SEQ ID NO: 865100 - RNA, 24 nt, Human
gaccucaagugauccacccaccuc

SEQ ID NO: 865101 - RNA, 23 nt, Human
gcccaggcuggagugcaguggca

SEQ ID NO: 865102 - RNA, 24 nt, Human
gcccaggcuggagugcaguggcau

SEQ ID NO: 865103 - RNA, 25 nt, Human
gcuggagugcaguggcaugaucucu

SEQ ID NO: 865104 - RNA, 23 nt, Human
ggccaggguggucucaaacuccu

SEQ ID NO: 865105 - RNA, 21 nt, Human
gggaagauccuggggacggag

SEQ ID NO: 865106 - RNA, 24 nt, Human
ggguggucucaaacuccugaccuc

SEQ ID NO: 865107 - RNA, 24 nt, Human
ggguucaagugauucacuugccuc

SEQ ID NO: 865108 - RNA, 22 nt, Human
gugauccacccaccucagccuc

SEQ ID NO: 865109 - RNA, 18 nt, Human
gugauucacuugccucag

SEQ ID NO: 865110 - RNA, 24 nt, Human
gugauucacuugccucagccuccc

SEQ ID NO: 865111 - RNA, 24 nt, Human
guucaagugauucacuugccucag

SEQ ID NO: 865112 - RNA, 22 nt, Human
guuggccaggguggucucaaac

SEQ ID NO: 865113 - RNA, 19 nt, Human
uacaggugcccaccacacc

SEQ ID NO: 865114 - RNA, 22 nt, Human
uagagacaagguuucaccaugu

SEQ ID NO: 865115 - RNA, 24 nt, Human
ucaaaaugcugggauuacaggaau

SEQ ID NO: 865116 - RNA, 24 nt, Human
ucaccauguuggccaggguggucu

SEQ ID NO: 865117 - RNA, 24 nt, Human
ucacuccaucgcccaggcuggagu

SEQ ID NO: 865118 - RNA, 24 nt, Human
ucacugcaaccucugcuuccuggg

SEQ ID NO: 865119 - RNA, 18 nt, Human
ucagaacccuccuuucau

SEQ ID NO: 865120 - RNA, 20 nt, Human
ucagccucccaaguagcugg

SEQ ID NO: 865121 - RNA, 18 nt, Human
ucagccucucaaaaugcu

SEQ ID NO: 865122 - RNA, 24 nt, Human
ucaguagagacaagguuucaccau

SEQ ID NO: 865123 - RNA, 21 nt, Human
ucaugcagcuucuucucucca

SEQ ID NO: 865124 - RNA, 24 nt, Human
uccaucgcccaggcuggagugcag

SEQ ID NO: 865125 - RNA, 23 nt, Human
ucccaaguagcugggauuacagg

SEQ ID NO: 865126 - RNA, 24 nt, Human
ucccaaguagcugggauuacaggu

SEQ ID NO: 865127 - RNA, 19 nt, Human
ucccaggccagugaggccu

SEQ ID NO: 865128 - RNA, 27 nt, Human
ucccugaaccgggaagauccuggggac

SEQ ID NO: 865129 - RNA, 19 nt, Human
uccggaacacucagaaauc

SEQ ID NO: 865130 - RNA, 19 nt, Human
uccuggguucaagugauuc

SEQ ID NO: 865131 - RNA, 23 nt, Human
uccuggguucaagugauucacuu

SEQ ID NO: 865132 - RNA, 24 nt, Human
ucgcccaggcuggagugcaguggc

SEQ ID NO: 865133 - RNA, 23 nt, Human
ucucaaaaugcugggauuacagg

SEQ ID NO: 865134 - RNA, 23 nt, Human
ucucacuccaucgcccaggcugg

SEQ ID NO: 865135 - RNA, 24 nt, Human
ucucacuccaucgcccaggcugga

SEQ ID NO: 865136 - RNA, 26 nt, Human
ucucacuccaucgcccaggcuggagu

SEQ ID NO: 865137 - RNA, 27 nt, Human
ucucacuccaucgcccaggcuggagug

SEQ ID NO: 865138 - RNA, 18 nt, Human
ucuccagagugaguucau

SEQ ID NO: 865139 - RNA, 22 nt, Human
ucuuuaaacaggguuauuggga

SEQ ID NO: 865140 - RNA, 22 nt, Human
ugaaaggcaaaaagacucucag

SEQ ID NO: 865141 - RNA, 23 nt, Human
ugagaacgugucagaacccuccu

SEQ ID NO: 865142 - RNA, 22 nt, Human
ugagauggagucucacuccauc

SEQ ID NO: 865143 - RNA, 24 nt, Human
ugauccacccaccucagccucuca

SEQ ID NO: 865144 - RNA, 23 nt, Human
ugaucucugcucacugcaaccuc

SEQ ID NO: 865145 - RNA, 19 nt, Human
ugcaaccucugcuuccugg

SEQ ID NO: 865146 - RNA, 22 nt, Human
ugccucagccucccaaguagcu

SEQ ID NO: 865147 - RNA, 24 nt, Human
ugccucagccucccaaguagcugg

SEQ ID NO: 865148 - RNA, 23 nt, Human
uggacaguggcaaucuccauucc

SEQ ID NO: 865149 - RNA, 24 nt, Human
uggagucucacuccaucgcccagg

SEQ ID NO: 865150 - RNA, 19 nt, Human
uggagugcaguggcaugau

SEQ ID NO: 865151 - RNA, 22 nt, Human
uggagugcaguggcaugaucuc

SEQ ID NO: 865152 - RNA, 23 nt, Human
uggagugcaguggcaugaucucu

SEQ ID NO: 865153 - RNA, 24 nt, Human
uggagugcaguggcaugaucucug

SEQ ID NO: 865154 - RNA, 24 nt, Human
uggccaggguggucucaaacuccu

SEQ ID NO: 865155 - RNA, 21 nt, Human
ugggauuacaggugcccacca

SEQ ID NO: 865156 - RNA, 24 nt, Human
uggguucaagugauucacuugccc

SEQ ID NO: 865157 - RNA, 27 nt, Human
uuaaguaauuuucaugcagcuucuucu

SEQ ID NO: 865158 - RNA, 23 nt, Human
uucaagugauucacuugccucag

SEQ ID NO: 865159 - RNA, 20 nt, Human
uuccggaacacucagaaauc

SEQ ID NO: 865160 - RNA, 19 nt, Human
uuucaccauguuggccagg

SEQ ID NO: 865161 - RNA, 24 nt, Human
uuuucaguagagacaagguuucac

SEQ ID NO: 865162 - RNA, 24 nt, Human
uuuuuuguauuuucaguagagaca

SEQ ID NO: 865163 - RNA, 26 nt, Human
uuuuuuuuuuuugagauggagucuca

SEQ ID NO: 865164 - RNA, 22 nt, Human
uuuuuuuuuuuuuugagaugga

SEQ ID NO: 865165 - RNA, 20 nt, Human
uuuuuuuuuuuuuuuuuugg

SEQ ID NO: 865166 - RNA, 19 nt, Human
aaaauggagcaaacacugc

SEQ ID NO: 865167 - RNA, 19 nt, Human
aaaucaaucuuaaguacug

SEQ ID NO: 865168 - RNA, 19 nt, Human
aacccagcccauccaauag

SEQ ID NO: 865169 - RNA, 20 nt, Human
aagaaaacaaauauugcaaa

SEQ ID NO: 865170 - RNA, 23 nt, Human
aagugcugagaugucaggcauga

SEQ ID NO: 865171 - RNA, 26 nt, Human
acacugcaauuuccacuuaggguccu

SEQ ID NO: 865172 - RNA, 18 nt, Human
acaggguuucaccauguu

SEQ ID NO: 865173 - RNA, 19 nt, Human
acaggguuucaccauguug

SEQ ID NO: 865174 - RNA, 24 nt, Human
acaggguuucaccauguugaccag

SEQ ID NO: 865175 - RNA, 21 nt, Human
agcaauggagacaaaauaacc

SEQ ID NO: 865176 - RNA, 20 nt, Human
agcgauuuucuugccucagc

SEQ ID NO: 865177 - RNA, 22 nt, Human
aggagagacaggguuucaccau

SEQ ID NO: 865178 - RNA, 21 nt, Human
aggcaugaguuacuaaaccca

SEQ ID NO: 865179 - RNA, 18 nt, Human
aguaguugggauuacagg

SEQ ID NO: 865180 - RNA, 18 nt, Human
agugacacaucaggaaaa

SEQ ID NO: 865181 - RNA, 24 nt, Human
agugcaauggccugaucucggcuc

SEQ ID NO: 865182 - RNA, 23 nt, Human
auauacaagaaaacaaauauugc

SEQ ID NO: 865183 - RNA, 21 nt, Human
aucaggaaaauacauuaucuc

SEQ ID NO: 865184 - RNA, 22 nt, Human
augccaggcuaauuuucuguau

SEQ ID NO: 865185 - RNA, 22 nt, Human
caaaaaauguagauaugcggca

SEQ ID NO: 865186 - RNA, 26 nt, Human
caaacaaagauacauacauauaugug

SEQ ID NO: 865187 - RNA, 22 nt, Human
caauggagacaaaauaaccaug

SEQ ID NO: 865188 - RNA, 21 nt, Human
cacacauauauacaagaaaac

SEQ ID NO: 865189 - RNA, 21 nt, Human
caccauguugaccaggcuggu

SEQ ID NO: 865190 - RNA, 22 nt, Human
caccauguugaccaggcugguc

SEQ ID NO: 865191 - RNA, 24 nt, Human
cacugcaauuuccacuuagggccu

SEQ ID NO: 865192 - RNA, 24 nt, Human
cacugcaauuuccacuuagggucu

SEQ ID NO: 865193 - RNA, 20 nt, Human
caggccaauguacaaacucu

SEQ ID NO: 865194 - RNA, 19 nt, Human
cagggccaacugcgggagg

SEQ ID NO: 865195 - RNA, 24 nt, Human
caggguuucaccauguugaccagg

SEQ ID NO: 865196 - RNA, 25 nt, Human
caggugcaugccaccaugccaggcu

SEQ ID NO: 865197 - RNA, 24 nt, Human
cauguugaccaggcuggucuggaa

SEQ ID NO: 865198 - RNA, 18 nt, Human
cccaggcuggagugcaau

SEQ ID NO: 865199 - RNA, 20 nt, Human
cccagguuccagcgauuuuc

SEQ ID NO: 865200 - RNA, 19 nt, Human
cccucaggccguacguaac

SEQ ID NO: 865201 - RNA, 24 nt, Human
ccuauugcccaggcuggagugcaa

SEQ ID NO: 865202 - RNA, 27 nt, Human
ccucagcugaguaguugggauuacagg

SEQ ID NO: 865203 - RNA, 29 nt, Human
ccucagcugaguaguugggauuacaggug

SEQ ID NO: 865204 - RNA, 18 nt, Human
ccucaugguccaccugcu

SEQ ID NO: 865205 - RNA, 22 nt, Human
ccuccagcaaacaaagauacau

SEQ ID NO: 865206 - RNA, 22 nt, Human
ccugaagugcugagaugucagg

SEQ ID NO: 865207 - RNA, 26 nt, Human
cggaacaccacagggccaacugcggg

SEQ ID NO: 865208 - RNA, 22 nt, Human
cuaaacccagcccauccaauag

SEQ ID NO: 865209 - RNA, 24 nt, Human
cugaagugcugagaugucaggcau

SEQ ID NO: 865210 - RNA, 23 nt, Human
cugaguaguugggauuacaggug

SEQ ID NO: 865211 - RNA, 24 nt, Human
cugcagcuuccacuucccagguuc

SEQ ID NO: 865212 - RNA, 24 nt, Human
cugcuccguacuccugaagugcug

SEQ ID NO: 865213 - RNA, 24 nt, Human
cuucccagguuccagcgauuuucu

SEQ ID NO: 865214 - RNA, 18 nt, Human
cuugccucagcugaguag

SEQ ID NO: 865215 - RNA, 21 nt, Human
gacagcuggagcuaccccgcc

SEQ ID NO: 865216 - RNA, 21 nt, Human
gaccucaugguccaccugcuc

SEQ ID NO: 865217 - RNA, 22 nt, Human
gagagacaggguuucaccaugu

SEQ ID NO: 865218 - RNA, 18 nt, Human
gauuacaggugcaugcca

SEQ ID NO: 865219 - RNA, 24 nt, Human
gauuacaggugcaugccaccaugc

SEQ ID NO: 865220 - RNA, 27 nt, Human
gcccuauugcccaggcuggagugcaau

SEQ ID NO: 865221 - RNA, 18 nt, Human
gcucacugcagcuuccac

SEQ ID NO: 865222 - RNA, 19 nt, Human
gcuggagugcaauggccug

SEQ ID NO: 865223 - RNA, 23 nt, Human
gcuggucuggaaguccugaccuc

SEQ ID NO: 865224 - RNA, 18 nt, Human
ggagacaaaauaaccaug

SEQ ID NO: 865225 - RNA, 22 nt, Human
ggagagacaggguuucaccaug

SEQ ID NO: 865226 - RNA, 25 nt, Human
guauuuauuuauuuauuuauuuauu

SEQ ID NO: 865227 - RNA, 22 nt, Human
uaauuacacaucugguuauuaa

SEQ ID NO: 865228 - RNA, 22 nt, Human
uaauuuucuguauuuuuaggag

SEQ ID NO: 865229 - RNA, 23 nt, Human
uaauuuucuguauuuuuaggaga

SEQ ID NO: 865230 - RNA, 24 nt, Human
uacaauuuuacaacaaauuuuaga

SEQ ID NO: 865231 - RNA, 18 nt, Human
uacagguuagaauacaca

SEQ ID NO: 865232 - RNA, 22 nt, Human
uagaauacacacauucucagac

SEQ ID NO: 865233 - RNA, 23 nt, Human
uagaauacacacauucucagaca

SEQ ID NO: 865234 - RNA, 24 nt, Human
uaggagagacaggguuucaccaug

SEQ ID NO: 865235 - RNA, 23 nt, Human
uaucaaaaagugacacaucagga

SEQ ID NO: 865236 - RNA, 20 nt, Human
uaucuacaugcauaacauag

SEQ ID NO: 865237 - RNA, 19 nt, Human
uauugcccaggcuggagug

SEQ ID NO: 865238 - RNA, 20 nt, Human
uauugcccaggcuggagugc

SEQ ID NO: 865239 - RNA, 24 nt, Human
ucacugcagcuuccacuucccagg

SEQ ID NO: 865240 - RNA, 18 nt, Human
ucccagguuccagcgauu

SEQ ID NO: 865241 - RNA, 21 nt, Human
ucccagguuccagcgauuuuc

SEQ ID NO: 865242 - RNA, 24 nt, Human
uccugaagugcugagaugucaggc

SEQ ID NO: 865243 - RNA, 22 nt, Human
ucuccaauuaauuacacaucug

SEQ ID NO: 865244 - RNA, 23 nt, Human
ucuugcccuauugcccaggcugg

SEQ ID NO: 865245 - RNA, 24 nt, Human
ucuugcccuauugcccaggcugga

SEQ ID NO: 865246 - RNA, 22 nt, Human
ugagauggacucuugcccuauu

SEQ ID NO: 865247 - RNA, 22 nt, Human
ugagaugucaggcaugaguuac

SEQ ID NO: 865248 - RNA, 24 nt, Human
ugagaugucaggcaugaguuacua

SEQ ID NO: 865249 - RNA, 27 nt, Human
ugaguaguugggauuacaggugcaugc

SEQ ID NO: 865250 - RNA, 21 nt, Human
ugaguuacuaaacccagccca

SEQ ID NO: 865251 - RNA, 23 nt, Human
ugcagcuuccacuucccagguuc

SEQ ID NO: 865252 - RNA, 24 nt, Human
ugcauagauguuugcacacauaua

SEQ ID NO: 865253 - RNA, 18 nt, Human
ugcccaggcuggagugca

SEQ ID NO: 865254 - RNA, 21 nt, Human
ugcccaggcuggagugcaaug

SEQ ID NO: 865255 - RNA, 24 nt, Human
ugcccuauugcccaggcuggagug

SEQ ID NO: 865256 - RNA, 25 nt, Human
ugcccuauugcccaggcuggagugc

SEQ ID NO: 865257 - RNA, 18 nt, Human
uggaaguccugaccucau

SEQ ID NO: 865258 - RNA, 19 nt, Human
uggagugcaauggccugau

SEQ ID NO: 865259 - RNA, 23 nt, Human
uggagugcaauggccugaucucg

SEQ ID NO: 865260 - RNA, 24 nt, Human
uggagugcaauggccugaucucgg

SEQ ID NO: 865261 - RNA, 21 nt, Human
ugggauuacaggugcaugcca

SEQ ID NO: 865262 - RNA, 22 nt, Human
ugggauuacaggugcaugccac

SEQ ID NO: 865263 - RNA, 24 nt, Human
ugggauuacaggugcaugccacca

SEQ ID NO: 865264 - RNA, 25 nt, Human
ugggauuacaggugcaugccaccau

SEQ ID NO: 865265 - RNA, 26 nt, Human
ugggccccaaaguagaaaacucuaaa

SEQ ID NO: 865266 - RNA, 20 nt, Human
uguaucaaaauuacaaagca

SEQ ID NO: 865267 - RNA, 21 nt, Human
ugucuuauccuccagcaaaca

SEQ ID NO: 865268 - RNA, 19 nt, Human
uuagauuauugaagguuag

SEQ ID NO: 865269 - RNA, 24 nt, Human
uuaggagagacaggguuucaccau

SEQ ID NO: 865270 - RNA, 18 nt, Human
uuauuuauuuauuuauuu

SEQ ID NO: 865271 - RNA, 19 nt, Human
uuauuuauuuauuuauuua

SEQ ID NO: 865272 - RNA, 25 nt, Human
uuauuuauuuauuuauuuauuuauu

SEQ ID NO: 865273 - RNA, 25 nt, Human
uuauuuauuuauuuauuuauuuauu

SEQ ID NO: 865274 - RNA, 25 nt, Human
uuauuuauuuauuuauuuauuuauu

SEQ ID NO: 865275 - RNA, 26 nt, Human
uuauuuauuuauuuauuuauuuauug

SEQ ID NO: 865276 - RNA, 25 nt, Human
uucugggccccaaaguagaaaacuc

SEQ ID NO: 865277 - RNA, 23 nt, Human
uugaccaggcuggucuggaaguc

SEQ ID NO: 865278 - RNA, 24 nt, Human
uugcccuauugcccaggcuggagu

SEQ ID NO: 865279 - RNA, 24 nt, Human
uuucaccauguugaccaggcuggu

SEQ ID NO: 865280 - RNA, 19 nt, Human
uuucuguauuuuuaggaga

SEQ ID NO: 865281 - RNA, 22 nt, Human
uuuuaaauauugcuuacuuuga

SEQ ID NO: 865282 - RNA, 24 nt, Human
uuuuuaggagagacaggguuucac

SEQ ID NO: 865283 - RNA, 25 nt, Human
uuuuuucuuuuuuaaaaaauacgug

SEQ ID NO: 865284 - RNA, 22 nt, Human
aaacaaauaacuuagagacuca

SEQ ID NO: 865285 - RNA, 18 nt, Human
aaagcuucucuguccaca

SEQ ID NO: 865286 - RNA, 23 nt, Human
aaauaaacaggauuuaaaaauau

SEQ ID NO: 865287 - RNA, 26 nt, Human
aagacaugcauguugugauacaccaa

SEQ ID NO: 865288 - RNA, 23 nt, Human
acaaaacaccauagaagguuaca

SEQ ID NO: 865289 - RNA, 19 nt, Human
acaaaaugaccaugaaagu

SEQ ID NO: 865290 - RNA, 20 nt, Human
acaaaguagugaauauauuc

SEQ ID NO: 865291 - RNA, 22 nt, Human
acaaggcuguuuugugcuaaaa

SEQ ID NO: 865292 - RNA, 23 nt, Human
accauagaagguuacaagaaugc

SEQ ID NO: 865293 - RNA, 19 nt, Human
agagcucugauuuacauuc

SEQ ID NO: 865294 - RNA, 18 nt, Human
aggaagugacgauugaca

SEQ ID NO: 865295 - RNA, 23 nt, Human
aggaagugacgauugacauuuuc

SEQ ID NO: 865296 - RNA, 23 nt, Human
aguucaaauguucauuguguugg

SEQ ID NO: 865297 - RNA, 19 nt, Human
auacuagagacuuuaagcu

SEQ ID NO: 865298 - RNA, 24 nt, Human
augcucagcuugcccucucuauug

SEQ ID NO: 865299 - RNA, 23 nt, Human
augguccacaagauaagagccac

SEQ ID NO: 865300 - RNA, 25 nt, Human
caaaccagaaaauuuucauaaacac

SEQ ID NO: 865301 - RNA, 22 nt, Human
caacacuccauaaacacaaaga

SEQ ID NO: 865302 - RNA, 22 nt, Human
cacaacccaggacuugcugccu

SEQ ID NO: 865303 - RNA, 19 nt, Human
cacaucaaaaugcauaaga

SEQ ID NO: 865304 - RNA, 18 nt, Human
caccauagaagguuacaa

SEQ ID NO: 865305 - RNA, 22 nt, Human
cacuugucccucuuuuuaugaa

SEQ ID NO: 865306 - RNA, 23 nt, Human
cagaacuuggguaaagccagaga

SEQ ID NO: 865307 - RNA, 21 nt, Human
cagauaucaucuaagacacaa

SEQ ID NO: 865308 - RNA, 20 nt, Human
cagcaccagccacuuguccc

SEQ ID NO: 865309 - RNA, 22 nt, Human
cagcaccagccacuugucccuc

SEQ ID NO: 865310 - RNA, 26 nt, Human
caucuccauuauucuaagaaaacaac

SEQ ID NO: 865311 - RNA, 20 nt, Human
cauucaauacucucugcauu

SEQ ID NO: 865312 - RNA, 24 nt, Human
ccucuccugaaagaaaauagaggu

SEQ ID NO: 865313 - RNA, 22 nt, Human
cuaagaaaacaacacuccauaa

SEQ ID NO: 865314 - RNA, 22 nt, Human
cuacacuaaaaucagaauuagu

SEQ ID NO: 865315 - RNA, 20 nt, Human
gaaaaugcuuauucaugcac

SEQ ID NO: 865316 - RNA, 20 nt, Human
gaaauuauuauaacaucuuu

SEQ ID NO: 865317 - RNA, 21 nt, Human
gacugcagaagaaugcaaaug

SEQ ID NO: 865318 - RNA, 22 nt, Human
gagaacucucuuugggguacag

SEQ ID NO: 865319 - RNA, 24 nt, Human
ggcauauggaagccauuuuuaauu

SEQ ID NO: 865320 - RNA, 25 nt, Human
gggaaaagaaaaacuuaaauuuuaa

SEQ ID NO: 865321 - RNA, 20 nt, Human
guaucuguauauauaacaag

SEQ ID NO: 865322 - RNA, 22 nt, Human
uaaaaauaaagcuucucugucc

SEQ ID NO: 865323 - RNA, 20 nt, Human
uaagaaaacaacacuccaua

SEQ ID NO: 865324 - RNA, 27 nt, Human
uaagaaaacaacacuccauaaacacaa

SEQ ID NO: 865325 - RNA, 22 nt, Human
uaagagccacaaaacaccauag

SEQ ID NO: 865326 - RNA, 22 nt, Human
uaaguaucauuuuucacaaccc

SEQ ID NO: 865327 - RNA, 23 nt, Human
uaauccaacuucccucuccugaa

SEQ ID NO: 865328 - RNA, 21 nt, Human
uacagauaucaucuaagacac

SEQ ID NO: 865329 - RNA, 21 nt, Human
uacagaugcucagcuugcccu

SEQ ID NO: 865330 - RNA, 28 nt, Human
uacuaaaaauaaagcuucucuguccaca

SEQ ID NO: 865331 - RNA, 23 nt, Human
uagaagguuacaagaaugcaaau

SEQ ID NO: 865332 - RNA, 23 nt, Human
uagccaucuaugaugaauaauau

SEQ ID NO: 865333 - RNA, 18 nt, Human
uauaacaagguacucucc

SEQ ID NO: 865334 - RNA, 21 nt, Human
uauaacaucuuucacaucaaa

SEQ ID NO: 865335 - RNA, 22 nt, Human
ucagaacuuggguaaagccaga

SEQ ID NO: 865336 - RNA, 20 nt, Human
ucauauguagcacuaaaugu

SEQ ID NO: 865337 - RNA, 21 nt, Human
ucaucuaagacacaaggcugu

SEQ ID NO: 865338 - RNA, 23 nt, Human
uccaacaucacuaaucacgcaac

SEQ ID NO: 865339 - RNA, 22 nt, Human
uccaauuagccaucuaugauga

SEQ ID NO: 865340 - RNA, 19 nt, Human
uccacaagauaagagccac

SEQ ID NO: 865341 - RNA, 25 nt, Human
ucuaagaaaacaacacuccauaaac

SEQ ID NO: 865342 - RNA, 19 nt, Human
ugaaauggaagauggugag

SEQ ID NO: 865343 - RNA, 22 nt, Human
ugaaauggaagauggugaggcg

SEQ ID NO: 865344 - RNA, 23 nt, Human
ugcauauuacauacuagagacuu

SEQ ID NO: 865345 - RNA, 23 nt, Human
uggaaauacagaugcucagcuug

SEQ ID NO: 865346 - RNA, 20 nt, Human
uggcauauggaagccauuuu

SEQ ID NO: 865347 - RNA, 20 nt, Human
ugggguacagaguggcauau

SEQ ID NO: 865348 - RNA, 21 nt, Human
ugugcuaaaaugcuuccaaca

SEQ ID NO: 865349 - RNA, 19 nt, Human
uuaauuuaggggcuacacu

SEQ ID NO: 865350 - RNA, 20 nt, Human
uuacuaaugggggaaaagaa

SEQ ID NO: 865351 - RNA, 26 nt, Human
uugagaauuuuuaauaauuacauuga

SEQ ID NO: 865352 - RNA, 23 nt, Human
uugugcuaaaaugcuuccaacug

SEQ ID NO: 865353 - RNA, 21 nt, Human
uuuaagcuacaaaauacuucu

SEQ ID NO: 865354 - RNA, 25 nt, Human
uuucuugauaaugaauacauucugg

SEQ ID NO: 865355 - RNA, 19 nt, Human
uuuugugcuaaaaugcuuc

SEQ ID NO: 865356 - RNA, 25 nt, Human
aaggagccuggagggaggaagggug

SEQ ID NO: 865357 - RNA, 20 nt, Human
aaggggguucucgcucgguc

SEQ ID NO: 865358 - RNA, 21 nt, Human
aagucagucucuggccacuaa

SEQ ID NO: 865359 - RNA, 23 nt, Human
acacacacacacacacacacaca

SEQ ID NO: 865360 - RNA, 23 nt, Human
acacacacacacacacacacaca

SEQ ID NO: 865361 - RNA, 23 nt, Human
acacacacacacacacacacaca

SEQ ID NO: 865362 - RNA, 23 nt, Human
acacacacacacacacacacaca

SEQ ID NO: 865363 - RNA, 23 nt, Human
acacacacacacacacacacaca

SEQ ID NO: 865364 - RNA, 24 nt, Human
acacacacacacacacacacacag

SEQ ID NO: 865365 - RNA, 21 nt, Human
acacacacacacacacacgca

SEQ ID NO: 865366 - RNA, 23 nt, Human
acacacacacacacacacgcacg

SEQ ID NO: 865367 - RNA, 25 nt, Human
acacacacgcacgcacgcaccaccu

SEQ ID NO: 865368 - RNA, 20 nt, Human
accgugggggcgcgggaagg

SEQ ID NO: 865369 - RNA, 22 nt, Human
agacauguaccagaacaauaua

SEQ ID NO: 865370 - RNA, 23 nt, Human
agacauguaccagaacaauauaa

SEQ ID NO: 865371 - RNA, 26 nt, Human
caaccacccacacuccgcagccacuc

SEQ ID NO: 865372 - RNA, 20 nt, Human
cacacacacacacacacaca

SEQ ID NO: 865373 - RNA, 20 nt, Human
cacacacacacacacacaca

SEQ ID NO: 865374 - RNA, 20 nt, Human
cacacacacacacacacaca

SEQ ID NO: 865375 - RNA, 20 nt, Human
cacacacacacacacacaca

SEQ ID NO: 865376 - RNA, 20 nt, Human
cacacacacacacacacaca

SEQ ID NO: 865377 - RNA, 20 nt, Human
cacacacacacacacacaca

SEQ ID NO: 865378 - RNA, 20 nt, Human
cacacacacacacacacaca

SEQ ID NO: 865379 - RNA, 20 nt, Human
cacacacacacacacacaca

SEQ ID NO: 865380 - RNA, 22 nt, Human
cacacacacacacacacacaca

SEQ ID NO: 865381 - RNA, 22 nt, Human
cacacacacacacacacacaca

SEQ ID NO: 865382 - RNA, 22 nt, Human
cacacacacacacacacacaca

SEQ ID NO: 865383 - RNA, 26 nt, Human
cacacacacacacacacacacacaca

SEQ ID NO: 865384 - RNA, 26 nt, Human
cacacacacacacacacacacacaca

SEQ ID NO: 865385 - RNA, 26 nt, Human
cacacacacacacacacacacacaca

SEQ ID NO: 865386 - RNA, 26 nt, Human
cacacacacacacacacacacacaca

SEQ ID NO: 865387 - RNA, 26 nt, Human
cacacacacacacacacacacacaca

SEQ ID NO: 865388 - RNA, 26 nt, Human
cacacacacacacacacacacacacg

SEQ ID NO: 865389 - RNA, 25 nt, Human
cacacacacacacacacacgcacgc

SEQ ID NO: 865390 - RNA, 26 nt, Human
cacacacacacacacacgcacgcacg

SEQ ID NO: 865391 - RNA, 25 nt, Human
cacacacacacacacgcacgcacgc

SEQ ID NO: 865392 - RNA, 24 nt, Human
cacacacacacacgcacgcacgca

SEQ ID NO: 865393 - RNA, 21 nt, Human
cacuccgcagccacucgugcc

SEQ ID NO: 865394 - RNA, 21 nt, Human
ccacacacacacacacacaca

SEQ ID NO: 865395 - RNA, 22 nt, Human
ccccgcacgccccccacaccug

SEQ ID NO: 865396 - RNA, 18 nt, Human
ccccuuuugucucgugcc

SEQ ID NO: 865397 - RNA, 18 nt, Human
ccccuuuugucucgugcc

SEQ ID NO: 865398 - RNA, 30 nt, Human
cccgagcuccacacacacacacacacacag

SEQ ID NO: 865399 - RNA, 18 nt, Human
ccucacgcccaaccaccc

SEQ ID NO: 865400 - RNA, 26 nt, Human
cgagcuccacacacacacacacacag

SEQ ID NO: 865401 - RNA, 20 nt, Human
cgcucgguccgcaaccgugg

SEQ ID NO: 865402 - RNA, 19 nt, Human
cuccgcagccacucgugcc

SEQ ID NO: 865403 - RNA, 26 nt, Human
cucuggagucucuggaauaaaaccuu

SEQ ID NO: 865404 - RNA, 24 nt, Human
cuuaucuggaggggauucucucca

SEQ ID NO: 865405 - RNA, 20 nt, Human
cuuggcacccgagcuccacc

SEQ ID NO: 865406 - RNA, 21 nt, Human
gaagacagcagggacucgcac

SEQ ID NO: 865407 - RNA, 18 nt, Human
gccgacugccgggcugcg

SEQ ID NO: 865408 - RNA, 21 nt, Human
uagaauuucagacauguacca

SEQ ID NO: 865409 - RNA, 22 nt, Human
uauauaaaaaucagcugaacaa

SEQ ID NO: 865410 - RNA, 20 nt, Human
ucaaaaucucuuaucuggag

SEQ ID NO: 865411 - RNA, 18 nt, Human
ucaaugacaaauguaaga

SEQ ID NO: 865412 - RNA, 19 nt, Human
ucacgcccaaccacccaca

SEQ ID NO: 865413 - RNA, 18 nt, Human
ucagacauguaccagaac

SEQ ID NO: 865414 - RNA, 20 nt, Human
uccacacacacacacacaca

SEQ ID NO: 865415 - RNA, 21 nt, Human
uccacacacacacacacacac

SEQ ID NO: 865416 - RNA, 24 nt, Human
uccacacacacacacacacacaca

SEQ ID NO: 865417 - RNA, 25 nt, Human
uccacacacacacacacacacacag

SEQ ID NO: 865418 - RNA, 23 nt, Human
ucgcacccggggacugacggcuc

SEQ ID NO: 865419 - RNA, 21 nt, Human
ucgcucgguccgcaaccgugg

SEQ ID NO: 865420 - RNA, 21 nt, Human
ucggcgucaggcgcucuccuc

SEQ ID NO: 865421 - RNA, 18 nt, Human
ucgugccaccccgcacgc

SEQ ID NO: 865422 - RNA, 18 nt, Human
ucucuccaagcaauagaa

SEQ ID NO: 865423 - RNA, 24 nt, Human
ugacaaauguaagaauuuuaaaaa

SEQ ID NO: 865424 - RNA, 19 nt, Human
ugccgggcugcgccugcgg

SEQ ID NO: 865425 - RNA, 22 nt, Human
uggagggaggaaggguguggaa

SEQ ID NO: 865426 - RNA, 20 nt, Human
uggagucucuggaauaaaac

SEQ ID NO: 865427 - RNA, 19 nt, Human
uggcacccgagcuccacac

SEQ ID NO: 865428 - RNA, 28 nt, Human
ugucucgugccaccccgcacgcccccca

SEQ ID NO: 865429 - RNA, 23 nt, Human
uuauguuuuucacucaaaaucuc

SEQ ID NO: 865430 - RNA, 21 nt, Human
uuuuaaaaaugaaaaauggca

SEQ ID NO: 865431 - RNA, 23 nt, Human
aagggaaggggaggaggggcaaa

SEQ ID NO: 865432 - RNA, 23 nt, Human
aaguaucuccccaguuuucagcc

SEQ ID NO: 865433 - RNA, 25 nt, Human
acagagccuccuucaacucuugaca

SEQ ID NO: 865434 - RNA, 27 nt, Human
accaggugcugccugccccguccugcu

SEQ ID NO: 865435 - RNA, 20 nt, Human
acgcuggcucuggggcugga

SEQ ID NO: 865436 - RNA, 19 nt, Human
acucuugacaaacuggagg

SEQ ID NO: 865437 - RNA, 22 nt, Human
agaaggcaggcaagggggacag

SEQ ID NO: 865438 - RNA, 18 nt, Human
agcagugggggacaggca

SEQ ID NO: 865439 - RNA, 20 nt, Human
aggagggguguggcuggagg

SEQ ID NO: 865440 - RNA, 20 nt, Human
aggcagagcccucagcugua

SEQ ID NO: 865441 - RNA, 21 nt, Human
aggccccaagacuuccagaag

SEQ ID NO: 865442 - RNA, 21 nt, Human
agggaagaaggcaggcaaggg

SEQ ID NO: 865443 - RNA, 20 nt, Human
agggcuagggguggggggag

SEQ ID NO: 865444 - RNA, 20 nt, Human
aggggaugucugauugcuuc

SEQ ID NO: 865445 - RNA, 19 nt, Human
agggguguggcuggaggag

SEQ ID NO: 865446 - RNA, 23 nt, Human
agggguguggcuggaggagcagc

SEQ ID NO: 865447 - RNA, 24 nt, Human
auccccccaggcuucuacuugcua

SEQ ID NO: 865448 - RNA, 20 nt, Human
cacgcauccccccaggcuuc

SEQ ID NO: 865449 - RNA, 23 nt, Human
cagagccuccuucaacucuugac

SEQ ID NO: 865450 - RNA, 19 nt, Human
cagccaggucaccuggcca

SEQ ID NO: 865451 - RNA, 24 nt, Human
cagccuggggagggucucaggagc

SEQ ID NO: 865452 - RNA, 19 nt, Human
cagcggccacuccauguuu

SEQ ID NO: 865453 - RNA, 20 nt, Human
caggcaagggggacagggag

SEQ ID NO: 865454 - RNA, 19 nt, Human
caggcccagagaagggccc

SEQ ID NO: 865455 - RNA, 23 nt, Human
ccagaagggaaggggaggagggg

SEQ ID NO: 865456 - RNA, 24 nt, Human
cccccaggcuucuacuugcuaguc

SEQ ID NO: 865457 - RNA, 22 nt, Human
cccguccugcuuccugcaggag

SEQ ID NO: 865458 - RNA, 18 nt, Human
cccucaucucuaccccca

SEQ ID NO: 865459 - RNA, 20 nt, Human
cccucccccaccacagcugc

SEQ ID NO: 865460 - RNA, 23 nt, Human
ccucccccaccacagcugcugga

SEQ ID NO: 865461 - RNA, 22 nt, Human
ccugccccguccugcuuccugc

SEQ ID NO: 865462 - RNA, 21 nt, Human
ccuggaagcagggcccaaggg

SEQ ID NO: 865463 - RNA, 18 nt, Human
ccuggagggagcuuaggg

SEQ ID NO: 865464 - RNA, 21 nt, Human
ccuucagcuacucagguccau

SEQ ID NO: 865465 - RNA, 24 nt, Human
cguucuccccucuaagggugccca

SEQ ID NO: 865466 - RNA, 24 nt, Human
cuaccaggugcugccugccccguc

SEQ ID NO: 865467 - RNA, 19 nt, Human
cucagguccauucaucuuc

SEQ ID NO: 865468 - RNA, 22 nt, Human
cucccccaccacagcugcugga

SEQ ID NO: 865469 - RNA, 21 nt, Human
cuccccucaucucuaccccca

SEQ ID NO: 865470 - RNA, 19 nt, Human
cucccuccccucaucucua

SEQ ID NO: 865471 - RNA, 19 nt, Human
gaaggggaggaggggcaaa

SEQ ID NO: 865472 - RNA, 21 nt, Human
gaaggggaggaggggcaaagc

SEQ ID NO: 865473 - RNA, 19 nt, Human
gacagagcagggaagaagg

SEQ ID NO: 865474 - RNA, 21 nt, Human
gacaggcagagcccucagcug

SEQ ID NO: 865475 - RNA, 22 nt, Human
gagcaggagggguguggcugga

SEQ ID NO: 865476 - RNA, 23 nt, Human
gagcaggagggguguggcuggag

SEQ ID NO: 865477 - RNA, 21 nt, Human
gaggaaacugaggcacacgca

SEQ ID NO: 865478 - RNA, 19 nt, Human
gaggggaacccucccccaa

SEQ ID NO: 865479 - RNA, 19 nt, Human
gcaaagcacugugccuacc

SEQ ID NO: 865480 - RNA, 20 nt, Human
gcacacgcauccccccaggc

SEQ ID NO: 865481 - RNA, 22 nt, Human
gcacugugccuaccaggugcug

SEQ ID NO: 865482 - RNA, 24 nt, Human
gccacagagccuccuucaacucuu

SEQ ID NO: 865483 - RNA, 22 nt, Human
gcccaggcccagagaagggccc

SEQ ID NO: 865484 - RNA, 21 nt, Human
gccuaccaggugcugccugcc

SEQ ID NO: 865485 - RNA, 21 nt, Human
gccuuccuucagcuacucagg

SEQ ID NO: 865486 - RNA, 20 nt, Human
gcugccugccccguccugcu

SEQ ID NO: 865487 - RNA, 22 nt, Human
ggaggggcaaagcacugugccu

SEQ ID NO: 865488 - RNA, 23 nt, Human
ggagggguguggcuggaggagca

SEQ ID NO: 865489 - RNA, 19 nt, Human
ggaggugggaagggagaga

SEQ ID NO: 865490 - RNA, 18 nt, Human
ggccacagagccuccuuc

SEQ ID NO: 865491 - RNA, 19 nt, Human
gggacagagcagggaagaa

SEQ ID NO: 865492 - RNA, 21 nt, Human
gggagugcugggcucuggcgc

SEQ ID NO: 865493 - RNA, 19 nt, Human
ggggacagagcagggaaga

SEQ ID NO: 865494 - RNA, 20 nt, Human
ggggacagggagaccuggaa

SEQ ID NO: 865495 - RNA, 21 nt, Human
ggguagggaggggccuuccuu

SEQ ID NO: 865496 - RNA, 23 nt, Human
ggucaccuggccacagagccucc

SEQ ID NO: 865497 - RNA, 18 nt, Human
guggaaggcagccagguc

SEQ ID NO: 865498 - RNA, 19 nt, Human
guggagcggggcaggccag

SEQ ID NO: 865499 - RNA, 19 nt, Human
guggcuggaggagcagcug

SEQ ID NO: 865500 - RNA, 18 nt, Human
uacaaggaguggaaggca

SEQ ID NO: 865501 - RNA, 23 nt, Human
uacaaggaguggaaggcagccag

SEQ ID NO: 865502 - RNA, 19 nt, Human
uaccaggugcugccugccc

SEQ ID NO: 865503 - RNA, 21 nt, Human
uagcaccuggccucuuuuccc

SEQ ID NO: 865504 - RNA, 18 nt, Human
uagcagugggggacaggc

SEQ ID NO: 865505 - RNA, 21 nt, Human
uccagaagggaaggggaggaa

SEQ ID NO: 865506 - RNA, 18 nt, Human
ucccccaccacagcugcu

SEQ ID NO: 865507 - RNA, 19 nt, Human
ucuacuugcuaguccaagg

SEQ ID NO: 865508 - RNA, 21 nt, Human
ucuggcgccugucugccuucc

SEQ ID NO: 865509 - RNA, 22 nt, Human
ugagaaaggcucauuuuuagca

SEQ ID NO: 865510 - RNA, 22 nt, Human
ugagcuguaagcagccugggga

SEQ ID NO: 865511 - RNA, 19 nt, Human
ugaggccccaagacuucca

SEQ ID NO: 865512 - RNA, 24 nt, Human
ugagguacaaggaguggaaggcag

SEQ ID NO: 865513 - RNA, 19 nt, Human
ugauugcuucguucucccc

SEQ ID NO: 865514 - RNA, 19 nt, Human
ugcaagcacugaggcccca

SEQ ID NO: 865515 - RNA, 22 nt, Human
ugcaagcacugaggccccaaga

SEQ ID NO: 865516 - RNA, 24 nt, Human
ugcaagcacugaggccccaagacu

SEQ ID NO: 865517 - RNA, 21 nt, Human
ugcccaggcccagagaagggc

SEQ ID NO: 865518 - RNA, 20 nt, Human
ugccuggagggagcuuaggg

SEQ ID NO: 865519 - RNA, 18 nt, Human
ugcuggaaaagggagugc

SEQ ID NO: 865520 - RNA, 18 nt, Human
ugcuucguucuccccucu

SEQ ID NO: 865521 - RNA, 23 nt, Human
uggaagcagggcccaaggggaug

SEQ ID NO: 865522 - RNA, 25 nt, Human
uggaagcagggcccaaggggauguc

SEQ ID NO: 865523 - RNA, 19 nt, Human
uggaaggcagccaggucac

SEQ ID NO: 865524 - RNA, 23 nt, Human
uggaaggcagccaggucaccugg

SEQ ID NO: 865525 - RNA, 18 nt, Human
uggcuggaggagcagcug

SEQ ID NO: 865526 - RNA, 24 nt, Human
uggggggagcaggagggguguggc

SEQ ID NO: 865527 - RNA, 21 nt, Human
uguggaggaggaaacugaggc

SEQ ID NO: 865528 - RNA, 21 nt, Human
uuaacuuacucccuccccuca

SEQ ID NO: 865529 - RNA, 22 nt, Human
aaaaggaaggcagcugcuuggc

SEQ ID NO: 865530 - RNA, 23 nt, Human
aacccccagggcuacccaccccc

SEQ ID NO: 865531 - RNA, 21 nt, Human
aagcagauggucagcagugcu

SEQ ID NO: 865532 - RNA, 20 nt, Human
acagagcagcggcugacccc

SEQ ID NO: 865533 - RNA, 19 nt, Human
acaucaguuccugugguuc

SEQ ID NO: 865534 - RNA, 21 nt, Human
accgccgccucccgcucaggu

SEQ ID NO: 865535 - RNA, 22 nt, Human
agacugagcaacccuacccagc

SEQ ID NO: 865536 - RNA, 19 nt, Human
agagggaggggaaccccca

SEQ ID NO: 865537 - RNA, 19 nt, Human
aggauaagucccuaaccuc

SEQ ID NO: 865538 - RNA, 22 nt, Human
aggcagcugcuuggcuuccuuc

SEQ ID NO: 865539 - RNA, 19 nt, Human
caccagggaggggccaggc

SEQ ID NO: 865540 - RNA, 19 nt, Human
cacuguccccaccagggag

SEQ ID NO: 865541 - RNA, 21 nt, Human
cagagcagcggcugaccccac

SEQ ID NO: 865542 - RNA, 24 nt, Human
cagcagugcucuuaucugccccuc

SEQ ID NO: 865543 - RNA, 23 nt, Human
cagcggcugaccccacccccaca

SEQ ID NO: 865544 - RNA, 19 nt, Human
cagcugcuuggcuuccuuc

SEQ ID NO: 865545 - RNA, 22 nt, Human
cagcugcuuggcuuccuucuag

SEQ ID NO: 865546 - RNA, 21 nt, Human
cagugcucuuaucugccccuc

SEQ ID NO: 865547 - RNA, 20 nt, Human
ccaccgccaccgccgccacc

SEQ ID NO: 865548 - RNA, 31 nt, Human
ccaccgccaccgccgcuaccggguccccagg

SEQ ID NO: 865549 - RNA, 21 nt, Human
ccaccgccgccaccgccaccg

SEQ ID NO: 865550 - RNA, 23 nt, Human
ccaccgccgccaccgccaccgcc

SEQ ID NO: 865551 - RNA, 21 nt, Human
ccccaaagacugagcaacccu

SEQ ID NO: 865552 - RNA, 24 nt, Human
ccccaaagacugagcaacccuacc

SEQ ID NO: 865553 - RNA, 23 nt, Human
ccccuccaaaccuaagugagggc

SEQ ID NO: 865554 - RNA, 20 nt, Human
ccgccaccgccaccgccgcu

SEQ ID NO: 865555 - RNA, 18 nt, Human
ccgccgccaccgccaccg

SEQ ID NO: 865556 - RNA, 21 nt, Human
ccgccgccaccgccaccgccg

SEQ ID NO: 865557 - RNA, 28 nt, Human
ccgccgccaccgccaccgccgcuaccgg

SEQ ID NO: 865558 - RNA, 21 nt, Human
ccucugccgucgccgcagcca

SEQ ID NO: 865559 - RNA, 22 nt, Human
ccuucuagaagccccgggagcc

SEQ ID NO: 865560 - RNA, 24 nt, Human
cgccaccgccgcuaccgggucccc

SEQ ID NO: 865561 - RNA, 24 nt, Human
cgccucugccgucgccgcagccac

SEQ ID NO: 865562 - RNA, 19 nt, Human
cggcgauccggcucccuuc

SEQ ID NO: 865563 - RNA, 22 nt, Human
cugaccccacccccacaggaca

SEQ ID NO: 865564 - RNA, 18 nt, Human
cugaggccagagccaacc

SEQ ID NO: 865565 - RNA, 24 nt, Human
gaacccccagggcuacccaccccc

SEQ ID NO: 865566 - RNA, 19 nt, Human
gaauguguaagggacagga

SEQ ID NO: 865567 - RNA, 22 nt, Human
gagccuuuaacuaccccagcuc

SEQ ID NO: 865568 - RNA, 23 nt, Human
gcaauagcagcagcaaaguccua

SEQ ID NO: 865569 - RNA, 20 nt, Human
gcagcugcuuggcuuccuuc

SEQ ID NO: 865570 - RNA, 19 nt, Human
gccccgggagccuuuaacu

SEQ ID NO: 865571 - RNA, 24 nt, Human
gccccgggagccuuuaacuacccc

SEQ ID NO: 865572 - RNA, 19 nt, Human
gccgcagccaccgccaccg

SEQ ID NO: 865573 - RNA, 23 nt, Human
gcuggaaccgucuucagggccca

SEQ ID NO: 865574 - RNA, 21 nt, Human
ggaacccccagggcuacccac

SEQ ID NO: 865575 - RNA, 22 nt, Human
ggacacaauguggggagaggag

SEQ ID NO: 865576 - RNA, 23 nt, Human
ggagccuuuaacuaccccagcuc

SEQ ID NO: 865577 - RNA, 20 nt, Human
ggccgccaccgccgccuccc

SEQ ID NO: 865578 - RNA, 22 nt, Human
ggccugguuccuuccuaccucu

SEQ ID NO: 865579 - RNA, 21 nt, Human
gggcgccugcgcgccgcgcgc

SEQ ID NO: 865580 - RNA, 21 nt, Human
gguaaaaaaggucgggaggag

SEQ ID NO: 865581 - RNA, 21 nt, Human
gugagggccugguuccuuccu

SEQ ID NO: 865582 - RNA, 20 nt, Human
uaagucccuaaccuccccca

SEQ ID NO: 865583 - RNA, 21 nt, Human
uacacaucaguuccugugguu

SEQ ID NO: 865584 - RNA, 18 nt, Human
uacccacccccacccugc

SEQ ID NO: 865585 - RNA, 21 nt, Human
uacccacccccacccugccuc

SEQ ID NO: 865586 - RNA, 26 nt, Human
ucagcagugcucuuaucugccccucc

SEQ ID NO: 865587 - RNA, 20 nt, Human
ucaguuccugugguucugua

SEQ ID NO: 865588 - RNA, 20 nt, Human
ugagcaacccuacccagccc

SEQ ID NO: 865589 - RNA, 21 nt, Human
ugagcaacccuacccagccca

SEQ ID NO: 865590 - RNA, 20 nt, Human
ugagggccugguuccuuccu

SEQ ID NO: 865591 - RNA, 23 nt, Human
ugaggguacugaggccagagcca

SEQ ID NO: 865592 - RNA, 19 nt, Human
ugcaauagcagcagcaaag

SEQ ID NO: 865593 - RNA, 19 nt, Human
ugcccuggaauguguaagg

SEQ ID NO: 865594 - RNA, 19 nt, Human
ugcucuuaucugccccucc

SEQ ID NO: 865595 - RNA, 19 nt, Human
uggggagaggagacugagg

SEQ ID NO: 865596 - RNA, 23 nt, Human
uguggggagaggagacugagggu

SEQ ID NO: 865597 - RNA, 19 nt, Human
uuccugugguucuguacag

SEQ ID NO: 865598 - RNA, 23 nt, Human
uuccuucuagaagccccgggagc

SEQ ID NO: 865599 - RNA, 18 nt, Human
uuuuuuuuuuuuagaguc

SEQ ID NO: 865600 - RNA, 24 nt, Human
cacccacucuccguccucuccaca

SEQ ID NO: 865601 - RNA, 21 nt, Human
cagauccagggaaagauaaag

SEQ ID NO: 865602 - RNA, 18 nt, Human
ccccacacuucgagucug

SEQ ID NO: 865603 - RNA, 22 nt, Human
ccguccucuccacaugcagauc

SEQ ID NO: 865604 - RNA, 20 nt, Human
cuggaaggacgcuggucucu

SEQ ID NO: 865605 - RNA, 21 nt, Human
gcuugugugcacccacucucc

SEQ ID NO: 865606 - RNA, 18 nt, Human
ggaaggacgcuggucucu

SEQ ID NO: 865607 - RNA, 21 nt, Human
uaccuacaacagacuccgcgg

SEQ ID NO: 865608 - RNA, 22 nt, Human
ucaacgcugaggucugaacagc

SEQ ID NO: 865609 - RNA, 23 nt, Human
ucagugugauaguagcucagauu

SEQ ID NO: 865610 - RNA, 25 nt, Human
agccggcgccggcggccugguuacc

SEQ ID NO: 865611 - RNA, 20 nt, Human
cacauggccgcgcacacgcc

SEQ ID NO: 865612 - RNA, 25 nt, Human
cacccugccuccgacucgccaggaa

SEQ ID NO: 865613 - RNA, 22 nt, Human
cccaggagaagcaguucccgcc

SEQ ID NO: 865614 - RNA, 21 nt, Human
ccgcgcacacgccucggggcc

SEQ ID NO: 865615 - RNA, 22 nt, Human
ccgcgcacacgccucggggccg

SEQ ID NO: 865616 - RNA, 24 nt, Human
ccgcgcacacgccucggggccgcg

SEQ ID NO: 865617 - RNA, 25 nt, Human
ccgggcuccaggggcucggaggguc

SEQ ID NO: 865618 - RNA, 22 nt, Human
ccugaggugggggccgggccag

SEQ ID NO: 865619 - RNA, 20 nt, Human
cgccucggggccgcgccgca

SEQ ID NO: 865620 - RNA, 21 nt, Human
cgcugugugcgcggggcuucc

SEQ ID NO: 865621 - RNA, 22 nt, Human
cucggagggucgcggccggggu

SEQ ID NO: 865622 - RNA, 22 nt, Human
cuuccugaggugggggccgggc

SEQ ID NO: 865623 - RNA, 21 nt, Human
gaggcuuccugaggugggggc

SEQ ID NO: 865624 - RNA, 23 nt, Human
gcgccgcaggcacacgccuccgc

SEQ ID NO: 865625 - RNA, 18 nt, Human
ggccgggccaggauggcu

SEQ ID NO: 865626 - RNA, 22 nt, Human
ggcggccugguuacccgggcuc

SEQ ID NO: 865627 - RNA, 21 nt, Human
gggccgggccaggauggcugc

SEQ ID NO: 865628 - RNA, 22 nt, Human
ggucucugggcgggccguggga

SEQ ID NO: 865629 - RNA, 24 nt, Human
uaagcgcacauggccgcgcacacg

SEQ ID NO: 865630 - RNA, 22 nt, Human
uacauaggugccugauggaaug

SEQ ID NO: 865631 - RNA, 18 nt, Human
uccugggcggcccaggag

SEQ ID NO: 865632 - RNA, 22 nt, Human
ucucugggcgggccgugggagg

SEQ ID NO: 865633 - RNA, 24 nt, Human
ugaaauuaagagauuuucucgguc

SEQ ID NO: 865634 - RNA, 19 nt, Human
ugagguaagagcgcgcugc

SEQ ID NO: 865635 - RNA, 20 nt, Human
ugcgcggggcuuccagggug

SEQ ID NO: 865636 - RNA, 28 nt, Human
ugcgcggggcuuccaggguggcgggucc

SEQ ID NO: 865637 - RNA, 21 nt, Human
ugcugaguuucuucaucuaca

SEQ ID NO: 865638 - RNA, 20 nt, Human
uggaaugucacagauaacuc

SEQ ID NO: 865639 - RNA, 19 nt, Human
uggccgcgcacacgccucg

SEQ ID NO: 865640 - RNA, 20 nt, Human
uggcggguccccgcgagccg

SEQ ID NO: 865641 - RNA, 20 nt, Human
uggcugcagcgcagcgacgg

SEQ ID NO: 865642 - RNA, 20 nt, Human
uuaccugggccccacccugc

SEQ ID NO: 865643 - RNA, 19 nt, Human
uucaucuacaauccgcgcu

SEQ ID NO: 865644 - RNA, 20 nt, Human
uuccaggguggcgggucccc

SEQ ID NO: 865645 - RNA, 21 nt, Human
uuccaggguggcggguccccg

SEQ ID NO: 865646 - RNA, 21 nt, Human
uuccugaggugggggccgggc

SEQ ID NO: 865647 - RNA, 21 nt, Human
uuuuuuuuuccacugaaauua

SEQ ID NO: 865648 - RNA, 21 nt, Human
uuuuuuuuuuuuuuuuccacu

SEQ ID NO: 865649 - RNA, 22 nt, Human
uuuuuuuuuuuuuuuuccacug

SEQ ID NO: 865650 - RNA, 20 nt, Human
aaagagaagccacuauaaau

SEQ ID NO: 865651 - RNA, 22 nt, Human
aacugacgauauccacagcccu

SEQ ID NO: 865652 - RNA, 18 nt, Human
acagaugacaaacuccau

SEQ ID NO: 865653 - RNA, 19 nt, Human
aggaagggaagauuucuaa

SEQ ID NO: 865654 - RNA, 23 nt, Human
aggacccaggcaugccuggccca

SEQ ID NO: 865655 - RNA, 19 nt, Human
aggcagaggcaggacccag

SEQ ID NO: 865656 - RNA, 20 nt, Human
aggcaggagucuguguuugg

SEQ ID NO: 865657 - RNA, 25 nt, Human
aggcaggagucuguguuuggggguc

SEQ ID NO: 865658 - RNA, 25 nt, Human
aggcaugccuggcccacaggaaggu

SEQ ID NO: 865659 - RNA, 19 nt, Human
aggcuggggaccacugcaa

SEQ ID NO: 865660 - RNA, 19 nt, Human
agggaaucuucucgucaug

SEQ ID NO: 865661 - RNA, 20 nt, Human
agugagacuuuuuuugagug

SEQ ID NO: 865662 - RNA, 21 nt, Human
cacagaagagagucuccacug

SEQ ID NO: 865663 - RNA, 22 nt, Human
cagaagagagucuccacuggua

SEQ ID NO: 865664 - RNA, 23 nt, Human
cagcaucggcagagggcaggcag

SEQ ID NO: 865665 - RNA, 20 nt, Human
cagcucaagaccaugggcag

SEQ ID NO: 865666 - RNA, 21 nt, Human
caucacuaaugcacuaacguc

SEQ ID NO: 865667 - RNA, 18 nt, Human
caucggcagagggcaggc

SEQ ID NO: 865668 - RNA, 18 nt, Human
cauggcuagacacucccc

SEQ ID NO: 865669 - RNA, 19 nt, Human
cauggcuagacacucccca

SEQ ID NO: 865670 - RNA, 24 nt, Human
cauuuuauucucucauucagcuca

SEQ ID NO: 865671 - RNA, 24 nt, Human
ccacagcccuauaccuaccauccg

SEQ ID NO: 865672 - RNA, 19 nt, Human
ccccugcuccuccucuucc

SEQ ID NO: 865673 - RNA, 22 nt, Human
cccugcuccuccucuucccuug

SEQ ID NO: 865674 - RNA, 20 nt, Human
ccucuuggaauacuugguca

SEQ ID NO: 865675 - RNA, 20 nt, Human
cguccucuauuacagaugac

SEQ ID NO: 865676 - RNA, 22 nt, Human
cucuuggaauacuuggucaaac

SEQ ID NO: 865677 - RNA, 22 nt, Human
gacacuccccaaugcucugcuc

SEQ ID NO: 865678 - RNA, 21 nt, Human
gaggcaggacccaggcaugcc

SEQ ID NO: 865679 - RNA, 19 nt, Human
gaugcagagggaaucuucu

SEQ ID NO: 865680 - RNA, 21 nt, Human
gcacuaacguccucuauuaca

SEQ ID NO: 865681 - RNA, 19 nt, Human
gcggcuggguaucagggcc

SEQ ID NO: 865682 - RNA, 22 nt, Human
ggacccaggcaugccuggccca

SEQ ID NO: 865683 - RNA, 20 nt, Human
ggagaucacaauagucagug

SEQ ID NO: 865684 - RNA, 25 nt, Human
ggcggcuggguaucagggccugggc

SEQ ID NO: 865685 - RNA, 21 nt, Human
gguaagcaguuuuuucaucac

SEQ ID NO: 865686 - RNA, 23 nt, Human
uaagaaagguauacaauuggcag

SEQ ID NO: 865687 - RNA, 23 nt, Human
uaaggaggguuuagaaaaagaga

SEQ ID NO: 865688 - RNA, 19 nt, Human
uagacacuccccaaugcuc

SEQ ID NO: 865689 - RNA, 20 nt, Human
uaucagggccugggcacccc

SEQ ID NO: 865690 - RNA, 23 nt, Human
ucaaucccgcuggacacacauau

SEQ ID NO: 865691 - RNA, 21 nt, Human
ucagugguaagcaguuuuuuc

SEQ ID NO: 865692 - RNA, 23 nt, Human
uccacuuucccacagagcugcca

SEQ ID NO: 865693 - RNA, 18 nt, Human
ucccacagagcugccagg

SEQ ID NO: 865694 - RNA, 20 nt, Human
ucuaggagacuaaggagggu

SEQ ID NO: 865695 - RNA, 19 nt, Human
ucuuaucuggucgucuucu

SEQ ID NO: 865696 - RNA, 22 nt, Human
ugcuccaggcuggggaccacug

SEQ ID NO: 865697 - RNA, 20 nt, Human
ugcucugcuccaggcugggg

SEQ ID NO: 865698 - RNA, 19 nt, Human
uggggucuuccacuuuccc

SEQ ID NO: 865699 - RNA, 24 nt, Human
ugggguucgccgugaugcagaggg

SEQ ID NO: 865700 - RNA, 21 nt, Human
uguaaaggagauacaaaggua

SEQ ID NO: 865701 - RNA, 23 nt, Human
uucuucacagaagagagucucca

SEQ ID NO: 865702 - RNA, 19 nt, Human
uugagugucaaucccgcug

SEQ ID NO: 865703 - RNA, 20 nt, Human
uugagugucaaucccgcugg

SEQ ID NO: 865704 - RNA, 27 nt, Human
uuucccacagagcugccaggcagaggc

SEQ ID NO: 865705 - RNA, 23 nt, Human
uuucuaggagacuaaggaggguu

SEQ ID NO: 865706 - RNA, 22 nt, Human
uuugaucucucaugauguaaag

SEQ ID NO: 865707 - RNA, 18 nt, Human
uuuuuuuuuuuuuuuugc

SEQ ID NO: 865708 - RNA, 19 nt, Human
uuuuuuuuuuuuuuuugca

SEQ ID NO: 865709 - RNA, 18 nt, Human
aacuaguuugguuuauuc

SEQ ID NO: 865710 - RNA, 23 nt, Human
aagcagcaagcagaaaaggggac

SEQ ID NO: 865711 - RNA, 23 nt, Human
agcagaaaagcaccuucauucac

SEQ ID NO: 865712 - RNA, 22 nt, Human
agugcugcaggggccaugcagg

SEQ ID NO: 865713 - RNA, 21 nt, Human
caaaaggauugacugaagcag

SEQ ID NO: 865714 - RNA, 23 nt, Human
caacuggugagugcugcaggggc

SEQ ID NO: 865715 - RNA, 22 nt, Human
ccaaaggcuggcuuuuggugcc

SEQ ID NO: 865716 - RNA, 25 nt, Human
ccagcccuuccaaaggcuggcuuuu

SEQ ID NO: 865717 - RNA, 18 nt, Human
cuggaacucuuaaagugg

SEQ ID NO: 865718 - RNA, 18 nt, Human
cuggcuuuuggugccuuu

SEQ ID NO: 865719 - RNA, 18 nt, Human
gcagcagcuucgacgugu

SEQ ID NO: 865720 - RNA, 24 nt, Human
ggaaagaagggcacaguccaccag

SEQ ID NO: 865721 - RNA, 19 nt, Human
ggaaguugcuccaccuaca

SEQ ID NO: 865722 - RNA, 21 nt, Human
ggaaguugcuccaccuacauu

SEQ ID NO: 865723 - RNA, 19 nt, Human
uaaaguggugagaucauca

SEQ ID NO: 865724 - RNA, 27 nt, Human
uauucugcauccugcauccccggauga

SEQ ID NO: 865725 - RNA, 18 nt, Human
ucuggaacucuuaaagug

SEQ ID NO: 865726 - RNA, 27 nt, Human
ugacugaagcagcaagcagaaaagcac

SEQ ID NO: 865727 - RNA, 19 nt, Human
ugagaucaucaaaaggauu

SEQ ID NO: 865728 - RNA, 20 nt, Human
ugccuuuccaaggggagggg

SEQ ID NO: 865729 - RNA, 21 nt, Human
uguugcagggaaguugcucca

SEQ ID NO: 865730 - RNA, 18 nt, Human
uucugcauccugcauccc

SEQ ID NO: 865731 - RNA, 19 nt, Human
aaacaggcaaauaaccaga

SEQ ID NO: 865732 - RNA, 19 nt, Human
acaacuuuuuucucccugu

SEQ ID NO: 865733 - RNA, 21 nt, Human
acaggcaaauaaccagauaug

SEQ ID NO: 865734 - RNA, 22 nt, Human
accuucucuauaccagcuguua

SEQ ID NO: 865735 - RNA, 23 nt, Human
acugcaaaugucaugggccacag

SEQ ID NO: 865736 - RNA, 21 nt, Human
acugcagucuccaugucucuu

SEQ ID NO: 865737 - RNA, 23 nt, Human
acugcuuccccuuucuuucuucu

SEQ ID NO: 865738 - RNA, 24 nt, Human
agaaagaaaagggcaguuuucugg

SEQ ID NO: 865739 - RNA, 24 nt, Human
agauaugcacaauacaauaugacc

SEQ ID NO: 865740 - RNA, 19 nt, Human
augaccuagguauguaugu

SEQ ID NO: 865741 - RNA, 23 nt, Human
augcacaauacaauaugaccagu

SEQ ID NO: 865742 - RNA, 18 nt, Human
caagucagauguuugucc

SEQ ID NO: 865743 - RNA, 23 nt, Human
cacaucaaaucuuuauucuaccc

SEQ ID NO: 865744 - RNA, 24 nt, Human
cacccuauuucucuccggauugcu

SEQ ID NO: 865745 - RNA, 20 nt, Human
caccuuuccaggaacaaugg

SEQ ID NO: 865746 - RNA, 21 nt, Human
cagauucugaggaaucaaagg

SEQ ID NO: 865747 - RNA, 23 nt, Human
cagugcuauaaaggaaggccaga

SEQ ID NO: 865748 - RNA, 21 nt, Human
cauagacaaggggccagacca

SEQ ID NO: 865749 - RNA, 19 nt, Human
cccaguaucuccgucccuu

SEQ ID NO: 865750 - RNA, 20 nt, Human
cccuuucuuucuucuucgcc

SEQ ID NO: 865751 - RNA, 22 nt, Human
cccuuucuuucuucuucgccuu

SEQ ID NO: 865752 - RNA, 20 nt, Human
cuaaggaaugcagaugaaaa

SEQ ID NO: 865753 - RNA, 21 nt, Human
cucaagagagagagaaucuga

SEQ ID NO: 865754 - RNA, 22 nt, Human
cuuucuuucuucuucgccuucu

SEQ ID NO: 865755 - RNA, 19 nt, Human
gggagguugaacuggcucu

SEQ ID NO: 865756 - RNA, 21 nt, Human
gggggagguugaacuggcucu

SEQ ID NO: 865757 - RNA, 22 nt, Human
guaucuccgucccuuucuucac

SEQ ID NO: 865758 - RNA, 19 nt, Human
gugucuacucccaagugac

SEQ ID NO: 865759 - RNA, 23 nt, Human
uacccauucuuccuuugaacagg

SEQ ID NO: 865760 - RNA, 19 nt, Human
uaggaugagagaaagaaaa

SEQ ID NO: 865761 - RNA, 23 nt, Human
ucagaaacaauguguuggagaca

SEQ ID NO: 865762 - RNA, 20 nt, Human
ucagcuguccaagucagaug

SEQ ID NO: 865763 - RNA, 23 nt, Human
ucauagacaaggggccagaccac

SEQ ID NO: 865764 - RNA, 24 nt, Human
ucauggaaaacaggcaaauaacca

SEQ ID NO: 865765 - RNA, 21 nt, Human
ucccccuuuaacccccucuua

SEQ ID NO: 865766 - RNA, 20 nt, Human
ucuuucuucuucgccuuccc

SEQ ID NO: 865767 - RNA, 21 nt, Human
ugaccagugcuauaaaggaag

SEQ ID NO: 865768 - RNA, 18 nt, Human
ugaccuagguauguaugu

SEQ ID NO: 865769 - RNA, 19 nt, Human
ugagagaaagaaaagggca

SEQ ID NO: 865770 - RNA, 20 nt, Human
uggaaaacaggcaaauaacc

SEQ ID NO: 865771 - RNA, 21 nt, Human
uggaaaugugaugugagcuga

SEQ ID NO: 865772 - RNA, 19 nt, Human
ugggaauguuucccucuga

SEQ ID NO: 865773 - RNA, 23 nt, Human
uggguagggaagaagcagcauuu

SEQ ID NO: 865774 - RNA, 23 nt, Human
ugguagggaucaccuuuccagga

SEQ ID NO: 865775 - RNA, 23 nt, Human
uguuucccucugaaggcuuggga

SEQ ID NO: 865776 - RNA, 19 nt, Human
uuuuuuuuuuuuuuugugu

SEQ ID NO: 865777 - RNA, 21 nt, Human
agcaugggcaccagccucacu

SEQ ID NO: 865778 - RNA, 19 nt, Human
auguggaguugauguggag

SEQ ID NO: 865779 - RNA, 23 nt, Human
auuuuauuauacaaaacuagauu

SEQ ID NO: 865780 - RNA, 21 nt, Human
ccuuggaugucagcuuggccc

SEQ ID NO: 865781 - RNA, 22 nt, Human
cgaggcgcuuggcggggucuac

SEQ ID NO: 865782 - RNA, 23 nt, Human
cggaacagaacacuccccacugg

SEQ ID NO: 865783 - RNA, 20 nt, Human
cggccaggauaugccggaac

SEQ ID NO: 865784 - RNA, 18 nt, Human
cugauuccacucaucagu

SEQ ID NO: 865785 - RNA, 19 nt, Human
gcgcauguggaguugaugu

SEQ ID NO: 865786 - RNA, 22 nt, Human
ggaguuguagcugacuggcugg

SEQ ID NO: 865787 - RNA, 21 nt, Human
ggccacagcuaguaaauuacc

SEQ ID NO: 865788 - RNA, 19 nt, Human
gguggggucagccuggccu

SEQ ID NO: 865789 - RNA, 20 nt, Human
guggagcaugggcaccagcc

SEQ ID NO: 865790 - RNA, 18 nt, Human
ugaaaagaaguuuauugc

SEQ ID NO: 865791 - RNA, 22 nt, Human
ugccggaacagaacacucccca

SEQ ID NO: 865792 - RNA, 21 nt, Human
uggccccucaaggggucccuc

SEQ ID NO: 865793 - RNA, 22 nt, Human
uuggcggggucuaccagccgcu

SEQ ID NO: 865794 - RNA, 24 nt, Human
uuuguaguugcugaaaagaaguuu

SEQ ID NO: 865795 - RNA, 21 nt, Human
uuuuuuuuuuuuuuuuguagu

SEQ ID NO: 865796 - RNA, 22 nt, Human
aaucguucccuccguguccccg

SEQ ID NO: 865797 - RNA, 20 nt, Human
caacagguguggugccuggg

SEQ ID NO: 865798 - RNA, 18 nt, Human
cacugcaaccucugccuc

SEQ ID NO: 865799 - RNA, 21 nt, Human
cacugcaaccucugccuccca

SEQ ID NO: 865800 - RNA, 21 nt, Human
caguuggguuuucccagauuu

SEQ ID NO: 865801 - RNA, 22 nt, Human
ccagguucaagcgaucccccuc

SEQ ID NO: 865802 - RNA, 20 nt, Human
cccagguucaagcgaucccc

SEQ ID NO: 865803 - RNA, 19 nt, Human
ccggcguuguacucuuucc

SEQ ID NO: 865804 - RNA, 21 nt, Human
ccucccagguucaagcgaucc

SEQ ID NO: 865805 - RNA, 22 nt, Human
ccuuuuccuuuuggaagauccc

SEQ ID NO: 865806 - RNA, 19 nt, Human
cgacuggucaccuuuuccu

SEQ ID NO: 865807 - RNA, 24 nt, Human
cgcucugucacccaggcuggguug

SEQ ID NO: 865808 - RNA, 20 nt, Human
cggcguuguacucuuuccca

SEQ ID NO: 865809 - RNA, 23 nt, Human
cucugucacccaggcuggguugc

SEQ ID NO: 865810 - RNA, 23 nt, Human
cugcaaccucugccucccagguu

SEQ ID NO: 865811 - RNA, 24 nt, Human
cugcaaccucugccucccagguuc

SEQ ID NO: 865812 - RNA, 19 nt, Human
gacuggucaccuuuuccuu

SEQ ID NO: 865813 - RNA, 22 nt, Human
gaucucuguucacugcaaccuc

SEQ ID NO: 865814 - RNA, 22 nt, Human
gcaaccucugccucccagguuc

SEQ ID NO: 865815 - RNA, 21 nt, Human
gucacccaggcuggguugcag

SEQ ID NO: 865816 - RNA, 22 nt, Human
gucaccuuuuccuuuuggaaga

SEQ ID NO: 865817 - RNA, 20 nt, Human
gucuccagcagaucucagcc

SEQ ID NO: 865818 - RNA, 21 nt, Human
guugcaguggcgcgaucucug

SEQ ID NO: 865819 - RNA, 27 nt, Human
uauuuuuuuucuuuuuauauuuugaga

SEQ ID NO: 865820 - RNA, 25 nt, Human
ucaccuuuuccuuuuggaagauccc

SEQ ID NO: 865821 - RNA, 19 nt, Human
ucacugcaaccucugccuc

SEQ ID NO: 865822 - RNA, 23 nt, Human
ucacugcaaccucugccucccag

SEQ ID NO: 865823 - RNA, 24 nt, Human
ucacugcaaccucugccucccagg

SEQ ID NO: 865824 - RNA, 25 nt, Human
ucacugcaaccucugccucccaggu

SEQ ID NO: 865825 - RNA, 25 nt, Human
ucagaugaucaacaauccauguuag

SEQ ID NO: 865826 - RNA, 18 nt, Human
ucccagauuucucgacug

SEQ ID NO: 865827 - RNA, 18 nt, Human
ucccagguucaagcgauc

SEQ ID NO: 865828 - RNA, 23 nt, Human
ucgcucugucacccaggcugggu

SEQ ID NO: 865829 - RNA, 19 nt, Human
ucucgcucugucacccagg

SEQ ID NO: 865830 - RNA, 22 nt, Human
ucucgcucugucacccaggcug

SEQ ID NO: 865831 - RNA, 23 nt, Human
ucucgcucugucacccaggcugg

SEQ ID NO: 865832 - RNA, 23 nt, Human
ucucgcucugucacccaggcugg

SEQ ID NO: 865833 - RNA, 24 nt, Human
ucucgcucugucacccaggcuggg

SEQ ID NO: 865834 - RNA, 26 nt, Human
ucucgcucugucacccaggcuggguu

SEQ ID NO: 865835 - RNA, 27 nt, Human
ucucgcucugucacccaggcuggguug

SEQ ID NO: 865836 - RNA, 24 nt, Human
ucugucacccaggcuggguugcag

SEQ ID NO: 865837 - RNA, 18 nt, Human
ugagacaaagucucgcuc

SEQ ID NO: 865838 - RNA, 22 nt, Human
ugagacaaagucucgcucuguc

SEQ ID NO: 865839 - RNA, 24 nt, Human
ugccucccagguucaagcgauccc

SEQ ID NO: 865840 - RNA, 19 nt, Human
uggguugcaguggcgcgau

SEQ ID NO: 865841 - RNA, 19 nt, Human
uucaagcgaucccccuccg

SEQ ID NO: 865842 - RNA, 20 nt, Human
uuuuuuuuuuuuuuguucca

SEQ ID NO: 865843 - RNA, 20 nt, Human
uuuuuuuuuuuuuuguucca

SEQ ID NO: 865844 - RNA, 19 nt, Human
uuuuuuuuuuuuuuuuguu

SEQ ID NO: 865845 - RNA, 18 nt, Human
accacggaaggaaagaca

SEQ ID NO: 865846 - RNA, 24 nt, Human
cggaaggaaagacagaauuuucau

SEQ ID NO: 865847 - RNA, 23 nt, Human
uugcaaauugauccacacucaau

SEQ ID NO: 865848 - RNA, 22 nt, Human
uuuuuuuuuuuuuuuugcaaau

SEQ ID NO: 865849 - RNA, 25 nt, Human
uuuuuuuuuuuuuuuugcaaauuga

SEQ ID NO: 865850 - RNA, 23 nt, Human
aaaacauuacaccucuggccccc

SEQ ID NO: 865851 - RNA, 20 nt, Human
aaacaagucugaaacccaga

SEQ ID NO: 865852 - RNA, 23 nt, Human
aaacaagucugaaacccagaaag

SEQ ID NO: 865853 - RNA, 23 nt, Human
aaaugucuauucaaguccuuucc

SEQ ID NO: 865854 - RNA, 24 nt, Human
aacuccaaagugucaucucaauau

SEQ ID NO: 865855 - RNA, 20 nt, Human
aagcaaacugaagacuuucc

SEQ ID NO: 865856 - RNA, 22 nt, Human
aagcaaacugaagacuuuccau

SEQ ID NO: 865857 - RNA, 19 nt, Human
aaggccucaaaagucucag

SEQ ID NO: 865858 - RNA, 20 nt, Human
aagugagaaacaggagaaag

SEQ ID NO: 865859 - RNA, 18 nt, Human
acuuguagaccuguccuc

SEQ ID NO: 865860 - RNA, 21 nt, Human
agaaagcaaacugaagacuuu

SEQ ID NO: 865861 - RNA, 24 nt, Human
agaccggaacccaaacgcagcgga

SEQ ID NO: 865862 - RNA, 20 nt, Human
aucacauugugggggagagg

SEQ ID NO: 865863 - RNA, 21 nt, Human
auugugggggagagggggggc

SEQ ID NO: 865864 - RNA, 20 nt, Human
auuucuuguuuuccaucuuu

SEQ ID NO: 865865 - RNA, 20 nt, Human
caaaauccaugucaucacau

SEQ ID NO: 865866 - RNA, 24 nt, Human
caagucugaaacccagaaagcaaa

SEQ ID NO: 865867 - RNA, 19 nt, Human
caauccuaaaaaccaccag

SEQ ID NO: 865868 - RNA, 19 nt, Human
caauguucuccaacauucc

SEQ ID NO: 865869 - RNA, 24 nt, Human
cacauguaaaauauauucaucuca

SEQ ID NO: 865870 - RNA, 24 nt, Human
caccagagacagggccuccaaaua

SEQ ID NO: 865871 - RNA, 23 nt, Human
caccggggccacuggagaagcgg

SEQ ID NO: 865872 - RNA, 21 nt, Human
caccucuggcccccaaaaucc

SEQ ID NO: 865873 - RNA, 24 nt, Human
cagaaagcaaacugaagacuuucc

SEQ ID NO: 865874 - RNA, 24 nt, Human
caucacauguaaaauauauucauc

SEQ ID NO: 865875 - RNA, 27 nt, Human
caucccaaaggccucaaaagguccuuc

SEQ ID NO: 865876 - RNA, 22 nt, Human
caugauguccuccaauccuaaa

SEQ ID NO: 865877 - RNA, 18 nt, Human
cauucccagugauagugc

SEQ ID NO: 865878 - RNA, 18 nt, Human
ccaaaagugagaaacagg

SEQ ID NO: 865879 - RNA, 24 nt, Human
ccuggcuuccagggugucccgggg

SEQ ID NO: 865880 - RNA, 22 nt, Human
cgcagcggacacgaaacccgcu

SEQ ID NO: 865881 - RNA, 19 nt, Human
cgguggagccaccggggcc

SEQ ID NO: 865882 - RNA, 20 nt, Human
cucaucccaaaggccucaaa

SEQ ID NO: 865883 - RNA, 23 nt, Human
cuccaacauuccacauccuugac

SEQ ID NO: 865884 - RNA, 19 nt, Human
cucccaaacaagucugaaa

SEQ ID NO: 865885 - RNA, 21 nt, Human
cucccaaacaagucugaaacc

SEQ ID NO: 865886 - RNA, 22 nt, Human
cucccaaacaagucugaaaccc

SEQ ID NO: 865887 - RNA, 19 nt, Human
cugagguggcauacacuca

SEQ ID NO: 865888 - RNA, 21 nt, Human
cuuguuuuccaucuuugauac

SEQ ID NO: 865889 - RNA, 26 nt, Human
gauuccuauuccaaaagugagaaaca

SEQ ID NO: 865890 - RNA, 18 nt, Human
gcacaauguucuccaaca

SEQ ID NO: 865891 - RNA, 19 nt, Human
gcuaucuucucacugcacc

SEQ ID NO: 865892 - RNA, 20 nt, Human
gcugcgguggagccaccggg

SEQ ID NO: 865893 - RNA, 21 nt, Human
ggaaguccaauaucaaggcac

SEQ ID NO: 865894 - RNA, 18 nt, Human
ggagaagcggagaccgga

SEQ ID NO: 865895 - RNA, 25 nt, Human
ggagaagcggagaccggaacccaaa

SEQ ID NO: 865896 - RNA, 20 nt, Human
ggggagagggggggcacggg

SEQ ID NO: 865897 - RNA, 23 nt, Human
ggggagagggggggcacgggggu

SEQ ID NO: 865898 - RNA, 18 nt, Human
ggguugcuaaaacaaaau

SEQ ID NO: 865899 - RNA, 21 nt, Human
gugaaaaccaaacuagucaug

SEQ ID NO: 865900 - RNA, 22 nt, Human
uaagggccugcuucccgguuca

SEQ ID NO: 865901 - RNA, 24 nt, Human
uauucaaguccuuuccuccauuuu

SEQ ID NO: 865902 - RNA, 20 nt, Human
ucaacauaugaaucugaggu

SEQ ID NO: 865903 - RNA, 20 nt, Human
ucaauaucacaucacucaga

SEQ ID NO: 865904 - RNA, 19 nt, Human
uccaaaagugagaaacagg

SEQ ID NO: 865905 - RNA, 23 nt, Human
uccaaaagugagaaacaggagaa

SEQ ID NO: 865906 - RNA, 23 nt, Human
ucccaaacaagucugaaacccag

SEQ ID NO: 865907 - RNA, 26 nt, Human
ucccagugauagugcacaagguaccc

SEQ ID NO: 865908 - RNA, 20 nt, Human
uccggccugugcagguccca

SEQ ID NO: 865909 - RNA, 25 nt, Human
ucuauucaaguccuuuccuccauuu

SEQ ID NO: 865910 - RNA, 18 nt, Human
ucucaguuaauuccagca

SEQ ID NO: 865911 - RNA, 22 nt, Human
ucugaaacccagaaagcaaacu

SEQ ID NO: 865912 - RNA, 23 nt, Human
ugaaaaccaaacuagucauguau

SEQ ID NO: 865913 - RNA, 23 nt, Human
ugagaaacaggagaaagggguga

SEQ ID NO: 865914 - RNA, 22 nt, Human
ugauguccuccaauccuaaaaa

SEQ ID NO: 865915 - RNA, 20 nt, Human
ugcgguggagccaccggggc

SEQ ID NO: 865916 - RNA, 24 nt, Human
ugcuaaaacaaaauaccauaaauu

SEQ ID NO: 865917 - RNA, 23 nt, Human
ugcugaggcaaaauucuucuuca

SEQ ID NO: 865918 - RNA, 18 nt, Human
uggagaaaugucuauuca

SEQ ID NO: 865919 - RNA, 18 nt, Human
uggagccaccggggccac

SEQ ID NO: 865920 - RNA, 19 nt, Human
uggcauacacucagccaaa

SEQ ID NO: 865921 - RNA, 19 nt, Human
uggcuuccagggugucccu

SEQ ID NO: 865922 - RNA, 19 nt, Human
ugguaagggccugcuuccc

SEQ ID NO: 865923 - RNA, 20 nt, Human
ugguaagggccugcuucccg

SEQ ID NO: 865924 - RNA, 22 nt, Human
ugguaagggccugcuucccggu

SEQ ID NO: 865925 - RNA, 21 nt, Human
uugaguuugauuuguauuucc

SEQ ID NO: 865926 - RNA, 22 nt, Human
uuucuuguuuuccaucuuugau

SEQ ID NO: 865927 - RNA, 20 nt, Human
uuuggagaaaugucuauuca

SEQ ID NO: 865928 - RNA, 24 nt, Human
aaaaaaccaugcaaaacuagccua

SEQ ID NO: 865929 - RNA, 19 nt, Human
aacaacaaaaagaaugccu

SEQ ID NO: 865930 - RNA, 18 nt, Human
aagaagccaggcacaaag

SEQ ID NO: 865931 - RNA, 21 nt, Human
aaugccuacccuaccccaagc

SEQ ID NO: 865932 - RNA, 24 nt, Human
acagaagaugaguagaaccaagaa

SEQ ID NO: 865933 - RNA, 18 nt, Human
acugagggaggugucaag

SEQ ID NO: 865934 - RNA, 19 nt, Human
agaaacaugagagggcguc

SEQ ID NO: 865935 - RNA, 22 nt, Human
agaagaaacaugagagggcguc

SEQ ID NO: 865936 - RNA, 24 nt, Human
agaauuccuccacauuccaauccc

SEQ ID NO: 865937 - RNA, 20 nt, Human
agcaaauagaaaaugauacu

SEQ ID NO: 865938 - RNA, 21 nt, Human
agcaauaaacaacaaaaagaa

SEQ ID NO: 865939 - RNA, 21 nt, Human
agggcgucugggugcuggcaa

SEQ ID NO: 865940 - RNA, 24 nt, Human
auguggauaaauacauuaugguau

SEQ ID NO: 865941 - RNA, 21 nt, Human
auguuugucauguuucacaau

SEQ ID NO: 865942 - RNA, 20 nt, Human
auuucauuuacugagagugg

SEQ ID NO: 865943 - RNA, 27 nt, Human
auuucauuuacugagaguggagaacaa

SEQ ID NO: 865944 - RNA, 20 nt, Human
caacaaaaagaaugccuacc

SEQ ID NO: 865945 - RNA, 25 nt, Human
caacagcacuuugaacaacuucuaa

SEQ ID NO: 865946 - RNA, 21 nt, Human
caagaaagcuaauagguggca

SEQ ID NO: 865947 - RNA, 22 nt, Human
cacggcaaaaccauaggagaag

SEQ ID NO: 865948 - RNA, 24 nt, Human
cagugguuaccuuuguguggagag

SEQ ID NO: 865949 - RNA, 22 nt, Human
cauuccagauuugaccugguug

SEQ ID NO: 865950 - RNA, 27 nt, Human
ccacauugccccuucuagaauuccucc

SEQ ID NO: 865951 - RNA, 22 nt, Human
cccgggagccucuacccgaccu

SEQ ID NO: 865952 - RNA, 18 nt, Human
cccuucgcuuccucucuc

SEQ ID NO: 865953 - RNA, 23 nt, Human
cgcuuccucucucggcagcacgc

SEQ ID NO: 865954 - RNA, 18 nt, Human
cuacagcuacauucaaua

SEQ ID NO: 865955 - RNA, 20 nt, Human
cuuccacggcaaaaccauag

SEQ ID NO: 865956 - RNA, 19 nt, Human
gaaacccaggggacagaag

SEQ ID NO: 865957 - RNA, 24 nt, Human
gaaagaagccaggcacaaagaaga

SEQ ID NO: 865958 - RNA, 18 nt, Human
gaaccaagaaagcuaaua

SEQ ID NO: 865959 - RNA, 19 nt, Human
gagagggcgucugggugcu

SEQ ID NO: 865960 - RNA, 22 nt, Human
gagagugagccaggagaaguga

SEQ ID NO: 865961 - RNA, 23 nt, Human
gagcuuuugggaagcagggaggg

SEQ ID NO: 865962 - RNA, 24 nt, Human
gagggcgucugggugcuggcaaca

SEQ ID NO: 865963 - RNA, 23 nt, Human
gcagggagggacucuggucugga

SEQ ID NO: 865964 - RNA, 25 nt, Human
gcuuuugggaagcagggagggacuc

SEQ ID NO: 865965 - RNA, 23 nt, Human
ggaagcagcaauaaacaacaaaa

SEQ ID NO: 865966 - RNA, 25 nt, Human
ggacagaagaugaguagaaccaaga

SEQ ID NO: 865967 - RNA, 20 nt, Human
gggagagugagagugagcca

SEQ ID NO: 865968 - RNA, 21 nt, Human
uaaaauucaaaaaaaccaugc

SEQ ID NO: 865969 - RNA, 23 nt, Human
uaagcuaaaaauaauuucauuua

SEQ ID NO: 865970 - RNA, 20 nt, Human
uaccccaagcccaguggaac

SEQ ID NO: 865971 - RNA, 20 nt, Human
uaccuuuguguggagaguga

SEQ ID NO: 865972 - RNA, 24 nt, Human
uagacauagauagauagauagaua

SEQ ID NO: 865973 - RNA, 22 nt, Human
uagauagauagauagacagaua

SEQ ID NO: 865974 - RNA, 22 nt, Human
uagauagauagauagauagaca

SEQ ID NO: 865975 - RNA, 22 nt, Human
uagauagauagauagauagaua

SEQ ID NO: 865976 - RNA, 22 nt, Human
uagauagauagauagauagaua

SEQ ID NO: 865977 - RNA, 22 nt, Human
uagauagauagauagauagaua

SEQ ID NO: 865978 - RNA, 22 nt, Human
uagauagauagauagauagaua

SEQ ID NO: 865979 - RNA, 22 nt, Human
uagauagauagauagauagaua

SEQ ID NO: 865980 - RNA, 22 nt, Human
uagauagauagauagauagaua

SEQ ID NO: 865981 - RNA, 19 nt, Human
uaggagaaguauggaagug

SEQ ID NO: 865982 - RNA, 22 nt, Human
uaucccaaauaugcuuguuuca

SEQ ID NO: 865983 - RNA, 19 nt, Human
ucaaaaaaaccaugcaaaa

SEQ ID NO: 865984 - RNA, 20 nt, Human
ucaagguguugggaggauca

SEQ ID NO: 865985 - RNA, 22 nt, Human
uccacggcaaaaccauaggaga

SEQ ID NO: 865986 - RNA, 18 nt, Human
ucuaagcuaaaaauaauu

SEQ ID NO: 865987 - RNA, 25 nt, Human
ucucucggcagcacgcaggucccgg

SEQ ID NO: 865988 - RNA, 19 nt, Human
ucuggucuggaagcagcaa

SEQ ID NO: 865989 - RNA, 19 nt, Human
ugaaaaaguuaaaagcaaa

SEQ ID NO: 865990 - RNA, 25 nt, Human
ugaaagaagccaggcacaaagaaga

SEQ ID NO: 865991 - RNA, 19 nt, Human
ugaauaaacuacagcuaca

SEQ ID NO: 865992 - RNA, 23 nt, Human
ugaauaaacuacagcuacauuca

SEQ ID NO: 865993 - RNA, 19 nt, Human
ugaaugccauaaaauucug

SEQ ID NO: 865994 - RNA, 20 nt, Human
ugaaugccauaaaauucugg

SEQ ID NO: 865995 - RNA, 23 nt, Human
ugaccugguuggugguuacaugg

SEQ ID NO: 865996 - RNA, 21 nt, Human
ugagccaggagaagugaaacc

SEQ ID NO: 865997 - RNA, 18 nt, Human
ugaucuugugccauuccu

SEQ ID NO: 865998 - RNA, 18 nt, Human
ugccauaaaauucugggc

SEQ ID NO: 865999 - RNA, 18 nt, Human
ugccauuccuucuugcau

SEQ ID NO: 866000 - RNA, 23 nt, Human
uggaacaauuauucaauuaaaac

SEQ ID NO: 866001 - RNA, 24 nt, Human
uggaagcagcaauaaacaacaaaa

SEQ ID NO: 866002 - RNA, 18 nt, Human
uggagagugaggagacug

SEQ ID NO: 866003 - RNA, 21 nt, Human
uggcaacauuccagauuugac

SEQ ID NO: 866004 - RNA, 22 nt, Human
ugggaggaucaucuuuguaaua

SEQ ID NO: 866005 - RNA, 20 nt, Human
ugggcagugguuaccuuugu

SEQ ID NO: 866006 - RNA, 18 nt, Human
ugucuaagcuaaaaauaa

SEQ ID NO: 866007 - RNA, 19 nt, Human
uguggauaaauacauuaug

SEQ ID NO: 866008 - RNA, 23 nt, Human
uuaaaagcaaauagaaaaugaua

SEQ ID NO: 866009 - RNA, 21 nt, Human
uuacugagggaggugucaagg

SEQ ID NO: 866010 - RNA, 19 nt, Human
uucugggcagugguuaccu

SEQ ID NO: 866011 - RNA, 24 nt, Human
uucugggcagugguuaccuuugug

SEQ ID NO: 866012 - RNA, 18 nt, Human
uugggaggaucaucuuug

SEQ ID NO: 866013 - RNA, 19 nt, Human
uuuguaauacugaaaucac

SEQ ID NO: 866014 - RNA, 18 nt, Human
uuugucauguuucacaau

SEQ ID NO: 866015 - RNA, 20 nt, Human
uuuuuuuuuuuuuuuuguuu

SEQ ID NO: 866016 - RNA, 25 nt, Human
aagacagcuccaccagccacaaaua

SEQ ID NO: 866017 - RNA, 24 nt, Human
ccccgagagagagacggagagaag

SEQ ID NO: 866018 - RNA, 23 nt, Human
gagagagacggagagaagguaac

SEQ ID NO: 866019 - RNA, 23 nt, Human
gguaacugcccaucucccuacag

SEQ ID NO: 866020 - RNA, 24 nt, Human
guucucuucguuuaagacagcucc

SEQ ID NO: 866021 - RNA, 18 nt, Human
uccaccagccacaaauag

SEQ ID NO: 866022 - RNA, 19 nt, Human
uccccgagagagagacgga

SEQ ID NO: 866023 - RNA, 20 nt, Human
ucccugggcgguuguagccc

SEQ ID NO: 866024 - RNA, 23 nt, Human
ugggcgguuguagcccuggcucc

SEQ ID NO: 866025 - RNA, 23 nt, Human
uuuuuuuuuuuucuuuuggaguu

SEQ ID NO: 866026 - RNA, 28 nt, Human
uuuuuuuuuuuuuuuucuuuuggaguug

SEQ ID NO: 866027 - RNA, 25 nt, Human
uuuuuuuuuuuuuuuucuuuugggg

SEQ ID NO: 866028 - RNA, 26 nt, Human
aaaaaaaaaaaacauaaaugacuagg

SEQ ID NO: 866029 - RNA, 21 nt, Human
aaauaccuuuuuaaaaccaaa

SEQ ID NO: 866030 - RNA, 27 nt, Human
aagcauaacuauaaaaugcuuaaauac

SEQ ID NO: 866031 - RNA, 19 nt, Human
acaaagaauaucaaaaaca

SEQ ID NO: 866032 - RNA, 21 nt, Human
aggggaccagucggucagagc

SEQ ID NO: 866033 - RNA, 19 nt, Human
aguagaagaaaauccuaga

SEQ ID NO: 866034 - RNA, 23 nt, Human
auaucaaaaacacaaagcauaac

SEQ ID NO: 866035 - RNA, 21 nt, Human
caaaaacacaaagcauaacua

SEQ ID NO: 866036 - RNA, 22 nt, Human
caacauuaaaaacccauaacac

SEQ ID NO: 866037 - RNA, 20 nt, Human
caagagaaaccacugaauag

SEQ ID NO: 866038 - RNA, 20 nt, Human
ccaguacagauagugauccu

SEQ ID NO: 866039 - RNA, 20 nt, Human
ccgauucuaaaauaaaacaa

SEQ ID NO: 866040 - RNA, 18 nt, Human
cuucaaauguugguccua

SEQ ID NO: 866041 - RNA, 20 nt, Human
gccaccguuuaggggaccag

SEQ ID NO: 866042 - RNA, 25 nt, Human
uaaaucccggggcccaacgaccaaa

SEQ ID NO: 866043 - RNA, 24 nt, Human
uaacaauacaaagaauaucaaaaa

SEQ ID NO: 866044 - RNA, 19 nt, Human
uaugcaaaaaaaaaaaaaa

SEQ ID NO: 866045 - RNA, 30 nt, Human
uaugcaaacccgauucuaaaauaaaacaaa

SEQ ID NO: 866046 - RNA, 18 nt, Human
ucccggggcccaacgacc

SEQ ID NO: 866047 - RNA, 25 nt, Human
ugcaaguuuucauacuacaaauuua

SEQ ID NO: 866048 - RNA, 21 nt, Human
ugguccuaaaucccggggccc

SEQ ID NO: 866049 - RNA, 20 nt, Human
uuaugcaaaaaaaaaaaaaa

SEQ ID NO: 866050 - RNA, 25 nt, Human
uuuaguaaaauuaugcaaaaaaaaa

SEQ ID NO: 866051 - RNA, 21 nt, Human
uuuuuuuuuuuuagaagcauc

SEQ ID NO: 866052 - RNA, 20 nt, Human
cagcggggcagcuccaaccc

SEQ ID NO: 866053 - RNA, 18 nt, Human
ccugccgcccaccagggc

SEQ ID NO: 866054 - RNA, 23 nt, Human
gacuguguguggucagccgguug

SEQ ID NO: 866055 - RNA, 19 nt, Human
ggacuggggggaagcaccg

SEQ ID NO: 866056 - RNA, 18 nt, Human
aagacauuacauauuuag

SEQ ID NO: 866057 - RNA, 19 nt, Human
acacaagugcaaagaccaa

SEQ ID NO: 866058 - RNA, 23 nt, Human
accaaucauaaccucaguucuua

SEQ ID NO: 866059 - RNA, 18 nt, Human
acgccaggaccgacagga

SEQ ID NO: 866060 - RNA, 20 nt, Human
agcaaauaaugaaugaacaa

SEQ ID NO: 866061 - RNA, 18 nt, Human
agugcaaagaccaagaaa

SEQ ID NO: 866062 - RNA, 23 nt, Human
auacaccacuacaaucgugcaaa

SEQ ID NO: 866063 - RNA, 20 nt, Human
auucaggaggccaacuuaau

SEQ ID NO: 866064 - RNA, 20 nt, Human
caauauuaagagauuaucga

SEQ ID NO: 866065 - RNA, 22 nt, Human
caccacuacaaucgugcaaaaa

SEQ ID NO: 866066 - RNA, 18 nt, Human
cacuaguaguuuucuagc

SEQ ID NO: 866067 - RNA, 23 nt, Human
cacuuucaacaccaagucaaagg

SEQ ID NO: 866068 - RNA, 20 nt, Human
cagcaaauaaugaaugaaca

SEQ ID NO: 866069 - RNA, 22 nt, Human
ccucuucauuuucagaggcaug

SEQ ID NO: 866070 - RNA, 23 nt, Human
cuggacuguccucuucauuuuca

SEQ ID NO: 866071 - RNA, 20 nt, Human
ggcaaaauaagcuaauucca

SEQ ID NO: 866072 - RNA, 21 nt, Human
uaagagauuaucgaggccaaa

SEQ ID NO: 866073 - RNA, 23 nt, Human
uacuauucagaaggaaagacagg

SEQ ID NO: 866074 - RNA, 20 nt, Human
uaucagacacaagugcaaag

SEQ ID NO: 866075 - RNA, 23 nt, Human
ucaggaggccaacuuaaugccuu

SEQ ID NO: 866076 - RNA, 24 nt, Human
ucaggaggccaacuuaaugccuug

SEQ ID NO: 866077 - RNA, 20 nt, Human
uccugcaguccaugguuaca

SEQ ID NO: 866078 - RNA, 23 nt, Human
uuaauauuuagaacagugccuaa

SEQ ID NO: 866079 - RNA, 19 nt, Human
uuaaugcaaaaugcgaauc

SEQ ID NO: 866080 - RNA, 22 nt, Human
uucagaaggaaagacaggaaga

SEQ ID NO: 866081 - RNA, 18 nt, Human
aagcccccaacauacccc

SEQ ID NO: 866082 - RNA, 19 nt, Human
aaggcaggcgcggggagcc

SEQ ID NO: 866083 - RNA, 18 nt, Human
acaccccccaaccuuccc

SEQ ID NO: 866084 - RNA, 26 nt, Human
agacaccccccaaccuuccccccacc

SEQ ID NO: 866085 - RNA, 21 nt, Human
agcaaauggccggggcucccu

SEQ ID NO: 866086 - RNA, 21 nt, Human
agcaggagcaggugagggcaa

SEQ ID NO: 866087 - RNA, 21 nt, Human
aggaaggggcugaggggggcg

SEQ ID NO: 866088 - RNA, 23 nt, Human
aggcacggagguagcgauagacc

SEQ ID NO: 866089 - RNA, 24 nt, Human
aggcaggcgcggggagccuggcuu

SEQ ID NO: 866090 - RNA, 23 nt, Human
aggcuggggcagggguggggagg

SEQ ID NO: 866091 - RNA, 21 nt, Human
agggcagucucuggggagugc

SEQ ID NO: 866092 - RNA, 21 nt, Human
agggcucagaucccugggggu

SEQ ID NO: 866093 - RNA, 18 nt, Human
aggggagggagcucccca

SEQ ID NO: 866094 - RNA, 21 nt, Human
augccuccagacaccccccaa

SEQ ID NO: 866095 - RNA, 22 nt, Human
caagggcuccuucuggaggucc

SEQ ID NO: 866096 - RNA, 23 nt, Human
cacacccggccucccugagaccc

SEQ ID NO: 866097 - RNA, 25 nt, Human
caccaugagaaagaugaggucaacu

SEQ ID NO: 866098 - RNA, 18 nt, Human
caccccaauagcaccagg

SEQ ID NO: 866099 - RNA, 19 nt, Human
caccccccaaccuuccccc

SEQ ID NO: 866100 - RNA, 23 nt, Human
caccccccaaccuuccccccacc

SEQ ID NO: 866101 - RNA, 18 nt, Human
cacccccuacaucaguuc

SEQ ID NO: 866102 - RNA, 26 nt, Human
cacccccuacaucaguuccaccucgu

SEQ ID NO: 866103 - RNA, 21 nt, Human
cacccggccucccugagaccc

SEQ ID NO: 866104 - RNA, 18 nt, Human
cagacaccccccaaccuu

SEQ ID NO: 866105 - RNA, 25 nt, Human
cagcucccucccagagguccaaggg

SEQ ID NO: 866106 - RNA, 21 nt, Human
caggaaggcacggagguagcg

SEQ ID NO: 866107 - RNA, 18 nt, Human
cagggcucagaucccugg

SEQ ID NO: 866108 - RNA, 24 nt, Human
caguuccaccuccuccugaggccu

SEQ ID NO: 866109 - RNA, 24 nt, Human
caugccuccagacaccccccaacc

SEQ ID NO: 866110 - RNA, 21 nt, Human
ccaauagcaccaggauagcac

SEQ ID NO: 866111 - RNA, 23 nt, Human
cccagagguccaagggcuccuuc

SEQ ID NO: 866112 - RNA, 18 nt, Human
ccccaacauaccccuuuc

SEQ ID NO: 866113 - RNA, 24 nt, Human
ccccaauagcaccaggauagcacc

SEQ ID NO: 866114 - RNA, 24 nt, Human
ccccaccgcagacagcugcagagc

SEQ ID NO: 866115 - RNA, 23 nt, Human
cccccaaccuuccccccaccgca

SEQ ID NO: 866116 - RNA, 22 nt, Human
cccccaccgcagacagcugcag

SEQ ID NO: 866117 - RNA, 19 nt, Human
ccccccaaccuucccccca

SEQ ID NO: 866118 - RNA, 18 nt, Human
ccccccaccgcagacagc

SEQ ID NO: 866119 - RNA, 22 nt, Human
cccuggggguguccaaaccaac

SEQ ID NO: 866120 - RNA, 24 nt, Human
cccuuucuggugugggggagggga

SEQ ID NO: 866121 - RNA, 21 nt, Human
ccuccagacaccccccaaccu

SEQ ID NO: 866122 - RNA, 20 nt, Human
ccucccugagacccacgggg

SEQ ID NO: 866123 - RNA, 21 nt, Human
ccucuggcagagagcaggagc

SEQ ID NO: 866124 - RNA, 25 nt, Human
cgagguagggguccaggacgaggcu

SEQ ID NO: 866125 - RNA, 22 nt, Human
cggauggcuccugcaguccuga

SEQ ID NO: 866126 - RNA, 19 nt, Human
cucccugcugggccucccc

SEQ ID NO: 866127 - RNA, 19 nt, Human
cucccugugggaguggggg

SEQ ID NO: 866128 - RNA, 22 nt, Human
cugccccuuauggcuuugcucc

SEQ ID NO: 866129 - RNA, 20 nt, Human
cuggggcagggguggggagg

SEQ ID NO: 866130 - RNA, 21 nt, Human
gacccucucucccugcugggc

SEQ ID NO: 866131 - RNA, 21 nt, Human
gagcaggagcaggugagggca

SEQ ID NO: 866132 - RNA, 19 nt, Human
gaggggggcggauggcucc

SEQ ID NO: 866133 - RNA, 25 nt, Human
gagguccuggguagcagcuaggaga

SEQ ID NO: 866134 - RNA, 22 nt, Human
gcagagagcaggagcaggugag

SEQ ID NO: 866135 - RNA, 18 nt, Human
gcaggaaggcacggaggu

SEQ ID NO: 866136 - RNA, 21 nt, Human
gcaggagcaggugagggcaag

SEQ ID NO: 866137 - RNA, 18 nt, Human
gcaggaugguaaagccac

SEQ ID NO: 866138 - RNA, 18 nt, Human
gccacccccuacaucagu

SEQ ID NO: 866139 - RNA, 22 nt, Human
gcccugcggaccaugcugccuc

SEQ ID NO: 866140 - RNA, 23 nt, Human
gccuccagacaccccccaaccuu

SEQ ID NO: 866141 - RNA, 18 nt, Human
gccuccccguccggccug

SEQ ID NO: 866142 - RNA, 18 nt, Human
ggaaggggcugagggggg

SEQ ID NO: 866143 - RNA, 21 nt, Human
ggacgaggcugguggccaggu

SEQ ID NO: 866144 - RNA, 20 nt, Human
ggcgcggggagccuggcuug

SEQ ID NO: 866145 - RNA, 20 nt, Human
ggcucccugugggagugggg

SEQ ID NO: 866146 - RNA, 23 nt, Human
gggcagcaaauggccggggcucc

SEQ ID NO: 866147 - RNA, 18 nt, Human
gggcagggguggggaggg

SEQ ID NO: 866148 - RNA, 20 nt, Human
gggcugaggggggcggaugg

SEQ ID NO: 866149 - RNA, 21 nt, Human
ggggagccuggcuuggugcug

SEQ ID NO: 866150 - RNA, 23 nt, Human
gggggguggugaggggaacaugc

SEQ ID NO: 866151 - RNA, 18 nt, Human
ggguggcucaggggucag

SEQ ID NO: 866152 - RNA, 18 nt, Human
gguggcucaggggucagc

SEQ ID NO: 866153 - RNA, 19 nt, Human
ggugugggggaggggaggg

SEQ ID NO: 866154 - RNA, 21 nt, Human
guccaaaccaaccccauucca

SEQ ID NO: 866155 - RNA, 24 nt, Human
guccugaggcuggggcaggggugg

SEQ ID NO: 866156 - RNA, 26 nt, Human
guccugaggcuggggcaggggugggg

SEQ ID NO: 866157 - RNA, 22 nt, Human
gugagggcaaggcaggcgcggg

SEQ ID NO: 866158 - RNA, 18 nt, Human
gugagggcagucucuggg

SEQ ID NO: 866159 - RNA, 21 nt, Human
uaccccuuucugguguggggg

SEQ ID NO: 866160 - RNA, 21 nt, Human
ucaucuuaugggugcggaaac

SEQ ID NO: 866161 - RNA, 22 nt, Human
uccaggacgaggcugguggcca

SEQ ID NO: 866162 - RNA, 18 nt, Human
ucccagagguccaagggc

SEQ ID NO: 866163 - RNA, 20 nt, Human
ucccugagacccacgggggg

SEQ ID NO: 866164 - RNA, 23 nt, Human
ucccugagacccacggggggugg

SEQ ID NO: 866165 - RNA, 18 nt, Human
ucccugcugggccucccc

SEQ ID NO: 866166 - RNA, 21 nt, Human
ucccuggggaggaaggggcug

SEQ ID NO: 866167 - RNA, 18 nt, Human
ucccugugggaguggggg

SEQ ID NO: 866168 - RNA, 22 nt, Human
ucccugugggaguggggguggc

SEQ ID NO: 866169 - RNA, 21 nt, Human
uccugaggcuggggcaggggu

SEQ ID NO: 866170 - RNA, 23 nt, Human
uccugaggcuggggcaggggugg

SEQ ID NO: 866171 - RNA, 20 nt, Human
ucucgugcugucacucuguc

SEQ ID NO: 866172 - RNA, 18 nt, Human
ugagagcgaacccagucc

SEQ ID NO: 866173 - RNA, 18 nt, Human
ugagggcaaggcaggcgc

SEQ ID NO: 866174 - RNA, 19 nt, Human
ugagggcaaggcaggcgcg

SEQ ID NO: 866175 - RNA, 19 nt, Human
ugagggcaaggcaggcgcg

SEQ ID NO: 866176 - RNA, 20 nt, Human
ugagggcagucucuggggag

SEQ ID NO: 866177 - RNA, 18 nt, Human
ugcagagcugagagcgaa

SEQ ID NO: 866178 - RNA, 22 nt, Human
ugcaguccugaggcuggggcag

SEQ ID NO: 866179 - RNA, 18 nt, Human
ugccgugggguggccccu

SEQ ID NO: 866180 - RNA, 24 nt, Human
ugccuccagacaccccccaaccuu

SEQ ID NO: 866181 - RNA, 21 nt, Human
ugcugggccuccccguccggc

SEQ ID NO: 866182 - RNA, 27 nt, Human
ugcuuccaagcccccaacauaccccuu

SEQ ID NO: 866183 - RNA, 20 nt, Human
uggcagagagcaggagcagg

SEQ ID NO: 866184 - RNA, 22 nt, Human
uggcagagagcaggagcaggug

SEQ ID NO: 866185 - RNA, 23 nt, Human
uggcagagagcaggagcagguga

SEQ ID NO: 866186 - RNA, 19 nt, Human
uggccaggucgucguucuc

SEQ ID NO: 866187 - RNA, 18 nt, Human
uggcucaggggucagcag

SEQ ID NO: 866188 - RNA, 21 nt, Human
uggcuuugcucccuggggagg

SEQ ID NO: 866189 - RNA, 21 nt, Human
ugggaguggggguggcucagg

SEQ ID NO: 866190 - RNA, 22 nt, Human
uggggaggaaggggcugagggg

SEQ ID NO: 866191 - RNA, 25 nt, Human
uggggaggaaggggcugaggggggc

SEQ ID NO: 866192 - RNA, 19 nt, Human
ugggggacgcuggugagcc

SEQ ID NO: 866193 - RNA, 21 nt, Human
ugggggaggggagggagcucc

SEQ ID NO: 866194 - RNA, 21 nt, Human
ugggguggccccugccccuua

SEQ ID NO: 866195 - RNA, 18 nt, Human
ugggugcggaaaccgagg

SEQ ID NO: 866196 - RNA, 19 nt, Human
uggugcugacuccacuccc

SEQ ID NO: 866197 - RNA, 19 nt, Human
uuuuuuuuuuuuuuuugcu

SEQ ID NO: 866198 - RNA, 20 nt, Human
uuuuuuuuuuuuuuuugcug

SEQ ID NO: 866199 - RNA, 20 nt, Human
uuuuuuuuuuuuuuuuugcu

SEQ ID NO: 866200 - RNA, 27 nt, Human
uuuuuuuuuuuuuuuuuuuuuuugggg

SEQ ID NO: 866201 - RNA, 22 nt, Human
aaaaggaaaaaaaaguacuaug

SEQ ID NO: 866202 - RNA, 23 nt, Human
aaacaaaaacuucaauauucagu

SEQ ID NO: 866203 - RNA, 18 nt, Human
agauaacgcggacagcgc

SEQ ID NO: 866204 - RNA, 19 nt, Human
aggagauaacgcggacagc

SEQ ID NO: 866205 - RNA, 23 nt, Human
auaaacauaacucaaaacaaaaa

SEQ ID NO: 866206 - RNA, 27 nt, Human
cagagacagcagcaagcggaggagcag

SEQ ID NO: 866207 - RNA, 18 nt, Human
cagcagcaagcggaggag

SEQ ID NO: 866208 - RNA, 20 nt, Human
cagcagcaagcggaggagca

SEQ ID NO: 866209 - RNA, 18 nt, Human
caucacauuagcuuguau

SEQ ID NO: 866210 - RNA, 21 nt, Human
cccagcccggccgccgcccgc

SEQ ID NO: 866211 - RNA, 24 nt, Human
ccccucagcgcuggcacccaguuc

SEQ ID NO: 866212 - RNA, 18 nt, Human
ccgccgcccgcucccagg

SEQ ID NO: 866213 - RNA, 21 nt, Human
ccggccgccgcccgcucccag

SEQ ID NO: 866214 - RNA, 19 nt, Human
cgccagcccgcaccggcgc

SEQ ID NO: 866215 - RNA, 22 nt, Human
cgggaggagauaacgcggacag

SEQ ID NO: 866216 - RNA, 20 nt, Human
cgucuuucucugaccgggac

SEQ ID NO: 866217 - RNA, 21 nt, Human
cuggaagccccucagcgcugg

SEQ ID NO: 866218 - RNA, 23 nt, Human
cuuucauaugaaugaaaaugcac

SEQ ID NO: 866219 - RNA, 21 nt, Human
gagacagcagcaagcggagga

SEQ ID NO: 866220 - RNA, 18 nt, Human
gcgcggcccagcccggcc

SEQ ID NO: 866221 - RNA, 21 nt, Human
ggaggagauaacgcggacagc

SEQ ID NO: 866222 - RNA, 23 nt, Human
gggaauugaaagguuugcauuuu

SEQ ID NO: 866223 - RNA, 24 nt, Human
guccgcuggaagccccucagcgcu

SEQ ID NO: 866224 - RNA, 22 nt, Human
uaaacauaacucaaaacaaaaa

SEQ ID NO: 866225 - RNA, 24 nt, Human
uaacaagaaaaaccuccuuuaaaa

SEQ ID NO: 866226 - RNA, 20 nt, Human
uaacucaaaacaaaaacuuc

SEQ ID NO: 866227 - RNA, 21 nt, Human
uaacucaaaacaaaaacuuca

SEQ ID NO: 866228 - RNA, 23 nt, Human
uauccucgucgucuuucucugac

SEQ ID NO: 866229 - RNA, 23 nt, Human
ucacauguaacaagaaaaaccuc

SEQ ID NO: 866230 - RNA, 18 nt, Human
uccgcuggaagccccuca

SEQ ID NO: 866231 - RNA, 21 nt, Human
uccgcuggaagccccucagcg

SEQ ID NO: 866232 - RNA, 22 nt, Human
uccuuuaaaaaaaggaaaaaaa

SEQ ID NO: 866233 - RNA, 22 nt, Human
ucgccgguggacacugcgguuc

SEQ ID NO: 866234 - RNA, 19 nt, Human
ucuaagaagagguguggcu

SEQ ID NO: 866235 - RNA, 19 nt, Human
uggcucaaugcccaucaca

SEQ ID NO: 866236 - RNA, 19 nt, Human
uguaacaagaaaaaccucc

SEQ ID NO: 866237 - RNA, 24 nt, Human
uuuuuuuuuuuuuuuuucacaaau

SEQ ID NO: 866238 - RNA, 22 nt, Human
aaaccucugccacaaucacuca

SEQ ID NO: 866239 - RNA, 22 nt, Human
aacaaagaaauucuaggaaugc

SEQ ID NO: 866240 - RNA, 19 nt, Human
augaacacagacaaacauc

SEQ ID NO: 866241 - RNA, 19 nt, Human
caaaaugaaagucaagguc

SEQ ID NO: 866242 - RNA, 19 nt, Human
caacagacucaugguaaug

SEQ ID NO: 866243 - RNA, 20 nt, Human
cagcuggccugauaaugaua

SEQ ID NO: 866244 - RNA, 22 nt, Human
caggucaaggcaagaggcugca

SEQ ID NO: 866245 - RNA, 18 nt, Human
cauggcacaaaccucugc

SEQ ID NO: 866246 - RNA, 18 nt, Human
ccucugccacaaucacuc

SEQ ID NO: 866247 - RNA, 22 nt, Human
ccugaacuacaacaauauagag

SEQ ID NO: 866248 - RNA, 22 nt, Human
gaacacagacaaacaucaaagu

SEQ ID NO: 866249 - RNA, 19 nt, Human
gaggcugcagcuggccuga

SEQ ID NO: 866250 - RNA, 19 nt, Human
gcaagugaauuugcugaug

SEQ ID NO: 866251 - RNA, 26 nt, Human
gccacaaucacucauaauaauucaac

SEQ ID NO: 866252 - RNA, 21 nt, Human
uacaaaaugaaagucaagguc

SEQ ID NO: 866253 - RNA, 23 nt, Human
uacaacaauauagagucccauuu

SEQ ID NO: 866254 - RNA, 23 nt, Human
ucucuuagucaaugaagaccuga

SEQ ID NO: 866255 - RNA, 18 nt, Human
ugaaagucaaggucacuu

SEQ ID NO: 866256 - RNA, 20 nt, Human
ugaacacagacaaacaucaa

SEQ ID NO: 866257 - RNA, 26 nt, Human
ugaacacagacaaacaucaaaguuuu

SEQ ID NO: 866258 - RNA, 22 nt, Human
ugacaacagacucaugguaaug

SEQ ID NO: 866259 - RNA, 19 nt, Human
uuuuuuuuuuuuuuuugca

SEQ ID NO: 866260 - RNA, 22 nt, Human
uuuuuuuuuuuuuuuuugcauu

SEQ ID NO: 866261 - RNA, 27 nt, Human
uuuuuuuuuuuuuuuuuuuuuuugggg

SEQ ID NO: 866262 - RNA, 20 nt, Human
aaaggcuucguccagcgaga

SEQ ID NO: 866263 - RNA, 22 nt, Human
acccccaauaaaacugagaagu

SEQ ID NO: 866264 - RNA, 25 nt, Human
acuccgugacaccaagacgguucug

SEQ ID NO: 866265 - RNA, 18 nt, Human
acucuucccuccaccauc

SEQ ID NO: 866266 - RNA, 21 nt, Human
agacacccccaauaaaacuga

SEQ ID NO: 866267 - RNA, 20 nt, Human
caccaagacgguucugccgg

SEQ ID NO: 866268 - RNA, 22 nt, Human
cacuacgcagccugggcucagc

SEQ ID NO: 866269 - RNA, 20 nt, Human
cagaaggcacacacgggcca

SEQ ID NO: 866270 - RNA, 24 nt, Human
ccaccccuuccaucucgaaaggcc

SEQ ID NO: 866271 - RNA, 20 nt, Human
ccccgagguucucuucuggg

SEQ ID NO: 866272 - RNA, 28 nt, Human
cccgaccccuuccccgagguucucuucc

SEQ ID NO: 866273 - RNA, 20 nt, Human
cgcagagaacagaggcuccc

SEQ ID NO: 866274 - RNA, 23 nt, Human
cgggugggaagcaccuggacucc

SEQ ID NO: 866275 - RNA, 19 nt, Human
cuuguggucacuacgcagc

SEQ ID NO: 866276 - RNA, 21 nt, Human
gaccccuuccccgagguucuc

SEQ ID NO: 866277 - RNA, 18 nt, Human
gcaggcucucggcagagg

SEQ ID NO: 866278 - RNA, 18 nt, Human
gccaccccuuccaucucg

SEQ ID NO: 866279 - RNA, 23 nt, Human
gccggcggggaggggcugcccga

SEQ ID NO: 866280 - RNA, 26 nt, Human
gcugcccgaccccuuccccgagguuc

SEQ ID NO: 866281 - RNA, 18 nt, Human
gcuggacucuucccucca

SEQ ID NO: 866282 - RNA, 24 nt, Human
gggaggggcugcccgaccccuucc

SEQ ID NO: 866283 - RNA, 19 nt, Human
gucacacuccucgccacac

SEQ ID NO: 866284 - RNA, 23 nt, Human
ucacuacgcagccugggcucagc

SEQ ID NO: 866285 - RNA, 23 nt, Human
uccaucucgaaaggcuucgucca

SEQ ID NO: 866286 - RNA, 19 nt, Human
uccugccgucacacuccuc

SEQ ID NO: 866287 - RNA, 23 nt, Human
ucggcagaggcuggacucuuccc

SEQ ID NO: 866288 - RNA, 20 nt, Human
ugagaaguuccuuuccgagg

SEQ ID NO: 866289 - RNA, 20 nt, Human
ugcacccguggcuccugccg

SEQ ID NO: 866290 - RNA, 22 nt, Human
ugcgaccgggugggaagcaccu

SEQ ID NO: 866291 - RNA, 20 nt, Human
uuccaucucgaaaggcuucg

SEQ ID NO: 866292 - RNA, 19 nt, Human
uuccugacagccucccuga

SEQ ID NO: 866293 - RNA, 24 nt, Human
uucucuucugggaguccggccacc

SEQ ID NO: 866294 - RNA, 18 nt, Human
uucugggaguccggccac

SEQ ID NO: 866295 - RNA, 19 nt, Human
uugcacccguggcuccugc

SEQ ID NO: 866296 - RNA, 21 nt, Human
aaagcucccuaccagccgccu

SEQ ID NO: 866297 - RNA, 24 nt, Human
aaccccagccaaagccgcuggcau

SEQ ID NO: 866298 - RNA, 22 nt, Human
aagacccacccccagaacccuc

SEQ ID NO: 866299 - RNA, 22 nt, Human
aagacucaauucucaaugaacc

SEQ ID NO: 866300 - RNA, 23 nt, Human
acccacccccagaacccucgcua

SEQ ID NO: 866301 - RNA, 26 nt, Human
acccccagaacccucgcuagcacgaa

SEQ ID NO: 866302 - RNA, 21 nt, Human
accgaaucucugaaaugaaag

SEQ ID NO: 866303 - RNA, 19 nt, Human
agcggcguagccuccagga

SEQ ID NO: 866304 - RNA, 19 nt, Human
aggaccacccccagcucca

SEQ ID NO: 866305 - RNA, 22 nt, Human
aggcaaauguaggguggggggu

SEQ ID NO: 866306 - RNA, 23 nt, Human
aggcaugcaucuucuuaaaaacc

SEQ ID NO: 866307 - RNA, 24 nt, Human
aggcggcgacgccccaggacugag

SEQ ID NO: 866308 - RNA, 22 nt, Human
aggcuucagaccaaccccagcc

SEQ ID NO: 866309 - RNA, 19 nt, Human
agggaugguuucgcaucgu

SEQ ID NO: 866310 - RNA, 19 nt, Human
auaggauguggcugagacc

SEQ ID NO: 866311 - RNA, 22 nt, Human
caagaucaccaagacccacccc

SEQ ID NO: 866312 - RNA, 23 nt, Human
caagaucaccaagacccaccccc

SEQ ID NO: 866313 - RNA, 22 nt, Human
caaggcccuggcgugagcuccu

SEQ ID NO: 866314 - RNA, 22 nt, Human
cacccccagcuccacccaaggc

SEQ ID NO: 866315 - RNA, 24 nt, Human
cacccccuucagcuaagggcaccc

SEQ ID NO: 866316 - RNA, 23 nt, Human
cacccgcaguccuaggaccaccc

SEQ ID NO: 866317 - RNA, 21 nt, Human
cagcaggcgugggccuccccc

SEQ ID NO: 866318 - RNA, 21 nt, Human
cagcaggcgugggccucccuc

SEQ ID NO: 866319 - RNA, 18 nt, Human
cagccccacgccaccccg

SEQ ID NO: 866320 - RNA, 19 nt, Human
cagcggcguagccuccagg

SEQ ID NO: 866321 - RNA, 21 nt, Human
cagcggcguagccuccaggag

SEQ ID NO: 866322 - RNA, 22 nt, Human
caggacugaggagucccucaga

SEQ ID NO: 866323 - RNA, 20 nt, Human
caggaggaaaugcuuuggua

SEQ ID NO: 866324 - RNA, 22 nt, Human
caguccacgcuucuccccaccc

SEQ ID NO: 866325 - RNA, 19 nt, Human
caguccuaggaccaccccc

SEQ ID NO: 866326 - RNA, 23 nt, Human
caugaucggauucugggucagcc

SEQ ID NO: 866327 - RNA, 22 nt, Human
ccaguccacgcuucuccccacc

SEQ ID NO: 866328 - RNA, 21 nt, Human
cccacccccagaacccucgcu

SEQ ID NO: 866329 - RNA, 18 nt, Human
cccacgccaccccgggga

SEQ ID NO: 866330 - RNA, 25 nt, Human
cccaggccauaaauaacuuuuaaaa

SEQ ID NO: 866331 - RNA, 25 nt, Human
ccccagaacccgcguugguccagca

SEQ ID NO: 866332 - RNA, 21 nt, Human
ccccagcugcagcccagcucc

SEQ ID NO: 866333 - RNA, 20 nt, Human
ccccagggcuggguggcguc

SEQ ID NO: 866334 - RNA, 22 nt, Human
cccccagaacccucgcuagcac

SEQ ID NO: 866335 - RNA, 18 nt, Human
cccccagaacccucgcuu

SEQ ID NO: 866336 - RNA, 24 nt, Human
cccgcaguccuaggaccaccccca

SEQ ID NO: 866337 - RNA, 23 nt, Human
cccggcuccugggcucagcgggg

SEQ ID NO: 866338 - RNA, 20 nt, Human
ccucaaggcccuggcgugag

SEQ ID NO: 866339 - RNA, 23 nt, Human
ccuccaauuacccacaggcugcc

SEQ ID NO: 866340 - RNA, 21 nt, Human
ccuguccucaaggcccuggcc

SEQ ID NO: 866341 - RNA, 19 nt, Human
cgacgccccaggacugagg

SEQ ID NO: 866342 - RNA, 25 nt, Human
cgcgugcaggcuucagaccaacccc

SEQ ID NO: 866343 - RNA, 18 nt, Human
cuguccucaaggcccugg

SEQ ID NO: 866344 - RNA, 21 nt, Human
gaagcccagccagucgggucc

SEQ ID NO: 866345 - RNA, 18 nt, Human
gaccugcggguuuugggg

SEQ ID NO: 866346 - RNA, 21 nt, Human
gagcccagccugcaaggcugu

SEQ ID NO: 866347 - RNA, 21 nt, Human
gcaugcaucuucuuaaaaacc

SEQ ID NO: 866348 - RNA, 27 nt, Human
gccaaaauacauaggauguggcugguc

SEQ ID NO: 866349 - RNA, 24 nt, Human
gcgcgugcccauggcucaguuuug

SEQ ID NO: 866350 - RNA, 21 nt, Human
gcgcuaggcuucgagucacac

SEQ ID NO: 866351 - RNA, 20 nt, Human
gcuucuccccacccccuuca

SEQ ID NO: 866352 - RNA, 19 nt, Human
gcuuugcuccuccagagcc

SEQ ID NO: 866353 - RNA, 22 nt, Human
ggaaaaaaaaaagaacacauua

SEQ ID NO: 866354 - RNA, 26 nt, Human
ggaaagaggacacagucugucgccag

SEQ ID NO: 866355 - RNA, 22 nt, Human
ggacaaaugcaaauuguuuccc

SEQ ID NO: 866356 - RNA, 21 nt, Human
ggcaggcaaagcucccuacca

SEQ ID NO: 866357 - RNA, 19 nt, Human
ggcguagccuccaggagga

SEQ ID NO: 866358 - RNA, 25 nt, Human
ggcgugcuguuuucaggacaggacu

SEQ ID NO: 866359 - RNA, 18 nt, Human
ggcucaguuuuggugucu

SEQ ID NO: 866360 - RNA, 21 nt, Human
gggaaagaggacacagucugu

SEQ ID NO: 866361 - RNA, 21 nt, Human
gggagcacagcggcguagccu

SEQ ID NO: 866362 - RNA, 20 nt, Human
ggguccgggugauuccugcu

SEQ ID NO: 866363 - RNA, 24 nt, Human
ggguucugugggccuggggcgugc

SEQ ID NO: 866364 - RNA, 18 nt, Human
gguccagcaggcgugggc

SEQ ID NO: 866365 - RNA, 19 nt, Human
guccacgcuucuccccacc

SEQ ID NO: 866366 - RNA, 18 nt, Human
gugcaugaucggauucug

SEQ ID NO: 866367 - RNA, 21 nt, Human
uaaaaaaauaaauauccauua

SEQ ID NO: 866368 - RNA, 24 nt, Human
uaaaaaaauaaauauccauuaaaa

SEQ ID NO: 866369 - RNA, 26 nt, Human
uaacuuuuaaaaauuugauuuucuua

SEQ ID NO: 866370 - RNA, 25 nt, Human
uacaaaaaaguuuccagucauaaaa

SEQ ID NO: 866371 - RNA, 23 nt, Human
uagcacgaagcccagccagucgg

SEQ ID NO: 866372 - RNA, 25 nt, Human
uaggacaagaucaccaagacccacc

SEQ ID NO: 866373 - RNA, 21 nt, Human
ucaccaagacccacccccaga

SEQ ID NO: 866374 - RNA, 23 nt, Human
uccccacccccuucagcuaaggg

SEQ ID NO: 866375 - RNA, 18 nt, Human
ucccugagcccagccugc

SEQ ID NO: 866376 - RNA, 24 nt, Human
ugaaaugaaaguccaugccagccc

SEQ ID NO: 866377 - RNA, 19 nt, Human
ugagcuccugaccugugua

SEQ ID NO: 866378 - RNA, 22 nt, Human
ugagcugcacuuucugaaggag

SEQ ID NO: 866379 - RNA, 25 nt, Human
ugaggacaggugcaugaucggauuc

SEQ ID NO: 866380 - RNA, 21 nt, Human
ugcagguugugcugugacgcu

SEQ ID NO: 866381 - RNA, 18 nt, Human
ugcccauggcucaguuuu

SEQ ID NO: 866382 - RNA, 24 nt, Human
ugccccagccccacgccaccccgg

SEQ ID NO: 866383 - RNA, 20 nt, Human
uggaagaggcugcaggcggc

SEQ ID NO: 866384 - RNA, 21 nt, Human
uggaagaggcugcaggcggcg

SEQ ID NO: 866385 - RNA, 19 nt, Human
uguacugaccaauguaaaa

SEQ ID NO: 866386 - RNA, 26 nt, Human
ugugacgcucgcuggacgcagggcuu

SEQ ID NO: 866387 - RNA, 21 nt, Human
aaaugcuuguuuuguaguucu

SEQ ID NO: 866388 - RNA, 23 nt, Human
acugcuccacaaaugaccaagua

SEQ ID NO: 866389 - RNA, 18 nt, Human
aguauuugauagaugaaa

SEQ ID NO: 866390 - RNA, 19 nt, Human
aguauuugauagaugaaaa

SEQ ID NO: 866391 - RNA, 24 nt, Human
auuugauagaugaaaaaauuuauu

SEQ ID NO: 866392 - RNA, 19 nt, Human
cacaaaaggaaaaacuuca

SEQ ID NO: 866393 - RNA, 21 nt, Human
caucaucuuccaaagguuucu

SEQ ID NO: 866394 - RNA, 21 nt, Human
cuacacaaaaggaaaaacuuc

SEQ ID NO: 866395 - RNA, 18 nt, Human
cuuuuuucuccuugacuu

SEQ ID NO: 866396 - RNA, 21 nt, Human
gaguuugauccuuuuuucucc

SEQ ID NO: 866397 - RNA, 18 nt, Human
gccgccgcgccguggucc

SEQ ID NO: 866398 - RNA, 24 nt, Human
uaaacgucuccauauguuuuucug

SEQ ID NO: 866399 - RNA, 27 nt, Human
uagccuaauaauauuucuuaucacauc

SEQ ID NO: 866400 - RNA, 19 nt, Human
uaucauaggacacaggccu

SEQ ID NO: 866401 - RNA, 22 nt, Human
uauuaaauaacaugcucccaag

SEQ ID NO: 866402 - RNA, 19 nt, Human
uccauauguuuuucugaac

SEQ ID NO: 866403 - RNA, 20 nt, Human
ucccuuucuccuuaagggaa

SEQ ID NO: 866404 - RNA, 23 nt, Human
ucuccuugacuucccuuucuccu

SEQ ID NO: 866405 - RNA, 18 nt, Human
ucuguucuaucauaggac

SEQ ID NO: 866406 - RNA, 21 nt, Human
ugaacaaaacuauaaaggaac

SEQ ID NO: 866407 - RNA, 22 nt, Human
ugaagcaguaauaacccaaaau

SEQ ID NO: 866408 - RNA, 18 nt, Human
ugagauaaaugaagcagu

SEQ ID NO: 866409 - RNA, 23 nt, Human
uuauaguucccauuaagcuagca

SEQ ID NO: 866410 - RNA, 26 nt, Human
uucuuuauuauuauaguucccauuaa

SEQ ID NO: 866411 - RNA, 20 nt, Human
uugguucuguucuaucauag

SEQ ID NO: 866412 - RNA, 20 nt, Human
uuugauccuuuuuucuccuu

SEQ ID NO: 866413 - RNA, 18 nt, Human
uuuuuuuuuuuuuuuuug

SEQ ID NO: 866414 - RNA, 24 nt, Human
uuuuuuuuuuuuuuuuugauaaag

SEQ ID NO: 866415 - RNA, 19 nt, Human
aaaauacugcuacaccagc

SEQ ID NO: 866416 - RNA, 25 nt, Human
aaaauacugcuacaccagccaauca

SEQ ID NO: 866417 - RNA, 18 nt, Human
aaagugcugggauuacaa

SEQ ID NO: 866418 - RNA, 24 nt, Human
aaagugcugggauuacaagcguga

SEQ ID NO: 866419 - RNA, 22 nt, Human
aaguagcugggauuacaggcau

SEQ ID NO: 866420 - RNA, 24 nt, Human
aaguagcugggauuacaggcauac

SEQ ID NO: 866421 - RNA, 19 nt, Human
aagugcugggauuacaagc

SEQ ID NO: 866422 - RNA, 19 nt, Human
aagugcugggauuacaagc

SEQ ID NO: 866423 - RNA, 26 nt, Human
aagugcugggauuacaagcgugagcc

SEQ ID NO: 866424 - RNA, 20 nt, Human
acgggguuucuccauguugg

SEQ ID NO: 866425 - RNA, 21 nt, Human
acgggguuucuccauguuggu

SEQ ID NO: 866426 - RNA, 24 nt, Human
acgggguuucuccauguuggucag

SEQ ID NO: 866427 - RNA, 24 nt, Human
agaggaaagagagcaggcagaggg

SEQ ID NO: 866428 - RNA, 26 nt, Human
agauuaggguggauaaggacacugcu

SEQ ID NO: 866429 - RNA, 22 nt, Human
agauucuccugccucagccucc

SEQ ID NO: 866430 - RNA, 22 nt, Human
aggccuaccuaccccauuaggc

SEQ ID NO: 866431 - RNA, 25 nt, Human
agguaguucagcuggacaaugaggg

SEQ ID NO: 866432 - RNA, 24 nt, Human
aggugauccgcccaccucggcuuc

SEQ ID NO: 866433 - RNA, 20 nt, Human
agugcaauggugcaauuucg

SEQ ID NO: 866434 - RNA, 24 nt, Human
agugcaauggugcaauuucggcuc

SEQ ID NO: 866435 - RNA, 24 nt, Human
caaagugcugggauuacaagcgug

SEQ ID NO: 866436 - RNA, 22 nt, Human
caagagauucuccugccucagc

SEQ ID NO: 866437 - RNA, 22 nt, Human
caccucaaccuccgccucccgg

SEQ ID NO: 866438 - RNA, 24 nt, Human
caccucggcuucccaaagugcugg

SEQ ID NO: 866439 - RNA, 18 nt, Human
cacugcucaccacccucc

SEQ ID NO: 866440 - RNA, 24 nt, Human
cauguuggucaggcuggucuugaa

SEQ ID NO: 866441 - RNA, 22 nt, Human
ccaaagugcugggauuacaagc

SEQ ID NO: 866442 - RNA, 24 nt, Human
ccaaagugcugggauuacaagcgu

SEQ ID NO: 866443 - RNA, 19 nt, Human
ccauguuggucaggcuggu

SEQ ID NO: 866444 - RNA, 21 nt, Human
ccauguuggucaggcuggucu

SEQ ID NO: 866445 - RNA, 24 nt, Human
cccgaccucaggugauccgcccac

SEQ ID NO: 866446 - RNA, 23 nt, Human
ccuaaguagcugggauuacaggc

SEQ ID NO: 866447 - RNA, 24 nt, Human
ccuaaguagcugggauuacaggca

SEQ ID NO: 866448 - RNA, 23 nt, Human
ccucaaccuccgccucccgguuu

SEQ ID NO: 866449 - RNA, 24 nt, Human
ccucaaccuccgccucccgguuuc

SEQ ID NO: 866450 - RNA, 24 nt, Human
ccucccgguuucaagagauucucc

SEQ ID NO: 866451 - RNA, 18 nt, Human
cgaccucaggugauccgc

SEQ ID NO: 866452 - RNA, 24 nt, Human
cgggguuucuccauguuggucagg

SEQ ID NO: 866453 - RNA, 23 nt, Human
cuaaguagcugggauuacaggca

SEQ ID NO: 866454 - RNA, 24 nt, Human
cuaaguagcugggauuacaggcau

SEQ ID NO: 866455 - RNA, 23 nt, Human
cucagccuccuaaguagcuggga

SEQ ID NO: 866456 - RNA, 24 nt, Human
cuccauguuggucaggcuggucuu

SEQ ID NO: 866457 - RNA, 19 nt, Human
cucuuauugcccaggcugg

SEQ ID NO: 866458 - RNA, 21 nt, Human
cucuuauugcccaggcuggag

SEQ ID NO: 866459 - RNA, 23 nt, Human
cugccucagccuccuaaguagcu

SEQ ID NO: 866460 - RNA, 22 nt, Human
cuguauuuuuaguagacacggg

SEQ ID NO: 866461 - RNA, 24 nt, Human
cuuauugcccaggcuggagugcaa

SEQ ID NO: 866462 - RNA, 20 nt, Human
gacaaugagggaguaugaga

SEQ ID NO: 866463 - RNA, 24 nt, Human
gacacgggguuucuccauguuggu

SEQ ID NO: 866464 - RNA, 24 nt, Human
gaccucaggugauccgcccaccuc

SEQ ID NO: 866465 - RNA, 22 nt, Human
gaggguccugacucccagggga

SEQ ID NO: 866466 - RNA, 18 nt, Human
gauuacaagcgugagcca

SEQ ID NO: 866467 - RNA, 22 nt, Human
gauuacaagcgugagccacugc

SEQ ID NO: 866468 - RNA, 22 nt, Human
gauuacaagcgugagccacugc

SEQ ID NO: 866469 - RNA, 18 nt, Human
gauuacaggcauacgcca

SEQ ID NO: 866470 - RNA, 24 nt, Human
gauuacaggcauacgccaccaugc

SEQ ID NO: 866471 - RNA, 21 nt, Human
gauucuccugccucagccucc

SEQ ID NO: 866472 - RNA, 19 nt, Human
gcccaggcuggagugcaau

SEQ ID NO: 866473 - RNA, 20 nt, Human
gccucagccuccuaaguagc

SEQ ID NO: 866474 - RNA, 23 nt, Human
gcucuuauugcccaggcuggagu

SEQ ID NO: 866475 - RNA, 21 nt, Human
gcugggauuacaagcgugagc

SEQ ID NO: 866476 - RNA, 23 nt, Human
gcuggucuugaacucccgaccuc

SEQ ID NO: 866477 - RNA, 24 nt, Human
ggauuacaggcauacgccaccaug

SEQ ID NO: 866478 - RNA, 24 nt, Human
ggcuggucuugaacucccgaccuc

SEQ ID NO: 866479 - RNA, 19 nt, Human
ggggaauagaggaugaagg

SEQ ID NO: 866480 - RNA, 23 nt, Human
gggguuucuccauguuggucagg

SEQ ID NO: 866481 - RNA, 20 nt, Human
guagcugggauuacaggcau

SEQ ID NO: 866482 - RNA, 24 nt, Human
gugauccgcccaccucggcuuccc

SEQ ID NO: 866483 - RNA, 23 nt, Human
guucagcuggacaaugagggagu

SEQ ID NO: 866484 - RNA, 22 nt, Human
uaacugccauuucuaaagagga

SEQ ID NO: 866485 - RNA, 19 nt, Human
uaaggacacugcucaccac

SEQ ID NO: 866486 - RNA, 24 nt, Human
uacaagcgugagccacugcgccca

SEQ ID NO: 866487 - RNA, 22 nt, Human
uacaggcauacgccaccaugcc

SEQ ID NO: 866488 - RNA, 24 nt, Human
uaguagacacgggguuucuccaug

SEQ ID NO: 866489 - RNA, 19 nt, Human
uauugcccaggcuggagug

SEQ ID NO: 866490 - RNA, 20 nt, Human
uauugcccaggcuggagugc

SEQ ID NO: 866491 - RNA, 26 nt, Human
ucaccucaaccuccgccucccgguuu

SEQ ID NO: 866492 - RNA, 18 nt, Human
ucccaaagugcugggauu

SEQ ID NO: 866493 - RNA, 24 nt, Human
ucccaaagugcugggauuacaagc

SEQ ID NO: 866494 - RNA, 24 nt, Human
ucccgguuucaagagauucuccug

SEQ ID NO: 866495 - RNA, 24 nt, Human
uccuaaguagcugggauuacaggc

SEQ ID NO: 866496 - RNA, 22 nt, Human
ucgcucuuauugcccaggcugg

SEQ ID NO: 866497 - RNA, 23 nt, Human
ucgcucuuauugcccaggcugga

SEQ ID NO: 866498 - RNA, 23 nt, Human
ucuaaagaggaaagagagcaggc

SEQ ID NO: 866499 - RNA, 24 nt, Human
ucuccugccucagccuccuaagua

SEQ ID NO: 866500 - RNA, 23 nt, Human
ugauccgcccaccucggcuuccc

SEQ ID NO: 866501 - RNA, 23 nt, Human
ugcaauggugcaauuucggcucc

SEQ ID NO: 866502 - RNA, 18 nt, Human
ugcccaggcuggagugca

SEQ ID NO: 866503 - RNA, 21 nt, Human
ugcccaggcuggagugcaaug

SEQ ID NO: 866504 - RNA, 24 nt, Human
ugcccaggcuggagugcaauggug

SEQ ID NO: 866505 - RNA, 24 nt, Human
ugccucagccuccuaaguagcugg

SEQ ID NO: 866506 - RNA, 19 nt, Human
ugccugagccucggcaccc

SEQ ID NO: 866507 - RNA, 24 nt, Human
ugcugggauuacaagcgugagcca

SEQ ID NO: 866508 - RNA, 28 nt, Human
uggagugcaauggugcaauucuagcacg

SEQ ID NO: 866509 - RNA, 23 nt, Human
uggagugcaauggugcaauuucg

SEQ ID NO: 866510 - RNA, 24 nt, Human
uggagugcaauggugcaauuucgg

SEQ ID NO: 866511 - RNA, 18 nt, Human
uggcaggaagaaagaaug

SEQ ID NO: 866512 - RNA, 19 nt, Human
ugggauuacaagcgugagc

SEQ ID NO: 866513 - RNA, 21 nt, Human
ugggauuacaagcgugagcca

SEQ ID NO: 866514 - RNA, 22 nt, Human
ugggauuacaagcgugagccac

SEQ ID NO: 866515 - RNA, 22 nt, Human
ugggauuacaagcgugagccac

SEQ ID NO: 866516 - RNA, 24 nt, Human
ugggauuacaagcgugagccacug

SEQ ID NO: 866517 - RNA, 26 nt, Human
ugggauuacaagcgugagccacugcg

SEQ ID NO: 866518 - RNA, 22 nt, Human
ugggauuacaggcauacgccac

SEQ ID NO: 866519 - RNA, 24 nt, Human
ugggauuacaggcauacgccacca

SEQ ID NO: 866520 - RNA, 22 nt, Human
uggggucaggcagccucaaccc

SEQ ID NO: 866521 - RNA, 23 nt, Human
uggucaggcuggucuugaacucc

SEQ ID NO: 866522 - RNA, 19 nt, Human
ugguugguggcaggaagaa

SEQ ID NO: 866523 - RNA, 24 nt, Human
uuaguagacacgggguuucuccau

SEQ ID NO: 866524 - RNA, 23 nt, Human
uucaagagauucuccugccucag

SEQ ID NO: 866525 - RNA, 24 nt, Human
uucgcucuuauugcccaggcugga

SEQ ID NO: 866526 - RNA, 18 nt, Human
uugcccaggcuggagugc

SEQ ID NO: 866527 - RNA, 24 nt, Human
uuucgcucuuauugcccaggcugg

SEQ ID NO: 866528 - RNA, 21 nt, Human
uuucuccauguuggucaggcu

SEQ ID NO: 866529 - RNA, 25 nt, Human
uuuuuuuuuuuugagauggaguuuc

SEQ ID NO: 866530 - RNA, 27 nt, Human
uuuuuuuuuuuuuuuuuuuuuuugggg

SEQ ID NO: 866531 - RNA, 20 nt, Human
aaacauccauaagaacaucc

SEQ ID NO: 866532 - RNA, 19 nt, Human
aaaguacacaggcagacga

SEQ ID NO: 866533 - RNA, 20 nt, Human
aauccaaaccaaccagccaa

SEQ ID NO: 866534 - RNA, 19 nt, Human
acaaauccaaaccaaccag

SEQ ID NO: 866535 - RNA, 18 nt, Human
acauuauguuaccaaaug

SEQ ID NO: 866536 - RNA, 24 nt, Human
acauuauguuaccaaaugcuaaca

SEQ ID NO: 866537 - RNA, 31 nt, Human
agaaacauccauaagaacauccaaaaacauu

SEQ ID NO: 866538 - RNA, 22 nt, Human
agggaagaaacauccauaagaa

SEQ ID NO: 866539 - RNA, 24 nt, Human
agguguggagaccaauuugcuucg

SEQ ID NO: 866540 - RNA, 19 nt, Human
auaagaacauccaaaaaca

SEQ ID NO: 866541 - RNA, 19 nt, Human
cauccaaaaacauuauguu

SEQ ID NO: 866542 - RNA, 18 nt, Human
cucguggccucggcgugg

SEQ ID NO: 866543 - RNA, 20 nt, Human
gcaucccaggguucaaauca

SEQ ID NO: 866544 - RNA, 20 nt, Human
ggaagaaacauccauaagaa

SEQ ID NO: 866545 - RNA, 18 nt, Human
uaagaacauccaaaaaca

SEQ ID NO: 866546 - RNA, 23 nt, Human
uacaaauccaaaccaaccagcca

SEQ ID NO: 866547 - RNA, 20 nt, Human
uacacaggcagacgauuuua

SEQ ID NO: 866548 - RNA, 21 nt, Human
uagagcaucccaggguucaaa

SEQ ID NO: 866549 - RNA, 23 nt, Human
ucaaaucacaauuugggauacaa

SEQ ID NO: 866550 - RNA, 22 nt, Human
ucuacaaaguacacaggcagac

SEQ ID NO: 866551 - RNA, 18 nt, Human
ucuggaugaugcucaauu

SEQ ID NO: 866552 - RNA, 20 nt, Human
ucuggaugaugcucaauucc

SEQ ID NO: 866553 - RNA, 18 nt, Human
ugaaauacucguggccuc

SEQ ID NO: 866554 - RNA, 22 nt, Human
ugaauaguaccauucacaucua

SEQ ID NO: 866555 - RNA, 18 nt, Human
uggaugaugcucaauucc

SEQ ID NO: 866556 - RNA, 22 nt, Human
uuagaaaaaugcucaauuuuuu

SEQ ID NO: 866557 - RNA, 25 nt, Human
uuuuuuuuuuuuagaaaaaugcuca

SEQ ID NO: 866558 - RNA, 23 nt, Human
aaaaacauguuuuccuccucuuc

SEQ ID NO: 866559 - RNA, 23 nt, Human
aagaaccccacuuuugcaagccu

SEQ ID NO: 866560 - RNA, 21 nt, Human
aaggauaguauggugggcagg

SEQ ID NO: 866561 - RNA, 18 nt, Human
acauguuuuccuccucuu

SEQ ID NO: 866562 - RNA, 19 nt, Human
acucaugcagcugcucuuc

SEQ ID NO: 866563 - RNA, 20 nt, Human
acucuugcauccauuuucug

SEQ ID NO: 866564 - RNA, 22 nt, Human
acucuuuuuuuuugccuucuuu

SEQ ID NO: 866565 - RNA, 21 nt, Human
agauggagaggacuacgugga

SEQ ID NO: 866566 - RNA, 18 nt, Human
aggcagucauagggguau

SEQ ID NO: 866567 - RNA, 18 nt, Human
aggugacuaggugauggg

SEQ ID NO: 866568 - RNA, 22 nt, Human
auaggaaauagcuccagcugua

SEQ ID NO: 866569 - RNA, 20 nt, Human
aucagcuucuacucuugcau

SEQ ID NO: 866570 - RNA, 20 nt, Human
caggacccaugcauugcugu

SEQ ID NO: 866571 - RNA, 20 nt, Human
ccauuuucugaguacaccac

SEQ ID NO: 866572 - RNA, 23 nt, Human
ccccuuccaaaaacugucuuccu

SEQ ID NO: 866573 - RNA, 21 nt, Human
cgggcagauggagaggacuac

SEQ ID NO: 866574 - RNA, 21 nt, Human
cugaaguggauuuagguccau

SEQ ID NO: 866575 - RNA, 21 nt, Human
gacuacguggacagacaggac

SEQ ID NO: 866576 - RNA, 22 nt, Human
gaguacaccacugagaaagaaa

SEQ ID NO: 866577 - RNA, 19 nt, Human
ggugauggguguugcuggu

SEQ ID NO: 866578 - RNA, 20 nt, Human
guccaucucuugauuggggg

SEQ ID NO: 866579 - RNA, 26 nt, Human
guggcucuuggcugcuggcuucacuu

SEQ ID NO: 866580 - RNA, 18 nt, Human
uaccaucuucuuuuacau

SEQ ID NO: 866581 - RNA, 22 nt, Human
uagggucccuuuuguuucaaau

SEQ ID NO: 866582 - RNA, 25 nt, Human
uagggucccuuuuguuucaaaucag

SEQ ID NO: 866583 - RNA, 19 nt, Human
uaugcuugccccuuccaaa

SEQ ID NO: 866584 - RNA, 21 nt, Human
ucagaaagaaccccacuuuug

SEQ ID NO: 866585 - RNA, 22 nt, Human
ucaugagcugaguccaucucuu

SEQ ID NO: 866586 - RNA, 21 nt, Human
ucaugcagcugcucuuccuuc

SEQ ID NO: 866587 - RNA, 19 nt, Human
ucuguucagaauaauaguc

SEQ ID NO: 866588 - RNA, 19 nt, Human
ucuguucuucaucauuucu

SEQ ID NO: 866589 - RNA, 24 nt, Human
ugaagauuucuagggucccuuuug

SEQ ID NO: 866590 - RNA, 18 nt, Human
ugagaaaccaacacauua

SEQ ID NO: 866591 - RNA, 23 nt, Human
ugagaaagaaacaggcucuguuc

SEQ ID NO: 866592 - RNA, 22 nt, Human
ugagucacaggacuggguggag

SEQ ID NO: 866593 - RNA, 18 nt, Human
ugagucaugagucacagg

SEQ ID NO: 866594 - RNA, 23 nt, Human
uggauuuagguccaugcugggaa

SEQ ID NO: 866595 - RNA, 24 nt, Human
ugggcaggugacuaggugaugggu

SEQ ID NO: 866596 - RNA, 20 nt, Human
uguuucaaaucagucucccu

SEQ ID NO: 866597 - RNA, 19 nt, Human
uuccaaaucauuaugcuug

SEQ ID NO: 866598 - RNA, 21 nt, Human
uugggggugagucaugaguca

SEQ ID NO: 866599 - RNA, 27 nt, Human
uugguauuauuauagaaaguuuccugg

SEQ ID NO: 866600 - RNA, 26 nt, Human
uuuaaauccaaagucaaucugacaac

SEQ ID NO: 866601 - RNA, 22 nt, Human
uuucuuuguucauuuuuggcug

SEQ ID NO: 866602 - RNA, 22 nt, Human
uuugcaagccucgaggaucagc

SEQ ID NO: 866603 - RNA, 27 nt, Human
uuuucuguuugccauccucuuuccuug

SEQ ID NO: 866604 - RNA, 25 nt, Human
uuuuguuucaaaucagucucccuga

SEQ ID NO: 866605 - RNA, 22 nt, Human
aaacacacacacacacacccuc

SEQ ID NO: 866606 - RNA, 19 nt, Human
aaaucucucccucccauuc

SEQ ID NO: 866607 - RNA, 24 nt, Human
aacaaggugcagggauggcaaagg

SEQ ID NO: 866608 - RNA, 20 nt, Human
aaggugcagggauggcaaag

SEQ ID NO: 866609 - RNA, 23 nt, Human
acacacacacacacccucuugug

SEQ ID NO: 866610 - RNA, 19 nt, Human
accaaacacacacacacac

SEQ ID NO: 866611 - RNA, 23 nt, Human
agaaugauccacaugggaacuca

SEQ ID NO: 866612 - RNA, 23 nt, Human
agggauggcaaagggggcuucua

SEQ ID NO: 866613 - RNA, 20 nt, Human
cacacacaccaaacacacac

SEQ ID NO: 866614 - RNA, 27 nt, Human
cacacacaccaaacacacacacacaca

SEQ ID NO: 866615 - RNA, 26 nt, Human
caccaaacacacacacacacacccuc

SEQ ID NO: 866616 - RNA, 21 nt, Human
cacccgaaacaaggugcaggg

SEQ ID NO: 866617 - RNA, 21 nt, Human
cagccaggacagggucuguac

SEQ ID NO: 866618 - RNA, 24 nt, Human
cauuguguuauaucaauagcuuca

SEQ ID NO: 866619 - RNA, 18 nt, Human
ccacacacacaccaaaca

SEQ ID NO: 866620 - RNA, 21 nt, Human
ccacacacacaccaaacacac

SEQ ID NO: 866621 - RNA, 24 nt, Human
ccacacacacaccaaacacacaca

SEQ ID NO: 866622 - RNA, 31 nt, Human
ccacacacacaccaaacacacacacacacag

SEQ ID NO: 866623 - RNA, 19 nt, Human
ccacuggguugggggcuga

SEQ ID NO: 866624 - RNA, 19 nt, Human
ccaggacagggucuguacu

SEQ ID NO: 866625 - RNA, 19 nt, Human
cccccccuccacacacaca

SEQ ID NO: 866626 - RNA, 21 nt, Human
cccccccuccacacacacacc

SEQ ID NO: 866627 - RNA, 20 nt, Human
cccuccacacacacaccaaa

SEQ ID NO: 866628 - RNA, 30 nt, Human
ccuuuuguuucaaagggcagagauggagac

SEQ ID NO: 866629 - RNA, 18 nt, Human
cucaaaucucucccuccc

SEQ ID NO: 866630 - RNA, 24 nt, Human
cucaaaucucucccucccauucau

SEQ ID NO: 866631 - RNA, 25 nt, Human
cucaaaucucucccucccauucauc

SEQ ID NO: 866632 - RNA, 21 nt, Human
cuccacacacacaccaaacac

SEQ ID NO: 866633 - RNA, 23 nt, Human
cuuggacucaaaucucucccucc

SEQ ID NO: 866634 - RNA, 20 nt, Human
gcccccccuccacacacaca

SEQ ID NO: 866635 - RNA, 22 nt, Human
gcccccccuccacacacacacc

SEQ ID NO: 866636 - RNA, 21 nt, Human
gccgggccuccacuggguugg

SEQ ID NO: 866637 - RNA, 23 nt, Human
gcuuggacucaaaucucucccuc

SEQ ID NO: 866638 - RNA, 22 nt, Human
ggauggcaaagggggcuucuag

SEQ ID NO: 866639 - RNA, 19 nt, Human
gggauggcaaagggggcuu

SEQ ID NO: 866640 - RNA, 22 nt, Human
ucaaagggcagagauggagaca

SEQ ID NO: 866641 - RNA, 27 nt, Human
ucagugauguauccagcggcccccccu

SEQ ID NO: 866642 - RNA, 18 nt, Human
uccacacacacaccaaac

SEQ ID NO: 866643 - RNA, 24 nt, Human
uccacacacacaccaaacacacac

SEQ ID NO: 866644 - RNA, 27 nt, Human
uccacacacacaccaaacacacacaca

SEQ ID NO: 866645 - RNA, 23 nt, Human
ugcagggauggcaaagggggcuu

SEQ ID NO: 866646 - RNA, 27 nt, Human
ugcuuggacucaaaucucucccuccca

SEQ ID NO: 866647 - RNA, 22 nt, Human
uugcgugguggcaaaggcuccc

SEQ ID NO: 866648 - RNA, 18 nt, Human
uuuuuuuuuuuuuuucug

SEQ ID NO: 866649 - RNA, 19 nt, Human
aaaaaagagauauguauaa

SEQ ID NO: 866650 - RNA, 21 nt, Human
aaaaaccuacuauguuccaaa

SEQ ID NO: 866651 - RNA, 18 nt, Human
aacagaauaaaaaagaga

SEQ ID NO: 866652 - RNA, 20 nt, Human
aagaaaccuagaguaaaaua

SEQ ID NO: 866653 - RNA, 24 nt, Human
aauaaaaagacugacuugaaagga

SEQ ID NO: 866654 - RNA, 22 nt, Human
acagauuccucacugcuggcca

SEQ ID NO: 866655 - RNA, 26 nt, Human
agaaaaagaaguaaucgacauaaaaa

SEQ ID NO: 866656 - RNA, 19 nt, Human
agaagauugaaauguaaua

SEQ ID NO: 866657 - RNA, 20 nt, Human
agacagaaaauuuuaauaau

SEQ ID NO: 866658 - RNA, 29 nt, Human
agacagaagauugaaauguaagggacccc

SEQ ID NO: 866659 - RNA, 20 nt, Human
agccaagaaaaagaaguaau

SEQ ID NO: 866660 - RNA, 21 nt, Human
aggaaagggaacuuccucaau

SEQ ID NO: 866661 - RNA, 22 nt, Human
aguaaaauauuaguauagacaa

SEQ ID NO: 866662 - RNA, 20 nt, Human
auaagccaagaaaaagaagu

SEQ ID NO: 866663 - RNA, 18 nt, Human
auccagccaccccaagac

SEQ ID NO: 866664 - RNA, 23 nt, Human
auccuagccaauucaauaagcca

SEQ ID NO: 866665 - RNA, 18 nt, Human
caaacaccaacggaagcc

SEQ ID NO: 866666 - RNA, 22 nt, Human
cacugcuggccaucauuugugg

SEQ ID NO: 866667 - RNA, 26 nt, Human
caguaauauauaaaagcacaacacau

SEQ ID NO: 866668 - RNA, 27 nt, Human
ccaauucaauaagccaagaaaaagaaa

SEQ ID NO: 866669 - RNA, 18 nt, Human
ccaguuaaaaaccuacua

SEQ ID NO: 866670 - RNA, 20 nt, Human
cccaggagcgaagagugugg

SEQ ID NO: 866671 - RNA, 23 nt, Human
ccccuaagacucugcaguugccu

SEQ ID NO: 866672 - RNA, 22 nt, Human
ccuacuauguuccaaacaccaa

SEQ ID NO: 866673 - RNA, 22 nt, Human
ccugauuaugggccaguagcac

SEQ ID NO: 866674 - RNA, 24 nt, Human
gaaaaagaaguaaucgacauaaaa

SEQ ID NO: 866675 - RNA, 19 nt, Human
gaagacauuugacaaaacu

SEQ ID NO: 866676 - RNA, 18 nt, Human
gcacaacacaucauagcc

SEQ ID NO: 866677 - RNA, 18 nt, Human
gccaagaaaaagaaguaa

SEQ ID NO: 866678 - RNA, 20 nt, Human
gcuuacauaacauauucuac

SEQ ID NO: 866679 - RNA, 20 nt, Human
ggaccaggaacaaggcaaga

SEQ ID NO: 866680 - RNA, 20 nt, Human
gucuucucuccucaggccuu

SEQ ID NO: 866681 - RNA, 23 nt, Human
uaaaagcacaacacaucauagcc

SEQ ID NO: 866682 - RNA, 26 nt, Human
uaaaauaaaaagacugacuugaaagg

SEQ ID NO: 866683 - RNA, 21 nt, Human
uaaaaucuacaauuaacacau

SEQ ID NO: 866684 - RNA, 23 nt, Human
uaacugacccaaggucaaacaga

SEQ ID NO: 866685 - RNA, 23 nt, Human
uaagccaagaaaaagaaguaauc

SEQ ID NO: 866686 - RNA, 23 nt, Human
ucaacauuuacugaagauccugg

SEQ ID NO: 866687 - RNA, 24 nt, Human
ucagcaugacuaugugucuucucu

SEQ ID NO: 866688 - RNA, 18 nt, Human
uccaaacaccaacggaag

SEQ ID NO: 866689 - RNA, 19 nt, Human
uccagacaaagaaacuaag

SEQ ID NO: 866690 - RNA, 23 nt, Human
uccaugugaguugacuucccagg

SEQ ID NO: 866691 - RNA, 18 nt, Human
uccucacugcuggccauc

SEQ ID NO: 866692 - RNA, 20 nt, Human
ucgacauaaaaauuagaaag

SEQ ID NO: 866693 - RNA, 21 nt, Human
ugacaaaacuucaauacaugu

SEQ ID NO: 866694 - RNA, 24 nt, Human
ugacccaaggucaaacagauauua

SEQ ID NO: 866695 - RNA, 23 nt, Human
uggaaauauaaauuaauaugaug

SEQ ID NO: 866696 - RNA, 20 nt, Human
ugugcagucuugcugcacgg

SEQ ID NO: 866697 - RNA, 20 nt, Human
ugugcagucuugcugcacgu

SEQ ID NO: 866698 - RNA, 22 nt, Human
uuagauaacccccuaagacucu

SEQ ID NO: 866699 - RNA, 18 nt, Human
uuaguauagacaagugaa

SEQ ID NO: 866700 - RNA, 22 nt, Human
uuccucacugcuggccaucauu

SEQ ID NO: 866701 - RNA, 23 nt, Human
uuugacaaaacuucaauacaugu

SEQ ID NO: 866702 - RNA, 28 nt, Human
uuuuuuuuuuuuuuuuuuuuuuuggggg

SEQ ID NO: 866703 - RNA, 22 nt, Human
cacggcgagucacucucagcac

SEQ ID NO: 866704 - RNA, 23 nt, Human
cacggcgagucacucucagcaca

SEQ ID NO: 866705 - RNA, 19 nt, Human
cagcaccacuuggaaaccg

SEQ ID NO: 866706 - RNA, 20 nt, Human
cccggaccagaaccuggcuu

SEQ ID NO: 866707 - RNA, 20 nt, Human
ccucagggaaaagcacugug

SEQ ID NO: 866708 - RNA, 18 nt, Human
cucccuucagucugcagc

SEQ ID NO: 866709 - RNA, 18 nt, Human
cugucccccgcccucagg

SEQ ID NO: 866710 - RNA, 21 nt, Human
gcgggacagcaggagaccacg

SEQ ID NO: 866711 - RNA, 23 nt, Human
ggaccagaaccuggcuuccugga

SEQ ID NO: 866712 - RNA, 21 nt, Human
ggaggugagugcccuaagccc

SEQ ID NO: 866713 - RNA, 20 nt, Human
uacccggaccagaaccuggc

SEQ ID NO: 866714 - RNA, 21 nt, Human
uccccacggcgagucacucuu

SEQ ID NO: 866715 - RNA, 21 nt, Human
uccuggauccagggguguccu

SEQ ID NO: 866716 - RNA, 21 nt, Human
ucugggugaaaugaucagccu

SEQ ID NO: 866717 - RNA, 26 nt, Human
ugaccaaaagauuccuguggaaacag

SEQ ID NO: 866718 - RNA, 23 nt, Human
uucuuucuugccguugcucccuu

SEQ ID NO: 866719 - RNA, 24 nt, Human
uuucuugccguugcucccuucagu

SEQ ID NO: 866720 - RNA, 22 nt, Human
aaaaaaccagacaacaaaaaac

SEQ ID NO: 866721 - RNA, 25 nt, Human
aaacaaaaaaaccagacaacaaaaa

SEQ ID NO: 866722 - RNA, 27 nt, Human
aaacaaaaaaaccagacaacaaaaaaa

SEQ ID NO: 866723 - RNA, 21 nt, Human
aaacaaacaaacaaaaaaacc

SEQ ID NO: 866724 - RNA, 23 nt, Human
aaaucaccuacucaaaaagcaga

SEQ ID NO: 866725 - RNA, 20 nt, Human
aacaaaaaaaccagacaaca

SEQ ID NO: 866726 - RNA, 25 nt, Human
aacaaacaaaaaaaccagacaacaa

SEQ ID NO: 866727 - RNA, 28 nt, Human
aacacucuugcuaacaauuuagugucua

SEQ ID NO: 866728 - RNA, 19 nt, Human
aaccagacaacaaaaaacu

SEQ ID NO: 866729 - RNA, 18 nt, Human
aagcagacucagaaaccc

SEQ ID NO: 866730 - RNA, 21 nt, Human
aaugaauggcucccaaaguca

SEQ ID NO: 866731 - RNA, 27 nt, Human
acaaacaaaaaaaccagacaacaaaaa

SEQ ID NO: 866732 - RNA, 18 nt, Human
acaacaaaaaacucaaca

SEQ ID NO: 866733 - RNA, 21 nt, Human
acaacaaaaaacucaacaagc

SEQ ID NO: 866734 - RNA, 23 nt, Human
accaggaacuagcucaacacucu

SEQ ID NO: 866735 - RNA, 24 nt, Human
agcagacucagaaacccaagguuu

SEQ ID NO: 866736 - RNA, 24 nt, Human
agccgaacagcacaaucaugcaga

SEQ ID NO: 866737 - RNA, 18 nt, Human
aggaaggcuggugucucu

SEQ ID NO: 866738 - RNA, 18 nt, Human
aggauuucaaaaaccacc

SEQ ID NO: 866739 - RNA, 24 nt, Human
agguggcccguuccuuaaagccuu

SEQ ID NO: 866740 - RNA, 21 nt, Human
aguagacagcauuucaauuca

SEQ ID NO: 866741 - RNA, 24 nt, Human
aucaccuacucaaaaagcagacuc

SEQ ID NO: 866742 - RNA, 21 nt, Human
auuuuggcaacaaaaccagga

SEQ ID NO: 866743 - RNA, 24 nt, Human
caaaggggucaaggcagaggaaag

SEQ ID NO: 866744 - RNA, 21 nt, Human
caacaaaaccaggauucccuu

SEQ ID NO: 866745 - RNA, 23 nt, Human
caaccucaaaaucaccuacucaa

SEQ ID NO: 866746 - RNA, 24 nt, Human
caagcaaaucacacaguuguggga

SEQ ID NO: 866747 - RNA, 24 nt, Human
caccaggaacuagcucaacacucu

SEQ ID NO: 866748 - RNA, 20 nt, Human
cacugaguggccaagcagac

SEQ ID NO: 866749 - RNA, 18 nt, Human
cagggccccuggccgggc

SEQ ID NO: 866750 - RNA, 19 nt, Human
ccaccaacauucaggcuca

SEQ ID NO: 866751 - RNA, 19 nt, Human
cccgggaaagugaguuccu

SEQ ID NO: 866752 - RNA, 21 nt, Human
cccuggccgggcccagaggcc

SEQ ID NO: 866753 - RNA, 20 nt, Human
cccuuaauauccccacaacu

SEQ ID NO: 866754 - RNA, 22 nt, Human
ccuccagguuuaccuccaaguc

SEQ ID NO: 866755 - RNA, 21 nt, Human
cgaacagcacaaucaugcaga

SEQ ID NO: 866756 - RNA, 23 nt, Human
cgcugggauucaagagccgaaca

SEQ ID NO: 866757 - RNA, 18 nt, Human
cuagaugaaggccccugg

SEQ ID NO: 866758 - RNA, 20 nt, Human
cucaacacucuugcuaacaa

SEQ ID NO: 866759 - RNA, 27 nt, Human
cucagcaaguaacacugaauguccaaa

SEQ ID NO: 866760 - RNA, 22 nt, Human
cuccugaaacccuuucaguaga

SEQ ID NO: 866761 - RNA, 20 nt, Human
cuggaaaaugcuguauuucc

SEQ ID NO: 866762 - RNA, 22 nt, Human
cuuaauauccccacaacugcuc

SEQ ID NO: 866763 - RNA, 18 nt, Human
gaaaaugcuguauuuccu

SEQ ID NO: 866764 - RNA, 22 nt, Human
ggccaagcagacccuguuggga

SEQ ID NO: 866765 - RNA, 20 nt, Human
gggccccuggccgggcccag

SEQ ID NO: 866766 - RNA, 24 nt, Human
guaacacugaauguccaaaaauac

SEQ ID NO: 866767 - RNA, 25 nt, Human
uaaacaaacaaacaaaaaaaccaga

SEQ ID NO: 866768 - RNA, 22 nt, Human
uaacaaaggggucaaggcagag

SEQ ID NO: 866769 - RNA, 22 nt, Human
uaccuccaagucaggauuucaa

SEQ ID NO: 866770 - RNA, 25 nt, Human
uauuuacuuuuuuuccuuccuccag

SEQ ID NO: 866771 - RNA, 19 nt, Human
ucaaaaucaccuacucaaa

SEQ ID NO: 866772 - RNA, 19 nt, Human
uccuuuuuagaaaugaggu

SEQ ID NO: 866773 - RNA, 19 nt, Human
ucuauggggaaugcaauuu

SEQ ID NO: 866774 - RNA, 18 nt, Human
ucucuguuacagguggcc

SEQ ID NO: 866775 - RNA, 19 nt, Human
ucuguggaaacacuucacc

SEQ ID NO: 866776 - RNA, 19 nt, Human
ugaauggcucccaaaguca

SEQ ID NO: 866777 - RNA, 24 nt, Human
ugguauaaacaaacaaacaaaaaa

SEQ ID NO: 866778 - RNA, 21 nt, Human
uguacaaugaauggcucccaa

SEQ ID NO: 866779 - RNA, 25 nt, Human
uguccaaaaauacggcuguguuaaa

SEQ ID NO: 866780 - RNA, 24 nt, Human
uuacauaaacgcuccugaaacccu

SEQ ID NO: 866781 - RNA, 21 nt, Human
uuaggguuaaucgcagcugca

SEQ ID NO: 866782 - RNA, 23 nt, Human
uucaauucagagaccaaagugaa

SEQ ID NO: 866783 - RNA, 23 nt, Human
uuuuuuuuuuuuuuuuuuccuuu

SEQ ID NO: 866784 - RNA, 25 nt, Human
uuuuuuuuuuuuuuuuuuccuuuuu

SEQ ID NO: 866785 - RNA, 27 nt, Human
uuuuuuuuuuuuuuuuuuccuuuuuag

SEQ ID NO: 866786 - RNA, 22 nt, Human
aaaauuccccugugcccagccc

SEQ ID NO: 866787 - RNA, 27 nt, Human
aaagacccccccaggaauuccacaccc

SEQ ID NO: 866788 - RNA, 21 nt, Human
aacggggcagcaaaggagccc

SEQ ID NO: 866789 - RNA, 26 nt, Human
acccuggagccgcuugcgugcguccu

SEQ ID NO: 866790 - RNA, 18 nt, Human
acgcaccgauccugcgag

SEQ ID NO: 866791 - RNA, 23 nt, Human
agagaaacacagaacucagcacg

SEQ ID NO: 866792 - RNA, 19 nt, Human
aggcaggguuacccgcugc

SEQ ID NO: 866793 - RNA, 19 nt, Human
agugggugcgggggugggc

SEQ ID NO: 866794 - RNA, 23 nt, Human
augcugcugcccugagacccccu

SEQ ID NO: 866795 - RNA, 21 nt, Human
auuagugggugcggggguggg

SEQ ID NO: 866796 - RNA, 22 nt, Human
cacagaacucagcacgcucagg

SEQ ID NO: 866797 - RNA, 21 nt, Human
cagaacaaggcaggguuaccc

SEQ ID NO: 866798 - RNA, 22 nt, Human
cagaauagagauguucugagga

SEQ ID NO: 866799 - RNA, 20 nt, Human
caggaaaagcagaauuagug

SEQ ID NO: 866800 - RNA, 22 nt, Human
ccccaggaauuccacaccccuc

SEQ ID NO: 866801 - RNA, 22 nt, Human
ccccccaggaauuccacacccc

SEQ ID NO: 866802 - RNA, 21 nt, Human
ccccugugcccagccccacga

SEQ ID NO: 866803 - RNA, 21 nt, Human
cccuaggagcccugggugaca

SEQ ID NO: 866804 - RNA, 24 nt, Human
cccugugcccagccccacgacucc

SEQ ID NO: 866805 - RNA, 23 nt, Human
ccgcgccggcgaaacgucaccac

SEQ ID NO: 866806 - RNA, 21 nt, Human
ccuccgcugccugcacaucug

SEQ ID NO: 866807 - RNA, 18 nt, Human
ccugugcccagccccacg

SEQ ID NO: 866808 - RNA, 24 nt, Human
ccuucuaagcauucuucagagcag

SEQ ID NO: 866809 - RNA, 19 nt, Human
cgcgcguggcggggacgua

SEQ ID NO: 866810 - RNA, 20 nt, Human
cucaagacuucuaccuaucu

SEQ ID NO: 866811 - RNA, 24 nt, Human
cuggccccucagguuccacaccuc

SEQ ID NO: 866812 - RNA, 20 nt, Human
cuggcggccuugcucgcgcu

SEQ ID NO: 866813 - RNA, 21 nt, Human
gacccccucaaggcaccggga

SEQ ID NO: 866814 - RNA, 24 nt, Human
gccagaauuaaagacccccccagg

SEQ ID NO: 866815 - RNA, 22 nt, Human
ggacaucuggcucuggugucug

SEQ ID NO: 866816 - RNA, 19 nt, Human
gugcgggggugggcugggg

SEQ ID NO: 866817 - RNA, 24 nt, Human
gugggugcgggggugggcuggggu

SEQ ID NO: 866818 - RNA, 21 nt, Human
uagugggugcgggggugggcu

SEQ ID NO: 866819 - RNA, 24 nt, Human
uccacaccucuauucagagaaaca

SEQ ID NO: 866820 - RNA, 24 nt, Human
uccauggaggccuucagagaggcc

SEQ ID NO: 866821 - RNA, 18 nt, Human
uccccugugcccagcccc

SEQ ID NO: 866822 - RNA, 23 nt, Human
ucuuucuccuccuccgcugccug

SEQ ID NO: 866823 - RNA, 21 nt, Human
ugacagaacggggcagcaaag

SEQ ID NO: 866824 - RNA, 22 nt, Human
ugcccagccccacgacuccagc

SEQ ID NO: 866825 - RNA, 22 nt, Human
ugcccugagacccccucaaggc

SEQ ID NO: 866826 - RNA, 24 nt, Human
ugcccugagacccccucaaggcac

SEQ ID NO: 866827 - RNA, 18 nt, Human
ugcccuggcauggcagag

SEQ ID NO: 866828 - RNA, 22 nt, Human
uggccccucagguuccacaccu

SEQ ID NO: 866829 - RNA, 23 nt, Human
uggcggggacguacccuggagcc

SEQ ID NO: 866830 - RNA, 24 nt, Human
uggugggggacaucuggcucuggu

SEQ ID NO: 866831 - RNA, 21 nt, Human
uuagugggugcgggggugggc

SEQ ID NO: 866832 - RNA, 22 nt, Human
uucagagaggccugcuggcccc

SEQ ID NO: 866833 - RNA, 21 nt, Human
uuccccugugcccagccccac

SEQ ID NO: 866834 - RNA, 21 nt, Human
uuucccuuuuuaguaauggug

SEQ ID NO: 866835 - RNA, 25 nt, Human
uuuuuuuuuuuuuuuuucccuuuuu

SEQ ID NO: 866836 - RNA, 29 nt, Human
uuuuuuuuuuuuuuuuuuucccuuuuuag

SEQ ID NO: 866837 - RNA, 21 nt, Human
aagcgccacagcgccucgagc

SEQ ID NO: 866838 - RNA, 22 nt, Human
agccagcgaaucacccucgacc

SEQ ID NO: 866839 - RNA, 18 nt, Human
aggcugcggccacgcguc

SEQ ID NO: 866840 - RNA, 19 nt, Human
aggcugcggccacgcguca

SEQ ID NO: 866841 - RNA, 24 nt, Human
agggaggaggcugcgucaggcccg

SEQ ID NO: 866842 - RNA, 24 nt, Human
agggggaagguugccuggcgacgg

SEQ ID NO: 866843 - RNA, 21 nt, Human
agguggaguuggacagcccca

SEQ ID NO: 866844 - RNA, 23 nt, Human
cacgcugcguucuugggccgcug

SEQ ID NO: 866845 - RNA, 24 nt, Human
cagcgaaucacccucgaccggccc

SEQ ID NO: 866846 - RNA, 22 nt, Human
ccagacaccgcaagggggugcu

SEQ ID NO: 866847 - RNA, 18 nt, Human
cccgaaugagcaccacac

SEQ ID NO: 866848 - RNA, 18 nt, Human
cccgcugaucucagcacu

SEQ ID NO: 866849 - RNA, 19 nt, Human
cccucgaccggccccgaag

SEQ ID NO: 866850 - RNA, 18 nt, Human
cccuuccccaucgccccg

SEQ ID NO: 866851 - RNA, 20 nt, Human
ccgcgccgcuuccuccagaa

SEQ ID NO: 866852 - RNA, 18 nt, Human
cgaccggccccgaagcuc

SEQ ID NO: 866853 - RNA, 19 nt, Human
cgcccuccgggaucacccu

SEQ ID NO: 866854 - RNA, 24 nt, Human
cgcccucgcccugcuccugcuugc

SEQ ID NO: 866855 - RNA, 21 nt, Human
cuaaggccccagccaugacuc

SEQ ID NO: 866856 - RNA, 23 nt, Human
cuccauccgcaugcucagcagcu

SEQ ID NO: 866857 - RNA, 22 nt, Human
cugcuccugcuugcgguucucg

SEQ ID NO: 866858 - RNA, 20 nt, Human
cuggcucugguccuccaucc

SEQ ID NO: 866859 - RNA, 19 nt, Human
cuucccgauucuacugagc

SEQ ID NO: 866860 - RNA, 24 nt, Human
gaguguguagccgcccuccgggau

SEQ ID NO: 866861 - RNA, 20 nt, Human
gcccaggguccaucucggcc

SEQ ID NO: 866862 - RNA, 19 nt, Human
gccccgccucacagugcag

SEQ ID NO: 866863 - RNA, 21 nt, Human
gcccucgcccugcuccugcuu

SEQ ID NO: 866864 - RNA, 19 nt, Human
ggaggaggcugcgucaggc

SEQ ID NO: 866865 - RNA, 23 nt, Human
uaaagccagcgaaucacccucga

SEQ ID NO: 866866 - RNA, 18 nt, Human
uaccagaugccucaguaa

SEQ ID NO: 866867 - RNA, 23 nt, Human
uaggcgcccucgcccugcuccug

SEQ ID NO: 866868 - RNA, 21 nt, Human
ucacccucgaccggccccgaa

SEQ ID NO: 866869 - RNA, 22 nt, Human
ucaggcccgacacgguggagcg

SEQ ID NO: 866870 - RNA, 21 nt, Human
uccaucaccaggcugcggcca

SEQ ID NO: 866871 - RNA, 23 nt, Human
uccaucaccaggcugcggccacg

SEQ ID NO: 866872 - RNA, 22 nt, Human
uccuccagacaccgcaaggggg

SEQ ID NO: 866873 - RNA, 19 nt, Human
uccugggaacucgcccaga

SEQ ID NO: 866874 - RNA, 19 nt, Human
ucgaccggccccgaagcuc

SEQ ID NO: 866875 - RNA, 19 nt, Human
ucgccccgccucacagugc

SEQ ID NO: 866876 - RNA, 20 nt, Human
uggaguuggacagccccagc

SEQ ID NO: 866877 - RNA, 22 nt, Human
uggauucuugcacgcugcguuc

SEQ ID NO: 866878 - RNA, 21 nt, Human
uggcggggcuucggcccuucc

SEQ ID NO: 866879 - RNA, 26 nt, Human
uuaaagccagcgaaucacccucgacc

SEQ ID NO: 866880 - RNA, 21 nt, Human
uucaccuguagguugauggcc

SEQ ID NO: 866881 - RNA, 21 nt, Human
uucagcggccucuucaggccc

SEQ ID NO: 866882 - RNA, 20 nt, Human
uucauggugaacaccagcca

SEQ ID NO: 866883 - RNA, 20 nt, Human
uucauggugaacaccagcca

SEQ ID NO: 866884 - RNA, 19 nt, Human
uuccuccagacaccgcaag

SEQ ID NO: 866885 - RNA, 21 nt, Human
aagaaccaagggcugcaggcg

SEQ ID NO: 866886 - RNA, 18 nt, Human
aagaacuuuuuaccuagc

SEQ ID NO: 866887 - RNA, 24 nt, Human
accgaacuccaccagaggcugcgg

SEQ ID NO: 866888 - RNA, 19 nt, Human
agaggccaacgcaaguaua

SEQ ID NO: 866889 - RNA, 21 nt, Human
agccccaccagcccugaacaa

SEQ ID NO: 866890 - RNA, 19 nt, Human
agccuggcuccccgucccg

SEQ ID NO: 866891 - RNA, 24 nt, Human
agcugcaccuugcgccccagcccc

SEQ ID NO: 866892 - RNA, 19 nt, Human
agggaaaaaacugacgcca

SEQ ID NO: 866893 - RNA, 23 nt, Human
agggaaaaaacugacgccagagg

SEQ ID NO: 866894 - RNA, 21 nt, Human
cacagggaucuuucuccuccc

SEQ ID NO: 866895 - RNA, 19 nt, Human
caccagcccugaacaaggc

SEQ ID NO: 866896 - RNA, 18 nt, Human
caccaugcccuuuaaaac

SEQ ID NO: 866897 - RNA, 25 nt, Human
caccuugcgccccagccccaccagc

SEQ ID NO: 866898 - RNA, 22 nt, Human
cagcugcaccuugcgccccagc

SEQ ID NO: 866899 - RNA, 24 nt, Human
caggacuccucuaguccaaucucc

SEQ ID NO: 866900 - RNA, 19 nt, Human
cagggaucuuucuccuccc

SEQ ID NO: 866901 - RNA, 21 nt, Human
cauugucagcugcaccuugcg

SEQ ID NO: 866902 - RNA, 22 nt, Human
ccaaacucggaaagggccgcgc

SEQ ID NO: 866903 - RNA, 20 nt, Human
ccaccagaggcugcggcucc

SEQ ID NO: 866904 - RNA, 20 nt, Human
ccagaggcugcggcuccucu

SEQ ID NO: 866905 - RNA, 21 nt, Human
ccagaggcugcggcuccucuc

SEQ ID NO: 866906 - RNA, 21 nt, Human
ccccacacccgaccgaacucc

SEQ ID NO: 866907 - RNA, 18 nt, Human
cccggcacugucucggcc

SEQ ID NO: 866908 - RNA, 19 nt, Human
ccgaccgaacuccaccaga

SEQ ID NO: 866909 - RNA, 19 nt, Human
ccgaccgaacuccaccaga

SEQ ID NO: 866910 - RNA, 21 nt, Human
cgaccgaacuccaccagaggc

SEQ ID NO: 866911 - RNA, 22 nt, Human
cgaccgaacuccaccagaggcu

SEQ ID NO: 866912 - RNA, 20 nt, Human
cgcggaggagucagugaccg

SEQ ID NO: 866913 - RNA, 23 nt, Human
cuccaaacauuauuucaccacuc

SEQ ID NO: 866914 - RNA, 20 nt, Human
cucggccggcugugcgaccc

SEQ ID NO: 866915 - RNA, 21 nt, Human
cugauaguuuucuggugcugg

SEQ ID NO: 866916 - RNA, 25 nt, Human
cuguaacacucuuucgggaacagcu

SEQ ID NO: 866917 - RNA, 23 nt, Human
cuguuguguucuguaacacucuu

SEQ ID NO: 866918 - RNA, 22 nt, Human
cuugcgccccagccccaccagc

SEQ ID NO: 866919 - RNA, 18 nt, Human
cuuucgggaacagcuuag

SEQ ID NO: 866920 - RNA, 21 nt, Human
gaaaaaacugacgccagaggc

SEQ ID NO: 866921 - RNA, 24 nt, Human
gaaaaaacugacgccagaggcagg

SEQ ID NO: 866922 - RNA, 22 nt, Human
gaauauuguacaauacuguugu

SEQ ID NO: 866923 - RNA, 19 nt, Human
gcacgaggaaagcgcggag

SEQ ID NO: 866924 - RNA, 19 nt, Human
gccccagccccaccagccc

SEQ ID NO: 866925 - RNA, 19 nt, Human
gcccugaacaaggcgccgg

SEQ ID NO: 866926 - RNA, 24 nt, Human
gcgcggaggagucagugaccgggc

SEQ ID NO: 866927 - RNA, 19 nt, Human
gcuccccgucccggcacug

SEQ ID NO: 866928 - RNA, 21 nt, Human
ggcuccccgucccggcacugu

SEQ ID NO: 866929 - RNA, 21 nt, Human
gggaguuagaggccaacgcaa

SEQ ID NO: 866930 - RNA, 18 nt, Human
guuuccaagaaccaaggg

SEQ ID NO: 866931 - RNA, 22 nt, Human
uaguuguuggugaaauuagaaa

SEQ ID NO: 866932 - RNA, 19 nt, Human
uccaccagaggcugcggcu

SEQ ID NO: 866933 - RNA, 19 nt, Human
ucgcugcaaaacaccaaac

SEQ ID NO: 866934 - RNA, 21 nt, Human
ucggaagagcgagauuuccuu

SEQ ID NO: 866935 - RNA, 19 nt, Human
ucucgcccuggaggacuuu

SEQ ID NO: 866936 - RNA, 20 nt, Human
ugaaagugcuucauaaacug

SEQ ID NO: 866937 - RNA, 21 nt, Human
ugaccgggcgcacucggaagc

SEQ ID NO: 866938 - RNA, 22 nt, Human
ugaccgggcgcacucggaagcc

SEQ ID NO: 866939 - RNA, 21 nt, Human
ugacuacccccacacccgacc

SEQ ID NO: 866940 - RNA, 24 nt, Human
ugaguggaugagggaaaaaacuga

SEQ ID NO: 866941 - RNA, 18 nt, Human
uggugcugggagcaccau

SEQ ID NO: 866942 - RNA, 19 nt, Human
uugcuucuuuccuugacua

SEQ ID NO: 866943 - RNA, 24 nt, Human
aaacuucugggcucaaaugauccu

SEQ ID NO: 866944 - RNA, 21 nt, Human
aacugauuggggagugaggug

SEQ ID NO: 866945 - RNA, 21 nt, Human
acuacaggccugaaauacugu

SEQ ID NO: 866946 - RNA, 19 nt, Human
aguagcugggacuacaggc

SEQ ID NO: 866947 - RNA, 19 nt, Human
aguagcugggacuacaggc

SEQ ID NO: 866948 - RNA, 19 nt, Human
caaaugauccuccugcuuc

SEQ ID NO: 866949 - RNA, 21 nt, Human
cacaguguggcuuggugccaa

SEQ ID NO: 866950 - RNA, 21 nt, Human
cacggacccacgcauggaccc

SEQ ID NO: 866951 - RNA, 20 nt, Human
caggcucaaacuucugggcu

SEQ ID NO: 866952 - RNA, 18 nt, Human
cccgugccugcagcgcgc

SEQ ID NO: 866953 - RNA, 19 nt, Human
ccugcggggaggggcuggu

SEQ ID NO: 866954 - RNA, 20 nt, Human
cgagcuggaaucugcaggug

SEQ ID NO: 866955 - RNA, 19 nt, Human
cuauaauaccaaaccacaa

SEQ ID NO: 866956 - RNA, 23 nt, Human
cuaucucucucucucucucuuuu

SEQ ID NO: 866957 - RNA, 24 nt, Human
cucaaaugauccuccugcuucugc

SEQ ID NO: 866958 - RNA, 24 nt, Human
cucggccuccggaguagcugggac

SEQ ID NO: 866959 - RNA, 24 nt, Human
cucucucucucucucuuuuaacuu

SEQ ID NO: 866960 - RNA, 23 nt, Human
cucucucucucucuuuuaacuga

SEQ ID NO: 866961 - RNA, 23 nt, Human
cugccucggccuccggaguagcu

SEQ ID NO: 866962 - RNA, 22 nt, Human
cugguccauccccggccagcca

SEQ ID NO: 866963 - RNA, 23 nt, Human
cuucugggcucaaaugauccucc

SEQ ID NO: 866964 - RNA, 25 nt, Human
cuucugggcucaaaugauccuccug

SEQ ID NO: 866965 - RNA, 20 nt, Human
gacccagcgacccacggacc

SEQ ID NO: 866966 - RNA, 27 nt, Human
gaguagcugggacuacaggccugaaau

SEQ ID NO: 866967 - RNA, 18 nt, Human
gcgcggguggcccucgug

SEQ ID NO: 866968 - RNA, 19 nt, Human
ggaaauguguacuucuucc

SEQ ID NO: 866969 - RNA, 19 nt, Human
ggagugagguggggggggg

SEQ ID NO: 866970 - RNA, 19 nt, Human
gggcucaaaugauccuccu

SEQ ID NO: 866971 - RNA, 18 nt, Human
ggggagugaggugggggg

SEQ ID NO: 866972 - RNA, 23 nt, Human
ggggagugagguggggggggggg

SEQ ID NO: 866973 - RNA, 24 nt, Human
gggggucuugcuacauugcccagg

SEQ ID NO: 866974 - RNA, 22 nt, Human
gggucuugcuacauugcccagg

SEQ ID NO: 866975 - RNA, 21 nt, Human
gucgagugcacaguguggcuu

SEQ ID NO: 866976 - RNA, 19 nt, Human
uaccugggcgcggcgcggg

SEQ ID NO: 866977 - RNA, 26 nt, Human
uaucucucucucucucucuuuuaaag

SEQ ID NO: 866978 - RNA, 19 nt, Human
ucaaaccucagccauauga

SEQ ID NO: 866979 - RNA, 22 nt, Human
ucaaaugauccuccugcuucug

SEQ ID NO: 866980 - RNA, 18 nt, Human
uccccggccagccacgga

SEQ ID NO: 866981 - RNA, 23 nt, Human
uccccggccagccacggacccac

SEQ ID NO: 866982 - RNA, 24 nt, Human
uccggaguagcugggacuacaggc

SEQ ID NO: 866983 - RNA, 22 nt, Human
ucugggcucaaaugauccuccu

SEQ ID NO: 866984 - RNA, 20 nt, Human
ugaggugggggggggggguc

SEQ ID NO: 866985 - RNA, 21 nt, Human
ugagguggggggggggggucu

SEQ ID NO: 866986 - RNA, 23 nt, Human
ugagguggggggggggggucuug

SEQ ID NO: 866987 - RNA, 23 nt, Human
ugcccaggcucaaacuucugggc

SEQ ID NO: 866988 - RNA, 23 nt, Human
ugccccugcggggaggggcuggu

SEQ ID NO: 866989 - RNA, 23 nt, Human
ugccucagcuucugccucggccu

SEQ ID NO: 866990 - RNA, 24 nt, Human
ugccucggccuccggaguagcugg

SEQ ID NO: 866991 - RNA, 19 nt, Human
ugcuacauugcccaggcuc

SEQ ID NO: 866992 - RNA, 20 nt, Human
uggaaauguguacuucuucc

SEQ ID NO: 866993 - RNA, 19 nt, Human
uggcaugagcuguaguuca

SEQ ID NO: 866994 - RNA, 20 nt, Human
uggcaugagcuguaguucaa

SEQ ID NO: 866995 - RNA, 18 nt, Human
ugggacuacaggccugaa

SEQ ID NO: 866996 - RNA, 19 nt, Human
ugggacuacaggccugaaa

SEQ ID NO: 866997 - RNA, 24 nt, Human
ugggacuacaggccugaaauacug

SEQ ID NO: 866998 - RNA, 24 nt, Human
ugggcucaaaugauccuccugcuu

SEQ ID NO: 866999 - RNA, 23 nt, Human
uggggggggggggucuugcuaca

SEQ ID NO: 867000 - RNA, 20 nt, Human
uuggggagugaggugggggg

SEQ ID NO: 867001 - RNA, 22 nt, Human
uuggggagugaggugggggggg

SEQ ID NO: 867002 - RNA, 23 nt, Human
uuuuuuuuuuuuuuucuguaauu

SEQ ID NO: 867003 - RNA, 23 nt, Human
uuuuuuuuuuuuuuuuuuucugu

SEQ ID NO: 867004 - RNA, 27 nt, Human
uuuuuuuuuuuuuuuuuuuuucugggg

SEQ ID NO: 867005 - RNA, 24 nt, Human
uuuuuuuuuuuuuuuuuuuuucuu

SEQ ID NO: 867006 - RNA, 20 nt, Human
aaaaaaagaguccuggagaa

SEQ ID NO: 867007 - RNA, 22 nt, Human
agaaagagccagagagaauggu

SEQ ID NO: 867008 - RNA, 26 nt, Human
agaggaagacagaaagagccagagag

SEQ ID NO: 867009 - RNA, 20 nt, Human
agccagagagaaugaggagg

SEQ ID NO: 867010 - RNA, 24 nt, Human
agccagagagaaugaggaggugag

SEQ ID NO: 867011 - RNA, 22 nt, Human
agggaggagggugagaagagga

SEQ ID NO: 867012 - RNA, 23 nt, Human
aggggagggaggagggugagaag

SEQ ID NO: 867013 - RNA, 21 nt, Human
ccccgcgcuuggccucgugcc

SEQ ID NO: 867014 - RNA, 22 nt, Human
ccgcugcauuaaauaguuaugu

SEQ ID NO: 867015 - RNA, 25 nt, Human
cgccaggugccgcgcaaaggacucc

SEQ ID NO: 867016 - RNA, 23 nt, Human
cgcuccggccccgcgcuuggccu

SEQ ID NO: 867017 - RNA, 18 nt, Human
cucaagguaaaaaaagag

SEQ ID NO: 867018 - RNA, 28 nt, Human
cucaagguaaaaaaagaguccuggagaa

SEQ ID NO: 867019 - RNA, 23 nt, Human
cugcgggaagcaucucgguuucc

SEQ ID NO: 867020 - RNA, 25 nt, Human
gagccagagagaaugaggaggugag

SEQ ID NO: 867021 - RNA, 21 nt, Human
gaggaagacagaaagagccag

SEQ ID NO: 867022 - RNA, 21 nt, Human
gaggagggugagaagaggaag

SEQ ID NO: 867023 - RNA, 23 nt, Human
gagggaggagggugagaagagga

SEQ ID NO: 867024 - RNA, 23 nt, Human
gagucccaggccaugggcaggug

SEQ ID NO: 867025 - RNA, 23 nt, Human
gccgcgcaaaggacuccgggaag

SEQ ID NO: 867026 - RNA, 23 nt, Human
gggaggagggugagaagaggaag

SEQ ID NO: 867027 - RNA, 24 nt, Human
ggggagggaggagggugagaagag

SEQ ID NO: 867028 - RNA, 20 nt, Human
guccucucagggaaggcugu

SEQ ID NO: 867029 - RNA, 18 nt, Human
ucccaggccaugggcagg

SEQ ID NO: 867030 - RNA, 21 nt, Human
uccgggaaggccgcuccggcc

SEQ ID NO: 867031 - RNA, 19 nt, Human
ugaggaggugagaaggggg

SEQ ID NO: 867032 - RNA, 21 nt, Human
ugaggaggugagaaggggggg

SEQ ID NO: 867033 - RNA, 23 nt, Human
ugcgggaagcaucucgguuuccu

SEQ ID NO: 867034 - RNA, 21 nt, Human
uuuuuuuuuuuuuuuuuccgg

SEQ ID NO: 867035 - RNA, 23 nt, Human
uuuuuuuuuuuuuuuuuuuccgg

SEQ ID NO: 867036 - RNA, 21 nt, Human
aaacaaaaauggauuucagga

SEQ ID NO: 867037 - RNA, 22 nt, Human
aacauacaauauacacacauaa

SEQ ID NO: 867038 - RNA, 18 nt, Human
aggaggaggaggaagggc

SEQ ID NO: 867039 - RNA, 21 nt, Human
aggcggcggcagaggaggagg

SEQ ID NO: 867040 - RNA, 20 nt, Human
aggcggcggcgacugaggag

SEQ ID NO: 867041 - RNA, 18 nt, Human
auacacacauaaaguaca

SEQ ID NO: 867042 - RNA, 24 nt, Human
caacauacaauauacacacauaaa

SEQ ID NO: 867043 - RNA, 27 nt, Human
caaccagcucuuacaccugcucuacca

SEQ ID NO: 867044 - RNA, 19 nt, Human
cacacaauauuauuaauag

SEQ ID NO: 867045 - RNA, 23 nt, Human
cacacauaaaguacaagcagcca

SEQ ID NO: 867046 - RNA, 24 nt, Human
cacacauaaaguacaagcagccac

SEQ ID NO: 867047 - RNA, 20 nt, Human
cacgaagaucuccucccagc

SEQ ID NO: 867048 - RNA, 19 nt, Human
cagcggccgccggcucccc

SEQ ID NO: 867049 - RNA, 21 nt, Human
cagcugccucuccgccccgcu

SEQ ID NO: 867050 - RNA, 19 nt, Human
caggaaccaugcugacauu

SEQ ID NO: 867051 - RNA, 19 nt, Human
caggucccaaggaagaggg

SEQ ID NO: 867052 - RNA, 20 nt, Human
cauaaaaacuaucagcugac

SEQ ID NO: 867053 - RNA, 26 nt, Human
cauacaauauacacacauaaaguacc

SEQ ID NO: 867054 - RNA, 19 nt, Human
cccagggcccgcgccgccc

SEQ ID NO: 867055 - RNA, 21 nt, Human
ccccagagcccugggcggcag

SEQ ID NO: 867056 - RNA, 23 nt, Human
cccccgcagcugccucuccgccc

SEQ ID NO: 867057 - RNA, 21 nt, Human
cccgcagcugccucuccgccc

SEQ ID NO: 867058 - RNA, 18 nt, Human
ccucccagggcccgcgcc

SEQ ID NO: 867059 - RNA, 21 nt, Human
cgaagaucuccucccagcucg

SEQ ID NO: 867060 - RNA, 20 nt, Human
cggauggauugcuaccuggg

SEQ ID NO: 867061 - RNA, 19 nt, Human
cggcccggcgcgggcucag

SEQ ID NO: 867062 - RNA, 20 nt, Human
cggcuccccccgcagcugcc

SEQ ID NO: 867063 - RNA, 18 nt, Human
cggcuggcuccgggcgcc

SEQ ID NO: 867064 - RNA, 21 nt, Human
cgggcggcggcgacugaggag

SEQ ID NO: 867065 - RNA, 19 nt, Human
cgggcucagaggcgcgcgg

SEQ ID NO: 867066 - RNA, 19 nt, Human
cucccagggcccgcgccgc

SEQ ID NO: 867067 - RNA, 24 nt, Human
gagggcgcgggcggcgcgggcggc

SEQ ID NO: 867068 - RNA, 20 nt, Human
gagggucagugaggcuggac

SEQ ID NO: 867069 - RNA, 25 nt, Human
gauaucucucauuacuucaaauccu

SEQ ID NO: 867070 - RNA, 21 nt, Human
gccccagagcccugggcggca

SEQ ID NO: 867071 - RNA, 18 nt, Human
gcccugggcggcagcagc

SEQ ID NO: 867072 - RNA, 28 nt, Human
gcggcagcagcggccgccggcucccccc

SEQ ID NO: 867073 - RNA, 21 nt, Human
gcggcggcgacugaggaggcg

SEQ ID NO: 867074 - RNA, 21 nt, Human
gcggcggcgacugaggaggcg

SEQ ID NO: 867075 - RNA, 26 nt, Human
gcuccccccgcagcugccucuccgcc

SEQ ID NO: 867076 - RNA, 18 nt, Human
ggagguucaagaauccau

SEQ ID NO: 867077 - RNA, 21 nt, Human
ggcaggucccaaggaagaggg

SEQ ID NO: 867078 - RNA, 23 nt, Human
ggcgcgcggagggcgcgggcggc

SEQ ID NO: 867079 - RNA, 18 nt, Human
ggcggcgcgggcggcggc

SEQ ID NO: 867080 - RNA, 18 nt, Human
ggcuccgggcgccccucc

SEQ ID NO: 867081 - RNA, 18 nt, Human
gggcggcgcgggcggcgg

SEQ ID NO: 867082 - RNA, 18 nt, Human
gguucuguguuuuguuug

SEQ ID NO: 867083 - RNA, 20 nt, Human
uaaaguacaagcagccaccg

SEQ ID NO: 867084 - RNA, 22 nt, Human
uacaaaaaagaaauaaggcugc

SEQ ID NO: 867085 - RNA, 18 nt, Human
uaccugggaaaauggacc

SEQ ID NO: 867086 - RNA, 20 nt, Human
ugggaaggggccggcgcggc

SEQ ID NO: 867087 - RNA, 23 nt, Human
ugggaaggggccggcgcggcccg

SEQ ID NO: 867088 - RNA, 21 nt, Human
uugccuguuuguuuucaaugg

SEQ ID NO: 867089 - RNA, 23 nt, Human
uuuuuugccuguuuguuuucaau

SEQ ID NO: 867090 - RNA, 19 nt, Human
aaccgggcagcccccaccc

SEQ ID NO: 867091 - RNA, 20 nt, Human
aaccgggcagcccccacccc

SEQ ID NO: 867092 - RNA, 20 nt, Human
agaugggaagacccagccuu

SEQ ID NO: 867093 - RNA, 20 nt, Human
aggccgggacccgccgggaa

SEQ ID NO: 867094 - RNA, 24 nt, Human
auagaccuuuuuucccaccaguuu

SEQ ID NO: 867095 - RNA, 22 nt, Human
auugcacuaaugcagacaguuu

SEQ ID NO: 867096 - RNA, 21 nt, Human
caaccgggcagcccccacccc

SEQ ID NO: 867097 - RNA, 18 nt, Human
cacccgcgcgagccccgc

SEQ ID NO: 867098 - RNA, 22 nt, Human
cagccuuugguauaaauaacuu

SEQ ID NO: 867099 - RNA, 25 nt, Human
ccagauauuuaaugcaagaugcaau

SEQ ID NO: 867100 - RNA, 22 nt, Human
cccaccccgcucgaacgccgag

SEQ ID NO: 867101 - RNA, 20 nt, Human
ccgcgcgagccccgccgccu

SEQ ID NO: 867102 - RNA, 25 nt, Human
cgcgagcacgcaggcgcgugcacgc

SEQ ID NO: 867103 - RNA, 23 nt, Human
gagagacaaagaaacucuacugg

SEQ ID NO: 867104 - RNA, 18 nt, Human
gcagaggccgggacccgc

SEQ ID NO: 867105 - RNA, 19 nt, Human
gcauuauuccuuuccagca

SEQ ID NO: 867106 - RNA, 24 nt, Human
uaaauaacuuacuuccacaaaaau

SEQ ID NO: 867107 - RNA, 19 nt, Human
uacuauagaccuuuuuucc

SEQ ID NO: 867108 - RNA, 24 nt, Human
uagauaagcuucucucuugugcuu

SEQ ID NO: 867109 - RNA, 24 nt, Human
uauauacuuuagaugagagacaaa

SEQ ID NO: 867110 - RNA, 25 nt, Human
ucucuugugcuuuuucuacuuuggg

SEQ ID NO: 867111 - RNA, 20 nt, Human
ugauagauaagcuucucucu

SEQ ID NO: 867112 - RNA, 22 nt, Human
ugggaagacccagccuuuggua

SEQ ID NO: 867113 - RNA, 22 nt, Human
ugugcuuuuucuacuuugggag

SEQ ID NO: 867114 - RNA, 25 nt, Human
uuagaugggaagacccagccuuugg

SEQ ID NO: 867115 - RNA, 19 nt, Human
uuccuuuccagcagcgcca

SEQ ID NO: 867116 - RNA, 19 nt, Human
uugauagauaagcuucucu

SEQ ID NO: 867117 - RNA, 21 nt, Human
uugauagauaagcuucucucu

SEQ ID NO: 867118 - RNA, 23 nt, Human
uugugcuuuuucuacuuugggag

SEQ ID NO: 867119 - RNA, 25 nt, Human
uuuacuauagaccuuuuuucccacc

SEQ ID NO: 867120 - RNA, 18 nt, Human
uuuuuuuuuuuuuuuuug

SEQ ID NO: 867121 - RNA, 25 nt, Human
uuuuuuuuuuuuuuuuuugaauuuu

SEQ ID NO: 867122 - RNA, 25 nt, Human
aaaagaaagaagaaaagagaaaaaa

SEQ ID NO: 867123 - RNA, 21 nt, Human
aaaagaggaaaagaaagaaga

SEQ ID NO: 867124 - RNA, 21 nt, Human
aaacccccuugagugcuccuc

SEQ ID NO: 867125 - RNA, 23 nt, Human
aaacugcaacggaccaccauuua

SEQ ID NO: 867126 - RNA, 23 nt, Human
aaagagaaaaaagaaaaaagggg

SEQ ID NO: 867127 - RNA, 23 nt, Human
aaaggaaaagacacagaguacau

SEQ ID NO: 867128 - RNA, 19 nt, Human
aagagcgugaaguucacag

SEQ ID NO: 867129 - RNA, 23 nt, Human
aauccugucccccugcucagaac

SEQ ID NO: 867130 - RNA, 24 nt, Human
acaacaauaaauaagugcagguac

SEQ ID NO: 867131 - RNA, 22 nt, Human
accagagccuuccuguaaacca

SEQ ID NO: 867132 - RNA, 21 nt, Human
accauuuacacaagucacacc

SEQ ID NO: 867133 - RNA, 19 nt, Human
agaaaagagaaaaaagaaa

SEQ ID NO: 867134 - RNA, 22 nt, Human
agaaagaagaaaagagaaaaaa

SEQ ID NO: 867135 - RNA, 23 nt, Human
agaaagaagaaaagagaaaaaag

SEQ ID NO: 867136 - RNA, 24 nt, Human
agaggaaaagaaagaagaaaagag

SEQ ID NO: 867137 - RNA, 19 nt, Human
agcuccuccacacacgccc

SEQ ID NO: 867138 - RNA, 18 nt, Human
aggaaaagaaagaagaaa

SEQ ID NO: 867139 - RNA, 21 nt, Human
aggcacaacucagccaggccu

SEQ ID NO: 867140 - RNA, 23 nt, Human
auggaacaguuaaaaaaacaaaa

SEQ ID NO: 867141 - RNA, 21 nt, Human
cacaccaaaaucaacugacac

SEQ ID NO: 867142 - RNA, 20 nt, Human
cacuugcuguaagauaagug

SEQ ID NO: 867143 - RNA, 22 nt, Human
cagcuccuccacacacgcccaa

SEQ ID NO: 867144 - RNA, 19 nt, Human
caguuaaaaaaacaaaaaa

SEQ ID NO: 867145 - RNA, 24 nt, Human
cauugccaugaaccauuuacacaa

SEQ ID NO: 867146 - RNA, 19 nt, Human
ccacucuaaaggaaaagac

SEQ ID NO: 867147 - RNA, 22 nt, Human
ccagagccuuccuguaaaccau

SEQ ID NO: 867148 - RNA, 23 nt, Human
ccagcccuuucuggaaccaggaa

SEQ ID NO: 867149 - RNA, 18 nt, Human
ccgaaacgauuaugcccc

SEQ ID NO: 867150 - RNA, 21 nt, Human
ccucaucaauccugucccccu

SEQ ID NO: 867151 - RNA, 20 nt, Human
ccugggaagaccaaaccccc

SEQ ID NO: 867152 - RNA, 22 nt, Human
ccugggaagaccaaacccccuu

SEQ ID NO: 867153 - RNA, 22 nt, Human
ccuuccuguaaaccaugagagc

SEQ ID NO: 867154 - RNA, 18 nt, Human
cgaaacgauuaugccccc

SEQ ID NO: 867155 - RNA, 18 nt, Human
cgggaggacccgacugcg

SEQ ID NO: 867156 - RNA, 18 nt, Human
cucaggcccucuuccugg

SEQ ID NO: 867157 - RNA, 24 nt, Human
cuccuccacacacgcccaacugag

SEQ ID NO: 867158 - RNA, 21 nt, Human
cuguaaaccaugagagcuuac

SEQ ID NO: 867159 - RNA, 19 nt, Human
cuguaagaauaguguucca

SEQ ID NO: 867160 - RNA, 19 nt, Human
cuguagcaguuccacaggc

SEQ ID NO: 867161 - RNA, 19 nt, Human
gaaaggcauucuguaagaa

SEQ ID NO: 867162 - RNA, 19 nt, Human
gcacaacucagccaggccu

SEQ ID NO: 867163 - RNA, 19 nt, Human
gcuccuccacacacgccca

SEQ ID NO: 867164 - RNA, 24 nt, Human
ggaaccagagccuuccuguaaacc

SEQ ID NO: 867165 - RNA, 20 nt, Human
gggcgggaggacccgacugc

SEQ ID NO: 867166 - RNA, 24 nt, Human
gggcgggaggacccgacugcgggg

SEQ ID NO: 867167 - RNA, 21 nt, Human
gucaaagucugggguugaaga

SEQ ID NO: 867168 - RNA, 28 nt, Human
uauacagucaaagucugggguugaagag

SEQ ID NO: 867169 - RNA, 23 nt, Human
ucacaccaaaaucaacugacaca

SEQ ID NO: 867170 - RNA, 26 nt, Human
ucagccaggccuaggaagcaacccaa

SEQ ID NO: 867171 - RNA, 25 nt, Human
ucaggcccucuuccugggaagacca

SEQ ID NO: 867172 - RNA, 22 nt, Human
uccacacacgcccaacugagca

SEQ ID NO: 867173 - RNA, 21 nt, Human
uccacaggcccucuuggcccu

SEQ ID NO: 867174 - RNA, 21 nt, Human
uccaucuuguacauaaagaaa

SEQ ID NO: 867175 - RNA, 24 nt, Human
ucuaaaggaaaagacacagaguac

SEQ ID NO: 867176 - RNA, 19 nt, Human
ucugggguugaagagcgug

SEQ ID NO: 867177 - RNA, 20 nt, Human
ugaaguucacagcuccucca

SEQ ID NO: 867178 - RNA, 24 nt, Human
uguaagaauaguguuccagaguua

SEQ ID NO: 867179 - RNA, 21 nt, Human
uuaggcacaacucagccaggc

SEQ ID NO: 867180 - RNA, 21 nt, Human
uuggggaaaaagaggaaaaga

SEQ ID NO: 867181 - RNA, 19 nt, Human
uuguacauaaagaaagaaa

SEQ ID NO: 867182 - RNA, 25 nt, Human
uuuuuuuuuuuuuuuuuuucuuuuu

SEQ ID NO: 867183 - RNA, 18 nt, Human
aaaaggagagccacccac

SEQ ID NO: 867184 - RNA, 20 nt, Human
aaacaaaaggagagccaccc

SEQ ID NO: 867185 - RNA, 19 nt, Human
aacucccgccucuggcacc

SEQ ID NO: 867186 - RNA, 20 nt, Human
aaggagccacggggcugggu

SEQ ID NO: 867187 - RNA, 22 nt, Human
aaugcaggcccugaugaggagg

SEQ ID NO: 867188 - RNA, 20 nt, Human
aaugggguguggacugagug

SEQ ID NO: 867189 - RNA, 19 nt, Human
acaaaccaaugaauaugac

SEQ ID NO: 867190 - RNA, 22 nt, Human
acccuaaggccaaucaaggagc

SEQ ID NO: 867191 - RNA, 19 nt, Human
accuucucagaaccucaaa

SEQ ID NO: 867192 - RNA, 19 nt, Human
acucuuugucaggucucag

SEQ ID NO: 867193 - RNA, 23 nt, Human
acuucgugcugggcccccccagg

SEQ ID NO: 867194 - RNA, 21 nt, Human
agaggggagcagcuguguccu

SEQ ID NO: 867195 - RNA, 20 nt, Human
agcagcagcugaguugccaa

SEQ ID NO: 867196 - RNA, 18 nt, Human
agcagcgggagagggaac

SEQ ID NO: 867197 - RNA, 22 nt, Human
agccaugaccucugaacccaga

SEQ ID NO: 867198 - RNA, 18 nt, Human
agccugcagccccugccu

SEQ ID NO: 867199 - RNA, 22 nt, Human
aggaggugaugggaaggucaag

SEQ ID NO: 867200 - RNA, 19 nt, Human
aggcagcagaacucacccu

SEQ ID NO: 867201 - RNA, 24 nt, Human
aggccagguucugaccuccaggug

SEQ ID NO: 867202 - RNA, 25 nt, Human
aggccagguucugaccuccaggugu

SEQ ID NO: 867203 - RNA, 19 nt, Human
aggcugagccugcagcccc

SEQ ID NO: 867204 - RNA, 22 nt, Human
aguuacaagaaaauaaagcuga

SEQ ID NO: 867205 - RNA, 24 nt, Human
auccuguuccccucccccagccca

SEQ ID NO: 867206 - RNA, 19 nt, Human
augaccucugaacccagaa

SEQ ID NO: 867207 - RNA, 26 nt, Human
caaaaggagagccacccacggagaua

SEQ ID NO: 867208 - RNA, 19 nt, Human
caaacccugaggcacucag

SEQ ID NO: 867209 - RNA, 22 nt, Human
caacucaagucuuggccugccu

SEQ ID NO: 867210 - RNA, 21 nt, Human
caccaccucugggaaccacca

SEQ ID NO: 867211 - RNA, 20 nt, Human
cacgcagcaguugggaaggu

SEQ ID NO: 867212 - RNA, 20 nt, Human
cacucccagcugcaaccaug

SEQ ID NO: 867213 - RNA, 22 nt, Human
cagaacacauggaagcagcagc

SEQ ID NO: 867214 - RNA, 21 nt, Human
caggcccucccugccagggug

SEQ ID NO: 867215 - RNA, 22 nt, Human
caggcccugaugaggaggugau

SEQ ID NO: 867216 - RNA, 20 nt, Human
cagguucugaccuccaggug

SEQ ID NO: 867217 - RNA, 21 nt, Human
cauccuguuccccucccccag

SEQ ID NO: 867218 - RNA, 23 nt, Human
caugaggggcacauagcaagcac

SEQ ID NO: 867219 - RNA, 23 nt, Human
ccaaggcccccuccacuauggac

SEQ ID NO: 867220 - RNA, 21 nt, Human
ccagaacacauggaagcagca

SEQ ID NO: 867221 - RNA, 22 nt, Human
ccagaacacauggaagcagcag

SEQ ID NO: 867222 - RNA, 23 nt, Human
ccagcacagggccaggcacacag

SEQ ID NO: 867223 - RNA, 21 nt, Human
ccagcccacucccagcugcaa

SEQ ID NO: 867224 - RNA, 23 nt, Human
ccagugcccagcacagggccagg

SEQ ID NO: 867225 - RNA, 19 nt, Human
ccaguuccccaaguagacc

SEQ ID NO: 867226 - RNA, 19 nt, Human
cccacauuuccaauggggu

SEQ ID NO: 867227 - RNA, 22 nt, Human
cccacucccagcugcaaccaug

SEQ ID NO: 867228 - RNA, 19 nt, Human
cccagcacagggccaggca

SEQ ID NO: 867229 - RNA, 30 nt, Human
ccccaaguagaccgcacuccuggccaccaa

SEQ ID NO: 867230 - RNA, 26 nt, Human
ccccgcccuaccuuucggccuccccc

SEQ ID NO: 867231 - RNA, 19 nt, Human
cccugagauaggagggccc

SEQ ID NO: 867232 - RNA, 20 nt, Human
cccugaggcacucagggcuc

SEQ ID NO: 867233 - RNA, 19 nt, Human
cccugccagggugguuggg

SEQ ID NO: 867234 - RNA, 18 nt, Human
ccuagcccugacacaggu

SEQ ID NO: 867235 - RNA, 25 nt, Human
ccucccccagcccacucccagcugc

SEQ ID NO: 867236 - RNA, 21 nt, Human
ccucugggaaccaccaucauc

SEQ ID NO: 867237 - RNA, 24 nt, Human
ccugaggcuuucaaaacccagaac

SEQ ID NO: 867238 - RNA, 19 nt, Human
ccugcagccccugccuccu

SEQ ID NO: 867239 - RNA, 21 nt, Human
ccuguuccccucccccagccc

SEQ ID NO: 867240 - RNA, 25 nt, Human
cgccucuggcaccugguuugugcuc

SEQ ID NO: 867241 - RNA, 22 nt, Human
cuauggacucugccaggugagg

SEQ ID NO: 867242 - RNA, 20 nt, Human
cucaauaaagauuuauuaca

SEQ ID NO: 867243 - RNA, 18 nt, Human
cucauugggaagauggga

SEQ ID NO: 867244 - RNA, 20 nt, Human
cuccacuauggacucugcca

SEQ ID NO: 867245 - RNA, 20 nt, Human
cuccuagcccugacacaggu

SEQ ID NO: 867246 - RNA, 20 nt, Human
cuggcaccugguuugugcuc

SEQ ID NO: 867247 - RNA, 18 nt, Human
cuguuccccucccccagc

SEQ ID NO: 867248 - RNA, 22 nt, Human
cuucacuuuccucaucgcuaaa

SEQ ID NO: 867249 - RNA, 19 nt, Human
cuucgugcugggccccccc

SEQ ID NO: 867250 - RNA, 22 nt, Human
cuugaccuucucagaaccucaa

SEQ ID NO: 867251 - RNA, 23 nt, Human
gaacccagaacacauggaagcag

SEQ ID NO: 867252 - RNA, 18 nt, Human
gaaccccugagagacccu

SEQ ID NO: 867253 - RNA, 21 nt, Human
gaacuccugcacacccuucaa

SEQ ID NO: 867254 - RNA, 20 nt, Human
gaagacagaggacaggccag

SEQ ID NO: 867255 - RNA, 24 nt, Human
gcacagggccaggcacacaguggu

SEQ ID NO: 867256 - RNA, 18 nt, Human
gcagaacucacccucagg

SEQ ID NO: 867257 - RNA, 20 nt, Human
gcagaacucacccucaggag

SEQ ID NO: 867258 - RNA, 21 nt, Human
gcccagcacagggccaggcac

SEQ ID NO: 867259 - RNA, 19 nt, Human
gccugagaauccagcugcu

SEQ ID NO: 867260 - RNA, 22 nt, Human
gcugcuggggcugcccuugacc

SEQ ID NO: 867261 - RNA, 21 nt, Human
ggcaccugguuugugcucuga

SEQ ID NO: 867262 - RNA, 18 nt, Human
ggcccagccugagaaucc

SEQ ID NO: 867263 - RNA, 19 nt, Human
ggcccccccaggugaagcu

SEQ ID NO: 867264 - RNA, 18 nt, Human
ggcugggaugugacuucg

SEQ ID NO: 867265 - RNA, 19 nt, Human
gggagcagcuguguccuug

SEQ ID NO: 867266 - RNA, 19 nt, Human
ggggcaugaaaaaaaacuc

SEQ ID NO: 867267 - RNA, 18 nt, Human
ggugacagcagcgaggaa

SEQ ID NO: 867268 - RNA, 23 nt, Human
ggugaugggaaggucaaggggcu

SEQ ID NO: 867269 - RNA, 22 nt, Human
ggugcacgggaacgucugcuga

SEQ ID NO: 867270 - RNA, 24 nt, Human
gugcugggcccccccaggugaagc

SEQ ID NO: 867271 - RNA, 18 nt, Human
guggguggcaagaagaca

SEQ ID NO: 867272 - RNA, 22 nt, Human
uaaaacaaaaggagagccaccc

SEQ ID NO: 867273 - RNA, 20 nt, Human
uaaggccaaucaaggagcca

SEQ ID NO: 867274 - RNA, 26 nt, Human
uagcaagcacuccauaaaugcaggcc

SEQ ID NO: 867275 - RNA, 21 nt, Human
ucagaccaggcccucccugcc

SEQ ID NO: 867276 - RNA, 19 nt, Human
ucagagugcugugggccug

SEQ ID NO: 867277 - RNA, 19 nt, Human
uccagugggaggaaggggg

SEQ ID NO: 867278 - RNA, 21 nt, Human
uccauugccaaacccugaggc

SEQ ID NO: 867279 - RNA, 19 nt, Human
ucccccagcccacucccag

SEQ ID NO: 867280 - RNA, 21 nt, Human
uccccucccccagcccacucc

SEQ ID NO: 867281 - RNA, 24 nt, Human
ucugccaggugaggggcccagccu

SEQ ID NO: 867282 - RNA, 19 nt, Human
ucugucuuaggcugacgca

SEQ ID NO: 867283 - RNA, 18 nt, Human
ugacagcagcgaggaagc

SEQ ID NO: 867284 - RNA, 25 nt, Human
ugacagcagcgaggaagcugugaag

SEQ ID NO: 867285 - RNA, 18 nt, Human
ugaccuccagguguggag

SEQ ID NO: 867286 - RNA, 24 nt, Human
ugcacgggaacgucugcugaugcc

SEQ ID NO: 867287 - RNA, 19 nt, Human
ugccagggugguuggggca

SEQ ID NO: 867288 - RNA, 22 nt, Human
ugccaggugaggggcccagccu

SEQ ID NO: 867289 - RNA, 20 nt, Human
ugccaugaggggcacauagc

SEQ ID NO: 867290 - RNA, 19 nt, Human
ugccaugcuggccggccug

SEQ ID NO: 867291 - RNA, 19 nt, Human
ugcccagcacagggccagg

SEQ ID NO: 867292 - RNA, 22 nt, Human
ugcccccugggcugggcauccu

SEQ ID NO: 867293 - RNA, 24 nt, Human
ugcugggcccccccaggugaagcu

SEQ ID NO: 867294 - RNA, 24 nt, Human
ugggaagguuggccugaggcuuuc

SEQ ID NO: 867295 - RNA, 19 nt, Human
ugggagggcugugccuguu

SEQ ID NO: 867296 - RNA, 19 nt, Human
uggggcugggaugugacuu

SEQ ID NO: 867297 - RNA, 20 nt, Human
uguccagugggaggaagggg

SEQ ID NO: 867298 - RNA, 20 nt, Human
uguugaggggugggggcugg

SEQ ID NO: 867299 - RNA, 19 nt, Human
uuccccaaguagaccgcac

SEQ ID NO: 867300 - RNA, 20 nt, Human
uucuguggccauacagugcu

SEQ ID NO: 867301 - RNA, 23 nt, Human
uuggggcaugaaaaaaaacucuu

SEQ ID NO: 867302 - RNA, 22 nt, Human
uuuucacagaugauggcuccug

SEQ ID NO: 867303 - RNA, 21 nt, Human
caccgcacgcuucccaccaac

SEQ ID NO: 867304 - RNA, 20 nt, Human
cauccgggaucccucgugcc

SEQ ID NO: 867305 - RNA, 19 nt, Human
ccaccaacuugauccacau

SEQ ID NO: 867306 - RNA, 19 nt, Human
ccgcacgcuucccaccaac

SEQ ID NO: 867307 - RNA, 20 nt, Human
ucccaccaacuugauccaca

SEQ ID NO: 867308 - RNA, 19 nt, Human
uuuuuuuuuuuuuuucuaa

SEQ ID NO: 867309 - RNA, 22 nt, Human
uuuuuuuuuuuuuuuuuuuucu

SEQ ID NO: 867310 - RNA, 22 nt, Human
aaaaacaccuucacagaaacau

SEQ ID NO: 867311 - RNA, 29 nt, Human
aaccaacuguaaaauacuuucagauccuu

SEQ ID NO: 867312 - RNA, 20 nt, Human
aaggcugaaggcugucugcu

SEQ ID NO: 867313 - RNA, 23 nt, Human
aagugucagcagguugggaggcc

SEQ ID NO: 867314 - RNA, 21 nt, Human
acaucuagauuguuugaccau

SEQ ID NO: 867315 - RNA, 22 nt, Human
accaaugucaauguuagucuca

SEQ ID NO: 867316 - RNA, 24 nt, Human
acuuugagaaccacuagugcaaag

SEQ ID NO: 867317 - RNA, 18 nt, Human
aggccauuuacaacaugg

SEQ ID NO: 867318 - RNA, 18 nt, Human
caagaucaaagugucagc

SEQ ID NO: 867319 - RNA, 19 nt, Human
cacauccauggguuccaca

SEQ ID NO: 867320 - RNA, 26 nt, Human
caggcaaccugcuuuacucaaagucc

SEQ ID NO: 867321 - RNA, 19 nt, Human
caggugaugcugcugccac

SEQ ID NO: 867322 - RNA, 22 nt, Human
cauccaaaaacaccuucacaga

SEQ ID NO: 867323 - RNA, 20 nt, Human
cauccaaaaacaccuucacu

SEQ ID NO: 867324 - RNA, 21 nt, Human
cauccauggauucaaccaacu

SEQ ID NO: 867325 - RNA, 23 nt, Human
ccaaaaacaccuucacagaaaca

SEQ ID NO: 867326 - RNA, 19 nt, Human
ccaagaucaaagugucagc

SEQ ID NO: 867327 - RNA, 19 nt, Human
ccucagucuuugcucuguu

SEQ ID NO: 867328 - RNA, 20 nt, Human
gaaggcugucugcuggugga

SEQ ID NO: 867329 - RNA, 23 nt, Human
gaggugacgcugcaguucaaggc

SEQ ID NO: 867330 - RNA, 19 nt, Human
gcagagauucugauagguc

SEQ ID NO: 867331 - RNA, 21 nt, Human
gcugccacugguccagggccc

SEQ ID NO: 867332 - RNA, 19 nt, Human
ggcccagggaagaggugac

SEQ ID NO: 867333 - RNA, 23 nt, Human
uaaaauacuuucagauccuugaa

SEQ ID NO: 867334 - RNA, 26 nt, Human
ucauccaaaaacaccuucacagaaac

SEQ ID NO: 867335 - RNA, 24 nt, Human
uccaaaaacaccuucacagaaaca

SEQ ID NO: 867336 - RNA, 23 nt, Human
uccuucacauccauggguuccac

SEQ ID NO: 867337 - RNA, 24 nt, Human
ucugccaggcaaacagcucugccc

SEQ ID NO: 867338 - RNA, 25 nt, Human
uguuccugcagagauuccucgucga

SEQ ID NO: 867339 - RNA, 23 nt, Human
uuauggcacgcaggcaaccugcu

SEQ ID NO: 867340 - RNA, 24 nt, Human
uucaaaauguuccugcagagauuc

SEQ ID NO: 867341 - RNA, 18 nt, Human
uuucucacaaguucccag

SEQ ID NO: 867342 - RNA, 22 nt, Human
uuucucaggggaccucagucuu

SEQ ID NO: 867343 - RNA, 20 nt, Human
uuugcuccuccucugccagg

SEQ ID NO: 867344 - RNA, 19 nt, Human
uuuuuuuuuuuuguacaga

SEQ ID NO: 867345 - RNA, 21 nt, Human
uuuuuuuuuuuuuuuguacag

SEQ ID NO: 867346 - RNA, 19 nt, Human
uuuuuuuuuuuuuuuuugu

SEQ ID NO: 867347 - RNA, 20 nt, Human
uuuuuuuuuuuuuuuuuugg

SEQ ID NO: 867348 - RNA, 23 nt, Human
aagcuggagccaauugggaggga

SEQ ID NO: 867349 - RNA, 23 nt, Human
aaggaguugacccauuuagagcc

SEQ ID NO: 867350 - RNA, 22 nt, Human
aaucaaaaaaagagcuguccag

SEQ ID NO: 867351 - RNA, 20 nt, Human
acagcuccucucaccuccuc

SEQ ID NO: 867352 - RNA, 21 nt, Human
acgaaggcuggcaaagaucca

SEQ ID NO: 867353 - RNA, 18 nt, Human
agccaaugccgugcgagc

SEQ ID NO: 867354 - RNA, 21 nt, Human
aggcagggacaguuuggggcc

SEQ ID NO: 867355 - RNA, 24 nt, Human
aggcggaaaacaaaggaguugacc

SEQ ID NO: 867356 - RNA, 19 nt, Human
agggccccugccccccacc

SEQ ID NO: 867357 - RNA, 24 nt, Human
agguggggggcgaggggcgggagc

SEQ ID NO: 867358 - RNA, 21 nt, Human
aucaugaccacaguaaacgaa

SEQ ID NO: 867359 - RNA, 23 nt, Human
aucccguuauccugagucccuca

SEQ ID NO: 867360 - RNA, 20 nt, Human
auccgaaccaguugacaagg

SEQ ID NO: 867361 - RNA, 24 nt, Human
auggaaccaaugaaagggggugcc

SEQ ID NO: 867362 - RNA, 23 nt, Human
auuggcagaggcgggacaaucuu

SEQ ID NO: 867363 - RNA, 21 nt, Human
caaaaaaagagcuguccagcg

SEQ ID NO: 867364 - RNA, 24 nt, Human
cacgcccccaggaagcuggagcca

SEQ ID NO: 867365 - RNA, 20 nt, Human
cacucucucccccacaccag

SEQ ID NO: 867366 - RNA, 24 nt, Human
ccaaccgggcuuaaucagcccaua

SEQ ID NO: 867367 - RNA, 18 nt, Human
cccaaucgggaaacggga

SEQ ID NO: 867368 - RNA, 23 nt, Human
cccacaauaaacuucuucgacaa

SEQ ID NO: 867369 - RNA, 18 nt, Human
ccccaaccccucacucuc

SEQ ID NO: 867370 - RNA, 19 nt, Human
ccccaggaagcuggagcca

SEQ ID NO: 867371 - RNA, 20 nt, Human
ccccuaagaaaaauggcccc

SEQ ID NO: 867372 - RNA, 19 nt, Human
ccccucacucucuccccca

SEQ ID NO: 867373 - RNA, 24 nt, Human
cccucacucucucccccacaccag

SEQ ID NO: 867374 - RNA, 18 nt, Human
cccucagugccucuugug

SEQ ID NO: 867375 - RNA, 21 nt, Human
cccucagugccucuuguggug

SEQ ID NO: 867376 - RNA, 18 nt, Human
cccuccaaccugcuccca

SEQ ID NO: 867377 - RNA, 18 nt, Human
cccucccaacugccgauc

SEQ ID NO: 867378 - RNA, 21 nt, Human
ccgcacacuccgccucccuua

SEQ ID NO: 867379 - RNA, 23 nt, Human
ccgccuagagcauuuccauuugc

SEQ ID NO: 867380 - RNA, 18 nt, Human
ccgggaguggggcggggg

SEQ ID NO: 867381 - RNA, 21 nt, Human
ccguucggcucuuccagcugu

SEQ ID NO: 867382 - RNA, 21 nt, Human
ccuaagaaaaauggccccgcc

SEQ ID NO: 867383 - RNA, 20 nt, Human
ccuuggguggacgagggccc

SEQ ID NO: 867384 - RNA, 24 nt, Human
cgaucccccaaccccucacucucu

SEQ ID NO: 867385 - RNA, 21 nt, Human
cgcggcaggucgugggcugga

SEQ ID NO: 867386 - RNA, 26 nt, Human
cggcgcggcaggucgugggggacgcc

SEQ ID NO: 867387 - RNA, 27 nt, Human
cguagccagcauggccggcccggcgcc

SEQ ID NO: 867388 - RNA, 21 nt, Human
cucagagcgccccucccaacu

SEQ ID NO: 867389 - RNA, 23 nt, Human
cuguggagguggggggcgagggg

SEQ ID NO: 867390 - RNA, 18 nt, Human
gaccugacgucccugacc

SEQ ID NO: 867391 - RNA, 21 nt, Human
gagcuuagaacucagcgagcc

SEQ ID NO: 867392 - RNA, 19 nt, Human
gagguggggggcgaggggc

SEQ ID NO: 867393 - RNA, 19 nt, Human
gcaggucgugggcuggaag

SEQ ID NO: 867394 - RNA, 20 nt, Human
gccaauucugggaagaggag

SEQ ID NO: 867395 - RNA, 18 nt, Human
gccacaggggcuucaucc

SEQ ID NO: 867396 - RNA, 21 nt, Human
gccccgggaguggggcggggg

SEQ ID NO: 867397 - RNA, 21 nt, Human
gccccucccaacugccgaucc

SEQ ID NO: 867398 - RNA, 26 nt, Human
gcgcaguugccccgccuccucuccgc

SEQ ID NO: 867399 - RNA, 24 nt, Human
gcuucguuucugggggcacugacg

SEQ ID NO: 867400 - RNA, 22 nt, Human
ggaaaacaaaggaguugaccca

SEQ ID NO: 867401 - RNA, 21 nt, Human
ggauggauggaaccaaugaaa

SEQ ID NO: 867402 - RNA, 21 nt, Human
ggcagcauuucuugcuucggu

SEQ ID NO: 867403 - RNA, 18 nt, Human
ggccggagagugagggcc

SEQ ID NO: 867404 - RNA, 20 nt, Human
ggccggcccggcgccgucac

SEQ ID NO: 867405 - RNA, 18 nt, Human
ggccggucccggaucggc

SEQ ID NO: 867406 - RNA, 20 nt, Human
ggcggaaaacaaaggaguug

SEQ ID NO: 867407 - RNA, 19 nt, Human
ggcggacgcggcccggggc

SEQ ID NO: 867408 - RNA, 19 nt, Human
gggauggagccaaugccgu

SEQ ID NO: 867409 - RNA, 20 nt, Human
ggggauggagccaaugccgu

SEQ ID NO: 867410 - RNA, 20 nt, Human
ggggauggauggaaccaaug

SEQ ID NO: 867411 - RNA, 26 nt, Human
guagccagcauggccggcccggcgcc

SEQ ID NO: 867412 - RNA, 24 nt, Human
uagaacucagcgagccaaucccuu

SEQ ID NO: 867413 - RNA, 23 nt, Human
uagaaggaaucugucgcuaggcg

SEQ ID NO: 867414 - RNA, 19 nt, Human
ucaggaaaagcggacggug

SEQ ID NO: 867415 - RNA, 19 nt, Human
ucagggaacaaguugucgg

SEQ ID NO: 867416 - RNA, 19 nt, Human
ucccccaaccccucacucu

SEQ ID NO: 867417 - RNA, 20 nt, Human
ucuugugguguacagcuccu

SEQ ID NO: 867418 - RNA, 20 nt, Human
ugacucagaaauucguccgg

SEQ ID NO: 867419 - RNA, 19 nt, Human
ugagggccccugcccccca

SEQ ID NO: 867420 - RNA, 24 nt, Human
uggaaccaaugaaagggggugcca

SEQ ID NO: 867421 - RNA, 21 nt, Human
uggcaaagauccaacacggca

SEQ ID NO: 867422 - RNA, 22 nt, Human
uggcaaagauccaacacggcag

SEQ ID NO: 867423 - RNA, 19 nt, Human
uggcagaggcgggacaauc

SEQ ID NO: 867424 - RNA, 24 nt, Human
uggcagaggcgggacaaucuuggg

SEQ ID NO: 867425 - RNA, 18 nt, Human
ugggagggagaacucagg

SEQ ID NO: 867426 - RNA, 22 nt, Human
uggggccaucccugaggggguc

SEQ ID NO: 867427 - RNA, 22 nt, Human
uggggggcgaggggcgggagcu

SEQ ID NO: 867428 - RNA, 18 nt, Human
ugguaccauccuggaugc

SEQ ID NO: 867429 - RNA, 19 nt, Human
ugucgggacgugggcaaag

SEQ ID NO: 867430 - RNA, 23 nt, Human
uuaaucucagagcgccccuccca

SEQ ID NO: 867431 - RNA, 22 nt, Human
uugccccuaagaaaaauggccc

SEQ ID NO: 867432 - RNA, 21 nt, Human
uuugagccaaucaaaaaaaga

SEQ ID NO: 867433 - RNA, 20 nt, Human
aaaagaugagggaggggagu

SEQ ID NO: 867434 - RNA, 22 nt, Human
accguaauggauucaauuucaa

SEQ ID NO: 867435 - RNA, 23 nt, Human
accuccuugcuuucacugucagc

SEQ ID NO: 867436 - RNA, 19 nt, Human
agaagaaaauaaaugggga

SEQ ID NO: 867437 - RNA, 22 nt, Human
agcaggagggacuccuucaggg

SEQ ID NO: 867438 - RNA, 22 nt, Human
aggcugcacucaaucaugggcc

SEQ ID NO: 867439 - RNA, 19 nt, Human
agggugcacuguggcaggg

SEQ ID NO: 867440 - RNA, 22 nt, Human
agugagacacucauuuucaaac

SEQ ID NO: 867441 - RNA, 24 nt, Human
agugaugguggcagguccaagaga

SEQ ID NO: 867442 - RNA, 20 nt, Human
caaacaagucucccuugaga

SEQ ID NO: 867443 - RNA, 23 nt, Human
cacucauuuucaaacaagucucc

SEQ ID NO: 867444 - RNA, 21 nt, Human
cacugcuucgcuccacagaag

SEQ ID NO: 867445 - RNA, 19 nt, Human
cacugucagcaggagggac

SEQ ID NO: 867446 - RNA, 21 nt, Human
cagugcugcccaccuccuugc

SEQ ID NO: 867447 - RNA, 19 nt, Human
ccaccucccucuuuuuuuu

SEQ ID NO: 867448 - RNA, 24 nt, Human
ccaucccaauuccaauccugaccc

SEQ ID NO: 867449 - RNA, 26 nt, Human
cccacccugcuuuauuuacaacacgc

SEQ ID NO: 867450 - RNA, 19 nt, Human
ccggugccgccucuagugc

SEQ ID NO: 867451 - RNA, 25 nt, Human
cgcccccuccccuccucccgguccg

SEQ ID NO: 867452 - RNA, 20 nt, Human
cggccgauauuauuaaaaac

SEQ ID NO: 867453 - RNA, 22 nt, Human
cggcgccccccuccccggagcc

SEQ ID NO: 867454 - RNA, 28 nt, Human
cugaggacccugaggcucaguucccaaa

SEQ ID NO: 867455 - RNA, 21 nt, Human
cugucagcaggagggacuccu

SEQ ID NO: 867456 - RNA, 24 nt, Human
cugucccauuccaucccaauucca

SEQ ID NO: 867457 - RNA, 21 nt, Human
gacaguauccaagcuccaggg

SEQ ID NO: 867458 - RNA, 18 nt, Human
gaguccgcuagccgcugc

SEQ ID NO: 867459 - RNA, 19 nt, Human
gauguccucguccaugacc

SEQ ID NO: 867460 - RNA, 19 nt, Human
gccucaguuccuugcauuu

SEQ ID NO: 867461 - RNA, 22 nt, Human
gcgccccccuccccggagccgg

SEQ ID NO: 867462 - RNA, 22 nt, Human
ggaggggagugcuaauauuuac

SEQ ID NO: 867463 - RNA, 21 nt, Human
ggcaauaaaagaagucgggga

SEQ ID NO: 867464 - RNA, 25 nt, Human
ggcaucuccaucuuggcuuguuuca

SEQ ID NO: 867465 - RNA, 18 nt, Human
gggcaucuggccucaguu

SEQ ID NO: 867466 - RNA, 20 nt, Human
gggccuaggagccucagggg

SEQ ID NO: 867467 - RNA, 26 nt, Human
gguccggcgccccccuccccggagcc

SEQ ID NO: 867468 - RNA, 21 nt, Human
uagaagaaaauaaauggggag

SEQ ID NO: 867469 - RNA, 24 nt, Human
uaggcugaggacccugaggcucag

SEQ ID NO: 867470 - RNA, 18 nt, Human
uaggggaaguccaaaauu

SEQ ID NO: 867471 - RNA, 22 nt, Human
uaggggaaguccaaaauuaaaa

SEQ ID NO: 867472 - RNA, 19 nt, Human
uaguacuccaccuuugagc

SEQ ID NO: 867473 - RNA, 27 nt, Human
ucacuggagcuggcaucuccaucuugg

SEQ ID NO: 867474 - RNA, 20 nt, Human
uccaaaauuaaaaauacaac

SEQ ID NO: 867475 - RNA, 21 nt, Human
uccaauccugacccagaaagu

SEQ ID NO: 867476 - RNA, 24 nt, Human
ucccauccccaaccguaauggauu

SEQ ID NO: 867477 - RNA, 23 nt, Human
ucccaugagucaucaccugauuc

SEQ ID NO: 867478 - RNA, 24 nt, Human
ucccgguccggcgccccccucccc

SEQ ID NO: 867479 - RNA, 21 nt, Human
ucuagugcucgaugcucccac

SEQ ID NO: 867480 - RNA, 21 nt, Human
ucugcuuuccuuccucacuuc

SEQ ID NO: 867481 - RNA, 23 nt, Human
ugaaauagaagaaaagaugaggg

SEQ ID NO: 867482 - RNA, 18 nt, Human
ugaggacccugaggcuca

SEQ ID NO: 867483 - RNA, 19 nt, Human
ugcauuucuggcaauaaaa

SEQ ID NO: 867484 - RNA, 21 nt, Human
uggauccacgucccacacagg

SEQ ID NO: 867485 - RNA, 19 nt, Human
ugggaaagugagacacuca

SEQ ID NO: 867486 - RNA, 18 nt, Human
uggucuucuuaaucuuag

SEQ ID NO: 867487 - RNA, 18 nt, Human
uuccuuccucacuuggcc

SEQ ID NO: 867488 - RNA, 20 nt, Human
uuuuuuuuuuuuaaagagcc

SEQ ID NO: 867489 - RNA, 19 nt, Human
uuuuuuuuuuuuuuuuuaa

SEQ ID NO: 867490 - RNA, 18 nt, Human
aaagucccccgggccccc

SEQ ID NO: 867491 - RNA, 20 nt, Human
accagcccgggcucggccuc

SEQ ID NO: 867492 - RNA, 21 nt, Human
acggcgccggacacacuaccg

SEQ ID NO: 867493 - RNA, 19 nt, Human
acguuacagaacaagcagc

SEQ ID NO: 867494 - RNA, 18 nt, Human
caccagcccgggcucggc

SEQ ID NO: 867495 - RNA, 20 nt, Human
caguggaagaaaugcccgcg

SEQ ID NO: 867496 - RNA, 19 nt, Human
ccacaguccucccgaucug

SEQ ID NO: 867497 - RNA, 20 nt, Human
cguuacagaacaagcagcga

SEQ ID NO: 867498 - RNA, 23 nt, Human
gaacaagcagcgaauucaaccac

SEQ ID NO: 867499 - RNA, 21 nt, Human
gggcucggccucucgcuuucu

SEQ ID NO: 867500 - RNA, 19 nt, Human
uaaaaaagucccccgggcc

SEQ ID NO: 867501 - RNA, 23 nt, Human
uaacguuacagaacaagcagcga

SEQ ID NO: 867502 - RNA, 19 nt, Human
uaaggaagucuacauggug

SEQ ID NO: 867503 - RNA, 27 nt, Human
ucaaccacuuaagaacuaaggaagucu

SEQ ID NO: 867504 - RNA, 23 nt, Human
uccucccgaucugguuuuuuaaa

SEQ ID NO: 867505 - RNA, 23 nt, Human
ucucacgcuucauuuaaucugaa

SEQ ID NO: 867506 - RNA, 20 nt, Human
uggaagaaaugcccgcggcg

SEQ ID NO: 867507 - RNA, 21 nt, Human
uuaagaacuaaggaagucuac

SEQ ID NO: 867508 - RNA, 21 nt, Human
uuacaggcucuccgucuucag

SEQ ID NO: 867509 - RNA, 19 nt, Human
uuuuugucucacgcuucau

SEQ ID NO: 867510 - RNA, 19 nt, Human
uuuuuuuuuuuuuuugucu

SEQ ID NO: 867511 - RNA, 18 nt, Human
uuuuuuuuuuuuuuuuug

SEQ ID NO: 867512 - RNA, 19 nt, Human
uuuuuuuuuuuuuuuuugu

SEQ ID NO: 867513 - RNA, 24 nt, Human
uuuuuuuuuuuuuuuuuugucuca

SEQ ID NO: 867514 - RNA, 18 nt, Human
aauaaaaggacacccaga

SEQ ID NO: 867515 - RNA, 23 nt, Human
aauaaaaggacacccagaagaaa

SEQ ID NO: 867516 - RNA, 21 nt, Human
acccagaagaaacucacucag

SEQ ID NO: 867517 - RNA, 20 nt, Human
acccagaauaaaaggacacc

SEQ ID NO: 867518 - RNA, 20 nt, Human
acuccaccuccuuccuucaa

SEQ ID NO: 867519 - RNA, 23 nt, Human
agaauaaaaggacacccagaaga

SEQ ID NO: 867520 - RNA, 20 nt, Human
aggaacaaaagagaacacgg

SEQ ID NO: 867521 - RNA, 20 nt, Human
agggaggugggggguugggg

SEQ ID NO: 867522 - RNA, 19 nt, Human
aggugggggguugggggcg

SEQ ID NO: 867523 - RNA, 24 nt, Human
agucaggcugaauuuauucagaau

SEQ ID NO: 867524 - RNA, 25 nt, Human
ccagaauaaaaggacacccagaaga

SEQ ID NO: 867525 - RNA, 26 nt, Human
cccgggccgagcaccgcgccuccccc

SEQ ID NO: 867526 - RNA, 18 nt, Human
cccggggccgggagaggg

SEQ ID NO: 867527 - RNA, 22 nt, Human
ccucccgcucgcgcucccgggc

SEQ ID NO: 867528 - RNA, 18 nt, Human
cgacagcagcggaggcug

SEQ ID NO: 867529 - RNA, 21 nt, Human
cgacagcagcggaggcugccc

SEQ ID NO: 867530 - RNA, 21 nt, Human
cucccgggccgagcaccgcgc

SEQ ID NO: 867531 - RNA, 24 nt, Human
cugccccggcugcagcggcugugg

SEQ ID NO: 867532 - RNA, 24 nt, Human
cugcgggucucugcuccucccgcu

SEQ ID NO: 867533 - RNA, 21 nt, Human
cuuagaggagccgcaggugcc

SEQ ID NO: 867534 - RNA, 21 nt, Human
gaacacggacucccgcucccu

SEQ ID NO: 867535 - RNA, 21 nt, Human
gcaggaggggguggcaucucc

SEQ ID NO: 867536 - RNA, 18 nt, Human
ggccgggagagggcaagc

SEQ ID NO: 867537 - RNA, 19 nt, Human
ggugggggguugggggcga

SEQ ID NO: 867538 - RNA, 18 nt, Human
gugggggguugggggcga

SEQ ID NO: 867539 - RNA, 22 nt, Human
uaaaaggacacccagaagaaac

SEQ ID NO: 867540 - RNA, 19 nt, Human
ucacucagggagguggggg

SEQ ID NO: 867541 - RNA, 26 nt, Human
ucacucagggaggugggggguugggg

SEQ ID NO: 867542 - RNA, 19 nt, Human
ucagaggaggcgacagcag

SEQ ID NO: 867543 - RNA, 23 nt, Human
ucccgcucccuacccagaauaaa

SEQ ID NO: 867544 - RNA, 21 nt, Human
ucccggagucccggggccggg

SEQ ID NO: 867545 - RNA, 19 nt, Human
ucccggcugcgggucucug

SEQ ID NO: 867546 - RNA, 18 nt, Human
ucuuucauuauuugcaca

SEQ ID NO: 867547 - RNA, 19 nt, Human
ugcacaggaacaaaagaga

SEQ ID NO: 867548 - RNA, 21 nt, Human
ugcacaggaacaaaagagaac

SEQ ID NO: 867549 - RNA, 22 nt, Human
ugcacaggaacaaaagagaaca

SEQ ID NO: 867550 - RNA, 23 nt, Human
ugcagcggcuguggcugccgagg

SEQ ID NO: 867551 - RNA, 23 nt, Human
ugcuggggcccgcgcuccggggg

SEQ ID NO: 867552 - RNA, 20 nt, Human
ugcuggggcccgcgcugcug

SEQ ID NO: 867553 - RNA, 27 nt, Human
ugcuggggcccgcgcugcugccgcgga

SEQ ID NO: 867554 - RNA, 21 nt, Human
uggaagaacaaugcaggaggg

SEQ ID NO: 867555 - RNA, 18 nt, Human
ugggggguugggggcgag

SEQ ID NO: 867556 - RNA, 19 nt, Human
uuuuuuuuuuuuugggggu

SEQ ID NO: 867557 - RNA, 20 nt, Human
uuuuuuuuuuuuuuuggggg

SEQ ID NO: 867558 - RNA, 18 nt, Human
uuuuuuuuuuuuuuuuug

SEQ ID NO: 867559 - RNA, 21 nt, Human
uuuuuuuuuuuuuuuuugggg

SEQ ID NO: 867560 - RNA, 22 nt, Human
uuuuuuuuuuuuuuuuuggggg

SEQ ID NO: 867561 - RNA, 25 nt, Human
uuuuuuuuuuuuuuuuuggggguga

SEQ ID NO: 867562 - RNA, 19 nt, Human
aagcaccaggaccacagaa

SEQ ID NO: 867563 - RNA, 19 nt, Human
acgcaccagggccgggggc

SEQ ID NO: 867564 - RNA, 19 nt, Human
agagggaggcacucuccgu

SEQ ID NO: 867565 - RNA, 23 nt, Human
agcugcuguugucuucacagccg

SEQ ID NO: 867566 - RNA, 24 nt, Human
caacaugaggaaacugaggccaga

SEQ ID NO: 867567 - RNA, 22 nt, Human
cacgcaccacgcaccacgcacc

SEQ ID NO: 867568 - RNA, 22 nt, Human
cacgcaccacgcaccgcgcaca

SEQ ID NO: 867569 - RNA, 21 nt, Human
cacgccacgccacuccacgcc

SEQ ID NO: 867570 - RNA, 22 nt, Human
cacgccacgccacuccacgccc

SEQ ID NO: 867571 - RNA, 23 nt, Human
cacgccacuccacgccacgccac

SEQ ID NO: 867572 - RNA, 20 nt, Human
ccacgcaccgcgcacagccg

SEQ ID NO: 867573 - RNA, 22 nt, Human
ccacgccacgccacuccacgcc

SEQ ID NO: 867574 - RNA, 22 nt, Human
ccacgccacgccacuccacgcc

SEQ ID NO: 867575 - RNA, 24 nt, Human
ccacgccacgccacuccacgcccc

SEQ ID NO: 867576 - RNA, 18 nt, Human
ccacuguccagccccagg

SEQ ID NO: 867577 - RNA, 18 nt, Human
cccauguggccuuagggu

SEQ ID NO: 867578 - RNA, 21 nt, Human
cccgccacgccacgccacucc

SEQ ID NO: 867579 - RNA, 22 nt, Human
cccgccacgccacgccacucca

SEQ ID NO: 867580 - RNA, 20 nt, Human
cccgcgccgcgagaccccgc

SEQ ID NO: 867581 - RNA, 21 nt, Human
ccgcaggcugguaggguccac

SEQ ID NO: 867582 - RNA, 19 nt, Human
ccgcgccacgugccgccgc

SEQ ID NO: 867583 - RNA, 20 nt, Human
ccgcgccacgugccgccgcu

SEQ ID NO: 867584 - RNA, 20 nt, Human
ccgcgccgcgagaccccgcc

SEQ ID NO: 867585 - RNA, 18 nt, Human
ccggccauaccaccuucc

SEQ ID NO: 867586 - RNA, 23 nt, Human
ccuggccugagcccauguggccg

SEQ ID NO: 867587 - RNA, 24 nt, Human
cgccgcgagaccccgccacgccac

SEQ ID NO: 867588 - RNA, 26 nt, Human
cgcgagaccccgccacgccacgccac

SEQ ID NO: 867589 - RNA, 26 nt, Human
cgcugaggcccccaggcuggcgguga

SEQ ID NO: 867590 - RNA, 22 nt, Human
cggccucugccccauaagggag

SEQ ID NO: 867591 - RNA, 22 nt, Human
cgugucugaagacuugccucac

SEQ ID NO: 867592 - RNA, 19 nt, Human
cuccacgccacgccacucc

SEQ ID NO: 867593 - RNA, 21 nt, Human
cuuagcaucggccucagcugc

SEQ ID NO: 867594 - RNA, 22 nt, Human
cuucacagccggccauaccacc

SEQ ID NO: 867595 - RNA, 23 nt, Human
gagcagccagaggccuuugaggg

SEQ ID NO: 867596 - RNA, 22 nt, Human
gagccccuuggucccgucccag

SEQ ID NO: 867597 - RNA, 23 nt, Human
gcaccagggccgggggcagggag

SEQ ID NO: 867598 - RNA, 25 nt, Human
gccacuccacgccccgcacccgcgc

SEQ ID NO: 867599 - RNA, 18 nt, Human
gccgcgagaccccgccac

SEQ ID NO: 867600 - RNA, 19 nt, Human
ggccugagcccauguggcc

SEQ ID NO: 867601 - RNA, 21 nt, Human
gggaggcacucuccguccaca

SEQ ID NO: 867602 - RNA, 22 nt, Human
gggggcucugggaacaggaggg

SEQ ID NO: 867603 - RNA, 21 nt, Human
gugucugaagacuugccucac

SEQ ID NO: 867604 - RNA, 19 nt, Human
uccacgccacgccacucca

SEQ ID NO: 867605 - RNA, 19 nt, Human
uccacgccacgccacucca

SEQ ID NO: 867606 - RNA, 21 nt, Human
uccacgccacgccacuccacg

SEQ ID NO: 867607 - RNA, 24 nt, Human
ucguaucacgcaccacgcaccacg

SEQ ID NO: 867608 - RNA, 18 nt, Human
ucuccguccacagcuccg

SEQ ID NO: 867609 - RNA, 24 nt, Human
ucugaagacuugccucacuguccu

SEQ ID NO: 867610 - RNA, 20 nt, Human
ugaggaaacugaggccagag

SEQ ID NO: 867611 - RNA, 24 nt, Human
ugaggaaacugaggccagagggag

SEQ ID NO: 867612 - RNA, 18 nt, Human
ugaggggaugaaggccug

SEQ ID NO: 867613 - RNA, 22 nt, Human
ugcacggggcggucucgggggc

SEQ ID NO: 867614 - RNA, 22 nt, Human
uggaagcaccaggaccacagaa

SEQ ID NO: 867615 - RNA, 24 nt, Human
uggaagcaccaggaccacagaaca

SEQ ID NO: 867616 - RNA, 18 nt, Human
ugggaacaggagggucag

SEQ ID NO: 867617 - RNA, 18 nt, Human
ugggcggccucugcccca

SEQ ID NO: 867618 - RNA, 21 nt, Human
uguugucuucacagccggcca

SEQ ID NO: 867619 - RNA, 21 nt, Human
aacuacaaagcugaaaguuuc

SEQ ID NO: 867620 - RNA, 22 nt, Human
aggguaagauagaagaggagaa

SEQ ID NO: 867621 - RNA, 20 nt, Human
cacugcggccacugcagggc

SEQ ID NO: 867622 - RNA, 25 nt, Human
cauggaaaacacugaaguugcccug

SEQ ID NO: 867623 - RNA, 21 nt, Human
ccacugcagggccgguccguc

SEQ ID NO: 867624 - RNA, 18 nt, Human
ccccccgccgccagccgc

SEQ ID NO: 867625 - RNA, 24 nt, Human
ccucaaggcgggaugucgggagga

SEQ ID NO: 867626 - RNA, 21 nt, Human
cgaggcgagagcgggcggagg

SEQ ID NO: 867627 - RNA, 20 nt, Human
cgccgccagccgcgauuccg

SEQ ID NO: 867628 - RNA, 22 nt, Human
cgccucagccuccucaaggcgg

SEQ ID NO: 867629 - RNA, 22 nt, Human
cgcgauuccgccucagccuccu

SEQ ID NO: 867630 - RNA, 23 nt, Human
cucaaggcgggaugucgggagga

SEQ ID NO: 867631 - RNA, 21 nt, Human
cugaucugcuuuaaauaacau

SEQ ID NO: 867632 - RNA, 21 nt, Human
gagggccggguccgggcuguc

SEQ ID NO: 867633 - RNA, 18 nt, Human
guaagauagaagaggaga

SEQ ID NO: 867634 - RNA, 23 nt, Human
gucgggaggagaggcgacugccu

SEQ ID NO: 867635 - RNA, 24 nt, Human
uacauauccacauggaaaacacug

SEQ ID NO: 867636 - RNA, 20 nt, Human
uagcggcacugccagaggcg

SEQ ID NO: 867637 - RNA, 22 nt, Human
uccacauggaaaacacugaagu

SEQ ID NO: 867638 - RNA, 19 nt, Human
uccgggcugucacugcggc

SEQ ID NO: 867639 - RNA, 21 nt, Human
uccgggcugucacugcggcca

SEQ ID NO: 867640 - RNA, 20 nt, Human
ugagggaaagcaauagcaug

SEQ ID NO: 867641 - RNA, 21 nt, Human
ugaggguaagauagaagagga

SEQ ID NO: 867642 - RNA, 21 nt, Human
uuuacauauccacauggaaaa

SEQ ID NO: 867643 - RNA, 18 nt, Human
aaaaggucccugugcuuc

SEQ ID NO: 867644 - RNA, 23 nt, Human
aggaggcccuggggucagaggac

SEQ ID NO: 867645 - RNA, 19 nt, Human
agggaguuuccagccccuc

SEQ ID NO: 867646 - RNA, 18 nt, Human
aggucuuuccuggggcug

SEQ ID NO: 867647 - RNA, 20 nt, Human
cacgugaccaggagcaaggu

SEQ ID NO: 867648 - RNA, 20 nt, Human
ccucuguuuccugaaaaggu

SEQ ID NO: 867649 - RNA, 19 nt, Human
ccugaaaaggucccugugc

SEQ ID NO: 867650 - RNA, 19 nt, Human
ccuggaggagaagcgggac

SEQ ID NO: 867651 - RNA, 18 nt, Human
cuccagcccucuguuucc

SEQ ID NO: 867652 - RNA, 18 nt, Human
gacugugggugaugaggg

SEQ ID NO: 867653 - RNA, 20 nt, Human
gcccuggggucagaggacuc

SEQ ID NO: 867654 - RNA, 20 nt, Human
uaacugggguggaaguugag

SEQ ID NO: 867655 - RNA, 20 nt, Human
ugccuggaggagaagcggga

SEQ ID NO: 867656 - RNA, 18 nt, Human
uggggcugcugggcuccc

SEQ ID NO: 867657 - RNA, 23 nt, Human
uuccuggggcugcugggcucccg

SEQ ID NO: 867658 - RNA, 25 nt, Human
uugccaagcgacggccaggucacgu

SEQ ID NO: 867659 - RNA, 19 nt, Human
uuuuuuuucaggaugugac

SEQ ID NO: 867660 - RNA, 23 nt, Human
uuuuuuuuuuuuuuuuuuucagg

SEQ ID NO: 867661 - RNA, 24 nt, Human
aaagugcugggauuacagguguga

SEQ ID NO: 867662 - RNA, 22 nt, Human
aacaccccccuuagucaaaggc

SEQ ID NO: 867663 - RNA, 18 nt, Human
aagugcugggauuacagg

SEQ ID NO: 867664 - RNA, 19 nt, Human
aagugcugggauuacaggu

SEQ ID NO: 867665 - RNA, 26 nt, Human
aagugcugggauuacaggugugagcc

SEQ ID NO: 867666 - RNA, 21 nt, Human
acaggugcccaccaccaugcc

SEQ ID NO: 867667 - RNA, 25 nt, Human
acccgccuuggccucccaaagugcu

SEQ ID NO: 867668 - RNA, 21 nt, Human
agaaaucuggcgaaaacagga

SEQ ID NO: 867669 - RNA, 24 nt, Human
aggugauugacccgccuuggccuc

SEQ ID NO: 867670 - RNA, 23 nt, Human
auauuggccaggcugguugcgaa

SEQ ID NO: 867671 - RNA, 24 nt, Human
caaagugcugggauuacaggugug

SEQ ID NO: 867672 - RNA, 24 nt, Human
cacaaagccaccgccgcgaagcag

SEQ ID NO: 867673 - RNA, 21 nt, Human
caccauauuggccaggcuggu

SEQ ID NO: 867674 - RNA, 22 nt, Human
caccauauuggccaggcugguu

SEQ ID NO: 867675 - RNA, 31 nt, Human
caccauauuggccaggcugguugcgaacucc

SEQ ID NO: 867676 - RNA, 21 nt, Human
cagaaugaugcccaagcccug

SEQ ID NO: 867677 - RNA, 23 nt, Human
cagaaugaugcccaagcccuggg

SEQ ID NO: 867678 - RNA, 19 nt, Human
caggugcccaccaccaugc

SEQ ID NO: 867679 - RNA, 24 nt, Human
cauauuggccaggcugguugcgaa

SEQ ID NO: 867680 - RNA, 27 nt, Human
caucagagaauugcuguaaaaaccuag

SEQ ID NO: 867681 - RNA, 21 nt, Human
ccaaagugcugggauuacagg

SEQ ID NO: 867682 - RNA, 21 nt, Human
ccaaagugcugggauuacagg

SEQ ID NO: 867683 - RNA, 24 nt, Human
ccaaagugcugggauuacaggugu

SEQ ID NO: 867684 - RNA, 20 nt, Human
ccacuuguuaaagaaauaca

SEQ ID NO: 867685 - RNA, 20 nt, Human
ccaggcuucaagcgauucuc

SEQ ID NO: 867686 - RNA, 19 nt, Human
ccauucaaauacuguuacu

SEQ ID NO: 867687 - RNA, 19 nt, Human
cccaggcuggaguacaaug

SEQ ID NO: 867688 - RNA, 19 nt, Human
cccagguagcugggaucac

SEQ ID NO: 867689 - RNA, 24 nt, Human
ccuccaggcuucaagcgauucucc

SEQ ID NO: 867690 - RNA, 23 nt, Human
ccucuuuggacuggcauuuaggu

SEQ ID NO: 867691 - RNA, 22 nt, Human
ccugaccucaggugauugaccc

SEQ ID NO: 867692 - RNA, 19 nt, Human
cgaaaacaggaauuguuag

SEQ ID NO: 867693 - RNA, 23 nt, Human
cgccuccaggcuucaagcgauuc

SEQ ID NO: 867694 - RNA, 22 nt, Human
cuaauaagguuaaguucucuuu

SEQ ID NO: 867695 - RNA, 22 nt, Human
cuaccauaucaaggucaucaga

SEQ ID NO: 867696 - RNA, 24 nt, Human
cuaccauaucaaggucaucagaga

SEQ ID NO: 867697 - RNA, 24 nt, Human
cucagccucccagguagcugggau

SEQ ID NO: 867698 - RNA, 19 nt, Human
cuccuuccucagccuccca

SEQ ID NO: 867699 - RNA, 20 nt, Human
cucgcucccugcaggcugca

SEQ ID NO: 867700 - RNA, 20 nt, Human
cucuuguugcccaggcugga

SEQ ID NO: 867701 - RNA, 23 nt, Human
cugcaggcugcagcgggagggcu

SEQ ID NO: 867702 - RNA, 23 nt, Human
gaccucaggugauugacccgccu

SEQ ID NO: 867703 - RNA, 18 nt, Human
gagaguaaccgguucacc

SEQ ID NO: 867704 - RNA, 19 nt, Human
gaucacaggugcccaccac

SEQ ID NO: 867705 - RNA, 18 nt, Human
gauuacaggugugagcca

SEQ ID NO: 867706 - RNA, 22 nt, Human
gauuacaggugugagccacugc

SEQ ID NO: 867707 - RNA, 22 nt, Human
gauuacaggugugagccacugc

SEQ ID NO: 867708 - RNA, 21 nt, Human
gauucuccuuccucagccucc

SEQ ID NO: 867709 - RNA, 24 nt, Human
gcauuuagguugccauucaagaag

SEQ ID NO: 867710 - RNA, 24 nt, Human
gcccaggcuggaguacaauggcau

SEQ ID NO: 867711 - RNA, 20 nt, Human
gcccgaaagcagcucugaga

SEQ ID NO: 867712 - RNA, 22 nt, Human
gccuuggccucccaaagugcug

SEQ ID NO: 867713 - RNA, 20 nt, Human
gcucuuguugcccaggcugg

SEQ ID NO: 867714 - RNA, 21 nt, Human
gcucuuguugcccaggcugga

SEQ ID NO: 867715 - RNA, 19 nt, Human
gcuggaguacaauggcaug

SEQ ID NO: 867716 - RNA, 23 nt, Human
gcugguugcgaacuccugaccuc

SEQ ID NO: 867717 - RNA, 24 nt, Human
ggcugguugcgaacuccugaccuc

SEQ ID NO: 867718 - RNA, 20 nt, Human
ggcuucaagcgauucuccuu

SEQ ID NO: 867719 - RNA, 19 nt, Human
gggagggcuggaccuggaa

SEQ ID NO: 867720 - RNA, 18 nt, Human
ggggucucaccauauugg

SEQ ID NO: 867721 - RNA, 22 nt, Human
ggggucucaccauauuggccag

SEQ ID NO: 867722 - RNA, 22 nt, Human
gggucucaccauauuggccagg

SEQ ID NO: 867723 - RNA, 24 nt, Human
gugauugacccgccuuggccuccc

SEQ ID NO: 867724 - RNA, 21 nt, Human
gugcagccuccgccuccaggc

SEQ ID NO: 867725 - RNA, 24 nt, Human
uaacuuuuugcauuuuuaguagag

SEQ ID NO: 867726 - RNA, 21 nt, Human
uaagaaggauauaauauaaua

SEQ ID NO: 867727 - RNA, 25 nt, Human
uaagaugauucacaaauagugcaaa

SEQ ID NO: 867728 - RNA, 23 nt, Human
uacacagcguucuaccauaucaa

SEQ ID NO: 867729 - RNA, 19 nt, Human
uacaggugugagccacugc

SEQ ID NO: 867730 - RNA, 23 nt, Human
uacaggugugagccacugcgccc

SEQ ID NO: 867731 - RNA, 20 nt, Human
uagagauggggucucaccau

SEQ ID NO: 867732 - RNA, 23 nt, Human
uaguagagauggggucucaccau

SEQ ID NO: 867733 - RNA, 26 nt, Human
uaguagagauggggucucaccauauu

SEQ ID NO: 867734 - RNA, 23 nt, Human
ucaacaccccccuuagucaaagg

SEQ ID NO: 867735 - RNA, 23 nt, Human
ucaagcugagggaagccucgugc

SEQ ID NO: 867736 - RNA, 19 nt, Human
ucagugcagccuccgccuc

SEQ ID NO: 867737 - RNA, 23 nt, Human
ucagugcagccuccgccuccagg

SEQ ID NO: 867738 - RNA, 23 nt, Human
ucccaaagugcugggauuacagg

SEQ ID NO: 867739 - RNA, 23 nt, Human
ucccagguagcugggaucacagg

SEQ ID NO: 867740 - RNA, 18 nt, Human
ucccugcaggcugcagcg

SEQ ID NO: 867741 - RNA, 19 nt, Human
ugaaaauguuuugaugcca

SEQ ID NO: 867742 - RNA, 18 nt, Human
ugaccucaggugauugac

SEQ ID NO: 867743 - RNA, 24 nt, Human
ugaccucaggugauugacccgccu

SEQ ID NO: 867744 - RNA, 22 nt, Human
ugcaggcugcagcgggagggcu

SEQ ID NO: 867745 - RNA, 24 nt, Human
ugcccaggcuggaguacaauggca

SEQ ID NO: 867746 - RNA, 24 nt, Human
ugcucuuguugcccaggcuggagu

SEQ ID NO: 867747 - RNA, 24 nt, Human
ugcugggauuacaggugugagcca

SEQ ID NO: 867748 - RNA, 20 nt, Human
uggcacaaagccaccgccgc

SEQ ID NO: 867749 - RNA, 18 nt, Human
uggcaugaccucagcuca

SEQ ID NO: 867750 - RNA, 23 nt, Human
uggcaugaccucagcucagugca

SEQ ID NO: 867751 - RNA, 18 nt, Human
uggcauuuagguugccau

SEQ ID NO: 867752 - RNA, 24 nt, Human
uggccaggcugguugcgaacuccu

SEQ ID NO: 867753 - RNA, 21 nt, Human
ugggaucacaggugcccacca

SEQ ID NO: 867754 - RNA, 24 nt, Human
ugggaucacaggugcccaccacca

SEQ ID NO: 867755 - RNA, 25 nt, Human
ugggaucacaggugcccaccaccau

SEQ ID NO: 867756 - RNA, 18 nt, Human
ugggauuacaggugugag

SEQ ID NO: 867757 - RNA, 19 nt, Human
ugggauuacaggugugagc

SEQ ID NO: 867758 - RNA, 21 nt, Human
ugggauuacaggugugagcca

SEQ ID NO: 867759 - RNA, 22 nt, Human
ugggauuacaggugugagccac

SEQ ID NO: 867760 - RNA, 22 nt, Human
ugggauuacaggugugagccac

SEQ ID NO: 867761 - RNA, 24 nt, Human
ugggauuacaggugugagccacug

SEQ ID NO: 867762 - RNA, 24 nt, Human
uggggucucaccauauuggccagg

SEQ ID NO: 867763 - RNA, 23 nt, Human
uggguccagaaugaugcccaagc

SEQ ID NO: 867764 - RNA, 24 nt, Human
uguaaaaaccuagugucuauguca

SEQ ID NO: 867765 - RNA, 19 nt, Human
uguuucaagcugagggaag

SEQ ID NO: 867766 - RNA, 24 nt, Human
uguuuugaugccauucaaauacug

SEQ ID NO: 867767 - RNA, 18 nt, Human
uuaguagagauggggucu

SEQ ID NO: 867768 - RNA, 24 nt, Human
uuaguagagauggggucucaccau

SEQ ID NO: 867769 - RNA, 23 nt, Human
uucaagcgauucuccuuccucag

SEQ ID NO: 867770 - RNA, 24 nt, Human
uucaagcgauucuccuuccucagc

SEQ ID NO: 867771 - RNA, 19 nt, Human
uuccucagccucccaggua

SEQ ID NO: 867772 - RNA, 24 nt, Human
uuccucagccucccagguagcugg

SEQ ID NO: 867773 - RNA, 23 nt, Human
uugaauaagcaucauaaaaaaau

SEQ ID NO: 867774 - RNA, 22 nt, Human
uugcucuuguugcccaggcugg

SEQ ID NO: 867775 - RNA, 23 nt, Human
uugcucuuguugcccaggcugga

SEQ ID NO: 867776 - RNA, 18 nt, Human
uuggccucccaaagugcu

SEQ ID NO: 867777 - RNA, 24 nt, Human
uuugcucuuguugcccaggcugga

SEQ ID NO: 867778 - RNA, 22 nt, Human
uuuugaugccauucaaauacug

SEQ ID NO: 867779 - RNA, 24 nt, Human
uuuugcucuuguugcccaggcugg

SEQ ID NO: 867780 - RNA, 24 nt, Human
uuuuuaguagagauggggucucac

SEQ ID NO: 867781 - RNA, 21 nt, Human
uuuuugcauuuuuaguagaga

SEQ ID NO: 867782 - RNA, 23 nt, Human
uuuuugcauuuuuaguagagaug

SEQ ID NO: 867783 - RNA, 22 nt, Human
uuuuuuuuuuuuuugagacgga

SEQ ID NO: 867784 - RNA, 18 nt, Human
uuuuuuuuuuuuuuuuug

SEQ ID NO: 867785 - RNA, 21 nt, Human
aaaaaaaaaaaaaaaaaggga

SEQ ID NO: 867786 - RNA, 26 nt, Human
aaaaaaaaaaaucaacccacaacaug

SEQ ID NO: 867787 - RNA, 24 nt, Human
aaaaaagggaaaauucucuucagu

SEQ ID NO: 867788 - RNA, 24 nt, Human
aaacucaugcucccauucuaacag

SEQ ID NO: 867789 - RNA, 23 nt, Human
aaacuccuggacucaagcaauuc

SEQ ID NO: 867790 - RNA, 20 nt, Human
aaagugcugggauuacaggc

SEQ ID NO: 867791 - RNA, 24 nt, Human
aaagugcugggauuacaggcguga

SEQ ID NO: 867792 - RNA, 24 nt, Human
aaaguguugggacuacaggcguga

SEQ ID NO: 867793 - RNA, 24 nt, Human
aaaguguugggauuacagguguga

SEQ ID NO: 867794 - RNA, 21 nt, Human
aacaaaauggcggacccggaa

SEQ ID NO: 867795 - RNA, 19 nt, Human
aagaggauuaauaugaaca

SEQ ID NO: 867796 - RNA, 18 nt, Human
aagcaucugaacuauaga

SEQ ID NO: 867797 - RNA, 25 nt, Human
aagcgauccucccaccucagccucc

SEQ ID NO: 867798 - RNA, 24 nt, Human
aaguaacugggacuacaggcgugu

SEQ ID NO: 867799 - RNA, 24 nt, Human
aaguagcugggauuacaggcaggu

SEQ ID NO: 867800 - RNA, 19 nt, Human
aagugcugggauuacaggc

SEQ ID NO: 867801 - RNA, 19 nt, Human
aagugcugggauuacaggc

SEQ ID NO: 867802 - RNA, 26 nt, Human
aagugcugggauuacaggcgugagcc

SEQ ID NO: 867803 - RNA, 19 nt, Human
aaguguugggacuacaggc

SEQ ID NO: 867804 - RNA, 26 nt, Human
aaguguugggacuacaggcgugagcc

SEQ ID NO: 867805 - RNA, 21 nt, Human
aaguguugggauuacaggugu

SEQ ID NO: 867806 - RNA, 26 nt, Human
aaguguugggauuacaggugugagcc

SEQ ID NO: 867807 - RNA, 24 nt, Human
acagagucagaccgugucucaaaa

SEQ ID NO: 867808 - RNA, 24 nt, Human
accgcacuccagccugggugacag

SEQ ID NO: 867809 - RNA, 26 nt, Human
accgcacuccagccugggugacagag

SEQ ID NO: 867810 - RNA, 24 nt, Human
accuugugauccgccugccucugc

SEQ ID NO: 867811 - RNA, 18 nt, Human
acggggugucaccauguu

SEQ ID NO: 867812 - RNA, 20 nt, Human
acggggugucaccauguugg

SEQ ID NO: 867813 - RNA, 24 nt, Human
acggggugucaccauguuggccag

SEQ ID NO: 867814 - RNA, 19 nt, Human
acuacaggcgugugccacu

SEQ ID NO: 867815 - RNA, 22 nt, Human
agaaaaaauguucccuaaauau

SEQ ID NO: 867816 - RNA, 18 nt, Human
agacagagucucacugug

SEQ ID NO: 867817 - RNA, 24 nt, Human
agagaaacuuccugagcccaagca

SEQ ID NO: 867818 - RNA, 19 nt, Human
agagauggaguuucaccgu

SEQ ID NO: 867819 - RNA, 19 nt, Human
agccaccacacgcagcuua

SEQ ID NO: 867820 - RNA, 24 nt, Human
agccugggugacagagucagaccg

SEQ ID NO: 867821 - RNA, 24 nt, Human
agcgauucuccugccucagccucc

SEQ ID NO: 867822 - RNA, 22 nt, Human
aggaaucugugaagggaaaaug

SEQ ID NO: 867823 - RNA, 24 nt, Human
aggcacaagcgauccucccaccuc

SEQ ID NO: 867824 - RNA, 19 nt, Human
aggcggagguugcagugag

SEQ ID NO: 867825 - RNA, 24 nt, Human
aggcggagguugcagugagccaag

SEQ ID NO: 867826 - RNA, 25 nt, Human
aggcuggagugcaguggcacgaucu

SEQ ID NO: 867827 - RNA, 23 nt, Human
aguaacugggacuacaggcgugu

SEQ ID NO: 867828 - RNA, 25 nt, Human
aguagcugggauuacaggcaggugc

SEQ ID NO: 867829 - RNA, 20 nt, Human
agugcaguggcacgaucuug

SEQ ID NO: 867830 - RNA, 23 nt, Human
agugcaguggcacgaucuuggcu

SEQ ID NO: 867831 - RNA, 24 nt, Human
agugcaguggcacgaucuuggcuc

SEQ ID NO: 867832 - RNA, 18 nt, Human
agugcugggauuacaggc

SEQ ID NO: 867833 - RNA, 18 nt, Human
agugcugggauuacaggc

SEQ ID NO: 867834 - RNA, 21 nt, Human
aguguaauggugcgaucucag

SEQ ID NO: 867835 - RNA, 24 nt, Human
aguguaauggugcgaucucagcuc

SEQ ID NO: 867836 - RNA, 18 nt, Human
auagacacauaauggaua

SEQ ID NO: 867837 - RNA, 18 nt, Human
auggaguuucaccguguu

SEQ ID NO: 867838 - RNA, 20 nt, Human
auggaguuucaccguguuag

SEQ ID NO: 867839 - RNA, 21 nt, Human
auucuccugccucagccuccc

SEQ ID NO: 867840 - RNA, 24 nt, Human
auuuuuguauuuuuaguagagacg

SEQ ID NO: 867841 - RNA, 22 nt, Human
caaaaaaaaaaaaaaaaaggga

SEQ ID NO: 867842 - RNA, 24 nt, Human
caaaguguugggacuacaggcgug

SEQ ID NO: 867843 - RNA, 24 nt, Human
caaaguguugggauuacaggugug

SEQ ID NO: 867844 - RNA, 23 nt, Human
caaccuccaccucccagguucaa

SEQ ID NO: 867845 - RNA, 22 nt, Human
caagcaauucuccugccucagc

SEQ ID NO: 867846 - RNA, 27 nt, Human
caagcaauucuccugccucagccuccc

SEQ ID NO: 867847 - RNA, 20 nt, Human
caagcgauccucccaccuca

SEQ ID NO: 867848 - RNA, 22 nt, Human
caagcgauccucccaccucagc

SEQ ID NO: 867849 - RNA, 27 nt, Human
caagcgauccucccaccucagccuccu

SEQ ID NO: 867850 - RNA, 22 nt, Human
caagcgauucuccugccucagc

SEQ ID NO: 867851 - RNA, 27 nt, Human
caagcgauucuccugccucagccuccc

SEQ ID NO: 867852 - RNA, 24 nt, Human
caauuuuuuguauuuuuaguagag

SEQ ID NO: 867853 - RNA, 20 nt, Human
caccaccgcacuccagccug

SEQ ID NO: 867854 - RNA, 26 nt, Human
caccaccgcacuccagccugggugac

SEQ ID NO: 867855 - RNA, 18 nt, Human
caccauguuggccaggau

SEQ ID NO: 867856 - RNA, 22 nt, Human
caccauguuggccaggaugauc

SEQ ID NO: 867857 - RNA, 23 nt, Human
caccauguuggccaggaugaucu

SEQ ID NO: 867858 - RNA, 24 nt, Human
caccauguuggccaggaugaucuu

SEQ ID NO: 867859 - RNA, 18 nt, Human
caccguguuagccaggau

SEQ ID NO: 867860 - RNA, 22 nt, Human
caccguguuagccaggauguuc

SEQ ID NO: 867861 - RNA, 23 nt, Human
caccguguuagccaggauguucu

SEQ ID NO: 867862 - RNA, 24 nt, Human
caccguguuagccaggauguucuu

SEQ ID NO: 867863 - RNA, 24 nt, Human
caccucagccuccugaguagcugg

SEQ ID NO: 867864 - RNA, 22 nt, Human
cacuccagccugggugacagag

SEQ ID NO: 867865 - RNA, 22 nt, Human
cacuccagccugggugacagag

SEQ ID NO: 867866 - RNA, 21 nt, Human
cacugcaaccuccaccuccca

SEQ ID NO: 867867 - RNA, 21 nt, Human
cacugcaaccuccgccucccg

SEQ ID NO: 867868 - RNA, 23 nt, Human
cacugcaaccuccgccucccggg

SEQ ID NO: 867869 - RNA, 22 nt, Human
cacugugucgccaggcuggagu

SEQ ID NO: 867870 - RNA, 24 nt, Human
cacugugucgccaggcuggagugc

SEQ ID NO: 867871 - RNA, 24 nt, Human
cagagucuggcucuguugcccagg

SEQ ID NO: 867872 - RNA, 23 nt, Human
cagccucccaaguaacugggacu

SEQ ID NO: 867873 - RNA, 19 nt, Human
cagccuccugaguagcugg

SEQ ID NO: 867874 - RNA, 21 nt, Human
cagguuucuauguugcccagg

SEQ ID NO: 867875 - RNA, 19 nt, Human
caguggcacgaucuuggcu

SEQ ID NO: 867876 - RNA, 22 nt, Human
ccaaaguguugggacuacaggc

SEQ ID NO: 867877 - RNA, 24 nt, Human
ccaaaguguugggacuacaggcgu

SEQ ID NO: 867878 - RNA, 21 nt, Human
ccaaaguguugggauuacagg

SEQ ID NO: 867879 - RNA, 21 nt, Human
ccaaaguguugggauuacagg

SEQ ID NO: 867880 - RNA, 24 nt, Human
ccaaaguguugggauuacaggugu

SEQ ID NO: 867881 - RNA, 23 nt, Human
ccaaguagcugggauuacaggca

SEQ ID NO: 867882 - RNA, 20 nt, Human
ccaccacgcccggcuaauuu

SEQ ID NO: 867883 - RNA, 18 nt, Human
ccaccgcacuccagccug

SEQ ID NO: 867884 - RNA, 20 nt, Human
ccaccgcacuccagccuggg

SEQ ID NO: 867885 - RNA, 20 nt, Human
ccaccgcacuccagccuggg

SEQ ID NO: 867886 - RNA, 21 nt, Human
ccaccgcacuccagccugggu

SEQ ID NO: 867887 - RNA, 21 nt, Human
ccaccgcacuccagccugggu

SEQ ID NO: 867888 - RNA, 23 nt, Human
ccaccgcacuccagccuggguga

SEQ ID NO: 867889 - RNA, 24 nt, Human
ccaccgcacuccagccugggugac

SEQ ID NO: 867890 - RNA, 25 nt, Human
ccaccgcacuccagccugggugaca

SEQ ID NO: 867891 - RNA, 23 nt, Human
ccaccucagccuccugaguagcu

SEQ ID NO: 867892 - RNA, 27 nt, Human
ccaccucccagguucaagcaauucuuu

SEQ ID NO: 867893 - RNA, 21 nt, Human
ccaggauguucuugaucugac

SEQ ID NO: 867894 - RNA, 23 nt, Human
cccaaaguguugggacuacaggc

SEQ ID NO: 867895 - RNA, 24 nt, Human
cccaaguaacugggacuacaggcg

SEQ ID NO: 867896 - RNA, 23 nt, Human
cccaaguagcugggauuacaggc

SEQ ID NO: 867897 - RNA, 24 nt, Human
cccaaguagcugggauuacaggca

SEQ ID NO: 867898 - RNA, 23 nt, Human
cccaccucagccuccugaguagc

SEQ ID NO: 867899 - RNA, 23 nt, Human
cccagguucaagcaauucuccug

SEQ ID NO: 867900 - RNA, 19 nt, Human
cccccgagguucaucgccu

SEQ ID NO: 867901 - RNA, 21 nt, Human
ccccucagaaaaaauguuccc

SEQ ID NO: 867902 - RNA, 22 nt, Human
ccccucguggagaaacagaggc

SEQ ID NO: 867903 - RNA, 20 nt, Human
cccggguucaagcgauucuc

SEQ ID NO: 867904 - RNA, 23 nt, Human
cccggguucaagcgauucuccug

SEQ ID NO: 867905 - RNA, 22 nt, Human
cccugcuauaguuuucuucuua

SEQ ID NO: 867906 - RNA, 23 nt, Human
ccgaaagugcugggauuacaggc

SEQ ID NO: 867907 - RNA, 24 nt, Human
ccgccucccggguucaagcgauuc

SEQ ID NO: 867908 - RNA, 26 nt, Human
ccgugucucaaaaaaaaaaaaaaaaa

SEQ ID NO: 867909 - RNA, 25 nt, Human
ccgugucucaaaaaaaaaaaaaaag

SEQ ID NO: 867910 - RNA, 24 nt, Human
ccucccagguucaagcaauucucc

SEQ ID NO: 867911 - RNA, 24 nt, Human
ccucccggguucaagcgauucucc

SEQ ID NO: 867912 - RNA, 23 nt, Human
ccugccucagccucccaaguagc

SEQ ID NO: 867913 - RNA, 19 nt, Human
ccugccucugccuccgaaa

SEQ ID NO: 867914 - RNA, 21 nt, Human
ccugcuccuuuggaaauggac

SEQ ID NO: 867915 - RNA, 24 nt, Human
ccuguccucccagcuacucaggag

SEQ ID NO: 867916 - RNA, 26 nt, Human
ccuucucuaguuaagacucccuguca

SEQ ID NO: 867917 - RNA, 24 nt, Human
cgaaagugcugggauuacaggcgu

SEQ ID NO: 867918 - RNA, 20 nt, Human
cggagguugcagugagccaa

SEQ ID NO: 867919 - RNA, 21 nt, Human
cggagguugcagugagccaag

SEQ ID NO: 867920 - RNA, 24 nt, Human
cggggugucaccauguuggccagg

SEQ ID NO: 867921 - RNA, 21 nt, Human
cgugagccaccacgccuggcc

SEQ ID NO: 867922 - RNA, 18 nt, Human
cucaaaaaaaaaaaaaaa

SEQ ID NO: 867923 - RNA, 26 nt, Human
cucaaaaaaaaaaaaaaaaagggaaa

SEQ ID NO: 867924 - RNA, 24 nt, Human
cucaagcaauucucccauuucaac

SEQ ID NO: 867925 - RNA, 24 nt, Human
cucacugcaaccuccaccucccag

SEQ ID NO: 867926 - RNA, 24 nt, Human
cucacugcaaccuccgccucccgg

SEQ ID NO: 867927 - RNA, 21 nt, Human
cucacugcaguuuugaccucc

SEQ ID NO: 867928 - RNA, 24 nt, Human
cucagccucccaaguagcugggau

SEQ ID NO: 867929 - RNA, 25 nt, Human
cuccugccucagccucccaaguagc

SEQ ID NO: 867930 - RNA, 24 nt, Human
cucuugaccuugugauccgccugc

SEQ ID NO: 867931 - RNA, 18 nt, Human
cugagcccaagcauugua

SEQ ID NO: 867932 - RNA, 23 nt, Human
cugcaaccuccaccucccagguu

SEQ ID NO: 867933 - RNA, 24 nt, Human
cugcaaccuccaccucccagguuc

SEQ ID NO: 867934 - RNA, 23 nt, Human
cugcaaccuccgccucccggguu

SEQ ID NO: 867935 - RNA, 23 nt, Human
cugccucagccucccaaguagcu

SEQ ID NO: 867936 - RNA, 24 nt, Human
cugugucgccaggcuggagugcag

SEQ ID NO: 867937 - RNA, 23 nt, Human
gaaaaugaucagaaaacucaugc

SEQ ID NO: 867938 - RNA, 24 nt, Human
gaaagugcugggauuacaggcgug

SEQ ID NO: 867939 - RNA, 21 nt, Human
gaacacagugcaaauuguggc

SEQ ID NO: 867940 - RNA, 27 nt, Human
gaaggcgccgcgaguaagauuucuggc

SEQ ID NO: 867941 - RNA, 22 nt, Human
gaccucgugauccgcccgccuc

SEQ ID NO: 867942 - RNA, 22 nt, Human
gaccucgugauccgcccgccuc

SEQ ID NO: 867943 - RNA, 24 nt, Human
gaccucgugauccgcccgccucgg

SEQ ID NO: 867944 - RNA, 22 nt, Human
gaccuugugauccgccugccuc

SEQ ID NO: 867945 - RNA, 24 nt, Human
gaccuugugauccgccugccucug

SEQ ID NO: 867946 - RNA, 18 nt, Human
gacuacaggcgugagcca

SEQ ID NO: 867947 - RNA, 21 nt, Human
gacuacaggcgugagccacca

SEQ ID NO: 867948 - RNA, 24 nt, Human
gacuacaggcgugugccacuaugc

SEQ ID NO: 867949 - RNA, 19 nt, Human
gagguugcagugagccaag

SEQ ID NO: 867950 - RNA, 23 nt, Human
gagguugcagugagccaagauug

SEQ ID NO: 867951 - RNA, 24 nt, Human
gaucugaccucgugauccgcccgc

SEQ ID NO: 867952 - RNA, 18 nt, Human
gauuacaggcgugagccg

SEQ ID NO: 867953 - RNA, 22 nt, Human
gauuacaggcgugagccgcugc

SEQ ID NO: 867954 - RNA, 18 nt, Human
gauuacaggugugagcca

SEQ ID NO: 867955 - RNA, 21 nt, Human
gauuacaggugugagccacca

SEQ ID NO: 867956 - RNA, 22 nt, Human
gauuacaggugugagccaccac

SEQ ID NO: 867957 - RNA, 22 nt, Human
gcaacaaaauggcggacccgga

SEQ ID NO: 867958 - RNA, 22 nt, Human
gcaaccuccaccucccagguuc

SEQ ID NO: 867959 - RNA, 22 nt, Human
gcaaccuccgccucccggguuc

SEQ ID NO: 867960 - RNA, 24 nt, Human
gcacuccagccugggugacagagu

SEQ ID NO: 867961 - RNA, 23 nt, Human
gcccggccaauuuuuuguauuuu

SEQ ID NO: 867962 - RNA, 23 nt, Human
gcccggcuaauuuuuuguauuuu

SEQ ID NO: 867963 - RNA, 23 nt, Human
gccucggccucccaaaguguugg

SEQ ID NO: 867964 - RNA, 24 nt, Human
gcgauucuccugccucagccuccc

SEQ ID NO: 867965 - RNA, 21 nt, Human
gcucacugcaguuuugaccuc

SEQ ID NO: 867966 - RNA, 22 nt, Human
gcucacugcaguuuugaccucc

SEQ ID NO: 867967 - RNA, 27 nt, Human
gcucuguugcccaggcuggaguguaau

SEQ ID NO: 867968 - RNA, 19 nt, Human
ggacccggaaaugaaggcg

SEQ ID NO: 867969 - RNA, 19 nt, Human
ggacuacaggcgugagcca

SEQ ID NO: 867970 - RNA, 24 nt, Human
ggacuacaggcgugugccacuaug

SEQ ID NO: 867971 - RNA, 22 nt, Human
ggagguugcagugagccaagau

SEQ ID NO: 867972 - RNA, 24 nt, Human
ggagguugcagugagccaagauug

SEQ ID NO: 867973 - RNA, 22 nt, Human
ggaguuucaccguguuagccag

SEQ ID NO: 867974 - RNA, 20 nt, Human
ggcauuuucaggucacuuga

SEQ ID NO: 867975 - RNA, 24 nt, Human
ggcucuguugcccaggcuggagug

SEQ ID NO: 867976 - RNA, 23 nt, Human
ggggugucaccauguuggccagg

SEQ ID NO: 867977 - RNA, 19 nt, Human
gggugucaccauguuggcc

SEQ ID NO: 867978 - RNA, 23 nt, Human
guagagacggggugucaccaugu

SEQ ID NO: 867979 - RNA, 18 nt, Human
guagcugggauuacaggc

SEQ ID NO: 867980 - RNA, 24 nt, Human
gucaguuauuuaaaaaaaaaaauc

SEQ ID NO: 867981 - RNA, 24 nt, Human
gugauccgcccgccucggccuccc

SEQ ID NO: 867982 - RNA, 23 nt, Human
guggagaaacagaggcaacaaaa

SEQ ID NO: 867983 - RNA, 23 nt, Human
uaaaaaaaaaaaucaacccacaa

SEQ ID NO: 867984 - RNA, 27 nt, Human
uaaaaaaaaaaaucaacccacaacaug

SEQ ID NO: 867985 - RNA, 28 nt, Human
uaaaagaggauuaauaugaacacagugg

SEQ ID NO: 867986 - RNA, 18 nt, Human
uaaagcaaugauaugagc

SEQ ID NO: 867987 - RNA, 24 nt, Human
uaauuuuuguauuuuuaguagaga

SEQ ID NO: 867988 - RNA, 22 nt, Human
uacaggcgugagccaccacgcc

SEQ ID NO: 867989 - RNA, 23 nt, Human
uacaggcgugagccaccacgccu

SEQ ID NO: 867990 - RNA, 19 nt, Human
uacaggcgugagccgcugc

SEQ ID NO: 867991 - RNA, 21 nt, Human
uacaggugugagccaccacac

SEQ ID NO: 867992 - RNA, 19 nt, Human
uacgcaucauaaaucuaag

SEQ ID NO: 867993 - RNA, 25 nt, Human
uacuuuuugcccuuuucaugugugc

SEQ ID NO: 867994 - RNA, 22 nt, Human
uagagacggggugucaccaugu

SEQ ID NO: 867995 - RNA, 20 nt, Human
uagcuggaaccauaggugcc

SEQ ID NO: 867996 - RNA, 24 nt, Human
uaggugccugucaccauacuuggc

SEQ ID NO: 867997 - RNA, 24 nt, Human
uaguagagacggggugucaccaug

SEQ ID NO: 867998 - RNA, 21 nt, Human
uaguagagauggaguuucacc

SEQ ID NO: 867999 - RNA, 24 nt, Human
uaguagagauggaguuucaccgug

SEQ ID NO: 868000 - RNA, 26 nt, Human
uaguagagauggaguuucaccguguu

SEQ ID NO: 868001 - RNA, 24 nt, Human
uauguugcccaggcgcaucucaaa

SEQ ID NO: 868002 - RNA, 22 nt, Human
ucaccguguuagccaggauguu

SEQ ID NO: 868003 - RNA, 24 nt, Human
ucacugcaaccuccaccucccagg

SEQ ID NO: 868004 - RNA, 25 nt, Human
ucacugcaaccuccaccucccaggu

SEQ ID NO: 868005 - RNA, 27 nt, Human
ucacugcaaccuccaccucccagguuc

SEQ ID NO: 868006 - RNA, 23 nt, Human
ucacugcaaccuccgccucccgg

SEQ ID NO: 868007 - RNA, 24 nt, Human
ucacugcaaccuccgccucccggg

SEQ ID NO: 868008 - RNA, 25 nt, Human
ucacugcaaccuccgccucccgggu

SEQ ID NO: 868009 - RNA, 27 nt, Human
ucacugcaaccuccgccucccggguuc

SEQ ID NO: 868010 - RNA, 24 nt, Human
ucacugcaguuuugaccuccaagg

SEQ ID NO: 868011 - RNA, 28 nt, Human
ucacugcaguuuugaccucggguccucc

SEQ ID NO: 868012 - RNA, 23 nt, Human
ucagaaaacucaugcucccauuc

SEQ ID NO: 868013 - RNA, 20 nt, Human
ucagccucccaaguagcugg

SEQ ID NO: 868014 - RNA, 23 nt, Human
ucagccuccugaguagcuggaac

SEQ ID NO: 868015 - RNA, 21 nt, Human
ucaguuauuuaaaaaaaaaaa

SEQ ID NO: 868016 - RNA, 24 nt, Human
uccagccugggugacagagucaga

SEQ ID NO: 868017 - RNA, 24 nt, Human
ucccaaaguguugggacuacaggc

SEQ ID NO: 868018 - RNA, 23 nt, Human
ucccaaaguguugggauuacagg

SEQ ID NO: 868019 - RNA, 24 nt, Human
ucccaaguaacugggacuacaggc

SEQ ID NO: 868020 - RNA, 24 nt, Human
ucccaaguagcugggauuacaggc

SEQ ID NO: 868021 - RNA, 21 nt, Human
ucccagguucaagcaauucuc

SEQ ID NO: 868022 - RNA, 24 nt, Human
ucccagguucaagcaauucuccug

SEQ ID NO: 868023 - RNA, 21 nt, Human
ucccggguucaagcgauucuc

SEQ ID NO: 868024 - RNA, 24 nt, Human
ucccggguucaagcgauucuccug

SEQ ID NO: 868025 - RNA, 24 nt, Human
uccgaaagugcugggauuacaggc

SEQ ID NO: 868026 - RNA, 26 nt, Human
uccucccaccucagccuccugaguag

SEQ ID NO: 868027 - RNA, 23 nt, Human
uccugagcccaagcauuguaccc

SEQ ID NO: 868028 - RNA, 24 nt, Human
uccugaguagcuggaaccauaggu

SEQ ID NO: 868029 - RNA, 23 nt, Human
ucguccgggacgcugccggccac

SEQ ID NO: 868030 - RNA, 26 nt, Human
ucuauguuuaaagcaaugauaugagc

SEQ ID NO: 868031 - RNA, 19 nt, Human
ucucaaaaaaaaaaaaaaa

SEQ ID NO: 868032 - RNA, 23 nt, Human
ucucacugugucgccaggcugga

SEQ ID NO: 868033 - RNA, 25 nt, Human
ucucacugugucgccaggcuggagu

SEQ ID NO: 868034 - RNA, 25 nt, Human
ucuccugccucagccucccaaguaa

SEQ ID NO: 868035 - RNA, 23 nt, Human
ucuggcucuguugcccaggcugg

SEQ ID NO: 868036 - RNA, 24 nt, Human
ucuggcucuguugcccaggcugga

SEQ ID NO: 868037 - RNA, 24 nt, Human
ucuguugcccaggcuggaguguaa

SEQ ID NO: 868038 - RNA, 25 nt, Human
ucuugcucugucacucaagccugga

SEQ ID NO: 868039 - RNA, 20 nt, Human
ugacagagucagaccguguc

SEQ ID NO: 868040 - RNA, 19 nt, Human
ugagacagagucucacugu

SEQ ID NO: 868041 - RNA, 22 nt, Human
ugagacagagucuggcucuguu

SEQ ID NO: 868042 - RNA, 20 nt, Human
ugaguagcuggaaccauagg

SEQ ID NO: 868043 - RNA, 31 nt, Human
ugauaugagcuaagaaauuugguccuuuauu

SEQ ID NO: 868044 - RNA, 23 nt, Human
ugaugugguggcauaugccuguc

SEQ ID NO: 868045 - RNA, 24 nt, Human
ugcacagagaaacuuccugagccc

SEQ ID NO: 868046 - RNA, 21 nt, Human
ugcaccaccgcacuccagccu

SEQ ID NO: 868047 - RNA, 22 nt, Human
ugcaguggcacgaucuuggcuc

SEQ ID NO: 868048 - RNA, 25 nt, Human
ugcccaggcgcaucucaaacuccug

SEQ ID NO: 868049 - RNA, 21 nt, Human
ugcccaggcuggaguguaaug

SEQ ID NO: 868050 - RNA, 24 nt, Human
ugcccaggcuggaguguaauggug

SEQ ID NO: 868051 - RNA, 24 nt, Human
ugccucagccucccaaguaacugg

SEQ ID NO: 868052 - RNA, 24 nt, Human
ugccucagccucccaaguagcugg

SEQ ID NO: 868053 - RNA, 22 nt, Human
ugccucugccuccgaaagugcu

SEQ ID NO: 868054 - RNA, 24 nt, Human
ugccuggguaauuuuuguauuuuu

SEQ ID NO: 868055 - RNA, 24 nt, Human
ugccuguccucccagcuacucagg

SEQ ID NO: 868056 - RNA, 21 nt, Human
ugcugaggcacuucugaggug

SEQ ID NO: 868057 - RNA, 20 nt, Human
ugcugggauuacaggcguga

SEQ ID NO: 868058 - RNA, 24 nt, Human
uggaaccauaggugccugucacca

SEQ ID NO: 868059 - RNA, 23 nt, Human
uggaggcggagguugcagugagc

SEQ ID NO: 868060 - RNA, 23 nt, Human
uggagugcaguggcacgaucuug

SEQ ID NO: 868061 - RNA, 24 nt, Human
uggagugcaguggcacgaucuugg

SEQ ID NO: 868062 - RNA, 23 nt, Human
uggaguguaauggugcgaucuca

SEQ ID NO: 868063 - RNA, 24 nt, Human
uggaguguaauggugcgaucucag

SEQ ID NO: 868064 - RNA, 24 nt, Human
uggaguuucaccguguuagccagg

SEQ ID NO: 868065 - RNA, 21 nt, Human
uggccuaguuuccuuuuuccu

SEQ ID NO: 868066 - RNA, 24 nt, Human
uggcucuguugcccaggcuggagu

SEQ ID NO: 868067 - RNA, 18 nt, Human
ugggacuacaggcgugag

SEQ ID NO: 868068 - RNA, 19 nt, Human
ugggacuacaggcgugagc

SEQ ID NO: 868069 - RNA, 22 nt, Human
ugggacuacaggcgugagccac

SEQ ID NO: 868070 - RNA, 24 nt, Human
ugggacuacaggcgugagccacca

SEQ ID NO: 868071 - RNA, 18 nt, Human
ugggacuacaggcgugug

SEQ ID NO: 868072 - RNA, 21 nt, Human
ugggacuacaggcgugugcca

SEQ ID NO: 868073 - RNA, 22 nt, Human
ugggacuacaggcgugugccac

SEQ ID NO: 868074 - RNA, 22 nt, Human
ugggacuacaggcgugugccac

SEQ ID NO: 868075 - RNA, 22 nt, Human
ugggacuacaggcgugugccac

SEQ ID NO: 868076 - RNA, 24 nt, Human
ugggacuacaggcgugugccacua

SEQ ID NO: 868077 - RNA, 21 nt, Human
ugggauuacaggcaggugcca

SEQ ID NO: 868078 - RNA, 22 nt, Human
ugggauuacaggcaggugccac

SEQ ID NO: 868079 - RNA, 24 nt, Human
ugggauuacaggcaggugccacca

SEQ ID NO: 868080 - RNA, 18 nt, Human
ugggauuacaggcgugag

SEQ ID NO: 868081 - RNA, 19 nt, Human
ugggauuacaggcgugagc

SEQ ID NO: 868082 - RNA, 20 nt, Human
ugggauuacaggcgugagcc

SEQ ID NO: 868083 - RNA, 20 nt, Human
ugggauuacaggcgugagcc

SEQ ID NO: 868084 - RNA, 21 nt, Human
ugggauuacaggcgugagccg

SEQ ID NO: 868085 - RNA, 21 nt, Human
ugggauuacaggcgugagccg

SEQ ID NO: 868086 - RNA, 22 nt, Human
ugggauuacaggcgugagccgc

SEQ ID NO: 868087 - RNA, 24 nt, Human
ugggauuacaggcgugagccgcug

SEQ ID NO: 868088 - RNA, 24 nt, Human
ugggauuacaggcgugagccgcug

SEQ ID NO: 868089 - RNA, 18 nt, Human
ugggauuacaggugugag

SEQ ID NO: 868090 - RNA, 19 nt, Human
ugggauuacaggugugagc

SEQ ID NO: 868091 - RNA, 22 nt, Human
ugggauuacaggugugagccac

SEQ ID NO: 868092 - RNA, 23 nt, Human
ugggauuacaggugugagccacc

SEQ ID NO: 868093 - RNA, 24 nt, Human
ugggauuacaggugugagccacca

SEQ ID NO: 868094 - RNA, 24 nt, Human
uggugcaaccauggcucacugcag

SEQ ID NO: 868095 - RNA, 24 nt, Human
uggugcgaucucagcucacugcaa

SEQ ID NO: 868096 - RNA, 24 nt, Human
ugguggcauaugccuguccuccca

SEQ ID NO: 868097 - RNA, 21 nt, Human
uguauuuuuaguagagacggg

SEQ ID NO: 868098 - RNA, 22 nt, Human
uguauuuuuaguagagauggag

SEQ ID NO: 868099 - RNA, 20 nt, Human
ugucuaacuucccuuccaau

SEQ ID NO: 868100 - RNA, 20 nt, Human
uguugcccaggcuggagugu

SEQ ID NO: 868101 - RNA, 19 nt, Human
uguuugucuucuguauauu

SEQ ID NO: 868102 - RNA, 19 nt, Human
uguuuguuuuguuuuuuug

SEQ ID NO: 868103 - RNA, 24 nt, Human
uuaguagagacggggugucaccau

SEQ ID NO: 868104 - RNA, 18 nt, Human
uuaguagagauggaguuu

SEQ ID NO: 868105 - RNA, 22 nt, Human
uuaguagagauggaguuucacc

SEQ ID NO: 868106 - RNA, 24 nt, Human
uuaguagagauggaguuucaccgu

SEQ ID NO: 868107 - RNA, 21 nt, Human
uucaagcaauucuccugccuc

SEQ ID NO: 868108 - RNA, 24 nt, Human
uucaagcaauucuccugccucagc

SEQ ID NO: 868109 - RNA, 21 nt, Human
uucaagcgauucuccugccuc

SEQ ID NO: 868110 - RNA, 23 nt, Human
uucaagcgauucuccugccucag

SEQ ID NO: 868111 - RNA, 24 nt, Human
uucaagcgauucuccugccucagc

SEQ ID NO: 868112 - RNA, 19 nt, Human
uuccaauugguuuuuccaa

SEQ ID NO: 868113 - RNA, 25 nt, Human
uuccugagcccaagcauuguacccu

SEQ ID NO: 868114 - RNA, 22 nt, Human
uugcacagagaaacuuccugag

SEQ ID NO: 868115 - RNA, 22 nt, Human
uugcagugagccaagauugcac

SEQ ID NO: 868116 - RNA, 18 nt, Human
uugcccaggcuggagugu

SEQ ID NO: 868117 - RNA, 21 nt, Human
uugggauuacaggugugagcc

SEQ ID NO: 868118 - RNA, 23 nt, Human
uuguauuuuuaguagagacgggg

SEQ ID NO: 868119 - RNA, 23 nt, Human
uuguauuuuuaguagagauggag

SEQ ID NO: 868120 - RNA, 23 nt, Human
uuguuuguuuguuuuguuuuuuu

SEQ ID NO: 868121 - RNA, 19 nt, Human
uuguuuuuuugagacagag

SEQ ID NO: 868122 - RNA, 19 nt, Human
uuucaccguguuagccagg

SEQ ID NO: 868123 - RNA, 20 nt, Human
uuuuguauuuuuaguagaga

SEQ ID NO: 868124 - RNA, 24 nt, Human
uuuuuaguagagacggggugucac

SEQ ID NO: 868125 - RNA, 24 nt, Human
uuuuuaguagagauggaguuucac

SEQ ID NO: 868126 - RNA, 20 nt, Human
uuuuuguauuuuuaguagag

SEQ ID NO: 868127 - RNA, 21 nt, Human
uuuuuguauuuuuaguagaga

SEQ ID NO: 868128 - RNA, 23 nt, Human
uuuuuuuuugagacagagucugg

SEQ ID NO: 868129 - RNA, 25 nt, Human
uuuuuuuuuuugagacagagucugg

SEQ ID NO: 868130 - RNA, 23 nt, Human
aaauaaaccucaaaauuguacuc

SEQ ID NO: 868131 - RNA, 20 nt, Human
aaauacauauuuacaaauaa

SEQ ID NO: 868132 - RNA, 21 nt, Human
aacagagugagaucccaucuc

SEQ ID NO: 868133 - RNA, 23 nt, Human
aagcaaauuucaaaauuagcugg

SEQ ID NO: 868134 - RNA, 21 nt, Human
aaggagggguacacuccaagc

SEQ ID NO: 868135 - RNA, 19 nt, Human
aauaaaccucaaaauugua

SEQ ID NO: 868136 - RNA, 19 nt, Human
aauaaugguucuucgcaca

SEQ ID NO: 868137 - RNA, 18 nt, Human
acugcacuccagucuggg

SEQ ID NO: 868138 - RNA, 23 nt, Human
acugcacuccagucugggcaaca

SEQ ID NO: 868139 - RNA, 23 nt, Human
agcugggcaugguggcacacgcc

SEQ ID NO: 868140 - RNA, 24 nt, Human
aggcaugguggcucacaccuguaa

SEQ ID NO: 868141 - RNA, 19 nt, Human
agggguacacuccaagcgc

SEQ ID NO: 868142 - RNA, 18 nt, Human
agugucuauucaucuuaa

SEQ ID NO: 868143 - RNA, 23 nt, Human
aucccagcacuuuggaaguccac

SEQ ID NO: 868144 - RNA, 24 nt, Human
auuaugccacugcacuccagucug

SEQ ID NO: 868145 - RNA, 24 nt, Human
auucugagaccagccuggacaaca

SEQ ID NO: 868146 - RNA, 19 nt, Human
caaaauuagcugggcaugg

SEQ ID NO: 868147 - RNA, 24 nt, Human
cacaccuguaaucccagcacuuug

SEQ ID NO: 868148 - RNA, 18 nt, Human
caccuguaaucccagcac

SEQ ID NO: 868149 - RNA, 19 nt, Human
caccuguaaucccagcacu

SEQ ID NO: 868150 - RNA, 19 nt, Human
cacugcacuccagucuggg

SEQ ID NO: 868151 - RNA, 21 nt, Human
cacugcacuccagucugggca

SEQ ID NO: 868152 - RNA, 22 nt, Human
cacugcacuccagucugggcaa

SEQ ID NO: 868153 - RNA, 23 nt, Human
cacugcacuccagucugggcaac

SEQ ID NO: 868154 - RNA, 24 nt, Human
cacugcacuccagucugggcaaca

SEQ ID NO: 868155 - RNA, 19 nt, Human
caguuagugcuugacacgu

SEQ ID NO: 868156 - RNA, 24 nt, Human
caucaguauuuucuggcuaugaaa

SEQ ID NO: 868157 - RNA, 20 nt, Human
ccaagaaauggcaaacuauc

SEQ ID NO: 868158 - RNA, 20 nt, Human
ccacugcacuccagucuggg

SEQ ID NO: 868159 - RNA, 20 nt, Human
ccacugcacuccagucuggg

SEQ ID NO: 868160 - RNA, 21 nt, Human
ccacugcacuccagucugggc

SEQ ID NO: 868161 - RNA, 23 nt, Human
ccacugcacuccagucugggcaa

SEQ ID NO: 868162 - RNA, 24 nt, Human
ccacugcacuccagucugggcaac

SEQ ID NO: 868163 - RNA, 22 nt, Human
ccagccuggacaacagagugag

SEQ ID NO: 868164 - RNA, 27 nt, Human
cccaagaaauggcaaacuaucuauaaa

SEQ ID NO: 868165 - RNA, 22 nt, Human
ccccaggaaaggagggguacac

SEQ ID NO: 868166 - RNA, 21 nt, Human
ccuauagucccagcuaaucag

SEQ ID NO: 868167 - RNA, 24 nt, Human
cgccuauagucccagcuaaucagg

SEQ ID NO: 868168 - RNA, 22 nt, Human
cucacaccuguaaucccagcac

SEQ ID NO: 868169 - RNA, 24 nt, Human
cucacaccuguaaucccagcacuu

SEQ ID NO: 868170 - RNA, 19 nt, Human
cugaauaucuuuaagugaa

SEQ ID NO: 868171 - RNA, 20 nt, Human
cugauugccaaaaaaguguu

SEQ ID NO: 868172 - RNA, 22 nt, Human
gaaaauuuuccaagcauuguac

SEQ ID NO: 868173 - RNA, 19 nt, Human
gaaguccacugugggagga

SEQ ID NO: 868174 - RNA, 21 nt, Human
gcacagcuacaaacugauugc

SEQ ID NO: 868175 - RNA, 22 nt, Human
gccacugcacuccagucugggc

SEQ ID NO: 868176 - RNA, 24 nt, Human
gccacugcacuccagucugggcaa

SEQ ID NO: 868177 - RNA, 18 nt, Human
ggaucacucaccagaauu

SEQ ID NO: 868178 - RNA, 22 nt, Human
ggcaugguggcacacgccuaua

SEQ ID NO: 868179 - RNA, 21 nt, Human
ggccaggcaugguggcucaca

SEQ ID NO: 868180 - RNA, 24 nt, Human
gguggcacacgccuauagucccag

SEQ ID NO: 868181 - RNA, 24 nt, Human
gguggcucacaccuguaaucccag

SEQ ID NO: 868182 - RNA, 21 nt, Human
guacucuuauagaacuuauuu

SEQ ID NO: 868183 - RNA, 21 nt, Human
guccuuagcaacgggguccag

SEQ ID NO: 868184 - RNA, 23 nt, Human
guuaacgaaggcuacucucgacu

SEQ ID NO: 868185 - RNA, 20 nt, Human
uaaaaagacacuagaaaaua

SEQ ID NO: 868186 - RNA, 27 nt, Human
uaaacaacauacuuguaauccugaaag

SEQ ID NO: 868187 - RNA, 23 nt, Human
uaaacuagaauacucugaaaauu

SEQ ID NO: 868188 - RNA, 18 nt, Human
uacaagcaaauuucaaaa

SEQ ID NO: 868189 - RNA, 28 nt, Human
uaccccaggaaaggagggguacacucca

SEQ ID NO: 868190 - RNA, 20 nt, Human
uagcaacgggguccagcggc

SEQ ID NO: 868191 - RNA, 22 nt, Human
uagcugggcaugguggcacacg

SEQ ID NO: 868192 - RNA, 22 nt, Human
uauagucccagcuaaucaggag

SEQ ID NO: 868193 - RNA, 24 nt, Human
uaugauuaugccacugcacuccag

SEQ ID NO: 868194 - RNA, 25 nt, Human
ucaacagguagaaaaaacaauuuuu

SEQ ID NO: 868195 - RNA, 24 nt, Human
ucaauaaugguucuucgcacaaau

SEQ ID NO: 868196 - RNA, 18 nt, Human
ucaguauuuucuggcuau

SEQ ID NO: 868197 - RNA, 21 nt, Human
uccaagcgcucacgaucucaa

SEQ ID NO: 868198 - RNA, 26 nt, Human
uccauuaguaacuguucuccucgugg

SEQ ID NO: 868199 - RNA, 23 nt, Human
ucucuacaagcaaauuucaaaau

SEQ ID NO: 868200 - RNA, 24 nt, Human
ugacacgucaacagguagaaaaaa

SEQ ID NO: 868201 - RNA, 24 nt, Human
ugccaaaaaaguguuauaaauaaa

SEQ ID NO: 868202 - RNA, 24 nt, Human
ugccacugcacuccagucugggca

SEQ ID NO: 868203 - RNA, 21 nt, Human
uggcucacaccuguaauccca

SEQ ID NO: 868204 - RNA, 24 nt, Human
uggcucacaccuguaaucccagca

SEQ ID NO: 868205 - RNA, 18 nt, Human
uggcugugauuuacaaaa

SEQ ID NO: 868206 - RNA, 20 nt, Human
uggggccaggcaugguggcu

SEQ ID NO: 868207 - RNA, 24 nt, Human
ugguggcucacaccuguaauccca

SEQ ID NO: 868208 - RNA, 23 nt, Human
uguauucacaaacauuuguccac

SEQ ID NO: 868209 - RNA, 20 nt, Human
uguccacuauuuuaaacuuc

SEQ ID NO: 868210 - RNA, 21 nt, Human
uuaaacccaagaaauggcaaa

SEQ ID NO: 868211 - RNA, 20 nt, Human
uuaacauuuuaauugcugaa

SEQ ID NO: 868212 - RNA, 18 nt, Human
uuagcugggcaugguggc

SEQ ID NO: 868213 - RNA, 24 nt, Human
uuagcugggcaugguggcacacgc

SEQ ID NO: 868214 - RNA, 23 nt, Human
uuaugccacugcacuccagucug

SEQ ID NO: 868215 - RNA, 22 nt, Human
uucacaaacauuuguccacuau

SEQ ID NO: 868216 - RNA, 24 nt, Human
uuuaauaacuuuccauuaguaacu

SEQ ID NO: 868217 - RNA, 19 nt, Human
uuuacaaaagaauaaaaua

SEQ ID NO: 868218 - RNA, 25 nt, Human
uuuuuuguugaugaauaacuuugau

SEQ ID NO: 868219 - RNA, 24 nt, Human
aaaggccccccaacagaaugaaag

SEQ ID NO: 868220 - RNA, 24 nt, Human
aaagugcugggauuacaggcauga

SEQ ID NO: 868221 - RNA, 25 nt, Human
aagaagccgagcggagccccgagua

SEQ ID NO: 868222 - RNA, 19 nt, Human
aagugcugggauuacaggc

SEQ ID NO: 868223 - RNA, 21 nt, Human
aagugcugggauuacaggcau

SEQ ID NO: 868224 - RNA, 26 nt, Human
aagugcugggauuacaggcaugagcc

SEQ ID NO: 868225 - RNA, 21 nt, Human
accacggccucccaaagugcu

SEQ ID NO: 868226 - RNA, 24 nt, Human
accauguuggucaggcuggucucg

SEQ ID NO: 868227 - RNA, 24 nt, Human
acucuuguugcccaggcuggagug

SEQ ID NO: 868228 - RNA, 22 nt, Human
acugcaaccuccgccccccagg

SEQ ID NO: 868229 - RNA, 21 nt, Human
agguucaagugauucuccugc

SEQ ID NO: 868230 - RNA, 22 nt, Human
agguucaagugauucuccugcc

SEQ ID NO: 868231 - RNA, 21 nt, Human
aguaacugggauuacaggcau

SEQ ID NO: 868232 - RNA, 23 nt, Human
aguaacugggauuacaggcaugc

SEQ ID NO: 868233 - RNA, 24 nt, Human
agugauucuccugccucagccucc

SEQ ID NO: 868234 - RNA, 18 nt, Human
agugcugggauuacaggc

SEQ ID NO: 868235 - RNA, 21 nt, Human
augggguuucaccauguuggu

SEQ ID NO: 868236 - RNA, 23 nt, Human
augggguuucaccauguugguca

SEQ ID NO: 868237 - RNA, 24 nt, Human
augggguuucaccauguuggucag

SEQ ID NO: 868238 - RNA, 18 nt, Human
auucuccugccucagccu

SEQ ID NO: 868239 - RNA, 24 nt, Human
caaagugcugggauuacaggcaug

SEQ ID NO: 868240 - RNA, 24 nt, Human
caaccuccgccccccagguucaag

SEQ ID NO: 868241 - RNA, 19 nt, Human
caacgccaugaaaucagag

SEQ ID NO: 868242 - RNA, 20 nt, Human
caagugauucuccugccuca

SEQ ID NO: 868243 - RNA, 22 nt, Human
caagugauucuccugccucagc

SEQ ID NO: 868244 - RNA, 21 nt, Human
caccauguuggucaggcuggu

SEQ ID NO: 868245 - RNA, 24 nt, Human
caccauguuggucaggcuggucuc

SEQ ID NO: 868246 - RNA, 24 nt, Human
cacucuuguugcccaggcuggagu

SEQ ID NO: 868247 - RNA, 20 nt, Human
cagccuccugaguaacuggg

SEQ ID NO: 868248 - RNA, 20 nt, Human
caggugauccgcccaccacg

SEQ ID NO: 868249 - RNA, 25 nt, Human
cauauauauaugucccccauguucu

SEQ ID NO: 868250 - RNA, 23 nt, Human
ccaaagugcugggauuacaggca

SEQ ID NO: 868251 - RNA, 24 nt, Human
ccaaagugcugggauuacaggcau

SEQ ID NO: 868252 - RNA, 23 nt, Human
ccaacagaaugaaagguguuaaa

SEQ ID NO: 868253 - RNA, 24 nt, Human
cccaaagugcugggauuacaggca

SEQ ID NO: 868254 - RNA, 19 nt, Human
cccaggcuggagugcaacg

SEQ ID NO: 868255 - RNA, 21 nt, Human
cccagguucaagugauucucc

SEQ ID NO: 868256 - RNA, 18 nt, Human
ccccagaauuccagaacc

SEQ ID NO: 868257 - RNA, 21 nt, Human
ccccagguucaagugauucuc

SEQ ID NO: 868258 - RNA, 24 nt, Human
ccccagguucaagugauucuccug

SEQ ID NO: 868259 - RNA, 23 nt, Human
cccccagguucaagugauucucc

SEQ ID NO: 868260 - RNA, 24 nt, Human
ccccccagguucaagugauucucc

SEQ ID NO: 868261 - RNA, 22 nt, Human
ccccgaguauuggguguugccc

SEQ ID NO: 868262 - RNA, 24 nt, Human
ccgccccccagguucaagugauuc

SEQ ID NO: 868263 - RNA, 24 nt, Human
ccugaccucaggugauccgcccac

SEQ ID NO: 868264 - RNA, 19 nt, Human
ccugaguaacugggauuac

SEQ ID NO: 868265 - RNA, 23 nt, Human
ccugaguaacugggauuacaggc

SEQ ID NO: 868266 - RNA, 24 nt, Human
ccugaguaacugggauuacaggca

SEQ ID NO: 868267 - RNA, 22 nt, Human
cgccccccagguucaagugauu

SEQ ID NO: 868268 - RNA, 18 nt, Human
cgcccggccucauuucuu

SEQ ID NO: 868269 - RNA, 25 nt, Human
cgcgaagaagccgagcggagccccg

SEQ ID NO: 868270 - RNA, 18 nt, Human
cucuuguugcccaggcug

SEQ ID NO: 868271 - RNA, 23 nt, Human
cugaguaacugggauuacaggca

SEQ ID NO: 868272 - RNA, 24 nt, Human
cugaguaacugggauuacaggcau

SEQ ID NO: 868273 - RNA, 23 nt, Human
cugcaaccuccgccccccagguu

SEQ ID NO: 868274 - RNA, 24 nt, Human
cugcaaccuccgccccccagguuc

SEQ ID NO: 868275 - RNA, 23 nt, Human
cugccucagccuccugaguaacu

SEQ ID NO: 868276 - RNA, 22 nt, Human
cuuacugcaaccuccgcccccc

SEQ ID NO: 868277 - RNA, 24 nt, Human
cuuguugcccaggcuggagugcaa

SEQ ID NO: 868278 - RNA, 22 nt, Human
cuuuaaaagauguaaaaaaaaa

SEQ ID NO: 868279 - RNA, 23 nt, Human
cuuuuuggagucuuauucgaaua

SEQ ID NO: 868280 - RNA, 22 nt, Human
gaccucaggugauccgcccacc

SEQ ID NO: 868281 - RNA, 24 nt, Human
gagaugggguuucaccauguuggu

SEQ ID NO: 868282 - RNA, 22 nt, Human
gaguaacugggauuacaggcau

SEQ ID NO: 868283 - RNA, 18 nt, Human
gauuacaggcaugagcca

SEQ ID NO: 868284 - RNA, 22 nt, Human
gauuacaggcaugagccacugc

SEQ ID NO: 868285 - RNA, 22 nt, Human
gauuacaggcaugagccacugc

SEQ ID NO: 868286 - RNA, 18 nt, Human
gauuacaggcaugcgcca

SEQ ID NO: 868287 - RNA, 22 nt, Human
gcaaccuccgccccccagguuc

SEQ ID NO: 868288 - RNA, 19 nt, Human
gccaugaaaucagaguaac

SEQ ID NO: 868289 - RNA, 19 nt, Human
gcccaggcuggagugcaac

SEQ ID NO: 868290 - RNA, 20 nt, Human
gcgcgaagaagccgagcgga

SEQ ID NO: 868291 - RNA, 23 nt, Human
gcuggucucgaacuccugaccuc

SEQ ID NO: 868292 - RNA, 22 nt, Human
ggauuacaggcaugagccacug

SEQ ID NO: 868293 - RNA, 19 nt, Human
ggauuacaggcaugcgcca

SEQ ID NO: 868294 - RNA, 24 nt, Human
ggcuggucucgaacuccugaccuc

SEQ ID NO: 868295 - RNA, 22 nt, Human
gggguuucaccauguuggucag

SEQ ID NO: 868296 - RNA, 19 nt, Human
ggucucgaacuccugaccu

SEQ ID NO: 868297 - RNA, 20 nt, Human
guaacugggauuacaggcau

SEQ ID NO: 868298 - RNA, 19 nt, Human
guagagaugggguuucacc

SEQ ID NO: 868299 - RNA, 21 nt, Human
guagagaugggguuucaccau

SEQ ID NO: 868300 - RNA, 22 nt, Human
guagagaugggguuucaccaug

SEQ ID NO: 868301 - RNA, 23 nt, Human
guagagaugggguuucaccaugu

SEQ ID NO: 868302 - RNA, 23 nt, Human
gugauucuccugccucagccucc

SEQ ID NO: 868303 - RNA, 19 nt, Human
gugccucagcccgcugcgg

SEQ ID NO: 868304 - RNA, 22 nt, Human
gugccucagcccgcugcggagc

SEQ ID NO: 868305 - RNA, 23 nt, Human
guuaaaucaggucaucuugaaua

SEQ ID NO: 868306 - RNA, 18 nt, Human
guugccagcuugcauggu

SEQ ID NO: 868307 - RNA, 19 nt, Human
uaacagguuuucugucacu

SEQ ID NO: 868308 - RNA, 22 nt, Human
uaagacuacaaagcagcauaac

SEQ ID NO: 868309 - RNA, 23 nt, Human
uaauuuuguauuuuucguagaga

SEQ ID NO: 868310 - RNA, 25 nt, Human
uaauuuuguauuuuucguagagaug

SEQ ID NO: 868311 - RNA, 23 nt, Human
uacaggcaugagccacugcgccc

SEQ ID NO: 868312 - RNA, 20 nt, Human
uacaggcaugcgccaucaca

SEQ ID NO: 868313 - RNA, 21 nt, Human
uacugcaaccuccgcccccca

SEQ ID NO: 868314 - RNA, 22 nt, Human
uagagaugggguuucaccaugu

SEQ ID NO: 868315 - RNA, 26 nt, Human
uauacauauauauaugucccccaugu

SEQ ID NO: 868316 - RNA, 22 nt, Human
uauaggaaaucaaaggcccccc

SEQ ID NO: 868317 - RNA, 22 nt, Human
uauucgaauauauacauauaua

SEQ ID NO: 868318 - RNA, 19 nt, Human
ucaagugauucuccugccu

SEQ ID NO: 868319 - RNA, 21 nt, Human
ucacucuuguugcccaggcug

SEQ ID NO: 868320 - RNA, 23 nt, Human
ucacucuuguugcccaggcugga

SEQ ID NO: 868321 - RNA, 24 nt, Human
ucccaaagugcugggauuacaggc

SEQ ID NO: 868322 - RNA, 24 nt, Human
uccugaguaacugggauuacaggc

SEQ ID NO: 868323 - RNA, 21 nt, Human
ucguagagaugggguuucacc

SEQ ID NO: 868324 - RNA, 24 nt, Human
ucguagagaugggguuucaccaug

SEQ ID NO: 868325 - RNA, 24 nt, Human
ucuccugccucagccuccugagua

SEQ ID NO: 868326 - RNA, 23 nt, Human
ucucgaacuccugaccucaggug

SEQ ID NO: 868327 - RNA, 22 nt, Human
ucuuguugcccaggcuggagug

SEQ ID NO: 868328 - RNA, 18 nt, Human
ugaccucaggugauccgc

SEQ ID NO: 868329 - RNA, 21 nt, Human
ugaccucaggugauccgccca

SEQ ID NO: 868330 - RNA, 24 nt, Human
ugauccgcccaccacggccuccca

SEQ ID NO: 868331 - RNA, 21 nt, Human
ugaugcaauguauagcacuuu

SEQ ID NO: 868332 - RNA, 20 nt, Human
ugcaauguauagcacuuuuu

SEQ ID NO: 868333 - RNA, 25 nt, Human
ugcauguaguauauuuuucccucgg

SEQ ID NO: 868334 - RNA, 18 nt, Human
ugcccaggcuggagugca

SEQ ID NO: 868335 - RNA, 21 nt, Human
ugcccaggcuggagugcaacg

SEQ ID NO: 868336 - RNA, 20 nt, Human
ugccucagcccgcugcggag

SEQ ID NO: 868337 - RNA, 24 nt, Human
ugccucagccuccugaguaacugg

SEQ ID NO: 868338 - RNA, 24 nt, Human
uggagugcaacggcgcgaucucgg

SEQ ID NO: 868339 - RNA, 18 nt, Human
ugggauuacaggcaugag

SEQ ID NO: 868340 - RNA, 19 nt, Human
ugggauuacaggcaugagc

SEQ ID NO: 868341 - RNA, 21 nt, Human
ugggauuacaggcaugagcca

SEQ ID NO: 868342 - RNA, 22 nt, Human
ugggauuacaggcaugagccac

SEQ ID NO: 868343 - RNA, 22 nt, Human
ugggauuacaggcaugagccac

SEQ ID NO: 868344 - RNA, 23 nt, Human
ugggauuacaggcaugagccacu

SEQ ID NO: 868345 - RNA, 24 nt, Human
ugggauuacaggcaugagccacug

SEQ ID NO: 868346 - RNA, 26 nt, Human
ugggauuacaggcaugagccacugcg

SEQ ID NO: 868347 - RNA, 18 nt, Human
ugggauuacaggcaugcg

SEQ ID NO: 868348 - RNA, 19 nt, Human
ugggauuacaggcaugcgc

SEQ ID NO: 868349 - RNA, 21 nt, Human
ugggauuacaggcaugcgcca

SEQ ID NO: 868350 - RNA, 21 nt, Human
ugggauuacaggcaugcgcca

SEQ ID NO: 868351 - RNA, 22 nt, Human
ugggauuacaggcaugcgccau

SEQ ID NO: 868352 - RNA, 24 nt, Human
ugggauuacaggcaugcgccauca

SEQ ID NO: 868353 - RNA, 24 nt, Human
ugggauuacaggcaugcgccauca

SEQ ID NO: 868354 - RNA, 24 nt, Human
ugggguuucaccauguuggucagg

SEQ ID NO: 868355 - RNA, 24 nt, Human
uggucaggcuggucucgaacuccu

SEQ ID NO: 868356 - RNA, 20 nt, Human
uguugcccaggcuggagugc

SEQ ID NO: 868357 - RNA, 20 nt, Human
uuaaauaagcauuuaaaaau

SEQ ID NO: 868358 - RNA, 23 nt, Human
uuaacagccucuucaccauuagc

SEQ ID NO: 868359 - RNA, 18 nt, Human
uuacugcaaccuccgccc

SEQ ID NO: 868360 - RNA, 24 nt, Human
uuacugcaaccuccgccccccagg

SEQ ID NO: 868361 - RNA, 21 nt, Human
uucaagugauucuccugccuc

SEQ ID NO: 868362 - RNA, 23 nt, Human
uucaagugauucuccugccucag

SEQ ID NO: 868363 - RNA, 24 nt, Human
uucaagugauucuccugccucagc

SEQ ID NO: 868364 - RNA, 24 nt, Human
uucacucuuguugcccaggcugga

SEQ ID NO: 868365 - RNA, 24 nt, Human
uucguagagaugggguuucaccau

SEQ ID NO: 868366 - RNA, 24 nt, Human
uuucaccauguuggucaggcuggu

SEQ ID NO: 868367 - RNA, 24 nt, Human
uuucacucuuguugcccaggcugg

SEQ ID NO: 868368 - RNA, 20 nt, Human
uuuuguauuuuucguagaga

SEQ ID NO: 868369 - RNA, 24 nt, Human
uuuuucguagagaugggguuucac

SEQ ID NO: 868370 - RNA, 20 nt, Human
aaagcagaccaaccccagga

SEQ ID NO: 868371 - RNA, 20 nt, Human
aaccccaggaucuccagcau

SEQ ID NO: 868372 - RNA, 25 nt, Human
aagaauccaaagcacuguacagaug

SEQ ID NO: 868373 - RNA, 18 nt, Human
aagcagaccaaccccagg

SEQ ID NO: 868374 - RNA, 19 nt, Human
aauccaaagcacuguacag

SEQ ID NO: 868375 - RNA, 21 nt, Human
acaacuggaucgcccuaggac

SEQ ID NO: 868376 - RNA, 25 nt, Human
acaacuggaucgcccuaggacacag

SEQ ID NO: 868377 - RNA, 20 nt, Human
acacaaagcagaccaacccc

SEQ ID NO: 868378 - RNA, 18 nt, Human
aguaccauacacaaagca

SEQ ID NO: 868379 - RNA, 22 nt, Human
caaguaccauacacaaagcaga

SEQ ID NO: 868380 - RNA, 21 nt, Human
cacuguacagaugaucaaaac

SEQ ID NO: 868381 - RNA, 22 nt, Human
cagcugcaccucuccuuacaga

SEQ ID NO: 868382 - RNA, 25 nt, Human
cagcugcaccucuccuuacagagcc

SEQ ID NO: 868383 - RNA, 24 nt, Human
ccauaauacauaagcaugacacag

SEQ ID NO: 868384 - RNA, 24 nt, Human
ccauacacaaagcagaccaacccc

SEQ ID NO: 868385 - RNA, 22 nt, Human
cccaccagucacugcuucuaga

SEQ ID NO: 868386 - RNA, 24 nt, Human
cugggguaggccugggaggaagaa

SEQ ID NO: 868387 - RNA, 21 nt, Human
gcucacugggguaggccuggg

SEQ ID NO: 868388 - RNA, 21 nt, Human
gcugcacaacuggaucgcccu

SEQ ID NO: 868389 - RNA, 24 nt, Human
gcugcaccucuccuuacagagcca

SEQ ID NO: 868390 - RNA, 20 nt, Human
gcugcagcugcaccucuccu

SEQ ID NO: 868391 - RNA, 19 nt, Human
ggcuuuuguuuggcaacag

SEQ ID NO: 868392 - RNA, 20 nt, Human
uagaacacugcugcagcugc

SEQ ID NO: 868393 - RNA, 25 nt, Human
ucacugggguaggccugggaggaag

SEQ ID NO: 868394 - RNA, 24 nt, Human
uccaucagaggccugcuucccuug

SEQ ID NO: 868395 - RNA, 18 nt, Human
ucccuuggcugaugguca

SEQ ID NO: 868396 - RNA, 24 nt, Human
uggaacugucagaaagccccacca

SEQ ID NO: 868397 - RNA, 23 nt, Human
ugggaggaagaauccaaagcacu

SEQ ID NO: 868398 - RNA, 19 nt, Human
uguacagaugaucaaaaaa

SEQ ID NO: 868399 - RNA, 19 nt, Human
ugucagaaagccccaccag

SEQ ID NO: 868400 - RNA, 24 nt, Human
aaaaaagucuuuggauaacaacua

SEQ ID NO: 868401 - RNA, 22 nt, Human
aaccauuuaaaaaucagaucua

SEQ ID NO: 868402 - RNA, 25 nt, Human
aaccauuuaaaaaucagaucuacga

SEQ ID NO: 868403 - RNA, 27 nt, Human
aacucauaacaaaacgcccacgcgucc

SEQ ID NO: 868404 - RNA, 21 nt, Human
aagauggauaugcauuacaaa

SEQ ID NO: 868405 - RNA, 19 nt, Human
aagcaaaguguucagaucu

SEQ ID NO: 868406 - RNA, 21 nt, Human
aagcacauguaaguaaaggua

SEQ ID NO: 868407 - RNA, 24 nt, Human
aagccuuguaaaaagauccuuugg

SEQ ID NO: 868408 - RNA, 22 nt, Human
aaugcuccagagaauccaaagc

SEQ ID NO: 868409 - RNA, 20 nt, Human
acaagacacaaauacauaau

SEQ ID NO: 868410 - RNA, 22 nt, Human
acagaucuucacuauguguuau

SEQ ID NO: 868411 - RNA, 19 nt, Human
acaucaaagugcuccuagu

SEQ ID NO: 868412 - RNA, 22 nt, Human
acugcuacaacauggacuucug

SEQ ID NO: 868413 - RNA, 22 nt, Human
agauauggccucagugauuucc

SEQ ID NO: 868414 - RNA, 22 nt, Human
aguguugcuuuggcaaaugguu

SEQ ID NO: 868415 - RNA, 26 nt, Human
auaaagcacauguaaguaaagguacu

SEQ ID NO: 868416 - RNA, 19 nt, Human
auuaaaacagaaaauucuu

SEQ ID NO: 868417 - RNA, 19 nt, Human
auuacaaaugaauugugcu

SEQ ID NO: 868418 - RNA, 20 nt, Human
caaaaaauucaagugaccau

SEQ ID NO: 868419 - RNA, 23 nt, Human
caaaugguuuuuauucuaaccca

SEQ ID NO: 868420 - RNA, 18 nt, Human
cacagaucuucacuaugu

SEQ ID NO: 868421 - RNA, 21 nt, Human
caguauuaaaaguauagagcu

SEQ ID NO: 868422 - RNA, 20 nt, Human
cauaacaaaacgcccacgcg

SEQ ID NO: 868423 - RNA, 23 nt, Human
cuauagcuuaaugugacuaauuu

SEQ ID NO: 868424 - RNA, 21 nt, Human
cucaaauucuaacugcuacaa

SEQ ID NO: 868425 - RNA, 24 nt, Human
cucagagucaauaccacaggaagc

SEQ ID NO: 868426 - RNA, 19 nt, Human
gaccuggcacuaguguagg

SEQ ID NO: 868427 - RNA, 23 nt, Human
gagauuuuaacaucuuacaauag

SEQ ID NO: 868428 - RNA, 19 nt, Human
ggucuucuuaaauuggcug

SEQ ID NO: 868429 - RNA, 18 nt, Human
uaaaaagauauggccuca

SEQ ID NO: 868430 - RNA, 23 nt, Human
uaaaacauaauugucacaagaca

SEQ ID NO: 868431 - RNA, 22 nt, Human
uaaaauuacaauaaacaacuga

SEQ ID NO: 868432 - RNA, 19 nt, Human
uaaagcaccuuggauugaa

SEQ ID NO: 868433 - RNA, 20 nt, Human
uaaucuacuccccuaauuaa

SEQ ID NO: 868434 - RNA, 19 nt, Human
uagugaggaggaaugaugu

SEQ ID NO: 868435 - RNA, 27 nt, Human
ucaaauucuaacugcuacaacauggac

SEQ ID NO: 868436 - RNA, 21 nt, Human
uccagagaauccaaagcagca

SEQ ID NO: 868437 - RNA, 24 nt, Human
ucuuuuuaaagcuauucugguuua

SEQ ID NO: 868438 - RNA, 19 nt, Human
ugaacaauuuuaaaagccc

SEQ ID NO: 868439 - RNA, 20 nt, Human
ugacaaaagcuaaauuuaug

SEQ ID NO: 868440 - RNA, 20 nt, Human
ugagacuucaugaggggucu

SEQ ID NO: 868441 - RNA, 23 nt, Human
ugcuccagagaauccaaagcagc

SEQ ID NO: 868442 - RNA, 24 nt, Human
uggauugaauccaagauggauaug

SEQ ID NO: 868443 - RNA, 26 nt, Human
uggccucagugauuuccucuuagcau

SEQ ID NO: 868444 - RNA, 19 nt, Human
ugucaaagcaaccaaccau

SEQ ID NO: 868445 - RNA, 20 nt, Human
uucaacuggaagagccacag

SEQ ID NO: 868446 - RNA, 21 nt, Human
uuucaacuggaagagccacag

SEQ ID NO: 868447 - RNA, 23 nt, Human
uuucaacuggaagagccacaguu

SEQ ID NO: 868448 - RNA, 20 nt, Human
aaacagguacacaagguccu

SEQ ID NO: 868449 - RNA, 23 nt, Human
aagaaaaccuuccagcaggagcc

SEQ ID NO: 868450 - RNA, 24 nt, Human
aaggagaaagagcaggguacacag

SEQ ID NO: 868451 - RNA, 24 nt, Human
aagugccagcaagcugcaagugcu

SEQ ID NO: 868452 - RNA, 23 nt, Human
acagggcaaaggaggcugcggaa

SEQ ID NO: 868453 - RNA, 21 nt, Human
acccauccugccacccauccu

SEQ ID NO: 868454 - RNA, 25 nt, Human
acuucuuuuuuuuuuugcaauuugg

SEQ ID NO: 868455 - RNA, 19 nt, Human
agcacaagaaaaccuucca

SEQ ID NO: 868456 - RNA, 19 nt, Human
agcaggauguacuugggug

SEQ ID NO: 868457 - RNA, 19 nt, Human
aggaagcagaaugcuagaa

SEQ ID NO: 868458 - RNA, 19 nt, Human
aggcagcugguccugggca

SEQ ID NO: 868459 - RNA, 19 nt, Human
aggcugcaucugcuugaaa

SEQ ID NO: 868460 - RNA, 21 nt, Human
agggcugggacugccggcuuc

SEQ ID NO: 868461 - RNA, 24 nt, Human
aggggacacaguggcuguuccagg

SEQ ID NO: 868462 - RNA, 21 nt, Human
agugaagacgcucaggaagga

SEQ ID NO: 868463 - RNA, 21 nt, Human
caaacagguacacaagguccu

SEQ ID NO: 868464 - RNA, 24 nt, Human
caagaaaaccuuccagcaggagcc

SEQ ID NO: 868465 - RNA, 19 nt, Human
caagcugcaagugcugcca

SEQ ID NO: 868466 - RNA, 18 nt, Human
caaugagccccugcccua

SEQ ID NO: 868467 - RNA, 22 nt, Human
cagaaugcuagaaggccuugca

SEQ ID NO: 868468 - RNA, 19 nt, Human
caggagccaggugggccug

SEQ ID NO: 868469 - RNA, 21 nt, Human
caggauguacuuggguggugu

SEQ ID NO: 868470 - RNA, 20 nt, Human
cagggcaaaggaggcugcgg

SEQ ID NO: 868471 - RNA, 18 nt, Human
caguugggcaccaugugc

SEQ ID NO: 868472 - RNA, 19 nt, Human
cauagccaauccuggccuc

SEQ ID NO: 868473 - RNA, 24 nt, Human
ccaaggacucaaagucucagaggc

SEQ ID NO: 868474 - RNA, 22 nt, Human
ccaggaagcagaaugcuagaag

SEQ ID NO: 868475 - RNA, 21 nt, Human
ccaguaccugcaggucacagg

SEQ ID NO: 868476 - RNA, 21 nt, Human
ccccauggcagucaguggagg

SEQ ID NO: 868477 - RNA, 23 nt, Human
ccccugcccuagaagggcuacag

SEQ ID NO: 868478 - RNA, 19 nt, Human
ccugaggcugugaggcugu

SEQ ID NO: 868479 - RNA, 21 nt, Human
ccugccacccauccuccuucc

SEQ ID NO: 868480 - RNA, 18 nt, Human
ccuuccagcaggagccag

SEQ ID NO: 868481 - RNA, 23 nt, Human
cgagcacaagaaaaccuuccagc

SEQ ID NO: 868482 - RNA, 20 nt, Human
cucagguugguucuuguugg

SEQ ID NO: 868483 - RNA, 24 nt, Human
cucccauggcuucaaagauggucc

SEQ ID NO: 868484 - RNA, 18 nt, Human
cucucaggccacugucag

SEQ ID NO: 868485 - RNA, 19 nt, Human
cugcagcuccucguuccag

SEQ ID NO: 868486 - RNA, 20 nt, Human
cugggcaucaacauguggcu

SEQ ID NO: 868487 - RNA, 21 nt, Human
cugggguugcaggggacacag

SEQ ID NO: 868488 - RNA, 20 nt, Human
cugguccugggcaucaacau

SEQ ID NO: 868489 - RNA, 27 nt, Human
cuuucugcuccugccgucucucaggcc

SEQ ID NO: 868490 - RNA, 23 nt, Human
gaagcagaaugcuagaaggccuu

SEQ ID NO: 868491 - RNA, 20 nt, Human
gaaugaaggagaaagagcag

SEQ ID NO: 868492 - RNA, 23 nt, Human
gagaaagagcaggguacacagau

SEQ ID NO: 868493 - RNA, 20 nt, Human
gcugugaucacaaacaggua

SEQ ID NO: 868494 - RNA, 23 nt, Human
ggauggcccuggccacucagccc

SEQ ID NO: 868495 - RNA, 20 nt, Human
ggccugaggcugugaggcug

SEQ ID NO: 868496 - RNA, 22 nt, Human
ggggacacaguggcuguuccag

SEQ ID NO: 868497 - RNA, 18 nt, Human
gugaugguggcucucacc

SEQ ID NO: 868498 - RNA, 21 nt, Human
uaaccgcacuaaugacuuuua

SEQ ID NO: 868499 - RNA, 20 nt, Human
uaagugccagcaagcugcaa

SEQ ID NO: 868500 - RNA, 19 nt, Human
uaccugcaggucacagggc

SEQ ID NO: 868501 - RNA, 21 nt, Human
uauuuuuuccucauuucucuc

SEQ ID NO: 868502 - RNA, 26 nt, Human
ucagcccagauagcaaggagggccuu

SEQ ID NO: 868503 - RNA, 20 nt, Human
uccacagccuugaccuccaa

SEQ ID NO: 868504 - RNA, 18 nt, Human
ucccauggcuucaaagau

SEQ ID NO: 868505 - RNA, 21 nt, Human
ucccauggcuucaaagauggu

SEQ ID NO: 868506 - RNA, 21 nt, Human
ucucccauggcuucaaagauu

SEQ ID NO: 868507 - RNA, 19 nt, Human
ucucucaguaaccgcacua

SEQ ID NO: 868508 - RNA, 21 nt, Human
ucucucccgagcacaagaaaa

SEQ ID NO: 868509 - RNA, 23 nt, Human
ugaaggauguggagccccagaag

SEQ ID NO: 868510 - RNA, 21 nt, Human
ugaugguggcucucacccucu

SEQ ID NO: 868511 - RNA, 23 nt, Human
ugaugguggcucucacccucucc

SEQ ID NO: 868512 - RNA, 20 nt, Human
ugcaggggacacaguggcug

SEQ ID NO: 868513 - RNA, 22 nt, Human
uggagggugggaagcuggaugg

SEQ ID NO: 868514 - RNA, 21 nt, Human
uggauggaguagaauaaaggc

SEQ ID NO: 868515 - RNA, 18 nt, Human
uggucaggcugcaucugc

SEQ ID NO: 868516 - RNA, 22 nt, Human
uggugugcagucgguggggucc

SEQ ID NO: 868517 - RNA, 22 nt, Human
uucaggggcuuuuagucaccgu

SEQ ID NO: 868518 - RNA, 23 nt, Human
uuccagggucccuagcaggaugu

SEQ ID NO: 868519 - RNA, 19 nt, Human
uuggccuuggcccuaaugg

SEQ ID NO: 868520 - RNA, 25 nt, Human
uuggccuuggcccuaauggucaggc

SEQ ID NO: 868521 - RNA, 23 nt, Human
uuggguggugugcagucgguggg

SEQ ID NO: 868522 - RNA, 20 nt, Human
uuuggccuuggcccuaaugg

SEQ ID NO: 868523 - RNA, 22 nt, Human
aaaccaccaggggccacagcag

SEQ ID NO: 868524 - RNA, 24 nt, Human
aacacagccaacacagcacagcca

SEQ ID NO: 868525 - RNA, 20 nt, Human
aacucgggcacacucagcag

SEQ ID NO: 868526 - RNA, 19 nt, Human
aagccagccagcucugccu

SEQ ID NO: 868527 - RNA, 18 nt, Human
aagcccagcucugcauuc

SEQ ID NO: 868528 - RNA, 22 nt, Human
aagguuuccuuagcugccacau

SEQ ID NO: 868529 - RNA, 23 nt, Human
aaugcuguuuucuucacauccac

SEQ ID NO: 868530 - RNA, 20 nt, Human
acacacugccccaccccaga

SEQ ID NO: 868531 - RNA, 20 nt, Human
acacugccccaccccagagu

SEQ ID NO: 868532 - RNA, 27 nt, Human
acacugccccaccccagagugguaggc

SEQ ID NO: 868533 - RNA, 21 nt, Human
acccagaggagcaguaaggaa

SEQ ID NO: 868534 - RNA, 19 nt, Human
accccgcacccucacuguc

SEQ ID NO: 868535 - RNA, 22 nt, Human
accccgcacccucacugucaga

SEQ ID NO: 868536 - RNA, 22 nt, Human
accuaagaguguaacuacuggc

SEQ ID NO: 868537 - RNA, 19 nt, Human
agagcacaugcucaccaag

SEQ ID NO: 868538 - RNA, 25 nt, Human
agauccagcagaaaauaggccaaaa

SEQ ID NO: 868539 - RNA, 19 nt, Human
agcacagccagagcagacu

SEQ ID NO: 868540 - RNA, 21 nt, Human
agcucucccuccucucccucc

SEQ ID NO: 868541 - RNA, 23 nt, Human
aggaagacagcaaccagaagagg

SEQ ID NO: 868542 - RNA, 19 nt, Human
aggagcaguaaggaagcuc

SEQ ID NO: 868543 - RNA, 22 nt, Human
aggagcaguaaggaagcuccua

SEQ ID NO: 868544 - RNA, 20 nt, Human
aggcaaaggaggaaacagca

SEQ ID NO: 868545 - RNA, 22 nt, Human
aggcaaaggaggaaacagcaac

SEQ ID NO: 868546 - RNA, 19 nt, Human
aggcugugcagcggcuucu

SEQ ID NO: 868547 - RNA, 24 nt, Human
agggagaaagcgaggcugccagag

SEQ ID NO: 868548 - RNA, 20 nt, Human
aggggcuggggugaguccug

SEQ ID NO: 868549 - RNA, 24 nt, Human
agugcguguucacaaaguggaggg

SEQ ID NO: 868550 - RNA, 24 nt, Human
caagauagaagccuccucaucuga

SEQ ID NO: 868551 - RNA, 21 nt, Human
cacagcacagccagagcagac

SEQ ID NO: 868552 - RNA, 22 nt, Human
cacagcaggauacucaacaaga

SEQ ID NO: 868553 - RNA, 18 nt, Human
caccaggggccacagcag

SEQ ID NO: 868554 - RNA, 19 nt, Human
cagcagaaaauaggccaaa

SEQ ID NO: 868555 - RNA, 18 nt, Human
cagcagcuccugcaggug

SEQ ID NO: 868556 - RNA, 19 nt, Human
caggagccucccuaaagcu

SEQ ID NO: 868557 - RNA, 21 nt, Human
ccagagcagacucgaacgcag

SEQ ID NO: 868558 - RNA, 24 nt, Human
ccagccgcggagccgcagccacag

SEQ ID NO: 868559 - RNA, 20 nt, Human
ccaggagccucccuaaagcu

SEQ ID NO: 868560 - RNA, 21 nt, Human
ccagggguggagcaucagggg

SEQ ID NO: 868561 - RNA, 18 nt, Human
cccacacacugccccacc

SEQ ID NO: 868562 - RNA, 19 nt, Human
cccacacacugccccaccc

SEQ ID NO: 868563 - RNA, 25 nt, Human
cccagaccaggagccucccuaaagc

SEQ ID NO: 868564 - RNA, 22 nt, Human
cccagccgcggagccgcagcca

SEQ ID NO: 868565 - RNA, 24 nt, Human
cccagccgcggagccgcagccaca

SEQ ID NO: 868566 - RNA, 19 nt, Human
ccccacacacugccccacc

SEQ ID NO: 868567 - RNA, 20 nt, Human
cccccugauccagcaacuca

SEQ ID NO: 868568 - RNA, 22 nt, Human
cccgcacccucacugucagagu

SEQ ID NO: 868569 - RNA, 19 nt, Human
cccugccccauugaagugc

SEQ ID NO: 868570 - RNA, 22 nt, Human
ccgccgccagcaccgccuccca

SEQ ID NO: 868571 - RNA, 20 nt, Human
ccgccucggccguggccgcc

SEQ ID NO: 868572 - RNA, 26 nt, Human
ccgcugcgccgccgccagcaccgccu

SEQ ID NO: 868573 - RNA, 21 nt, Human
ccgggcgccugaccccgcacc

SEQ ID NO: 868574 - RNA, 22 nt, Human
ccguggccgccuccuccucugc

SEQ ID NO: 868575 - RNA, 18 nt, Human
ccucaguggugagugccu

SEQ ID NO: 868576 - RNA, 18 nt, Human
ccucccagccgcggagcc

SEQ ID NO: 868577 - RNA, 19 nt, Human
cggccguggccgccuccuc

SEQ ID NO: 868578 - RNA, 19 nt, Human
cguggccaggcgucccacc

SEQ ID NO: 868579 - RNA, 28 nt, Human
cguggccaggcgucccaccgccucggcc

SEQ ID NO: 868580 - RNA, 24 nt, Human
cuaaagcuuggccagugcccacgg

SEQ ID NO: 868581 - RNA, 18 nt, Human
cuaaucucaagagagagc

SEQ ID NO: 868582 - RNA, 20 nt, Human
cuaaucucaagagagagcac

SEQ ID NO: 868583 - RNA, 20 nt, Human
cucacugucagaguguggcu

SEQ ID NO: 868584 - RNA, 23 nt, Human
cucccacaccagcaaccgcugcg

SEQ ID NO: 868585 - RNA, 21 nt, Human
cuccugggggugcauucuucc

SEQ ID NO: 868586 - RNA, 19 nt, Human
cucugcauucagcugcucc

SEQ ID NO: 868587 - RNA, 23 nt, Human
cucuuuacuucccagaccaggag

SEQ ID NO: 868588 - RNA, 21 nt, Human
cugcagcuccuuccucaacgg

SEQ ID NO: 868589 - RNA, 22 nt, Human
cugcgccgccgccagcaccgcc

SEQ ID NO: 868590 - RNA, 25 nt, Human
cugcgccgccgccagcaccgccucc

SEQ ID NO: 868591 - RNA, 22 nt, Human
cuggauucugccucuuguacug

SEQ ID NO: 868592 - RNA, 21 nt, Human
gagcaggggcuccaggcgagu

SEQ ID NO: 868593 - RNA, 19 nt, Human
gaggaaacagcaacacucc

SEQ ID NO: 868594 - RNA, 18 nt, Human
gagggacgaggaagacag

SEQ ID NO: 868595 - RNA, 20 nt, Human
gauccagcagaaaauaggcc

SEQ ID NO: 868596 - RNA, 24 nt, Human
gccaaggccaaugcuguuuucuuc

SEQ ID NO: 868597 - RNA, 24 nt, Human
gccagcucucccuccucucccucc

SEQ ID NO: 868598 - RNA, 21 nt, Human
gcccgggauacggagaagcca

SEQ ID NO: 868599 - RNA, 19 nt, Human
gccucgcuuucacucucug

SEQ ID NO: 868600 - RNA, 19 nt, Human
gcgccgccgccagcaccgc

SEQ ID NO: 868601 - RNA, 18 nt, Human
gcuggggugaguccuggg

SEQ ID NO: 868602 - RNA, 22 nt, Human
ggagaagccagccagcucugcc

SEQ ID NO: 868603 - RNA, 20 nt, Human
ggagaauggaaggggagggg

SEQ ID NO: 868604 - RNA, 18 nt, Human
ggcaggcaggggcugggg

SEQ ID NO: 868605 - RNA, 19 nt, Human
ggcaggcaggggcuggggu

SEQ ID NO: 868606 - RNA, 18 nt, Human
gugccugcagcuccuucc

SEQ ID NO: 868607 - RNA, 27 nt, Human
guggccaggcgucccaccgccucggcc

SEQ ID NO: 868608 - RNA, 28 nt, Human
uacuucccagaccaggagccucccuaaa

SEQ ID NO: 868609 - RNA, 20 nt, Human
uagugucccaacacagccaa

SEQ ID NO: 868610 - RNA, 21 nt, Human
ucaacaagacaauguaggaaa

SEQ ID NO: 868611 - RNA, 22 nt, Human
ucacauccaccacuggggagaa

SEQ ID NO: 868612 - RNA, 18 nt, Human
ucacucucugucucugcc

SEQ ID NO: 868613 - RNA, 20 nt, Human
ucacuuggcaggcucugcug

SEQ ID NO: 868614 - RNA, 24 nt, Human
ucaggggcaggcaggggcuggggu

SEQ ID NO: 868615 - RNA, 23 nt, Human
uccaagauagaagccuccucauc

SEQ ID NO: 868616 - RNA, 18 nt, Human
uccccacacacugcccca

SEQ ID NO: 868617 - RNA, 19 nt, Human
uccucaguggugagugccu

SEQ ID NO: 868618 - RNA, 23 nt, Human
uccucuggaucagcucaugauaa

SEQ ID NO: 868619 - RNA, 18 nt, Human
uccucuuccucuuccucc

SEQ ID NO: 868620 - RNA, 23 nt, Human
ucucugccaguggcucaucaccu

SEQ ID NO: 868621 - RNA, 22 nt, Human
ucucuggcuccaagcccagcuc

SEQ ID NO: 868622 - RNA, 19 nt, Human
ucugccucgcuuucacucu

SEQ ID NO: 868623 - RNA, 23 nt, Human
ucuguaauggccaaggccggggc

SEQ ID NO: 868624 - RNA, 21 nt, Human
ucuuccucuuccuccgagucc

SEQ ID NO: 868625 - RNA, 23 nt, Human
ugaaaggccgggcugaauggggc

SEQ ID NO: 868626 - RNA, 23 nt, Human
ugaagugcguguucacaaagugg

SEQ ID NO: 868627 - RNA, 20 nt, Human
ugaauggggcaaggaugcag

SEQ ID NO: 868628 - RNA, 22 nt, Human
ugaauggggcaaggaugcagug

SEQ ID NO: 868629 - RNA, 21 nt, Human
ugacagagcuugaggacggcc

SEQ ID NO: 868630 - RNA, 21 nt, Human
ugaccaggcugugcagcggcu

SEQ ID NO: 868631 - RNA, 20 nt, Human
ugagcgcggccgccgugacc

SEQ ID NO: 868632 - RNA, 18 nt, Human
ugaggacggccuaguagg

SEQ ID NO: 868633 - RNA, 19 nt, Human
ugcacagauguuagugucc

SEQ ID NO: 868634 - RNA, 20 nt, Human
ugccuaggcucagacccaga

SEQ ID NO: 868635 - RNA, 21 nt, Human
ugccucgcuuucacucucugu

SEQ ID NO: 868636 - RNA, 19 nt, Human
ugccugcagcuccuuccuc

SEQ ID NO: 868637 - RNA, 26 nt, Human
ugcggccgggcgccugaccccgcacc

SEQ ID NO: 868638 - RNA, 21 nt, Human
ugcuccagcucccccugaucc

SEQ ID NO: 868639 - RNA, 18 nt, Human
ugcuguuuucuucacauc

SEQ ID NO: 868640 - RNA, 23 nt, Human
uggaacauagugucccaacacag

SEQ ID NO: 868641 - RNA, 18 nt, Human
uggaaggggagggggcug

SEQ ID NO: 868642 - RNA, 23 nt, Human
uggccaggcgucccaccgccucg

SEQ ID NO: 868643 - RNA, 20 nt, Human
uggccgccuccuccucugcc

SEQ ID NO: 868644 - RNA, 19 nt, Human
uggcuccucuggggaugau

SEQ ID NO: 868645 - RNA, 20 nt, Human
ugggagaauggaaggggagg

SEQ ID NO: 868646 - RNA, 28 nt, Human
uggggagaagccagccagcucugccucg

SEQ ID NO: 868647 - RNA, 21 nt, Human
uggggcaaggaugcagugaag

SEQ ID NO: 868648 - RNA, 19 nt, Human
uggggugaguccuggggaa

SEQ ID NO: 868649 - RNA, 24 nt, Human
ugucucuggcuccaagcccagcuc

SEQ ID NO: 868650 - RNA, 26 nt, Human
uguggcuccucuggggaugaugcuga

SEQ ID NO: 868651 - RNA, 22 nt, Human
uuaguguccacuuccugacccu

SEQ ID NO: 868652 - RNA, 21 nt, Human
uucacaaaguggaggggggau

SEQ ID NO: 868653 - RNA, 20 nt, Human
uuccuccgaguccagggcuu

SEQ ID NO: 868654 - RNA, 23 nt, Human
uuccucuuccuccgaguccaggg

SEQ ID NO: 868655 - RNA, 21 nt, Human
uugaagugcguguucacaaag

SEQ ID NO: 868656 - RNA, 22 nt, Human
acuaaguugcaggcuggagcag

SEQ ID NO: 868657 - RNA, 20 nt, Human
acuuccaggagugcucuggg

SEQ ID NO: 868658 - RNA, 19 nt, Human
agagaggggaacugggggc

SEQ ID NO: 868659 - RNA, 18 nt, Human
agaggcacauuugcaagg

SEQ ID NO: 868660 - RNA, 18 nt, Human
agccugcggagccacugg

SEQ ID NO: 868661 - RNA, 18 nt, Human
agucccacuuccaggagu

SEQ ID NO: 868662 - RNA, 21 nt, Human
agugcaggagcagucuggaga

SEQ ID NO: 868663 - RNA, 19 nt, Human
cagcccagaguggcagcag

SEQ ID NO: 868664 - RNA, 18 nt, Human
cagcgaggccaccugcca

SEQ ID NO: 868665 - RNA, 21 nt, Human
ccaacagcugagacgggaggc

SEQ ID NO: 868666 - RNA, 23 nt, Human
ccugcucacagcccuucagucug

SEQ ID NO: 868667 - RNA, 24 nt, Human
ccuggcaggacugucacaggguuc

SEQ ID NO: 868668 - RNA, 24 nt, Human
ccuuacaccugcucacagcccuuc

SEQ ID NO: 868669 - RNA, 18 nt, Human
cucugggccacucagccu

SEQ ID NO: 868670 - RNA, 19 nt, Human
cucugggccacucagccug

SEQ ID NO: 868671 - RNA, 22 nt, Human
cugccaggcuguccugggccau

SEQ ID NO: 868672 - RNA, 24 nt, Human
cuuacaccugcucacagcccuuca

SEQ ID NO: 868673 - RNA, 19 nt, Human
gaggccaccugccaggcug

SEQ ID NO: 868674 - RNA, 20 nt, Human
gagugugggggcagagaggg

SEQ ID NO: 868675 - RNA, 19 nt, Human
gcaggagcagucuggagag

SEQ ID NO: 868676 - RNA, 18 nt, Human
gccaggaggccugguucc

SEQ ID NO: 868677 - RNA, 19 nt, Human
gccugccuacugucuccca

SEQ ID NO: 868678 - RNA, 18 nt, Human
gcucugggccacucagcc

SEQ ID NO: 868679 - RNA, 20 nt, Human
ggacaagaacgggcagagaa

SEQ ID NO: 868680 - RNA, 18 nt, Human
ggagcccuuacaccugcu

SEQ ID NO: 868681 - RNA, 21 nt, Human
ggcagagaaggugcugcgggg

SEQ ID NO: 868682 - RNA, 20 nt, Human
ggcagagaggggaacugggg

SEQ ID NO: 868683 - RNA, 22 nt, Human
ggcagagaggggaacugggggc

SEQ ID NO: 868684 - RNA, 18 nt, Human
ggcagcagcugcggacac

SEQ ID NO: 868685 - RNA, 23 nt, Human
gggauggccugggcccuggcagg

SEQ ID NO: 868686 - RNA, 20 nt, Human
gggcagagaggggaacuggg

SEQ ID NO: 868687 - RNA, 21 nt, Human
gggcagagaggggaacugggg

SEQ ID NO: 868688 - RNA, 21 nt, Human
ggggaggggguaagugcagga

SEQ ID NO: 868689 - RNA, 24 nt, Human
ggguaagugcaggagcagucugga

SEQ ID NO: 868690 - RNA, 21 nt, Human
gugggggcagagaggggaacu

SEQ ID NO: 868691 - RNA, 19 nt, Human
uaccuuucucgccuguagc

SEQ ID NO: 868692 - RNA, 20 nt, Human
uaccuuucucgccuguagcc

SEQ ID NO: 868693 - RNA, 20 nt, Human
ucacagcccuucagucuguc

SEQ ID NO: 868694 - RNA, 22 nt, Human
ucaggaggaaguaauuccuucc

SEQ ID NO: 868695 - RNA, 21 nt, Human
ugcaggagcagucuggagagg

SEQ ID NO: 868696 - RNA, 24 nt, Human
uggagggaugguggggaggggcug

SEQ ID NO: 868697 - RNA, 24 nt, Human
uggcagcagcugcggacacaggcu

SEQ ID NO: 868698 - RNA, 21 nt, Human
uggcaggacugucacaggguu

SEQ ID NO: 868699 - RNA, 28 nt, Human
ugggggcagagaggggaacugggggcag

SEQ ID NO: 868700 - RNA, 21 nt, Human
ugugggggcagagaggggaac

SEQ ID NO: 868701 - RNA, 18 nt, Human
uucagucuguccuugcag

SEQ ID NO: 868702 - RNA, 21 nt, Human
uuuuuuuuuugaaaacagaag

SEQ ID NO: 868703 - RNA, 23 nt, Human
uuuuuuuuuuuuuuuuuuuuggg

SEQ ID NO: 868704 - RNA, 18 nt, Human
aaaaacacaagcucuccc

SEQ ID NO: 868705 - RNA, 22 nt, Human
aaacagacgauuuuccccucca

SEQ ID NO: 868706 - RNA, 23 nt, Human
aaacagacgauuuuccccuccac

SEQ ID NO: 868707 - RNA, 22 nt, Human
aacacaagcucucccguuuacc

SEQ ID NO: 868708 - RNA, 18 nt, Human
accacagcccuuggaucu

SEQ ID NO: 868709 - RNA, 21 nt, Human
accacagcccuuggaucugca

SEQ ID NO: 868710 - RNA, 23 nt, Human
accacagcccuuggaucugcacc

SEQ ID NO: 868711 - RNA, 19 nt, Human
agcaggcacuuuacaauga

SEQ ID NO: 868712 - RNA, 23 nt, Human
auagacuaauaagccaagagcuu

SEQ ID NO: 868713 - RNA, 22 nt, Human
caccagccugggcauccagaau

SEQ ID NO: 868714 - RNA, 22 nt, Human
cagcagauacauguccugaaau

SEQ ID NO: 868715 - RNA, 23 nt, Human
cagcaggcacuuuacaaugagcc

SEQ ID NO: 868716 - RNA, 21 nt, Human
caguacucggagacaaaggca

SEQ ID NO: 868717 - RNA, 18 nt, Human
cccaaaccaucccucccc

SEQ ID NO: 868718 - RNA, 19 nt, Human
cccaaaccaucccuccccc

SEQ ID NO: 868719 - RNA, 20 nt, Human
cccuccaccuugaaaauaaa

SEQ ID NO: 868720 - RNA, 18 nt, Human
cucugcuccgcucgcacc

SEQ ID NO: 868721 - RNA, 21 nt, Human
cuucaaaaacacaagcucucc

SEQ ID NO: 868722 - RNA, 22 nt, Human
gcaggcacuuuacaaugagccc

SEQ ID NO: 868723 - RNA, 21 nt, Human
gcaguacucggagacaaaggc

SEQ ID NO: 868724 - RNA, 19 nt, Human
uaccacagcccuuggaucu

SEQ ID NO: 868725 - RNA, 18 nt, Human
uccaccuucucugggaag

SEQ ID NO: 868726 - RNA, 19 nt, Human
uccaccuugaaaauaaaau

SEQ ID NO: 868727 - RNA, 19 nt, Human
ucccccagugcacacaggu

SEQ ID NO: 868728 - RNA, 21 nt, Human
ucccccagugcacacaggugc

SEQ ID NO: 868729 - RNA, 22 nt, Human
ugaccaacaccagccgccacgc

SEQ ID NO: 868730 - RNA, 22 nt, Human
ugcagcaggcacuuuacaauga

SEQ ID NO: 868731 - RNA, 24 nt, Human
ugcaguacucggagacaaagucca

SEQ ID NO: 868732 - RNA, 22 nt, Human
ugcccaaaccaucccuccccca

SEQ ID NO: 868733 - RNA, 23 nt, Human
ugcccaaaccaucccucccccag

SEQ ID NO: 868734 - RNA, 19 nt, Human
uggaucugcaccugcccaa

SEQ ID NO: 868735 - RNA, 22 nt, Human
uguauagacuaauaagccaaga

SEQ ID NO: 868736 - RNA, 18 nt, Human
uuuuuuuuuuuuuuuuug

SEQ ID NO: 868737 - RNA, 19 nt, Human
uuuuuuuuuuuuuuuuugu

SEQ ID NO: 868738 - RNA, 21 nt, Human
aacaaagcugaaccccaauaa

SEQ ID NO: 868739 - RNA, 22 nt, Human
aacaacacaaacauaugaccca

SEQ ID NO: 868740 - RNA, 19 nt, Human
aacaaggggagcaguggaa

SEQ ID NO: 868741 - RNA, 19 nt, Human
aagcggccaccucuggaag

SEQ ID NO: 868742 - RNA, 24 nt, Human
aauauggccuugggaugccuugau

SEQ ID NO: 868743 - RNA, 24 nt, Human
aauauuaugguaagguuaaaaagg

SEQ ID NO: 868744 - RNA, 24 nt, Human
aauugcccuauuuuaaaucuccau

SEQ ID NO: 868745 - RNA, 21 nt, Human
agagcuccccauauaauuuuc

SEQ ID NO: 868746 - RNA, 22 nt, Human
agcauuuucccaccagggaaag

SEQ ID NO: 868747 - RNA, 19 nt, Human
agccggccgggaacaaggg

SEQ ID NO: 868748 - RNA, 19 nt, Human
aggaagggcaagcauuuua

SEQ ID NO: 868749 - RNA, 19 nt, Human
aggaaugggcauaaaggga

SEQ ID NO: 868750 - RNA, 22 nt, Human
aucucuucccacuaaauugccc

SEQ ID NO: 868751 - RNA, 23 nt, Human
aucugcaucuaaacccucuccaa

SEQ ID NO: 868752 - RNA, 18 nt, Human
aucuuugauuacauauau

SEQ ID NO: 868753 - RNA, 21 nt, Human
auggauuccugagggcuccau

SEQ ID NO: 868754 - RNA, 18 nt, Human
auuaaacaugacauccaa

SEQ ID NO: 868755 - RNA, 23 nt, Human
caacaacacgcuagaaaauuaaa

SEQ ID NO: 868756 - RNA, 21 nt, Human
caaucugacuauaagagcauc

SEQ ID NO: 868757 - RNA, 19 nt, Human
cacacuuuugaaggccauc

SEQ ID NO: 868758 - RNA, 23 nt, Human
cacuguaacauucagcuucuaca

SEQ ID NO: 868759 - RNA, 21 nt, Human
caucuagggucucaucugcuc

SEQ ID NO: 868760 - RNA, 19 nt, Human
caucugcuccugccucugc

SEQ ID NO: 868761 - RNA, 22 nt, Human
caucugguccugcuuauccucc

SEQ ID NO: 868762 - RNA, 27 nt, Human
cauugagaacacacuuuugaaggccau

SEQ ID NO: 868763 - RNA, 24 nt, Human
cauuuuaaagcuccagggccggga

SEQ ID NO: 868764 - RNA, 25 nt, Human
ccaauauucaaguucaauucccaau

SEQ ID NO: 868765 - RNA, 19 nt, Human
ccucugcauggcuugccuc

SEQ ID NO: 868766 - RNA, 20 nt, Human
ccucugcauggcuugccucc

SEQ ID NO: 868767 - RNA, 23 nt, Human
ccugggauccccaggugcucaag

SEQ ID NO: 868768 - RNA, 18 nt, Human
cuccugccucugcauggc

SEQ ID NO: 868769 - RNA, 19 nt, Human
cugcauggcuugccuccgc

SEQ ID NO: 868770 - RNA, 19 nt, Human
cugugcaugagucugccgu

SEQ ID NO: 868771 - RNA, 18 nt, Human
gaaaaaaagcugaaaaug

SEQ ID NO: 868772 - RNA, 18 nt, Human
gaagggcaagcauuuuaa

SEQ ID NO: 868773 - RNA, 24 nt, Human
gcaacaacacaaacauaugaccca

SEQ ID NO: 868774 - RNA, 19 nt, Human
gcgucucugagggucugac

SEQ ID NO: 868775 - RNA, 18 nt, Human
gcuagaaaauuaaacuua

SEQ ID NO: 868776 - RNA, 18 nt, Human
gcuccugccugccaucca

SEQ ID NO: 868777 - RNA, 21 nt, Human
ggaaauggggucacaccaaau

SEQ ID NO: 868778 - RNA, 19 nt, Human
ggaagggcaagcauuuuaa

SEQ ID NO: 868779 - RNA, 21 nt, Human
ggccaucuuuuuuuuuuuuuu

SEQ ID NO: 868780 - RNA, 26 nt, Human
gggaggcagccagccggccgggaaca

SEQ ID NO: 868781 - RNA, 20 nt, Human
gggcaaucuuuuuuuucuuu

SEQ ID NO: 868782 - RNA, 22 nt, Human
guaagacaacaacacgcuagaa

SEQ ID NO: 868783 - RNA, 18 nt, Human
guauauauaacauaugua

SEQ ID NO: 868784 - RNA, 26 nt, Human
guccugcuuauccuccaguuuauuca

SEQ ID NO: 868785 - RNA, 20 nt, Human
gugcuggacacagcacgggg

SEQ ID NO: 868786 - RNA, 22 nt, Human
uaagacaacaacacgcuagaaa

SEQ ID NO: 868787 - RNA, 22 nt, Human
uaaucugcucuuuauuuucccc

SEQ ID NO: 868788 - RNA, 20 nt, Human
uacagcaacaacacaaacau

SEQ ID NO: 868789 - RNA, 21 nt, Human
uaccucaccugaccaggguuc

SEQ ID NO: 868790 - RNA, 19 nt, Human
uagauaaacauguuccuca

SEQ ID NO: 868791 - RNA, 18 nt, Human
uaggaaaaaaagcugaaa

SEQ ID NO: 868792 - RNA, 21 nt, Human
uauaaagccacagaucauucu

SEQ ID NO: 868793 - RNA, 20 nt, Human
uaucgcucuacuaccucaaa

SEQ ID NO: 868794 - RNA, 18 nt, Human
uauguauauauaacauau

SEQ ID NO: 868795 - RNA, 19 nt, Human
uauguauauauaacauaug

SEQ ID NO: 868796 - RNA, 21 nt, Human
uauguauauauaacauaugua

SEQ ID NO: 868797 - RNA, 26 nt, Human
uauucaaguucaauucccaaucugac

SEQ ID NO: 868798 - RNA, 18 nt, Human
ucagaucuucagaguagc

SEQ ID NO: 868799 - RNA, 25 nt, Human
ucauacaacauugagaacacacuuu

SEQ ID NO: 868800 - RNA, 19 nt, Human
ucauacauccacauaugua

SEQ ID NO: 868801 - RNA, 21 nt, Human
uccauggauuccugagggcuc

SEQ ID NO: 868802 - RNA, 19 nt, Human
ucccuuuuccuucucugug

SEQ ID NO: 868803 - RNA, 18 nt, Human
ucgcucuacuaccucaaa

SEQ ID NO: 868804 - RNA, 21 nt, Human
ucucugugcaugagucugccg

SEQ ID NO: 868805 - RNA, 21 nt, Human
ucugcaucuaaacccucucca

SEQ ID NO: 868806 - RNA, 19 nt, Human
ucugcucuuuauuuucccc

SEQ ID NO: 868807 - RNA, 18 nt, Human
ucuuuguggguugaagag

SEQ ID NO: 868808 - RNA, 19 nt, Human
ugacccaauauucaaguuc

SEQ ID NO: 868809 - RNA, 19 nt, Human
ugagaagggaggaaauggg

SEQ ID NO: 868810 - RNA, 22 nt, Human
ugagaagggaggaaaugggguc

SEQ ID NO: 868811 - RNA, 18 nt, Human
ugagauguucccuuuucc

SEQ ID NO: 868812 - RNA, 24 nt, Human
ugagggcuccaugcuccugccugc

SEQ ID NO: 868813 - RNA, 19 nt, Human
ugagucugccgucuucccc

SEQ ID NO: 868814 - RNA, 18 nt, Human
ugauagacuacagcaaca

SEQ ID NO: 868815 - RNA, 20 nt, Human
ugauuuguuugggcaaucuu

SEQ ID NO: 868816 - RNA, 24 nt, Human
ugcgagcagguuugcagugccaag

SEQ ID NO: 868817 - RNA, 18 nt, Human
uggaagcugagagcugga

SEQ ID NO: 868818 - RNA, 21 nt, Human
uggauggaauuaaacaugaca

SEQ ID NO: 868819 - RNA, 20 nt, Human
ugggaugccuugauguccuc

SEQ ID NO: 868820 - RNA, 18 nt, Human
uggggucacaccaaauca

SEQ ID NO: 868821 - RNA, 24 nt, Human
uguauacuuacacacauugguaua

SEQ ID NO: 868822 - RNA, 24 nt, Human
uguugacaauucauaggaaaaaaa

SEQ ID NO: 868823 - RNA, 19 nt, Human
uguuggaggggauacagga

SEQ ID NO: 868824 - RNA, 21 nt, Human
uuaagaaucacucaaagaauc

SEQ ID NO: 868825 - RNA, 22 nt, Human
uucaaaauauacuaucaaacua

SEQ ID NO: 868826 - RNA, 18 nt, Human
uucagcuucuacaggagg

SEQ ID NO: 868827 - RNA, 23 nt, Human
uucauaggaaaaaaagcugaaaa

SEQ ID NO: 868828 - RNA, 26 nt, Human
uucauaggaaaaaaagcugaaaaugu

SEQ ID NO: 868829 - RNA, 24 nt, Human
uucucguggcaucuagggucucau

SEQ ID NO: 868830 - RNA, 21 nt, Human
uugaagagagacaacaaccga

SEQ ID NO: 868831 - RNA, 23 nt, Human
uugaaggccaucuuuuuuuuuuu

SEQ ID NO: 868832 - RNA, 23 nt, Human
uuggaauucucccugaguuaauu

SEQ ID NO: 868833 - RNA, 18 nt, Human
uuuaaggaaaaugcagaa

SEQ ID NO: 868834 - RNA, 21 nt, Human
uuuuuucuuuuuuaaagauug

SEQ ID NO: 868835 - RNA, 19 nt, Human
uuuuuuuuuuuuuaaggaa

SEQ ID NO: 868836 - RNA, 21 nt, Human
accaacuucacucccuccccu

SEQ ID NO: 868837 - RNA, 25 nt, Human
acuucacucccuccccuguccucag

SEQ ID NO: 868838 - RNA, 21 nt, Human
agaugccccgaggagcacaga

SEQ ID NO: 868839 - RNA, 23 nt, Human
agccgcuggaaggggggugagcc

SEQ ID NO: 868840 - RNA, 24 nt, Human
agggcagggggugcagccccaggu

SEQ ID NO: 868841 - RNA, 23 nt, Human
agggucagaagucacagggagcc

SEQ ID NO: 868842 - RNA, 23 nt, Human
augcugccaccaagccccugggg

SEQ ID NO: 868843 - RNA, 23 nt, Human
caaaccaacuucacucccucccc

SEQ ID NO: 868844 - RNA, 19 nt, Human
caaagcaacacagaggagc

SEQ ID NO: 868845 - RNA, 25 nt, Human
caaagcaacacagaggagcaagggc

SEQ ID NO: 868846 - RNA, 23 nt, Human
caagucagcaggucccuggggag

SEQ ID NO: 868847 - RNA, 23 nt, Human
cagaagggucugagggcaugaug

SEQ ID NO: 868848 - RNA, 18 nt, Human
cagagcccuggaggagug

SEQ ID NO: 868849 - RNA, 22 nt, Human
cagcgggcagagcccagaaggg

SEQ ID NO: 868850 - RNA, 21 nt, Human
cagcugcuggcccagccagga

SEQ ID NO: 868851 - RNA, 19 nt, Human
cagggggugcagccccagg

SEQ ID NO: 868852 - RNA, 19 nt, Human
cagggggugcagccccagg

SEQ ID NO: 868853 - RNA, 20 nt, Human
ccaccccaaaccaacuucac

SEQ ID NO: 868854 - RNA, 27 nt, Human
ccacccgugagcaaaggccgcaggggu

SEQ ID NO: 868855 - RNA, 18 nt, Human
ccagccgcuggaaggggg

SEQ ID NO: 868856 - RNA, 19 nt, Human
ccaggaaagcgggaccagc

SEQ ID NO: 868857 - RNA, 22 nt, Human
ccaggggugggcagggccaccc

SEQ ID NO: 868858 - RNA, 23 nt, Human
cccagccccaggcuuugucccac

SEQ ID NO: 868859 - RNA, 18 nt, Human
cccaggaggagugggacu

SEQ ID NO: 868860 - RNA, 24 nt, Human
ccccaacuucaaggcugccaaguu

SEQ ID NO: 868861 - RNA, 27 nt, Human
ccccagcccuagacuccagcccaggca

SEQ ID NO: 868862 - RNA, 19 nt, Human
cccccagcgggcagagccc

SEQ ID NO: 868863 - RNA, 27 nt, Human
cccccagcgggcagagcccagaagggu

SEQ ID NO: 868864 - RNA, 22 nt, Human
ccccgaggagcacagacaggag

SEQ ID NO: 868865 - RNA, 27 nt, Human
ccccgcccagccccaggcuuuguccca

SEQ ID NO: 868866 - RNA, 28 nt, Human
ccccugggggagggguguggggcgcugc

SEQ ID NO: 868867 - RNA, 21 nt, Human
ccgcccagccccaggcuuugu

SEQ ID NO: 868868 - RNA, 22 nt, Human
ccggagcaucaggagaugcccc

SEQ ID NO: 868869 - RNA, 23 nt, Human
ccuccaggaacaucucccagccc

SEQ ID NO: 868870 - RNA, 23 nt, Human
ccucugcauacgcccaggccaaa

SEQ ID NO: 868871 - RNA, 19 nt, Human
ccugccgaggcugacccca

SEQ ID NO: 868872 - RNA, 25 nt, Human
cgcccaggccaaauuccaggaaagc

SEQ ID NO: 868873 - RNA, 18 nt, Human
cggccucugcauacgccc

SEQ ID NO: 868874 - RNA, 19 nt, Human
cuccugccgaggcugaccc

SEQ ID NO: 868875 - RNA, 22 nt, Human
cucugcauacgcccaggccaaa

SEQ ID NO: 868876 - RNA, 20 nt, Human
cugagggcaugaugggcauc

SEQ ID NO: 868877 - RNA, 18 nt, Human
cugccaccaagccccugg

SEQ ID NO: 868878 - RNA, 27 nt, Human
cugccgaggcugaccccaacuucaagg

SEQ ID NO: 868879 - RNA, 19 nt, Human
gacuccagcccaggcagag

SEQ ID NO: 868880 - RNA, 18 nt, Human
gaguguccuccuccagga

SEQ ID NO: 868881 - RNA, 24 nt, Human
gaugggaguguccuccaggaaugu

SEQ ID NO: 868882 - RNA, 22 nt, Human
gcagcugcuggcccagccagga

SEQ ID NO: 868883 - RNA, 19 nt, Human
gcccccgcccagccccagg

SEQ ID NO: 868884 - RNA, 19 nt, Human
ggaguguccuccaggaaug

SEQ ID NO: 868885 - RNA, 24 nt, Human
ggcagagcccagaagggucugagg

SEQ ID NO: 868886 - RNA, 19 nt, Human
ggcagggggugcagcccca

SEQ ID NO: 868887 - RNA, 21 nt, Human
ggcagggggugcagccccagg

SEQ ID NO: 868888 - RNA, 22 nt, Human
ggcagggggugcagccccaggu

SEQ ID NO: 868889 - RNA, 20 nt, Human
ggcaugaugggcaucagugg

SEQ ID NO: 868890 - RNA, 19 nt, Human
ggccucugcauacgcccag

SEQ ID NO: 868891 - RNA, 19 nt, Human
gggcagagaaagggcaggg

SEQ ID NO: 868892 - RNA, 24 nt, Human
ggguagggauggggcagagaaagg

SEQ ID NO: 868893 - RNA, 23 nt, Human
gggucagaagucacagggagccc

SEQ ID NO: 868894 - RNA, 24 nt, Human
ggugggggcuaugcugccaccaag

SEQ ID NO: 868895 - RNA, 19 nt, Human
gugcagcugcuggcccagc

SEQ ID NO: 868896 - RNA, 25 nt, Human
uagccccagcccuagacuccagccc

SEQ ID NO: 868897 - RNA, 18 nt, Human
uaggguagggauggggca

SEQ ID NO: 868898 - RNA, 19 nt, Human
ucccacauggugguacagg

SEQ ID NO: 868899 - RNA, 20 nt, Human
ucugaugggaguguccucca

SEQ ID NO: 868900 - RNA, 18 nt, Human
ugagcaaaggccgcaggg

SEQ ID NO: 868901 - RNA, 19 nt, Human
uggaggagugggacuccug

SEQ ID NO: 868902 - RNA, 21 nt, Human
uggcaggcagcaccccaggag

SEQ ID NO: 868903 - RNA, 18 nt, Human
uggcccaaagcaacacag

SEQ ID NO: 868904 - RNA, 24 nt, Human
uggcccaaagcaacacagaggagc

SEQ ID NO: 868905 - RNA, 21 nt, Human
ugggauuuugguugugccagg

SEQ ID NO: 868906 - RNA, 21 nt, Human
ugggcagggccacccgugagc

SEQ ID NO: 868907 - RNA, 19 nt, Human
uggggcagagaaagggcag

SEQ ID NO: 868908 - RNA, 23 nt, Human
uggggcagagaaagggcaggggg

SEQ ID NO: 868909 - RNA, 18 nt, Human
uggugccuggagucccac

SEQ ID NO: 868910 - RNA, 24 nt, Human
ugguggcagguccaccagcagaug

SEQ ID NO: 868911 - RNA, 18 nt, Human
ugguugugccaggggugg

SEQ ID NO: 868912 - RNA, 18 nt, Human
ugugaugguggcaggucc

SEQ ID NO: 868913 - RNA, 25 nt, Human
uucaagucagcaggucccuggggag

SEQ ID NO: 868914 - RNA, 20 nt, Human
uuugguugugccaggggugg

SEQ ID NO: 868915 - RNA, 25 nt, Human
uuuuuuuuuuuuaaaaaucagaugg

SEQ ID NO: 868916 - RNA, 18 nt, Human
aaacaggaacacacuucu

SEQ ID NO: 868917 - RNA, 18 nt, Human
acaggaacacacuucucc

SEQ ID NO: 868918 - RNA, 20 nt, Human
agacacacaacacacaaaca

SEQ ID NO: 868919 - RNA, 20 nt, Human
agcuaccagacaaagcaacu

SEQ ID NO: 868920 - RNA, 19 nt, Human
agcuggccaacucccugca

SEQ ID NO: 868921 - RNA, 24 nt, Human
cacacagacacucacagacacaca

SEQ ID NO: 868922 - RNA, 27 nt, Human
caccaaggcugagggugauccgggagc

SEQ ID NO: 868923 - RNA, 21 nt, Human
cacucacagacacacaacaca

SEQ ID NO: 868924 - RNA, 21 nt, Human
caggaacacacuucuccuggu

SEQ ID NO: 868925 - RNA, 20 nt, Human
ccaaguucaguuuuauuugg

SEQ ID NO: 868926 - RNA, 23 nt, Human
ccacugagcaccaaggcugaggg

SEQ ID NO: 868927 - RNA, 21 nt, Human
cccugauggcaggcccaggga

SEQ ID NO: 868928 - RNA, 22 nt, Human
cgugacacaaucagcacugaag

SEQ ID NO: 868929 - RNA, 18 nt, Human
cucacagacacacaacac

SEQ ID NO: 868930 - RNA, 18 nt, Human
cucccugcacagagcucu

SEQ ID NO: 868931 - RNA, 22 nt, Human
cucgggaccacugagcaccaag

SEQ ID NO: 868932 - RNA, 19 nt, Human
cugcucccuccaccugccc

SEQ ID NO: 868933 - RNA, 20 nt, Human
cugcucccuccaccugcccc

SEQ ID NO: 868934 - RNA, 18 nt, Human
cuggaggugggacggagg

SEQ ID NO: 868935 - RNA, 19 nt, Human
cuguggguuaacauucaug

SEQ ID NO: 868936 - RNA, 22 nt, Human
cuucuauucggcuggagguggg

SEQ ID NO: 868937 - RNA, 19 nt, Human
gaagacugcucccuccacc

SEQ ID NO: 868938 - RNA, 23 nt, Human
gacacucacagacacacaacaca

SEQ ID NO: 868939 - RNA, 19 nt, Human
gcuggggcucugccuucuc

SEQ ID NO: 868940 - RNA, 23 nt, Human
ggcacagaggugcuggggcucug

SEQ ID NO: 868941 - RNA, 19 nt, Human
ggcagguacacaauuuucu

SEQ ID NO: 868942 - RNA, 21 nt, Human
ggcggggggugggggucuagg

SEQ ID NO: 868943 - RNA, 18 nt, Human
gggggcacagaggugcug

SEQ ID NO: 868944 - RNA, 21 nt, Human
ggugggacggaggaaggaaug

SEQ ID NO: 868945 - RNA, 21 nt, Human
gugcuggggcucugccuucuc

SEQ ID NO: 868946 - RNA, 21 nt, Human
uaagcaggacuggaaucuguu

SEQ ID NO: 868947 - RNA, 21 nt, Human
uauucggcuggaggugggacg

SEQ ID NO: 868948 - RNA, 21 nt, Human
ucaguuuuauuugguugcuga

SEQ ID NO: 868949 - RNA, 19 nt, Human
ucccugauggcaggcccag

SEQ ID NO: 868950 - RNA, 24 nt, Human
uccuuggauucuguggguuaacau

SEQ ID NO: 868951 - RNA, 22 nt, Human
ucucuugagcuaccagacaaag

SEQ ID NO: 868952 - RNA, 23 nt, Human
ucugcucgugaagaaacaggaac

SEQ ID NO: 868953 - RNA, 24 nt, Human
ucuugagcuaccagacaaagcaac

SEQ ID NO: 868954 - RNA, 23 nt, Human
ugaaaaguuuggagcaaauguac

SEQ ID NO: 868955 - RNA, 22 nt, Human
ugaagaccaaacugccacugag

SEQ ID NO: 868956 - RNA, 23 nt, Human
ugaauaauugugcauuugccaua

SEQ ID NO: 868957 - RNA, 19 nt, Human
ugaggcagcccagcaggga

SEQ ID NO: 868958 - RNA, 24 nt, Human
ugaggggaggaagaacgaagacug

SEQ ID NO: 868959 - RNA, 18 nt, Human
ugcacagagcucuggggg

SEQ ID NO: 868960 - RNA, 21 nt, Human
ugccagggaucuggaagccuu

SEQ ID NO: 868961 - RNA, 19 nt, Human
ugcucccuccaccugcccc

SEQ ID NO: 868962 - RNA, 21 nt, Human
ugcucgugaagaaacaggaac

SEQ ID NO: 868963 - RNA, 22 nt, Human
uggaaucuguuccugccaggga

SEQ ID NO: 868964 - RNA, 19 nt, Human
uggcaggcccagggaaccu

SEQ ID NO: 868965 - RNA, 22 nt, Human
uggcggggggugggggucuagg

SEQ ID NO: 868966 - RNA, 23 nt, Human
uggggggcacagaggugcugggg

SEQ ID NO: 868967 - RNA, 20 nt, Human
ugugcccuugguggccgaug

SEQ ID NO: 868968 - RNA, 18 nt, Human
uuaacauucaugcuuugu

SEQ ID NO: 868969 - RNA, 18 nt, Human
uuuuuuuuuuuuuuuuug

SEQ ID NO: 868970 - RNA, 19 nt, Human
uuuuuuuuuuuuuuuuuug

SEQ ID NO: 868971 - RNA, 21 nt, Human
aaaaaaaaaaagaguuccaaa

SEQ ID NO: 868972 - RNA, 26 nt, Human
aaaauccagacaauuugucacaagaa

SEQ ID NO: 868973 - RNA, 22 nt, Human
acaaaacuaaaaaccacaagga

SEQ ID NO: 868974 - RNA, 24 nt, Human
aucuccagcaaugauuauuuccaa

SEQ ID NO: 868975 - RNA, 20 nt, Human
caaaccagcugugccgcagc

SEQ ID NO: 868976 - RNA, 21 nt, Human
ccagcaaugauuauuuccaaa

SEQ ID NO: 868977 - RNA, 19 nt, Human
cccccgccccucagcucuc

SEQ ID NO: 868978 - RNA, 22 nt, Human
ccccgccccucagcucucuuuu

SEQ ID NO: 868979 - RNA, 19 nt, Human
ccgcagcgcccccgccccu

SEQ ID NO: 868980 - RNA, 18 nt, Human
ccgccccucagcucucuu

SEQ ID NO: 868981 - RNA, 23 nt, Human
ggcaugugauagaagcuguagcc

SEQ ID NO: 868982 - RNA, 21 nt, Human
gugccgcagcgcccccgcccc

SEQ ID NO: 868983 - RNA, 18 nt, Human
uacaaaacuaaaaaccac

SEQ ID NO: 868984 - RNA, 21 nt, Human
uacaaaacuaaaaaccacaag

SEQ ID NO: 868985 - RNA, 24 nt, Human
uccaaaauguaaagauuugaaaca

SEQ ID NO: 868986 - RNA, 25 nt, Human
ugaaacauaauuuauacaaaacuaa

SEQ ID NO: 868987 - RNA, 18 nt, Human
uugcucaaaccagcugug

SEQ ID NO: 868988 - RNA, 19 nt, Human
uuuuuuuuuuuuagaggaa

SEQ ID NO: 868989 - RNA, 22 nt, Human
uuuuuuuuuuuuuuuuuagagg

SEQ ID NO: 868990 - RNA, 22 nt, Human
aagcgcacccagcacugggagg

SEQ ID NO: 868991 - RNA, 25 nt, Human
acccacagguagccaagaugcacaa

SEQ ID NO: 868992 - RNA, 19 nt, Human
agaaucgugaaacuugugg

SEQ ID NO: 868993 - RNA, 20 nt, Human
agguagccaagaugcacaag

SEQ ID NO: 868994 - RNA, 23 nt, Human
agguccaacaguguuagccagaa

SEQ ID NO: 868995 - RNA, 25 nt, Human
cacagcaguaaggacuugaaugaga

SEQ ID NO: 868996 - RNA, 22 nt, Human
ccacagguagccaagaugcaca

SEQ ID NO: 868997 - RNA, 18 nt, Human
ccccgugccgacccccuc

SEQ ID NO: 868998 - RNA, 22 nt, Human
cgugccgacccccucacgacgc

SEQ ID NO: 868999 - RNA, 20 nt, Human
gacccccucacgacgcggcc

SEQ ID NO: 869000 - RNA, 21 nt, Human
gcacaagaccgcccgacuccc

SEQ ID NO: 869001 - RNA, 23 nt, Human
gcacccagcacugggaggaaaug

SEQ ID NO: 869002 - RNA, 22 nt, Human
gcacugggaggaaauguggcuu

SEQ ID NO: 869003 - RNA, 19 nt, Human
gcgaugcagaaggcggccu

SEQ ID NO: 869004 - RNA, 20 nt, Human
ggacuugaaugagaaucgug

SEQ ID NO: 869005 - RNA, 24 nt, Human
ucguacugaaagacuacauucagu

SEQ ID NO: 869006 - RNA, 22 nt, Human
ugguauuuguucuucacagcag

SEQ ID NO: 869007 - RNA, 18 nt, Human
uuaggugucuagguggaa

SEQ ID NO: 869008 - RNA, 24 nt, Human
uuuuuuuuuuuuuuuuucaguuuu

SEQ ID NO: 869009 - RNA, 22 nt, Human
uuuuuuuuuuuuuuuuuuucag

SEQ ID NO: 869010 - RNA, 18 nt, Human
aaacaaggaaucacccaa

SEQ ID NO: 869011 - RNA, 22 nt, Human
aauugucugcagauuacucuca

SEQ ID NO: 869012 - RNA, 22 nt, Human
agcaaggagacacuuaagauca

SEQ ID NO: 869013 - RNA, 22 nt, Human
agcacauagaauacccuuagau

SEQ ID NO: 869014 - RNA, 18 nt, Human
auagaauacccuuagaua

SEQ ID NO: 869015 - RNA, 18 nt, Human
auagucuaaaaacaagga

SEQ ID NO: 869016 - RNA, 24 nt, Human
aucccuguucucaaguguuaaaaa

SEQ ID NO: 869017 - RNA, 21 nt, Human
caaggaaucacccaaguaaga

SEQ ID NO: 869018 - RNA, 21 nt, Human
cacuggagccugaagcaaagu

SEQ ID NO: 869019 - RNA, 22 nt, Human
cauacaccccuuuuaaauuguc

SEQ ID NO: 869020 - RNA, 19 nt, Human
caucaagugagcuacaaau

SEQ ID NO: 869021 - RNA, 26 nt, Human
ccacaaauacguuuauuccucuaaaa

SEQ ID NO: 869022 - RNA, 20 nt, Human
ccgcgcggcagccucagggu

SEQ ID NO: 869023 - RNA, 19 nt, Human
ccugcacuggagccugaag

SEQ ID NO: 869024 - RNA, 21 nt, Human
cguggagaucccccagauccc

SEQ ID NO: 869025 - RNA, 19 nt, Human
cuguucucaaguguuaaaa

SEQ ID NO: 869026 - RNA, 20 nt, Human
gacacuuaagaucaauucaa

SEQ ID NO: 869027 - RNA, 21 nt, Human
gagcaaggagacacuuaagau

SEQ ID NO: 869028 - RNA, 20 nt, Human
uaaaaacaaggaaucaccca

SEQ ID NO: 869029 - RNA, 19 nt, Human
uaacuccuaucccaguuuc

SEQ ID NO: 869030 - RNA, 19 nt, Human
uaccagagcaaggagacac

SEQ ID NO: 869031 - RNA, 22 nt, Human
ucaagugagcuacaaaucuauc

SEQ ID NO: 869032 - RNA, 25 nt, Human
ucauuugucacauauuucaggcccu

SEQ ID NO: 869033 - RNA, 26 nt, Human
ucuaacuccuaucccaguuucuuuuu

SEQ ID NO: 869034 - RNA, 19 nt, Human
aaagugcugggauuacagg

SEQ ID NO: 869035 - RNA, 19 nt, Human
aaagugcugggauuacagg

SEQ ID NO: 869036 - RNA, 18 nt, Human
aagugcugggauuacagg

SEQ ID NO: 869037 - RNA, 19 nt, Human
aagugcugggauuacaggu

SEQ ID NO: 869038 - RNA, 18 nt, Human
accaagcaauccucccac

SEQ ID NO: 869039 - RNA, 24 nt, Human
accaagcaauccucccaccucugc

SEQ ID NO: 869040 - RNA, 23 nt, Human
accucugccucccaaagugcugg

SEQ ID NO: 869041 - RNA, 21 nt, Human
acggggucuuguuauguucca

SEQ ID NO: 869042 - RNA, 21 nt, Human
agccaagugccaguaaucaca

SEQ ID NO: 869043 - RNA, 24 nt, Human
auaguagagacggggucuuguuau

SEQ ID NO: 869044 - RNA, 24 nt, Human
auccucccaccucugccucccaaa

SEQ ID NO: 869045 - RNA, 19 nt, Human
auguuccacaggcuggucu

SEQ ID NO: 869046 - RNA, 24 nt, Human
caaagugcugggauuacaggugca

SEQ ID NO: 869047 - RNA, 27 nt, Human
caagcaauccucccaccucugccuccc

SEQ ID NO: 869048 - RNA, 28 nt, Human
caagcaauccucccaccucugccuccca

SEQ ID NO: 869049 - RNA, 19 nt, Human
caagucaccacgcccggcc

SEQ ID NO: 869050 - RNA, 19 nt, Human
caccacgcccggccuauuu

SEQ ID NO: 869051 - RNA, 23 nt, Human
caggcuggucuugaacuccuggg

SEQ ID NO: 869052 - RNA, 20 nt, Human
ccaaagugcugggauuacag

SEQ ID NO: 869053 - RNA, 21 nt, Human
ccaaagugcugggauuacagg

SEQ ID NO: 869054 - RNA, 21 nt, Human
ccaaagugcugggauuacagg

SEQ ID NO: 869055 - RNA, 22 nt, Human
ccaaagugcugggauuacaggu

SEQ ID NO: 869056 - RNA, 21 nt, Human
ccagcacucucuguagccaag

SEQ ID NO: 869057 - RNA, 21 nt, Human
ccaguaccuguacaggccagg

SEQ ID NO: 869058 - RNA, 25 nt, Human
cccccuugucccucagaugcaucca

SEQ ID NO: 869059 - RNA, 23 nt, Human
ccgccccccuugucccucagaug

SEQ ID NO: 869060 - RNA, 22 nt, Human
ccucccaccucugccucccaaa

SEQ ID NO: 869061 - RNA, 26 nt, Human
ccucccaccucugccucccaaagugc

SEQ ID NO: 869062 - RNA, 20 nt, Human
cucacuucccaccucgugcc

SEQ ID NO: 869063 - RNA, 28 nt, Human
cuccagcacucucuguagccaagugccc

SEQ ID NO: 869064 - RNA, 19 nt, Human
cuggucuugaacuccuggg

SEQ ID NO: 869065 - RNA, 19 nt, Human
cuucggagaccgccccccu

SEQ ID NO: 869066 - RNA, 22 nt, Human
cuuguuauguuccacaggcugg

SEQ ID NO: 869067 - RNA, 24 nt, Human
gaucauacuccacugugguccuga

SEQ ID NO: 869068 - RNA, 21 nt, Human
gcaauccucccaccucugccu

SEQ ID NO: 869069 - RNA, 18 nt, Human
ggcuggucuugaacuccu

SEQ ID NO: 869070 - RNA, 24 nt, Human
gggaccaagcaauccucccaccuc

SEQ ID NO: 869071 - RNA, 23 nt, Human
guagagacggggucuuguuaugu

SEQ ID NO: 869072 - RNA, 21 nt, Human
gugcugggauuacaggugcaa

SEQ ID NO: 869073 - RNA, 24 nt, Human
guuauguuccacaggcuggucuug

SEQ ID NO: 869074 - RNA, 24 nt, Human
uacacuguucuccagcacucucug

SEQ ID NO: 869075 - RNA, 20 nt, Human
uacuccacugugguccugaa

SEQ ID NO: 869076 - RNA, 24 nt, Human
uaguagagacggggucuuguuaug

SEQ ID NO: 869077 - RNA, 24 nt, Human
uauguuccacaggcuggucuugaa

SEQ ID NO: 869078 - RNA, 24 nt, Human
uccacaggcuggucuugaacuccu

SEQ ID NO: 869079 - RNA, 25 nt, Human
uccacaggcuggucuugaacuccug

SEQ ID NO: 869080 - RNA, 23 nt, Human
ucccaaagugcugggauuacagg

SEQ ID NO: 869081 - RNA, 18 nt, Human
ucccucagaugcauccaa

SEQ ID NO: 869082 - RNA, 21 nt, Human
ucuugaacuccugggaccaag

SEQ ID NO: 869083 - RNA, 24 nt, Human
ucuuguuauguuccacaggcuggu

SEQ ID NO: 869084 - RNA, 24 nt, Human
ugaacuccugggaccaagcaaucc

SEQ ID NO: 869085 - RNA, 24 nt, Human
ugcugggauuacaggugcaaguca

SEQ ID NO: 869086 - RNA, 21 nt, Human
ugggaccaagcaauccuccca

SEQ ID NO: 869087 - RNA, 22 nt, Human
ugggauuacaggugcaagucac

SEQ ID NO: 869088 - RNA, 24 nt, Human
ugggauuacaggugcaagucacca

SEQ ID NO: 869089 - RNA, 18 nt, Human
aaacgcggagguuggagc

SEQ ID NO: 869090 - RNA, 18 nt, Human
aaagauggggaggaagac

SEQ ID NO: 869091 - RNA, 22 nt, Human
aaauauucuuccagguuucucc

SEQ ID NO: 869092 - RNA, 18 nt, Human
aacccgccucuggcuucu

SEQ ID NO: 869093 - RNA, 22 nt, Human
aagcauugggagggugugagcu

SEQ ID NO: 869094 - RNA, 23 nt, Human
acccaggcuggagugcaguggug

SEQ ID NO: 869095 - RNA, 23 nt, Human
accccaaggccgccgugggccac

SEQ ID NO: 869096 - RNA, 23 nt, Human
accccaucccugcaggagcuggg

SEQ ID NO: 869097 - RNA, 18 nt, Human
agcagagggagcagggcc

SEQ ID NO: 869098 - RNA, 23 nt, Human
aggaaagccggcuggucuccaag

SEQ ID NO: 869099 - RNA, 24 nt, Human
aggagggaauggacuugucuguca

SEQ ID NO: 869100 - RNA, 22 nt, Human
aggauggaaagauggggaggaa

SEQ ID NO: 869101 - RNA, 25 nt, Human
aggcuggagugcaguggugcaaucu

SEQ ID NO: 869102 - RNA, 20 nt, Human
agugcaguggugcaaucucg

SEQ ID NO: 869103 - RNA, 24 nt, Human
agugcaguggugcaaucucggcuc

SEQ ID NO: 869104 - RNA, 25 nt, Human
augggaugugagcagaaacgagaau

SEQ ID NO: 869105 - RNA, 18 nt, Human
auuagccacuaccaaacc

SEQ ID NO: 869106 - RNA, 21 nt, Human
caaacgagcucuguggaagcu

SEQ ID NO: 869107 - RNA, 24 nt, Human
caaccaugccucacaguugagcaa

SEQ ID NO: 869108 - RNA, 19 nt, Human
caagugaggcgaagacccg

SEQ ID NO: 869109 - RNA, 24 nt, Human
cacccaggcuggagugcaguggug

SEQ ID NO: 869110 - RNA, 24 nt, Human
cacuccauuccucagcacguuccu

SEQ ID NO: 869111 - RNA, 19 nt, Human
cagagcagagggagcaggg

SEQ ID NO: 869112 - RNA, 22 nt, Human
cauccgggggccccgugugucc

SEQ ID NO: 869113 - RNA, 22 nt, Human
caugggaaauggggcagggggc

SEQ ID NO: 869114 - RNA, 20 nt, Human
ccacugggcugugcuugugc

SEQ ID NO: 869115 - RNA, 20 nt, Human
ccagaucugccaucguguuc

SEQ ID NO: 869116 - RNA, 20 nt, Human
ccagcagugcggaggggcag

SEQ ID NO: 869117 - RNA, 23 nt, Human
ccaggagccuguuuuccuucccc

SEQ ID NO: 869118 - RNA, 20 nt, Human
ccaugccucacaguugagca

SEQ ID NO: 869119 - RNA, 18 nt, Human
ccccagagcagagggagc

SEQ ID NO: 869120 - RNA, 20 nt, Human
cccgugcccagcagacaagg

SEQ ID NO: 869121 - RNA, 23 nt, Human
cccuuagccaccaaccaugccuc

SEQ ID NO: 869122 - RNA, 20 nt, Human
ccgugcccagcagacaaggc

SEQ ID NO: 869123 - RNA, 19 nt, Human
ccuccucugcugcuccugg

SEQ ID NO: 869124 - RNA, 27 nt, Human
ccugcccagcaaguuuaagggccgugg

SEQ ID NO: 869125 - RNA, 20 nt, Human
cgccucuggcuucugagcuu

SEQ ID NO: 869126 - RNA, 23 nt, Human
cgugacgcugucuuccugacucg

SEQ ID NO: 869127 - RNA, 24 nt, Human
cucaugggaaauggggcagggggc

SEQ ID NO: 869128 - RNA, 24 nt, Human
cucgcucugucacccaggcuggag

SEQ ID NO: 869129 - RNA, 20 nt, Human
cucugucacccaggcuggag

SEQ ID NO: 869130 - RNA, 23 nt, Human
cucugucacccaggcuggagugc

SEQ ID NO: 869131 - RNA, 18 nt, Human
cugagccuuggggagggg

SEQ ID NO: 869132 - RNA, 27 nt, Human
cugcugggcucugugugacuggaaacc

SEQ ID NO: 869133 - RNA, 21 nt, Human
cuggcggguggaaguguggcc

SEQ ID NO: 869134 - RNA, 18 nt, Human
cuggcuuggggauggaaa

SEQ ID NO: 869135 - RNA, 18 nt, Human
cugugcuugugcuggggc

SEQ ID NO: 869136 - RNA, 20 nt, Human
cuuacacuuugauauuaaac

SEQ ID NO: 869137 - RNA, 18 nt, Human
gaaggauggaaagauggg

SEQ ID NO: 869138 - RNA, 23 nt, Human
gagcagguacacagaaggagcuc

SEQ ID NO: 869139 - RNA, 20 nt, Human
gaguggcugucacaggccug

SEQ ID NO: 869140 - RNA, 24 nt, Human
gcacaggaaaacgcggagguugga

SEQ ID NO: 869141 - RNA, 18 nt, Human
gcagcggguggcucagaa

SEQ ID NO: 869142 - RNA, 23 nt, Human
gccacugggcugugcuugugcug

SEQ ID NO: 869143 - RNA, 24 nt, Human
gcggagguuggagcacccccagga

SEQ ID NO: 869144 - RNA, 23 nt, Human
ggccgugggcaggccuuguagcc

SEQ ID NO: 869145 - RNA, 19 nt, Human
ggcucagaagugggagcag

SEQ ID NO: 869146 - RNA, 21 nt, Human
gggcuccaaaccugcccagca

SEQ ID NO: 869147 - RNA, 18 nt, Human
gggcucccagacaccccc

SEQ ID NO: 869148 - RNA, 21 nt, Human
ggggaggaagacccuggcggg

SEQ ID NO: 869149 - RNA, 20 nt, Human
ggggcuggcagagagcugcc

SEQ ID NO: 869150 - RNA, 19 nt, Human
gguggcucagaagugggag

SEQ ID NO: 869151 - RNA, 20 nt, Human
gugcuggggcucccagaggc

SEQ ID NO: 869152 - RNA, 20 nt, Human
uagccaccaaccaugccuca

SEQ ID NO: 869153 - RNA, 25 nt, Human
uauuuauuuuuuuuagauggagucu

SEQ ID NO: 869154 - RNA, 24 nt, Human
ucacccaggcuggagugcaguggu

SEQ ID NO: 869155 - RNA, 21 nt, Human
ucccagacacccccagagcag

SEQ ID NO: 869156 - RNA, 18 nt, Human
ucccaugggcuccaaacc

SEQ ID NO: 869157 - RNA, 21 nt, Human
ucccugcaggagcuggggcag

SEQ ID NO: 869158 - RNA, 24 nt, Human
ucccugcaggagcuggggcaggug

SEQ ID NO: 869159 - RNA, 23 nt, Human
uccguggaguagaagaaggggca

SEQ ID NO: 869160 - RNA, 19 nt, Human
uccucagcacguuccuggc

SEQ ID NO: 869161 - RNA, 20 nt, Human
uccuggaguggcugucacag

SEQ ID NO: 869162 - RNA, 22 nt, Human
uccuggaguggcugucacaggc

SEQ ID NO: 869163 - RNA, 24 nt, Human
ucgcucugucacccaggcuggagu

SEQ ID NO: 869164 - RNA, 20 nt, Human
ucggaccccaucccugcagg

SEQ ID NO: 869165 - RNA, 19 nt, Human
ucggggcccaggaacgagc

SEQ ID NO: 869166 - RNA, 18 nt, Human
ucuccaagugaggcgaag

SEQ ID NO: 869167 - RNA, 24 nt, Human
ucuccaagugaggcgaagacccgu

SEQ ID NO: 869168 - RNA, 19 nt, Human
ucucgcucugucacccagg

SEQ ID NO: 869169 - RNA, 23 nt, Human
ucucgcucugucacccaggcugg

SEQ ID NO: 869170 - RNA, 24 nt, Human
ucucgcucugucacccaggcugga

SEQ ID NO: 869171 - RNA, 26 nt, Human
ucucgcucugucacccaggcuggagu

SEQ ID NO: 869172 - RNA, 27 nt, Human
ucucgcucugucacccaggcuggagug

SEQ ID NO: 869173 - RNA, 20 nt, Human
ucucggggcuggcagagagc

SEQ ID NO: 869174 - RNA, 24 nt, Human
ucugucacccaggcuggagugcag

SEQ ID NO: 869175 - RNA, 24 nt, Human
ucuuagagcugagccuuggggagg

SEQ ID NO: 869176 - RNA, 19 nt, Human
ugacgcugucuuccugacu

SEQ ID NO: 869177 - RNA, 21 nt, Human
ugacucggggcccaggaacga

SEQ ID NO: 869178 - RNA, 24 nt, Human
ugacuggaaaccagggaaggagac

SEQ ID NO: 869179 - RNA, 21 nt, Human
ugagagugaaggccaggagcc

SEQ ID NO: 869180 - RNA, 20 nt, Human
ugagcuucagcauauaagca

SEQ ID NO: 869181 - RNA, 18 nt, Human
ugaggcaggaacuggguu

SEQ ID NO: 869182 - RNA, 22 nt, Human
ugcaguggugcaaucucggcuc

SEQ ID NO: 869183 - RNA, 23 nt, Human
ugcccagcagacaaggccggggc

SEQ ID NO: 869184 - RNA, 18 nt, Human
ugcuugugcuggggcucc

SEQ ID NO: 869185 - RNA, 21 nt, Human
ugcuuuaaucccccuguuugc

SEQ ID NO: 869186 - RNA, 24 nt, Human
uggacuugucugucacgcaggggc

SEQ ID NO: 869187 - RNA, 23 nt, Human
uggagugcaguggugcaaucucg

SEQ ID NO: 869188 - RNA, 24 nt, Human
uggagugcaguggugcaaucucgg

SEQ ID NO: 869189 - RNA, 19 nt, Human
uggaguggcugucacaggc

SEQ ID NO: 869190 - RNA, 20 nt, Human
uggcugaggcaggaacuggg

SEQ ID NO: 869191 - RNA, 20 nt, Human
ugggagggugugagcugggg

SEQ ID NO: 869192 - RNA, 20 nt, Human
ugggcuccaaaccugcccag

SEQ ID NO: 869193 - RNA, 23 nt, Human
uggggcucccagaggcauccggg

SEQ ID NO: 869194 - RNA, 22 nt, Human
ugucugcugggucagcacugcc

SEQ ID NO: 869195 - RNA, 21 nt, Human
uguggaagcucagcaggaagg

SEQ ID NO: 869196 - RNA, 24 nt, Human
ugugucaggaggugacggcuggag

SEQ ID NO: 869197 - RNA, 22 nt, Human
uuagauggagucucgcucuguc

SEQ ID NO: 869198 - RNA, 20 nt, Human
uuuuuuuuagauggagucuc

SEQ ID NO: 869199 - RNA, 18 nt, Human
uuuuuuuuuuuuuuuucg

SEQ ID NO: 869200 - RNA, 22 nt, Human
uuuuuuuuuuuuuuuuucgaau

SEQ ID NO: 869201 - RNA, 18 nt, Human
aagacucccagugggugg

SEQ ID NO: 869202 - RNA, 22 nt, Human
aggccaggcggcggccccgggc

SEQ ID NO: 869203 - RNA, 18 nt, Human
caggcggcggccccgggc

SEQ ID NO: 869204 - RNA, 19 nt, Human
caggcggcggccccgggcc

SEQ ID NO: 869205 - RNA, 20 nt, Human
ccacgaggcucaucccuugg

SEQ ID NO: 869206 - RNA, 21 nt, Human
ccaggccaggcggcggccccg

SEQ ID NO: 869207 - RNA, 18 nt, Human
ccagggagggacucccag

SEQ ID NO: 869208 - RNA, 18 nt, Human
ccccacgaggcucauccc

SEQ ID NO: 869209 - RNA, 19 nt, Human
ccugccccuccaaguacac

SEQ ID NO: 869210 - RNA, 24 nt, Human
ccuuacccuggucuggaggccaga

SEQ ID NO: 869211 - RNA, 21 nt, Human
cggccccgggcccucugcccc

SEQ ID NO: 869212 - RNA, 25 nt, Human
cugagaauaaaaaccagggagggac

SEQ ID NO: 869213 - RNA, 19 nt, Human
gaaagggcucccugccccu

SEQ ID NO: 869214 - RNA, 22 nt, Human
gagaauaaaaaccagggaggga

SEQ ID NO: 869215 - RNA, 18 nt, Human
gcugugagcaccuguugg

SEQ ID NO: 869216 - RNA, 24 nt, Human
ggguggcugcagccccugccucgg

SEQ ID NO: 869217 - RNA, 23 nt, Human
uaaaaaccagggagggacuccca

SEQ ID NO: 869218 - RNA, 18 nt, Human
uacugagaauaaaaacca

SEQ ID NO: 869219 - RNA, 22 nt, Human
ucccuuggagcacacaggaagc

SEQ ID NO: 869220 - RNA, 23 nt, Human
ugagguacugagaauaaaaacca

SEQ ID NO: 869221 - RNA, 20 nt, Human
uggcugcagccccugccucg

SEQ ID NO: 869222 - RNA, 21 nt, Human
uggguggcugcagccccugcc

SEQ ID NO: 869223 - RNA, 18 nt, Human
uuuuuuuuuuuuuuuuug

SEQ ID NO: 869224 - RNA, 21 nt, Human
uuuuuuuuuuuuuuuuugagg

SEQ ID NO: 869225 - RNA, 21 nt, Human
aaaaaaaagccggguauggug

SEQ ID NO: 869226 - RNA, 22 nt, Human
aaaaggccaggaguggaagaca

SEQ ID NO: 869227 - RNA, 21 nt, Human
aacagagugaggcccugucuc

SEQ ID NO: 869228 - RNA, 22 nt, Human
aaccguuuuuaaaaaccccauu

SEQ ID NO: 869229 - RNA, 25 nt, Human
aagaagccugcaaaacaaauacgua

SEQ ID NO: 869230 - RNA, 19 nt, Human
aagcugaagggcucccagg

SEQ ID NO: 869231 - RNA, 20 nt, Human
aaggucucauguagccugug

SEQ ID NO: 869232 - RNA, 23 nt, Human
acagagugaggcccugucucaaa

SEQ ID NO: 869233 - RNA, 24 nt, Human
acagagugaggcccugucucaaaa

SEQ ID NO: 869234 - RNA, 19 nt, Human
accccauugugaacauuuu

SEQ ID NO: 869235 - RNA, 24 nt, Human
acccugucucuacaaaauauacaa

SEQ ID NO: 869236 - RNA, 23 nt, Human
acucacacaagcacuugucccua

SEQ ID NO: 869237 - RNA, 18 nt, Human
acugcacuccggccuggg

SEQ ID NO: 869238 - RNA, 24 nt, Human
acugcacuccggccuggggaacag

SEQ ID NO: 869239 - RNA, 19 nt, Human
agacacuucaagggcccca

SEQ ID NO: 869240 - RNA, 18 nt, Human
agaggaacuugaugacca

SEQ ID NO: 869241 - RNA, 19 nt, Human
agauucggaaagcagguuc

SEQ ID NO: 869242 - RNA, 22 nt, Human
agcacaggcaccagaaugaucc

SEQ ID NO: 869243 - RNA, 21 nt, Human
agcacuuuugggagguugagg

SEQ ID NO: 869244 - RNA, 21 nt, Human
agccaggagguuucacguggc

SEQ ID NO: 869245 - RNA, 23 nt, Human
agccgggugugguggugcaagcc

SEQ ID NO: 869246 - RNA, 24 nt, Human
agccuguagucccagcuauucagg

SEQ ID NO: 869247 - RNA, 24 nt, Human
agcuauucaggaggcugagguggg

SEQ ID NO: 869248 - RNA, 23 nt, Human
aggaaacuugaaccacagagcug

SEQ ID NO: 869249 - RNA, 25 nt, Human
aggcccacagguaagauggccagga

SEQ ID NO: 869250 - RNA, 21 nt, Human
aggcugaggugggaggaucac

SEQ ID NO: 869251 - RNA, 24 nt, Human
agggagcagacacuucaagggccc

SEQ ID NO: 869252 - RNA, 20 nt, Human
agggagcugugcagucucag

SEQ ID NO: 869253 - RNA, 18 nt, Human
agggccccaaaaggccag

SEQ ID NO: 869254 - RNA, 19 nt, Human
aggggccugcugcagaugg

SEQ ID NO: 869255 - RNA, 19 nt, Human
agguggaggcugcagugag

SEQ ID NO: 869256 - RNA, 20 nt, Human
agguggaggcugcagugagc

SEQ ID NO: 869257 - RNA, 24 nt, Human
agguugaggcagaugaauugcuug

SEQ ID NO: 869258 - RNA, 21 nt, Human
aguauggaaggcccggaagga

SEQ ID NO: 869259 - RNA, 24 nt, Human
aucguaccacugcacuccggccug

SEQ ID NO: 869260 - RNA, 26 nt, Human
caaaacaaauacguaagaacuggaua

SEQ ID NO: 869261 - RNA, 25 nt, Human
caaaaggccaggagaaagaaaaaaa

SEQ ID NO: 869262 - RNA, 20 nt, Human
caaggagaugacucacaugg

SEQ ID NO: 869263 - RNA, 22 nt, Human
caauguggcgaaacccugucuc

SEQ ID NO: 869264 - RNA, 24 nt, Human
caauguggcgaaacccugucucua

SEQ ID NO: 869265 - RNA, 19 nt, Human
cacacacagccgggugagc

SEQ ID NO: 869266 - RNA, 20 nt, Human
cacccagugugaacuuugga

SEQ ID NO: 869267 - RNA, 19 nt, Human
caccuagggaaguauggaa

SEQ ID NO: 869268 - RNA, 24 nt, Human
cacuccggccuggggaacagagug

SEQ ID NO: 869269 - RNA, 18 nt, Human
cacugcacuccggccugg

SEQ ID NO: 869270 - RNA, 19 nt, Human
cacugcacuccggccuggg

SEQ ID NO: 869271 - RNA, 22 nt, Human
cacugcacuccggccuggggaa

SEQ ID NO: 869272 - RNA, 24 nt, Human
cacugcacuccggccuggggaaca

SEQ ID NO: 869273 - RNA, 26 nt, Human
cagaaugaucccagggcucagcucca

SEQ ID NO: 869274 - RNA, 21 nt, Human
cagacacuucaagggccccaa

SEQ ID NO: 869275 - RNA, 25 nt, Human
cagcacuuuugggagguugaggcag

SEQ ID NO: 869276 - RNA, 18 nt, Human
cagccugcaaggagauga

SEQ ID NO: 869277 - RNA, 24 nt, Human
cagcuauucaggaggcugaggugg

SEQ ID NO: 869278 - RNA, 18 nt, Human
caggaaacagcacccugc

SEQ ID NO: 869279 - RNA, 20 nt, Human
caggagguggaggcugcagu

SEQ ID NO: 869280 - RNA, 23 nt, Human
caucccuguaauccagcacuuuu

SEQ ID NO: 869281 - RNA, 22 nt, Human
ccacggagcuuagccuucagga

SEQ ID NO: 869282 - RNA, 19 nt, Human
ccacugcacuccggccugg

SEQ ID NO: 869283 - RNA, 20 nt, Human
ccacugcacuccggccuggg

SEQ ID NO: 869284 - RNA, 20 nt, Human
ccacugcacuccggccuggg

SEQ ID NO: 869285 - RNA, 21 nt, Human
ccacugcacuccggccugggg

SEQ ID NO: 869286 - RNA, 24 nt, Human
ccacugcacuccggccuggggaac

SEQ ID NO: 869287 - RNA, 22 nt, Human
ccaggagguggaggcugcagug

SEQ ID NO: 869288 - RNA, 21 nt, Human
cccagggcucagcuccaaggc

SEQ ID NO: 869289 - RNA, 23 nt, Human
cccauugugaacauuuuuggaac

SEQ ID NO: 869290 - RNA, 20 nt, Human
cccuggccuuccugcucuuc

SEQ ID NO: 869291 - RNA, 21 nt, Human
ccggccuggggaacagaguga

SEQ ID NO: 869292 - RNA, 18 nt, Human
ccgggugagccccgcagg

SEQ ID NO: 869293 - RNA, 19 nt, Human
ccuggaguccccgcaaagg

SEQ ID NO: 869294 - RNA, 22 nt, Human
ccugggcaauguggcgaaaccc

SEQ ID NO: 869295 - RNA, 24 nt, Human
ccugggcaauguggcgaaacccug

SEQ ID NO: 869296 - RNA, 21 nt, Human
ccugggccugggcaauguggc

SEQ ID NO: 869297 - RNA, 18 nt, Human
ccuggggcugcaggccag

SEQ ID NO: 869298 - RNA, 24 nt, Human
ccuguacacauagcugacucugaa

SEQ ID NO: 869299 - RNA, 21 nt, Human
ccuguagucccagcuauucag

SEQ ID NO: 869300 - RNA, 19 nt, Human
ccugugguggggcagugaa

SEQ ID NO: 869301 - RNA, 20 nt, Human
cucacacaagcacuuguccc

SEQ ID NO: 869302 - RNA, 23 nt, Human
cucaucccuguaauccagcacuu

SEQ ID NO: 869303 - RNA, 23 nt, Human
cugagcugaggcgagacccacac

SEQ ID NO: 869304 - RNA, 22 nt, Human
cugcagugagcugugaucguac

SEQ ID NO: 869305 - RNA, 20 nt, Human
gaaagcacguggguuccaga

SEQ ID NO: 869306 - RNA, 18 nt, Human
gaacagagugaggcccug

SEQ ID NO: 869307 - RNA, 20 nt, Human
gaaccacagagcugcuggcg

SEQ ID NO: 869308 - RNA, 25 nt, Human
gaaguccccacacaagugcacccuu

SEQ ID NO: 869309 - RNA, 21 nt, Human
gaccuuggcagccugcaagga

SEQ ID NO: 869310 - RNA, 23 nt, Human
gagcagacacuucaagggcccca

SEQ ID NO: 869311 - RNA, 21 nt, Human
gaguggaagacaggcccuagc

SEQ ID NO: 869312 - RNA, 18 nt, Human
gaugaccaggagccgugg

SEQ ID NO: 869313 - RNA, 19 nt, Human
gccgggugagccccgcagg

SEQ ID NO: 869314 - RNA, 23 nt, Human
gccugggcaauguggcgaaaccc

SEQ ID NO: 869315 - RNA, 23 nt, Human
gccuguagucccagcuauucagg

SEQ ID NO: 869316 - RNA, 20 nt, Human
gccugugcccuggccuuccu

SEQ ID NO: 869317 - RNA, 20 nt, Human
gcugugaucguaccacugca

SEQ ID NO: 869318 - RNA, 24 nt, Human
gcuguugcugggaggggccugcuu

SEQ ID NO: 869319 - RNA, 20 nt, Human
ggaaggacacacacagccgg

SEQ ID NO: 869320 - RNA, 20 nt, Human
ggagaaagaaaaaaaaaagc

SEQ ID NO: 869321 - RNA, 18 nt, Human
ggagcugugcagucucag

SEQ ID NO: 869322 - RNA, 18 nt, Human
ggaggcugcagugagcug

SEQ ID NO: 869323 - RNA, 24 nt, Human
ggaggcugcagugagcugugaucg

SEQ ID NO: 869324 - RNA, 25 nt, Human
ggcccugucucaaaaggccaggagu

SEQ ID NO: 869325 - RNA, 22 nt, Human
ggccugggcaauguggcgaaac

SEQ ID NO: 869326 - RNA, 18 nt, Human
ggcgaaggggguggguga

SEQ ID NO: 869327 - RNA, 23 nt, Human
gggccugcugcagauggcugcgg

SEQ ID NO: 869328 - RNA, 25 nt, Human
gggucucugcuguacaggaccuugg

SEQ ID NO: 869329 - RNA, 22 nt, Human
ggguguguucugagcugaggcg

SEQ ID NO: 869330 - RNA, 23 nt, Human
gguaugguggcucaucccuguaa

SEQ ID NO: 869331 - RNA, 19 nt, Human
ggugagccccgcagggagc

SEQ ID NO: 869332 - RNA, 23 nt, Human
gguggcucaucccuguaauccag

SEQ ID NO: 869333 - RNA, 23 nt, Human
gguuugggucucugcuguacagg

SEQ ID NO: 869334 - RNA, 23 nt, Human
gucucaggucguccaguccuggg

SEQ ID NO: 869335 - RNA, 21 nt, Human
guggaagacaggcccuagcca

SEQ ID NO: 869336 - RNA, 20 nt, Human
guggaggcugcagugagcug

SEQ ID NO: 869337 - RNA, 24 nt, Human
uacaaacagguaguucugaaagca

SEQ ID NO: 869338 - RNA, 18 nt, Human
uacaggaccuuggcagcc

SEQ ID NO: 869339 - RNA, 20 nt, Human
uaccgccugugcccuggccu

SEQ ID NO: 869340 - RNA, 26 nt, Human
uaccgccugugcccuggccuuccugc

SEQ ID NO: 869341 - RNA, 23 nt, Human
uaugagaaggcuguugcugggag

SEQ ID NO: 869342 - RNA, 24 nt, Human
ucacaugagcccaggagguggagg

SEQ ID NO: 869343 - RNA, 23 nt, Human
ucacugauaugguaaugccuccu

SEQ ID NO: 869344 - RNA, 18 nt, Human
ucaguccaggaaacaagc

SEQ ID NO: 869345 - RNA, 28 nt, Human
ucccuguaauccagcacuuuucccuggg

SEQ ID NO: 869346 - RNA, 23 nt, Human
uccggccuggggaacagagugag

SEQ ID NO: 869347 - RNA, 24 nt, Human
uccggccuggggaacagagugagg

SEQ ID NO: 869348 - RNA, 23 nt, Human
ucguaccacugcacuccggccug

SEQ ID NO: 869349 - RNA, 19 nt, Human
ucuccaagcaggugguccu

SEQ ID NO: 869350 - RNA, 20 nt, Human
ucuccaagcaggugguccug

SEQ ID NO: 869351 - RNA, 23 nt, Human
ucugaagacugcuaagaggguuu

SEQ ID NO: 869352 - RNA, 20 nt, Human
ugacucacauggaagucccc

SEQ ID NO: 869353 - RNA, 20 nt, Human
ugagaaggcuguugcuggga

SEQ ID NO: 869354 - RNA, 20 nt, Human
ugagaccagccugggccugg

SEQ ID NO: 869355 - RNA, 23 nt, Human
ugagcccagaaguuugagaccag

SEQ ID NO: 869356 - RNA, 22 nt, Human
ugaggaaacuugaaccacagag

SEQ ID NO: 869357 - RNA, 25 nt, Human
ugaggcagaugaauugcuugagccc

SEQ ID NO: 869358 - RNA, 24 nt, Human
ugaggcgagacccacacgaaaucu

SEQ ID NO: 869359 - RNA, 18 nt, Human
ugaggugggaggaucaca

SEQ ID NO: 869360 - RNA, 19 nt, Human
ugaggugggaggaucacau

SEQ ID NO: 869361 - RNA, 24 nt, Human
ugaggugggaggaucacaugagcc

SEQ ID NO: 869362 - RNA, 26 nt, Human
ugaggugggaggaucacaugagccca

SEQ ID NO: 869363 - RNA, 18 nt, Human
ugauaugguaaugccucc

SEQ ID NO: 869364 - RNA, 18 nt, Human
ugcugaaccaagaagccu

SEQ ID NO: 869365 - RNA, 22 nt, Human
uggaguccccgcaaagggagcc

SEQ ID NO: 869366 - RNA, 18 nt, Human
uggcucaucccuguaauc

SEQ ID NO: 869367 - RNA, 19 nt, Human
uggcucaucccuguaaucc

SEQ ID NO: 869368 - RNA, 23 nt, Human
uggcucaucccuguaauccagca

SEQ ID NO: 869369 - RNA, 24 nt, Human
ugggaggaucacaugagcccagga

SEQ ID NO: 869370 - RNA, 22 nt, Human
ugggaggggccugcugcagaug

SEQ ID NO: 869371 - RNA, 22 nt, Human
ugggagguugaggcagaugaau

SEQ ID NO: 869372 - RNA, 24 nt, Human
ugggagguugaggcagaugaauug

SEQ ID NO: 869373 - RNA, 24 nt, Human
ugggcaauguggcgaaacccuguc

SEQ ID NO: 869374 - RNA, 21 nt, Human
uggggaacagagugaggcccu

SEQ ID NO: 869375 - RNA, 18 nt, Human
uggggcugcaggccaguu

SEQ ID NO: 869376 - RNA, 18 nt, Human
uggugcaagccuguaguc

SEQ ID NO: 869377 - RNA, 22 nt, Human
ugguggcucaucccuguaaucc

SEQ ID NO: 869378 - RNA, 24 nt, Human
ugguggugcaagccuguaguccca

SEQ ID NO: 869379 - RNA, 18 nt, Human
ugugguggggcagugaac

SEQ ID NO: 869380 - RNA, 20 nt, Human
uuagccgggugugguggugc

SEQ ID NO: 869381 - RNA, 24 nt, Human
uuagccgggugugguggugcaagc

SEQ ID NO: 869382 - RNA, 19 nt, Human
uucaggcagaagugagaag

SEQ ID NO: 869383 - RNA, 21 nt, Human
uugcuugagcccagaaguuug

SEQ ID NO: 869384 - RNA, 24 nt, Human
uugcuugagcccagaaguuugaga

SEQ ID NO: 869385 - RNA, 24 nt, Human
uuggaacaagccucuuagaggguc

SEQ ID NO: 869386 - RNA, 18 nt, Human
uuugggucucugcuguac

SEQ ID NO: 869387 - RNA, 19 nt, Human
agacaggggcggcccgagc

SEQ ID NO: 869388 - RNA, 20 nt, Human
agagaaaaaaaaaauaacug

SEQ ID NO: 869389 - RNA, 26 nt, Human
agagaaaaaaaaaauaacugccuggg

SEQ ID NO: 869390 - RNA, 19 nt, Human
cagcgccgcaaagcuccgc

SEQ ID NO: 869391 - RNA, 24 nt, Human
cagcgccgcaaagcuccgcucaga

SEQ ID NO: 869392 - RNA, 18 nt, Human
caggauggaugaccaaca

SEQ ID NO: 869393 - RNA, 19 nt, Human
cccaggcugcggcagcgcg

SEQ ID NO: 869394 - RNA, 20 nt, Human
cccuggggaaucccaggcug

SEQ ID NO: 869395 - RNA, 21 nt, Human
ccgcaaagcuccgcucagaca

SEQ ID NO: 869396 - RNA, 20 nt, Human
ccuguaagcuucagcgccgc

SEQ ID NO: 869397 - RNA, 25 nt, Human
cuccgggggggucccuggggaaucc

SEQ ID NO: 869398 - RNA, 26 nt, Human
cuuuacuagaaauauagagaaaaaaa

SEQ ID NO: 869399 - RNA, 18 nt, Human
gcaaagcuccgcucagac

SEQ ID NO: 869400 - RNA, 20 nt, Human
gcaaagcuccgcucagacag

SEQ ID NO: 869401 - RNA, 25 nt, Human
gccgcaaagcuccgcucagacaggg

SEQ ID NO: 869402 - RNA, 21 nt, Human
gcuccgggggggucccugggg

SEQ ID NO: 869403 - RNA, 24 nt, Human
ggagcaucuccgaacucagcguag

SEQ ID NO: 869404 - RNA, 18 nt, Human
gggggggucccuggggaa

SEQ ID NO: 869405 - RNA, 23 nt, Human
uauagagaaaaaaaaaauaacug

SEQ ID NO: 869406 - RNA, 21 nt, Human
ucagacaggggcggcccgagc

SEQ ID NO: 869407 - RNA, 21 nt, Human
ucccuggggaaucccaggcug

SEQ ID NO: 869408 - RNA, 24 nt, Human
uccgccaaucagacgccgggcgag

SEQ ID NO: 869409 - RNA, 21 nt, Human
uggagcaucuccgaacucagc

SEQ ID NO: 869410 - RNA, 24 nt, Human
uuuuuuuuuuuuuuuuuuuuucag

SEQ ID NO: 869411 - RNA, 18 nt, Human
aacagcugacccuggggg

SEQ ID NO: 869412 - RNA, 20 nt, Human
aaccaggucucuaguuuguu

SEQ ID NO: 869413 - RNA, 19 nt, Human
aagagucagaaccacaggu

SEQ ID NO: 869414 - RNA, 23 nt, Human
aagagucagaaccacagguggga

SEQ ID NO: 869415 - RNA, 23 nt, Human
aagaugacauccucauuucuacc

SEQ ID NO: 869416 - RNA, 22 nt, Human
aaggggaggccgcauacuugcc

SEQ ID NO: 869417 - RNA, 21 nt, Human
aauagccccagaagcaagagc

SEQ ID NO: 869418 - RNA, 23 nt, Human
acacugacccuccaauagcccca

SEQ ID NO: 869419 - RNA, 21 nt, Human
acagcugacccugggggugag

SEQ ID NO: 869420 - RNA, 19 nt, Human
accacacccaacagcacca

SEQ ID NO: 869421 - RNA, 18 nt, Human
acgcagugugcgggcugg

SEQ ID NO: 869422 - RNA, 24 nt, Human
acgcugcaggaacaaagggggacc

SEQ ID NO: 869423 - RNA, 21 nt, Human
agaccacacccaacagcacca

SEQ ID NO: 869424 - RNA, 18 nt, Human
aggaaaaguggggaggcc

SEQ ID NO: 869425 - RNA, 25 nt, Human
aggaaaaguggggaggccauaaagg

SEQ ID NO: 869426 - RNA, 25 nt, Human
aggaacaaagggggacagcaucagc

SEQ ID NO: 869427 - RNA, 21 nt, Human
aggacacccuauuccugcuaa

SEQ ID NO: 869428 - RNA, 19 nt, Human
aggcaccaugaggcugccc

SEQ ID NO: 869429 - RNA, 25 nt, Human
aggcagcccugggugcugggggcag

SEQ ID NO: 869430 - RNA, 19 nt, Human
agggaaucucagagcccag

SEQ ID NO: 869431 - RNA, 19 nt, Human
auccuuuccaccccucccu

SEQ ID NO: 869432 - RNA, 22 nt, Human
auccuuuccaccccucccuccc

SEQ ID NO: 869433 - RNA, 18 nt, Human
auucagucacagacacug

SEQ ID NO: 869434 - RNA, 21 nt, Human
caacagcaccacaaagacagg

SEQ ID NO: 869435 - RNA, 26 nt, Human
caacagcaccacaaagacaggcaccc

SEQ ID NO: 869436 - RNA, 19 nt, Human
caagagccuagggcccagc

SEQ ID NO: 869437 - RNA, 19 nt, Human
caagcaaagugcuuugaaa

SEQ ID NO: 869438 - RNA, 24 nt, Human
caauagccccagaagcaagagccu

SEQ ID NO: 869439 - RNA, 22 nt, Human
cacacaguugucgguaauguuc

SEQ ID NO: 869440 - RNA, 25 nt, Human
caccacaaagacaggcaccaugagg

SEQ ID NO: 869441 - RNA, 20 nt, Human
caccccucccuccccggccc

SEQ ID NO: 869442 - RNA, 30 nt, Human
caccccucccuccccggcccuugggcccag

SEQ ID NO: 869443 - RNA, 21 nt, Human
cagaaccacaggugggaggga

SEQ ID NO: 869444 - RNA, 24 nt, Human
cagagcccaggcuccccacugagc

SEQ ID NO: 869445 - RNA, 23 nt, Human
cagcaccacaaagacaggcacca

SEQ ID NO: 869446 - RNA, 18 nt, Human
cauaaaggagaaagacca

SEQ ID NO: 869447 - RNA, 21 nt, Human
caucacauccuuuccaccccu

SEQ ID NO: 869448 - RNA, 25 nt, Human
caucacauccuuuccaccccucccu

SEQ ID NO: 869449 - RNA, 31 nt, Human
ccacacccaacagcaccacaaagacaggcag

SEQ ID NO: 869450 - RNA, 21 nt, Human
ccaccccucccuccccggccc

SEQ ID NO: 869451 - RNA, 18 nt, Human
cccaacagcaccacaaag

SEQ ID NO: 869452 - RNA, 19 nt, Human
cccacugagcuuggccagc

SEQ ID NO: 869453 - RNA, 19 nt, Human
cccagcgauccauacccag

SEQ ID NO: 869454 - RNA, 24 nt, Human
ccccagaagcaagagccuagggcc

SEQ ID NO: 869455 - RNA, 20 nt, Human
cccuugcaggcagcccuggg

SEQ ID NO: 869456 - RNA, 21 nt, Human
cccuugggcccagcucuggcc

SEQ ID NO: 869457 - RNA, 21 nt, Human
ccggcccuugggcccagcucu

SEQ ID NO: 869458 - RNA, 20 nt, Human
ccuccaauagccccagaagc

SEQ ID NO: 869459 - RNA, 23 nt, Human
cgcauacuugccuccuguguccu

SEQ ID NO: 869460 - RNA, 21 nt, Human
cuacggaguugugcuggggcc

SEQ ID NO: 869461 - RNA, 19 nt, Human
cuccccggcccuugggccc

SEQ ID NO: 869462 - RNA, 20 nt, Human
cuccuucagaggacccuaaa

SEQ ID NO: 869463 - RNA, 20 nt, Human
cugcaggaacaaagggggac

SEQ ID NO: 869464 - RNA, 22 nt, Human
cuggaacagcugacccuggggg

SEQ ID NO: 869465 - RNA, 24 nt, Human
cuugcaggcagcccugggugcugg

SEQ ID NO: 869466 - RNA, 19 nt, Human
gagcagcagcuguggccug

SEQ ID NO: 869467 - RNA, 20 nt, Human
gagcagcagcuguggccugg

SEQ ID NO: 869468 - RNA, 24 nt, Human
gagcgguggcagugaaucacacag

SEQ ID NO: 869469 - RNA, 25 nt, Human
gagcuuggccagcagcuuugaacuc

SEQ ID NO: 869470 - RNA, 21 nt, Human
gcagcccugggugcugggggc

SEQ ID NO: 869471 - RNA, 21 nt, Human
gcccuugcaggcagcccuggg

SEQ ID NO: 869472 - RNA, 19 nt, Human
gcugacccugggggugagc

SEQ ID NO: 869473 - RNA, 20 nt, Human
ggagacaguggcaggugcug

SEQ ID NO: 869474 - RNA, 20 nt, Human
ggcaggguaggacgcuggcc

SEQ ID NO: 869475 - RNA, 19 nt, Human
gggacagcaucagcagagc

SEQ ID NO: 869476 - RNA, 20 nt, Human
gggccaaggaggcugagggg

SEQ ID NO: 869477 - RNA, 19 nt, Human
gggcccagcucuggccagg

SEQ ID NO: 869478 - RNA, 19 nt, Human
gggucuuguagcaggcggc

SEQ ID NO: 869479 - RNA, 19 nt, Human
ggguggcucaguggccgag

SEQ ID NO: 869480 - RNA, 20 nt, Human
guggcucaguggccgagggg

SEQ ID NO: 869481 - RNA, 23 nt, Human
uaaaauaaaaugcaagcaaagug

SEQ ID NO: 869482 - RNA, 21 nt, Human
uaaaaugcaagcaaagugcuu

SEQ ID NO: 869483 - RNA, 18 nt, Human
uaacugacccagcccuca

SEQ ID NO: 869484 - RNA, 24 nt, Human
uaccagaccacacccaacagcacc

SEQ ID NO: 869485 - RNA, 24 nt, Human
uacuaggaagcugaagaagacggu

SEQ ID NO: 869486 - RNA, 22 nt, Human
uagguucuaacugacccagccc

SEQ ID NO: 869487 - RNA, 20 nt, Human
ucacauccuuuccaccccuc

SEQ ID NO: 869488 - RNA, 20 nt, Human
ucagagcccaggcuccccac

SEQ ID NO: 869489 - RNA, 21 nt, Human
ucagaggacccuaaaagugaa

SEQ ID NO: 869490 - RNA, 18 nt, Human
ucagcagagccugagggg

SEQ ID NO: 869491 - RNA, 23 nt, Human
ucagcagagccugagggguugca

SEQ ID NO: 869492 - RNA, 21 nt, Human
ucaguggccgagggggccaag

SEQ ID NO: 869493 - RNA, 21 nt, Human
uccacgcugcaggaacaaagg

SEQ ID NO: 869494 - RNA, 21 nt, Human
uccauacaucccaaauacuag

SEQ ID NO: 869495 - RNA, 23 nt, Human
uccccggcccuugggcccagcuc

SEQ ID NO: 869496 - RNA, 28 nt, Human
ucuguacuccuguggaugagaaggggag

SEQ ID NO: 869497 - RNA, 21 nt, Human
ugacccagcccucaugagguu

SEQ ID NO: 869498 - RNA, 19 nt, Human
ugagaaggggaggccgcau

SEQ ID NO: 869499 - RNA, 25 nt, Human
ugcccuugcaggcagcccugggugc

SEQ ID NO: 869500 - RNA, 20 nt, Human
uggcugagaaauggaaggau

SEQ ID NO: 869501 - RNA, 22 nt, Human
ugggaagagucagaaccacagg

SEQ ID NO: 869502 - RNA, 22 nt, Human
ugggcaggguaggacgcuggcc

SEQ ID NO: 869503 - RNA, 22 nt, Human
uggggaggccauaaaggagaaa

SEQ ID NO: 869504 - RNA, 19 nt, Human
ugugcuggggccaugcuga

SEQ ID NO: 869505 - RNA, 21 nt, Human
uugaaagaagggaggacaccc

SEQ ID NO: 869506 - RNA, 23 nt, Human
uuggccagcagcuuugaacuccu

SEQ ID NO: 869507 - RNA, 24 nt, Human
uuuccaccccucccuccccggccc

SEQ ID NO: 869508 - RNA, 22 nt, Human
uuuggcugagaaauggaaggau

SEQ ID NO: 869509 - RNA, 22 nt, Human
uuuuuauuuuuuuuuuugcagg

SEQ ID NO: 869510 - RNA, 18 nt, Human
uuuuuuuuuugcaggacc

SEQ ID NO: 869511 - RNA, 25 nt, Human
uuuuuuuuuuuuuuuuuuuauuuuu

SEQ ID NO: 869512 - RNA, 19 nt, Human
aagcagaggaagccugagc

SEQ ID NO: 869513 - RNA, 18 nt, Human
aagcugaggcaggagagg

SEQ ID NO: 869514 - RNA, 23 nt, Human
aagggacaagaaaaccaggccca

SEQ ID NO: 869515 - RNA, 21 nt, Human
acaaagcagaggaagccugag

SEQ ID NO: 869516 - RNA, 20 nt, Human
acacccaaggcaagggugac

SEQ ID NO: 869517 - RNA, 24 nt, Human
acuccgagggacagugcuuccggg

SEQ ID NO: 869518 - RNA, 23 nt, Human
agacaaagcagaggaagccugag

SEQ ID NO: 869519 - RNA, 18 nt, Human
aggagaugcuuuauuuca

SEQ ID NO: 869520 - RNA, 21 nt, Human
aggcaggagagggacacccaa

SEQ ID NO: 869521 - RNA, 23 nt, Human
aggcaggagagggacacccaagg

SEQ ID NO: 869522 - RNA, 19 nt, Human
aggcccaaagugagggcag

SEQ ID NO: 869523 - RNA, 18 nt, Human
aggccuuucuuguuggcu

SEQ ID NO: 869524 - RNA, 21 nt, Human
agguacaauaggccacaccuc

SEQ ID NO: 869525 - RNA, 20 nt, Human
caaagcagaggaagccugag

SEQ ID NO: 869526 - RNA, 21 nt, Human
cacccaaggcaagggugacag

SEQ ID NO: 869527 - RNA, 23 nt, Human
cacccaaggcaagggugacaggc

SEQ ID NO: 869528 - RNA, 23 nt, Human
caccucuguccugcaccugggaa

SEQ ID NO: 869529 - RNA, 23 nt, Human
cagucucaacuacuggucccaca

SEQ ID NO: 869530 - RNA, 21 nt, Human
ccaaagugagggcagcgcaga

SEQ ID NO: 869531 - RNA, 21 nt, Human
ccaaucaugcuggccuucuuc

SEQ ID NO: 869532 - RNA, 18 nt, Human
ccagacacgugcccagag

SEQ ID NO: 869533 - RNA, 22 nt, Human
ccagggugggagcaaccacaga

SEQ ID NO: 869534 - RNA, 24 nt, Human
cccaaagugagggcagcgcagaga

SEQ ID NO: 869535 - RNA, 20 nt, Human
cccacagaagaagucuucag

SEQ ID NO: 869536 - RNA, 18 nt, Human
ccccgaguccggggaguc

SEQ ID NO: 869537 - RNA, 21 nt, Human
ccccggcuguguccacucucc

SEQ ID NO: 869538 - RNA, 24 nt, Human
ccucuaaaauuaagcugaggcagg

SEQ ID NO: 869539 - RNA, 21 nt, Human
ccugcguuggggcagucucaa

SEQ ID NO: 869540 - RNA, 18 nt, Human
cuuucuuguuggcuggag

SEQ ID NO: 869541 - RNA, 19 nt, Human
gacaagaaaaccaggccca

SEQ ID NO: 869542 - RNA, 19 nt, Human
gagggcagcgcagagauga

SEQ ID NO: 869543 - RNA, 19 nt, Human
gagucgccggggccuugga

SEQ ID NO: 869544 - RNA, 18 nt, Human
gcgggugggccucggcgg

SEQ ID NO: 869545 - RNA, 22 nt, Human
ggagagccagucuccggccgga

SEQ ID NO: 869546 - RNA, 19 nt, Human
gucuccggccggauucugg

SEQ ID NO: 869547 - RNA, 21 nt, Human
ucagggaaaacacccagggug

SEQ ID NO: 869548 - RNA, 19 nt, Human
uccggccggauucuggugc

SEQ ID NO: 869549 - RNA, 24 nt, Human
uccugcaccugggaaccuugggca

SEQ ID NO: 869550 - RNA, 20 nt, Human
uccugcguuggggcagucuc

SEQ ID NO: 869551 - RNA, 18 nt, Human
ucuguccugcaccuggga

SEQ ID NO: 869552 - RNA, 24 nt, Human
ugaagggacaagaaaaccaggccc

SEQ ID NO: 869553 - RNA, 21 nt, Human
ugaccagacacgugcccagag

SEQ ID NO: 869554 - RNA, 18 nt, Human
ugaggcaggagagggaca

SEQ ID NO: 869555 - RNA, 21 nt, Human
ugccugcucaugguggguugu

SEQ ID NO: 869556 - RNA, 20 nt, Human
uggaugagcagagcaaccac

SEQ ID NO: 869557 - RNA, 25 nt, Human
uggaugugaccagacacgugcccag

SEQ ID NO: 869558 - RNA, 23 nt, Human
uguccugcguuggggcagucuca

SEQ ID NO: 869559 - RNA, 28 nt, Human
ugugaccagacacgugcccagagcugcc

SEQ ID NO: 869560 - RNA, 20 nt, Human
uucagaacaagguacaauag

SEQ ID NO: 869561 - RNA, 19 nt, Human
uuggggcagucucaacuac

SEQ ID NO: 869562 - RNA, 18 nt, Human
uuguccugcguuggggca

SEQ ID NO: 869563 - RNA, 19 nt, Human
uuguccugcguuggggcag

SEQ ID NO: 869564 - RNA, 22 nt, Human
uuguugugguguggcuccuuuc

SEQ ID NO: 869565 - RNA, 23 nt, Human
uuuuuuuuuuuuuuuuaagcagg

SEQ ID NO: 869566 - RNA, 19 nt, Human
uuuuuuuuuuuuuuuuuaa

SEQ ID NO: 869567 - RNA, 21 nt, Human
aacugcuucuuucagcuccug

SEQ ID NO: 869568 - RNA, 19 nt, Human
accccuccccuucuaucuc

SEQ ID NO: 869569 - RNA, 20 nt, Human
acucccucagagacagagug

SEQ ID NO: 869570 - RNA, 19 nt, Human
acuccuaacacugcucuuc

SEQ ID NO: 869571 - RNA, 20 nt, Human
agccuacuccccaaacccgc

SEQ ID NO: 869572 - RNA, 18 nt, Human
cacugcucuuccucuaca

SEQ ID NO: 869573 - RNA, 21 nt, Human
cagcuugucuggaagaaccga

SEQ ID NO: 869574 - RNA, 18 nt, Human
cccuccccuucuaucuca

SEQ ID NO: 869575 - RNA, 18 nt, Human
cccuccucccucuccucc

SEQ ID NO: 869576 - RNA, 19 nt, Human
cccucuccuccuaccccuc

SEQ ID NO: 869577 - RNA, 24 nt, Human
ccucccucuccuccuaccccuccc

SEQ ID NO: 869578 - RNA, 21 nt, Human
cuacccuccucccucuccucc

SEQ ID NO: 869579 - RNA, 22 nt, Human
cuacuccccaaacccgcuuaac

SEQ ID NO: 869580 - RNA, 19 nt, Human
cucaagccuacuccccaaa

SEQ ID NO: 869581 - RNA, 21 nt, Human
cucccucuccuccuaccccuc

SEQ ID NO: 869582 - RNA, 20 nt, Human
cuccuaccccuccccuucua

SEQ ID NO: 869583 - RNA, 20 nt, Human
cuccucccucuccuccuacc

SEQ ID NO: 869584 - RNA, 28 nt, Human
cugauggugaugugguaggcaguucuuu

SEQ ID NO: 869585 - RNA, 19 nt, Human
cuggaagaaccgaaggaug

SEQ ID NO: 869586 - RNA, 19 nt, Human
cuggccccucuuugaaauc

SEQ ID NO: 869587 - RNA, 23 nt, Human
uaacuccuaacacugcucuuccu

SEQ ID NO: 869588 - RNA, 19 nt, Human
uaacugcuucuuucagcuc

SEQ ID NO: 869589 - RNA, 22 nt, Human
uaagguagggcucaagccuacu

SEQ ID NO: 869590 - RNA, 20 nt, Human
uccccaaacccgcuuaacuc

SEQ ID NO: 869591 - RNA, 20 nt, Human
ucccucagagacagagugga

SEQ ID NO: 869592 - RNA, 18 nt, Human
ucccucuccuccuacccc

SEQ ID NO: 869593 - RNA, 18 nt, Human
uccuccuaccccuccccu

SEQ ID NO: 869594 - RNA, 22 nt, Human
ugaccuaacugcuucuuucagc

SEQ ID NO: 869595 - RNA, 21 nt, Human
uggccauggucagcgucuugc

SEQ ID NO: 869596 - RNA, 22 nt, Human
uggccauggucagcgucuugca

SEQ ID NO: 869597 - RNA, 20 nt, Human
uggucagcgucuugcagcuu

SEQ ID NO: 869598 - RNA, 21 nt, Human
ugucuggaagaaccgaaggau

SEQ ID NO: 869599 - RNA, 20 nt, Human
ugucuuccuacccuccuccc

SEQ ID NO: 869600 - RNA, 22 nt, Human
ugucuuccuacccuccucccuc

SEQ ID NO: 869601 - RNA, 18 nt, Human
uuuuuuuuuuuuuuuuug

SEQ ID NO: 869602 - RNA, 20 nt, Human
uuuuuuuuuuuuuuuuuugg

SEQ ID NO: 869603 - RNA, 20 nt, Human
aaaaagacaacggcaaccga

SEQ ID NO: 869604 - RNA, 21 nt, Human
accuguggacgaggguucccu

SEQ ID NO: 869605 - RNA, 18 nt, Human
agaaauugcauucuguac

SEQ ID NO: 869606 - RNA, 22 nt, Human
agagaacuugucacuaguaauu

SEQ ID NO: 869607 - RNA, 24 nt, Human
caagagcaagggguggccaccugu

SEQ ID NO: 869608 - RNA, 24 nt, Human
caaggaaaaaagacaacggcaacc

SEQ ID NO: 869609 - RNA, 24 nt, Human
cagaacacguugcccaccucgcaa

SEQ ID NO: 869610 - RNA, 18 nt, Human
ccaccuguggacgagggu

SEQ ID NO: 869611 - RNA, 21 nt, Human
cccauggccacugcgcucauu

SEQ ID NO: 869612 - RNA, 18 nt, Human
ccccauggccacugcgcu

SEQ ID NO: 869613 - RNA, 21 nt, Human
ccgagucaaggaaaaaagaca

SEQ ID NO: 869614 - RNA, 23 nt, Human
cucaagagcaagggguggccacc

SEQ ID NO: 869615 - RNA, 19 nt, Human
cucgagaugguagguggcu

SEQ ID NO: 869616 - RNA, 21 nt, Human
gagcaagggguggccaccugu

SEQ ID NO: 869617 - RNA, 22 nt, Human
gagcguuauuaaaacccuacua

SEQ ID NO: 869618 - RNA, 21 nt, Human
gagguuuugggugggacucaa

SEQ ID NO: 869619 - RNA, 21 nt, Human
gugggacucaagagcaagggg

SEQ ID NO: 869620 - RNA, 19 nt, Human
uaacagaacacguugccca

SEQ ID NO: 869621 - RNA, 23 nt, Human
ucaaaggggccccgggggcggcg

SEQ ID NO: 869622 - RNA, 20 nt, Human
uccccauggccacugcgcuc

SEQ ID NO: 869623 - RNA, 21 nt, Human
uccgagucaaggaaaaaagac

SEQ ID NO: 869624 - RNA, 19 nt, Human
ugaugaccacacgggaacc

SEQ ID NO: 869625 - RNA, 21 nt, Human
uguccaucaaaggggccccgg

SEQ ID NO: 869626 - RNA, 19 nt, Human
uuuuuuuuuuuuagagauc

SEQ ID NO: 869627 - RNA, 19 nt, Human
aaagaaggaaaaauagaac

SEQ ID NO: 869628 - RNA, 19 nt, Human
aaagugcuaggauuauagg

SEQ ID NO: 869629 - RNA, 24 nt, Human
aaagugcuaggauuauaggcauga

SEQ ID NO: 869630 - RNA, 24 nt, Human
aagaaggaaaaauagaacuaagaa

SEQ ID NO: 869631 - RNA, 19 nt, Human
aauagaacuaagaauauca

SEQ ID NO: 869632 - RNA, 24 nt, Human
accauguuggccaagcuggucuug

SEQ ID NO: 869633 - RNA, 22 nt, Human
agagagaaagagggaaccccga

SEQ ID NO: 869634 - RNA, 24 nt, Human
agcuggucuugaacuccugaccuc

SEQ ID NO: 869635 - RNA, 18 nt, Human
aggaagccucccagcuca

SEQ ID NO: 869636 - RNA, 19 nt, Human
aggcaugagccacugugcc

SEQ ID NO: 869637 - RNA, 22 nt, Human
aggcaugagccacugugccugg

SEQ ID NO: 869638 - RNA, 23 nt, Human
aggccaggaaaggauaggucuga

SEQ ID NO: 869639 - RNA, 25 nt, Human
aggcuggagugcagugggaagaucu

SEQ ID NO: 869640 - RNA, 24 nt, Human
aggugaucugcccgccucggccuc

SEQ ID NO: 869641 - RNA, 19 nt, Human
aguagcugggauuaaaggc

SEQ ID NO: 869642 - RNA, 24 nt, Human
agugcagugggaagaucucagcuc

SEQ ID NO: 869643 - RNA, 18 nt, Human
augggguuucaccauguu

SEQ ID NO: 869644 - RNA, 22 nt, Human
augggguuucaccauguuggcc

SEQ ID NO: 869645 - RNA, 25 nt, Human
augggguuucaccauguuggccaag

SEQ ID NO: 869646 - RNA, 24 nt, Human
auuuuuguauuuuugguagagaug

SEQ ID NO: 869647 - RNA, 24 nt, Human
caaagugcuaggauuauaggcaug

SEQ ID NO: 869648 - RNA, 18 nt, Human
caaccuccaccuccugga

SEQ ID NO: 869649 - RNA, 22 nt, Human
caccaccacgucuggcuaauuu

SEQ ID NO: 869650 - RNA, 24 nt, Human
caccacgucuggcuaauuuuugua

SEQ ID NO: 869651 - RNA, 21 nt, Human
caccauguuggccaagcuggu

SEQ ID NO: 869652 - RNA, 23 nt, Human
caccauguuggccaagcuggucu

SEQ ID NO: 869653 - RNA, 24 nt, Human
caccauguuggccaagcuggucuu

SEQ ID NO: 869654 - RNA, 27 nt, Human
caccauguuggccaagcuggucuugaa

SEQ ID NO: 869655 - RNA, 22 nt, Human
cacccggggccccggccucguc

SEQ ID NO: 869656 - RNA, 23 nt, Human
cacccggggccccggccucgucc

SEQ ID NO: 869657 - RNA, 21 nt, Human
cacugcaaccuccaccuccug

SEQ ID NO: 869658 - RNA, 19 nt, Human
cacugugccuggucaagau

SEQ ID NO: 869659 - RNA, 22 nt, Human
caugugauucuccugccucagc

SEQ ID NO: 869660 - RNA, 24 nt, Human
cauguuggccaagcuggucuugaa

SEQ ID NO: 869661 - RNA, 24 nt, Human
ccaaagugcuaggauuauaggcau

SEQ ID NO: 869662 - RNA, 24 nt, Human
ccaaccagugacauucuugacugg

SEQ ID NO: 869663 - RNA, 18 nt, Human
ccaggauucugugaaccc

SEQ ID NO: 869664 - RNA, 21 nt, Human
ccaggauucugugaaccccuc

SEQ ID NO: 869665 - RNA, 18 nt, Human
cccauaucucaaccccca

SEQ ID NO: 869666 - RNA, 26 nt, Human
ccccauaucucaacccccacgucagc

SEQ ID NO: 869667 - RNA, 19 nt, Human
cccgaguagcugggauuaa

SEQ ID NO: 869668 - RNA, 19 nt, Human
ccuccaccuccuggauuca

SEQ ID NO: 869669 - RNA, 19 nt, Human
ccucccagcucagaggguc

SEQ ID NO: 869670 - RNA, 22 nt, Human
ccucccagcucagaggguccug

SEQ ID NO: 869671 - RNA, 24 nt, Human
ccuccuggauucaugugauucucc

SEQ ID NO: 869672 - RNA, 22 nt, Human
ccugaccucaggugaucugccc

SEQ ID NO: 869673 - RNA, 24 nt, Human
cgccucggccucccaaagugcuag

SEQ ID NO: 869674 - RNA, 22 nt, Human
cggguccucuccccggugcccc

SEQ ID NO: 869675 - RNA, 23 nt, Human
cgugcaccaccacgucuggcuaa

SEQ ID NO: 869676 - RNA, 24 nt, Human
cucacugcaaccuccaccuccugg

SEQ ID NO: 869677 - RNA, 24 nt, Human
cucagccucccgaguagcugggau

SEQ ID NO: 869678 - RNA, 24 nt, Human
cucauccccauaucucaaccccca

SEQ ID NO: 869679 - RNA, 19 nt, Human
cuccaaaagcugugacucu

SEQ ID NO: 869680 - RNA, 26 nt, Human
cuccugaccucaggugaucugcccgc

SEQ ID NO: 869681 - RNA, 23 nt, Human
cugcaaccuccaccuccuggauu

SEQ ID NO: 869682 - RNA, 23 nt, Human
cugccucagccucccgaguagcu

SEQ ID NO: 869683 - RNA, 24 nt, Human
gaccucaggugaucugcccgccuc

SEQ ID NO: 869684 - RNA, 18 nt, Human
gagaugggguuucaccau

SEQ ID NO: 869685 - RNA, 24 nt, Human
gagaugggguuucaccauguuggc

SEQ ID NO: 869686 - RNA, 21 nt, Human
gaggguccuggguccgggucc

SEQ ID NO: 869687 - RNA, 19 nt, Human
gauuauaggcaugagccac

SEQ ID NO: 869688 - RNA, 21 nt, Human
gauuauaggcaugagccacug

SEQ ID NO: 869689 - RNA, 22 nt, Human
gcaaccuccaccuccuggauuc

SEQ ID NO: 869690 - RNA, 20 nt, Human
gccucagccucccgaguagc

SEQ ID NO: 869691 - RNA, 21 nt, Human
gcgcaggaagccucccagcuc

SEQ ID NO: 869692 - RNA, 22 nt, Human
ggauuauaggcaugagccacug

SEQ ID NO: 869693 - RNA, 18 nt, Human
gggguuucaccauguugg

SEQ ID NO: 869694 - RNA, 22 nt, Human
gggguuucaccauguuggccaa

SEQ ID NO: 869695 - RNA, 18 nt, Human
ggguuucaccauguuggc

SEQ ID NO: 869696 - RNA, 22 nt, Human
ggguuucaccauguuggccaag

SEQ ID NO: 869697 - RNA, 21 nt, Human
gguagagaugggguuucacca

SEQ ID NO: 869698 - RNA, 19 nt, Human
ggucuugaacuccugaccu

SEQ ID NO: 869699 - RNA, 19 nt, Human
guagagaugggguuucacc

SEQ ID NO: 869700 - RNA, 21 nt, Human
guagagaugggguuucaccau

SEQ ID NO: 869701 - RNA, 22 nt, Human
guagagaugggguuucaccaug

SEQ ID NO: 869702 - RNA, 23 nt, Human
guagagaugggguuucaccaugu

SEQ ID NO: 869703 - RNA, 24 nt, Human
gugaucugcccgccucggccuccc

SEQ ID NO: 869704 - RNA, 24 nt, Human
gugauucuccugccucagccuccc

SEQ ID NO: 869705 - RNA, 23 nt, Human
uaagaauaucaugccaaccagug

SEQ ID NO: 869706 - RNA, 24 nt, Human
uaauuuuuguauuuuugguagaga

SEQ ID NO: 869707 - RNA, 22 nt, Human
uagagaugggguuucaccaugu

SEQ ID NO: 869708 - RNA, 21 nt, Human
uaggauuauaggcaugagcca

SEQ ID NO: 869709 - RNA, 22 nt, Human
uaggauuauaggcaugagccac

SEQ ID NO: 869710 - RNA, 22 nt, Human
uaggauuauaggcaugagccac

SEQ ID NO: 869711 - RNA, 23 nt, Human
uaggauuauaggcaugagccacu

SEQ ID NO: 869712 - RNA, 24 nt, Human
uaggauuauaggcaugagccacug

SEQ ID NO: 869713 - RNA, 19 nt, Human
uauuuuugguagagauggg

SEQ ID NO: 869714 - RNA, 23 nt, Human
ucaacccccacgucagcccugga

SEQ ID NO: 869715 - RNA, 19 nt, Human
ucacugcaaccuccaccuc

SEQ ID NO: 869716 - RNA, 23 nt, Human
ucacugcaaccuccaccuccugg

SEQ ID NO: 869717 - RNA, 24 nt, Human
ucacugcaaccuccaccuccugga

SEQ ID NO: 869718 - RNA, 20 nt, Human
ucagccucccgaguagcugg

SEQ ID NO: 869719 - RNA, 24 nt, Human
ucccaaagugcuaggauuauaggc

SEQ ID NO: 869720 - RNA, 24 nt, Human
ucccagcucagaggguccuggguc

SEQ ID NO: 869721 - RNA, 24 nt, Human
ucccgaguagcugggauuaaaggc

SEQ ID NO: 869722 - RNA, 24 nt, Human
uccuggauucaugugauucuccug

SEQ ID NO: 869723 - RNA, 18 nt, Human
uccuggguccggguccuc

SEQ ID NO: 869724 - RNA, 18 nt, Human
ucggccucccaaagugcu

SEQ ID NO: 869725 - RNA, 21 nt, Human
ucucaacccccacgucagccc

SEQ ID NO: 869726 - RNA, 24 nt, Human
ucuccugccucagccucccgagua

SEQ ID NO: 869727 - RNA, 24 nt, Human
ucuucauccucauccccauaucuc

SEQ ID NO: 869728 - RNA, 23 nt, Human
ucuugaacuccugaccucaggug

SEQ ID NO: 869729 - RNA, 19 nt, Human
ucuugacuggagcugcugc

SEQ ID NO: 869730 - RNA, 18 nt, Human
ugaccucaggugaucugc

SEQ ID NO: 869731 - RNA, 20 nt, Human
ugaccucaggugaucugccc

SEQ ID NO: 869732 - RNA, 24 nt, Human
ugaccucaggugaucugcccgccu

SEQ ID NO: 869733 - RNA, 20 nt, Human
ugauucuccugccucagccu

SEQ ID NO: 869734 - RNA, 25 nt, Human
ugcccgccugccgggugccacccgg

SEQ ID NO: 869735 - RNA, 24 nt, Human
ugccucagccucccgaguagcugg

SEQ ID NO: 869736 - RNA, 23 nt, Human
uggagugcagugggaagaucuca

SEQ ID NO: 869737 - RNA, 18 nt, Human
uggcagagagaaagaggg

SEQ ID NO: 869738 - RNA, 24 nt, Human
uggccaagcuggucuugaacuccu

SEQ ID NO: 869739 - RNA, 24 nt, Human
ugggaagaucucagcucacugcaa

SEQ ID NO: 869740 - RNA, 24 nt, Human
ugggauuaaaggcgugcaccacca

SEQ ID NO: 869741 - RNA, 24 nt, Human
ugggguuucaccauguuggccaag

SEQ ID NO: 869742 - RNA, 24 nt, Human
ugguagagaugggguuucaccaug

SEQ ID NO: 869743 - RNA, 18 nt, Human
ugugacucuauggggucc

SEQ ID NO: 869744 - RNA, 24 nt, Human
ugugauucuccugccucagccucc

SEQ ID NO: 869745 - RNA, 23 nt, Human
uuauuggccaggcuggagugcag

SEQ ID NO: 869746 - RNA, 18 nt, Human
uucaugugauucuccugc

SEQ ID NO: 869747 - RNA, 23 nt, Human
uucaugugauucuccugccucag

SEQ ID NO: 869748 - RNA, 18 nt, Human
uugcagauggggaaguca

SEQ ID NO: 869749 - RNA, 20 nt, Human
uugcuggagacaggucuuau

SEQ ID NO: 869750 - RNA, 21 nt, Human
uugcuggagacaggucuuauu

SEQ ID NO: 869751 - RNA, 18 nt, Human
uuggccaggcuggagugc

SEQ ID NO: 869752 - RNA, 24 nt, Human
uugguagagaugggguuucaccau

SEQ ID NO: 869753 - RNA, 21 nt, Human
uuucaccauguuggccaagcu

SEQ ID NO: 869754 - RNA, 22 nt, Human
uuuuugguagagaugggguuuc

SEQ ID NO: 869755 - RNA, 24 nt, Human
uuuuugguagagaugggguuucac

SEQ ID NO: 869756 - RNA, 20 nt, Human
uuuuuguauuuuugguagag

SEQ ID NO: 869757 - RNA, 24 nt, Human
uuuuuuuuuugagacagggucuug

SEQ ID NO: 869758 - RNA, 20 nt, Human
uuuuuuuuuuugagacaggg

SEQ ID NO: 869759 - RNA, 23 nt, Human
uuuuuuuuuuuugagacaggguc

SEQ ID NO: 869760 - RNA, 24 nt, Human
uuuuuuuuuuuugagacagggucu

SEQ ID NO: 869761 - RNA, 24 nt, Human
uuuuuuuuuuuuuuugagacaggg

SEQ ID NO: 869762 - RNA, 19 nt, Human
aaaaagaguuuauuuagaa

SEQ ID NO: 869763 - RNA, 20 nt, Human
aaacacacacacaaagaaga

SEQ ID NO: 869764 - RNA, 24 nt, Human
aaacacacacacaaagaagauacc

SEQ ID NO: 869765 - RNA, 22 nt, Human
aaacagaaggauccccugaaca

SEQ ID NO: 869766 - RNA, 22 nt, Human
aaacagaaucagaaacucuaga

SEQ ID NO: 869767 - RNA, 27 nt, Human
aacaccuaucuaucuuagagcuuaagc

SEQ ID NO: 869768 - RNA, 19 nt, Human
aacagaaggauccccugaa

SEQ ID NO: 869769 - RNA, 24 nt, Human
aagaguuuauuuagaaaguaucau

SEQ ID NO: 869770 - RNA, 18 nt, Human
acagcugccacagccgug

SEQ ID NO: 869771 - RNA, 25 nt, Human
acgcagggugcgggagcuggcaggg

SEQ ID NO: 869772 - RNA, 18 nt, Human
acuggaaucuuucaauga

SEQ ID NO: 869773 - RNA, 20 nt, Human
agauacugagaaugagccuc

SEQ ID NO: 869774 - RNA, 18 nt, Human
aggcagaggcuggucgag

SEQ ID NO: 869775 - RNA, 23 nt, Human
agggugcgggagcugggcaggag

SEQ ID NO: 869776 - RNA, 21 nt, Human
agucucaaaggaaaccaugua

SEQ ID NO: 869777 - RNA, 19 nt, Human
aguucaugugggcucuggc

SEQ ID NO: 869778 - RNA, 21 nt, Human
aucacggcuaaccucucacac

SEQ ID NO: 869779 - RNA, 21 nt, Human
augcaucccauucuucauaca

SEQ ID NO: 869780 - RNA, 21 nt, Human
augcugcuguuaucuucugcc

SEQ ID NO: 869781 - RNA, 22 nt, Human
caaaaucacucaacucaggagc

SEQ ID NO: 869782 - RNA, 24 nt, Human
caaaaucacucaacucaggagcca

SEQ ID NO: 869783 - RNA, 18 nt, Human
caagagaaggucaaaggg

SEQ ID NO: 869784 - RNA, 25 nt, Human
caaggccaccuuuccagaacucgug

SEQ ID NO: 869785 - RNA, 18 nt, Human
caccuaucuaucuuagag

SEQ ID NO: 869786 - RNA, 21 nt, Human
cagccgugcacaccagggcca

SEQ ID NO: 869787 - RNA, 19 nt, Human
cagcggccgugaagguauc

SEQ ID NO: 869788 - RNA, 22 nt, Human
cagggccagagcagcccacuga

SEQ ID NO: 869789 - RNA, 22 nt, Human
ccaugccuacccuuucuaagga

SEQ ID NO: 869790 - RNA, 21 nt, Human
ccccugaacaguaacugauuu

SEQ ID NO: 869791 - RNA, 18 nt, Human
cccuggauacccaggccu

SEQ ID NO: 869792 - RNA, 18 nt, Human
ccgugcacaccagggcca

SEQ ID NO: 869793 - RNA, 20 nt, Human
ccuaaacgcagggugcggga

SEQ ID NO: 869794 - RNA, 21 nt, Human
cuaaccucucacacugagaga

SEQ ID NO: 869795 - RNA, 24 nt, Human
cucccaggucauuccaagucggcu

SEQ ID NO: 869796 - RNA, 18 nt, Human
cugcagccgcuggcagug

SEQ ID NO: 869797 - RNA, 26 nt, Human
cugccacagccgugcacaccagggcc

SEQ ID NO: 869798 - RNA, 19 nt, Human
cuggucuugucaccccagg

SEQ ID NO: 869799 - RNA, 18 nt, Human
cuguaugugcuuauuccc

SEQ ID NO: 869800 - RNA, 18 nt, Human
cuucugccucagacagac

SEQ ID NO: 869801 - RNA, 20 nt, Human
gaacgucaauacugccacaa

SEQ ID NO: 869802 - RNA, 20 nt, Human
gagccucccuggauacccag

SEQ ID NO: 869803 - RNA, 19 nt, Human
gcacaccagggccagagca

SEQ ID NO: 869804 - RNA, 25 nt, Human
gcagaccaaguauagcaagccucua

SEQ ID NO: 869805 - RNA, 22 nt, Human
gcagagccucccuggauaccca

SEQ ID NO: 869806 - RNA, 20 nt, Human
ggaauuuuccaugccuaccc

SEQ ID NO: 869807 - RNA, 20 nt, Human
ggccaaguauccacaucccc

SEQ ID NO: 869808 - RNA, 20 nt, Human
ggugacaaauacaacuggaa

SEQ ID NO: 869809 - RNA, 18 nt, Human
guuuuuuuaaaaaaagaa

SEQ ID NO: 869810 - RNA, 19 nt, Human
uaaaaggacuacugagaaa

SEQ ID NO: 869811 - RNA, 23 nt, Human
uaaacgcagggugcgggagcugg

SEQ ID NO: 869812 - RNA, 26 nt, Human
uacugccacaaggccaccuuuccaga

SEQ ID NO: 869813 - RNA, 27 nt, Human
uagcucgaugguaaaaggacaaacacc

SEQ ID NO: 869814 - RNA, 21 nt, Human
ucaacagcugccacagccgug

SEQ ID NO: 869815 - RNA, 18 nt, Human
ucaauacugccacaaggc

SEQ ID NO: 869816 - RNA, 19 nt, Human
uccaagucggcugcagccg

SEQ ID NO: 869817 - RNA, 22 nt, Human
uccacaccagggcgcgaagaac

SEQ ID NO: 869818 - RNA, 23 nt, Human
ucccaggucauuccaagucggcu

SEQ ID NO: 869819 - RNA, 19 nt, Human
ucccuggauacccaggccu

SEQ ID NO: 869820 - RNA, 22 nt, Human
ucccuggauacccaggccuggg

SEQ ID NO: 869821 - RNA, 18 nt, Human
ucuaguuagggcccuuca

SEQ ID NO: 869822 - RNA, 24 nt, Human
ucugcuuucugaacagccaccacu

SEQ ID NO: 869823 - RNA, 24 nt, Human
ucuguagaguguguuggcuuggaa

SEQ ID NO: 869824 - RNA, 26 nt, Human
ucuuuggucuugagaucaaaugcauc

SEQ ID NO: 869825 - RNA, 25 nt, Human
ugacaaauacaacuggaaaggguuc

SEQ ID NO: 869826 - RNA, 20 nt, Human
ugagauacugagaaugagcc

SEQ ID NO: 869827 - RNA, 22 nt, Human
ugagauacugagaaugagccuc

SEQ ID NO: 869828 - RNA, 20 nt, Human
uggaaaacacacacacaaag

SEQ ID NO: 869829 - RNA, 26 nt, Human
uggaaaacacacacacaaagaagaua

SEQ ID NO: 869830 - RNA, 24 nt, Human
uggccucugugggacugaacuccu

SEQ ID NO: 869831 - RNA, 24 nt, Human
ugggaggugggugaagaguguugg

SEQ ID NO: 869832 - RNA, 19 nt, Human
ugggcaggagaggugaccu

SEQ ID NO: 869833 - RNA, 19 nt, Human
ugggccaaguauccacauc

SEQ ID NO: 869834 - RNA, 21 nt, Human
uggguuuuugcauuucaaucu

SEQ ID NO: 869835 - RNA, 23 nt, Human
uuaaucacaaggacagcaugagu

SEQ ID NO: 869836 - RNA, 18 nt, Human
gccacuccuccaggccac

SEQ ID NO: 869837 - RNA, 18 nt, Human
ugaaugaaugggaaaagg

SEQ ID NO: 869838 - RNA, 21 nt, Human
ugugaaugaaugggaaaaggg

SEQ ID NO: 869839 - RNA, 21 nt, Human
uuuuuuuuuuuuuuuucucag

SEQ ID NO: 869840 - RNA, 23 nt, Human
uuuuuuuuuuuuuuuuuuucuca

SEQ ID NO: 869841 - RNA, 24 nt, Human
uuuuuuuuuuuuuuuuuuuuucuu

SEQ ID NO: 869842 - RNA, 19 nt, Human
aagcuguuuucugcuaccc

SEQ ID NO: 869843 - RNA, 20 nt, Human
aauuuuguccuuuuggaaca

SEQ ID NO: 869844 - RNA, 23 nt, Human
accucuuuugugcagaauccuca

SEQ ID NO: 869845 - RNA, 24 nt, Human
agagcaguuuuccugaagccuagg

SEQ ID NO: 869846 - RNA, 26 nt, Human
aggaaagaauacaacuugauagaaaa

SEQ ID NO: 869847 - RNA, 24 nt, Human
aggaaugcaacuaauauuguugag

SEQ ID NO: 869848 - RNA, 24 nt, Human
aggcgucuguccaugguacuuccu

SEQ ID NO: 869849 - RNA, 23 nt, Human
aucauguccauaguuucagccug

SEQ ID NO: 869850 - RNA, 22 nt, Human
caauccaacugcacugcuuugu

SEQ ID NO: 869851 - RNA, 20 nt, Human
caccccugguaggcgucugu

SEQ ID NO: 869852 - RNA, 18 nt, Human
cagauugcacuaaaaaac

SEQ ID NO: 869853 - RNA, 19 nt, Human
cagcuccuaagguaacacc

SEQ ID NO: 869854 - RNA, 24 nt, Human
cauucaggauuaaagaguuaggaa

SEQ ID NO: 869855 - RNA, 22 nt, Human
cggggccacuuuuuccuggagg

SEQ ID NO: 869856 - RNA, 18 nt, Human
cugcuacccuuuccuguc

SEQ ID NO: 869857 - RNA, 25 nt, Human
cuuccaagucaaauaccaauugcau

SEQ ID NO: 869858 - RNA, 18 nt, Human
cuugauagaaaaacgucu

SEQ ID NO: 869859 - RNA, 22 nt, Human
gaaggggacaacauucauuagg

SEQ ID NO: 869860 - RNA, 19 nt, Human
gagcaguuuuccugaagcc

SEQ ID NO: 869861 - RNA, 23 nt, Human
gcggcagaucgcgcgcgggagcc

SEQ ID NO: 869862 - RNA, 21 nt, Human
ggagccgcgggacccgggaag

SEQ ID NO: 869863 - RNA, 21 nt, Human
ggccacuuuuuccuggagggu

SEQ ID NO: 869864 - RNA, 24 nt, Human
uaaagaguuaggaaggauaaauua

SEQ ID NO: 869865 - RNA, 22 nt, Human
uaacaccauugaaggggacaac

SEQ ID NO: 869866 - RNA, 20 nt, Human
uaauuccggaauuuuuccuu

SEQ ID NO: 869867 - RNA, 19 nt, Human
uagaacaggaaagaauaca

SEQ ID NO: 869868 - RNA, 22 nt, Human
uauagaacaggaaagaauacaa

SEQ ID NO: 869869 - RNA, 19 nt, Human
uaugaaagucaguggagau

SEQ ID NO: 869870 - RNA, 23 nt, Human
ucaaauaccaauugcaugcuaac

SEQ ID NO: 869871 - RNA, 19 nt, Human
uccaugauggguaaugggg

SEQ ID NO: 869872 - RNA, 23 nt, Human
uccuggaggguuuccaugauggg

SEQ ID NO: 869873 - RNA, 24 nt, Human
uccuuacaauccaacugcacugcu

SEQ ID NO: 869874 - RNA, 19 nt, Human
ucuucagaaaucaugucca

SEQ ID NO: 869875 - RNA, 21 nt, Human
ucuuuugugcagaauccucag

SEQ ID NO: 869876 - RNA, 20 nt, Human
ugaauugaauguucagcucc

SEQ ID NO: 869877 - RNA, 20 nt, Human
ugcuuugucaccccugguag

SEQ ID NO: 869878 - RNA, 22 nt, Human
uggacauuugcuuuaugaaagu

SEQ ID NO: 869879 - RNA, 18 nt, Human
ugugcagaauccucaggc

SEQ ID NO: 869880 - RNA, 20 nt, Human
uucaaaaaauacaacacaac

SEQ ID NO: 869881 - RNA, 25 nt, Human
uucaggauuaaagaguuaggaagga

SEQ ID NO: 869882 - RNA, 20 nt, Human
uugauagaaaaacgucuuug

SEQ ID NO: 869883 - RNA, 22 nt, Human
uugcccagcagccggccgcggc

SEQ ID NO: 869884 - RNA, 21 nt, Human
aggaggcucgcgggggccagc

SEQ ID NO: 869885 - RNA, 21 nt, Human
ccagcgcacgcgggccuagcc

SEQ ID NO: 869886 - RNA, 22 nt, Human
ccccuuauaaggaagacagaaa

SEQ ID NO: 869887 - RNA, 21 nt, Human
ccgccacagcaaacgccaccu

SEQ ID NO: 869888 - RNA, 18 nt, Human
cgggggccagcgcggagg

SEQ ID NO: 869889 - RNA, 18 nt, Human
gccacagcaaacgccacc

SEQ ID NO: 869890 - RNA, 23 nt, Human
gccagggcaggaggcucgcgggg

SEQ ID NO: 869891 - RNA, 21 nt, Human
uuauauccagacugcauuacu

SEQ ID NO: 869892 - RNA, 18 nt, Human
uuuuuuuuuuuuuuucug

SEQ ID NO: 869893 - RNA, 22 nt, Human
uuuuuuuuuuuuuuucuguguu

SEQ ID NO: 869894 - RNA, 23 nt, Human
uuuuuuuuuuuuuuuuuuucugu

SEQ ID NO: 869895 - RNA, 24 nt, Human
uuuuuuuuuuuuuuuuuuuuucuu

SEQ ID NO: 869896 - RNA, 19 nt, Human
acuugaugcuccaaccucc

SEQ ID NO: 869897 - RNA, 20 nt, Human
agaaggcaacaccaagggga

SEQ ID NO: 869898 - RNA, 22 nt, Human
agaaugccucucauuuaggccu

SEQ ID NO: 869899 - RNA, 22 nt, Human
agacagguucaguaauguccuu

SEQ ID NO: 869900 - RNA, 22 nt, Human
agaugggggagugaaggggccg

SEQ ID NO: 869901 - RNA, 19 nt, Human
agggaaauguguggagaug

SEQ ID NO: 869902 - RNA, 23 nt, Human
agggaaauguguggagaugcaag

SEQ ID NO: 869903 - RNA, 19 nt, Human
agugaaggggccggcugga

SEQ ID NO: 869904 - RNA, 18 nt, Human
aucaauagcccugucccc

SEQ ID NO: 869905 - RNA, 18 nt, Human
augaaggaagccccaccu

SEQ ID NO: 869906 - RNA, 19 nt, Human
caagacagguucaguaaug

SEQ ID NO: 869907 - RNA, 18 nt, Human
ccagaguuucgaggcaca

SEQ ID NO: 869908 - RNA, 18 nt, Human
ccccaacaaaguaugaag

SEQ ID NO: 869909 - RNA, 22 nt, Human
ccggcuggaacuugaugcucca

SEQ ID NO: 869910 - RNA, 23 nt, Human
ccucugagguuccacagaaaagc

SEQ ID NO: 869911 - RNA, 20 nt, Human
ggaccuuaucaauagcccug

SEQ ID NO: 869912 - RNA, 21 nt, Human
uccagaguuucgaggcacagc

SEQ ID NO: 869913 - RNA, 22 nt, Human
uccagggcagccaaccagucag

SEQ ID NO: 869914 - RNA, 22 nt, Human
uggaacuugaugcuccaaccuc

SEQ ID NO: 869915 - RNA, 23 nt, Human
uggaacuugaugcuccaaccucc

SEQ ID NO: 869916 - RNA, 18 nt, Human
uggccucugagguuccac

SEQ ID NO: 869917 - RNA, 23 nt, Human
aaagcggagcccaagccgcgacc

SEQ ID NO: 869918 - RNA, 20 nt, Human
aagccgcgaccaacuugaaa

SEQ ID NO: 869919 - RNA, 21 nt, Human
aagccgcgaccaacuugaaau

SEQ ID NO: 869920 - RNA, 24 nt, Human
aggugauacaaauguggaaggagg

SEQ ID NO: 869921 - RNA, 21 nt, Human
caaagcggagcccaagccgcg

SEQ ID NO: 869922 - RNA, 18 nt, Human
cagacagauuauaugaac

SEQ ID NO: 869923 - RNA, 22 nt, Human
ccccuccccaaagcggagccca

SEQ ID NO: 869924 - RNA, 21 nt, Human
ccuccccaaagcggagcccaa

SEQ ID NO: 869925 - RNA, 28 nt, Human
cuccuuucucccuucauacaauugagaa

SEQ ID NO: 869926 - RNA, 20 nt, Human
cugcugccccuccccaaagc

SEQ ID NO: 869927 - RNA, 24 nt, Human
cugcugccccuccccaaagcggag

SEQ ID NO: 869928 - RNA, 24 nt, Human
gcucccaccccuaauuaucuccac

SEQ ID NO: 869929 - RNA, 20 nt, Human
guuacucucuguauccuaaa

SEQ ID NO: 869930 - RNA, 20 nt, Human
uaaaaguauaaaaccaggcu

SEQ ID NO: 869931 - RNA, 23 nt, Human
uaaaccugcugccccuccccaaa

SEQ ID NO: 869932 - RNA, 21 nt, Human
uaauagguacaguuacucucu

SEQ ID NO: 869933 - RNA, 24 nt, Human
uauaaaaccaggcuuacuccuuca

SEQ ID NO: 869934 - RNA, 22 nt, Human
uauccuaaagaaagacacgagg

SEQ ID NO: 869935 - RNA, 19 nt, Human
uccccaagauagcaaaggu

SEQ ID NO: 869936 - RNA, 24 nt, Human
ucucagcucuaacaaccccaguuc

SEQ ID NO: 869937 - RNA, 26 nt, Human
ugaagaaacaaauaauagguacagcg

SEQ ID NO: 869938 - RNA, 23 nt, Human
ugaauaaaccugcugccccuccc

SEQ ID NO: 869939 - RNA, 21 nt, Human
ugaccaaaugauuugcuuguc

SEQ ID NO: 869940 - RNA, 22 nt, Human
ugaccaaaugauuugcuugucu

SEQ ID NO: 869941 - RNA, 21 nt, Human
ugauacaaauguggaaggagg

SEQ ID NO: 869942 - RNA, 22 nt, Human
ugcucccaccccuaauuaucuc

SEQ ID NO: 869943 - RNA, 19 nt, Human
ugcugccccuccccaaagc

SEQ ID NO: 869944 - RNA, 24 nt, Human
uucaaacugcucccaccccuaauu

SEQ ID NO: 869945 - RNA, 19 nt, Human
uugacagauaaaaacacuu

SEQ ID NO: 869946 - RNA, 18 nt, Human
uuuuuuuuuuuuuuuuug

SEQ ID NO: 869947 - RNA, 22 nt, Human
uuuuuuuuuuuuuuuuugacag

SEQ ID NO: 869948 - RNA, 23 nt, Human
aaacaggaauagaauaaggggac

SEQ ID NO: 869949 - RNA, 23 nt, Human
aaagccagggcaggugguaggug

SEQ ID NO: 869950 - RNA, 19 nt, Human
aaaggaacagccagggagg

SEQ ID NO: 869951 - RNA, 25 nt, Human
aaaggggaaagcugguauuccgucg

SEQ ID NO: 869952 - RNA, 23 nt, Human
aacucuaaauuccucaccauccu

SEQ ID NO: 869953 - RNA, 19 nt, Human
aagcaucagaucugagcca

SEQ ID NO: 869954 - RNA, 19 nt, Human
aagccauggccccucccca

SEQ ID NO: 869955 - RNA, 22 nt, Human
acagcagaacccugaaagaccc

SEQ ID NO: 869956 - RNA, 21 nt, Human
acaggaggcugggacccagaa

SEQ ID NO: 869957 - RNA, 20 nt, Human
acaguucaucucuguaccug

SEQ ID NO: 869958 - RNA, 20 nt, Human
acccuuucucugugaccaaa

SEQ ID NO: 869959 - RNA, 25 nt, Human
agaagccugcacggaagccugaaag

SEQ ID NO: 869960 - RNA, 23 nt, Human
agaagguaaaugcuaaagccaag

SEQ ID NO: 869961 - RNA, 22 nt, Human
agacaggaaaggggucugcugg

SEQ ID NO: 869962 - RNA, 21 nt, Human
agagauuggauguggugggca

SEQ ID NO: 869963 - RNA, 21 nt, Human
agaggaaauauuuucaagcac

SEQ ID NO: 869964 - RNA, 19 nt, Human
agagggaggaaaguagggc

SEQ ID NO: 869965 - RNA, 18 nt, Human
agagugcaucagagaggc

SEQ ID NO: 869966 - RNA, 28 nt, Human
agauggaagagagugcaucagagaggcu

SEQ ID NO: 869967 - RNA, 22 nt, Human
agccccccaaggagggugggga

SEQ ID NO: 869968 - RNA, 20 nt, Human
agcuccucaccccugccccc

SEQ ID NO: 869969 - RNA, 20 nt, Human
aggaaaggggucugcuggau

SEQ ID NO: 869970 - RNA, 18 nt, Human
aggaagaugaacugucag

SEQ ID NO: 869971 - RNA, 19 nt, Human
aggaaggauguuggggcug

SEQ ID NO: 869972 - RNA, 21 nt, Human
aggacaccaugagucucacaa

SEQ ID NO: 869973 - RNA, 20 nt, Human
aggcaagugaugagaccaga

SEQ ID NO: 869974 - RNA, 21 nt, Human
aggcaagugaugagaccagag

SEQ ID NO: 869975 - RNA, 21 nt, Human
aggcagauauaucuccccagg

SEQ ID NO: 869976 - RNA, 22 nt, Human
aggcaggcaagugagcccagag

SEQ ID NO: 869977 - RNA, 23 nt, Human
aggcaggcaagugagcccagagu

SEQ ID NO: 869978 - RNA, 24 nt, Human
aggggaagaaagccagggcaggug

SEQ ID NO: 869979 - RNA, 18 nt, Human
agggguuuuuccaguggc

SEQ ID NO: 869980 - RNA, 20 nt, Human
aguggagaagccugcacgga

SEQ ID NO: 869981 - RNA, 19 nt, Human
auggaccugaauugucugu

SEQ ID NO: 869982 - RNA, 19 nt, Human
caagaaggcaagugaugag

SEQ ID NO: 869983 - RNA, 19 nt, Human
caagccauggccccucccc

SEQ ID NO: 869984 - RNA, 22 nt, Human
caaggugaaagcugaugacagu

SEQ ID NO: 869985 - RNA, 18 nt, Human
caaggugagggaccaagc

SEQ ID NO: 869986 - RNA, 21 nt, Human
cacagacccugcccugccugc

SEQ ID NO: 869987 - RNA, 23 nt, Human
cacagcagaacccugaaagaccc

SEQ ID NO: 869988 - RNA, 23 nt, Human
cacugcaucucuggauacaggag

SEQ ID NO: 869989 - RNA, 18 nt, Human
cacuuggacagaaaucac

SEQ ID NO: 869990 - RNA, 21 nt, Human
cagaaaccacuccuuuuccca

SEQ ID NO: 869991 - RNA, 20 nt, Human
cagaagacagcaaguaccau

SEQ ID NO: 869992 - RNA, 21 nt, Human
cagaagacagcaaguaccauc

SEQ ID NO: 869993 - RNA, 18 nt, Human
cagaaugcaagaaggcaa

SEQ ID NO: 869994 - RNA, 24 nt, Human
cagaaugcaagaaggcaagugaug

SEQ ID NO: 869995 - RNA, 18 nt, Human
cagcuccucaccccugcc

SEQ ID NO: 869996 - RNA, 18 nt, Human
caugccaagccauggccc

SEQ ID NO: 869997 - RNA, 24 nt, Human
ccacagcagaacccugaaagaccc

SEQ ID NO: 869998 - RNA, 20 nt, Human
ccacugcaucucuggauaca

SEQ ID NO: 869999 - RNA, 24 nt, Human
ccacugcaucucuggauacaggag

SEQ ID NO: 870000 - RNA, 26 nt, Human
ccacugcaucucuggauacaggaggc

SEQ ID NO: 870001 - RNA, 21 nt, Human
ccagagaggugagcagggaca

SEQ ID NO: 870002 - RNA, 18 nt, Human
ccagagagugacuugauc

SEQ ID NO: 870003 - RNA, 21 nt, Human
cccacagcagaacccugaaag

SEQ ID NO: 870004 - RNA, 22 nt, Human
cccauggccaccugcccagaga

SEQ ID NO: 870005 - RNA, 30 nt, Human
cccauggccaccugcccagagaacuugucu

SEQ ID NO: 870006 - RNA, 18 nt, Human
cccauggccaccugcccg

SEQ ID NO: 870007 - RNA, 21 nt, Human
ccccauggccaccugcccaga

SEQ ID NO: 870008 - RNA, 19 nt, Human
ccuaagauaguauucagcc

SEQ ID NO: 870009 - RNA, 24 nt, Human
ccuaagauaguauucagccagaaa

SEQ ID NO: 870010 - RNA, 22 nt, Human
ccugacucuccugaucuugccc

SEQ ID NO: 870011 - RNA, 19 nt, Human
ccugccugccccagcgggg

SEQ ID NO: 870012 - RNA, 22 nt, Human
ccuugggaagggcaagacccaa

SEQ ID NO: 870013 - RNA, 22 nt, Human
cgacuucugguccccaccuggc

SEQ ID NO: 870014 - RNA, 20 nt, Human
cucagggaaaggggaaagcu

SEQ ID NO: 870015 - RNA, 19 nt, Human
cuccucaccccugcccccu

SEQ ID NO: 870016 - RNA, 23 nt, Human
cucguucacacuaagaggagacc

SEQ ID NO: 870017 - RNA, 21 nt, Human
cucuuaagcuucacagacccu

SEQ ID NO: 870018 - RNA, 21 nt, Human
cucuuagagugacaaacagcu

SEQ ID NO: 870019 - RNA, 19 nt, Human
cugaucuugccccccacau

SEQ ID NO: 870020 - RNA, 21 nt, Human
cugccacccuccuuggugccc

SEQ ID NO: 870021 - RNA, 21 nt, Human
cugccacccuccuuggugccc

SEQ ID NO: 870022 - RNA, 23 nt, Human
cugcccugccugccccagcgggg

SEQ ID NO: 870023 - RNA, 19 nt, Human
cugugcaugggcaagugga

SEQ ID NO: 870024 - RNA, 25 nt, Human
cugugcccaagaccuggucugcccc

SEQ ID NO: 870025 - RNA, 18 nt, Human
cuugccccccacauccug

SEQ ID NO: 870026 - RNA, 22 nt, Human
gaaaaggagucccuggagcaga

SEQ ID NO: 870027 - RNA, 18 nt, Human
gaaaggaggaaucagagu

SEQ ID NO: 870028 - RNA, 19 nt, Human
gaagguaaaugcuaaagcc

SEQ ID NO: 870029 - RNA, 23 nt, Human
gacagaaaucaccguucaacagc

SEQ ID NO: 870030 - RNA, 19 nt, Human
gacccugcccugccugccc

SEQ ID NO: 870031 - RNA, 19 nt, Human
gaccuggucugccuucuua

SEQ ID NO: 870032 - RNA, 18 nt, Human
gagagauuggauguggug

SEQ ID NO: 870033 - RNA, 21 nt, Human
gagagccacugcaucucugga

SEQ ID NO: 870034 - RNA, 24 nt, Human
gagauggaagagagugcaucagag

SEQ ID NO: 870035 - RNA, 19 nt, Human
gagauuggauguggugggc

SEQ ID NO: 870036 - RNA, 18 nt, Human
gagcaggcucagcuccuc

SEQ ID NO: 870037 - RNA, 21 nt, Human
gagcccacagcagaacccuga

SEQ ID NO: 870038 - RNA, 20 nt, Human
gauguuggggcuggagguca

SEQ ID NO: 870039 - RNA, 22 nt, Human
gcaaacagugccaccuagaagc

SEQ ID NO: 870040 - RNA, 27 nt, Human
gcaauggagagccacugcaucucugga

SEQ ID NO: 870041 - RNA, 19 nt, Human
gccacaucaucaaggugag

SEQ ID NO: 870042 - RNA, 21 nt, Human
gcccccuucccauuaagggcc

SEQ ID NO: 870043 - RNA, 19 nt, Human
gccuuggggaaagagaugg

SEQ ID NO: 870044 - RNA, 19 nt, Human
gcugccaguauccccugcc

SEQ ID NO: 870045 - RNA, 22 nt, Human
ggaaaucugcacuuggacagaa

SEQ ID NO: 870046 - RNA, 25 nt, Human
ggagaagccugcacggaagccugaa

SEQ ID NO: 870047 - RNA, 23 nt, Human
ggagucccuggagcagaaaagug

SEQ ID NO: 870048 - RNA, 19 nt, Human
ggcagguuugcagaagaca

SEQ ID NO: 870049 - RNA, 19 nt, Human
ggccagggcuuggaugcuc

SEQ ID NO: 870050 - RNA, 22 nt, Human
ggcccaggggccugacucuccu

SEQ ID NO: 870051 - RNA, 24 nt, Human
gggaaagcugguauucuuggacgc

SEQ ID NO: 870052 - RNA, 25 nt, Human
gggaaagcugguauucuuggacguc

SEQ ID NO: 870053 - RNA, 21 nt, Human
guaggacaacuagccacagag

SEQ ID NO: 870054 - RNA, 20 nt, Human
guccccucuccuacucccag

SEQ ID NO: 870055 - RNA, 20 nt, Human
gugacaaacagcuucuccca

SEQ ID NO: 870056 - RNA, 21 nt, Human
guugagcacuugcaaggcacu

SEQ ID NO: 870057 - RNA, 20 nt, Human
uaaggcaaacagugccaccc

SEQ ID NO: 870058 - RNA, 25 nt, Human
uagccaaagcuccuuggaggaaguc

SEQ ID NO: 870059 - RNA, 20 nt, Human
uagccccacuucccacuccu

SEQ ID NO: 870060 - RNA, 24 nt, Human
uaggagaaaagggccuggcaaucu

SEQ ID NO: 870061 - RNA, 19 nt, Human
uagggccagcugucagccc

SEQ ID NO: 870062 - RNA, 20 nt, Human
ucaacucuaaauuccucacc

SEQ ID NO: 870063 - RNA, 24 nt, Human
ucacggagccuuggggaaagagau

SEQ ID NO: 870064 - RNA, 23 nt, Human
uccagaguugaggggaagaaagc

SEQ ID NO: 870065 - RNA, 25 nt, Human
ucccauuucuuuaaaaacaggcugc

SEQ ID NO: 870066 - RNA, 18 nt, Human
uccccauggccaccugcc

SEQ ID NO: 870067 - RNA, 20 nt, Human
uccucaccccugcccccuuc

SEQ ID NO: 870068 - RNA, 20 nt, Human
uccugaucuugccccccaca

SEQ ID NO: 870069 - RNA, 20 nt, Human
uccuugcccucaaggagcuu

SEQ ID NO: 870070 - RNA, 22 nt, Human
ucucugugaccaaaagaaagga

SEQ ID NO: 870071 - RNA, 19 nt, Human
ucugagccaagcugagccc

SEQ ID NO: 870072 - RNA, 20 nt, Human
ucugcacuuggacagaaauc

SEQ ID NO: 870073 - RNA, 23 nt, Human
ugaaaggaacagccagggaggua

SEQ ID NO: 870074 - RNA, 21 nt, Human
ugacagucacggagccuuggg

SEQ ID NO: 870075 - RNA, 21 nt, Human
ugacagucacggagccuuggg

SEQ ID NO: 870076 - RNA, 20 nt, Human
ugacuugaucaacuaugcaa

SEQ ID NO: 870077 - RNA, 19 nt, Human
ugagagauuggauguggug

SEQ ID NO: 870078 - RNA, 19 nt, Human
ugagccaagcugagccccc

SEQ ID NO: 870079 - RNA, 22 nt, Human
ugagggcagcagggagccaagg

SEQ ID NO: 870080 - RNA, 19 nt, Human
ugaucuugccccccacauc

SEQ ID NO: 870081 - RNA, 24 nt, Human
ugccacccuccuuggugcccucug

SEQ ID NO: 870082 - RNA, 19 nt, Human
ugccaccuagaagcgaagc

SEQ ID NO: 870083 - RNA, 19 nt, Human
ugcccagaucuaguaagac

SEQ ID NO: 870084 - RNA, 18 nt, Human
ugcccugccugccccagc

SEQ ID NO: 870085 - RNA, 23 nt, Human
ugcccugccugccccagcggggc

SEQ ID NO: 870086 - RNA, 26 nt, Human
ugccuucuuagaaggcagauauaucu

SEQ ID NO: 870087 - RNA, 23 nt, Human
uggauguggugggcagaaagaga

SEQ ID NO: 870088 - RNA, 23 nt, Human
uggcaauggagagccacugcauc

SEQ ID NO: 870089 - RNA, 19 nt, Human
uggggauggggcuccagag

SEQ ID NO: 870090 - RNA, 20 nt, Human
ugugaccaaaagaaaggagg

SEQ ID NO: 870091 - RNA, 22 nt, Human
uuggggaaagagauggaagaga

SEQ ID NO: 870092 - RNA, 25 nt, Human
uuugcagaagacagcaaguaccauc

SEQ ID NO: 870093 - RNA, 24 nt, Human
aaagugcugggauuacagguguga

SEQ ID NO: 870094 - RNA, 19 nt, Human
aaguagcugggacugcagg

SEQ ID NO: 870095 - RNA, 20 nt, Human
aaguagcugggacugcaggu

SEQ ID NO: 870096 - RNA, 18 nt, Human
aagugcugggauuacagg

SEQ ID NO: 870097 - RNA, 19 nt, Human
aagugcugggauuacaggu

SEQ ID NO: 870098 - RNA, 26 nt, Human
aagugcugggauuacaggugugagcc

SEQ ID NO: 870099 - RNA, 22 nt, Human
accuagagaggcaggcuaggga

SEQ ID NO: 870100 - RNA, 24 nt, Human
aggaaaccaaggcacagagaggug

SEQ ID NO: 870101 - RNA, 19 nt, Human
aggcaggcuagggagagcu

SEQ ID NO: 870102 - RNA, 25 nt, Human
aggcuggagugcaguggcgcuaucu

SEQ ID NO: 870103 - RNA, 20 nt, Human
agugcaguggcgcuaucucg

SEQ ID NO: 870104 - RNA, 23 nt, Human
agugcaguggcgcuaucucggcu

SEQ ID NO: 870105 - RNA, 24 nt, Human
agugcaguggcgcuaucucggcuc

SEQ ID NO: 870106 - RNA, 24 nt, Human
aucuugugauccaccugccucggc

SEQ ID NO: 870107 - RNA, 18 nt, Human
augggguuucaccauguu

SEQ ID NO: 870108 - RNA, 19 nt, Human
augggguuucaccauguua

SEQ ID NO: 870109 - RNA, 20 nt, Human
augggguuucaccauguuag

SEQ ID NO: 870110 - RNA, 24 nt, Human
augggguuucaccauguuagccag

SEQ ID NO: 870111 - RNA, 21 nt, Human
auucuccugccucagccuccc

SEQ ID NO: 870112 - RNA, 24 nt, Human
caaagugcugggauuacaggugug

SEQ ID NO: 870113 - RNA, 18 nt, Human
caccauguuagccaggau

SEQ ID NO: 870114 - RNA, 22 nt, Human
caccauguuagccaggaugguc

SEQ ID NO: 870115 - RNA, 24 nt, Human
caccauguuagccaggauggucuc

SEQ ID NO: 870116 - RNA, 23 nt, Human
caccugccucggccucccaaagu

SEQ ID NO: 870117 - RNA, 22 nt, Human
cacgccauucuccugccucagc

SEQ ID NO: 870118 - RNA, 19 nt, Human
cagcagccaagcccagcgc

SEQ ID NO: 870119 - RNA, 22 nt, Human
cagccuggcucuaggugcuggg

SEQ ID NO: 870120 - RNA, 21 nt, Human
caggggcuggacggucagcuu

SEQ ID NO: 870121 - RNA, 21 nt, Human
caggugcccaccaccacaccc

SEQ ID NO: 870122 - RNA, 21 nt, Human
caggugcccaccaccacaccc

SEQ ID NO: 870123 - RNA, 22 nt, Human
caggugcccaccaccacacccg

SEQ ID NO: 870124 - RNA, 24 nt, Human
caggugcccaccaccacacccggc

SEQ ID NO: 870125 - RNA, 21 nt, Human
ccaaagugcugggauuacagg

SEQ ID NO: 870126 - RNA, 21 nt, Human
ccaaagugcugggauuacagg

SEQ ID NO: 870127 - RNA, 24 nt, Human
ccaaagugcugggauuacaggugu

SEQ ID NO: 870128 - RNA, 19 nt, Human
ccaagcccagcgcaacuca

SEQ ID NO: 870129 - RNA, 22 nt, Human
cccaaguagcugggacugcagg

SEQ ID NO: 870130 - RNA, 23 nt, Human
cccaaguagcugggacugcaggu

SEQ ID NO: 870131 - RNA, 24 nt, Human
ccucccaguuucacgccauucucc

SEQ ID NO: 870132 - RNA, 19 nt, Human
ccugaucuugugauccacc

SEQ ID NO: 870133 - RNA, 23 nt, Human
ccugccucagccucccaaguagc

SEQ ID NO: 870134 - RNA, 24 nt, Human
ccugccucggccucccaaagugcu

SEQ ID NO: 870135 - RNA, 24 nt, Human
cgcucuguugcccaggcuggagug

SEQ ID NO: 870136 - RNA, 24 nt, Human
cggagucucgcucuguugcccagg

SEQ ID NO: 870137 - RNA, 23 nt, Human
cuaauuuuuuguauuuuuaguag

SEQ ID NO: 870138 - RNA, 24 nt, Human
cucagccucccaaguagcugggac

SEQ ID NO: 870139 - RNA, 22 nt, Human
cucccaguuucacgccauucuc

SEQ ID NO: 870140 - RNA, 24 nt, Human
cuccugaucuugugauccaccugc

SEQ ID NO: 870141 - RNA, 21 nt, Human
cucgcucuguugcccaggcug

SEQ ID NO: 870142 - RNA, 24 nt, Human
cucgcucuguugcccaggcuggag

SEQ ID NO: 870143 - RNA, 21 nt, Human
cucuaggugcugggcucuaga

SEQ ID NO: 870144 - RNA, 23 nt, Human
cugccucagccucccaaguagcu

SEQ ID NO: 870145 - RNA, 19 nt, Human
cuugugauccaccugccuc

SEQ ID NO: 870146 - RNA, 18 nt, Human
gaaaaaccuagagaggca

SEQ ID NO: 870147 - RNA, 18 nt, Human
gagaugggguuucaccau

SEQ ID NO: 870148 - RNA, 24 nt, Human
gagaugggguuucaccauguuagc

SEQ ID NO: 870149 - RNA, 22 nt, Human
gaucuugugauccaccugccuc

SEQ ID NO: 870150 - RNA, 24 nt, Human
gaucuugugauccaccugccucgg

SEQ ID NO: 870151 - RNA, 18 nt, Human
gauuacaggugugagcca

SEQ ID NO: 870152 - RNA, 19 nt, Human
gauuacaggugugagccac

SEQ ID NO: 870153 - RNA, 22 nt, Human
gauuacaggugugagccacugc

SEQ ID NO: 870154 - RNA, 18 nt, Human
gcaagcucugccucccag

SEQ ID NO: 870155 - RNA, 19 nt, Human
gcccaggcuggagugcagu

SEQ ID NO: 870156 - RNA, 23 nt, Human
gcgcaacucagagggagcuaggg

SEQ ID NO: 870157 - RNA, 25 nt, Human
gcucuguugcccaggcuggagugca

SEQ ID NO: 870158 - RNA, 21 nt, Human
gcuggagugcaguggcgcuag

SEQ ID NO: 870159 - RNA, 23 nt, Human
ggagucucgcucuguugcccagg

SEQ ID NO: 870160 - RNA, 21 nt, Human
gggcagccuggcucuaggugc

SEQ ID NO: 870161 - RNA, 22 nt, Human
gggguuucaccauguuagccag

SEQ ID NO: 870162 - RNA, 24 nt, Human
gguuucaccauguuagccaggaug

SEQ ID NO: 870163 - RNA, 23 nt, Human
guagagaugggguuucaccaugu

SEQ ID NO: 870164 - RNA, 24 nt, Human
gugauccaccugccucggccuccc

SEQ ID NO: 870165 - RNA, 21 nt, Human
gugcagcagccaagcccagcg

SEQ ID NO: 870166 - RNA, 24 nt, Human
uaauuuuuuguauuuuuaguagag

SEQ ID NO: 870167 - RNA, 25 nt, Human
uaauuuuuuguauuuuuaguagaga

SEQ ID NO: 870168 - RNA, 19 nt, Human
uacaggugugagccacugc

SEQ ID NO: 870169 - RNA, 23 nt, Human
uacaggugugagccacugcgccc

SEQ ID NO: 870170 - RNA, 22 nt, Human
uagagaugggguuucaccaugu

SEQ ID NO: 870171 - RNA, 24 nt, Human
uaguagagaugggguuucaccaug

SEQ ID NO: 870172 - RNA, 26 nt, Human
uaguagagaugggguuucaccauguu

SEQ ID NO: 870173 - RNA, 23 nt, Human
uauuuauuuuugagacggagucu

SEQ ID NO: 870174 - RNA, 24 nt, Human
ucaccauguuagccaggauggucu

SEQ ID NO: 870175 - RNA, 18 nt, Human
ucacugcaagcucugccu

SEQ ID NO: 870176 - RNA, 18 nt, Human
ucacugcaagcucugccu

SEQ ID NO: 870177 - RNA, 19 nt, Human
ucacugcaagcucugccuc

SEQ ID NO: 870178 - RNA, 23 nt, Human
ucacugcaagcucugccucccag

SEQ ID NO: 870179 - RNA, 20 nt, Human
ucagccucccaaguagcugg

SEQ ID NO: 870180 - RNA, 23 nt, Human
ucccaaagugcugggauuacagg

SEQ ID NO: 870181 - RNA, 23 nt, Human
ucccaaguagcugggacugcagg

SEQ ID NO: 870182 - RNA, 24 nt, Human
ucccaguuucacgccauucuccug

SEQ ID NO: 870183 - RNA, 24 nt, Human
ucgcucuguugcccaggcuggagu

SEQ ID NO: 870184 - RNA, 18 nt, Human
ucggccucccaaagugcu

SEQ ID NO: 870185 - RNA, 26 nt, Human
ucuccugccucagccucccaaguagc

SEQ ID NO: 870186 - RNA, 19 nt, Human
ucucgcucuguugcccagg

SEQ ID NO: 870187 - RNA, 22 nt, Human
ucucgcucuguugcccaggcug

SEQ ID NO: 870188 - RNA, 23 nt, Human
ucucgcucuguugcccaggcugg

SEQ ID NO: 870189 - RNA, 24 nt, Human
ucucgcucuguugcccaggcugga

SEQ ID NO: 870190 - RNA, 26 nt, Human
ucucgcucuguugcccaggcuggagu

SEQ ID NO: 870191 - RNA, 27 nt, Human
ucucgcucuguugcccaggcuggagug

SEQ ID NO: 870192 - RNA, 23 nt, Human
ucugggcagccuggcucuaggug

SEQ ID NO: 870193 - RNA, 18 nt, Human
ucuguugcccaggcugga

SEQ ID NO: 870194 - RNA, 24 nt, Human
ucuguugcccaggcuggagugcag

SEQ ID NO: 870195 - RNA, 22 nt, Human
ugagacggagucucgcucuguu

SEQ ID NO: 870196 - RNA, 21 nt, Human
ugagcucccugcacuaggaac

SEQ ID NO: 870197 - RNA, 22 nt, Human
ugcaguggcgcuaucucggcuc

SEQ ID NO: 870198 - RNA, 19 nt, Human
ugcccaccaccacacccgg

SEQ ID NO: 870199 - RNA, 18 nt, Human
ugcccaggcuggagugca

SEQ ID NO: 870200 - RNA, 21 nt, Human
ugcccaggcuggagugcagug

SEQ ID NO: 870201 - RNA, 22 nt, Human
ugcccaggcuggagugcagugg

SEQ ID NO: 870202 - RNA, 24 nt, Human
ugcccaggcuggagugcaguggcg

SEQ ID NO: 870203 - RNA, 24 nt, Human
ugccucagccucccaaguagcugg

SEQ ID NO: 870204 - RNA, 21 nt, Human
ugccucggccucccaaagugc

SEQ ID NO: 870205 - RNA, 24 nt, Human
ugccucggccucccaaagugcugg

SEQ ID NO: 870206 - RNA, 24 nt, Human
ugcugggauuacaggugugagcca

SEQ ID NO: 870207 - RNA, 28 nt, Human
uggagugcaguggcgcuauccuagcacg

SEQ ID NO: 870208 - RNA, 23 nt, Human
uggagugcaguggcgcuaucucg

SEQ ID NO: 870209 - RNA, 24 nt, Human
uggagugcaguggcgcuaucucgg

SEQ ID NO: 870210 - RNA, 23 nt, Human
uggcucuaggugcugggcucuag

SEQ ID NO: 870211 - RNA, 21 nt, Human
ugggacugcaggugcccacca

SEQ ID NO: 870212 - RNA, 18 nt, Human
ugggauuacaggugugag

SEQ ID NO: 870213 - RNA, 19 nt, Human
ugggauuacaggugugagc

SEQ ID NO: 870214 - RNA, 21 nt, Human
ugggauuacaggugugagcca

SEQ ID NO: 870215 - RNA, 22 nt, Human
ugggauuacaggugugagccac

SEQ ID NO: 870216 - RNA, 22 nt, Human
ugggauuacaggugugagccac

SEQ ID NO: 870217 - RNA, 24 nt, Human
ugggauuacaggugugagccacug

SEQ ID NO: 870218 - RNA, 24 nt, Human
ugggguuucaccauguuagccagg

SEQ ID NO: 870219 - RNA, 18 nt, Human
uggucaggggcuggacgg

SEQ ID NO: 870220 - RNA, 19 nt, Human
uggucaggggcuggacggu

SEQ ID NO: 870221 - RNA, 18 nt, Human
uuaguagagaugggguuu

SEQ ID NO: 870222 - RNA, 22 nt, Human
uuaguagagaugggguuucacc

SEQ ID NO: 870223 - RNA, 24 nt, Human
uuaguagagaugggguuucaccau

SEQ ID NO: 870224 - RNA, 24 nt, Human
uugcccaggcuggagugcaguggc

SEQ ID NO: 870225 - RNA, 23 nt, Human
uuguauuuuuaguagagaugggg

SEQ ID NO: 870226 - RNA, 19 nt, Human
uuucaccauguuagccagg

SEQ ID NO: 870227 - RNA, 20 nt, Human
uuucaccauguuagccagga

SEQ ID NO: 870228 - RNA, 24 nt, Human
uuuuuaguagagaugggguuucac

SEQ ID NO: 870229 - RNA, 21 nt, Human
uuuuuguauuuuuaguagaga

SEQ ID NO: 870230 - RNA, 24 nt, Human
uuuuuuguauuuuuaguagagaug

SEQ ID NO: 870231 - RNA, 23 nt, Human
aaagauggguaguaaggcuugag

SEQ ID NO: 870232 - RNA, 19 nt, Human
aacugacuuccccucuucc

SEQ ID NO: 870233 - RNA, 20 nt, Human
aagugagaacaugggauauu

SEQ ID NO: 870234 - RNA, 25 nt, Human
aauacccauucugauaauacccauu

SEQ ID NO: 870235 - RNA, 18 nt, Human
aauuucuucuugguucaa

SEQ ID NO: 870236 - RNA, 23 nt, Human
aauuuuggaacucauuauugguc

SEQ ID NO: 870237 - RNA, 22 nt, Human
acauuugcaaaauuucuuugca

SEQ ID NO: 870238 - RNA, 21 nt, Human
accaaauuuucuuuaucuggu

SEQ ID NO: 870239 - RNA, 18 nt, Human
acuucauugcuugucagu

SEQ ID NO: 870240 - RNA, 18 nt, Human
acuuccccucuuccuauu

SEQ ID NO: 870241 - RNA, 20 nt, Human
agaaaucuuucacuuaccuu

SEQ ID NO: 870242 - RNA, 20 nt, Human
agaauggcauuuccuggguu

SEQ ID NO: 870243 - RNA, 21 nt, Human
aguuugguguacaguuaauuu

SEQ ID NO: 870244 - RNA, 23 nt, Human
aucauggucaugugguuuuuguu

SEQ ID NO: 870245 - RNA, 19 nt, Human
augcaauuucuucuugguu

SEQ ID NO: 870246 - RNA, 21 nt, Human
augcuggguugaaugcuaugu

SEQ ID NO: 870247 - RNA, 21 nt, Human
auggcauuuccuggguuuuuc

SEQ ID NO: 870248 - RNA, 21 nt, Human
auggcugcauaguauuccaug

SEQ ID NO: 870249 - RNA, 18 nt, Human
cacauguauguauucuuu

SEQ ID NO: 870250 - RNA, 21 nt, Human
cagccugaaguuuucuuuuuu

SEQ ID NO: 870251 - RNA, 21 nt, Human
ccaaccuccacccauaagccc

SEQ ID NO: 870252 - RNA, 18 nt, Human
cccacuuauaagugagaa

SEQ ID NO: 870253 - RNA, 20 nt, Human
cucaaggggaaugcuuccau

SEQ ID NO: 870254 - RNA, 20 nt, Human
cucauuauuggucuguucag

SEQ ID NO: 870255 - RNA, 22 nt, Human
cugguuccaaauaaauuucaga

SEQ ID NO: 870256 - RNA, 20 nt, Human
cuugguucaaucuugggggg

SEQ ID NO: 870257 - RNA, 21 nt, Human
gaucauggucaugugguuuuu

SEQ ID NO: 870258 - RNA, 21 nt, Human
gauucuggauuagaucuuugu

SEQ ID NO: 870259 - RNA, 24 nt, Human
gcccaguuuuuaaugggguuguuu

SEQ ID NO: 870260 - RNA, 22 nt, Human
gcugcagugcuuuccacaaugg

SEQ ID NO: 870261 - RNA, 20 nt, Human
ggcuucaacuauaaaucugu

SEQ ID NO: 870262 - RNA, 19 nt, Human
gggcagagacaacagguuu

SEQ ID NO: 870263 - RNA, 18 nt, Human
guaucucauuguggcuuu

SEQ ID NO: 870264 - RNA, 20 nt, Human
guccagaguuuuguuugaua

SEQ ID NO: 870265 - RNA, 21 nt, Human
guuuuaguugcuguagccuug

SEQ ID NO: 870266 - RNA, 20 nt, Human
uagaaaucuuucacuuaccu

SEQ ID NO: 870267 - RNA, 23 nt, Human
uagcaucuauguuuugauuuuuu

SEQ ID NO: 870268 - RNA, 29 nt, Human
uaggagccuuugggcagagacaacagguu

SEQ ID NO: 870269 - RNA, 24 nt, Human
uaggauaagagccucagcuccauc

SEQ ID NO: 870270 - RNA, 22 nt, Human
uaggucccacuugucaauuuuu

SEQ ID NO: 870271 - RNA, 20 nt, Human
uaguuugugugcauacaggu

SEQ ID NO: 870272 - RNA, 24 nt, Human
uauaaguauuugcuuuucucugca

SEQ ID NO: 870273 - RNA, 21 nt, Human
uaucagaucuaggagccuuug

SEQ ID NO: 870274 - RNA, 24 nt, Human
uauugagaauagugcugcaaugaa

SEQ ID NO: 870275 - RNA, 24 nt, Human
ucaaggggaaugcuuccagcuuuu

SEQ ID NO: 870276 - RNA, 19 nt, Human
ucacuuaggauaagagccu

SEQ ID NO: 870277 - RNA, 20 nt, Human
ucagaugcaguuuguaaaca

SEQ ID NO: 870278 - RNA, 24 nt, Human
uccacaauggcugaauuaauuuac

SEQ ID NO: 870279 - RNA, 26 nt, Human
uccagaguuuuguuugauagauuuuu

SEQ ID NO: 870280 - RNA, 22 nt, Human
ucccaaccuccacccauaagcc

SEQ ID NO: 870281 - RNA, 22 nt, Human
ucucuaaugaguuauuagaaaa

SEQ ID NO: 870282 - RNA, 22 nt, Human
ucucuucugggcuuuuucauca

SEQ ID NO: 870283 - RNA, 21 nt, Human
ucugauaauacccauucagac

SEQ ID NO: 870284 - RNA, 19 nt, Human
ucuucccaaccuccacccu

SEQ ID NO: 870285 - RNA, 22 nt, Human
ucuuugcuauugagaauagugc

SEQ ID NO: 870286 - RNA, 21 nt, Human
ucuuuuuuuauaccaguacca

SEQ ID NO: 870287 - RNA, 19 nt, Human
ugacuccuuugcuuuccuc

SEQ ID NO: 870288 - RNA, 24 nt, Human
ugagaugguaucucauuguggcuu

SEQ ID NO: 870289 - RNA, 20 nt, Human
ugauuugguucauagcuugg

SEQ ID NO: 870290 - RNA, 22 nt, Human
ugcuuuccucuuccuucucuuc

SEQ ID NO: 870291 - RNA, 19 nt, Human
ugcuuuucucugcagccuc

SEQ ID NO: 870292 - RNA, 18 nt, Human
ugggucaacugcauguug

SEQ ID NO: 870293 - RNA, 23 nt, Human
uguaaacauuuucucccauucug

SEQ ID NO: 870294 - RNA, 18 nt, Human
uguaaucaauguuuagcu

SEQ ID NO: 870295 - RNA, 23 nt, Human
ugugcagauggauuugguuuacu

SEQ ID NO: 870296 - RNA, 21 nt, Human
ugugugcauacagguguuuau

SEQ ID NO: 870297 - RNA, 23 nt, Human
uguugaauuuuauuaaaaaccuu

SEQ ID NO: 870298 - RNA, 18 nt, Human
uguugaggaucacauggu

SEQ ID NO: 870299 - RNA, 24 nt, Human
uuauaagugagaacaugggauauu

SEQ ID NO: 870300 - RNA, 25 nt, Human
uucuguagucugcaaauagcuucuu

SEQ ID NO: 870301 - RNA, 23 nt, Human
uucuugguucaaucuuggggggu

SEQ ID NO: 870302 - RNA, 23 nt, Human
uugcccaguuuuuaaugggguug

SEQ ID NO: 870303 - RNA, 24 nt, Human
uugcuuuccucuuccuucucuucu

SEQ ID NO: 870304 - RNA, 23 nt, Human
uuguaguaugguuuaaaguuggg

SEQ ID NO: 870305 - RNA, 18 nt, Human
uuuaacaauacugauucu

SEQ ID NO: 870306 - RNA, 24 nt, Human
uuuccacaauggcugaauuaauuu

SEQ ID NO: 870307 - RNA, 23 nt, Human
uuugaagacuuuuccacacauuu

SEQ ID NO: 870308 - RNA, 20 nt, Human
uuugcaaaauuucuuugcag

SEQ ID NO: 870309 - RNA, 25 nt, Human
uuugcaaaauuucuuugcaguaugg

SEQ ID NO: 870310 - RNA, 20 nt, Human
uuugguauuagaaugaugcu

SEQ ID NO: 870311 - RNA, 19 nt, Human
uuuguaaacauuuucuccc

SEQ ID NO: 870312 - RNA, 18 nt, Human
uuuguugcauuuguaguu

SEQ ID NO: 870313 - RNA, 20 nt, Human
uuuugcuuuuuuucauguuu

SEQ ID NO: 870314 - RNA, 23 nt, Human
uuuuuguuuuuguugcaauugcu

SEQ ID NO: 870315 - RNA, 18 nt, Human
agaguccuuccagaaccu

SEQ ID NO: 870316 - RNA, 19 nt, Human
aggcaccacaacgccgagc

SEQ ID NO: 870317 - RNA, 21 nt, Human
agggcacacaagugucaaggg

SEQ ID NO: 870318 - RNA, 25 nt, Human
agggcugugaggaagauggccagua

SEQ ID NO: 870319 - RNA, 19 nt, Human
cagaaucaacccacacuaa

SEQ ID NO: 870320 - RNA, 21 nt, Human
cagaguccuuccagaaccucc

SEQ ID NO: 870321 - RNA, 20 nt, Human
cagcuguaaucaacucagca

SEQ ID NO: 870322 - RNA, 23 nt, Human
ccacaacgccgagccacgguaag

SEQ ID NO: 870323 - RNA, 23 nt, Human
ccagaguccuuccagaaccuccu

SEQ ID NO: 870324 - RNA, 19 nt, Human
ccuacucaggugcuuggca

SEQ ID NO: 870325 - RNA, 21 nt, Human
ccucaggcaccacaacgccga

SEQ ID NO: 870326 - RNA, 21 nt, Human
cuccgcacuuccgagguugcc

SEQ ID NO: 870327 - RNA, 20 nt, Human
cuuaaaggacagaaaauguc

SEQ ID NO: 870328 - RNA, 18 nt, Human
gaaccuccugauucgcgc

SEQ ID NO: 870329 - RNA, 21 nt, Human
uacucaggugcuuggcagagc

SEQ ID NO: 870330 - RNA, 20 nt, Human
uacuguauuggcccagcugu

SEQ ID NO: 870331 - RNA, 19 nt, Human
ucccagggcacacaagugu

SEQ ID NO: 870332 - RNA, 24 nt, Human
ucguugcuuuaaauuguugcuuug

SEQ ID NO: 870333 - RNA, 21 nt, Human
ugagggcugugaggaagaugg

SEQ ID NO: 870334 - RNA, 23 nt, Human
uggcccagcuguaaucaacucag

SEQ ID NO: 870335 - RNA, 22 nt, Human
uggccggcugucccucaggcac

SEQ ID NO: 870336 - RNA, 22 nt, Human
uggucuuauuugugcccguuga

SEQ ID NO: 870337 - RNA, 21 nt, Human
ugucaagggccuacucaggug

SEQ ID NO: 870338 - RNA, 19 nt, Human
uuccagaaucaacccacac

SEQ ID NO: 870339 - RNA, 22 nt, Human
uuccagaaucaacccacacuaa

SEQ ID NO: 870340 - RNA, 24 nt, Human
uugcuuuaaauuguugcuuuguuc

SEQ ID NO: 870341 - RNA, 20 nt, Human
uuggucuuauuugugcccgu

SEQ ID NO: 870342 - RNA, 18 nt, Human
uuuuuuuuuuuuaagggc

SEQ ID NO: 870343 - RNA, 19 nt, Human
uuuuuuuuuuuuaagggcu

SEQ ID NO: 870344 - RNA, 24 nt, Human
uuuuuuuuuuuuuuuuuuuaaggg

SEQ ID NO: 870345 - RNA, 21 nt, Human
aaaaaaaccaaagcccaagga

SEQ ID NO: 870346 - RNA, 20 nt, Human
aaagcagccaggcaggcgug

SEQ ID NO: 870347 - RNA, 25 nt, Human
aaaguaacgaagaaaaacuuaaaua

SEQ ID NO: 870348 - RNA, 22 nt, Human
aaccacauaccccaauuuaaca

SEQ ID NO: 870349 - RNA, 26 nt, Human
aaccacauaccccaauuuaacaccuu

SEQ ID NO: 870350 - RNA, 24 nt, Human
aagaaacucauuuauagcacaggc

SEQ ID NO: 870351 - RNA, 23 nt, Human
aagagaggaaggaaacagcagga

SEQ ID NO: 870352 - RNA, 19 nt, Human
aagcagcccuaggaagccc

SEQ ID NO: 870353 - RNA, 23 nt, Human
aagcagcccuaggaagcccaggu

SEQ ID NO: 870354 - RNA, 19 nt, Human
aagcaguuagugaauacua

SEQ ID NO: 870355 - RNA, 21 nt, Human
aagucggcaguuauuuaaaau

SEQ ID NO: 870356 - RNA, 19 nt, Human
aauuuauuacaaaacuuuu

SEQ ID NO: 870357 - RNA, 19 nt, Human
acaugcugccaagucuggc

SEQ ID NO: 870358 - RNA, 18 nt, Human
accuggauccuagggcuc

SEQ ID NO: 870359 - RNA, 23 nt, Human
agagaggaaggaaacagcaggag

SEQ ID NO: 870360 - RNA, 21 nt, Human
agaggaaggaaacagcaggag

SEQ ID NO: 870361 - RNA, 18 nt, Human
agaggaccuggauccuag

SEQ ID NO: 870362 - RNA, 20 nt, Human
agaggagagggagugcagag

SEQ ID NO: 870363 - RNA, 19 nt, Human
agaugauuacagaucucug

SEQ ID NO: 870364 - RNA, 22 nt, Human
agcugcugcugcccaccaaagc

SEQ ID NO: 870365 - RNA, 18 nt, Human
aggaaggaaacagcagga

SEQ ID NO: 870366 - RNA, 21 nt, Human
aggaaggaaacagcaggagaa

SEQ ID NO: 870367 - RNA, 24 nt, Human
aggaagugggcugacgacuggaga

SEQ ID NO: 870368 - RNA, 21 nt, Human
aggcgugggcauuguacaacc

SEQ ID NO: 870369 - RNA, 21 nt, Human
caaaacgguuucugaauauga

SEQ ID NO: 870370 - RNA, 21 nt, Human
caaagaaucauuuaagacauc

SEQ ID NO: 870371 - RNA, 18 nt, Human
cacaugaagcagcaaagu

SEQ ID NO: 870372 - RNA, 20 nt, Human
cagaaaagguacacaaagaa

SEQ ID NO: 870373 - RNA, 23 nt, Human
cagaucucugguuucagaaguuc

SEQ ID NO: 870374 - RNA, 19 nt, Human
cagcaaaguaacgaagaaa

SEQ ID NO: 870375 - RNA, 22 nt, Human
cagcaaaguaacgaagaaaaac

SEQ ID NO: 870376 - RNA, 26 nt, Human
cagcaaaguaacgaagaaaaacuuaa

SEQ ID NO: 870377 - RNA, 20 nt, Human
cagcacacggcaaggcugag

SEQ ID NO: 870378 - RNA, 21 nt, Human
cagccccagcuucgaaaaucc

SEQ ID NO: 870379 - RNA, 25 nt, Human
cagcggccucuugccagccccagcu

SEQ ID NO: 870380 - RNA, 18 nt, Human
cagcugccaaugggcuga

SEQ ID NO: 870381 - RNA, 22 nt, Human
cauuguacaaccagccucaggc

SEQ ID NO: 870382 - RNA, 20 nt, Human
cauuuaagacauccugguua

SEQ ID NO: 870383 - RNA, 24 nt, Human
ccaaauacuuaauugcuaaaggaa

SEQ ID NO: 870384 - RNA, 22 nt, Human
ccaagagaggaaggaaacagca

SEQ ID NO: 870385 - RNA, 22 nt, Human
ccagcggccucuugccagcccc

SEQ ID NO: 870386 - RNA, 19 nt, Human
ccagugugucugcugguga

SEQ ID NO: 870387 - RNA, 30 nt, Human
cccaggugcccacaucgaaagcacucccaa

SEQ ID NO: 870388 - RNA, 20 nt, Human
ccccagcuucgaaaauccgc

SEQ ID NO: 870389 - RNA, 24 nt, Human
cccuuauucagcuaccaaauacuu

SEQ ID NO: 870390 - RNA, 19 nt, Human
ccggcucgcugccgccgcc

SEQ ID NO: 870391 - RNA, 19 nt, Human
ccguacccacucaguccaa

SEQ ID NO: 870392 - RNA, 21 nt, Human
cuaaacccagauaagucaucu

SEQ ID NO: 870393 - RNA, 19 nt, Human
cugccgccgccucgcgcug

SEQ ID NO: 870394 - RNA, 20 nt, Human
cugccgccgccucgcgcugu

SEQ ID NO: 870395 - RNA, 19 nt, Human
cuugggcuggcuguguuuu

SEQ ID NO: 870396 - RNA, 18 nt, Human
cuuugagggguccaugcc

SEQ ID NO: 870397 - RNA, 18 nt, Human
gaaagcagccaggcaggc

SEQ ID NO: 870398 - RNA, 23 nt, Human
gaagcagcccuaggaagcccagg

SEQ ID NO: 870399 - RNA, 24 nt, Human
gagcgugucugcguugucagccaa

SEQ ID NO: 870400 - RNA, 18 nt, Human
gcaaaguaacgaagaaaa

SEQ ID NO: 870401 - RNA, 18 nt, Human
gcugccaagucuggcccc

SEQ ID NO: 870402 - RNA, 25 nt, Human
ggaaacagcaggagaagcugucagc

SEQ ID NO: 870403 - RNA, 18 nt, Human
ggaaaguacacaugaagc

SEQ ID NO: 870404 - RNA, 18 nt, Human
ggcauuguacaaccagcc

SEQ ID NO: 870405 - RNA, 23 nt, Human
ggccccugaagaggagagggagu

SEQ ID NO: 870406 - RNA, 19 nt, Human
gggcgucaccaugaaggag

SEQ ID NO: 870407 - RNA, 22 nt, Human
gguaggaaaguacacaugaagc

SEQ ID NO: 870408 - RNA, 19 nt, Human
gugcuuucuccacccucuc

SEQ ID NO: 870409 - RNA, 21 nt, Human
gugcuuucuccacccucuccu

SEQ ID NO: 870410 - RNA, 24 nt, Human
uaagugugaagcccaguauauguc

SEQ ID NO: 870411 - RNA, 26 nt, Human
uaauugcuaaaggaauuacucccagc

SEQ ID NO: 870412 - RNA, 20 nt, Human
uacaaccagccucaggccuc

SEQ ID NO: 870413 - RNA, 23 nt, Human
uacacaugaagcagcaaaguaac

SEQ ID NO: 870414 - RNA, 27 nt, Human
uacuagaaaaaaaccaaagcccaagga

SEQ ID NO: 870415 - RNA, 21 nt, Human
uacuggcaagaagagaugugg

SEQ ID NO: 870416 - RNA, 18 nt, Human
uagaaaaaaaccaaagcc

SEQ ID NO: 870417 - RNA, 20 nt, Human
uagaaaaaaaccaaagccca

SEQ ID NO: 870418 - RNA, 22 nt, Human
uagaaaaaaaccaaagcccaag

SEQ ID NO: 870419 - RNA, 22 nt, Human
uagcacaggcaccccaggccaa

SEQ ID NO: 870420 - RNA, 23 nt, Human
uaggaagacuaaagcuauggaca

SEQ ID NO: 870421 - RNA, 19 nt, Human
uaguauaaagcuuccaacc

SEQ ID NO: 870422 - RNA, 26 nt, Human
uagugaauacuauugaauccuaaacc

SEQ ID NO: 870423 - RNA, 20 nt, Human
uauagcacaggcaccccagg

SEQ ID NO: 870424 - RNA, 20 nt, Human
uauuacaaauuugguuuucc

SEQ ID NO: 870425 - RNA, 18 nt, Human
ucaaaccacauaccccaa

SEQ ID NO: 870426 - RNA, 19 nt, Human
ucacgcaggugucgggcgg

SEQ ID NO: 870427 - RNA, 21 nt, Human
ucagaaaacuuccucuugggg

SEQ ID NO: 870428 - RNA, 21 nt, Human
ucagcuugccauucaugagcu

SEQ ID NO: 870429 - RNA, 21 nt, Human
ucauuuaagacauccugguua

SEQ ID NO: 870430 - RNA, 18 nt, Human
uccaagagaggaaggaaa

SEQ ID NO: 870431 - RNA, 23 nt, Human
uccaugcccagugugucugcugg

SEQ ID NO: 870432 - RNA, 19 nt, Human
uccgaaagcauccuuuaag

SEQ ID NO: 870433 - RNA, 18 nt, Human
ucgcugccgccgccucgc

SEQ ID NO: 870434 - RNA, 20 nt, Human
ucgcugccgccgccucgcgc

SEQ ID NO: 870435 - RNA, 18 nt, Human
ucuuucguuuuaagaaca

SEQ ID NO: 870436 - RNA, 18 nt, Human
ugaaagaaccacucagaa

SEQ ID NO: 870437 - RNA, 21 nt, Human
ugaaagaaccacucagaagca

SEQ ID NO: 870438 - RNA, 25 nt, Human
ugaaagaaccacucagaagcagccc

SEQ ID NO: 870439 - RNA, 21 nt, Human
ugaagcagcaaaguaacgaag

SEQ ID NO: 870440 - RNA, 23 nt, Human
ugaagcagcaaaguaacgaagaa

SEQ ID NO: 870441 - RNA, 19 nt, Human
ugaaggagcccauuuagua

SEQ ID NO: 870442 - RNA, 18 nt, Human
ugacacaaaauacugaga

SEQ ID NO: 870443 - RNA, 18 nt, Human
ugacacaaaauacugaga

SEQ ID NO: 870444 - RNA, 18 nt, Human
ugacccaggacucagcag

SEQ ID NO: 870445 - RNA, 21 nt, Human
ugacggggcgucaccaugaag

SEQ ID NO: 870446 - RNA, 21 nt, Human
ugaugagaagcagcacacggc

SEQ ID NO: 870447 - RNA, 26 nt, Human
ugccaaugggcugaguggcuggccgu

SEQ ID NO: 870448 - RNA, 19 nt, Human
ugcuaaaggaauuacuccc

SEQ ID NO: 870449 - RNA, 24 nt, Human
ugcuuucuccacccucuccuccca

SEQ ID NO: 870450 - RNA, 22 nt, Human
ugggcuggcuguguuuuucaug

SEQ ID NO: 870451 - RNA, 23 nt, Human
ugggugugccugcuuugaggggu

SEQ ID NO: 870452 - RNA, 21 nt, Human
ugguggugguggcaaagcaug

SEQ ID NO: 870453 - RNA, 23 nt, Human
ugugaagaaacucauuuauagca

SEQ ID NO: 870454 - RNA, 21 nt, Human
ugugccugcuuugaggggucc

SEQ ID NO: 870455 - RNA, 22 nt, Human
uguuuugggugugccugcuuug

SEQ ID NO: 870456 - RNA, 23 nt, Human
uuagugaauacuauugaauccua

SEQ ID NO: 870457 - RNA, 18 nt, Human
uucaugagcugcugcugc

SEQ ID NO: 870458 - RNA, 18 nt, Human
uucucagugacacaaaau

SEQ ID NO: 870459 - RNA, 22 nt, Human
uucuugauugugguugacgggg

SEQ ID NO: 870460 - RNA, 22 nt, Human
uugguggugguggcaaagcaug

SEQ ID NO: 870461 - RNA, 24 nt, Human
uuuaucaaucaaaccacauacccc

SEQ ID NO: 870462 - RNA, 19 nt, Human
uuucuccacccucuccucc

SEQ ID NO: 870463 - RNA, 20 nt, Human
uuucuccacccucuccuccc

SEQ ID NO: 870464 - RNA, 22 nt, Human
uuuguuuuguuuuuaaaucuua

SEQ ID NO: 870465 - RNA, 20 nt, Human
cgcacgcgcacuaggguccg

SEQ ID NO: 870466 - RNA, 22 nt, Human
uaagaaugggagcuuuauuuau

SEQ ID NO: 870467 - RNA, 20 nt, Human
uccaaaggggcggagccacc

SEQ ID NO: 870468 - RNA, 20 nt, Human
uuuuguuguguucaauacag

SEQ ID NO: 870469 - RNA, 19 nt, Human
uuuuuuuuuuuuuuuuuaa

SEQ ID NO: 870470 - RNA, 26 nt, Human
aaaaugaagacaccagggaaagagga

SEQ ID NO: 870471 - RNA, 22 nt, Human
aaagacacaaaagcucuuugua

SEQ ID NO: 870472 - RNA, 18 nt, Human
aaaggaagccaacaaaga

SEQ ID NO: 870473 - RNA, 24 nt, Human
aacaaaccauugagaacuuuggga

SEQ ID NO: 870474 - RNA, 24 nt, Human
aacacaucuucgaauacaucagca

SEQ ID NO: 870475 - RNA, 26 nt, Human
aaccaaauccagcaguucugucagca

SEQ ID NO: 870476 - RNA, 25 nt, Human
aaccaccagcaccaacucucagucu

SEQ ID NO: 870477 - RNA, 22 nt, Human
aacuuugggaguuuccaaauuc

SEQ ID NO: 870478 - RNA, 19 nt, Human
aagaggucagagcagaacg

SEQ ID NO: 870479 - RNA, 23 nt, Human
aagccaaaggcccuaggucaaaa

SEQ ID NO: 870480 - RNA, 20 nt, Human
aaggagaugguaagaacagc

SEQ ID NO: 870481 - RNA, 19 nt, Human
aaguauuuugaggacaagg

SEQ ID NO: 870482 - RNA, 22 nt, Human
acggaggaaaaugaagacacca

SEQ ID NO: 870483 - RNA, 21 nt, Human
agaaaccuuucauucagagcc

SEQ ID NO: 870484 - RNA, 23 nt, Human
agaaggcaacucccaagaccagg

SEQ ID NO: 870485 - RNA, 19 nt, Human
agacaacaggaaucugggc

SEQ ID NO: 870486 - RNA, 24 nt, Human
agacauuuuggugugaauugugga

SEQ ID NO: 870487 - RNA, 20 nt, Human
agaccaggaguaaugagaga

SEQ ID NO: 870488 - RNA, 26 nt, Human
agaggacauggaacucacaacaaacc

SEQ ID NO: 870489 - RNA, 22 nt, Human
agaugucaaagacacaaaagcu

SEQ ID NO: 870490 - RNA, 20 nt, Human
agcuacauagccuccacacc

SEQ ID NO: 870491 - RNA, 23 nt, Human
aggaggaaaggaagccaacaaag

SEQ ID NO: 870492 - RNA, 23 nt, Human
aggaggaugcaggucuggagcua

SEQ ID NO: 870493 - RNA, 18 nt, Human
aggcaacucccaagacca

SEQ ID NO: 870494 - RNA, 18 nt, Human
aggcaaggacaaccuucu

SEQ ID NO: 870495 - RNA, 23 nt, Human
aggcaauauccucccccugcccu

SEQ ID NO: 870496 - RNA, 25 nt, Human
agggugcugcugcucugcagguccg

SEQ ID NO: 870497 - RNA, 19 nt, Human
augaugagcaacugcaaca

SEQ ID NO: 870498 - RNA, 19 nt, Human
auggaacuaguggcaauga

SEQ ID NO: 870499 - RNA, 20 nt, Human
auuugaagacagcuccucca

SEQ ID NO: 870500 - RNA, 21 nt, Human
caaaagcucuuuguaggugcu

SEQ ID NO: 870501 - RNA, 21 nt, Human
caaaccccacaacuggauauu

SEQ ID NO: 870502 - RNA, 25 nt, Human
caaaugguucuuuauugaacaccca

SEQ ID NO: 870503 - RNA, 21 nt, Human
caaccaccagcaccaacucuc

SEQ ID NO: 870504 - RNA, 22 nt, Human
caaccaccagcaccaacucuca

SEQ ID NO: 870505 - RNA, 21 nt, Human
caacuggauauuaagucagga

SEQ ID NO: 870506 - RNA, 18 nt, Human
caagaauaaagccaacuc

SEQ ID NO: 870507 - RNA, 22 nt, Human
caagaauaaagccaacucaaau

SEQ ID NO: 870508 - RNA, 23 nt, Human
caagaauaaagccaacucaaaug

SEQ ID NO: 870509 - RNA, 20 nt, Human
cacaacaaaccauugagaac

SEQ ID NO: 870510 - RNA, 20 nt, Human
cacaggaccaaggggcugga

SEQ ID NO: 870511 - RNA, 24 nt, Human
cacaggaccaaggggcuggagugu

SEQ ID NO: 870512 - RNA, 19 nt, Human
caccacaaccaccagcacc

SEQ ID NO: 870513 - RNA, 27 nt, Human
caccacaaccaccagcaccaacucuca

SEQ ID NO: 870514 - RNA, 21 nt, Human
caccagcaccaacucucaguc

SEQ ID NO: 870515 - RNA, 21 nt, Human
cagaaggcaacucccaagacc

SEQ ID NO: 870516 - RNA, 22 nt, Human
cagaaggcaacucccaagacca

SEQ ID NO: 870517 - RNA, 26 nt, Human
cagacuggauuaaucauguggccaaa

SEQ ID NO: 870518 - RNA, 19 nt, Human
cagagcccccaagcuagga

SEQ ID NO: 870519 - RNA, 20 nt, Human
cagaguccagcucgccuuuc

SEQ ID NO: 870520 - RNA, 20 nt, Human
cagaucagagcauuaggcaa

SEQ ID NO: 870521 - RNA, 18 nt, Human
cagcagaaaagcugggca

SEQ ID NO: 870522 - RNA, 21 nt, Human
cagcaguucugucagcaaagg

SEQ ID NO: 870523 - RNA, 18 nt, Human
caggguaggcugaauggu

SEQ ID NO: 870524 - RNA, 19 nt, Human
cauagccuccacaccggaa

SEQ ID NO: 870525 - RNA, 23 nt, Human
cauuaaauucccucugccccaag

SEQ ID NO: 870526 - RNA, 19 nt, Human
cauucagagcccccaagcu

SEQ ID NO: 870527 - RNA, 21 nt, Human
ccacaaacugauucuaagagc

SEQ ID NO: 870528 - RNA, 22 nt, Human
ccaccacaaccaccagcaccaa

SEQ ID NO: 870529 - RNA, 19 nt, Human
ccaguggaguauccucaga

SEQ ID NO: 870530 - RNA, 18 nt, Human
cccaagugaacuggaaag

SEQ ID NO: 870531 - RNA, 22 nt, Human
ccccagguucaucuuagagcuc

SEQ ID NO: 870532 - RNA, 18 nt, Human
cccccugcccucuaaucc

SEQ ID NO: 870533 - RNA, 22 nt, Human
ccugguugagucugcuuguugu

SEQ ID NO: 870534 - RNA, 18 nt, Human
cgccuccuucccucagcc

SEQ ID NO: 870535 - RNA, 19 nt, Human
cgccuccuucccucagccc

SEQ ID NO: 870536 - RNA, 20 nt, Human
cucuaaguacagacauuuug

SEQ ID NO: 870537 - RNA, 19 nt, Human
cugggaugcagccugaagc

SEQ ID NO: 870538 - RNA, 18 nt, Human
cuucccaucugguuguuc

SEQ ID NO: 870539 - RNA, 18 nt, Human
cuuccucagaguuuuggc

SEQ ID NO: 870540 - RNA, 21 nt, Human
gaaaagucacaaacaccuuuc

SEQ ID NO: 870541 - RNA, 24 nt, Human
gaaacacuauucaccccucccuuc

SEQ ID NO: 870542 - RNA, 21 nt, Human
gaacucacaacaaaccauuga

SEQ ID NO: 870543 - RNA, 21 nt, Human
gaaggagaugguaagaacagc

SEQ ID NO: 870544 - RNA, 23 nt, Human
gaggaaaggaagccaacaaagag

SEQ ID NO: 870545 - RNA, 21 nt, Human
gcauggccacagugacugauc

SEQ ID NO: 870546 - RNA, 18 nt, Human
gcaugggcagugaauggc

SEQ ID NO: 870547 - RNA, 23 nt, Human
gccaacucaaaugaaagcagagc

SEQ ID NO: 870548 - RNA, 19 nt, Human
gcuaggcaauauccucccc

SEQ ID NO: 870549 - RNA, 24 nt, Human
ggaggaaaggaagccaacaaagag

SEQ ID NO: 870550 - RNA, 21 nt, Human
ggcgcucagcaugggcaguga

SEQ ID NO: 870551 - RNA, 20 nt, Human
gggacagcagggagacggag

SEQ ID NO: 870552 - RNA, 24 nt, Human
gggcuggaguguugggaacagaug

SEQ ID NO: 870553 - RNA, 22 nt, Human
ggggugagagccaccauggaga

SEQ ID NO: 870554 - RNA, 25 nt, Human
gugaaagccaaaggcccuaggucaa

SEQ ID NO: 870555 - RNA, 21 nt, Human
uaaaaggaggagggugguaga

SEQ ID NO: 870556 - RNA, 18 nt, Human
uaaccucaaggcugaacu

SEQ ID NO: 870557 - RNA, 23 nt, Human
uacacacucacgacugucaacac

SEQ ID NO: 870558 - RNA, 18 nt, Human
uacauagccuccacaccg

SEQ ID NO: 870559 - RNA, 21 nt, Human
uacauagccuccacaccggaa

SEQ ID NO: 870560 - RNA, 21 nt, Human
uaccuugaagcaaggaguaac

SEQ ID NO: 870561 - RNA, 18 nt, Human
uacuagcagaaucuccuu

SEQ ID NO: 870562 - RNA, 22 nt, Human
uacugagguccccacuuuuagu

SEQ ID NO: 870563 - RNA, 21 nt, Human
uagcagaaucuccuuccucag

SEQ ID NO: 870564 - RNA, 22 nt, Human
uagcagaaucuccuuccucaga

SEQ ID NO: 870565 - RNA, 22 nt, Human
uagcucuaaguacagacauuuu

SEQ ID NO: 870566 - RNA, 19 nt, Human
uaggaggaugcaggucugg

SEQ ID NO: 870567 - RNA, 23 nt, Human
uaggaggaugcaggucuggagcu

SEQ ID NO: 870568 - RNA, 23 nt, Human
uaggcaauauccucccccugccc

SEQ ID NO: 870569 - RNA, 18 nt, Human
uauccuaggacagcuaag

SEQ ID NO: 870570 - RNA, 23 nt, Human
uaugggagagagaaauaaacuuc

SEQ ID NO: 870571 - RNA, 20 nt, Human
ucaaaugaaagcagagcuga

SEQ ID NO: 870572 - RNA, 20 nt, Human
ucacugcacuguuaugggag

SEQ ID NO: 870573 - RNA, 18 nt, Human
ucacuucugaaucuuccu

SEQ ID NO: 870574 - RNA, 23 nt, Human
ucagaaggcaacucccaagacca

SEQ ID NO: 870575 - RNA, 20 nt, Human
ucaggcgggauccagccauc

SEQ ID NO: 870576 - RNA, 25 nt, Human
ucaucugccaccacaaccaccagca

SEQ ID NO: 870577 - RNA, 24 nt, Human
ucaucuuagagcucaagcagauuc

SEQ ID NO: 870578 - RNA, 20 nt, Human
ucauggcuccaaaugcaagg

SEQ ID NO: 870579 - RNA, 18 nt, Human
uccaggcucagguacccc

SEQ ID NO: 870580 - RNA, 18 nt, Human
ucccucagccccggaucc

SEQ ID NO: 870581 - RNA, 22 nt, Human
uccguuucaggcgggauccagc

SEQ ID NO: 870582 - RNA, 22 nt, Human
ucucccaauggccauucuuccc

SEQ ID NO: 870583 - RNA, 19 nt, Human
ucuuaagcacuuagagccu

SEQ ID NO: 870584 - RNA, 25 nt, Human
ugaaaagucacaaacaccuuuccca

SEQ ID NO: 870585 - RNA, 20 nt, Human
ugaaagcagagcugagagcc

SEQ ID NO: 870586 - RNA, 18 nt, Human
ugaacacccacuuuggcu

SEQ ID NO: 870587 - RNA, 23 nt, Human
ugaagacaccagggaaagaggag

SEQ ID NO: 870588 - RNA, 24 nt, Human
ugaagacaccagggaaagaggaga

SEQ ID NO: 870589 - RNA, 19 nt, Human
ugaaugguucuaggccagg

SEQ ID NO: 870590 - RNA, 18 nt, Human
ugacaggcuguuccuagg

SEQ ID NO: 870591 - RNA, 24 nt, Human
ugacuugaggcuggauaccuuccu

SEQ ID NO: 870592 - RNA, 19 nt, Human
ugagagacucaaaucuaac

SEQ ID NO: 870593 - RNA, 19 nt, Human
ugaggacaaggagauuuuc

SEQ ID NO: 870594 - RNA, 22 nt, Human
ugagguccccacuuuuagugaa

SEQ ID NO: 870595 - RNA, 20 nt, Human
ugaugcuuuguccugcccag

SEQ ID NO: 870596 - RNA, 18 nt, Human
ugauucuguguuccacag

SEQ ID NO: 870597 - RNA, 19 nt, Human
ugcagcaggaggaaaggaa

SEQ ID NO: 870598 - RNA, 21 nt, Human
ugccaccacaaccaccagcac

SEQ ID NO: 870599 - RNA, 21 nt, Human
ugcccagcacccauucguccc

SEQ ID NO: 870600 - RNA, 22 nt, Human
ugccugaugacaucauggacca

SEQ ID NO: 870601 - RNA, 19 nt, Human
uggaacucacaacaaacca

SEQ ID NO: 870602 - RNA, 22 nt, Human
uggagacagaguccagcucgcc

SEQ ID NO: 870603 - RNA, 24 nt, Human
uggagcuaucagcugucauggcuc

SEQ ID NO: 870604 - RNA, 23 nt, Human
uggcaaugauuacauacagcugu

SEQ ID NO: 870605 - RNA, 24 nt, Human
ugggaagaagagagaaacacuauu

SEQ ID NO: 870606 - RNA, 19 nt, Human
uguaagcacagcauuugaa

SEQ ID NO: 870607 - RNA, 23 nt, Human
ugugaauuguggaguuuauggca

SEQ ID NO: 870608 - RNA, 21 nt, Human
uguggccaaacaugcauggcc

SEQ ID NO: 870609 - RNA, 23 nt, Human
uguguggugacaggcuguuccua

SEQ ID NO: 870610 - RNA, 18 nt, Human
uguuccuaggucccuggg

SEQ ID NO: 870611 - RNA, 20 nt, Human
uuccaaauucgaacuggaag

SEQ ID NO: 870612 - RNA, 21 nt, Human
uucuaaccucaaggcugaacu

SEQ ID NO: 870613 - RNA, 18 nt, Human
uugaacacccacuuuggc

SEQ ID NO: 870614 - RNA, 18 nt, Human
uugcaaaccccacaacug

SEQ ID NO: 870615 - RNA, 22 nt, Human
uuggugugaauuguggaguuua

SEQ ID NO: 870616 - RNA, 23 nt, Human
uugucuucccaucaccuuguuuu

SEQ ID NO: 870617 - RNA, 23 nt, Human
uuuguaggugcugacuggcucac

SEQ ID NO: 870618 - RNA, 27 nt, Human
agaacaaucagagaaaaagggaggccu

SEQ ID NO: 870619 - RNA, 20 nt, Human
agccacaggcaggcaacuaa

SEQ ID NO: 870620 - RNA, 20 nt, Human
augacuuucugugaggguuu

SEQ ID NO: 870621 - RNA, 22 nt, Human
caaaaaaauuccauucugugaa

SEQ ID NO: 870622 - RNA, 24 nt, Human
caagaaaaauaaaacuagccacau

SEQ ID NO: 870623 - RNA, 20 nt, Human
cagaacaaucagagaaaaac

SEQ ID NO: 870624 - RNA, 19 nt, Human
cagagaaaaacaugauuuc

SEQ ID NO: 870625 - RNA, 21 nt, Human
cagagaaaaacaugauuucau

SEQ ID NO: 870626 - RNA, 21 nt, Human
cagcaguggacgucaccauuu

SEQ ID NO: 870627 - RNA, 20 nt, Human
caggagccuuuuuccaaccu

SEQ ID NO: 870628 - RNA, 25 nt, Human
cagucucacugaagagaggaugaau

SEQ ID NO: 870629 - RNA, 24 nt, Human
ccuuucuuccccuuuugcaagucc

SEQ ID NO: 870630 - RNA, 24 nt, Human
cuguacaaagagcacaugugcaug

SEQ ID NO: 870631 - RNA, 18 nt, Human
gaaacaugauaugaaugg

SEQ ID NO: 870632 - RNA, 25 nt, Human
gugaauugaaauaaaaagguaucuu

SEQ ID NO: 870633 - RNA, 22 nt, Human
gugcaugaguuaaaaaacaagg

SEQ ID NO: 870634 - RNA, 19 nt, Human
uacacuuuuuaaaacugua

SEQ ID NO: 870635 - RNA, 18 nt, Human
ucagagaaaaacaugauu

SEQ ID NO: 870636 - RNA, 25 nt, Human
ugagacaugaaacaaaaaaauucca

SEQ ID NO: 870637 - RNA, 21 nt, Human
ugauaugaaugguuuaaguca

SEQ ID NO: 870638 - RNA, 22 nt, Human
ugcaaaacaagaaaaauaaaac

SEQ ID NO: 870639 - RNA, 21 nt, Human
ugcaugaguuaaaaaacaagg

SEQ ID NO: 870640 - RNA, 19 nt, Human
uggaggaggguuacaggag

SEQ ID NO: 870641 - RNA, 20 nt, Human
uguagaguguuaaaaaagaa

SEQ ID NO: 870642 - RNA, 21 nt, Human
uuacaggagccuuuuuccaac

SEQ ID NO: 870643 - RNA, 24 nt, Human
uuacaggagccuuuuuccaaccuc

SEQ ID NO: 870644 - RNA, 22 nt, Human
uucaaaauaagaguauuuagaa

SEQ ID NO: 870645 - RNA, 18 nt, Human
uucaacuuuacugucgac

SEQ ID NO: 870646 - RNA, 20 nt, Human
uucacauuuaacaaaaguag

SEQ ID NO: 870647 - RNA, 26 nt, Human
aaccgacucagaccugacagcaacau

SEQ ID NO: 870648 - RNA, 20 nt, Human
acccgucagacuccaaccga

SEQ ID NO: 870649 - RNA, 18 nt, Human
agaaaagucuggaaagua

SEQ ID NO: 870650 - RNA, 18 nt, Human
agaugcuggagcucaggc

SEQ ID NO: 870651 - RNA, 21 nt, Human
aggcugggccgcccccuuggc

SEQ ID NO: 870652 - RNA, 26 nt, Human
agguggcccgggggggauaugggggg

SEQ ID NO: 870653 - RNA, 26 nt, Human
caaagcucccugcucggcugccccuc

SEQ ID NO: 870654 - RNA, 23 nt, Human
ccaaccgacucagaccugacagc

SEQ ID NO: 870655 - RNA, 21 nt, Human
ccccuuggcucucccuccuga

SEQ ID NO: 870656 - RNA, 19 nt, Human
cccgggggggauauggggg

SEQ ID NO: 870657 - RNA, 18 nt, Human
cccuuggcucucccuccu

SEQ ID NO: 870658 - RNA, 19 nt, Human
cccuuggcucucccuccug

SEQ ID NO: 870659 - RNA, 19 nt, Human
ccuccuguuccaggggagc

SEQ ID NO: 870660 - RNA, 22 nt, Human
ccuucugcuccccuguuucuca

SEQ ID NO: 870661 - RNA, 21 nt, Human
cgacucagaccugacagcaac

SEQ ID NO: 870662 - RNA, 19 nt, Human
cggcugccccucgcccgcc

SEQ ID NO: 870663 - RNA, 18 nt, Human
cucaaggugucaaaggag

SEQ ID NO: 870664 - RNA, 19 nt, Human
cucagaccugacagcaaca

SEQ ID NO: 870665 - RNA, 21 nt, Human
cucccugcucggcugccccuc

SEQ ID NO: 870666 - RNA, 24 nt, Human
cucgccuacccgucagacuccaac

SEQ ID NO: 870667 - RNA, 24 nt, Human
cugcgccugcgcgucucgccuacc

SEQ ID NO: 870668 - RNA, 26 nt, Human
cuggagcucaggcccgccgugugugc

SEQ ID NO: 870669 - RNA, 19 nt, Human
gacucagaccugacagcaa

SEQ ID NO: 870670 - RNA, 21 nt, Human
gcacccaggcaggagcgggcg

SEQ ID NO: 870671 - RNA, 18 nt, Human
gcccgccgugugugcacc

SEQ ID NO: 870672 - RNA, 19 nt, Human
gcccgggggggauaugggg

SEQ ID NO: 870673 - RNA, 20 nt, Human
ggagcgggcgcuguccaggc

SEQ ID NO: 870674 - RNA, 22 nt, Human
ggcuggggcucucugcgccugc

SEQ ID NO: 870675 - RNA, 20 nt, Human
ggggggcaggacaggcagag

SEQ ID NO: 870676 - RNA, 24 nt, Human
gucucgccuacccgucagacucca

SEQ ID NO: 870677 - RNA, 23 nt, Human
uaagaaaagucuggaaaguagca

SEQ ID NO: 870678 - RNA, 23 nt, Human
uaagaaaagucuggaaaguagca

SEQ ID NO: 870679 - RNA, 21 nt, Human
ucauacccccaaacucagaug

SEQ ID NO: 870680 - RNA, 20 nt, Human
ucgcugaggccaccugggcc

SEQ ID NO: 870681 - RNA, 21 nt, Human
ucuggaaaguagcagaaucau

SEQ ID NO: 870682 - RNA, 20 nt, Human
uggcccgggggggauauggg

SEQ ID NO: 870683 - RNA, 24 nt, Human
ugggccgcccccuuggcucucccu

SEQ ID NO: 870684 - RNA, 22 nt, Human
ugggggccccagcccuguccca

SEQ ID NO: 870685 - RNA, 20 nt, Human
uguuugcuuuguaagaaaag

SEQ ID NO: 870686 - RNA, 24 nt, Human
uuggcucucccuccuguuccaggg

SEQ ID NO: 870687 - RNA, 24 nt, Human
uuugcagcacaggcaguuuucuuc

SEQ ID NO: 870688 - RNA, 27 nt, Human
uuuuuuuuuuuuuuuuuuuuuuugggg

SEQ ID NO: 870689 - RNA, 26 nt, Human
aagaaaccaagucugaagcaguggga

SEQ ID NO: 870690 - RNA, 21 nt, Human
aauucuccucuuacuucaagc

SEQ ID NO: 870691 - RNA, 23 nt, Human
accccaacaccuucuucuuucuu

SEQ ID NO: 870692 - RNA, 21 nt, Human
accuucuucuuucuucugcug

SEQ ID NO: 870693 - RNA, 19 nt, Human
agcaaagaaaagcauaauu

SEQ ID NO: 870694 - RNA, 21 nt, Human
agcauaauucuccucuuacuu

SEQ ID NO: 870695 - RNA, 19 nt, Human
aggcagcagccgccgugug

SEQ ID NO: 870696 - RNA, 22 nt, Human
aguagguagugaaaaacaguaa

SEQ ID NO: 870697 - RNA, 19 nt, Human
auaaaacaaauauacuggc

SEQ ID NO: 870698 - RNA, 25 nt, Human
augauccaucuucagugggggauga

SEQ ID NO: 870699 - RNA, 22 nt, Human
auggugacgacuauucaggcac

SEQ ID NO: 870700 - RNA, 21 nt, Human
caaguccacaguaaccaggag

SEQ ID NO: 870701 - RNA, 22 nt, Human
cagcagcggcggcggcgaggag

SEQ ID NO: 870702 - RNA, 19 nt, Human
cagcggcggcggcgaggag

SEQ ID NO: 870703 - RNA, 23 nt, Human
cagcggggcugcgcgggccccuc

SEQ ID NO: 870704 - RNA, 21 nt, Human
caggcacacaucucuuccuug

SEQ ID NO: 870705 - RNA, 25 nt, Human
cauaaggaagagaauggcuaauucc

SEQ ID NO: 870706 - RNA, 26 nt, Human
caucuagggguaagauaugacugcuc

SEQ ID NO: 870707 - RNA, 19 nt, Human
ccagcagcggcggcggcga

SEQ ID NO: 870708 - RNA, 19 nt, Human
cccguagucuucugguuuc

SEQ ID NO: 870709 - RNA, 24 nt, Human
cccguagucuucugguuucuagcu

SEQ ID NO: 870710 - RNA, 20 nt, Human
cccuucuacuuuauuuguaa

SEQ ID NO: 870711 - RNA, 22 nt, Human
cggggcugcgcgggccccucgu

SEQ ID NO: 870712 - RNA, 18 nt, Human
cucaauugauuguccauu

SEQ ID NO: 870713 - RNA, 22 nt, Human
cucuuuucuuacuuucccccuu

SEQ ID NO: 870714 - RNA, 19 nt, Human
cuuggauuuccuucucuuu

SEQ ID NO: 870715 - RNA, 24 nt, Human
cuuuauauuguugcauuccucaau

SEQ ID NO: 870716 - RNA, 18 nt, Human
gaaaaagcaaagaaaagc

SEQ ID NO: 870717 - RNA, 22 nt, Human
gaaaaagcaaagaaaagcauaa

SEQ ID NO: 870718 - RNA, 22 nt, Human
gagcagcggggcugcgcgggcc

SEQ ID NO: 870719 - RNA, 23 nt, Human
gagcgcggucaacgcggcgagca

SEQ ID NO: 870720 - RNA, 23 nt, Human
gauacaugaggggucagaaagaa

SEQ ID NO: 870721 - RNA, 18 nt, Human
ggcugcgcgggccccucg

SEQ ID NO: 870722 - RNA, 22 nt, Human
gguugccaggaagcuuggagau

SEQ ID NO: 870723 - RNA, 26 nt, Human
uaaaauaagacucauaguucucugcc

SEQ ID NO: 870724 - RNA, 23 nt, Human
uaauauaggcagacaguagguca

SEQ ID NO: 870725 - RNA, 20 nt, Human
uagggguaagauaugacugc

SEQ ID NO: 870726 - RNA, 21 nt, Human
ucaccuggagaugcuugauac

SEQ ID NO: 870727 - RNA, 22 nt, Human
ucccaggcucucccuagagccc

SEQ ID NO: 870728 - RNA, 18 nt, Human
uccuacagccucgcaugu

SEQ ID NO: 870729 - RNA, 21 nt, Human
uccuaccacagucaucuccuc

SEQ ID NO: 870730 - RNA, 21 nt, Human
ucuucagugggggaugaaagu

SEQ ID NO: 870731 - RNA, 19 nt, Human
ugaagcaccuugugaagau

SEQ ID NO: 870732 - RNA, 23 nt, Human
ugaggggucagaaagaagccugg

SEQ ID NO: 870733 - RNA, 18 nt, Human
ugccaaggaagagcuucc

SEQ ID NO: 870734 - RNA, 19 nt, Human
ugcugugggaugauccauc

SEQ ID NO: 870735 - RNA, 23 nt, Human
uguggacccuuaauauaggcaga

SEQ ID NO: 870736 - RNA, 18 nt, Human
uuaaaaaaaggcagcagc

SEQ ID NO: 870737 - RNA, 21 nt, Human
uuccuuggguccuaccacagu

SEQ ID NO: 870738 - RNA, 20 nt, Human
uuucccccuuaaaaaaaggc

SEQ ID NO: 870739 - RNA, 25 nt, Human
uuuuuuuuuuugaaugaaaagggcu

SEQ ID NO: 870740 - RNA, 18 nt, Human
uuuuuuuuuuuuuuuuug

SEQ ID NO: 870741 - RNA, 22 nt, Human
aagcuuuauggaagagcaauuc

SEQ ID NO: 870742 - RNA, 20 nt, Human
accaacuccugagcacgcgc

SEQ ID NO: 870743 - RNA, 22 nt, Human
acucagugagccuccacccuuc

SEQ ID NO: 870744 - RNA, 18 nt, Human
aggcaggacaccaacucc

SEQ ID NO: 870745 - RNA, 21 nt, Human
caauacagguaaugaaacucu

SEQ ID NO: 870746 - RNA, 27 nt, Human
cagcccucuacucagugagccuccacc

SEQ ID NO: 870747 - RNA, 19 nt, Human
cagcucccuggcuggcacc

SEQ ID NO: 870748 - RNA, 19 nt, Human
cagugagccuccacccuuc

SEQ ID NO: 870749 - RNA, 21 nt, Human
cauuuuccucuuaagcauagg

SEQ ID NO: 870750 - RNA, 18 nt, Human
ccaacccugcagggacau

SEQ ID NO: 870751 - RNA, 22 nt, Human
ccaaugggcagccccagccuga

SEQ ID NO: 870752 - RNA, 22 nt, Human
ccaggaacacuuucauuuuccu

SEQ ID NO: 870753 - RNA, 23 nt, Human
ccccaaugggcagccccagccuu

SEQ ID NO: 870754 - RNA, 22 nt, Human
cccucuacucagugagccucca

SEQ ID NO: 870755 - RNA, 22 nt, Human
ccugagcacgcgcuaggcgaac

SEQ ID NO: 870756 - RNA, 18 nt, Human
cucaguuuagacaacagc

SEQ ID NO: 870757 - RNA, 20 nt, Human
cuccugagcacgcgcuaggc

SEQ ID NO: 870758 - RNA, 22 nt, Human
gacaccaacuccugagcacgcg

SEQ ID NO: 870759 - RNA, 22 nt, Human
gcccccaaugggcagccccagc

SEQ ID NO: 870760 - RNA, 21 nt, Human
gcucugucccugccaacccug

SEQ ID NO: 870761 - RNA, 19 nt, Human
ucagagacagcaccccagg

SEQ ID NO: 870762 - RNA, 21 nt, Human
ucccuggcuggcaccaugguc

SEQ ID NO: 870763 - RNA, 22 nt, Human
uggggcccccaaugggcagccc

SEQ ID NO: 870764 - RNA, 20 nt, Human
aaaaagacuguucugccccu

SEQ ID NO: 870765 - RNA, 21 nt, Human
acccaaaaagacuguucugcc

SEQ ID NO: 870766 - RNA, 19 nt, Human
accccgaagucugcaaagc

SEQ ID NO: 870767 - RNA, 21 nt, Human
acgcugcaggagggcccagac

SEQ ID NO: 870768 - RNA, 22 nt, Human
agacgcgacagaggaaagaaac

SEQ ID NO: 870769 - RNA, 25 nt, Human
agagcaccccgaagucugcaaagcg

SEQ ID NO: 870770 - RNA, 23 nt, Human
agcccggcccuuacccaaaaaga

SEQ ID NO: 870771 - RNA, 18 nt, Human
auaacacaaaagacauuc

SEQ ID NO: 870772 - RNA, 22 nt, Human
cagaggaaagaaacgggaaacc

SEQ ID NO: 870773 - RNA, 19 nt, Human
caggagggcagcacagaga

SEQ ID NO: 870774 - RNA, 21 nt, Human
caggagggcccagacgcgaca

SEQ ID NO: 870775 - RNA, 23 nt, Human
caggaucaaggucccaguccgcc

SEQ ID NO: 870776 - RNA, 19 nt, Human
cccaaaaagacuguucugc

SEQ ID NO: 870777 - RNA, 21 nt, Human
cccccagcccggcccuuaccc

SEQ ID NO: 870778 - RNA, 21 nt, Human
ccccgugucccgguucuccag

SEQ ID NO: 870779 - RNA, 18 nt, Human
cccggcccuuacccaaaa

SEQ ID NO: 870780 - RNA, 21 nt, Human
cccuuacccaaaaagacuguu

SEQ ID NO: 870781 - RNA, 18 nt, Human
ccucccguccccgugucc

SEQ ID NO: 870782 - RNA, 22 nt, Human
cgaggaaggugccccggaggcg

SEQ ID NO: 870783 - RNA, 23 nt, Human
cggcuaaacgcggguguguggag

SEQ ID NO: 870784 - RNA, 18 nt, Human
cguggcgaggaaggugcc

SEQ ID NO: 870785 - RNA, 20 nt, Human
gaccggcucccggggcccgg

SEQ ID NO: 870786 - RNA, 21 nt, Human
gcccccagcccggcccuuacc

SEQ ID NO: 870787 - RNA, 23 nt, Human
gcccccagcccggcccuuaccca

SEQ ID NO: 870788 - RNA, 24 nt, Human
ggaaagcaacagccccuggccuuc

SEQ ID NO: 870789 - RNA, 25 nt, Human
ggccgggcaggcaggaucaaggucc

SEQ ID NO: 870790 - RNA, 22 nt, Human
ggcucccggggcccgguuaccu

SEQ ID NO: 870791 - RNA, 21 nt, Human
gggcccagacgcgacagagga

SEQ ID NO: 870792 - RNA, 19 nt, Human
gggccccgcggccuuucag

SEQ ID NO: 870793 - RNA, 22 nt, Human
gggcggccgggcaggcaggauc

SEQ ID NO: 870794 - RNA, 21 nt, Human
guucgggguccgcucucauuc

SEQ ID NO: 870795 - RNA, 20 nt, Human
ucccgguucuccaggagggc

SEQ ID NO: 870796 - RNA, 23 nt, Human
ugcuggcccucccguccccgugu

SEQ ID NO: 870797 - RNA, 22 nt, Human
uggcccucccguccccgugucc

SEQ ID NO: 870798 - RNA, 20 nt, Human
ugucguggcgaggaaggugc

SEQ ID NO: 870799 - RNA, 19 nt, Human
uguggcggcuaaacgcggg

SEQ ID NO: 870800 - RNA, 20 nt, Human
uuuuuuuuuuuuuuuuuaac

SEQ ID NO: 870801 - RNA, 25 nt, Human
aaauggguuuuaaaaauuaaggcuc

SEQ ID NO: 870802 - RNA, 19 nt, Human
aagaaaaaagucacuaccu

SEQ ID NO: 870803 - RNA, 25 nt, Human
agucacuaccuauucaaguucuaga

SEQ ID NO: 870804 - RNA, 21 nt, Human
caccccaccccucccacgaaa

SEQ ID NO: 870805 - RNA, 22 nt, Human
caccccaccccucccacgaaaa

SEQ ID NO: 870806 - RNA, 19 nt, Human
cacgaaaaagaaaaaaguc

SEQ ID NO: 870807 - RNA, 23 nt, Human
ccucccacgaaaaagaaaaaagu

SEQ ID NO: 870808 - RNA, 24 nt, Human
cuugggacucuauauacucccagg

SEQ ID NO: 870809 - RNA, 19 nt, Human
uaaaugcucuaagguaaau

SEQ ID NO: 870810 - RNA, 23 nt, Human
uaagauaaaaaauuggacuauaa

SEQ ID NO: 870811 - RNA, 23 nt, Human
ucaacccugcuaaacguuuuguu

SEQ ID NO: 870812 - RNA, 19 nt, Human
ugccagaacaauguaaaaa

SEQ ID NO: 870813 - RNA, 19 nt, Human
ugugcugaacacacauuga

SEQ ID NO: 870814 - RNA, 18 nt, Human
uuaagauaaaaaauugga

SEQ ID NO: 870815 - RNA, 30 nt, Human
uuuuuugcuucuuugaaaaaagauguuuaa

SEQ ID NO: 870816 - RNA, 19 nt, Human
uuuuuuuuuuuuuuugcuu

SEQ ID NO: 870817 - RNA, 24 nt, Human
uuuuuuuuuuuuuuugcuucuuug

SEQ ID NO: 870818 - RNA, 20 nt, Human
aaaaauuggcauauggacaa

SEQ ID NO: 870819 - RNA, 23 nt, Human
acaccaggauuuccgccaggcca

SEQ ID NO: 870820 - RNA, 21 nt, Human
agauguuaacuaaauuucugu

SEQ ID NO: 870821 - RNA, 18 nt, Human
agcaucaccaacgcuccc

SEQ ID NO: 870822 - RNA, 18 nt, Human
agguaagcaggcggaauc

SEQ ID NO: 870823 - RNA, 24 nt, Human
aguuuuuuacaccaacuaaauggu

SEQ ID NO: 870824 - RNA, 25 nt, Human
auacagcaucaccaacgcuccccag

SEQ ID NO: 870825 - RNA, 20 nt, Human
auggccaccgaggcguuucc

SEQ ID NO: 870826 - RNA, 24 nt, Human
auuucuagauguggggagaaacaa

SEQ ID NO: 870827 - RNA, 18 nt, Human
auuuuguuccuccaccuc

SEQ ID NO: 870828 - RNA, 22 nt, Human
caauagaaaaccagacaccacg

SEQ ID NO: 870829 - RNA, 18 nt, Human
cacaguuugcgaggguuu

SEQ ID NO: 870830 - RNA, 23 nt, Human
caccgcuaccaacggcugugggc

SEQ ID NO: 870831 - RNA, 19 nt, Human
cagcaguacugcugccacc

SEQ ID NO: 870832 - RNA, 18 nt, Human
caucaccaacgcucccca

SEQ ID NO: 870833 - RNA, 19 nt, Human
cauuuuuugguuguuguuu

SEQ ID NO: 870834 - RNA, 23 nt, Human
ccccucuaggggaggauggaggc

SEQ ID NO: 870835 - RNA, 20 nt, Human
cccgcaaggcugaggaugag

SEQ ID NO: 870836 - RNA, 21 nt, Human
cccggucacgccgccggcgcc

SEQ ID NO: 870837 - RNA, 18 nt, Human
ccgccaggccacaguuug

SEQ ID NO: 870838 - RNA, 19 nt, Human
ccggcgccgccauuuuguc

SEQ ID NO: 870839 - RNA, 18 nt, Human
ccuccaccucagccaacc

SEQ ID NO: 870840 - RNA, 22 nt, Human
ccugagaggcaaagauggaggc

SEQ ID NO: 870841 - RNA, 19 nt, Human
cggucacgccgccggcgcc

SEQ ID NO: 870842 - RNA, 23 nt, Human
cggucacgccgccggcgccgcca

SEQ ID NO: 870843 - RNA, 24 nt, Human
cuaaaaaugcucaaucauaagcau

SEQ ID NO: 870844 - RNA, 21 nt, Human
cuccaccucagccaaccacaa

SEQ ID NO: 870845 - RNA, 21 nt, Human
cugucguggcgaugucguggg

SEQ ID NO: 870846 - RNA, 24 nt, Human
cuuguaaaacauaaaagcucccau

SEQ ID NO: 870847 - RNA, 20 nt, Human
gagaaacccuaaaaaugcuc

SEQ ID NO: 870848 - RNA, 19 nt, Human
gcacagcgaguuggggcag

SEQ ID NO: 870849 - RNA, 20 nt, Human
gccaccgaggcguuucccgg

SEQ ID NO: 870850 - RNA, 22 nt, Human
ggagaaacaaaugcugcucgaa

SEQ ID NO: 870851 - RNA, 18 nt, Human
ggagaaacccuaaaaaug

SEQ ID NO: 870852 - RNA, 19 nt, Human
ggaggauggaggccuccgg

SEQ ID NO: 870853 - RNA, 21 nt, Human
gggcacagcgaguuggggcag

SEQ ID NO: 870854 - RNA, 22 nt, Human
gguaagcaggcggaaucuuucc

SEQ ID NO: 870855 - RNA, 19 nt, Human
guacauacauguucaguug

SEQ ID NO: 870856 - RNA, 18 nt, Human
gugggccagagggcccgg

SEQ ID NO: 870857 - RNA, 23 nt, Human
uaaaauaccgagaacaugauaua

SEQ ID NO: 870858 - RNA, 19 nt, Human
uacaccaacuaaaugguug

SEQ ID NO: 870859 - RNA, 19 nt, Human
uacuagaucagcuggcuua

SEQ ID NO: 870860 - RNA, 23 nt, Human
ucccagaucauauggguguuuac

SEQ ID NO: 870861 - RNA, 21 nt, Human
ucccgguguuacagggcgugg

SEQ ID NO: 870862 - RNA, 20 nt, Human
ucgguggcggucgcugccuc

SEQ ID NO: 870863 - RNA, 24 nt, Human
ucgugggcugagaaagggggcaca

SEQ ID NO: 870864 - RNA, 20 nt, Human
ucucaagguuccaggcuggg

SEQ ID NO: 870865 - RNA, 21 nt, Human
ucucgguggcggucgcugccu

SEQ ID NO: 870866 - RNA, 19 nt, Human
ucugcuucuucuguuccuc

SEQ ID NO: 870867 - RNA, 21 nt, Human
ugaaauaaaauuuacuugcaa

SEQ ID NO: 870868 - RNA, 18 nt, Human
ugagaggcaaagauggag

SEQ ID NO: 870869 - RNA, 20 nt, Human
ugaggaugagggcugcugga

SEQ ID NO: 870870 - RNA, 23 nt, Human
ugcucugcuucuucuguuccuca

SEQ ID NO: 870871 - RNA, 24 nt, Human
uggaggccuccggggcccaccggc

SEQ ID NO: 870872 - RNA, 21 nt, Human
uggcuuacagacaagaagcca

SEQ ID NO: 870873 - RNA, 18 nt, Human
ugguuguuguuguuuuua

SEQ ID NO: 870874 - RNA, 20 nt, Human
uguuacagggcguggaguca

SEQ ID NO: 870875 - RNA, 23 nt, Human
uuaacuaaauuucugugacaaau

SEQ ID NO: 870876 - RNA, 23 nt, Human
uugcagcuguggcugaauacugu

SEQ ID NO: 870877 - RNA, 21 nt, Human
uuugcaaaccccagggaugga

SEQ ID NO: 870878 - RNA, 23 nt, Human
uuuuuacaccaacuaaaugguug

SEQ ID NO: 870879 - RNA, 20 nt, Human
aaaacagccaggugucagga

SEQ ID NO: 870880 - RNA, 25 nt, Human
aaacaagcucuacuucagaugucca

SEQ ID NO: 870881 - RNA, 20 nt, Human
aaacagccaggugucaggaa

SEQ ID NO: 870882 - RNA, 21 nt, Human
aagauuuuagucuaaacagaa

SEQ ID NO: 870883 - RNA, 25 nt, Human
aagcgggaaggaggcggggggaggu

SEQ ID NO: 870884 - RNA, 20 nt, Human
aaguuaaggcacagcaguuc

SEQ ID NO: 870885 - RNA, 20 nt, Human
acaagaguaaaacuccaccu

SEQ ID NO: 870886 - RNA, 23 nt, Human
acacaguaguaaaacugcuacaa

SEQ ID NO: 870887 - RNA, 19 nt, Human
accacaauuccuccuugua

SEQ ID NO: 870888 - RNA, 24 nt, Human
accagggccuccagcuggaggcag

SEQ ID NO: 870889 - RNA, 23 nt, Human
accccaggauucaaauaggaccg

SEQ ID NO: 870890 - RNA, 27 nt, Human
acggcacuccagccuagacaacaagag

SEQ ID NO: 870891 - RNA, 24 nt, Human
acuccaaagcaaguuacuaucaac

SEQ ID NO: 870892 - RNA, 24 nt, Human
acuccacaaacaacccuucugacc

SEQ ID NO: 870893 - RNA, 21 nt, Human
acuuugucgcccaggcuguag

SEQ ID NO: 870894 - RNA, 23 nt, Human
agagcugaggggccagcuugagc

SEQ ID NO: 870895 - RNA, 18 nt, Human
agauuccccaccacccac

SEQ ID NO: 870896 - RNA, 23 nt, Human
agauuccccaccacccaccauac

SEQ ID NO: 870897 - RNA, 19 nt, Human
agccgcauagcgaagcucc

SEQ ID NO: 870898 - RNA, 22 nt, Human
agccgcucacucagcuaacccc

SEQ ID NO: 870899 - RNA, 18 nt, Human
aggaaugugccauuuacc

SEQ ID NO: 870900 - RNA, 24 nt, Human
aggcggggguugcagugagcuaag

SEQ ID NO: 870901 - RNA, 22 nt, Human
aggcuggagguggggguauggg

SEQ ID NO: 870902 - RNA, 23 nt, Human
aggcuggagguggggguaugggu

SEQ ID NO: 870903 - RNA, 19 nt, Human
aggcuguagugcaguggca

SEQ ID NO: 870904 - RNA, 28 nt, Human
aggugggggacagauucauagguuuuug

SEQ ID NO: 870905 - RNA, 22 nt, Human
agugcaguggcauucucggcuc

SEQ ID NO: 870906 - RNA, 20 nt, Human
aguuaacugcaacaagccug

SEQ ID NO: 870907 - RNA, 20 nt, Human
caaacaaaaaucacacagua

SEQ ID NO: 870908 - RNA, 24 nt, Human
caacaagccugaaaauuugguuac

SEQ ID NO: 870909 - RNA, 18 nt, Human
caacccagugcaucucca

SEQ ID NO: 870910 - RNA, 23 nt, Human
caaccuccaccucccagguucaa

SEQ ID NO: 870911 - RNA, 22 nt, Human
caagcacagcaaaaggucaccc

SEQ ID NO: 870912 - RNA, 18 nt, Human
caagcgagucuccugaac

SEQ ID NO: 870913 - RNA, 18 nt, Human
caccagcuucccguccug

SEQ ID NO: 870914 - RNA, 19 nt, Human
caccccacaggccacucca

SEQ ID NO: 870915 - RNA, 23 nt, Human
caccucauaacaaacaaucaauc

SEQ ID NO: 870916 - RNA, 24 nt, Human
cacuccagccuagacaacaagagu

SEQ ID NO: 870917 - RNA, 21 nt, Human
cacugcaaccuccaccuccca

SEQ ID NO: 870918 - RNA, 19 nt, Human
cacuggucaguaugcugcc

SEQ ID NO: 870919 - RNA, 24 nt, Human
cacuuugucgcccaggcuguagug

SEQ ID NO: 870920 - RNA, 22 nt, Human
cagaacccuaggcugcugaugc

SEQ ID NO: 870921 - RNA, 22 nt, Human
cagagcugaggggccagcuuga

SEQ ID NO: 870922 - RNA, 22 nt, Human
cagcccagacuccacaaacaag

SEQ ID NO: 870923 - RNA, 23 nt, Human
cagcuaaccccaggauucaaaua

SEQ ID NO: 870924 - RNA, 19 nt, Human
caucaagcacagcaaaagg

SEQ ID NO: 870925 - RNA, 22 nt, Human
ccaccacccaccauacagcucc

SEQ ID NO: 870926 - RNA, 18 nt, Human
ccaccccuccucaagaaa

SEQ ID NO: 870927 - RNA, 19 nt, Human
ccacggcacuccagccuag

SEQ ID NO: 870928 - RNA, 21 nt, Human
ccacggcacuccagccuagac

SEQ ID NO: 870929 - RNA, 24 nt, Human
ccacuggucaguaugcugccuucu

SEQ ID NO: 870930 - RNA, 19 nt, Human
ccagauuccccaccaccca

SEQ ID NO: 870931 - RNA, 18 nt, Human
ccagcauuacuaagguuu

SEQ ID NO: 870932 - RNA, 26 nt, Human
ccagcccagacuccacaaacaacccu

SEQ ID NO: 870933 - RNA, 20 nt, Human
ccaggugucaggaaugugcc

SEQ ID NO: 870934 - RNA, 23 nt, Human
cccagguucaagcgagucucccc

SEQ ID NO: 870935 - RNA, 23 nt, Human
cccagguucaagcgagucuccug

SEQ ID NO: 870936 - RNA, 19 nt, Human
ccccacaggccacuccaaa

SEQ ID NO: 870937 - RNA, 21 nt, Human
ccccaggauucaaauaggacc

SEQ ID NO: 870938 - RNA, 19 nt, Human
cccgggaggcggggguugc

SEQ ID NO: 870939 - RNA, 30 nt, Human
ccgagggccugaucuagcugcugccaagac

SEQ ID NO: 870940 - RNA, 23 nt, Human
ccggccucagaacucuccaaugu

SEQ ID NO: 870941 - RNA, 23 nt, Human
ccuacggcacauacuauuuuguu

SEQ ID NO: 870942 - RNA, 19 nt, Human
ccucaacccagugcaucuc

SEQ ID NO: 870943 - RNA, 21 nt, Human
ccucccagguucaagcgaguc

SEQ ID NO: 870944 - RNA, 24 nt, Human
ccucccagguucaagcgagucucc

SEQ ID NO: 870945 - RNA, 26 nt, Human
cgcaccacggcacuccagccuagaca

SEQ ID NO: 870946 - RNA, 30 nt, Human
cgcaccacggcacuccagccuagacaacaa

SEQ ID NO: 870947 - RNA, 22 nt, Human
cgggaaggaggcggggggaggu

SEQ ID NO: 870948 - RNA, 24 nt, Human
cgggaggcggggguugcagugagc

SEQ ID NO: 870949 - RNA, 21 nt, Human
cuaguuaacugcaacaagccu

SEQ ID NO: 870950 - RNA, 24 nt, Human
cucacugcaaccuccaccucccag

SEQ ID NO: 870951 - RNA, 21 nt, Human
cucagccccagucuucuuagc

SEQ ID NO: 870952 - RNA, 25 nt, Human
cucagucacaccggggaguuuugcu

SEQ ID NO: 870953 - RNA, 24 nt, Human
cucccagauuccccaccacccacc

SEQ ID NO: 870954 - RNA, 20 nt, Human
cucccuguaacucaaaaagc

SEQ ID NO: 870955 - RNA, 23 nt, Human
cucccuuugugggauugaugcaa

SEQ ID NO: 870956 - RNA, 21 nt, Human
cugaaauaagcaacaucaaaa

SEQ ID NO: 870957 - RNA, 24 nt, Human
cugaacccgggaggcggggguugc

SEQ ID NO: 870958 - RNA, 22 nt, Human
cugaccaacagccaccucucag

SEQ ID NO: 870959 - RNA, 24 nt, Human
cugagggcuuucuguuguuacuga

SEQ ID NO: 870960 - RNA, 23 nt, Human
cugcaaccuccaccucccagguu

SEQ ID NO: 870961 - RNA, 23 nt, Human
cugcccagcccagacuccacaaa

SEQ ID NO: 870962 - RNA, 22 nt, Human
cugcuucugaaauaagcaacau

SEQ ID NO: 870963 - RNA, 25 nt, Human
cuucccagcauuacuaagguuucuc

SEQ ID NO: 870964 - RNA, 25 nt, Human
cuucccguccugaccaacagccacc

SEQ ID NO: 870965 - RNA, 26 nt, Human
gaacccuggcauuccaauuagaaacg

SEQ ID NO: 870966 - RNA, 22 nt, Human
gaccacaauuccuccuuguaaa

SEQ ID NO: 870967 - RNA, 21 nt, Human
gaccuagaacaggguaccagg

SEQ ID NO: 870968 - RNA, 22 nt, Human
gcaaccuccaccucccagguuc

SEQ ID NO: 870969 - RNA, 23 nt, Human
gcacagcaaaaggucaccccuuu

SEQ ID NO: 870970 - RNA, 21 nt, Human
gccaccccuccucaagaaaca

SEQ ID NO: 870971 - RNA, 24 nt, Human
gcccaggcuguagugcaguggcau

SEQ ID NO: 870972 - RNA, 20 nt, Human
gccgagguuccugccagacg

SEQ ID NO: 870973 - RNA, 18 nt, Human
ggaaggaggcggggggag

SEQ ID NO: 870974 - RNA, 18 nt, Human
ggaaggaggcggggggag

SEQ ID NO: 870975 - RNA, 21 nt, Human
ggggauuacaagugaagccac

SEQ ID NO: 870976 - RNA, 24 nt, Human
ggggguugcagugagcuaagaucg

SEQ ID NO: 870977 - RNA, 19 nt, Human
gggguugcagugagcuaag

SEQ ID NO: 870978 - RNA, 22 nt, Human
gggguugcagugagcuaagauc

SEQ ID NO: 870979 - RNA, 23 nt, Human
gggguugcagugagcuaagaucg

SEQ ID NO: 870980 - RNA, 19 nt, Human
gggugguccccagacucug

SEQ ID NO: 870981 - RNA, 19 nt, Human
ggugacagagacagcauga

SEQ ID NO: 870982 - RNA, 21 nt, Human
gguugcagugagcuaagaucg

SEQ ID NO: 870983 - RNA, 24 nt, Human
guuacuaucaacacguuuccaacu

SEQ ID NO: 870984 - RNA, 21 nt, Human
guugcagugagcuaagaucgc

SEQ ID NO: 870985 - RNA, 21 nt, Human
uaaaaacaaaacaagcucuac

SEQ ID NO: 870986 - RNA, 22 nt, Human
uaaagcagccgcauagcgaagc

SEQ ID NO: 870987 - RNA, 22 nt, Human
uaacuacucagccccagucuuc

SEQ ID NO: 870988 - RNA, 23 nt, Human
uaacugcaacaagccugaaaauu

SEQ ID NO: 870989 - RNA, 23 nt, Human
uaccagggccuccagcuggaggc

SEQ ID NO: 870990 - RNA, 18 nt, Human
uagaaacguguuucaagg

SEQ ID NO: 870991 - RNA, 21 nt, Human
uagaaucuuaaagcagccgca

SEQ ID NO: 870992 - RNA, 21 nt, Human
uaggcagugcugcccagccca

SEQ ID NO: 870993 - RNA, 24 nt, Human
uaggcagugcugcccagcccagac

SEQ ID NO: 870994 - RNA, 18 nt, Human
uauguaggugcaaagcug

SEQ ID NO: 870995 - RNA, 23 nt, Human
uauucuuauuuaaaaacaaaaca

SEQ ID NO: 870996 - RNA, 19 nt, Human
ucaacaggcuggagguggg

SEQ ID NO: 870997 - RNA, 22 nt, Human
ucaagcacagcaaaaggucacc

SEQ ID NO: 870998 - RNA, 20 nt, Human
ucaccccuuuccggggggac

SEQ ID NO: 870999 - RNA, 21 nt, Human
ucacucagcuaaccccaggau

SEQ ID NO: 871000 - RNA, 24 nt, Human
ucacugcaaccuccaccucccagg

SEQ ID NO: 871001 - RNA, 25 nt, Human
ucacugcaaccuccaccucccaggu

SEQ ID NO: 871002 - RNA, 27 nt, Human
ucacugcaaccuccaccucccagguuc

SEQ ID NO: 871003 - RNA, 18 nt, Human
uccacaaacaacccuucu

SEQ ID NO: 871004 - RNA, 19 nt, Human
ucccacuuugucgcccagg

SEQ ID NO: 871005 - RNA, 22 nt, Human
ucccacuuugucgcccaggcug

SEQ ID NO: 871006 - RNA, 23 nt, Human
ucccacuuugucgcccaggcugu

SEQ ID NO: 871007 - RNA, 24 nt, Human
ucccacuuugucgcccaggcugua

SEQ ID NO: 871008 - RNA, 21 nt, Human
ucccagguucaagcgagucuc

SEQ ID NO: 871009 - RNA, 24 nt, Human
ucccagguucaagcgagucuccug

SEQ ID NO: 871010 - RNA, 24 nt, Human
uccccaccacccaccauacagcuc

SEQ ID NO: 871011 - RNA, 18 nt, Human
uccccagacucugcugcu

SEQ ID NO: 871012 - RNA, 21 nt, Human
uccccagacucugcugcuccu

SEQ ID NO: 871013 - RNA, 24 nt, Human
ucgcccaggcuguagugcaguggc

SEQ ID NO: 871014 - RNA, 22 nt, Human
ucuaggcagugcugcccagccc

SEQ ID NO: 871015 - RNA, 20 nt, Human
ucuccagcuccagcuccgca

SEQ ID NO: 871016 - RNA, 23 nt, Human
ucuccugaacccgggaggcgggg

SEQ ID NO: 871017 - RNA, 23 nt, Human
ucuggccaagauuuuagucuaaa

SEQ ID NO: 871018 - RNA, 26 nt, Human
ugaaauaagcaacaucaaaacagcca

SEQ ID NO: 871019 - RNA, 21 nt, Human
ugaccaacagccaccucucag

SEQ ID NO: 871020 - RNA, 22 nt, Human
ugagccagcuugcaaucccucg

SEQ ID NO: 871021 - RNA, 20 nt, Human
ugaugaccacaauuccuccu

SEQ ID NO: 871022 - RNA, 23 nt, Human
ugcagaggcaguccagagcugag

SEQ ID NO: 871023 - RNA, 20 nt, Human
ugcaguggcauucucggcuc

SEQ ID NO: 871024 - RNA, 20 nt, Human
ugccaaggucaccagcuucc

SEQ ID NO: 871025 - RNA, 23 nt, Human
ugccgagggccugaucuagcugc

SEQ ID NO: 871026 - RNA, 18 nt, Human
ugccuucuccagcuccag

SEQ ID NO: 871027 - RNA, 21 nt, Human
ugcugccaagacaugccaagg

SEQ ID NO: 871028 - RNA, 24 nt, Human
ugcugcccagcccagacuccacaa

SEQ ID NO: 871029 - RNA, 18 nt, Human
ugcugccuucuccagcuc

SEQ ID NO: 871030 - RNA, 28 nt, Human
ugcugcuccuucccagcauuacuaaggu

SEQ ID NO: 871031 - RNA, 18 nt, Human
uggaggcagagagagcca

SEQ ID NO: 871032 - RNA, 22 nt, Human
uggaggcagagagagccacccc

SEQ ID NO: 871033 - RNA, 18 nt, Human
uggagguggggguauggg

SEQ ID NO: 871034 - RNA, 20 nt, Human
uggcaaggagcucuggccaa

SEQ ID NO: 871035 - RNA, 19 nt, Human
ugggugccuucugugugcc

SEQ ID NO: 871036 - RNA, 22 nt, Human
uguagugcaguggcauucucgg

SEQ ID NO: 871037 - RNA, 21 nt, Human
uuacuaagguuucucucccag

SEQ ID NO: 871038 - RNA, 20 nt, Human
uucaagcgagucuccugaac

SEQ ID NO: 871039 - RNA, 21 nt, Human
uuccugugucucugccgaggg

SEQ ID NO: 871040 - RNA, 19 nt, Human
uugcagugagcuaagaucg

SEQ ID NO: 871041 - RNA, 22 nt, Human
uugcagugagcuaagaucgcac

SEQ ID NO: 871042 - RNA, 18 nt, Human
uuuaccggguggucccca

SEQ ID NO: 871043 - RNA, 21 nt, Human
uuucuaguuaacugcaacaag

SEQ ID NO: 871044 - RNA, 24 nt, Human
uuugucgcccaggcuguagugcag

SEQ ID NO: 871045 - RNA, 19 nt, Human
acagcagagagacucugac

SEQ ID NO: 871046 - RNA, 23 nt, Human
cacaaaaccagcccuggcuccaa

SEQ ID NO: 871047 - RNA, 19 nt, Human
cacccugccccuagcacuc

SEQ ID NO: 871048 - RNA, 21 nt, Human
cacucuggccuugccuggccc

SEQ ID NO: 871049 - RNA, 21 nt, Human
cagcagagagacucugaccag

SEQ ID NO: 871050 - RNA, 23 nt, Human
cagcagcccauaguucacuucug

SEQ ID NO: 871051 - RNA, 19 nt, Human
cagcagcuccagcaaccac

SEQ ID NO: 871052 - RNA, 23 nt, Human
cagccccagccucucgguggccu

SEQ ID NO: 871053 - RNA, 22 nt, Human
cagcccuggcuccaagaggccc

SEQ ID NO: 871054 - RNA, 22 nt, Human
ccaugggaaucaaagucacuag

SEQ ID NO: 871055 - RNA, 21 nt, Human
cccauaguucacuucugaagc

SEQ ID NO: 871056 - RNA, 25 nt, Human
ccccagccccagccucucgguggcc

SEQ ID NO: 871057 - RNA, 22 nt, Human
ccccuagcacucuggccuugcc

SEQ ID NO: 871058 - RNA, 19 nt, Human
cccuggcuccaagaggccc

SEQ ID NO: 871059 - RNA, 22 nt, Human
ccuugccuggcccugccagcag

SEQ ID NO: 871060 - RNA, 21 nt, Human
cuccaugggaaucaaagucac

SEQ ID NO: 871061 - RNA, 18 nt, Human
cucucgguggccuccagg

SEQ ID NO: 871062 - RNA, 27 nt, Human
gagagacucugaccagacagguggccc

SEQ ID NO: 871063 - RNA, 20 nt, Human
gcccugccagcagcuccagc

SEQ ID NO: 871064 - RNA, 21 nt, Human
gccuugccuggcccugccagc

SEQ ID NO: 871065 - RNA, 20 nt, Human
ggagacacagggaaauggcc

SEQ ID NO: 871066 - RNA, 22 nt, Human
ggccuugccuggcccugccagc

SEQ ID NO: 871067 - RNA, 18 nt, Human
gggcgcugccuucaucug

SEQ ID NO: 871068 - RNA, 24 nt, Human
gucacuacaacagugagcugaagc

SEQ ID NO: 871069 - RNA, 22 nt, Human
gucagccccagccccagccucu

SEQ ID NO: 871070 - RNA, 30 nt, Human
gucagccccagccccagccucucgguggcc

SEQ ID NO: 871071 - RNA, 22 nt, Human
guggccuccaggucagcauccu

SEQ ID NO: 871072 - RNA, 26 nt, Human
guggucagccccagccccagccucuc

SEQ ID NO: 871073 - RNA, 19 nt, Human
ucacuaguugcucccagca

SEQ ID NO: 871074 - RNA, 20 nt, Human
uccaagaggcccacagcaga

SEQ ID NO: 871075 - RNA, 20 nt, Human
uccaugggaaucaaagucac

SEQ ID NO: 871076 - RNA, 21 nt, Human
ucucgguggccuccaggucag

SEQ ID NO: 871077 - RNA, 25 nt, Human
ucugaagccagagcaagugaggggc

SEQ ID NO: 871078 - RNA, 21 nt, Human
ugaccagacagguggccccag

SEQ ID NO: 871079 - RNA, 24 nt, Human
ugaggggcgcugccuucaucugug

SEQ ID NO: 871080 - RNA, 19 nt, Human
ugccccuagcacucuggcc

SEQ ID NO: 871081 - RNA, 24 nt, Human
ugccuggcccugccagcagcucca

SEQ ID NO: 871082 - RNA, 26 nt, Human
ugcuucauucuugcuggcauaauuca

SEQ ID NO: 871083 - RNA, 20 nt, Human
uggcauaauucauggaugga

SEQ ID NO: 871084 - RNA, 19 nt, Human
uggcccugccagcagcucc

SEQ ID NO: 871085 - RNA, 23 nt, Human
aagggcaaggcacagaaaggcuu

SEQ ID NO: 871086 - RNA, 19 nt, Human
agagccaccaggcuuccuc

SEQ ID NO: 871087 - RNA, 19 nt, Human
agcagcaggccagaugcag

SEQ ID NO: 871088 - RNA, 22 nt, Human
agcagcaggccagaugcagggg

SEQ ID NO: 871089 - RNA, 23 nt, Human
agcuccauggccacggcagccuc

SEQ ID NO: 871090 - RNA, 21 nt, Human
agcuuccagagcuccauggcc

SEQ ID NO: 871091 - RNA, 23 nt, Human
aggggagugggcaaagggcaagg

SEQ ID NO: 871092 - RNA, 23 nt, Human
caccaggcuuccucccccagccc

SEQ ID NO: 871093 - RNA, 18 nt, Human
cagcccagggugaaagcc

SEQ ID NO: 871094 - RNA, 20 nt, Human
cagccucagagccgcagccc

SEQ ID NO: 871095 - RNA, 23 nt, Human
caggggagugggcaaagggcaag

SEQ ID NO: 871096 - RNA, 18 nt, Human
ccaccaggcuuccucccc

SEQ ID NO: 871097 - RNA, 21 nt, Human
cgagaggaaggccgaaccucg

SEQ ID NO: 871098 - RNA, 19 nt, Human
cgccugggggcuccugcag

SEQ ID NO: 871099 - RNA, 18 nt, Human
cuccauggccacggcagc

SEQ ID NO: 871100 - RNA, 19 nt, Human
cucccccagcccagcuucc

SEQ ID NO: 871101 - RNA, 18 nt, Human
cugggcccguguggaacu

SEQ ID NO: 871102 - RNA, 21 nt, Human
cugggcccguguggaacuggg

SEQ ID NO: 871103 - RNA, 24 nt, Human
gcaggggcagcacugggcccgugu

SEQ ID NO: 871104 - RNA, 24 nt, Human
gcauugagggucuuggcaguccca

SEQ ID NO: 871105 - RNA, 21 nt, Human
gcuccugcagcagcaggggcu

SEQ ID NO: 871106 - RNA, 20 nt, Human
gcuuccucccccagcccagc

SEQ ID NO: 871107 - RNA, 27 nt, Human
ggccacggcagccucagagccgcagcc

SEQ ID NO: 871108 - RNA, 24 nt, Human
gggggcuccugcagcagcaggggc

SEQ ID NO: 871109 - RNA, 21 nt, Human
gguaaggaggcagguucagga

SEQ ID NO: 871110 - RNA, 20 nt, Human
gugagcucaggugcuggugc

SEQ ID NO: 871111 - RNA, 20 nt, Human
ucagagccgcagcccagggg

SEQ ID NO: 871112 - RNA, 25 nt, Human
uccauggccacggcagccucagagc

SEQ ID NO: 871113 - RNA, 18 nt, Human
ucccccagcccagcuucc

SEQ ID NO: 871114 - RNA, 18 nt, Human
uccugcagcagcaggggc

SEQ ID NO: 871115 - RNA, 23 nt, Human
ucuuggcagucccaccaggggag

SEQ ID NO: 871116 - RNA, 18 nt, Human
ugagaggcaggcaagagu

SEQ ID NO: 871117 - RNA, 22 nt, Human
ugggggcuccugcagcagcagg

SEQ ID NO: 871118 - RNA, 19 nt, Human
uuuuuuuuuuuugagaggc

SEQ ID NO: 871119 - RNA, 20 nt, Human
uuuuuuuuuuuuugagaggc

SEQ ID NO: 871120 - RNA, 22 nt, Human
uuuuuuuuuuuuuuuugagagg

SEQ ID NO: 871121 - RNA, 21 nt, Human
agaaggagccugaagguggug

SEQ ID NO: 871122 - RNA, 20 nt, Human
agggaugcacuaaguuggaa

SEQ ID NO: 871123 - RNA, 27 nt, Human
agggaugcacuaaguuggaaggaccac

SEQ ID NO: 871124 - RNA, 18 nt, Human
aggugguggcgagaggag

SEQ ID NO: 871125 - RNA, 19 nt, Human
ccagaggauggcaucugga

SEQ ID NO: 871126 - RNA, 19 nt, Human
ccugaaggugguggcgaga

SEQ ID NO: 871127 - RNA, 24 nt, Human
cugaaggugguggcgagaggagcu

SEQ ID NO: 871128 - RNA, 19 nt, Human
gcuugggugggagguggcu

SEQ ID NO: 871129 - RNA, 21 nt, Human
ggagucuugcuaguggcuugg

SEQ ID NO: 871130 - RNA, 19 nt, Human
uaaguuggaaggaccacuu

SEQ ID NO: 871131 - RNA, 22 nt, Human
uggaaggaccacuuguagugug

SEQ ID NO: 871132 - RNA, 22 nt, Human
uggcaucuggaggugaaggguc

SEQ ID NO: 871133 - RNA, 19 nt, Human
uggcuugggugggaggugg

SEQ ID NO: 871134 - RNA, 19 nt, Human
ugugccagaggauggcauc

SEQ ID NO: 871135 - RNA, 21 nt, Human
uuggaaggaccacuuguagug

SEQ ID NO: 871136 - RNA, 20 nt, Human
aauuaccuuacuaauggcac

SEQ ID NO: 871137 - RNA, 19 nt, Human
acgaagcggguaggggguu

SEQ ID NO: 871138 - RNA, 21 nt, Human
caccgucucccuccgccucca

SEQ ID NO: 871139 - RNA, 19 nt, Human
cagcccacccagugacgcc

SEQ ID NO: 871140 - RNA, 23 nt, Human
ccauacuguucauuuuguucuca

SEQ ID NO: 871141 - RNA, 18 nt, Human
cccccugccucgcgccca

SEQ ID NO: 871142 - RNA, 19 nt, Human
ccgccgccgcccgggccgc

SEQ ID NO: 871143 - RNA, 20 nt, Human
ccgcgggcuccuccuccucc

SEQ ID NO: 871144 - RNA, 25 nt, Human
cgaggcggggcccuacggagaaccu

SEQ ID NO: 871145 - RNA, 22 nt, Human
cgggcuccuccuccucccccuc

SEQ ID NO: 871146 - RNA, 21 nt, Human
cuaaaauggucuggucucucu

SEQ ID NO: 871147 - RNA, 18 nt, Human
cuccuccucccccucccc

SEQ ID NO: 871148 - RNA, 19 nt, Human
cucuguuuuuggccugaag

SEQ ID NO: 871149 - RNA, 18 nt, Human
gacgccaccgucucccuc

SEQ ID NO: 871150 - RNA, 22 nt, Human
gagcccagggccccgcggacga

SEQ ID NO: 871151 - RNA, 21 nt, Human
gaggcggggcccuacggagaa

SEQ ID NO: 871152 - RNA, 21 nt, Human
gauaaugcugcgaccuguuug

SEQ ID NO: 871153 - RNA, 20 nt, Human
gccuccacuuccgccccagc

SEQ ID NO: 871154 - RNA, 19 nt, Human
gcuccuccuccucccccuc

SEQ ID NO: 871155 - RNA, 21 nt, Human
ggccucgccgcgagagcccag

SEQ ID NO: 871156 - RNA, 18 nt, Human
guuguuccacaguuucuu

SEQ ID NO: 871157 - RNA, 20 nt, Human
guuuagcugugcggccgugg

SEQ ID NO: 871158 - RNA, 18 nt, Human
uaaaauggucuggucucu

SEQ ID NO: 871159 - RNA, 21 nt, Human
uaagagacgcuuaagugacau

SEQ ID NO: 871160 - RNA, 24 nt, Human
uccacuuccgccccagcccaccca

SEQ ID NO: 871161 - RNA, 21 nt, Human
ucccuccgccuccacuuccgc

SEQ ID NO: 871162 - RNA, 18 nt, Human
uccucagucuccuccucc

SEQ ID NO: 871163 - RNA, 25 nt, Human
uccuccgccgccgcccgcuccgagg

SEQ ID NO: 871164 - RNA, 23 nt, Human
uccuccuccgccgccgcccgcua

SEQ ID NO: 871165 - RNA, 19 nt, Human
uggucuggucucucugcug

SEQ ID NO: 871166 - RNA, 24 nt, Human
uugcuguuuagcugugcggccgug

SEQ ID NO: 871167 - RNA, 24 nt, Human
uugugggcuuuuuccauacuguuc

SEQ ID NO: 871168 - RNA, 20 nt, Human
uuuuccauacuguucauuuu

SEQ ID NO: 871169 - RNA, 21 nt, Human
uuuuuuuuucuuugacaaguu

SEQ ID NO: 871170 - RNA, 18 nt, Human
uuuuuuuuuuuuucuuug

SEQ ID NO: 871171 - RNA, 24 nt, Human
uuuuuuuuuuuuuucuuugacaag

SEQ ID NO: 871172 - RNA, 19 nt, Human
aagggcagggcagcuucca

SEQ ID NO: 871173 - RNA, 18 nt, Human
agcagaaaggccacugca

SEQ ID NO: 871174 - RNA, 18 nt, Human
aggaaggaaagagacauu

SEQ ID NO: 871175 - RNA, 21 nt, Human
caucuaggagaggaaccgucc

SEQ ID NO: 871176 - RNA, 22 nt, Human
ccacucaggaugcaggcggcag

SEQ ID NO: 871177 - RNA, 18 nt, Human
cugagcacagccacaugu

SEQ ID NO: 871178 - RNA, 29 nt, Human
gcggagaagcagccucuuuauucccacaa

SEQ ID NO: 871179 - RNA, 18 nt, Human
ggagaggaaccguccgug

SEQ ID NO: 871180 - RNA, 21 nt, Human
gggcggggcuggcgcuauccg

SEQ ID NO: 871181 - RNA, 24 nt, Human
guggcucuagauacaucuucccac

SEQ ID NO: 871182 - RNA, 22 nt, Human
ucacugggcgugauuccaacau

SEQ ID NO: 871183 - RNA, 23 nt, Human
ucagcggaguuuugggguccucu

SEQ ID NO: 871184 - RNA, 19 nt, Human
ucaggggccuuccaagggc

SEQ ID NO: 871185 - RNA, 21 nt, Human
uccaagggcagggcagcuucc

SEQ ID NO: 871186 - RNA, 18 nt, Human
ucccacaugacaaaaaac

SEQ ID NO: 871187 - RNA, 21 nt, Human
uccuugggagacucugcgcuu

SEQ ID NO: 871188 - RNA, 21 nt, Human
ucuaggagaggaaccguccgu

SEQ ID NO: 871189 - RNA, 20 nt, Human
ugagaauggcagguuuugga

SEQ ID NO: 871190 - RNA, 18 nt, Human
uggccucugagcacagcc

SEQ ID NO: 871191 - RNA, 21 nt, Human
uggcucuagauacaucuuccc

SEQ ID NO: 871192 - RNA, 20 nt, Human
ugugaguugcagggagcugg

SEQ ID NO: 871193 - RNA, 28 nt, Human
uucccacaugacaaaaaacggucuuuau

SEQ ID NO: 871194 - RNA, 18 nt, Human
uuggccucugagcacagc

SEQ ID NO: 871195 - RNA, 21 nt, Human
uuggccucugagcacaggguc

SEQ ID NO: 871196 - RNA, 25 nt, Human
uuuuuuuuuuugcggagaagcagcc

SEQ ID NO: 871197 - RNA, 20 nt, Human
uuuuuuuuuuuuuuuugcgg

SEQ ID NO: 871198 - RNA, 26 nt, Human
aacacacacaugugcaugcacacaca

SEQ ID NO: 871199 - RNA, 29 nt, Human
aacacacacaugugcaugcacacagugug

SEQ ID NO: 871200 - RNA, 23 nt, Human
acaugugcaugcacacacaccca

SEQ ID NO: 871201 - RNA, 22 nt, Human
augcacacacacccaaaguccu

SEQ ID NO: 871202 - RNA, 18 nt, Human
cagcggccgccaccuucu

SEQ ID NO: 871203 - RNA, 23 nt, Human
caugcacacacacccaaaguccu

SEQ ID NO: 871204 - RNA, 18 nt, Human
ccacccaagccccccgcu

SEQ ID NO: 871205 - RNA, 18 nt, Human
ccagcggccgccaccuuc

SEQ ID NO: 871206 - RNA, 21 nt, Human
ccagcggccgccaccuucucc

SEQ ID NO: 871207 - RNA, 21 nt, Human
cccucagccaccucccgggcc

SEQ ID NO: 871208 - RNA, 23 nt, Human
cccucagccaccucccgggccuc

SEQ ID NO: 871209 - RNA, 21 nt, Human
ccgccaccuucuccaccagcu

SEQ ID NO: 871210 - RNA, 20 nt, Human
ccgccuggaccccucagccc

SEQ ID NO: 871211 - RNA, 26 nt, Human
ccuggaccccucagccaccucccggg

SEQ ID NO: 871212 - RNA, 22 nt, Human
ccuuugugcuuuaaacauuccu

SEQ ID NO: 871213 - RNA, 20 nt, Human
cgucccgccgccuggacccc

SEQ ID NO: 871214 - RNA, 27 nt, Human
cucauggaaaacacacacaugugcaug

SEQ ID NO: 871215 - RNA, 22 nt, Human
gaccccucagccaccucccggg

SEQ ID NO: 871216 - RNA, 25 nt, Human
guagaguuuccucccggucuucaaa

SEQ ID NO: 871217 - RNA, 26 nt, Human
guagaguuuccucccggucuucaaaa

SEQ ID NO: 871218 - RNA, 19 nt, Human
gugcaugcacacacaccca

SEQ ID NO: 871219 - RNA, 26 nt, Human
uaaaaagcagugccucauggaaaaca

SEQ ID NO: 871220 - RNA, 19 nt, Human
ucuaaagaugagagggggg

SEQ ID NO: 871221 - RNA, 19 nt, Human
ugagaggggggagggaaau

SEQ ID NO: 871222 - RNA, 21 nt, Human
ugagaggggggagggaaaugc

SEQ ID NO: 871223 - RNA, 20 nt, Human
uucaaaaggccagagucguc

SEQ ID NO: 871224 - RNA, 20 nt, Human
uucugguugccacccaagcc

SEQ ID NO: 871225 - RNA, 19 nt, Human
uuuuuuuuuuuuuuuugcu

SEQ ID NO: 871226 - RNA, 25 nt, Human
uuuuuuuuuuuuuuuugcucaccag

SEQ ID NO: 871227 - RNA, 21 nt, Human
aaaaaaugccacugaucucac

SEQ ID NO: 871228 - RNA, 18 nt, Human
aaaaugccacugaucuca

SEQ ID NO: 871229 - RNA, 21 nt, Human
acguaucagugcuguagacag

SEQ ID NO: 871230 - RNA, 24 nt, Human
cagcacagccuggaaauugcaucc

SEQ ID NO: 871231 - RNA, 19 nt, Human
ccacugaucucacaguuua

SEQ ID NO: 871232 - RNA, 23 nt, Human
cuugacagucacguaucagugcu

SEQ ID NO: 871233 - RNA, 20 nt, Human
uccacagcacagccuggaaa

SEQ ID NO: 871234 - RNA, 18 nt, Human
uucaaaccugcuggaaga

SEQ ID NO: 871235 - RNA, 24 nt, Human
cagcuuuauuaagacaggggcggu

SEQ ID NO: 871236 - RNA, 19 nt, Human
gacaggggcgguagaagaa

SEQ ID NO: 871237 - RNA, 19 nt, Human
uagaagaaggucuccaugc

SEQ ID NO: 871238 - RNA, 19 nt, Human
uuuuuuuuuuuuuugccga

SEQ ID NO: 871239 - RNA, 21 nt, Human
uuuuuuuuuuuuuuuugccga

SEQ ID NO: 871240 - RNA, 21 nt, Human
aaaauucaaaacuagguaacc

SEQ ID NO: 871241 - RNA, 25 nt, Human
aaaauucaaaacuagguaaccgccc

SEQ ID NO: 871242 - RNA, 23 nt, Human
aaagauuccagggaaacugcgca

SEQ ID NO: 871243 - RNA, 25 nt, Human
aacaagugacaaaauucaaaacuag

SEQ ID NO: 871244 - RNA, 23 nt, Human
aaggaugggguguguacgucacc

SEQ ID NO: 871245 - RNA, 20 nt, Human
acugcgcaacagccuggggc

SEQ ID NO: 871246 - RNA, 23 nt, Human
aggcgggagcgauccacagcagc

SEQ ID NO: 871247 - RNA, 19 nt, Human
auccacagcagcugaccca

SEQ ID NO: 871248 - RNA, 21 nt, Human
auuacagugcugucuuuaauu

SEQ ID NO: 871249 - RNA, 22 nt, Human
caacaagugacaaaauucaaaa

SEQ ID NO: 871250 - RNA, 22 nt, Human
ccccauccgagagggaaggggg

SEQ ID NO: 871251 - RNA, 18 nt, Human
cccccuucuccuccucuu

SEQ ID NO: 871252 - RNA, 19 nt, Human
ccuccagccaggaggcggg

SEQ ID NO: 871253 - RNA, 22 nt, Human
ccuccagccaggaggcgggagc

SEQ ID NO: 871254 - RNA, 26 nt, Human
ccuucuaucgcccccaccccuccuuu

SEQ ID NO: 871255 - RNA, 22 nt, Human
cgagaaauauuaaagaccagga

SEQ ID NO: 871256 - RNA, 21 nt, Human
cgucaacaacuauggcgggcg

SEQ ID NO: 871257 - RNA, 26 nt, Human
cgucgcacuccuuuuccccgagacuu

SEQ ID NO: 871258 - RNA, 18 nt, Human
cucauaagguacuugaaa

SEQ ID NO: 871259 - RNA, 18 nt, Human
cugcgcaacagccugggg

SEQ ID NO: 871260 - RNA, 21 nt, Human
cuucuaucgcccccaccccuc

SEQ ID NO: 871261 - RNA, 21 nt, Human
cuucuccuccucuuuggugcc

SEQ ID NO: 871262 - RNA, 20 nt, Human
gauccacagcagcugaccca

SEQ ID NO: 871263 - RNA, 21 nt, Human
gggcggcgggcagaggcggug

SEQ ID NO: 871264 - RNA, 23 nt, Human
uagcagucgaucaaaaagauucc

SEQ ID NO: 871265 - RNA, 20 nt, Human
ucaaaaagauuccagggaaa

SEQ ID NO: 871266 - RNA, 18 nt, Human
ucccccuucuccuccucu

SEQ ID NO: 871267 - RNA, 20 nt, Human
uccccgagacuugguacugg

SEQ ID NO: 871268 - RNA, 19 nt, Human
ucucuggccaucacuccug

SEQ ID NO: 871269 - RNA, 18 nt, Human
ucuucuccacccucgucg

SEQ ID NO: 871270 - RNA, 24 nt, Human
ugaaacuaaaauuuuugccacgaa

SEQ ID NO: 871271 - RNA, 27 nt, Human
ugacaaaauucaaaacuagguaaccgc

SEQ ID NO: 871272 - RNA, 27 nt, Human
ugcccugccauccuucuaucgccccca

SEQ ID NO: 871273 - RNA, 19 nt, Human
ugggaaggacauggucaac

SEQ ID NO: 871274 - RNA, 24 nt, Human
ugggaaggacauggucaacguagc

SEQ ID NO: 871275 - RNA, 25 nt, Human
ugggaaggacauggucaacguagca

SEQ ID NO: 871276 - RNA, 26 nt, Human
uguacacccucaacaagugacaaaau

SEQ ID NO: 871277 - RNA, 22 nt, Human
uucuccacccucgucgcacucc

SEQ ID NO: 871278 - RNA, 19 nt, Human
uugaaacuaaaauuuuugc

SEQ ID NO: 871279 - RNA, 21 nt, Human
aaacaaaaacagagggcuaga

SEQ ID NO: 871280 - RNA, 23 nt, Human
aaacaaaaacagagggcuagagg

SEQ ID NO: 871281 - RNA, 21 nt, Human
aaacaaaaacagagggcuagg

SEQ ID NO: 871282 - RNA, 19 nt, Human
aacagaauucaucaaacaa

SEQ ID NO: 871283 - RNA, 22 nt, Human
aaccaaaacaagcgccgcgccc

SEQ ID NO: 871284 - RNA, 18 nt, Human
aagaggauggguccugga

SEQ ID NO: 871285 - RNA, 20 nt, Human
acacccaaaacccacccaag

SEQ ID NO: 871286 - RNA, 18 nt, Human
acauugucaccccaggga

SEQ ID NO: 871287 - RNA, 20 nt, Human
accccgaagcugccgugggc

SEQ ID NO: 871288 - RNA, 19 nt, Human
agagguccuugccccuuug

SEQ ID NO: 871289 - RNA, 23 nt, Human
agccagcucuauuucagaagucc

SEQ ID NO: 871290 - RNA, 22 nt, Human
auccaggccacuggagccuggg

SEQ ID NO: 871291 - RNA, 21 nt, Human
caaaaacagagggcuagaggc

SEQ ID NO: 871292 - RNA, 18 nt, Human
caaaacaagcgccgcgcc

SEQ ID NO: 871293 - RNA, 24 nt, Human
caaacaaaaacagagggcuagagg

SEQ ID NO: 871294 - RNA, 25 nt, Human
caaacaaaaacagagggcuagaggc

SEQ ID NO: 871295 - RNA, 21 nt, Human
caacacagcacgucuaacgcc

SEQ ID NO: 871296 - RNA, 20 nt, Human
caacacccaaaacccaccca

SEQ ID NO: 871297 - RNA, 24 nt, Human
caagcgccgcgcccggagcugccc

SEQ ID NO: 871298 - RNA, 21 nt, Human
cacaacacagcacgucuaacg

SEQ ID NO: 871299 - RNA, 28 nt, Human
cacccaaaacccacccaagaggaugggg

SEQ ID NO: 871300 - RNA, 18 nt, Human
cacuguguguccaggggc

SEQ ID NO: 871301 - RNA, 28 nt, Human
cagaauucaucaaacaaaaacagagggc

SEQ ID NO: 871302 - RNA, 18 nt, Human
cagagagcccgaaaacga

SEQ ID NO: 871303 - RNA, 18 nt, Human
cagccaacacccaaaacc

SEQ ID NO: 871304 - RNA, 22 nt, Human
caggaacacagcuggcaaccau

SEQ ID NO: 871305 - RNA, 18 nt, Human
cagggugugagcaggcgc

SEQ ID NO: 871306 - RNA, 24 nt, Human
caucaaacaaaaacagagggcuag

SEQ ID NO: 871307 - RNA, 19 nt, Human
ccaacacccaaaacccacc

SEQ ID NO: 871308 - RNA, 22 nt, Human
ccaacacccaaaacccacccaa

SEQ ID NO: 871309 - RNA, 23 nt, Human
ccaacacccaaaacccacccaag

SEQ ID NO: 871310 - RNA, 22 nt, Human
ccacuggagccuggggaaagug

SEQ ID NO: 871311 - RNA, 20 nt, Human
ccaggccacuggagccuggg

SEQ ID NO: 871312 - RNA, 21 nt, Human
cccagccaacacccaaaaccc

SEQ ID NO: 871313 - RNA, 27 nt, Human
cccggcuccccuuacccagccaacacc

SEQ ID NO: 871314 - RNA, 20 nt, Human
cgcccggagcugcccacguc

SEQ ID NO: 871315 - RNA, 20 nt, Human
cgccgcgcccggagcugccc

SEQ ID NO: 871316 - RNA, 23 nt, Human
cuccccuuacccagccaacaccc

SEQ ID NO: 871317 - RNA, 24 nt, Human
gaccccauagguuauaacagaauu

SEQ ID NO: 871318 - RNA, 23 nt, Human
gccaacacccaaaacccacccaa

SEQ ID NO: 871319 - RNA, 21 nt, Human
gcgccgcgcccggagcugccc

SEQ ID NO: 871320 - RNA, 19 nt, Human
ggcaggagcccgccccagg

SEQ ID NO: 871321 - RNA, 20 nt, Human
ggcgcggcagcuggugcagg

SEQ ID NO: 871322 - RNA, 21 nt, Human
ggcuugcggaacugcgggcuc

SEQ ID NO: 871323 - RNA, 19 nt, Human
gggcucagagagcccgaaa

SEQ ID NO: 871324 - RNA, 21 nt, Human
ggucagggugugagcaggcgc

SEQ ID NO: 871325 - RNA, 23 nt, Human
guguguccaggggccaggaacac

SEQ ID NO: 871326 - RNA, 24 nt, Human
uacccagccaacacccaaaaccca

SEQ ID NO: 871327 - RNA, 22 nt, Human
uagaaggaaaccaaaacaagcg

SEQ ID NO: 871328 - RNA, 20 nt, Human
uagaggccaguguccaugag

SEQ ID NO: 871329 - RNA, 22 nt, Human
uagaggccaguguccaugagag

SEQ ID NO: 871330 - RNA, 22 nt, Human
uauacauugucaccccagggag

SEQ ID NO: 871331 - RNA, 23 nt, Human
ucaaacaaaaacagagggcuaga

SEQ ID NO: 871332 - RNA, 19 nt, Human
uccccggcuccccuuaccc

SEQ ID NO: 871333 - RNA, 27 nt, Human
ugaggaugccacacuguguguccaggg

SEQ ID NO: 871334 - RNA, 20 nt, Human
ugcaaacaugaggaugccac

SEQ ID NO: 871335 - RNA, 21 nt, Human
ugcaaacaugaggaugccaca

SEQ ID NO: 871336 - RNA, 22 nt, Human
ugccacacuguguguccagggg

SEQ ID NO: 871337 - RNA, 22 nt, Human
ugcccaggacucauauccugac

SEQ ID NO: 871338 - RNA, 23 nt, Human
uguccaugagagguccuugcccc

SEQ ID NO: 871339 - RNA, 25 nt, Human
uugcauauauacauugucaccccuc

SEQ ID NO: 871340 - RNA, 19 nt, Human
uuuaaagauuucucaauuu

SEQ ID NO: 871341 - RNA, 25 nt, Human
uuuuuuuuuuuuuaaagauuucuca

SEQ ID NO: 871342 - RNA, 18 nt, Human
aaaaaggagcacaacaaa

SEQ ID NO: 871343 - RNA, 20 nt, Human
aaaaaggagcacaacaaaca

SEQ ID NO: 871344 - RNA, 22 nt, Human
aaaggagcacaacaaacaugca

SEQ ID NO: 871345 - RNA, 19 nt, Human
aacagaaaaaaggagcaca

SEQ ID NO: 871346 - RNA, 23 nt, Human
aacucaacaccauugcucccaug

SEQ ID NO: 871347 - RNA, 23 nt, Human
accuuccuccaggucaccuacug

SEQ ID NO: 871348 - RNA, 24 nt, Human
agaaaaaaggagcacaacaaacau

SEQ ID NO: 871349 - RNA, 23 nt, Human
agaaacacaacuuguccccucau

SEQ ID NO: 871350 - RNA, 21 nt, Human
agaggucacauccccuaagcc

SEQ ID NO: 871351 - RNA, 23 nt, Human
agccagcaaguggcagcccccag

SEQ ID NO: 871352 - RNA, 18 nt, Human
agggaugcuucaggaugc

SEQ ID NO: 871353 - RNA, 20 nt, Human
agugagugagcaccagcugc

SEQ ID NO: 871354 - RNA, 22 nt, Human
caacagaaaaaaggagcacaac

SEQ ID NO: 871355 - RNA, 18 nt, Human
caacaggcucuuccuacu

SEQ ID NO: 871356 - RNA, 27 nt, Human
caacaggcucuuccuacuucucucauc

SEQ ID NO: 871357 - RNA, 23 nt, Human
caacuuguccccucaugguuucc

SEQ ID NO: 871358 - RNA, 24 nt, Human
cagccagcaaguggcagcccccag

SEQ ID NO: 871359 - RNA, 19 nt, Human
caggcucuuccuacuucuc

SEQ ID NO: 871360 - RNA, 23 nt, Human
cagucagacuguagagugucacc

SEQ ID NO: 871361 - RNA, 18 nt, Human
cauuucaccugcugucug

SEQ ID NO: 871362 - RNA, 18 nt, Human
ccaacagaaaaaaggagc

SEQ ID NO: 871363 - RNA, 19 nt, Human
ccagcugcuggggauccag

SEQ ID NO: 871364 - RNA, 18 nt, Human
cggaaaacagaaacacaa

SEQ ID NO: 871365 - RNA, 19 nt, Human
cucaaggauuauucuggga

SEQ ID NO: 871366 - RNA, 27 nt, Human
cuccaggucaccuacuguagagcucgc

SEQ ID NO: 871367 - RNA, 25 nt, Human
cucguacucccccugguauucgaca

SEQ ID NO: 871368 - RNA, 23 nt, Human
cugcggcuucauucuugaaguca

SEQ ID NO: 871369 - RNA, 24 nt, Human
gaaaaaaggagcacaacaaacaug

SEQ ID NO: 871370 - RNA, 20 nt, Human
gaagguuguauggcacagug

SEQ ID NO: 871371 - RNA, 20 nt, Human
gacuuguagacaacaggcuc

SEQ ID NO: 871372 - RNA, 19 nt, Human
gcggaaaacagaaacacaa

SEQ ID NO: 871373 - RNA, 20 nt, Human
gcuuuuggccaggguggccc

SEQ ID NO: 871374 - RNA, 21 nt, Human
ggaaaacagaaacacaacuug

SEQ ID NO: 871375 - RNA, 23 nt, Human
ggcuucaccugggcccuuccgca

SEQ ID NO: 871376 - RNA, 21 nt, Human
ggggauccagauguggcucgu

SEQ ID NO: 871377 - RNA, 18 nt, Human
gugagaucaagaacccac

SEQ ID NO: 871378 - RNA, 19 nt, Human
guggcccugacacgaaggu

SEQ ID NO: 871379 - RNA, 20 nt, Human
guggcccuuuuuauuugcuu

SEQ ID NO: 871380 - RNA, 21 nt, Human
guguagaguccuugaucauuc

SEQ ID NO: 871381 - RNA, 23 nt, Human
guguguagaguccuugaucauuc

SEQ ID NO: 871382 - RNA, 22 nt, Human
uacagaugagaaaacuuaggac

SEQ ID NO: 871383 - RNA, 24 nt, Human
uacuucucucaucccuuguccgug

SEQ ID NO: 871384 - RNA, 19 nt, Human
uaguucauggauccuccgu

SEQ ID NO: 871385 - RNA, 20 nt, Human
uauguguacguguguauaua

SEQ ID NO: 871386 - RNA, 22 nt, Human
ucacauccccuaagccucaguc

SEQ ID NO: 871387 - RNA, 25 nt, Human
ucccaggguugcucagccagccgua

SEQ ID NO: 871388 - RNA, 22 nt, Human
ucccccauuacagaugagaaaa

SEQ ID NO: 871389 - RNA, 23 nt, Human
uccccuaagccucagucaguguu

SEQ ID NO: 871390 - RNA, 21 nt, Human
uccguggcggaaaacagaaac

SEQ ID NO: 871391 - RNA, 19 nt, Human
ucgacagaauaguacacug

SEQ ID NO: 871392 - RNA, 24 nt, Human
ucgcuaagccauuccccucugcac

SEQ ID NO: 871393 - RNA, 23 nt, Human
ucuagacuuguagacaacaggcu

SEQ ID NO: 871394 - RNA, 22 nt, Human
ucucaaggauuauucugggaaa

SEQ ID NO: 871395 - RNA, 18 nt, Human
ucugaugguugcuucuag

SEQ ID NO: 871396 - RNA, 26 nt, Human
ucuguacuuuaccaacagaaaaaagg

SEQ ID NO: 871397 - RNA, 28 nt, Human
ucuguguguguguguuuagcaggugugu

SEQ ID NO: 871398 - RNA, 18 nt, Human
ugaagucacuuuucccag

SEQ ID NO: 871399 - RNA, 18 nt, Human
ugaaucagucagacugua

SEQ ID NO: 871400 - RNA, 18 nt, Human
ugagaucaagaacccacc

SEQ ID NO: 871401 - RNA, 19 nt, Human
ugagaucaagaacccacca

SEQ ID NO: 871402 - RNA, 21 nt, Human
uggccgugaugucaucaguga

SEQ ID NO: 871403 - RNA, 21 nt, Human
ugggcucuccaagccacccag

SEQ ID NO: 871404 - RNA, 23 nt, Human
ugggcucuccaagccacccagug

SEQ ID NO: 871405 - RNA, 25 nt, Human
uggguguauuuauguguacgugugu

SEQ ID NO: 871406 - RNA, 24 nt, Human
uguacuuuaccaacagaaaaaagg

SEQ ID NO: 871407 - RNA, 24 nt, Human
uguagguaauucccccauuacaga

SEQ ID NO: 871408 - RNA, 18 nt, Human
uguguacguguguauaua

SEQ ID NO: 871409 - RNA, 27 nt, Human
uguguguguguguuuagcaggugugua

SEQ ID NO: 871410 - RNA, 24 nt, Human
uguugguugagaguacagagaggu

SEQ ID NO: 871411 - RNA, 20 nt, Human
uuccuccaggucaccuacug

SEQ ID NO: 871412 - RNA, 25 nt, Human
uugaagucagugagaucaagaaccc

SEQ ID NO: 871413 - RNA, 27 nt, Human
uugaagucagugagaucaagaacccac

SEQ ID NO: 871414 - RNA, 19 nt, Human
uuguccccucaugguuucc

SEQ ID NO: 871415 - RNA, 24 nt, Human
uuuuuuuuuuugaccgcuuuuggc

SEQ ID NO: 871416 - RNA, 26 nt, Human
uuuuuuuuuuuuuugaccgcuuuugg

SEQ ID NO: 871417 - RNA, 25 nt, Human
uuuuuuuuuuuuuuugaccgcuuuu

SEQ ID NO: 871418 - RNA, 20 nt, Human
aaccuuuugcuccacccccu

SEQ ID NO: 871419 - RNA, 18 nt, Human
agaauccuccauccagca

SEQ ID NO: 871420 - RNA, 20 nt, Human
agagcacgcuucccaucuug

SEQ ID NO: 871421 - RNA, 23 nt, Human
agaggaacccagggcggcagcag

SEQ ID NO: 871422 - RNA, 19 nt, Human
agcagcagggggccccagg

SEQ ID NO: 871423 - RNA, 23 nt, Human
aggaaggaugaaggaugaguguc

SEQ ID NO: 871424 - RNA, 23 nt, Human
agguggggaccugggugggcagg

SEQ ID NO: 871425 - RNA, 23 nt, Human
aguccucucuccucccuuuguug

SEQ ID NO: 871426 - RNA, 19 nt, Human
auaccacuuagcacagagu

SEQ ID NO: 871427 - RNA, 21 nt, Human
auagaggaacccagggcggca

SEQ ID NO: 871428 - RNA, 19 nt, Human
auccugacucugucccugg

SEQ ID NO: 871429 - RNA, 19 nt, Human
cacagcagcagggggcccc

SEQ ID NO: 871430 - RNA, 24 nt, Human
caccugagccugugcacaggcccu

SEQ ID NO: 871431 - RNA, 21 nt, Human
cagaauccuccauccagcauc

SEQ ID NO: 871432 - RNA, 23 nt, Human
cagaauccuccauccagcaucuu

SEQ ID NO: 871433 - RNA, 22 nt, Human
cagauaccacuuagcacagagu

SEQ ID NO: 871434 - RNA, 24 nt, Human
cagccuaagcugggggucaaaggc

SEQ ID NO: 871435 - RNA, 18 nt, Human
caggaaggaugaaggaug

SEQ ID NO: 871436 - RNA, 23 nt, Human
caggacagagcuggugcugaagg

SEQ ID NO: 871437 - RNA, 21 nt, Human
caucuuguggacucggagggu

SEQ ID NO: 871438 - RNA, 24 nt, Human
cauugcacgcaugcggggcaugug

SEQ ID NO: 871439 - RNA, 23 nt, Human
cauuuguuaacagucuguccucc

SEQ ID NO: 871440 - RNA, 21 nt, Human
ccaaccuuuugcuccaccccc

SEQ ID NO: 871441 - RNA, 20 nt, Human
ccacaguuggggggaagggc

SEQ ID NO: 871442 - RNA, 20 nt, Human
ccaccagggggggaaccagg

SEQ ID NO: 871443 - RNA, 21 nt, Human
ccagugaguccucucuccucc

SEQ ID NO: 871444 - RNA, 24 nt, Human
ccauccagcaucuucccuggucac

SEQ ID NO: 871445 - RNA, 20 nt, Human
ccaucgacccaggacagagc

SEQ ID NO: 871446 - RNA, 22 nt, Human
ccauggggcugggcuuuccucc

SEQ ID NO: 871447 - RNA, 23 nt, Human
cccaaccuuuugcuccacccccu

SEQ ID NO: 871448 - RNA, 21 nt, Human
cccagccugccacccacccac

SEQ ID NO: 871449 - RNA, 18 nt, Human
ccccagauaccacuuagc

SEQ ID NO: 871450 - RNA, 20 nt, Human
ccccccgcaguccaugcucc

SEQ ID NO: 871451 - RNA, 23 nt, Human
ccccuggccccuucacuccccca

SEQ ID NO: 871452 - RNA, 19 nt, Human
ccccuucacucccccaggg

SEQ ID NO: 871453 - RNA, 20 nt, Human
cccuggccccuucacucccc

SEQ ID NO: 871454 - RNA, 22 nt, Human
ccgcucccuccccgccuagccc

SEQ ID NO: 871455 - RNA, 22 nt, Human
ccguccacaaaugagguucaga

SEQ ID NO: 871456 - RNA, 21 nt, Human
ccuaagcugggggucaaaggc

SEQ ID NO: 871457 - RNA, 20 nt, Human
ccuccccgccuagccccugc

SEQ ID NO: 871458 - RNA, 25 nt, Human
ccucucuccucccuuuguugacucc

SEQ ID NO: 871459 - RNA, 25 nt, Human
ccuugugucacagccgacacucuug

SEQ ID NO: 871460 - RNA, 19 nt, Human
cgacccaggacagagcugg

SEQ ID NO: 871461 - RNA, 18 nt, Human
cggcgggaugggcccggc

SEQ ID NO: 871462 - RNA, 18 nt, Human
cgggaugggcccggcccg

SEQ ID NO: 871463 - RNA, 22 nt, Human
cuaggcccagccugccacccac

SEQ ID NO: 871464 - RNA, 21 nt, Human
cuccacuagacugugaacucc

SEQ ID NO: 871465 - RNA, 18 nt, Human
cucccuccccgccuagcc

SEQ ID NO: 871466 - RNA, 26 nt, Human
cuccucccuuuguugacuccugaccg

SEQ ID NO: 871467 - RNA, 21 nt, Human
cugacucugucccuggauuuc

SEQ ID NO: 871468 - RNA, 21 nt, Human
cugccacaaccugauuuguac

SEQ ID NO: 871469 - RNA, 21 nt, Human
cugccacccacccaccacuca

SEQ ID NO: 871470 - RNA, 25 nt, Human
cugccacccacccaccacucacuug

SEQ ID NO: 871471 - RNA, 20 nt, Human
cuggcuuacugacaccugag

SEQ ID NO: 871472 - RNA, 21 nt, Human
cuuguggacuugcuucccauc

SEQ ID NO: 871473 - RNA, 19 nt, Human
gaaggccccaucagcauga

SEQ ID NO: 871474 - RNA, 19 nt, Human
gacacucuugaccagugag

SEQ ID NO: 871475 - RNA, 23 nt, Human
gcagagcucccucugggcugcag

SEQ ID NO: 871476 - RNA, 23 nt, Human
gcaguccaugcuccagccauccu

SEQ ID NO: 871477 - RNA, 24 nt, Human
gcauagccagccuaagcugggggu

SEQ ID NO: 871478 - RNA, 26 nt, Human
gccacaaccugauuuguacucugauc

SEQ ID NO: 871479 - RNA, 20 nt, Human
gcggcagcaggaaggaugaa

SEQ ID NO: 871480 - RNA, 24 nt, Human
ggaagggcaaggccauggggcugg

SEQ ID NO: 871481 - RNA, 21 nt, Human
ggacucggaggguuccgagca

SEQ ID NO: 871482 - RNA, 18 nt, Human
ggcaaggccauggggcug

SEQ ID NO: 871483 - RNA, 19 nt, Human
gggcacagcagcagggggc

SEQ ID NO: 871484 - RNA, 22 nt, Human
gggcacagcagcagggggcccc

SEQ ID NO: 871485 - RNA, 20 nt, Human
uagaggaacccagggcggca

SEQ ID NO: 871486 - RNA, 22 nt, Human
uauagaggaacccagggcggca

SEQ ID NO: 871487 - RNA, 23 nt, Human
uauuaucaucaucagcacagugc

SEQ ID NO: 871488 - RNA, 22 nt, Human
ucccaaccuuuugcuccacccc

SEQ ID NO: 871489 - RNA, 23 nt, Human
ucccacaugcagagcucccucug

SEQ ID NO: 871490 - RNA, 25 nt, Human
ucccuggucacauggucccaaccuu

SEQ ID NO: 871491 - RNA, 23 nt, Human
uccuuggggggccacaguugggg

SEQ ID NO: 871492 - RNA, 22 nt, Human
ucgacccaggacagagcuggug

SEQ ID NO: 871493 - RNA, 20 nt, Human
ucuuggggaccuccuugggg

SEQ ID NO: 871494 - RNA, 20 nt, Human
ugacugggguggagaucuug

SEQ ID NO: 871495 - RNA, 24 nt, Human
ugacugggguggagaucuugggga

SEQ ID NO: 871496 - RNA, 18 nt, Human
ugagcagcgagguuuaua

SEQ ID NO: 871497 - RNA, 20 nt, Human
ugaggccugccacaaccuga

SEQ ID NO: 871498 - RNA, 21 nt, Human
ugaguccucucuccucccuuu

SEQ ID NO: 871499 - RNA, 18 nt, Human
ugccauuuguuaacaguc

SEQ ID NO: 871500 - RNA, 22 nt, Human
ugcggggcacauggugggcauu

SEQ ID NO: 871501 - RNA, 24 nt, Human
uggauuucuggcuuacugacaccu

SEQ ID NO: 871502 - RNA, 22 nt, Human
ugggaugccccaggaagggcaa

SEQ ID NO: 871503 - RNA, 21 nt, Human
uggggaccugggugggcaggu

SEQ ID NO: 871504 - RNA, 18 nt, Human
uggggcugggcuuuccuc

SEQ ID NO: 871505 - RNA, 19 nt, Human
uggggcugggcuuuccucc

SEQ ID NO: 871506 - RNA, 24 nt, Human
ugggggcagcugagcagcgagguu

SEQ ID NO: 871507 - RNA, 20 nt, Human
uggugggcauucagggauga

SEQ ID NO: 871508 - RNA, 22 nt, Human
uguggcugugccagcagggagu

SEQ ID NO: 871509 - RNA, 20 nt, Human
ugugggacuugugggggcag

SEQ ID NO: 871510 - RNA, 23 nt, Human
uuagcacagagucgagcccauag

SEQ ID NO: 871511 - RNA, 19 nt, Human
uucucuguuccccccgcag

SEQ ID NO: 871512 - RNA, 23 nt, Human
uuucuggcuuacugacaccugag

SEQ ID NO: 871513 - RNA, 25 nt, Human
uuugcuccacccccuucucuguucc

SEQ ID NO: 871514 - RNA, 18 nt, Human
uuuugcuccacccccuuc

SEQ ID NO: 871515 - RNA, 24 nt, Human
uuuuuuuuuuuuggagagugcuca

SEQ ID NO: 871516 - RNA, 20 nt, Human
uuuuuuuuuuuuuuuuuugg

SEQ ID NO: 871517 - RNA, 20 nt, Human
aaaaaccaaaaggcaguaca

SEQ ID NO: 871518 - RNA, 24 nt, Human
aaaacaaaagcaaaaagagugcaa

SEQ ID NO: 871519 - RNA, 23 nt, Human
aaacaaacguggggaaaaagcaa

SEQ ID NO: 871520 - RNA, 22 nt, Human
aaagccccuugcccugauucua

SEQ ID NO: 871521 - RNA, 18 nt, Human
aaccucaguccugcaucc

SEQ ID NO: 871522 - RNA, 25 nt, Human
aagagauggcaggcuuaaaaaggaa

SEQ ID NO: 871523 - RNA, 24 nt, Human
aaggcacccaguccagaguagugc

SEQ ID NO: 871524 - RNA, 24 nt, Human
aaggcacucaccuaucacuaaccc

SEQ ID NO: 871525 - RNA, 18 nt, Human
aauccuucucucucugcc

SEQ ID NO: 871526 - RNA, 20 nt, Human
aaucucagucuccugaucug

SEQ ID NO: 871527 - RNA, 23 nt, Human
aaugccagaauccuggaaaugag

SEQ ID NO: 871528 - RNA, 21 nt, Human
accagccaccccccuuuguug

SEQ ID NO: 871529 - RNA, 23 nt, Human
accccagaccuccuccccuucuc

SEQ ID NO: 871530 - RNA, 24 nt, Human
accuauaccaauccaauccagggg

SEQ ID NO: 871531 - RNA, 23 nt, Human
acgcugugugcacggacagcucc

SEQ ID NO: 871532 - RNA, 22 nt, Human
acucugggagcaaccucagucc

SEQ ID NO: 871533 - RNA, 22 nt, Human
agacaggaaagaugcucccuaa

SEQ ID NO: 871534 - RNA, 18 nt, Human
agaguaacauguaaugug

SEQ ID NO: 871535 - RNA, 19 nt, Human
agcagcucccuuccgcaga

SEQ ID NO: 871536 - RNA, 18 nt, Human
agccagaagccagggccg

SEQ ID NO: 871537 - RNA, 22 nt, Human
agcccaacagaggugcaaacug

SEQ ID NO: 871538 - RNA, 22 nt, Human
agcugugcaugccuggagcccc

SEQ ID NO: 871539 - RNA, 24 nt, Human
aggaaaaguaccagacagacagaa

SEQ ID NO: 871540 - RNA, 21 nt, Human
aggagggugggaaagcguggg

SEQ ID NO: 871541 - RNA, 19 nt, Human
aggaugucuccgagcaaaa

SEQ ID NO: 871542 - RNA, 18 nt, Human
aggcagcccagaaaggag

SEQ ID NO: 871543 - RNA, 19 nt, Human
agggauggugggucugagc

SEQ ID NO: 871544 - RNA, 18 nt, Human
agggaugucauagcagcc

SEQ ID NO: 871545 - RNA, 23 nt, Human
auaggauguggccaggagaguca

SEQ ID NO: 871546 - RNA, 29 nt, Human
aucucgcacaccucugcagucccuuccaa

SEQ ID NO: 871547 - RNA, 19 nt, Human
auuuccacaaauauuucua

SEQ ID NO: 871548 - RNA, 18 nt, Human
caaaaagagugcaaaggc

SEQ ID NO: 871549 - RNA, 19 nt, Human
caaaagcaaaaagagugca

SEQ ID NO: 871550 - RNA, 22 nt, Human
caaaaugccagaucugccugcg

SEQ ID NO: 871551 - RNA, 21 nt, Human
caacacaggaguugaaagagc

SEQ ID NO: 871552 - RNA, 22 nt, Human
caacuacaaaaggggacuaaug

SEQ ID NO: 871553 - RNA, 20 nt, Human
caccagccaccccccuuugu

SEQ ID NO: 871554 - RNA, 18 nt, Human
cacgcaaacacacacaca

SEQ ID NO: 871555 - RNA, 18 nt, Human
cacgcacagccaccggcg

SEQ ID NO: 871556 - RNA, 26 nt, Human
cagaaccaagauggcuggacucaaau

SEQ ID NO: 871557 - RNA, 19 nt, Human
cagagaacgcugugugcac

SEQ ID NO: 871558 - RNA, 23 nt, Human
cagagcuguucugcaaagaaaaa

SEQ ID NO: 871559 - RNA, 20 nt, Human
cagcagguuugcacagggug

SEQ ID NO: 871560 - RNA, 19 nt, Human
cagcauuucuaggguacgu

SEQ ID NO: 871561 - RNA, 20 nt, Human
cagccaccggcgacucuagc

SEQ ID NO: 871562 - RNA, 20 nt, Human
cagcccagaaaggaggcaca

SEQ ID NO: 871563 - RNA, 18 nt, Human
caggaaccagcucaggag

SEQ ID NO: 871564 - RNA, 18 nt, Human
caggaggccaccugaucc

SEQ ID NO: 871565 - RNA, 23 nt, Human
caugacagccaggagcauccugg

SEQ ID NO: 871566 - RNA, 23 nt, Human
cauggaauuaguccacagcauuu

SEQ ID NO: 871567 - RNA, 18 nt, Human
ccagaaaggaggcacagg

SEQ ID NO: 871568 - RNA, 18 nt, Human
ccagaccuccuccccuuc

SEQ ID NO: 871569 - RNA, 22 nt, Human
ccagaccuccuccccuucucuc

SEQ ID NO: 871570 - RNA, 23 nt, Human
ccaucugacaaagacuguucuga

SEQ ID NO: 871571 - RNA, 23 nt, Human
cccacaguggcucaccagggagg

SEQ ID NO: 871572 - RNA, 19 nt, Human
cccacgcacagccaccggc

SEQ ID NO: 871573 - RNA, 20 nt, Human
cccacgcacagccaccggcg

SEQ ID NO: 871574 - RNA, 19 nt, Human
cccagaaaggaggcacagg

SEQ ID NO: 871575 - RNA, 23 nt, Human
cccagaccuccuccccuucucuc

SEQ ID NO: 871576 - RNA, 18 nt, Human
ccccacgcacagccaccg

SEQ ID NO: 871577 - RNA, 18 nt, Human
cccggaagcgagaagcag

SEQ ID NO: 871578 - RNA, 23 nt, Human
ccgccuucccagcagcucccuuc

SEQ ID NO: 871579 - RNA, 22 nt, Human
ccgcggacucuggaaaccccag

SEQ ID NO: 871580 - RNA, 20 nt, Human
ccggccaagagauggcgggg

SEQ ID NO: 871581 - RNA, 23 nt, Human
ccggcgacucuagccacccugga

SEQ ID NO: 871582 - RNA, 21 nt, Human
ccuaucacuaacccuuucgaa

SEQ ID NO: 871583 - RNA, 18 nt, Human
ccucauuccacucaucuc

SEQ ID NO: 871584 - RNA, 19 nt, Human
ccuccugucccuccagccc

SEQ ID NO: 871585 - RNA, 18 nt, Human
ccucugcagggccaggga

SEQ ID NO: 871586 - RNA, 22 nt, Human
ccucugcagggccagggaugaa

SEQ ID NO: 871587 - RNA, 21 nt, Human
ccucugggcuacccgaggcuc

SEQ ID NO: 871588 - RNA, 22 nt, Human
ccugcgcuccuuucagacuaga

SEQ ID NO: 871589 - RNA, 21 nt, Human
ccuggauaguaaaggugcccu

SEQ ID NO: 871590 - RNA, 18 nt, Human
ccuggggccucauuccac

SEQ ID NO: 871591 - RNA, 21 nt, Human
cgcacugcccaagacacuguu

SEQ ID NO: 871592 - RNA, 21 nt, Human
cgcucuggcgaccccggaagc

SEQ ID NO: 871593 - RNA, 19 nt, Human
cggcacagacaggaaagau

SEQ ID NO: 871594 - RNA, 19 nt, Human
cgggaggggcgcucuggcg

SEQ ID NO: 871595 - RNA, 21 nt, Human
cucacuuucaaagagauggca

SEQ ID NO: 871596 - RNA, 19 nt, Human
cucauuccacucaucucgc

SEQ ID NO: 871597 - RNA, 19 nt, Human
cuccccuucucucgcacga

SEQ ID NO: 871598 - RNA, 24 nt, Human
cuccuccccuucucucgcacgauc

SEQ ID NO: 871599 - RNA, 24 nt, Human
cuccugagccaacacaggaguuga

SEQ ID NO: 871600 - RNA, 22 nt, Human
cucuggcgaccccggaagcgag

SEQ ID NO: 871601 - RNA, 18 nt, Human
cugaaaggcacucaccua

SEQ ID NO: 871602 - RNA, 18 nt, Human
cugaucugaauaauggac

SEQ ID NO: 871603 - RNA, 20 nt, Human
cugaucugaauaauggacac

SEQ ID NO: 871604 - RNA, 24 nt, Human
cugcaggccccaaacucaccuucu

SEQ ID NO: 871605 - RNA, 21 nt, Human
cugggagcaaccucaguccug

SEQ ID NO: 871606 - RNA, 27 nt, Human
cuucuuagcaaaaccgcggacucuggg

SEQ ID NO: 871607 - RNA, 18 nt, Human
gagauggcaggcuuaaaa

SEQ ID NO: 871608 - RNA, 21 nt, Human
gagcugugcaugccuggagcc

SEQ ID NO: 871609 - RNA, 20 nt, Human
gagggggcuggggagcacag

SEQ ID NO: 871610 - RNA, 24 nt, Human
gccagggccgccuggcaggccuau

SEQ ID NO: 871611 - RNA, 18 nt, Human
gcccuccugucccuccag

SEQ ID NO: 871612 - RNA, 23 nt, Human
ggaauacauacacugugggguua

SEQ ID NO: 871613 - RNA, 18 nt, Human
ggagccccucacccaccu

SEQ ID NO: 871614 - RNA, 21 nt, Human
ggauaguaaaggugcccuuuc

SEQ ID NO: 871615 - RNA, 24 nt, Human
ggguggcgggaggggcgcucuggc

SEQ ID NO: 871616 - RNA, 18 nt, Human
gucccuccagcccucccu

SEQ ID NO: 871617 - RNA, 18 nt, Human
gugaaguaggaggguggg

SEQ ID NO: 871618 - RNA, 24 nt, Human
gugcacgcaaacacacacacacac

SEQ ID NO: 871619 - RNA, 23 nt, Human
gugcaugccuggagccccuggga

SEQ ID NO: 871620 - RNA, 21 nt, Human
guggcucaccagggagggcag

SEQ ID NO: 871621 - RNA, 22 nt, Human
guggucucuggcaaguucccuu

SEQ ID NO: 871622 - RNA, 19 nt, Human
guugcugagcugaucaagu

SEQ ID NO: 871623 - RNA, 23 nt, Human
uaaaacaaaagcaaaaagagugc

SEQ ID NO: 871624 - RNA, 24 nt, Human
uaaaacaaaagcaaaaagagugca

SEQ ID NO: 871625 - RNA, 18 nt, Human
uaaaaugaacagccaaua

SEQ ID NO: 871626 - RNA, 23 nt, Human
uaaaaugaacagccaauacucuc

SEQ ID NO: 871627 - RNA, 19 nt, Human
uaaugggcuuggucuguga

SEQ ID NO: 871628 - RNA, 20 nt, Human
uaaugggcuuggucugugau

SEQ ID NO: 871629 - RNA, 19 nt, Human
uacccgaggcucugcaggc

SEQ ID NO: 871630 - RNA, 23 nt, Human
uaucaaaaaauaaugcaugaggu

SEQ ID NO: 871631 - RNA, 21 nt, Human
ucaccuaucacuaacccuuuc

SEQ ID NO: 871632 - RNA, 19 nt, Human
ucacgggccugcuccauac

SEQ ID NO: 871633 - RNA, 18 nt, Human
ucacuuagauacacuggg

SEQ ID NO: 871634 - RNA, 18 nt, Human
uccaaagaauugaacucc

SEQ ID NO: 871635 - RNA, 20 nt, Human
uccacaguguugcugagcug

SEQ ID NO: 871636 - RNA, 18 nt, Human
uccgcccuccugucccuc

SEQ ID NO: 871637 - RNA, 21 nt, Human
uccugauaaaauggcagagau

SEQ ID NO: 871638 - RNA, 18 nt, Human
ucgguguuucugugucua

SEQ ID NO: 871639 - RNA, 18 nt, Human
ucucuggcaaguucccuc

SEQ ID NO: 871640 - RNA, 24 nt, Human
ucugcagcagguuugcacagggug

SEQ ID NO: 871641 - RNA, 18 nt, Human
ucugcuucgagaagaggc

SEQ ID NO: 871642 - RNA, 23 nt, Human
ucuggaaggacucagcgcuugca

SEQ ID NO: 871643 - RNA, 22 nt, Human
ugacguguuuaaaacaaaagca

SEQ ID NO: 871644 - RNA, 23 nt, Human
ugcaaagaaaaaccaaaaggcag

SEQ ID NO: 871645 - RNA, 23 nt, Human
ugcagcggagccccucacccacc

SEQ ID NO: 871646 - RNA, 18 nt, Human
ugccagaauccuggaaau

SEQ ID NO: 871647 - RNA, 18 nt, Human
ugccccauuuggcaccag

SEQ ID NO: 871648 - RNA, 18 nt, Human
ugccucguccgccuuccc

SEQ ID NO: 871649 - RNA, 21 nt, Human
ugccucguccgccuucccagc

SEQ ID NO: 871650 - RNA, 20 nt, Human
ugccuggagccccugggagc

SEQ ID NO: 871651 - RNA, 20 nt, Human
uggaaaccccagaccuccuc

SEQ ID NO: 871652 - RNA, 20 nt, Human
uggcagagaugucaugaaca

SEQ ID NO: 871653 - RNA, 22 nt, Human
uggcgaguggcccacaguggcu

SEQ ID NO: 871654 - RNA, 19 nt, Human
uggcgggguggcgggaggg

SEQ ID NO: 871655 - RNA, 22 nt, Human
ugggagcccaugacagccagga

SEQ ID NO: 871656 - RNA, 20 nt, Human
ugggagccuggcagguuggg

SEQ ID NO: 871657 - RNA, 20 nt, Human
ugggcauaaaaaucagcacc

SEQ ID NO: 871658 - RNA, 25 nt, Human
uggggagcacagggcuauuggcaag

SEQ ID NO: 871659 - RNA, 21 nt, Human
ugguaaccuguagaguaacau

SEQ ID NO: 871660 - RNA, 21 nt, Human
ugucccaucugacaaagacug

SEQ ID NO: 871661 - RNA, 21 nt, Human
ugucccuccagcccuccucug

SEQ ID NO: 871662 - RNA, 18 nt, Human
ugugcaugccuggagccc

SEQ ID NO: 871663 - RNA, 18 nt, Human
uucaaagagauggcaggc

SEQ ID NO: 871664 - RNA, 19 nt, Human
uucacagucgguguuucug

SEQ ID NO: 871665 - RNA, 18 nt, Human
uuccagagcuguucugca

SEQ ID NO: 871666 - RNA, 22 nt, Human
uuccgcagagugcuuaacagcu

SEQ ID NO: 871667 - RNA, 23 nt, Human
uucucaacaauaaucccacccau

SEQ ID NO: 871668 - RNA, 22 nt, Human
uucugcugcuugcaagccaugu

SEQ ID NO: 871669 - RNA, 22 nt, Human
uucugcuucgagaagaggcgga

SEQ ID NO: 871670 - RNA, 19 nt, Human
uucuggcaagcccaacuau

SEQ ID NO: 871671 - RNA, 24 nt, Human
uugaugacguguuuaaaacaaaag

SEQ ID NO: 871672 - RNA, 23 nt, Human
uugcaagccauguggucucuggc

SEQ ID NO: 871673 - RNA, 22 nt, Human
uugcugagcugaucaagugugu

SEQ ID NO: 871674 - RNA, 19 nt, Human
uuuuuugguuuuucauuuu

SEQ ID NO: 871675 - RNA, 21 nt, Human
aacaccaugaucgaggaccuc

SEQ ID NO: 871676 - RNA, 20 nt, Human
aacuacagacacauucacug

SEQ ID NO: 871677 - RNA, 19 nt, Human
aaguaccggagcgcgaagc

SEQ ID NO: 871678 - RNA, 20 nt, Human
aaucacggccagaaaccacc

SEQ ID NO: 871679 - RNA, 18 nt, Human
aaugccuauuccucgaac

SEQ ID NO: 871680 - RNA, 22 nt, Human
acuucacauccaaucacggcca

SEQ ID NO: 871681 - RNA, 19 nt, Human
agaaaccaccuccaaugcc

SEQ ID NO: 871682 - RNA, 21 nt, Human
cacacaaugucuguuaaauag

SEQ ID NO: 871683 - RNA, 22 nt, Human
cacggccagaaaccaccuccaa

SEQ ID NO: 871684 - RNA, 26 nt, Human
cacggccagaaaccaccuccaaugcc

SEQ ID NO: 871685 - RNA, 25 nt, Human
cagaaagagcccaucuuuuucuguu

SEQ ID NO: 871686 - RNA, 19 nt, Human
cagcccaccacacaauguc

SEQ ID NO: 871687 - RNA, 26 nt, Human
ccaaugccuauuccucgaaccaucca

SEQ ID NO: 871688 - RNA, 19 nt, Human
ccacacaaugucuguuaag

SEQ ID NO: 871689 - RNA, 27 nt, Human
ccccgcuauccaccagaccaccugguc

SEQ ID NO: 871690 - RNA, 22 nt, Human
ccgcuauccaccagaccaccug

SEQ ID NO: 871691 - RNA, 20 nt, Human
ccucgaaccauccaagcucu

SEQ ID NO: 871692 - RNA, 24 nt, Human
cggccagaaaccaccuccaaugcc

SEQ ID NO: 871693 - RNA, 21 nt, Human
cuaaguaaaaauaucucugcu

SEQ ID NO: 871694 - RNA, 19 nt, Human
gaucgaggaccucuucuac

SEQ ID NO: 871695 - RNA, 20 nt, Human
uaaaagaagagaauauucau

SEQ ID NO: 871696 - RNA, 21 nt, Human
uaacacaacuacagacacauu

SEQ ID NO: 871697 - RNA, 25 nt, Human
uaacacaacuacagacacauucacu

SEQ ID NO: 871698 - RNA, 22 nt, Human
uccaaugccuauuccucgaacc

SEQ ID NO: 871699 - RNA, 23 nt, Human
uccucgaaccauccaagcuccua

SEQ ID NO: 871700 - RNA, 21 nt, Human
ugcaaacuaacacaacuacag

SEQ ID NO: 871701 - RNA, 20 nt, Human
ugcagagggcuggcugggcc

SEQ ID NO: 871702 - RNA, 19 nt, Human
uguuuuaaaagaagagaaa

SEQ ID NO: 871703 - RNA, 20 nt, Human
uucgucucaucagagagaga

SEQ ID NO: 871704 - RNA, 23 nt, Human
acagcagcggcaacaugcgguag

SEQ ID NO: 871705 - RNA, 20 nt, Human
accuugucacuggagagggg

SEQ ID NO: 871706 - RNA, 22 nt, Human
agaggggagaaggaacuggagu

SEQ ID NO: 871707 - RNA, 21 nt, Human
caccuaggugcaggcugggcu

SEQ ID NO: 871708 - RNA, 25 nt, Human
cagcagaaacagcagcggcaacaug

SEQ ID NO: 871709 - RNA, 21 nt, Human
cagccaagcugagcaaggaca

SEQ ID NO: 871710 - RNA, 19 nt, Human
cccgcagccuagacugggg

SEQ ID NO: 871711 - RNA, 23 nt, Human
ccuaggugcaggcugggcuacag

SEQ ID NO: 871712 - RNA, 20 nt, Human
cgucccagcagaaacagcag

SEQ ID NO: 871713 - RNA, 19 nt, Human
gaggggagaaggaacugga

SEQ ID NO: 871714 - RNA, 24 nt, Human
gcagcggcaacaugcgguaggcac

SEQ ID NO: 871715 - RNA, 19 nt, Human
gcugagcaaggacaggucc

SEQ ID NO: 871716 - RNA, 31 nt, Human
ggcuacagggacagccaagcugagcaaggaa

SEQ ID NO: 871717 - RNA, 22 nt, Human
uuuuuuuuuuuuuuuugagugg

SEQ ID NO: 871718 - RNA, 20 nt, Human
uuuuuuuuuuuuuuuuuugg

SEQ ID NO: 871719 - RNA, 21 nt, Human
aacuccuugggggcuccuggu

SEQ ID NO: 871720 - RNA, 24 nt, Human
aaucgccugaacccaggaggcgga

SEQ ID NO: 871721 - RNA, 19 nt, Human
acccugaagguggggaagg

SEQ ID NO: 871722 - RNA, 19 nt, Human
accggcacuguggaggcgg

SEQ ID NO: 871723 - RNA, 23 nt, Human
acuccgagggggcaucgcaggag

SEQ ID NO: 871724 - RNA, 21 nt, Human
acuccuugggggcuccuggug

SEQ ID NO: 871725 - RNA, 23 nt, Human
agccaggugugguggcacaugcc

SEQ ID NO: 871726 - RNA, 21 nt, Human
aggagagggacggggaagagg

SEQ ID NO: 871727 - RNA, 18 nt, Human
aggcaggagaaucgccug

SEQ ID NO: 871728 - RNA, 24 nt, Human
aggcaggagaaucgccugaaccca

SEQ ID NO: 871729 - RNA, 24 nt, Human
aggcggagguuggggugagccgag

SEQ ID NO: 871730 - RNA, 20 nt, Human
aggcugaggcaggagaaucg

SEQ ID NO: 871731 - RNA, 20 nt, Human
aggcugaggcaggagaaucg

SEQ ID NO: 871732 - RNA, 22 nt, Human
aggcuggagcugagaaggggua

SEQ ID NO: 871733 - RNA, 21 nt, Human
aggugugguggcacaugccug

SEQ ID NO: 871734 - RNA, 24 nt, Human
aggugugguggcacaugccuguaa

SEQ ID NO: 871735 - RNA, 22 nt, Human
auggagcccgaagagccacacu

SEQ ID NO: 871736 - RNA, 24 nt, Human
auugcgccauugcacuccagcaug

SEQ ID NO: 871737 - RNA, 19 nt, Human
caagcaggcacuguggcca

SEQ ID NO: 871738 - RNA, 24 nt, Human
caauaaggucccauucugaggucc

SEQ ID NO: 871739 - RNA, 19 nt, Human
cacgccuguaaucccagca

SEQ ID NO: 871740 - RNA, 22 nt, Human
cagcaaggacaguccuucaagc

SEQ ID NO: 871741 - RNA, 24 nt, Human
cagguaaucaggaggcugaggcag

SEQ ID NO: 871742 - RNA, 18 nt, Human
cauugcacuccagcaugg

SEQ ID NO: 871743 - RNA, 19 nt, Human
cauugcacuccagcauggg

SEQ ID NO: 871744 - RNA, 19 nt, Human
cauugcacuccagcauggg

SEQ ID NO: 871745 - RNA, 20 nt, Human
cauugcacuccagcauggga

SEQ ID NO: 871746 - RNA, 26 nt, Human
ccacgcccaccggcacuguggaggcg

SEQ ID NO: 871747 - RNA, 19 nt, Human
ccauugcacuccagcaugg

SEQ ID NO: 871748 - RNA, 20 nt, Human
ccauugcacuccagcauggg

SEQ ID NO: 871749 - RNA, 19 nt, Human
cccauucugagguccaggg

SEQ ID NO: 871750 - RNA, 22 nt, Human
cccugaagguggggaagguggg

SEQ ID NO: 871751 - RNA, 22 nt, Human
ccuaagucacggcucuaaggag

SEQ ID NO: 871752 - RNA, 22 nt, Human
ccuguaaucccagguaaucagg

SEQ ID NO: 871753 - RNA, 24 nt, Human
cgagauugcgccauugcacuccag

SEQ ID NO: 871754 - RNA, 18 nt, Human
cgccauugcacuccagca

SEQ ID NO: 871755 - RNA, 21 nt, Human
cucacgccuguaaucccagca

SEQ ID NO: 871756 - RNA, 21 nt, Human
cucacgccuguaaucccagca

SEQ ID NO: 871757 - RNA, 21 nt, Human
cuccugguguccuuggugugg

SEQ ID NO: 871758 - RNA, 25 nt, Human
cucuuccaacuccuugggggcuccc

SEQ ID NO: 871759 - RNA, 23 nt, Human
gacccuuuuccccaauaaggucc

SEQ ID NO: 871760 - RNA, 20 nt, Human
gagguaggagagggacgggg

SEQ ID NO: 871761 - RNA, 26 nt, Human
gagguuggggugagccgagauugcgc

SEQ ID NO: 871762 - RNA, 22 nt, Human
gcaggagaaucgccugaaccca

SEQ ID NO: 871763 - RNA, 25 nt, Human
gccacacuccgagggggcaucgcag

SEQ ID NO: 871764 - RNA, 19 nt, Human
gccaccuagaaaguggacc

SEQ ID NO: 871765 - RNA, 23 nt, Human
gcuccugguguccuugguguggg

SEQ ID NO: 871766 - RNA, 20 nt, Human
gcuggagcugagaaggggua

SEQ ID NO: 871767 - RNA, 22 nt, Human
ggagguuggggugagccgagau

SEQ ID NO: 871768 - RNA, 24 nt, Human
ggagguuggggugagccgagauug

SEQ ID NO: 871769 - RNA, 21 nt, Human
ggcucacgccuguaaucccag

SEQ ID NO: 871770 - RNA, 21 nt, Human
ggcuggagcugagaaggggua

SEQ ID NO: 871771 - RNA, 20 nt, Human
gggaagaagagcgaaacucc

SEQ ID NO: 871772 - RNA, 24 nt, Human
gggcgcgguggcucacgccuguaa

SEQ ID NO: 871773 - RNA, 18 nt, Human
gggcuccugguguccuug

SEQ ID NO: 871774 - RNA, 24 nt, Human
ggguagcugcccuugggcaccacg

SEQ ID NO: 871775 - RNA, 24 nt, Human
gguggcacaugccuguaaucccag

SEQ ID NO: 871776 - RNA, 23 nt, Human
gguggcucacgccuguaauccca

SEQ ID NO: 871777 - RNA, 23 nt, Human
guggcucacgccuguaaucccag

SEQ ID NO: 871778 - RNA, 19 nt, Human
gugggcaucccuccagucu

SEQ ID NO: 871779 - RNA, 20 nt, Human
uaaaaacacaaaacuagcca

SEQ ID NO: 871780 - RNA, 21 nt, Human
uaaaaacacaaaacuagccag

SEQ ID NO: 871781 - RNA, 22 nt, Human
uaaaaacacaaaacuagccagg

SEQ ID NO: 871782 - RNA, 23 nt, Human
uaaaaacacaaaacuagccaggu

SEQ ID NO: 871783 - RNA, 26 nt, Human
uaagauggagcccgaagagccacacu

SEQ ID NO: 871784 - RNA, 18 nt, Human
uaagcugggggaggcggu

SEQ ID NO: 871785 - RNA, 23 nt, Human
uaauagacagcagucuacacugc

SEQ ID NO: 871786 - RNA, 22 nt, Human
uacuaaaaacacaaaacuagcc

SEQ ID NO: 871787 - RNA, 22 nt, Human
uagaggacacuauucaagccac

SEQ ID NO: 871788 - RNA, 23 nt, Human
uaggcugggcgcgguggcucacg

SEQ ID NO: 871789 - RNA, 19 nt, Human
uauaaagacccuuuucccc

SEQ ID NO: 871790 - RNA, 21 nt, Human
ucacgccuguaaucccagcau

SEQ ID NO: 871791 - RNA, 23 nt, Human
ucccauucugagguccagggagg

SEQ ID NO: 871792 - RNA, 20 nt, Human
ucccuccagucucugcuucc

SEQ ID NO: 871793 - RNA, 18 nt, Human
uccuugggggcuccuggu

SEQ ID NO: 871794 - RNA, 20 nt, Human
uccuugggggcuccuggugu

SEQ ID NO: 871795 - RNA, 24 nt, Human
ucgguaaauguucuaauuuuuuuu

SEQ ID NO: 871796 - RNA, 23 nt, Human
ucucugcuuccuucucuggggcc

SEQ ID NO: 871797 - RNA, 23 nt, Human
ucugcuuccuucucugugucucu

SEQ ID NO: 871798 - RNA, 22 nt, Human
ucuguguccucuccuauucugu

SEQ ID NO: 871799 - RNA, 22 nt, Human
ugagccgagauugcgccauugc

SEQ ID NO: 871800 - RNA, 20 nt, Human
ugaggcaggagaaucgccug

SEQ ID NO: 871801 - RNA, 24 nt, Human
ugaggcaggagaaucgccugaacc

SEQ ID NO: 871802 - RNA, 25 nt, Human
ugaggcaggagaaucgccugaaccc

SEQ ID NO: 871803 - RNA, 22 nt, Human
ugauggggcuguccuuucuagg

SEQ ID NO: 871804 - RNA, 24 nt, Human
ugccuguaaucccagguaaucagg

SEQ ID NO: 871805 - RNA, 19 nt, Human
ugcugaggucagugugagg

SEQ ID NO: 871806 - RNA, 19 nt, Human
ugcugaggucagugugagg

SEQ ID NO: 871807 - RNA, 22 nt, Human
ugcuuccuucucugugucucug

SEQ ID NO: 871808 - RNA, 23 nt, Human
ugcuuccuucucugugucucugu

SEQ ID NO: 871809 - RNA, 24 nt, Human
uggagcccgaagagccacacuccg

SEQ ID NO: 871810 - RNA, 22 nt, Human
uggaggcggcuuggugaauauu

SEQ ID NO: 871811 - RNA, 21 nt, Human
uggcacaugccuguaauccca

SEQ ID NO: 871812 - RNA, 22 nt, Human
uggcacaugccuguaaucccag

SEQ ID NO: 871813 - RNA, 20 nt, Human
uggcccugggugucucuccc

SEQ ID NO: 871814 - RNA, 22 nt, Human
uggcucacgccuguaaucccag

SEQ ID NO: 871815 - RNA, 24 nt, Human
uggcucacgccuguaaucccagca

SEQ ID NO: 871816 - RNA, 24 nt, Human
ugguggcacaugccuguaauccca

SEQ ID NO: 871817 - RNA, 22 nt, Human
uguauaaagacccuuuucccca

SEQ ID NO: 871818 - RNA, 20 nt, Human
ugugucucuguguccucucc

SEQ ID NO: 871819 - RNA, 25 nt, Human
uucaagcugcgucuugcauguuggu

SEQ ID NO: 871820 - RNA, 18 nt, Human
uuccgacgcugccggagc

SEQ ID NO: 871821 - RNA, 24 nt, Human
uugggggcuccugguguccuuggu

SEQ ID NO: 871822 - RNA, 18 nt, Human
uuggggugagccgagauu

SEQ ID NO: 871823 - RNA, 22 nt, Human
uuggggugagccgagauugcgc

SEQ ID NO: 871824 - RNA, 21 nt, Human
uuuuuuuuuuuuuuuucccag

SEQ ID NO: 871825 - RNA, 23 nt, Human
uuuuuuuuuuuuuuuuucccagg

SEQ ID NO: 871826 - RNA, 21 nt, Human
aagcgggacgugggcugcggg

SEQ ID NO: 871827 - RNA, 19 nt, Human
acaaugggccuggggucug

SEQ ID NO: 871828 - RNA, 19 nt, Human
cccuggaaaucuccagaua

SEQ ID NO: 871829 - RNA, 21 nt, Human
cuggaaaucuccagauaccaa

SEQ ID NO: 871830 - RNA, 18 nt, Human
gaucacccgagagucagg

SEQ ID NO: 871831 - RNA, 21 nt, Human
gcccuggaaaucuccagauac

SEQ ID NO: 871832 - RNA, 21 nt, Human
uuacaaugggccuggggucug

SEQ ID NO: 871833 - RNA, 22 nt, Human
uuuuuuuuuuuucagcaaccuc

SEQ ID NO: 871834 - RNA, 24 nt, Human
uuuuuuuuuuuuuuuuuuuuucag

SEQ ID NO: 871835 - RNA, 25 nt, Human
aaagugcuggggauuacagguguga

SEQ ID NO: 871836 - RNA, 24 nt, Human
aaguagagaugggguuucgccaug

SEQ ID NO: 871837 - RNA, 27 nt, Human
aagugcuggggauuacaggugugagcc

SEQ ID NO: 871838 - RNA, 24 nt, Human
aggugauccgcccgccuuggccuc

SEQ ID NO: 871839 - RNA, 22 nt, Human
aguagagaugggguuucgccau

SEQ ID NO: 871840 - RNA, 23 nt, Human
aguagagaugggguuucgccaug

SEQ ID NO: 871841 - RNA, 21 nt, Human
agugcuggggauuacaggugu

SEQ ID NO: 871842 - RNA, 23 nt, Human
augggguuucgccauguuggcca

SEQ ID NO: 871843 - RNA, 24 nt, Human
augggguuucgccauguuggccag

SEQ ID NO: 871844 - RNA, 21 nt, Human
auugcaauagauuauacaacc

SEQ ID NO: 871845 - RNA, 25 nt, Human
caaagugcuggggauuacaggugug

SEQ ID NO: 871846 - RNA, 21 nt, Human
cagaaaaggaugucugagaug

SEQ ID NO: 871847 - RNA, 24 nt, Human
cauguuggccaggcuggucucgaa

SEQ ID NO: 871848 - RNA, 22 nt, Human
ccaaagugcuggggauuacagg

SEQ ID NO: 871849 - RNA, 25 nt, Human
ccaaagugcuggggauuacaggugu

SEQ ID NO: 871850 - RNA, 19 nt, Human
ccauguuggccaggcuggu

SEQ ID NO: 871851 - RNA, 22 nt, Human
ccauguuggccaggcuggucuc

SEQ ID NO: 871852 - RNA, 22 nt, Human
cccgccuuggccucccaaagug

SEQ ID NO: 871853 - RNA, 18 nt, Human
ccugaccucaggugaucc

SEQ ID NO: 871854 - RNA, 22 nt, Human
ccugaccucaggugauccgccc

SEQ ID NO: 871855 - RNA, 24 nt, Human
cgccauguuggccaggcuggucuc

SEQ ID NO: 871856 - RNA, 26 nt, Human
cuccugaccucaggugauccgcccgc

SEQ ID NO: 871857 - RNA, 24 nt, Human
gaccucaggugauccgcccgccuu

SEQ ID NO: 871858 - RNA, 18 nt, Human
gagaugggguuucgccau

SEQ ID NO: 871859 - RNA, 24 nt, Human
gagaugggguuucgccauguuggc

SEQ ID NO: 871860 - RNA, 18 nt, Human
gauuacaggugugagcca

SEQ ID NO: 871861 - RNA, 18 nt, Human
gauuacaggugugagcca

SEQ ID NO: 871862 - RNA, 22 nt, Human
gauuacaggugugagccaucac

SEQ ID NO: 871863 - RNA, 24 nt, Human
gccauguuggccaggcuggucucg

SEQ ID NO: 871864 - RNA, 25 nt, Human
gccauguuggccaggcuggucucga

SEQ ID NO: 871865 - RNA, 22 nt, Human
gccuuggccucccaaagugcug

SEQ ID NO: 871866 - RNA, 23 nt, Human
gcuggucucgaacuccugaccuc

SEQ ID NO: 871867 - RNA, 23 nt, Human
ggauuacaggugugagccaucac

SEQ ID NO: 871868 - RNA, 24 nt, Human
ggcuggucucgaacuccugaccuc

SEQ ID NO: 871869 - RNA, 18 nt, Human
gggauuacaggugugagc

SEQ ID NO: 871870 - RNA, 23 nt, Human
gggauuacaggugugagccauca

SEQ ID NO: 871871 - RNA, 22 nt, Human
ggggauuacaggugugagccau

SEQ ID NO: 871872 - RNA, 23 nt, Human
ggggauuacaggugugagccauc

SEQ ID NO: 871873 - RNA, 24 nt, Human
ggggauuacaggugugagccauca

SEQ ID NO: 871874 - RNA, 22 nt, Human
gggguuucgccauguuggccag

SEQ ID NO: 871875 - RNA, 22 nt, Human
ggguuucgccauguuggccagg

SEQ ID NO: 871876 - RNA, 19 nt, Human
ggucucgaacuccugaccu

SEQ ID NO: 871877 - RNA, 23 nt, Human
guagagaugggguuucgccaugu

SEQ ID NO: 871878 - RNA, 24 nt, Human
uaaguagagaugggguuucgccau

SEQ ID NO: 871879 - RNA, 22 nt, Human
uacaggugugagccaucacacc

SEQ ID NO: 871880 - RNA, 23 nt, Human
uacaggugugagccaucacaccu

SEQ ID NO: 871881 - RNA, 22 nt, Human
uagagaugggguuucgccaugu

SEQ ID NO: 871882 - RNA, 20 nt, Human
uauacaaccccaaguuuaua

SEQ ID NO: 871883 - RNA, 24 nt, Human
ucccaaagugcuggggauuacagg

SEQ ID NO: 871884 - RNA, 22 nt, Human
ucgccauguuggccaggcuggu

SEQ ID NO: 871885 - RNA, 24 nt, Human
ucgccauguuggccaggcuggucu

SEQ ID NO: 871886 - RNA, 23 nt, Human
ucucgaacuccugaccucaggug

SEQ ID NO: 871887 - RNA, 18 nt, Human
ugaccucaggugauccgc

SEQ ID NO: 871888 - RNA, 21 nt, Human
ugaccucaggugauccgcccg

SEQ ID NO: 871889 - RNA, 24 nt, Human
ugaccucaggugauccgcccgccu

SEQ ID NO: 871890 - RNA, 21 nt, Human
ugcaauagauuauacaacccc

SEQ ID NO: 871891 - RNA, 18 nt, Human
ugccugauuuuuguugac

SEQ ID NO: 871892 - RNA, 23 nt, Human
uggcauagaguaucuaauauuuu

SEQ ID NO: 871893 - RNA, 24 nt, Human
uggccaggcuggucucgaacuccu

SEQ ID NO: 871894 - RNA, 24 nt, Human
ugggguuucgccauguuggccagg

SEQ ID NO: 871895 - RNA, 18 nt, Human
uuagaggaaaguccagga

SEQ ID NO: 871896 - RNA, 18 nt, Human
uuggccucccaaagugcu

SEQ ID NO: 871897 - RNA, 23 nt, Human
uuucgccauguuggccaggcugu

SEQ ID NO: 871898 - RNA, 24 nt, Human
uuuuaaguagagaugggguuucgc

SEQ ID NO: 871899 - RNA, 23 nt, Human
uuuuauugcaauagauuauacaa

SEQ ID NO: 871900 - RNA, 24 nt, Human
uuuuuaaguagagaugggguuucg

SEQ ID NO: 871901 - RNA, 24 nt, Human
uuuuuuuuuuuuuuuaaguagaga

SEQ ID NO: 871902 - RNA, 25 nt, Human
uuuuuuuuuuuuuuuuuuuuuaagg

SEQ ID NO: 871903 - RNA, 19 nt, Human
aaagaagacaaggaagaga

SEQ ID NO: 871904 - RNA, 20 nt, Human
aagcaaaggugguaaugaaa

SEQ ID NO: 871905 - RNA, 19 nt, Human
agacaccaggagccuccuc

SEQ ID NO: 871906 - RNA, 26 nt, Human
aggccaggccuacuagagugccuggu

SEQ ID NO: 871907 - RNA, 24 nt, Human
cacugccguuucagacaccaggag

SEQ ID NO: 871908 - RNA, 25 nt, Human
ccauucuuuuccaagcaaagguggu

SEQ ID NO: 871909 - RNA, 18 nt, Human
ccuguuucuucucucucc

SEQ ID NO: 871910 - RNA, 21 nt, Human
cggcucagagggcgugcucag

SEQ ID NO: 871911 - RNA, 20 nt, Human
gagcggcucagagggcgugc

SEQ ID NO: 871912 - RNA, 24 nt, Human
gccuguuucuucucucuccugcug

SEQ ID NO: 871913 - RNA, 18 nt, Human
uaacugccaggaccaccg

SEQ ID NO: 871914 - RNA, 23 nt, Human
uaacugccaggaccaccgaaugc

SEQ ID NO: 871915 - RNA, 24 nt, Human
uaggcuuuuagaauccauuaaucc

SEQ ID NO: 871916 - RNA, 21 nt, Human
ugguaaugaaaauggaaaaga

SEQ ID NO: 871917 - RNA, 23 nt, Human
uucucucuccugcuguuucuggg

SEQ ID NO: 871918 - RNA, 24 nt, Human
uuggcuucucacagcuggccuguu

SEQ ID NO: 871919 - RNA, 25 nt, Human
uuuuuuuuuuuuuuuaggcuuuuag

SEQ ID NO: 871920 - RNA, 24 nt, Human
uuuuuuuuuuuuuuuuaggcuuuu

SEQ ID NO: 871921 - RNA, 23 nt, Human
uuuuuuuuuuuuuuuuuuuuagg

SEQ ID NO: 871922 - RNA, 25 nt, Human
aacacaaaucugagcuugaauuaua

SEQ ID NO: 871923 - RNA, 22 nt, Human
aagcaccucucgcggagaccga

SEQ ID NO: 871924 - RNA, 24 nt, Human
agcaacagggcagccgggaagcag

SEQ ID NO: 871925 - RNA, 21 nt, Human
cagcaacagggcagccgggaa

SEQ ID NO: 871926 - RNA, 20 nt, Human
ccacggaucagugaggauag

SEQ ID NO: 871927 - RNA, 24 nt, Human
ccgacagcaacagggcagccggga

SEQ ID NO: 871928 - RNA, 20 nt, Human
ccucucgcggagaccgaaag

SEQ ID NO: 871929 - RNA, 19 nt, Human
gcggagaccgaaagauucu

SEQ ID NO: 871930 - RNA, 18 nt, Human
ugacuccgacagcaacag

SEQ ID NO: 871931 - RNA, 24 nt, Human
aaacugggcccagagggaccccga

SEQ ID NO: 871932 - RNA, 22 nt, Human
acccugcgaccccauacauuua

SEQ ID NO: 871933 - RNA, 23 nt, Human
acucaacacccugcgaccccaua

SEQ ID NO: 871934 - RNA, 21 nt, Human
acugagcaccucccauguggc

SEQ ID NO: 871935 - RNA, 20 nt, Human
agggaaacugggcccagagg

SEQ ID NO: 871936 - RNA, 24 nt, Human
cacccugcgaccccauacauuuac

SEQ ID NO: 871937 - RNA, 18 nt, Human
cagagggaccccgagguc

SEQ ID NO: 871938 - RNA, 21 nt, Human
cccaauuuacagauagggaaa

SEQ ID NO: 871939 - RNA, 23 nt, Human
cccauacauuuacuguccccaau

SEQ ID NO: 871940 - RNA, 24 nt, Human
ccccauacauuuacuguccccaau

SEQ ID NO: 871941 - RNA, 18 nt, Human
ccccaucacugggugucc

SEQ ID NO: 871942 - RNA, 18 nt, Human
cccuuagcgcacuuaacg

SEQ ID NO: 871943 - RNA, 20 nt, Human
ccuccugucacucaacaccc

SEQ ID NO: 871944 - RNA, 19 nt, Human
ccuggcucgcgccucuccc

SEQ ID NO: 871945 - RNA, 18 nt, Human
ccuuuacugagcaccucc

SEQ ID NO: 871946 - RNA, 21 nt, Human
cgaccaggccuggcucgcgcc

SEQ ID NO: 871947 - RNA, 18 nt, Human
cuaagcagccuccuguca

SEQ ID NO: 871948 - RNA, 20 nt, Human
cuagagucugugcucuugac

SEQ ID NO: 871949 - RNA, 20 nt, Human
cucccaggacccgccuggcu

SEQ ID NO: 871950 - RNA, 19 nt, Human
cugggcccagagggacccc

SEQ ID NO: 871951 - RNA, 24 nt, Human
gaccccauacauuuacugucccca

SEQ ID NO: 871952 - RNA, 18 nt, Human
gagauauguaagccgcga

SEQ ID NO: 871953 - RNA, 18 nt, Human
ggagaggagaaagcggca

SEQ ID NO: 871954 - RNA, 21 nt, Human
uaagcagccuccugucacuca

SEQ ID NO: 871955 - RNA, 20 nt, Human
uagaaaggacagaagcggug

SEQ ID NO: 871956 - RNA, 21 nt, Human
uaguucaugggcuugacugcu

SEQ ID NO: 871957 - RNA, 21 nt, Human
ucacucaacacccugcgaccc

SEQ ID NO: 871958 - RNA, 18 nt, Human
ucugacagucucuagagu

SEQ ID NO: 871959 - RNA, 22 nt, Human
ugagcaccucccauguggcuaa

SEQ ID NO: 871960 - RNA, 19 nt, Human
uggcuaagcagccuccugu

SEQ ID NO: 871961 - RNA, 18 nt, Human
ugggcccagagggacccc

SEQ ID NO: 871962 - RNA, 23 nt, Human
ugggcccagagggaccccgaggu

SEQ ID NO: 871963 - RNA, 24 nt, Human
uuacugagcaccucccauguggcu

SEQ ID NO: 871964 - RNA, 24 nt, Human
uuucuccgcgggcgccgaccaggc

SEQ ID NO: 871965 - RNA, 19 nt, Human
uuuuuuuuuuuuuuuuuaa

SEQ ID NO: 871966 - RNA, 21 nt, Human
uuuuuuuuuuguagagacugg

SEQ ID NO: 871967 - RNA, 27 nt, Human
uuuuuuuuuuuuuuguagagacuggaa

SEQ ID NO: 871968 - RNA, 18 nt, Human
uuuuuuuuuuuuuuuuug

SEQ ID NO: 871969 - RNA, 19 nt, Human
uuuuuuuuuuuuuuuuugu

SEQ ID NO: 871970 - RNA, 18 nt, Human
aaacagaaaacaaagcuc

SEQ ID NO: 871971 - RNA, 23 nt, Human
aaagcucuuccaguagcugguau

SEQ ID NO: 871972 - RNA, 24 nt, Human
aacacaaaccaaaauaaaccuaua

SEQ ID NO: 871973 - RNA, 24 nt, Human
aacagcaacacaaaccaaaauaaa

SEQ ID NO: 871974 - RNA, 21 nt, Human
aacauugaugaaaaauaucau

SEQ ID NO: 871975 - RNA, 23 nt, Human
aagaacagcaacacaaaccaaaa

SEQ ID NO: 871976 - RNA, 18 nt, Human
cacaaaccaaaauaaacc

SEQ ID NO: 871977 - RNA, 22 nt, Human
cauccuggcaauucauaucuag

SEQ ID NO: 871978 - RNA, 19 nt, Human
ccggcuucugccuccgacc

SEQ ID NO: 871979 - RNA, 19 nt, Human
cuacacaggcuuccucugg

SEQ ID NO: 871980 - RNA, 24 nt, Human
cucaaacauccuggcaauucauau

SEQ ID NO: 871981 - RNA, 23 nt, Human
gacacauauuuacucaaacaucc

SEQ ID NO: 871982 - RNA, 18 nt, Human
uaaucagucucugagaaa

SEQ ID NO: 871983 - RNA, 21 nt, Human
uaaugaaacagaaaacaaagc

SEQ ID NO: 871984 - RNA, 18 nt, Human
uacacaggcuuccucugg

SEQ ID NO: 871985 - RNA, 18 nt, Human
uaccuaucuacacaggcu

SEQ ID NO: 871986 - RNA, 19 nt, Human
ucagaagucuccuucccgg

SEQ ID NO: 871987 - RNA, 24 nt, Human
ucagaagucuccuucccggcuucu

SEQ ID NO: 871988 - RNA, 20 nt, Human
uccucaguaauagauucacu

SEQ ID NO: 871989 - RNA, 24 nt, Human
uccuucccggcuucugccuccgac

SEQ ID NO: 871990 - RNA, 18 nt, Human
ucuccuucccggcuucug

SEQ ID NO: 871991 - RNA, 21 nt, Human
ugccuccgaccuucucggucu

SEQ ID NO: 871992 - RNA, 24 nt, Human
uggaagaacagcaacacaaaccaa

SEQ ID NO: 871993 - RNA, 21 nt, Human
uuccucaguaauagauucacu

SEQ ID NO: 871994 - RNA, 20 nt, Human
uuuuuuuuuuuuuuuuuugg

SEQ ID NO: 871995 - RNA, 18 nt, Human
aaaaaaaaaauccccaaa

SEQ ID NO: 871996 - RNA, 21 nt, Human
aaaaauccccaaagacaagaa

SEQ ID NO: 871997 - RNA, 21 nt, Human
aaagacaagaaauggugaaga

SEQ ID NO: 871998 - RNA, 23 nt, Human
aagaggaaaaaaaaaauccccaa

SEQ ID NO: 871999 - RNA, 23 nt, Human
aauuguuuccauucugaggucug

SEQ ID NO: 872000 - RNA, 21 nt, Human
agccgccauucaggggccccg

SEQ ID NO: 872001 - RNA, 21 nt, Human
agggaaagacccacacuaaug

SEQ ID NO: 872002 - RNA, 24 nt, Human
agggaaggaggguguugaaaaaaa

SEQ ID NO: 872003 - RNA, 18 nt, Human
caaagacaagaaauggug

SEQ ID NO: 872004 - RNA, 18 nt, Human
caagaaauggugaagacu

SEQ ID NO: 872005 - RNA, 20 nt, Human
caagaaauggugaagacugc

SEQ ID NO: 872006 - RNA, 18 nt, Human
cagccccagugguuuacu

SEQ ID NO: 872007 - RNA, 18 nt, Human
cagccuccgggcgccgcu

SEQ ID NO: 872008 - RNA, 18 nt, Human
cauugcagcuccggcgac

SEQ ID NO: 872009 - RNA, 18 nt, Human
ccgccgccgccgccgccg

SEQ ID NO: 872010 - RNA, 21 nt, Human
ccgccgccgccgccgccucag

SEQ ID NO: 872011 - RNA, 22 nt, Human
ccgccgccgccgccgccucagc

SEQ ID NO: 872012 - RNA, 23 nt, Human
ccuucaccgccacgccacgcccc

SEQ ID NO: 872013 - RNA, 23 nt, Human
cgggcgccgcucauugcagcucc

SEQ ID NO: 872014 - RNA, 21 nt, Human
cugguuuccucauccuacagg

SEQ ID NO: 872015 - RNA, 19 nt, Human
cuguuugcuccucccucau

SEQ ID NO: 872016 - RNA, 20 nt, Human
cuucaccgccacgccacgcc

SEQ ID NO: 872017 - RNA, 23 nt, Human
gagccgccauucaggggccccgg

SEQ ID NO: 872018 - RNA, 22 nt, Human
gcagcuccggcgacggacgccc

SEQ ID NO: 872019 - RNA, 19 nt, Human
gccgccgccgccgccgccg

SEQ ID NO: 872020 - RNA, 21 nt, Human
gccgccgccgccgccgccgcc

SEQ ID NO: 872021 - RNA, 22 nt, Human
ggaaggaggguguugaaaaaaa

SEQ ID NO: 872022 - RNA, 18 nt, Human
ggacgcccgcucggcucc

SEQ ID NO: 872023 - RNA, 21 nt, Human
ggaggguguugaaaaaaauug

SEQ ID NO: 872024 - RNA, 21 nt, Human
gggaguggucccauuucacag

SEQ ID NO: 872025 - RNA, 23 nt, Human
ggggaguggucccauuucacagg

SEQ ID NO: 872026 - RNA, 22 nt, Human
ggguguugaaaaaaauuguuuc

SEQ ID NO: 872027 - RNA, 22 nt, Human
gugaagaggaaaaaaaaaaucc

SEQ ID NO: 872028 - RNA, 24 nt, Human
uagccaccugguuuccucauccua

SEQ ID NO: 872029 - RNA, 18 nt, Human
ucauugcagcuccggcga

SEQ ID NO: 872030 - RNA, 19 nt, Human
ucauugcagcuccggcgac

SEQ ID NO: 872031 - RNA, 22 nt, Human
uccagaauggcggcacuaagaa

SEQ ID NO: 872032 - RNA, 25 nt, Human
ucccucauagguaagcagcaagagu

SEQ ID NO: 872033 - RNA, 18 nt, Human
uuacuggggagugguccc

SEQ ID NO: 872034 - RNA, 25 nt, Human
uugcagcuccggcgacggacgcccg

SEQ ID NO: 872035 - RNA, 23 nt, Human
uugugaagaggaaaaaaaaaauc

SEQ ID NO: 872036 - RNA, 21 nt, Human
uuuuuuuuuuuuuuuguguga

SEQ ID NO: 872037 - RNA, 22 nt, Human
aaaaggcucaugaccguacucc

SEQ ID NO: 872038 - RNA, 21 nt, Human
acgcucagccguccgcgggac

SEQ ID NO: 872039 - RNA, 22 nt, Human
agguggccgggaaugugagagc

SEQ ID NO: 872040 - RNA, 24 nt, Human
aucgaaaggcaaauauuuauuuuu

SEQ ID NO: 872041 - RNA, 21 nt, Human
augcaguccacgaccugcaca

SEQ ID NO: 872042 - RNA, 22 nt, Human
cacacccucacauggcagccug

SEQ ID NO: 872043 - RNA, 23 nt, Human
cacucacuucuccauggccucca

SEQ ID NO: 872044 - RNA, 23 nt, Human
cagcagcucuccagauccuccuc

SEQ ID NO: 872045 - RNA, 18 nt, Human
caugaccguacucccaca

SEQ ID NO: 872046 - RNA, 27 nt, Human
ccacagaagcuccugcagccacacgcu

SEQ ID NO: 872047 - RNA, 22 nt, Human
ccagcagcucuccagauccucc

SEQ ID NO: 872048 - RNA, 26 nt, Human
ccucacauggcagccugggcaggggc

SEQ ID NO: 872049 - RNA, 19 nt, Human
cgaccugcacacccucaca

SEQ ID NO: 872050 - RNA, 21 nt, Human
cuccagggggcgccagucacc

SEQ ID NO: 872051 - RNA, 21 nt, Human
cucggugggcccccaggcgga

SEQ ID NO: 872052 - RNA, 19 nt, Human
cuugcugugaugcagucca

SEQ ID NO: 872053 - RNA, 19 nt, Human
gaagcuccugcagccacac

SEQ ID NO: 872054 - RNA, 23 nt, Human
gagcugugggggugaaggucagc

SEQ ID NO: 872055 - RNA, 22 nt, Human
gaugcggaaggugggagcccug

SEQ ID NO: 872056 - RNA, 20 nt, Human
ggaaggugggagcccugggc

SEQ ID NO: 872057 - RNA, 22 nt, Human
ggaugaggggcaugguggcugg

SEQ ID NO: 872058 - RNA, 21 nt, Human
gggcagggagggcauaguaca

SEQ ID NO: 872059 - RNA, 18 nt, Human
gggcaugguggcugggag

SEQ ID NO: 872060 - RNA, 19 nt, Human
ggggcaugguggcugggag

SEQ ID NO: 872061 - RNA, 21 nt, Human
gggugaaggucagcggggggc

SEQ ID NO: 872062 - RNA, 23 nt, Human
ucagcggggggcaggggcagggg

SEQ ID NO: 872063 - RNA, 24 nt, Human
uccauggccuccaugguguucucc

SEQ ID NO: 872064 - RNA, 18 nt, Human
ucccacagaagcuccugc

SEQ ID NO: 872065 - RNA, 18 nt, Human
ugagagcggaguucgugg

SEQ ID NO: 872066 - RNA, 20 nt, Human
ugagagcggaguucguggcg

SEQ ID NO: 872067 - RNA, 18 nt, Human
ugcaguccacgaccugca

SEQ ID NO: 872068 - RNA, 22 nt, Human
uggcagccugggcaggggcaga

SEQ ID NO: 872069 - RNA, 20 nt, Human
ugggagcccugggcgugugg

SEQ ID NO: 872070 - RNA, 21 nt, Human
ugggaugaggggcaugguggc

SEQ ID NO: 872071 - RNA, 23 nt, Human
ugggaugaggggcaugguggcug

SEQ ID NO: 872072 - RNA, 21 nt, Human
ugugcagcagaugaggccggc

SEQ ID NO: 872073 - RNA, 21 nt, Human
uucaggaagagaaacagaaga

SEQ ID NO: 872074 - RNA, 24 nt, Human
uuucaggaagagaaacagaagacc

SEQ ID NO: 872075 - RNA, 22 nt, Human
uuuuuugaucgaaaggcaaaua

SEQ ID NO: 872076 - RNA, 18 nt, Human
uuuuuuuuuuuuuuuuug

SEQ ID NO: 872077 - RNA, 21 nt, Human
aaacaaauuuucuagccccug

SEQ ID NO: 872078 - RNA, 18 nt, Human
aagaagauggggauuuug

SEQ ID NO: 872079 - RNA, 21 nt, Human
aagccaagacugggcugggga

SEQ ID NO: 872080 - RNA, 21 nt, Human
aaguaaaacaauuagggacac

SEQ ID NO: 872081 - RNA, 21 nt, Human
aaucaacaccuaaaauccaga

SEQ ID NO: 872082 - RNA, 22 nt, Human
acaacacagauauaaggugaag

SEQ ID NO: 872083 - RNA, 19 nt, Human
acaccaccuccuuucccca

SEQ ID NO: 872084 - RNA, 23 nt, Human
acaccaccuccuuuccccagccc

SEQ ID NO: 872085 - RNA, 21 nt, Human
acacugagagcagacaaaggc

SEQ ID NO: 872086 - RNA, 23 nt, Human
acacugagagcagacaaaggcca

SEQ ID NO: 872087 - RNA, 19 nt, Human
accaccuucagucccugcu

SEQ ID NO: 872088 - RNA, 20 nt, Human
accaccuucagucccugcug

SEQ ID NO: 872089 - RNA, 21 nt, Human
accagcgccagccggucgcgc

SEQ ID NO: 872090 - RNA, 20 nt, Human
accaugaaauccacugggcc

SEQ ID NO: 872091 - RNA, 22 nt, Human
agaaaucaacaccuaaaaucca

SEQ ID NO: 872092 - RNA, 19 nt, Human
agaagccaagacugggcug

SEQ ID NO: 872093 - RNA, 18 nt, Human
agaaggagauagauaagg

SEQ ID NO: 872094 - RNA, 23 nt, Human
agaaggagauagauaagggggac

SEQ ID NO: 872095 - RNA, 22 nt, Human
agccaugaaggguggggaggga

SEQ ID NO: 872096 - RNA, 25 nt, Human
aggaagugguaucccgugauccaga

SEQ ID NO: 872097 - RNA, 22 nt, Human
aggcaggaggcaagccaugaaa

SEQ ID NO: 872098 - RNA, 19 nt, Human
aggguggggagggaaggag

SEQ ID NO: 872099 - RNA, 18 nt, Human
auaggucacaucuguagg

SEQ ID NO: 872100 - RNA, 20 nt, Human
caacaccuaaaauccagagg

SEQ ID NO: 872101 - RNA, 22 nt, Human
caagacugggcuggggagccga

SEQ ID NO: 872102 - RNA, 22 nt, Human
caaguuaacaaguaaaacaauu

SEQ ID NO: 872103 - RNA, 23 nt, Human
caccagcgccagccggucgcgcc

SEQ ID NO: 872104 - RNA, 21 nt, Human
caccuaaaauccagaggcagg

SEQ ID NO: 872105 - RNA, 20 nt, Human
cacgccgcccguccgccucg

SEQ ID NO: 872106 - RNA, 19 nt, Human
cacucuuacauucagcagc

SEQ ID NO: 872107 - RNA, 22 nt, Human
cacugagagcagacaaaggcca

SEQ ID NO: 872108 - RNA, 21 nt, Human
caggaggggacaagaagccaa

SEQ ID NO: 872109 - RNA, 19 nt, Human
caugccgggccuggccaug

SEQ ID NO: 872110 - RNA, 19 nt, Human
ccacggccgcgccgaugcc

SEQ ID NO: 872111 - RNA, 23 nt, Human
cccccgaggcccccgucaccagc

SEQ ID NO: 872112 - RNA, 18 nt, Human
ccccgaggcccccgucac

SEQ ID NO: 872113 - RNA, 25 nt, Human
cccucugccaccccagcccugagcc

SEQ ID NO: 872114 - RNA, 19 nt, Human
ccgcucuccugccgccgcc

SEQ ID NO: 872115 - RNA, 23 nt, Human
ccgcucuccugccgccgccgccg

SEQ ID NO: 872116 - RNA, 19 nt, Human
ccugccgccgccgccgacc

SEQ ID NO: 872117 - RNA, 22 nt, Human
cgaggcccccgucaccagcgcc

SEQ ID NO: 872118 - RNA, 24 nt, Human
cgccgaugccccccgaggcccccg

SEQ ID NO: 872119 - RNA, 21 nt, Human
cguugaggugcaagaagaugg

SEQ ID NO: 872120 - RNA, 19 nt, Human
cuccaugccgggccuggcc

SEQ ID NO: 872121 - RNA, 22 nt, Human
cuccugccgccgccgccgaccu

SEQ ID NO: 872122 - RNA, 22 nt, Human
cucuccugccgccgccgccgac

SEQ ID NO: 872123 - RNA, 27 nt, Human
cucugccaccccagcccugagccacag

SEQ ID NO: 872124 - RNA, 19 nt, Human
gagaaggagauagauaagg

SEQ ID NO: 872125 - RNA, 18 nt, Human
gcagaggaggaagucugg

SEQ ID NO: 872126 - RNA, 21 nt, Human
gcccaccaccuucagucccug

SEQ ID NO: 872127 - RNA, 24 nt, Human
gcccccgucaccagcgccagccgg

SEQ ID NO: 872128 - RNA, 22 nt, Human
gcccuggauaacaacacagaua

SEQ ID NO: 872129 - RNA, 24 nt, Human
gcgccgaugccccccgaggccccc

SEQ ID NO: 872130 - RNA, 19 nt, Human
ggacaccaccuccuuuccc

SEQ ID NO: 872131 - RNA, 19 nt, Human
gggaaggaggagcucccac

SEQ ID NO: 872132 - RNA, 21 nt, Human
gggagggaaggaggagcuccc

SEQ ID NO: 872133 - RNA, 19 nt, Human
gggauuuuggccacaacuc

SEQ ID NO: 872134 - RNA, 22 nt, Human
ggggauuuuggccacaacuccu

SEQ ID NO: 872135 - RNA, 19 nt, Human
gucuggagcccuggauaac

SEQ ID NO: 872136 - RNA, 18 nt, Human
uaacaacacagauauaag

SEQ ID NO: 872137 - RNA, 23 nt, Human
uaacaacacagauauaaggugaa

SEQ ID NO: 872138 - RNA, 23 nt, Human
uaaggugaaggccucccucugcc

SEQ ID NO: 872139 - RNA, 22 nt, Human
uagggacaccaccuccuuuccc

SEQ ID NO: 872140 - RNA, 24 nt, Human
uagggacaccaccuccuuucccca

SEQ ID NO: 872141 - RNA, 22 nt, Human
ucacaucuguaggggaucaaag

SEQ ID NO: 872142 - RNA, 21 nt, Human
ucgcgccaccgcuccaugccg

SEQ ID NO: 872143 - RNA, 31 nt, Human
ugaaggguggggagggaaggaggagcucccc

SEQ ID NO: 872144 - RNA, 25 nt, Human
ugacaagaugauauaaaaaucucaa

SEQ ID NO: 872145 - RNA, 19 nt, Human
ugagagcagacaaaggcca

SEQ ID NO: 872146 - RNA, 20 nt, Human
ugagagcagacaaaggccaa

SEQ ID NO: 872147 - RNA, 18 nt, Human
ugccaccccagcccugag

SEQ ID NO: 872148 - RNA, 20 nt, Human
uguaggggaucaaagucccg

SEQ ID NO: 872149 - RNA, 21 nt, Human
uuacaacugaagcaauuugac

SEQ ID NO: 872150 - RNA, 18 nt, Human
uuccccagcccauuuuuc

SEQ ID NO: 872151 - RNA, 18 nt, Human
uuuuuuuuuuuuuuuuug

SEQ ID NO: 872152 - RNA, 18 nt, Human
uuuuuuuuuuuuuuuuug

SEQ ID NO: 872153 - RNA, 23 nt, Human
aaaaagcaaagugaucuaggaua

SEQ ID NO: 872154 - RNA, 21 nt, Human
aaagcaagacagcaugaccuc

SEQ ID NO: 872155 - RNA, 24 nt, Human
aagcaagacagcaugaccucccga

SEQ ID NO: 872156 - RNA, 22 nt, Human
acagcaugaccucccgaggucu

SEQ ID NO: 872157 - RNA, 19 nt, Human
acugcuccgccccggcccc

SEQ ID NO: 872158 - RNA, 22 nt, Human
agaguccugguaaguacuucuc

SEQ ID NO: 872159 - RNA, 24 nt, Human
aguggucggggaagcgcuggcgcc

SEQ ID NO: 872160 - RNA, 23 nt, Human
caacgugaaauuaaauuguaguu

SEQ ID NO: 872161 - RNA, 22 nt, Human
caagccacuuaaaagcaagaca

SEQ ID NO: 872162 - RNA, 24 nt, Human
cagcuccuuaaagaaaaagcaaag

SEQ ID NO: 872163 - RNA, 21 nt, Human
caguuuaacagaaauaaaaga

SEQ ID NO: 872164 - RNA, 20 nt, Human
ccaagccacuuaaaagcaag

SEQ ID NO: 872165 - RNA, 21 nt, Human
cccgcauagccgaacccgagu

SEQ ID NO: 872166 - RNA, 22 nt, Human
ccucccgaggucucagguccac

SEQ ID NO: 872167 - RNA, 18 nt, Human
cgacugcuccgccccggc

SEQ ID NO: 872168 - RNA, 20 nt, Human
cgcggggaacgcgacugcuc

SEQ ID NO: 872169 - RNA, 26 nt, Human
cuccgccccggccccgcgccgguucc

SEQ ID NO: 872170 - RNA, 22 nt, Human
gcaagccuccuccucacggcuc

SEQ ID NO: 872171 - RNA, 18 nt, Human
ggguuucuucacuuuccc

SEQ ID NO: 872172 - RNA, 23 nt, Human
guggucggggaagcgcuggcgcc

SEQ ID NO: 872173 - RNA, 21 nt, Human
uaaaagcaagacagcaugacu

SEQ ID NO: 872174 - RNA, 18 nt, Human
uaacaugaaaaucaugua

SEQ ID NO: 872175 - RNA, 18 nt, Human
uagccgaacccgaguggu

SEQ ID NO: 872176 - RNA, 22 nt, Human
uaggugcaacaucagcuccuua

SEQ ID NO: 872177 - RNA, 24 nt, Human
ucacuguccuaauguaucauuuug

SEQ ID NO: 872178 - RNA, 18 nt, Human
ucacuuuccccaagccac

SEQ ID NO: 872179 - RNA, 23 nt, Human
ucagcauaccuuauccaaaaauu

SEQ ID NO: 872180 - RNA, 20 nt, Human
uccuuaaagaaaaagcaaag

SEQ ID NO: 872181 - RNA, 24 nt, Human
ugccauacaauuauaaaaauuuca

SEQ ID NO: 872182 - RNA, 22 nt, Human
uuaaaagcaagacagcaugacc

SEQ ID NO: 872183 - RNA, 19 nt, Human
uugucuuuucacuguguuu

SEQ ID NO: 872184 - RNA, 20 nt, Human
uuugggguuucuucacuuuc

SEQ ID NO: 872185 - RNA, 19 nt, Human
uuuuuuuuuuuuuuuuugu

SEQ ID NO: 872186 - RNA, 27 nt, Human
uuuuuuuuuuuuuuuuuuuuuuugggg

SEQ ID NO: 872187 - RNA, 22 nt, Human
aaguaucacaggccagacagcu

SEQ ID NO: 872188 - RNA, 24 nt, Human
agaccaagaacagaugucggaaaa

SEQ ID NO: 872189 - RNA, 20 nt, Human
agggaaugaguugucuucaa

SEQ ID NO: 872190 - RNA, 28 nt, Human
aucacagcccaaguaucacaggccagac

SEQ ID NO: 872191 - RNA, 19 nt, Human
cacaaaagaccaagaacag

SEQ ID NO: 872192 - RNA, 18 nt, Human
cacaggccagacagcuca

SEQ ID NO: 872193 - RNA, 24 nt, Human
ccucagagggaaugaguugucuuc

SEQ ID NO: 872194 - RNA, 22 nt, Human
ccucuaaacaggcacgaagcuu

SEQ ID NO: 872195 - RNA, 20 nt, Human
cggaaaaguuuuuuuuucuu

SEQ ID NO: 872196 - RNA, 22 nt, Human
cugcgucacaaaagaccaagaa

SEQ ID NO: 872197 - RNA, 23 nt, Human
cuucaaccugcgucacaaaagac

SEQ ID NO: 872198 - RNA, 18 nt, Human
ggccagacagcucaugag

SEQ ID NO: 872199 - RNA, 22 nt, Human
uaaacaggcacgaagcuucugc

SEQ ID NO: 872200 - RNA, 19 nt, Human
uaacaugauagacauaaaa

SEQ ID NO: 872201 - RNA, 22 nt, Human
uagaaugaugugaguccaagcu

SEQ ID NO: 872202 - RNA, 25 nt, Human
uagacauaaaauugguuuaucuccu

SEQ ID NO: 872203 - RNA, 20 nt, Human
uauuguuuaaaaguuucaau

SEQ ID NO: 872204 - RNA, 20 nt, Human
ucuagauuuuuguauaacau

SEQ ID NO: 872205 - RNA, 19 nt, Human
ugacugaaaauucaggugu

SEQ ID NO: 872206 - RNA, 19 nt, Human
ugucuuuuucuauuccucc

SEQ ID NO: 872207 - RNA, 26 nt, Human
ugucuuuuucuauuccucccccuuca

SEQ ID NO: 872208 - RNA, 18 nt, Human
uguguucucauuuauuau

SEQ ID NO: 872209 - RNA, 19 nt, Human
uuauacuacccucuaaaca

SEQ ID NO: 872210 - RNA, 22 nt, Human
uucuauuccucccccuucaacc

SEQ ID NO: 872211 - RNA, 23 nt, Human
uuguauaacaugauagacauaaa

SEQ ID NO: 872212 - RNA, 23 nt, Human
uuuuguauaacaugauagacaua

SEQ ID NO: 872213 - RNA, 18 nt, Human
uuuuuuuuuuuuuuuuug

SEQ ID NO: 872214 - RNA, 23 nt, Human
uuuuuuuuuuuuuuuuuugguuu

SEQ ID NO: 872215 - RNA, 22 nt, Human
ccaugucugugucucgguccuu

SEQ ID NO: 872216 - RNA, 22 nt, Human
cccagccccuccccuacuuuuu

SEQ ID NO: 872217 - RNA, 24 nt, Human
ccuccccuacuuuuuggucagcua

SEQ ID NO: 872218 - RNA, 24 nt, Human
gaaguccuuccaugucugugucuc

SEQ ID NO: 872219 - RNA, 25 nt, Human
uaauuugcagacccagccccucccc

SEQ ID NO: 872220 - RNA, 19 nt, Human
ucccaggacuccuuccuug

SEQ ID NO: 872221 - RNA, 18 nt, Human
uccuguuggugggucccc

SEQ ID NO: 872222 - RNA, 19 nt, Human
uccuugguccuguuggugg

SEQ ID NO: 872223 - RNA, 18 nt, Human
ugucugugucucgguccu

SEQ ID NO: 872224 - RNA, 19 nt, Human
uuccaugucugugucucgg

SEQ ID NO: 872225 - RNA, 18 nt, Human
uuuuuuuuuugcgguccc

SEQ ID NO: 872226 - RNA, 21 nt, Human
uuuuuuuuuuuugcgguccca

SEQ ID NO: 872227 - RNA, 18 nt, Human
uuuuuuuuuuuuuugcgg

SEQ ID NO: 872228 - RNA, 18 nt, Human
uuuuuuuuuuuuuuuuug

SEQ ID NO: 872229 - RNA, 19 nt, Human
uuuuuuuuuuuuuuuuugc

SEQ ID NO: 872230 - RNA, 21 nt, Human
uuuuuuuuuuuuuuuuugcgg

SEQ ID NO: 872231 - RNA, 21 nt, Human
aaacaauacaucccaugaaca

SEQ ID NO: 872232 - RNA, 24 nt, Human
aaagugcugggauuacagguguga

SEQ ID NO: 872233 - RNA, 19 nt, Human
aagaaacuuggguccugga

SEQ ID NO: 872234 - RNA, 18 nt, Human
aagugcugggauuacagg

SEQ ID NO: 872235 - RNA, 19 nt, Human
aagugcugggauuacaggu

SEQ ID NO: 872236 - RNA, 26 nt, Human
aagugcugggauuacaggugugagcc

SEQ ID NO: 872237 - RNA, 24 nt, Human
aauacaguggugugaucucagcuc

SEQ ID NO: 872238 - RNA, 24 nt, Human
acccgggugauuuuuguauuuuua

SEQ ID NO: 872239 - RNA, 18 nt, Human
acgggguuucgccauguu

SEQ ID NO: 872240 - RNA, 19 nt, Human
acgggguuucgccauguug

SEQ ID NO: 872241 - RNA, 24 nt, Human
acgggguuucgccauguugcucag

SEQ ID NO: 872242 - RNA, 19 nt, Human
acuacaggugccugccacc

SEQ ID NO: 872243 - RNA, 18 nt, Human
acugcacccagccuggca

SEQ ID NO: 872244 - RNA, 19 nt, Human
acugcacccagccuggcag

SEQ ID NO: 872245 - RNA, 21 nt, Human
agguucaagugauucuccugc

SEQ ID NO: 872246 - RNA, 22 nt, Human
agguucaagugauucuccugcc

SEQ ID NO: 872247 - RNA, 24 nt, Human
aguggugugaucucagcucaccgc

SEQ ID NO: 872248 - RNA, 20 nt, Human
auuuuuguauuuuuaguaga

SEQ ID NO: 872249 - RNA, 22 nt, Human
auuuuuguauuuuuaguagaga

SEQ ID NO: 872250 - RNA, 24 nt, Human
auuuuuguauuuuuaguagagacg

SEQ ID NO: 872251 - RNA, 24 nt, Human
caaagugcugggauuacaggugug

SEQ ID NO: 872252 - RNA, 23 nt, Human
caaccuccaccucccagguucaa

SEQ ID NO: 872253 - RNA, 20 nt, Human
caagugauucuccugccuca

SEQ ID NO: 872254 - RNA, 22 nt, Human
caagugauucuccugccucagc

SEQ ID NO: 872255 - RNA, 21 nt, Human
caccgcaaccuccaccuccca

SEQ ID NO: 872256 - RNA, 21 nt, Human
caccgcaaccuccaccuccca

SEQ ID NO: 872257 - RNA, 23 nt, Human
caggugccugccaccacacccgg

SEQ ID NO: 872258 - RNA, 24 nt, Human
caggugccugccaccacacccggg

SEQ ID NO: 872259 - RNA, 19 nt, Human
cauguugcucaggcugguc

SEQ ID NO: 872260 - RNA, 24 nt, Human
cauguugcucaggcuggucucgaa

SEQ ID NO: 872261 - RNA, 21 nt, Human
ccaaagugcugggauuacagg

SEQ ID NO: 872262 - RNA, 21 nt, Human
ccaaagugcugggauuacagg

SEQ ID NO: 872263 - RNA, 24 nt, Human
ccaaagugcugggauuacaggugu

SEQ ID NO: 872264 - RNA, 24 nt, Human
ccaccucccagguucaagugauuc

SEQ ID NO: 872265 - RNA, 18 nt, Human
ccacugcacccagccugg

SEQ ID NO: 872266 - RNA, 18 nt, Human
ccacugcacccagccugg

SEQ ID NO: 872267 - RNA, 19 nt, Human
ccacugcacccagccuggc

SEQ ID NO: 872268 - RNA, 20 nt, Human
ccacugcacccagccuggca

SEQ ID NO: 872269 - RNA, 22 nt, Human
ccauguugcucaggcuggucuc

SEQ ID NO: 872270 - RNA, 23 nt, Human
ccauguugcucaggcuggucucg

SEQ ID NO: 872271 - RNA, 20 nt, Human
cccaggcuggaauacagugg

SEQ ID NO: 872272 - RNA, 23 nt, Human
cccagguucaagugauucuccuc

SEQ ID NO: 872273 - RNA, 23 nt, Human
cccagguucaagugauucuccug

SEQ ID NO: 872274 - RNA, 19 nt, Human
cccgaccucaagugacuug

SEQ ID NO: 872275 - RNA, 24 nt, Human
cccgaccucaagugacuugcucac

SEQ ID NO: 872276 - RNA, 23 nt, Human
cccggguagcugggacuacaggu

SEQ ID NO: 872277 - RNA, 24 nt, Human
cccggguagcugggacuacaggug

SEQ ID NO: 872278 - RNA, 23 nt, Human
ccgcaaccuccaccucccagguu

SEQ ID NO: 872279 - RNA, 24 nt, Human
ccgcaaccuccaccucccagguuc

SEQ ID NO: 872280 - RNA, 24 nt, Human
ccucccagguucaagugauucucc

SEQ ID NO: 872281 - RNA, 24 nt, Human
ccucccggguagcugggacuacag

SEQ ID NO: 872282 - RNA, 20 nt, Human
cgaccucaagugacuugcuc

SEQ ID NO: 872283 - RNA, 24 nt, Human
cgccauguugcucaggcuggucuc

SEQ ID NO: 872284 - RNA, 27 nt, Human
cgccauguugcucaggcuggucucgaa

SEQ ID NO: 872285 - RNA, 24 nt, Human
cgggguuucgccauguugcucagg

SEQ ID NO: 872286 - RNA, 24 nt, Human
cucaccgcaaccuccaccucccag

SEQ ID NO: 872287 - RNA, 24 nt, Human
cucagccucccggguagcugggac

SEQ ID NO: 872288 - RNA, 19 nt, Human
cucagucacccaggcugga

SEQ ID NO: 872289 - RNA, 19 nt, Human
cucccagguucaagugauu

SEQ ID NO: 872290 - RNA, 19 nt, Human
cucccgaccucaagugacu

SEQ ID NO: 872291 - RNA, 23 nt, Human
cugccucagccucccggguagcu

SEQ ID NO: 872292 - RNA, 24 nt, Human
cuggaauacaguggugugaucuca

SEQ ID NO: 872293 - RNA, 20 nt, Human
gaacacaggugaaugucccu

SEQ ID NO: 872294 - RNA, 23 nt, Human
gaccucaagugacuugcucaccu

SEQ ID NO: 872295 - RNA, 21 nt, Human
gacgggguuucgccauguugc

SEQ ID NO: 872296 - RNA, 23 nt, Human
gagacgggguuucgccauguugc

SEQ ID NO: 872297 - RNA, 19 nt, Human
gaguggaaacaauacaucc

SEQ ID NO: 872298 - RNA, 18 nt, Human
gauuacaggugugagcca

SEQ ID NO: 872299 - RNA, 19 nt, Human
gauuacaggugugagccac

SEQ ID NO: 872300 - RNA, 23 nt, Human
gauuacaggugugagccacugca

SEQ ID NO: 872301 - RNA, 21 nt, Human
gauucuccugccucagccucc

SEQ ID NO: 872302 - RNA, 20 nt, Human
gcucaggcuggucucgaacu

SEQ ID NO: 872303 - RNA, 23 nt, Human
gcuggucucgaacucccgaccuc

SEQ ID NO: 872304 - RNA, 22 nt, Human
ggcuggaauacaguggugugau

SEQ ID NO: 872305 - RNA, 23 nt, Human
gggguuucgccauguugcucagg

SEQ ID NO: 872306 - RNA, 23 nt, Human
guagagacgggguuucgccaugu

SEQ ID NO: 872307 - RNA, 21 nt, Human
gucucagucacccaggcugga

SEQ ID NO: 872308 - RNA, 24 nt, Human
gugauucuccugccucagccuccc

SEQ ID NO: 872309 - RNA, 23 nt, Human
gugauuuuuguauuuuuaguaga

SEQ ID NO: 872310 - RNA, 24 nt, Human
guuucgccauguugcucaggcugg

SEQ ID NO: 872311 - RNA, 19 nt, Human
uacacagcguccacaccuc

SEQ ID NO: 872312 - RNA, 23 nt, Human
uacaggugccugccaccacaccc

SEQ ID NO: 872313 - RNA, 19 nt, Human
uacaggugugagccacugc

SEQ ID NO: 872314 - RNA, 24 nt, Human
uacaggugugagccacugcaccca

SEQ ID NO: 872315 - RNA, 22 nt, Human
uagagacgggguuucgccaugu

SEQ ID NO: 872316 - RNA, 24 nt, Human
uaguagagacgggguuucgccaug

SEQ ID NO: 872317 - RNA, 19 nt, Human
ucaagugauucuccugccu

SEQ ID NO: 872318 - RNA, 19 nt, Human
ucacccaggcuggaauaca

SEQ ID NO: 872319 - RNA, 24 nt, Human
ucaccgcaaccuccaccucccagg

SEQ ID NO: 872320 - RNA, 27 nt, Human
ucaccgcaaccuccaccucccagguuc

SEQ ID NO: 872321 - RNA, 23 nt, Human
ucagccucccggguagcugggac

SEQ ID NO: 872322 - RNA, 26 nt, Human
ucagcucaccgcaaccuccaccuccc

SEQ ID NO: 872323 - RNA, 19 nt, Human
uccauacugagaguagagu

SEQ ID NO: 872324 - RNA, 23 nt, Human
ucccaaagugcugggauuacagg

SEQ ID NO: 872325 - RNA, 21 nt, Human
ucccagguucaagugauucuc

SEQ ID NO: 872326 - RNA, 24 nt, Human
ucccagguucaagugauucuccug

SEQ ID NO: 872327 - RNA, 23 nt, Human
ucccggguagcugggacuacagg

SEQ ID NO: 872328 - RNA, 24 nt, Human
ucccggguagcugggacuacaggu

SEQ ID NO: 872329 - RNA, 22 nt, Human
ucgccauguugcucaggcuggu

SEQ ID NO: 872330 - RNA, 24 nt, Human
ucuccugccucagccucccgggua

SEQ ID NO: 872331 - RNA, 24 nt, Human
ugacuugcucaccuuggccuccca

SEQ ID NO: 872332 - RNA, 20 nt, Human
ugauucuccugccucagccu

SEQ ID NO: 872333 - RNA, 24 nt, Human
ugauuuuuguauuuuuaguagaga

SEQ ID NO: 872334 - RNA, 24 nt, Human
ugccucagccucccggguagcugg

SEQ ID NO: 872335 - RNA, 24 nt, Human
ugcugggauuacaggugugagcca

SEQ ID NO: 872336 - RNA, 23 nt, Human
uggaauacaguggugugaucuca

SEQ ID NO: 872337 - RNA, 28 nt, Human
uggaauacaguggugugauggcucuagc

SEQ ID NO: 872338 - RNA, 21 nt, Human
uggcagucaauuuuaagccuc

SEQ ID NO: 872339 - RNA, 21 nt, Human
ugggacuacaggugccugcca

SEQ ID NO: 872340 - RNA, 22 nt, Human
ugggacuacaggugccugccac

SEQ ID NO: 872341 - RNA, 24 nt, Human
ugggacuacaggugccugccacca

SEQ ID NO: 872342 - RNA, 18 nt, Human
ugggauuacaggugugag

SEQ ID NO: 872343 - RNA, 19 nt, Human
ugggauuacaggugugagc

SEQ ID NO: 872344 - RNA, 21 nt, Human
ugggauuacaggugugagcca

SEQ ID NO: 872345 - RNA, 22 nt, Human
ugggauuacaggugugagccac

SEQ ID NO: 872346 - RNA, 22 nt, Human
ugggauuacaggugugagccac

SEQ ID NO: 872347 - RNA, 24 nt, Human
ugggauuacaggugugagccacug

SEQ ID NO: 872348 - RNA, 19 nt, Human
uggucucgaacucccgacc

SEQ ID NO: 872349 - RNA, 24 nt, Human
uggugugaucucagcucaccgcaa

SEQ ID NO: 872350 - RNA, 21 nt, Human
uguauuuuuaguagagacggg

SEQ ID NO: 872351 - RNA, 21 nt, Human
uuaagccuccuauuucccagg

SEQ ID NO: 872352 - RNA, 18 nt, Human
uuaguagagacgggguuu

SEQ ID NO: 872353 - RNA, 22 nt, Human
uuaguagagacgggguuucgcc

SEQ ID NO: 872354 - RNA, 24 nt, Human
uuaguagagacgggguuucgccau

SEQ ID NO: 872355 - RNA, 21 nt, Human
uucaagugauucuccugccuc

SEQ ID NO: 872356 - RNA, 23 nt, Human
uucaagugauucuccugccucag

SEQ ID NO: 872357 - RNA, 24 nt, Human
uucaagugauucuccugccucagc

SEQ ID NO: 872358 - RNA, 18 nt, Human
uuggccucccaaagugcu

SEQ ID NO: 872359 - RNA, 23 nt, Human
uuucgccauguugcucaggcugg

SEQ ID NO: 872360 - RNA, 24 nt, Human
uuucgccauguugcucaggcuggu

SEQ ID NO: 872361 - RNA, 21 nt, Human
uuuggggcuauuuugccuuag

SEQ ID NO: 872362 - RNA, 23 nt, Human
uuuuuaguagagacgggguuucg

SEQ ID NO: 872363 - RNA, 24 nt, Human
uuuuuaguagagacgggguuucgc

SEQ ID NO: 872364 - RNA, 20 nt, Human
uuuuuguauuuuuaguagag

SEQ ID NO: 872365 - RNA, 25 nt, Human
uuuuuuuuuuuuaguuagagucuca

SEQ ID NO: 872366 - RNA, 25 nt, Human
aaaaaccuguacagcauuagugcca

SEQ ID NO: 872367 - RNA, 21 nt, Human
aaacaaacagaccaaaaagca

SEQ ID NO: 872368 - RNA, 24 nt, Human
aaacaaacagaccaaaaagcauaa

SEQ ID NO: 872369 - RNA, 18 nt, Human
aaacagaccaaaaagcau

SEQ ID NO: 872370 - RNA, 26 nt, Human
aagcaaaagaucaaacaaagggaccc

SEQ ID NO: 872371 - RNA, 20 nt, Human
aagcauaaauaaacagcagc

SEQ ID NO: 872372 - RNA, 19 nt, Human
aaggugagugacagagagc

SEQ ID NO: 872373 - RNA, 22 nt, Human
aaugagcugccucuuaacugcc

SEQ ID NO: 872374 - RNA, 21 nt, Human
acacacacacucccucucaca

SEQ ID NO: 872375 - RNA, 19 nt, Human
acacacacucccucucaca

SEQ ID NO: 872376 - RNA, 25 nt, Human
acacacacucccucucacagucucc

SEQ ID NO: 872377 - RNA, 18 nt, Human
acugccugcuccaccccu

SEQ ID NO: 872378 - RNA, 22 nt, Human
agagacagcaggaagggcaaag

SEQ ID NO: 872379 - RNA, 23 nt, Human
agagacagcaggaagggcaaagc

SEQ ID NO: 872380 - RNA, 20 nt, Human
agagcagaacagggucugcu

SEQ ID NO: 872381 - RNA, 18 nt, Human
agcaggaagggcaaagcu

SEQ ID NO: 872382 - RNA, 19 nt, Human
agcccagagcagaacaggg

SEQ ID NO: 872383 - RNA, 18 nt, Human
aguggcucccugugccca

SEQ ID NO: 872384 - RNA, 23 nt, Human
auccacaugugucaacacacaca

SEQ ID NO: 872385 - RNA, 23 nt, Human
caaacagaccaaaaagcauaaau

SEQ ID NO: 872386 - RNA, 19 nt, Human
caagcgcugagcccagaaa

SEQ ID NO: 872387 - RNA, 25 nt, Human
cacacucccucucacagucuccaaa

SEQ ID NO: 872388 - RNA, 21 nt, Human
cacagcccagagcagaacagg

SEQ ID NO: 872389 - RNA, 19 nt, Human
caccaggccaaccauggag

SEQ ID NO: 872390 - RNA, 21 nt, Human
caccccuucacagcccagagc

SEQ ID NO: 872391 - RNA, 20 nt, Human
cacugccugcuccaccccuu

SEQ ID NO: 872392 - RNA, 21 nt, Human
cagaaauuuggacaaaugagc

SEQ ID NO: 872393 - RNA, 19 nt, Human
cagccccugugcccuuccu

SEQ ID NO: 872394 - RNA, 19 nt, Human
ccaucuuccuuccucuguc

SEQ ID NO: 872395 - RNA, 20 nt, Human
ccauggagcuagaaacagag

SEQ ID NO: 872396 - RNA, 21 nt, Human
cccaccaggccaaccauggag

SEQ ID NO: 872397 - RNA, 22 nt, Human
ccccuggcauacccugagaacc

SEQ ID NO: 872398 - RNA, 19 nt, Human
cccucaguggcucccugug

SEQ ID NO: 872399 - RNA, 21 nt, Human
cccugccauacucccuucuca

SEQ ID NO: 872400 - RNA, 20 nt, Human
cccuggcauacccugagaac

SEQ ID NO: 872401 - RNA, 21 nt, Human
ccgguacuguuucugccccug

SEQ ID NO: 872402 - RNA, 22 nt, Human
ccugauccacaugugucaacac

SEQ ID NO: 872403 - RNA, 18 nt, Human
cucagccccugugcccuu

SEQ ID NO: 872404 - RNA, 20 nt, Human
cucagcucuccuaacaggaa

SEQ ID NO: 872405 - RNA, 18 nt, Human
cuccaccccuucacagcc

SEQ ID NO: 872406 - RNA, 20 nt, Human
cuccuaacaggaaaaaaacc

SEQ ID NO: 872407 - RNA, 18 nt, Human
cucugucucccacucucc

SEQ ID NO: 872408 - RNA, 21 nt, Human
cugauccacaugugucaacac

SEQ ID NO: 872409 - RNA, 23 nt, Human
cugcuccaccccuucacagccca

SEQ ID NO: 872410 - RNA, 21 nt, Human
cugggccagcaaggaggaagg

SEQ ID NO: 872411 - RNA, 21 nt, Human
cuguuucugccccuggcauac

SEQ ID NO: 872412 - RNA, 18 nt, Human
gacuguguggucuggugu

SEQ ID NO: 872413 - RNA, 24 nt, Human
gcaaaaaacaauuuuaaaaaagca

SEQ ID NO: 872414 - RNA, 22 nt, Human
gcauacccugagaacccaugug

SEQ ID NO: 872415 - RNA, 22 nt, Human
gcccaucucagccucuugccau

SEQ ID NO: 872416 - RNA, 21 nt, Human
gccccugugcccuuccugggc

SEQ ID NO: 872417 - RNA, 19 nt, Human
gcuagaaacagagacagca

SEQ ID NO: 872418 - RNA, 19 nt, Human
ggaauuuuucacauuugcu

SEQ ID NO: 872419 - RNA, 22 nt, Human
uagaaacagagacagcaggaag

SEQ ID NO: 872420 - RNA, 22 nt, Human
ucaaacaaacagaccaaaaagc

SEQ ID NO: 872421 - RNA, 23 nt, Human
ucaaacaaacagaccaaaaagca

SEQ ID NO: 872422 - RNA, 25 nt, Human
ucaacacacacacucccucucacag

SEQ ID NO: 872423 - RNA, 21 nt, Human
ucaguagccgcaucccagccc

SEQ ID NO: 872424 - RNA, 21 nt, Human
ucccagcccugccauacuccc

SEQ ID NO: 872425 - RNA, 23 nt, Human
ucccucucacagucuccaaacag

SEQ ID NO: 872426 - RNA, 25 nt, Human
ucucacagucuccaaacagcacugc

SEQ ID NO: 872427 - RNA, 18 nt, Human
ucucaguagccgcauccc

SEQ ID NO: 872428 - RNA, 24 nt, Human
ucuccaaacagcacugcagagccu

SEQ ID NO: 872429 - RNA, 25 nt, Human
ucuccaucuuccuuccucugucucc

SEQ ID NO: 872430 - RNA, 19 nt, Human
ugacccucaguggcucccu

SEQ ID NO: 872431 - RNA, 24 nt, Human
ugacuucuguagugcucagccccu

SEQ ID NO: 872432 - RNA, 21 nt, Human
ugagugacagagagccgguac

SEQ ID NO: 872433 - RNA, 24 nt, Human
ugcaaaaaacaauuuuaaaaaagc

SEQ ID NO: 872434 - RNA, 18 nt, Human
ugccugcuccaccccuuc

SEQ ID NO: 872435 - RNA, 25 nt, Human
ugcuccaccccuucacagcccagag

SEQ ID NO: 872436 - RNA, 18 nt, Human
ugggcagcuggccucagc

SEQ ID NO: 872437 - RNA, 22 nt, Human
uguuucugccccuggcauaccc

SEQ ID NO: 872438 - RNA, 22 nt, Human
uuggaggacuguguggucuggu

SEQ ID NO: 872439 - RNA, 21 nt, Human
uugggagggaacuccaccccc

SEQ ID NO: 872440 - RNA, 19 nt, Human
uuuuuuuuuuuuuuugucu

SEQ ID NO: 872441 - RNA, 18 nt, Human
uuuuuuuuuuuuuuuuug

SEQ ID NO: 872442 - RNA, 19 nt, Human
uuuuuuuuuuuuuuuuugu

SEQ ID NO: 872443 - RNA, 19 nt, Human
aaacagcccaauggcccca

SEQ ID NO: 872444 - RNA, 21 nt, Human
aaacagcccaauggccccagg

SEQ ID NO: 872445 - RNA, 22 nt, Human
aagaguggcaaguugcugcugc

SEQ ID NO: 872446 - RNA, 18 nt, Human
acaaacaugaacagaaca

SEQ ID NO: 872447 - RNA, 24 nt, Human
acaccuggaggguacuuuggccac

SEQ ID NO: 872448 - RNA, 23 nt, Human
acugcacuggggaccaagggaau

SEQ ID NO: 872449 - RNA, 26 nt, Human
aggaagaguggcaaguugcugcugcc

SEQ ID NO: 872450 - RNA, 19 nt, Human
aggaggaauaaacuggaug

SEQ ID NO: 872451 - RNA, 23 nt, Human
aucaacuucccaucaguaaauuc

SEQ ID NO: 872452 - RNA, 24 nt, Human
caaacaugaacagaacacagccga

SEQ ID NO: 872453 - RNA, 24 nt, Human
cagaaccuugcagcucccggcucc

SEQ ID NO: 872454 - RNA, 22 nt, Human
cagcgcucuggauccggcuccu

SEQ ID NO: 872455 - RNA, 19 nt, Human
caggguuuuucuugugcua

SEQ ID NO: 872456 - RNA, 25 nt, Human
cauucaacaaacaugaacagaacac

SEQ ID NO: 872457 - RNA, 24 nt, Human
ccccagguggcuccgugccagccu

SEQ ID NO: 872458 - RNA, 23 nt, Human
ccgcccgcucggcucucagcugu

SEQ ID NO: 872459 - RNA, 25 nt, Human
ccguggaccugcccgcgccgcccgc

SEQ ID NO: 872460 - RNA, 19 nt, Human
ccugcuccgcccgacccuc

SEQ ID NO: 872461 - RNA, 22 nt, Human
ccugugguaaauuacuucuuuc

SEQ ID NO: 872462 - RNA, 24 nt, Human
cucagcugucaagcagccgccugc

SEQ ID NO: 872463 - RNA, 22 nt, Human
cuccucggaggaccugcaacuc

SEQ ID NO: 872464 - RNA, 22 nt, Human
cugccccacccuugacaaacag

SEQ ID NO: 872465 - RNA, 26 nt, Human
cuguggucagggcaugaccggggucc

SEQ ID NO: 872466 - RNA, 18 nt, Human
cugugucgccugugguaa

SEQ ID NO: 872467 - RNA, 21 nt, Human
gaaggcugagaaagcuuuuuc

SEQ ID NO: 872468 - RNA, 23 nt, Human
gcgauuagucaguuucuugaagu

SEQ ID NO: 872469 - RNA, 23 nt, Human
gcgccgcccgcucggcucucagc

SEQ ID NO: 872470 - RNA, 22 nt, Human
ggaccaagggaauugagggcac

SEQ ID NO: 872471 - RNA, 21 nt, Human
ggacucagaggaguggggcag

SEQ ID NO: 872472 - RNA, 20 nt, Human
ggggcagagccuccccacca

SEQ ID NO: 872473 - RNA, 21 nt, Human
guaaacggaccaaacauaaua

SEQ ID NO: 872474 - RNA, 20 nt, Human
guccaaacacugcacugggg

SEQ ID NO: 872475 - RNA, 19 nt, Human
ucccaucaguaaauuccug

SEQ ID NO: 872476 - RNA, 21 nt, Human
ucccguggaccugcccgcgcc

SEQ ID NO: 872477 - RNA, 18 nt, Human
uccgugccagccuccuga

SEQ ID NO: 872478 - RNA, 20 nt, Human
ugacaaacagcccaauggcc

SEQ ID NO: 872479 - RNA, 25 nt, Human
ugacuugaauuccaccaucagcaag

SEQ ID NO: 872480 - RNA, 24 nt, Human
ugagaaagcuuuuucuuggugcuc

SEQ ID NO: 872481 - RNA, 20 nt, Human
ugcccuacucaccuaacagu

SEQ ID NO: 872482 - RNA, 27 nt, Human
ugcccuacucaccuaacaguuuugcug

SEQ ID NO: 872483 - RNA, 18 nt, Human
ugcugaaucccagcgcuc

SEQ ID NO: 872484 - RNA, 21 nt, Human
uggcacuccugcugaauccca

SEQ ID NO: 872485 - RNA, 20 nt, Human
ugggcucauggaggaagagu

SEQ ID NO: 872486 - RNA, 22 nt, Human
uggggcagagccuccccaccag

SEQ ID NO: 872487 - RNA, 23 nt, Human
uggugguccaaacacugcacugg

SEQ ID NO: 872488 - RNA, 19 nt, Human
uuuuucuuggugcucuguu

SEQ ID NO: 872489 - RNA, 22 nt, Human
uuuuuuuuuuuuuuaccaguaa

SEQ ID NO: 872490 - RNA, 22 nt, Human
uuuuuuuuuuuuuuuuuaccag

SEQ ID NO: 872491 - RNA, 23 nt, Human
uuuuuuuuuuuuuuuuuuaccag

SEQ ID NO: 872492 - RNA, 22 nt, Human
aaaauaacauaccauacauugg

SEQ ID NO: 872493 - RNA, 18 nt, Human
aaacacucagcagaaaac

SEQ ID NO: 872494 - RNA, 22 nt, Human
aaaggaaacacucagcagaaaa

SEQ ID NO: 872495 - RNA, 20 nt, Human
aaaguuuuaagaaucucaca

SEQ ID NO: 872496 - RNA, 18 nt, Human
aacauaccauacauugga

SEQ ID NO: 872497 - RNA, 18 nt, Human
aagaacgaaaugaacaaa

SEQ ID NO: 872498 - RNA, 23 nt, Human
aagaacgaaaugaacaaaaagaa

SEQ ID NO: 872499 - RNA, 22 nt, Human
aagccaacuuuccagaccaaaa

SEQ ID NO: 872500 - RNA, 24 nt, Human
aauugggcugguccuugaaaacag

SEQ ID NO: 872501 - RNA, 21 nt, Human
acaaagcaagaggaacccaag

SEQ ID NO: 872502 - RNA, 22 nt, Human
acaaagcaagaggaacccaagc

SEQ ID NO: 872503 - RNA, 24 nt, Human
acaaaggaaacacucagcagaaaa

SEQ ID NO: 872504 - RNA, 23 nt, Human
accacgcacaccgcagguacugg

SEQ ID NO: 872505 - RNA, 19 nt, Human
agaagacaaauagggcaac

SEQ ID NO: 872506 - RNA, 21 nt, Human
agacaagccaacuuuccagac

SEQ ID NO: 872507 - RNA, 25 nt, Human
agacaagccaacuuuccagaccaaa

SEQ ID NO: 872508 - RNA, 19 nt, Human
aggcacucacagcuaggga

SEQ ID NO: 872509 - RNA, 18 nt, Human
auaauuacagagagaaug

SEQ ID NO: 872510 - RNA, 23 nt, Human
augaagcaaaaaaguuuuaagaa

SEQ ID NO: 872511 - RNA, 21 nt, Human
auggaaaacagaucuugugca

SEQ ID NO: 872512 - RNA, 20 nt, Human
auggaugauccagacuuggu

SEQ ID NO: 872513 - RNA, 19 nt, Human
caaagcaagaggaacccaa

SEQ ID NO: 872514 - RNA, 22 nt, Human
caacuacaaaccuuucauguug

SEQ ID NO: 872515 - RNA, 23 nt, Human
caagaggaacccaagcauuucca

SEQ ID NO: 872516 - RNA, 25 nt, Human
caagaggaacccaagcauuuccauu

SEQ ID NO: 872517 - RNA, 23 nt, Human
caaggacaauucauaauuacaga

SEQ ID NO: 872518 - RNA, 24 nt, Human
cagaaguuauauagccaagaggca

SEQ ID NO: 872519 - RNA, 18 nt, Human
cagcagaaaacauucccu

SEQ ID NO: 872520 - RNA, 24 nt, Human
ccaagcauuuccauugcuggacuu

SEQ ID NO: 872521 - RNA, 24 nt, Human
ccaaggacaaaggaaacacucagc

SEQ ID NO: 872522 - RNA, 21 nt, Human
ccacugagcccacuucagugu

SEQ ID NO: 872523 - RNA, 21 nt, Human
ccagaccaaaaggcacucaca

SEQ ID NO: 872524 - RNA, 20 nt, Human
cccaaggacaaaggaaacac

SEQ ID NO: 872525 - RNA, 25 nt, Human
cccaaggacaaaggaaacacucagc

SEQ ID NO: 872526 - RNA, 19 nt, Human
cccuaggcuccagaaucuc

SEQ ID NO: 872527 - RNA, 20 nt, Human
cgacuccugaguccccugac

SEQ ID NO: 872528 - RNA, 24 nt, Human
cuagcuguggguauuaugagacaa

SEQ ID NO: 872529 - RNA, 22 nt, Human
cuccaaaaaccacugagcccac

SEQ ID NO: 872530 - RNA, 23 nt, Human
cuccaaaaaccacugagcccacu

SEQ ID NO: 872531 - RNA, 22 nt, Human
cucccuaugcaaagcugccaca

SEQ ID NO: 872532 - RNA, 22 nt, Human
cugguccuugaaaacaguggga

SEQ ID NO: 872533 - RNA, 18 nt, Human
cuugugugggagcaugag

SEQ ID NO: 872534 - RNA, 20 nt, Human
gaaaugaacaaaaagaacac

SEQ ID NO: 872535 - RNA, 20 nt, Human
gaaccaagccagagaaauug

SEQ ID NO: 872536 - RNA, 19 nt, Human
gaagcaaaaaaguuuuaag

SEQ ID NO: 872537 - RNA, 22 nt, Human
gacaaagcaagaggaacccaag

SEQ ID NO: 872538 - RNA, 19 nt, Human
gagcagcccaaggacaaag

SEQ ID NO: 872539 - RNA, 21 nt, Human
gagcagcccaaggacaaagga

SEQ ID NO: 872540 - RNA, 18 nt, Human
gcuucuucacuccaaaaa

SEQ ID NO: 872541 - RNA, 20 nt, Human
gcuugcaugaccagucucac

SEQ ID NO: 872542 - RNA, 22 nt, Human
gggucucuaacaugaguuguuu

SEQ ID NO: 872543 - RNA, 21 nt, Human
ggucaagcgugcagagaaggc

SEQ ID NO: 872544 - RNA, 18 nt, Human
guaaaacaaggacaauuc

SEQ ID NO: 872545 - RNA, 26 nt, Human
gucugaagucuuugcacugaaggcca

SEQ ID NO: 872546 - RNA, 24 nt, Human
uaacauaccauacauuggagaaga

SEQ ID NO: 872547 - RNA, 26 nt, Human
uagccaagaggcaaccaaguguaaua

SEQ ID NO: 872548 - RNA, 23 nt, Human
uagcucccuaggcuccagaaucu

SEQ ID NO: 872549 - RNA, 25 nt, Human
uauuauaaacaauaaaauauaugua

SEQ ID NO: 872550 - RNA, 18 nt, Human
ucacaguggaaauaaucc

SEQ ID NO: 872551 - RNA, 24 nt, Human
ucacggggccaaaugguuucccuu

SEQ ID NO: 872552 - RNA, 21 nt, Human
ucacuccaaaaaccacugagg

SEQ ID NO: 872553 - RNA, 20 nt, Human
ucacugagcgugcucagggg

SEQ ID NO: 872554 - RNA, 21 nt, Human
ucagggaaguaagaacgaaau

SEQ ID NO: 872555 - RNA, 21 nt, Human
uccccugacaaagcaagagga

SEQ ID NO: 872556 - RNA, 23 nt, Human
ucuagugaucaaagacauucucu

SEQ ID NO: 872557 - RNA, 25 nt, Human
ucucuugcuucagggaaguaagaac

SEQ ID NO: 872558 - RNA, 26 nt, Human
ucucuuuuaauguaaaacaaggacug

SEQ ID NO: 872559 - RNA, 18 nt, Human
ucuuuuguauagaugauu

SEQ ID NO: 872560 - RNA, 23 nt, Human
ugaaacgaacuccgaaccaagcc

SEQ ID NO: 872561 - RNA, 18 nt, Human
ugacaaagcaagaggaac

SEQ ID NO: 872562 - RNA, 20 nt, Human
ugagacaagccaacuuucca

SEQ ID NO: 872563 - RNA, 22 nt, Human
ugagacaagccaacuuuccaga

SEQ ID NO: 872564 - RNA, 25 nt, Human
ugagacaagccaacuuuccagacca

SEQ ID NO: 872565 - RNA, 19 nt, Human
ugcugggccuaaccagccc

SEQ ID NO: 872566 - RNA, 18 nt, Human
uggaugauccagacuugg

SEQ ID NO: 872567 - RNA, 26 nt, Human
uggcacuguaaaugcuugcaugacca

SEQ ID NO: 872568 - RNA, 21 nt, Human
ugggcugguccuugaaaacag

SEQ ID NO: 872569 - RNA, 23 nt, Human
uuuuuuuuuuuuuuuuuauccau

SEQ ID NO: 872570 - RNA, 19 nt, Human
acaggcagcuccaugagag

SEQ ID NO: 872571 - RNA, 19 nt, Human
agagccccggccccugccc

SEQ ID NO: 872572 - RNA, 18 nt, Human
cagcuggcaggcaggagg

SEQ ID NO: 872573 - RNA, 22 nt, Human
caggagcuccaggcugaggccu

SEQ ID NO: 872574 - RNA, 23 nt, Human
cagucccuccacccacccugccc

SEQ ID NO: 872575 - RNA, 18 nt, Human
ccaugagagccccggccc

SEQ ID NO: 872576 - RNA, 20 nt, Human
cccccucuuccucaucuuga

SEQ ID NO: 872577 - RNA, 23 nt, Human
cccccucuuccucaucuugauuu

SEQ ID NO: 872578 - RNA, 20 nt, Human
cccuccacccacccugccca

SEQ ID NO: 872579 - RNA, 21 nt, Human
ccggccccugcccuggcggcu

SEQ ID NO: 872580 - RNA, 23 nt, Human
ccgugggcucuggcugugucccu

SEQ ID NO: 872581 - RNA, 18 nt, Human
cucgcaucagucccucca

SEQ ID NO: 872582 - RNA, 22 nt, Human
cugaagcccugcacggccccug

SEQ ID NO: 872583 - RNA, 19 nt, Human
cuggcggcuucugcuuugc

SEQ ID NO: 872584 - RNA, 22 nt, Human
cugggggaccucgcaucagucc

SEQ ID NO: 872585 - RNA, 19 nt, Human
gagagccccggccccugcc

SEQ ID NO: 872586 - RNA, 22 nt, Human
gguuucaccacaggcagcucca

SEQ ID NO: 872587 - RNA, 24 nt, Human
gugcugcugaagcccugcacggcc

SEQ ID NO: 872588 - RNA, 20 nt, Human
uacaagacgccagcuggcag

SEQ ID NO: 872589 - RNA, 19 nt, Human
ucagucccuccacccaccc

SEQ ID NO: 872590 - RNA, 19 nt, Human
uccaggcugaggccugggg

SEQ ID NO: 872591 - RNA, 21 nt, Human
ucucaaggcacgacaggcccc

SEQ ID NO: 872592 - RNA, 22 nt, Human
ugauucccguuccagcuuucuc

SEQ ID NO: 872593 - RNA, 18 nt, Human
ugauuuggauacaagacg

SEQ ID NO: 872594 - RNA, 20 nt, Human
ugcccuggcggcuucugcuu

SEQ ID NO: 872595 - RNA, 22 nt, Human
ugcccuggcggcuucugcuuug

SEQ ID NO: 872596 - RNA, 23 nt, Human
ugcccuggcggcuucugcuuugc

SEQ ID NO: 872597 - RNA, 23 nt, Human
ugcugcugaagcccugcacggcc

SEQ ID NO: 872598 - RNA, 18 nt, Human
uuccucaucuugauuugg

SEQ ID NO: 872599 - RNA, 27 nt, Human
uuuuuuuuuuuuuuuuuuuuuuugggg

SEQ ID NO: 872600 - RNA, 20 nt, Human
aaccgugcgcccagcaagac

SEQ ID NO: 872601 - RNA, 21 nt, Human
aagacacaagcgaugacaccg

SEQ ID NO: 872602 - RNA, 21 nt, Human
acaagcgaugacaccgauuua

SEQ ID NO: 872603 - RNA, 20 nt, Human
agacggaggagggggacagc

SEQ ID NO: 872604 - RNA, 19 nt, Human
agaguccuccgggagcucc

SEQ ID NO: 872605 - RNA, 23 nt, Human
agcaagacacaagcgaugacacc

SEQ ID NO: 872606 - RNA, 21 nt, Human
aggagcagucaggggacucag

SEQ ID NO: 872607 - RNA, 21 nt, Human
aggccucggggugggggaguc

SEQ ID NO: 872608 - RNA, 25 nt, Human
aucccagagccucccgcagaguccc

SEQ ID NO: 872609 - RNA, 19 nt, Human
caaccgugcgcccagcaag

SEQ ID NO: 872610 - RNA, 24 nt, Human
caaugggucccggccuuccacaac

SEQ ID NO: 872611 - RNA, 23 nt, Human
cacaacggcagcuccucgguccc

SEQ ID NO: 872612 - RNA, 23 nt, Human
caccccaagccuggaaacuucca

SEQ ID NO: 872613 - RNA, 23 nt, Human
caccgagcucuggagacucagga

SEQ ID NO: 872614 - RNA, 19 nt, Human
cagcacaacggcagcuccu

SEQ ID NO: 872615 - RNA, 24 nt, Human
caggccccgaggagcagucagggg

SEQ ID NO: 872616 - RNA, 18 nt, Human
caggcuaaaccuggggac

SEQ ID NO: 872617 - RNA, 18 nt, Human
cagggaccaccacccugu

SEQ ID NO: 872618 - RNA, 22 nt, Human
caucccagagccucccgcagag

SEQ ID NO: 872619 - RNA, 20 nt, Human
ccacgcuacagcccugcgcc

SEQ ID NO: 872620 - RNA, 23 nt, Human
ccagagccucccgcagaguccca

SEQ ID NO: 872621 - RNA, 21 nt, Human
cccagagccccagcucugccc

SEQ ID NO: 872622 - RNA, 22 nt, Human
cccagggaccaccacccugucc

SEQ ID NO: 872623 - RNA, 20 nt, Human
ccccgaggagcagucagggg

SEQ ID NO: 872624 - RNA, 25 nt, Human
ccccuggcuccccucgcgauccucc

SEQ ID NO: 872625 - RNA, 22 nt, Human
ccccuggcuucccucgcgaucc

SEQ ID NO: 872626 - RNA, 19 nt, Human
ccccugugcccuaccugac

SEQ ID NO: 872627 - RNA, 20 nt, Human
ccccugugcccuaccugacc

SEQ ID NO: 872628 - RNA, 22 nt, Human
ccugagccgggcaucccagagc

SEQ ID NO: 872629 - RNA, 23 nt, Human
ccuggcuccccucgcgauccucc

SEQ ID NO: 872630 - RNA, 23 nt, Human
ccuggcuucccucgcaauccucc

SEQ ID NO: 872631 - RNA, 23 nt, Human
ccuggcuucccucgcgauccucc

SEQ ID NO: 872632 - RNA, 23 nt, Human
ccuggcuucccucgcgauccucc

SEQ ID NO: 872633 - RNA, 23 nt, Human
ccuggcuucccucgcgauccucc

SEQ ID NO: 872634 - RNA, 24 nt, Human
cgcaggcgccucugccaccacccc

SEQ ID NO: 872635 - RNA, 19 nt, Human
cgccucugccaccaccccu

SEQ ID NO: 872636 - RNA, 25 nt, Human
cgccucugccaccaccccucgugcc

SEQ ID NO: 872637 - RNA, 21 nt, Human
cgcucugaggucugcuugucc

SEQ ID NO: 872638 - RNA, 20 nt, Human
cggccaguaaccgcaggcgc

SEQ ID NO: 872639 - RNA, 24 nt, Human
cuccccuggcuccccucgcgaucc

SEQ ID NO: 872640 - RNA, 24 nt, Human
cuccccuggcuucccucgcgaucc

SEQ ID NO: 872641 - RNA, 24 nt, Human
cuccccuggcuucccucgcgaucc

SEQ ID NO: 872642 - RNA, 24 nt, Human
cucccuuggcuucccucgcgaucc

SEQ ID NO: 872643 - RNA, 24 nt, Human
cucgcgauccuccccuggcucccc

SEQ ID NO: 872644 - RNA, 24 nt, Human
cucgcgauccuccccuggcuuccc

SEQ ID NO: 872645 - RNA, 24 nt, Human
cucgcgauccuccccuggcuuccc

SEQ ID NO: 872646 - RNA, 24 nt, Human
cucgcgauccuccccuggcuuccc

SEQ ID NO: 872647 - RNA, 24 nt, Human
cucgcgauccuccccuggcuuccc

SEQ ID NO: 872648 - RNA, 19 nt, Human
cucugcgggggaggagcgg

SEQ ID NO: 872649 - RNA, 25 nt, Human
cugccccuggcuucccucgcgaucc

SEQ ID NO: 872650 - RNA, 18 nt, Human
cugcuugucccucccugg

SEQ ID NO: 872651 - RNA, 20 nt, Human
cuggaaacuuccacgcuaca

SEQ ID NO: 872652 - RNA, 22 nt, Human
gacgccaaagcucugcggggga

SEQ ID NO: 872653 - RNA, 25 nt, Human
gcagagucccaccccaagccuggaa

SEQ ID NO: 872654 - RNA, 26 nt, Human
gcagagucccaccccaagccuggaaa

SEQ ID NO: 872655 - RNA, 21 nt, Human
gccccgaggagcagucagggg

SEQ ID NO: 872656 - RNA, 21 nt, Human
gcgauccucccuuggcuuccc

SEQ ID NO: 872657 - RNA, 21 nt, Human
ggagcagucaggggacucagg

SEQ ID NO: 872658 - RNA, 19 nt, Human
uaccugacccacccaggga

SEQ ID NO: 872659 - RNA, 18 nt, Human
uccccuggcuccccucgc

SEQ ID NO: 872660 - RNA, 18 nt, Human
uccccuggcuucccucgc

SEQ ID NO: 872661 - RNA, 18 nt, Human
uccccuggcuucccucgc

SEQ ID NO: 872662 - RNA, 19 nt, Human
uccccuggcuucccucgca

SEQ ID NO: 872663 - RNA, 19 nt, Human
uccccuggcuucccucgcg

SEQ ID NO: 872664 - RNA, 20 nt, Human
ucgccgccuccgggacgccu

SEQ ID NO: 872665 - RNA, 19 nt, Human
ucugcuugucccucccugg

SEQ ID NO: 872666 - RNA, 21 nt, Human
ugagccgggcaucccagagcc

SEQ ID NO: 872667 - RNA, 20 nt, Human
ugcgccaggccccgaggagc

SEQ ID NO: 872668 - RNA, 22 nt, Human
ugcgcccagcaagacacaagcg

SEQ ID NO: 872669 - RNA, 19 nt, Human
ugcgggggaggagcggccc

SEQ ID NO: 872670 - RNA, 23 nt, Human
ugcuugucccucccuggccccug

SEQ ID NO: 872671 - RNA, 19 nt, Human
uggccccugugcccuaccu

SEQ ID NO: 872672 - RNA, 21 nt, Human
uuuuuuuuuuuuuuguuuugg

SEQ ID NO: 872673 - RNA, 23 nt, Human
uuuuuuuuuuuuuuuuguuuugg

SEQ ID NO: 872674 - RNA, 18 nt, Human
uuuuuuuuuuuuuuuuug

SEQ ID NO: 872675 - RNA, 24 nt, Human
uuuuuuuuuuuuuuuuuuuguuuu

SEQ ID NO: 872676 - RNA, 20 nt, Human
acgcagucccaggggaggcc

SEQ ID NO: 872677 - RNA, 26 nt, Human
acgcagucccaggggagggggaacgc

SEQ ID NO: 872678 - RNA, 20 nt, Human
acucagaaaggcagcagagg

SEQ ID NO: 872679 - RNA, 24 nt, Human
agaagccucuggggccugcugcuc

SEQ ID NO: 872680 - RNA, 22 nt, Human
agagaaacggcuccagaccagg

SEQ ID NO: 872681 - RNA, 18 nt, Human
aggauggaauagggaaga

SEQ ID NO: 872682 - RNA, 21 nt, Human
aggccacccaucaaaggaugg

SEQ ID NO: 872683 - RNA, 24 nt, Human
agggacccuagagagaaacggcuc

SEQ ID NO: 872684 - RNA, 22 nt, Human
aguggggcuggucugcuguggg

SEQ ID NO: 872685 - RNA, 25 nt, Human
cagaggugcagagaagccucugggg

SEQ ID NO: 872686 - RNA, 21 nt, Human
cccagcagaccguuaagaaag

SEQ ID NO: 872687 - RNA, 19 nt, Human
ccuguggcagcaucagccc

SEQ ID NO: 872688 - RNA, 20 nt, Human
cggagaguccugagagacag

SEQ ID NO: 872689 - RNA, 22 nt, Human
cggcuccagaccaggcuuuccc

SEQ ID NO: 872690 - RNA, 20 nt, Human
cuccucuauggcugcccgaa

SEQ ID NO: 872691 - RNA, 18 nt, Human
cugaccuugacuuccugu

SEQ ID NO: 872692 - RNA, 23 nt, Human
cuggaguggguguggccuccucu

SEQ ID NO: 872693 - RNA, 18 nt, Human
cuggggccugcugcucug

SEQ ID NO: 872694 - RNA, 22 nt, Human
gaaaggcagcagaggugcagag

SEQ ID NO: 872695 - RNA, 21 nt, Human
gacccuagagagaaacggcuc

SEQ ID NO: 872696 - RNA, 19 nt, Human
gagagacaggaggagaggg

SEQ ID NO: 872697 - RNA, 21 nt, Human
gaggugcagagaagccucugg

SEQ ID NO: 872698 - RNA, 19 nt, Human
gcagucccaggggaggccc

SEQ ID NO: 872699 - RNA, 21 nt, Human
ggagagggguucuccauggca

SEQ ID NO: 872700 - RNA, 23 nt, Human
ggaggcauccauccuugacccuc

SEQ ID NO: 872701 - RNA, 19 nt, Human
ggcucggugcugcugacag

SEQ ID NO: 872702 - RNA, 21 nt, Human
ggggaggcccacuuggguccc

SEQ ID NO: 872703 - RNA, 22 nt, Human
gguguccuggaguggguguggc

SEQ ID NO: 872704 - RNA, 22 nt, Human
guaggaugucuagugacacccc

SEQ ID NO: 872705 - RNA, 20 nt, Human
uaacaggccacccaucaaag

SEQ ID NO: 872706 - RNA, 22 nt, Human
uccauccuugacccucggagag

SEQ ID NO: 872707 - RNA, 24 nt, Human
ucggagaguccugagagacaggag

SEQ ID NO: 872708 - RNA, 22 nt, Human
ucugcuguggggccguccugug

SEQ ID NO: 872709 - RNA, 19 nt, Human
ugacaguggggcuggucug

SEQ ID NO: 872710 - RNA, 20 nt, Human
ugagagacaggaggagaggg

SEQ ID NO: 872711 - RNA, 19 nt, Human
ugcggcggagggagagaug

SEQ ID NO: 872712 - RNA, 21 nt, Human
ugcugcucuguguccuguggc

SEQ ID NO: 872713 - RNA, 21 nt, Human
uggaauagggaagaaagugag

SEQ ID NO: 872714 - RNA, 26 nt, Human
uggcagcaucagccccugcggcggag

SEQ ID NO: 872715 - RNA, 18 nt, Human
uggcagugagggguuccc

SEQ ID NO: 872716 - RNA, 23 nt, Human
uggggcuggucugcuguggggcc

SEQ ID NO: 872717 - RNA, 19 nt, Human
uguccuggagugggugugg

SEQ ID NO: 872718 - RNA, 20 nt, Human
uucccuagcagggacccuag

SEQ ID NO: 872719 - RNA, 25 nt, Human
uuuuuuuuuuucccacuuguuuuuu

SEQ ID NO: 872720 - RNA, 18 nt, Human
agaguugucaaaaggaca

SEQ ID NO: 872721 - RNA, 19 nt, Human
agaguugucaaaaggacag

SEQ ID NO: 872722 - RNA, 18 nt, Human
cauuucuguuucagaauc

SEQ ID NO: 872723 - RNA, 24 nt, Human
uaacauaaacuauuugcugauauu

SEQ ID NO: 872724 - RNA, 23 nt, Human
uaagagaguugucaaaaggacag

SEQ ID NO: 872725 - RNA, 22 nt, Human
uaagaugcaacuucuacuguga

SEQ ID NO: 872726 - RNA, 24 nt, Human
ucagagucauuaaauaagaugcaa

SEQ ID NO: 872727 - RNA, 19 nt, Human
uucagaauccccacauucc

SEQ ID NO: 872728 - RNA, 24 nt, Human
uucauuucuguuucagaaucccca

SEQ ID NO: 872729 - RNA, 22 nt, Human
uucugugucuccuucuccuuca

SEQ ID NO: 872730 - RNA, 28 nt, Human
uuucagaauccccacauuccucauuuga

SEQ ID NO: 872731 - RNA, 20 nt, Human
aaaauuaaugaauaaggaau

SEQ ID NO: 872732 - RNA, 22 nt, Human
aaaccgccacacccacaccuca

SEQ ID NO: 872733 - RNA, 21 nt, Human
aaaguuaaagugauaucgcca

SEQ ID NO: 872734 - RNA, 22 nt, Human
aagcaguucacaaccauaagua

SEQ ID NO: 872735 - RNA, 19 nt, Human
aaggaugaggauguggaga

SEQ ID NO: 872736 - RNA, 25 nt, Human
aagugauggaggcugaauuugagcc

SEQ ID NO: 872737 - RNA, 22 nt, Human
aauggccuuuacaaacuuccac

SEQ ID NO: 872738 - RNA, 21 nt, Human
acacagaaaccgccacaccca

SEQ ID NO: 872739 - RNA, 21 nt, Human
acagaaaccgccacacccaca

SEQ ID NO: 872740 - RNA, 19 nt, Human
acucuuaccucccucccca

SEQ ID NO: 872741 - RNA, 24 nt, Human
agaaaccgccacacccacaccuca

SEQ ID NO: 872742 - RNA, 24 nt, Human
agaaggcagcuuucucucuuucug

SEQ ID NO: 872743 - RNA, 22 nt, Human
agacacagaaaucaacucagcu

SEQ ID NO: 872744 - RNA, 24 nt, Human
agacacagaaaucaacucagcuga

SEQ ID NO: 872745 - RNA, 18 nt, Human
agauucugcaugacuucu

SEQ ID NO: 872746 - RNA, 19 nt, Human
agcaguucacaaccauaag

SEQ ID NO: 872747 - RNA, 26 nt, Human
agguguggcaauucagaagagcagcu

SEQ ID NO: 872748 - RNA, 19 nt, Human
aguauuaucauuuauugag

SEQ ID NO: 872749 - RNA, 20 nt, Human
auaaguaagauuuacuuccu

SEQ ID NO: 872750 - RNA, 21 nt, Human
auaaguaagauuuacuuccua

SEQ ID NO: 872751 - RNA, 24 nt, Human
aucuuucaccuccccuuucuccau

SEQ ID NO: 872752 - RNA, 19 nt, Human
augccagggccccagguuc

SEQ ID NO: 872753 - RNA, 20 nt, Human
caaguccucacccauggcca

SEQ ID NO: 872754 - RNA, 21 nt, Human
cacacagcagcccauccccag

SEQ ID NO: 872755 - RNA, 24 nt, Human
cacacccacaccucacauaccaau

SEQ ID NO: 872756 - RNA, 25 nt, Human
cacagaauuccaaguguagcacagg

SEQ ID NO: 872757 - RNA, 21 nt, Human
cacauaccaugacagggugga

SEQ ID NO: 872758 - RNA, 22 nt, Human
cacccauggccaggaaugaggc

SEQ ID NO: 872759 - RNA, 19 nt, Human
cacgguaucuuuaaaaaac

SEQ ID NO: 872760 - RNA, 20 nt, Human
cacugacaggaggguccuuu

SEQ ID NO: 872761 - RNA, 21 nt, Human
cagaccaaguccucacccaug

SEQ ID NO: 872762 - RNA, 25 nt, Human
cagagcacagaauuccaaguguagc

SEQ ID NO: 872763 - RNA, 19 nt, Human
caucucacacacucacaga

SEQ ID NO: 872764 - RNA, 22 nt, Human
cauugacaggaaccugcucuuc

SEQ ID NO: 872765 - RNA, 21 nt, Human
ccaaguuuuacuuuauagcua

SEQ ID NO: 872766 - RNA, 21 nt, Human
ccacacccacaccucacauac

SEQ ID NO: 872767 - RNA, 20 nt, Human
ccacaccucacauaccauga

SEQ ID NO: 872768 - RNA, 19 nt, Human
ccagaacuaagcuuuacau

SEQ ID NO: 872769 - RNA, 18 nt, Human
ccaggaaugaggcacagg

SEQ ID NO: 872770 - RNA, 18 nt, Human
cccacuguggaagaaggc

SEQ ID NO: 872771 - RNA, 19 nt, Human
cccauggccaggaaugagg

SEQ ID NO: 872772 - RNA, 21 nt, Human
ccucuugcaucucuucaaaaa

SEQ ID NO: 872773 - RNA, 20 nt, Human
cgaacucagaacauugacag

SEQ ID NO: 872774 - RNA, 26 nt, Human
cgguugaccucugugugagauggcac

SEQ ID NO: 872775 - RNA, 23 nt, Human
cuccagaaggcagcuuucucucu

SEQ ID NO: 872776 - RNA, 22 nt, Human
cucuccuggggaaaagagccua

SEQ ID NO: 872777 - RNA, 29 nt, Human
cugacccuacucuuaccucccuccccauc

SEQ ID NO: 872778 - RNA, 19 nt, Human
cugggcccucuugcaucuc

SEQ ID NO: 872779 - RNA, 18 nt, Human
gaaaccgccacacccaca

SEQ ID NO: 872780 - RNA, 21 nt, Human
gaaauagacacagaaaucaac

SEQ ID NO: 872781 - RNA, 18 nt, Human
gaacgucaacauucacac

SEQ ID NO: 872782 - RNA, 18 nt, Human
gaagagcagcugucaaca

SEQ ID NO: 872783 - RNA, 24 nt, Human
gaggaugccuaguggcaggugcag

SEQ ID NO: 872784 - RNA, 18 nt, Human
gccaaguggaaguagagc

SEQ ID NO: 872785 - RNA, 18 nt, Human
gggaauauaauaggcugu

SEQ ID NO: 872786 - RNA, 21 nt, Human
ggugucaaaggauggaagggu

SEQ ID NO: 872787 - RNA, 22 nt, Human
ggugucaaaggauggaaggguu

SEQ ID NO: 872788 - RNA, 23 nt, Human
ggugucaaaggauggaaggguuc

SEQ ID NO: 872789 - RNA, 24 nt, Human
guacacagaaaccgccacacccac

SEQ ID NO: 872790 - RNA, 21 nt, Human
gucaugucuggccaugucucc

SEQ ID NO: 872791 - RNA, 21 nt, Human
guggaaguagagcugucgcuu

SEQ ID NO: 872792 - RNA, 18 nt, Human
gugucaaaggauggaagg

SEQ ID NO: 872793 - RNA, 22 nt, Human
gugucaaaggauggaaggguuc

SEQ ID NO: 872794 - RNA, 18 nt, Human
uaacuuggccgguugugg

SEQ ID NO: 872795 - RNA, 18 nt, Human
uaagaaaacuggagaaau

SEQ ID NO: 872796 - RNA, 23 nt, Human
uaagugauggaggcugaauuuga

SEQ ID NO: 872797 - RNA, 21 nt, Human
uacacagaaaccgccacaccc

SEQ ID NO: 872798 - RNA, 20 nt, Human
uacacauacaaccagguguc

SEQ ID NO: 872799 - RNA, 24 nt, Human
uacagcuuugcacacugacaggag

SEQ ID NO: 872800 - RNA, 19 nt, Human
uagcauguggaaucagucc

SEQ ID NO: 872801 - RNA, 20 nt, Human
uaucaugccaggcugggaga

SEQ ID NO: 872802 - RNA, 22 nt, Human
ucaacauucacacagcagccca

SEQ ID NO: 872803 - RNA, 21 nt, Human
ucacacagcagcccaucccca

SEQ ID NO: 872804 - RNA, 24 nt, Human
ucagaacauugacaggaaccugcu

SEQ ID NO: 872805 - RNA, 20 nt, Human
uccaugagauuacagcuuug

SEQ ID NO: 872806 - RNA, 23 nt, Human
ucccaaagaccauccuaagagcc

SEQ ID NO: 872807 - RNA, 25 nt, Human
ucccuccccaucaauucaagcugaa

SEQ ID NO: 872808 - RNA, 21 nt, Human
ucugugacuuugucgugugug

SEQ ID NO: 872809 - RNA, 25 nt, Human
ucugugacuuugucgugugugggag

SEQ ID NO: 872810 - RNA, 19 nt, Human
ugaaauagacacagaaauc

SEQ ID NO: 872811 - RNA, 18 nt, Human
ugaaucccaaagaccauc

SEQ ID NO: 872812 - RNA, 23 nt, Human
ugaauggccuuuacaaacuucca

SEQ ID NO: 872813 - RNA, 18 nt, Human
ugacaggaaccugcucuu

SEQ ID NO: 872814 - RNA, 18 nt, Human
ugaccaaguuuggauuua

SEQ ID NO: 872815 - RNA, 22 nt, Human
ugaccucagcucugucuagcac

SEQ ID NO: 872816 - RNA, 24 nt, Human
ugaccuugaccauccuaaucacac

SEQ ID NO: 872817 - RNA, 20 nt, Human
ugacuucuccuguccauccc

SEQ ID NO: 872818 - RNA, 21 nt, Human
ugagcaaacguacacagaaac

SEQ ID NO: 872819 - RNA, 20 nt, Human
ugauaucgccaggguuccug

SEQ ID NO: 872820 - RNA, 24 nt, Human
ugcguguaugagcaaacguacaca

SEQ ID NO: 872821 - RNA, 19 nt, Human
ugcuccaucaucacucucc

SEQ ID NO: 872822 - RNA, 21 nt, Human
uggaaucaguccuccagaagg

SEQ ID NO: 872823 - RNA, 19 nt, Human
uggcaggguauagcagaga

SEQ ID NO: 872824 - RNA, 22 nt, Human
uggccaggaaugaggcacaggc

SEQ ID NO: 872825 - RNA, 22 nt, Human
uggcccccucucuucuaguccc

SEQ ID NO: 872826 - RNA, 18 nt, Human
uggcuugugcccaguggc

SEQ ID NO: 872827 - RNA, 19 nt, Human
ugguaagugauggaggcug

SEQ ID NO: 872828 - RNA, 21 nt, Human
ugguauuauuuuccccgucuu

SEQ ID NO: 872829 - RNA, 22 nt, Human
uguagacuauucaaucuacacc

SEQ ID NO: 872830 - RNA, 18 nt, Human
ugucaaaggauggaaggg

SEQ ID NO: 872831 - RNA, 21 nt, Human
ugucaaaggauggaaggguuc

SEQ ID NO: 872832 - RNA, 18 nt, Human
uguggccagaacuaagcu

SEQ ID NO: 872833 - RNA, 24 nt, Human
uguguucuaucugcauuccugcuu

SEQ ID NO: 872834 - RNA, 18 nt, Human
uucacacagcagcccauc

SEQ ID NO: 872835 - RNA, 23 nt, Human
uuccacccaaguuuuacuuuaua

SEQ ID NO: 872836 - RNA, 21 nt, Human
aacagaagcuccccacccccu

SEQ ID NO: 872837 - RNA, 21 nt, Human
aaggauucaggcucggccucc

SEQ ID NO: 872838 - RNA, 19 nt, Human
acacagcaacagacaccac

SEQ ID NO: 872839 - RNA, 20 nt, Human
acacugaaaguugcauaacu

SEQ ID NO: 872840 - RNA, 19 nt, Human
acagaagcuccccaccccc

SEQ ID NO: 872841 - RNA, 20 nt, Human
acaggcccccgcugcccacc

SEQ ID NO: 872842 - RNA, 22 nt, Human
acccccagagccuucccugccc

SEQ ID NO: 872843 - RNA, 23 nt, Human
agcaggcagggggcaguuagggg

SEQ ID NO: 872844 - RNA, 19 nt, Human
agccagcgccgguguggcg

SEQ ID NO: 872845 - RNA, 21 nt, Human
agcugggccuggggcagugcc

SEQ ID NO: 872846 - RNA, 22 nt, Human
aggcaaacgcaauccggguccg

SEQ ID NO: 872847 - RNA, 21 nt, Human
aggcagggggcaguuaggggu

SEQ ID NO: 872848 - RNA, 23 nt, Human
aggcagggggcaguuaggggugc

SEQ ID NO: 872849 - RNA, 21 nt, Human
agggaccuagggccaggagcu

SEQ ID NO: 872850 - RNA, 22 nt, Human
aggggugcaagagagcccaggg

SEQ ID NO: 872851 - RNA, 20 nt, Human
aucucuucugcugucuccca

SEQ ID NO: 872852 - RNA, 23 nt, Human
caaggcaguggacgucacuuggg

SEQ ID NO: 872853 - RNA, 22 nt, Human
caaggcgaagcgcucgucuccu

SEQ ID NO: 872854 - RNA, 25 nt, Human
cacacacaggcacacgcaugucagc

SEQ ID NO: 872855 - RNA, 24 nt, Human
cacacgcaugucagcaagcacgug

SEQ ID NO: 872856 - RNA, 24 nt, Human
caccacacacaggcacacgcaugg

SEQ ID NO: 872857 - RNA, 18 nt, Human
cacccccucucccauuuc

SEQ ID NO: 872858 - RNA, 22 nt, Human
cacgacacagcaacagacacca

SEQ ID NO: 872859 - RNA, 23 nt, Human
cacucugugggggcagcccugau

SEQ ID NO: 872860 - RNA, 22 nt, Human
cagaacagaagcuccccacccc

SEQ ID NO: 872861 - RNA, 23 nt, Human
cagacaccacacacaggcacacg

SEQ ID NO: 872862 - RNA, 19 nt, Human
cagggagggccgggccggg

SEQ ID NO: 872863 - RNA, 25 nt, Human
cagggcaccaggguguuaggguccc

SEQ ID NO: 872864 - RNA, 22 nt, Human
ccagggagggccgggccgggca

SEQ ID NO: 872865 - RNA, 20 nt, Human
cccacggcaugcccggcagg

SEQ ID NO: 872866 - RNA, 18 nt, Human
cccaugcgccacccucgc

SEQ ID NO: 872867 - RNA, 24 nt, Human
ccccagagaucugggguucuccaa

SEQ ID NO: 872868 - RNA, 20 nt, Human
cccccagagccuucccugcc

SEQ ID NO: 872869 - RNA, 23 nt, Human
cccccagagccuucccugcccau

SEQ ID NO: 872870 - RNA, 18 nt, Human
cccccgcugcccaccgcc

SEQ ID NO: 872871 - RNA, 18 nt, Human
cccccucucccauuucag

SEQ ID NO: 872872 - RNA, 20 nt, Human
ccccgcugcccaccgccugg

SEQ ID NO: 872873 - RNA, 20 nt, Human
ccggccgguggccugggccu

SEQ ID NO: 872874 - RNA, 21 nt, Human
ccgguggccugggccugacca

SEQ ID NO: 872875 - RNA, 27 nt, Human
ccuagggccaggagcugggccuggggc

SEQ ID NO: 872876 - RNA, 22 nt, Human
ccucccaugcgccacccucgcc

SEQ ID NO: 872877 - RNA, 21 nt, Human
ccucccgccccacucucucca

SEQ ID NO: 872878 - RNA, 26 nt, Human
ccucccgccccacucucuccagagcc

SEQ ID NO: 872879 - RNA, 25 nt, Human
ccucgcccaccacacuggggccgga

SEQ ID NO: 872880 - RNA, 21 nt, Human
ccuggcugggccccagagauc

SEQ ID NO: 872881 - RNA, 23 nt, Human
cgcaugcaaacacacuuaaagca

SEQ ID NO: 872882 - RNA, 19 nt, Human
cgccgguguggcggccucg

SEQ ID NO: 872883 - RNA, 24 nt, Human
cgggccgggcagggagccagcgcc

SEQ ID NO: 872884 - RNA, 26 nt, Human
cggguuggggggacagggaugugugg

SEQ ID NO: 872885 - RNA, 23 nt, Human
cuaaggcaaacgcaauccggguc

SEQ ID NO: 872886 - RNA, 24 nt, Human
cuccagagccccgagacccucagg

SEQ ID NO: 872887 - RNA, 22 nt, Human
cucccauuucaguagauggaag

SEQ ID NO: 872888 - RNA, 20 nt, Human
cucgccuuggccgggcccac

SEQ ID NO: 872889 - RNA, 18 nt, Human
cugcccccacacccugcc

SEQ ID NO: 872890 - RNA, 24 nt, Human
cuggcugggccccagagaucuggg

SEQ ID NO: 872891 - RNA, 23 nt, Human
cuggugcagggcaccaggguguu

SEQ ID NO: 872892 - RNA, 22 nt, Human
gaacagaagcuccccacccccu

SEQ ID NO: 872893 - RNA, 19 nt, Human
gaagggagcggggaggggc

SEQ ID NO: 872894 - RNA, 19 nt, Human
gacccccagagccuucccu

SEQ ID NO: 872895 - RNA, 18 nt, Human
gagcaggcagggggcagu

SEQ ID NO: 872896 - RNA, 22 nt, Human
gaggagggcagggguucccggg

SEQ ID NO: 872897 - RNA, 21 nt, Human
gcacagcugcccccacacccu

SEQ ID NO: 872898 - RNA, 25 nt, Human
gccccaggggcggugcggccugcuu

SEQ ID NO: 872899 - RNA, 19 nt, Human
gcccugauucuaucucuuc

SEQ ID NO: 872900 - RNA, 21 nt, Human
gcccugauucuaucucuucug

SEQ ID NO: 872901 - RNA, 18 nt, Human
gccggagcagggcggucg

SEQ ID NO: 872902 - RNA, 19 nt, Human
gccucccaugcgccacccu

SEQ ID NO: 872903 - RNA, 18 nt, Human
gccuggcugggccccaga

SEQ ID NO: 872904 - RNA, 20 nt, Human
ggaagcuguggcagaacccg

SEQ ID NO: 872905 - RNA, 19 nt, Human
ggaaggggcuggcaggggg

SEQ ID NO: 872906 - RNA, 19 nt, Human
ggacaggcccccgcugccc

SEQ ID NO: 872907 - RNA, 19 nt, Human
ggaggaaaaggcccugggg

SEQ ID NO: 872908 - RNA, 21 nt, Human
ggcacauggggcugggaggga

SEQ ID NO: 872909 - RNA, 24 nt, Human
ggcaggcacauggggcugggaggg

SEQ ID NO: 872910 - RNA, 23 nt, Human
ggcagggggccccaggggcggug

SEQ ID NO: 872911 - RNA, 18 nt, Human
ggccuggggcagugccgg

SEQ ID NO: 872912 - RNA, 22 nt, Human
ggcugggagggaccuagggcca

SEQ ID NO: 872913 - RNA, 24 nt, Human
gggcagggguucccggguuggggg

SEQ ID NO: 872914 - RNA, 21 nt, Human
gggccgggccgggcagggagc

SEQ ID NO: 872915 - RNA, 23 nt, Human
gggcuggcagggggccccagggg

SEQ ID NO: 872916 - RNA, 22 nt, Human
ggggaaggauggcgggagaggg

SEQ ID NO: 872917 - RNA, 18 nt, Human
gggggccugcccgggucc

SEQ ID NO: 872918 - RNA, 18 nt, Human
guagcuuccaggacuccu

SEQ ID NO: 872919 - RNA, 19 nt, Human
gugcggccugcuggaggag

SEQ ID NO: 872920 - RNA, 22 nt, Human
uaacuguggccucgagggccac

SEQ ID NO: 872921 - RNA, 21 nt, Human
uagccccuugggucccacucu

SEQ ID NO: 872922 - RNA, 25 nt, Human
ucaggcucggccucccaugcgccac

SEQ ID NO: 872923 - RNA, 22 nt, Human
uccauaagaccccugaacuugc

SEQ ID NO: 872924 - RNA, 22 nt, Human
ucccaaagaaaaaaacauuuua

SEQ ID NO: 872925 - RNA, 21 nt, Human
uccccacccccucucccauuu

SEQ ID NO: 872926 - RNA, 21 nt, Human
ucccgccccacucucuccaga

SEQ ID NO: 872927 - RNA, 22 nt, Human
ucccgccccacucucuccagaa

SEQ ID NO: 872928 - RNA, 23 nt, Human
ucccuucaccagaacagaagcug

SEQ ID NO: 872929 - RNA, 20 nt, Human
ucggaggcuucucggagaau

SEQ ID NO: 872930 - RNA, 23 nt, Human
ucggugccuccuaauuucugcag

SEQ ID NO: 872931 - RNA, 22 nt, Human
ucuaucucuucugcugucuccc

SEQ ID NO: 872932 - RNA, 20 nt, Human
ucuccagagccccgagaccc

SEQ ID NO: 872933 - RNA, 24 nt, Human
ucucccagccugggaaggggcugg

SEQ ID NO: 872934 - RNA, 22 nt, Human
ucugcagauucuaaggccaaaa

SEQ ID NO: 872935 - RNA, 20 nt, Human
ucugugggggcagcccugau

SEQ ID NO: 872936 - RNA, 24 nt, Human
ucuucugcugucucccagccuggg

SEQ ID NO: 872937 - RNA, 25 nt, Human
ugagguagauuggcacagcugcccc

SEQ ID NO: 872938 - RNA, 23 nt, Human
ugcauaacuguggccucgagggc

SEQ ID NO: 872939 - RNA, 24 nt, Human
ugccagggagggccgggccgggca

SEQ ID NO: 872940 - RNA, 18 nt, Human
ugcccccacacccugccu

SEQ ID NO: 872941 - RNA, 21 nt, Human
ugcccgggucccuucaccaga

SEQ ID NO: 872942 - RNA, 19 nt, Human
ugccggagcaggcaggggg

SEQ ID NO: 872943 - RNA, 23 nt, Human
ugccggagcaggcagggggcagu

SEQ ID NO: 872944 - RNA, 19 nt, Human
uggaagacgcagaggagga

SEQ ID NO: 872945 - RNA, 19 nt, Human
uggaagggagcggggaggg

SEQ ID NO: 872946 - RNA, 20 nt, Human
uggaggagggcagggguucc

SEQ ID NO: 872947 - RNA, 23 nt, Human
uggcacagcugcccccacacccu

SEQ ID NO: 872948 - RNA, 23 nt, Human
uggcagaacccggccgguggccu

SEQ ID NO: 872949 - RNA, 24 nt, Human
uggcagggggccccaggggcggug

SEQ ID NO: 872950 - RNA, 20 nt, Human
uggcccgcgcggcacucgcc

SEQ ID NO: 872951 - RNA, 22 nt, Human
uggccugggccugaccacggcc

SEQ ID NO: 872952 - RNA, 24 nt, Human
ugggaagcuguggcagaacccggc

SEQ ID NO: 872953 - RNA, 22 nt, Human
ugggaaggggcuggcagggggc

SEQ ID NO: 872954 - RNA, 23 nt, Human
ugggaaggggcuggcagggggcc

SEQ ID NO: 872955 - RNA, 22 nt, Human
uggggaaggauggcgggagagg

SEQ ID NO: 872956 - RNA, 22 nt, Human
ugggggccugcccgggucccuu

SEQ ID NO: 872957 - RNA, 19 nt, Human
uggggugcugggggccugc

SEQ ID NO: 872958 - RNA, 18 nt, Human
uggugacaaggcagugga

SEQ ID NO: 872959 - RNA, 19 nt, Human
ugucagcaagcacguggga

SEQ ID NO: 872960 - RNA, 23 nt, Human
uguuaggguccccaugcuuccuc

SEQ ID NO: 872961 - RNA, 18 nt, Human
uucacagauauuuuuagg

SEQ ID NO: 872962 - RNA, 23 nt, Human
uucccaaagaaaaaaacauuuua

SEQ ID NO: 872963 - RNA, 20 nt, Human
uuccucagggggugggcaug

SEQ ID NO: 872964 - RNA, 21 nt, Human
uucuaaggccaaaaaauaaaa

SEQ ID NO: 872965 - RNA, 23 nt, Human
uugcuccauucacagauauuuuu

SEQ ID NO: 872966 - RNA, 21 nt, Human
uuuuuuuuuuuuuuucccaaa

SEQ ID NO: 872967 - RNA, 20 nt, Human
auuacaaaauagugaccgcg

SEQ ID NO: 872968 - RNA, 20 nt, Human
cacccaggcccccaccacuc

SEQ ID NO: 872969 - RNA, 22 nt, Human
cagcccaguacaccugcaacgg

SEQ ID NO: 872970 - RNA, 24 nt, Human
cagcuggaucagcuccagccacau

SEQ ID NO: 872971 - RNA, 21 nt, Human
ccaggcccccaccacuccacc

SEQ ID NO: 872972 - RNA, 19 nt, Human
ccccacagaguuccucucu

SEQ ID NO: 872973 - RNA, 21 nt, Human
ccccaccacuccacacgggcg

SEQ ID NO: 872974 - RNA, 19 nt, Human
cuccacacgggcggagagc

SEQ ID NO: 872975 - RNA, 22 nt, Human
gaucccugacagcccaguacac

SEQ ID NO: 872976 - RNA, 24 nt, Human
gcccccaccacuccacacgggcgg

SEQ ID NO: 872977 - RNA, 22 nt, Human
gcggagagcagaaacccgggag

SEQ ID NO: 872978 - RNA, 21 nt, Human
uacaccugcaacggcccccac

SEQ ID NO: 872979 - RNA, 24 nt, Human
ucccacccaggcccccaccacucc

SEQ ID NO: 872980 - RNA, 24 nt, Human
ugguauagaaaagaucccugacag

SEQ ID NO: 872981 - RNA, 19 nt, Human
uuuuuuuuuuuuguagguc

SEQ ID NO: 872982 - RNA, 19 nt, Human
uuuuuuuuuuuuuuuuugu

SEQ ID NO: 872983 - RNA, 23 nt, Human
uuuuuuuuuuuuuuuuuuguagg

SEQ ID NO: 872984 - RNA, 21 nt, Human
aaacccaagacugcccagcaa

SEQ ID NO: 872985 - RNA, 19 nt, Human
aaagugcugggauuacugg

SEQ ID NO: 872986 - RNA, 24 nt, Human
aaagugcugggauuacuggcauga

SEQ ID NO: 872987 - RNA, 25 nt, Human
aagcaauccucccaccucggccucc

SEQ ID NO: 872988 - RNA, 20 nt, Human
aagcauuugcuguuuccugc

SEQ ID NO: 872989 - RNA, 26 nt, Human
aagugcugggauuacuggcaugaacc

SEQ ID NO: 872990 - RNA, 18 nt, Human
acacucaggagaccaaga

SEQ ID NO: 872991 - RNA, 21 nt, Human
accagcgccacuggcaucauc

SEQ ID NO: 872992 - RNA, 21 nt, Human
acccagccauuccugggccug

SEQ ID NO: 872993 - RNA, 23 nt, Human
accuggguacacucaggagacca

SEQ ID NO: 872994 - RNA, 18 nt, Human
agacaggaucuugcugug

SEQ ID NO: 872995 - RNA, 20 nt, Human
agagcccagcccccuccugc

SEQ ID NO: 872996 - RNA, 25 nt, Human
agagcccagcccccuccugccaggu

SEQ ID NO: 872997 - RNA, 23 nt, Human
agccagacguggggcaaaggugu

SEQ ID NO: 872998 - RNA, 20 nt, Human
agcccaggccagcccugcaa

SEQ ID NO: 872999 - RNA, 18 nt, Human
aggcagugcaggguccuc

SEQ ID NO: 873000 - RNA, 22 nt, Human
aggcagugcaggguccucuggg

SEQ ID NO: 873001 - RNA, 19 nt, Human
agugugaggaacagagaga

SEQ ID NO: 873002 - RNA, 18 nt, Human
aucacggacaucauggag

SEQ ID NO: 873003 - RNA, 24 nt, Human
aucuugcuguguugcccaggcugg

SEQ ID NO: 873004 - RNA, 22 nt, Human
caaagacaggaucuugcugugu

SEQ ID NO: 873005 - RNA, 18 nt, Human
caaagccacaggugaccu

SEQ ID NO: 873006 - RNA, 18 nt, Human
cacagcccaggccagccc

SEQ ID NO: 873007 - RNA, 19 nt, Human
cacagcccaggccagcccu

SEQ ID NO: 873008 - RNA, 20 nt, Human
cacagcccgcugguucuccu

SEQ ID NO: 873009 - RNA, 18 nt, Human
cacuaaacccaagacugc

SEQ ID NO: 873010 - RNA, 25 nt, Human
cacugcacuguuccuccaggucucc

SEQ ID NO: 873011 - RNA, 19 nt, Human
cagcauugcggcacuaaac

SEQ ID NO: 873012 - RNA, 20 nt, Human
cagcgccacuggcaucaucg

SEQ ID NO: 873013 - RNA, 20 nt, Human
cagcuccuacggggugggga

SEQ ID NO: 873014 - RNA, 22 nt, Human
caggaagcagccugucagaagu

SEQ ID NO: 873015 - RNA, 24 nt, Human
caggaucuugcuguguugcccagg

SEQ ID NO: 873016 - RNA, 23 nt, Human
cagggcccaggaguccccagcuc

SEQ ID NO: 873017 - RNA, 22 nt, Human
caggugaccuggggccaaugcc

SEQ ID NO: 873018 - RNA, 19 nt, Human
caguggccgagccaucccc

SEQ ID NO: 873019 - RNA, 18 nt, Human
caucacggacaucaugga

SEQ ID NO: 873020 - RNA, 23 nt, Human
cauccccgcccacacaugcugcc

SEQ ID NO: 873021 - RNA, 19 nt, Human
ccaaagccacaggugaccu

SEQ ID NO: 873022 - RNA, 19 nt, Human
ccagcccugcaacugcucu

SEQ ID NO: 873023 - RNA, 22 nt, Human
ccauuccugggccugccgccua

SEQ ID NO: 873024 - RNA, 21 nt, Human
cccaagacugcccagcaacuc

SEQ ID NO: 873025 - RNA, 20 nt, Human
cccacacaugcugcccggca

SEQ ID NO: 873026 - RNA, 19 nt, Human
cccacagcccaggccagcc

SEQ ID NO: 873027 - RNA, 25 nt, Human
cccacagcccaggccagcccugcaa

SEQ ID NO: 873028 - RNA, 20 nt, Human
cccagcccccuccugccagg

SEQ ID NO: 873029 - RNA, 21 nt, Human
ccccggaggacugcuguggcc

SEQ ID NO: 873030 - RNA, 22 nt, Human
cccguggcaacucagggcagcc

SEQ ID NO: 873031 - RNA, 21 nt, Human
ccuacgggguggggagaaguc

SEQ ID NO: 873032 - RNA, 21 nt, Human
ccuccacgcucacaucacgga

SEQ ID NO: 873033 - RNA, 22 nt, Human
ccuccacgcucacaucacggac

SEQ ID NO: 873034 - RNA, 25 nt, Human
ccuccaggucuccccaagguuggcu

SEQ ID NO: 873035 - RNA, 19 nt, Human
ccugcaacugcucucccca

SEQ ID NO: 873036 - RNA, 24 nt, Human
ccuggccucaagcaauccucccac

SEQ ID NO: 873037 - RNA, 18 nt, Human
ccuguccugcaacgaggg

SEQ ID NO: 873038 - RNA, 19 nt, Human
cgaaagugcugggauuacu

SEQ ID NO: 873039 - RNA, 24 nt, Human
cgaaagugcugggauuacuggcau

SEQ ID NO: 873040 - RNA, 21 nt, Human
cgccuaggggcucacagggcc

SEQ ID NO: 873041 - RNA, 24 nt, Human
cucaagcaauccucccaccucggc

SEQ ID NO: 873042 - RNA, 27 nt, Human
cuccuggccucaagcaauccucccacc

SEQ ID NO: 873043 - RNA, 21 nt, Human
cucggccuccgaaagugcugg

SEQ ID NO: 873044 - RNA, 20 nt, Human
cugccugaggcugggccccg

SEQ ID NO: 873045 - RNA, 22 nt, Human
cuggccucaagcaauccuccca

SEQ ID NO: 873046 - RNA, 19 nt, Human
cugggugggaaggacgugc

SEQ ID NO: 873047 - RNA, 22 nt, Human
cuugcuguguugcccaggcugg

SEQ ID NO: 873048 - RNA, 21 nt, Human
cuuuacacugcacuguuccuc

SEQ ID NO: 873049 - RNA, 24 nt, Human
gaaaacggcacagcugccucccac

SEQ ID NO: 873050 - RNA, 24 nt, Human
gaaagugcugggauuacuggcaug

SEQ ID NO: 873051 - RNA, 23 nt, Human
gagcaggaccaccacugcgggga

SEQ ID NO: 873052 - RNA, 18 nt, Human
gagccauccccgcccaca

SEQ ID NO: 873053 - RNA, 22 nt, Human
gauuacuggcaugaaccacugc

SEQ ID NO: 873054 - RNA, 24 nt, Human
gcacuaaacccaagacugcccagc

SEQ ID NO: 873055 - RNA, 22 nt, Human
gccgagccauccccgcccacac

SEQ ID NO: 873056 - RNA, 22 nt, Human
gcggucccaauggcugucagaa

SEQ ID NO: 873057 - RNA, 20 nt, Human
gcuggaacucaauuucugca

SEQ ID NO: 873058 - RNA, 23 nt, Human
gcuggucuugaacuccuggccuc

SEQ ID NO: 873059 - RNA, 24 nt, Human
gcuguguugcccaggcuggucuug

SEQ ID NO: 873060 - RNA, 24 nt, Human
ggagaagcccgucugcaagccgga

SEQ ID NO: 873061 - RNA, 21 nt, Human
ggaggcggguccucggggagg

SEQ ID NO: 873062 - RNA, 22 nt, Human
ggaggcggguccucggggaggg

SEQ ID NO: 873063 - RNA, 19 nt, Human
ggcccuggauguucacccc

SEQ ID NO: 873064 - RNA, 24 nt, Human
ggcuggucuugaacuccuggccuc

SEQ ID NO: 873065 - RNA, 18 nt, Human
gggcaucaggccaggcgc

SEQ ID NO: 873066 - RNA, 20 nt, Human
ggggaggggcagcuuccaca

SEQ ID NO: 873067 - RNA, 23 nt, Human
ggggaggggcagcuuccacagug

SEQ ID NO: 873068 - RNA, 24 nt, Human
ggggaggggcagcuuccacagugu

SEQ ID NO: 873069 - RNA, 21 nt, Human
gggugggagaagcccgucugc

SEQ ID NO: 873070 - RNA, 24 nt, Human
guacacucaggagaccaagagcac

SEQ ID NO: 873071 - RNA, 23 nt, Human
guaccggaccuucuccuccucca

SEQ ID NO: 873072 - RNA, 19 nt, Human
gucacagccagacgugggg

SEQ ID NO: 873073 - RNA, 19 nt, Human
uaaacccaagacugcccag

SEQ ID NO: 873074 - RNA, 22 nt, Human
uacccagccauuccugggccug

SEQ ID NO: 873075 - RNA, 21 nt, Human
uacuagaagagcugaccuuuu

SEQ ID NO: 873076 - RNA, 21 nt, Human
uaugaugacccuguccugcaa

SEQ ID NO: 873077 - RNA, 22 nt, Human
uaugaugacccuguccugcaac

SEQ ID NO: 873078 - RNA, 18 nt, Human
ucacagccagguaggccc

SEQ ID NO: 873079 - RNA, 18 nt, Human
ucagcgucacagccaggu

SEQ ID NO: 873080 - RNA, 25 nt, Human
ucaggccaggcgcgcucggugcaca

SEQ ID NO: 873081 - RNA, 18 nt, Human
ucccaguuuuuccuguuu

SEQ ID NO: 873082 - RNA, 21 nt, Human
uccccgcccacacaugcugcc

SEQ ID NO: 873083 - RNA, 24 nt, Human
uccgaaagugcugggauuacuggc

SEQ ID NO: 873084 - RNA, 22 nt, Human
ucggggaggggcagcuuccaca

SEQ ID NO: 873085 - RNA, 23 nt, Human
ucggugcacaccgcaccugggag

SEQ ID NO: 873086 - RNA, 22 nt, Human
ucucccaguuuuuccuguuugg

SEQ ID NO: 873087 - RNA, 20 nt, Human
ucugcaagccggagcaccac

SEQ ID NO: 873088 - RNA, 22 nt, Human
ucuguagccgagagcccagccc

SEQ ID NO: 873089 - RNA, 19 nt, Human
ucugugacgaccgcugggg

SEQ ID NO: 873090 - RNA, 21 nt, Human
ucuugaacuccuggccucaag

SEQ ID NO: 873091 - RNA, 18 nt, Human
ucuugcuguguugcccag

SEQ ID NO: 873092 - RNA, 19 nt, Human
ucuugcuguguugcccagg

SEQ ID NO: 873093 - RNA, 23 nt, Human
ucuugcuguguugcccaggcugg

SEQ ID NO: 873094 - RNA, 24 nt, Human
ucuugcuguguugcccaggcuggu

SEQ ID NO: 873095 - RNA, 24 nt, Human
ugaacuccuggccucaagcaaucc

SEQ ID NO: 873096 - RNA, 22 nt, Human
ugacgaccgcuggggcagagug

SEQ ID NO: 873097 - RNA, 20 nt, Human
ugcaagccggagcaccacca

SEQ ID NO: 873098 - RNA, 23 nt, Human
ugcacuguuccuccaggucuccc

SEQ ID NO: 873099 - RNA, 18 nt, Human
ugcaggguccucugggug

SEQ ID NO: 873100 - RNA, 24 nt, Human
ugcccaggcuggucuugaacuccu

SEQ ID NO: 873101 - RNA, 18 nt, Human
ugcccuggccaggucccu

SEQ ID NO: 873102 - RNA, 24 nt, Human
ugcuguguugcccaggcuggucuu

SEQ ID NO: 873103 - RNA, 24 nt, Human
uggcaucaucgaaagcgacagcca

SEQ ID NO: 873104 - RNA, 20 nt, Human
uggccucaagcaauccuccc

SEQ ID NO: 873105 - RNA, 21 nt, Human
uggccucaagcaauccuccca

SEQ ID NO: 873106 - RNA, 25 nt, Human
uggccucaagcaauccucccaccuc

SEQ ID NO: 873107 - RNA, 24 nt, Human
uggcugucagaaaacggcacagcu

SEQ ID NO: 873108 - RNA, 22 nt, Human
ugggaaggacgugcccgcggug

SEQ ID NO: 873109 - RNA, 19 nt, Human
ugggagaagcccgucugca

SEQ ID NO: 873110 - RNA, 19 nt, Human
ugggauuacuggcaugaac

SEQ ID NO: 873111 - RNA, 22 nt, Human
ugggauuacuggcaugaaccac

SEQ ID NO: 873112 - RNA, 24 nt, Human
ugggauuacuggcaugaaccacug

SEQ ID NO: 873113 - RNA, 26 nt, Human
ugggauuacuggcaugaaccacugcg

SEQ ID NO: 873114 - RNA, 18 nt, Human
ugggugggaaggacgugc

SEQ ID NO: 873115 - RNA, 19 nt, Human
uguagccgagagcccagcc

SEQ ID NO: 873116 - RNA, 21 nt, Human
ugucagaaaacggcacagcug

SEQ ID NO: 873117 - RNA, 19 nt, Human
ugugacgaccgcuggggca

SEQ ID NO: 873118 - RNA, 24 nt, Human
uguguugcccaggcuggucuugaa

SEQ ID NO: 873119 - RNA, 18 nt, Human
uguugcccaggcuggucu

SEQ ID NO: 873120 - RNA, 22 nt, Human
uguugcccaggcuggucuugaa

SEQ ID NO: 873121 - RNA, 19 nt, Human
uuaagcacugcacgauacu

SEQ ID NO: 873122 - RNA, 22 nt, Human
uucccuguccuacccagccauu

SEQ ID NO: 873123 - RNA, 24 nt, Human
uuccugggccugccgccuaggggc

SEQ ID NO: 873124 - RNA, 26 nt, Human
uucugugacgaccgcuggggcagagu

SEQ ID NO: 873125 - RNA, 21 nt, Human
uuuuuuuuuuuuuuuuugaca

SEQ ID NO: 873126 - RNA, 27 nt, Human
uuuuuuuuuuuuuuuuuuuuuuugggg

SEQ ID NO: 873127 - RNA, 21 nt, Human
agaaagcaugaauccaaaagg

SEQ ID NO: 873128 - RNA, 18 nt, Human
agcccuugauggugcaac

SEQ ID NO: 873129 - RNA, 18 nt, Human
agcugagaaaauaugcac

SEQ ID NO: 873130 - RNA, 24 nt, Human
augaaccagauauuuuauggccuu

SEQ ID NO: 873131 - RNA, 21 nt, Human
caguuuuauucuucuagagca

SEQ ID NO: 873132 - RNA, 19 nt, Human
ccaaccaaauuuggaccca

SEQ ID NO: 873133 - RNA, 23 nt, Human
ccagauauuuuauggccuuuccu

SEQ ID NO: 873134 - RNA, 18 nt, Human
ccgcugcccucagggggc

SEQ ID NO: 873135 - RNA, 25 nt, Human
ccggcuccgcggcccgucgccgccc

SEQ ID NO: 873136 - RNA, 21 nt, Human
ccgggucuugucuccccgcug

SEQ ID NO: 873137 - RNA, 27 nt, Human
ccucagggggcugccggcaacgccucc

SEQ ID NO: 873138 - RNA, 23 nt, Human
ccucuaaaaagugacuuuggucc

SEQ ID NO: 873139 - RNA, 20 nt, Human
cgaaaaugccauuaaauugc

SEQ ID NO: 873140 - RNA, 21 nt, Human
cgcggcguggccgccggcgcc

SEQ ID NO: 873141 - RNA, 21 nt, Human
cggcucugcucggcccgcgcc

SEQ ID NO: 873142 - RNA, 21 nt, Human
cuccgcggcccgucgccgccc

SEQ ID NO: 873143 - RNA, 21 nt, Human
gccauuaaauugcucuuuggc

SEQ ID NO: 873144 - RNA, 19 nt, Human
gcgcguggcggcucgaggg

SEQ ID NO: 873145 - RNA, 20 nt, Human
gcggcguggccgccggcgcc

SEQ ID NO: 873146 - RNA, 20 nt, Human
gcugccggcaacgccuccau

SEQ ID NO: 873147 - RNA, 18 nt, Human
ggcucgagggaugcgcga

SEQ ID NO: 873148 - RNA, 23 nt, Human
uccaacgcccggcucugcucggc

SEQ ID NO: 873149 - RNA, 18 nt, Human
uccaugcgcgcgcgggcu

SEQ ID NO: 873150 - RNA, 21 nt, Human
ucgccgggucuugucuccccg

SEQ ID NO: 873151 - RNA, 24 nt, Human
ucuaaacaucaauggggaaaaaaa

SEQ ID NO: 873152 - RNA, 21 nt, Human
ugaaccagauauuuuauggcc

SEQ ID NO: 873153 - RNA, 20 nt, Human
uuggugcuuaacccugaauc

SEQ ID NO: 873154 - RNA, 20 nt, Human
uuggugcuuaacccugaauc

SEQ ID NO: 873155 - RNA, 24 nt, Human
aaagugcugagauuacagguguga

SEQ ID NO: 873156 - RNA, 18 nt, Human
aacagcuugauguagccc

SEQ ID NO: 873157 - RNA, 21 nt, Human
aagcagcccugucaacagcuc

SEQ ID NO: 873158 - RNA, 20 nt, Human
aaggguccucaaacauggaa

SEQ ID NO: 873159 - RNA, 24 nt, Human
aagugaucuuccugccuuggccuc

SEQ ID NO: 873160 - RNA, 26 nt, Human
aagugcugagauuacaggugugagcc

SEQ ID NO: 873161 - RNA, 19 nt, Human
acacacugcagacgcgaca

SEQ ID NO: 873162 - RNA, 18 nt, Human
accacagaauuugggcag

SEQ ID NO: 873163 - RNA, 24 nt, Human
acgaggcacaauuuagcgcuaaaa

SEQ ID NO: 873164 - RNA, 23 nt, Human
acuugccaccuggcuaaaauuau

SEQ ID NO: 873165 - RNA, 22 nt, Human
agauuacaggugugagccacug

SEQ ID NO: 873166 - RNA, 23 nt, Human
agggcaaagaaagacgcuccccu

SEQ ID NO: 873167 - RNA, 23 nt, Human
aggucaagcuaccacuggaaaug

SEQ ID NO: 873168 - RNA, 18 nt, Human
aguuauuuuccagugcug

SEQ ID NO: 873169 - RNA, 19 nt, Human
auguucucucucuucuguc

SEQ ID NO: 873170 - RNA, 24 nt, Human
caaagugcugagauuacaggugug

SEQ ID NO: 873171 - RNA, 20 nt, Human
caagucagaggcagaggcag

SEQ ID NO: 873172 - RNA, 22 nt, Human
caagugaucuuccugccuuggc

SEQ ID NO: 873173 - RNA, 27 nt, Human
caagugaucuuccugccuuggccuccc

SEQ ID NO: 873174 - RNA, 21 nt, Human
cagaaauguccuccacaacca

SEQ ID NO: 873175 - RNA, 24 nt, Human
caggugugagccacugugccuggc

SEQ ID NO: 873176 - RNA, 21 nt, Human
caucucaggucaagcuaccac

SEQ ID NO: 873177 - RNA, 24 nt, Human
cauuaaacacgucccuccaagacu

SEQ ID NO: 873178 - RNA, 21 nt, Human
ccaaagugcugagauuacagg

SEQ ID NO: 873179 - RNA, 21 nt, Human
ccaaagugcugagauuacagg

SEQ ID NO: 873180 - RNA, 24 nt, Human
ccaaagugcugagauuacaggugu

SEQ ID NO: 873181 - RNA, 24 nt, Human
ccacuggaaaugaugaucuucccc

SEQ ID NO: 873182 - RNA, 21 nt, Human
cccaagucagaggcagaggca

SEQ ID NO: 873183 - RNA, 23 nt, Human
cccagccuggaagcuccuucuuc

SEQ ID NO: 873184 - RNA, 22 nt, Human
ccccaaaccacagaauuugggc

SEQ ID NO: 873185 - RNA, 19 nt, Human
ccccacacacugcagacgc

SEQ ID NO: 873186 - RNA, 23 nt, Human
ccuccaagacucucaagacauaa

SEQ ID NO: 873187 - RNA, 23 nt, Human
ccuccacaguguuucagcccuaa

SEQ ID NO: 873188 - RNA, 23 nt, Human
cgaggcacaauuuagcgcuaaaa

SEQ ID NO: 873189 - RNA, 19 nt, Human
cgggcucaagugaucuucc

SEQ ID NO: 873190 - RNA, 24 nt, Human
cuaaagauuuucccaccuuucugg

SEQ ID NO: 873191 - RNA, 23 nt, Human
cuagcaacucuaguauguucucu

SEQ ID NO: 873192 - RNA, 24 nt, Human
cuauaaugcucacauauaacaauc

SEQ ID NO: 873193 - RNA, 20 nt, Human
cucaagugaucuuccugccu

SEQ ID NO: 873194 - RNA, 24 nt, Human
cucaagugaucuuccugccuuggc

SEQ ID NO: 873195 - RNA, 18 nt, Human
cuccaaaaagaaaagcag

SEQ ID NO: 873196 - RNA, 25 nt, Human
cuccacaguccauacacuugccacc

SEQ ID NO: 873197 - RNA, 26 nt, Human
cuccacaguccauacacuugccaccu

SEQ ID NO: 873198 - RNA, 21 nt, Human
cucccaaagugcugagauuac

SEQ ID NO: 873199 - RNA, 22 nt, Human
cucuacaguugucuauguuucu

SEQ ID NO: 873200 - RNA, 21 nt, Human
cugaaaaugucuuguuccuau

SEQ ID NO: 873201 - RNA, 23 nt, Human
cugccuuggccucccaaagugcu

SEQ ID NO: 873202 - RNA, 24 nt, Human
cugucuauucugggccuucccaga

SEQ ID NO: 873203 - RNA, 26 nt, Human
cuuaacauacuugccucauaauaaga

SEQ ID NO: 873204 - RNA, 20 nt, Human
gaaaagcagcccugucaaca

SEQ ID NO: 873205 - RNA, 25 nt, Human
gaaauguccuccacaaccacugccu

SEQ ID NO: 873206 - RNA, 24 nt, Human
gagcaucuauaaugcucacauaua

SEQ ID NO: 873207 - RNA, 22 nt, Human
gaggcacaauuuagcgcuaaaa

SEQ ID NO: 873208 - RNA, 18 nt, Human
gauuacaggugugagcca

SEQ ID NO: 873209 - RNA, 24 nt, Human
gauuacaggugugagccacugugc

SEQ ID NO: 873210 - RNA, 18 nt, Human
gcaaagaaagacgcuccc

SEQ ID NO: 873211 - RNA, 23 nt, Human
gcaaagaaagacgcuccccuaga

SEQ ID NO: 873212 - RNA, 23 nt, Human
gcccugucaacagcuugauguag

SEQ ID NO: 873213 - RNA, 22 nt, Human
gccuuggccucccaaagugcug

SEQ ID NO: 873214 - RNA, 19 nt, Human
gcuauguugcccagggugg

SEQ ID NO: 873215 - RNA, 19 nt, Human
gggcucaagugaucuuccu

SEQ ID NO: 873216 - RNA, 22 nt, Human
gggcucaagugaucuuccugcc

SEQ ID NO: 873217 - RNA, 23 nt, Human
gggcucaagugaucuuccugccu

SEQ ID NO: 873218 - RNA, 24 nt, Human
gguagucucgcuauguugcccagg

SEQ ID NO: 873219 - RNA, 20 nt, Human
gucuauucugggccuuccca

SEQ ID NO: 873220 - RNA, 18 nt, Human
uaaaagcaccaucacaau

SEQ ID NO: 873221 - RNA, 22 nt, Human
uacaggugugagccacugugcc

SEQ ID NO: 873222 - RNA, 23 nt, Human
uacaggugugagccacugugccu

SEQ ID NO: 873223 - RNA, 18 nt, Human
uaccacuggaaaugauga

SEQ ID NO: 873224 - RNA, 21 nt, Human
uacccgccgccccgcgaaccc

SEQ ID NO: 873225 - RNA, 22 nt, Human
uacccgccgccccgcgaacccc

SEQ ID NO: 873226 - RNA, 20 nt, Human
uagagguagucucgcuaugu

SEQ ID NO: 873227 - RNA, 24 nt, Human
uaguauguucucucucuucugucu

SEQ ID NO: 873228 - RNA, 22 nt, Human
uagucucgcuauguugcccagg

SEQ ID NO: 873229 - RNA, 24 nt, Human
uauguugcccaggguggucucaaa

SEQ ID NO: 873230 - RNA, 19 nt, Human
ucaagaguuuuucuuuucu

SEQ ID NO: 873231 - RNA, 26 nt, Human
ucacaaggguccucaaacauggaaga

SEQ ID NO: 873232 - RNA, 19 nt, Human
ucagaggcagaggcaggua

SEQ ID NO: 873233 - RNA, 23 nt, Human
ucauuaaacacgucccuccaaga

SEQ ID NO: 873234 - RNA, 18 nt, Human
uccacaaccacugccucc

SEQ ID NO: 873235 - RNA, 23 nt, Human
ucccaaagugcugagauuacagg

SEQ ID NO: 873236 - RNA, 18 nt, Human
ucccaccuuucugguauc

SEQ ID NO: 873237 - RNA, 18 nt, Human
uccccuagagccuccaaa

SEQ ID NO: 873238 - RNA, 21 nt, Human
uccuccacaaccacugccucc

SEQ ID NO: 873239 - RNA, 24 nt, Human
ucuaguauguucucucucuucugu

SEQ ID NO: 873240 - RNA, 18 nt, Human
ucuauucugggccuuccc

SEQ ID NO: 873241 - RNA, 19 nt, Human
ucucgcuauguugcccagg

SEQ ID NO: 873242 - RNA, 19 nt, Human
ucucgcuauguugcccagg

SEQ ID NO: 873243 - RNA, 20 nt, Human
ucucgcuauguugcccaggg

SEQ ID NO: 873244 - RNA, 21 nt, Human
ugaaaggaggccccaaaccac

SEQ ID NO: 873245 - RNA, 21 nt, Human
ugagauuacaggugugagcca

SEQ ID NO: 873246 - RNA, 22 nt, Human
ugagauuacaggugugagccac

SEQ ID NO: 873247 - RNA, 22 nt, Human
ugagauuacaggugugagccac

SEQ ID NO: 873248 - RNA, 22 nt, Human
ugagauuacaggugugagccac

SEQ ID NO: 873249 - RNA, 24 nt, Human
ugagauuacaggugugagccacug

SEQ ID NO: 873250 - RNA, 24 nt, Human
ugcugagauuacaggugugagcca

SEQ ID NO: 873251 - RNA, 19 nt, Human
uggaagagggagacagaac

SEQ ID NO: 873252 - RNA, 21 nt, Human
uggcauuuuucauguguuucc

SEQ ID NO: 873253 - RNA, 20 nt, Human
ugucuuguuccuauaggcca

SEQ ID NO: 873254 - RNA, 26 nt, Human
uucaaugguguuuaacagguuugacu

SEQ ID NO: 873255 - RNA, 21 nt, Human
uucuuuuuggacauuuaggag

SEQ ID NO: 873256 - RNA, 24 nt, Human
uugccaccuggcuaaaauuauuug

SEQ ID NO: 873257 - RNA, 18 nt, Human
uuggccucccaaagugcu

SEQ ID NO: 873258 - RNA, 20 nt, Human
uuuuaagccauuaaauuugu

SEQ ID NO: 873259 - RNA, 19 nt, Human
uuuucuauaaauucuccca

SEQ ID NO: 873260 - RNA, 24 nt, Human
uuuuuuuuuuguagagguagucuc

SEQ ID NO: 873261 - RNA, 22 nt, Human
uuuuuuuuuuuuuuuguagagg

SEQ ID NO: 873262 - RNA, 19 nt, Human
uuuuuuuuuuuuuuuuugu

SEQ ID NO: 873263 - RNA, 20 nt, Human
uuuuuuuuuuuuuuuuuugg

SEQ ID NO: 873264 - RNA, 21 nt, Human
aaacccucuuuuaggagaggc

SEQ ID NO: 873265 - RNA, 24 nt, Human
aaagaauaaacgcuggaacucaaa

SEQ ID NO: 873266 - RNA, 22 nt, Human
aaagcuucugcaggccaaggcc

SEQ ID NO: 873267 - RNA, 24 nt, Human
aacaaugaggcacaucgguccccc

SEQ ID NO: 873268 - RNA, 18 nt, Human
aacacagccaauggguug

SEQ ID NO: 873269 - RNA, 23 nt, Human
aaccaaacuuuauccagaaaagc

SEQ ID NO: 873270 - RNA, 25 nt, Human
aaccacccucacucuucccaaaccc

SEQ ID NO: 873271 - RNA, 18 nt, Human
aaccuuaaggacaaaggc

SEQ ID NO: 873272 - RNA, 23 nt, Human
aacucgucgcucauccugggacc

SEQ ID NO: 873273 - RNA, 19 nt, Human
aagaaggagaucuugagaa

SEQ ID NO: 873274 - RNA, 21 nt, Human
aaguuccagguauccagaauc

SEQ ID NO: 873275 - RNA, 19 nt, Human
aaucuucaaacagaacaca

SEQ ID NO: 873276 - RNA, 23 nt, Human
acaggcccagccagcaggucacc

SEQ ID NO: 873277 - RNA, 21 nt, Human
acaucgguccccucuccccaa

SEQ ID NO: 873278 - RNA, 18 nt, Human
acccaccggcuucuccua

SEQ ID NO: 873279 - RNA, 22 nt, Human
acccauuuggccuugaaacccu

SEQ ID NO: 873280 - RNA, 19 nt, Human
accggcugggaggagcuuc

SEQ ID NO: 873281 - RNA, 18 nt, Human
accggcuucuccuaucgg

SEQ ID NO: 873282 - RNA, 18 nt, Human
acguguggauggaugagg

SEQ ID NO: 873283 - RNA, 23 nt, Human
acucacccacccuuuuaaugcaa

SEQ ID NO: 873284 - RNA, 23 nt, Human
agaacaggaauucucuugaguua

SEQ ID NO: 873285 - RNA, 21 nt, Human
agacagcaccguugacaaacc

SEQ ID NO: 873286 - RNA, 23 nt, Human
agacagcaccguugacaaaccca

SEQ ID NO: 873287 - RNA, 23 nt, Human
agcaccguugacaaacccauuug

SEQ ID NO: 873288 - RNA, 22 nt, Human
aggaaaaaagaauaaacgcugg

SEQ ID NO: 873289 - RNA, 19 nt, Human
aggaauguucaaauucccc

SEQ ID NO: 873290 - RNA, 19 nt, Human
aggacaaaggcggaguagg

SEQ ID NO: 873291 - RNA, 23 nt, Human
agggaugcugggaaucuuaaggu

SEQ ID NO: 873292 - RNA, 19 nt, Human
aggguggagaugagggggg

SEQ ID NO: 873293 - RNA, 18 nt, Human
auaccuggcagacagagu

SEQ ID NO: 873294 - RNA, 26 nt, Human
caaccaaacuuuauccagaaaagcau

SEQ ID NO: 873295 - RNA, 21 nt, Human
caaccacccucacucuuccca

SEQ ID NO: 873296 - RNA, 25 nt, Human
caaccacccucacucuucccaaacc

SEQ ID NO: 873297 - RNA, 18 nt, Human
caagccgcuggaagccaa

SEQ ID NO: 873298 - RNA, 21 nt, Human
cacaauccccagcuaaaaccc

SEQ ID NO: 873299 - RNA, 23 nt, Human
caccccaagacaaccgagcacag

SEQ ID NO: 873300 - RNA, 20 nt, Human
cacccucacucuucccaaag

SEQ ID NO: 873301 - RNA, 18 nt, Human
cacccugucagcugcucc

SEQ ID NO: 873302 - RNA, 21 nt, Human
cagaacacagccaauggguug

SEQ ID NO: 873303 - RNA, 29 nt, Human
cagaagccugguuccaauuugggagccuc

SEQ ID NO: 873304 - RNA, 22 nt, Human
cagaagccugugaggaaggcug

SEQ ID NO: 873305 - RNA, 24 nt, Human
cagcaccaggggcuggggggcuaa

SEQ ID NO: 873306 - RNA, 19 nt, Human
cagccagcaggucacccca

SEQ ID NO: 873307 - RNA, 22 nt, Human
cagcccagggcagcgggcccug

SEQ ID NO: 873308 - RNA, 21 nt, Human
cagccccucggaucgcagccu

SEQ ID NO: 873309 - RNA, 23 nt, Human
cagcgccugcguuuuacagcacc

SEQ ID NO: 873310 - RNA, 21 nt, Human
caggaugccagcacaaucccc

SEQ ID NO: 873311 - RNA, 26 nt, Human
cauuccucuccccaucucccccuacu

SEQ ID NO: 873312 - RNA, 24 nt, Human
ccaaacccacucucucuuuuggcu

SEQ ID NO: 873313 - RNA, 23 nt, Human
ccaaccacccucacucuucccaa

SEQ ID NO: 873314 - RNA, 20 nt, Human
ccagaaaagcauauuuguaa

SEQ ID NO: 873315 - RNA, 23 nt, Human
cccaaccacccucacucuuccca

SEQ ID NO: 873316 - RNA, 24 nt, Human
cccaccccaagacaaccgagcaca

SEQ ID NO: 873317 - RNA, 25 nt, Human
ccccaaccacccucacucuucccuc

SEQ ID NO: 873318 - RNA, 19 nt, Human
ccccaagacaaccgagcac

SEQ ID NO: 873319 - RNA, 22 nt, Human
ccccaagacaaccgagcacaga

SEQ ID NO: 873320 - RNA, 19 nt, Human
ccccagacugggaugggag

SEQ ID NO: 873321 - RNA, 20 nt, Human
cccccaaaucuucaaacaga

SEQ ID NO: 873322 - RNA, 23 nt, Human
cccccggaucugcgcggccccug

SEQ ID NO: 873323 - RNA, 19 nt, Human
ccccuauggcacagggccu

SEQ ID NO: 873324 - RNA, 21 nt, Human
cccgccgcggccuccucgccu

SEQ ID NO: 873325 - RNA, 24 nt, Human
cccuucggcaugaaugagagccgg

SEQ ID NO: 873326 - RNA, 19 nt, Human
ccgccgcggccuccucgcc

SEQ ID NO: 873327 - RNA, 19 nt, Human
ccgccgcggccuccucgcc

SEQ ID NO: 873328 - RNA, 20 nt, Human
ccgccgcggccuccucgccu

SEQ ID NO: 873329 - RNA, 25 nt, Human
ccgcggccuccucgccuugcucccc

SEQ ID NO: 873330 - RNA, 20 nt, Human
ccgcugcgcccgccgcggcc

SEQ ID NO: 873331 - RNA, 21 nt, Human
ccgcugcgcccgccgcggccu

SEQ ID NO: 873332 - RNA, 21 nt, Human
ccggaucugcgcggccccugu

SEQ ID NO: 873333 - RNA, 21 nt, Human
ccucacucuucccaaacccac

SEQ ID NO: 873334 - RNA, 21 nt, Human
ccucacugggguggguccccu

SEQ ID NO: 873335 - RNA, 20 nt, Human
ccucgccuugcuccccucuu

SEQ ID NO: 873336 - RNA, 21 nt, Human
ccugagccagggguccugacu

SEQ ID NO: 873337 - RNA, 22 nt, Human
ccuugagggagggugagugugg

SEQ ID NO: 873338 - RNA, 27 nt, Human
ccuugcuccccucuuaguccucucuuc

SEQ ID NO: 873339 - RNA, 31 nt, Human
cgcggcccagcgccugcguuuuacagcaccc

SEQ ID NO: 873340 - RNA, 26 nt, Human
cgcgguggcggcggcggcggcgcccc

SEQ ID NO: 873341 - RNA, 22 nt, Human
cggcuccugagccagggguccu

SEQ ID NO: 873342 - RNA, 22 nt, Human
cgggagcugagcgucaggguuc

SEQ ID NO: 873343 - RNA, 19 nt, Human
cggggccgcggcgggcgcg

SEQ ID NO: 873344 - RNA, 23 nt, Human
cgguccccucuccccaaccaccc

SEQ ID NO: 873345 - RNA, 24 nt, Human
cucccccggaucugcgcggccccc

SEQ ID NO: 873346 - RNA, 23 nt, Human
cucccccuacugccagugaagac

SEQ ID NO: 873347 - RNA, 21 nt, Human
cuggcagacagagugagcaca

SEQ ID NO: 873348 - RNA, 19 nt, Human
cugggcugggauucugggc

SEQ ID NO: 873349 - RNA, 19 nt, Human
cugggggcaggucgggugg

SEQ ID NO: 873350 - RNA, 20 nt, Human
cuggguccccaucuguaaga

SEQ ID NO: 873351 - RNA, 23 nt, Human
cuucacccaucugggcucuucca

SEQ ID NO: 873352 - RNA, 20 nt, Human
gaacacagccaauggguugg

SEQ ID NO: 873353 - RNA, 22 nt, Human
gacagcaccguugacaaaccca

SEQ ID NO: 873354 - RNA, 22 nt, Human
gaccagcucugggaaucuccau

SEQ ID NO: 873355 - RNA, 21 nt, Human
gagaggccaggacaguuagug

SEQ ID NO: 873356 - RNA, 20 nt, Human
gagcaggcucugggucccca

SEQ ID NO: 873357 - RNA, 23 nt, Human
gagggaagggggcagccagaagc

SEQ ID NO: 873358 - RNA, 19 nt, Human
gagugguucuucucuuugg

SEQ ID NO: 873359 - RNA, 21 nt, Human
gaugaggggccagggaaggga

SEQ ID NO: 873360 - RNA, 22 nt, Human
gaugggagcugcccagaguagu

SEQ ID NO: 873361 - RNA, 24 nt, Human
gauucugggcugggauucugggcg

SEQ ID NO: 873362 - RNA, 19 nt, Human
gcacagagagaccggcugg

SEQ ID NO: 873363 - RNA, 19 nt, Human
gccgcggcgggcgcgggcg

SEQ ID NO: 873364 - RNA, 18 nt, Human
gccuugaaacccucuuuu

SEQ ID NO: 873365 - RNA, 20 nt, Human
gcgagugugugucagccccu

SEQ ID NO: 873366 - RNA, 18 nt, Human
gcgcccgccgcggccucc

SEQ ID NO: 873367 - RNA, 24 nt, Human
gcggcggcgccccgagcagcggaa

SEQ ID NO: 873368 - RNA, 27 nt, Human
gcggcggcggcggcgccccgagcagcg

SEQ ID NO: 873369 - RNA, 19 nt, Human
gcgggagggaagggggcag

SEQ ID NO: 873370 - RNA, 20 nt, Human
gcgguggcggcggcggcggc

SEQ ID NO: 873371 - RNA, 22 nt, Human
ggaagggaagaggaaccgcgag

SEQ ID NO: 873372 - RNA, 21 nt, Human
ggacagcacagggaugcuggg

SEQ ID NO: 873373 - RNA, 21 nt, Human
ggagggcagggagagggugcc

SEQ ID NO: 873374 - RNA, 23 nt, Human
ggagggcagggagagggugccag

SEQ ID NO: 873375 - RNA, 20 nt, Human
ggaggguggagaugaggggg

SEQ ID NO: 873376 - RNA, 22 nt, Human
ggaggguggagaugaggggggc

SEQ ID NO: 873377 - RNA, 26 nt, Human
ggccaaggccagaaugguguugccag

SEQ ID NO: 873378 - RNA, 22 nt, Human
ggcgacaguggaaacgcuggag

SEQ ID NO: 873379 - RNA, 21 nt, Human
ggcggcagaagccugugagga

SEQ ID NO: 873380 - RNA, 20 nt, Human
ggcggcggcggcggcgcccc

SEQ ID NO: 873381 - RNA, 18 nt, Human
ggcucuggguccccaucu

SEQ ID NO: 873382 - RNA, 21 nt, Human
gggaagaggaaccgcgagguu

SEQ ID NO: 873383 - RNA, 27 nt, Human
gggaggguggagaugaggggggcggca

SEQ ID NO: 873384 - RNA, 23 nt, Human
gggcagcgggcccugagagcggu

SEQ ID NO: 873385 - RNA, 21 nt, Human
gggcagggagagggugccagg

SEQ ID NO: 873386 - RNA, 23 nt, Human
gggcagggagagggugccagggc

SEQ ID NO: 873387 - RNA, 23 nt, Human
gggccgcggcgggcgcgggcggc

SEQ ID NO: 873388 - RNA, 23 nt, Human
gggcgcgguggcggcggcggcgg

SEQ ID NO: 873389 - RNA, 19 nt, Human
gggcggcggcggcgcugcc

SEQ ID NO: 873390 - RNA, 21 nt, Human
gggcgggagggaagggggcag

SEQ ID NO: 873391 - RNA, 24 nt, Human
ggggcgggagggaagggggcagcc

SEQ ID NO: 873392 - RNA, 22 nt, Human
ggggugggguucaccuuaacau

SEQ ID NO: 873393 - RNA, 18 nt, Human
ggguccccucccucugcu

SEQ ID NO: 873394 - RNA, 24 nt, Human
ggguccugacucacccacccuuuu

SEQ ID NO: 873395 - RNA, 26 nt, Human
gguagaggcaagaggagacuccacaa

SEQ ID NO: 873396 - RNA, 19 nt, Human
gguccccaucuguaagaag

SEQ ID NO: 873397 - RNA, 22 nt, Human
gguguugccagcccagggcagc

SEQ ID NO: 873398 - RNA, 20 nt, Human
gucggugugaccagcucugg

SEQ ID NO: 873399 - RNA, 20 nt, Human
uaaaaccaaacucgucgcuc

SEQ ID NO: 873400 - RNA, 26 nt, Human
uaaggcaaaaucaaucuucacccauc

SEQ ID NO: 873401 - RNA, 19 nt, Human
uaagggagacccacccugu

SEQ ID NO: 873402 - RNA, 26 nt, Human
uaaggugggaauacugcuccaggccc

SEQ ID NO: 873403 - RNA, 20 nt, Human
uacguguucuucucauaccu

SEQ ID NO: 873404 - RNA, 23 nt, Human
uaguccucucuuccucuccuccu

SEQ ID NO: 873405 - RNA, 23 nt, Human
uaugggggaggguggagaugagg

SEQ ID NO: 873406 - RNA, 20 nt, Human
ucaaacagaacacagccaau

SEQ ID NO: 873407 - RNA, 22 nt, Human
ucacccacccuuuuaaugcaaa

SEQ ID NO: 873408 - RNA, 24 nt, Human
ucacggagaggccaggacaguuag

SEQ ID NO: 873409 - RNA, 24 nt, Human
ucacugggguggguccccucccuc

SEQ ID NO: 873410 - RNA, 22 nt, Human
ucagugccgggaucucuugcag

SEQ ID NO: 873411 - RNA, 22 nt, Human
ucagugccgggaucucuugcag

SEQ ID NO: 873412 - RNA, 19 nt, Human
uccaacaauguaaaggaau

SEQ ID NO: 873413 - RNA, 22 nt, Human
uccaagaaagggagacagcacc

SEQ ID NO: 873414 - RNA, 19 nt, Human
uccccaguucaggucucug

SEQ ID NO: 873415 - RNA, 18 nt, Human
ucccuggggaagaaagag

SEQ ID NO: 873416 - RNA, 24 nt, Human
ucggcggaugggccccaccccaag

SEQ ID NO: 873417 - RNA, 19 nt, Human
ucucuugcaggugacuuuc

SEQ ID NO: 873418 - RNA, 19 nt, Human
ucugaaagcuucugcaggc

SEQ ID NO: 873419 - RNA, 22 nt, Human
ucugcaaauggccccagacugg

SEQ ID NO: 873420 - RNA, 24 nt, Human
ugacaaacccauuuggccuugaaa

SEQ ID NO: 873421 - RNA, 19 nt, Human
ugaccacagacagcaccag

SEQ ID NO: 873422 - RNA, 21 nt, Human
ugaucugaaaaaaggaaaaaa

SEQ ID NO: 873423 - RNA, 25 nt, Human
ugcccagagagggagaccuaugcaa

SEQ ID NO: 873424 - RNA, 19 nt, Human
ugcuagagaauucccuggg

SEQ ID NO: 873425 - RNA, 18 nt, Human
ugcuccaggcccaggagc

SEQ ID NO: 873426 - RNA, 25 nt, Human
ugcuccccucuuaguccucucuucc

SEQ ID NO: 873427 - RNA, 19 nt, Human
uggaacuccuaaugcaaac

SEQ ID NO: 873428 - RNA, 22 nt, Human
uggaugaggcuccauggcggcc

SEQ ID NO: 873429 - RNA, 23 nt, Human
uggccugcaaaaaccuuaaggac

SEQ ID NO: 873430 - RNA, 22 nt, Human
uggcggcggcggcggcgccccg

SEQ ID NO: 873431 - RNA, 18 nt, Human
ugggaccagccaaggccu

SEQ ID NO: 873432 - RNA, 18 nt, Human
ugggaugggagcugccca

SEQ ID NO: 873433 - RNA, 18 nt, Human
ugggaugggagcugccca

SEQ ID NO: 873434 - RNA, 20 nt, Human
ugggcuggacugaguccugg

SEQ ID NO: 873435 - RNA, 20 nt, Human
uggggaagaaagagaaggcg

SEQ ID NO: 873436 - RNA, 24 nt, Human
ugggguggguccccucccucugcu

SEQ ID NO: 873437 - RNA, 19 nt, Human
uggugcccagagagggaga

SEQ ID NO: 873438 - RNA, 19 nt, Human
uguaagaaggggugggguu

SEQ ID NO: 873439 - RNA, 19 nt, Human
uuuguaaucaccacuaaac

SEQ ID NO: 873440 - RNA, 25 nt, Human
uuuuuuuuuuuuuuuuuuuuuaagg

SEQ ID NO: 873441 - RNA, 19 nt, Human
aaagagagcugugggcugc

SEQ ID NO: 873442 - RNA, 19 nt, Human
accaagauggcugccguag

SEQ ID NO: 873443 - RNA, 21 nt, Human
acuucagagguccgaaagaga

SEQ ID NO: 873444 - RNA, 20 nt, Human
agcaaugucauccaggcccu

SEQ ID NO: 873445 - RNA, 24 nt, Human
auaaagcaaaacaaaaucuuuuuc

SEQ ID NO: 873446 - RNA, 21 nt, Human
auccccgcccugcuuuuccua

SEQ ID NO: 873447 - RNA, 23 nt, Human
caagaggaaauguugacuagacc

SEQ ID NO: 873448 - RNA, 22 nt, Human
caagauggcugccguagccuaa

SEQ ID NO: 873449 - RNA, 22 nt, Human
cuacuaccuccuuucaagcaga

SEQ ID NO: 873450 - RNA, 27 nt, Human
gaaauucuccacaugccuguguuacuc

SEQ ID NO: 873451 - RNA, 20 nt, Human
gaugacacucuaguucuugu

SEQ ID NO: 873452 - RNA, 21 nt, Human
gcaaaguauucuucaugccag

SEQ ID NO: 873453 - RNA, 18 nt, Human
guggaggagucuaagcug

SEQ ID NO: 873454 - RNA, 22 nt, Human
uaccuccuuucaagcagacuuc

SEQ ID NO: 873455 - RNA, 19 nt, Human
uaggauaguucuagguuaa

SEQ ID NO: 873456 - RNA, 23 nt, Human
uaucccacagaguucuggaguca

SEQ ID NO: 873457 - RNA, 24 nt, Human
ucacaugcucaugguaaaucuaaa

SEQ ID NO: 873458 - RNA, 24 nt, Human
uccacaugccuguguuacuccugc

SEQ ID NO: 873459 - RNA, 18 nt, Human
uccgaaagagagcugugg

SEQ ID NO: 873460 - RNA, 21 nt, Human
ucucaggguaccaagauggcu

SEQ ID NO: 873461 - RNA, 22 nt, Human
ucuccacaugccuguguuacuc

SEQ ID NO: 873462 - RNA, 20 nt, Human
ucuuaagugaccaauggcug

SEQ ID NO: 873463 - RNA, 18 nt, Human
ugauguugagaauucugu

SEQ ID NO: 873464 - RNA, 19 nt, Human
uguggaggagucuaagcug

SEQ ID NO: 873465 - RNA, 28 nt, Human
uucaaacagggaaaaaugauguugagaa

SEQ ID NO: 873466 - RNA, 22 nt, Human
uucaagcagacuucccucgugc

SEQ ID NO: 873467 - RNA, 19 nt, Human
uucaagcuaugaucuugua

SEQ ID NO: 873468 - RNA, 22 nt, Human
uuuccuagaaugcuggcaucuu

SEQ ID NO: 873469 - RNA, 24 nt, Human
uuuuuuuuuuucaagcuaugaucu

SEQ ID NO: 873470 - RNA, 24 nt, Human
uuuuuuuuuuuuuuuuuuuucaag

SEQ ID NO: 873471 - RNA, 18 nt, Human
aacaguaugggacagacu

SEQ ID NO: 873472 - RNA, 21 nt, Human
aagagaagccuccagccaccc

SEQ ID NO: 873473 - RNA, 24 nt, Human
aaguuucaaguaguaagucagugu

SEQ ID NO: 873474 - RNA, 24 nt, Human
acccaccauaucugcucagugggc

SEQ ID NO: 873475 - RNA, 18 nt, Human
accugcccaccacaccaa

SEQ ID NO: 873476 - RNA, 26 nt, Human
acugguggaggagaagggcuggccga

SEQ ID NO: 873477 - RNA, 18 nt, Human
agacaaguagauagacag

SEQ ID NO: 873478 - RNA, 18 nt, Human
aggcagggacugagaaag

SEQ ID NO: 873479 - RNA, 24 nt, Human
aggcccuccaccugcccaccacac

SEQ ID NO: 873480 - RNA, 20 nt, Human
aggcggccuccggggcuggu

SEQ ID NO: 873481 - RNA, 18 nt, Human
agguggaauucccagggc

SEQ ID NO: 873482 - RNA, 22 nt, Human
cagacagacaaguagauagaca

SEQ ID NO: 873483 - RNA, 18 nt, Human
cagccacccaccauaucu

SEQ ID NO: 873484 - RNA, 19 nt, Human
cagccugcugggauccuug

SEQ ID NO: 873485 - RNA, 19 nt, Human
cagcucugcucuggggaac

SEQ ID NO: 873486 - RNA, 21 nt, Human
caggagagcugcaggcuggca

SEQ ID NO: 873487 - RNA, 23 nt, Human
caggcaucagcuccagcucugcu

SEQ ID NO: 873488 - RNA, 22 nt, Human
cagggcaggcccuccaccugcc

SEQ ID NO: 873489 - RNA, 20 nt, Human
caguaugggacagacuggga

SEQ ID NO: 873490 - RNA, 18 nt, Human
caucagcuccagcucugc

SEQ ID NO: 873491 - RNA, 23 nt, Human
ccacaccaacauggugcaauaaa

SEQ ID NO: 873492 - RNA, 23 nt, Human
ccaggccaggcucagcagcugug

SEQ ID NO: 873493 - RNA, 24 nt, Human
ccuguguccagggcaggccggggc

SEQ ID NO: 873494 - RNA, 19 nt, Human
cuauggauggcugggcuga

SEQ ID NO: 873495 - RNA, 20 nt, Human
gaagccuccagccacccacc

SEQ ID NO: 873496 - RNA, 24 nt, Human
gaagccuccagccacccaccauau

SEQ ID NO: 873497 - RNA, 25 nt, Human
gacaagaaaacaaccaaguggguaa

SEQ ID NO: 873498 - RNA, 18 nt, Human
gacucccuggggaggugg

SEQ ID NO: 873499 - RNA, 18 nt, Human
gagaaagagaagccucca

SEQ ID NO: 873500 - RNA, 18 nt, Human
gcacggaaagaccgacgg

SEQ ID NO: 873501 - RNA, 20 nt, Human
gcacuggagugggugucugg

SEQ ID NO: 873502 - RNA, 22 nt, Human
gcggccuccggggcuggucucc

SEQ ID NO: 873503 - RNA, 18 nt, Human
gggagguggaggccuggg

SEQ ID NO: 873504 - RNA, 22 nt, Human
gguggaggagaagggcuggccc

SEQ ID NO: 873505 - RNA, 22 nt, Human
guggaauucccagggcuaugga

SEQ ID NO: 873506 - RNA, 19 nt, Human
gugggcacggaaagaccga

SEQ ID NO: 873507 - RNA, 19 nt, Human
uaacaguaugggacagacu

SEQ ID NO: 873508 - RNA, 19 nt, Human
uagacagacagacagaggg

SEQ ID NO: 873509 - RNA, 21 nt, Human
ucugcucuggggaacuggugg

SEQ ID NO: 873510 - RNA, 24 nt, Human
ugagcagaggaucgaggcucuugg

SEQ ID NO: 873511 - RNA, 19 nt, Human
ugccuggcacagggauagg

SEQ ID NO: 873512 - RNA, 18 nt, Human
ugcucagcagggccccug

SEQ ID NO: 873513 - RNA, 21 nt, Human
uggagacucccuggggaggug

SEQ ID NO: 873514 - RNA, 23 nt, Human
uggaggagaagggcuggccgggg

SEQ ID NO: 873515 - RNA, 23 nt, Human
uggcagguggaauucccagggcu

SEQ ID NO: 873516 - RNA, 20 nt, Human
uggcccagacagacaaguag

SEQ ID NO: 873517 - RNA, 27 nt, Human
ugggcucaagcggucgcaagucugucu

SEQ ID NO: 873518 - RNA, 19 nt, Human
uggggagguggaggccugg

SEQ ID NO: 873519 - RNA, 19 nt, Human
uggguaacaguaugggaca

SEQ ID NO: 873520 - RNA, 22 nt, Human
uggucaaguuccaggauggggc

SEQ ID NO: 873521 - RNA, 19 nt, Human
ugguggaggagaagggcug

SEQ ID NO: 873522 - RNA, 21 nt, Human
ugucuugugcacuggaguggg

SEQ ID NO: 873523 - RNA, 19 nt, Human
uuauggguaacaguauggg

SEQ ID NO: 873524 - RNA, 27 nt, Human
uuuuuuuuuuuuuaaagagauaguuuu

SEQ ID NO: 873525 - RNA, 24 nt, Human
uuuuuuuuuuuuuuuuuuuuaaag

SEQ ID NO: 873526 - RNA, 21 nt, Human
aaaagcaacugaacaugaaac

SEQ ID NO: 873527 - RNA, 21 nt, Human
aaagcaacugaacaugaaacg

SEQ ID NO: 873528 - RNA, 23 nt, Human
acacacacacacacacacacaca

SEQ ID NO: 873529 - RNA, 23 nt, Human
acacacacacacacacacacaca

SEQ ID NO: 873530 - RNA, 23 nt, Human
acacacacacacacacacacaca

SEQ ID NO: 873531 - RNA, 23 nt, Human
acacacacacacacacacacaca

SEQ ID NO: 873532 - RNA, 23 nt, Human
acacacacacacacacacacaca

SEQ ID NO: 873533 - RNA, 23 nt, Human
acacacacacacacacacacaca

SEQ ID NO: 873534 - RNA, 23 nt, Human
acacacacacacacacacacaca

SEQ ID NO: 873535 - RNA, 23 nt, Human
acacacacacacacacacacaca

SEQ ID NO: 873536 - RNA, 21 nt, Human
acacacacacacacacacggc

SEQ ID NO: 873537 - RNA, 22 nt, Human
acaccaccgcguaccugugagc

SEQ ID NO: 873538 - RNA, 31 nt, Human
acacccacuacacacacacacacacacacag

SEQ ID NO: 873539 - RNA, 18 nt, Human
acccacacccacacgcac

SEQ ID NO: 873540 - RNA, 21 nt, Human
acccacacccacacgcacacc

SEQ ID NO: 873541 - RNA, 31 nt, Human
acccacuacacacacacacacacacacacag

SEQ ID NO: 873542 - RNA, 23 nt, Human
acccuggaccccuggaaugucuc

SEQ ID NO: 873543 - RNA, 21 nt, Human
agaaccgaacagcuggaucca

SEQ ID NO: 873544 - RNA, 21 nt, Human
agcacacacucacggccaccc

SEQ ID NO: 873545 - RNA, 22 nt, Human
aggaaacagucccccaauuccg

SEQ ID NO: 873546 - RNA, 20 nt, Human
aggaacccgacaccaccgcg

SEQ ID NO: 873547 - RNA, 22 nt, Human
aggcuggggggccaggggcugc

SEQ ID NO: 873548 - RNA, 23 nt, Human
agguggagaaggagggcgggaag

SEQ ID NO: 873549 - RNA, 22 nt, Human
caaaagcaacugaacaugaaac

SEQ ID NO: 873550 - RNA, 20 nt, Human
cacacacacacacacacaca

SEQ ID NO: 873551 - RNA, 20 nt, Human
cacacacacacacacacaca

SEQ ID NO: 873552 - RNA, 20 nt, Human
cacacacacacacacacaca

SEQ ID NO: 873553 - RNA, 20 nt, Human
cacacacacacacacacaca

SEQ ID NO: 873554 - RNA, 20 nt, Human
cacacacacacacacacaca

SEQ ID NO: 873555 - RNA, 20 nt, Human
cacacacacacacacacaca

SEQ ID NO: 873556 - RNA, 20 nt, Human
cacacacacacacacacaca

SEQ ID NO: 873557 - RNA, 20 nt, Human
cacacacacacacacacaca

SEQ ID NO: 873558 - RNA, 20 nt, Human
cacacacacacacacacaca

SEQ ID NO: 873559 - RNA, 20 nt, Human
cacacacacacacacacaca

SEQ ID NO: 873560 - RNA, 20 nt, Human
cacacacacacacacacaca

SEQ ID NO: 873561 - RNA, 20 nt, Human
cacacacacacacacacaca

SEQ ID NO: 873562 - RNA, 22 nt, Human
cacacacacacacacacacaca

SEQ ID NO: 873563 - RNA, 22 nt, Human
cacacacacacacacacacaca

SEQ ID NO: 873564 - RNA, 22 nt, Human
cacacacacacacacacacaca

SEQ ID NO: 873565 - RNA, 22 nt, Human
cacacacacacacacacacaca

SEQ ID NO: 873566 - RNA, 22 nt, Human
cacacacacacacacacacaca

SEQ ID NO: 873567 - RNA, 22 nt, Human
cacacacacacacacacacaca

SEQ ID NO: 873568 - RNA, 22 nt, Human
cacacacacacacacacacaca

SEQ ID NO: 873569 - RNA, 26 nt, Human
cacacacacacacacacacacacaca

SEQ ID NO: 873570 - RNA, 26 nt, Human
cacacacacacacacacacacacaca

SEQ ID NO: 873571 - RNA, 26 nt, Human
cacacacacacacacacacacacaca

SEQ ID NO: 873572 - RNA, 26 nt, Human
cacacacacacacacacacacacaca

SEQ ID NO: 873573 - RNA, 26 nt, Human
cacacacacacacacacacacacaca

SEQ ID NO: 873574 - RNA, 26 nt, Human
cacacacacacacacacacacacacg

SEQ ID NO: 873575 - RNA, 28 nt, Human
cacacacacacacacacacacacggcug

SEQ ID NO: 873576 - RNA, 29 nt, Human
cacacacacacacacacacacggcugugg

SEQ ID NO: 873577 - RNA, 27 nt, Human
cacacacacccacacucacucacaccc

SEQ ID NO: 873578 - RNA, 19 nt, Human
cacacacucacggccaccc

SEQ ID NO: 873579 - RNA, 21 nt, Human
cacacccacuacacacacaca

SEQ ID NO: 873580 - RNA, 23 nt, Human
cacacucacucacacccacaccc

SEQ ID NO: 873581 - RNA, 23 nt, Human
cacccacacccacacgcacaccc

SEQ ID NO: 873582 - RNA, 24 nt, Human
cacccacacccacacgcacaccca

SEQ ID NO: 873583 - RNA, 21 nt, Human
cacccacacgcacacccacua

SEQ ID NO: 873584 - RNA, 20 nt, Human
cacccacacucacucacacc

SEQ ID NO: 873585 - RNA, 18 nt, Human
caccgcguaccugugagc

SEQ ID NO: 873586 - RNA, 19 nt, Human
cagagccccaaggcugggg

SEQ ID NO: 873587 - RNA, 23 nt, Human
cagagccccaaggcuggggggcc

SEQ ID NO: 873588 - RNA, 22 nt, Human
cagcaaaggcuuucggagccaa

SEQ ID NO: 873589 - RNA, 18 nt, Human
cagcccaggacccacacc

SEQ ID NO: 873590 - RNA, 19 nt, Human
caggaacccgacaccaccg

SEQ ID NO: 873591 - RNA, 18 nt, Human
cagggcccagcccaggga

SEQ ID NO: 873592 - RNA, 23 nt, Human
cagucccccaauuccgccggggg

SEQ ID NO: 873593 - RNA, 20 nt, Human
cauggggaggggggcggcuc

SEQ ID NO: 873594 - RNA, 26 nt, Human
ccacacgcacacccacuacacacaca

SEQ ID NO: 873595 - RNA, 30 nt, Human
ccacacgcacacccacuacacacacacaca

SEQ ID NO: 873596 - RNA, 21 nt, Human
ccaggaacccgacaccaccgc

SEQ ID NO: 873597 - RNA, 21 nt, Human
cccacacccacacgcacaccc

SEQ ID NO: 873598 - RNA, 22 nt, Human
cccacacccacacgcacaccca

SEQ ID NO: 873599 - RNA, 21 nt, Human
cccacacucacucacacccac

SEQ ID NO: 873600 - RNA, 21 nt, Human
cccacuacacacacacacaca

SEQ ID NO: 873601 - RNA, 18 nt, Human
ccccaaggcuggggggcc

SEQ ID NO: 873602 - RNA, 19 nt, Human
ccccaaggcuggggggcca

SEQ ID NO: 873603 - RNA, 22 nt, Human
cccuggaccccuggaaugucuc

SEQ ID NO: 873604 - RNA, 25 nt, Human
cgcacacccacuacacacacacaca

SEQ ID NO: 873605 - RNA, 20 nt, Human
cggcugugacagcccaggac

SEQ ID NO: 873606 - RNA, 19 nt, Human
cggcuuugaauccccggcc

SEQ ID NO: 873607 - RNA, 20 nt, Human
cucacucacacccacaccca

SEQ ID NO: 873608 - RNA, 20 nt, Human
cuggaccagaaccgaacagc

SEQ ID NO: 873609 - RNA, 26 nt, Human
cuggaccccuggaaugucucuggacc

SEQ ID NO: 873610 - RNA, 22 nt, Human
gaauccccggccacgggcacua

SEQ ID NO: 873611 - RNA, 20 nt, Human
gagccagagccccaaggcug

SEQ ID NO: 873612 - RNA, 31 nt, Human
gcacacccacuacacacacacacacacacag

SEQ ID NO: 873613 - RNA, 25 nt, Human
ggaccagaaccgaacagcuggaucc

SEQ ID NO: 873614 - RNA, 22 nt, Human
ggcacuagaagguggagaagga

SEQ ID NO: 873615 - RNA, 26 nt, Human
ggcgggaaguccaguugagaugggca

SEQ ID NO: 873616 - RNA, 18 nt, Human
gggaggggggcggcuccc

SEQ ID NO: 873617 - RNA, 19 nt, Human
gggccaggggcugcaggga

SEQ ID NO: 873618 - RNA, 22 nt, Human
gggggagccagagccccaaggc

SEQ ID NO: 873619 - RNA, 23 nt, Human
gugcagccacacacacccacacu

SEQ ID NO: 873620 - RNA, 20 nt, Human
uacacacacacacacacaca

SEQ ID NO: 873621 - RNA, 25 nt, Human
uacacacacacacacacacacacac

SEQ ID NO: 873622 - RNA, 18 nt, Human
uagaagguggagaaggag

SEQ ID NO: 873623 - RNA, 19 nt, Human
uagugggcuucccuugucc

SEQ ID NO: 873624 - RNA, 23 nt, Human
ucacacccacacccacacgcaca

SEQ ID NO: 873625 - RNA, 18 nt, Human
ucagggcccagcccaggg

SEQ ID NO: 873626 - RNA, 22 nt, Human
uccaggaugucaggaaacaguc

SEQ ID NO: 873627 - RNA, 20 nt, Human
ugaauccccggccacgggca

SEQ ID NO: 873628 - RNA, 20 nt, Human
ugacagcccaggacccacac

SEQ ID NO: 873629 - RNA, 22 nt, Human
ugauugacagcuguccccaucc

SEQ ID NO: 873630 - RNA, 19 nt, Human
ugcagguggaugagccccu

SEQ ID NO: 873631 - RNA, 20 nt, Human
uggaaugucucuggaccaga

SEQ ID NO: 873632 - RNA, 23 nt, Human
uggaccagaaccgaacagcugga

SEQ ID NO: 873633 - RNA, 20 nt, Human
uggggaggggggcggcuccc

SEQ ID NO: 873634 - RNA, 20 nt, Human
uuuuuuuuuuuuuuugugcg

SEQ ID NO: 873635 - RNA, 19 nt, Human
uuuuuuuuuuuuuuuuugu

SEQ ID NO: 873636 - RNA, 20 nt, Human
uuuuuuuuuuuuuuuuuugg

SEQ ID NO: 873637 - RNA, 19 nt, Human
aaagugcugggguuacagg

SEQ ID NO: 873638 - RNA, 24 nt, Human
aaagugcugggguuacaggcguga

SEQ ID NO: 873639 - RNA, 21 nt, Human
aacuuauuagaaaggggccau

SEQ ID NO: 873640 - RNA, 28 nt, Human
aacuuuuuuuuuuuuuuuuuuuuuuuuu

SEQ ID NO: 873641 - RNA, 19 nt, Human
aaguagcugggacuacagg

SEQ ID NO: 873642 - RNA, 20 nt, Human
aaguagcugggacuacaggc

SEQ ID NO: 873643 - RNA, 26 nt, Human
aaguagcugggacuacaggcgcaugc

SEQ ID NO: 873644 - RNA, 19 nt, Human
aagugcugggguuacaggc

SEQ ID NO: 873645 - RNA, 26 nt, Human
aagugcugggguuacaggcgugagcc

SEQ ID NO: 873646 - RNA, 20 nt, Human
aaugcaguggugcgaucucg

SEQ ID NO: 873647 - RNA, 24 nt, Human
aaugcaguggugcgaucucggcuc

SEQ ID NO: 873648 - RNA, 19 nt, Human
acuacaggcgcaugccacc

SEQ ID NO: 873649 - RNA, 18 nt, Human
acuggguuucaccguguu

SEQ ID NO: 873650 - RNA, 20 nt, Human
acuggguuucaccguguuag

SEQ ID NO: 873651 - RNA, 24 nt, Human
acuggguuucaccguguuagccag

SEQ ID NO: 873652 - RNA, 23 nt, Human
agacuggguuucaccguguuagc

SEQ ID NO: 873653 - RNA, 23 nt, Human
agagaacuuuuuuuuuuuuuuuu

SEQ ID NO: 873654 - RNA, 23 nt, Human
aggcgugagccaccgugcccggc

SEQ ID NO: 873655 - RNA, 23 nt, Human
aggggccaucugcagagccacca

SEQ ID NO: 873656 - RNA, 24 nt, Human
caaagugcugggguuacaggcgug

SEQ ID NO: 873657 - RNA, 21 nt, Human
cacaucacuagacaagaguuu

SEQ ID NO: 873658 - RNA, 24 nt, Human
caccacgccgggcuaauuuuugua

SEQ ID NO: 873659 - RNA, 18 nt, Human
caccguguuagccaggau

SEQ ID NO: 873660 - RNA, 24 nt, Human
caccguguuagccaggauggucuc

SEQ ID NO: 873661 - RNA, 20 nt, Human
cacucauuacugaaaacugu

SEQ ID NO: 873662 - RNA, 18 nt, Human
cacugagugacacacauu

SEQ ID NO: 873663 - RNA, 23 nt, Human
cacugcaaccuccucuuccuggg

SEQ ID NO: 873664 - RNA, 22 nt, Human
caggcaauucuccugcuucagc

SEQ ID NO: 873665 - RNA, 24 nt, Human
caugccaccacgccgggcuaauuu

SEQ ID NO: 873666 - RNA, 22 nt, Human
ccaaagugcugggguuacaggc

SEQ ID NO: 873667 - RNA, 22 nt, Human
ccaaagugcugggguuacaggc

SEQ ID NO: 873668 - RNA, 24 nt, Human
ccaaagugcugggguuacaggcgu

SEQ ID NO: 873669 - RNA, 18 nt, Human
ccagagacggagggaaga

SEQ ID NO: 873670 - RNA, 21 nt, Human
ccaucugcagagccaccacuu

SEQ ID NO: 873671 - RNA, 23 nt, Human
cccaaguagcugggacuacaggc

SEQ ID NO: 873672 - RNA, 24 nt, Human
cccaaguagcugggacuacaggcg

SEQ ID NO: 873673 - RNA, 26 nt, Human
ccgcccgccucagccucccaaagugc

SEQ ID NO: 873674 - RNA, 24 nt, Human
ccgccucagccucccaaagugcug

SEQ ID NO: 873675 - RNA, 20 nt, Human
cgccgggcuaauuuuuguau

SEQ ID NO: 873676 - RNA, 24 nt, Human
cgccucagccucccaaagugcugg

SEQ ID NO: 873677 - RNA, 24 nt, Human
cgugauccgcccgccucagccucc

SEQ ID NO: 873678 - RNA, 19 nt, Human
cucacugcaaccuccucuu

SEQ ID NO: 873679 - RNA, 23 nt, Human
cucacugcaaccuccucuuccug

SEQ ID NO: 873680 - RNA, 24 nt, Human
cucacugcaaccuccucuuccugg

SEQ ID NO: 873681 - RNA, 24 nt, Human
cuccugaccucgugauccgcccgc

SEQ ID NO: 873682 - RNA, 20 nt, Human
cucuguugcccaggcuggaa

SEQ ID NO: 873683 - RNA, 23 nt, Human
cucuguugcccaggcuggaaugc

SEQ ID NO: 873684 - RNA, 23 nt, Human
cugcaaccuccucuuccuggguu

SEQ ID NO: 873685 - RNA, 23 nt, Human
cugcuucagccucccaaguagcu

SEQ ID NO: 873686 - RNA, 24 nt, Human
cuggguuucaccguguuagccagg

SEQ ID NO: 873687 - RNA, 24 nt, Human
cuuccuggguucaggcaauucucc

SEQ ID NO: 873688 - RNA, 25 nt, Human
gaacauuuuacauauaugcgaaaua

SEQ ID NO: 873689 - RNA, 22 nt, Human
gaccucgugauccgcccgccuc

SEQ ID NO: 873690 - RNA, 24 nt, Human
gaccucgugauccgcccgccucag

SEQ ID NO: 873691 - RNA, 25 nt, Human
gagagaacuuuuuuuuuuuuuuuuu

SEQ ID NO: 873692 - RNA, 24 nt, Human
gagccaccacuuacuguccacuca

SEQ ID NO: 873693 - RNA, 22 nt, Human
gcaaccuccucuuccuggguuc

SEQ ID NO: 873694 - RNA, 20 nt, Human
gcccaggcuggaaugcagug

SEQ ID NO: 873695 - RNA, 22 nt, Human
gcucacugcaaccuccucuucc

SEQ ID NO: 873696 - RNA, 23 nt, Human
ggagucucgcucuguugcccagg

SEQ ID NO: 873697 - RNA, 22 nt, Human
ggggccaucugcagagccacca

SEQ ID NO: 873698 - RNA, 21 nt, Human
ggguuucaccguguuagccag

SEQ ID NO: 873699 - RNA, 20 nt, Human
ggucucaaucuccugaccuc

SEQ ID NO: 873700 - RNA, 18 nt, Human
gguuacaggcgugagcca

SEQ ID NO: 873701 - RNA, 24 nt, Human
gguuacaggcgugagccaccgugc

SEQ ID NO: 873702 - RNA, 24 nt, Human
gugauccgcccgccucagccuccc

SEQ ID NO: 873703 - RNA, 22 nt, Human
uaaugagucacaucacuagacc

SEQ ID NO: 873704 - RNA, 24 nt, Human
uaauuuuuguauuuuuaguagaga

SEQ ID NO: 873705 - RNA, 23 nt, Human
uacaggcgugagccaccgugccc

SEQ ID NO: 873706 - RNA, 20 nt, Human
uaccuggacggcaggugacc

SEQ ID NO: 873707 - RNA, 25 nt, Human
uaggaugauaccuggacggcaggug

SEQ ID NO: 873708 - RNA, 21 nt, Human
uaguagagacuggguuucacc

SEQ ID NO: 873709 - RNA, 24 nt, Human
uaguagagacuggguuucaccgug

SEQ ID NO: 873710 - RNA, 25 nt, Human
uaguagagacuggguuucaccgugu

SEQ ID NO: 873711 - RNA, 24 nt, Human
ucaccguguuagccaggauggucu

SEQ ID NO: 873712 - RNA, 24 nt, Human
ucacugcaaccuccucuuccuggg

SEQ ID NO: 873713 - RNA, 20 nt, Human
ucagccucccaaagugcugg

SEQ ID NO: 873714 - RNA, 18 nt, Human
ucagccucccaaguagcu

SEQ ID NO: 873715 - RNA, 20 nt, Human
ucagccucccaaguagcugg

SEQ ID NO: 873716 - RNA, 23 nt, Human
ucagccucccaaguagcugggac

SEQ ID NO: 873717 - RNA, 24 nt, Human
ucccaaagugcugggguuacaggc

SEQ ID NO: 873718 - RNA, 24 nt, Human
ucccaaguagcugggacuacaggc

SEQ ID NO: 873719 - RNA, 21 nt, Human
uccgcccgccucagccuccca

SEQ ID NO: 873720 - RNA, 20 nt, Human
uccuggguucaggcaauucu

SEQ ID NO: 873721 - RNA, 21 nt, Human
uccuggguucaggcaauucuc

SEQ ID NO: 873722 - RNA, 24 nt, Human
uccuggguucaggcaauucuccug

SEQ ID NO: 873723 - RNA, 19 nt, Human
ucucgcucuguugcccagg

SEQ ID NO: 873724 - RNA, 23 nt, Human
ucucgcucuguugcccaggcugg

SEQ ID NO: 873725 - RNA, 24 nt, Human
ucucgcucuguugcccaggcugga

SEQ ID NO: 873726 - RNA, 26 nt, Human
ucucgcucuguugcccaggcuggaau

SEQ ID NO: 873727 - RNA, 27 nt, Human
ucucgcucuguugcccaggcuggaaug

SEQ ID NO: 873728 - RNA, 18 nt, Human
ucugcagagccaccacuu

SEQ ID NO: 873729 - RNA, 18 nt, Human
ucuguugcccaggcugga

SEQ ID NO: 873730 - RNA, 24 nt, Human
ucuguugcccaggcuggaaugcag

SEQ ID NO: 873731 - RNA, 25 nt, Human
ugaaaagacuguaaaacauucacau

SEQ ID NO: 873732 - RNA, 19 nt, Human
ugaaugagagaacuuuuuu

SEQ ID NO: 873733 - RNA, 22 nt, Human
ugagauggagucucgcucuguu

SEQ ID NO: 873734 - RNA, 19 nt, Human
ugcaaccuccucuuccugg

SEQ ID NO: 873735 - RNA, 24 nt, Human
ugcagagccaccacuuacugucca

SEQ ID NO: 873736 - RNA, 22 nt, Human
ugcaguggugcgaucucggcuc

SEQ ID NO: 873737 - RNA, 21 nt, Human
ugcccaggcuggaaugcagug

SEQ ID NO: 873738 - RNA, 24 nt, Human
ugcccaggcuggaaugcaguggug

SEQ ID NO: 873739 - RNA, 24 nt, Human
ugcuucagccucccaaguagcugg

SEQ ID NO: 873740 - RNA, 24 nt, Human
uggaaugcaguggugcgaucucgg

SEQ ID NO: 873741 - RNA, 24 nt, Human
uggagucucgcucuguugcccagg

SEQ ID NO: 873742 - RNA, 21 nt, Human
ugggacuacaggcgcaugcca

SEQ ID NO: 873743 - RNA, 22 nt, Human
ugggacuacaggcgcaugccac

SEQ ID NO: 873744 - RNA, 24 nt, Human
ugggacuacaggcgcaugccacca

SEQ ID NO: 873745 - RNA, 21 nt, Human
ugggaucacguaaugagucac

SEQ ID NO: 873746 - RNA, 18 nt, Human
ugggguuacaggcgugag

SEQ ID NO: 873747 - RNA, 22 nt, Human
ugggguuacaggcgugagccac

SEQ ID NO: 873748 - RNA, 23 nt, Human
ugggguuacaggcgugagccacc

SEQ ID NO: 873749 - RNA, 23 nt, Human
ugggguuacaggcgugagccacc

SEQ ID NO: 873750 - RNA, 24 nt, Human
ugggguuacaggcgugagccaccg

SEQ ID NO: 873751 - RNA, 23 nt, Human
uggguuucaccguguuagccagg

SEQ ID NO: 873752 - RNA, 19 nt, Human
uuacaggcgugagccaccg

SEQ ID NO: 873753 - RNA, 22 nt, Human
uuaguagagacuggguuucacc

SEQ ID NO: 873754 - RNA, 24 nt, Human
uuaguagagacuggguuucaccgu

SEQ ID NO: 873755 - RNA, 25 nt, Human
uuccagucugggaucacguaaugag

SEQ ID NO: 873756 - RNA, 19 nt, Human
uuucaccguguuagccagg

SEQ ID NO: 873757 - RNA, 24 nt, Human
uuuuuaguagagacuggguuucac

SEQ ID NO: 873758 - RNA, 20 nt, Human
uuuuuguauuuuuaguagag

SEQ ID NO: 873759 - RNA, 25 nt, Human
uuuuuuuuuuuugagauggagucuc

SEQ ID NO: 873760 - RNA, 22 nt, Human
uuuuuuuuuuuuuugagaugga

SEQ ID NO: 873761 - RNA, 24 nt, Human
uuuuuuuuuuuuuuuuuuaaccag

SEQ ID NO: 873762 - RNA, 27 nt, Human
uuuuuuuuuuuuuuuuuuuuuuugggg

SEQ ID NO: 873763 - RNA, 21 nt, Human
aacaagcagccaguggcgagu

SEQ ID NO: 873764 - RNA, 18 nt, Human
aagaaugccaccauuauc

SEQ ID NO: 873765 - RNA, 23 nt, Human
aaggcagagagacucaaaauuca

SEQ ID NO: 873766 - RNA, 20 nt, Human
acaaagcaugcagaaacuua

SEQ ID NO: 873767 - RNA, 22 nt, Human
acaaagcaugcagaaacuuacu

SEQ ID NO: 873768 - RNA, 21 nt, Human
agacucaaaauucaucgacag

SEQ ID NO: 873769 - RNA, 24 nt, Human
agccuccaguguggcgccuggcuc

SEQ ID NO: 873770 - RNA, 22 nt, Human
aggggcugcaugcagugagcca

SEQ ID NO: 873771 - RNA, 20 nt, Human
augccacggugcgcgaaagg

SEQ ID NO: 873772 - RNA, 22 nt, Human
caaaucaacaucaaugcucagc

SEQ ID NO: 873773 - RNA, 24 nt, Human
cacacggccggggacgugcuguuu

SEQ ID NO: 873774 - RNA, 18 nt, Human
cacaguucgacuucuguc

SEQ ID NO: 873775 - RNA, 24 nt, Human
caccccaaaucugaccccaaccgg

SEQ ID NO: 873776 - RNA, 23 nt, Human
caccugggccuaagcugggaggc

SEQ ID NO: 873777 - RNA, 23 nt, Human
cagagccagggcggagucagggg

SEQ ID NO: 873778 - RNA, 22 nt, Human
cagcaauaccgcaacgaacagc

SEQ ID NO: 873779 - RNA, 21 nt, Human
cagcaaugcccucucucucuc

SEQ ID NO: 873780 - RNA, 22 nt, Human
cagcggcguccccaggagacca

SEQ ID NO: 873781 - RNA, 23 nt, Human
ccaggggcugcaugcagugagcc

SEQ ID NO: 873782 - RNA, 21 nt, Human
cccacggcagggguauggggc

SEQ ID NO: 873783 - RNA, 23 nt, Human
ccccaaaucugaccccaaccggu

SEQ ID NO: 873784 - RNA, 21 nt, Human
cccccgaggcccgagggggcu

SEQ ID NO: 873785 - RNA, 18 nt, Human
ccugaauuaacaagcagc

SEQ ID NO: 873786 - RNA, 25 nt, Human
ccuggcaccugggccuaagcuggga

SEQ ID NO: 873787 - RNA, 18 nt, Human
ccuggccccgauaggcag

SEQ ID NO: 873788 - RNA, 21 nt, Human
cggagccggaugucugcaucc

SEQ ID NO: 873789 - RNA, 21 nt, Human
cuaguauugcacgccaggggc

SEQ ID NO: 873790 - RNA, 18 nt, Human
cugcagcgggagucuacg

SEQ ID NO: 873791 - RNA, 18 nt, Human
cugcuuacauuguuguuu

SEQ ID NO: 873792 - RNA, 26 nt, Human
cuggcaacagcuacucaauugcacgu

SEQ ID NO: 873793 - RNA, 18 nt, Human
cugggcccucccgccugg

SEQ ID NO: 873794 - RNA, 24 nt, Human
cuucaccccaaaucugaccccaac

SEQ ID NO: 873795 - RNA, 18 nt, Human
cuuccugggcucccuaaa

SEQ ID NO: 873796 - RNA, 20 nt, Human
gacaucuuuuacgcaaaaau

SEQ ID NO: 873797 - RNA, 19 nt, Human
gcaugcagaaacuuacuca

SEQ ID NO: 873798 - RNA, 23 nt, Human
ggagcacuaguauugcacgccag

SEQ ID NO: 873799 - RNA, 21 nt, Human
ggcagggguauggggcagagc

SEQ ID NO: 873800 - RNA, 25 nt, Human
ggccugggcccucccgccugggagc

SEQ ID NO: 873801 - RNA, 18 nt, Human
ggguauggggcagagcca

SEQ ID NO: 873802 - RNA, 20 nt, Human
gguauggggcagagccaggg

SEQ ID NO: 873803 - RNA, 22 nt, Human
guuaagaaauggagacgaacuc

SEQ ID NO: 873804 - RNA, 18 nt, Human
uaacuuccugggcucccu

SEQ ID NO: 873805 - RNA, 21 nt, Human
uacaggccagcaaugcccucu

SEQ ID NO: 873806 - RNA, 21 nt, Human
uacgcugcuguugccugggcc

SEQ ID NO: 873807 - RNA, 20 nt, Human
uaucaaguaacuccaguuua

SEQ ID NO: 873808 - RNA, 27 nt, Human
ucauguguccaccccacuccagcagau

SEQ ID NO: 873809 - RNA, 20 nt, Human
uccccaggagaccacggccc

SEQ ID NO: 873810 - RNA, 19 nt, Human
ugaaaaucugcagggcugg

SEQ ID NO: 873811 - RNA, 25 nt, Human
ugcagugagccacaggccagaggcc

SEQ ID NO: 873812 - RNA, 19 nt, Human
ugccuuugguuuggggacu

SEQ ID NO: 873813 - RNA, 24 nt, Human
ugccuuugguuuggggacuagcuc

SEQ ID NO: 873814 - RNA, 22 nt, Human
ugcugcuuacauuguuguuuug

SEQ ID NO: 873815 - RNA, 18 nt, Human
uggcgccuggcucugggu

SEQ ID NO: 873816 - RNA, 24 nt, Human
ugggaggccagcggcguccccagg

SEQ ID NO: 873817 - RNA, 22 nt, Human
ugggccuaagcugggaggccag

SEQ ID NO: 873818 - RNA, 23 nt, Human
uggggcagagccagggcggaguc

SEQ ID NO: 873819 - RNA, 21 nt, Human
uuuuuuuuuuuuuuuuucauu

SEQ ID NO: 873820 - RNA, 19 nt, Human
aaaaaacacacacacacac

SEQ ID NO: 873821 - RNA, 26 nt, Human
aaacacacacacacacucacacucuc

SEQ ID NO: 873822 - RNA, 22 nt, Human
acacacacacacucacacucuc

SEQ ID NO: 873823 - RNA, 18 nt, Human
acacacacacucuacagg

SEQ ID NO: 873824 - RNA, 18 nt, Human
acacacacucucucuaua

SEQ ID NO: 873825 - RNA, 20 nt, Human
acacucacacacucucucua

SEQ ID NO: 873826 - RNA, 19 nt, Human
acacucucucuuccucuuu

SEQ ID NO: 873827 - RNA, 19 nt, Human
acacugcacccuagaggca

SEQ ID NO: 873828 - RNA, 18 nt, Human
acucagaaaauucagucc

SEQ ID NO: 873829 - RNA, 24 nt, Human
acucuacagguguucaauagaaaa

SEQ ID NO: 873830 - RNA, 21 nt, Human
acugcacccuagaggcaggag

SEQ ID NO: 873831 - RNA, 25 nt, Human
agaaaacacacacucacacacucuc

SEQ ID NO: 873832 - RNA, 18 nt, Human
agguacggacacugcacc

SEQ ID NO: 873833 - RNA, 20 nt, Human
aggucucugaauagguguuc

SEQ ID NO: 873834 - RNA, 24 nt, Human
caauagaaaacacacacacucucu

SEQ ID NO: 873835 - RNA, 19 nt, Human
cacucacacucucucuucc

SEQ ID NO: 873836 - RNA, 21 nt, Human
cacucucucuuccucuuuccc

SEQ ID NO: 873837 - RNA, 24 nt, Human
cacucucucuuccucuuucccgca

SEQ ID NO: 873838 - RNA, 20 nt, Human
cacugcacccuagaggcagg

SEQ ID NO: 873839 - RNA, 22 nt, Human
ccuagaggcaggagcaguggga

SEQ ID NO: 873840 - RNA, 20 nt, Human
cucuuccucuuucccgcaac

SEQ ID NO: 873841 - RNA, 18 nt, Human
gagcuugagguuucucuc

SEQ ID NO: 873842 - RNA, 18 nt, Human
gggaaggagggcccaggc

SEQ ID NO: 873843 - RNA, 23 nt, Human
guuucucaaugucugggcugggg

SEQ ID NO: 873844 - RNA, 20 nt, Human
uagaaaacacacacacacac

SEQ ID NO: 873845 - RNA, 19 nt, Human
uagaggcaggagcaguggg

SEQ ID NO: 873846 - RNA, 18 nt, Human
uccaggucucugaauagg

SEQ ID NO: 873847 - RNA, 23 nt, Human
ucucucuucuucccaaguuucuc

SEQ ID NO: 873848 - RNA, 19 nt, Human
ucucuuccucuuucccgca

SEQ ID NO: 873849 - RNA, 21 nt, Human
ucugggcuggggaaggagggc

SEQ ID NO: 873850 - RNA, 22 nt, Human
uggggaaggagggcccaggcuc

SEQ ID NO: 873851 - RNA, 23 nt, Human
ugucugggcuggggaaggagggc

SEQ ID NO: 873852 - RNA, 22 nt, Human
uugggagcuugagguuucucuc

SEQ ID NO: 873853 - RNA, 20 nt, Human
uuuuuuuuuuuuuaagagau

SEQ ID NO: 873854 - RNA, 19 nt, Human
uuuuuuuuuuuuuuuuuaa

SEQ ID NO: 873855 - RNA, 25 nt, Human
uuuuuuuuuuuuuuuuuuuaagaga

SEQ ID NO: 873856 - RNA, 18 nt, Human
aguagaggaccugggccg

SEQ ID NO: 873857 - RNA, 26 nt, Human
augugcaaaacugacagccguccaag

SEQ ID NO: 873858 - RNA, 25 nt, Human
ccccgcacugaggcucgugucccuc

SEQ ID NO: 873859 - RNA, 22 nt, Human
cccgcccggcccgccccgggag

SEQ ID NO: 873860 - RNA, 22 nt, Human
ccgcccggcccgccccgggagc

SEQ ID NO: 873861 - RNA, 18 nt, Human
ccucucccuggccaccac

SEQ ID NO: 873862 - RNA, 26 nt, Human
cgccagcagccgcuacaugcucgacc

SEQ ID NO: 873863 - RNA, 21 nt, Human
cgcgugcggcucccgcggccc

SEQ ID NO: 873864 - RNA, 20 nt, Human
cggccgggcccuccccgagc

SEQ ID NO: 873865 - RNA, 19 nt, Human
cggcucccgcggcccgccc

SEQ ID NO: 873866 - RNA, 22 nt, Human
cguccaagggcccagccgacag

SEQ ID NO: 873867 - RNA, 23 nt, Human
cuccccgagcggggacacacugc

SEQ ID NO: 873868 - RNA, 26 nt, Human
cucgacccgggccucgugccgguucc

SEQ ID NO: 873869 - RNA, 22 nt, Human
cuuccaccccgcacugaggcuc

SEQ ID NO: 873870 - RNA, 18 nt, Human
gacaggacuggcucuccc

SEQ ID NO: 873871 - RNA, 19 nt, Human
gacuggcucucccugcccg

SEQ ID NO: 873872 - RNA, 20 nt, Human
gcagggcuuggcugagcccu

SEQ ID NO: 873873 - RNA, 19 nt, Human
gccccgggagccccgccgc

SEQ ID NO: 873874 - RNA, 22 nt, Human
gccgacaggacuggcucucccu

SEQ ID NO: 873875 - RNA, 19 nt, Human
ucccucggcagcucccugc

SEQ ID NO: 873876 - RNA, 20 nt, Human
ucccuggccaccaccaaggg

SEQ ID NO: 873877 - RNA, 18 nt, Human
uccuucugggaaggccua

SEQ ID NO: 873878 - RNA, 20 nt, Human
ucugcaccgggcgccucucc

SEQ ID NO: 873879 - RNA, 25 nt, Human
ugcaguaaacuucuuuuuaaggucu

SEQ ID NO: 873880 - RNA, 24 nt, Human
ugggugcccccccauccacugucc

SEQ ID NO: 873881 - RNA, 18 nt, Human
ugugcaaaacugacagcc

SEQ ID NO: 873882 - RNA, 23 nt, Human
ugugggugcccccccauccacug

SEQ ID NO: 873883 - RNA, 19 nt, Human
uuccaccccgcacugaggc

SEQ ID NO: 873884 - RNA, 18 nt, Human
agcuagcuucgcgacccc

SEQ ID NO: 873885 - RNA, 21 nt, Human
agcuucgcgaccccgcuccuu

SEQ ID NO: 873886 - RNA, 23 nt, Human
cacaaccaagccgccgccgcgcc

SEQ ID NO: 873887 - RNA, 19 nt, Human
ccccgccucuucacaacca

SEQ ID NO: 873888 - RNA, 18 nt, Human
ccgccgcgccgccgggcc

SEQ ID NO: 873889 - RNA, 21 nt, Human
ccgggcccggggaccuggagg

SEQ ID NO: 873890 - RNA, 22 nt, Human
ccucucacagucucauaggggu

SEQ ID NO: 873891 - RNA, 30 nt, Human
cuucacaaccaagccgccgccgcgccgccu

SEQ ID NO: 873892 - RNA, 20 nt, Human
gaccuggaggggggccgcug

SEQ ID NO: 873893 - RNA, 19 nt, Human
gggggccgcugcuagcuag

SEQ ID NO: 873894 - RNA, 21 nt, Human
uccuuugagguaggccccggg

SEQ ID NO: 873895 - RNA, 18 nt, Human
uuccccgccucuucacaa

SEQ ID NO: 873896 - RNA, 20 nt, Human
uuuuuuuuuugcugacaccc

SEQ ID NO: 873897 - RNA, 20 nt, Human
uuuuuuuuuuuuuuuuugcu

SEQ ID NO: 873898 - RNA, 23 nt, Human
uuuuuuuuuuuuuuuuuugcuga

SEQ ID NO: 873899 - RNA, 20 nt, Human
uuuuuuuuuuuuuuuuuugg

SEQ ID NO: 873900 - RNA, 19 nt, Human
caggagccugggcgggaau

SEQ ID NO: 873901 - RNA, 22 nt, Human
cggcugggagugggcucugugg

SEQ ID NO: 873902 - RNA, 19 nt, Human
cucccugguccaucucugg

SEQ ID NO: 873903 - RNA, 20 nt, Human
cugggagugggcucuguggc

SEQ ID NO: 873904 - RNA, 25 nt, Human
gaggacggcugggagugggcucugu

SEQ ID NO: 873905 - RNA, 22 nt, Human
gcauccuguccucccuggucca

SEQ ID NO: 873906 - RNA, 18 nt, Human
uaaaaccaggccacgcaa

SEQ ID NO: 873907 - RNA, 22 nt, Human
ugaaaauaaaaccaggccacgc

SEQ ID NO: 873908 - RNA, 23 nt, Human
ugccuggcgguuacaggagccug

SEQ ID NO: 873909 - RNA, 19 nt, Human
uuuuuuuuuuuuuugagga

SEQ ID NO: 873910 - RNA, 18 nt, Human
uuuuuuuuuuuuuuuuug

SEQ ID NO: 873911 - RNA, 21 nt, Human
uuuuuuuuuuuuuuuuugagg

SEQ ID NO: 873912 - RNA, 20 nt, Human
aaaguagaucaucugaugga

SEQ ID NO: 873913 - RNA, 21 nt, Human
aagaaaguauaagccaggcgc

SEQ ID NO: 873914 - RNA, 20 nt, Human
aagaagaaagaaaguauaaa

SEQ ID NO: 873915 - RNA, 23 nt, Human
aagaaucacuugaacccaggaga

SEQ ID NO: 873916 - RNA, 23 nt, Human
aagaucgugucacugcacuccag

SEQ ID NO: 873917 - RNA, 28 nt, Human
aaguauaagccaggcgcgguggcucacg

SEQ ID NO: 873918 - RNA, 19 nt, Human
aagugcccauuuggguccc

SEQ ID NO: 873919 - RNA, 24 nt, Human
aaucacuugaacccaggagacgga

SEQ ID NO: 873920 - RNA, 24 nt, Human
acagagcgagacucgaucucaaaa

SEQ ID NO: 873921 - RNA, 24 nt, Human
acccaggagacggagguugcagug

SEQ ID NO: 873922 - RNA, 24 nt, Human
accucguuucuacuaagaauacaa

SEQ ID NO: 873923 - RNA, 23 nt, Human
acugcacuccagccuggugacag

SEQ ID NO: 873924 - RNA, 25 nt, Human
acugcacuccagccuggugacagag

SEQ ID NO: 873925 - RNA, 24 nt, Human
agacggagguugcagugagccaag

SEQ ID NO: 873926 - RNA, 21 nt, Human
agccuggugacagagcgagac

SEQ ID NO: 873927 - RNA, 23 nt, Human
agccuggugacagagcgagacuc

SEQ ID NO: 873928 - RNA, 23 nt, Human
aggagacggagguugcagugagc

SEQ ID NO: 873929 - RNA, 20 nt, Human
aggagccucggauggcaguu

SEQ ID NO: 873930 - RNA, 18 nt, Human
aggcagaagaaucacuug

SEQ ID NO: 873931 - RNA, 23 nt, Human
aggcagaagaaucacuugaaccc

SEQ ID NO: 873932 - RNA, 24 nt, Human
aggcagaagaaucacuugaaccca

SEQ ID NO: 873933 - RNA, 24 nt, Human
aggcgcgguggcucacgccuauaa

SEQ ID NO: 873934 - RNA, 24 nt, Human
aggcugaggcagaagaaucacuug

SEQ ID NO: 873935 - RNA, 20 nt, Human
aggugguuguuggguugggg

SEQ ID NO: 873936 - RNA, 20 nt, Human
aguugcuccgucuguugagu

SEQ ID NO: 873937 - RNA, 22 nt, Human
aucaugcuuucuggguagaccc

SEQ ID NO: 873938 - RNA, 21 nt, Human
auccuggccaacauguugaaa

SEQ ID NO: 873939 - RNA, 24 nt, Human
aucgugucacugcacuccagccug

SEQ ID NO: 873940 - RNA, 24 nt, Human
auuagugggcgccuguaaucccag

SEQ ID NO: 873941 - RNA, 24 nt, Human
auuuuccugacuccuguuucuggg

SEQ ID NO: 873942 - RNA, 20 nt, Human
caacagcccuuacccugggc

SEQ ID NO: 873943 - RNA, 20 nt, Human
caagaucgugucacugcacu

SEQ ID NO: 873944 - RNA, 24 nt, Human
caagucggguggaucaagagguca

SEQ ID NO: 873945 - RNA, 25 nt, Human
caccccugaaaagggaccucccaga

SEQ ID NO: 873946 - RNA, 22 nt, Human
cacuccagccuggugacagagc

SEQ ID NO: 873947 - RNA, 23 nt, Human
cacuccagccuggugacagagcg

SEQ ID NO: 873948 - RNA, 18 nt, Human
cacugcacuccagccugg

SEQ ID NO: 873949 - RNA, 18 nt, Human
cacugcacuccagccugg

SEQ ID NO: 873950 - RNA, 20 nt, Human
cacugcacuccagccuggug

SEQ ID NO: 873951 - RNA, 22 nt, Human
cacugcacuccagccuggugac

SEQ ID NO: 873952 - RNA, 23 nt, Human
cacugcacuccagccuggugaca

SEQ ID NO: 873953 - RNA, 24 nt, Human
cacugcacuccagccuggugacag

SEQ ID NO: 873954 - RNA, 21 nt, Human
cagcagacaccacugccacac

SEQ ID NO: 873955 - RNA, 25 nt, Human
cagccaaccuggaauaagccagagu

SEQ ID NO: 873956 - RNA, 22 nt, Human
cagcgccuugcccaucucccuc

SEQ ID NO: 873957 - RNA, 24 nt, Human
cagcugcucgggaggcugaggcag

SEQ ID NO: 873958 - RNA, 19 nt, Human
caguggguccuguccccug

SEQ ID NO: 873959 - RNA, 22 nt, Human
ccaacacaucagccaaccugga

SEQ ID NO: 873960 - RNA, 24 nt, Human
cccaacacaucagccaaccuggaa

SEQ ID NO: 873961 - RNA, 23 nt, Human
ccccugaaaagggaccucccaga

SEQ ID NO: 873962 - RNA, 20 nt, Human
cccugugccugggaaacuuc

SEQ ID NO: 873963 - RNA, 21 nt, Human
ccucccucccucccuaguccc

SEQ ID NO: 873964 - RNA, 21 nt, Human
ccuggccaacauguugaaacc

SEQ ID NO: 873965 - RNA, 24 nt, Human
ccuggccaacauguugaaaccucg

SEQ ID NO: 873966 - RNA, 21 nt, Human
ccuggugacagagcgagacuc

SEQ ID NO: 873967 - RNA, 19 nt, Human
ccuguaaucccagcugcuc

SEQ ID NO: 873968 - RNA, 21 nt, Human
ccuguaaucccagcugcucgg

SEQ ID NO: 873969 - RNA, 21 nt, Human
ccuguccccugggaaaaacca

SEQ ID NO: 873970 - RNA, 20 nt, Human
ccuuaagguaccucaacagc

SEQ ID NO: 873971 - RNA, 19 nt, Human
ccuucccucccucccuccc

SEQ ID NO: 873972 - RNA, 19 nt, Human
ccuugcccaucucccucuu

SEQ ID NO: 873973 - RNA, 23 nt, Human
cgccuauaaucucaucacuucgg

SEQ ID NO: 873974 - RNA, 24 nt, Human
cgccuguaaucccagcugcucggg

SEQ ID NO: 873975 - RNA, 24 nt, Human
cgggaggcugaggcagaagaauca

SEQ ID NO: 873976 - RNA, 22 nt, Human
cggguggaucaagaggucaaga

SEQ ID NO: 873977 - RNA, 23 nt, Human
cuagucccugacaucuucucaca

SEQ ID NO: 873978 - RNA, 22 nt, Human
cucacgccuauaaucucaucac

SEQ ID NO: 873979 - RNA, 24 nt, Human
cucacgccuauaaucucaucacuu

SEQ ID NO: 873980 - RNA, 24 nt, Human
cuccagccuggugacagagcgaga

SEQ ID NO: 873981 - RNA, 22 nt, Human
cuuggccaaggguacagccacc

SEQ ID NO: 873982 - RNA, 19 nt, Human
cuuuaugacucacauuugu

SEQ ID NO: 873983 - RNA, 23 nt, Human
gaggacuuucucaucuugggaga

SEQ ID NO: 873984 - RNA, 23 nt, Human
gagguugcagugagccaagaucg

SEQ ID NO: 873985 - RNA, 23 nt, Human
gcacuccagccuggugacagagc

SEQ ID NO: 873986 - RNA, 22 nt, Human
gcagaagaaucacuugaaccca

SEQ ID NO: 873987 - RNA, 22 nt, Human
gccuugcccaucucccucuuga

SEQ ID NO: 873988 - RNA, 20 nt, Human
gcuugucucccagugggucc

SEQ ID NO: 873989 - RNA, 25 nt, Human
gcuuuacccaucucccaacacauca

SEQ ID NO: 873990 - RNA, 20 nt, Human
gcuuucuggguagaccccuu

SEQ ID NO: 873991 - RNA, 22 nt, Human
gcuuugacuuuguggacacccc

SEQ ID NO: 873992 - RNA, 20 nt, Human
ggagguugcagugagccaag

SEQ ID NO: 873993 - RNA, 24 nt, Human
ggagguugcagugagccaagaucg

SEQ ID NO: 873994 - RNA, 23 nt, Human
gggaaaaaccagggaacuucuua

SEQ ID NO: 873995 - RNA, 23 nt, Human
gggaggccaagucggguggauca

SEQ ID NO: 873996 - RNA, 23 nt, Human
ggucaagugagucauauugccag

SEQ ID NO: 873997 - RNA, 19 nt, Human
gguggcucacgccuauaau

SEQ ID NO: 873998 - RNA, 23 nt, Human
gguggcucacgccuauaaucuca

SEQ ID NO: 873999 - RNA, 26 nt, Human
gucaagugagucauauugccaggugg

SEQ ID NO: 874000 - RNA, 23 nt, Human
uaagcauccucccucagcgccuu

SEQ ID NO: 874001 - RNA, 24 nt, Human
uaagccagagucucagacaagaaa

SEQ ID NO: 874002 - RNA, 19 nt, Human
uagaagaaacgcuuuaccc

SEQ ID NO: 874003 - RNA, 21 nt, Human
uagaagaaacgcuuuacccau

SEQ ID NO: 874004 - RNA, 23 nt, Human
uagcuuugacuuuguggacaccc

SEQ ID NO: 874005 - RNA, 19 nt, Human
uagggcaggaaaucaugcu

SEQ ID NO: 874006 - RNA, 21 nt, Human
uagugggcgccuguaauccca

SEQ ID NO: 874007 - RNA, 22 nt, Human
uagugggcgccuguaaucccag

SEQ ID NO: 874008 - RNA, 24 nt, Human
ucaagaggucaagagauugagacc

SEQ ID NO: 874009 - RNA, 20 nt, Human
ucacugcacuccagccuggu

SEQ ID NO: 874010 - RNA, 23 nt, Human
ucacugcacuccagccuggugac

SEQ ID NO: 874011 - RNA, 21 nt, Human
ucacuugaggacuuucucauc

SEQ ID NO: 874012 - RNA, 24 nt, Human
ucagccaaccuggaauaagccaga

SEQ ID NO: 874013 - RNA, 20 nt, Human
ucaggagccucggauggcag

SEQ ID NO: 874014 - RNA, 19 nt, Human
uccaaagccccagguccuc

SEQ ID NO: 874015 - RNA, 22 nt, Human
uccagccuggugacagagcgag

SEQ ID NO: 874016 - RNA, 21 nt, Human
ucccagaagccuacagaguac

SEQ ID NO: 874017 - RNA, 20 nt, Human
ucccuagucccugacaucuu

SEQ ID NO: 874018 - RNA, 23 nt, Human
ucccucccucccucccuaguccc

SEQ ID NO: 874019 - RNA, 23 nt, Human
ucccucuugaccuucccuuaagg

SEQ ID NO: 874020 - RNA, 25 nt, Human
ucgggaggcugaggcagaagaauca

SEQ ID NO: 874021 - RNA, 19 nt, Human
ucucaaaaaaauaaaaaag

SEQ ID NO: 874022 - RNA, 26 nt, Human
ucucaaaaaaauaaaaaagaagaaag

SEQ ID NO: 874023 - RNA, 18 nt, Human
ucugccuucccucccucc

SEQ ID NO: 874024 - RNA, 23 nt, Human
ucugccuucccucccucccuccc

SEQ ID NO: 874025 - RNA, 18 nt, Human
ucugcuuccuccuccccu

SEQ ID NO: 874026 - RNA, 23 nt, Human
ugagaccauccuggccaacaugu

SEQ ID NO: 874027 - RNA, 22 nt, Human
ugagccaagaucgugucacugc

SEQ ID NO: 874028 - RNA, 20 nt, Human
ugaggcagaagaaucacuug

SEQ ID NO: 874029 - RNA, 24 nt, Human
ugaggcagaagaaucacuugaacc

SEQ ID NO: 874030 - RNA, 25 nt, Human
ugaggcagaagaaucacuugaaccc

SEQ ID NO: 874031 - RNA, 18 nt, Human
ugcucuggaccaucaccc

SEQ ID NO: 874032 - RNA, 18 nt, Human
uggaauaagccagagucu

SEQ ID NO: 874033 - RNA, 21 nt, Human
uggcucacgccuauaaucuca

SEQ ID NO: 874034 - RNA, 22 nt, Human
ugggccagccugcuuacccugc

SEQ ID NO: 874035 - RNA, 24 nt, Human
uggguugggguguggaucaggaau

SEQ ID NO: 874036 - RNA, 22 nt, Human
uguggaucaggaaucugaugcc

SEQ ID NO: 874037 - RNA, 18 nt, Human
uguggaucaggaaucugg

SEQ ID NO: 874038 - RNA, 18 nt, Human
uuaagaaaguauaagcca

SEQ ID NO: 874039 - RNA, 19 nt, Human
uucuuucuccuuuuuauua

SEQ ID NO: 874040 - RNA, 24 nt, Human
uugagucugauugcugggggccaa

SEQ ID NO: 874041 - RNA, 22 nt, Human
uugcagugagccaagaucgugu

SEQ ID NO: 874042 - RNA, 21 nt, Human
uuucuacuaagaauacaaaaa

SEQ ID NO: 874043 - RNA, 24 nt, Human
uuuuuuuuuuuuuuuuuaacaaug

SEQ ID NO: 874044 - RNA, 22 nt, Human
aaaaaacccaaaacacacucca

SEQ ID NO: 874045 - RNA, 19 nt, Human
aaaaagagucccugucucu

SEQ ID NO: 874046 - RNA, 24 nt, Human
aaaacaaaacaaaacaacaaaaaa

SEQ ID NO: 874047 - RNA, 19 nt, Human
aaacaaaacaaaacaacaa

SEQ ID NO: 874048 - RNA, 21 nt, Human
aaacaaaacaaaacaacaaaa

SEQ ID NO: 874049 - RNA, 22 nt, Human
aaacaaaacaacaaaaaaaaca

SEQ ID NO: 874050 - RNA, 23 nt, Human
aaacaaaacaacaaaaaaaacaa

SEQ ID NO: 874051 - RNA, 27 nt, Human
aaacaaaacaacaaaaaaaacaaaaac

SEQ ID NO: 874052 - RNA, 20 nt, Human
aaacuuuacauuuauucuag

SEQ ID NO: 874053 - RNA, 18 nt, Human
aaaggacauguacaaaug

SEQ ID NO: 874054 - RNA, 22 nt, Human
aacaaaaacaguguuuucuccu

SEQ ID NO: 874055 - RNA, 31 nt, Human
aacaaaacaaaacaacaaaaaaaacaaaaaa

SEQ ID NO: 874056 - RNA, 22 nt, Human
aacacaauagaugacgaacccu

SEQ ID NO: 874057 - RNA, 25 nt, Human
aacaguuaaaaaaaacccaaaacac

SEQ ID NO: 874058 - RNA, 21 nt, Human
aacuggccaaaacaaaacaaa

SEQ ID NO: 874059 - RNA, 23 nt, Human
aagagcaaaauaaggucaggagg

SEQ ID NO: 874060 - RNA, 18 nt, Human
aagcagcuuugcccuucu

SEQ ID NO: 874061 - RNA, 19 nt, Human
aaucuggguuggacugcuc

SEQ ID NO: 874062 - RNA, 20 nt, Human
aauggcuccacaucugcagg

SEQ ID NO: 874063 - RNA, 23 nt, Human
acaaaacaacaaaaaaaacaaaa

SEQ ID NO: 874064 - RNA, 25 nt, Human
acaaaacaacaaaaaaaacaaaaaa

SEQ ID NO: 874065 - RNA, 21 nt, Human
acaacaaaaaaaacaaaaaca

SEQ ID NO: 874066 - RNA, 22 nt, Human
acacaucaccauaacauaauca

SEQ ID NO: 874067 - RNA, 22 nt, Human
acagaagaaaaauaaaaaagga

SEQ ID NO: 874068 - RNA, 21 nt, Human
acaguuaaaaaaaacccaaaa

SEQ ID NO: 874069 - RNA, 20 nt, Human
accaaguuaaaggauguucu

SEQ ID NO: 874070 - RNA, 24 nt, Human
acccaaaacacacuccauuaucau

SEQ ID NO: 874071 - RNA, 18 nt, Human
acccccagagcugagaaa

SEQ ID NO: 874072 - RNA, 22 nt, Human
acccuaagccuccgggcugcac

SEQ ID NO: 874073 - RNA, 23 nt, Human
acccugauaguggccaaguagaa

SEQ ID NO: 874074 - RNA, 25 nt, Human
accuugggaagaggauaccuucuug

SEQ ID NO: 874075 - RNA, 22 nt, Human
acuacagcuguucagaccaaug

SEQ ID NO: 874076 - RNA, 22 nt, Human
acuguguggaggaagaccaggg

SEQ ID NO: 874077 - RNA, 21 nt, Human
agacagcucgaaacccaugcc

SEQ ID NO: 874078 - RNA, 24 nt, Human
agagugcauuuuuuuuucucugua

SEQ ID NO: 874079 - RNA, 22 nt, Human
aggacauguacaaauggccuuc

SEQ ID NO: 874080 - RNA, 21 nt, Human
aggaguagaccaacuacagcu

SEQ ID NO: 874081 - RNA, 24 nt, Human
agucaacacaauagaugacgaacc

SEQ ID NO: 874082 - RNA, 22 nt, Human
agucaguacuuaagagucuaga

SEQ ID NO: 874083 - RNA, 23 nt, Human
aguuccaccugaaaccaggcagc

SEQ ID NO: 874084 - RNA, 18 nt, Human
auaacauaaucacaaaag

SEQ ID NO: 874085 - RNA, 19 nt, Human
auaaccuugaacuaaaagc

SEQ ID NO: 874086 - RNA, 23 nt, Human
caaaaagccauuaauagucaaca

SEQ ID NO: 874087 - RNA, 31 nt, Human
caaaacaaaacaaaacaacaaaaaaaacaaa

SEQ ID NO: 874088 - RNA, 24 nt, Human
caaaacaacaaaaaaaacaaaaac

SEQ ID NO: 874089 - RNA, 21 nt, Human
caaacugguaaaugaccccca

SEQ ID NO: 874090 - RNA, 18 nt, Human
caacaaaaaaaacaaaaa

SEQ ID NO: 874091 - RNA, 19 nt, Human
caacaaaaaaaacaaaaac

SEQ ID NO: 874092 - RNA, 20 nt, Human
caacagaaggagcuucuaaa

SEQ ID NO: 874093 - RNA, 23 nt, Human
caacugggcuaauggcuccacag

SEQ ID NO: 874094 - RNA, 24 nt, Human
caacugggcuaauggcuccacauu

SEQ ID NO: 874095 - RNA, 18 nt, Human
caacuuccaacagaagga

SEQ ID NO: 874096 - RNA, 23 nt, Human
caaguagcuccagugugcaccaa

SEQ ID NO: 874097 - RNA, 25 nt, Human
cacagacgcuuuauuggcuggggag

SEQ ID NO: 874098 - RNA, 21 nt, Human
caccagaaagaauuuugccaa

SEQ ID NO: 874099 - RNA, 18 nt, Human
caccgcuuugagaaagcu

SEQ ID NO: 874100 - RNA, 21 nt, Human
caccuuuguuuccccacacaa

SEQ ID NO: 874101 - RNA, 20 nt, Human
cacuccauuaucaugauccu

SEQ ID NO: 874102 - RNA, 24 nt, Human
cagcagugaaauacacacacgugg

SEQ ID NO: 874103 - RNA, 21 nt, Human
caggagccggcaagggaagag

SEQ ID NO: 874104 - RNA, 21 nt, Human
cauuucucuguagcauuuggg

SEQ ID NO: 874105 - RNA, 19 nt, Human
cauuuuagaucacagguac

SEQ ID NO: 874106 - RNA, 22 nt, Human
ccaaaacacacuccauuaucau

SEQ ID NO: 874107 - RNA, 19 nt, Human
ccacacaaucaagugcuaa

SEQ ID NO: 874108 - RNA, 22 nt, Human
ccagaaagaauuuugccaaagg

SEQ ID NO: 874109 - RNA, 25 nt, Human
ccagaaagaauuuugccaaaggaca

SEQ ID NO: 874110 - RNA, 23 nt, Human
ccaguauuccccaccccucccac

SEQ ID NO: 874111 - RNA, 19 nt, Human
cccuaagaaauggcucucu

SEQ ID NO: 874112 - RNA, 19 nt, Human
cccuaagccuccgggcugc

SEQ ID NO: 874113 - RNA, 18 nt, Human
cccuugcugagguccagc

SEQ ID NO: 874114 - RNA, 20 nt, Human
ccuagauuggagagcaaaac

SEQ ID NO: 874115 - RNA, 23 nt, Human
ccucuaccuucaucuauagcaaa

SEQ ID NO: 874116 - RNA, 22 nt, Human
ccuuaauaaaacacacaaccaa

SEQ ID NO: 874117 - RNA, 26 nt, Human
cgccacagacgcuuuauuggcugggg

SEQ ID NO: 874118 - RNA, 20 nt, Human
cgugcagcaaggcaugcugg

SEQ ID NO: 874119 - RNA, 18 nt, Human
cuagguugugaacauauu

SEQ ID NO: 874120 - RNA, 19 nt, Human
cucaagcaaaaaaaccaga

SEQ ID NO: 874121 - RNA, 23 nt, Human
cugaaaccaggcagccaucauca

SEQ ID NO: 874122 - RNA, 19 nt, Human
cugacagcccucuaccuuc

SEQ ID NO: 874123 - RNA, 21 nt, Human
cugcacccuaagccuccgggc

SEQ ID NO: 874124 - RNA, 24 nt, Human
cugcaggggucgccccgaucuccu

SEQ ID NO: 874125 - RNA, 19 nt, Human
cuggaaaugaacuuuuaac

SEQ ID NO: 874126 - RNA, 25 nt, Human
cuggccaaaacaaaacaaaacaaca

SEQ ID NO: 874127 - RNA, 21 nt, Human
cuggggagagugaagagcaaa

SEQ ID NO: 874128 - RNA, 19 nt, Human
cugguuggaaagcacauau

SEQ ID NO: 874129 - RNA, 23 nt, Human
cuuucaaauugcacaccaaguua

SEQ ID NO: 874130 - RNA, 18 nt, Human
cuuugaagggguuucagc

SEQ ID NO: 874131 - RNA, 22 nt, Human
cuuugugauguacuggacaugu

SEQ ID NO: 874132 - RNA, 18 nt, Human
gaacaacuguguggagga

SEQ ID NO: 874133 - RNA, 19 nt, Human
gaagggguuucagccuguc

SEQ ID NO: 874134 - RNA, 20 nt, Human
gagaagcagaaggaagguug

SEQ ID NO: 874135 - RNA, 26 nt, Human
gagacuaaucuacaauggggacaccu

SEQ ID NO: 874136 - RNA, 18 nt, Human
gaggaagaccagggaggc

SEQ ID NO: 874137 - RNA, 20 nt, Human
gaucacagguacucaacuuc

SEQ ID NO: 874138 - RNA, 20 nt, Human
gcaaaauccuuacccaauca

SEQ ID NO: 874139 - RNA, 23 nt, Human
gccaaaacaaaacaaaacaacaa

SEQ ID NO: 874140 - RNA, 23 nt, Human
gccuggggagaccagcugggugc

SEQ ID NO: 874141 - RNA, 24 nt, Human
gcugacagcccucuaccuucaucu

SEQ ID NO: 874142 - RNA, 18 nt, Human
ggagaauauccucaacug

SEQ ID NO: 874143 - RNA, 24 nt, Human
ggagugcacuggccaucccucaga

SEQ ID NO: 874144 - RNA, 25 nt, Human
ggcagcucacacagcugccuuccga

SEQ ID NO: 874145 - RNA, 29 nt, Human
ggccaaaacaaaacaaaacaacaaaaaaa

SEQ ID NO: 874146 - RNA, 21 nt, Human
gggaaggguuaggaggggagg

SEQ ID NO: 874147 - RNA, 22 nt, Human
gguaccaggagccggcaaggga

SEQ ID NO: 874148 - RNA, 23 nt, Human
guagaaaacauuucucuguagca

SEQ ID NO: 874149 - RNA, 24 nt, Human
guauuccccaccccucccaccuuu

SEQ ID NO: 874150 - RNA, 22 nt, Human
uaaaaaaaacccaaaacacacu

SEQ ID NO: 874151 - RNA, 24 nt, Human
uaaaaaaaacccaaaacacacucc

SEQ ID NO: 874152 - RNA, 25 nt, Human
uaaaaaaaacccaaaacacacucca

SEQ ID NO: 874153 - RNA, 20 nt, Human
uaaaaauacucauaaagcag

SEQ ID NO: 874154 - RNA, 22 nt, Human
uaaaacacacaaccaaucagga

SEQ ID NO: 874155 - RNA, 18 nt, Human
uaaacccugugugccaaa

SEQ ID NO: 874156 - RNA, 19 nt, Human
uaacauaaucacaaaaguc

SEQ ID NO: 874157 - RNA, 21 nt, Human
uaacauaaucacaaaagucaa

SEQ ID NO: 874158 - RNA, 25 nt, Human
uaacauaaucacaaaagucaaagca

SEQ ID NO: 874159 - RNA, 20 nt, Human
uaaguuccaccugaaaccag

SEQ ID NO: 874160 - RNA, 19 nt, Human
uaaucacaaaagucaaagc

SEQ ID NO: 874161 - RNA, 24 nt, Human
uacacacacgugcagcaaggcaug

SEQ ID NO: 874162 - RNA, 19 nt, Human
uacagcuguucagaccaau

SEQ ID NO: 874163 - RNA, 20 nt, Human
uagacuguacagaagaaaaa

SEQ ID NO: 874164 - RNA, 20 nt, Human
uaggagacaccagaaagaau

SEQ ID NO: 874165 - RNA, 27 nt, Human
ucaacugaaccuagauuggagagcaaa

SEQ ID NO: 874166 - RNA, 26 nt, Human
ucacaaaagucaaagcagucaguacu

SEQ ID NO: 874167 - RNA, 18 nt, Human
ucagcagugaaauacaca

SEQ ID NO: 874168 - RNA, 22 nt, Human
ucaggaggaggaagaaaaggca

SEQ ID NO: 874169 - RNA, 20 nt, Human
ucaguggguacaccuuggga

SEQ ID NO: 874170 - RNA, 19 nt, Human
ucccugucucugaaguuag

SEQ ID NO: 874171 - RNA, 26 nt, Human
uccgagugacuggguuugccugaccc

SEQ ID NO: 874172 - RNA, 21 nt, Human
uccuuggugcccagagggcua

SEQ ID NO: 874173 - RNA, 22 nt, Human
ucuagagaacaaagaggugaac

SEQ ID NO: 874174 - RNA, 23 nt, Human
ucucuggaaaugaacuuuuaacu

SEQ ID NO: 874175 - RNA, 22 nt, Human
ucuguagcauuuggguagcugg

SEQ ID NO: 874176 - RNA, 24 nt, Human
ucuuagaaacaauauuccuucaac

SEQ ID NO: 874177 - RNA, 20 nt, Human
ugaaauacacacacgugcag

SEQ ID NO: 874178 - RNA, 22 nt, Human
ugaaauacacacacgugcagca

SEQ ID NO: 874179 - RNA, 18 nt, Human
ugaaaucaugcagagaug

SEQ ID NO: 874180 - RNA, 23 nt, Human
ugaagagcaaaauaaggucagga

SEQ ID NO: 874181 - RNA, 19 nt, Human
ugaagcccacuagcuuggc

SEQ ID NO: 874182 - RNA, 24 nt, Human
ugaauauaaccuugaacuaaaagc

SEQ ID NO: 874183 - RNA, 19 nt, Human
ugacagaaaggcugguaaa

SEQ ID NO: 874184 - RNA, 26 nt, Human
ugacuacacaucaccauaacauaauc

SEQ ID NO: 874185 - RNA, 22 nt, Human
ugagaaaugugaacgauucaag

SEQ ID NO: 874186 - RNA, 21 nt, Human
ugagaagagacuaaucuacaa

SEQ ID NO: 874187 - RNA, 23 nt, Human
ugagguccagcuguuuaugcugu

SEQ ID NO: 874188 - RNA, 23 nt, Human
uggacaugucucaaaacagucuu

SEQ ID NO: 874189 - RNA, 26 nt, Human
uggccaaaacaaaacaaaacaacaag

SEQ ID NO: 874190 - RNA, 24 nt, Human
uggcuggggagagugaagagcaaa

SEQ ID NO: 874191 - RNA, 19 nt, Human
ugggaaagaaaaaaauugc

SEQ ID NO: 874192 - RNA, 20 nt, Human
ugggaagggaauuacauuga

SEQ ID NO: 874193 - RNA, 18 nt, Human
ugggagaagcagaaggaa

SEQ ID NO: 874194 - RNA, 23 nt, Human
ugggugugggagaagcagaagga

SEQ ID NO: 874195 - RNA, 19 nt, Human
uggguuggacugcucugcu

SEQ ID NO: 874196 - RNA, 21 nt, Human
ugguaaaugacccccagagcu

SEQ ID NO: 874197 - RNA, 22 nt, Human
ugguaagugggguuuaccuucu

SEQ ID NO: 874198 - RNA, 18 nt, Human
uggugaacaacugugugg

SEQ ID NO: 874199 - RNA, 19 nt, Human
ugugcugagacuuugucuc

SEQ ID NO: 874200 - RNA, 18 nt, Human
uguggaggaagaccaggg

SEQ ID NO: 874201 - RNA, 24 nt, Human
uguggcacagguacccuugcaccu

SEQ ID NO: 874202 - RNA, 24 nt, Human
ugugggagaagcagaaggaagguu

SEQ ID NO: 874203 - RNA, 22 nt, Human
uuagaaacaauauuccuucaac

SEQ ID NO: 874204 - RNA, 23 nt, Human
uuaggcuacgauguaucauuaua

SEQ ID NO: 874205 - RNA, 22 nt, Human
uucucuggaaaugaacuuuuaa

SEQ ID NO: 874206 - RNA, 19 nt, Human
uugcugagguccagcuguu

SEQ ID NO: 874207 - RNA, 22 nt, Human
uuuaaaauacgacuuaacugca

SEQ ID NO: 874208 - RNA, 21 nt, Human
uuugcccuucugcaaauacug

SEQ ID NO: 874209 - RNA, 18 nt, Human
uuuuaacuuaccugauua

SEQ ID NO: 874210 - RNA, 20 nt, Human
uuuuagaugucaucugccuc

SEQ ID NO: 874211 - RNA, 19 nt, Human
uuuuuuuuuuuuucacuuu

SEQ ID NO: 874212 - RNA, 26 nt, Human
uuuuuuuuuuuuuuuuucacuuuaau

SEQ ID NO: 874213 - RNA, 23 nt, Human
aacacaccucugugcuacuagga

SEQ ID NO: 874214 - RNA, 27 nt, Human
aagugccugccagguuccccggugucg

SEQ ID NO: 874215 - RNA, 23 nt, Human
agagccccuugcauauccccacu

SEQ ID NO: 874216 - RNA, 18 nt, Human
agccuaggggguuccaaa

SEQ ID NO: 874217 - RNA, 23 nt, Human
agggaagaaccacauacacggca

SEQ ID NO: 874218 - RNA, 19 nt, Human
auccccucuccaauaaagc

SEQ ID NO: 874219 - RNA, 22 nt, Human
augaauucaggcuguggcggcc

SEQ ID NO: 874220 - RNA, 19 nt, Human
caacugguuccagcagggu

SEQ ID NO: 874221 - RNA, 21 nt, Human
caagagauggucaucuaccac

SEQ ID NO: 874222 - RNA, 28 nt, Human
cacauacacggcaauaaucugggaaacc

SEQ ID NO: 874223 - RNA, 21 nt, Human
cagagccccuugcauaucccc

SEQ ID NO: 874224 - RNA, 20 nt, Human
cagccuccuccucaucuccg

SEQ ID NO: 874225 - RNA, 20 nt, Human
cagcgagccccgcccucccc

SEQ ID NO: 874226 - RNA, 21 nt, Human
cauccccugggauccugugga

SEQ ID NO: 874227 - RNA, 22 nt, Human
ccaagcuuaacccccauccccu

SEQ ID NO: 874228 - RNA, 24 nt, Human
ccaccacaccagaacacaccucug

SEQ ID NO: 874229 - RNA, 20 nt, Human
ccagaacacaccucugugcu

SEQ ID NO: 874230 - RNA, 23 nt, Human
ccagagccccuugcauaucccca

SEQ ID NO: 874231 - RNA, 18 nt, Human
ccccggacgcccuggccu

SEQ ID NO: 874232 - RNA, 24 nt, Human
ccccugggauccuguggagacagg

SEQ ID NO: 874233 - RNA, 19 nt, Human
ccuccccagcugagggggc

SEQ ID NO: 874234 - RNA, 23 nt, Human
ccucccggccgugucgcaccgcc

SEQ ID NO: 874235 - RNA, 21 nt, Human
ccugcccacauccccucucca

SEQ ID NO: 874236 - RNA, 18 nt, Human
ccugggccuuauagccag

SEQ ID NO: 874237 - RNA, 21 nt, Human
ccuguggagacaggcaccugg

SEQ ID NO: 874238 - RNA, 22 nt, Human
ccuugcguuguucuccuccucc

SEQ ID NO: 874239 - RNA, 19 nt, Human
cgcaccgccgggaccggca

SEQ ID NO: 874240 - RNA, 21 nt, Human
cgcagccccggacgcccuggc

SEQ ID NO: 874241 - RNA, 20 nt, Human
cgccauggaccgggcccgag

SEQ ID NO: 874242 - RNA, 19 nt, Human
cgcccuggccuccggggcu

SEQ ID NO: 874243 - RNA, 19 nt, Human
cgccgggaccggcagcgcu

SEQ ID NO: 874244 - RNA, 22 nt, Human
cgccgggaccggcagcgcucgg

SEQ ID NO: 874245 - RNA, 21 nt, Human
cggagccccuccaccucccug

SEQ ID NO: 874246 - RNA, 19 nt, Human
cuccaauaaagcaccugug

SEQ ID NO: 874247 - RNA, 21 nt, Human
cuccaauaaagcaccugugcc

SEQ ID NO: 874248 - RNA, 21 nt, Human
cuccgcgcggccugcgcccuc

SEQ ID NO: 874249 - RNA, 22 nt, Human
cugcguaggcgcagccuccucc

SEQ ID NO: 874250 - RNA, 18 nt, Human
cugugcuacuaggaggac

SEQ ID NO: 874251 - RNA, 18 nt, Human
cuuggcuccucugagggg

SEQ ID NO: 874252 - RNA, 20 nt, Human
gaagaaccacauacacggca

SEQ ID NO: 874253 - RNA, 18 nt, Human
gaagcauauggggaaauu

SEQ ID NO: 874254 - RNA, 23 nt, Human
gagccccuccaccucccuguggg

SEQ ID NO: 874255 - RNA, 21 nt, Human
gccauggaccgggcccgagcc

SEQ ID NO: 874256 - RNA, 21 nt, Human
gcccacauccccucuccaaua

SEQ ID NO: 874257 - RNA, 18 nt, Human
gcccaggagagguugugg

SEQ ID NO: 874258 - RNA, 20 nt, Human
gccccggacgcccuggccuc

SEQ ID NO: 874259 - RNA, 22 nt, Human
gccccggacgcccuggccuccg

SEQ ID NO: 874260 - RNA, 19 nt, Human
gccucauccuguauaguuu

SEQ ID NO: 874261 - RNA, 24 nt, Human
gcgcaggguccgaggggccgccau

SEQ ID NO: 874262 - RNA, 20 nt, Human
ggaaauuaauagugguggca

SEQ ID NO: 874263 - RNA, 23 nt, Human
ggaaccuuccuuauccccugccc

SEQ ID NO: 874264 - RNA, 25 nt, Human
ggagccccuccaccucccugugggg

SEQ ID NO: 874265 - RNA, 20 nt, Human
ggcauuguugugugaguuca

SEQ ID NO: 874266 - RNA, 25 nt, Human
gggaagcauaauaucuguuuucaga

SEQ ID NO: 874267 - RNA, 20 nt, Human
gggcccgagccaaaugcagc

SEQ ID NO: 874268 - RNA, 19 nt, Human
ggggcucagcgcagggucc

SEQ ID NO: 874269 - RNA, 20 nt, Human
gggugguugaagcauauggg

SEQ ID NO: 874270 - RNA, 19 nt, Human
guucaugaauucaggcugu

SEQ ID NO: 874271 - RNA, 19 nt, Human
uaacccccauccccuggga

SEQ ID NO: 874272 - RNA, 21 nt, Human
uaacccccauccccugggauc

SEQ ID NO: 874273 - RNA, 23 nt, Human
uaagggucgcagucggcagcagg

SEQ ID NO: 874274 - RNA, 18 nt, Human
uaagucccugccaccaca

SEQ ID NO: 874275 - RNA, 21 nt, Human
uaaguguggguauugguuuuu

SEQ ID NO: 874276 - RNA, 21 nt, Human
uacauagaugacaauuuugug

SEQ ID NO: 874277 - RNA, 23 nt, Human
uaggauucccuaagucccugcca

SEQ ID NO: 874278 - RNA, 24 nt, Human
uauggcaaagugccugccagguuc

SEQ ID NO: 874279 - RNA, 20 nt, Human
uccaauaaagcaccugugcc

SEQ ID NO: 874280 - RNA, 23 nt, Human
uccauucugggucugaguuagga

SEQ ID NO: 874281 - RNA, 21 nt, Human
uccccugggauccuguggaga

SEQ ID NO: 874282 - RNA, 21 nt, Human
ucccuguggggccuggccuug

SEQ ID NO: 874283 - RNA, 21 nt, Human
ucugaguuaggagcuuggggc

SEQ ID NO: 874284 - RNA, 23 nt, Human
ugccaccacaccagaacacaccu

SEQ ID NO: 874285 - RNA, 18 nt, Human
uggcaggaagggggaccg

SEQ ID NO: 874286 - RNA, 19 nt, Human
uggcaggaagggggaccgg

SEQ ID NO: 874287 - RNA, 18 nt, Human
uggcauuguugugugagu

SEQ ID NO: 874288 - RNA, 23 nt, Human
ugucaggggcagccaggacuguc

SEQ ID NO: 874289 - RNA, 24 nt, Human
ugucaggggcagccaggacuguuc

SEQ ID NO: 874290 - RNA, 22 nt, Human
ugucgcaccgccgggaccggca

SEQ ID NO: 874291 - RNA, 20 nt, Human
uguugugugaguucaggagg

SEQ ID NO: 874292 - RNA, 22 nt, Human
uugcguuguucuccuccucccg

SEQ ID NO: 874293 - RNA, 28 nt, Human
uuggacaagagauggucaucggacuucc

SEQ ID NO: 874294 - RNA, 23 nt, Human
uugugugaguucaggaggugagg

SEQ ID NO: 874295 - RNA, 21 nt, Human
uuugucccuuauguguggcuc

SEQ ID NO: 874296 - RNA, 21 nt, Human
uuugugacugacuggugucuu

SEQ ID NO: 874297 - RNA, 20 nt, Human
aaaaggcuguaucugccuuc

SEQ ID NO: 874298 - RNA, 25 nt, Human
aaacaggugagcucugucccaggac

SEQ ID NO: 874299 - RNA, 26 nt, Human
aaaccugaaauaccacaguugccaaa

SEQ ID NO: 874300 - RNA, 20 nt, Human
aaagugcugggauuauaggc

SEQ ID NO: 874301 - RNA, 24 nt, Human
aaagugcugggauuauaggcguga

SEQ ID NO: 874302 - RNA, 19 nt, Human
aagugcugggauuauaggc

SEQ ID NO: 874303 - RNA, 19 nt, Human
aagugcugggauuauaggc

SEQ ID NO: 874304 - RNA, 26 nt, Human
aagugcugggauuauaggcgugagcc

SEQ ID NO: 874305 - RNA, 18 nt, Human
aauuuuuuguauucuuuu

SEQ ID NO: 874306 - RNA, 19 nt, Human
acacacaagcgguggucgc

SEQ ID NO: 874307 - RNA, 23 nt, Human
acaggugcccgccaccacgcccg

SEQ ID NO: 874308 - RNA, 18 nt, Human
acccuggaccugaagccu

SEQ ID NO: 874309 - RNA, 19 nt, Human
agagaugggguuucaccgu

SEQ ID NO: 874310 - RNA, 18 nt, Human
agccucccgaauagcugg

SEQ ID NO: 874311 - RNA, 20 nt, Human
aggcgugagccaccgcgccc

SEQ ID NO: 874312 - RNA, 25 nt, Human
aggcuggagugcaguggcgcgaucu

SEQ ID NO: 874313 - RNA, 20 nt, Human
aggugcccgccaccacgccc

SEQ ID NO: 874314 - RNA, 20 nt, Human
aguagagaugggguuucacc

SEQ ID NO: 874315 - RNA, 20 nt, Human
agugcaguggcgcgaucucg

SEQ ID NO: 874316 - RNA, 23 nt, Human
agugcaguggcgcgaucucggcu

SEQ ID NO: 874317 - RNA, 24 nt, Human
agugcaguggcgcgaucucggcuc

SEQ ID NO: 874318 - RNA, 19 nt, Human
augggguuucaccguguua

SEQ ID NO: 874319 - RNA, 22 nt, Human
auuaguuuucucucucccacuc

SEQ ID NO: 874320 - RNA, 18 nt, Human
caaaacacugaccacagc

SEQ ID NO: 874321 - RNA, 20 nt, Human
caaacaucccuguacuuuuc

SEQ ID NO: 874322 - RNA, 21 nt, Human
caagacgcccgcaccugaggg

SEQ ID NO: 874323 - RNA, 18 nt, Human
caccaaguuggcagugac

SEQ ID NO: 874324 - RNA, 18 nt, Human
caccguguuagccacgac

SEQ ID NO: 874325 - RNA, 24 nt, Human
caccguguuagccacgacggucuc

SEQ ID NO: 874326 - RNA, 22 nt, Human
cacgccauucuccugccucagc

SEQ ID NO: 874327 - RNA, 19 nt, Human
caggugcccgccaccacgc

SEQ ID NO: 874328 - RNA, 21 nt, Human
caggugcccgccaccacgccc

SEQ ID NO: 874329 - RNA, 21 nt, Human
cagugacaguggcacacagaa

SEQ ID NO: 874330 - RNA, 22 nt, Human
cccaggcuggagugcaguggcg

SEQ ID NO: 874331 - RNA, 24 nt, Human
cccgaauagcugggacuacaggug

SEQ ID NO: 874332 - RNA, 24 nt, Human
cccgcaccugagggcaugcgucca

SEQ ID NO: 874333 - RNA, 21 nt, Human
cccguggaaacuccugccccc

SEQ ID NO: 874334 - RNA, 23 nt, Human
ccuaaagugcugggauuauaggc

SEQ ID NO: 874335 - RNA, 25 nt, Human
ccuccgcagaaugaggaggagcgaa

SEQ ID NO: 874336 - RNA, 19 nt, Human
cgccucccggguucacgcc

SEQ ID NO: 874337 - RNA, 24 nt, Human
cgccucggccuccuaaagugcugg

SEQ ID NO: 874338 - RNA, 24 nt, Human
cggagucuggcucuguugcccagg

SEQ ID NO: 874339 - RNA, 24 nt, Human
cuaaagugcugggauuauaggcgu

SEQ ID NO: 874340 - RNA, 24 nt, Human
cucccgaauagcugggacuacagg

SEQ ID NO: 874341 - RNA, 21 nt, Human
cucccggguucacgccauucu

SEQ ID NO: 874342 - RNA, 24 nt, Human
cuccugauuucgugauccgcccgc

SEQ ID NO: 874343 - RNA, 23 nt, Human
cugccucagccucccgaauagcu

SEQ ID NO: 874344 - RNA, 24 nt, Human
cugcgaggccgacucgcaagacgc

SEQ ID NO: 874345 - RNA, 19 nt, Human
cuguugcccaggcuggagu

SEQ ID NO: 874346 - RNA, 24 nt, Human
cuuuuaguagagaugggguuucac

SEQ ID NO: 874347 - RNA, 22 nt, Human
gacucgcaagacgcccgcaccu

SEQ ID NO: 874348 - RNA, 24 nt, Human
gagaugggguuucaccguguuagc

SEQ ID NO: 874349 - RNA, 20 nt, Human
gagcucugucccaggacccg

SEQ ID NO: 874350 - RNA, 22 nt, Human
gauuaguuuucucucucccacu

SEQ ID NO: 874351 - RNA, 18 nt, Human
gauuauaggcgugagcca

SEQ ID NO: 874352 - RNA, 22 nt, Human
gauuauaggcgugagccaccgc

SEQ ID NO: 874353 - RNA, 22 nt, Human
gauuauaggcgugagccaccgc

SEQ ID NO: 874354 - RNA, 24 nt, Human
gauuucgugauccgcccgccucgg

SEQ ID NO: 874355 - RNA, 24 nt, Human
gcagaaugaggaggagcgaaguac

SEQ ID NO: 874356 - RNA, 19 nt, Human
gcccaggcuggagugcagu

SEQ ID NO: 874357 - RNA, 18 nt, Human
gcgaaguaccgaccucac

SEQ ID NO: 874358 - RNA, 25 nt, Human
gcucuguugcccaggcuggagugca

SEQ ID NO: 874359 - RNA, 19 nt, Human
gcuggagugcaguggcgcg

SEQ ID NO: 874360 - RNA, 23 nt, Human
ggagucuggcucuguugcccagg

SEQ ID NO: 874361 - RNA, 24 nt, Human
ggcucuguugcccaggcuggagug

SEQ ID NO: 874362 - RNA, 18 nt, Human
gggguuucaccguguuag

SEQ ID NO: 874363 - RNA, 23 nt, Human
gugauccgcccgccucggccucc

SEQ ID NO: 874364 - RNA, 24 nt, Human
uaaagugcugggauuauaggcgug

SEQ ID NO: 874365 - RNA, 18 nt, Human
uaaguguaauucaaaaca

SEQ ID NO: 874366 - RNA, 26 nt, Human
uaauuuuuuguauucuuuuaguagag

SEQ ID NO: 874367 - RNA, 23 nt, Human
uacaggugcccgccaccacgccc

SEQ ID NO: 874368 - RNA, 21 nt, Human
uaguagagaugggguuucacc

SEQ ID NO: 874369 - RNA, 24 nt, Human
uaguagagaugggguuucaccgug

SEQ ID NO: 874370 - RNA, 26 nt, Human
uaguagagaugggguuucaccguguu

SEQ ID NO: 874371 - RNA, 24 nt, Human
ucaccguguuagccacgacggucu

SEQ ID NO: 874372 - RNA, 24 nt, Human
ucacugaaagcuccgccucccggg

SEQ ID NO: 874373 - RNA, 20 nt, Human
ucagccucccgaauagcugg

SEQ ID NO: 874374 - RNA, 21 nt, Human
ucccaggacccguggaaacuc

SEQ ID NO: 874375 - RNA, 23 nt, Human
ucccgaauagcugggacuacagg

SEQ ID NO: 874376 - RNA, 21 nt, Human
ucccggguucacgccauucuc

SEQ ID NO: 874377 - RNA, 24 nt, Human
ucccggguucacgccauucuccug

SEQ ID NO: 874378 - RNA, 24 nt, Human
uccuaaagugcugggauuauaggc

SEQ ID NO: 874379 - RNA, 19 nt, Human
uccuucaaaacacugacca

SEQ ID NO: 874380 - RNA, 18 nt, Human
ucggccuccuaaagugcu

SEQ ID NO: 874381 - RNA, 18 nt, Human
ucgugauccgcccgccuc

SEQ ID NO: 874382 - RNA, 26 nt, Human
ucuccugccucagccucccgaauagc

SEQ ID NO: 874383 - RNA, 23 nt, Human
ucuggcucuguugcccaggcugg

SEQ ID NO: 874384 - RNA, 24 nt, Human
ucuggcucuguugcccaggcugga

SEQ ID NO: 874385 - RNA, 18 nt, Human
ucuguugcccaggcugga

SEQ ID NO: 874386 - RNA, 24 nt, Human
ucuguugcccaggcuggagugcag

SEQ ID NO: 874387 - RNA, 18 nt, Human
ugaaauaccacaguugcc

SEQ ID NO: 874388 - RNA, 22 nt, Human
ugagacggagucuggcucuguu

SEQ ID NO: 874389 - RNA, 20 nt, Human
ugagcucugucccaggaccc

SEQ ID NO: 874390 - RNA, 22 nt, Human
ugcaguggcgcgaucucggcuc

SEQ ID NO: 874391 - RNA, 24 nt, Human
ugccaaacaucccuguacuuuucc

SEQ ID NO: 874392 - RNA, 18 nt, Human
ugcccaggcuggagugca

SEQ ID NO: 874393 - RNA, 21 nt, Human
ugcccaggcuggagugcagug

SEQ ID NO: 874394 - RNA, 22 nt, Human
ugcccaggcuggagugcagugg

SEQ ID NO: 874395 - RNA, 27 nt, Human
ugccucagccucccgaauagcugggac

SEQ ID NO: 874396 - RNA, 22 nt, Human
ugcggcuuccacagagcugcga

SEQ ID NO: 874397 - RNA, 23 nt, Human
uggagugcaguggcgcgaucucg

SEQ ID NO: 874398 - RNA, 24 nt, Human
uggagugcaguggcgcgaucucgg

SEQ ID NO: 874399 - RNA, 21 nt, Human
ugggacuacaggugcccgcca

SEQ ID NO: 874400 - RNA, 22 nt, Human
ugggacuacaggugcccgccac

SEQ ID NO: 874401 - RNA, 24 nt, Human
ugggacuacaggugcccgccacca

SEQ ID NO: 874402 - RNA, 18 nt, Human
ugggauuauaggcgugag

SEQ ID NO: 874403 - RNA, 19 nt, Human
ugggauuauaggcgugagc

SEQ ID NO: 874404 - RNA, 21 nt, Human
ugggauuauaggcgugagcca

SEQ ID NO: 874405 - RNA, 22 nt, Human
ugggauuauaggcgugagccac

SEQ ID NO: 874406 - RNA, 23 nt, Human
ugggauuauaggcgugagccacc

SEQ ID NO: 874407 - RNA, 24 nt, Human
ugggauuauaggcgugagccaccg

SEQ ID NO: 874408 - RNA, 19 nt, Human
ugggguuucaccguguuag

SEQ ID NO: 874409 - RNA, 21 nt, Human
uuaaguaucugcuaaggugcc

SEQ ID NO: 874410 - RNA, 18 nt, Human
uuaguagagaugggguuu

SEQ ID NO: 874411 - RNA, 22 nt, Human
uuaguagagaugggguuucacc

SEQ ID NO: 874412 - RNA, 24 nt, Human
uuaguagagaugggguuucaccgu

SEQ ID NO: 874413 - RNA, 23 nt, Human
uucaaaacaaaacaggugagcuc

SEQ ID NO: 874414 - RNA, 20 nt, Human
uuccgugcugcuuuccccuc

SEQ ID NO: 874415 - RNA, 24 nt, Human
uugcccaggcuggagugcaguggc

SEQ ID NO: 874416 - RNA, 21 nt, Human
uuucaccguguuagccacgac

SEQ ID NO: 874417 - RNA, 18 nt, Human
uuuccgcugccagucaca

SEQ ID NO: 874418 - RNA, 23 nt, Human
uuuuuguauucuuuuaguagaga

SEQ ID NO: 874419 - RNA, 26 nt, Human
uuuuuuguauucuuuuaguagagaug

SEQ ID NO: 874420 - RNA, 23 nt, Human
uuuuuuuuugagacggagucugg

SEQ ID NO: 874421 - RNA, 25 nt, Human
uuuuuuuuuuugagacggagucugg

SEQ ID NO: 874422 - RNA, 22 nt, Human
uuuuuuuuuuuuuugagacgga

SEQ ID NO: 874423 - RNA, 18 nt, Human
uuuuuuuuuuuuuuuuug

SEQ ID NO: 874424 - RNA, 20 nt, Human
aaacaugcaugaaaaacaca

SEQ ID NO: 874425 - RNA, 22 nt, Human
aaggauacuuccaaagacagac

SEQ ID NO: 874426 - RNA, 19 nt, Human
aaggcccaaagagacccaa

SEQ ID NO: 874427 - RNA, 21 nt, Human
acaagauacaguagcacacaa

SEQ ID NO: 874428 - RNA, 24 nt, Human
acagagggacgguagaaucagaaa

SEQ ID NO: 874429 - RNA, 19 nt, Human
agaaauacagauggcacca

SEQ ID NO: 874430 - RNA, 19 nt, Human
agaagagacugaaaaggca

SEQ ID NO: 874431 - RNA, 19 nt, Human
agaaucaaauuuaucagca

SEQ ID NO: 874432 - RNA, 23 nt, Human
agacaaaugggaaaccgaccaga

SEQ ID NO: 874433 - RNA, 24 nt, Human
agacagagggacgguagaaucaga

SEQ ID NO: 874434 - RNA, 18 nt, Human
agacugaaaaggcagaug

SEQ ID NO: 874435 - RNA, 22 nt, Human
aggguggauaagaaguggggcc

SEQ ID NO: 874436 - RNA, 21 nt, Human
agguacaucaaauaaucacaa

SEQ ID NO: 874437 - RNA, 23 nt, Human
aguacauggaaacugaaaaggga

SEQ ID NO: 874438 - RNA, 20 nt, Human
agugaaaggauacuuccaaa

SEQ ID NO: 874439 - RNA, 22 nt, Human
auacuguagccccacaaaacca

SEQ ID NO: 874440 - RNA, 19 nt, Human
auacuuccaaagacagaca

SEQ ID NO: 874441 - RNA, 24 nt, Human
aucacaauacaccugggccuagca

SEQ ID NO: 874442 - RNA, 24 nt, Human
auggcaccaucuucccaaagucca

SEQ ID NO: 874443 - RNA, 23 nt, Human
caaaaccaacuucaugcuuaaau

SEQ ID NO: 874444 - RNA, 19 nt, Human
caaauaaucacaauacacc

SEQ ID NO: 874445 - RNA, 24 nt, Human
caagauacaguagcacacaaaaua

SEQ ID NO: 874446 - RNA, 24 nt, Human
cacaagauacaguagcacacaaag

SEQ ID NO: 874447 - RNA, 21 nt, Human
cacaugcaaccuguccaagau

SEQ ID NO: 874448 - RNA, 22 nt, Human
cacuccccucuccaaaggccca

SEQ ID NO: 874449 - RNA, 24 nt, Human
cacuccccucuccaaaggcccaaa

SEQ ID NO: 874450 - RNA, 23 nt, Human
cagaagagacugaaaaggcagau

SEQ ID NO: 874451 - RNA, 23 nt, Human
cagcacaggacugacagcagcuc

SEQ ID NO: 874452 - RNA, 22 nt, Human
cagcacuuccaugggagggagg

SEQ ID NO: 874453 - RNA, 22 nt, Human
caugaaaaacacaggucacugc

SEQ ID NO: 874454 - RNA, 23 nt, Human
cauggaaacugaaaagggaaaga

SEQ ID NO: 874455 - RNA, 21 nt, Human
ccaaagacagacagagggacg

SEQ ID NO: 874456 - RNA, 18 nt, Human
ccaagcaaaggcccugag

SEQ ID NO: 874457 - RNA, 21 nt, Human
ccacuggcccugccgcucccc

SEQ ID NO: 874458 - RNA, 22 nt, Human
ccauacuguagccccacaaaac

SEQ ID NO: 874459 - RNA, 19 nt, Human
cccaaagagacccaaugag

SEQ ID NO: 874460 - RNA, 21 nt, Human
cccacaaaaccaacuucaugc

SEQ ID NO: 874461 - RNA, 23 nt, Human
cccagagaaguuaagaaauaaga

SEQ ID NO: 874462 - RNA, 20 nt, Human
ccccacaaaaccaacuucau

SEQ ID NO: 874463 - RNA, 23 nt, Human
ccccacaaaaccaacuucaugcu

SEQ ID NO: 874464 - RNA, 20 nt, Human
ccccucuccaaaggcccaaa

SEQ ID NO: 874465 - RNA, 21 nt, Human
ccccugaccaagcaaaggccc

SEQ ID NO: 874466 - RNA, 20 nt, Human
ccccugaccaagcaaaggcu

SEQ ID NO: 874467 - RNA, 18 nt, Human
cccugaggacagcacagg

SEQ ID NO: 874468 - RNA, 19 nt, Human
cccugcacuccccucucca

SEQ ID NO: 874469 - RNA, 22 nt, Human
ccgcuugagaccagcauggucu

SEQ ID NO: 874470 - RNA, 24 nt, Human
ccuacaugccccuguugacuugga

SEQ ID NO: 874471 - RNA, 19 nt, Human
ccugcacuccccucuccaa

SEQ ID NO: 874472 - RNA, 18 nt, Human
ccuuccacaugcaaccug

SEQ ID NO: 874473 - RNA, 23 nt, Human
cuacccgcuauuuccagccauau

SEQ ID NO: 874474 - RNA, 21 nt, Human
cuccccgggagacauggccuc

SEQ ID NO: 874475 - RNA, 21 nt, Human
cugcugcucagacacacuuug

SEQ ID NO: 874476 - RNA, 21 nt, Human
cuggcggcaaugguggugcgg

SEQ ID NO: 874477 - RNA, 22 nt, Human
cuucaugcuuaaaucugcugcu

SEQ ID NO: 874478 - RNA, 21 nt, Human
gaaaacccacuggcccugccg

SEQ ID NO: 874479 - RNA, 23 nt, Human
gacugacagcagcuccagaaaga

SEQ ID NO: 874480 - RNA, 18 nt, Human
gagcuggagacagcacuu

SEQ ID NO: 874481 - RNA, 25 nt, Human
gcaacccucaguucaccaugaaaac

SEQ ID NO: 874482 - RNA, 19 nt, Human
gcacaaauuuuucuguaaa

SEQ ID NO: 874483 - RNA, 18 nt, Human
ggaaggguggauaagaag

SEQ ID NO: 874484 - RNA, 23 nt, Human
ggaggucaaauccaagacuaccc

SEQ ID NO: 874485 - RNA, 22 nt, Human
ggcccugccgcuccccauuucc

SEQ ID NO: 874486 - RNA, 21 nt, Human
gggauggcucuacccaugacc

SEQ ID NO: 874487 - RNA, 19 nt, Human
gugucauagagcuuccugu

SEQ ID NO: 874488 - RNA, 18 nt, Human
uacauggaaacugaaaag

SEQ ID NO: 874489 - RNA, 21 nt, Human
uagccccacaaaaccaacuuc

SEQ ID NO: 874490 - RNA, 19 nt, Human
ucaguucaccaugaaaacc

SEQ ID NO: 874491 - RNA, 23 nt, Human
uccacaugcaaccuguccaagau

SEQ ID NO: 874492 - RNA, 19 nt, Human
uccagaaagacugugauuc

SEQ ID NO: 874493 - RNA, 19 nt, Human
uccauacuguagccccaca

SEQ ID NO: 874494 - RNA, 19 nt, Human
ucccaaaguccauacugua

SEQ ID NO: 874495 - RNA, 23 nt, Human
uccccgggagacauggccuccca

SEQ ID NO: 874496 - RNA, 20 nt, Human
ugaaaaggcagauguuccca

SEQ ID NO: 874497 - RNA, 22 nt, Human
ugaaaaggcagauguucccaaa

SEQ ID NO: 874498 - RNA, 18 nt, Human
ugaaaaguugauucaguu

SEQ ID NO: 874499 - RNA, 18 nt, Human
ugaaacaaaaacaugcau

SEQ ID NO: 874500 - RNA, 24 nt, Human
ugaccaagcaaaggcccugaggac

SEQ ID NO: 874501 - RNA, 18 nt, Human
ugacuuggaugaagaguc

SEQ ID NO: 874502 - RNA, 28 nt, Human
ugagagaucccuguggaauuccagccca

SEQ ID NO: 874503 - RNA, 19 nt, Human
ugaugggcccugaggcucu

SEQ ID NO: 874504 - RNA, 18 nt, Human
ugcagaaaaucauucuca

SEQ ID NO: 874505 - RNA, 23 nt, Human
ugcccugcacuccccucuccaaa

SEQ ID NO: 874506 - RNA, 21 nt, Human
uggcaagcaacaaacauugcu

SEQ ID NO: 874507 - RNA, 21 nt, Human
uggccagacaaaugggaaacc

SEQ ID NO: 874508 - RNA, 20 nt, Human
uggcggcaaugguggugcgg

SEQ ID NO: 874509 - RNA, 23 nt, Human
ugggguguccacauaaacagaau

SEQ ID NO: 874510 - RNA, 22 nt, Human
uggucagggucugacuccugau

SEQ ID NO: 874511 - RNA, 18 nt, Human
ugucauagagcuuccugu

SEQ ID NO: 874512 - RNA, 20 nt, Human
ugucauagagcuuccuguuu

SEQ ID NO: 874513 - RNA, 21 nt, Human
uguggaauuccagcccaauga

SEQ ID NO: 874514 - RNA, 19 nt, Human
ugugucauagagcuuccug

SEQ ID NO: 874515 - RNA, 19 nt, Human
uguuuggggccagccugug

SEQ ID NO: 874516 - RNA, 18 nt, Human
uucacuauggaugaagaa

SEQ ID NO: 874517 - RNA, 23 nt, Human
uuccacaugcaaccuguccaaga

SEQ ID NO: 874518 - RNA, 25 nt, Human
uuccagcccaaugagguccugagcc

SEQ ID NO: 874519 - RNA, 21 nt, Human
uuccuggucagggucugacuc

SEQ ID NO: 874520 - RNA, 21 nt, Human
uugcuggcggcaaugguggug

SEQ ID NO: 874521 - RNA, 19 nt, Human
uugggaacccugcuguccc

SEQ ID NO: 874522 - RNA, 25 nt, Human
uuugcagaaaaucauucucaguccu

SEQ ID NO: 874523 - RNA, 21 nt, Human
uuuggggagaaagcaguuuuu

SEQ ID NO: 874524 - RNA, 30 nt, Human
uuuuuuuuuuucuuuaguuuugcuuuuaaa

SEQ ID NO: 874525 - RNA, 23 nt, Human
uuuuuuuuuuuuucuuuaguuuu

SEQ ID NO: 874526 - RNA, 18 nt, Human
aaaacaaacgcacaagcc

SEQ ID NO: 874527 - RNA, 24 nt, Human
aagcagaaaaaaagcuacguuuua

SEQ ID NO: 874528 - RNA, 21 nt, Human
aaucgccgucgacaccgagcu

SEQ ID NO: 874529 - RNA, 21 nt, Human
acgcugacaaaacaaacgcac

SEQ ID NO: 874530 - RNA, 21 nt, Human
agaggcagcggcaagccccag

SEQ ID NO: 874531 - RNA, 20 nt, Human
agccagcgcugaggcagccc

SEQ ID NO: 874532 - RNA, 18 nt, Human
aggaaaaaaaagaggcac

SEQ ID NO: 874533 - RNA, 24 nt, Human
aggagcagcagggaagcgcgcggc

SEQ ID NO: 874534 - RNA, 21 nt, Human
aggcagcggcaagccccaggg

SEQ ID NO: 874535 - RNA, 19 nt, Human
caaaacaaacgcacaagcc

SEQ ID NO: 874536 - RNA, 19 nt, Human
caaaacaaacgcacaagcc

SEQ ID NO: 874537 - RNA, 23 nt, Human
caccgcgacgcggagaacagcag

SEQ ID NO: 874538 - RNA, 19 nt, Human
cacuccuccagccccacac

SEQ ID NO: 874539 - RNA, 22 nt, Human
cagccccacaccccugcgccca

SEQ ID NO: 874540 - RNA, 19 nt, Human
cagcugugacaccuaagca

SEQ ID NO: 874541 - RNA, 19 nt, Human
cagcugugacaccuaagca

SEQ ID NO: 874542 - RNA, 20 nt, Human
ccacaccccugcgcccagaa

SEQ ID NO: 874543 - RNA, 22 nt, Human
ccacaccccugcgcccagaacc

SEQ ID NO: 874544 - RNA, 18 nt, Human
ccaccgcccuccgugccc

SEQ ID NO: 874545 - RNA, 21 nt, Human
ccacuccuccagccccacacc

SEQ ID NO: 874546 - RNA, 19 nt, Human
ccagccccacaccccugcg

SEQ ID NO: 874547 - RNA, 19 nt, Human
cccaauuuuguuguaucug

SEQ ID NO: 874548 - RNA, 22 nt, Human
ccccagggauccgcggccccaa

SEQ ID NO: 874549 - RNA, 19 nt, Human
cccccgccccagcuccucg

SEQ ID NO: 874550 - RNA, 20 nt, Human
cccccgccccagcuccucgc

SEQ ID NO: 874551 - RNA, 20 nt, Human
ccggccuucagccagcgcug

SEQ ID NO: 874552 - RNA, 20 nt, Human
ccuccgugccccgcgcgccu

SEQ ID NO: 874553 - RNA, 19 nt, Human
ccugcgcccagaaccgagg

SEQ ID NO: 874554 - RNA, 23 nt, Human
cgaaccccagaggcagcggcaag

SEQ ID NO: 874555 - RNA, 21 nt, Human
cgacgcggagaacagcaggag

SEQ ID NO: 874556 - RNA, 21 nt, Human
cgcacaagcccaccgaaucgc

SEQ ID NO: 874557 - RNA, 23 nt, Human
cgcccagaaccgaggcccgcguc

SEQ ID NO: 874558 - RNA, 20 nt, Human
cgccccagcuccucgcccag

SEQ ID NO: 874559 - RNA, 24 nt, Human
cgcggagaacagcaggagcagcag

SEQ ID NO: 874560 - RNA, 19 nt, Human
cuccagaguccaccaccgc

SEQ ID NO: 874561 - RNA, 23 nt, Human
cuccagccccacaccccugcgcc

SEQ ID NO: 874562 - RNA, 24 nt, Human
gaaaauaaauccaagcagaaaaaa

SEQ ID NO: 874563 - RNA, 18 nt, Human
gagcaccuggaaggagcc

SEQ ID NO: 874564 - RNA, 20 nt, Human
gagcaccuggaaggagcccc

SEQ ID NO: 874565 - RNA, 22 nt, Human
gagggucacccagcugugacac

SEQ ID NO: 874566 - RNA, 24 nt, Human
gcgaaccccagaggcagcggcaag

SEQ ID NO: 874567 - RNA, 20 nt, Human
gcuccaccuccagaguccac

SEQ ID NO: 874568 - RNA, 25 nt, Human
ggagaacagcaggagcagcagggaa

SEQ ID NO: 874569 - RNA, 21 nt, Human
ggagaacagcaggagcagccg

SEQ ID NO: 874570 - RNA, 18 nt, Human
ggcagcugcuggagcacc

SEQ ID NO: 874571 - RNA, 19 nt, Human
uaaaagaggacacguaaua

SEQ ID NO: 874572 - RNA, 21 nt, Human
uauaccaaguccacagagaag

SEQ ID NO: 874573 - RNA, 22 nt, Human
uccaccuccagaguccaccacc

SEQ ID NO: 874574 - RNA, 18 nt, Human
uccccgggcagcugcugg

SEQ ID NO: 874575 - RNA, 20 nt, Human
uccuccucaacgucucgccg

SEQ ID NO: 874576 - RNA, 20 nt, Human
ugacaaaacaaacgcacaaa

SEQ ID NO: 874577 - RNA, 21 nt, Human
ugacaaaacaaacgcacaagc

SEQ ID NO: 874578 - RNA, 24 nt, Human
ugacaaaacaaacgcacaagccca

SEQ ID NO: 874579 - RNA, 21 nt, Human
ugacaccuaagcacgcugaca

SEQ ID NO: 874580 - RNA, 25 nt, Human
uuaagggugcuucgggccggccuuc

SEQ ID NO: 874581 - RNA, 18 nt, Human
aagcuccagcucuccggc

SEQ ID NO: 874582 - RNA, 25 nt, Human
aaggugcuggagaggaggcugggug

SEQ ID NO: 874583 - RNA, 22 nt, Human
acccuucauauuaccaaggcua

SEQ ID NO: 874584 - RNA, 24 nt, Human
agaugaaccuuauugggggacccg

SEQ ID NO: 874585 - RNA, 18 nt, Human
agggcgcugugggcagga

SEQ ID NO: 874586 - RNA, 20 nt, Human
agguugccgucucccucgug

SEQ ID NO: 874587 - RNA, 18 nt, Human
caagugaaaucaucuucu

SEQ ID NO: 874588 - RNA, 22 nt, Human
cagcacagcaaggugcuggaga

SEQ ID NO: 874589 - RNA, 19 nt, Human
cagcagcagagggcagcac

SEQ ID NO: 874590 - RNA, 21 nt, Human
cagcagcagagggcagcacag

SEQ ID NO: 874591 - RNA, 19 nt, Human
cauucaccuuccggggcca

SEQ ID NO: 874592 - RNA, 20 nt, Human
ccccucuggcuggucuuggg

SEQ ID NO: 874593 - RNA, 19 nt, Human
ccggggccacuggcugggc

SEQ ID NO: 874594 - RNA, 25 nt, Human
ccuuugaccgggguggcuucaaagc

SEQ ID NO: 874595 - RNA, 21 nt, Human
cgcaggugucacccuugaugg

SEQ ID NO: 874596 - RNA, 23 nt, Human
cggaacccagguugccgucuccc

SEQ ID NO: 874597 - RNA, 21 nt, Human
cggggccacuggcugggcuga

SEQ ID NO: 874598 - RNA, 19 nt, Human
cgggguggcuucaaagcuc

SEQ ID NO: 874599 - RNA, 18 nt, Human
cugcucuuaagagguuag

SEQ ID NO: 874600 - RNA, 26 nt, Human
cuucauauuaccaaggcuacuggcug

SEQ ID NO: 874601 - RNA, 23 nt, Human
cuuccggaacccagguugccguc

SEQ ID NO: 874602 - RNA, 21 nt, Human
gcagcacagcaaggugcugga

SEQ ID NO: 874603 - RNA, 22 nt, Human
ggcugggugggcacaccaaggg

SEQ ID NO: 874604 - RNA, 19 nt, Human
gggacccgcagaggcuggc

SEQ ID NO: 874605 - RNA, 19 nt, Human
gggcugggugggagcaggu

SEQ ID NO: 874606 - RNA, 20 nt, Human
ggggccacuggcugggcuga

SEQ ID NO: 874607 - RNA, 20 nt, Human
gucagcuuggggccuaagug

SEQ ID NO: 874608 - RNA, 19 nt, Human
uaccaaggcuacuggcugu

SEQ ID NO: 874609 - RNA, 19 nt, Human
uaccagacaugagggacuu

SEQ ID NO: 874610 - RNA, 21 nt, Human
uaccagacaugagggacuuuu

SEQ ID NO: 874611 - RNA, 20 nt, Human
uagacacaaaggggucaaga

SEQ ID NO: 874612 - RNA, 18 nt, Human
ucagaagagacugcucuu

SEQ ID NO: 874613 - RNA, 19 nt, Human
ucccccuuaauggaguugc

SEQ ID NO: 874614 - RNA, 23 nt, Human
ucuccaacaggccacagcgguua

SEQ ID NO: 874615 - RNA, 24 nt, Human
ugaaguucacaggcugauagggcc

SEQ ID NO: 874616 - RNA, 19 nt, Human
uggcuggucuuggggcugu

SEQ ID NO: 874617 - RNA, 24 nt, Human
ugggcacaccaagggcuggguggg

SEQ ID NO: 874618 - RNA, 22 nt, Human
ugucagcagcagagggcagcac

SEQ ID NO: 874619 - RNA, 22 nt, Human
uuuuuuuuuuuuuuuuaccaga

SEQ ID NO: 874620 - RNA, 22 nt, Human
uuuuuuuuuuuuuuuuuaccag

SEQ ID NO: 874621 - RNA, 18 nt, Human
aaaaaacugacaagaaca

SEQ ID NO: 874622 - RNA, 25 nt, Human
aaaaagaacucuuuaaaauaaugaa

SEQ ID NO: 874623 - RNA, 24 nt, Human
aacaacacagguuugaacugcgca

SEQ ID NO: 874624 - RNA, 28 nt, Human
aacauuuuuuuuuucucuaggggggccc

SEQ ID NO: 874625 - RNA, 18 nt, Human
aagaaauaaaaagaacuc

SEQ ID NO: 874626 - RNA, 24 nt, Human
aagaagccauaguaucucagggua

SEQ ID NO: 874627 - RNA, 19 nt, Human
aagggaagacuagaacaaa

SEQ ID NO: 874628 - RNA, 21 nt, Human
aagugucuguccagaacaccc

SEQ ID NO: 874629 - RNA, 20 nt, Human
acaaaaaacugacaagaaca

SEQ ID NO: 874630 - RNA, 21 nt, Human
acagaaagaccaacuccucuu

SEQ ID NO: 874631 - RNA, 25 nt, Human
acccaauagguagaaaacauggccu

SEQ ID NO: 874632 - RNA, 18 nt, Human
acucggccucaaccuugg

SEQ ID NO: 874633 - RNA, 21 nt, Human
acugacaagaacaaguucuag

SEQ ID NO: 874634 - RNA, 23 nt, Human
agacuacucagcgugaagaugag

SEQ ID NO: 874635 - RNA, 21 nt, Human
agauaagacaaagaaccuguu

SEQ ID NO: 874636 - RNA, 19 nt, Human
agcucucauaaggugaugg

SEQ ID NO: 874637 - RNA, 21 nt, Human
aggaugauucacuucuaccua

SEQ ID NO: 874638 - RNA, 18 nt, Human
agguagaaaacauggccu

SEQ ID NO: 874639 - RNA, 21 nt, Human
agucaucugugaggcuaaaua

SEQ ID NO: 874640 - RNA, 18 nt, Human
agugcuuguggaaaaaga

SEQ ID NO: 874641 - RNA, 21 nt, Human
aucuuuuuuuuuuuuagcuaa

SEQ ID NO: 874642 - RNA, 19 nt, Human
augaaagaaauaaaaagaa

SEQ ID NO: 874643 - RNA, 19 nt, Human
auguucagggacuaaagca

SEQ ID NO: 874644 - RNA, 20 nt, Human
caaagaaaauguucagggac

SEQ ID NO: 874645 - RNA, 23 nt, Human
caauacaguugacccaaacaaca

SEQ ID NO: 874646 - RNA, 22 nt, Human
caauagaacagacugccuuuua

SEQ ID NO: 874647 - RNA, 22 nt, Human
caauagaacagacugccuuuua

SEQ ID NO: 874648 - RNA, 21 nt, Human
cacagguuugaacugcgcagg

SEQ ID NO: 874649 - RNA, 21 nt, Human
cagaaaaagcucagauucaua

SEQ ID NO: 874650 - RNA, 19 nt, Human
cagggaacaacuugucuuu

SEQ ID NO: 874651 - RNA, 22 nt, Human
cagggacuaaagcaguccauca

SEQ ID NO: 874652 - RNA, 21 nt, Human
caguagaucaagccaagacca

SEQ ID NO: 874653 - RNA, 22 nt, Human
cauacacagaaaauuucacgua

SEQ ID NO: 874654 - RNA, 21 nt, Human
cauccccgcuaugaacucuga

SEQ ID NO: 874655 - RNA, 20 nt, Human
ccauggucccuuccaacuua

SEQ ID NO: 874656 - RNA, 23 nt, Human
cccaauagguagaaaacauggcc

SEQ ID NO: 874657 - RNA, 21 nt, Human
ccccagauaagacaaagaacc

SEQ ID NO: 874658 - RNA, 22 nt, Human
ccugcugugugugucacgggga

SEQ ID NO: 874659 - RNA, 19 nt, Human
cucuuagaaaugaacuaug

SEQ ID NO: 874660 - RNA, 19 nt, Human
gguagaaaaacccaauagg

SEQ ID NO: 874661 - RNA, 18 nt, Human
gucuguccauguacaagu

SEQ ID NO: 874662 - RNA, 21 nt, Human
uaaccaaagaaaauguucagg

SEQ ID NO: 874663 - RNA, 21 nt, Human
uacaagauucuaaagucaucu

SEQ ID NO: 874664 - RNA, 22 nt, Human
uacauacaacacaaaaaaugug

SEQ ID NO: 874665 - RNA, 20 nt, Human
uauaugaaugaccauaugua

SEQ ID NO: 874666 - RNA, 21 nt, Human
uauguuuauauauaaugcuua

SEQ ID NO: 874667 - RNA, 20 nt, Human
uccaaacaaauacacuauga

SEQ ID NO: 874668 - RNA, 19 nt, Human
uccacauaaugcugcaaaa

SEQ ID NO: 874669 - RNA, 27 nt, Human
uccauagccagagaaugaccggggucc

SEQ ID NO: 874670 - RNA, 25 nt, Human
uccccagauaagacaaagaaccugu

SEQ ID NO: 874671 - RNA, 26 nt, Human
ucuagcuccaucacggacuuacugaa

SEQ ID NO: 874672 - RNA, 23 nt, Human
ucuagugcuuguggaaaaagaaa

SEQ ID NO: 874673 - RNA, 22 nt, Human
ucucugagggauuuauugguuc

SEQ ID NO: 874674 - RNA, 22 nt, Human
ucucuuagaaaugaacuaugua

SEQ ID NO: 874675 - RNA, 22 nt, Human
ucugccacugggacagaaagac

SEQ ID NO: 874676 - RNA, 24 nt, Human
ugaagaugaggaugaagaccuuua

SEQ ID NO: 874677 - RNA, 19 nt, Human
ugagaaaaacauuaaaaug

SEQ ID NO: 874678 - RNA, 22 nt, Human
ugagcaggcagguuuauucaga

SEQ ID NO: 874679 - RNA, 19 nt, Human
ugaggagucagguuauaug

SEQ ID NO: 874680 - RNA, 28 nt, Human
uuacugaaugacccuaggcaaaucaugu

SEQ ID NO: 874681 - RNA, 21 nt, Human
uuauucuugccuccaugaaag

SEQ ID NO: 874682 - RNA, 20 nt, Human
uuccaaacaaauacacuaug

SEQ ID NO: 874683 - RNA, 21 nt, Human
uucuaaagucaucugugaggc

SEQ ID NO: 874684 - RNA, 25 nt, Human
uucuauauauugcaugaugcccacc

SEQ ID NO: 874685 - RNA, 18 nt, Human
uugacccaaacaacacag

SEQ ID NO: 874686 - RNA, 21 nt, Human
uugaggagucagguuauaugc

SEQ ID NO: 874687 - RNA, 18 nt, Human
aaaagagcaacucaaaaa

SEQ ID NO: 874688 - RNA, 20 nt, Human
aaacaaacacacauuuaccc

SEQ ID NO: 874689 - RNA, 20 nt, Human
aaacaaacacacauuuaccc

SEQ ID NO: 874690 - RNA, 22 nt, Human
aaacacacauuuacccacagaa

SEQ ID NO: 874691 - RNA, 19 nt, Human
aaacacauggccugaacaa

SEQ ID NO: 874692 - RNA, 26 nt, Human
aaagagcaacucaaaaaaauaugcac

SEQ ID NO: 874693 - RNA, 21 nt, Human
aacacacauuuacccacagaa

SEQ ID NO: 874694 - RNA, 21 nt, Human
aaccgcuucucugcccuucca

SEQ ID NO: 874695 - RNA, 22 nt, Human
aaccgcuucucugcccuuccau

SEQ ID NO: 874696 - RNA, 22 nt, Human
aagcaaacacauggccugaaca

SEQ ID NO: 874697 - RNA, 22 nt, Human
acaaaggaagacaauaccaaau

SEQ ID NO: 874698 - RNA, 23 nt, Human
acccauaguaaaagagcaacuca

SEQ ID NO: 874699 - RNA, 26 nt, Human
acuucccaauuuuuuuuuuuuuuuuu

SEQ ID NO: 874700 - RNA, 20 nt, Human
agaagcaaacacauggccug

SEQ ID NO: 874701 - RNA, 24 nt, Human
agaagcaaacacauggccugaaca

SEQ ID NO: 874702 - RNA, 30 nt, Human
agagaaacaaacacacauuuacccacagag

SEQ ID NO: 874703 - RNA, 23 nt, Human
aguaaaagagcaacucaaaaaaa

SEQ ID NO: 874704 - RNA, 24 nt, Human
caaacacacauuuacccacagaau

SEQ ID NO: 874705 - RNA, 22 nt, Human
caacccauaguaaaagagcaac

SEQ ID NO: 874706 - RNA, 23 nt, Human
caacucaaaaaaauaugcacuga

SEQ ID NO: 874707 - RNA, 25 nt, Human
cacagaauugaagcucacuucccaa

SEQ ID NO: 874708 - RNA, 19 nt, Human
cacauggccugaacaaucc

SEQ ID NO: 874709 - RNA, 22 nt, Human
cagcuccagugagaaaugcaac

SEQ ID NO: 874710 - RNA, 19 nt, Human
ccaguggcaagacauucaa

SEQ ID NO: 874711 - RNA, 21 nt, Human
ccauacccagcagcaaccgaa

SEQ ID NO: 874712 - RNA, 24 nt, Human
ccauaguaaaagagcaacucaaaa

SEQ ID NO: 874713 - RNA, 19 nt, Human
cccacagaauugaagcuca

SEQ ID NO: 874714 - RNA, 21 nt, Human
cccacagaauugaagcucacu

SEQ ID NO: 874715 - RNA, 18 nt, Human
cccuuuggcacaacuugc

SEQ ID NO: 874716 - RNA, 24 nt, Human
cgcuccacaucucccaguccuuca

SEQ ID NO: 874717 - RNA, 24 nt, Human
cggaggucgcuccacaucucccag

SEQ ID NO: 874718 - RNA, 23 nt, Human
cuacaaaggaagacaauaccaaa

SEQ ID NO: 874719 - RNA, 19 nt, Human
gcuccacaucucccagucc

SEQ ID NO: 874720 - RNA, 23 nt, Human
uacagaacacuuuuacugcaacc

SEQ ID NO: 874721 - RNA, 22 nt, Human
uacugcaaccaguggcaagaca

SEQ ID NO: 874722 - RNA, 19 nt, Human
ucaaagagaaacaaacaca

SEQ ID NO: 874723 - RNA, 23 nt, Human
uccuggauaccacugugcagccc

SEQ ID NO: 874724 - RNA, 20 nt, Human
ugcuguggagcucugugguc

SEQ ID NO: 874725 - RNA, 21 nt, Human
uggcaagacauucaaagagaa

SEQ ID NO: 874726 - RNA, 22 nt, Human
ugggcuucugugggcuccaggg

SEQ ID NO: 874727 - RNA, 19 nt, Human
uuacugcaaccaguggcaa

SEQ ID NO: 874728 - RNA, 18 nt, Human
uucaaagagaaacaaaca

SEQ ID NO: 874729 - RNA, 24 nt, Human
uuuucguuuuuuuguuuuuuuuuu

SEQ ID NO: 874730 - RNA, 23 nt, Human
uuuuuuuuuuaaauuguucccag

SEQ ID NO: 874731 - RNA, 18 nt, Human
uuuuuuuuuuagcaaccc

SEQ ID NO: 874732 - RNA, 24 nt, Human
uuuuuuuuuuuuuuuuuuuuaaug

SEQ ID NO: 874733 - RNA, 18 nt, Human
aacagucacugaacacac

SEQ ID NO: 874734 - RNA, 21 nt, Human
aaccuccgagcuccacucuuc

SEQ ID NO: 874735 - RNA, 26 nt, Human
aacucaaucacucccgcauucuuaua

SEQ ID NO: 874736 - RNA, 19 nt, Human
aagaaaaccagccuugggg

SEQ ID NO: 874737 - RNA, 26 nt, Human
aagccacagaaagucauucacagaac

SEQ ID NO: 874738 - RNA, 19 nt, Human
aagcugcccacgcccucag

SEQ ID NO: 874739 - RNA, 25 nt, Human
aagcugucgaagguuaauguaaacu

SEQ ID NO: 874740 - RNA, 22 nt, Human
aauuuucucuuccucagaaagc

SEQ ID NO: 874741 - RNA, 25 nt, Human
acacacagccaugguaaccagacgc

SEQ ID NO: 874742 - RNA, 20 nt, Human
acacaucuccuugaacccac

SEQ ID NO: 874743 - RNA, 22 nt, Human
acagaacgcagcagcuccaccg

SEQ ID NO: 874744 - RNA, 20 nt, Human
acccuggggccagggagcac

SEQ ID NO: 874745 - RNA, 28 nt, Human
acgaccuccuacggcaccaucucuccug

SEQ ID NO: 874746 - RNA, 18 nt, Human
acuccacuccgcugguga

SEQ ID NO: 874747 - RNA, 18 nt, Human
acugaacacaccgaagac

SEQ ID NO: 874748 - RNA, 20 nt, Human
agaacgcagcagcuccaccg

SEQ ID NO: 874749 - RNA, 22 nt, Human
agacuugucuguggcucugucc

SEQ ID NO: 874750 - RNA, 21 nt, Human
agcaaacagucacugaacaca

SEQ ID NO: 874751 - RNA, 24 nt, Human
agcaaacagucacugaacacaccg

SEQ ID NO: 874752 - RNA, 22 nt, Human
agcaaagaugcuacaggaggaa

SEQ ID NO: 874753 - RNA, 19 nt, Human
agcccugggcugccagccc

SEQ ID NO: 874754 - RNA, 21 nt, Human
aggaacaggaggagagggccg

SEQ ID NO: 874755 - RNA, 23 nt, Human
aggaagaaaaccagccuuggggg

SEQ ID NO: 874756 - RNA, 21 nt, Human
aggagagggcugggagggguc

SEQ ID NO: 874757 - RNA, 20 nt, Human
aggaugcuguagcgcugaau

SEQ ID NO: 874758 - RNA, 18 nt, Human
agggacggaaguaggcgg

SEQ ID NO: 874759 - RNA, 18 nt, Human
agggggugugggaggcca

SEQ ID NO: 874760 - RNA, 24 nt, Human
agggggugugggaggccaggcagg

SEQ ID NO: 874761 - RNA, 24 nt, Human
agucucaugcucaccauuucuuuc

SEQ ID NO: 874762 - RNA, 24 nt, Human
auccagcaaacagucacugaacac

SEQ ID NO: 874763 - RNA, 26 nt, Human
augcagccccagggagaggggaacgc

SEQ ID NO: 874764 - RNA, 19 nt, Human
auucaggacagcuuccagg

SEQ ID NO: 874765 - RNA, 22 nt, Human
auugguggugagggcaccuggc

SEQ ID NO: 874766 - RNA, 20 nt, Human
caaagaugcuacaggaggaa

SEQ ID NO: 874767 - RNA, 19 nt, Human
caacucgaaguucaaacgg

SEQ ID NO: 874768 - RNA, 21 nt, Human
cacacacagccaugguaacca

SEQ ID NO: 874769 - RNA, 20 nt, Human
cacacagccaugguaaccag

SEQ ID NO: 874770 - RNA, 20 nt, Human
cacaguaaucguuccagucg

SEQ ID NO: 874771 - RNA, 22 nt, Human
caccuggccggugucuauuggc

SEQ ID NO: 874772 - RNA, 19 nt, Human
cacgaugaacagugacucg

SEQ ID NO: 874773 - RNA, 22 nt, Human
cagaacgcagcagcuccaccga

SEQ ID NO: 874774 - RNA, 24 nt, Human
cagaacgcagcagcuccaccgaca

SEQ ID NO: 874775 - RNA, 23 nt, Human
cagacuugucuguggcucugucc

SEQ ID NO: 874776 - RNA, 20 nt, Human
cagcaggaagggugcugccc

SEQ ID NO: 874777 - RNA, 26 nt, Human
cagcccagccucugugcgugccucuu

SEQ ID NO: 874778 - RNA, 20 nt, Human
cagcccugggcugccagccc

SEQ ID NO: 874779 - RNA, 20 nt, Human
caggagcaggugacacugcc

SEQ ID NO: 874780 - RNA, 21 nt, Human
cagggagagacucgaacucca

SEQ ID NO: 874781 - RNA, 25 nt, Human
cagggggugugggaggccaggcagg

SEQ ID NO: 874782 - RNA, 22 nt, Human
cagggugaggccgccagggagg

SEQ ID NO: 874783 - RNA, 18 nt, Human
caggguuccccauccuuc

SEQ ID NO: 874784 - RNA, 20 nt, Human
caggucccccacgugcuucc

SEQ ID NO: 874785 - RNA, 20 nt, Human
cauggacacacacagccaug

SEQ ID NO: 874786 - RNA, 24 nt, Human
ccacgcacugcauggcggccacgc

SEQ ID NO: 874787 - RNA, 18 nt, Human
ccacucggggccgaacga

SEQ ID NO: 874788 - RNA, 22 nt, Human
ccacucuucccaccaguuccac

SEQ ID NO: 874789 - RNA, 21 nt, Human
ccaggcugcaaagggaacugg

SEQ ID NO: 874790 - RNA, 20 nt, Human
ccagggucuucacguggcug

SEQ ID NO: 874791 - RNA, 22 nt, Human
cccaugggggucuccaggaaga

SEQ ID NO: 874792 - RNA, 18 nt, Human
cccucaggcugugcccag

SEQ ID NO: 874793 - RNA, 22 nt, Human
ccgaaaaggacuggacagggga

SEQ ID NO: 874794 - RNA, 25 nt, Human
ccggcagguuauccagcaaacaguc

SEQ ID NO: 874795 - RNA, 20 nt, Human
ccucaggcugugcccagucu

SEQ ID NO: 874796 - RNA, 20 nt, Human
ccucugcuucagccugugua

SEQ ID NO: 874797 - RNA, 19 nt, Human
ccugccaaguugcccaugg

SEQ ID NO: 874798 - RNA, 20 nt, Human
ccugcuuuguugcucucggg

SEQ ID NO: 874799 - RNA, 18 nt, Human
ccuguguaugguccaggg

SEQ ID NO: 874800 - RNA, 20 nt, Human
cgacuucuacaugcagcccc

SEQ ID NO: 874801 - RNA, 18 nt, Human
cgagggaggucccucugc

SEQ ID NO: 874802 - RNA, 22 nt, Human
cgcuuccaacucaaucacuccc

SEQ ID NO: 874803 - RNA, 18 nt, Human
cggaagagaaagcgccgc

SEQ ID NO: 874804 - RNA, 20 nt, Human
cgggacacagagaaggggga

SEQ ID NO: 874805 - RNA, 19 nt, Human
cgggcagcguuuccaggag

SEQ ID NO: 874806 - RNA, 21 nt, Human
cggggccgaacgaccugccga

SEQ ID NO: 874807 - RNA, 19 nt, Human
cucugugcgugccucugcu

SEQ ID NO: 874808 - RNA, 23 nt, Human
cugaaaucuuugggauccagcga

SEQ ID NO: 874809 - RNA, 18 nt, Human
cugcagaaagagggacgg

SEQ ID NO: 874810 - RNA, 22 nt, Human
cugcuccuggugcugacgguca

SEQ ID NO: 874811 - RNA, 22 nt, Human
cuugggggauuccaaggcccag

SEQ ID NO: 874812 - RNA, 21 nt, Human
gaccuccuacggcaccaucuc

SEQ ID NO: 874813 - RNA, 19 nt, Human
gacuucuacaugcagcccc

SEQ ID NO: 874814 - RNA, 20 nt, Human
gagcagcacagcacggcugg

SEQ ID NO: 874815 - RNA, 20 nt, Human
gaggagagggcugggagggg

SEQ ID NO: 874816 - RNA, 23 nt, Human
gagggcugggaggggucuggggg

SEQ ID NO: 874817 - RNA, 20 nt, Human
gauuccaaggcccagggagg

SEQ ID NO: 874818 - RNA, 20 nt, Human
gcaccaucucuccugccaag

SEQ ID NO: 874819 - RNA, 19 nt, Human
gcacugcauggcggccacg

SEQ ID NO: 874820 - RNA, 23 nt, Human
gccacucacacugauuccaucau

SEQ ID NO: 874821 - RNA, 22 nt, Human
gcccucaggcugugcccagucu

SEQ ID NO: 874822 - RNA, 22 nt, Human
gcccuccacccaggcuccgcga

SEQ ID NO: 874823 - RNA, 20 nt, Human
gcccuggaaccuccgagcuc

SEQ ID NO: 874824 - RNA, 20 nt, Human
gccuccagaguauuugaaau

SEQ ID NO: 874825 - RNA, 21 nt, Human
gccugcaggcacagguccccc

SEQ ID NO: 874826 - RNA, 21 nt, Human
gccugcuuuguugcucucggg

SEQ ID NO: 874827 - RNA, 21 nt, Human
gcucauugcaggggguguggg

SEQ ID NO: 874828 - RNA, 20 nt, Human
gcugggaggggucuggggga

SEQ ID NO: 874829 - RNA, 19 nt, Human
gcuuggugaagggcaccgg

SEQ ID NO: 874830 - RNA, 26 nt, Human
ggaacaggaggagagggcugggaggg

SEQ ID NO: 874831 - RNA, 19 nt, Human
ggaaccuccgagcuccacu

SEQ ID NO: 874832 - RNA, 22 nt, Human
ggaaggacaggugucugacaga

SEQ ID NO: 874833 - RNA, 23 nt, Human
ggacguauaguucucuaggcuuu

SEQ ID NO: 874834 - RNA, 23 nt, Human
ggagagggcugggaggggucugg

SEQ ID NO: 874835 - RNA, 25 nt, Human
ggagcacccagaaacaggcgaaguc

SEQ ID NO: 874836 - RNA, 19 nt, Human
ggaggagagggcugggagg

SEQ ID NO: 874837 - RNA, 21 nt, Human
ggaggagauggggcugcagug

SEQ ID NO: 874838 - RNA, 23 nt, Human
ggaguccugcagcaucccugccu

SEQ ID NO: 874839 - RNA, 20 nt, Human
ggcaucaaccauccacgacc

SEQ ID NO: 874840 - RNA, 25 nt, Human
ggcuggaugggcacccgcuuuggga

SEQ ID NO: 874841 - RNA, 26 nt, Human
gggaacaguguaggaaggggcguggc

SEQ ID NO: 874842 - RNA, 21 nt, Human
gggaggaggaggagauggggc

SEQ ID NO: 874843 - RNA, 21 nt, Human
gggccccaggucacagaaaug

SEQ ID NO: 874844 - RNA, 22 nt, Human
ggggaggaggaggagauggggc

SEQ ID NO: 874845 - RNA, 24 nt, Human
ggggcguggcaugggguggggcug

SEQ ID NO: 874846 - RNA, 21 nt, Human
gggggaggaggaggagaugga

SEQ ID NO: 874847 - RNA, 21 nt, Human
gggggaggaggaggagauggg

SEQ ID NO: 874848 - RNA, 26 nt, Human
gggggaggcaggccauuuauugaaga

SEQ ID NO: 874849 - RNA, 21 nt, Human
ggggugugggaggccaggcag

SEQ ID NO: 874850 - RNA, 23 nt, Human
ggggugugggaggccaggcaggg

SEQ ID NO: 874851 - RNA, 18 nt, Human
ggguggguucacagguuu

SEQ ID NO: 874852 - RNA, 18 nt, Human
ggugcugacucgggugaa

SEQ ID NO: 874853 - RNA, 19 nt, Human
gugcugaucugcagucuug

SEQ ID NO: 874854 - RNA, 22 nt, Human
uacggcaccaucucuccugcca

SEQ ID NO: 874855 - RNA, 21 nt, Human
uagaaggaaggacaggugucu

SEQ ID NO: 874856 - RNA, 21 nt, Human
uagcaggcccuccacccaggc

SEQ ID NO: 874857 - RNA, 19 nt, Human
uauauaccaucagcugaac

SEQ ID NO: 874858 - RNA, 21 nt, Human
ucaggcugugcccagucucau

SEQ ID NO: 874859 - RNA, 21 nt, Human
ucaguguggcccgggccucca

SEQ ID NO: 874860 - RNA, 19 nt, Human
uccaagccacagaaaguca

SEQ ID NO: 874861 - RNA, 21 nt, Human
uccaagccacagaaagucauu

SEQ ID NO: 874862 - RNA, 28 nt, Human
uccaaggcccagggagggugggaaggaa

SEQ ID NO: 874863 - RNA, 27 nt, Human
uccaaugguuccauuccaauauuuucc

SEQ ID NO: 874864 - RNA, 24 nt, Human
uccacuccgcuggugagcagcccc

SEQ ID NO: 874865 - RNA, 24 nt, Human
uccccagacuugucuguggcucug

SEQ ID NO: 874866 - RNA, 19 nt, Human
uccuuccagggcagcucca

SEQ ID NO: 874867 - RNA, 20 nt, Human
ucgccugcuuuguugcucuc

SEQ ID NO: 874868 - RNA, 23 nt, Human
ucgguggaguugaagacauccag

SEQ ID NO: 874869 - RNA, 22 nt, Human
ucuagcuuccagcucaagaagu

SEQ ID NO: 874870 - RNA, 23 nt, Human
ucuccaggaagaaaaccagccuu

SEQ ID NO: 874871 - RNA, 26 nt, Human
ucuccugccaaguugcccaugggggu

SEQ ID NO: 874872 - RNA, 23 nt, Human
ucugcugaaaucuuugggaucca

SEQ ID NO: 874873 - RNA, 20 nt, Human
ucuggaccgcagcccagccu

SEQ ID NO: 874874 - RNA, 21 nt, Human
ugaaggccuugcucauugcag

SEQ ID NO: 874875 - RNA, 18 nt, Human
ugaaugugcagaucuggg

SEQ ID NO: 874876 - RNA, 20 nt, Human
ugacacguucugacccagca

SEQ ID NO: 874877 - RNA, 21 nt, Human
ugacccagcaagcuuuucauu

SEQ ID NO: 874878 - RNA, 18 nt, Human
ugacgaugggaagcuugg

SEQ ID NO: 874879 - RNA, 27 nt, Human
ugacuuccacuguggagccacugguuu

SEQ ID NO: 874880 - RNA, 23 nt, Human
ugagauccugcaggagauucucc

SEQ ID NO: 874881 - RNA, 19 nt, Human
ugaugccauugguggugag

SEQ ID NO: 874882 - RNA, 20 nt, Human
ugauugugaacguggccacc

SEQ ID NO: 874883 - RNA, 21 nt, Human
ugauugugaacguggccaccu

SEQ ID NO: 874884 - RNA, 22 nt, Human
ugauugugaacguggccaccuu

SEQ ID NO: 874885 - RNA, 22 nt, Human
ugcagaucugggcagagaggug

SEQ ID NO: 874886 - RNA, 25 nt, Human
ugcccagucucaugcucaccauuuc

SEQ ID NO: 874887 - RNA, 24 nt, Human
ugcccuggaaccuccgagcuccac

SEQ ID NO: 874888 - RNA, 26 nt, Human
ugccggguacugguugcugggagggu

SEQ ID NO: 874889 - RNA, 20 nt, Human
ugcuacaggaggaacaggag

SEQ ID NO: 874890 - RNA, 23 nt, Human
ugcugggagggugcugacucggg

SEQ ID NO: 874891 - RNA, 22 nt, Human
ugcuucagccuguguauggucc

SEQ ID NO: 874892 - RNA, 19 nt, Human
uggaaccuccgagcuccac

SEQ ID NO: 874893 - RNA, 19 nt, Human
uggacacacacagccaugg

SEQ ID NO: 874894 - RNA, 23 nt, Human
uggcaucaaccauccacgaccuc

SEQ ID NO: 874895 - RNA, 18 nt, Human
uggccggaggcuagcagg

SEQ ID NO: 874896 - RNA, 21 nt, Human
uggccggaggcuagcaggaag

SEQ ID NO: 874897 - RNA, 24 nt, Human
uggcucuguccagacgcuuggacu

SEQ ID NO: 874898 - RNA, 18 nt, Human
ugggaagcugcccacgcc

SEQ ID NO: 874899 - RNA, 19 nt, Human
ugggaggccaggcaggguc

SEQ ID NO: 874900 - RNA, 21 nt, Human
ugggaggccaggcagggucac

SEQ ID NO: 874901 - RNA, 22 nt, Human
ugggagggugcugacucgggug

SEQ ID NO: 874902 - RNA, 24 nt, Human
ugggcagagaggugcugaucugcc

SEQ ID NO: 874903 - RNA, 22 nt, Human
ugggcuggaugggcacccgcuu

SEQ ID NO: 874904 - RNA, 20 nt, Human
ugggggaggaggaggagaug

SEQ ID NO: 874905 - RNA, 18 nt, Human
ugggguggggcugccaug

SEQ ID NO: 874906 - RNA, 21 nt, Human
uggugcugacggucagcucau

SEQ ID NO: 874907 - RNA, 22 nt, Human
ugguugacacguucugacccag

SEQ ID NO: 874908 - RNA, 19 nt, Human
ugguugcugggagggugcu

SEQ ID NO: 874909 - RNA, 23 nt, Human
uguugauugugaacguggccacc

SEQ ID NO: 874910 - RNA, 23 nt, Human
uucacagaacgcagcagcuccac

SEQ ID NO: 874911 - RNA, 22 nt, Human
uuccgcaugcggccuuggcacc

SEQ ID NO: 874912 - RNA, 20 nt, Human
uucuauggccaaagggaagu

SEQ ID NO: 874913 - RNA, 24 nt, Human
uucuauggccaaagggaagucgcu

SEQ ID NO: 874914 - RNA, 21 nt, Human
uugaagaacgcagacuugcga

SEQ ID NO: 874915 - RNA, 19 nt, Human
uugaugcacgcuuccaacu

SEQ ID NO: 874916 - RNA, 21 nt, Human
uugauguugauugugaacgug

SEQ ID NO: 874917 - RNA, 19 nt, Human
uugcccuccacucggggcc

SEQ ID NO: 874918 - RNA, 19 nt, Human
uugggccacaucuuucuuu

SEQ ID NO: 874919 - RNA, 21 nt, Human
uugguggugagggcaccuggc

SEQ ID NO: 874920 - RNA, 21 nt, Human
uuugcccuccacucggggccg

SEQ ID NO: 874921 - RNA, 19 nt, Human
uuugggauuuccucugcuu

SEQ ID NO: 874922 - RNA, 18 nt, Human
uuuugggggaggcaggcc

SEQ ID NO: 874923 - RNA, 18 nt, Human
uuuuuugggggaggcagg

SEQ ID NO: 874924 - RNA, 23 nt, Human
uuuuuuuuuuuuugggggaggca

SEQ ID NO: 874925 - RNA, 20 nt, Human
uuuuuuuuuuuuuuggggga

SEQ ID NO: 874926 - RNA, 20 nt, Human
uuuuuuuuuuuuuuuggggg

SEQ ID NO: 874927 - RNA, 22 nt, Human
uuuuuuuuuuuuuuuuuggggg

SEQ ID NO: 874928 - RNA, 25 nt, Human
uuuuuuuuuuuuuuuuuuuuugggg

SEQ ID NO: 874929 - RNA, 19 nt, Human
aaauucccaucuacuccuc

SEQ ID NO: 874930 - RNA, 20 nt, Human
aacacggugaaaccccgucu

SEQ ID NO: 874931 - RNA, 21 nt, Human
aacacggugaaaccccgucuc

SEQ ID NO: 874932 - RNA, 20 nt, Human
aagcaggugcaacccguuac

SEQ ID NO: 874933 - RNA, 20 nt, Human
aaggcaggcggaucacgagg

SEQ ID NO: 874934 - RNA, 20 nt, Human
accccgucucuacuggccca

SEQ ID NO: 874935 - RNA, 22 nt, Human
agaaauguuuauuaguaacgcc

SEQ ID NO: 874936 - RNA, 21 nt, Human
agcgucuauccauucgcgcgc

SEQ ID NO: 874937 - RNA, 18 nt, Human
aggcaggcggaucacgag

SEQ ID NO: 874938 - RNA, 24 nt, Human
aggcaggcggaucacgaggucagg

SEQ ID NO: 874939 - RNA, 25 nt, Human
aggcaggcggaucacgaggucagga

SEQ ID NO: 874940 - RNA, 23 nt, Human
aggccaaggcaggcggaucacga

SEQ ID NO: 874941 - RNA, 24 nt, Human
aggcggaucacgaggucaggagau

SEQ ID NO: 874942 - RNA, 20 nt, Human
aucacgaggucaggagaucc

SEQ ID NO: 874943 - RNA, 22 nt, Human
caaggcaggcggaucacgaggu

SEQ ID NO: 874944 - RNA, 24 nt, Human
caaggcaggcggaucacgagguca

SEQ ID NO: 874945 - RNA, 24 nt, Human
cagcacuuugggaggccaaggcag

SEQ ID NO: 874946 - RNA, 25 nt, Human
cagcacuuugggaggccaaggcagg

SEQ ID NO: 874947 - RNA, 20 nt, Human
caggcggaucacgaggucau

SEQ ID NO: 874948 - RNA, 20 nt, Human
ccaagcaggugcaacccguu

SEQ ID NO: 874949 - RNA, 27 nt, Human
ccagucaaaaaagauguccucagaccc

SEQ ID NO: 874950 - RNA, 24 nt, Human
ccauuugucacacauaguucaucc

SEQ ID NO: 874951 - RNA, 23 nt, Human
cccccucuccugucucuucaccg

SEQ ID NO: 874952 - RNA, 21 nt, Human
ccccgucucuacuggcccaaa

SEQ ID NO: 874953 - RNA, 22 nt, Human
ccccgucucuacuggcccaaaa

SEQ ID NO: 874954 - RNA, 22 nt, Human
cccgucucuacuggcccaaagu

SEQ ID NO: 874955 - RNA, 21 nt, Human
cccuguaaucccagcacuuug

SEQ ID NO: 874956 - RNA, 23 nt, Human
cccuguaaucccagcacuuuggg

SEQ ID NO: 874957 - RNA, 24 nt, Human
ccgccaagccugucccuuggcugu

SEQ ID NO: 874958 - RNA, 23 nt, Human
ccuggcuaacacggugaaacccc

SEQ ID NO: 874959 - RNA, 24 nt, Human
ccuggcuaacacggugaaaccccg

SEQ ID NO: 874960 - RNA, 20 nt, Human
ccuguaaucccagcacuuug

SEQ ID NO: 874961 - RNA, 24 nt, Human
cgagaccauccuggcuaacacggu

SEQ ID NO: 874962 - RNA, 18 nt, Human
cgcccaccgaucccccuc

SEQ ID NO: 874963 - RNA, 22 nt, Human
cgcgcgcgucacuaauuacaug

SEQ ID NO: 874964 - RNA, 22 nt, Human
cuacuggcccaaaguucucuuc

SEQ ID NO: 874965 - RNA, 21 nt, Human
cuccucagcuuguugaaccuc

SEQ ID NO: 874966 - RNA, 19 nt, Human
cugaagauggaggcgggac

SEQ ID NO: 874967 - RNA, 22 nt, Human
cugaugggauggaugguucuuu

SEQ ID NO: 874968 - RNA, 18 nt, Human
cuggcuaacacggugaaa

SEQ ID NO: 874969 - RNA, 20 nt, Human
gcccuguaaucccagcacuu

SEQ ID NO: 874970 - RNA, 24 nt, Human
gcuaacacggugaaaccccgucuc

SEQ ID NO: 874971 - RNA, 18 nt, Human
ggcuguggugucgcugga

SEQ ID NO: 874972 - RNA, 22 nt, Human
uaacacggugaaaccccgucuc

SEQ ID NO: 874973 - RNA, 24 nt, Human
uaacacggugaaaccccgucucua

SEQ ID NO: 874974 - RNA, 20 nt, Human
uacauggggcauuggcucuu

SEQ ID NO: 874975 - RNA, 25 nt, Human
ucaaaaaagauguccucagacccag

SEQ ID NO: 874976 - RNA, 18 nt, Human
ucacgaggucaggagauc

SEQ ID NO: 874977 - RNA, 24 nt, Human
ucacgaggucaggagaucgagacc

SEQ ID NO: 874978 - RNA, 19 nt, Human
uccgccaagccugucccuu

SEQ ID NO: 874979 - RNA, 20 nt, Human
ucuccugucucuucaccgcc

SEQ ID NO: 874980 - RNA, 21 nt, Human
ucuccugucucuucaccgccu

SEQ ID NO: 874981 - RNA, 22 nt, Human
ucuccugucucuucaccgccuu

SEQ ID NO: 874982 - RNA, 23 nt, Human
ucuccugucucuucaccgccuuu

SEQ ID NO: 874983 - RNA, 22 nt, Human
ugaaaccccgucucuacuggcc

SEQ ID NO: 874984 - RNA, 25 nt, Human
ugaaccucaacaguaagaaggcucc

SEQ ID NO: 874985 - RNA, 24 nt, Human
ugggaggccaaggcaggcggauca

SEQ ID NO: 874986 - RNA, 18 nt, Human
uucacuuugacauucagu

SEQ ID NO: 874987 - RNA, 22 nt, Human
uuuuuuuuuuuuuuuuucacag

SEQ ID NO: 874988 - RNA, 19 nt, Human
aaaaagugacaagaauuug

SEQ ID NO: 874989 - RNA, 21 nt, Human
aagaggagaugcucugcugcu

SEQ ID NO: 874990 - RNA, 26 nt, Human
aagcagcuccaaagaaaggggaacgc

SEQ ID NO: 874991 - RNA, 22 nt, Human
aaggcagcaccagcagagaagc

SEQ ID NO: 874992 - RNA, 21 nt, Human
agaccaaaugccucugggaga

SEQ ID NO: 874993 - RNA, 23 nt, Human
agcacagcucccgggggccgccu

SEQ ID NO: 874994 - RNA, 19 nt, Human
aggagaugcucugcugcug

SEQ ID NO: 874995 - RNA, 26 nt, Human
caaaugaucuaucaucccuacagagu

SEQ ID NO: 874996 - RNA, 20 nt, Human
cacacaauucucaugaucau

SEQ ID NO: 874997 - RNA, 21 nt, Human
cacccacggccgcaauagcuc

SEQ ID NO: 874998 - RNA, 24 nt, Human
cagcaccagcagagaagcuauaaa

SEQ ID NO: 874999 - RNA, 20 nt, Human
cagcucccgggggccgccuc

SEQ ID NO: 875000 - RNA, 23 nt, Human
cauuugccagauuauccuucagu

SEQ ID NO: 875001 - RNA, 18 nt, Human
ccacacacccuacagcca

SEQ ID NO: 875002 - RNA, 20 nt, Human
cccgcgaccacccacggccg

SEQ ID NO: 875003 - RNA, 22 nt, Human
cccgcgaccacccacggccgca

SEQ ID NO: 875004 - RNA, 21 nt, Human
ccuuaaccacacacccuacag

SEQ ID NO: 875005 - RNA, 21 nt, Human
gaucauuaauacucugacuug

SEQ ID NO: 875006 - RNA, 23 nt, Human
uagaaggcagcaccagcagagaa

SEQ ID NO: 875007 - RNA, 22 nt, Human
uagagcacagcucccgggggcc

SEQ ID NO: 875008 - RNA, 19 nt, Human
ucaaaacugagcuuuaggg

SEQ ID NO: 875009 - RNA, 21 nt, Human
ucccgggggccgccucgugcc

SEQ ID NO: 875010 - RNA, 22 nt, Human
ucguuuacugguucagcacaca

SEQ ID NO: 875011 - RNA, 21 nt, Human
ugacugguucaugcuccauga

SEQ ID NO: 875012 - RNA, 21 nt, Human
ugagcaaagauacagaccaaa

SEQ ID NO: 875013 - RNA, 18 nt, Human
ugccagauuauccuucag

SEQ ID NO: 875014 - RNA, 26 nt, Human
ugucucauuugccagauuauccuuca

SEQ ID NO: 875015 - RNA, 22 nt, Human
uuguaccuuaaccacacacccu

SEQ ID NO: 875016 - RNA, 18 nt, Human
aaagugcuggaauuacaa

SEQ ID NO: 875017 - RNA, 24 nt, Human
aaagugcuggaauuacaagcguga

SEQ ID NO: 875018 - RNA, 23 nt, Human
aaggcgcucugucccccuguuua

SEQ ID NO: 875019 - RNA, 26 nt, Human
aagugcuggaauuacaagcgugagcc

SEQ ID NO: 875020 - RNA, 18 nt, Human
aauuacaagcgugagcca

SEQ ID NO: 875021 - RNA, 21 nt, Human
acaacagccugaauccagaac

SEQ ID NO: 875022 - RNA, 23 nt, Human
acacaguccacugcccgaaggcc

SEQ ID NO: 875023 - RNA, 20 nt, Human
acagcgggcgucccuucgcc

SEQ ID NO: 875024 - RNA, 23 nt, Human
accucagccucccaaagugcugg

SEQ ID NO: 875025 - RNA, 24 nt, Human
acuauguuggucaggcuggucucg

SEQ ID NO: 875026 - RNA, 26 nt, Human
acuccugaccucgugauccacucacc

SEQ ID NO: 875027 - RNA, 27 nt, Human
acucuguugcccaggcuggagugcaau

SEQ ID NO: 875028 - RNA, 21 nt, Human
aggccaccauccagacgacgg

SEQ ID NO: 875029 - RNA, 20 nt, Human
aguagagacggggguuucac

SEQ ID NO: 875030 - RNA, 18 nt, Human
aguagcugggauuacagg

SEQ ID NO: 875031 - RNA, 21 nt, Human
agugcaauggcgugaucucag

SEQ ID NO: 875032 - RNA, 24 nt, Human
agugcaauggcgugaucucagcuc

SEQ ID NO: 875033 - RNA, 24 nt, Human
auuuuuguauuuuuaguagagacg

SEQ ID NO: 875034 - RNA, 24 nt, Human
caaagugcuggaauuacaagcgug

SEQ ID NO: 875035 - RNA, 22 nt, Human
caagcgauucuccugucucagc

SEQ ID NO: 875036 - RNA, 19 nt, Human
caaggagcccuuccucugu

SEQ ID NO: 875037 - RNA, 21 nt, Human
cacagcgggcgucccuucgcc

SEQ ID NO: 875038 - RNA, 24 nt, Human
caccaggcccggcuaauuuuugua

SEQ ID NO: 875039 - RNA, 22 nt, Human
cacccaccucagccucccaaag

SEQ ID NO: 875040 - RNA, 23 nt, Human
cacccaccucagccucccaaagu

SEQ ID NO: 875041 - RNA, 19 nt, Human
cacccagacgagggggaag

SEQ ID NO: 875042 - RNA, 21 nt, Human
caccuccagccacuggggcgc

SEQ ID NO: 875043 - RNA, 22 nt, Human
caccucggcauccacccaccuc

SEQ ID NO: 875044 - RNA, 21 nt, Human
cacuauguuggucaggcuggu

SEQ ID NO: 875045 - RNA, 24 nt, Human
cacuauguuggucaggcuggucuc

SEQ ID NO: 875046 - RNA, 22 nt, Human
cacucuguugcccaggcuggag

SEQ ID NO: 875047 - RNA, 23 nt, Human
cacugcccgaaggccaccaccca

SEQ ID NO: 875048 - RNA, 23 nt, Human
cacugcccgaaggccaccaucca

SEQ ID NO: 875049 - RNA, 19 nt, Human
cagcgggcgucccuucgcc

SEQ ID NO: 875050 - RNA, 24 nt, Human
cagcuccugcaaccucugccuccc

SEQ ID NO: 875051 - RNA, 24 nt, Human
cagguggaaggcgcucuguccccc

SEQ ID NO: 875052 - RNA, 24 nt, Human
ccaaagugcuggaauuacaagcgu

SEQ ID NO: 875053 - RNA, 26 nt, Human
ccacccaccucagccucccaaagugc

SEQ ID NO: 875054 - RNA, 22 nt, Human
ccaccgcgcccggccaggcaaa

SEQ ID NO: 875055 - RNA, 22 nt, Human
ccacucaccucggcauccaccc

SEQ ID NO: 875056 - RNA, 24 nt, Human
ccacugcccgaaggccaccaccca

SEQ ID NO: 875057 - RNA, 24 nt, Human
ccacugcccgaaggccaccaucca

SEQ ID NO: 875058 - RNA, 25 nt, Human
ccagcaucugccccacguuucuuca

SEQ ID NO: 875059 - RNA, 21 nt, Human
ccauuaccuaaugaaacugag

SEQ ID NO: 875060 - RNA, 22 nt, Human
cccacaacagccugaauccaga

SEQ ID NO: 875061 - RNA, 19 nt, Human
ccccgagcgcaagcucugc

SEQ ID NO: 875062 - RNA, 23 nt, Human
cccgaguagcugggauuacaggc

SEQ ID NO: 875063 - RNA, 24 nt, Human
cccgaguagcugggauuacaggcg

SEQ ID NO: 875064 - RNA, 25 nt, Human
cccgcccugcccagcaucugcccca

SEQ ID NO: 875065 - RNA, 23 nt, Human
cccggauucaagcgauucuccug

SEQ ID NO: 875066 - RNA, 22 nt, Human
ccgaguagcugggauuacaggc

SEQ ID NO: 875067 - RNA, 22 nt, Human
ccgcgcccggccaggcaaagca

SEQ ID NO: 875068 - RNA, 23 nt, Human
ccggaaaggccaacaguccagcg

SEQ ID NO: 875069 - RNA, 24 nt, Human
ccucccggauucaagcgauucucc

SEQ ID NO: 875070 - RNA, 22 nt, Human
ccugaccucgugauccacucac

SEQ ID NO: 875071 - RNA, 22 nt, Human
ccugcaaccucugccucccgga

SEQ ID NO: 875072 - RNA, 24 nt, Human
ccugucucagccucccgaguagcu

SEQ ID NO: 875073 - RNA, 20 nt, Human
cgcuccggaaaggccaacag

SEQ ID NO: 875074 - RNA, 25 nt, Human
cgggaucccgggcuucuuccccgag

SEQ ID NO: 875075 - RNA, 24 nt, Human
cggggguuucacuauguuggucag

SEQ ID NO: 875076 - RNA, 18 nt, Human
cguccaguggagaaugcc

SEQ ID NO: 875077 - RNA, 31 nt, Human
cgugagccaccgcgcccggccaggcaaagcu

SEQ ID NO: 875078 - RNA, 21 nt, Human
cucaccucggcauccacccac

SEQ ID NO: 875079 - RNA, 24 nt, Human
cucacucuguugcccaggcuggag

SEQ ID NO: 875080 - RNA, 24 nt, Human
cucagccucccgaguagcugggau

SEQ ID NO: 875081 - RNA, 18 nt, Human
cuccugaccucgugaucc

SEQ ID NO: 875082 - RNA, 23 nt, Human
cuccugcaaccucugccucccgg

SEQ ID NO: 875083 - RNA, 19 nt, Human
cugcaaccucugccucccg

SEQ ID NO: 875084 - RNA, 20 nt, Human
cugcaaccucugccucccgg

SEQ ID NO: 875085 - RNA, 23 nt, Human
cugcaaccucugccucccggauu

SEQ ID NO: 875086 - RNA, 24 nt, Human
cugcaaccucugccucccggauuc

SEQ ID NO: 875087 - RNA, 24 nt, Human
cuggagugcaauggcgugaucuca

SEQ ID NO: 875088 - RNA, 18 nt, Human
gaaaaaacaauccucucg

SEQ ID NO: 875089 - RNA, 19 nt, Human
gaaaaaacaauccucucga

SEQ ID NO: 875090 - RNA, 20 nt, Human
gacacaaaggagggggucac

SEQ ID NO: 875091 - RNA, 22 nt, Human
gaccucgugauccacucaccuc

SEQ ID NO: 875092 - RNA, 22 nt, Human
gaccucgugauccacucaccuc

SEQ ID NO: 875093 - RNA, 24 nt, Human
gaccucgugauccacucaccucgg

SEQ ID NO: 875094 - RNA, 24 nt, Human
gaccucgugauccacucaccucgg

SEQ ID NO: 875095 - RNA, 19 nt, Human
gacgacggggaagccuuga

SEQ ID NO: 875096 - RNA, 21 nt, Human
gagaaugccaccuccagccac

SEQ ID NO: 875097 - RNA, 26 nt, Human
gaguagcugggauuacaggcgcacgc

SEQ ID NO: 875098 - RNA, 18 nt, Human
gauuacaggcgcacgcca

SEQ ID NO: 875099 - RNA, 21 nt, Human
gauucuccugucucagccucc

SEQ ID NO: 875100 - RNA, 19 nt, Human
gcaucguccgcccucgugc

SEQ ID NO: 875101 - RNA, 21 nt, Human
gccaccacccagacgaggggg

SEQ ID NO: 875102 - RNA, 24 nt, Human
gcccaggcuggagugcaauggcgu

SEQ ID NO: 875103 - RNA, 22 nt, Human
gcccggcuaauuuuuguauuuu

SEQ ID NO: 875104 - RNA, 24 nt, Human
gcgauucuccugucucagccuccc

SEQ ID NO: 875105 - RNA, 22 nt, Human
gcggcggugaagacagacuggc

SEQ ID NO: 875106 - RNA, 19 nt, Human
gcucucauugcaucugggu

SEQ ID NO: 875107 - RNA, 19 nt, Human
gcuggagugcaauggcgug

SEQ ID NO: 875108 - RNA, 23 nt, Human
gcuggucucgaacuccugaccuc

SEQ ID NO: 875109 - RNA, 25 nt, Human
ggacacaguccacugcccgaaggcc

SEQ ID NO: 875110 - RNA, 24 nt, Human
ggagggagggaacccgacaaagag

SEQ ID NO: 875111 - RNA, 23 nt, Human
ggagucucacucuguugcccagg

SEQ ID NO: 875112 - RNA, 24 nt, Human
ggccaccauccagacgacggggaa

SEQ ID NO: 875113 - RNA, 22 nt, Human
ggcuggagugcaauggcgugau

SEQ ID NO: 875114 - RNA, 24 nt, Human
ggcuggucucgaacuccugaccuc

SEQ ID NO: 875115 - RNA, 24 nt, Human
ggggcgccugggggcagggcggag

SEQ ID NO: 875116 - RNA, 20 nt, Human
ggggguuucacuauguuggu

SEQ ID NO: 875117 - RNA, 24 nt, Human
ggggguuucacuauguuggucagg

SEQ ID NO: 875118 - RNA, 18 nt, Human
gggguuucacuauguugg

SEQ ID NO: 875119 - RNA, 19 nt, Human
ggucucgaacuccugaccu

SEQ ID NO: 875120 - RNA, 23 nt, Human
ggucugcgcggcggugaagacag

SEQ ID NO: 875121 - RNA, 18 nt, Human
guagcugggauuacaggc

SEQ ID NO: 875122 - RNA, 21 nt, Human
gugaagggcggccccaggucu

SEQ ID NO: 875123 - RNA, 24 nt, Human
gugaagggcggccccaggucugcg

SEQ ID NO: 875124 - RNA, 22 nt, Human
gugacacaaaggagggggucac

SEQ ID NO: 875125 - RNA, 30 nt, Human
gugagccaccgcgcccggccaggcaaagcu

SEQ ID NO: 875126 - RNA, 23 nt, Human
gugauccacucaccucggcaucc

SEQ ID NO: 875127 - RNA, 18 nt, Human
guggaaggcgcucugucc

SEQ ID NO: 875128 - RNA, 19 nt, Human
guggaaggcgcucuguccc

SEQ ID NO: 875129 - RNA, 24 nt, Human
uaauuuuuguauuuuuaguagaga

SEQ ID NO: 875130 - RNA, 23 nt, Human
uacaagcgugagccaccgcgccc

SEQ ID NO: 875131 - RNA, 25 nt, Human
uaguagagacggggguuucacuaug

SEQ ID NO: 875132 - RNA, 24 nt, Human
uauguuggucaggcuggucucgaa

SEQ ID NO: 875133 - RNA, 22 nt, Human
ucacuauguuggucaggcuggu

SEQ ID NO: 875134 - RNA, 24 nt, Human
ucacucuguugcccaggcuggagu

SEQ ID NO: 875135 - RNA, 18 nt, Human
ucagccucccaaagugcu

SEQ ID NO: 875136 - RNA, 20 nt, Human
ucagccucccgaguagcugg

SEQ ID NO: 875137 - RNA, 18 nt, Human
ucagcuccugcaaccucu

SEQ ID NO: 875138 - RNA, 21 nt, Human
ucaucaguuccuucugggugu

SEQ ID NO: 875139 - RNA, 21 nt, Human
uccacccaccucagccuccca

SEQ ID NO: 875140 - RNA, 19 nt, Human
uccacugcccgaaggccac

SEQ ID NO: 875141 - RNA, 18 nt, Human
ucccaaagugcuggaauu

SEQ ID NO: 875142 - RNA, 24 nt, Human
ucccgaguagcugggauuacaggc

SEQ ID NO: 875143 - RNA, 21 nt, Human
ucccggauucaagcgauucuc

SEQ ID NO: 875144 - RNA, 24 nt, Human
ucccggauucaagcgauucuccug

SEQ ID NO: 875145 - RNA, 22 nt, Human
uccugcaaccucugccucccgg

SEQ ID NO: 875146 - RNA, 23 nt, Human
uccugcaaccucugccucccgga

SEQ ID NO: 875147 - RNA, 23 nt, Human
ucucacucuguugcccaggcugg

SEQ ID NO: 875148 - RNA, 24 nt, Human
ucucacucuguugcccaggcugga

SEQ ID NO: 875149 - RNA, 26 nt, Human
ucucacucuguugcccaggcuggagu

SEQ ID NO: 875150 - RNA, 27 nt, Human
ucucacucuguugcccaggcuggagug

SEQ ID NO: 875151 - RNA, 18 nt, Human
ucucauugcaucuggguu

SEQ ID NO: 875152 - RNA, 24 nt, Human
ucuccugucucagccucccgagua

SEQ ID NO: 875153 - RNA, 19 nt, Human
ucucgaacuccugaccucg

SEQ ID NO: 875154 - RNA, 18 nt, Human
ucuguugcccaggcugga

SEQ ID NO: 875155 - RNA, 24 nt, Human
ucuguugcccaggcuggagugcaa

SEQ ID NO: 875156 - RNA, 22 nt, Human
ugagauggagucucacucuguu

SEQ ID NO: 875157 - RNA, 18 nt, Human
ugcccaggcuggagugca

SEQ ID NO: 875158 - RNA, 21 nt, Human
ugcccaggcuggagugcaaug

SEQ ID NO: 875159 - RNA, 21 nt, Human
ugcccaggcuggagugcaaug

SEQ ID NO: 875160 - RNA, 24 nt, Human
ugcccaggcuggagugcaauggcg

SEQ ID NO: 875161 - RNA, 24 nt, Human
ugcuggaauuacaagcgugagcca

SEQ ID NO: 875162 - RNA, 21 nt, Human
uggaauuacaagcgugagcca

SEQ ID NO: 875163 - RNA, 22 nt, Human
uggaauuacaagcgugagccac

SEQ ID NO: 875164 - RNA, 23 nt, Human
uggaauuacaagcgugagccacc

SEQ ID NO: 875165 - RNA, 24 nt, Human
uggaauuacaagcgugagccaccg

SEQ ID NO: 875166 - RNA, 24 nt, Human
uggaauuacaagcgugagccaccg

SEQ ID NO: 875167 - RNA, 24 nt, Human
uggagucucacucuguugcccagg

SEQ ID NO: 875168 - RNA, 19 nt, Human
uggagugcaauggcgugau

SEQ ID NO: 875169 - RNA, 24 nt, Human
uggagugcaauggcgugaucucag

SEQ ID NO: 875170 - RNA, 18 nt, Human
uggcaucguccgcccucg

SEQ ID NO: 875171 - RNA, 18 nt, Human
uggcgugaucucagcucc

SEQ ID NO: 875172 - RNA, 23 nt, Human
uggcgugaucucagcuccugcaa

SEQ ID NO: 875173 - RNA, 19 nt, Human
uggcugaggucaaggagcc

SEQ ID NO: 875174 - RNA, 22 nt, Human
ugggauuacaggcgcacgccac

SEQ ID NO: 875175 - RNA, 24 nt, Human
ugggauuacaggcgcacgccacca

SEQ ID NO: 875176 - RNA, 22 nt, Human
ugggggcagggcggagacacag

SEQ ID NO: 875177 - RNA, 24 nt, Human
uggguuucguggaaaaaacaaucc

SEQ ID NO: 875178 - RNA, 24 nt, Human
uggucaggcuggucucgaacuccu

SEQ ID NO: 875179 - RNA, 21 nt, Human
uguauuuuuaguagagacggg

SEQ ID NO: 875180 - RNA, 24 nt, Human
ugucucagccucccgaguagcugg

SEQ ID NO: 875181 - RNA, 23 nt, Human
uguggaagucccccggauugagg

SEQ ID NO: 875182 - RNA, 20 nt, Human
uguugcccaggcuggagugc

SEQ ID NO: 875183 - RNA, 22 nt, Human
uuaguagagacggggguuucac

SEQ ID NO: 875184 - RNA, 25 nt, Human
uuaguagagacggggguuucacuau

SEQ ID NO: 875185 - RNA, 23 nt, Human
uucaagcgauucuccugucucag

SEQ ID NO: 875186 - RNA, 22 nt, Human
uuccucugugaagggcggcccc

SEQ ID NO: 875187 - RNA, 18 nt, Human
uugcccaggcuggagugc

SEQ ID NO: 875188 - RNA, 24 nt, Human
uuguauuuuuaguagagacggggg

SEQ ID NO: 875189 - RNA, 25 nt, Human
uuuuuaguagagacggggguuucac

SEQ ID NO: 875190 - RNA, 20 nt, Human
uuuuuguauuuuuaguagag

SEQ ID NO: 875191 - RNA, 23 nt, Human
uuuuuuuuuuugagauggagucu

SEQ ID NO: 875192 - RNA, 25 nt, Human
uuuuuuuuuuugagauggagucuca

SEQ ID NO: 875193 - RNA, 18 nt, Human
uuuuuuuuuuuuuuuuug

SEQ ID NO: 875194 - RNA, 25 nt, Human
uuuuuuuuuuuuuuuuuuguuuuuu

SEQ ID NO: 875195 - RNA, 18 nt, Human
aaacacagucaccucccc

SEQ ID NO: 875196 - RNA, 20 nt, Human
aaacccagaugaaggcagcg

SEQ ID NO: 875197 - RNA, 21 nt, Human
aaagagacagagguagauuaa

SEQ ID NO: 875198 - RNA, 20 nt, Human
aagacccuggcccucagcgc

SEQ ID NO: 875199 - RNA, 18 nt, Human
aagagggcaucccccagc

SEQ ID NO: 875200 - RNA, 19 nt, Human
aagcaggaagggugagaga

SEQ ID NO: 875201 - RNA, 20 nt, Human
aagcaggaagggugagagag

SEQ ID NO: 875202 - RNA, 20 nt, Human
aagcccaaggcaggccccag

SEQ ID NO: 875203 - RNA, 18 nt, Human
aaggccucccaucaccgg

SEQ ID NO: 875204 - RNA, 19 nt, Human
aagugcuggauggggcaug

SEQ ID NO: 875205 - RNA, 21 nt, Human
aaguggcagcagugcuggugg

SEQ ID NO: 875206 - RNA, 18 nt, Human
acagcaccucagagaagc

SEQ ID NO: 875207 - RNA, 21 nt, Human
accauccccuaaacacaagag

SEQ ID NO: 875208 - RNA, 21 nt, Human
acccuaagaucaccugcccuc

SEQ ID NO: 875209 - RNA, 22 nt, Human
accuggaggagccacauacgca

SEQ ID NO: 875210 - RNA, 20 nt, Human
acuggcaggaggggcuuccc

SEQ ID NO: 875211 - RNA, 19 nt, Human
acuggcugcgugagagguc

SEQ ID NO: 875212 - RNA, 19 nt, Human
agaaguggcagcagugcug

SEQ ID NO: 875213 - RNA, 26 nt, Human
agacagagguagauuaaaagggaccc

SEQ ID NO: 875214 - RNA, 22 nt, Human
agagaagggaacagguuaacgc

SEQ ID NO: 875215 - RNA, 19 nt, Human
agagagggacggaaagagg

SEQ ID NO: 875216 - RNA, 18 nt, Human
agagggcuggccugggcc

SEQ ID NO: 875217 - RNA, 19 nt, Human
agagggcuggccugggcca

SEQ ID NO: 875218 - RNA, 20 nt, Human
agcacaagacccuggcccuc

SEQ ID NO: 875219 - RNA, 23 nt, Human
agcaggaggaagcugagagggcu

SEQ ID NO: 875220 - RNA, 19 nt, Human
agcagggaggaggggaagc

SEQ ID NO: 875221 - RNA, 19 nt, Human
agcagugcugguggccccg

SEQ ID NO: 875222 - RNA, 18 nt, Human
agccaggcaggcaggguc

SEQ ID NO: 875223 - RNA, 23 nt, Human
agccggggcugcucggcucuccc

SEQ ID NO: 875224 - RNA, 20 nt, Human
agccuggagggacccggugg

SEQ ID NO: 875225 - RNA, 22 nt, Human
aggaggaagcugagagggcugg

SEQ ID NO: 875226 - RNA, 18 nt, Human
aggaggggcuucccugcc

SEQ ID NO: 875227 - RNA, 19 nt, Human
aggcaagagugcuggcagc

SEQ ID NO: 875228 - RNA, 19 nt, Human
aggcaggaggggccucagg

SEQ ID NO: 875229 - RNA, 21 nt, Human
aggcagggucccccaaucccu

SEQ ID NO: 875230 - RNA, 21 nt, Human
aggcuguggcaggggccuggg

SEQ ID NO: 875231 - RNA, 24 nt, Human
agggagcucacgugugggcugugg

SEQ ID NO: 875232 - RNA, 23 nt, Human
agggcaggcaagagugcuggcag

SEQ ID NO: 875233 - RNA, 18 nt, Human
agggucuuugcuuggcac

SEQ ID NO: 875234 - RNA, 22 nt, Human
agugaugaugauuuuagccaaa

SEQ ID NO: 875235 - RNA, 23 nt, Human
augaaaagcaggaagggugagag

SEQ ID NO: 875236 - RNA, 24 nt, Human
caaguccaguaagggcaaggggag

SEQ ID NO: 875237 - RNA, 20 nt, Human
caagugcuggauggggcaug

SEQ ID NO: 875238 - RNA, 23 nt, Human
caccacaucuauuaugaggcaag

SEQ ID NO: 875239 - RNA, 25 nt, Human
cacccuaagaucaccugcccucugc

SEQ ID NO: 875240 - RNA, 21 nt, Human
caccucagagaagccacugag

SEQ ID NO: 875241 - RNA, 21 nt, Human
cacuucaaaaucucggcucaa

SEQ ID NO: 875242 - RNA, 20 nt, Human
cagcaaugcuguugcucggc

SEQ ID NO: 875243 - RNA, 18 nt, Human
cagcaccuggaggagcca

SEQ ID NO: 875244 - RNA, 21 nt, Human
cagcagagagggacugguggg

SEQ ID NO: 875245 - RNA, 21 nt, Human
cagcagugcugguggccccgg

SEQ ID NO: 875246 - RNA, 22 nt, Human
cagcgcagccacccgagccgcc

SEQ ID NO: 875247 - RNA, 22 nt, Human
cagcugagacagacgcaggcuc

SEQ ID NO: 875248 - RNA, 24 nt, Human
caggcaccacacccucaggccuca

SEQ ID NO: 875249 - RNA, 18 nt, Human
caggcucccuccucccuc

SEQ ID NO: 875250 - RNA, 20 nt, Human
cagggccaaguccaguaagg

SEQ ID NO: 875251 - RNA, 19 nt, Human
caguaggcucccacaggcc

SEQ ID NO: 875252 - RNA, 24 nt, Human
ccaaagcuuggacugaggggccug

SEQ ID NO: 875253 - RNA, 19 nt, Human
ccaagugcuggauggggca

SEQ ID NO: 875254 - RNA, 21 nt, Human
ccaagugcuggauggggcaug

SEQ ID NO: 875255 - RNA, 23 nt, Human
ccacacccucaggccucaaggcc

SEQ ID NO: 875256 - RNA, 20 nt, Human
ccacagcacaagacccuggc

SEQ ID NO: 875257 - RNA, 23 nt, Human
ccaggccugcagcccaacccaug

SEQ ID NO: 875258 - RNA, 18 nt, Human
cccaacccaugggccccu

SEQ ID NO: 875259 - RNA, 21 nt, Human
cccaagugcuggauggggcau

SEQ ID NO: 875260 - RNA, 18 nt, Human
cccacuggggagcagggc

SEQ ID NO: 875261 - RNA, 27 nt, Human
cccagccccacagcacaagacccuggc

SEQ ID NO: 875262 - RNA, 22 nt, Human
cccauaguccguagcccagagc

SEQ ID NO: 875263 - RNA, 21 nt, Human
cccaugcugagcucccuggga

SEQ ID NO: 875264 - RNA, 18 nt, Human
ccccacccuaggcccaac

SEQ ID NO: 875265 - RNA, 26 nt, Human
ccccacccuaggcccaacacuuucuc

SEQ ID NO: 875266 - RNA, 25 nt, Human
cccccagccccacagcacaagaccc

SEQ ID NO: 875267 - RNA, 24 nt, Human
ccccuccagccaaccucaacuccc

SEQ ID NO: 875268 - RNA, 22 nt, Human
ccccuucgcacugggaguccac

SEQ ID NO: 875269 - RNA, 27 nt, Human
cccugacccccuccagccaaccucaac

SEQ ID NO: 875270 - RNA, 18 nt, Human
cccugcccuccagggggc

SEQ ID NO: 875271 - RNA, 22 nt, Human
cccuggcccagcuucaggcccu

SEQ ID NO: 875272 - RNA, 23 nt, Human
ccgccgccgccgccgccgccgcc

SEQ ID NO: 875273 - RNA, 24 nt, Human
ccgccgccgccgccgccgccgccu

SEQ ID NO: 875274 - RNA, 26 nt, Human
ccgccgccucccagcgcagccacccg

SEQ ID NO: 875275 - RNA, 22 nt, Human
ccggggcugcucggcucucccu

SEQ ID NO: 875276 - RNA, 21 nt, Human
ccggugggcugcugagagggg

SEQ ID NO: 875277 - RNA, 26 nt, Human
ccuaacucacuggcugcgugagaggu

SEQ ID NO: 875278 - RNA, 25 nt, Human
ccucaaggccgggggugggaguggc

SEQ ID NO: 875279 - RNA, 19 nt, Human
ccucccagcgcagccaccc

SEQ ID NO: 875280 - RNA, 19 nt, Human
ccugagucccucaccacca

SEQ ID NO: 875281 - RNA, 24 nt, Human
ccugcagcgagcugcacuuucagc

SEQ ID NO: 875282 - RNA, 22 nt, Human
ccugcagucacccuuccaggca

SEQ ID NO: 875283 - RNA, 24 nt, Human
ccugcccucugcugccuggugccc

SEQ ID NO: 875284 - RNA, 21 nt, Human
ccuggaggggacacucagccu

SEQ ID NO: 875285 - RNA, 22 nt, Human
ccuggaucagaaagagagggac

SEQ ID NO: 875286 - RNA, 23 nt, Human
ccugucccuauuguggcccggga

SEQ ID NO: 875287 - RNA, 21 nt, Human
ccugucccugcccugucccua

SEQ ID NO: 875288 - RNA, 23 nt, Human
ccuuccaggcaccacacccucag

SEQ ID NO: 875289 - RNA, 23 nt, Human
ccuugcuguccagccaggcuggg

SEQ ID NO: 875290 - RNA, 20 nt, Human
cgcccauaguccguagccca

SEQ ID NO: 875291 - RNA, 21 nt, Human
cgccgccgccgccucccucca

SEQ ID NO: 875292 - RNA, 23 nt, Human
cgcuuggguacccagcuccgggc

SEQ ID NO: 875293 - RNA, 19 nt, Human
cggcucaaaagggcagcag

SEQ ID NO: 875294 - RNA, 21 nt, Human
cgggggccaggaggcucuggg

SEQ ID NO: 875295 - RNA, 19 nt, Human
cgugccagucaccacagga

SEQ ID NO: 875296 - RNA, 24 nt, Human
cucaguaccacggggaaggauaga

SEQ ID NO: 875297 - RNA, 20 nt, Human
cuccugagucccucaccacc

SEQ ID NO: 875298 - RNA, 21 nt, Human
cucguacugggagcacuccuc

SEQ ID NO: 875299 - RNA, 23 nt, Human
cugcccucugcugccuggugccc

SEQ ID NO: 875300 - RNA, 22 nt, Human
cugcucggcucucccucccggg

SEQ ID NO: 875301 - RNA, 21 nt, Human
cuggugcccaagucucugccc

SEQ ID NO: 875302 - RNA, 22 nt, Human
cugguggccccggcugaggcug

SEQ ID NO: 875303 - RNA, 21 nt, Human
cuuuaccucagaagccuuagc

SEQ ID NO: 875304 - RNA, 25 nt, Human
gaaaugaaucaucugaaaaaugaaa

SEQ ID NO: 875305 - RNA, 21 nt, Human
gaacacaggccacgcaggccc

SEQ ID NO: 875306 - RNA, 21 nt, Human
gaagcugaagugguguccccg

SEQ ID NO: 875307 - RNA, 22 nt, Human
gaaguggcagcagugcuggugg

SEQ ID NO: 875308 - RNA, 19 nt, Human
gacaggagggcaggcaaga

SEQ ID NO: 875309 - RNA, 23 nt, Human
gacuguggggagcagcgccccag

SEQ ID NO: 875310 - RNA, 22 nt, Human
gagacgggagagaaagagccag

SEQ ID NO: 875311 - RNA, 18 nt, Human
gagcgugcaggcagcccc

SEQ ID NO: 875312 - RNA, 22 nt, Human
gaggagccacauacgcagggcc

SEQ ID NO: 875313 - RNA, 19 nt, Human
gagggugggaaggagacaa

SEQ ID NO: 875314 - RNA, 21 nt, Human
gcagcagugcugguggccccg

SEQ ID NO: 875315 - RNA, 22 nt, Human
gccaggccugcagcccaaccca

SEQ ID NO: 875316 - RNA, 25 nt, Human
gccgccgccgccgccgccgccgccu

SEQ ID NO: 875317 - RNA, 23 nt, Human
gccgccgccgccgccgccgccgg

SEQ ID NO: 875318 - RNA, 24 nt, Human
gccucaaggccgggggugggagug

SEQ ID NO: 875319 - RNA, 18 nt, Human
gcucccacaggcccacug

SEQ ID NO: 875320 - RNA, 18 nt, Human
gcucucccucccgggggg

SEQ ID NO: 875321 - RNA, 26 nt, Human
gcugacaugcaggaagaguccccagu

SEQ ID NO: 875322 - RNA, 25 nt, Human
ggaagcuggagguggguagggauug

SEQ ID NO: 875323 - RNA, 19 nt, Human
ggaagggucuuugcuuggc

SEQ ID NO: 875324 - RNA, 19 nt, Human
ggacccgggacugacgcag

SEQ ID NO: 875325 - RNA, 22 nt, Human
ggagagcagggaggaggggaaa

SEQ ID NO: 875326 - RNA, 19 nt, Human
ggagcgugcaggcagcccc

SEQ ID NO: 875327 - RNA, 18 nt, Human
ggagcuccaaggugggcc

SEQ ID NO: 875328 - RNA, 18 nt, Human
ggaggcucucccaggcac

SEQ ID NO: 875329 - RNA, 20 nt, Human
ggcaggaggggcuucccugc

SEQ ID NO: 875330 - RNA, 22 nt, Human
ggcucccuccucccucuugcuc

SEQ ID NO: 875331 - RNA, 18 nt, Human
gggaaacugaggcacaag

SEQ ID NO: 875332 - RNA, 18 nt, Human
gggaaggcccuggagugg

SEQ ID NO: 875333 - RNA, 19 nt, Human
gggaauggggaggaaagaa

SEQ ID NO: 875334 - RNA, 25 nt, Human
gggcaaggggagggggcauucuggu

SEQ ID NO: 875335 - RNA, 21 nt, Human
gggcagggaguggccauggac

SEQ ID NO: 875336 - RNA, 23 nt, Human
gggcauggggagaaaggggcgug

SEQ ID NO: 875337 - RNA, 20 nt, Human
gggcccuggcccagcuucag

SEQ ID NO: 875338 - RNA, 20 nt, Human
gggccggggccggggcugga

SEQ ID NO: 875339 - RNA, 25 nt, Human
gggccggggccggggcuggaggcgu

SEQ ID NO: 875340 - RNA, 21 nt, Human
ggggagcgugcaggcagcccc

SEQ ID NO: 875341 - RNA, 24 nt, Human
ggggagggugggaaggagacaaag

SEQ ID NO: 875342 - RNA, 22 nt, Human
gggggccaggaggcucugggag

SEQ ID NO: 875343 - RNA, 18 nt, Human
ggggggccggggccgggg

SEQ ID NO: 875344 - RNA, 20 nt, Human
ggggggccggggccggggcu

SEQ ID NO: 875345 - RNA, 22 nt, Human
gggugaggagggagcucacgug

SEQ ID NO: 875346 - RNA, 21 nt, Human
ggucuuugcuuggcaucaggc

SEQ ID NO: 875347 - RNA, 24 nt, Human
ggugaagguuuuccaaagcuugga

SEQ ID NO: 875348 - RNA, 19 nt, Human
ggugagagagaacucugag

SEQ ID NO: 875349 - RNA, 18 nt, Human
ggugggaguggcgcugag

SEQ ID NO: 875350 - RNA, 21 nt, Human
uaaagagacagagguagauua

SEQ ID NO: 875351 - RNA, 18 nt, Human
uaagaacacaggccacgc

SEQ ID NO: 875352 - RNA, 20 nt, Human
uaccucagaagccuuagcug

SEQ ID NO: 875353 - RNA, 19 nt, Human
uacugcuggcaagaggugg

SEQ ID NO: 875354 - RNA, 18 nt, Human
ucaagccaggcaggcagg

SEQ ID NO: 875355 - RNA, 22 nt, Human
ucacccuuccaggcaccacacc

SEQ ID NO: 875356 - RNA, 24 nt, Human
ucagcuuauuuggacuguggggag

SEQ ID NO: 875357 - RNA, 21 nt, Human
ucagugugugacacccaguga

SEQ ID NO: 875358 - RNA, 22 nt, Human
ucaguugguggccgcuggggaa

SEQ ID NO: 875359 - RNA, 23 nt, Human
ucaucugaaaaaugaaaagcagg

SEQ ID NO: 875360 - RNA, 24 nt, Human
ucauggauggagcucuucuccucg

SEQ ID NO: 875361 - RNA, 21 nt, Human
ucaugggcugugcgucguggc

SEQ ID NO: 875362 - RNA, 23 nt, Human
uccaauauccagggcccagcaau

SEQ ID NO: 875363 - RNA, 25 nt, Human
ucccuacaauucuccugagucccuc

SEQ ID NO: 875364 - RNA, 19 nt, Human
ucccucaccaccauggagg

SEQ ID NO: 875365 - RNA, 18 nt, Human
ucccuccucccucuugcu

SEQ ID NO: 875366 - RNA, 25 nt, Human
ucccugccugggggugaggagggag

SEQ ID NO: 875367 - RNA, 23 nt, Human
uccgcagguagcgcugcgccagg

SEQ ID NO: 875368 - RNA, 21 nt, Human
uccgcagguagcgcugcgccg

SEQ ID NO: 875369 - RNA, 21 nt, Human
uccuccgucaccuucgccuuu

SEQ ID NO: 875370 - RNA, 21 nt, Human
ucgugguaccucugcugaccc

SEQ ID NO: 875371 - RNA, 22 nt, Human
ucuaggcuucucagauuuaaaa

SEQ ID NO: 875372 - RNA, 25 nt, Human
ucuccagcuacaccaagcccaaggc

SEQ ID NO: 875373 - RNA, 22 nt, Human
ucucccaggcacggccccuccu

SEQ ID NO: 875374 - RNA, 19 nt, Human
ucucugagcccugaggcgg

SEQ ID NO: 875375 - RNA, 22 nt, Human
ucuguaacauggggcuaagaac

SEQ ID NO: 875376 - RNA, 24 nt, Human
ucuucuguaacauggggcuaagaa

SEQ ID NO: 875377 - RNA, 21 nt, Human
ugaaaagcaggaagggugaga

SEQ ID NO: 875378 - RNA, 27 nt, Human
ugaaaagcaggaagggugagagagaac

SEQ ID NO: 875379 - RNA, 23 nt, Human
ugaaggcagcgcagcagacagga

SEQ ID NO: 875380 - RNA, 23 nt, Human
ugaaucaucugaaaaaugaaaag

SEQ ID NO: 875381 - RNA, 19 nt, Human
ugacacccagugagggcug

SEQ ID NO: 875382 - RNA, 21 nt, Human
ugacccccuccagccaaccuc

SEQ ID NO: 875383 - RNA, 22 nt, Human
ugaccugggcugucccuguccc

SEQ ID NO: 875384 - RNA, 23 nt, Human
ugaccuuggaagggcccagucug

SEQ ID NO: 875385 - RNA, 18 nt, Human
ugacuugggcagcaggag

SEQ ID NO: 875386 - RNA, 23 nt, Human
ugacuugggcagcaggaggaagc

SEQ ID NO: 875387 - RNA, 18 nt, Human
ugagagggcuggccuggg

SEQ ID NO: 875388 - RNA, 21 nt, Human
ugagagggcuggccugggcca

SEQ ID NO: 875389 - RNA, 18 nt, Human
ugaggcggggaggguggg

SEQ ID NO: 875390 - RNA, 21 nt, Human
ugagggcugacccauccuccu

SEQ ID NO: 875391 - RNA, 21 nt, Human
ugagggugggucccugacccc

SEQ ID NO: 875392 - RNA, 21 nt, Human
ugaggugaagguuuuccaaag

SEQ ID NO: 875393 - RNA, 22 nt, Human
ugagucagggggcagagaaaug

SEQ ID NO: 875394 - RNA, 24 nt, Human
ugcagcccaacccaugggccccuu

SEQ ID NO: 875395 - RNA, 19 nt, Human
ugcagggaauggggaggaa

SEQ ID NO: 875396 - RNA, 18 nt, Human
ugcucggccaagcccugc

SEQ ID NO: 875397 - RNA, 21 nt, Human
ugcucggccaagcccugcccu

SEQ ID NO: 875398 - RNA, 23 nt, Human
ugcugguggccccggcugaggcu

SEQ ID NO: 875399 - RNA, 18 nt, Human
uggaagaaguggcagcag

SEQ ID NO: 875400 - RNA, 20 nt, Human
uggagguggguagggauugg

SEQ ID NO: 875401 - RNA, 18 nt, Human
uggcaagagguggcccca

SEQ ID NO: 875402 - RNA, 25 nt, Human
uggcaggaggggcuucccugccugg

SEQ ID NO: 875403 - RNA, 22 nt, Human
uggcaggggccugggagagcag

SEQ ID NO: 875404 - RNA, 20 nt, Human
uggcuggggcuggaagaagu

SEQ ID NO: 875405 - RNA, 18 nt, Human
uggggaaggcccuggagu

SEQ ID NO: 875406 - RNA, 22 nt, Human
uggggaagggucuuugcuuggc

SEQ ID NO: 875407 - RNA, 19 nt, Human
ugggucccugacccccucc

SEQ ID NO: 875408 - RNA, 21 nt, Human
ugggucccugacccccuccag

SEQ ID NO: 875409 - RNA, 20 nt, Human
ugguaccucugcugacccca

SEQ ID NO: 875410 - RNA, 19 nt, Human
uggugcccaagucucugcc

SEQ ID NO: 875411 - RNA, 20 nt, Human
ugucccugucccugcccugu

SEQ ID NO: 875412 - RNA, 18 nt, Human
uuccaauauccagggccc

SEQ ID NO: 875413 - RNA, 18 nt, Human
uuccucgggggccaggag

SEQ ID NO: 875414 - RNA, 21 nt, Human
uucgcacugggaguccacgug

SEQ ID NO: 875415 - RNA, 24 nt, Human
uucucucagugugugacacccagu

SEQ ID NO: 875416 - RNA, 19 nt, Human
uugguggccgcuggggaag

SEQ ID NO: 875417 - RNA, 22 nt, Human
uuuuuagggggaggagagcggc

SEQ ID NO: 875418 - RNA, 21 nt, Human
aaaguucuccuuccacaaauc

SEQ ID NO: 875419 - RNA, 18 nt, Human
accccggccucggccacg

SEQ ID NO: 875420 - RNA, 19 nt, Human
aggcccgguagggccuuga

SEQ ID NO: 875421 - RNA, 20 nt, Human
caaccgcaagcaggcagcgg

SEQ ID NO: 875422 - RNA, 18 nt, Human
cggcagggucaccccggc

SEQ ID NO: 875423 - RNA, 21 nt, Human
cggugcggcgaagguuuaguu

SEQ ID NO: 875424 - RNA, 27 nt, Human
cuccggcagggucaccccggccucggc

SEQ ID NO: 875425 - RNA, 19 nt, Human
cucuccccacugaccuggg

SEQ ID NO: 875426 - RNA, 18 nt, Human
gccacgcccacuauagag

SEQ ID NO: 875427 - RNA, 19 nt, Human
gccguacugcaaacucggu

SEQ ID NO: 875428 - RNA, 26 nt, Human
gcuuguuguggauaauagagggaggc

SEQ ID NO: 875429 - RNA, 21 nt, Human
ggaggcccgguagggccuuga

SEQ ID NO: 875430 - RNA, 24 nt, Human
ggcagcuaaucccaugaaaccagg

SEQ ID NO: 875431 - RNA, 19 nt, Human
gggaggcagcuaaucccau

SEQ ID NO: 875432 - RNA, 18 nt, Human
uaaucccaugaaaccagg

SEQ ID NO: 875433 - RNA, 19 nt, Human
uaaucucuccccacugacc

SEQ ID NO: 875434 - RNA, 23 nt, Human
ucacccgguucuagaagccgcgu

SEQ ID NO: 875435 - RNA, 22 nt, Human
uccucguaaaccccagucauau

SEQ ID NO: 875436 - RNA, 24 nt, Human
ucgcugagccgcagcgcgucgcgc

SEQ ID NO: 875437 - RNA, 27 nt, Human
uucuaugacuauauauccucguaaacc

SEQ ID NO: 875438 - RNA, 21 nt, Human
uugaaaguucuccuuccacaa

SEQ ID NO: 875439 - RNA, 19 nt, Human
aaaagcccaauuccaagag

SEQ ID NO: 875440 - RNA, 19 nt, Human
aaagagacugcacugaaug

SEQ ID NO: 875441 - RNA, 20 nt, Human
aacacacccaagacuaaaga

SEQ ID NO: 875442 - RNA, 23 nt, Human
aauacagaaaaagauaggucuga

SEQ ID NO: 875443 - RNA, 18 nt, Human
acacagcucccucuaagc

SEQ ID NO: 875444 - RNA, 20 nt, Human
agaaaaagauaggucugaga

SEQ ID NO: 875445 - RNA, 18 nt, Human
agaggaggugagaaggag

SEQ ID NO: 875446 - RNA, 19 nt, Human
agagucccccacauggacc

SEQ ID NO: 875447 - RNA, 23 nt, Human
agagucccccacauggaccuccc

SEQ ID NO: 875448 - RNA, 18 nt, Human
agcagaugaacacauuuc

SEQ ID NO: 875449 - RNA, 18 nt, Human
aggaauaauucuacaugg

SEQ ID NO: 875450 - RNA, 23 nt, Human
caaaagcccaauuccaagagucc

SEQ ID NO: 875451 - RNA, 21 nt, Human
caagacauaaaaccgaaccua

SEQ ID NO: 875452 - RNA, 24 nt, Human
caagacuaaagagucccuccucuc

SEQ ID NO: 875453 - RNA, 20 nt, Human
cacaaugauucuucgagaca

SEQ ID NO: 875454 - RNA, 19 nt, Human
cacagcucccucuaagccu

SEQ ID NO: 875455 - RNA, 18 nt, Human
caccaaaagcccaauucc

SEQ ID NO: 875456 - RNA, 21 nt, Human
caccaaaagcccaauuccaag

SEQ ID NO: 875457 - RNA, 18 nt, Human
caccccaugcaagaaaac

SEQ ID NO: 875458 - RNA, 22 nt, Human
ccuccucuccauauauauugcc

SEQ ID NO: 875459 - RNA, 19 nt, Human
cucaaggucaggagcucau

SEQ ID NO: 875460 - RNA, 23 nt, Human
cuuaacacacccaagacuaaaga

SEQ ID NO: 875461 - RNA, 20 nt, Human
gaaggagcaauuagggaugg

SEQ ID NO: 875462 - RNA, 22 nt, Human
guuaaguacuccucaaggucag

SEQ ID NO: 875463 - RNA, 23 nt, Human
uagcuucacaauccaggaauaau

SEQ ID NO: 875464 - RNA, 22 nt, Human
uauauugccauucugauucuuc

SEQ ID NO: 875465 - RNA, 21 nt, Human
ucagaggucaccaaaacacag

SEQ ID NO: 875466 - RNA, 18 nt, Human
uccucaaggucaggagcu

SEQ ID NO: 875467 - RNA, 19 nt, Human
uccucaaggucaggagcuc

SEQ ID NO: 875468 - RNA, 18 nt, Human
ucgcuggguucuuugaag

SEQ ID NO: 875469 - RNA, 21 nt, Human
ugacuguuggcuucauuguga

SEQ ID NO: 875470 - RNA, 25 nt, Human
ugagaaggagcaauuagggauggug

SEQ ID NO: 875471 - RNA, 18 nt, Human
ugagaggaggugagaagg

SEQ ID NO: 875472 - RNA, 21 nt, Human
ugagaggaggugagaaggagc

SEQ ID NO: 875473 - RNA, 19 nt, Human
ugauaaggcacaaggaaga

SEQ ID NO: 875474 - RNA, 22 nt, Human
uucaagacauaaaaccgaaccu

SEQ ID NO: 875475 - RNA, 29 nt, Human
uuuuuuuuuuuuuuuuuuuauacuuuuag

SEQ ID NO: 875476 - RNA, 20 nt, Human
aaaggagaugaugggaaggc

SEQ ID NO: 875477 - RNA, 22 nt, Human
aacauuuuauuuuacauuauau

SEQ ID NO: 875478 - RNA, 23 nt, Human
aacguuuaaagggggacagaggc

SEQ ID NO: 875479 - RNA, 22 nt, Human
aacugcaucuucagacagcacu

SEQ ID NO: 875480 - RNA, 24 nt, Human
aacugcaucuucagacagcacuga

SEQ ID NO: 875481 - RNA, 19 nt, Human
aagcugcagaguggagcgu

SEQ ID NO: 875482 - RNA, 25 nt, Human
aagcugcagaguggagcgugagagg

SEQ ID NO: 875483 - RNA, 23 nt, Human
acuccaggauuugguccuuggua

SEQ ID NO: 875484 - RNA, 23 nt, Human
agaaaagacccccacacagugaa

SEQ ID NO: 875485 - RNA, 18 nt, Human
agaaagagcugacauaag

SEQ ID NO: 875486 - RNA, 24 nt, Human
agagagagugaaauucagggucua

SEQ ID NO: 875487 - RNA, 18 nt, Human
agcaacugcaucuucaga

SEQ ID NO: 875488 - RNA, 22 nt, Human
agcuguacuuaaaucagaagga

SEQ ID NO: 875489 - RNA, 18 nt, Human
aggucaggggcagccuca

SEQ ID NO: 875490 - RNA, 23 nt, Human
aguccucuuuuuauuugaauucu

SEQ ID NO: 875491 - RNA, 18 nt, Human
agugaaaagcuggaagag

SEQ ID NO: 875492 - RNA, 18 nt, Human
agugaaugacugggcuac

SEQ ID NO: 875493 - RNA, 21 nt, Human
auaguuacccaggccuggaaa

SEQ ID NO: 875494 - RNA, 18 nt, Human
aucucccucuuuuccuaa

SEQ ID NO: 875495 - RNA, 19 nt, Human
cacaaccugacagcagagu

SEQ ID NO: 875496 - RNA, 21 nt, Human
caggucccccauuugacuuuc

SEQ ID NO: 875497 - RNA, 21 nt, Human
ccagcgcucgcugcagccggg

SEQ ID NO: 875498 - RNA, 23 nt, Human
cccaggccuggaaaucucccucu

SEQ ID NO: 875499 - RNA, 22 nt, Human
ccccuggcccaggaugagcccu

SEQ ID NO: 875500 - RNA, 20 nt, Human
ccgcagaagcuccggauagg

SEQ ID NO: 875501 - RNA, 22 nt, Human
ccucccgccacuaccucgugcc

SEQ ID NO: 875502 - RNA, 21 nt, Human
ccucuaaaguugggagaacuc

SEQ ID NO: 875503 - RNA, 22 nt, Human
ccuggaaaucucccucuuuucc

SEQ ID NO: 875504 - RNA, 25 nt, Human
ccuuuccauccucuaaaguugggag

SEQ ID NO: 875505 - RNA, 21 nt, Human
cucauuggcuguaauuugaca

SEQ ID NO: 875506 - RNA, 19 nt, Human
cucauuuuguucaguuucu

SEQ ID NO: 875507 - RNA, 18 nt, Human
cucccucuuuuccuaauu

SEQ ID NO: 875508 - RNA, 22 nt, Human
cucucuggccagaaggucaggg

SEQ ID NO: 875509 - RNA, 19 nt, Human
cugcaucaaauucccaaaa

SEQ ID NO: 875510 - RNA, 24 nt, Human
cuggaaaucucccucuuuuccuaa

SEQ ID NO: 875511 - RNA, 20 nt, Human
cuggcuggcagcaaugucuc

SEQ ID NO: 875512 - RNA, 22 nt, Human
cuguacuuaaaucagaaggauc

SEQ ID NO: 875513 - RNA, 18 nt, Human
cuuccuacuucacuggcc

SEQ ID NO: 875514 - RNA, 22 nt, Human
gagaaaagacccccacacagug

SEQ ID NO: 875515 - RNA, 21 nt, Human
gagcacagcggggaaggaccg

SEQ ID NO: 875516 - RNA, 19 nt, Human
gcaaacagcaacugcaucu

SEQ ID NO: 875517 - RNA, 19 nt, Human
gcaguccagcgugcuggcc

SEQ ID NO: 875518 - RNA, 22 nt, Human
gcuagauuacucugccccuuuc

SEQ ID NO: 875519 - RNA, 25 nt, Human
gcugcagccgggccgucucgcaguc

SEQ ID NO: 875520 - RNA, 19 nt, Human
ggaagagaaacaaaacuca

SEQ ID NO: 875521 - RNA, 18 nt, Human
ggagaacuccaggauuug

SEQ ID NO: 875522 - RNA, 20 nt, Human
gguccugaaaggagaugaug

SEQ ID NO: 875523 - RNA, 22 nt, Human
gguuccaacuguugagaccugu

SEQ ID NO: 875524 - RNA, 18 nt, Human
uaaaacaggguaaucuuu

SEQ ID NO: 875525 - RNA, 20 nt, Human
uaacaucauccgcuuuccuc

SEQ ID NO: 875526 - RNA, 19 nt, Human
uaacuccuagaacaaggac

SEQ ID NO: 875527 - RNA, 23 nt, Human
uaagcaggucaaccugaagcuac

SEQ ID NO: 875528 - RNA, 19 nt, Human
uaauagagcacaauggaca

SEQ ID NO: 875529 - RNA, 23 nt, Human
uaccaggcagcucuggaggcucc

SEQ ID NO: 875530 - RNA, 22 nt, Human
uacgcagaccccaccgcucagc

SEQ ID NO: 875531 - RNA, 26 nt, Human
uacucugccccuuuccauccucuaaa

SEQ ID NO: 875532 - RNA, 18 nt, Human
uacuuguuguuucuucuc

SEQ ID NO: 875533 - RNA, 19 nt, Human
uagaaagagcugacauaag

SEQ ID NO: 875534 - RNA, 27 nt, Human
uagcaaacaccuuuauauuuuugaaau

SEQ ID NO: 875535 - RNA, 18 nt, Human
ucacuggccucagucucc

SEQ ID NO: 875536 - RNA, 22 nt, Human
uccaaaagcacuaucaugaacu

SEQ ID NO: 875537 - RNA, 22 nt, Human
uccaugcugagcacagcgggga

SEQ ID NO: 875538 - RNA, 23 nt, Human
ucccuaagcagcucauccgguuc

SEQ ID NO: 875539 - RNA, 24 nt, Human
ucuucagacagcacugagcaagua

SEQ ID NO: 875540 - RNA, 21 nt, Human
ugaaaagcuggaagagaaaca

SEQ ID NO: 875541 - RNA, 19 nt, Human
ugaaaggagaugaugggaa

SEQ ID NO: 875542 - RNA, 20 nt, Human
ugaaaggcugguauacauuu

SEQ ID NO: 875543 - RNA, 23 nt, Human
ugagaggucagcugccaugugau

SEQ ID NO: 875544 - RNA, 19 nt, Human
ugauaagcaggucaaccug

SEQ ID NO: 875545 - RNA, 23 nt, Human
ugccuucuugauuuuccaaucuu

SEQ ID NO: 875546 - RNA, 24 nt, Human
ugcuggccagagaccgcagcuucc

SEQ ID NO: 875547 - RNA, 21 nt, Human
uggaagagaaacaaaacucac

SEQ ID NO: 875548 - RNA, 19 nt, Human
uggccagaaggucaggggc

SEQ ID NO: 875549 - RNA, 21 nt, Human
uggcccaggaugagcccucag

SEQ ID NO: 875550 - RNA, 21 nt, Human
ugguuccaacuguugagaccu

SEQ ID NO: 875551 - RNA, 20 nt, Human
uguuuuggugacaguuuucu

SEQ ID NO: 875552 - RNA, 23 nt, Human
uuagauaauacuuuccagcugua

SEQ ID NO: 875553 - RNA, 18 nt, Human
uucacagaaucaucacuc

SEQ ID NO: 875554 - RNA, 20 nt, Human
uucucagcaauauucacaga

SEQ ID NO: 875555 - RNA, 25 nt, Human
uugcuuuaucaagaagaauauuaac

SEQ ID NO: 875556 - RNA, 21 nt, Human
uuguucaguuucuguguugga

SEQ ID NO: 875557 - RNA, 21 nt, Human
uuuaugaaaucaaugccuucu

SEQ ID NO: 875558 - RNA, 18 nt, Human
uuucaucucauuuuguuc

SEQ ID NO: 875559 - RNA, 21 nt, Human
uuuccauccucuaaaguuggg

SEQ ID NO: 875560 - RNA, 21 nt, Human
uuucuuccuacuucacuggcc

SEQ ID NO: 875561 - RNA, 18 nt, Human
uuugcaaacagcaacugc

SEQ ID NO: 875562 - RNA, 23 nt, Human
uuuuuuuuuuuuuuuuuuuucag

SEQ ID NO: 875563 - RNA, 19 nt, Human
aaagugcuaggguuacagg

SEQ ID NO: 875564 - RNA, 20 nt, Human
aaagugcuaggguuacaggg

SEQ ID NO: 875565 - RNA, 19 nt, Human
aaagugcuggaauuacagg

SEQ ID NO: 875566 - RNA, 24 nt, Human
aaagugcuggaauuacagguguga

SEQ ID NO: 875567 - RNA, 25 nt, Human
aaaucaacaucuuauauuucuauac

SEQ ID NO: 875568 - RNA, 24 nt, Human
aagaagcugggauuacaggcacau

SEQ ID NO: 875569 - RNA, 29 nt, Human
aagcaagaaauaggagacggagggacccc

SEQ ID NO: 875570 - RNA, 18 nt, Human
aagugauccacucgccuc

SEQ ID NO: 875571 - RNA, 26 nt, Human
aagugcuaggguuacaggggugagcc

SEQ ID NO: 875572 - RNA, 26 nt, Human
aagugcuggaauuacaggugugagcc

SEQ ID NO: 875573 - RNA, 18 nt, Human
aauuacaggugugagcca

SEQ ID NO: 875574 - RNA, 18 nt, Human
aauuacaggugugagcca

SEQ ID NO: 875575 - RNA, 21 nt, Human
aauucuugugccucagcuucc

SEQ ID NO: 875576 - RNA, 22 nt, Human
acagaguuucgccguuggccag

SEQ ID NO: 875577 - RNA, 21 nt, Human
acagccaguaagcagaugagc

SEQ ID NO: 875578 - RNA, 21 nt, Human
acagguaaauccacuaaggua

SEQ ID NO: 875579 - RNA, 23 nt, Human
acucugucgcccagggugcuggg

SEQ ID NO: 875580 - RNA, 19 nt, Human
agagacagaguuucgccgu

SEQ ID NO: 875581 - RNA, 23 nt, Human
agauacaaaaaguucacacagcc

SEQ ID NO: 875582 - RNA, 18 nt, Human
agccaccaugcccagccc

SEQ ID NO: 875583 - RNA, 19 nt, Human
aggcggccugcuguggagc

SEQ ID NO: 875584 - RNA, 22 nt, Human
aguccauuacuggcuagaauaa

SEQ ID NO: 875585 - RNA, 21 nt, Human
agugcaauggcgcgaucccag

SEQ ID NO: 875586 - RNA, 23 nt, Human
agugcaguggcgugaucuuggcu

SEQ ID NO: 875587 - RNA, 24 nt, Human
agugcaguggcgugaucuuggcuc

SEQ ID NO: 875588 - RNA, 24 nt, Human
auacaaaaaguucacacagccagu

SEQ ID NO: 875589 - RNA, 24 nt, Human
augggguuuugccauguugcccag

SEQ ID NO: 875590 - RNA, 22 nt, Human
caaaaaguucacacagccagua

SEQ ID NO: 875591 - RNA, 24 nt, Human
caaagugcuggaauuacaggugug

SEQ ID NO: 875592 - RNA, 23 nt, Human
caaccuccaccuccuggguucag

SEQ ID NO: 875593 - RNA, 20 nt, Human
caaguagcuggacuacaggc

SEQ ID NO: 875594 - RNA, 24 nt, Human
caccaugcccagcuaauuuuugua

SEQ ID NO: 875595 - RNA, 20 nt, Human
cacuaaaaagacaagaauuc

SEQ ID NO: 875596 - RNA, 19 nt, Human
cacucugucgcccagggug

SEQ ID NO: 875597 - RNA, 21 nt, Human
cacugcaaccuccaccuccug

SEQ ID NO: 875598 - RNA, 23 nt, Human
cacugcaaccuccaccuccuggg

SEQ ID NO: 875599 - RNA, 22 nt, Human
cagaguuucgccguuggccagg

SEQ ID NO: 875600 - RNA, 19 nt, Human
cagauggauggcugccucc

SEQ ID NO: 875601 - RNA, 22 nt, Human
cagcuucccaagaagcugggau

SEQ ID NO: 875602 - RNA, 20 nt, Human
caggaguuaggauuccaugc

SEQ ID NO: 875603 - RNA, 28 nt, Human
caggcaauucuugugccucagcuuccca

SEQ ID NO: 875604 - RNA, 24 nt, Human
cagggucucacucugucgcccagg

SEQ ID NO: 875605 - RNA, 21 nt, Human
cagggugcuucugugaggugu

SEQ ID NO: 875606 - RNA, 19 nt, Human
caucccagauggauggcug

SEQ ID NO: 875607 - RNA, 23 nt, Human
caucucagccucaaguagcugga

SEQ ID NO: 875608 - RNA, 22 nt, Human
caucuuauauuucuauacuaaa

SEQ ID NO: 875609 - RNA, 19 nt, Human
cauguugcccaggcuggcc

SEQ ID NO: 875610 - RNA, 20 nt, Human
cauguugcccaggcuggccu

SEQ ID NO: 875611 - RNA, 22 nt, Human
cauguugcccaggcuggccuug

SEQ ID NO: 875612 - RNA, 24 nt, Human
cauguugcccaggcuggccuugaa

SEQ ID NO: 875613 - RNA, 20 nt, Human
ccaaagugcuggaauuacag

SEQ ID NO: 875614 - RNA, 21 nt, Human
ccaaagugcuggaauuacagg

SEQ ID NO: 875615 - RNA, 24 nt, Human
ccaaagugcuggaauuacaggugu

SEQ ID NO: 875616 - RNA, 20 nt, Human
ccaccaugcccagcccagac

SEQ ID NO: 875617 - RNA, 21 nt, Human
ccaccucccaggauuugauuc

SEQ ID NO: 875618 - RNA, 27 nt, Human
ccaccuccuggguucaggcaauucuuu

SEQ ID NO: 875619 - RNA, 18 nt, Human
ccagggugcuggagugca

SEQ ID NO: 875620 - RNA, 23 nt, Human
ccagggugcuggagugcaguggc

SEQ ID NO: 875621 - RNA, 25 nt, Human
ccagggugcuggagugcaguggcgu

SEQ ID NO: 875622 - RNA, 21 nt, Human
ccauguugcccaggcuggccu

SEQ ID NO: 875623 - RNA, 19 nt, Human
cccaagaagcugggauuac

SEQ ID NO: 875624 - RNA, 24 nt, Human
cccaagaagcugggauuacaggca

SEQ ID NO: 875625 - RNA, 23 nt, Human
cccaggauuugauucaggcggcc

SEQ ID NO: 875626 - RNA, 19 nt, Human
ccuaccucgaccucccaaa

SEQ ID NO: 875627 - RNA, 23 nt, Human
ccucaaguagcuggacuacaggc

SEQ ID NO: 875628 - RNA, 19 nt, Human
ccuccaccuccuggguuca

SEQ ID NO: 875629 - RNA, 30 nt, Human
ccucccaucucagccucaaguagcuggacc

SEQ ID NO: 875630 - RNA, 22 nt, Human
ccuccuggguucaggcaauucu

SEQ ID NO: 875631 - RNA, 20 nt, Human
ccugagcuuaagugauccac

SEQ ID NO: 875632 - RNA, 22 nt, Human
ccugagcuuaagugauccacuc

SEQ ID NO: 875633 - RNA, 23 nt, Human
ccuugaacuccugagcuuaagug

SEQ ID NO: 875634 - RNA, 24 nt, Human
cgcucugucagccaggcuggagug

SEQ ID NO: 875635 - RNA, 19 nt, Human
cuaaagugcuaggguuaca

SEQ ID NO: 875636 - RNA, 20 nt, Human
cucaaguagcuggacuacag

SEQ ID NO: 875637 - RNA, 24 nt, Human
cucacugcaaccuccaccuccugg

SEQ ID NO: 875638 - RNA, 27 nt, Human
cucacugcaaccuccaccuccuggguu

SEQ ID NO: 875639 - RNA, 21 nt, Human
cucacugcagccccgaccucc

SEQ ID NO: 875640 - RNA, 19 nt, Human
cucagccucaaguagcugg

SEQ ID NO: 875641 - RNA, 24 nt, Human
cucauccucccaucucagccucaa

SEQ ID NO: 875642 - RNA, 21 nt, Human
cuccuggguucaggcaauucu

SEQ ID NO: 875643 - RNA, 21 nt, Human
cucgcucugucagccaggcug

SEQ ID NO: 875644 - RNA, 24 nt, Human
cucgcucugucagccaggcuggag

SEQ ID NO: 875645 - RNA, 20 nt, Human
cugaacuugagugugcagca

SEQ ID NO: 875646 - RNA, 23 nt, Human
cugcaaccuccaccuccuggguu

SEQ ID NO: 875647 - RNA, 24 nt, Human
cugcaaccuccaccuccuggguuc

SEQ ID NO: 875648 - RNA, 20 nt, Human
cugcacucuucugagguugc

SEQ ID NO: 875649 - RNA, 23 nt, Human
cugcuggauacaagcuaucaugu

SEQ ID NO: 875650 - RNA, 23 nt, Human
cuucauagucauacauagccuga

SEQ ID NO: 875651 - RNA, 22 nt, Human
cuuggcucacugcagccccgac

SEQ ID NO: 875652 - RNA, 21 nt, Human
gaagaaaaccaagauacaaaa

SEQ ID NO: 875653 - RNA, 18 nt, Human
gaagcugggauuacaggc

SEQ ID NO: 875654 - RNA, 24 nt, Human
gaauuacaggugugagccaucacg

SEQ ID NO: 875655 - RNA, 19 nt, Human
gagcugcacucuucugagg

SEQ ID NO: 875656 - RNA, 24 nt, Human
gagcuuaagugauccacucgccuc

SEQ ID NO: 875657 - RNA, 20 nt, Human
gauuucuguccccaccuccc

SEQ ID NO: 875658 - RNA, 18 nt, Human
gcagcagaauuaccugga

SEQ ID NO: 875659 - RNA, 22 nt, Human
gcccagcuaauuuuuguauuuu

SEQ ID NO: 875660 - RNA, 24 nt, Human
gccucagcuucccaagaagcuggg

SEQ ID NO: 875661 - RNA, 21 nt, Human
gcucacugcagccccgaccuc

SEQ ID NO: 875662 - RNA, 25 nt, Human
gcuggagugcaauggcgcgauccca

SEQ ID NO: 875663 - RNA, 25 nt, Human
ggaaggcuucuuaaaacacagauuu

SEQ ID NO: 875664 - RNA, 22 nt, Human
ggacuacaggcgggugccacca

SEQ ID NO: 875665 - RNA, 22 nt, Human
gggguuuugccauguugcccag

SEQ ID NO: 875666 - RNA, 23 nt, Human
gggguuuugccauguugcccagg

SEQ ID NO: 875667 - RNA, 22 nt, Human
ggguuacaggggugagccacca

SEQ ID NO: 875668 - RNA, 24 nt, Human
ggguuacaggggugagccaccaug

SEQ ID NO: 875669 - RNA, 24 nt, Human
gguuacaggggugagccaccaugc

SEQ ID NO: 875670 - RNA, 21 nt, Human
guagaaaugggguuuugccau

SEQ ID NO: 875671 - RNA, 22 nt, Human
guagaaaugggguuuugccaug

SEQ ID NO: 875672 - RNA, 23 nt, Human
guauauuuuuuguagagacagag

SEQ ID NO: 875673 - RNA, 19 nt, Human
gucagccaggcuggagugc

SEQ ID NO: 875674 - RNA, 22 nt, Human
gugagccaccaugcccagccca

SEQ ID NO: 875675 - RNA, 24 nt, Human
gugauccacucgccucgauuuccu

SEQ ID NO: 875676 - RNA, 18 nt, Human
gugaucugccuaccucga

SEQ ID NO: 875677 - RNA, 23 nt, Human
gugccucagcuucccaagaagcu

SEQ ID NO: 875678 - RNA, 19 nt, Human
guggagccugagaauguac

SEQ ID NO: 875679 - RNA, 23 nt, Human
gugguuccugaacuugagugugc

SEQ ID NO: 875680 - RNA, 24 nt, Human
guuuugccauguugcccaggcugg

SEQ ID NO: 875681 - RNA, 23 nt, Human
uaagcagaugagccugacuucau

SEQ ID NO: 875682 - RNA, 22 nt, Human
uaauuuuuguauuuuuuguaga

SEQ ID NO: 875683 - RNA, 22 nt, Human
uacaaaaaguucacacagccag

SEQ ID NO: 875684 - RNA, 24 nt, Human
uacagaugcuucuguucuggagac

SEQ ID NO: 875685 - RNA, 22 nt, Human
uacaggcgggugccaccaugcc

SEQ ID NO: 875686 - RNA, 24 nt, Human
uacaggggugagccaccaugccca

SEQ ID NO: 875687 - RNA, 24 nt, Human
uaccagguacuacagaugguaaaa

SEQ ID NO: 875688 - RNA, 24 nt, Human
uaccucgaccucccaaagugcugg

SEQ ID NO: 875689 - RNA, 25 nt, Human
uacuacagaugcuucuguucuggag

SEQ ID NO: 875690 - RNA, 22 nt, Human
uagaaaugggguuuugccaugu

SEQ ID NO: 875691 - RNA, 20 nt, Human
uagagacagaguuucgccgu

SEQ ID NO: 875692 - RNA, 20 nt, Human
uagcuggacuacaggcgggu

SEQ ID NO: 875693 - RNA, 26 nt, Human
uaggagacggaaucaggaguuaggau

SEQ ID NO: 875694 - RNA, 22 nt, Human
uaggguuacaggggugagccac

SEQ ID NO: 875695 - RNA, 24 nt, Human
uaggguuacaggggugagccacca

SEQ ID NO: 875696 - RNA, 24 nt, Human
uaguucuaaguaauugauugguuu

SEQ ID NO: 875697 - RNA, 33 nt, Human
uauaaaacagggacaucuugcauaccccuaaag

SEQ ID NO: 875698 - RNA, 24 nt, Human
uauacuaaacacuagccacuacuu

SEQ ID NO: 875699 - RNA, 21 nt, Human
uaugcuauaucuuuccaggga

SEQ ID NO: 875700 - RNA, 20 nt, Human
uauuuuuuguagaaaugggg

SEQ ID NO: 875701 - RNA, 21 nt, Human
uauuuuuuguagaaauggggu

SEQ ID NO: 875702 - RNA, 21 nt, Human
ucaaaaagagccagacagaca

SEQ ID NO: 875703 - RNA, 23 nt, Human
ucacugcaaccuccaccuccugg

SEQ ID NO: 875704 - RNA, 24 nt, Human
ucacugcaaccuccaccuccuggg

SEQ ID NO: 875705 - RNA, 25 nt, Human
ucacugcaaccuccaccuccugggu

SEQ ID NO: 875706 - RNA, 27 nt, Human
ucacugcaaccuccaccuccuggguuc

SEQ ID NO: 875707 - RNA, 20 nt, Human
ucagccaggcuggagugcaa

SEQ ID NO: 875708 - RNA, 19 nt, Human
uccagggccagggugcuuc

SEQ ID NO: 875709 - RNA, 26 nt, Human
uccagggccagggugcuucugugagg

SEQ ID NO: 875710 - RNA, 23 nt, Human
ucccaaagugcuggaauuacagg

SEQ ID NO: 875711 - RNA, 24 nt, Human
ucccaagaagcugggauuacaggc

SEQ ID NO: 875712 - RNA, 23 nt, Human
ucccagcucacugcaaccuccac

SEQ ID NO: 875713 - RNA, 27 nt, Human
ucccucauccucccaucucagccucaa

SEQ ID NO: 875714 - RNA, 23 nt, Human
ucccucugggagcugcacucuuc

SEQ ID NO: 875715 - RNA, 25 nt, Human
uccuaaagugcuaggguuacagggg

SEQ ID NO: 875716 - RNA, 20 nt, Human
uccucccaucucagccucaa

SEQ ID NO: 875717 - RNA, 21 nt, Human
uccuggguucaggcaauucuu

SEQ ID NO: 875718 - RNA, 22 nt, Human
uccuggguucaggcaauucuug

SEQ ID NO: 875719 - RNA, 20 nt, Human
ucuaaguaauugauugguuu

SEQ ID NO: 875720 - RNA, 19 nt, Human
ucucacucugucgcccagg

SEQ ID NO: 875721 - RNA, 20 nt, Human
ucucacucugucgcccaggg

SEQ ID NO: 875722 - RNA, 27 nt, Human
ucucacucugucgcccagggugcugga

SEQ ID NO: 875723 - RNA, 23 nt, Human
ucucagccucaaguagcuggacu

SEQ ID NO: 875724 - RNA, 23 nt, Human
ucucgcucugucagccaggcugg

SEQ ID NO: 875725 - RNA, 24 nt, Human
ucucgcucugucagccaggcugga

SEQ ID NO: 875726 - RNA, 24 nt, Human
ucugagguugcaggcauccagggc

SEQ ID NO: 875727 - RNA, 19 nt, Human
ucugucagccaggcuggag

SEQ ID NO: 875728 - RNA, 24 nt, Human
ucugucagccaggcuggagugcaa

SEQ ID NO: 875729 - RNA, 24 nt, Human
ucuuuuuuuuuuagagacagucuc

SEQ ID NO: 875730 - RNA, 24 nt, Human
ugaagaaaaccaagauacaaaaag

SEQ ID NO: 875731 - RNA, 18 nt, Human
ugacuucauagucauaca

SEQ ID NO: 875732 - RNA, 25 nt, Human
ugagaauguacauuucuaacaaguu

SEQ ID NO: 875733 - RNA, 20 nt, Human
ugagacagggucucacucug

SEQ ID NO: 875734 - RNA, 22 nt, Human
ugagacagggucucacucuguc

SEQ ID NO: 875735 - RNA, 25 nt, Human
ugagcacuucauaacuuaaaauucu

SEQ ID NO: 875736 - RNA, 20 nt, Human
ugagcuuaagugauccacuc

SEQ ID NO: 875737 - RNA, 24 nt, Human
ugaucugccuaccucgaccuccca

SEQ ID NO: 875738 - RNA, 18 nt, Human
ugcacucuucugagguug

SEQ ID NO: 875739 - RNA, 22 nt, Human
ugcaguggcgugaucuuggcuc

SEQ ID NO: 875740 - RNA, 24 nt, Human
ugccauguugcccaggcuggccuu

SEQ ID NO: 875741 - RNA, 26 nt, Human
ugccauguugcccaggcuggccuuga

SEQ ID NO: 875742 - RNA, 24 nt, Human
ugcccaggcuggccuugaacuccu

SEQ ID NO: 875743 - RNA, 28 nt, Human
ugcccaggcuggccuugaacuccugagc

SEQ ID NO: 875744 - RNA, 24 nt, Human
ugccucagcuucccaagaagcugg

SEQ ID NO: 875745 - RNA, 24 nt, Human
ugcuggaauuacaggugugagcca

SEQ ID NO: 875746 - RNA, 20 nt, Human
uggaaggcuucuuaaaacac

SEQ ID NO: 875747 - RNA, 18 nt, Human
uggaauuacaggugugag

SEQ ID NO: 875748 - RNA, 19 nt, Human
uggaauuacaggugugagc

SEQ ID NO: 875749 - RNA, 21 nt, Human
uggaauuacaggugugagcca

SEQ ID NO: 875750 - RNA, 22 nt, Human
uggaauuacaggugugagccau

SEQ ID NO: 875751 - RNA, 24 nt, Human
uggaauuacaggugugagccauca

SEQ ID NO: 875752 - RNA, 26 nt, Human
uggaauuacaggugugagccaucacg

SEQ ID NO: 875753 - RNA, 19 nt, Human
uggacuacaggcgggugcc

SEQ ID NO: 875754 - RNA, 23 nt, Human
uggacuacaggcgggugccacca

SEQ ID NO: 875755 - RNA, 19 nt, Human
uggagccugagaauguaca

SEQ ID NO: 875756 - RNA, 19 nt, Human
uggagugcaauggcgcgau

SEQ ID NO: 875757 - RNA, 19 nt, Human
uggagugcaguggcgugau

SEQ ID NO: 875758 - RNA, 23 nt, Human
uggagugcaguggcgugaucuug

SEQ ID NO: 875759 - RNA, 24 nt, Human
uggagugcaguggcgugaucuugg

SEQ ID NO: 875760 - RNA, 24 nt, Human
uggccaggauugucuugaacucuu

SEQ ID NO: 875761 - RNA, 24 nt, Human
uggcgcgaucccagcucacugcaa

SEQ ID NO: 875762 - RNA, 24 nt, Human
uggcuagaauaauaacuagaaauu

SEQ ID NO: 875763 - RNA, 24 nt, Human
uggcucacugcagccccgaccucc

SEQ ID NO: 875764 - RNA, 19 nt, Human
ugggauguguaggcuucau

SEQ ID NO: 875765 - RNA, 19 nt, Human
ugggauuacaggcacauca

SEQ ID NO: 875766 - RNA, 19 nt, Human
ugggauuacaggcacaugc

SEQ ID NO: 875767 - RNA, 21 nt, Human
ugggauuacaggcacaugcua

SEQ ID NO: 875768 - RNA, 23 nt, Human
ugggauuacaggcacaugcuaac

SEQ ID NO: 875769 - RNA, 23 nt, Human
ugggggcugucaaaaagagccag

SEQ ID NO: 875770 - RNA, 24 nt, Human
ugggguuuugccauguugcccagg

SEQ ID NO: 875771 - RNA, 24 nt, Human
uguagaaaugggguuuugccaugu

SEQ ID NO: 875772 - RNA, 22 nt, Human
ugugagccaucacgcccggccc

SEQ ID NO: 875773 - RNA, 23 nt, Human
uucaggcaauucuugugccucag

SEQ ID NO: 875774 - RNA, 18 nt, Human
uucaggcggccugcugug

SEQ ID NO: 875775 - RNA, 18 nt, Human
uucaucuuugccuaguuc

SEQ ID NO: 875776 - RNA, 24 nt, Human
uuccuaaagugcuaggguuacagg

SEQ ID NO: 875777 - RNA, 22 nt, Human
uugagacagggucucacucugu

SEQ ID NO: 875778 - RNA, 21 nt, Human
uuggcuauacuuucaucuuug

SEQ ID NO: 875779 - RNA, 24 nt, Human
uuguagaaaugggguuuugccaug

SEQ ID NO: 875780 - RNA, 22 nt, Human
uuguagagacagaguuucgccg

SEQ ID NO: 875781 - RNA, 22 nt, Human
uuucuauacuaaacacuagcca

SEQ ID NO: 875782 - RNA, 25 nt, Human
uuugaacuuaaucuccacaguaaca

SEQ ID NO: 875783 - RNA, 23 nt, Human
uuuguagaaaugggguuuugcca

SEQ ID NO: 875784 - RNA, 24 nt, Human
uuuguagaaaugggguuuugccau

SEQ ID NO: 875785 - RNA, 24 nt, Human
uuuguagagacagaguuucgccgu

SEQ ID NO: 875786 - RNA, 23 nt, Human
uuuugccauguugcccaggcugg

SEQ ID NO: 875787 - RNA, 18 nt, Human
uuuuuguauuuuuuguag

SEQ ID NO: 875788 - RNA, 24 nt, Human
uuuuuuguagaaaugggguuuugc

SEQ ID NO: 875789 - RNA, 23 nt, Human
uuuuuuguagagacagaguuucg

SEQ ID NO: 875790 - RNA, 24 nt, Human
uuuuuuguagagacagaguuucgc

SEQ ID NO: 875791 - RNA, 23 nt, Human
uuuuuuuuuugagacagggucuc

SEQ ID NO: 875792 - RNA, 20 nt, Human
uuuuuuuuuuugagacaggg

SEQ ID NO: 875793 - RNA, 23 nt, Human
uuuuuuuuuuuugagacaggguc

SEQ ID NO: 875794 - RNA, 26 nt, Human
uuuuuuuuuuuugagacagggucuca

SEQ ID NO: 875795 - RNA, 24 nt, Human
uuuuuuuuuuuuuuugagacaggg

SEQ ID NO: 875796 - RNA, 21 nt, Human
aaaaaaagggaagaaaaaaua

SEQ ID NO: 875797 - RNA, 26 nt, Human
aaaaauacuggggaagaaaacacagc

SEQ ID NO: 875798 - RNA, 19 nt, Human
aaaacaaaauacaagaccu

SEQ ID NO: 875799 - RNA, 26 nt, Human
aaacaagaaauguacaaaggggaccc

SEQ ID NO: 875800 - RNA, 18 nt, Human
aaacagguuugucuccca

SEQ ID NO: 875801 - RNA, 20 nt, Human
aaagcagacccuucagcuug

SEQ ID NO: 875802 - RNA, 19 nt, Human
aaccaacaggcagccagaa

SEQ ID NO: 875803 - RNA, 19 nt, Human
aaccuccccgaaagaaguc

SEQ ID NO: 875804 - RNA, 19 nt, Human
aacguccugcgcugauguc

SEQ ID NO: 875805 - RNA, 21 nt, Human
aagaaaaaauacuggggaaga

SEQ ID NO: 875806 - RNA, 23 nt, Human
aagacaaccaacaggcagccaga

SEQ ID NO: 875807 - RNA, 20 nt, Human
aagagaggcucucuccagga

SEQ ID NO: 875808 - RNA, 21 nt, Human
aagcauauccucccaacauaa

SEQ ID NO: 875809 - RNA, 20 nt, Human
aagccaauccuccaggcugg

SEQ ID NO: 875810 - RNA, 22 nt, Human
aagggcauuuuggcccaaaggc

SEQ ID NO: 875811 - RNA, 22 nt, Human
aagugaacuuuuuugagaacac

SEQ ID NO: 875812 - RNA, 25 nt, Human
aagugacuuuacagaggggaaaaga

SEQ ID NO: 875813 - RNA, 23 nt, Human
aauaaacuuuuuuaucuggauuc

SEQ ID NO: 875814 - RNA, 19 nt, Human
aauggcccaaagacugagg

SEQ ID NO: 875815 - RNA, 21 nt, Human
acacagccuauuaaauccauu

SEQ ID NO: 875816 - RNA, 22 nt, Human
acagaacaccagacuuucagaa

SEQ ID NO: 875817 - RNA, 19 nt, Human
acagaagcaggaggggcag

SEQ ID NO: 875818 - RNA, 20 nt, Human
acagaagcaggaggggcagg

SEQ ID NO: 875819 - RNA, 24 nt, Human
acagcacuguuuggcagcuccuuu

SEQ ID NO: 875820 - RNA, 23 nt, Human
acaggaaaaaaaauagacuuuca

SEQ ID NO: 875821 - RNA, 20 nt, Human
acccauuccuuggugccucc

SEQ ID NO: 875822 - RNA, 22 nt, Human
acgcaagguuuggcaaucucaa

SEQ ID NO: 875823 - RNA, 22 nt, Human
acggggcaggaaaaaaagggaa

SEQ ID NO: 875824 - RNA, 18 nt, Human
acguaacucugauccacc

SEQ ID NO: 875825 - RNA, 18 nt, Human
acucuuggcaccucccuc

SEQ ID NO: 875826 - RNA, 22 nt, Human
acugcagauaagagauagccca

SEQ ID NO: 875827 - RNA, 19 nt, Human
acugcuggggaugcagaag

SEQ ID NO: 875828 - RNA, 20 nt, Human
agaaagcugcugcugauucg

SEQ ID NO: 875829 - RNA, 23 nt, Human
agaacaccagacuuucagaagca

SEQ ID NO: 875830 - RNA, 22 nt, Human
agaagaaagugacuuuacagag

SEQ ID NO: 875831 - RNA, 24 nt, Human
agaagaaagugacuuuacagaggg

SEQ ID NO: 875832 - RNA, 23 nt, Human
agacagugcuaacagcccuggca

SEQ ID NO: 875833 - RNA, 20 nt, Human
agacugcaaggcaaaggaac

SEQ ID NO: 875834 - RNA, 18 nt, Human
agauacagaacaccagac

SEQ ID NO: 875835 - RNA, 21 nt, Human
agcacccaggaaccuuaagag

SEQ ID NO: 875836 - RNA, 23 nt, Human
agcagcacuggugguggauggac

SEQ ID NO: 875837 - RNA, 21 nt, Human
agcaucacccauuccuuggug

SEQ ID NO: 875838 - RNA, 22 nt, Human
agccagaacuacggaaaauaaa

SEQ ID NO: 875839 - RNA, 22 nt, Human
agcccacagaugugcaagugaa

SEQ ID NO: 875840 - RNA, 21 nt, Human
agccuuggcuuccuggggcca

SEQ ID NO: 875841 - RNA, 20 nt, Human
aggaaaaaaagggaagaaaa

SEQ ID NO: 875842 - RNA, 21 nt, Human
aggaaccuuaagagcugcuga

SEQ ID NO: 875843 - RNA, 19 nt, Human
aggaagaggauacagcaca

SEQ ID NO: 875844 - RNA, 20 nt, Human
aggaagaggauacagcacaa

SEQ ID NO: 875845 - RNA, 19 nt, Human
aggaagcacaugcuugaaa

SEQ ID NO: 875846 - RNA, 23 nt, Human
aggagacugcaaggcaaaggaac

SEQ ID NO: 875847 - RNA, 22 nt, Human
aggcagccagaacuacggaaaa

SEQ ID NO: 875848 - RNA, 18 nt, Human
aggcaggacucacccagu

SEQ ID NO: 875849 - RNA, 18 nt, Human
agggcauuuuggcccaaa

SEQ ID NO: 875850 - RNA, 23 nt, Human
agguagauaggaaaacccuccuc

SEQ ID NO: 875851 - RNA, 19 nt, Human
aucagccuauuuugcccuu

SEQ ID NO: 875852 - RNA, 20 nt, Human
auccucuuucuagcaaaagc

SEQ ID NO: 875853 - RNA, 22 nt, Human
augagaaacagaaggugaggag

SEQ ID NO: 875854 - RNA, 22 nt, Human
auguauuggaaaucaaauggcc

SEQ ID NO: 875855 - RNA, 26 nt, Human
auucuuccacccuauguauuggaaau

SEQ ID NO: 875856 - RNA, 23 nt, Human
caacauaagccagauuagccccu

SEQ ID NO: 875857 - RNA, 22 nt, Human
caagacaaccaacaggcagcca

SEQ ID NO: 875858 - RNA, 20 nt, Human
caagacucuggccugggaca

SEQ ID NO: 875859 - RNA, 21 nt, Human
caagagauacuacuguuccau

SEQ ID NO: 875860 - RNA, 23 nt, Human
caagccagauugcccaccuccuc

SEQ ID NO: 875861 - RNA, 21 nt, Human
caagcuugucuguccuccaaa

SEQ ID NO: 875862 - RNA, 22 nt, Human
caaucacugccauuucacaaau

SEQ ID NO: 875863 - RNA, 23 nt, Human
cacagcacccaggaaccuuaagg

SEQ ID NO: 875864 - RNA, 18 nt, Human
cacagccccagauacaga

SEQ ID NO: 875865 - RNA, 19 nt, Human
cacagccccagauacagaa

SEQ ID NO: 875866 - RNA, 23 nt, Human
caccagacuuucagaagcagcaa

SEQ ID NO: 875867 - RNA, 18 nt, Human
cacccauuccuuggugcc

SEQ ID NO: 875868 - RNA, 19 nt, Human
caccccagccuuggcuucc

SEQ ID NO: 875869 - RNA, 20 nt, Human
caccucccucccuccccacc

SEQ ID NO: 875870 - RNA, 22 nt, Human
cacuauccgcaaauggucucca

SEQ ID NO: 875871 - RNA, 18 nt, Human
cacugccaggcugaaaac

SEQ ID NO: 875872 - RNA, 21 nt, Human
cacugggccaagguucggggc

SEQ ID NO: 875873 - RNA, 23 nt, Human
cagaacaccagacuuucagaagc

SEQ ID NO: 875874 - RNA, 18 nt, Human
cagagcgggucucguaag

SEQ ID NO: 875875 - RNA, 18 nt, Human
cagaguggaaugcuucuc

SEQ ID NO: 875876 - RNA, 20 nt, Human
cagaguggaaugcuucucaa

SEQ ID NO: 875877 - RNA, 22 nt, Human
cagauuagccccuggaagcuga

SEQ ID NO: 875878 - RNA, 18 nt, Human
cagcacaacucaagccag

SEQ ID NO: 875879 - RNA, 18 nt, Human
cagccuauuuugcccuuu

SEQ ID NO: 875880 - RNA, 20 nt, Human
cagcuccagaaccacauccc

SEQ ID NO: 875881 - RNA, 21 nt, Human
caggaaaaaaagggaagaaaa

SEQ ID NO: 875882 - RNA, 19 nt, Human
caggaacccacagccccag

SEQ ID NO: 875883 - RNA, 23 nt, Human
caggaacccacagccccagauac

SEQ ID NO: 875884 - RNA, 22 nt, Human
cagggucuccuaugcagguagu

SEQ ID NO: 875885 - RNA, 23 nt, Human
caucccuggcccccauacggccu

SEQ ID NO: 875886 - RNA, 20 nt, Human
cauccuccgaaagcugggga

SEQ ID NO: 875887 - RNA, 24 nt, Human
ccaagacacacucuacuaagcaca

SEQ ID NO: 875888 - RNA, 23 nt, Human
ccacacacugucucuuccauccc

SEQ ID NO: 875889 - RNA, 22 nt, Human
ccacauccucuuucuagcaaaa

SEQ ID NO: 875890 - RNA, 22 nt, Human
ccacuaagggucugaggacaaa

SEQ ID NO: 875891 - RNA, 21 nt, Human
ccagugguaaauccaccucca

SEQ ID NO: 875892 - RNA, 20 nt, Human
ccauuucacaaauuuccagu

SEQ ID NO: 875893 - RNA, 25 nt, Human
cccaaucacugccauuucacaaauu

SEQ ID NO: 875894 - RNA, 24 nt, Human
cccacagccccagauacagaacac

SEQ ID NO: 875895 - RNA, 23 nt, Human
cccagcucuugacaaagggcagg

SEQ ID NO: 875896 - RNA, 24 nt, Human
ccccaaaaucacauucuuccaccc

SEQ ID NO: 875897 - RNA, 20 nt, Human
ccccagauacagaacaccag

SEQ ID NO: 875898 - RNA, 18 nt, Human
cccccgggcccagccgcc

SEQ ID NO: 875899 - RNA, 24 nt, Human
ccccgaaagaagucuggaaauaaa

SEQ ID NO: 875900 - RNA, 22 nt, Human
ccccugcagcauaagggacaga

SEQ ID NO: 875901 - RNA, 19 nt, Human
ccccuggaagcugauacua

SEQ ID NO: 875902 - RNA, 18 nt, Human
cccgccuucuucuucucc

SEQ ID NO: 875903 - RNA, 18 nt, Human
cccgggcccagccgccga

SEQ ID NO: 875904 - RNA, 21 nt, Human
cccuaucuacucuugcagcac

SEQ ID NO: 875905 - RNA, 18 nt, Human
ccgccgacgccgcggccg

SEQ ID NO: 875906 - RNA, 20 nt, Human
ccgccgacgccgcggccgca

SEQ ID NO: 875907 - RNA, 22 nt, Human
ccgccucccauuguaucaccca

SEQ ID NO: 875908 - RNA, 22 nt, Human
ccucaagagauacuacuguucc

SEQ ID NO: 875909 - RNA, 24 nt, Human
ccuccacauccucuuucuagcaaa

SEQ ID NO: 875910 - RNA, 24 nt, Human
ccucccaacauaagccagauuagc

SEQ ID NO: 875911 - RNA, 19 nt, Human
ccucccucccuccccaccc

SEQ ID NO: 875912 - RNA, 18 nt, Human
ccucccuccuccucaucc

SEQ ID NO: 875913 - RNA, 20 nt, Human
ccucuccacaaagcagaccc

SEQ ID NO: 875914 - RNA, 22 nt, Human
ccucugcaaccuacggggcagg

SEQ ID NO: 875915 - RNA, 21 nt, Human
ccucuuaaaacauagaaugaa

SEQ ID NO: 875916 - RNA, 19 nt, Human
ccuggccagagccuucuca

SEQ ID NO: 875917 - RNA, 26 nt, Human
ccuucagcuuggcagcaucacccauu

SEQ ID NO: 875918 - RNA, 18 nt, Human
cgcgccuucaggcgguuc

SEQ ID NO: 875919 - RNA, 18 nt, Human
cgcggcaaagcaccuccc

SEQ ID NO: 875920 - RNA, 19 nt, Human
cgggcccagccgccgacgc

SEQ ID NO: 875921 - RNA, 23 nt, Human
cgggccggaugguguccagcgcc

SEQ ID NO: 875922 - RNA, 26 nt, Human
cgugguggggcgccugccgccgcgcc

SEQ ID NO: 875923 - RNA, 19 nt, Human
cuagacacaggaacccaca

SEQ ID NO: 875924 - RNA, 20 nt, Human
cuauuuugcccuuucugaac

SEQ ID NO: 875925 - RNA, 21 nt, Human
cucaagauuuccugagcagcu

SEQ ID NO: 875926 - RNA, 24 nt, Human
cucacagucacuuaccagauaccu

SEQ ID NO: 875927 - RNA, 21 nt, Human
cucauccuccuccuggucuga

SEQ ID NO: 875928 - RNA, 22 nt, Human
cuccaccguagccccgacuguc

SEQ ID NO: 875929 - RNA, 21 nt, Human
cucccaacauaagccagauua

SEQ ID NO: 875930 - RNA, 23 nt, Human
cucccacugugaacuccaccgua

SEQ ID NO: 875931 - RNA, 20 nt, Human
cucccuccuccucauccucc

SEQ ID NO: 875932 - RNA, 21 nt, Human
cuggcccccauacggccuuuc

SEQ ID NO: 875933 - RNA, 18 nt, Human
cugggccaagguucgggg

SEQ ID NO: 875934 - RNA, 22 nt, Human
cuguuacuuucagagaaaguau

SEQ ID NO: 875935 - RNA, 22 nt, Human
cuucccacagcacccaggaacc

SEQ ID NO: 875936 - RNA, 22 nt, Human
cuugccagccaccagccccccg

SEQ ID NO: 875937 - RNA, 21 nt, Human
gaaaacccuccuaaacaagaa

SEQ ID NO: 875938 - RNA, 20 nt, Human
gacaaacugcagcuucgauc

SEQ ID NO: 875939 - RNA, 19 nt, Human
gacacagccuauuaaaucc

SEQ ID NO: 875940 - RNA, 18 nt, Human
gagaggcucucuccagga

SEQ ID NO: 875941 - RNA, 24 nt, Human
gagcagcacuggugguggauggac

SEQ ID NO: 875942 - RNA, 21 nt, Human
gaggagccaggagauguggag

SEQ ID NO: 875943 - RNA, 24 nt, Human
gaggagccaggagauguggagcaa

SEQ ID NO: 875944 - RNA, 21 nt, Human
gaggaggaaggacagaucagg

SEQ ID NO: 875945 - RNA, 19 nt, Human
gaggaggagcuaccuggaa

SEQ ID NO: 875946 - RNA, 21 nt, Human
gcaaaggaacagaagcaggag

SEQ ID NO: 875947 - RNA, 21 nt, Human
gcacccaggaaccuuaagagc

SEQ ID NO: 875948 - RNA, 18 nt, Human
gcauuacguaacucugau

SEQ ID NO: 875949 - RNA, 19 nt, Human
gccacaaugagaaacagaa

SEQ ID NO: 875950 - RNA, 18 nt, Human
gccacaucaaucgucuca

SEQ ID NO: 875951 - RNA, 22 nt, Human
gcccaaagacugaggugucuuc

SEQ ID NO: 875952 - RNA, 18 nt, Human
gccccgacuguccggagg

SEQ ID NO: 875953 - RNA, 22 nt, Human
gccccgacuguccggaggcgga

SEQ ID NO: 875954 - RNA, 27 nt, Human
gcccuaaagcccacacagggagcagca

SEQ ID NO: 875955 - RNA, 22 nt, Human
gccuuggcuuccuggggccagg

SEQ ID NO: 875956 - RNA, 21 nt, Human
gccuuucucccaagcacauca

SEQ ID NO: 875957 - RNA, 21 nt, Human
gcggcaaagcaccuccccuau

SEQ ID NO: 875958 - RNA, 25 nt, Human
gcuagacacaggaacccacagcccc

SEQ ID NO: 875959 - RNA, 21 nt, Human
gcugagacccuggaagucaga

SEQ ID NO: 875960 - RNA, 19 nt, Human
ggaaaguuccagaaacuac

SEQ ID NO: 875961 - RNA, 19 nt, Human
ggaauggucucuccccucu

SEQ ID NO: 875962 - RNA, 20 nt, Human
ggaaugugaguaacacaaug

SEQ ID NO: 875963 - RNA, 22 nt, Human
ggacgccgccgcccgccuucuu

SEQ ID NO: 875964 - RNA, 19 nt, Human
gggaacaauggcaaugcag

SEQ ID NO: 875965 - RNA, 18 nt, Human
gggaaggaggaggaagga

SEQ ID NO: 875966 - RNA, 23 nt, Human
gggaggagccaggagauguggag

SEQ ID NO: 875967 - RNA, 18 nt, Human
gggcaggacacacuaagg

SEQ ID NO: 875968 - RNA, 19 nt, Human
ggggcaggaaaaaaaggga

SEQ ID NO: 875969 - RNA, 19 nt, Human
ggucuauucccaggagggc

SEQ ID NO: 875970 - RNA, 21 nt, Human
gguucuguuacuuucagagaa

SEQ ID NO: 875971 - RNA, 19 nt, Human
guaaaaccagugguaaauc

SEQ ID NO: 875972 - RNA, 19 nt, Human
guaccgguggggcaggaca

SEQ ID NO: 875973 - RNA, 23 nt, Human
guagauaggaaaacccuccuaaa

SEQ ID NO: 875974 - RNA, 25 nt, Human
gugguggggcgccugccgccgcgcc

SEQ ID NO: 875975 - RNA, 23 nt, Human
guuugucucccacugugaacucc

SEQ ID NO: 875976 - RNA, 19 nt, Human
uaaaaaaacaaaauacaag

SEQ ID NO: 875977 - RNA, 20 nt, Human
uaaaaaaacaaaauacaaga

SEQ ID NO: 875978 - RNA, 22 nt, Human
uaaaaaaacaaaauacaagacc

SEQ ID NO: 875979 - RNA, 25 nt, Human
uaaagcccacacagggagcagcacu

SEQ ID NO: 875980 - RNA, 26 nt, Human
uaacaaggaagaggauacagcacaac

SEQ ID NO: 875981 - RNA, 21 nt, Human
uaacagcccuggcaucuuucu

SEQ ID NO: 875982 - RNA, 23 nt, Human
uaacugcuaucaacaguucagau

SEQ ID NO: 875983 - RNA, 21 nt, Human
uaagagauagcccacuaaugu

SEQ ID NO: 875984 - RNA, 19 nt, Human
uacaagaccugcucuggcc

SEQ ID NO: 875985 - RNA, 25 nt, Human
uacagaacaccagacuuucagaagc

SEQ ID NO: 875986 - RNA, 22 nt, Human
uaccagauaccugggccuuucc

SEQ ID NO: 875987 - RNA, 21 nt, Human
uacuggggaagaaaacacagc

SEQ ID NO: 875988 - RNA, 24 nt, Human
uagaaugaaauaaacucggaucuu

SEQ ID NO: 875989 - RNA, 21 nt, Human
uagauauguucacaaguguuc

SEQ ID NO: 875990 - RNA, 21 nt, Human
uagcccaaaacuucuuucacu

SEQ ID NO: 875991 - RNA, 20 nt, Human
ucaaauggcccaaagacuga

SEQ ID NO: 875992 - RNA, 18 nt, Human
ucacaaguguuccuacug

SEQ ID NO: 875993 - RNA, 21 nt, Human
ucacugacaucauagugacac

SEQ ID NO: 875994 - RNA, 24 nt, Human
ucacuuguuauguccuuuuaccuc

SEQ ID NO: 875995 - RNA, 18 nt, Human
ucagacugcauuacguaa

SEQ ID NO: 875996 - RNA, 21 nt, Human
ucagcuucccacagcacccag

SEQ ID NO: 875997 - RNA, 20 nt, Human
uccaaaaugggaacagaagg

SEQ ID NO: 875998 - RNA, 26 nt, Human
ucccagauaauacucaaauaucaaau

SEQ ID NO: 875999 - RNA, 21 nt, Human
uccccgaaagaagucuggaaa

SEQ ID NO: 876000 - RNA, 18 nt, Human
uccccugcagcauaaggg

SEQ ID NO: 876001 - RNA, 23 nt, Human
ucccucccuccccacccuuucaa

SEQ ID NO: 876002 - RNA, 22 nt, Human
uccggaggcggagaaaugccgg

SEQ ID NO: 876003 - RNA, 20 nt, Human
uccuccaaaaugggaacaga

SEQ ID NO: 876004 - RNA, 19 nt, Human
uccuccucauccuccuccu

SEQ ID NO: 876005 - RNA, 23 nt, Human
uccuccucauccuccuccugguc

SEQ ID NO: 876006 - RNA, 24 nt, Human
ucuagcaaaagcgaacacugcaga

SEQ ID NO: 876007 - RNA, 18 nt, Human
ucuccaccucccuccucc

SEQ ID NO: 876008 - RNA, 19 nt, Human
ucuccagugagacuaaggc

SEQ ID NO: 876009 - RNA, 22 nt, Human
ucuccuccuugccagccaccag

SEQ ID NO: 876010 - RNA, 20 nt, Human
ucuccuuuagaaagcugcug

SEQ ID NO: 876011 - RNA, 25 nt, Human
ucuggccucaagagauacuacuguu

SEQ ID NO: 876012 - RNA, 21 nt, Human
ucuuccaucccuggcccccau

SEQ ID NO: 876013 - RNA, 20 nt, Human
ucuucuucuccuccuugcca

SEQ ID NO: 876014 - RNA, 19 nt, Human
ugaagcgggugaaaucaac

SEQ ID NO: 876015 - RNA, 24 nt, Human
ugagaaagcugccagcauguggca

SEQ ID NO: 876016 - RNA, 19 nt, Human
ugagacuaaggcaagcuaa

SEQ ID NO: 876017 - RNA, 24 nt, Human
ugagacucagaagggaggagccag

SEQ ID NO: 876018 - RNA, 19 nt, Human
ugagaggaggagcuaccug

SEQ ID NO: 876019 - RNA, 23 nt, Human
ugaggagacagugcuaacagccc

SEQ ID NO: 876020 - RNA, 19 nt, Human
ugaggcgcaggacgugcuc

SEQ ID NO: 876021 - RNA, 18 nt, Human
ugauaaggaacccacucc

SEQ ID NO: 876022 - RNA, 21 nt, Human
ugauaaggaacccacuccaca

SEQ ID NO: 876023 - RNA, 22 nt, Human
ugauaaggaacccacuccacag

SEQ ID NO: 876024 - RNA, 24 nt, Human
ugauauguucugugacauggaaug

SEQ ID NO: 876025 - RNA, 26 nt, Human
ugauauguucugugacauggaaugug

SEQ ID NO: 876026 - RNA, 20 nt, Human
ugauucguaagcauauccuc

SEQ ID NO: 876027 - RNA, 26 nt, Human
ugcaaaucccauuugaggagccacaa

SEQ ID NO: 876028 - RNA, 22 nt, Human
ugccaccccagccuuggcuucc

SEQ ID NO: 876029 - RNA, 23 nt, Human
ugccguucgaucauccggaaguu

SEQ ID NO: 876030 - RNA, 22 nt, Human
uggacacaaagacaauaaaaac

SEQ ID NO: 876031 - RNA, 20 nt, Human
uggcaccucccucccucccc

SEQ ID NO: 876032 - RNA, 21 nt, Human
uggcaccucccucccucccca

SEQ ID NO: 876033 - RNA, 23 nt, Human
uggcagcaucacccauuccuugg

SEQ ID NO: 876034 - RNA, 24 nt, Human
uggcagcaucacccauuccuuggu

SEQ ID NO: 876035 - RNA, 19 nt, Human
uggccagagccuucucacc

SEQ ID NO: 876036 - RNA, 23 nt, Human
uggccagagccuucucaccaggc

SEQ ID NO: 876037 - RNA, 19 nt, Human
uggcccaaaggcuguacag

SEQ ID NO: 876038 - RNA, 20 nt, Human
uggcugagacccuggaaguc

SEQ ID NO: 876039 - RNA, 21 nt, Human
ugggaacagaaggcacugcca

SEQ ID NO: 876040 - RNA, 19 nt, Human
uggggaagaaaacacagca

SEQ ID NO: 876041 - RNA, 18 nt, Human
uggggccagguuccagau

SEQ ID NO: 876042 - RNA, 20 nt, Human
ugggggaagcgggaaggagg

SEQ ID NO: 876043 - RNA, 23 nt, Human
uggucagccccaaaaucacauuc

SEQ ID NO: 876044 - RNA, 19 nt, Human
uguagcagauacagugugc

SEQ ID NO: 876045 - RNA, 24 nt, Human
ugucucuuccaucccuggccccca

SEQ ID NO: 876046 - RNA, 19 nt, Human
ugucuguccuccaaaaugg

SEQ ID NO: 876047 - RNA, 19 nt, Human
uuacuuuggacacaaagac

SEQ ID NO: 876048 - RNA, 21 nt, Human
uucccacagcacccaggaacc

SEQ ID NO: 876049 - RNA, 18 nt, Human
uuccuccacauccucuuu

SEQ ID NO: 876050 - RNA, 19 nt, Human
uucguaagcauauccuccc

SEQ ID NO: 876051 - RNA, 18 nt, Human
uucucccaagcacaucag

SEQ ID NO: 876052 - RNA, 20 nt, Human
uuggagaagcuagaagggca

SEQ ID NO: 876053 - RNA, 22 nt, Human
uuuacaggaaaaaaaauagacu

SEQ ID NO: 876054 - RNA, 24 nt, Human
uuucuguggccacacacugucucu

SEQ ID NO: 876055 - RNA, 21 nt, Human
uuuuucagcaaguguucccgg

SEQ ID NO: 876056 - RNA, 21 nt, Human
aaaaacggagaaaaagaggga

SEQ ID NO: 876057 - RNA, 20 nt, Human
aaaagaaaaaagaaaaugca

SEQ ID NO: 876058 - RNA, 18 nt, Human
aaaauuagcugggcgugg

SEQ ID NO: 876059 - RNA, 21 nt, Human
aaacuggcggaggggucagca

SEQ ID NO: 876060 - RNA, 22 nt, Human
aaagaggccaaucuucaaugag

SEQ ID NO: 876061 - RNA, 18 nt, Human
aaagcucuucaacuucuc

SEQ ID NO: 876062 - RNA, 22 nt, Human
aacaucuccuucccgugugcug

SEQ ID NO: 876063 - RNA, 22 nt, Human
aacaugccaaaggacacgaagc

SEQ ID NO: 876064 - RNA, 25 nt, Human
aagaaugagggacuuacagaaaaaa

SEQ ID NO: 876065 - RNA, 20 nt, Human
aagcaacaggcuggggagac

SEQ ID NO: 876066 - RNA, 24 nt, Human
aauuaaugaaaaaacggagaaaaa

SEQ ID NO: 876067 - RNA, 24 nt, Human
aauuacuugaaccugggaggcaga

SEQ ID NO: 876068 - RNA, 24 nt, Human
acagagugagacugugucucaaaa

SEQ ID NO: 876069 - RNA, 24 nt, Human
accccaucucugcuaaaaauacaa

SEQ ID NO: 876070 - RNA, 21 nt, Human
acccugugagacacugcuuca

SEQ ID NO: 876071 - RNA, 23 nt, Human
acucuagccuggugacagaguga

SEQ ID NO: 876072 - RNA, 23 nt, Human
acugcacucuagccuggugacag

SEQ ID NO: 876073 - RNA, 25 nt, Human
acugcacucuagccuggugacagag

SEQ ID NO: 876074 - RNA, 28 nt, Human
acugugucucaaaaaaaaaaaaaaagaa

SEQ ID NO: 876075 - RNA, 18 nt, Human
agaaaagaaaaaagaaaa

SEQ ID NO: 876076 - RNA, 21 nt, Human
agaagcuacagacgaauggaa

SEQ ID NO: 876077 - RNA, 21 nt, Human
agaccgagguggguggaucac

SEQ ID NO: 876078 - RNA, 21 nt, Human
agagaaaggaaagaggccaau

SEQ ID NO: 876079 - RNA, 22 nt, Human
agaggggugcaagcaagcaggu

SEQ ID NO: 876080 - RNA, 22 nt, Human
agagguugcagugagcugagau

SEQ ID NO: 876081 - RNA, 24 nt, Human
agagguugcagugagcugagaucg

SEQ ID NO: 876082 - RNA, 21 nt, Human
agccaagugucuucaagcucu

SEQ ID NO: 876083 - RNA, 23 nt, Human
agccuggugacagagugagacug

SEQ ID NO: 876084 - RNA, 24 nt, Human
agcgcuuugggagaccgagguggg

SEQ ID NO: 876085 - RNA, 23 nt, Human
agcugggcgugguggcacgugcc

SEQ ID NO: 876086 - RNA, 20 nt, Human
aggcagagguugcagugagc

SEQ ID NO: 876087 - RNA, 24 nt, Human
aggcagagguugcagugagcugag

SEQ ID NO: 876088 - RNA, 22 nt, Human
aggcaggagaauuacuugaacc

SEQ ID NO: 876089 - RNA, 24 nt, Human
aggcaggagaauuacuugaaccug

SEQ ID NO: 876090 - RNA, 21 nt, Human
aggcugaggcaggagaauuac

SEQ ID NO: 876091 - RNA, 24 nt, Human
aggcugaggcaggagaauuacuug

SEQ ID NO: 876092 - RNA, 20 nt, Human
aggcuggggagacggggggc

SEQ ID NO: 876093 - RNA, 23 nt, Human
aggcugggucaugccccaacucg

SEQ ID NO: 876094 - RNA, 29 nt, Human
aggggcuaaagaaaacacugggguauucc

SEQ ID NO: 876095 - RNA, 24 nt, Human
aggggucagcaagagagaggaaaa

SEQ ID NO: 876096 - RNA, 18 nt, Human
agucauugagcuugagga

SEQ ID NO: 876097 - RNA, 22 nt, Human
aguggcuaccauauuggacagc

SEQ ID NO: 876098 - RNA, 24 nt, Human
aucgugccacugcacucuagccug

SEQ ID NO: 876099 - RNA, 21 nt, Human
aucucuuuuucuccuccgccu

SEQ ID NO: 876100 - RNA, 23 nt, Human
aucucuuuuucuccuccgccuga

SEQ ID NO: 876101 - RNA, 18 nt, Human
aucugaacaauuuugggg

SEQ ID NO: 876102 - RNA, 24 nt, Human
caaaaaaaaaaaaaaagaaaagaa

SEQ ID NO: 876103 - RNA, 25 nt, Human
caaagacaccagggaauuggagacc

SEQ ID NO: 876104 - RNA, 19 nt, Human
caaagcucaggcuuuuacu

SEQ ID NO: 876105 - RNA, 24 nt, Human
caauguggugaaaccccaucucug

SEQ ID NO: 876106 - RNA, 23 nt, Human
cacaagcagcggcuauuucagcc

SEQ ID NO: 876107 - RNA, 20 nt, Human
cacaauggcacagcauccuc

SEQ ID NO: 876108 - RNA, 24 nt, Human
caccacgcccuccuggucuauguu

SEQ ID NO: 876109 - RNA, 21 nt, Human
cacgaugagacccuggcugcu

SEQ ID NO: 876110 - RNA, 24 nt, Human
cacgccuguaaucccagcgcuuug

SEQ ID NO: 876111 - RNA, 21 nt, Human
cacucuagccuggugacagag

SEQ ID NO: 876112 - RNA, 21 nt, Human
cacucuagccuggugacagag

SEQ ID NO: 876113 - RNA, 23 nt, Human
cacucuagccuggugacagagug

SEQ ID NO: 876114 - RNA, 18 nt, Human
cacugcacucuagccugg

SEQ ID NO: 876115 - RNA, 18 nt, Human
cacugcacucuagccugg

SEQ ID NO: 876116 - RNA, 22 nt, Human
cacugcacucuagccuggugac

SEQ ID NO: 876117 - RNA, 23 nt, Human
cacugcacucuagccuggugaca

SEQ ID NO: 876118 - RNA, 24 nt, Human
cacugcacucuagccuggugacag

SEQ ID NO: 876119 - RNA, 18 nt, Human
cacugcucuugcuuaagc

SEQ ID NO: 876120 - RNA, 22 nt, Human
cagaauuuccuggauauuuaac

SEQ ID NO: 876121 - RNA, 21 nt, Human
cagcaaguucuuccaaagccu

SEQ ID NO: 876122 - RNA, 20 nt, Human
cagccuggauuaccaaugag

SEQ ID NO: 876123 - RNA, 24 nt, Human
cagcgcuuugggagaccgaggugg

SEQ ID NO: 876124 - RNA, 24 nt, Human
cagcuacuugggaggcugaggcag

SEQ ID NO: 876125 - RNA, 18 nt, Human
caggagccaggucagaaa

SEQ ID NO: 876126 - RNA, 19 nt, Human
ccacugcacucuagccugg

SEQ ID NO: 876127 - RNA, 19 nt, Human
ccacugcacucuagccugg

SEQ ID NO: 876128 - RNA, 23 nt, Human
ccacugcacucuagccuggugac

SEQ ID NO: 876129 - RNA, 22 nt, Human
ccuggccaauguggugaaaccc

SEQ ID NO: 876130 - RNA, 23 nt, Human
ccuggccaauguggugaaacccc

SEQ ID NO: 876131 - RNA, 24 nt, Human
ccuggccaauguggugaaacccca

SEQ ID NO: 876132 - RNA, 25 nt, Human
ccugggaggcagagguugcagugag

SEQ ID NO: 876133 - RNA, 22 nt, Human
ccuguaaucccagcgcuuuggg

SEQ ID NO: 876134 - RNA, 18 nt, Human
ccuguagucccagcuacu

SEQ ID NO: 876135 - RNA, 21 nt, Human
ccuguagucccagcuacuugg

SEQ ID NO: 876136 - RNA, 22 nt, Human
ccuguagucccagcuacuuggg

SEQ ID NO: 876137 - RNA, 24 nt, Human
cgagaccauccuggccaauguggu

SEQ ID NO: 876138 - RNA, 20 nt, Human
cgaggaugggggccuaggac

SEQ ID NO: 876139 - RNA, 20 nt, Human
cgaggaugggggccuaggac

SEQ ID NO: 876140 - RNA, 20 nt, Human
cucacgccuguaaucccagc

SEQ ID NO: 876141 - RNA, 24 nt, Human
cucacgccuguaaucccagcgcuu

SEQ ID NO: 876142 - RNA, 23 nt, Human
cucuuuggcagcaaguucuucca

SEQ ID NO: 876143 - RNA, 18 nt, Human
cugaguucuaaagaaaaa

SEQ ID NO: 876144 - RNA, 23 nt, Human
cuuuuaguuucuuugccuuuggg

SEQ ID NO: 876145 - RNA, 22 nt, Human
gaaaggcuucuugaaccucuuu

SEQ ID NO: 876146 - RNA, 24 nt, Human
gacagagugagacugugucucaaa

SEQ ID NO: 876147 - RNA, 20 nt, Human
gacccugugagacacugcuu

SEQ ID NO: 876148 - RNA, 20 nt, Human
gagaagucuccacugcucuu

SEQ ID NO: 876149 - RNA, 23 nt, Human
gagaauuacuugaaccugggagg

SEQ ID NO: 876150 - RNA, 20 nt, Human
gagaucgugccacugcacuc

SEQ ID NO: 876151 - RNA, 18 nt, Human
gaggaugggggccuagga

SEQ ID NO: 876152 - RNA, 23 nt, Human
gagguggguggaucacgagguug

SEQ ID NO: 876153 - RNA, 22 nt, Human
gcaaguucuuccaaagccugga

SEQ ID NO: 876154 - RNA, 23 nt, Human
gcacucuagccuggugacagagu

SEQ ID NO: 876155 - RNA, 24 nt, Human
gccaauguggugaaaccccaucuc

SEQ ID NO: 876156 - RNA, 20 nt, Human
gccacugcacucuagccugg

SEQ ID NO: 876157 - RNA, 20 nt, Human
gcugagaucgugccacugca

SEQ ID NO: 876158 - RNA, 19 nt, Human
gcuuggcgcgguggcucac

SEQ ID NO: 876159 - RNA, 21 nt, Human
ggacagcacuauggguguggu

SEQ ID NO: 876160 - RNA, 21 nt, Human
ggaguauggcaaaccauaggc

SEQ ID NO: 876161 - RNA, 23 nt, Human
ggagugagcagaucuuugccuug

SEQ ID NO: 876162 - RNA, 23 nt, Human
ggccaaucuucaaugagucauuu

SEQ ID NO: 876163 - RNA, 23 nt, Human
ggcgcgguggcucacgccuguaa

SEQ ID NO: 876164 - RNA, 21 nt, Human
ggcucacgccuguaaucccag

SEQ ID NO: 876165 - RNA, 25 nt, Human
gggcaggagccaggucagaaaggga

SEQ ID NO: 876166 - RNA, 19 nt, Human
gggcuaaagaaaacacugg

SEQ ID NO: 876167 - RNA, 23 nt, Human
gguggcucacgccuguaauccca

SEQ ID NO: 876168 - RNA, 24 nt, Human
gguggcucacgccuguaaucccag

SEQ ID NO: 876169 - RNA, 20 nt, Human
guaccagaauuuccuggaua

SEQ ID NO: 876170 - RNA, 21 nt, Human
gucucaaaaaaaaaaaaaaag

SEQ ID NO: 876171 - RNA, 24 nt, Human
guugcagugagcugagaucgugcc

SEQ ID NO: 876172 - RNA, 19 nt, Human
uaaauggggcugugucucu

SEQ ID NO: 876173 - RNA, 19 nt, Human
uaagcagccaugcuugugc

SEQ ID NO: 876174 - RNA, 20 nt, Human
uacagaaaaaaacuauacua

SEQ ID NO: 876175 - RNA, 22 nt, Human
uagcugggcgugguggcacgug

SEQ ID NO: 876176 - RNA, 23 nt, Human
uaggcugggucaugccccaacuc

SEQ ID NO: 876177 - RNA, 19 nt, Human
ucaaaaaaaaaaaaaaaga

SEQ ID NO: 876178 - RNA, 23 nt, Human
ucaaagcucaggcuuuuacuuag

SEQ ID NO: 876179 - RNA, 22 nt, Human
ucaagcucuucaagaagccuca

SEQ ID NO: 876180 - RNA, 20 nt, Human
ucacacacauauauuggggu

SEQ ID NO: 876181 - RNA, 22 nt, Human
ucacgagguugagaucgagacc

SEQ ID NO: 876182 - RNA, 22 nt, Human
ucacgccuguaaucccagcgcu

SEQ ID NO: 876183 - RNA, 22 nt, Human
uccaaugucaucaggaugggcc

SEQ ID NO: 876184 - RNA, 21 nt, Human
uccccagagggcuggguccac

SEQ ID NO: 876185 - RNA, 21 nt, Human
uccuggauauuuaacuaugug

SEQ ID NO: 876186 - RNA, 19 nt, Human
ucuaaagaaaaaugcagac

SEQ ID NO: 876187 - RNA, 23 nt, Human
ucuagccuggugacagagugaga

SEQ ID NO: 876188 - RNA, 19 nt, Human
ucucaaaaaaaaaaaaaaa

SEQ ID NO: 876189 - RNA, 20 nt, Human
ucucaacacgaugagacccu

SEQ ID NO: 876190 - RNA, 21 nt, Human
ucucugcuaaaaauacaaaaa

SEQ ID NO: 876191 - RNA, 23 nt, Human
ucucuugucucuuugagucucca

SEQ ID NO: 876192 - RNA, 22 nt, Human
ucucuuuggcagcaaguucuuc

SEQ ID NO: 876193 - RNA, 25 nt, Human
ucuucaagcucuucaagaagccuca

SEQ ID NO: 876194 - RNA, 18 nt, Human
ucuugggacaccaauggg

SEQ ID NO: 876195 - RNA, 18 nt, Human
ugaaaaaacggagaaaaa

SEQ ID NO: 876196 - RNA, 19 nt, Human
ugaaaaaacggagaaaaag

SEQ ID NO: 876197 - RNA, 24 nt, Human
ugaaccugggaggcagagguugca

SEQ ID NO: 876198 - RNA, 19 nt, Human
ugacaugaaagggugaugc

SEQ ID NO: 876199 - RNA, 22 nt, Human
ugagcugagaucgugccacugc

SEQ ID NO: 876200 - RNA, 21 nt, Human
ugaggaaacugaggcucaaag

SEQ ID NO: 876201 - RNA, 24 nt, Human
ugaggaaacugaggcucaaagaca

SEQ ID NO: 876202 - RNA, 20 nt, Human
ugaggcaggagaauuacuug

SEQ ID NO: 876203 - RNA, 24 nt, Human
ugaggcaggagaauuacuugaacc

SEQ ID NO: 876204 - RNA, 25 nt, Human
ugaggcaggagaauuacuugaaccu

SEQ ID NO: 876205 - RNA, 19 nt, Human
ugagggacuuacagaaaaa

SEQ ID NO: 876206 - RNA, 20 nt, Human
ugcagugugagaaaggcuuc

SEQ ID NO: 876207 - RNA, 18 nt, Human
ugcccuggaccuuggggg

SEQ ID NO: 876208 - RNA, 19 nt, Human
ugcccuggaccuugggggc

SEQ ID NO: 876209 - RNA, 24 nt, Human
ugccuguagucccagcuacuuggg

SEQ ID NO: 876210 - RNA, 19 nt, Human
ugccuuggauccuaaccag

SEQ ID NO: 876211 - RNA, 21 nt, Human
ugccuuggauccuaaccaggu

SEQ ID NO: 876212 - RNA, 21 nt, Human
ugccuuuggggauagaagcua

SEQ ID NO: 876213 - RNA, 23 nt, Human
ugcgaggaugggggccuaggacu

SEQ ID NO: 876214 - RNA, 25 nt, Human
uggaaaugagaauuccugcucucaa

SEQ ID NO: 876215 - RNA, 24 nt, Human
uggccaauguggugaaaccccauc

SEQ ID NO: 876216 - RNA, 22 nt, Human
uggcuaccauauuggacagcac

SEQ ID NO: 876217 - RNA, 22 nt, Human
uggcucacgccuguaaucccag

SEQ ID NO: 876218 - RNA, 23 nt, Human
uggcucacgccuguaaucccagc

SEQ ID NO: 876219 - RNA, 19 nt, Human
ugggagaccgaggugggug

SEQ ID NO: 876220 - RNA, 24 nt, Human
ugggagaccgagguggguggauca

SEQ ID NO: 876221 - RNA, 24 nt, Human
ugggaggcagagguugcagugagc

SEQ ID NO: 876222 - RNA, 19 nt, Human
ugggaggcugaggcaggag

SEQ ID NO: 876223 - RNA, 22 nt, Human
ugggaggcugaggcaggagaau

SEQ ID NO: 876224 - RNA, 23 nt, Human
ugggggaagaagguccugggucg

SEQ ID NO: 876225 - RNA, 21 nt, Human
ugggggccuaggacuauuggg

SEQ ID NO: 876226 - RNA, 18 nt, Human
uggugaaaccccaucucu

SEQ ID NO: 876227 - RNA, 24 nt, Human
ugguggcacgugccuguaguccca

SEQ ID NO: 876228 - RNA, 25 nt, Human
uguaaauggggcugugucucuuuca

SEQ ID NO: 876229 - RNA, 19 nt, Human
uguuauuacauaagaauga

SEQ ID NO: 876230 - RNA, 25 nt, Human
uguucagguacuuguaggugcagcc

SEQ ID NO: 876231 - RNA, 23 nt, Human
uguuccauaucuguaccguccaa

SEQ ID NO: 876232 - RNA, 22 nt, Human
uguuuuauauuagacccuuuca

SEQ ID NO: 876233 - RNA, 21 nt, Human
uuaagcccaugacaacguugg

SEQ ID NO: 876234 - RNA, 24 nt, Human
uuacuugaaccugggaggcagagg

SEQ ID NO: 876235 - RNA, 20 nt, Human
uuagcugggcgugguggcac

SEQ ID NO: 876236 - RNA, 20 nt, Human
uuagcugggcgugguggcac

SEQ ID NO: 876237 - RNA, 24 nt, Human
uuagcugggcgugguggcacgugc

SEQ ID NO: 876238 - RNA, 19 nt, Human
uuauagaaguguuguccaa

SEQ ID NO: 876239 - RNA, 19 nt, Human
uucaauagucacacacaua

SEQ ID NO: 876240 - RNA, 21 nt, Human
uucauuuaaucucuguaauga

SEQ ID NO: 876241 - RNA, 21 nt, Human
uuccuagcuguuuuggauugg

SEQ ID NO: 876242 - RNA, 24 nt, Human
uugaaccugggaggcagagguugc

SEQ ID NO: 876243 - RNA, 18 nt, Human
uugcagugagcugagauc

SEQ ID NO: 876244 - RNA, 22 nt, Human
uugcagugagcugagaucgugc

SEQ ID NO: 876245 - RNA, 23 nt, Human
uugggaggcugaggcaggagaau

SEQ ID NO: 876246 - RNA, 19 nt, Human
uuuugggggaagaaggucc

SEQ ID NO: 876247 - RNA, 21 nt, Human
aaagaaaagucagggcccaag

SEQ ID NO: 876248 - RNA, 23 nt, Human
aagaaggcacaaagguaggagca

SEQ ID NO: 876249 - RNA, 19 nt, Human
aaucucguucucucgucac

SEQ ID NO: 876250 - RNA, 25 nt, Human
acacugaaaacagaggcagagacau

SEQ ID NO: 876251 - RNA, 22 nt, Human
agaggcagagacauguacucug

SEQ ID NO: 876252 - RNA, 19 nt, Human
agccaugagggaaggaccc

SEQ ID NO: 876253 - RNA, 23 nt, Human
agcucguuugcuuucuaggcugg

SEQ ID NO: 876254 - RNA, 19 nt, Human
aggugaaagcaagguagca

SEQ ID NO: 876255 - RNA, 24 nt, Human
caagaaggcacaaagguaggagca

SEQ ID NO: 876256 - RNA, 22 nt, Human
cagaacggcagccccaaggccc

SEQ ID NO: 876257 - RNA, 21 nt, Human
cagagccucaagagccaggag

SEQ ID NO: 876258 - RNA, 22 nt, Human
cagcaccaguggaagcucagcu

SEQ ID NO: 876259 - RNA, 21 nt, Human
cagcagcaccaguggaagcuc

SEQ ID NO: 876260 - RNA, 22 nt, Human
cagcagcaccaguggaagcuca

SEQ ID NO: 876261 - RNA, 19 nt, Human
caucauuuucccuggaacc

SEQ ID NO: 876262 - RNA, 24 nt, Human
ccaaagccacacugaaaacagagg

SEQ ID NO: 876263 - RNA, 27 nt, Human
ccacacugaaaacagaggcagagacau

SEQ ID NO: 876264 - RNA, 23 nt, Human
ccaccugggcugucagccaugag

SEQ ID NO: 876265 - RNA, 21 nt, Human
ccaucucuguaccuucucaca

SEQ ID NO: 876266 - RNA, 19 nt, Human
cccaaggcccggagugucc

SEQ ID NO: 876267 - RNA, 22 nt, Human
cccggaguguccaggggcuucu

SEQ ID NO: 876268 - RNA, 24 nt, Human
cccugccgucucgccuggcgccca

SEQ ID NO: 876269 - RNA, 21 nt, Human
ccgcacacucagaacggcagc

SEQ ID NO: 876270 - RNA, 23 nt, Human
ccuggcagugauccuuuucuuug

SEQ ID NO: 876271 - RNA, 19 nt, Human
cggcagccccaaggcccgg

SEQ ID NO: 876272 - RNA, 21 nt, Human
cuccagagccucaagagccag

SEQ ID NO: 876273 - RNA, 24 nt, Human
cuccagagccucaagagccaggag

SEQ ID NO: 876274 - RNA, 22 nt, Human
cuguggccucaaccucccagac

SEQ ID NO: 876275 - RNA, 21 nt, Human
cuuguguauuggaaaaccugu

SEQ ID NO: 876276 - RNA, 22 nt, Human
gagccccauucccacaggcggg

SEQ ID NO: 876277 - RNA, 19 nt, Human
ggaaaaccuguauggcagu

SEQ ID NO: 876278 - RNA, 20 nt, Human
ggacuaaacuguagcaauuc

SEQ ID NO: 876279 - RNA, 26 nt, Human
ggcccggaguguccaggggcuucugg

SEQ ID NO: 876280 - RNA, 20 nt, Human
ggccucaaccucccagacag

SEQ ID NO: 876281 - RNA, 23 nt, Human
gggcuucuggccugaggugaauc

SEQ ID NO: 876282 - RNA, 24 nt, Human
uacacuguggccucaaccucccag

SEQ ID NO: 876283 - RNA, 21 nt, Human
uaccagucuauacacuguggc

SEQ ID NO: 876284 - RNA, 23 nt, Human
ucaagagccaggagagggcacag

SEQ ID NO: 876285 - RNA, 21 nt, Human
ucagugucucuucugggcucc

SEQ ID NO: 876286 - RNA, 21 nt, Human
uccaaagccacacugaaaaca

SEQ ID NO: 876287 - RNA, 19 nt, Human
uccaggggcuucuggccug

SEQ ID NO: 876288 - RNA, 24 nt, Human
ucccucuugcuuuauagcuagcug

SEQ ID NO: 876289 - RNA, 24 nt, Human
ucucuuguccucagugucucuucu

SEQ ID NO: 876290 - RNA, 23 nt, Human
ucuuuguagccaccugggcuguc

SEQ ID NO: 876291 - RNA, 21 nt, Human
ugaggugaaucugccaggccc

SEQ ID NO: 876292 - RNA, 21 nt, Human
ugauagacucaugauggaaac

SEQ ID NO: 876293 - RNA, 18 nt, Human
ugccaggcccaagaaggc

SEQ ID NO: 876294 - RNA, 19 nt, Human
ugccaggcccaagaaggca

SEQ ID NO: 876295 - RNA, 21 nt, Human
uggaaccuggucacugacuaa

SEQ ID NO: 876296 - RNA, 21 nt, Human
uggcuggagaggugggagcuc

SEQ ID NO: 876297 - RNA, 22 nt, Human
uggugugaucucuuguccucag

SEQ ID NO: 876298 - RNA, 22 nt, Human
uguccaaagccacacugaaaac

SEQ ID NO: 876299 - RNA, 18 nt, Human
uguggccucaaccuccca

SEQ ID NO: 876300 - RNA, 22 nt, Human
uguguauuggaaaaccuguaug

SEQ ID NO: 876301 - RNA, 20 nt, Human
uuccuguccaaagccacacu

SEQ ID NO: 876302 - RNA, 24 nt, Human
uuggaccaccacaugacaucauuu

SEQ ID NO: 876303 - RNA, 25 nt, Human
uuggaccaccacaugacaucauuuu

SEQ ID NO: 876304 - RNA, 22 nt, Human
uuuuuuuuuucauuggggaauu

SEQ ID NO: 876305 - RNA, 23 nt, Human
uuuuuuuuuuuuuuuucauuggg

SEQ ID NO: 876306 - RNA, 24 nt, Human
aaagugcugggauuacaggcguga

SEQ ID NO: 876307 - RNA, 19 nt, Human
aagugcugggauuacaggc

SEQ ID NO: 876308 - RNA, 19 nt, Human
aagugcugggauuacaggc

SEQ ID NO: 876309 - RNA, 26 nt, Human
aagugcugggauuacaggcgugagcc

SEQ ID NO: 876310 - RNA, 20 nt, Human
acaggguuucacccugcuag

SEQ ID NO: 876311 - RNA, 19 nt, Human
acccugcuagccaggaugg

SEQ ID NO: 876312 - RNA, 26 nt, Human
agagaaaaaauuuauguauccuuaau

SEQ ID NO: 876313 - RNA, 18 nt, Human
agugcugggauuacaggc

SEQ ID NO: 876314 - RNA, 24 nt, Human
augauccacccaccucggccuccc

SEQ ID NO: 876315 - RNA, 24 nt, Human
caaagugcugggauuacaggcgug

SEQ ID NO: 876316 - RNA, 22 nt, Human
cacccaccucggccucccaaag

SEQ ID NO: 876317 - RNA, 23 nt, Human
cacccaccucggccucccaaagu

SEQ ID NO: 876318 - RNA, 24 nt, Human
cacccugcuagccaggauggucuc

SEQ ID NO: 876319 - RNA, 24 nt, Human
caccucggccucccaaagugcugg

SEQ ID NO: 876320 - RNA, 22 nt, Human
ccaaagugcugggauuacaggc

SEQ ID NO: 876321 - RNA, 22 nt, Human
ccaaagugcugggauuacaggc

SEQ ID NO: 876322 - RNA, 24 nt, Human
ccaaagugcugggauuacaggcgu

SEQ ID NO: 876323 - RNA, 22 nt, Human
ccugaccucaugauccacccac

SEQ ID NO: 876324 - RNA, 18 nt, Human
cuccugaccucaugaucc

SEQ ID NO: 876325 - RNA, 22 nt, Human
gaccucaugauccacccaccuc

SEQ ID NO: 876326 - RNA, 24 nt, Human
gaccucaugauccacccaccucgg

SEQ ID NO: 876327 - RNA, 18 nt, Human
gauuacaggcgugagcca

SEQ ID NO: 876328 - RNA, 22 nt, Human
gauuacaggcgugagccacugc

SEQ ID NO: 876329 - RNA, 23 nt, Human
gauuacaggcgugagccacugca

SEQ ID NO: 876330 - RNA, 22 nt, Human
gcacauauaccaaauaguuacc

SEQ ID NO: 876331 - RNA, 24 nt, Human
ggauggucucaaucuccugaccuc

SEQ ID NO: 876332 - RNA, 21 nt, Human
uaauauauacauacacauaua

SEQ ID NO: 876333 - RNA, 19 nt, Human
uacaggcgugagccacugc

SEQ ID NO: 876334 - RNA, 23 nt, Human
uacaggcgugagccacugcaccc

SEQ ID NO: 876335 - RNA, 22 nt, Human
uacauacacauauacauauacc

SEQ ID NO: 876336 - RNA, 19 nt, Human
uaguagggacaggguuuca

SEQ ID NO: 876337 - RNA, 23 nt, Human
uaguagggacaggguuucacccu

SEQ ID NO: 876338 - RNA, 21 nt, Human
uauacauauaccaucuugccc

SEQ ID NO: 876339 - RNA, 19 nt, Human
uauauacauacacauauac

SEQ ID NO: 876340 - RNA, 20 nt, Human
uauauacauacacauauaca

SEQ ID NO: 876341 - RNA, 20 nt, Human
uauauacauacacauauaca

SEQ ID NO: 876342 - RNA, 24 nt, Human
uauauacauacacauauacauaua

SEQ ID NO: 876343 - RNA, 23 nt, Human
uauguauccuuaauauauacaua

SEQ ID NO: 876344 - RNA, 24 nt, Human
ucacccugcuagccaggauggucu

SEQ ID NO: 876345 - RNA, 24 nt, Human
ucccaaagugcugggauuacaggc

SEQ ID NO: 876346 - RNA, 18 nt, Human
ucggccucccaaagugcu

SEQ ID NO: 876347 - RNA, 24 nt, Human
ugauccacccaccucggccuccca

SEQ ID NO: 876348 - RNA, 24 nt, Human
ugcugggauuacaggcgugagcca

SEQ ID NO: 876349 - RNA, 18 nt, Human
ugggauuacaggcgugag

SEQ ID NO: 876350 - RNA, 19 nt, Human
ugggauuacaggcgugagc

SEQ ID NO: 876351 - RNA, 21 nt, Human
ugggauuacaggcgugagcca

SEQ ID NO: 876352 - RNA, 22 nt, Human
ugggauuacaggcgugagccac

SEQ ID NO: 876353 - RNA, 22 nt, Human
ugggauuacaggcgugagccac

SEQ ID NO: 876354 - RNA, 24 nt, Human
ugggauuacaggcgugagccacug

SEQ ID NO: 876355 - RNA, 26 nt, Human
ugggauuacaggcgugagccacugca

SEQ ID NO: 876356 - RNA, 18 nt, Human
uuaguagggacaggguuu

SEQ ID NO: 876357 - RNA, 24 nt, Human
uuuuuaguagggacaggguuucac

SEQ ID NO: 876358 - RNA, 21 nt, Human
uuuuuguauuuuuaguaggga

SEQ ID NO: 876359 - RNA, 19 nt, Human
uuuuuuguauuuuuaguag

SEQ ID NO: 876360 - RNA, 24 nt, Human
uuuuuuguauuuuuaguagggaca

SEQ ID NO: 876361 - RNA, 24 nt, Human
uuuuuuuuguauuuuuaguaggga

SEQ ID NO: 876362 - RNA, 25 nt, Human
cagcacaugaucaauuguuugaugu

SEQ ID NO: 876363 - RNA, 26 nt, Human
cagucuagaacauauucugcaaagug

SEQ ID NO: 876364 - RNA, 19 nt, Human
gaauuccuuuacagcacau

SEQ ID NO: 876365 - RNA, 20 nt, Human
gugcuuauaaaacuuagcac

SEQ ID NO: 876366 - RNA, 19 nt, Human
uaauuuuaaauuuuaccac

SEQ ID NO: 876367 - RNA, 24 nt, Human
uacauaguauaaggaaaacuacag

SEQ ID NO: 876368 - RNA, 23 nt, Human
ugacacuaguauuaaauuaaaau

SEQ ID NO: 876369 - RNA, 23 nt, Human
uuaauacugaguuccauaaaaau

SEQ ID NO: 876370 - RNA, 21 nt, Human
uuuuuuuuuuuuuuuacuuaa

SEQ ID NO: 876371 - RNA, 18 nt, Human
aaaugauccaccgauaaa

SEQ ID NO: 876372 - RNA, 24 nt, Human
agccgagccuucggcagggacccg

SEQ ID NO: 876373 - RNA, 22 nt, Human
auguacuuuaaaguacagucau

SEQ ID NO: 876374 - RNA, 26 nt, Human
cccgugccccggcgcgcccaggugag

SEQ ID NO: 876375 - RNA, 21 nt, Human
cgacugcaaagguugccgccc

SEQ ID NO: 876376 - RNA, 24 nt, Human
cgagaaccgcgcugcuccucucuc

SEQ ID NO: 876377 - RNA, 20 nt, Human
cgcgcugcuccucucucuca

SEQ ID NO: 876378 - RNA, 21 nt, Human
cgugcagggcaggcgcgcggg

SEQ ID NO: 876379 - RNA, 20 nt, Human
cguucugcugucccggccga

SEQ ID NO: 876380 - RNA, 18 nt, Human
cucgaaaugauccaccga

SEQ ID NO: 876381 - RNA, 18 nt, Human
gcgcugcuccucucucuc

SEQ ID NO: 876382 - RNA, 21 nt, Human
gggcaggcgcgcgggucuccg

SEQ ID NO: 876383 - RNA, 20 nt, Human
gguggacagaagcagccgag

SEQ ID NO: 876384 - RNA, 22 nt, Human
gucuucauacugcaaacaauca

SEQ ID NO: 876385 - RNA, 19 nt, Human
uccaccgauaaaugaagaa

SEQ ID NO: 876386 - RNA, 24 nt, Human
ucuucauacugcaaacaaucacac

SEQ ID NO: 876387 - RNA, 21 nt, Human
ugaguugcuccagccacugga

SEQ ID NO: 876388 - RNA, 22 nt, Human
uggagcaucauuugggagcgaa

SEQ ID NO: 876389 - RNA, 22 nt, Human
ugucuucauacugcaaacaauc

SEQ ID NO: 876390 - RNA, 18 nt, Human
uuaaaauaaaggugguuu

SEQ ID NO: 876391 - RNA, 24 nt, Human
uucauacugcaaacaaucacacag

SEQ ID NO: 876392 - RNA, 22 nt, Human
uuuuuuuuuuuuuuuuuccuuu

SEQ ID NO: 876393 - RNA, 23 nt, Human
uuuuuuuuuuuuuuuuuuccuuu

SEQ ID NO: 876394 - RNA, 26 nt, Human
uuuuuuuuuuuuuuuuuuuccuuuaa

SEQ ID NO: 876395 - RNA, 19 nt, Human
aaaacauagcaccaaacau

SEQ ID NO: 876396 - RNA, 23 nt, Human
aaacacuagagaaacuucgagcc

SEQ ID NO: 876397 - RNA, 18 nt, Human
aacccaggccucggccca

SEQ ID NO: 876398 - RNA, 21 nt, Human
aagcccucuuugaaaugaccc

SEQ ID NO: 876399 - RNA, 18 nt, Human
acaauauaaaggcaaagc

SEQ ID NO: 876400 - RNA, 24 nt, Human
acaauauaaaggcaaagcaaauuu

SEQ ID NO: 876401 - RNA, 21 nt, Human
acccaggccucggcccaaaau

SEQ ID NO: 876402 - RNA, 19 nt, Human
acguagcagauagaaaacc

SEQ ID NO: 876403 - RNA, 24 nt, Human
agagaaacuucgagccaaaaauac

SEQ ID NO: 876404 - RNA, 22 nt, Human
aggugguggggaucuaccuggu

SEQ ID NO: 876405 - RNA, 20 nt, Human
aucaacuguucccaauaagc

SEQ ID NO: 876406 - RNA, 26 nt, Human
caaaaauacaugcugacuuucuagaa

SEQ ID NO: 876407 - RNA, 19 nt, Human
caagauaaaagccuuugac

SEQ ID NO: 876408 - RNA, 22 nt, Human
caauaccuuuaacuccagacac

SEQ ID NO: 876409 - RNA, 24 nt, Human
cacaaggguuacaauauaaaggca

SEQ ID NO: 876410 - RNA, 20 nt, Human
cacagcaaaugagaaacugc

SEQ ID NO: 876411 - RNA, 25 nt, Human
cacagccucauaagcccucuuugaa

SEQ ID NO: 876412 - RNA, 19 nt, Human
cagaaaacacuagagaaac

SEQ ID NO: 876413 - RNA, 19 nt, Human
cagauguguggaguaugcc

SEQ ID NO: 876414 - RNA, 24 nt, Human
caucuuuggucacagcguuaagag

SEQ ID NO: 876415 - RNA, 23 nt, Human
cauuagacaaaauuauuuaaagu

SEQ ID NO: 876416 - RNA, 22 nt, Human
ccaauaccuuuaacuccagaca

SEQ ID NO: 876417 - RNA, 23 nt, Human
ccccaaccgcgcacuugcugcuu

SEQ ID NO: 876418 - RNA, 23 nt, Human
ccucccgaccucagcccuccaac

SEQ ID NO: 876419 - RNA, 23 nt, Human
ccuuuaacuccagacaccauguu

SEQ ID NO: 876420 - RNA, 21 nt, Human
cgaccucagcccuccaacucc

SEQ ID NO: 876421 - RNA, 19 nt, Human
cuagagcucuguacacacc

SEQ ID NO: 876422 - RNA, 21 nt, Human
cuagagcucuguacacaccac

SEQ ID NO: 876423 - RNA, 24 nt, Human
cucacauggcaacaaucauggauu

SEQ ID NO: 876424 - RNA, 25 nt, Human
cucgcaguggccccaaccgcgcacu

SEQ ID NO: 876425 - RNA, 18 nt, Human
cucucacauggcaacaau

SEQ ID NO: 876426 - RNA, 20 nt, Human
cucuguacacaccacccucc

SEQ ID NO: 876427 - RNA, 24 nt, Human
cugauuuuaaagaaaaaucacaug

SEQ ID NO: 876428 - RNA, 24 nt, Human
gaaaacacuagagaaacuucgagc

SEQ ID NO: 876429 - RNA, 21 nt, Human
gaauuccauguugugauuucu

SEQ ID NO: 876430 - RNA, 18 nt, Human
gcaguggccccaaccgcg

SEQ ID NO: 876431 - RNA, 26 nt, Human
gccccaaccgcgcacuugcugcuugu

SEQ ID NO: 876432 - RNA, 21 nt, Human
gccgaccuccuccaaccgugc

SEQ ID NO: 876433 - RNA, 18 nt, Human
guggaguaugccaauacc

SEQ ID NO: 876434 - RNA, 23 nt, Human
guggaguaugccaauaccuuuaa

SEQ ID NO: 876435 - RNA, 25 nt, Human
uaaaacucucacauggcaacaauca

SEQ ID NO: 876436 - RNA, 22 nt, Human
uaaaagccuugguaaugaccau

SEQ ID NO: 876437 - RNA, 21 nt, Human
uaaccuuuaaaacucucacau

SEQ ID NO: 876438 - RNA, 21 nt, Human
uaagauaaaaaccauuacuug

SEQ ID NO: 876439 - RNA, 22 nt, Human
uaagcgaucacucaagaauggu

SEQ ID NO: 876440 - RNA, 22 nt, Human
uacaauauaaaggcaaagcaaa

SEQ ID NO: 876441 - RNA, 25 nt, Human
uaccuuuaacuccagacaccauguu

SEQ ID NO: 876442 - RNA, 20 nt, Human
uacuacaaacugcuugguua

SEQ ID NO: 876443 - RNA, 25 nt, Human
uaggguccuuuuuacuguagguggu

SEQ ID NO: 876444 - RNA, 19 nt, Human
uauguagcauuagacaaaa

SEQ ID NO: 876445 - RNA, 22 nt, Human
ucccgaccucagcccuccaacu

SEQ ID NO: 876446 - RNA, 24 nt, Human
uccuagagcucuguacacaccacc

SEQ ID NO: 876447 - RNA, 21 nt, Human
ucgcaguggccccaaccgcgc

SEQ ID NO: 876448 - RNA, 24 nt, Human
ucuaaaacggccucgcaguggccc

SEQ ID NO: 876449 - RNA, 18 nt, Human
ucuagaaauaguguaaag

SEQ ID NO: 876450 - RNA, 19 nt, Human
ugaaaugacccauacaaau

SEQ ID NO: 876451 - RNA, 21 nt, Human
ugaaugaguucaaaucacauu

SEQ ID NO: 876452 - RNA, 18 nt, Human
ugagucccuagaacgagc

SEQ ID NO: 876453 - RNA, 22 nt, Human
ugaguuaacucuacuacaaacu

SEQ ID NO: 876454 - RNA, 18 nt, Human
ugaguucaaaucacauuc

SEQ ID NO: 876455 - RNA, 23 nt, Human
uggagucaaaagauuuaucuuca

SEQ ID NO: 876456 - RNA, 21 nt, Human
uggggaucuaccugguucuca

SEQ ID NO: 876457 - RNA, 21 nt, Human
uguacagugagugaacaugaa

SEQ ID NO: 876458 - RNA, 24 nt, Human
uguggaguaugccaauaccuuuaa

SEQ ID NO: 876459 - RNA, 22 nt, Human
uucacauuuuauuuguauugca

SEQ ID NO: 876460 - RNA, 22 nt, Human
uuguaacccaggccucggccca

SEQ ID NO: 876461 - RNA, 27 nt, Human
uuuaggguccuuuuuacuguagguggu

SEQ ID NO: 876462 - RNA, 23 nt, Human
uuuuuuaauuguguauauguagc

SEQ ID NO: 876463 - RNA, 27 nt, Human
uuuuuuuuuuuuuuuuuuuuuuugggg

SEQ ID NO: 876464 - RNA, 18 nt, Human
aauaagccacauacuuag

SEQ ID NO: 876465 - RNA, 18 nt, Human
aaugauccccacagugau

SEQ ID NO: 876466 - RNA, 21 nt, Human
acagugaugaggggucagcac

SEQ ID NO: 876467 - RNA, 19 nt, Human
accagcagcgccgcaggcc

SEQ ID NO: 876468 - RNA, 19 nt, Human
accauaauacaauagaaca

SEQ ID NO: 876469 - RNA, 18 nt, Human
agggcccagucccaccuc

SEQ ID NO: 876470 - RNA, 22 nt, Human
caagcugcuggaacagcugggg

SEQ ID NO: 876471 - RNA, 18 nt, Human
cacacagccucaaccagc

SEQ ID NO: 876472 - RNA, 19 nt, Human
cacagcuccgccucuccuc

SEQ ID NO: 876473 - RNA, 29 nt, Human
cacagcuccgccucuccuccagccccucu

SEQ ID NO: 876474 - RNA, 18 nt, Human
cagaggggcugaggggug

SEQ ID NO: 876475 - RNA, 21 nt, Human
cagcagcgccgcaggcguggc

SEQ ID NO: 876476 - RNA, 19 nt, Human
cagugaugaggggucagca

SEQ ID NO: 876477 - RNA, 18 nt, Human
cauggaauaagccacaua

SEQ ID NO: 876478 - RNA, 21 nt, Human
ccaagacuauuuuccugcgcc

SEQ ID NO: 876479 - RNA, 21 nt, Human
cccacacagccucaaccagca

SEQ ID NO: 876480 - RNA, 27 nt, Human
cccguccccgacccacacagccucaac

SEQ ID NO: 876481 - RNA, 23 nt, Human
cgccagacaagcugcuggaacag

SEQ ID NO: 876482 - RNA, 19 nt, Human
gacaccauaauacaauaga

SEQ ID NO: 876483 - RNA, 19 nt, Human
gaggacagaggggcugagg

SEQ ID NO: 876484 - RNA, 22 nt, Human
gcuccgccucuccuccagcccc

SEQ ID NO: 876485 - RNA, 24 nt, Human
uauuacaaaaauaauuacauggaa

SEQ ID NO: 876486 - RNA, 19 nt, Human
ucccgggggaucuucacac

SEQ ID NO: 876487 - RNA, 19 nt, Human
uccugcgccucaucugccc

SEQ ID NO: 876488 - RNA, 25 nt, Human
ucggacaccauaauacaauagaacc

SEQ ID NO: 876489 - RNA, 24 nt, Human
ugaaauccaugaaaacaguuacau

SEQ ID NO: 876490 - RNA, 20 nt, Human
ugacgccagacaagcugcug

SEQ ID NO: 876491 - RNA, 23 nt, Human
uuacccaucauauuuaacauuuc

SEQ ID NO: 876492 - RNA, 23 nt, Human
uucggacaccauaauacaauaga

SEQ ID NO: 876493 - RNA, 19 nt, Human
aaaaacuaagaacaaaagc

SEQ ID NO: 876494 - RNA, 20 nt, Human
aaaaacuaagaacaaaagca

SEQ ID NO: 876495 - RNA, 20 nt, Human
aaaaacuaagaacaaaagca

SEQ ID NO: 876496 - RNA, 21 nt, Human
aaaacacagggacuggacagc

SEQ ID NO: 876497 - RNA, 19 nt, Human
aaacagaaacacauaguug

SEQ ID NO: 876498 - RNA, 24 nt, Human
aaacagaaacaguaauuucugaau

SEQ ID NO: 876499 - RNA, 20 nt, Human
aaagaacucaauacaaaguc

SEQ ID NO: 876500 - RNA, 21 nt, Human
aaauggaggcaaaggcagccc

SEQ ID NO: 876501 - RNA, 19 nt, Human
aagaggaagggggagagag

SEQ ID NO: 876502 - RNA, 21 nt, Human
aaguugcaccugccaauccca

SEQ ID NO: 876503 - RNA, 21 nt, Human
acacuugccaucucuuacccc

SEQ ID NO: 876504 - RNA, 23 nt, Human
acaugccagagcaaaugaaucca

SEQ ID NO: 876505 - RNA, 22 nt, Human
agacagaccacagaugaaucuu

SEQ ID NO: 876506 - RNA, 18 nt, Human
agagagaaaauaaauucu

SEQ ID NO: 876507 - RNA, 18 nt, Human
agcccagugcaagagguc

SEQ ID NO: 876508 - RNA, 19 nt, Human
agcccagugcaagaggucc

SEQ ID NO: 876509 - RNA, 23 nt, Human
agcuccccugcagcagggcuccg

SEQ ID NO: 876510 - RNA, 19 nt, Human
agggacuggacagcagcag

SEQ ID NO: 876511 - RNA, 25 nt, Human
aguugaauaguacaucuuggcuccc

SEQ ID NO: 876512 - RNA, 23 nt, Human
auggugaugaacagugucauuau

SEQ ID NO: 876513 - RNA, 18 nt, Human
augguuccaugguaugug

SEQ ID NO: 876514 - RNA, 19 nt, Human
augguuccaugguaugugu

SEQ ID NO: 876515 - RNA, 18 nt, Human
caaaaagaacucaauaca

SEQ ID NO: 876516 - RNA, 18 nt, Human
caaaauauuuccugagaa

SEQ ID NO: 876517 - RNA, 21 nt, Human
caaaggcagcccagugcaaga

SEQ ID NO: 876518 - RNA, 21 nt, Human
caaagucaauauaaaaaaauc

SEQ ID NO: 876519 - RNA, 26 nt, Human
caaaugaauccagcuuaaccccuucu

SEQ ID NO: 876520 - RNA, 18 nt, Human
caaccucugacacagccc

SEQ ID NO: 876521 - RNA, 22 nt, Human
caccuauggguucccccuuccu

SEQ ID NO: 876522 - RNA, 18 nt, Human
caccugccaaucccagag

SEQ ID NO: 876523 - RNA, 20 nt, Human
cacuugccaucucuuacccc

SEQ ID NO: 876524 - RNA, 21 nt, Human
cagcaagauggcugauuaccg

SEQ ID NO: 876525 - RNA, 19 nt, Human
cagcaguugccagcguggu

SEQ ID NO: 876526 - RNA, 23 nt, Human
cagcccagugcaagagguccgga

SEQ ID NO: 876527 - RNA, 19 nt, Human
cagugucugcucccccagg

SEQ ID NO: 876528 - RNA, 24 nt, Human
ccacaccuauggguucccccuucc

SEQ ID NO: 876529 - RNA, 21 nt, Human
cccagggccaggggaaagccc

SEQ ID NO: 876530 - RNA, 25 nt, Human
cccccagggccaggggaaagcccac

SEQ ID NO: 876531 - RNA, 19 nt, Human
cccccuuccuucuucucca

SEQ ID NO: 876532 - RNA, 21 nt, Human
ccccugcagcagggcuccgcc

SEQ ID NO: 876533 - RNA, 18 nt, Human
cccuacucucccuucccc

SEQ ID NO: 876534 - RNA, 24 nt, Human
cccuuccuucuucuccagcauguc

SEQ ID NO: 876535 - RNA, 26 nt, Human
cccuuccuucuucuccagcaugucuu

SEQ ID NO: 876536 - RNA, 20 nt, Human
ccuguacuacagcaagaugg

SEQ ID NO: 876537 - RNA, 19 nt, Human
cuauggguucccccuuccu

SEQ ID NO: 876538 - RNA, 19 nt, Human
cucacacuugccaucucuu

SEQ ID NO: 876539 - RNA, 20 nt, Human
cuccccugcagcagggcucc

SEQ ID NO: 876540 - RNA, 21 nt, Human
cuggaaaaagcaagagugaac

SEQ ID NO: 876541 - RNA, 22 nt, Human
cuguguuuaacagacagaccac

SEQ ID NO: 876542 - RNA, 21 nt, Human
gagcuccccugcagcagggcu

SEQ ID NO: 876543 - RNA, 25 nt, Human
gcaaaaacuaagaacaaaagcacca

SEQ ID NO: 876544 - RNA, 24 nt, Human
gcagcaguugccagcgugguuggc

SEQ ID NO: 876545 - RNA, 24 nt, Human
ggauggcuccucugcccacaaccc

SEQ ID NO: 876546 - RNA, 20 nt, Human
gggcuccugaaggagcuccc

SEQ ID NO: 876547 - RNA, 18 nt, Human
guagaguguccauuuucc

SEQ ID NO: 876548 - RNA, 20 nt, Human
gucuccuuuggcagggcagc

SEQ ID NO: 876549 - RNA, 20 nt, Human
guuuggucuccuuuggcagg

SEQ ID NO: 876550 - RNA, 20 nt, Human
guuuguugcagauacaggaa

SEQ ID NO: 876551 - RNA, 24 nt, Human
uaacggcaaaaacuaagaacaaaa

SEQ ID NO: 876552 - RNA, 21 nt, Human
ucagcaacuaagagugggagc

SEQ ID NO: 876553 - RNA, 21 nt, Human
ucagcuguguuuaacagacag

SEQ ID NO: 876554 - RNA, 18 nt, Human
uccaguuugaagggaucu

SEQ ID NO: 876555 - RNA, 22 nt, Human
uccccaaacucuguagaguguc

SEQ ID NO: 876556 - RNA, 22 nt, Human
ucccccagggccaggggaaagc

SEQ ID NO: 876557 - RNA, 19 nt, Human
ucccuacucucccuucccc

SEQ ID NO: 876558 - RNA, 21 nt, Human
ucccuacucucccuuccccaa

SEQ ID NO: 876559 - RNA, 20 nt, Human
uccgccaggauggcuccucu

SEQ ID NO: 876560 - RNA, 24 nt, Human
uccgccaggauggcuccucugccc

SEQ ID NO: 876561 - RNA, 18 nt, Human
uccugcauuuuauuuugu

SEQ ID NO: 876562 - RNA, 24 nt, Human
uccuucuucuccagcaugucuuuu

SEQ ID NO: 876563 - RNA, 20 nt, Human
ucucuuaccccauuucccaa

SEQ ID NO: 876564 - RNA, 22 nt, Human
ucucuuaccccauuucccaaaa

SEQ ID NO: 876565 - RNA, 24 nt, Human
ucugcccacaacccagucaguguc

SEQ ID NO: 876566 - RNA, 20 nt, Human
ugcacagugacgguggucag

SEQ ID NO: 876567 - RNA, 19 nt, Human
uggcagaggcgaugaguug

SEQ ID NO: 876568 - RNA, 21 nt, Human
uggcuccucugcccacaaccc

SEQ ID NO: 876569 - RNA, 18 nt, Human
ugggagaaagaggaaggg

SEQ ID NO: 876570 - RNA, 22 nt, Human
ugguauguguuuuuuauaaaca

SEQ ID NO: 876571 - RNA, 22 nt, Human
uguauccaugacguagcaaccu

SEQ ID NO: 876572 - RNA, 19 nt, Human
uugaagggaucuaacggca

SEQ ID NO: 876573 - RNA, 18 nt, Human
uuggucuccuuuggcagg

SEQ ID NO: 876574 - RNA, 22 nt, Human
uuuaucagcaacuaagaguggg

SEQ ID NO: 876575 - RNA, 23 nt, Human
uuuuuuuuuuuuuaaaggcuuua

SEQ ID NO: 876576 - RNA, 22 nt, Human
uuuuuuuuuuuuuuuuuaaagg

SEQ ID NO: 876577 - RNA, 31 nt, Human
acacagaugaaccaagcagacgaaaccagag

SEQ ID NO: 876578 - RNA, 21 nt, Human
agacgaaaccagauuaggaaa

SEQ ID NO: 876579 - RNA, 21 nt, Human
gaaccaagcagacgaaaccag

SEQ ID NO: 876580 - RNA, 19 nt, Human
uaaacacaaauucuaaaag

SEQ ID NO: 876581 - RNA, 21 nt, Human
ugaaccaagcagacgaaacca

SEQ ID NO: 876582 - RNA, 24 nt, Human
uguuuuguuuuauuuauucacuua

SEQ ID NO: 876583 - RNA, 21 nt, Human
uguuuuguuuuguuuuauuua

SEQ ID NO: 876584 - RNA, 18 nt, Human
uuuguuuuguuuuguuuu

SEQ ID NO: 876585 - RNA, 22 nt, Human
auccuccucaucuccaccccca

SEQ ID NO: 876586 - RNA, 20 nt, Human
caucuccacccccacggagg

SEQ ID NO: 876587 - RNA, 21 nt, Human
cuccucaucuccacccccacg

SEQ ID NO: 876588 - RNA, 24 nt, Human
ggaagaugcuggaggaagacaccc

SEQ ID NO: 876589 - RNA, 19 nt, Human
ucagugcuggggccucuuc

SEQ ID NO: 876590 - RNA, 19 nt, Human
aaaaugaugcauaauuucu

SEQ ID NO: 876591 - RNA, 20 nt, Human
aacuggccuuaagcaaaagu

SEQ ID NO: 876592 - RNA, 25 nt, Human
aagcaaaagucugaaaccuaggccg

SEQ ID NO: 876593 - RNA, 21 nt, Human
acuggccuuaagcaaaagucu

SEQ ID NO: 876594 - RNA, 19 nt, Human
aucaccuuucaucggagug

SEQ ID NO: 876595 - RNA, 24 nt, Human
augggucccaaagaaacuaacacu

SEQ ID NO: 876596 - RNA, 22 nt, Human
caaaagucugaaaccuaggcug

SEQ ID NO: 876597 - RNA, 23 nt, Human
cuggccuuaagcaaaagucugaa

SEQ ID NO: 876598 - RNA, 22 nt, Human
cuucacugcaucaguaguuuua

SEQ ID NO: 876599 - RNA, 20 nt, Human
uaacaaugagaugcgaucaa

SEQ ID NO: 876600 - RNA, 21 nt, Human
uaaccuuuugagaauugcacu

SEQ ID NO: 876601 - RNA, 23 nt, Human
uaagcaaaagucugaaaccuagg

SEQ ID NO: 876602 - RNA, 26 nt, Human
uauagaaaugguuauagauaaugaga

SEQ ID NO: 876603 - RNA, 22 nt, Human
ucaaacauccauauuaucugau

SEQ ID NO: 876604 - RNA, 24 nt, Human
ucagaaagaacuuaacaaucuuuc

SEQ ID NO: 876605 - RNA, 18 nt, Human
ucaggguagauggguccc

SEQ ID NO: 876606 - RNA, 23 nt, Human
uccagcugcguuccuuugccugc

SEQ ID NO: 876607 - RNA, 19 nt, Human
uccugaacuuuccguaguc

SEQ ID NO: 876608 - RNA, 20 nt, Human
uccugaacuuuccguagucc

SEQ ID NO: 876609 - RNA, 23 nt, Human
ucuuccagcugcguuccuuugcc

SEQ ID NO: 876610 - RNA, 24 nt, Human
ucuuccagcugcguuccuuugccu

SEQ ID NO: 876611 - RNA, 25 nt, Human
ucuuccagcugcguuccuuugccug

SEQ ID NO: 876612 - RNA, 20 nt, Human
ugauguggucaggguagaug

SEQ ID NO: 876613 - RNA, 24 nt, Human
uggccuuaagcaaaagucugaaac

SEQ ID NO: 876614 - RNA, 21 nt, Human
uucaaauguaaauauagaaau

SEQ ID NO: 876615 - RNA, 25 nt, Human
uucacugcaucaguaguuuuauucc

SEQ ID NO: 876616 - RNA, 20 nt, Human
uuccuuugccugcaacaggg

SEQ ID NO: 876617 - RNA, 22 nt, Human
uuccuuugccugcaacaggggu

SEQ ID NO: 876618 - RNA, 26 nt, Human
uuugauguccugaacuuuccguaguc

SEQ ID NO: 876619 - RNA, 22 nt, Human
uuuucugaauucacggguuucu

SEQ ID NO: 876620 - RNA, 20 nt, Human
uuuuuuuuuuuuuuuuccac

SEQ ID NO: 876621 - RNA, 27 nt, Human
aaaaaacaggcugagaaaaguggcuca

SEQ ID NO: 876622 - RNA, 18 nt, Human
aaacaaaaaacaggcuga

SEQ ID NO: 876623 - RNA, 24 nt, Human
aaagugcugggauuacaggcauga

SEQ ID NO: 876624 - RNA, 19 nt, Human
aacaaaaaacaggcugaga

SEQ ID NO: 876625 - RNA, 18 nt, Human
aagaaacaaaaaacaggc

SEQ ID NO: 876626 - RNA, 19 nt, Human
aagugcugggauuacaggc

SEQ ID NO: 876627 - RNA, 21 nt, Human
aagugcugggauuacaggcau

SEQ ID NO: 876628 - RNA, 26 nt, Human
aagugcugggauuacaggcaugagcc

SEQ ID NO: 876629 - RNA, 23 nt, Human
aauaagaaacaaaaaacaggcug

SEQ ID NO: 876630 - RNA, 23 nt, Human
aauaauagaaaauaagaaacaaa

SEQ ID NO: 876631 - RNA, 18 nt, Human
acaccaugaauugccuga

SEQ ID NO: 876632 - RNA, 25 nt, Human
acucugucgcccaggcuggagccca

SEQ ID NO: 876633 - RNA, 20 nt, Human
agccaccacaccuggcccca

SEQ ID NO: 876634 - RNA, 20 nt, Human
aguagagacagggauucacc

SEQ ID NO: 876635 - RNA, 18 nt, Human
aguagcugggacuacagg

SEQ ID NO: 876636 - RNA, 19 nt, Human
aguagcugggacuacaggc

SEQ ID NO: 876637 - RNA, 19 nt, Human
aguagcugggacuacaggc

SEQ ID NO: 876638 - RNA, 18 nt, Human
agugcugggauuacaggc

SEQ ID NO: 876639 - RNA, 23 nt, Human
auaauagaaaauaagaaacaaaa

SEQ ID NO: 876640 - RNA, 20 nt, Human
caaaaaacaggcugagaaaa

SEQ ID NO: 876641 - RNA, 24 nt, Human
caaagugcugggauuacaggcaug

SEQ ID NO: 876642 - RNA, 20 nt, Human
cacaccuggccccauccucu

SEQ ID NO: 876643 - RNA, 24 nt, Human
cacccuguuagccaggaaagucuc

SEQ ID NO: 876644 - RNA, 22 nt, Human
cacucugucgcccaggcuggag

SEQ ID NO: 876645 - RNA, 22 nt, Human
caugccauucuccugccucagc

SEQ ID NO: 876646 - RNA, 22 nt, Human
caugcugguuucaaacuccuga

SEQ ID NO: 876647 - RNA, 23 nt, Human
ccaaagugcugggauuacaggca

SEQ ID NO: 876648 - RNA, 24 nt, Human
ccaaagugcugggauuacaggcau

SEQ ID NO: 876649 - RNA, 25 nt, Human
ccacaccuggccccauccucuuaac

SEQ ID NO: 876650 - RNA, 20 nt, Human
ccaugcugguuucaaacucc

SEQ ID NO: 876651 - RNA, 24 nt, Human
cccaaagugcugggauuacaggca

SEQ ID NO: 876652 - RNA, 22 nt, Human
ccgacgugcugggauuacaggu

SEQ ID NO: 876653 - RNA, 24 nt, Human
ccucacagguucaugccauucucc

SEQ ID NO: 876654 - RNA, 19 nt, Human
ccugaccccgugaucugcc

SEQ ID NO: 876655 - RNA, 21 nt, Human
ccugaccucaagugaccuaug

SEQ ID NO: 876656 - RNA, 19 nt, Human
ccuggccccauccucuuaa

SEQ ID NO: 876657 - RNA, 24 nt, Human
cgacgugcugggauuacaggucgg

SEQ ID NO: 876658 - RNA, 23 nt, Human
cgcccaggcuggagcccaguggc

SEQ ID NO: 876659 - RNA, 20 nt, Human
cucaagugaccuaugugccu

SEQ ID NO: 876660 - RNA, 19 nt, Human
cucacaucuguuggccaug

SEQ ID NO: 876661 - RNA, 24 nt, Human
cucacucugucgcccaggcuggag

SEQ ID NO: 876662 - RNA, 24 nt, Human
cuccugaccccgugaucugccugc

SEQ ID NO: 876663 - RNA, 20 nt, Human
cugaagacuuugugacaauc

SEQ ID NO: 876664 - RNA, 23 nt, Human
cugccucggccucccaaagugcu

SEQ ID NO: 876665 - RNA, 23 nt, Human
cuuaacauaaacacuugaauguc

SEQ ID NO: 876666 - RNA, 22 nt, Human
gaccccgugaucugccugccuc

SEQ ID NO: 876667 - RNA, 24 nt, Human
gaccccgugaucugccugccucgg

SEQ ID NO: 876668 - RNA, 24 nt, Human
gacuacaggcgccagccaccaugc

SEQ ID NO: 876669 - RNA, 21 nt, Human
gacucccugcaagcuccgccu

SEQ ID NO: 876670 - RNA, 27 nt, Human
gaguagcugggacuacaggcgccagcc

SEQ ID NO: 876671 - RNA, 21 nt, Human
gauuacaggcaugagccuccg

SEQ ID NO: 876672 - RNA, 24 nt, Human
gauuacaggcaugagccuccgugc

SEQ ID NO: 876673 - RNA, 18 nt, Human
gauuacaggucggagcca

SEQ ID NO: 876674 - RNA, 22 nt, Human
gcaagcuccgccucacagguuc

SEQ ID NO: 876675 - RNA, 23 nt, Human
gcccagcuaauuuuuuguauuuu

SEQ ID NO: 876676 - RNA, 20 nt, Human
gcccaggcuggagcccagug

SEQ ID NO: 876677 - RNA, 23 nt, Human
gcugguuucaaacuccugaccuc

SEQ ID NO: 876678 - RNA, 23 nt, Human
ggauuacaggcaugagccuccgu

SEQ ID NO: 876679 - RNA, 20 nt, Human
uaaaaaguacuggcucaaaa

SEQ ID NO: 876680 - RNA, 21 nt, Human
uaacauaaacacuugaauguc

SEQ ID NO: 876681 - RNA, 24 nt, Human
uaauuuuuuguauuuuuaguagag

SEQ ID NO: 876682 - RNA, 22 nt, Human
uacaggcaugagccuccgugcc

SEQ ID NO: 876683 - RNA, 24 nt, Human
uacaggcgccagccaccaugccca

SEQ ID NO: 876684 - RNA, 22 nt, Human
uacaggucggagccaccacacc

SEQ ID NO: 876685 - RNA, 22 nt, Human
uagagacagggauucacccugu

SEQ ID NO: 876686 - RNA, 23 nt, Human
uaguagagacagggauucacccu

SEQ ID NO: 876687 - RNA, 21 nt, Human
ucaauaaaggcuugaacucaa

SEQ ID NO: 876688 - RNA, 21 nt, Human
ucacagguucaugccauucuc

SEQ ID NO: 876689 - RNA, 24 nt, Human
ucacagguucaugccauucuccug

SEQ ID NO: 876690 - RNA, 24 nt, Human
ucccaaagugcugggauuacaggc

SEQ ID NO: 876691 - RNA, 23 nt, Human
ucccgacgugcugggauuacagg

SEQ ID NO: 876692 - RNA, 24 nt, Human
ucccgacgugcugggauuacaggu

SEQ ID NO: 876693 - RNA, 21 nt, Human
ucccuacaccaugaauugccu

SEQ ID NO: 876694 - RNA, 20 nt, Human
ucccugcaagcuccgccucu

SEQ ID NO: 876695 - RNA, 18 nt, Human
ucggccucccaaagugcu

SEQ ID NO: 876696 - RNA, 23 nt, Human
ucucacucugucgcccaggcugg

SEQ ID NO: 876697 - RNA, 24 nt, Human
ucucacucugucgcccaggcugga

SEQ ID NO: 876698 - RNA, 26 nt, Human
ucucacucugucgcccaggcuggagc

SEQ ID NO: 876699 - RNA, 24 nt, Human
ucuggaguagcugggacuacaggc

SEQ ID NO: 876700 - RNA, 22 nt, Human
ugacugcuugccaaaggcuuug

SEQ ID NO: 876701 - RNA, 24 nt, Human
ugagacagacucucacucugucgc

SEQ ID NO: 876702 - RNA, 24 nt, Human
ugagccuccgugccuggccucaua

SEQ ID NO: 876703 - RNA, 21 nt, Human
ugccucagcaucuggaguagc

SEQ ID NO: 876704 - RNA, 24 nt, Human
ugccucagcaucuggaguagcugg

SEQ ID NO: 876705 - RNA, 21 nt, Human
ugccucggccucccaaagugc

SEQ ID NO: 876706 - RNA, 24 nt, Human
ugccucggccucccaaagugcugg

SEQ ID NO: 876707 - RNA, 22 nt, Human
ugccugauggugaauaaguguu

SEQ ID NO: 876708 - RNA, 21 nt, Human
ugccuuggccucccgacgugc

SEQ ID NO: 876709 - RNA, 22 nt, Human
ugccuuggccucccgacgugcu

SEQ ID NO: 876710 - RNA, 20 nt, Human
ugcugggauuacaggcauga

SEQ ID NO: 876711 - RNA, 24 nt, Human
uggccaugcugguuucaaacuccu

SEQ ID NO: 876712 - RNA, 22 nt, Human
ugggacuacaggcgccagccac

SEQ ID NO: 876713 - RNA, 24 nt, Human
ugggacuacaggcgccagccacca

SEQ ID NO: 876714 - RNA, 25 nt, Human
ugggacuacaggcgccagccaccau

SEQ ID NO: 876715 - RNA, 18 nt, Human
ugggauuacaggcaugag

SEQ ID NO: 876716 - RNA, 19 nt, Human
ugggauuacaggcaugagc

SEQ ID NO: 876717 - RNA, 20 nt, Human
ugggauuacaggcaugagcc

SEQ ID NO: 876718 - RNA, 20 nt, Human
ugggauuacaggcaugagcc

SEQ ID NO: 876719 - RNA, 23 nt, Human
ugggauuacaggcaugagccucc

SEQ ID NO: 876720 - RNA, 24 nt, Human
ugggauuacaggcaugagccuccg

SEQ ID NO: 876721 - RNA, 21 nt, Human
ugggauuacaggucggagcca

SEQ ID NO: 876722 - RNA, 22 nt, Human
ugggauuacaggucggagccac

SEQ ID NO: 876723 - RNA, 24 nt, Human
ugggauuacaggucggagccacca

SEQ ID NO: 876724 - RNA, 21 nt, Human
uggugaauaaguguugacugc

SEQ ID NO: 876725 - RNA, 23 nt, Human
uuaaaaaguacuggcucaaaaaa

SEQ ID NO: 876726 - RNA, 19 nt, Human
uucaugccauucuccugcc

SEQ ID NO: 876727 - RNA, 21 nt, Human
uuuuuguauuuuuaguagaga

SEQ ID NO: 876728 - RNA, 24 nt, Human
uuuuuuguauuuuuaguagagaca

SEQ ID NO: 876729 - RNA, 22 nt, Human
aaaacaucauuauaaaaccccc

SEQ ID NO: 876730 - RNA, 18 nt, Human
aaaacccgagauaaacca

SEQ ID NO: 876731 - RNA, 20 nt, Human
aaagagcagccaauggcaca

SEQ ID NO: 876732 - RNA, 19 nt, Human
aagagcagccaauggcaca

SEQ ID NO: 876733 - RNA, 21 nt, Human
aagcagccuccugagguaggu

SEQ ID NO: 876734 - RNA, 24 nt, Human
aauuuuccuuucauguuauaaggc

SEQ ID NO: 876735 - RNA, 19 nt, Human
acaucauuauaaaaccccc

SEQ ID NO: 876736 - RNA, 20 nt, Human
caagccaaugcacagaaaag

SEQ ID NO: 876737 - RNA, 20 nt, Human
cacuucuugggacggggcuu

SEQ ID NO: 876738 - RNA, 27 nt, Human
cagcaauuagauauaaaaaaaucuuaa

SEQ ID NO: 876739 - RNA, 20 nt, Human
cagcagugcucuacugcggc

SEQ ID NO: 876740 - RNA, 23 nt, Human
cagccuccugagguagguaaccu

SEQ ID NO: 876741 - RNA, 22 nt, Human
cagcucaggaaaagcauuauuu

SEQ ID NO: 876742 - RNA, 22 nt, Human
cccaacuauugcaaguucuaga

SEQ ID NO: 876743 - RNA, 18 nt, Human
ccuacuucccagguucug

SEQ ID NO: 876744 - RNA, 23 nt, Human
cggcacgacagacacccuguuaa

SEQ ID NO: 876745 - RNA, 19 nt, Human
cugcauuugcucucucaca

SEQ ID NO: 876746 - RNA, 20 nt, Human
cugcggcacgacagacaccc

SEQ ID NO: 876747 - RNA, 21 nt, Human
cuucuggcaauaaauuaaggu

SEQ ID NO: 876748 - RNA, 23 nt, Human
gaccugacuuacuuaggaacaua

SEQ ID NO: 876749 - RNA, 19 nt, Human
gagguguggcucuucaagu

SEQ ID NO: 876750 - RNA, 19 nt, Human
gcagccaauggcacaaguc

SEQ ID NO: 876751 - RNA, 20 nt, Human
ggacuagaaagagcagccaa

SEQ ID NO: 876752 - RNA, 21 nt, Human
ggcaggaaauuucuuuugguc

SEQ ID NO: 876753 - RNA, 23 nt, Human
gggaacaaggcaguguucuuuac

SEQ ID NO: 876754 - RNA, 24 nt, Human
gggaacaaggcaguguucuuuacc

SEQ ID NO: 876755 - RNA, 21 nt, Human
ggggcaggaaauuucuuuugg

SEQ ID NO: 876756 - RNA, 26 nt, Human
uaaaacaucauuauaaaacccccccu

SEQ ID NO: 876757 - RNA, 21 nt, Human
uaaaacccccaacuauugcaa

SEQ ID NO: 876758 - RNA, 25 nt, Human
uaaaacccccaacuauugcaaguuc

SEQ ID NO: 876759 - RNA, 18 nt, Human
uaaaacuagaacagaaau

SEQ ID NO: 876760 - RNA, 19 nt, Human
uaaaaguaacugcugaacc

SEQ ID NO: 876761 - RNA, 18 nt, Human
uaaaaugaaggcagcagc

SEQ ID NO: 876762 - RNA, 23 nt, Human
uaacugaagaaaaaacccgagau

SEQ ID NO: 876763 - RNA, 25 nt, Human
uaaggcaacacugggauccagcuca

SEQ ID NO: 876764 - RNA, 23 nt, Human
uacuuaggaacauaaauuuuggg

SEQ ID NO: 876765 - RNA, 21 nt, Human
uagaaagagcagccaauggca

SEQ ID NO: 876766 - RNA, 22 nt, Human
uagaaagagcagccaauggcac

SEQ ID NO: 876767 - RNA, 25 nt, Human
uagaaagagcagccaauggcacaag

SEQ ID NO: 876768 - RNA, 20 nt, Human
ucacuuggggagcuuuaaaa

SEQ ID NO: 876769 - RNA, 21 nt, Human
ucacuuggggagcuuuaaaaa

SEQ ID NO: 876770 - RNA, 20 nt, Human
ucccagguucugacugcauu

SEQ ID NO: 876771 - RNA, 19 nt, Human
uccuggaucccaugcuucu

SEQ ID NO: 876772 - RNA, 19 nt, Human
ucugggaccuacuucccag

SEQ ID NO: 876773 - RNA, 23 nt, Human
ucugggaccuacuucccagguuc

SEQ ID NO: 876774 - RNA, 20 nt, Human
ugacuuacuuaggaacauaa

SEQ ID NO: 876775 - RNA, 21 nt, Human
ugggguuggaggaagcagcag

SEQ ID NO: 876776 - RNA, 20 nt, Human
uguaaacuaguuuacaaagc

SEQ ID NO: 876777 - RNA, 19 nt, Human
ugugcagucaagcgcgagg

SEQ ID NO: 876778 - RNA, 21 nt, Human
uuggggcaggaaauuucuuuu

SEQ ID NO: 876779 - RNA, 24 nt, Human
uuuucuggacucaucagaauguua

SEQ ID NO: 876780 - RNA, 23 nt, Human
aaacaugcaugcuccgaaaagcc

SEQ ID NO: 876781 - RNA, 21 nt, Human
aagcagggcuuaugcagcagc

SEQ ID NO: 876782 - RNA, 28 nt, Human
agcccgccccuccuuccucucuuccccu

SEQ ID NO: 876783 - RNA, 18 nt, Human
aggcugcggugcugcggc

SEQ ID NO: 876784 - RNA, 24 nt, Human
caaaccuaagcccacacucugucc

SEQ ID NO: 876785 - RNA, 22 nt, Human
caaagcccccucuagucccaaa

SEQ ID NO: 876786 - RNA, 20 nt, Human
caagcagggcuuaugcagca

SEQ ID NO: 876787 - RNA, 22 nt, Human
caccauaguugccaaagccccc

SEQ ID NO: 876788 - RNA, 22 nt, Human
cacucuguccccuugcaaguga

SEQ ID NO: 876789 - RNA, 24 nt, Human
cagcccucggucuggccuggcugg

SEQ ID NO: 876790 - RNA, 19 nt, Human
ccaaaccuaagcccacacu

SEQ ID NO: 876791 - RNA, 25 nt, Human
ccauagccggcgcgaggcccaaggc

SEQ ID NO: 876792 - RNA, 19 nt, Human
ccccuccuuccucucuucc

SEQ ID NO: 876793 - RNA, 19 nt, Human
cccgccccuccuuccucuc

SEQ ID NO: 876794 - RNA, 20 nt, Human
cccuccuuccucucuucccc

SEQ ID NO: 876795 - RNA, 20 nt, Human
cccucuagucccaaaccuaa

SEQ ID NO: 876796 - RNA, 22 nt, Human
ccuugccaggagcccgccccuc

SEQ ID NO: 876797 - RNA, 21 nt, Human
cuacuggcggcgacgagcccc

SEQ ID NO: 876798 - RNA, 19 nt, Human
cucgcggaagguauuccuu

SEQ ID NO: 876799 - RNA, 19 nt, Human
gcacggccauagccggcgc

SEQ ID NO: 876800 - RNA, 18 nt, Human
gccggcgcgaggcccaag

SEQ ID NO: 876801 - RNA, 23 nt, Human
gcuauaaacaugcaugcuccgaa

SEQ ID NO: 876802 - RNA, 19 nt, Human
ggcggugcaguccccgcgg

SEQ ID NO: 876803 - RNA, 22 nt, Human
ggucacaaaaacaaccuuaaga

SEQ ID NO: 876804 - RNA, 21 nt, Human
uaagcccacacucuguccccu

SEQ ID NO: 876805 - RNA, 20 nt, Human
uagaacaaugcuccaaagaa

SEQ ID NO: 876806 - RNA, 24 nt, Human
uagccggcgcgaggcccaaggcug

SEQ ID NO: 876807 - RNA, 23 nt, Human
uaguugccaaagcccccucuagu

SEQ ID NO: 876808 - RNA, 19 nt, Human
uccccgcggcagagcagcu

SEQ ID NO: 876809 - RNA, 24 nt, Human
uccccuugcaagugaagaaaugca

SEQ ID NO: 876810 - RNA, 26 nt, Human
uccuuuaacugcagguguuuguugcc

SEQ ID NO: 876811 - RNA, 18 nt, Human
ucgucgggaaucucgguc

SEQ ID NO: 876812 - RNA, 19 nt, Human
ugccaggagcccgccccuc

SEQ ID NO: 876813 - RNA, 22 nt, Human
uuaagagggggugguuuucuuc

SEQ ID NO: 876814 - RNA, 22 nt, Human
uuagaacaaugcuccaaagaac

SEQ ID NO: 876815 - RNA, 25 nt, Human
uuggcacagcaauauguaauuuccc

SEQ ID NO: 876816 - RNA, 18 nt, Human
aagcaccccuccuucccc

SEQ ID NO: 876817 - RNA, 23 nt, Human
aaggagcugucagggauuggagg

SEQ ID NO: 876818 - RNA, 21 nt, Human
acacuaagacgggcccccggg

SEQ ID NO: 876819 - RNA, 21 nt, Human
accccgaggagcccacuccca

SEQ ID NO: 876820 - RNA, 22 nt, Human
aggcgcggaggucgcaggcacc

SEQ ID NO: 876821 - RNA, 20 nt, Human
aggcgggccugggcaggcag

SEQ ID NO: 876822 - RNA, 18 nt, Human
caccagccucccaccgac

SEQ ID NO: 876823 - RNA, 18 nt, Human
caccccuccuuccccgcc

SEQ ID NO: 876824 - RNA, 19 nt, Human
caccccuccuuccccgccg

SEQ ID NO: 876825 - RNA, 20 nt, Human
cagaacacuaagacgggccc

SEQ ID NO: 876826 - RNA, 26 nt, Human
cagcagccccgggagguggccccgag

SEQ ID NO: 876827 - RNA, 23 nt, Human
cagcucccgccgcggcgcgggga

SEQ ID NO: 876828 - RNA, 25 nt, Human
cagcucccgccgcggcgcggggagg

SEQ ID NO: 876829 - RNA, 21 nt, Human
ccagugcgggcugagggucag

SEQ ID NO: 876830 - RNA, 22 nt, Human
ccccaacucagcccaaggagcu

SEQ ID NO: 876831 - RNA, 18 nt, Human
ccccgaggagcccacucc

SEQ ID NO: 876832 - RNA, 19 nt, Human
ccccggcggucgcagggcg

SEQ ID NO: 876833 - RNA, 21 nt, Human
ccccggcggucgcagggcggg

SEQ ID NO: 876834 - RNA, 19 nt, Human
ccccggggcggcccggcuc

SEQ ID NO: 876835 - RNA, 23 nt, Human
ccccggggcggcccggcucugcc

SEQ ID NO: 876836 - RNA, 23 nt, Human
ccccuccccgcuccccuucacca

SEQ ID NO: 876837 - RNA, 18 nt, Human
cccgccgcgcuaccgagc

SEQ ID NO: 876838 - RNA, 19 nt, Human
cccgccgcgcuaccgagcg

SEQ ID NO: 876839 - RNA, 23 nt, Human
cccgccgcgcuaccgagcgcccg

SEQ ID NO: 876840 - RNA, 20 nt, Human
cccggggccgaggcagcgac

SEQ ID NO: 876841 - RNA, 21 nt, Human
ccgccgcgcuaccgagcgccc

SEQ ID NO: 876842 - RNA, 20 nt, Human
ccggggccgaggcagcgacg

SEQ ID NO: 876843 - RNA, 22 nt, Human
ccucugccccuccccgcucccc

SEQ ID NO: 876844 - RNA, 25 nt, Human
ccugaagcaccccuccuuccccgcc

SEQ ID NO: 876845 - RNA, 22 nt, Human
cgcagggcugggcuccagggcg

SEQ ID NO: 876846 - RNA, 21 nt, Human
cgcuaccgagcgcccggcucc

SEQ ID NO: 876847 - RNA, 19 nt, Human
cggcgggaagaggcaggcc

SEQ ID NO: 876848 - RNA, 24 nt, Human
cggcucugcccggggccgaggcag

SEQ ID NO: 876849 - RNA, 21 nt, Human
cgggaagaggcaggccggaga

SEQ ID NO: 876850 - RNA, 18 nt, Human
cgggaggcgcggaggucg

SEQ ID NO: 876851 - RNA, 22 nt, Human
cgggagguggccccgagccccg

SEQ ID NO: 876852 - RNA, 19 nt, Human
cgggccugggcaggcagca

SEQ ID NO: 876853 - RNA, 23 nt, Human
cucccccagcuccaucgcggccc

SEQ ID NO: 876854 - RNA, 25 nt, Human
cucccccagcuccaucgcggccccc

SEQ ID NO: 876855 - RNA, 20 nt, Human
cuccccuucaccagccuccc

SEQ ID NO: 876856 - RNA, 24 nt, Human
cuccccuucaccagccucccaccg

SEQ ID NO: 876857 - RNA, 25 nt, Human
cugcccggggccgaggcagcgacag

SEQ ID NO: 876858 - RNA, 18 nt, Human
cuucaccagccucccacc

SEQ ID NO: 876859 - RNA, 22 nt, Human
gaggagcccacucccagugcgg

SEQ ID NO: 876860 - RNA, 27 nt, Human
gccccgagccccggcggucgcagggcg

SEQ ID NO: 876861 - RNA, 22 nt, Human
ggccggagaggcgggccugggc

SEQ ID NO: 876862 - RNA, 18 nt, Human
ggcggcgggaagaggcag

SEQ ID NO: 876863 - RNA, 18 nt, Human
ggguuccggggaacuccu

SEQ ID NO: 876864 - RNA, 21 nt, Human
ucacaguuacuuuaaucugca

SEQ ID NO: 876865 - RNA, 21 nt, Human
ucagggauuggaggcggcugg

SEQ ID NO: 876866 - RNA, 19 nt, Human
uccagggcggcgggaagag

SEQ ID NO: 876867 - RNA, 21 nt, Human
ucccaccgaccuggcgucccc

SEQ ID NO: 876868 - RNA, 25 nt, Human
uccccgcuccccuucaccagccucc

SEQ ID NO: 876869 - RNA, 19 nt, Human
uccuccggcagaacacuaa

SEQ ID NO: 876870 - RNA, 22 nt, Human
ucgcggccccucgggcacuucc

SEQ ID NO: 876871 - RNA, 28 nt, Human
ucugcggcgcagggcugggcuccagggc

SEQ ID NO: 876872 - RNA, 20 nt, Human
ugccaagcgcccgcggaggc

SEQ ID NO: 876873 - RNA, 22 nt, Human
ugccccuccccgcuccccuuca

SEQ ID NO: 876874 - RNA, 18 nt, Human
ugcccgaccccgaggagc

SEQ ID NO: 876875 - RNA, 20 nt, Human
ugcccggggccgaggcagcc

SEQ ID NO: 876876 - RNA, 18 nt, Human
ugcggcgcagggcugggc

SEQ ID NO: 876877 - RNA, 19 nt, Human
uuacuuuaaucugcacggg

SEQ ID NO: 876878 - RNA, 18 nt, Human
uucacaguuacuuuaauc

SEQ ID NO: 876879 - RNA, 28 nt, Human
aaaaggaauucccuuuagccuucaugaa

SEQ ID NO: 876880 - RNA, 22 nt, Human
aaaggaauucccuuuagccuuc

SEQ ID NO: 876881 - RNA, 23 nt, Human
aaagugcugggauuaagguguga

SEQ ID NO: 876882 - RNA, 25 nt, Human
aagugcugggauuaaggugugagcc

SEQ ID NO: 876883 - RNA, 24 nt, Human
acagaguuucaccaugcuggccag

SEQ ID NO: 876884 - RNA, 24 nt, Human
accaugcuggccaggcuggucucg

SEQ ID NO: 876885 - RNA, 19 nt, Human
acccaggcuggagugcaau

SEQ ID NO: 876886 - RNA, 22 nt, Human
accccuaaguaacaaggacaaa

SEQ ID NO: 876887 - RNA, 19 nt, Human
accuucuucagugcuuauu

SEQ ID NO: 876888 - RNA, 18 nt, Human
agacuggaaaggagcaag

SEQ ID NO: 876889 - RNA, 19 nt, Human
agcaaggagguacuggacu

SEQ ID NO: 876890 - RNA, 22 nt, Human
agcuauguaggcagugaaacca

SEQ ID NO: 876891 - RNA, 21 nt, Human
aggacagaagacuggaaagga

SEQ ID NO: 876892 - RNA, 21 nt, Human
aggcagugaaaccaaaaagac

SEQ ID NO: 876893 - RNA, 20 nt, Human
aggugugagccaccgcgccc

SEQ ID NO: 876894 - RNA, 26 nt, Human
aguaacaaggacaaaaucaaaaggaa

SEQ ID NO: 876895 - RNA, 22 nt, Human
aguagagacagaguuucaccau

SEQ ID NO: 876896 - RNA, 24 nt, Human
agugcaauggcacgaucuuggcuc

SEQ ID NO: 876897 - RNA, 23 nt, Human
caaagugcugggauuaaggugug

SEQ ID NO: 876898 - RNA, 21 nt, Human
caacucuaccauccuuauccc

SEQ ID NO: 876899 - RNA, 22 nt, Human
caagccauucuccugccucagc

SEQ ID NO: 876900 - RNA, 22 nt, Human
caaggaagacccauaaaucuca

SEQ ID NO: 876901 - RNA, 21 nt, Human
caccaugcuggccaggcuggu

SEQ ID NO: 876902 - RNA, 24 nt, Human
caccaugcuggccaggcuggucuc

SEQ ID NO: 876903 - RNA, 27 nt, Human
caccaugcuggccaggcuggucucgaa

SEQ ID NO: 876904 - RNA, 24 nt, Human
cagaguuucaccaugcuggccagg

SEQ ID NO: 876905 - RNA, 20 nt, Human
cagccuccugaguagcaggg

SEQ ID NO: 876906 - RNA, 28 nt, Human
cagcuccauggaagaagggacuguagag

SEQ ID NO: 876907 - RNA, 18 nt, Human
caugcuccaacaaugcgg

SEQ ID NO: 876908 - RNA, 24 nt, Human
caugcuggccaggcuggucucgaa

SEQ ID NO: 876909 - RNA, 20 nt, Human
ccaaagugcugggauuaagg

SEQ ID NO: 876910 - RNA, 23 nt, Human
ccaaagugcugggauuaaggugu

SEQ ID NO: 876911 - RNA, 23 nt, Human
ccaggacagaagacuggaaagga

SEQ ID NO: 876912 - RNA, 20 nt, Human
ccaggagggaagaugggaaa

SEQ ID NO: 876913 - RNA, 18 nt, Human
ccucccaggacagaagac

SEQ ID NO: 876914 - RNA, 23 nt, Human
ccugaccccuaaguaacaaggac

SEQ ID NO: 876915 - RNA, 23 nt, Human
ccugccucagccuccugaguagc

SEQ ID NO: 876916 - RNA, 21 nt, Human
ccuugugauuugccuuccuca

SEQ ID NO: 876917 - RNA, 22 nt, Human
ccuugugauuugccuuccucag

SEQ ID NO: 876918 - RNA, 21 nt, Human
cgcccggccaugccauucauu

SEQ ID NO: 876919 - RNA, 24 nt, Human
cgcucugucacccaggcuggagug

SEQ ID NO: 876920 - RNA, 18 nt, Human
cuagucucuaaguuuucu

SEQ ID NO: 876921 - RNA, 23 nt, Human
cucagccucccaggacagaagac

SEQ ID NO: 876922 - RNA, 22 nt, Human
cuccugaccuugugauuugccu

SEQ ID NO: 876923 - RNA, 24 nt, Human
cucgcucugucacccaggcuggag

SEQ ID NO: 876924 - RNA, 22 nt, Human
cucuaccauccuuaucccugac

SEQ ID NO: 876925 - RNA, 25 nt, Human
cucugucacccaggcuggagugcaa

SEQ ID NO: 876926 - RNA, 20 nt, Human
cugauuccauuaacuggacu

SEQ ID NO: 876927 - RNA, 24 nt, Human
cugcaaccuccaucugcuggguuc

SEQ ID NO: 876928 - RNA, 22 nt, Human
cugccucagccuccugaguagc

SEQ ID NO: 876929 - RNA, 23 nt, Human
cuuaucccugaccccuaaguaac

SEQ ID NO: 876930 - RNA, 24 nt, Human
gaagacccauaaaucucagccucc

SEQ ID NO: 876931 - RNA, 18 nt, Human
gacaaugguccugaucua

SEQ ID NO: 876932 - RNA, 24 nt, Human
gaccuugugauuugccuuccucag

SEQ ID NO: 876933 - RNA, 20 nt, Human
gagacagaguuucaccaugc

SEQ ID NO: 876934 - RNA, 23 nt, Human
gagcagaaacaucacugcuuccu

SEQ ID NO: 876935 - RNA, 22 nt, Human
gaggagaggguuuacacuuggg

SEQ ID NO: 876936 - RNA, 20 nt, Human
gcagugaaaccaaaaagacc

SEQ ID NO: 876937 - RNA, 19 nt, Human
gcuggagugcaauggcacg

SEQ ID NO: 876938 - RNA, 23 nt, Human
ggaguuacaaggucccaaccucc

SEQ ID NO: 876939 - RNA, 23 nt, Human
ggcuggucucgaacuccugaccu

SEQ ID NO: 876940 - RNA, 20 nt, Human
ggucucgaacuccugaccuu

SEQ ID NO: 876941 - RNA, 24 nt, Human
gugauuugccuuccucagccuccc

SEQ ID NO: 876942 - RNA, 23 nt, Human
guuuagggcuaguuucuggaucc

SEQ ID NO: 876943 - RNA, 21 nt, Human
uaacaaggacaaaaucaaaag

SEQ ID NO: 876944 - RNA, 24 nt, Human
uaacaaggacaaaaucaaaaggaa

SEQ ID NO: 876945 - RNA, 23 nt, Human
uaaguuuucuaacaccucccaua

SEQ ID NO: 876946 - RNA, 23 nt, Human
uaauuuuuuuauuuuuaguagag

SEQ ID NO: 876947 - RNA, 24 nt, Human
uaauuuuuuuauuuuuaguagaga

SEQ ID NO: 876948 - RNA, 18 nt, Human
uagcagggacuacacgua

SEQ ID NO: 876949 - RNA, 24 nt, Human
uaguagagacagaguuucaccaug

SEQ ID NO: 876950 - RNA, 26 nt, Human
uaguagagacagaguuucaccaugcu

SEQ ID NO: 876951 - RNA, 25 nt, Human
ucaagccauucuccugccucagccu

SEQ ID NO: 876952 - RNA, 18 nt, Human
ucacccaggcuggagugc

SEQ ID NO: 876953 - RNA, 18 nt, Human
ucacugcaaccuccaucu

SEQ ID NO: 876954 - RNA, 19 nt, Human
ucacugcaaccuccaucug

SEQ ID NO: 876955 - RNA, 24 nt, Human
ucacugcaaccuccaucugcuggg

SEQ ID NO: 876956 - RNA, 22 nt, Human
ucccaaagugcugggauuaagg

SEQ ID NO: 876957 - RNA, 20 nt, Human
ucccauaccaaagcacugcg

SEQ ID NO: 876958 - RNA, 23 nt, Human
ucccugaccccuaaguaacaagg

SEQ ID NO: 876959 - RNA, 24 nt, Human
ucgcucugucacccaggcuggagu

SEQ ID NO: 876960 - RNA, 19 nt, Human
ucuaacaccucccauacca

SEQ ID NO: 876961 - RNA, 19 nt, Human
ucuaaguuuucuaacaccu

SEQ ID NO: 876962 - RNA, 21 nt, Human
ucuaccauccuuaucccugac

SEQ ID NO: 876963 - RNA, 24 nt, Human
ucuccugccucagccuccugagua

SEQ ID NO: 876964 - RNA, 19 nt, Human
ucucgaacuccugaccuug

SEQ ID NO: 876965 - RNA, 19 nt, Human
ucucgcucugucacccagg

SEQ ID NO: 876966 - RNA, 23 nt, Human
ucucgcucugucacccaggcugg

SEQ ID NO: 876967 - RNA, 24 nt, Human
ucucgcucugucacccaggcugga

SEQ ID NO: 876968 - RNA, 26 nt, Human
ucucgcucugucacccaggcuggagu

SEQ ID NO: 876969 - RNA, 27 nt, Human
ucucgcucugucacccaggcuggagug

SEQ ID NO: 876970 - RNA, 18 nt, Human
ucugcuggguucaagcca

SEQ ID NO: 876971 - RNA, 24 nt, Human
ucugucacccaggcuggagugcaa

SEQ ID NO: 876972 - RNA, 18 nt, Human
ugagacagagucucgcuc

SEQ ID NO: 876973 - RNA, 22 nt, Human
ugagacagagucucgcucuguc

SEQ ID NO: 876974 - RNA, 23 nt, Human
ugccucagccuccugaguagcag

SEQ ID NO: 876975 - RNA, 21 nt, Human
ugccuuccucagccucccaaa

SEQ ID NO: 876976 - RNA, 18 nt, Human
ugcuggccaggcuggucu

SEQ ID NO: 876977 - RNA, 24 nt, Human
ugcuggguucaagccauucuccug

SEQ ID NO: 876978 - RNA, 23 nt, Human
uggagugcaauggcacgaucuug

SEQ ID NO: 876979 - RNA, 24 nt, Human
uggagugcaauggcacgaucuugg

SEQ ID NO: 876980 - RNA, 24 nt, Human
uggccaggcuggucucgaacuccu

SEQ ID NO: 876981 - RNA, 19 nt, Human
uggcucacugcaaccucca

SEQ ID NO: 876982 - RNA, 18 nt, Human
ugggauuaaggugugagc

SEQ ID NO: 876983 - RNA, 21 nt, Human
ugggauuaaggugugagccac

SEQ ID NO: 876984 - RNA, 22 nt, Human
ugggauuaaggugugagccacc

SEQ ID NO: 876985 - RNA, 23 nt, Human
ugggauuaaggugugagccaccg

SEQ ID NO: 876986 - RNA, 21 nt, Human
uggggugggugcggggguucc

SEQ ID NO: 876987 - RNA, 20 nt, Human
ugucacccaggcuggagugc

SEQ ID NO: 876988 - RNA, 24 nt, Human
uuaguagagacagaguuucaccau

SEQ ID NO: 876989 - RNA, 18 nt, Human
uucaagccauucuccugc

SEQ ID NO: 876990 - RNA, 21 nt, Human
uucaagccauucuccugccuc

SEQ ID NO: 876991 - RNA, 22 nt, Human
uucauuuucccaggagggaaga

SEQ ID NO: 876992 - RNA, 23 nt, Human
uucauuuucccaggagggaagau

SEQ ID NO: 876993 - RNA, 21 nt, Human
uuccucagccucccaaagugc

SEQ ID NO: 876994 - RNA, 23 nt, Human
uuccucagccucccaaagugcug

SEQ ID NO: 876995 - RNA, 24 nt, Human
uuccucagccucccaaagugcugg

SEQ ID NO: 876996 - RNA, 21 nt, Human
uuucaccaugcuggccaggcu

SEQ ID NO: 876997 - RNA, 20 nt, Human
uuuucugacaaugguccuga

SEQ ID NO: 876998 - RNA, 24 nt, Human
uuuuuaguagagacagaguuucac

SEQ ID NO: 876999 - RNA, 22 nt, Human
uuuuuuauuuuuaguagagaca

SEQ ID NO: 877000 - RNA, 20 nt, Human
uuuuuuuuuuugagacagag

SEQ ID NO: 877001 - RNA, 25 nt, Human
uuuuuuuuuuuugagacagagucuc

SEQ ID NO: 877002 - RNA, 18 nt, Human
uuuuuuuuuuuuuuuuug

SEQ ID NO: 877003 - RNA, 22 nt, Human
aaacaaacaggagccacuuuug

SEQ ID NO: 877004 - RNA, 18 nt, Human
aaagcauuuucauagacu

SEQ ID NO: 877005 - RNA, 18 nt, Human
aaauucacuucauaacaa

SEQ ID NO: 877006 - RNA, 23 nt, Human
aaccugccaaggacaaccuccgg

SEQ ID NO: 877007 - RNA, 24 nt, Human
acagaacagagaaaccgcugguac

SEQ ID NO: 877008 - RNA, 22 nt, Human
acaucagagggaauguccugaa

SEQ ID NO: 877009 - RNA, 23 nt, Human
accgccgucaccaccgcugccgg

SEQ ID NO: 877010 - RNA, 24 nt, Human
acgguaaucaagguuccaggcauc

SEQ ID NO: 877011 - RNA, 19 nt, Human
agaacagagaaaccgcugg

SEQ ID NO: 877012 - RNA, 18 nt, Human
agaggcagaaugaagcag

SEQ ID NO: 877013 - RNA, 21 nt, Human
agauuaaccuuuaauuacacc

SEQ ID NO: 877014 - RNA, 23 nt, Human
agcuaaauuuaagaaacaacccu

SEQ ID NO: 877015 - RNA, 18 nt, Human
aggcaggaugugcuggcu

SEQ ID NO: 877016 - RNA, 20 nt, Human
agugaaaucuuuaaaaagau

SEQ ID NO: 877017 - RNA, 25 nt, Human
auaaagcauuuucauagacuuaaaa

SEQ ID NO: 877018 - RNA, 22 nt, Human
aucaccaaugaaaaaauaaagc

SEQ ID NO: 877019 - RNA, 21 nt, Human
augaagcagucuucaaacagu

SEQ ID NO: 877020 - RNA, 27 nt, Human
auuucugcccuuuuuuuuguuuuguaa

SEQ ID NO: 877021 - RNA, 18 nt, Human
auuugaggacaauguuuu

SEQ ID NO: 877022 - RNA, 22 nt, Human
caaaaauaaaaccaaucaucau

SEQ ID NO: 877023 - RNA, 22 nt, Human
cacacccccacacaggccgccc

SEQ ID NO: 877024 - RNA, 20 nt, Human
caccgcggcucacaccccca

SEQ ID NO: 877025 - RNA, 22 nt, Human
cagaaugaagcagucuucaaac

SEQ ID NO: 877026 - RNA, 20 nt, Human
cagccaggcugcaacagcag

SEQ ID NO: 877027 - RNA, 22 nt, Human
caggcugcaacagcaggcagga

SEQ ID NO: 877028 - RNA, 25 nt, Human
caucaucaaacaaacaggagccaac

SEQ ID NO: 877029 - RNA, 18 nt, Human
ccagccaggcugcaacag

SEQ ID NO: 877030 - RNA, 22 nt, Human
ccccacacaggccgcccagucc

SEQ ID NO: 877031 - RNA, 21 nt, Human
ccgccgucaccaccgcugccg

SEQ ID NO: 877032 - RNA, 23 nt, Human
cggccggccgcgcggcuuccccu

SEQ ID NO: 877033 - RNA, 24 nt, Human
cggcgcagccuugggcaccgcggc

SEQ ID NO: 877034 - RNA, 18 nt, Human
cugguacuagaggcagaa

SEQ ID NO: 877035 - RNA, 22 nt, Human
cuuuaaagaacauuauuugagg

SEQ ID NO: 877036 - RNA, 24 nt, Human
gaaaaccugccaaggacaaccucc

SEQ ID NO: 877037 - RNA, 25 nt, Human
gagcauucggggcugaagccguucg

SEQ ID NO: 877038 - RNA, 19 nt, Human
ggccgaguagcuccagccc

SEQ ID NO: 877039 - RNA, 22 nt, Human
ggugauuucugcccuuuuuuuu

SEQ ID NO: 877040 - RNA, 18 nt, Human
guccagugggagaugcga

SEQ ID NO: 877041 - RNA, 20 nt, Human
guccugaaaggaaugaguug

SEQ ID NO: 877042 - RNA, 22 nt, Human
uaaaaaagccuuacauggucag

SEQ ID NO: 877043 - RNA, 18 nt, Human
uaaaauacuucuacaaca

SEQ ID NO: 877044 - RNA, 18 nt, Human
uaaagaacauuauuugag

SEQ ID NO: 877045 - RNA, 24 nt, Human
uaaagcauuuucauagacuuaaaa

SEQ ID NO: 877046 - RNA, 18 nt, Human
uaaauuuaagaaacaacc

SEQ ID NO: 877047 - RNA, 24 nt, Human
uaacaugagcuaaauuuaagaaac

SEQ ID NO: 877048 - RNA, 19 nt, Human
uaagaaacaacccuagucu

SEQ ID NO: 877049 - RNA, 19 nt, Human
uaagaaagagguuccuuca

SEQ ID NO: 877050 - RNA, 20 nt, Human
ucacagaacagagaaaccgc

SEQ ID NO: 877051 - RNA, 23 nt, Human
ucacauugaucacagaacagaga

SEQ ID NO: 877052 - RNA, 22 nt, Human
ucagacuuucaucaccaaugaa

SEQ ID NO: 877053 - RNA, 21 nt, Human
ucagaggaagccggauucacg

SEQ ID NO: 877054 - RNA, 22 nt, Human
ucgcacggccaccgccuucguc

SEQ ID NO: 877055 - RNA, 29 nt, Human
ucucuuaugaaaaaaaggcugggagaggu

SEQ ID NO: 877056 - RNA, 18 nt, Human
ugaaaaguacaagagcug

SEQ ID NO: 877057 - RNA, 26 nt, Human
ugaaaauguaaaauacuucuacaaca

SEQ ID NO: 877058 - RNA, 18 nt, Human
uggaguggggaugacaaa

SEQ ID NO: 877059 - RNA, 25 nt, Human
uggggugauuucugcccuuuuuuuu

SEQ ID NO: 877060 - RNA, 23 nt, Human
ugugcuggcuugaugaggugcua

SEQ ID NO: 877061 - RNA, 22 nt, Human
uguuuaaauacaagaaaaguaa

SEQ ID NO: 877062 - RNA, 19 nt, Human
uuauucucauuuaaagucu

SEQ ID NO: 877063 - RNA, 20 nt, Human
uuauuugaggacaauguuuu

SEQ ID NO: 877064 - RNA, 22 nt, Human
uucaaauucacuucauaacaau

SEQ ID NO: 877065 - RNA, 18 nt, Human
uucacuucauaacaauca

SEQ ID NO: 877066 - RNA, 23 nt, Human
uucccagagcuguucaaagucua

SEQ ID NO: 877067 - RNA, 19 nt, Human
uuccuuggggugauuucug

SEQ ID NO: 877068 - RNA, 23 nt, Human
uuccuuggggugauuucugcccu

SEQ ID NO: 877069 - RNA, 19 nt, Human
uugaaaauaggacaucaga

SEQ ID NO: 877070 - RNA, 21 nt, Human
uugaggacaauguuuuuucag

SEQ ID NO: 877071 - RNA, 18 nt, Human
uuuaaagucuuaaacccu

SEQ ID NO: 877072 - RNA, 19 nt, Human
aaaaaacuuccaugcccuu

SEQ ID NO: 877073 - RNA, 19 nt, Human
aaagagcuaauacacagac

SEQ ID NO: 877074 - RNA, 24 nt, Human
aacucacaacacugcagcagccuc

SEQ ID NO: 877075 - RNA, 19 nt, Human
aagcaaaagaacgaaaugc

SEQ ID NO: 877076 - RNA, 22 nt, Human
aagcagagaagacaggaggucc

SEQ ID NO: 877077 - RNA, 19 nt, Human
acaaagcaaaagaacgaaa

SEQ ID NO: 877078 - RNA, 26 nt, Human
acaaagcaaaagaacgaaaugcgcaa

SEQ ID NO: 877079 - RNA, 27 nt, Human
acaaagcaaaagaacgaaaugcgcaag

SEQ ID NO: 877080 - RNA, 20 nt, Human
acaaagucuaccaugcaccc

SEQ ID NO: 877081 - RNA, 19 nt, Human
acucaugcugggggcaaag

SEQ ID NO: 877082 - RNA, 26 nt, Human
acuuccaugcccuuccauuccccucc

SEQ ID NO: 877083 - RNA, 22 nt, Human
agcuuccaacucacaacacugc

SEQ ID NO: 877084 - RNA, 19 nt, Human
augcacccagaagcagaga

SEQ ID NO: 877085 - RNA, 21 nt, Human
caaagcaaaagaacgaaaugc

SEQ ID NO: 877086 - RNA, 23 nt, Human
caacuccgagagaacagaccaaa

SEQ ID NO: 877087 - RNA, 22 nt, Human
cacaacacugcagcagccucca

SEQ ID NO: 877088 - RNA, 21 nt, Human
cccaccaacuccgagagaagg

SEQ ID NO: 877089 - RNA, 23 nt, Human
cccuuccauuccccucccuccaa

SEQ ID NO: 877090 - RNA, 22 nt, Human
cuuccauuccccucccuccaaa

SEQ ID NO: 877091 - RNA, 23 nt, Human
gaagcagagaagacaggaggucc

SEQ ID NO: 877092 - RNA, 21 nt, Human
gagagaacagaccaaacuaac

SEQ ID NO: 877093 - RNA, 19 nt, Human
gcaaagaauggaaagagcu

SEQ ID NO: 877094 - RNA, 19 nt, Human
gcccuuccauuccccuccc

SEQ ID NO: 877095 - RNA, 24 nt, Human
uacucgcacugcagaguccacgcg

SEQ ID NO: 877096 - RNA, 25 nt, Human
uagggugcccaccaacuccgagaga

SEQ ID NO: 877097 - RNA, 22 nt, Human
uauuaaaugcucaauucucaaa

SEQ ID NO: 877098 - RNA, 23 nt, Human
ucaaaauuauauguauauauuuu

SEQ ID NO: 877099 - RNA, 19 nt, Human
uccgagagaacagaccaaa

SEQ ID NO: 877100 - RNA, 21 nt, Human
uccgagagaacagaccaaacu

SEQ ID NO: 877101 - RNA, 23 nt, Human
ucugccggggccuccucucccua

SEQ ID NO: 877102 - RNA, 27 nt, Human
ugaccagagacguuuacaauuuauacc

SEQ ID NO: 877103 - RNA, 21 nt, Human
ugcacccagaagcagagaaga

SEQ ID NO: 877104 - RNA, 24 nt, Human
ugccacaaagucuaccaugcaccc

SEQ ID NO: 877105 - RNA, 18 nt, Human
ugcgcagccugaccagag

SEQ ID NO: 877106 - RNA, 23 nt, Human
uggaaagagcuaauacacagaca

SEQ ID NO: 877107 - RNA, 26 nt, Human
aaacaagaagggagcuggagauuugg

SEQ ID NO: 877108 - RNA, 18 nt, Human
aagcagccacagaacacu

SEQ ID NO: 877109 - RNA, 23 nt, Human
aagccaaggcagcagcagaggga

SEQ ID NO: 877110 - RNA, 19 nt, Human
aaggagcugccuguguucc

SEQ ID NO: 877111 - RNA, 22 nt, Human
aaguggccccuaaccaccaaga

SEQ ID NO: 877112 - RNA, 20 nt, Human
aaugcccagcaaggucccac

SEQ ID NO: 877113 - RNA, 21 nt, Human
acacaagguacauccuccucc

SEQ ID NO: 877114 - RNA, 22 nt, Human
acagggcaagaaaagggcaggg

SEQ ID NO: 877115 - RNA, 23 nt, Human
acagggcaagaaaagggcagggg

SEQ ID NO: 877116 - RNA, 26 nt, Human
accaagcacugauaaaaaauauauau

SEQ ID NO: 877117 - RNA, 22 nt, Human
agaagacagggccgcaaggaca

SEQ ID NO: 877118 - RNA, 19 nt, Human
agcugccuguguuccuccc

SEQ ID NO: 877119 - RNA, 19 nt, Human
aggaccaugguuugguggg

SEQ ID NO: 877120 - RNA, 20 nt, Human
aggaucaauguucugaaggu

SEQ ID NO: 877121 - RNA, 18 nt, Human
agggaaaggagcugccug

SEQ ID NO: 877122 - RNA, 21 nt, Human
agggaggccccuccaaccuuc

SEQ ID NO: 877123 - RNA, 19 nt, Human
agggggcuggcaggagggc

SEQ ID NO: 877124 - RNA, 22 nt, Human
agggggcuggcaggagggcugc

SEQ ID NO: 877125 - RNA, 19 nt, Human
agguccccuuaccccugcc

SEQ ID NO: 877126 - RNA, 21 nt, Human
caaggaggcggguccucccuc

SEQ ID NO: 877127 - RNA, 18 nt, Human
caaugaggaggacaggag

SEQ ID NO: 877128 - RNA, 21 nt, Human
cacaaagcagccacagaacac

SEQ ID NO: 877129 - RNA, 18 nt, Human
cacuugcaggcacaugcc

SEQ ID NO: 877130 - RNA, 21 nt, Human
cacuugcaggcacaugccuac

SEQ ID NO: 877131 - RNA, 22 nt, Human
cagagaaggacauccaccucca

SEQ ID NO: 877132 - RNA, 21 nt, Human
caggcugggagcagagaaagg

SEQ ID NO: 877133 - RNA, 19 nt, Human
caggggacccuguuucccc

SEQ ID NO: 877134 - RNA, 20 nt, Human
cauauaaugcccagcaaggu

SEQ ID NO: 877135 - RNA, 23 nt, Human
cauccuccuccccugcagccccc

SEQ ID NO: 877136 - RNA, 21 nt, Human
cauggccccgaagcagcucag

SEQ ID NO: 877137 - RNA, 19 nt, Human
ccccgaagcagcucagcuc

SEQ ID NO: 877138 - RNA, 27 nt, Human
ccccuaaccaccaagacaggguacccu

SEQ ID NO: 877139 - RNA, 19 nt, Human
ccccuuaccccugccccuc

SEQ ID NO: 877140 - RNA, 22 nt, Human
cccugcagcccccacaggccuc

SEQ ID NO: 877141 - RNA, 19 nt, Human
ccuacaaagcagcagccau

SEQ ID NO: 877142 - RNA, 23 nt, Human
ccuacauacaguauggcagcagg

SEQ ID NO: 877143 - RNA, 21 nt, Human
ccucccuccucuuucaggguc

SEQ ID NO: 877144 - RNA, 21 nt, Human
ccugcagcccccacaggccuc

SEQ ID NO: 877145 - RNA, 25 nt, Human
ccugcagcccccacaggccucaggg

SEQ ID NO: 877146 - RNA, 19 nt, Human
ccuuaccccugccccuccc

SEQ ID NO: 877147 - RNA, 23 nt, Human
cuagagccucaaaggaaaagugg

SEQ ID NO: 877148 - RNA, 18 nt, Human
cucaaaggaaaaguggcc

SEQ ID NO: 877149 - RNA, 25 nt, Human
cuccccugcagcccccacaggccuc

SEQ ID NO: 877150 - RNA, 18 nt, Human
cucugaaacccccacagg

SEQ ID NO: 877151 - RNA, 21 nt, Human
cugaaacgcgccaccaaaccc

SEQ ID NO: 877152 - RNA, 22 nt, Human
cugcagcugugauuccacauca

SEQ ID NO: 877153 - RNA, 21 nt, Human
cugccccucccuacugcuggg

SEQ ID NO: 877154 - RNA, 23 nt, Human
cuuuauccucagguccccuuacc

SEQ ID NO: 877155 - RNA, 24 nt, Human
gaagccaaggcagcagcaguggga

SEQ ID NO: 877156 - RNA, 18 nt, Human
gacaggcagggggaaugg

SEQ ID NO: 877157 - RNA, 21 nt, Human
gacaggcagggggaauggucu

SEQ ID NO: 877158 - RNA, 26 nt, Human
gagccaaccccagacagagaaccuca

SEQ ID NO: 877159 - RNA, 21 nt, Human
gaugaggaaaacaagaaggga

SEQ ID NO: 877160 - RNA, 20 nt, Human
gauucugagagugacugcuc

SEQ ID NO: 877161 - RNA, 22 nt, Human
gcaaggacaggcagggggaaug

SEQ ID NO: 877162 - RNA, 21 nt, Human
gcagcagcagagggaagccag

SEQ ID NO: 877163 - RNA, 22 nt, Human
gcaggcacaugccuacaaagca

SEQ ID NO: 877164 - RNA, 20 nt, Human
gcccccacaggccucagggg

SEQ ID NO: 877165 - RNA, 23 nt, Human
gccccuccaaccuucccugguga

SEQ ID NO: 877166 - RNA, 22 nt, Human
gcgacuucgcugaaacgcgcca

SEQ ID NO: 877167 - RNA, 21 nt, Human
gcgguguguggggcauccggc

SEQ ID NO: 877168 - RNA, 22 nt, Human
ggagaggggcagcuggcagcuc

SEQ ID NO: 877169 - RNA, 20 nt, Human
ggcaagaaaagggcaggggg

SEQ ID NO: 877170 - RNA, 24 nt, Human
ggcaagaaaagggcagggggcugg

SEQ ID NO: 877171 - RNA, 21 nt, Human
ggcaagcagaaggcccugcug

SEQ ID NO: 877172 - RNA, 22 nt, Human
ggcagggggcuggcaggagggc

SEQ ID NO: 877173 - RNA, 26 nt, Human
ggcagggggcuggcaggagggcugca

SEQ ID NO: 877174 - RNA, 20 nt, Human
gggagagaagugcaugcagu

SEQ ID NO: 877175 - RNA, 24 nt, Human
gguaggaggaugaggaaaacaaga

SEQ ID NO: 877176 - RNA, 22 nt, Human
guauggcagcaggcaagcagaa

SEQ ID NO: 877177 - RNA, 22 nt, Human
gugaggcaggcugggagcagag

SEQ ID NO: 877178 - RNA, 20 nt, Human
uaaaaccaaccaagcacuga

SEQ ID NO: 877179 - RNA, 23 nt, Human
uaaauacauuuuauucagaacaa

SEQ ID NO: 877180 - RNA, 19 nt, Human
uacaggguaggaggaugag

SEQ ID NO: 877181 - RNA, 21 nt, Human
uaggaggaagccaaggcagca

SEQ ID NO: 877182 - RNA, 24 nt, Human
uauucuucacaucaugugccaagc

SEQ ID NO: 877183 - RNA, 23 nt, Human
ucacugcagcugugauuccacau

SEQ ID NO: 877184 - RNA, 19 nt, Human
ucagaaggacaggagagca

SEQ ID NO: 877185 - RNA, 25 nt, Human
uccacaucaaaccugaacaguaaga

SEQ ID NO: 877186 - RNA, 21 nt, Human
uccaccuccacuagagccuca

SEQ ID NO: 877187 - RNA, 22 nt, Human
uccaccuccacuagagccucaa

SEQ ID NO: 877188 - RNA, 19 nt, Human
ucccacuugcaggcacaug

SEQ ID NO: 877189 - RNA, 21 nt, Human
ucccacuugcaggcacaugcc

SEQ ID NO: 877190 - RNA, 19 nt, Human
uccccugcagcccccacag

SEQ ID NO: 877191 - RNA, 20 nt, Human
uccccuuaccccugccccuc

SEQ ID NO: 877192 - RNA, 19 nt, Human
ucccuggugaggcaggcug

SEQ ID NO: 877193 - RNA, 24 nt, Human
uccucccuccucuuucagggucuc

SEQ ID NO: 877194 - RNA, 18 nt, Human
ucucaggccacugcuauc

SEQ ID NO: 877195 - RNA, 20 nt, Human
ucuuuugcuuuggcugaugg

SEQ ID NO: 877196 - RNA, 24 nt, Human
ugaacaguaagaauugggcauuua

SEQ ID NO: 877197 - RNA, 24 nt, Human
ugagagaccaacggcaguuggagc

SEQ ID NO: 877198 - RNA, 23 nt, Human
ugccuacaaagcagcagccaucu

SEQ ID NO: 877199 - RNA, 19 nt, Human
ugcuggcgcagaugcagaa

SEQ ID NO: 877200 - RNA, 19 nt, Human
uggcagcaggcaagcagaa

SEQ ID NO: 877201 - RNA, 25 nt, Human
uggccaaggagcaacuucagaagga

SEQ ID NO: 877202 - RNA, 23 nt, Human
uggcgguguguggggcauccggc

SEQ ID NO: 877203 - RNA, 21 nt, Human
uggcugauggggaaucaagau

SEQ ID NO: 877204 - RNA, 23 nt, Human
ugggcacuggucagcaacuccuu

SEQ ID NO: 877205 - RNA, 20 nt, Human
uggugggaguacaggguagg

SEQ ID NO: 877206 - RNA, 18 nt, Human
uuaaaaccaaccaagcac

SEQ ID NO: 877207 - RNA, 20 nt, Human
uuaaaggaccaugguuuggu

SEQ ID NO: 877208 - RNA, 22 nt, Human
uuaaaggaccaugguuuggugg

SEQ ID NO: 877209 - RNA, 21 nt, Human
uucccuggugaggcaggcugg

SEQ ID NO: 877210 - RNA, 20 nt, Human
uuucagggucucugaaaccc

SEQ ID NO: 877211 - RNA, 23 nt, Human
uuucagggucucugaaaccccca

SEQ ID NO: 877212 - RNA, 18 nt, Human
uuuuuuuuuuuuuuuuug

SEQ ID NO: 877213 - RNA, 22 nt, Human
uuuuuuuuuuuuuuuuuggagu

SEQ ID NO: 877214 - RNA, 22 nt, Human
aggagaccccagucggcuaccc

SEQ ID NO: 877215 - RNA, 23 nt, Human
uaagaaaauuccacaauaaucag

SEQ ID NO: 877216 - RNA, 25 nt, Human
ucgccaggagaccccagucggcuac

SEQ ID NO: 877217 - RNA, 19 nt, Human
uuuuuuuuuuuuuaaggga

SEQ ID NO: 877218 - RNA, 22 nt, Human
accuugaagagggccacaggga

SEQ ID NO: 877219 - RNA, 23 nt, Human
aggaagguaggaccuugaagagg

SEQ ID NO: 877220 - RNA, 24 nt, Human
aggaagguaggaccuugaagaggg

SEQ ID NO: 877221 - RNA, 18 nt, Human
aggaccuugaagagggcc

SEQ ID NO: 877222 - RNA, 23 nt, Human
aggguucacaggagaguuaggca

SEQ ID NO: 877223 - RNA, 20 nt, Human
agguaggaccuugaagaggg

SEQ ID NO: 877224 - RNA, 24 nt, Human
caaguagaugaugaccaccaacca

SEQ ID NO: 877225 - RNA, 19 nt, Human
caccauacggggcagguug

SEQ ID NO: 877226 - RNA, 18 nt, Human
ccacagccucucccgggc

SEQ ID NO: 877227 - RNA, 18 nt, Human
ccacagggacuucaagga

SEQ ID NO: 877228 - RNA, 19 nt, Human
ccaccacagccucucccgg

SEQ ID NO: 877229 - RNA, 19 nt, Human
cccucccuucuccccucca

SEQ ID NO: 877230 - RNA, 23 nt, Human
cucccgggccgcuguagacagcc

SEQ ID NO: 877231 - RNA, 24 nt, Human
cuguacagaaccacaaagaauaaa

SEQ ID NO: 877232 - RNA, 24 nt, Human
cuuuacaauuauauguaugucacu

SEQ ID NO: 877233 - RNA, 22 nt, Human
cuuugcccucccuucuccccuc

SEQ ID NO: 877234 - RNA, 23 nt, Human
gaggacaaugaccaucacgaggg

SEQ ID NO: 877235 - RNA, 18 nt, Human
gaugaccaccaaccaugg

SEQ ID NO: 877236 - RNA, 19 nt, Human
gccccgaggccggcgcuuc

SEQ ID NO: 877237 - RNA, 22 nt, Human
gccccgaggccggcgcuucucg

SEQ ID NO: 877238 - RNA, 23 nt, Human
gcccucccuucuccccuccauca

SEQ ID NO: 877239 - RNA, 24 nt, Human
ggaggacaaugaccaucacgaggg

SEQ ID NO: 877240 - RNA, 18 nt, Human
ggaggggcgggccuggcc

SEQ ID NO: 877241 - RNA, 24 nt, Human
ggccacagggacuucaaggaagga

SEQ ID NO: 877242 - RNA, 21 nt, Human
guggcauccuggggagcuucu

SEQ ID NO: 877243 - RNA, 21 nt, Human
uaaaaggaggggcacacagca

SEQ ID NO: 877244 - RNA, 20 nt, Human
uaaaauaauaugaaaagacc

SEQ ID NO: 877245 - RNA, 18 nt, Human
uaggaagguaggaccuug

SEQ ID NO: 877246 - RNA, 21 nt, Human
ucaaaacauaucugguugcaa

SEQ ID NO: 877247 - RNA, 23 nt, Human
ucccuucuccccuccaucaagga

SEQ ID NO: 877248 - RNA, 23 nt, Human
ucggggccaccacagccucuccc

SEQ ID NO: 877249 - RNA, 18 nt, Human
ucuggaggacaaugacca

SEQ ID NO: 877250 - RNA, 21 nt, Human
ugaaaagaccauaacugaaga

SEQ ID NO: 877251 - RNA, 18 nt, Human
ugagggaagcccaggguu

SEQ ID NO: 877252 - RNA, 19 nt, Human
uggcauccuggggagcuuc

SEQ ID NO: 877253 - RNA, 19 nt, Human
ugguggcauccuggggagc

SEQ ID NO: 877254 - RNA, 19 nt, Human
uucaaggaaggaggaaacc

SEQ ID NO: 877255 - RNA, 18 nt, Human
uucaauuugaugcccuga

SEQ ID NO: 877256 - RNA, 20 nt, Human
uuggaauuucugguuuuuca

SEQ ID NO: 877257 - RNA, 21 nt, Human
uuuacacagugguggcauccu

SEQ ID NO: 877258 - RNA, 21 nt, Human
uuugcccucccuucuccccuc

SEQ ID NO: 877259 - RNA, 21 nt, Human
uuuggaauuucugguuuuuca

SEQ ID NO: 877260 - RNA, 22 nt, Human
uuuuacacagugguggcauccu

SEQ ID NO: 877261 - RNA, 23 nt, Human
uuuuuuuuuuuuuuuuuuaacug

SEQ ID NO: 877262 - RNA, 21 nt, Human
aaaccaaaacaaaucaggaaa

SEQ ID NO: 877263 - RNA, 19 nt, Human
aaaguagaggggaacucac

SEQ ID NO: 877264 - RNA, 19 nt, Human
aagaaguucccaagcagcc

SEQ ID NO: 877265 - RNA, 20 nt, Human
aagcagccggaagguaggaa

SEQ ID NO: 877266 - RNA, 21 nt, Human
aagcagccggaagguaggaaa

SEQ ID NO: 877267 - RNA, 24 nt, Human
aaugcagaaacauuuauugaaaga

SEQ ID NO: 877268 - RNA, 19 nt, Human
agacuagguuucuaaaagu

SEQ ID NO: 877269 - RNA, 19 nt, Human
agaggaguaauuauucagc

SEQ ID NO: 877270 - RNA, 19 nt, Human
caagaaagaaguucccaag

SEQ ID NO: 877271 - RNA, 26 nt, Human
ccaaagcacaugucuacgccaggcag

SEQ ID NO: 877272 - RNA, 18 nt, Human
ccaguuuggguggaaggc

SEQ ID NO: 877273 - RNA, 19 nt, Human
cuacccccuccaacugucc

SEQ ID NO: 877274 - RNA, 19 nt, Human
cuacccccuccaacugucc

SEQ ID NO: 877275 - RNA, 18 nt, Human
cucggccuacccccucca

SEQ ID NO: 877276 - RNA, 21 nt, Human
gaagaaaagacuguuguucuu

SEQ ID NO: 877277 - RNA, 24 nt, Human
gagugagcauugccugugccagua

SEQ ID NO: 877278 - RNA, 18 nt, Human
guagaggggaacucacuc

SEQ ID NO: 877279 - RNA, 23 nt, Human
uaaauauaaaaagccaaacuuua

SEQ ID NO: 877280 - RNA, 18 nt, Human
uaaguaaagaaaugacau

SEQ ID NO: 877281 - RNA, 24 nt, Human
uaggaaaccugagcguuugaaagc

SEQ ID NO: 877282 - RNA, 18 nt, Human
ucauuagcuaaguuaaaa

SEQ ID NO: 877283 - RNA, 18 nt, Human
uccuuguuuacacugugu

SEQ ID NO: 877284 - RNA, 19 nt, Human
ugaaagacauuucgaagcc

SEQ ID NO: 877285 - RNA, 24 nt, Human
ugacauuuuaaauauaaaaagcca

SEQ ID NO: 877286 - RNA, 21 nt, Human
uggaaggcuaaaaguagaggg

SEQ ID NO: 877287 - RNA, 22 nt, Human
uggauuagccauuaacauuuuu

SEQ ID NO: 877288 - RNA, 19 nt, Human
uggcgggcaagaaagaagu

SEQ ID NO: 877289 - RNA, 18 nt, Human
uggcugcgggcuuggcgg

SEQ ID NO: 877290 - RNA, 21 nt, Human
uguguacauaguacaaauaua

SEQ ID NO: 877291 - RNA, 22 nt, Human
uguguacauaguacaaauauag

SEQ ID NO: 877292 - RNA, 24 nt, Human
uuaaaccuucuuuaauuauggauu

SEQ ID NO: 877293 - RNA, 19 nt, Human
uuacuugaaguuuucgagu

SEQ ID NO: 877294 - RNA, 23 nt, Human
uuagaagacuagguuucuaaaag

SEQ ID NO: 877295 - RNA, 23 nt, Human
uucaugacaauaaaacuuguaaa

SEQ ID NO: 877296 - RNA, 24 nt, Human
uuuaucaagcauuccaaaaccaac

SEQ ID NO: 877297 - RNA, 23 nt, Human
uuuuuuuuuuuuuuuuuuaaaug

SEQ ID NO: 877298 - RNA, 23 nt, Human
aaaucauuucaguacuucuuccu

SEQ ID NO: 877299 - RNA, 19 nt, Human
aaccaaaagacaaaaacaa

SEQ ID NO: 877300 - RNA, 25 nt, Human
aaccaaaagacaaaaacaagggacc

SEQ ID NO: 877301 - RNA, 21 nt, Human
aagaaaccaaaagacaaaaac

SEQ ID NO: 877302 - RNA, 23 nt, Human
aagaaaccaaaagacaaaaacaa

SEQ ID NO: 877303 - RNA, 23 nt, Human
aaugcauucaguaaggcacucaa

SEQ ID NO: 877304 - RNA, 24 nt, Human
acaaaaacaaucuuuuuaaaccuc

SEQ ID NO: 877305 - RNA, 22 nt, Human
agaaaccaaaagacaaaaacaa

SEQ ID NO: 877306 - RNA, 23 nt, Human
agcauacucugaacuuacagaau

SEQ ID NO: 877307 - RNA, 22 nt, Human
aggaagaaaccaaaagacaaaa

SEQ ID NO: 877308 - RNA, 19 nt, Human
aggagaaaggaagaaacca

SEQ ID NO: 877309 - RNA, 22 nt, Human
aggagaaaggaagaaaccaaaa

SEQ ID NO: 877310 - RNA, 21 nt, Human
aggauucaggucagaguacau

SEQ ID NO: 877311 - RNA, 21 nt, Human
aggcgggugcggccuccgggc

SEQ ID NO: 877312 - RNA, 24 nt, Human
auacuuuuuauagaaagacacgcu

SEQ ID NO: 877313 - RNA, 24 nt, Human
auaugauaaucuauuaacacucag

SEQ ID NO: 877314 - RNA, 22 nt, Human
aucucauuuccuucauuuucaa

SEQ ID NO: 877315 - RNA, 18 nt, Human
caucaugaauuuauuuuc

SEQ ID NO: 877316 - RNA, 21 nt, Human
cauuaaugacuaucauuuuac

SEQ ID NO: 877317 - RNA, 22 nt, Human
cauuuuucacugagagccccgc

SEQ ID NO: 877318 - RNA, 25 nt, Human
ccaaagcaaaagcccugucauucau

SEQ ID NO: 877319 - RNA, 23 nt, Human
cgaaagcacugcagcaguuucug

SEQ ID NO: 877320 - RNA, 24 nt, Human
cgccggaggcgggugcggccuccg

SEQ ID NO: 877321 - RNA, 18 nt, Human
cucugaacuuacagaaua

SEQ ID NO: 877322 - RNA, 21 nt, Human
cugugguuccccauacuuagu

SEQ ID NO: 877323 - RNA, 21 nt, Human
gagcuucuuccacaaucacaa

SEQ ID NO: 877324 - RNA, 19 nt, Human
gugguuccccauacuuagu

SEQ ID NO: 877325 - RNA, 20 nt, Human
uaaaaaauccaaagcaaaag

SEQ ID NO: 877326 - RNA, 22 nt, Human
uaaccacagaacgcucuucccu

SEQ ID NO: 877327 - RNA, 21 nt, Human
uacagaauaaguaccacgcca

SEQ ID NO: 877328 - RNA, 23 nt, Human
uagcagggacuaaauacaguggu

SEQ ID NO: 877329 - RNA, 20 nt, Human
uauaguuauaaucaaggaaa

SEQ ID NO: 877330 - RNA, 22 nt, Human
ucaaggaaaugauuucacauug

SEQ ID NO: 877331 - RNA, 18 nt, Human
ucaggauucaggucagag

SEQ ID NO: 877332 - RNA, 20 nt, Human
ucauuaaugacuaucauuuu

SEQ ID NO: 877333 - RNA, 22 nt, Human
ucucauuuccuucauuuucaau

SEQ ID NO: 877334 - RNA, 22 nt, Human
ucuuccacaaucacaaugagag

SEQ ID NO: 877335 - RNA, 19 nt, Human
ugccugcaauuucuuccuc

SEQ ID NO: 877336 - RNA, 21 nt, Human
ugccuggaauguagcagggac

SEQ ID NO: 877337 - RNA, 21 nt, Human
ugguagaucauuucuccagga

SEQ ID NO: 877338 - RNA, 18 nt, Human
uuccccauacuuaguaca

SEQ ID NO: 877339 - RNA, 24 nt, Human
uugucuugaacuugucuaaacaua

SEQ ID NO: 877340 - RNA, 19 nt, Human
aagaggaaacaugggaagg

SEQ ID NO: 877341 - RNA, 18 nt, Human
aaggaccuguugcaugcc

SEQ ID NO: 877342 - RNA, 25 nt, Human
acaagacaggaaaggggaagaagcc

SEQ ID NO: 877343 - RNA, 20 nt, Human
acaccagcccacaccuaugu

SEQ ID NO: 877344 - RNA, 19 nt, Human
acgccacuccaaggaccug

SEQ ID NO: 877345 - RNA, 24 nt, Human
acucaguuugaguguggcaccugg

SEQ ID NO: 877346 - RNA, 21 nt, Human
agaagcugacaugagcagguc

SEQ ID NO: 877347 - RNA, 21 nt, Human
agacaggaaaggggaagaagc

SEQ ID NO: 877348 - RNA, 24 nt, Human
agacaggaaaggggaagaagcuga

SEQ ID NO: 877349 - RNA, 18 nt, Human
agcuauugccauguagag

SEQ ID NO: 877350 - RNA, 20 nt, Human
agcuauugccauguagaggu

SEQ ID NO: 877351 - RNA, 18 nt, Human
aggaaacaugggaaggau

SEQ ID NO: 877352 - RNA, 19 nt, Human
aggcuggucuugagcuucu

SEQ ID NO: 877353 - RNA, 20 nt, Human
auuguuuuaguccauuuugu

SEQ ID NO: 877354 - RNA, 18 nt, Human
cacagcacgccacuccaa

SEQ ID NO: 877355 - RNA, 21 nt, Human
cacagcacgccacuccaagga

SEQ ID NO: 877356 - RNA, 23 nt, Human
cagaggaccuccuccugggguuu

SEQ ID NO: 877357 - RNA, 22 nt, Human
cagcuacaccagcccacaccua

SEQ ID NO: 877358 - RNA, 20 nt, Human
caggcuggucuugagcuucu

SEQ ID NO: 877359 - RNA, 21 nt, Human
ccacacagcacgccacuccaa

SEQ ID NO: 877360 - RNA, 25 nt, Human
ccaggcccagcacugagucuugugc

SEQ ID NO: 877361 - RNA, 20 nt, Human
cccucuggcaaugcuuccag

SEQ ID NO: 877362 - RNA, 25 nt, Human
ccuccugggguuucagaucagucuu

SEQ ID NO: 877363 - RNA, 20 nt, Human
ccucuucaauuacucaguuu

SEQ ID NO: 877364 - RNA, 22 nt, Human
ccuguugcaugccaggcccagc

SEQ ID NO: 877365 - RNA, 24 nt, Human
cgagugauacaggcuggucuugag

SEQ ID NO: 877366 - RNA, 22 nt, Human
cuacaccagcccacaccuaugu

SEQ ID NO: 877367 - RNA, 18 nt, Human
cucugccucagggcucag

SEQ ID NO: 877368 - RNA, 18 nt, Human
cuugagaggggcuggaga

SEQ ID NO: 877369 - RNA, 22 nt, Human
cuugagaggggcuggagagaga

SEQ ID NO: 877370 - RNA, 23 nt, Human
gaucucugccucagggcucagag

SEQ ID NO: 877371 - RNA, 23 nt, Human
gccaggaccccgagugauacagg

SEQ ID NO: 877372 - RNA, 22 nt, Human
gcccagcacugagucuugugcc

SEQ ID NO: 877373 - RNA, 20 nt, Human
gggaagaagcugacaugagc

SEQ ID NO: 877374 - RNA, 19 nt, Human
uaacccagcagaggagcga

SEQ ID NO: 877375 - RNA, 23 nt, Human
uaacuuccuggcacucuuaguuu

SEQ ID NO: 877376 - RNA, 22 nt, Human
uaaguagcuauugccauguaga

SEQ ID NO: 877377 - RNA, 21 nt, Human
ucaccacacugagcaccugga

SEQ ID NO: 877378 - RNA, 25 nt, Human
uccacacagcacgccacuccaagga

SEQ ID NO: 877379 - RNA, 21 nt, Human
uccccaauauucauuauccac

SEQ ID NO: 877380 - RNA, 21 nt, Human
uccccgggcagcacucuggga

SEQ ID NO: 877381 - RNA, 24 nt, Human
uccccgggcagcacucugggagau

SEQ ID NO: 877382 - RNA, 18 nt, Human
ucuauccccgggcagcac

SEQ ID NO: 877383 - RNA, 22 nt, Human
ugagaggggcuggagagagaug

SEQ ID NO: 877384 - RNA, 18 nt, Human
ugauacaggcuggucuug

SEQ ID NO: 877385 - RNA, 25 nt, Human
ugccaggaccccgagugauacaggc

SEQ ID NO: 877386 - RNA, 19 nt, Human
ugggcagcuacaccagccc

SEQ ID NO: 877387 - RNA, 22 nt, Human
uguaaauaacucccauauuaaa

SEQ ID NO: 877388 - RNA, 21 nt, Human
uguugcaugccaggcccagca

SEQ ID NO: 877389 - RNA, 25 nt, Human
uucauuauccacacagcacgccacu

SEQ ID NO: 877390 - RNA, 20 nt, Human
uuuuuuuuucaaugcaagua

SEQ ID NO: 877391 - RNA, 20 nt, Human
aaaaaaaaaaagccaacaca

SEQ ID NO: 877392 - RNA, 20 nt, Human
aaaaaaaaaagccaacacac

SEQ ID NO: 877393 - RNA, 21 nt, Human
aacacacuuuuuucuuucuuu

SEQ ID NO: 877394 - RNA, 25 nt, Human
aaccaauuccuccucugcuuacacc

SEQ ID NO: 877395 - RNA, 24 nt, Human
aacuuucuaaaaaaaaaaaaaagc

SEQ ID NO: 877396 - RNA, 20 nt, Human
aagaacagcugaaaagaucu

SEQ ID NO: 877397 - RNA, 21 nt, Human
aagcucccaggccuuugggaa

SEQ ID NO: 877398 - RNA, 24 nt, Human
aagcucccaggccuuugggaacag

SEQ ID NO: 877399 - RNA, 21 nt, Human
aaguggcaggaggauguuugc

SEQ ID NO: 877400 - RNA, 23 nt, Human
aauucugcaaaucuuuauugagu

SEQ ID NO: 877401 - RNA, 19 nt, Human
acacacuuuuuucuuucuu

SEQ ID NO: 877402 - RNA, 20 nt, Human
auuccuccucugcuuacacc

SEQ ID NO: 877403 - RNA, 20 nt, Human
caaaaagcucccaggccuuu

SEQ ID NO: 877404 - RNA, 22 nt, Human
caaaaagcucccaggccuuugg

SEQ ID NO: 877405 - RNA, 19 nt, Human
caagccccacauagacucu

SEQ ID NO: 877406 - RNA, 25 nt, Human
cacacuuuuuucuuucuuuucaaaa

SEQ ID NO: 877407 - RNA, 23 nt, Human
cagcugaaacaaauucauauccu

SEQ ID NO: 877408 - RNA, 19 nt, Human
ccaauccauguuccagcca

SEQ ID NO: 877409 - RNA, 20 nt, Human
cucucugcugccacuucugc

SEQ ID NO: 877410 - RNA, 18 nt, Human
gcugggcacaggcuaggc

SEQ ID NO: 877411 - RNA, 22 nt, Human
uaagugaaccaauuccuccucu

SEQ ID NO: 877412 - RNA, 18 nt, Human
uacaggcgcuguguggaa

SEQ ID NO: 877413 - RNA, 23 nt, Human
uagacucuugguaaaaacaauuc

SEQ ID NO: 877414 - RNA, 19 nt, Human
ucaagccccacauagaccg

SEQ ID NO: 877415 - RNA, 23 nt, Human
ucacaauccuagcuccacaucac

SEQ ID NO: 877416 - RNA, 23 nt, Human
uccaugguuugauaaccuagaac

SEQ ID NO: 877417 - RNA, 27 nt, Human
ucccucucugcugccacuucugcacag

SEQ ID NO: 877418 - RNA, 26 nt, Human
ucuaacuuucuaaaaaaaaaaaaaag

SEQ ID NO: 877419 - RNA, 21 nt, Human
ugaaucaaaagcaggguuuaa

SEQ ID NO: 877420 - RNA, 20 nt, Human
ugggaacauaugcugugcuc

SEQ ID NO: 877421 - RNA, 21 nt, Human
ugguaccauagggagguguuu

SEQ ID NO: 877422 - RNA, 19 nt, Human
uguggaagaaccaauagca

SEQ ID NO: 877423 - RNA, 19 nt, Human
uguguggaagaaccaauag

SEQ ID NO: 877424 - RNA, 22 nt, Human
uucaaaaagcucccaggccuuu

SEQ ID NO: 877425 - RNA, 20 nt, Human
uucuuuucaaaaagcuccca

SEQ ID NO: 877426 - RNA, 20 nt, Human
uuuucuaucaaauccccaag

SEQ ID NO: 877427 - RNA, 18 nt, Human
uuuuuuuuuuuuuuuuug

SEQ ID NO: 877428 - RNA, 23 nt, Human
aaaaaaauacagaggaaccuaaa

SEQ ID NO: 877429 - RNA, 22 nt, Human
aaaaaauacagaggaaccuaaa

SEQ ID NO: 877430 - RNA, 22 nt, Human
aaaaagcagaaggaaggcagag

SEQ ID NO: 877431 - RNA, 22 nt, Human
aaaaauacagaggaaccuaaac

SEQ ID NO: 877432 - RNA, 21 nt, Human
aaaagaaaaaaaaauacagag

SEQ ID NO: 877433 - RNA, 19 nt, Human
aaagaaaaagacugggaga

SEQ ID NO: 877434 - RNA, 21 nt, Human
aagaaaaaaaaauacagagga

SEQ ID NO: 877435 - RNA, 18 nt, Human
aagaaaccaaaguugugg

SEQ ID NO: 877436 - RNA, 21 nt, Human
aagaaaccaaaguugugggua

SEQ ID NO: 877437 - RNA, 22 nt, Human
aagaugcuucuggcuuuuauua

SEQ ID NO: 877438 - RNA, 18 nt, Human
aagcucuucuugggucag

SEQ ID NO: 877439 - RNA, 23 nt, Human
aagcucuucuugggucagaaaug

SEQ ID NO: 877440 - RNA, 24 nt, Human
aauaaagaaaaagacugggagaga

SEQ ID NO: 877441 - RNA, 20 nt, Human
acacuacagugacuacaaac

SEQ ID NO: 877442 - RNA, 20 nt, Human
acagacaccucccagcagau

SEQ ID NO: 877443 - RNA, 19 nt, Human
accacaaggaacacuacag

SEQ ID NO: 877444 - RNA, 19 nt, Human
acccuaaaucagagacaga

SEQ ID NO: 877445 - RNA, 22 nt, Human
acuacaugcagauauacaaaug

SEQ ID NO: 877446 - RNA, 23 nt, Human
acucucaaagggcaggaaaagaa

SEQ ID NO: 877447 - RNA, 26 nt, Human
agaaaugcaauucuuugauggugccc

SEQ ID NO: 877448 - RNA, 20 nt, Human
agaaggaaggcagagcuuaa

SEQ ID NO: 877449 - RNA, 18 nt, Human
agacuaaaccauggaaau

SEQ ID NO: 877450 - RNA, 21 nt, Human
aggaacacuacagugacuaca

SEQ ID NO: 877451 - RNA, 18 nt, Human
aggaauggaauguagcca

SEQ ID NO: 877452 - RNA, 20 nt, Human
aguccugagucuugccugag

SEQ ID NO: 877453 - RNA, 26 nt, Human
auacaaauggaugauaagaaaccaaa

SEQ ID NO: 877454 - RNA, 21 nt, Human
auggaaauugggaacaagcac

SEQ ID NO: 877455 - RNA, 18 nt, Human
caaagacugaaacugaag

SEQ ID NO: 877456 - RNA, 23 nt, Human
caaagggcaggaaaagaaaaaaa

SEQ ID NO: 877457 - RNA, 19 nt, Human
caaggccaaccaaaggcca

SEQ ID NO: 877458 - RNA, 23 nt, Human
cagaauaaagaaaaagacuggga

SEQ ID NO: 877459 - RNA, 24 nt, Human
cagcagaugaaugcaucaccuccu

SEQ ID NO: 877460 - RNA, 28 nt, Human
cagcuucugaauguccagagcaguccuu

SEQ ID NO: 877461 - RNA, 24 nt, Human
caggcuccaaaaagcagaaggaag

SEQ ID NO: 877462 - RNA, 19 nt, Human
cagguucuugggcuucauc

SEQ ID NO: 877463 - RNA, 21 nt, Human
caucuuaucugaccacacaga

SEQ ID NO: 877464 - RNA, 21 nt, Human
ccaaaaagcagaaggaaggca

SEQ ID NO: 877465 - RNA, 19 nt, Human
cccuucugccuucuuuucc

SEQ ID NO: 877466 - RNA, 22 nt, Human
cuaaacccuaaaucagagacag

SEQ ID NO: 877467 - RNA, 24 nt, Human
gaaaagaaaaaaaaauacagagga

SEQ ID NO: 877468 - RNA, 19 nt, Human
gaauaaagaaaaagacugg

SEQ ID NO: 877469 - RNA, 19 nt, Human
gagagagaugggagcugau

SEQ ID NO: 877470 - RNA, 19 nt, Human
gccaaccaaaggccaggcu

SEQ ID NO: 877471 - RNA, 24 nt, Human
gugaaaaaagugaauuugccuaca

SEQ ID NO: 877472 - RNA, 22 nt, Human
uaaacccuaaaucagagacaga

SEQ ID NO: 877473 - RNA, 24 nt, Human
ucacgucccucaguggcucccugg

SEQ ID NO: 877474 - RNA, 21 nt, Human
ucaguggcucccuggaggaag

SEQ ID NO: 877475 - RNA, 24 nt, Human
ucccucaguggcucccuggaggaa

SEQ ID NO: 877476 - RNA, 20 nt, Human
ucccuggaggaagaaugauu

SEQ ID NO: 877477 - RNA, 22 nt, Human
ugaacuacacagcacacuugca

SEQ ID NO: 877478 - RNA, 18 nt, Human
ugaauguccagagcaguc

SEQ ID NO: 877479 - RNA, 22 nt, Human
ugaccacacagacaccucccag

SEQ ID NO: 877480 - RNA, 18 nt, Human
ugagaaaaauacucaggu

SEQ ID NO: 877481 - RNA, 19 nt, Human
ugcuuuggacuaucacguc

SEQ ID NO: 877482 - RNA, 18 nt, Human
ugggagagagaugggagc

SEQ ID NO: 877483 - RNA, 22 nt, Human
ugggagagagaugggagcugau

SEQ ID NO: 877484 - RNA, 22 nt, Human
ugucacagaauaaagaaaaaga

SEQ ID NO: 877485 - RNA, 23 nt, Human
uuagagggugaaaaaagugaauu

SEQ ID NO: 877486 - RNA, 21 nt, Human
uucauucaaggccaaccaaag

SEQ ID NO: 877487 - RNA, 23 nt, Human
uuuggaagcaccucucccuggaa

SEQ ID NO: 877488 - RNA, 22 nt, Human
uuuggggccccacucuucauuc

SEQ ID NO: 877489 - RNA, 24 nt, Human
uuuuuuuuuuuuuuuuauuacaag

SEQ ID NO: 877490 - RNA, 18 nt, Human
aaaacccaagagagcuuc

SEQ ID NO: 877491 - RNA, 19 nt, Human
aaguuccaguucucagugg

SEQ ID NO: 877492 - RNA, 23 nt, Human
acacaaauucggucagcuuucca

SEQ ID NO: 877493 - RNA, 19 nt, Human
acagcucucugacaggugg

SEQ ID NO: 877494 - RNA, 20 nt, Human
accucuggcucuucuggaug

SEQ ID NO: 877495 - RNA, 20 nt, Human
acugaaguaguuccaauggg

SEQ ID NO: 877496 - RNA, 18 nt, Human
agcaccucuggcucuucu

SEQ ID NO: 877497 - RNA, 21 nt, Human
aggaaaaagccauauagaaag

SEQ ID NO: 877498 - RNA, 24 nt, Human
aggacagcaagcaccucuggcucu

SEQ ID NO: 877499 - RNA, 19 nt, Human
agggggucgcccaagguag

SEQ ID NO: 877500 - RNA, 22 nt, Human
aguaaguuggauuugacugccc

SEQ ID NO: 877501 - RNA, 22 nt, Human
aguaguuccaaugggccuguga

SEQ ID NO: 877502 - RNA, 22 nt, Human
aucagcaagggggucgcccaag

SEQ ID NO: 877503 - RNA, 22 nt, Human
augggccuguggucuggauacc

SEQ ID NO: 877504 - RNA, 26 nt, Human
caagucccacagccugcagauccaca

SEQ ID NO: 877505 - RNA, 24 nt, Human
cacacggaaaaaggaaaaagccuu

SEQ ID NO: 877506 - RNA, 21 nt, Human
cacaggccgaguguuuggaac

SEQ ID NO: 877507 - RNA, 21 nt, Human
caccacugggacuggggccug

SEQ ID NO: 877508 - RNA, 21 nt, Human
cacggaaaaaggaaaaagcca

SEQ ID NO: 877509 - RNA, 20 nt, Human
cagcacgggaaaacuggaug

SEQ ID NO: 877510 - RNA, 19 nt, Human
cagccugcagauccacacu

SEQ ID NO: 877511 - RNA, 22 nt, Human
caggccgaguguuuggaacacc

SEQ ID NO: 877512 - RNA, 20 nt, Human
cauagucuucaagucccaca

SEQ ID NO: 877513 - RNA, 19 nt, Human
caucagcaagggggucgcc

SEQ ID NO: 877514 - RNA, 20 nt, Human
ccaagguagaaaguucccag

SEQ ID NO: 877515 - RNA, 18 nt, Human
ccaucacauagaaggggg

SEQ ID NO: 877516 - RNA, 18 nt, Human
cccacagccugcagaucc

SEQ ID NO: 877517 - RNA, 22 nt, Human
cccgugcaccacugugguccuc

SEQ ID NO: 877518 - RNA, 18 nt, Human
ccggaacccuucuuugac

SEQ ID NO: 877519 - RNA, 19 nt, Human
ccugaaauacuccucugca

SEQ ID NO: 877520 - RNA, 23 nt, Human
ccugaacucccucucuauggcau

SEQ ID NO: 877521 - RNA, 24 nt, Human
cgugcaccacugugguccucugcu

SEQ ID NO: 877522 - RNA, 23 nt, Human
cucgauacugcuuaacccagguu

SEQ ID NO: 877523 - RNA, 23 nt, Human
cugaacucccucucuauggcaug

SEQ ID NO: 877524 - RNA, 19 nt, Human
cugaaguccccgugcacca

SEQ ID NO: 877525 - RNA, 24 nt, Human
cugcugccuguggggcaccacugg

SEQ ID NO: 877526 - RNA, 19 nt, Human
cuucaagucccacagccug

SEQ ID NO: 877527 - RNA, 21 nt, Human
gaaaguucccagucaaggaca

SEQ ID NO: 877528 - RNA, 18 nt, Human
gaagauggaggggcagcc

SEQ ID NO: 877529 - RNA, 20 nt, Human
gaucacgauuagccagccug

SEQ ID NO: 877530 - RNA, 21 nt, Human
gauggaaggagugucccuggg

SEQ ID NO: 877531 - RNA, 22 nt, Human
ggacuggggccuggcccacgug

SEQ ID NO: 877532 - RNA, 21 nt, Human
ggauggcagguaaugagccag

SEQ ID NO: 877533 - RNA, 21 nt, Human
ggcagccauucgaucagccuc

SEQ ID NO: 877534 - RNA, 27 nt, Human
gucacagucauuaauaccucucagcaa

SEQ ID NO: 877535 - RNA, 19 nt, Human
gucuuuguagaugagaccu

SEQ ID NO: 877536 - RNA, 18 nt, Human
gugucaagucacaguccc

SEQ ID NO: 877537 - RNA, 23 nt, Human
guguccccaaaaccccuuuccaa

SEQ ID NO: 877538 - RNA, 21 nt, Human
uagaagggggugccaaugaca

SEQ ID NO: 877539 - RNA, 22 nt, Human
uagaaguuccaguucucagugg

SEQ ID NO: 877540 - RNA, 18 nt, Human
ucaagaacguuagggaca

SEQ ID NO: 877541 - RNA, 22 nt, Human
ucaauguaaaacccaagagagc

SEQ ID NO: 877542 - RNA, 26 nt, Human
ucacagucauuaauaccucucagcaa

SEQ ID NO: 877543 - RNA, 21 nt, Human
uccaagccuggcagggaaggg

SEQ ID NO: 877544 - RNA, 19 nt, Human
uccccaaaaccccuuucca

SEQ ID NO: 877545 - RNA, 23 nt, Human
uccccaaaaccccuuuccaaaau

SEQ ID NO: 877546 - RNA, 19 nt, Human
ucucuauggcaugggcaga

SEQ ID NO: 877547 - RNA, 18 nt, Human
ucuggaacggagcuauaa

SEQ ID NO: 877548 - RNA, 19 nt, Human
ucuguggcugggcuccaag

SEQ ID NO: 877549 - RNA, 21 nt, Human
ucuuugagguacuucugcaag

SEQ ID NO: 877550 - RNA, 26 nt, Human
ucuuugagguacuucugcaaggaauc

SEQ ID NO: 877551 - RNA, 20 nt, Human
ugaaaacccggaacccuucu

SEQ ID NO: 877552 - RNA, 18 nt, Human
ugacagguggagagaggc

SEQ ID NO: 877553 - RNA, 23 nt, Human
ugacagguggagagaggcucucu

SEQ ID NO: 877554 - RNA, 22 nt, Human
ugagccaggcagcuguaggcca

SEQ ID NO: 877555 - RNA, 19 nt, Human
ugagguacuucugcaagga

SEQ ID NO: 877556 - RNA, 21 nt, Human
ugcagccacacggaaaaagga

SEQ ID NO: 877557 - RNA, 21 nt, Human
ugccuguggggcaccacuggg

SEQ ID NO: 877558 - RNA, 21 nt, Human
uggcguggaauauaguccccu

SEQ ID NO: 877559 - RNA, 22 nt, Human
uguccccaaaaccccuuuccaa

SEQ ID NO: 877560 - RNA, 18 nt, Human
uguggagcuugcuugccc

SEQ ID NO: 877561 - RNA, 21 nt, Human
ugugucaagucacagucauua

SEQ ID NO: 877562 - RNA, 21 nt, Human
uguguucauggcaguguauau

SEQ ID NO: 877563 - RNA, 22 nt, Human
uguguucauggcaguguauaug

SEQ ID NO: 877564 - RNA, 19 nt, Human
uuccaucgucuuuuucaca

SEQ ID NO: 877565 - RNA, 19 nt, Human
uucucagugggagggagcc

SEQ ID NO: 877566 - RNA, 21 nt, Human
uucucagugggagggagcccc

SEQ ID NO: 877567 - RNA, 20 nt, Human
uuguagaugagaccugggca

SEQ ID NO: 877568 - RNA, 21 nt, Human
uuucacaggccgaguguuugg

SEQ ID NO: 877569 - RNA, 24 nt, Human
uuuuuuuuuuuuuuuugccuccga

SEQ ID NO: 877570 - RNA, 18 nt, Human
uuuuuuuuuuuuuuuuug

SEQ ID NO: 877571 - RNA, 21 nt, Human
uuuuuuuuuuuuuuuuugccu

SEQ ID NO: 877572 - RNA, 23 nt, Human
uuuuuuuuuuuuuuuuugccucc

SEQ ID NO: 877573 - RNA, 19 nt, Human
aaacaccaggaggcuaccu

SEQ ID NO: 877574 - RNA, 19 nt, Human
aaacccacgagccacgcuc

SEQ ID NO: 877575 - RNA, 18 nt, Human
aaagacuagaaaaaggcu

SEQ ID NO: 877576 - RNA, 25 nt, Human
aagugucaaagauggcauuugaacc

SEQ ID NO: 877577 - RNA, 19 nt, Human
accaucuggacucuuacag

SEQ ID NO: 877578 - RNA, 22 nt, Human
agaaaccagaucucucugcccu

SEQ ID NO: 877579 - RNA, 18 nt, Human
agaggcugcugggccuca

SEQ ID NO: 877580 - RNA, 19 nt, Human
aggcaaaagguacaacagg

SEQ ID NO: 877581 - RNA, 22 nt, Human
aggcaaaagguacaacagggaa

SEQ ID NO: 877582 - RNA, 18 nt, Human
cagggccaggccacucuc

SEQ ID NO: 877583 - RNA, 21 nt, Human
cagggccaggccacucucugc

SEQ ID NO: 877584 - RNA, 28 nt, Human
ccucaagaaguggaggccucaggcccau

SEQ ID NO: 877585 - RNA, 19 nt, Human
ccucaggcccaugaucuau

SEQ ID NO: 877586 - RNA, 19 nt, Human
ccucccuggccauccagga

SEQ ID NO: 877587 - RNA, 20 nt, Human
ccucccuggccauccaggaa

SEQ ID NO: 877588 - RNA, 23 nt, Human
ccugcaggcaaaagguacaacag

SEQ ID NO: 877589 - RNA, 18 nt, Human
ccuggcuccaccaucugg

SEQ ID NO: 877590 - RNA, 18 nt, Human
cgcccaaaaccauuuuac

SEQ ID NO: 877591 - RNA, 18 nt, Human
cgcccaccgcugcaccgc

SEQ ID NO: 877592 - RNA, 22 nt, Human
cuccagggccaggccacucucu

SEQ ID NO: 877593 - RNA, 18 nt, Human
cuuacagccuucaaucuc

SEQ ID NO: 877594 - RNA, 21 nt, Human
cuucuagaggcugcugggccu

SEQ ID NO: 877595 - RNA, 24 nt, Human
gacuucacggaaaacccacgagcc

SEQ ID NO: 877596 - RNA, 21 nt, Human
ggggaaggaacuuacaugaca

SEQ ID NO: 877597 - RNA, 21 nt, Human
uacaacagggaaacacgagaa

SEQ ID NO: 877598 - RNA, 24 nt, Human
uaccuucuagaggcugcugggccu

SEQ ID NO: 877599 - RNA, 22 nt, Human
uagaaguuaucgcccaaaacca

SEQ ID NO: 877600 - RNA, 19 nt, Human
uagaggcugcugggccuca

SEQ ID NO: 877601 - RNA, 21 nt, Human
ucacggaaaacccacgagcca

SEQ ID NO: 877602 - RNA, 18 nt, Human
ucugaaaagacuagaaaa

SEQ ID NO: 877603 - RNA, 21 nt, Human
ucugaaaagacuagaaaaagg

SEQ ID NO: 877604 - RNA, 25 nt, Human
ucuucagacaccacccugaguugca

SEQ ID NO: 877605 - RNA, 24 nt, Human
ugcccugcaggcaaaagguacaac

SEQ ID NO: 877606 - RNA, 23 nt, Human
uggacucuuacagccuucaaucu

SEQ ID NO: 877607 - RNA, 20 nt, Human
ugucaaagauggcauuugaa

SEQ ID NO: 877608 - RNA, 21 nt, Human
uuuacugggagaacaaacacc

SEQ ID NO: 877609 - RNA, 24 nt, Human
uuuuuuuuuuuuuuuuuuuuuggg

SEQ ID NO: 877610 - RNA, 18 nt, Human
aaaaggaggcagccgaga

SEQ ID NO: 877611 - RNA, 18 nt, Human
aaagugaugccaagagaa

SEQ ID NO: 877612 - RNA, 20 nt, Human
aaccauugaagaccaggguc

SEQ ID NO: 877613 - RNA, 23 nt, Human
accguccccgcugccagccacgc

SEQ ID NO: 877614 - RNA, 22 nt, Human
accucgucuccucccuccucag

SEQ ID NO: 877615 - RNA, 22 nt, Human
agagaaccucgucuccucccuc

SEQ ID NO: 877616 - RNA, 19 nt, Human
aggcccuggggguugacau

SEQ ID NO: 877617 - RNA, 21 nt, Human
agggagaaagugaugccaaga

SEQ ID NO: 877618 - RNA, 20 nt, Human
agggugucuaguucugcagc

SEQ ID NO: 877619 - RNA, 18 nt, Human
caaauauucacuaaauau

SEQ ID NO: 877620 - RNA, 20 nt, Human
caacggaaaaggaggcagcc

SEQ ID NO: 877621 - RNA, 28 nt, Human
caagagaaccucgucuccucccuccuca

SEQ ID NO: 877622 - RNA, 22 nt, Human
cacagggaggugguuuugccag

SEQ ID NO: 877623 - RNA, 21 nt, Human
caccacuggaaucucaauagc

SEQ ID NO: 877624 - RNA, 23 nt, Human
cacccaaaacuuuccgcugggca

SEQ ID NO: 877625 - RNA, 20 nt, Human
cacccagacccccgccgacc

SEQ ID NO: 877626 - RNA, 23 nt, Human
caggaaguggacccccccacccu

SEQ ID NO: 877627 - RNA, 24 nt, Human
ccaaagguuagacuuccucccggc

SEQ ID NO: 877628 - RNA, 23 nt, Human
ccaggaugugguuuggggcgcga

SEQ ID NO: 877629 - RNA, 22 nt, Human
ccagggagaaagugaugccaag

SEQ ID NO: 877630 - RNA, 23 nt, Human
cccagacccccgccgaccucgga

SEQ ID NO: 877631 - RNA, 19 nt, Human
cccaggccaaaucuucaag

SEQ ID NO: 877632 - RNA, 22 nt, Human
ccccacccugcacaucccuucu

SEQ ID NO: 877633 - RNA, 21 nt, Human
cccggcacccaaaacuuuccg

SEQ ID NO: 877634 - RNA, 18 nt, Human
cccuaccugcccaaucag

SEQ ID NO: 877635 - RNA, 18 nt, Human
ccugcgccccggcgcacc

SEQ ID NO: 877636 - RNA, 22 nt, Human
cgcgcacgcgacucuugggccu

SEQ ID NO: 877637 - RNA, 20 nt, Human
cgcuccaggaugugguuugg

SEQ ID NO: 877638 - RNA, 23 nt, Human
cuaguucugcagccagggagaaa

SEQ ID NO: 877639 - RNA, 19 nt, Human
cuggaaucucaauagcaca

SEQ ID NO: 877640 - RNA, 22 nt, Human
cugggcagagucccuaccugcc

SEQ ID NO: 877641 - RNA, 19 nt, Human
cuugggccugcgccccggc

SEQ ID NO: 877642 - RNA, 20 nt, Human
cuuuccgcugggcagagucc

SEQ ID NO: 877643 - RNA, 22 nt, Human
gagcaggaaguggaccccccca

SEQ ID NO: 877644 - RNA, 18 nt, Human
gcagagucccuaccugcc

SEQ ID NO: 877645 - RNA, 19 nt, Human
gcccgggggugggcccggg

SEQ ID NO: 877646 - RNA, 27 nt, Human
ggagcagaugaguaggacacgcgucug

SEQ ID NO: 877647 - RNA, 21 nt, Human
gggagcagaugaguaggacac

SEQ ID NO: 877648 - RNA, 23 nt, Human
gggcgcgaagggacaacggaaaa

SEQ ID NO: 877649 - RNA, 21 nt, Human
gucucacuggcccaggccaaa

SEQ ID NO: 877650 - RNA, 23 nt, Human
uaaaucaaauauucacuaaauau

SEQ ID NO: 877651 - RNA, 30 nt, Human
ucagcgcggcccgggggugggcccgggggg

SEQ ID NO: 877652 - RNA, 19 nt, Human
ucccaaagguuagacuucc

SEQ ID NO: 877653 - RNA, 20 nt, Human
uccgcugggcagagucccua

SEQ ID NO: 877654 - RNA, 19 nt, Human
uccugcuuucuuuucuccc

SEQ ID NO: 877655 - RNA, 20 nt, Human
ucucaauagcacauuuuccu

SEQ ID NO: 877656 - RNA, 20 nt, Human
ucucacuggcccaggccaaa

SEQ ID NO: 877657 - RNA, 23 nt, Human
ugaugccaagagaaccucgucuc

SEQ ID NO: 877658 - RNA, 21 nt, Human
ugcagccagggagaaagugau

SEQ ID NO: 877659 - RNA, 24 nt, Human
ugcagccagggagaaagugaugcc

SEQ ID NO: 877660 - RNA, 19 nt, Human
uggaagguugucuucuaga

SEQ ID NO: 877661 - RNA, 22 nt, Human
ugucuuggagucucccaaaggu

SEQ ID NO: 877662 - RNA, 18 nt, Human
uguguggcacagggaggu

SEQ ID NO: 877663 - RNA, 19 nt, Human
uuugaaggggaaauaaaua

SEQ ID NO: 877664 - RNA, 18 nt, Human
aaacuggugaagcuagca

SEQ ID NO: 877665 - RNA, 22 nt, Human
aaagacagaaaagccacaagga

SEQ ID NO: 877666 - RNA, 23 nt, Human
aaauaacagggucuuaggaagga

SEQ ID NO: 877667 - RNA, 19 nt, Human
aacccuacuuccucauccc

SEQ ID NO: 877668 - RNA, 21 nt, Human
aauaacacaaauaacaggguc

SEQ ID NO: 877669 - RNA, 23 nt, Human
acaaggaacagaaacuggugaag

SEQ ID NO: 877670 - RNA, 18 nt, Human
acacacauacacacagga

SEQ ID NO: 877671 - RNA, 21 nt, Human
acagaaacuggugaagcuagc

SEQ ID NO: 877672 - RNA, 22 nt, Human
accacucacacacauacacaca

SEQ ID NO: 877673 - RNA, 19 nt, Human
acccuacuuccucauccca

SEQ ID NO: 877674 - RNA, 20 nt, Human
accugucaggagccucccuc

SEQ ID NO: 877675 - RNA, 27 nt, Human
acucucccacccuccugcccauccccu

SEQ ID NO: 877676 - RNA, 23 nt, Human
acuggccugcccaccacucacac

SEQ ID NO: 877677 - RNA, 22 nt, Human
agaaaaucugccccuguaaagg

SEQ ID NO: 877678 - RNA, 18 nt, Human
agaaacuggugaagcuag

SEQ ID NO: 877679 - RNA, 21 nt, Human
agaggacuugugggcugagau

SEQ ID NO: 877680 - RNA, 23 nt, Human
agcaaaagacagaaaagccacaa

SEQ ID NO: 877681 - RNA, 21 nt, Human
agcuagugagcaguaucccua

SEQ ID NO: 877682 - RNA, 23 nt, Human
aggaagagcaaggagguaucagc

SEQ ID NO: 877683 - RNA, 22 nt, Human
aggcaagaagggaaggggaagg

SEQ ID NO: 877684 - RNA, 24 nt, Human
aggcaagaagggaaggggaaggag

SEQ ID NO: 877685 - RNA, 25 nt, Human
aggcaggaaauaacacaaagggacc

SEQ ID NO: 877686 - RNA, 22 nt, Human
agggcagcccacugcaggacuc

SEQ ID NO: 877687 - RNA, 19 nt, Human
auccacucucccacccucc

SEQ ID NO: 877688 - RNA, 22 nt, Human
auuucauuguugaacugagcag

SEQ ID NO: 877689 - RNA, 24 nt, Human
auuucauuguugaacugagcagaa

SEQ ID NO: 877690 - RNA, 26 nt, Human
cacucucccacccuccugcccauccc

SEQ ID NO: 877691 - RNA, 23 nt, Human
cagaaaagccacaaggaauccau

SEQ ID NO: 877692 - RNA, 21 nt, Human
cauccccugcccccccucacc

SEQ ID NO: 877693 - RNA, 23 nt, Human
caucuaggaagagcaaggaggua

SEQ ID NO: 877694 - RNA, 24 nt, Human
caucuaggaagagcaaggagguau

SEQ ID NO: 877695 - RNA, 18 nt, Human
ccagagcagacccacagg

SEQ ID NO: 877696 - RNA, 22 nt, Human
ccaggcucuaaccugcagcgcc

SEQ ID NO: 877697 - RNA, 24 nt, Human
cccacacaccacaggcacacaccu

SEQ ID NO: 877698 - RNA, 21 nt, Human
cccaccacucacacacauaca

SEQ ID NO: 877699 - RNA, 19 nt, Human
cccagaaaaagcaacucaa

SEQ ID NO: 877700 - RNA, 18 nt, Human
ccccugaguaucccuaga

SEQ ID NO: 877701 - RNA, 24 nt, Human
ccccugcccccccucaccaggcug

SEQ ID NO: 877702 - RNA, 18 nt, Human
cccuaggguggagaggac

SEQ ID NO: 877703 - RNA, 22 nt, Human
cccugccacuggccugcccacc

SEQ ID NO: 877704 - RNA, 23 nt, Human
ccuaagaccgcugacagggccuc

SEQ ID NO: 877705 - RNA, 19 nt, Human
ccucccucaggaaacuggg

SEQ ID NO: 877706 - RNA, 25 nt, Human
ccucuauaccagccuguaucugcuc

SEQ ID NO: 877707 - RNA, 22 nt, Human
ccugcagggccugccuagggga

SEQ ID NO: 877708 - RNA, 19 nt, Human
ccuguaucugcuccuagag

SEQ ID NO: 877709 - RNA, 24 nt, Human
cgccgagggcuccggggacggcgg

SEQ ID NO: 877710 - RNA, 24 nt, Human
cggggacggcgggcagaauccgcu

SEQ ID NO: 877711 - RNA, 22 nt, Human
cucauccacucucccacccucc

SEQ ID NO: 877712 - RNA, 22 nt, Human
cucccgugaccccuaguuaugc

SEQ ID NO: 877713 - RNA, 22 nt, Human
cucuauaccagccuguaucugc

SEQ ID NO: 877714 - RNA, 26 nt, Human
cucuauaccagccuguaucugcuccc

SEQ ID NO: 877715 - RNA, 22 nt, Human
cugcauccucuauaccagccug

SEQ ID NO: 877716 - RNA, 24 nt, Human
cugccacuggccugcccaccacuc

SEQ ID NO: 877717 - RNA, 19 nt, Human
gagcagacccacaggcaug

SEQ ID NO: 877718 - RNA, 18 nt, Human
gagcagcaucccacaagg

SEQ ID NO: 877719 - RNA, 18 nt, Human
gaggugggcaucuaggaa

SEQ ID NO: 877720 - RNA, 21 nt, Human
gcaaaagacagaaaagccaca

SEQ ID NO: 877721 - RNA, 22 nt, Human
gcaagaagggaaggggaaggag

SEQ ID NO: 877722 - RNA, 18 nt, Human
gcaucuaggaagagcaag

SEQ ID NO: 877723 - RNA, 18 nt, Human
gcccacacaccacaggca

SEQ ID NO: 877724 - RNA, 21 nt, Human
gcccauccccugcccccccuc

SEQ ID NO: 877725 - RNA, 18 nt, Human
gccugggagaguguggga

SEQ ID NO: 877726 - RNA, 19 nt, Human
ggaaggacaaaaauggaag

SEQ ID NO: 877727 - RNA, 22 nt, Human
ggcaagaagggaaggggaagga

SEQ ID NO: 877728 - RNA, 23 nt, Human
gggaaggggaaggagagcaggag

SEQ ID NO: 877729 - RNA, 23 nt, Human
gggaauggugaggcaagaaggga

SEQ ID NO: 877730 - RNA, 19 nt, Human
gggcaugggggagcgaggg

SEQ ID NO: 877731 - RNA, 20 nt, Human
ggucugacaaagggcaccug

SEQ ID NO: 877732 - RNA, 20 nt, Human
guacagggcagcccacugca

SEQ ID NO: 877733 - RNA, 19 nt, Human
uaacacaaauaacaggguc

SEQ ID NO: 877734 - RNA, 22 nt, Human
uaacccaccgaccuucacacac

SEQ ID NO: 877735 - RNA, 21 nt, Human
uaacccuacuuccucauccca

SEQ ID NO: 877736 - RNA, 23 nt, Human
uagaagugagcuguagaaagagg

SEQ ID NO: 877737 - RNA, 20 nt, Human
uagcaaaagacagaaaagcc

SEQ ID NO: 877738 - RNA, 23 nt, Human
uagcaaaagacagaaaagccaca

SEQ ID NO: 877739 - RNA, 26 nt, Human
uagcaaaagacagaaaagccacaagg

SEQ ID NO: 877740 - RNA, 22 nt, Human
ucacacaccagagcagacccac

SEQ ID NO: 877741 - RNA, 18 nt, Human
ucauccacucucccaccc

SEQ ID NO: 877742 - RNA, 19 nt, Human
ucaugagguucaggguaca

SEQ ID NO: 877743 - RNA, 18 nt, Human
uccaugcaggggcugggg

SEQ ID NO: 877744 - RNA, 19 nt, Human
ucccacaaggaacagaaac

SEQ ID NO: 877745 - RNA, 22 nt, Human
ucccacccuccugcccaucccc

SEQ ID NO: 877746 - RNA, 23 nt, Human
uccuagagcagcccacacaccac

SEQ ID NO: 877747 - RNA, 26 nt, Human
uccugcccauccccugcccccccuca

SEQ ID NO: 877748 - RNA, 19 nt, Human
ucucccacccuccugccca

SEQ ID NO: 877749 - RNA, 21 nt, Human
ucugccccuguaaagggcaaa

SEQ ID NO: 877750 - RNA, 25 nt, Human
ucuuaggaaggacaaaaauggaagc

SEQ ID NO: 877751 - RNA, 22 nt, Human
ugaacugagcagaaaaucugcc

SEQ ID NO: 877752 - RNA, 18 nt, Human
ugagguucaggguacagg

SEQ ID NO: 877753 - RNA, 23 nt, Human
ugagguucaggguacagggcagc

SEQ ID NO: 877754 - RNA, 23 nt, Human
ugcaggggcuggggccggcccug

SEQ ID NO: 877755 - RNA, 22 nt, Human
ugccaggcucuaaccugcagcg

SEQ ID NO: 877756 - RNA, 24 nt, Human
ugccaggucucauugccacguccu

SEQ ID NO: 877757 - RNA, 18 nt, Human
ugcccuaccuuucugcau

SEQ ID NO: 877758 - RNA, 18 nt, Human
ugccgagcaagggcgagg

SEQ ID NO: 877759 - RNA, 19 nt, Human
ugccuaggggaauggugag

SEQ ID NO: 877760 - RNA, 21 nt, Human
ugcuccuagagcagcccacac

SEQ ID NO: 877761 - RNA, 19 nt, Human
uggcccaggguaaggaccc

SEQ ID NO: 877762 - RNA, 26 nt, Human
uggggccggcccugccacuggccugc

SEQ ID NO: 877763 - RNA, 21 nt, Human
ugguagggucugacaaagggc

SEQ ID NO: 877764 - RNA, 18 nt, Human
uguaaagggcaaaccucc

SEQ ID NO: 877765 - RNA, 21 nt, Human
ugucaggagccucccucagga

SEQ ID NO: 877766 - RNA, 21 nt, Human
ugugcaggagccuaagaccgc

SEQ ID NO: 877767 - RNA, 19 nt, Human
uucaguaggcacacaguua

SEQ ID NO: 877768 - RNA, 25 nt, Human
uuuuuuuuuuuuuggcuuugcaggg

SEQ ID NO: 877769 - RNA, 18 nt, Human
uuuuuuuuuuuuuuuuug

SEQ ID NO: 877770 - RNA, 24 nt, Human
uuuuuuuuuuuuuuuuuuggcuuu

SEQ ID NO: 877771 - RNA, 22 nt, Human
uuuuuuuuuuuuuuuuuuuggc

SEQ ID NO: 877772 - RNA, 23 nt, Human
aacuuuuuuuagccacagaccuu

SEQ ID NO: 877773 - RNA, 19 nt, Human
cacggcgggcugagccugg

SEQ ID NO: 877774 - RNA, 23 nt, Human
cacuggcacugcagggaaccuuc

SEQ ID NO: 877775 - RNA, 21 nt, Human
ccagccacggcgggcugagcc

SEQ ID NO: 877776 - RNA, 22 nt, Human
ccugggccugucaagcccugac

SEQ ID NO: 877777 - RNA, 22 nt, Human
cucaacagagaauguuuaugga

SEQ ID NO: 877778 - RNA, 19 nt, Human
gagugugggagugggaggg

SEQ ID NO: 877779 - RNA, 18 nt, Human
gcagcccaggggccagcc

SEQ ID NO: 877780 - RNA, 19 nt, Human
gccugggccugucaagccc

SEQ ID NO: 877781 - RNA, 18 nt, Human
gcgggcugagccugggcc

SEQ ID NO: 877782 - RNA, 18 nt, Human
gggcagcccaggggccag

SEQ ID NO: 877783 - RNA, 19 nt, Human
gggccugucaagcccugac

SEQ ID NO: 877784 - RNA, 21 nt, Human
gggcuacagucucgccagcug

SEQ ID NO: 877785 - RNA, 22 nt, Human
ucccugcugcagcacuggcacu

SEQ ID NO: 877786 - RNA, 26 nt, Human
ucccugcugcagcacuggcacugcag

SEQ ID NO: 877787 - RNA, 23 nt, Human
uccucaacagagaauguuuaugg

SEQ ID NO: 877788 - RNA, 21 nt, Human
ucgcugcuucugcccagcucu

SEQ ID NO: 877789 - RNA, 19 nt, Human
ugcaagagugaguguggga

SEQ ID NO: 877790 - RNA, 21 nt, Human
ugcuuaaagacacaggcucug

SEQ ID NO: 877791 - RNA, 18 nt, Human
ugcuucugcccagcucuc

SEQ ID NO: 877792 - RNA, 21 nt, Human
ugcuucugcccagcucucccu

SEQ ID NO: 877793 - RNA, 19 nt, Human
uuuauggagucagcacgaa

SEQ ID NO: 877794 - RNA, 25 nt, Human
uuuuuuuuuuuuuuuuuugauuuuu

SEQ ID NO: 877795 - RNA, 20 nt, Human
uuuuuuuuuuuuuuuuuugg

SEQ ID NO: 877796 - RNA, 20 nt, Human
aagacuuuuguugaaaaauu

SEQ ID NO: 877797 - RNA, 20 nt, Human
aauagaauacaaaaagcuag

SEQ ID NO: 877798 - RNA, 19 nt, Human
acuuuuuuucuaaagagaa

SEQ ID NO: 877799 - RNA, 21 nt, Human
agaaagugaugaaaaauccaa

SEQ ID NO: 877800 - RNA, 24 nt, Human
agaagguaauauucaguuaccaga

SEQ ID NO: 877801 - RNA, 25 nt, Human
agaugcuuauuuucuaccuuuuccu

SEQ ID NO: 877802 - RNA, 21 nt, Human
augaaaaauccaaaauuucug

SEQ ID NO: 877803 - RNA, 18 nt, Human
caaaaagcuacacuggac

SEQ ID NO: 877804 - RNA, 20 nt, Human
caaagcuucagagcucaaaa

SEQ ID NO: 877805 - RNA, 22 nt, Human
caaccaccuaaaacugaaauuu

SEQ ID NO: 877806 - RNA, 19 nt, Human
cagaaggccaucuccacca

SEQ ID NO: 877807 - RNA, 23 nt, Human
caucaaauaauauaauaccaaau

SEQ ID NO: 877808 - RNA, 30 nt, Human
ccucuuaugaacgaaagaaauauagagguu

SEQ ID NO: 877809 - RNA, 27 nt, Human
cuaaaacugaaauuuucuguacuuagu

SEQ ID NO: 877810 - RNA, 19 nt, Human
gaacgaaagaaauauagag

SEQ ID NO: 877811 - RNA, 22 nt, Human
gcaaacaucaaauaauauaaua

SEQ ID NO: 877812 - RNA, 24 nt, Human
gccaucuccaccacugaaugauuc

SEQ ID NO: 877813 - RNA, 21 nt, Human
uaacaccacagaacuuuugaa

SEQ ID NO: 877814 - RNA, 24 nt, Human
uaacaccacagaacuuuugaauau

SEQ ID NO: 877815 - RNA, 24 nt, Human
uaagauugaaacagacuauuacaa

SEQ ID NO: 877816 - RNA, 26 nt, Human
uacuuuuuuucuaaagagaaagugau

SEQ ID NO: 877817 - RNA, 23 nt, Human
uagggcaucacagguuuuagaaa

SEQ ID NO: 877818 - RNA, 24 nt, Human
uaguacaacaccuucauucuuaau

SEQ ID NO: 877819 - RNA, 21 nt, Human
ucaaagcuucagagcucaaaa

SEQ ID NO: 877820 - RNA, 21 nt, Human
uccaaagcuugauuuaaaugu

SEQ ID NO: 877821 - RNA, 25 nt, Human
ugaaaaauccaaaauuucugcaucc

SEQ ID NO: 877822 - RNA, 18 nt, Human
ugaaacagacuauuacaa

SEQ ID NO: 877823 - RNA, 24 nt, Human
ugaaacagacuauuacaacaauau

SEQ ID NO: 877824 - RNA, 23 nt, Human
ugaauauccccuuuucccaauug

SEQ ID NO: 877825 - RNA, 21 nt, Human
uuaguacaacaccuucauucu

SEQ ID NO: 877826 - RNA, 19 nt, Human
uucugcauccaguguuuga

SEQ ID NO: 877827 - RNA, 26 nt, Human
uuugaauauccccuuuucccaauugu

SEQ ID NO: 877828 - RNA, 21 nt, Human
aaaguagaaauaucugcuuac

SEQ ID NO: 877829 - RNA, 21 nt, Human
acggcucccuccucccgcggc

SEQ ID NO: 877830 - RNA, 18 nt, Human
agguaaauucaaacaaaa

SEQ ID NO: 877831 - RNA, 24 nt, Human
auagcauuccccucccacaccaca

SEQ ID NO: 877832 - RNA, 26 nt, Human
caaacaaaaaguaaaucauccucagu

SEQ ID NO: 877833 - RNA, 23 nt, Human
caaacacuagagcugggggccag

SEQ ID NO: 877834 - RNA, 20 nt, Human
cagcuccucggugacggcuc

SEQ ID NO: 877835 - RNA, 22 nt, Human
cagcuccucggugacggcuccc

SEQ ID NO: 877836 - RNA, 25 nt, Human
cucccacaccacaaaaguagaaaua

SEQ ID NO: 877837 - RNA, 23 nt, Human
cugcccggggcagcgagcggcag

SEQ ID NO: 877838 - RNA, 20 nt, Human
gagcugggggccagagaaag

SEQ ID NO: 877839 - RNA, 21 nt, Human
gcauuccccucccacaccaca

SEQ ID NO: 877840 - RNA, 30 nt, Human
gcggcagcuccucggugacggcucccuccu

SEQ ID NO: 877841 - RNA, 21 nt, Human
uacuaugcuaaugccauaggu

SEQ ID NO: 877842 - RNA, 28 nt, Human
uccccucccacaccacaaaaguagaaau

SEQ ID NO: 877843 - RNA, 18 nt, Human
ugccuugguugcaacugu

SEQ ID NO: 877844 - RNA, 18 nt, Human
ugguugcaacugugcccc

SEQ ID NO: 877845 - RNA, 19 nt, Human
aaaaagcucaccucacaac

SEQ ID NO: 877846 - RNA, 21 nt, Human
cgucuuugguccucuuuccaa

SEQ ID NO: 877847 - RNA, 21 nt, Human
cucuggggaugcuugcuuccc

SEQ ID NO: 877848 - RNA, 19 nt, Human
cugaaaaagcucaccucac

SEQ ID NO: 877849 - RNA, 24 nt, Human
ugaaaaagcucaccucacaacgcc

SEQ ID NO: 877850 - RNA, 24 nt, Human
ugaugauacacacaaaucugccuc

SEQ ID NO: 877851 - RNA, 24 nt, Human
ugccucaauuauucaauuaguuuu

SEQ ID NO: 877852 - RNA, 21 nt, Human
uuaguuuuguugggcccaauu

SEQ ID NO: 877853 - RNA, 22 nt, Human
aggaagaaggaaaguacacugg

SEQ ID NO: 877854 - RNA, 23 nt, Human
agggaagaagugauggagaggaa

SEQ ID NO: 877855 - RNA, 21 nt, Human
agugauggagaggaagaagga

SEQ ID NO: 877856 - RNA, 23 nt, Human
caaagaggaucccgaaagacagu

SEQ ID NO: 877857 - RNA, 20 nt, Human
cacuggccaauacucugaaa

SEQ ID NO: 877858 - RNA, 21 nt, Human
cacuggccaauacucugaaac

SEQ ID NO: 877859 - RNA, 19 nt, Human
ccuuauccuccccacuccc

SEQ ID NO: 877860 - RNA, 18 nt, Human
gacagcgccuuauccucc

SEQ ID NO: 877861 - RNA, 18 nt, Human
gccaauacucugaaacug

SEQ ID NO: 877862 - RNA, 20 nt, Human
ggaagaagugauggagagga

SEQ ID NO: 877863 - RNA, 18 nt, Human
ggagaggaagaaggaaag

SEQ ID NO: 877864 - RNA, 25 nt, Human
ggcaacagugggggcaaccgguacc

SEQ ID NO: 877865 - RNA, 21 nt, Human
gggaagaagugauggagagga

SEQ ID NO: 877866 - RNA, 18 nt, Human
gguccugugagagcuguu

SEQ ID NO: 877867 - RNA, 23 nt, Human
gucucaaugauuauucccauccc

SEQ ID NO: 877868 - RNA, 22 nt, Human
uccaagaaguuugugagucacc

SEQ ID NO: 877869 - RNA, 21 nt, Human
ugaaacugacugacuugggua

SEQ ID NO: 877870 - RNA, 19 nt, Human
ugauuauucccaucccaau

SEQ ID NO: 877871 - RNA, 22 nt, Human
uuaacuuaagggaagaagugau

SEQ ID NO: 877872 - RNA, 27 nt, Human
uuggaaaacgauccaccaaccuuuuua

SEQ ID NO: 877873 - RNA, 18 nt, Human
uuuuuuuuuuuuuuuuug

SEQ ID NO: 877874 - RNA, 19 nt, Human
accucccucccuccuuccc

SEQ ID NO: 877875 - RNA, 23 nt, Human
agaggcugggucagcuguggaug

SEQ ID NO: 877876 - RNA, 24 nt, Human
agccaggggaguggguaggccaua

SEQ ID NO: 877877 - RNA, 22 nt, Human
aggcugggucagcuguggaugg

SEQ ID NO: 877878 - RNA, 22 nt, Human
auagcagaaagggagaacugag

SEQ ID NO: 877879 - RNA, 23 nt, Human
augauucuagauccuagacagag

SEQ ID NO: 877880 - RNA, 19 nt, Human
caaagagagcacugcccuu

SEQ ID NO: 877881 - RNA, 22 nt, Human
ccagcugcagaccuccaguugc

SEQ ID NO: 877882 - RNA, 18 nt, Human
cccaaauagcuccucugc

SEQ ID NO: 877883 - RNA, 20 nt, Human
cccaaccacagcaaaggcaa

SEQ ID NO: 877884 - RNA, 18 nt, Human
ccucccucccuccuuccc

SEQ ID NO: 877885 - RNA, 18 nt, Human
ccucuuaccucccucccu

SEQ ID NO: 877886 - RNA, 19 nt, Human
ccugaagugucaccucucu

SEQ ID NO: 877887 - RNA, 24 nt, Human
cuccagagaucaccaagccccucu

SEQ ID NO: 877888 - RNA, 20 nt, Human
cucgugcugccucugguccc

SEQ ID NO: 877889 - RNA, 21 nt, Human
cugaagcugauuuguaaugau

SEQ ID NO: 877890 - RNA, 22 nt, Human
cugcugugggcugggcuuccag

SEQ ID NO: 877891 - RNA, 18 nt, Human
cugucccaaauagcuccu

SEQ ID NO: 877892 - RNA, 18 nt, Human
gaacugacuccuguccca

SEQ ID NO: 877893 - RNA, 21 nt, Human
gacaagaguugcuugggacgc

SEQ ID NO: 877894 - RNA, 21 nt, Human
gaccucuccucuggccugugg

SEQ ID NO: 877895 - RNA, 22 nt, Human
gcaaaggcaacacucuuccucc

SEQ ID NO: 877896 - RNA, 18 nt, Human
gcggcggggcgcgcgagc

SEQ ID NO: 877897 - RNA, 20 nt, Human
gcugugggcugggcuuccag

SEQ ID NO: 877898 - RNA, 20 nt, Human
ggcuggaaggagagaugcca

SEQ ID NO: 877899 - RNA, 18 nt, Human
gugcaguuugggcuggaa

SEQ ID NO: 877900 - RNA, 26 nt, Human
gugcugccucuggucccugaaggaaa

SEQ ID NO: 877901 - RNA, 22 nt, Human
guggguuaugauucuagauccu

SEQ ID NO: 877902 - RNA, 18 nt, Human
guuaaggaauggcugaug

SEQ ID NO: 877903 - RNA, 20 nt, Human
uagcagaaagggagaacuga

SEQ ID NO: 877904 - RNA, 24 nt, Human
ucacuuugcuccucuugcccucug

SEQ ID NO: 877905 - RNA, 21 nt, Human
ucaggaccucuccucuggccu

SEQ ID NO: 877906 - RNA, 20 nt, Human
ucugucuucugguccaggca

SEQ ID NO: 877907 - RNA, 25 nt, Human
ugacuccugucccaaauagcuccuc

SEQ ID NO: 877908 - RNA, 25 nt, Human
ugccucuggucccugaagugucacc

SEQ ID NO: 877909 - RNA, 23 nt, Human
uggaaggagagaugccagcccuc

SEQ ID NO: 877910 - RNA, 19 nt, Human
uggauagcagaaagggaga

SEQ ID NO: 877911 - RNA, 22 nt, Human
uggaugggguggugccuugguc

SEQ ID NO: 877912 - RNA, 20 nt, Human
uggcugaugacugcuacacc

SEQ ID NO: 877913 - RNA, 18 nt, Human
ugggaaccugguuggggc

SEQ ID NO: 877914 - RNA, 18 nt, Human
ugggcuggaaggagagau

SEQ ID NO: 877915 - RNA, 19 nt, Human
ugggcuuccagcugcagac

SEQ ID NO: 877916 - RNA, 21 nt, Human
uggggcugugcaguuugggaa

SEQ ID NO: 877917 - RNA, 21 nt, Human
uggucccugaagugucaccuc

SEQ ID NO: 877918 - RNA, 28 nt, Human
ugguuggggcugugcaguucuggaguca

SEQ ID NO: 877919 - RNA, 23 nt, Human
ugugggcugggcuuccagcugca

SEQ ID NO: 877920 - RNA, 20 nt, Human
uuaccucccucccuccuucc

SEQ ID NO: 877921 - RNA, 20 nt, Human
uuccagcugcagaccuccag

SEQ ID NO: 877922 - RNA, 19 nt, Human
aacuguggacacauucacc

SEQ ID NO: 877923 - RNA, 24 nt, Human
aagaaaccagacccagccauaagc

SEQ ID NO: 877924 - RNA, 19 nt, Human
aagcagcucgagcagggac

SEQ ID NO: 877925 - RNA, 19 nt, Human
aaggggucaggggcagagc

SEQ ID NO: 877926 - RNA, 19 nt, Human
acagccccugcagcagcaa

SEQ ID NO: 877927 - RNA, 19 nt, Human
acaggcugucaucuuccag

SEQ ID NO: 877928 - RNA, 24 nt, Human
acuugcgcacgugaggcagccgcc

SEQ ID NO: 877929 - RNA, 19 nt, Human
agagaaaaucaucucaagg

SEQ ID NO: 877930 - RNA, 26 nt, Human
agcaggggaauggagguuuuggaggg

SEQ ID NO: 877931 - RNA, 23 nt, Human
aggaaccgggagaagggccacuu

SEQ ID NO: 877932 - RNA, 19 nt, Human
aggaccaaccgcgccgcca

SEQ ID NO: 877933 - RNA, 21 nt, Human
aggagaaaaggaggauggaga

SEQ ID NO: 877934 - RNA, 20 nt, Human
aggcaaggagaaaaggagga

SEQ ID NO: 877935 - RNA, 21 nt, Human
aggcauaguguggccccugcc

SEQ ID NO: 877936 - RNA, 20 nt, Human
agggaggccagcagggcggg

SEQ ID NO: 877937 - RNA, 21 nt, Human
agguggcgccuugggcagagc

SEQ ID NO: 877938 - RNA, 18 nt, Human
auccugcuccaaccucuc

SEQ ID NO: 877939 - RNA, 21 nt, Human
aucgccccuuccuccucccca

SEQ ID NO: 877940 - RNA, 23 nt, Human
augagcagcaggagagcccggaa

SEQ ID NO: 877941 - RNA, 26 nt, Human
augcccaccagcacgcgcacacacgg

SEQ ID NO: 877942 - RNA, 18 nt, Human
auggagagagccccagcc

SEQ ID NO: 877943 - RNA, 25 nt, Human
caaaagaagcuagcgcaggccaccc

SEQ ID NO: 877944 - RNA, 20 nt, Human
caaggagaaaaggaggaugg

SEQ ID NO: 877945 - RNA, 21 nt, Human
caagugauuauugauggugac

SEQ ID NO: 877946 - RNA, 23 nt, Human
cacagguagauugaguguaggaa

SEQ ID NO: 877947 - RNA, 20 nt, Human
cacaucccuugccacccucc

SEQ ID NO: 877948 - RNA, 21 nt, Human
cacaucccuugccacccuccc

SEQ ID NO: 877949 - RNA, 18 nt, Human
caccacguugaccaggcc

SEQ ID NO: 877950 - RNA, 25 nt, Human
caccacguugaccaggccaauagcc

SEQ ID NO: 877951 - RNA, 21 nt, Human
caccagacagggaacaugcac

SEQ ID NO: 877952 - RNA, 22 nt, Human
caccggcucacggucgcccugg

SEQ ID NO: 877953 - RNA, 18 nt, Human
cacguugaccaggccaau

SEQ ID NO: 877954 - RNA, 22 nt, Human
cacuuugugaccuuccuggagg

SEQ ID NO: 877955 - RNA, 19 nt, Human
cagaaagcugaaaaagagg

SEQ ID NO: 877956 - RNA, 18 nt, Human
cagcaagaccaccaccac

SEQ ID NO: 877957 - RNA, 21 nt, Human
cagcaagaccaccaccacgca

SEQ ID NO: 877958 - RNA, 23 nt, Human
cagcagcaagaccaccaccacgc

SEQ ID NO: 877959 - RNA, 24 nt, Human
cagcugggugcugcagccccacgg

SEQ ID NO: 877960 - RNA, 22 nt, Human
ccaggacccagaagagcggugg

SEQ ID NO: 877961 - RNA, 18 nt, Human
ccaggccagccaccacac

SEQ ID NO: 877962 - RNA, 22 nt, Human
ccaggccagccaccacaccacg

SEQ ID NO: 877963 - RNA, 22 nt, Human
ccauagucgaagcggaugaggc

SEQ ID NO: 877964 - RNA, 18 nt, Human
cccuuccuccuccccaaa

SEQ ID NO: 877965 - RNA, 24 nt, Human
ccucucaacuguggacacauucac

SEQ ID NO: 877966 - RNA, 19 nt, Human
ccugcagcagcaagaccac

SEQ ID NO: 877967 - RNA, 19 nt, Human
ccugccugcccuggggcca

SEQ ID NO: 877968 - RNA, 18 nt, Human
ccuggcuguccgcccagg

SEQ ID NO: 877969 - RNA, 23 nt, Human
ccugggagccgcucgccagcgcc

SEQ ID NO: 877970 - RNA, 18 nt, Human
ccuucagcagguacaggc

SEQ ID NO: 877971 - RNA, 22 nt, Human
cgaagcggaugaggcucaggua

SEQ ID NO: 877972 - RNA, 19 nt, Human
cgccgcugguuccacaggc

SEQ ID NO: 877973 - RNA, 24 nt, Human
cgcgcacacacguuccccuaaccc

SEQ ID NO: 877974 - RNA, 19 nt, Human
cggucagcaugagcagcag

SEQ ID NO: 877975 - RNA, 26 nt, Human
cucccuccauucuauuccuguggggc

SEQ ID NO: 877976 - RNA, 24 nt, Human
cucucaacuguggacacauucacc

SEQ ID NO: 877977 - RNA, 23 nt, Human
cugaccacagcugggugcugcag

SEQ ID NO: 877978 - RNA, 23 nt, Human
cuguggacacauucaccggcagu

SEQ ID NO: 877979 - RNA, 22 nt, Human
cuuucuccccuucucccucaaa

SEQ ID NO: 877980 - RNA, 18 nt, Human
gaacaggaaccgggagaa

SEQ ID NO: 877981 - RNA, 22 nt, Human
gaagaaaccagacccagccaua

SEQ ID NO: 877982 - RNA, 23 nt, Human
gaccacagcugggugcugcagcc

SEQ ID NO: 877983 - RNA, 20 nt, Human
gagcagcaggagagcccgga

SEQ ID NO: 877984 - RNA, 19 nt, Human
gauuccuucagcagguaca

SEQ ID NO: 877985 - RNA, 18 nt, Human
gcaaggagaaaaggagga

SEQ ID NO: 877986 - RNA, 19 nt, Human
gcagcucgagcagggacag

SEQ ID NO: 877987 - RNA, 19 nt, Human
gcagucgcgguacaccggc

SEQ ID NO: 877988 - RNA, 22 nt, Human
gcauagcuccccucccucaaag

SEQ ID NO: 877989 - RNA, 18 nt, Human
gccccugccugcccuggg

SEQ ID NO: 877990 - RNA, 20 nt, Human
gcgcaggccacccgaguccc

SEQ ID NO: 877991 - RNA, 21 nt, Human
gcucccuccauucuauuccug

SEQ ID NO: 877992 - RNA, 20 nt, Human
gcucuugaaagaacaggaac

SEQ ID NO: 877993 - RNA, 21 nt, Human
gcuuucuccccuucucccuca

SEQ ID NO: 877994 - RNA, 24 nt, Human
ggaccagaaccaugcauugaggga

SEQ ID NO: 877995 - RNA, 18 nt, Human
ggacccagaagagcggug

SEQ ID NO: 877996 - RNA, 19 nt, Human
ggagaagggaggccagcag

SEQ ID NO: 877997 - RNA, 21 nt, Human
ggcagagcuggcgcuccacaa

SEQ ID NO: 877998 - RNA, 22 nt, Human
gggaauggagguuuuggagggg

SEQ ID NO: 877999 - RNA, 18 nt, Human
gggagaagggaggccagc

SEQ ID NO: 878000 - RNA, 21 nt, Human
gggagaagggaggccagcagg

SEQ ID NO: 878001 - RNA, 23 nt, Human
gggcagagcaaaaauccagucug

SEQ ID NO: 878002 - RNA, 21 nt, Human
ggggaauggagguuuuggagg

SEQ ID NO: 878003 - RNA, 19 nt, Human
ggggcuggcagcaggggaa

SEQ ID NO: 878004 - RNA, 22 nt, Human
gguacaggcugucaucuuccag

SEQ ID NO: 878005 - RNA, 23 nt, Human
gucgucccgacagguccagccug

SEQ ID NO: 878006 - RNA, 19 nt, Human
guggaaaacuguggaccag

SEQ ID NO: 878007 - RNA, 18 nt, Human
guggacagggauggugcu

SEQ ID NO: 878008 - RNA, 19 nt, Human
uacaggcugucaucuucca

SEQ ID NO: 878009 - RNA, 22 nt, Human
uagagcccaacggugacccaca

SEQ ID NO: 878010 - RNA, 22 nt, Human
uagcauagcuccccucccucaa

SEQ ID NO: 878011 - RNA, 18 nt, Human
uaggaugacaguggaggc

SEQ ID NO: 878012 - RNA, 19 nt, Human
uaggaugacaguggaggca

SEQ ID NO: 878013 - RNA, 19 nt, Human
ucauacuuacagucguccc

SEQ ID NO: 878014 - RNA, 21 nt, Human
uccacaggcaccaggccagcc

SEQ ID NO: 878015 - RNA, 21 nt, Human
ucccugagguuggaguccuag

SEQ ID NO: 878016 - RNA, 19 nt, Human
ucccugguguggaaaacug

SEQ ID NO: 878017 - RNA, 19 nt, Human
uccuucagcagguacaggc

SEQ ID NO: 878018 - RNA, 21 nt, Human
ucgccccuuccuccuccccaa

SEQ ID NO: 878019 - RNA, 25 nt, Human
ugaaagaacaggaaccgggagaagg

SEQ ID NO: 878020 - RNA, 21 nt, Human
ugacaguggaggcacagaagu

SEQ ID NO: 878021 - RNA, 22 nt, Human
ugaccacagcugggugcugcag

SEQ ID NO: 878022 - RNA, 22 nt, Human
ugagaaacgaggccacggccga

SEQ ID NO: 878023 - RNA, 20 nt, Human
ugaggcagccgccgcugguu

SEQ ID NO: 878024 - RNA, 22 nt, Human
ugaggucagugucccuggugug

SEQ ID NO: 878025 - RNA, 22 nt, Human
ugauuuauuaagcacaucccuu

SEQ ID NO: 878026 - RNA, 19 nt, Human
ugcccuggggccacccugg

SEQ ID NO: 878027 - RNA, 19 nt, Human
ugcgguagcggcagagcau

SEQ ID NO: 878028 - RNA, 20 nt, Human
ugcugcagccccacgguccu

SEQ ID NO: 878029 - RNA, 21 nt, Human
ugcugcagccccacgguccug

SEQ ID NO: 878030 - RNA, 23 nt, Human
uggaaaacuguggaccagaacca

SEQ ID NO: 878031 - RNA, 19 nt, Human
uggaguccuagcauagcuc

SEQ ID NO: 878032 - RNA, 21 nt, Human
uggcgggagcggaagugauuc

SEQ ID NO: 878033 - RNA, 21 nt, Human
ugggagccgcucgccagcgcc

SEQ ID NO: 878034 - RNA, 18 nt, Human
ugggcauccaggacccag

SEQ ID NO: 878035 - RNA, 19 nt, Human
ugggggaggaggcuggcac

SEQ ID NO: 878036 - RNA, 22 nt, Human
ugggugcugcagccccacgguc

SEQ ID NO: 878037 - RNA, 18 nt, Human
ugguacaugggggaggag

SEQ ID NO: 878038 - RNA, 21 nt, Human
ugguacaugggggaggaggcu

SEQ ID NO: 878039 - RNA, 23 nt, Human
uguggaccagaaccaugcauuga

SEQ ID NO: 878040 - RNA, 20 nt, Human
uuaaaaguuuucaguaucaa

SEQ ID NO: 878041 - RNA, 20 nt, Human
uucaagaaguugaaaagaga

SEQ ID NO: 878042 - RNA, 21 nt, Human
uugaacuuguccucugauucc

SEQ ID NO: 878043 - RNA, 22 nt, Human
uugaccaggccaauagccacgu

SEQ ID NO: 878044 - RNA, 22 nt, Human
uuuuuuuuuuuugaggcuugga

SEQ ID NO: 878045 - RNA, 18 nt, Human
uuuuuuuuuuuuuuuuug

SEQ ID NO: 878046 - RNA, 21 nt, Human
uuuuuuuuuuuuuuuuugagg

SEQ ID NO: 878047 - RNA, 33 nt, Human
uuuuuuuuuuuuuuuuugaggcuuggaauugau

SEQ ID NO: 878048 - RNA, 26 nt, Human
aaaaaaaaacaaaaacaaaaaaacaa

SEQ ID NO: 878049 - RNA, 22 nt, Human
aaaaacaacuaagaggccgggc

SEQ ID NO: 878050 - RNA, 22 nt, Human
aaaaaugcugaagauuaguaua

SEQ ID NO: 878051 - RNA, 23 nt, Human
aaacagcuauagaaacuaguuuu

SEQ ID NO: 878052 - RNA, 25 nt, Human
aagugauccucccaccucggccucc

SEQ ID NO: 878053 - RNA, 27 nt, Human
aagugauccucccaccucggccuccca

SEQ ID NO: 878054 - RNA, 18 nt, Human
aagugcugaaguuuaccu

SEQ ID NO: 878055 - RNA, 24 nt, Human
aaucgcuugaauccaggaggugga

SEQ ID NO: 878056 - RNA, 24 nt, Human
acagagcaagacuccaucucaaaa

SEQ ID NO: 878057 - RNA, 23 nt, Human
accucggccucccaaagugcuga

SEQ ID NO: 878058 - RNA, 19 nt, Human
acugagauccagaguuuag

SEQ ID NO: 878059 - RNA, 23 nt, Human
acugcacuccagucuggcgacag

SEQ ID NO: 878060 - RNA, 25 nt, Human
acugcacuccagucuggcgacagag

SEQ ID NO: 878061 - RNA, 20 nt, Human
agaaaacagcuauagaaacu

SEQ ID NO: 878062 - RNA, 22 nt, Human
agaaucgcuugaauccaggagg

SEQ ID NO: 878063 - RNA, 24 nt, Human
agaggccgggcacgguggcucaug

SEQ ID NO: 878064 - RNA, 21 nt, Human
agccagcgccgcggccggaca

SEQ ID NO: 878065 - RNA, 23 nt, Human
aggcaggagaaucgcuugaaucc

SEQ ID NO: 878066 - RNA, 24 nt, Human
aggcaggagaaucgcuugaaucca

SEQ ID NO: 878067 - RNA, 20 nt, Human
aggcugaggcaggagaaucg

SEQ ID NO: 878068 - RNA, 24 nt, Human
aggcugaggcaggagaaucgcuug

SEQ ID NO: 878069 - RNA, 21 nt, Human
agguggagguugcagugagcc

SEQ ID NO: 878070 - RNA, 24 nt, Human
agguggagguugcagugagccgag

SEQ ID NO: 878071 - RNA, 23 nt, Human
agucuggcgacagagcaagacuc

SEQ ID NO: 878072 - RNA, 25 nt, Human
agugauccucccaccucggccuccc

SEQ ID NO: 878073 - RNA, 22 nt, Human
auaaaaacaacuuuuaaacccu

SEQ ID NO: 878074 - RNA, 21 nt, Human
auauaucuauauguauaugua

SEQ ID NO: 878075 - RNA, 24 nt, Human
auugcgccacugcacuccagucug

SEQ ID NO: 878076 - RNA, 25 nt, Human
caaaaaaaaaacaaaaacaaaaaaa

SEQ ID NO: 878077 - RNA, 26 nt, Human
caaaaacaaaaaaacaauuaagaacc

SEQ ID NO: 878078 - RNA, 25 nt, Human
caaacuccugggcucaagugauccu

SEQ ID NO: 878079 - RNA, 18 nt, Human
caacuuuuaaacccuuau

SEQ ID NO: 878080 - RNA, 21 nt, Human
caagacuccaucucaaaaaaa

SEQ ID NO: 878081 - RNA, 22 nt, Human
cacuccagucuggcgacagagc

SEQ ID NO: 878082 - RNA, 18 nt, Human
cacugcacuccagucugg

SEQ ID NO: 878083 - RNA, 18 nt, Human
cacugcacuccagucugg

SEQ ID NO: 878084 - RNA, 22 nt, Human
cacugcacuccagucuggcgac

SEQ ID NO: 878085 - RNA, 23 nt, Human
cacugcacuccagucuggcgaca

SEQ ID NO: 878086 - RNA, 24 nt, Human
cacugcacuccagucuggcgacag

SEQ ID NO: 878087 - RNA, 20 nt, Human
cagaaaacagcuauagaaac

SEQ ID NO: 878088 - RNA, 24 nt, Human
cagcuacuugggaggcugaggcag

SEQ ID NO: 878089 - RNA, 29 nt, Human
caggagguggagguugcagugacaacggu

SEQ ID NO: 878090 - RNA, 22 nt, Human
caucucaaaaaaaaaacaaaaa

SEQ ID NO: 878091 - RNA, 23 nt, Human
caucucaaaaaaaaaacaaaaac

SEQ ID NO: 878092 - RNA, 24 nt, Human
ccaaagugcugaaguuuaccuaau

SEQ ID NO: 878093 - RNA, 19 nt, Human
ccacugcacuccagucugg

SEQ ID NO: 878094 - RNA, 20 nt, Human
ccacugcacuccagucuggc

SEQ ID NO: 878095 - RNA, 23 nt, Human
ccacugcacuccagucuggcgac

SEQ ID NO: 878096 - RNA, 22 nt, Human
ccaggagguggagguugcagug

SEQ ID NO: 878097 - RNA, 22 nt, Human
ccaucucaaaaaaaaaacaaaa

SEQ ID NO: 878098 - RNA, 26 nt, Human
ccucccaccucggccucccaaagugc

SEQ ID NO: 878099 - RNA, 22 nt, Human
ccugggcucaagugauccuccc

SEQ ID NO: 878100 - RNA, 18 nt, Human
ccuguagucccagcuacu

SEQ ID NO: 878101 - RNA, 21 nt, Human
ccuguagucccagcuacuugg

SEQ ID NO: 878102 - RNA, 22 nt, Human
ccuguagucccagcuacuuggg

SEQ ID NO: 878103 - RNA, 24 nt, Human
cgagauugcgccacugcacuccag

SEQ ID NO: 878104 - RNA, 25 nt, Human
cgccacugcacuccagucuggcgac

SEQ ID NO: 878105 - RNA, 18 nt, Human
cgcuugaauccaggaggu

SEQ ID NO: 878106 - RNA, 24 nt, Human
cucaagugauccucccaccucggc

SEQ ID NO: 878107 - RNA, 23 nt, Human
cucaugccuguagucccagcuac

SEQ ID NO: 878108 - RNA, 25 nt, Human
cuccaucucaaaaaaaaaacaaaaa

SEQ ID NO: 878109 - RNA, 20 nt, Human
cuggcgacagagcaagacuc

SEQ ID NO: 878110 - RNA, 24 nt, Human
cugggucuugcuauucugcccagg

SEQ ID NO: 878111 - RNA, 21 nt, Human
gagguggagguugcagugagc

SEQ ID NO: 878112 - RNA, 23 nt, Human
gagguugcagugagccgagauug

SEQ ID NO: 878113 - RNA, 23 nt, Human
gcacuccagucuggcgacagagc

SEQ ID NO: 878114 - RNA, 22 nt, Human
gccgggcacgguggcucaugcc

SEQ ID NO: 878115 - RNA, 18 nt, Human
gcucaagugauccuccca

SEQ ID NO: 878116 - RNA, 22 nt, Human
ggagguugcagugagccgagau

SEQ ID NO: 878117 - RNA, 24 nt, Human
ggagguugcagugagccgagauug

SEQ ID NO: 878118 - RNA, 22 nt, Human
ggcacgguggcucaugccugua

SEQ ID NO: 878119 - RNA, 23 nt, Human
ggccgggcacgguggcucaugcc

SEQ ID NO: 878120 - RNA, 21 nt, Human
ggcucaugccuguagucccag

SEQ ID NO: 878121 - RNA, 22 nt, Human
gggcucaagugauccucccacc

SEQ ID NO: 878122 - RNA, 23 nt, Human
gguggcucaugccuguaguccca

SEQ ID NO: 878123 - RNA, 24 nt, Human
gugauccucccaccucggccuccc

SEQ ID NO: 878124 - RNA, 23 nt, Human
guggcucaugccuguagucccag

SEQ ID NO: 878125 - RNA, 19 nt, Human
guugcagugagccgagauu

SEQ ID NO: 878126 - RNA, 21 nt, Human
guugcagugagccgagauugc

SEQ ID NO: 878127 - RNA, 24 nt, Human
uaagaggccgggcacgguggcuca

SEQ ID NO: 878128 - RNA, 18 nt, Human
uagagacugggucuugcu

SEQ ID NO: 878129 - RNA, 24 nt, Human
uauguauauguauauguuagagac

SEQ ID NO: 878130 - RNA, 24 nt, Human
uauucugcccaggcuggucgcaaa

SEQ ID NO: 878131 - RNA, 20 nt, Human
uauugcaaaauacuuaaaau

SEQ ID NO: 878132 - RNA, 21 nt, Human
uauugcaaaauacuuaaaaug

SEQ ID NO: 878133 - RNA, 23 nt, Human
uauugcaaaauacuuaaaaugua

SEQ ID NO: 878134 - RNA, 21 nt, Human
uccaggagguggagguugcag

SEQ ID NO: 878135 - RNA, 19 nt, Human
uccaucucaaaaaaaaaac

SEQ ID NO: 878136 - RNA, 22 nt, Human
ucccaaagugcugaaguuuacc

SEQ ID NO: 878137 - RNA, 21 nt, Human
uccugggcucaagugauccuc

SEQ ID NO: 878138 - RNA, 22 nt, Human
uccugggcucaagugauccucc

SEQ ID NO: 878139 - RNA, 24 nt, Human
uccugggcucaagugauccuccca

SEQ ID NO: 878140 - RNA, 20 nt, Human
uccugucuaaaaaugcugaa

SEQ ID NO: 878141 - RNA, 24 nt, Human
ucgcuugaauccaggagguggagg

SEQ ID NO: 878142 - RNA, 18 nt, Human
ucggccucccaaagugcu

SEQ ID NO: 878143 - RNA, 23 nt, Human
ucuugcuauucugcccaggcugg

SEQ ID NO: 878144 - RNA, 24 nt, Human
ucuugcuauucugcccaggcuggu

SEQ ID NO: 878145 - RNA, 18 nt, Human
ugaagugaauagacagca

SEQ ID NO: 878146 - RNA, 21 nt, Human
ugacuuggcaaagucauccaa

SEQ ID NO: 878147 - RNA, 22 nt, Human
ugagccgagauugcgccacugc

SEQ ID NO: 878148 - RNA, 20 nt, Human
ugaggcaggagaaucgcuug

SEQ ID NO: 878149 - RNA, 22 nt, Human
ugaggcaggagaaucgcuugaa

SEQ ID NO: 878150 - RNA, 25 nt, Human
ugaggcaggagaaucgcuugaaucc

SEQ ID NO: 878151 - RNA, 24 nt, Human
ugcccaggcuggucgcaaacuccu

SEQ ID NO: 878152 - RNA, 28 nt, Human
ugcccaggcuggucgcaaacuccugggc

SEQ ID NO: 878153 - RNA, 24 nt, Human
ugccuguagucccagcuacuuggg

SEQ ID NO: 878154 - RNA, 22 nt, Human
uggaaaguaauauaacacacaa

SEQ ID NO: 878155 - RNA, 19 nt, Human
ugggaggcugaggcaggag

SEQ ID NO: 878156 - RNA, 23 nt, Human
ugggaggcugaggcaggagaauc

SEQ ID NO: 878157 - RNA, 24 nt, Human
ugggcucaagugauccucccaccu

SEQ ID NO: 878158 - RNA, 23 nt, Human
ugggucuugcuauucugcccagg

SEQ ID NO: 878159 - RNA, 21 nt, Human
uuaaaguaauguaaaacauuu

SEQ ID NO: 878160 - RNA, 19 nt, Human
uuacauauauaucuauaug

SEQ ID NO: 878161 - RNA, 19 nt, Human
uucaagauuaaggggaaga

SEQ ID NO: 878162 - RNA, 19 nt, Human
uucuuauaucaaguaaaga

SEQ ID NO: 878163 - RNA, 24 nt, Human
uugaauccaggagguggagguugc

SEQ ID NO: 878164 - RNA, 18 nt, Human
uugcagugagccgagauu

SEQ ID NO: 878165 - RNA, 19 nt, Human
uugcagugagccgagauug

SEQ ID NO: 878166 - RNA, 22 nt, Human
uugcagugagccgagauugcgc

SEQ ID NO: 878167 - RNA, 23 nt, Human
uugcgccacugcacuccagucug

SEQ ID NO: 878168 - RNA, 24 nt, Human
uugggaggcugaggcaggagaauc

SEQ ID NO: 878169 - RNA, 26 nt, Human
aaaaaaagcaauaaagaaaccgugca

SEQ ID NO: 878170 - RNA, 23 nt, Human
aaaaagcaauaaagaaaccgugc

SEQ ID NO: 878171 - RNA, 18 nt, Human
aaaagaacaggcgggaaa

SEQ ID NO: 878172 - RNA, 19 nt, Human
aaaagaacaggcgggaaaa

SEQ ID NO: 878173 - RNA, 24 nt, Human
aacacuaaagauauugaguccaaa

SEQ ID NO: 878174 - RNA, 27 nt, Human
aaccacaguaaauacaguucuuggcau

SEQ ID NO: 878175 - RNA, 22 nt, Human
aagaacaggcgggaaaaaaagc

SEQ ID NO: 878176 - RNA, 24 nt, Human
aagauauugaguccaaagcucaaa

SEQ ID NO: 878177 - RNA, 18 nt, Human
acccgaauccgcacccgg

SEQ ID NO: 878178 - RNA, 18 nt, Human
accggaguggaccacugc

SEQ ID NO: 878179 - RNA, 24 nt, Human
acgcugcccaucccgaccgggugc

SEQ ID NO: 878180 - RNA, 24 nt, Human
acuacaguuauccuguaguacauc

SEQ ID NO: 878181 - RNA, 30 nt, Human
agaaaccgugcaagaaacucagugaauaaa

SEQ ID NO: 878182 - RNA, 23 nt, Human
agaagcuuaacaugaccuacaaa

SEQ ID NO: 878183 - RNA, 25 nt, Human
agacacagacuucagaauuuaaagc

SEQ ID NO: 878184 - RNA, 24 nt, Human
agcaauaaagaaaccgugcaagaa

SEQ ID NO: 878185 - RNA, 18 nt, Human
auacaguucuuggcauaa

SEQ ID NO: 878186 - RNA, 20 nt, Human
aucaaugccaaacaaaucuu

SEQ ID NO: 878187 - RNA, 18 nt, Human
augcuucacugccuuucc

SEQ ID NO: 878188 - RNA, 24 nt, Human
auuccauuaagcuucaauuugagc

SEQ ID NO: 878189 - RNA, 19 nt, Human
auugaguccaaagcucaaa

SEQ ID NO: 878190 - RNA, 19 nt, Human
cacaagccugcgacguacc

SEQ ID NO: 878191 - RNA, 23 nt, Human
cacacagccuucgguccggaacc

SEQ ID NO: 878192 - RNA, 23 nt, Human
cagaaaauaguaaauaccuuaca

SEQ ID NO: 878193 - RNA, 19 nt, Human
ccacaguaaccccggccug

SEQ ID NO: 878194 - RNA, 23 nt, Human
ccauuagauaauauccugguuau

SEQ ID NO: 878195 - RNA, 21 nt, Human
ccgcacccggcaaccggagug

SEQ ID NO: 878196 - RNA, 24 nt, Human
ccggcugcggggggagcuggggga

SEQ ID NO: 878197 - RNA, 21 nt, Human
cgacccgcacaagccugcgac

SEQ ID NO: 878198 - RNA, 18 nt, Human
cgccacaguaaccccggc

SEQ ID NO: 878199 - RNA, 20 nt, Human
cgugcaagaaacucagugaa

SEQ ID NO: 878200 - RNA, 21 nt, Human
cucacaggccuacgcugccca

SEQ ID NO: 878201 - RNA, 22 nt, Human
cuguaguacaucucaauauccu

SEQ ID NO: 878202 - RNA, 24 nt, Human
cuguaguacaucucaauauccucc

SEQ ID NO: 878203 - RNA, 26 nt, Human
gaacacacagccuucgguccggaacc

SEQ ID NO: 878204 - RNA, 23 nt, Human
gaacccgacccgcacaagccugc

SEQ ID NO: 878205 - RNA, 19 nt, Human
gaccuacaaaucugauuua

SEQ ID NO: 878206 - RNA, 21 nt, Human
gccggcugcggggggagcugg

SEQ ID NO: 878207 - RNA, 19 nt, Human
ggagcugggggacaggggc

SEQ ID NO: 878208 - RNA, 21 nt, Human
ggcugcggggggagcuggggg

SEQ ID NO: 878209 - RNA, 19 nt, Human
gggagcugggggacagggg

SEQ ID NO: 878210 - RNA, 24 nt, Human
ggggccacaaugaacggcggagaa

SEQ ID NO: 878211 - RNA, 19 nt, Human
guccucgccaccccauccc

SEQ ID NO: 878212 - RNA, 24 nt, Human
guuugaguuuugcaccucaaaguu

SEQ ID NO: 878213 - RNA, 21 nt, Human
uaaagaaaccgugcaagaaac

SEQ ID NO: 878214 - RNA, 24 nt, Human
uacaaaucugauuuagggaaacac

SEQ ID NO: 878215 - RNA, 21 nt, Human
uacaucccgaggcagcgcagg

SEQ ID NO: 878216 - RNA, 18 nt, Human
uacugauuuuauuauuau

SEQ ID NO: 878217 - RNA, 21 nt, Human
uacuuaaacugaaaaugagau

SEQ ID NO: 878218 - RNA, 20 nt, Human
uaguacaucucaauauccuc

SEQ ID NO: 878219 - RNA, 21 nt, Human
uauaauaguggauuaaucaaa

SEQ ID NO: 878220 - RNA, 22 nt, Human
uauacuuuacaucccgaggcag

SEQ ID NO: 878221 - RNA, 20 nt, Human
uaugcuucacugccuuuccu

SEQ ID NO: 878222 - RNA, 19 nt, Human
ucaaaaugaugacacauca

SEQ ID NO: 878223 - RNA, 22 nt, Human
ucagugaauaagaagaucaaaa

SEQ ID NO: 878224 - RNA, 22 nt, Human
uccacaaccacaguaaauacag

SEQ ID NO: 878225 - RNA, 19 nt, Human
uccgcacccggcaaccgga

SEQ ID NO: 878226 - RNA, 18 nt, Human
ucgccaccccaucccucg

SEQ ID NO: 878227 - RNA, 23 nt, Human
ugggggacaggggcacccgcagg

SEQ ID NO: 878228 - RNA, 18 nt, Human
ugucauaacauaauugaa

SEQ ID NO: 878229 - RNA, 23 nt, Human
uguccacaaccacaguaaauaca

SEQ ID NO: 878230 - RNA, 21 nt, Human
ugucggggccacaaugaacgg

SEQ ID NO: 878231 - RNA, 21 nt, Human
uuaaagccuccccaccugcaa

SEQ ID NO: 878232 - RNA, 21 nt, Human
uugaacacaaaagacccacau

SEQ ID NO: 878233 - RNA, 22 nt, Human
uuugagcaaaaguguaaucacu

SEQ ID NO: 878234 - RNA, 21 nt, Human
uuuuuuuuuuuuuuuuuuaag

SEQ ID NO: 878235 - RNA, 20 nt, Human
aaacaaaucgcuagaggggc

SEQ ID NO: 878236 - RNA, 21 nt, Human
aaacaaaucgcuagaggggcu

SEQ ID NO: 878237 - RNA, 19 nt, Human
agaagccaucucugcccuu

SEQ ID NO: 878238 - RNA, 21 nt, Human
agccaucucugcccuuccccu

SEQ ID NO: 878239 - RNA, 19 nt, Human
agcuccgagcccucuuccc

SEQ ID NO: 878240 - RNA, 20 nt, Human
aggacacguagccccgaagc

SEQ ID NO: 878241 - RNA, 21 nt, Human
aucugggcggccccaaggcag

SEQ ID NO: 878242 - RNA, 24 nt, Human
cacaaaugcgggugcccaaggcaa

SEQ ID NO: 878243 - RNA, 22 nt, Human
caccgaggcaccucgcagacgc

SEQ ID NO: 878244 - RNA, 23 nt, Human
cagacccugccuuucgggcuggg

SEQ ID NO: 878245 - RNA, 18 nt, Human
cagcaggaaggcagcucc

SEQ ID NO: 878246 - RNA, 23 nt, Human
caggaaggcagcuccgagcccuc

SEQ ID NO: 878247 - RNA, 19 nt, Human
caggcucuccggggcuccc

SEQ ID NO: 878248 - RNA, 20 nt, Human
caucugggcggccccaaggc

SEQ ID NO: 878249 - RNA, 20 nt, Human
ccagacccugccuuucgggc

SEQ ID NO: 878250 - RNA, 21 nt, Human
ccagacccugccuuucgggcu

SEQ ID NO: 878251 - RNA, 24 nt, Human
cccaaggcaaagucgcccccaagg

SEQ ID NO: 878252 - RNA, 18 nt, Human
cccagggcggggagcggc

SEQ ID NO: 878253 - RNA, 21 nt, Human
cccccaaggcuucucacaaac

SEQ ID NO: 878254 - RNA, 22 nt, Human
cccccaaggcuucucacaaacu

SEQ ID NO: 878255 - RNA, 23 nt, Human
ccccugccugcaucccccagacc

SEQ ID NO: 878256 - RNA, 18 nt, Human
ccgcacccagacccugcc

SEQ ID NO: 878257 - RNA, 18 nt, Human
ccgcacccagacccugcc

SEQ ID NO: 878258 - RNA, 22 nt, Human
ccggggcuccccucccucccca

SEQ ID NO: 878259 - RNA, 24 nt, Human
ccuuucgggcuggggcgcucagcc

SEQ ID NO: 878260 - RNA, 19 nt, Human
cgcacaaaugcgggugccc

SEQ ID NO: 878261 - RNA, 21 nt, Human
cgcccccaaggcuucucacaa

SEQ ID NO: 878262 - RNA, 21 nt, Human
cggagaagggaggggcccggg

SEQ ID NO: 878263 - RNA, 19 nt, Human
cggccccaaggcagcagga

SEQ ID NO: 878264 - RNA, 24 nt, Human
cgucuccgacagcacaggacacgu

SEQ ID NO: 878265 - RNA, 25 nt, Human
cuaguucaugucaucacuuuuccua

SEQ ID NO: 878266 - RNA, 27 nt, Human
gaagccaucucugcccuuccccugccu

SEQ ID NO: 878267 - RNA, 23 nt, Human
gacacguagccccgaagcuguca

SEQ ID NO: 878268 - RNA, 20 nt, Human
gagcccucuucccgcaccca

SEQ ID NO: 878269 - RNA, 22 nt, Human
gagccugcuuccagcucccacc

SEQ ID NO: 878270 - RNA, 18 nt, Human
gcaaagucgcccccaagg

SEQ ID NO: 878271 - RNA, 19 nt, Human
gcgcucagccgggagccug

SEQ ID NO: 878272 - RNA, 20 nt, Human
ggagccugcuuccagcuccc

SEQ ID NO: 878273 - RNA, 22 nt, Human
gggcggggagcggcgcugcgau

SEQ ID NO: 878274 - RNA, 24 nt, Human
uagccccgaagcugucaucggaaa

SEQ ID NO: 878275 - RNA, 23 nt, Human
ucagaaccaggcaaaucgggcug

SEQ ID NO: 878276 - RNA, 22 nt, Human
uccacaaccacgacagccugga

SEQ ID NO: 878277 - RNA, 24 nt, Human
uccacaaccacgacagccuggaga

SEQ ID NO: 878278 - RNA, 19 nt, Human
uccagcucccaccggcagg

SEQ ID NO: 878279 - RNA, 23 nt, Human
uccccugccugcaucccccagac

SEQ ID NO: 878280 - RNA, 25 nt, Human
ucgccgggugucugcaccggggaaa

SEQ ID NO: 878281 - RNA, 21 nt, Human
ucuccggggcuccccucccuc

SEQ ID NO: 878282 - RNA, 18 nt, Human
ugcccaaggcaaagucgc

SEQ ID NO: 878283 - RNA, 21 nt, Human
ugggcggccccaaggcagcag

SEQ ID NO: 878284 - RNA, 18 nt, Human
uucaugucaucacuuuuc

SEQ ID NO: 878285 - RNA, 21 nt, Human
uuccacaaccacgacagccug

SEQ ID NO: 878286 - RNA, 19 nt, Human
uuccccugccugcaucccc

SEQ ID NO: 878287 - RNA, 24 nt, Human
uuuuuugcaagccauaucugagaa

SEQ ID NO: 878288 - RNA, 23 nt, Human
uuuuuuuugcaagccauaucuga

SEQ ID NO: 878289 - RNA, 21 nt, Human
uuuuuuuuuuuuuuuuugcaa

SEQ ID NO: 878290 - RNA, 27 nt, Human
uuuuuuuuuuuuuuuuuuuuuuugggg

SEQ ID NO: 878291 - RNA, 23 nt, Human
agucccugagcuccgggacgccc

SEQ ID NO: 878292 - RNA, 20 nt, Human
cccugagcuccgggacgccc

SEQ ID NO: 878293 - RNA, 20 nt, Human
gaggggcggcggggacgacu

SEQ ID NO: 878294 - RNA, 23 nt, Human
gcagcccggguagggugcgacca

SEQ ID NO: 878295 - RNA, 22 nt, Human
gcccggggcucagucccugagc

SEQ ID NO: 878296 - RNA, 18 nt, Human
uaggacccaguuugcuac

SEQ ID NO: 878297 - RNA, 20 nt, Human
ucagucccugagcuccggga

SEQ ID NO: 878298 - RNA, 25 nt, Human
ucccugagcuccgggacgcccaacu

SEQ ID NO: 878299 - RNA, 22 nt, Human
aaaauccuccauagccaccucc

SEQ ID NO: 878300 - RNA, 19 nt, Human
aaacagggacacagggugg

SEQ ID NO: 878301 - RNA, 19 nt, Human
aaaccaaacucacaaacac

SEQ ID NO: 878302 - RNA, 21 nt, Human
aaaccaaacucacaaacaccc

SEQ ID NO: 878303 - RNA, 21 nt, Human
aaacucacaaacacccagagc

SEQ ID NO: 878304 - RNA, 24 nt, Human
aaacucacaaacacccagagcuca

SEQ ID NO: 878305 - RNA, 22 nt, Human
aaagcacccggggcggggggcg

SEQ ID NO: 878306 - RNA, 18 nt, Human
aacauuccaggaaaccag

SEQ ID NO: 878307 - RNA, 21 nt, Human
aaccaaacucacaaacaccca

SEQ ID NO: 878308 - RNA, 20 nt, Human
aagcacccggggcggggggc

SEQ ID NO: 878309 - RNA, 20 nt, Human
aagcuggaggcaggcuggcu

SEQ ID NO: 878310 - RNA, 23 nt, Human
aaggacuuagccauccgacaggc

SEQ ID NO: 878311 - RNA, 19 nt, Human
aagucacaccuggacacaa

SEQ ID NO: 878312 - RNA, 28 nt, Human
aauccugcaagccaccccacccuuacua

SEQ ID NO: 878313 - RNA, 25 nt, Human
acaggccuacgaauugcuucauacu

SEQ ID NO: 878314 - RNA, 19 nt, Human
accauaaagguaaagugga

SEQ ID NO: 878315 - RNA, 18 nt, Human
accccagaagccacgcac

SEQ ID NO: 878316 - RNA, 19 nt, Human
acgacugaccacccuccac

SEQ ID NO: 878317 - RNA, 20 nt, Human
acucuugcuaccaaaacagg

SEQ ID NO: 878318 - RNA, 20 nt, Human
agaaaccaaacucacaaaca

SEQ ID NO: 878319 - RNA, 21 nt, Human
agaaagcacccggggcggggg

SEQ ID NO: 878320 - RNA, 24 nt, Human
agagaaaccaaacucacaaacacc

SEQ ID NO: 878321 - RNA, 22 nt, Human
agagcagcacagcagcugcggg

SEQ ID NO: 878322 - RNA, 22 nt, Human
agcgcccgaaggggaggccgag

SEQ ID NO: 878323 - RNA, 20 nt, Human
agcucugcuccagcccaaac

SEQ ID NO: 878324 - RNA, 20 nt, Human
aggagccccgccgccucugc

SEQ ID NO: 878325 - RNA, 19 nt, Human
aggcaggcuggcuuuggga

SEQ ID NO: 878326 - RNA, 19 nt, Human
aggcaggcuggcuuuggga

SEQ ID NO: 878327 - RNA, 18 nt, Human
aggcccuggaaacaggcc

SEQ ID NO: 878328 - RNA, 20 nt, Human
aggcggagggccccggagga

SEQ ID NO: 878329 - RNA, 23 nt, Human
aggcugaggggucuuccaggcau

SEQ ID NO: 878330 - RNA, 20 nt, Human
aggggucuuccaggcauguc

SEQ ID NO: 878331 - RNA, 23 nt, Human
aucaguccccauuucuuccucag

SEQ ID NO: 878332 - RNA, 23 nt, Human
caaaauccuccauagccaccucc

SEQ ID NO: 878333 - RNA, 19 nt, Human
caaacacccagagcucauc

SEQ ID NO: 878334 - RNA, 24 nt, Human
caaauuuucucugccaaauuaagc

SEQ ID NO: 878335 - RNA, 27 nt, Human
caacacaggauaaaacucaucuccggu

SEQ ID NO: 878336 - RNA, 19 nt, Human
caaccuucagauagacaca

SEQ ID NO: 878337 - RNA, 25 nt, Human
caagcgaaugucucuuuccccucuc

SEQ ID NO: 878338 - RNA, 21 nt, Human
cacccagcccccuauggaauc

SEQ ID NO: 878339 - RNA, 18 nt, Human
caccccagaagccacgca

SEQ ID NO: 878340 - RNA, 19 nt, Human
cacccggggcggggggcgg

SEQ ID NO: 878341 - RNA, 24 nt, Human
caccuccuuccgcccagcuuuauc

SEQ ID NO: 878342 - RNA, 25 nt, Human
cacugaaccccagccccugucccag

SEQ ID NO: 878343 - RNA, 21 nt, Human
cacugugucuccccucucgcu

SEQ ID NO: 878344 - RNA, 18 nt, Human
cagagcccgccaggcuuc

SEQ ID NO: 878345 - RNA, 21 nt, Human
cagauagacacauggugacca

SEQ ID NO: 878346 - RNA, 22 nt, Human
cagccccugucccagagccucc

SEQ ID NO: 878347 - RNA, 20 nt, Human
caguccacugugucuccccu

SEQ ID NO: 878348 - RNA, 23 nt, Human
caugccaaaauccuccauagcca

SEQ ID NO: 878349 - RNA, 23 nt, Human
ccaauccugcaagccaccccacc

SEQ ID NO: 878350 - RNA, 22 nt, Human
ccacgcagaggcauuucugcag

SEQ ID NO: 878351 - RNA, 18 nt, Human
ccaggaaaccagcucugc

SEQ ID NO: 878352 - RNA, 21 nt, Human
cccagccccugucccagagcc

SEQ ID NO: 878353 - RNA, 19 nt, Human
ccccagaagccacgcacac

SEQ ID NO: 878354 - RNA, 26 nt, Human
ccccagaagccacgcacaccuccuuc

SEQ ID NO: 878355 - RNA, 18 nt, Human
cccccgcauccugugcuc

SEQ ID NO: 878356 - RNA, 18 nt, Human
ccccgccgccucugcagg

SEQ ID NO: 878357 - RNA, 25 nt, Human
ccccgccgccucugcagggucccgc

SEQ ID NO: 878358 - RNA, 21 nt, Human
cccgaaggccacacccagccc

SEQ ID NO: 878359 - RNA, 22 nt, Human
cccggggcggggggcgguaagg

SEQ ID NO: 878360 - RNA, 19 nt, Human
cccuauggaaucagauggg

SEQ ID NO: 878361 - RNA, 20 nt, Human
ccucagggcccuggcacuga

SEQ ID NO: 878362 - RNA, 19 nt, Human
ccucccccgccgcccccaa

SEQ ID NO: 878363 - RNA, 26 nt, Human
ccucugggucccaccccagaagccuu

SEQ ID NO: 878364 - RNA, 18 nt, Human
ccugcaagccaccccacc

SEQ ID NO: 878365 - RNA, 23 nt, Human
ccugcaagccaccccacccuuac

SEQ ID NO: 878366 - RNA, 26 nt, Human
ccugcaagccaccccacccuuacuaa

SEQ ID NO: 878367 - RNA, 18 nt, Human
ccugcagcuggacagggc

SEQ ID NO: 878368 - RNA, 22 nt, Human
ccuggcacugaaccccagcccc

SEQ ID NO: 878369 - RNA, 21 nt, Human
cgaggaggagcgggaggagga

SEQ ID NO: 878370 - RNA, 25 nt, Human
cgcacagggcuacgacugaccaccc

SEQ ID NO: 878371 - RNA, 20 nt, Human
cgccgcccccaauuacauuu

SEQ ID NO: 878372 - RNA, 20 nt, Human
cggcuuccagguucucuccc

SEQ ID NO: 878373 - RNA, 23 nt, Human
cggguccaaaugaaggggugggg

SEQ ID NO: 878374 - RNA, 25 nt, Human
cucacagacagcacauauucuacgu

SEQ ID NO: 878375 - RNA, 19 nt, Human
cucaguggacagccuauga

SEQ ID NO: 878376 - RNA, 18 nt, Human
cuccagcccaaaccaggc

SEQ ID NO: 878377 - RNA, 22 nt, Human
cuccccacgcacucucccucag

SEQ ID NO: 878378 - RNA, 18 nt, Human
cucccccgccgcccccaa

SEQ ID NO: 878379 - RNA, 19 nt, Human
cuccuugcaggggcuccaa

SEQ ID NO: 878380 - RNA, 19 nt, Human
cugacaaaguucacaaucu

SEQ ID NO: 878381 - RNA, 19 nt, Human
cugcaaacagaaggcugag

SEQ ID NO: 878382 - RNA, 21 nt, Human
cugcguuucacuaaaccaagc

SEQ ID NO: 878383 - RNA, 24 nt, Human
cuggccaaugagugugggaggccc

SEQ ID NO: 878384 - RNA, 20 nt, Human
cugucccgugagccucugac

SEQ ID NO: 878385 - RNA, 22 nt, Human
cuuggugcugaccgguucgcuc

SEQ ID NO: 878386 - RNA, 22 nt, Human
gaacagauguacagggaauucu

SEQ ID NO: 878387 - RNA, 18 nt, Human
gaagggguggggggagcc

SEQ ID NO: 878388 - RNA, 19 nt, Human
gacaggccacgcaugccaa

SEQ ID NO: 878389 - RNA, 21 nt, Human
gaccagagcccgccaggcuuc

SEQ ID NO: 878390 - RNA, 20 nt, Human
gagcagcacagcagcugcgg

SEQ ID NO: 878391 - RNA, 23 nt, Human
gagccgauggcacagagcagcac

SEQ ID NO: 878392 - RNA, 19 nt, Human
gcacgcacugggaauggcc

SEQ ID NO: 878393 - RNA, 19 nt, Human
gcagcacagcagcugcggg

SEQ ID NO: 878394 - RNA, 25 nt, Human
gcagggcagagaaaccaaacucaca

SEQ ID NO: 878395 - RNA, 24 nt, Human
gccaaaauccuccauagccaccuc

SEQ ID NO: 878396 - RNA, 22 nt, Human
gcccuggaaacaggccaauccu

SEQ ID NO: 878397 - RNA, 19 nt, Human
gcccuggcacugaacccca

SEQ ID NO: 878398 - RNA, 21 nt, Human
gcccuggcacugaaccccagc

SEQ ID NO: 878399 - RNA, 24 nt, Human
gcccuggcacugaaccccagcccc

SEQ ID NO: 878400 - RNA, 23 nt, Human
gcgguggcaccauugugcaugcc

SEQ ID NO: 878401 - RNA, 20 nt, Human
gcuggacagggcccucagau

SEQ ID NO: 878402 - RNA, 22 nt, Human
gcugucuauuggcagaaaccug

SEQ ID NO: 878403 - RNA, 23 nt, Human
gcuuggaccggcucuccggaagc

SEQ ID NO: 878404 - RNA, 20 nt, Human
ggaagacugaagugaaacca

SEQ ID NO: 878405 - RNA, 20 nt, Human
ggaggagcacaguuagcgcg

SEQ ID NO: 878406 - RNA, 18 nt, Human
ggcaggcuggcuuuggga

SEQ ID NO: 878407 - RNA, 19 nt, Human
ggcggcggcggcggcucug

SEQ ID NO: 878408 - RNA, 25 nt, Human
gggaaacucagaccaacaaggagcc

SEQ ID NO: 878409 - RNA, 19 nt, Human
gggaauggccucacaaggc

SEQ ID NO: 878410 - RNA, 20 nt, Human
gggagcaggcggagggcccc

SEQ ID NO: 878411 - RNA, 21 nt, Human
gggcacgcacugggaauggcc

SEQ ID NO: 878412 - RNA, 22 nt, Human
ggggagccgggugacaagcggu

SEQ ID NO: 878413 - RNA, 19 nt, Human
ggguccaaaugaaggggug

SEQ ID NO: 878414 - RNA, 23 nt, Human
gguggcgacaggccacgcaugcc

SEQ ID NO: 878415 - RNA, 21 nt, Human
guaagauccugccugucuggu

SEQ ID NO: 878416 - RNA, 26 nt, Human
gucccagagccuccccucuggguccc

SEQ ID NO: 878417 - RNA, 18 nt, Human
gucucuuuccccucuccu

SEQ ID NO: 878418 - RNA, 24 nt, Human
uaaaguggacaaccccugagguca

SEQ ID NO: 878419 - RNA, 23 nt, Human
uaaaucacugaaagccuccgcuu

SEQ ID NO: 878420 - RNA, 20 nt, Human
uaagauccugccugucuggu

SEQ ID NO: 878421 - RNA, 25 nt, Human
uacgacugaccacccuccaccacag

SEQ ID NO: 878422 - RNA, 20 nt, Human
uaucagggagggacaagccu

SEQ ID NO: 878423 - RNA, 23 nt, Human
ucaacccgaaggccacacccagc

SEQ ID NO: 878424 - RNA, 24 nt, Human
ucaacugcagucagugcuccuggg

SEQ ID NO: 878425 - RNA, 24 nt, Human
ucacuaggagcugccaccgguggg

SEQ ID NO: 878426 - RNA, 21 nt, Human
ucaguagacaggggcccuaga

SEQ ID NO: 878427 - RNA, 22 nt, Human
ucaguccccauuucuuccucag

SEQ ID NO: 878428 - RNA, 19 nt, Human
ucaugggguuccuguguuu

SEQ ID NO: 878429 - RNA, 21 nt, Human
ucccccuucagccacacaguc

SEQ ID NO: 878430 - RNA, 23 nt, Human
uccgacaggccucaccauaaagg

SEQ ID NO: 878431 - RNA, 18 nt, Human
uccggugcagaaaugauu

SEQ ID NO: 878432 - RNA, 25 nt, Human
uccuugaggccacugucaggggcug

SEQ ID NO: 878433 - RNA, 21 nt, Human
ucgcuugggacaggcccaugc

SEQ ID NO: 878434 - RNA, 18 nt, Human
ucuccucccccgccgccc

SEQ ID NO: 878435 - RNA, 18 nt, Human
ucucgacauacuugguau

SEQ ID NO: 878436 - RNA, 31 nt, Human
ucugacacagcaaacugacuaucaguagacu

SEQ ID NO: 878437 - RNA, 27 nt, Human
ucuggccaaugagugugggaggcccug

SEQ ID NO: 878438 - RNA, 19 nt, Human
ucugggucccaccccagaa

SEQ ID NO: 878439 - RNA, 19 nt, Human
ucugggucccaccccagaa

SEQ ID NO: 878440 - RNA, 19 nt, Human
ugaaaugaacguucugcaa

SEQ ID NO: 878441 - RNA, 22 nt, Human
ugaaccccagccccugucccag

SEQ ID NO: 878442 - RNA, 20 nt, Human
ugaccagagcccgccaggcu

SEQ ID NO: 878443 - RNA, 19 nt, Human
ugaccgguucgcuccuugc

SEQ ID NO: 878444 - RNA, 20 nt, Human
ugagacgcacagggcuacga

SEQ ID NO: 878445 - RNA, 18 nt, Human
ugagcaccucuccccaac

SEQ ID NO: 878446 - RNA, 21 nt, Human
ugagccccccaccugcagcuc

SEQ ID NO: 878447 - RNA, 21 nt, Human
ugagugccaggcucuaggcuu

SEQ ID NO: 878448 - RNA, 26 nt, Human
ugaguucaaacucuuguccccuaagc

SEQ ID NO: 878449 - RNA, 20 nt, Human
ugcaaaacgaacacgaggca

SEQ ID NO: 878450 - RNA, 21 nt, Human
ugcagauuccagugguuuccu

SEQ ID NO: 878451 - RNA, 21 nt, Human
ugcgugugcaacguggaguau

SEQ ID NO: 878452 - RNA, 21 nt, Human
ugcgugugugugguguuacuu

SEQ ID NO: 878453 - RNA, 24 nt, Human
ugcuaccaaaacagggacacaggg

SEQ ID NO: 878454 - RNA, 19 nt, Human
ugcuccagcccaaaccagg

SEQ ID NO: 878455 - RNA, 21 nt, Human
uggcacagagcagcacagcag

SEQ ID NO: 878456 - RNA, 22 nt, Human
uggcagugucgagcaaguguaa

SEQ ID NO: 878457 - RNA, 21 nt, Human
uggcgacaggccacgcaugcc

SEQ ID NO: 878458 - RNA, 19 nt, Human
ugggaaggagaagcuccug

SEQ ID NO: 878459 - RNA, 23 nt, Human
ugggaauggccucacaaggcagc

SEQ ID NO: 878460 - RNA, 25 nt, Human
ugggggcugcagauuccagugguuu

SEQ ID NO: 878461 - RNA, 19 nt, Human
ugguggcucagcagcuccc

SEQ ID NO: 878462 - RNA, 18 nt, Human
uguccagguggcgacagg

SEQ ID NO: 878463 - RNA, 19 nt, Human
ugucccagagccuccccuc

SEQ ID NO: 878464 - RNA, 23 nt, Human
ugucccagagccuccccucuggg

SEQ ID NO: 878465 - RNA, 27 nt, Human
ugugcaugccugcagcuggacagggcc

SEQ ID NO: 878466 - RNA, 20 nt, Human
ugugguguuacuuggugcug

SEQ ID NO: 878467 - RNA, 24 nt, Human
ugugguucugucccgugagccucu

SEQ ID NO: 878468 - RNA, 18 nt, Human
uuagacagaugcaugugg

SEQ ID NO: 878469 - RNA, 21 nt, Human
uucaaccaguccuuucagucc

SEQ ID NO: 878470 - RNA, 19 nt, Human
uucauacuuauccggaaga

SEQ ID NO: 878471 - RNA, 19 nt, Human
uuccuucauggcaccacgc

SEQ ID NO: 878472 - RNA, 18 nt, Human
uugugcaugccugcagcu

SEQ ID NO: 878473 - RNA, 23 nt, Human
uuucacuugggguuccucacaua

SEQ ID NO: 878474 - RNA, 22 nt, Human
uuuuuuuuuucugcucggugcc

SEQ ID NO: 878475 - RNA, 19 nt, Human
aagcagacggcccacccuc

SEQ ID NO: 878476 - RNA, 20 nt, Human
acagcaaggcucucugccag

SEQ ID NO: 878477 - RNA, 20 nt, Human
agcgggugggagggcggggg

SEQ ID NO: 878478 - RNA, 23 nt, Human
agggcgggggcgggggcgggggc

SEQ ID NO: 878479 - RNA, 19 nt, Human
aggggccgcuuccuguugg

SEQ ID NO: 878480 - RNA, 19 nt, Human
cacugugcuggggugaggu

SEQ ID NO: 878481 - RNA, 25 nt, Human
caucucauuacuucuggaucccucu

SEQ ID NO: 878482 - RNA, 19 nt, Human
ccaggcagcccagaugaac

SEQ ID NO: 878483 - RNA, 22 nt, Human
ccgccuccagcggggacagucu

SEQ ID NO: 878484 - RNA, 22 nt, Human
cgagaucgggcggggaugcugg

SEQ ID NO: 878485 - RNA, 19 nt, Human
cuggggugaggugcuuucu

SEQ ID NO: 878486 - RNA, 21 nt, Human
cuggggugaggugcuuucuuu

SEQ ID NO: 878487 - RNA, 21 nt, Human
cuucuggaucccucuaccgcc

SEQ ID NO: 878488 - RNA, 18 nt, Human
gagcgggugggagggcgg

SEQ ID NO: 878489 - RNA, 18 nt, Human
gagggcagcagcugggca

SEQ ID NO: 878490 - RNA, 22 nt, Human
gcagcagcugggcagagacgag

SEQ ID NO: 878491 - RNA, 22 nt, Human
gcccgggcuuuauucgcgacuc

SEQ ID NO: 878492 - RNA, 18 nt, Human
gccuggagucgcgcggag

SEQ ID NO: 878493 - RNA, 25 nt, Human
gcggcuccgaagccgggaggggccg

SEQ ID NO: 878494 - RNA, 18 nt, Human
gcggggcgccgcccgggc

SEQ ID NO: 878495 - RNA, 19 nt, Human
gcuuccgcgaggggcgcgg

SEQ ID NO: 878496 - RNA, 19 nt, Human
gggagggcgggggcggggg

SEQ ID NO: 878497 - RNA, 22 nt, Human
gggcgggggcgggggcgggggc

SEQ ID NO: 878498 - RNA, 18 nt, Human
ggugggagggcgggggcg

SEQ ID NO: 878499 - RNA, 18 nt, Human
gugggaacgaaagcagac

SEQ ID NO: 878500 - RNA, 23 nt, Human
uaccgccuccagcggggacaguc

SEQ ID NO: 878501 - RNA, 24 nt, Human
uaccgccuccagcggggacagucu

SEQ ID NO: 878502 - RNA, 18 nt, Human
uccgcgaggggcgcgggg

SEQ ID NO: 878503 - RNA, 19 nt, Human
ucugagcgggugggagggc

SEQ ID NO: 878504 - RNA, 18 nt, Human
uggcaaccaggucugagc

SEQ ID NO: 878505 - RNA, 20 nt, Human
ugggaugcggggcggcccgg

SEQ ID NO: 878506 - RNA, 19 nt, Human
uggggagggcagcagcugg

SEQ ID NO: 878507 - RNA, 24 nt, Human
uggggagggcagcagcugggcaga

SEQ ID NO: 878508 - RNA, 18 nt, Human
uuuuuuuuuuuggggcag

SEQ ID NO: 878509 - RNA, 19 nt, Human
aaaaaggccagacgccccu

SEQ ID NO: 878510 - RNA, 18 nt, Human
aaauggucagcaaguagc

SEQ ID NO: 878511 - RNA, 23 nt, Human
aaggacaugacaggcucuggaag

SEQ ID NO: 878512 - RNA, 21 nt, Human
aaggauccaggcugcuggguc

SEQ ID NO: 878513 - RNA, 21 nt, Human
aaggcugcgacugaacuucgg

SEQ ID NO: 878514 - RNA, 20 nt, Human
aaguagcuggaaggagaaga

SEQ ID NO: 878515 - RNA, 20 nt, Human
aauuaacacuucuagaucac

SEQ ID NO: 878516 - RNA, 23 nt, Human
acaggcugggagagguggggaca

SEQ ID NO: 878517 - RNA, 19 nt, Human
accccaucccaggccucca

SEQ ID NO: 878518 - RNA, 23 nt, Human
acccugcuaagggguacacacca

SEQ ID NO: 878519 - RNA, 24 nt, Human
agaaugcccucagagagccugccu

SEQ ID NO: 878520 - RNA, 20 nt, Human
agaccuccaaccacaccaga

SEQ ID NO: 878521 - RNA, 19 nt, Human
agagauagacagaaggaac

SEQ ID NO: 878522 - RNA, 22 nt, Human
agaggcaggugcuggugggcuc

SEQ ID NO: 878523 - RNA, 25 nt, Human
agaucagggccaggcaaaugcagga

SEQ ID NO: 878524 - RNA, 24 nt, Human
agcaacagagauagacagaaggaa

SEQ ID NO: 878525 - RNA, 24 nt, Human
agcccauacaugaggacccagagc

SEQ ID NO: 878526 - RNA, 21 nt, Human
aggcaaggggagguuccgggu

SEQ ID NO: 878527 - RNA, 18 nt, Human
aggccagaccagcagagg

SEQ ID NO: 878528 - RNA, 19 nt, Human
aggcugcagcugggcccca

SEQ ID NO: 878529 - RNA, 19 nt, Human
aggcugcgacugaacuucg

SEQ ID NO: 878530 - RNA, 25 nt, Human
agggaguaggcuagcugcagaccua

SEQ ID NO: 878531 - RNA, 21 nt, Human
aggggguacaagggagcaugg

SEQ ID NO: 878532 - RNA, 21 nt, Human
agguggggacugcuugaggcc

SEQ ID NO: 878533 - RNA, 18 nt, Human
aucucucuccugucuccc

SEQ ID NO: 878534 - RNA, 24 nt, Human
augagcaaagagcccgagagaagu

SEQ ID NO: 878535 - RNA, 23 nt, Human
caacccucacaccagcucucacc

SEQ ID NO: 878536 - RNA, 20 nt, Human
caagcagggcacacaaugcu

SEQ ID NO: 878537 - RNA, 23 nt, Human
caagguaaagucaagaucuccca

SEQ ID NO: 878538 - RNA, 23 nt, Human
caagugccaagguaaagucaaga

SEQ ID NO: 878539 - RNA, 18 nt, Human
cacacuggggcagaagau

SEQ ID NO: 878540 - RNA, 19 nt, Human
caccagaugagggcaagca

SEQ ID NO: 878541 - RNA, 19 nt, Human
cacuugauuuccagaccuu

SEQ ID NO: 878542 - RNA, 22 nt, Human
cacuuggagguggggacugcuu

SEQ ID NO: 878543 - RNA, 21 nt, Human
cagaaggaacaaaauagggcg

SEQ ID NO: 878544 - RNA, 18 nt, Human
cagaccuaccccauccca

SEQ ID NO: 878545 - RNA, 19 nt, Human
cagcaacagagauagacag

SEQ ID NO: 878546 - RNA, 21 nt, Human
cagcaacagagauagacagaa

SEQ ID NO: 878547 - RNA, 19 nt, Human
cagcaccagagggggaaau

SEQ ID NO: 878548 - RNA, 20 nt, Human
cagcaggcugcagcugggcc

SEQ ID NO: 878549 - RNA, 21 nt, Human
cagcccaucaacccccucacu

SEQ ID NO: 878550 - RNA, 18 nt, Human
cagcucugugcuuccuuc

SEQ ID NO: 878551 - RNA, 19 nt, Human
caggccagaccagcagagg

SEQ ID NO: 878552 - RNA, 20 nt, Human
caguauggagugcaaggucu

SEQ ID NO: 878553 - RNA, 23 nt, Human
caguauggagugcaaggucucuu

SEQ ID NO: 878554 - RNA, 23 nt, Human
caguggcaccagaagaggccagu

SEQ ID NO: 878555 - RNA, 23 nt, Human
caucaacccccucacugcccucu

SEQ ID NO: 878556 - RNA, 21 nt, Human
cauccaguucaagcugcuucc

SEQ ID NO: 878557 - RNA, 23 nt, Human
caugcacccagcccaucaacccc

SEQ ID NO: 878558 - RNA, 24 nt, Human
ccaucaacccccucacugcccucu

SEQ ID NO: 878559 - RNA, 23 nt, Human
cccagcccaucaacccccucacu

SEQ ID NO: 878560 - RNA, 20 nt, Human
cccagcucugugcuuccuuc

SEQ ID NO: 878561 - RNA, 24 nt, Human
cccaguaacuagcauaggguaccc

SEQ ID NO: 878562 - RNA, 21 nt, Human
ccccaggaucaagagcgaugg

SEQ ID NO: 878563 - RNA, 24 nt, Human
cccccaacacccccaguaacuagc

SEQ ID NO: 878564 - RNA, 23 nt, Human
cccuccacccaagugcauggaua

SEQ ID NO: 878565 - RNA, 21 nt, Human
cccugagccccaucugggcuc

SEQ ID NO: 878566 - RNA, 20 nt, Human
ccgagagaaguuggggaaga

SEQ ID NO: 878567 - RNA, 22 nt, Human
ccuaccccaucccaggccucca

SEQ ID NO: 878568 - RNA, 26 nt, Human
ccuaccccaucccaggccuccaggag

SEQ ID NO: 878569 - RNA, 21 nt, Human
ccuccagcaguggcaaagugu

SEQ ID NO: 878570 - RNA, 18 nt, Human
cggaaccccgugggaucu

SEQ ID NO: 878571 - RNA, 21 nt, Human
cgggagcccugggugacagug

SEQ ID NO: 878572 - RNA, 24 nt, Human
cgugggaucucucuccugucuccc

SEQ ID NO: 878573 - RNA, 21 nt, Human
cuaaagacuucugggccaaca

SEQ ID NO: 878574 - RNA, 20 nt, Human
cucagagucaacaccucucu

SEQ ID NO: 878575 - RNA, 23 nt, Human
cucagcaccagagggggaaaugg

SEQ ID NO: 878576 - RNA, 24 nt, Human
cucagcaccagagggggaaauggg

SEQ ID NO: 878577 - RNA, 20 nt, Human
cuccugucucccccaacacc

SEQ ID NO: 878578 - RNA, 23 nt, Human
cucuccugucucccccaacaccc

SEQ ID NO: 878579 - RNA, 27 nt, Human
cucugcagcuugagaagcaggaaaugg

SEQ ID NO: 878580 - RNA, 22 nt, Human
cucuggaaggauccaggcugcu

SEQ ID NO: 878581 - RNA, 30 nt, Human
cugagaggcaggugcuggugggcuccuggg

SEQ ID NO: 878582 - RNA, 20 nt, Human
cugcagcugggccccaagac

SEQ ID NO: 878583 - RNA, 20 nt, Human
cugcuggacugggcuggggc

SEQ ID NO: 878584 - RNA, 20 nt, Human
cugggcuggggcaagggcuu

SEQ ID NO: 878585 - RNA, 26 nt, Human
cuggggccccaggaucaagagcgaug

SEQ ID NO: 878586 - RNA, 21 nt, Human
cuguagccagagacacagggc

SEQ ID NO: 878587 - RNA, 18 nt, Human
cugugcuuccuuccuggg

SEQ ID NO: 878588 - RNA, 20 nt, Human
cugugcuuccuuccugggug

SEQ ID NO: 878589 - RNA, 21 nt, Human
cuuccugguuggucugcugcu

SEQ ID NO: 878590 - RNA, 19 nt, Human
cuucuagaucacuccuucg

SEQ ID NO: 878591 - RNA, 21 nt, Human
cuugaggcccgggagcccugg

SEQ ID NO: 878592 - RNA, 22 nt, Human
gaaauucacugugaccccaccu

SEQ ID NO: 878593 - RNA, 24 nt, Human
gaaggauccaggcugcuggguccc

SEQ ID NO: 878594 - RNA, 21 nt, Human
gaaugaauaaaugaaugaaca

SEQ ID NO: 878595 - RNA, 20 nt, Human
gacugggcuggggcaagggc

SEQ ID NO: 878596 - RNA, 26 nt, Human
gagacuccccuccacccaaggcacuc

SEQ ID NO: 878597 - RNA, 19 nt, Human
gagauagacagaaggaaca

SEQ ID NO: 878598 - RNA, 22 nt, Human
gagguggggacugcuugaggcc

SEQ ID NO: 878599 - RNA, 19 nt, Human
gagguuccgggugggggug

SEQ ID NO: 878600 - RNA, 20 nt, Human
gcaccaaagccaucugauga

SEQ ID NO: 878601 - RNA, 24 nt, Human
gcacugaaguggggugagaggcca

SEQ ID NO: 878602 - RNA, 19 nt, Human
gcauuccaaagggaguagg

SEQ ID NO: 878603 - RNA, 18 nt, Human
gccaaggucugcugaaug

SEQ ID NO: 878604 - RNA, 20 nt, Human
gcuggggcaagggcuugggg

SEQ ID NO: 878605 - RNA, 22 nt, Human
gcuggguggaggcccccagccu

SEQ ID NO: 878606 - RNA, 20 nt, Human
ggaaagucuccauccaguuc

SEQ ID NO: 878607 - RNA, 20 nt, Human
ggaccuagcccuccacuccu

SEQ ID NO: 878608 - RNA, 18 nt, Human
ggcaccagaagaggccag

SEQ ID NO: 878609 - RNA, 21 nt, Human
ggcagaagauguggagucacc

SEQ ID NO: 878610 - RNA, 18 nt, Human
ggccagugggcuaugugc

SEQ ID NO: 878611 - RNA, 22 nt, Human
gggcagggaguggggagcccuc

SEQ ID NO: 878612 - RNA, 21 nt, Human
ggggaaaugggcugaguccug

SEQ ID NO: 878613 - RNA, 22 nt, Human
ggggagcccucaagcaaagggc

SEQ ID NO: 878614 - RNA, 24 nt, Human
ggggagguuccggguggggguggg

SEQ ID NO: 878615 - RNA, 19 nt, Human
gggucuguuccucaccugg

SEQ ID NO: 878616 - RNA, 23 nt, Human
ggguggaggcccccagccucugc

SEQ ID NO: 878617 - RNA, 19 nt, Human
ggugcagaacucaugcaga

SEQ ID NO: 878618 - RNA, 22 nt, Human
gguggaggcccccagccucugc

SEQ ID NO: 878619 - RNA, 18 nt, Human
ggugggaaugaaaagcuu

SEQ ID NO: 878620 - RNA, 22 nt, Human
gucaagaucucccacuugauuu

SEQ ID NO: 878621 - RNA, 25 nt, Human
uaacuaaagacuucugggccaacag

SEQ ID NO: 878622 - RNA, 21 nt, Human
uaagggguacacaccagcagc

SEQ ID NO: 878623 - RNA, 21 nt, Human
uacacaccagcagcucaguug

SEQ ID NO: 878624 - RNA, 25 nt, Human
uacacaccagcagcucaguugugca

SEQ ID NO: 878625 - RNA, 20 nt, Human
uaccccaucccaggccucca

SEQ ID NO: 878626 - RNA, 21 nt, Human
uagaacacccaaguguacucc

SEQ ID NO: 878627 - RNA, 23 nt, Human
uagaacacccaaguguacucccc

SEQ ID NO: 878628 - RNA, 20 nt, Human
uaugugccaugcaccaaagc

SEQ ID NO: 878629 - RNA, 25 nt, Human
uauuggugggcagggaguggggagc

SEQ ID NO: 878630 - RNA, 19 nt, Human
ucaaggaugguuaguugca

SEQ ID NO: 878631 - RNA, 18 nt, Human
ucaccuggguauuggugg

SEQ ID NO: 878632 - RNA, 18 nt, Human
ucacugugaccccaccuc

SEQ ID NO: 878633 - RNA, 22 nt, Human
ucagggccaggcaaaugcagga

SEQ ID NO: 878634 - RNA, 20 nt, Human
ucccaggaaugaaaaaggcc

SEQ ID NO: 878635 - RNA, 18 nt, Human
ucccaggcacagagacuc

SEQ ID NO: 878636 - RNA, 25 nt, Human
ucccaggccuccaggagggaugcuc

SEQ ID NO: 878637 - RNA, 23 nt, Human
uccccaaagaggucuguauccau

SEQ ID NO: 878638 - RNA, 18 nt, Human
uccccagacacccugcua

SEQ ID NO: 878639 - RNA, 21 nt, Human
ucccccaacacccccaguaac

SEQ ID NO: 878640 - RNA, 18 nt, Human
uccccuccacccaagugc

SEQ ID NO: 878641 - RNA, 21 nt, Human
ucccuggcaugcacccagccc

SEQ ID NO: 878642 - RNA, 20 nt, Human
ucccugggaggccggaaccc

SEQ ID NO: 878643 - RNA, 21 nt, Human
ucccugggaggccggaacccc

SEQ ID NO: 878644 - RNA, 19 nt, Human
uccugggcuggucuugcug

SEQ ID NO: 878645 - RNA, 21 nt, Human
uccuggguggcuuccuuugug

SEQ ID NO: 878646 - RNA, 19 nt, Human
ucucucagagucaacaccu

SEQ ID NO: 878647 - RNA, 18 nt, Human
ucucugcagcuugagaag

SEQ ID NO: 878648 - RNA, 20 nt, Human
ucuggcaggacccagaagau

SEQ ID NO: 878649 - RNA, 22 nt, Human
ugaaggaaaaacuuauuuuaac

SEQ ID NO: 878650 - RNA, 19 nt, Human
ugaaguggggugagaggcc

SEQ ID NO: 878651 - RNA, 22 nt, Human
ugaaugaagagcaauuccaaag

SEQ ID NO: 878652 - RNA, 20 nt, Human
ugaaugagugggugaaugaa

SEQ ID NO: 878653 - RNA, 22 nt, Human
ugaccccaccuccuuucaguau

SEQ ID NO: 878654 - RNA, 18 nt, Human
ugacuccacagaccucca

SEQ ID NO: 878655 - RNA, 21 nt, Human
ugacuccacagaccuccaacc

SEQ ID NO: 878656 - RNA, 22 nt, Human
ugacuccacagaccuccaacca

SEQ ID NO: 878657 - RNA, 23 nt, Human
ugagcaaagagcccgagagaagu

SEQ ID NO: 878658 - RNA, 20 nt, Human
ugaggacccagagcuggggc

SEQ ID NO: 878659 - RNA, 18 nt, Human
ugaggcccgggagcccug

SEQ ID NO: 878660 - RNA, 19 nt, Human
ugcagagccaugaagggca

SEQ ID NO: 878661 - RNA, 25 nt, Human
ugcagaggacucaggggagccucca

SEQ ID NO: 878662 - RNA, 20 nt, Human
ugccaaggucugcugaauga

SEQ ID NO: 878663 - RNA, 25 nt, Human
ugccaaggucugcugaaugaguggg

SEQ ID NO: 878664 - RNA, 19 nt, Human
ugcugccuuuauugcauuc

SEQ ID NO: 878665 - RNA, 20 nt, Human
ugcuggguccuugggagccc

SEQ ID NO: 878666 - RNA, 21 nt, Human
ugcuggguggaggcccccagc

SEQ ID NO: 878667 - RNA, 19 nt, Human
ugcuggugggcuccugggc

SEQ ID NO: 878668 - RNA, 19 nt, Human
ugcuuccuuccuggguggc

SEQ ID NO: 878669 - RNA, 20 nt, Human
uggaaggagaagauacccug

SEQ ID NO: 878670 - RNA, 24 nt, Human
uggagguggggacugcuugaggcc

SEQ ID NO: 878671 - RNA, 21 nt, Human
uggcaaaguguaaacuucaag

SEQ ID NO: 878672 - RNA, 21 nt, Human
uggcaccagaagaggccagug

SEQ ID NO: 878673 - RNA, 23 nt, Human
uggcaccagaagaggccaguggg

SEQ ID NO: 878674 - RNA, 21 nt, Human
uggccacagaaggcugcgacu

SEQ ID NO: 878675 - RNA, 23 nt, Human
uggccacagaaggcugcgacuga

SEQ ID NO: 878676 - RNA, 18 nt, Human
ugggacuacagaaugccc

SEQ ID NO: 878677 - RNA, 20 nt, Human
ugggagagggggaccuugac

SEQ ID NO: 878678 - RNA, 18 nt, Human
ugggaggcugcuugaaag

SEQ ID NO: 878679 - RNA, 19 nt, Human
ugggcuccugggcuggucu

SEQ ID NO: 878680 - RNA, 24 nt, Human
uggggugagaggccagagggucug

SEQ ID NO: 878681 - RNA, 18 nt, Human
uggggugcagaacucaug

SEQ ID NO: 878682 - RNA, 20 nt, Human
uggggugcagaacucaugca

SEQ ID NO: 878683 - RNA, 18 nt, Human
uggguccuugggagccca

SEQ ID NO: 878684 - RNA, 23 nt, Human
uuaacacuucuagaucacuccuu

SEQ ID NO: 878685 - RNA, 18 nt, Human
uuagaugcauguugugaa

SEQ ID NO: 878686 - RNA, 22 nt, Human
uucaagcugcuuccugguuggu

SEQ ID NO: 878687 - RNA, 22 nt, Human
uucaaggagggccuagguugcc

SEQ ID NO: 878688 - RNA, 19 nt, Human
uuccucaccuggguauugg
